(19) United States
(12) Patent Application Publication
(10) Pub. No.: US 2015/0284798 A1
(43) Pub. Date: Oct. 8, 2015

(54) Compositions and Methods for the Diagnosis of Retinal Neovascularization

(71) Applicant: The Schepens Eye Research Institute, Inc., Boston, MA (US)

(72) Inventor: Neena B. Haider, Brookline, MA (US)

(21) Appl. No.: 14/434,989

(22) PCT Filed: Oct. 14, 2013
(86) PCT No.: PCT/US13/64881

§ 371 Date: Apr. 10, 2015

Related U.S. Application Data
(60) Provisional application No. 61/713,402, filed on Oct. 12, 2012.

(51) Int. Cl. C12Q 1/68; C07K 14/79; C12N 9/12; C07K 14/705; C12N 9/48; C07K 14/435

(52) U.S. Cl. CPC C12Q 1/6883; C12N 9/48; C07K 14/435; C12N 9/12; C07K 14/705; C07K 14/79; C12Q 2600/156; C12Y 207/10001; C12Q 2600/158

(57) ABSTRACT

This application discloses compositions and methods for the diagnosis of retinal neovascularization.

### RELATED APPLICATIONS

[0001] This application claims benefit to and priority of U.S. Provisional Application No. 61/713,402, filed on Oct. 12, 2012; the contents of which is hereby incorporated by reference in its entirety.

### FIELD OF THE DISCLOSURE

[0002] The present invention relates to compositions and methods for diagnosing retinal neovascularization.

### BACKGROUND OF THE DISCLOSURE

[0003] Degenerative and vascular proliferative disorders of the retina, including photoreceptor/ganglion cell loss and ocular neovascularization (the most common cause of blindness in all age groups), is associated with retinopathy of prematurity in children, diabetic retinopathy in working age-adults and age-related macular degeneration in the elderly.

[0004] Prior to the invention described herein, the genetic makeup responsible for these diseases was unknown, rendering the identification and treatment of these diseases challenging. Thus, there is a pressing need in the art to identify diagnostic and treatment methods for retinal neovascularization.

### SUMMARY OF THE DISCLOSURE

[0005] The present invention relates to compositions and methods for the diagnosis of retinal vascular disease, e.g., retinal neovascularization. The invention also provides for isolated polynucleotides and corresponding polypeptides utilized to diagnose retinal vascular disease. The subject is preferably a mammal in need of such diagnosis/treatment, e.g., a subject with retinal vascular disease or a predisposition thereto. The mammal is any mammal, e.g., a human, a primate, a mouse, a rat, a dog, a cat, a horse, as well as livestock or animals grown for food consumption, e.g., cattle, sheep, pigs, chickens, and goats. In a preferred embodiment, the mammal is a human.

[0006] A method of diagnosing retinal vascular disease in a subject is carried out by providing a test sample from a subject. For example, the test sample is obtained from a biological fluid selected from the group consisting of blood, vitreous humor, and aqueous humor. The retinal vascular disease is selected from the group consisting of diabetic retinopathy, age related macular degeneration, and retinopathy of prematurity. A genetic mutation associated with a region of human chromosome 3 or mouse chromosome 9 is detected in the subject. The sequence of Homo sapiens chromosome 3 is provided in GenBank Accession No. CM000665.1 (GI: NC_{—}000003.11), incorporated herein by reference. The genetic mutation may be in a gene or regulatory region of a gene located in human chromosome 3 or mouse chromosome 9.

[0007] For example, the genetic mutation comprises a genetic mutation in Kyphoscoliosis peptidase (Ky) or a regulatory region thereof, centrosomal protein 63 (Cep63) or a regulatory region thereof, anaphase promoting complex subunit 13 (Anapc13) or a regulatory region thereof, angiomotin-like 2 (Amotl2) or a regulatory region thereof, Gm5627 or a regulatory region thereof, receptor-like tyrosine kinase (Ryk) or a regulatory region thereof, solute carrier organic anion transporter family or a regulatory region thereof, member 2a1 (Slco2a1) or a regulatory region thereof, member RAS oncogene family (Rab6b) or a regulatory region thereof, signal recognition particle receptor, B subunit (Srprb) or a regulatory region thereof, transferrin (trf) or a regulatory region thereof, 1300017J0RIK or a regulatory region thereof, topoisomerase (DNA) II binding protein 1 (Topbp1) or a regulatory region thereof, or carnitine deficiency-associated gene expressed in ventricle 3 (Cdv3) or a regulatory region thereof. In some embodiments, the genes are regulated by regulatory regions (or sequences) that are located on a different chromosome (i.e., the regulatory region is not located on human chromosome 3 or mouse chromosome 9). In other embodiments, the genes are regulated by regulatory regions (or sequences) that are located on the same chromosome, and at least 500 bp, 1,000 bp, 5,000 bp, 10,000 bp, 15,000 bp, 20,000 bp, 25,000 bp, 50,000 bp, or 100,000 bp from the genes (i.e., the transcription start or termination site) described herein. In some embodiments, the regulatory regions are directly flanking the gene that is being regulated; for example, the regulatory region is directly upstream of the transcription start site or directly downstream of the transcription start site.

[0008] Preferably, the genetic mutation is associated with a region of human chromosome 3. In some cases, the genetic mutation is located in at least one of Ky cDNA provided in GenBank Accession No. BC024014.1 (GI: 21955431) (SEQ ID NO: 15), Cep63 cDNA sequence provided in GenBank Accession No. BC014050.2 (GI:33878420) (SEQ ID NO: 16), Anapc13 cDNA sequence provided in GenBank Accession No. BC005398.1 (GI:13529286) (SEQ ID NO: 17), AmotL2 cDNA sequence provided in GenBank Accession No. BC011454.1 (GI:15079242) (SEQ ID NO: 18), Ryk cDNA sequence provided in GenBank Accession No. NM_{—}001005861 (XM_{—}001130617) (SEQ ID NO: 19), Slco2a1 cDNA sequence provided in GenBank Accession No. BC041140.1 (GI:26996626) (SEQ ID NO: 20), Srprb cDNA sequence provided in GenBank Accession No. BC063001.1 (GI:38649414) (SEQ ID NO: 21), Trf mRNA sequence provided in GenBank Accession No. NM_{—}001063.3 (GI:257196241) (SEQ ID NO: 22), Topbp1 cDNA sequence provided in GenBank Accession No. BC151237.1 (GI:153217452) (SEQ ID NO: 23), Cdv3 cDNA sequence provided in GenBank Accession No. BC007338.2 (GI:33873572) (SEQ ID NO: 24), or Rab6b cDNA sequence provided in GenBank Accession No. BC078662.1 (GI:50927455) (SEQ ID NO: 25), or regulatory regions thereof.

[0009] Preferably, the genetic mutation is associated with a region of human chromosome 3. In some cases, the genetic mutation is located in at least one of Ky DNA provided in GenBank Accession No. NC_{—}000003.11 (GI224589815:c134378285-134311000) (SEQ ID NO: 302), Cep63 DNA sequence provided in GenBank Accession No. NC_{—}000003.11 (GI: 224589815:134191182-134307246) (SEQ ID NO: 303), Anapc13 DNA sequence provided in GenBank Accession No. NC_{—}000003.11 (GI: 224589815:c134206112-134195297) (SEQ ID NO: 304), AmotL2 DNA sequence provided in GenBank Accession No. NC_{—}000003.11 (GI: 1224589815:c134097340-134071166) (SEQ ID NO: 305), Ryk DNA sequence provided in GenBank Accession No. NC_{—}000003.11 (GI 224589815:c133983626-133861936) (SEQ ID NO: 306), Slco2a1 DNA sequence provided in GenBank Accession No. NC_{—}000003.11 (GI: 224589815:c133763526-133636932) (SEQ ID NO: 307), Srprb DNA sequence provided in GenBank Accession No. NC_{—}000003.11 (GI: 224589815:133497257-133545954) (SEQ ID NO: 308), Trf DNAsequence provided in GenBank Accession No. NC_{—}000003.11 (GI: 224589820:73915262-73965820) (SEQ ID NO: 309), Topbp1 DNA sequence provided in GenBank Accession No. NC_{—}000003.11 (GI: 224589815:c133389958-133310251) (SEQ ID NO: 310), Cdv3 DNA sequence provided in GenBank Accession No. NC_{—}000003.11 (GI: 224589815:133289930-133311620) (SEQ ID NO: 311), or Rab6b DNA sequence provided in GenBank Accession No. NC_{—}000003.11 (GI: 224589815:c133625432-133532336) (SEQ ID NO: 312), or regulatory regions thereof.

[0010] Alternatively, the genetic mutation is associated with a 1.0 Mb region of mouse chromosome 9 between the position 102,450,352 and 103,338,569 (i.e., SEQ ID NO: 14) as stated on mouse genome GRCm38.p1, including at least 50 Kb (kilobases) flanking said region, or the corresponding human sequence thereof. Also provided herein is the genetic mutation associated with human chromosome 3 between the position 132,757,235 and 134,370,478, including 50,000 base pairs flanking said region. For example, the genetic mutation is located in at least one of SEQ ID NOs: 1-13, or the corresponding human sequence thereof, for example SEQ ID NOs: 15-25 or SEQ ID NOs: 302-312.

[0011] As described herein, “corresponding sequence” refers to homologous sequences, such as homologous sequences found in a different species. Identification of homologous sequences is based on the similarity of the sequence, chromosomal synteny, or both. The term homology is used to indicate a likeness of structure and conservation of biological function. Calculations of nucleic acid or amino acid sequence identity provide a convenient method of identifying corresponding, homologous, or related genes, herein “homologs”. Such homologs may be members of a gene family or multiple genomic sequences present in the same genome, or may be corresponding genes or genomic sequences from different species (i.e., mouse and human). Chromosomal synteny may be used to further distinguish between homologous genes when there is sufficient evolutionary conservation between homologous genes when there is sufficient evolutionary conservation between the genomes that are being compared (i.e., between mammalian species). A “syntenic homolog” has both sequence identity to the reference gene, and has the corresponding chromosomal location in relation to the closely linked gene. Syntenic homologs have a high probability of sharing spatial and temporal localization of gene expression, and of encoding proteins that fill equivalent roles.

[0012] Homologous sequences can have substantial sequence similarity, i.e., homologous sequences between mouse and human. For example, homologous sequences may be at least 50%, at least 60%, at least 65%, at least 70%, at least 75%, at least 80%, at least 85%, at least 90%, at least 91%, at least 92%, at least 93%, at least 94%, at least 95%, at least 96%, at least 97%, at least 98%, or at least 99% sequence identity with the nucleotide or amino acid sequence with the subject sequence. The sequences, or fragments thereof, with genetic mutations that can be used for diagnosing a retinal vascular disease are preferably about 50%, about 55%, about 60%, about 65%, about 70%, about 75%, about 80%, about 85%, about 90%, about 91%, about 92%, about 93%, about 94%, about 95%, about 96%, about 97%, about 98%, about 99% identical to the sequences provided herein; and any range derivable therein, such as, for example, from about 70% to about 80%, and more preferably from about 81% to about 90%; or even more preferably, from about 91% to about 99% identity. Algorithms for sequence analysis are known in the art, such as BLAST, described in Altschul et al. (1990) J Mol Diol 215:403-10. Other methods for sequence analysis include pairwise alignment by dot-matrix methods, or structural alignment by distance matrix alignment or sequential structure alignment program (SSAP).

[0013] The genetic mutation detected is a point mutation, or a single base substitution where a single base nucleotide is replaced with a different nucleotide. In some embodiments, the genetic mutation is a transversion from adenine (A) to thymine (T), or thymine (T) to adenine (A). In other embodiments, the genetic mutation is A or T to G or C. The mutation can be a missense, nonsense, or splice mutation. Other mutations include additions, deletions, or chromosomal arrangements.

[0014] Any of the genetic mutations described herein can result in a in a gain-of-function mutation or a loss-of-function mutation in the gene. In a gain-of-function mutation, the gene product, or polypeptide encoded from the nucleic acid with the genetic mutation, gains a new and abnormal function. Gain-of-function mutations can be determined by assessing polypeptide activity. In a loss-of-function mutation, there may be no gene product or encoded polypeptide, or the encoded polypeptide has less or no function.

[0015] Also provided are methods of detecting a genetic mutation associated with a region of human chromosome 3 or mouse chromosome 9 in a subject. The region of human chromosome 3 or mouse chromosome 9 includes the genes described herein, and the regulatory regions thereof. In some embodiments, nucleic acids or polypeptides are isolated from a sample from the subject for detection of the genetic mutation. The nucleic acid may be DNA or RNA. Methods for isolating DNA and/or RNA are well-known in the art. Polypeptides can be isolated using any suitable method known in the art. The detection of the mutation is performed by nucleic acid detection techniques known in the art, such as amplification based techniques, real-time PCR, Northern blotting, microarray, PCR-based sequencing, Sanger sequencing, or next-generation sequencing. Alternatively, the polypeptides encoded by the nucleic acids described herein are isolated by methods known in the art. For example, polypeptides are typically detected by contacting a sample with an antibody or other specifically binding reagent in an immunoassay, such as ELISA or western blotting. The presence or absence of a genetic mutation associated with a region of human chromosome 3 or mouse chromosome 9 in a subject is useful for diagnosing retinal vascular disease. The presence of the genetic mutation in a subject indicates the presence or increased risk or predisposition for developing the retinal vascular disease. The absence of the genetic mutation in a subject indicates the absence or reduced risk or predisposition for developing the retinal vascular disease.

[0016] Also provided herein are methods for selecting a therapeutic regimen for a subject. The presence of a genetic mutation associated with a region of human chromosome 3 or mouse chromosome 9 in a subject, or a gene associated with the region as described herein, indicates that the subject should receive a therapeutic regimen comprising, for example, an anti-vascularization agent, an anti-angiogenesis agent, anti-inflammatory agent, or surgical procedures including but not limited to panretinal photocoagulation, laser photocoagulation, vitrectomy, scleral buckling, or peripheral retinal ablation.

[0017] Also provided is an isolated polynucleotide comprising the nucleic acid sequence set forth in SEQ ID NO: 1, SEQ ID NO: 2, SEQ ID NO: 3, SEQ ID NO: 4, SEQ ID NO: 5, SEQ ID NO: 6, SEQ ID NO: 7, SEQ ID NO: 8, SEQ ID NO: 9, SEQ ID NO: 10, SEQ ID NO: 11, SEQ ID NO: 12, SEQ ID NO: 13, or SEQ ID NO: 14. Also provided is an isolated polynucleotide comprising the nucleic acid sequence set forth in SEQ ID NO: 15, SEQ ID NO: 16, SEQ ID NO: 17, SEQ ID NO: 18, SEQ ID NO: 19, SEQ ID NO: 20, SEQ ID NO: 21, SEQ ID NO: 22, SEQ ID NO: 23, SEQ ID NO: 24, SEQ ID NO: 25, SEQ ID NO: 302, SEQ ID NO: 303, SEQ ID NO: 304, SEQ ID NO: 305, SEQ ID NO: 306, SEQ ID NO: 307, SEQ ID NO: 308, SEQ ID NO: 309, SEQ ID NO: 310, SEQ ID NO: 311, or SEQ ID NO: 312. Also provided are isolated polynucleotides comprising the nucleic acid sequences at least 50%, at least 60%, at least 65%, at least 70%, at least 75%, at least 80%, at least 85%, at least 90%, at least 91%, at least 92%, at least 93%, at least 94%, at least 95%, at least 96%, at least 97%, at least 98%, or at least 99% identical to SEQ ID NO: 1, SEQ ID NO: 2, SEQ ID NO: 3, SEQ ID NO: 4, SEQ ID NO: 5, SEQ ID NO: 6, SEQ ID NO: 7, SEQ ID NO: 8, SEQ ID NO: 9, SEQ ID NO: 10, SEQ ID NO: 11, SEQ ID NO: 12, SEQ ID NO: 13, SEQ ID NO: 14, SEQ ID NO: 15, SEQ ID NO: 16, SEQ ID NO: 17, SEQ ID NO: 18, SEQ ID NO: 19, SEQ ID NO: 20, SEQ ID NO: 21, SEQ ID NO: 22, SEQ ID NO: 23, SEQ ID NO: 24, SEQ ID NO: 25, SEQ ID NO: 302, SEQ ID NO: 303, SEQ ID NO: 304, SEQ ID NO: 305, SEQ ID NO: 306, SEQ ID NO: 307, SEQ ID NO: 308, SEQ ID NO: 309, SEQ ID NO: 310, SEQ ID NO: 311, or SEQ ID NO: 312. In some cases, the polynucleotide comprises a complementary deoxyribonucleic acid (cDNA) sequence or a messenger ribonucleic acid (mRNA) sequence.

[0018] Isolated polypeptides comprise an amino acid sequence encoded by the isolated polynucleotide of SEQ ID NO: 1, SEQ ID NO: 2, SEQ ID NO: 3, SEQ ID NO: 4, SEQ ID NO: 5, SEQ ID NO: 6, SEQ ID NO: 7, SEQ ID NO: 8, SEQ ID NO: 9, SEQ ID NO: 10, SEQ ID NO: 11, SEQ ID NO: 12, SEQ ID NO: 13, SEQ ID NO: 14, SEQ ID NO: 15, SEQ ID NO: 16, SEQ ID NO: 17, SEQ ID NO: 18, SEQ ID NO: 19, SEQ ID NO: 20, SEQ ID NO: 21, SEQ ID NO: 22, SEQ ID NO: 23, SEQ ID NO: 24, SEQ ID NO: 25, SEQ ID NO: 302, SEQ ID NO: 303, SEQ ID NO: 304, SEQ ID NO: 305, SEQ ID NO: 306, SEQ ID NO: 307, SEQ ID NO: 308, SEQ ID NO: 309, SEQ ID NO: 310, SEQ ID NO: 311, or SEQ ID NO: 312.

[0019] An isolated polynucleotide comprising a functional region of SEQ ID NO: 14 or a fragment thereof is also provided.

[0020] The sequences of various regions of mouse chromosome 9 are provided herein. However, the invention also comprises polypeptides and nucleic acid fragments, so long as they exhibit the desired biological activity (i.e., result in the retinal vascularization phenotype) of the full length polypeptides and nucleic acid, respectively. A nucleic acid fragment of almost any length is employed. For example, illustrative polynucleotide segments with total lengths of about 10,000, about 5000, about 3000, about 2,000, about 1,000, about 500, about 200, about 100, about 50 base pairs in length (including all intermediate lengths) are included in many implementations of this invention. Similarly, a polypeptide fragment of almost any length is employed. For example, illustrative polypeptide segments with total lengths of about 10,000, about 5,000, about 3,000, about 2,000, about 1,000, about 5,000, about 1,000, about 500, about 200, about 100, or about 50 amino acids in length (including all intermediate lengths) are included in many implementations of this invention.

[0021] Polynucleotides, polypeptides, antibodies, or other agents are purified and/or isolated. Specifically, as used herein, an “isolated” or “purified” nucleic acid molecule, polynucleotide, polypeptide, or protein, is substantially free of other cellular material, or culture medium when produced by recombinant techniques, or chemical precursors or other chemicals when chemically synthesized. Purified compounds are at least 60% by weight (dry weight) the compound of interest. Preferably, the preparation is at least 75%, more preferably at least 90%, and most preferably at least 99%, by weight the compound of interest. For example, a purified compound is one that is at least 90%, 91%, 92%, 93%, 94%, 95%, 98%, 99%, or 100% (w/w) of the desired compound by weight. Purity is measured by any appropriate standard method, for example, by column chromatography, thin layer chromatography, or high-performance liquid chromatography (HPLC) analysis. A purified or isolated polynucleotide (ribonucleic acid (RNA) or deoxyribonucleic acid (DNA)) is free of the genes or sequences that flank it in its naturally-occurring state. A purified or isolated polypeptide is free of the amino acids or sequences that flank it in its naturally-occurring state. Purified also defines a degree of sterility that is safe for administration to a human subject, e.g., lacking infectious or toxic agents.

[0022] Similarly, by “substantially pure” is meant a nucleotide or polypeptide that has been separated from the components that naturally accompany it. Typically, the nucleotides and polypeptides are substantially pure when they are at least 60%, 70%, 80%, 90%, 95%, or even 99%, by weight, free from the proteins and naturally-occurring organic molecules with they are naturally associated.

[0023] “Conservatively modified variations” of a particular polynucleotide sequence refers to those polynucleotides that encode identical or essentially identical amino acid sequences, or where the polynucleotide does not encode an amino acid sequence, to essentially identical sequences. Because of the degeneracy of the genetic code, a large number of functionally identical nucleic acids encode any given polypeptide. For instance, the codons CGU, CGC, CGA, CGG, AGA, and AGG all encode the amino acid arginine. Thus, at every position where an arginine is specified by a codon, the codon can be altered to any of the corresponding codons described without altering the encoded polypeptide. Such nucleic acid variations are “silent substitutions” or “silent variations,” which are one species of “conservatively modified variations.” Every polynucleotide sequence described herein which encodes a polypeptide also describes every possible silent variation, except where otherwise noted. Thus, silent substitutions are an implied feature of every nucleic acid sequence which encodes an amino acid. One of skill will recognize that each codon in a nucleic acid (except AUG, which is ordinarily the only codon for methionine) can be modified to yield a functionally identical molecule by standard techniques.

[0024] Similarly, “conservative amino acid substitutions,” in one or a few amino acids in an amino acid sequence are substituted with different amino acids with highly similar properties are also readily identified as being highly similar to a particular amino acid sequence, or to a particular nucleic acid sequence which encodes an amino acid. Such conservatively substituted variations of any particular sequence are a feature of the present invention. Individual substitutions, deletions or additions which alter, add or delete a single amino acid or a small percentage of amino acids (typically less than 5%, more typically less than 1%) in an encoded sequence are “conservatively modified variations” where the alterations result in the substitution of an amino acid with a chemically similar amino acid. Conservative substitution tables providing functionally similar amino acids are well known in the art. See, e.g., Creighton (1984) Proteins, W.H. Freeman and Company, incorporated herein by reference.

[0025] By “isolated nucleic acid” is meant a nucleic acid that is free of the genes which flank it in the naturally-occurring genome of the organism from which the nucleic acid is derived. The term covers, for example: (a) a DNA which is part of a naturally occurring genomic DNA molecule, but is not flanked by both of the nucleic acid sequences that flank that part of the molecule in the genome of the organism in which it naturally occurs; (b) a nucleic acid incorporated into a vector or into the genomic DNA of a prokaryote or eukaryote in a manner, such that the resulting molecule is not identical to any naturally occurring vector or genomic DNA; (c) a separate molecule such as a cDNA, a genomic fragment, a fragment produced by polymerase chain reaction (PCR), or a restriction fragment; and (d) a recombinant nucleotide sequence that is part of a hybrid gene, i.e., a gene encoding a fusion protein. Isolated nucleic acid molecules according to the present invention further include molecules produced synthetically, as well as any nucleic acids that have been altered chemically and/or that have modified backbones. For example, the isolated nucleic acid is a purified cDNA or RNA polynucleotide.

[0026] Although the phrase “nucleic acid molecule” primarily refers to the physical nucleic acid and the phrase “nucleic acid sequence” refers to the linear list of nucleotides of the nucleic acid molecule, the two phrases can be used interchangeably.

[0027] The transitional term “comprising,” which is synonymous with “including,” “containing,” or “characterized by,” is inclusive or open-ended and does not exclude additional, unrecited elements or method steps. By contrast, the transitional phrase “consisting of” excludes any element, step, or ingredient not specified in the claim. The transitional phrase “consisting essentially of” limits the scope of a claim to the specified materials or steps “and those that do not materially affect the basic and novel characteristic(s)” of the claimed invention.

[0028] Other features and advantages of the invention will be apparent from the following description of the preferred embodiments thereof, and from the claims. Unless otherwise defined, all technical and scientific terms used herein have the same meaning as commonly understood by one of ordinary skill in the art to which this invention belongs. Although methods and materials similar or equivalent to those described herein can be used in the practice or testing of the present invention, suitable methods and materials are described below. All published foreign patents and patent applications cited herein are incorporated herein by reference. Genbank and NCBI submissions indicated by accession number cited herein are incorporated herein by reference. All other published references, documents, manuscripts and scientific literature cited herein are incorporated herein by reference. In the case of conflict, the present specification, including definitions, will control. In addition, the materials, methods, and examples are illustrative only and not intended to be limiting.

### BRIEF DESCRIPTION OF THE DRAWINGS

[0029] FIG. 1 is a schematic of cellular components and molecular cascades during formation of the retinal superficial vascular plexus.

[0030] FIG. 2 is a series of images showing clinical phenotype of Nrv1 retinas depicts cotton-wool spotting and larger, tortuous blood vessels. Top panels: Fundus photos of wild-type (Nrv1+/+, left) and affected (Nrv1+/−, right) retina at postnatal day 30 illustrating abnormal blood vessels (middle panel on the top) and cotton-wool spotting (right panel on the right). Bottom Panels: fluoroangiography of wild-type (Nrv1+/+, left) and affected (Nrv1+/−, right) retina at postnatal day 30 illustrating tortuous and larger blood vessels in the retina (middle panel on the bottom) and abnormal vessels protruding in the vitreous (right panel on the right).

[0031] FIG. 3 is a series of images showing that the Nrv1 retina exhibits tortuous vessels Immunofluorescence analysis on flat-mount retinas from wild-type (Nrv1+/+, left) and affected (Nrv1+/−, right) mice with an antibody against alpha-smooth muscle actin (red), a marker for major blood vessels. The analysis shows the tortuosity of blood vessels in the affected retina when compared to wild-type retina.

[0032] FIG. 4 is a series of images depicting that the Nrv1 model shows neovascularization into the vitreous. Hematoxylin and eosin stained retinal sections from wild-type (Nrv1+/+, left) and affected (Nrv1+/−, right) mice showing abnormal blood vessels protruding from the retina into the vitreous in the affected animals.

[0033] FIG. 5 is a series of images showing that neovascularization in Nrv1 mouse comes out from the retina at p10 while the hyaloid vasculature regresses normally. FIG. 5A and FIG. 5B provide alternate views. Histological analysis performed at different postnatal time points (p8, p10, p14, p21) on wild-type (Nrv1+/+, left) and affected (Nrv1+/−, right) retina sections showing the regression of the hyaloid vasculature (markes by asterisks) in both wild-type and affected and the abnormal protrusion of retinal vessels into the vitreous starting from p10 (marked by arrows).

[0034] FIG. 6 is a series of images showing new blood vessels in the vitreous are surrounded by astrocytes Immunofluorescence analysis on flat-mount retinas from 30 days old wild-type (Nrv1+/+, left) and affected (Nrv1+/−, right) mice with antibodies against GFAP (a marker for astrocytes, in red), COLIV (a marker for blood vessels, in green) and pan-laminin (a marker for the basement membranes, in pink). The analysis shows in the affected animals the presence of astrocytes around the blood vessel in the vitreous.

[0035] FIG. 7 is a series of images showing new blood vessels in the vitreous are surrounded by astrocytes Immunofluorescence analysis on flat-mount retinas from 30 days old affected (Nrv1+/−) mice with antibodies against GFAP (a marker for astrocytes, in red), and pan-laminin (a marker for the basement membranes, in pink). The analysis shows the presence of astrocytes around the blood vessel in the vitreous (marked by the arrow).

[0036] FIG. 8 is a series of images showing that astrocytes guide aberrant vessels into the vitreous Immunofluorescence analysis at different postnatal time points (p4, p6, p8, p10) on wild-type (Nrv1+/+, left) and affected (Nrv1+/−, right) retina sections with antibodies against GFAP (a marker for astrocytes, in red) and COLIV (a marker for blood vessels, in green). The analysis shows the presence of astrocytes (orange arrows) around the blood vessels in the primary plexus of both normal and affected mice and their abnormal presence in the vitreous of affected animals starting from p4. Nuclei are shown in blue.

[0037] FIG. 9 is a series of images showing that disorganization of astrocyte network leads to abnormal vascular topography Immunofluorescence analysis on flat-mount retinas from wild-type (Nrv1+/+, left) and affected (Nrv1+/−, right) mice with antibodies against GFAP (a marker for astrocytes, in red) and COLIV (a marker for blood vessels, in green) showing the disruption of organization of astrocytes network and abnormal vascular topography in the affected mice.

[0038] FIG. 10 is a series of images showing that astrocyte topography is disorganized in the Nrv1 mouse. Confocal analysis on flat mount retinas from wild-type (Nrv1+/+, left) and affected (Nrv1+/−, right) mice analyzes as in FIG. 8 showing the disruption of organization and topography of astrocytes in affected mice.

[0039] FIG. 11 is a series of images showing that vascular density appear to be reduced in Nrv1 mutant retina. Movie showing the three layers of the retinal vasculature. The movie was recorded with a confocal microscope on flat mount retinas from wild-type (Nrv1+/+, left) and affected (Nrv1+/−, right) mice stained with antibodies against GFAP (a marker for astrocytes, in red) and COLIV (a marker for blood vessels, in green). The movie shows a reduction of vascular density in the deeper layers.

[0040] FIG. 12 is a schematic depicting genome-wide scan—the backcrossing strategy. Schematic representation of the backcrossing stategy used to generate recombinant for linkage analysis. A cross of C57BL/6J×CastEi/J was established to generate F1/N 1. Affected offspring were backcrossed to CastEi/J to generate recombinant N2 pups. Disease associated alleles are shown in red, non-disease associated alleles are shown in yellow.

[0041] FIG. 13 shows that genome-wide scan maps the retinal defects to Chromosome 9. Genome-wide scan was performed on pooled DNA samples by using 69SSLP markers. Markers were analyzed by electrophoresis. The Marker D9Mit346 (left panel) was linked to the disease showing heterozygosity for the affected samples and homozygosity for the non-diseased-associated CastEi/J allele in the unaffected samples. Marker D10Mit16 (right panel), as well as all the others, was unlinked showing heterozigosity for both affected and unaffected samples. Nrv1+/+: unaffected mice; Nrv1−/+ affected mice.

[0042] FIG. 14 is a schematic depicting that genetic finemapping narrows Nrv1 interval to 1.0 Mb. On the left, the physical map of chromosome 9 is shown with the genetic markers used for finemapping. Flanking markers are shown in red. On the right, all of the recombinants that help refine the Nrv1 interval are shown. Mapped recombinant events are depicted as colored chromosomes. The diseased-associated C57BL/6J chromosome carrying the Nrv1 mutation is shown in red while non-diseased associated CastEi/J chromosome is shown in black. The mouse identification number and its phenotype are given. Aff: affected.

[0043] FIG. 15 is next generation sequencing data used to identify the mutated gene into the 1.0 Mb.

### DETAILED DESCRIPTION OF THE INVENTION

[0044] Retinal vascular disease is a hallmark of many blinding disorders such as diabetic retinopathy (DR) (affects millions worldwide), age related macular degeneration (AMD) (affects 1 in 3 people over the age of 65) and childhood diseases such as retinopathy of prematurity (ROP). These diseases cause the formation of extra blood vessels and lead to debilitating vision loss and eventually blindness.

[0045] The present invention provides compositions and methods for diagnosing, treating and/or preventing ophthalmic or ocular disorders, diseases or conditions, such as retinal vascular disease. The subject is preferably a mammal in need of such treatment, e.g., a subject with diabetic retinopathy or a predisposition thereto. The mammal is any mammal, e.g., a human, a primate, a mouse, a rat, a dog, a cat, a horse, as well as livestock or animals grown for food consumption, e.g., cattle, sheep, pigs, chickens, and goats. In a preferred embodiment, the mammal is a human. The terms “ophthalmic” and “ocular” are used interchangeably herein.

[0046] Specifically, the invention described herein characterizes a genetic mouse model that recapitulates the retinal vascular phenotype observed in diabetic retinopathy patients. This mouse strain, NMF128, carries a chemically (ENU)-induced mutation with a semi-dominant mode of inheritance. NMF128 was generated by ENU-induced mutagenesis at The Jackson Laboratory Neuroscience Mutagenesis Facility. The phenotype is characterized by early-onset retinal neovascularization and protusion of retinal vessels onto the vitreous body, a typically avascular portion of the eye. As described herein, the abnormal vitreal vessels exhibit tortuosity, a clinical indicator for abnormal vasculature, and originate from the retinal vasculature. In addition, the abnormal vitreal vessels in NMF128 eyes express a retinal neovascularization agent, vascular endothelial growth factor (VEGF), long after normal retinal vasculature development is complete. The mouse model described herein is a valuable tool for the study of pathology, progression and the genetic networks that are perturbed in retinal neovascularization diseases.

### Retina Structure

[0047] The vertebrate retina is a light sensitive tissue lining the inner surface of the eye. The optics of the eye create an image of the visual world on the retina, which serves much the same function as the film in a camera. Light striking the retina initiates a cascade of chemical and electrical events that ultimately trigger nerve impulses. These are sent to various visual centers of the brain through the fibers of the optic nerve. A number of changes can occur in the retina with age. For example, atherosclerotic buildup and leakage in the retinal arteries can lead to macular degeneration as well as reduction of peripheral vision. Rods and cones of the retina can become less sensitive over time, as they replenish their pigments more slowly. Progressively, all these effects can reduce vision, ultimately leading to partial or complete blindness. Retinal diseases such as age-related macular degeneration are difficult to treat, and current retinal treatments include invasive laser surgery to stop the leaking of blood vessels in the eye.

### Retina Pathology

[0048] Retinal diseases include proliferative diabetic retinopathy, age-related macular degeneration (AMD), retinopathy of prematurity, and retinal branch vein occlusion. Diabetic retinopathy (DR) remains the most common cause of vision impairment in working-age adults in the United States and Europe, and retinal neovascularization occurs in up to 20% of patients with diabetes. Pathological retinal neovascularization in patients with diabetes results from an imbalance of pro-angiogenic and anti-angiogenic factors. In addition to VEGF accumulation in eyes with diabetic retinal neovascularization, changes in numerous other cytokines, chemokines, adhesion molecules, vasoactive hormones and immune cells have been reported. Together, these changes constitute a complex inflammatory process that results in an aberrant wound-healing response. All retinal cell types, including neurons, glial, microglial and vascular cells, are believed to be affected by diabetes, resulting in a neurovascular disorder. The retinal neurovascular degeneration of diabetes includes neuronal and vascular cell apoptosis, and microglial and glial cell activation, which provides intraretinal sources of cytokines and chemokines (Gariano & Gardner, Nature 438, 960-966, 2005).

[0049] Clinically, diabetic retinopathy (DR) is classified into two stages: non-proliferative DR (NPDR) and proliferative DR (PDR). In NPDR, VEGF-A (which is known to act as a survival factor for endothelial cells, via induction of anti-apoptotic proteins) expression in elevated levels has been described in human and in experimental models of DR. VEGFRs are also upregulated in NPDR. VEGF-A may be increased initially in preclinical DR as a mechanism to maintain the integrity of the retinal vascular bed. In a later stage, high VEGF-A production in ischemic areas, where VEGFR-2 is upregulated, then leads to vascular leakage and neovascularization. In proliferative DR (PDR), intra-ocular neovascularization is likely caused by high levels of VEGF-A in the vitreous derived from widespread production of this factor by ischemic retina. Elevated levels of VEGF-A have been found in the aqueous humor and vitreous of patients with PDR (Witmer et al., Prog Ret Eye Res 22, 1-29, 2003).

[0050] Angiogenesis, the formation of new blood vessels from preexisting vasculature, is a major component in several retinal vascular diseases causing blindness, such as retinopathy of prematurity, proliferative diabetic retinopathy, and age-related macular degeneration described above. Diabetes mellitus is the main cause of new cases of adult blindness. Nearly all individuals with type 1 diabetes show some symptoms of diabetic retinopathy, usually ˜20 years after clinical recognition of diabetes; in the most advanced form of diabetic retinopathy, called proliferative diabetic retinopathy, new blood vessels grow uncontrollably on the retinal inner surface, causing hemorrhages and even retinal detachment. Surgical and laser photocoagulation treatments are only partially effective and may further damage the retinal tissue.

[0051] Prior to the invention described herein, the genetic makeup responsible for these diseases was unknown, rendering the identification and treatment of these diseases challenging. Accordingly, the invention is based on the characterization of the genetic model that recapitulates retinal vascular disease in humans.

### Detection of Genetic Mutations

[0052] Also provided herein are methods for detecting genetic mutations associated with the 1.0 Mb region identified herein. Nucleic acids or polypeptides are isolated or extracted from the sample using standard molecular biology techniques. The genetic mutations are then detected from the isolated nucleic acids and/or polypeptides as described below.

[0053] Detection of the genetic mutations described herein is performed preferably by techniques known in the art. In one embodiment DNA sequencing reactions using polymerase chain reaction (PCR) are used to screen the sequences described herein in a sample from a subject. Methods for nucleotide sequencing of genetic or other biological material are known in the art.

[0054] The isolated nucleic acid sequences are optionally amplified before being sequenced. The term “amplified” defines the process of making multiple copies of the nucleic acid from a single or lower copy number of nucleic acid sequence molecule. The amplification of nucleic acid sequences is carried out in vitro by biochemical processes known to those of skill in the art such as PCR or by cloning and expansion.

[0055] One process of in vitro amplification, which is used according to this invention, is the polymerase chain reaction (PCR) illustratively described in U.S. Pat. Nos. 4,683,202 and 4,683,195 the contents of which are incorporated herein by reference. The term “polymerase chain reaction” refers to a process for amplifying a DNA base sequence using a heat-stable DNA polymerase and two oligonucleotide primers, one complementary to the (+)-strand at one end of the sequence to be amplified and the other complementary to the (−)-strand at the other end. Because the newly synthesized DNA strands subsequently serve as additional templates for the same primer sequences, successive rounds of primer annealing, strand elongation, and dissociation produce rapid and highly specific amplification of the desired sequence. Many polymerase chain processes are known to those of skill in the art and are operable in the process of the invention. For example, DNA is subjected to 30 to 35 cycles of amplification in a thermocycler as follows: 95° C. for 30 sec, 52 to 60° C. for 1 min, and 72° C. for 1 min, with a final extension step of 72° C. for 5 min. For another example, DNA is subjected to 35 polymerase chain reaction cycles in a thermocycler at a denaturing temperature of 95° C. for 30 sec, followed by varying annealing temperatures ranging from 54 to 58° C. for 1 min, an extension step at 70° C. for 1 min, with a final extension step at 70° C. for 5 min. The parameters of PCR cycling times and number of steps are dependent on the primer pair, their melting temperature, and other considerations known to those of skill in the art. It is appreciated that optimizing PCR parameters for various primer and/or probe sets is well within the skill of the art and is performed as mere routine optimization.

[0056] The amplification agent for PCR is optionally any compound or system that will function to accomplish the synthesis of primer extension products, including enzymes. Suitable enzymes for this purpose include, for example, E. coli DNA polymerase I, Taq polymerase, Klenow fragment of E. coli DNA polymerase I, T4 DNA polymerase, AmpliTaq Gold DNA Polymerase from Applied Biosystems, other available DNA polymerases, reverse transcriptase (preferably iScript RNase H+ reverse transcriptase), ligase, and other enzymes, including heat-stable enzymes (i.e., those enzymes that perform primer extension after being subjected to temperatures sufficiently elevated to cause denaturation). In a preferred embodiment, the enzyme is hot-start iTaq DNA polymerase from Bio-rad (Hercules, Calif). Materials including enzymes operable to amplify target genes are optionally contained in a kit such as the Herculase PCR master mix (Stratagene, La Jolla, Calif.). Suitable enzymes will facilitate combination of the nucleotides in the proper manner to form the primer extension products that are complementary to each mutant nucleotide strand. Generally, synthesis is initiated at the 3′-end of each primer and proceed in the 5′-direction along the template strand, until synthesis terminates, producing molecules of different lengths. There are optionally amplification agents, however, that initiate synthesis at the 5′-end and proceed in the other direction, using the same process as described above. In any event, the process of the invention is not to be limited to the embodiments of amplification described herein.

[0057] The primers for use in amplifying the nucleic acid sequences of Fzd-4 are optionally prepared using any suitable process, such as conventional phosphotriester and phosphodiester processes or automated embodiments thereof so long as the primers are capable of hybridizing to the nucleic acid sequences of interest. One process for synthesizing oligonucleotides on a modified solid support is described in U.S. Pat. No. 4,458,066, the contents of which are incorporated herein by reference. The exact length of primer will depend on many factors, including temperature, buffer, and nucleotide composition. The primer generally should prime the synthesis of extension products in the presence of the inducing agent for amplification.

[0058] Design of primers for specific amplification of the genes or sequences described herein is similarly performed by methods known in the art. Preferably, primers are designed to flank a mutational site of interest. Preferably, the primers are complementary to genetic sequences described herein. It is appreciated that the complement of the aforementioned primer and probe sequences are similarly suitable for use in the instant invention. It is further appreciated that oligonucleotide sequences that hybridize with the inventive primer and probes are also similarly suitable. Any of the primers and/or probes comprising SEQ ID NOS: 26-301 can be used in the present invention. Examples of suitable primers and/or probes can be found in Table 1.

[0059] Standard considerations of primer designs are taken into account when designing primers such as melting temperature, primer length, GC content, propensity to form secondary structure, identity of end nucleotides, and others known in the art. It is appreciated that modifications of primers of SEQ ID NOs: 26-301 are similarly operable.

[0060] Those of ordinary skill in the art will know of various amplification processes that are also used to increase the copy number of target nucleic acid sequence. The nucleic acid sequences detected in the process of the invention are optionally further evaluated, detected, cloned, sequenced, and the like, either in solution or after binding to a solid support, by any process usually applied to the detection of a specific nucleic acid sequence such as another polymerase chain reaction, oligomer restriction (Saiki et al., BioTechnology 3:1008 1012 (1985)), allele-specific oligonucleotide (ASO) probe analysis (Conner et al., PNAS 80: 278 (1983)), oligonucleotide ligation assays (OLAs) (Landegren et al., Science 241:10′77 (1988)), RNase Protection Assay and the like. Molecular techniques for DNA analysis have been reviewed (Landegren et al., Science 242:229 237 (1988)). Following DNA amplification, the reaction product is optionally detected by Southern blot analysis, with or without using radioactive probes. In such a process, for example, a small sample of DNA containing the nucleic acid sequence obtained from the tissue or subject is amplified, and analyzed via a Southern blotting technique. The use of non-radioactive probes or labels is facilitated by the high level of the amplified signal. In one embodiment of the invention, one nucleoside triphosphate is radioactively labeled, thereby allowing direct visualization of the amplification product by autoradiography. In another embodiment, amplification primers are fluorescently labeled and run through an electrophoresis system. Visualization of amplified products is by laser detection followed by computer assisted graphic display, without a, radioactive signal.

[0061] Other methods of detecting amplified oligonucleotide illustratively include gel electrophoresis, mass spectrometry, liquid chromatography, fluorescence, luminescence, gel mobility shift assay, fluorescence resonance energy transfer, nucleotide sequencing, enzyme-linked immunoadsorbent assay, affinity chromatography, chromatography, immunoenzymatic methods (Ortiz, A and Ritter, E, Nucleic Acids Res., 1996; 24:3280-3281), streptavidin-conjugated enzymes, DNA branch migration (Lishanski, A, et al., Nucleic Acids Res., 2000; 28(9):e42), enzyme digestion (U.S. Pat. No. 5,580,730), colorimetric methods (Lee, K., Biotechnology Letters, 2003: 25:1739-1742), or combinations thereof.

[0062] In one embodiment real-time PCR (RT-PCR) is used to detect the presence or absence of a mutation. Methods of RT-PCR are known in the art such as that used in the TaqMan system. Illustratively, a probe complementary to the mutation of interest is used to detect the presence or absence of a mutation. A probe is preferably hybridized to a region of DNA that has a target mutation. Preferably, a probe differentially hybridizes to a region with a mutation and is selective for that mutation. Illustratively, a probe will have greater hybridization with a site that contains a mutation than with the site in the absence of the mutation, Greater hybridization is illustratively determined by differences in melting temperature between complete hybridization and incomplete hybridization.

[0063] Optionally, other detection systems using RT-PCR are operable herein. Illustratively, allele specific PCR with blocking reagent (ASB-PCR) is used as a method of detection in the present invention. Methods of ASB-PCR are found in Morlan, J, et al., 2009; PLoS ONE 4(2): e4584, doi:10.1371/journal.pone.0004584, the contents of which are incorporated herein by reference as applicable to the subject invention. Other methods such as that described in U.S. Application Publication No: 2008/0213756, the entire contents of which are incorporated herein by reference, are similarly operable.

[0064] In an alternative method the sequence of mRNA is detected. This process preferably uses reverse transcription PCR to synthesize cDNA from RNA collected from a subject. The sequence of the synthesized cDNA is then obtained by PCR and sequencing methods as known in the art or as described herein and determination of the presence or absence of a mutation is performed.

[0065] in a preferred embodiment a probe such as that used for RT-PCR is labeled. The “labeled” with regard to the probe is intended to encompass direct labeling of the probe by coupling (i.e., physically linking) a detectable substance to the probe, as well as indirect labeling of the probe by reactivity with another reagent that is directly labeled. Examples of indirect labeling include detection of a probe using a fluorescently labeled antibody and end-labeling or centrally labeling of a DNA probe with biotin such that it is detected with fluorescently labeled streptavidin.

[0066] The detection processes of the invention are optionally used to detect RNA (particularly mRNA) or genomic nucleic acid in a sample in vitro as well as in vivo. For example, in vitro techniques for detection of nucleic acid include northern hybridizations, in situ hybridizations, RT-PCR, reverse transcription PCR, and RNase protection.

[0067] The size of the primers used to amplify a portion of the nucleic acid sequences described herein is optionally at least 5, and often 10, 15, 20, 25, or 30 nucleotides in length. Preferably, the GC ratio is above 30%, 35%, 40%, 45%, 50%, 55%, or 60% so as to prevent hair-pin structure on the primer. Furthermore, the amplicon is preferably of sufficient length to be detected by standard molecular biology methodologies. The forward primer is preferably shorter than the reverse primer. Techniques for modifying the Tₘ of either primer are operable herein. An illustrative forward or reverse primer contains LNA-dA and LNA-dT (Glen Research Corporation) so as to match Tₘ with a corresponding alternate primer.

[0068] An inventive process uses a polymerization reaction which employs a nucleic acid polymerizing enzyme, illustratively a DNA polymerase, RNA polymerase, reverse transcriptase, or mixtures thereof. It is further appreciated that accessory proteins or molecules are present to form the replication machinery. In a preferred embodiment the polymerizing enzyme is a thermostable polymerase or thermodegradable polymerase. Use of thermostable polymerases is well known in the art such as Taq polymerase available from Invitrogen Corporation (Carlsbad, Calif.). Thermostable polymerases allow a polymerization reaction to be initiated or shut down by changing the temperature or other condition in the reaction mixture without destroying activity of the polymerase.

[0069] In a further embodiment detection of PCR products is achieved by mass spectrometry. Mass spectrometry has several advantages over real-time PCR systems in that it is used to simultaneously detect the presence of Fzd-4 and decipher mutations in target nucleic acid sequences allowing identification of single or multiple mutations simultaneously. Further, mass spectrometers are prevalent in the clinical laboratory. Similar to fluorescence based detection systems, mass spectrometry is capable of simultaneously detecting multiple amplification products for a multiplexed and controlled approach to accurately quantifying components of biological or environmental samples.

[0070] Many mass spectrometry platforms are suitable for use in the instant invention illustratively including matrix assisted laser desorption ionization time of flight mass spectrometry (MAIM), electro spray mass spectrometry, electrospray ionization-Fourier transform ion cyclotron resonance mass spectrometry (ESI-FTICR), multi-stage mass spectrometry fragmentation analysis (MS/MS), mass spectrometry coupled with liquid chromatography such as high performance liquid chromatography mass spectrometry (HPLC) and ultra performance liquid chromatography isotope dilution tandem mass spectrometry (HPLC-ID/MS/MS), and variations thereof.

[0071] It is appreciated that numerous other detection processes are similarly suitable for measuring an amplification product by detecting a detection signal. Illustrative examples include, but are not limited to, liquid chromatography, mass spectrometry, liquid chromatography/mass spectrometry, static fluorescence, dynamic fluorescence, high performance liquid chromatography, ultra-high performance liquid chromatography, enzyme-linked immunoadsorbent assay, real-time PCR, gel electrophoresis, or combinations thereof.

[0072] A polypeptide, or a genetic mutation thereof, can be detected in any suitable manner, but is typically detected by contacting a sample from the subject with a reagent that specifically srecognizes or binds the polypeptide or mutated polypeptide and then detecting the presence or absence of a reaction product. For example the reagent is an antibody. The antibody may be monoclonal, polyclonal, chimeric, or a fragment of the foregoing, as discussed in detail above, and the step of detecting the reaction product may be carried out with any suitable immunoassay. The sample from the subject is typically a biological fluid as described above, and may be the same sample of biological fluid used to conduct the method described above.

[0073] Immunoassays carried out in accordance with the present invention are used to detect the polypeptides, or genetic mutations thereof, as described herein. Examples of suitable immunoassays are immunoblotting, immunofluorescence methods, immunoprecipitation, chemiluminescence methods, electrochemiluminescence (ECL) or enzyme-linked immunoassays.

[0074] Those skilled in the art will be familiar with numerous specific immunoassay formats and variations thereof which may be useful for carrying out the method disclosed herein. See generally E. Maggio, Enzyme-Immunoassay, (1980) (CRC Press, Inc., Boca Raton, Fla.); see also U.S. Pat. No. 4,727,022 to Skold et al. titled “Methods for Modulating Ligand-Receptor Interactions and their Application,” U.S. Pat. No. 4,659,678 to Forrest et al. titled “Immunoassay of Antigens,” U.S. Pat. No. 4,376,110 to David et al., titled “Immunometric Assays Using Monoclonal Antibodies,” U.S. Pat. No. 4,275,149 to Litman et al., titled “Macromolecular Environment Control in Specific Receptor Assays,” U.S. Pat. No. 4,233,402 to Maggio et al., titled “Reagents and Method Employing Channeling,” and U.S. Pat. No. 4,230,767 to Boguslaski et al., titled “Heterogenous Specific Binding Assay Employing a Coenzyme as Label.”

[0075] Antibodies can be conjugated to a solid support suitable for a diagnostic assay (e.g., beads such as protein A or protein G agarose, microspheres, plates, slides or wells formed from materials such as latex or polystyrene) in accordance with known techniques, such as passive binding. Antibodies as described herein may likewise be conjugated to detectable labels or groups such as radiolabels (e.g., ³⁵S, ¹²⁵I, ¹³¹I)) enzyme labels (e.g., horseradish peroxidase, alkaline phosphatase), and fluorescent labels (e.g., fluorescein, Alexa, green fluorescent protein, rhodamine) in accordance with known techniques.

[0076] For polypeptides known to have enzymatic activity, the activities can be determined in vitro using enzyme assays known in the art. Such assays include, without limitation, kinase assays, phosphatase assays, and reductase assays, among many others. Modulation of the kinetics of enzyme activities can be determined by measuring the rate constant K_{M} using known algorithms, such as the Hill plot, Michaelis-Menten equation, linear regression plots such as Lineweaver-Burk analysis, and Scatchard plot. A genetic mutation in the nucleic acid encoding the polypeptide or a genetic mutation in the regulatory region of the gene encoding the polypeptide can result in a gain-in-function (i.e., increase in enzymatic activity or different function) or a loss-of-function (i.e. decrease or loss in enzymatic activity).

[0077] In some cases, one or more steps of the methods of the invention are performed on a computer. For example, the detecting, measuring, calculating, and assigning steps are performed on a computer. In some embodiments, the invention provides an article of manufacture containing computer executable instructions stored on a non-transitory computer readable media, which, when executed by a computer, causes the computer to perform operations comprising the detecting, measuring, calculating, and/or assigning steps of the methods described herein. In some embodiments, the computer further generates a report indicating the diagnosis of the subject, where the report indicates whether the subject comprises a retinal vascular disease.

[0078] In some embodiments, the invention provides a non-transitory computer program product storing instructions, which when executed by at least one data processor of at least one computing system, implement a method described herein (e.g., a detecting, measuring, calculating, and assigning step of a method described herein). In other embodiments, the invention provides a computer-implemented method that performs the detecting, measuring, calculating, and/or assigning steps of the methods described herein. In some cases, the invention provides a non-transitory computer readable storage medium containing executable instructions to perform the detecting, measuring, calculating, and/or assigning steps of the methods described herein. In other cases, the invention features a system containing at least one data processor and memory storing instructions, which when executed by the at least one data processor, causes the at least one data processor to perform operations including the detecting, measuring, calculating, and/or assigning steps of the methods described herein.

[0079] These computer programs (also known as programs, software, software applications or code) include machine instructions for a programmable processor, and may be implemented in a high-level procedural and/or object-oriented programming language, and/or in assembly/machine language. As used herein, the term “machine-readable medium” refers to any computer program product, apparatus and/or device (e.g., magnetic discs, optical disks, memory, Programmable Logic Devices (PLDs)) used to provide machine instructions and/or data to a programmable processor, including a machine-readable medium that receives machine instructions as a machine-readable signal. The term “machine-readable signal” refers to any signal used to provide machine instructions and/or data to a programmable processor.

[0080] To provide for interaction with a user, the subject matter described herein may be implemented on a computer having a display device (e.g., a CRT (cathode ray tube) or LCD (liquid crystal display) monitor) for displaying information to the user and a keyboard and a pointing device (e.g., a mouse or a trackball) by which the user may provide input to the computer. Other kinds of devices may be used to provide for interaction with a user as well; for example, feedback provided to the user may be any form of sensory feedback (e.g., visual feedback, auditory feedback, or tactile feedback); and input from the user may be received in any form, including acoustic, speech, or tactile input.

[0081] As described in detail below, the mouse model, Nrv1 (new retinal vessels 1), shows abnormal production of blood vessels in the retina and vitreous. These blood vessels are disorganized and clumped. A disorganized astrocytes network underlines the abnormal vascular topography. The abnormal blood vessels into the vitreous originate from retinal vasculature and are preceded by the uncommon presence of astrocytes into the vitreous. The data described herein indicate misguidance defects due to the astrocytes.

[0082] As described in detail below, linkage analyses mapped the vascular disorder to a 1 Mb region on the chromosome 9. Sequencing this region identifies the genetic mutations responsible for this disease. As described herein, characterization of this mouse model and its genetic cause assists in the development of diagnostic and viable treatment methods that prevent, attenuate, and/or cure these diseases.

### Example 1

### Genetic Model of Retinal Neovascularization (Nrv1)

[0083] The retinal vasculature includes the superficial vascular plexus, the intermediate vascular plexus, and the deep vascular plexus. The cellular components and molecular cascades during formation of the retinal superficial vascular plexus are described in Dorrel M., 2006 Progress in Retinal and Eye Research (FIG. 1).

### Mechanisms of Retinal Vascular Defects and Diseases

[0084] Lack of hyaloid vessel regression: Persistent fetal vasculature syndrome (Norrin, Lama1). Lack of vascularization into retina: Persistent fetal vasculature syndrome (Lrp5). Neovascularization into vitreous: Proliferative diabetic retinopathy and retinopathy of prematurity (Nrv1).

[0085] The following are genetic approaches to generate mouse models: 1) Gene-driven approach (reverse genetics): gene/mutation→function/phenotype; and 2) Phenotype-driven approach (forward genetics): function/phenotype→gene/mutation.

[0086] As described herein, ENU Mutagenesis provides a way forward to understand gene function. The potency of this approach is 12 times that of radiation, and 200 times that of spontaneous mutation. This can provide single nucleotide substitution, 70-85% A-T to T-A or A-T to GC, 70% nonsynonymous change (65% missense and the remaining are nonsense or splice mutations). The chemical structure of N-Ethyl-N-nitrosurea is provided below.

[chemical structure]

[0087] Described in detail below is phenotypic and histological characterization of the Nrv1 (new retinal vessels 1) mouse. FIG. 2 is a series of images showing clinical phenotype of Nrv1 retinas depicts cotton-wool spotting and larger, tortuosus blood vessels. FIG. 3 is a series of images showing that the Nrv1 retina exhibits tortuosuos vessels. FIG. 4 is a series of images depicting that the Nrv1 model shows neovascularization into the vitreous. FIG. 5 is a series of images showing that neovascularization in Nrv1 mouse comes out from the retina at p10 while the hyaloid vasculature regresses normally. FIG. 5A and FIG. 5B provide alternate views. FIG. 6 is a series of images showing new blood vessels in the vitreous are surrounded by astrocytes. FIG. 7 is a series of images showing new blood vessels in the vitreous are surrounded by astrocytes. FIG. 8 is a series of images showing that astrocytes guide aberrant vessels into the vitreous. FIG. 9 is a series of images showing that disorganization of astrocyte network leads to abnormal vascular topography. FIG. 10 is a series of images showing that astrocyte topography is disorganized in the Nrv1 mouse. FIG. 11 is a series of images showing that vascular density appear to be reduced in Nrv1 mutant retina.

[0088] In summary, the Nrv1 mouse phenotype has the following characteristics: 1) tortuous blood vessels; 2) larger major blood vessels; 3) abnormal vessels protruding into the vitreous; 4) reduced density of vessels in the inner retina; and 5) disruption of organization and topography of the astrocyte network.

[0089] As described herein, apoptosis/proliferation during vascular development is examined. Vascular development is also tracked on flat mount retina.

### Example 2

### Mapping and Candidate Gene Identification of Nrv1

[0090] Mice are commonly used as models of human retinal disease in order to understand the genetic basis of disease, and to develop treatments for these diseases. Prior to the invention described herein, due to the complexity of the retina and secondary effects in systemic circulatory systems, genetic manipulation leading to retinal neovascularization has proven difficult. Specifically, creating mouse models of proliferative diabetic retinopathy and ischemic retinopathy using other methods including inducing diabetes or laser-induced vascular occlusions failed to produce a real disease phenotype. The mouse model of oxygen-induced retinopathy was the most common animal model for retinal angiogenesis studies. In this model for pathological neovascularization of the retina, pathology was driven by manipulating the concentration of oxygen that the mice breathe. However, this model was a transient model, in which the retinopathy was difficult to maintain and eventually regressed. Thus, prior to the invention, there was a pressing need for a genetic mouse model to examine retinal neovascularization. The NMF128 mouse mutant (Nrv1) described herein is a clinically relevant animal model for retinal neovascularization-related diseases, specifically for proliferative diabetic retinopathy.

[0091] The mouse model described herein, NMF128, develops a vascular anomaly phenotype that closely resembles human retinal vascular diseases such as proliferative diabetic retinopathy, ischemic retinopathy from vascular occlusions and systemic blood dyscrasia and retinopathy of prematurity. The NMF128 mouse model described herein provides a unique opportunity for the study of disorders associated with retinal neovascularization. The mouse model described herein is a valuable tool for the study of pathology, progression and the genetic networks that are perturbed in retinal neovascularization diseases. In addition, as described herein, this model is used to test genes for therapeutic value in the amelioration of disease with minimal negative consequences.

[0092] A genome-wide scan on pooled DNA samples was performed to identify the chromosome carrying the causative mutation. Genetic finemapping was then utilized to reduce the genomic interval. Linkage analyses mapped the vascular disorder to a 1 Mb region on the chromosome 9. Specifically, this disorder was genetically mapped to a 1.0 megabase (Mb) region on chromosome 9 containing 14 genes. Specifically, a 1 Mb region on chromosome 9 between the position 102,450,352 and 103,338,569 as stated on mouse genome GRCm38.p1 was identified as responsible for carrying the mutated gene. Genes in this region include Ky, Cep63, Anapc13, Amotl2, Gm5627, Ryk, Slco2a1, Rab6b, Srprb, Trf, 1300017J0RIK, Topbp1, and Cdv3. The homologous genes have been identified in humans.

[0093] FIG. 12 is a schematic depicting genome-wide scan—the backcrossing strategy. FIG. 13 shows that genome-wide scan maps the retinal defects to Chromosome 9. FIG. 14 is a schematic depicting that genetic finemapping narrows Nrv1 interval to 1.0 Mb. FIG. 15 is next generation sequencing data used to identify the mutated gene into the 1.0 Mb.

[0094] The candidate genes found within 1.0 Mb Nrv1 genetic interval are set forth below:

| Gene, full name | Function | Mouse Model |
|---|---|---|
| Ky, Kyphoscoliosis peptidase | Neuromuscolar junction | myopathy involving postural |
| | development | muscles |
| Cep63, centrosomal protein 63 | Cell cycle | ND |
| Anapc13, anaphase promoting | Cell cycle | ND |
| complex subunit 13 | | |
| Amot12, angiomotin-like 2 | Angiogenesis | ND |
| Ryk, receptor-like-tyrosine kinase | Skeletal morphogenesis | Craniofacial abnormalities, |
| | Cell migration | shortened limbs, |
| | Axon guidance | palatoschysis |
| Sico2a1, solute carrier organic | Prostaglandin transport | prenatal or early postnatal |
| anion transporter family, | | lethality. |
| member 2a1 | | |
| Rab6b, member RAS | Intracellular protein transport | growth retardation, behavioral |
| oncogene family | | and immunological abnormalities. |
| Srprb, signal recognition | Signal transduction | ND |
| particle receptor, B subunit | | |
| Trf, transferrin | Iron homeostasis | hypochromic, microcytic anemia |
| Topbp1, topoisomerase (DNA) | DNA repair | embryonic growth arrest |
| II binding protein 1 | | |
| Cdv3, carnitine deficiency- | TTP36-Abl/PDGFR pathway | ND |
| associated gene expressed in | | |
| ventricle 3 | | |

[0095] The chromosomal region identified in mouse chromosome 9 is syntenic to human chromosome 3. No disease is associated with this region except for Slco2a1 (Primary hypertrophic osteoatropathy) and Trf (atransferrinemia).

[0096] Genes responsible for retinal neovascularization are found on chromosome 9, positions 102,450,352 to 103,338,569, as stated on mouse genome GRCm38.p1 (nucleotide sequence provided in GenBank Accession No. NC_{—}000075.6 (GI:372099101), incorporated herein by reference).

[0097] Ky, or Kyphoscoliosis peptidase, is a cytoskeleton-associated protease required for normal muscle growth. Ky is involved in function, maturation and stabilization of the neuromuscular junction. The cDNA sequence of Ky in Mus musculus is provided by GenBank Accession No. BC156644.1 (GI:162317891), incorporated herein by reference. The amino acid sequence of Ky in Mus musculus is provided by GenBank Accession No. AAI56645.1 (GI:162317892), incorporated herein by reference. The cDNA sequence of Ky in homo sapiens is provided by GenBank Accession No. BC024014.1 (GI: 21955431), incorporated herein by reference. The amino acid sequence of Ky in Homo sapiens is provided by GenBank Accession No. NP_{—}848649.3 (GI:148806932), incorporated herein by reference.

[0098] An exemplary sequence of Ky in Mus musculus strain C57BL/6J chromosome 9, GRCm38.p1 C57BL/6J is provided directly below.

NC_000075.6 (GI: 372099101: 102506138-102546239):
(SEQ ID NO: 1)
GCACCATGGAGCTGAAGAAGGACAGCAACGCTGTGGCCATCGACATGCTGCTCATCGTGCACTCCGAGAA
GCGGCGCGCGGCGCAAGCCACGCACTTGGACCCGCAGGCGAACCCGGGCGCGCTGCTGCAAAACCGAGGA
GGTAACACCCGCCTGGCCCGGGTCCTCAGAATCCCTGGGCACCTCGGCCACTAAGCCCCCGGGTCCTCTC
GCCGGGGGGCGCCTAAGCAGCACCCCCCTCCCCAACGAGGCTAATCCGAACCTCTCCGAACCTCTCCCAG
ACCGCTGCTTGTGCCCTGGCGCCAGGGCACCTGCGTTCCTTGGCAACGCACAGCGCACTGGTTGCCCCAG
GCCTGTTTTCTCCCGCTATTCTCTGAAGGGTGCAAAACACATAGAAAAATGCTCTTCAGAAAGAAACCAG
GGCCTTAGGCTGATCACGTGTAGCAGAGGCCTAGTCCCCAGTCAGCATGCAACTCACCATAAGTTACCAG
GGACCCCAAAGGGTCCCTGTACTGAGTCAGACTTTAAGATAACTTAGAGTCTCAGTTTCCCCTTTCGTAA
GCCTCTCTTTTCGCCTCCAACAGATATAAGGACTGAATGGGTGAAGGGAACCTGGGCTGGGGTGGAGTAG
TGTTTGAAGTCTCCTGACCGTACTTGAATTTAGCTTCAATTTTACTTCTTCTGCAGACTTTGGGAAAACG
AAAACTGAGAAGTGATTGCTTATAGGGTGATTGCAGAAGGCAGAATCTGCCTCTATTCTACACACACACA
CACACACACACACACACACACAACTTGTATAGCGTATAAAGGGTGCCGAACGGACGCTCAGGAAATCACC
GAAAAATGTAGGGGCCTCGTGGCGCTGGTCTTGGAGGGAGCCTCTGAAGCTGACTTGAGGGTCTAACTCT
GCACCACTTCTTTAGCAGAGATGCCTGCCGGCTGCACAGAGAAAGATGACTGCTACCATCCCACTCTCCC
TCCAGCTCCCACGTTTCTTGGGACCCCCTCCCGCTGCTCTATCTGCCCCCCACTCCCAGCTTCTGTGCGC
ATGATGCACCCACAGCCTGTCCACCTGCTGTGCGAGGGCAGCGGTTCTCTAGACAACCTTGATCCATCAG
CCACATGCGCTGGAGCTATGATGCAGCCCCTGGGGAGCTGGAAGGGAGGCATTAAGGGAAAGAGAGACTG
GAGAACTGAGAGTGTTCGCAGCAGTTAGAGTTTAGGACGGAGTGTGAGGACGGGAGCTGTTTAGGTTAAT
AGATCCTGTAGTTCTCCGATGCTGCTCCTGGGAGAAAGGATTAGACCCTCTCAGGGTCTTTGAAGGAGAA
AGAAAATGTCCTCCACGTCTTGATGGGAATGAGATGGCGCCCGTCGCATGTAACACAATCCAGAAGACCG
CTCCCCGAGTGTAGTGAGGCCTAGTTCCAAGTCAGCCCAATAGTCCCCACCGCCCAATCAGAGTCCCTTT
GCTTCTGACACCAGAGAGGATAAAGAGAGAAGCCATAAAGTGCTGGCTATCAAAACTGCCCTCAAGGTAC
CCAAAGCCTACCCAAAATGTCCATGACTCCAGAAGAGCATACAAACTTTGACCCTGCTTTACTTGGGGGG
TAAAGCACCCCTACTTGAAAGGCACTGGTATTTTTCTAGAAACATTTTCCCAGAGAAGGTTTCTTGAAGA
TGCTGGGCAGTAGAGAGAACCGTGTCCCCTATTCTTTACCAAAGTGAAAAAGAACAGTGTAGGGTCTCCA
AGGTCTGCCATCCATGGAACCCCCAGGCTGTACCGACCTGTGTAGCCACACTTTAGGGCATAGCCTGAGG
AAGAAAAGCATTAAGTCAAACTACTTGTTCAGACGTCTCACACAGATGCACAACAGCCCAAAATCGCCCT
GCCGACTTTCAAGTCTCTTTCTGTCACCTGCAGGAGAGTTCTCCCCCTAAGGAACGGCCAAGGAAGGCCT
TAACGCGCCCCCTCCCCACACCCATCAGAGAAGAATAAAGTTCAACTATTGTCACGAGGCAGACACGGTG
GCCTTGTGCCACAGAGCAAGGAGGGAAGGAGTCAGAGGGACAGGACAAGAAGAGTCACCAGCAATTTAGG
CTGCAGGGCTGGCCTGGTCTCTCTTCTTTTCTCTAAGAGTCCAGCACGTTCCCAGCTATTTCCTTAGAAC
AGCGCTCCCCACAACACAGACTATGAAGAGCAACAGACTCTGCAGAAAAGATCGGGGAGGGGGGGCTGAG
GAAGATTTGGGGGCTTCTGGGGTGAAGGGTTAGAGAGCCAGACCTGAGACTGAGCTTCCTGGGAACACTG
CTATCAAGTGTGCCACAGAGCTGGTCTTGTGGTGGCGCCTCTGCTCCCACTGCTCCCACTGCCTGAGCAT
ACATCAGGTTGCATGCCAGGGACTCAATCTCTCAACTATCACTTCCAGCCACTGCCAGGGAGAGAGCTTC
CCTTCTCTTCTGCATTACATCATTGCCAGAGCGAAACATGGGTGCATCTGATGGGTCATGCTGAGGCCTA
CACAGGTCCATACTCTAGCTGCAAAGGATGCTGGGAAAGTAGGCAACTGTGGCTCTCCACTCCCATAGGA
ACAGGCAATCTCTGTATGCTTTGTCCCTGCATACAGAAATAGGCAGGCAAAGCAGAAAGAAAACTCTCAG
AAAATAATACTTTCATACTTACATATTGGAGATGTGGAAATGGGTATTGGGCATCTGTATAGCAAAAATT
CCTTCTGGAAAATCCTGATAGCCAATCCCACCATCACTAAAAACTACATTTTTTTTTAAAATTTAAGGAT
TGCATTGTTTCCTCAAATGTGTCTCATTCAAGGGCAGCCTATCTCAGATCCTGAAAAAACTGGTTCCCAC
AGCCTTGTTTAGCACAGATGGGTGTCTAAGTGGAACAGTAGTGCATGGTACTCGCCCTAGGGCTCCCTCC
ACAAAAAGTCTCACACCCAATCTTCTCTCACAGGATTCCAAGGTGTCAGAAACGGAATCCGGAAGTGGCA
AGAGTTGGAAGAAAACAGCTTTCAGGGTAAATCTCTTTTTCTTTCTATTTTCTGTTCCGTCTCTGTGATT
CAAAAACCCCGAAAAGTGGCTGGAAGAGTTGGGTTGTCCTCATTGGGAAATTGGCCCTAACATCTAATCG
GTGAGCAGACATGGCTGCCTGTGGCTCGGCCAAGCCTCTAGGCCTCTGTGAGCCTGGAAAACTTTCCCTG
GCATCGGGGCTCCTGTGTTTCTGGAAGCTGAAAGTGGGGAATGATGCTGTGAACTTCAGCACCCATTTGT
TTGCTGGCTGAGCTATATACGAGGATTTGGCTTTACTTGGGGTATCGAGGGTTGTGTGTGTTCCCACCAG
AGGCAGGGCTGCTGACATCACAAAGACTATATACAGCTCTAAAATGTGTTTGAGTTTTTTGTTGTTGTTG
TTGTGTTTTGTTTTTCTGGTCAGACTGGGATAGTGGCCTGTCTTAAATCTATATTACTTGAGGACTGGGC
AGAGCCGATCAAAGGTTGTATAGTAGTCCCTACTGCCCTGAGCTTCCGAATACAGCTAGAAGTTCATTTC
CAAGTTCATTTCCAAAACCTCTTCTTTCTGGTTCCAGACAGCGCTCTTTTCTGGAACACAGGCGATGGGC
CAAAATAGCGGGTTTTGTTTTGTGTGCCTCAAAGACTGATTACCTCAGCTTCCAGGGGGATGCATGAGCG
TTAACATGCATGATGAGAACACAGACTTCTACTAGGACCCCGACCTCCACTCGCAGAATGTTGCTGAGGA
GTTCCAGCAGACCCCACCCATGTAACCCTGGAGTCAGATGTCTGCCCCTGCACAAGAGCACAGCTGAGGA
AAGGTGAATAACTCCGCCTTCGCCAGCCTTCAGACAGCGGCAAAACGGAAACGCAAACCAGGAAAACTGA
TCTTACCTCTGTGCTTATTCCTTCAACAGCTCCGTTTCGCAATTCCTTTGCGCCAGGCCAAAGTTTGTTA
GAGATTGAACAGTTAAACAAGCAAGTCTAGAACCCTGTCCTGGTAGAGCTGTGTTCAAATGATGGTCATT
TCCCCACGTCCCTTATGCTGTTCACGGGAAGGAGTCATCTTCAAGATGCAAGCACACCCATTAAGAACAT
CCGCCTGTGTCCTGGCTAGTGGATCCGTGTAAAGGCTTCCTTAATTGGGGCTAAGCTATAAGGAAAATCT
AACTCACTTGGGGTGGCAAAGATTGACATTTTAGCTAGTGAAGCGATACTCTAGGCCAATAAGAAGCCTA
AGAATGAGAGTCCAGGAACTCCAGCCCTAGGAATGGCCACTCAGAGCCTGTGTGCTGTGTGCTGGGTCCA
TGTGTGAGCAAGAAAGTGAGTCAAGTGGGAACACTGGACAAAAAGAGAATATCCTTTATGTTGCTTTTCT
CTCTTGCCTGTGTGAGCCATCTGTCAAGCACCAAAGGCCTCTCAGAAAACCCTGGAGTCATTCCACTTTG
GGCATCTTCAAGGTTGGAATGGAGATTAGTGAAAAACTTCACAAAACAGAAAGCAATGCAGTAACTCTCA
AGATGATTATTTAAAAAAAAAAAAAAAAAAACAACCCTCTGAGGCTCTTAGTATCCATCCACAGAAGGTG
ATTTAAATAGTCCATGAAAAAAATCTAGCGTTTGAAGATTTGGTATGACTCTGGCAGCAGAGAATGTCTG
TAGAAACCTTAAATCCAGGAAACATGATGGTTTCGCCATCCCACCAACATGTGTAATTTTAATGTAAGAT
TTGGTCTAGAAACCAGGCAGTGGTGGCACATGTCTTTAATCCCAGCACTTGAGAGGCAGAGGAGGACGGA
TTTCTGAGTTCAAGACCAGCCTGGTCCACAGAATGAGTTCCAGGACAGCCAAGGCTACACAGAGAAACAT
TGGCTCCAAAAAAAAAAAAAAAAAAAAAAAAAAAAAAAAAAAAAAAACCACACAAACAAACAAACAAAAG
ACTCAGTCTACTTTTTAAATGACATGCACATATGGAGAAATATAGCAGCCTCTTTCCACTTTTTTTGAGG
GCAAGCTCCAGGGCACTCGCGTTGAAGCTGATTTCATCACATATGTGCCTTGCTGGTACCCAAGTCACCG
AGTCCTGCTAACCAAAAGGCTGTCCAGACCCGGTAGTTGGAGAAATTTCATCTCAGAAGGAAGTGGCCCA
GTGGCATGTGCTGACAGAGTGTGCACAAATGGAACCAAGTGTGGTGTTGATCCAAAAGGGCACATTTGTC
CTCCTATTGCTACTCTGTACCCTCCTTGGGCTTGGGTGTTGGCGAGAGGTAGGGTGGGGAGCCTGAAACA
CTCCAAACTTTTGGAAGCAGCAGGTGTTTGGGCTCAGCCACCCCTCTCCCAAAGCTCGCCCAGCAACGGG
CTTACCCTGCTGTGATTGGCTGCTCTCCTTGGTCCTGGCTGAAGTCTGCCTAGCAGCACAGTGTCTGGTG
CCCTACCGCTAGAGAGAAACCACTTGTGCAGCCCTGACTATAAATACCTCCCAGGAGCTGTGCCAGCCAA
TCATCCTTCTTAAGGATTCCCTTCCCGGCTCCTGTTTCCTCATGGAGGTACAGCCAGCCGTGCCCACAGA
AGGCAGCCTCCCTGTCCTCACCCGAGTGGCCAGGAGCTCCAGCCCAGCATGCCACATCACCCCACATTGG
CATACGATGACAGTGCATCTGGCCTTGGCTAGGCAACCATGTTCTAGAAGTCCTGGGGGCCTGACTCAAC
CCGATCCTAGGAGAAGACTAGAGCATGCCGGTCCCCCAAGGCAAACCTCTGCTGGGTGGACCCCAAGTCT
AGCCCAGCTGAGTGCCCCACTTATCCACCTTCACCAGCTTCCGCTAGGGAAGCATCGAAGCTGTGTCATG
GGAAGCACAGAGTTGCCTTCGTGATTGGCTCCACTCTACAGACAGCAACCTTAGGGAAATGCTAGTTCCC
AGGCTGAACCACTGTTTTCCCCTAAAGTGAGGCTCACTCTAGGTCACAGGGAGATGACGAATTATAAGGG
GAAATATAGACTGAGAACTTCCTTCTGCCATAATCCTGGTCCTTCCTCGACTCTTCCCACATCCATGAAG
ACAAGGTCCCAGGGCTGGCTCAGTAAGGACAGTGCTGGCACAGCCACAGAGCAGCCATAAAGCAGAAAGG
AATTCATGCCTAGGAAGACCCGAGAAGACAGCGATGGCCTGTAGCAAGAACCAGGCATCTCTCTTCAGCA
TCCCAACCCCACTGGGCCATAAGGACATGTAAATATCACCAGTGGACACAGAGAACTCAAACATGTTGAG
TGCTCTGTAAAAATGGTGAAACTAAACCAAACTGAGTATCCTCCCACCTTCAAGGATAGAAGCAGAGGCA
GGTGACTGTCCCTGTGCTCCTCAGAGGGAGGAAAGAAAGCTGAGCTAGGAGTTTGGAAGCTCAAGAGTTC
AAGTACTATGTTGGACCCCCACCCTCACCCCCACCCCCACCCCCGCACAGTTCACTCCACAGAAAGGGAT
GATGACAATCGGTTAGGCATCTGTGTCTGAGAAAATATTTTGGAAATTGTAGCAAAAACTCCAGAGCAGC
AGTTCCATAGACCAGTAGTATGAATCCCGGCCTGGGTAAGCTTCCACTGGGAGGCAGAAGGGGTGGGCAC
TTGTGGACTCCCATGGGTGAGGCTATGCTGGTCCAGAGGTGTGCTCACTATGGCAGTAGATGTGCTCAGC
CCCCGCCAACATACAATTATCTCAGGTGCACCCGGCTCCCTCAGCCCCCCTCCCAGGGAACATTATACCA
TGGTCATGGTGGTCACTTGCCATCGTCTTTGTCTTTCTTAAATAGGAAACTTGCCAGAGAAGCAGTGCCT
TCAGCAGCCGCAGGTCATCACCTCCTACGACAACCAAGGTAAGAGACAAATCGCTAATGGCCATCTCTCC
TGGGGTTGTGTTCCAGGCTCTGCTGCCCAAGTCAGCGAGCCCGGGATACAGAGATCAGGCTGCAGGGAGC
ACCTCTGCTCTGATCCATAAAAGCTATAGGGAGCACCTTCTCTGTGATCCAAGAAGGCTACAGGGAATAC
CTCCTCTGTGATCCATGAAGGTTAGAGCATCCTTCTCCCTGCATCCCAGAGGAAGAACTGAGACACCCTG
CCCTTCCAGTGAAGAAATAAAGTCCTTGGATTACAGAGTCCCACCATTATCGATATTGTCAGTGCTACAG
CTAACACTCACTGAGTGCAAAGCATGTGTCTGCGGCTCTACCAACCTCTATACGCACTTAAGTATCAAAG
CAACCTTGACTGGGTGAGATGAGGAGACTAAGGCTTGAGACAGCAAGAGTCAGGGCTAGCTCTCTGGTAC
CTTACCTCCAACCCCAGCAGGGCCTCAGTTGTTAACCTTCCCGTGGCTGGGCTTCTGCGGCTTCCTCGAA
ACTGATCTCCTGCTGGCTCCCAGTATCCAAGTGCTCCCACATCCTGAGTCACAAAGGCTCCTTGACCTCT
CTTGAAGCTGAACCTGATGAAACATCCCACTTAGCGCCAAGTTTTCGGCAGCAAGGTGGAACAACCTGGT
CCTTCATTGAGAGCTCTGATTTTCCCAGAAGTGCTCTGGGTACTTGGAAATGGCAGGCAAGGGCACTCTC
TGCTGGCCAGGCTGATTCTGCAGTTTTCTAGATCTGAGACTACCACGAGGTAGAGCTGAGGTTTCCACTG
TGGCTGGAGGAGAACCTATTTAAAGGACTCCAGCATCTACCATGACTCTTCGTCAGAAGCCTGGGGTGCT
CAGGCTCAACCCAGAGTTGGCTGCCATTGCTGATGCCATAACAAGCAAGAAAACTATGCCATAGCACTCA
AGGGACATGGGTATGCCCCTTCCTGAAGCACAAGAATCAATGCAGGCCAGGCTGTTTCTCTGACACTGAC
GTGGCTGTACAAGTCTCACAGCAGAGATACCTCGCTGATGTAGAAAGATTGCGAATGGGCTGCCATTCTC
TCAACACAGGGGACAAAAGAAAGGCTCCTGCATGTAGGACTGGGTCCTAGGGAGCGGGAAAGACCGAAGG
GGAAATTAAGGCAGGAGGGATGGTGGGGGCAGGGGTGATAAATCAGTTTCCTGTTGCTCATTGGCTAGAA
ACAGCAAGATTTCGCCTTAAGCTTCTGGGACTGAGAAGGCCGAAGTCAGCTTTGCTGGGTAAAGGGCAGG
TGTCAGCGGGCCGCAGCCTTTGAAGTCTTGGGAGGGAATCCATTCCTTACCTCCTCCTGCTCCTACAGGC
TGCCAGCATTCCTTGGCTTTATGGCTGTGTCATTCCAGTGACGGCTTCTATTATCACATGGCCCTCTCCC
TTTTTAGGTAGGCAGTTCTCCGTCTCCCTCTTATAAAGTTATACGTGGTCACATCTAAGGCCCAACCAGA
TAGCCCAGAATAATCACTCTGAGATCCATAGGTAAGGCCCCATCTGCGAAATCTCCCTCGCAGTCAGAGA
TTCTGATGGATACCCTGAGAATTCATTACTCAGCTCACGATAAGGAACCATTGTAAGCAGAATAGAGGAG
GCTGGGAGTGTAGCTTAGTTGTTTGGCTATCATGCATGAGGTTTTTTAGTCTGATCCCTGGCACCCCCCA
CCCCCAGATAAAAAGAACAGGTGAGCAGCAACTGAGATGGAATATCTGTGTAAGAAAAGAGGGGGTGGGA
CAGACACGAGGGCATCTGGGGAGAAATTTTAGCTGGGAGTCATGACATGAAGGCACAGGCAGGCAGGCAG
GCATCTGCTAGGTGTGGAAAGTCTGTGTCTGTGGCCAGGGGAAAAGGGGACATGAGCAGAGTAAGAAGCA
GGAGATGAGGCAGAAAGGATTCGAGGCAGGACTTATGGTCCTAGGTGTGGGCTGCCTTCAGTGTGCTGGC
TTCTGATCAGAGTATGATCAGCAGACATCAGATGGCTTTAGATGTAGTGCCTCTAATATTGGAAGAATGA
ACAGAACAGAAGGGGGTGACTAGAAGCAAAGAGGACTCCCCCTAGAGGTTGTATCCAATGGCAAGAGGGT
TTCCCATGTTGTGGATCTGGGCTAGAAGGAGAAGGGGGAACGGGGAGACAAGAATTGAAGCATAAGCCAG
GGGTAAGACACAGCAGACTGATCAGGGGGCGGGGGTGGGGTGAAGGGGAAGAGTTGAATGTCGTTCTGTT
GAGACTAGGCATTGGGGAAACAGAAAGGATGTCCCCATCGTGTGTTGAGTTTCTACAAATCGGCAAGCCT
GGGACTCCTTGGGCTCTGTTCTAGGGACCCTGTCAGCTCCAGCACAGGAGGTCCAATCATAGCCTAGATC
AGAGGCAGAACACGAGGTGTGTGCCAGACATCGAGCTAAGCACTGTTCATGGCTCCTCATCTCCCTCAGC
CACACTCTATGAAAGGTTTTCTTTCTCACACACACACTAAAAAAATGAAATCCACTTTATGGATGGAAAA
AAATGGAGAAACCGAGGCACAGGGGCATCTAAGCAGCTTACCTGAAGTTATGCACTAAACAGGACAAGTC
AGATCCAAGAGTTGAACATGTCTGTGCACCCCCTTAAAGCCAAGTGGGCTTAACTTCTGTACCACACTTC
CCCCATACAGGACAGGGACCACAGAGCTGATTTGAGTACAACGTCCCTGCCCACCCCAGCAAAAAGTCCA
AGGCTCCAGATGGAGTTTCTTATTAAAAATGGCTCTGCTTTCCCCTTCTCCTCAGTGGCAGGTTTTATAC
AGCAGGCAATAAAAAGCCTGCTCGTAGTGCACAGGGGCCTTAGAAGATGAATCTTCAGTGGGCTTGTGTT
TGGGTGACAGGAGAGTAGTCACCACAAGGAGGCACGATGGCTTCTGACCCTCAGGGTGGCGGCTAAGGAG
ACAGTTCTGAAATGACACCACCCATCATGCGTGTCCCCAGCTTTTGGAGCTGACTGCTTCCCGACTACTA
CATCCTGGAAGCATAGAGCACGCATCTTTTAAGATCTAGCCAGCCATGGTTCATTTGAGAGTGCTTTTAA
GATGACGAATGTTTAACTAAGATTTTTCCGACTTTAAGTGTTATGGAAAAGTATGCCCAGGTTGTAAATG
GATCAGCATGTACAGAGACTCTTAAGTCAATGGTGCTGAGTATCTTGCATAAATCCTGGGACTCCTCCGC
ATGCACCCCTGTCACCACCCCCATGCATGCATACACACCATGCACACATGCTTGCCTGGCGGTCTTTGTT
AATTGATCAATGCACCTGGCAGCCACTTCCAATCAGTCAGAGTTAATGAACAACACAAAACCCACTTGCC
GTGCCCACGTTAGATATTCTGAGTCAATTGAGCCGTTAGACAAATACCGACTGAAACCTGGAGCCATTAG
GAGAGCTGTCGTGTGGGAGATGTCACCTGACTGGGTAAAAGGCCAGCCTAGAACAGTGCCCACACAGACT
CGGGATGCTCTATGCATCTCAAATTTTGAGAGAGAAAGGGAGAAAAGTCAGCAGGGTTTAGAAAATGTCC
AGCCTGAAAGCCACCTCATAGGGGTAGCAAGAAATATCCCTAAATGGCCAAGGCTGCAGTTTCAGAAGTC
TTATTCAGCAAATGAATTGCTGGGGAAGGGTACTATGAGAGAGGCCAGGCAGGACACCCAAAGTCCCAGA
AAGGGTCTCTTATCCTTGACGGTCAAGGTTGGTGTGATTGGCAGCTGCTTGGGATTTAGCTCTGACTTGA
ATTTTGCCTGAGATTCTTCGTGTTGAGAGATAGGTCAGGTTAATATTTTTACTAAAATCTCAGTTTTATT
AGATCTAAAAGTGAGGTGGGTACGCTGTCTGCCTCTCTAGTGAATGCTAACCATCTTGACACAGGGTGAT
GACGGCAGGCCATTCCTAGGGGGCAGAGAAGTCTCACAGATGGTCTCTTCAGTCTCTGGAGGAATGCAAA
ACTCCATAATCAGGGTGAGAGTTTGACAGCGTTGAGAATAAAAACAGCAGCACAGCCTAGGGACAGTTGG
TCCTGGGCAAGGAGATAAAGTGAAAAATTGCAGGGAGAAGAGGGGGTTCAAATGATGTCAGGGAGAGCTG
GTGAGCGACAGCCCCTCTAAACATGAGGCCACCTCCCCGTTAACCCCAGAAGGGTCACAACTGTGGTTTG
TTTCCCAGCCCCACCACTCTTCACAAGAAACATGGTTGGAGGAGGGCAGCTAGATGTACATAAGCTAGGA
GAAGTGCGAGGGAGATGCTTACTGTTGGACCCTAGGCCCACGAGCTGTTCACCTTCGCAGCTCCTTTAAG
GCTACAGTTGGTTCAGCCCAGTAATCTCCAAACAACAGCTGCACTGGGTCAGACAGACTCCTGGGTCGGA
TAGACCCCTTTGCTGCGGGACTGAAAGCATTGCGGGTTGCAACCCACAATAGAGAGAGCGTGCAGGGGAG
CCTCTCACAGTTCATCTTTCAAAAAGCATCTTGTGGCCACACACCACTTTGGAGAACACCTCAGAAAGAG
TTGCACAAGAAAACAAAGAGGCCAAGTTAACCAGGGCCGCAAAGGGAATATGCTTCGGATGAGGGTGGCA
CCCAATCTTCTGACAAGAATGGACTCACACCCTGAATTCTGAAATCCTCGGCATCTTCATCCCAGGATCA
CAGGGCTGGTGTCATGGGCAGTGAATGTGCTAGATTCTACACTTTACAGGTGAATGCTGGGCTACAGAGA
TAGCTCAGTTTTAAGAGCATTTGCTCCACAATCGTGAAGACTAGAGTTCGAACCTCAGCACCCACATGAC
AGGGCAGGCATCCTCTGACATGCCTTTAACCCAGCTCAGAGGCTGTCAGAGATTGGAGGCTCTTGGACTT
GCTGGTTTCCAGCCTAGCTGAAACACAAGCCTCGGGTTCAGGGAGAGACTCTGCCTCAAAGAAATAGGCG
GAGAGTGATAGAGATCACCTTATTTATTGCATGTGAACAATACATATATACCCCCCACACACACACACAC
ACATTAACTAATTTATTAGTTAATTAAATATTTAAAATGTTTGCTAAGCCTTTTGGTCTGGGGAACACAC
ATTGTATCTCCAGTCTCGTTAGCATGCAAAACAAGTTTTAAAAGCGTATAAGAAAATCAATAATGGTTTT
CCAAAAGAAAATAATTGCAGTATATTTTAACAAAGGATTAATAAAAAGGAACTCATTCTTACAAAACAAA
GGAAACATAATAAATCAGTAAATAATAATAACAATCAGCACTCAAAACAATTTAAAGAGCAAATAAGAAA
TTTTAAATCTACACTAAAATGTTTTTAAATACATAAAACAATAAGGGACCCTTCATTAATAAAAATGTAA
AGGGTTTATGAAGGCAGGTGCCAGTAAGCTTAGCAGGCATGTTTGTGTTATCCACCACCACGGGACTCAG
CTCCTAATGCCATCGTGAGCTTCCAAGCCTGCAGATCTGCTGGACGGTCACTGTCCACGCCATAGCCGGC
TGATCTCAGCTCTTGGCTGAGCTAGTGCTGGCTGTCAGCTGGTGGGCTGGCTGGAGACCAGAGGGTTTCA
GATAGCCTCACCTGAGCAGCCCTGCGCTGCTCCCTGCGGTCTCTCACCCTTAGTCTGGTGCACACACAGC
ACAGCACTGTGGCAGGGATGCCAAGAGTGGGAGCGAGCGTTGCAAAGTCTCTCCAGGGCTAAACTCAGAC
ACTGAATGATAACACAAGTTCTACCCCATGCTAATCAGCCATACTAACTTGTGAGGCCAGCCTACATTCA
AGGGGTGAAACAAAACACCTCTCGTTGGGAAGAAGATGAAGTGTAGGCAATCAACCAGGGCAAGAATGAG
TAAAAAGGGCATTCTCCACCTCTGACCCCATTGGTGGAATCAGAAACCAACAGAAGGATGTGTGGGAAAG
TCGGCCAGTATTACAAAAGCCTTCCAAAACCCTCATTCCTTTCCATCAGTGTTTAGGAATTCACTCTCAG
GAATTGATTGGAAAAGTGTTAGAGATGTCTTCTTTATCCTGATGTTCACCACATCATGGTTTATCACAGC
AAGCACCTGGGGAGTGCGGAGTATCCGATGCACACAGCAAGTTGTAGTGAGTACTCTGAACACGTGACGT
AAATGTGTGTTCCACTGCCTTCCAGGACTGGGGGACATTCTCTACAGCACCGCAGAAGCCACGGCAGCTG
ACAGCACTATTTAATGCTTCTCCGCAGTTGCTGATTTTTTTAAATTAATCCCTTCAATCTCTGAAAGAAG
AGAGCTGATATCTCTGACTATAATGTATATTTGTCTATTCCTCTCTATAATTCTGTGAGTTTTATTTCAG
ATATTTTAAATCTTTGTGTTCAGGTGACTACGTATTTGACATTGTCACATCTCCTTGATAAGCTGACGTT
TCTTCACTATTATATTATACTATTATGTTATATTTCTCTATCTCTGGTATTTTCCTTTCTTGAGTGGATA
TGTTAATGAGCAAATTGTCTTGGTCTCACTGTACCTGAAAAAATGTTTTTATTTCATTCTCATGTGGAAT
TTTTATTGGATAGAGTCAGTTAATCCCTTTCAGAATCTTAAAGATTCCACATCTTTCTGTCCTAGTTTCT
GATGAGAAATATGTAGCCACCTTATATATAATATATCACTTATCCAGAGCGTATTCAGGGACATTGTATC
TCAGTGTTGTAATTATGTCATGTCTGGACCTGGATCTTCTTTTATTTATCATGGTTGGCACACACTAAAC
TTGAGTCCATTCATGTATGTCTTTTCTCAAATTTGAGTAGTTTGTTATTTCTTCAGCTACTTTTCTGCAC
ACATGGTTGCCGGAGACATGAACAGTGGACTTCTAAATGTGGTCCTGTGGTCTCTGAAGCATTGCTGGCT
TTTCCCATTGTCCAGATTGGATCCCGGCCGCTGTTCTCATGTTCTCAGGCTCTTTCCTTTGTCATAGAAA
ACATTGTAGCCCATCTTCCATTTCAGGGTTAACATCTCCACTTTGTTCTTCCATCTTCTGTTTCTTCGCT
GTGTTTTGTATCTTTTGCTTTATTCTGAAATGGCTGGCCTTTCGTTTTGGAGCATGGCTAATGTGCCATT
TTATCACCTTTGGGTTAAATGTGGGTTGTCATGGTTGGCATCTTTTCTTCTCCAACTGAGATCTTCCCAG
GTACTCTGCTGAGCAGTTCTGAGTGGTGGCCTTTGCGGGGCCCATCTGCTTGCGTGCACCAGGAAGTGGC
CAGTTCAGAAGGAAGACATGGTTTTTCCCCTAGAGTTTGGTAGTCAGACTGTGGTATAAAGTGCATGGGG
TGAGACGTGTGGTGACCATGGGAACTCATTTGCAACTTTAGGGAATTACATTTCGTCAGCCATTTCCTGT
TCCTCTGGCCAAAAAAAAAAGGTTGAAACTTTGTCTTTTCACTCTGTTGGGTACTTTTTATAACTGTGTC
TGGGGACAATCAGCAGGAGAGATGAAGGAGGGAGGAAGGGAGGATAGAGGGAGGGAGAAGAGAGGAGAGG
GAAAGAGAGGGAAGGAGAGAGATGGTGGAGGGAGGGATGGAGCGAGGGAGGAAGGGAGGGAGGGTGGAGG
GAGGGAGGGAGGGAGGGAAAGGAGACAGGGAGAGAAAAATACACATGCCACTTGTGCCTGGCTACTAACC
TCACAGCTACCCACATTCTTGCTTCTGGGCTGAATCAGGAAAATATAGAATAAAGAAAAAAAAAAAAAAA
CACAGCAGAAGATGTCCCTGAGACAATTAGGGGTTCCCATTCTCACCCTTCAAGTAGAAAATGATTTTTT
TTTTCCTTGAGTACTCTTTTACATCCATGCACCTCTGCGTAGGGATGCCTTTGCCTGAGGTGTTGCCAGA
ATGAGAAGAAGGGTAGACCGATGCGGTCCTGTCTCACAACCCGGTCGTTGCCACTCCCAACCCTGTTCTT
TTCTATCACTGAATTTCCAGGGTCTGCAGATGGGTTTCCCCATGCATTCCACCCCCATGGTTAGATGGGG
TAGAGAGAGCGCTTGTGTTTGTTGTTTGGGTTAGTCTGGAAAACATGAATTATCTGCATATTCAACAGAA
AGATCTAAGATGAAGCACGTTCTGCCATTTGAACATCTGTCACAAGACGGAGTGCCCTTCCTAGCAGCAT
TTGGCTAAGAATGTCACCTCCCCCTTTGCAGGTACTCAGCTGACTGTGGAAATCCACCCCCAAGACGCCA
TGCCCCAGCTGCTTAAGAAGTTCTCTTTGGCTAAACGTACGTACCTGTACAGGGCTGCTTTGATCGTCCA
ACCTGGGAGAAGGCAGAAACATTACTATTTACACCCATTGTGTTAGTTTCTATTCTTATTGCTCCCATGG
CTTTGGGAGATACAGTATACTGTGACAGAAAAAGTTTGGCAGCAGGAAGTTCCGTAATTGCAGGAGTATG
CAGCTGGACGTATCGCTGCCCCACATAGTGGTAAAACAGGAAGCAGAAAATGAACAGGAAGTGGAACTGG
GCTTTAGAGACTCAAGACCTGCCCACCAGTTACCCACTTCCTCCAGAGAGGCTTCACCCCCTAAAGGTTG
TACATCCCTCCAAGACAGCATTAATATCCAGGGACTGGGTGTCCACACACATAAGTTTATGGGAGCATTT
CACAGTCAAGTACAACAGCCAGATGCTACTGTTCTCGGGTCTCTGTAAGGAGGTCCGGGTGATGCGCATA
ACTAATAGTGCATTCTCTCACCAGACTGTCACTACCAGGGTTTTAAGATGCCATCTGTAGGCTGCCAAAA
ACCGTGGTATGCACAGTGCTAAGTACTTCCCATGCCTCACCTTCTTGACCTTTATGCAGATGCTGGTATT
CGCCCCATGTTTTTTCAAGTCAGCAAAGCGAGGCTCAGAAAAGAGAAACGACTGTCCAGGAGAGTTACTC
GGCCAAAAGATAAAGACCCAGGTCCAACTCCGAAGCCTCCGATTTCAGCTATAATATGTGGGAGGTGTCA
GTCTATGTAGGCAGGCAGGATCTTGACTGCAATGACTCTTCATCCCTGCCCCATCTTCACCCTGGCCTGC
CTCTTGGATGAAGGAGGCCTCATGAGGAAAGAGGCAGAGGAGGCTTGAGGCCCCTCCCGCTGTGTCCTCT
CAATGATGCAAAACCCTCCAAGGCTATATCCTTGCAGAGCACACCACGACCCTTTTTTTTTTCACATAGA
AAAGGAGGAAAAATAAGTAAGATACCCTTGTAGGATTGTTCTAAACTCCCATAAACACTAACTTCTCGGA
ACCCTGCCATTCCGTCTGAAGATGGAGGAGGAGGGGAAGAAAAGTTCCAAAGAAAAACAGAACCTATTTC
TGGGAATGGAAACCACCCTCTCAGCTTTCAGTTCCTATATTTACAGCCTGAAGTGGCTCTGGGGGCATAA
ACCGTCGGCCTCGGTGAGCCCACCCTCAATTCTGAATGGTTTCATTAGACACCATGTCTTCCTGACCTGA
CTTTGAACCAGCAGCTAAGTCTCCTTTGCTTCTTTCCCAGGGACTCCCCTGTTACTCACCATTCACAGTG
CAGGGCCACCCACTCCAAGGGCTACATGACCTTCTGGGCCCCAAGTTCCATACACATTACCTTTTGTGCC
CCTATTATCGCTCTTCGCTTAGTCAGTTCTTGTCTTGGCTAGACATAAAACTGCCTACATGTACTGACAA
CTGCCACGTATTATAGCTAGAACCAAAGGGTTTGGAGCTGTACTTGGGCCTTATTCTCTTGGCCAGGTAA
CTTTCTTGGACAATCATTTCTCCTACCTGAGCCTCACTTTGCTGACTTGGAAAACACAGGGTGAATACAG
GTCAAAAGGCTAAGGCACAGAAAGTACTAGAAGAAACTGGTTTGTACCTATAGCGTCTGCAGCTATTTTC
CAAGATGGCAGAATGCAGAGGAGGGGTGAACCACAGCTCTGTGCAGGCCTGCTGCAGGGGATAAAGCCTT
GAGATCACAGCATGCTCTGACTCAACTCAAAGACCATAGCTCCCTTTCCTGTCATTCATCCCCTATTCCC
AGTCTCTTCTCTGGCCCAGCAGCCACAGTGCATGGTGGGTGGGGATGGGAGCAGGGAGTCTGTAAGAGCC
AGCATGAACAGGGAGAGTGGCCAGGACTACTACCTAGAAAATCGCCAGTGCTTGCTTTTCTGTTTCTTCT
GTGGTATCTCTGACCTTTGGGATATTCCAGGTTTACAAGGTGATAAAAATGGAAACATGAGACCCCGGCA
GCCTGGAGGGAAAGATGCCCACGGTGAGTCCCAGGCCTTCTCTGGGGCCTCTTTAAAAAAAAAAAAAAGC
AGTGAGTTGGCCTCATGGTCCAGTCTCCAGCTGCCAATTGGTACTGGCTTGCTGGGACATCAAGAGTCTG
AGACCATCTGTGGATCTGGGAGAAAGAGTGTCCTGATTGACTAGTAGTGTTGGCCACAGACACAGGTGAA
GAGGGAAAACTCTTATATCATCCCAGCGCCAAAGAGTAACCCCTTTCTGAGTACAAAACAGTCTACTACA
GAAAATGGTGGACCCGGGATGCAGAGTGATGCTAATTTGGAGCTGGAGACGTAGCTCTGCTGGTAGGGTA
CCTACCTACCTAGCAGGCATGAAGCTCTGGGACCAGTTCTCAGAACCACATCAACTGGGTATGCCAACAT
ACTCCTGCAATCCTGGTACTCAAGAGGTGGAGGCAGGAGGATCAGAATTTCAAAGTCACCCTGTGCTCTA
TGGAGAAAACCAGCCTCAACTGGAGACCCTATCTTTAAAAAGAAAAGAAAAGGAAAAAAAACAGTAAAAA
CATAGATGAGGGACTTGGAATACAGCCCACTGGCAGAACACTTGCCCACCATGTGCAGGGGGTCAATCCC
CATTGTGACAAAAAATACAAAGCAATAAATAAAATGGAGTGTCAAGTGTTTACACGGTAGGAAGCTTGTG
GGTAGCAGGTTACGGCAGAGAAACACTAAATGGGGTGATATGAGGTGATAGATGGTCTGGATTGGAATCC
TGCTTTTTCCTCTAATTTGTCTTCTCTAAGCCTCAGTTTCCCCCTTGGTAGGCCGGATGCTAGCAGTGGC
TCCGTGCACACCTGCCTATTTTATTTGGCCTCAAAATCAGAGTAAGTTAATTAATGTTCCTGGTGTTTTA
AGTATCTTGCTATAAAATCATATTCTCCTGTTTGACTCTTACATAATCTGCTTGGAAGGTAGATTTAACG
AGGCATGAATCACCATGGGTATTTTGAATATAAAATATCAAATATTGTAAGAATGGAACCAGGGAAAGAG
GAACTAATAAAGTGGAAATTTTAACACCATTTTAGAAATGCCATCCTTCTAAACAGGAAGGCGGGGAAGA
GCTGACCTGAGCGGCAGCCTATGTGATGTGAAAGCCCACCTGATGCCCACCTGTCACCGTGGCGCTCTTA
TCAGGCAGTGACGGGAGGCAGGCTGAGGAGAACTGAGATGTGAGGCACTCAGCAGGAGCTAGCCAGTTAT
TCCCCTTCTGGTGGGGGCGGCTGAAGTATGGCTGGGTTTCGGACCACACTAGATGGTTATATCTGCATTA
AGATGCCCCAGGTCCAACTCTATGGGTAAACACAAACCAGGATGATGTCACCTCCTGAATCCCTGATCTG
CCTCCCAGAACAGACTGGGGCACTCCTACATCCAATTGGAAAATAGAGGTGGACACTAGCCATAAACCAA
TATCAGCATCCTATTCTCTCTCTCCCTTTCTACCCCCATGGCCTGACTCAAAGTCTGGGTGCCCTACTGA
GACCCTGGTGACCAGCTCTACCAGACTTCCTTACACCTAGCATGCCTTGTGGTACCTTACACCAAACACT
TGGCCATGGGTCCTCCCCGATTAAGAATACCAGGGGCCAGCAACACTACTTACAGAAAGTTAAAAAAAAA
AAAAAAACCTTAAACTAATTATCAGGGGTGGGAAAGTGGATTGCATCATCCTTTCAGTAATTGTCTGGGT
ACAATTGAGTCAGCCAAGGTTTTTAATGCTGAATCTCCAGGGTCTTCAAAATAATCTCAAGTTCCCTGTG
AATCTTCAAGATGACCATAGGGGTAGTCACAGTTCCTAGGCAACTTTGCCCAAACAAACGTTTCTAGGAG
GTACAGCTCTTGGAATGAGTGTGTTGGTGTAAGAAAGGTTAAAGAGCCATGGATCCTCCAAGTGACTATT
AGGATTGGGCTCACAGCCCTCCTCAGGGGTCCCCCACCCCACCCACCCCCCGTACTGACTTGGTTTCCCT
GTGTTAACAGCCTACCCCTGGGACAGATCCAGTTTGAAATCCATGCCCCTGGACCTCCGGCTCTTTGAAA
AACTGGATGCCTCTGCCTCACAGGTAGGAGAATTGACTCCCTTGGCTAAAGGCCCCAAAGGTGACTTGGA
GTTCCCCAAGTCAGGATAAAAGAGCCTACCTCCAAGGCCTCTCTTGATCATACACTGAGTAAACCAGATG
GATGGTCTATGGCTGTCCTTTCACAGTGTACCTTCGTTACTTTGTAATGGCTGTGATCAAATAACTGGCA
AGAGGCAAGATGATGGAGGGAGAGTTTGTTTTGGCTTACAGTTTGAGGAGGCACTGTGTCTCGGGGCAGG
GAGGGTATTGAGCGTGAGGTGACTAGACAAATTGCAACCCTAGGCAGGAAGAGAACAGACAGGAAATGGA
GCAGGCTATAAAACCTCAAGGCCTGGCCTCCAGTGATCTACTTCTTCCAGCAAGGCTCTGCCTCCTGAAG
GCTCCACAACCTTCTCAAAGAATGCCACCAGCTGGGGACCAAGTGTTTAGATACATGAGCCTATGGAGGA
CCTTACACATTTCAATACCACCAGTGTGGATGCGGAACAGGAAGCCCAAGGGTTGTGTTAAACCCATAGG
CAATGCCTTAGTTACTTTTTTCTTGCTGTGACGAAACACCATACCTTGGGGAGAATAGGGTTTATTTCAT
CTTATAACTTATAGTCCCTTATCCAAGGACATGGAGGCAGGAACTCAAAGCAAGAAGCCTAGAGATAGAA
ACTGATGCCTAGGCCATGAAGAACACTGCTTACTGGCTTGCTCCTCGTGGCTTGCTTTCCTGTAGCACTC
AGGACCACCAGCCCGGAGATGACAATACCTCCCACGTCATTCATCAGTTAAGACAATAAGACAAGCTTGT
CCGCAGGCCAATCTGGTGCGGGGTATTTCTCAATCGAGATTTCTTCTTCCCAAATGACTCTAGCTTGTGG
CAAGTTGACATAAAACTAGCCAGCGTAGATCAGGTTTAGTAAATCTTAACCATGACCACAGGCTGCTGTA
GCTACCCGAATACCTGCCTGGCTGGTCCCAGATGGGAAGAGGAAAGCTGAGGTGGCTCTAGCACCTGGGC
TTCAACTGGCCAGCACACATGCCCTGTCCAACTCCCCTAACGCCACACTATTTATCCCCCACCACCCTCT
GCCCTCCTGGGCCCCGTTCCAGCTTCCTCACTGGAGAAAGAGTAGCTGGCCAGATTTGGTGGGTGTCACA
CTCCCATCCTCCCCTGACCCCCATAGAATCTGATTTTTCTGCTCCCAGGTGACAGTCAAGAGTGGCCTGA
ATGAGCTGGTGAGTGACTTGCTCCAGGAAGCCCACAGCGATCTGGAAAGGGTCAGAGCCATCTGGATCTG
GATCTGCCACCATATAGGTATGCCACCATATAGGTATGCCACCATATAGGTATGCCACTAAGGGGGTAGC
ACCGGGGACCCTGGATGCCCCTTCCTTCAGATCCCTGCTTCTGTTGCCTCATCAGAGTGAGGAGTTAGGT
CAGGGGGACGTGCCTGAAGTAACCAAGGAAGGTAAAAGCCACCCTTCTGAACTGGGCCTTCACCCAGAAG
CTGACCTCCCTGGGTCCAGGATTCCTAGTAAGCCCCGCTCTACAGAGATGAGAACCCAGGACGGCCCATC
ACCAAGAGGGTGACCACAGACTGAGGAGGACACAGCTGTATGAACACCAGAAGGTCCTAAGACAAGTGCC
AGCTAGGGCAAGTGCTCATATTCCTGTCTCCTGCTGTCCCACCTGTGTCCCCGGCCGCTGGCTTCCACCT
ACTCCCAGGGTTCTCCAAGCCATCTTAGAAACCTGGGCCTGAGCGGCTGCCCACTGCTCTCTGAGAGACA
GTTAAGGGAATCTTGCCAGGTCCTGACAAGTCACAGGCTTCCCTTGCTGAAGCCTGCAAGTGGGGGAGAT
GGTGGCCAACTGAGTGGCGGGGTGGACCCTTGTTCCTTTGACATGAAGAACAGCCAGTGTCCCACCTGGA
TTCCCCGAGGCTCTTCTTTGTCCTCCAGGTGCAACTTAGAAAATGTAGTCACCCAAGGTCTGAACCTGAG
GGCGGGTGCCTCCTTCCCTACACCACCACCAGCTTTCTTCCCCCTCTTAGACAAGGTTTCATTAGGCAGC
CCTAGCTGGCCTGGAACTCACTATGTAGACTAGGCTGGTCTTGAATTCACAGAGATCTATCTGCCCACCT
CTACTTTCTGAGTGCTGGGATTAAAGGTGTGCGCTATGAGGACCAGGTGGTCCTCTCCGCTTTGGCCGCG
ATGTCCCTTTTGCCACCTACACAAAAGGTGACCACATCTGGCTAGGTTGGGGTCCTGTTTCTGTTCATGC
CACCATTTCCTCCTGAGCACAGCTGGGGGGTGAAGGCTATCCTATGGGCTCTGTGGCTTTCCCTTCCTCA
CTGAGCCATCCTCGTGCACCTGGGAGCCTTGCGTGCCCACAGCCGCCTCCTCTGTCCTCCAGAGTACGAC
GTTGAGGCTGCCCAGGAGAAGGACCGCCAGGCCTTCAAACCCACTGACATCCTGAGGACCCAGAAGACCA
ACTGTGATGGTTACGCCGGCCTCTTTGAAAGGATGTGCAGGTATGAAAGACAGCCTGTGATAAGCAAGAG
TCCCCGGGCTGTCACCCGACTGCCTGCTTCTTTCTTCTCTTTCGTCCCTCTGTGCCTCTGCCCCCATTGC
CAGGTCTGGAGCTTGAGTTTGCAAACTCTGCCGGGGAATCCAAGTGAGTCCTGAAAAGGTCAATTTCTCC
CTTTTTAACACCAGCGTAATTGACTTTGGACCATCTGCCGGGCTTCGCCATGCATTAACATAATGGCAGA
TGAATGCACAAAGATAATTTGGTTATAAAAGGCCCCTTTTCTGCCTTCTCCCTTCACTGTGCAGCTGAAG
GTTAAAAGAATGGCAGGCCTGGAAGCCAGAGGACAGTGGCCGCTGACGCCAAGGAGACTATGAAAGGCTG
TCCTTTGAGGAGGGAGAGGGGCCGTGCTTGGAAAGATCCATTGGTAGGAAAGCTCAGTAGCCAGGAAGTG
GTTCTCTGTGCCTTGGGGCCCCATTCTCAGAGCTATGGCACAGACACAGGCCCAAGTGGGAGAACTGGCT
GAAGTAATTCTTGGTAACATCAAGACAGTCTCAAGTCCGGGGGAGCCATACGGATGGATTTCTGAGGTCA
CCTGGGTTCTCCTAGGGAACAAGCAGGAAGTGAGTGATTGGCTATGTCCCTGAAAAGCTGTGAGTAGGTC
TCAGATACCCAGTGTCCACCTATCGGGACTGCAGGTGGCAGTTGTCAAACCACAGTAACAGATGCTCTCC
AGTCGAGCAGCTGGCATGGCTTAGCGTTGTGCTGCTGGTCCCCTGTGGCCTTGTGTGCACTTGTGTGTGC
CCTGTCTTGAGATGCACACAACCCATTCTCGGCCTGAGCTCCAGTGCCTCCCAACCCTGTATTACCGCTT
CCAGGTATAGGCAGATACCTGGTTCTGGGTCCCTCTAGCCCTCCTGCCCAACTCCCTGCTCCAAACTTCC
ACTTCCCATCTCTGGGACCCTAGCCTCAGAGACAACCTGGGCAGGATCCATGCTGGCTGACCCACTGTTC
TCCCTCCAGCAGTACCTTCTACTTCTCCAAGTTCCCAGTGACATCCCCAGCCCCAGAGCCAGGTGCCCCA
TTGTCTTTGGGCATCCCTGTCCCTGGGTTCCCAGTGTCTTTCAAAGTCCTCCAAAACTTGACCTCAGCCA
CCTGCTGGCTCTGCACCTCGAAGCAACACTCACACAACACTTCCGCTTCCGCTTCCCATGAGTGCACAGC
CCTTCCTGGCATTTCTCTAGGCCCCACCCCAGAGCCTCCTTCCTATCCTTTGACATCTGACCTTGTCTAC
TAACTTGTGTGAGTTACATTAGGTTTTCATCTTGTAGCTCTTTACTCCAGGTGATGATGAGGAATCAAAT
CCAGGGCCTTTCCCAGGGAAAACAAACAATCTACCACTAAGCCTTAGCCCTCCCATGGTGCTCCAGACAG
ACTCTAGCTCTGTAGCTCAGGCTCGCTTTGAATTCACTGTGTGGCAAGGCTGGCCTAAGTGCTGGGATTA
TGGGTATGCAACAACTGTTCTGCTAATAATTTTTTTAACTATATTATGTTTAGTTAGTTAGTTAGTTAGT
TATGCCTCTGTCTCTCTGGGGGCGGGGGAGAGGGGAGGCATATACATGTCATAGCATTCATGTGAAGGTC
AGAGGTCAACTTTCAAAAGTCAACTCTGTCTTTGTAACATGAGGGAATTGAACCAGGCTTGGTGGCAAGT
GCTTTTACCCACTAAGCCATCTTGTCAGCCCACTAATAACTTTTTTGAATTAAAAAAAAAAAAATGCTTT
CTGTAAATAGTCTCCAAAATGTACAAGACAAGGAAAACAACTAATTGGCTCTGAATCACCTAGGTAGAGT
TGAGATAGTGACGCCCACGTGCCTTCCCAGGTGATAGTGACACCCATGTCCCTTCCCAGGTGACAGTGAC
ACCCATGTGCCTTCTCTGGCTTGTTCTCAGCACAGTTCTCTCTATGTGCCTTTCTTCCTGTGTCTTAATC
CCCCGCCCCTCTTCTGCCTCTCTGAGAACATCTGGCCCAGAATTCTCCACACAGTAGACCCTCAATTGGC
ATTTACACACAGTAGGCTTTTAATAGGCATTTTCAGAATGGTGAGAAGCAAGAAGGATATGCCTGGCAGA
CGTGTGTGTTTTCTTTTGAATAACAGAACACCACCGGGTTTTCAGTGCCTGCCTGGCATCTTTCAGAATG
TGGTTGTTTTCATAGGAATTTGTAAATTTGAAAACACTTGGATTTCTTTTTCTTTTTTTCTCATGATGGG
TTTTGTTTTGAGGTTTATTTTTTTAAGAAGTATTTATTTTATTTTATATAGAGGAGTATACTGTAGCTGC
CTTCAGAAGAGGGTATCAGATCCTATTACAGATGGTTGTGAGCTACCATGTGGTTGCTGGGATTTGAACT
CAGGACTTTTGGAAGACGAGTCAGTGCTCTTAACCACTGAGGCATCTCTCCAGACCCTGGATTTTCTTTC
TAGTTGATTCATTCTTTCACAATTTCATATGCATATTATACTTTGAATGTCTCCCCCATAGTCCCCTCAC
CTCCTTCCCCTCCCACTAAACCCCTTCTTCCTAACAGACTCCCCCACTCCTATTTTCATGACTTTGGGGG
CCACTCTATTTTATTAGGGTTGTCTACAAGAGTAGGGGTTAGTTAAATAAGGGTAGCTTACCACTGAGAA
ATTTGGCTCTCCTGCCCCCCCCCCCAACAACCCTTAACTGCCTAGAACTTCCCAGAAAGGGGTGGGGCCT
CATGAGCCCCGCCCCCATCCATCCTTGATGGACTCACCAGCTCTGCCTCCTCACTGCAGGACTCCTGCAG
GTGGCAACAGTCTTGAGTCTTGCAAGCATGTCTGTATGTCTCCTGAGTCTCCCGGCTCACTGTAGATGTG
CCACAGGTACAGTCAGAAAGACCAGGGCCCCCATCCCTAACTGACCACTTATGAGTTTTGTTCATTTAGG
TAAGGCAGCTTCCTTTCAGGCCTCGGTTTCTTCATCTGTATTTTAGGGACTGTATTGCTTTCAGGGCGGA
ACAGTAGAGCATGCCACGTGGAGGTGCCGCTCAACTGACTTGGGAAATGCTATTTTTTTTTAAGACTTGC
GCCATCTTTCATAAGCATTGGAGCATTTTTGCGGAACTTTCCTACTGCCTCTGCTAGCCCACCCACATAG
ATCCAGAAAACTGACGCTTGCCTTGATTGACTCTGTCGGCTCTCTGACCTGTTCCAGATGCTTAACAATG
GCCACATCCTGCCCTGCAGCTCATCATTAAAATACACCCCCAACATTTCACATCAGTTAAAGTTAGTCTC
AACCTAGCGATGACCATGCACAAAATCCCTTGCACTGCCTGGGACACTTAACAGTAGCTCAGGGTTCGGT
GAACTCCCTTAAGTGTCGCCTTAAGGATCAGTAACCCATTCGTGCATGGCCTCCCTAAGCCCCTTGACCC
CTGGAATGGCTGCCAATCATTTGGTAAATTCATTAGTTGGTTCCTTAATAATTGCAGACACGCAATCCAC
ACCTGCTTATTGAGTCTGTGGACTGCCAGGGTGGCCTCTTAGAAAGCGCCGTCCTCGGAAGTCCTGCCTA
ATGCTCTGCTTCCTGGCCAAGGGCCTCATTAAAGACTGATTTAACAGAGCAGTTTGGTAAGGACTTAGAT
ATTCCCAGGCATTCTCTGTTTCCCCCTTTGTCTTTCCTACATTTCCGATGTGGTGTGTTTTGTTAGCTCT
CTCGTCGCCCCGTGTAATTGCTGGTCCAGTTTCTTCCCGGCTTTCTATCATTGAGCAGTAAGTCTGTCTT
CAGCCCCGATTGCCCACAGCCTTAATTGATTCTGCCTAATCTCCTTGCAGGGGCCAAGGTTAATTCCCCA
GGCACCTGCCACTGAGTCAGCCTGCAGTAAATTCTCTCCCCCACTGTAATCATGGCCCCAGTAACACCAG
CCAGCAAATTTTTCCAGAGATTTGAGGTAACCGGCGCTTTATTGCCAGTCTGAAGCTTTGGCACTGAGCA
GGCTGGTTGTCACCAATCATATGTCAGCTGCATTTCCATCCATCTTCCATGACATCTTCTAGTCCCGTGA
AGAGCAAGGACAGAGGCATGCCTGCTTGGTTAGCTGCTGGTGGCCAATGTGACCATAGTGGCCATCCAAG
CCTCTAGGGAGATTCTCCAGGAGCTGGGTGGTCTTTCTTATTTTCTTCTTTTTCAGCAGTATTGGAGACT
GAACCCAGAGTCTTATATATGCTAGCCAGCTAAGAACCCTATCACTGAGCTGCCTCTCCGTTAAGTTTTT
GAGTCAGCATCTCTCTGAGTTACCCAGGCTGATCTTCAACTCACTCGGCAACTCAGGCAGACCCTGTACT
TGTGACTTTCCTACCTCAGCCTCCAGAGTGCTAGAACTAAAGTACTCCAGAGTAGAGAGAACTAAAGGCC
TGCATCCGCCCAGAGCTGCCTTAAATAATTTAATTATTGCCAGCACTGACTTTGTCACATAAGGCCTCTG
AAAGGGACACCTAAACTCCCCCTCCACTGTGGCTACACTGGAGGAGGATACAAGCTCGAATTCTTTCTCG
GATCATCTCTTCATTTCATTGTATATCACCTACAGTCCTACATATGAAAGCAGGATGTTGGTCTGCAAAA
GTCCTGACATAGTTTGAAAGCTCTCAGACTGTGTCTCAGGACTGCTGGACCCCAGGATTGTCTTTACTTT
AGCTGGCTGTGTGTCACCAAGTCAGGTAGCCTTTCTCTCAAAGCCACAGTTAGACAGGAAACCTCTGAGA
TCATGCCTAGGAAGCCAGAGGTGGACAGGTGTGTGGCAAGGATAGAGAGATACCTAAGTTTATAAGAAAT
CAAATCCAAGTGTTGAGAGAGATGCCGCTGCTTATGCCCTGCTTAGAAATCACACGCCTTCAACAAGATA
ATGAAAGAAAAGAACGTTTCATTTAGCATGGTCAAAGGCTGCTGTGCGCAGTGTTCCTGCCTGCCCAAGC
CCCTCACCTACACTCCCAGCTTCTCACAGGCTATACCTGTATCACATAGCTCCTGTGGCAGGGCCTGGAC
CTTATCTGTATCAAACAACCATCAAGGTCTGGACTGTCAACTCCTCACTCTGTACCCAGGGGACACACCA
CAGCAAGCTGGTATGCTCAGATCTTTGATAAGTGACAAGGAAATGTGCTCATAGCTCCAGAAGCCAGCCA
AGGTCACTAGGTAATGGCACCTTCCATTTGCCCACCCCTCTACTCAGTGCATATTCATCAGGCTGCAGAG
GAAGGTCAAGTGTTCTTCAAAGCCTCAGATCATTGGTTGGGTCCCCGAGCCCCAGCCCTGGCTGGGAATG
GGCTGCTGCTTGCTCCTGATGTTCTGGGTGTCGCAAAAGGATTGCTCGTGAGTCCTGCATGCAAGCTGGC
TTTGCAATATCAGATGCACATCCTCCCTGTGCTAGTGCCCCAACAGTGGTACTGTCAGGACTCTCAGATG
GAGAAGCAGGATTCTGCAGCCTAAGGTTGTTACATAGACAGACGGCCTTGGGCTGTGTTTGGGGCTGGCT
AGCCAAGCTACTCGGCAGGTAGAAACATGTCTCACCTGAGATCCCTTCTTCAGCACTTTTTTGCCTCAGT
CTGGTGTTTCACAGATCCTCCTGCTTCGCAAGCACAAGCTCTTCTAAGGCAGCCACTGAGCCTTGTGTTG
GAACAATCTCTCACTGTGGTTCATTGTGTGTCATGTGCTGCCCCCCCCCCTTCACACACACACCCACGCC
CAGTGCCGGTTCTTGTGCTTGACACACCATTTGTACGGTCAGAGCTCTTTCAATGATGTGAAGGGGTCAC
GGATTGTGGTCTGATCAGGAACCAGAGAGGCTCGATAGATAGTTCTACAATCAGATAGATAGTTTTATGC
CTGTGAAATATTTAATTTATATAAAAACTACGGATTACTGACAACACTTTACATTGTGACTTCTGTCCAA
TTCATCTTACACATAGTTGTCAGATAATAAAATAACCCCATGTCATACTCCAGCAATGCATAAACTTACA
GCTGACTTCATTTTTCATCTTAGTTCTGCCACAGGCAATCCCCACGGCCCTTTCTCCTTCTCCTCGGTCT
GTCAGAGGAGAATTGCCCCCTGGAGATCACTTAATGCCAACCATCCTTTTTAGCCCATAATGAACCTGGC
AAGGTCACTGCAGGTGACTGGTAGAGGTAGCAATAGAGTTCTGATTTCCTGGCTGCGGTCAATGGCCACC
CATTCCAGCTTGGAGCAATATAGGTACATGTCACTCATCCTTTCTCCCTCCTATGGCTCGTTCCTGGGCT
GGGCAAGACCCTTCCCCACTTGCTTCTCCTGGGTGGAAGAATACCTCCCACTCACTGTTTAAAACAAGCT
TCCCCCAGTTGGAGGAGACACAGTCTGCCTACAGGAGAGGCCAGTTCACTCCAGCACCCAGAGAAGATGT
GGATGCTAAATGCTCCCCACTCCTTCCTTGCTCCTGATGCTCTGAGCAGAAAGCAAGCACCAGACAGCAA
TCCAGACCCCAGCGTTCCACTCACCGCTTGCCCTTCCTGCGAAGTGAGCCATTTGCAAACACAAAGGTTC
CCAGGACTTCCCTTTGCCCTCCACACCAGGCTAAAATTTACATACACAGTGTTTTCGAGCAACAATGGGG
AATAATTCACTGAAGAATATAACCTAAGTTTTCCCAATTCTATAACGAACACATAATCATATTTTAAAAT
GTTGTCGTGCTCCCTCCCCCGCCCCGCCCTGCTTCTTTTTACAGTACTGGAGAGAGAGTCTTCGCTCTTG
CATGCAAGGCAAGCACTCTGGGCCTGACCTACAGCCCCCCCCCCAAAAAAAAGTAAGATGCAGAGGAATT
TAAATAAACACACCTATAACCCCATTTCCGAGGGATCAAGAATCTCTCCCTACCCAACCCTGCCCTCGTT
CTCCATGAATATATATATTTACACTCAGAGAGACTGTCTGCCGTGGCTTCCTGCCTCAGAAAGACCTTCT
GTTCTGGGACTCATTTTGGACCGTCACCAGTAGAAAACCCTACCACCAGGGTCTAGCAACTCTTGGTGTT
TGTCAACAGAATGTCCCCAAGTGTTCCTGAAATAACTTCACAGGGCCCAGCTGCTATAATATCGTGAGAT
TCCCTAGGGAACCCTGGAGACCTAACGCCTCTTTGGCACTGCGGACAGGAGGGGAGGGATTTAATTTAAT
TGATCATATAGTTCCCAAATAAAAGACACAAAACATTTATATTTAAAACAAGCTGTAACAGCACTAGAGC
TGGGCAGATATCAGCCCTCTGTGTTATTTTGTCTACTTCCTTGTCAATAACCCAGAGATATCACTTGCTT
TGTTCCCCCTGGGCTGCTCCTACTCCAACTGGCTGGCCCTCATGGCCATGGGGTCATGATCAGCCTACCT
CATGGTATCTTCTTCCTCCTTCTCTCCTTGTGGTCTCTGCTTCAGACTCCAAGCCCAGAAACCAAAACCT
GCCTACCTCTCTTCTGCCCAGCTGCAGGCCGTAGGCGTCTTTATTGACCAATCAGGGATAACTTGGAGGG
CAATGTTACATAGCGCCAATTGGGTGTACAATGAGGATTTCCTCGTCTCTGGAGGCAACCAGACGTTGGG
GTTCAGTACTCAGCGTTACAATATGTAACAACAGACCAAACCTCAACAGGGACCATCAAATGTCACCCCC
TGAAAGGAGTCTCGGTGTGAGTCGCCTCAGCGTGGCTCTGCAGGGAAAGGAGGGCTACAGCGGATGTGGT
GACATACCACCATCGTTATCTGCATGTGATGCAATAAGAGAAATGAGAATCTCTTCATTTTCATGCTACC
ACATTTGCCCCAGTGACCCAGCAAATGACGCATAAGTGTACGTCAGTGACACTCAGTGTGGCCTTCTACT
AAATGTGAGCTAAATACCCATCTCCATGGGCAAGCCTCTCCCTACACTCACAGTCAGTATGTGATCTTCT
GACCCCATTAGTCTAAGACCCTGTTGTTTAATGGGACTGGAGATTCAGACCCAATGCATCCTGAGAGTGA
CCAGGCCCGGCTACCTGATGTGGGCCTCAGAGAGATGTTCAGGATCAGCACTGTGTGGAGGGTGGGTAGT
TGTTGAGGTGCAGATGGGGTTCCACTGACGAATCACTTTGGGAATCCAGGACTCAGTAGACTTGTGAATT
TATTATACCAGTTTTCACAAATGCAAGAAAAGTGTTGGGGCAGAGCAACTCAGCACCAGGGCCAGCAGGC
CCGGGGCCAGCAGCTCCATGTAGGTCAGACTGGTACTGTCCATTTGTCCATTGCCATGTTGGGGAAGAGC
TGCTGAAGAGAGAGGCCAGTGGGTGGTGGGGAAGGCAGGGCCCTCAGGGGACTTGCTGATTCAGCCTTTG
GAGTGTTGGCCACAGCCCAGACCTGGTTTTATGAGGTCTCTAAAAGTGACAGGCACTCCATCTCCCACAG
TTCAACTTTCCCCAAAGTGATACCTGCATTGCTGCGTGCCATGGGGATACCCTGTCAAAAAGACAAGGCC
AGCCAGTCAACGTTTCCACTCCTCGAGGAGCAGGTAGAGACTTCAAAATGGTGGCTGTCTCAGTCAGGGT
TACTATTGCTGTGATGAGACGCCATGACCAAAGCAACTTGGGGAGGAAAGAGTTTATGCAGCTTATGCTT
CCACATCACAGTTCATCATCGAAGGAAGTCAGGACAGGAATTCAAACAAGACAGGAACCTGGGAGGCAGA
AGCTGGTGCAGAGACCATGGAGGAGCCCTGCTTAGTGGCTTGCTCCTAATGGCTTGCTCAGTCTGCATTT
TATAGAACCCAAGATCACTAGCCCAGGGGTGTCGCCACCCACAATGGCCTGGGTTCTCCCCTTATTAGTC
ATTTAGTAAGAAAATGCCCTTTGATCTTGCCTACAGCCCGATCCTATGGAGGCATTTTCTCAATAGAGGC
TCCATCCTCTGATGACTCTAGCTTGTGTCAAGGTGATGCAAAACTGGCCAATGCAGAGGCCCAGGCAGGT
AGTCAAGGAAGGATATTAATGCACCATGGTGCTTTCTGTTCCTTCCTCATGGAGGCCAAAGCTGATGGTC
TGGTCTCCTGGCAGCCAGCCCATTCTCCTAGGTTGGTTCTGGACCAGTTTGCCTGCCTTCCCAAGCCCAT
GCAGAGGGGAACAGCCAGGAATCAGAGCTCAGCTACCTCCTCTCTCATCACCAGCACCTGCCGGAGGTAT
GCTGGCTTCCCCGCCTCTGTGTGCAGCTCTTTCGCATTGGTTTTCTTCCAAGAACATCTCTGTCTCCCAG
CTCCCTGCATTCTCGAGGCCGTCCTCACTCTTGTCCTGATTTTTCCTCCTGAGATGCTGTACATCGGATC
ATGGCAAGCAGGCCCTGGGGAGACACTTCAGAAGTAAGCTGAAGAGTCTCAGGGGAATAGCAAACAACAG
GGCTGCAGTCAGTCTGCACGGGCAGGGCCTGCCAGCACTCTGGATCCCTGTCCACACACCCCTAGCACTC
AAGCCCCTTCTCAGACCCATGTCCCATCCCCAGGGTTGCTGGTGTGCAGTGTGTCACCGTGCCTGGCTAC
TCCAAGGGCTTTGGCTACCAGACCGGCCAAAGCTTCTCCGGAGAGTTCGACCACGCCTGGAACGCTGTGT
ACCTTGAGGGTCGTTGGCACCTGGTGGACAGCACCTGGGGCAGCGGCCTGGTGGACACCACCACCTCCAA
ATTCACCTTCCTGTAAGTACGAAGCTCAGTTTTGTCCGTGTCTTTCCTATCTGTGTGTGGGGTGCAGACA
AGGTTGAAGAAGGGAGGCATGTGGGGGAAGGGAAGGGCCAAGTGTTAGAGGAAGACCGGACAGCCTTGCC
TAGCTACTCTCGCCTTCCCAAAAGCTGGTTCCAGGTCGCTTGCAAGGAGCTGAATTTTCTTGTCACCTCT
GCCCTCTGTGACTCCTCTGACTCTCCATGAGTCCATAAAGCTAAACCCAGGAGCCCCTCCTGTTTGCCCC
AGGTCACATATGAGGAGGGGCGAGGCTAAGGTGCCTCCTTTGTGCTCCATCTTCTCCTCCAATTCCTGTT
CTCTGAAGGAGGAAGAAGGATGCAGTTGGCAGAAAGGAGAGGTGTAGGTGGGGCTAAGCCACCTGGGTCC
TTACGGTGCAGTCTGGATCATCCTCTAAGGCTTGTTCAACCCTGAACTTAACCTTCAGCCAAGCATGGCA
TTTTCATGGGTCGTGATGTCCCTCAGCAGCCTAGATCCCCCTTTATTTGGGAAACGAACTGTTTCCTCCA
ATGTGTGCAAGTGAAACTTTGGCCCTCCACACTCACCCTACATAGAGCTGTTACCCTCAACAGTGCCCCC
CTTAGGCGGAGCAAAGCCCCCCAAGCCCAGGCTGTCTCCCTTTCCTTCTCTTTGTCTCTGTCTCTGACCA
GCCCTAAGGAGCCACAGAAGTTCCCCTGCTGCATACCCCCTTCCCCCTGGCACAGGGGCAAGAAGGGTCC
AGCGCAACTAGAACACTGTCCCCTTGCCTCCCTACCTCCCCATCCTCTCGCTGTCCACACCCGCTCTACG
GATCATGGTTTTGGTCCTTTCAAACCACTTTTGGGCATTAAACAGAGAGAAAGCTGTCCTTTCTACCTCA
CCCTATCCATAACCTCCCAAGGCTCTGCGAGCAGGCCCTGAGTTCATGCTGTGGCCTTGTCTCAGAAGGG
ACCTCAGATCCCCTGTGGCCCCAGGATCTGCACACAGCCACCCGAAGAGTCTCCAGTGCCCGCATTAGGA
CCACAGATCGTCCTGCCGACAAACTTCTGTTATCAGCAACACCCAATCCAGTGGTTGGGTCAGCTAGACA
AAGATTTCCCAAAGCTCCCCCGTGAGATACCCGGATGTGGGTGATAATGGTCAGGCCTACTCTCACACCC
GGCTCCTAACCAGGTCTTCCTCTACTCCAGCTACAATGAATTCTACTTCCTCACCCACCCCGCCCTGTTC
ATCGAGGATCACTTCCCAGACAACAAAAACTGGCAGCTGCTGAAGCCGCCCCAGTCTCTGAGGCAGTTTG
AGAACAGCATGTACCACAAGAGTGAATTCTACAACAAGGGCATGCTGAGCGCCCACCCGGAGACGTCCAT
GATCAGAACAGGTAAGGAGAAGCACAAGGCGGAGCCCCAGTGACGGCTGAAGCTCCCTTCCCACTAGAGT
AAGCCAAGAAAATCAGACCACCAAGCTTAGCTATCTTCTATGGCCTGAGCTGACACTCATCGCCCCTTGA
CACAGCATGGAAACCATGGCTGCTGGGCGTTTGCAACACTCTTAAGGGGCAAGGCCTGACCCCAGGACCA
GACCCCAGGCAGAGAGGATAAAGAAGTGTCATGGACCTCAAAGGACTCCCCCTAAAGGACTGTTTCTCAT
GCCTCTCTGGGGATCCAGAGCCTGGTCCTGCTCTTGGCGCACCACAGCAGGGGTCAGGAAGGCTGACCAG
CCCACCTCCCCCTTCTCATCAAAGCCCAACCTGACAGCACCAGCTCTGCCACCAGGAGGCCTCCACACAT
CCCAGACAGAAGGCCTGAGATCCCAGAAGCAATCAACTGGGGGGGGGGGGTGGGCATGAGGGATGATGGC
CTTGACCCCACCCCACCCCACCCCACCCCACAGGCTGATGGGATAAGGGGACAAGGCAGGGGGGTCCACG
AGGGGGCAGTCAGGAGCAGGTACCTCTTGCCCATTGCACTTCCCATGGATTCTTGATCTGGATGCAGAGC
TGCAGTGGTCTCTGGTTAGTCACAGACACGTGGCCGCTTCAGCAGCCCACAGCTGCTCACTTCAAAGATC
ATTTCCTGCACCTGAGTCTGGCAGAGGTCTGCGGTCTCTATCGTGAGACATGAAGCCACAAGAAAGACTC
GAGCAGACCACAGTGCCCTCGTGATCATACTGCTGAGTTGAGTTTGCCTTTTTTTGGGAGATGTAAAAAT
GTAAACACCAGATTTCTTAATTTATACTAACCTAAAACTCAATTCCATATTCATGCTCCTTATTGTAAGA
ATATTTCTTGGTGCCTGTGAGTTGCCTTGAGAATAGAGCTTGAAAAGAAGCAAGGGAAGGGGGCAGGGCG
TGAGGGTAGGGTGAAGAGGAAGGAGAGAGTCACAGATACAGGGAGGAGAGAAGAGGCAGAGAGAATAAAG
AAGTGCCAGCCACAGTCCTTCAGTGGCCTTTGGGGTCCCCAATAATTCACCTCTTCTAAGATGCTCAGCA
CACTTCTGCCAAATGTTCTCTAAGACAAGTGCTAAGCTCTTCCAAAGAGCCTACAGCCCAGACAAAGGCA
GAACATAGAAAAAACACTCCCATGATTCATTCTGGAAAATGGTGGGTTCTCTGGAAGAGGCCTCCAGCAT
CCCTCCAGCACCCCTCCAGCATCCATCCCTCCAGCATTCCTCCAGCACCCCTCCAGCATCCATCCCTCCA
GCATCCCTCCAGCATCCCTCCAGCATCCCTCCAGCATCCCTCCAGCATCCCTCCAGCATCCCTCCAGCAT
CCCTCCAGCATCCCACCAGCATCCCTCCAGCATCCCACCAGCATCCCTCCAGCATGTCCAGCTCACCTGA
AGGGCTGAAGCAGACTCTTTGCAGCCAGGTCTTTAGGGTGAGTCCCCACCATACATGGAATGGAGGATTA
ATAGTGGACGTGAACCAGACAGCCTTCTCCTTTGCCTTTCTCCATCCATGAGCGGGACTGGAGAAGTTAC
TGGGCAAGGGCTGGGGTGGTCAGCTTCTAACAGAAGCCATGGCCGGGCTCTCAGAGCAGACACTGCCTGG
GGAGCCAGACAAGCCCAGATAGAAAAAGCCTTCCTGAGCCAGTGAAAAGCAATGTTCCAGTAGAGGAGTA
CAGAGGCAAGGCAAGGGGGAGCTGGCAGGAGAGGGAATGGATTCAGTGGGTTCGCTGAGACCCAGGTCCA
GAAGCACAGCTCTGGCTCCCTGTGTGAGAAGCAAGTGTTGGGAGGGGAGTCCAGAAAAATACCCTGTTAA
CACTCCTGGGCTTAGACTCCTGGAGGAAAGCCCGTTCTGGTTATGGTGTGGTGTTCATATGACAGCTGTT
GATACCATAATCTTTTCAGGGGGGTGATACAAAAGTAATACTTCAGAGTTGTGGGGGGTGGGGTGGGAGG
TGGTGGATGGATAGCTCAGTGTTTAAGAGAGCTTGGAGCTCATCCAGACGACCTGAGTTCTGGTACCCAC
ATCCTTAAGTCAGCTCACAATCGCCTGTAACTCCATATTCAGGGGGATCAGTACCCTCTTCTGAACCATT
ACACACACACACACATACACACACACACATACACACACACACACACACACACACATACACACACACACAC
ACACACGCACACACAGCATTCACACAAAGACATATGTGCACACACATAAAAATAAATCTCTTTTTAAGAC
GTAAGAATTGAATGAGACAGCACTCTTCCAATACTTTTAGGCCCCTCCCTGCTCTGGAATCAAATAAAAT
ATCTAGGCAGGCTTCATCTAATGTAAAGCAAGTGGGAGAGTAGAGGAAGGGAACACATATGGCTAGGGTA
GGGTTTTCTTGCCCATCCTCCACCCCACCCCACCCTCCCCAGTTATCACAGTTATCAGCTGTCTCAAAAA
TATTCACCCAAATGAGTCAGAAGAATACCGCGTTCAGGGCTGTCACACTGTTAAAAATCAAGCTTGGTAG
AAATCTTCACAACCACGGACATAGACACACACTGTAAGTCACACCTCCCCCCCAGTGCTTAAGCATCCCC
CAGCACACACTGGATCCGGCTCACCTAACCACAACTTCCTCTCCGCAGTCAATGGGAAAGCCACAATCAC
CATCGAGAGCCGGGCCCCAACACTGTTCATGTTCATGCTCAATGGCAAGCAGGAGCACGGGCTCCTGAGC
CTCAGGAAGAACGGGATGAAGCTGGAGGTGTACCCTCCAACCATGGGCACCCACAAGCTGCAGATCTTCG
CCAAGGGCAACTCTGAAATCTACAGCTCGGTGCTAGAATACACACTCAAGTGCAACTATGTAGACTTCTC
TGTCCAGCTGCCCAGTGAGCTCCACCAGCCCGTGGGCCCCAGCTGGTTCTCGGAGCAGATGGGCATCACG
AAGCCCTCTCACTCTGACCCTATCATTCACACCAGCGATGGCCGCTGCGCCATCAGCTTTAGCGTGGAAG
AGGGCGTCAGTGTCCTGGCATCCCTTCATGGCGATGACGGCCCCATCACTGAGGAGACACAGCGGCGCTA
CATCTTCCAGTTGAACCGAGGGAAGAGGACCGAGCTCAAAGTCCAGCTGCCCCATGCCGGCAAGTTTGCC
CTTAAGATCTTTGTGAAGAAGAGGCAGGAACAAGGGAACTTCATCTTTGTCTTCAACTACCTCTTGTGCT
GCGCCAACACCAAGGTGAACTGGCCCATGTTCCCTGAGAGCTTTGGCAACTGGGGACAGGACAATGAACT
GCTAGAGCCTCTCTCCGGTGTGCTTCCCGCCAACCGCAACATAGCCTTCAAACTAAAGCTGCATGGTATC
GCCAAAGCTCTGGTGAAAGGACAGGACACGTGGCCCCTCACTCTTAACCCCGAGGGCTACTGGGAGGGCA
GCTGCAACACAGCTGGCTGCCAGGAAGTCTACGTCATGGTGCTAGAGAATGCTAACCACAACTTCTACAG
CTACATCCTGAAATACAAAGTGAATGACCAGTGAGGGGCTGCATTTCTTCACGGTCCCCCAGGGTTAAGG
CCAGCCCTGCCCAGGGAGGGCCCAAGCTAAGAGCAGAGAGCCCAGGACACCACTAATCTGCATGAAACCA
CTTCTAGGCCTCTGCTTCAGTCCCCTCTGCCTCAATCTCCCTGCTGTGTCACAGGCACTGAGGAATTTGT
GCCGCCAAAGGCTCACTCAATGTGGCTGTGGAAGAAGAGACAGAGGCCAGGGCCCTCTAGAAGAAAAAGG
TGCTATGTAAATCCAAGGTATTGTGAAACGTACACCCCTGCCTGTGCCTGCTCTTGTGTTAGGACTTTGT
TGCTGTAGAGCTGAATGGGAAAGCGGAGGTGTTGCGGGTGCTGAAAGCTTTCCCCACGATGCCTGCCTGG
TGCTTGAGGCTGAATCTATGAGAAAGGTGTGCTCCCCCTGCAAGTAACATGGTGTTTCTCCCCACTACTT
CTGGACCCCAGGGAATGTCGGGCCTGCCCATCTTCCACATTCCTAGTGCTCCTATTAGCTACTTCATGCT
CTTCAAGAGCTTGCAAAGGGGGTGGGTGTAGAAAGCAAACCAGCTGACCCTCAGCCAACTGGAGGCTGCT
GTCTCCTGATGCCTAGCATCTCTGAGATGTGCTAAGGGCAGGAAAGCAGCCGTGTGCACATTCGGATGTC
CTGGCTGGGGACCAGGGATGGAGTGGGTTTGCAGGTCCAGCAACCCACATGGAAGGGTGAAGACCCCGAT
TCTATGTGCCTACCAGAGTTTAGCTGAGGGCCTGGAGATTGCCCCACCCCACCCCCCACCAGCCATCCTC
AGGAGCCTCAAATGCCTACATAGCCCACTGGTAGCCTGGCTGATGACCTGGGCCCTGGGCAAGCAGATTA
GCCCCAGCAGTTATCAGATACCAGGGATAGTGTCTGATAACAAGATGTTGCTCCTTCCTTACAAGCCAAA
CCAAGCTGAGGGGACCACCACCTGCCCCCTAGAGAAAGTGTTGGTCTCTGTCTCTGAGGAAAGCCCTATC
ATAGCCATTTTCCCTCCTGTCTTTCTCTGAGATGACAACCCCTGCCCTGAGTTCAACCTTCCTTCCATTG
GGAACAGTTGAGGGCCTCTTACTTGCTCCGGCCTGTCCTAAAAAGCCTGAGCTGCCTAGCTGGCCCTCAG
CAGCACCTGAGGCTGGTGTTTCCATGGCAACAGCTGAGGGGGGAAAAGCAGGCTGCTGCAAACAGGGAAG
GCCTGAGGAGAGCCCCCCGACAAGAGGTTCCTGCAGTAGCATCCCAGTGCACAGATGTGCTCCAGGAGGG
TCCCTACCAAATTTCAGGGTTCTAGGACTCTGCTCACTGTGCCTGTCTCAGGACCACCCCCCCCCCCAAT
CCCTCACTGCTCTCTAAGGAATGTCCTCAGGCTCAGCTGCCGCCAGAGCCAGCCTGGGATACTCACAGCC
TCTACAGTCAAGTCTTTCCTCAGTAAGAGCCCATCAGACTCCTTCGATAAGTGGCTGACCCCTCATGCTA
GATCCTGGGACTATAGAGGTGAACACAAAGGACTCAGCCATAGGCACCCGCATCTCTGGGTGGGCAGTCT
GCCAAGTGGAACCTATCTGAAGACCTAGGAGCCCAGAACTTCAGCTCTTCATTCCCTTCTGCCCCTTTCC
CACAGGTCCCCACTGCTACCCACCTGATACCACATAGCCCCCCTCCACCAGACTGGGTAGCCTCACTTGT
GATTAGCATGGCTGCTAGGGGCTGAGCTGCCTTGGCTCATGTCCAGGGTCCTCTGGCAGTCTCAGCCCAT
CAGCATCTTGTCACTCACGCCTGGAAAACGCACCAAAGTGGGGTGGGGTGGGGTGGGAGGTGGCGTTGTC
TCCACTACAAGAAGACGGTGGAGTTTGCACTGCCTGGAAACAGCCTTTCCTCACCCCTTTTATTTTATGA
GCAGTAAGAACTGTGCTATGTTTTAACGAAATAGTAAGTGCTTCGGCGGTCCCTGCCACTCGCTAGACAC
AGCCGCGACAGCCACTGCTAGCCCTGCAGAAAATGATCCCCATGTTTTTTTCAAAACAGCATAATTAATC
TATTCTGGAGCTTGTGGAGGATGCTACCCCACAAAACAGGAGCTGTCCTCAGCACCAGAGACCCAGACCG
AGCCTCTCCCAGCGGCCCGGGTCAACCACACGCTCCGCCCTCCTCATATAACCAGGTAGTCCCTTTGTCA
AGGCAACTGTAGGTGCACTCGGAAAAACGCCTGCGTTTCTTTTTACTGAAGCAAAGATACACGAAACCGA
ATCCAATCTTCATGAATTTTTACACGCATGCTGCTCAGCCTGAAAATTTGGAGGCTGCGTTTTGAAGGCT
TTTTATTCAAATCCCCCTCTTTGTCTGCTGGTCCACGAGTCTCATTGGCCGATCAAATGGCACGAGCGCC
CCCTGGTGGATCACGTGCGAAGTTGCCACCGCTGCAAACCCCCAAGCTGGCTCTTTTTATGATGTTTGTT
AAAAATCACTAGGTGCTTTCTCGTCCCTTGCGGACAAGTTATGCTGTCTACGGCATCCACATCGTGGATA
GTTATCCTCGTGGTTGATATGCCAATGTCAGCGTTGTCTTGCAGACTGTCAGAAGAGCCTGGGGAGACTT
CCCTGGCCTGGCGTGGTGAGAAGATAGGATGGGATTAAGAATTGAGCATCTTGCCCAGAAAGCTTTTCCT
GAGACAGAAACCCTGGGCACAGGAATGCCTGTCTGGGGTCGCTGTGATCACACTCATTACTATGGCAATG
ACAGGCTGAAACTGATCAAACTCAGCGTTTTGCCAGGCAGGCCCCAGGATGGGCGCCAGGGTGCAGAAGG
ATGGGGCGTGGTGAGGCAAAAGGGTGCAATTAAGCTCTTTCAGCTTGCTTCAAAAGTGCCACCAGCTCAG
CTGGACTGTTCTCTGTCTGATTGTGAATATTTTGAGTTCTCCATATGTTACATTGTCCCACGAGGACGGA
CTCCTCCCGGCCCACAGAGATTAAAGAGACGTAAATAGATTAACTGAAGCATGAAGGATTTGAGCTAGAT
ATAAAGAACCATTTCCTGTTGTGAAGCAGGAGGGACACGTTGCCAATAAACTCTCGGCGAAATTCTCAAA
GGACTTGAAAAGGAGAAAAGTTCCCGCAGTGGTCCGGCATTTTCTTTGCCGTGCTTACTGAAGCGGTTGG
GTTCTCCCTCCGCTAACTCGTAACTCTTAAACAGTACTGGTTGGCCGGCAGTAAACACCAGGTTAATGGT
GTGACCATATAGCTCACTGTTGTGGGATTTCAAAGGCCGTTTATCTGAGGTCTGCCATTTCCTTTCATCT
GGAGTAAGTAAAGCCGCAGAGGTGACTATTTCTCCCCGTGTGTGCTGAGTAGTGTGGGCCACTGGCTGTT
AAAGATGCTGTCCTCACATTGTTGCTGGGGTTCTTTTTCAATAAAATTTATATTCATTTTTA

[0099] Cep63, Centrosomal protein of 63 kDa, is a protein that is required for normal spindle assembly. Cep63 plays a role in the DNA damage response. Following DNA double strand breaks, Cep63 is delocalized from centrosomes, leading to inactivation of spindle assembly and delay of mitotic progression. The cDNA sequence of Cep63 in Mus musculus is provided in GenBank Accession No. BC048718.1 (GI:28913748), incorporated herein by reference. The amino acid sequence of Cep63 in Mus musculus is provided in GenBank Accession No. AAH48718.1 (GI:28913749), incorporated herein by reference. The cDNA sequence of Cep63 in Homo sapiens is provided in GenBank Accession No. BC014050.2 (GI:33878420), incorporated herein by reference. The amino acid sequence of Cep63 in Homo sapiens is provided in GenBank Accession No. AAH14050.1 (GI:15559363), incorporated herein by reference.

[0100] An exemplary DNA sequence of the Cep63 gene in the Mus musculus strain C57BL/6J chromosome 9, GRCm38.p1 C57BL/6J is provided directly below.

NC_000075.6 (GI: 372099101: c102626124-102586578):
(SEQ ID NO: 2)
AACCGACCGCATGCCCCAAAGACGGGCGAGCTGCGGCTAACTGTGGTGCGGTCTCGGCCCTGGCCACGGTGG
TGCCGCTAGGCTCCAGGCCTCATGGCCCGCGGCCGCAGCTCGTTGCGGCCCACCTGCCGCGGGGCTTTCCAA
TGCCGGGTTGCGGCTGCCCGGTCGTCGCGCCCCTGGGTTCCTCCTCCTCCCTATGGGACTCTGGGCTGGCCG
GCCAGGTGCTTCGGCCTGCGGGAGGGCGGGCTGCGGGCTGTGGGCTGCATGGCTCCCGGGAAGGGACCCGGC
TGCTGCTGCTGCCGCCGGTGTAGGACCAGGCCTTAGCGTTAGCCGCCCAGCGGGAAGCCCGCAGGGTTCCTT
GGTGATGTTAGTATGAGAGGTGCGGAAATGTGGCGGGAACCCCTGATGGCAGGGGAATTGCAGATGGCTTCA
CGCTTTCAAGTCAAGCATAGGAAACAAGATTGGTGGAGTGAAAGTTTGGAAAGGGGAATTCCACAACAGCGC
TTTCACGCGGAGACACTTGACAGTGAATGGGCTTTTGTCCTTTACAAAATCGTGGAGTTAGTGCATTCTGAT
GTCAGACCTAGTTTTCATTTACAGACTGTAGACTTGTTGCCAAAAGTGCTCCCCATTCTCCCCAACTAGCGC
TGGCTCTCCTTTGTAGCTATGATCTGGAACTTGCAGTGTAGACCAGGCTGGCCTCAAACTCAGAGATGGGCC
TACCTATGTCTCCTAATTAAGGATCCGCGCCACCTCGCCTGGCTTTCTTGAGGCCAATTTAGAGTTTCAAAA
ATGTATTACTTTATTATAGCTCTTTGTACAACTCGAATATTTGTATTTTATATTTTGTATGTAAGTCAGAGA
TCAATGGCTATAGTTATCTTTAGCTTTTTACACTTTTTTTTTTTGTTTTGTTTTTCGAGACAGGGTTTCTCT
GTGTAGCCCTGGCTGTTCTGGAACTCACTCTGTAGACCAGGCTGTCCTCGAACTCAGAAATCCGCCTGCCTC
TGCCTCCCGAGTGCTGGGATTAAAGGCGTGCGCCACCACGCCCGGCTTTTACACTTATTCTTAAAGGCTGCA
GCTTAACGATATGATGAAACGAATTATCTTATTTGGAATGCAGCGCCATTTTTAGGTTAATTTTTGTCCCGT
GCTCTCTGTCTTTTACTGTGTCGTCCTCAGTGGTCAGTATAGTAAAGGAGGCTGCGAAACTAAAGAGGGTTA
GAGACTTAAACCACAGACACATGTCCCTTTAAAATGTGTATATGCTGAAGTTTCAGAAACAATGGAGATATT
GTTAATCATGCTGCTGCTGCTTCCTCCCGTGGAGCGGTAGGGACCGGTTACTTAGGCTTTCCTGTACTGTGT
GGTGGCTGATGGTGACAGCATTAGTCCACACTGTCATAGCTTAAGGTGCTCCCCATGCCAAAGGCTAGAGTT
GCTTTTTTAAGTTTTACAAAAACCACAGTACTATTTTTACATCAGTACAAATTTATAAAAAGCACACAGTGT
CAGTGTCCGGTGAGTTCAGGTTCTTCAGCTATTCCATATGTGCTTGTAATACCAAAGTTGTAGACTTGTAGA
CCAAAGTCCTACAGAGAACTGTCAGCTGCATTCGGTTGCTAGGCCTTCAAAACCCTCTAATCAATAATCAAA
ACCCTCAATTTCTTTCTTTCATATATATACATATATATTATATACATGTATTATATGTGTATATATGATATT
TTCTTTATTTACATTTCAAATGTTATCCCCTTTCCTAGTTTCCCCTCTGAAAATCCCCTATTTCTCCCCCCC
CCCCAAGCAGGTTCTTACCTCCCGTTTCTTTATCACTCAGGTTTAGCTGGTTGTATATATTTTTGAATTTAT
GCCTCTACCTCTTCTATGACCTCTCCTTCACTGGCTAAATCTTGAACTACACTATCCAGTGTGGCAGTCATC
AGCCAGCCCTGACATTTTAAATGAACTGTTTGGTTCCCCAGATGCATTAGCCACATTGGAAATGCCCAGCAC
ACACAGGCTGCCTAGTGGCTATTGTCTGATTAATACTGATAAGATGTTTCCATAATTACAGAAAGTTCTGTT
GCAATACAATGATCTTTTGAAATACAGTGTTAGATTCAGCCTTGATTTTTGATGGCAGGTACAAGAAAACTC
AAAGGTATAGGTTTTATATTATAAAAATTATCTGTTGCGTTCATTGTCAGGGAGACTTGTAATGTCTGAGTC
ACCCCACTAGGGATGTTAGAATTAAGCTGTGTATGTCGGGGTTCCTGTGCTGTTTGCTCAGTTGAGCCACCA
TGAAATTGCCCAAGAGCCTTTGGTCAATAGGGAGCTCTTCATGGCTAATAGTGCCTGGGCCGATTACTGAGT
GAGAGCCACCGTGGTGCTTTCTAGTGGCGTCATGTGCCCAGTGCTGCTTAGCTGGCACTCTTATGATGAACT
TGCCTTCCGCAGCTGACTATCCTGAAGTACAGTTTGTACAGGAATGGCAAGCAAAATGCTTAACTCCGTTCC
TTTCTTTTCAGACTACAGCAATGAATTGGTGGCCTAGCAACCTCCAAAGGTAACCCAAGGGCTCCACCTTAA
AACAAACAGATAGACTTGAATGTGTTTAAATCTGTGACGTAGCAACCTCCAAAAGTAACCCAAGGGCTTTAT
CTTAAAAACCAACCAACCAACCAACCAATAGGCTTCTATGTGTTTACATTGTTTGAACATATAACAATTTTT
TAAAAAGATTTATTTATTATATGTAAGTACACTGTAGCTGTCTTCAGACACTACAGAAGAGGGCATCAGATC
TCATCACAGATGGCTGTGAGCCACCATGTGGTTGCTGGAAATTGAACTCACGACCTTCAGAAGAGCAGTCAG
CACTCTTAATCGCTGAGCCATCTCTCCAGCCCCAACATTTTTTTGATACCTGAAATTGTATCATTTCCTCCT
AGTTTTGCTTTAGCTGGGTTTTTTTGTAGTCAAGGATGACCTTGAACTTAAGATCTTCCTGCTTCACCTCCC
CAGTGCTAGGATCCCGGTCAGTGCTGCTGCTTTCCTCTCTGTGTGGTAGTTAGAAAGCACTGTCATCGTCCC
TGTAAAAGAGCAAACCTGCTCTGTAGAAAGTTAGCTTTATCCCTGACTCCCCCACCTGATCACTTCCCTCCG
TAAAGGCAGTAGTTCTCAGTTTGTTCTTCAGTAAATAAGCACCCAAAGGCGAACACACTTCTTCTTCTTGCT
TTGTAGCTGTTTTCACCTTATCACAGGCCCCTCCACAGATGTATGCTCTTTTGACAGCTTCCTAGTATTCCC
TCAGTGAATGAGGGCCCTGTTGGCCCTATGTTAGTATTTGACCTTAGTGCTAAGCGGTGGCAGATCATCAAA
CACTTTTTGCTTAAGTCTGTATTGAGTATTAGGAACACAGAATTCTCAGCCACAGTCACGTGGCACCATCAA
AGAGGAAACAAGACTTATTGAGTAAATGCAGGCCATGTTGGTTAGGGACAGAGTCACTGATGTGGCTGTGAT
AAATATCTACAGGAAATCTCAGTCCTCCCTGTGTATTGGATCCTAGAGAAGGGTAGAGTGTTTAAGTTAAAG
AAACACACTCCACATTAGCCGACGTTTTTCAAGGCATGTTACTGGTCATCTGTGCCTGTTTTAAACTAGAAT
TCCTTTGTCTCAATACTAGGATTTAAGTTTTGAGCTTTTCTTATAGCTGAGTAGTTTTATCACAGTGCTGCT
GCCACCTAGTGGTGATTAGGCAATATGCTTCAGCTTTATTCTGTTGCCCTCTGAGATCCTGTTAACCATAAG
AAGGCAGTGTTAACCAAAAGATGGCACATTGCTTGGGTCTGGAGGGTCACATTATCTGGGTTTGAACTTAAG
GAATATAACCTATAGCTTTTTATAATCAAGCCGTTCTCCCTGTTTCATCAAAGGGGTAGCACCTGCCTTTTA
CAAGGAAGATAGAACGTGTAAGAGGCAGGTAGATAAAGTGAACATTCACTAAAGTTTAGCATATATTATACA
CGTTGTTAGTTATTAAATAGTGTCATACATAAATGCCAAGAAATTATATATTATTAAATAATCACTGTTTAA
GAATGGCATGACCTGCTGGGCGGTGGTGGCGCACGCCTTTAATCCCAGCACTTGGGAGGCAGAGAGGCAGGT
GGGTTTCTGAGTTCGAGGCCAGCCTGATCTACAGAGTGAGTTCCAGGACAGCCAGGGCTACACAAAGAAACT
CTATCTCAAAAAAAAAACCAAAAAACAAAAAACAAAAAAGGCATGACCTAAAGAGGTGTATTTTTAGTAGGA
ATTATTTTGAGAAATAATTATAAAAAAGATGAAATAAAGACCTTGGCAGTTACTATTCATACCCTTCATTTT
GCAGATGGAAAAGCCGAAGTTCGAGGACACAGAGCTGGTTAGTTGCAGAGCAGAATTGTTTTCTGGGCGTCT
GTCTAGTGTTGGCTCAACTGCTTCCCAGTTCTGGAGCAGAGCAAAGGCTGGGTTGGGTTGCTCTGTAATTTG
ACCCTTACTGTGGTTTAGAAGGAAGTGTAGTAAAACGTGGAGTCCTCTCCGTTAGGATTTTACTCTGGGTCA
TGGTGAGCTCTATCAGGAACACTGGTTGGAGGAAAGAGCCTTAGCCACCCTGTGCAAGAAGAGCCAGCAGTC
CTTGCTAGGACATGTAGAGATAGGTGCAGTTACAACACACTAGCTGTCCCTCTGGTCTTCTCAGCCTTTCTG
TGTCTCTAGAATCATCTGTGTGTCTTCTGTCTGTGCATTCATTGCCAGGGGATGTTGACCATTTTGTTTCTT
TTTTAGTCCCACATTGGGCTATTTCTTGGTAAGGAGTATGTCTTTTATTATTATGTAGAGGGCTGTTTGTAC
AACACTAAACTGTTCAATAAGGTAATCTACTTCTCAGAGAAGTAGATTACTTCTGGAAAAGCATTAGGACAG
AGGGACCCAATCTCTACATCGCAACTTTTGGCCTTGTCTTTAATTCAGAATTAAATTGAAACTTTGAAAACT
GAGGAAAAAGGACTGTTTCTTTTTTCTTTTTAAATTTTATTTTATGTACATGAGAGTTTTGCTTACATGTTT
ATCTCTGCACTATAAACGTAACTTGTGATCCCCTGAAACTAAGTTTATGGAGAGTTATGAGCTGTCATATGG
CTCCAACAAGGTCCTATCTCCCAATAGTGCTACTCTACATGGACCAAGCATTCAAACACATGAGTCTCTG
GGGGCCAAACCTATTCAAACAACCACAATACTTTACTTTATGGAATTGTAATTTCTATGTTTAATATTCC
TTTTATATTTCAATATTTTTATAGATTTAGAACTTAGAATCAGAGGACCACACAGATACTGCCTCTCCTC
CAGCCTCTCTACTGCTACCATTTCTTCTAGCTCCCGCACATTCTTTTTTTTTTTTTTTTTTTTTTCAAGA
CAGGGTTTCTCTGTGTAGCCCTGGCTGTCCTGGAACTCACTTTGTAGGCCAGGCTGGCCTCGAACTCAGA
AATCCGCCTGCCTCTGCCTCCCAAGTGCTGGGATTAAAGGCGTGCGCCGCCACCACCCGGCGCTCCCACA
CATTCTTATCACCAGCCTACACCACCAACCATGAGCACAGAGCCTCGGTAGCCATCCTCTGGTCCAGGTT
ACTTCACTGACTCTGGATTCAGATCGTTGTTATCTTTAAAATCCTTGTCATCATAACCTTTGAGAGTTTC
ATCCACAGACATAGTGCTGATCACGCTCTGGCCTTGGAGTTTCCTGGAGTCCTTTCTTCGTAGCTATTTT
GATCTCCTTGTGTCATCCACTTACTCCTGTTGACATTCCTCAGTTCTTACCTTTATGAAATTGCTTTCAG
TAAGATAGTCAACCCATGAGCATGACAAGCCTTGCCGTCCTTGGTGTCTTCTTTCATTTCTTTCTTTAAT
GTTTTAAAGTTTTCATTGAAGAGATTACTTCCCTAGTTATGTTATTTCACACGTGTGTGTGTGTTGTGTA
TATATGTATGTATGTGTATAAATATATGTGTGTGTGTGTGTGTTTATTTAATTCTGCAGTATTTTAAAGT
TGTTATGAATGAGATTGCTCTCCTGAGTTCTTTCTCAGGGTGTCTGTTATTGGTTATGGAAAAGCTACTG
AGTTTTGATGTGGGTTTTATGTCTTGCTCCTTTTCCGAAGGTGTTTATCAGTTCTAGAAGCTGTTGAGTG
ATGGTATTCAGAGTCTCATGTATGAACCATTTTGTGTAAAGAAAGGATCATTTAGCTTCTTTAGCTGTAT
CCCTTTTCTTTCCTTTTTGGCTTTCTGTTCTAAGACTCCAAACTTGAGTAACAGTGGAAAAAGTGTTTGC
CTTTGTCTGTCATTCCTCCTTTTAGTGGCAGTGCTCTGGGCTTCTCCCCATTTAGTGTGTTGATTATAGG
CTTGCCATATATGTCCTTAATTATGTTGAGCTGTACTTCTTTGTGTTTGTTTGGCTTTTTGAGACAGGGT
TTCTCTGTATAGTCCTGCCTATCCTGGAAGGTACTCTGTAGACCAGGCTGGCCTTGAACTCAGAGATCTG
CTCGCCTCTGCCTCCTAAGTGCTGGGATTAAAGATGAGCACCACTGCCACCTGGCTGACATATAGCCTTT
TTAAAATTGATTCTTTGTGAATTTCACATCTGCACCCCAATCCCACTCATCTCCCCATCCCTTCCTCCCC
CCCCCCAGTGCCAAGAGGAAACAAAAATAAAACCAACAAAACAAAAAACCCCAAACCTCTCCCTGTGGGA
GAGGCAGTGTGCCATATAGTATCCCCTTTTGTCCAAACAGCTACACTTGCAAATGTTCATTGGAGTGAGT
CATTGGTCCAGTTTGAGCCCCCTGGCTTATGCTACACTATCAATACTGGATTGTCAATTGGACTTGTCTC
AGATATCCTGTTGTTACTCTGTGTCATGGAGATGTCCAGCCTTGAATCTGTAGGACCAGGCCCCTTCATG
GGTTACAGCAGTTCACAGATGGGATAGATGTTGGGGTTGGCCAACTCAGAGCCTTGGATCTGGGCCTGGT
ATATGGTCAGCCTGCCAGCTTTCCTGTGCCCGCACCACCAGGGCCAGCGCTCCTACTTTACTCAGGTGAT
TTGGCAGCTGGCAAGGGGTGGGATTGGCTGTCCTGCACTCATGCCATTGGAATCTACACCCGTGCCACCA
GGGCCAGCTCTCCAGCATTGTCCTGTGAGGGGTAGGTCCAGCTTACTCTAGTGTGTAGCTGGTGATGGGT
GGAGATATGAACTAACTTTATTGTTAGTTTTTTCAAGGCTATTGGATTATATCAGAAGTCTTTTCCGCAT
TAACTAAGAGGATCATGTGATTTCTGTTCTATTAATATGATAAATGATATTTGCTAATATATAGTATATA
TCATAATTTGATAACATTAATATGTATGTTGAACCATCCTTGTATCATTGTAATGTTACGTGTTTGGTCA
TAGTGGATGATCTGTTCTTTCCCTCTAAGGCAATATTTGTCTTTACCTGTAAGGTATGTTTCTTGCAAGT
AACAAATAGATTGATCCTTTGTTTGTTTGTTTTGTTAAGATTTATTTATTTATTTTATATATGTGAGTAC
ACTGTTACTCTCTTCAGACATACCAGATGAGGGCATCCAACTCCATTACAGATGTGGAATAACACTGACT
GCTCTTCTAGCACATCTGGAAGAGCAGTCAGTGTTATTAACCACTGAGCCATCTCTCCAGCCCCTGATTC
TTCTGTCACTACCTCCTCAGCACTGGAATTTCAGATGTCTGCTGCCATGCCTAGAATTCTCTAGTGAGCT
GGCCTATATGCTTACATGCCAAGCATTGTTCACATACCGTGTCATCTTAGTAGCTCTTAGATTGGGCCTT
TTAACAATGTCCTGTGGATCTTGTCATTTCCCTTCATATTTTCTTATTACCTTTGTCATTGTCTTCATGT
TCTAATTCATATACCTTGTCTTTAGGCCCTGAAACTCTGCTTTCTATTTGGAGAGGCTTTCCATTGAGCT
TTTAGTTGACTCAATGAGATTTTTATTTACAAAATTTCCATTTGATTTTTTTCAGTATTTCTGTCTCTAT
TGAATGCCTCATTCATAGCCTGTATTGACTTCTTACTTCATGCAGATGCTTGTTGGCTTCCTTGTTGAAT
TCCTTCAAAAGTCTGTTTATGTTGTTTGATTTCATTGAACGTTCTTACTCATTCATTCATTCATTCATTC
ATTCATTCATTCAGTGTGCATGTCATGTCTATCACCTCCACTTGAATGGGGCTGGGTTTCAGTTTATTCT
TATTAAATGCTATTCCTGAGTCAGTGCTGGCACATGTCATATAGACAGACAGACTGTGAGTGAAGGGACT
ATCAGAAAGCTGACTTCTCACTTAGCTAAGGAGCTCTGGAGCTCGAGATCCCTGGCGGACAAAGATGGGG
AGGCTGAGGATCTTTCCCTTTGAGTTGCTTTATTTTCAGAAAAGTTGGGCCCATTTTCATGACGTAGAGT
TTGAAATTGCTGTTGATTACCTATTATTTTTGAATTATTTGACTCTGGATTATAAGTACCTGATAAAATG
TGATGCATATTTTCCATATTATTCAAGCTTTTGCAATTCTACGAAATAAAAAATTTTGACTATCAAAGAT
ACTATTATTGGCAGGATAGGAAGTGAGAATCAGGCTGCTGAGTTACTGGTTTAGAAATCTGTTCCAATCT
ATTCAGTTTCTGGGTCTGAATGTTAGAAATTTAGATGGCAAAGGGAATATTATTATTTTAGCGTCACTTT
TCTAAAAATACAAAATGGTAACAGCCCATAGGTGGCAGCAGATCTGCAATAATGCTCTTGAGCCCACTGT
CATGGCCGTTTCTTCCTCTTCACCACTAAGTGTTACATTTAGAAAGACAGACATGTAGAGGCACAGTGTG
AGCAGGATCCAGTCCTCCTTTGCAGCGTGAGTAATGGGGCTCCTGCTGAGAGAAGGGCGCCCAGGGAGCA
GGGCGCTGTGCAAGCCTCACAGCCTGGGAGCACTTAGATGTTAAGTACTTCACTTGCCTCCCCAGGAATT
CCGACAGAAGTCTCTGGACTGGGAGAAGCAGCGTCTGATTTATCAGCAACAGGTATCTTCTCTGGAAGCA
CAGAGGAAGGCTCTGGCTGAACAGTCGGAGATAATCCAGGTAGGCTTAAGCTGTCCGATGCATGGCTATT
GACCGAATCGGACTTACTGCCATGCTCTTTCTGTCTTACTTGGATTCTCTCTGTAGTCTTTGTGTGGTAA
GCCTGCCTTCCTCTACTTGTGGCTTAGCCTCTTCAGCATCTAAAACACTCTAAAACACTTCAGTTTTTTC
TTTCTTTTTTCTCTCTTTCTTTCTCTCTTTTCTTTCTCTCTCTCTCTCTCTCTTTCTTTCTTTCTTTCCT
TTTGGTTTTTCGAGACAGGGTTTCTCTGTGTAGCCCTGACTGTCCTGGAACTCACTTTGTAGACCAGGCT
GGCCTCCAACTCAGAAATCCGCCTGCCTCTGCCTCCCAAGTGCTGGGATTAAAGGCGTGCACCACCACTG
CCCGGTGAGTTTTTGTTTATTCAATCCTCATTTTATTCATGTTTATTGACTATTATCTTTAAGTCACTGC
TATCAATTTACTATTGTGGTTAATTCCATATAATGCAAACTTCACTGTTAGTAAAAGTGGAGTTGTTATT
TACCAGGCAGTCAACTAGAGATAGAATAAGATACCTTGAAAGAACTGACATCTGTTGTGCCCACTAAGGG
TATTTGAATAATCCTTCTCATAGTTTTATTTAACATAAAGTTATCTGATTAGTTAAAAGTATTAGGTATA
AATGTCTTTCTCTTTTTCCTTGGCAAACTAACCAAGAATGAAAGCTTCCTTTAACTCAGTTTGTGTCCAT
CAATGCTGTGTTGTTATCTTTACTAAACACTTATTAAATCTCTGTGTGCCCATTACTTAGTGTTAATGAT
TGTCATCATCTTGCCAATCTTGTATGTAAATGAGCATTAGAAATTCATAACAGAAATTATACCTCATCTT
CTTTTCGTGTGGTATTGAACCCATGGCTTCACTTATTCTTGGCGAATACTGTACCAGTGAGCTAAATCTT
GTGCCACCCTGACTGGCTTTCTGAGCGCAGTAGTGTTGACAACATGTGCACATTGTTTTGTGCAGCTGTT
CTTTGAGACTTCTTCCTTTTTTGTTTTAAAGAGGGACATGGCATTAAAAAAATAAAAGATTGATTTTCTT
TGTATTGGTATTTTTCCTTGATGTATATATGTGACCACTGTTACACAGTGCCACAGTGCCCGAACAGGGC
ATTGATTCTGGACTGGAGGCATAGATCAGTGTGAGGTACAGGGTGAATGCTGGGAATTGAACTCTGGAAG
AGTAGCCTATGGCGTTCTTATCCAGCCCACTTCTTTCATCTTGGAAAGCTAAAACTGGGTACACTTTTAC
TCTTTATTTTTTGCTATTAAAATGTTACAAAGCAAATCATGGCATCAACTCATTTTTGAACAGGCAAGGA
CTTAAAATCCCTATAATATGATAGGGTAACATCAATAGGATAAATAATAGTAATATAACTTAGTATTCAG
TCTGCAGTTTTATCCAGTTGTCTAAAAACTACTCTTTCACAGTGGCTGTTTGAGGCAGAATCCAGTTAAG
CTTGACTAATTGCATTTAATTGATATGTGGGACAGCAGAAAATCCGAGAGTCTGGGTAAATGTTATGAGA
AAAAACTGAAAAAAACTCTTTCATATTTTTAACATTGAAGAAGATTCAAAAACAGCTTCACGCACTTTGA
GTCATGTATTTGGATTCATCTATGCAGCTATTAGAGTTTTATACTCCATGCTTGTTTTAGGGAAAAAAAA
AAAAACAAAAAAACCCGAGAACATCCTTTGTCTGGCTTTTCTTTTTCTTTTTTCTTTTCTTAATGTAGTT
TTGGAGCTTCAAGGAAACCATTGTCACAAATAGATTGCTTAAGAACAGTGGGGTTGGAGGCAGCAAAGGC
TTTGATTTTCCACTGCAGCACGAGTACCTGTCTGCCCATCTGGGTCGCCTTCAGATGCGGCCACGCAGGC
CATAGCATCCCTGTAGGCAGCAGCCTGAGGATCCCACAAGGCTCTGAGTTCAGTGTGCACCATGCCTCTG
CGGTGTCTGTCACCTGGTGCGCCTTGACAGAAGTGCCTTCTGTCTCCCTAAGGCAAATTGCCTTAATGGT
TTCCTTACTTTCATTGCCCTTTGTGTAGTGAGATAACTCCACCCTTCTGAATGCTTAGTGAAGAAGGGCA
TTTCTGCTTTCTTGAAAGAAAATGTATTTGTGCATGAAAATATATATTTCAAATATATTTACCTTTAAGT
GCTTCTAAAGCTGGCCAGTTAAGAGGAGGAATTTTAGGAGTTGTTTCTGTGATTTTCTGACTTGCTTAGG
ATTAAAAGAGGTATTTCTGAAATTAGTACCACTGTAGCAATATGTGAATTACACAGTTTACTATTTTGTG
CAGTTAGATTAAAAAGGTGAAAAGAAATATAAGATTAATTTAATATATTAATATATAAAAATTAATATAT
TATAAATTAGTATATATTATATAAATATATAAATCAATATATTTAATTTAATAATATATTTTATTTAACC
CAGTATATCAAAATATTATCAGTTCAAAATTTACATTCTTTTAAAAACTAAGTCATTGACACCTCACTGT
GTATTACACAGTTAGAACATTGTTCAAGTCAGACTAGCCACAGCTCAGTGCTCAGTCTCTTATTGCCATA
GTAGACAGTAGAACTTGGGCTATCATTTCTTTTTTTTTTTTTTAATTTTTTTATTAGGTATTTTCCTCAT
TTACATTTCCAATGCTATCCCAAAAGTCCCCCATACCACCCCCCCCCCAACTCCCCTACCCACCCACTCC
CCCTTTTTGGCCCTGGCCTTCCCCTGTACTGGGGCATATAAAGTTTGCAAGTCCAATGGGTCTCTCGGGC
TGGAGAGATGGCTCAGCCGTTAAAAGGCTAGGCTCACAACCAATGGGTCTCTCTTTCCAGTGATGGCCGA
CTAGGCCATCTTTTGATACATATGCAGCTAGAGACACAAGCTCCGGGGTACTGGTTAGTTCATATTGTTG
TTCCACCTATAGGGTTGCAGTTCCCTTTAGCTCCTTGGGTACTTTCTCTAGTTCCTCCATTGGGGGCCCT
GTGATCCATCCAATAGCTGACTGTGAGCATCCACTTCTGTGTTTGCTAGGCCCCGGCCTAGTCTCACAAA
AGACAGCTACATCTGGGTCCTTTCGATAAACTCTTGCTAGTGTCTGCAATGGTGGGCTATCATTTCTAGT
TAATGAAGATACTGTGTTTTTGCATGAGTGAAATAGTAGAATAAAAGAGGACCGAGACTGATTCTAAAGT
AACAAATGGAGACTACCTGGTTACAGAGTTGCTGACACAGCTAAAGCTCCAGCATTGAATGCAGACCACA
GTGTTATACAGTGTCACAGTGCTGAGGTTTTGGGCTATGTGCCTCCTGGCCACTCATTTGGACAGCTTTT
CCCAGCTGTGCTCTGTGAGCTCCAGGGCTGGTGGGCAGGTGAGGGATGGGGTGAGCTGAGGCTCAGCAAC
GGAGCACAGCCATTTTCTCCTCCTACCTTCAACCAATCTCTACATTTACTTATTGTGCAGAGGATTCTGT
ATAAGATTTCCTCTTGTTTTTGAAAGTCTTCTGCCAATTGCATGCATAGTGGTTAGCGTTGACCCTGTCC
TGAATCTTCTTTCACGTGCCATTCTAGGGATCTGGTGGAAAACAAATTGCCTCTACTCTGAGGCCTTGAG
CTCTAATTTACACAAAATTATTTGTCTGTATCTTTGCCTCTCCCTTTTTGTTTCCGTTTTTTTTTTTTTT
TTTTTTTTTTTCATCTTTGTGTCACCATATTGTAAGGCAAAAGAGTTTGGTCCTCAGTTATGTACAGCAG
AATCTTTAAATCTGTAGTAGATGGATTCCACAGAGATATTTCTGCTTGAATTTCTAAAATACAAGTGGGT
GCCTTTCCTTTAGGAAATGTTTAAAATAAGGGAAGTTTAACTTTACAAATGATTTATGTCCATTTTTAAT
GTATAGATAAAAAACCAGTCTGGATACTGAATTAAAACTTGAAAAAAACAGAATGTGAGAAGCCAAAAAC
ACTTCAGCTGGCATGCAGAGCCAAAAGGTTAGACACTGTACTCCACGGGTCCTGAGCCAGTTGCTGAAGT
GGCTTTATTTGAATAGACTTCAGTAGGATATGCCACTAAAAGAAAATGTCCAAAACCTGCTGATAGCCCA
GCCTTCCTAGGAGTGAATCTTTTCTTTCCTCAGTGAATACAATTATTGATTATTCTTCTATCAACTCTCT
TTTCCCTATATGTTTTTAGGCTCAGCTTGCCAACCGGAAACAGAAATTAGAGTCCGTGGAACTATCTAGC
CAGTCAGAAATTCAACACCTGAACAGTAAGCTTGAGCGGGCTAAGGACACCATCTGTGCCAATGAGCTGG
AAATAGAGCGCCTTAACATAAGGGTCAACGACCTGATGGGAACCAATATGACTATCCTGCAGGACCATCG
GCAGAAGGAGGAGAAACTAAGGGAATCTGAGAAGTTACTAGAGGTGTGTGTTAGAATGAGTAACTTAGGG
AGGTATATGCATGCCCTAGGACTAGGTCCTGGATGCCCAGCTTCCTTCTTGGGCTGAGGCTGGTGGCTCA
GCTCCTGATAGCTGTATTCATACTGTCCTTGTCATAAAACTTGCAGTCAGCCTTCCTGGTTGCTTTTCTC
ATGAAGTAGAAGCATTGAAATATTATTTGACTTTTTTTCTGGAGTATTTTGCAGTCTCTGCAGGAAAAAG
AGAGAGCTAAAGGAAAGTTGTAATAATATCTGTCTTTTTTCTTGAGTGTTTTGCAGGCTCTGCAGGAAGA
ACAGAAAGAGTTGAAGGCAAGTCTTCAATCTCAAGAAACCTTCATCCTTGAGGCAAAAATGCAGGAGAAA
CTGCAAACGACATTAAAGGCAGTTGGCACTCAGCAGTCCGTAGAAAGGTCTGTTTGAACCGTAAATGTTA
GTCTGCTGGCCTGTTTGACAGTTTGGCATTGAATGCTGATTTTAATATCGAATATTTTCATTTCTGTGTT
TGATCATCTTGTCTTATTTGACTTTAATTTATGAGTTAGATTTTTATTGTCTTAAAATTTGTATGGATGG
TTTTGTCTCCTTTTCATTTAAGTCTCTAAGATTCTGAGGATCATAAGGTTGGAAACTCCTTATCTCTCTT
TGTTAGACTTGGAGGGCCTCTCTGCCTTAGAAGACTAAGGTATGGTGGAAAGTAGTTGCTTGCCATCAGT
AACAGCCTGTCACTTAGCTAGCCCTTTGGGAACTGACTTTATTGTTATCATTATTATTGTATTATTATTA
CTACTACTACTATGTTTTGAAATAGGATTTTATGCATTACCCCAGGCTACCTTCAAAATTACTGTGCAGT
TGAGGATGACCTTGAACTCCTCCTGATCCTCCTACCTTTGCCTCCTAAGTGCTGGGATTATCAGTGTTGT
GACCCCACCCAGTCTCAGGGCTTCCTGTATGCCCTGGGAATTCTCTACCAACTAAGCTATAAATCTCCCG
GTGCTGGGAATCAAACCTGGGTCCTCTGCAAGAATAACAGGCCTTCTTTCCAGCCTACTGGGGCGCTTTCTT
CAGAATGAAAGATGGTCTCTGAAAGAACACATTGAGGATTTCTGAAGAAGAGAAATTTATCATACAACTCTC
GATACTTATGAGTTTAAGGGTTATTCTTTCTTTATGGTGTGAATTTCTCTGTTTAGGCAGTCTTTTCTGTCT
CCTTTCATTTTCCTTCGAGATCCTTCTTGGCAGTCCTGCATCTGTGAGCAGTTTGCTTAAGGGATGATGAAG
TTTCCCAAGGCATGCAGCAGTGCCCTGTTAAAATCTGGTCTCAGCTCTGGACCTCAGAGATGAGTGACATTG
GTTTTCTGTCACTGAGAAACCAATAGCTTAGAAAGAAGGAGGAATATACTAAACCTTTATTTTCCAGTTCTA
TATAATTTGGCATGAAGAGTGGGGGACATGTCAGCAGCAGTAATTGTTGTGTTAGTGAGAAGTGCTGCTTTC
CCTTCAGCAGTGGTCCTGGGTGATTCCTCTCAATGTGTAGCAGGGTTTGTGTTAATGTCCCTTGAGAGAAAA
TAACTTTTCACCCTGACATTCTTTAAGAACTAAGCATTAGAGGGGCTAGAAGGAGGGCTCAGACAGTAAGAG
CATATACTATTCTTGAAGAGAACCAGAATTTGGTTCCTAGATCTACATCTGGTGGCTCCATTGCCTCTGGCT
TCCATGGACCATACTTAAAAAATAAGTCTTGACTACAACAATAGAAGGAAAGCCAGGCCTGGTGGCAAACAC
CTTTAATTCTATCACTCAGAAGGCAGCTGGACATCTCTGACTTCAAAGCCAGCCTGGTCTACATGCATAACT
GGTTCTAGACCAGCCAGGGCTACATAGTGAGACATATTGTGTCTAAAAAATTAAGTTAAACAATTAAAAAAA
AAAGCATAGAGTAATGTGATGTTTCATTGGTTTTGTAGGATAGTTTCAGCAGCAGTTAGGATTTTGTTTGCT
TTTGGAATGTATTTGGTGCTAGCATTGCTAAATGATAATCCTTGCTTCTACAGACTTCTTAGGCTGCTTTGT
ATTTCTCACTGTGATTGCTTTTACTCACCCTAACTTGGAATCCTGGAATTCAGAACAGTAATTTTTCTCACT
CCTCTTTTCTTTTTCTTTTTTCCCCTAGTTGCCAAAACAAAGAGGATTTAGAGATGGAGGCTTTGTTGGAAG
GAATACAAAATCGGGGGCATAGTGGGTAAGTTTGCCTTTGACTGTGAGCTCATTGCAGTTTAAAAACCTACC
TGGGTTCTGTTAGACTAAAGCTAAGCTGAGCTAAGGCACATTTGTGGACAGCATCCCTCCGACATCAGTTGC
CTTCTCTCAGCATTACTAGGGAGGACTGTGGCTCCTATCCTAGCTTGAGTTTTCCCCTTCAGCTCAGATGGG
TATCAGTAGCTTGAGCAGTGAGGTAGGTTACAGTGTGTTCCAAATAACAGTTGGGAGAAATAACAGCAATAG
ATCTTGCTCAAGGGTGAGTTTCTTGAAACAGCTCTTCTTTGTTATCTTTTTTCCTGCATAATATAGCCTGTT
TGCTACTAAGACTGTTCATTTTGGCTGAAAGAGCTGCAACACAGGCTTGCCTGGATTCTCCCAAAAGAATCC
CTTAAATATCCCAGAAGATGTGGTTAGTAGCTCTGAAATCTCACTTTGCAAGCCAGATGTAAAGCATCCATC
TGTGTTTCAGCAAGTGAGCCTGGTTTTAGGTTACTCATTAGAGGAGGGCAAAATATTGTGTGGAGTTAAGCA
GCATAGCATATGACAGCAAAGGCCCAGGCACCCTGGGCTTGGCTTCTGTAATGTTTCAGTTCTCCAGATAGG
TTTAGTCTGTGATATTTTTATCTGTGAACTAGGAGAAACCACTTGGGCATGAGCTGTGACTGGTCTGTTGGT
GCTTGTAGGGGATTTTTGACATCCTGTGAAGCAGAACTGCAAGAGCTCATGAAACAGATCGATATAATGGTG
GCTCATAAGAAGTCGGAGTGGGAGGGGCAGACGCACGCTCTGGAGACTTGCTTGGACATCCGTGATCGGGAG
CTGAAGGCTCTGAGGAGTCAGCTGGACATGAAGCACAAAGAGGTAGAGCGGCTGCTTCACTTCTCTTGTTAT
CTTGACTCTGGCTTTAAATCATACATGGTTCCATACACCCATGTTCATGCATGTATATAATATACTTGGAGC
AACCCATGTCCAAACCTTTAATCCATCTTTGTGGTAGTTTAATCTTTTATGCTAAAGGTGTTTCTTAAGTGT
AAGCATTTGTTTACCAAGTTAGGTTTGTTTGTTTGTTTGTTTGGGGTGTGTGTGTGTGTGTATGTATGTATG
TGTCTTCAAGACAGGGCTTCTCTGTAGCTCTGGCTGTTCTGGTACTTGCTCTGTAGACCAGGCTAACTTGGA
ACTCAGAGATCTGCCTGTCTCTGCCTCCTGAGTACTGAGATTAAAGGTGTGCGCCACAACCGCCCAATCTTA
TTCTAATTGTTACCTTTTCTTCTTTTTTTCTTTTCTCTTCTTTTCTTTTCTCTTCTTTTCTTTTCTTGTTTT
AAGATTTATTTTATGTGAATGAGTATTTTGCCTGCATGCACACATATGTGCACCATATATATGCCTGATGTC
ACAGATTCTCTAGAACTGGAGTTAGAGACAGTTGTGAGCTGCCATGTGGAGTACTGGGAATCCAACCTGGGT
CCTCTAGAGGAGCAGTCCGTGCTTCTAACCACTGAACCATTTCTCCAGTCCTCTTAGGGTTTCTTTTAGAAG
ACATTTTATTATGGAAGTATAAGAACATTAGTATTTGTTTCAGGGAGCATTTTACTTTGGAAACATATAATG
CACACTGTATTTAAGAGAGTGTCAGTGGAGACCAGGGCGTGGCTTTGGTGGTTAAGTGCTTACTGTGCAGCT
CTAAGACCCTGGGTTTGCATTCCCAGAGGTCATGTGATACAGCCAAGCATGGTGGTATTCATCTGCAACCCT
AGCACACAAGAAAATGGGAGAAGGCTTGCATAATCTTTGCATAACTTTCATCATATTACATGTCCATATTAA
CATCACCAGGTTTATAGTATAGGTTTTGGCTTCACTTGTAAAGTTAGGTGACAGCAAAGTTGAAGATATAGG
GACATGGTGTAGCAGTAGAGTGCTTGCTTAGTATGCTGAAAGCCTTAGGTTCAGTTCCAGCATTCTTCTACC
CCTCTACCTCCCAATAAATGTAAAAGTTGAGCCCTTGCTTTTAACAGTCAGAGTTAAGCAGGTCAAGGCAGG
AGAAGCAGCTCAGTGATGGAGTGTGCTTAGCATGCACACAGTCCCGGCCAGGACCACCAGCCTTGTAAGCAA
AGTTAAGGAAACCCACTCAGACAGACCTTTTTTAAAATTAGGGAGAAGGAAAATCAAATCATTTCTAGTCTC
ACCACCACTAATATTGGTAGTGCTGGGGGGAGGTTTAAGACTAGCTCCTGACTTAGTCCTCATAACTTAGTG
GTGCAGTAGAAGAAGAACACTGAATCCTGGAAGGGAAGCAGGAAGCAGTGTAGGTGGAAGCATTGTCTCTGA
GTTTCTATACAGATTAGTCTGGGAAGAATACGAACTGTGGGTAAATGCTAACCCTAAGCCTCACGCTCGTTC
TGCCAGACTTGCCTGCGTGGCACTTGCCCTTCTGAAGGCCAATATACTACCAGGACTGACAACACAAACTGT
GATTTGGTTAGTGATGATACTGTATACATGTGTGAAATTTTCAAAGAGTTAAAAAGTTATCGCCCAGTGAGT
GGTTGGCCATTTACACTTAGAGTCAAATAACACTTTAGTAATACCAGCTGTATTAGTTTAGATTTCTGTAAA
TGGTATTTGCTAATCTAGAGTTTAAAGTTTAGACAAATCTTTTAAAAGTTTTTTTTGAAGTTTTATTTTAAA
AAAAGATTTAGTATTTATTTTATGTATATGAGTACACTGTTGCTGTTTTTAGACACACCATAAGAGGGCATT
GTGAGCCACCATGTGGTTACTGGGAATTGAACTTAGGACCTCAGGAAGGGCAGCCAGCGCTCTTAACCATTG
AGCCATCTCTCCAGCCCCTAGGCACATCTTTTAAGAACACAACTTACACAGAGACAGGAAGGTGATAAGGAA
GCCCAGCAAATGATAGCCACGCTAGACTGCAAAGACGAAACAGTGTGGTGGGCTAGAGAAACAGGTCAGTGG
GTAAGAGTACTGGCTGT
TCTTTCAGAGGATCCAGGCTCCATTCTTAACACCCACGTGGTGGCTAACAGCTGTCTGTAGTCCCAGTCT
CAGAACACACCTTCCTCTGGCCTCCATGGCACCAGGCATTCGATGTGGTACACAGATACACACAGGCCAA
ACACCCATGTGGCTCTCTGGGTCTTTACTGTTCCACTGCGCTTGCTTCTCTCGGGACCTTGTGAACTGTT
CACACCAAGTCTAGACGTAGCAGGGTGAGGATGGGCGAAGTCAGCAGCTTCCTGTTGCTCACAGAGACAG
AAACAGAGCTGTCTGCTTCCTTAGTAGGTTCCCAGTGACAGCTCCGGCTGCTTACTGCCGTAGTCTGCCC
AGGAATGGGCCGTTATGGCTCTTCCTTCCATCTCCTCACTATGCTTTCCAAGGTCACTCTCCTCATCCAC
CCAGAAGTCTACTCTCAGATTGCACTTCTAGGAAACCTCAAAATAAGACCAAATAATATAGTAAGACAGT
TTTAACCTTCCTTATAAATCTGTAAAAATTACCAGGGTTGTCAGTAGGAAATAATAAAGCCAGAGTCATG
CTTGAGAGTTTTAACACATTTTTCTCAGTAACTGATGATGGAGAGCATTCATAAAGATACAGATTTGAAC
AGCATGATCAGCAAACTTGACCCAGTTTATAACTATAGAACTCAACACAAGAGAACTGCAGAGCATGCAT
TTCTTCTGCAGCACAAACTGAATGATTTCCAAAAATGGCTCTATCCTGGTCCATGAACAAAGTTTTGAAA
TCATAGATAAACTCTCTTAACATAGCAGAAGTAAGTTAGAAAAAGATAACCTTGAAAAAAATCTGTGTAT
TTGGAAATTAAATAAGTTATGAATGACCCAGAGAAGTCATAATAGAAATGGAAAATAGTTTGAATAGTCC
CAGACCTCAACTCTGGAACTCTAATAATCCAACTGTAAGTAGCCATACAGCCTTAAAGTGTACCAAGCAG
CACAGGCAGGAGATAGGGAGAAATTATGTCCATGGAACCTATAGAAGTAACACAGCTCTCTTGCTGTTGA
TAGAACAAGCGCACGGAAAGGCCATTTAAGGTAGAGTGCTGATCAGAATCAACTTGACCTAGTTAATCTT
AAGTGTGTTCTTCTTAAGTGACTGGGACATTTTACTGCAGTCAGGCGGCTATCACCATAACCAGCAGATT
AAGTTGTATATTTTTATAGCAAAGTAGATTTAAGCTAAGATTCAACACAATAAAAGACAACTTTTCAAGT
ACTTGGAAATTAAGCAATATACTTAATGACTGTTCTGCTTTTAGGTTGGAATATTGCATCAGCAGATAGA
AGAACATGAGAAAACCAAGCAAGAAATGGCCATGGAGTACAAGGAGGAGTTACTGAAGCTGCAGGAGGAA
GTGAGCCTTTCATTGTGTGCCGTGCCGTGAGGTGTAGTCGTTCTCTTTCTGTAACTCCTGACTGTTGTGT
TGACAACTTGTTTCTGATTTCAGTGGTGAGAACTGCACAGCCTGTGTGATAGTCTGTGGGAAGAATGTGG
TAGAAATATTTTTCTCTGACCTTGAATCTAGGTAAAGAATCTTGTCCAAGCATGTTTGCTAGTACCTAGG
CCAGCAGTTAGCTGAGAGGAAAAGAATTGTTTATATAATATTGAAATCTTGATAACAGAACATTTAATTT
TTTTTTCCAAGACAGGATTTCTCTATAGAGCCCTGGCTGTCTTGGAACTCACTCTGTAGACCAGACTGGC
CTTGAACTCAGAAATCCGCCTGCCTTTGTCTCCCAAGTGCTGGGATTAAAGGCATGTGCCACCACTGCCT
GGCAACATTTAATATTTTAATTTCTAAGTTTATATTGGAAGATACAAAGCACTTAGAAATATTTTGGGAG
CCATGAGGTGCTGGTGCACGCCTTTAATCCCAGGACTTGAGAGGCAGAGGCAGATGGATCTCTGTGAATT
AGAGGCCAGCCTGCCTGGTGAGTTCTATAATTGCCAGGACTACACAAGAAACCCTGTCTCTAAAAACCAA
AAAGGAAGGAAGGAAGGAAGGAAGGAAGGAAGGAAGGAAGGAAGGAAGGAAGGAAGGAAGAAGAAGAAAG
GAAAGGGAAGGAAAGGAAAGGGGAAAGGAAAGGAGAGAAAAAAAAGAGCTGCAAAAAGCAGGGGTCGTAA
GATGGCTCATTGGGTAGAGGCACCTGCCACCCAACTTCATGCATGAATTTGATTCCAGGAACCTACATGG
TGGGAGGAGAGACCCAGCTTCAGCAGACTGTCCTCTGACCTCCTCTTGCTGGGCTGAGATGCACACACAC
CTCCTCTCCTCTCTCCCCTAATAAAAAATAAAAATGTTTTCAAAACACTTTTTTAAGCAAGAAAATTGGG
AGGCAAAGCTAGGTGAGAGTTGAGAGTGTACTGTTCGTGCAGAGGGCTCTGGGTCAGTTCCCAGTACCAT
GTTAGGAAGCTCAGAACACCTAGAATTCCAGCTAGAGGGCTCGGACATCCTCTCTGGCCTTCTTAGGCAT
CTATCTGCACTTGCATGCATATACCTACATAGAGAGAAACACACATAACTAGAAATTAAAAATAAAATCT
TTAAAAAGAAAATTCTATTTTCATATTCAATGTAATTTTTAATATTGGGGAAATTACTTTTGTTTTGGCT
TAAGTCAAAGTCTCCTACTGACCGTGCATCATCAGTGCCCTCAGGAGTATGTCTTGAGAACCACTGGCTC
AGAGGGGAACAGTCACTGCTTCCTCTATTCTGTGGAGTGGGTCGTGGAGGGGCATCTATGAATGCATGAC
AATTGCCATTAAACTAAATTTTACTTTTTCTTTTCTGGACTGGAAATTTCATTACTTTTATAAATTTCAT
TTCTTTCTCTCACATACACATGCAAGCAGGCACATGCACTTTAAGACAAGGCAGCCCAGGCTGGCCTCAG
GTTCTTCATGTGATTGAAGATGACCTTGCCCTTCTGTTTCTCCTGCCTTCACTTAGTTCTGTGATCACTG
CACCAACTCCCACAGCCAGTCTGTGTGGAGCTTGGTCCAGCCCAGGGCCAGCGTTTTCCAGGTCAGCGCT
CTACCAGCTGAGCTGTAGCCCAGCCTTGTCGTTTTTATGTCTTCTTTTATTTTGCTTTGCAGCTCTAACA
TGCTGCCAATCTATTTTCAATAGTGTAATTTAGCAGTGCTCTTGCTGTATAATCCCAATTCATCTGACCA
CTACAGTTTGCTAACTCTTAAATAACTGTTTTTACAGTTAAGCAGACTGAAGAGAAGCTATGAAAAGCTG
CAGAAAAAGCAACTAAGAGAATTTAGAGGAAATACCAAAAGTTTTCGAGAGGATCGGTCTGAGATTGAGA
GGCTAACTGGAAAAATAGAGGTATGTCTACAGCAATAGTCCCAGTTGAAACGGCAGTTGTCCATTGTGTA
GGAAAATGCCATTTCTAATGGAGCTGTTTTCTGGAGCAAGTTCCTGCTATCTCAGGGGCTGCCACTGAAC
TAGTCAGTGTAGGATGGCGGTCCCCATCACATGCTCCCCTGTGGCTGATGGGCTTCCAAGACATCAATTA
ATCTCAAGAGTGTAGAGCTCCCATACAGAGCACTTGGAAATATATGGAGGTTTTGTTTTGTTTGTTTTTT
GTTATTATTTTAAAATGATGGAGCATGAAATTGGCATTCATGGTAGAGGTAGCAGGGATAGCCAACATGT
CTGGGACAGTATCCTGGAGAAGATCCTAGTACTCAGTACCTCCCATTCTGAGAAACACGGAGCATCAGTT
AGTGGCAGCATCCTACCTTATCTCTGTCTCCTCCACCCCGATCCTGTAGGTGTTAGTGACCGGGGGGATG
CTTGGCTTTTCTTGTAGAGAGTGCTCTGCTCATCAGGTGACTTCCTTTCAGTTCCCATTTAGGTAGAGCA
TGAGTTACAATGGATTCGCCTACCTCTCTGATTTTGTTTTTGTTCCATAACTCTGTGATTACTGATAGGA
GACAGTGAGTCCCCTCTCTTCTCCAGTACATTGAAACAGTCACTCAGGATTGTGGGAACTAAAAGGGGGA
GGGGAAAGAGGGGGAAGGAGGATAGCCTGCGCTGGCCAGAGTTCCTCCTATGCTCTGGGCAGGCGGATGT
GGGAGGGCTGCCAGACGCTTTCCATTCGCTTTCCACTCGCTTTCCAGGTGGGCATCTAAGCCACTGACCC
CACTCGACGGGGGCGGGGGGGGGCGGGGGGTGGACAAGGGGCAGCCCCCGAAACCAGGGGGCCCAGAGCA
ACACCCTGCAGCCCTGGGGTTATGGGAGAGAAGGCTTAGGGGAGAGGTTCCCACACAGGCGAGAGTCTGC
ACAGTGGGCCTTGAAGAACAGACAGTTTATTTAGAGCTTTATTATAGAAAGGCAGGGGGAAGAGAGGAGG
TAAAAGAGAGAGAGAGACTGGCCATGGCCAAGAGGAGAGAGAGAGAGAGAGAGAGAGAGAGAGAGGAGAG
AGAGAGAGAGAGAGAGAGAGAGAGAGAGGAGAGAGAGAAAGAGAGAAGAAGAAGGAGGAGGAGGAGAGAG
AGAGAAGAGTAAGAGCAAGAGAGCAAGAGAGGAGTGAGAGAGTGAGGAGGGGCTAAGCAGCCCTTTTTAT
GGTATGCTGCTATCTTTACTGTTGCTAGGTAACTGGGGAGGAGTTTAGCCTGAAGGTCAGAAGCTTGGGA
CATTGCCTACATGACTACTAGCCACGCTTCTCTTATGGGGGGCTGAGGGGGTGGGAGCCAGGGTCCCAGG
AGACATGAGAGAACTCCTTCTGTCCCATGTAGGTGAATTATCACCACCAGGACCCGGGGTTCAACATCTA
GCTTCAACTGGAAACCAGGCTGTCTGTGCATAGCCCAGTGCCCCACACAGGATGTTTTGGGACTTCAGAG
TCTGATCCAGTAGTAGGCATGGGACCTAGGAATCTATACCTTACCTAATTAAGAAACTGTTCAATATCAT
TGTGTGACTGCTTAACAATGTTGTATGAGTGATCTGTCATATAGAAATGTACTTTATATACATGTCTTAT
TTAGGGTTTCATTGCTGTGAAGAGACACCCTGACCAAGGCAACTCTTCTAAAGGAGAACATTTATTGGGG
TTGGCTTATTCATTCAGAGCTTTAGTCCATTATCATCATGGTGGAAAGCATGGCAGCATGTAGGCAGACA
TGGTACTGCAGGAGCCGAGTTCTACATCTTGATCTGCAGGAAGCAGGACATTGGACTTCTACACTGGATG
AAGCTTGAGCATAGGAGACTTCAAAGCCTATCCCCACAGTGACACACTTCTTCCAGCAAGGCCACACCTA
CCCTGGGCTATTGCTAGGGCAGGGTTATAGTAAAAAATAATAGAGTAAATGAGCTTCCTTTTGTGTAAGT
CAGGCATGCTTCTGTTCTTGCCAGACTGTCTTGTAAAGTTTTTCTGATAGAAGGATTCAAGTGTTAACAA
AATGGTTTTGCTGTTTTATGCGGCTTTTCCCCTTGAAACACACCCCAAACCCTAGTAAAGATTAAATTGC
TGCTGACCCTGGATTGTTCTCCAGGTATTCCCCCTCCTCCCCAAAGCAGGCTACAAACTGACCAGTTCTA
AGGAGCTTAGTTAAAAGAATAGTTGGGACAACAGCCTGGCTGGCATTGTTTGTTTGCCAGGATAAGAGAG
AGACCTGTTTCCCCCTCCTTCTGTTCTTAGGCCTCTGGAGGACTGTCAGAAGGAAAGGAAGTACAGCTCT
CCAGGGCAAGGAGTCTTGGATAATGTGCTCTCCCAGCTGGACTTCAGCCACAGCAGTGAAGAACTCCTGC
AGGCAGAGGTGACGCGTCTTGAAGGCAGGTAGATAATTAGCTACACATTGAAAATTTGAAGTTGTTAGGA
TGAACTTTGATTCTCACATTGATTGAGTAAAACAGTGCATTGGTGAAATGAAGTTGTTTTTTCTCTAGCA
TTCACAAATGGCCTCACTCCCTAGTTCATTGAAAATACAGAAGACACTGTCCTAACCTTCTGCCAGTTGG
CCTTCATCTGAGCCTGTGCTCTGTGGACGTGTCTGAGGCTGACTTGCTCCTGCTGTGACGTCCTCTTTAG
GGCTTTCTTCAGAATGGTTTATATGGACAGAAAGTATTCTGGGAGCTTTTTCCATTTTGAAAACAATTAA
ACCCCTTTAAACCATCAGAATATTTCCTCTTTCTCTGTTCTTCAGAGTCAAAATCTTTTTTTAAAAAAAT
TATTTATTTATCTTTTTTTATATGAATACACTGTAGCTGTCTTCAGACACACACCAGAAGTGTGTGCATT
GAATCGGATCCCATTAGAGGTGGTTGTGAGCCACCATGTGGTTGCTGGGAATCGTACTGCTGACCTTTGG
AAGAGCAGACCGTGCTCTTAACCACTGAGCCATCTCACCAGCCCTAGAATCAAATTTTTGAAGACTTGTG
TATTCTGATAATTCCCACTTCACCCTTTGCCTTTTAGGCCCCATTCAGTTCAGCTTTCTTCTGTATTCCC
TCACTGAAACTGTTCTTGGAGAAGATACAGTGGGCATGTCTTTCTTCCTTCATTCTTGTTTATGGTGTGA
TTTAGATTTTCTTGGCTTTGAATTGAATGCTAGCTAATGGCAAATCTATAGTATTTGGTAGCATAGTATA
TTCTAGCATAGCATGCATAGCATGGCATAGTGTGATAGGTAGTGCTTTTTGTTTTATTTTATTTTTTGCC
ATAGTTACAAACTTTATTTTGCTTGTCACATTTGTAAACTTTTTTATTGGGAAGAGTTTGATATTTTGTT
TTAAACTCATTATAATTGCTTGTATACTAATTTTTTTGGTGTGGGTAAAAGATAAAATATTTACATAAGC
TCTTTGCCTTTAGGCAAACATAACAAGAAGAAGTGCCACTTTACACTTTCTAGCTTGTCTTGATACATTG
CTCCTCAGTGTGCTGTGTTTCGTGCAGCCCTCTGCTGTAGGCCTTTTAGAGTGTGTGGGGCACTTGTGAT
CTCTACTGAGGTGTGTGTGTATATGTGCTTTATTTAGACTGAGCCAAACAAAACTTACTATTATTACTAC
TATTACTAGTATTGATATCATTTGTTTTTTTGAGACAGTTTTTTTTCTGTGTAGCCTTAGCTGTCCTAGA
ACTGCTTTATGTAGACCATGGTGGTCTCGAACTTAGAGATTGGCCTGCCTTTGCCTCCCAAATGCTGGGA
TTAAAGGTGTACTCCACCCACCATGAGTGCTAAATAAAGATTATTAGTCTTTTGATATTGGAACAAAAAA
ATTTGTTTTTAATCATAGTTGTCATCTCCCCCTCCCCCGACCTCCAGTTGGTTTTCTGATAATCTTCATG
GACTTCTTGTCAGGCTCAGAAGTTGCGCCTCTGGTTTGACTCCAGCACAGCACTGCACAGCACTGCACTG
ACCACCTTAGCCCCTCAGGTCCTGCTTTTCCCATGCATGGCTAGGACAATGTGATCTCTGATCTTACTCC
TCTGCTAGTCTCAGTGTTTAGCACATTGTAACCATATACTAGTAGTAAATAGATAAATAAAAATTCTAGA
ATTTCTGGAAATAAAATTAGAATGAATAAATAACAGTATTCAGTAAGAATGGCTTCAGTTTTTTTCTTTG
AAAAATCTAGTGGACAAAAAGACTGTTCTAAACAGTGTGGTGTTTAGTTTGAACAGCACCTAAACCAGGAAG
GGCAGGGCTTTTGTTATACTACAAAGATGATATCTCTATTTTATTTTATTTTTGTTTCATGTGCATTGGTGT
TTTGCCTCCATGTATATCTGTGTGAGGGTATCAGAAACCCTGGAACTGGAATTATAGACAGTTATGAGCTGC
CATGTGGGTGCTGGGAATTGAAGCTGGGTCCTCTGGAGGAGAAACCAGTGCTCTTCACTGCTGAGCCATCTC
TTCAGCTCCCAAAGATGATATTTTTGAATAATAACTTATCTGGCAAATTTGCTATGTTTGTGAAATAATATA
GTACTAAGCATTTGTAGAATAATTTAGAGGTGTATGCTGTAGCACGTGAGGGCTAATGGCTAAGTTTGGCAG
GCATAAGAAGTAAAATATTTTAACCATAGAGTTTTCAGTTTCAGAGATAAAATACTCATTTTAAAGGACTTG
GGGAATTAAATGAGCATATTTAAAGTAGATAATTTCTAGAAAAATTTGCCTTCAAGTTGTAAAAATTGAATT
ATTTAAGGTGAACAGGGGAGTAAGGACTGGAGTGACTGTAATTAGGCCAGTGCCAGTTTGGTTCCTGAGAAG
CTAATGGCCATCATGGGCTAGGGGAGGAGGTGCTTTGTGGTGAAGGGACGATTGCATTGCTACAAAGAGGCA
GAGCACTGGAGTGAGAGGCATGCTGCCTCCGTGGCGCTAAGTCTCAGAAAGATTGGTCTTGAGTAAGAACAA
TGAGTTGGGGACTCTTCAAAGAGTTCTTGCGGTTCTGTATAGTGTGGTTCTGTATAGTGTGGAGTGTGTCTG
TGTGTTGCTAAGGGTGATGAAGTGTGAGTCTGTTGTGACAGTTCTTGGTGGCTTTCCCTCTCTCATAGAGCT
AGAGAAACCCATACAGCTAGAGCAAAACTGTTAGTAAAGTGGCTGGTGTCTTTATAATTCTGTAGCCAGTAA
AGTTTAAATCAGGGGGCGGGAGTGGAGGAAAACACGAAAGAC
AAAACTACCTCAGTGTTGAGATGGGTTTGCTGCATCTAGTGATAGGGGAATTGCAAATGACTTCTCGTGA
CGGGTATGAGGTTTAAGGTGTTAGTAGGAGGTATCTTGGGCATCAAGAGGGTACACTTAGATAATCCATC
TTATGGGTTTCAGGAATTTTACTTATATATGGTTGTATTTCTGCCATACAGTTTAGAATCTGTGAGTGCA
ACATGCAAACAGCTGAGCCAAGAACTAATGGAAAAATACGAAGAGCTGAAGAGGATGGAAGGGCATAACA
ATGAGTACCGGACAGAGATAAAGAAGGTGAGAGCCTCCGTCAGAGCCTGGGCTCAGAGCTGGGCAGGAGG
TGCTCAGTGAGGGAAATGTGTTGGGTGGTCAGTGGAAGAGTTTGCTGGAACTCAGTGGGAGGAGGAGGGA
TATGAGAGGATGATAGGGATGGATGATCAAAGGATACTGTGCATGTGGGGAACTTGTGAAATATGCTCAT
GATGATTTCTAAACAATTATATTGCTTATTAAAAAAGACATTATATTACCTGTAATTTCCTTATTGGCTT
CCTTTGTGCTATGAAGTAGTTAATGTCCTCATTGGCTGTTGGTACTCTAGAGCCTTTTTTTAAGGGGTCC
TGTCCCCAGTGTGCTGGTGTACTCTAATCCTAGCTTTGGGAGGTGTAGACAGGAGATCAGAGCCAGCCTG
GGTTAGATGAGACTGTCTCAAAATACCAAAAATAAATTAATTTTTTTAGAGGCTTTATTTAGAGGATTAG
TCTTGTTTTATAGCCCAGGTTGGCCTTAAACTCATAATCCTCTGGTCTTTTGAATTCTAAATATTGAGAT
TAGAGACATCTGTTACCATACTTGGCTTAATTTGTGTTTTTCACTACTTTGAGATTATTGCTAGTTCCTG
TGCATGTGTGTGTATGGTGCACACATGTATGTGTATGTAGAGCCCAGAAGTAGATATTAAGTAGCTGCTT
ATTGCTCTCTCCCCACACACTCACCTGCCTCAGCAGCTCTAACTGAACTCAGTATTCATTGGCTGACTAG
CTTAGCTGGCCATTGAACTGCAGAATCAACCTTTATCTGCTGTCCCTCTCCCCATGCTGGGATTATAGAT
GTATGCAACCTTCCAGGATGAATTTTATGTGGGGGCTAGGAATCTAGACTAAGTCCTTCTGCTCCTGCTG
CAGGTATGTTATAGACTGAGCTGTCTTCCTCAAAGGCTCTTGCCCCTTTCTACCTCTTATCTTTCTGTTA
GTTCTCTCCTGAGAAACAGAAAACTAGATAAAGAAACAAACAAAAACCCCAAACAAACAAACAAATTTTA
ATTTTTAGCTGTGAAAAGAATGAAAGTCTTAGAGACTACATAAATTAGACATAGACTTTGCCATTGACCC
CAGTGTTTGAGTAACACATGTTTTTCTGAGACCTAATGCATGATTTTGAATTTAAATACCAGACTTTCAC
AGTAGTTATAGAAGTTGATAACTTGTAGTTGATGATTTTCTGTATATCTAATCTAGGAAAAATTTCATGT
CTTAAGGTAAGATAGACATTACCTTATTTTATCAATTTTGTGTATATTTTTCTTTGTTAAATTCTGTACA
TTTTAAACATTTACTTGTCAGTTTCATACATATATATGTACTGTATATTATATCATAGTCATCTCCAGTG
CCCTCTTTTATTCCCTTCTATGATCTCCCTTTCCTATCTTGTCTTCTTCCTTCTTTCTCTTTGTCTTTCT
TTTAGGCCTACATTGTTTAGGGTTGCTTGCATGAACGTTGGCAGGGAGTTATCTACTGGAGCAATTTACC
AGTAACTACACTATTGAAGAAAATGACAACCCTGCCCTGGCAGCCATTAACCAGGTGTCTTCTCTCTGAA
TACCTTGTTCTTTAGGGACATGCTAGGCCAGTGCTCGCTCTACCATTGAGCTACATCTCTAAACCTTGTT
TGTTGAGAAGGGGTCTTCCTGGAAGTTCAATCTGGCCTTGCAATCACTGGCAGATCAGGCTGCTCTCAAT
CCTGGGGTCTTTCTGTCTCTGCCTCTACCTCCTAAGTGTCAGAGTTACTGCTGTGTAGATTTATATGCCT
GAATCCTAAATACTTTCTCTGAACTTTTGGTGTTTTCTTTTGTGCCTCTCTATAGTTGAAGGAACAGATT
CTGCAGGCTGATCAGACCTACAGTTCTGCCCTGGAAGGAATGAAGATGGAAATCTCCCAGCTAACTCGGG
AGTTGCACCAGCGAGATATCACTATTGCTTCTGCCAAGTGTTCCTCCTCAGACATGGAAAAGCAGCTGAA
GGCAGAGATGCAGAAGGCAGAAGAAAAGGCTGTAGAGCATAAGGTAAAGTCCATCCAGGGCGCTCCACTT
CATATTTACCTGTTTGTTTTTAAAGAATGAATTTATTCAAGGAATAACTTCCGTATTTCAGTGGTAGACA
CCTGCTTTGGGCTGGTTAGCAAGCAGGATAGTGAGGGTTGGTGGGGAGGTCAGATTGATACAGACAAGGA
AAATGACTACCTTAGTGGTACGTGGGCAAGGTACTGGGAGCACAGCCAAGGAGTTGCTTATCTAGAGTAA
AGATCTCTCTTCCTGCAAGAGGAGAATGAGTAAGCTGGAAGAGACCATGCAGAGCTAGTAAAACTGCAAG
ATGTGGCCTGAGCAGCGGGTGGGGAGCCACCATTCAAGGGAAATGGGGAATGGATGCGTTGTGGAGATAC
TTGGCTGCACGGTTGGCTAGGCTTTGTGTTTGATTAGACTAGGGTAACAAAGGACAGTAAGAAGCTATTA
CTGAGGGATGAAGCTTGAGTAGCCAAGTAATGCCCTGTAACAAGGCAGAGAATGGTTGTAGTGCTGTGGA
AGATGATGCATTTCTATGAAAGATGCCCAGGATAGGGAAGCTAGCAGAGGAGACATTAGTTTGGCACATT
TGGTTTCAGATAAAGCCTGAACTTTTATATGGAAAAATTGGTTAGTTGGCTCCACGGAAATCCTGAAATT
CAAGGGTTGGCCATTTAGTTGTGGAATTCCTGGATGAAGGTGGCATTTGAAATCCCTCTCCCCAGATACT
GCAGTTATAGTGAAAAGGCAATAGAGTATGCCTAAGAGTGACTTGGATCAAATTTCGCAGATTTCTCAGT
TGGAGTGAAGGAGTGGGATGGAACTTTAAAAGAAGTGGCAGTGAAGGAGTTTCCCAGACTGTGCCTGCTG
AGGAAGAAGGCCATGAAAGGAGGCAGGAATTTTTTCATAGAGATAGTCTAGCAGAAAAGCTCAGCAGAGT
GAGGGCTGAAAATAAATGAATGCTTTATGCAAGCGCAGTCCCACGTGGTGGTGGTGGCAGAAAGTTGATG
CGAGCTGGAAGCAGGGTGTGTCTAAGATCTTCTGTGACTGAATCTTTGTGCCTTAGTCCCATTCATTACT
GAGTGACATTTAATCACATGCACAGTGCTTTGCCTGCTAACACCTTTGACACTCTTAAGAAGCATATGTG
GGGCCTGGGAGACGGCTGAGGGAGTGAGAGCCCCTCTCTGCAAGCATAAGGACCTGAGCTGGGATTCCCA
GAGCCTACATAGAAGCCAGGCGTGGCTTCATGGTCTGTTGATTAGCCTAGCATTGCAGGGGAGGGGCACA
GCAGAGAGAGCTGAATTCTGAGAACTTGTTGGCTCTGGTCTCTGCAAATACACATGACAGGCACACTTGT
GCTCTCATGTGTATGCAACACACACAACACCCTGTATCTACACACATTTTAAAAGTTTATCTATATGGAT
AGAGGATGTAGACTGGACTAAGTAGACTAGAGAAAATGATGTGGAAAAGCTTTGTAAAATATATTTGATT
TATGTGAGTCCCCCGATTTTCCTTTTGCAGGAGATTCTAAGTCAGCTGGAATCTCTCAAATTAGAAAATC
ATCGTCTTTCTGAAACAGTGATGAAGCTGGAACTGGGCTTGCATGAGGTACACACATCGACACTTAGCTT
TTGTGTTTTTGAAGCCTTTGAACGTAACTGTTAATATTGATGCTAGAAGAAGGTAGAATTAACTAGTTTG
AACAGTCCCTTAGGAGATACAGTCACAAATGAGGTCCAGGTGCCCTCCTGCCAGAGGATGTTTATGCTGA
AGCAGTAGGATAGTTTCCTATTGTGTGTGACAAGATGGATATATAGTCTGTGTTCTCAGCAAGGGAAGTA
TCTGTAAAGTGCCAGCAGAGTGCTGGCAGTCATTGTGAAGTGGACACTGGGCGCTGCTTTTAGTGCTAGG
CTGTTGTGCTCACAGTGTCTTTATTATAAAGCATACCATCCTTGAAGTATTTTAGTTTTCATTTTATTTC
TATGAAGCATACATAGTTCATTTATTCAACTATTCTAGAATACTCAGTGCTAAATTGCACACAGGATAAC
TGATCACGTGTTTGACTCTGAAGACATTATACTAATTTAGTGGAGAATATGAGAAATACATATAAGCTAC
TGTGAAATCAGAACAGGACAGTGTGAAGTTATATTGTAAAAGTCTTACAATTTAAAAAATGATGCATCTA
TTCTGATCCATCTTTTTTTGGTGTAGGTCAAAAGTCGGAAGATTGAATTCTTTTTTTCTGAACTTCCAGG
GAGTGTTCTGCTTCCAAAAAGATTCATAGTCACAAAAGGCACCCAGTTTGCTCCTAATAGTTCCAATTTC
ACAGTCATGGAGGCCGAGAGTGAAGACGCAAAAGGCTAGAAGAATACTTTATTTCAACTAGGAAAATGGG
GGACTATTTTCATAATCTTTCAGATGGGCAAGATTCTCTAAGCATCATGAAGCCACAAAGGATTTTACAA
CATAAAAATGTAAAATTTCTGGATGGCAAAAGGCTCCATTGAAAAGACTGATAATAGAAGCAAGTGTGGC
AGCTCATGCTTATAATCCCAGCTCTCGAGAGGCTGAGGCAGGAGGAGCGAGAGTCCAAGGCCAAACTGGA
CAAGACCCTGTCTCAGAATAAAAATAACAGCAGAGGGGCTGGGAGTGGAGCTTAGAGGGAGAGCACTCGC
CTAGCTTGAGGCCCGGGGCTGGCGGCACTGGTGCTTGAAAGAAAGGAGCAGTAACCTGGAAGTAGACACA
GGCTAACCAAGTGTCAGCAAGTAAGAGTTCCTACAGAGGCGATAGGAAAGAGACCCAGTCGGAAAAGGGC
AAAGAACTAAGTAGATATTTAAATTCAAGTGAGCGAGGGAAGCTATTAAACTTCCCTAATAGCCAAAATT
TTTAAAAATAAAAATTTCTTGCTAATAAGCTTGATAATGATTTAGAAAGTTAATATATGGCCTCTCTTGG
CAAGTATTTTAACAGCAGGCTCTCCCATGCATATAGAGATTGCCTTCAGTACAGTTGAGCCATGGACATG
GAGCTTGTAAGTCCATACACCCCCAGTCCTCCCGGTATTTCCACCTGTGATATTAATAGTCATATTCTTC
ACTGTCCTCCTGGTATTTCCACCTGGAATATTAGTAGTCACATTTTTCAGTGTCCTCAGCAGTTTGCATC
CCCAGAGAGCCCACCTTATGGGAGTAAAGGTTCAGAAATGGGCACAGCAGGTATTATGAAATAAACTGGT
TACTTAAATGGTTGATTTGTGATTGTACTCTGAAATATGCTGTCATTTAAGATGGAAACATTCATTTAAT
TTTTCTGCTACTCCACATCCCTGTGATACTGTAATGAAAAAAATTTTTTAAGCACAAACTCACATGGATG
GGAAAAAAAATAGAGGAGACAATAGCCAAACATTTAAAATATTTAATATAATTTTATTTTTGTGTGCATG
GTGGGTGATTGTGTACACGCATGTGTATGTACATGTGTATGAATGTATGAAAGCTAGGGGTTGATATTGA
ATGTCTTCCTTTATCATTCTCTACCTTTTGTATTGAGGCAGGGTCTCTCACTTGGACCCTGAGCTTGCAA
ATTGGGCTTGCTCCAGAGATCCTGTCTCCTTTTTCCAAGTATTAAGATTACTGGCAGTCTACTGTGTCTA
CTCGGCCAGTATTTACATGAGTGTTATAGATCTGAGCTCTGGTCCTCTTGCACGGCAAGTACTTTACCAA
CTGAATCGTTTTCTCAATCCCATAGCTAAATATTTTATAAGGTTTTGTCAAGGAGGTGGAAGATGGATGG
AGGTGGGGGCTGGGGCACATGGCTAACCAGCTGGCTGTCTTAATGACTAGATGGATGGCTAATAAGTGGA
TGGATTAGTAGGTGAGTGGGTAAATGGATGAGCAGGTAGGTGAGTGAGTGAGAGTGTAGCCAACAAATGA
CTTTGTATGCCCTGATAAAGCCAATACCGAGCGAGTAGTAATTTGTGGACTAATCTGTTTACACTATAGT
GTTCTTTAAAAATGTGTCATTTGTCAGTATTAGAGTGGCTCTGTTTACATTAAAGAACTGAGAGATTCCA
GAGATGCTAAAGGCAGACTGTGCAGGGTTCTGTGGAGCTGAACTTCTCTTGAACCTTAGTGGGAGCGCTG
ACCCTCTTTGCCCACTGAGTGCATGCCTGCTCCCCAGGTGTCATGCCGCCCTTCCCGCTCAGGCACCGGG
AGGAATTGTTAGTAAGCTAATAGCTCTCGGAGATTTCAGAAAGATGCACAGAAAAGACAAGTTTCTCTTC
TTTTTAGCTATGTGCAAGGGGTCTCAACCCTCCCCCCGCTGCGACCCTTCAGTACAGTTCCTCATGTTGT
AGTGACCCCAACCATACAATCATTTTTGTCGCTACTTCATAACCATAATTTTGCTACTGATATGAATTGT
AATCTAAATATTTTTGGAGATAGACATTTGCTAAAGGGGTGTAGGTTAAGGAAAGCTGGTTTAATGATTT
CAGACATCAAAGTTGTAAAAATCCTGTCAGCTTTAGCTTTCTCTGGTTTCAGAGTTGCATACAGTATGAA
TATCTGTACAGATTATCAAAACATAATTACTAGGAAATGCTTTTTGCATGTTACCACCCAGGAAGGTGAA
TTTACTTTTCCAAATTAATCTAATTATCTTAATGAAAGCAGCAGCTTTGATTAATGTTGGCCACTTTAAA
GATGAGTCGTAGTTCATAGCGTAGCCCTGCATTTTAGAAATAAAAAGGTGGGTAGGTAGTCGACAGTGTA
GCACTTGTCCTGTGAATACACTTCTCTGAGATATTATAAAACATGGACAGCTACTAATCCTAGTTTACAG
GTCTATTTACACACTTGTGAGTTGACAGGCAAATTATGTTTATCAGAACTCTATTGACTAGCTTACTTTC
ACAATTTTTCTTTACAGAAAATGAAATATGTTAAACTGTAAAGATCACCATAATTTTATAGAATGCTAAT
TAAATGAAAAAAATTAGAAAAAGAAAGTAGATGTGTATTATCAAGAAATAAGATATATGATCACAGAACT
AAGACCAGTTCATGGTAAATTCCTGCCACATAAAATAGTCCTGCTTTTATGTTGCTAACTTCATATCAAA
CTACATGCCAAAAAGTATTTAAGATGGAAGGGTATTTATTTTAAAGTTACCCCTTTTGGCCAGAATTCTC
TTTAGACTCTTGTGTTTAAATTACTTTCTTTGAGTTAGTTCTTTTAATTTCCTCCCACAGGTATTGTGTG
TAAGGAGAGGGCTCCTCATTCTTCTTGATTTCCAGGTCTGATTCTTGAAGCTTTCCTCTGCCTTGTTTCC
ATGCCTTGAATGCTTATGTACAGAAGGAAGCCATCCTGCCTTTAACTTTGTCCCTTCCTTCACTCTAGGC
AGACTGATGCTTTTCCTGTGTTCATCTTAAGAGGGCTAAAGACAAATCTTTACTTTCTCTAAGTAAAGCC
ATAATTAAAACTAAAACAGAAAATATCTCAGCCAACACTGTTGTAGGTTGATCATAATTACCCTTAAACA
TACTAGTGATTCTCGTGTTCTTTTTTATTAGGCAAAAGAGATTTCACTAGCAGACCTTCAGGAGAATTAT
ATTGAGGCCTTAAATAAATTAGTGTCTGAAAATCAACAACTGCAGAAAGATTTGATGAGCACCAAATCTG
AGCTGGAGCATGCTACTAACATGTGCAAAAAAAAAGATGGCGAGATCTTTAACCCAGCACACAGCAGAGC
TGCCGGGTTCAAGAATGCAGAGCTTAAGTAAAGTTCCCTCCCTCCCTCCCTCCCTCCCTCCCTCCCTCCC
TCCCTCTCTGTCTCTTAAAGAATTACTTATTTATTTTATGTATGTGAGTACACTGTAGCTGTATTTGGAC
ACCGGAAGAGGGCATCGGATCCCATTACAGATGGTTGTGAGCCACCATGTGGTTTCTGAGAATTAACTCA
GGACCTCTGGAAGAGCAGTCAGTGCTCTTTTACTAAGCCATCTCTCTAGCACCTTAAGTAAAGTTTCTTA
AAAGTCTCTTTGAAGTGCATGTGCTACGGCCTGCTTTCCTACTTTGAGAAGACTTTCTGGCTTAGAGCTG
TGCAGTCATCACAGGCTCTGGTTTAACTCTGCCCAGTGTGCACAAGAGGCTCAGGTGGCTCAGCCTATTT
CATCACAGCTTTTGTTCTGTGCACCCTGAGTGTACATGTGTGTGAACAGCAGCTTGTTCCTGAGTTTTCA
TGCTGCCTCCCACTACCTTCATCACACCTGTTCCATAAGAAGTAAAACGTGGCTTTCTATAAAAAGCACC
CATTGCACTTTTTTTTAAAATGTATTTATTTTATTTATGTGAGTACATTGTAGCTGTTTTCAGACAATAC
CAGAAGAGGGCATCTGATCCCACTACGGATGGTTGTGAGCCACCATGTGGTTGCTGGGATTTGAACTCAG
GACCTCTGGAAGAGCAGTCAGTGCTCTTAACCACTGAGCCATCTCTCCAGCCCAAAGAACCTGCCAACTC
TTTTTTTTTTTTTTTAAGATTTATTTATTACATGTAAGTACACTGTAGCTGTCTTCAGACCACCAGAAAA
GGGCGTCAGATATCGTTATAGATGGTTGTGAGCCACCATGTGGTTGCTGGGATTTGAACTCTGGACCTTC
GGAAGAACAATTGGGTGCTCTTACCCACTGAGCCATCTCACCAGCCCCCCATTGCACTTTTGATCAATTA
ATTTTAGGTTGTTACCATAAGAAAGGTTATTTCAATGAGAAGCCAACTGACTTGAGTTTGTTCTGTGTAG
CCTGTGTGTTTTCCTACCAGAAGCCTTTGTTAGCATCCCCACCCCACTCTCACCCACGGTGACATTCTGA
GCTTTCTCTGTGCACGGGGTGCCCTGGCCCTGTTCCTTCTGCACCCCACTGGCAGCATGTTTGGCCGCTG
CTATGCTGGGAGCATGAGAGCAGAGCCCGAGGAGCGCTTGTCTCCGAGTGGACTGCTCATTTGTAAGCAG
TAGAGTCCTGTCGCATAGCCTCTTATGAACATGCTTCTTTCAGCATTTATTGGAAAGAAAAGTTGCTACA
GTTTTTCATTTATCTTGTTTTCTAATCTGCTATCCAGGCCAATCCATGGCCAGCACAGACATGACGGAAT
AAAGACCGAGCAGTACAAAACAGGTCACCACTCGCCTCGAGGACAAACGTTGGATAGCATAGACCCTGTG
GCCAGGGGTCCCAGCCCCCTGAGTTCTCACATCAGCCCCGGCAGCTCCACCGTCTCTCTGCCTTCCAACT
TTCTATTTGAGGCTCACTCTTTGCCTTCAGTGCTAGATATAAATGATGTCAACTTTTCTGACAGTCTGTC
TGACTGTATGAATGACCAAGAAGAGTTTGTATCTTCGGTATGAAAACTTTCTCGTGCTAATACTTATTTT
TATTTTTAATTTTAAGCTAAAGAGGGTGATTTTTTTTTTTTCTTACTGGGTCCCAGTCAGTACCCTGTAT
CACTTTCACATTTGTAGTTTTGCTTGTGAAGGCACATTCAACCAAGACAGCTTCAAATTCAGGTTCTAAA
ATACTTAGAATATGAGTGCAGGCATTCACTGACTTTAGCCTGCGCCTTCTTGCCTGCCTTTCCCAAGAGG
GCTGACCATGCTGCAGGGATTGAATCAAGGGCTCTGTCTCAAGCATGGAGACTGAGGAGGGAAAAGAGGG
GCTGCTGGGGAGGAGCTGGTGGCCTGGGGCTGAGGGTGGTGCATCTAAGGTGAATGGAGCATGATTTGAG
TACCTATGATGGCGCCTTACCCTCACCACTAGGCTCCAGTGTTCTTTACCTTCCATCGTGAAGCCGGTGT
TGGGCTGTCCATTGCCTGTTGTTAGCTGTGGTGTGTCTTTGTGAAAGTTTAGTAACCTTTGTTTTTGTTT
TTTTGTTTGTTTGTTTGTTTATTTTTGAATGTGTCAGCAATTCCATGGAAAGATTTTCTTAAAGTTTTCA
AAATAAATGTCCAATTTAACTTACACATAGTTAACAAAAAAAATCAACACCCTGAAAAGTACCTTTCTTC
TAAGTTTGGCAGCCAGCCTTCCCTGCCCTATGATGATGTGATTTCACAAATGTCACCTTTTCCAGCTAGT
GTGAGCATCACGCTTTTCCTTCAGAAGTCAGGTATCTGATGGTTGCGCTCTACAGGGCCAACACGGTTGG
TCCTTATTATTCATCACTTGCCGGTTTGACTGCCCACTAAACTGTACTGTGGCCCTGCTGTACCCACATG
TGGACACACAGAAAGCAGGAGAGCTGGCTCCCACGCTCCTAATAGAGGGAGCAAAGGTGGCCTTGTGTTT
CGTTCCAGTCTCAGTGTTCATGTGGTGATGGCGGGCAGCACCCTGCTGTGTGAGAGCCTTGATTCCAGCA
CCAGTTACAGTGGTAGCCGTGGGAAAGTCATTTCTCACTTCTGAAACTCATTTCTGTTTTGTCAAATAGA
GACAAGAGGGTGTATATATGTCTATACTGTGTGTGTTTATTTCCCCCGGAGGCAATGATTTGTGCTAACT
CAGCGTTTAAAGTGACTTCTAAAGTATAACATTAAATGAGAGCAAACTGCGTGTGCTAGATTTCCTGTAT
TACCTTCAAAAATCTGAGATCTGAAGTATCACCAGAATTGAGAGTTGCAGATCAAAGGCCATGGAGTGGA
ATTTTAAGAAAGGGAAAAATATTGATTTTTAACTGGCATTTAATTTGTTTCCTGTAGATTTTCAGTGCTT
TAAAGTGAGAGTAACATTCAGAGTTTTGAAATAGCAGGCGTTGGCTGTATTCTTCAGTAAGAGGCAGGCA
GGCATTTCTAGTCTAAGCCGAGGTACTCTCAGACAACTGACGACATTTCCTATACACTTTACACAGACAC
TCTTTGGGTCAGAAAGAAAGAGCTCTGTGGAGCTATGTTTTCAGAACTTGCCTTTTTTTCTTTCTTGGAT
TTAAGACGAAAATATCTCCTCAGGAAAAATTCTCCCTTTAACAGGGCTAGGCAGAAAATATCAAAATGTT
GGGGCATTCATTCCTGCTTCCTAACACATATCATGATTTGTCCCTCTTCCAGGGCTCGCTGCCCACCTCT
CCTCTGGGATCGATAGCTACCAGGTTTCTGGAAGAGGAGGAGCTGAGGTCTCACCATATTCTAGAGCGCC
TGGACGCCCACATTGAAGAACTGAAAAGAGAGAGTGAGAAGACGGTGAGGCAGTTCACAGCCCTCGTGTA
GCCCTGCACAGCCACAGACGGAAGACTGGATTATAAAGTTGTAATGAAGCAATGCTCGCAAGGGCGGCAC
TGAGGAGTCTGCAGACTGGGCACTTGGGTATTTTCACTGCGTTGTGTGGAGGACTGCTTCCATAGGAACT
TGTGAGAATAAACCGCTTTGCAGACTTTTCTCACATGAATGTTTATTACCACAGAGCAATGCTTTCTCTT
TCCGACTTACATGTGAATAGCTGTGTACTACTGAAAATAAAGATTGTACTATACAGTTTGAAACTAG

[0101] An exemplary cDNA sequence of the Cep63 gene in human chromosome 9, is provided directly below.

(SEQ ID NO: 15)
AGCGGAGGGCCGTAACTGGGGGGAGCTCCTGACTCCAACACCCCACCCAACTCCCTCCTAGGGAGAGAGA
GCTGTCAACCTCCAAAACCAACCCAGGGAAGGAGTGAGGTCGAGGCCAAAACTTGGACAATCTCTGCACA
TCTTGCAATTCAATCTGGAGCCCCTTTGCTGTCTTTCCTTTTCCTGAATCTACTCTCAATGTTGACAGCA
CTGTGCGATTTCTGTATTTGCCAGGGGCTTCTCGTGGGAGGTCGGCTCCAGCCCTCTCGAGAACCCTCCG
GAGACCGTGGGGATGAGGCAGCGCTCAGCCAGAGAAGCCCTGGAGCCCAGGACCAGCGCTTCAAGTGCAC
CGGGCGGGAGGCAGGGGCGCAGGGAGGGAGGCTCTGGACCGGCCGCCCCTGCTGACTATGGCCCCGGTGC
AGGTCAAGGCTTGGGCCCGGGGATTTCCTTTCAAAGGTGACTTAGAGCCGCTTCATTAGGGTAGCGCCCT
CCCAGGCGGGCCCTAATGGCGTGTTTGGCAGAGTCAGCGAAAAGCAGCGCCCTGCGGCTCCAGCGGCGGG
GGAGCGCCCTCTTCCGCGCCCTCGCCCTCTCCCGTGTGGGGCAGCTGCGCGCACGGGGCCATTTGCAGCG
CAAGCAGCCTAGCGTGCGGCCGCGGCGCCCAGGTCGGAAAGGAGGCGGCATCATGGAGCTGAAGAAGGAC
ATCAACGCTGTATCTATCGACATGCTGCTGATCGTGCACTCGGAGAAGCGGCGCGCCGCACAGGGATTCC
AAGGTGTTGGAAATGGAGTCCGAAGATGGCAGAAATTAGAAGGAAATGACTTTCACGAAAACTTGGTGGA
GAAGCAGCACCCTCAGCAGCCCCAGGTCATCACTTCCTACAACAGCCAAGGTTCCAGGGATTCTGGCATG
GATATCTCTAAAGGCCATTCTTCAGCCTATCCCAGGGGACAATTTAAAGTGGAGTAGGTGAGAAAGGCCT
CACTGAGAAAGTGACATCTAAGCAAGGAAAGAGGGTGTCACTCTGTGGCCCAGGTTGGAGTGCAGAGGTG
CGATCATAGCTCACTCCAGCCTCAAACTCCTGGGCTCAAGCAATCCTCCTTCCTCAGCCTCCCGAGTAGC
TGGGACCACAGGGACACAACTGACTGTGGAAGTCCACCCTCGAGATGCCATGCCCCAGCTGCTCAAGAAG
TTCTCCTTGGCTAAACGTATGTATGACACAGGTACTCATGGTGGAGGGCTGGCAGAGAGGATTGAAGGCA
GCTGGTTGGGCCAGATCCCAGCCCAAGCATCTTCTGAGGGAAGGAGAAGAGTGACATGGGCCTGCAAACT
GGGAAAAGGCAGAAGCATGACAGCTTTATCCTGGGAGACTCTTTTCTCTACACCCAGCTACCGCTGATTT
TGCATCTCTGGAACTAGTCATAGGTTTACAAGGTGATAAAAATGGAAACACAAGACCCCGGCAACCTGGA
GGGAAAGATGCCCATGCCTACCCCTGGGATCGATCTAGCCTGAAATCCATGTCCCTGGACCTGCAGCAGT
TTGAGAAATTGGATATCTACGCCTCACAGGTGACAGCCAAGAGTGGCCTAGACGAACTGGTGAGTGACCT
GCTCCAGGAGGCCCACACTGACCTGGAAAGGGTCCGCGCCATCTGGATCTGGATCTGCCATCACATAGTT
TGGAATGCAGCTTAGAGAATGAGCTCGCCTGGCACAGAGTATGACATTGCAGCTGCTCAGGAGAAGGACC
GCCAAGCCTTCAAACCCACTGACATCCTGCGGACCCAGAAGACCAACTGTGATGGCTATGCTGGCCTCTT
CGAGAGAATGTGCAGAGCTGCTTGAGGAGCGTGTCAAGCAGGCTCTAGGGATGAACATTTCAGAAGTGAT
CTGAATGGTGTTGGTCTCAGGGGAGGAGCAGACAGCGGAGACTGCAGCCAGTCTGTACCAACAGGACCAG
CCAGCACTGTATCTCCCTGTCCCCAGTGCCCCGAGATAAAAGCCATCAAGGCTGTTTATATGCTCGCCGG
AGTGCAGTGTATGACCGTGCCTGGCTACTCCAAGGGTTTCGGCTACCAGACAGGGCAGAGCTTCTCGGGG
GAGTTTGACCATGCCTGGAATGCTGTGTACCTGGAGGGAAGATGGCACCTGGTGGACAGCACCTGGGGCA
GCGGCCTGGTGGACACCATCACCTCCAAATTCACCTTCCTCTACAATGAGTTCTACTTCCTCACCCACCC
TGCACTGTTCATCGAGGACCACTTCCCAGACAACAAGAACTGGCAGCTGCTAAAACCTCCTCAATCTCTG
AGGCAGTTTGAGAACAACATGTATCACAAGAGTGAATTCTACAACAAAGGGATGCTGAGTGCCCACCCAG
AGACTTCCATGATCAGAACAGGTGAGCCCGGAGCAGGTGCCAGTGTGCTAGCAGCAGGAATGGAGCATTT
CGCACTGTCCTCCAGGAGCCCGCCTGAGACTGCGCTTTCAAGGCATGCCCTTCCAGACGCATGGCTTGTG
AGCTTAGCACAAAGCTTGTGTGTGCATGTGGATGAGTGGAGGCTGCTGAGGCAGCCCAGGCCATCAGGGC
AGGGAAGGGCCATAGGCCACATCAGCAGGGACAAAAGCTCACTCACACTAGCATAAACCCAGAAAGGGAT
GTGTCTGAAGGCTGCAGGTTTCCTAGAACTTGAAGGCTGAACACACAGCCTGGCATGTCACAGAAGCCAG
GGCTGGGCACTTCCTAGCTGGGTGAGTCTCTCTCAGTTCACATAGCAGGGAAAAGGACTACGTCACCCTG
GCTACACATAGCCTCTGGGCTCAGGTCCCCAACAGAAGCTACTGGCCTGCTGTGTTCTCTTCCCCAACTC
CTGCTGGAGAGAATACATGGCCTCAGCAGAGCTGGAATCTGGGTGTTGGTGGTCCAACCAGCAAGGATGG
GGAGCAACATGGGTCTCACAGGACAGGTGGGGGCAGTCCCACCCAAGACAGAGAGTTGGGGCAGACTTCC
TTAGGGAGGTGGCCACTGAGCTGGGTCTTGGGAGAGGAGAACAGGCCTAGTAGCTAGACAGAGATGGACA
TGTTCTAGGCAGCAGAGGAGAGGCGGGGACACAGTAAGCCCCCAGCCTCCAAACTCAGGCACCCCTGGAT
GAGGGCCAAGCTCCAGCACCTCTGCCTGGCTGGCTCAGTACCCCTCCCTTCTGGAGGTGGGACCCAGCCG
TTTCCAGCCCACTCCCCTGGGGCAGTATAGGATACCCAGCTTAGCCATCTCCCATGGCTGGCCTGGGCTG
ACATGTGCTCTCCCAACCTTCACCACGGAGCCATGGCAGCTGAGTATGTTTGCACACTCTGAGGCATACG
GGGGCTGCCCTGGAGGGCCAGAACTGGTCACAAAAAAGCAGGGCCTTCTCTGGAAGATTGTCTCTTATGC
CTCTCCAAGGCCTTGGCACCTGATCCAGTGCTGGGCACACAGCCTGGGCACGCTGCACAGCCCTGTAAGT
CGGGTCAGTCCAGCCTCCCACACCTCAGCAAAGGACTGCCTGGTGGCACCGTCTCTGCCACTGGGGCCTC
CATCCGCCCAGGACAGGAGGTCTGAGCTCACACTGACTATTAGCACAGGGTGCCTGTGGGTGGGCCCAGA
GCCCCTGGGGAGCTCCAACCCACATTGCAGGGCAATGGGGCAGCGGGGAGCACAGGTGTCCCCAAGTTAG
TTCCAACTGACTTGTCCCTTCCACCACACAATGGCTTCCTTTGCCAAGTTGCTGAGCTCTTGCAAACTCT
TCCAACTCCAAATACCTGGCAGCTCCTGCAGCTAAAATAACAGCGTGAAGTTGCTCAATTTGAGAATCCA
TTTCCTGTGCTTACAACAGATGCAGGGCTTGTTCAATGTATCATAGGCCGTGGAAATATCGGAAAGAACT
GACCAGGTCAAAGCAACACCAAACTGATGTCATTGAGTGGAGTTTGCCTTTTTAAGAGACATAAAAATAT
AAACACCAGATTCCTTAATTTATAGAAATCTAAACCTAAATATGATTCCATATATCTGAAAAAAAAAAAA
AAAA

[0102] Anapc13, or anaphase promoting complex subunit 13, is a component of the anaphase promoting complex/cyclosome (APC/C). Anapc13 is required for ubiquitin ligase activity of the APC/C and controls progression through mitosis and the G1 phase of the cell cycle. The cDNA sequence of Anapc13 in Mus musculus is provided in GenBank Accession No. BC028526.1 (GI:20306452), incorporated herein by reference. The amino acid sequence of Anapc13 in Mus musculus is provided in GenBank Accession No. AAH28526.1 (GI:20306453), incorporated herein by reference. The cDNA sequence of Anapc13 in Homo sapiens is provided in GenBank Accession No. BC005398.1 (GI:13529286), incorporated herein by reference. The amino acid sequence of Anapc13 in Homo sapiens is provided in GenBank Accession No. AAH05398.1 (GI:13529287), incorporated herein by reference.

[0103] An exemplary DNA sequence of the Anapc13 gene in Mus musculus strain C57BL/6J chromosome 9, GRCm38.p1 C57BL/6J is provided below.

NC_000075.6 (GI: 372099101: 102626296-102634244):
(SEQ ID NO: 3)
GTGACCCAGAAGAAGGGCGGGGCCGGGAGGAAGCCGACGCGCGCGCAGTGGGTAAGGGTTTTTCGCGCCC
GCGGCCCGGGTTTCCGAGGGTGGCCAAGCGTTCGCCCTCGAACTCCGGCGTCTACCGCTTCCAGAGGCGC
GGGCCGGTACTTTCAACCGAGCTTCAGAGCCACTTCTTTACTGCACGCTGTGCGGAGTGGAACGGAGCCC
CCATGGCGACGCTCGACCTCCCCCCTTGCACTTCCGCATGTAGTATCCTCCCACCCCTCGAACCGGAAGT
CGCTGCAGCGGGTGACTGTAGTGTCCCAGGATGGTGGCCTCCGAGGGCCATTTTAGTGTAGGCGCCGTGC
TCGTAGCTTAGAAATACATTTACAAAGCTGTGTGCATGAAAGGTGTGTATGTCTCATAGGACGTACGCAT
CTAATGTCTAGAAAGAGATATCCGGGCAATGTGACAAGCTTTCCTCCTGTTGTCACGTATTGTGCCCAGA
GATCTAGGGGACTGGTGAAGGAATGGACCCTTGGGACTGCACTCAGCCTGGGGTCTAAAGGAAACAATCT
GAGAGCTGAGAGTTTGATATTATCTGGTATCCGGAGCGGGGGAACTTTCTGTTTACGTAAAGGGTGAGCA
CCCGAGCACCTGACCCAGGAAAATAGATGTGTTTGGAAGGACGGCCAAGCATAAGTGATGAGGGACGGGG
GTGGGTGAAAAGCGTGCTAGTTTCTAAGCATGTAGAAGAGAGTCATGTTACAAAGTATTGAGGCGAACTT
GTGGAAAGACTGGGTATCCTTACATTACCGCTGGAGACAGTAGTACCCTGCCAGTCAGTCACAAAGCTGA
CCTGACTTGTTTCATAGATCATTTGAGGCAAGCAGCAAAGCATTCAAGGACAGAGCCTGCTGAAAAGCTG
GAGAGAAAGTCAGAGCACTTTAGAAAAAGGTGCAATCCATAGGGACTGGGAAAGTCAGCACCAGAAGGTG
TGAAATGCAGCCCAAGGCTCAGCTACAAAAACAAAAGGCTTGTCAAACCCTGAGGGGTGATTAGAAGTGG
CCCTTCAGCTGGCTTTGCGTTATCCACTAGCTAGGGTCTGGTTATGTCTGAGGAAAACTGCTAAGTTATC
ACCTGGTTTTAACGTGGCAGAGGGAGCTTCAGTGTGTGTGTGTGTGTATACGCGTACACGAAAGTTGTGG
TGGTGGGGGAGATTTCTGCGTACAGGTGGAGTTGTAGATGAGTGTAGAGGCCAGAGGTCAACATCAGTGT
CTTCCTTTATTACTTTGAATCTTAAACCTGGAGCTTTCTGATTCAGTTAAACTGCCTGGCCTGGCAGCTT
CCCAGAGAACACAAGTGTGCCATCGTGCCAGGCTTTTTCTGCGGGTGCCAGGAATCTGAATTCAGGTCTT
TTTGCTTGCACAGCAAGCACTTCACTCCACTGAACCTCCTCCCAGGCCCCAGGTTGTTTAATTTTTTAAA
GTAAAAAGCCCTTTCCCTCCTACAGACTAGGTAGATAGCGCTAGCTTGCTTGCCTTTATTCTGTTGGAGG
CAAGCACATAGCCGCGTAGCACAGTTTGTTTCTTGTATGAGTCTCCCTTCTCTCGGAAACAGAACAGTTC
CTGAGAGAGCCACTGGTACTAATCCTCACAAGACCTTTCCTTGGGTTGCCACTTTGTGGCAGGGAGCACA
GTAGGGTGTGTTTGTGATAAGGAACAAACTTGGAAGCCAGAAACCCAAAAGCACTGCTTGATGACTGAGT
TAGACTGCAACAGTTTCAGGAGAAAAATGTGGAACAATCTGTGGTCTGGGAGCTTAGCAAGCATCCTGAG
CACTTGGACCAGGCACTGAAGAGAGCCAGCAAGATGGTTTAGTGGCTTAAAGGCGCTTGCTGCCAAGCCT
GGCAACCTGAGTACAATCTCTGGGACCCGCCTGGTGGAAGAAGAGAACCAAAATCCCCAAGTTGTCCTTT
GACTTCCACACGAACTTACACATATACATTGTTTCTTTCAAGAAGGAAGTAGGCTGGGTGTTGGGATCAC
AGCACAAAAGTTCTTGCACCCTCACATATCCAGGGAGGCCGAGATGTTAAGCATGCAGGATTGTTCTTCC
AATGTGAGAGATATAAAACTTGTTCAGTCCACAAAGCTGGGAATTGGAAGTGATTGACAGCCTGGTGATC
TGCGTTATCTGTTGGGCCAGGCCACATCAACCTACAACCAGGACCGAGGGTGGCTAGTAATTTAAATGAC
CCTGATAAGCAGGGGTTCCCTAAGCTCCAGAAGTAGCTAAGAGACCAGATGATGTCTATGTTATTGTATG
ACCTTCCTTAGACCCTTAAGCTAGTACAGGTAACCTATCTCTAGAACCCATCGTCTTGGAAGAAATAACA
TACCCTAAGTCGAGTTTCAATGTAATTGCACCTCCCTGTGCACCAGAAACTGTTATTACACCAGGAAACT
TTCTTCCAAATCATACTATGTTTAAGTTTGTTCGGAGTAAACCGCCTAGCATCAGACCCCCCAAGTCTAA
GCAAGACTGATAAAGTCAGTCTGAACCCAGTTTTCATTCTCACCTGACAGTTTGCTTCCCTCCCTGGACT
CCTGCAGGGCCCCCTCAGCTGGGGATGGAGGTCGGTTGGCAGTGTGCTTAACTGTAGTATACACAACACC
CTGGTTCTGTAACCAGAGCCGGTGGCACAGGCCTGCAATCCCATTGGTGGAGGCAGGAAGATTGGAAGCT
TAAGGCTGCTTTTGGCTATAGAGAGTTTGAGACTCTCAAAAAAACAAACAAAAAGGAGGACGCCCAGAGG
GATAGAGAACCTGGAGCTGCCACCGTTGATCTTGGATAGTTCTGTTGAGTTCAGTCTGGATGCTGTTTAA
GAAAGGAAGTGGTTTCCTGGGTAAGCCCTGCTGGCCACGTTGTTCCTGCCCTGAGAGTTAGCAGCTGGCC
TATGGTTGGTCACTTCACACATCCCAGCTCAGTGTCACCCAGCTGTTCCCTTAGCTCCTGTGCCTTTAGA
CTGCCAATGTTTGGGCCAAGACGGGTGGAGACTTGTGCCAAATCGTAGGGGAGGGCTTCAAGAGCAGGAG
CTGACACTCAGGTAAGTCGGTCTGAGTCAAGTCAGAGACTCGTCAAAGACATCACAAGCAGGGAAGGGTG
ATTGTATAAGATGGTAAAGATAAAAGAAAGTTACATTTCCACGCAGTGTCTTCTAGGACCTTATTCTGAA
GACCTGTGTTGCTCTCTGGTTCCACTAGCAGCCTGGTGTGTTGATCAAGCATGTCAGCTGAGGTGAGGAG
AGAACTGGAGTCTTTATGTTGTCATCTGACACATACAAGATGGGCCTTTCCTGGGGTAATGTTAAGCACA
GCAACAAAACCAGTTTCAAGGTGGAAGTATGAGGAATCCTAGTCCTGGATTATACTATACCTTCACTGTG
TTAGAAAAAAAAAAAAAAAGACCTCTTTGGCTTACAGGCCTGACAAGATCAAAGCTGCAGGAGGATGGAC
AGTGAGGTACAGCGAGATGGAAGGATCTTGGACCTGATTGATGATGCTTGGCGGGAAGATAAGCTGCCAT
ATGAGGATGTCGCCATTCCACTGGTAGGTTGTGATTCGAGCTCAGGAGAAAATGTGGTGAGACTTAGTGG
AGGTTGGTGGGAAGTGAAATGCTAAGGCCCAGAAATCCTACTGCCTGGTGTAACTAGCTTCAATACAGGT
CATACCAGGGCTGGAGTATACCCGGATTTTTGGAGCCACAAAAGCCCAGAGGGATGCCAAGTGTGAGTTT
AGCACATCACACCCAGGAGCAAGGAGCATTGCTGGCTTACCAGTCTTTGTGGGTTTTTTTTGTTTTTGTT
GTTTTTATTTGTGTGTGTGTGTATGTATATATTTATGTATGTATGTATGTATGTATGTATGTATAGTGTG
AGAATGTCTGCCACCCATGTGCAGATGGGGAGGGTGACAGAAGAAGGCATCAAATTCCCTGGAGCTGGAC
TTACAGGTAGTTAGAGATCACCCAACACAGGTGCTGGAACAAAGCTTGGATCCTCTAAAAGAAGAGTCGG
TGATCTTACCACTGAGCCATCCCCCCAGCCCTTAGGATTTATTTCCATTTGTGTATGTGTGAGGGTCTGG
GATACAGTGGAGGAGCGTGTGAGTACAGGTGCCCTCAGAGGCCAGAAGAGGGTGTTGGGTCCCTTGGAGC
TGGAATTAAAGGCAGTTGTGAACCACCCAACATGAGTGCTGAAAACCAAACAGTGTCCTCTGCAAAAGCA
GTAGAGCCCTTAACCACTGAGCCGTCTCTCAGCCCCTCTGATGCAGGCACACAGCCAGCTGCTTACAGGC
AACCTTGCCTTTCTTCTTTGGCCTGTAGACATACAAGCTCTCAGTAAACCTTTTCTTTGCTGATCTCTAG
GAAACTCCCTTAAAAGGCTGTTGTTGAACCTTCTGTAATAAGTAACCCCCCACTTTTGCTTATGTAGATT
TAAAAAAAAAAACAAAAACTCATTGATGTTACAAAGGCCTAACAAAGAACAAGGCAAACAGAGTCTGGGG
ACTTTCTCTGTACAGTGTGACACACGCTCTGGAAGAGCAGCTAACACAGCATGACTTCCAGGAGCATCAC
CTGCACTGCTGTTTTACAAAGAACAGACTCCACTCGCTCACTCACCGGCACTCTCTTTCAAGAGTAAGAG
GTGGGATGTGTTCAGTGGATATTCAAGTCGCAGCTTAGTTCAAGTTCAGGACAATAAAATAATAAGAATC
ATAGCTACAATTTATTACCAGTTTTAAGCCATAGACTGAAATTAAGGCTTGCATTATCTGTAATCCTTAA
GACAGCCATACAGGGGAGGTGGTAGTGTCTCCGTTTGGCAGGAAAAGAGTAGGATTAGAGAAGTACACTT
ACCTCAAGTCTAGTGACTAGTATGTCAGATTTCATAAGCAAAGCTCAAAGTCTGTAAGCTTTCATCTGTC
CACCCATCCATCCGTCCATCCATCCATCCAACAATCACTTCTCCAAAGTCTACTGTGTGCCCTAAGGGTA
TATGAGCATAAGATAAAGTTCCTGTTTGGAGCCAGGGATCAAGAGAGGTAGGTGACTAACTAATGACACT
ACCAAGCAGGAGGGAAGGATAAGCAAGTGGAGAATGGCTGGAGGCCTGGCATGCAGTAGAAATGCAGAGA
AGATGTAATGCTTAAGAAAGAATCAGATGGTTCATGGTGCTAGACAGGGTACTGTAGCAAAGAAGAGTGT
AGCAGGCCCAGGGTTTGAAACACGTTGGGAGATGGTGAAGCAGTGGGCAGCAATTACCTTAGTAATTAGG
AGGCAGAAAGTTGGGCATAGTTTTTGAGAAAATGTTTGTGCCCCACTTCGACCTCCTTCTCTAGGTATCT
AGGGATGAAAGGTCTGTGGAGGGAAGCTGCCATAGCTCACATTTGTCTTTCAGAAAGTGGGGTCTGTAAC
ATTGACAGACAGCCTGATAGAAGAAAGGGCCAGGGGACATCATGTGACTGCAGTGCAGTGATCTAGGCAA
GGGAGGAAAACCACAACAGCACCAGGAAAAGTGCTGTGACTTGCTGAGCTCCGTACAGCAAGACCTAAGG
AACACTTACATGGTAGGGAATGAAGGGGGAGGTCCCTCTGCTGACTTCCTGGTGCCATGGTAACCTGATC
CTGTGGTCCATCCACACAGTGTTGTGATTCTAAAGGAATGTGTCTGTCAGTTAGCTTTTGCTGCATAACA
AATTATCCTGAAACTTAATGGCTTACAATAACAACTGTTTGGTCATAATTTTATTTCTTATTGGGGAGGT
CTGGTCCACACCAGTTCAGCCAACTAATCCTAGGCTTGCTGGTGCTGCAGTGTCAGGCAGCAGACTAGCT
GGAGCCCCTCTGCCAGTTAACAGGATGTCTCCAGGAAGTAGGGTGCCTGGCACTTGGCACACACCACCCT
GCAGGTCCTCTGGGACCTCAGCCTCAGGTTCAGCAGCAACAGGGAAGTGCAGAGCACTTAGGGCTCAGGC
CCAGAACTGCCCCACAGCTGCATTCTGCTGAGATGGGCAAGTCTGTGGCCAATCCAAAGGCACAGTCAGG
GTTAGACTCTGCGGCTTGGCAGGAACAGCTGCAGACAGCTGCAGCTGTTGGTGAATTTGTCCCTGTGGAT
ATTGTGCGTATGGTATTTTGTGTTGGGTGGGCATGTTTTGTCTAGTTTTACATGGTAGTATTCATCGCAA
GAATTAATAGTCACCAAGCAAACGATACATCATTTTAGGAAGCCTAGTATGCCATTAGAGAGCATGACAT
TAAGTCGTTCTTAATCAAAGGCCTGTTTATTTTTTGTGACCTGTAGATAGTTATTAAGGTCAGATTTCTA
AACGGACTAGAGAATGACAGTTCTCTGGCTCTGTTTACAGAATGTTGAATCTCACTTTACTTTCGGCATA
GCAGACGCATGTTGTGCAAACACATTGGGGTTTTCCTGTATGTGTGTACCTGTGTGCCATGACACACATG
TAGAACTCAGCGTTGTCTGCAGTGCCTTTACCCACTGAACCACTTTACTGGACCTGCTTCAAATACATCT
GTACATATTGTAGCCAAGTATCATGTTCCATATGTTGAACATAATTTTAAAAATAAAAATACCTCCACAT
AGTATAAATATAAGTGAGAAATCCTAACTTTGAATATGAAAGCATCAGTTTTCTAACACAAAGTGTAAGT
TCAGGGAATTGCACAGAAATACATGTGGTGAACTCTGGAGCCATGGCTTATCTCTGTAAGAAAATGGCTC
TTGGGGTGTGAGCTAGTCTTTACTGTGCTTTCCACTAGGGGGAGCTCTCACCTGTTACATTGTCAGTGTC
CATTATCCAGCCCATATTGTCACTAAAGAAAGCATTTTGTTGCAGCATTTTTTCTTCTTGATACAATTCC
TGTATTTGAGAACATATCAGCAAATCAGATTGGCCCTTAAAGCATTTTTCAATAGGTTTAGCATTGGTTC
TTGTCAGTGTTCTCAGCCACTCAGCAGTGTGTGCCCTAGAGTACTGAGTACCCTCACAGCATGCACTGGA
TCTAATGTCCTTACTCTCCCCGTCCCCAAGGCAGAGACATGGGGGTGAAAAAAAAAGCTCTTTTTTTTTT
TTCTCCAATTTTTGAGAGTGGAAACAAAAGCCCCCAAGGGTTTGAATTACCTCATCAACCCAATAAGCCA
GCAAATGAAGGCTGTCTGGGCCTCCAGTCTCTGCCCTTAGCCCTCCTGCCCCACTGCCTTTTATAAGAAA
ACCAGAGTCACAGGGCCAGCATTCCCATGAGGCTTCCAAGCAAGCCGCACTGAACAGACCTCTGATATTT
TCTATCCATCTGTTTGTTTAGGCTCTCTCTTTAGAGCATCATATCAGCTTTGCTGGCTGTTCCCAGGCCC
TCGGAGGCTTTCTTTCCTAATGCCTTTGTGTTTTCAGAAGTAACTGCAGGACCAGGTCCACACCTATAAT
CCCAGCTCCTGGGAGGCAAAGGAGGATGGGAAAGAGACTTGGGGGTGATCGGCTGAGAGTGTGGCTCAGT
GAGAGAGTGCTAGTGTATCTCAGCAGGGCCCTGAGCGCAGTCCCCGGCCGCGCAGAAACACAGTTCAAGA
TTTGGGGCCAGCCTAGGCTACCTGAGACCCATCTCAAGGATAGAAAAGACACTTCCTGATGGTCGTTACG
GCTGTGCTTCCCTTCCAGAGTGAGCTTCCTGAGCCCGAGCAAGACAACGGAGGCACCACAGAGTCTGTGA
AAGAACAGGAGATGAAGTGGACAGACCTGGCCTTACAGGGCCTCCACGAGAACGTCCCACCCGCTGGAAA
CTGATGCCGGGCTCCTTCCCACGGACGGAGTTTTCAAACATATGGGGATAAAAATGTTTCCTGTCGCCAA
ATGCAGATCTTTAGCAATAAATCAACACTCAAAAGCATA

[0104] An exemplary DNA sequence of the Anapc13 gene in human is provided below.

(SEQ ID NO: 16)
CAGGATGTACCAAACGTGGAAGCGGAGACGGGGAGGTCTGGGGGTGCCACGCAAGTCCCTTTCCTCCCGA
CACGAGTGCAGTAAAGAAAAACGGTTATGAGCGTAAAGTGACAGCCTCGGCCGATGGGAATAGGGGGAAG
TCCGACACTGAGCAACGAACGCATTCCCGCGCCTCCAAAACCTAGGCCGGGGGCGCTGGAAACCCTTACC
GGCACCCGGCCACCGCGGCAGACGCTTGCTCCTGCCACGCCCCCCCCCCTCCCCCGCATCACGTGTCTGC
ACTCGCTTTCCTCGGATTCCCGGATGTGGTTGCCAAAACAAAGGGGATTTGGTGATGGAGGCTTTGTTAG
AAGGAATACAAAATCGAGGGCATGGTGGGGGATTTTTGACATCTTGTGAAGCAGAACTACAGGAGCTCAT
GAAACAGATTGACATAATGGTGGCTCATAAAAAATCTGAATGGGAAGGACGTACACATGCTCTAGAAACT
TGCTTGAAAATCCGTGAACAGGAACTTAAGAGTCTTAGGAGTCAGTTGGATGTGACACATAAGGAGGTTG
GAATGTTGCATCAGCAGGTAGAAGAACATGAAAAAATCAAGCAAGAGATGACCATGGAATATAAGCAGGA
GTTGAAGAAACTACATGAAGAATTATGCATACTGAAGAGAAGCTATGAAAAGCTTCAGAAAAAGCAAATG
AGGGAATTCAGAGGAAATACCAAAAATCACAGGGAAGATCGGTCTGAAATTGAGAGGTTAACTGCAAAAA
TAGAGGAATTCCGTCAGAAATCGCTGGACTGGGAGAAGCAACGCTTGATTTATCAGCAACAGGTATCTTC
ACTGGAGGCACAAAGGAAGGCTCTGGCTGAACAATCAGAGATAATTCAGGCTCAGCTTGTCAATCGGAAA
CAGAAATTAGAGTCTGTGGAACTTTCTAGCCAATCAGAAATTCAACACTTAAGCAGTAAACTGGAGCGGG
CTAATGACACTATCTGTGCCAATGAGTTGGAAATAGAGCGCCTCACCATGAGGGTCAATGACTTGGTTGG
AACCAGTATGACTGTCCTACAGGAGCAGCAGCAAAAAGAAGAAAAATTGAGGGAATCTGAAAAACTATTA
GAGGCTCTGCAGGAAGAAAAGAGAGAATTGAAGGCAGCTCTTCAGTCTCAAGAAAATCTCATACATGAGG
CCAGAATACAAAAGGAGAAGTTACAAGAAAAAGTAAAGGCAACTAACACTCAACATGCTGTAGAAGCTAT
AAGTTTGGAATCTGTGAGTGCAACGTGTAAACAGCTGAGCCAAGAACTAATGGAAAAATATGAAGAACTG
AAGAGGATGGAAGCACATAACAATGAATACAAAGCAGAGATTAAGAAGTTGAAAGAACAGATTTTACAGG
GTGAACAAAGTTACAGTTCTGCACTAGAAGGAATGAAGATGGAAATCTCCCATCTAACTCAGGAGTTACA
TCAGCGAGATATCACTATTGCTTCCACCAAAGGTTCTTCCTCAGACATGGAAAAGCGACTCAGAGCAGAG
ATGCAAAAGGCAGAAGACAAAGCAGTAGAGCATAAGGAGATTTTGGATCAGCTGGAGTCACTCAAATTAG
AAAATCGTCATCTTTCTGAAATGGTGATGAAATTGGAATTGGGTTTACATGAGTGTTCCTTGCCTGTATC
TCCCCTTGGTTCAATAGCTACCAGATTTTTGGAAGAGGAGGAACTGAGGTCTCATCACATTCTAGAGCGC
TTGGATGCCCATATTGAAGAACTAAAAAGAGAGAGTGAAAAGACAGTGAGACAATTCACAGCCTTAAAGT
AGCCTCTTAAAAAAATCACAATCTTGGAAATAAAAATAAACACCAAAGAGTTACTGTCATCTGAAGTAGC
AGCTCTTTAAAAACATGAAGAGATAAAATTATAAAAATGATACATCTAAAGCAGTGGTGAAGAAAGCTGA
AAAACTGATACTTTTGATAGGCATTTTCTCTGCACTGGTTTGTTTAAAGGACTTCTTCCAGCAATAAGTT
GAAAGAATAAACCACTTTGCTAGACAAAAAAAAAAAAAAAAA

[0105] AmotL2, or Angiomotin like 2, is a protein that binds angiostatin, an inhibitor of angiogenesis. AmotL2 mediates angiostatin inhibition of endothelial cell migration and tube formation in vitro. The cDNA sequence of AmotL2 in Mus musculus is provided in GenBank Accession No. BC027824.1 GI:20381294), incorporated herein by reference. The amino acid sequence of AmotL2 in Mus musculus is provided in GenBank Accession No. AAH27824.1 (GI:20381295), incorporated herein by reference. The cDNA sequence of AmotL2 in Homo sapiens is provided in GenBank Accession No. B C011454.1 (GI:15079242), incorporated herein by reference. The amino acid sequence of AmotL2 in Homo sapiens is provided in GenBank Accession No. AAH11454.1 (GI:15079243), incorporated herein by reference.

[0106] An exemplary DNA sequence of the AmotL2 gene in Mus musculus strain C57BL/6J chromosome 9, GRCm38.p1 C57BL/6J is provided below.

NC_000075.6 (GI: 372099101: 102717804-102733417):
(SEQ ID NO: 4)
AAGCAGATCATCGGCGCCACCGACTAGTGCGCACCTCCGTTGCTGACTGTACCTAAGCCGAACCGGGTCT
GCGTGCGCCGGCAGCCGCGGGCCGCAGCGGTAAGCAAGGTGCCGGGCACTCCGGGCAGTGCGCGAGGCCG
GCGGGGACGCTTCCCAGCAGCAGCGGGACACCGCGATCAGTCCGACCCTTTCTGGAGATCGGAGCTGGGG
TGGACGAGCCTCCCCGGGAGCGGGAGGGGAGACTGTGAACCCTTTCGAGGATCGATCCTGGGTGTCTAGC
CTAGACTGCTCGCGCTTTTGTGGGGGTGAGGACACCATTCTCCGACCCACTGGGGCTGGAGGAAGGACAG
AGGATCAGTGTTTGGGAGTGTGCGTCTCGCGTGCGGGGCAAGTGAAAAGCTGCGGTAGGCATATCTCGCT
GAATTATGAGGTTACCGTGGCTGCTTTGTCTGGATTGGGGATACAGGTGGCTTTTACCCTCAGCTAGCTC
AAGAATTCCTCTTTGTCTTCCTTGGAAAATCCTCTGCGGAGCCACGAACTGGCTCTCACTTAGAAAGAAT
GCAGCCTGCTGTCCAGTCCGGTGACGTCAGCGCTGAAGTATTTGGAAAACAAAGAGGGTTAGGGAGAGAG
GCGTACCCGCGATGCTTAAAGACCTCTCGCGGTTGCGGGTTTTGCTCGCCCGGGGCGCTCGGGCAGCCAC
CGGTGCTAGTGGTCTGCCTCGGTAGAGGTGAGTAACGCCGGGACCCTGGACTGGCCTGGTTGACTTGGAG
ACTAGCGTTGGTTCCTTTTGCTGGAGTGAGCCCAGGCCAAGGCCAGAGACCCGTGTTTGCTTAGAAAGGT
GGCTGGTTTTCCGAGTGCAGCGCTCCAGTGCAGCCCAGGTACAGCGCCCGTGTAAGGAAGTTGATTTTCA
GTAAGTGCTCTTATATAAGTATTTGAAAGAAAGATTGTGCATCTAGGGGATTCGATTGGGACGTTTGTGC
GATGAAAGGCCTCGGAAATGTTCGGTGCTCCGAGAGCCTGGCTCATAGTCGGCGCGCCTGGAATCTGCCG
GGAAGGCTCAGCATTCCTTCTAGCCGCTCCCGGATCCTTAGCGCGAGTCAGCCCAGACAGTGATTAACTT
AGGAAATACCGCGTAGAAAAAGCCGCGTGTGAGCAGACTCTTCAAGTCTTACACATTGCAGGGTGCAGTT
GGGGGGGGGGGGGAGGATTAGTTGCTGGCTTGGGTATCGTCAGGGCTCATTACCTTTCTCCAGCTCTGCC
AACATACCATTCCCAAACTGAGGTAGGACAGGGGGCTAGCATTAGTATGGCACAGAAAGGGGCCACCACC
CCCTTCCTTTGTCTCCCCCCTCGCCTCATTACCCCATCAACTGGCATAGGTAGTTGTTACTAATATCAAC
AGAGATGCAGAGGGATCATCCCCTGTGTGCCTCTAGCATACACGTAGGGAGGGGTTTTTCTAAGTAGCAA
ATGTGTGTGCCAAGAAAAGAGGTTGGTGGTCATGGAAAATGTTTCCCTGGCTCAGTTACTGCAAGCTCCC
CTCTGCCTCCTCACCAATTTCCATGGGGCTTCTTGTGCTGCTCACCTTGCAGAGTGGCTGCTAAGGTCAT
CTGTGACAGGGAGACTCAGATTTATTTTATCAGCAGCCTTTGAGCCCAGGGTCTGGCTCACGCGTCTTTA
TTCTAAAGAATCAATGGAATTATTTGCTTAGGGCTTCTTTCTGCTGGGCTACATTCTTTCTTTACCGCCT
GCCAGTAAACTGGGAACCCTATTGCTAAGTGGTTGAATTTGATGGACGCCTGTCCTACAGTTTGCCCATG
AGATTGTTTGGGGTAATGGCTGACTGCCGGGGACTGTGATATGAGATAGCCTTCTGGTTTTCTGTTGTAT
ATCTGTAAGATCAGCTAAATCTCCATAAATGTTACAATGATAAGCATTTGCCAAGGATTTATAGCATACC
AGGCGCTCAGCTTCTTACATTTCAACTCCAAGAGACACACTGTGTGTGTGTGTGTGTGTGTGTGTGTGTG
TGTGTGTACATATATATGTATGTATATACATATATGCATATATATATTTATATTAATGGCAAACTAAGGA
TCAGAAGCTCAGTAACTAAACTTAATCAATAGATGGCCATATTAGCACTTGCATCTGGGCCTGTGTAAAA
CCACCCACCTACCCACCCAGCCTCCTCCTTCATCCAGAGTGTTCCTGCAAGTGCCCCTCCCTCCTTTGTT
TGTGCTTCCTTTGACTGCTATTCTTTCTGTCTCTTAGGTGCTCTGAGACCAGGTGCCTGCTGGCCATTGT
CTAGGCAGGTGTGTGCAAGCCAGAGAAGCATGAGGACACTGGAAGACTCCTCAGGGACAGTCCTGCACCG
TCTCATCCAAGAGCAGCTGCGCTACGGCAACCTGACAGAGACTCGCACTCTGCTGGCTATCCAGCAGCAG
GCCCTGCGGGGTGGGGCTGGAGCTGGGGGCACGGGGAGCCCCCAGGCTTCCTTGGAGATCGGAGCACCCG
AGGACAGTCAGGTGCTGCAGCAAGCCACCAGGCAGGAGCCCCAGGGCCAGGAGCATCAGGGTGGAGAGAC
CCACCTGGCAGAGAACAGGCTGTACCGGCTGTGCCCACAGCCCAGCAAAGGAGAAGAGTTGCCCACCTAT
GAGGAGGCCAAAGCCCATTCGCAGTACTACGCAGCGCAGCAGGCAGGGTCCCGGCCGCATGTTGGGGACC
GGGATCCTAGAGGAGGGGTGTCCGGAGGCGGCCGGCGACAGGATGAAGCTCTTCGAGAGCTGAGGCATGG
CCATGTGCGCTCCTTGAGTGAACGGCTTCTGCAACTGTCCCTGGAAAGAAACGGTGCTCGGGTCCCCAGC
CACATGAGCTCTTCCCACAGCTTCCCTCAGCTGGCCCGCAGCCAGCAGGGCCCCCAACCCCGAGGGCCCC
CAGCTGAGGGCCCAGAGCCCCGCGGGCCACCACCTCAGTACCCACACGCTGTAATGGCTCAGGAGACTGC
GGCTGTCACTGACCCAAGATACCGACCCCGAAGCAGCCCACACTTCCAGCATGCCGAAGTCAGGTAACCC
CAGATTTCTTTCTAGTTCGGTCTCCCAGGAGGAGGAGAACCCCAAGATCATATATATCGTGGATCTCAAC
TGTCATGATCCCAATCCCAGGGCACCCCCACCAGTTCCTAGGGCTGTCTGATCTAGATCTACCCTCTCCT
GTCTTGAGAAGGGAGAGCTGGGGGGGCTGGAGGGTAAGGGGATTTAGCTGATCCAGTCATGGTAGCATGC
CTGTAATGTTTAGGTGAGGCAGGAGGATCACACCACCAGCCTGGACAACGTAGCAAGACTGTCTAAAACA
AAAAGAAACTGACATCATTGCTTTAACTCAAAATATACATAGCATTGTCTATAGCATTCAAATAAGGAGG
GCTCCCAGGGATGTGAATGGGGTTCAAAGGTGAGCATTTCTTTTTTTCTAAGAAAGAACTAACTAAAGAC
AATAGGAATCCTTACCAAACTTCTCCCGAGTTAAGTAGGCCAAAGGTGGAACTTATTGAAGGTTTTTAAG
AGAAGGTGGACATTTTTTGTTGTTGGCTCATCATTGGGAGGTGTTGCTATTGAGGCTGAAAGAACTAGGT
GGCTCGCTGGGCCACTTCTGTATAGTTACTGTCTGCCAGTTAATTACTTACTAGCTTTTCCCTTGTGCTT
ATGGGCCTAGATGAGTGAGTGAGTGAGTGAGTGAGTGAGCTGCTTTGGGGGGAAAGGGGGGGCTCAGGAT
GCTGTTGGACCAGAGTAGTGACTTGGCTTGACTTCCTGTGAAGTGAACTCTCGGGGAGTGTGTGTGTGTG
AACTCTCGGGGAGTGTGTGTGTGTGTGTGTGTGTGTGTGTGTGTGTGTATTGGAGGGCATGATATGATTG
GCTCTTAAGAGATCAATACTAGCCTTAGAGAATGGGTCATTGGAGCTAGGCTGGGAGCCCAGTTAGTATA
AGCAGGAAGCCAGATCATTGCAGGAGTCCATGTTCCTAGAAATGAGGGGCTGCCTTAGTCATCTTTATTG
GCCCCTGTGCCTTTTCCAGAGAAACAGGCACCATTGCTGTACCTCCTTTGGGGTGGGGTGAGGTGGGCTC
CAAGGAACCTGGCTGGGGACCCTCTGGGTTCAAAGTCAGTCACCCTTGCTGAATCCTTATTTGGTCCCTC
CATTTCCCACCAATTCGGTTTTCTTCACTCTGGAAGAGAATAGCCGCCTTGGGCCTAGTAGGGGAGCCAG
GGGAGCGGGGATGTGTGGGGGTGTGGGGGGGGTGGAGCCTCGTGGGTTTACTCTAGCCTCCACTCCCCCA
GACCCCCACCTCACCTCCCTTTTCAGGGCCGGTCAGGAAGAGTTTCTTCTTTTGGACCAGCCCTATTGAA
CCCTGCCAGGAAAAGATAATATCCAGGCAAGGAAGTGGGCTGTTTTGCAGGAGAACAAAAAGATAGGGAG
GAGGGCGGTGGGAAATGGAAGAACCAGGAGCAAGTGTGAACGGAAAGGAGTCGTCGCCATTCTTCCCTGG
AGCTCTCGATCATTCTCGAAGAATGTCAGTTGTGTCTGCCTGGCCTGTGGTAGGGAGGAGGGGGACAACA
GTTATCTGAGGCAACCCTAAGAGTGACCACACTTGGCAGCAAGGGGGAGTTTAGTCAGTCTAGTGGCAGC
CCTCTTCTCTGCACTCCCTGGAGCCTATAGGAGGAAAAAGGATGGGCAGGCTTTAGGGACTGAGTCAGGG
GCTCAAAGAACAGGGGAGCGAGCCATAGGCTAGAGGGGTGATTTTGGACACTGGGGATGGCAGAGGGGGC
ATGAGAGATCCAGAAGTGAAATCCAAACTTCCAAGAGGCTTCTAGAACATTCTGAGTACAACTGAGAAGG
CACTTGTGACACTTGGGGGTCACAAGGCCCCCAGAAAGAGCCTCTGGCTACCTGGGCCTAACTGTTCTCT
AAACATTAGAGTGTAAGGATGTGTTACACTCATGGCCAAGGGCCGAAAGAACACAGTCCTGAACTCTGCT
ATGGAGCTAATCCAGGGGTTGCCCCTTAACTGAGGTGATCACCAACAGAGATGGAAGCTAGACAGTCATG
GGTGAACCTGCTGTTACCAGCCATTTGGTCAAGCCTGGCTTCTGTGGCTGGAGACCCTTGTGATTTCGCC
GACACAGGTGCCACTTGGCAGCTACAGCACTGGTCTGCTGAAGGCCTAGCAGCTGGAGCTGAAATCTGTT
CCCCCTGGCATCTGATTCCCTGCTCTAACCTTAGCTGGGGTCTTGGAAAAGAATTTCGGTAGTTGTGGGT
AGCAAGACCCTTGAAACAAAGAGGAGAAAAAACTCAGGTGAGCCGTTTTAGCTGACATGGCTTACCTGCT
AGAATCCACTAGTAAGTGCCCTTCCTGGGGCCTGGGGACTCTGTGTGGCTTCCATCCCAAAAGATCCTTC
TATCAATTCAAAAGGTCATGAGCGCGTCTTTAAAGGTAATATTTAAGCTGTATTTGCTTAGGACGACCCA
GGTTGCTTGAACAGAATGAGCATCTGGATACAGCGCCACCGCCACCCTACCCCACACCCATCCTGCTCTC
TGACTCTTGAGTCTTAGGCACATACCTTGTGGCACAGGCCCTCCCTCTGGTGGCTGCCTAACACTGGGGA
GGCTCAGTCACTGGCAGTAATAGTCAGAGTGCGCGTGCACACGTGCGTGCTGTGTGTCTCGGGGCTCTGA
GCTTTATTCACCTCTTCTTTCCCAGGATCCTGCAGGCCCAGGTACCACCGGTGTTCCTCCAGCAGCAGCA
GTACCAGTACCTGCCACAGCCCCAGGAGCACTCTCCACCCCTCCACCCGGCAGCTCTGGGCCATGGACCC
CCAAGCTCCTTTGGTCCACCTGCAGTGGAGGGACCACCCAGTGCCCAGGCCACCTTGGGCAGTGCCCACC
TGGCCCAGATGGAGACTGTACTGAGGGAGAATGCCAGGCTGCAGAGGGACAATGAGCGATTGCAGAGAGA
GCTGGAGAGCACTTCAGAGAAGGCTGGCCGCATAGAAAAGGTGGGGACTCCAAGGACACTCAGAGCGGTG
GCCGGTGCAGAGGGAGGCAGAGGGGCAGGAAAGCCTATCAGGCTACCTTTTGCACCATATTCTCCTACAC
ACACCCCCAGACACACACACACACACACACACACACACACACACACATCCCAAGCTGACTCCAGACAGCT
GAGGACCGACCAAGAGGCCTGCCCTAATGCATGAGCAGTTGCTGGCCAGTAGTGGTTAGAAAGGACTCAT
TCACTAGCTCCCTGCACACTTGTACCCTCACCCTGCACAGCCCCTCCTGTGGACACCTCCCACAGAGAGC
CCTTTGTGCACCCACACAACAGCCAGTCTGTTCCAGGCCAACACTGGCCAAAGAGAAAGCCCCTCCTCTC
AGGGAAAAGAAAAAGCAACGCATTGGCAAAGCAAGCCAGCTAGGAGCACGTGGAAGACCTGTGGCTTCCA
AGTGGGAGGGGCAGCCACATGCTCTGGGCAGAGGCAGCTCAGGCTGGGGTCTGGCACCCCCACTTCCTCG
GTGAAGCCTGGCCAATTGTGTACTAAGGTTCAACTTTAGCAATAGCCTCAGGCTTTCCACTTGCTGTCTA
TCTACAGTGTTCTGGATAGGCTGAGCCACCTAGGTGCTCTCATCCCTGGTCCTTTGTAAACACTAGGCAT
GGGGCATGCTGGAGGTAGCCCCCTTGTAGAGCAGCTAGCCCAGTGTCTAGGCAGCAGTCTGGTCTACCTA
AGAGGCTGCAGTCCTGTGGCAATCTCAGTAAAGTCACTGGCCTCCCTCCCTAGGACCCTTCCTGAAGTTG
AATTAATTATCTGTCTCTTACAGCTGGAAAATGAAATCCAGCGGCTCTCTGAGGCCCACGAGAGCCTGAT
GAGGACCTCTTCCAAGCGTGAGGCCCTGGAGAAGACCATGAGGAACAAGATGGACGGTGAGATGAGACGG
TTGCAGGACTTCAACCGAGACCTTAGAGGTAAGGACCAGGCACGAGGGTTGGGGTGTTGGGAGGACATCA
TCTGTCAGACTTTGGGGGCTCTGTTTTCAGGGGGAAATTTAGAATCTGTTCTGAGCTATAGAGGCCTACA
TTAGCCCCCATCGTTGGGCCCTGAGCTGAGCTGGGACTTCCTTATAATCCCATCTCCCCAGTTTAGAGGG
TGCAAGCCTACAGTTAGGACCCGAGGGTAAAGCCCAGGCTGATAGCATCCCTCTATATTTAAAACATCTT
TTCTCCTTATTTGAAACAGAGAGATTGGAATCGGCAAACCGCCACCTGGCAAGCAAGACCCAGGAAGCCC
AGGCGGGCAGTCAGGACATGGTGGCGAAACTGCTTGCCCAGAGTGAGTAGGGGACCAGCTGAGAAACCTG
GGTGGGTGTAAAGGCAATGAGGCACAATGACGTGGCCCCACTACCCCTGCCACTCCCTTCCCCTTCAGGT
TTAACCCACCCTCACTACCCCCACCCCCCTTGCAGAGTGGTACAGATTCACTGAATGGCTGCTCTGGGAA
GGGGTGATTTCCAAAGATGAATAGGGACTAGGGAGCCTTAACTGGCTGAGCCACACACTATGGACTCTCA
GTCTCTCCTGTAGGGAGGCCATGACAGCCCTGGCAATAGATAAATGGAGGATGATGAGGGTTCTTTGGAG
TTTTCCTAGGAATGACAGACAACAGAAAGGCTGGGGACATGGGAAGCTGCAGGGGATGGTCCACATGGTG
AAACTTCCTGGGACAGCCACAGATGGGTTTAGTCAACAGCTACAGTCTGAAGGAGGCATTCAGAAAGTTT
CTCTTTAAAACAGGGAGGTCCAGGCATCCTGGAAGCTTTATAGACTAATCAATTTGTTCCTTCATTAGTG
GAGCCAGGCTAAGCACCTGGCCAGCGCTGGGCTGAATGTGAGAATCCATCCAGAGGATGACAGGGAGGTG
AGATGAGCTTAAGGCAGGAGCAGGTACCCACAAGTTCAAGGGAAAAAGTGTTCCTGAGCCATGTTCCTGG
TGATTAGGAAGCCCCTGGTGACCCTGGGAAATCTGGGAACAGCAGAAGTATGGAGGCAGTGGAGGAGGTC
TCAGACACTGAGGGGAAATGACAGGCTTGTAGGTAAGAGGTATTTAGGAGGAATATGTATGAGGGTACTT
TGTTAGGGGTGTCTAAAGAGGGAAAGACTCCAGAGAGAGGGGGTTTCTGAATGCTAACCGCCCCACCCCC
TTCCTTCGGGGACTTAGAGTGCTTGCTAATAAATAAGCCTTTGGCAGGGAATGGGCTCAGATTGGGTAAG
ACCTGTGCTATCCACTACTACCTTTCAAAATGAGGTGGTTAAAGGTCTCTGGAACGGAGGTGAAGGGGAA
AGAGGTGTGTCGCCTAGGGGTTTGCCCTTGGGAGTCTGTAGAAGCACCTACTGCTGTGGGAAGAGAGATT
AGGGGTGCTTTGGTGGGAGGGGTGGGTTTTGGAGCCCGGCTCTGACGGAGAAAGGAAGTCTTAAGGAGGG
TTTCTGGAAGCTTGCAGAGGGGGAGGGGGGCAGAAGCAGCCGGGAGGCGTTTCCTCTCCCCGGGGAGCAA
GCTAGCGCCAGGCTGTTCTTGGCTTCTTGCTGGAGCCATTAATCTCGCAGCCGCGGGTGACCTGGATGCC
TGGCATACCAGAGCTGCTGGGCTGTTCCGCTCCCAGCCCGTCCCCCCCTCCGTTCCCTCCCCTGTGCGCC
TGACAGTGGCGCCCTTCGGCCCCGGCGGCGCCCAGCCTGGCTTTGGGAGGAGAGAGTATGAATACAAAGG
GAGGCTAGGACCTGAATGTGGAGAGCTTGCTAAGATAGGCTCAGCCTCCCACCCTCAACCAAGGTATCTT
AGAGATTGTACAAGGCATCTGGAAACAAAAAACACTGGATCCACAGCTGGAGGAACTAAGAAACCCCCCT
AGCATTAGAAGGCTGTTTTGCTTTGTTTGTTTTGTTTTTCTATATAATCGCCATTTCTAAAGGGCTGAGG
TTGACACTTTTTTCTGGAGGGTACAGAATTCCTCCCCATAACTGGCTTTCCCCAACAGCAGCCCCCATCT
CTGCCTGAATTGTCTGATATGGGCCTTCAGGAGCTGACTCTGAGGCCTGACAACTGGTCCTGCCTGCTTT
TGGACAGGTGTTGCCTTGGCCTGGCACAGGCTACAGAAGCATCTACCTCCTAGTACTGCTAGGTCTGGAG
TGAGGCCTGGACATTCAGACACAGGCTGTAGTGCTAGTGGGTGAGAGAGGATGCTGTTTACGGGTCTGAA
CCTGGCTTCTTCCCTCCACTCCACTCACCAAAGGCAAGCCAGCAGAGTATGACCAAGTCATGTGTAAAGC
ATCATGGAACAGCCCCGTCTTTTCCCTCCACACCAAAGAGTGAGGCAAGCTAGGCCGATTGTAGCCTTCA
GAAGGGCAAAGGAGATAGCCTAGATTGCCCCTTAGTGCCCCTTAATGCTGTTCAACGAGTTGGTGAAGGG
AGGCCTCTGCATACTAGGGCCGTGTCCTAGCCACACATAGCCCAAAGAAAGTTAACATTTCTTCTGTCTT
TCCAGCCACATTTTGAGAGTTCGGTAGCTGAGTGTAACCTTGGTAGTTACTGTTTTGGATAATGTAGAGC
CATCCACTGTAGCAGAAAAATCTCACCAATATAGTTTTGTTCCAAACCCTGTTCCCTACGAACTCTCTAG
AGAAATAAGCAGCCATTCTTGGTCGACTAGCCCAAGACTCCCAAAGGGCGAACATCCAGGTTCTTTCTTG
CCTTGGCCAGGCTAAATGGAGAGGTTCCTCTAATGTGCAAAGTGCTCGGCAATTGCTGGAATCTTAGACA
CAAGTCTTTGGACCAGCATCCTTTTCAGTGTGATGCATGGTTTGAATTCTCTTATGATGTTGCATGTGGG
CCCCCAGACCATGCAACAAAAGGGTCGGTGAACAGGAGAGGCTACCGTCCGCAGACTGTACTTAAGAGTT
CATTTCGGCAAGCCTATAGGGAGAAGGACTGTGAGCAAAGCCTTATAGCCGGAGCCTCCCAGTCAGCCAT
TTGGTTCCTATGTTTCTTCCTCTATAAATCAGGAGCCTCAAATTCCTCCTGGGGGATCAAGTGTGATAAG
GTTAAAAGTGCACGTCCTGCTTGCACAACGAATGACCTTGTCACAGTACCCTCCCTAATCTATAACAGGT
TGGCACAGTGTCTGCCTGAGCAGTCTAGTTATCATGAAGCTTAAGGAAAATATGTTTTGGTAATGGTCAT
GTCTGGCACAGTTCAAGCAGCTGAAAGGCCACTTTGGTTTATTTGTTTGTTCCAGCAAGGGTCATGGGGG
TCAGGCTCTGCCGTTTACTCTTACCTTAGTCTGCATCTCGCCGAAGTGCAATATGTAACTCGCAGACGCG
TCGAGGGGGAGAAGCAGTTGTCACAAGTAGGCAAAGGTGGCCGCCATCACTGACCCTTTCCTCTTTAATG
TCTCCTCGGACAGGCTATGAGCAGCAACAGGAACAGGAGAAGCTGGAGCGGGAGATGGCACTGCTGCGTG
GTGCCATCGAGGACCAGCGGCGACATGCTGAACTGCTGGAGCAGGCTCTGGGCAATGCACAAAGCCGTGC
CGCCCGGGCTGAAGAGGAGCTACGCAAAAAGCAGGCCTATGTGGAGAAGGTGGAGCGGCTGCAGCAGGCA
CTGGGGCAGTTGCAGGCTGCCTGTGAAAAGCGAGAGCAGTTGGAGCTGCGTCTGCGCACGCGCCTGGAGC
AGGAACTCAAAGCCTTGCGTGCACAGCAGGTAAGCCCAGAAGACCTGTGCAGCTGGCAGTACCGGGCACA
ATTCAAAGAGTCCCTCCCTGCTCTCTAGTCTTTGTCCTCTTTGAAAGATGATTGCTTCATGTTCCCCTTG
GCGCTGCTTGGTCCCTCTCAGGTGCTTTGTATAGCAAAGGCTCTGCCTCGAGCCCTACTGTGGCTAATAA
CAGAAATTTGGTACCTTAGTACCAGTCAGTAATAATGTTCGTGCAGAAGGCTTGACCACTCTAATCCATC
TTCCCAAAAATAGGAAGGAAGATGTCTGAGTCTGTGCTTGGACATAAACATCTCTTGTGTTTACCAACCA
AATAGAGTTCTGTCTCTACACACAACTTTACCCTGTCATAGAAGGGGGGCCAAGACTTTGTCCCAATGTG
ATTGCCACTCAAACCCAATTCCCACTTCAGAGAATTGCTTTTTAGTCGTATGTGTCCCTAGTCTCCTGAC
CACCAGAATTAAGGAGAGGATGTGAGGAGTTTTGCTATTCCCTATATCTCTGGGTGGAAGTAGGAAGGGC
TGTCTGTATGTGCTGTCCATGACTGAACAGAGGGATGCATGTGAGAGACTTCATGTGAGCCTGAGGAACA
AAGTCCCCCTCGTGCCAGCCTTTACCCTTGACCATGCTATTCCTTGCTCTACAGAGGCAGACAGGCACCC
TCGCAGGTGGTGGCGGCAGCCATGGTGGGTCCGCCGAGCTCAGTGCCCTGCGGCTGTCTGAACAGCTGCG
GGAGAAGGAGGAACAGATCCTGGCTCTAGAGGCGGACATGACCAAGTGGGAACAGAAGTATTTGGAAGAA
CGGGCTATGAGGCAGTTCGCCATGGACGCGGCTGCCACTGCGGCTGCCCAGCGCGATACCACTCTCATCC
GGCACTCCCCCCAGCCCTCGCCCAGCAGCAGTTTCAACGAGGGCCTGCTGCCAGGCAACCACAGGCACCA
GGAGATGGAGAGCAGGTACCACAGGGTCAGGCAGGGGTATCTGCGGTCAGGGGTGGAACGGTGCTACCCA
GTCTCTTCCCAGTGTCCTTTGTCCCTGGTAAATAGGCCCCACCCATAGCAGCTCTGTATGTTTGACATTC
CAGAAATTATAGACAATTGTTTCCCTGAGTGAATCCCTGGTATTCGCAGGCTGGAGGTGGGTGGGTACCT
CCTAAGCTCTGGCCACTTCTCCTTCTCTGTAAGAGATCTTCATCTGAGTCTTGCAATAATAGGTGGGCTT
CCAAGGCCAAGAGGTCCTGCCTGCCCCAGGGAGAGATGTCTGGGTTTCTTTGCAACTTCTGTGAGGTGGG
TGGGCTGGAGGAGCTGAGCCTGTGGGTCTGACAGTGTGACCTCCTCCCTGACAGATTGAAGGTGCTCCAT
GCTCAGATCCTAGAGAAGGATGCGGTGATCAAGGTCCTTCAGCAGCGCTCCAGGAAAGACCCTGGCAAGG
CCACCCAGGGCACCCTACGGCCTGCCAAGTCGGTGCCGTCCATCTTCGCGGCTGCAGTGGGAACTCAGGG
CTGGCAAGGGCTCGTATCCAGTGAGCGGCAAACTGATGCACGGCCAGCGGGAGGTATGAGGAGGCTTGGT
GTGGGAGGGAAAGGGGTAGGAATTTTGGAATGCATATTACCAGACTCTCAGAATACACGCCCACTGAGAC
CAGGGCTTCCTGACCCCCTCTTCTAAGGGATCGGGTTTAGCCTTTGGCTCCCGTGACTGCAACCTACATG
GGTCCTGCTAGTAGAGTGGATGGATGCTGGATACAGATAGATCTAGGCAAGGGTGTTCCTGAGCAAATAC
TAAGAAATCCTAGATTCCAGCTACAAAGAAGGGCCACAGAACATTGATGCCTATCCTGACCCCATTTATT
CCTATTTTAAAAGAGGAGTCTTGCTGGGCGTGGTGGCGCACGCCTTTAATCCCAGCACTCGGGAGGCAGA
GGCAGGCGGATTTCTGAGTTCGAGCCCAGCCTGGTCTACAAAGTGAGTTCCAGTACAGCCAGGGCTATAC
AGAAAAACCCTGTCTCGAAAAAAAACAAAAAAACAAAAAAAAAGAGGAGTCTTTTCATTCTATTAGACAG
CTTGCAAATTAAGAACTACCCAGTCCACCAAGTTTGCTTGGGGTGTCCTCCATTGGGACCGTGTCTCCTA
CATCAAGCTGTACCCATCAGTGTCCATTCTTTCTTACAGACCGGGTCCCAGCAGAGGAGCCTCCGGCCAC
AGCTCCTCTCCCTGCCCACACCAAACATGGCAGCAGAGACGGGAGCACCCAGACGGATGGCCCTGCAGAC
AACACCTCTGCCTGCTTGGCCTCAGAACCCGATGGCCTCCTGGGGTGCAACAGTAGCCAGAGGACACCCT
CTCTGGGTAAGCACCCCACTTGGTTAGATGAGGGTTGGGAACATGGTAGAGGTGCAAACTGGAACGCATG
GGCCCTGTTTTCCCCACGTTTCCGCAAACTCATCCACTGTGGAAAGCCCCACCGTAGCGAACTGAGGGTT
GTTGGAAGTTGTCTCAATGGGAGGCAGGGCCATCGAGCCATTTCAGAAAGAAGGCAACGCAACAGGAAGC
ACTCTAACTCCTCCAGAGTTGCCCTCACATCCTCCTGTCAGTCCAGGAGCTTGACAAGTGAACTCAATGG
TGATCTTGGGTTGGGAAGCTATTTGGAAGAGCCCAGAAAGGAGGAACTAAGCCTTTTCTCTTTCTACTCT
TGTTTCACATTTGCCCTTGCATAGCTGCCTGTGTGTGCCCCATGATCTCAGAAAAACCACAGGCATGACA
GGAACGCTACAGCCTGCTTCTAACCCTGGGAGCACCCTTCCACTGATCATTCAAGCTAGTTCAGAGTCTA
AACACAGGCATGGGCTTCCTCGGCAGAGGGGAGGGGGCACAGCCTTGTGCTTAGTTGATCAAGGGAAGAG
GAACCTAAGGGCTGAGGCAGCTTAGGGGAGGGGGTCTTGTTTAAAAAAGACCCTGTGTTGGGAGCTGAGG
AGAACAAGTGGATAGTACTGACAGCATACACTTGTCTTCTTGTTTTTTCTCCAGACTCTATAGCTGCAAC
CAGAGTCCAGGATCTGTCAGACATGGTAGAAATACTGATCTGAAGGAAGGAGGCAGTGCCTTGGGGACCC
CGAAGCCTGGCTCCCTCCTGGCATTCCGGCAGTTGTCTTCAAATGCTGTGCCTCACATCCTCCGACCAGT
GATGCCTTGGTGCATGGGGCTCAGAGAGGAGCACCCCAGGGGAGCTAGCTAGAAAAGCCTGCACCCCCTA
GAAGACTGCTTTTTGGCCTATATTTCTCCTATGACAATGAGGAAGGAAAAGCCAGACATCACCTGCAGCC
GGAGGCCTGTTGCTGGGGCAGAAAGGAGCTGAGCCCCCTCCGTCCTGCCTGAAGGAAACAGCGGATTCTG
ACGCCCAAGAATGGCTGGGCACCAGCCGAGCGGTCTGCAGGGATCGTTAGGCCAGCTATGGTGTTCTGTG
GCTAAGCATGGCTCCAGCCAACACTATCTGCTCTTCAGTCCCTGACTGACTTCCTCAGATCACTAAGACT
TGAATCCTTGGGAGGTGGGGGACGATGGGAGTGTGAGTCTTTCGGGAGCCACCAGCATGTCCCCTTGGAG
TAGGTTAGAGGTCACTTGAGAGGCCCCGCAGAGCAGTGTGTTTTGTATATAATTCTTTTTCCTTGGGAAC
AGAAGACTAAGCGTGCCGGTTCAGAGTCTCCTCCAGGGCTGTGCTGCCTGCCCCTGCTGCCACAGTTCTT
GAAACATGTGACAGGTCTACCAGATGTTCCTCTGCCTGCAGTTCCTGGCTGTGGATTTTGATACTGGTTG
GCTTTCCTCTGCTTTTTAAATCCCTGTGTTTCGTGCCCATGGGATTCTTATCACCAGCCTTTGTGAATGG
CTCCACAGCTCCTATCCCTGGGACATCCTGTCAGTTTGGTTATAAACTGAGCCAGATGTGATGAGCCACC
ACAAGCGGACATCTGTCATGCCCAGCACCAGGTTCTCTTTGAAGAAACTGGAGAAGTTGTTCTCATAAAT
GTATTCGTTCCCACCAGCAGGGACTGGGAGAGGGAGCTATGTTGTTAAAACGAATCAGTGAACTTAAAGA
AAAGTCCTCATTATGGTGCCCCCACCACAGAATGGCACCCTTAGAGGCTGGCTCCTCAAGTTTTGGTGCC
CCAGCCCTGAAGCAGGGCCAGCTACTTGGAATTAGGTGAACTACCCCCACGTGGCAGACCACCAGCAGCA
GTGACTTTGACTTCTGGTCTTAAAGCAACCCCCATTCAGCTCAAAAAGCGATTGGTGGATTTCAGATCTT
TTGTGTTTTTCTCCTCTGGTTGTTTTGTTTGTTTTTCTTTCACTGTTTGAAGTTCTGTCTGTTGTTTGTT
CCATTCCCATAGTTCTCTCTGCATTTCCTTTTTAAACATTTGCATTTGCTGGGCAATTGCGTATTTTTTT
AATTCCCTTTCCCCTATGTAAAGCTGAGAAATACATCTGGTTCATGTACGTTGTTTACAAAGATAAAAGT
TTTTAAAAAAAAAGGAGGGGGAAAAGAAGGCAAAAAAATATTGTGAAAGGAAAAAAAAAACAACTTAATA
TATTTTGGATTAATATTTGGTATTTCTTTTAAAGTATTTTTTTTGTGCTGTGAACGTTTTCTGCCAAAGA
CCATGACGTGTGTCTGTGTGTTTAAGTTATCATGAATATTTAAAGTGTAAACATGGCTGTTTTGTTACGC
CACTCTGTACCAGGATTGCTGCTGCATTCCGCCAGGTATGACAGTATTTTAATAAAAAAAGAGCTTATAA
GGAG

[0107] An exemplary DNA sequence of the AmotL2 in humans is provided directly below.

GenBank Accession No. BC011454.1 (GI: 15079242)
(SEQ ID NO: 18)
GCAGGAGCAAGCGTCTGCCGCGGTGGCCGGGTGCCGATTTGACAAGATCAAAGCTGCAGGAAAATGGACA
GTGAGGTTCAGAGAGATGGAAGGATCTTGGATTTGATTGATGATGCTTGGCGAGAAGACAAGCTGCCTTA
TGAGGATGTCGCAATACCACTGAATGAGCTTCCTGAACCTGAACAAGACAATGGTGGCACCACAGAATCT
GTCAAAGAACAAGAAATGAAGTGGACAGACTTAGCCTTACAGTACCTCCATGAGAATGTTCCCCCCATTG
GAAACTGACGCTTGGCTCCTTTCTTGTGGATGGATTTTCTCAAAGTACACAGATAAAGCACGGTTTGTTT
CAGTCTCCAAATTCAAACCTTTGAGTAATAAATCAGCACTCAAAAATGTACACCCATTTAGTTTGTGGTA
GCAAAGTGCAATGCGAAATTGAATGAGAAACTGAGATTTCTCAGTAATGGTGAATATTTCGCTCTTTAAA
CCTAAAACTCTTCATTGAGTAGCTTATATTTGAACATGATTGGTTAAACATTTGCCTCTACCTCTGATTT
TGCTTTGCTGTCAAAGTTTAACACCTTCCAACTACTTATGTGTGTCCTGTAACACAGGTGATTGAACGTA
TGAGAGGGAAAGGCAAAGAAAAAGGAAGCCAGACACTAGGAGAATTATTAACTTCTCATACTTCCCCACA
TTGAGAAGCATTCGGAGTGTATTTAGCCTGTAGATGTTGTGATATGCAAATATCCCATTCCCTGGTTACT
GGCATTCCTAAGATTCTTCATGGTATTTTCAAACTTTGGATAAATTTACAGATTAGAAAGATATCTGACA
GTTAATCTCTGTTCTCCTTACAAATTCCTTTTGTGCTGCTGGAAAGGATCTTTGGCTAGGTGGATGACTA
GTTTTATTCAAAGCCTTTTCTCAAAGCCCTTTCAGTTACAACCACCCCACTATGGAATCAGTATTTAGTT
ATACATTTGTATAAGAACCTGTATTTTGAAAAACACATTCATGTATATTTATTCCTGGAATTATTTGCCT
GTTAAACAGTGTCTTTCATGTTCTCTCCCCAGATTGTAAACTCTGTAAGAAGCTGCTTGTATCTGTATCC
CTTGTTGAAACTCTGAAAACACTGAATAACTAAAATCTCTTCTCATCCTTACAAAAAAAAAAAAAAAAAA
AAAAAAAAAAA

[0108] Gm5627 is a predicted gene found in Mus musculus. The non-coding RNA sequence of Gm5627 in Mus musculus is provided in GenBank Accession No. NR_{—}033301.1 (GI:287325394), incorporated herein by reference.

[0109] An exemplary DNA sequence of the Gm5627 gene in Mus musculus strain C57BL/6J chromosome 9, GRCm38.p1 C57BL/6J is provided below.

NC_000075.6 (GI: 372099101: 102739648-102756685):

(SEQ ID NO: 5)

GAGACAGCCAGGGCCAAAGCCCTGCCTGACAGCTCTAGAGTGGACCCCGT
GCAATGTGAAGTCTCTGGGCTCTGGTTTCAGTACTCTAGGCCCTGTGTCT
TCCACACCAGCCTTCCCAGAGCTGGGCAATGAGTCCACCTGGAATGTGTA
ACTGCCACGCTCGTCGCTGCACTTAAAGAATTGGCCTCTGCCTTCCCTGC
CAAAGCAAAGATTCAGATCAGCAGATCCAGCAAGGCCAGACATTGACTGG
GAATGGTCCCCTCAAGTCAGGACCAGCGGTGCCTCCTCTTGGGTGAGACC
CGAGTGTTTTTTTTTGTTTTTGTTTTTGTTTTGAGGACCAAATATCCATC
ACTTGACAGAGCCTTTATTAATGGTGATTTCATCGTGGTCCCAGTCATAG
GTGACCTTGAGGGAATTGAATAGAAGGAAAACAAGAGACTTGGGGGACTT
TGAAAGTGTTGGGACAGTAAATGACACAGGTCTGGAGAGTGAGGAAGCCA
CAACAGGATGCTCTAAGAAAACCTTTCTTTCTTTCTCTTAAAAGATTTCT
TTTATTATTTACGTATATGTATGTGTGGGTTCCCTAGAGGGCCAGAAGAA
GGTGTCCAATGTCATGGAACAAATGTGATAGAGTATTGTGAACAGCTTGA
TGTAGGTGCTAGGAACAGAACTCAGGTCCTCTGTAAGAGCAGTGGTTAGT
AAGCACGGGGCCTTTCTCTCTAGTCCTAGCAAACTTTTACAGCTAGAGAA
GGTGTGGGGGCTGCCCATTCCAGGATGTTCATTCCAGCATTGTTTAGTAA
CAGTGAATAATTGAAAATAACACCACGGTCTAAGCACAGGGGACAGATGA
AGAAATTATGGTTTAGCCATGCACAGGTGAAGCTGGTGGTTCACAGGTTG
GTTGTCTGGCTTTTAAAGGTACATTTGGTTTCTTGCAGAGAGAGAGAGAG
AGAGAGAGAGAGAGAGAGAGAGAGAGAGAAAGAGAGAAACAGGAAGAAAC
CGCTACCTCTGTGAGGAGGCTGTTCCAGGTTGTCAAATTCTCTGCCTCAC
CGTGGTTACTCACCACGGTCAGTCTCTATCATCACTGGGTGCAGACCTGT
GCATGCTATTCTCTGGATCTGGAACGTTCTCCCTGCCCCTTTCCTAGCCC
TCTGCCCTGGTAAGTTCTTCTGACCCCTTAGGAGTTAGCATTAACATTAT
CCCTCTAGGGAAGGCTTTTTGACTGTCCCACACTGAGTTAGGTCACCCTG
TTTCATGTTCTCATTGTATCCCTGTAAAACTTCATTAGTGCCATTTAGGA
GAGCATTTGTGACAACTCTCCCTCGCTTAGGCATTCCACCTAATGAAGGC
AGAGGAACGTGGAAGATCTAAAGTCACCGTCAGAAGCAGACCTCCAGGAC
CCGTGTCACCCTCGGATACCAGATCCGATGAATGAAAAGCTTATGAAGCA
GTGGTATTCCCATAGTCTAGAAATGATCTTCCTTGGCTAGAGAGATGACA
GGGTGGGTGAAGGGGCTTGCTGCACAAACATAAAGACCTGAGTTCGGATC
CCAGAACCCAGGGAAAGGTAGGCTATGAGCTTAGAGCTAGGGAGAAGCTA
CGAGGATGTGAAGTTAGAGGGATCTCTGGGGCTCACTCGCCACCAGCTTA
GTACTAGCTCAATGGTTCTCAGCCTTCCTAATGCTGAACTCCTTTAGTGC
AGTTCCTCCTGCTGTTGTGATTCCCCCAACGACAAAATTACTACTTCCTA
GCTGTAATGTTGCCACACTTATGAGTTGTAATGTAAATATCTGATATGCA
AGGTATCTGGTATGTGAACCCCTGGGACCCACAGATTGAGAACCACTGTT
CTAGGTTCAGGGAGAGTCCCTTCCCCAAGGGAACAAGGTGACAAATTAGA
GCAGAATACTCAGAGTTCCCTCTGGACTCCAACTTCCACAAAGATGCACG
TGCCTATGATCAGTTGAATACTTCTCCCTACCCCCCCCCCCAAATGTATT
GTTAAAGACACTATCTCACAATGTTTCTCTGGCTGGCTTAGAACTTACTA
TGTTAACTGGGTAGACCTTGAACTCATGGAGATCCTCCTACCTATGCCTC
CTATGTGCTGGGATTAAATGAGTGTGTCACCAAGACTGGCCCCCAAAACA
TTTTTTTAATTACAAAGGAATAAAATTGTAACTTCAGAATGTGTGGGGCA
GTGGGCATGGGGGAATAAAGAGAGTGAGAGAAAAACGGCGTCCGGCCAGA
GTTCTGGTGCTCTGGGCAGGTGGACTCAGGAGGACTGCCAGGGTGGGTGT
CTGGCTGTGGGAAGCCACAGAACTCCAGCCTGCAGTGGGGTGGACAAGGG
GCGTCTCACAGAGGCCAGAGATAACAGGTTCTCAGTCTCGGGCGTCCCAG
ACACCGCTGGACACGGTGGAAGAGCTGAGAACAAAGTGGGGCCGGTCATC
CCCAGGGCCGAAGGGAGGACAGGGCAGGGGGAGAGGGGGCTCTGGGGGGT
TCTCACATGGGTGAGAGTCTTTGGTCTGGTCTGTGGCTGGAGTGCAGGAA
GGCCTTCCAGCGGGAGGTTAGATGTGGCTCTTTAGAGGAAAGCTTATTCC
ATCGTTCAAGCACAGTGGGCCTTGATGAGCAGAGACAGTCTATGGTTTTA
GAGCTTTATTGTAGAGAGGCATGGAGAAAGAGAGGAGGTAGAAAGAGAGA
GGCTGGCCATGGCCATGTGGAAAGAGGGGGGAAGGGAGAGAGAGAAGGAG
GACTAGAGATGAGAGTAAGAAAGGTGAGAGCTTAAGGAGAAAGAGGGGGA
GCCAAGCAGCTCCTTTTATAGTGGGCTGGACTATCTGGTTATTGTCAGGT
AACTGTGGGGAGGAGTCTAGCCAGAATGTCAGGAGCTTGGGGGCTTTATC
TGTGTGACTGATAGTCACAGAATTATGGAGTTGGGGACCCTGTCGTATCA
GGCACCTGTCTCTGGGGATGTGGCTCACTGTTCCTTCCCTTGTAGAGTTT
TCTACTGAGTCTCCGGAGCAAGTCCCATTCAACCAAAACAGGCTGCCTTT
CACAGCCCCACAAGAGTGGAGAAATCTTAAGCCATGTGACCAAGGTAAAC
ATCACCAGTCATTGGACATAGTGCCATCATGAGCCCTGTATAGAATGTAC
CAAGAAGGGCAGGTCACATCTGTGGCTCCCTTCCCACCAAGGCACAAGAT
GCATCTCCATATGGGAAAATATCACACAATTGCAAATTCTCTGTTGTTTT
GCTTGAGACAGGGCCATCTTATATAACCCAGGCATATAAGAGCTCATGAT
CTTTCTGCCTCTATCTCTCCAGTGTGCTAGGGCTACACCGGCTAGGACTT
TAAAAACAAGAACCTTTCTATTCCATTTATGATTGGGGTGGGGGTATAAC
TTTCAGGAGTTGGTTCTTCTCCTTCTACCATGTGAGCTCCAGGACTCGAA
CTCAGGTTGCCAGGCTTAGTGTGGCAAATGCTTTACCCATTGAACTATCT
CCCAACCTTAGACCACTACTCTTAAAAAAAAAAGTCTTAAGGCAGCTGGA
TGTAATGGTACATGTCTTTAGTTGTAGCAGTCAGGAGACTGAGGCAGGTG
GACTTCTGAGAGTTTCAGGCCAGCCAGTTCAAAAGAAAAAAAAAAGTTAG
GGAGAGGTGGTTTAGTGATTAAGCGCACCTGCTGCTCTAGCAGAGCACCT
CCATGGTGGCTCACAACTGTCTGTAACTCTAGCCCCAGGGGATCCTCATC
TATGGGCACCAGGCATGCACATGGTAAAGACATACATGGAGGCAAATCAC
ACATACACATAAAAATAGATAACAGGTGTGCGCCACCACCGCCAGGCAGA
TTCTTAGTGAAAAGCTGTTGTGTGCAAGGATTTGCTTCATGTCTATGTCA
CCAGATAGCCTATTAGCTTCATGGAGTCCGAGGCCACAAATCCTGTCTTG
TCATTGTTATCTCCTGACGTGATGTACCCAGTAAATATGTGCTGATAAAC
AGATACAGTTACGGACATTGGGGACATGGGGAGTCATGGAAGGATGTGGA
GGGAATGGGGGAACATGGGAGACATGGGGGATCGTTGGGGGACATGGGGG
CATGGGGGATGTCCATGATGCATTAACTGACAAAATAGGACATGTGAGGC
CAGTTTTATAGCTTGGTTGGCATGACATCCTGGGCTCATTCATTCTCCAG
CACTGGAGGCAGGAGGATCAGAAGTTCAAGATTACCCTCAGCCACACCAA
GGTCAAGGCCGGTCTGGGTTTTGTGAGATGGTGTCTGAAAACAAAGAAAA
TTTAAACAACCAAAACCTATGACACGAAATAACTCATATGATCTGGGGAT
AAGAGCACACCCCTGTAATCTTAGTAATTAAGAGGCAGGAAGATTGCCAA
AAGTTGAGACTAGTCTGGTCTATCCAGTGAGTTCCAGGCCAATCAGAGCC
ACAAAGCAAGACCAGTCTCAAACGCAATTGCTTAATTAATTACAATTTAA
AAGTAAACAAAAGCAAAAATACCTATGCCAATGTTTGCTTAAATAAAAAG
AACATAAAGAAGAGGGGTGGTGGTCTCATTCACCTTTAATCTCAGCACTC
AGGAGGCAGAGGCAGGGAAATCTCTGTGAGTTTGAGGCCAGCCTGGTCTA
CAGAACAAGTTCTAGAACAGCCAAGGCTACACTGAGAAACCCTATCTCAA
AAAGAAAAAAAAAACCATAATGATTCAGAAATAAACTGGGGACAGTGGCT
GTCACTGAAAGAAATAGTCAAAGGTGATCTTTATTTTGGTCTTAAAAAAC
AAAACAAAGGGCTGGTGAGATGGCTCAGTGGGTAAGAGCACCCGACTGCT
CTTCCGAAGGTCCAGAGTTCAAATCCCAGCAACCACATGGTGGCTTACAA
CCATCTGTAACGAGATCTGATTCCCTCTTCTGGAGTGTCTGAAGACAGCT
ACAATGTACTTACATATAATAAATAAATAAATCTTTAAAAAAAAAAAAAA
AAAAAAACAAAACAAAACAAACCCTTTGTGCTGCACCTGGGTCCCTACAC
ACAGACCTGGAGCCAGTCCCTGTGGGGCGGGCAGCCGATGCAAGAGTATG
AGTTCGGCAAACTGGTACCAGGATGCAGGATAGCCACAGGCAGCGTAGGG
ATACAGTACTGAATGGAGGCAGTAATCGCCCTCCATTTCTCAGCTCTGTG
ATCCAGGCAGCTTATGTTTCCTGAGCACGTCTTCTAAACTGGCACATCCA
TTCCCAGGAGGTCGGAACTCATGGCCATTTGTTGTGTGGCTCACAGGAGT
TTTTCCTCTCACAGTTCTGGAGCCTTCTGAGGCTAAGATGTAGTCCAGGG
TACACCACTCTGAATGTGTTGTGGGAGACGTCTTCTTGCCTCTTCTGAGC
TTCTAGCACTGTGGCTCTCAACCTTCCTAATGCTGTGACCCTTTAACACA
GTTCCTCATGCTGTAGTGACCCCCGAACCATAAGATTAGTTTTGTTGCTA
TTGCATAACTGTAATTTGTTCCTGTTATTCCTGAATTATAATATTAATAT
GTGTCTTCCCATGGTTTTAGGAGACCCGTGTGAAAGGATCAAACTCCAAG
AGATCTCAACCCACAGGTTGAGAAACATTGCTCTAGAAGCTCTTGGCAAC
TTTAGTATTCCTCTCTTATAACTGAAACACGTCCATCCCTACCTCTGTGT
CTCTAGATCTAAATCTTCTTCATATGCTCTTTCTAATCCAGTGTGGCCAT
ATCCGATTCCTTCTTCTTCCTCTCCTCCTCTTCCTCTTCTTCTTGAGTCT
CACATAGCCTAGGCCTTGAACTGACTATCCTGTCAAAGATGACCTTTGAA
CTTTTGCTCCTCAGATCTCCACCCCCTGAACCTTGGACTTACAGGTACAT
TGCACCATGCTGAGTTTATGTGGTGCTGGGGACAGAGGCCAGGGCTTTGT
GCATACTGGGCACAATGCTCTACAAACTTAGGGACGACCACCGCTCAGAT
GTCATCTGATTTTGATTATACCTTTGTTTTGGTTTGGTTTTTTGTTGGTT
TTGTTTTGTTTGCTTGTTTTTTTGGTTTTTCGAGACAGGGTGTCTCTGTG
TAGCCCTGGCTGTCCTGGAACTCACTCTGGCCTCGAACTCAGAAATCTGC
CTGCCTCTGCCTCCCAAGTGCTGGGACTAAAGGTGTGCACCACCACTGCC
CAGCTTAATTACACCTTTGAAGCTGTTTCCAAATAAGTTATACTCTACAG
GTAAAGGGGTTTAGGTCCTGAATATCTAATCTAATCTAATCTAACCCAAT
CTACCACTGATACCCATTTTCTATCACTGCCTATGGTGCGTCTCAAAAAC
GTAAGAAGCTGTTTAAAGTAACATTGTATCTACTCACAATTCAGGACTCA
ACAGTTAGGGCTGGGCTCAGCTGGAAAGTTTTGCTGATTTCTCCTGAGGT
CATTAGCATGGTTTTTTGTTTTTTTGTTTGTTTGGTGTGTGTGCGTGTGT
GCATGCGTGTTTGTGTGTGTGTGTGTGTGTGTGTGTGTGTGTGTGTGTGT
GTGTGCGTGTGTCTCCTTCACAGCCTCTCAGGCTCTCCTGGTGGATCAGA
TGAGGTCTATGCACACGCAGCTAGACAGAGGATAAAAGCATACGCTTCCA
TGCCTGCTGACCCTTCCAGCCTGACTGGGCTGCTGTAGGTTTTTATGGTC
ATGCAAGCAAGGCAAGTTCAAATTCAAAAGACTCAACTTCTCTGTAGAAG
TGGCAGAGGCAGATTACAAAGGGGCCTGCATATGGCAGTAGTGGAAGTAC
TGAGCTGTCTTTACAAATGATCTCCGTAGACCTCCAGTTCTGGAAACATA
AGGTAAACAGATCCAGGCCTTTCATGTTAGAACTCATCCTAGCAGCTGAC
CAGGCTCCTGTGGGGAAAGCTTGGTGAGTGCGCATGGATGTGCAAAAGAA
AGCAAGGTGCTCTATTGTGAGTGGCAGACAGCATGACTCCCATGCCCTAG
GCCCCTGGTGGCCCCAATCAGAGACTAGGATCATAATTTAAGTATAAAGC
AAAGATGGCCCAACCTCAAACCCTGAAGAAACAGCTCAGATTCATATGCA
ATGCTCGCTGAGGCAAGATGTTTTATGACAAGAGCTGGTAGGGAAATTAG
ACTGGAGTTACTCCTTGGCAGAGTCCCCTGTCCCTCCCTTCCTGCGGGGT
GAGCTCTCTGCCCCTTTCCCCAGTGACTGCTCCACAGAGCTCTGGCAGGC
CACACTGCAGTGGGAGGGAAAGCCCTGGGGGTATATATCGGATGTCATAG
GAGGTGAAGTCCTGGCTGCACTTTTCACTGTGTGACTTTGAGCCTGTTTC
CTCATCTGTGAAATGTGGGCTCTCGGAGCTTTCATAAGAACCAAGAATGC
TTTGCCAATGCTGCAATCATCTCTGAGGACCACACAGCCCCTGGCTTGCT
CATGCATGCATGCAATAGTCAACCTTGTCTGCCGAGAGCAACATACTCTT
CCTAGGACTTTTCTCTGCCTTCTTCATCCTCTGCCAGTCCTCTCAAGCCT
GAGCTTTGAATGAGAACGCCATCTTCTTAGTTATCCTCTCCACTGTGGAT
CTTAGATTTCTCTCCTGAGGTTAAAACTTTCTTTTTAATTATATTAAAAT
TCAATTCTGCCGAGCAGTGATGGCACACGCCTTTAATCCCAGCACTTGGG
AGGCAGAGGCAGGCGGATTTCTGAGTTCAAGGTCAGCCTGATCTATAGAG
TGAGTTCCAGGACAGCCAGGGCTACACAGAGAAACCCTGTCTTGAAAAAA
ACCAAAAAAATAAAAAATAAAAATTTAATTTTAATTCTTATTGGTTGAAA
TGCCTTTCATTTTTTAAATTAGGTATATATGTGCTGGCAAAGGAGTGTGT
GCATGAGGGCAGGTCCCACAGATCTAGAGGAACACGCTGGATTCAGAGTC
CCTTGTGAGCAGCCACACCAGGTAAACCAGGAGTGAACTCTGGTGTACCC
CTGAGTCATTCTCCTGCCTGACTTTTCTTCTCTTTCTGTCTTTCACTCAT
GTGTCCTACCTTCCTTTCTATCTTTTCTTTTCTTTTACTTTTTTTATTGC
ATTCCCCTAAGATGGGGACTGATCTGATGCCAGGGACTCCTGCAAGCCAT
CTACCACTGGACCACATCCCTAGCTCCTTCCCTGAGGTTTCTCAATGTGA
ATGGCCAAAGAACTGGAGGTTTCAGAACCAGAAACCTCTAACTGGTTATG
TGTCCCACCGTCCTGGGGAAGAACCAGAAAGGAACGGAAGAGGCCACTGA
ATCCTGGGGCTGGGTCAGGCCAGCTCCCAGCTGTTTCTGAAGACTTTTTC
TAAAGAAACTTCCCCTTAACATAAACTTGCAGTGAAAGGAATTTTCACTA
AGACGGTTGGTTTGTTCAACGTTTATTGAGCAATTCAACCTGGCCTACCC
TAGACACACAGCAGAGACATCGTGAGTCCTTTCCCCTGAAGAAAGAACAG
GCTCAGAGTGTGAAAGGAGCTGTCACTCAGAAAGGACATGCTGAACTCAG
GGGAGGCTGCAAAGGCCTTGTGGAGGGAATGCCTTAAGTCTGTGGGTGAG
TCTTTTTGGCAGTGCTGAAATTCAAAGTGAGAAGTCTCACAAGAGACAGG
AAATGTTCTGTTTTTATTTTTATTCATTTTTTTTCTCTTCCCCCTTCCCT
TTCTCCCTTTTGCTCCAGACCCACTCGCTCTGCCCCCGCCCCTCCCCTCG
CTCCAGGCCCTTCCCCGCTCACTCTGGGCCTTTCTTTTCTTTCTTTCTCT
CTCTCTCTCTCTTTAAGATTTATTTATTTATTTTTATGTATATGAGTACA
CTGTAGCTGTACAGATGGTTGAGCCATCACGTGGTTGCTGAGAATTGAAT
TCAGGACCTCTGTTGGCTTCAGTCCCCCCTGCTCGCTCTGGTCAACCCGG
CTCACTTAGACCCAAAGATTTATTTATTAAAATATCTAAGTACACTGTTA
GCTGTCTTCAGCCACACCAGAAGAGGGCGTCAGATCTCATTACGGATGGT
TGTGAGTAACCATGTGGTTGCTGGGATTTGAACTCAGGACCTCTGGGAGA
GCAGTCAGTGCTCTTAACCGCTGAGCCATCTCTCCAGCCCCCTTCATTTA
TTTCTTAACAAAACCAAACCAAATAGGGTCTCATGTAGCCCAGATCAGCT
CCTGATTCTCCAAGTAGCTAGGGATGACCTTGAATGTCTGATCTTCTGGC
TCAGCCTCCTGTATGCTGGGGTTACAGGTGTGTGCCCTCATAGCCATTTT
TGGGGGGATTCTGAGGATTAATCCCGGGCCTTATGCACAGCTACATTCTC
AGCTCAGAGACTAGAATGGTTCAGAAAAGCCTTGTTAGCTTCTGTGAGTG
AGCAGAAAATGGATAGACAGTGCCTTGCTTGGAACTGGAGTGTCCTCATG
GACTGGGGCTCAGGCAGAGAAGAATAGGGAGTCATTTTATTCTTTGGATT
TCTTGTTTCAGTTTGGCTTGGGTTTGCTCTTGTTTCCATTTGATTTTCCC
CAGATTTTTTTTTTCCTTCTGGCTTATGAGGGCAGTAGCTCTGTGGAGGT
CGTGGGGCAGCACCAACAGTCTAAACAGTTGTCGGTTCCATCCTACAGAG
CTGCGTGAGATGGATTCTGACCACCTCGCTGTGGATTGGCGCAGCTCAGG
AAGCAGTGCAGCTTGACACAGAGCTTGGGAAGCACACCCCCATTGATGGT
GCTTGCTTTGCAAACATCCCTGATTGCTGCGGCCTCTACAATCCTCTGAA
TGACGAACAACTTCATGGCCTCGTCCTTGGGCACACACCGGTCAACATCA
CTGCACAAGGTTGAGGCCCTTTTTGACGTGATCGCTGTTTCTTTTTCCTG
TCTGTCTTTCTCTCTCTGTGTCTCTGTCTCTGTCTCTGTCTCTCTCTCTC
TCTCTCTGTCTCTCTCTCTCTCTCGTCACCTTGTAGCCAAGACCTAAAAA
TTCTTGTGGGTTTTGTTTTCTTTTACTTTCTGTATATGTGAGTTTTATCT
GCATGTATGTCTGCATACCACATGTATGCCTAGAGCCTGTGGAGGTCAGA
GAGAACTTTGAATCCCTAGAACTAGAGTTACATACAGATGGTTGTGAGCC
TGCCCTGTGCAGAAGCAGAAAGGACTTGTAACTGCTGAGTTATCTTTCTG
TTTGTTTGTTGTTTGTTTTTTACAGATTTATCCTATTTTTCATCACATGA
AAAATAAGATCTTGTTTTCTTAAGTAATTGCAGAGTGACAGACACCAGAG
TAAGGACTTAATGAACCAGGCAGAAGGACCCTTCATCTAAAGCAGCCAAA
GAGTCGAATGATTAGAAGGGAGCATAAGAGAACGTGGTTAGCTCAGTGCA
AAGGGATTACCAGGACACATGTACTCAAAGGCATTGTTAAAGACCAAGGA
CAACACAGATGCCACCGTGAGGCAGTGTGAACAGGTGAGGCGTGAAATGC
ACATAGCCAGAAAGGCGGCAAAGATTCAGCTCCATCTTCCTGGATACTGC
CCTGTTTGCCCATCCAACCCACAAGGCACCCGGTTCAGCTTCTGCAATAA
GAGGCAGTATGATGCCCCAAAATGTTTGATACCAGGCTGTGATAGCCCTG
AGGACAAGATCTGCCTTGTTCCTGTGGCAGACCCAGCTCCAGCCTAGACC
TGGCATTGGGTAGAGGCTGGCAGTTAAGAGTTGCTAGCAAATAGATGGCT
TCAGAACTTTCCAGAAAGCTAGTGGCTGATAGAACCAAGGAATTCCTTAG
ACCAGAGTACAGAATGGCAGGAAAGCACCAAAGTACACAGCAAGCTCAGA
CCAGGAGAGTTTGATCTCTGTGTCGAGCTCAGAGATGGAGAAGGACCCAG
TAGGGTATCATGCTATTATACCAGAGCTACAAGGAGGTCCTGGTCCTGGA
TAGGAGGAACTCATGGGCAAAGGGCTAAGGGCAAACTAGGAACCTAAGAC
CTGTGCAACCATAGAAAGGCTCAGTAGAAGGACCCAGATATAGCTCTCTC
TTGTGAGACTATGCTGGGGCCTAGCAAACACAGAAGTGGATGCTCACAGT
CAGCTATTGGATGGATCACAGGGCCTCCAATGGAGGAGCTAGAGAAAGTA
CCCAAGGAGCTAAAGGGATCTGCAACCCTATAGGTAGAACAACAATATGA
ATAACCAGTACCCCGGAGCTCTTGACTCTAGCTGCATATGTATCAAAAGA
TGGCCTAGTCGGCCATCACTGGAAAGAGAGGCCCATTGGACTTGCAAACT
TTATATGCCCCAGTACAGGGGAATGCCAGGGCCAAAAAGTGGGAGTAGGT
GGGTAGGGGAGTGGGGGGGGGAAGGGTATGGGGGACTTTTGGGATAGCAT
TGAAAATGTAAATGAGGAAAATACCTAATAAAAATATTTAAAAAAGAAAA
AGAAAAAGAAAGAAAGAAAGGCTCAGTAGGGCCTGGGAAGATAGCTCTGT
CAACTTGGGGCTTGGACTTTGATCTCTAAAACTCATGTTTAAAAAGTTGT
GCATAGAGCCAAGCATGGTGATACACGCTTTTAATCCCAACACTCAGGAT
GCAAAGGCAAGCTGATCTCTATGAATTTGAGACACAACTAGACTACAAAG
CAAGTTCCAGATTAGCCAGAGCTATAGAGCGAGGGAGACCCTGTCTCAAA
AAGAGACGGGGGTGAGGGGAGAGGAGAAGGAGGAGGAAGGGGAATGGAAG
AAGAGGAAGAAGAGGAAGGAGAAGGAAGAGGAGGAAGAAGAGGAGGAGAG
AGCTATGTGTGGAATGTACGTGTAACCCTAGGGTTGGAGAAGCTGAGAAA
GGTGGGTTCTTGGGGGCTCACATGGCAAGCTTTAGGCCAGAGAGAAACTA
GTCTCAAAAAAAAAAAAAAAAGAAAGAAAGAAAGAAAGAAAAGATGGTGT
TTGAAGAAGCTGATTTTTGGCTTCCACATATGTTTGCATGTACATTAGCA
TCTGCCCTCACTTGTGTTCCTACACCACACACACACACACACACACACAC
ACACAGACACACACACACACACACACACACACACACACACACATACACAG
CAAAAGATCTGAGGTCTGGTCCAGCTATCTCTGGAATGTTCATTATGGTC
AGGCCTTGTATCCAGGCTCAGTAAAAGTCCAAGAACTGAGTGGCCAAGAT
CCATACTTGGGAACCTGAGTCAGCCCTGGCAGAGTTGGTAGATACTGCAA
TCGGGTGGGCAGGAGCTATAGGCAGGGTCCCTGCGGCTTGTCAGAATGTT
GCCGCCTGGGCCCTTTCAGCTGGATGCTGGGTTGGTAGGGGAAGAGTACT
AGTAGGAGCAGAGCTGTAGGCAGGGTAGAGCTTTGGGTCTGACAAGGTCA
GAGCTACTCCTGTTCTGGAAAAAGAAAGTCAGGGTAAACATCTGGCCCGT
AAGTACCATGAACAAGCACTCAAGGGTACAGGAAAAGGGTCAGAAGTGTG
GCCTGAAAGGAAGTCGAAGCCATCAAGGAAAGCCAAGAGTGTTGAAGCAG
GGTTGAATGCTACCTTGGCTGTATGTGTGACACTAGAGAGGAGATGTAGG
TGGGAGTGCAGTCAGGCCCACCATCCATGATTCCAAAGCCCACCACACCT
TGCACCATGCTCACTCTTTAACACCTTTGACTCAAACTCTCAACAGCAAC
CTCCGTGAAGGCCGAGGGGCATCCGAGAACAGGAGCAGGCAAGAAGCCTG
TGCCTCTTCATCCCTAGACACATCCCTTCTTGTAGACTGACTACTGGGCA
GTAAACCGTGAGGATAATGAAACCCAGAATCCCAGGATGGAGGAGGATGC
TGCGTGGCTAGCAAGCTTCAACCCTTTTCTAGAATGGAATCCTCTTTAGT
AATATAGTGGGTTCTCAAGCAACTAGGTCTGGCCTGTAGGCCTGCCCCAC
CCTGCCTGATCCTCCCAAGCCCTGGCTTCCCGTTGGGCTGGTCCTACCAA
GGTAGAAGGCTCCAGGGCCATATTTTGGGCCCTTCCCTCCCCTATACCTG
CGTCAATGACTCTTTCTGCCTTCCACCCTAGCTTTAAGGAGGGTGCTCAT
CGGAGGCTTGGCTCCTCATCAACAACCCAAGGCTCTCCAGCCTCATCAAC
TGTCAGGCAGATTGGGCTTGGCTGTGCTTCTGATCCAAGTTCTCCACCAC
TGCCTACCTCAGCACCCTCCAGTGATGTGCAAGTTCCCAAGACCCACCTT
AATGCCCCTCTGCCCAGCTCCAGTTGGTGGAGACCAAGCACATGGGCAGG
GCAGGAGTGTGAGACTTCCTAGCCTTTCCCCCTTGAGCCGACCCTTCAAC
TACCCCCTCACTTCATTCCTATGGAAAGACCAAGCCATGGTTTATAATAC
TTCCTCTGAACTCTTAGGAGGAAGATTTTTATAAAGCAGGGACTTGAAGA
CTGGTAACACCATGTTCTGAAGGTTGCTGTAGTTTGCAATTAGTTCTTCA
CCAAAGCAAGAAAGAATAACAACATCAGCCACAGGCCTGGGGGGTTGGGA
GGGGAGCAGGGAAGCTTGAAAGCCAATTTTTTTTATATTTAAAATGTTTT
ATTTTAAAATATTTTTATTATTTTTAATGATGTGTGGAAGTGTGTCTGCA
TGTAGTGTCATGTGAATCCAGGTGCCTGCAGAAGCCAGAGCCATTGAACC
CCCTGGATTACAGCTACAAGGGCTGTGAGCCACCAGATGTGGGTACTGGG
AACTGACCTCAGGTCTTCTGGAAGAAAACAATTGCTCTTAACCTCTGAGT
CATCTTTCTAGCCCCATAAAATGTTTTACATTTTTGTGGATGTCTCTCTT
GCATGTATGTCTGTGCCCAATTTGCATGCCCCATCTCTGTGTTGGACATA
AGAGAGCACTGGATTCCCTGGAATTGGAGCTACTGATGGTTGTGAGCTGC
CAAATGAGTGCTGAGAATGGAACCTGGATCCTCTATAAGACTGACAGGTG
CTCTTAACTGCTGAGCCATCTTCCCAAGGCCAAGCATCATTGTCAGGAGC
TACTGGACTGCCATGAAGAGTAGACTGTAGCAGCTCTTGGCAGTTTTCCC
TGGGGCTGTAGGCAGATGATAAAACCCACAGTATAGGAGTAGATGTGCCC
GACAGAGGAAGCAGAGACTCTATAGGAAACACAGAGCTGAGGCTGGGTAC
CTGGGAGCAGCCAGAAGATCTCACAGTGCAAGAACATGCAGTAGATGCAG
ATGAGTTGGCTGCATAAGGAAGGAGAGGGAGGACAGGAAATGGACCAGGC
TGATCAAGATACCAGAAGAATTTCTATACAGCTAGAGTGAGGAGAGCGTG
GGTAGGACAGGCAACCCTCAGGGAACGCCCAAGGTTTGGAAGAAGACTCT
TTGGCCAAGTGGTCATTTGATAAAGGGGGGTATGGCTTACCATTGAGGAT
CCTGGCCATGTCTCAAGAGAATACCCTCGAATACTCGCTCACTCCTGCTT
TGACCCCATGAGCTTTAGATATGACTGAATCTGACACACACACACACACA
CACACACACACAAGGGGGGAGTATTGGATGTGTACAAGTGGTTTGCTGAC
ATTCATGTCTATGTACCATGTGTCTAAAGTGCCAAGGGGCCCAGAAGAGG
GCATCAGGTGCCCTAGGACTGGAGTTACAGTCAGTTAGGAGTCACCATTT
GTGTGCTGGGGATCAAACCCAGGTCTTCCATAAGAGCAGCCAGCACTCTT
AACCCCTGAGCCAACTCTCCAACCCCACATGGCTGAACCTTTAAAGCCAC
TAGAGTGAGTTCTATCAGCTGTTCATCTGTCCTCCTGGGACAGAAGTGGC
AATCCTGTATACTTCACTTTCTTAACCATGTAAGGAACTTATTTTGCAAG
TAAGTGTCTGGAGCTCAAACTGACCCAAGAATTTGACTGAAGTCACACAA
CACATCAGACACAGAGGAGGTTCAAGCCTGTCTAATATCCAAACTCTGGG
TAATGTAAATAGTTGATATATGCTTGTCACACATATATTCAACAGATTCC
CTGGGCATGTAAACTTGGGAAATGCTGGTTTCAGTGAACTTGAGCAGACT
CTTTTCACAGCATGGAGAAAAACTTTAGGCCATGGACTCTTGTCCCAGTT
GGAGTTGCTGTCCCTTAGAAGCAGGACCTCCTGTCCTGTAAGGTCAGAGG
TGGGGCACTGGAGGCCTCTTACTTCAAGCTGTTTATATTCTCACTTTACA
TCTATGGCTCTCCCCACAACACATACACATCTTATGTGTGAGGAGAGGGG
ACTGGTTTTTAATTAGACTTTGAAGAATCTTGGGTGAAGGATAGTGGGGA
AGCCAAACACCTCTGACCCTTAGTTGTCACAAGAGATACCTTCATTCTAC
GTACAGGGCCTAAGGCCTTGATCATCTATGGTGACATGTCTTTGGGACAC
TGCCAAACAACAAAGCCATTTCATGTATTAAAGTTTGTTTGGAAGGGACT
TGTGGATGTGGTATCATTTTAATAAAAAGCTGAGAGATTAAGAAGCAGAG
TTGAGGTGGAGAGAAAAGAGCCACATTTAGGGGAAAGAGCATACTCACAT
AGCCCAGTCCTGGGAGAAGCCAGGAATGGAGCTGTTCTTGATGCAGCAAA
GAACTGGATTTGGATCTGCAGGCATGAGAACTATGGGAGATGCTTGAGGC
AGAGGTCATTTGATGCAATCTAGGAGTAGGGACTGGGATATGAGTCAGTT
GGTAGAGTGCCTGCCCTTTGTGCACAAAGACCTGGCTTGGGTCCCCAGTA
TCGCAGACACAGAGACTGGAGGTTCGTGCCTATAATCCCAGCTCCTGAGG
GGTAGAAGAAAAAGGATCAGAAGTTCAAAACGTTCTCTGCTACATAGCAC
AGTCGAGGCCAGCTTGGAGGCCACACACACACACACACACACACACACAC
ACACACACACACAAACTCTTAAGGCACCCCCCCACCCCAGCTTCTCTCTC
ATTTCTTAATGGAATGCCAGCTTGCACACAGCTATTCCACATCTTGCCTT
TTTTCTCCCCTCCTCCCTCCTCCCCTCCTCCAAAGCCTCTTTGGCCCAGC
GTCTTTGTCAGCAGTGTTCCCTTAGGTTCTCGCTGTATGAAGCATCTTTC
TGTAACTTCTGCTGGAGAATAGCTTCTGTGGACACCACGGAATGTCTGGT
TATTGAGAAAGTGCGGAGAGATGACCTTCCCCCCTGAAGAGTGCCATTGG
CACACTTCCCTCGACCCTTTCTGCCTCCTGAGATCAGCCTTCCTGAAGTC
CATCCCTTCCGGGGAATGGGGCATGCCAGTAGGGTCCCCAGGGACATTCT
CCCCAGCTATGCTGGACACTTCCCCACCCTCTAGAGTAGATGCCAGAAGA
AGAAGGGCAAGTGGAAATGGGGGTGGGAGTGGAGGTAGCGACAGAGTGGA
GACAGAGAAAAGGGTCTGACTGAGGCCTGTGACCCCTGCTGCCCCCAACC
CATGCTTGTCATGAATAAGGCCAGTGGATGGAGAAACACTAGTTTCTTTC
TGGCTTCAAGGCTCTGGTTGGATTACTCCTTTGATGTGTTTGTCCTTTGG
CCTCAAAGGGACGGCTTCGACTTGGTAGCTCATGATAGCCTTAAGTACAG
CAATCCAAGGTCACCAGGCCCTCTTTCTAACACAAGTCCCCTTCTCCCTT
GGCTTTCAGGAAGGACCAAGGCCCCAGAGCCTCGTTAATCTGTTGTCAGA
GTCCCTGATGGCATGCTAGGTATTTTTACAATTGTTCTAAAATCCCATTA
TCTCCACCGTCCGGGTTGCACAGGGGCCGCCATTGGCTGAATACGTGACC
GACCACCAATGATTCCCTCCAGGGAACGCCAGGCAGAGCTCCCTGGGCTG
CTGGCCATCATCCAAACATGCTCCTCTCCGTGGAAAAGAAGTGATGTCAT
ACACGGAAGGGGTGGTCTCCACGCACAGGATACCTGTAAACACCGAAGCA
TGTTTCAAAGAAAAACAAAAGTCAAATTACAGAGCTGC

[0110] An exemplary DNA sequence of the Gm5627 gene in human is provided below.

(SEQ ID NO: 18)

GTCAGGATCCTGCAGGCCCAGGTGCCTCCTGTGTTCCTCCAACAGCAGCA
GCAGTACCAGTACCTGCAGCAATCTCAGGAGCACCCCCCTCCCCCACATC
CAGCTGCTCTCGGCCATGGCCCCCTGAGCTCCCTCAGTCCACCTGCTGTG
GAGGGGCCAGTGAGTGCCCAGGCCTCCTCAGCCACCTCGGGCAGTGCCCA
CCTGGCCCAGATGGAGGCCGTGCTGAGGGAGAATGCCAGGCTGCAGAGAG
ACAATGAGCGGCTGCAGAGGGAGCTGGAGAGCTCTGCGGAGAAGGCTGGC
CGCATTGAGAAGCTGGAAAGCGAAATCCAGCGGCTCTCTGAGGCCCATGA
GAGCCTGACCAGAGCCTCCTCCAAGCGTGAGGCCCTGGAGAAGACCATGC
GGAACAAGATGGACAGTGAAATGAGGAGGCTGCAAGACTTCAACCGGGAT
CTTAGAGAGAGATTGGAATCTGCAAATCGCCGCCTGGCAAGCAAGACACA
GGAGGCCCAGGCCGGCAGTCAGGACATGGTGGCCAAGCTGCTTGCTCAGA
GCTACGAACAGCAGCAGGAGCAAGAGAAGCTGGAGCGAGAGATGGCACTG
CTGCGCGGCGCCATCGAGGACCAGCGGCGGCGTGCCGAGCTGCTGGAGCA
GGCTCTGGGCAATGCGCAGGGCCGGGCAGCTCGAGCCGAAGAGGAGCTGC
GCAAGAAGCAGGCCTATGTGGAGAAAGTGGAGCGGCTGCAGCAGGCGCTC
GGGCAGCTGCAGGCAGCCTGTGAGAAGCGGGAGCAGCTGGAGCTGCGTCT
GCGGACTCGCCTGGAGCAGGAACTCAAGGCCCTGCGTGCACAGCAGAGAC
AGGCAGGTGCCCCAGGTGGTAGCAGTGGCAGTGGTGGGTCTCCAGAGCTC
AGCGCCCTGCGACTGTCAGAACAACTGCGAGAGAAGGAGGAGCAGATCCT
GGCGCTGGAGGCCGACATGACCAAGTGGGAGCAGAAGTATTTGGAGGAAC
GTGCCATGAGGCAGTTTGCCATGGATGCGGCTGCCACGGCTGCTGCTCAG
CGTGACACCACTCTCATCCGACATTCCCCCCAGCCCTCACCCAGCAGCAG
CTTCAATGAGGGTCTGCTCACTGGTGGCCACAGGCATCAGGAGATGGAAA
GCAGGTTAAAGGTGCTCCATGCCCAGATCCTGGAGAAGGATGCAGTGATC
AAGGTCCTTCAGCAGCGCTCCAGGAGAGACCCTGGCAAGGCCATCCAGGG
CTCCCTGCGGCCTGCCAAGTCGGTGCCATCTGTTTTCGCGGCTGCGGCAG
CAGGAACCCAGGGCTGGCAAGGGCTCTCTTCTAGTGAGCGACAAACAGCA
GACGCCCCTGCTCGGCTGACTACAGACAGAGCACCCACAGAGGAGCCAGT
GGTCACAGCTCCCCCTGCTGCCCATGCCAAACACGGGAGCAGAGATGGGA
GCACCCAGACTGAGGGCCCCCCAGACAGCACCTCCACCTGCCTGCCACCG
GAGCCTGACAGCCTTCTGGGGTGCAGCAGTAGCCAGAGAGCAGCCTCTCT
GGACTCTGTAGCTACATCCAGAGTCCAGGACTTGTCAGACATGGTGGAGA
TACTGATCTGAAGGAGGTGGTGCTTCAGGACTCTGAGCCATTCTCTCCCC
TCCTCTGCCCTGTGCCACTCTCAGCCATTTCAGCAGCCCCGTCAACCGCT
GCTCCGTCCCTTTCCCCAGCCAGACACTCATTCCCATTGACCATCTGGTC
CCAGGAGCTCAGGAGGAGGACCCCAGGGGAGAGGAGAGCTGTGAGAGCAC
CGGCACCCCCAGAAGACTCTGCTTCTTAGCCCACATTCCTCCGGGCCTTA
TGGAGAATGAGGATTCAGCCTTGACTTCTTGCCCAAGGCCTGCTACTGGG
GTAGCAACTGACAGCTCAGAAAGGAGCTGAGCTCCCTCTGCCCTGCCAGT
TGTCAGTCAGGCAGGGAGGGAGTGGCTGTGTTGGTTTGGGGAACTAATTT
CCACGGACGGCTGCCCGTGGACACCAGGTGGACTGGTTCACTAATCAAGT
CAGCCATATTGTTCTCTGGCTAAGTTTGGTTCCAGCCAACGTCATCTGCT
CTTCAGTTCCTCACTGCCTTCTTGGGATACTAAGACTTGAATTTTTTGGG
GACTATTAAGGGTGTTAGTCTTGGAGAAGACACAGCCTCACCTTCTCACT
TGCTGTGGGTGAGGGGCCATTTAAGTGGACTGGGAGACAGTGCGCAGTTT
GTATATAATTCCCTTTCTTGTGGAACAGAAGACTGAGGCCTGCAGGTTCC
GATGTGTCTCCATGGGCTGTGCTCCCCTCTTCCTACTGTCAGTTTCTGAA
ACTTCTGACTGGCCTCCCAGTTATGCCTCCTCCTCAAGTTCCTGGCCCGT
GGATGTTAAAGCTGCTCGATTCCCAGGATCTCGGCTGCCTTTTCCTCTAT
CTTGAGCCCTATAAATGCCCACGGGACCCCCACCACCAGCCTCTTGAAGT
GGCTCCACAGCTCCTGTCCCTGGAACATCCTGTCAGTTTGGTCATAAACC
CTGAGCCAGATGAAATGAGCCACCGTGAACAGACATCTGCCATGCCCCCA
GGTGGGCTTCGGTGGCCCTACCCGGTACCAGTTCTTTCTGAGAAACTGGA
GATGTCTTGTTAGCATAAGTGTCTTCATTCCCACCTGGAGGGTTTGGGAG
AGGAGCAAAGCAGTTGAAAACTAGTTAATGAGCTACAAGAGTCAAATAGT
CCTCTGAATGGAGCCCCCATCACAAAACAGTGCCCAGGAGGCTGGCTCCT
CAAGCTACCCATGCCCAGCGCCCTAAAGCAGCACCAGATGCTTTGGAATT
GGGGTGAAACACCCACATGGCAGCCTGCTAGCAGCAGTGACTTTGACTTC
TGGTCTTAAAGAGTCCCTCACTTCAGCCCCAGGAGCTATTGGTGGGTTTT
AGCAGTTTTGTCTTTACCGTTTTTAGTTCTCCTTGATTCTTTGTTTTCTT
CCTTTATCGTTTTTAGGTTTGGTATGTGTTGTTTTATTTCCATGGTTCCT
CAAGTTTCCTTTTTAAACATTTGCATTTGCTGGACAATTGCAATTTTTTT
TAAAAAATTCCCCTACCCCTGTTTAAAGCTGAAAAATACATTTGGTTCAT
GTGCATTGTTTACAAAGCAAAAAGAAAAAAAAAAAAAAAAA

[0111] Ryk, or related to receptor tyrosine kinase, is an atypical member of the family of growth factor receptor protein tyrosine kinases. Ryk is involved in stimulating Wnt signaling pathways, such as regulation of axon pathfinding. The cDNA sequence of Ryk in Mus musculus is provided in GenBank Accession No. BC032275.1 (GI:21595526), incorporated herein by reference. The amino acid sequence of Ryk in Mus musculus is provided in GenBank Accession No. AAH32275.1 (GI:21595527), incorporated herein by reference. The cDNA sequence of Ryk in Homo sapiens is provided in GenBank Accession No. NM_{—}001005861 (XM_{—}001130617), incorporated herein by reference. The amino acid sequence of Gm5627 in Homo sapiens is provided in GenBank Accession No. EAW79155.1 (GI:119599561), incorporated herein by reference.

[0112] An exemplary DNA sequence of the Ryk gene in Mus musculus strain C57BL/6J chromosome 9, GRCm38.p1 C57BL/6J is provided below.

NC_000075.6 (GI: 372099101: 102834920-102908307):

(SEQ ID NO: 6)

CCCGTTCCCGGGCGGCGGGTCTGAAGCGGCGGCGCGATGAGCTGGCCGGC
CGCCCCCGGCTCGGGGCTGTGAGGCGCTCGGGGCCGGGGTGCGCGGCGGC
GCGGCGGGCGGCGGACGCTCCTGCTCGGCGGCGGCCATGCGCGCGGGCCG
GGGCGGCGTCCCGGGGAGCGGCGGCCTGAGGGCCCCGCCGCCGCCGCTGC
TGCTGCTGCTGCTGGCGATGCTGCCCGCCGCCGCCCCGCGGTCCCCGGCC
CTGGCCGCCGCTCCTGCGGGACCCAGCGTGAGCCTCTACCTGAGCGAGGA
CGAGGTGCGCCGGCTGCTTGGTGAGTGGCGCGGCTCCCGGGGCCTCGTGA
GCCCGCGGTGCTGCCGCTGCGCCGCCCGCGCTCTCTCTCTCTCTCTCCCT
CTCTGCAGCCTCCCTGCGCGTGTCACTCTAGGCCGCGGAGCTCCGGAGCC
TCGGAGTCGGCGCTCGGGACACGGGTGGCCGCTCCTTAGCCTGCTGTGGG
TGGCCCACAGGCCACGCCGCCGCCGTGCGCTTGCTTTCTGGTTAGCGAGT
GGGGGGCAAGGTGAGCCGGGCGCCCTGAGTTGTGTGGCATCCTGCACACC
TTCGGGCCGACCGGATCCCAAGCATCGGGGTTTGCCTTGGGTTCCTTGAG
TGTGACCTGATGCTGCCGTTCCAGGCCACTTGCCTACTCTGCAGACCCTG
AAGCGAGAGGAGAACTTGGCTTTGGGGTCCGTCGGCGGTGGTTCCGTTTA
CCTGTTTAGCCCGTTGTTTGGGGAGTCCGACTCTGCCCTCCGCTTGGAAC
TCTGTGCATTCTGAAAATCAGCCCTTGAAGGAAGGCCTGGCCAGCCATCA
AAAGGAAGTCTCTGATAGTTAGGGATACCCAGCTTTTGCCGTCTTTTGTG
CATTAAGGCAGTCCCTTCACTTTTTATCGGGGTGTTTTAGAGTGAAGTGT
TGGAACTGGAAAGGTCTCCCCCTAAATATCCATTAAGTGTCACTTTTTTA
GTGAGCGAGTATGCCTCCCCCAAGTGTGTGTGTGTGTGTGTGTGGTGTGC
GCGCGCGTGTGTATGCGTATGTGTGTATTAGAGGAGGTTTTTTTGTTTGT
TTGTTTGTTTGTTTGTTTTGTTTTGTTTTTCCTTTCCAGACAGGGACTTT
ATGTAGCCTGGGCTGTTTTGGAATCCACTATGTAGACCAGGTTGGCCTCA
AGCTCACAGAGAGCCTTCTGCCTGTTAGAAGAGTTTCTTAGGGTCTGTTG
AGAGAGTTTAGCCTCGGAATGAAAACTGCTTTTAGCAGACTGTTTAGACA
TAGTTGTATGTGTAGGTTTATCGGCTTTAACTAAAGAACTGTGTTTTCCT
AACATCCTAATTTAACCTTCCTTATAGTCTAGTTGAATTAGCTGAATTTA
GTCTAGCAGAATTGAAATGGCATCTGAGTTACGCCTGGAGCATGGGAGAA
AGGCTTGGGAAAAAATAACGATTTGTAGTGCGGCTCCTAGGCGTGCTTTT
GTAAGGGTTGTTTTTGTTGTTGTTAAAAGAACTTACGTAATTGTGACTTT
ATTGACATGTATTTCCTCTCCTGCCTTAGCCAGGATGGAAGTAGGGAGAC
AGAGATATCTGGCAGCAGACAGAGACGAGTACATGTGCCTACCGTTGCGT
GTTAGAGTTTTGCTGTTACTTTTATTTATTTTGGTGTGTGTGTACCACGA
TGTGTTCTGTGGAGGTCACAGGACACCTTGAAGGTGTGGGCTGTCTTTCC
ACTATTAATAGGGGGTCCCAGGGCTCAAACTCATGTCATCTGACTGGACG
ACAAGTGCTTTTACCTGCTGAGCCATCTAGCTGGGGCTTGATATGGACTT
AAACATGTTGTTTCAGTTTCTTGTTACCCAGTGGGGCAATTATGGGAGAT
GAGAAAAGTAAGGCTTTCAGTAACTTGCTGAAGGTAACATGGTTTATTTC
ATATATTACATATATAATATATACCCACACAAGACAGTGTTTCCTGGCTG
CAGACTAAGTTATTGAAGGGCATGTGCATTTAGAAGTTTGATTATGGCAT
GTTAAAAAAGAGACTGTTGTTCATTAGTACGTGAAGTGATACCTTTGTAG
CCTGGAACTGATTTTCTTAGGACAGTAGCTGAGGGGGCACCTGATGGATG
AGCACCTGGTCCAGTAGTGTGTGAAATAGAGTGGGGAGCATGGCTCATTA
ATGCTCCCATCCACCCTTAGGTATTTCAGTTCCATGCAAGCTGAGTTGTC
CTGTTACAATGTGGTCTCTAGATAGTCCTCTTGCAGAACCAGGGCCTCTT
TCTGTCCCTTTACGTTTCCCTCAGCTGTGCTGCTGTTGAAGGATTCCCAT
CTGGCTTTGTCTGGGTGGCAAAGTGCAAGTACTGGGACGTTTGCTGGGCC
TCCTGAGTGTGGCTGTGATGGTGTGTACGTGCGAGACTGTTGGAGATAGT
GCTTTCCACCACGTTTTCCTTTGCGTAAAGGGTTAAGTGACTTCCAAAAG
CTCAGGCAAGCTAGTGTCAGTTTTACAGTGTTGCTGAGACCCAGGGTTCA
GAATGCCAGGTGAGAACTTGGAAGTTGGAAGTGACAACTCTGTGGAGCTG
GCTGTACTTGATAGGAGAAGTGCTTTTAATCCAGACATTAGCTGCACATA
ATAGAAATCAATTGGATAATAGCAAAAAGGCCTTGAACCAGAAGCCATCA
GCACCCTGCCTTTGGGCTTTTTGCCCTCCAGGTCCCACTGCCCCAGTGGG
CGTAGTTCACACAACTGTGGTGGAGTTTGTCTTTCCCTTGTTGTCTTTGG
AATTTCTAGACTAGTGTGGACTGAACATTTGTCTTCTGGGGTCCTCCTTG
TTCATCAGACTCCCCAGGGCAGGTGGGTTTTTTTTTTTTTTAATTTTAAA
AAACATCCCAATCACAAAGGAACTCACACAATATCTACTCACTGATAAGT
GGATATTAGCCCAGAAACTTAGGATACCCAAGATATAAGATACAATTTGC
TAAACACATGAAACTCAAGAAGAACGAAGACCAAAGTGTGGACACTTTGC
CCCTTCTTAGAATTGGGAACAAAACACCCATGGAAGGAGTTACAGAGACA
AAATTTGGAGCTGTGACGAAAGGATGAACCATCTAGTGATTGCCATATCC
AGGGATCCATCCCATAATCAGCTTCCAAACGCTGACACCATTGCATACAC
TAGCAAGATTTTGCTGAAAGGACCCAGTTGTCTCTTGTGAGACTATGCCG
GGGCCTAGCAAACACAGAAGTGGATGCTCACAGTCAGCTATTGGATGGAT
CACAGGGCCCCCAATGGAGGAGCTAGAGAAAGTACCCAAGGAGCTAAAGG
GAACTGCAACCCTATAGGTGGAACAACATTATGAACTAACCAGTACCCCG
GAGCTCTTGTCTCTAGCTGCGTACGTATCAAAAGATGGCCTAGTCGGCCA
TCACTGGAAAGAGAGGCCCATTGGACTTGCAAACTTTATATGCCCCAGTA
CAGGGGAACGCCAGGGCCAAAAAGGGGGAGTGGGTGGGTAGGGGAGTGGG
GGTGGGTGGGTATGGGGGACTTTTGGGATGGCATTGGAAATGTAAATGAG
GAAAATACCTAATTAAAAAAAAACATTTATTTTTATTTCATGGGCATTGG
AGTTTTGCCTGTATGAGGGTATAGCATCCCCTGGAACTCGAGGTACAGAC
AGTTGCGAGTTGCCATGTGGGTTCTGGGTATTGAACGTGGGTCCTCTGGA
AGAGCTGCCAGCACTCTTAGCCACAGAGCCATCTTTAATCCTCCAGTGCA
TGTTTAAACCAGCAGTCAGTTGCCACAGTGGTCTGGTCTGTGCCCTCAGA
TGGTCAGTATCGATGCTATAGCGTACAAATACATTGCCCTTTTCTGAGTT
CGATATGAACTGGTAGACACCCCCTCCCACACTCACCCCCTTTGTTCGGG
TTTTCCCTTTGGATCTTAAACTTTTTTTTGATTAGCTTGCTTTGTGTCTG
TACATATATTCTCTCGGGTACCCCAAGAAGCACGCTGAGTGCCTTTTGAT
CCCCAGTCCCCTTCAGGCAGCACTTTAAGACATCTGTTAGTTCCATTGGA
TTCTTCTCAGTGGTACCTTCCTTGATTTAGTGTCATCCATCCCTTGCTTC
AGGCTGGTCAGTAGCACTTTATACCTCTCTGTCCTCTCTTGGTCTCCTGT
CCTCCTTTTTCTTTGCTGGTTGTGTGTATCCTCAGGGGAACCCTAAGGAT
GGGGTTCATGGGGAAGAGATATTATTTGAGGTCCTTTATGTCTGAAAATT
TTCATTTTACCCTCACACTTTGTTGATGGTCTGGATGACTTTAGAATATT
AGGTGGAACATAATTTTTGTTCACAATTTGGAGGGTTATTTTCTCTTGTA
AGGATTTCAGATAAAGAGCCCAAAGCCATGTCTTTCTAGCTCCTTCCCCC
ACCCCCTTCACAGTTTTTAGAATTCCGGAGTGGTTTACTCTGGAATTACT
CTGGTATTCTGAAGTTTGTTAATTGGGTTGCAAAGCCTTCAGTTTTGGGG
AGTGTTTGTTTGCTTTTTAAATAATATCCTATGCCTTATTTCTTCCTATG
TGGGTTTTTTTTTTTCTTTCTTTCCTGAGATGGCTGTCGTGTGTCTGTTG
ATTCTCCTTAAGTTGAACTTCATGCTTCTTGTCTTACCTTTATTGCTTTG
TATTGAAACCAGTGGACAGAGAGTTCTCCTCAATTTTGTCTTACCAGCTT
TCATTTTAAAAATGTTACTGATGTTTGTAAGTTTTAGAATCTCTTTTTTT
TTCTGTATTTGATTGCATCTTGTGAATGTTTTATCTTAACTTTTTTATTA
TTGTTGTTGTTGTTGTTGCCAGAATTAAACAGAATTCTTCTGCTTGTGGT
TCTGGCTGTCTGATCCTTGGCTTTGTGTAGTGAGATGCTAATATTGTTAG
GAGGGAGAGGATATGCTCGTGTGCTGACCATCCTTGCTGTCAGCCAGAGT
GCAGGTGGGCATTTCGCTGGAAGCCTGTCCCGAACACCAGTACAGAATTT
TGTATCTAATTAGGGCTCTCTGCTCAGTGTCTGTAAAGAAGCCCCAGGAA
ACTTCCTGCCTCTGGAATGCCGGGTGATAAATCAGCTGCCAGGCCTTGGG
TTACCTGGTTGGGGAGGAATGGAAGTTTTCACCCTCAGGCTGTAGACTTT
GACTTCTGGTTATAATTCCCTGCCCTTATGACTCAATTTCCCTAGACCTG
GGGTCTCCTACTGAACCTGGGGACCTGCTGCTGTGGATATTTGCACAGTG
GCTCCCTCCCTGTGCAGCCTGAGCTTCAGGGTGACCTTTGGTACCTCCCA
GGTACCTCTAGGGCTGAGCCTCTTAAGGGGCTTCTGATCGCTCCTCTACC
TGCTTTCCATCATGCAGAAGTCTGATAAAGTAGATGAGTTTTTTCTTCCT
TCTTGGCTTGATAATTCAGTTCCCCTACCATCCAAAGGCTTTGGTCATTC
TGAGCTGTGTCATTTGGTAGTTGTTTTGTAAGGGCAGTGGTGGTCAGTAG
TGGTGGACAGAGTGCTCATGATGTGTGGCAGAAGTTTCCCCGTGTCAGAT
ACATAGTCCTCGAAGGCGGGTGCTGACACTTCCACCCTGTACCCAAGCAG
GCTGAAACAAGATTCCATCAACTGAGGCCCTTAGAAGCAACAGAAATGTC
TTTTTCACAGTTCTGGATGCTGGGAAAGCCAAAATCAAAGTGCTGATGGC
TTGGTTTCTGGTCAGGGCCTGTTTTCTGGTTCCTAGATGTATCCGTTCTC
ACACAGTGGGAGGGTGAAATGAGCTCTGTGGTCTTCATTATCAGGGCACT
GATCCTCCTTGTGTCTTTAAGACCTAATCCTCTCCCAAAACCCTGTTGTT
TATCTATCTGCCCGCCATGGCGGTTAGAATTGTAACATGGGTTCTGGGGG
AATACAGAGGTTTTTACCTTAGCACTGAGGAAGCAGACTTGGAGGGGGTC
CTTGGTGTGTGCCTGCTGCATGCAGTCGTCCTGTGGAAGTCCGCCTATGT
TCTGAACCGTGTCTGTGTGGTTTCCCGTGTCACCAGGCCCTGCTTCACTG
CTCTCATTACTGTCCTTAGCAGACTACAGTACTGGCTACTGTGTCCATAT
GTGAAGGGTGGGATCTTGATTCAGCGTGTTGTGGACATCGAGTAGAAGGC
CAGGCCTTGACTCAGTTGTGCCTGAAAACTGGATCCCTGCTGTTTCCAGC
AGCCCTGGAGCCGCTGCAGTTAAGCCAGAACTCAAACAGTGCTGGTTTGT
GGACCTGGTTACTGTCAGTGTCCTCCTAGGTTCACTAACGTAGCCCTGTG
CGCTGCAACTGCTGGAGCAGTGCCAGAGGTTTGGGAATAAGATGCCGGTG
GCTGGGAAGGCGTGGTGACAGTGATGGCCGTGATAGGGAGCTGTGGTCCA
TGGCGGTGAAGACAGCTTCGGAGAGAAGGAAGCAGTTAAGCATTTCCTCT
GGCTAGCTTGCTTCTCCTTTCAAACTAAATTGCTTCTGGGAAAGCCATGC
TTGCTCACTCACAGCTTATTTAAAGACAGTTCACACTTGTTTAGGCACTT
GCTTCTCAGAGCAGTGTAGGGAAGGAAAATTGAAGGATTATATATATGGA
GATAATGACAAAAAGTGATTAGATTCCTTTCCTTAATGAAGTGTGTGTGT
GTGTGCATGTGTGTATGATTGTCCCATGTAGGACTGTAGCTCTGGGATAA
GATTATTGGAGGAGTGGTCACTTGATTGTGATTGATGGGGTGATAGGCAG
GGTTATTTTTCATTTTTCACTATGGTTGTTGGGAGGGTGTTTTTGTTTGT
TTTTTGTTTTTGTTTTTATTTGTAGGAATGGTTACTTTTGAGAGAGGAAA
GAGAGTCTTGGAGAGTTTGGGAAGGGATCCCAGGAAAGGAAACATTTACA
CCTCATCTCCAGGTTGAGCTAGACAGGCAGACAGAAGAGAGAAGCACTTA
GGGCCAGGCAGAGAACATGGCATGGAGTGTGGGGGCAGACACTGCAGAAC
TCTGACATGGCTGGGATGAGAGCCATGAGCCAAGGAGAGGAGACAGAGAA
GACAGCTGGGAGATCAGCGGATTGGAGCTGTTCCCCTGGGAATGGAAAGC
CACTGGAGTAGTTAGGCAGCACTCCAGAGGTGGAGGCAGGGGGGATCAGG
ACTTCCTGGCTAGCTTTGTATATGTGAGACTCTGATTTACTCCCCTCCCC
CAAACAAAATAACAACAAAACCCAGCCATCAAAATACAGTACCCCACAAC
AAATAAAGCAGAGATAGGAAAGGAGTATGCAGTCGTAGTGGGTTGTAGAA
AAGATAGTGTGTGGCTCCTTGTCTATAGTTAAGACACCTGTCGGGGAACA
TGGGTTGGGGAGCAGGTGAAGAGGTGGGGTGGATTTATCAGGAATGAGCA
ATGAGTTGGGAGGTTTACCCCTCTGAGACCTCAGGGCTAAGGAGAAGCTA
TTCTCTAGAGTCCACTTTTTTAGATTTGGATGTCTGAGCCAAAGGACCCT
GTCTCAGTTGAGATGAGCCAAGTGTTCTCCCCAGCTAAGCTCCTCTCGTT
CCTGCAGAGTCTCAGGCCAAACGCTTGGCTGGACAGGGGTGGTGTCCTCC
CTGCTGGTGGCACTGGTATAACCTGCTAGGGGTGGCTTTGGCAGGAGTGG
GTTAGCATCCTGAAGTGAACCCTTAACCCTAGGCGTTGGGTTGGGGTTGG
TGGTATTGGCACAGCTGAATCCGAGCCCATGTGTTCTTAATTGGGAGGCC
GGGGCTGAGACATTGTGCAATTGTGGGTTTGAGTTTCTTTCTCCCTGCAC
ATATGGGGGAAAATTCTGTCCAATTATGGCTATACTTGTCCCATGTGAGT
CACAGCCTGAGTTAATGAGCGAGTTCTGAAGGTGCTGCCTCAGTGCTGCT
CGGGTTTTAAGTCCACTCCAAGCGTAAGTGTGTGTGTGTGGGGGGGGGGC
ACGTTTCTCAAACACTCAGAACTGAGAACCTCCCCAGCTTTGCTTTGGGG
TTTTGATGCTGTACATCAACTGTCCTTTTAGATCTTGCCAGCCTGAGAGA
TAAGAAAAACCTGCCCTTGAGACCAAACTATTAAGTTACTCTTAAACTAC
AGCAAAAGTACCGTGCTTTCTGTGTGTGTCATCCTTGTGGATGTATGTGT
GTTCTAATCTGGATGTTACTAAGCAACATTCCATTGTGTAGGGCCTCCTA
AAACGTTATGTGCTAAAACTAATGTGTGTGTGTGTGGGGGGGGGGCTGAG
ATGTAAACGCTTACTGAAGGGTCTGTTTTGCTGTCCCCAGCAATGACAAT
GCCGAGTGACTGTCATCCTTACATTTTAAGTTGTAATAGAATGTGTATAG
TTCTTAACTTGGGAGATGCCCATAATCTAGAGAGAACTAACACATCTTAT
GCACACCAGCTATTTCACACATGTTTGTCAGCAGCATCTGGCACATTGTT
TACTTTTTAAATAGATAAAACCAAGATTCTGGAAAAATACACAATTTGCT
GGAGGTCTCAGATGCATGCAGTTACGAAGCTCTGAAGTGCACGCTTTCTA
CTCTGTTTCTGGGAAGGGTAATAGTCTACCCGGCTCCCATTGAACTCACC
CGGGGAGCTGCAACAACATCCAGAGTCCTGGCTATACCCTTACCAAGTGG
TGTAGTGATCTGAACTTCTGATCCTCCTGCCTTCCCCTCCCAAGCTCTGG
AATTCCAAGTGTTTACAACTCCTGCTTCACGTGGTGCTGGAGATCAAACC
AGGGTTCCGTGAATGCCGTACCCCAGAGCCAGGTCCTCAGCCCTTGTAGT
TGATCTGAAGTGATGAGTCAGCCCTTTGACTTCTGAATGCGTCACTGACT
GTAAGATGCACAGCTTGTAAATTTGCAGCTGACTTAGTGGGAGTTCTAGT
TAACAGACTGCTTTCCCCCATACCTCAGATTAAAGTGACATGCCCTGTTA
TCAAGGGTGACACTGTAATAACATCATCAGCCTAGCATTTCAAAAAGTCC
AGGTGCTGTCCTGGGAGTGCCAGTGGTTTTCTCCTTCCTGGTAAAGGGGG
TCTCTATAGTAAGATTGCATACTTTGCTAGAAAGTCCTTAGGCCTGGGGC
CTCAGAGAACTCCTGCTGAAGTTCATGGGTATCTCTGAGTCTTTTGGATT
TTTGAGACAGGGTTTTTCTGTTTAGCCCTGGCTGTCCTAGAATTTGCTTT
GTAGACCAGGCTGGCCTTGAACTCACAGGGATACACCTGCCTCTGCCTCC
CAAGTGCTGTGATTAAAGTGTGTGCCAGCACTGCCCAGCTGTATTCTAAT
TTCTTACAAGAGTTAAAACAGTTATGATGGGGTTGGAGAGATGGCTCAGC
AGTTGAGAGCACTGGTTTCTGCAGAGGACTGAGGTTTGACTCCTGGCAGC
TGCATGACAGCTCACAACTGTCCATAACTAGATCCAGGGGATCCAGTGCA
CTCTTCTGACCTTGGGTACCAGACACACATGTGATGCTCAGATAAGCCTG
TGAGCAAAATACTTATACACATAAAATAAAATAAACAGAAAATAAAATTT
AAATAAAAAGTTGTCTTTAAGAATTCATTCTAGAGCTGGAAAAATGGCTC
TGAGGATAAATATGTATTGTATAAGGCTGGAGACCTCAGTTTGATCACCA
GGACCCACCCGAGAGGAATGAATGACATCAACAAGTTGTCCTCACACCTG
AGCCCTTCCCATAAACAAACAAACAAGTGAATAAATGTATGTATGCAATT
AAAAAGTTCACTCTGCTATAAGCTTTTATGGGCTTTGACAAGTGCATAAT
GTCCTCTGTGTACTTCATCATATAGTATATAAAGAATATATCAGATATAC
AGAGTAGTTTTAATAAAAAAAATCATAGGAGGAGGCATCTGCATTTATAA
TAACAACAAAAACCCAACCAGTCAACCAAACAAAAAGCCAAGAGAGCCGG
GAAAGAAAGTTTCCAGTATTCATTTTTCTGAAGTCCTGCTGTTCCTCTAA
CCCAGTGCACTTTTTCTTATCTCTTACATTGTAGTTCTCATTTCAAGAAA
TTAGACTTTATAGTCTTTTTTTTACTATCTGCATTACTTATTCTTTGTTT
CTGCGGACATTTTTGGCCACGTGGAATACGGTTACATAGTTATTGCTAGC
ACACCAGTGCCTGTTGGTGAGTTTTAGTTGTTATCTAGTGCTCTGTACAT
TCTTTCCTTTAAAAAAAATATGTGTGTCTATAAATATATGTTTGGATGGC
AGATACTGTGAACATTTCTGGGTGCTGAGTGTGTGTGTGTATGTGTGTGT
GTGTGTGTGTGTGTGTGTGTGTGTGTGTGTTGTGTGTTTTGTGTGTGTGT
GTGTGTGAAATTTTTTGAGACAGGATCTATTGCTTGCCCTAGAATTCAAT
GATGAGGCTCAGCTGGGTGGCCGTCCAGGAAGCTCCAGGGAACCTCCTGT
CCCCATCTCCTCAGGGCTGGAATTACAAGTGTATGCCATTGCACCCAGCT
TTTTTGTGGGTGCTGGGATCTAAACTCTGGCTCTCTCTTGTAGCAAGCAT
GTTAGGAGCTGAGCACCTCCTCAGCCTGCCTACCTGCCTTTCTTTCTTTG
CCTTCTTTTCTGTTTTTGCTTTTGTTTGTTGGTTTCTTTGTTTTAGACAG
ACACTTGTTCTGAAATTCAGGCTAGCCTCCTGCTTCATTCTTCCCACATG
CTGGAATTGTAGGAGTGTACCAGGATGCATGACAGCTGAACATTTATGAA
TTCTTTTAAATATCCTTGGATTTTGTTGTGGGATGCAGTTAAATGACTTG
GAAACAGTTTGAGCCTTCTGGGTGTTACTTATAAGGCTTGTTGTCAGGCT
CATTGTTCCCCACAGGTGAGTTAAGACCCTTCTGCACTTATCCCACTAAA
CCGTGAAGGGTGAGCCTCCGGTCTGGCTGGTGGGAGGATCCAGATTCTGA
GTATTGGGCACTGTTCCCTTTTACCCTCTCTCTGCCCCCTTCTGGCTTCC
ACATTTGCATGTCGAGTCACAACTCAGATGGGCTCTGGAGCTCAACACTC
TGGACCTTGGACTTTCCACTTTGTTTAGCTCTCTGTGCACCATACCTCTA
GAATCTTTTTCTAGATTCGCACATGCCACAGCATTCATGGGGAGGTCAAA
GGACAGCTTTGAGGAGCCAGTTCTCTCTGCGCTGTATTGAGCTTTGGGCA
TCAGGCTCAGTCCTGAGACTCTGTGGTGAGCGGTCACACCTGCTGAGCCA
TCTCTCTTGACTTCAGCATCCTTCTCTGCACTGTAACTGTAGCACTTACT
ACTTGTGGTCTTTGTTCTAGGGATGGGTCACTGTTGCCTCCTGATGAGTC
CTTTAAATTAATGAATCAGTTGAGTCCAGTCTTGATTATATCAGATGAGA
GAATCAGTCAATCTTCCAATATTCTCATCAAATGCTCGTTGTTCATGTCT
TCCCTAAGGTTAATTCCTTAATGATCAATTAGAGGAAAAAGTAGCCCTGC
TGAAAGAAGCAGTTGTGTAAGGCTTGGATCTGTTTGTGCAAGCACGCTTG
TGAGCATATGGTAGGTGGCAAGTGTGGGAGAGTGTGGGAGCCCATATGTT
TGCATGTTAGTCGCATCCCTTCCTTCCACTTTAAGTGGTTAGGCATGTGT
AGCGGCAAATCTTGATGGTCAGGTTAACACACCTGGAAAGAGGGACCCTC
AATTCAAGAATTGCTTCCATCAGCTCGGCCTGTGGACAAATTTAGGGGGG
CATTTTCTTGATTAGTTACTGATGTGGGAAGGCCTACCACACTGTGTTCT
GTGTCACCTCTGGGCATGTGGGTCTGGGCTGCATAGGAAAACTATCTGAG
CTGGGTAGTGGTGGCACACACCTTTATCCCAGCGCTCAGGAGGTAGTGGC
AGATGAATCTCTGAGTTCAAGGACAGACTGGTCTACAAAGTGAATTCCAG
GACATCCAGGACTACAGAGAGAAACCTTGTCTCAAAGTACCCCTCCCTGC
CAAAAAAAGTTATTTAAGCATGAGCTAGTGAGTGGGCCAGTACGTGTAAG
AGAGTTTCTCTGTTTCTCAGTGGGTTCTGCTTCATTTCCTGCCTGGACTC
CCTCATTGATTGGCTGTGACCTGCCGTCTTCTTTCCCGAGTTGCTTTGGG
TTATAGTTGTTTATCAGACCTACAGAAAAGCAAGCTGTAACTAATGATCT
GCCTATGTAAGATGAGTTGCTCTTCGCACATGTGCTATAATGCATTTGAA
TATGCTGAATGAGCCTCACAACAGCCTATGTTAGTCACTGCTGGCGATTT
CTGTATCTTTGCATTAAAAACAAATACCCTAAACATTTTGAGCTGTTTCA
TTTCTGGTTGGGCTCTGCTGAGGAAGGTAGAATGGCTCATCTGTTTGGTT
CTGAGGAAGGACTGGGAGTAAGCTGCAGGACACAGGGAAGGAGCCTGCTG
ATCCTCCCCAGGAAGAGCCAGATACCTGTAGCCCCGAGCCCCTTTCCTCA
CATTTAACTGTGTGAGGAAACACAATTCCTGGCCTAAGACAATAGGCCAC
TTAAGCACAACGCACTGGAGGCCTCAAGTCACCGGGTCATTTAGATATTT
GGTTGGTTGCCTTTCGTAACAGTATTCTTTTACAAGAGTAATATGAGCTT
ATTTTAGGAGCATGGGGTATCTTTGGTGACTAAAACAGATAAAGGACCTG
GCCTTGTGGAACTAACTTTTGACAGAGACCTATGTGATTTGCCTTTGAAA
TTAGCTTTGGGATTGGATTCCTGAGATAGTAGCACCCTGCTGCCCGTCAC
TGGCAGGGAGAAGAAGCGATGCTTGTGAGTTCTCTGTGTTTTATGATAAC
AGCCTACATTATTACCAGGCAAGTCTGAGTCAGTCCAGCCTGAGGTAAAG
TGTGCTCCTGTTAGCAGTGGAGGTCAAAGAAGTTGGGCAGTGCTGCCATG
AAGCCCTGGGTATGTGGCTCCATTTCTGTGGCTGTGTCAGTGGTACAGGT
ATAAACTGGTCATATCACTTTCTTCTTCTAGGTCAGGGAACACACCAAGC
TATTGTCTAGAGTCTCTGTCTTACCAGATGCTGGGGATTAGGGCTCTGTG
GCGGGGAAGTGGTGTTTTATGTTTTAATGCTGAAGCTTGTGTATCCTTGA
GAGGGAGTTGGGAGGTGCCTTCTACACTATTGGCTATTGTCCAGATCATA
TGCAATCACAGTTTTTAGGGGAATCTTCTTACGCATTTCTCTTTGACCTA
TATTTTCCTTGGGAGTGAAGTGTTTGGTTGTTTTAATTTAAAGTGTGTTT
GCTACATTTGCTATAGTGTTTGCTGAGGTGGGGAAGGTGACAGCACATCT
ATTTGAAACCACGCCTGCATAACTTCTTCCAGAGCACTAGCAGAGACAAA
CCAGAGCAGCACAGCTTTTGTGATGGATGGCTTGAGTGTCTGTGATCAAG
CATCAGAGAATTACTATGGGTTTTGAGAAGACAGGTCTTGGTCTGAAGGA
GGGAGCCTAAAATACAAGGAGCAGAGTGGGGGAGTAATGGCCTTTTGTTG
GTCAGAGCTGTCTTTCTCAGCACCCATGCTTGTCTTGGTTTTTCTGTATG
TAACTATGCATTGTTACCTCAGCTCTGCCAAGATGTTTGAGATAGAGACA
GAGACAGAGACAGAGACAGAGAGAGAGAGAGACGCATGAAGCAAACACTG
TGTGGTGGAGTGCCTGAGAGTTGTTCCCAGTGTTCCTGCTCCAGTAGCCA
CAAGGCTTGAAGAGACCTTTGTAGTGGTGGAAGAAGGCGTTCCTTTCCTG
CCATCAAATGTCGCAGTTCTCTGCTGAGGGCAGCCACGTTCTTCTGGGAC
CTAAACTCAGAAGCTCTGCAAAAGCAGCCTCTGCAGCTCTGGCAGTCGCT
GCTATGTGAAGTTAAATGTCGCTTCTCAATAAATTGTTTGGGTGTGCACG
GGCATAGCTAGATTTCGATGAACAAACTTATTTCAGTTTATTATTTTATA
TAAATTAGAAACATTAGAAGTACGAGCTTTTTATTTTGTATCAGTAAGTG
TACTTAGTGGTTATACATTGCTTACAAATAAACAAAAAAATAAATAAATT
CCAAGAAAAAAACCACATTGATTACCTTTTTCTGATTAGACCTAGAAGAT
TGTCTTGACTTGAAATTTTTTAAAAGTTTTGATTGGTACGTGGGAGCCAT
GGATGTATCATAGAATACTTATGTTTTGGGTGACATTTGGAAACTACTGC
TGATGTCATAAAATTATAGAATTTTTAGTGGAGGAGGGGATTAACATCAT
CTGGTCTACCTCTTTTGTCTTATAGTTTTGAAAGCTGACTTATGAAGATG
GCTTAGGAAGTGAGTGCCAAAGGCCTCTCACCTACTTAGTCTCAGCCAGG
AAGAGAGGTCTGCACGGTGAAAGCTGCTCTGTTTTCTTATTTTAACTGAT
GCCTGACAGGTTGTAAAATAACTTTTTTTTATCAACAGCCAGCTATTCAT
GTGTCTGCCACTGAATGCTACAATGCTACCCTAGGTAGAGGAGACTGCTG
GTCCTGTGAGCAGCTCTCAGACATATGTCCTGTCAAGTGCACTCTTAAAA
GGAGGCTCTTCAGTGACATGCAACTTACCCACAGGATGGCAGCATTGGAA
TCCGTAGTTAACTTTCAAAGTCATTTGGAAAAATTTTAATTAGTGGATTA
TTAATTTGGGACTTAAAATTGTATAGTGAAGAACTTATTTTTCTTGATAG
GGTCATGAGAATTTTGCAAGAGTAACAAATTTTATATCATCAAATATGGG
TTCTTTAACATCAAATTATGAACAAATGTTATCCTTTCTTAGAGAGAGAC
ACACGCTACTTCCCTACTTTGCTGGAATTGGCAGCAAGAAGCTTAAGTCG
AGCTGATGAAATTGAGCAGCTGAAGTGCTTATCCTGAGTCAGAATGGCAG
TATTCTGTGTGTTCTGATGACAAAATGCAACCTAGTCAGTCCATGGCCTG
TGGCCTTTGCCCTCTCTCCCTCCTCATAGCCCTTTCCACTCTCTGCCTGT
TCTCCTTTCCCTGTTTTGTTCCCTTCTCTTTGGCGCTCCCTCTTTATATG
GTAGCGTTTCAGTTCTTGAGTCTCCATGGTGCTGCTTCTTTCAAAAATCA
GTCTGTCTGTCTGTCTTATCATCTATCCATCTATCATCCATCTATATCTT
CTATCTATATCATCCATCTATATCTGTCTATTATCTATCATCCATCTCTC
TCTATCTAATCAATCAATCAATCTATCTATCTATCTATCTATCTATCTAT
CTATCATCTATCTGTTTATCATCCATCCATGTCATCCATCTACCTACCTA
CATACATACCTACCTATTACCTATCTCTCTAGGGTGTGTATGTGTGTGTG
TGTGTGTGTGCGCGCTATGCAAACAGAAGGTTTGAGGACAGCCTGCAGGA
ATGGGTTTCTCCCTGTTTGGCTTCTGGGGTCATCTTTGGTGGCAGGCACC
TTTACCTGTTGAACATCTCACTGACCTGTTCTGTATCTTTACAAGTGGAT
TCACACACTATGGGATATTTTTTCTGACCATCTTCATGTAGCACAATGTT
ATGGAGGTTCCCATACATCTTTTCATTCTATTTTCATACCATAATTTACT
TTTTATCTGTTCAGGGACCTTCAAGTTACTTACATATTTTGGCTGTTATG
AATAATGGTGCTGAGAATATGCAAGTACCCGACTGGATACATGTTCAAGT
TAGGTACATAGAATAGAATTGAGGGTTATCTGGTAACTGTCTTAACTTTT
TAAGGCACTGCTAGGGGCATTTTCAGTGGCTGACTGTTTTGTATTCCTAC
CAAGACTGCAGGGGTCTTGTTTCTCTGCACGCCAGCTCTTGCTATTTTCT
GCTTCTTTGGTTGTGGTTATTCTAGGCAGTATGAAGTACCTCATTTTTAT
TTTGATTCTGTTTTCCTGGTATCGAATGATGTGGAGCATCTTTACATGTA
GTTGTTTATATGTCTGTCTTCTTTGGAGAAATGGGTGTTCAAGTCTGTTG
TCCACTTTTAGATTGGACTGGTGGTGGTTGCTGAATTGTAAGAATTGTTT
ATATATCCAGGATTCACATACTTGCCAGGTGTGATTTGTGGGGCCATCCT
CCAGTCTGTGTGTTCTTGTCTTTGTAATAGTAGGTTGTTTCGTTGTTTGT
TTGTTTGTTTGTTTGTTTGTTTGTTTCTGGTTTCTGCATAGAATTAAAAC
TTTTTTAAATATGAATTTTGGCTTATCTACTCTTTCTTTCCTTCTTTCTT
TTTTGTTTTGTTTTGTTTGAGACAGGGTATCTTTATGTATCCGTGGCTGT
CCTGGAACTGGTTCTGTAGACCAGGCTGGCCTTGAACTCAGAGATCCACC
TTCCTCTGCCTCCCTAGAACTGGGACTGAGGGCGTGTGCCACCATCACCT
GGCTAGTTTATCTTCCTTTTCCATCCCTTGCTTGGGCTTTTGCTATCCTA
TTGTAAGAACTCGCCACCAAGGTTATGAAGATATATCTTTAATATTTTTC
CAAGAATTTTATGGGTTTTTTGTTTTGTTTTTCTTTTGTTTTTCAAGACA
GGGTTTCTCTGTATAGCCCTGGCTGTCCTGGAACTCACTTGGTAGGCCAG
GCTGGCCTGGTTTTATGGTTTTGTCTTATGTTTGGGACATCTATTTTAAA
CTAATCTTTGTCTGTGGTGTGAGGTAGGGACCCAGTTACATTCTTCTTAT
AGAATAACCATTGTCCTACCATTGTTTGTTGATGGTGGTTTTGGTACCCT
TATCAAAACTTGAGTCTTCAGTTTTGGGTGGTGGGGGTGGGAGGTGGCTT
TAAGACAGAGTATTTCTGTATATTCTTGACTATCCTGGAACTCACTCTGT
AGACCAGAGCTGGGCTCAAACTCACAGAGACCTGCCTGCTTTTGCCTCTG
GAGTTCTGGGATTAAAGTTGTGTGCTAACTACCACTGCCCACTGCCTGGC
AAGTCTTCAGAATTTTATAACTTTATTTCTGGCATCAATTCTGTTCTGTT
AGTTTACACAGCTGCCATTATGTTAGAATCATACTTTTTAAATTTTTCTG
AGATTATAATCATATCATTTCTCCCTTTCCCTCAACATTCCCATATATCC
CTCATTCCTTGTTCAAATTTATGGTCTCTTGGTTTCTTTCTTTTTTGTTT
GTTTGTTTGTTTTGTTTCATTTTTAATGAGAGAGAGAGAGCGCCTAAATA
CATAAATACAACCTGCTTCGACTGTGATGTTATTTATCTGTGCTTCCAGG
CCTCATGAGCTTTCCCTTGTCTACGTTAGATGTCTGTTGTTGTTCTTGTT
CAGTTCGTGTTTAAGCAGTCATGTTGGTGAGACTTTATGGCTGTCACTTA
TGACATTCTCACGGCAAACTTCCTGTTCCTCTGATTCTTAGAATCTTTCC
TTTTCCTCTTCCACAATGATCCCTGAGCCATAGTTACAGGAGTTATGTTG
TAGATGTATCTGTTGGGATCGGGCGCCATAACTCTTCATTTTGCTTGGTT
GTGGTTTGCTATAATGGTCTCCTTTCATTGTAAAACGGAGAAGTTTCCTT
GCAGAGGGGGAGGACTTACCTGTGGGTGTGGGGAAATATTTAGGATGTGG
TTAGGGGTCATGATGATTTAGTAAAGTAGAAGACCCATGATTTTACTAGC
TGTGGGTGGTTGGCTGGGTTTCCAGGACCAGGCATGATTTCCCTCTTGTT
GAGCAGGTCTTAAGTCCAATTAGAGAGTGCTGGTTACCGCCGAGGTACGT
GTGCCACTTCTGCACTGTCTTGATTTGCATAGCTTTGTAGTGAGTTTTGA
AACTGTGAAATGCGAATCTTCTTTTATGTGCTTTTAAAAGATTGTTTTGG
CTATTTGGAGCAACTTTGCAGTTTCATATCCACCTATCTACTTTTCTATT
TCTGTGTAAAAGGCAGGTGGAATTTTGGTAGAGAATGCACTGACATTGTA
CATTTGGGTTATATTGCCATTTGACTAACCCTGCTGTCTTCCCATCCGTA
AGCATGCGATGTTTTTCTGTTTATTCGGTTGTTTCAGTACTTTGTGTTTT
TTAACTTAGATTTTCATTTCTTTGGTTACATTGCTTCCTAAGTATTTTAG
TCTTTGCGATGCAGCTATGAATGGAATTGGTTTCTTAATTTCCCTTTGGA
ATTGTTCTTTGAGGAACTGACTCTTATGCTTTCTATCTTTCCATCTGTTG
TTTCGCCTCAAGATGGTGACTCCAAACCCTCCTCTCTTTTGTTGTAAGGT
CTTTACTGTATACCTTTACCTTATACACACTAGTATTGGGAAAAAAGACC
CCAAAAAAGTGATTCCCAAAGACTTTATTCTCTAAATCGAAATTTCTTTT
TTACCTTCCTCTATTCCCCAAAATGTCAGAACCTGTTCTGATTTTCTTTT
AGCTGTTCCTCTTTGGACCATGATGGTCCCAGTTTCCAGGAGACGTTTCT
CAAGGCGCCTGCTGGGGTAACTAACCCTGAGGCTCACCGAGCCTTCCTCC
CACCCCCTTTCCTGGTCCCCGATTTTCTAACATTCCTCTGCTCTGGCTTG
CTGTGAGACTGGCTCATTGCTGCGTTGTGGAATGTGATCCTTTCCTCAGC
ACCACTCCTCAGTGTCCATTTAACCTGGTCCATGTTTGCCCACCATTCCC
CATCATCATAACCTCTGCCAGCCCCTGTTTCTGAGCTCAGTGTGCATGTG
ATCACAGTGGTTACAGATGATGCATGGATAACTGGTGATAGTTGCAAGGG
GCAGCCTTTACTGTCTTCACTTGCCTGGTTTTCACTTTGAGTGAAAAAGA
AAGGAGATTAAATCCAGAAATATAAACTATGATACTCCTTGTAAATTTAG
TGTTTGTCAAAAAAAAAATCAAGATAAAATTGTTAAAAAAATTTTTATTT
CCTTTATTTTATTTCATGGATGCCAATGCAAAACATAGACTTTATTGATC
ATTTAGAAAATATATGTTCATATCATAAAGAAGAAGAAAAACATTAAACA
CTCATTATTAACTTTTGGTAAACAATCCTCCTAGCCTATTTTTGCATTCT
TGTTTTTCTTATAAAAGGTGAAGAAAGCAGGCAGATTGTACTTCGTAACC
TACATGTGTTTCCTGTCTCTGTGCCTTCTTCTCACCTACTGCTGACCAAA
TTTTGGCCTGGACATTTTCTGCCTTAAAAAGTTGGTTTCACATTTCCTTA
CAACCGATAACTTTTAAAATAAATAATAATATTATTTATGTGTATGGGTA
GGAATGTGGTTGGTATATATGTGGCCGTCAGAGGACAGCCTTGAGGGGCT
TCTTCCACTCTGGGATCTGAGCATTAGATTTGGCTGACCAATGCTTGTCT
AGCAAGTCCCTTTACCTACAAGGCTAGCTTATTAGCCCAGTGTTTCGTTT
TTGTTTGAGAACACTATTTTAACATAGTCCAGGCTAGCTGAAAATTCAGT
AAGTAACTGAGATGCCTTGAACTCAGCAGCCTGTTACTAGGGTGTGACCA
ACCTGGTTGCTGATAGCTTTATATAACTGTCGGGAGGGTGGTTTGAGAGG
AGACAGTTTCTATAGTGTATCTGTCATCTTGATGCGTGTCTTACTTATGA
TTATACTAATTATGGATATTCATGTCTTCTATTCTCTGAATCCTAATTTC
ACACCCTAATTGACATTCTTTATGTCTCTATGTTTAGAAATGCTTTACAT
TAAAAATGATTTATTTATTTTGATTGATGTGTATGATTGTCTGCATGAAT
ATGTGCTTCATGTGAGTGTGGTGCCTATAAAGACCAGAAGAGGGCATCAG
ATCGCCTTGAACAGTAATTGCAGACAGTTGTGGATGCTGGGAATCAAACC
TAGGTCCTCTGCAAGAGCAGCCAGTGGACTTAACCACTGAGCCATCTCTC
GAGCCTCTGAAACACTTTATGCTTTGATTTAATCAGCAAAGATTGACAGT
TATTTTATCATCGTAAGTTTCTCCTTGGTATAAAGGATTCTTTGTTCCCT
GTTAAAAACAAAAAAGTTATTCTTTCTTGGTATGATTTAGAGTTACTTAC
TGGGGTATAAATATGTAATTGGCTGTTTTCTGAGGCCTCTGAGAATATGC
TTTCTTTGCATAGGATCAGAATTTGTCTGGAAATGGACTTTCTTGCTGGC
CTTTTCTTCCCTGGATGCTTTGTTCCAGCATCCTAGAGTTTTCCATGCCA
GTCTCCACAGCTAGTGAACACGGCCAGTCTCCACAGCTAGTGAACACGGC
CAGTCTCCACAGCTAGTGAACAAGGCCAGTCTCCACAGCTAGTGAACAAG
GCCAGTCTCCACAGCTAGTGAACACTGCCAGTCTCCACAGCTAGTGAACA
AGGCCAGTCTCCACAGCTAGTGAACACTGCCAGTCTCCACAGCTAGTGAA
CAAGGCCAGTCTCCACAGCTAGTGAACAAGGCCAGTCTCCACAGCTAGTG
AACACGGCCAGTCTCCACAGCTAGTGAACACTGCCAGTCTCCACAGCTAG
TGAACAAGGCCAGTCTCCACAGCTAGTGAACACTGCCAGTCTCCACAGCT
AGTGAACAAGGCCAGTCTCCACAGCTAGTGAACAAGGCCAGTCTCCACAG
CTAGTGAACACGGCCAGTCTCCACAGCTAGTGAACACGGCCAGTCTCCAC
AGCTAGTGAACACGGCCAGTCTCCACAGCTAGTGAACAAGGCCAGTCTCC
ACAGCTAGTGAACAAGGCCAGTCTCCACAGCTAGTGAACACGGCCAGTCT
CCACAGCTAGTGAACACGGCCAGTCTCCACAGCTAGTGAACAAGGCCAGT
CTCCACAGCTAGTGAACAAGGCCAGTCTCCACAGCTAGTGAACAAGGCCA
GTCTCCACAGCTAGTGAACACGGCCAGTCTCCACAGCTAGTGAACACGGC
CAGTCTGACATGTGTCTTCCCATCAGTCCTCTGTCAATGCTGTAGGTGGA
GATTCTTCCTAAACTTTGGTCTTTCTTTTTAGTACTTTAACAGATTTTGC
CTTTTGCTATATCTTGGTATTTCAAGGGATGGTGGAGGAAGGATTTTTAG
TTATTAATGATTTGTCATTACTAGTGTCAACTTTAATATACCAAAGATGA
CATCTTCTCAGTAATTTTTTAATTGAGAAATAATTGGGATGGGTGAGCAT
GTACAGCCTTTTTTCCTAGCTCTTACTAACTTTAATGGGCTTTTAATAGA
AAGTATCTTAGTTGCTTTGTTGTTGTTGTGTGGAGATACTTGACCAGGGC
AACTTAGAAAAGAAAGCGTTTAATTGAGGACTTGCTTCAGTTTCAGAGGG
TGATCCATGGTCATCACGGCAGGGAGCAAGGCAGCTGGCAAGTGGGCACG
GCACTGGCGCAGTAGCTGAGAGCTTACATCTCCCACACCCACAAGGCCCA
TCGAGAACGAATTACCTCAAAGCCAGTGACACACCTCCTCTAACAAAGCC
ATACCTCCCGACCCTTACTAAACAGCTCCATCAACTGTGGACCAAACATT
CAAATGAGCCAGTAAGGGCCATTCTCATTTAAACTGCCACAGAAAGTAAT
TGAATTTGGTTTTAGTGACTTTCAAAATGCTGTATGCATATTTAAATGCT
TTTTTAAAACCTTTAATTTTTTTTCACTTACTCTTCATAGAATATTTAAA
CATTGTTGTTGTTGTTGTTGTTGTTGTTGTTGTTGTTGTTGTTGTTAGAT
GAAGTCTTAGTGTATTGTCTTGGATGGCCTGGCCTGGAACTCACTGTGTA
GTATCTACCTGCCTCTGCCTTTGCCTCTGCCTTCTAAATGCTGGGGTTCA
AGGCATGTACCACCTTGCCCACCCTTCATAGAAAACTTAAGGAGAAAGAA
AAGAATACAGGGTACATAAAAATCAAGTATAACCAATCTATTATTCACTT
CTGTCTTAGGGTTTTATTGCTGAGAAGAGACACCGTGACCAAGGCAACTC
ATAAAGAACAACAGCTCACTGGGGCTGGGGCTGGCTGACCGTTTCAGAGG
TTCAGTCCATTATCACCACGGTGGGAAGCACGCAGTGTCAGGCACACATG
GGGCTGGAGAAGGAGCTGAGAGTTTGACATCTTGATCTGCAGGCAGCAGA
AGGAGACTGGGCAGAGCTTGCACAGATATATGACCTCAAAGCCCACCCCC
ACAGTGACACACTTCCTCTATCAAGGCCACACCTCCTAATTATGCCATTC
CTCATGGGCCAGGCATTCAAACATGTGAGTCTATGGGGGCCAAGCCTATT
CAAACCACCACACTACTTAGTATATTTTGGTATTCACTTTCTTTTTTAAA
AATGGAACATATATAATGTGCACATTCATATATGCATATCCATGTCTGAC
TTTAATTTCTTAGATATGTATTGAACACTTTGAGGTGCCAGGCAGTTTTA
AAATTTTGCTGTATATAGTTTACATCTTGCCTACTTTCACTTAGTGTTAA
GGACTGGACAAAACTGGTTCACCAAACTGTGTTTGTAGAAGCCCCGCTCA
CAGTGTCATAACTCTTTTCAGGGTTTTTTAGTTCAATCCCTCCTTCCCCT
CCCTTTCCCTCCCTCCCTCCCTCCCTCCCTCCCTCCCTCCCTCCCTCCTT
TTCCCTCCCTCCCTCCCTTCCACCCTTCCACCCTTCCTCCCTTCCTCCCT
TCCTTTCTCTTTCCTTCTTTTTGTCATCAGAGTTATTTTTGTGTTGCTGG
GACCAAAAAACCTGATGGAAGCAAGCCGAGGAAGGATAGACTTGTTTTGT
TCCATTGTAGAGGGTCCAGTCTGTCAGGACAGCAGGAGTTCAGGCAGTGG
CCTCTTCACATGGCAACAGACAAGAAGCCGAAAAGGCAGGCTGCAGCCAG
TGCAGACACAATCTTCAGAGGCCTGCTCTTAGTGACTTACTTCTGGCAGG
CAGGGTCTGCTCCCTGAAAGCTTCTTCCACATCTTTTGAATCAAGACACA
AGCTGGGACTGGGCACGAACTCACAGAGACCCACCTGCCTCTCTGCCTCC
TGAGTGTTGGGATTAAAGGCATACACCATCACTGCCTGGCATGACTGTTG
ATTATTAACCACTGCTGTCTTGCTAGGAATTTATATTACTCACAAGTTTA
GAGTCACAAATTGCTGCCGCTCCCTGCTCAGCATTCAGAGTTATATTTAA
AGAACATAAGCATTTCTGTTATAATATCAAATCCACTCCTAAGAAAACTT
TCAAGAGTGCTTATTCACTAAAAATAACAGGATTATGGTGAAAAGAAGGT
TCAAGGCAGACCATTCAAGACTTCTACTATTTCAGACCAGAGAGAGCTAA
CAATAGCATAATTGGTACCTTATGAGGTAAGGTGGGTCGCCTAGTCAAAC
CACTTATTGTGGCTGAGGCTCCCTGAGAGCAGAGTAAAGCTATTAAAGTG
TAAGAGGATGGAAATTGCAGGCCTCGTGGTTGTGAGCTGTGGGGTTGGCC
TGAGAGTGGTACAGGGGGAGTGCAGCTTGCTCTGCCAGGACACATGCACA
GGCCAGACAGTGCTCCTCTGGGGATAGAGCCCTTGGGCAGTGCTCACCAT
TAATATTCTTGAAATGGAGCTGAAAGGGCTTGCGTACACATGCCTGCCTC
GAGGCTGGGGAGGTGGCTCAGTTGTTAAGAACACATAAAACCCTTGGAGA
GGACCCGAGTTCAGTTCTCAGCACCCATATCAGGAGGCTAACAACTGCCT
GTAACTCTAGCTCCAGGGGATCCAATACCCTCTCCTGGATTCTGCAAGCA
CTTGCACTCACATGTGTACACACCCTTCTGCCTCCAGTTAAAAAGAAAAC
AAATTCTTTATATACGGCTTTATGACCTTGACTCAAATCAAGATATTGAA
CATTGCCATCTTTGCAGGAAGTCCCCTGTACTCCCATCTCCCATCCTTCT
TTCTAGATGAGCACAGTTCAGAGTTTTATCCCAATTAGTGCTATATCTTC
TAGAAGTTTTATCTAAATAAAGTCTAATAATAGTTTGCTATTCTCATGTG
TCACGTTTCTTTTATTCTGAAAAGTCCATCCTTGTTCCAGAGTCTGGTTT
TGATTGTAGAGTAGTAGTCCATTGTTGAATGTAAACAATTGGTATCAAGT
TCAGTGTTTGCTGAGGAACATTTGTGTTGCTTCCACTTCTGCTTATTAGT
AGTAAAAGGCCTGTGAACATCTGCACAAGTGTTTTGTGGATACAGTGTTT
TCATTTCCTTTGCAGAATTACCTCAAGAGGAATTGCTGGCCATAGAGTAG
GTGTGTGTTTAATTTATAAGCAACTGCTAGCTTTTCAAAGCAGTTGAGCT
GTTTTTCACCCTGGCAGGGATGTTCTGAGCTGACTTGCCAGCATCAATTG
TAGTTATTCTCTTGGGTGCTAGTGGTTTTCATCGTACTTCTAACCTTTGT
CTGTCTGAAGATTAATGGTGTGTTTTAGCGCCTCTTCACATTTTCATGGC
CCCGTGTGTGTCTTACTACGAAGCGCACCAATCTCCCTCCCTTCTACTCA
TAGAATGTGGTTGAGAGCAAAGTTTACTTAGGTCTTGAGAAGAGGCCTGG
GCCTCTTCAGGCCCATTCCTTGTGGTTTCTCTGCACAGCCCTATCTAAAA
CATACAGTTTCTTGGAAGAAGGCTAACCAGCATTTAAAGGGGCAACTGGC
TTTTCCCCATAGGTTTTCTCCTAAAAGCACTTGTCTAGCACAGCCTTTCC
ACTACTTGATTTCCAGTGTGTTTAACAGTTCCACAGCTATAATGTATTAC
TATTATAAGTGTGAAATTGAGTGGGAGTAGGGACATCCTTACCTTGTTAA
TAATTTTAGAAATGAGAATGTGAAAATTCACCCTTGCGCATGCGAGCTGT
ATGGCTTTGCAAGTGCCCTTTGGTAAAGACAGAGAAAGTGTCTGTCCGTT
TACTATTTGTTGTCTGTTTTTATCCGTATAGATTTTCAATCTGATATGCC
ATCACTGTTTCGTTTCAAAACAGGGTCTCGTGTTGCCCTGGTTGGCCTCA
ACCTTGTTAAATAGCTGAGGATGACTTTGAACCCCTGAACTTGCAGCACT
TTGCCTGTGCTGGAGTCACTGGTGTGAGTCACCACACCCGCCTTCGTTGT
TTTCCCTTTTCTACTAATGTGGTGACTCACTGACTTCTTAGCGGTCACTT
GGTTATGCTGCGCTTCCCCTTTTTCATGCTTTTCGTGGCTTATGATTGTC
CGTACGTCTGCCCGTTGGGTATGGGGCTGTTAGTCTGTGGCTGGGGCTCT
TGGCTTTTGCTTTCTGTGTAGGAAGCTTTGCTTGGTACAGTGCTGCATCT
TTTGTGTGTAGAGGATCTCAGTTGTAAGTTTTGTTACCTGAGTCGTTTCA
CCTTGAGCTATAGTTGTGTGTTGTCATTCTGCCTCATGAGTCTTTTTCTT
TTTGTTACTTGACATATTTCTGAACTTTGTTTTAATCAATCTCTCTAGAC
TAACTATCTCAGGCTTGAGTGAATTTTTGTAAAAGGTTTATTATTTTTAT
GTGTATAAGTGTTTTGCCTGCGTGTGTGTGTGTGTGTGTGTGTGTGTGTG
TGTGTGTGCGCGCACCTCATGTGTGCAGTGCCCACAGAAGTCAGGGAGGG
TTTAATCTCTGGGACTGTAATGAATTGTTGGGAGGTGCCATGTGGGTGCT
GGGAATCAAACTCAGGCCCTTGGCAGAGAAGTCAGTACTCTTAGTTGCCA
CGCCATCTCTCCAGCCCCTTAAATGAATTTAAACTGTATTATTGTGATTA
CTGATGTTTTCTTTGAATTCATTTTCCTTTTCCATTCAATCTTTCCATCT
TCCTGCCTCCTCTACATCTTTCTCTAACAACACCAGCCCCCCCCCCCCCC
ATGTTCCTTAGCATTTTCTGCCTTCAGCAGGCAGAGCCTTCTGCACAGGC
TTCCAGCTCGCCCATGTTGTATCTGGCACCCTGCGCATGATGCATAAAAC
AGTGCTACACAGATCTCGTTTTTTGACTTATCATATCTGGGTCCGAAATG
AAGGAGCTTTGACAGATAAGCTGTCTGTGGCAGAGCTGTTGGTCTCTCTC
TGTGTACTGAGGGGTCTGAGGTATCCAGGTGACCTCCTTCATGGATGTGC
CATTTAAGTTTCTGTTTGTCCTGTCTGAGCACTAGGGACATCTGGACTAA
ACTTTAACAGTAACCATGTTTAAAGGGAGTTAACAGGCCCCTGTTCTCTC
CGTTCTTTGGCTCTTTGCCTGTCTCTAACACTTGCTGATAATACCTCCTT
CCCCCTTTTGTCTCAGTGCCCAGGACTCAAGGTCACTGACTTGGTCGCAT
CAGTCATTAGCTTTGTCATTACTGGTGTTTTCTTTTCCTTTTTGTTTTTT
GGGTTTTTATTATCATTATTATCTGACATCTTTTTCACAGTAGGTTGATT
TTCCACCGAAGGCAGTCCTTAAAGGTTTTCTTCAGAGCCTGGATAGATGG
CTTCGCAGTTAAGAACACAGACCCACATGTAGCTCACAGCCTTCTGCAAC
TTCAGTGCAGGTAGTCTCCCTCCTTTTTGAATCGAAGTGTGGGCCAGCAG
TCGAGAAGGATTTATGTTTCTTCTTCTGTGCTCTTTGGAGAGGCACCGAA
TCTAGAAGGCAGAGTGGTTTCAGGTGGTCCTGGCACGGCTGTCTCAGAGG
GGGAGCTAGGTTTTGAGTGCCAGTTTCTCTGTGGGCTGTGGAAGCTGTAG
CATCCTGCTTCACAAGGCAGCTCACATGCCACACAGGCCGCAGCTTCACG
GCACCGCACACTTGTGCGTCAGTGCATGCTCTCTGCCCTCTGCAAGAATC
TGTGACACGGAAGACATTTGGATGGCTAACTACGTTTCCTTCTTTCCCCC
CTAGGTCTTGATGCAGAGCTTTACTATGTGAGAAATGACCTCATCAGTCA
CTACGCTCTGTCCTTTAACCTGCTAGTGCCCAGTGAGACAAACTTCCTGC
ACTTCACTTGGCATGCAAAGTCCAAGGTAAGCGCTGCCGGCAGACCACGT
GACAGGTCACCCAGTCTGCAGAGGCGAGGGCTGTCCCTGAGGATGGGCCT
TCCTCTCCACAGAAGGGTCAGTGGTGGTATAGAGCACTGGGTCTTTTCAG
GTGTATAGCTGACAGATACAGTCTTGAGCCTGCTCCTCTGAAAGTTTAGA
TTTAGGTGGCTGCCAGGTGGGTGACCAGCGCATCACAGGGCTGGGTCCTT
TGAGGCTTTTGCAGGGAGATCTGTACCCAGGAAAAAAGAGAGTTGGATCT
GATGGTGACCCTGCTGTTACAGAGAAGCCATATGTGGCTGGAGGATGGGT
GAGTGGCTGGGGAGGAGCATGGCTGAGCTGGCTGGCTCTTCCACACACAC
TTGGTGACTTGAACGTAAGTTTCCCATTTACTGTTCTGAGTCCCCCTGGT
AACCATAGATACTGAAGCGGGGAGGGGGGTGCTTATCAACTTCTGCCATT
TGTGTATTGGTGAATTCTTCACCTCTGACTGCCAAGGAACCTTACATGCT
TGTCTCCCAGATTTGCCAGATGATACTGTTTGTACCCTTTACTCCCCTCC
CTGCCTGCCTATGAATCCTTGAGCTGTTTCAAAGTGCATTGAACGCATCA
TGTCCTCTCTCTCCTAAATCAAAACCAGGAAGTTTGGTGTTCTAACTCAC
AGCACTTGGGTAACTGAGTTCTAACTCACTCATCAGGGACCCTCAGCATC
TTTATCACTAAGGTTTCACTAGAGACTGATGTTGTTTCAGTTTGTGTCAA
TCTGAAGTTTTGATGCCCTGCCCATGTGCTTCAGCCTCAAGTTGTTGGGA
GTGGAGAACCTGTCATGGTGGAAGCTAGCTTGGAAGGGTCGTCTATGAAT
CTATATGCTTGCAGGGGGAACACTGAAGGGGACTGGTATAACTCTAATTA
TCTGGTAGATTCCTCTCCTCTCCTCCCCCCTCTCCCCTCCTCCCCCTCCC
CTTCTTCCCTTCCTCTTCCCCCCTCACCTCCCCACTTCCCCCCTCTCCTC
CCTCCCCTCCTCCTCCTCTCCTCCCTTTCCTCCCCCCCCCCCCCAATCCT
TCTCTCTCTTTCTCTTCTTGAGGCAGGGTTTTACTCTATAGCTCTGGCTA
CATGTAGATTCAGCTGGCCTTGGACTCAGATATCTGCCTCCCAAGTTCTG
GGATTAAAGGTGTGCACCACTACACCTGGCTAGCAGCATGTATTTAACTA
TACATTTGGGCTTCTTCTTGATGATATTACAGTCCCCAACTCTAGTTCTT
AAGTCCTAGTATCTGGTGATTTTTGGCACAGCTGATTAATTGCAGTTTGT
TTATTTAAAAAGTTAATCGTACGAGTAGGTAGTACATGGATATGGCCTGT
AAGGGTATACAGTGAAAAGGAAGGTTTTCCGTTGTCATGGTAGCATGCTG
AGCAAGCCCATCTAGATCACTGTCTTCATCAGGCATTGTTGCCTGAGTCT
TGTCTCCTAAAGAAAGGTAGTGTATATGTGTGCAGTGTGCACACGTACAC
CTAAGTGCTTCCTGCTTTCGTGTAGTGTGGAGTTGTGAGCAATGTGTCCT
GGTAAAGGGGCACTGTTCCTTGTTCCTTGGTATTGCTTTGTGTGTTCCCC
CCTTAAATAACTGTATCATTTTCTCACATAGTTGTGCTCTGGTCATTTCC
TACAAGAGGAAACCGAGACCCAGGTTTGGGAAGGACTTGCTTAAATGAGT
CTGGAGGCTGAAGAAACAGGTGCTAGGGGTGAGCTCACATGGCAGTCACC
CGAGAAGGCAGGAGTAGTAAGGTGCGGTCTCTTATCACTTGATTCTGAGA
TACAGTCAGACTTCAGAAGGAAGGCTGTCTCTCTCAGTTTCTAACACTCT
GTCAGAATCTCTGTTTGGGCTGTTTGAGCTCTTGCCAGAAGATGAACTGT
TGGCTTCCGAGATCTCCAGACTCGCCAGTGTATCACTTGAACACTGCAGG
CATTTTAACATCAGTGTTCCCACATCAGAGCTTTTGCTGGTAGAGTTCTC
CAGTGTTTACGTGACTGGTCTTGCCAAAGATTTCAGTTCCCTCAGCGGCT
GGAGCTGTGTGTGTCTTTTCTTAACATCTATGTCACGCGCGCCTCGCTGA
GTGGTTGAGAATGTGTTAATTGTATTTTAAGATGGGAGGAGAACTCTGGT
ATTGATTCTCTCACAAGAGTAGACGACTAGGCGGTCTTAACAGATAATTA
GTTTCTTGTATGTTCCAGAACATTCCCCAGTGTTCAAGAAGAAACTTGCA
ACTGTGTCTGCTAAGTGTCAGTAGATATGCTAGACAGCCAAAAGGCAGAG
GCTCAGTAGGATGTGGCAGAGGACTCCACCACCCACTCCCTTGGTCTCCG
TCCAGGAGATTCTGCGGGGAGCTTGTCAGAGCTCCAGCAGCTGCCTCTGG
GGGCCAGCCTGCTGTGTCCCAGTGGAGTGAAGTAGCTGTGAGAAAGGCAG
TTCTGGCAATTTCAGAGAAATTAAAAGGCCGTTGACTGTAGGCGAGCACA
TTCACTTTAGATGTGTTCCAGAAGGGGACTGCTTTATTCGTCGTCTGCCT
ATTCACACAGCCATGCGTTCCAAGTAAGGAAAAATACCAAACATGTTGAT
TTTTTAGCTTATTCAAATATTTATATTTTCTCTAGTTACTTTTCTGAAGT
ATTTTGGCTCATTTATTTTCTGATAAACAGCTGCTGCACAGATTTGCTTT
GGGGTGGGGGGCAGGGTAAGGCTGGGGTGCACTTTCTAAATAGATCTCTT
TCTTCCAAGGTGATTGACAAACGGCATTCCTTACAGATCAGTACACACCA
AAGTAGAGACAATTGTATTCCAGTGATTGGCACTTTCTTCTCTGACTCCA
AAAACTACATTAAAAAAAAAAACCAAAAAACAAAAAAACCCAGCTGTCCT
CAGTACACCAGTGTGAGGGGGGAACTGCCTTCTGATGCTTCCGTGTTCAT
TCATCCGTCCAAAGGAAGTCTTAGGCAAAGGGCAGGCTTCCATGCTTCTT
GTTGTGGGTTCCTCTGGGCCACTGCTGATTCTCTCAGTCCTTCCCTCAGC
CACCTCTGCCTGTGCTCTGCTCCTTGTTTTGCCGCCACTTGCAACATCAT
TTCCTCCCTTTCTCCCTCTCCCGTGCTTAGACTGAGATGGCCCTGCCACT
CCTCTTGCCGCTCTCCCTCAGCTCTGCCGTCAGAGCCCTCTCTTTGCTTT
CCTGGCTTTGGTCCCCGGACAGCTATTCCTCTGCTTATAGCCAGAACTTT
GTAAAGGAGACCGAAAGGTTAGAGCAGATGTCCAAGAGGGGCACTGAGGG
GTAAGGAGCTTCTGGAAGAGCATTGATGCCATGGACAGACAGAGTCAGCA
AGATGACGTGGGCCTCAAGCACAGCTCAGGCCCTGGCACTAGAAACGGAC
GGCCTGGCAGGGTGTCTGGGGAGAGGCATCGAGCCCATGTGATAGAAGTG
GGGTCTTTGATTCCCTGGCAGGAGGCAGAGACAGGAGGGGGAGCTGGATC
AAGTAACTCACTTCCCAGGTGAGAAATCCTGGCTCCAGGATGTCTGTTAG
CTAGGAACACACACTGTCCCAGTGGGGTGCCTGCCTACCTATGAGAGGAG
GCTCCCCCATGTATGTAGGAACCCACAGACAGTATCCCAGTGAGGCGCCT
GTGTTGATCTGTGAGAGGAGCTTGGCAATCAGGTAAGCTCAACTCTGTCT
GGTAACCCTACAGCTTCAGCCTTTGAGGTTACCAGATGGGTATGCCTAGT
AGGTAGTTGGAGGAAAAGGAGAGGGAGAGACAAGTTGAAATGTTTATCCT
TGGGACTGGAGTGCAGAGGGTTAATGTTCTGATAGGTCAGCCTGATGCAG
AAAGGAATAAGAGTTCTTCCTGGAAGTGAAGAAGCCGAGCAGGTAGCGTG
TGGTGCACCAGCGAGGAGCACGGGTGAGGTTGAAGAGGAGCAGCCATTGA
GCACAGGTCTGGGGGGTCATCATGTGTATCATCTCCTCAGCAAGCTGAGC
CAAGGGCCATGGGGTTGCAGGCACTGCCATCCAAGTGTGAAGAAGAAGGA
GTGAACCAGCTGAAGGTGTCAGAATGACTGTGTCAGTGATGTCCCTGCTG
GGGCACAGGCTGGGGCACAGGCGGTGGGAACATGAAACCCGGCATCCTGG
CTGTGCTGGGAAGGAAGGAAGTAGTTTAATTAACCACTGCTTTCCCCCCT
CTACTAGCGCAGCCCTCGGCTCATAAACATGCCTCATAAATGTTGTCCGA
CTTAGAGTAGTGAGCACAAAGAACTGCTTTTACAGGGACCAGAGGTGGGT
GGTCAGAGGCAGTGCTGGCATCTTGGATGGAATGGACGGTATTTTTGTAT
CTGTTTTGGACATAGAGAAGTTGAGTGCTATGTCAGAACGAACACTGAAT
TTCAGAGTTAACAGAAAGATGGGAGGAGACGGAATGAGCCAGCCTTCGAA
ACCTGTGTAGAGTCTTGTGTGTGACATGTGAGTGGCCCGAGACATGCACT
GAGTAGAAGAGAGCTTCAGAGTAGAGGGGCTGATTTCACGCAGGACGTCT
AGAGAGGGCCTTAGAGCCTGACAGGGATACTGACCACATGTGCAGACCCA
GTGCTCAGGTCTAGAAAGTAGACATGAGCAAGAAGAGGAGGAGCCTGAGG
GGAAAGCCACACTGAGGGAGATCATGAGGGAGATGAGAGTATGAGAGGCT
GTGCAGCCAGTGGGGTTCCTCACATCAGGAACAAAACCGATCCCACCAGT
GCTGACAGCTCAGGAGGGTTTGCTGCAAACCCCTGGGGTTGGCAGGAGGC
TGATGACCACAAAGGAGTGCAGCTTGACAGTGGGAGAGGCTGCTGAGGCC
CCGGGGTCCCGAGCCAGTGTCACGGGCCTGTTGTGTCATCAGCTTGGAAA
AGTTGCTCATTTGTGCAGGTCACGTGGCCTCCTGGTTCTAGATCCCATGC
TGATCTGTCTCAGGCACCACCCCCCCCCCCCCCCCAAGCTATGGCCTCGT
GCAGAGATAACAGCCATACCTTACAGTCAGTGCATCCTCTTGAGGTTTTA
GTGCTGGGAAGCCCAGGGTACCTTAGTGATGGCTCTCTAGCGCCCCTTGG
TGGCAGCCATGGCGATGTGATGAGCTGAGAGATTGAATGCTTCCTTCCAG
ACTGTTGATTTTAAGGGAAAGGGTGGTTCAGTTCCAGGTACCAAATGGAC
AGTAGCCTTCAGGTTGAATTTCTGTCTGGCTGAAAAGTCCTAGTATGATT
TCAGTTTTATTATTTTTATTTATTTATTTTTGAGACGGGGTCTCACTTTG
TAGCCCAGGTTGATCCTGAACTCACTATATAAACCACACTGGCCTCAAAC
TCACAGAGATCCACCTACTGCTCACGGCTGACTGCTAGAATTAAAGGACT
GCTCTTGGAATCTTTTTGGGAGTGGATTTTTATTCCACCCATGAATAGCT
CTCATACTGCTTAGTTAATGAACTTACTAATGAAGTCTTTTTCTGTTGTC
AGGGGTATAATGTTTTATCTCTCTTCATTTTGCAGGTTGAATATAAGCTG
GGATTCCAAGTAGACAACTTTGTGGCTATGGGCATGCCCCAGGTCAATAT
TTCTGCTCAAGGGGAGGTCCCACGCACTTTATCAGGTGAGCCAGGAAAGA
CGGACTTAGCATACTGCTTTCAGCTGCCTCCATCCTATCCCTACAAGGAT
AGTTCACTGAGTACCGGGCCCTCCCACATCAATCATTAATCAAGAGAGTG
CCCCACAGACAAACTCAAAGGTCCCAGGGGGTTGGGAGGCAGGGGTTGGG
GAAGTAGACGTGTAATTATTATTGTCATCTTTATTGTCTATTTATTTTTA
AAGAATGTTGTAGGGCTTTTCCTGGCAGTTTTATTCACAATTATTATTGG
CACAAGTTCAGCTAGGCTTTAAGCAGAGCTGGGAGGCAAGTTAATTTTTG
GGGGTCAGCAAGAGTTTCAGAAATATCAAAGTCTCTGATCCACTACTCAT
AGATGGTGAAATATCTTTGAAATTTGTAAGAAAGGAATCATAAATTAAAA
AGGCAAAATGTTCTAAAATCTACGACTTTGTCATTAACATTCCTAGATAT
ACCTTTAGAAGCTAATCCTATTTAGAAGGGCAGTGTTGTTTTTAATTCAT
AGCCAAGAACATGTTAGCTTTGTTTATAGGTTTATTATAATTTCCCCCAG
TAACAATGTCTTTATTTCCTAGAGGTACTGCTTTTGAATGGTACAATTTT
TATTTTATTTTATTTTTTAAAGATTTATTTATTTACTTATTGATTCATTT
ATTTTATGTATATGAGTACACTGTTACTATCTTCAGCCACACCAGAAGAG
GGCATCGGATCCCATTACAGATGGTTGTGAGCCACCATGTGGTTGTTGGG
AATTGAACTCAGGACCTCCGGAAGGACAGTCAGTGCTCTTAACCACTGAG
CCATCTCTCCAGCCCTGATACGGTTTTTAAATGTGGTTACTAAATACACA
TATGACATAAACATTCTCCACAGGGAGTACTTCTAAACATGTCATGCACC
TGTCTGCTCATACTATGGATATAGTTGTTATTGGTGGTGTGCTGACGTGT
ATTTTTGGCCATCTGTTATGGTGTGGCTTCAAGCCCAACAGGAACTCTCT
GGCACCCAGTTCAGTGCAGCTTTGGTTTCCCTACATTTTCTTAGCCAGAC
AGCAGGAAAGGCTTTCCCTCCTTGGGATTCGATGATGGCATGCTTTATTC
CGGGTAGCTCATGTCTGCCCTGCAGGCCGCAGTCCACACGGTGTGGTCAG
CACTGCCTTCTTGACATTCATACCCTTCACGTTGCTAGGAGCGATACACA
GGTGCATTTGGTGCTGCAGAGTCTTTCCTTCCGTGGTGTAGTTTTGTTAC
CGTTGCTGGGGAGACTGGTAAGCTCAGCAGTTTGCCTCGTGATTCCTGAG
ATTCAGTGCATTGGAAAGCAGAACATAGACAACAAACTGATATTAAAAAC
AAAGTCACAAGGAAGGCTCGGAAGTAACTATCCCTTCATCTGTGTCCTGT
GCTCTGCTTCAGTCCTCTGGATCTGCAGTGAAGGAAATGCAGGTGTCCAG
AGCGGTGGTGACAGGGTCTCCGGAAGCTCCTGTCTGATCCGCTTATTTAG
ATGCGCTTCTTTATTTTATTTGAGCAGAAATAGATGAAAATGTTGTATAG
CATTGATCCTAATCTTTAGGACACTAAAGTGTTTTCTCTTGTTTCTTTTA
ACAGTGTTTCGGGTCGAGCTTTCTTGTACCGGCAAAGTCGACTCTGAAGT
CATGATTCTAATGCAGCTCAATCTGACAGTGAATTCCTCAAAAAATTTTA
CAGTTTTAAATTTTAAACGAAGGAAAATGTGCTACAAAAGTAAGGAATTT
ATTTAACAGAATGTGTTTCATGTAGATAAGAGGTCAATAGAAGACTGCAT
TTTCTGTATAGAGATTTAAGCATGACCAAGTCTTGATTATAGTTATGAGA
AAAGCGCATTAGTGGATGAAACTCTGGGTCAGCCTCTGGCTCTCATTCCA
TTGGAGTTCTGTGGGTGTTTCCAGAGCGAGCGACAGAGCTGAGCATTCGC
TCGGTGGGCTTGGACTCTGCAGGACCTTTGTGTTGGGGGTCACATGGGCC
TGGGTTGAACCATATCTCTGTGTTTTCAGGACAGGGGAGATATTGCACCT
CTGCAGGGCTGAGATTCTTGTCTGTGAGATGTGCATGTTGCTGTTTCAGA
GAGGTTTTAAAGGGTAACGAAACCTAGTCCAGAATTAGAAAGTCACATGT
GGGCACTTAATAATTAGGGTTTGAATTATATCATCCATTACCCAGGAAAT
CACCATAGATAGTAGTGAGTTCTAGAACACCAAGGCTGAGTTTTGAAATG
TTAAGATTTTGTTTTAAGAGTTAAATATTTTATGTATATGAGTACACTGT
AGCTGTCCTCAGACACACCAGAAGAAGGCATCAGATCCCATTACAGATGG
TTGTGAACCACCATATGCTTGCTAGGAACTGAACTCAGGACCTCTGGAAG
AGCAGTCAGTGCTCTTAACCCCTGAGCCATTTCTCTAGCTCCAATTTTAA
GATTCTTAAAGGTTATCTAATCTCCATGTAGCCTACAGATAAAATTTCCA
GAATTTACAAATAGGTAGAATTGTTTACTGTTTAAGGTAGAAACAAAACA
AACTGTAAACTCAGTGGATGTTTCCCGTGATCTGTACACTTTACACGCGC
TAAACCCAGCTTTAGGTGTTATGTTTCAAAAAGTCTGAGTGGCCTGACCA
AGGTCAGACAAAGTGCTGCAGCCTGTGCTCTCCACTGCTTTGTGAAACTA
TTTACAGTTTCCCAGTTGAAACTAGCAAGTGAGTTACAGTGGCAGATGCC
AAGATACAGGCCAGAGATACAGGCCAATAAAGAAGCTATATTGCATTGAA
AAGAGACATTTTTAAAATTAAAAAAAAATTAACACCCTTAGCTTTAGTAC
TGTGAATTATATACCTACTTCAATGTAAGTTTAAAGCCTGTAGGGACTGT
AGAGGCTTTACTCCAACCTAATCTTTTTGTGATTGGCATGAGGACACTGG
TCCTCGAGAGTGGGAGGCCTCCTAGGTTTGTATAACTACTCAGTGGGGAT
GGATGGAGGATGGATGGATGGATATAGAACAGGTGGATGGATAGGTGGAT
GGATAGATAGATGGAAGGATAGAGAATGGATGGAGAGTGGATAGATGCAT
AGAAGGATGTATGTATAGATGGATGGATAGAGAATGGATGGATGGATGGA
TAGAAGATGGATGAATGGATAGAAGGAAGGATAGAAGATTATGTATATAT
GAATGGAAGGAAGAAAGGATAGAGAATGGATGGATGGATGGATGGATGGA
TGGATAGAAGATAGAAGATAGATGGATGGAGGATTAATACTAGGGTTGGA
CCTAAGGTGTGCTAGGAGAATAGAATGCTTTACCATTGTGCTATATCCAA
AACTCATATTTTAGAATTTTTATTTTGAGACAGGGTTTTGCTAACTTATC
CAAGCTGGTTTTGAACTCACTATGTAACCTAGTCAAGCCTTGAACTTGTG
TTTCTCCTGCCTCAGCCTCTGGGTAGCTGAGACTAAGGTGTGCACCACAA
TGCCTGACTTGTGAAAACTGTCCCATTTTAGATTTAATGCATATCACCAT
CTTAATTTGGTGGTCCTATTTTGTCCACTTGGATTGTGTAGTTTTTGTTT
CTGACTCTTACTTTTAACATGTGATTTTGTTGTATTTATCTGGTTTCCTA
GCCTATGGCACTTAACTGAACTAGTAAGCATCCCCGAGCTGTGTGGAATA
GCTGTTACTTCTGGGAGGGGGTTCTGTATCTTATGGGTGAGAATTACAGG
TCAGGAAGTTTCCTAGAACTCCAGAGCCTTTCCCCTCAGCTGGTGGCGCG
GTTTCCATGATGACAGTATAAGTTTGTGGGTTTCCCTACACTCTTTACCA
CAGAAGCCCATCTCATTGGGAATCTGTAAGTGACTGGCAGAGACTGTCCT
TTGACTAGTGATTGCACTGATGGCAGGACAGCCGTTCTCATGATCTTACT
GCAGACAGCTGTGACTTAGCTCACGCAGTGTTCAGGAGGTATGTTAGTAT
GTAAGGATTGTTACAGAAAAAAACTTCTAAAGTACTTTTTATTTCTCTTT
TAATCCAGAACTTGAAGAAGTAAAAACTTCAGCCTTGGACAAAAACACTA
GCAGAACTATTTGTAAGTGTCACTGCGTTCGCGTTCTCCACCCTGCGAGT
GTGAGCATGACTGCGTGAGGCCTGAAGCCGGGTGCCAGCACCAGTGTGCT
GTCTGGTTTGCAGAGTGATATGTAGACCAAATGAAGCTGTTTGAGAATTC
AAACTTAAACATACTTTATAGCACGCTAACAAATACCTTTTAGAAGCAAG
AATTTATATTGTGGTTTTTCTCAGGCAGGACCAATAAAGGAAAGGATATT
AAAAAGTTATGTGTGAGACCTCCATTAGCAGAGTGTTTAAGAATCTGACT
TGTAGCCTGGGCCCAGCTCTTAACTAATTTCATCTAGGTGAAAATGAAAA
TTTATGTCATTTATTCTATATTTTATTTTGATATAGCGAGATGACTTAGT
TGGTAAAGTGCTTGCTATGTAAGCATGAAGACTTGTTCCGATTCCTAGCA
CCCGTGTAAAAGGCAGGTGCTGCGTATACTCCTGTAATGTTGCACTGTGG
GGGATGGGAAGGTGGGAGAAGGGCAGAGGCAGGCAGATCTCCAAAGCCTC
CTGACCTGTCAGTCTAGTTAGCTAATGCATTCCAGGTTCAGTGAGAGATT
CTGACTCAACAAGCAAGGTAGGAAGTGATAGAGGAAGATACAGAATGTCA
GCCCCTGGTCTGTGCATACACATGTACACACATATGCACACACATAAACA
TCTGCGCACACACACACACACACACACACACACACACACACAGGGGGGGG
GGGAAGACAGACAGACAGACAGACAGACAGATGAACACTCTGGTTCAGGC
TGGTCTGGAGATCTGTATGTTGTTGAGGGTAACCTTGAGTTTCTGATTCC
TCTTTCTCTACCTCAGGAGTGGTGGGAATTGAACTCAGGGCCTCACACAT
GCTAGGCAAACACCTACTAACTGAGCCACACTCCCAGTCCAGGCATAGAT
TATTTAAATACATGGAGAAAAAAATTTTGTTAGGTCAGTTAGATTTATTT
ATTTGTTTACTCTTGGTATTGATTATATTATACACCATTAACAAGCTTCT
TTTTTCTCTTATGAACACATTATGGTAGCATTAGCACCAAATGATCTTTA
TAGAAATAGATAATATTTTCAGGAGAAAGTTGCAAGTATACTGAAGTTCA
GAGTATGCGCTGGTGGACATTTATGTCCTCAGTAACTATTGCATGTGTTC
TTCTGTGCATTGCTAACTCCAAATTTGATGGATAGGGGATTAGTGTCTTA
AAGCACAGTCTAAACATCACATCATTTGACCCCTAAGTATGTCACTGTAG
GTCACCTAAAAAGCCCCTAGTTACCCAACACACCCACATGTTGATTTATC
ACATATATCATCTCTTCTATCTAATCTGTGTTCAAATTTACATAATTGTG
CCAAACCATCTTTCAATAGTTTCCTTCTTCAAAATCAGGATCTAAATGGA
GCCAATACATAGTGTGTTTTGTCCATGACACACACACACACCACCACCAC
CATCTCTTCCTCCTCTTCTTCCTCCTCTTCCTCTTCTTAATTTTTTTTTA
TTTTTTATTTTATTTATTTTATTTATGTGAGTACATTGTAGCTGTCTTCA
GACACACCAGAAGAGGGCATCAGATCTTATTACAGATGGTTGTGAGCCAT
CATGTGGTTGCTGGGAATTGAACTCAGGACATCTGGAAGATCAGTCAGTG
CTTTAACTGTTGAGCCATCTCTCCAGCCCCACACCACTTCCTTCCTTCCT
TCCTTCCTTCCTTCCTTCCTTCCTTCCTTCCTTCTTTCTTTGTTTCTTTG
TTTCTTTCTTTCTTTCTTGCATTTTTTTAATTTATTTTTTTTAATTAGGT
ATTTTCTTCATTTACATTTCAAATGCTATCCCAAAAGTCCCCCAGACCCC
TCCCCCCATTCCCCTACCCACCCATTTCCACTTCTTGGCCCTGGTGTTCC
CCTGTACTGAGGCATATAAAGTTTGCAAGACCAAGGGGCCTCTCTTTCCA
CTGATGGCTGATTAGGCTATACACCACTTCTTTATTAATTGATCATATTG
TCTTTTTTTCCCATAGAATTTGCCAAAGTAAACATTCTTCTTGTATTATT
TAATTGCCTTTAACTCTTTCTTATAACTGGTAGTTAAATTTTATACTTGA
TTAGACTTAGGACCACTTCTTTTGGTAAGAGCAATTCACGGGTGTCCTGT
GTGCTTCTTATTTATTGTTTTAGCACCTCAGAGCACCTCAGAGCACCGAG
CATCTGTCCTAATGTAGGCTTTTGTTTGTTTGTTTGTTTGATTGTTTCTG
TTTTTGTTTTTCTCTGTGTAGCCCTGGATGTCCTGGAACTCACTTTGTAG
ACCAGGCTGACCTTAAACTTTTTCTCCCCTCCCCTCCCCTCCCCTCCCCT
CCCCTCCCCTCCCCTCCCCTCCCCTCCCCTCCCCTCCCCTCCCCTGTTCT
CTTCTCTTCTCTTCTCTCTCTCTCTCTCTCTCTCTCTCTCTCTCTCTCTC
TCTCTCTCTAATTTAAATGCTCACAAGGTATTTCTCCCTAAGAACAACAG
TAGGATGCTCTTGGCCTCTGTCTCTCTCTTCCTTGCTCTTTCTCTTCCAA
CTTTTATCACTCCTATCCAGCATTTACTGAGTCTGCAGTATACTAGGTGG
TGTGACTGAGGCAGAGGATTGAACTGAGAAACAGCCCCAGCCTTTACGGA
CTTAAGAGTGTTCCGGGGGAGATAGGACAGCATGGTAGGCACCCCGAGGA
GGGACTTGTCACTGCCTCTGAAGGAGAGCGGCAGCAGCTAAAGGAAGGGC
AGCTGTGTTCTGACAGGGGAGTGTCAGAGAGGAGTAGGAGCAGAGCTACA
CCCGCTGGAAGCTGAGGGGCTGGGCAGAGTGCGGGCGGACGGCCTGCCCA
GCGGACCTGTCTGCTCCGGCCACTGCTTGGGCTGCAGTGTCCATCCACGC
AGGCTTGGGGCTTTTCTACCCCTCCTGAGACGTTTCAGCAGATACTCCTG
GGAGTCTTGTTTTCACTTGACCCAAATCTAGCTGTCCCACTTGCATTAAC
CTTTTAGATTTTTATTCACTTTTTGTTCTTTTACTCCACGTTTAATTGTT
TGGTTGTTGGCAGCTTAGGATCCGTCTGCTCAGCCTTCTTCCCAGTGTTA
GGCTCCCGAGCTTGTGCCGCTGTATCCAGCCTGAGAGAAGCCTGGGTTCT
CCTTTACTGTTAAAAAACAAATCACATATGTATACAATGTATTTTCATCT
TATCCACTCCCCCTATAGTTCCTACTGGGTTTCCCATACACACACACAAT
CCCTTCCCGCCTCTGTCTGTGTGTGTGTGTGTGTGTGTGTGTGTATGTGT
GTGTGTGTAGTATGCTCACTTAAGCATTCAGTTAATTTTTCTATTCCTGT
GGTGTTTCTTAAAATAATGTAGCTGGGTATAATCATATTTAATCAATAGA
ACCCTTTTAAAAAATCAAAGAAGCAAAATTATATTGATCAAGAGAACTGT
GCAGTCTGCCCAGCAGGGTGACTATTAGCTGTGTGTAGCTTTGAGGCTAT
AAATATATTAACACAATATAAAGTAGAATACAGTGAAGTTATTCTGGTTG
TTTTTCATACCACATAGTTAAGGTAGCAAGTGGCTACTGTGCAGGGCAGT
GCATTCCATCTGTTTCTGCAACTATGCTATAGAACATTTACTGAAGGACA
TGCGTGTCTTGTATACTGGGGTGTTTTGTATCTACTGTTTGTGAGGGTCT
GACTGTGGTTCATATTAACCAGAAATTTTAAAGTCTTAAAACTGTAACAA
AACCACCAAAATTGGTGTGAGTACCGCACTGCGGGTATCTGGTTTTATCA
AAGGACGGGTGTGATGCAGTGCAGGCCTTCCCGTGAGGAGCAGGGCACTC
CCCGTGTTAGGCCACAGAGCACCCCATCAGCTCTGTAAAAACCTCACGTG
CCTCTCATTTCTGTTTCAGATGACCCTGTCCATGCAGCGCCAACGACTTC
CACGCGTGTGTTTTACATCAGTGTAGGGGTTTGCTGTGCAGTGATATTTC
TTGTAGCAATAATATTAGCCGTTTTGCACCTTCATAGCATGAAAAGGATT
GAACTGGATGACAGGTACCGTTCATGTTTTGGGGAGCATGTTACTTGCAT
GTGCATGAGTGCCCCTCCCCCAAGCCCCCCCCCCTCCATCCATGCACATT
GTGCAGGGGAGGAGGGAGAGTGATGAAGCTCAAGCCAAAGAGGAACTCAG
ATGTCTCGGTTATTACTGCCTTTATGTTTTTATCTTCATCTTTTAAAGTT
TGTGGAGTTATAACCTGGGGGAGAAATAAAGGTCAGAAATGTTTTTCATG
TTTGTTATCCTGATTCGCCTCCAGGTCCGACTGCCTTTTTTAAACTACTT
CCTTCTACGTCCTCCAGCCCCTCCCCGTCCCTCCTTCCATCCCTCCCTTC
CTCCCTCCCTCCTCCCTCCCTCCTGCCTTCCCACTTGAGTATCTGCTGTA
CTTTAAAGTTTCTTGGATGATCCTAATGTGTAGCAGAGTAGAGACACCGG
GTAGATAATTACACTAAGTGTTGGGACTATAAAGATTAATGATACTCTTC
ATGGTATCAAGGTTCTTTGATGTTAACCCATAATTATAGTATAGAATTGA
TGATTGTGGTATGTATAATGTAGTGTGGGAATGCAGAAGGTCCTGGCTTA
ACCTGGGTGAGTCACACACATTATAGCCAGACTATAGTGAAGGGTAAAGA
TGGAATGGGAGATACGTGCTCATAACCCACAATCCTTAGCGACAAAAGGC
ATTCTCAGCATTGTTTTTGACTTTGAACTTTGAACCCTTTCTACCTGTCT
TGATCCCTAGTTGCAACTTGTCAGGTGATTCCATATCCCTGATGCTGCCC
TTTGAGAGCTTTTGTTCATACTGGGGCCATGGGACTTCTTGCTAATCCAG
ACCCATTATTTGTACTCCAGATCCATCACCGTCTTTCCCACAACTAAAAT
AGAAGCTTTTTCCAGGCAGGGAGGAGAGACCCTTCTCTCCCCAAACTCTC
CTAACACTGTACAGTAGAGCCATGATATCAGCATTCCCTTTGTAAAAGAT
CTGGGGGCTGGTTGGATCCAGCACTCTTTAAGTACTTTGGATCCAATACT
CATGACTTAGTCTCCACTGTGCTCCTTCCCTTCCTTGAGTCAAAAGAAGA
GAGGAGTGAACATGGCGGAGTGCATACAGGCACTCTAACCTGCTTTCTGT
TGCCGTGATAAAACACTGGCCAAAACCATTGTGGAGGAGGGATGGGTTCA
TCTCAGTTCACACTGTCAGGTCATAGTCTAGGGGATGTCAAGGTAGGAAC
TGGAAGGCTGAACCATAGGGCATGGCTGCCACTGCCTTGCTTCCTTAGGC
ACTGAAGGCCCACCTGCCTAGGGGTGAAGCTCACGGTCGGCTGGACCCTC
TCACATCTGTCATTAACCAAAACATCTCGCTTACATAGTCACGGGCCCAT
CTGATCTGGGCAGTTCCTCAACTGAGACTCCTTCATGAGACTCTAGGCTG
TGTCAGGTTGGCAGCCAGCTCACTAGGGTAGTGGATGCTATGTTTCAGAG
TGTTTGGTGTACACCGGGATCATGGAGTTCTTTGATTTTACAGAGGAAGA
ACTGGCATTTGGAAGCCGTTGAGGGGAGAAAAGACTAGACATCTTGTAAA
CAATTTCGACAGATGATATAAATGATGAGAGTTACTGAAGAGTAGAATAG
TCAGAAGTCATACTTTGTGCTTTTTGTTTTTGGAGGCAGGGTCTCATGTA
GCCCAGGCTGGTCTTGAACTTTTGATTCTCCTGCTCCACCCCCTAACAGC
ACATACTGTTATACTCAGCTCCACAGGTCTGATACTCATCGAGTTGAGTT
TTCCTTGACTGCTGGTGTGTGTGTTCAGGCCATGGGTTCACACAGGCCGA
CATTGTGCTGTAACTCATAGATTCCATGAAGCATACGTGTCTTCCTGCTA
AGTATTCAGCACTCACAAGCAAACTCTCTAGGTTTCTAGATACTGTCTGA
ATAAAAGCAATTATGTGATTGCTTGTTTTCAGGGCACAGCCTAGTAGTTA
GGAGCTAGCCTCTGGGGCCAGGCCATCTGTATCTGATATCCAGCTGTTCT
ATTTACCAGCCTCTCAGCCTTCTCACGTGTAAAGCAGAGATTGTGGGCTG
TGAAGAAAGGACGCTAGAGGGGTGGGTAGCAGATCTCAGCCGTAGCTACA
TGCAGTAAGTGCCGCCATGCCGACGTCATCCCCAGAACGATACAGTGGAT
AATCTGGCGTTCCCATTATTCCTGGCTTGCTTACAACACACCAGGCAAGC
TAATGGTGGTGGCCAGCACTGGAGACACCTGCTGCTCCTCTCTACACTAC
ATGGTTGTGTAATTAAGACTCAGAGACAGACGTAAAGACAGACTTGTGGG
ATTGTGGCAATACACCAGTACAAAGCAGGAGGGCTCCATTCTGCCATTTC
TGTATTGTAGTTACATCAGATGCTTGCTGCCTGACAAGCTCTGTTCCTCG
GGAGGCTTAGTGGTGCTGTGAACTCTTGGGAAGAGCCAGTGTTCTGTTAC
ATATGAGGTTTCTCTGGAGGCAGAGGGTGTAGCTGTCTGAGACGTGCTCT
CAGCAGGGACACATGGAGTTCGCGCGCGAGGCTTTCCCTCTCTCCCAATG
CAGCACATTGATCTGTAGTCCATTACAGCAGAGTCTGCCCTGAAGGGGCT
GCGTGGTCTCCTGCAGAGCTCGGTCTGTAGCTGCTCTCTCTGTGGTCTCC
CCCTCAGGGAATGGAAAATCCATTCCTCGAGTATGGGGTGCTTGCATGTG
TTATTTGGTAGTATTTTCTTTTTCTCTTCTACTTACTGCTTCCTAGCACC
TCACTACCCTCAGCATTAGGGTGGGAGTGGGGGCTTTTTGTTTTTTCTTT
TCTATATTTGTTTTTACCCTTGCTGTCGTAACAAACTGGCATACATAGTA
ATATACAGAGTCTTAAAGTTTCCTCTTCCTTCTCCTCCTCCTTCTCCTCC
TCCTCCTCCTCTTCCTTCTCCTCCTCCTCTTCCTCCTCCTCCTCATCTTC
TATCTTCTTCTTCTGACAGGGTTTCTCTGTATCTGTAATTTGCTCTGTAG
ACCAGGCTAGCCTTGAACACAGAGATCCTCCTGCCTCTGGCTTCTGAGTG
ATGGGATTGAAGGCGTGCATGAAGAATGAAAAAGTCGGTTACTGCGCTCA
ACCGTTCCCTCCGCATCACGTATCAGCAGCTGGAGTCGGCAGCAAGCATT
CTGCCTGGCCCCCGTCTTCCCAGTCCATGGGCGTGGCTGCTTTCACTGAG
TAGCTAACCCACTGTGCTTTGGGCTCTCACAGGGGTCCCAGTTTGCTTCC
TGTGCTGGGCACCGGTGTAAGTGTTGGGGAGGTGGAGTGAGCAGGCACTT
AGCTGTCCCCATGGAGCTTGTGGTCTGCCCAGATGAGACGTTCAGCAAGA
AGTCCCAACTGGAAAGAGGGTGGGAAGGTCTGTGGTGTTCAGTGCTGCCT
CCTCAGCAGCAGAGCACCTCCTGTCACACACAGACACTTGATAAATATTT
ATTGAATAAATATATAAATAGATGACTCACTGAAAATAGACAGTAAGATT
TATTATTTTGAAGATCTTTGTTTAAATTCTTAGCTTATCCTAAATCTAGG
TGCTTTCTTGCTTATGAAAAATCAAATTTATTTAGACTAGTCATATGCTA
CTAAATGTTAGTAAATATACATTTTAATCTGTTTCCTACCTCCTGTGATG
GTGTCGGGCTGTCCTTGCTTCTCTTATAATCGTACGTTTGGCTCCAAAGA
AAGTTTCTTGCTCCACTGTTGCTTCGCTCTTCTTTCACTTGTTCATTTCT
GTTAAGGAAATGAAACTCTGACATAACTAGCCATCAAGCTTGACTGCTCT
CAGTCATTTTTAGCTGACGCAAGAGCACCACCTACTGTTCAGTTGTCAAA
GTTTACTCACCCGGACACATTGTTGCTCGCAGGGAATATCTGAGTTTTCA
CAGATATCATACATTTGAGCCTCACCTCCTGTGAGGCAGGTCTCCTCAGT
CCTCTTCTGCGGAGGAGCTCTTATCTGTCCCCTTCTGTGATGCAGCCCTT
CCCTCCTCTCTGCTGAAGACTACACTTCTAACAAATAGGACTTTTAGTCA
CATCTTTGCCAAGTACTCTGCAAAAACATGTACCTGTAGGTCACCGTTCT
AAGGTTGGAGACATGATGCGCAGTATTCCTCATGATAAAAGAGTGGTCGT
TTATAAATGCATGCCTGAGGGCCAAGCAGTGACCTCAGTGATGTACTTAG
ACATCTTCCGTGTAAGACCCTTTTAGCCGTCTTGTTGGGAGTAGCTTTAT
GCTTCCTTCTATCCCCACAGAGTTCGAGGCTCCAGAAGGATTGAATACTT
TGCCTAAGCCACACAGCTGGTGATGTGGGCAATTGTGATTTACAGGTTTA
TGCTCAGCATTTGCTTATGACCAACTACATATGTAAACTCACATAAATCA
CCATTTAGTAACTTCCAGAACTCCAACCACACAGTAGCCTGACAAATCTT
TGTTACATTCTATGAATTGAAAGTCCCCTCAGCAAAGTTGACTGTAAGTT
CCCAGGAAGAAATAACAATCTGAAATGTGAGCGTCTCCAGGGAAAGAAGG
CATGTTGAGGGCACATTAAATGAACAGGCATTTCACGTGGAGATTGTACT
GTGCAGAGTGGCTCATGTGCACACAGGCTCTCTGAATGTTTATTGGAGGA
CACCTCTATCTCAGTACTTCAGCCATGACAGTAGGTCATTCTAAAGTGTG
TTAGCGATAAAAGGCTACATAGCCTCCAGAACTCACTACTTAGATGCCTT
ATGTCTGTACGTTTTTCACATGTGTGTTTGGGCTCTTGAAATTGGCAAAA
TACAAATCCATGTGTAAGTATCCAGATTATATAGCAGGTGGTCACCAGTT
CCATTGTAATCACTGGGGTTTGAAACTACGATGATAAGGTACAAATATCA
GTCAGTCACAAGGTTCTTCATATGTAATAGTGGGCTCCACCACCTCTGTG
GTGACAGGAGTTCTGTCTGGCTCTCTGGTTTTACTCTCTGTGCTGAATCT
CTGCTTTAACATCTCCTCGGCTACAAAATTAAAAGGAATAGGCCAGTGAG
ATTGAAATGTTCCCCAGAGTGACCTGGGACAAGGTTTCTACCCATTGAGA
AGATGGAAGAATATGCTTGGGAAGTGTTGGTTTATAGGAATTACAACACG
TGAGTGACAAGATTTGCGCCCACCACCTTCAGGGGCTCCTCTTACTTGGA
AAGTATGGGGTGATGTGATGTTTCAAGTTCTAGAGATTTCTGAGAACCAT
GAATTCTAAAAGTGGCATGGGAGGGGTGAAGAGGGACAACATATATGATT
AAACAGTGAGACTGTGAGGACACCCCTGCCCCCGTTGAGCATGGCACTCT
TGATTTAATCTGTGGCTGCTTCAACTCAAGACCATTTGATTTGGGCCATT
GCTGAAATGAACTTGTTTTTCTCCTTTTCTGAAAGCCAGTTCAACTGAAC
AGCGTGGGGTTTTTTCTAGAAAGCCGAGACATAGTTCCTGACACACCCTG
TGTGAGGTTCAGAATTGCTCTCTGAGCACGTCTACCCGCACTCCTGAATA
ATTTTGCTCTGATGGCATGCCCTCCGTCGTCACGTCCCTCAGGAATCCAG
TTTGGAACGCTGATAGAGATGCGTGCCTTTATTGCATTGTTATCTCGACC
AACTTATGTACCTTATATGTATGGGAAAGACATCTCTCACTGAGGCTCAC
TTATCAAGTATTTCTGTCTTCAAATTCTTTGCAGCATCAGCGCCAGCAGT
AGTTCCCAGGGGCTGTCTCAGCCGTCTACCCAGACGACCCAGTATCTGAG
AGCTGACACACCCAACAATGCAACGCCTATCACCAGTAAGAGTCAATTGA
ATCCTAAAGCTGTATGTGCTCTGTCTGTGGTTAGAGTATTTGTGGGATTA
ATGTACCAGTGTGTAACTTGTGTAAAAGTTGGTTTGATCTTCGATTTTGT
TTTTTTAGAGCACTGAGTTAAAAAAAAGTTGGGGTATTTAAAGTAAAAAT
AGTTGCTAGAGCTAGTTTTGCTTTGGGGAGATTTCCATAGTTAATTTTAT
TAAAAGAGCTAATAAATCAATTTTATACAAATCCAGACTGAAGGTTTTCA
GGTTACTTATATGGAATAAACTAATACTCTCATGGGGTACATAGAGACTT
GGCATTGGTTTTACTCATCTGATGTTGGAGATAGAAGCCAGGGTCTCCAG
CATGCCCGCTGTACTGTGTAAGGAGCTGTCCACCAGTCCATGCTGCTGTC
TTCTAATCCTAATTCAAATCTCATTACCATTGATATGGTCTGCCTGTCTG
TCTATGATTTTTCAAAACAGGGGTTCTCTGTGTAGCCCTGGCTGTCCTAG
AACTTGCTTTGTAGACTAGGCTGGCCTCAAACTCAGAGATCCTTCTGCCT
CTGCCTCCTGAGTACTAGAATTAGAAGTGTGTCACACCACAGCCCAACTT
TTTTGTGGGGGTGTTTGGAATTTCCTTTCCTTTCCTTTCCTTTCCTTTCC
TTTCCTTTCCTTTCCTTTCCTTTCCTTTCCTTTCCTTTCCTTCTCCCTCC
CTCCCTCCCTCCCTCCCTCCCTCCCTTCCTTCCTTCCTTCCTTCCTTCCT
TCCTTCCTTCGTGTGCCATGCTGGAATCAAACCAAAGGGCCCTCACACAT
GTTACAAGTACTTTACCACTGAGTGACATCCCTAGCTTTTAATTTCTCTC
TTTAAAAAGAAAATCAACCTGTGTGTCTGTGTGTCTTTATATACATGAGT
TCTAGTGTCCACAGATGCCAGAGGTGTGGGGTCCCCCTTGAGCTCGAGTT
CTAGTCAGTTGGAATTGAACTTGGGTCATTTGGAGGAGCATTGAGTGCTC
TTAGCCACAGAGCCATGTCTTTAGCCCTAATTTTCTTCTTATTAGCAGAA
TTTTGTTTTTTAGCTTAGGCTGGCTTGGAACTCTAGCATGTAGATTAGGT
TGGCCTTATATGGGCCACCATTACCAGCCCATTTTTATTTTTATACACTT
CAGGGTTAGGAATTTTGGGGAAAGTTTTTTTCTTTTTTCTTTTTTTTTTT
TTCATTCTTTCTTTTGGTTTTCTTGAGATAAGGTTTCTCTGTGTAGTCCT
GGCTGTCCTGGAACTCGCTCTGTAGACCAGGCTAGCCTCAAACTCAGAGA
TCTGTCTTCCTCTACCTTCTAAATGCCAGGATTAAAGTTGTGCATTATTA
CTGCCCAACTAAAATAAATCTTTTAAAAATATTTAACTGACAAGTTATAT
ACAGTGTGATATAAAATATGCATGTAATAATGTAGTGTTATTGGACTATA
CTTTAGATATAGTGGGGAATCAGTTATGAGATGATGATGAGAATAGACTA
ACCTTCTGAAACTGTAAGCAAGACCCCAATTAAATGTTTTCTTTTATAAC
AGTTGCCTTGGTGATGGTGCCTCTTTGTAGCAATAAATGACCAACACGGG
GAGGAAGATAGCCTTGATCTAATGTTATTACCAAGAGAATGTCAGTGTAA
GGAAGACTATTGATGTCCTATAATTAGTAGCCTTTCCAAGGCAAGACCTG
AGCCAGAGAGAGAGAGAGAGAGAGAGAGAGGGAGAGGGAGAGGGAGAGGG
AGAGGGAGAGAGAGAGAGAGAGAGAGAGAGAGAGAGAGAGAGAGAATGCC
TAGACCTGGCATGGGCTTTTGAAGCCTTAAAGCCAACCCCATACCTCCCA
GTGACACACTCCTCTAACAAGGCCATACCTCCTAATCCTTCTAATTTTTA
CAAACAGTGCCTGGAGACTGTTTAATTATGAGCCTATGGAGGCCGTTCAT
ACCCAAACCACCACACTCTCAGTGCCCTGCGGTGGTTTTTCTAAACTGTT
TCCAACAAAAAGAGTCAAACGTGTTAGGAGAAAAAGCAGATTCCAGGTCT
GGGTCAGGAAATGAACAAGGCAAATCTAAGACATATGATTGAGCAACATA
TCCCACTTACCAAGGATGGAGCCACTGAGTATACAAGAGAATAATGACTG
CAGTGATTTGGAATAAAATATGTGTAATAATCCATAAATGTATAATGCTT
ATAATTGCTCAACATAATTATTAACTGGGGCTCCATCAATACCTTAGTAT
CTGACAGCTGGCTGAATGAATTATATTGCAGGGTAATGAGGTAGCACCAG
TTGCTTAGAACAAGCATTTCCTTACAGAAGGCTCCCAGCTAATGACTATG
AAAGGAATGGTACAATTAGACAAGGACATTTAATAAAATACTTAGTCTAG
GAAAGACCATCATTGATGAAAGCCCTAAGCACAAAGGAAATGGAGGCTTC
ACCATTGGCCAGTCAAATCCTTCCCTGATCCACTGATAGATAAACTTAGC
ACTACAAAAAGTGCAACACCCAGGTATTTTATACCTGAGGATATGAAGTT
CCAACCCCAGATAATTAGCCTGGATTTAATCAAGGCTAGAGCTTGGAGCT
GTCCTGTAACACAGAGACAGAGGAAGAAGGTGAAGGACATGCCAGGAGCA
AGGAGGGCAGTTCTGCATCATTGATTGTGGCAGGAAACAAGGGCCAACAA
AAAACCTCAGAGAAATCAGAGCAGCACCTTTGGTCACTCTCAAGAAAGAA
AGATGACAAACCCTTCGTGAAAATGCCGTGGTAGGTAGGAAGGTCATTTC
TGCTCAGAAAATGCAAACCTTTAATGTCGCTTTTAATGCTGACATTAGGG
CTGTCCTTACTGATGGATATGACCTTATGAAAGAGACTATATACCAATGA
AAATAATTTACATATTAAAAATTTGTTCTTAAGGTGAAATTTACCTATTT
TTTGTTTTTCACTGTGGACATTATCACAGAGAAACACGTAGTTCATATAT
CAATAGACGCTAAAAACACTGGAAACCTTTAACTTTTACATGTATGAGTG
CGTTGCCTGCGTGTGCATGTGACCATGTGCATGAAGTCTCTGCAGAGGTC
AGAAGAGGGCGTTGGGTCCCCTGGGACCAGCCTTTACAGCAGTTGTAAGC
TGTCGTGGGTACGGGGAATCCCACCTGGGTCTCTCTAAGAATATCAAGTG
CTCTTAAATACTGAGCTTTCTCTCCGCCCCACCCCCAACAAATTGTCCTA
AAAACTCAATATAAATACAGTTGTTTTATGACTAAAAAAGGAAGGCCAGG
CATGGTGGTACACACTTTTAATCCTAGCGCTCAGGAAACAGAGGCAAATA
GCTCTCTGTGAATCTGAGGCCAGCCAGCTCTACATAGTGAGTTCCAGGCC
AACCAGGGATACATAGTGAGACCCTACCTCAAACAAAACAAAATAGGAAT
AGCAACAAAAGGGATGGGGTGTAGTGGATCATACCTATAACCCCAGTATT
TGGGAAACTGAGGTAGATCATGGGTTCTGAGCCAGCATGGGCTGCCTAGT
GAGACTTGTCTCAAAAAGAAAAAAAGGGGTGGGGGCAGAAAACAAACTTA
AATACTGGGCTTCGGGAGTGCTAACGAGAGTGGTCAAAGTGAAGATGTAG
TTTATCAGAAGTGATGCTTTTCAAACTTCTCCGTATTTGAAAAGATCGTT
TGTCACGTGATTTATTGAAAAATCATTTGGGAGGGAAAACTAGAGAGGGA
TTAGAGTCTGTAATTCAAACCTTGTGTCATTTGTCCCAAAGGCATTCCAA
ATGACAATAATATTTTTAGTGCTTCTTGTTTTAACATTTGGAAGTAGTGG
TGTCATAGATGGGACTGTTTTTCCTTAATTTTTTAAAAAAAATTATTTTT
ATTTTATTCATACTGATGTTTTGCCTGACTATATGTCTGTTGTGAGGGTG
TCAGGTCCCTGGATCTGGAGTTAGAGACAGCTGTAAGCTGCCATGTGGGA
TTTGAAGAGTAGACAGTGCTCTTAACTGCCGAGCCACATCTCCAACCCCT
TCCCTTAACATCTTATGTGCCCTTCAGCAGCAGCTTCTCTGATCTGTGTG
TATAGTTGCTTCATTATTCATTTGCTTCATTATTCTTTGCTATGACTTAA
GTCCACAGGCTGGAGTGCCTAGGTGAGCCCAGTGCTGCAGTAGGGTATTT
ATATTGCTTGGTCTGGCTTTGTTGGCTCCTCAGGTTATCCTACCTTGCGG
ATAGAGAAGAACGACTTGCGAAGTGTCACTCTTCTGGAAGCCAAAGCCAA
GGTGAAGGATATCGCAATATCCAGAGAAAGGATCACACTGAAAGATGTCC
TCCAAGAAGGTACTCGTGCTCGCTACAGTTTCAGTTCTGTTAAAAAATTG
TCTTCATTTTCTATTTCTTTAGACTTTATACAGTGTCGTAGCAGCTTTGA
TGAACATCTTGATTTTGAAGTGTGATAAAACAGACAAGTATTTGTGACCT
ATAAATGTATTGTATCCTTATTTCAAGTGATCAGTACCCAGCACCTGTAT
TTACAATACTTAAATTAGTTTATTCTTTCATGGCTTGTGGATGATCAGGT
GTGTGGATGGGCATTGGGGTTAGGCTCAGCGTTTGTAGCCTGAGTGACCT
TAGAGAAACCACACAGTATCTCAGAATTTCTGTAGAGTTCACACCATGCT
AGTCTTCATCACTCTGAGACTAGCTGAGAGGCGACATGAAATGGTGCATT
CGGAAGACTTCTCAGAGTTTGTATTTGACATGTCCAGGGCTCTTTTCACC
CCGTCTTGCAGGCCCTTGATCTCGGCTTTGAGTTTTAGGTCTCCATTAAG
GAGATGGTGAGATCGGAGGACAGAAATTAACAGTGAAATACTGCATCACA
CGCGGTTAGATGGCAGATGCTTGTTTCCTCGCTGCAATTTGTTCTGGAAT
GTGTTTGGTCCGCACAACTGTTCTGTTTGCTGGGCCTCCTGGAAGCTAGT
CTCAGCTAAGTGAGGACCTAAGATGCCTTCTGAGAGAGTGGCGCTCAGTT
GACGCAGACTCTTATTTCTGTCTGTTCTTCAGAGTAGGAACACTGCTCCT
ACGGTTGTCTGCTTCCTAACTCAAATAACTAGATAGATCATCTGCAGTCT
GAGGAGAGAAACCAGGCCAGACAGCATTTCCTACAGAGTTAGTGGTTATG
CTTCCAATTTCCTGTGTTTCCAAACAGGATGCTCATACTTTGAGGAAATT
TGGAGCCATGTTTTCCTTGATACTTTTTGGAGCCATAATGGTTTTTTGTT
TGTTTGCTTGTTTTTTGTTGTTATTGTTTTGTTTTTTAAGAACTTTAGCT
TTCAGAAAAGAAAACATGACTGGCTAATATTTTGAAAAGTGGTGAGGTTC
ACTGGAGATCTGACTAAGTACAAATCAAACAGTGGTTACACGCCACTTTT
CATCTGTTAGATTGGATGAAATTAAAAAGAGATAGCTAGAGATCCAGATG
GGGTTACAAGGTGATAAACTGTTATGCACCCTGACCGGTGGCAAGGTAAT
CTGTGTACACATGTGCTGTAGTGTGGGGTTTGCCCAGTTACTTTTGCATT
TAAAGTTTGTGTTTGGAATATCTAAAGGGGACTAGGTTTAGGGAAAAGGA
GACACAGCAGGGTGGACGGAAGGACCAGGTCTGTCCTGCTGGGCAGGGAT
AGAAGGAAGGACCAGGTCTGTCCTGCTGGGCAGGGGTGGAAGGAAGGACC
AGGTCTGTCCTGCTGGGCAGGGGTGGAAAGAAGGACCAGGTCTGTCCTGC
TGGGCAGGGGTGGAAGGGAGGCACTCCTTTGACAGTACAGAGACTCGGAG
GTGTTTGGACAGCTCCAGGCAAAGATTCTCCAAACCCTTCTGCCTGCAGC
ACCGATGTCACTCAGACTCTGTGACTCAGTGGGACCTTCCACATGAGCAC
TGGTACCTTTAGCACACACAGTGAGATATTAAAGCCAAGGTGTGTGTAGT
GTCCACAGTAAAGCTAAACTCTTTCAGGCATTTCTTTTAAATTATGAAAA
AAAAAATGGTCTGTGCGAAAGAATAGCATGTCAGCAATCTTTTTTTTTGA
GGATCATCTCATTTAAAAAGTATTTTTAGCAATCAGGAAATTAATAATAA
ATCTGTAAGGATTTTTGCATTTCTGTTTTACACTGCTGTGCCCCTCGGGA
ATGTCATAATTTCTTTGCTGTGAGAGCTCCTTAGGAGCACACTTGGCCCT
CAGTGACCTGAGAGTTGGGTCACCTCACCTGAGACTGAGGGGTAGAGGCG
CCGAGGCCTCTCTGAGCCAGGGTTAGCGTTCCTCACTCTTTCATCATTGA
AGTCTGCATCGCAGAAAGAGCGGCCGTTCTCTCCCTCCGTCGTTGCTTTG
AGGCAACTACCAGAGACTCAGATGCTCTGGCTGGCACCTGTAACTGCGAC
AGCACGCCTGACCGACTGTGTTTATTTAGAGAAATTAAGGAAAATAGTCT
CAGATATTTAGTCTAGCTATAGGATTTCTCAAGCAACCTGCTTTGTGGGC
TTGAATTGCTCTTAACAGCTTTAGTCCGGTTTATTCTGGAGGGAGAATGA
ACAGCAGCCACACCTGTCAGCTTAGTCGCGGTTACTAGAAAGCTTTGTGA
TACTGTGAAGATTATTGTATGGCCTCATTAACTGTTATTTTTCCTTTTAG
GTACTTTTGGGCGTATTTTCCATGGGATTTTAGTAGATGAAAAAGATCCA
AATAAAGAGAAGCAAACATTTGTAAAAACAGTTAAAGGTAGGGATTTTTA
CATGCTGTTTTCATAAGAGTTTTTTGTTTGTGTTTTTTTGTCAATCACTC
AAACTAGCAAAACTCTGTCCCCTGTCTCAGTGTGTGCCAGACCTTTGGAA
TGACTCTGTACTAGTGTGACTCACAGGCTAATTTTTGCAAATTAGGTTTT
TCTCACCAGGTATAGAAATTAGTTTTCTAACTTACTAAACATTTATTAGA
AATGAATCCAACAGTAGTTAAATTGCATAATTGCATGCGCTTAACCTATC
TGTGTCTAACTTTGAGGTTTTTTTTCCTGTTGAAACTCCCTTATACCATC
CTTAATCATATGTAAGAAAACATTGTCATTAGTTTTCAACATATTTATAA
AGAAGATAATGAGCTGTGCTCAGATCCACAGTGCCTCATATAGATATTTT
TTTACATTGTTTACCTTTTGTTCTCTCCCCCACTTGATCTCTTACACGCT
GTGTAGTGCCCTAAGACATGCCTGTTTCTTCAACCCTTACCCTGACTGCC
ACCCTTTACCCTTACCCGTGTGTTAGGTAAGCAGGTGTTCATGTACATGT
GTGCATACATGCAGAGATCCCAGGAGTCAGCCTTAGGATTCTCTAATCAA
GTGTTATCCGCCTTTTTGCTTTCTTTTTAAATTATCTTTATTTTATTTTA
GTTTAGTTTATGTATATGAATGTTTTGCCTGCATGTGTGTATTTGTACCA
CCTGGGTGCTCTGGGCCCCTGGGAGGGTGTTAGATCCCCTGGAACAGACA
GTTGTCAGACACCAATGGGTAGGTGCTGGGATTTGAACCCAAGTTCTCTG
GAAAAGCAGCCAGTACTTCTAACCACTGAGCCATCTCTCCCCAAATCCTC
CTTGATCTTTGAGACATCTCTCTCTCTTTCTCTCTGGGACCTAGGGCTTT
CCAGTTAGGCTAGGCAGACTGGTCAGCGAGCTCCAGAGATCCACCTGGAT
CTGCCTCCACAGCTCGGGCTGTAAGCACGTGCCAGCGTGCCCCGCTCTTT
TTCATGACCATCAGATTTGCTAGGAAGGCAAGCGCCTTACAGACTAGTCC
TTCTTTCCGATCTAAGGAGTGCTCCTTTCTGAGAAAGAAACTAAGCACTT
GGCAGAGATTGAGAGGAAATTATTTTTGAGTAGAAGATGTAAAGTTTTTT
TGAGATTTACAGTAACTGTTTCTAAATGTACGTAAGGGAGTAGGTGGGAA
GGACGGAGGGCTTATGTATATTATTTCTAAAACTTCAGGTTTTACTAGTC
ATAACTAAAACATCTAGAATTTACTGCCTGTAGTTTAACAAAGTTGCCCG
TTTAGAACTTCTACAAATCCTTAAACCCCTCCGCATTCAAACGGTTCAAC
TCGCTGCTTTGTTTTGTGTTTGTTTCCTCCCCTTAGCTCCCAAAACATTT
AATATTTTGTTAGACGATAGTGGGCTTTCTGACTAATTTTGAAGGATAAT
TTACATGACTCTTTTTACATTTTACTCTTTATAATTATAAGGTTTGAGCC
ACAAGTATTGTAAAGGAACTGCTTTTTGTTTTCTTATTTTTCTTAAGGAA
ATACTTTATTTTAATGGCAGTACTTTTGGATTTATAAATACTCCATGCAT
CATAGTGAGTCCTGAATTCAATCCTGAGTTAGTGTGGAAAGGAAATAAGA
GTGATAAGAAAGCGCAGCACAGATCCTGCAGCTCTGTGATAAGCCTTCGC
TCTGTGCTGGAGCTGTGGCCACCGCGCCCCCCCCCTCCGCTCCCCAACCC
CAGTAACTACTGTGTTCTCCCTGACGGGAGGGAAACAGGAACAAACACAG
TGAGTCCTTAGCACTCAGCCATGGCTTATGTGGGCTGGGGACATGCAGTG
GTGCTCGTTTGCATAGGCCACATGGCTGAGGTGCTCCACGTTTATCTTTT
AGAGTATTGATTCTCTGTTGATGCTGTGTCCTGCTGACAAACATCCCTCA
CAGGCTGGTGAGCTCTATTTCATCTTAATGCGTGCTGCACAGATAGTAGC
TCAACAAAGAATAGGGTTTGGGGGTTTGGGGTTTTGTTTTAGAGAATGCA
AATTTTTATGGGGAAAATTGAAGCCTTTTTTTTTTTAAGTTTAATAATTT
TGTTCAGAGATCTAATAGATATCCAGTGTCAGTTTCCAAAGACTGAAGTC
AGAAATGTCACCTGGATCAAAACCCATGAATTTAGATACTAGAAATAAAA
TGGAGCCAGGCACAATACACCGTGCTTAGGAGGCGGAGGCAGGAGGATCG
GAAGTTGGAGGCCACCTTAGGCTACATACTAAGACTTTGTAACAGTGCAG
CAAAGTGTGAAATCTAAGTTCTCTCATCCCCGGAGCCCACAGAAAGGGTG
TGACATGGTTCTTCTCACCGTCAGGGGACAACATGGTCCCCAGGTAGTTT
TGATTTTTCAAGTAACTTTGTTTTTAAACCGTAATGTGCCTTATGGAACC
TTACCAGATTCTGTCATCTGCTCCGGAGTTTCTGTGAAAGCTGCCGTCTC
CAGCCAGGGTCTGTCGGCTGCCCTGGGCTGGAGGCTGCTTGTAAGTTACA
ATGAAAATTGACCCTAGGTAACGAAATGTTAGTGTAACACGTACAGTATT
AATCACGGCAGTGGTTTTTGTTTTTGTCTTTGTTTTTAATACATAGACCA
AGCATCTGAAGTTCAGGTGACGATGATGCTCACCGAGAGCTGCAAGCTTC
GAGGTCTGCACCACAGGTGAGAGCGAGGCTGCGCTTCAGCACCGAGCACA
GTGCGACTCCGCACACTTACTCACTTTTTAAGAATGTTATGTCTTGTTCA
GAACTGAATTCTTTTGGAAATTCTTTATTTGTTTTCCTTCTGAGTATAAA
GGTAAATGCGTGCTCATTGAAAGCAATTTGTAAACAGCAAAGGACGAAGA
TGGTAGAGAACAGGATGTAAGCTATGTAAATAATAAATGTGCACAACTAA
GCTTTCTAAAAGAGTCTACGTATCATGTACCTGTCTCCCTTTAACAAATA
TGACAGGGTGATGCATACATTAAAGAAAATTGCTACAAAAATTTATATCT
ATGGAACACCAAGGCCAAAAATAATTAACCATCCATCCTTAGATACAATG
AGGTTAATGGTCTGCCATGTACTGTTGAGTGTGTATGCATGCCAGTGTGT
GTGTGTGTGTATGTGTGTATGTGTATGCATGCCCGTGTGTGTGTGTGTGT
GTGTGTGTGTGTGTGTGTGTAACTACCTGAGATCTTGTATCTAGAAATAG
CCATCTATGTATTTGTCTGTAGAGATATTTTATAATAAATTTAGTGTGTT
TCCAGTGTACTTTTAAAAAGGACAATGTTTTTTACCTTTAATAAAATTAA
TTTCTTTATGTAACAATAAAAAAAAAACCTGTTTCTAGGTTTTCATGTTG
GTAACTGTAAATCCCTGTCCCCATTTTAATAGGCCACTTAGTGGTTTACT
GAATGACTGTACCACGTTTTATTTAATTTATCTCTTATGTATGCTCTTAA
AATCATAGTATGATTTCACAAAATGTACCTATTGGAAGAACTTTTAACAA
CTTCTTCTAGACCAGGAATGATTGGGGACAGCAGCATCAGTATCAAGGCA
AAGTTTTTGCATGTTTGTTGACATAGTTTCTATATAGCCCGGGCTCTTCT
GGAACTCACTATTTAGACTCCACTGTCTCTGCCACCCGCGTGCTGGTATT
AAAGGCACTTTCCACCAAGCTGAGCTGGCAGTCGGGGTATGTTTGTTGGT
TTGTTTGAAGCATCATATAGAGAGGTCTAGGAGGTGGTCATGTCTCCGAC
CCAGAGTTGGAGGGGTACAGACAAGTAAATACCTGGAGCTCATTGGGCAG
CCTAGCTGAACCATTGTGTTCCAGGCCAGACAGAGACCAAAGTGGATAAC
AGTTAAGGAAGGCACATGATGTTGACCTGTGACTTCTATGCACATGCTTA
GACTGTACATACTTATATATTCCTACATGTATATACACCACACACAAGTA
TTGTGTAGACTCTGCTTAGTTTGTATGACTACTGAGAGTTTCACATATCT
GAAAAGTGAACCCTGACTCTGTGTGTTAGAAGGCTCTGTGGGCTTCTGGG
AAGGCCTTGTGATGTGTGCAGAGGGCACCATTGGCTTCCATTTGGACTTG
GGCTGTTACTGAGCTCTGATAAAAGTATGAATACACAGAAATTCCTTCTT
TGCATTTTGTTTTTACTTTGGGTTTTGATGGCCTAAAAAGATGACAGCCA
CATGAAAATGAGTTCAGTGGTAATGAAAACGAGACAGATATTTGGCATTG
TGGTGGTGTAAAGAAAATAAGCCAAGAGGAGAAGACAACTGTTTGGACTG
AGATTAAACACAGCATAATTCTTGGCTTCTGATCAGCTGAGATGAAGGTG
ACATTAAAGTCTCTAAGTCTCAGAAGCAGGGGGAAGAGAAAGCGCGTTGT
TAATAAGCTCTTTTAGTCTCAGATCCCAAGACGGAGGTTTGCATTAGGTT
CATTATTTAATGTAGATTCTGATAATATAAAAGTAAATATTCATTTTCTA
AAACTCCATTGAAAAACGAGGCTTTTGAAGAAAAAGTTGAACGCAATATT
GAGAAACAGTGAGGGTATTCCTTGGAAGAGTTGAGTAATATAACTCAAGA
ATGTTGCCTTCAATTGGCCAGATTCAGCCCCAAGAGTAGAAGTCCTCACT
TGTTGGGAAATAGACAGCACCCCCCCCCCCCGGCTATATTTGCTTTAAGA
AAGGAAGGAAGGAAAGGAAGAAAGAAAAAGAGAGGGAGGGAAGAAAGAAA
CTAAGTTATATTTGCTAAAAGCCAGAAACACGTCTGGAGCTTTTAGACCC
TTTTTAACAGTGTTGTGAGTGAGTGCTTGATGCTGACGCAGACTCTAGAG
GAAGCACCTTCTGGCTGATCACTTATGCTCCCGGCCAGTTCCCTGACCCT
GTGAAGCTGTAACCGGCAGGACAGAAGCACGTGGCAGGAGTTAATGCAGA
CAAAGCCACAGACTTTTCCCAAGTAGGAGCTTTAGATCTACCCTAGCCCT
GCGCATCCCTTGGCTGAGCAACCTTCCAGGCAGGCACTTACGTTCTCTCA
TGCAGCTTTAATCTGCACTGCTTCACAGCATCCCTCCATGATGGGCTAGC
AGTCTCAGACACCCCACAGAAGGAGAGGCGAAGCAAGTTGGTCAGAGTTC
ATGTCATCTCGGCTGTGAAGTGACGTTAAGATCCCTAGTTGTGGCAGTAA
AGCTGCTGGTATGCTCTATTCCCTGTAGTCCTCCATCTGACCACACGCAG
TTAATGGAATACTCAAGGCTGTGCGATTGCTTGCTTCAATTTCATTCACT
AACTGCCCGTTTGTACTTAGGATTCAGGTTGGTGTAGAATAATAATAATA
ATAAAAAAGGTCATCTGGTTTTTTGGTTTTTTTAAAAAAGATTTATTTAT
TTATTTCATGTGTATGAGTACACTGTAGGTGTCTTCAGACACTCCAGAAG
AGGGCATCAGATCTCATTACAGATGGTTGTGAGCCACCATGTGGTTGCTG
GGACTTGAACTCAGGACCTCTGGAAGAGCAGTCAGTGCTCTTAACCGCTG
AGCCTTCTCTCTAGCTCAAGAGTAATCTTAAGATCAGTACCATAGAGTTT
ATTGTGCAGGCTCAGTGCACTCAGCAAGAAATGTCACCTGTTTTCAGGTG
TCACCTTTTCATTGGTTGTAGTCTGTGAGTCAGAAGGTTTGCTTTGTGTT
TTTACATTCTGTGATACAGGTTAAGAATCCCTGACACGTTTGAAAGCATC
TTGACATTCTAATTTTTTTGTTAGCTTTGGTTTTTCTACTGGAACTTGTA
AGTTTTCTCATATTGAAATGCTTGCATAAATTAAAAATAAACTGCTTTCA
TTACTTCATGTCTGAAAACCCCTAAGCCGTTTTTTGTTTTTTTGTGTTTT
TTTGTGGTGTTTTGGTTTTTTTGTTTTGTTTTGTTTTGTTTTTGTGGTTT
GAAGTCCCCATTGGCCCAGAATGCCCAGTGATGGCTGGCCCTTGTTAATG
CATAATGACAGGTAGCTTTAGGGTTGTAAGCATGCTCAGCATGGGAGGCA
GTTAGGCCCAGCCCCGAAGCCCTGCAGCCCCACCTCGCCTCCGCCTTCTC
ACCTCTCCTTTACCTCCATCTGTCCATTCTTCGATATCTCAGACCTTTCT
GTTTGTCCTCCTTTCCTTTGTAAAATGGGCAGTGAAGAACAGTCATTTAT
TCTTGGAAACATTTTCATAAAGCTTTTTACTATTTCCAGAGTTTTTCCAG
GTTTGGTTTTTGTGTATATGGGTGTTTTGCATGTATGTGTGTATGTCTGT
GCACCACATTATGCGGGGCCTGAGGGGGCAGACGAGGCATTGGGTCCCCT
GAGACTGTACTTAGAGTCAATTGTGAGGCACCATATGAGTTCTGGGAATC
AAACCTGGTCCCTCTGCAAGAGCAGCCAGTGTTCTTAACTACTTAACCAC
AAGAGTAAACATTTTGGTTTTATTTATCTTATTTGTTGTGTCTGGACAAA
TGCCATTAATTCTGCTAAGCAATTTCAGTCATGGGTGAAGGGACAGAGAT
AATCCTTTAGGGTTAAGGAAGTGGCCAGCTCACCTGCTTATCCTGAAGCA
GGGTTAGCCCTGATTGATCCTCTAGGTGAAGCTCGAATTGGAGTGAGTGT
GTGTGTCTGTGTGTGTGTCTGTGTGTGTGTCTGTGTGTGTGCTTCTGGAA
AGGAGGGGCTCTGCAGTCCTTCCTGCATTCTCCTTTATCCTGGGAAGGAA
ATGTCCAGCAGCCCAGGGGAAAGCACAGGGGCGTAGAATCTGATGACACC
TAAATTTCCTTCTCTTTATACTTGATCTTTGTCCATAGGTTCCTAACCAC
TCTTCAGCTGTAACGCTAAAGTCTTTGATGTGTCCGTCCAGTGCCTCTTA
GAGACTGATGCTTCTGGCAATGGGGACACTCTTAGGACACAAAGGCCAAG
CAGAAACTTACTGTCATCTCACAAGTCAGAGACAGCGCCTCTTGGTACAT
TTCTGCAGCTTCCCCTTTGTCTTTGTGGTTGTCCTGTGAATGTGTGGGTT
GTGCCTCAGTTTCTTTGAGTTCTTTTCATTTTTTTAAAGATATTTATTTA
TTATATGTAAGTACACTGTAGCTGTCTTCAGACACCCCAGAAGAGGGCGT
CAGATCTCATTATGGATGGTTGTGAGCCACCATGTGGTTGCTGGGATTTG
AACTCAGGACCTCTGGAAGAACAGTCATTGCTCTTAACCGCTCAGCCATC
TCTCCAGCCCGCTCTTTTCATTTTTTGATCGTTCAGTTGTAAGGTGTTAC
TTTGTCATTCTTGGGCAACTTTTCACTGTTGATATCCTATTGACTTCTCT
TGTTAATGCACCTTTTTATGTTTCATATTAATCTTTTAAAAAACTTTTTG
ACATTGGTGTTCTGCCTCCAAGTGTGTCTGTGTGAGGGTGTCAGATTCCC
TAGAACTGGGGTCACAGACTGCCATGTGGGTGCTAGAACTTGAACTTGGG
TCCTTTAGAAGAGCAGCCAGTGCTCTTAACCCCCAAGCCACCTCTCTAGC
CCCCATGTACTCATTCTTTATGAAGCCATAAAGAACTAATAAATAGTGCT
TTTAGGGTATTGTTATGTATGTGTTTCAAAAATGCATTAAATGTAACCAC
ACAGGAGGTGGCACTGAGTATGTAAATTGAGTCTATGTTATTTCTGGCTT
AATAGAGAGGAGGTAATTATTTAAATACTTACAACCTTGGGGAAAGTGAG
TTATTTTCATATATCAGCTGGAGTGTCATTACACAGGAGGATGGGACGTG
TGTGTGTGTGTGTGTGTGTGTGTGTGTGTATATGAGTGCCATGAGAATTA
AAGTATGCAAGATTGTTCAGTGCATTCTTATTTATTGTGTACATAAGAAT
TGTTTGAAATTCACATGTTACAAGTTTGAAAACTAAGGCCAAGTGGGGGA
GGGGAGCAGGGCCCCCATGCACTCCCATATCCACTCTCACAAGCATGCAC
AAACACACACACACACACACACACACACAATCACTCAGATAGTGAATCTT
GTTTACATACACACACACACACACACACACACAGAGTGAATCTTGTTTTC
AAAACTCAGGTTCCAAATTCTACTGCAAGCATTTGACTTTGTGACAGTTT
CAACCTGTTGGAGACTTTTGATGGTCCCGTTTTATTTGCAGCGGGGATGG
GGCCTTTTTGATTTCCAGCGTGACAGTAAAGTCGGTGGGACAGCGTGATG
ATGAGCTCCGGGCCAAGCTGGCCAAGCAGCCATCAGCTGTCTGCGCCTGG
CCTTTAGGGTGGGGATTAACATGGCCGTCAGCAAATCTAATACAAAGGAA
TTCATTCTGGGTAGTCATTTTTATTCTACAAAGAAAGCTCATACTTATGA
GGACTTTTCACATCTGGTTTAAGAAGTAGGCCATTTGTAAATAAATATTT
TAATGATAATCTTTTTAAGTGTGTTTGGAATTTCATTTTGCTTTCGATTA
TCTTTATTACTTTTTATTTAAGATAAATCAGTAAGGTTTTAGATTTCACT
TGCATTTTTCCAAATCTCTTATTATTTTCTAGAAACCTCCTTCCTATTAC
TCATGTGTGCATAGAAGAAGGAGAAAAGCCCATGGTGGTATTGCCATACA
TGAATTGGGGGAATCTTAAATTATTTCTTCGGCAGTGCAAATTAGTAGAA
GCCAATAATCCACAGGTGAGAAAATTTCCCTAAATATGAAAAATTCCTAA
TGGTTTTGCAAGTAGATATTAATAACCACACACATAGTGTCTAAAGATTA
AAAAAAAAAAAGACCTCAGAATGAACCAGGAGATATTTATAAGCTGTCGA
TTTAGAGGACCGTGAAGATGGCCTGTGGCTTCCCAGTGGAGCACTCTTGG
CCCATGCTGTTTCTCATTGTTCGCCACACCTTCATTCATAAATCACCTCT
TATGTCCTATGACAGCATCTCAAAGTCTCTTCCGGAGTAACTTCTGAAGA
CGGCCTAGGATTTCCTTTCTTGGAATAGAAATCATAGCAGAGCGGTCTAA
CCATATGGTGCCAAGGGCACTGAAGGTTGGAGGTCAGGATCGTGGGGGAT
AATCAGGAATATCCTTAATGTGCCTGACTGTGAGACGCCACGGTTTAAGT
TTCTCTCTTGTCACTACCGACGTGCTGTGGTAGTGATCAGAGAGTCTGTT
GGGTGCTTTGCTGTCTGCTATATTTTCTGTTCTTGTTAAATTGATTTTAA
GACTTAAAATAGCATACTTCTTGTAGTTAATAAGAAGAACAAACTCAGAT
CTGCACTGAGTATTTGACTCTTAATGTATATGATATGTCGTTTAAGCTAA
AAGACTAAAGCTCTGGTTAGAACCATGTAGTTAGAGGTCGTGGTCTGTGG
GTGTCACCAGGAGAGGAACTTCCCTGCCCAGCCTGCAGTGCCGGCGGGCA
TCTCGAGGAGCGTGTCTGCAGAGAGACTGGTTTTTGGTAGAATGCTGCCC
CCACCCCAGGGTGGTGGTGGTGGTGGTGGTGATAATCTGATAAGACCTAC
TACTACGAAAGAAAAGAGCCAGTCACTAGAGAGATACATGAAAATGATAA
GTGTCATGGATAAAGTCTCATCGGTGGTAAATCCTGCTACCCAACAGGGG
CTTTTGTAATGGATGAACAGTATTCCGTGCTGCCAGAGCACATCTTGGTT
GAGAAATAGGTTTTCAAAATCTCAGTAAGTAGGTCCAAGGGAGTGTTATG
GGGTGGGACTGTAGACTCAGGTAATCAGATCCCAAACTAGTTCTGCAGTA
TCTACAGACTGTGTCATTTCTTTTCCTCTGTTACCACAGGCAATTTCCCA
GCAAGATCTGGTCCATATGGCTATTCAGATTGCCTGCGGGATGAGCTACC
TGGCGAGGAGAGAAGTGATCCATAGAGACCTGGCTGCTAGGAACTGTGTG
TAGGTGTCCGCCGCTCCCTGGGCTTGCCCTCTGTCTGGGAGTCCCGGGGC
ACACAGACTGTTTGTGGTGATGCTGCATCTTAACACCCTGCTACCTTCTA
TGTTCATGTCTCTCTCTTCAGCATCGACGACACTCTTCAAGTCAAGATCA
CAGACAATGCCCTTTCCAGAGACTTGTTTCCTATGGACTACCACTGCCTA
GGGGACAACGAGAACAGGCCAGTGAGATGGATGGCTCTGGAAAGTCTGGT
TAATAATGAGTTCTCTAGTGCTAGTGACGTGGTAAGTACTGGAGCCCAGG
TCAACAGCATGTAGAGAAAAGCTTTCTGTTTCACTACAGTCAGTGTTTTG
TTCTTTTAAAAATCTTGGTGCTGTTCCTTGAAATTTTCATCCAGAGAGCC
TGTGTACTTAGCTCCCTCTTGGCCCACTTAAAGCAGAGCACCGGCCCAGA
TCCTGTGTTCTTGCTCACACCAGCTGAGGCAGCACCATTCCCACTGAGGG
GCGCTGAGGTTAGGGAGCGGGCGGCCACTATCATCTCCTTGCACAAGTCT
CAGGATGCCTGAGTGGCTACTAAAGGCAGAATGGTTGCTTTCTGAGCATG
CTCTCTTCTCAGTCTGCAGCCTCTCTCATCTGCAGTCCTGACACTGTTCC
TGTTAGGTGTCAGCGTAGTTCTTTCTCCTCTTCCAGAGCACAGAGTTGAG
CCCTTCTGCTCAGTGATGTGCTTCCAGAAGCCGCATCTACTCGTCCGTTG
TAAGGTTCTGTCCCGCTACTTTTTATTCTAGTCTAGATCATAATCAGCCC
AGACTTGGAGGCGCGGGCCTATCGTTCCAGACCCACCTAGGGTACATAGT
GACTGTGTATCAAGAAAGAATGAAAAAGTAATATGATTTTTGTTTGTTTT
GTTTTTATCTCTTGACTGTTGCACACTGTAGCTGTGTATTTGGAAATTAG
ATTAAAAAGTTTGGCTATTAAGGTCCCTAAGTCATCATTTGACAATACTA
CATTACTTGTAAAATAATTGGGATTTGATCTCATGTTTCAACATCTAAGA
CCTGGGTTGATTGTGTTTGGGCGTCTGGCTTATTTTATTATTCAGAGCTG
CCTTTCCATTTCGGCTTGTATGCTTCACACGTCTCCCTTTAATAGTGGGC
TACTGACACAGCTCCTACTCGTTACTTACATTGATTAGTGCACATGCTTT
CCCCCCGTGTATTGATTTTGCTGGCTCTATAACAAATTGCTCAGGGCTCA
GATATAAATGGACTAGACATTATAAGTGTATATCATGCCTTATAGTTTTC
ATAATTGTTATAATTGTATTCAATTTATATCTGAGAGGAAAAAGAGCCTT
TTGTTGGACTAAAAAGGGGAGTATCGTTGAGGTTTGGCCTTTTGCTATGT
ACTGTGATGCTAAATATCAGCTCCCAAGGCCTGCTGGACCTCAAGGACTA
GAGAATCTACACAGAGAACCGACTGACAACGCTGTGGCCTTGCCCCCAAG
TCATCCCTGATTGGTGAATAAGATGCCTACAGCCTGTAGCTGGACAGGAT
TGAGATGGGCAGGGCTCGGGGTTCCCAAGCTTGGGGTTGAGAAAAGGGAG
GAGGAGGGAAGAAGGAAGGAGCCATGAATTAGGTGAGTCAGTCCTAAAAG
GACAACCATGAGGACTGGCAGTGAAGTTACGGGCAGCCCAGATGGAGCAT
GGCAAGTGATAACTCCGGGTTACTAATGGGGAAATAGATTCTAGTAGTGT
AGAGGATAGATAGCTGCCCAACTCTAGTGCTGATTAAGTCTTGTTATGAT
GATAAAAGTTTCGTGTATTTTATCTGGGAACTGAATGATCAAAGGTGGGG
TAGAAACCCTGACTTGAGATTAAATAATTACAGCAATATTTTATTGCTAA
ATTCCTTTGGCATAACAATAGTACTTGGTTTTCTTATAGGTCTGTGGTCT
ATTTAAGCTAGGTTCTTGGCCACCCAAGCAGTGTCAGGCATGGGTTTTGT
CTCATGGAGTGGGCCTTAAATCCTGTCACTAGAGGTGTCACTTGGTGGAG
AGATGTCTAGTTGGAGGATTCTCTCCTCCATTATTTGGTGACTCCATTTA
GATTTCTTTCATATATGTATGTATTTTAAGAAATCTCTGTTGTAGGTTTC
CATGTGACTCCTCAAATGGCCCTCCTTCATTTTGTTTTGATCATTGTGAG
TCCAGTACTGGACATCTTAACATAATTCTCTAAATTTAGAATACCAACTC
CCAGTTCAACAAAGTTCTCCCTCATTACAGCCCATGCTGGTCTTGGGCAT
GAAATCTTGCCTCAGCCTTCTAAGTGCTAGGATTACAGGCATGTGTTTTG
TCTTATTCCAAGTTGAATTGAGCTTAGCATATTATTGTAAGAATGTCCCT
TCATTAAATTTAACGTGGCTAACTCCTAAAAATGATCAGATTTTTCCCTT
AAATTCTTCCAGACGCATTTCATATGCATAAATACTCCCTATAAGTATCT
TTTGCCTTGAATACTTGGGACCAAAAGAAATATTTATGTCTTTTCCTGTG
ACTATGATAGGCTGTTAGTTTAAAATTCTGCCATCAAGTTGGGGCATTGC
ATATTGTTTTAAATTCTTAAAGGTTATTGTTACATTCTAACATTGGGGTT
AAAAATGCTAACATGTTGAACACATGAACACATGTTGACTTTGCTCTCTT
TGGGTGGAGGTGGGATTCGTATTCATTCTCTCTTCTCTCTCTCTTTTCTC
TCTTTTCTCTCTCTCTTCTCTCTCTCTCTCTCTTTTTCTCTCCCTCTCTC
TCTCTCTCTCTCTCTCTCTCTCTCCCTCTCCCTCTCTCTCTCTCTCTCTC
TCTCTCTCTCTCTCTCTCTCTCTCTCTTCTAGGCACAGTTTCTCTGTTTA
ACCCTGGCTGTCCTTGAACTTGCCCTGTAGACCAGGCTGGTCTTGAACTT
AAGGAGCCAAGCACCTCTATCTCCTGAGCGCTAGGAGGGGTTGTAAAGGT
TGTACACTGAGGTTGAAACTCAGTGTCATTTCTTAAGGGTGCTGAACAGT
TTTCACCATCAGGTACTAAGAACTGTAACCCTGCTCCCACTGAATCTGCA
CATGGGAAGTGCACACTTGCAGGTGTGTAAGTGCATACTTGCAGGTGTAG
CTCAGGACCCTTTTTTCTCCTTGAAAGAACCTTATAGTTCTGCAGTTTTG
TAGTTAAGGAGTCTTCATGATTTGCTTAGAAACACACTGGTTGGTTGTTT
TGTCATAATAGTAACGCATTGCCACTTTGGGCTTTGTTTTTGTAATTCTA
TCTGGAAACATCCAATATGTTGGTACATTAAGATTCTAATAACGTTAACA
TCAGCTTTTAACTGTCAGCTTAGGAAGTACACACAACCAGATCCAGCTAG
TTACGAATGTCTAGTATGCCAAGATGGGACCTCACATAGGCACTCTGAAG
ACGTCTGGGTATTGTTCTTGTTCTATGTTTTTGCCAAATGTAGGCACAAC
TTCAGATGTCTGTTACGACTTTTTTCCCTTTATTTGAAAAAATACTTTTT
GATTGATGCCTCCTTTGAATTATTTAGATAATTATAGTAGCTAACACAGT
TCAGCTGTCAAGAGTCTGCCACCGATTGAGTGGTGAATGCAATCAGGAAA
GCACAGTTGAGAGTTTCATGTTGTTTTTCCTCGTCTTTGTGGTACTACAT
TGTGTTTAAAAAGCATTTTCTTGGGAAAAACAAATCAAAGAAATGACTTC
CATGCTAATCTTATCAGCATGGTTTATGGCACTCGGGGGATCCTTTTTAA
GGCATGTGAATAGTTACTAGGCCATAGAGCAAATCAAATGCCCCCCATGT
GCCTGCTGTTTCTTTCTAGACACCGGTGGACATTGTCCTGGGAGCAGAGT
CTGCAGTCATTCAGAGCCTGCATCTGCAGCATGCTCCATCTTGCTCCAGT
CCGCCAAGTGCTCTAGCGGCCATCGCCAGATACTGAGTAGGCTCAGTCAG
GAGACTCATGTACAGCGGGTGGTGTCTAAGGGAAAGCTGGAGTTTCTGAA
AGACGCTTCTTATTTTCAAAAGCAGAGAACTCTTTCTGTCTCATATTTTC
CATTACTAATTTTAGGTAGGGCTTAGAAGATCCTCAGTAGTTAGTTGTGT
GTTTCCTTCATGGTTGCAGATTTTATACACCAACAATCTTAGACCTATTA
TTTCAGTATCAAATTCACATTAAGAGAATTAGTGTAGGGACAGAAGAACA
ATGTAGACATGAAAGGATCAGTTTAGACCATGGTTTAGGAAATAGAGATT
TAAGATTTAATGTTCTTGATGTTAGGGTCCTGCTTCATTGTATTGCTCTA
GCGTTGGTTGTCCTGGCGTTTCTTAAGAACGAGCAGTACAGGGATCACTC
TAAGAACAGTTGCTGTATTTCCAGACGTGGTCGACTCCCCTGGCAGTGTT
GTCTGCAGTACTGCTCTCTCAGGATCTCACGCGTCTCTGAGCATCTCTCC
TCTGGAGCGCTTTGGAGACGTGCTCCTACTCTCTGCTCCTACTGTCTCCC
TTAGAAGACCCCAGGATTCCGATGAAGCCCTGTGCGAGTGTCTGCTGGCG
GAGAAAGTGGCGTGAGCAGCCAGTTCTGTGATAGCCGTCGGTTGCGTGTA
GGTCTGCAGGTGTCTAAGGATTGGTCACACCAGCAGCTGCAGATGCTGGC
TTTTGAGGAAGGCGGATAGACCCAGTAGCTCAGGACACAGGCTGCATTCC
TCCAGCTCTGCAGCCTGGGGAGTCCAGCATGAGGGCACTGATCAGTGTCC
TGCTTTCTGCTATTTCTTCACATGGCAGAGGGAAGAGTGGGGTTTGCTGA
GGTCTTTATAAGACTTTATAAGCTCCCATTCCTGGGAGCTCCACCTTTAT
GGTGTTAACTCCTCCCATAGCCCCACCCGCTAGCTTTATCACACTGGGCA
TCGGGAGTTCAAAATGTACACATGGTGGAGGCATGGTGGAGTCTCTCAAG
TTCTGCTGCTGGGCCTCCTAATTCACACCCCTCATGTAGTAGATCGCTTT
CATTCCTTCCTGACGTTCCTTCCTCATTTGCCTAAAATCAGTCTCATCAG
ATGTGAGTGAGCCTCAAGGTATGATTTATACTCAGGTGAATTTGTTTTCA
GCTCTAAGTTTAGGAAAGGAAGCAAGTTACCGACTTCCAGAAACGCAGCG
GTGGGACGGGTTCAAGTTGGTGCATCTGTCTCCAAAAGCGTAAAACAGGA
AGGGAAAGAAACCCAACAAACACAGTGCACCTTAGACTCAAGCAGGCCTC
TAGCTCAGTGCCTTGCCATCCAGGACCCTGGTCCCTTCATCAACAGCTGC
CCATGAAAGTTCATTTGTGGCTCTCCACTGGGGTCCCAGCCAGGCAGGGC
AGAGCATGAGAGTATCCCGTCACACGTTTCCAGTGAGTGCTAAGGTTTCG
TCTCAGTTAACTGGCTGGGGCGATTGCTCTGCTGAAGCCTGTCTGGCATT
TTAAATTCCCAGAGGACTCACACAGAAGCTGCCCCATTCAGTGACCTCAC
CCTCATACGTTAAGATGAAAACAATTGTGTACTTTCTGACAAACCATGCC
AGTATATATTGTTCATTAAAAAAAAAAAAAAAAACCTAGTTTTTGTCCTT
CATTTTAAATAACAAGGTCAGAAGCTATGTCTCTTGGCGCATGTCTGTAG
TCTCAGCACTTTAGGAAGTTGGGGAAGGGAAGTTGTTGGAGTCTCAGGCC
AGCCTGGGTTACAGAGAGAGACCTGCCCCCACCAGTGCCACCACCACCAC
TCGCAAAATAGAGGCTAGCATTCATCTGCACCTGTTACTTATACCTCCTT
CTGTCAAAGATGGCCTGATGCTCACTGGTGAAAGGACAGCAGATTCTGAA
AGGCTTTGCTATTCTGGCAATGCTGCCCCTGAGCACATGGATAGTGGGGG
AACTGTGTTCAACCCCCACCCCCATTCTCCAAATGACAGGTGGGAAATTC
TAACCCCTGAAACTAAGACTATAACTTTAAGAACACCTAGGACTTCCAGT
GACCAGTAGAAGCTGGAATTAGGAAGGAAGGGATCACCTTTTAGAGCAAT
ATTTAATGTCATTCCATTATGGATTTTTTGTTTTGTTTTGTTTTATAGAT
TCTGTTAAAAATGTGGCTATTGTTCACTAATATAGGTTGAATAGCCTTCG
TCCAAAATGCTTGGGTTTTTTTCCCTAGACTTAATACATACATACATACA
TACATACATACATACATATGCTGTATAAATGGGACTCAAATCTAAACACA
GGTCTGTTTTGTGTAATATTTTTAATGATTTTGTGCATGAAACAGTTTCA
TGGCATGGAAATTTCTTTATTGTAGTGTCAGCTCTATAACTTAGATTTTG
GTGTGTTTTGCATTAGGGATATTCAACCTGTGAAAGGCTTTTTTAAAAAC
AATCTGTGTATTTTACACAGTGTCTCCAGATTTTGTTCGTACTGAAACAG
TAACCTCCAGCTTTGTGCTCTGGGTGTGGATGTGCTGTGTGCCCCACCCA
GCTCTGCCCTTTCACTCACTGAGATGTGTGCTTGGCCAGCCATAGGTTTC
ACCTGCTTCCTCGCCTGGTAACCTAAGCTGCCAGCGTGAGGTTCAAGGGT
TTGTTGTGAAAACTGAATGTGATTGGAGGCTCATCGCAAAGCACTGGTGA
GAACCCTTTAGCTCCTACACAGGTGCTGCCCCCTCTCCCCAGCGTTGACG
TGAACTCAGGTTCACAGGTGGCAGCAGGTTGTCCCCACCGTGCCCTGGAC
AGCAGCATAGCCGCAGCTCTGGGTGGTGGTGGAGCCTGCCTTCCACTGCT
CGTTCTTCTCATGAAGGGAAGGCCCGAGTCAGCCGGCCGGGCCTTGCAGT
GCCTCTGCTTGGGCTCTGCGCTTACTGTTCATCCCCTTACTGGTTTTAGG
TAACTCTGACTTTTACTCAGCTGGACAGTATCTTTTCAGGGTGTTCCTAA
AAGTTGTAAATGGTGACAACAACACATTGTCTCTCTGTGCATGCTAGGGT
TCCATCCCTCGCTCTGCAAAATAAGCAGATCAGAAACCCATGACTGCTTC
TATGTTATGTAATCTGCATGTCTCGCTTACTGAGGGAATCTTCTGTCCAT
CTAGGTTGTTCTCCATTTCCCACCGTAATTCGTTAACTTAGGGGTAGCAT
GGTGAATAGCCAGTGATAGAAGTGGTTTCTTTGAACGGACCTAGTTACTT
AGACCAAATGATACAAATGTTAACATTGAAGAATTAATGCATTTTAATGC
TTTCTTTCCTACACCAGCTGGAGAAACTAGCCAGTATGGTAGCTTTTGTT
TTATGAGCAGTACTCACTTTATTTAGGAGTTTGTTCAGTTGCTATTTGTG
ACCTGTCTGTAGTCACCAGCGCCCAGTTTTAGAATGTTCCCCTCATTGTG
CTGCTGTCCTCTCCTAGTGGGCCTTTGGAGTGACGCTGTGGGAGCTCATG
ACTCTGGGCCAGACGCCCTACGTGGACATCGACCCCTTTGAGATGGCCGC
TTACCTGAAAGATGGTTACCGAATAGCCCAGCCAATCAACTGCCCTGATG
AACTGTGAGTTTTTTGGATCTCAGACATGAGCCTTGGTGCATTTACTATG
TTACTATAAAGCAGGAAAGCACGTAAGATACTCCTTCAGAGTAAAGAAAA
AAGTAGAGGACAGAACTCAGTGCTGACCTCTGCTCTCCACAGACATGCAC
AGACACATGCATACAACCACACAGACATGCACATAGACTACATGACAGTA
AACACAGACAGAGACAGACACCTTTCTCATCCTGGCCTTGCCTTCCTTCC
TTGCCTCCATCATGGCGGTGGGGTACACAGGGCCTGGTTGGGATGGTGGC
ACAGCAATGTGTTGTCTACAGAGGCCCTAAAAGGTTTCCCTGCCAGTTTT
AGATAGTAGCTTTGCTGTAGATCCAGGAGTCTTAATTTCAGGTAACACTT
CTTCCTAGTTCTTCCTCAACAGCGTCCAGGACAACGCAGCCTGTTATTCT
GACTGTTCTGTGTATTTACACAAAGCTCTGAACTTTCTGAGTATTGTATT
CTCATAAAGAACTGAAGATGGTTGTGTGTAATCCAAAGAACTTAACTTCC
TTTAATCCTGAAGCTGCTAACAGTACAGCTAAGCGATTGCTCATGGCTGT
CCTCCCCAGCAGCCCATTAAACAGAGCACATAACTGGCAGGACGCTGACG
GAGGCCTGACACGTTTCCATGTCACTGCAGGTTTGCTGTGATGGCCTGTT
GCTGGGCCTTGGACCCTGAGGAGAGGCCTAAGTTCCAGCAGCTGGTCCAG
TGCCTCACAGAGTTCCACGCTGCCCTGGGAGCCTACGTCTGACTTCTCTC
CCAGCTCCGCCACTCAGAAGAAAGTGCCTGTCTGTCACGGATGCCCCTCG
TGCAGCGCAGTGCCTGCAGGGGCACACTGTCTCCAGATCACCCAGCCTTA
GCAGTGCTTCCAAACCTCAGCTTTTAACGATGACGTAATAACGCAGAGTG
TTTTCTAGATACCACTTTTACTAGGTTGAACCAAAAGGGGTTTTGTACAT
TTTTTGGCCAAAAATTTTTTTAAAATATAGTGACTTTGGACTAGGGGGTG
CATTCTTTTAAAAAATGAATAAACAGTTTTAAAAATTATTTAGACACAGA
TATTTGGAATAGCTGTCTTAGTGCCAACTGCTTTTATTCTTAATGTTTTA
CTTCATTGAAGTAATGTAGGTGACTCACCTTTAAAGCTATTTTAATATTT
TGGTCACTACTTTTGGGAGTGGTTTGTCTTCAAAATGCGGTACTTTTCTT
AGGAAAAACAACATTACGAAGTTGTCTGGTTTGCCTTATACGAAGAAAGA
TAGTATATTAGGAAAATTGAAAAAGTAAAAAGAAAAAGAAATTACAAAGT
AAAAATAAAAAAAAAAAAACATATCGCCCCCGCATGGAAAATCGCTTGTT
TAGTGACCATGGCTCTGCTCACATTTGGGGAAGCAGGTCTGAGTTCACAT
CTCAGTCAGCTTTCCTGTGAGCTGGAAGAAGGCTGGGGCAGGCTTGTGGA
AAACAGTGGTGACCTTATTTATTTTTGCTCTCCGGGGAAGGAGAGGACAC
AGTTCCTGACAGTGACCCCTCTCTACTGCTGCGGTTCCCTCTGTGCACGC
CTGGGCGGAGCTACGCACAGAGCCGGTGCTTCTGTTGTTGTGGGTTTGGG
GGGTTTTAGTTTTGGTTTTTGGTTTAAATTGGTAATTTTTATGCTTATCT
TCAAGGCTGGCTTAAGTATAAATTTGTTTTTTTAAAACACTTGAAAAATT
AAAGGACTCATTTTATATGCTGGTATTCAAAATACTGCTCACAGTGTGTG
ACTGTTGGTCGTGTCCTGAAAGTCTTGGAGTCACATTTTATCCCCTGAGA
GTTTGACTCAGGTTCCAAAACCCTAACAGAAGAACAGCTGACTCTGCTCA
GCCGCCAGGGCCTGTTAAGAAGTTGGAGTTACTCCTACAAGGACTTATCA
TGGAGAGAGTCCACAAATACATGTATGTAGTTACACACAGGTTTGGTCTA
CCTAAGGGATTGTCACCTGGGCCTGTGAAGTGACTGGGCCTGCAGCTACT
GCCTCTGTGTCTGTCCTCTCAGGGATGTGAGGGAGAACATGGGTCTGTTC
TATTAAAATAAGTCTTGTGAATAAAGAGAGTATCTGAA

[0113] An exemplary DNA sequence of the Ryk gene in human is provided below.

(SEQ ID NO: 19)

CGGCTCGGGGCTGTGAGCGGCTCGGGGCCGGGGGTGGGCGGCGGTGCGGC
GGGCGGCCGACGCTCCTCTTCGGCGGCGGCGGCGGCGGCCATGCGTGGGG
CGGCGCGGCTGGGGCGGCCGGGCCGGAGTTGCCTCCCGGGGGCCCGCGGC
CTGAGGGCCCCGCCGCCGCCGCCGCTGCTGCTTCTGCTTGCGCTGTTGCC
GCTGCTGCCCGCGCCTGGCGCTGCCGCCGCCCCCGCCCCGCGGCCCCCGG
AGCTGCAGTCGGCTTCCGCGGGGCCCAGCGTGAGTCTCTACCTGAGCGAG
GACGAGGTGCGCCGGCTGATCGGTCTTGATGCAGAACTTTATTATGTGAG
AAATGACCTTATTAGTCACTACGCTCTATCCTTTAGTCTGTTAGTACCCA
GTGAGACAAATTTCCTGCACTTCACCTGGCATGCGAAGTCCAAGGTTGAA
TATAAGCTGGGATTCCAAGTGGACAATGTTTTGGCAATGGATATGCCCCA
GGTCAACATTTCTGTTCAGGGGGAAGTTCCACGCACTTTATCAGTGTTTC
GGGTAGAGCTTTCCTGTACTGGCAAAGTAGATTCTGAAGTTATGATACTA
ATGCAGCTCAACTTGACAGTAAATTCTTCAAAAAATTTTACCGTCTTAAA
TTTTAAACGAAGGAAAATGTGCTACAAAAAACTTGAAGAAGTAAAAACTT
CAGCCTTGGACAAAAACACTAGCAGAACTATTTATGATCCTGTACATGCA
GCTCCAACCACTTCTACGCGTGTGTTTTATATTAGTGTAGGGGTTTGTTG
TGCAGTAATATTTCTCGTAGCAATAATATTAGCTGTTTTGCACCTTCATA
GTATGAAAAGGATTGAACTGGATGACAGCATTAGTGCCAGCAGTAGTTCC
CAAGGGCTGTCTCAGCCATCCACCCAGACGACTCAGTATCTGAGAGCAGA
CACGCCCAACAATGCAACTCCTATCACCAGCTCCTTAGGTTATCCTACCT
TGCGGATAGAGAAGAACGACTTGAGAAGTGTCACTCTTTTGGAGGCCAAA
GGCAAGGTGAAGGATATAGCAATATCCAGAGAGAGGATAACTCTAAAAGA
TGTACTCCAAGAAGGTACTTTTGGGCGTATTTTCCATGGGATTTTAATAG
ATGAAAAAGATCCAAATAAAGAAAAACAAGCATTTGTCAAAACAGTTAAA
GATCAAGCTTCTGAAATTCAGGTGACAATGATGCTCACTGAAAGTTGTAA
GCTGCGAGGTCTTCATCACAGAAATCTTCTTCCTATTACTCATGTGTGTA
TAGAAGAAGGAGAAAAGCCCATGGTGATATTGCCTTACATGAATTGGGGG
AATCTTAAATTGTTTTTACGACAGTGCAAGTTAGTAGAGGCCAATAATCC
ACAGGCAATTTCTCAGCAAGACCTGGTACACATGGCTATTCAGATTGCCT
GTGGAATGAGCTACCTGGCCAGAAGGGAAGTCATCCACAAAGACCTGGCT
GCCAGGAACTGTGTCATTGATGACACACTTCAAGTTAAGATCACAGACAA
TGCCCTCTCCAGAGACTTGTTCCCCATGGACTATCACTGTCTGGGGGACA
ATGAAAACAGGCCAGTTCGTTGGATGGCTCTTGAAAGTCTGGTTAATAAC
GAGTTCTCTAGCGCTAGTGATGTGTGGGCCTTTGGAGTGACGCTGTGGGA
ACTCATGACTCTGGGCCAGACTCCCTACGTGGACATTGACCCCTTCGAGA
TGGCCGCATACCTGAAAGATGGTTACCGAATAGCCCAGCCAATCAACTGT
CCTGATGAATTATTTGCTGTGATGGCCTGTTGCTGGGCCTTAGATCCAGA
GGAGAGGCCCAAGTTTCAGCAGCTGGTACAGTGCCTAACAGAGTTTCATG
CAGCCCTGGGGGCCTACGTCTGACTCCTCTCCAATCCCACACCATCAGGA
AGAAGGTGCCTGTCGGGGCTCACTTGAAGCCTGTCAGGGATGCTTTGTAT
CTAACACAACGCCAACAGAAGCACATTTGTCTTCCAGAACACCGTGCCTT
AGAAATGCTTTAGAATCTGAACTTTTTAAGACAGACTTAATAATGTGGCA
TATTTTCTAGATATCACTTTTATTAGGTTGAACTGAAAGGGTTTTTGTAA
ATTTTTTGGCCAAAATTTTTTAAAACATACTTACTTTGGACTAGGGGTAC
ATTCTTACAAAATAAATAAACAGTTTTTAAAATTGTTTAGACACAGATAT
TTGGAATTAGCTATCTTAGTGCCAACTGCTTTTTATTTTTTTACTTCATC
AAGGTGATGTAAGTGACTCACCTTTAAAGTTTTTTTAGTGTTATTTTTTA
TCACTACTCTGGGAAATGGTTTGTCTTCAAGATGCAATACTTTTCTTAGT
AAAGGAAAAACAGCATAAAAAGATACCTGGTCTGCCTTGTACAAGAAAAG
GCAATATTAGAGGAAGAAAATTTAAAGAAAAGCTAGAGGAAAAAAAAATT
TTTTTAAAAATACTTATTAGAAGCAAACTGCCCTTGCATGGAAAACTGTT
TATTTTTTTCAGTGAAAAGGAATTCTGCTTTCGTGTTTTTGGGAAAGCAG
GAACTGAGTTCATTACATCTTTAATTTGGCAGAAATTAGCCTTTCTGTGA
ACCAGATGTGGTTTGGGGCAGATCTGTAGTAAACAATGGTGATTTTATTT
ATTTTTACTCTCTGGAAAAGGAGATAATACAATTCCAGAAAGTGAACTCA
TATTTCTAAGGTTAAGATTCCCTTTTATTGCACCTAGAATAGTGCTATGC
ACAGAGCGGGTGCTTGAGTTGTTGTCGTTTTTTGTTTGTTTTTTAAATGT
AAACTGGTAAATTTTGTGCTTATCTTCAAGGCTGGCTTAAGTATAAAATT
GTTTTTTAAACACTTGAAAAATTAAAGGATTTGTTTTATATT

[0114] Slco2a1, or solute carrier organic anion transporter family, member 2A1, encodes a prostaglandin transporter that is involved in mediating the uptake and clearance of prostaglandins in numerous tissues. The Slco2a1 cDNA sequence in Mus musculus is provided in GenBank Accession No. BC035200.1 (GI:23273774), incorporated herein by reference. The Slco2a1 amino acid sequence in Mus musculus is provided in GenBank Accession No. AAH35200.1 (GI:23273775), incorporated herein by reference. The Slco2a1 cDNA sequence in Homo sapiens is provided in GenBank Accession No. BC041140.1 (GI:26996626), incorporated herein by reference. The Slco2a1 amino acid sequence in Homo sapiens is provided in GenBank Accession No. AAH41140.2 (GI:37572262), incorporated herein by reference.

[0115] An exemplary DNA sequence of the Slco2a1 gene in Mus musculus strain C57BL/6J chromosome 9, GRCm38.p1 C57BL/6J is provided below.

NC_000075.6 (GI: 372099101: 103008489-103087849):
(SEQ ID NO: 7)
TCAGTCTCCACGTCTCGCTCCCCATAGCCCGGCTACCGCCGCTGAAGCCTGAAGCACCCAAGTCCCGCAG
AACCTGACCCCGGCCTGTCGCCACCACCTTGGCCCGGTCAGGGGACGTCGCCTCAGTCACGATGGGGCTC
CTGCCCAAGCCCGGAGCACGCCAGGGCAGCGGCACCTCCTCGGTCCCAGCCAGACGTTGCTCCCGCTCGG
TCTTCAACAACATTAAGGTGAGTAGTGTTGTGAGTAGTGTTCGTGTTCGGGGCAGGAGGGCGGCAGAGTG
GGTGACACAACCTAGGACGTCGATGAGGCCAGTCCGGGAGCTCTGGGTTGCACCCGGCTCCCTTCTCTGT
CCCCGGTGCCACATCCGTGGGGCCTGGCCCGGCGCGTGAGCGTGAGCGTGAGGGGGCGACACCTCTCTCT
CTCTCTCTCTCTCTCTCTCTCTCTCTCTCTCTCTCTCTCTCTCTCTGTGTGTGTGTGTGTGTGTGTGTGT
GTGTGTGTGTTGCGCGCATATGCTCATAGGCTCTCGTGGGGAGTAATAATCAGAACAGACGTAACTTTGT
AAAGGGGAACTGTCCTGTTCTTCCATGGAGAAAGAACACCTCCAGGGAATTCTGTTGGGTCTCTGCTGTG
GGTATGCGCTCTTCCTTAATGAGAAGGGATGCAGAGGAGTTTAGCCAGCACCTTGTGGGCAACAGGCTGT
GGGCAGCCTGAGATGCAAGTCAGAGCACAGGCACCTTGTCTCAGTGGATGGTAGAAGCCTGCATTCCTTG
CCTGGGTTTTCATCTTTGCAATAGTTGGGAGTCGCAGATTAGATTGCTACCTGGCTGCATAGCTCCCAGC
AGTTTTGAGGATTCCCCAGCTCTCCTGGTCTCAAGAAAACAGCAGGCACTCGAGGTTTATGGAGAAAGGC
CACCAGAGGTGCCTGTGGCCTGAGAGTTATGAGGAGTTAATAGAAAAAAGAGGAAGCTGTTAGCATGAGA
ATGCCTTCTTTGGTAAGGGTCAAAAGTAGGGTCCACTTCCCCCAGGTCTTGAAGGACCTGGAATGGTTGC
GTCCTCACAATATTTGGGAGAGAGGTTCCTGAAGAAGGTATCTCCTGGAAGGGGCTAGACGACCTTGGTC
AGACATCCAGGCGCCCTGGGGTCCGGCAAGCATATGGTGCAGAGAGATTATTTCCCACAATTCCTACCTT
AGATGTAATGGGTGCCCAGACCTCACATGGAAGGATTGGAGAAATGTGAACAGGCTATGTGTGTCTAACG
GAAAGAGACTGGGGTTTGGGGGGTGGGGTGGGGCAGAGCGAATGCCACCTGCATGTTCTGCCTCAGGCTG
TTACTGGTAGAACTGGGGTTCCTCGTGGGGATCCCTCTTTTGTTACTACCACCACCACCACCATGGTTTT
AAAGGGCTACCTTGATTTCCCATTGGAATATTCCTAACACAGAAAATTGGAGGTAATTGAAAACAGTCCT
CAGATCTCCTCCCCTCTAGCCAGACCTGGATGGGAATTCCATTTATTATTTTGGTTCTACCAATTTAGAG
GGACTTGGAGAATTATGGAGATTTTTTTTAAAACTTGCTAATTAGAAGGAAAGGGTGTGTCTAAAGGATG
GGTGGTCTCAAAGGAATGGGATTGTGGCAGCACGAGAAGGAGGTCACTCTCATTTTCCCCAAGAATGGAA
AGAGAGGTGGCTGTCCCAGGATTCCTGATGGTGAGGGTGACAAGAGTGACTCAGCACCTCCAACCCCTAA
GAATAAGTGGGTGGCAGCCATTTCGTTGAAAAATATAAAAATAAGATAAAACCCACATTCATATGCTGAG
ATTCATGCCTGAGACCTGGACCTAGGCCAGTTGGCCTCAGAAGGGAGAGTCAAGAGCTCTTATCAGTCAA
GAGGTTTTGAGTCTGTTAAAACATTTCCTTGGTTGGAGGATAATAAGCATCAGATGACAGGCAATTTGGA
GAGCCCCCACCTTAGCCAGGTTCGTCCTGGAGACCCTAGGCACACCTGAGTGGAGATCCTAGCTAAGCTT
TTTCTTGCTGGTGACTCTATGCCTGGGCCTTTGCTATTCGAAGGGAGATTTTCTCCTCTTGATAACAGGC
TGGGTGATTACCTTATACCTTCCCAGCAAGGGAAAGGTGACACAAGTGACACAAGTGGGGCAGGTGACAA
GGGACATCCAGCCCAATAGCTTGTCACTTTGCTGGCATCTTTGTCACTGGGATGGACTGTCAAGAGCGGA
TGTTGCTATAAACCCATGTGCCACATGATCTGAGGGAGGAGTAGAGTCTGAGAATACAGATCCACGGCCC
AGCCCGGCCACACTCACTTCCTGGGTCACTCAGGACAGACACATGGCTCACCTTTCTTGGCCCTCTGGGG
TCCTTTTCTGAAAGAGTGGGTGTCATGAATAGTTCCCACCATGCACCTCAGTAAGAATGCCCTAGGGTAA
GAGTTAAACTGGGCCTCCCCAGGGTGAGCCCCACTTCTGTAAACAAGGCATCGCATTCGATGTTGTCCAG
GAGCTCCGGTTTCAATGTTAGACCAGCTCTGAATGACGCCCTGGTCTCCATCCTTGACACCACACTGTGA
GCCTGCACAGGTCAAGCCAGATAGGAGGGTACTGAGGTGGGAGAGTGAGTCCCACCTCTAACCAAGATGC
TATTTGTAATTGATACTTACCAACAAAGGCAAACATCCGTTTTCTTCAGTGGAGTGTCCCTGTGAATATC
AAACCACACTTCAGAGCAGACCCGTATCCCCGGGGTAGCTGGCCAAGATAAAACAAAACCCATTTTTGTT
TGTTTGTTTGTTTGTTTGTTTGTTGTGGGCTTTTTGTTTAGCTTGGGCATTTTTAGCTTATTGTTTTGTT
TTGTTTTGATTTTTGTGAGATTTATTTATTTATTTATTTATTTATTTATTTATTTTAAAGCCTACAGCAC
CCTCTGGTCTCCCAGTAGTAACCAAGCCTTACCCTACTTAGCTTCCAAGATCAGACGAGATTGGGTGCAT
TCAGGGTGGTATGGTCATAGATGAGTGCTGTTTTGTTTTGTTTTGTTTGAAAGAGAGAGAGAAAGCATAA
AGTTGAGTGGTTGGTGAGGTGGAGAGGACCTGGGAGGAGTAGGGGGAGAAAAAACATGATCAAACTATAA
TATTGGACAAAAGTTGTTAAAAATCTTTAAAAATGATTAAAAGATAGATTTTAAAAACTCAAAATAAAAA
TTAGAAAAAAACTGGGTGTGGTGGTCTTGTAATCTTAGCATCCAGGAGATAAAGGCAGGAGAACTAGAAG
CTTAAGTTATCACTGGCTATAGAGTAAGCTGGAGACAGCCTGGGCTACATGAGACCTGTGAAAGAAAGAA
AGAAAAAGAGAGAGAGAGAGAGAGAGAGAGAGAGAGAGAGAGAGAGAAAGGAAGAAAGGAAGGAAGGAAG
GAAGAGAGAAAAAAGAAACCATTGTCCCATTAGTTCCATGATGCAGTTATTAGTTATCAATGACAGTTAA
TAATATTAATCACAATGTCCATAATAATAACAAATAATAGCTAACAGTAATTGAGCTCTATGAATGTACA
GACCTTGAGGATCTTGCACGCACATCCCATCTGCTTTACAACTCTAGCAGAGGATAACATTACCAACCTC
ACTGGTAAGGCAATCAATTCTTCATGGACCAGGAAGGGAGGCAGGGAGAAGCAGGAACAGCTATGGCACA
AAGTACTGTCCTCATGAGCACTATCGTCTACGCTGGCTCTATAACTGGCGACAACACAGCCATCACTTAA
CAGTACTTTCTCCAGGACCAGAAGACATTCAGAAGTGGGTACAGAGGGGACCCAGACATGAATCCCCAAT
GCTGACCCACTCCTGCCTCTTCTCTCTTCACAAGGCTCCATGAAAGAGCCTTGCACCTATTTATTATTAT
TATTATTATTATCATCATTATTATTATTATTACATGAAACGGTGCTGGAATTAAAGGTGTGAGGCACCAC
CATGCAGCCAGGGGAATTTTTACATAGCCTGTGTGTGTGTGTGTGTGTGTGTGTGTGTGTGTGTGTGTGT
GTGTGTGTGTGTGTAACAAGTTGATGTGCAGCTATGTGGAGGCCAGAGGACAATCTACAGTATCAGCCTT
AGGGACAGCTTCCATCTCCTTTGAGAAAGGGTTTTAAATGGCCTGAAGCTCACTGACTATGGTCAACTAA
GCCATGGATCCCTAGCCATGGATCCCTAGGGCTCCCCTGTCTCTACCTACTGCTAGGGTCAAACCCACTC
TGTGTCTGGGTAATGTCATTCTTACACAGGTACTAAGGCTAGAACCGGGATCCTCCTGCGCATGCGGCAA
GCACTTTATAGGTTGGGAAGTGTTTTGCTTCTGGTTTATTTTGTGGTGCTGTTGAATCCCAAGCCATGAG
CCATATAAGAGAGCATTCTACCACTGAGTCACCTCCCAGGCCCTGTGGGGTGAAGATTTATATATCTCCT
CCTGCAGGAGACCTCTCTCTCTCAAGATTTATTTATTTTGTCTATATGAGTACACCATTGCTCTCTTCAG
ACACACCAGAAGAGGGCATTGGATCCCATTACAGATGGTTGTGAGCCACCATGTGGTTGCTGAAAATTGA
ACTCAGGACCTCTGGAAGAGCAGTCAGTGCTCTTAACCATGGAGCCATCTCTCCAGCCCCCAGGAGACAT
CTCTTGAGGTTTGGTTTGCAAGAAGATTCTTAGGAATCTCAGAACCTGCTCAAACATCACTGTCAATTAG
TCTAGTACAGGCCCAGGACTCTAAATTAAAAGCAGGTTCCCTCGGAGACCCTGGGAGGAGGTAGGCTCTG
CTCCTGACTTCTCCTGGCAGCCTCAGACTAATCTGAAGCTCCCTAAAGTGAAACACCATCGTGGAGCTAA
GTCGAGGTTCTTCTGAGGCCTTTGACCCCCTCAGCCCTAGTGAGGCATCTTGAGTGCCACTTCTTAGTTT
CCAAAATCCAGGGCAGCATGCCAACAATCTAATCCATCCCCAGGAAAACACTCCCACTGGACTCCCTGAA
TCAGAGAAGAGCTAACGGTGGCTCGCCCACCTCCCTCCAGGGGGCGCATTTCCATAGACTTCAGAACAGT
GATCTGTTCTCAGGAGGCTGGCTTGGCAAGTTTATCAGAAGGCAGGGAAGGAAGGATGAGGACTAATGAG
TTCTCTGGTATTAGAATACTGGGATTCCTCTCTGGGATGATGTTCTAAGCCCTCTATAGCTTTTCATCTC
CCAACACAGAACAAATGAGAGCAAGTTAACATTTCTGAGGGTGCAGAGTCCCTTTCATCTGTCCTGATTG
TGACAGGACTTTCTCTTTTTCCAAGCTAGGAGACCCAGCCTGGGCTGTTGGGATGAGGGCACGCTTCTCC
TATCTTCTCTTGTCTCAGCATGTAATTTGAGACAAACGGTGTTTGTAGGGGAAAGTTAGAGGTCTCTGAC
CCTCCTCGTTCTCCCCTTCCCACCCTTGAATTGGTTGTAACCACCTTTTTGTCTGTAGAGACACTGGGTG
CACAGTGTCTACTATGTGCCCAATCCCAAGGATGGGGAGGGAGGTACCAAGAAGGCAAGGATAGGGAGAC
TCAGCGCTGTGTAGATAGAGGATAGGGGATAGAGGATTGCTCTCTGTTTATTATTTTTAGACTCTCTAGA
GATGGTTTTCTCAAGGAATGCTGTGAAGAAATGAAGAAATGGGGTGTATGAGTTTGCCCTTCTTCATGCT
CTACATGGGTCACCATCACTGGGGGCTCTCTCACAGTGGCCCCATGAGAAAGTCACTTGTGTTGCTTAGT
TCCAGGCACAGCTTTATTTGTTTAGAGTCTTTTAGAAAATGGTTTTCAGTTTGAAACGATAACAGATTCT
CAACAAAGCTGGTCTTAGAGGTCCTGTGTATCCTACACCCACTCACCCTCAGGGTTCCATGCTATATGAC
AACAGTAATGACGAAGGATATCAAAAAAGCAGGAAATCACCACTGCTATCTCGTGCACGTACAGTCCGGT
CCTGTACTGCTTTATCACAGGTAGATTTGTGCAGACACCACCCATCTGAGGATACAGGTGTGTTTCACCA
CCCACCGCAGAGAAGTGCCTTGTGCCTGCTCGTTGAGAGTCTCATCCTCTGACCACTGTCCCTAACCCCC
AGCACTGTCTAGTGTCCATCTCCAGGATTGTATTATTTCAAGGCTGTTACATACAGGGAAGCATGTAACA
GGCGACCTTTTGAAAAACCAGCCGTCTTCATGCAGAATAACGTATTTGCGTTCCAGTCCGTCTAAGCTGT
GACACAGATCAGGTGCTGGTTCCTTTAACGGCTGAGTACTACGCCAAGGTGTGGATGTGCTGTGCTTCGT
TTACACATGTTCACTTATGGAAGAACGTTTGGCTCATTTCCCACTTGGGACTAGTTCAGATAAATCCACA
AGAGTGGTGACGTACAGGCTTCTGTGTGGACATAGCTCGTAATTTCTCTAGGGTGAATGCCGTGGAGTGT
TGCTGGGTGGTGTGGTTGTTGAACAATGATACTTTTTTTTTAAAAAAAGATTTATTTATTATTATAAATA
AGTACACTGTAGCTGACTTCAGACACACCAGAAGAGGGTGTCAGGTCTCATTATGGGTGGTTGCAGAGAT
TTGAACTCAGGACCTTCCTTCGGAAGAGCAGTCAGTGCTCTTACCCACTGAGCCACCTCACCAGCCCTGA
ACAATGATACTTTTTTAAAAAGGATCTTCCTAACTCTTTCCTGGAAGGGTCGTCTCACCTTACACGGGTG
TCAGCTGCTTAGCAGTTGGTCAGCTTTTGACATTACCACTCTTTTTTTGTAAAAATTCTAATAGACATGC
GGCACCACCTCTTTGTGTCTCGTTCATGTTGTCCTTGTGGCTGGAGAGAGGAAGATTGAGCTTCTTTTCA
TGTGATCATCGCCCCTTCATGTTGTCGTTTTCCTTTAATGTTGTGTAGCTTTAAGAGCTCACTGGGCACT
CCAGTTATAAGTCCTTTGTTGGGTTATTTGGTCTGCAGATTTTGTCTTTGAATCTGTAGGTTGGTTTTTT
ATTTTTTTTAATCATTTAAAATGGTTTTATAGAGAAAATACTTAATTTTGATGAATTCCAATTATTGGTC
TGTGTGTGTGTGTGTGTGTGTGTGTGTGTGTGTGTGTGTGTGTGTGTGTATACACCTGCTCACATGTGAG
CACACAGTAGTCAAAGGACCTTAGGTGTTGGTCCTCAACATTCACATTGTTTGAGACAGGGTTTCTTGTT
TACTGCTATATACAACTCCAGCCTTTGTTTGTTTGTTTGTTTGTTTTTAAGCTCACGGAGGCAGATTACC
CACTACTCACTGTGTAGCTCAGGTTGTCCTGGAATTCCTGATCCTCTTGATTTCTATCTCTGAATCGCTG
GGGTACTAAGTATGTACTGCCATGTCTGGCTTACATATATCAGCCTTCAGCAGTTTGGGTCCTCCTCTTG
GTGCTACATCTAAGAAGGCTTGCTTCACTGAATCATAAATCTATTGCCTTTCGAGTTGTTCTGTGTAGAG
GTGAGGACCGGGTCAAAGCCTTGTCTGTTTTTACCTCTAGATGTTCTTGTGCCACGTCTCTTCTCTCCTA
ACCTGTCTCCGCGCTCTTGTCCAAAGCCAGTTGGCTGTTCTCCTGTAGGTCTCTTGGTTCTTCGTTTAGC
TTCACTGCTACACACCTTCAGGCCCCTCCTTGTATCGCTGTCTGATTATTGTAGCTACGGAGCGAGGCTC
GACGAGGGAGGAGCTTGCTTTCACCTGTAACGGTGCAGTTATCAAGCTTGCTAACTCACGGGGCTTCCCT
TGCCCTCTGGCTTTTGGCATGATTTCAGGGCAGATTTCAGCAGTGGGGATGAGCTCTCTGTCAGCACCCC
TGTCTCCTGCTTGCCTTCTGGTTTCAGCTGTTTGGCATGCTTTTCTCCTTGGACTTTTAGATCTGTGCCT
CTAAATCCTTCTCTATGAGGGTGGGAGATGTCTCAGTCTGTAAGGTATTCACCATGCAAGCATGAGAACT
TGAGTTCAGAACCCCAGGATACATGTAAAAATCTGGGAGCCATGGCCCAGGCCTCTAATTTCAGTGCTGG
GAGGGTAGAGATAGGTTTCCTGAGGCTCCCTGGCCAGCCAGCCCAGCAGAACCCATAAGTTCCAGGTTCA
GTAAGAGAATTTGCTTCAAAACTAGAGACTTGCTGTCAACCTCTGGCCTCCACAAGCACATGCATGTGCA
CTTGCACATACATGTATACACACATGTATACACATGCAATAAATACACTTTTCCTTTATAATCCTAATGA
CAGCCCTGAAGAGAGGTGTCAACCCAACACCTCCATCTCACAGCTGAGGAAGAAGAGAACTGCACAGGGC
CGAGTGCTGAGTAACTGACAAAGCAGGAATGCCCACTCAGCATCTCCCTCCCAAGTCCCCCTTTTCCCGT
GACCACAGAAGGACTCTGTCTTCTACTTTCTCTCATCCGTGACCTGCAGGCTTGGGCTCCATGGTCTCAG
GGTTCTTTTCCCAATCTCAAATTCTCAGCTCATGCTAGCCATCATGGATTAAGATGAGACTAGGAGCGAG
CCAGTTGGATCTGTACTGTGCTTGGAGAGTTTCTGTGGACCCAGTGGAAGCAATGAGATTCTTCCATCAG
TGTCCTGCTGGCTTGGGTTGGAGGACCTTGGTGGCCTGGGTCTGCCTTACTGTTGGAAGTTGATTAAATC
TTCTCAGGGGTGGAGAGTGAAACTAAGGCAGAAGTCAACTTGGACTTCACTGTGGGGGTGAGGGGGGTGG
GCTGATACTGTTGGGGGTGGGCATCTTCATGAGCTGATCTTCCCAGCTCCTTTCCATTCTGGGTCCTGAA
GCTCAGCAGTATACCCAAGAGGCTCAGGTCCAGCCCAAGGGTGAAGCAAAGAGAGGGAGCCAAAGGACTT
GTGAGGAACTCTTAGAACATTCAATGCGATCAGTATTTGGTGCTAATGCCCAGGACTGCTCTTGGCTTCA
AGAGATGTGGTGGACTCTCTTCTCCTATCTTAGGGTTTCTATTGTGGGAATGAAACACCATGACCAAAAA
GCAAATTGTGGGAGAAAAGGGTTTATTTGGCTTAGACTTCCATATTCCTGTTCATCACCAAAGGAAGTCA
AGACAGGAACTCAAACAAGGCAGGAACCTAGAGGCAGGAGCTGATGCAGAGGTCATGGAGGGATGCTACT
TACTGCCTTGACTCCCATGACTTACTCAGCCTGCTTTCTTATAGATCCCAGGATCACCAGCACAGGGATG
GAACCATCCATACTGGGCTGGGCCCTTCTCTATTGATCACTAATTAAGAAAATTCCCTAGAGCTGGATCT
TATGGAGGCATCTTTTCAGTTAAGGTTCCCTCCTTTCAGATGACACTAGCTTGTGTGTCAAGTTGACATA
AGTCTACTTTAGCACACCTCCTTAGAGAATTAATGAGCATCTGGGTCCTGGAGGAGCCTGGGGTCTTCTT
GACAAACCACATATGTTCAGCAGGGTGTCACACCAAATGTCCCTGGGATATGGGCTAGCCTAGAGCACCA
AGAAACTTGGGTAAGATACAGAGGTCCTCAGAAGGGGTCAACATGGAGGTTCACCTTTGTCACATGCCTC
ACCTCAAGGCCCTGGGTTCTAAATAATAAATAGGTTTCCACATCCTGGAAGGGCTAGAGAACAATGTATC
TGGAGATAGGGCCTGACCTGACTAACCCCAAGAATTAGATTTTTCCCCCTGAAAACCAAATGAATATTAT
ATTTTGTTTCACAAATCATCTATTTCTACAAGTCTGTTCTTGTTCCCCAAATCTTGGAGTAACCTCAACA
TCCAGGGACCTGTTTTGTGTTTCTCAAACGCAGGGTCCCAGAAGAAGCCCGTCAAATTTGGGGACTACCA
CCTAGATAGAGCTCAGGAAATAACTACTTTATCTGGCTAGTTCACTCAGTCAGCTTGTTGGCTACAGAGG
GACAGACTCTCCACAGTTTAAACAGGATGGGAATGTGGGGTGTGGGTCAGGACATTTGAGCCCAGTGGGA
CACTGGCAAAGTGGGACCAGTTACAGAATCTGGTGGGGTGCCCCGGGTTGGGGGAAAAGGGCACGTTGGT
AGATCGCTACCAACATCTACCAGTAGAAACGACACAGGATTTTCCTGGTGTCTTTTGGTTGCCAAACAGA
ACCCTAAACAGATCTTAACTGACCACTTTCTCAGTCAGCTTCAAACTGTTCCTTCCTTGCGCCTCGGGTC
CTCTTCTTTTTCTTAAACTTACTGTTTTTCTTTGGCTCACAATGCAGGTGGAGGCAATAGCCAGGAGCTG
AGCCAGGAGTCTGCAGTTGATTGACTGGTTGTGGGTGAGACCTTTTCTAGCTAGGCACTGCTGTTCTGTC
TGGCTCTCCGAGAAGCTCCAAAGTTTCTGAGATGGATTGCCTGTATGTTTGCTGGTTCCCAGCCACCCGA
ACAAACCACCCCCGTTTGCCCTGGGACACAGGACTTTCAGTTTTAAAACTGGAAATGTTCTAAGGAAATT
GAAATAAGTGAGTCAACTTACTGCCTCCCATGTAAGAATAGCTTACGAAAACAAGCTTCTACTCTCTGAC
TACCAGAGGCAGCAAGGAGGGTCGCAGATGATGTTGCAGGGTAGAAATGAACCCCAGAGGCTCATGGAGG
CTTCCAGAGAGCAGCTTATCATGGGCCAGATCTTGTGCCTTGCAAGCCTCATTAGTCTCTCCGATTTACA
GGTGAAAGCCTTTCTCCAAGCTTCCTACGCCCATTGTGGATCATGGTTCATGACTAGTCCATTGCGTAGA
ATCTGTACAGATAAGAATATGGACAGATAAAGCTCCTGGTCTGGGGAGCTATTGAATTTCAGAATTGACT
GTGATGTGCAAACTCATCTCCTCAAAGATGCAAAAATGTGCTGATGTCTCTGTCTTTGCTAGCTGGCTCA
TTCACAGGATAGCCTTCTTCTACAACCCAGGCCCACCTGCCTTGGGGATGGCACCGCTCATGGTGGATGA
AGTGCTCCACATCCACCGTCATTAAGACCATCCCTCACAGGCATGACCAAGTAATCCCTCAGTGGGAACT
CTCCTCCAAATGACTCTAGGCTTATCAAGTTGATAGCTGAATCTAACTAGGATATAACCTATTATATACT
TAATGCATAGGTATATAAGATTTATAAGGAGCAGGGATAGCATTGTTCATACTTGTTTGGTTGGTTGTCT
TATTTGTACTATATTTTAGTCTAATTTCGTTTCATTCTTGCATTTTTTCTTTCTTTTCTTTCTTTCCTCC
TCTTCCTCCTCCTCCTCCTTCTTTTTGAGACAGTATCTTGCTCTGTGGCCCAGACTGAGCTGAAATTCAC
TAAGTTAACCTGGTGTACTTTGAACTTGCAATAATCCTCCTGCCTCTGCCTCCCAAGTGTGATTACATAC
ATGAGCCACTGTGCCTGGTCTTGAACATTCAGAGTACTGGCCACAGTTCCAACCCATTCTTAGTAGCCAG
TACAAAATTCCTTCCATTTGGACCATGTGCGTGGTGATCCATAAAAAGAAAAAAAAGGACAGATATTCAG
CTATGACTATAATTATCAATATATCTGTGCTTTCTGTAAGAGTGCACACCCACAGTGCACACATTTAGTG
AGCTAATGTGAACAAAGCTAGGTCTTCCAGAACGCTGACTGATGAAGCCCTTTCCCTATGCCGAGAAGGC
AGCCTGTTAATTCCTACTTTATCATGGAGGAAACTAGGAGGAGGCCTATATGAACTGCCACTCACACAAG
TGGAGAGCTGAAAGTATCGCTTTCTGGGGGTGCTGTCTTGAGTTTTTCTCCCCTCTACAGCTGCACATTG
TCCTCCATAAATCTCCAGTCATTTAGCCAGAGTGGTACCTAGCCATAGCGTCCTACCAGAGATGTGGCAG
AGCTAGTGCTGTTTTCTAAGTCAGACATATCGACTGTTGTCCCAGAACTCTAACTTCCTCACGTTTGCCT
CTAGATGCACATTTCCTCTTTGGTGTTCAGCCAACACCAACACTCCATCCAGCACAGGACACTTAGATGG
AGTGTGGACGTGGGGCTATGTCATGGCTTTAAAAATGTTGATTTCTAAATGAAAGAATTAGTGGAAACCC
GATCATTTTCACAGTGTCTTAGGCTGTAACTCATTTGCTTAGAAACTCAAAGGGAAGGACTACTCTATCA
TCGGAGTGTCAATAAATAAACTGCAAGATGTCTGTGGAATAGTCGCAAATCTATTGTGTGTACATGTCTT
GTTGGGAATTGTACTACACATCAATTTTAAAGTTTTTTTTTAACTTCTTATTGATTCTTGTGAACTTCAC
ACCATTCACCCTAGTCCCACTCATCTCCCCATCCCTTCGTACCTGCCCTCTTCCCTTGCAACCTCCCCTG
CTACAGAAGCTGTAGTGTGTCCCAGTGTGTCCCAGAGTACACTCTTTCGTCCATACTTATTTATTTGCCA
AAGTTCATTGCAATGACTTTTTGGTTTGGTACAAGGCCTCTGACTCCTGCTACTGTATCAATACTGGAAC
CTCTCTGGAACTCCTCTTAGATATCCTGTTGTTGCTCTGTGTCATGGTGATCCTGTAGTTTTAGATCTGT
AGGACTGACCCAGCCATTCATGCACTCCAGCAGTTCATCAATGGGGTAGATGTTGGGGTGGGACAATTCA
AAGCCCTGGATCTGGGCCTGAGAGGTACCAGAGCTGGTCAGCCTTCTGGCTCTCCTCCTCTCATTGCCCT
TGGAGACAGCTCACCAGCGTCCCCCATATCCAGACCAGCTCGGCTGTGCTGCCCAAGGAGGTGCAGGGCC
TGCTCTCCCAAGTGCTGCAGCAGGGGAGGGGCAGGGCCAGATCTCCTGCTCTGATGACCCAGGGCAGCTC
TCCTGCTGCCAAAGGTAACAAGGGGTGAGGGAGGGTCATCTCTCCCTAACCAATGTCACTACACAACAGG
CAAGGGACGGGGCCAGCTCTCCCATACATGCGCCCTTGGAGCTGGCTCACCCACAACCCTGCTATCAGGG
GCAACTCTACTTCGCTGCCCAGGTGAGGTGGAGGGCCCAAGTGCTGCCGCAACATGACCTCCTTTCATGA
CCCCAGGGGCAGCAATCCCATGAAGCCCAGGTGAGGATAGCGTCAGTTCTACACAACACTCAGACATCAA
CACGTCCCTGGGTGGTATCCCAGACCAGGGACATCTGCCTAGCTGCTGCAGGGTTACAGACCAAGATGTG
CCCTCTCCCTGTGACAGCATAGGCCAGGGCCTTGCTATGGTCCCAGGTGGCACCACCAGCTGCTCACATC
AGGTTCCTCATGACCCTTGAGTCTGCAGTTCTGCCTTTCTTCATTGTGCCCACATCCTTCTGTTTCTTGT
TCTCTTCCTTTTCTCCACCACTGACTTGCTCCTCTTTGTGGTGTGTGTGCCTGGAGACTCTGAGTATCCG
GGGTCACCTCAGGAGTGCTGTGCCCTGATTGTGCATTATGGTGCCAGGCAGGGGTTATCTCGGGCACAGT
CTGGCCACTGCTGGACTAGTGGACATCTCGGGCAAGATCCCTGTCCAGGCTTCATGGTGCCAGTCTGGTG
GTCATCTTGAGCTCACTCCTCTCCCAGCCTGCCAGAGTGGCCCTTTGCAAGGGTCATCTGTCTCAGGCTC
ACTGCCACCTGGGACCCTCAGTCCCAGGTGGGATTCTTCTAGTCTCCAGCTCACTCTCCATCCTGGGAGC
CCATGTGGTCCTGCCTGGCAGCGGACTGGTGGTCATCTCAGGCTCAATTATTTCAGGAAGTGTTAGGCTA
CTAATCATTCAGATGTTCATAGGTCAGAACACCAAGCACAGATATAATCTCTTCTTTTTGCCACCTACTG
ATATGCCTGTGACAGAGCAGCCATGCCTGTCACACCTCTAGGGACAGGGAAGCTTTCTAATGATTTATTT
ATTTATTTGTATTTTCTGTGCACTGGTGTCTTGCCTGCATGCTTGTCTGTGTGAGGGAGACAGATCCCCT
GGACTAGCATGACAGACAGTTGGGAGCCGCCAAATGGGTGCTGGGAATTGAACCCATGTCCTTTGGAAGA
ACAGCCAAGTGTTTTCAACCACTGAGCCATCTCTCCAGGCCCCAATCTTAATGTTTTAAGAATAAATCAA
ACAATGGAAAGGAGCTTCTCTGATGTTAAGTAAAATGAGGCAGGATGGACCACCGTATGGACCAAGGGTG
TGGATATTTCTGCTAGGGCACACAAAGCAAGGCAGCGCTAAGGAAGAACACCCAGACAGAAGTGGTTCTC
CGCTGGGCGGGGACAGGAAAGCCTAGCAACAATGTCCCTTTGTTCTTTATGGATTTGTATGTTCTTTATT
GTCCTACAACAAACATGTCCTATATTTATGCTTAGATGAAACTATCAACTCCAGACTCTAAAGTGACATC
CACCCTCCACTGCCAGGTGCACCAAGACATTACACTGGTGGTACATGAAATAAAAGCCATGGAGCACAGA
AGTGCTGTTTTCCAGGACTCTGAGAGTGGACCAAGGACGCTGCAGGATTGCAGTGAGAGGGATGGGGTTG
TCCTGTAGTGTGGTTGCTATTCCCTTTGCATTTTTACGCCTATTATTGCATTCGAGGCTCACTGCTTCCC
AGAGGTGGACTCAATTCAGATAATGATACTTGAAGCCTTAAAGAGTGGTAAGAATGCAGAACACTCTCCA
TTCTGGAAAGATGGGAGACAGGTATATCCAGGAATCCCTCTCCACTCTGCCAGCACCCACTCACAGTGCC
CAGCTCAGAGCTTAGGAATCCAGCCCCAAGGGTTGGCCAAACACCTTAGATAGACGAGTCTATCTATCAG
ATCTGCATCTTGCCCTGTAGGAAGGGCAGCCAAGGGCGAGGCAGCAAGGACAAGAGCTGCCACTGGATCT
GCTGAGTACTGACTGGAGGTCTAGTCCTGTGCCTGGGGATTTATGCCTGGGAAGACATGGAAACCATCTT
AGTGGGCTTTCCTGTGGCCATGTTAGTAAACCTGGATTGCCTGCCACATTGTTTGTAAGGCTGCACTCTG
CAGTTGTTCTAAACAGCAGTGACCTTTGACTCTCTGAGGCCAAGAGTAGTAAGGTTCATTTATTTGTGTG
TGTGTGTGTGTGTGTGTGTGTGGTCAGGAGTCACCTGGGGTTTTGTTGTTGTTTTGTTTAAGACAAGGTC
TCTCACTGGCTTTGAATTCATTAAGAAGACTACCCTGGATGGCCAGTGTCTTAGGGTTTTACTGCTATGA
ACAGACACCACAACCAAGGCAAGTCTTATAAAGGACAACATTTAATTGGGCTTGCAGGTTCAGAGAGGTT
CAGTCCATTATCATCAAAGCAGGAACATGACAGCATCGAGGGCAGGCATGGTGCAGGAGGAGCTGAGAAT
TCTACATCTTCATCTGAAGGCTGCTAGCAGAATACTGACTTCCAGGCAGCTAGGATGAGGGTCTTAAGCC
CACACTCACAGTGACACACCTACACCCAACAGGGCCACACTAACTACTAGTGTTACTTCCTGGACTGAGC
ATATACAAACCATCACAGCCAGAAAGCCCCAAAGGTCTGCTTTCTCAGTGATGGGATTACAAATGCACAC
CAACACGCCCAGCTGCTTCTTCCTTTTGTTCTGAGGATAAGCCCAAGGTCCTCATTACTGACTGAGCTAA
CTCCCCATCTTCACATTCTTGGTCGATTACTATCAAGCATTGGCTATTCAGTGATGAGTAAAAGCAGAAG
AGCTCTGTCCCTCCAGTCAGATAAACAGTGCACAGTTATGCAAATGACAGCAAAGTCACCAGGCATGTCA
TATAATCGGGGGAGGAAATTGCCTGTTTAAGGTAACAAATATGGTGGATTCTGCTTTACATATCTGGGTC
ATGGACTGTGAGTTTTAGCGTCATCCTCACTGTCCTCATACAGAATGACTGAGTGGGAAACACCATTAGG
AGCAGAAAAAATGTCTCTGCCTCCCAAAGGCTGTGGTTAGATGGCTGGATCATAATAAGTTCTAGTGCAT
TATGGTTTCCATCAACAAGACAGGCCCATGTAGCACAAAAGACCTCTTAATGAAAACACTTAAAGGTGCT
TCATAAAATAAGTAAAATCAGAGTTCCCATGTATAGCTGAGCTTTCGAGAAAGAGAGGGGAGTGGTCAGG
TGAGAGAAATGAAGAAGGCACAAAACAGCAGAAACTTGACACACCAGTCACCGCTGTGGGGGACAGATGG
GAATGGAGCATAGTGGCTATGAGAGCAGGAAAGAGCCCAAGAGACTGTCTGAGAAGGATGTGGTGTTAGT
TACAGTATGGGTACCTAAGATGACATGAGAGGCGGTGGAATCCCATGTATAAGCTACACGGAATTGCCAA
CTGAGGTACCACATGATGGACAGACTTTATACTATATAAAAGTTAACTCAAATGGATCTGAGACTTAAAT
ATAAGATCCAAAACTATAAAACTCAAAAGAAGACATGGAGATCAAGCTTTATGACACAGAGCTGGGCAAA
GCTGTCTTAGATGTGATGCCAAAAGTATAGGCAATATATATTAAAATTGTTAAAAGTTATATGATGTTGA
ATTTTTAAACATTTCTGAGTGTCAAGCAAGACAGTCAATGGCATCTTAGAAGAGGCAATCTATGGACTGG
AGAGATGGCTCAGCGGTTAAGAGCACTGGTTGTTCTTCCAGAGGACCTGGGTTCAATTCCTAGCACCTAC
ATGGCAGCTCACAACTGTCTATTCCCCAGCTCCAGGGGACACTACACCCTTACATAGGCATACGTGCAAG
CAAAACATAAAATAAAAATTAAAAACAGAAAATGCAATCTAAGACATGGGAGAAAATACATGCAAATTTA
TGTGCAGTAAGAATTAATATCTAGGAGCCAGGCATGGTGGCGCACACCTTTAGTCCCAGCACTCAGGAGG
CAGAGGCAGGCGGATTTCTGAGTTTGAGGCCAGCCTGGTCTACAAAGTGAGTTCCAGGACAGCCAGGGCT
ATACAGAGAAACTCTGTCTCAAAAAACAAAACACAAACACAAACAAACAAACAAACAAAAAAGAATTAAT
ATCTAGGACATATAAAAAATTTCTTCAATCCAGCAACAAAGAACAACTGGAACTGTAAACTGAATAAATC
CTATTCTTTACTTTGCTTTTGGTTCAGGTACTTTTATCCCAGCAATGGAAAACACACTAGGACATTACAG
GAGGAAGATCTGAAAGCAGAGGCTCTAAGCAATAGTTAAACACCCTTGATCATAGCAGCGCTAAGGTAGA
AGGAACCCAAGTCTCCACCAATGAATAAACAGACAAGCAAACCAGACATAGCCACAGGGTGGAACATTAG
TCAGCCTCAAAAGGAAAGACATTCTCACGCATGCTATAAAATGGACAGACCTGGAGGACGTTCTGCTCAG
AGAAGTATGCCAACCACAAAAGAGCAAAGATATGATCTCATTTAAGTGAGGTCTGTAACACGGCTAAATG
TATAGATAGGGACCGTGAATGGCAGTTTCCCAGGGTTGGAGGGATGGTGGGAGAATGGGGAACTCCTACC
CAATGGGTATTCGTTTCAGCATCACAAGATGAAGTGTCTGAGAGGCAGATGATGGTCATGGTTGCACAGC
CTTAAATGTGTGATGCCACAGGAGTTGGTCCTGGAAATGGTCGTGATGGTTGGTAGATTGAAATGTGGTT
TTCCTCCATTGGAAATATGTATGGGTGATCAGTAAAACATCACTAGACACAGGCCTCCCAGGGAGGGGAG
AATAAAAGGTAGACTTACAAAATGATAATAAAACAAAATGTAATCAAAGGCTGTAGCAACGGAAGGTTGC
GGAGGCAAACCCCCTTCGGTGGAGCCTGATATTATAACTAAACCGAGAAAGAACTGCAGCGCATGCAAAT
GTCCTACCCTCATCATTTCCATTTCAGAGAGTCTCAGGTTGGATTAAAAAAAAGAGAGAGAGAGAGTCAA
ATTGCTTTTGAAAAGGGACATCCAAGTCAGTGGGATGTGAGGTCACCTACATTGCTTCATGTCCCACCTC
TCCCTCCATTCTCAAAGATGGTGGCTTAGCATCTTGAAATCTATCAGCTCACCCTCTCTCCTCTCTCATG
AAGACTTTTGTCATTATACACACATGCACACACACACACACGCACATACGCAGCCATGCATCTTGAATAA
GCTCCCAATTTAACATCATAGTCACGCCTTCAAATTTCATTTTGCTACATAAGCTAATATAGTCAAAGGT
TACACCTGTAACCCCAGCATTTGGGAAGTGGAGGCAAGAGGATCAGGAGTTCAAGGCCAGCCTTGGCTAC
ATAGCAAGCCTGTGCTACGTCAAACCTTGACTCTAAAACTAAATAAATTACCACAAAACCAAAATCCACA
AAAATAAACATTAAAACACACAGAAAGTTTGAAAATCAAGGGGCAGAAGATTACCAGGAGACCAAGATGT
AAAGATGATTTATCCATTTTTAATAACAAGTACAAGTGCCTATAACAAAAAAGAATGCTAGACTGTGGTA
TATTTGTAATATTTAAAAATGAATGAGACTCATAGCTACAATGTACCCAGAACAGAGCCCACAAAATCCA
GCAAGGAAACAGTGGCAGATGTGACCAGGTGGATGAGAGTATGTATCTCTGAATGTCACTGTCATTTTGT
CTCATGAAGCTCAGAGTCACAGCCAGCAGCCAGAGCATGTCCATTGCGGTTCATTTAAATGCAATTTGAA
AAAAAAATCCCGGGACAGACTCTAATTGGCTCTGCTGGGTCACATGTGGCCCTCCCAGTGCAGGACACCA
TACTGGTATTGTCTTCTTGAATCATGGGTCCAACAGGGACCCCTCTAGAACTGTTCTTACAAACAAGGTG
GGTGGATAGGGCAATCCAGACCTGCTGTGTTAGGAAGGTGAACAAGTGAAAGAGACGCCAAAGAAGAGGT
GCGGTCCTTGGTGCCGTGGGAGACTCCTTGGGTGTCATGGTAAGCAGATTGTTTGAGCAAGGAGCAAAAT
GAAAGGGGTTCGCCCCCTCTGCACTCTGCAGTCACAGCAGTTCTAGGGAGCCACCAACAAAACCACCACC
TTAGAGGAAACCGGAAGTGAGGCTTAGAACACTTCTCAATTGGCTACAGCTCAGCAGTCAGCCAGACGGC
TGGCTACGGCGTAATTAATTGGTTAACTGCAATGCCCCTCCCCTCCAAATGTTATTTAACATCCTTTGCT
GCGGAGAAAAGGTCCCTCCAGAAAGAGGGCAGTCAGGTACAGGCAAGGGATCTTTCTGAACTGGACTCAC
ACCTGTTTCTTATCGCCGCTGTAACAAATGATCCCAGCCATGATGCTTAAACAAGGACTTACTGTAGGGA
AAGCCTTGGAAAATGTGGTGCCAAGTGATTTCCTCACCTTCTTCCACTTCTACAGTCACCTACATTCCTC
CATCCTCAAAGATGGCAGCTTAGTGTCTTGAAATCTCTCCCCTCCCCCTTCTCCTTCTTATCTCATAAAG
ACCCTTGGAATTATATTGCCCACCGCTCTCCATGGATCTTGGATATGCTCCTAATTTAAAATCCTATCCA
CACCTTCAAATTTCCTTTTTGCACATAAGCTACTACTATGTTCAAAGGTTCTGAGGGCCCCCTTCTAAAT
AGGGGAAGACATTGTTTTGTCCAATTTGGGGTTACTCAAACTAAAGTCAGTAGAAGGCATTCAACACATA
TATTAAGATATAGCACAAGGAATTGGCTCACACAATATTGGAGGCAAGCAGTCCAATCACAAACAGGCTC
TTAGGATTCACCAACTTGGGACAAAGCTGCTGTCCGTGGTGTGTCTGTGTGTGTCTCTGTGTGTGTGTGT
CTCCTGCACACACTTGTCAGTTCTCTTAAGTTTTGTGGTTGATTGGCTTGGGCCAACTCAGATCATACAG
GATCATATAGATCATCTTCCTTCCTTCAAGTCAGGCGATTCTGCATTTTAATTACATCTGCAGACCTCGA
TTGTGTTTGACTAGCCAGAGGCGAGGCTAACCATGCTGGCCCATCCAGTGTACTGTTACAATTAGGACCT
GTTGGGGATAGACTGTTGCAGCTCCAGGAGTTGGGGCTACCATGGGAACAGAGGGAATCCCCAGAAGGTA
GCGCCTTCTTGAAACTGTTGATTTGAAGAATGCATGCTTGGGGTTGGGGATTTAGCTCAGTGGTAAAGTG
CTTGCCTAGCAAGCCCAAGGCCCTGGGTTCGGTCCTCAGCTCCGGAAAAAAGAAAAAAAAAAAAAAAAAA
AAAAAAAAAAAAAAACTTTAAAAAAAAAAAAAAAAAAAAAAAGAAGAATGCATGCTTGAGTGAACTGTAA
GAAGCCCAGGAGGGGGTGAGCACCTTCCCACAGTTTGAAAAAGCTGTGTCGAGAGAGAGAGAGAGAGAGA
GAGAGAGAGAGAGAGAGAGAGAGAGAGAGAGAGAGAGTCTGCTTCCTTCTACACCAACTTTGCCAGGCCA
CACAGTGAGCGAGCTACCTGTGACTACAGAGATGCCCCTTCCTTCTGTTGCCTTCCCATTGCTAGGTCGC
AGGCCCCTGGGGTGCAGACTTGAATGGGCGGGTGGTGGAAGGCCGGTGAGCTCATGTCTGCTGCTCCTGG
AACAGGAGGCAGCTGTAGGCGTGAGTGTTTGCTTGGCTTATCTTTTCCCATCTGAAGATGGTCATTGGTG
ATTCATTCCGGAATCTTGGAGTCTGCGGGGAGAAGTCCCAACCCAAACCAACCAGGTGCAGGTAAAGGGA
CACCCATCCCCCTGTGTCCCTGCACTTGCCTTCTAGTGTTCTAAGAGAAAAAAATCGGCCTGGGGAGGGG
GCTCCCCAACACCCACTGTGCAGGCAGACTCTCAAGAGGATTCCCCATGCCCAGATAGATAGCCCAGAAG
CGGGAGAGAAATCTGTAAGTCCCAGCTTCTCACTCCATGAGAAGTTTACATTTTAGCAACTCTGTTCACA
AAATGTGTTTGTCCAGAGGTTGAGCTTTGTCACTGGGAAAAAAAAGTTGTCAGGGAAGAAGGACTTAAGG
GCTTGGGAGTTCTTCCTTTGACTCGACAGCCATGATTGTCAAAATGGAGTCTATGAGCTGGTGGCACCCT
CCACACAAGCCAGCTTATTGTAAAGACAAATTTTCATACCCCATCCCTGACTACTGAATGACTGATGGAA
AGACTTCTCGGGTACTTCTGATGTGCTCCAGCGTTCAGTGACATCTCTCGGGCAAGCACATCTTGAGCCC
CTGTTGTGCATGCAGAGTGTGCTATGGTTGCTGCTATGAATGTGGTGGTGAAAGTGAACAGCAAGAAGTA
ATTGGTATTCAACTCCCACGGTTGCCAGGTAACTCGACTGGCTGATTGTAATGGATGGAGGAAATTTGCC
TGGCCTCTGAGGTTGATGAGTAAAGGCCTCCCAGAACTTTCTGGTGTGGCTCAGGTAAAGGCCAAGGACT
GTAATCTCCTGTCCCAGAGACCTCTCTGTGCAGGGAGACTGGAGTGGGACTGTATTAAAGCAGAACCTCC
TTAGCCAGGAGGAACAGCCATGTTGCAATCTGCAGGCTTTCTGGGGGGGGGGAGGGGCTCAAAACACACA
GGCTGGGTTCCATAGCAACCTCATTTAAGCCATGGGAAAGGACCAATTGTCTGGGAGGCTGAGGTCAGGA
GTTCAAGTTAAATAGTCAAGGTAAGCAGGGATCTGAGAAATGGGCGTTCTCTTCTCTGTATCTACTCCTG
GCTGCAGACAGTTTGTGGTGCTAAGAATGCCTGGTGCTCTGAATGAGCCATTCCAGAGATTGTGGGAATC
CCTATGGCCATTCCCTTGATGCTCTTTGGGGCCGTGGTGTGAGTGTGGGTTGGGAAGAAGCACCAGGGGG
TTGTGGAGACCAGGGTGCCATATTTTTGTGCATGTTACGAAACTCACATCTTCCCGCCCTCCTTTCTTGA
CCTCTCCATTTGTCTTTTATTTTCTTCTGTCACAACAGCCTAGGACCTGATGAAGCTTTTCTGGGAAAGA
ACTTGGTCTCAGTTCCGTGGTCTGACTGAAGACCCCTCCCTTTGAGGTTTCATTCAGTTCTGTCATGCTC
TCTCTGTGTTGACCTTGAAAATATTGCTTTCTCTTTTTCTGTTGCTCCATAGCTCCCAGCAAAAAGTAAC
CCACAGTTAAGAAAAGGTTTGGCTTGGCTTATTCTGGATTGAGGGTACAGACTGGCATGGCAGGGCTGGC
ATGGTGGGAGTGTGCAGGAGCTGGCTTTATGCACCTACAGTCAGGGAGCAGAGAGAAAGAGATAACCATC
AATGCTCCATTTTCACTCTGCTTTTGGTTTAGTCTGGGACCCCAGGTAATGGGAGAGAGCTACTTCCATC
CTTCATGGTCTTCTCTCTATAGCTCAACCTCCCTGAAAATGCATAGCGATTTGTCTCTTAGGCAATTCTA
AGTCTGGGCAAGTTGATAGCCAAGATTAAGAATGTGTGTGTGTGTGTGTGTGTGTGTGTGTGTGTGTGTG
TGTGTGTGTATGTATGTTTATATATATATGACATGGCAGCTTTGGGGGAGAGGGGCAAGTAGGGTCCATA
TTCTGAGAGTGAGCACAGGACTCCAGAGCACCGCTTGGCGACCAGCCCTCCTGAGAAAGCTTCTACTTCT
GGGGAGGATCACTTGTGCAGACTTCTACCCATGCAAAGACTAGACCAGAGACTCAGCTTGGAGCACATCC
CAAATAGCATTAGAGATCAAGTGGCCCTTGTCTGGCTGCAGATAACCACCTCACACATCAGAGTTTAGAT
GTGTTAGGGTGTCTGTCAAGTAACTGGGGCTTTGTCCTGTTTTTTTTTTTTTTTTTTTTTTTTTTTTTTT
TTTTTTTTTTTTTTTTTTTTGTGCCGCTGTAGCACCACAGCTGTCATGAGGCACCCAGGAGGCTCTAGGT
CAAGTAAGCCTTCCACCTTCTTCATGGGGAAAATGGAGTCTGCCAGCGAGGCCCCCCGGCTGCGTCGAGC
AGGAGTAAAAGCTAATAAAGATAAAGGAATCAGTCATGGGTGGGGATATAGCTCATCCTAGTACGCACAG
GCTCCAGGGCTTGATTCCCAGCATTACCAGAAAAACAATGAAGAAGGAAGGAAGGAAAACAGAATGGAGA
AAAGATTTTTTCCCTCCAGCTGGAACGCGCTCAAGGGGCTTCAGTCCTACGGAGCCCAAGAGGGACTTAT
TTCAATGCAGCCCTGGGTTCCTGTTGTCCACTGGGCTTGAGAATTGCATTCCACACTATCCCCCCACCAG
AATGAGAAGTTGAATAATGAGCAGAATTGAAGTCCTCTTGCCCTGGAACCAGTTGCTGGCCTGGCCGGGA
CCTAGAGGTCACTCCCCGTCAGCCCTGAGCCATCCATTCTCCAATCGTGCCACCAACCATTGACAAGACC
AGAGAGAGCTGGTCTTGTCCTTGGTAGGCAGTGGTGCCTGCCCAGCTTTCCTCCCATGCCAGGCCTCTCA
CCGATGCTTGCTTTCTTTGCCACCCCTGTTCCCTCCTTTCATTCTCTCTACGGGTCCCTCTCCCCTGACC
CATCAGCACACTGACCTCTGCGCACCCGCTCCCACCTGTTCCCCCGCAGCCCATTGGCTCCTTCCTCTCA
CCACCTGCCCTGCCCTGCCCTGCCCATGTTCTGACCTCCTCACTTCCCTCACACCACTCTCTCCGGTGCC
CCTTACCACCCCTGGGCCACCTCAGCTCTCAGGCCTTCCCTTGCCAGAATTCCTCTCCCTTGGCTGCTCG
CTCGTCCTGGCCGTTGTCCAACTAGAGACTTCCTGCCTTGTCTTCGCAACCTCGCCTGACTGCTTTCCTG
CGTTCTGCCCTGTTACATGACAACCTTTGCAGGAGGTCCAGCATGTGTCATACCTGCTTAGAAGTCTTCA
GTGATGACCAGATGGAGATGAACTCCTATGGCTCCCCAGGGAGGCAATTGTCACTCACAGTGTAATTTCT
TCCTGCCACACCCCTAGAATGTTCCCCAGATTCCTCTGACCCTATCACCGTGTGACAGATGCGCAGCCTG
GCTTCCCTGCCACACAGTCACCTACAGGGAAACCTCCTCCATGCCTTTGTCACTTCATTGGTAAAGTCAG
ACCATCAATGGCAAGCGCATCTCATGAACCACCAGAGGTCATGTGGTAGAACTGCGCTCACAGCCTAAGG
CAGAGAAGCATTTCCTTCTCCGGAGGTGTCTGATGCAATGTGGAGATCTGAATGTTGGGTAAGGGCTTCT
GTCTCTTCCTAGCATCCTCTTCCTTGCCCAGGGGAGAGAGGGGGCAATCTGCTCTGGCTTGATGAACCTG
CTCTGCACAGGACCAAGCTTTCAGGGGACTGATGTCATGTTGAGTAATGGGAGAACGTGTGGAGACTGCC
GCTAGTTCTGTGGATCCTCTGGCAGGCTGGGAAGGGGGATATGAGGTGACCATGATAGAGCATGTTGTGT
CCCCATGTCAGAACAAGTGTGTCTGGTTGTGAGTACTGATTATGGCGAGGATCCTGACCTGTGATCAGTG
AGTGGGGGGAGTGCTCACCTGTGGGTATGGATGTATAGACTCTGCAACACTGTCACCTGGAGAGGGACCT
TTACTTAGGATCAGCCAGAGGAGACAGTGTTGACAGTGAGTGGGGCCAGCAATCCACTCAGTGGAGGTAG
GCAGGTGTCTGCACACACACACACACACACACACACACACACACACACACACAGGGTCCTCAGGTCCTCT
CCTCCATGTTTCTTGTACATCTCATTGGGGACCTACTGAAGCTTTGTTCTCAGACCTCCTCTGTGGCTTC
CAGCAAGTATGTTGCAGTTTTTCGGAAGGTCTCCTGGGAGCTGCTGTTGATGAATGAGTGGTGGGTGGAC
ACAGGCTGCCCTGGGCAGGGGTTTTCCTGAATGAAAGTTCTTTCCTGTCCCACCAGGGCGCTGACTCATG
TCTGATGGGACTTGCTCCGCTCTTGCCTGGGTACTCCAGGGGCACAGCTTAACACTCTGTTTCTCATGCC
CAGAAAAAAAAAATTGACAGCCCTTTGTCTGTCTGCCAAATTAAACCCACAATAAAGACCAAAAGTCAAA
ACTGAGTCCAAGGCTTCACTTCTCCATAGGGAGATGAGTTTGTTGGGAGCTCTGGGCTAGAAAATGACTG
TGGGATTCTGAAGAGACTGAAAGAACCGATCCACAAGAATTGATGACAAAGAAATTTGTCTTTGTCTCTA
GAACTTTTAGGGGGAGGCATGGCTACAGGAAAAGGAAACCACCTGCTTCTACCGTGAATTTACAACCTAA
TTTGACAACTTTGTATTTGTATGCATTTAATGCTAGCTTTTTGGTGTCTGGATAAGAGTGGGCCCCTCAC
TGACAGTCACTCCTTGCCTTATCCATGGTCTTTAGTGTTCCTGGAGAGGATCGCTTCTTCCTCATGCTTA
CCCTGCCTCTGTGGTCATTTCCTTCGCGCCCTGCTGCTGTGTGCTGGATGCTGAGAATGGCTAGGGCCCT
GAGCCCCAGTGATTGAAATCACACTCTGGGCTCAGTTGCCTGAAGGAACAATGGAGAGCTGTAGCTCAAG
GGGCCGTCCTTGACACTAGCCTGCTGAGTTCATGAAGAAAGGAGCTGGAGGCTGGGGGGCAGATCAGGCG
GTGAAGAGTTTGTCATGTTAAGCATGAGGAGCTGAGTTCAATCCCCAGAGTCCACACTAGAAAATAACAA
GGATTGAGGAATCTGGAGGGGGCAGGGACTCCACAGGAAGACCAACAGAGTCAACTAACCTGGACCCTTG
GGGGCTCTCAGAGACTGAACCACCAACCAACGAGCGTACCCAGGCTGGACTATCTCCATCCCCTGCATAG
TTGTAGCAGCTGTGCAGTTCCCCCAACAACTGGAGCAGGGACTTACCCTGACTCTGTTGCCTGCCTGTGG
ATCCTGTTCCCCTAATTGGGCTGCCTTGTCTGGCCTCAGTGGGAGAGGATGTGCCTAGTCCTGCAGTGAC
TTGAGATGCCCGGGTGGGTTGGCACCCAGTGGAGGACTTCTTTCTCAAAGGTGAAAAGGAGGCGTGGGGG
AAGGGGCCGTGTGAAGGTAGGACTGGGATGATGGGGGGCTGTGATCAGGGTGTAAAGTGAGTAAATAAAT
AAATTTAAAAAAAAAAACAGTAACAAGGCCAGGCATGGGGCACATGCCTTTAATCCCAGCACTCGGGAGG
AAGAGGCAGGCGGATTTCTGAGTTCGAGGCCAGCCTGGTCTACAAAGAGTTCCAGGACAGCCAGGGCTAT
ACAGAGAAACCCTGTCTCGAAAAAAACAAAACCAAAACCAACCAACCAAACAAACAAAAAAACAAACAAA
AAAACCCCAAAAAACAAAAAATAATAACAAAACCGAGTGTGGATGTGTGGGGTTCTTGTTATCCCAGCAC
TGAGTGGGAAAGAGCGCAGACGGGAATCCAGAGGCTTGCTGGCCAATCAGCTCATCCTACTTCTCAACTC
CAGGTCAGTGGAAGACTCCGTCTCAAAGAAGAGGATGGCAGCTGTCTTAGTTAGGGTTTCGTTGCTGTGA
AAAGATACCATGACCAAGGCAACTCTTATAAGGGACATTTATCACCACAGCAACTGAGGTTGTTTTCTGG
CCTCCAGACACAGACATGCATACGTATACACAGAGAGAGAGAGACAGACAGACAGACAGAGAGGCTTGTA
CACAAATGTATACCACATGCACATACACACACGGGCGGTGGCAGGGAAGAGGAAGAGGGAGAGAGGCACA
CATGCAAACACATGCACATCACGTGCATACTACATGTGCGCGTGCACACACACACACACACACACACACA
AGGAAGGAAGAGCCGTCAAAGAAGAAAGCATTTCTCACCATCATTTGTTGCCCCAGCAACTTCACGCTTT
CTATTACGGACACACTTCGGCACTGGGTTGTGGCCACTGTGCTGGGAAGCTTAGGCAGAGGGGAAGGCAG
ATGAGAGTTTGAGTGTGGACAGCGCTGTAGGCTGTGGACTGGGCTCAGATTTTCATCCAAGATGGTGGGA
ACCCACAGGCTTGTCACTGTCACAGCAGGCTCTGGTCTCCATTTTCAATCATGCTGCCACTTAAAAGTCC
CTTCCCACAAAGCCCAAGGGCAAACTGACCCTAGCTCTTGGAACTCAGAAGAGTTTCTACCTTGGAGGTG
AGGCAGGTGGCAACTGAAGGGACCCAGAGACCTTTGGGGAAGCTGGTACTGATCTAGTTTTTATTATGGG
TCCTTGAACTGTAGCCAGCTCGGGAATCTTTAAGCTGTACTCTTACAACAGATGCATTTTCTGTGCGAAT
GTACTCCAGTAAGAGCTTTCTCAGAAGACTTCTCTGGCTGTTTAAAGAGTAGATCAGAGCAAGGAAAGAG
TAGGTATAGGAAATGAGAATAGGGATGTGTCTATGAGTCAGGGGATGTCACCAGCTGCTGGTGTCAGGGA
CTGGAGGGGACCAACATAGATGAAAAATGTAACAAAATTTGAGATTTGGCTTGGAGGCACCGAGGGCAAA
ACCTAGAATCCAGAAAACACTGTTGGAAGGCAGGAATGACGGGGCATGGACTTGATAGGAAATGGGTGGA
AATAGGAGAGGCACAGTTGAGAGGAAGTCAGCCTGGGGAGGGAGGGCTTCAGTTAAGCATCCATGCTCCC
ACAGGTGGGTAAACAAGACACCAAAGGTTGGTACATGTGAAAGCACTGATATACATCCCGGGGACCATCA
ACATCTGGGGGATAGAGAAGACATCTCTTATCAAGGTTTTACAATAGAAACAGACCTAGAGGAAGTGACA
TCATGTACTCCAGTGCCCATCCTTGTTGAATTACCTGGTACAGAGGTTCACATCTGTGATCCTGACTCTT
GACACTTGGGAGGTAGGAGTTTGAGGCTAGCCTGGGCTATATAGCTAGACCCTATCTCAGACAGAGAGAG
TGACAGAGACAGAGACACAAGAGAGAGACGGGTAGGAGGTGGGATAGAAAGGAGAGATGAGGTGGGGGAG
TCCTATAGGACTTAGATACTTTTTGGAAAGCCTTATGTGATCGCCAGGTACTGTCAACTTCAGCAAAAAC
AATCTCTGTAGCACCTCCTTCCTCTGAGCCCTCAGAAGAGTCAACATTGTCACACAATGGAAGAGTAGTA
TGACTTAGTGTCTGTTGGCTGTTGTCATTTGCCAACTACAATATGAGATGAGCTTGCAAGTTGCCCTGGG
CCTTCGTCACCTTCTCCACAGGGTTATGTGAGATTATCTAGGTTTGCAAGCATTTACTGAACATGTACCA
TGCATTGGCTTACTGATGTGACAGTGAGAGCATGCCTGGAAAAAAAAAAGCAATGGAAACAGATAATAGA
GACAAAGATGATGTGACGGCCCCACATGCCCTCCCTCAGAGCTCCCTAGCGGTCATTGCCCACTGATAGG
ACCATAGGACCCCTCCTTGGAGGGACTCTTGTGAGACTGTCTTTGTATTATAGTTTGCACTTTCTCTATC
TGAAAAACTGGCTTCCCTTTGCTTGAAGGCAGGAAGGGATGGGCTTTATCTTCAAATCCTTCCAGGATGT
GAGAAAAAATATTGACATCCCATCTTGTTACCAGAACAAAGACGAGGAAGGATATAAAATAGCAACGTTT
CCATATTCACAGGGTCTAGATGTCCCTTCCCTGCCATAAATGCATTCAAGGCACGTTGGACAACGGCGGC
TTCCTTTCAACCCAACAGGTGACTGCGAGCCAACTTCCCCCAGCACAGGATGGTGCTTGTTCTTCATTAA
GGAGTGTTTTCACTGTCTTAAAAGACAACAAAAGCTTTTCAGAATCTCTGGAGAAGAATTCAAGCATATA
TTGACATGAACACTAGGGATAATTTTATTTCCAAGTGTCTATTTGCCCAGGAAAACGTTCTTCTAGTGAA
TATGATAAATCCATAGAGTCTCACATGCGTGCATTTAACCTCCCCTCCCCCAGGCGATCTCTCAGCTTGC
TCTTCCATGACACCTCGTCACCACCTCCTTGCAGTGGTCTGCCTCACACACTCCTGGGGCTGAGCACCAA
GCACAAAGCCCCACCCCCACACCGGGATGGGGGAACCAGAGCATCTCGGAACATCCAGTGCTGGACGCCT
TTTAGGGTTCCTAGTGTGGTTTGGGGTCCAGGATTCCCACTGCTTCTCTCCTTTGTGCCCCAGATTTAAA
ATGAGGATGCAGCATGGAAAGCCACAGGCTTCCTGTCCACAGTGAAGTTCTACATTTTCTTTTACTTCAA
AGGACACCCCAGGACCCCATCTTATCAAAGATCCTTTTTAGTGAGATTATAATCCCAGATCCAGATTCCC
AAATTGCCTTCTTCCTTCCCTATGAAGAGACAGGAGGTGTCTTATATCTTCCGTGCTCCTCTTTAGACTA
CTCTGGTACTTTCTTTTTTCTCTTTTCTTTTTTCTTTTCTTTTCTTTTCTTTTCTTTTCTTTTCTTTTCT
TTTCTTTCCTTGTCTTGTCTTGCTTTTCTTTTGTCTTGTCTTTCTTTCTTTCTTTTACTTTCTTTCTTTT
CCTTCTTCCTTCCTTCCTCCCTCCCCCCCCCTCTTTCTTTCTTTCTTTCTTTCTTTCTTTCTTTCTTTCT
TTCTTTCTTTCTTTCTTTCTCTCTTTCTTTCTTTCTCTTCTAAGAACCATCAGGACACAGTGCTTTTCTA
GTTCCTAACAATGCTAATGTTCCTGATGCTACCTTGGCTCATTTCTCCTCCAAAGGACATCAACTTTGAG
CCCAGGCTGGCTATTTTGAATCTGAGTGTTATCTTGTGTAGACATTCTTCCTGCATGGGAATATACTTGA
TTTCCTGAATGATTGTGTGACAGAGACACTCCCCACGGGGGCACTGGGCTATGCCCGGCAGAAGGTACAG
GAGGCTTAGGCAGGCTCCCTGGCTGTTCCAGGCCTTTCTCCCTAGGTCACATCTTTGTTTTACATCCCAC
TGTCCCTTTGGAAAGACAGTAATAAGGATTCACCATCCATCTTCCAATTCTCTGGGCCCTCAGGGGGGTC
TCAGAGGCACCAACTCAGTCTCTCTCTCTCTCTCTCTCTCTCTCTCTCTCTCTCTGAAATGTCAGATGAC
TCTGGAAAACATCTTTATCTGTGTTGAATAGGGTACCTTGAACCTAGGACCTCACCGTTCAGCACTTAAC
CCCTGGTCCACTGCCGGCCAGCAAGGAGGATGAGCTGTGGGCAGGGAAGTTACGTGGGAAGGAGCACACA
CAGAGTCAGAATCACCATCAGGCCGAGTGCCTGCAATCAGAGGCACACCTTGCTCTGCAAGACTCAGCTA
GCGAGATAACAGTGTCATAACCCGAATGTGCTAGGGTTATGAGGGAGGATCTGTTTGTACTTTGGGATTG
ACAGTTTAGTCCACTGCCCAACATATAATAAATGGTCTCTTAATGGTGTTCTTGACACCACTGTGATTTG
AAAAAAGCACACCCATACCACCACGCTGTCCTCCAATTTCAGTAGTGGTCAGTAAACTATATGAGGTAGA
GCCAACAGTTTGTTATGAAATAGGCTTTCTCTTAAATGATTCTGCTCCATGATAGGCTGATATAAATGTC
TTACCTGGCAAGTGGGAGAAACATAGACATGTAGAGCATTTTCTATTTATGAGAAGTTTATTAAATATGC
TTCTTGGAGCCCTTCTTTATTCATTGAGAAAGTAGGGGCACAAGGATGGGAATAGATTGGGTTTGTAATT
CAAGACGGTAGACTAAACACATGCTCATTTCTCCTCAGCTCCAACATCCCCATTATGATGAAAACGGTGA
TTAAGGATGATTAAAAAAAAGGACCAGAAACAGTTAAAAAGGGGGACACACTATGAATGGATGAAAGAAC
TCAATAATTTCTGTGGCATGGACAATGGTTAGTGGATGGGTCAGACTGGGAGTCACAGACTCTCAGGTCC
CTTCAAGGGGTGTTCAGTGGTGGGAAACCTGAAGCCTGCTGCAACTCCAGAGGCAGCAGGGATAGAATCT
GTGAGTATTATGAGGTAGAAAGCTGAATTCTTGGGGTGATAGTCAGCAGAGGACAGCCCTTTGCCCAGGG
GAAAACCCAAGCGTCCCTTCATTGTGAACCAAGGGCACTATCACCAGGGGGTTTGGGGCACTGGTTCCTG
TGGCTTCCAGTTTGTTTGCCACAGAGTGGGGTGGTCTGATAATAATAAAAGACCGGCAGAACTGTGAACA
GCTGGGAGGAACAGGGAGAAGGACACATCTAGGTAGCCAAACCCCTATCCACGATGGTGCATGCTCTAAA
ACGGCAGAGCAAGACGTCCTAGAACAAGCATAGCGGCTTGAGATGTGTGATCAGCAGAAAGCCTGTTCCG
TGGACCTGCTAGAGCGGCTAAAGCTGCTTGCCCATAGGTTTGCTACTCTGAGCCCTTCTGTGCTGCTTGA
GGTTTTTTTGTTTTTGTTTTTGTTTTTTAAATTTACACGTTGTTGTATAGATGATAAGATGAAGGGGGAA
AACAAAACATGTGAAAAAAATGTAAACAGATTTTAATGTTCTGTGTGGAATCTGGTTGACAGAGGCCAGG
AGTTCCTTTGGGCTAGAGCTGCGATTGGAAACCCATCTGGTCAAGAATTCCGTTCCTCTACACAGTAGTT
AGTATTCCTGACAGCCTAGGCTGTCGTTAGCTCCAGCTTAGAGATGGAAGAGGAAGAGAATGGTCTCTGA
GCCCAGGGGTCTATGCTGTTGCTGTTGCTGTTAGGATAGCATCTTTCTCTAGGATCTGGGTCTCCTCCAC
TAGGCTGTCTAGCCAGCAAGCTCCAGGAATCCTCCCACCTCTGCCATCGCAGTACTGAGGTTTCAAGTGC
ACACCACTACACCCAGTTCTTTGGGGGTTTTCCCACAGGTTCTGTGGTCTGATTGATTGCTATAAGAAAC
ATCTCACAGACCGAGATATCTCCCAAGTCCTCTCTGAGGTCAGAGAAACTAAAGCAGGCAGCAGAGGACT
CAGAGCAGCCCGGGCATACCCAGAAACACCCAACACTCATGTGGCATCAGAGGAATGTTTCTTTATGTCT
GTGGCTTTTCCTTCTTCTCTCCTTCCCTCCCTCCTTCCCTCCTTCCCTCCCTCCTTTGGGAAGGACTGCT
TCTTCTAGACCACAGACAGCTGCCATCTAGAAACACCGGAAGGCCATCAGCTGATGCCCTGTCAGGCCAC
TTAAAGCTTTTTATCATGCTAGCCAGCTCCAGTCTGAATTATCCCAGTGAAATCACATCCTAGTGGCCAT
GAGGGCTCATGAAGGGAAAGTCCTCCCTCCCTGAGAGCTGTGTTCACAAAGTCAGAGCTGGGTGAGAGCA
GGAGCAGCCATTACCTGGGGGTCCGTGCGTCAGACCTGCCTGGCAGCTTCAGGGCCAGCCAGTGCTTCTG
TGGTCTAATGCCAGTTAGCTATAGCTCCAATGTCTAGACTAGGAAAAAGAACGAGTCAAGAACATGACAA
TGAAAACTGACCAAACAAAACTGTGTCCCAGGTGTCCTTGACCCTTCCCCATTTATCCTGAGTTCTCAGC
AGTCCCTCACCCTGAGTGCTTATGGTACAGTTAGTTGTCCTCCGCATGCCACTGAAACTTGCCTTGGGCC
CCAGACCTCTCTCTATCATCATGTGCATCCTCTCAGCCTTCCTTTGGTCTTTTTTAAAAAATATTTTTAT
TAGGTATTTTCCTCATTTACATTTCCAATGCTATCCCAAAAGTCCCCCATACCCTCCTCCCCTTCCTTTG
GTCTTTAAAGGTCACTTCAATTTCTCTGCTTTTTTTCTCCTTTACTCTCCCTGCCACGCCATCCTCATTT
GTTAGGACTGAGGAATGGAGCTGTGAGCATGACCTGCACATTTGGATGTCTGAGAGTCTCCCTCATATCC
AACCCTGCAAGAAAGGTCCCCAAAAGGGAAGGCCTTTGCTAACTTCCTCTGTGAGATGTACCTGTAAGAG
TCTGTCTCTCTGTCTCTGTCTCTGTCTCTGTCTCTGTCTCTGTCTCTGTCTCTCTCTCTCTCTCTCTCTC
TCTCTCTCTCCCTCCTTCCCTCCCTTTTTGGAATAGCATGCACACACAAATCTAAATATTTACACGGGTT
TTGAACTTTTCAGCATAGAGCCCTTGAGTAAACAAACACTCTCACAATGTTGTCAATGCTCATACTTTAA
GACAACAACAAAACCAGAAAACTTTGCGGAATGCCCTTCAAAGGGTCAGGATATTATTTTGAAAACCTTC
ATGCCTCTGACTCTGTCCTCAAGGGAATTTTCCTTTAGTCAATTTTATTGAGGTCTACTTTGCTTATAAT
AAAATGCACACACTTTAAGTACAGACTCTACCTGTATAAATATCACTGCTATAAAAATGTAGACGACATC
AACCACATCAGAAAGTCCCTGTATTCATAGTTGCAAATTTTTAACTTTTGTGGTTTGGGTTTGGCATTCT
CAGGAGCCATTCTGAGTGAGACAAGTAAGCCAGGGGGATAGCTGAACCGTGCTTACAAATTATAGCCACG
TCAAAGGGGAATTTTATACATGACAGAGACTGATCATTGCAATGAACCTGCAGTACCCTGGCTTTTCTGA
CGGCTGAAGCCTCTAGATCCCAGGTTATTGTGACATTTTGAAAACACGATGCTCACCTGCTTCCTCTGAG
CCAGATATTGCTTCAAGCCCTGGGGGATAATTTGTTCTAAAACTCTCCAGTCATGTTTTCTCCTGTAAGT
CTAGAGCCTGTTGAGGAAATATCAATAAAGAAGAAATCTTGTGTGTTGTACAATCTATAGAAGCAAGAAG
TGCCTGCGAACAGAATGAGAATAGAGGGAGGAGATGGAAAGTGGCTGACCGTAGTAATCCTCGGACTGCG
TCTTTACCTTTCCTTGTCTTTCTGTGAAGCATTTTGGAGTGTTTTGTTGTTGTTGTTGTTGTTGTTGTTA
AATGGAGTTGAGTGGAACACCTAGCTTCTTATAGGTAAAGGGTGGGCCAGGTTCTGGGGACCTCAAGCAA
GTAAAGAACTTGCCTCCCAAGCAGAAGGGCCAGAGTGCAATCTCCAGCATCCATGTAAAAAACCATGTGT
GGTGCTATGTGCTCGTAAGTCCAGTGCTGAGTTGTAGACACAGTGGATCCCTGGAGTGGATCCCCATGGC
CAGCAAGCCTTGCCTAGTCCGCCAGCTCCAGATCCCGGAGAGAGTCGCTGTCTCAAAAAAACAAGGCAGA
TGGCTCCTGAGGGGTTGACTTCTGCTCTTCATGTGTTATGTGCATAGACACACACACACACACACACACA
CACACACACACATAGGGGGAATTGGCTTAAACAGAGCTGAGCAGGTCTTTAATGAAGTCTTTGACGTACT
AACATAATTGCAGCTTTTCCTGAGGGAAGGCTGTAGGACGCACCAATCTCCAGATATTTTTCTCCTGTAA
ATCCCACTGGATTTGGCGTGTGTGGAGCAAGGAGTCATTTTTACAGCTCCCTGAATGTAGCACATGCAGC
TTCCGCTTCTCATGGCACAGAGCTGAAAGCCACAGAGAAGTTCATGACTAGGGGCAAGGAAGGGAATGAG
GTTGGGCAGCTTGTGGGTCCAGCATGGGGCCAAGAATCCCAAACACAGCCCTTGGGTAATCTTTTTGACT
AGGGTGTTACAGCTCCTAGGTACTGTGGCTCAGAGTGACCCCATTGGTAGCCAAAGATTCCATGCAGAGC
CAGGATCCGAACCTAGGCCTGTTTTACTCCCAAACCCAAACCTGCCTACACCAGGATGGCTGTCCTAAGT
GAAGTATAGAGAGGCTGTAACTCAGCAACATGCCCCCACTTCTCCACAGTTAATCTACATGTCCCTTCAA
GCCACATACTCTTCAGGGGGCATTTACCACTTTTTCCCCCCACTGGCAGGTGATCGTTTTTTCTTCTCCT
GCTAGTTATGAGTGAGTATTTGGTAAGTCAGAGCAGACAAGGACACGGTCTCCTGGTTCTGTCCTCATGA
AATGGTATGCAGGGCCAGATGCCTGTGACCCTGGGAGTGGCCCCTTGCAGCAAGCTCTGCCAACCTACCC
CTCCATGGCTTCCTCTTTCCCCTGCATTTTCTCCTGTTGTCATAGCCGCACATCCCACCTGTCTTTATCT
GCTGCATCCCCTGGAGGATGGGGCTCAGACCCGCATCAGTACCTCTGTCCCAGCATCCATGAGGTACCCA
GTCTGGTCACAGCTGCAGTGGCTACTGCTGACGTGGGCATTGCCGCAAAGGGACATGGCAAAGAGATATA
GCAGGGTCCTCACTGTAGCCCAGGGGTGAAGATGTGGAAATCCAGCACTTACTGGAAATAGCAAAGGAGT
ATCTCTCAGGAAAGGCTCTGAGGCAGTTTGTCTCCCACCATCCCCGTCTTCCTCTCAGGAGACAACAGAG
GAAGTTGGTAGGAATTACTCACGTCTGCTAATTCATTACTAATTGAAAGGAAGGGAGATGGGTCTTCTCT
AAGCTCAACGCTCAGAAGCTAAAGTATACTAACTCTGACCTTGGGTCCCCTTTTCACGTCTGGCCTTGCC
TCCTTGGCTTCTGTATTTTATTCCATTTAGAGTTGCTGACCACTCAACTTCTGTGGGAGTCTTTGATCTG
GTCCCTTTTCACATATCCTGCAAGACGTCCCTGGCATCACCAATACCATCAGCGACACCTTTATCCTATC
TTCACTAAAATTCACTGGCTTAGTTAGCATCACCTGTCAACTTGACATAGCCTAGAATCATCCTCCCCCA
GCACCCAAAAAAGAATATTTGTTGAGTAATTGTCTTTATGGAGTTGATCTGTGGGCATATCTGTGAGGGC
TTATCTTGATTGTGAATTAATACAGAGAGCTCACCCCATCATGATGGCACCATTCCCCGGGAAGGTGACC
CAGTGCTGTGTAAGGAAGCTAGCTCTATAAGAACAAGTCTGAGAAAGCCAGAGAACAATGCTTCTAATGA
CTTCTGCTTCAAATCCCTGTTTGAATTTCTGCAATGGCCTCAGTTTCTCCATTTTGGAAAACAAACTGGG
ACAAAAACTCATCTTCAAAGCTGATTTCATCATAATATATTTAAAAATAGGGGTTAGAGAGATGGCTCAG
CGGTTAAGAGCACTGGCTGCTCTTCCAGAGGTCCTGAGTTCAATTCCCAACAACCACCATGATGACTCAC
AACCATCTATAATGGGATCTGATGCCCTCTTCTGGTGTGTCTGAAGATAGCTACAGTGTACTCATATACA
AATTACATAACTTTAAAAATATTAAAAATATTCCAGCCAATGAAAGGAAACACAGAAGACACTTTCTGGG
AGGCAGGACTGAAGAGATTTCTCTGGCCAGCAGGTTCTCTGCTGCTTCTGGTGAGGAGGGAGCTGGTTGG
TGGGGCTCAGAGGCAGGCAGCAGTTTGGAGAGCTATCTATTTCTCTGAGTACGGTGGCCTTCTTGAATAT
AGAGGCCATGAGTACAGACGGACATGCAGTGAGATCTGGTCTCTGTCAAAGAAGCCTCGAGTTGGCCTTG
CCAAGGCTCTGTCCAAGCAGCTAGGTCATTCCACAGGCTGGAGGGAGGCCCCAGCAGCAAGACCAGCTCA
GTTTCGGAGGGAAATGACAATGAAGATGGAGACTTAGTTGCTCTTCTCAGACACCGGCCCTTCAGTCCAG
AGAATAACTTTAGCAGAGTATGAAACATAACAGCACCCTACCCTTCTCTGGAGGAGAAACACTACCCAAA
GGAAACCTTCCAAGCACAACTTAAGGATGTGGGTCTTGTGGCTTGGTGCCTGTTCATGCAGCAGCTGAGA
TCCCAGGGAGACACAGCCTGGAGCTGAGGACACCATCAAATTCTTCTTCCATATTGCAAGATGATATCTA
ACCCTGTCTAGTATGGAACTCACATTTGCTCAGTACACACAGGACAAGGCATGTGAGGCCAGCTGGGACA
CAGTGACAATTAACCTCTGGGCATTTCTCCAAGGCCTTGAGCATTCATCCAGAGGGGAATATGACCAGTC
AGAAATTTTCTTGGTAGGAGGTCAAGATAGCCCTGATAAAAGCCCAGTAAGACAGAATGAGGATATTCAT
TTAAGTAGATGGTAGGAGGACTCTGTCAAACCACCTTCCTAGAGACATAAGAACTTCCTGGGCGGGCTGG
AGAGATGGCTCAGTGGGTAAGAGCACCCGACTGCTCTTCCGAAAGTCCGGAGTTCAAATCCCAGCAACCA
CATGGTGGCTCACAACCATCTGTAATGAGATCTGACTCTCTCTTCTGGAGCATCTGAAGATAGCTACAGT
GTACTTACATATAATAAATAAATAAATCTTTAAAAAAAAAAAGAACTTCCTGGGCCTTGGAGGATGGAGG
TTATGAGTGAGGACATGCCAGGAGAAGTGGAGCATCCAAACTGAGGCCCAGATTGAGTAGTGAATGACCT
TCAGCCCTCTCATGGCACAGCAGGAAGACCAACTAGCAGTTCATGAGAAAATCACGATACGGTTAGGGAG
CAACTCAAGGTGGCAAAGGCCCTTGACACTTGTCTAAGGGGGGGACCTTGCTTGGGGATGGCATTTCCCA
TGGTTTTAGTGGGCTCTTTGTGACAACAGTTATAACTCATTAGGTAGAGTGCTTGCCCTGGTCTGCACAA
AGCCTTACGTTCAACCCCCAGCACAGCACAGAAACAGAATGTGGTAGCACAGGCCTGGGAGCTCAGCACA
GAGTAGAGGTAGAAGGGTCAGAAGTTCAAGGTCACCTTCAGCTTCAGAGAGAGTTTCAACCCAACTTGGG
AGACAAGAGACAGGGTCTCAAAAACCAAACCAAACCAACAACAAAACCTGGGAAATCTGGGAGTGACTAG
CACTTTCAGACCATTTGCCATGGGGTGGAATATGTGGTATCTGATAGAGTTTCACCCTCAGAACCATCCA
TGAAGTGTTTCCATGAAGAGACAGTGCCAACTGTCTCAGAGAGCCCTGGATGGAAGGCTGGGCAGGCACC
CGGGACACTGGGCAGAGACCTCACAAGCCTGTCATCTGTCCCCCAGGTCTTCGTGCTTTGTCATGGCCTC
CTACAGCTCTGCCAGTTGCTCTACAGTGCCTACTTCAAGAGCAGCCTCACCACTATCGAGAAGCGCTTTG
GGCTCTCCAGTTCTTCCTCCGGTCTCATCTCCAGTTTGAATGAGGTGAGTGGGAGGCCCTTTATTTTAAA
AGACTTTTAAAATCAGACTTGTGTATTGTATGTGTGAATGTTTTGCCTGTATATATATATATATATATAT
ATATATATATATATATATATATATGTATGTATGTGTGTATGCATGGATGCATAGCAGACAGATGTTTACT
GCCTGAGGAGATCAGGAGAAGGCATTGGATCTCCTGGAACTGGAGTTACAGATGGCTGTGAACCACTACG
TAGGTGTTGGGATATGAACCTGTGTCTACTGCTAGAGCAGCAAGTGCTATTAAATACTGACCATCTCTCC
AGCCCTGAGTGGGACGCTCTTGCCAGGTTAGGTCATTGTATGCACTGACCTAATCTCTGAGAGGTACATA
AGAGGGGCAGGGTTTACCTCCTAGTGCAGAAAACCACCCCTAAATTTTGGTCTTTGATTTACTATTGTCC
TCATAGACAACGGACGGCAAGGAAACAAACCTTTGCCATTTATGTCACCAAAGCCTGGCCCTGGCCCTTG
GATGTATCACAAGTCACCCACAGCTCTTGGTGAATCCAGACATGGCCTCTGGATTCTTCTCACACCATGT
TCTAGGCTCCGTGACTAAACAAATGAGATCTAGCATATAGGATAGACCCTCTCTTACAGCAGTCAAGAGG
AACCAAAACTATGATTCCCACACCTAAACTTTTATCTGCATCATTAAATGCTGGGAATAAAGCTGTGGTC
CAGGAACACATGGAGTTTGTAGGCTGCTGTTGCTGCTGGCGGTGGTGAGTGTGTGTGTGTGTGTGTGTGT
GTGTGTGTGTGTGTGTGTGTGTGTGTGGCCAGGGGTGTGTAAAGAGAGTCCAGCCTGGTGCCAGGTTAAG
TGAGGGCATCTGAGTGTGTGGTGAGTACAGACCTTCAGACTGAAGCTCCAATCTCAAAGCCTTCCTGGCC
CCAGGTGATATGAAAGGACACAGAATGCCTATGGTAGTTCAAAGGCAGGTGAGGGGCTAGAACAGAGAAG
CCATGGGTATCTTGGCCTTGGAAAGCAGCAGCTCCTATTATTCACTCTGACATGACATTGAAGGATGAAC
AGACATGGCGGGTTGGATCCCTAGATCCCTAGATGTTAACCCCTAGTCTTTAGAGCCCTTTGGTTTTGAG
ACACAGAAGGGCAAAGTGTGTTCATAATGGGCTTTATGTCAGATTGCAAATGTTTAACACCAGCGAGTCG
GTGTTAAGCTGTTTTAGAGGCACTCCGGGGGTGAGACCTCAAGTCCTCTCCTTGGCTAGAACAACTGCAG
CTTTGAGGTCTAGCAACCCATGGCTTCTGCAGGTGAGCGCAGGCCCACATGCCCCGACCTTTCTTCCTGA
TTTGTTTTGGACCCCTCCACCATCTGTCATGCACAGACCCTTTCGAGTCAGCTGACAGCTGAAATGGTCC
AACACTTTAGTCCACATACAAAAAAATAATAGAGATGCTAAAAGGAAAGAAATGAAACCCAAGAAGCTCA
AGAAGAAGCTTTTCCTCTCTCTGCAGAACCCGCTTCAGAATGTTCTAGAACCCTCAGGCTGGAGGGCTCT
CTGCTAAAGCCAGGCTGCCTCCGCATACACCTCACACACCCTCACAGCCTCCTGTGTGTGCCGCAGCCTC
TGTTTGTTGGTCATGCTCTTTGACACATGTCAATGAGCACCAACTTTGGGCCAGGCACTATCCTAGATGC
TAGGGAGGCAGAAAGGAACAGACAGACAGAAAGCTAAGACAAACATGTAGAAATAAATCTCTAGTAGGTA
GATGGTAGGCTCCATGAGAAGGTGGCATGGGAGAGGAAGAACATGCAGGGTCAAAGTGGTGGACACAAAG
GGACATCCCTTGTAAGGAGCACCAGGAACAGTGTTCCTGATGTCCACACTGAGCAGGACTTGGAAGTGGT
ATGGTCCTTGTCCTTTGTTTTGAAGAATTTAGCATGGGGATGGGGTGGGTTAGAGTTATTGAGGCAGAAG
TCCATTCTTCCAGAAGATTGTTCTAGGACAGTGTAGACAACCCAAAATGGGCCTCCGTGGTTCCGGTTAC
CTCCTGACTTCATGGATGGAGCTATGACACTTACTGTTTGACTGTCAAGTTCTAGTTTTCTTTCGGTTGC
TCTGATAAAGACCATGAACCAAAAGGAACTTGGAAAAGAGAGTATTTATCTCGCTTACACTTCCATCCTA
GGTCACCATCACAGGAAGCCAGGGCAGGGACTGAAGCGGGAGCAGAGGCAGAGATCACACAGGAAAGCTG
GCTTCCTCCTTCAGCTTGCTTAGATTGCTTTACAACCCAGGACCGCCTGACCAGGGACGGCATCACCCGC
AGTAGGCCAGGCCCTCCCACATTAATCATTAATCAAGGTAGATGTCCCACAGACTTGCCTACAGGCCAAC
TGATAGAGATATTTTCTTGATTGAAGTTTCCTCTGCCCAGATGGCCCGAGTTCGTGTCAAGTTGACAAAA
AAAATTAGCCAGCAGAAATTTGACATTGAGAGTAGTAACATGGTGTCTGGGGCCATGCACATTGCTTGGT
TGTTATTCTGACGTTCAGTCCAAAGTCCCTGAGTCCATTACTTTGGACCTCATTTAAGTTAGGAGTTTAA
TTTAAAAATATATGCTACACTAGCAGCCAGCCAGGACTGGAGCTTCCTTGGACTTTTGCCCCAAAAGACT
TTTCTAGAAGGGCTAGGGTAAAAGCTTAGTTGGTAAGGTGCTGATCATGCAACCACAAGGGCCCAAGTTG
TCCCATCCCTAGAACCTACATTTAAAAAACCAGGTGCAGTAGTGGCATGTGTCTATACTTCCAGAGTTGG
GGAGGTAGAGACAAGGGGATCCCTGGAGTCAACCAGCATAGACTATTTGCCTAGCCACTAAGAAACTGTC
TGAGAGAGAGAGAGAGAGAGAGAGAGAGCACAGAAGCACACCCACTTGCTAACACACACACCCTACACAC
ACCCACTTGCTAACACACACACCCTACACACACACACACACACACACACACTTAGGTTTGTGTATAGACA
TCCAATATTTAGATTAGTTCTTTATGCTTTCAGATAATTTTTTGGGGTTGGTCTAAAAACCTGAGGTCGG
GATGGGTTTCTGATGGCCAAGGGAAAGCCAATGCCGTGAATCTACAATGTGAGCAAGACCATCTGGGCAA
GGCTAGTGTGGCTTTGTCAGGGACTGCACTAAAGCCAGACGGCCCCTTCACTGTCTGTTCTCCCTAGGTG
AGCTATGGTAGGTCTCCTCTGGGCTGGAGGAGGGTGGGACCTGGCTCTCACTGCATCCCTTGTCCTCCTC
TGCAGATCAGCAACGCTATCCTCATCATCTTCGTCAGCTACTTCGGCAGCCGGGTGAACCGCCCACGGAT
GATCGGCATAGGGGGTCTCCTCCTGGCTGCAGGGGCCTTTGTCCTCACCCTCCCACACTTCCTGTCAGAA
CCCTATCAGTACGCGTCGACAACTGCTGGTGAGTGGCTCCGACTCCTGCCTGGAGGAACTGAGGCAGGGT
GAGCACGGTGCAGAGCAGATGGTGGTGCTCCTGGGGTTGGGGGTCTCCGCTCTGAGTCACCTTCTTCCCT
CTCCCGCTAGAGACTGTCCTTGACTTCAGTAGTTCATTTTCTCTGCAGACTACATCTGAAGTGCAGAACC
TATTGAAGCATGCAGAAGCATGAAGTAGCCCAGCTACCTGGTTGTTAAGGATGTGGTTGCTGGCCTTTCT
CTGTGAGTCCTTGTGCTTTGTGCCCAAGGCAATCCAAACTCCACCTGCCTAGAACCAGAACCCACGGAGG
CTTAGAGAAAAAGAGGACCAGAGTGTGGGACATGATGAAGTTTGGGGGGTAGGGGGGGTCCTGTTTGTTG
TACTGTCAATTTCGTTTTAACTAGCATATCGCTTGTATGGTCCTTTTGTACGGTCCACTCGCTGATGCCA
GGATATTAGTGGAGTGTAGAAAAAAGTTATAATATGAGGTTTTATGTAACTTCTCCTGGAAAAATATGAA
CAAATGTCTGTTCACGCCATATAAGACACTACAACAACCCAAATTCTACTCAACTGTAGTTGGTGAATCA
ATAAATTCATTCAGGTTAATCACAGGAATATAGGTAAGAGATGATAGAAATATGGGTAATTCAAAGGCAG
CTACATCTCCAAAAGGCATACCCATCATGGGTGAAGACTCACAAAAGCTGTATGTTTGGAGCCTCCTGGA
AAGGTCTAGGTAACTCTAACGAGAGTCTCCTCTTCCCCAGCAACTGATTCCTGCTTTGTATGACCTAGGA
GGAAGCTTTGTAAATCTTGTAATTTTCGTGAACTTCTGAGCCATACAAGTTTCTATAGCTCCCTTCATCT
TACGAGTTCCCTACTTCCTCTAACCTGAAGAGAAGGTTTCAGTTGGGAAGAAATGGCTGCATCGTAGGTC
TTGACAGTTGAAGGTACTCAGATACTATTTCATGTTCCAAGTATCTAAGAAGAGAGAGAAGATGTGGGGG
AGGTCTTATCTCCTGACCCTCAGATAGGGGGCTTTTTCTGTGACCCAAACTTCTGCATTTTATTGGGGTG
TCTTGTGGCAGAATGAAGTAGACTTTAGAATTTATGTGGTTAAACATGGTATTGATTAGTACTGAAGTAT
CTATGAAAAGGTAACTTTTCTTTAGTCTTAATTTAAAATTATTTAATTAGCATATATTAATTATACATAA
TAGGTTTCACTGGGACATTTCCGTACATGTACATGATGTACTTGATCATATTCACGTTCTTTCTCCCACC
CTTATTAATCCTGTTTCTTTTCTACTGTTTCGTGTGTGTGTGTGTGTGTGTGTGTGTGTGTGTGTGTGTG
TGTGTGTATTTCATTAGGGTTGATTAAAGGAGTGTAAGTGAGGGTTTGTTTATAAGAACATGGGCACCTT
ACCACAGGCTTTTCCACTGAAGAAAACGTTGCTCTTTTCCCTACCAACCCATCAACTGATTGTAAATTGT
TGTTGTTTTAAATTGTTTAGTTTGAACTTTATACAAATTCTAGACAGCTCTTTGTTGATATAAGCTGTAC
AAATATTTCCTCCCCGTCTCTAACTCATCATGATATCCTTTTTAACAGACTATAAAGCCCTTCCAGAACA
GAAAGAGGTTTTAATTTTGACAAAATTCAATTTTTCCTTATTTTTTTCCCTTCCATGACTCATTCTTTCA
GTACTGCACTTAGGACCTCTGTCTGACCCCAAGAGAGAGATTTTTCTATGCACTTTCATGGGGTGTCTCC
ATTTTTTACATTTGCATGTAGACTTACGATCTGAGTTAATCATTTAGTTATAAATGCTCAAGATTTCCCT
CTTGTGTATGAATGTCACTTTTCAGCCCAATTTATTACAAAAACTGTCTTTTCAGCATACCATAATTTTG
TACCATTATAGCAGATAAATTGTCTTGGGCTAAGGCTGCAGGTCAGTGGTAGAAAGCTGACCCTGAGTTC
CACCAACACAGAGAAGAAAGCTGACGGTGTCTGTGGGTTCATCTCTGGACTTCCCTTCCCACCCCATGGA
TCTGGGTGTCTCCTTTGCCAGTACTGCAGGCCCCTCCCTCCCCTCCCCAGTGTTTTATTACATTTCATAT
ATATATATATATATATATATATACTTTGAGATCTAGTTGTTTATATTCAAAAGAAAACATTTTTTTCTGG
AATTTTGATTGGGACTGCATTAAATCCATAATCAACTGGCACACCTGTTGTGTGTAATCCTCTCATTGTT
AAATAGTTTGGCTCACTGCTGCCCTGTGTTCACCACTGACTGATGACTGAACAGGCTCTAAGCTGATGAA
TGCCTTTATCCTCCAGGAGAACATAGTCCCTGGATGCCTCAATGCCCACTGTCTATCACTGCTGCCCAGT
GCTGTGGATACTCCTAGCTTCCCCTCCCCACCCTACTCAGTGCTATTAATATTCACCCACAAGGCTAGAG
GTTTCTGTGTTCCTATTCTTCTGGGGAGGGAGACTTTAACATACTTTGTTGCTACAATGTTCCCCTATTC
CTGAGCTAGATCTTTTGTTGTTACTTTGATGAGTGATAAAATGTCAGAAAAGATCTTCCTTTCGCCCTTG
CTCTCTAATTGGTTTAGCTGCAAACAGCCATGAAATGAGTAGTTATCCCTGCTCAGAACTTTAAGGAAAG
TGCATCTTTGTCTTTTGGCGATTCTTAATGGACCTTCTCCATCTGTCTCATTATCAGCTCTTTATTTCTA
GGCCTCCTGGTTTTAGTCTCTCTAGTTGATCGTTTTCTTCTTTGCTTTGCTATCATAACATGTTTGAATG
TGGGCCAATCTGTATCTGTCTGGGAGTTCAGGTTTGTTGGGGGTTGGGAGTTAGTTGTTGGGATGTATAA
CCAAGATTTTTATGTAATTCTAAAATATGTCAGTCAAAAATGCTTCTGGTTTTCTTCATCCTTCACTCTG
GAACTTTTATGTAGATATACACGGCAGTCACCCTCATCTTGTAACCTCACTTTCAGTGGGTTGTCCCTCT
GTACCATCTTTTTAGTGATTTCCTTGAAGTACGTCTCCCCATTCTGTGAGTCCCTCTCTAGCTTTGTAAA
TCAGAACCAAGCCCTTCCATAATGTAAAATTTAAGAGCTGTCACTGTTTTGCTAATTTCTAGGAGATAGG
ATTTGCTTCCAAATTTTTCAGCCCCAATTTTGTGATTTCTTAATGCTTTTTTACTGACATACATATACAT
AGGTATGTTTCTTTGATGTCTTCAAGTATTAAAATATATTTATGTATGTAGCCTTTTTTGATATTGTTCC
AATAGCTCAAGCTTTAAGAATGTGGCCCTGTCCCCTTCATTTTGTCTGCTTGCTCACGTTCCTTGTGGGT
CCTCCCTTTGTATGTTCTATCATGTACCATGGAGCAAACTGTAATAAGTTATATGTGGACAGATTGGGAG
TGGATCTGGTTTAATATCCGTTTGTGTACCGAGTGTGCACTATCTGCAGGGATCTAGGGCTCTGACCCAG
CTGGAGCAACCAAAGAGCCCCAAGAGTTGCAGTTCTCCGAGAGGGAGTCAAAGAAAGGCAGCTCTTCCAC
TGCGGATGCTGCCCAGAGTTGGTGGCAGGGGCAGGATGCAGTGGGCAGCTAGGAGCCAAGGTTGGGGTGG
GGTTTGGGGGTCACAGGACAGGAGCCAAAGTAAGGCAGCTCTTCCACTGCGGATGCTGCCCAGAGTCGGT
GGCAGGGGCAGGATGCAGTGGGCAGCTAGGAGCCAAGGTCGGGGTGGGGTTTGGGGGTCACGGGACAGGA
AGTGGCTGAGTTAGCCTTGAGCAGCTTCCAGCGACAAAAGCTTCTAGAGAGAAAACTCTTCCCTAGAGTG
TTACAGTTCCATAAGACAGGCACTCTCAGACGATTCGGTGAAATAACTCATGCCCTTTATTCCTTCTGGA
TAGGATCTTATAATACGGTTTTCGGGGGGGGGGTGGGAACTGACAGTGGGTGCTTCCTATTGTCTTGGTC
TGAGATGTTAGGGATGCCTCATCTGCATGTGGAAGGACTTCAGGTGCTGTCCCTGCATGACTGATTGTCA
CAGTCCTCTCCATGGGGTGTCGTGGAAACCCTGTTCCAGGACAGGAACCTGGCCGGGAGTAGATTTAAAC
ACCTACAGTTCTCAAGTATGATAATTGCCAGGGTTTCTGAATCCACTCCACCTTACCAGGTTTTCTGCCA
GGTGGCCCCACAGGGCAGCATCATGCTTTACATCCTCGTGTGGACTTAGTGCTTCAGGACCACCGCTGCT
TTGGAGGTACCTTTGTATCAACCTGTTAGCTCAGGATGATACTGCCCTTGTCTTGAGAGAAGTGGGGGGA
GGTTATGGCTTGGTGATGAGCGGCAGTGAGGGCCCCGCACTGCAAATGTTCATCCTTAGTTCGATGCAAC
AGAGCTGTGTGATGTTGGTTGAGGATGGGTGAGCCACCCAGGAACGTGCTGAGCAAGTAACTGATTCCTG
TTTGCTTGAACATCAGGCTCTTCTAAAAGTAGATGTAAGGGCCAGAGATGGATCATTTAGAATGGCCGAG
GGAGGAAATTCCTCTATGGGTTGTGAGGCCTGTGCTAGAGATGGGTAGTTGGTTTGAATGGGCGTGGGGA
GGATTATAAGCAGGAGTGGGAGGGGTCTACAAATGAAGTGTCTACAAGGTTCTGGTACTGTCCCTCCTTC
CTCTGGAGCGTCCTAGTCATCTGCATAGGCGTGTCGCAGTCGCAGTCCTTGACTGTTTAAAGGCTGAGCC
TTGCTTCAGGAGAGACAAGGACGGAGACAGACCCAAACCTGTGGGTTCTTCCCTGTCCTTTCTCCCCTCT
ATCTGGGGGGGAGGCATGGAAACCCAGCTCTGATGGAGAGTCAGGCCTTGACCTTTTTGATGCATGAAGA
CGGGGCTAATGAGATCAGCAAGGGAGCCTGGAGCACTGGGGCCGAAGGGAGGGCACTTTGCCAGACACCA
CACACCAGGCTGGTCGGCTCCCCGCGGCCTGGGCCCACAGCCCATGGCATTTGCTTTGCACAATGTAGCC
ACGGGAGGAAAATTAGCGATGGCCTCACTCTGCTCCTTATTAGGGGTGGCTATTCAGATTGAGTGGGACT
TTACCACAAAGCCCAGATCACTACCAGCCCAGTCTTAACCCCGATGCTCCTGGCCCAAATCATCTGAGAG
ACTGTGGAAAGGGCTATTAGAAAGAGCACAGCTTGCCTGACAGGACCACAGTGTGCACAGGCTAGGAGAA
GGGGCTGGGCTGTTGTTGCTCCTGTCTGTGCATGTTCTGATTGCAACGAGGGTAGCACTTGCTCTGACAG
ACACTCAAGCAACATCTGGAAGCGTTCAGGGGTAGACTGCCTTCGGGGTCCACCTTTCTAGGGCCAGGCA
ATAAGAGGAGGAGGCCCGTGACCCAGGAGTCACTCTGTGTGCTTTGGCTGGGCTATGTACTAGGTGCCGA
TGCAGTGTGGAAGTATGGTGTTAATATGTTCAGATAAAAATAGTCATTAAGTCTCATTTTGTGGAAGGAA
TTATGATTTGTGGCTCCACTTCCAATATACTCTTATGGGAACTTCAACTTTGAATTATGTGAGGTCATCA
GAGTGGGAGCGACACCCAAATGTGGGTGTGTCTGAACTGTCTTCTGGAGCCAGGCAGTCCTAGGGCTGAA
ACTAACCATTGAGACTCTCTAATGGGAACTACAGCCTTGAGCCATTTCCTCCTTGCTTTGAGTCTTAGCA
AGGTCTAAAGAGAAACACTTCCCCATCATAAGGCTCAGGTGTAGCCCCTCAGAGTCCCCAGTGAGAACAC
ACATTGTGTCCTCTGACAAGTGCTTTGCTGTGGGCTGGGTAGCGTGGGAGGACCTGCAGGTGATCTCTAG
TCTTCATGCCTGGTTCTCCAGCACACCCTCATTTGGGTGTATGGTCCCTCTGGATGAGAACTTGGCCTGC
TGTTCTGACTAGTTCCCAGAGCACGCTGAATGAAGTTTCATCTGGAGCCTCTTAAAGTCACAGTGTAGGA
AAGGCTCGGTCCTCACTCCCATTGGTAGGCAGAGCATGGACTTTGACAGTCCAATCCCATCTCAGCTGCT
CTCTTGCCAACTCTTCTTAGGGGAGGCACTCCTCTTTTTTTCTGAACCTTACCTGTAATACAGGAGCAAC
AATACCTTCCCACTCTGTGTTCCCGGAATAGAAATAGACATGAAGAGCGTGGCTCATGGTGGCTATTGGG
GAAACCTACCTCTATTTGCTTGCCTTGCCGTCGCATTTGAAATCTGTAGTCGATCAGTTTCCGCTCCACT
CCTCTCTTCATGAGGATTTGCTGATTTCTTCCCCCATGGAGCAAAGCGGCCCCAGCAACGACCATGGGAA
ATGAAGGGAAACTATGATCTTCAGAGGGGGAAGAAAACTGAAGGAAGGCTGAATGTTGTGGGAAATCACA
AAGACCTTTACAACTAATTGCTAATTTAAAAAAGTCCATGCAGGCATTTATGGGTGTTTAGATTTTCTAA
ATGTCACTGGGGTCCGGAAATGTGCCTTGGCGCCTTTAGAGGCTAGCTACCCAGCCAAAGCCTCCATCCA
AGCCCATGTCTAGAAGATACAGGGAGGCTTTTGTGGATGGGAAACAAGCCAGCGTGAGACCGGTTCCCAT
AGGAGAGAAGAGAGGGGACTTATGGGAATCAGTGTTTGGAAGGACTAGGTGTAACCTGGTGAAAGATTCA
GTCTAGTCCTTCCGGAAGTCAGCCTGGAAGACAATGGTTGCTGGGGCAGGAAGTCTCTTGAAGGCTAAGC
AGGAAATGAAGGGAAGCGTTGTATTTTGGAAGCAATCAAGAAAAGAAAAGGAAGAAGCCCTTCCTGGTCC
TTGATGTCTGAGGCTGTTGGTCCCTAGGCTGTGCTCTTCGTGATGTCCCCAGGAAGATGGGCAGAGGGAA
AACACACAAAGCGGAGCCTTGGGACCCAGAGTGACTTCAACCCTTCCTTCCTCGGCTCTCGGCCTCCAGA
GCTCAATCCATCTCCTAAGCCTGGAAGGGGCCCAGGCCCGGGGCTCAGACAGAGTCACTCTGGAACACGA
GCTCGGGTCTGTGGTAAACACCCAGCTGTGGCATGAAATGGAGATGCTAGAAGCTCCGGGAAATGAGGGG
CAGGCTCATGGCGTGCAGGTGGCCCACGTGTGCCTGTGCAGGGTATGTGCAGGGCAGAGCTTCTCTACGG
GCCGATGTTGGGTGAGGTAGGGAAGTGGCTGGGCATGCAGAGGAGAGAAAGCTGGTGTGTGGGGGGATGG
GTACTGGTGGCAGGAGTGTGTAGACGCAGGGGTGAAGGTAGGGCGGTAGGAGGGTTGTGAGGAGGTGGGA
GTATCTGGGAAGGAGGGTGAAGAGAACATACATAAGAAGAAGTGTGTGGGTAGGGATGTGGGGGACAAGC
GTGCACGTGATGGGACTCGGGTGGGGTGGCAGTTGGCTGGAGAGCTGAGATAGGGTGTTACTAAAGAGTA
AAGGGAGCATGCGTGTTGGGGTGAGTGGGTGGGTAGTCAGTGGTTGCACAGCCTGGCTAATTGGAACTGT
TTAATCTGGAAAAAAAGGAAGAAGACAAAAAAACAAACAAATACAAGAAAGGAAAATATCAAAAAAAAAA
AAAAAAAACCACATACATGCTATTAACTCAACTAAAAGAAAATCAGTTCCGAACAGATGAGTAGACCAAA
AGCAAATGTGATTTGACGTGGACCTTCTTAAAGTCATGGTATAGGAAAGGAGAGGTGTAAACCTGAGGGA
TGATTGTAGGCACCCAGCTGCTGCACTGAGTGGCAGGGAAGGTCACAACTCTGAGGTTGGTGGGGCAAGC
TTCTCCACTGCAGTGGCATGAGAGACAGCCCCTCTCCAGGCACTAGCTCCTGTCCTAGGCTGTCCATGCT
CTGGGTCTTTGAGCATTGTAGTGGGTTTGGTCTGATGCTGCTTGTATTCTAATGCGGAATACTGGTTCCT
CAAAACGTGGTTGCCCTCCGCCCCACGAGCAGATCCTCATGTGTTCAAGGGATGCCATGTGAACCTTCTC
CCCAGTTTCACTGGTCAATAAAAGGCCTGTGATTGGGCAGGGAAGGGAGAAAGGTGAGACTGGAGGTTCA
AGAGATAGGGTGGCAGGTAGAAGGGGGAAGGAAGAGGAGGGATATAAGGGAGGAAGAAGCTGCCATGGAT
CAGAACCGTGTGGCCAAAAGGAACAGCAAGTAACAAGGGCCCTTATAGCTAGGAAATACGTTAGTATAGA
CCTGCCCAATCTAGGCATATGGCTTATAAATAGAATTTCTGGATTGTGTGTCTTTTATAAGGGCTTATTA
GGATTGAAATTTTAACTACATAGCATCTGTGTTGTGGGCAAGTCAGGTGCATTGAAAGCATCCTCCTCGT
CCTCCAGTAGGAGGCTAAATGTGGCTGGCTCCTCTCTACCTTCTGGGCCCTTGGGAACTACTTACTATGC
AGCCATTTTTCTTGTTCAACAGTGAAGCCAGGTAGTGGGCCTGCTGCAAGTGTCTTTGGAGACAAGCTCC
TTCCTGCCCTCCATTGAGTCACTCTTCCTGGATGGTTGGTAGACTCTGTCTCAGTCCTACCTAGGACGGG
GGAAGGTCTCCCTAAGAGCTGTCATTCAAGGCAGAGAAGAAAGGCTTTGGGCATCCTAGGAAACAGTCAC
TATCCCACTGTAGGATGGGGTTTGAAGAAACCGTTAGCCATCACTATAGGAGGTAGTGGACTCCTGAAGG
CCCAGGGAGTCAGAAAGGCACCTTCTATTCCTCTTCCTGTACTTGGTGAGGCTATTGACTGCCCAGACAC
CTCCTGTGACTGAAATACTTGACATGGATGACCCAGGCACACCTAGGCAGTGGGCACCTTTCTCCCACGA
CCATGCTTGCGCCGTCCATAATCAGAGAAAATGGAAGCTCGGGCATTGAAATAGGGAAAATAACACAACA
GTCAACTGACCCACATCCCAGGAACTAGCTGTTAGCAAAGGCTTGTGGGTATTCTGGAATGTTCCAGATA
TCCCCTTCCTGTCTTCTCCCTAGCCTGGGGTAGAAGAAGTGAGGAGAAGGCTGAGTAGGAAAACTCCCTC
CTCCACCACACACCCATCCTTCAAGAGCCCTGGTTATGTCTGGGTTGTATTCCATATCTCCAGAAGCTTT
GGTTATAGAAAGCTTTAGTGGCTGAAGTGCTTGAAAACCATATCAGGCCATGGGCAGACATTTTTATTCA
AGTACCAGGTAGCAAATATTTCCAGCTTGCCAACCCCAGAGACTATGAACCTGTTTAGCACTGTCCCAGG
AACACCAGCTTCCACAGGAGTAGAGACCAAAGTGTCTAGGCGTGTGCTGTAAAACTCACGGGCACAAACA
GGGCAGGGATCCATCCGATCCTAGCCTCATTAGTAGTTTCCCAAGCCCTGTGCTACATGGTTCTCCTGGC
CTAGGCTTACCCTATCCCTTAGAGCTGAAACCAAGGCTATGAATCCACCAGGCTGCCTTGATGTGCCCAG
TCACTCTCTTTCTTAGATATGGTACTATCTCCCATGGGTTCTAGTCCCTCCTAGAATCATCCAGAAAAAG
TCTGTTAGTCCCAGCTACAGGAATAGCCACCCCATAGCTGGGCTGAGCCTGCTCTTCCACTGCGGGCTCT
TCACTGGACCTCAGATAATAAGGTTGCAGGGCTTCGGGGTCTCCTCAGGAAAAAGACAGAAGTTTCCGCT
CTGGATCCGAGGATCCTAAAGCAGGGCTTAAGATGTGGATGTGTGATCAAAATAGCCAGAAACTCAACCC
TGAGGATGGTTTTGTTGTTGTTTGGTTTGGTTTGAGACAGGGTTTCTCTGTGTAGCCCTGGCTGTCTTGG
AACTTGCTCTGTAGATGGGACTGGCCTTGAACTCAGAGATCTACCTACCTCTCTCTGCCTCCCGAATGCC
AGGCCTTGCCTTGCCTATTTACTGTCTAGCTGAAGCCAAGCCTTGTATTTGATCCCTGTAAGAGTCACTC
TCCTTGGTTGGAACCCTGCTTTTTTTCCCTTGGGTTTAATTTTTTTTTTTTTTACTTTTCGGCCTTCGGG
ATGTTTTATCGGCCATTCTCCTGACTCTGTTGTTCTTAGGCCTGCCAGCCATGTCCCCAGGACAGAGCAT
GAAGAGTGACAGACACATAGCCCTTCTACCTCAGGTATACAGTAAGCTGGTACCCCTGAAGATGCTCCAG
ATATGGGTCCCCATCTTACCTAGCAGATATAGTGACAGACTTTGTCAACAGGCTGCCTCCAGTCAAGTCA
TGCCACAGCTTCTGCTGGCTAAAGAGCCTCACTAACAAAGAAAATGTGTGTGGGGGAGGAGGCATGGATG
ACTTTTGATGAACTGATGTTGGCTCTGCTAACTACTCTGGGTTTTCTTCAAAGAGCTCCCCGGCAGCCTG
GGGAATAAATCTGTGAGCAATAACTTCTATTTCACAACAATGAAAGGTGCTAGTGAAGTGCCTATCTCCT
TAAATATTAAAGTCGGTGCTGCTAGCTGTCATCATTTTTCTCCCAACCACTAAAGAAATGAGTCTGATGC
TCAGGGTGCCTGTGCACTGGCAAAGGCTATAAGGAACTAGGAGAGGGGAGTCTCAGGCCAGCCATATGGC
TTGGGATTTTAAGTCTTGCATACAGCAAGCCTGCTCCCTTAGGCCCAGTACAAGTAGTATTATTTTAGAA
CCCTCCTATGACAAGGGAGGCAGTGTGGGAAGAGAGTTTCAGTCTCAGTGCACACATACATGTGTGCACA
TACACAGACGTGCCCAACACTAGCACACTCCTTTCCTGTACATGTACGAACTTTTCCAAGAACACACTTT
TGCCCTGTGAGTTCTTTGTTGTAATCTGCTATTGCTGGAAACCGCCCTCAGTCTTGCCTGTCACTACTGG
AGCCTGTCCCTGAGGAACATGGCCTTATCCATTTGAGTTTCTCCAAGTGATTCATCATTTTGAATGAAAG
TAGTTTTATTGGAGGAACTTTGGGTCCTCGATTATGATATACTAATTATTTCTTATAAAATAATGCTTTA
TAAAACAAAGTTTTATGAATAAGGAGAGCACAAAGTTGTGAAGGAGTGGGAAGGTGGGGATGGACGTGGG
AAGAGCTGGGGGGATGGGAGGAGAGTGACTATAATAAAAAATACATTGTATAAAGTTCCCATAGGATCGT
AAAATAGTATATTAACTGTTTTTCATTGCAATGACACATAGTGATCACATAAGCATAGCATGTGACATTT
CAACCTATGTACACATGTGTGCTGATCTGATTGGAATGGCTGACATACCTTCTATCATGCTAGCCACTTA
CCATTTCTTTATGTTGGGAACATCATCCCTGCTTCAGCCCTGTCTCATGCCTGCCTGAGTCCATGGGTCA
CATCTCAGGAAAGTTGACTTCTTGACACAAAATCTCCTATATTGCAAAACCACAGAGAGATCCAGAAGTC
AGGACTGGAATTTTGCAGATATAAAACTCAGCGTGAGTCAGGAGGTTGACTCGTGTGCTGCCAGGGTGGG
GCTGAGTAACCTCAGGAGGGGTGAAGCCAGCCTGTTCCTAGTTAGCACTGCCCAGTCCTGTAAAGACTAA
TGGAACCGGACCCCTTGTGTCCTACTGGGGTTAAAGAATGTGCTTTGATGAACTTGTGCCTTCCAGGAGT
CTGCCTTGGAGGAGATAGGAAATAGACTAAGCTCCTGTTAATAAAAAAAGTTTCTTTTCCTCCTAAGGAG
CCCTGCAGTATAGAGGCAGGCAGCCTTGGGTGAGCAAATGGATTTCAGAGAAGTTCTGTAGTGGCTGCAA
AGGGTGCCACTTATCTGTCTTATTTCAGGACTTTTATTATTTTTAAAACGTTGTGTGCGGGGGGGGGGGG
GGGGGAAGGGGACTGGAGATATAGAGATGCACACCTTTGATCCCAGCACTCCGGAGACGGATCTCTGTGA
GTCTGAGGTCAGCCTGGTCCACAGAGTGAGTTCTAGGACAGCCAGAGCTACAGAGTGAGTCCCTATCTCA
AACAAACAAACAAATACACCAACAAAAATGTAGGACTGGAGAGATGGCTCAGTGATTAAGAGGACTTACT
CTTGCAAGGATCCAGGTTTGGTTCCCAAAGCCCACATGGTGGCTCATAACCATCCATAACTCCAGTTTCA
GGGAAGTCAATGTCGTCTTCTGATCCCTGAGGATACCGCGTGCACATACATGCAGGCAGAACACTCATAC
ATATGAGATAAATAAATCTATAAAAAAATTTAATTTGTATGTGAGGTAACGTGTATGAATGTGTTTGGAT
GTATGTTCATATGTGCACATATGTCCATGCACACATTTATGTGGAGGCTAGAAGTCAATGTTAGATGATT
CTCAGTCATTCTTAGCTGTATTTCTTTGAGACAGCATCTCCCACTGAACCTGGCGCTCGCCTGTTTATCT
AGGCTGTAGGCCGTGAGCGCCAGGAATTGGCCCTATCTCTGCCTCCCCAGTGCTGGGATTACAGGTGCAC
GCTGCCACGCCGGAGCTTCTCTCTGTGTGCTGAGGAGGATCTGAAGTCAGGTCCCCATGTTTGCTCGGCC
ATCACTTCACTAAGTGAGCCATGTCCCCAGCCACAGTGAGCAGCCGGGAAAGCGCTCAGACTTGAGAAAT
GAGATACTTGTTGATCCCTTACACGGGCTCAAGCTCTTGGAAAAAGCTAAGAACTTTGCCCCTAGGGAAG
AAATGGGAGACTGCAGCCCAGAAAGCCAATCTGTCCTTCTGTCTGTTGAGAACCTGCCTGCAAGGATGGT
CCCCTCCAAGGCCTGTTCTTCCCATCTTCCTGCCTCTGCAGTCACATATCTATGATGCCCACCTCATTCA
TGCTGATTATTTTTGAAAAGAGCTTAACGGTCTTTAAAAAAAAAAAAAAACTAAGACCCTATTTTCACCC
AGGGTGTGGTGACCTAGACACCCACTAAAGGGGGTCCATGCCTTGTTCCTAAGCTCCTGCATAAGGCTCC
AACTGCTGTCAACCGCCCTGGAGGGCAGGGAGCAGCAGACCTCCTCAGAACATCGTGCCCACTGCTCTTC
TCTGTTCCTCGGTGCTCCAGGGTCAGTGCTCACCACCTCCAAGGTAGCCGACTGCTGTTCCTCTGAGATG
GCACCCATAGGGAAAGAAGCCCTGCCCTAAGGGCTTTGTTTAACTACTTTTGCTCATACATGTGTGTGTG
CATGTACATGTATGCATTCATACATGCATGTGGGGGGGTGGGGGGGAATACATCCGGAGGCCAGAGGTCA
TCCTGGGTGTTGTTGCTCGCTCAGGAGGGTCATCCACCATATTTTTCGAGACATATTCTCTCACTGGGAC
TTGGGCTGGCCAATGAGTCTAGGCTGGGTGGCCACATGCCATGTGATCCTCACCTTTCCAACACTGGCGT
TACAAGCGTGTGCCCTCATGCTGGGCTTTTTATATTGGTTCCAAAGATCATATTCAGATGTCATGCTTAT
GAGGGCAAGCACTTTATGAACTCAGCCATCTTCTCAGCTCCAACTACTGTCCCTTTGCACCAGTGTCACA
GCTGGATCTGAAGTAGGATTGGGCCCCCATTCAGGACTGGCATCGGGAAGGGCATGTTCTGCAGGGAGAT
CTTGAATCAATGTGGGAAACAGAATAAAGCCATGGAGAATTTGGAGACTTGGATGTAGTTGGGCCAACTG
ATTTTTTTATGCATATTTCGAGTAAGATGTATTTCTGACCTGCATATTGACACTTTTAAACTTAATAGTA
GTGAAACGATCCCCAGAGACTTTGGTGGCTGAACACTTCGCTGGATGAAACTTCAGGAGGATTTCTGTGG
CTTTGGCATACCACGCAATATGGCACATGAAGACTTAATAAGGCAGTCAATGTTTTTACGATCTTTGATG
ACCATTAAATCTCTCTCTCTCTCTCTCTCTCTCTCTCTCTCTCTCTCTCTCTCTCTCTCTCTCTCACACA
CACACACACACACACACACACACACACACACAGAGCCTTTGACAGCCAAAGCAGTAACGATGGTTCTCAT
GAATGTCTGTTTCTGTCAAATAATGAGGACGGATGAAATCTGGAATTAGAGTAAACTTAGAACAAACTCT
ATTCTCTGGGACTTTTATTTCCCCGGAGAGTCCCTCAAGTCGTCATCCCCTGCCCCCTGCTCCAGTTCAC
TCCATTCTCCCACCACAGTCCTACCTATTCATACTCATACGACCATGGAGCCCCCGCAAGCCCTGACCCT
GAGCACACAGCGACAGCCTCACCTCTTAGAGCTCTAGGCAGTTCTGGCTGAGGATCTTCCTGCCCTTGAA
CTAGGGCCTTAGTCTACCCAGAAGCTGTATTACAGTGCCCTGTCAGGGTCCTCACCTGTCTTGGGGTGTC
CTTGGGGTACTTCCTAAGGCAATCTACCCACCTGCAGTAGCTAGATTGCATACCCCCCTCCCAAACTTCC
CTGTGAACTGTGTCCCTCACTTGTGAGTGCTGCGACACCCTGGCTTCCCATTGTGCCCTCTTCTTGGTTC
AGAGGCCCCTGGTCTCCAGAGAACTTTTTCCAACACCTCTCCATCCCCCTGCCATGCCAACTCTGAGTTT
CCCATTTAACCTTTACTCTCTGTCCTTTGTGTGCTTGGCACTATTTTTTTTTTCCAGTTACGGTGAAATG
TGTAACGTGAAGTTTGCCCTTCTACCACTGTAAGATGCGTGCTGGTGGGGCTAAGTCAAAGCCACCCGCC
TCCAGGACATTCTTATGTGAATCGATCCTATGCAATGTCTTCATTCGTTTCTCCCTTAGCCCTTGACAAA
CTCCCTGTCTTTATGATTTCAGCCATTTTAGAAGCCTCCCATTAAGGGAGTCAGGCAGGACTTGGCATTT
TGTTTGGCTTCTTTCACTTAGCACAGTGTCCCCAAGGCTCATATATGTTACCATACAGCAGAATTTGCTT
CCTCTTTAAATTGAAAAAAGATCCTATTGTATGTACCATGTTTGACTTAATTACCAGGTTGTTTCTATTT
CTTGGTTTTCACCAACAATGGTGCCATAAATATGGGAACATTAAGATCTCTTCAGGGCTGAAGAGATTGC
TCAATGGTCAAGAGCACTGACTGCTCTGCCAGAGGTCCTGAGTTCACGTCCCAGAAACTACACAGTGGCT
CACAACCATCTGTAATGGGATCCGATGCCCTCTTCTGCTGTGTCTGAAGACAGCTACAGTGTACTTATAC
ACATAAAATAAATAAATCTTTTTTTAAAGCGGGGAGGTGGATCTAAAAGAGGAAGAAAAAGAAAAATCCA
GCAAGGGCAGTGGCCGTGCACACCTTTGATCCCAGTAGTTGGGAGGCAGAGGCAGGCAGAGGCAGGAGGA
TCTCTGTGAGTCAGGACAGCCAGGGCTATACAAAGAAACCGTCTTGAAAAACAAAAGCCTCTTCAAGCCT
CAGCTTCATCTCGATTATTACGGGACTCATTGCAGAGTGGCTGCAGCCTTTCCAACGCTTCGACAGCAGT
GCCCAGGGGTCTCTCCGTCTCAGGATCCTCACCAACACTCGCTGTTTTCCGGCTTTTTGATGCTTGCCAT
CCTGTGGGACATTACATGCTATCTCATCGCTTCCTGTTTCTGTTGGCAAAGCAATACTGTAGTTGCTTTT
TTCTTTTTTTTAAATAACCCAGGGGCCCTTGTGGGTTGGAGACTAGGTAAGGGCCATGCCTTTGTCCCTC
TGTCACCTGCATGAGGAAAAGGCCTTCTCTCACAGTCACTAGCCAGATGGCTGGGAGACTAAAGAGGATT
TGAATCTTGGTGTGACTGTTTTTCAAGAGGCAGGCTTCACCCACACTGCTAGTCAGAGGATGGTGTCTCA
GATAGAGGCACATGCCTTCCGTGACCAAGCAGGCACAGGGACAACTCTTTCTTGGCATTATCATTTGATT
TCAGATGGCCTTTAAAATATTCTTGAATAGATAATGCACACCACAGGACACTCACTAAAGGCGACCAAGG
CCCCTGTCTCCGTTAAAGTCATCTGCATTCTGTGCCACCAATGAGCCTTGGCTAGTGGTTGTAGTAACAG
TTTGGTTTGTTGAGAGGGGTACATGTTATGTGGACCAGGCTGTCCTCTAACTGGTAATCCTTCTGCCTCA
GCTCCTTGAGGGCTGAGATCCCTAGTGAGCCCGCCATGCATGGCTTCCCAGAGTACTTGATAGTATCACA
CCTGGCCTTCGTCCCTCTGTTTTATCTGAGTCTCTCAGTGGCCATTAAAGGAGCCCTTTTGCTGGAAGTT
TGCACATGGGTCTAGTCTAGACCCTGGCATTGAGAACAGGAAGTGATGGGATTCGGCCATAGGAGGCCTG
TGTGGACGGGGAATGGGGCATCAGGGAAGGCGGAGCCCCTGCTCCTGCCCTACCAACTATTCCATGGCCC
CAACCTTTTCTCTCCAGGGGGCTCAGGGGCCCTCTCACTCAGGGCCACATCTCTAGGAAGATCCTAAGTA
GGAATTAAACTGATTCCATTCGTGTTAATGAAAACCCCACAGAGGACGGCTGGTGACGTCAGAGGCTTCC
ATTGGCCAGAATGAAGCAGGAATAAAAGGAATCTGGAAAAGATTCCCTCAAACCCCTCTAGGCCTTGGAA
AGCTGACAACGCTGATTGTTTGGTGTGGGGCAAATTGAAAACAGAGGCACAGAAGCAGCTGCCAAGCCTG
GCAAAGCCTACAGCCGCAGGAACCACAGTGTCCAAAGGCCATACTGGGATGACTGGAGCCCTCCCAGAAG
GGCCTCCAGGGGCAGCCTCGCTCCCCAATCTGTAATATGACAGGGTCTCCAAATCCCCTTGTTTTCAGAG
TCTGCCGTTCTTCTCTTGGTCCCGGCCAAAAGGCCCAAGAAGCATTAAGAGTCTATGATTCTGGGGGGCT
GCCCAGGTGTGGTCAGGTCCCTAAATACCTTTGGCAGCCAGTCCTTCGCCATGGTGTGGTGCTGGGAGCA
TTCAGAAGTGAAGGATCAGGGGTCAGGATGCAGGGAAGGCCAGAGCCAAGCCCAGCGGTGACATAGTCCT
TTGCTGAGGAGAACTCTGGGTTTAGCCTGTGGATCTCCTCTTCCAGATGGGTGGCGCTTTCCTCCAGGAC
TGAAATACGGATCCACTATGCTCAACCCTCTGCCAGCACCAGAACAGAGGGAGAAATGGTTGTGCCTTCT
CCTTCCTGGGCAGAGCTGCTCCTGGTGCAAGAACCGCCATCCTCCTTGCTCTCGCCTCAGTCTCTGTAGC
AAGCAAGTCTTCGGCCAGGCAATCAGAGGACTACTCCTCTAGGACCATGTCCCATTTTCCTAACCCTGGC
CCTCTTTCCCTTCCTCTGGGATATGGAAGAAAGGCTAGAACAAGAGCGGGATAGAAGGACAGATGGTGGA
GGCGGGCAGCCAGGCTGATGGTGACTACTGGGCATGCTCATTGCAGGAAACAGCAGCCACTTTCAGACCG
ACCTCTGTCAGAAGCATTTGCCAGGCCTGCTCCCCAGTAAGTGCCACAGCACCGTGCCCGATACCCAGAA
GGAGACCAGCAGCATGTGGAGCCTGATGGTGGTCGCTCAGCTGCTGGCCGGCGTTGGGACGGTGCCCATT
CAGCCATTTGGGATCTCCTATGTGGACGACTTTGCAGAGCCTACCAACTCGCCTCTGTATATCTGTGAGT
CTTAAGCTTCAGCCGGGCTGCGAGGGGTGGGGATCAGGACCTGGTGCAGCACCTGCTAAAGCTCTTGGGG
ATGAAGTGGGGTCTGATTCACTTGGCCCACAACATGGTGGATGACAAAGACCCATTGTTAATGCCAGTTC
TGCTTCCTTCCACTTGGCTGGACCTCAAGTGGCTAACCCAAGTCCCCAGGCTTTTACTTAGAGGACGGCA
CTAAGATTTTTTGTGTGAGCCTTGTGTTTTGAGGTTAGGTGAGCTGATGTAGATCACCATTTAGCCCTGT
TTTGAGCCTTTGACATCACAGCATGATATTGGATTCTATCAAGTTCACACTAGAAAACCATGCAATTGAG
GTTTTTTTAAAAAATGCAACAACAACAACAACAACAACAGCATAATGCTTTAAGTTTAAATTTGGTATTG
GACCACGTTCACAACTGTCCTGGAGACCATGTGGCCTATGGGCCAGGTGTTAGACACTCTGTAGATCCTC
AACAAATTATAGGCTCTTCTAGGTGATATACCAATACTCCGAGTTGTGGACAGGTTAGCATGCATGAAGA
AGGTAGCAGATGGCCAACTGGTACCTAATCCCTTCCCTTAGAGAGAAAGCCACATCGAGCTTTCTCAGGG
TCACAGCCTGTACCTTTGACTCCACGTGCACCCGTCAGAGCCACCAGCACCGTGCACACACAACACTGTA
ACTATAACACAGAATCCGCGTGATGCTGTACCCATCCTGGATTTAAACTAATGGAGAGTAAATAAATAAA
AGTAGATTTGTGCTCTTGTAAAAAAAAAAAAAAAAAAAGATACCATTGAGGAAAGTTCATTCCAGGCCAG
CAGATCTCTCTGGCAGGTGCTGGAGGAGCCGCAGGCTTGGTTCTGCAAGCCTTGGCATCCGGCCCTTCCT
TATCTGCAGGAGCTGTAATAGGCTTGGGCTTCAGGAGGAGTTACAGGCATGGGCTTGTTGGTCCCAGGGG
ACAGCGAGTGGCACCTTAGGAATCTCCTTCAGTTTGGGAGACTAGGGATGCTGAACTCCCCCCAATGCCC
CTCACTCGGCTTTTTATCCCTTGCTTTAATTTCCAGCCATCTTATTTGCTATCGCCGTGTTTGGGCCGGC
TTTCGGGTACCTGCTGGGCTCAGTCATGCTGAGGATCTTCGTGGACTACGGCAGAGTGGACACGGGTGCG
TATGCAGAGGACACTCATTCTTACCTATCACCCCTTTACTGATGCTTCTGGTTTAGCTCCTCCCTTGTGG
CTGCCCATAGAGAGCAGCGATGGAGCTCTCAGCCCATGTGGGGCCCTGCCCTGAGGTGCCTGTCACTGAG
TGACTGGACACTATTTTGCTACTTTCTTCCTCCTTCTGTGTCCATGTCTGATGTCAAGGAACACAGAGGG
GGCTGGAGTGCAGTGGGACAGATTTTCAGGGGATCATTGCTGTTTGTAGAACAGGCAACCCACTTTGTTG
ATGGCGATGTCCTCCGGCTCCTAAGAATTATGGGACCTCCTTTCTTAGGGCTCCTCAAAAGTAAAGTGTA
GCTGGGCGTGGCAGCGCTCGCCTTTAATCCCAGCACTCGGGAAGCAGAGGCAGGCAGATTTTTGAGTTCG
AGGCCAGCTTGGTCTACAAAGTGAGTTCCAGGACAGCTAGGGCTCTCCAGAGAAACCTGTCTCAAACAAA
CAAAACAACCAAACAACAACAGTAAAGTGTTCTCAAGCTTAGTGGTTACGAGTGCAGGTGAGGATGGCAG
GCACACAGGTTTGGAATTGACTAATGGACAAGAGATTTGGTCTCCTGATCAGTTAGAGGAAGTCAGATGT
GTGTAAGTCTTCCGTTACTGGGATGCTAGAAGAGCCTGTAGAATGGTGGCGGCAAAGTGTGTAGTAGTGT
ATGAACCATGTCAGCCCTCTGGAGACCAGATCATTTCACCAATTATTCCTGCCAAGAGCTAGAGAGGAAG
CACAGCAGTGGGAGGGTTAGCATTTGCCTTCTGTGCAGAGGCTGGGGTGCTCTGGGAAGACCAGAAAGGC
CTGGAGAGGGAGAGCTGTCCCACCACTGTGGGAAGAAAGTCAGTAAAACACCCCCCTGAACCAGAGTTCC
CTTTCGAGTCAGGTCAGAGAGATCGGGCATTCAGCCAACAGACACTTCTATCCCTCGGTTTCTTCTCAGC
TACAGTGAACCTGAGCCCAGGTGACCCTCGGTGGATCGGAGCCTGGTGGCTGGGCCTGCTCATCTCCTCA
GGCTTCTTGATCGTCACCTCTTTGCCCTTTTTCTTCTTTCCCCGAGCGATGTCCAGAGGAGCAGAGGTAA
GTGTCCCAGGGCCCAGGACTCCATGGATGTAGCCACGTAAGCAATGGACACGGGCTTGGAAAAGAAACAG
CTGGGAAGCTGCAGTGGCCTTGGCAAACTGGGGGAAATGAAAAGAGGTCTTAGGACTTAGGGTTCATCAG
AGGCTGAGAAGAGGTACCCCTCAGCACCTTCTTATCAGGCTGTCATCTCGAAGACCGGAGGGTTGCAAAG
GAACATAGTTTGGAAATCCCTGAGTTCATCTAAGCTGGGCTAAAGAGTTAAGAAGCAATTCACAGTGCTC
AATGGGATGTAGAGACAGCGAGACAACTCAATCCTTAGAAAGCCGGCCATGCAAACGTGAGGCCCTGAGC
TTAAGCCACACACCGCCTCTTTTTTTTAAAAAAAAAAAAAAGCCAAGCGTGGTGGTATATAATTGCAATC
CCAGAGCTGGGGGGGGGGGGGGTCAGATAAATGGAAGTATTCCCTAAGGCTTGATAGCCAGACAGCCTAG
GTGGGGAGTTCCAGGCTACTTAAAGACCTCTTTAAAAATCAATATGGGGGCTGGAGAGATGGCTCAGCGG
TTAAGAGCACTGACTGCTCTTCCAGAGGTCCTGAGTTCAACCACAGCAACCACATGGTGGCTCACAACCA
TCTGTAATGGGATCTGATGCCCTCTTCTGGTGCGTCTGAAGACAGCTATAACTATATATTCTTTAAAAAA
AAAAAATCAAGATGTGTGGTGCCAGAAGGATGACACCCAAGGAGGTTGGCCCATGACCTCCACGTGGACG
CACACATGCATGTACACATGTGGACACACACACACACACAAAAGCTGAGCAGGTAGTGAGGCACAGTTAA
CTTGGACATTTAGTGGAGTTTACTAAGGTTTGAGCCTGAATGCCTGGTGAGAAGGGGGCGTCCACTCAAG
GTGTAAGTGAGGGTGTGGGGCAAGGATGGGCTGAGAAGGAGCGTGTCTGGGACAGGGTTGTATCTGCTAG
GGAAAGGAACCTGAAAGATGAGACTAGGAAGCAGCAGAGAGGAGGTTGAGCGGAGCCTTTATGTTACACT
AAAGGGTCTCACGTTTTCTCCTGTGGTTTCTGGGCACTGCAGTGACTGTGTGGTCCCATAGTGACAATAT
GGCAGTTGGCTGAGATTGGGGCTCATGAAAGAATGAAGATTGGAGACCTAAGAGGCTCAAGAGAAAGAAG
GAAAACACAGTTGAGGGTCAGGGCAGTGGCCATCAGAGAGATGGGACAAAGTCCTGCCTGGAGCGGTAGT
GCACAGACTTGGCTGTGGATAGGCGTTGGAGCTGCTGTTTTGTGTCTATGACTTAAGACAGAAAGGGCCC
CACTGTGGGAAATGGAGCTGTGAGCAGAGGTCCAAAGCTTATCCCGGGGAAGCATTTAAGAGGTTATGGG
TGTATTTTGATAGGCTAAGAGTTGGACAGCTCTGAGCTTGAAGACTGTTCCACTCGTAAACTTGTTGAAT
GATGCTAGGCAAGTTGCTTTGTTTTTAAGCTTCCTTTCTTGTAAAGTTCTTGGGAGTAATTAAAGAATCT
GTCTGGGAAGGAAGTTGTGAGGGAAGAGGCGATGGATGGAGAGTAATGGGCATGTTGCCCAGAGCAGGAG
GGCTCAGTTAATGGGAGCATCAAAAAATGCTTATGGTAAAGCCCTGGCCTCTGTCTATGCAGTGGCTTGG
AGAGAGCCGAGGGCTCTGACTGGAGCTGCTAGCTTCAGAGACTGGCGAGGGCACTGAGGTAATGTCCCCA
GAATGATTAGAACAGAACCTAGGGTAGGGGTTTCTTCTGGACTGAGTAGAAAGCAGGGTCCCAGAGAGGA
CACAGAAAGGGGGAGCTGAGAACTGCAGACATCGTAGATCCCTGTGTCCTAGAAGCTAGCCATCTCCAGG
ATCTGCATATGGGACACAGTGTAGTCATAACGCAGACAAGGGTAGGGTCCAGGATGATGCTTTGGGCATC
AGTCATGGGAAAGTCAGATGAAATAATATGCCCATAGGTATAGTGGGAGGCATTGGCACAGATTCACCCT
GGCCTCCAGCCAAGGCACCAGGCTCCTGAAAAACACAGGTGGTATCTGCTTCAAGGGAGCATCCTGCAGA
TGCCCTCCCCCACACACGTGTGGTCCTCACGCCGCTGAGTCAAGGGGCTCAAGGATGGGCCATTAACATC
ACCATGTTTGCTACCTTCAGAGGTCTGTTATCGCAGAGGAGACCATGAAGATGGAGGAAGACAAGTCAAG
AGGCTCCCTGATGGATTTCATTAAACGTAACTGAGCGCCCCAGCAGCCTCGGGTGGGCTGGTTCTGGGAG
GCAGCAAGCCAGGTACAGGGTAAAGGGCAACAAGAGACAATAAGTAAGGCCCGTGACTGCCTCACCTCCC
TTCAGTTCGGAGGGATCCTGCCAAGGACCCTGGTGACCGGTTCTTTACAGGAACCAGTAAATCCCACTTC
AGGCAGAGCCAGTCACCCCCTCTCAAGTCTCCCCTTCTGCTCTCTCTCTCTCTGTCTTCCTATAGTGGTG
GAAGTTGTGGGAGGAGACCTTCCCCAGGGTGAGCAGTGTTTCTATTTACCCACCACCAGCATCCTCTTAG
TCAGACCACAAGCGTGGTGAGCAGGAATCCAAGGACCCTGGGCTGACTTCTGGGAGTCTGGGTGTCTCTG
ATTCTGCCCCGAGGAAGAGAGGAAGCTGTCCTTGTGGATGAGTCAGGGTGACGGCAAGGCTCTAGGAAGC
CTGTGATGCTCTTGCCAAGGCCTGCCTCCTGACAGCTGTTTGCCCGCAGGGTTCCCCCGCATCTTCCTGA
GGCTGCTGATGAACCCACTCTTCATGCTGGTGGTCCTGAGCCAGTGCACCTTCTCCTCAGTCATTGCTGG
CCTCTCCACGTTCCTCAACAAGTTCCTGGAGAAGCAGTACGATGCCTCGGCAGCCTATGCCAACTTACTC
ATTGGTGTGTCAGAGGGCACTGCAGGGCCTGGGTGGTGCCCTAGGGAGGAACTGGGTACTGTACAGTCCA
TCCAGAGATAACTGAGAGCCAGACCGGATGCAGGCAGGAGACAGGAGGGCTTGCCGGAGAGAAAGAATTT
TAAGAGCATTTTTCCTGGTTGGCGATCTAGAGTGATTTTGGCAGGATTCTGAGACTCCTATTCTATTTAG
GAGTGGGTGAAGACTAGGGGCTGCTTTCCTTCCCATCAAGAGGGTAGGAATCTGATATCCTCCCAACTGA
CCTTATCAGGGGTAACAGAGGAGAGAGGGAACATGGAGCTTGAGATATACATAACACCTCTTAGGAGTTG
CCTTCTCCAGGAACTTGAGTCTTGGCCCTGTGACACGTCAGCCTCCTTTACACGATGGCAGTGCAGATGC
TTAGCCCCCACCCACCCAGACTAATGAACCCAGATTCTGTGGCAGGGGTGCTCGTACTTCTTGCAGTAGA
TGCTAAGAACCACTAATGGGGGTTCTACCAAGTGCCTAAATGAATAACTGGGCCCCATCTATAGGTGAAT
TTGACCAAAGATTTGACAAGATAATCAGGGCATGAGATCTGGGGTGACTTCCCTGTTTGCGCTGAAGTCC
TGTGTAGCCTTTAGGGATGCTATCATTTCTCCAGCCTTCAGTGTCGGATCAGGGCATCGCCACCCAAGAA
CGATCTACTTCCTTATTGTTGTCATTGTCTTCTTGTTTTCAATTTGTTTCTTCGAAACAAGTCCTAGAAT
AGCCCAGGCTGACTCTGAACTTGCTAGGTAGCTGAGGATCACCTGGAATTCCTGATCCCCCTGTCTCCAC
TTCCCAAGCGCTGGGTTATAGGTGTCAGAAGTTGACTGCCTCTTTGCTTTTTGATCAGGCTAGCCAACCC
TCTACTAAAGTAAATTCTCGGGATGTACCCAGCAATCACCCAACAGTTAGTGATATTCGGTAGTCACCCA
TCGTTTCTTTACGAAGCTGTGCTCCTTCCCTGTGGTTCAGCTCAAGGCTCCCAGGCTGTGCATCCAGCCC
CTCTCCTTCTCACCTAGGTGCTGTGAACCTTCCAGCTGCGGCCTTGGGGATGCTGTTTGGAGGAATCCTC
ATGAAGCGTTTTGTTTTCCCTCTGCAAACCATCCCCCGAGTAGCTGCCACCATCATGACCATCTCCATAA
TCCTATGTGCCCCTCTCTTCTTTATGGGATGTTCCACACCCGCCGTGGCTGAGGTCTACCCTCCCAGGTA
ATGGACAGCCGGAATCCAGCCACTGTATGTCTCTCTTCTCTGCCTTTTACCTCCTCCGTCCTGCTCATTT
GATCTGATGTCTCACATGGTGACACAGGAAGCCAGGTCTCAAATAGTGTGTTCTATTATGAGATGAGATT
AGCCAGCCAGTGGGGTTGGGCTTAGGGTTTGGTTTTGTAAGAAGCCACAGAAGCTAGCCGGCTTAGTGTC
TGGATGAGCCTAAGCCATAGAAGCCAGGAAATAAGCAATGGTTAATGCCAGCTCTGAACCAGCTAGAGCT
AGAGTCTCACTGAGATGTCGAAGAAAGAGGAGAAGAGACTTGAAAAGGTTTAGAGATGAACAATTAAAAT
GGCGACACACTGTAAAAAACAAGGGCTGCAGAGGCAGGGGCAGGTCAAAGGACCAGTCTGCTTGCTTAAA
GCAGCGTGAGACGTAAGCGTAGGGCAAGCTTTATCTTCAGAAAGAGTGTTACAACCCCATGAGCAAGGAA
CATGCCACTCCCCACCTCCTCCCCCCTCCCCCACAAACCCACCCCAGGTAACCACCTTGAAACGTTTTCT
TTTTTTGAAAGGAAAACATATTTTCTTTATTTATATTTCAAATGTTATCCCCTTTCCTAGTTTCACCCCC
TCCTGGAAACCCCTATCCCGTCCCCCCTCCCCTTGTTTCTGTGAGGGTGTTCATAAGGGAAATTGGTCTG
AAGTTCTCTTTCTTTGTTTGGTCTTCATGTGGTTTAGGTATAAGAGTAATTGTGGCTTCACAGAATGAAT
TGGGTAGTGTTCTTTCTGTTTCTATTTTGTGGAATAGTTTGAAGAGTATTGGTCTTGGGTCTTCTTTGAC
AGTCTGATAGCATTCTCCACTAAATCTATCTGGTCCTGGGCTATTTTGGTTGGGAGACTATTAATGACTG
CTATTTCTTTAGGGGTTATGGGACTGTTTAGATGGTTTATCTGATCCTGTTTTAACTTTGGCACCTAGAA
AATTGTCCATTTCATCCAGATTTTCCAATTTTGTTGAATATAAGCTTTTGTAGTAGGATCTGATGATTTT
TTTGATTTCCATGTCTCCTTTTTCATTTCTGATTTTATTAATTTGGATACTGTCTCTGTGCCCTGTGGTT
AGTCTGGTTAAGGGTTTATCTATCTTGTTGATTTTTCTCAAAGAACCAGCTCCTGGTGTTGTTGATTCTT
TGAATAGTTCTTTTTGTTTCCATTTGGTTGATTTCAGCCCTGAGTTTGATTATTTCCTGCCGTCTACTCC
TCTTGGGTGTATTTGCTTCTTTTTGTTCTAGAGCTTTCAGGTGTGCTGTCCCCGCTGTCGTTGAAACTTT
TTCTTGAGGACTTTGCCCAAAACATTTGCAAGATTTGGAGACTCAGAACCTTTTAACCCCAGCATAGTCT
CTTTCTCGTGGAGAGCAACATCTCCAAATACACCAACAGCATCAGGCAAAAACATAGTGTGATATGACCT
CCTCTGTAGCTGACAGATGACAGAGGAAAGCAGAACAAAAGAGGGGAACATTGCCTCGAGTGAGGGAGTG
AGAAACTCACCACCGTTCTGCAGGCTGACTGGGGACCCAGAGAAGCTGGGGACCCAGAGAAACCTGAAAG
CTTGGGGTCCTTGAGGTGGTTTTCAGTGGGAGTTTGGTCCCACCTCTGTCACCTGCCTGGCCTGAGTTCT
AGATATGACACTCTTTGTTGCTATGAGGAAGTTATCCGTAAACAAAAAGGCCCTTCCATTGTGATGTCCC
ATAAATGCCAACATCCACTGCTACTGTTTATCAATGCACTACTCAGCCATCAGAACTTCCCCAAAGAAGA
TCAGTAAGAACAGCCATCGAAATCCACTTCGATGAAGTTCTGGCCCAGGATAGGAAGGCGAATGGACAGA
CCCAGATCAGTGAATCCATTTGTTTCAGGAGATGAACAGTCTATAAAAACCTCAGTGGCCTCCAAAGGTC
TCAGCCAGCACCTAGCTGGGCCATAAGAGAAGGCAAATGTTTCTAATGACTTCACTGTAGCGTAGACCAC
TTCCTTCAACAGAGCTTCAGGCTGTCAGTCATTTTAACTCTGACAGTGGCATGGGTGTTTTCTGGCTAGA
CCTTTACAACTGAGTAATGGGTGGGTTTGGGTTCCCAGGGTCAGGAGAATGGAGAGGGCCATGATGTCCA
AACCATGGCAGACTCACAGCCGGCTCCCACCGGCTCCGTTCAGATTCTGGGACAGCACTGGCCTAAGACA
AACGGGGGTATGCAGGCACATCAGCCAGGCCAGGACCTCGTGCTGGGCTGGAGTGTGGTGCTGTTTCTTG
GTCTTGCTTTGTTTGATTCTCTTCTCTTCCTGTCTCGCCTGGCAGCACACCAAGTTCTATACATCCGCAG
CCTCCCGCCTGCCGCAGGGACTGCCTGTGCCCAGATTCCGTCTTCCACCCTGTCTGCGGAGACAATGGAG
TCGAGTACCTCTCCCCCTGCCATGCTGGCTGCAGCAGCCTCAACGTGAGCTCAGCAGCTTCTAAGCAACC
AGTAAGGACAACGACGAAGGGGGTCACAGGGGTCGACAGAACCACATGGAGCTTTGGGGCTCAGTGTGTC
ACCTCAAAAACCGTTCCTTGGCCGTCAGTATCAGCGTCTTAGCCCCCTCCACCATCTCTCATCCTTCTCT
GCCCCGGGGTCATGACCAGATGCCCACAGCCCAAAGTCAGTTAAAGATTGGCTGGAGACCAACGAGTTCA
TTCTTGGGAACTTGGCAAAACAACAGAAACAAGTCCGAGCAGTCGCTCTCAGCGGAAACTTGTGACTGAT
ACTAATGGCTCCCTGTGGCAGGGGGGAACTTCTGGGTTCTGGGTTCTGGGTTCAGGCCATATTACAGAGT
CACATGGCCTGAGAGCAGAGGGTCCCCTGTGACTTGGACCTTAGAGGCCAGTGCTGGGAGCAGCAGTCGT
TTCAAGCCCTCCTCTCCCAGGAGTGCCACAGAGTTGGCCTGAAGCCATGAAATTAAGTTCAAATCTAGGA
TTAGAAACAAAATCTCTCTTCACCTGGTCTTCAAGGCCATGTGTCTCCTTCTTAGACCTAGACCTATGGG
GACTTGTCTGACAATATGTGAGGACAGTGACCCCAGGCCTTCTGGGATCAGGAAACAGCAAATGCCTCCT
CCAGGTTTGTCTCTTAGTCAGAAATCCATGTGTGCAGCCACCATGTCAACCAAAAGCCCTGGTCTCACAG
TTTACATCCAGTCCGATAAATGCACACGATAAATGCTGAGGGACTTCCTGAGGTGACTTACCCTTGAGCA
AAGACCAGAAGAATCCTATGGAAACCTGGAAGCCCATTGCACTCGAGGGAAGCACAGGTGCCAGTGCACC
AGAGAAGCTGAGGAAAGGCCTGGTCGGCGCTAAGCGACAAGTGTCACAGCTATCGGGACAAGGGATCAAC
AGGTCCAGAGCTGGGCAGGGCCAGGCAAGCCAGACTTAGGAGGGAGATTATTTCCCCTCTTAACTCCCTC
TGATGAGAACAATGGAACGTCTATGTCATTACTATAGGATGCCCCCATAGGAAGAATGCACCTGTGTGTC
GGCCATGTGTGTTGGCCATGGGCCAGGCTAGCCCCCACTTACCACCTCTTGCGAGGTCACAGAAAAAAGC
TTCCCCTGTCTGTCACTATGGGCAAAGGCCCTTGGCTCTCAGGTAGAGAAGGGTGAGGAGCTAAGACAAG
ATGGCCCCTTAGTTTGCCTCTTAACTGGAAGAGTGGTGGCTTCTGTGGTTTTCTTATCTTTATTTACTCT
CCGCTGACTCATCTACTTCCAGAAATAATCTTGACAAGCTTCCAATAACAGCACAAGTACATCAAGACAA
AATCCATTACCATGATAGCAAGGGAAAAAATAATAAATTATAAGGGGGATAAAGTCTTAGTATTTTAAGA
TCCAGATTGCGGGAGGTTACGGCAATATCGTGTGTTAGGAACTTCTGAGCTTGAGGGCCACAGTCCCACT
GACTGACAGAGGGAGGCCTCCTCTAGCTCATTAGTTGGCTCAGCCCCATAACAGCTCTGACACCAACGTC
ATCATAGGCTGGGCCATCAGCCACTGCAAGGAGGGAAGGCAAAGATGACCAGATGAACGGTGGCCGCCAA
ATGAGTCGAACAGCAGTGTTGAGCCACATAGAATTATGATGAGGCAGGGTCCTCCTCTGGGGGCTCTTCT
TAGGTCAAAGTACACCTCTTCAGTGGGGAGTGCTACAGAGCATTCAAGAGACTCTGTTATTGTTTCCTCT
ACTCCCGGAACATACCTTCTCCCATAACAACTTGCGCAACCACTAGAGCGGGCTGGACCGGGAGGAGAGC
TCCCAGGTTCCAGGCGCTGAGCTGATGAGGGTGCTTTGCCTGGTGATGGGATCTTGGGCATTCAGATGTT
GGAAGACTGCAGGAGTTCATCCCATGCTGGACTCTTGGTGAAGACCATTTCTTTCTTTTTTTTATTTTAA
AGATTTGTTTATTTATTTTATGCATGTGAGTGCACTGTCACTCTCTTCAGACACACCAGAAGAGGGCATC
AGGTCTCATTACAGATGGTTGTGAGCCACCATATGGTTGCTGGGAATTGAACTCAGAACCTCTGGAAGAG
CAGTCAGTGCTCTTAACCGCCGAGCCATCTCTCCAGACCGTGAAGACCATTTCTAATGTCCCCAAAGTGA
AAGAGCCAGGACCCCATGGGGCACTCTAAAACCCTCATCTGACCTCTTCAGTCTTTGAATCCTAGCTTTT
CCTCCATCCCTGGAGGGCTGAAGGGAGGGCAGAGGGATTCGTTCATATTAGAGGGAGGCAGTGTGGATAT
GTGAAACATACAGAGGTTAAATCATGACGTGGCCCCTCCTGTTCTTCAAGATCTATTTGAACTGTAGCTG
TGTGACTGGAGGATCCGCATCGGCCAAGACAGGCTCCTGCCCTACATCCTGTGCACAGCTGCTGCTCCCG
TCCATCTTCCTCATCTCCTTTGTGGCACTCATTGCCTGCGTCTCCCACAACCCCCTCTACATGATGGTCC
TACGGTGAGTGAAATCTCTGAGCCTCTGGCTGCTGCTTCCACACCCTCTCTTTGACAGTACATCCTGTCT
CCTACTCAGAGTCTCTCCTCCCTTAACTGGGGAGTCTTAACAGCAACCTACAAGTGTCTAATGGTGAGAA
GACAATAGGTACACTGATGGCAGGAGTTCCCTGTCCCAGGAGGAGCTCCTGGTAGGGAAGCCTGGCCCAG
GCTCCTAGTATCCATGAAACATAGGCCCTGTTGGCACCCCCATCTTTATTTGTGGGAAGTTAAATCATAG
CCCGGGATGGTGGAACTGTCGAAAGGTTGAGCCGCAGGTTCAAGACAGGCTGTGGGTAAAGATTCACTTG
TTCTTCAATATTAAAAGAGGAGAAATCAGCAAGTCAGAAACTGAGGAAAGTTCCAGAAGCAAAGCGAACA
CTGTGAGAAAGGGCTGAAAACGTGAAATTTGCAGGAGACTGGGGACTCAGTGCTCAGAGTGGAGGGACAA
GGGACCAGGAACCAGGGTGGGGTCAAGAGAAGTGTCTGGTTTTTAATAGAGAGCGTTCCCTCTTCTCATT
CTACCAAGAAGGAAAATGTAAGAAAAGAAAAAGAAAAAAGAAAAGAAATCTCACCCAAGTTCATCTAACC
ACCTCCTGCCTGCCTCTCTGACCTCCCATCCAGCCCCATCAGCTTACTTGGAAAGCAGAGAAGGAGAAAC
ACAAAGGTTGAAAACTCCCTATCAGATTAAAAGTCTCTACTTGAGTGTCTTGGGTGTTGCCTGACCTCAT
GACTCCCAGTTTCCTTGACTATGAAAGGAAGATAGTGATACCCACCTCCAAGTGTGAGTGTGAGCAATTA
CAAGGTCAATCGCTTCGTAAACAGAAGCTCCTCTGCTGGGCGTGGTGGTGTCATCTATAAATCTAGTGCT
TGGAAGTAGGAGAACCAAGAGTTCAAGGTCTTCTTTGCCTAGATAGTAAGTTACAAGCCAGCCTAAGCAA
TATGAGACCCTACCTTACAAGGTTCTCAATGTTTGAGTAACAATCCCTTTGGGGGTTGACTGACTCTTTC
ACAGGGGTTGCCTACTACGACCATCAGAAAACACAGAATTTACATTACAATTCATAACATTAGCAAAATT
AAAATTAGGAAGTAACAACGAAATAATTTAGTGGTTGGGAGGCTCACCACAGCATAAGGAACTGTATTAA
AGGGTCGCAACCTTAGGAAGGTTGAAGACCACTGCCCTACCTCAGAAAAGACATGGGGGCTGGTGTTCTC
CATATTGATTAGGACCTATCTCTCCAGAAGGCTAAGCAATGAGGAAGGACCAGCTGCCATGTCAATAATG
TAGCTTAGTAACAGAGCACTTGGTTAGCACATGTATTTTACTCTATCCAAGTCTAGTCTCTTTCCATTCA
TCCCAGAACCTCAAACTACTAAATAGTACCATGAACATTCAGGATTACGTCCTCCCAACTTAGTCAAATC
CCTCAGGATACATCTTCATGGATACACCAAGAGATTTGTTTCCCAGGTCATTCCAGATCCATACGTTAGC
AATGAAGATTGGCCATCGAAGTCATCCATTATGGATCGGGCCATTGGAGACAAGCTGATACAGAGGGAAA
GAACATCCATTCAACTGGAATTCCAGGCACTGTCCACTGGGAGATCCCACATGGTCCCTCTTTCTCCTAC
TTGAACTCCAAAGAGCCTCCCTTCACTGGGTCATCCCCCTGGGGATGTCTCTCAGATGCCGACTAACTTT
GGCAATGGTTGTAAGATAATATGGAATGATCTGGAGGCCACTTTTGAGTTCTTTTCCACTCTGTCCTCGG
CTCCAAATTCTTTTCCAAATGATAATCACCCAGCCAGGAGTATGTGGTGTGAAAACGTGGAGAAGCCAGA
GTCTGGTCACACAGCAGGCGCTTCTACCACTGCTCTGAGCTCCTCAACCCTGTGTGTCAGATGCCAACCC
CCTTTTCACTCTCCAGTTGAGGTGGCAGCTCTCTAGGGAGAGCTGAACCTCTTTACCTGGCTTTGCCATC
CCCCTCTTGAAGGAGAAAAGGTAGAAAGCAGGACCACGCACAGAATCCACAGGACCCAATGCAAATGAAA
CTGTAAAGACTTTGGCTTGTGAATCATTTAAGAACTCCAAGACATACGTAAACCAAAGCTGGGCCTTTCT
GACGGCAGCATCCTATGCAGCTATTCAAGTCACACCTTACAAAGCTGGCCCAGGGCAAGGAAATGTTTCA
GATCTGCACAGAAGCTGATAGCCCAGGGCCCTCTTTTCCTGGTACAAGATATTCTGTGGGTGTTGTTCAG
ACCTGCTGTCTAAGCATCCAGCCAGAAATTCCTTTCTACTTGGTCTCTCTTGCCTGCTTTCTTTCCAAGA
AGTCTCTGGACAGTCCTGAAAACAATACAGACTATTGGTTCTCAAACCCAAGTTTACATCCAACTCTCCT
GGAATATCCACGTTTTTGATAGATGCCAGGCGGAGAATCTGTATTTTGAACGTAGCCTGGGCGGTGCCTC
TGATCCAGCAACAGTGCTTTGAGAACGATGGGTATAACAGGCATTCAGCAGATAATGCGCATCATCCATG
TGTCTGGTCAGACTCCATGAGGACCAGTGCTGACCTGCTCTGAGTCTTTCTACCCCCTACACCTCATACC
CTCCAGGTGATGCTGCAGTCTAGAGTCCTACTGGTGCTAACTTCCTGTTTTCCTTTTCAGTGTGGTGAAC
CAGGATGAAAAGTCGTTTGCCATTGGAGTACAGTTCTTGTTGATGCGTTTGCTGGGTAGGTGATTTAGGC
CCTGGACCGTGGGCATCTAAAAGCCATGTGGGGCGGGGCAGGGTTTGGAGAAGTCCCAGTTCATCTTGGC
TGCATATTCCTAACAGCAAGAAGAACCAAACCCTGACAGATGACAGTTTGCCTGATTGCTTGAGATCGGG
GAAGATTCTGTCTACAGTATTCAAGCCAAATTTAAATTATGTAAGAAAAAGAAAAGGTCATAGCTGAGAG
TGCTGAATACAGAGTTAAAGGCAGGTATTTTTAAATCTGTCTCCAAGAATCCGCCCTAGGAAACAAGACC
TTGCATTCCTGCCCTAGACAGAGCAGTTTCTGAGCTGAGCCCTGGCTTCCCTCCCATTTTCCAAACCTCA
GTCCTCTGCCACGGTTCAGCAAATGTCTCTTCTGTCAGGGGATCCTGCCTCCAAACCCTGTCTGTCCTCA
AGTAGCCTGGAGCCCCCAGCTCAACACTCAAAATACTCAAGCTGTGCATACACATAATCAGCAGAGACCT
ACAGGGAGAGAGAACTCCCACGGGAGCAGGAGGCATCTGGCTTCCCTGAGTGCAGGGACTGCAGGGAGAG
GAGACACACAGTAGGTTCCTTCCCAGCTGGCCAACTCTCATCTGCCCGTTGACATCCATGGCACAGTCAT
GCATTAGACTGAACCCCAGGCACTGATGTGGAGGTCTTGCTACAATGGATGAACAAAAGTATAAAGATTG
AATTTAACAGAGGATCTTTGTACTAAGAATTTCAGGGGTGGGGATTTTGAGGTTCCGGGCAGAAGGACTT
GAGTTACTATCAATGTGAGCCTTCCTACTTTAACCACTGACACCCTCTGCATTATTATACAGGGGTGCAG
GTCACATCTTGCCCTGCCATGGCTTCCATTAGCCTTCCAGCGTGCGTCATCATCCCAGCTGAAGTCAGAT
GGGCAGGTGCCTATGCAGGGTCTGAGCCAGCATTTTCAATGGAGTTTCTTAGCCGCAAGCCATTTATCCT
ATCATGAAGCGTCTCAGTTCCAAAGGACCCTTAACCCTCTAAATGACAACCGTCACATTCCTGGAACCAC
ACAGGGGACACAGGGTATCTTGTCCAGGTTGAGGCTGGTTCATTAGCACAGCTGCTTGTATTTATTTATT
TATGACTTACCATCTATAGCTGGTTTATCACTTACTCCAATGCCCTGGCGGGGAAAGAGCCCTGGCATTC
CTCCCAGAGGACCTTCTGCCCTGCTTCTATTGGTGACTTAGAGAATGGCCCCTCTGCCCCGCTGCTCCAA
GCCCTTGCTGCTTCCTCTTTCCCACCTGAGCTCAGCTAACTCTGTGGACCACAGTTGGAAAACACAGGCC
TAGAGGAAATCCACTGGTCACTTAAGAACACAGCTTCACTCTGGGTTAGATGAAAAGACTGCCTATTTAT
AAACCCCAGCAGGCTCACAGTCACCCACTGAGATGTGGTTGAAAACTCTCCTTGACTTCTTTTCTATTTA
GGGATGGGTCACTAGGGCCAGTTTCCAGCCACTGTTCACCTGGAAACTGGAGTGTGAGCAGGGGCTGAGG
GGCTGCTCTTGGGAATTTCTCTATGTAGGTAGGGAACAGGACTGGGTTGCCTCTTTCTTCCAGAAACAGG
AACTCACAGGGTGCTAGAGTGTCTGGTGTTTTCAGCACCGCGTTTCTGAGAATGGGATGGCCCATCTGCA
ACGTAAATCCTGGACAAGTCCACCCTGATCCACTGACTGCTGGACAAGTCCACTCTGACCCACTGGCGGC
TAGACAAGTCCACCCTGACCCGTTGGCTGCTCACAACGTGGCTAGCACCACTGAGTTTGGTGGGGTTGGG
TAGTGGGCATCTAAAATATTCATCACCCAGTAAGGTGTTGTGCCTGCTGGACTTCATCTTAACATTCAGA
TGCTAGGATGATTTGGCAACCTGTGTTTCTGAGCAAGACGGGGAACTAAAGGTCTCCAAAGGGTGTTGTC
CGATCTAGTGGGCTAGTTTGGAGTGGGAGAAGAACGTGGGATTTGAACTTCAGTGAACCCTTGGGTCCTC
TTGTTCGCTTGCACTTTATTCCAGTGACTCCACCCACCCACAGAGGCTGGGGGAGTCCTTGGAGGCGTTA
GCACTCTCGAGATGGAACTTCTACCTGGGGCCAGCCTTGAGCTTGAGAACAGTGCTGTGTGTCTGAGCTG
ACTCCAGGTTGAGCCCGTGATTCATTCTGCCCTGAAAGAATGGATTCCCTTTTATCTCCTAAGCCTTCTG
GTGAAAGGGGAACTCTTGCTGAGCTTTGCTGCAGCTTTCTGCTTTCCCGAGTCACTGTGATTCCGAGGGC
AATGTGTGAACCGTGCCATTGGTGTGGGGGGCTCGGACATCTCTGACTGCAGATCCAAGCCACCCAGACA
CCCTGAATTCTCTTTCCCTTTGTTGCCAGCCTGGCTGCCATCTCCATCCCTTTATGGCCTGCTCATCGAC
TCCTCCTGTATCCGGTGGAACTACCTATGCTCAGGGAGACGAGGGGCCTGTGCGTATTATGACAACGATG
CTCTTCGAAACAGGTGAGAGCTCCCACATACACAGGTGTCTAGGAGATTAGGTCTGTTGTCCCAGCACGG
GGGGGGGGGGGAAAGCCCTTTTTTTAAACCTCATGGATGTGGTGGAGGCTGTCAGCTTTCTAAGGGGCAA
AATAGGAGGGAATGTCTCTATAGATTCTGCCATGGACAGAGAGCAGAGGCTACCATAGCAGGCATTTGGG
GACCTATAAGGAGCCATTCAGGTGAGGAGACACAGGGTCTGCTTTGAGGTGTCCCCCAAAGTACTGTCCC
TCACAAGCCTACTCATAGCAGCAGACAATGGTCACCAAAGTTAAAGGTGTACCTGGAGCCTGAGAGAGAT
TTCGAATATGGAAAAGATACCAGTCACTCTCCACTGCTCAGAGAATGGGGAACACAGCACGGCGCCCAGG
AGAGGTCCAAAGAAGCAGGAGTCCAACCTATGCCTGTGAGCCAAATGCAGCCATCTCTTCTGTTGCTGCC
GTTCCATCATCTAGAAATGGTGGAGAAGGTGGGCCTGCAGGGGCTAGAAATACTGAGGACGGATAGAAAA
GGCCAGGTTAGAGAAGGCCAGCAGAGAGGCAGCTGAAAGATACAGACCCTCTGGAGACAGCTGGGACAGT
AGTGTCACCTCTGGCCATCAGTGATGTCACAGGAGAGCAGAGGATCACTAGCGTCATGTGTCTCTCCACA
GTGACCACCTGAGAAGTGACAGCTCGTCACCTGAGTAACGATCTTCACAGCTTCTAGTGAACTGTGAAAA
CAAAGATCATCTTCCCGCTGCCCCTGGGCCTCACCATACCTGTCTCTTCCTGCCTCATAGGTACCTGGGC
CTACAGGTAATCTACAAGGTCTTGGGCACACTGCTGCTCTTCTTCATCAGCTGGAGGGTGAAGAAGAACA
GGGAATACAGTCTGCAGGAGAATGCCTCGGGCCTCATCTGACCTTCAGCTGGGACTACTGCCCTGCCCCA
GAGACTGGATATCCTACCCCTCCACACCTACCTATATTAACTAATGTTAGCATGCCTTCCTCCTCCTTCC
CTCTCTCTCTCCCTCTCTCTTGCGCACACACACACACACACACATACACACATACACACACATGCGCCAG
TGCGCGCACAAAAGAGAGAGAGAGAGAGAGTTAGTTCACTCACCCCTTGTCTCACCGGCCTCTTCCTCCT
AAAGTCTCCCGCATGGTTCTTAGGGCCTGAAGGGTCCTGAGCTGAATGAGCGCTGGACTGAAGGGTCTAG
TTTCTCAGAGTCCTTGGAAGGGATCCTCTCCTCAGCCCTGGGTCTTCCACTGTCCGTACTAAGGCAGCCT
CTGTTCTCACCAGTCTCTCAGGAACACTTCAGTGGTGGGAGAAATGGGAGCCTTGACTTCCGTGCCAGGC
AGCCCAGCTCCTCTGTCTCTGCCCACACCCAACAGAGAGGCAGGGGAGCAGCAGGTGGTTGTTTCTTAGC
AGCTACCACTGGGCTAAGGGAGCTTGGCTGTGGCCGCTTTGCATCTGGCTTCAGTCTAGCATGGAACCCA
GGAGGGACCTATCTCCCTTTCCTTTCCCACTTTCTGCCCTCAAGGCTGATTTGGAAACCACCACTTTGGG
AAGTATAACCCTCTCTGTATACTACTCCCTGGTGTCAGAGCAGGAACGAAGGAACCAGCAAGGCTAGGTC
ATCCAAGCACTGTTCCTAGGAACCTGAGGCCTACCCTCAGGTCAGCATGTGCTTCCTTCTGCCTTTCAAA
CCAACAAAGCCCATGTAAGGAGCCCATGTAAGGAGGACCCAGTCTCCCACCCTCACAGTAGAGACAAGGT
CTTTCCCCCTTCAGAGACGCAAATAGCCATCTTTACCATGCCCCGGAAACAAAAGAGTGACCTCACATGG
GCTTTGCTGTCTGGACTTCAGCTCATGTGCAGAGGAGTAAAGGCGGTGAATGGGGGGTGTGATCCTGAGA
TGCAGTCAGACCAAGGAATGGAGCAGAGTGGATGCCACCTGTCACTGTGCCAGATGGCAAGTTGCAGCCC
ACAAAGAGAGTAGCCGGGTTGACTCGCTTGCAAACACATTGTCTTCGTTGGCATTTTCTCAGCTTTTCCT
CACTACCTCTCTGGATGTGGAGGTGGGCTCCTTCTGTGGGCCTGGGCTGGGGGCCACCACTGCCATGCAG
TGGAGAGGCAAAGGCAGAGGCCCAGGAATGAGGCCTTTTCTCAACGATTCTGTTTATCAGAGAACTGGCT
TGGTGTTTGTCAGGGATGCTGTATGGTTCTCTGAGAGCTCCCCTGGAAAACCTTACCTCCATTCGCATTG
GGATTGCTCCCAGAGAGCGCTCGGTGGGCAGCAAGAACATGCTCACACACTTGCCAAGCATATCCAGAAC
CAAAAAGGCTGGCGGAAAAGATCCTGGTCTGACTGCCCATGCACACCCTGAGGCTCCAGCAGGTTGACTG
TGTGCCTGAGCTGGAGATCTGGCTCACCGTGTCCCCGAAGCAGCTAGGCAATTGACATTGCCCTATGTGA
CATTTAAGTGCCTTTCAGAAATGCCTTATATGGTGAGAAGCCAAATGGTTTATGTCGGCGTGGCAAAGGT
CCTGTGAGACTGAAGCCTTCAGGGAGCCTTTGTTACTGGCAGTGTTCTTTCTGAAGCCACCGGGCTCATT
TCCACAGATCTTATTAAGGAGGAGGCTCCACACAACCTCACGGGCCAGTTTCAGCATGTGGAACGGTTCT
GCTTGGAACCTGATTCTCTGCAACTAACCCTGGGCTTACTCACTGCAGTTTAACCAGATTCTGAAGGCAT
AGCCTTCCACCAATCTCGCAAACAATGAACGTCAACCTTCCGTTCCCGGAAGATCAGCTGTCCCCACAAG
TCTTTATTCTATTATATTGCTATTAATATATTATAATTCTGTTCTGGGTGT

[0116] An exemplary DNA sequence of the Slco2a1 gene in humans is provided below.

(SEQ ID NO: 21)
CCTCCGGCCACTGCCGCCGCGGTCGCCTCTCACCCGCCCGGCCGCTCCAGCCCGAGGCGCCCCGACCCCG
CGCCACTCCGCGCCCGGCCAGCCGCCCGCAGCCATGGGGCTCCTGCCCAAGCTCGGCGCGTCCCAGGGCA
GCGACACCTCTACTAGCCGAGCCGGCCGCTGTGCCCGCTCGGTCTTCGGCAACATTAAGGTGTTTGTGCT
CTGCCAAGGCCTCCTGCAGCTCTGCCAACTCCTGTACAGCGCCTACTTCAAGAGCAGCCTCACCACCATT
GAGAAGCGCTTTGGGCTCTCCAGTTCTTCATCGGGTCTCATTTCCAGCTTGAATGAGATCAGCAATGCCA
TCCTCATCATCTTTGTCAGCTACTTTGGCAGCCGGGTGCACCGTCCACGTCTGATTGGCATCGGAGGTCT
CTTCCTGGCTGCAGGTGCCTTCATCCTCACCCTCCCACACTTCCTCTCCGAGCCCTACCAGTACACCTTG
GCCAGCACTGGGAACAACAGCCGCTTGCAGGCCGAGCTCTGCCAGAAGCATTGGCAGGACCTGCCTCCCA
GTAAGTGCCACAGCACCACCCAGAACCCCCAGAAGGAGACCAGCAGCATGTGGGGCCTGATGGTGGTTGC
CCAGCTGCTGGCTGGCATCGGGACAGTGCCTATTCAGCCATTTGGGATCTCCTATGTGGATGACTTCTCA
GAGCCCAGCAACTCGCCCCTGTACATCTCCATCTTATTTGCCATCTCTGTATTTGGACCGGCTTTCGGGT
ACCTGCTGGGCTCTGTCATGCTGCAGATCTTTGTGGACTATGGCAGGGTCAACACAGCTGCAGTTAACTT
GGTCCCGGGTGACCCCCGATGGATTGGAGCCTGGTGGCTAGGCCTGCTCATTTCTTCAGCTTTATTGGTT
CTCACCTCTTTCCCCTTTTTTTTCTTCCCTCGAGCAATGCCCATAGGAGCAAAGAGGGCTCCTGCCACAG
CAGATGAAGCAAGGAAGTTGGAGGAGGCCAAGTCAAGAGGCTCCCTGGTGGATTTCATTAAACGGTTTCC
ATGCATCTTTCTGAGGCTCCTGATGAACTCACTCTTCGTCCTGGTGGTCCTGGCCCAGTGCACCTTCTCC
TCCGTCATTGCTGGCCTCTCCACCTTCCTCAACAAGTTCCTGGAGAAGCAGTATGGCACCTCAGCAGCCT
ATGCCAACTTCCTCATTGGTGCTGTGAACCTCCCTGCTGCAGCCTTGGGGATGCTGTTTGGAGGAATCCT
CATGAAGCGCTTTGTTTTCTCTCTACAAGCCATTCCCCGCATAGCTACCACCATCATCACCATCTCCATG
ATCCTTTGTGTTCCTTTGTTCTTCATGGGATGCTCCACCCCAACTGTGGCCGAAGTCTACCCCCCTAGCA
CATCAAGTTCTATACATCCGCAGTCTCCTGCCTGCCGCAGGGACTGCTCGTGCCCAGATTCTATCTTCCA
CCCGGTCTGTGGAGACAATGGAATCGAGTACCTCTCCCCTTGCCATGCCGGCTGCAGCAACATCAACATG
AGCTCTGCAACCTCCAAGCAACTGATCTATTTGAACTGCAGCTGTGTGACCGGGGGATCCGCTTCAGCAA
AGACAGGATCGTGCCCTGTCCCCTGTGCCCACTTCCTGCTCCCGGCCATCTTCCTCATCTCCTTCGTGTC
CCTGATAGCCTGCATCTCCCACAACCCCCTCTACATGATGGTTCTGCGTGTGGTGAACCAGGAGGAAAAG
TCATTTGCCATCGGGGTGCAGTTCTTGTTGATGCGCTTGCTGGCCTGGCTGCCATCTCCAGCCCTCTATG
GCCTCACCATTGACCACTCCTGCATCCGGTGGAACTCGCTGTGCTTGGGGAGGCGAGGGGCCTGCGCCTA
CTATGACAACGATGCTCTCCGAGACAGGTACCTGGGCCTGCAGATGGGCTACAAGGCGCTGGGCATGCTG
CTGCTTTGCTTCATCAGCTGGAGGGTGAAGAAGAACAAGGAGTACAACGTGCAGAAGGCGGCAGGCCTCA
TCTGACCCCACCCTGGGCCACTGCCCTGCTCCAGAGAGTGGACCTTGACTCTTCCACACCTGCCTATACT
CACTAATGTTAACACGTCATTTCCTTTTTGTATTTTTAAACAAGAAAGAAAACCCCAGTCCTCATTTGCC
TTCCCTACCTCTTCCTCCCAGAGTCCTCCCCACAGTTCCTAAGGGCCACTGTGTACCCGGGCTGTGTGGG
CCAGAACTGGGGGGCTGAGTCTTCCCTGGCCCCTTGGAAGAGGCCCCCAGATGCCCAGGCTCACTTCAGT
GTTGAGTCCTCCATTGAGGATGCCCACTGAGGCAGCCAGGCCCCTCACCAGCCCTGGGGGGAATCCTAAA
CAGAGAGAGAAAAAGGGTATCTGCCCTTCTTGCCAGGCAGCTCCACTCTCCCGCTGACTGCCCACACCCT
GCAGAGTGGCAGGGGTGAAAGGAAGAAGGAAGTGGCTGAGTTATTAATAGCCAGAGCCACTGGGAGACTG
GGGAGACTGGCTGTAACCCCCTTCACACCTGGGTTTGGCATCAGCACAGACTACGGGAGGGGCTGGCTCC
CTCCCCCTCAGACCCTCACTTCCTGTACCTAGAGGCCATTCTGGATGCTGCCATGTTGGGAAGTACAGTC
TCTGCCCATTACCTGCATGCAGGCACCAGAGCAGGGACTGAGAAACCCCAAGGATGGGTCATCTAAGTGC
TGTCCATATGAACCCTGGACTTTCTGTCCTTAGATCCTCACATGTTATCCCTGTCTTTCTGGGGTACGTT
TCAAACTGAGGAAGCTACAACACAGTGAAGACCCAAGGAAGGCCTATGAAATGGTCCTGATGCCCAACCT
CCCACCCCTTCAATGTGGGGACGAGACCCCCTCATCTCAGAGTAATGGGAAGAACCTCCCACATCTCCCT
GGCAGCAGATGAGGTGGCTTCACATGCACTTCCCTGTCTGGACTTCAGCCCGTATTCCGAGGAGTAGAGA
GGCAGAAGAGATGTCAGCAAAGCAAGTGATGAAGCAGAGTGGATGTCCACTGTCACCAAGCTGGATGGCA
AGCTGCGGCCCACAAAACAGCCAGTCAGGTTGGCTTTCCTGGTTTCAGACATGCTCATACCATTCCCATT
TTCTCAGCCTCTTCTCACTGCCTCCAGAGAGGTGGGTGCCTGGGTTGAGAGACACAGCTGCTACGTGATA
GATGTTGAGAGACAGAAGCCAACGAAGGAGGTCATTCATCAACAAATATATTTATTGGAGACCGACTTTG
TGCAAAGCAATGCTAATCAGGGTTCTCCATGGAGCTTCCCTCAGCTCTTACCTCACCTCCCTCCATTTAC
ATTAGGGCCTTCTCCCAGGGTGTGCTCGGTGGGCAGTGTGGGACTGGGGGTGTGGGAGTTGGTGAGAGCA
GGAGGAGAGGTGGGGACAGCAAGAAGCCACAGATTGGCATGAAGGATCCTGACCTGACTATCCATGCCAT
CCATGGCCCCCAGACTGACTCTGCACCTGGCCCTTTGCCAGACAGCTCTGTCTCCCCATGTCCTCTGGAA
CAGCTGGGCATGGGTCATGGCCATTCATGACCCTTAAGTGCCACCCTTCTTGGAAGACCCCCTCCAGAAG
CATACTGGAAGCCACCTCTGGAAAAGCCTCATATGGTGATATGCCAAAATATTTATGTCAATGTCCAAAC
AAAGTCCAATGCCATGAGACTGAAGTCTTTGTGGAAACCACTGTTACAGACAAGCTTATTTCCAAAGCCA
CCTCATTTCCAAACATCTCACTCAGGAAGGGAGGCTCAATGTAACCTCAGGGGCCAGTTTTAGCATTTGA
AATGGTTCTGCTTGGAAAATGATGCCCTGCAACTAACCCTGGTCTTTCCCATGGCAATTTAACCACATTT
GGAAGGCACTGCCTTCAGCTGAGTTTATGAACAATGAATGCCAACCTTCAGGTTCTAGAAGATTGGTTGC
ACTCCCAAACCTTTATTCTATTATATTACTATTAAAATATTCTAATTTTGCTATTGAAAAAAAAAAAAAA
AAAAAAAAAAAAAAAAAAA

[0117] Srprb, or signal recognition particle receptor, B subunit, is a component of the SRP (signal recognition particle) receptor that plays a role in correct targeting of the nascent secretory proteins to the endoplasmic reticulum membrane system. The Srprb cDNA sequence in Mus musculus is provided in GenBank Accession No. BC003798.1 (GI:13277830), incorporated herein by reference. The Srprb amino acid sequence in Mus musculus is provided in GenBank Accession No. AAH03798.1 (GI:13277831), incorporated herein by reference. The Srprb cDNA sequence in Homo sapiens is provided in GenBank Accession No. BC063001.1 (GI:38649414), incorporated herein by reference. The Srprb amino acid sequence in Homo sapiens is provided in GenBank Accession No. AAH63001.1 (GI:38649415), incorporated herein by reference.

[0118] An exemplary DNA sequence of the Srprb gene in Mus musculus strain C57BL/6J chromosome 9, GRCm38.p1 C57BL/6J is provided below.

NC_000075.6 (GI: 372099101: c103202065-103188033):
(SEQ ID NO: 8)
TCTTTCATGGCTTCGGCGAACACCCGGCGAGTTGGCGATGGCGCCGGTGGCGCCTTCCAGCCTTACCTCG
ACTCCTTACGACAGGAGCTGCAGCAGAGGGATCCGACGCTGCTCTCCGTGGCGGTGGCTCTCCTGGCGGT
GCTGCTGACGCTGGGTGAGGCGGCCGGCATTCACGGCGAGGGCAGGGTGGCTCGGCGCCGCAGGCCAGGG
AGGCGGACGGCTGCGTTCCCTCTTCTACTACTCGTCTTCCAGACCCAGCAGTGTGGAAAGGGGACGCTGA
AGTGACCTGGGTCTTGGGACAGGACTTACATGAGGCGGCCCTGTGCGCTTGAGCGCTGCGGCCGCCATCG
TTCATTCCAACTTTGAGCCACTTGTGTCTGAACTGGGCTCTGAGATACTGGGGTACTAAGGTAGAGTAGA
AATCCACCAATCAAATGTAGCAAGCCACTAATTTTTCCCAGATCCATCATTCTGTGTATACTTTTAGTCT
CCACATTTGGATGAGGGAAATAGACGTGAAAAGGTTTACAGTTGATAGTGGCTGGCGCTCCGTGAGTTCC
TAACAAAACTGACTCTAATCCGTGTGACAATGAAAGTAGTCCAGATGGACGCTTTGTTTTTTTGTCGTAA
ATGCCTACTAATAATGTCTTTAGAAAATGAAGGCTGCCTTTCTCTTCTCTGCAGTGTTCTGGAAGTTCAT
CTGGAGCCGAAAGAGCAGTCAGAGAGCTGTTCTCTTCGTTGGTCTCTGTGACTCTGGGAAAACGTTGCTG
TTTGTCAGGGTAATGCTTTGATTTTCACCTCGGTTAGACTTAAGAGGGATGGGTAAGGCATTTCCGTAGC
CCTGTCATCTTGCAGTTTATTTGGTACAGCAAGTTTAGGACATGTTTTTAAAAATATTTTTTTTTCTTTT
TAATTATATGTATGTGTGTGGGTATATGCACATGAGTGCCTGTACCTGTAGAGGCCAGATGTGTCAGATT
TTGTAGAGTCGGTCTTCAAAGCTGCCTGATGTGGGTGCTGGGAATTGAATTCAGGTCCCTTTGCTAGAAG
CAGGATGGGATCTTATCCAACTTAGTTGAGTCTCCAGCCCTGGGAGTTAATTCTTTTTTTTTTTTTAAGA
TTTATTTATTATTATATCTAAGTACACTGTAGCTGTCTTCAGATGCACCAGAAGAGGGAGTCAGATCTCA
TTACAGATGGTTGTGAGCCACCATGTGGTTGCTGGGATTTGAACTCAGGACCTTCGGAAGAGCAGTCGGT
GCTCTTAACCACTGAGCTATCTCTCCAGCCCCCTGGGAGTTATATAAAAAAGACTCTAGGAAAACCTGTA
AAAACACACACACACACACACACACACACACATACACACACGATGCTGTTAGAATACGTGGTCTGGGGAT
GGGGAGGTGACTCAGTCTGTTTTCTTGCCTGGCAAAAAAATGAGGGTCTGAGTTTGGATCGGTGGCACAT
ACGTGAAAGCCAGGTCCAGAAGTTCTTGTCAGCAATCCCAGGGCCTAGGAGGTATGGATCCCTGGAATTC
CTTGGCTCACCACCACCCATGCTAGTTGGTTTTCTCCCCGGGTTCAGTGAGAGACCACAGCCTCACAAAA
GGTGGCTGGCTGTGTGGTGGTGGTCCATGCCTTTAAAGCCAACACTTGGGAGGCAGAAGTAGGAGGATCT
CTTCAAGTTTGAGGCCAGCTTGGTCTGTAGAATGAGTTCCAGGACAGCCAGAGCTGCACAGAGAAACCCT
ATGTCAGGGAAAAAAAAAAAAAAAAAAAAGCAAAAACAGTAAATAAATAAGGTGGAGAAAGATTAAGGAC
TCCCGACATCAACCAACCTTCAGTGTACATACACCTGTTAAAAAATGCATTACCAGTTTCTTGGGCTACT
CAGAATATAATGGTTATGGACATACATTTTTTTGTTTGTTTGTTTGATTTTGTTTTTTTCCAGACAGGGT
TTCTCTGTATAGCCCTGGCTGTCCTGGAACTCACTCTGTAGACCAGGCTGGTCTTGAACTCAGAAATCCA
CCTGCCTCTGCCTCCTAAGTGCTGGGATTAAAGGCCTGTGCCACCACTGCCTGGATAGACATATATTCTT
AAGTGTAGCTTGCGTTCTTATTCTTTCTTTAAACAATCAATAAAGGATAAAGGAAGCCCAATAACTTTTG
CTGATTTCTGTGACTTAAAATAGTCCCAGCATGGCTAGTTCTGAGCAATCCAGCATTATCACAATCATGA
CAAAAATTACCCTCCTTCGACAGTCTTAAGCTAGAGAGGCCTCCCTTTACTAACACTTAGTTTTATGTAA
GCCAGTGTATTTTAACTGAACATGTTTTACTATGGAGAATTTACCCTCTTCCTTTGGAGGGTATAAATAA
TAATAATAGTAGTAGTAGTAGTAGTAATAGCTATTATTATTTTAATTGTGTGTGTGTGTTCATTCATGTG
TGTAAGGGCTGGTACGTGTGAGCCTTGGCACATCTGTGGAGGTCAGAGGACCAGAAGTGTTGGTCTTCTC
TCATTGCTGTGCCAGGCAAGCTAGTATGAATTTCTGGAGATTGTCCTGTCTCCCTCCCATTTTCCCCATA
GGAGTACTGGGCTTGTGAATGTGTGTACTACTAGATCTGGGTTTATGTGGGTTCAGAGGGGCTGAACTTA
GGTCATCAAGGTTACACAGGAAGTGTTATGTCCACTGAACATCTCCTGAGGCCTTGAGTTGGTTTTGGTG
CCTAAAATCTTTACAGGTCAGTAATTTGGCCCCTTGCTGTTGTTTAAAAATAATACTAATAATGTTGGGC
CCAGGGTGCCACTTTCTGATGGCACTGCAAAAAGAAGGAATAAAGCTTGTAATTAATTATTATTATTATT
TGGTTTTTCGAGACAGGGTTTCTCTGTGTAGCCCTGGCTGTCCTGGAACTCACTCTGTAGACCAGGCTGG
CCTCGAACTCAAAAATCCGCCTGCCTCTGCTTCCCGAGTGCTGGGATTAAAGGCGTGTGCCATCACTGCC
CGGCTGTAATTAATCACTATTCTACAAGTTAAAAATAAAGCAGTATGATCGTTTTCAGCTGTTTCAAGTA
GCATTCGTTCATTTGACCTTACTCTCCACAGAATGAAAATGTCATTTTTTACATTGCATTCAGTGTTATT
GTAACTCGCTTACCCTGATTTGTCTGTCTTGGTTTTGTTTTGTTTACAGTTGCTAACTGGCCAGTACAGA
GACACACAGACTTCCATTACCGATAGTTCTGCCATATACAAAGTCAACAATAACAGGGTAAGAGGTATCT
GGAATGTTCTAGAATCTGACACTCTTCTTTACTAAGTTCTACTGTCATGTGTGTTGCTGACCCAAAGCAA
CTTGGGGAGGAAAGGATTTAATCTGTTTACACTCCCGGGATGTAGTTCATTGTTAAGGGAATTCAGGGCA
GGGTCCTGGCAGCAGAAGCCATGCAGAAATGCTGCTTGCTGGTTCACTCTTCAGTTCACTTAGCTAGATT
TCTTCATAGCTCCGGACTACCTGCCTAAACATGGCGCCTCCCACATTGGACTCAAGAAAATGACCCATAG
ACATGCACACAGGCCAGTCTCATGGAGGGACTTCTGTTGAGGCTTCTCTTGCATGGCTGGAAGCTGTGTC
AAGTTAACAAAGCTTACTGGGGCACTGTGGCTTGTCAAGGAAGAACCTTCTTGGATGGAGTAGTCTGAAG
ATGTAGGTACCTTTTGTGTAGCTTCATTTTACGTAGAACATATTCTGTATAACAAACAGATCTGCCCTCG
ATAATATAGGTAGCAGATTTAGTCCTGCCCACCCATCCTCGTAACTTACGTACAGGGTATAAGACATTTT
ATTTTTAGGTTCTGTCTGTCCAACATTACTATGAGGTTCAGTAAGTACTGGGTCTTTTTCGGGTATAAGG
AGGCAGTATGTAGACACAGGACAATCATTTGGCTAAAAGTAGTTGTCTTTTTCTGCCTCTGCTAGCCAGA
CTTCTCTTTAGAAGCCGTCCCATAGTTAGATTTTTATTACCCAGAGCCTTGTTAATGTCTAGTGCCTTTT
TTTTTAATTTAAAAAATTTATTTATTTATTTGTTTGTTTGTTTTTGAGACAGGGTTTCTCTGTATAGCTC
CGGCTGTCCTGGAACTCACTCTGTAGACCAGGCTGGCCTCGAACTCAGAAATCCTTCTGCCTCTGCCTCC
CGAGTGCTGGGATTAAAACTTTTTTTCTGTGCCTCACATATACTAGGCAAGCCACTACCCTTCCTTCACC
TGTGTTTACTATTAAGACATCCTCAACAGAAATCCATCTGACTTGCTGCCTGCAGTAAACATTTGCTTGA
TTCATGAGCTCAGCTCCAGTGTGCTGATCTGATGGTGAAGATCTATGCTATGTGAACCTGGAGCTGGACC
GAATGGTGATGTGATGTCACTCTTGCTGTCCTCAGGGTAACAGCCTGACTCTGATCGACCTCCCCGGGCA
TGAGAGCTTGAGGTTTCAGCTCTTAGATCGCTTTAAGTCTTCAGCTAGGTAAGTCAGGGATGAAGTGACA
TGGGTCCCTTCAAGTCTGCACTGCGTCCATGCGCACGCTCACGCTGGTTCCTCTGCCAAGACTTTTGACA
CTGGTATGGGATGAACCTTGGAGTGGCCATTTCTGGGGTGCTAGAACTCGGAAGACGTAGGAGCCTGCTT
AAGGCTGGCTTTTCAGATTGCGCAGGGGGTGTCACTCTACTAGCATGATTAAACTTCAACTATGTGTATG
TGGGGCAGGGTATGTGCACTTGTGTGAGGTACAGCATAGGAAGGGAGGGTGTTGGATCCCCTGGAGCTGG
GGTTACAGTTGGTTGTAACTTCCCAACATGGGAACTGAACTCAGATCCTCTGCAAGAGCAGAACACACTC
TGAACTGTTGAGCCATCTCTCTAGCCACTGACTCTGAAAATAGATTTAATGACATGTTAAGGCTATTACA
ATCTGGAAAAGGAAATTGTAAGGCTAGGATGGATCCCAGAAGATACTAAACTCAAAACATTAATCATACT
CTTTTTGGTTTTCTTTCTTTTTTTGGGGGGGGGGGGGGTTCGAGACAGGGTTTCTCTGTATAGCCCTGGC
TGTCCTGGAGCTCACTTTGTAGACCAGGCTGGCCTCGAACTTAGAAATCCGCCTGCCTCTGCCTCCCGAG
TGCTGGGATTAAAGGCGTGCGCCACCACGCCTGGCTTTTTCTTTTGTTTTGATAAGGTGGCAGTATCTCT
CTAGCCCATGTAGCCCAGGCTGGCCCTGAACTGTAAGCTTTTTCCATTCCAGCCTCCTGGCTTATACAAA
CTAAGTGGCTTTTCTTTCCTGTCCACCTGCTTGGTTTTGGCTTTTCAAGATAGAGTCTCAGGTACTGCAG
GTTGACCTTGAACTTGCTATATAGCCAAACAAAGAACCTTGAATTTGCAAGTGTTGGGATTACAGGTATG
TGTCACCATAACTAGCAAGGCTTTCTTTCCTCTTACCTTCTTTTCACCTTATTTATTTATTTATTTATTT
ATTTATTTATTTATTTATTTTTGGTCATCAATAAGAAATTCCCTTGTGTATGTGTGTTTGTTTGTTTGTT
TCTTTTTTAGCATATAAATGCTAGCATTGTCCAAAAAACTGTAAGAGATTGATTTCTAATTGTCTTGAAG
TTGAGCTGCTGGGAGTTGCCCAAAGAAAGGCTTGGCTCTATTGGGCTTTACCTCCCGTGTTTGGATTGGA
AATCGAGTACAAATGAAAATGGAAAGCCCGCCAGCACCTGACTCTGCCCCATTTTTCTACGCAGAATCAT
GCCTTTTGACCCCACAGGGACGAATCTGACATTCAGAATTACTGATGATAGCAGGACAAAGGGGTTTATT
GTTTGCTTCGCTTTGTTATATTTCTCTCATAGTAGATTCTTTTTGGGGGGTCAGGGTTTGAGACAGGGTT
TCTCTGTGTAGCCCTGGCTATCCTGGAACTCCCTCAGTTGATCAGGCTAGCCTCCAACTCAGAGATCTGC
CTGCTACTGCCTCCTGACTCTTGGTTCCTGGCACTAACAGTGTGCTCTACCATGCTCGGCTCTTATTGTA
GATTCTTAAGCCTTCAGGCATGCTAGCTGGAGTTCTTTGGCATAACTGTTAGTTTGCATGGCTAGCACAC
AGCTGGTATCCTCAGAAAGGCCTGGCTTGAGTCCTGTGAAGCACCAGTAGCTGTACTCACGTCCTGGGTC
TGGCCCAGATGCTAACCAGAGTCTGGATCAGAAGTGCAGCAGAACAGAGTGCCACAGTACCACGTGGCAC
AGAGAGGTCCCCTCACCCCTGCAGTAGTGCAAGCAGCTATGGAGCTAATAGTTTACTAGGTGCTTTTCTG
CTGGTGGGTATGGAGCTGTCCACTTCATAGGAACAACCGTATAGAGACCTTCCTCACTATCTCCCTCGTA
TAACCCAGCCAAAAGCTAGAGGCTGCATGTCTGTTCTTAAATCACACTAAATTGATACCTCAAGAACTAT
TTTTAGTGTAAGTCCTCATGTCATTGATTTTTAAATTCTTTCCTAAAATTTGTATGTTGTAGTTTTAAAT
GCTTTCTTCATGTTTGCTGTCTAACATTGTTAAGAAAAGTAAGGAAAATTTGTATTTGTATTAATTTGTC
AGAGTGTCTCAAGAACAGCTTTTTAAAAAATTTTTTTCCATTGTCACTTGCAAATATTTTAGAGTTTATA
GTATAATTACACTTTTTTCCAAGTATTTTGGATAAATAGAATATTCAGCATATAAAGATAAAACTAAGTT
AATAAGCCGGGTGTGATGGTGCACACCTTTAATCCCAGCACTCGGGAGGCAGAGGCAGGCGGATTTCTGA
GTTCGAGGCCAGCCTGATCTATTTACAAAGTGAGTTCCAGGACAGCCAGGGCTACACAGAGAAACCCTGT
CTTGAAAAACCAAAAAAAAAAAAAAAAAAAAAAAACCTAAGTTAACAAACTTCATTCAGTCATAAAACTG
TTAAATCGAAAACACTTTTACTATGGTATATGACATTTTTCTTTTTAAGATTTCTTTTTAAAATTTAGGT
GCATGCCCCTGTTCTTGTTTGTGCACTGTGTGTGTGCAGGTACCCAAAGGACCAGAACATGACGCTGGGC
CCCCTGGACTGCAGTTACAAGCAGTAGTGAGCTGCCTGATGTGGGTGCTGGGAACCTAACCTGGGTCCTC
TACAAGAGCAACAAGAACTCTTACCATGACCCCAATGTGACATTTAAAAAAAAAATTCTTCCTTGTGACC
TAAGATTGTTTTTCCATCTAGGGATTTCAAAGTATATTATATTTTCTTTCTGTGGATTCCTGCCCCATTT
TAAAAAACAAAAAACAGTATCTAACCAGGACCCATTTCTTTTTTATAAACCATGACAAGCACCTGTGTTT
TGAGGCTCCCTGATGTTTGATTTCTTTGCTCTTTGCCAAATTTTGCTCCTTCCTTTCAGGTTCTGTTTTC
CTCAGAGTATCTGCTAGAAATGTTTCTAGAGGATGAGTGTGTCGTGAAGTTGTTGGCTGTCTTTCACGGA
AAGCAACCTTTATTTGGCCTCTTTTTTTTTCATGGTCCTTGGTCTTAGTTGCATGTGAGGTCCTGGGTAG
CAGCTCCGAGTGGTCCCTGGAGACCGCCGACTCCACATCTGCTCTTACAGAGTGCCAGTGTAACTGTCAT
TTCCCTCTGAGGCATCTGTCTTTGGGTTTCTGGTATTTGGAATTCAAGTGTAGCACCCTACACAGAAGGG
TGTTATCATCTGTTAAGTGCAGGCCCTGGGGGGCAGCTGGACCAGTCACCCTGTGCACAGCTTGCCACTC
AAAGGTAATCTAATGGAGACCGTAGCTGGAACGGAATTCCAAAGAAACTGAAACACCCGGTCTCCATGCC
TCGCCGCTACAAGGCACAAGTGGATATTTACAGGTAGAAGAGCCTCAAGAGAAAGATTAGCCTAAACATC
AAGCCAGATTCATCCGACCCTGTGCCTGCTGCCTCATTTGTCACAGCATGGGCCGTTCTCTCTGCCCTAG
CTCTTGCGTAGTTTATCTGACACATCCTTCTCTCTCGAGTGTTGCCCCTCAGAGTGTTAGCCCCTCAGAT
CCGCTGCCTAGTTTGCCGTGTTCTTTTCAGCTGAGAGAACCTGTTTAGTTTCCACTGTGTTGCTAATTTT
ATTTACTATTTTTATAATGTGTTCTTTTTTAAAATACCCTTTAAAACTCCACCCATTTCTTTTTACTTGC
TTCTAGTATTATTCTCTAAAATAATTTTAAACATACATTATGATTTTTTTTGGAGGCAGAATTTCATGTA
GCTCAGCCTGACCTTGAACTCACTGTTCAACCAAAAATGAACTTGAGTTTTTGATCTCCTGCCTCTACCT
CCTCAGTGCTAGGATTACAGGTGATCACTTTGGTTCAATGCTGGGTGGGATGGGATGGATACATATACAT
ACACATATACATATACATATACATCCATATGTATATATATATATTCTACTATGCAAGCACTCTGCTAACT
GAGCTACATGTCCAGCCCATAAACATGTGCTTTGTAGATTGCTCTAAAGTCCAGTTTTGGGGGTGCTGGT
TAATCTCTTTTATAATTGCATATTTTAATTTCTGTTTTGATCCAGAACTCCTCCTCTAAGAGAATGGGTG
CCATCGATGAGACTGGTAGTCTTTGTTAGTGTAGGGCGTGAGCGGCCAGCTCCACACCGCTCTCCTCATT
TGTTAGCACCATCGGGGGTTGATGATGAATATGGTCCAAAATTGTTTTCTTAACTTTTTTTTTCCTTAAA
GTTTTATTTATTTTATTTGTATGACTACACTGTTGCTGTCTTCAGACACACTAGAAGAAGGCATCGGATC
CCATTACAGATGGTTGGGAGCCACCATGTAGTTGCTGGGAATTGAACTCAGGACTCTGGAAGAACTCTGA
GCCATCTCTCCAGCCCCCAATTTTTATATAATCTCTTGCTTAGGGCTCTTATTCCAAGGGAGTGTCCACT
TATGCCCCATAGCTACAGCCATTGGAGACCGGGTGTTTTAACGTCTTTAAAACTATTTTCTAACCACAGC
CTCCATTTCACTGCCTTAGAGTTGGAGGCTTTGGGTAAGGTTTGGTCCAGTTGTCCAGACCCTGTTAGCC
ACTGCACATTCTCTGCCCCAGGACCTGATGTCTGAGGCTCCCGTGCAGTACCTCTGGTACTTGATGGTGT
CACTGCTGTGTCTGAGGTCAGGTCCCACATAGTCACAATCCTTGAGTTCCCTCAAGAGTGTTCTGTCTTC
CACTTAGGCCCCAGTAGTCTTCACAGCACAAGCTTCACAGGGCAGTGTCCTCATCCCTTCCCCTCTGGCC
TGGCCTCCCCCGTTCACCCTGCCTTTGTGCTCTTCTCGAGATTTTTACATCTTTCTTTTGTCTCCCTCTT
TGTTCTCCCACTGTGGGTACATTCTGCCCTGTGTTCATCGCCTAGATCTGTCAGATGGTTTTCTGACCCT
TGAAAGCCCAAGTCATTTCTTGTGTCCTTTTAGCTTCTTCATGTTTTGTTTTTGTTTTCTTTTTTTACTT
AAATCAAAGCATGCATGCGTGCATGTGTGCTGTGGTGGAGGGCTGAGTGGAGAAACCAGGGGTCTGTCTT
GTGGCTCCTGCCTGCCGTGTGTGCTCATGTGTCCTTCCCTTTAACTGTCCCTGCAGGGCTGTGGTGTTTG
TGGTGGACAGTGCGGCGTTCCAGCGGGAGGTGAAAGATGTGGCCGAATTTCTGTACCAGGTCCTCATCGA
CAGCATGGCTCTGAAGAACTCACCGTCCTTATTAATAGCCTGCAATAAGCAAGGTGCTTCCTGGCAAAGG
CAGCCAACCGTTGAGGATTGCTGTTGGGAATTAGTTCATTTACCCGCCGTTGTTATTTCTGAGCATGGGG
AAAGGGCTGGAATTAAGCATTAATTAAGGGATTAAATCTGAAAATTGTTTCTATTACTTTCCTGGTCTTT
TACCAGGTTGTCCCAAGGACTGGCAGCTGGGGGCTCTGTTGATATTATATCTTTTTCATGATACAGTGCT
TTTTAAAGATAAATTATCTTACTTTTCCAAATGTTAATTTGTGAGACCGAGTACTATCGGTTCTGGGGGG
ATTATTGGGCCTCTCCTTCCAGACAGGCTGCGCCACTGTTCCCTCTTACCCCAGCGCTCACAGTCAGGTT
GGCTGGGCATCAGCTCTGTGGCCAGGCGGAGTAACGTCAGGAGTTGGTCCTCGGGAACTCCTTCACGGCT
ACATTTCCTAATACCTGATGAATGGTGCAGCTCTTAGCATCTTTTGTAAAAGTATTTTTGTTTTGTGTGT
ATGTGGGGCGGGGGGGGGGGGGGGGTGTGCAGGGCTGAACCTCAGGCATACCCGGTGCCTGAGAAGATTA
GAAGAGGGCTTTGGATCTGCTGGGACAGTTGTGAGTTGGCCATGCAGGTTCTGGTACTTGAACCCTGGTC
CTCTGGAAGAGCAGCCAGTGCTGTAACCCCTGGGCCATCTCTAGCCCTAGCCATCATCTTTTCTTAAGGG
TTAATGTGGTGTTGTGTTGAAAGTTCTCCTCAGATGTCAGTCATGGTTCACGTATGCTTGCTTTCTTTCA
ATGGACAGGACAGGTTACATATTGAAGGGCTTGTAAGGTGTGGGAAACTTAAGCTTGGTTAGTTTTAAGG
TCATTAGCACTAAAACAATATTTTGTTGTATTTTATGTTTTAAAACATTTTTTAAAAACCTGCAAATACA
GCATTTACTGTGACAGAAAGGAATAATGATAAAAAGTGTTTCAACAAAGGAATGTGGGGTGAACTAGTTG
GTATAATTGGGAATTTTCTTTCTGTGCTGGAAGTCCAGGGAGGAGACAGATCCTGGTTTAAACTAGAATA
ATGCTCTTCTTTTCCTTCCCAGATATCGCAATGGCAAAATCAGCGAAGTTGATCCAGCAGCAGCTTGAGA
AGGAGCTGTAAGTGGGGCTGTGCTCCGGGTGGCGTCCTGACCGTCGGAGTCCATTCGCAGCTTAGGATCG
AGTGATCAGAGTTGTAGCTGGGGTAGTATGGAATATGTGTTAAAGGGATTATTAGAATTATAAAAGACGT
GGGTGTTTATAGCCATTTAAGGTTTTTCACAAATTAGGGAAAGGTGTGTGGCACCATGCCCTGCTTGTAA
ATTTAGTCAGATGTAGTATTTATGAAATGTCCCCAGCAGGAAGGCAGCAAGCATGCTGCCTGTGTGCTCT
ACAGGGCCAGCGGCTGGCAGCACAGTGACAGTTTGGGAAGGTTTTCCTGCTTACAGATACAGGACAGATG
AGACGGAAGTCTGTGGATGTGTGAGCTTCATAGCCAAGGCTCCCTATCTACCCTTTCTGAAGTTTCAAAA
CCATGAGTTTTATAATACAGTGGGGCCATTCAGGAGAGCTTAGAAGTAGGTAGAGGCTTCAAAGAGCTGG
TGTGACCTGGGTCTCCTAACCCACTGGTGTCTGTCTGAAACAGTGATCCATGGACATAAAGGACAAGCCA
GCAGTGTCAATACCGACTGGTGCTATCCCTTTGATTTAGGAGCTCATAGGATTTTGGGCTTTGTTGCGTC
TGACTTTTCTCCCTTTGCCCCCAGCAACACCTTACGAGTCACCCGGTCCGCGGCTCCCAGCACACTGGAC
AGTTCCAGCACCGCACCTGCTCAGTTGGGGAAGAAAGGCAAAGAATTTGAATTTTCCCAGTTGCCACTCA
AAGTGGAGTTCCTGGAGTGTAGTGCCAAGGGTGGACGAGGGGACACTGGCTCTGCTGACATCCAGGACTT
GGAGAAGTGGCTGGCCAAGATTGCCTGAGGAGCATCGCTGGCCACAAGCGTTGGTCATGTGAGACTGACC
CTGCAGTTTGAGAAAGGGCGGTGGTGGTGTGGACTGATAAAGAGGGGGCATGTCGTTGAAGCATTTCTTG
AGTTCTTGAAACAATTGTACCACCCCCACCCCACCCCCGTCAGCTCCTTTCTCAGCTAGTCCTTTCTTAA
TTCCCATATTCTTTCTCCCTTTGCTAGGTGTTAGGTGTAGCATCATGTTAGTGTGAGACATAACAGAGAG
GGCATCGCTTTGAGAGTAGGGTCGCATCTGAGAAGTCCTTGTCTCCTGCCTCTGTGTTGGTCCCTTTTCC
TGGGACCAGATCTGCCTGCTTGTGGAATAAGTGAACTTGCAGTTGCCCCTGGTGTAGGCATAATACAGTG
TCAGTTCTTAGTGGAGTCTGGGGTGTGAAGGTCTACAGTGAAGACAGCTTCAAAGCCACAGGCACAGCTG
ACAGTGTGTCCTTCACGGGCTCAGTGACCATCCCACACCACCCTAGCTGACAGTGTGTCCTTCACGGGCT
CGGTGACCATCCCACACCACCCTAGCTGACAGTGTGTCCTTCACGGGCTCGGTGACCATCCCACACCACC
CTAGCTGACAGTGTGTCCTTCACAGGCTCGGTGACCATCCCACACCACCCTAGCTGACAGTGTGTCCTTC
ATGGGCTCGGTGACCATCCCACACCACCCTAGCTGACAGTGTGTCCTTCACGGGCTCGGTGACCATCCCC
ACACCACCCTAGGTTCAAAAGCTGCCGCAACCCCGAAGAGTCACCCTCACAAGGTGGCTCTAGGAGCCAA
ATCCCCAGACACTCCTAGGTTAGTGTTCTAGAGGCTCCACTGGGGAGAGCAGGGAGACAGCACACTGCTG
CCTCGGGCGTGCGTGAGCCCAGGCTGTCCCCTGTGCTACTTGATCAGCTCCTGTTGTGTCACCCCAGCTA
GAGTGCTATGGAACAATACAAACTGAAGATGTCCACTGTGCATTTTAAATACATATTTATTCATGATGCT
TTAAAAAATGTTACCTTTTTAAAGTGATGCTGTCTTCAACATTTGTGTTCTCATTGCTTTTATAAATGAC
TGGTATCTTGATAAATGACTATACTGAAAGCATTGAGTCAAATGATGAGTACAAGTGGGAACCTGAGCTA
GAATTGAACCCCAGCTCCAGGTTACTGAGCCTACAGATCGCTGCATATATGAGACTCTTGGTCTCGTCTC
ACACTCAGAGTCAGGCTTCACTAAAGCCACACTAAAGAGACAGGCAGAGCATTGACTCAGGTGCAGTGCT
CAGGGAATATGTGTGGCGCTCTGGGCTGGCCTGGACCAGTGAGAGGGACAGGATAAACACACAGGTGTTC
TCTGTGCAGACCAGCCCAAGCCTCTGCCTGCTGACACATGGCCTCCCTGTGGGTCACCTGGGCTGATAAT
AGAGTCCCAGACCATGATTCCCATCAAGTACTCAGCTCCCCACTCCTAAAATATCTACTGGCCTTGCTTA
TGGTGTATGAGACAGATACAGCACAGCACAGGACAGATAAGCCATGAGATGACTCAGTTCTCACTGGGAG
GCAGTATTGCTGCTAGGATTCTTACTGCCCTTTGCACACTGCTGTTCATGTTGGTCACGGACAAATGGGA
AGGGCACGATGAAGGACGTTCACATCACAGTAGGTGCTCATCAAAAAAACCTTTCAGTTAGAAAATGTGT
TCGCTGGCCTCCCTTTTGTCTGCATAATAAAGTGATTTTACTTAGTGGGAGAATCAGTACATCAAAAAAG
TGACAAGGATGGAGAGCAAGGATAAATGTTATTTATTTATTTATAGCCTGTGTCCTGAGCAAAAGGTAAG
CTGTGCAGGGCTGGGAACCAGGTTAGTAGAATGCCTACCTGGAACGCATGGGTCTGGCTTTGCTGTGGGC
TGCTGTAAAAGCCAGCTCTAAACAGGCAGCCGCAGCAAAGATTCTATGTCTGGACTCTTCCATGGAGCCA
CGGCAGAAGCAGCTTCTCACTGCTAGGTGCCTTGTGGTCTCTCGGGAGGCCTTGGCCCCTGCCACTGCTT
CCCAGGGCCTCCAGCACCTCCTGACGTGAGCTGTTCTATCAGAGGGGAGGGGAGGCAGTGGCCCAGCCAT
TGAGCTATTTCAGGCACAATAAAATATAAGGCT

[0119] An exemplary DNA sequence of the Srprb gene in humans is provided below.

(SEQ ID NO: 22)

GCTGTACCGGGGACCACGCGTCTCATCCATGGCTTCCGCGGACTCGCGCC
GGCTGGCAGATGGCGGCGGTGCCGGGGGCACCTTCCAGCCCTACCTAGAC
ACCTTGCGGCAGGAGCTGCAGCAGACGGACCCAACGCTGTTGTCAGTAGT
GGTGGCGGTTCTTGCGGTGCTGCTGACGCTAGTCTTCTGGAAGTTAATCC
GGAGCAGAAGGAGCAGTCAGAGAGCTGTTCTTCTTGTTGGCCTTTGTGAT
TCCGGGAAAACGTTGCTCTTTGTCAGGTTGTTAACAGGCCTTTATAGAGA
CACTCAGACGTCCATTACTGACAGCTGTGCTGTATACAGAGTCAACAATA
ACAGGGGCAATAGTCTGACCTTGATTGACCTTCCCGGCCATGAGAGTTTG
AGGCTTCAGTTCTTAGAGCGGTTTAAGTCTTCAGCCAGGGCTATTGTGTT
TGTTGTGGATAGTGCAGCATTCCAGCGAGAGGTGAAAGATGTGGCTGAGT
TTCTGTATCAAGTCCTCATTGACAGTATGGGTCTGAAGAATACACCATCA
TTCTTAATAGCCTGCAATAAGCAAGATATTGCAATGGCAAAATCAGCAAA
GTTAATTCAACAGCAGCTGGAGAAAGAACTCAACACCTTACGAGTTACCC
GTTCTGCTGCCCCCAGCACACTGGACAGTTCCAGCACTGCCCCTGCTCAG
CTGGGGAAGAAAGGCAAAGAGTTTGAATTCTCACAGTTGCCCCTCAAAGT
GGAGTTCCTGGAGTGCAGTGCCAAGGGTGGAAGAGGGGACGTGGGCTCTG
CTGACATCCAGGACTTGGAGAAATGGCTGGCTAAAATTGCCTGAGAGGCA
GCTCTAAAGCACAAGACCTGGATGTGTGACACACAGTTTTGGAAAAAGGT
CTGTGGTAGTCTGGAGTTGATGAGGAAGGGGTACAAGATGTGGTTAGAAA
CATTTCTTTGTTCTGGAAACAAAGTACTGTTGAAACCAGCTTGGAATTTT
TTTTTTTTTTTTTTTTTAAGTTCAGTTCTCCCTTATGGCTGCCTTTCAAA
CAAGTACCTTTTATCTGATGCCTGTATCTTCCCTTTGTTAAGGTGTAACT
TGATGTAGGGTCAAGGTTTTTGTGACAACAGGCAGACTCCACACAGAGAG
GATATGATGAGAATATGGCCATCACCTGAAAAGTTTTCTTATCTTCTGTG
CTTTTGGTCCCTGGAAACAAATCCGCCTATGTATGAAGCTAGTTGATTTC
CAGTTGCACTATTTCCAGTTGCCTCTGAAGTTCACAGGCAATACATTGTC
TAGTCCTTTGCGAATTTCTCTGATTTGTGGGCACAGTTATGAAGTTTCCC
CACATGTGAAGACAGGTACAAAATAGCAGAGCCAAGCAGACAGTGGGTCT
ATTCTTCATTAGCTCAGTGACTTGTCCACACTCGTCTTAGCACTTACGTT
TCAAAAGCTTGTCACAAACCCTTGGAGTCATTCCCAGATAATAGAACTGG
AAATGATAAATCCCCTAATGCCAAGGGTCTAGTGTGTTCTTAGTGGTTAT
ACTGGGAAGTGTGTGGAGATTTAGGTGCTGCTCTGCTGCTCTGGATGGCT
GAAGGCTCCTGGGCCATCTTCATGTGCTGCTTGAAGAGCTCCTATTTTGT
ACTCCTGGCTAGAATGCTGTGGAACAAATACAAAGTGAAAAAAGTTCTCT
GTAGATTTCTGAAGTGCATATTCATTGATGCCAAGAAAAAAAAAAAGTTG
CCTTTTTGAAAAAAAAAAAAAAAAAAAAAAAAAAAAAAAAAAAAAAAAAA
AAAAAAAAAAAAAAAAAAAAAAAAAAAAAA

[0120] Trf, or transferrin, is an iron-binding blood plasma glycoprotein that regulates the level of free iron in biological fluids. The Trf mRNA sequence in Mus musculus is provided in GenBank Accession No. NM_{—}133977.2 (GI:118129942), incorporated herein by reference. The Trf amino acid sequence in Mus musculus is provided in GenBank Accession No. AAH92046.1 (GI:62027488), incorporated herein by reference. The Trf mRNA sequence in Homo sapiens is provided in GenBank Accession No. NM_{—}001063.3 (GI:257196241), incorporated herein by reference. The Trf amino acid sequence in Homo sapiens is provided in GenBank Accession No. AAB22049.1 (GI:248648), incorporated herein by reference.

[0121] An exemplary DNA sequence of the Trf gene in Mus musculus strain C57BL/6J chromosome 9, GRCm38.p1 C57BL/6J is provided below.

NC_000075.6 (GI: 372099101: c103230286-103208876):
(SEQ ID NO: 9)
GCCACGGGCAGGCGGCGCAGAAGCGGGTCGGTCTGTACTCCCCGCTCCTCGCCACACACACACCGAGAGG
ATGAGGCTCACCGTGGGTGCCCTGCTGGCCTGCGCTGCCCTGGGTGAGTGTGCGTGCAGGGGATGACTGG
CTGGCTATGTATGCAACCCTTAGGAGCTAAAGCTGGAAGTCCCAGCTTCCAGCCCCTTGCTTCTTCTCTG
TGGTATCTTCATCTTCCATAGCGTAGGAACAACGTGGATCCACATGCATCTGGGGCTCTGATTCAGTCTC
TACCTTTCACTATCCTCATCACGCTGTCTCCCCTATGTCCAGTAATTTGAAGATATGGTATACGCGATGT
TAGAAAACTTTTAACCAGTTTACCCAGGCGCTATCCCGGGGCCTCAGTATAGTCCAAACAGCATGGTGTG
GTAGTCACAACTTCCTGAGATCTAATCCTGCTATCTCTCCTTTGTCTGATGCCTCCTTGGATGCCTTTGG
CGCTGGTGGCTTAGACTAGGGTGTGGGATTTGAAGCCAGAATTCTGGGGTTCAAATCATACCTGTATTTC
TCCTGCGACGGGTCTTGCTTGTTACCGCACATGCCTGGGAGGGTCAGGTGAGGGTGAGGTCACAGGTCCC
AGTCCTGCATCCTGCTGACTCCTCACCAGAGGGGGGGGGGGTCTCAAAGACCCAAATGCCTGCTCCAGTT
GGACTGTAGTTAGCATTTGTCACAGTGTTGGGGCTGTCTAGTTTGAGTGATTTGTCATCCCTAACAACTG
TCAGCCTGAAACAGGCTTCCGTGCTTGTTAGCTCAGGACACCTTGTGTGGCTATGCACAGTGACACCGGA
CCAAGGTCAAAATTTACAAGTTAGACGAACTAGTTTGAAGAGGCTAGAGAGGTCGTCTATCCCTCTGGCC
ACGGTGAACTAAAGGGAAGGAGCTGGGGACGATCAGTCTCCCTGTTGTCCTTCCTCATCCATCCTGAGGT
CCATTGGCCTCACCCACCCCGATCCATGCTTAGTGATTTGTGGGCTTGCTGAGTCAGTAAGTCAGCCCTG
CTGAATTGCCCGAAAGGGAAGGGATGTGACAAGAGCTAGGAGTGCCAGGTCCCACAGACGGCATCTCTCC
ATCGTGTGGATTTCAGTGGTGACCCAGCTGGGGAGATGGTACAACTGGGCAGATGCTTAGCATGCAAACA
CCAGGACCTAAATTCAGAACCCCAGCAACCATGTAAAAAGCTGGGTACCGCAGTGCCCTGGGGAAGCAGA
CACAGGAAGATCCCAGGGAACCCACAGTGCCCTGGGGAAGCAAACACAGGAAGATCCCAGGGACTTTCTG
GCCAGACAATCTAGTGGAACCAGCAAGGCTCAGATTCAGTGAAAGACACTGTCTCCAAAAAAATCAGGCA
GAGAGTAATAGCGGGAGACACCGCACGTTGCCCTTTGTCCCCCACCCCCACCCCCCATGTGTTCCCATCT
GCACATGCACACACCACATGGGAGCCCGATTATATAAGCACATACACACATCGTGATACACGTAATTGTC
TTCAGCTGATTCTCTAAATGGCGGCCCAAAGGGGGTAAAGCATCCAGGGAAGGTTTGGTAGAAACAGAAG
CCTGCTGCATAGAAGGGAGTTCCTAGCCTTTTCTCAACAGAAGACAGCTGAAGAGTATCACAGGTGAACT
CGTGATCAAACTGTCGCTCAGAGAGACGCAAAGCTTCTAAGATCGTTATCTTCCCCTGGGGCCTGGCCAT
CAGACCTAGTGTCTGGGCTGCTAACAAACATGATGACGTAGGACAAACCTGCTTCCTCCCCCAAGGCCAG
CTTTCTCATTTCTAAAAGACGGTATGCCTTTCCTAGAGTTGGTGTCTAGAGCCTTGTCTGAAGGTGGCTG
AGGATGGTGTTTGCCCACTGAAGTTCACATTTTGATGTGGACCTTCAGCCAAGGCAAAAGAAGAGCAGGT
TGTCACCTTCAGCTACCCCAGCATCTCTCTAAGCAGCCCAGGGTTAGGTGGGAACATGGCAGACCGTTGG
GGCGAACGGATTCATCTGTTCCCAGGATCGGAGTGCAGCAGAGCCCTGTGCTCTGTCATGACTGCCACCA
GGGATGAGAGGAGGGTGGAACAGAGGAGAGGTGGCCATTAAGACCCTTCGTAAAGTGGTGCGTTCTCTCC
CCAGGCACGGGGAGCGGGTCCTTTATGCCTCCGCCTTCTCTCCTGCAGGGCTGTGTCTGGCTGTCCCTGA
CAAAACGGTCAAATGGTGCGCAGTGTCAGAGCACGAGAATACCAAGTGCATCAGCTTCCGTGACCACATG
AAGACCGTCCTTCCGCCTGATGGCCCCCGGCTTGCCTGTGTGAAGAAAACCTCCTATCCGGATTGCATCA
AGGCCATTTCTGTAAGTCCTGCTGCCGGGAACGGTAGCCCCTATACGCCTCTGGTTTGACTCACTTGTGG
AAAAAAAAAAATTGAACTGGGGGGTGGGGACTGTCAGGTGTCCAAGTAGACAATTATACCAAGAGTGGCA
GGAAGAGGATCATTCCAAGGCTTGAATTCTCCTGTCCATCCGGGTGTGGCCGCACACGTAGGTGGCCATG
GCATGCTAGCTCCTACTGTTTCAGGGGCCCAGGACTATAGGGAAAAGCAGTAAGCTTTTCAGTGTTAAGA
CTAGCACCTTCTGGGCTAGTGAGATGGGCTTCTGAAGGTCCTGAGTTCAAATCCCAGCAACCACATGGTG
GCTCACAACCATCCGTAATGAGATCTGACACCCTTTTCTGGTGCATCTGAAGACAGCTACAGTGTGCTTA
GATATAATAATAAATAAATCTTTAAAAAAAAAAAAAAACAAAGACAGCACCTTCAGGGTTTTCACCTCCA
TGACAGCACCCACAGAGGAGCTTACAGGGACTCTCAAAACACGAGGGTCTCTGAATGACAAACCCCACTG
TGTGGCCGAGCATGGAAACAGATATAAGAACCCAGCCACCCACAGACCCTGGGTGCTCCACTACAACCAT
GCCAGAGCCTCTGGTATAATAGCAGTGCCCACCTCTGAAGAGGGAGAGACCCTTCCCCCCTACCAAGCCT
GCCAGACCAAGCCTCGACCACTGCCGATGGGTAAATCCGCATTTTGTCCAGGTACTGGGCACATCATCAG
GGAAAAGTGAGGAAAAAAAAGACTCCATTTCTTCCTCTAGATGGAATCAACCCAAACCGGCAGGGCTGGA
TGTGCTTGTGCTTGGGATTTTCTAGCCCGAGACCCATGGAGCGCTGCCAGGTCCTTCCCACTTGTTCTGG
TGTAGGGAAGCCTTCCTTGCAATAAGTCTTTGGGACTCGCTCTCTTCTAGGCAAGTGAAGCCGATGCTAT
GACCTTGGATGGGGGTTGGGTGTACGATGCCGGCCTGACTCCGAACAACCTGAAGCCCGTGGCGGCGGAG
TTTTATGGATCAGTGGAACGTGAGTTCTCCCAGAATACCCAGGAGGGGGACCGTGGTTTAGTAGATGTTA
AATCTCATTCTGTAGGCAGGTAGCCGACATTAGAAACGCTAGGAAGCCTTTTCTTTGGGGAGTCCATGGG
GAATGAGATCTTCTAGCCCTCCGGGCACACATGGAGACATCTTGAGGACTTTGGGCTGGTTGGAGGCTGG
TATGGACCTTCTGAGTCAGGCATCCTCAATGGAGAGCAGGCTGGGGTCCAGCTTGGCCTTCACTGGATCT
GGGGAAGTGTCCAAGCTCCCCAGAGCCTCAGGCGCCATGGACAAGAGAAAACCCACCCCTATAGTGCCCG
GAGGGAGCTTAGCAGTCCAAGAAGCTCTTCTGAGATAGCTCTGGTGGTCCCTGTCACCATATTAGAGGAT
GTAAAATACTTTGAGGGAGACAGAGAATGCCTCTGTTGTGGCTCTCACATGTTCCTGGTGCCTTGGCTTG
GTAAGGAGAATGAGGCGCTCATGACCCATGTGCCGATGCCTCTTGAGCCTTTGTTTTCCCGGATGGACCA
TCTGTCTTTAAGTCTACAGAGGTTTCTCTGGCTTCTTACCACCCAGCTCTGCCTAAGTTACCCCTGGGTC
TCTCTCTCTCCTTCATCAGGACAGAGCACTGACAAGCAGTGCTTCTCTGGGCCATGTCAAAGTCCTCCCT
CCACATTGTCCCCTTTCAGATCCACAGACCTACTACTACGCTGTGGCTGTGGTAAAGAAGGGAACAGACT
TCCAGCTGAACCAGCTCGAAGGCAAGAAGTCCTGCCACACAGGCCTGGGAAGGTCTGCAGGCTGGGTCAT
CCCCATTGGCTTGCTCTTCTGTAAGCTGTCGGAGCCCCGCAGTCCTCTTGAGAAAGGTAAGCCGCCATTT
CTATTCTGAATATCCTGTACTGCTGGGGCCACACAGTCCTGGTTAGTCAGGCAGGTAGGCTGAACTCCAA
GGAAGTGGAGGAAGAGGGAAACAATTAGAAGTGGCAACTTGAACCTTCTTGTTGTTGTGAGCTCCCAACA
CCCCTGCAGAGGCTGACCTGAGGAGGAATGAAAGGGCAGGTGGGTCCACAGTGGATTTCCATATTCACTT
CAGTCCCTCACACACCCTCAACCCCCATCACCCCCACCACCACACACACCTCTGCTCCGTTAAAGGATGC
TTTGGTTCCACCTGCTGGTCATAAGGTTGTCCTGCACCTCTCTAGGCTGTACTACAGCCCCCAGAGGCAC
CCTTTGAAAGATCTGGAGCCTGGCAGTGGTGGCTCACACCTTTAATCCCAGCACTTGGGAGGCAGAGGCA
GGTGGCTTTCTGAGTTCGAGGCCAGCCTGGTCTACGGAGTGAGTTCCTGGACAGCCAGGGCTACACAGAG
AAACCCTGTCTTGAAAAAAACAAAAACAAAAAAAAACCTGGAAACAGAGTGGGCAAAGTCTAGGGCAAGC
CTTGTTTAGCAAGAAGTACTGCTTGTGTCCCCGGGAGGGTAACTGAAGAGCAGGGGTTAACTTATTCCTG
TCTAGAAACCCTGCTTAGTACATGAAAGGCTGGGCAGGGACTGTGCTGGGCAGGGACTGTGCCTCTGCCT
TCCTTCACCAGCCCAGGCTGGGTGATGGCATTATGCTTATTATGCCTTGTCCATTTCTTTGTATCGAGCA
GCTGTGTCCAGTTTCTTCTCGGGCAGTTGTGTCCCCTGTGCAGATCCAGTGGCCTTCCCCAAACTGTGTC
AACTGTGCCCAGGCTGTGGCTGCTCCTCCACTCAACCATTCTTTGGCTACGTAGGCGCATTCAAGTGAGT
GGAATTGACACTCTGTGGTGGCCAGTGCCAAAAGTCCTCAAATGGGGGCTCTTTGCTGAGCCAACCTACC
TAAAAGCATGCAGGTGGCTTAAGGTCCTCCCAGGAAGGCGGGGTTACAACCTGGGGCTCTCAAGGCCAAG
GTAACCTATGTCCCCTTCCATCTGATGTCAAAGTTCAAGCCCTGTTCTGGCAGTCCTCTCTCCTCAGAGC
TTCCGCATCTGGCTGGCGTCTCCTCTCAGTGGGCTGGGTAGCATCTGAAGGGACCTACATACCCCGAGTG
CCTCACAGTAGACCATGCTCAGGATACTAGACGCTGCCCCGCACCACCCCAGCAGTACATGTGGCTTTTT
AAATTATGTTTTTACATATAATATATTTTAATCATATATAAAACTGTCCAGTGGACATAAAATACTCTGA
GGGAGGCAGGGCATGTGAGCCTCTATTATGGCTCCATGAGCCTTGGGTTGGTAAGGACAATGAGGCGCTG
TGCCGGTCCCTCTTGGGCCTTTGTTCTCCTGGAATGATGCTACAGATGGACCATCTGTCTTTAAGTCTAC
AGAGGTTTCTCTGGCTTCTTACCACCCAGCTCTGCCTAAGTTACCCCTGGGTCTCTATCACCATACCAGA
GGACACTGCACCCCCATACCTTCTTACACACACACACCAACACTGAAGATTAAACCAAACCAAAAGTACA
CAGGGGAAAACAAAACAAAACATGAAGTCCTCTGTGTGTGTGTGTGTTGGCCAACTACTCCTGGGCATGA
GACTGGTCCTGAAATATGGTTGATATACTCCCTTAAAAAAACAAAAAACAAAAACAAAACAAAACAAAAC
AAAAACAACTGATTTTCGCCAGGCAGTGGTGGCACACGCCTTTAATCCTAGCACTTGGGAGGCAGAGGCA
GGCAGATTTCTGAGTTCAAGGCCAGCCTGGTCTACAAAGTGAGTTCCAGGACAGCTAGGCTACACAGAGA
AACACTATCTTGAAACAAACAAACAAACAAACAACCCTGATTTTCTGAAGCCAGCATCAATTGCAAGTAG
CCTCTTAGGAATAGGATTTTGTGTCATTTATGCCCAATTTCTTGCTCTCTCTTTTTTGTCTTCTGATACC
CTGAAATCCACATAGCCAGGGTAGAAATACTGTCATCTTCCATACTAAGGATCTGAAGATTTTTACATTA
TTTTCACCTCCTGTCAGCCACTTTGGGGTACGTGAGCACATCCCCCATCCCAGTGGTACTGTGGATGTCA
GCATCCCACCCTAGAGAGCTGTCTCCACTATGAGGGCCACTCAGCCTCAGGCCTTGTCTGAAAGGTGACA
GTGTGATCTGGACCAGGAGCAGGGTCCACCTTCTGGGACTCCTTGTTCATGGGCTTCTTTCCCACAGGTG
TCTGAAAGATGGCGGTGGGGATGTGGCCTTTGTCAAGCACACAACCATATTTGGTGAGTGATGGGGAAAG
ACTCTGGCCGGTTCCTTGTCATCCTTTTCATGGCTAGTGGCCAGACCTGAGCATGCAGGGTCTCTCTCCC
GCTGCTTGAGTCTCTATATATGCAGAGGAAGGTACTTTGGGGGTCTCTACCAAGATTCATGGGTCTCTTT
CCAACACTCAAACCACACAATGGCTCTCCCTCTAGGGAAGAAGTGTCACAGCCAAGGGTTGGAGGTTGGC
CTGGCTGACCTTGCCTGTCAGTAGTCTTGCTGAGCTTGGAGTCAGGGGATGGGGGCAACCATTGCTTCAC
TGGCCTACAGAAGCCTCTGTGTCTTTAACTGGTCATAGGCTCACCTTCCTGCATATTCCTTGACCCTCAG
AGATCCCTCTAGACCTTTCAGTTCATGCTTTCAATGCTAACAGGACTTCAAAAATGGGGAGGGGTTCAGC
CTGCCACAGGCTCACTGAACTTTCCCTCCTTAGAGGTCTTGCCGGAGAAGGCTGACAGGGACCAATATGA
ACTGCTCTGCCTTGACAATACCCGCAAGCCAGTGGATCAGTATGAGGATTGCTACCTGGCTCGGATCCCT
TCTCATGCTGTTGTGGCTCGAAAAAACAATGGCAAGGAAGACTTGATCTGGGAGATTCTCAAAGTGGCAC
AGGTATTTTACCGCCATCCTCTGTCCTGCTTACCGCTCTGTGCAGAGATCTCTTTGACATCTGGACACAC
TAAGACAGCCGGGTCACCAACCTCTCCAGCATCCTCATAGAGTAGCCAGTGTCTCCTCTGGTATCAACAT
CCACCACCTTTTTGACCAATGATACCCTTTCCATCTGAATTAGGCCCTCAAGGCCCAGAGAGAATCCCAG
AAGGAAAGAGAATCTCCGTCACACTCGCTCACGCGCGCGTGCACGCACACACACACACACACACACACAC
ACAGAGGCACACGCGCACACACCCAGACTGCAGAGGAACTGACTTCCCCTGCCTCTTGGCTGAGGTCGGT
TAACACAGTTTCCTCTGGTCAAGCCTACTCATGCCAGCCTCTGCACTAGATTCACTTGTTCTCAGCTAGT
TCTCACTTAACTACTCAGGCAGACAGGGAGAGGGAATGTGGGATGGTCCTTACAGGATCCCGGACAAAGA
GGCGCTGGGTGATGGAGAACATGCCCGAATAACTTCTCTCCTGGTACCTCCAAGTTTCCCACACTTTTAA
GATCAGTTTCCTGAAGTTTCTCTTGTTCTCTTCAGTTCTTGTTCTTCTTTTTAACCTCCCTAATTCCCTG
TTCACTCCACTGTTTTTATAGTTTTTTTGTTTTGTTTTGTTTTGTTTTTGTTGTTGTTGTTTTTCCTTCT
GGAAACAGGAACACTTTGGCAAAGGCAAATCAAAAGACTTCCAACTGTTCAGCTCTCCTCTTGGGAAAGA
CCTGCTGTTTAAAGATTCTGCCTTTGGGCTGTTAAGGGTCCCCCCAAGGATGGACTACAGGCTGTACCTT
GGCCATAACTATGTCACTGCCATTCGGAATCAGCAGGAAGGCGTGTGTAAGTATTCAGGGAAAACTAGGT
GACCCCAGGAATGTGGGGAACCTGGTAAGGTCAAGAAGCAGCCATGGTCTTTCTGGGGACTGACAGCTTC
TCCTGCTGTTCTCATTTCCATCCTGTTTGTGAGCCTAGGGCTAGACTGATGCTGGCTGGCATCAACCATG
AGAGGACCCAGAGGTCACCAAGTGCTTTAAAGGCTGGTCACATTTAAAATGACCTGGGTTCATACTAGTA
TCATTCCTCTGCAAAAATTAGGGTAGCCCCCTGCCCTTTATGAAGCCAATTAGACTATTAGAAAGTAAAT
AACTCCATGTTTCTGCAGACTGTATATCTCTTGCCAATATTGTGGTCAACATGGGCGTAATGAAAGCTGG
AGATGCAGGGAGTTTGATCTGGCCCTGGGTTTCACTGGAGGACTGGGGGTTTGCCTAATAATTTATTCAC
TCAGTAGGTATGTATTAGACAACCAGCCACAGACTCGGCTGGGTGCCTAACTTATAAACACATACTAGAC
TCTGCTGTTTGGGGAAGGAATTTCAGGTCAGGGAGAGGACAAATGTTTGAGAGATAGTCACACTACTGAA
CAGATAAATACAAAATGAAAGAATGAAAAACAGCAACAAAAAAAAAATCAAAGTCCTACAGTAGTGAAAA
CCAAAGTCAAACCTCTGAGGGTACTTGTACTAACATGTACAAACATACATACACACACACACACACACAT
TCATGCACTTACGCATGCATGCACGCACATACGCACACACGCACCCCACGTGATTAAAATTAAAGAAAAC
TAAATCTTACCTCGGAAGAAAAGCTGAACTTAAATGAAATCAACTACAGTTGGGCTGTGTCCCATCTGCT
TCCCTAGACGATTAGGAGTTCCTTGGTGGGATCTGTTTATTTAGCTCATCATTTCCATAAAGCACTTAGC
AGCATTGACATCTACCAGACAGCTGCTGCAGCCTTTCTTACCTGAGCCCCGGCTCTTCTTCTGGTACCAC
AGGCCCGGAGGGCTCGATCGACAACTCGCCAGTGAAGTGGTGTGCACTGAGTCACCTGGAGAGAACCAAG
TGTGACGAGTGGAGCATCATCAGTGAGGGAAAGATAGAGTGTGAGTCAGCAGAGACCACTGAGGACTGCA
TTGAAAAGATTGTGGTACGTGTCTCCTGCCTCTCAGGGTGGGTCCCCAACACTATGGCCTGCTGGCCCGC
TGAGTTAGCAAGTGTAACTCTTGCATGGAAATCCCCTTTCCAGACTCCTTGCTCTCATGGTTTGAGTTCA
GCTCTGAAGGATGCCCTTTACATTAGCGCAGTAGAAGGGTAAACTGAGCCATCTCCTGTCAAAGGACACT
GGACCATGACAAGAGTGCCTTTTGGGCTCAGGATGTGCCCTGGGGAGTGTGGAAAGGGCTCCGTTTTGAT
TTCGCAAGCAAGTACATGTTCACTTCATTGATCGAGATAGCATTTTTAAATTGCCTGTAGAGAATTTTCT
AAATCCTGAGCCCGAGAACGAAGAAAAACAGCACCCCTTGTCATCACCGTGACTCAGAGAAAACCCTCTT
CTTGAGAGTGTGCTGTGTGGGTTGCTTAGCACACCCCACCTTAGCACCTCATCGTGTCTTGTGAGCCTTT
CTTGTGTCTTTCGAACCCTGGCGTTTCTGCCTCAGAGAATACACTGAGGTTCTGCAGGGTGGCAGCCTTG
GAGAGGGCAAGGAAGCTCCAAGCTCTCACACCCCTGCCTCTGTTCTGTGCTCTATGGAGCCTCTCCAGTT
GCCTATTCTTTGAGTTGACTCTTTTGTGCTTTCTAAGATATCTATCAGAAAGCAAAACTGACTGCGAACC
CCATTCTTCTATCTACATTTTCAGATACTACATTCTTTTAGCTACAGACCATTTTCTTGTTTTGTCTGAG
TCAAGGCAAGAAAAATCAAACCAACTTCATACAAAGCTTGCTAACACAGAACCAGAGTTTATATAAAAAT
ACACTAACATCTGGGCGTGCCTGACTGATCATCAGGGGTCCGGTACCAACATCTACTGTTGCCCTTGGCT
TTATAACTTGGGCTGAGAGGGGCCTTCAAGAGGCCAGTCTAAAAGGGCAGGTGGCACAGGAAATAGCAAC
TCTTCATTTGCTGTGTCTTCCTGTGTCTTTGCAGAACGGAGAAGCGGACGCCATGACTTTGGATGGAGGA
CATGCCTACATTGCAGGCCAGTGTGGTCTAGTGCCTGTCATGGCAGAGTACTACGGTGAGTGAGGACAGT
GCCTCTGTGTTCTTTCTGAGCCATGGTAGAAGGAGAATCACAGCCCAATTTATCCCACAGCCACCATAAA
ATGCTCCTTGCATGAGCTTTTTCTCAGTCTCTGAGACGCCCTCACCTAGAATCTCCACAGTCATCTTAAA
GGATGAGAGTGGTGGGATCCTCAGTCCCTGAGATGAGATTTCTGGTATAAAAAGGATCCAATTACAGAGG
ACATATAGGAAGTCTGGAAAGTCTTGCGATATCCAGAAGGCTCACTTTTCCTGCTACCTTGTAGCAGGAC
AAATAAGTTCAGTCAACATCCCACTGTGGGCTTGGTACACAGTGAGCAAGACACTTGAAATGCAGTTTGT
GAATGAGTCCCAGAGGTCAACAGCCAGGTGAACTCTCAACATCTGGAGAGTCTTGACATTATTGTAAATC
AGAGGTGTGTGTGGTCTTATCCATGCCTCTTAGTTTTAGTTGCCTCATGAGAAAGGTGTGGGTTTTCTAT
CCTATACATAAATGTTTAATGGTTTCTTGATTCTCTTTCAGAGAGCTCTAATTGTGCCATCCCATCACAA
CAAGGTGAGTTGAAACGGGTAATCTCGGGCACAGGAAGGTAAATTCTCATTGTTGGGAGAAGTGGTTAGG
CAAATTTATAAGTCAATGGAGAAAGCCAATTTTAGAAGGCAAAGTGAGATGAAAGAATAGTAATTGATCA
GGAGTGTGTGTGTGTGTGTGTGTGTGTGTGTGTGGTGACTCAGATACAGGGTTACTCATCTCCTGTTAAT
ATGTAGGTATTGTCTCTATAAGGATGCATGAGGGAACCCAAGGGTTGAGAATTTATGAATGGTCTCCAAA
CAAATCTTTGAACAAAGCAGTAACTAGAACATCTGTTGACAAAGCTAGGATTTCTTGCCCCTGTCAACTG
ATCCTGGGGACAATCTAGGTTCTTCCCATTGCTTCCTACCATTTTGAATCCTATGAAGTCTTCAGAGTTT
TAGATGAGAGTTAGCACAGACCTTGTCTATGTAGTCCTTGCAGGACTGAATGGAGCACTTCAAAATGCTG
ATGTCTAAGTGCATGGAATTCCATCCAGGCTGGGCCCAGGAAACCAGACTAGCCCATCTCTTACTAAGGC
TTTGATTAGGAGTGGATCTGAAAAGATGGCACCAGAGCAAACAGGAATTCAAATGCCAAAGTGACCCTGA
GTCCTAGTGTTCAGTCTCCTTAGGTTGTATTCCACAGAACTATGAGTGTACAATTCTGTAGTCTTGTCCC
TGCAGCTAAACTTAACCTCCCAGTTTTTAGCATATCTAGAAGGAGCCATTATTATTCCACAGATTGTTTT
CAATTGGAGAAAGTATATTGAATTAATTAAAACAGAAAACAGAATCACAGGTGTTCCAGCCCCAACTGAG
GTCACATTTGTGCTATAGAAAATTACAACCAATGTGTTGTTGGTATTTCCTTTTTTATGTTTATCCTGGT
ATAAAATCATATTCTTATTATCAGAGGGAATCTGGCCTGATTAACCCCAATACATGTTCATATACAAAAT
GCCAGAGTTCCATTAACTTTTCTGTACCCATGTCTTTGATTTAATAATTTGGAAAGTGAGTTACTGGCTT
TTAACTTCAATAACCTTATGCATACAGGTAAGGGCTGTATGTTAGCCTTCTTCCTAATGATTATATGTTA
ATATTTGCTATTTTATGTGTATACATGTATATGTGGGCACATGTGCACACTTGTGATGGGGCATGTAGAG
GTCAGAAGTCAACGTCAAGTGGAATTTCTCAGAAGTCATCCACTTTGTTTTATGAGATGGGATCTTTGTT
GGTCTGGAGTAAGTTAAGCTGGCTTACTAGTAAGGCCCAGGAATTTGTCTGTACCCATCTTCCTAGTAAT
GAGATTATAAGCACATGCCACCATGCCTGGCTTTTATCTTACATCAGTTCTGGGGACCGAACTGCTTACA
TGGCAAGAACTTTACCAACCAAGTCATTTCCTGAGCCCATTATTTTATTTTTAAATCAATACATCAAAGC
ATTTTTAATATGGACATAATCACGGGGCACCATGTGATCTTAGTACTTTGCTTTTAAGATTCTTCCTGCA
AGACTGTCCTGTTCTTCACCGGAGTTAGATGTTGTGGAATTCCTTTCACGACACAATGCTATTTAGGACA
TCCTCGCTGTCCTAGGGAGACAGTGGCTTCTGTTGGAAGCAGATACTTTGGGAGGCCCCAGCGATATTAA
TTGTTCTTTTCAGGTATCTTTCCTAAAGGGTATTATGCCGTGGCTGTGGTGAAGGCATCGGACACTAGCA
TCACCTGGAACAACCTGAAAGGCAAGAAGTCCTGCCACACTGGGGTAGACAGAACCGCTGGTTGGAACAT
CCCTATGGGCATGCTGTACAACAGGATCAACCACTGCAAATTCGGTGAGCAGAGCTGGGAAGGCAGCTTG
GGAGGAGCCGTGCAGAAAAACAGGGTCCTGAGGGAGGCGGTGGGCTCAGGGTTCATAAAAGTGAGTTTCA
CAAAAATGAACCTCAAGGAAATAGCAAAAAAAGCTAGGAGGGGTGCGGAGCTGAGCCATGGAGTCAGGAT
GATTGTCTCAGTGGCAAATGATGGCGTCAGTAGATATACATTTAGTTGCCTCTCCCATGATGGAGATCAG
AGGTGAGCAGTCCACGGCTGATAAGGTCTTGAGAGCTTCTCCTTCTTTCCGGTCCACGATTTCCATCATA
GTACTTCCATGTTCAAAGCAACCTTGCCTGGGCAGTCACAATTCAGGCAAGGAGAACAAGTGGAAATTTA
CACCCACTATGGTCAGTGCTTGAAAAGAGCCTTCTGGACTTGAAAGCAATTATTTGCATATAACTTGCCA
TTGTGCAGAACTTAGGTGTCCTGTCAGACACCTACCTACATGTACCTACTATAAACCAAATTAGATTTTT
GTTACGGAGGAACAAAGGGAAACAGACATTGGGTGGATATCAAGCAATCTCTGCCATCAGGGTTCTGTGA
TATGACTATGTGGGCTGCCGTTTCCTGGGTCCCTTAAGGTGTTGGTCATCTCACCGAGTCCCTGCTCAGC
CCTGAGGATTCTTCAGTTGACTATGTCCTCTACCTGAGGCTGTTTCTATCTCCTTATGTTTCTGAGTAGA
AGATCCCAACAGAAAATTTTGGCCATGGCTTTGCTTCATATTGGCTTCCTCAGATCTTCTTTCCTGATGC
CTCTAAATTTGGGCAACTCCTTAAAAATGATAGAACTGTAAACATGACTATGAACTCTGCGACCTTAGAA
TATGCAGGGAGGGGAGATGGGGACACATTTCTGCACAGAGATGCTCTGCTGTCTCAGAAACAAAGGACAC
CTGGGGTGACAGGCAGAAAGCACAGGCTCCTGAACTTGCTTCCCTGAGCCTCCTTATATTTTCACATCCA
TAGAAGCAGCTGATGGGCAGAGGCTGTCTCCTATCCCTCTCTTGATTTCTGAGGTGTAGTGTAGCTCTTC
TAATGAATGGCAGGGAAGGGGAAACTCACAAAGAAAGAAAGAATGGTACAACCTTAGAAATTCCATTTCT
TCATTCTACAGGCTAGAGATGGTACCATCACAGTCCTCCAGGGGTCTCCTTTACCCTGAAGTGGAATGCT
CACAAAATCCTTTCCCAACCTTGAGAAGTTTCCTCCAAAGACCTATAGTCTGGGTGGTTCTGGGTTGGTG
GGTGGCAGGTTGCAGAGTGAATTATTTCATAGCCTGTCAGGGGTTAGGTAAGCCACTAGAATTAACACAC
ACACACACACACACACACACACACACACACACAAAGCTGACATTTTCTTGTTCTTCTGTCCAGATGAATT
TTTCAGTCAAGGCTGCGCTCCCGGGTATGAGAAGAATTCCACCCTCTGTGACCTGTGTATTGGCCCACTC
AAATGTGCTCCGAACAACAAAGAGGAATATAATGGTTACACAGGGGCTTTCAGGTGAGTTTTCCAACACA
CACACACAGAGTTGGATATCTAAAATCCACATAAAAACCAAGCACGAATATATGTCTTTAACCTCAGCAC
TTGCGAGTGTGGGATGGAGGAGAAACAAGTGGGTCTCTGGAGCTCACTAGCCACCAGCTTAGCCAAACTG
AGGCGCTCCAGGCTCAGGGAGAGACCATGTATGTCTCAAACAGTAAGGTGGGGAATGATAAAGGCAGATG
TCCAATGTTGACTTCTGACCTCTGCACACATGTACACATGTGCACATGCACACATACTCACATGAACGTG
CATATACGCCTTCCTCTCGCACCCACAAAGAATAAAGAAAAAAAAAAGCATGGTGTGTGGAGCTGAGCTT
GTGGGACTGACTGCACAGCAACTTGGGGCCTTTTGCTTTCCTTATTCTGCATGTTGTTGAGTGATAGAAC
GAGTGGCCCTAACACTTGATGACATCAGGTGACCAACCTGAATCCCCAAGGTGCCTCTGAATGACAGGTG
CCAGTCTGACCTCCTGTCTTCTCTCTTCTCCAAATCTGGACCTGTTCAGGTGTCTCGTTGAGAAAGGAGA
TGTAGCCTTTGTGAAACACCAGACTGTCCTGGATAACACCGAAGGTATGTGTGCGCTCTCTTCTGTTGGT
TCCCTCCAGAATCTGGGTCACTGGGATTTGCTGAGACTCAGGGATGGCTCCATAGGAGCTGTGCAGAAAC
CGTCAGGCTCGAGAGTTCTAATTCTCAACTTGTATGTTCAATGGAGAGAGAAGCAATTGCTCTGCAGTGA
TCCCTATGGCAAGGGTCCCTGCAAGGCTGGGGCAGGGTGAATATGCGTGGGAAGCTGCTTGCACTGCCGT
GTGCAAAGGAGGATGGGATACAGCACAGGGAGCCAGTGTATAGCATCTCCCAGTGCCATGTCTGGAAATG
TTGGACATGAAACTAATGTTAACAGTAACAGATGGCAAACCATAGATTAAAGTAAGAATCCATGATGCAA
CCCAGACTAGATAAACGATGAAGAGATAGCTCTTGCGGGCCATGGAATGCTAGCTAAGGAATGAGGTGGG
ATGGCAAGGTTGGGAAGATGGGCTTGAGTATCAGGAAGGATGAGCACGCCAGGCCTTGTATGTCACCAAG
GGCTCCTGAGGAACTGCCGTTCCGGCCATTAACCACTGCCCTGTCAGCTCTCAGGTCTGTTCTCTTCACT
GCCTTGGGCAACTGATGTAGGATGGACTGTCTCTCGGCACCAGCTCTTCTGAGACGCCTTCCCAGGCGGC
ACACCCACTCTGCTGAGAATCTTCTGTCTATGTGGCTACAAAGTATCTGTGTGCACTTTGGCTGTGGGCA
ATCACTGGGCTCTTTCTCTTCCTCTTTATCCTCCCAGCACCTGAGACTGCACTCAGAAGACACTAAGAAT
TTATTTAACGAACTGATTTGATTGTGTTCTCTCTCTCTCTCTCTCTCTCTCTCTCTCTCTTACACACACA
CACACACATTTTCTCTCTCCCCTTCCCACCTCTCTCTCCCTTCCTCTTTCCCCTTTCCCTCCCTCTCTCT
TTCTCTCCCCTCTGCTTATCTCTTTCTCTCTCCCTACCTCTCTCTCCCTCCTCCTCTCCTTCTCCTTTCC
TCTCTCTATCCCTTCCTCCCTCTCTCCCCTCTTCCTACCTTGTTCTCTCTCTTCCTCCCTCTCCCCTCTC
TCTCAGTCCCCCCTTTCTCTCTCCCTTCTCTCCCTCCCTTGTTCCCCACATGATTTTTAAACTTTCTTTA
AAGGCTTTCTTTCATGCCACCCAAGTGTCATCCTGGTCTTGGTTCTTTGTCACCTTTGATTTCTTCTGTG
CTTTTCTGAGTAAGTCTTTGATTTCTAGGCCTTGACTCTCCACTCTTCATAAAGGCTCCAACACCTGTAA
CCTCCTGGTTACAGTTGCTGTAGGAGACCTGACCTTCCATCTCCTCAGCTCCTCAGACTGACAAGCTGCT
ATTTTTATGCACAGGATGCTGGCACGACAAGCTCAGTTGGCACAAATGCAAGCCCTTCCTAGTTCTCTTT
CCATAGCTTCTGTCTCTAGAGAACCTTGTTATAATCCTCTGCCAGTCCCTCCCATTGTCCCTCCATCAGC
CCACCTTAGTACTTGGAAATTAACCCAAGGCCTGGATCATGCTTAATCAAGTCTTTACCACGTAGGGTGG
TGGAAGCAATTTGATTATATTAAAATTAAGCTGAATTAACTGTTCTACATCTACATAAGCACATTCATAT
TCAATAGACACTCATCATTACCGTAGTGGCAAAAAAAAAAAAAGTATAATTACTCCAAATATCTATTAAT
GGAGGAATGGTTTAAAAACACTGTGTTATTGTCACACTATAGAATAAGATCCAATGATTTTAAAGAATTA
CCTTGATTTGCATAATGGTGCAGAAGAAACTGTGACGCATATAAGTAGCTGAGAGCTACAGAAGTTCATA
TGTGTTAAGATCTACTGCTAAGAAAAAAAATGTAGGCTTGTAACATCACACAGACTTGTATATAGGTAAA
TGAGGACAAGGCGCATGCGTGGAAGCACAACTTGTGATTTCCAGGCTTGGTGCCAGAGAAAACATTGGGA
GTAAAGGAACGCAGAAGTGAGGGTGTTTAGTTTGTGAGGGAATAATTTTAAAATATGATAACGCTGGTCT
CACACAGTATTTGTTCAATTACGGGAAAAGCTGAGCGGACAGTGAATGAATCGAGAGAGGTCACGATCCC
GCTTTATGAGCGAGAAATGAAAACTGGCAATAAAAAATGCCCGGAGGAACCGCGGAAAACCTCCGAAAGG
GCGGAGGTCTTTAAATCGACTGTTCGGTTGGTTAACTGTTGCAAAGAGAATGCAGAAAAGATTAAGTAAG
CAGCTGAGATAGGACATTAGCTCCTGGGACTAGCATGAAGTCAAACTGAAAATATCGATGAGTATCGATA
TGAGAGCGTCTTCCGGGCGGGTCTTCCGTTTGGAGAGCTGAGAGGGCAGCACAGAGGCGGGGAAACTGCC
TTAGAGCACCACCTTCTCCCCGCTCCTTGATGGAGCTAGAAGTACAGAAGGTCTCGGGATTTTGTCTGAG
ACAGGCTTCACTCTGTATCTCCCGTTAACCTAGAATTCACTGTGTAGACCAGCTGGCCCCACATTCACAG
AGATCCATTTGTTTCTGCCTTCCAAGTGCTAAGATTAAAGGCATGCATTAGCACACCTGGCTTGCTTGCT
TGCTTGCTTGCTTTATTTATTTATTTATTTATTTAAATAAATGCATTGTTGTTGTTTAGCATTGGAATTT
AATAGAAGTTTTTTTTCTTTTTCTTTAAAAAAAAACCACCCATAGAACATGGCTTTTTTTTTTTCTTTCT
TTGTTTTCTTTTCTTTTCTTTTTGTTTTGTTTTGTTATTGTTGCTGTTGTTGTTGTTTTCAAGACAGGGT
TTCTCTGTGTAGCCCTGGCTGTCCTGGAACTCACTCTGTAGACCAGGCTGGCCCCTCGAACTCAGAAATC
CACCTGCCTCTGCCTCCCAAGTCCTGGTATTAGAGGCGAGCACCACCACTGCCTGGCTTGTGGCTCTTTT
TTCATTTGGCTGAGAGGGCAGGTCAGAGGAGAGTGGTCACTAAAAAGCTCTTGTGAATCGAGTGCTACCT
GTAATGAACACGACCATCCTCTCCTCCTAACACCACCATAACCTTAAACATGGGCTTGTGCTGGACAGAA
GGCACACGCCTTCCATACACCTGTGGGTCAGTGACATCCCAGTGACTACAACGGTTCCACCTGGCGGATC
CACCCCTTTTCTCTACCCAGGAAAGAACCCTGCCGAATGGGCTAAGAATCTGAAGCAGGAAGACTTCGAG
TTGCTCTGCCCTGATGGCACCAGGAAGCCTGTGAAAGATTTTGCCAGCTGCCACCTGGCCCAAGCTCCAA
ACCATGTTGTGGTCTCACGAAAAGAGAAGGCAGCCCGGGTTAAGGCTGTACTGACTAGCCAGGAGGTATG
AACTACCCAGGGTCTGCTACCGTTTATTCCTAGCAGGGGCAGGCTATTCGGAGTTAAACGGAGCTCCGGA
GTGAGCATTTCCTTTCTAAAAACTAGAATTTGGACTCTACAGACCGTGGATCAGAATATCTGAGTTCAAA
TCTCAGCTCGGCAGCTTTCGGTCCACGCCATCTTAGGCACATGGCTTAAAATGTCCACGTTCGGTTTCTT
CACGTATTAAATGGAAATAATACCACATACACACATGTTTCTAAGTTAACAAAAAAATAAATAAATAAAG
TGGTGCATGCACACGTCTTAGGGAATGTGTGTTTACAGGGAGGGCACACAGTGTGCTAGCTGGGACTGGA
TTCCTCAGACCTGGCTCTGCTCCTGTGGAACTCCTAGTCAGGACAGACAAATTCCCACTTGACCCATAAC
CCCTCCGAGCCTAGAATCTGCCTTCCAGCTCATCTGGATCTTGACTCGGGACTTTATTTTCCTCGAGAAT
GTTTTTCTGAAAACAATTTCTAATGTTCCTTCGTATGAGTCTTAAGGACCGGAATTGACTACTCCTTCTC
TTGCTTGTATCAGTTGCACCATATTCTTAACAGTCTGGAAAATACAAGACTCTTACTCTCAGAAAAATCC
TGTCAGGGCCAGCCTTGGGGGGCAGCGAGTACAGGGGCCACTGGAACACTTTATCCCTAGGGCCACTCTA
CACACACACACACACACACACACACACAAATTACCCTTCCTTCTGGTATAGCTGCCTGCCTTTTAATTTG
TCATTAGTTTTAAAAGAAATAGGCTAGCATACTTTGAAAAGTTCCTTCCAAAGCCTATGATAATCTTCAG
TGGTGTTTCTAGTTTGACATTAGATTTGAGTCAAGCAGTCTTACAATCACTAACAGTTTCATAGCAGCAT
TACCAAATATTTAAAGAAACTCAATGTGAAATGTTTAACCTTTCTACAGCGTTTTATACCTCTGTTTCTT
GTGTCGATTTTTAAAAAAATGCCATGTCAATTATAAATATCTTCTGTAGCTTTCTGTTGTTCCCAGGGCT
GGCTTGGACCTTTCAGTTTCCTGCAGGTGTTTCCAGTCCGAGACATAGGTTCACGTCTATTTTCTGCTCA
TTTGACAGACTTTATTTGGGGGAAGTGACTGCACCGGCAATTTCTGTTTGTTCAAGTCCACCACCAAGGA
CCTTCTGTTCAGGGATGACACCAAATGTTTCGTTAAACTTCCAGAGGGTACCACACCTGAAAAATACTTA
GGAGCGGAGTACATGCAATCTGTCGGTAACATGAGGAAGTGCTCAACCTCACGTAAGTAGAATGAACCCT
GTGGAGAGGTCGCAGAGAAACCCAGCGATGGGTGCTGGAATGGTAGTTACAAGAACTCAAACCCTTAGGA
AACAGCCACGTGAGCAAGGCAAAACCTAGCATATACAACCACGTGGGTTATATGCACATATTGTTAAGGG
GTCGCAGACCCAGGATACTAAGGCAGTGGACGAATTATATGCACACAATTCCTAAGAAGATAAAAAGGGG
CACTGAACTTATTAGAGGTCCCTGTCCAATATGGCAATGGCTAGCAAGGTGTGACAGAGCAAGTTCAGGT
GACAGCTGGATTAAATCTAGATATCATATCCTCACTCCACCCAGCTACAATTTTAATTGAAAGTAGCCAT
AGCAAGAAGAATTATCACAGAGCATCCTTTTAGACAGCTCTGTTCATAGAACATCCTTTTAGACAGCTCT
GTTCTAGGGAACTTCAATAATGATAAGTTCTGGCTAGCTAGGAAGTTGCTAAGCAGCATCTGCAATGCCA
TATTCCAGGAATTGAAATAGGATAAAATATATTTTACCATCTGTTTGGGGATTAGCGGGGACACCTGAAA
ACATTTGTAAAGTGCGAGGGGGTGCATGGGATATACAGTGGTGAGTCTCCCACTGGAGTTTGGAGGTGAG
TCTTGGCCTTCATTTAAGTTATTGTGCTGGAGATACAGCCTCGGAGACTGTGCTGCTCTGGGGTGATGGC
CCTTTCAAGGTTGCCCCATGTGGATTGGTAAGATGGCTCAGTGGGGAAAAGAGCCCGTGGCACAAGCTAG
ATGACCTGAGTTTAATCCCTAGATCTGACGGTCGGAGACAATATACTATACTATACTACACTGTGCTGCA
CTGTGCCAAGCTATGCTATATATGTGTTTTACAAGTTGCCACATGGAATTCTAGTGTGAGCAATGTGATT
GTTGAGGTTTAGTGTGACAGAATCCAAGTTAATATTTCCCTTACCTGTATGCTCCAGAGAACACCAGTCT
AGCTTTGTTTTTCTCCACTCCATCCTTAGACCCAGCTCAGACGTTGCTGGGGACTGCCAGCTACCATCTG
CCTCGCATTCTCAGGGAAGAAGGGCCTTCCTAGGCGGCTTCTCCTTATGTGAATTCAAGTTCAGAGCCTC
ACTGGTTAAAAGCAAAGTTGGGGATGCCTGTAGGGCAGGAAAGTCACATGACAGCTTCTCTATCCTTGTG
TGGAGCCCTCCCCGTGGGAGGCTCAGGAGCTGTGTAGGGAAGCAGGGATGGGAGGGATGGGGCACAGCAT
GCATGAGTCTAGCAGAACAATGAGCCTTGGCACAATTTATGTGATACTGAATTGCCCATTCAGGTTCCTT
TCATTCTGCTAAACAGCTCATAAAAGTAAGAGTATTCTCAATGTCCTATATCTTTCTTCTCTCCCCAGGA
CTCCTGGAAGCCTGCACTTTCCACAAACATTAAAATCCAAGAGGTGGGTTGCCACTGTGGTGGAGACAGA
TGCTCCCTCCCGTGGCCCATGGGCTTCTCTTGGTCTTCATGCCCTGAGGGGTTGGGGCTAACTGGTGTAG
TCTTCGCTGCTGTGCCTTACCACATACACAGAGCACAAAATAAAAACGACTGCTGACTTTA

[0122] 1300017J0RIK is a predicted gene located on chromosome 9 of Mus musculus strain C57BL/6J. An exemplary DNA sequence of the 1300017J0RIK gene in Mus musculus strain C57BL/6J chromosome 9, GRCm38.p1 C57BL/6J is provided below.

NC_000075.6 (GI: 372099101: c103288297-103250530)
(SEQ ID NO: 10)
AGTCAACACTGCCTTCTGGGTAAAGTGCACCTAGGCTGGGGGAGAGCAAGCAGAACGCAGTTCCACAGTT
GAAAATGAGGCTGCTCATCTGCGCCCTTCTATGCTTGGGGACCCTAGGTGAGTGTGCTGAGAGCCAGGCA
GGGGGCCGGCCCTCTGGGGAGGGGACCAGGTGTCATTTGCTGACCATACACTTCAGGGATCAAATGTGGT
TGGATAGACTATGAGCCTAGAGAAGAGTAATCACTTTGGACTGGAATTCACCTGCCACGCAGTCCCCCGG
CTGTCCTTTGCCCTCACTGAGGCGGTCATAGTGGATTGTCGCTGACTCTTTTGCTTGCTTTTGGGACCCT
TTTCCTGCCACATCCTCCTTAATACCAGGGAGGTGCCTAGTCTTTTTGTAACTTGTTATGTCGCGTTTGG
TTGATATCCCTGGGAGGGCTGCCCTTTTCTGAAGGAAAATGGAGACGTAGTTGGTGACAGGGGATGTGAA
GAGGGACTCAGAGGAAGGAGGGGAAATTGCAGCAATATATGAGAGATAGGAGAGGAAAATAAAAAAAACA
AAACAAAACAAATAAACAAACAAAAAAACCCCACAACTTGTTTCACTGCTTTGGTAGGTAAAGGGGCTGA
TGTTGTGATTGACGACATATGACCTCCAGGACCAAATGGTAGAAGAGGAAATCCACTCTTGAAATCTGTC
CTCTGTAGTAATAATAAGTATAGCACATAAAATAAAAATTTAAAAAAACCAAAAAAAAAAAAAAAAAAGA
AAAGAAATCTGTCCTCTGACCCCCATGTGGCTTCCACACAATGTTAACTTTTTTTTAAAAAAAGTTATGT
TTACCCAACAAACACACAGTTGCTGGAGAAATGAGCTAACACAGCCAGAGGCAGGCAGAGTTCTACGCTC
ACAAATACAAGAAGCCCTTTCGTGGGTAGGGAGAACAGGCTCCAGGGAAGAACTCATGCACTGTGAAGAG
CTCTTCCTGTCTCAACCACGGTTGGATCCTCCTCCCTTTAGCTTTGTCTGATCTGAGACCGTGGTAAATA
ATACCTAGGGTGGCCAGAGCCCGGCAATGGTGCACAGTATATGTCTGCCTCTTCTGCCCAGCAGTGCCAT
CTGTAGCCACCCAGAGGGTCATTCGCTCTCAGAATGCAGCTGCCTGATCTCTTTCAGAATTCCCCTGAAC
TGAGCCAGTGTTCTGCTAAATAGCGTTCCGCCACCATTGCCAGCAATGTCAGACACAGACCAGAAGTTCA
TTTTCCCAACAGGCTTCATGTTTACATGTCAGAGACTAAAGGCCCCTCCGGGCTTCGTTTCTTCACGACC
TTTCTCCGGGCTACCAGACCAGGCCGGAGTCTGGAACCTTCATTCCTCAAAACTCAGTGTTCCAGTCCAA
TAAGAATACTTGTGGTGTCAAATGACAAAAAACAAAACAAAACCCCAAACCACCACTACCAACAACAACA
AAAAACCCCAGCCAAAGCAGCTTAAATAGGAAACACGTAACTGAGGGTTACATATCCTAAAAACTTGCAA
AAGTCAAGAGCCAAGCCAACGGTTTCTTCTGGGGTCCAGGAACTTTCTCCATTCAGTGAGTGACTGGAGG
CCACCAGCAGCCTTTCTCTTCCTCCTGAAAAGGTCAGAGCGTGCTCAGACCTCTTCCTGTGTCTGTCAGG
AGGCTAGTGGGGGCATGCTATTGATGACCTTGTTGATGTTATCAGACTCCACCCACCCTTAGCTTGTCTG
TACACGTCCTCTTTTTAAAATATTTCTATTTGCCAAGCCAGGACAGTGGTGACAGAGCTGTGATGCTCAG
GCAGGGAATGAATTCACCAAAGACAGAAGGAAGCAGTAGTAGAGAATTAGCTACACTGTGGCACAACCAG
TAGGCAGTAGAAACAGTTTAAACAGAAACTTTGTAAGAACTGGGGAGGGGTGCATGTGTGCTTGCTTGAG
TGTGTGTGTGTGTGTGTGTGTGTGTGTGTGTGTGTGTGTGTGTGTGTGTGTATGTGTCTGTGTGTGTGTA
TGTGTGTGTTTCTATGTAGGCAGTCCTCCATGTGTACTTGCTTGAGTGTGTGTGTGTGTGTGTCTGTGTG
TCTGTGTATTGTGTGTGTTTCTATGTAGGCAGTCCTCCATGTGTACTTGCTTGAGTGTGTGTGTGTCTGT
GTGTGTCTGTGTGTCTGTGTATTGTGTGTGTTTCTATGTAGGCAGTCCTCCATGTGTACTTGCTTGAGTG
TGTGTGTGTGTCTGTGTGTGTGTCTGTGTGTGTCTGTGTGTCTGTGTATGTGTGTGTTTCTATGTAGGCA
GTCCTCCAGCAATGGCGGCAGTTGAGGCTTATGGTTATCAACAGGTTGACCTTGAGGTTAGGATGATCTT
GCTGTGACTTAGAAATGGCTCAGTAAAACCTACCAGTCCTAACGTGACATCCATCTATCATTTTTAGCTA
GGGCGTGTTATGATGAAGTCTTTGTCATAGAGCAGTAGTCCCGTTCACAGGCAGTAGTGACTTGCTCTGA
GCCCAGCCTGCTTTGAGGCCAAAGCCGCTTTGTTCTGAGACTTGAAGTGGCTCAGCAGTGTTCCCCCAGA
ATATTGACACATTGTTTGCATACGATAAACTACACTCATTTAAAGGATATATACAGTTCGGCTAACGTGA
CCCCCCTCCATAATCGAGATAAAGAACATTTTTAACTTTTTCAAATTGCCCCTCCTCCTTTCTCGGCCAC
CCCCACCTCACCCCTGCAAACACCCTGCCTCCTAGGCTCACACATCTGGAGTGTAAGCACACATCCCTGT
AGGTTTGGCTTCTCTGTGTTTTCCATTTATGTCTTTATTGTGTGCTCTGTCTGTGTGTATGTGCTCTGCA
GGAGAAGACTTTTGGAGTTGGTTTTCTCCTTACATCTTATGGGGTCTGGGGTCAAACTCAGGTCATCAGG
TTGGGCAACAAGCACCCTTACCCTCTGCCATCTCCACGACCTGGACTACTGACTTCTCCTTCTTTTTTTT
CCCTCTTCCTCTTCCCCTTCTTCTTTTCCTCTTCTTCTTCATCTCCTTCTCCTCCTCCTTCCTTTCTCTC
CTCCTTCTCACCACGCCACCCCCGCATTAGATTGTAATTATTAAGCAAGAAGTGGAATTAAATAAGTTAT
TAATTTGGATGCAAGTGTGCAATACTCAAACCAAAGTGAACCTGGAATTTCTGGGGGGAAAAATTGTCAG
TAACACAAGTAGCCACTCCCTCCTTCCCACCAACAATACAGAGGCCTGTTGGAGGAAAGAATTGGGCTTT
GAGTGGGAGAGCAGGTAGGGCTGTTAGTTACACTTGGATTTTAGAATGATTTCTATGGCTCTCAGAATCA
AGAATCCATAATGAGTGCAGGTAAGGGCCACAACCTTGAAGTCTTGAGCAGGGATTCCAGTAGATCTAGC
TGTGCACCGCCATGTGAGGAGTCTGGCTTGGACCCCATTGGAAGCAGGGGAGATCACAGGTAAGGGCAGT
TTCCATACATAGACAATAAACATCAATAAACATCAATAACTCATAGGTATTTGAATGACCCATTCCTTGA
AACCTTCTCAATTGCTGTAGACAGCGGGGATAAAGCCCTCAATGGTGGAGGGGCTGTAATGGTTCCAAGG
GGTCTACTTCACAGAACTGGGAGTTCTCTCTCTCTCCCTCCTTCCCTCCCTCCCTTCCCCTCTCCTTCCC
CACTGCCCTCTCCCCATTTATGTGTGCTACATTCATACATTCAATCACATGTGGGTGTCCTCGTGTGCAC
ACACACTGTACTTGTGTGAGTTTGTGCGAAGGCTGGCAATTGACACTGGGTCCATTTTAGCGGCTGAAAC
CGGGTCTCTCACTGAGCCAGAAGCTCATCAACTCTGCTAGTCTAGCTAAACAAGATCCGGGTCTCTGCCT
CCTGAGTCCAGGCAGCTCCTTATCTACTGAGCCACCTCCACAGTCCCAGCGGCTTCTGTCACTTGGCATA
GTTGTTTGGAGATTTATCCAGGTGGCATATACCACATTCACTCTCTCAATGGCCAAACCCTGTATCACTG
TGCTGAAGGCAACTTTAGTTGGTCACATGTCCCCTGAGGACTTTTGTTTTGTTTTGTTTTGGTTTTTCGA
GACAGGGTTTCTCTGTGTAGCCCTGGCTGCCCTGGGACTCACTTTGTAGAGCAGGCTGGCCTCGAACTCA
GAAACCCGCCTGCCTCTGCCTCCCGAGTGCTGGGATTAAAGGTGTGCGCCACCACACCCGGCTAGTGAGA
GGCTTTTATGAATAACTGCCATGCACAGTAGTGGGCCCATCTTTGAGAGGATACGTGGTTTTGTTTCTTT
TGTATAAATATCTAAAATTATTGGGTCCTATTAGTAACTATATGTTGAGGGTTTTTGTTTGTTTCTTTCA
CTTGCTGTTTTTGAGGTTCATTCAGGACTTAAAGCATGATGGTACCTATCTACTCTCCCTTTAATGCACA
CTTGATGGTTTTTTTTAATGTTTACTTATTTATTTACTTACTTTAATGTGTATGAATGATCTGTCTTCAC
ACACACAAACCCAGAAAAGGGAATCAGATCCCATATAGATGGTTGTGAGCCACCATGTCGTTACTGGGAA
TTGAACTCAGGACTTCTGGAAGAGCAGCTAGCATTTTTTTTTTTTAAAGATTTATTTATTTATTATATGT
AAGTACACTGTAGCTGTCTTCAGACACTCCAGAAGAGGGAGTCAGATCTTGTTACGGATGGTTGTGAGCC
ACCATGTGGTTGCTGGGATTTGAACTCTGGACCATCGGAAGAGCAGTCGGGTGCTCTAACCCACTGAGCC
ATCTCACCAGCCCAGCAGCTAGCATTTTTAACCTTTAGCCCTGAATGTTTTTCTTTTAGTTATTGAAAAA
AAAAAAAAGAAAGTTTTGCTGTGAATATCTGTGTATTTGTTTGAGTTCCTGTTGTCAATTTTTAAATATA
TATTTAGGAGTGAAAATGCTGTGTCATATTGCTAATTCTGTGGTTATCTTTTGGGGGATGTTTGTTTGTT
TGTTTGGGTTTTGGTTTTTCGAGACAGGGTTTCTCTGTATAGCCCTGGCTGTCCTGGAACTCACTCTGTA
GACCAGGATGACCTCGAACTCAGAAATTCGCCTGCCTCTGCCTCCCAAGTGCTGGGATTAAAGGCTTGCG
CCACCACGCCTGACTTGGGGGACTTTAATATATCTGGAGAGAGTCAGAAAAAAAGGGCCCTGAGAATTCC
CTCAAGGAACACAGCTAATTCAGTGTGTGGATGACACACAGTTGGCTCTATTTTTTAGTATTAAGATATT
TTTAATTACACACATAGTGTGTGTGTTTGTGGGGGGGTTGTGCATATAATTGAGGTATCCACAACAGAGG
CCAGAAGATAATGTCCAGTTCCTCAGCACTGGAGTTACAGGAGGTTGTAAGCTGTGACTCAGGGGCTGGG
AACTGAACTTGGGTTCTCCAGAAGAGTTGAATGCAGACTTAACGGTGACACCATCTCTCTGTGCCATCGG
TCCAGGCCACTTAGCTCCTTGTCTTGTGTTTGATTCCTTTCTGCCAGCAGAGGAAGGTAAGTGCTGTGGG
TCCCTGACACCTCTTGTGTCTCTCCCCTAGGGCTGTGCCTGGCTCTTCCTGAGAAGACCATACGATGGTG
CGTTGTGTCAGATCATGAGGCCACTAAGTGTTCTAGTTTCCGTGACAATATGAAGAAAGTCCTTCCTGCA
GGTGGCCCAGCTGTTACCTGTGTAAGGAAAATGTCTCACCCTGAGTGCATCCGGGACATCTCGGTAAGTC
ACTGCTGTGTGAAAGAAAGCTGAAGAAAGGCTGTCCTTTTCCTGTATTTTACAGAGCTGGGGAGAACACA
GCTGTTCAGTGCTCGTCTGTCGGAAAAGTCATCATCTTAATCAAACAACTAATACAGGGTTCAAACTTAG
CAATGTAGCCATGACACAGCAAAACCTAAAACTGCATCAAGAGAATCTATAAAGACTCAAAAGTACTGGG
CTTAGCAGTTTAGAGCCCTGGCTGTTATCCCGGAGGACCAGGGTTCAATTCCCAGAACCCATATGGCAGC
TCAAAACTGTCTGTAACTCCAGTTCCAGAGGATCTGTCACCCTCTTACAGGCAAAACACCAATGCATATG
AAATAAAAATTTTAAAAATTAAAAAAAAAAGACTCAAAATGAAACAAGAAACTTTCTCTATGCAGACCAG
GCTTTTCCAGAACTCAAAGTGTCCCCGTTCCTCTGTCCCAGGCACTGGGACTCAAGGTGTAGACCACCAT
ACCTGGTGGAGTTTTAATATTAAGTACAAAAAGCTGGGGTGTTGTTGTTGTTGCTTTTGTTCTTTTAACA
AGGCTGGTCTTGAACTATATGCCTGCCTTTGCTTCCCGAGTGCAGGGATTAAAGGTGTGTACCACCACTA
CCCAGCTAAACTTGTTTTTTTTTTCTTAACATGAAATTTGCCTTTGTTTAATATGCATACGTGTGTGTGC
ATGTGTATGAGTGTGTATGAGAGACACAGAGACAGAGACAGAGGCAGACAAGTGGGAGAGTAAGCAGAGA
TGGATTTATAGCTATAAATATAAATTATATTTGCTAGTTGTCCTTATGCAGTTGCAGAGCAGGTTAAACT
GTCTAAGACTTGCCTTTTTCATCTGATGCTGGACCCTAAAGGGGAAGGACTCAGGAAGGGAGGATGTGCG
AAGTGGAGAAAAGCCGCCATGAACTGGAGCCTCAGAGAGGGCTGGAGCTCATGTCAAGTCCATTCATGTT
GCTCCAAATCTTCTTCCGTCCTTCTGTCTTTCTTTTATGTACGTATTTATTTTTATTTTATGAGGTCCTG
AATTCAATTCCCAGCAACCACATGGTGGCTCACAATTATCTGTAATGGGGATCCAATGCCCTCTTCTGCT
GTGTCTGAAGACAGTGACAGTGTACCCACATACATGAAATAAATAAATAAATAAATCTTTTAAAAAAATA
ATGGATATTGACAACCTAGGAAAACAAAAAAGAATGAGAGGAAGGAAGTCTGAGCTATGGAAGAGTCTGT
GGCATCAGAGTCCCGGGAAAGACACTAGCAGAGTCTTCGCCAGGGGTGATGAGTCTCATTCATGTCTGGT
CCCTTGTCTTTCAGGCCAATAAAGTAGATGCTGTGACTGTTGACGGAGCTTTGGTGGCTGAAGCTGACCT
GCCTCACCACAGCCTGAAACCTATCATGGCAGAATACTATGGATCAAAAGATGGTGTGTTCTCCCAGTAT
CACTGGTGTGGCGTGATGGCCACCATGGTTGGGGGGGGGGGGCTTTGCCAAGAGTGGCGGTTACTTTTCT
TGTTGCCGTAACAAACTGCCTAACAAAAGAAACTTCAGGAAGGGAAGGTCTATCTTGGCTCACGGTTTTA
AAGGATACAGTCCACCACTGTGGGAAGGGCAATGCCAAGGAGCGCGAGGCAGCTGGTCACATTGCATCTG
TAGTCAGGAAGCAGGGAGAAAGCGAGGGGGACTGATGCTCGGTCCACTCTCTTCTCATTTCTATTCATCC
CAGGAATGGTGCTACCCACATTCAAGGGGTGACTCTTCCCTTCTCAGTGAAACCTCTTTGAAAACCCTTA
ACGACACTCAGAGATGTGTCTCCTACATGGTTGCAAATCTAGCCAAGACAATGGTGTAAAGGAAGCATCA
TGCCAACGTTACGGGTACCAAGTCCCCAGAGCTCTTCCGATTGGCAGTGTTGTTCACTGACCCGCAGGGT
TTGGGACATTTCTCCACAGGAAGCTGTAGCTTTTATGAATCCTGATGGACAGACATATCCTTGGTTCTAT
AGTCTGTGGGACAGTTAACATCCCCAGAGGAACGTTATCTAGAGCCTATCACACACCTCTAGGGTTGTGA
CAATAAGATACCATTTCTGAGGATCCACAAGGCTCTTCTTTTTGTTGCTTCCTGTAGGCCTTATATGGCA
CAGGTGGTATGAAAAGAAGCTCTGGGGGAGTGAATGAGGGGAGATTCACCTCGCGTCCATTATTTCTATC
AGCCTGTGAAAGCACAGCCCGGCTCAGTCTGGTAGTCCACGAACACTCTCCGTCTTTCTTCTCACAACTT
TACTATGTGCCTGAGCTGTAAGCAGAGAACCACAAAAGGAAGAGAAGTCCACATAGAGACAGCAACAGTG
CAATGACTGGGACTAAAGCTTGGGGGTCCCTGGAACCCCCACGAGTCCTGAAATGAAGCATTGGAGGCTT
TGCAGACTTACAATGACTTGCAGAAACTAAATATTATAAGCCCAATGCTTTCAGTACAGCTGGTCTGGCT
AATAGCCTATCCGCAGTGCTGCGGATGAGTGTTTGTTCCCGTGGTGATCCCACGGCTAACTACACACACC
ATGGTTTAACATCTCTGTCCAGCTTCAGAGGAGGGGCACAGCATGCATTCGAAAGACCAAACTGAAAATT
CAAAGGATGCTACTGTCATCTGCATTGACCATAAAGTAAAAGCCTCACAAGTCTAGCTTGTAAGTCAGAG
AGCATCTGTGATATTAATTTATTGCCTTGGAAGGATCAGTTCTCTCTTCCTGCCAGAAAAAGGCATTTTT
TCATTCCCCACCCCACCCCACCCCCCACACTTCTTTCTAGGGAGTGGTGCTGGGCCCAGGGTCCTCTGAT
GGTCCGCATTGAGAATGCCCTGGAAGGTTGGTTGTAATGACACACTTCATTTTTGCCTTCTCTTTCTCTC
TGCTCCACTACAGATCCAAAAACCCATTATTATGTTGTGGCCATGGCAAAGAAGGGAACAGGCTTCCAAC
TGAACCAGCTCCGGGGCAAGAAGTCCTGCCATACTGGCCTGGGCTGGTCTGCTGGGTGGTACGTTCCCCT
CAGCACCCTGCTTCCTTCTGGCTCTCGGGAAACAGGTGAGACACCTGGGGCTGGGTGCCCTTAAGTGGGG
CTCCTGCACTGGATGGTCTAAATGGGTTATGTTGGGGTTCCACAATGGGTCAGTCATTTGTCTTGCTGCT
GTGAAACATACCCGACAAAAGCACCTTCAGGAAGGAAGGGCCCGAAGTCTGAGGGAACAGTCCATCTCAG
TGGGGAACTCATGATAGCAGGAGCGCTCTCTCTCTCTCTCTCTCTCTCTCTCTCTCTCTCTCTCTCTCTC
TCTCTCTCTCTCTCATTTAACCCAGGACCCAATTCCATCAGTGGGGACACACCCATGTTCAGGGTAGCTC
TTCCCTCATTAGTTAAACTTTTCTGGAAACATCTTCATAGACACACACCCAGATATGTGTTTCCATGGTG
ATTCCAAATCCAGTTGATAATGCATGTTAACCATCGCTCACTCCCTGACGAACATGTCATGCTTTATGTT
CTCCAAGATGGAGTAAGAGTATGCACTAGCATCACATAGCTGGCAGAGTCATCTCTCAATAGAGGTGCTT
CTCTTTTGCTGGGCCGTCAGTCTCTTCTTCCCTGGGAATTGCAGCAGTTTGTCTTGGCAAGGGTAGCCTT
GAAAGTCCCCAAGGAAGGTCATCTCCCTCCAAGCCTCCCAGGAAGGGTCTCTGGGGACTCCCAGAAACTT
CACCAGCCCCTCGGGTTTCCAAGTATTCATTCGAGGGCTTGGGGCATGGGCAAGGACAGTGGGACTGGTC
GATGCTAGGACATCTCTGGATACCCCAGGCTTCTCGAGCATTTAGAATGAGCCACAGTGAGCCCAGACCT
GTTCAACCCTTGAAGATGATTACCAGATCCTACACTCTGCAAAAGTGGTACCCTTTCTGAGCTGACAATG
TAGTATTCATGGATATTCTGGGGGTTTTTGTTTGTTTGTTTGTTTTAAAGATTTGTGTATTTTTATGTCT
ATGAGTACACTGTATCTGCATGTACATGTGCATGCCAGAAGAGGTCATCAGATCCTATTACAGATGGTTG
TGAGCCTCCATGTGGTTGCTGGGAACTGAACGCAGGACCTCTGGGAGAGCAGGCAGTGAGTGCCCTTAAC
CACTGAGCCACCTCTCTAGCCCCCAGTACTCGTGTTTTAACAGAGAGGGACAGGTGACTCTGTGGGTCTG
CTGGAGTCTGGTGAAGTGGAACAGCCTTGCCTTGGTGGCAGATACCCGTGGACGTCTCCCTGGGCAGCTA
GGCTACTGGCTTGCTCCTCTCCTGACTCACCAGCAGCATCTACCAAATACCCCCATGCCCCACCACCAAA
GGGATCCCATGAGGCATCATAGTCTCTGTGCACAGAAGGGATGAAGTGGGTGAGCTTCATGCAGGGAGAC
AAGGCTACTGGGTGGTGGACGATCTGCACAGGGTCTTCAGTGTTCTGTCTGGCCCTGTAAGGGGTTGGTG
AATTAACAGGGTCACGTCTTGTCTTCACGTGGGTCAGCAGTTCCCACACCTTACAGCAGACAAGCCGGCA
AGCATTTTCATGGGCTTGAGCCCTGGGCTCACCTGAGTGTGATTCTCAAACACACAGGACCCTGGGCCAT
GCATCCATTCATTCTGACGTGGGCACTGCCGACTACCTAAGGCAGGCTCCCTGCACATTCTTTCCCTTCT
TAGAAGCAGGCCTGGGAGATGTCCACAGACTTAGGCTCTCCCATAGGGCACTCCCCCACAAACATGCGTA
ACCTGGAGCCTTGAGCCAGCTCACACCCTGGGGCCTTGTCTCTGTGTTGAGCAGCGGCAGCCACGTTCTT
CTCCAGCAGCTGTGTGCCCTGTGCGGATGGAAAGATGTTCCCCAGCCTGTGCCAACTGTGTGCGGGGAAG
GGGACAGACAAGTGTGCCTGCTCCTCCCGGGAACCATACTTTGGCTCCTGGGGAGCCTTAAAGTAAGTGA
AACCTTTGCTCTGGAACAAGGGGGTCTCTTAGTGACTTTTCTCTTTTTAAAAAAAAAAAGTATTTATGAA
ATTAATTTATTATCAGATTATTAATTTACTAAAAATTAATAAATTATTAAAAAGAATTTATATTATATGT
TATATAATACTTTACATAAATAATCAAACTATGTGTATTTGTGGTTGTCTGCACGTCTGTCTGTGTGAGG
GTGTTGAATCCCTGGAACTGGAGTTACAGACAGTTGTGGGCTGCCATGCGAATGCTCGGAATTGACCCCA
GGACCTCTGGAAGACTGCTGAGTCATCTCTCCAGTCTCTTAGTTACTTTTCTTCTTTCTGTGACTAAATG
CCTGACAAGAAGCGACTTGTGAGAGTTTATTTCAGCTCACTGTTTGGGAGGATACCATCCTTCATGATGG
GAAAGGTGTGGTGGCGGGAGCAGGAGCTAGCAGGTTACCTGGAGTGGGGGATGCTGGCGCTCAGTGGGAG
CAGGGGCAGGGGCAGGAGCTAGCTGGTTACCAGGAATGGGGGATGCTGGTGTTCACTGGGAGCAGGAGCT
AACTGGTTACCAGGAGTGGGTGGGGGATGCTGGTCTCTGCTCACTTTCTCCTTTTTATTCATTGCCAAGC
TCTAGCCCATAGAGTAACACCACCCACATTCAAGGTGTGTCTTCCCACCTTAATTAACCTAGAAACACAC
TCGAAGATACGACCTGTGCTTGTCTCCTATGTTATCTGATCCAGTCTAGTTGACAACCAATATCAGCCAT
CGAAGAGAGACGAAGGCATAGGGTAGAACAGGACATACTCCTGGCATCTAGATGGCATGAGCATCAGGGT
GCAGAGTCCCTCCCGTGGCCTACCCCTGTTTCTAACCATCCTGAGGAACTATCTTCTTTGTGGGAGACCT
TATTGTCTCCCCAAAGCTGGGGCCATGACATGCCCCATGGTAACAGAAGTGCCAAGGGGTCAGACTTATC
TCTTTTCTGGAGACCGAGGTCCATAGACACAGGCCTCAGGAGTCTCCCAGCGAACCACCTTTGGCATTTT
ACCTGTGTTTTTTCATTCTCTGTAGAAGGTGACTCAAACCAAAGCAGGGTTTTGAGGTTATCTGACAGGT
TTTTGTTTGTTTGGGGTTTTTTGTTGTTGTTGTTGTTTTATTTTCATTACTGTTTTTTGAGACAGGGTTT
CTTGGTGTAACAGTCCTGGCTGTCCTGTAACTCCCTTTATGGACTAGGCTGGCCTCAAGCTCACAAAGAT
CCCCTGCCTCTGCCTCTCAAGTGTTGGAAGCAAAGTCGTGTTGTTGTTGCTGTTCAAACACTGCATTCAG
AGGCTTGGGGAAGGGTTATTTTCTGTCTGCTATTTTCTGCAAAAGAGGTCTCCCTGTCACTGAGAGCATC
TGATGCCTTTATTTTTTCTTTTCCTAATTTATTTATTTTTATTCACTTTACATCCCAATCATAGCCCCCC
TCCTGTCCTCCCAGTCCCACCCTTACAAATCCCTCACCCAATTACCCCTCCCTTTATCCTCAGAGGAGGG
GAAGGGAAGCCCCACCCTAGAATATCTAGTCCTAACAGGACTAAGCATATCCTCTCCCACTGAGGCCCAA
CACTAGGTAGGGGGAAGGGGATCCAATGGCAGGTGACAGAGACAGAGACAGCCCCTGTTTCATTCGTTAG
GGGACCCACATGAAGCCCAAGTTGCACATCTCCTACAAATGTGTGAGTGTCCTAGGTCCAGCCCCTGCAT
ACTCTTCAGTCTCTGTGAGCTTCCAGGGACCCAGGTTAGTTGACTTTGTAGGTCTTCTTGTGGTGCCATC
TATATTCCAGTCTTCCACAAGACTTCCCAAACTCCATCTGATGTTTGGCTGTGGGTCTGTCAATCAGCAT
CCCTCCGTCCACTGCCGGATGAAGCCTCTCAGAGGACAGTTTTGTTAAGCATAGCAGAGTATATCATTAA
TCGTGTCAGGGGTTGGCTCTCTCCCATGGATGGGTCTCAGGTTGGACTATTCCTTCTTTCTCTGCTCCAT
CTTTATCTCTGCACATCCTGTAGGCAGGACAAATTTGAGATTGAAGGTTTTGTGGGTAGATTGATATTAT
ATTGCTGGTCATGGTGGCTCATACCAGTAGGTTTTATCTGATGACTTGTAAGTAGCCAAAACCAAACCAG
TTGCTTGGAGCTGCTCCCTAGGAGGAATGTGAGGGTCCTGTCTGCTTCATCACCCCTCTCTGGAGCTGTC
TGCCATGATGATTTCCAGACTCCTGCCTGCTTCAGGTCTCGGCATGGCTGTATAATGTTCAAAGGCCCCA
GATAAGGCCATTGCCTCTCTGAAGGCAGATGGGCGCCACCATTTCTACCAAAGCCTTCCTAGATTGTAAG
GGGCATTGCGCAAGAGGCAGATGAACCGTGTTCCCAGGCAGAGGGCCTGACCTTGGCTGTCCTGTTTGCA
GATGTCTGCAGGATGGCACGGCGGATGTGAGCTTCGTGAAGCACCTGACAGTGTTTGGTAAGTGCTGGAC
GAAGAGCAAAGTGGGCCCCAGCCTGACCAAAGGCTCTGGCTCTTGTCTCTAAAGGGTTTTTGTTTGTTTG
TTTGCTTTTTTTTGCTTTTAACTTCTAGAGACTATTGATATTGAGAGGCTAACTCCATTGAAGAGATTTT
ATGAAAGCATTTCCACCATTTCTACATTGTTTAGGGCCCCACTTATTCTTCTTAGCACACATCCGTCTCC
TAGTGACCACACCCATTTCAGGGCTCTGCACCCATCCCTCTCTGGCTGCCTTAGCCAACCTGCTGATGCC
TCTATAAATCTAGGGAACATGAATTTTGGACGGTTATTTGCAATTTACCAACAAATGAAAGAAGTCGCTT
CTGCAGTGGCCCACATTAAACCAAGAGCCTTGTATATACCAGACAAAGGCTTTACCCTGATAACCCCCCC
ATTCTAAAAATTAAAATCAAAAGTAACATGGCAAACCTTTCCACCAGCCATTTTGGACAATTTAGCTCAA
ACAAGCAAAGCAACGTTTTCAGACAAGTTAAGATGACATATTCTGGTTTTGTGAGGTGTGTATGTGTGTA
TGTGACAACTGTTGGGATCATAAAAAGAGAAAGAGTTATAAGAATGTGTTCTGGCAGGGTGTGGGGAAAG
GGTGTCCCCCGGCAGACCCATGCAGAGGCATCCCTTCCCCCTGAGGGACCTGACACACACCAGTGCAGTA
TAGAATAGGGTTCATTCAGGGCATGGGGAGGGGAGTTAAGAGGGTAGCAGAGGCAGAGAAAGGCAGAGAG
GAGAGAGTAGAAACGTAGGGGCCAGCCATGACCATGTGTAGAGGAGGTGGGGGAAGGGAATGGGGAGAGA
GGGGGCAAGAGGCAAGAGGCAAGAGAGAGAGAAAAGTGTAAGAGAGAGAGAGGAGGGACCAAGCAGTCCC
TTTTATAGGGCCAGGTCTACCTGGCTGCTGCCAGGAACTGTGGGGGTAGAGTTTAGACAGAATACCAACA
ACTGTATCTGTGTGTATGTATTTGTATATGTGTCTTTCTCTCTCTGTGTATGTGTGTGTATGTATTTGTA
TATGTGTCTTTCTCTCTCTGTGTATGTGTGTGTGTGTGTATGTATTTGTATATGTGTCTTTCTCTCTCTG
TATATGTGTGTGTGTGTGTGTGTGTGTGTGTGTGTATGTATGTCTATGTATGTGTGTGTGTATGTGTGTG
TGTGTGTGTATGTGTGTGTGTGTTTATCTGTGTATGTGTTTATGTGTGTCTGTGCTGGGATTGAAGGCGT
GCGCCACCGCTGCCCAGCTAAGGCTGCAACTTTAAGATGAGGGTGTCAACAGTGCCTGCTCCTTCTGAGG
ACGTGAGGAAGAATCTCCCGTCCTGTTCTCCTGGCTGGGTGGCCGTCTCTGCTTTTCCTTGGCTTGCACA
TAAATATCGTCACTGTCTGACGTCACACTGATGTCATGCTTGCATGGCAGTCTCCCTGTGTGCACGTCTC
TGGCTCAGTTTCCTCTCCCACAAGAACACTGATTGTATTGAATTGGGAGCCCACTGTATTCCACTATGTC
ATATCTTAATGGCACACACTTGTAAAGACTACTTCAAAGTGAGGTCACACTTGGGGACGCTGTGGATTAT
GACTTCAACCTATGAATGGGACAGGGTCCACAACACCCAAATCAACATAGTAGCAACCAAGGAACCTGTG
CTTCACACCTGCAGAGTTCCCTGACTGGGACCCCAGTATCCTTTCCTACCCTCGGCTCTCTCAGCACTTT
CCCCAAGCAGGCTCTGTCTCGGGGAGAACATGGCTGCGTTCATGAGGGACATGAATTGCCCCAGCATGGC
AGCATATCTGAGACCTTGACAAGTTACCTTAACTCTCTGCCTCTGTTTCTTCGTGCCTATGATGTGATCA
TTCTATGTCCAGCCTCCTTTAGCTTGGGGGATTGATGGTAAAGAGGCCTGGGCAGCAGTAAGTCTTGCAT
ACAGCCGTGTGGGTCATCACTGCTAAGCGTGTGTTTGCTGCCACCATTTGTATGTTCAGATCCACAGGGA
TGTAGGCAGCTGGAGGGGGCCAGGGTCAGGCATGGTACCCTACCTGTGGGAGCCACAGTGGGACTATAAC
TCTGTCATTCCCCTGGTGAGCCCCGCTGCTCTCTCATCTGTGGAAAGTGTATTTAGAAAGGATTCTAGCT
CTGTCCCCTTCAGGCCACTCGCTCTGTGGTGGTGGGGAGAGGTCAGCACAGCTCCAGGCTCAGCCTGCTC
ACCCGAACTTTCCTTCCTCAGAGGCCATGCCAACAAAGGCCGACAGGGACCAATACGAGCTGCTCTGCAT
GGACAACACCCGCAGGCCAGTGGAGGAATATGAACAGTGCTACCTGGCCCGGGTCCCTTCTCATGTTGTG
GTGGCTCGAAGTGTGGATGGCAAGGAGGACTCCATCCAAGAGCTTCTCAGAGTGGCCCAGGTACCCCATT
CCCACATCCTTTCCTCAGCTCGAAGCTCCTGGCTTCAGTGTGTGTGGTATGTGTGGGTTTCCTCCATCTG
ACCACACTAACACTAGCCGTCTTTGTGCATTCAGGATACAATGGGCGATGCATTCACCAACAATCTACCT
GCTATGTGTTTATTCCAGACAGTAGAAGCCATTAGGACCATGTGACCTACATCACCAACCCAGGGCTAAG
CACTTCCTGTCTCATTTCTGTTCTCTTTTTCATTCTATGGAGTCCCACCCTCTTCAACAAAGCACTTCCC
TTGTGACCCCCTACCCTGGCCTGTGACTCTCCTGGTGGAGGAACAGAAACAAGATCTCTGTATTGGTGGA
AATCTCTCCCAGACAGTCTCTGGACCCTATCTGTGCCAGCACTGTGTTCAGGCTCAGGGATGAAGCACCC
AGGCACAAGGAGAGCATGCATGCATTAGCACCAGGAGGAATTGCACCACCTTGAGAACATGGGCCTTGTA
CTCTGTGCTTTCACAGAGGAACTGATTGGAAGGGCATTCTGGGATAAATCCTGAGGCCTGGGGATAAGGA
GTGTGTGTGTGTGTGTGTGTGTGTGTGTGTGTCCCCATCCGTCCAAAAGAGGGGTGAAGGATTATTAGAA
AAATCAGCAGGTGGCTGATTTTATGCAGAGCCACTGCAAGAGCAAACTACAGTCATTTGAACCTTTTTGC
TATTGTTATTGTTGTTGTGCTTAGGTTTTTGTGGAGACAGGTCTCATGTAGCCTAGACTGGTCTTGACTA
TGCTAAGTAGCCAAAGGTGGACTTGCACACTCCTTATCCTCCTTCCCTACGCTCCCAAGTACTGGGAATA
CAGACATGTGTTGCCATACCTAGCAAACACAGTCCTTTGAAAGAGCACTTGGACAGGTACCACGAAAAGC
TGAAATCAGGAACAACTGTGAGCCAGGCAACGGAGACACAGGCAACGGGCATTTGGGGTATTTTGAAAGC
CTGAAAGGAAAAGAGACTGTTTAATAACTGGTCCTTAGCAACAAGCCTGAGGTAAAGAGAAGGTCCAGGA
CACCTACCCTGCATCCCTGCTGGCAACTTCAGGGAACGTCTAGCATCACCAGGGCAACCAGTCAGGGAGG
AAAAAGTCATCACTCATGTGAACACACAGCAAGAGCCCTACTAGAGCCTACTAGAGCCGGGCAGCTGCCT
GGCACATGACCAACTCAGACCCCCCTTTCTACAGGTCGGGAGTTAGCAGTTTGCCAAGTTTATACGGCAC
AGGCTAGATGGGATTTGAGTAAAACTGTCCTTCAAAGAACTTGTTAGAAGCCCTGGAACTGTCTTTGTGT
GTGGCTATCTCCTTTTATCTGTGTGTAAGGGGTTATTTAAAAAGCTTTAGTGGATGTCTGTGATTGTAAA
AAAGTCCCAAGCCCTACAGATAGATAAATATACAGATGGATAGCTTGCCAGTTAGATGTGTAAATAAATA
ATAGATAGGGAGGTAGACACTCCTTGATTCACTGAGCTGTACTCTAGTAAACCTGTCACTGTGCTTAAAA
AAAAAATCAAATCAAACCATTGTAAGTCAGCAATCTGTGCATTCAAATGTATGATGAAGATTAATGTATA
AATTAAGCACAATAAGGGATTATCAATAATATCAAAATACATCCATATACTACAATTAAAGTTATTTAAA
ATTTAATGCCTCTGTCTGGAATTTTTCCCCTTAGTATTTTCAGAATGCTGTTAACTGTTGGCAACTGAAA
TCGCAGAAAGAATCTGTGGATACGTGTTAGTGTTATTATTAATTATTATTATCATTATTATTTTTATTAT
TATTTATCTAATTTATTTCAAGGCTCACATCTGGGCACAACTTGTAGGCATATTTGTTTTATTTATTTTA
TTTGGGTTCTTTTACCTCTACCTCCCTTTCAACCCTTATTCCTTCCAACAGCCCAACACCAGGGAGGAGA
GAAAGAAGGTTAGAGAGGACAGGAGGCGTTGGTTTCTCTTTAGAATACTTTCTGCTGACTGGGGTTGGGT
TCCTTGGAGGTGGTGGGGGAGTCTGATCTTCATAGTGAGGATATCTTCAACTTCTTCTTGTCTCTTTACT
CTTTGCGTATGACCACTTGACTAACCCCAACAACAGCAACCAGGAGCAGCATGGAAAGGCTACAGCTGCC
ACCTTCTTTCTTCTGCTCCTACTCCTCTTCCTCCTCCTCTTGCTCTTCCTCCTCCTCCTGCTCTTCTTCC
TCCTCCTGCTCTTCCTCCTCCTCCCTCCTCCTCCTCTCCCCCTCCATGTCCTCCACCACTCCTCCTCCTC
CTCCTCCTCCTCCTCCCCCCCCCATCCTCCTCTTCTGAGTCCCTCCTGGCCTCTCTTGGGGCTGCATTTC
TACCCTCTCCCGAGTCCTCAGAATTAAACTATCTGCAGCCAGCATAATTACATCCCTGCCAGAGCATGAG
GCAGGAGGTCAGCTGCTTTGAATAATCTGAAGCAGCCCCTTATCTCACACCTGGGATTAAAACAACAACA
TGTCTACCTACATAACCTAAGTGAGATTTTAAAGAAACCAAATTCCTCACTACAGACAGGGATGGCCGCA
TGGCTTCCCACCCCCCTCCCTTACCTAGTTTGGTTTCTTTTTGTCTTTACTTTCACCTCCGTGTCAACAA
TGATCCTCTGTTTCTTTTCCTGCCTCTGGACAGGAACATTTTGGAAAAGACAAGTCATCACCCTTCCAGC
TCTTTGGCTCCCCTCACGGGGAGGACCTGCTGTTTACTGATGCTGCTCATGGGCTCCTAAGGGTCCCTCG
AAAGATAGACATCAGTCTGTACTTGGGATATGAGTTTCTTTCTGCCTTTCGGAATCTTAAAAGAGGTATG
TCAGACTCGGGAGGGACCTGCCAAGCTTCAGCCACCGGGTGTGGCAGAGGCCTTGGATTGAGATTTTGCT
GGTGGCTGCAAGTTTCACCTAACCTTAATGGTCAGAAAAGCCCACAAGTGCTACTCAATACCCAGGGCTA
ACGAGCAGATGTTCTGATAAGCCAGGAGAAAGGGCTATGCTACGCTATTTAAGGACGAGAACACTATATT
GGTGGAAGTGGTGGTGCTGGGCTTGAACTCAGAGCCTTACAGATGTCACGAAGGGGCTTGATTACTGGGG
TATTCTGGTCCCTACATAAAGGATTTGAAAATCTTTCTATTATAGAGATTTTCTTTAAAGGTTTTGTTTA
AGTATATGAGTACACACCAGAAGAGGGCCTCAGATCCCACTGCAGATGGTTGTGAGCCACCATGTGGTTT
CTGGGAACTGAACTCAGGACCTCTGGAAGAGCAGCCAGTGCTCTTAACCACTGAGCCATCTCCAGCTCCC
TACCATAGACAATTTAAAGCCACGGTGGTTCCAGGTTCTTGTGTTAACTGAGTCTATTCTCCCAGTGGTG
GGTTTGCTCAACAGAGAGGACAATTCATCCTCAACTGACCAGGAAACACATCCATGATCACAGTCAGGAG
CAGAGCTAGAACAGGCATTGCGGAGGCTTTGAGTGCAGCGCCACCCTCGCACCCCCAACCCCCGCTTCCA
CTGGCCTCTGCTGCCCGCCCCTCTCTTCACTTCTCTGTTTTCAACCCCCAGCCCCCCTGCCCCCCAATTT
AGTCAAACAATAGTCACTGAGCATCTACAAAAGAAAGTGTTAGATGTTAGATGGGAGCTGACACAGCAGA
TGGGCCACAGCGATGAGACCATCCAAGCAGAGCACATGACTGCCATGGGCTGCTCCCTGGATGGAAGTTC
TGGAAGGGAGAGCTAAGACGCTTCCCTGGGGAGGTGATATCAGGAGGGAGGGGAAAACTCCACCTCAGCT
GCTTTATGAATGCCTAGGTCTCTACTTCTCCTAGACAATGACTGATGGCAAGGAGCTATGGCAAGGAATG
AGTCGCACCCGCTCTTTGCCATCAGTGATGCCCTGCCTGGCATCATGTCTGCAGCCATCTGGGGCTTTCT
TTGGGTCCTTGGATCATCTTTCTGCATCCTAGGTCTGGAAGACTCCCAGAGGGTGAAGTGGTGTGCAGTG
GGCCAGCAGGAGAGGACCAAATGTGACCAGTGGAGTGCTGTGAGCGGTGGTGCTTTGGCGTGTGCCACGG
AGGAGACCCCTGAGGACTGCATCGCTGCCACCATGGTAGGAAACCCCGCTCCTTCATCTGGGCTACATTG
CATATAACTATTTTATCTCAGGGATCATACTTACAACTATAAGAATACATTAGTTGCTCTATTTAGAATC
TTGATTAAAATATCAAGTTAATTATGAATGACTTTCTTAATGGTTATTCATTATTTTGTTAGTTATTTAT
TGAAAACGTTTCTTGCACCGCAGTTATGAGTGTGGTGCTGATGGGATTTAGGCAATGGATTTGATTCCAT
TAGTTGTAAGAAAACATTTTCCCGTGAGACAGATTAAATATAGTACCTGAATCTGACCATGGGGGTTCTG
AATTTACTGACAATGGTCATAAAGAAAGTGTGTTCTGGGCATGTCAGAGGGTCCTCTAGGAGGACACAGG
GATGTCCAGAGAGCATGGTTTGAATCGGGCATGTTTCTAGCTGACAGGCCAGAGGCAGGTCTTGTTTTCT
AAACTCCGTATTTCCACCAGTTCTGCTGTCTGGTTAAATAAGGACCCATGACAGAATGTGCATGAGATGA
AGTCTCTGAGGGTCAGAGGAATGAGAGCCACACAGTTTACGACTGATTTCTTTCTTAACTTCAGAAAGGA
GAAGCGGACGCCATGAGCCTGGATGGAGGGTTTGCCTACGTCGCAGGCCACTGCGGCCTGGTACCTGTCC
TGGCAGAGAACTACTGTGAGTGGGGCGCTTCTCTTCATTTCTCCCTGGGCCATGGGCACAGAAAGGTGAA
GAAGTAATGTCATTTTCTGGTAAGATGAGGATGACTATTTTTGCAGCTTAGGGCTCTTTGAAGTGGAATC
TTGGACTCCCCAGTCAGAAGCAGATAAGCTGCAGATGTGGGTGTTAGGCGTCTTTCCATAGGTCTTAGAA
TCAAGCAGCCAAAGTGAGGGCAACAAGTGTCTGTCTCTCCAGTGTCTTTGCCCCTGCTGGGACAGTTACA
AGCAAGGAGAGTTCAACGTCATACCTCCTGTTTTATCTAGAATGATACTGGAGGGCATGTGGTGGGTAAA
GCCACCACAATGCTTGTCAACTAGCCCTTGGGTTAGACTTGCTGCTAGCTCCCGGGTCTCAGCAGCCATG
ACAGGCTAGGCTCAGCCACTCCCTCAGATAACAATTAAAGAGGAGAGAGAGAGAGAGAGAGAGAGAGAGA
GAGAGAGAGATTGATTGATCTTATCTACCATAGCCACTTAAGGAAGCGGACCCATTAGAGCTGCAACCCC
TAAGTCCATCTTCAGGATTCTGATATGAAGGTTCAGGTTTAAATAAGAGGGCAAGAGACATGCATGGATG
ATCAATCCTTGTCATGATGTGGTCTCCCACATCATGGATCCATCATGCTATTTGGCTTTAGTCTCACCTA
CAAGGTGGACTGACAAGGTGGACTGACAGGGTGGTAGAACTGTATGAAACCTCTCCCTGGGAGACAAGTT
CTTCCTCAGAGACTTGCAGTGACTCTTGAGTCATTCCCTTCTCCAGCATGAGATTCCTGAAGGCATTTCA
GTGCCTTGGGGACTACTGTTCCAATAGTCTGAGAGCCAAAGTGAGGGCAACAGGTATCTGTCTCTACAGT
ATCTTTGGCCCCTGCTGGAACAGTTACAGGCAGAGAGAGTTTAACATCATATCTCTTATTCTGGCTAGAA
TGATACTGGAGGGCATGAAGTGGGTAGTGCTTGCCAAACAGCCCCTGGGTTAGACTTGTTGTAGCTCAGA
GAAGATGTCAGATCCAGACAGCTGCTTCAAAAGCATCTCTGCCAAGATGTGCAGCCATCTCTCTTCTGCT
CCCCTTCTATGGGCATCTTATTGTACTTTGGATCTGTTTAAGTTTTGAGATTCTGGGGGTAGAACCTGAT
GTTATAATAGGAAAGACTAGGGGGAGAAACTAAATGGGCTGCAGAACCTTTGACTGGTGATAACCAGCGA
CGGCTTGCTAAGCCAACATTCCTCATTTTATTCCATCTCAGCTGAGGTAGAGAAGCTTACAGCTCGGGTA
GAATAACTCGTGTGAGAGTTTAACGTGGACCTTCAGTGTTTCCATTTTTCTTTTTAGTGTCTACCCACAG
CAGTGGGAGGCTGGGGTCTAAGTGTGTGAACGCACCTTTGGAAGGTGAGTGAGTCAGCTTTTTGAACTTT
GGGGTTCAAAGGCAGAACCTTATCCTTGGGAAGAAGGCAAAGGAAGCCTTAAAAAATGACCAAAATCGGG
GCTGGAGAAATGGCTTAGCAGTGAAGTATGATGATTGGTCTCGAAGATGACCCAGATTTGATGCCCAGTA
CCCACATCAGGCGGCTCACAAATACCTGTAACTCCAGTTTCCTCTTTGCTGCCCTCTGCTGGCCTCTGTC
GTTCCCTTATGAATGTGGTACACATGCACTCATGCAGGCACACACACATACACATACATTAAAAAAATAA
TAACAAATAAAACCAAACTTAATAGAGTTGAAAAGAGATGCCAGGGTTCACTGTTGAAATACACAACTGC
CCTAAAGCAGCCATAATAATTGATGTCTGCAGGGCACTTGACAATTGAAAGGACTCCTGTGAACTCTGAG
ACTGCTGTCTGTTCTCCTCAGCAACCTGGTAGAATGAGCATTATTGCTCCACTGGGATGTAGTTGGGGAA
ACTGAGGCTCAGGGACTGGGTGTCTTCCCAGGGGGAAAGAGCCAGGGGTGGCTGCAGTTAAGTTTGAGAA
GAGTTGGGGTGAGCAGACC CCCAAGTCCTCCTGGCACAGCACGGTGTTTCTGTCACGTGTCCACTCTTG
CACGAAGGTCAGCATAGAGGCAGAAGTCATCTGGGAGCAGGTTAGGCCTTGTGAGAGAAGGAGATTCCCA
GGGGCTGCTGAGGAGGAAGAAGAAAATGAGAATCACCCTGGGGTTAGCTGGAACTTAATAACAGGGGAAT
TGACCTGGTCCTTAGAGCAAACACCTTCAGAAGTTAAGTCTCCTGCCCACATCTCTCCATGGCTGATGTT
TATATTTCCCCTGAAGGATCCAGCCTTGAAATCAGGTGGAATGTGGCCATGGGTAAGCTCCCTGGACCAT
CAGCATCATTTGGGAATCCATTGGAAATGAGATTTCTTGACTTCTCTCTAATTCTACCCAGTCAAATACT
TCTGGAAGAGGCCAGAAGACTGCTTTGTTGGATTTAATGACAGAGCCCCAAGATGAATACCAGATACTTA
CTTCGGCTCAGCAGAGATCTGATGAGTTGAAGGTTTGGCTCAGTATAGCACACACAGCCTCAGGTGGGCT
TTGCCCCTGTTGAGTACCAGGCCACAGAGGTCCCCATGCTTTCATGTCCCTGCTCAACTACAGCAGTCCA
CCCTAATCTCCCTGTGATAGGAGCCTGAAGCTCCCCACTCTCTATATTCATGGCTAAGAAATCTTCTCTG
AATCGCGTCCTCCTACTCAAAACTGAGAGCTGGCTTCCATCAGCCGTGTATTCCAGTCTGATCATTTATG
GTCAGAAACAACATGTCTGCTTCAAGAAAAGTTGAAATATCCAGGAGCTGCAGTCACATGCAAAATGTAG
GTCAGCAAGGATGTTGAGAAGACAATTTAGACAGACACATGATGGCTGTCATCGAGAAGGTTCAGTCTGA
GTATGGGTGGAGAGGGCTCTGTATTTAGCCAAATGTATCAGCTATTTTCCTTGTTGCAATAGCAAAAAGC
ATCCTAATGGAGGAAGGGTTTGTTTTAGTTACAGTTGTAGGGGAGACAATCCCTCAGTGGTGAAAGCATG
GCAGAAGCCGGTCTTGTTGCATCAGCAGTCAGAAAGCAGAGAGAAATGAGTGTCAGGGCTCGGCTAGCTT
TCTCCTTTGATGGAGCCCAGGGAATGGCATCTGCTTTCCTACCTCAGTTAACCCAATCAAGACCAACTCT
CCCTGACATGCCCAGAGCTCTATCTCCAAGGTGCTTCTAAGTCATATCAAGTCAACAGTCAACATAAACA
ATCACACCAAATCTGTCTCTTATCTTTCTATATGTCTCTACTATCTCTTTTTTCTCTCCTGTATATCTCT
CCACCTCTGTCTCTCCCATCTGTTTCCCTCTTTCTTTTCTATCTCTGCATCTTTTATTTCTGTCTTTCTC
ACACAAAGTCAAAGATAGATGATAGCATTTAATGAAATAAGAATAAAAATCTTAGACCTGAAGACAGTAT
TAGTATTTTATAATAATAATAATAATAATAAATTTATTATTATTATCATCATCAGTAGTAGATAGTGTAG
CTACTTGTATTACAGAGTCCAGTCAGTGGAAATTGCTTTTCCACAAGCGAATCTAGAATTATCTCTGCCA
CTAGCACCACTGTTGGGAACCTACAGATTCATCTACTCTCCCCACTCAAAGCAGGATGCTCGGAACACAA
CAGATTCCCCCACCCCACATGACGAGTTTTAGCCATCACTGTACTAATGAGAAGTGTAGGTACATATAGA
GGCACCCAAGGTCATCTAAGATAGCTAGTGAGACAAGTCTACACCTGCCATGCTGAGCCCCAGTTTTTCC
CACATTTGAACACGGAGGGCAGGGTGTGTGTGTGTGTGTGTGTATGTGTGTGTGTGTGTGTGTGTGTGTG
TGTGTAATGGAGGTGGGGGTGAGTGACGGTATTTCCTAATTCTGAAGATTTATAACTTTATCTGTCTAAC
CTAACCAATTCCACTCTTCAGCTCTGACTTACTAATGAGCACGACTCAGTAGTGTATTCCTCAGATAGGA
AAACCTGAAGCACTAATGATAGTCCCATAAGTCAGGAAGAAGGCAGGAATGCTCACTCCCACCAGAGAGC
CACAGGATTACCTTAGAAGTAAAGGCAGCGAGATTAGAAAATGAGGGGGTCTTGCCAGAGAAGCAGGGGC
CCCCTTGGACCAGTCCCACACTCCCATTGTCACAGATCCTGAACCATGCTAAAGTCACACTTGCAGGCAA
ATGGCTATGTAGTTTCAGCACACCAGCCAAAGGATGGAGCTGAACAGAAGATGGAGAAACCAAGTTCACA
TTCTCCTCCACACAGAGACTCCATTAAATGTTCCCGGGGAAGGGAGTGTGCCAGATCCTGCTTTTGCCCA
CTCTCTGTCTCCAAACAGTAAAGAGCTTGTGTCTCGGTGTCTCCACTGCAAGGTTATTATGTTGTGGCTG
TGGTTAAGAAATCGGATGTTGGCATCACCTGGAAATCTCTGCAAGGCAAGAAGTCCTGCCACACGGCCGT
TGGCACTTCTGAAGGCTGGAACGTCCCCATGGGTTTAATATACAACCAAACTGGGTCTTGCAAATTTGGT
AAGTGTGTTCTGAAGGTAAGGCGGTGCCTTCCTTGGGCTTGTTCCTGAGTTGGGGGGATATTCAGTTCAG
GAGATGGCAAGGAATGTCCTGGCCACCTAGGATATTTGGGTCATGGGCTTGACAGAAAGTGAACTCCACC
CCTTCCCAGGTAACTCCTCCCCTTTCTCCTACTTTCACTACCTGCTTTTGATGGGAGTACATAGCCCTGA
AGGCAGATCTCAGGGAAAGGGCCCTGTTATGTCTTATGAACAGTCCTGGGAATAAATGGAGCCTTAGTAG
TGTGTGTAAGTGTGCACATGTGTGTTATTTTCACATATACCCTGAACTGACAGCTTTCACACTTGAAGCC
CTTTCACCAGGAAGGCCCTGGAGTGCTGCCTCCCCTTGCACATTTATCCTGCTCCCTTGACTCCCACCCT
AGCCACTTCAGCTGCACCCTCAAGGGTACCTCAGATTCCTTGCCTCTATCACTTGATACATCCCAGTCTT
CTTCTCTGGAACAGAGGAACCAGGCTGGAGAAGAGCCCAGGACAACAGAGTAGTCATTGCTCTGGAAAAG
CTCTGACCAGTGGCCTCAGTGGGCCCCCAACACTCCCGAGTGCAGCTGCCCCTCACACTTCCAATAATTG
TGCCTGTGTCCACACACCTCAAACCCACACCGACCTGCCACCTTCTCTGGCAGATGACCCAGTCAGTGGA
CACCATCAGAAGACAACTGAAACCATCAGCATCCATCAGCAGAAGCTGCTGAGTCTATGGACCTCCTGAC
TGCTGCCTCTCCTCAGCCTCCTACATGCCCAGATCCCTCTCCCTGCACTTGGGTACCACTCACGACAAAG
CCCAAGACACTCAACTATTTTTCTTTTCTTAGCCTATCCAACAATTCCTTTCAACACGTCAATACACTGA
TGTCTTCTATCTTTAAGATTCTTAACTCCTACAACATTCTCCTGCAGCCCCTGTCTAAGTTCACTTTTTC
CTTTCCTCCCAGATCTTAAAAACACTACAGGAGCCACACACCTTTCTCTCACATCTCCACTTCCTGCTGT
CTGTCTTCTTGCATCATCCATCCCGAGGGCATCACTCTGATGGAGACCCCCACAGTGCCCTCCAGCTGCT
CAGCTCCTGCTCTCCCAGCACCACCACCCCTCTATTCCTGGCTTTCGTGATGATGTCTAGATGTTGTTTT
TCTCCTTCTCCTAAAGGAGTCTATCCTTTCCAACCTGGTTAAGAAACATCGGGGTTTCATAAAGCAGTTC
TCTTCCCGTCTAAGCATCATCCCTAAGCACTCACATCCAAATGCAGCTGGATCATTACGCTGCCCATACA
AAACCAGGTACTCGGTATGCACTGGATAAATGCTGACTGCTGTTGCTTTTATTGTGTCTAAAGGGCGATA
ACTCTCAAGCACAGATTGCTCCTTCACACACACACACACACACACCGCAACACACACGCACACACCCCCC
CCCCTGCAGCACACACACATACACAGTCTCAAGAAGTTGGGCTTCACCTCAGACTCGCGATGCAGCTGAG
ACTGATATTGAAGCTCTGATCTTCCCGCCTCCCAAGTGCTGGGATTATAGGTGTGCATGACCACATGCAA
CCCAAACATGTATCTAATGAACTATTTCCATATCTACTTAAGATCTCGAAGGCATATTAAACTCATCTCG
ATTATCCAAAACGGTGTTCTCTCATCCTAACCTGGTGATGCTCCAGGACT GCCTAGCACCGTGGAGGAC
TCTGGAGTCCCACTTGCCCAGCAACGTCAGTTCTTTCTCCTCCCACCCACGTCTTCTTACTTCACGCTCC
CTCTCCTAGCCCACTGCAGTGGCCTGCCACCCGAGCTGCACATCAACCCTACATCCATCTACTTCTCAGT
CAGACTTCTGCAAAGTGTGGTTCTGATTGTGTGTGCCAATCCACTGGGCCCAGCATTGTCTAAATCACTT
CAGAGACTCCCTTTACTCTAGAGATAAACAACAGTAGCTACACAGTAACATCCCCTGGGGTCTGAACCTT
GCCCCTGCCCTACTCCCTTCTCTTGACAGTCTATTCAAACGGCCCCCATTAAGCTTGTTATGCTATGTCT
GGGTCCTGCTCTCAGGTGCCAGTCCCCTGTCTGTAAGCTTCTCTTCTCCCCATTCCCTTGGGGACTGCCT
ACTCATTCCCCATCTCTTGACTCCCTGGTCTATGGAAGGTCCCTCTATCTCCAGTTTCAGGAAATCATAT
TCCTTCTTCCCAGAGCAACGGGGGCCATGCAGATCCATGGGTGTGGTTGCTTGAGCTCTGAATGGTACCC
ACAGAGAGTAAGTGGAAAAGGGAAGGGCCCATGGTCAGTGTAGTTCCCTGGAACCCAGTGCTAGGCTTGG
CAGCCATGGCTTTCCTAACTTGAAGTCACAATGGCAAGCTTTCTAAAGGGAAAACCAAGACAGCAGAGAC
CAGAACGCATGGGTTTAGGTCAAACAAGCCAGCCCACTCCCTTTCCACTATGTTAGAGTTACACTCTCTA
CCTACCCTTCAACACCCTGGTCCTGTTTGAGGACAGGTAGACTTCTGTGAGCTCTCAGGCCGGCTCATCT
CCAGTCAGTCCCTTTACGTGGTATGGAATCTTTTCTTTTCTTTTCTTTTCTTTTCTTTTCTTTTCTTTTC
TTTTCTTTTCTTTTCTTTTCTTTTCTTTTCTTCTCTTCTCTTCTCTTTTCTTTCCTCTTCTCTTCTCTTC
TCTTCTCTTTTCTCTTTCTTTCTTTCTTTTTTCTTTTTTTCTTTTTTTCTGAGACAGGGCTGTCCTGGAA
CTCACTTTGTAGACCAGGCTGGCCTTGAACTCAGAAATCCACCTGCCTCTGCCTCCCAAGTGCTGGGATT
AAAGGCGTGCACCACCACTGCCTGGCTTGGAATCTTTTCTTTTATTCCATGATGTTCTTGTTCTTTTTTA
AAAAATGAGTTTTGTATATGTAGAGTATGTATGTGTTCATATGGACATGGATATGTATATGTGCAGGTGC
ATGTATGCACACATCTATGGAAGCCAGAGATAGAGGCTGGTTGTCTTCTTCAGTTGATCTCCACATTATT
ATTATTGTTTGAGTAAGAGTCCCTCTGTGTAGCCCTGATGGTTCCGAGATCCAACTGTCCCTGCCTCCTA
AGTGCTGGTACTTATAGCTCCTGTCTTAGTTTTTGAGACTGGGTCTCTCACTGAACCTGGAGCTCACCAT
TTTGACTAAGCTGGCAGGTCAGCGAGCTGCAGGGATCCACCTGTCTCTGCCTTTCTCAGCACTGGAGTTA
CAGATTTACACCACAGCACCCAGCTTTTACGTAGGTTCTGGGGATCCAAACTCAGGTCCTCTTGCTTGCG
TGGTATGCACTTTGCTGGCTGAGCCATCTCCCTAGCCCTTACTAATGTTGCTGAATAACAAGCTGTGTGC
TTGTGTTGCAGGCAGTCTCAGGGACAAACCTCCGGGGCTTTCCTGTGATCACGGGAAGAGCTGACTCTGG
CTTGTCCTTCCTTGCAGATGCATTCTTCAGTCGCAGCTGTGCCCCAGGGTCTGACCCTGACTCTCCTCTC
TGCGCTCTGTGTGTTGGGGGTAACAACCCAGCCCACATGTGTGCTGCCAACAACGCTGAGGGGTATCACG
GCTCCAGCGGAGCTCTCAGGTTAGTGTCTGTGCCTTTCCTTCTCTTGGCATCACCCTGTTGACCCCCTCA
TCTCCTCATGCATTCATCATATCAGTATCTGGGTGGTGATTTGGGAGGATCTGGGATTGGAGACCAGAGT
TAACTGCTGATATTCAGCCTGGTTCTATAAAGAATACTCCCTTGGCCCAGGTGCCTGGGCACTTCAGGGA
CTTGGATAGGGCAAGATCAGTAGTACAGAGTCTAGTTTTCCTCTTATCTTTTGTGTGACTGTAGATAAGC
CATTGGTTCTGTTAGAGCTCAGCTGTCAATCACAGGAGAGACCCAGACTCTGGCTTCCCCCACTGAGCTC
TTTTACACCGACAGATCTTTTACAATAGACCTGTCAAGGTACTGCCTTTCATTTAAATGAAAGAAGATGC
AGTTACAGAGCACTGAGTAGCAGGTGCTCGTCTAGGTAGCTAGCAAGCAACAAGACTCGCACGGTCCTGT
CTGCTCTGTGTCCCAGTACAAAATAGGACCGTAAACAGACAAGTAAAGAAAATTGTTCTCAACTGAATAT
GCTATAGAGAGACCAAGAGGAGGCACGAGTTAGGGAGCTTTCCATCCTTGTAACAAAACACCCGAGACAA
TCAGCTTATAAGACAAAAAGGTTCATTTTAGCTCATGATCTTAGTGGTTCTAAGTAGAACCAATGCAACT
GGGATCCGGCCGTCTGTTTCAAAGGCGTGTCTCAACGACTCAGGGATCACTCAGTAGGACCCATCTCCTT
CTGGTTTCACCTCTAATTACCACCACCTTAGAAATAAGCTCTTTTTTTAAAATTTAAGTTTAAATTTGAT
TTTAATTTTTATGTGTGTACATGTGTCCCTGTGTGTGTGTCTGTTTAAATATGATCATATTCATACAGGT
GCCTGCAGATGCCAGAAGAGGGCATCAGACACCAGTCCAACCCCTGGAGTTGGACTTAGGGGTGATTGTC
AGCTGCCCAACATGGGGGTTGGGAAGCAAACTCTGCTTCTCTGGAAGAGCAGCAAGTGCTCTCAAACACT
GAACCATCTCTCCAGGTCCCAGAGCCAAGCCTTTGATAGTCAAGTGCCTTTGGAAGATGTTCAAGATCCT
AGCACAGCAGGGAGTAATGTGGCAATGGCCAGGGCAGGCAACAGCTTAAGAAAAGGTACATGGGGAAGGT
CTTTGAGAGCAGAGAGATCAGGAGAGCTGAGAACTAAATAATGAGAGATGAAATTGGCCAGAGAGAATCT
GGAGCAAGAGTAATCGAGAAGTGAATCAGCACGGGTGAGGCATGTGTGGCAAAGACCCTACTGAGTGAGG
CCAGCAATAAAATTCTGTGGACTGAAGTGTGGAGAAGGAAGGTGTCTGGGTTGTGACCTGCTGCCTCTGC
CTGTGGTGGCCATGTCTATTGAACCCTGGAGTCCTGGCTGAACAGGAAAACTGAGTTCTAAATATGATGA
GCCAGCCATGCTGGATATGTTCAGATTGGTGTGTGTGTGTCTGTGTGTCTGTGTGCCTGTGTGTGTGCCT
GTGTGTGTGTGCCTGTGTGTGTGTGTCTGTGTGTGTCTGTGTGTGTGTGCCTGTGTGTGTCTGTGTGTGT
GTGTATGTCTGTCTGTCTTTGTTTGTACTGGATGAGTAAAAGCTCTGTGGGCAGCATGGGGCACTCTAGA
AAACTCCCCTGCCCCCGTATACATCAGTTGACTTCATCCTGCCCTCCAAACATTTGCCTCTTATCAGTCA
TGTGCTAGTGACATCAATATCTATCTGCTGAATGTTGAATCTAAGCCAAACTAACTTACATTATCTTTAT
ATCACAAGGTAACTGGTATTAAGCTTGACCCAACTTTAATACTTTTTCAAATCATTTTTATTTGCTTATT
ATTTTATTTACTTATTATTTTGTATGTGTAAGGTGCATATGCTCCAGGATATTTATATCTGTCTGTCTGT
CTATCTATCTGTCCATCTATCATCTATCTGTCTGACTATCTATCTATCTATCTATCTATCTATCTATCTA
TCTATCTATCTATCTATGTTGGAAAGGGGAGGACTTGTGCACAGCAGTGCACATGTGGAGGTCAGAAAAC
AACTTGAGGCAGTTAATTCTCTTTTTCTACCATCTGTAATCCAGAGACCAAACTCAGATTGTCAAGTTTG
GTGAGTGAGTGTTTGTTTGTTTGTTTGTTTTTGTTTTTGTTTTGTTTTTGTAAAGACAGACTCTCACTCT
GTAGCCCAGACTGGCCTGAAATTTGTGATTCTCTGGTCTCGGCCTCTCAAATGCTGGAGTTATAGATGTC
GCCACAGGTACACATTTTCCCATGGGATAAAGATTGTGTCGTGTTTAGAGAAGCAGATGAGTGCTGTCAG
AGCTGAGCAATTGAGTGCAATAAAATCACCTCACAGCCATATTTCCACGCGGATTGTAGTATCTCATGGT
GTGATACTACAGCACGTGGGTCTTGTAGATCTAACTAGAGTGCCATCCCATAGATATCTCTGTTAGTGGG
AGTACACAAGCAACCTGTCTGGGGAAAGTGGTGAGGATTTAAAACAAGGCCTGAACGGTGCTTTCCACAA
GGGAAACTCAATGAGCAGTTCTGCCTCTCCATCACCTTCCTTCCTGGGGCCCTGCAGGCACTACAGTTGC
TTGTGTGGGGTGCTGGGTGCCTAGTGGTGTGACTCCCCCTTGGTGGCTCCCTCTTACTCCTTGCTGATTC
TCCTTGCTGGCCTGGGCCTTGTTGTGCAGGTGTCTGGTTGAGAAGGGGGACGTGGCCTTCATGAAGCACC
CTACAGTTCTACAGAACACTGATGGTACGTAGGCGCCTGCAATGTGCTTTCTGTCCATGGGAACACTCGA
GTCTCCCTTGCAGAGTGGCTCCCCAAGAGGCAACTGGGGAAGTTGAATAGCTAAGCCCAGGAGACTCCAG
TGACTAGGATCGTAGCACTTTAAATTAATCTAGCATTGAAACGGTCTTCCAGTCTGTTCAGACTTGATGC
TAGTTATCACCCTGGCCTTGAACCTGGCTGACAAAGCCCACAGAAACCATGGGCTGTGTGAGTAGGTCTG
ACTCCCTGATTGACAGGCATTCCTTTGGTATTCCAGATTAAAGTTCTTGACAGCCATCCCGTGTTGGAAA
ATGTCTTGTCTGTTTCTGTAGCTTGACTTTTTTCACTTTCTTTAAAAAAATTGTCTACTTATTTATATAT
TTATTTGTATGTGAGTGGTCATGAGGATTTATGCACACCACATGTGTGCAAGAGCCCAAAGCCAGAGGGC
ATTAGACCAACTGACCCTGAAGCTGCCTGAAGTTGGCTAGGAACTGAACTTGGGTCCTTGGAAGAACAGT
GAGGTCTTAACCCCTGAGCCAGATCTTTTGACCCCAGGTGGATAATATTAATGAGTTTTTGAGTTTTTTA
TATAACTTTTAAAAAAAGATTTATTTACTTATTTTATGTACATGAGTGCTCTATCTGCATGTACACTTGA
ATACCAGAAGAAGGTATCAGGTCATATTATAGATGGTTGTGGGCCACCATGTGGTTGCTGGGAACTGAAC
TTAGGACCTCTGAAAGATCAGATAGTGTTCTTAACTGCTGAGCCATCTCTCCAGCCTCTTCCTTTGTTTG
TTTGTTTTTTAATTGTTGTTTTTTGTTTTTTGGGTTGTTTGTTTGTTTGTTTGTTTGAGACAGAGTTTCT
CTATGTAGCCCTGGTTGTCTTGTAACTCACTTTGTAGACTAGGCTGGCTTTGAACTCTGAGATCTACCTG
CCTTTGCCTCCCAAGTGCTGGAATTAAAAGCGTACCCATCACTGTCTGACAACAGTCTTAAATTTTAAAA
CACTCCAATGTGTTGAATTTTCCCCTTTGGTTAACACTCCCAGGACTGTTATTTTAAATTCTTATTCAGT
TCTGGAGAATTTAACCAAGGGTCTTGCTAGGCAAATGCTCTACAGTGAGCTGCAGCCCTGGCATTTGATT
TGTTTATTGATTAATTGATTTTGAATTTTATAGCTATGAGTCTTTTACCAGGATGTATGTCTGTATACCA
CATGCATGCCTGTTGCCTGTAGAGGCCAAAAGAGAGCATCAGATCCCCTGGGGTTGGAGTTGCAGACACT
TGTGAGTCACCATGTGGGTGCTATGACACAAGCCCAGGTCCTCTGGTCCTTAACCTCTGAGCCATGTCTC
TAAACAATTATATCTATATTTTAAACTTACACGTATTTACTTAATGTCTGTTTGTTATGAGGTCAGAGGA
AAACTTACTTGAGTCAGTTCTCTCCCTCTATCTATTATGTGGGTCCCAAGGGTCCAACTCAGGTCCTCTG
GCTTGGCAGCAACTGCCTTCTTTCTTTCTTTCTTTCTTTCTTTCTTTCTTTCTTTCTTTCTTTCTTTCTT
TCTCTCTCTCTCTCTTTCTTTCTCTCTTTCTTTCTTTCTTTCTTTCTTTCTTTCTTTCTCTCTCTCTCTC
TCTCTCTCTCTCTCTCTCTCTCTCTCTCTTTCTCTCTTTCCCCACTGAGCCACCTCACTGGCCCCAACAT
CATTCTCTCCCTAGGAAAGAACCCTGAGCCTTGGGCTAAGGGTCTGAAACACGAAGACTTTGAGCTGCTC
TGCCTTGATGGCACCAGGAAGCCTGTGACTGAGGCTCAGAGCTGCCACCTGGCCAGAGTGCCAAACCGTG
CTGTGTTCTCCAGGAAAGATAAGGCTGACTTTGTTCGAAGAATACTCTTCAACCAACAGGTATGGGCACC
AGTGCCTACCCCCTGTGACTCAGTGCCTGGTTCCCAAGAGCTGCACTGATGGCCGTGTGCCTGTGCACCC
AGCTTAGCTCATGCTCTTTCTCCCTCAGCAGGGGGCCCTGGACCTACGAGTCCTCACTCTGGTTATATCT
GGTGCCCACTTGTTCTGCAGCTCTCTAGGAGTGTAAGATTTGCAGCCTTGAGGAAACACACAGGATCTCT
TGGGCCCGGTCAATTTCCAAGAGAATGAATCTCTTCTCTCTTCTTCTGGTGCATTAAGTAAAGGAGTTGT
TGGTTCAGTGGCTGAGCCAAGTGTAACAAAAGCAGAATGGTGGGTTCTCTAACTGACTTGTGGGTTGATC
TGAGTCTGTCTTCTTAACCTGGATAGGCTGGGCACCATCTGGGCTTGCTGAAAGTTAAGGAGCCAAACAT
CTAGACACTTT CTGACTGTATTGAAAGCCAACAGTTGCTGATGTTATGGAGTATCAGATGCCTAACCCA
AATGATCTGAAGGAAAACCTATAGCCTTCTCTGCCTACTGCAATAGATATCCCGTTCTTGGCGGTTTCTC
AAAGAAGAAATCCATGTTTTATCATATATCACCTTCACATCCCTGAAAAAAAAAAAAAAAAAAAGATGAC
CTAGTGTCCTGGTGTTCCAGTTTTCTTCTCTTTGTTGTGCTAGGGCAATAACCAAAAGAAACTTGGGCAC
AGAAAGGGTTTATCTGACTTACAAGTTTAATCTATCATTGGGGAAGTCAGGCAGGAAACTCAAGACAGGA
ACCTGAAGGCAGGAACTAAAACAGACCATGGAGGAGCACCACTTACTGTTTTGCTTGATAACTCGCATTG
AGCTGCCTTTCTTGTATAGTCTCAGCCAACCTGCTGAGGGATGGTACCACCCACGAAGGGCTGGGCCCTC
CTATATCAACTATTAAGAAAATACCCATAGACATGCCCACGGGCCAATCTAAGAGACTGTAGCTAACTGA
GAATCCCTCTTTCCAGGTATGTAACATTGACAATCAAAATTAACCTTCACACCTAGGAAAACCATTGAAA
TAAGAGAGTCTTGACTGTGGACATGTGGCATAGAGGTGGGGGGGAGTCTCACACAAGATAAGCTGCCATG
TTGGCTACTATGGAAATCAACTAAGGAAGAGAAGTAGGATGGAGATATAGAACTGGTTGGAGTTCAGAGA
CAAGAAGAGGAAGCAGCAAGGGAAGACATGGGAAGATTTTGCCTGTAGCTTTAGAAAATCACTACTGCCT
TTGCCTAGGACAGAAGCTGGCTCAGCTCCATTGGGGGGGGGCGTGTCTTGCTATGAACCCACTTCCAAAA
CCCTTGAATCCGAAGATAAAAGACACACACAGACAGCTTTGTTACCTTAACTCGCCTGCTAGGCACAATT
GCTGGGTGCAAATATCTCCTGCCTGGAAATACATGCCCTTACCAATTTATTATCTCCATATTTCCTTCTG
CCCTAAGCTTAGTGGCTTGTTCCAAATAGCCCCTGCCAAACATCTTTGGCCACCTGCCTGTAACCGAAGC
CACAGGCCCTAGCTTCCCCCAAGGCCTTACATGTTTGCTGTGTCCTTCTTCCTCCAAAGCATGGCAGAAA
AAGCCTCTTTCCTTCCTTTGCATCTCCCTTTTCCTCCTGGGACCCGGAAGTCCCACCTGTACTGCCTGCC
CAGCAATTAGCCCCCGGCTTTCTTTATTGACACATCAAGAGCCAATTGGGGAAATAGCGTTAGTGACAGA
ACCTCCCCCTACAGGAGGATGATCCATACAGCTGGGAAAGCACCTGGCACTGGCTGGCTAACTGGTGACA
TATGGCCAGCTTTCTACTTGTGTTTCTTATGAAAGAAAGATGAAATTTCAAGACCTGTAAGTCATATAAA
GTACTCAGAAATTGCTGGTTGTTTGTGAGCCTAGAGGCTGCCTGGGGCTGAGAAAAAAGAAAAACAAACC
TGGGTATGCCCCGGAGTTAAAACATTCCTGGGAACAGCTTAACTTTAAAGATAAAGAGGAATGTGAGGAC
AGAACAGGGCTATCTAAACTGAGTCAACAACTCACAGAACTCTGACACCCTGCACGTACATGTAATTTTT
CTGCTGATATTTGAATAAGCCAATAGTGTGCCACTATGCTGAATTCCATGCCCCTAGGCCCCTTACCCCA
TAAAAACCCCTAACTTTCGAGCCTCGTGGCCGACATCCGTTATCTCCTGTGTGGGATGCATGTCGGTCCG
GAGCTCCGTCATTAAATGACCTCATGTAATTACATCAAGATGGTCCTTCGTGATTTTTTGGGTGCACGCC
GAATCGGGAATTGAGTGGGGGTTTCCCCCACTAGGTTCTATCACTTACATACAGCATTGCACAATGTGAC
GTTAGTGTCTCCATTTACAAATGAGCAAACAGAGGTAGACTGAGCGTGGTGAAGGATTTTCCTAAGTTCA
CATAGCAAGAAAAAGATGAAGCCAGGATTCAAACCCACAGACCATGCTTTCTGTTACTACAGCATTCCCT
GAACTGTTGTTGTGTCCAGGGATTCCCCAAGGACTGGAGCTGAGCAGTCCAGAAACCTTTGGTTTTCTAG
AAAGAGTAGACACCTCTATGCTTCCTGGCACCCCTAGTGACTTTCTGTTTATTCCAATCCAGGAGCTCTT
TGGAAGAAATGGATTTGAATATATGATGTTCCAGATGTTTGAATCCTCAGCTAAGGACCTGCTTTTCAGT
GATGACACAGAATGTTTATCTAACCTTCAGAACAAAACAACATATAAAACATACCTAGGACCACAGTATC
TTACCTTGATGGATAACTTTAGACAGTGCTTGTCCTCTGGTAAGTAGAAACAACCAAGGAGAAATAGCAG
GAGATTCGAAATCAGCATGTTTATGTTAAGAGCTCGGTTGTTTCAAGTATTCAGTTGATACAAAGGCATG
GAGAAGCAGAAACTTTCTCTTTGACTTGAAGGTTTAGAGTTACCATTGAGCCAATTCAATTAGAAAATAA
TGAAAGACACCATCCATGTAATGCTAAATTGTCTGAAGGAGACAAGAAGTGTAGCAGAACTTGAAACCAT
TTGGGAAATGAAGCTCTTCTCATGTGTATTCCCATTTTTGTTGGGGCTTGGGAAATGATACAAGCTGTAT
GTCTTAGGGTTTACTGTTGTGAACAGACACCGACCAAGGCAACTCTTATAAGGACAACATTTAATTGGGG
CTGACTTACAGGTTCAGAGGTTTAGTCCATTATCTTCAAAGTGGAACATGGCAGCATCCAGGCAGGCATG
GTACAGGAGGAGCTGAGAGTTCTACATCTTTATCTGAAGTCCACTAGGAGAAGACTGACTTCCAGGCAGC
TAGGATGAGAGTCTCAAAGCCCACACCCACAGTGACACACCTTCTCCAACAAGGTCACACCTTGTGATAG
TGAGCCAAGTATATTAAAACCACCACACTGTGCATACCACCCGTGAAGGGCTGGTTTTTGATGGTTTTAT
ATAAAATGCTCAAACATTAATAAAAGTAAATACAGCATGGCTAGCTCTGTAGGAATCTTGGGATACATAT
TTTAGATGGCATAGATGTCTCAAAAAAATAGAAATTGGGAAAATAAAATTAAAACTGAGATAACCATTGG
GCATATGCCCGACTCTGTGGCATTGTGTTGTGTGTTAGGGATAATGTAAGCAGGAAGGAAGGACAGGTAC
TTAAGGATAGGAAGGAAGGACAGCACAGGGATTTAAGGACATGAAGGAAGGACAGATACTTAAGGATATA
CATGGTAGGACAGAGATGGCCAGTGAGGGTCTTAACTCATCTCAACTGTGGCTTACTTTTAGAAGACAGG
AGTGTTTCCAATACACTTTCAAGAATTTCACTTTTAAGAGCATGAGAAATCAGAGCAGACGAGTTTGGCA
AGTGCAGGCAGAGCCTGATGTTCTTCCCCTTGTGTTTTAATTTACAGAACTGCTGGATGCCTGCACATTT
CATAAATATTAAACACCATTCAGCTGGGGGGGGCGGTAACCCAGGGGCTGGGGACCCAACTGCTTGCCTC
CATGTGGACTTGTGCAGAATGAATAAAAGTATCTTCCCAG

[0123] An exemplary DNA sequence of the Trf gene in humans is provided below.

(SEQ ID NO: 23)
TGGCACCGAGCGAGCCGCGATGACAATGGCTGCATTGTGCTTCATGTCCC
TTCCCATCAACATTTCTGTGCTGGACTCCTTCCACTCGCGGGTCGTCTCC
AGAGCTCAGAAAATGAGGTGATCAGTGGGACGAGTAAGGAAGGGGGGTTG
GGAGAGGGGCGATTGGGCAACCCGGCTGCACAAACACGGGAGGTCAAAGA
TTGCGCCCAGCCCGCCCAGGCCGGGAATGGAATAAAGGGACGCGGGGCGC
CGGAGGCTGCACAGAAGCGAGTCCGACTGTGCTCGCTGCTCAGCGCCGCA
CCCGGAAGATGAGGCTCGCCGTGGGAGCCCTGCTGGTCTGCGCCGTCCTG
GGGCTGTGTCTGGCTGTCCCTGATAAAACTGTGAGATGGTGTGCAGTGTC
GGAGCATGAGGCCACTAAGTGCCAGAGTTTCCGCGACCATATGAAAAGCG
TCATTCCATCCGATGGTCCCAGTGTTGCTTGTGTGAAGAAAGCCTCCTAC
CTTGATTGCATCAGGGCCATTGCGGCAAACGAAGCGGATGCTGTGACACT
GGATGCAGGTTTGGTGTATGATGCTTACCTGGCTCCCAATAACCTGAAGC
CTGTGGTGGCAGAGTTCTATGGGTCAAAAGAGGATCCACAGACTTTCTAT
TATGCTGTTGCTGTGGTGAAGAAGGATAGTGGCTTCCAGATGAACCAGCT
TCGAGGCAAGAAGTCCTGCCACACGGGTCTAGGCAGGTCCGCTGGGTGGA
ACATCCCCATAGGCTTACTTTACTGTGACTTACCTGAGCCACGTAAACCT
CTTGAGAAAGCAGTGGCCAATTTCTTCTCGGGCAGCTGTGCCCCTTGTGC
GGATGGGACGGACTTCCCCCAGCTGTGTCAACTGTGTCCAGGGTGTGGCT
GCTCCACCCTTAACCAATACTTCGGCTACTCGGGAGCCTTCAAGTGTCTG
AAGGATGGTGCTGGGGATGTGGCCTTTGTCAAGCACTCGACTATATTTGA
GAACTTGGCAAACAAGGCTGACAGGGACCAGTATGAGCTGCTTTGCCTGG
ACAACACCCGGAAGCCGGTAGATGAATACAAGGACTGCCACTTGGCCCAG
GTCCCTTCTCATACCGTCGTGGCCCGAAGTATGGGCGGCAAGGAGGACTT
GATCTGGGAGCTTCTCAACCAGGCCCAGGAACATTTTGGCAAAGACAAAT
CAAAAGAATTCCAACTATTCAGCTCTCCTCATGGGAAGGACCTGCTGTTT
AAGGACTCTGCCCACGGGTTTTTAAAAGTCCCCCCCAGGATGGATGCCAA
GATGTACCTGGGCTATGAGTATGTCACTGCCATCCGGAATCTACGGGAAG
GCACATGCCCAGAAGCCCCAACAGATGAATGCAAGCCTGTGAAGTGGTGT
GCGCTGAGCCACCACGAGAGGCTCAAGTGTGATGAGTGGAGTGTTAACAG
TGTAGGGAAAATAGAGTGTGTATCAGCAGAGACCACCGAAGACTGCATCG
CCAAGATCATGAATGGAGAAGCTGATGCCATGAGCTTGGATGGAGGGTTT
GTCTACATAGCGGGCAAGTGTGGTCTGGTGCCTGTCTTGGCAGAAAACTA
CAATAAGAGCGATAATTGTGAGGATACACCAGAGGCAGGGTATTTTGCTG
TAGCAGTGGTGAAGAAATCAGCTTCTGACCTCACCTGGGACAATCTGAAA
GGCAAGAAGTCCTGCCATACGGCAGTTGGCAGAACCGCTGGCTGGAACAT
CCCCATGGGCCTGCTCTACAATAAGATCAACCACTGCAGATTTGATGAAT
TTTTCAGTGAAGGTTGTGCCCCTGGGTCTAAGAAAGACTCCAGTCTCTGT
AAGCTGTGTATGGGCTCAGGCCTAAACCTGTGTGAACCCAACAACAAAGA
GGGATACTACGGCTACACAGGCGCTTTCAGGTGTCTGGTTGAGAAGGGAG
ATGTGGCCTTTGTGAAACACCAGACTGTCCCACAGAACACTGGGGGAAAA
AACCCTGATCCATGGGCTAAGAATCTGAATGAAAAAGACTATGAGTTGCT
GTGCCTTGATGGTACCAGGAAACCTGTGGAGGAGTATGCGAACTGCCACC
TGGCCAGAGCCCCGAATCACGCTGTGGTCACACGGAAAGATAAGGAAGCT
TGCGTCCACAAGATATTACGTCAACAGCAGCACCTATTTGGAAGCAACGT
AACTGACTGCTCGGGCAACTTTTGTTTGTTCCGGTCGGAAACCAAGGACC
TTCTGTTCAGAGATGACACAGTATGTTTGGCCAAACTTCATGACAGAAAC
ACATATGAAAAATACTTAGGAGAAGAATATGTCAAGGCTGTTGGTAACCT
GAGAAAATGCTCCACCTCATCACTCCTGGAAGCCTGCACTTTCCGTAGAC
CTTAAAATCTCAGAGGTAGGGCTGCCACCAAGGTGAAGATGGGAACGCAG
ATGATCCATGAGTTTGCCCTGGTTTCACTGGCCCAAGTGGTTTGTGCTAA
CCACGTCTGTCTTCACAGCTCTGTGTTGCCATGTGTGCTGAACAAAAAAT
AAAAATTATTATTGATTTTATATTTCAAAAACTCCATTCTTTCCTAAATA
TTTTCAACAAAGGATTTCTTTATGCATTCTGCCTAAATACCTATGCAACT
GAGCCCTTCCTTCTCAGCTCAAGATTCGTCTGGTCTTTCCCTACAGCTTT
GTGTGTGCCATGGCCACATCTCCTGGGTACAGTTCAAGGAGACATCTTTT
CTAAAAGGGTCTGCGTGATCATTAAAATATAATCAAATGTAAAAAAAAAA
AAAAAAAA

[0124] Topbp1, or DNA topoisomerase 2-binding protein 1, is a protein that is required for DNA replication. Topbp1 plays a role in the rescue of stalled replication forks and checkpoint control. The Topbp1 cDNA sequence in Mus musculus is provided in GenBank Accession No. BC049797.1 (GI:29437357), incorporated herein by reference. The Topbp1 amino acid sequence in Mus musculus is provided in GenBank Accession No. AAH49797.1 (GI:29437358), incorporated herein by reference. The Topbp1 cDNA sequence in Homo sapiens is provided in GenBank Accession No. B C151237.1 (GI:153217452), incorporated herein by reference. The Topbp1 amino acid sequence in Homo sapiens is provided in GenBank Accession No. AAI51238.1 (GI:153217453), incorporated herein by reference.

[0125] An exemplary DNA sequence of the Topbp1 gene in Mus musculus strain C57BL/6J chromosome 9, GRCm38.p1 C57BL/6J is provided below.

NC_000075.6 (gi|372099101: 103305327-103350428):
(SEQ ID NO: 11)
CGCGCCCCCCGACTTGGTGCCCGTGGGCCCTCGGGCTCCACCTAGGTGAG
CGAGCTTCGGCTCCTCCCGGCCGGCGTGGCCGCCCGGCGCCTCTTGCGGC
CTTCGCGCCTCTCCTAACCGGCGGGTGGGCCTCAGGTCCCTGGGGAGCCG
CGGCCTGGACGCTCCTTTCCCTGGGAGCTGGGCCGAGCGTGCACGACCTT
GCACGGTGGCTGCTTGCGTTCAGAGTTCGTTAACTTAGGAGCAAATCTTG
CGGGCTGTGGGTACCCGTAGCCGCAGCGGCGCCCTGCGTCGTCTTAAGCC
CCATGCAAGTGAACAGTGAGTGACTGAGGACCAAACCAAGGGTCTCAGGG
GATTCAATCAGGAACGTTCATTTTGTTCTCACGTTTGCAAGGATCCGTGT
CCTTTTTTTTCTTCTTCGACTTTGCCCACCTTCTGGGGCCCTTTGTAAAC
ATCTTGAATGAATTGATGAACCAAGCCAGATAGCTATGTCTTAGGCACTC
TTGTCTGCATAAGAAAATAGTTGATTTGCAGGCCGGGCGGTAGTGGCACA
CTCCCTTTTTTGCCAGCTTGAGTGAGGCAGAGGCCGAGCATCTCTTGAGT
GCCAGGCAGACCTAGTCTACAGAGCGAATTCCAGGACTGCCAGGGCTTGT
CTCAAAACTAAAAAAAAAAAAAAAAAAAACCAAAAACCCTACAAAAATAG
TTGACTTGTACATTTAATTCCCTGATTGACTGACTGACTTTTGTTCTTCT
TGACTGCCTTATTCTCACAGTTCAGCTATGTCCAGAAATGACCAAGAGCC
GTTTCTTGTGAAGTTTTTAAAGTCTTCGGACAATTCAGAATGCTTTTTTA
AAGCTCTTGAGGTAAGAATTAATGGATATGTCTTATTTGATACTTGAGCT
CATTTTCATGTTTTAAATGTTTTTGCTTTGTTGGATTTTATGTCTTAGAA
GTAGATAATTTTAATGAAATTTTGCTATAGCATATGCTTAATACAGATAA
ATCACTGCTATATAATTTTTAGTTGATGCAAGTTTACCATTATATTTTTT
GGGAGGATTGAAATCTATTGTGACAATTGGATGTTAACCTACAGTTTGAT
CCCCTACCCCCGCCCGGTCTGTGTCTGTTTGTGTGTGTGTCTGAGCCATC
TTCCCAGTCCTCTGACTTAGAGTTCCTGACTTGTTTTGTTTACTAACCCC
ATTGATCCTTTAAGCACTGAAAAACGGAGTCACAATGCAATAGTTTTGGT
TCATTGCTTGCTCTCTCTCTTTCTCTCTGTCTCTCTCTCTCTGTCTCTCA
TACACACACACACACACACACACACACACACACACACACACACACATATT
CATGAATGAATGAATGATGGGAGTAGTTTTGAGCTTTGCCATTCACAAAC
CCTAGTAATGTCCTTGTAGCTTGGGAATCTATTAGAAATGCAGAGCCTTG
GGATCCCAACCCACATTTGACAATTAGAATATGCATTTTAAACAAAAGTC
CCAGTGCATATTCAGGTTTGAGAAGTTAGCTGTTTTTTTTTTGTTTGTTT
GTTTGTTTTGTTTTTTAAAGTTCACTCACTTAGCAATCATCAATTGAGTG
TCCGTCATCTGACAGGTTTTCCTCTAGCATAATACTTGGGGTACACCAAT
GATCAGAACAAGCAAATATCTCTCCTCTTTCAGCATACATAGAACAGGAA
ATCGGTATTAATCAGGTGATAAGCAAGAAACTACACAGTATGGGGGCAGT
GAAAGAGTTGAGACTGAGTCTCACAGTGTAGCCCAGACTGATCTGGAACT
CTGTGCTTCTGCCTCAGTTTCCTGCATGCTGAGATTACAGGTGTGTGCCC
CAAAACCTAGTACCTATGTAATGTGTTATAAGGGGTCTAGTACTGTGGGA
AAATGAAAAAGAAAAAGCCAAAACAATTTAAGGTTTTCCAGAGGATGTTT
GTTGGAGGAGAAAGACATGGAAGGGTTACAGCTTAAAACTGAATTTAAAA
AAAAGCAAACTATTTCTCTTAAGATTATAGACTAGGGTCTTGTATAAGGT
ACTAGGTATCCGGATATGCTTATAAACAAAATACATCATGGAATGTTCAT
TTGTGTTGGTGTGTGGGGATGGTGTTTATGTGGGTGCTCTTGTGCACATG
CATTCGGAATAGTATCTGCATACCACAGTACATGTGTAGATGTCAGAGGA
CAACTTGAAGCAGTTGGTTCTCCTTTTACCCTGAGGTTCTCAGGCTGAAT
GGCAGGCACTTTTACCTGATGAGCCATTTAACAGAACCAACACATTCCTT
CTCACAGGGAAGAAATAAAACTATGTACATTTACAAAAAGAACCATTTTT
TTTTCCTTCATAAAATGTAGTCAAGTGGTAGAGGGAGTGTAGTTAGAAAG
CAGGATGACCATGGGAATATTGCTTAGTGGTAGTTGTATAGTGTGCATAA
AAACCTGGTTTTAGTTCCCGGTGCTGCAAAGCAAACCCACCGTGGTATCT
AGAAAGATCTAGACAGGTATCTCTAGGAAGTGACAGTGAAGCAGGCGTTA
TTGCAGTGAAGAACCACTTCCAATGAAAGCTTAAGAAAAGAGTAGCTCCT
GTAGTAGGACCAGAAGCAGAACCGCTTAGTAGGTCATTAGTATCTTCCAG
GTGTACGGTTTGGGGATGACTGGAATTAGCCAGGAAGGTGGATGTAAAGA
TGAGACTTGAGATAAGTGAGGGCTAAATTTTATGATTTTGTAGTCATGAA
GTTGTATGGTGCTGATGCATCTTTAATCCCAGCTCTTGGGAGGCAGAGAG
ATCTCTATGAAATGGAGGCCAGCCTGGACTACGGAGTTAAGTTCCAGGAC
AACCAAGGCTACACAAAGAAACCCTGAATGGGGGGCGGGGGGGGGGGGGG
AAGAATTGGGACTGATCCATGTGCCCTTTCTTTTTGTCCAGTGGTTCATT
TCTGCTATATTCCTCAGTTTCTCTCCATCTTATTTTTTTGAGATAAATTT
CTCACTGTTGTAGAGCCCACTGATTTGCTAGACTGGTTGGCCAGGGATCT
GGTGGGCTCCAGTCTCTGGCACCCACCCCACTGCCCAGTATTGGGATTGT
GAGTCCATGCCTCCACACTAGGCTTTTTACATGGGGCCAAACTCAGATGC
CCAAGCTTACACTGCAGGCATTTTACCCACTGAACCCTCTGCTCAGCTCC
TGGGTGGTTTCTTTAAAAGGATTACTAACTGTGAAGAATAGAGAGGAGAC
CAGTTCAGAGGCTTCTGCATGGGTCTAGGTGAGAAGCATGCATGGGTCTA
GGTGAGAAGCTTTATTTAATAAGGAAAGGGCTGGGTTTGAAATTAGCTCT
GAGCACTTAGTAGGACTTAAATTTAGGGTACTAATTTCTACTACAATCTT
ACTTGTTTTTTCTTTCAGTCAATAAAGGAATTACAATCAGAAGATTATCT
TCAGATTATTACAGATGAGGAAGCATTGAAGATAAGAGAGAATGACAAAT
CGCTTTATATCTGTGACCGTTTCAGTGGCACTGTTTTTGATCACCTTAAA
CAGGTTTGCTGTTTCTAGAATACTTATTTGCTCTTTCACCCTCTCTTTTA
ATCTGTGTGTACCTGTGCTTGTGTGTGATGTGTCTGTCTGTCTGTGTGTG
TGTACATGCATGCGTGTGTAGGGTCTCATTCTTCATGAAAACTATCATGA
GTGCTACGAGTACCTTGGGATTCTTTGGGCTTGGGGTTCTTAGATATCTG
AGCTGCTTTATTGGCTGTTGCTTTTTTGAAAAGCATACTTGAATGTTTCT
CAGTTGTTATAGCATAAGATTATTGCATTAAGATTGTATTTCTTGGGAAA
GGTGCCCTAGTGGTTCAGGGCACGTACTTCAAGGGATCTGAATTTGATTC
ACAGCACCCATGTCAGGTGGCTCATGACTGCTTATAATGCCGGTTCCAGT
ACCTCCAACTCCAGGTTTATCTGTACAAAATGTGTGTATACCTACATAAG
GATACATACATACATACATACATACATCATATAATTTAAAATAATAAAAA
GTTTTATGTTGTAAGAGTTTTTACCTGCATGCATGTTGGTGCACCATGTG
CACACTTGATACGCTTGGGGGTCAGAAGAGGGCATTGGATCCCTTAGAAT
TGAAGTTACAGGTTGTAAGCTACTGACTAAGGTACTGGGAACCAAACCTA
GGTCCTTTGTAAGAACAATAAGTGCTCTTAACTTTTTAAAATTAATAATG
ATAATAATAAGACAAGGAGGAAAGTTTGTTTTAAGTGGTTGAAGTTTTGG
AGGCAGTTATGAGCGCTCTTGTGGTTTTGCTTTGGAGGGTGCGTGTCTAT
TTAGTGCTTGCTTGAGAAATTATGTGATAGTCTTTTTCTCCTAACATTTC
ATGGTTTTCTGCAGTAGCTGTTAGCTTCTGTGAGTAACTAATAAAATGTC
CCAAGTTTAATTTTGTGATTTTGTCCCAAACTTTTTACAGCTTGGCTGCA
GGATTGTTGGTCCTCAAGTGGTCACATTTTGTATGCGCCACCAGCAATGT
GTCCCAAGAGCTGAGCATCCAGTCTACAACATGATAATGTCTGACGTAAC
TGTATCCTGTACAAGCCTGGATAAAGACAAACGGGTAAGCACTGAAAGCA
GCCGGGCTGCCCCCACCTGACTTACCCAGGGCTCAACAGCAGCAGGCCTC
ACACGTGGGGTTCACAGCTACAGGCCTCACACGTGGGGTTCACAGCCAGC
AGACTTGTGCATGGCTCCCAGTGGTATTTTTTTCTAAAGATTATTATATA
ATTCCATCATTTCCTCATCCCTTTTCCTCCCTCCAAATCCTCTCATACAC
CATTCCTTGCTTTTTTTTTCAAGTTTTCAAATTTATAATCTTTTTTTCAT
TGTTATATGCATAAATATATACATAATCTTAGATAAATACAACCCGCTTA
GTCTGCATAATGTTACTTATATGTATTGGTGTGCTCTTCCCTGGGGAAAG
TGGAATATGATTGTAGAGACACTGGTTAAGTGCTTTGTTTTGATTTAAAA
GAAAAGTTACTTTTTTTTCTACAGTCAGTGAGTTTTGTTTTAAATCATTT
AATTTTTGCAGAACAGAAAATCTTTCAAGAAAGGATTCTAATCTGGGTGT
TGTAGTGCATGCCTTTAATCCCCAACTCTTGGAAGGTAGAGAAAGGCAGA
TTAGTGAATTCCAGATCAAATAGGGCTACATATTAATAAGACCTGTCTCA
AAAAAAAAAAAGGAAAGGAAAGGAAAGAAAAAAGAAAAGTGGCTGGCACC
TTTAATCCCAGCACTGGAGAGACAGAGGCAAGTGTGTCTAAGTTCAAGGT
CAGCATGGTCTAAGGCCAGGATAGCTAAGGCTACACAGAGATGCCCTGTC
TCGGGGAAAAAAGAAATAATCAGAAGCAACATAGTTTTGAATTATGGAAT
TTAAAAGAATAAATAAGGTCACTTATTAATGATAATAATTCTACCTGAAA
GTGTTTCTGTAGGTGACTGAGGGTGCTTAAACTTAAGAAGGCTATGATGT
CATTAGCAATATTAATCTGCAAGACCACATTGTTATAAATGTGGTTGATT
AGAAAGTATTGTTAAAAAGTATGTGACTGTTCAAGAAAACAGTTCTTTTC
AGGTTTTTTGTTTTTTTGTTTTTAGGGGAAGGCTGTGGATTGAGCCCAGA
GCCTTGTGCATGGTAGGCAAGCATTCTACTACTGAGCTACATCACCAGCC
TACAAATAGCGATTTTTAAATTTAAAATTGATACACATCTTTCCAAAAAT
AATTACTTATTTTTTTTAGTAGCAAAAAACATTTGTATGTTTAGTCTATC
AACAGTAAATGATACTTATGGGGGCTGGAGAGATGGCTCAGCGGGTAAGA
GCACTTATTGCTCTTAGAGAGGACCTGGGTTTGGTTCCCAGTACCTGCTA
GATAGCTCACAACCATTTAAACCTTCAGTTTCAGGGGGTCTATCTGATGC
CCTCTTGTGATCTCCAAGGCATGCAAATAATGTATAGACATATACTCAGG
CGAAAGAAACACTCATACACATAAATTTTTTTAAAAAAATTACGTGATTT
TTTTTTTTTTAAAATAGAAGAATTGTTGTTTTCTCCAGCATTAACATATT
TTCTTTTGGGTCTATAGGAAGAAGTTCATAAATACGTACAAATGATGGGT
GGACGAGTATACAGAGACCTTAATGTATCAGTCACTCACCTTATTGCAGG
AGAAGTTGGGAGCAAAAAGTACTTAGTTGCTGCTAATCTGAAGAAGCCTA
TTTTGCTACCTTCTTGGATAAAAACCCTTTGGGAGAAGTCACAAGAAAAG
TGAGGCACATTCATATGCTTTGTCTGTTTGAAAAAATGATGCATTTGGAT
AGTTTTGACGGTGTTTGGTTTTCATGGGGAAGCTTTATGGTATCTCTGGA
CTTGTTACTGAGAAACAAAACAGGGTCTTTGTTCATTTCTCCAGTGACAG
TAGGGGAGATGGTCCATAGATTCAGCAGTGCCTAGAGGGCAAATGCTTTG
ATAATGAAGTTCTTTTCTGCATCAAATACATCTAAAATAATTCAGTTTGG
CTTTTGTGTTGCACTGTGTAATACTGTTCCCCAGTATTAAGATGGAGAAT
AAAGTACCTACTTGGGCAGCTCTGTTCCCTGCTGGGTAGGGTGGAGGTGC
AGAGAGGGGTAGAGGTAAGATTAATATACATATATGTAAGCCATCTGCTG
AGAGGTGATCATTCCGTGTACATCGAGCCTATTTTCTGCACTGGGCTGGA
CATTAGATGTATGTAGAGATCAGAACAGGATAACAGTTTACCTTATGGAG
TTTGGAGGTACACTTCTGTTTTCCCTAAACTTGGGTTTATAGTAATAAAT
CCGGGTATCTGAATTATATCTGCATTCTGTGGCATTTTTCTGCACTTATT
TCAACATTATTCAGCATGTACTCAGTACATTTCCTAGTTAGTACCAGCCT
GGTGAAGTTTAGCACACCTACTTATTGTGGCAACAAAATGGCAGTACTAT
TGTTGGAACTCTGCCGAAAAGCATTCCTTTTACTTATCAAGAGTAATGGA
AGAATGTGTCTGTTTTATACCAGACAACCTGTGTAAACGTTAGGTTTTTA
AGTACAGATCCAGTCTTATAATTCTGCCAAATGCTCCCCATTTATTAGCA
AGGACTTAGGAGTTAATAGTGCTTTCTTTAAGATAGTCTTGGGACTGTTG
CTGAAATACAAGTTTTTATTAGAGACTTGGGACTGAGCTAGATGAGCAGT
TAGTGTAATCCTCAATGTCAGTTTTCCTTTCTGAAAAATGTTTATAGATC
CTAAAGAATAGCAACTGAGCAGACAGGGAGAGCAGTAGGAGCTAGCACGG
TCTGAGTACTCGGGCTCAGTTGTCTCCTCTTCTTACTTTCTCCAGAAAAA
TAACCAAGTACACTGATGTAAACATGGAAGACTTTAAGTGTCCTATTTTT
CTTGGTTGCATTATCTGTGTGACTGGCTTAAATGGAATACACAGAAAGAC
AGTCCAGCAACTCACGGCTAAGCACGGAGGCCAGTACATGGGACAGTTGA
AGATGAATGAGTGTACACACCTCATTGTGCAAGAACCAAAAGGTAAACAA
TGCCTTAGATGTGGTTGAGCGTGCAAGTCCTGTTTAAGCACTAATTCTCT
GTAGACCACCTTGTGTTCTGATGTGTCATTGCCTTAGTTTATCTGGGTTT
TTTTTTGCCTTTTAAATTCTTGAGAAGATAGTTTGGGTCACAGTCTAGAA
AAATTAAGGAACTGTCCTTGTTATTGTCCAGAATATGGAATAAACATAAA
ATATCAAAAGTTGCCCATGATGTTTCACTACCTGACTTAGACCTTGATGA
AAAAAAAACAAAACTCTTCACAGCATAACAAATATGTATAGCTGAGTGGT
ATTCTTTCTCATGACTAACTTCAGAAGCTTAGTTAAGCACTTAGTGGGAT
GAATTGGTTTATATTACTGCATTTGGATTGGGGTGCGGGTGGGTGGTATG
GGTAGAGTTCCCGAGTGCTGGGCAAGTGCTCTACCACATTTTCCAACTAG
TCTATGAACTAGAATTTCTTTCTTTCTTTCTTTCTTTCTTTCTTTCTTTC
TTTCTCTTTTTCTTCTTTTTCTGAGACAGGGTTTCTCTGTGTAGCCCTGG
CTGTCCTGTAACTCACTCTGTAAAGTTTTACTATTGAGAAACTTTAAAAT
TATTACTGTTTTTGATATTTCGGGAATTTTATTCTAGGGAATAGTTTTGC
TAATACTCCTAAAATCAGGGTTAGGGTTTATACAAATATATAAGAAGAGT
CTTGCTGTATTTTTAGTAACTCCTTTGTGTTTGTACTGTTTTACTAAGCT
ACCTTGATAAGAAGCATTTGAGAGTGATTGTTAGTTACTTGATAATTGTC
ACTTGATCAGGAGATTGGTGTAATGGTTATGATAGGACAGTTACTGTGGC
TTTTCTCAATCTAAAGGCAGTCTGTTTATCTATTAACTATGTTTTAAGGT
ATGCGGGATTGAGCCTAGGTCTTGCTTATGCTAGGCAAGTGCTTTCCCAC
TGAGCAATGACCCTAGTCCTGCTTTCTGTTGGAGACAGGCTCTCGTCAAG
TTTGCCATGCTGCTGTGAGATGTATGATTTTCCTGTCTTACAGAATATAG
ACTCTACCAGGCCCTGCTCCCTTGACTTTATGGAGTACCAAAAGTTCTCC
ATAGAGCGGGGTGTCAAAGGAGGAGGAGGAGGCAGGAAATCAGGGCTACA
CATCTTTGTCTAGTCAAAGATAGTATTTATTACGTTGCATACATTTATGG
TATCTGCAGTTGTATTATATGTTCTTATTAAACAACATTAATAGCCGGGC
AGTGGTGGCGCACGCCTTTAATCCCAGCACTTGGGAGGCAGAGGCAGGCG
GATTTCTGAGTTCGAGGTCAGCCTGGTCTACAAAGTGAGTTCCAGGACAG
CCAGGGCTATACAGAGAAACCCTTTCTCAAAAAACCAAAAAACAGAAACA
AACCAAAAAAACAACATTAATAATGTCAAGCATGATGGTGTCTTCAGTCC
CAGTGCTTGGGAGGCATAGGCAGGCAGATCTGTGTGAGTATAAGTCCAAC
CTAGTCTATCCAGGCTAACTAAGCCTACAAATGAGACCCTATTCCAAAGC
TGGTTGGCTGGAAACTTGACTCAGTGGTTAAGAGCACTGGCTACTCTTTC
AGAGGACCCTAGCTTGATTCCCAGCACTTATATGGCAGCTCACAACTCTC
TGTAGTTCCAGTTCCAGGGTGTCCAACACCCTCTTCTAACCTCCTTAAGC
ATCAGACATGCAAGTAGTACACAGACATACATGCAGACAAAACACCCAGA
CACATTAAATAAGAAATAAAAAATTCGCTGGGCGTGGTGGCACACGCCTT
TAATCCCAGCACTCGGGAGGCAGAGGCAGGTGGATTTCTGAGTTCGAGGC
CAGCCTGGTCTACAGAGTGAGTTCCAGGACAGCCAGGGCTACACAGAGAA
ACCCTGTCTCGAAAAAAAAAAAAAAAAAAGAAAGAAAGAAAAAATTCTTA
AAGGTAAATATATTTACTGGTAAGCTTTAATCATTACTTTTGTTTGGAGT
GACTTTTAAAAAAATAATTTACTATGAACTAACTATATAGTCTATGTATT
TCTGTATTTCTTTCGTAATGAACACAGGACAAAAATACGAATGTGCCAGG
AGATGGAATGTGCACTGTGTGACCCTGCAATGGTTTCATGACAGTATTGA
GAAAGGCTTTTGTCAGGATGAATCTATATACAAGGCTGAAACCAGAGTAG
AAGCAAAGATGGTGCCTGATACTTCAACACCCACTGCTCAGAGCAATGCT
GAAAGTAAGTCTCTTTGAGATTAAAATAAACAATTACTTGTTCACATGAT
AATTGATTGACTGGGGATGTAGCTTAGTGGGAAAGCTTTTGTCTTGCAAG
CCCAGGAACTCAGTCTTAAACACCAAGGAAAAAGTGAAGGAGTTGATTTG
TTAACAGGACCATAGGAATATAGTAGGGACTTTATTTTCTCCCTTTGCCC
CTGGGTAGAATTAAATAAAATAGCCATGCGTAGACAGCTTTCCAGAACTT
CTTTTGTATGCCTTTTGGAATGAGAGATTGCTTTCTTTCACATCCTAATT
CACACAAGAGGGGATTAAGAACACTAGTGTATGGGCTTAAGGGAAGAGTT
GTTCGCCCCTCTCCACATTTGTTTGCTTGGTTAATTGGTTTTTCAAGACA
GGGTTTCTTTGTATAGCTCTAGCTGTCCTGAAACTCCCTCTGTAGATTGC
TGAGCCCGGCATGGCCCTGGTGGGGACAGTTCTTGCCCCTGGGACAAGAC
CCGGTGTGGGCCTCCTCAAGTGTTGATGGCTGGTGGGTAGAAGACTTGTT
GTGTAGTAATGTACGTATTTTCTGGACCAGCAGTGGGCGAGTCTTTCCTT
CTGAAGAATGTCCTCCCTGTTAACTTTAATGATTCCATGATAATTAGAAA
TAGAGTCCAGGAGAGTGTGGCTGTGTCTCGGACCTTCAGGACAGCCCTTA
AGGATATGGGAAAGAACTCTAAATACGTGAGTTCAAAAATGTAAGGATGC
AATATGAATTATGAGGGGCTTCACGAATCTAAAGGAACAGAGATAGCTAC
ACTATGAGCCTGCTTGTCAGAAAGATACAAAGGCAGGCGGATACAAATGT
CCCAGGCAGATTCCTGGGACACAGCAAGATTAGGTCCAAGTGTGGTTGAA
ATGATAATTTCCAGTTCTACCTAGCTAGTTTAGCATCTGTGTGTAAGAAA
CTAGCAGATCTCTGAATTCTTTTGCAATGTTAAAAGAAAATGTGTTTGTT
GTCTCCTAAGAAACAAAAAAGTCACTGATGCTGATTCATAGGATAATTAA
AAAAAGGAACCTGGAATAAATAACTGAATTGTTATGTAAATAAAAAACTG
GGCTTTTGGTCTACCTGATGTGAACTAGCAGAAAGCAGTAGCAGATCCTT
TTTAGAATTTTCTCTAGTGAGAGCTCTGGAGAACAAAAACATCTCTGCAA
GAATTTTTCTTAATTTTCCAACTTGGTAGGAAGATAAAATAATTTTTTTA
TAGCAGTTTTTCTGACTATGGTCAGAAAACCCATGAGCTATCCAGATAGC
TTTTAGAATTTTTCCTAGCAGAGAGAACTGTCTCAACCAGAGTTTTTAGA
ATAGTGAGAAAAGGCTGTCCAGAGCAGAGCAGAGCACATACACACTCATA
CACACACACACACACACACACACACACACACACACACACACACACACACA
CACTAACTCTCACACACTCACACACTCAGACTGAGAGATCGAGCAGTCTG
GAAAGCCATCTCAGCAAAACCTAGGCTGCCAGCTTGGACCCACAATTAGA
CTTCGAGTTGTTCTTTTCGCTGCTCTCAGACACTACTTCTCTCAGAACCC
CTCTCTGCCAAGGCTAGTCCCTGGCAGTAGATCATTGAGCTGGCCTCAGA
TTGAGATTGCGTCCACTTTCTGAGCACTGGGATTAAAGGCGTGTCCACCA
TGCCCAGCCTATATTTTCTGTATTGGTTTACTGTAATGATTATAAATCAT
TACATAAAAATTCGGCCTGCATGAAGTCCTGAGTTTGATTACCTTTTGAT
TACTACTACTGCATTATAAAGCTGGATGTGGTGGCACATACCTATAATAC
CAGCACTTGAGAGTTGGAGATGGAGGGATCAGAAGTTTAAAGTCTTCTTT
GGCTACAAAGAGTTCAAAGCCAACCTGGATTTGGTGAGACTCTGCCTCAG
AAAACAAAACAAAAGGCCAGGGACAGTGGTATATAACCTCAGTGCCAGCA
CTGCGGGCTGAGGCAAGTTCGATGTGGTCCTGATCTGGGTAGTGCAGTCC
TTTTCAGCCTTCCTAATGCTGTGACCCTTTATTACAGTTCCTCGAATTAT
GGTGACCCCGACCATAAAATAATTTTGTTGCTACTCTATAACTGTAATTT
TGCTACTGTTATGAATTGTAATATAAATATCTGTTTTCTGGAGGTCTTAG
GTGACATCTGTGAAAGAGTTGTTTGACCCCCAAAGGGCCTCAACCCACAG
ATTGAGAACCACATGCCCCTACATCCACATGCCACTCTGATGTGTCAGCT
AGGCTAGCATATTCAGTCAATACTGAGGTCTTATTTCGGAAGTTCCATTT
AGCAAAGTCTTCCTCCTTGGACCTTAAAGCCAGCCTTATGGGCTATAAGC
CACTTTAAGGAAATATTAAATATAATTTCACCTAAAGAATGAAACTTTAT
AGCCGGGCATGGTGGCGCGCGCCTTTAATCCCAGCACTCGGGAGGCAGAG
GCAGACAGATTTCTGAGTTCGAGGCCAGCCTGGTCTACAGAGTGAGTTCC
AGGACAGCTAGGGCTACAGAGAAAACCTGTCTCAAAAAACCAAAAAAAAA
AAAAAAAAAAAAAGGATGAAACTTTTATTTTTTTTTTCAGTAAAAATCTC
TGAATTTTTGTAGGTTTATGCCTTAAGCCCTTTCTAGGAAAAGTTAGTTT
ATTAGGAAGCAGGTAATGGCTCTTTTACCTCAGGAATTTTCATTTCCTTT
CACATTTTAGGTCACACGCTCGCAGATGTCAGCCATATATCCAACATAAA
TGGCAGCTGTGTAAATGAAACAATGTTTGGTTCAACTACTAGCAAACTTG
AATGTTCCCTTGAAAACCTAGAAAATCTGGACATCAGTATGTTTCAAGCT
CCTGAAGACTTATTAGATGGCTGTCGGGTATGTCTTTATTATGTAACAAA
GTCAGAAGGACAAATAAGAGACCTGAGTTTAGGGCTAGCTTGGGCTACAC
AGGTCCAGACATCCATACACCCTCAGCCTGACTCCAAAGACCCCTCACAG
ATGGACTTGCTCCTTATGTGCGTAAGCAAACCTTGCACTAAATTAGGAAG
CTGACACTTGGCACACACACGCTGTGCCTGTGGGTCTGTCTGGGCTGTAG
CTTCATCCCTTCTATTGCTGAGTTCTTAAGTCTGCTCTGAAACCTTACCG
CCTACTTTACAGATGTTCATCCTTATCATTTGTTTACAATACATTAATGA
CGGTGATCATTTCATGTTACATTATGTTATTTAAAATATAACTTAATCCC
CATGAGTAAAGTGGTTATTATCTTGAAGCTAATACTTAGATGATTAAAAT
CCATTTTTAGGGCACTTAGGCTAACGTGCTTGTTGCTAAGCCTGACAGCC
TGTGCTCAGTCCCTAGCACCCCATGTGGTCGAAGGAATGAACGTAATCCT
GTCCTGTGACATGTACTTGCGCCACGCCCACACGTGTATATGTACAAGAC
TTAAATACAATAATGTGCTTTCTCAGAGTCCTAGACAGATAATACTGTGG
TCTTAAAGTCTGCCTTCTTAATTGTGTACAAGACCTTGGGTTCAGTGCTC
AGAAATAAAAAGAGAAAAAGATTAGATTTGTAAGATTATTTTCAGTGTGT
GCATGGAAGCTCCGTGATGGAAGTGTCGCGTATTTAGACCCACACACCCC
ACACAGTGCTAGGAGGGGAGTGAGAAGCTACACATTTTTCCTCAGAGTAG
GCAGTTAGGTTTATTGTTAAGGCCACATATCTGTGATCGCTCCTAAGATT
TATCAACTTACTGGTGGGATAGAACGACACTTTGTGTAATCTTTTTTCTT
TGATCTTGGGACAGACTAGTTCTAGATGTAACTTTGAATTTTTTTTTTTC
TATGTAGGAAGTATTTGATTCCTAATTTTTGCTAGGATGTATTCTAGTAA
TGGTGATAGTTTGGGACATGTGGAAATAGATTGTCCTTTTTGAAATTTTT
TAAAGACTTGAAATTTTTAAAAGACTTGAAAAGTAATGTCGGCTATCCCT
CACATCTACAACCCCTGTACACATGTTTCTTCAAAGCATTGGGCTCAGCT
CCTGGATTTGTTGTTTTGGTTAATTCAAGTCGAAAAGAAATTTCAGGAAA
GATAACTATGTAGGAAGGAGTTGGCTCCGAGCCTTGAGGAGTTTGCTCAG
TTCATATGGTTGGTCAGTACCAACTGAAAACATGCAAGCCTGGGTGCTCC
TGAGTTTACAGTGAACTGCAGTGTTTCTCTGTAATTATTCATCTACAGGC
AGTCACTCCTTTACAATTTAAGGAGCTATTTGTATGTTAGAAATAGCTCT
GCCACCCACCAAACCTGATGACCTGAGTTCCATTCCTGGGACCATAAGGT
AGGAGAGAACTGAGTCCCTCATGTTTTCCTCTGGCCTCCATATATGTATT
CTGACACCTGTGCATGTGCACACATATGTACACACACACACACATATACA
CACAGTGAAAATCTTATAGCAAGCTGTGCACCATCATTTAGAAGATGTTG
CAGTTTGTCCTGTAATTCATCTGCGGCCTCAACCCTCCTTCAGGTTTTTA
CTGAGAGATGACAGTGCTGTGGTTAAAATACCAGTTTTAGGCTGAGGAGA
TGGGTGAGTGGGGCAGGCACTTGCTGTGAAAACATGGGGGCTGAAATTTG
ATTCCCAGCACCTATGTAAAAGCTGTGAGTGATGGTGTCCAGCAGTGGGG
GGTGGAGGGGAGCTAGCTGCTAGTGTGTGTGCACACATTAGATGTAGACT
ATAGTTGACTCCATGTGTATCCCAAAATGTACATGAAGTATCTTGTTTAC
ACACAGTGGATACAGTTTTCCTTTAAATTTGTTTCTGTTGAGGAAAAAAA
TAACTTGAGTATGTTAATCCAAAGCAAATGTTTTCTTTGCAGATATATCT
TTGTGGTTTTAGTGGCAGAAAGCTGGATAAGCTGAGAAGGCTTATTAACA
GTGGAGGTGGAGTTCGATTTAATCAACTAAATGAAGATGTAACTCATGTA
ATTGTGGGAGATTATGATGACGACGTGAGGCAGTTCTGGAGCAAATCATC
TCACAGGTCCTGTCAGTCTTCAGCTCAGAGCACTTGGTACAGGGATGGTT
TGGGTTAGCTTTGCATGTCTGTGCGTGGAGCTGTGGGAATGATGGCCAGT
GGAGTGACGATCTTCTACTCGGGAGCCTAACTCTGCTCTTTTTATAGGCC
TCACGTAGTGGGAGCAAAGTGGTTGCTGGAGTGTTTTACTAAAGGATATA
TACTTCCTGAAGAGTCCTATATCCACACTAACTACCAGCCAGCTGGAATT
GCAGTTTCCGATCAGCCTGGAAACCAGACAGCTGTCTTAGACAAGAGCGG
CTCATTCTCCAAGAGCGCCCTTGTTCCTGCTGAGAGGCTTCAGCAGGCCG
ACGAGGATCTGCTTGCTCAGTATGGAAATGACGACTCCACGATGGGTGAG
GAAGAGTTGATTAGCTTTTGTAGTTAAGAAGCAATAGATAATGCATGATA
GCTGCCATATTTTTATGAACATTTTATTTTCAAAAACTTTTAGATTTGTA
ACTTTGTAACCAGGCAAGGCCATCAGGCTCCAAATGATTGAATCATGCTC
TCAGTAGCTCTATGTTGAGTATGAACTGTTTTTGTTTGGGGTGTGTGTTT
GTGTGTGTGTTGGTGCCAGAGGTCAGAGGTGAGACCCTCATGGAGCTAGA
GTTACAGGCATTTGTGTCTAATGTGGGTGCTAGGAATAGAACTCGCGTAC
TTTGTAAGAACTGTGCATCCTTTTAACCTCTGAGCTATCTCTCTGGCACC
TCTGTGTGAATTGTAATGGTAGAAAACAAAGGCCCTCTGACTGGGCTGTC
GGAAGTCTTTCCTGCATGCAATACTGTTCCTGGTACTGCTGTCTCAGCGT
ATAGTTTCATCGGTGTAGTAAGGTAAATTACCAACAAAGAGTTAGAACTA
ACCTTTTTAGAGTGTATTATTTGATACATCAAAAGATAGGGTTTTGTGGT
GACTGTCACGTACTGTTTGTTTATGAAAATAGAGCATACCCCTGTGCCAA
GAGCATTCCTGTGAAGTCCTCCTGTTTTTCGCTTTCTAGTTTGTGTCCTG
TGTAGGTTTATAGATGAGCCTTTGGCCTTCGTGGCTAGGTTGTTTAGTTG
TTTACATTGCTTATTGCAATGCTGAGGCTGACTCAGGCGTAGGCTCTATC
ACTGAGCTGTTACTCTTTTTATTTTTAATTTTAAGGCTTAGTCTGCTCTT
GGACTTCCTCCGTGAGGCAGGTAGATTTTGAACTTGGAGTCTTTCTGCCT
CAGCTTTCTGAGTAGTTGGTTTTTCAGGCCTCTTCTACTAGGGCTGGCTT
CAATTTACATAAAGTATATGTACTTTGTAGTTGTAAAGACATAGTTTTCA
GTTCTTTTTTTTTTAAGATTTTATTTCTTTTAAAAAAAGATTTTATTTAT
TTTACGTATATGAGTACTATAACTGTACAGATGGTTGTGAGCCTTCATGT
GGTTATAGGAATTGAATTTAGGACTTATGTTCGCTCAGTTCAACCCTGCT
TGCTCTGGCCCAAAGATTTATTATTATATCTAAGTACACTGTAGCTGACA
GCTGACTTCAGATGCACCAGAAGAGGGCATCAGATCTCATTACGGATGGT
TGTGAGCCACCATATGGTTGCTGGGATTTGAACTCAGGATTTTTGGAAGA
GCAGTTAGTAGTGCTCTTACATACTGAGCCATCTCATCAGTCCCCAGTTT
TCAGTTCTTTTTGTATGTGTGTGGTTTTTGTTTTTTGTTTTTTTTTGTTG
TTGTTGTTTTTCGAGACAGGGTTTCTCTGTGTAACCCTGGCTATCCTAGA
ACTCACTTTGTAGACCAGGCTGGCCTTGAACTCAGAAATCCATTTACCTC
TGCCTCCCAAGTGCTGGGATTAAAGGTGTGTGCCACCACTGCCCAGCCAG
TTTTCAGTTCTTATTGAATTTTAATTGTTTAATTGTGGAAAACAAATTTT
TTTATTATTTTTCTAAATCTATTCAGTGGTACACATTTGAGTTTCAGCAC
TTGCGAAGCAGAAAGAGGCAGAAGGAGCTTGAGGCCATCCTGGGCTACAT
AACAAGCTGCAGACCAGCCAGGACTAGAGAGACCGTGTCTCAAAAACAAA
ACAAAGAAACAAAACAAAGCATGTTTACTAGACGGTGATTTTTCAGGAAA
TTTGGTTTTCTACTCTGGTTTCATACTTAGAATAGACATGACAGTTGTTC
TCTGATTGACGATGGTGATACTTAGCATTTGGGATAAACCTGAAGATGGA
ATGAATACAGAGTCTCCTTTCACTGTATATTTAAACCTAAGTTTTATAAG
TATTAAAATTATCAGACTCTTACATTCATGTCTTTGCTAGAAAATCACTG
TGTAGCTTTGGTTGATTTGGATATTGCTGTGTAAACCAATTTGGCCTTGA
ACTGACAGAGATCCACCTGCTTCTGTTTCCCAAGTATTGGGATTAAACCT
GTGCATCACCACACCCTGTGCAAATAAACTCTTTTTTTTCTTTCTATTAT
TCACTGTACATCCCAATATCCATCCCTTTCCTCCCAGTCCCCTCCATAGC
CCCTATTCCCCGTCCCCCATTCCCCCTCTCCTGTGAGATGGGGGACCCCC
ACCCTCCAATCATCAATCACCCCATCATGGCACATCAACTCTCTGCTGCA
CTTGGTGCGTCTTCTCCCACTGAGGCCAGACAAGGCAACCCAGCTAGGGG
GATGGGATCCACAGACAAGCAACAGATTCAGGACATCCCTGACTCCAGTT
GTTAGGGGACCTGCATGAAGATCAAATAGCACATCTACTACATATGTTTG
GGGAAGCCTGGGTCTAGCCCATGTTGGTGGATTTTTGGCTGGTGGGAAAT
AAACTTTGTTTTGTTTTTTCTCAAGACAGGGGGAAATAAACTCTTAAGTC
TAGTAATTGTCAAATAGAAAACTTGCCTTTTTCTTTTCCAGTTGAAGCTA
AGCTATCTGAAGCTTTAGAGCCTGAAGTCGGGCCTTGCCCTGGTTCTGCT
CACCGTGAGCCCTGTGATGATTCCACTCACATTTCTGTGCAAGAGGAAAA
CAAGTCGTCTGTCAGTCATTGCATCCTTGATGACTCTACAGTTCGTGAAG
AAGGCTTATTTAGCCAGAAGAGTTTCCTTGTTTTGGGTTTTAGTGTTGAA
AATAAATGTAATATTGTAGACATCATAAGAGAGCATGCTGGCAAGATTGT
GTCCCTTCCCAGCAGAATTGTTGCTGACTATGCTGTGGTTCCACTGCTGG
GATGTGAGGTAGACGTGACGGTGGGAGAAGTTGTTACAAACACGTGGCTG
GTAAGAAGCTGTGGCAGTCGGAACCCTGTTTTGAAGGAGTATTGGCTGCC
AGAGTCTTTATGTTTACTTTTGAGCCTGTTCTGTTTATCTAAATTGGCAT
TTGGTTTGGGCAACGGCAATTTTAAAACATTAGCCTGGGAGAGCAGCAGG
ATGGCCCAGTGGGTAGAGGCCCGAGCTGTGGGAGCCTGAGCACCCGAGCC
TGAGCCCTAGACCCTGGTGGGAGAGAGAACTCCCACGAGTCCTCTGACCT
CCGTGCTGCAGACACTTTCTCTCCCTCCTTTTCCTTTTGCTGTGCCCCCT
CAAATGCACCGGCTATACTTCTGGCCTCAAACTCAGAAATCTGCCTGCCT
CTGCCTGAGTGCTGGGGATTAAAGGCGTACACCACCACGCCCAGCCCAAA
CCTGTATTTCTTGATCCTAATACTAACATCAAGAAGTTGCTATCACAGGG
CTAAGGCACCAGTATTCTTTAAAGTAACTTGCAATTGCTGTATTAATCCA
TCTTACTGATTTTGATATGCAAATGTGAAGGATTGGTATCTGTATTTTTC
TTCAAATATCATTTGGAATATGTCAAGAATGAGCATACTCAAGTCTATGT
AAAATTCCTTTTTCCTTAAACTAAAATTGCTACTATTATAACTTGAGCTT
CTCTTAACCACTTGTTTCTGATAGTAGCTTTATTGCTTTTGTTTTCAAAG
GTTACGTGTATAGACAACCAGACATTAGTTGATCCCAAGTCGAATCCCCT
CTTCACACCAGTCTCAGTAATGTCGGGAGTGACTCCTTTAGAGGACTGTG
TGATTTCCTTCAGTCAGTGTGTGGGAGCAGAAAGAGATTCCTTGGTATTC
TTAGCAAATCACCTTGGAGCAAGGTATGTAATATTTTCAGTATATCTCCT
GCCTGTGAGTGAGTGTGCATGCACACACACACACACACACACACACACAC
ACACACACACACACACACACACACACACACACACACACAGTGTTAGGCAA
TAAGCGGAGGGCCTTGTACATGCTAAGCAAGGGCTCAACTATGGCAACCC
TAACTGCATCAAGTTTTGTTTGTTTTGGCTTACTGGAAAGTGTATAATTA
CATTTGCCTAGGATTTTGTTTGTATATGTGGTTGATGGGTAAATACTGGG
GCATACACAGCTAGGTGGATATCTGGCAAACTTGCAAGGCTGTGGGCAGG
CATTGTTTTTTTTTTTTTCCCCCATTGGCTTAGTCACCATGAAAGGCTGT
TACTAAATTGTGCTTCTCTAAGCACTGTATGTGCCCTTCAGTGCCTCCTC
CTCTTCCTTCTCTTCCCCCCTTCTTCCCCCCACCTCCTTTCTCTTTCTTA
TTTTAAGTGTATATCTATTGCTTGTTTTTATCGAGAAATACAAATGGAGC
ACTTTTTTTTTTTTTTTTTTTTTTTTTGGTTTTTCGAGACAGGGTTTCTC
TGTGTAGCCCTGGCTGTCCTGGAACTCACTTTGTAGACCAGGCTGGCCTC
AAACTCAGAAATCCGTCTGCCTCTGCCTCCCGAGTGCTGGGATTAAAGGC
ATGCACCACCACACCCGGGGCAAATGGAGCACTTTGCAAGGAATGCAAGG
AACACTTTGGAAATAAAGGAATTAAAAGTTTCCTATAAAATCCTCATTGG
TCATTACGTAGTAGCATTTGAAAAAGAGTAGAAATCAGCTGTATCAATGC
ATTTCCATTAACCAACCTCATATTTAATGGGGATATTTTTAGGTTAAGAG
CATAATGAGCATAATGCTTTTAAGCAACACTCTGAACATTCTGAGGGGTA
GAGTCACAGCAGGGCTTCTCTGTGTAACCCTCTCTCCGTAGACCAGTTTG
GCCTTGATCCAACTCAGGTCGGCCGCTCTTGCCTCTAGAGTCCTGGGATT
AAAGGCGTGCACTGCCACCACCCAGAGTATGTTTCTCTGACATTAACCAT
GCTATTATTTTTTTAAAATGAGCTAATTGTGTGTTCATTTGCTTTATTTC
CATGTAAAATTTTAGTGTTCAAGAATTCTTTGTTCGCAAAGCCAATGCAA
AGAAAGGCATGCTCGCCAGCACACATCTTATAGTGAAGGAACCGACTGGT
TCCAAATACGAAGCTGCAAAGAAATGGAGTTTGCCGGCAGTTAACATTTC
ATGGCTCTTAGAAACTGCGAGAATCGGGAAGAGAGCAGATGAAAACCATT
TTCTGGTTGACAACGCACCTAAACAAGGTTAGAAGTCCTTGTTTTTTTTT
TATGTATTTTACAACTTGATGGTTTCTGAAATAGGGATGTTCCAGTACTT
GCTTTAAAACATTTGTATGACCCTAACCTCAGTCAGTGGTGCTTACTTCA
GAACCCCTGAGTGAAACACGGAAAGCAGATCAATGAAGAAGCGCATCAGG
GTCAACCCTCGATTAGTCCTCAAGGCGAGTGACGAGAAGGTGACCCCCGA
ATGGCTGTTAGAAGCAGTTTTTATACTTTTTAGTGGCACAGGTTACATCA
GCAAGGTAACAGTTCATACTTATTGCCTAAGCATATTGACCTTAAAATCT
ATTGGCTAGCAAGCATGACACACATTTGAACTCTACCTAGGACTTTCCAG
GGGGTCCGATGACTATGAGTCAGTACGTTCTGCTGTTTTTCTGAGAATTT
TTTTACTCCAGGATGTTCCTGTGGGTGAATGGAACTTGGCCTAGCTTTGA
CCCCAGGTGAGAGGGGGAAGCTGTAAGGAGGGTGTGAGACTGGAAAAGCC
CTTAGGGTCCCTCACAATCTTTTATTTCTGCTATTGTTTATGGTAGGTCC
TGTGAGTCTTGGTTGTTTGTCAGTGGTGCCATCTCTCAGCTTAGTGTGTA
CTGTACCAATTGTTGTCAGTACGGCCTGAAAGGAAAGTGCACACACAGTC
TAGTTCAGTGCTGTGCAAGGCGTGAGCCTCTATCCCAGTTAGTGTTAATT
CCTTTTATGGCTTGCGCTAGCATGCTGGGTAGCTAATGTGCTCTTGCTGC
TTATCTGGGTTTTTCGTATGTTCCCACAAGATAACTTACGACTTGGCTAC
TGTCCTAGTTACTTTTCTATTGCTGTGATAAGGAACCATGGCCAAAAGCA
GCTCGGGAAGGGAAGCATTTATTCCAGCTTACAGTCTGTAGTCTGTCACT
CAGGTAAGCCTGGAAACTGATGCGGAGGCCATGGACGAGTGCCGCTCACT
GGCTTATTCCTTATGGCTTGCTCAGCTTGTTTTCCTTTACCATCCAGGGA
CCAACTGCCCAATAACGTACTGCCCATAGTGAACTGGGCCTCCCAAATCA
ATCATCAATCAAGGAAACATGCACAGGCCAATCTGGTGGGCGTACTCTCA
GTTAAGGCTCCCTTTTCCCGAGCCTGTGGCTGGTTGTCGTAAAACCAGCC
AGCACAGCTATTTTCCTTTGTCTTGAGTTTGAATGCCCCTTTCTCTGGGA
TAGATGGCTTCTTTGACTTAACAGTTATGGCCTTGTCTCTTCACTTTTCT
CCTTTTTGTAGGATTCTTGTTGCTTAGAGAGGCTGGTTTGCTTTCTTGTC
TCAGTCAAACTATAAACTATAAAGGCAGGAACTGTGGAAGTCCTGTGGAT
TCTTTACTTTTATTGTTTGGCAATGGGCGTGCTGTGAAGTAGTCAAAAAC
GTTTTGTTTAATGTTGGATAACAGTGGAGAAGGCAGAGATGGGAGGATGT
GAACAGCCTCTGAAAGGCAGTGTTGCTGGGCAGACTGCAGAGCCCAGTCA
GCATCCTGGGAGCACCTGAGAGCTGTTAGCTGCTACCAAGGCGGCCTAGA
CATGTTCCGTTGCCACAGCAGACTAGCTCACTAGACTTTCCAAAATTTTT
GACTACACTTAATTCTAAAGACATCTTTCGGGAATTTTCTTCTTACTGTT
TTGACTAGGTTAATACACTGTTTTGTTTTGTGAATGGATTTATAATTATT
TGTTTCACTTAATGTGTGTGTCTGATTCAATATATACATTCATGTACACA
TACATTCATGCACACATATGTACACATATGTGTATGTGTGAGTATATTTG
TGTATGTGATGTATGAGTGTGCATGTCTGACCACAGGTCAACATGGTGTG
TTTTCTCTGTCATGCTCCATCTTGTTTTTAGAGTCAGGGTCTCTCACTAA
ACCTGGAGCTCACTGATTAGGTGAGCTCCAGGAATCTGCCTGCCTACACC
ACTGCACCCAGCTCTCCTTGGATGCTGGAGACCTGAATTCAGGTCTTCAT
TCTTGCATAGTAAGCACTTTACTCACTGGGCCATTTCTCCATTCATCACT
GTATATTTTAATATATCTTCTGGAGTCAGGGGCACATCTCTGAAGCCACA
CTTGAAGAACACTAGTGAGGATGAAGCAGGGGGGTCACATACATGTGTGT
CCAGCCTATGTTCTATGGAATGCATTCATACAAAGATGGCTTTGACTGTA
GCCCAACACAAAATCATAAAATACCTGGGTTGTTTTTTGTTGTTAAACCC
TGATTGTGATCTTCTCTTTGTAGATGACAGTGTTCTGTTGCAGTGTCAGT
CAACAGGTTCCACGCATCTGCAAGGCTTTATGAGACCTGTCTCAAAACAA
GTTTATCTGGTTTGTTTTTTGGAAAGTAGGAATATAACTTTATGGTTTAA
AGTGTACTGAGACAATATGTAAAATCTAACAAAATACTAAAATGTCACTT
TGCCTCATATGAGAGAAAAGGCTCATATTAATGGCTCATTTGTTTTTTGT
TTTGTTGTTTTTTTCATTTTCAATTTGTAGAACAAGTTTTAGAAACTAAG
ATACCAAATGGAGTGAGTTCAAATCCAGATTTACCAGCACATCCTGACGC
ACACTTGGAAATTCACAGAAAAAAGGCGGTTACACCTTTGGACATGAATC
GCTTTCAGAGTAGAGCCTTCCGTGCTGTCATTTCACAGCAGAGGGGGCAG
GACCCCACCTTTCCACCAGTACGGCAGCCCCTTACTAAGGAGCCCTCTTT
ACACCTGGACACACCATCAAAGTTTCTGTCCAAGGACAAGCTTTTCAAGC
CATCCTTTGATGTGACGGTAAGGTTTGAAGGAAATGTTACTAGTGCTAAT
GGTTTTATGGTTTATAAAGGTAGAGCCCCAAATTGTGCGTTACTACTAAA
GTTTGTAATAGAAAGTCATCCAGAGATGTTGATAAATGGGCGCTCAGAGC
TGAGATAACAGCTGTGCCTATATAATATGAAGTTAGGACTCTGGGTTTGC
TCATGAACACAGTTCTAGGCAGATGACTTAACCTCTGAATATCACTCTGA
AATGAAATAGTCTAATGTAATGGTTTTGTAAGCTTTAAAATAGCAAATGT
GTTGCTACCGTTTCTGGGTGACTTAGTGTGCCTTGGACTTGCTGAAAGCC
CTAGTGTTGCCTTACCTTTTCAGTCACTCCTCTTAAGGAGACAAGTGTTG
TTTCTCTGTGTGATCTGAGCAGTGGGGCCAACACCTTATGAAATTTATTC
ATGAATCAAAGACTATTCAAATAGTCTTCTTTCAGATTCTCAAGATTCCT
CCCCCCCCCCACCTTTTTTGGGGGAAGGCTTTTGGCTTTCTAAGTAGCTG
TTGAAGTAAGTCATTGCCTGAGATTTCTGTATCCTTGAGCCCACTTACTT
TTGATAGTTTGCTTATAGGATGTTAAGAAATGACATTTTAGCTGCACCTA
GTAGTGTTTCCTATAATCCCAGTAACTCGGAGGCCAAGGTGGAAGATCAT
AAATTCAAGACTTGTCTAGGTTACACAGTGAGTTCAAGGCCTGCCTCAAA
CAAAAAGTACTTTTGTTTTTGTTTTGCCTAGAGTTTTTTGTTTGTTTGTT
TGTTTTGTTTTGTTTTTTTCTGAGATAGCTTTTCTCTGTGTAGCCCTGGC
TGTCCTGGAACTTGCTCTGTAGACCAGGCTGGCCTTAAACTCAGATCTGC
CTGCCTCTGCCTCCCTAGTGCTGGTATTAAAGGCTTGTGTCAGCACTGTC
CAGCAATTCTTTGCTTTAAAAAAAAAAAAAAAGAGTTGTGGAGGTAGGTC
TCTAATAGAATAGTGGCCTTGTGGACATGAGAAGACTATGGGTTTCATCC
ATAAGAAATCCAGGTGCATTTTAGACATTTTTACTACTGTGTTTAGGGGC
AGATTATTCCGAAAATAAATATTGATATCTAGTACCATTTTATTCTAGGC
TGATGTATATCCCTAATCTGAAAATCAAAATGGCTCCTTTAGTATTCTAC
AGTGGTCCTGCAGTTTTAAATCCCTTCCTCTGATTAGTGCTCTGCCCCAT
GAGCCTTCAGCAGAGGAAAGGCACTGTCTTAGTGCTATGACTTCTGGAGT
CAGGATGACCATGCTTCATGCTGCCTTCTGTCTGACACGTGGGAACTCCC
TTGAGCGTCACCATTCTTGTCCTGGGATCATGTTAAGTCACGGAATGAGT
CCCAACAACTTGTACAGTTCTCAGACCCCTTAAGTAGTAAACACAGAAAA
GGGATGCACTGCTAAGTGAAACTGCAACCAACATTTGGGCAGCCACTGTC
CGAGCTCAGATAGGACTCATTCTGTGTGCCCTTCCTCATGCTCGGTATTT
CTGTTTCTCCTCCCCACCACTTGTCAGAGTTGTGTTGTGCTTGGTTTTGG
CACTTACAGAGGCAGTGTTAGGAAGTCTCTTGCATCTGTTTTGTTGGATT
TGTTTAGCCTCTATTGTGGAGATTTGCCCATGTTCTATATAACTGTAGTT
AATCATTTATCATAAGATGGTATTTTTTCTATCTGAGGTAGTGTTTGCTA
TATATCCAGTATATTTATATGAAAACTGTAATTTCTGATTCCCAATATGT
GCTTATTTACCCATCCTGTATATTAAGTGATGTTTGCAAGTTTCTTGTGT
TGATAATTCTTGTTTCGGTTTTTGGTTTTGGTTTTTGATTTCTCTGTGTA
GCCCTCACACTGTAGACCAGGCTGGTCTTGAACTCTCGGATTTACCTGTC
TCTACCTCCCAAGTTCTGGGATTAAAGCCTGTTCCACCATGCCCAGCAGT
GTTGGTAATTCTTCTTCTGAGATTTCACATGGTTTTGTTTTTTGTAAGTA
GTCGCTTTGTTAGTTGGCACACTGATGTGTGACTTGTATTAATTAGAATA
TAAAATGCAACTTTTGATTTTATAAAAGATCCTGTCTTGTTTAATGCTTT
CTGGCTTGAGGGCTGTCTGCTGTGGTTTTAGGATTTCAGTGTGCTGTATT
TATCTCAGTTCTGTCATGTATATAGTAACTTACACTTGCTTCATATACCT
TTATATTATGTTTGCTTGATGTTCTTTTTTCCTTGTTTCCTTTTTGTATG
TAGAATAGAACCCCTGCTCCACTTTTGAGACAAGGTCTCCTATATAATGC
AGACTAACCTTGAATTCTGAGATCTACCTGCCTCTGCCTGTTGATGACTG
GAGTTAAAGGCATGGACCTCCATGCCTAGCTTTTTCTCTTTTCTTTCCTC
TCCTCTCCTCTCCTTCCTTTTTTTTTTTTTTTTTTTTTTTTTTTTTTTTT
TAAGATTTTAAAACAGTTTTACTGTATAGATAGCCCTGATTGGCTTGGTA
CATAGAGCCAGGTATTCATCACTGTTGTGTATGATGCTGGAGAATATGCC
TAGGGCTTTGTGCATGTAGTACTCCCAGCCGAGCTGTATCCCAGTACAAA
CCATAAACATGTGTTGATCATTTGCCATTGTGGTTACTAGCTAGTAAATT
CCCTACTCTTTGCTTAGTTTCAGCAAAGAGTAATTGAGGCTTTTCCCTTC
TCTCCTTTCTAGCCTCTCCGAATCTTGGGAGAGTTAGCATTAAAGGTGTA
TGGGATTGTCAAAGCCTAGAGTTGACATGACAGGTAGTGCATCCTCTCCA
TATTAACTGTCCACTTCTCCTGCTGGCATATTTTACTTAGTTTGGATATT
ATAAAATTTATGCAACTGCATTCCTGAACATATTCATTCATATTATTTCT
GATCTTTCCTTCTTGAGGTGTGTCACTTTTTGTTAATCCACATCAACAGT
AGAAGGATCTGTTCTCAAGAACTTTGTTTCTCAAGAACACTTCTCTCTTT
GTGATCATGCATTCCTTGGTATCATGAGGCTGGATGAAAGAAAAGAATGG
CTTCCTCCATTGTAGTCTGCAGAAACCCCAGATGAGAGGCATCTATCTAT
CTGTCGTAGAACTTTCAGCACCCATTGTCATGAAGGGATATTAGAACTGT
CCTCTAAGGTGCCCAGAACACTTACGCCTGTCTCTAAAGGTGTCAGATGC
TTGCCCACTTTCAGCGTTAAGTGCAGTCCTGGTTAGCTCTGAGCTCTGTG
GACTGCTTGGGAAGTAGCCAGACCCTGCATGGAGCTCTCTGCGTCCAGTT
CTTAGCCTCCCCTCCCTTTGAGCCTATATTTTATATCTTGTACATTTTGT
TGGTTCTTGCCTCAGTCTGACTTTTTACCTAATCTTAAAATTAATTTCTT
ATACCCATCCATTCTTTCTGGTTTCCTTCTGTGTTCACTTTAGTTTGGGG
TATTTTATGTAATTGCAATTACAATTCTTAAGTGTGGTATGTATGCACTG
CTGAAAAGGTAAGTATGCCTAATGGTTTTGTTTATCTGTTTTAAAATCTA
TTTTTTATGTGCATGGTTCTTTTGCCTACACATATGTTTATGCATCACCT
GCGTGCCTGGTGAACATGAAAACCAGAGGGTGTCAGATCCCATGGAACTG
GTGATACATATAGTTGTGAGCCACCACGTGAGAGCAGGGGATTGATTCCC
TGGGTCCTCTAGAAGAGCTCTCGCAGTACTCTTAACTGCTCAGCCAACTC
TCCAGCTCCTTACTTAATGCTTGGTGAAGAATATGAAATTCTTTTAACTC
TAGTATAAAAATAAAAATTAAAGTTCATGCTTTTTATTTCAGAGAAAAAG
AGGTCAAAGATGTAATCTCTTTTTTCCTTTCTTCACTACTTTGTCTCTTT
CCTCTGTGTCCCCCTCTTCCTCTCCTCATTTTTTCCTTTTTCCTGTTCTT
AAACACAGGATGCACTTGCAGCCCTGGAAACCCCAAATGCTGCCAGCCAG
AAGCGGAAACTAAGCTCACCACTCTCTGAAGTCATCGTCAGAAACCTGAC
AGTTGCTTTGGCAAATAGTTCCCGAAACACTGACAGTCATTCTGCCAGCC
CTCAGCTGAAGGGTGCCCATTTGGAGGAGGTAGACATGGTTTTCTTATTA
AATGGAAGGTGTCCCTAATGCATGTCAAAGAACTGTGGCTGGTCTGTTTC
TTTATTCTCCATGTGCAGGAAGAGACTCGGAAACCACTTGACAGCGTTGT
GGTGTGTGTGAGTAAGAAGCTCAGTAAGAAGCAGAGTGAGCTCAATGGGG
TCGCAGCATCACTGGGAGCAGAGTACAGGTAGGGACAGCTCTGTGTTGGC
GGCGCCAGCCACAGCTCAGACAGCACAAAAAGCCTGTATTCATTTATAAG
GAAGACTTGGCTTTGCCTGCTTGTGTGCATTATCTAATAAAACCTCTCCG
ATTAATTAAAACTGTCCTCTTAGGTACCCAGAACACTTAAGCCTGTCTAT
AAAGGTGTCAGATGCTTGCCCACTTTTAGCCTCCAGTGCAGTCCTGGTTA
TGGACTGGTCATGGGTTTATAGTCAGCACATCTGGGACTGACTGCATTTA
TTATCAATCTTAGTGATTTCCTGTGAGTAGTACTGACTGACCACTGTAGC
AAACCTTCCTAGATTCCCCTGACTTCCACACTCCATTAAAGACATTTTAG
TTTGCTCTAAATAAAAATTTATTTGTGTGTGTGTGTGTGTATGTTGGCAT
GGTGGTACACTCCATTAATTCCAGCGCTTGGGAGGCAGAGGCAGGAGGAT
CTCTGAGGGTCTACATAGTTCCAGGATAGGCAGGGCTACAGAGTGAGAGA
CCCTGTCTCTAATGTTTTCTTAAGAGACGTAGTCTCATGCTGTGGTAGAT
TTCTTGCCTAGTGTACTCAGAGGCCTGAGCTCAGTTCTCAACATAGATAG
TTTTGTGATAGGGACTAACTTGATAGAGTGAATAAACAGGGTGGTGGCCA
GTGACTGGACAGTGGATTTGAATGCCTTAAGTTTTATTAACTTGAAAATA
CTTTTTATTGTAATTAGAAAGTGATATACATTATAAGACAAAATGGAAGG
ATTCTTAAAAATATAAAGAAGATAGTAGTATTTTAAAAGTATTCTTCTGG
CATCTACACTGTATAAATGCTGTGTAAATGGAGTCGCTAGCATTTGTCAG
GATACAAAATCTGCCATTTACTACTCTTGCTTATTCTCTAGTTCTTTGAG
TTCTGTGTGTCAGAACATTCTGTTCAGAGTAGACTGCTGTTTCCCTTAGT
TATTCCTCTTGCATATTTGGTTGTTTCAGGTGGAGTTTCGATGAGACTGT
TACTCATTTCATTTACCAGGGTCGGGCAAATGACAGTAATCGAGAATATA
AATCTGCAAAGGAAAGAGGGGTGCACATCGTGTCCGAGCATTGGCTATTA
GAGGTAAGCAATGCTTTTCCCTCTCTTCCTTGTTGGTTGAAAATACACAA
ATATTTCAGAGCACAAACCAGTTTCATTGAATGCAAATAAATTTGCTAAT
CTTGGCTAACTGTGTGGTGGCATGTCGTGCCAATACCTGCCCATTTCATG
GCTGGGACATGAAAGAGGTCGTGAAAGGGTTGGGATTGGACTGCTGTCCA
GGGCACACCCCGAGGGCCTGTTGGATGCCATGGGAACTGTGCTTGTAACA
TAAGGCCTTGGGACACTCAAAATCTGAGCTATATGTAGGTCATGCTTGGG
GCATTGTATCGTTTTAGCATTAGAACTTAAATTGTTTTAAGATTAATTGG
TTGATTGGTTGATTGATTATTTTTGTATTTTTATGCACATGAGTGCTCTA
TCTACTTGTACACTCGAGTGCCTAGAAGAGGGCATCAGACCCCATTATAG
ATGGTTGTGAGCCACCACGCGTGATAGATGGGGAATTGAACTCAGGACCT
CTGGAAGAACGTACATCTCTCCAGCCCTAGAACTTAAAATTTTTATTGCT
TGAATATTTACCAAGTTTTAAATGAATACTTATATCATGATTCCTTTCCC
TCATTGACTATTAGATGAAGAGTAGCTAAGGGGCTGGAGAGATGGCTCAG
TGGTTAAGAGCACTGACTGCTCTTCCAAAGGTCCTGAGTTCAATTCCCAG
CAACCACATGGTGGCTCAAAACCATCTGTAATGAGATCTGATGCCCTCTT
CTGGTGTGTCTGAAGACAGCTACAGTGTACTTACATATAATAAATAAGTC
TGAGAGGGAGAGGGAGGGAGAGATTGAGAAAGAGAGAAGCTGAAAGAAAG
GGTGTGGAAGGTAAAGGCTCTCACCACCAAGCTTGACTATTTGAATTTAT
TTCCTGGGACCCATACAGTGGGAGGAGATAACCAACTCCTACAAGGTCTG
CCCCCCATATAAATAGATAGAAATTAATTTAAATCATATAAAAACAAAAG
ATGTTTTTGAGGGTAGTTGCTAGCATCCTCATACACTATAGCCATGCTTT
TCTTGGTGCTCTCTGGAATGGCTGATACAGAGGCTAAATGCAGAGGCAGG
ATTAGAGTTTATACTTTAATAGACAGTAGATTGTAAAAGTGGGGATAACT
TGTTCCACTTTGTTTAATTTACTGTGTGTGCATAGGTGTGCTCAGAGGGC
CTTTTACTCTTTTTACAGTTTTAATATGGTTTCAGTGATTAAACTCATGT
CACCAACTTAATAGGACAAGGACATTTACTGGCTAAGTCATTTCCTGGGT
CCCAATTGGTTATTTACATGCTAGAGTTTTCCACTGTAAATTAATTTCCT
TCCTTCCTTCCTTCCTTCCTTCTTCCTTCCTTCCTTCCTTCCTTCCTTTC
TTTCTTTCTTTCTTTCTTTCAAAGATTTATTTATTTTTTATATGTAAATA
CACTGTAGCTGTCTTCAGACACTCCAGAAGAGGGCATCAGATTTCGTTAC
GGATGGTTGTGAGCCACCATGTGGTTGCTGGGATTTGAACTCGGGACCTT
TGGAAGAGCAGTCGGCACTCTTAACCACTGAGCCATCTCACCAGCCCCTG
TAAACTTCTTTCTAAAGTGTACACTTGTGTTTCAGTGTGCTCAAGAGTAT
AAGCATCTTCCTGAATCTCTTTATCCACACACTTACAATCCCAAAATGAG
TTTGGACATCAACACAGTGCAAGATGGGCGGCTCTGTAACAGCCGGGCAC
CCTTGGCAGTTTCTGCATCTAAGGATGATGGGGTAGGTGGTGTGGACAGT
GAGCCCCTCCCAAGCTGCATGTAGATGTCTGTGAAACTTTATGCAGTGAA
CTTCGTTTGAGAAGTTGTCATTTTTCTCTTTGAATAGCCAGATCATCTGT
CTGTAGAAGGAAATGAGACAAACACTATGGGCACAAATGACAAAGAGTCA
CCTCTGTTGAATGGGAGTGGAAGAGATGACTGTAAAGGAGGTAAGACACT
TGTCACTTTTTACCCCTTACTCTCACGCCATGGCCTCCCAAGACAGGGTT
TCTCTGAGTGGTTCTGGAACTGACTCTGTAGACCAGGCTGGCCTCAAACC
CAGAGATCTGCCTTCTTCTTTCCAAGTGCTGGGATTAAAGGCCTGCGCCA
CCACACTCAAGTGCACTTTTTACTTTTGACAACGTTTGTTTTGACTTACA
GTCCCAGCTGTATTTTACCACTAATAGAAGAACTGGGATGGCCTTCCAGC
TTTGCAGCCAAACACTGACTTCTCTCCACAAAACCCTAGAGAGGTGTCTT
CTTCCAGTCTGAGTCAGCTGCTCATTCTCCTGCAGCTTCGCATCAATGAG
GAGCTGTGCCCACTGCAGGAGCACTTGGAATTTCTCTTTGCAGTCACAGC
TTGACTGTTCAGCAGAAGAGCCTTTTGACCTAACTTGACTTTCATGCATG
CCTTTGTCACTTGCCTTAGTCACTGCTAGCTTTACTTTAGAGCTAGAGAG
AGGAGTGTGACTCTTCTCTTCACTTGAACACTAAGCCACTGTAGGATGTT
AATTGAGCTAATTTTAGAACTGTTGTTTCTTAGGGATTGCGGAAGTCCTT
GGAAGGAAAGAGAGGAGGAACAACCAGTCAGCATATACAGCTTTTATCTG
TAGCTTTTGTGTAGATATGGTTCACACAGAATCATTTGGAAGAGTTGGAC
AATTGTTAATATATGGTTGCTACAGCTCTCCATTTGCAAAAAAAAAAAAA
GAAAGAAAAAAAAGCAATGTTTTAGTGTAGCTGGAGCTGAGAAATATATA
GTAAAGGGTACATTTTTAGCTCAAACAGCCTTAGAAAATGAAAGCCCAAG
CTTGATTGGTTTGGACTCTGATGAAGACCTGGCTACATCCTATCATGTCA
CTATCAGAAAGGGAAAGAGTGCAAGTGGGTGTCACCACATGAAAGACTGC
AAGCAAGTTAGACCAGGCTCACTGTTGTCATAGCAACCCACAACAAAACT
AGCCTGAGTTCCCCCTGAAAACTGCATTACTTCTGGGGTGGTGTTGCTAA
TGACCCAACCCCCTTAGACTAGATCTCACTCTTAAGGAGTCTCCTTACTA
TACCACACCACACACAGGAGGGTGTGCACTCAAGCCAGAGAAGAGTGTCT
GGGAAACAGGGGCTGCTCCAGTCCTGGGTTTTATTTGCTGGTGTAGTGTG
TGGCTTCTGTCCTGCTTTATTTTGCTGTTTCCTGTTCAGTGTCACTAGCA
GTTATTTTGAATTTCTTGCTATTACAGATAGTGCTGTGCTGATTACCTTA
CTTAGATGTGTTACTCTCTGACTTCTCCTTATTCAGCCTGCCTACTAGAA
CTTGCTTTCTGACTTAACTGTTCCATTCTGTTTATTTCAAAAATGCCTAC
ATGGTATCTACTTCAGTGTCTATAATGGGAAGGAAAGACAAAGACGTTGT
GGTGTGTTCTTTCAAGGATTAGTGAAAGCTCGGCTAGTGCTTTACAGCAG
CAATCCCAGGCTTGCTGCTGAGGCAGGAGGGCATTCAAGGCCAGCATGAG
CTATGTGGCAAGATCCAAAGCAAATGGACAGACAGCTATACATACAAATG
ACTGTGAATCTCTGTAGTATGCATCCATGAGAAAGGGTCAGACACGAGCA
GGGAGCTCCTCAAAGGAGCAAGTTTTCCTCCAAGGGAGTCTTCATCGCTT
CAGAAACAGTCCTCATGGCCGCCTTTGTGTTTTGTGACATTTTAGCCTTG
TATTCCTGTATAAATGTTCAGTAAATGGCAATTCTTTGTTCAGCTAGATC
TAGACAAAATAGTGTAAGATATGATTGACAAGAGAAGTTAGTAACTGTGG
TAATGCTTGCCTGTAATCCCAGAACCCTAGAGACTGAGGCAGGGATTACA
ATGGGAGGTCAGCCTGGCCACACAATCAGATCTATCTTCACACCAGCAAG
GTGGAACGGGGGGGCACATCTTTCTTGATTGATATCGATTACTCTGTTTC
TAGCTCTGACCCAGGCCTTGGAGATGAGAGAGAACTTCCAGAAGCAGCTG
CAAGAGATCATGTCAGCCACCTGCATTGTGAAGACGCCTGCCCAGAAGAC
TTGCATGTCAAGAAGCAGCTGTAACAGCGCCTCTTCAACTCCTGACAGCG
CTCGCTCTGTGCGGAGCGGACGAAGCCGAGTCCTGGAGGCACTCAGGTTT
GTGCGCTGTGTTGTTTGCATAAAAGCCCCTGGTAACTTAGGTTGGTGGGT
TAGGCTCTTTTTGTTGTTTTTGTTTTTCGAGATAGGGTTACTTTGTGTAG
TCCTGGCTGTCCTGGAATTCTGGAATTTGCTCTGCATACCAGGCTGGCCT
TGAACTCAAAGATTCATCTGCTTCTGCCTCCCAAATACTAGCAATAAAAG
GTTTGTGCCACCACACAGGACTTTAATTTTCTTTTCTTTTCTTTCTTTCT
TTTTTTTATTTTAAATAAAGTGGAAATTAGAATATTGAGACCAGTGAAGG
GGTTTGTGTTGGCGCTTTGTTTAACTCAAACAGTATGCATTATATCCCAC
TGTCATCTGGGGTTTTGTGTATTGCTGCTGAGTTTTTTGTCTTGTTGCTC
AAGCAGTTGTGAGTTCTTACTTTGAAGTATGTGATTTTAGGTGCACTTTT
CCACTTGACGTAAAATCCGGGAGCAGTCAGTCCTCTCTGTCACTTAGTGT
TAGCACTAGACAGTGAGGACACAGAGTACTTCAACTTTAAACAGCTTTTT
TATTATCTTGTGTTTGAGTGTGATATGTGGGCGTGAAGACATGCATGCCA
TAGCACCCATGTCGAGGTCAGAGGACAGCCTGTGGATGTCACTCCACCCT
TTCCTCACTTTTTATTTCTTACTTGAAGTGTGTGTACGTTTTTCCTCTGT
GTTCTAGGAAAGGTGCCACAGTTCTTAATGCAGTATAACTTAAGCTCATT
GAAATTACTGTATTTTTCTTTGTCTTTATAGTTATAAGACAAGGTCTTAT
CCCAGGCTGGCCTGCAATACTGTGGAACTAGTGTTAGCCCTAAACTCCCA
ATCCTCCTGCTTCAGTCTCCTGACTGCTGGAATTACATGTGTACCGCCAC
TCACCCTCTCTCTGTATTGCTGTGTAGCCAAGGTGGGCTTTAAATAAACT
TGGTGTTTTTCTACCTCAGTTTACCAAGTGTTGGGTTACTGGGCCCACCA
ATAGCATTTTTTTACCTCTCTCTGTATTGCTGTGTAGCCAAGGTGGGCTT
TAAATAAACTTGGTGTTTTTCTACCTCAGTTTACCAAGTGTTGGGTTACT
GGGCCCACCAATAGCATTTTTCTACTAGAAGAAAAAATCTCTGAGGTGTA
GGGTGAGAGATTTGAGTCCATGTTGACTTCATTTATATCGTACTCTGTGT
TTTCCTTGGGGTAATTTTGAATTCTGAGAAAAGTAGCTTTTCCCAACAGT
GCAGGTCATGTTTTAGATATAGAACCTTACTCTGTGCCAGGTCGTTTGGG
ACTAAAAGGCTTTCCTGGTTCATTGGCTTGTTTGTTTTTAAGACAAGGTC
TCACTATGTAGCTTGAGCTGGTCTGGAGCTCAGAGATCACCTGCCTGACT
CTGCCTCTGCCTCTGCCTCCATCCACTTTGGGATGTAGTCCTTACTGTCC
TGAAACTCAATATGTGGACCAGACTGGCCTCAAATTTACAGAGACCCGCC
TCCTACTGGCTACCGAGTCACTTACTAACTGCATGTAGCTTGGTGATGGC
GCAGGCCTGTAATCAAGGCCCCAGGGAGATAGCCAGGTGGTAAAGGTGCT
TCACGCCAAGCGTGATGACTTGAATTCCGTCCCTGGAATGGTGGAAGAAG
AGAGCTAACTTCTGTAAGCTGTCCTCTGGCCTCCACATAAGGTCACTGTG
TCACATATGTGTATACATACACACAAAGTAAATAAATAAATGTAATGAAA
ACATTTTTAAGGGACTAGAGAGATAGCAGTTAATGAGTGCTTGCTACTCT
TGTAGAGGCCACAACTAACTGCTTGTGACTACAGGTCGAGGGGATCTAAC
AACTTCTTTTGGCCTCCCTGGGCACCCACATCTGTACATATAAACAAAAT
ACTTGAAAATATTTTAATGAATTCATAATTCTGTAATTCAGTAAATGTCT
ACCATAGACTGGAAATTTTGGTCACCAAGTGTACTGGCTAGTTTTGTGTC
AACTTGACACAGCTGGAGTTATCACAGAGAAAGGAACTTCAGTTGAGGAA
ATGCCTCCATGAAATCCAACTGTAAGGCATTTTCTCAATTAGTGATCAAG
GGGGAAAGGCCCCTTGTGGGTGGGACCATCTCTGGGCTGGTAGTCTTGGT
TCTATAAGAGAGCAGGCTGAGCAAGCCAGGGGAAGCAAGCCAGTAAAGAA
CATCCCTCCATGGCCTCTGCATCAGCTCCTGCTTCCTGACCTGCTTGAGT
TCCAGTCTTGACTTTCTTTGGTGATGAACAGCAGTGTGGAAGTGTAAGCC
GAATAAACCCTTTCCTCCCCAACTTGCTTCTTGGTCATGATGTTTGTGCA
GGAATAGAAACCCTGACTAAGACACCAAGGGTTGAAAGACCCATTAGTTA
TATCTTCAGCAATGTCATGTTAAAAATACACTTTAAAGCTGGGTATAGTG
GCACCCACGAGGCAGAAGCAATGGATCTGTGAGTTCAAGACCAACCTGGT
CTTCAATGTGAATTCCAGGACAGCCAGACCTACATAGTGAGACTCAATGA
GATATAATTTAATTACTAAGACAGGTACGGTGGTGCATACCTACAGTCCT
AGCACATGGAAGCTGCTGAGGGGAGCTCATGGTCGTCCTTCACTACAGAG
AAGCGTCTTTAAAAGAAAATGTAAATGCAATTATTAACCCACTAGCTACA
GTTCTCTAAACATCACCCTGGTTCCCTAATTTTTTAGAATTTAAAAAATA
CCCGGGCTTGATGGCGCACGCCTTTAATCCCAGCACTAGGGAGGCAGAGG
CAGGCAGATTTCTGAGTTCGAGGCCAGCCTGGTCTACAAAGTGAGTTTCA
GGACAGCCAGGGCTACACAGAGAAACCCTGTCTCAAAAAACAAAACAAAA
AAAAATTAAAAAATATATAATTATTTTTGAAATACAGTTATAGACATTCA
CTTAAATTGTCTAGTAGAAATATTTTAGAAGTAATTAACTGGGTGTATTG
GTGCATGCTATGCTGTGTAGGTTTTTGTAAACTTGGGTCATTTAAGAAGA
GAAACCTCATCTGAGAAAATGTCTTTATCACTCTGGCGTGTAGGTAAATC
TGTAGAATATCTTGGCTAATGAGTGATTTAGGAGGGTCCGGCCCACTGTG
AGCCCCTGGGACTTCCTTTGAGCAAGCCATGCAAGTCAATAAGCAGTTCT
CTTCTACAGTCTCTTCAGTTCCTGCCCGGACTTCTCTCAGTGATGGGCTA
CAGCTGTAGGCTGTAATAAATCTCACCAGGCTGCTTTTGATCATATCTTA
TCACAGCAGGGGAAGCAAACCAGGATGCATGCCTATAATCTTAGCACCTG
GGAGGCAGAAGCAGGAGAAGCACCTCATTTAAAGCCATACTCTCAATAAT
GAGACCATATGTCCAAAAAAAAAAAGAAAAGGAGAAGAAAGGATGTCCTC
TTGATTTATTCAACAAATACTGTGTGTCTTTGCTGCTTACTGGTTTTCCG
CACTTGGGTTCAGTGTGGCTGCTATTTAACACTGTCCCTTTTGTTCCTTA
GGCAGTCTCGGCAGGCAGTGCCTGATGTGAACACGGAGCCGTCCCAGAAC
GAGCAGATCATTTGGGACGACCCGACAGCAAGGGAAGAGAGAGCAAGGCT
TGCCAGCAACTTACAGTGGCCCAGCGACCCCACACAGCATTCTGAGCTTC
AGGTTGAGATAAAAATGCCGGATGACTCTCCCTCTCGAAAGCCTGTGTAC
CATTCAGAAATTGCTGAGCAGGGTAATAAGACAGACATTGACTTGTGCTT
AAGAATGCTGACCTCTTAAAGACACCATGGTTCTCTGTTACATATGCGAA
TCAAAATGAATTTTCTAGTACTGTTTCAGTCAAATGAGAAATGTTTTTTG
ATTTTTAAATATAGAAATTTAGCTATAAGTTTCTGAAGAAGAAATTGTCA
TTTTTGAAGCTTCTAGCCTCCATACAATCTAATCTGGGGCCAGAATATTA
TCAGCCTCTGAGCCTTACTGCTGACTTAAGTTCACCCTTTCTAATTCTTC
TGAGCTCTAGCTGGATGGCTCAGCTTAGCTGGTCAGCTGTAAACTCCTCT
CCAGAGTGACTGATTCAGTCTGGCTTCTCTCAGCTTCTCCTGAACTGCTC
TGCTTGGCCTCAGACTGTCTTTGGCAACATGTTCTAATCTTATTGCTTCT
TCTCGTTCTCTGGCTTGTTCTGTTTTCACCTGTGTTTAGCTGTTCTCTCT
GCAACCTGTCCTTCTATAATAATGTCTGGTAAAACGGCCTTTCTTCTCAC
TGTGCTGCTTCCTATAGCTTCCCTTTCCTCTCCTTGTTATTGGGCCTGTC
CTAGTCTGTCAGATCTTTCTCTTGATTCAGCACTTTGTCTGCCACTCAGT
TAGACATGGCTTACAAACATGGGTGCTTTTTTTCTACAACTAACTTTACC
TTCATTGCTGGGAATTAAGAGCAAGTCTGTATTCCAGCCAGAGGGATTAA
AGGTGTGTGCTGAAACTCAACCACACCACAAGTAAAAACAGGTTTTCTCA
GTAAAGATCACAATCTTGGGGTTCACCGTGTGATCAAATATCCTGAAATA
TTTAGGATCAGCCTTTTTTTTTTTCCCTTTCTACCCTCTTCTGTTTGTGA
GGTAATGTCTGATGTTGTTTGGCTTATGAGCTTTGCCTGAGTTCCTTTTT
TTTTCTCCCTTCACCTCGGTTAAGGTTATCTTCCTGTGCTGGATATACAG
ATCTGATTTTTTTCTCCAAGAATTGCTTTCATTTTAAAAAGTTGGGTATG
TTATACTTGTGAAAAGATGTTTTAGAAAGGGATTCACAAAACTCAATTAA
TAGCTGCCCTTTCAGAGCTATTTAGTCAGATGTACCTATAAGCTGGGGAA
ACCAACCACTCTTTCCTCTATGTGTAGTGCTTGCTTTTGAGCCATGCAGG
GTTGTACCCATGCAGGGCTCAAGCCTGAGAGTCTCCTGTCTCAGCCTCCC
AAGTTACTGGGGTTACAAACAGATGCCACCATGTCTGAGCCTTTGTATAC
TTTTGATTGCAGAATTCATGGCTCATTTTATTTTGGCCAAGACAGGTGAG
AACATTTCCAGAGTTTGTTCTAAGTTCCATGTGTACACTCTTACACAGTA
TTTCTTTCTCCTTACCCTTAGCCTCGTGTGTTACTCAAGCCCCAGGGCAC
CCAGGCTCTGAAGAACCAGAGCCTCCAGTAGCAGAAAGGCCTTTGATCCC
CGAGCCGCAAGCCCCCGCTGTAGCTTCCCCCCTGGCTAAGCCGCCTGTGG
CCCCACAACCTGCAGACAAGGTTTGTTAACCTTCGGTATGGTGATGGCGG
GCGGTTTTGTGTATTTTATGCTGGAGTAGGAAGTGTTGGCTGCAGCAGGC
TCATCACTACTGAAAAGTGCATCTCTTTGAATTACAATTTGTATACTTGG
TCCCTTAGAAGACTAGATAAAATGTCACTATAAAATAGCTATATCTGATA
ATAGTTTTAATGTTAATATTTTTCTAAAATAAAACTATTGTGTTTTAGAT
TGAAACACAGGAGGAGACGCACAGAAAAGTTAAAAAACAGTATGTGTTCC
AGATGTCGTCTCTGAATTCTCAAGAGCGGATTGATTACTGTCGCCTGATT
AAAGACTTAGGTGCCATTATTTTACTTTTTTTTTTTTTCAATTTTCTTCC
AATATTTTACTTTAAAACATTGTTATTACAACTTATTTAGAATACAAATG
CAAACATATTTCTATCATGTGTAAAGGGGAGGGCAGTTGAGAAAAGAACA
TGGTTAAGTTTTGGATTTTGTTGGTTTTTTTTTTGGTTTTGTTTTTTTTT
TTTGAGACAGGGTTTCTCTGTGTAGCCCTGGCTGTCCTGGAACTCAGTCT
GTAGACCAGGCTGGCCTCAAACTCAGAAATCCACCTGCCTCTGCCTCCCA
AGTGCTGGGATTAAAGACATGTGTCACCACTGTCTGGCTATGGGCAAGTT
ATTTAAGCCTACACATTGAGTCTGTTCTGCCTCACAGACCCAGGTACACA
GATAGGCAAAATACACATACATATAAATAATATATATATATATATTTTTT
TTAAGTCAAGGGTGGGACTGGGGGTTGTATGGCTCAGTGTGAGTTTTTTT
GGGGGGGGGCATATATGAAGCCCTGAATTTCAACTGTATACACGGGTCAG
CATTGGAAGTTTTATTTTTTATAAAACCCCAATCTACATTTCAAATCACT
AGATCTTGGAACGCTGAAGGCAGGGATGGAGGGCGATAAATTAAAGTGAA
TGTTACTTTTACATCTCTAGGTTGATCATTTTATATAAATAATTTTTATG
CACAGTTAACATTTTTCTAGAAAGAAAGTTAAGAACTAGTAGATGCCGTT
TCTCTCCATACAAGGTGGGTCGGTGATCGAGAAGCAGTGCTCTGACCCCA
GCTGCACACACATGGTTGTGGGCTACCCACTGCGCAATGAGAAGTACTTA
GCTTCTATGGCAGCTGGTAAATGGGTGCTTCATCGCTCCTACCTAGACGC
TTGCAAGACAGCTGGGCGCTTTGTGCAGGTGTGTATTCATATTCCTGTGA
AGGTTTGTTCTCTTGTTAATGACTTAGGAGATCCTTGGTCATCCCCTCAC
CGTGTATTTAGTTTAAATGACCACACGTGGCCAGTCAGATTACAGCTGTT
CTGTGAGGATCTTTGAAACAGAACAAAGTCTGCAAGGTCGGGCTGCTTTA
TTCACATCCCTTTTTATTAAAATATTTTGGTTGGCATACAAAAAAATGAG
TTTTTATTGTGGCCTGCTCACTTTTTGTTACCTAATTTATCGGTGCTTTT
TTATTGAAATGATTTTCTCTTAATGAGCAGATTCAAGATAGCCCATTATA
AGGCTTTTTCTTTGCTGTTAGCTTATCCATATTAAGCAGTTGTAACAAGC
TGGGCATCACGGTAATATCTACTGTGTCGTTTCCGAAGCTTCCAATCTGA
GCTCCTTGGGACTTGTCTTAGTTCATACCTCCTCAGGCTGTGCTCTCATG
AAGCCAAATACTAGGGTATTTTACTAAGTTAGGTATGCTACTAAGTTGCC
AAAATACAGCTGTCTGGCCAAAAGGTTTGTTTTGGGGAAATTAGTTTCTG
GTTTTAATTAAAGCCAGCTGTACTGGTTCTTCACATAAAACTGAATAAAT
GGAATGAGTTCCCAAAGTAGTGTTCTCTATCATTCGTGTCTCTGTAACGA
TTGAACTTTCAGCTTTGATCTTGATAGACTGCAAGCTGCTGGGGGCCAGA
TACCCATGCTTAGTTAGCACAGTGCTGTGAAAGGAACCCACAAGTTCACT
GGCCTGGTTTTCTAGGAAGAAGACTACGAGTGGGGAAGTAGCTCCATACT
TGATGCTCTCCCTGACGTCACTGAGCACCAGCAGAAGCTCGCACTGGCGG
CAATGAGATGGAGGAAAAGAATCCAGCAAAGTCAAGAATCCGGCATTGTT
GAGGTACTATTGTGGGATTCAGTATTGTGACTTGTTTTAAAGAGCATATG
CCTGACCAAGTAGTTCTGATTGTCTTTTATTCCATAATTGATATATTTAG
TTGCACATTCTGTGTTGAACTAAAATTTCTGTTGTGCAGGGAGGCAGAGG
CAGGAGAATGTTTGAATTCCAGGATATCTGAGGCTATGTAGAAATCCTGC
CTGAGACAACAAAGTATTGTGTTACTGTAAGATAGGGTCTTCTAAAGATA
ACTTGTCTTTTCAGGGTAGAGCATCAGGAGTCCTAAGCCAGGTCTGCAAA
TTCTCTCTAAGGAGTCTATATACTTTTGAGTAAGGAAATTATGTCCTTTC
TTTCCTAATTGCTGATTGCTAGGGTACTCCTGTAATCCTAGCACTTGGGA
GGCAGGAGAAGAGCAAGAGGTCAGAGCTAGCCTATGAAACTTTGTCCTTT
TTCTTTTCTTTCTTTCTTTTTTTTAAACTAATAATGGGTTGAAGAGGCCG
CCCAGGGGTAAAGGCACCTGCGCTGCTCTTCCAGAGAACTCAGATTTAAT
TCCTATCATCAACATCTGTAAATCTACTTCCAGAGGATCCAACACCCTCT
TCTGACTTCTGTAGGCCCTGCATGCAAGTGATACTTAGTATATGTAAATA
TATGCAAAAAACCCACTGAGTTTTGTGTGTGTGTGTGTGTATAGATAGAT
AGATGAATGACAAGAAATTACTTGACACTAAACAATTAAATTCATGCATT
ATCTCTGCATTTTGAATGTTTAGTATGTTAAAATTACATGTACTTATTTT
TAAATAGGGAGCATTTAGTGGCTGGAAAGCTATTTTACGTGTTGATCGGC
CCCGAGAAGCTGGGTTCAAACGCCTTCTTCAGGCAGGAGGAGCAAAGGTT
TGTCCTGAATTAATTTACTGCTATCCTAGGGGCAGGTTTGCACCAACTTG
TCCAGCAAGGTTTCTGTGATGTCTCCCTGCCCTCTGCCTTTGAGGGGAGG
AGCATCTGCTATGGAGCATGAGGGGATTAACCCTTCCTGTTTTTCATTAG
GTGTTATCTGGTCATCCAGAACCTTTACTTAAAGATGCTACGCATCTCTT
TTGTGACTTCAATAAACTGAAACCTGATGACTGCAGAGTTTTCATCGCAG
AGGCTACTGCCCAGAACATGGTCTGCTTGAAAACAGAATATATCGCTGAT
TATCTCATGCTGGTTTGTCACATTCTACTCTTCCGTTTATCATTATCATT
TTTATTACTTGTGTGTATATGTGGGGTGGGGAGTTGGCACATGTGTGCTC
GTCAGAGGATAGCTTAATGGAGTTGGTTCTCTCCTACCATGTAGGTTCAA
ACTTAGGTTGCCAGGCTGGTAGCAAGCGCCTTTACTTGCTGAGTCATTTT
GCTGGCCCCATACTTCCTTATTTCTAGAGATATGTGTATGTTTGTAGATG
AACATCCACACATTTACTCTTGGCTTGCTGCTAATAGAATTGACAGTCTG
CCATTCTCTAGTCTTTCAGTTTAGTTCCATTTCTATATTGGATGCCTGTA
AACTTTTTAGCATGAAATTTAAGTATGACAGGTTTATGAAAATCTGGGTA
GCTATAGATGTTTTACAAGTTCTTTAAAATATTGGGCTATAAAGAAAGCA
GGGGGCTAGAGAGTTGGCTCAGAGACAAGAGAACTGGCTGCCATTGAAAT
CAGACTCAGTTCCTACCTAACAGTAACAGACCTACCGTGTGTACCTGTGT
TCGTGTGTACCTGTGTTCGTGTGTGTGCTCGTGTGTGTGTGTGTGTGTGT
GTGTGTGTGTGTGTGTGTGTTCGTGTATAGAGGTGTCTGTGGAGTTCAAA
AAAAAAAAAAAAAAAAAGAGTTCTATTCCCTGGAGCTGGAGTTATAGGAG
GCTGTATCCTGTCCAGTATGGGTGTGAGAATCAAACTTAGATCTCTTAAG
TGCTCTTAACTGCTAAGCCATCTCTCCGGCCCTAAATGAATGGATTTTTA
AACTGTATACTTGCTTCCTAGGTCAAGCAACATTTTAATATAATCAAGTA
ACATTGATTTATTACATAGCCGTTTCTCATTTTTTTTATGCATTTCAGAG
TTTTGGGGAAATCAGAACATGTGTCTCCTCAAATACTTAGCATGTGTATC
ATTAACTAGAATCCAGTATTTGTTTACTTTTCTCTTAGAAGAGCTGTTGT
ACAGTGAAATTTGTAGATAACAGTTCCATCATGTGAGTCAGCCTCCTGAT
AGATGATGGCCTTCCAAAACCCTTTGGTATCAAGAGCATGACCTCATTTC
AACAAGCATCCTTGGGGCCCTTTTCAATGACCTCTACCCCAGCCCCACAG
AGATAAGCTTGTTTTATTATTTGTCCCCAGAATATATTAATCTTTCCTTA
GTTTGAGAGCTTTTTATACCTGGCCTTAGGGAACACTTAGCATACTGTCC
ATGTGTCTAGGTCATGGTGCATGTTAGCTAGCTCATCCCTTATTATAGAA
CGTTCTGTCTGAACAGAGCCCCTGGGTGACTTCCCTTCAATGTGAAGTAG
TGTAACTGCTGGGCTAAGTATACATTTAGTTTATGTGGTCTGGATAGCTT
TAAACTTGCAGGGCTTCCTACTTCTGTCTCCTAGTACTAGAATTGCATGG
TATTCACTATCAGACTCTTCCTAGAAGAGATTTGGTGTCACTTTATAGTC
ACTTGACTTTTAGCATCTGGTATGGCTACAGTGGAGGTAGTAGCATCATG
CTTTAAAAGAATCAGTCTTTACCTCTCTTACTCTGCCTCTCTTTGCCTCC
CATCCTTGTCCTGCTAATTGCTGTTATTACCAGCATGTATCTCGTTGTTT
ATGAGCTTTTTTCACTTGGTACTCCAGATTGGCCTTAGGCCTTAAACTGG
TTTTGTTTGTTTGTCTGTTTTCTTTCAATTCTGATGGAAAATAGGTTATA
GACTATAGATCCTGGCATTTATCTGTTTGCATTACTTAACAAATAACAGA
AGCAGCTGAACTGTCAGTTCACATTTTAGTCTTATTAAATAAAGGTTGTG
TGTGTGTGTGTGTGTGTGTGTGTGTATGTATGGCTCAGAGGCCAAAGATT
TGGCCAAGCTCCACAAACTATTTCTGGCTTCCAGACCTTTGCTCTGGGTT
CCCAACCTTTTTTTTCTGAGGAAATAGTTGCTTTCCTACCTTGTTCTTCA
AGCCATTTCTATTAGAATTTTAGCCAGCCTGTGGCACACATAAAAGAAAC
AAAATGAGAAAGCCCACAAAAGCTAAATTGACCCAGGTCTGACCTGCCCT
GTAACAGTTACTTGGTTTGTTAATTCTCCAGCGTCTTTAATTAGAATTTA
AGTTCAATTCCCAGAACCCAAAAAAGGCAAGCATGATGTTTGTAATCTTA
ACACTGGAAAGGCTCAGTTCCAGGCCCATAAGTGACTAGTGGGATTGGCA
TGGTGACTCAGGCCTTTAATCCCAACATTTGGGAGTTAAAGGTAGGAGGA
TCACTAAAAGTCTGAAGCATCCTGGGCTACAAAAGGCCAGCTTGTCTTAT
TTATTTATTTATTTATTTATTTATTTATTTATTTTATGAAAATAGAAAAA
TGGCTGCAAAGGTAGCCATTGCAAGGACTTGGTGTCAGGTAGAAACACTT
AAATGTCCTTGCTACCTGATAGTTAAGCCCATTGCACATTTGTAAATGGG
TGTAAAAACACTTATAGTAATTCACACTACTAGCTACTGACCAGCCTTTC
CCCAATTTAATCTATATTTTAATCCATGGAATCATTAAAATCTGAACTAG
CCATGCTTTACCTGAACTTTGACCCACTGGCAAGCTTTGAGGGGAAAAAG
AAACCTGGAGACATACATGCACTACAAATTTGAAGTTTTCCTCTTCCCAT
TCCAGGAATCCCCTCCTTGTGCAGACAATTACCGTGTATCCGAAGCTGCT
TTATTCCATAATAAGAAAGGTGGGCCTGGATTACCACAGAAGAGGAAAAC
TCCTGCAGAGAATGTAGTCAAACGGCCTCGAGTACACTGAAGTGAGCCAT
ACACAACCACCCAACGAATGTTTTTGAGTTTAGTGTGCTTGCCTAAAATG
TATAAAGTGCACTAGAAAATTTTCAGCTACAACCTGAACATTGCTGTGAT
GCATTTGTGTAGCAGTTTAAAGGCATACATCTGAAGGACTATGCTTCAGA
TTCTAATGATCCTGTAAACTGGATACCTTTAACCTGAATTTGAATCACTG
GTTATTGACTGTTCCTAATGAGGCTGAAATAGTTTTAACAAGGAGATTTG
TTTCAAAAATGTCATAGTTCATAAAAGCAAAAGTTATACATTAGGGTTAT
TTCATGTTTTCCTGATTTTTATATATGTATTCTTGCCATTTAACCTCTTT
AACAGCCTGAGCAGAGAGTTTAACAATGAAGCTGGGGCTCTAAACTTAAA
ATATGTATATATGTAAATGTGTGTATGTATAAACTTCTATCATTTGCCAA
ACTTGGGCACCAAAACTTTGAGATAAAGAATAAAAAAAAATAGCAACTTA
AA

[0126] An exemplary DNA sequence of the Topbp1 gene in humans is provided below.

(SEQ ID NO: 23)
GGCGCCCGACCCCAGCCACCGCCCTGCGGCCAGCGCGTCCCCCGACTCGC
CGCCCGGAGACCCCGAGGCTCCAACGAGTTCAGAAATGTCCAGAAATGAC
AAAGAACCGTTTTTTGTGAAGTTTTTAAAGTCTTCAGACAATTCCAAATG
TTTTTTTAAAGCTCTCGAGTCCATAAAAGAATTCCAATCAGAAGAATATC
TTCAGATTATTACAGAAGAAGAGGCATTGAAGATAAAGGAGAATGATAGA
TCACTTTATATCTGTGACCCTTTTAGTGGCGTTGTCTTTGATCACCTCAA
AAAGCTTGGCTGCAGAATTGTTGGTCCTCAAGTAGTCATATTTTGTATGC
ACCACCAGCGATGTGTCCCAAGAGCCGAACATCCAGTTTATAATATGGTT
ATGTCTGATGTAACCATATCTTGTACAAGTCTGGAAAAAGAAAAAAGGGA
AGAAGTTCATAAATATGTACAAATGATGGGCGGACGAGTATACAGAGACC
TTAATGTATCAGTAACTCACCTTATTGCAGGAGAAGTTGGTAGCAAAAAA
TATTTAGTTGCTGCAAACCTGAAGAAACCTATTTTGCTTCCCTCTTGGAT
AAAAACACTTTGGGAGAAGTCACAAGAGAAAAAAATAACTAGATATACTG
ATATAAACATGGAAGATTTCAAGTGTCCTATTTTTCTTGGTTGCATAATC
TGTGTGACTGGCTTATGTGGCTTAGACAGGAAAGAAGTTCAGCAACTCAC
AGTTAAGCATGGAGGTCAATACATGGGACAATTGAAAATGAATGAATGTA
CACACCTCATTGTGCAAGAACCAAAAGGTCAGAAGTATGAGTGTGCCAAG
AGATGGAATGTACACTGTGTGACCACACAGTGGTTTTTTGACAGTATTGA
GAAAGGTTTTTGTCAGGATGAATCCATATACAAGACAGAACCTAGACCAG
AAGCAAAGACTATGCCCAATTCTTCAACTCCTACCAGCCAGATCAACACA
ATTGATAGTCGTACTCTTTCAGATGTCAGCAATATTTCCAACATAAATGC
AAGTTGCGTAAGTGAATCAATATGTAATTCACTTAACAGCAAACTGGAGC
CTACACTTGAAAATCTAGAAAATCTGGATGTCAGTGCATTTCAAGCACCT
GAAGATTTATTAGATGGTTGTCGGATATATCTTTGCGGTTTTAGTGGCAG
AAAGCTAGATAAACTGAGAAGACTTATTAACAGTGGAGGTGGAGTTCGTT
TTAACCAGCTAAATGAAGATGTAACTCATGTTATTGTGGGAGATTATGAT
GATGAATTGAAGCAGTTTTGGAATAAATCAGCCCACAGGCCTCATGTAGT
GGGAGCAAAGTGGTTGCTAGAGTGTTTCAGTAAAGGTTATATGCTTTCTG
AAGAACCATATATCCATGCTAATTACCAGCCAGTGGAAATTCCAGTTTCA
CATCAGCCTGAAAGTAAAGCAGCTCTTTTAAAAAAGAAGAACAGCAGCTT
CTCTAAGAAAGACTTTGCTCCTAGTGAAAAGCATGAGCAAGCTGATGAAG
ATCTGCTCTCTCAATATGAAAATGGTAGCTCCACAGTAGTTGAGGCTAAG
ACGTCTGAAGCCAGGCCCTTTAATGATTCTACTCATGCTGAGCCCTTGAA
TGATTCTACTCACATTTCTTTGCAAGAAGAAAACCAGTCTTCTGTCAGTC
ATTGTGTCCCTGATGTTTCTACAATTACTGAAGAAGGCTTATTTAGCCAA
AAGAGTTTCCTTGTTTTGGGTTTTAGTAATGAAAATGAATCTAACATCGC
AAACATCATAAAAGAAAATGCTGGGAAAATCATGTCCCTTCTGAGCAGAA
CTGTTGCGGATTATGCTGTGGTTCCTCTGCTGGGGTGTGAAGTGGAAGCC
ACTGTGGGAGAAGTTGTTACAAATACATGGCTGGTTACTTGCATAGACTA
TCAGACTTTGTTTGATCCAAAGTCGAATCCTCTCTTCACACCAGTTCCAG
TAATGACAGGAATGACTCCTTTAGAGGATTGTGTTATTTCATTTAGCCAG
TGTGCTGGAGCAGAAAAAGAGTCTTTAACATTCCTAGCAAACCTCCTTGG
AGCAAGTGTTCAAGAATACTTTGTTCGCAAATCCAATGCAAAGAAAGGCA
TGTTTGCCAGTACTCATCTTATACTGAAAGAACGTGGTGGCTCTAAATAT
GAAGCTGCAAAGAAGTGGAATTTACCTGCCGTTACTATAGCTTGGCTGTT
GGAGACTGCTAGAACGGGAAAGAGAGCAGACGAAAGCCATTTTCTGATTG
AAAATTCAACTAAAGAAGAACGAAGTTTGGAAACAGAAATAACAAATGGA
ATCAATCTAAATTCAGATACTGCAGAGCATCCTGGCACACGCCTGCAAAC
TCACAGAAAAACCGTCGTTACACCTTTAGATATGAACCGCTTTCAGAGTA
AAGCTTTCCGTGCTGTGGTCTCACAACATGCCAGACAGGTCGCAGCCTCC
CCAGCAGTAGGACAACCACTTCAGAAGGAGCCCTCGTTACACCTGGATAC
ACCATCAAAATTCCTGTCCAAGGACAAACTCTTCAAGCCTTCCTTTGATG
TGAAGGATGCACTTGCAGCCTTGGAAACTCCAGGACGTCCCAGCCAACAG
AAAAGGAAACCGAGTACGCCACTCTCAGAAGTTATTGTCAAAAACTTGCA
ACTTGCTTTGGCAAATAGCTCTCGAAATGCTGTCGCTCTTTCTGCCAGCC
CTCAACTGAAAGAGGCCCAGTCAGAGAAGGAAGAAGCCCCAAAGCCACTT
CACAAAGTAGTGGTATGTGTTAGTAAAAAACTCAGTAAGAAGCAGAGTGA
ACTAAATGGGATCGCAGCCTCTCTAGGAGCAGATTACAGGTGGAGTTTTG
ATGAAACAGTGACTCATTTCATCTATCAAGGGCGGCCAAATGACACTAAT
CGGGAGTATAAATCTGTAAAAGAAAGAGGAGTACACATTGTTTCCGAGCA
CTGGCTTTTAGATTGTGCCCAAGAGTGTAAACATCTTCCTGAATCTCTTT
ATCCACATACTTATAATCCCAAAATGAGCTTGGATATCAGCGCAGTGCAA
GATGGCCGGCTCTGTAATAGTCGACTACTCTCAGCTGTGTCTTCAACAAA
GGATGATGAGCCAGATCCTTTGATTTTAGAAGAAAATGATGTAGACAATA
TGGCCACCAATAATAAAGAGTCAGCACCATCAAATGGAAGTGGAAAGAAT
GACTCTAAAGGAGTTCTGACACAGACCTTAGAGATGAGAGAGAACTTTCA
GAAGCAGTTACAGGAGATAATGTCTGCAACATCAATAGTGAAACCCCAAG
GGCAGAGGACTTCCCTTTCAAGAAGTGGTTGTAACAGCGCATCTTCAACC
CCTGACAGCACTCGCTCTGCTCGCAGTGGACGAAGTAGAGTCCTAGAGGC
ACTGAGGCAGTCTCGTCAGACAGTACCTGATGTCAACACAGAGCCTTCCC
AAAATGAACAGATCATTTGGGATGACCCTACAGCAAGGGAGGAGAGAGCA
AGGCTTGCCAGCAATTTGCAGTGGCCTAGTTGTCCCACACAATACTCTGA
GCTTCAGGTTGACATTCAAAACTTGGAGGATTCTCCTTTTCAAAAGCCTT
TACATGATTCAGAAATTGCTAAACAGGCTGTCTGTGATCCTGGAAACATA
CGTGTGACTGAAGCTCCCAAACACCCAATCTCTGAAGAACTGGAAACTCC
CATAAAAGACAGCCACCTGATCCCTACGCCTCAAGCCCCCAGTATTGCCT
TTCCACTCGCCAACCCCCCTGTGGCTCCGCACCCTAGAGAAAAGATTATA
ACGATAGAGGAGACTCATGAAGAATTAAAAAAACAGTACATATTTCAGTT
ATCATCTCTGAATCCTCAAGAACGTATTGACTATTGTCATCTGATTGAGA
AACTAGGTGGATTGGTGATAGAAAAGCAGTGCTTTGATCCCACCTGTACA
CACATTGTTGTGGGACATCCACTTCGAAACGAGAAGTATTTAGCCTCAGT
GGCAGCTGGGAAGTGGGTGCTTCATCGCTCCTACCTTGAAGCCTGCAGGA
CTGCTGGACACTTCGTGCAGGAAGAAGACTATGAATGGGGAAGTAGTTCC
ATACTTGATGTTTTGACTGGAATCAATGTACAGCAACGAAGACTAGCACT
TGCAGCAATGAGATGGAGAAAAAAAATCCAGCAAAGACAAGAATCTGGCA
TTGTTGAGGGAGCATTTAGTGGGTGGAAGGTTATTTTACATGTGGATCAG
TCTCGAGAAGCAGGCTTCAAACGCCTTCTTCAGTCAGGAGGAGCAAAGGT
GCTACCTGGTCATTCTGTACCTTTATTTAAAGAGGCCACACATCTTTTTT
CTGACTTGAATAAACTGAAACCAGATGACTCAGGAGTTAATATAGCAGAA
GCTGCTGCCCAGAACGTGTACTGCTTGAGAACAGAATACATTGCTGATTA
TCTCATGCAGGAATCACCTCCTCATGTAGAAAATTACTGTCTACCAGAAG
CTATTTCATTTATTCAGAATAATAAGGAACTTGGGACTGGATTATCACAA
AAGAGGAAAGCTCCTACAGAAAAAAATAAAATCAAACGACCTAGAGTACA
CTAATCGCATCTACCCTTTAGTTACCAAACATTAAATGTTTTTAAAAATT
GAAAGCCTGAATGTGACTGTGATAGATTTGGGTAGTAATTTAAAGATGAG
TACCTGAAGAATTCTGCTTCAGAGTATAATGATGACCCTTCTTGAGTTTT
GAACACCTGAAATTGTAATCACTGAAATATTAACTGTTTCTTAATAAAAA
GTTACCTGAAATAACAACAAAATACAACTCCTCAGCTAGCTTGCTGTTAA
ACCACATTGAAGTCTGTTAAAAGATATTTATTTTTCTTGTAAATATCTGA
AGCTGTAGCTTAGTGGAAATTTTAGCAAGGTAATGGATTTTGCTTTAAAA
TGTCTGCCTTACAAATTCATAACAACAAGATTTGTCAGTCAGCATTTATT
CATGTTTTCCCTGATTTTTATCTTCTCACCATTTTACCTCTTTTAACAGG
AGCCTGAGCACAAGGTTTAATGAGGAAGCTGGGGCTATAAATATGTGTGT
ATATATGTATATGTATGTTTGTACAAATCTCCATGATGTTTGCCAAGTTT
GAATGCGCAAAACTTGGAAAATGTGACAATAAAGAATAAAAGTAGTAACT
CAAATTAGTATTAAGATGTGTTTACATAGATAAATTTTTTAAAAGAGCAA
AAAAAAAAAAAAAAAAAAAAAAAAAAAAAAA

[0127] Cdv3, or carnitine deficiency-associated gene expressed in ventricle 3, is a gene that exhibits upregulated expression in cells overexpressing c-erbB-2. The Cdv3 cDNA sequence in Mus musculus is provided in GenBank Accession No. BC096479.1 (GI:66396591), incorporated herein by reference. The Cdv3 amino acid sequence in Mus musculus is provided in GenBank Accession No. AAH96479.1 (GI:66396592), incorporated herein by reference. The Cdv3 cDNA sequence in Homo sapiens is provided in GenBank Accession No. B C007338.2 (GI:33873572), incorporated herein by reference. The Cdv3 amino acid sequence in Homo sapiens is provided in GenBank Accession No. AAH07338.1 (GI:13938400), incorporated herein by reference.

[0128] An exemplary DNA sequence of the Cdv3 gene in Mus musculus strain C57BL/6J chromosome 9, GRCm38.p1 C57BL/6J is provided below.

NC_000075.6 (GI: 372099101: c103365780-103353102):
(SEQ ID NO. 12)
GCCCACAGCGGCGGGCGGAACCGAGCGCGCAGGCGCGGCGCTGCCTCTCTCTGCTGGTGGCCCGCCCTCC
CTCCTCCCCTCCCTCCCCTCCCCGTCCCCTCTCCCCCTCCTCAGGCCCGCGCGTCTTCCTCCCGCACGCG
CCGTCGTTAGCCGAGCGCTCGCCGGTGCGCGCCTTCCTTGTCCCTCAGGCAGCGGGGCGGGCGCGACCCT
GCTCCACGCTCGCGGTTCCCAGCGAGGAACGTACCACCAGAGCACGGGGGGAGCCGGCCGCCCTGCCGCC
CGCGCCTCGGCGACCCCGCGGGGCTGAGGCGACGCCGCACCCTGCAGCCTGAGCGCACAGCCGGCCTTGA
CCCAGAGCTCGGAGCCGCGAGCGCCGCGCCCTCCGCCGGCCCCACCCATCCGGACCGCGGCCATGGCCGA
GACCGAGGAGCGGAGCCTGGACAACTTCTTCGCCAAGAGGGACAAGAAGAAGAAGAAGGAACGGAGCAGT
CGCGCGGCCAACGCGGCGAGCGGCGCGGGCGGGAGCAGCGCGGCGGCGGGCTCCAGGCCGGGCGATGGCG
GGAGCCTGGGCTCCGGTGCCAGGTCGGGCGACGGCGGGAGCTTGGGCTCCGGCTCCAGGTCGGGCGACGG
CGGGAGCTCGGGCTCTGGTGCTAGGTCCGGAGACGGCGGGAGCTCGAGGTCCGGAGACGGCGGGAGCGCG
GGCCCCGCCGGCAAGGCCATAACGAAGGTGAGGGTCGGGAGGCCGGCGGCCGGCCGCATGTGCCCGCCCC
CGCCGGCCCGGGAGGCCACGTGACTCGGGCTTCGCACGTCGGCCCGGCGGGCGGGCGGGCTCGCGGTCCT
CGGCCCCCGGGGCTCGTCTGGCCGCCCCCGTCCGCGGCCCTCTGCGCGCCGCGCCCTCTGGGCCACGGGG
GTTGGGCCGGTCCCCGGGTGACGTGTGCCCGAGTCCTCGTGGTCCCGCTTGAGCCCCGCTGGGGCCGGAT
TTCATGTTCTTAAGGTGTTCCGAGGCTCCTCTGTGCCGCCCGGGCCAGCGTGGCTTACTCTCCCAACCAC
GGCCACGCAGGGCTGGGAATTGAGTTGTGGAATTTCTGTCGCCTTCTCTCCGCCGCTCAGCTCGCCCTGG
GCTTGGGTTTAAGTAAAAGCGGCGGCAGAGAGGGCGTTTGGGAATTAGGCACGTCTCCGGATCTTGCAGG
AACGGGCTAAACTTTACCGTCCGGCCACTAGCCCCAATTTTTGAGACAAGGTCTCACGGTGTAGCTCTGG
TTGGCCTCCAGTTCACAAAGAGCCTCCGGCCTCTGTCTCTGGAGTACTGGGATTAAAGGTCTGTGTCACT
GTCTGCAATTTTGTTTTTTTTTTGTTGTTGTTGTTGTTGTTGTTTTTTGTTTTTTTTAAAGATCACATTT
ATTTGCTTATTTGTGTGCGCGCACTCCTGTGTACGTGTGCGGAGAGGTTAGAGGCCGGGGTAAATTCTCT
CTTCCCACCACGTGGGCCTGGAGAGTTAGACTCTCTGGTTCTCGGTGTTGACTGCCGCCGATTCTTAGAC
CGACTCAAGAATCCTGGCGACCACTGATGGAATTTTTCCGAGTCTGGAATCTGTTTACCAAGATCTCTAA
TTAATTAATTCGATGTTTCGCGGGTACCTTTACCAGTTTGGGGAATCCCGTTGGCCCTTGATGCCTTTTA
GTCTGAAGTGGGCTTACCAAAAACTAATCAGGTGTTGTTTCTTCCATAGGATGAAAATGAGTGGAAAGAA
TTTGAGCAAAGAGAGGTTGATTACAGCGGATTAAGAGTTCAGGCAATGCAAATAAGGTAGGATGTGATTA
CACGTGGGATTAGGTAACCTTGTTAAGTAGTGCACGCGTTTACTTTTTTTTTTTTTTAAATGCCCTCTGT
GTCATTAAATTAGTTGCCAACTCTAAAATCCTGTGGTTTCCCTATTTGCAGCTATGTGGATTTTTGGCTT
GACTAAAATGGATTTTTGTCATTTAAAAATTTTTAACACTTCGTGTTTGAATTTAGGTGGTCTTCCCTAC
CCCTAGTAGGGCTCCTGTAGTTCACTCGCTGCCCTGAGAACTTACTGTGTGACTCAGGAGAAGAAGGGGC
TTGTTTTTTTTTTTTTTTTCCAAAAAAAAATATTTGAAGCGAGTTGCCTGTGTAATACATGTCTGTACTG
TCTTCTGGAATTGGAATTACAGCTGTTAGTGTGGGTTCTGTGAGCTGGACCCTGATCTGTGGAAGACCGC
TGAGCGACATGTCACCTTGAACTCTTAATTCTAAAGTGTCCACCCAAATGTACCACCAAGCTGTGCAGGA
ACTTAGTTTTTTCTTTTACTTACTTAGTAAAATTGTTTTCTAGTTCTCTCTGGTAATTGCAGTGTAGGAT
ACTTCCAACATACACGAATTTGCATTGACCATGAAGCCACCTTGAATACCCACTACCCCAGTCAAAAAAT
TGAACGTTAATAGAGGCTCTTCTGAACCTATCCCCAAAAGTAGCTTACCCTAGCCCTCGTTTGCACAGTT
CTTAGCTGTGTATTCCGGACTGAACTTGAGCTGCTGGAATTGCAGGCCTGTGCTACCTGCCATTTCGGGC
TCTGAGGTGACTGGTTTTCAAAGTTCAGGAAAACAGTCATTTTCACAGTTGGATTGGTTGATTTAAGAGA
ACCTACATTGTCACGTTCAATCTGTGGTAGTTCATTTTAGATCTGGTTTTAAAAGTAACATGTTTGGAAA
GATTTTTTTTTTAAGTAGAAAGGGTAAGTATTTAAGGTAAGGTTTTTGAAGTTCAAAAGTGAGTAGGGCT
CTATTGCCTTAAAATCCTTTACTCATCTTACACAAGCAAAATGATTGGAAATTGTCTTTGGTTTGAAGCT
TGCAATTTGTAGAGAATTCCAGTGACCATATGGGACAGTTGTTGAGGAAATAACTTTCTTAACTCTAAAT
TAATCTTTTAAAATCTAGATTATATATGATCTGAGGTAACTTATTGAAAAGCCAGGTAGTATATTTTAAT
GTATGGTTAGTGTCTGTACCACCCAGGCATTCATATCCCTAGGTGTTCTCACTTGTGAATTTACCAAATT
AAACATTGTTTTTTATAGTAGGGAACTTAGAAGTTATCTCCCTTTTTGGTGTGGCTTTAGTGTTTTGTTT
TGCTTTGTTTTTCCTTTTTTAAAGATTTAATTACATATGTATGTCTGGGATGTATATGTACATGTATGTG
CATGCAGGTGCCTGTCGAGGCCAGAAGAGAGCGCATCAGTTCCCTTGAAACTGGAGTTACAGGTAGTTGG
GAGCTGTGTTCTAGGGACTGAATTTGTATCCTCTACAAGAGCAGTATATAAGCTTATGAGTAATTTTAGA
AAATACTTGGTGGTGAAAGCCTTAACTGTCAGCTGTTGAGAAGCTGAGGTGGGGAGAATAAGAAAAATCA
GGTGCGCTTGGGTTAGAGTGAGTTTAAGGTTACTCTGAGCAATTTAGTGAGACCCTATCTCAAAACTTAA
AAGAAAAAGTAGAAAATGTTCTTGTTTTGTATCTCCAAGTCTGATCTATAAATCTGGAGAGGGAGTTTAC
AGGTTCCTTTCTTTTATCTGGATGTGGTCCCTGCTCTGAAGTTAAATTATGCCCTTGAGTGGTAATTTCT
GGACATATTGACTTGAATTTTAGTGGGTAAAAGTAACACTTTCTGAAGGTAGAGGGGTGGCCTTCAAGTT
TTTTCAGTATAAAATTTGATTTTGTTAAATTATGGAGAACATTTAAATTGAACTGGTTTTCTAACAGGAT
ATAAAATTCTTTATTTTAACTTTTTTAGAGTCAGGAAGTTGTTAATAAACTGTTAGGATCTACTTGTCTC
TGCCCTGCAGTGTTGACATGCCTGGCTTTCATGTGGGGGCCAGGGGTTTGAACTCTGCTCTTTTTACTTT
TACAGCAAGTGTTCTTACCATATATACAGATGAACAGTTGTGATTTACTGTGTTGGTGAGTGAATAGATT
CAAAGAGTGAATGAATAACTGAAAGCAACTGCTTCAGTGTATGCAGGTGTAAATGCCATGTAGGTGGGAA
TCTTTTTCACCTTTTTTGGATGCATTAGGTTGTTGGGATATTACCACACCCAGATGATTACCTATTTCAT
CCCTGAAGCAATTATAGTATTGACATGGCTTTACAATTTAAAAAGGCAAAAAAAAAAAAACCTCTTGAAA
AAATTATGAAGATTGGAAACCACAATTAGCCTGGGTAATTATAAACTTCATACTAGCTAATAAGCTACTG
TTAGACAATGGTGTTGTGCTATCTGATCAGATTTTTACGATCCATTAGAGAATAACATGTTCCCATCTCT
TTTTCAAATGAAAGCTAGAATTTTTTACTTCCTGTTACGAAGGTGATATATGTACTGAGTGTATAAATTT
GCTCTTCGTATTGGTGATATCTAAAAGCCAGCCAGTATCATCTTGAAAGCCTGACCATTAAATGACAGAG
ATGGCAGAACCTGGACTTGAGCAATCAGTTCCTAACATTGTTTTAGCTATCAAAGTTCTCATTAAAATTA
CAGATCTTTAGGATTCTCTCTGGATGTTTGATGTTTATGATAAGTATAATGTATTAGATGATGATTTAAA
TGGCATGAATATTATTTGTTAGTGACCAGCATCATTTTATATGGCTGGACAGGTTGTATGTTAAAAGGGA
AAACTGAAATTTGGCTTTCTCTTTTTCCTTTGTCTTTTAAAAATTGCAGTTTATTTTGTGTGAGCATGCT
GTGGCATGCATATCAGAATAAAACCAACAGGAGTTAGTTCTCTTCCACCTTGTGGATCCTGGGGATTAGA
CTCTGGTAGTTAGGCTTGGTGGCAAGGACCATCTAGGTGTGACCTTTAGTTTTTGGAGAAAGTATCAGTG
ACGTCATCATTCTCTTGCCTCAGCTTGCATGCTGAGGTCACCAGTCAGCCTCCAAACGGTGGTTACTTCT
CTGTTTGTCTTTTTGAGTTACAGGTGAAGTGCTCTGTTATTGAGCCCTGAGAGACAGTCTTAGTCTTAAA
TACAGATTGGAAATTAGGTTGTTCCTCTTTCTTGACATCATAAGTCTTTAAATGCTGGGGTTACTTCCAG
CTGGTGGGCAGTGTCTTTAAAGGGCCTTAATAAAGATGGGTATGGTGGTTTACACCTTTAATTTCAGCAC
TTGGGAGATAGAGACAGGAAGATCAGTCAGGATCGTCAGCTTACTTGAGTATATAGTGAGTTTAAGGCCA
GCCTGGGCTACCTGAGTGAGGCCTTGTCTTGGATTCTAGGTATGGCTCAGTTTAGCATGCTTTTGTTGCA
TACATGAGAATCCAAGTTAGACTCCACTCACCAATGGAGGGAAAAAAAAAATCAACACTAAGCCAGAAGA
AATTTGGCTTAAAGCTAGGACACATCTTGCTTTAATAGGAATATCTTTTATGGGGGCCAGCAAGATGGCT
TATTATTGGGTATTGCTGTTAAAAGTTGATGACCTGGGTTTATTCCCTAGAATCCACATGGTAGAGAACT
GATTCCCAAAAGTTCGCCCCTAAAGAGTTTAGTCTCAGCAGAGGGAGGCAGAGACAGGCAGGTCTCTGAG
ATGTCGATCAGCTTTGCCTACGTATCTGATTCCATGCCAGTCAGGACTGTATAATTGGACCATATTTTCA
AAAGAAATGTATTTTTTTGTAGAAGTTTCATATGGTGGTGCATACATCTAGTTCCAGTTCTTGGGAAGTT
CAATGTGCTTGTTTTTCAATAGTGAAAAGGAAGATGATGATAATGAGAAGAGAGAAGATCCAGGAGATAA
TTGGGAAGAAGGTGGAGGTGGCAGTGGAGCAGAAAAATCTTCAGGTCCCTGGAATAAAACCGCTCCGGTA
CAAGCGCCTCCTGCTCCAGTAACAGGTGATCTTCTGTTTTCCCTCCTGAGGGATGGGCATAGTGGATCCA
AATGGATGCTGCTTTAGTGGAAGGAATGTAGAAATTGAGGGACATACTTTTTTTGTCCTGTAGGCTGTCA
AAGTTTTGCTTTTGTTTTTGGTGCTAGGGAATAAAGCCAAGTAGTTCACCTCCTGCTATCATCCTACCAC
TAAATCACATTCTTGGTGCTGCACTTAGGTCTTGAAGCTTACATTCTCAGCAGAAGGGAGTGAGTAAAAT
TTCTTTAGAACTAAAGAACTTTTAGGGGTTTATGTGTGTTGTTGGATGTGTGTTTGCATGTTTGTACAGT
GCTTGTGGATGGACCACAGCTTGGTGCCGGTCTCATTGTCCATTTTTATTTTTTGAGAGTAGGGTTTCTC
AAGGAACCGGGAACTCAAACCAGTTCTAGCTATCCTAGCTAGCCAGTTTGCTTTTAGGATCCTGTTTGTG
TGCCTTGCCATGGCTGCCTAGGCTTACATGGATCTGACCATCCTGTACACATGCTCGGCAGACTGTAGCC
ATTGAGCCAGCTTCCTAGCTCAGCGTGTTTGTCTGGTTTTTGCTGTGCTAGAAATTGAACTCTAAAAACT
CTGCACATGCTAAATGTGCTGTACCACAGAGCTGCATTTTCATCTCAAAATTGTTAGTTTTATTTATTTT
ATATAGCTCAGGCTGACCTTGAGTCCTCTGTAATACAGATGACCTTATGCTACCCCACTTCCCAAAACCT
GAGATTACAGGTGTGAGCTTTCCTGGCAATTTTCTAAGTTAAAAAAATTTTTTATATGTAAAGTTCTTAT
TTTTTGAGAATGCCATCAGTATATTTTTGGTAATATTCATCCCCACTCTGCTCAGGCTAGCCCTGAATTT
GTGTGTGTGTGTGTGTGTGTGTGTGTGTGTGTGTGTGTGTGTGTGTGTGTGTGTGTGTGTTTATGTCTTG
TTGTGTGGGTATCGAGGCTAGAGGTTGGCTGTGTCTTCCTCGTCACTCTAAATGCTTAAGACAAGTTCTC
ACCGAGTCTAGAGATGATTGAATGGCTGTACTAGCTAGCTAGCGCACTCCTAGGATGTTCTTTTCTCTGT
CACCACCCACCCATCCTGTGCTGTTTACAGGCATGTGCTGCTGCCATGCCTGGGCTTTGGTGCACATGAG
TTTAAGTTCTAATGCTTATGGCAAGTGCTGAAGTGACTAGTGTGAATCACCATGGAAATGCTGCCTTTTT
TTTTTTTTTTTTTTTTCTCCTGAACCTGATGTTCTTTCAAGCTACTCCTGGAATGCACCAGACACACAGC
TCCAGCAGACCCTTAGTTCTTAGCTTTGGGAGTATTTTCTTTCTCTTTCCTCTTTTTATCAGGTGCCTGA
AAAGCCAGGTGGTAGATGACTGTGGTCTCTGTTGTGCTGCTGTGGCATAGACAGTAATGTGGAATTAACA
GCAGTGAGGATAGCTGTGCTCAGTTGTTGGGCCGGATTCAGCTTGTTCACTAATATTTGGTTTTAAGTGT
TGGCTTTCTTTTTATTATTTGTGTGGTGAGTTTGTGGAGCTGGATCTTGCCACCAGGTTTGTATAAAGAG
GGTCTTTTCATATCTGCTTAATTTTACCCTGTTAATAAAACCCTTCCCAAGCCCCCTTTTAATATGTAAC
CTCTTTGGGGCTCAGCAGTTAAGAGTACTAACCTACACTCTACCAGCACCAGAATTATATCTTAGTAATT
CTTATCAGAGGACCACAAATATCTATGACTCCAGTTTCAAGGAATCCACCTTTCCCTTCTGGCCACCAGG
GGCATCTGTGTATCTACATGATGTGTGTACACATTGAAGTGTAGCTCCTTTGTACTCCTGCTGTTATTTT
TGGCATGGCACCCCTTCTCCCCTTCTCCCCTTTTTTTGTCTCTTCTAGAATATACTGCCCATTAGGTAGC
ATTTTGGGGGGTGCTGGATGAGCTCAAGTGAGAGAGGGATGGCTAGTCACATGTAGCTGTGTTGAATACT
TAGGACATGGTGGCTAATGTGACTGAGGAATTGAAACCTAGATTTCATTTTACTCATCTAAAATAGCTAC
ATGTGTTGCTTTGATCCCAGCACTCAGGACACAGACAGATGGTGTTTGAGTTGGGGCAGCCAGGGCTACA
GAGACGGGGCTGAGATGAGATGGCTCAGCGGTTAAGAGCACTAACTGCTCTTCCAAGGTCTCGAGTTCAA
ATCCCAGAAACCACATGGTGGCTCACAACCATCCATAATGAGATCTGACACCCTCTTCTGGAGTGCCTGA
AGACAGCTACAGTGTACTTACATATAATAAATAAATAAATCTTTAAAAAAACATATGAATGAATGAGTGC
ATAAGAGAGCAGGCAAGCCTCACAAGTCATATCACCCACAAACACAAATAACGAATTTTTTTTAAAAAGC
CACATGTGGTGGCTGAAATGTAAGGGTCAGTAGTTATTTAGTGTTTGGTCTGGTTTTTTTGAAGATGGGT
CTGAGTTGCCCAGGCTGGCTTTGAACTCCAGATCCTCCTGTCTCAGCCTCCCATGTTGCAAGCATGTTCC
ACTGTTCAAGGCAGGTTGTTTTTTGTTTGTTTTTTTGAGACAGGGTTTCTCTGTGTAGCCCTGGCTGTCC
TGGAACTCACTTTGTAGACCAGGCTGGGCTTGAACTCAGAAATCCGCCTGCCTCTGCCTCCCAAGTGCTG
GGATTAAAGGTGTGCGCCACCACGCCAGCCTCAAGGCAGTTTTTAATGTGTGTATCTCAAGTGCAGCTTA
GATACTCAGTAAAAGCTTGTATGCTTTCCCTCTGGCATAACAAAGCCTATAGAAAGCAATCCTTTAAACT
ATAAGAACATTTTATTTCAGCTAGTAGATGATTACAGTGCTGTCCCAGTGAGCCTCCCCAGCCTGAAACT
TTGAAATTTTTCATAAAGTGGGAAACGACACTGCTTGAATACATATCAAGGGTCAGTTGGGAAGGTAGGA
GACAGGAAAAACCTGAAACATTGTGGCCCCCAAATTCAGTCACAGTAAATTTAAAGTCAAGGTGCTTTTT
CCTGTGTTATAAGCAAATAGAGAAACTTAACATCCAATAGTCTTAATGAAATAAAGACCTTTATTATTTT
TAGGAATTTAAAATACTGCATGTGTATTTTATTAAATAATTTATATAAAATACCTTGTTTAGCCCACCTT
TCAAGTAGAGAAAGTAGATGTCACCTTTTGATAGAAACACCAGCGACAGCAGTGTTGAATTTCAGAAGAG
ATTAAGAGATGGGCAAGGTTCTACTTGAGACATTTTCTCACAGAACTTTGTTTTTATTGTGTAGTCCAAA
TCCATTCTAAATCAGGGTGGCCTTTCCTACAGTTGTTATAGGATCAGGAGTGTGGGAAAATGTTACAAGA
AAGTCAAACATTTGAATGGTTTATCTATTAGTTACAGAAACCCCGGAGCCAGCAATGCCCAGTGGTGTAT
ACAGGCCTCCTGGGGCAAGGCTAACCACAACAAGGAAAACGCCACAAGGACCACCAGAAATATACAGTGA
CACGCAGTTCCCATCCCTGCAGTCCACTGCCAAGCATGTAGAGAGCCGGAAGTAAGTATGTGAGGCTATG
AGCTAGGCTTTCTGACAGGCAGCTGGGCACATGGTGAGGCTTTGGTACCCAGGAGGGAAGGAGAAGGTGG
GGGAAGAGTCCTTTAAGTACATTATTACTGGCTTCTGTTCCTTTTAAATATGGAAACTAGAATTGTAGAA
GCATTTATCATTGCATTCACAGTAAATGTGAGAAGATGAAAGATGTTGGCATTTATAAATCTAATACTAT
AAATAATCTTATTTCATTCAGCAGGTACTTAAAATGAATACTACCTGAAGTTAAATGACCACATATGGCA
CATCTACATCTTATTAGGGACATGAATTTTCAAAAATAAAGTGGGAAGAAATGTAAATGGCATCAGATGG
AAAATTTTTTTGGGTGGTTTTAAAGTAAATCCCAGCCTTTTCACCTCGTTGAGAGCACAGCTGGCTTGAA
TTTAGACCTCTACTTGGACTTGCTTCTCCGTTCTGTCCTCACATGTGGGGGACTCTGGGAGAGCAGTGAC
TTGCCACACACATCTTTCTGTACCTGATCTAATCAGACCACTCCCCCAAAGCAAAAGGGAGGAGAAATTG
TTGAATGATGAGAACATTACTTGAATGAGGAAATTGTTGCCCTTATGCATAAAGACGTATTATCTACTAA
CTGCGAAAACTTAGAAGTGAGTCTTAGAAGGAATGTCATTATACAGCTTCTTTCTGGTTGTTTTCAAGTT
GGTCCCAAAATATGCAGAAGATGGGACCTCGGAGCTTCAGTACAGTATTACATGTTTTCTGTTCAATTGA
AGCCTTAAAATGGTTTGATAAGGATTTTTGTATTCTCTTCCTGTCTCTCCAGGATTATCCTTAGGGTCTT
TTTTTTTTTTTTTTTTTTTTTTTTTTCTTTTTAAATTCGAGGAAGAGTACTTTCAAAATTCCCTAGTGAA
GAAGAAATATTTACTGATTACATTTCTTTTCCCTTAGGGATAAAGAAATGGAGAAGAGCTTTGAAGTAGT
AAGACACAAAAATAGAGATAGGGAGGAGGTTTCAAAAAACCAGGCCCTTAAACTTCAGCTAGACAACCAG
TATGCTGTGCTTGAGAATCAGAAGTACAGCCACACACAGTACAGCTAAGGAATGGTCTTTGCTAAGCCTT
CCAAGGTAACTAGACCACAGCTAACCACCAAGAACAGCCATTCATCGTTTTGATTTCTGGATCTACAGTG
ACTGACTGAAGACCTCAAGTCCAGTGACTGTCCCTGTTGCACTATGGAAGTTCAAGAGTCACGACTGATC
TTGATGTGTGTTGGATTTAGGGGTGTTTCATTGTCTTAAATATTTGTGAATTAGATTCAACAGTGTTTCC
ATAGTTGCTCTGCGTATAAAACCAAACCTGCAGCCAGTGGTCATTCAAACATCTTTATGTTCAGATACTG
AGCCTTCGCAAGGTTGACTACCTCAGATTTGCTGCCCTTAGTTGTGGATTTCATGTGGATCACATCTTCT
ACATAAGGTTACAGCTACTAGTGTCTGTGTGAACCTTGAAACCAACTCTACTGGATTCCTGTCAGAAAGC
CTTCAGAAGTCAGCCATCTGGGTTCTGAGCCGCTGTAAAAGATGAAGAGTTAAGTGACCTTAATTAACCT
GTTCTGTGCCCCATCCTAAGGCATACTCTGTAGGCTGTGGCTGTGTTAGACTCCCTGGAACAAGCCGCTG
TCAGAAATGATGTGTTTGGATCATCTGTGTGGGGCTTATGATTTATAATTTAAGTTTTTAGTTTTATGCG
GTAACTGGATTTAATTCAACCAAACTCTGGTCCACCAAATGGGGAGTGGGTGGGGGGGTAGTCTTATTTC
TTTGAATAATTTTTCATTCAGATAGTGCTTGTTCGGTTCCACATTAAGGCCTTGCTTTGACTCAGAGTAA
GTTCTTTAAGGGCATATTGTCTGAAATATGTCTGAAAGAAGCATTGGAATTGTAAAATGCCCTATGAATT
TGCCAATCCTTAGGTGGAACCAGATAGCCTTTGATGCATATAAAGGACAGCGGATCCGCTGCACTCCAGG
TGCTGCTCAAGCCTCCTAATCAGGTCTAATTGAACTGCTGTGGACAGAGTGTGGCGTCTGCTCACTGCTG
TGGACAGAGTGTGACGTCTGCTCAGGAGGAGAGGGTTTCACTGACCTGGCTTTTAACAGTTCAAAGCAAC
AGGAGCAAAACACCCAAGTTGCGCATGAATCTGGCATGGTGTCTGATAAATCCTTGTGTGTGCCCCAAAT
GTGAAGGTTATGGGCTATTCATTGTTTAGCCAGCTCTTGACATTCACCTTGGGAGTATGTTTGGTAATCA
CTTGGAGACGCAGGGGAATAGTCAGTAATGTAGCATTTCTGTTGTAATTTCAATTTAACTATCTAGTAGT
ACTTGGCTCTTAGAAGAGGTTTCTGCTAAATTTCTTTCTACCTAATGAAATAGCCTGTCAGTTACCTACC
TTGTCACTACAGATGGTTCAGTACACATACTCTATGTTGGCATATGACTATGTGATACAATACTAGTGCC
TGGGTTTCTCTCTGTAAACGAATCCCTTTGCCAAACACAGGTCAGACTTGCTCACTACTGACAGGAGTGG
AACAGGAAATGGATGTTTTCCCAGCTTGAGAGCATGTTTAGTGGATTTAGGGCAGCAGTGTAGGAAGCAG
GAGGTGGAGGCCAGTGTCACCTGACCAGACTGTATGCCACTTCAGAGCAATAATGTTGGCATGATCTGAA
CCAGCCAGGAGGAGGTTGAGTGATTAGAGGCTTGAGATTCTTAGTTGAACTGAAGACTTCATTTGGGCAC
CAGAAACGTTAACACCTTGAGCCACAAACTTCCCTTAAAGTATGCTTCACTCCAGCGTGACACACAAACA
CAGATTCTGTTTGGGGTTATGGTTTAAGACGTGAACAGAAACATGATGAGGTTTGTTTAATGGCATACTG
TACTGGAACGCTGAAGAACTGCAGCAGATGTAAATTCCAAGTCTTGTTATTTTTTAAGATTGTGAAATTA
TCAAAATGCATATGAATCAAGTTTTAATACACTGTCTGGGTGGATGAGGCTGTCCATTGCACCATTTCTT
TCTTTGGGTTCTCAGGCATGGTTCTGACAGTGTAAGAACTCTGTAACATTTAACATTGAATAAACAGTAA
ACCAATGGA

[0129] An exemplary DNA sequence of the Cdv3 gene in Mus musculus strain C57BL/6J chromosome 9, GRCm38.p1 C57BL/6J is provided below.

(SEQ ID NO: 24)
CCGAGCTCGGAGCCCCGCGGGCCGCGCCCGCCGCCGGCCCCACCCATCCG
GGTCGAGGAGGCCGAGGCCATGGCTGAGACGGAGGAGCGGAGCCTGGACA
ACTTCTTTGCCAAGAGGGACAAGAAGAAGAAGAAGGAGCGGAGCAACCGG
GCGGCGAGTGCCGCGGGCGCAGCGGGCAGCGCCGGCGGAAGCAGTGGAGC
CGCGGGTGCGGCGGGCGGCGGGGCGGGCGCGGGGACCCGGCCGGGTGACG
GCGGGACCGCCAGCGCGGGGGCTGCGGGCCCAGGGGCCGCCACCAAGGCT
GTGACGAAGGACGAAGATGAATGGAAAGAATTGGAGCAAAAAGAGGTTGA
TTACAGCGGCCTCAGGGTTCAGGCAATGCAAATAAGCAGTGAAAAGGAAG
AAGACGATAATGAAAAGAGACAAGATCCAGGTGATAACTGGGAAGAAGGT
GGAGGTGGTGGTGGAGGTATGGAAAAATCTTCAGGTCCCTGGAATAAAAC
AGCTCCAGTACAAGCACCTCCTGCTCCAGTAATTGTTACAGAAACCCCAG
AACCAGCGATGACTAGTGGTGTGTATAGGCCTCCTGGGGCCAGGTTAACC
ACAACAAGGAAAACACCACAAGGACCACCAGAAATCTACAGTGATACACA
GTTCCCATCCCTGCAGTCAACTGCCAAGCATGTAGAAAGCCGGAACAGGT
ACTTAAAATGAATGCTACCTGGAATTAAATGACTACATATGGCACATCTA
CATCTTACTTTAGGGACATGAATTTTTTAAAATAAATAAAATGGGAAGAA
ATGTAAAAAAAAAAAAAAAAAAAAAAAAAAAAA

[0130] Rab6b is a small GTPase that is thought to play a role in retrograde membrane traffic at the level of the Golgi complex. The Rab6b cDNA sequence in Mus musculus is provided in GenBank Accession No. BC059903.1 (GI:37604218), incorporated herein by reference. The Rab6b amino acid sequence in Mus musculus is provided in GenBank Accession No. BAF02859.1 (GI:112292963), incorporated herein by reference. The Rab6b cDNA sequence in Homo sapiens is provided in GenBank Accession No. BC078662.1 (GI:50927455), incorporated herein by reference. The Rab6b amino acid sequence in Homo sapiens is provided in GenBank Accession No. AAH78662.1 (GI:50927456), incorporated herein by reference.

[0131] An exemplary DNA sequence of the Rab6b gene in Mus musculus strain C57BL/6J chromosome 9, GRCm38.p1 C57BL/6J is provided below.

NC_000075.6 (GI: 372099101: 103112074-103185270):
(SEQ ID NO: 13)
CGCCCTCCTCCTCTCCCCTCCCTGCTCCTTCACCGCTTCCTCCTCCTCCTCCTCCTCCTCGCCCGGCCCC
AGCTGCCAGCACCATGTCCGCAGGGGGAGATTTTGGGAACCCGCTGCGAAAATTCAAGTTGGTTTTCCTA
GGGGAGCAGAGCGGTGAGTACTCGGCTTATTCTCTCGGCTCGGAGCCGAGTCTTTTCCCCACGCCGCCCA
TTCAGCCACCCCACTAGGGACCCTCCCAGCCCTGGCTCGCCAAGGCCCTTCCACGCCCCGGTAGAGGAGA
GGGATGCAGATGGGGAGATGGGGCTGGCTCGGGTGGGGCCGGGCTGGGGAGGACCAAGGGGGAAAGGAAG
AAGGTGGTTCTGGGGGTCAAGGGATGAGGGTGAGTGTGAGATCTGGGTACGGGTACCCGGTGCAGGTGCG
TCCGGGAGGACCGAGGGCGGCGGCTGGCTCACCCGCTCTAGGCGCCGGGCTCGCGGGCTCGCTGACTAGC
TCGCACTGCGGCACAGGCTGCGGAGCACTGTGCAGGTGTCTGGGTGCCGGCGAGGGTGTGGGCGAAGGGA
CAGGAGCCTCTCTTGGGAGAACGAGGTGGGGCTGGGAGCTGGTTGCCCCCACCCCAAGGTTGCGCCCGAG
GGGCTCCCTGCGGACCCTGCCTGGAATCTAGGGAAAGGACGCGTCCAGCTCTGGAGCAGATTGCTGCTGG
GAAATGGGGAACACGACACCTGTCCCTTTTCGAAAAGAGTGGGTGCAAGTGGTAGGGTAACTGGGCACTT
AGCTTCTCTGGCTTACATCCGACTGGGCAGAAGGTTCTAGACTCACTGTCCTTCACTAATGTGTTAGCCT
CTTTGGGGCTTAGGGGTGTGGATCGTGAGAGTGAAGATTCTTCCCATAGCAGGTGACTTGGGGGATGGTA
CAGAGGCGTCTCATATCTGTGAGCTTGGCACTGGGCAGAGAAAGGCCTAGGCGACACGCCCTGCCTGGCT
TCCCTGCCCCCTCTAGAGAGCATCAGTGGAGCCGGTGGATTCTCCCACCCCCCATCTCCCAGCTCACCGC
CCTTCTTGGGGGAGGGGAGGTCACCGTGGCAGCCAGCCAGAGCCTAAGGAGGGGGAGAGTAAGGGTTTCT
TTGCTGCCCAGGAGTCTCCCCTCCCAAGTATCTGACACCCAGGTTGGTCCAAGGTGGGAAGCTCAGACAG
AAGAGCAGCGACCCCTCTGATACCTGTGGGAAGGAGTACCTCCTTGAGAGCCTCGGTCCAGGAGTCACAT
AACCAGGGGGTTACAGACATAAGCTGGGCTTCTGAGCATTTCTGCTGGAAGAGAGGGGGATCCCGGGGGG
GGGGGGGGCGGGATTCCCAGCTCTAGCTCTGTAAACCAGTTCTGTTAGCTGGTTTGGAGGCCAAGAGGAG
GAAGGCCGTGGGAGGACCTGGTGGGCCCAGGCACCGTGCAGCTATGACGTGTGCGTGTGGGCTGTGGAGG
TCACATGGCCACCTCCTGTCTGCTGATGCTCAGTACCTGAGCTGGAGGGTTGGGAGCCGGGTGGAAGTCG
GGGTTGCCTGTCCCGGAGAGCTGGGTTTGGGACATTTCACATCGTACCCAGCTCAGCTAGGTAGCCAGCT
GGATCTGATTCCCTGTGCTTTGTAGATCCCAAGTGTCACAAAGGACACCTCCGTTCCTTGCTGTGTGGAA
AGGATTTTGGGAGCACCTCAGCCCTAGGAGGGAGCCTGCAGGTGCACAGCAGCCTTGGGGGGTGGGGGGG
GCTCTCAACTGTGTTGTCATTTGCCTGATTCCAGGCCTCCTGGACACTCAGTTTCTGTCTCTGAGTAGTG
GGTAGCTGGAAGCAGCCCTTATGCCTCATGTTTCCCCCAGTGCCTGGACTATGCTGGAGTTCAAAGAATA
TTTGTTAATTCTAAATCTGAACACAGTTCCATAAAGAATCATATGTGGTGAGTTTGAATGAAACTCTGGG
CTCCCTTAGCAACTGCTGATGGGTGGAACACACACACACACACACACACACACACACACGCCACCCCCAG
TGAGAGTTCTGCCAACCCCTCCAGGTCTGGAGTCACAGAAGTGAGAGACAGCCTTTCCTCACATGCTCAT
GTGGAGAGAGAGTGGGGAGGTCTTGCCCAGAGACCCACTGTGAGTTGTGAACACTTTGGGAGCAGGAACC
CCCACTTCCATTTTCCCGTCTGCCATTTTTAACTAGAGTGTCATTGGGAAATAAGATGACCTTCAATGCG
GAAAGCCAAGTCTGGAACCTCTTTGAGAGGATTTATGGGCTCAGTTAGTTGGTTGTGGCCTGGTGGAATG
CTTGGCTAATTGGTTAGGGGCAGGATTCATAGGCCCTTGGAACATAATCCATCATTGTGTTATTAGTGAG
TTGTTTACCGCGGGTGTACAGAGCTTGTGGTGTCTGTGAGTCTCAGAAGTTATGTGTATTCCGGAGCCTA
GTAGGCCGTGGCTGTAACCCCTTCCATCTTACCTCCTGACAGTTTGCATGCCAGCATCCTCTGCAGCCTG
TGCTGTGGAGGGCGGCTCCTGACATCTGGTCCAAACCCTACCCAAGCTCTCCCTTCCTGTGTGATCACGG
AGACCCCTCACGTTCCATACCAGGGCACTTGAGCCAACTGGAATCCGAGGCCTAAGCTTCCCTATAGAGG
CCAGCTAATGGAGATGGGGGAGGGAGGCGATAAAAGAGGTTGAAAGGACACAACCTTCTCCTGATCTCTA
TTCCTGACATTGTGGTAGCATCCCTCTAGGCTTGTGGACAGAGACAGCTGGATTCTAAAGAGGGGTACCA
GGCTTGGAGCAGGCTAAGGTAGGAGATACCCTGGAACAGATAATCATAGGTAGGCATGAGGCCTTCAAAG
GTACCGAGGAACTGGTTCAGGTAGGAAGCCTTTGAGTGCCTGCTCTCCGGAACGCGCCTCTCGCCTGTGG
ACTGTAGTCTGACTGGCAGTGCCTGTGTCACATGGAGTAGGATCCTGGCCAGGTGCTGTGGACTTAGGGT
GAGGTGTTTCCTTGCGTCAGGTAGGTCATGCAATGCTGCTGGCCTTCAGGTCGCTGTGTGGCGCCTCCCG
ATTAGCCCTAACACGGGTGGCAGTGGTGGCGAACCCAAGAGGGTGGTGCACGCCAGACTGGTGTGGAGCA
TCTGAAAAAGACAGGCAAAGTCTGAGGGAGAGTGGGCCTGCGAGGTGTCCATCTTTCTCCCAAGTTATCA
GAGCCTCCCAGGGGATCTGGACCTTACCAGACACATCCTGGTGTGTGTGGTGAGGAGGGAGGGAAGGAAG
AGTGGACAGACATGGGGGGAGGGGGGCTGTCTGCTTTCCCGGGCTGAGGCAGTAGGCCATCCGTCTCTAT
AGGCCTGAGTACAAGGAGTAGGGGTAGATTTCAGAGAAACCCCTCTCTCCTTGGCCCAGCTCTGCAGAAA
GTGTAGGTAGAGGCACGCCTGTCAGGAGCGACTCTAACCTTCCGAACGCTACAGCCCTCTAATGCAGTTT
CTCGTGTCGTGGTGACTCCCAGCCATAAACGCGTTTTGTTGTTGCTTCATAACTGTAATTTTGCTACTGT
TATGAAGAGTAATGTCAATATCTGATATACAGGATAGCTGATACGTGATCCCAAGGAGGTCTCGACTCAC
AGATTTGAGAATGATGGGATTGCTGGCACCCGGTTGAGACCGTCCTATACATCCTCTTCAGCTAAGGGTT
AAGAAACAACTGTCCACAGACTGAGCCCTGTTTCCTGCAACCACCCCATGCAGCACAAACCGTCCTGTCC
TAGCTTGGTGGCAAGCCCACTGTCCCTTTTAGAAGCTTTTCTCCTTTCAACTTCCAGGCTTGTCACATGG
ACACAGCTTTGATTCTTTTAATGAACATTAAAAAAAAAAACCCAAAACCCCACAAAACTGGTTATGTGCA
GTCCCATGACGCCTCTTCTGTCTCAGCTAGGTAAGGATTTTAATTTAAGGATTTTAGGGTGAGTTTTAAG
CACCCTAAGTGGGTGACCAAAGCACGTTGAGAGGATTGTGTCTGAGTCATCTCGCTCCCTGCTCCCGTCT
GTGGGCTGTGCGTGCTCACCGAGGATCTTGATTCGAAAACGATGACATCTTTGATGTGAGAGATTTGCTG
ATGGCCTGTCAGCAGATTAACAGTGAAGGGAGGTGAGGCAGCTTTGTGTGGTGTTCCTGGCACCTGGCAC
TCTCTCAGGCCAGATTCTTCTTATCGGGGAGTTGACAGTTGCTTTGTCTTGTTTTGTTTTTCCAGAGAAT
TGCATCATTATGCCATGGTCATGCCCAAGCACCTGAGATTCTCAAAGGGTTCCCCAACTCCCTTAATATC
TCTGAAGAAATATGGAGGTGGAGTAGGGGCTCCTGTACTACCAGAGGTGGGGAAGGACACGGCAGACCAG
ACCAGATCTCTTGGAGGCTCAGACTCAATCCCCATGGTGTTCTGTGCCTTGCTTTCTCATCTCGGTTTTT
TTCCCTCACCTTCTAATTTCTCTCTCCCATCCCTCTCTCTTGGGTGCTAGTACAAGAGAGAGAACCTTGG
GCGTTGCGTATAGACCTACAACCCTTGATTTTTTTTCCCTATGTTTAACAAAGTGCGTCGGAATGACACA
GACAGTAAGATGAGGCTGTCTGTATTCCTTCTGTTACTATAATGAAACACCCGAGTCAGGCCAGCTTTAT
AAGGAGAGCAGATTTGTGGAGCTCACACTCTGGAGGGTCAAGGACAGGGTGCTGGCATTGGCTCCATTCT
GGTTGAGGCTCTCATAACAGATGACATCATGGTTGGGGAGTGATTCTGAGGGCACGAGGTCATATTACCA
CAGGAAGTTAGATAACTTCACAATCCTTCCCCAACACTGGCTCCAAGGGATCGAACCCCTCTTAGCAGGT
TTTCAGGCTTACTCTTTGGGGGAGGGGTTAGGTGAAGGTCAGGGGCTAGGAAGATGGACAAGGGTCTTAC
ACAGGCCTCACTGGCTTTGAACTCCCTGTGTGAATGGGGATAACCTTGAGTTCTCCTCCTCCTCCACCTC
CTGAGTGCCAGGGATTGAATCTAGGGCCTCATGCATGCCAGATGAAGCACCAAATCCCCTGGTCCCGCCT
CTTAAAGGACCCGCTGCCACATGAGGACTGAGCCACATCCAGACCAGAGACTTAAAGGTTAACCCTCGAG
AGAAAAATGTTGTTATTTATAATCCTCAAATGCTCATAAATCATTTTAAAATAGAACAAAATAACTTCCT
GTCCTTTGCTTCCATAGTGCACCCCTAAAACCAGTCTGTGTTGCCCTGACATTGCAGACCATCCTTAACA
GACCTGAGAGAAGCGGCCTGTAGGTTACCTCCACCTGGCTCTCCCCACCCAACTTCCGCACCCAGTGCCT
TTCACTGTGGCTTGACACAACAGGGCTCCTTGGTCTCAATATGATGACATTGTTGGCCACAACTGTCTGG
GGAGCTGAAAGGTTTCGTAGAACAGCAAAACATAAACAGGATTGAACTACTGTGCTGGACACTGTCTGTC
TGTCTGTCTGTCTGTCTGTCTGTGGTCCTTTGTTGTTTCTTGCTGTGCAGAAGAGATGATGGAGGAGCCC
TTGCTGGAGGTTGCCAAGGAGAAGGACCAGACACGCCCTGAGATGGGCAGCTCTTTTGTTCGAGCCAGAA
AGACAAGCTGCTGGGAAACAGCTCCAGGCAGGGCCTGGGACTTGAAGTCCCAAGGGGACTGGGAATGGCA
GGCGCTTTGTTTCTAGAGCCAGGGAGCCTCCCCCCCCCCCCCCATGTTGGCTTACTTCGAAGGGCTCCTG
AGGAGGTCTGTATTATAGGTCTGGGCTTCAGAAATGAAATTTTCTTCATTATTTCTATAACTTCTGCTTG
AAACTTAAGAGCGATCATTTTAAAGAGTAAAATTTTTGTTGAATACTTCTTATCACTTTAATAAAGTAGC
TTATTTTTAGAAGAAAAACATATTTATCCTGTTCTCTTGGTAACGAGACCAGTGGGAGTCCAGGTAACTG
GGGCTACGTACCTCGGCCTAGCATCGTATCCAGGGAGTGATGTACTCAAGGGACAGGCCTGGGTCCTGAA
GAGTACAGCTGACAGTGTGGCCCTGAAGGCAGAGTTGATTCTTTAAAGTGGTCTCCGAGAAATTCACTGA
AGGGCTGGTTGCCCGTGTCCTTCCTCTGTGAACCTCAGGTCAATGCCCCGGGCTCTCCAGGGGCACTTTG
TACCTTCCTGGTCACTCTGTGATAATCATGCACTGATTGCTATTTTGCGGTTCGTGAGGCTGCGGCTTGG
AAAGAGCTGGTCCTGCCTACCATTAGTGTAACAAATTAGAGCTTGGAGTGCCGGGGTTTGGGGGACAGCT
GAGTCAGGAGAGTGCCTGCCTTGCCAGCATGAATAGCTAGCCGAGCTTGAGCCCCAAAACTCACAAAAAA
AAGTCGAGTGTGGTGGCAGATGCTTTTAATCCCAGCACTGGGGTGGCAGAGGCAGGTGTATCCCTGTGGC
TTACCAGCCAGCCAACCTGGTCTACGAGGTGAGCTCAAGGCCTCCGGGTCAATGAGAGACGCTGTTTCAT
GAACCTTTGGATCAGGTCATTATCCAAGGCAGGGCCAGGAGTGGGGACAGAAGAATATTGAGGACTTAAA
AGCAGAGTCTGCCATGAATGAATGACTCAGAACACCTGTACCAAACACTTTGCTAAAGAGGAACCAGTAG
ATCACCGTGTAGCTCCACTGACCATGAAGGATGCTGGAGCCAACCACAGGGAGGACAGGCTTTGGGGAAG
GAGGCAGGCAAGCTCCCCACGAAGGAGGCTGGCAGCCCTGGCATTGTGTGGCAGGCAGTCTGTCTCCCCA
CACAAGGAATTGCTTACTTTGGATGGCCTGGAGAGAACCAATAGAGAATCAGCCTTCAGCCTACTTCTAC
TGGGGACATGCTGCTGGGGACTGTTCCCAACAAGGGGAAAACCAGTCAAATGTGGACCAAGCCCTGCTGG
GCCTTGTCTTGCTCCTGGGACTGCCGTGTCCTGGAAACACAGATGGTTTTTGCCACCTGTTAAATGAGCC
CCTGCTCCACTCTGGCTCCCAAGGCTCCTGGGTACAGTGGTTTCTTAGGCCAGATGTCATTCAGTGCTGG
CATTAAGCAAGATGTCAGGCTTATAATGATACTTCAGCCTGGAGATGAGCATGCCGCTGGCGTGAGGTGC
TGCGGAGAGGCTCTCCCGATGTGTGCTTTGGTCCATCCTGTACTTCCTGTCACCAGAAGGCACTTCTTCC
ACATACGGATGGCCTTAGAGGAAGGCAGCAAGGAAGGTACACCTCCCAGGCACTCGGTGCTCAGCACAGG
GAGAGAGCCAGAACCAAGGTGGGTGGTAGTGACCTTGCCTAAGCTCCTGCTCCGACCATCACTGTGCCGG
ACCTCCTGAGTCCTGGGCATCTGGCCCGACTCACCCCCGTCACTTGTCTGGGTGGTGTCTGGGGTGCAGT
AGAACCGTGCACACTCGTTCTCCTCAGCTGGCATGACCTTGCTGGAATTTCACAAAGATCAAACGCATGA
ACACACAGCATGCAGGTAAAGCTCGAGTACCAGCTGGCTTTGTCAATAAAATTGTGACGGAGCCTCCCTC
TCCCCCTCCTCACCTTGCAGCTGTTAGGGAAGGAGTAGAGATGCATGAAGCATTTCTGCAGGTAGGCTGC
ACCTCGCAGCCCCGGGACAGCACATCCCAGTTGACAGCTGCAGAGATGGAGGCTCTGAGAGGAGGGGCTT
CTGTGTGCCCAGCAGAGCCCAAAGGCAGACCCCACTCCGCAGGAGAGAGACTCAGGCCTCTGGCTCAGTG
CTTGCTTGCTCCTGCTCATCGCCCGCAGAGGCGGGAGGCAGCACTGATATACCAGTTTCCCCACGTGAGG
GCTACCCATACCCTCATGAGCACCTCATTCTCACTGGCAGACCACAGGGGCAGAAGCTGCTCTGGTGTGA
CCTAGACCGTTCAGATCAGCCTAAGGTAAGCGGGAAGAAGCCCTGGTCCTTATAAATAGGAAGCATTAGA
TTCAGAAGCAGAGCTATGGCTGTGGTCTGCTTGAGCAAGTCGTTTTATGGTGAGTGGGAAAGGCCTGTAG
GCATGGGGATGCGGCAGACACAAGGGCCCCCTCTGTGCCAAGGCAGGAGAGGGCTTAGGGCCCCTGAAGA
ACTGAACAGGTTCAGGGCTGCTGGGACTCTAGTGCCCTGCAGGTGTGGGAGAGTAGCAGGTATAAGGGTT
GAACCTACAGAAGATGGCAGGGCCAGCCCGAAGAGGCCTCCTTGCCTTCCCACACTTGGTGTCTGAGCCT
TTCCTATAGAGAGTGGTGACCCCTGGAGGCCGGGACAGGGGAGGCCCATGCTCATGGATTAGGAGACAAA
GGCAGAGTGTGGCATATTTGAGGGTCCAAGTGACTGACCTGGGGTCAGACAGGGGGCATTTGGGGAAGTG
TAAGCCCAGCTTCTGCCTGGCTCTCTGGCCTACTCAGTTGGGTGGGTCTGTTCTCTCAGTTTGGTCTGCA
GAGACAAGACTCAAGACAATGAGATGAATGAGGGAGGGACTCCCAGCTTTCTCCATACTGCCCTCAGATG
TCCTAGAACCAGCCCCTGGGAGCTCCCCCATCTACACTGCCTCCACAGCAACCTGGGGTCCCTGGATGCT
TTGGCCTTGGTGACATGGGTGTGACAGTCTGCAGCAGTCCTTCCAGACTTCCCTCTGCCCGTTGCTCTGG
CAGATGTGGCATCTGATGCAGTGACGATCGGGCTCTGATTAGCCTCCTGCCGTTCCTCCTCTTTTGGGGG
CCCTTGCCACACACGTCCTTTGCCTTCTCCTGTGCTGCTTTCCTTTAAGGTTAGGAGATTTGGTCGCACA
GCGCAGATGAAGAGAAAGTGCTGTTGTCTGCCTTGACGACTGAAACTTAAGCTTAAACTGGCTGCTCCAA
AAGCCAAGGTGTTTGAGAGCCAGGGACCAGAGTGAGTGGAGGCAGAGGACTGCCACTCTTGAACCCACCC
CTAGCTGAGAAAGAGCAGCCTATTGGGATCAAATGAGAACAGGTTTTCAGATGACCCATGACCTCTGCTC
TCTTCCCTTCCTGCCTCAGTAGTCTTCCAATGCAACGGAGCACCGCCTGGTATAGCTTTGGCAGCATGGC
TGTAGTTCTGATTGGTTCATTTACAATGACAGCATCTCATAGTGACACTCGCCCCTTTAGCAGCACCAGA
TCTATCATCTCTGTGGTCAGGGTGGGTGAGGACTCTTCTCTGTGCTGGTGTTCAGCAGGGGAAAGAGGGA
CAACTTTGGCCCCTTCCAGCCTCCCCTGCAGGTGTGGGAGCTGGAGACCCATCCCTGGTTCTGGAAGAGA
TTGCTGTAACTGTGACCAGCGCACTAAAGCCAAGTCCCAGGGGACAGTCAGATAAGCTTCTGGCTCACTC
TGAGAGTCCCAGTGAAACATCCCACCTTGACCCTGTGGTGAGCAGGAAGTAGGTCATAGGACAGAGCGGT
GGAGCCATTTAGGACACGTTTCTCATTTTTTTCCCCTCCTGTCCAGTATAGTGAGCAGCCCCGGAGGGAG
CCACAGGTGTAGCCAGAGGGAAGAGAGACCACGGGTGTGCTGAGTCAGGGAGAGTGTGCTTCCTGCTTCC
AGCACAGGCCAGGCTCTGCGGCCACACTAGGTGTGCCTTCAGGGCTTGCTGGCTTCCTGTGAGGCTTCCA
GAGCCAAGATGCTTGGTGGTTCTAACGATGCTATCCATCCTGGGATTCTGAACAAAGTCCGGTTAAAGAC
TGGAGGTTCTGTCAAACTGATGCTGATTCCTGGGCTTTGTATGTTGTGACTGTGAAGGGCAAGAAGAGGA
GTGGGGCAGCAATGGAAAGGAGGACTCTGCCTGGTGCTCCCTGGAGCACCCCCACTGCCTGAGCACTCCC
TGTGTGTGTTGCACCGTGGGGTGATGCTAAGCCTCATCTCTCCCTCCTCCAGGGGTCTGCGCTGCTGCCG
CCGTGACCCTGCAGATGTACACTTATCTGGCCACTGTAAGAGAATGCTTCCAAATTGTTTTTAAACCCTC
GGCATATCCTGTGTGAAGCCCTAGAACCTGTAAAGTTCTGAATTCTGCCTCACTGGGTTCCCTTCCCCTT
CTCTACACCCTACCATAACACTGCAGGCCACTGCCCAGATCACAAGGAGCAGGAGGCCTGACAAGGCACC
TGGCCAGTCTCCCGTCCTGAACCTTTCCTAACCACATCAGAAAAATGCCAGAGCCCCACCTGTAGAGCCA
GGAAAAGTCTGCTCTTCTCTAGCTCTGAGAACAGAAGAGATGCTAGAGCTGGCATCATCTGGTGTCTTCT
GGTTGGGGGGGGCGGGTATGGCATGGGGGTCTGGGCAGAGGGTGACCAGTGCCTGGACCAGTAGACCCTT
CAGAGAAATCCTCCATTCTGCCTTCATCCCAGCAGGCTGGGAGAAATATCTGCTGGTTAGGAGAACTTGT
TCCAGGGGATCAGTCCAGATCACAGCAGTAGGAAGGGGAAGGGAACCACTTGGTAAGTGGAAGGCAGCCC
GTTACTGTGAGCCCCATGTTCTCAGATGTCCTTCTCCTGAGTGCAGATAGGACTTGGGACTTGCTGCTAG
CCCGTACAGTATGGCAAAGGTCGCGGGAGGTCACTCATTTAATTGTGTCATTGGGAAAGGTAACAAGATA
TTTGTCCCTGGATGGTTTCATTTTATTTATTAATTAAAATTTACTCTCTAACAATTCCACATGTGTATGC
AGTGTACTTTATTCATAACCACTTACTTTCCCAACTTCAGCCTCCCCCTCCCCCCCTCAGGACCACGCCA
GGTGACATCGTCCCCTGCTCGCCACTATATTTTTTTGAGGCAGGGTCTCCCAGTGAACCTGGAGCTCACT
GATTGGCTAGATTTGCTGTTCGGTGAGCCCTGGGCAATGTTCTGCCTTTGCCTCCTGTGCTATGATTTAT
AGGCCACCGATAGCTTTTCACACGGGAGCTGGGGATCCGGTCTCAGATCCTCATGCTGGTGTGGCAAGCC
CTTTCTCCACTGAGCCATCTCCCCAGCCCTTCTTGGTTGGTCTATTAGAAAACTGTCCCTCCGTGCTTCG
GAGAAATAAGCTGCCATGCTTTGGATAAGTGTGTGTAGAGAGGGGCTGGAAACTGTCTGTGGCTGACCTC
GAACAAGAAAGTGTCTCCAGTTTTATAAGCTTGGAGGAGGACTCTAACTTCGGAAGAGAAATACGGTCTG
GCAGACACCATGTTTGTGATCCCGTGAGACCCGAAGCAGAAGGTCCTTCAACCCATGTCTGGACTCCTAG
CTGGCAGGGACTGAGAGATCATAAAAGTTCACTGTTTCCAGCCATTGTAACAATTACCGATGGCAGTCGG
CACACAGAAATAGATAGTTTCTACAGAGGAGAGAAAGATCTTAGGGTGGGGAGATGCCTTTATCAGAGAG
GGAGTGGCATTCTCAGGAGGGACCCCTGACCAGCCCTGAGTCAAGCAGCTACCCAGGCCCAACCTGTGAA
CCCCTGATGTGTGATCTGCTTATGTTCTTCATGTGTTCCTGTCTTAGTCGGGGTTTCTATTCCTGCACAA
ACATCATGACCAAGAAGCAAGCTGGGGAGGAAAGGGTTTATTCAGCTTACACTTCCACATTGCTGTTCAT
CACCAAAGGAAGTCAGGACTGGAACTCACGCAGGTCAGGAAGCAGGAGCTGATGCAGAGGCCATGGAGGG
ATGTTACTTACTGGCTTGCTTCCCCTGGCTTGCTCAGCCTGCTCTCTTATAGAACCCAAGACCACCAGCC
CAGGGATGGCACCACCCACAAGGGGCCCTCCCACCCTTGATCACTAATTGAGAAAATGCTTTACAGCTGG
ATCTCATGGAGGCATTTCCTCAACTGAAGCTCCTTTCTCTGTGATAACTCCAGCTTGTGTCAAGTTGACA
CACAAAACCAGCCAGCAGAGTTCCCAAATAAACCTTGATTCGTGGCATTGTTCCCTGTCAGATGCAGGAC
TAGAACATTCTGTAGGGCCTCTGTCATGTCCTTGTGTTCTGACCCCACTCTGATCGATGGCCCTCCCAGG
AACCAGGTTTATTGTCCCTTAACCTCTCTGCTGACCCTTGGCACTTCCCATTGCATGTTTACAGTGGAGC
CTTAACAAGTGAAGTCTTCCTGGTCTGGTGACACCTTGGTGACCTTGTGTTTTTTATTTTTATTTTTTTC
TTTTTGTGATTTTTCAAGACAGGGTTTTTCTTGTGTAGCCCTGGCTGTCCTGGAACTCACTCTGTAGACC
AGGTTGGCCTTGAACTCAGAATCTGCCTGCCTCTGTCTCCCAAGTGCTGGGATTAAAGGTGTGTGCTACC
ACTGCCCGGCGACCTTGTGGTTTCATATCAGCAGCAAGGACAAGAGTAAAAAGAAGAGCTTCGGAGGGTG
GGTCTCAGTTGTTCATTGGAAGAGACAGTGCCTGCATGTGGCCCTGGTTAGACAGGTGGCTTCTGAGGGT
GATTTCTCCGTTGTGCATTGGAAGAGATGGTGCCTGGATGTGGCTTTAGTTCCGTACCCCCCATTCCTTC
CTCTGGCTTCACAACTCTCTGGTAAGATCTGCATCAGAGTCTTCTGTGGTTTGGGCCATTATGGGGCTGC
TTTTAGGAATGGCTCCTTAGAGACCTTGAGCTTACAGAGTCAGAAGAAGACTAAACATTTGCTCTGGTTC
CCCGTTTCCCCATCCAGTCTAGTGCCGGACAAGCAACCATCTGAGTTCCACAAAACTGGAGGAGACACAG
CGATCCTTCCTGTATCCCAGATGGCCGTTATCCACTCACAGGCCCAGGGCCCTGAGGTCTCCAGTGTGTG
TTCCTTCCTCATGGTACTTTGGCAGGAGGCCTGCCTCTATGCAGGTGTCTGAGGAGCAGGAGATGGTCAA
TTTTGTCTGAATGGGAGGTCTAGAAGTTTCTCTCTTGCTCTTTTTTTTTTTTTTTTTTTAAAGATTTATT
TATTTATTATATGTAAGTACACTGTAGCTGTCTTCAGACACTCCAGAAGAGGGCGTCAGATCTTGTTACA
GGTGGTTGTGAGCCACCATGTGGTTGCTGGGATTTGAACTCCTGACCTTCGGCAGAGCAGTCGGGTGCTC
TTACCCACTGAGCCATCTCACCAGCCCTCTCTCTTGCTCTTGTGTTCCCCTTTATAGCTGGCTTGAGCAA
GGTAGGCCTGAGCCTCTATCCACCTCCTCCTGGGCCAGCTGAATGTTGAGCTGCTGTGTGAGGGTCTGTA
GGAGGACAGGAGAAGAAGCAAGGGCCCACAGAGGCAGCATCAGAAGCAGCCCCCTGTCTGGAGACTAAGA
GCATCCCAGTTTGCCTCTTGGCACGATGCTCTACCCCTGTACCACAGTTCCTTTGAGAAGGGAGTAGACT
TCTGGGAAGGTGTTTGCCAGCATCGGTCTTCAGGTCCCTTCCACATCCCTGAGCAAGCTTTATCCCATTG
TCATGTCAAAGTCGTGACCCTAGTTTGAGGAGCTTTAGGTAGTCAAAAGTCTCTCTGACAACTTAGGATG
CATAGCCATCCATGCACTCTGTCCTCCATCTTGCCACCTCACCCCTTTCTTGTATTCCTCAGACTTTTAG
CATCCACAGCACCAGCCTTGGGAAGAAAAGGGTGAATATGCCCATTACTTTGCCAACATTATGGCTGGAT
GAGCCAAGACACCTATTAGATAAGCTATAAGCTTGCAATAGCAGGAACTTACATTATGGCTGGATGAGCC
AAGACACCTGTTAGATAAGCCATAAACTTGCAATAGCAGGAACTTCCTAAGGGGGCAGTGGGAATATAGC
ATTGCTATCTCTCTTCTCTGCAGTATGTTGTGTTCGTGGTGAACCAGTTCTGCACCGCATGGATGTGTGG
ACACAGTTGGCCTGGAGGGGCTGGCTGGAGTTGGGCTGAGCCTCAGAGCAGTTGAATGGGAGCACATTTG
CCCATTGCAGTGTGACTTTTCCTGGGAAGCCCAGGGTTGCTATGGGTACGGTGGATGGGGACCTGCCAGT
GTGGTGTGGCTGGCACTCAGATGTTTTTACTTGGCCCCAGAAGGAAGACACCATACCACTCTGAAATTGC
TATGAGTGTGCAATGCAATGAGGCAGAAAGGATTCAGACCTGGGTAGGTCAGCTGGGAGTTCTGCAGCCT
ACAGAGGGTGCCAAGATCTCGGGAGGGTCTTAGAAACCGTGAAGGTGATGTCCTTGATCATCAGTCCCAG
TAGCGAGAAGCCCAGGGAAGTCAAGACGTTTCCACATCGACCCATTGTATTGGCCATATATGTGCATACA
CTGTCTGTATGTGTACTACATACATCTCAAATGTGCATACAGCAGTGGCACCCTGTGATAAGAGCTCCCA
GCAGCCACTGACCTGGCTCAGTCCTGTTCGTCTATGAGGCTTGAATAAATGTACAGTAATATTCCAGTTC
CTTAGGAAAATTTCATATTCATCAGGGGATATGCAGTCCTTAACAGAGTGAACAGTTCTTTCAGAGGACC
CAGGTTTGGTTTCCAGTGCCCACATTGGGTGGCTTATGACTACTCCAGGGGTTCTGATACCCTTACTCTG
GCTCCGGGGGTTCTGATACCCTTTTCTGTCCTCCTCAGGTACTTCACTCACTTTGAGTACATGGCCCCTC
ACATACACGTGTACTGAAACATGTACTTAAAAATAAAATCTTACAATTTTTATATTCAGCAGCACATTTG
TTTAATCAGACAGAATGCACCATTTCCTAAATATATCGGGTATCTCAGAGACTGTGTGTATATAAGCATA
TATGTTACATATTAATATATAATATTTCCCCTTTGCTGTTCATTTTAGCATACTTTTAAGCTTATAAAAA
AGTTACAGAAATAATACCAAAGCTTCCCGCCTGCCTTTTACCCAGGACTCCCAATTTTTTAATTTTTACA
ACTCTCACAGAGTTCTCCAGACTTTTGTGAGATAGATATTTCTCTCTCCATTGAATGTCTGAGGAAGCTG
AAACCCAGAGAAGGTGGTAACTGACATAAGATCACACAGCAGACCAGAGGCAGAGGCAAGATTAAAACCC
AAGCCCGTTGGTCCTTAGAGCATCTGTGTGAGCAATGAGGCTGTGTGACTCCGTTGACGTCTCCTCTTCT
GCCCTGTGTTTCTTTTCTTGTACAGTAGATCTGCGAGCAGTGAGTTATCTCATCTCATCTGTCTTTATCT
CACTTACATTTCTGAAATGGTTTTTTTTCCCCCTGGGGGTAGAATCTGGGGCTGCCGATATTTTGAAGAT
GCCCCTTGCTCACTCTGTCATGGCCACTGGAGCCCTAGGCCAGAGGCCAACTCTGAAGGTTCCAGTGGGC
CAGGTCCCTGTCACTTACTCCAAAGAAGGCAGGTGGGATGGCGGAGATGCAGCAAGGAAGGATGTTAGTC
AGCACTGCTGTGCGGGGAAGCAGCCTTTGTTAAGCCTGTGCAGTCTGTCTTCTGGGGACGACTCGGGCTT
TAGGTTTAAAGAGAGGGAGATTGGGAGATACATAAGTAAGCAGGCTTGGTTAAACTGGTCTAGGTGATTA
TATCAGTTCTGGCTCTGCCAGCTGACTGAAGTCCTTCAAGGAGGCTTCCAAGGGAAGGGACACTGCAGGC
AGGCATTCTGTCCCCAAGGTATCCAGGTGGTGGCAGGTTTAGAGCCGTGAGTGGCTACTTTCTGGTACGT
TGTGTTTCATTCACTTTGTTTGGGGTGGGGGAGTAGAGTGTCTTGAACAGAACTTTGACAGGAAGATGTT
TTTATCTGCATGCTTTCAGGCTTGAAGAGAGCGAGATACGTCACTGACGTTTGCGCAGACCGCCCCTGAG
TAACTAACATGCCTATGTGCAGAGTTAGGCAAAGCCGGAACTTGAGTCGGAGCAGGACCTCACTGTGTAA
GAGACCAGCCTACTTCTGCCTCCAGAGGGCTGTTGGGATTAAAGGCGGACACCAGGGTATTCAACTCTGA
CCAAGTTTAAGACCAAAGAGGAAGATGTGAAAGTGAAGGCTTTTCTCCTGCTTTAGTTTTAGTCTAGTTT
TTGCCTCCTGGGGCCAGTGAGGAGCCAAGTTTCTTGGTAAACGCAGTTTCCACCTGCCTGTTGTATCGCT
TCAGAGTAACAAGGACTCTCATAGTTCTCTCAGGTTTATTGTTATTTTTGTTTAAATAGTTACCTTTAAA
GCCACTTAAATGACAAAAGTCTTGGTATCTGCCCACGATTGTCGATTGTCCTTAACTCTCTTTTGTGTCT
GTGTGTTTCTACCTAGTGTCATTTCCTGTATTCCTGAAGAATTTCCCAGAACAGTTTTTGTCATGAGGAT
CTGCTAGTGATAAATTCTGTTAGCTTTTGTATGTTTTTAGATAGATAGGTAGGTAGATAGATAGATAGAT
AGATAGATAGATAGATAGATAGATAGATAGATAGATAGATAGATGGATGGATGGATGATAGACAGAGAGG
CCTCTTTATCGTGCCATTGCTTTTAAGGATATTGTCCCTAGGTATAGAATCCTACGTTAATATTTAGTGT
AAGTTTTTACTTTCAGAACTGTTTTTTTTTTAAACCTTAGGACTGGGAATTGAATCAGGGCCTAGTGAAT
GTTGAGCACTCCGTTGTCTTCTTGCTTATATCGATTTAGGGAAGAGCTCTGCTGCCCCCTTGTCTTCGCA
TCTTGGTGTCACCGTCCAGCTGGCTTGAGCACCAGAGGCATGATTGGACAGGTCAGAGTGGAAGGCTGGA
GCCTCAGACTTGGAGCAGTAGCCGGAGTCCCATAGGGGATGTGCCCCACCCCCCAGCCCAGGCCCTGTGT
ATACTTTCAGAGATGTCTTAGGGTTTTGCTGCTGTGAACAGACACCGTGACCAAGGCAAGTCTTTAAAAG
ACAACCTTTAATTGGGGCTGGCTTACAGGTTCAGAAGTTCAGTCCATTATCATCAAAGCAGGAACATGGC
AGTGTCCAGGCAGAGCTGAGAGTTCTACATCTTCATCTGAAGGCTGCTAGTGGAAGACTGACTTCCAGAC
AGCTAGGGTGAGGGTCTTAAAGCCCATGCCCACAGGGATACACCTACTCCAACAAGGCCACATTTCCAAA
TAGAGCCATTCCCTGGGCCGAGCACATACAAACTATCACAAGAGGTTTCTGCTAACCACTGGCTCTGTGC
AGCTGGGAAATGGAGCTTCTTGGTGGACTCTTCTCCCCCTCCCCTCCCCTCCCCTCCCCTCCCCTCCCCT
CCCCTCCCCTCCCCTCCCCTCCCCTTCTCTCTCTCTCTCCCCCTCCCCACTCCTATCTCACACTTCAGCC
TTTGAGACCTCCAGTCACAGATAGAGAAGACACTGGACACTGCCCTACAGCTAGCTCCCTGGTATTTTGT
TCATGTTGATTCTTTTATAGCTCATCTTTGATAGTGTTTATCACTGTTCGAAAGTTCATTGCTGTTCTCT
TCTGTGATGTGCAATCATCTTTGACATCATAGTTTTCACTGCTGGGATTTTGATTTGTGTCTTTAAAAAC
CTTTTCCTTGTTTCTGTTTAATTTTTTGGACATATGGAATGCAGCAATAACAGTCTCATACGTAATGTTG
AAAGACCCTCGTTTCTGGGGAGACTCTTGCTCAAGTCCTGGGATGAGCTGACGCCCCAATAACTCGAGAG
AAACCGTTCTTGATGCAATATCACAGGAGGTTTATTTATCAGCATGCTGAGGCTGAGCTCGTAACCCACA
CAGGGGCAGAGGAGATGACCCCCAGCAGTTGCAGTCGAGGGTTTTTAAAGAATAAACTGCAAGGTGAGGG
GAGGATAGGACCACAAAGAATGGGGAAGCTGAGTAAACACTGAAAAATGGGGATGGTGAATTACGGCTCA
TCTCTCACGGAAAGGTTACAGGCTATCTTTGGCAAACATTCTTGGTCCCTTACACTATGGGTCAGGCACC
TGGGTGGGTCACCCAGTGGTCATCATTCTCTCAGGCTGAAGGCGAAAGAACAAAGAACTCCATGCTAGGC
TTCGTTTCTAGGGAGTCTAAGAAACACATTGAGTTGGGGGTCTTACAATGTCTTTATCTGCTAATTCTAC
TGCATCAGTTTGGGTTTGGTTCCAGCTGATTTTTGTCTCTCCTTTTTTTCCCCCCAAAAAAAGATTTATT
TATTTATTTACTACATGTAAGCACACTGTAGCTGAGTTCAGACACTCCAGAAGGAGGCTTCAGATCTCAG
TATGGATGTTATTGAACCAGCATGTGGTTGCTGGGATTTGAACTCCAGACCTTCAGAAGAGCAGTCAGTG
CTCTTACCCGCTGAGCCATCTCACCAGCCTTTCTTCTCTCCTTTTATGTTCCCATTTTCAGGCTTCTTTG
CATGCCTGGAGTTTTGGGTTTTTTTTTTTTAAGGTTTTAATTTTTTATATGTATGGGTGTTTTGCCTGCA
GGTATGTTTGTGTACCACATGTGTGCCCAGGACCCAGAAGATAGCGTGGAATCCCCTAGAACTACAGTTA
AAGATATTTGTGGGTTCTAGGAATTGAACACAGGTTTCCTGGAAGAGCAGACAGTGCTCTTAGCCTCCGC
ACAACCTCTCCTGGTGATTTTCTTTTTTAAATTGTTCAGGTTTATTAATTAGAAGGTGCCATATCCTGAC
TCTGTCTTCAACAATTATATTCCAGGCTTCTTTTCTTTCTTTCTTTCTTTCTTTCTTTCTTTCTTTCTTT
CTTTTCTTTCTTTCTTTCTTTCTTTCTTTTTTTTTTTTCTTTTGGTTTTTTGAGACAGGGTTTCTCTGTA
TAGCTCTGGCTGTCCTGGAACTCACTTTGTAGACTAGGCTGGCCTCGAACTCAGAAATCCACCTGCCTCT
GCCTCCCGAGTGCTGGGATTAAAGTCGTGTGCCACCATGCCAGTCTTATTTTCGAGAGTTATGAACAATC
TTTTTTGGCACAGGGAAGGAATTATCTAAGTAATTAAATAAGGGCGGGTACTCCTGGCACACTGTGGTTC
TAAGCCTGAGAATACAACTGTTACCCTCATGCTGGCTACCCCGGCTCTCCTCTGCCTTCCCACCACAGTA
AGCAAGCAGCCAGACCTTAGTTCTGTCCTTTGGCTTCAGGACTCTGGGCTGATGGGAGGAAGTGGGACGT
CACTAAGATTATGAAGCCCTGGGGTAAGAGGATTCTGCCCACAGCAGTAAAGGAGTCTTTTCTAGAACTT
CCATCCCACAGTATATTAAAGTCAATTTGGGTCTTAAAGACCATTTGGCTCAGCCTCAATGGAATACCAA
TGAGCCAAGGCAAAGCCAAGACGTGTTCAGGGCACATTGGCCAACTTAGGCCTCCATCATTTGACAGGCA
GCTCTGGCTGGGTCTTGATGATTGAGCAAGTCACTGTTATATCAATGAACCCATCTCACTCATGAACAGT
GCCTTTCTCAGTTCTGGACTGTTTGTCCCACATGTCTGTTGTGGGACACAGTGTCTTTATTTCGGTAACC
TGAGGCCTTACTCTGCAGAGCCACCTTCAGGCAAGCCCGTCCTGTGTTTCTAGTTCCTGGTTTCCCTTCT
TTAGCCCTTGACCATGTGATGTCCCCTTCCCTTTTGTTGTCCACGTCTTTCAGTCACTCAGTCCTGTACC
TACTACCACCCTGTATGCCTCCTGACCTCAGGTGATAGAGGTTGGGGTCGGGGCTCTATGTCATTCCCTG
ACCTTGAACTGAGAAAGCCTCAGGTCAGAGCTCAAGACCTCTTCCTGATCCTGGCCTGAGGTTGGCTTTG
GCTTGTTTTAGTGTCGTAGGGTTAAGGAATGGGACACTCCTGTAGCTCATGCACCCCAAATCATTCATTC
TCACAGTGGGGCTGGCCAGGAGTAATGCCCGAGGTCTATTTAGGATTAGGGGAGAAGAAGAAATCTCAGT
TAGGTCTGGGTGGGCAGGGATGATTTGGTGTGAAATCTCTTGAGGCTGTGGGGAAGGAGAGATAGAAGCA
AAACTAACGGCTTGCGAGCTCCCAGAGGGCTTTGGAGGGTAAAGAATGGACTCAGAAATGTGAAGTACTG
CATAGTAGTCTGTGTGGGTACTCACCCCACTTGATGCTGGGTCTCCAGCGCTTGCTTTATAGCCCCCAAG
TTTGTACCTTTGACTGGCATCTCCCCATTTCCTCCGACCGTGTGCTCCAGCAATCACCTGCAATTCTTTG
TCCTCTGTAGATTGAACATACAGGTGAGACCATGTGGCTGTGCTGTGTCTTTTTGTGTGCACAGTATTGT
CATTACAAAAAAAGGGTATCAGTGGCCCATGCACACACATAGGCATGCACGCACACACATATACCACAGG
CACACGTATACACATGCCAGGAAGGAAGCTGTGTTGTGATGAATACATCAGCTGGATTAACTGCCATATC
CCTGCGTACATATCTATAGAGAGAGGGAGTTCTGTCAGAGCATCACCTCCTATATGTTAACTCTTTATAG
CATTGACTCGTCAGCTATGCCTCCGTACACCTGGGGGTGGGGAAAGAATGGCAGCTGGAGAACACACGGA
TGAGCATCATGCAGGAAGGTGGCAGAGCCCTCCCTCTGGGCAGCCGGAGGCCCGGGTTGGGCACCTTTGG
AAGAGTCTCACCTACCTCAGCCCTTGGGCAGCTCTTCCCTCCAATTAACTTTCTACTGAAGGAGGAGCCA
CTGGAAAAGAAGCAAGACAGCCAAGAGTGTATGTGTAAAATGGGAAACTGAGGCTGGGCCTCCCAAGGCA
CTGTCTGGTGGCCGTGTGCAGGCTTAGCAATCCATTGTCATTATGTCACAGAGCTTTGAGGAGGGTGTCT
GGAAGACTGACCACAGCATACCTCAGGCTCCTAGACAAGGGAAGCAGGCTTGTCTGTAGTATTAGACTTT
GTGGGGAACAAGGAACTTTTATTTTGCCCTTCTGGTTTCTGCCTTATCCTGTCTACATGGCTGAAGAGTG
GGTTTCTTTTTTATTTGACAGCATTTTATTTTTAATTCTTCTATTAATTCATCATCACTATTGAAATTAT
GTATATGTGTCCAAGAAGGCCAGAGGTATCAGATCCCCTGGATCTGGAACTGGAGATAAAGGTAGCTGTG
AGCCACCGGACATGGGTGCCAGGAACCAAGCTCCGGTCCTCTGCAAGAGCTGTAAGTGCTCTTAACCCTA
GAGCCATCGCTCCAGCTCCTGAGAGTTGAATTCTGTGTTGCTAAGCTCTTTCTTTGGATCCCCTGATCGA
TCCTGCTCTTTCTTGCTCTCACAGAAGGGCTGTAATCCTCAGGGATTGCAATGGCTTCAAGGTCAACACC
CAGTCAGGGCCACATAGGAGGCCAGAACTCCCTTCTGTTGGCCTGGATCCCCACTTCTCCAGCCAGCACA
GAGGATGGTAATGAAGAGACATCTGAGTCAGGACAAGCTTCCAGAACACTGGGCTTAGAGGAAGTGGGGC
TGTGGGGGTGGGGTGGGCGGGGAGACTGAGGCAGGAACACTCAGAAGGGCAGAGGCTCAGGCATGGCCAG
CTCTGGCTGGTATGGAAGGGCCTAAGCCACACTTGCCTGCCCCATGCCTTGCTACCCTCAGCCTCCCTCT
TTGTCCTGCCCCCCATCCCCTTGTTCCATCTTTACTGGCCCCCTAGTGAGGCCCAGGCAGCTGAGCATCC
GCTGGTGGAGGGAATTAACATACTTAATTAAAGTGTCCACGAAGAGCTTTGCATACTTCTTAATTACTGT
CTGAGTCTGTGGGGGGAAGGTTTGGAATGGGATTTTTTTTTTCACCTGTTTCCGAATTTAGCTGACAGTG
AGCCAGCTGGGCCCTGAGGGCTCAGGTGGGAGCTGTCAACACCGCTTTGAGCTGGGGTGGCAGAGCAGGG
TGTGGAGGGGAATCCTGGCCCCAGGCACATTTGCCTTTCCGCAGTCAGAGAGGGCTGGGGTTTCTGTTTC
TTTAACCCAGAACAAAAGGAGACAAGACTCAGACAATGGTAGCTGGTGTCTTCTCAGCTCCTCTCCTCCT
CATAGGGCCTGAGTGCACACCACACCGCCACGACTGGGCCAATTTCAGGGTGCCTGTTGTGCAGAGGTTT
CAGGGGGTGGTGGGGGCATCTTTTGGGAGTGCTATGAAACAGTGACACGGGGTCAGGATGGCCCTGGCCT
GTCACTTCCGGTTTCAGGCCCAGGCTGTGAGTGAGCTCTGTCCATCATCAGGAGGACTAGGCTGAATTTT
ATCTCTGTCCAGTGCTGCAGAGCAGTCAGGGACAGTAACGTGAGCTTGAGTTGATGGCAGGCTGCAGGCC
CAGGCTCTTGTAGGTGGCACAGCTTTGGGCAGGCTTTGGCAGATTTTCCATCAAATGATTTCTGCAATGG
TTTCTTTTGCCCTCTCACTCCCCGGCCCTAACAGCAGTCTCTCCACCCACATTCACACTCACTTGGAGAG
GAGAGTGAGGGGGAGGTGTGTCCTTCACAAAGTGAGACAGCAGCAGGACGTGGGTCTGGAACTCACCATC
TATTCAGCTCTCATCCTGTGAGCCAGGCCCAAGCCACACCCAGTGTCCTCATGAGTACTGACTCGGGCAT
GCCACCCGTGGCACAGTGTGGGTGGATGACGTGAGGTGAAGGGTAACCCCATCACCCAGCCCTCAGATCT
TCACCACTCCACACCAAACCAGGTGTCAGCTCCCCTCAGAGAGGATGTGTGCTAGGACCGCCCAGCCCAG
TCACAGTGCAGCCCCTCCCTGAAGCTTGGCAGGTCAGGTATTTATGGCGGGGTGTAGCTCCACGTGGCCA
GGGCTGTTGCTGGAGAGCAGCCTGCTTCCTCACTAAGAACTGGGCTCACAGGATGAACCTGACATAGTTG
GCACCCAGTAGGGGGTCAGCGAATGCTGAAACTTCACTGTTTTCTGCATCTACTTGGAAACCACCAGAGC
GTGCACAAGTCACTCTGTCTGGAACTTGTGCTGAGATGGGTCCCAGAGCCTGTGGGAAGCCAGTGGAGTG
CATGGACCCCAGGGAGACAGACAGGCAGGTACTGGGAGCGGGCCATCAAGGCTCAGCGTTCAGTCTATCT
AGCAGCTGGCAGTAGTGCCGTGGTGTGTGGAAGTGAGCGCCTCACAGCCTGTGGGTATGCGTGAGCCTTG
TCCCACAGCTCAGGAGAGAGTTCTGAGAAAATAAGGTTTTGTGGGAAATATGCATAAATCCTTTGCTCGT
GAGATTGAATGATTGCTGTAATATTTACTTCCTGGACACAGTGCTTCCTTGTGTGTCCTGGTCGGGTCGT
TATTATACCTTCATGGTGCTCAGAATCTAAGCTCAGTACCTGATCGAGCCTTGTTGGCTGGGATTCCAGG
GATGGTCACAAAGCCAGGTGACCTGAGACATCCTGTGCTCTCACTTGACTCTGACCTGCCAGGGGTCCTG
TCACCTCCTATGTTAGATCACACCCCACTGCCCCTGCGTCCTTCTGAATAGTCCATCTCTCACCAGACTT
CAGCCCCACCTCCTGGGTGGCTTCTGTAGCCAGTCTCCTGGAGCAGTGTAAGAGTTCCTTTTAAAAGCTC
GGAACTGGCTGGGCGTGGTGGCAGCACTCGGGAGGCAGAGGCAGGCGGATTTCTGAGTTCGAGGCCAGCC
TAGTCTACAAAGTGAGTTCCAGGACAGCCAGGGCTACACAGAGAAACCCTGTCTCTGTGTATCTCATGCT
GTGGATCAGACCACCCAAAACTCAGCTGCCCAGAGATAGGGAGGGTAGTCACCCGAGTCTCTCGAGTTCA
TAACTGGAGCAGGACACAGCGGGGTAGGTATTAGCTCTGAACATACAGCATTGTGAGTGCTAGAGTCCTC
GGAATGAGAAGGCCCACGCACTCACAGGTGACTTGGGATGGGAGATGTCTCGGTTTCTCGTCACAGGAGC
ACCAGAGTGGTCTCACCCAGGTGGGCTGGCGTGAGAGCCCAGTTCAGGGTGTATAGACAGGAGCACACTC
CTGGCAGGTGATCTGCCCTTTCTCCCCAGTGACACACAGAACCATTTGTGTCCCCAGAGTAGGACCCTCC
AGACGCAGCCCCTGACGGATGCCGGGCTTGCATTGTGAGGGCATATGGAGTGGGGACCGTCCCTGTGGTG
GGAATGTTGAACCACCATCCCTGGGTACATCCACATCCTGCTGAAGCCTCCTTGGGCGCTCGCGATGCCT
TGGATGCTTCAGCTATGGCTGCCACACCCGGCAGCGAAGCCTTCTCATCTGCCCCTTGTAGCTCCACATC
CGGTGCCAAAGGTGAGGTTTTGTTTAAATCGATCCTGCAGCTTCATGGAGCTTCCTGTGTCCCTCATGGG
AACAGTGTTTTTATTTCTTTCTTCACACACTGTCTGCCTCCATTATTCTCCCCCTCTCCCTCTCTCCCCC
TCTCCCTCTCTCCCCCTCTCCCCCTCTCCCTCTCTCCCTCTCTCCCCCTCTCCCTCTCTCCCTCTCTCCC
CCTCTCCCTCTCTCCCTCTCTCCCTCCGAATTTGCTAGCTCTTCCCCGCTGCCTTGGGGTCTTGGTCCCA
CCAGCAGCTTTGCTGACAGACCCCAGGATCTGCTACTTGCCAAGACCTCTCTCCAGGAAGGAGGCAGAGT
GGTACTCACTCCTTCACTGCCTGTTCACTTGGAGACCTTGGGCATGGTTTTTTCTTTTCATTAATTAATT
AATTAATTCACTTTTCATCCTGATCCCCGCTCCTCTCCCTCCTCTCCTCCCAGTCCCACCCTCAGAAGCC
CCCCCACCCCACCCCCGTGGTTACTAACCCACACATCAGACACATCAGTCGCAGCAGGACTAAGCGCATC
GTCTCCCACTGAGGCTCAGCTATTAAAAACAAAGATATGGGGCTGGCAAGATGGCTCAGTGGTTAAAAGC
ACTGACTGCTCTTCCAGAGGTTCTGTGTTCAATTCCCAGCAACCAACCACATGGTGGCTCACAACCATCT
GTAATGGGATCCGATGCCCTCTTCCGGAGTGTCTGAAGACAGCTCCACTGTACTCATATGCATTAAATAA
ATAAATAAATCTTTAAAAGAAATAAAAGAAAGATATGGTGCATCCATATGAAGGCAAATAAATGGAGCTA
GAAAATACCATCCTGAGTGAGGTTACCCCAGACCCAGAAAGACACTCATGGTCTGTACTCATAAGTAGAT
ATTAGCCATAAAGTACAGAGTAACCATACTGTAATCCACAGACCTTAAGCTAAGTAACACGGAGGGCTCA
AGGGAGGATGTTTGAATCTCACTCAGAGGGGGAAATAGGCATCGGAGATGACTAGAGGGAGGGAACCTGA
CCTCGGCTATCTTAATGCATAGCATGGAGATGGGGATTCAGGGGTGGGTGGCCTGCTTGTTTCCAGTAAA
GCCCAGCCCTGCTGTGCTGCACTGTGTCCTGAGCCTTGCCGCCAGCAGTGCCAGTGCAGTAGAGTGACCT
TGAAGGCAGAGCCCGGTGGAAGGCTGGCTCTCTGAAGGGTTCCTGCAGGAATTCAAAGCTGAGGTTCACC
AGCATTTCTTGCCCCTCCTCTCATTGCCAATTCTGGTGTGTGCTGACCACCGCCATCCCTCTCAGCACAC
TGCCCCCCACCCTCGCCATGACCTCTAGTAAGGCCTAATGAGGTCTGTTTCCAGATTCCAGCAACTTCTA
CCCAGGGCCGTTGTCGAGGACAAGAAAGGGACAGGGCAGGACCTTCTGTCCTCCGGGGTGGGGTGAGGTA
GGCCGAGAACTCCCCAAGCATGCCCCACAGGCATGCTGTCCTGTAATGCTGTGGTGGAGGCCAACGCGAG
TGAACAGAGGGACTGCCTTATACTCTGCTCAGGCCTCTGGAGGTTCCAGGAGACAGAATGGAGGGGGCCT
TTTCCTGCAGTTCCTGGTGTCTGCTAGTGTTTTCAGACTTTGTGTCCAGAGCCAGGCAGTCCAGTCCCTT
GCAGACTGTTGAGCCCAGAGACCTCAGAAGCCAGGATCAGGGCAGAGACCCTGCGGTTCCAAACTTGGCC
AGCATGGGGCTGCGGAAACAAATTGATCAGAAATAAAGAGCAGGGATAAATGCTCTGGGAAGCATGAGGA
CCACGGGAAGGATGAGGCGTGCAGGGGTGTCTCCAAGAAAAGAAGCTGGAAAATGTTGAGGGGCTCCCCA
ACACATCCATACTTCTGACCAACTATTTCTAAATCCAGGGGGTCCCCAGTGCTCCTTAGGTTCAAGAACG
GAAACTCAGGAAGCCAGTGGCGGGGGTGAGGGGCAATGGAGAGATGGCTCAGCTGGTCACTTGCCGTGCA
GTCATGAAGACCCGAGTTTGGCTCACCAGCATCCACGTTAGAAGCTGGGTGTGGTGATGCTGCACATCTG
CAACCACAGCCGTGGAGGGGGGAGGGTGGGAGAGACAGGCAGATCCCTGGAGCTAGCCAGCCTCACCATT
CAGTGAGTTCCCACGCAGTATGGCTGTGCCCTCTCCTCACAGAATCACAGCTCTCCCCCTTCAAGGCATA
TCTCACAACCCAGGAGGCTATGCAGGGCCTGGCTGTCTGGAATTCTTTGGGATTTCAAAAACAGGCAGAG
CTGGTTGAGTGTTGTCCATGTGATGGAACTCAGTCCCCAGCCTGCCTTCCTTCCCTGGGGGTTGGACTGA
CTCTGGGCCCCAGCCCTCTGGTCTTAGGATTGACAGCCCCATCCTGAAGCCACCTAGGGAACCACCACCT
CATTAATATAGGCTCAGGTAGAGTGACTAGGGCTTAGGACAAACAGAGATATTCCTGTTGTGCCCCCCCA
CCCCCCACCTCCGCCCTCAATTCCAATCGCAGCATTTTCCGTCCTCACCCCAAGCCGAGGAAGAGTCAGT
TTCTTCATTACACAACCTTAGTGGTGGTGGTTTTGTTTTTCTCCTGTCATTTGTCATTCTGGAAATTACC
TCTGCTATCTTAAGTGACCTGACACCTCTTGCTCTTTAGCATTTCCTGTGTATTGTTCCTCTTATGACCT
TCTCACTAATTAACATTCTCTGATGTCTTTGTTGTGTTATAACGAGGGAGGTCCAGAGGAGTGGTGACCA
CCTCAAGGTGGTCATGACCACCTCAAGGTGACACAGCTAGTAAGCGCCCCAGTAGGATTTTCACCTCAGC
TGGGCTGGCCATGAGGTCTTCTGGCTGCAGCTCAAACCTAGTCTATCGGACAGGTGACTGCCTCTCCTTG
GCCACTGTTGGCTGTCAGGAATGACTACACTTGTCTGTTACGTGCTGTGCACAATAGATTCAAACCCAGC
AGAGAGCTTTTCTATGGATCCCATTGGATTGACCGGCATGCCACTAGTCCCAGCCTGGGGATGGCCTGCT
AGACAGTGGACAGGGCAGAAAGGCCTTAGGGACCTTTGCCTTCCCTGTCACGGGTACTTATCTCCTGCAC
TCGCTTCTGAACCTCTCTGGACTGTGGCTGAGTCCTGGTGGGGCAGAGGAGAGAAGAGCTCCGAGTAGTG
ACCTAACAAATGTCCCTTTATATTATCCTTCCTCCCCTCCCAGATGGCCTGAAGTACAGCAGTTGGCATT
CTTGTCACTGCTGTGTCCCAGGGGACCTGCACGGGGTTGTGTCAAAAGCCAAGCCCTGCAGTTTGGGAAA
TTAGCAGCATTTATGGCTGTCCCAAGAGACTCTTGGCATCTCAGCCAAACTAGCAAGTCTTCAGCTGGGG
ACATTTCTGCCCCAGTAAGGGAGTTTACGGACTGCAGTTGTCACAGTATTTGGGGGGGTCCTGTTGTCAA
TTACGTAGTGGGATCTCGAGGTGCTAATGACCCAGCATTGAGCTGGACAGTCAGACACACTCTGTGGGGA
ATAGGCTTGCCCTTGAGAGACCTGAGAAAGGTCTGCTTCCCTGCCCCTTTCTCACCAGGGTTTAAGTTGA
ATAAATGGGAATCAAAGAAAGTCTCCCTTGAGCCGATGAGTGGTCAGGTGGTCTATCCAGGGGGGCACAG
GCAGCCATGAGAAGAGCATTCTGTTGGGATCTCATGTCAGCTGGGGCCTGGGGTCAGGGCAGACCTGGAC
TTGGGTGGTAGAGGGTGAAGAAAGGGTAGGCCGCCACCTCCTCCGTGGCAGCCTGGGGACTGACGAGTGT
GGCCCCCTAGAGCTCACATCAGCACCTTGGCTTGGGCTCTTTCTCCTGGGGTCTGCTTCTCTGCTTTCTG
TGGTTTCTATGAGCCAGCCTTTCAAGTGCGCGTGTTTAGAAGACCCTAGCCATAGGCTGGTCTTACGGCT
GAACCTCTCTCTCCTTTCTGCCTTGCAGTCGGGAAGACGTCTCTGATCACGAGGTTCATGTATGACAGCT
TCGACAACACCTACCAGGTAAGACTCCCCACTTCCCATGCTCCCCCCCCCCACCTCCCCTGCCTCTGTCT
CTGCCTGTGGACCCTGTCTGGAGAGCACTGCCAGCTGTCTCCAGGGAGCATTGAGCTCAGAGTGGGTGGG
GCCACTGCAGCTCTCTCAGGCAACTTACCGATTGGAAGGAATGCCATGCCCTTCCTGGTAACCTGGCCTA
GGCCGGAAATGAGCTCAGAGTCTAGATGTTGAAAAGGAAACTTTTATTTTTTAAGGGAGAAATATCAAAA
CCAGAGAAGGGATCTTTTGAAGAGGCAGGTTGGAAGCATTACAGAGTTTGGTTATGTCAAGGGGCAGGCC
GAAGAGGATAAGATGAAGTGCAGGGGCAGTTGGAGAGGGTGCAGCTCAGGAGTGGTCACACTGGCTGGAC
TTGACATACACATAACCCAGACAGACCACGCACGGACTGTCACACACGCTCAGTCCGCCCTCATCCCCTG
CTGCTGAAGCACACGCTGCCACAGAGAGGCGTGGACGCTTAGTTGACCCTGCCCTGTGTGGTCAGGAGAC
TGGGCATAAAGACATCTGTGGAGCCTGGTTTGGGAATGGTAGCCTGGGCTCAGTCACAGGCCCATAGGTG
ACCCCAAACCGAATTCATGAGGGGCAGAGACATATCTGTTTGGTATCAGTGGTGGTGGTGGACAGGGCAG
GCAGTACACGTGAGTTTCCTCACAGCTAAAGCATTTTGCCAAAGTTGTTATCCCTACCACCACCTTGGAC
TGTCTGTCCACAGTTAGTTCACCAGTTCATTTCTCTAGGCTAGGGTCCTGTGAGATACTAGCTCCCAGAC
AATGTTAGTAGCTGTTACTTGGCAAAGGGAGTGTGTGGTTTCACAAGCAGAGCTGGGTTGTTTAGACTGG
GGGGGGGTGGTGGGGGGAATGAGGGTGGGAGTGGAAGGGGACTGCTCTCGCTCAGCACTGAATCTCAGGG
CTCCCCCTCAGCCCAGGGCTTCAGTCTGCTGAAAGCAGATGCAGTGGTTGTTTGAATGTAGAATCCCTTT
GTCAACACATTCTCAAGGACAAGTATTTATAGATTCACTGGGGCAGCTGTTCCAAGGTGCCGCTCTCCCC
GCTGCTGGGTGTGGAGCAGCCCACGAGTCTCCGATGCTTGTCCGTCCGTCAGTGCCCTAGTGCAGTCACC
CTTGTCTCAGATGTCCTCTGAGGACCCCCTTTCTGTTTCCCTCAAGTTCTTATTCCACTCTGCAATGGGT
GGACTGAAATCCTATATCACGTGGACTCCAGAGGGATTGCCTACGGGGAAGGACAGGAGACTCTGGGTGC
GTCAGAGGGTGTACGTGGCTTTGGGACATTGATGCCGGTCATACTGTTGTGTCCTCCCCCAAGCCAGGAC
TTTGCGTCACTTTGGTCTGACTGTGGAGCAGAGGTGACATCCCTAACAGACTCCCCTCCTGAAAGAAAGA
TGAAATTTCAAGACCTGTAAGTCATATAAAGTACTCAGAAATTGCTGGTTGTTTGTGAGCCTAGAGGCTG
CCTGGGGCTGAAAATAAAGAAAAACAAACCTGGGTATGCCACATAGTTAAAACATTCCTGGGAACAGCTT
AACCTATAAGATAAAGAAGACTGTGAGGACAAGCAGGGCTATCTTGTCTGGGTCAACACCACCTGGCCGG
AACCTCCCCTCTGTCTACTGCTCCTTGACGCCGGGTAAAGTCATACATCAACTGGTTGCTATGTGAACAA
AGATAAGCCCCCAGCCCACAGAAACAAAGTCCTGATGCCCTTTTGCTGACATGTAATCTTTCTGTTAATG
TTTAAATAAGCCAATAGTGTGTCTCTATGCTGAATTCCACACCCCTAAGCCCCTTACCCCATAAAAACCC
CTAGCTTCTGAGCCTCGTGGCCGACATCCGTTATCTCCTGTGTGGGATGCATGTCGGTCCGGAGCTCCAT
AATTAAACGTCCTCATGTATTTACATCAAGATGGTTGTCTGTTCGTGATTCTTGGGTGCACGCCGAATCG
GGAGTTGAGTGGGGGTTTCCCCACTAGGTTCTAACACTCCTAAAGTCTCCTTGTGCTCTGTGTGTGCACA
TGCACACGTGTGAATGTGTGCACCTGCGCACATGCTTGTGTTTTTATTAGTTGACTTTTCCCTTTTTGAC
ACAGAGACTCCTGTGGCTCCAGCTGGCCTTGACTCTTCTGGGTAGCTAAGAATGACAGTGATCTCTGGCT
ATTTCTGACTACTGCTTGATTTTTTTTTAGCGATCTTCCTGTTTTTCCTATGGCACCGCATTGAGATTCT
TAGCAGCAGTGGACAAATTACCTTTGAAATTTTATCTCCCTTCTTCCCACTGTCACCCTCATTGCCTGAC
GCTTGTCACTCAAATCAGGCTTTACTTGTTCCTGTCACTGTGTGGTGGCTGGCGATGGCCTAGCCTGGAC
ATCAGCTCCTGTCACTGTCCCAGCTCCGCTCGCTCTGCTCTGAAAATTCTTCCAATGCCTGAAGCGTGGC
AAATGTTTGCCCTGAGAACAGAGCCCCACCTCTTGCATCAGTTCCCATGAGCCTTTGGCTGTAGCGTGTG
ATCCTGAAAGCTAGTTGGGCCCCTCAAGTCTAGGGCTACTCCTCTGCCCTTCTGGTTCTCACCTGTGTTT
TGGGATGTGCCAAGTCCAGGATCTTCTTGGAGACATCACTGTACAAGGCCTGGCTGAAGATGGTGCCACA
GGTACCTACGGGCACAGTAATGGCTGCTTGCCTCAGTTGACTGGTGCCATCAGACTGAGCGCCTCCCAGG
ACCACTGTCATGGTGAGTCAACGGAGATCACAGAACAGATCCGATGCCGCTCTCCCCATGCGTGGGAGAA
TTGTCTGACTCGGTTTCTTTACATCACCAGGTGGAAATCCTTTCCTTAAGCCCTTTAGAGCAGTAATTAG
GCTGAGAGGCTGGGCTCTGCTTCTCTCCGTCATTCATACACACACACACACACACACACACACACACAAA
GACATACACACACACATATACACATACAAAGACATATATATAAACACACAAAGACATATACACACAGACA
CACAAAGACATACACACACATATACACACAGACACATATATACACTCACATATACACACAAAGACATAAA
TACACAGATACACAAAGACATACACACACATACATATACACACATAGGTACACACAAAGACATACACAGA
CACACAGACACACACAAACTCACACACAAAGACATACACACAGATACATACACAGACACACACATACAAA
CAAAGACATATGCATAAACACAAAGATACACACACACAGACATATATACACAAAGACACACAGATACACA
AACACACACACACACACACACACACACACAGACATACACACACACAGACACATGATTGCTTGTTAATCCT
CTGGAGATGGAGGAGGACAGACTTTGTTTATTTTCTTTTTCTGAGCATAGCAGCAGAGGTGTATGGGAAA
TAGATAAGTCCCCAGGGACCCGAGAAGATGAAATGTATTTTCTCTCAGGCTGTCCCACTGCACAGGAGCC
GTGCTTGTCACCCTCCCACCAATATCCTGTCTGTCCCAGCAGCAGTACAGCATGGCAGAGTCTAGGCCCA
CTCAGTCAGCTCCCAGGACAGTGTTCCCTCTCTCTCCTCATGGCTCCAGACCCTGTGCTCCCCTCCCATT
CACTCATCCTGACAAAAGACAGCTGTGTGCTGTAGTACATGGCCTGACAGAAGGTAGCAGAAGGCAGCCT
GGCCCACCCTCAGCGGGGCACAGAGGGCAGGGCCTATCCTCAGCCACGGCCAGTGCCACCTTGATGTAGA
GCTGAGTGTGCAAGAGGCCCCAAAGGGCCACCATGCGGCCCTGAGTATGGTAGGCTGGGGTCCTCAGCTG
AACCTCTCAGAAGGTTCTGTTTGTGGCCCTGGTGAGCTGGCACTTCTACAGCCCTGGGGGACCTTTGAGA
AGCATGTCTTCGTTCTCTACTTACCTGGCAGTTACACACATACACACACACACACACACACACACACACA
CCCCTTATTCTCCGCTAACACATGTACTCTAGTCTCTCACCGCCCTGCCTAATCACACCATACAAACTGA
TTCACTTATACAGTTTTCACTTGGTGGAAAACCAAGTCTCAAGCAGAGGAAATTTTGTCTGTGGTGATTC
CTTCATGTAAAACCCCAGCTAAGAGGTAGTATGTTTTGTAATGTGGTAGCATGATGCGGCGGAAGTGGGT
GCCTTAGCGGGCCCATGTTGAGGTACCCCCACCAAGGTACCAGCCAGACAATGGGTCTAGTATAAAATGA
AGTTTATTTGGGGCATGAGAGGAGGCTGTGGAGAGGGGGTGGAGGCAGAGAAAGAGGACAGAGAAGAACA
GAAAGAGAGGAGAGAAAGAAGGGAAGAGGCCAGCAGAGAACATGCAGGGAGAGAGAAAGGAGGAGAGGAC
AGAAGCGGGAAGAGAGGTCACACAGTCTTTTTATAGCCAGCTGGGCTCATACCTGGCTGTTCCTAGGTAA
CTGTTGGGCAGAGCCTAGAAGAAATGCTAACGAGGTTTTCTTAAAACTCTATCTAGGGAAAAAAAAAATC
TGGGCATATCTTGTAATAAGAGGTGGTTCTTGCTGTGCGCTCCCCCACCCATACCAGCACATACCCAGGA
AACCCCTGTGGGCCCTGGGAGGGTCAGCTGTGTGAAGGAGCCCTGCTAAAGGGAGGTGTGGTCCTCTGAA
GGTCACTCCTGGCCGAGGCTCTCCAGGGTGCTCTTTCCAGCCTGCAAAGCTGGCAGCTCAGGCCTTAGCG
TCTTAGAGAACTGAGAGGTGGTAAGAACTTAACACTGAGGACCCATGGCCCCTCCTGTCATCCACACCAA
GTTAGAACAGCACAGATCTAATGGGCTGCCTCAGGGAGAGAGGCGCCCACAGGCCAGGAGGGCTCTTCTC
AGAGGACACTTGTGAGATGGGAAGGTGTTTCAGACTCTGAAGGGGGTTCCTAAGAAGCAAATGCTGGTCT
TTCTGGCAGGCTCAGATCTCCTGAGATCTCTTGCCGGCAGCTGATCCTCGAGCCATGGCAGTCTGTTCTG
CCCTGAGGCTTCCCACACTCAGTCTTGGGGCCGCCGCCACAGCAAATTACCACACACTGAGTAGCTTCAA
AGGAACAGGAGTGTATTCTGTCCTCACCTTCCTGGGGGCCTGAGGGTGGAACACATACAAGAGAGCCCTG
AGCTTTTGGGGGTTGGGGGGAGGGCATTCTCCTTGCTGTTGGCTTCTAGTGGCCTCAGATGCTCTTTGTC
ATAGGGCTTCAAGATTTCCATCTGGCCGCCCTCTTCATGAGATCTGAGTAGATAAGGTGGATGGATAGGT
GTGGATTCTCATCTGGGCCCTTGAAGTGGACGCAGCATGCATCTGTATGCATCTGTATGCATCTGTATGC
ATCTGTATGCATCTGCACTCGGGGAGAGGCTCCTAGTCACGTCACCTCACGTGGTGCCTGAAGCCTTGGA
TTTTTATTTCTGTCTCCTGCCTTGTCCTGATTACGTGCTCTTGCCGTGGCCACAGAGACTTCTCCCTGAC
ACAGTGCGGTAACTGGCCTCTTACCTGACAAGCGATGCTTCCTCTTCAAGGTGAATACATATATGCTTGT
ACACACATACACTCACATGCAGATACATACATGTGCACACACATACACTCTCACACGTGCCTGTGCACAC
ACACGCACACATACATATGCATACACATGGCACACACCAGCACACACACATTTATGCAGTGCGCACACAC
ACACACACACACATATACGCCAGCCTTTCCTGAATACTGAATAAAGCTTCTGCGTGCACTCGTGCCTCTC
TCCGCTGTGGCTGCATCAAATCCTCCTCCTCTCCTATCGGCTCCACTCTTGTCTTCCGGTGGCCTTCCTG
CCCACTCCAGCAGCCATCAGTCGCTGGCTTGTCTGGCCCACACACCCTAGGGACCACGTCACTAACACTG
TTTTTCACAGGCTCAGACACTACTGGAGGGGAGGGTGAATGGGCAAAGACTTGGTTGACCACAGTGATAC
TTCTCATGATGTGAGCACCATGACCACCCAGGGACCAGGTAGCAAGGTGTTTTCTGTATTAGTATTATGA
TGAACAGAGCCAATTACATGTATGCACGTATGTATATGAATATATGTTATTGTACACGTACACACACGAT
TACAAATTGGACAGCCATTCTTCATAGAGAAGAAAGTAACCACGGGACAGATTGTGACCTTGAAAAGCCA
GGTGCCTGCCCTGTGACCTTGGGAGCCAGCATCTCCTCCTCCAGGGCACTAACTGAGCAGCTGTCATTGG
CTGGCAGTGACCCGGCCCTACCTGTTCCCAAGAGGCTGTGAGCTCCTCTCTACAAAGCAACCACTTTCTT
GGCTGAGTCTTTAAGTTTACCAGGCTCATTTGCATGCTAATTTGCATAACTTTACCCAGATACTTCGGTC
TGGTGGTTGGCTGTGCCTGAGAGAACAGCAGAGTCATTGTCAGGGGCTTGTCATGCCCAGCTGCTTTCTG
CCATTTACGGATGCTTCTCTCCAGCGCCGGCCGGCCGGGCTCAAAAAGAAGACGCACGCACATACTTGCC
TTTTCATTCTCTTCCCCTGAAGAAATAAATGCTGGCGTCAATTTATGCTAATTGCCATGCAGATTTCCTC
CGGTAGACTTTATTGCTGTATCTTGTCAGAATGTGGATGCAAATTTATATTTCATAATAAATGCACAGAG
CTAAGAAGATTTCAACAAGTGCCGTAGGGAATATCTTGCTCAGAGATCTTCTTGCTCGGATGTGCTGGTG
GAAGGTCTGTGCAGAGGAATGCAAGTACGCCACCGTCGACACCCCTGTCGATACTGTGTAATGCCACACT
CAAAGGAAGATAACCGTTGGGAGGAAATCTGTGCTTCTTAATATTCTTTGCATGTGTAAAATAAAGTGGC
TGCTATTTTTCATAGTCAGTGAGTGCCGTTTGCCAGCGCAAAAGAATAAATTAGCATTGCCAGGTTCGGG
GCCACGTATAACAGTAGACTACACCTCCGTTTCCTTCAGAGAAGACATCACGCAATACAGGCAGAGAAGG
CACAGCTGTGTGAGGGGATCACGGGGCTTCTAGACTGACAGAGGACTCCCAGGCACATGCCTGTTTGTAT
CTCTTGATATCTCATCCCCTGTGGGCATCTACCATCGGAAATGATTTGTTTCATACCTCATAAGATAAAG
AATAGAAAAGCTACCTTGACTATAACTCCTTGGCACAGTGAAAGAGCGGCGTGCCTCTCCTCGGCTCCAC
CTTCCTGAACCTTTGCTGAAGCCCTGGGAATCCCAGATCCTTGGGATGTCGATGAAGAATAGGACAGCAA
AGGTTCCTGAGGGGCTGGGGGTGGGGGTGGGGGTCTGACAGATTAGGAAAGAAACAGTTCCTGTCTCTCC
ACTGCAGGATTCAACAGAGCCTTTAATGTGCCAGGAGAGTCACTCACTTGCTTGCTGTTTCTGCTCATCC
TGAGCAGAGACTCCGAGGCCATACCGCATAACCAGACAGACACCGGGCAGTCTCCATGGCTTGGCTGTGC
CGCTTTGCCTGGAGAGCCCTGGGTCAGCTGGTTCCTGGTAACAATTGCTCATTTCTGTTGACATAGCATA
TGACAGAATGAAGTGCCTTCACAGAGTCTTAACTCCTTTGGTCCAACAGTCCTTAGAGGGAGCTCTGGGA
TCTTCATTTGAGAGGTGAGGGGGTTGGGGGCTAGGGCTAGGCTGGGGGCTAATTGGACTCCTTAGTTCAG
TATGCACGAGAGCTTGGGTCTTCAGTTATGGGGCACCTGTAAATCCCAGCACAGGGAGGTAGAAGTGTGA
GGATAAGAAGCTCAAAGCCACCCCCAGCAACAAGCTAAAGGCCAACTTGGGAGCTGGGGTACAGTAGATC
CTTTCACAAGGCAGAAAAACAAGATAAATAAATAAGCGCAAAGAGCAACAAAGAAAATCCCACTGGCGCC
CACTGGACACATGACCCACTACTGATGGCATGTTGGCCTCTCTGGGGCCAGCTGTAGCCTGTCCTGAGTG
GCCCTGATATACACAGCCTGAGTGCGCTCCCTTTCCAAAGAACCCGTGAGGGTTCCTCATCACCTGGGCC
GCAGGGCAGCGCTGGGGCTGTGTGTATCAGAAATCCTGGCATTAATCCTGGAATAACACACACACACACA
CACACACACACACACACACACACACACACTCTCATACTCATACCAGTCTCACGCACCCATTCATGCCTTT
GTACAAATACAGTGTAAACTTGAGTGTGTTCCATTCCCACGCACATATAAACACACATCCACCAATGCAT
AACTCTCCTGTGTGACCTGTGTTGACCCCTGAGAGGAGGCTGGTCCAGAGGAGTCACCAAGGATCCCTGG
GCCTAGCCGAATAGTTAGTTGTTCTTGCTATCTGGTGTCTCCTTCCTCCAATGTTCACCTGAAGTGGGAG
TGTCCTTCATGACCAAGACTGCAGGTGCAAAGGAAAAAAAAAAACTAGCTCTGCAAGCGAGGGCACTGGG
CTAAGTGTGGCAGAAATACCGCCTGGGGCTCAACATTTGATCCCAGGTTTCCTGGTGGACAGGAGAAACT
ATATGCTTGGGTCTTGTAAATATAAATACAAGAAGTGTTCAGGTTTGTGTTCTGATCAGATGTTGCTACC
CTGTAAACTAACCCACATCACCCACAGGCTGGTGTGTTTGGATGCTGGGTCACCAGCTGGTAGGGATGTT
TGGGGAAGTTGTGAGATTATATTTAGACGACGAGATGTAGTGGAGGAAGTGTGTCTGGGGAAGGCAGAGC
TGCAGTGGATTCCGTTTATGGCCTGCCTCCAGTCCTGATCCTCTGTGGTGGAAACAGCCTCACGCTCCCA
CCCGCCATGGGCAGGAGCTGCTCTCACCTCCCCTAAAGCCATCAAAATAGAGCCTTCCTCCTGTCAGTTC
TTTCTGTCAGGTATTCTGTCTCAGCAACAGAATAGTCCCCAGTGTCTAGGGTTTCCTGGGGCCAGCCTAC
AGAGATGTACACACATGAAGTGGCTTGGCAGGTAGACTGGCTGGTAGTAGTGTGAACGGCGAGGTGGACT
CCTCACGTGGGCAGTCTGTGCTTCTGACTCACCGGCCTCTAAAATGTGCTGCCCGCCTACCCGCCTCACT
TCCTGCTGGCACCATATTGTACTGTGTAGACAAACACCTGAGACCCGTGGCCTCCACAGTCAGAGCTGAC
ACAGGTCAGAGCCTGTAGGGTGGTACTGAATAACAATTCAACAGTGCTCTCAGACAGAGCCCAGGAGCTC
CACACACTGTGCTCCGGCCATCCCACCTCCTGCCTTGTGGGAATGCCCATCAGTCTGGATCTAGCGTTGT
GGCTCTCCACTTGGGCAGTATGAGTGATGGTCTGGTACTGCCTGCTTTCACTAGTTGGTGTGGTGTGGTT
GCGGCTAACTTTCTGTAGTCTGCTCCAAAAGAGTCAGCCTATATTAGCTACTTTTCCACGAGTATCACCA
AGCACCCAACAGAAACAGCCTAATGTAGAAAAGGTTGATTTGGGCGTGTGATTTCAGAGATGTCAGTCAG
TCATGGTAGAGAACAGAGCAAAGCAGTTTGCATCATGGTGACCAAAAAGCAGAGAGTCGGAGCATGCAAG
CAAGGGTCTGGATAAGGACACACTAGTGACTTACTTCCTCCAACTAGCCCCCATCTCGTATGCCTTACTA
TGTCCCAATAATGCCATTGTCTTAATGAACCCATCAAAGGATTGCGCCATTGATCAGACCAGAGCTCTCA
TGATTTAATTGTCTCTGGAAATGCCATTACACACAAGGGCGGGTAGACAGATAGACAGACAGACAGATGG
AGAAGTACATTATTTATCTCCTAGGTGTTTCTCAGTTTGTTTGTTTGTTTGTTTATCATCCAAAGGCTTA
TGTTTTGAATGCTTATTCCCCAGCCCGTGGCACTATTTTAAGAGACTGTGTGATTTTTAAGAGGTGGGAC
TCTATCTGGTAGAAGTAAGACACTGGGGGTGGGAGGGTGGACCCTTGAAGATTATGCCCAACCCCTTCTT
CCTATGTTGCTCTCCTTTTCCCGGCCTGCTGTGATGTGAACAGCTTTGGCCACATTCTGCTACTGCCAGA
TAGCCTTCCCAAGCAGGTGGGACCAAACATCCATGGACTGAACTCTTTGAACTGTAAGCCAGAAGAAAGT
CATCCCATCCTTGAGTTCTTATTTCCATTGAGTATTTTGGCTGCAGTGATTCAAGAGTCTATACTAATCT
ACTTAATAAACTTAACCACCATACCTGGGCAGTGGTGGTGCACGCCTTTAATCCCAGCACTTGGGAGACA
GAGGCAGGCAGATTTCTATGTTCGAGGCCACAGAGTGAGTTCCAGGACAGCCAAGGCTATACAGAGAAAC
CCTGTCTCAAAATGAAAACCAACCCCCCCCCAAAAAAAAAAAAAACAAAAAAAAGCCAAACTTAGCCATC
ACTCAGCGCACAAAGGCCATCTTTATGTCCTCATCTGAAGCCATGTCCTAGTAGCAGAGAAGGTGTGGGG
TGGTCCTTGTCACCCTGCTGACTCACTATCACACCCTGGGAAAGTCATGTCTCTAGTCTGAACCTCTAGT
TTGTCATCTGCTGAGTGAATATATGTTCACCCATATACCGGCTACTCCACTTGTTAAAACCTGCCTCAGC
CACGCACACAGCCTTTCTACATCTGTCCACATTCGCTAAGTCTGACCTGTCCTGAGTATCATCCACATAC
CCTGCCCCGGAGCCTGCTCCTTCCCCTTGCATATCTTCCAGATATACACAACAGTTCTGTGTATCTTTCT
TACATCTGTCCCATCTACCAGCCAGGATGATCTTTCTAGAGTGCCGGCTATTAGGAAGTCCTTCTGAAGT
TTCACTTCATCCAGTTCCCTGGCTTCCTCAAGTCCCCTACAGCAGCCATTGGCCCCAACTGTTTTCCATT
TTCTGAAAGAACTACCTGGCTTCATTCTTCAGGGTGCTCTCTCCTACAACACTCTCTTTACTGCCTTTAC
CTGTGTACTGACCCTCTCCTGTGCCCGTAGTCCTTGCAGAAGACCCAGGTCCTGTCACCACCATTTCCTT
TCAGGCTAAGGATCGTCTTTAACATAGACTCTTTGTCCCCGTTCATTTAAAAGGTGCTTTTAGTTTATCT
GCACATGAACATTTTTTGCTGGGTTTTAAATTCTAGCTCCACTTGCTATCTGTCATCATTATCTTCCCTG
CTCTTCCATCCTCGGGTACCAGGTGCCATTTTCCTCTGGCTGGTCTCAAGATTGTATCTTTGGTTTGGTC
CTCATTGATTTGACTCTGATTTTTAAAAGCTTTTCTGGGCTGGAGAGATGGCTCAGTGGTTAAGAGCACT
GACTGCTCTCCCAAAGGTCCTGAGTTCAAATCCCAGCAACCACATGGTGGCTCACAACCATCCATAATGA
GATCCAACTCCCTCTTCTGGAGTGTCTGAAGACAGCTATAGTGTACTTACATATAATAAATAAATAAAAT
ATTTTTTTAAAAAAAGCTTTTCTGTACTTCTTGTCAATTGTGGTGGCTTCATGTTCTGTCCTTCACGTTG
TGTTCTAGTTGGTATGATATTATATACTTGTGTATGCCTATGTGTGTACTGTACATGTTCTTGTGTGTGT
GAATGTGTGTGTGTGTGTATGTGTGTGAAGAGGTACATTTCTCATGGCACGTGTGTGGACATGAGAAGAC
AACTTGTGGAATTAGTTTTCCCATTTCTACCATGAGGGTTCCTGGGCCAAACTGAGGTGGTCAGGCTTGG
CAGCAAGCACCTTTACCTGCTAAGCCGTCTTGCTGAACTTGCCCATCTCTGTCTTTGTTATGAACATAAC
CTTCTGTAGTTGGGCATAATAAATATTGGTTATCTTAAAATATTTCTTCCTACTTTCAATGTCCGAATCA
TCTCAGGATTGATCCTCATTTTCCTTGTGTATGGCTTGCGTTTTCCTGTCACCTCATGTGTCTACTCGGT
TGAGATTACATCCTGCGCGCGCGCGCGTGTGTGTGTGTGTGTGTGTGTGTGTGTGTGTGTGTGTGTGTGT
GTGTCTGTCTGGATTCTGGTTGCAGCTTTGAGTCCTGCTGGTTCTTTGTTTTAAACCCTGATTCTCAGCT
CTGTCCCCTGTGCTGGGCAACAACCCTCTCTTCCATCTGTAGTCTTGTTTTGCTTCTGGCCTTGGGCAGA
TTGCTTGGGATCTTCTCTGGCCATCCAGTATTGGACAGCATTTCTATAGAGACTTCAGAGCCCCTTCTGT
GGCTTTCTCATGTCTAGGATTTTTCTGTACTTCTCGTCAATTGTGGTGGCTTCACGTTCTGTCCTCTCGT
GTTCCAGTTGGTATGACTGACTGGGTTTCTTCATGAGTCTGAGTTTTTACCAGCACTTCCTGGTGCCTTC
CTCGCCTGTTTTTTCTAGTTGATTCAGAGTTAATAGCATCAATCATCCAGAGGGCTAGATGACCTCGGAT
GATGAGAACCAGAGTCCACCTCACTCCTCCAAGATGCTTCTCCTATCCCCACTATTCCCCGACTTCTGCC
TACTGGAAGGTCCTATGTACTGAGGTCTTGCGTATCCACTCCACATATCCATCAGACACCGAGCAAGCCA
GGCCTGCTGCTCTGACCTTCATCCCTTCCACGCTGGCTCTTCCTCTCCATTTGCTGTGAGTGACAGTTTC
TGTATGTGTCTTCTCCTCCAAGTAGGAAGATCCTTAGGGGCAGGGACTGGGGATTTTTTTTTTTACAACA
CACAGTAGGTACTCAAGGGTGAAGTGAAGTGGTTTGACTTAATTATTTACACCATCTGCCACGAAGAAGC
TGCCCAGGGAAGACCATGACTGCCACCTTCTCTGAAAATCTGGCCTCCGTGGGAGACACAGGCTCCAGCT
GGCAGCGGTGTGGGCCAGCTGCTGAGACTCATGTCTGGGAAATACATGGTGCCCAGGAGCTAGAGCTATG
TTCTGGTCATGGAGACCCAGCCAAGTCTCTCTTTCAAGCCCTTTTCCCTATGTCCTTTGAGGGCTCACTT
TATTTATTTCTACTAAAATGCAAATGAACTCTCTCTTAAGAGGGCTCTGCAGAGCTGTTATGGCCAATGA
TTACCGCTTTCTGACAGTCGGGAGCCAGACAGGATTTGACTCCAGGGAAACACAGTGACAGCTTGGAAAA
TGGACTTCTAGAAGCCGCAGGACTACAGCTCAACAGCCCAAAGCAGAGCCTTTGACGTCCGGGAGAGCTG
GATTCAGATCTCAGGTCTGCTACCCAGCCTGGGTGACAGACCTTGGTTCGGAGTGAGCCTGGTTCCTTCC
CTGTGCATAGCAACTCATCCACTGGTGTTATCTCCATCTCCCCCACCCTCTTGTTATCAGTCTGTGGCCC
TGGAGAGCACAGCCTCCTCAGAGCTGGATCACAGCACAGAGCAGTTTATCTGCACGCTTCGCTGAGCAAG
TCACTGCTCTGAGAACTTGTCTGTGATTCTGACACGCAGAGCCTGTGCTTGTGTCTACCTGAGTGGGCCC
AGGAGTCGCAGTGTTTAAGGAAGCTCCTGGGGTGACACTGAAGCACATGATCCACATGGTACATGCTAAA
ACCCCCCACATGGTTGACCAGAGGCAGAGATTAGGGAGTCTGAGACATTTCCTATTTGGTAGAGAAGGTA
TTGAATAGCCTCTGGGCTATCCCAAGTGTTGATAATCTGATTTGCGGAGAAGCATCTCAAATTCATAAGT
ACTGATTATGGAAGAACATTTCACAGGAGGGACAGCATCAGGAAAGAGATGCAGAAGCTGACATGGGAAG
GGCCTGTAGACTGACTCAGTGGGTAAAGGTGCTTGCTGCCAAGCCCGGTGACCTGAATTTGGTCTCCAGA
TACATGTGGTGGAGGACCAGCTCCAGCAAACTGTCCCCTGACTTCCACACAAAAGCCATGCATGCATGCA
TGCACACACACATACAAAGTGAACAAAAACATGCAGAGAAACATGTGTCTTAGTTAGGGCTTTATTGCTG
TGAACAGACACCATGATCAAGGACAACATTTCATTGGGGCTGGCTCACAGGTTCAGAGGTTCAGTCCATT
ATCATCAAGGCAGGAGCATGGCAGCATCGTGGTGCAGGAGGAGCTGAGAGTTCATCTTCATCTGAAGGCT
GCTAGAAGACTGACTTCCAGACAGCTAGGACAATGGTATTAAAGACCACGCCCACAGTGACATACTTTTT
CCAACAAGGCCACACCTCCTAATAGTGCCACTCTCTGGCCCAAGCCTGTACATGACATGTGAATTCTAAA
CAGCATTATTCCTTGGTATAAAGTCAAGCTGGTTATGAGGAGTACAAGGTTATAAAAAGCCAGTGGTGAC
TCTTGAACAGTCAACCACAGGTGCTTAGACTGTTTCCTGGGAGCTGTAAGGAGGAACAAAGTCAGGATGT
GTGTGTGTGTGTGTGTGTGTGTGTGTGTGTGTGTGTGTAATATTTATATTGTATATAAATATATAATACA
TATTATATATATTATTAGTTTTGTTTCTTAAGATTCATTTATCTTTATTTCATGGTTGAGTGGTTTGCCC
CCATGTAAGAAAATGCACCATATATGTGAAGTGCTGGTGGAGACCAGAAGAGGCCATTAGATTCCCCAGA
ACTGCTGCAGACCCTCTGGGCCCTTTGTCTGCGTGGAACGGGTCTCTCTAGTCGCGGGTAGGCAAAGCAT
CGAATGAATTGACAGACAGATGCACACAGGAGAGGTTGTGTAGAATCTGAATGTAATGTCAAATCCAGCA
TCAGACTTTTTATACAGAAGACAATAAGGAAGTTGGGTGACATTCCTGCACGGTAAAAAGAGGTTACTGG
ATTCTTACATAAAACAGAGGAATGCAAACACAGAAGGTCTAACAGGAACCACCTGGGATAGAATTCATTG
TTAACAACTGGGATCAACAAGGGCTCCACCTAAGATTCACTTAATCTTAGAAGCCCAGGGTCAAGGGCTT
CGTGCCCTTGCCATAGTTCCTATTTTAGTCTATTGTATAGTCCACCTTCCCCTTAGGCCATTGTAAATAC
GTGTGTGTGTGTGTGTGTGTGTGTGTGTGTGTGTGTGTGTGTGTGTGTGTGTGTGTGTGTGTGTGTGTGT
GTGTGTGTGTGTATGGGTGTAACTCAGCTATAGTCTTAGAAGCCAGGTGTGAGGTCTTTACTCTTCTAGG
GCAAGGGCTTTCACACCCAAGTCATGGTTCTAACTAGGGAGTTCCTTTCTAGCTAACCATCTCATGAATA
ATGCAATACTCTAAAACCATAGCCCGATCTACTTCCTAAACCATTGTAAATTCCTGTATATGGGTGCGAC
TTGGCTTTTATTCTAAGTGATAGTGTAATACCAGAGGCTATTTCTGGATGTCACTGAATAGCAATATTCT
TACTGAACTTCTAGCCCATGGTCTTGCTCAAGGACGTTCTAAGACTGTTGGAACACTGGCGGAAGGCTTT
AGCTATGTCAGAATTCAATCTTAAAAAGCACTTATAATAGGATAATACTAAAAGAGAGCACGTGGATCCG
TACACTAGACTAACTCGGGAATGGAAAATTAATGTATGGGTTAGAGAGAACGCCAGACTCCAGGAGTGTT
TCCGTGAAACTCTTCCGCCTCATGAGTAGCTTCCAAACCTCTCGGCTTGTCAAACTGACTCAACCGGAGT
GCGTGGCATAGAACAAGCTCTATGGAGAGTTGTAAGCTGCCCTGTGGGTGCTAGGAACTTAACCTGGGTC
CTTCCCAAGAGCAGCCAGTGTAATTAACTGCAGAGCCACCTCTCCATATCCCTAATGTCATTGGTTTTAA
ACTCAAAACTAACCTTGCCTGCCACATGAAGGTTGCTTATGGGGCAGTGGTGAGGACAGGGAACCCAGGG
AAGATGCTACTGAGGTTACTCCCGTGGGAGGTTCAGTCTGCACGAGGGAGCAGTGAGATCGGTGAGAAGG
GGTGAGGATGGGAGCAGGTGAAACCACAAGAGGTGGCACCGTCATCTCTGCCTTCCCTCACCCCTGTCTT
GATGGTTTCAGAATGTCCTCAGAGTTCTTGAGACTCATTCCCACATCTATTTTCTTCTTTTAAAGCCTAG
CTATTTGTGTCATCTAGGGGTCTGTTCCTCTTGAGGTTTTTTTTTTTTTCCTCAATTATGATTCAAATTT
CTTCTTTGCATAGGTGGTCTGTTTTTATTTTGTGGACAGGATAATTTAAATGCATAGCTTTCTTTGCTTC
CCCAGAGACTTTAATCCCTTCATTGTTCACCAGCTTGTGGTCTCTCTTACGTGCTTGTACATTGTTGTTT
CTTGAATTTTTTTTCTAAAAATCAGAATAGCCTGATCCAATCTGCTCAGCTCTCAACAAAAGAAAAACAG
TGACATCAGAGCTTAAGAGCAAAGATGGCTCAGACACCCAGAGGTGATGCCCATGCTGTGCTGTACAGAT
GTAAGAAGATACACATTAGTTGAATGAATTACATTTTTTATGTTGTTGTGATTAAGTTACCTGACAGAAA
CAGTTTATGGAAAGAAAGAGTTTTGGTTTTTTTTTGGGGGGGGGGGTTGTTTTTTTTGTTTTTGTTTTGT
TTTGTTTTTTGTTTTTTTTTTTGGCTCATGGTTTCAGAAGAGTTCAGTCCTCATGGCAGGGAAGACACAG
CAGGGTTCACAGCAGTGCCAGCTTGTGGTGGGAGCTCCTCAGACCACAGTAGACCCTGAAGCAGAGAGAG
CAAGAACCAGCTATAACCTGGGGTCCGTGTCAGACACCCACCCTAAATGTCCTGTCTCCACCAGCTAGGT
CCTGCTTCCCAAAGGTTCCAAACTCTCTCCAAAGAACACCACCAGCTGCAGAACAAACACTCAAAACCTA
AACCTGTGAGAGACTTCCAGTCAAGCCATAACATTCCATCTTGGTTGCCAAAGGCTCACGGCCATCTTAA
AAGACAAAGACACACTTATTCCAATTTTAAGACGTTCTCACAGTCTCAACATTGACCAATAGTCTAAGTC
CAAAGTCTCCACTGATGGTCAAAACAGTCTGTGGTCTCCTGGAAATAAGAATGTGTTCAAGATTAGAAAA
AAAATAGGAGACCAAAAGCCAACAGGGGAAACACTTAAGTCTTCTACCTCCGTGTCCAGAATCTGGGCAC
ATCATTTGGTCTCACACAGAGATGTTCCTTAAAAATCTAGGTGCTAGTCTCTGTGACCCCATAATTTACA
TTCTGCACACCTGAAAACTAGCACCAGATAGGTAAGTCAAAAGTCAGCTGCCGCAGGGACCCCTTCGATT
ATGGCTGCTTTTGGCTTCTGAGTACCTGAGAAGCTGAACCAAAACCTAGAAAACCATCTTCTTAGGTGGC
CCCTTCCCATCGGAGCACCTTGGTGACTCTTCAAAATACATTCACCTTCTGAAGGAAAGTATTTTAAGTG
ATTAATTGATTCGTCTTCTATTTCATACCCTGGAGCCCTCAGAATGGGGACAGATTCTCAGCTCACCTGC
TCTGTTGCCCCCGTGCCAGGTGAGCATCAGTAGCATGCCGTGACCCCTAGTCTCTTATCCACAGCTTTAA
ACATCTTCTCCTTTCTTTCAGGGCCAAATTACACATCTTGAAACTTCTCTGCATTTTGCCCCCAGTCTCA
CTGTGAAGGTAGCTAAAAGTAACCAGCCAGAACCATACTGGTAGCAGGTTGACCTCTGTCTGGGTTGCTT
TGCATTTTCTCCATTACCTTTGAAGTAGTCCACCACCTCACTCAAAATTTCAGGTCATGGGTAGAATGTA
AATAAATTCTTTGTCAGATTCCAGTGGCCTCTAGAAGCCAGTGACCAGTGGAGTCCTTGTTTTGCCCAGA
GATCACGTGGGTATGGTCTTTGCTGCTCATATTGTTGTTAGTGTTTGATCCTCCAAGTTCTCAAGGGAAC
AGTGGATCTGGGGCCTTAGAGTCCACATGGTTAAACTGTTGCAAGCCAGTTTCAAAGGCTTAGAAACCAC
CTGGTAAGATTAGCCATCTGAATGTTGCCACTTTGCTGGGATCCGCTCTCTGCTTCTCACTTTAGCATGG
TTCTGAGAGAAACAACTTGAAGAAAACACTCTTTCTGGCTCGTGGTTTTTCAAAGGGCTTCAGTCTATCC
AGCAGTAGCAGCATGAAGTAGAGGCACCTCACGCCACTGAGGCAGATCAGGAAAGAGCGAGGACAGAGGC
TTTGTGTAACCTTCAAAGCCTGCCCCCACCCAACTGCTTCTACAAGGTATGTCCCATTCTGAAAGGTTCC
ACCGCTCTCCAAGTTAACACTGTCAGCTGGAGAACAAGCATTCAAAACACGAACCTATGGGATGTTTCAG
ATTGGAACGGCCAGAATGAGTCTGAGAGAGTGACAGCTATGCGATTAGGGATGGCTCTTAGGTAGTAGCT
TGAAGATCAGATAGAGGTGGGAGGCAGCTGTGGGGAGAGGAAGTTGGTCCCTCTCGGCGTTGGCTCATTG
CTGTCTCCTTGGTCAGTCTGTTTCGTGAGGCTTAATAGAGATATAGTCTGTGGCTCAGTGAGCTTTAACG
ATGATAAAAGTCACTGGGCTACGTGTTGCTGCGGCTTGATCCAGTGGCATGACTCCTCGTCATATTATCT
AATGATCTCTCTCTGCGCCATGGCAGCGAAGTGTCTTACATGTGCACACAATGGGGGAAAAGGATTGTCG
CCGTTACAGTAACATCCCTGTCGCCACCCAGCTGCCGACCTTAGGGGATAGGATTTTCCATGGTCCTTCA
CTCTGTTGATCCAGGTTAGTTACGCCGTACTGACGGCGGCTTGAACAAAGTAGAAAATGAGATCTCTGTT
ACTTGTAGTACTGCCGAGGTGACTCTCTTCACAGTCCAGGAGTCAGGCTCCGTTGAAGTCTTCCTGCCCT
CTGGTCCTCAGCTGGACGAGCCACGATCACCCGCCCCACGAGTCTGCATTCCACGCAGTGGGAAAGGGGG
CAGCTTAGTGGGGCGCACTAACCCAGGAAGGGCTCATTCCGGATGATCATCACCTACACATCCTGCGATC
AGAACTCAGCCACCCTGCAGCCAAGGCTTCTGGGAAACATGGCCTTTGACTGGGGCAGCTCAGTTGTGCA
TTTTCTAAATTCTGTATTGAGGGATGCTGGCAGCCTCTGCCTCTGATCCTGAGCCCAGGCATCTGGTCTT
GCTTCAGGGGTCACTAAAGAAGGAGTCTGGTGTCTTCAAGGATCCTGTGGCACATAGAAAAGTTGACATT
TCTGCCTGCTTGGCATATTCCTGGTCTTCGAGCGCGCATCAGTTTTAGACTTAGTTCTCATGGCTGTGGT
AGGCACTTGGGGAAGTCAGGCAGGAAGCTGGAAGCAGGAGTTGAAGCAGAGGCCATGGAGGAACACTGCT
TACAGGCTTGCTCCTCAAGGCTTGCTCAGCCTGCTTGCTTGTAGCATCTAGAACCACATGCTCAGGGCCT
TCCTGCATCAGCCATGTATCAGGAAAATGCCTCCCACAGACGTGTCCACAGGCTAGTCTAGTCAGGTGGA
GCCAGCTGAGAGCCCCTCTTTCTGCAAACCTTTCTGTATTACAAGAAGATGATTCTAGGCACAGGGTGGA
GCACGCGACTGGAGCCATGCCCTGGATGTCTAGCTGTGTCTGAGGGTTCGTTATCACTTAGTGGTGTTTG
CTCTGTTTCACACCGACAGTATCTTGGCTCCTGCTTGTAGACATGGGGTGCAGGTAAGGACCAGAGAGGT
TGTCTACTAGGACAGAAGAGGTGCCAGGTGGCACAGGAGTGTGGGTGACATCCCTTGGCTTGGCAGCATG
AGGAGCAAAAGAGCTCTTTGGGCTTCAGGCATTGTGGATGGTCCACAGTACCCCATCCAAGGCAGGGCAC
GATGCTCTCTGTCCCCATGCAGTGACAAATCCTACCCAACCCTGCCTCCCCGAGAACAATGCCGAACTGA
AGTCCAAGTCCAAGGGAGAGTCTAGGAGCTCAGGGGATGCTGGAGGCAGGTGGGGACTGCTTCCTGTGCC
CCATGCTCTCTCACCCTTCTAGAGGCACCGTTCTCTCTCTCTGCGTAGAACATGCTCTGCAAACAAAAAC
CTGATCTCACCATCATTTGCTCAATCTCCTTCCTCAGTGGAGGGACTTGGCTTGAGTGTCCCCTCTGTTG
TCTGTGCCATTTCCTGGGGTCCCTGGCCTTCTGGCTCCTTTGTGTGATTCCTTTTTCATGTTGACCTTTT
GGTGTTGGTTTCTTTTTTTTAAACAGGCAACCATCGGGATTGACTTCTTGTCAAAAACCATGTACTTGGA
AGACCGTACGGTGAGTTCCTGGTCTTAGAACTGGAGGACAAGGAGGGCATTGTCGGGCTTGTTCCCTAGA
GCCCTCACTTGAGCACTCTTGGGAGTCTCTGCCAAGACCAGGAGGGAGCTAGCAGTGCCATCATCGTGGG
GTCTGGGCTTCCAACCCCCTCTACCACTCCTCTACCGATGCCTCTGTTTGGGCCTTGTAGGTTCGACTGC
AGCTCTGGGACACTGCTGGGCAAGAGAGGTTCCGCAGCCTGATCCCCAGCTACATCCGAGACTCCACGGT
GGCTGTGGTGGTATATGACATTACTAGTAAGTTGGAGTCTGTGTTGGAAGGAGGGGGCTCTTAGGACCCA
GTGTGACCCTGACCAGACCTGTGTGTGTGTGAATGTGTACGCCAGCGTGTGTTCAGTGTGGGGTAGTGTG
TTATCTTAAACTGTAGTGGATTCATCAGTGTCCTTCAAACTCCTGTGACAGATTCGACTGCATAATACAG
GGTTGATCCTGCTTGGGGCACGGGCCCCCCGGGGTGGGGGAAATGGCAGGTGTTCACAGGGTTAGCTCTC
TGTGTCCTCCCTGGCCCTGGCTGGCATGTGTGTGCCAGCTTTCCCCAGGCATCTCTCGAGGCAGTCCCTC
TTGTATACACGGTTTTTGAAAGGGCTGCACAGACTCAGTGGGGGACCAGACATTGGGGCAGGCCTTATGC
AGAGCCCAGGTACCCCCAAATCATCCAGAGCAAAGATTCTCAACCTGTGGGCTGACACTCTTCTAGGATC
AAATGACTCTTTCACGGGGATGGCATACCAGATATTCTCCGTATCAGATACTTACATTGCAGTTCATAAC
AGTAGCAGAGTTACAGTTTATGAATTTGTTACTGTAGCAACAAAAATAGATTTATGGTTGGGGCTCACCA
CAACATGGGCAACTGTGTTAAAGAGTCATTGCATTGGGAAAGATGAGGACCACTGAGCTAGAGATGAGCA
ACTGTGTTAAAGAGTCATAGCACTGGGAAGATTGAGAACCACTGACCTAGAGGAACACACCTGGGAAGCC
CCAGGCTTTACTCCCAGAGTGCTCTGAGGACCCTGACATCACATGCGGTTGTGCACGCCTCACTGCCCAG
TTCTGCCTTGCCCCTCTGTCTACCTCCTCCTCTCTGAGCATATGCTCCTTACACCCCCTAGTGAGGTGGG
AGTTGTGTCACAGGCTGGGGAGAGCAGCCACCTCCCCCCCACCCCCAGGTGCTGAATTTGGATGTCTGAG
GGAGATGACCCTGAACACAGGTGACTTGCTTCTGTGTTGATATGCCTCTAGGGGGCGCTTTATCTGCCTA
CCCTTCCCTGCAGGGTTGCAGGTTCTCTTCCCCAGCTAGCCTGGCCTTCCTCAGGCTCCTCTGAACATCA
CTTTGGGGGGACACCATTTCCTAGGGGCCGCCATATGCTCCCTTCACAGGTCCGCGGCTCGGCCAGGCCA
TGGCCAGCTGTGACTCTTGCGTGGTCTCTAGAGTCACTGTTCTGTGTAGAAATTGTGACAGCCTAGCTTC
CTAGGTACGGTGACTTCTCTCCCTAGGGTGGCTGAGCAGTGCTGGAGGTTCTCCCAGTATCACAGGGTAG
GAGGCCATCTTTCCTTCTGACCCCTCCGGGGACCTCATTCCCACTCTGTTCCCACTTTCTGCCTCCAGAT
CTCAACTCCTTCCAGCAGACTTCTAAATGGATTGATGACGTCAGGACGGAGAGGGGCAGTGACGTGATCA
TCATGCTTGTGGGTAACAAGACGGATCTGGCTGATAAGAGGTAGGCAAGCACTGGAGTGTGGAGGTGCTA
TGACTAACGGGCCCATGCTTCCTCGCCCCTCTGTGGCTGTTCCTGCCCAGGTCTGAGATGACAGGGCAGC
GAGGCTGATCTCCACGCACAGGGCCCCCGACACGCCTGTTAGCCCCCATACACTGCAGGCTTCTCATCTC
TGATTTTCCTCAGCTCAGCAAAGGCAGGGCAGGGCCTGTCTGCACAGGCATTTCTATCATGGTCCCAAAG
TAGCCTGTGACACAGCTTCTGTCCCTGGGAAATCCTGGCGTTGACATGTGAGGTCCTCAGGTATGAGCCT
GAATTATGTCAGCCGAGTACCGACTTTGTCCCCTGCCCATGCATCCTGGTTTATGGCTGGATCTGGGCAT
GGAGTATTTTTGGAAAAGGTTTCTCCGTAGCTGTCCCCTGATGTCACTGCCCATTAAGGTGTCATTAGCA
TATATGTCCGCTCTTGGAACCCTGTGCTAACTGGGACAGAAAAGCCGTGTGTCGCGGTTTCTAATAAAGC
ATGTGGCTTCTTGCAGCAGCCCTGCCGAGGGGGGAGGGAAATGGTCTCCTCTGCAGAGCAGTATGGGCCA
AGGCGAGCTACTTTTAATTTTGGTGTTTGCATTAGGAAATGGGGGCTGAGGCTTCACTCCAAGAAAGGCT
GCATGTGTCCAGGAGATCCTGTTCTAACGACTGCTGAGAAAGCCGTAGGGGGCGTGGCTCAGTCGCAGAG
CGCTCGCCTTTCCAAGTGTGAAGCTCAGCATCATAAAGCCAGGCATGGTGGCATATCCTACAGTCCCTGC
TCTAGGGAGGGACATATCATACTGAATCAGTAGTTCAGTGTCATTCGTTGTTACATCACAAATCCAAGGC
CAGCCTGGGCTACATAGGTAAAAGGTAGAAGGTAGCCTTGCTTCCTAGTTCAGAAGATGTGGGAAAATGT
GGAAAAGACTTGGGGTTCTCTGTGCCCAGGTGCCACATTCTTGCTAGACAGACTATAGCAGGCCTCCTGG
CAGGGACCCCTGGGCAGGAAACCTGTCTTCACGGCTGACCAATGGGCCTGGCAGTCCCTACAGTTCTTTA
TCGCAGGCTGCCTCCTCTACTTCTGCCAGGGGTTGCCTCTCTGCCCCCTGATTTTCCTTCTCCCCTTCAT
TTCCAGGCAGATAACCATCGAGGAAGGAGAACAGCGGGCCAAAGAACTGAGCGTCATGTTCATCGAGACC
AGCGCGAAGACTGGCTACAACGTGAAGCAGGTTAGGATACAGCTGGCTTGCTCGGGACTGGAGGCCCTCC
CCTGAGGTCTTCCTTGCTCTGAGTGGCTAGCGACTAGGATGGGGCAGACAGCCAGTGCATATACTTATAG
CTCTGGGCAGTGGGGGATGGCACTGGCTTCCAGCGCTGGTAAAGCTGGTGGCGTGGGGGGTGGGGGAGGC
ACTCCGCTAGGGAGCCGCGCAGACCCTGTCAGTCACTAGTCTGTCTCCTCAGCCATCATCAGGTGTGGGT
CCCTGGAGCAGCGTGTGTGAATGAAAGTCCAGCATGGACTTCCACCTGGCTGAGGAAGCTGTGGTTCTTA
GCATCTCATTTCACTTCACATGCAAATGTAGGATGTTGAATCTGATCGACACGTTGGGCTTATGTCTTGT
ACTTGGCAAGAACCCGGGGCCATGAAGGGTAACTCAGAAATGGAGCAAAGAGACTCCCTTGGCAGTCGGG
AATCATGGGAGGGAGCCAAGGTGTGGCTGGGACCCACAGGACCAGAGTAGTTGGTGGGCGGAGCTTAGCA
GCTCAGCCGACCTGGGCTTCAGAAAAATCCCACAGGTATTGTGACTGCTCCCTCATCTGTAACCAGCTCT
TCAGTGATGAATACTGACAGCCAGACAGCCTCAGTGTTAGCAGTGAGTCCTGTGACTGTCCCACTGGCAG
AACTTCACAGTATGACAGGGATCCCACACTTCACAGTACTGGATCTCAGCATCCCACTAGCCGTTAGACC
ACCTGTAATCCTGATGTGAACATGTATGTTTGTAAGGAGACACGGATGTCAGCGTGGCTCAGATTTATGA
TCCTTAAATATTTGGGAAGTTTTATTCAGAAGCAAACGGTTTCCTTTATCATCCATTATAACTTGACTAC
ATCTGAAAAAAACGAGTCCACCGGCTTCAGCAGTGTGAAAGGAACCCATGGCTCAAACAAGGTGAAGAAC
CCCTGTCTCGGAGCAGGAGGAGGGTGGTAGCAAGGAGGAAGGACATCCTAGGCAGGGCTGATGGGCGTAG
AGCCTGGCAGCAAGGTGCCCGTAGCACGGGGAGGGACCCTGAGTAAGGAACGTGGCTTGATGCCGCCGTG
TCTGCTGCGGCCCTCGACTGACTTCCCAGGCATACCTGGGCACCACTTGGCTTTTGAGAGAGAGTGATGG
TTCACTTCATATTGATAGTGCTGAGATTAAGGTTGACAAAGGAGCTAGAAAGGACAAAGTAGGAGGGGCA
CTGTGGCCATATTAGGGAACCCCCGGCCCCAGCTTCCGGAACCCAGTGCCCAATTGGAGGGCCCTTCAGC
TCCATTCACTCCAGCCCTTTCCAAGCCTCTGTATCAGATGTGAGCCTAACCACCTCAGAGAGGAGAAAAA
GAGGCGGGGGTGGGGTGGGTGGTGAGGCCGCTGCTCTTTGGGTCCAATGACATCATGGGAAATCGAAGCC
GAGGACAGTATCAGGCATCCATAGAGCAGGAGGCATCTTCAACCTGCTGGGCCAAGGTGAGACTGGTCCC
TTCCCCCATCCTGGAATGATCTGGAATCTGAGCAAGGGTTTGAGCAAGAGTTAAGTCTGGTGGGTTTGAG
CTGCTATTGCAATTGCTACAGGCTATGCAGCTCACAGGTAACGGAACCTTCTTCCTCCCTGCTCTGAAGG
CTGAGGACTCCAAGATGAATGCGCTGGGAGATCCAGTGCCTTGCGGACTCTGCTCCCTCATATTTGGCAC
CTTCCAGTTGTTTCCTCACATGAAAGGAACGTGAAGGCTCCCTCAGCTTCTCTTCCAGTCAGGAGGGCTC
CTTAAGGCAACACCTCCTCACACCGCCTTGCTAGGAGTTAGATTTTTTTTTTTTCATTTGTTTAGTTGGT
TTTGTTGTTCGTTTGGTTGGTTTGCTTTTCAGTTTTTCGAGACAGGGTTTCTCTGCATAGCCCTGGCTGT
CCTGGAACTTACTCTGTAGACCAGGCTGGCCACAAGCTCACAGAGTGCTGGTGTTAGAGACATACACCAC
CACTGCCTGGCCAGGAGTTAGGTTTTAACTTATGAACTTGGGGGAGACCCAGACATCCAGCCAGGCTTAG
AATCTTCTGTGCTCTTGGCTTCTGCTTGTACTTGTTACTTTCAAGATGTCACCTCTGCCACTGTCCATCT
ATTAGGTGCCCCTGATACCTTCTGTCCTCGTGCACACTCAATTAGGTAGACTTGCACGTCGACCCACACT
CCACATGCTTGCTTCTCCCACACCCACTTTCTCATATACACGCAGAAACATGGCATTTACCATGATACAC
ACACATACATACACACTTACACCCAAAAACACACTTAACTTTTTATACCCACTCTACAAACAATATCAGG
CATACCACGCATAGCACACGCATGTAGCACACCACATTGACACAAATTTTCACATCCTTCACTGTGGCTA
TGGCCCTGGCTCCCAGGATCTGTGTCCCTGGGGAGAGTCGTTTGTCTTACGTAAGGCTAGAAACTGGTTT
TCTACACCTAGTCCCCATGTGAGAGTGATGGACAGACACCCACTGAAGGGCCTGCTTCCTGTGGCCTGGA
TGATTTCTGTAGCAGAGCAGGTCCCTTGCAGTCACCCTCATGACCCCTGCTGACTGCCTGTGGGCCAGCC
TGCCTCTAGGAAGAGCCCCAGCTTTGCTGTATGTGTGGACATGTGTTTGTGTGCAGGTGTGTGTGGGCAT
GCATGTGTTTACTTACACCTGTGGCGGTCACAGGTTAACTTCTGGTGTCATTCCTCAGGTGTCATCCACC
TTATACTTTGAGATAGGGTCTTCGACTTTACCTGAAGTGTACCAGTTCAGCTAGCCAGGGAGCCCTGGGA
ACCTGTCTTTGTCACTCCATCACTAGAATTATAAGTGTGTGCGGCTACATGCAGCTTTTTACGTGGATTC
TGGGGACTGGATTTGAGTCCTCTTGCTTGTGTGGCAAGCACTTTGTCTCCCTAGCCCCTGTTCCCTCTTC
CTATTAACATCCTGAGTCGCTCCAGGACCAACATTGAGAGGGGCTATGGTGATGGCAGAGGACTTAGAAC
AGGCCTGCACTCTGGGGCAGTCAGTGGGCAGTCAGTGGACAGACAGGCCACCAATCCTCAGGCTCCGTAC
ACGAGGAGAGCAGTACAGGGGGAGACCAGGAGAGGGAAGGAGGGGGACTGGGCAGGCCTCACCCTGCATC
TCCTGCCTGCAGCTCTTCCGACGTGTGGCGTCAGCTCTGCCCGGCATGGAGAATGTCCAGGAGAAGAGCA
AAGAAGGGAGTATCCTTTTCCTTTATCATGTGAGTGAAAAGATGGCTCCCCAAGCCCGCGAGTCGTTTAG
TTCAGTAAGCAGATGAAGACCACCTTGCCTCTGTCGCAGCCCTCCCTGGTCTGATGCAGAGAGCCGGGCC
ACCTCTTTCAGTAGCCAGATGGGCTCCACGTTCTCTGAGCTCCAAACCTTCTCTAACCAAGGCTGCCTCT
TCTTTCTTAGCAGTGAGGAGAGACAAGGGCTGTGCAGCAGTGGGGGATTGGAGGGTGGTGGCTCTGTGTT
GCTTTGTAGTGAACACTGCGTGTGTTTCCTGAGTCCCCTGGAGATCCCAGACAAGGAAGCTTCCATGCAA
TGAGCACTTGATTTCAACCTGCCAATGCTTCCTCCATCTGCCCACTGCTCTGTGGGGAAAGCTTGCCCAA
CACTCATCCAGTATAACTAAAAACCTCGCTTACACCCAGATGATGAATCTGAGGTGCGTAGAGCAATCCA
AGGCCCGCTGTGTGTGTGTAAGTCAGGGAATTAGCCTTTACACTGAGACTTCCTGCATATCTACCCCTAC
TCCGTCCTGGAGGGTTGTCTCTCAAGGATCCCAGCGAGGCAGAGATTAGTAGCGCTGTAGGTGGCTGAGG
ACATTGCCCACAAGCAGGCTTTCTTTGAAGTTTATCAGATGGCCCTACCTGAGCAAAAACCCACCTGCAG
AGTCAAGAAAGGAGCAGGACCGATGGGAAGCCAAGAGGTGTAGTGACCCTGTGCCCACTGGGAGGGACAG
ATAGCCTGCTTTTATCCTGTCCACTCCAAAGGCAAAGCTGACATACTAGCATGCATGGCGGTCATTCATT
CATGTTCTCCCCGAGGCCCCGGTGGCACTCCATGCAGGATTCACAGTTGGGTCCCCCAGGCTCCCACTTC
AGCATGACAACTAACGTGGCGTCCTAGTGAACCTAGCGACCCGCCCAGCTTTAGGGAGAAGAGCGCTGGG
CAGATGGCAAGCAGATCACACAGGGCACTGTTTGCCCAGCTGTGGGGTGCCCCCATCTGGCAGATGCAGC
CATCCGTACCACTCCCAGGTGCTCATGGCTGGAGCCTCCTATGAGGCAAGACTGGAGCAGCCTGGAGCAG
ACTCTATAGACAGCCCAGCAGGGGACAGGTGGAAGCAGCTGCCACCTCAGCTTGGTGCTGAGCCAGCACT
TGTGTTGACTGATGGTTCAAACCCAGATCCTGTCATGATGTGTTAGGGATCATGCTTGGGATTGCATCAA
CATGAGGAACAAGCACACAGAAGTGCCACTTGGTGATATATGAACGGTTCTCATGTGGCCTTACTCCTTG
GACTGGTGTTGGGGGGGGGGGTGCAGAGCTTCTGTCTTCTGCTTCCAGGTCCCTAGAGGGTGTCTGCACT
TCACATCTGCTCTGCACAGGAAGCCTGCCCAGGGCCTGTCTAGCAGGTCCCCTTACCCACCCTCCAGCGC
TTGATCTCTCAACAAAGTTGAGCTAAGGGACCACAGAAAGATAGGGCCACAGCCCTTTGCTGTATCCACA
CACACAGGGCACTCCTTTCTGGAACAAGGGTTTCGTGTGCCAAATAATGACAGTAACTTGGCAGTAACTA
ATAGATTTCTCCACCAACGAAATGAACCAATTCAAGCCAGATCAAAAGTGTAAAGGCAGGTTTATTGAGA
GGCAGCTGTCCGACGAGGCACACTTGGAGGTCAGTAAAGTCACACGTCCAGGCTAAAGCAAGGGAGTTAT
GTGGGTTTTAGGCACAGAGTGATGACGTGTGAGCTAGGAGCTGGGATTATGCCTGTGTAAAGTAGAGAAG
CTGTGTGGGCACTCACTGTGCGTGGCTGGAAACAGAGACAGGGAGAGGGGTTGTGTTAGCCTGGAATTTT
CCTCTTGCAGGGCCGGGTTGGGGGAAGAACAAATGGGGTTTCTTAGCTTGTGCAAGGGATATGCAGGGGC
TCCAACCAACCTTCCTGACCTCTTTGGGTAGAAGGAAGGGCACTGATTCAGAGCTACATCCTGCTGCAGA
GGGAGAGAGTCGGGAGTCAGTGGGTCCGAGTTCCTCGGCAGGTATGAGTGCAGAAGGATTTGGTTGACAG
TTACTCGGGAAACTTTGAGAATCCGTTCTGGGAGAAAGCGGAGGATGCAAGGTGCTAGGAGGAAAAAAAT
AGATTAATACCACGGCCCTGTGAACGGGGCTAGCTAGGTGCAGAGTGAAGACTGCCAGGAAGAATAAAAC
GGAGACTACCCTGGTTGTCTTGGCAGGGTTCTTCAGAGTTTGTGAGGTGACTCAATGTTAGCCTCTACTA
GGCCAGGTTTGCTGGCATAACAACATTCTTTTCCCAGGGACATACAGGTGCCTCCTGAGGGATGAGCCTG
CTGTGAGGAGGACCAATGCTCCTCACAGGTTTTGCATGGCCACGTGAATTGATCTCATGCTGGAGGAGTG
GCCACCAAGTTGTTGATGGGCTTTTGGGGACAGTCAGACACCTCTCTGATCTCAGCCACCTGTATCCCAT
GCCCCCCGCAGTGGAGGTCACAGCAGCAATACCTGTTACTACTGTGATCTGTGTGGGCAGAGGGCACCTG
AGATTGGAAAGAGCTGGTAGGATAGGAGAGCGTGGCTGTGTCAGCCTTTCCATAAAGCATCTGGTTCGGT
ACTGGTGTCATTGGGATACACAGAGAGGAAGGATCACCAGGAGGCAAGCTTTTTGCTATAGAGCCGCTGC
ACCGAAGAATCCCCTGCTGTGCCTGGGGAAAAAAACAAAGTTGTGTTAGTAGTATTGCAAAGGGAGCCAG
GTCCAGAGTAGCAGAAATGGAAGTGAGTGTCTGGAAGAGGAGTGCGGCTTGTATAGTGATAGCCTTTGGT
TGGAGGGTCAGCCCTTGGCCTCACGAAGGGACCAGCAAGGGAACTGCTCTCAGAAGAGCGCAGCCCAGAG
CAGCCCAGAGAGAGCAGTTGTTGTTGTCAAAGACTTTAGAGAGGTTAAGTAGGATTGCTCCCTCCTGGAT
GAGGCCCAGCCAGGGGAAAGGTTCATTTTCTTTAGTTTTTACCTGGGGTTGGGAGGAGTCTCTCGGGTGT
GATTGGAGGGACTCCTGTTGTGGTGTGGTCTTGGTGAGGTTTGCCGGGAGCTGGAGGGAAGAGGGTCTGG
ATGTCGGGTCTCCAGATTTCTCTCTGTTCACATGGTTACGAGGATGTTTCGCTCTGATAGACTTGGCTTA
TTACCCCGAGCCCAGCGGTCATTCCAAGGATCTCAGACGCTAATATAGCTGTAGTTTAGTGGGGAATATC
CAGCCACTGGGCAGGCTCATCCCTGTCCATGCTCTCAGCAGCTTTCTTGTCTGCACCCTCCTCGGATGTT
CATTTTACAAGGGCCCCATGAGCAACCCCCTTGTTCTTTGACCCTTTGGGAATGACAAACTTCCTCCATC
TGGTGGTCGTGGGTAAAGCATTCATAGAGGAGCAATACTCCCTGTGCATTTAAAGAAAGATCTGGGATGG
AAATACCATCTTGGCACCCCTTAGAAGGACAGTCTGTTTGGCCCGCGATGTCGTTGTGGGTTTCACCGGC
TTGATCGCAGAACATGGAAGCAACAGCAGTATGTTGGAGCTGATTTGGTCTCACCTAGCTGGACAACCAG
GCAGGGGTGTCTCGGTGTCTGGCACCTGTGGCAGCAGAGAAAGGGTGTGACCCAGGAAAAGGAAGAGGCA
AATAGAGTGAATGTTGTCACGTTTGACCATTCAGACCTGGTTTTGAGAATCCCTGTAGAACCTGAGAGCG
GTGGGTGCCAACTGCTAAACAGACCAGCCATCTTGGGCTGGGGCCTTTTTGAGCCGAGATAGATGGTGCC
AACACTGATATCCTAGGAGTTTGGCAGCTGAGGGAGTGGTGATTACCATGTAGAGTCCGATCCACTGGAG
CTCTAAAGATTTGGAAGACAGTTGTTTGAGAAGCACCTGGTCCCCTGACCCCGGGAAAGGGACAGGGGTG
GGCAGTGGCTGAGTCTGCTGATATTGGGGTAGGGAGATAGTTGTCAGTGTGTGAGCCGATAAGGGAGCAC
GGGAGGGATAGGGTAAGTAGCTGGGGGAGTCCGGGCCCGCGGATGTTGGTTGAGGAGAAACAGCCTTCCG
TGCATGAGCTCAGAAGGACTGAGGCGCGTAGGAGAATGTGGGGTAGCTCAGAGGTGAGAACACTTGGGAG
AAGGGAAGGCCAGGGTAACCTGGGCTCAGGTGAGAGTTCTGAGTTGTTTGATAAGGCTCTCTCTACCTTT
CTCAATGACTGGGTGGCACGGAATGTGAGATTTTCGGGTTCAAGGCATCCCTGGCATGCAAAACTGAGCT
CCTGTGTCCCAGGAGCTGTCACATCCGCTGCTCCCCTGGAGGTGGGGAGCATTTGGATCCACCCTGTAAA
AGTGTCAACGAGGGTTAGGAGACGGCAGAGTCTTTTCTGGGCAGACATGTGTGTGAAGTCAGTTTGCCAG
TCTTGTCCTGGTTGGTGTCCTTGGAGCTGGTGCAGGGTCTGGCGTATCTGGAGAGCCCCCTGTGAGTTTG
TCTTGGCACATGTTTGACCGGAAGGATGAGGCTGTAAAATATGGGCTCAAAGGTCAGTGGAGTCAGTGGG
GAGGGGCAGCTTTAGAAATGGGAACAGAGCCTTGGGTCTGATGTGTAGGCTCTGGTGGATGTCTGAGATA
ATAGAAGGTGCCAATTTGAGGGGGAGAATAAAGCTGTTATTTAGGCAAAGCCATCCATCTTTTGTCTGTG
TGGCCCCTTTGTTAAGGAATCTGGCTTTATCCTCCATCTGACACTGAGGTTTGTAGGAAGATCGTAGGAA
GAGGATGTGCCCCGTGCGTCTGTAGGAGCTAGGAGCCAGACCTCAGACCACTGAGTCAGCCCTGGAATTA
TCCACAGGCTCTGGATCTGTGGAGGTCTGGTCCCTCCCTTACTCCTGCGCTGACTTATGGCCACCTCTGC
AGGGAGTTGGAGGGCTCCAAAAGCTTGGCTATAAGGGGACCACCCATGGTGTCAAGGAACCCCCTTTCCT
TCCATAGGACAGAGGGGCTGTGAGCTACAAGAAAGGCTTACTTTGAGTCAGCATTGGCTCATTGTCCTTT
GTCAACATGGAGTGCCCTGGTTAGAGCAATGAGTTCAGCCTTTTGTGAAGAGAGGTTCCACTGCGAGATG
GTTCGACTCAGTCATTTCAGCTGAGGTGACCACCGCGTATGCCGTCTGGTGGGTCCTGAGTTATCTCTAA
GGGAACTTCCATCCACAAAAAGGGTGAGTTGTGGGTCTGTGAGAGGCTGGTCTGGGAGGCTGGGTTGGGG
TGAGCGTAGGTCCTCCACAGCTCTAAGCAAGAGTGGGAAGGCACATGGAGGAGGGTGGACCAGGAGGAAC
AGCTGCTGGGTGTAGAGCAGGGCTAGGGGCCAAGGTGACCTGGGAGTTTCCCAGGAATAACAGATAAAAG
GGTTGGGCCCATGAGGGTCTGAGGAGAGAGAAAGAAGGGTGGCTCAGGAGATCAGAGAGGCAGCGGGTAG
AGTATACAGTAATAGGCTGGAGTAAGGTGATCTTGAGTGAGTTCAGCCATTGCTGTTAGGTCTCGCAGAC
ATGGCTGCCATCGCACACAGTAGGGTCCAGTTGTTTAGATAGCAGAGCAGTGGCTGGGGGGACTGGAGAG
ATGGCTCAGCGGTTAAGAGCACTGACTGCTCTTCCGAAGGTCCTGAGTTCAAATCCCAGCAACCACATGG
TGGCTCACAACTATCTGTGATGGGATTTGATGCCCTCTTCTGGTGTGTCCGAAGAGAGCTACAGTGTACT
CATATGTATTAAATAAATAAATCTTTAAAGAAGAAGAGGAGGAGGAGGAAGAGCAATCAATGGCTCAGTG
AGAGGGCCCAGTGGGTTGGACTAGGGCCCCAGCCCCTCGTCAGTAAAGAGGTGATAGGACTGAGTAGAGT
CTGAAAAGGCCAAGACTGAGGCTGCTAAAAAGGCATCTCAGAGAGTAGGGAAAATGATGGTGAGCTATAG
CTGAGTGGGTGAGGGGCCCACTGGGGGCCCCCTTGACTGCCTGGTATAGTGGCTTAGCCATATTAGCTAA
ATATGGGAATCCAGGGTCTAAAGAATCCAACCAAGTCCAAAAATGAAAGAATATGATCTGCCATAGTTTG
GGGCTATAGATCTCTCAGAACCCGCGCTTGTTGAGGGTCTTAGAGCCTCGGCTAAGTTGAACACCAAGTA
TATATTACAGTGGGAGAGCATAGTTGAGCTTTAGATGGGGAGACTTGATCCCGGGTAGACAAGGTAGTTT
AGAAACAAGAAGTTGGCCGTCTGGGACAAAGACAGGGAGGGGCTACAAAGTAATAGGTCATCTACATACT
GAAGACGTGTATTTAGCATTAAGGTCTAAGGAGAGAGCCAGGCAGTGGTGGCACACACCTTTAATCCCAG
CACCTGGTAGGCACTGGAGGGCTTACGGAGAGGGAGAATGGAAGAGTTGCAAGTCCTATAGGGATCAGAA
GTCCCTGACACGCGAGGTGAGTATTGATGGACTTGAGACAGTGACGATGGGGCTCAGAAGTGGGGAGCTG
GGGTCTGAAAGGGGAAAGAAGAGGGGTAAAACTAGGACCGGCTGGTGGGGCGGAGCGATTACCAGGGTGG
AGATATACCATACTTGGGGGTCAACAGGGTCTGGTAGAGTACATCCAGGGTAGTCTGGCGTAGGGATCTG
TGAGGCAACCAAAGGAAGAAGAAGATGAGAGTGGGGAGAGGTTGTGGGGATTCAGAGAAGTGGCTGAGGA
TATTGTGGTCAAGTAAAGGCACAGGGCAGACAGGCATGACTAGGAAAGAATGTGTAAAAAATGGTCAGCC
AAGGATATAGGAAAGTGGCATAGTCGGCATGAAAGGAGGGGATCCCATCCATCCTCATAGCAGAAACTGA
TGAAGGAACAGCGGGATCCGAGTGGGAGGTCAAGACAGAGAAGGTAGCCCCATGTCCACCCGGAAGGTCA
TGGCACATTACCCTAGGATCTGCAAGAGTGACAGGAGCCCTCGAGTCTGGGTGCCATCAATCCTGTGCCA
GGCCGAGGAGCCCTAAGGCAGGAAGAGTTTGTGCTACCTGCACTGATGGCTCTGGACCTTCGTGACCTGG
CCCAGAGGACAAGCCCACACTGGGGCATTCTGACTTCCAGTGGTAGGGCAGTGAGCAGACAGCATGGGTT
GCTGAGGGCTGGGGCAGTTGTGGGATCAGTGGCTTTGCTGGCCGCATTTGAAACAGGCCCTTGTTGGAGT
TGACATTGACGGGATGGGGTCTGCGGGATTGCCAGTGGCCTCAGGTCAGTTGCCAAGTCTTAGGCTTGGA
GTGCAACCTTTTGCTGTAGCTGAGCCTGTCGGGAAGACTCAGTTGCCTCCCCTTGGGCATCGAATACCTT
AAAAGCCATCTTTACCAATTCCTGTACGGGGGTTTGGGAACTATCTTCAGTCTCTCCCCGCCCCCTCCGA
ATATCTGAAGATGACTGGGAAATAAAATGGGTAGCCAGGACTGTAGCCCCTGCCGGGGAGGCCTGGTCAA
GGCAGATGTGTAGACCATGGTTTGTTGTAACCAGTTTTTTAATGGCCAGGATTTCATTAGCTTCCTGTGT
AATTTTGCAGAGATTGCCAAAAGTCAACAATCTTATTTGAGACCATTTCCATTCCCTGAAGGAGACAATG
GACCGTACTCTAATCGGTGGTCAATGTGACCTGGCTAATAATTCCACTTAGGCTCTGTGGTCAGCACCGT
TGTGTCACTCACAGGGACTGTATTGTCCACTAGGTGGCCCTGGTCTGCATACTGTCTGCCTGCAGCCTGA
ACCTGTCCATGTTCCTCAGGAGTGAGGGTAGAGCCTGAATGACATAAAGATCGTGGAGTTAGGTCATAGT
CCTGACAAAGGAAGCAGAACTCTTTAATATAGGCAGATGGGATGGCAGAGAAGGGGCCTCTCCACTTTTC
AGTCTGGGAGAAGTCTTGAAGGGAGAAAGGAACATGAACTCCCACAGCTGTTTCTGCTCCGGCCACCTCC
TGGGAGGGCAGAAGAGCTTTGGAGTATTGAGACTGCATAGGAGAGGCTACAGGGGAGGGTTCAGGGGAAG
TGAGCCAGGGAGTGCATGGGGATCAGGGTGTGGGTTGACCCCTAGGTGGAGCCTGTGTTGGTAATGAAGG
AGGAGGGACAATGGGAGGAGAGAGGAGGGGAGGGACAAGGGGGACAAGAGTTAGGGGGAGGAAGTTAATT
GTCCTTGGCTTTTGTCTCAGAGGGAGGGGAAGAAAAAGGGGTGGGTACCAGGGAGAAGGCTAGCCAATAG
GCGGGTTATCAATGGTGTAGGAAGGAGGAAGGAAGGAGGAAGGAGCAGGTATAGGGAGGAAGGTTGGCCA
ATAGACTCAAGCTTATGGTGCTATAGGAGTGGGAGTAGTAGACAGGGCTGGGGAAGGGGTTGGTGTGCCC
ATGATTCAAGTGGTCCCGCCAGGGTAAAGGGTGTCTTGTAGTCCAAGTCCCCAGATGAATGTGTGTCTGG
AGGTGTCACAGCCTTGGCCAACAAGACTTGAGCCATTGAACACTGACTACAGAAGGGCGGAAGTGCAGTT
CCCAAAACATTTGTACATAGGGGAGCTCAGGCCATCTGTCCATATGCCAGCAGAAAATTTCAAGATCATG
AAGGATGTTAAGTCAGTAGTACCTCCTGGTGGCCATTTGGACTCACTGTCCAAGGCGTATTGTGGCCAAG
CCACAGAATGAAGAGGAACTTAGGGTCCAAGACAGCCCCAACTTGGATAAATTGCATAACCGCCACCACA
TGGGCTACTGAAGATTGGGTTTAAACTTGGCGTTGTCTTCTCCCGGACTTGCCAATGATGCAGCGACCCA
TATGATAGACTGGGATCGAAGAGTGTGGGGTGGAGAAACCTTGGAAAGGACGTCTCTGAATCCAAGGCCT
CCCTAGAACAAAACGAATCCAAAGCCTGCCTGGAACAAAGACTGAGTCTTTGCTCTGAATGGACAGGCTT
GTCCTGGCTCGGCCGAGACTTGTCAGGGGATCCCTAGCTTGGTCCTGAACCTGGAAGAGGCACCCGGTAC
CTGTTAGGCTGTGGCTGGGAAGTGGCTCTCATTGAGTAGAGAGAGGGAGAGAAGTGGTCCCCACATGGCC
TGAGGCCTGACCCACTGGACTGGGGGCCCAGCTTCTCCCAATTCTTCAGAATCATAATAGGTTTCTCCAC
CAACGAAATGAACCAATTCAAGCCAACTCAAAAGTATAAAGGCGGGCTTATTAAGAGGCAGCTCTCCAAT
CTCATAGGTGGAGGTCAGTGAAGACACACATCAGTCAGGGCTAAAGCAAGGGGAGTTTAGGGGCACAGGG
AGATGATGTGTGAGCTAAGAGCTGGGATTATGCCTGTATAAGGTAAAGCATATTAGCCCAGAATTTTCTT
CTTGCAGGTAGGGTTGGAGGGAAAAGAGCAAACAGGGTTTCTTAGCTTATGCAAGGGATAACCAGGGGCT
CTAACCAAATAGTAACCATGTGTCCCAAGGAGAGAGTGTTAGGATTAGGCATTGGGGGTACCTTGGTGGG
TCTGGGCCAAGGTGTGCTGCTAAGAGATCACTCTACATAGCAGACCTCACACACAAGAGGTTTATGGGAG
AGGGGAGGTAAAAGGCCATCTTGGAGTTGAGATATAAGAAACAGACAGAGAGACTGGGAAACAGAATTAA
CAAGACACACAGAGAGAGGAAGATCAGGGATGGCTTGAGACTTAAAGGGTGTGTGTGTGTCACATAGGGG
AAATAAGCAGCCATAGGACGGTAGAAATGCACCACACCTGGCCACAGCGGGCAATGACATAAGCTACTAG
CTCTGAGTTGCTGAAGGACAAGCTGGTGGGGCTCCTGATTTATAGTATTCCTCCTTCTTGTTTATTATAA
AAGGCAAGAAAAGAGGAAGGGGTCGTGGTAAGGTGGCAATGGGGGTGCCTATGCTTTTTAGACTGCTCCC
TGCTATCTCAGAGCATGGATATCTTTGGGGACCCAAGAAAACTGGGGTGCTGGCCAACTCCTGAGAGTGC
TGGCCATTTCCCTAGCTGTGTAGGCTCTGTGGGACCATCTGGGGCTAGCAAAGTGCAGGCCTAGTTGAAG
CAGTCTGTGAGGCTGGACCACCTGGGGCCAGCCACTTTCAAGCTATCCTAGATGCTGACTTTGAGTTAAC
ATGGGGACCTGGCAGGATGCTGGGACAGATACATGCAGGAGAAAATCTTTTCTTAGGTGTACATTTGAAA
CTTTTAGACCCAGGGTCCTGGTAGTTGGGAGAGGGGAGTCCCCAAAACCAAGGAAAGGGGATCCCACCGT
CAGAAATAAGTGGACAGTAGGCAGGTAGGGGAACAGGCTGTTGACTGACAGTACTTATCTGGAGTCCATT
CACCAGGAGAGAAGGATTCATCCTATTCCCTGAAGCTTACGAGAACTTAAATTTACAAAAAGAAAGAAGT
TTTAGGCATGTTACCATTGCCACTGTTTGTAATCTACATTGAAATCCATATTGTAGAGAACAGACTCGCC
TTTCTGTCATAGTAGAAGCTCAGGATATGATTCTGGGAGGACAAGCTGGGGGAGGGCAGGGACCTTCTGT
GGAGCAGCAAGGCCAACACACACTTGATCTTGATATTCAGTACAAGTACAGACCATGAAAGAGGGGCTTC
CTCCCTCTGTCCGGAAGACTGGATGTATCTATCAGACAGACAGTTTTATCAGCGCAATAAAAAGCACCTG
TAAGTCTATACTTAGAAGACAGCCATAGGAAATCTAAAACCTTGAGCTTGTGACTGTTATAAAAGCAGTA
GTGCTTTTCCAGAGCTAGATTGATAGCTTATTAGAACTGCATTGACTCGGGTTAAAACTCTGGGTTTTTG
AAGTCTGAATACAACCATAGCACAGCAAAGGAAAGAAATCTGAAGCATTTTTTTTTAATATATACCTTGT
TACTTTCTTACGCCTTTACAAATTGCATTTACATGCCTTAGAAACACCTCCTCAGACCCTCAGACATTTG
CTTAGATCCTCAGAGCTTAAGCTTTAAACTTCACACCTTTTGTTCCTACCCAGCCGTCGACTGAGAACAG
TCCTCGGAAAGCAGAAATAGTGGAAAGTTACACTGGACTCTATCTTGTGAGTTTGACTCTTTTCTGAGTC
TGGTAACAAGGCACACTGGGTCTCAACCCAGTAGGAGCTCTAGGACAGTGAAGCCTGGGGCCTGATTTTT
ACACCTGAAGACAACTGAGCAGCGACTGAAGCCTTGGTTGCTGCTGTTAACAATTTACCAAGCTGTCACT
AGCCGAGTCCTTGGTGCCAGAGCTCTGAAAAGGATAGATTTCATTTGAGTTAAGTAGGAAGTAAGGCCAC
GTAGCTTCCGAATCAATTAAAAATGACAGAGACTTACCAGCTACCTGGACAGTCACCCTAGGGTGTCTCT
GTGGTCATTGGGGACAGAGGTCTCAGGGCTGTGTCAGACTTCACCTGCCAGGCTCAGAAGGTCCTGACAG
ATTGTCCTGTGGAGTAAGAACTTCGGGGGGCACTTGCCTACCTTGTCTAGGCAAAGGAAGGCAATCTGCT
CCCTAGTGTCTTACTTGTCCTCAGGTTGGACAGTAGCATCCTAGCAGCAGTAGAAGTGAGGGGCAGTTTT
GGGCCCAGTGTCCAGCCTTGCCACATTTAAAGCAAGCTCCAAGTGAAGGTTCTTCTGTGCCCATCATCTT
CTTTGAAGGAGCTTAGGGGTGCTGCCAGGAGCTGTCATAGCATGTCTCTCTAGCATGAAAACCTTTTTTA
AAATTATTATTAATTTACAATGCCATATTTTGCAGATCTCTGAAGCATTTGAGGACCATCTATTAGTATA
AATGATTTAGTGGTCAAAGGTTCTCCGAGAGGCATCGCAAAGGGGAGTGAGGAGGTAAATGACACAATTC
CCATGGTGACATAAAGGGGGAGGTCCAAGGCCTAAGGTATCCCAAGGACTTAGGCACAAGTTGAACAGTG
GGTCACCTCACACAGTTCTAGGACCAGGGCTAAAAGCCCAAGGAGGCACGGGATGCCTGGTACCAGGACT
TTCTAATGAAGCCAGAAGATGAAAACCATACTCAAAAACAAAGCGTCATCCAATGGGAGTGATCAGGGGT
GGGTTGCTCTGCCAGAGACTCTGCCAGTGGACAGGAGGTATAGCTCCCAGTTGAGTATATACTTGATGTG
TCTGAGGCCCTGGGTTCCAGCCTCAGTCCGAGTAAGTAAATAAACCAACTCCAGGTGGGAAGGTCACGTA
GCTGTGGGGTTCTCCCAGGCCCCTCAGCCTCCTGTAAGGATGATGGGTGAAGTCTGATGCTGAAGTTAGG
TGGCACGTCCACTGGACCTCAAGCAGTGCTAGGGACAGAGTTCACTGCGACCTGAAGAGGCTCCACAAAG
GAACCTGGCTTAGAATGAGGCCACTTAGAGGCAGAGATAGGGAGGGGGCCTGAATGGGGCAAGGCTGTGT
GCGGTACTTCTAGATGGAATCTGTTGAGGAAGGGGACAGTCTTGATTGCTGGGACCTCCATGTATGGTAG
GGGGGCAAGGATCATCAAACCAGAGCTGATTCATGGGAAAAGACTGGATGCTAGTATGAGAGATCTTGGA
TGCTGTGCCTCTGCTCCAGGCGATGGGTGTCACTGAGCCGGCTTAGGGATGCCATTCTGCTGAGCAAGGG
GTGAGGTGGCTCAGAGGGGCACCTGGGAAAGATGAGAAGACCCCAGTGAGGCCTGTGCTCGGGACCAGCA
GTGAAAGCCAGGACCTGGAGTGTCCTGGGATCAGTGGGGACCACCACAGAACCACAGTTAGCAGAGACTA
GCATCACGGTGGTCTAGGAAGCGTTTGTAGAGATGTAGGGAGCAGAGGAAAAGGACCATGGGATGGGAGA
GGGCAAAGCTGAGCTGAGGGGGAGGGGGAAGGAAGCAAGTTTACTTATGTGTACTCTCCAGTGGCATCAG
GCATGTGGGGGTAAGTACACACACACATACCAGCAAGGTAGCACTGTATGTTTTTCTGTAAGCACACATA
CAAGATAGAAGGTAGGGAGAAAAATCAAACTGAAAATATATACCGTGCTGTGTGATTGACAGAAAGCATA
AAATACTGGCTGCAAGCCAAGTAAAACAGCCAAGGCAAAGAGACAATGAAATTCAGGGTATGTTATGCCA
AAAGAACCTCATATGTTACCCCCAAAGACGGGACACAGAGACATCCTTAGAATGCTAGCAGCAAGCTCCA
TTGCCACCCCACCCCACTCAGCCCAGCCAAGGATCTGGGTGGGGCTGGAGAGCATCCAAGGGCTTGGTGC
ACAGTAGTGGTGAGATGTCCTGGCTGGAGGCAACGCTAAAGTCTTGTACAATCAGTTAGTCTGGGTTTGT
AGCCAGAGATGATGGGAAGGTACAGGCTGCCCTGCACTTTGCATCCGCTCCTCTGGTGTTCTTGGCAAGT
GTGATTCAGCCCCCAGCCCCCAGAATGCTGTAGAAAGGGGCTGTTTAGTCCGTGGATGCAGCTTCTCACT
GTAACGGCCTTGAGAAGTAAGGACCACCACCTCACATCCTCCTGTACTTTATGATATGGACACTCAATTC
TGATCCTGGCCAGGGGACTCTTCCCTCCCAGGCGCTTTGGGGGAGGGCCAGCCGTTAACCAGCTGGTTGC
TAACCATCTATTGCTAGATGCTGGAGTTGAAGCACAGTTTATCTGTCACCGGAGGAAGCTTCTAGCCAGA
CTCTGCCTGGCCTCTCTCTGTGTGGTGTTGATAGTGAGATCACAGCCCGGTTCACACTGGGTCGACAGTT
TTGAGGGGCGGGGTGCAGGCAGGTAGAGACAGGAGAGAAACGGGTGGGAAGCAGTTCCTTCCTACTCCAG
CCGAGCGAAGAGCTGAGGCTGTGGGTTTGCAGAGAGAGAGCATGGCGTCTTGGTGAGCGGCACTTCTTCC
TTAGCCCGCCTCCTACAGTGATTGACATCAAGCTGGACAAGCCTCAGGAGCCCCCGGCCAGCGAGGGCGG
CTGCTCCTGTTAATGCACCGCCCACTCGGCTTCCTCAGCGCCACTCACTTGTTTTGCCTCCTATAGCTTC
CTAACGGGGTGGGAACTGAGTTTATCAAGACTGGAGGATCTTTCTTTTCTCTCTCTCTCTCTCTCTAGGA
GTAGGGTGGGACATGGGGAGGGAGGCTGGGCATCAGGGACCACGTCACTCTTAACAGCTGTTACCTAAAC
AACTATTTTTTGGTTTGGTTGTAATATATTGTACTTTATTAAGATTGCCAAAAACTGTTAAAATTTAAAA
AAAAAATTTAAATCATGTGTATACAACTTTTTGCCAGATTAGAAAAGTAGTCATTTTTATTTGAAAGAAG
TGCTTTTTTGTTTGTTTGTTTTTGTATATTTGTAAACTTACAGAGAACCTCTCCACACACTTCTTCCTTC
CTGTTCTCTTGGAACTGTGTGTCACCTCTATTTTCCTCCTACCCCCGCCCCCCCCAGCCCAGAAAATTAA
AGCAATTAACTGAACAGTAGTAATTACATTCTAGTTCTGGGTCACATGGCCCAAACCAACCAAACCCGCA
CTCCACAGTCAAATCCAACTTTAATCTAACAAAACAGCCTCTGAGGGGGTATTGTCGAGTTCTTCCCTGG
CAGAGTGGGACACATTGGCAGGCCCCTGAGAGGAGATGAAGGCCCGTGGACTGTAGATTCAGCAGCAGCT
CCTTGGCTGCTTCCGCCTCTTCTCCTTCCCTGAAAAAAATAACCATAGAGCCAGAAAGCACAGGCAACAG
TGTGTTCTCTGGGCTGACCCGGTGACAGACAGCAAGAAGTTACTGGAAGGATGGGGTGCGCTTGGCAGCT
GAGGGCTGAGGCAGTGTGTAATCTACTGGCCCAACCATTGACACACATGGTTAGGCTGACTCGCCAACTC
AATGTGTGATGCTGGGTGGCTCAGGGACACTGAAGCCTAGGGCACCTGCCATCACTGCAACTACCATTGA
GGAAGTGAGAGGAGTCGGCCATGACTCCGGACACTCCATGTTGTCAGACCCTTGGATACTAATCTTGCCG
AACGTTGTTCTGGAAAAGCTGATTCCTTGATGTGTCCTCACCTCTGGCGTGGTACGTTTGAAATCTTTGT
ATGAATACCTTTGGGAGTGTTGGCAGCTGCACTGCACGCATCTTGGAGTCACTGTGGGGTTTCCAGAAGG
CTGCTGCCCCAGGGTACTGCAACTTGCCCCCCAGCAGGCTGTCCTTGCTATTTCCACTCATTCCCCAGAC
TGAAGACCTTCAGAGTCTCTTAGCAGAGTGCTCTTCTCAAAGCAGAATAGCTCTTATATTCTAAACGCTC
CCGGACTCACTGCCCCTGTCTGCCTTTGGGCAGGCCTGGGGCAGTGACTCTAATCAGAGCAGCCTAGCCC
CATAGCATTGGCTCTTCTTTCAGACTGCTGGTGGGCAGAGTGAATTGCCTCCACAAGGCAGAACTCCAAC
AAGGAGGTTGGGATGAATTATGGAATCTCTCAAAGAATGAGTTCAAAATGGCAGCCTGTGTGGCAGGGCT
GATTCTGTGAGTGGGCCCGTCATGCGACTCCATCCTGGGAGACTGTGTCAAAGCCGGTTCTGATGATGAA
GAGAGGAAGCAGGACCGCCCTGGGTACCTCCTCCAGAAGGCAAGGACCAATGTACGAGCATAATCGAAAC
GTCACGTGTTTAGTTTTTATATGTGTGTACATAATTATACATAGAGATAGACTTGTGTATACACCCTTCG
CGCGCACACATACACACACTCACATCCTCACATATACATGTGCTCAGTGTATATCCTCGTCTCTCCCGCT
CACAACTTGGAACTTACATTGTGATTCCGGTTTTTGGAAGTTCAAAAGTATGCAGTGTATTGAAATAAGA
AATAACTCAATATTGTCAAATAACTTGTGGTTGTCTTGCCTTCAATAAAATAGTGCATAGATGTGTTAAA
CTACAAGCAAAAGTAGTCCACAGAACTACCTTTACCACTGCTTTTTGTACCTGTGTGCACAGGTGTGCAT
GCCGTCGTGGGCCAGTGTCCCCCACTGTGGACACCCCACCCATGTGGTGCTTGTTGGAAGAAAGCATACT
TAGCCCGTGGTGACAGCAGCCTGGTTGGCAGTGAGGGGCTTTGCTGGTGGCCTCTGGCAGAGCCCCACTG
ACAGCACTCTCTACTGGCTTTCACTGAATGAATGTAGGGTGAATTTTAACCTTCTGGACACTGAATAACC
TTTCTTGTATTCCTGTAACTCGAATTAGAAAATCCGTTCACTTCTCTTGTGCACACAGTCTAAGACATCA
TGGCCTGCTACTAGAAACAGCAGGTACCATGGCAGATGCCATTTCTGGTCGATCTGGCCTAAGGAGCCCT
GCCTTCCTAGCTTGTACACAAAACCCCCTCCTTGAGTTTAGACTCTCCCAGCCCTGCGGCCCCTGAGAAT
TAGGGTTCTGCCCCATTGCTCCCCCACTCCAGAGGTGCCCTGGCCTTATTTCCTCAGCCAAGCTACCCAT
CTCCTTCCCAAAAGGCAATCAAGGCAGCCAGGCCCCAACAGAACTAACTGTAGTGGACCTGGGCTTTCCC
CCTGACCGCCACCACCATCCTACTTGTACGTAGGATCCAATCAGGTTCTCATAAAGACATCCTGAAATTA
TCTGTGCCCCCATCTTTGCTAAATTCAGATCAGTCAGAGGACAAAATGGAGGGTTCCTCTTAGGGCATGA
TCCCAATGTCGTAATTCAGTTCCTCTCTCTGGACACTGCCTGGCCTGGCAGATGGGCATGGCCCTCCTCC
TTTTCTTTAAGAGACTTGAAAGAGAGTTGTCAGCAAAACTGTGAGCAGTGCAGAGATTGTGAAAGGGCAG
GTAGTGTAAGTAGTATTGTTGTGGAGTCAGAGGTTAGAATGCTGGGTGGTTAGAGCCTTGCTGCTGCCAG
TCACTGCTCCCCGTTGCCATCTTTAAACATTTCGCAATATCTCAAGATCCAGGAAGGCATGGCCATGTCA
GTTCAATGTCTCAGGCAACAAAGACAAGGGTTGCAAGGTGGTAGCTAGGAATATAGACGCCTGGGCCTAG
TCTCTGTAACCCAGTGGCTAACCAGTGTCAGAGATCTAAGCAGGGCTGGCTTCAGCCTCCTGTAGGCAGG
GCAGTTTATCCCTTTTCCATATGGATGGGGGAGAGGCTGTCAGCAAAGTGGCTGAAGAGAGCTAAGTTAG
AGCTACCCAAGAGCCAGCCAGCAGGAGTCTGTGTCAAATGCTCAGGGCTCGATGCTCACTAGTTTCTAAA
CTACCTCTCCCCCAAGAATGGGAGGCACCATCACCTTGCCACAGCACTGGGAGCCAAACCCTTCCTGTTT
CACGGGTGGGAGAACCAGAACAGAAAAGGTCACCTGCAAGCCAGAGAGGATCAGAACTAGTGTTGGCATT
CTTGATCCGTTGCTGACCTTGCGGTGTCCAGACAGGACTGCTGTGCTAGCGTCCCTTAAGCCATCTCTAC
TCCATGGCTAGTACCTAAGGGTCTTCCCAGCCTGGCTAGCTAGAGAGAAGATAGGTGCATTTTGGGCTCT
CACTGTAAAGAAGAGTGGTCCCCAAATCTACTTGCATTGTCTTGTGTACACACACACACACACACACACA
CACACCCCAGTAGTCAGGGTACCCTTTTAATTTTTGTTTGAAATCAACTTCTTCACTGTTTGGAAATCTT
GCAGTTTCAATGTGCACACTCCTTGGACTCCAGACCCTGTCTGATTGATACTCTCTGCAGGGTATAATTA
TCAGGAAATCCACGCAGCGGGAGTTCAGATGGGCCCTTCAGGAGGCAGGAAGCCTCCATAGCAACGAAGG
CCAGCCTGCCATTGTGATGTGTTGACTTCTCACCTCACCTGTCCTTTAAAGTGAGGAGCAGAGGGCGGCA
TTTCTATCTGTACTGGGCTCAGAAGGCACAGTGGCCATATTGACTTTACATTCAACTGTGTAATATGTGG
AAAAGACTCAGCATGTTGGTCAAACAATAAACTGTCCTAATTCTCGA

[0132] An exemplary DNA sequence of the Rab6b gene in humans is provided below.

(SEQ ID NO: 25)
ACGCGCGCAGCCAGCCCTTCCCCCTCCGGCTCCCGCACCGCCGGCCGCCTCCCCTCGCCCTCCTACTCTC
CCCTCCCTGCTCCTTCGCTTTTTCCTCCTCCTCCTCTCCCGGCCCCGGCTGCCAGCACCATGTCCGCAGG
GGGAGATTTTGGGAATCCACTGAGAAAATTCAAGTTGGTGTTCTTGGGGGAGCAGAGCGTCGGGAAGACG
TCTCTGATTACGAGGTTCATGTACGACAGCTTCGACAACACATACCAGGCAACCATTGGGATTGACTTCT
TGTCAAAAACCATGTACTTGGAGGACCGCACGGTGCGACTGCAGCTCTGGGACACAGCTGGTCAGGAGAG
GTTCCGCAGCCTGATCCCCAGCTACATCCGGGACTCCACGGTGGCTGTGGTGGTGTACGACATCACAAAT
CTCAACTCCTTCCAACAGACCTCTAAGTGGATCGACGACGTCAGGACAGAGAGGGGCAGTGATGTTATCA
TCATGCTGGCGGGCAACAAGACGGACCTGGCTGATAAGAGGCAGATAACCATCGAGGAGGGGGAGCAGCG
CGCCAAAGAACTGAGCGTCATGTTCATTGAGACCAGTGCGAAGACTGGCTACAACGTGAAGCAGCTTTTT
CGACGTGTGGCGTCGGCTCTACCCGGAATGGAGAATGTCCAGGAGAAAAGCAAAGAAGGGATGATCGACA
TCAAGCTGGACAAACCCCAGGAGCCCCCGGCCAGCGAGGGCGGCTGCTCCTGCTAATGCAGAGCCGACCT
GTGGCTTCCCATGACACTCCTTGCTTGTTGTGTTGCTTCCTATTGGCTAGCTTCCTAAGGGGGGAGGGAA
CCGAGTTATCAAGATGGGAGGATTTTTCTTTTCTCTCTGTCTTTAGGTGTAGGGTGGGATGGGGAGGGAG
GCTGGACATCAGGGATCACATCACTCTTAACGGCTGTTACTTAAACAACTATTTTTTGGTTTGGTTGTAA
TATATTGTACTTTATTAAGATTGCCAAAAACTGTTAAAATTTAAAAAAAATTTAAATCATGTGTATACAA
TTTTTTGCCAGATAAAAATGTAGTCATTTTTATTTGAAAGATGTGCTTTTTGTTTTTGTATATTTGTAAA
CTTATAGAGAACCTTTTCCACACACCTCCTCCTTCCTGTTCTCTTTGAACCATTCATCACCTCTGCCTTC
CTCCTATCCCCAGCCCAATAAATTAAAACAATTAACTGAGCAAATTAATTAGGCTTCAGTCTGGGGCCAT
CTGGCCCCACTCTCTAGGCCCTACTCCAGTTAAATCAAACATTGGTTGAACACATCAGCCTCTGAAAAGG
TAGCTCTGACTCTTGTCTTTCCATGGCCAGAGTGGGTCGTCAACCTCGTGTGGAGCTGAGACCAAGGTCT
GTGGGCTCTAGGCAGCCCGGCAGCAGCCCCCAGAGGAACTGCTCCCACCTCTCCTTCTCTTTCCCTGAAA
AGCCTTGAAGGGGGTTGAGGGTACAGGCAACCTTGTGTTCTCTGTGCCCTCAGGGACTGGCAGAGCAAGA
GGCCATCAGAAGGACGAGGTGCTGTTGGCAATTGCAGCTGCGTGGTGCGTGGTTTATAGACTGGGGTGCC
ATGTGTACTTCTGAAAATATTTTAACCAGCCCACCCAGCAGTCAGTACACATGCCTGGGCCAAGTCTAAG
AAACTCAGTGTGTGATGTTGGGCAGTGTGCCATCCTGAAGCCTTCCTCCTGGATGTCAGGGAAGCTGGAC
CACCTGGAGTTGATCCTCTGTGATGGGGAGGCGGGGGGGGGGGGGGGTGTTGTCTGCAGAACCACCACCT
TGAAAGATCCATGTTCTTAGAGCCTCAGCTGCTAATATTGTTGAGTGCTTTCTGGAAAAGCTGATTTGTT
GCTATGTTTTCACCCCAGTGGCATGGCGCAGTTGAAGTCTTTGTGGACATATCTTTGTGGCTACTGTGGC
TGCGCTGTGGTCACCTGAGGATGTGGTTCAGGTGGGGTCTCCAGAAGGCTGCTTGCCCCCAGAGAGCCAT
CTCTTCCATTTTTGATTCATTCCTGAGAATGGCTTAGTCCTGAGAATCTGCAAAGTCTCTGAAGAGAACT
CTCTCTTCCCACTAAGTGAGTCTGGCCAAAATGTAAACCCCACCCTCCCTGCTGTCATTGGCTCTCCCTC
CAGGCTGCTGCTGGGCATGTCATAGATGGGATGAATGACCATCTGGGGTATGGTGGGCTGAACTCCACAA
GGTCGTTGGAATGAATTTTGAAACTTCTCAGAAATTAATCTGAAATGGCAGGCAGTAAGTGCAGCAGAAT
CTGGCAGGACTGATATTTGTGCAGTGGGCCTGCCACACACCCTCTGCCTAGGAGGCTGTGTGCCAGAGCT
CATCTCTAGCAAGGAATTTATCTTCAGGTGAAGAAGAGAGGAAGCAGGATCCCACTGAGCACCTCTTGCA
GAAGGCAAGGACCAATGTTTGAACGTGTTTCAGATGTCATGTGTTTAGTTTTTATATGTGTGTACATAAT
TATATATAGAGATAGACTTGTGTATACACCTTCCACAAACACATCCTCACGGAGATACATGTGCTCAATG
TATATTCTTGTTTCTCCTGCTCTCAAGTTGGAACTTGCATTGTGATAAGTTTTGGAAATTCAAAAGTACT
GCAACGTGTTGAAATAAGAAATACTTAATATTGTCAAATAACTTGTGATTGTCTTGCCATCAATAAAATA
ATGCATAGTTGTGTTAAACTACAGGCAAACATAGCCCACGGGAATATCTCCACCATTTCTCTATGTACTT
TATATGCACGGGTGTGCATGCCTGTGTGGGCCAGTGTCCCCCCACCATGGGCACACCCCCAAGTGGTGCT
TGTTGGAAGAGTGCTTACTTACCTCGAGAGAATTTACAGGAGTCCACATGACAGTGTCCTGCCTGGTTGG
CAGCGGGGGCCATCACCTGTGGCCTCTGAGACCGCCCCATTTACAGGAATCTGCACTGGGTCTCAGTGAA
TGAACGTATGGTAGATTTTTATTTTCTTGGCACTAAAGATTAGCTTTTTTAAAAAAACATCCCATAAAAC
AGTAGAAACTCAGTTCCCTTCTCAGGGGCACACACATCCAAGGCACCGTGGACTGTGTTTCCATCCTGGC
CTAGAGGAGCAGTAAAAGATAGCATTTGGTTTGACATGGCCTTAGTGAGTCCTGCCTTTCCTAGCATGCA
CACAACATCCTCTCTTTGAGTTTGGGTTCTCCCCAGCCCCTTGGCCTCTGAGGCTGAGGGTGGCTTCCTC
CCATCCTCCCATCTCAGTGGTTCCATGGCGCTCCCTTCGGCACGTGCGGTTTCCGCCCCTCCCTTCCTGG
GGTGTGGAAAGGCAGCCAGACCTCTTTTTCAGAAGTTGTTGGTTCCCTGATTTTTGTCTTGAGCAGGCAC
CATCCCTGTCCCCTTGCTTGCAGGTAGAATTGGCACAGAGTTAAGGTTCCATAATAAACTGTTAGGTGCT
CTTGAAGAAGATGTCATGGCATTGCCTCAGCACCCCAGCAAGAGCATTGCATCTTTGCTGAATCCAGATG
GGTTAGCAGAGGGCAAATTGGAGGATTCCTTTGAGGAAATGTTCTCAATTGAGCAATTCAGTCCCTCTCC
CCAAAGACTAGACGTGACCTGGCAGATTAGCAGGATCCTCTTGGCCTTCTTTTTTGGGGATGGTGGGAGT
GAAGGGGGTGAATCTTAAAAGCTTATCAACAAAGCTCCTGTTCTGCAGGCATCAGGAAAGTTGAGTGTAA
GATGGAAAAAGCAAACAGCCTATTTACAAGTGGAAACACATTGGTTCTGATCACTCCTAACTTGCTGGGT
GATCATACATACATCAACATGAAGGTGTGACATCAGAATCATGAGCACCATGGCTGCAGTTGTGTGATCC
AAGGCTAGTTGGCTTGGTAGCTGTTGGCAGCAGTTTCCCTTGGTCAGAGGCCTCCTTGCTATCTATCGCT
GCTCTCTTCTTGTCATCCTTAAACATTCAGTCATGTTCCCAGGTCTGAGGGGAGCAATGGCCAGACCAGT
TTCAGTATCTCTGGCAACAGAAACAAGGATTGAAATGGTGGTAGTTAAGAGTGCAGACACATCTGGGGTG
CAACGTCTGCATCATCCTGGTGGCTAGCCAGTGCGGGGAGGCCCTGCCCTGGGATACCAGTTGTGACAAT
AAAGGGATGGCCCTCCTGGCTTCAGCATCCTGCAGGTAGAGCAGCCTCATTCCTTCACAAGATGGAAGGC
AGGTGAGGATGTCAGGATGAGATGGGACCAGGTAGCCGAGGACAGTGAGGCATGTCTGAGCCACTTGAGG
GGCAGCTGAACAGAAGGATGTCTGTGTGCATCAACCGAGCAGATTGTGCGCACACTCGTTTCCGAACTGC
CTCTCCCCAAAGAATGTGAGGCATTGTCACCTTGTTACAGCTATGTGAAGCAGAGCTGTCACAACTTTTC
CTGTCTACAGGCAGGAAAACCAGGATGGAGAAGGGCAACTTGCTTATTAAGATCACCCAGCAAGTTAGGA
GTGATCAGAACCAGTGAAGTTTCCATTTTTCATCCATTGCTGCCCTGTGTGTGAACAAATGTGACTCCAT
ATTTATTACACAGCAAGGACTGCTGTGTGTGGGTGTGTTCCTCAGACCATCTCTACTCTTTTTGGTTAGG
ACACTAGGTTCTTCCCAGCATATGAGTGAGAATATTGGTGGTATTTTGGGCTCCTCTACTGCACAAGGGC
CAGTCCCCAAGTCTACTCTGATTGATTGTCATGGGCACCCACACAGATCAGGACACCCTTTGAATTTTTG
TTTGACATGAACTATTTAGGTGTTCCAAAACCTTGGGATCTCAATGTGCAAACTCCTTGGACTCCAGACC
CCTGTCTGGTTGGCACTCCCAGCAGTGTGTGGTTTCATCAGGAAATCCTTGCAGCAGGGGTTTAGATGGT
TCCTTCAGGAGGTGGGAAGCCTCCATAGCATTGAAGGCCAGCCTGCATCTCGCGGTGTGTGTCCACTTCT
CCCCTCACTTTCCCCTCACCCATCCCTTTAAAGTGATTGGCTGTGAGGAGCACAGAGGGTGGCAATTCCA
TCTGTTATGGGCTCAGAAGACATAGCCGCCATGTTGATTTCACATTAAACTGTGTAAAATGTGGAAAAGA
CTCAGCATGTTGGTCAAACAATAAACTGTCCTAATTCTCAAAAAAAAAAAAAAAAAAAAAAAAAAAAAAA
AAAAAAAAAAAAAAAAAAAAAAAAAAAAAAAAAAAAAAAAAAAAAAAAAAAAAAAAAAAAAAAAAAAAAA
AAAAAAAAAAAAAAAAAAAAAAAAAAAAAAAAAAAAAAAAAAAAAAAAAAAAAAAAAAAAAAAAAAAAAA
AAAAA

[0133] n-R5s89, or nuclear encoded rRNA 5S 89, is a ribosomal RNA found on chromosome 9 in Mus musculus strain C57BL/6J chromosome 9, GRCm38.p1 (NC_{—}000075.6 (GI:372099101), the sequence of which is incorporated herein by reference.

[0134] Gm7364 is a predicted gene in Mus musculus that is found on chromosome 9 in Mus musculus strain C57BL/6J chromosome 9, GRCm38.p1 (NC_{—}000075.6 (01:372099101), the sequence of which is incorporated herein by reference.

[0135] The 1 Mb region on the chromosome 9 between the position 102,450,352 and 103,338,569 as stated on mouse genome GRCm38.p1 is provided below (SEQ ID NO: 14).

[0136] Nucleic acids in BOLD and underlined denote the Marker used to delimit the chromosome region.

AAGAAGCAAACGGGAGTCCTTAAACTGAGGCTCATTAGACTTAAGTTCAGGAGGGTGTGTGTGTGTGTGTGTGTGTGTG
TGTGTGTGTGTGTACATATGTGTGTGCATGTGTAAGCATTGTGCCCATGCGTGCATGTGTATGCTTATGTAGACATGTA
TGTATTGTGTGTATGTATACATACGTATGAATTATAAAACAAAATAAATTACATAGCATAAACGTCAGAAAATGCATTT
CCAAAGCAGGTATCCAATAACTATGTGGTGTGATTAGCGTTCTAGGATATGCCTCTTTCCCCAGACCTTTAGCTTGATT
GCTTTTTTAAATTGTTGTGGATATATGTGTGGGAGGTGTGTGTGCAGGTGTGAATGCATGTTCACACCTGTGGGAGCAC
ACACAAATGTGCGTGTGAATGGAGGCCAGCAGCTGAGTGAGTGTCTTCCTCAATCTCTCCTCCCTCTATTTATTGAAGC
AGGGTCTCTCACTCACCAGAGATAGCCAGCTTGCCCAGGGGATCCAAAGATTTGGAATTACAGTCAGACCACCATACCC
ACTCAGGTTTGCTTTTTCTCTTAATGTAGGAATTTCTGCCATCACACCTTCATGCTAAATGAATCTACTGATTCATCTT
CTCAGCCCTCCTTCTTATGTATGACTCTATCGTATAACCTATACACAGTCCAACTACATTCATGTTTCAGTAAAGCACA
AAGCTTTAAACAATATGTTCTGTAGATACCATGTTTGACTTGCTATCGAAACAACTGGGAGTTTTATCATGAAATGTTG
AGACAAGTTCTTTGTCCCACGATGAACTTATCTCTACGCACGCACACACACACACACACTGTTCATTATATTAAATTAG
ATCCTATTCAGATCAGCATTAGCATCTCCCACTCTCCCAAGCGCTCTTTCGCCGTATGGAGGATTCTGTAAAAATTCTT
CTTTCTTCCTCACAGGAGAGTTCTTGAAACGGGAAGAACAGCTGCTGTGTTCACGGGTCCTCCTTTGCAGATGAAGGAG
CTCCCACTCTCCACGTTCCTCAGGGGAACTGTCCTCTGGACCCGCCAATCACGCTGGGTGTATGCCATTGCAGCTAAGC
CTCTTGAAGCTAGGCTGGTGTTTCGACAACGCATGTTGATGAGGTGAGTGGTGGCCTTGGCTTTTATTTCTAGAACTTG
ACTTCCAAACATCCATCTTAAGGAAATCATCACACAGTGGGCCAACGTACTAGAAAGCAAGTGGGTAAAGTATGTTACA
TGCGCATAAGATTTAGCATTGCACAGCTATTGTCTAGAGAACAATTGTTACCCATTTCCCATGTGCAACACTCTCATGT
ACACACTCACATGTATGCATATGCACAAGCATATGCTTTTATAAAAGAAAGAAACATATCATTAGTGGTATTATATGAT
AACTCTTTTATATTCTGTATGCATTTCTCAAATATTCTACACAGGATGTGGAGTACTCCTGATTCACACATACACACAC
ATACACACACACACACACACACACACACACACACACACAAATAAAAAAATAAGTTAAAAAAACAAAAACTGGTGTGGTG
CCGCATGCCAATAATCCCAGTACTCAGGAGGCAGAGGCAGGAGGATCAGGAGCTCATGGCTTGTCTCTGCTGCAGAGTC
TGAGGCCAACCTGAGACCAAGTTTCAAGTTTTCAAAGTCTTTTTTTGAATTTAAGGATATTTAAAATAAAATGAAACAG
AAACTATTTAAATAGAAGAAGGAGGAGGAGAAGGAGGAGGAGGAAAAGAAGGAGGAAGGAGGAGGAAGAGGAAAAAGAA
GCAGCAGTAGAGGCTAGGAACTGGACCCCCTAGTGCCTCCCATTGTCTGGAATAGCACAGGAAGCTGGTCTTGTCCCAG
AGCCTGGCTGGTGCTATAGTTTCCTACTACGGTGACTTTCAACCAGCAGCCCTGAGACACAGCACTGCAGGAGTTGCCC
GTCACCACCACTGTGTACTGATGGCACCATGACTGTGACTTCTTTTACCCCAGTCAGGAAAAGCACAAGCAACAGAAGG
TGCCCAAGACTGAGGAAACCTGAGTGAGTGAACAAGACACTGCCTGCAGCAGGGAGTCCCTATGTCCCCTTAGACACGG
GCTTTCCCAGTCATTACCATACATTAAGGATATCCAAGTGAACAAATCTCACCTATAACATGTGACCTCCTAGTCTCTA
AAACAGCCTGCACAGGTGTTGTCTTAGATCAGGTGTGTCCAACCTATTGACATTGCATCATGACTCATGGTTATAGCTT
TCCTAGGAGGTATGTAGCCTAGAAGCCACAAGTTAGACAAGGCTAACACAGGTAGAAAGCTCTGGATGCCTTGCTTAAG
AGGTGATCAAAAGACCAGGAGCACTGATTGGCCATATCTTACCCACTGTCGCTGAGCTTCAGTTTCCACCAGTAGAAGA
GAAAGACTCTACTAGATCCATATCTCTGGGTCACTGTTGGAACTACCAACAACTAGTGGTCATAAATGACATGTGACAT
GTCACAAGGAGACCTATACTGCCTGTCCTTTCCTGGAGCATTCAAATGGTTGTCCCTGCAACCTTCTTTGTTCCTCTGT
CTTCCAAGAAGTTTCGCATATGTGGATGACCTGTAGGCATAGAAGTGCTCATATTCTGGCCTTATGCCATTCTCTAAGA
CAGATCCAGAGCCCCTTCTTTCCCTCTGGCACTCCCTGGGACCCTTCTTGGACTCCCTGCTGTGCAATGCCTCCGCCCT
CCTTCTTCCCCAGTCAGTCATATGATGGGGCTAGCGCCAGCCAGGACCCACATCTGCCTGCCCACAAAGACCAGATGGG
CCACATGTTCTCTTGTGAGCCAAGTGTCTGGTCTGAGAAAGCCTGAAAGGTCATCACTGTGTATGGGCAGGTCCCCCCT
TCAGCAAAGTCATCCCTCAGTAAACGATGAGCCCTGCCACCTCTTGCTGGAACAGTCAGCACACTGTATGCTCAGCCTT
TCCAATCAGTTTTGTTTCCACTGTCTTTGGCTACTGTGTGTGTGTTGGGGGCGGGGGGGGGGAACGTTTAGTGTAAAAC
GAAATGGGATTTTCCCTTCGATATTCTTCTTGGATGACAGGTCTGTGATTGGAATCAGGGCATGAAAAATCATGCCCTG
GTGGCTGTTTCCATTAGTGGCTTTTTGACTCTTCAGGGACACCTGGAGCACAGCGCCCAGTGCCTTCTACCTCCCACCC
CTTACAGCTCAGGCAGGTCCCAGGAGGCTGACCCATAGCCTTTTGCTCTATCTGGGCCTGTGATATCTGGCTGGCATCT
TTGAAAGAGCCCACTGTGCCATTCTTCCATTTATCCTTGTCTTGTATGTCTCTGCTCTCATCCAAACTCCTTCCTCTCC
CTCAAATGTGCACATGAACACACAAGTACACATAAATGAATGTCCACTTGTGCATACACACCCACACAGCAGATTCTTG
ACTCTTTACAAGTAATGAACTTTGGAAAGTACTGCTTTATCATATATAAAAGAAAAAAGTTGTTTTCTTGCAAATGTTG
CAGGGCCCTGGAGGGGGGGGAAGGTAGGAGGGGGGAGGTTAGATGTTCAAGAGGAGAACAAAACAAAACCACACTCCAG
GAGCTCTTAAAAGAAGATTCTTTAAGAAAGAGCTGCAGAAGTAGCAGCCTCACAAGAGCTGACTCAAGACTGCCTGGGC
CTGGAAGACGGCCACACATCTCCACGGCCCTCGTCTGCAGCATCCATCCATGCACGGACAAGCACTCTGGGACTCTTGG
TGATGGTAGACAAAGAGAAGAAGCAAGTATGTGGGTAGAGCCCCTGCTCAGAGATTCTAGGGTGATGCTTCTGTACCTC
AGGCCAAGGTTCAGAGAATAACAGTGAGTTTACTGAGCAGGCTGTGGCCTCAGAGACCTTGCTCCTGTGGTCAGGATGT
TGTAAATAAGGAGATGCCTCCTTCCACACCCGCTCCCATCCCAACCATGGCAGCCACTTCTGTTCTTGTGTTCTTGGAG
GAGAAGAATTCACACCAGGCACAAGCAAAGCAAGCAAATGGTCAAGGTTTCTTTTAGCAGGTGAGACTGCAGAGGCAAA
GTACACCGCTATAGTGGAGGGCTGACCAACCCGACTCTTAGAGGACTCAGCCTACTGTTCAGTTCCCTTTGCCCACCCT
TGGGACCATCCCGTTCCAGGTAAGGGCAGAGAGTTTCTTGCAAGCCCTCTTGCACACAATTACCTACAGTTATTCTGCT
TCTACTAGATACAATAAGTGAACGTATTTGTATAAAATTGTAACTACCTATGGAGTTGACAAGTTTACGAAAGGGAAAG
AGTACTTTGTGCATGCTCTGCGCATGCTCCCCTGGCGCTTCCTGGGCGCCTATTCAGAGCCAGTGGAGACCTGTTTTAT
TGTTTTTCCCAGCTCCCTTTCTTCCTACTTAGTCATCTTGGCTATTGCATTCTAAGTTGAAAGCCCAGGTATTACCTTC
CTCAGTGTTTCCAACTTCGTTGTTTTACAATTAATATAGTTTAAAGCCTAATATTTGTTTTCATTGTAGCAAAGAGGAA
AGCAGACTAAGATCTGTAAGGGCAGGGCGCCTGCGCAGCAGTCCACAGTAGGTTTCTGAGCCAGCAGGCAGCATTTGGG
TGTATCGTGGTGTCCAGGGGTGACATCCTTGCCCATCTATGGAGCTGTGATCAGTGCAGTGAAGTCCCCACCATGAAAC
CTTGCAATGACAGAAAAGCCCTCTCAGAGACCCGGAGACTGGAAGACTTGATTTCTGCAGTGGTCCAAGAAGACAGTGG
GACCAGTAGGCAAGGCTAGCCTCTAAGTGAAGACAGCTGCCTGTGTGCCAATGGATATCTGTGTGCCAATGGATATGGC
AACACTCGTGCCAGACACCCTTGCCCTCTACCCTAGAGCCTGAGCATGCTAACTAACACTCTAGCCCTGAGGTGTGACT
ACAGGCACACCCGCAGTGAGTGGCAATCAATGGGGGCCACTTCCGACATGATGCTAAGAGAGAGAGGGTTCTGATCTCA
CCACCAGACCCCTTGAAGTCAGTCCAAGTGTCTGGGCAAGAAAATGAAACATCCCAGAAAGCGAGTGGAAGGCAGCTTT
CCCTGCAGGCCTCTTGTGCTGTTTCTCTGAGTTCTTCCGTGATGACAGTTCTAAGAGTGTGGGCAGAACTGGGCAGTCA
CTTAATCCAGCCTGTGGTGAAAGAATCATTCCGCTGCAGAGGTTCCTGCCTCCTGGGAATGTATGAGTCCTTAGCACAG
CCAGACAACAGCCATAAATGAAGCCATGTTTGTTTACAGCCTGTCATCTTCTCTACATAAACTTTCTATGCACTAAAGA
AACAACATCTTCCATTGATCACGAATGAAGTTTGCCAAAAGAAATCTGGGAAGCAGCACGCGATGGAGATTTTAAAATC
TATTTCCATCCGTTAACTGACAGAAGAAATCTAGAAAGAATTAATTCACCAAAGGCTTTTTGGACAGCCCTGCTAAGCC
AGTGGGGGAGCCCGTGCCCTTCTGGTCCTCAGCCTTGTTTATTTCCCTCCAGGCCCAGCCCTGGTCTTCGTGTCTATAA
TATGACTCTGAAAATCCATTTAGCCCAGGTGAACTCCAGATAGCAAGACAAAACAGAGCAAAGGGCAAAAAACACCTGT
GTTCTGTGGAACCATTCTGGTTTGTTTGTTGTGGTCCTGGGGACTGAACCTGGGGCAGCATGCATGGTCTGCAGCAAGT
GCTTGACTACTGAGCTAAACCATTATTCCTATGCACTGTTATTTTATTTTTCAAGTGTGCGCGCGTGTGTGTGTGTGTG
TGCGTGCGTGTATGTGTGCAAGTGTGTGTGTGTGTTGTTATGATGGTTAGTTTTAACTGCCAACTTGACATGAGCAAGA
ATCGTGTGAGAATAGGATCTTAATGAAGCACAGTCTAGGTCTTATACTGGCCTGTGGGTGTGTCTTGGTTGTACATTGG
TGTGGGAAGACCCGCCGTGAATGTGCGTGGCACCATTTCAAGGGCTGGGCCCTGGACTCTATGAAGGGCAATGAAAGCT
GAAAGCCTTTACACAGGCAGCAGGGGAGCACTAGTCTTTCTCACAGCTCCAGACTGTGGGTGTGGCAAGTTCCTACCTT
AACCTGCCTTAATAACGGACTGTAGCCCAGGGTTGTAACTCACATATACCCTCCTGCCCTCTGGTGCTTTTTAGAGAAA
ATATTTAATCGCAGCAATAGAATGCAATTAAAACAATTAGGGTATTCCTGTATAGGGTATATGCATTCGTGTGTGTGTG
TGTGTGTGTGTGTGTGTGTGTGTGCACTCTCTTGCACACTCAGAGGCCAGAGAAGGATGTGGGATATCTTGCTCTATCA
CCTTATACCTTGTTTCTTTGGCACTAGAGCTTCACTGACCCTTGAGTTAATCTGGTGGTGGTGCCCAGCAAGCTTCAGT
GACCCTCCTGACTATGTCCTCCACAGAACTGAAGTTCAAACACACACAGCTTTTAACATGGGTGCTGGAAGTAGAGTTC
TGAGTCCTCTTTCTTATACAACAAACACTTACCCACTGAGCCTCCTCTCTAGCCTCCTTTCTATCCTTTTATAAATGAG
TGGTCCTTAAAATCCTAACTCAACAAATTTCTCGAACATCTTAGTGCTCAAAACTATGTCACATGACCATCTAATCCAT
ACAAGGCCTGGAGATATTGTTTTTCCTGGTCACTTTTGGCACAGCAAAATGAGATTTCTGTGACTTTGGGTGAGGAGAA
AGGACACAGTGGGCAGCTGGCTGTCTCTACCAGGTGTCTCCATAACAGCCCTTTGTTTGTCGGAGGGTCTGGGAAATGG
ATCAACAGGAAAAGAGAATGGGGACCAGAGGTATAGAAGAGACGGGAGAGATTAGTGTCCGGATGCCCAGCTCAGCTGA
GAGCAGGCATGCCTCTTGTGATGACCAGCAGTCAGTTTGCTGAGGATGCAGGGCTTTCAGTGCTAAAACTCAGGCAGGA
GATGCGCTGTGGCTCAGTGGAAGCCTGGTGTGTGTGAGGCTCAAGGTTCAGACCTCAGTACTTCAAGAAAACCAAGGCA
GTTCCAAGCAAACCTGGGAGGTAGTCTACTCTAAATGTTTACAGGCCAGCATGAGGCAGTATTAAGCAAGCTGCCCTTG
ACCAGTGCTCCCCAAAGCCCTCCACAGGTCCCCAAAGCCCTCCATTCTAGAGGCTGTAAGGTCAGAAGAACTTTCCAAT
GACCTGATTTATTCATGCAATTCACACTTCTCTTGCACTGTTACACAAAGGAGTTCCCCAGAGATTCTATGGCCTGGAA
GCAGTCAGCAGACAGGGTCCACAGGTGGAAACGGGATCCAGCTGCCTTCAGCTCCTCAGGGAAAAGGAAGGGAAAGGTA
TAACCTAAAGAAAGCCTGGAGTCGCAGACACTTGTGAGCCATCATATACAGGTTCTGGGAATCAAACCCTGGTCCCCTG
GAAGCCCAAGCACTGTTCTAATCCAATGAGCCATTTCTCCAGTCCCTTTACATTGAATGTTTTAAAGCCCTTTGATGTT
ATCAACAAATTGTAAATGTTTAAAAGGAAGCTGAGAACAGAGATCCACTGTCCTAAACTAGAATAGGGATGGGGGGGGG
GGGCAGTTAAAGTATAGAATGTTCTGGAAATTAAAGGATAGAACTAAAACCAAGAATAATACACAGATCCAGGCATCAG
GAAGTACTTCCAGGACCCTCGACAGTAGTGCATGTGTGTTGGTGCAGCAGCGGGGTAGGGAGGTGGTTGTGGGAGCATG
GATATACCTCTGTGTGGAGCTGTGAGTTTTCTGTGTGTGTCAATGGCTTATTGCTGTACAACTTAAAGTGTGGTTCAAA
AACCAGCTCCCAAGGGAACTCTTCAACATCAGTTACGGTAGACGTGAGTACAGAAATGGGGGCAACTTGGAATACCCAA
GATTCAATTCACAGACCATTTGAAAAAATAGGAGAAGCTTTAGAAACTCCTACGGTAGCTCCACAAAGCAACTTGACAT
TCGTCAAGCTGAAATCAAGAATCTGGGCTTATATATCGTTTATATTTGCTGAACTTTTTTTCCCTAGAAATTTCTCTTC
ACAAAAGTATCCCATGATGCTTTGAGAAGTTGAAAAAATATGGTCATGTCATACTTGAGATGAACTATACAGGATAAGT
ACTAACTATTCAAAGAGGAGGGATATAGAGTGATATGATGGAAAATGTGTGCTTTGGGGAAGACTCTGCACGGTCTGTG
ACACACTCCTCCTTATCACCTGATCCTAGCCTTCTCCCTCTGTGGGGACGTCCAGCTCCCCCTCCATCCGTTCCCTACA
TCAAGATTCCTGGTCTTGAGATATATATATATGTGTGTGTGTGTGTGTGTGTGTGTGTGTGAGAGAGAGAGAGAGAGAG
AGAGAGAGAGAGAGAGAGGGATTTGAATTCTCTTCAGACCCAATAACAAAATCTTACAAATTTCTCCAACCATGTATTT
TACTTAAAATCATTAATTTGCATTCATTAAAAACAAAACATTATTTTCCCTTATTGAAAAATTGTTACCCAGTTTATGA
AACGCTCCTTTTGGATCCCACCATTGATGTAACTCAGTTGCTCTCTGGAATTCTTCTCTCTCTCTCTCTCTCTCTCTCT
CTCTCTCTCTCTCTCTCTCTCACTTGCTCACTCGCTCTCTCTCTCTCTCTCTCTCTCTCTCTCTCACTTGCTCACTCGC
TCTCTCTCTCTCTCTCTCTCTCTCTCTCTCTCTCAACATCTATTCACTCCACTCCATACATTTTTTTCTTCTATCTTAG
CTTCTCTTGCATGCTATATTGGCATGAATTAAAAGAAAGAAGTCATAATAAGCCAAAGGAAAGATACTTGAGGTTGGTA
GGAGGAAGAAAGAGGGCTAGGGAGTGATACAAAGAAAAAAAGAGAGAAGAGGGATGGGTGTTGAATACAAGGGAACCAA
GGGATCATTCCATGACGTCTCTCATACATGAACTACAGATACTTGTGGTCCAAGATTTCATAGCTATTTATTGTTGTAG
GTGTTCAAGACAGGCTAATTGTACTGGGCTTAGAGTACTAACAGCCAACAGCTAAAGTTACTGTCCTGAGCTGTGGTTG
TCAGGATCCTCAGCTCTTCAAGTCTTGGCAGCTCTCTCAAGTTCTTCTTGTGTTCAGAGCTTTTCAGTCCTTGTAGTTT
GGGCTCCCACCCTCAGCTCTTGACAGCCACTCATCTTCCCCAATCCCAGTTTCTCTGCCATCCTTCATAGTCTTAACAC
CTCAGATTCTGCCCTGGGTTGCTCTCTGGAACTCTTCGGCTACCTACTAATGTTACAGCTCAGAGCTTTGGGTATTAGG
GCCCTTTGCTTTAGTGGCTTTTTAGAACTCTTAGCTACCTCACCCCTACCACTGTCACTGCCAAACCTAAAGACTCAGG
GTCTTGTCTGCTTGGTGTAATAAGCCCAACCTTCTCTACTTGTGACAAAGTACATAGCCAGGCAAGAAAAAAAGCTTTT
ATTGGATCATATTGTCATAACACTGGAGCATAGTACCCAGGAAATATATCTTAAAAAAAAATAAAGTGACAAACAGCCA
CCTCATATAGCCATAAGGGGGATGAGGTATGCTTGTAGCTAGATTATAATTCCACCAGTCTTAGCCTTTTATATGCATG
GCTCCCAAGTTCACCAATTATAAGCTTTATTTACCTAAAGAACAATTACAAGCCAAGGACCAATTGCAGGCTTTTTAGC
TGCAAGGGAAGCAGTGTCATCTTGAGTCCACAGATATGTCTTGTCCAAAGTGGAGTCTTCCAAAGCAAATGCAAGCTGC
ATGGGACTGTCATGACTGGAAAAAAGGCCTCCTAAAGTATAGGAGTCATAGCTTTAACAACAGCTATAGTTCCAGTAGT
CTACAATTGGAGTGCAGCTTCCTCAGATTAAATATGAAGTGTTCAGAGTGCCAAAAGAGGTTTGCTTGTCTGACAGATC
CCCATTGAAGGTTGTTAGACACAAGTTAAAGGTTTATCAGCTATCATTCAAGAAGCTTAACAGGTAGTCCTAACAGCTT
AGCTTATTTGGGGGATGGACATTAAAGATGCTTACAATAAAGACCTATCACAGAATTCTCAACAGAACCTAGCAGTGCT
TAATATCTAGTCATCTAGCCGTGGGCCCTTAAGAAGAATTGGATTCACTTTTATCTATCTCATTAAGGACACGTGAAGT
TGGGATGTCTAAGGCTCTGCCAATGTTATTCCTCTTACTCTCAATATCTACAACACCTTTCCCACAGCTGGTCTGGGTC
CATTGCCTTATCAATACAGGCTCTCTTTACTATCAGCCCACTTCTAAAACCTCTTCAGCTCTTCTATAGTCTCCTTAGT
TTTTGTATATTCCAGTAACTTACATAGATCTGTATATAGAGATATATTTAATGCATGATGTGAGAGTTAATAATTAACA
TTCAAAAAGAAGAGTCTACATTGCCTCAACCAGATTACCAAGGTACCCAGCAATGTGCTGCTACTGAAAATACAGCACC
TTATAGATTTATTATTATTCAATAAATTATGACTGTGGGAAGACACAAATATATTTACCTGCATTTCTGGCAGTGTATT
CTCTATGGTACTCAGTTGCTACAAACTCATTCTCAAACCCAGAGAAACTGACATACACACGCATGCAGCACCATGCTCT
TTCAGAAACAGAGTGTGACACAATAAATGCATACAGAAGTCAGTTCACTTCTTGGCTTGCTGTAGTCTGAGCTGAGTTT
AAATTAGAGTGAGTTCACATGTTTTCCAGGGGGTCACCTAAAGTGGCTTTGAGAATTTAAGTGAATAAAGAGGCACATT
TACAGGGTACCAGCAAGCATGTTCCCCTTTGCCTTTTGAGAATTTATCCAGGCTGCATATTTTTCTGGGCCACTAAACT
TGTGCAACAGAAGTACAAAGAGCTGTGTGGCCTAGAGTAAACCATTTAACCTCTCTGATCTAAAATCTGAGAGGAGCCC
CTCATCCCGAAATTAGTTAGAGCCTTTTGCCAGCAGAGAAGGAAGAATCCCACACAACAAATAACGGGGCCTTTCTCCA
CAGCTGCTCACCAGCAATATTCTAAGAATCTCACTAGAAAACCCAATTACAGGGATGGGCATGTATTAAACCCCTTGTG
CAACCCTATACCAAATGATAGAGCACTTCTGGACAGATAATTTTACTCATTAAAGGAGAAAGAAAGGATTTGGGGAGTT
ACTTAGCAACTTTTTTAGCTGTAACGTGTGAGCTATCAAAAAGCATGTATGGCTAATGCTAAGCTGTTGTGACTTCCTC
ATGAGGAGTCGGTGCCCAGGCCTTATCTATCTCAGTTTCCACAACTCCCCTTGGGGAGGACACGCTCATATCCACCCTC
TGGGTTGTGCCTTCACCTCTTCCCAGCAGCTCTTTTTCTCTTAACCCTCATGATTACACTTATGCTAAAGTATCTTTAA
TGATGGGGTGGAGAGATGGCTCGTTGGTGAGCAACATCTGCAGTTTGCTGAAGACCCAGGTTCGGTTCTCAGCATCCAT
TTGGTGCCACACAGCCGTCTGCAACTCCAGTCCCCAGGAATAATCATATGCTTCCTCTGGCTTCTGCATGACCCTGTCT
GCATGTGACACACATGCATGCAGGCAAAACATTCGTAGGCATAAATAAAAGAAGTGCCATCCTCAAAGGTAGATCTTTA
ATTAAATCCCCAACTCGTTCACTGTACCAGTTAGTTGTGAAATTCTTTTCGGTATCAAAGCCATAAACCTCAGCCTGGT
CTGAGTCAAGTTCCCTAAAAATATATGGGACCTTTTCAAGCTGCTGTGGGTGACAGTGTGGAACTATGTCTGGGTCCCC
TCTCTGCTGGCAACAGACTGTTACAAAGCTCGGGGGTGGGGGCGGCGCGGGGGAGAGGGGCGACACGATGACCCCTTTC
CCAACGTGTGTCATTACTGACATGTATCATTGCTCTTAAGTCTGCTGAAGAGACATTAGATGGCTTTCTCCCCTTCCAT
CACTGACTCCAGGGCGGGGGTGAGCGGGTGGTGGTGGGAAGGCTCTGCAGCATCATGGCTGAATGAATGGGTACGCACT
CAGAGCTGTGTTTAGCACAAACCATACCATGTTTGCAGCATGTGGTCAGGCAAATTAACCATTTTCTTTCACTAACATG
GTGTGTCTCTGGCATTGCTTCATTCCATAGGAGTATGGTAAGGCTCACATGAGACAGTGAGCAGAGAGTCATCCCTATC
CTGTACCTTTAAAACAAACCTTTAGTAATACCTGCAGTTACTTGTTCATAGCTGACGCCATTCGCTCAGGCCAGAGGCT
ATCCTCATGGCTACCGCAGAGTCGGCTAGGTGAAGCCTTGTGTGCGGTCTGGTGTGGGTATTGATGGAGTCAGGGTGAG
ATAAGGGAACCTTGAAGGCCCAGAACAGACCCGCATTCCCTGCCAGCTAGACGATCTTGGAAGATTAAGACCATGTCTG
CCAAGGACACTGCTGACCCCAGCCCGGGTCAGAAGCGCGTTCCCACTTTGGAGCTTTCCAGCCTGTCCCGGCACAGAAC
AACAGGTGTGTGTATGTGCTCAGTAACTTGAACCTATCTTTGGAGCCTTCTAAAATTGAGAGAGGACAGACAGCTCTTT
CTTCAGACAACCACAAGACCAATAAACAACTTTTCAGGGAGATCGGGGCCAACTCCAGACTCAGCAGGGATGGCTGTCC
TTTTAGGGACTCTTGAACCTGTATTTTCAGTAGAGCGCCATGGCAGCAGTACCACCGCCATTCCTGGCTGGCTGCTGAA
CCAGGTTCTTCTTTACTGCTCTTACAGACCCAGGAGCAGAGTGGTTGCTCAGAGCTCTAGCAGATGGGTCCTGGCAGGA
GCCTTAGCCCTACCACAGGCTTCTTGCTGACCTTGAAGAAGCTGGCTAACCTAGGGCTTTTGAGAAGTTTGTGGTAGAG
CTACAGTAACATTAGCAGCCCAGAACTTGGCACAGAGTGAGTCTCAGCGCATGACCGAGCACTGTCCCTCCACGACCCG
TGGGGACACTGAAGCCCACTCTGGCCAAAATCATGCTTTAATCTATCACACAATCCCCAGCACAAGCCTGGCCTGTTGT
CCTGCCTTTCTGTGGAAGCCCTAGGGTGGTGATTCTAAACCTTGCTAATGCTGTGCCCCTTTAATACAGTTCCTCATGT
TGTGGTGACCCCCAACCATCAAATGATTTCCTTGCTACTTCATAACTGTTATTTTATTACTGCTGTGAATTGTAATGTA
AATAGCTGATAGTTAGGGTATCTGATTTGTGACACCTGTGGGGTCACAAGTCACAGGTTGAGATCCTCCATCCTAAAGT
GAGACACTTGTGTCCCTCTCTCTGCTCACCAGCCGTGCTAAACAATGTACCTCAAAGAATGGAAATCTCCGGGGTTGTG
GGCGGGGCTGTGGGTGGGGCGGGGGTTTGGGGAATCTTGCCATTTCCCTCCTAGGAAGAGATTGCCCATTACTCTGGAA
ACTTCTTTCATGATTAAATTAACATATGATATTGCACATGCCAGCAAGAGTTTGCTGAAGGGACCCTGATATAGCTGTC
TCGTATGAGGCTATGCCGGTGCCTGGCAAACACAGAAGTGGATGCTCACAGTCATCCATAGGATCGAACACAGGGCCCC
CAATGGAGGAGCTAGAGAAAACACCCAAGGAGCTGAAGGAGTCTGCAACCCTATAGGTGGAACAACAATATGAACTAAC
CAGTACCCCCGGAGCTCTTGTCTCTGGCTGCATATGTAGCAGAAGATGGCCTAGTCGGCCATCATTGGGAAGAGAGGCC
CCTTGGTCTTGCAAACTTTATATGCCGCAGAACAGGGGAACACCAGGGCCAAGAAGCAGGAGTGGGTGGGTAGGGGAGC
AGGGCAGGGGGAGGGTATAGGGAACTTTCAAGATAGCATTTAAAATGTAAATAAAGAAAATATCTAATAAAAAATTTTA
AAATAATAATATCAAAAATTAGCATATGCACATTCCCTGGCTTTTGTTTTGTCTACTCTACAATATTATAACACTGCTA
CCAAAAAAAAAAAAAAAAAAGAAAAAGAAAGAAAGAAAGAAAGCCAAAAGAAAGCTAGATATCATAGTGCCCAGATTGG
CCAACCTGTAACTAAATCCATTTTCCGTTACTGACTTCTGTTCTCTAATATTTATGCTGCGGGTTTCTGAGCCTATGGG
CCCTATAACAGGAAAGTCTGGGGCAGAAACAAGAGAGTAACCCTCTGCTCCAATGATCTACCTAGGACATGGAAGGCAC
TGGCTAAGACAGGGCCACAGCACCCCTCAGCCAGGCTCTTCCCCGCAGCTCTACCAAACCAGAACGTTCTTTCCACGTA
GCCTAGGGTGACCTCAACTTTCTGACCCTCCATCCTATACCTCCACTGTGCTGAGATTACAGGAGCACACCACCAGACT
TGTTTTTCACAGTGCTGTGATCAAACCAGCAAGTATTTTACCAACTGAGCCGCATCCTCAGCCCAGGGACATTCTTCAG
AAAGGGCTAAAGAGCTAAAGACGACCCTCCAGAGATGCAGCCTCGTGTTATCTTACTCCAAGCACAGATCAGAATCAAT
ATTCAGAGTCAGAGACCACATGTCTGTGCCCAGACTTTGAGATAAAGGGTAAAGGTTAAAAATAGATGAGAATACACAC
ACACACACACACACACAAACACACACACACACACACACAGCTATGAAAAACACCCAACAGAGGCTGCTCAGCAGTGAAT
CACTCTCTAGAATCTTGTACACTACCATGTTGCTACCCACAGCTATATGTGTGTTCTGATGATCACAGTTCCCCAAACA
AAACCTTAATGATGTCACTCGTTACTTCTTCTTGGCATACTTTAAGTTGGTATAAACACATTTATAAATAAGCTGTTTG
GCATGAAGCTATGAATTTTCTCTACTCGGGAGATTTTATACGTAATGTTTATAGTATGATTTTGACTCACAAAGGTCTA
CTTAACCCACAAGATGTTGGTAAGTCTGTCTTTTAGGGAAAAACACTTACATTAGAACACATAAAACATATACAACCCA
ATTAAACATAGTCTAAGGTCTACCCAGCGTCTGATTCCCCTCCCCTTACTCAGATCATGTGGCCTCAGAGACCAGTCCT
AGACCCAGGGAAGGTCATGATTAGCAGGCCCATAGTGATTAGCCCGTCTATTGTCAGTGCCATGCTAAGGGATAATGTC
ACCTGGTGTTCCTCTGAACTCTTGAGGTCCCTGAACAGAGGAGACCTGAGGTGGTTCAGTTAGATCAAAGACCATCCCC
GAGCATCTGTGAGTGTACCAAAGGACTCTTTATTGTCTGGCTAAAAATTAACATGGATACATGCTGTCATTGTTGCTGC
CAGAGGCCATCTTGCGTGCTCAGCTGAGGTCTGCCTGAAGATAAGGTACTGCAAGTGATCAAAAAGGTGGGGAAACCAG
TCTTGGCTTCACTGAGCCACACCCAGCTTGTTCTGTGCCACCCACCCCCACCCCCATCCCCAACCCCGACTTCTTGTTT
TACAAATCGTATGTTAAATGTGAGGGAGTTTCCTAGCATTCTAAGAAGAAAGAATCCATTTTGCTGGCAGGACCTAAGC
CTGAAGATGAATGGAAGAGAAAGAACTCTTGAGATAACAGCCAAGCACTGGCGTGCATAATCCCAGCACTAAATTGAGG
GGAGGGGGGAATGGCTAAGTTGGTGGCCAGCGTGGACATGTGCAGTAGAAATCTATCTCAAAAACAGTTGACCAGGTAC
TAGAAGAAAGAAGCAGAGAAGGAGCCCATGCTTAAGCAGTAAGGACATTTCCCCTCGTGAATCCCAGAAACCATGACAA
GGAAAGTCGGATTTGAACACCAGAGAAAGAAGAGATGAGACAGTGTTCCTAACTCCTGAATCATATACTCAGCCCAGAG
CATCATGGTCCCCATTGTTCAAGAACAAAAGCAAAATGACAGGGCCGTGGACGACAGGGGAGAAGATGCCCCAGGGACT
ACCATGGTCCCAGAGAGCTCATGAGTCCCTGGAAGTATGTATTTTCTGGAGCTAAAGTCCTGGTAGGCAGCTTGCTTCC
TCTCCCAGGAACTTCCTTACAACCTCTGATAGACATGAAGATTTGCTGACTCTCCCCTCCAGCCAATAGATGTTCTTCA
CACTTCCCCCTAGACTCAGTGAACACAGATCTCCTTCCATAACAAAATCCAAATGAGAAAGGGAAATGCCAGACCCATC
TGTGATGGTGAAACCTCATAGCGCACATCTGTGGTCTGCCTGCCACAGCCTGCTCCTGCTCCTGCTCCTGCATCTGCTC
CTGCTCCTGCTCCTGCTCCTGCTCCTGCTCCTGCTCCTGCTCTTGCTCCTGCTCCTGCTGCTCCTCCTCCTGCTCCTGC
TCCTGCTCCTGCTCCTGCTCCTGCTCCTGCTCCTGCTCCTGCTCCTGCTCCTCCTCCTGCTCCTCCTCCTGCTCCTCCT
CCTGCTCCTGCTCCTGCTCCTGCTCCTGCTCCTGCTCCTGCTCCTGCTCCTTCTGTTAGCAGCACCCATCATGCCTGAG
ACAATGTGGACGACAAAGGATGAAACAGGACCCCCGATCCACAGATGAGCATGTGGCTCAGGTCTAACCAGTGTATCTC
CCTCATTGTTTCAGATATAGGCAGATGAACCCCAACCACTAGCAAAGAGGAGGAATTGATATTGAGAGGGAGACTGGAT
TCTTTATCTTTACCCAGGAAGACATGAGGTTTTGGGCAGTTGCTAGGACCAGGTTGGTAATCTATGAGAAATGAAAAGC
CTTTCTGGCAAGGAAGCTAAGTCAGAGAGATGCAGGCAGAGCGAGAGACAAACTGCATCCTGACTACATCATATGAGCC
CCTTGTCTGAAGCCAGCACCCTACATCTTACACTTAGATGAGTGTGTGTGTGTGTGTGTGTGTGTGTATCTGTCTGTCT
ATGTGTGTGTATCTGTCTGTCTGTGTGTGTGTGTGTCTGTCTGTGTGTCTGTAATTTTCACATGGTTGATATGGTTGGT
TTTTCTATCACTTGTAACTGATAGAGTCTGGGCTAATAACACTTCTCAACCTTAAAAAAGAATGGCATCCCCTCTCTTA
CAATTCTGGGTTTTATGTAAGAGACCTAGGTTGCTCCTAATGGGCATAACTGCCTGACCTTGAACAAGTCACAACCAAG
TGTTCTCAGCAGCAAATGAGGGTGTTCAATCTCCCAGGGTTTTTTTTCTCCTGTTCTGAAATTGTGTATAACTATGAAT
AGTCTCTTAGCAACCTTCACATTCACAGAATTAGATGCAAGATGACTTTCTTCAAGTATATGGATTTAAAAATATTAAA
ATATAATTTCAATACTTTAATTACATGCCAGATTTTATAGACTATTGAAGGCCTCTTTGCTTTAGCAAGGTACATAATA
ACACTACATTCATGACACACATGTGTCATCTCTAATTTCTTATTCTTTTAAAGATTTTGTTTTTATTTTTAATTATGGG
GAGGGTTGTGCACATGAGGTTGGTACCCATGGTGGCCAAGAGAGGGTATCAGATTCCCAGGAACTGGAGTTACAGGCAA
TTATGAACCACCTGATGTGGGTACTGGGAACTGAACTCATGTCTTCTGCAAGATGCACTCTTAAACAGTCAAGCATCTC
TCCTGGTCCTTTTCTCTCTCCAGCACCTGAGAACATCCACTACCCTTGCCACTTCTGATGAAGAACACCCAGTGTATCT
TTGCTAATCTATCTTATGGTTAACCTGTAAGCTTTTATATAACATAGGTTATATCAGTACACAGCTATGGTGTCCCAGA
TAGAAAGTTAACAAGTCAGAAGAGACAAACTTCAGGCTCAGCTCACCTGACTACATCTCTGGCTACTTCCTAGTCCAAA
ACTAACCTCTTCTTTTGAGAGGTTTTGCTGTCAGCCAAGAGGGCTGGGGTGTCCAGCTAATGTGACTTGCAGCTCTTAG
TGTGAATTTGCTCTTCCTGGCATCTAATTTGAACTCCTCTCAATACCACCGCAGGTTCATTTCTTGGTGCTCTGTTTTA
GTTGAAAAGCCCTCAGAGCGGATTCAGTGACTCAGAACTCAATTCTCTGGGGGCACTCGGAGGCGGCAGAGCTAGAGAA
TGGATTCTTCTGGCCTGCTGTTAAGTGAAACCAACTGATGCCTTGCCTGACCCATTTATCAGGTGTAATGGGCTGGAGC
ATGCTCTGAAGAACTCGCTCACGGAGGCTGAGCCACTTAAACCATGCTCTCAGAGCACAGGATGCTCTCTGGTTGAAGA
ACAGGAGCAAGAGGTCAGGTGAGCCTCTAAATTCCTTGAAGAGTGTGCCCATGGCAGTTGTGAGCTCTGGCATGGCACG
ACCATGCTCCTGGAAGATCTGCTCGTGCTGACTGGCTCTAGACACTTTTCTTATTTCAAGTCTTGGTTTCTTCTCATGT
ACGGTAGGGCCTCAAAATCTGGAGTAACTGATGTCATGTGTGTAATACATCTGCTACATAGTCAAATCATAACAGTTAA
ACCAATCAAGAGAAAGTGCTGTGCTGGCCAGAAACAACAACAGTCCCAGGTGCCTTACTGTCCTCACCCTACCAATAGG
ATGGGTAAACTCCAAGGAGTTATCACACTAGACTCTGCTGCCTCCCACGACAGCTTTGTCACAGTTCCATCTCCAGGGG
AACTCAGCAGTCTCTCCTTGATTATTTTACCCCATGTTGGGGCTCACTTACATTATTGGGGTCAGATTTATCAAGCTTG
TAAGAGAGAGCAACACATTTCCTTACTATTTTTTATGGGGTTCATGGATTCTCAGCTAAGGTAGGATATTAGTTAAGAT
GTCCTACCTTAGCTGACCTTCAGCATCTCCTGGCCAACCCATCGGGCCAGTGTTCCTGTGGCTCACATGGTCATGGATC
ACCTGAAGGCATGGGATATCAGTCCCTCACTTCACAGTTTACCAAGTGTCACGGAGCAAAGTGACAAGCTTTCTCTTCA
GCAAAAGTGGAAGCCAGTTCCGTCACCCCCACCCCCACCCCCACCCCCGCTGACTCCTTTTTATGGCTTCTCCCTCCAA
AGACAGGCTTTCTTGGCTCTCTCTCAAAATTGGTGACCCCTCACAGAACAGGAGGTCCTGAAGAGGGTCTACTCCCCGC
ATCTTGGGTCCTTTCCAGGCTTTGAGACATGTCCTGCTCCAGGCCCGCCCCTACATGTCCTGAGTGCCACCTGTCCCGT
GACTTCACTAACAAGTGCCACTGTCCTGTGTAAATCTCCTCTGGGCTCAACCTCCAGGGCAAGAGAGGAGAATTAGGAC
ACCAGAGTTGAAAGATGCTGGCTTCAGAAGAGAGCGCTAAGCAGACCTGAATAGCTGAGTGTTTCAAAGCACCCGTGGA
AGTCCGTGTAGAACTGCAACATCTCCTCCAACCACTGGCAGTTCCCGGCCCTCCTGGATTCCTTTGAGTAGTAGCTCTG
AATTCTGCATCCTACAAACGCACCTTCTGCATTTCAATGGGGAAAGATTGGGGACAGCTTTGGGCCTTCAAACCATATG
TTTGCCTCTCCAAATCATGAAGCCAGAGATTCCCCTTGGGTAATAATAGCAGTTTTGAGCTGGAAGACTTGAAGTCATG
TGATGTTCAGGAATGTAAGGTTTGGTAAAGTCCACTTCTTTTCCCAGACCCCATGTAGGGGTGAAAGCCAAGCTGACTT
ACCCACAAAGACTCAGAGAAACAGTCCTTGCCAGAAATGCTCAGACGGCCCACAGTTATTCCTCCTCCAAGAGTACACA
CAGGTCTACAGCTCAAAGAATAAATTCACTCTACCATGACACACCCATTCCTCAATGGCTGCTTCTTGCATGGACTTGA
CAATGTAAATGGCCCACTCTCATGACCTTACATTGACTTAATACTGTAAAGATTATTTCCAAATAAAGTCATATTCTGA
GACATTAGAGGCTTAGGAGTTCAAAATATGAACTTAAAGGCGGGGGCATTCCAGCCCCCAACAGTATGTATATTCATAA
AGAAGAAAAAGCAAAACTGTCTTGGTGAGATAGAACAGCAGTATGGCCTGTGAGCAATTTTTCTTAACTGTGTGGGAGC
AGCCTGTCACACCATGGTAAGGACAGCACTCCTGCTACAGGAGGCTTCTAAGCACAAGAATTCTTCTGTTCTCCACCCA
CCCCCTCTGCTGAAGGAGGTTCTGCTGGGGTCTGTCTGTGACCACATGGTGTTTAAACACATCAAGCCAATATAGGTAT
CCACAGACAAGCCTGGCTCCTAATGAGCTATGGGGTAACTTCCTGCTGTCAACATTCAGTTTTCTCATCTATAAAATGA
AGCTAGCCTGTTCCAAACACTTCTCAGAGAAGGGGAAATAGAATATAGGACAAGACAAGTCCCTTCCGCTCGACTCGAG
ACTCGAGCCCCGGGCTACCTTGCCAGCAGAGTCTTGCCCAACACCCGCAAGGGCCCACACGGGACTCCCCACGGGACCC
TAAGACCTCTGGTGAGTGGACCACAGTGCCTGCCCCAATCCAATCGCGCGGAACTTGAGACTGCGGTACATAGGGAAGC
AGGCTACCCGGGCCTGATCTGGGGCACAAGTCCCTTCCGCTCGACTCGTGACTCGAGCCCCGGGCTACCTTGCCAGCAG
AGTCTTGCCCAACACCCGCAAGGGTCCACACGGGACTCCCCACGGGACCCTAAGACCTCTGGTGAGTGGACCACAGTGC
CTGCCCCAATCCAATCGCGCGGAACTTGAGACTGCGGTACATAGGGAAGCAGGCTACCCGGGCCTGATCTGGGGCACAA
GTCCCTTCCGCTCGACTCGAGACTCGAGCCCCGGGCTACCTTGCCAGCAGAGTCTTGCCCAACACCCGCAAGGGCCCAC
ACGGGACTCCCCACGGGACCCTAAGACCTCTGGTGAGTGGAACACAGCGCCTACCCCAATCCAATCGCGTGGAACTTGA
GACTGCGGTACATAGGGAAGCAGGCTACCCGGGCTTGATCTGGGGCACAAACCCCTTCCACTCCACTCGAGCCCCGGCT
ACCTTGCCAGCTGAGTCGCCTGACACCCGCAAGGGCCCACACAGGATTCCACACGTGATCCTAAGACCTCTAGTGAGTG
GAACACAACTTCTGCCAGGAGTCTGGTTCGAACACCAGATATCTGGGTACCTGCCTTGCAAGAAGAGAGCTTGCCTGCA
GAGAATACTCTGCCCACTGAAACTAAGGAGAGTGCTACCCTCCAGGTCTGCTCATAGAGGCTAACAGAGTCACCTGAAG
AACAAGCTCTTAACAGTGACAACTAAAACAGCTAGCTTCAGAGATTACCAGATGGCGAAAGGCAAACGTAAGAATCCTA
CTAACAGAAATCAAGACCACTCACCATCATCAGAACGCAGCACTCCCACCCCACCTAGTCCTGGGCACCCCAACACAAC
CGAAAATCTAGACCCAGATTTAAAAACATTTCTCATGATGATGATAGAGGACATCAAGAAGGACTTTCATAAGTCACTT
AAAGATTTACAGGAGAGCACTGCTAAAGAGTTACAAGCTCTTAAAGAAAAGCAGGAAAACACAGCCAAACAGGTGATGG
AAATGAACAAAACCATACTAGAACTAAAAGGGGAAGTAGACACAATAAAGAAAACCCAAAGCGAGGCAACGCTGGAGAT
AGAAACCCTAGGAAAGAGATCTGGAACCATAGATGCGAGCATCAGCAACAGAATACAAGAAATGGAAGAGAGAATCTCA
GGTGCAGAAGATTCCATAGAGAACATCGACACAACAGTCAAAGAAAATACAAAATGCAAAAGGATCCTAACTCAAAACA
TCCAGGTAATCCAGGACACAATGAGAAGACCAAACCTACGGATAATAGGAATTGATGAGAATGAAGATTTTCAACTTAA
AGGGCCAGCTAATATCTTCAACAAAATAATAGAAGAAAACTTCCCAAACATAAAAAAAGAGATGCCCATGATCATACAA
GAAGCATACAGAACTCCAAATAGACTGGACCAGAAAAGAAATTCCTCCCGACACATAATAATCAGAACAACAAATGCAC
TAAATAAAGATAGAATATTAAAAGCAGTAAGGGAGAAAGGTCAAGTAACATATAAAGGAAGGCCTATCAGAATTACACC
AGACTTTTCACCAGAGACTATGAAAGCCAGAAGAGCCTGGACAGATGTTATACAGACACTAAGAGAACACAAATGCCAG
GCCAGGCTACTATACCCGGCCAAACTCTCAATTACCATAGATGGAGAAACCAAAGTATTCTACGACAAAACCAAGTTCA
CACAATATCTTTCCACGAATCCAGCCCTTCAAAGGATAATAACAGAAAAGAAGCAATACAAGGACGGAAATCACGCCCT
AGAACAACCAAGAAAGTAATCATTCAACAAACCAAAAAGAAGACAGCCACAAGAACAGAATGCCAACTCTAACAACAAA
AATAAAAGGGAGCAACAATTACTTTTCCTTAATATCTCTTAATATCAATGGACTCAATTCCCCAATAAAAAGACATAGA
CTAACAGACTGGCTACACAAACAGGACCCAACATTCTGCTGCTTACAGGAAACCCATCTCAGGGAAAAAGACAGACACT
ACCTCAGAGTGAAAGGCTGGAAAACAATTTTCCAAGCAAATGGACTGAAGAAACAAGCTGGAGTAGCCATTTTAATATC
GGATAAAATCGACTTCCAACCCAAAGTTATCAAAAAAAACAAGGAGGGACACTTCATACTCATCAAAGGTAAAATCCTC
CAAGAGGAACTCTCAATTCTGAATATCTACGCACCAAATGCCAGGGCAGCCACATTCATTAGAGACACTTTAGTAAAGC
TCAAAGCATACATTGCACCTCACACAATAATAGTGGGAGACTTCAACACACCACTTTCTTCAAAGGACAGATCATGGAA
ACAGAAACTAAACAGGGACACAGTGAAACTAACAGAAGTTATGAAACAAATGGACCTGACAGATATCTACAGAACATTT
TATCCTAAAACAAAAGGATATACCTTCTTCTCAGCACCTCACGGGACCTTCTCCAAAATTGACCATATAATTGGTCACA
AAACAGGCCTCAATAGATACAAAAATATTGAAATTGTCCCATGTATCCTATCAGACCACCATGGCCTAAGACTGATCTT
CAATAACAACATAAATAATGGAAAGCCAACATTCACGTGGAAACTGAATAACACTCTTCTCAATGATACCTTGGTCAAG
GAAGGAATAAAGAAAGAAATTAAAGACTTTTTAGAGGTTAATGAAAATGAAGCCACAACGTACCCAAACCTATGGGACA
CAATGAAAGCATTTCTAAGAGGGAAACTCATAGCGCTGAGTGCCTCCAAGAAGAAACGGGAGACAGCACATACTAGCAG
CTTGACAACACATCTAAAAGCCCTAGAAAAAAAGGAAGCAAATTCACCCAAGAGGAGTAGACGGCAGGAAATAATCAAA
CTCAGGGGTGAAATCAACCAAGTGGAAACAAGAAGAACTATTCAAAGAATTAACCAAACGAGGAGTTGGTTCTTTGAGA
AAATCAACAAGATAGATAAACCCTTAGCTAGACTCACTAAAGGGCACAGGGACAAAATCCTAATTAACAAAATCAGAAA
TGAAAAGGGAGACATAACAACAGATCCTGAAGAAATCCAAAACACCATCAGATCCTTCTACAAAAGGCTATACTCAACA
AAACTGGAAAACCTGGACGAAATGGACAAATTTCTGGACAGATACCAGGTACCAAAGTTGAATCAGGATCAAGTTGACC
ATCTAAACAGTCCCATATCACCTAAAGAAATAGAAGCAGTTATTAATAGTCTCCCAACCAAAAAAAGCCCAGGACCAGA
TGGGTTTAGTGCAGAGTTCTATCAGACCTTCAAAGAAGATCTAATTCCAATTCTGCACAAACTATTTCACAAAATAGAA
GTAGAAGGTACTCTACCCAACTCATTTTATGAAGCCACTATTACTCTGATACCTAAACCACAGAAAGATCCAACAAAGA
TAGAGAACTTCAGACCAATTTCTCTTATGAATATCGATGCAAAAATCCTCAATAAAATTCTCGCTAACCGAATCCAAGA
ACACATTAAAGCAATCATCCATCCTGACCAAGTAGGTTTTATTCCAGGGATGCAGGGATGGTTTAATATACGAAAATCC
ATCAATGTAATCCATTATATAAACAAACTCAAAGACAAAAACCACATGATCATCTCGTTAGATGCAGAAAAAGCATTTG
ACAAGATCCAACACCCATTCATGATAAAAGTTTTGGAAAGATCAGGAATTCAAGGCCCATACCTAAACATGATAAAAGC
AATCTACAGCAAACCAGTAGCCAACATCAAAGTAAATGGAGAGAAGCTGGAAGCAATCCCACTAAAATCAGGGACTAGA
CAAGGCTGCCCACTTTCTCCCTACCTTTTCAACATAGTACTTGAAGTATTAGCCAGAGCAATTCGACAACAAAAGGAGA
TCAAGGGGATACAAATTGGAAAAGAGGAAGTCAAAATATCACTTTTTGCAGATGATATGATAGTATATATAAGTGACCC
TAAAAATTCTACCAGAGAACTCCTAAACCTGATAAACAGCTTCGGTGAAGTAGCTGGATATAAAATAAACTCAAACAAG
TCAATGGCCTTTCTCTATACAAAGAATAAACAGGCTGAGAAAGAAATTAGGGAAACAACACCCTTCTCAATAGTCACAA
ATAATATAAAATATCTTGGCGTGACTCTAACTAAGGAGGTGAAAGATCTGTATGATAAAAACTTCAAATCTCTGAAGAA
AGAAATTAAAGAAGATCTCAGAAGATGGAAAGATCTCCCATGCTCATGGATTGGCAGGATCAACATTGTAAAAATGGCT
ATCTTGCCAAAAGCAATCTACAGATTCAATGCAATCCCCATCAAAATTCCAACTCAATTCTTCAACGAATTGGAAGGAG
CAATTTGCAAATTTGTCTGGAATAACAAAAAACCTAGGATAGCAAAAAGTCTTCTCAAGGATAAAAGAACTTCTGGCGG
AATCACCATGCCAGACCTAAAGCTTTACTACAGAGCAATTGTAATAAAAACTGCATGGTACTGGTATAGAGACAGACAA
GTAGACCAATGGAATAGAATTGAAGATCCAGAAATGAACCCACACACCTATGGTCACTTGATCTTCGACAAGGGAGCTA
AAACCATCCAGTGGAAGAAAGACAGCATTTTCAACAATTGATGCTGGCACAAATGGTTGTTATCGTGTAGAAGAATGCG
AATCGATCCATACTTATCTCCTTGTACTAAGGTCAAATCTAAGTGGATCAAGGAACTTCACATAAAACCAGAGACACTG
AAACTTATAGAGGAGAAAGTGGGGAAAAGCCTTGAAGATATGGGCACAGGGGAAAAATTCCTGAACAGAACAGCAATGG
CTTGTGCTGTAAGATCGAGAATCGACAAATGGGACCTAATGAAACTCCAAAGTTTCTGCAAGGCAAAAGACACCGTCAA
TAAGACAAAAAGACCACCAACAGATTGGGAAAGGATCTTTACCTATCCTAAATCAGATAGGGGACTAATATCCAACATA
TATAAAGAACTCAAGAAGGTGGACTTCAGAAAATCAAATAACCCCATTAAAAAATGGGGCTCAGAACTGAACAAAGAAT
TCTCACCTGAGGAATACCGAATGGCAGAGAAGCACTTGAAAAAATGTTCAACATCCTTAATCATCAGGGAAATGCAAAT
CAAAACAACCCTGAGATTCCACCTTACACCAGTCAGAATGGCTAAGATCAAAAATTCAGGTGACAGCAGATGCTGGCGA
GGATGTGGAGAAAGAGGAACACTCCTCCATTGTTGGTGGGAGTGCAGGCTTGTACAACCACTCTGGAAATCAGTCTGGC
GGTTCCTCAGAAAACTGGACATAGTACTACCGGAGGATCCAGCAATACCTCTCCTGGGCATATATCCAGAAGATGCCCC
AACAGGTAAGAAGGACACATGCTCCACTATGTTCATAGCAGCCTTATTTATAATATCCAGAAGCTGGAAAGAACCTAGA
TGCCCCTCAACAGAGGAATGGATACAGAAAATGTGGTACATCTACACAATGGAGTACTACTCAGCTATTAAAAAGAATG
AATTTATGAAATTCCTAGCCAAATGGATGGACCTGGAGGGCATCATCCTGAGTGAGGTAACACATTCACAAAGAAACTC
ACACAATATGTATTCACTGATAAGTGGATATTAGCCCCAAACCTAGGATACCCAAGATATAAGATATAATTTGCTAAAC
ACATGAAACTCAAGGAGAATGAAGACTGAAGTGTGGACACTATGCCCCTCCTTAGATTTGGGAACAAAACACCCATGGA
AGGAGTTACAGAGACGGAGTTTGGAGCTGAGATGAAAGGATGGACCATGTAGAGACTGCCATAGCCAGGGATCCACCCC
ATAATCAGCATCCAAACGCTGACACCATTGCATACACTAGCAAGATTTTATTGAAAGGACGCAGATGTAGCTGTCTCTT
GTGAGACTATGCCGGGGCCCAGCAAACACAGAAGTGGATGCTCACAGTCAGCTAATGGATGGATCATAGGGCTCCCAAT
GGAGGAGCTAGAGAAAGTAGCCAAGGAGCTAAAGGGATCTGCAACCCTATAGGTGGAACAACATTATGAGCTAACCAGT
ACCCCGGAGCTCTTGACTCTAGCTGCATATATATCAAAAGATGGCCTAGTCGGCCATCACTGGAAAGAGAGGCCCATAG
GACTTGCAAACTTTATATGCCCCAGTACAGGGGAATTCCAGGGCCAAAAAGGGGGAGTGGGTGGGCAGGGGAGTGGGGG
TGGGTGGATATGGGGGACTTTTGGTATAGCATTGGAAATGTAAATGAGTTAAATACCTAATAAAAAATGGAAAAAAAAA
AAGAATATAGGACAAATAAGTGGTACTGTGTGAGTACAGTAATTACACCAAATAAATGGAAGGTGGTAAAACGTCTCCT
TGTCCTTTCAACAACCATGCTCCCCATCTGCAGGCATGCAACGCATACAAATACAAGAACACATACACACACAGCATGC
ATATATATATATACATATATATATATATATATATATATATATATACCATATATATCATATATATACAAACATACACACA
TACAAACATGCATGCACACATAGACACAAACATGTATACATACATGCATGCATGTACACACACACACCATTTCCACAGG
CAGGTATATCAATGGTGGTATTTCACAGTAGCCCATTAGATGTGGGTAAATCACTCTGGTTGGCTAACTCTGTTTAGTT
GAGGTCTGAATAAGCTTTAAAGACAAGACTCTTAGTTCTGCTGAATGGCATTTGCTGAGAGCTCACTTGTGGCTGCCAG
GAAGCTCTGTGGGTGTTGCTCATGTTGAATACGTGCCAGCCCTGGGTGTGGCAGATCTACAGAAGCACACTGCAGTGTG
GTTGCTGTGCACTGGGCTTCTAGAGACAGGCTTGAATTCAGCTGCATAAACTTGGGCAAGTTGCTTAGACTTCTGCCTC
CGTGTCCTCACCTGTGAAATGGAGCCAGTGATAACGCTCACTTTCTAAATGCTGCTGTGAAGCTTAAGTGAGGTTAATC
TTTGAATGCCTGGCATGTAGCAAGCGACCTGGGGCTGCTAACCACTGTGGCTCACCCTGTTCATTCATGAGCAAGAACT
GATCCGCTGGTATGTGCCAAACTCTATGTCAGTCATACACACAGACTTGCCCTCCCTCCCAAGCATGCAGTAGAGGTGC
ACACCCAGCTTGCATAGTGCTTTAAGAAGAGTCACAAAAACCGTCCCAAAAGTCATGGAAAGCAAGTGACTAGCACATG
ACCTGACCTGGATGGAGACCAGACATAGAATTGGGTGTTTAGAAAAGCCCCCAAGACCTGGTACAGTCTTAAAGTAAGA
AGAGATGTGTTTGGGGGAGGAGATAGGAAAGATATGTGTGCCTACAGAGGCTCCATGGCAACCAACAAGCCACCCTGGC
TTAGAGGAACATGCGTGAGCAAGGGAAATGTGTCTGAGAAGCAGTTGGGAAAGAGGGCCTGGTGGTCCAGTGGTTTCTG
CTAAGGACTTCAGCTGGATCCCTTATTGGTGCAATCAGAGAGTGGCACACTCAAATCTGTGTTTCAAGCCCAAGAATGG
TTACAGGCGTGAAAGGGAGGGGGTAGGGAGGATACTGGAGATGCAGTTCTCGGCCATTGATGAGACTGGCACAGGTGGT
GATTGTGAAAAGAGATGCAGAGAGGGGATGCTGAAGAGGATTCATGGCATGGCTATATGGCAAGATAACAATTGAGGAG
AGAGAGGTGTTGCAAACATGAGTGACTGTGTCCTCGGGTGCTTTTAAAAGAAAGGGAGGGCAAAGAGATCAACCTAAAG
CCCCAGCCTTAGAAATCAGGCTACAGGCCCAGGGTGAGGAAGTAGGAGAGATCAGGAGCAGAGCCTGGGGCCAGAAGAC
AAGGGTCCAGGGGTAACTAGAAAAAACAAGGCCCACTGGGAAGCCGAGGGACACTCAGAGAACTCAGCCCCATGGAGTT
AGGATGTGACCACGTGGAGTCAAGGACTGACCCTCTCCTAGCTCAGAGGACCAGGAGCATGGAGCCCACGAACGCAATG
TAGATTTAGCCACCAGAGGGCGATAGAGGGCCCGGGGAGTGTGGGGCAAGGACAGTAGGGGAGGGTTAGAAAGTAGAGT
GATGAAATAGCGGGCAAAGGCAGGCATCCTTGGCCACTCTTTGGGAAACTGGAATAACAAGGGGAGCCAGTAGATAGGG
ATGGAAATGCAAGAGGAAATGGTGCTGCCCACGGGGGTAACAGAATGTCTGTTCCTCTCCCCCCTGATCTAAGCCGCTA
AGGTGTTGGATTGCTTAACTGAACCATTTTGGTTGTTGTGGTGATGGTTGTTTTTCTGCCTGTCTTTCCACAGAACCGG
GTATAGAGAGGTCCAGGAAGTGGCGGAAGAGACTCCATCTCGTTCCACAGGTCCTGTTCTGATGCCCCGCTGGGGACCT
CATTCTCAGAAAGCCTCAGCAGTGTTCGGTATATTTTTAAAGCCTTGTGTATTTATCAGCTTAATTACTGATTTTTATT
TCACAGTTAAAAATAATAAAAATGTGTTTCCCAAGGTCATGTATCCACGACTACTAATTCACTAATTTAAAATAATTTC
ATCATCTCTCCAAAAAAAAACCTGTGCATATAAAGTCACACCCTCATTTCTCTAGCCCCAGGCACTAATCTAACACTAT
CTCTTTGACTTGGCTCATCTTAAACATTTTCTACCAGTGGGATCGTGCGGTGTATTTTGTGGCTGGATTCTTTCCACTC
AAGACAGTGTTTGCAATGTTCATGCATCTTGCCGTACCGGGGCCCTGTTCCATGTTCTACCAGAGTAAGAATCCATTGT
ATGGTGATGCTCAGTTGTGTTTACTTCTAAATTTGCAGGCATCCCCCCAATGGCTCTGCCCTTTTCCATTTCCACCTCC
ATGTGTAGGCTTCCAGTTTCTTCACATCCTTGAGAGAGTTTGTTATTGCGTGCTTTAATTACACACAATTGCAGGTTGG
GCTTGCATTCCTCTAATGACCAATATTGCTGGGTGACTTTTAATGTACTATTTATTGGGCATTGATACCACTTTTGGAG
ACGTGAGTATTCAAATCCTTTGTCTATGGTTTATTTGGGCTGACCTTTAATTCTTGAGTTGTGTGAGTTCTTCATATAG
TCTACCCAGACTTTTTTTTTTGTGTGTGAAATTCTAAGTGTTTGATTTCCCTTGGTGAGTTGTCTTTTTCACTCTCTTG
ATGGTAACTTCAGCCGCACAGGTCTTTTTACCTTGAAAAAGCCCAGCTTCCACACTCTTTGTTGGTTATCTGGGAAAAA
ATAGCTCAGTCCAGGACCTGAAGATTATATCTGTGTTTTCTTCTAGAGATTTTGTGGTTTGGGTTCTCACATTGACGTC
TGTTATCCATTTTGAGTGAATGCTTCGTTTACACTGTGATACAAGAATTCAAATTTATTTTTTCCATGTGGGCCCAGTA
TCATTTTTAGAAAATAACCTCTTTGCCTACCTTATTGTCTTGATGCTTGTCAAAGGCTAAGTGACTACAGATGTATTAG
TTCCAGACACTCAGTTCCTCTCCACTGATCTCTGTGTCTATCTTTATCCCTGACCACACAGTATTGATAACCGCATGAA
TGCAGTGAGCTTTTAATTTGGAAAGTATGAGTTCTCCAACATGCTTGTTTTTTCAAACTTATTTAGGCTTCCTGGAATT
TTATATTACCATGCTAATTTTAGGCTTAGGTTATCAATTTCCACCCCCCCCAAAAAAAAACTACTGGAAATTTGATATG
AATTGTGTTAAATATGTAAAATGATTTGAGTATCTTAATATTAAATCCTCTATCCCACGGATCCAGGATGTCTTTCCAT
TTTAAGGCCTCTAATTTCTGCAATGTTTGTGGGTTTCATTGTTAAATTTACTCTTAATCATTTTGTTCATCTTGGTGCT
GTTATGGACAGGATCGTTTTCTGTATTTCATTCTTGGAACATTCACTGAAGGGCTACAGAAGTACAATTGGCATTTATG
TTTTGATCATTATTCTGTTGTCTTACTAACTCATCTATCAGATTAATATACTTTTCCGTGGCTTCCTTAGGACTTGACA
TACCTGAGATCCTGTCACCTTCGAATAGTTCTACTGGGGTTTTGTTTGTTTGTTTTTTCTGATCTGGATGCTTTTTATT
TCCTTTTCTTGGCCAATTTTCATGAAGACGACTTCCAGTACAGTGGTGATAAGTGAGGACAAATAGTCTTTTCTTGTTC
TAGACCAGTGGTTCTTAACCTATTGGCCCCAACCCCTTTGGGAGCAGAGGGACACTACTAGACCCATATAAGCCAAGGA
ACAGCAAAGTAGAGCTGCATTGTTCAAACACCCCTCGCTCCTAAGAGAATTCAGTGGGAAGGAAGCTGCTCCATTGTTC
AGGTAATGATCAGTGGGATACTTGGGCCAGAACACAGTATGAACTACAGCCACAGAGAGCATGAGCGGGTGAGAAGCCA
ACACAGGAAAGGATGCAGCAAGAGAAACACTGAGAGCCAGTACAGGTGGAGGAGGCCAGGGAAGGGTGATGTCATGACT
AACATCGAGGTCAATATGATAAGATTTAGAATCATACAGAAAACACACCTCTAGTCACGTCTGTGGGGGCATTTACAGA
GAGGTTTAACTGAGGAGAGATGATCTACGCTGAATATAGGCAGTGCCCTCCCACAGGCAGGGGTCTGTGACTGAACAAA
AAGGGTAAAGCCAGCTGAGCAGCAGTATTCGTCCCTCTGCTTCCTGACTGTCCTGTCGCCATGCCTCCCCCACCATGAT
GGACTGTACCCTCAAACTGTGAGCCACAGTCAACCTTTCCTTCCTGAATTACTTTCATCAGGTATTTGGTCACAGAGAC
ATGTAAAGTAACTAATCCAAGAAGGAAGAAAATTATCTTAGGCAGTGACTGGGATCTCCCAAAATAAGAATGATTCGAT
GGAGAGGGGTCTGGCAGTGTGGAAAGCCATATTTTACCAGATTTCTGATGGTCTGTCTTGCTGTCTTCATCAAAGGCAT
AATTCCCAAAGTTGGTACAGATCTAACTAGGAAGAAGGTGACATTATCACAACTTGGAATTTAGCAGCCACATCCCCCT
TGGCCTTAATTTCAAGTTGTATCTGTCATAGGATCTGAGCAACCAAAGGTTCTCTGTCACTCAGACGGAAAATGTTCAC
AGTCACAATTAGTCCGCCAGAGAAGGTTTGCCCTGCACCAGAGTTGTCCTAAGGTGTCCCTCAAAAGGGGAATGGGGCT
GGCACAGGTGGAACTCCTATCATACTTGATTTTAGAAGCAGGAAGAACTCAGAGGTGACACAGTAGACAGATAGTAGCA
ATTGAGTGGCAGTTAGGACACAACCTGACTCAAGTATGCAACAATTTAATCCCTCGTGTATACAGTAGCCGTAGGGCCT
TAAAGAGATAGGAAAATCATTTTCAAAAATGTCTTTTCTCTTTCCAATAAATTGCAATAAAGGTAGAAATTACAGCTGC
ACAAGGCTCTGAGAAGTGACAGTTGCATGCTCAGCCATGGACAAGACATTTATACCATCTCCTCCAAGCTCAGGAAATA
GAGCAGGGGTTAGGAAGTGGGGAGATTTTAAGAACTTGAAGGTAGGGGAAAGGACTGCAAGATGCCATGGTCTGGGCAG
TCCACAGCCTTCGTGATGAACTCTCAGCTGCTGCAGGTACCTGCTCTGGTCCTGCAAGGGAATGGGCCATTCACAACCA
GGCAAGGATGGAGGAGAGATGCTAAGGCCCTATCTCTCTCTTCTTGCTGAGCCATGTCCTATTGAGTGAGTCACAGAAA
GAGGAGGGAGTCTTTTCTTTCAGCTGTGTACCTCTGATGGTGACCCTATCAGCCTCCAATAGATAATCTAAATCTAACT
GTTACACAGAAGGCCTTGGTTAACTTAAAGAGATGGTGGCACAACAAAATTTAGTCACGAATCTGGGAAAGAGGCAGGT
AGGGAGAAGGGAAGGCTGGTAGAGGTGGGAGTGAAATGAATGAGTTGGTAGAGGAAGTAACAAGAATACAGTGTGTGAG
CGAGTGTGTACATGCCTGTGTGTGAGCATGTGCATGTGTGTGTGCGTGTGTGTGAGCATCTGTGAATGAGTGTGTACAT
GCCTATGCTTGTGTGTGTATGTGTGTGAGAGCATGTCTGTGTACACGCCTGTGTGTGTGCGCGTGTGTGTGTGTGTGTG
TGTGTGTGTACTTATCAAATAACTTGCTTAATATAAAACAAAATCACTTCAATGGGCATCTTACAGTGTTACCCACTTG
ACAAGCTATCTGTCCCTGGAGGCATGTCTGACCAACTGAAACAGGCCAGCACTCACCTGGGTGTGTCTGCAGTCACACT
CAACCTTTCTCAGAGACAATACCCCATTCTTCAGACTGCCACAGATGATAAAACAGCATAGGGGAACAGGGATCCCACA
TCCACAAGTACCAAGACAAAGGCTCTCAGCATGTGCAGGAGGCATCCACAGACTCACTGCACACAGGAGAGCCTTGCTC
GGTTTCCACCTGAACACTCTCATGGAAGTATGACTCTGAGTTCTGTCTTCCCTTTGCACTGCTGCTGGAAATATTAAAA
AATGAACCCACCAACTCTCCATGAGGCCTGACCACACTCCCATGCTCCTACTGGCCCACCAACTCTCTGGCCACGCCAG
GCCACAGGGCTACCGCCAGGCCATCTCTCCAGAGAGCCCCTCCCCAAGTTCCTCTCACTACCATGCAATGCCCCATGCA
CCCCACAGTCAGCCATCTCAACACCTAATTACTTGGTAGAATCAAGACTCTTAAAGCCGAACTAACCAATCAAATTTAT
ATATCAATAATATCACAATTTACAATATGCCGATACAATAATTTCAGAGCCAGTTGATAATGATAAAAGCTTTATCCCA
ATGATCTAAACTTGCGATGCCATAACTGCTTGTGGCTGGGAACGTCACACAGGTTGACGTCTGCAGCCGGCTTCCTTCC
TCTCCCCTCTCTGAGAGGCTCTCTCTCTCTCTCTCTCTCTCTCTCTCTCTCTCTCTCTCTCTAACTCTTAGCTCTGCCT
CCCCTTTTCTTGTCCAATCTCAGGCCTCCTCTGCAATTAATGTAATTGGACAGGGAAAATCCTCCGACATTACACACTT
ACTATTTTCACTATGAAATATTTCAAATACATCAAGAAGTGCATTTGATAATATGACAAACATCCATGTGCCCACTGGG
AGAGAGAACAAAGGGTAACTATATTTTTGGTTTTTGCTTCAGATCCTTTTTAGAAGAAAGTAAAATATTACAGATGTAT
TGATGATCATCTCTATGAACCTTTTTCTAATTCCTCCCCTCTCCTTCTCCCCAGAGGAAGAGCTACTCTGAATTATCAA
CATATTCTACTTATTTGATTAAGCTATTCTACAAATACCTGTAGATAGTGTGTAGTATTGTGTTACCTGTTTTAGAATA
TTTCCTAGGTATTATGACACATCCTTTTAACCCCATGTATGCACTTAGTTTTACATGTTTATAATTAAATGTTTATGTT
TTTATGTTCAGGTATATTACATACCATACCATAACATTTGACATATATATGTGTGTGTGCATGTGTGTGTGTTATGTAT
ATGCTTACATGTGGGAAGCCATTCCGGACTCCCTGGCCAGCCCGGACGGAAATCTGTGCCAGGCAGTAAACAAGCCCAT
ATTTGGTGGATGGCCCGCCCTTAATCCCTGATTGGCTGAGCAAGCCTGCCTGGTGAGGTGATGTGACCTGTGGTGATTG
GTTGAGGCATGGTTGTGGCTTGAGTGGAAAAAAAAAAAAAAAAACACTTGTACCCCGAGGCCGGGAGATTTGAAGAGAG
AAGCTGCCTGAGTAAACTGCTTTAAGAAGAACTGGTTGCGGTTTCCTTGCTGGTTGAGTTGGACGCAACAAGTGGTGCC
GAAACCCAGGAACCGACTCCCCCACCGAAGAGGTTCAGAACTTTCTGCAGTCAGGGTCTGTCGACAGGATGAGTACGGT
AGGTAAATAACTCACCATCCCGGGGTTGGGATTAGGCTCTTGGTACGAGACAATAAGGCTCTCCGGCTCTGGAGATGAG
AAAGTGAAAGTAAGAAAGACTAGGTAGGAAAATTTTGGTAAACAGTGATAGGAAAATTTTTGGTAAACAGTGGTAGGAA
AAGTTTTGATAAACAGCGGTAGGAAAATTTTAGTAAACAGCTATAAGGAAATTTTTGATAAGCAATGGTATTTAAAGAA
AGCACAGGCCTGTAAGGTTCCCGGGGGGGGGGAGGGGGGACAAAGCATTAAAGTTCTCAGTTAGAGACTATTAGGTTCC
CGGTAAGTGGGACGATTCAAGTTCTCGGTTAGAGACTATTAGATTCCCGGATTAGGGACTATTAAGGTTCTCAGATAGG
ATAGCACAACTTTTAATCATCCCTAGTCTTCATGGCTTATGCCCAGCCACATCACAAAAAAGGGGAGAAAAAGGATTTG
GTTCTTCAGGCACCCAACTTACCTGTCTGTCATTACAAATGGATCAGCGTCCAGTACTGGAGTTACAGGTGGATGGAAA
ATCCATCTTGGGGCTTTTAGATACAGGAGCTGATAGGTCCATAATTGCAAGGAAGGACTGGCCAAAAGGATGGCCGATT
CAGGAGTCAGAACAAATATTACAAAGCCTGGGCTATGCAAAGAGCCCAGACATAAGTGCCAGGATGCTCCCTTGGAAAG
ATAAGGAAGGGCATGATGGGATGTTTCAACCACTTGAGCTGCCCATTAACTTATGGGGTAGGGATTTGTTGAAAACAGT
GTCCTGTTTAGGAGCAAGGATCGCCCCTACGGCCATTTGGCCTCAAAAGATACAGTTGAGGGTTGATTCCTTGCATACT
TTAAACGATTTTCAGAAATTGTTAGGCGATATCAATTGGATTCGGCCCTATTTGAAGATCCCAAATGTTAAATTAAAAT
CTCTGTTTCAAATTTTAGAAGGAGACTCAGAGTTAAGTTCCAAAAGGGAATTAACACCTGAGGCTAGAAAGGCCCTTAC
CCTAGTGGAAGAAGAATTGATTAAAGCCCAGCTTCAGCGTTGTAGAGAAGGGTTACCCATCATTTTGATAATATTACCT
ACTGAGATGCAACCCACAGGATTATTGTGGCAAGAAGTCCCATTGTTATGGATCCATTCCAAAATATCTGCTGGGAGGA
CATTAGATCATTACCCTACAACAGTGGCTTCTTTAGCCTTGTTGGGAATTCAACATTGTTTACAATTTTTTGCTATAAA
ACCCAGCTCTATTGTAATCCCTTATGATGGGTATCAGCAAAAGGTCCTAACAGCAAATATTGATGAGTGGGCTATTTTA
GCCTGTATTAATGAGGGCCCATTTGATAATCATTATCCCAAACATCTGTTAATGACCTTTTTTAAGGAACATCCAGTCA
TTTTCCCTCAAGTGGTGAGGAAAACACCCATTAAGGATGTAGTTAATGTGTTTACTGATGGATCAAAAACCGGATGCGG
AGTATATGTGGTAGAGGGGAAAGATCCTGTGGTCAGGCAATATTATCCCTGTACTCCACAGATGGTGGAATTACAAATA
GTTATTGAGGTCATTAAGAATTGTGATTTTCCTTTTAATCTAATTTCAGATTCACAATATGTAGTTAATTTAGTTTTAT
CCCTAGAAGTGGCTGGACAAATAAAAGCTCATAGTACCATCTAAGCCTTGGCCTTACAATTACAGAAGTTGCTGTGGGA
AAGACACCAACCATTATATATTGAACATGTCTGTGCCCATAGTGGGCTTCCAGGACCCTTAAGTAGGGGAAATAATATT
GTGGATAATTGTACTCATATGGAGTTCATATTTTTAGCATCCCCTAGGGAGTTAGCCTCACAATTTCATTCTACCCAAG
TGGATCCTGGCTTGGCATCAGGAAAGAATGGGCTGGGATAGGTGCCCTCGCTGTGGCCCTTGTTTTGGCATGCATGTTG
TGTTGGTTGCGGAATGCCCAGGTCCGCACTGCCGCCATGGTGGTACAAGCTTTTGCCACAGTGGAAGCAGGGCAGTCAC
CTCAGATTTGGCTTGCTGCCATGAAGAATGAACAATGAAGCCATTGCTTAGTAGGGTTGTAAGGCTAAGCACTGCACAG
AGGTTAGTCTGGAAGCTGTTTGACAATGTCTGGGAGGTATGTCTGATTGCATGAGGGTTGAGTGTCCTAGTGTCCTTCC
CCCAATGGCACGAGAGCAGGTCAGGGTTGCTCTGGGTAAAAATCTGTGAACCTAAGAGTCAATCCTGTACATGGCCCCT
ATTTCTGCACACTGGGGATCAGACCTCTATCTTCACCCACAGAGCTTGCTTCAAAAGAATATAAAAGGGGAATTGTGGG
AAGCCATTCTGGACTCCCTGGCCAGCCCGGATGGAAATCTGTGCCAGGCAGTTGGTGGATGGCCTGCCTTTAATCCCTA
ATTGGCTGAGCAAGCCTGCCTGGTGAGGTGATGTGACCTGTGGTGATTGGTTGAGGTATGGTTGTGGCTTGAGTGGATA
AAAATGCTTGTACCCCGAGGCGCGGGGGATTTGAAGAGAGAAGCTGCCTGAGTAAACTGCTTTAAGAAGAACCGGTGGT
TGCGTTTTCCTTGCTGGTCGAGTTGGAGGCAACACTTACATTACATGTTTATGATTCAGTTTTCTATGTTTATGGCTTC
TGTAGATCTGAACCATCTGTGGTAATTCCTGTTAGTATTCTCATGTGAAAGGGCTCCATGGTCTATAGAATCATACCCT
GACATAGCTGTTGTCCTGGTTGGTTTTTTAACAACTTGTTACAGGTAGAGTTATCTGGAAAGAGGAACCTCATTAGCAA
AAAAAAAAAAGTCTCCATTAGATTACCTGTACGCAGTAAGTCCAGAAGGCATTTTCTTGAGTGTTGATTGATATGTGAG
GGCCAAGACCTCTGGAGGTGGTGTCACCCCTGGGCAGGTGGTCCCGGGGCATAAAAGAAAGCAGGCTGAGCAAACCAAT
ACACAGAACTTCTCTATGCTTCTGGTTCATTTCCTGCATCCAGGTTCCTACTTTGAGTCTCGGCTTCCTGCCATGACGG
ACTGAACAATGAGCCAAATAAACCCTTCCCTCCCAAGTTGGTTTTGCTCACTGTCTTAATACAGCAATGGAAAGAAAGC
TAAGACAGTTGTTTTCCTGTTTGTCATCTTATCAGCTCCAACCTGGTGAGTGACCTGAGCTGGTCATGGGGTACGCATA
GTTCAACTTTACTAAATAGTACCAAGTTACCTTCTAGATTGCTGGAAACATTCTTGGCTTAGTTACTTTTCTCATTGCT
TTGAGCATATACCTGAAAAACGCAACTTGTTGTTGTTGTTGTTGTTGTTGTTTTCGAGACAGGGTTTCTCTGTGTAGCC
CTGGCTGTCCTGGAACTCACTCAGTAGACCAGGTTGGCCTTGAACTCAGAAATCCGTCTGACTCTGCCTCCCAAGTGCT
GGGATTAAAGTTGTATGTCACCATGCCCAGCCTGACAAACGCAAGTTAAGGAAGGAAGGGTGGTCAGAGAGTATGGTTC
ATTTACTGCCTGGGTCTGCCAGCAGGAGCAGGAGGTGACTGCTCGCTTTGCTTCCAGAGTCAGGAAGCAGATAGAGTGA
ATGCTGGTGCTCAATTCACTTTCTTTACCCGGTTTGGGGCCAAAGCTATGGGGTGGGGTTCCTCCTCCATTACACCTCT
CTGGAGACACCCTCACAGGCACACCCAGGTTTCCTAGGTGATTGCAAACACTGAGGTTTCACCAACACAACCCTCTACT
CCCATCAGTCACATACAAGCAGTCTGTGCACCTGCAGCAAGCCGGACTTCACAGTCCTCAGGTGAGCTGTGGGAACTCA
CTTCCTTACAATAGCATGAGTTCCCGTTCCTGAGCCCAGTCTGTAAGGGGCATCCCTGCTCTCAGGAAGCCCCACCTTG
ATTTCCTCTGCTTCTCTGCACCCTGCTTTCTTCACACTGGGGGCTCAGCAGCTGTCATCTAAGGTTGCATTTTGGGAGA
AGCATGTACAGATTGAAAGCAAATAACCCCTAAAACAGTCTGTGCAAAGAAGTCAGAGGGCCAGGAAAATCTTACTTGA
TTGAGATTGTTGACTTAGTTCAGCTACTGTAAGTTACTGTAGACTGGGTAGTTTATAAACAATGGTGGTTGATTTCTTG
AAGTTCTGAAGGAAAGAAGTCCATAGTTTAACAGACTAGAAATTCAAGACCTATTCTAACTGAGCTCCTGTGAGAGCCT
CCTTCCAGACTGCAGGCTGCCAGCTTCTTGCTATGTTCCTATACTGCAGAAGCCGGGAGAGAGACCTCTGGGGTTTGTT
TTTATAAAAGAACTAAGAACATTCGTGACAAATTACCTCCTTAGGCATCCCCCACCCCATGCCTGTCACACACTAGGGC
TTTAACATGCGAGTGTTACAGGAACATGGCCATACTGTCTATAGCAATCATCTCATTAGTAGTAATTGAAAACCTTGTG
TTCAGAAATCATTTGTCAGAACCCAAGCCCAATCTTTTTTTAAACAAACATCGGTACTATTTTTAGCTTAGATTTTTCA
TTTGACTATCCAGGCAAGTCTATCCCCCCAGAAGCCATGGATCAATAACTAAGGAGTTTTACCATTACTGAAACTATCG
GCCTCATCAATAACTAACACAAACTGAGTCACAGTTCACCTGGCATTGCTTTGGCACCCGCCAACAGCCTAAGACAGCT
ACACCATAACAATGAAAGGCTAGCTGGCCTGGGAGCCTGCTGGTTATTACTGCACTGGCAGACATTGGGAGTGTGTGCC
CTCAAAGGTAGACTGTGAGGCCAGTCTCCCCATATGGTGTTTCACAGAACCTCAAAATCAGACCGATGAAGAAGGAAGG
TTTCTTCACCAAATCTGTGACTTGTGTTCCTCTACCTACACCACTCCTCGTCCCTTTATCTTCTTACTGCTTTGGTATG
TAGACATTTTTTGGGGGTGGGCATGTAGTATGTGAGAGGGGAAGATGTTAGAGATGGTGCAGAGGAACGGATGGTACAG
GTGATGAAGGATAGTGGTGGTGGTGGTGGTGGTGGTGGTGGTGGTGGTGGTGGTGGTGGTCGTGATGGTGGTGGTGGTA
GAGATAGTAGTGGAGAGGATTGTCCTGAATAATGTTAGGTCAACTTGACACGCACTAGAGTTATCTGAGAGGAGGGCAC
CTTAATGAGGTGCCTCCATAAGATCCAGCTATAAGGCATTTTCTTAATTAGTAACTGATGAGGGAAGGGCCCAGCCCAC
TGTGGGTGGTGCTATCCCTAGGCTGGTAGTCCTACATGCTATAAGCGGGCTAAGCAAGCCACGAGGAGCAAGCCAATAA
GCTGTACTCTCCATGGCCTCTACAGCAGGCCCTGCTTGAGTTCCGGTCCTGTCTTCCCTTGATGATGAACTGGGATGTA
GAAGCATGGGTTGACTCAATTCTTTCCTCCCCGAGTTGCTTTGGTCATGATATTTCATCATAGCAATAGAAACCCAAAC
TAAAACAATGCTCGTTGTGGGACCGTGAAAGGCAGACTGTTTTCTAGTTGAGCTAGGTTTAAACCCTGGAGTCCCAGCA
GATAACTCTGCAAGGGACAGAAGGAAGTTTGCCATGCTCGAGGCGCTAGCTCCGTAATTCTGTGGCCATCAGTCACATA
GGGCAACATCCCAAGCTCCTGGTATTCTGTCTGGACTCCACCCCCACAGTTACCTGGCAACAACCAGGTATGCTCCTCC
CCACAGTTACCCAGCAACAACCAGGTAGGCCTGGCCCACTATAAAAGGGGCTGTTTGCGCCCTCCTCGCTCTCTTATTC
TCTTGCTCTTGCTCCCTTGCTCCCTATCTGCCTTCCCTTCCCCTCTCTCTCCACGTGGCCATGGCCGGCCTCTACTGCT
CTACTCTCTCCCTTTCTCTGCCTTTCTACAATAAACGCCTTAAAACTATGAACTGCCTCTTCTCATCCAGATGCACCAT
GCTAGAGCAATGGAGCAGGTCTTCCTCTAAAGAGCTTTGTCTAATCTCTCGGAAGGTCTCCCTGCCTCCCAGACATGAA
CGCCACCAAACCAAGCGCAGACCCACACTCCATTCTCAGCACTCAGCAACATCTGCAGTGCCGTCCTCGGCCTCCATGC
AGAGACCTCAGACTGTGCTTCCCCACCCCTGGAGCTGGGTCCTGAGTCTTCTCACAGCCTGACACCTTTGCAGTCAAAC
TTCCCGTGTCCACCTCCACAAGCAGCCCTAGCCCTGTGGCAGGCCAGATGCAGGACACCATTTTAACCCACAGCTCATA
AGTTTTTGTGTGGAAACTACCACATATTAAAGAGCTGGATGTTAGTGCTGTGCCTCCTGTAATGCCTCTACTCAGGACC
TCAGGCTCACTGAAATGCAGTTTCTCCTCTCTCTCTCTCTCTCTCTCTCTCTCTCTCTCCCCTCCCTCCATTTCTCTCA
AAAAGTATTAGCATAGGAATTTGCCTCAGGCCCTAACAGGAAGGATGCCTACAATGTCTAACTGCCAGCAGCTCACAGA
ACACCTTTAGCTGGGATTTAATGGGAAGGTGACTGCCTGGGCTAGAAGCTGGATTTGGACTCTTAGCCTGGGATGTAAC
AGAGCCACTTAGAGAGGCAGAGATGGAGAAGAGAATAGAGAACGTAGGTTTTAGGGTCAGACAGACCTGAATTCTGCTG
TTTATTTTCTCTGAGACCTTGGCCATGTTACCTGTCATCTCTGGCCCTCACTGCTTCACCTCTGAGGTTGGCTCAATAA
TGATCCATGGTCTACTTAAGAGAATGAAACAAAGCAAGGCTCAGCAGAGTCCAGCAAACATGTGCTGTCGCTGACCTAC
CCCACTGCACATAGTACTGGGACTGAGTCAAGACCTCTAAGGTGATGCTGCCCACCTGCCTGTGCAAGGGCAGAGAGAG
CATCCCGCATCCCATCCCATTCTGGTGGTTGCAGACGAATGAAACAAATGATGGAGAAGCTGCCCACTCATTGAAGAAC
TCAATTCAGATCCCTCCTTGCTCTGGCTCCAGCCCAACCCTCACCTACTCAGGGACTTCACAGGTTGGGATGAGAAGGC
TTGAAGGAAGGAAGGAAGGAGGGAGGGAGGGAGGGAGGACCAATCCTGGTGAGGGAGTGGGGTGTATCTACCGGTAGTT
CTATCCCTCCCTTCCCACAGAGCCTTCTAGGAGCACGCTGTCCATGCAGGCTCCTGGCCTCAGCCCGACTAGAGTCAGA
TTCTAGAGCACAGCTTAGATGCTAGAACTGATTCTGCTGCCCATCAACACCTGACAACCACTGGCTGATTGCTGGTGCC
TGCGGGTAGAGGCTGCCACGTGACATAGTCGCTTGGCGTGCTGAGGCAGAAGGGATGAGTTCGAGAGCATCCTTTCCAC
CAGGGGGCGTGCTGAGAGCAGGGCTACCCCAGCCCACCCCCACCACAGAATGCAGCCCACTCTTCACCTGTCTCAGAGG
ATTCTTGGCCTCTCTGCCCAAGTGACCTCTGCCTCTCATCTTAAGGATCTCTCTCCTATCTCCATCACTCTCTGTCTGC
ATGTCTCATTCTCTGATTCTGTCCCTTTATCTTTCTCTCCCTACTCCTATTTCAGGACCCCTGTCAGCTCTTTCTCCTT
CTCACTCACTACCGCATCCCTCTCCCCTCCCTCTCCCTCTATCTTCTCTCCCTCTCTTCTTCCTCTCCCTCTCCCTCTC
CCCTCTCTCTCCCTCTCTCCTTCATCCTCCCTCTCTCCTCTCTCCCTTCTCCTTTCCTCTTCTTCCTCCCCACTTCTCT
CCCTCTCTGCTCTTCCTGAGCCTATCCATGGATCTGTCTTCCTGCTCTGTGTGTGTCTTTCTCCCTGTGTCTCTGAGTT
TCCCTGTCCCTTCCCTGTCTCCTCCCTCCCTGGAGGCTTCCAGGCTGGTGACTGGGAACAGATGGCCATTAGGCTTTGG
CCAGAGGCCCCTGTCATCACTGAGGCTCCTCCCTCGGTGGCAGCTTGTCAGAGACCACCTGGGGAGTGCAAACGGTCCT
GCCACAAACAAGTCACTGTCACCAGTGATTCAGGGCCTGGCCCTGTCTAATCTCGGCCTGCCTTGGGTAACCCTGTGAG
TGGCCAGCTCCCTGCCTTGCTTGCGCAATGGCTGCTGTAGGGGCCAGAAGCCAGGAGTGGGCTAAAGAAGGACAGTGGG
AAGTTTTGTACCCAGTAGGCCTTGCCAGGCCCAGAGGAAGCACCTGGAGGCAACAATCATCTGTGACCCATGGCCACAG
TAGTTGCGATGCCCTGGGCCTGTGTCCTATCACCAGCCTCCCATATCGGAACATAAGAGATGAAACCAGGCTGCTCAAA
TACCCCCAAGCCCCTGCCTGATTTCTCCTGGACCTGCATGGCGGAGCTAGAGTGGCCTTGTTTAGGTGCCCTGAGGGCA
AGCCCTAAAGAACACTGCAGTATCCAGTGAGAAGCTGGTACCCTCACCCCGCCATGGCTCTAGCTGTGCCCCCACCACC
TGAAGGGTCCTGAAGTTCAGGTAGCCTAGCTGCACCCATGTAGGTACACATATACACATATCACACACACATACATCAC
ACACACACACACACACACACACACACATACATCACACACACACGCACATGTGAATTGCCATAAAGCAATACCTATCATA
CACCAGAACACTTGTTCTCTAAAACATAAACAGACAGGCAGGATCATCTCTAGAAAGGGCCCTGTTACAAATCCCTGAC
ACACACTCCTGCACTCTAGTACACCTGAGATACCAAAGGGAGATGCTGCTGTGTGGCCTGCTTGCACCCCTGTTCTTCC
CATATCCACACAGTAGATGCTCTGAGGGGAAGGTGAGCATCTGTGGCCGCACGCCTGCCATCCCCCTGCAGTCCTGCCC
CAGGTTCAAGGACAGTCTGATGTCACCCATGCCCTATTCAATACAAGGCATATGCTCCTCTTCCTATCTCTCATCTATG
TGGGCAGTGAGTAAGATGCTCCTGGTTTACCCAAGAAGGCTGAGGCTGCAACTAGCCTGGAAATGCAGATACTTCCACC
TTGTCCTTCCTAGATGGTCTTGTAGGAATCCAAAGAAATCTTGTAGGATACAAAGCAAAAGCCCCTATCAGGAGCCCCC
CTGATACAGAGGTGCAAAGGGGATAATTGAGAACCACTGGGCTGGCCCCACCTCGCAAGTGTGAGCTGCAGGAGGCCAA
GTGGACCGATGTGCAGCCTCCAGGAGGAAGGCTTGGGTCCTGCAGCTGCCATGCACCCACACCCTACGAGCTGCCTGCC
CTGCAGCAGCCAGAGGCAGTTGGGCCTGGGAGCTCTTCCCCAGGCCTGTCCTCCCCTGTCCCCACCCTAGTCACCCCCC
TCCTAGTTGGAGGAAGGACAGGATGGCAGGATACAGTGGGTGCAACCCCGGCTCATGTTTCCCTCCTCTCTTCCTGGCA
GGGATTACACGGTGAGCAAGGAGGACAGCTGAGCTGGCAGGTGGGTGGCCGGCCATGCTGAGGGGCGAGCTGGGGCGGA
AGGACGCGACAGCTGAGGTAACTCGGGCCTTTCATTCCCCTTTCCTACATCTCCCCTCCTGGCTCCCCTGGGGAGCTTG
TACATCAGGAATGAGTCTATCAGACCAAGAACCCACCCATGTGTAGGCACCTCTCTTGCTTTACCCTAATTCCGCTCAG
AATGGGCAAAAGTAAAACACGTAGGTTTAAAGAATTGAACTCAGAGAATTGAAGATTTGTGGTTTGGGGATGGGTAGTA
GCAGGCCTGGAGTGGGTGAGGTGTATCCAATTTAAAACCCACTCATTAGCATTGACACTCCTCCCTCTCCCAGCTTCCA
CCACAGCCCCAGTAGAACCGTCTCTACGGCTGTGAGAAGGCACCTGTCCGTACAAATGCAACTGCACCTTATCCCAGCC
TTTACCCTGATATGGTCCCGAAGCCTGTAGTTTCTTGGGCTACCTACCTGACCATTTGGAAATACTTAGCTTCAGGACA
GAGGATGTCAATCGTTGACCCTTAGATACTTATTTGAATGACTGGAGATAGTTTGGGGATCAAGCAATAAAAATTAGGT
ATGAACCTAGAAAATTCAGGAATCATGTGTCAGCAGAAAGCTATGACCTAGGCTCAGGTCTTGGTGGAGGCCTGAGTGA
CAGTCTCGTGCAAGGGAGGTAGGAGGAGGCCCTGCCCTTCTCCTTCCCACCCCACCCACAGGAGGACATCCACAGTCAG
AAAAGCAAGGGTAGATATTGAAGCTGTTGTGTGGATGCCCCCAGATCTGACCCAACATCAGCTGGTATGTTCCAGGCAG
CGACAGTCTAGCTGATCTCTGGGTCTGCTGCAACCACGAAGGGGTGTTCCAATGCCATGGCCAACATGGAACAATCAGG
TACTGGACTCCAACAGCTATGCGTGCTCTCTAACCTCCTTCCCATATGGTGCTGCTTGAGCCGGTAGACTCCTTGGTTC
CTCTCTATATCTACCCTGAGCAGTGCAGTCCAGAAGTTCCTGCCAGGTAGCATGTTTTCCATCTGCCCTAGATGTTTGT
CTCAAACCCTCATTCTGGTGTCCTATATTAGCAAGCCTGTGCAACCCAGTACTGTTCTTCACACATCTGTGCACATTCC
ACAACGACTTCTCTGAGCCCTGCTCCATGAGCGAAATGTGTTAGCTACTTGAAACGTCTGTTGGAAAACATTCAAGACC
AAGTAAAAGCACCTGGCACAGGGCGCCGCATAGAGCAAGCCCCAAAACATGTTTCTCCTTTTCTAGTCATAACGGCTAT
AACAAAATACCATTAACTGGGAAGCCTATATATTAGGGGGGAAAAATTCTCATAGTTCTAGAAACTGAGACGTCAAAGA
TCAGGATCTCAGAAAATTTACCATCTGGAAGGCCTACTTCCTGTGTTAGAGATGGCACTTTCTCCTTCTGTCCTTACAC
GCTCATCTGGGATAGTTTGCTAAGGATACTAATACCATTCATAACTGAATCATCTTCCAAAGACCCACCTGCCATCACT
ATCACACTGATGATTAGGATTTCAATATATGATTAGGAGTTGAAAGAACACAAATGCTCAGGCCATAACTGACACTCTT
CTCAAACCTTCTTGCCTGCCTGCCTTCCATCCTTCCTTCCTGCCTGCCTGCCTTCCTTTCTTCCCCATCTCAATCCTTC
CAGAGAGTCCTGAGCATCCTAATTAATCCCCCCTCATCCGCCTCTATTTCACTCCATCCAGATCCTCAGTGAGCCTCTG
AGGCCCCAATAAGCTCTGTTGCCTTTCTAAGTGGAGCTGCACACAATTTTCTAGGTCAACTACAGAGAGGGACTCATTC
ATCTTTGTGTTCCCAGGCATCCAACGCAGACCTAGAACATAATGTCTGGTTCCAGATGGAATGAAGGGGTTGTGATTGG
ATGGGGATGGAGGACAGATGGACAGATGATGAATGTGTGGGTGAATGGATTGGGTTAGATAGAATGGATACAAGGATAG
AACTGGCAGATGGGTTGAGGACCTGTGTCTACATAGAGATGTAGGGATGGGTACATTAACAGCTAAGTGAAATGGATAG
ATGCGAATATGTGGTACCCAAGTATTGAAGAGGAGGGATAGGAGGATGGAGAAACAGATGGCTGCAGTCACATGCCAAG
TTGGCTTTGGGCCAAGACAAGAAGGCTTCAAGGAACTCTCTCTAATACTTTCACCTCAATCCTTGTCACATCCTGTTTG
CCATTGCTGTCACAGCACAAACTTGGGGTGGTGGTGACTGACGGTGGTGGGTGGTGGGTGTGGATGCTGCCTCCATTTG
CAGTTTTGCCCAAGACCTCACTTATTGGTCCCTGCCCCAGGCTCCATGTACCACAAAGCTCAGAGCACAGGCATGGGTG
GAGAGCACACTTGCCCTTCCCCAGACACCTTCCCAGCCCTCAAAAGTTGCCCTGGAGACGGATAACTGAACGTACCAGT
GGAGATGCTGCTGTCCTCAGGCTCAGCACCTAAGTCTGGACACCAGCCAACCAGACTTCTCCCCAGGGTGAGCTTGGAT
TCCAGCCACATGGAGGTTCAGCTAGGCTGACACTCCTATGAGAGGCCTCAGTAAATCCAGAGGTCCTTGAGAGCAGGCA
TGGTATCACCCTCCCTGCCCAATCCAGTCATGCAGTCTTTGACACAGAGTTGGCAGAGCAAATGTTTGCGGGCTAAAGA
AAATGAGCAAGGCATCCTAGACACAGCCAGCTGTTGCTACGAGAAAGCAGTGGTACGTGCTCATCTGAGCTGAGAAGGT
GCACACCAGCTCTGCCGCTTCCCAGGTGGGTGACCTTAACTGGTCCCTGGACCTCTTTGACCTAGCCTCTCTTCATCTG
TAAACTCATAATAACGGGTGACACCACTCAGCCCTCGCCTGTGCTTGCTTGGACCACGCAGAAAACCTCTGATGTTGGT
CTTTTGAAGGACCCTAGTCTGAACCAACAACAGTTCCTGCCCCCCACTCTTCTCCACCAGGGCAGGGCAGGCCTGTATA
GAGGAGCTGGTGAGTTGCAGGCACTGAGCATACACCATTTCCAGGTTTCTGCAGCCAGGGCTATCTATAATCACCCTGA
CCCCAATCTTTCCATGTGAATTATGTAAAGAGAGTTCTCCAAAAAAAACAAGACCCATGAAAAGTCCCAGCCTGTGCTT
TCCAGCCCTCATGTCATCTTTCCCAACTTGATAAGGACCATGGCTTATTAGTCATTCCTACCCAGCTCACCCTGTCCTG
CGCCTGCACACGTGAGACTAAAAATACCCATGGCTCCTATTAGACACTCTGCCCTAGGGACACGCCAAGCCTGAGTCTG
CAGTGACACCAAAAGCTGGCTCCTTCACAGCCCTCGGATCCAGGCCACTGGGCTCTTTTCCCCAGCAGCACCCTCCTGA
TGGGCCCCTGAGGGTCCATGGGATTGATCAAAAGGCTGCTGTGGGTTTGGTTGTAGCTCTGTGTCACTCTCCAAAGCCT
CCTCCTCCGTCTGACTCATTTGCCTTGTAGACAGCTTCACCCCGCCCAGAAAATGGTTCTTTCTCAAAGAACTCTCATC
TCTCTGAGTGCTTCCCTGGGCCCTACAGATATTCAATCCAAACCTCAGCCCCTGGAAAAGACACCCGTGCTTCTCACTG
AAAACAGATGCGATAACAAGGGTGTTGGGTTCAACGGGAAAGTCAGACAGGCCTCCCCGAAAGCCTTGGGGTAGACTCA
AACTTGTGTGCATTGTGTGTGGGGTGTGTGTGTGTGTGTGTGTGTGTGTGTGTGTGTGTTGTTTCATGTTGGTGAACGT
GTTTACACGTGCATGTAGGTACACATGCATGTGTGTATGTATGACTGTAGAGGTCAGAGGTCAATGCCAGTTGACTTCC
TCAGCTCTCATGTTTGTACAGCAAAAATCTTTACTGACTGGGTCATTTCCCTAGCCTCCTGAACCAATCTCTTCATCCT
TCATTGTTTTCTATCAATAAAATGGACACAAAGCCATAGGTCCAACCTCTAGCTGTTGTGAGACAATCAGGATAAATCC
ATGGGAAGAAGAACACAGGCTCTGAGCTCTAACCCAGAACTGGCACTGAAGCGGGAACAAGGGGTGGGCAAGGTCTCTT
ACTCACAAGGAACATGCCAGGGACATGCCAGGGACATGTCAATGGGCCGGTGATGTATGCTTGGCAGGGCCGAAGAGGT
GATCTCTCCTCAGGCTCTTATGTGCTACTGGATATCTCTCTTGGCATTGACCAAGCTATTTTGGAAATGGTGGTGAGAG
ACGAATTGATTTTCATCATCTCTATACCCAGGAAAAGGCCAAGACCGTCACAGAGCGGGACTCCTATAATCAAAGTACC
TGAGGGCTGGACCAGAGTGCTTCCAACATTTACCTGTGAATGTATACGGCAAAACATGACTATACCAATCTCTGGAGAG
AAAAAACAAAAACAAAAAACAAACCAAAAAAAAAAAAAAAACCCAGAAAGCTAATAAAGGGGTCACAAAAAGCTAGGCT
GAAATGGAAAGCAGTGAATAGCAGGCTGGGGAGGCAAATGCCAGAAAGGCTGAGAATGGAGATTGTTAAAAAAAAAAAC
AAAAAAAAAACTCATGCTTTGGCTCTTGGCAGCAGCCAGGGTGGGGGTGTGTGAACAGGACTAAGCAACTCTCTGAATG
AAGCTCTCCCCAAATCTGTGCTCCAGAATGTTCTGCCAGCAGCCAAGGAAGGTGTCTTTAGAGACGCTTGTCCTCACAT
AACCTTCCTCTCCTCTGGGCACTGAAGGTCTGCGAGAACGATGCAAAGGAAGGAGCAACTGCTCTGCGGGGCTCAGTGC
TTTCTCCAGGCTAAAGCCAGAAGTGCCAGCTTGCTGCAAGCTCTCATTCTGCCCAATTTGGCTCAAACATTTATTGAGT
GCCTCCTGTGTACATGGGGAAGGCAGAGGGCTGAGGAGCAAGGGAGGCAATGACCTGGTCCTCAAAGAGGACCAGGTCT
GGAGAGGACGTTATCAGAGTTCACAATAGGATAAGGAAGATCATGTGTAGAAGGAAGAGTGTTTGTCCTTCTGGTTAGT
GTTTAAATGTCTGTGCCATTACAGGAGAAAATAGAAAAGAAGACTGTGAGCCTTAAAAAGCCAACAGCACACACATGTA
AAGTTGGGCAGGGGTTGGGGGAGGGGGCTGGCTCAGTTGGTAAACTACTAACCTTGCCACAGAGGTCCTAAGTTCAATC
CTCAGGACCTTTGTAAAAAAGCTGAGCAAGGTGCTGACCTTTGTAATCCCTGAACTGAAGAGATAGGGATGGGGGGGGG
GGGAGGTAAGAAAGAAAAGAAAAAAATTATCCTCTGACCTCCACATGCTTGCCCACAAGCAAGGGCACACACATGTACC
TGCACATAAATACACATAATGTACAGAGAGAGAGAGAGAGAGAGAGAGAGAGAGAGAGAGAGAGTTCTCAGAGGTAATA
AAAGTTCAACTAAAAATATGTTCCATGCATTAATTATTCTAATGCTAAGAGCTTATGTAATGACAGCATTCAGTCGGGG
GTGACAGGTGACCAGGGGTGGACATACAAGGCTAGTGAGTTTGTAAGTGGACACAAACTTTTTTGGAAAGTCATTTGAC
ATTGTATATATCTCAAGCCTTAAAATAGTCATAACCTTTTGAGTGAGTGATCCCACTTCCAGGAATCTATTCTAAGGAA
ATAACCAGCTAATGTGGCCAAAGATGTAGGCACACAAACATTTACTGTGGCATCACCCTGGGGAGAGGATACTATGAAA
CAAGCTAAACTCCTACCACTGGGCAAAGGGGAAGCAGGTGTAATCACTGATTTGCCCTTTAAATTAGTTTTGAGGAGGT
TCACTGTGTGTTCCGAAAGAGGCAAAACCATGACACCAACCTGTACACGGTGCCACCCTACTGGCATAAGGGGCGCACA
CTCAACTATATGCAGCAACAATAGGAGAGGAAATGCTAGTGAACAGGACACTGAAAAGTGCTCACACCTAAATGACAGG
GTTCGGGTGATACAGTTTCTCTCTTGCCTGGTCTTCTGAATTTTCAGTACTGGTCATGAGTTTGGCAGAACTCATGGAC
TTTCGTGTGCTGGAAGATCATCATGACCTCGCTCATCCAAAGAGGTCACATTGCTCTGAAGACTCGGTCTGGTCACCTT
CCCTGTATCCCCTCGCTTCCTGTAGCCCTTCCCTAATGCATCCATGGAGGAAAATACGCTGTACCAGCAGGCTCCCTGC
TAAAAGCTTTCTCTGTACAGACTGGTGCCTGATGCCTGTTTCTGTGGGGGAAGAGAGAACTTTGCCTCTTGGAAACCCT
AGGGAAGAAAAAGGGTTCAAACTGGAAGCCCCAGAGAGCTCCTCTTTCTAAGGACAAACAGCAGTGTGAGGTAGGACAC
AGGAGAACACTCCTCTCCTGTGGGAATCTATAGCCAGGAGCAAGTTCCTCCCCAAACCCCCACTCCCACCCCTACTTCA
CCTCCAAAACAGCAGCCCCAGCTCATGGCCTAGAATTCAACAGACAGCTGACAAGTCCACCTTCAAGCAAAGGAGTGGA
AGCGGTGAGCCTAACAGCTGGACGTGCCTTCGTGCCAAATTGGGAAGAGGAGGCTGATAACAAAGCAACAGTCATGCAT
TGTCTGTCTAGAGCGCTGTGGTTTGAGGAACACATTATTAAGTGATTTCATTGGTGTGTGACCATCTCACAGTGTATTT
AACAAGCTGGAGCAAGCATAACAAGGCTTCAAAACATTTCCCTCATGTGACCTCTTTTCATCCCCCCAAAAAGTTGTAT
TCAATCACAGGTATATAAGTATGTAAAATAATACAAATGAAGCATTTACAGTCATTGCTATATCTATAGCTTTGGCTAT
TAATTGAGGATGAAGGTTAATTTGCATACTGATAACATGATTGCTATCTATTTCCACATAAAGAATTAAAGTGTGCCTG
AGTATTGGATAGTCTATCTTCAATGGTTTTCTCCGAGTTGACCAGTGTTTGGATTTTATAATCATCAATCCTGAGATCA
TGGCTTCACTTAAACAGGAAGGACCAAATAACAGAAGAATATATAGGGTTATTGTGAAATTGTTGGAAAATTGACCCTA
ATCCCAAACCTAAATTCATCGAATCATTTTTTAAACAAAACCCAGGTCAGCAACTTGAGAAGCAATTTTTAAAATCAAA
TATCCTGACAAAATATACTGGAAGGGTAAAGTAATTTGCTACTTATATCCTGAGGGATAATAGTAGGAAAATAGCTTTA
AAGTTTTTATTTTGCATTAATAAACTGTTATGTTTCTATATGTGCTGAAAATTCTGTATGTGCGGTGAAATGCCACAAT
TCATAATGTACAATTGTCTAACGCTATGACTATTGTCTTGAACCTGAGCCCATATCTAGGGCAGCAGTGGTGATGCCTC
GTGAGTGATGTCATGCACAGTGCTAAGTGTGCGTGTTGTGTATTCGGAACCAAGGCTGCAGTGAAGTCCCACAATGCAC
TGAGCGTGAGCACCACCAGAAGTACTCAGACTAATTACGCATTGATTTTGAGTTAATCTTTGGTCATTGTTCATTTAGA
AACTCTTGTTATTGCCAAGTTTTTTCTACAACTCACACATTTGTGGGCTCCCAGCCCAGTTAAGAAGCTTTGATGTAGC
CTGCTACCTATTTCCTCTCTACGATATCAGTAAGTAGATATGCAAATACATGATAGATACCGAGGGGGACAAAGGTACG
TGGGTACGGATATAGAGTAGTCTGTTGCCTCTGGGTCATGATAAACAAATAAACAGGAGGTTGGGTCAAACCCAAGAGG
AAATGACACAATCAAAAAACACCATAATGGAGCAAAAATTTCTTGCTTTTTATAAAAGTATTTACATTAGCATATAAAC
TATAAGATAGCATTACGGCATTTTCAAAGTCAGATTTGTTTTATAGTGAGCATGTTTTTTATAAATACGAGTATAGTCT
AACAAGAAAAGTATAGTGTAAATACAGGAATGCAGTGTGCATAGTCACTATTATCAAGTGTGTACTTTGCACAAATATA
CTGCTATGGTTGCTGGCAGGTAATAGGCTTGCCTTCAGCGCATCAGCAAAAACATGTGTGTGCTGTGTAGTGTCATGGT
TGTTATAATGGAGACCATATCCCTAGGACAGAAGGAGTTTTCAGCCCCATCATAACCTTGTGAAACCTCCCTCGTACAT
GTGGTCCATCATTCTACGGAAACATTGCCTACACAATGCATGGTGAATTCTTACTGATTTGTGTCATTTAAATTCTGAA
ATTTCCAGTTCACTGTAAGTTAAATAATTAAGGATTTAGCCCAAAATGCAAGTAGTCTCTGTTTTGCCAGACCTAAGGC
AAGGGTAGAGTACAGATTAATTAGTGAGGTCAGAATAAAATCTTTGAATCCCATTATTCAACATGGTATCAGGATGCAG
GGGCTACCTCTTAGAAGAAAGTCTAAAAGCAGAAAGGTCAGGGGCGTTTGAAACTAAGAGATGGTTATGGCTGCAGCAC
AGGTGCACATGAGGCTAGTCCAGGGTGAACCTAGGCAGGGAACAGTTCTGCAGGCCACAGGAGCTGGGTCTTGGCACTA
AGGACCATAAGGAGGATGAGCCCAAGTGCCTGGCAGCATCAGGACTCAGAGTCAAGGTGACCCGAGTTCAGCTTTCTCC
AAAGCAAGACTCTCAGTGCAGTTCTGGAAACATGTGTTGACATCTAGATACAGTCGAGGTCATCGGGATTGGGAAGGAG
GTAATATCGAATCTGATAGGGTGCTGCTAAGTATCCTACAACACATAGGATGGCTTCCTACAGCAAAGACATCTCCGGC
TCCGATCTTCAGTCATAAGGATGGGAGGCAAGCACTTCTGCAGACACTTGGATTTCACACATGGACAGCAGGACCACAC
ACACATATACACGCTATCTGCCTCTCTCTGACTGATATACTTCAGCTAACCATGCTTCCCAGAGATGGCTCTAGGAGGG
GGCATTAAGCTGAGTCCTTAAGAATGATATTCTGTGGCATGACAGCAACGGTGGAAGGGACAGAAACATCTCTGTATGT
TATATCACGGATGCTATCTGCCCTTATATCTGCCCTTAGCCTGCATCTGTCACCGTTCTTGTCTCTGGTACAAAATACC
TGGCAGAGGCAGTCTAGAGAAAGAATGATTGATATCACCTCAGTTTCATGACCTGTTCCTGGGCACAGAGAGGGACCTC
ACCGAGAACTTGAGGTGGCTGAGGACATTAGGGTGGATCAGTCAGGGAGGGGAGGGGGGAACTGAAGAGAAGATTGGGG
ATTCTGAGCCTTTAGGCAGAGTGGCTACTCCACCTGCTCAAAGCCTGTCTCTAGTTGACCCCTCAAGCAGAGCACAGTA
CACAGAGGTAGGCATGGCTTCTGCCCATGGTGTGGAGAGTGTGGCAACTTTCTTACATCTCAGTGGCCAGCCAGGATGC
GCAGCTAGTTCCAACCAGTGATCCAACTAGGCCCTGCTTCCTGAAGGTTCCACAGCTTCCTCAAACAGCATCAACTGTG
TGTGTGGGGGTGGGGGGCAAGTCTCTTAACAATGGCCAGGTGGGGACATATCACATGCAAACCGTACCACTGTCTCTTG
AAGGACTTAGGCCAGTGGTTCTCAGCCTTCCTAGTACGGTGACCCTTTAGTACAATTTCTTGTGTTGTGGTGACCCCCC
AGCCATAAAATTACTTTTGTTGCTACTTCGTAAATGTAATTTTGCTACTGTTATGGACTGTAGTGTAAATATCTGATAT
GCAGGATATCTGATCTGATGTGTGGTTCCTGTGAAAGGGACCTTTGACTCCCCAACCCTAGGGGTCTAGACCTACAAGT
TGAGAACCACTGACTTAGAACACACTGGGTGAAGGAGGTGAGTGCAGGTCCTCATGGTTGCCTAAACCACCTCCAGGAC
CCAGCAGGTTTGTATAATCCAGTCCTTTCTTTCTCAGCCTCTGTGTGTGTGTGTGTGTGTGTGTGTGTGTGTGTGTGTG
TGTGTGTGTGTGTGTGTGTGTGTTGACACACATATAGTCAGGGAATAGGGCTCACTTTAGCAGAATGAAACCTATCTAG
TCCACCATCTGTCTCCCCTGTCCATCAAGAGACTCAGCTGTCTAGCTACACCAGTTCAACATTGTTAGAAGCCGACAGA
CATCCAGTTAGAGAAGACACAGTGGCGACCCAATGCTGAGACAATGGAGAGAAATGGTCCAAGGTCACATGGCCAGCAA
GTGGTGGCACTGCTGCTGGAACATAGCTTGTATCAGAGTGGCTGTTTCAAGGACAAGGTGGAGAGCTCTCAGGAGCCAT
GGACCAAGGTGGAGTCACAGAGCAAGCAAGGCCTCCTGCAGAGGTGGCATCTATTACCTGTGTCAACACAAATTAGGGA
ATTGTCTCCCACCTGGTTGAACCACAGTGCCAAAGGCTCCCAAGCAAAAGCCATGTAAACACTCCTTGGACCTACAGCC
AAATGCCCTGTCGCTGTTGGCTGGGCAGAGCAGGCCTGGCTAAAAATAGAAGGGGCTCTCAGGTCCAGCTCCCTGACAG
CAGCTGGCAGCTCCCAGTTCCTTTCTTTCTCTCTCTCTCTCTCTCTCTCTCTCTCTCTCTCTCTCTCTCTCTCTTTCTC
TCTCTCTCTCTCTCTCTTCCCCTCAGGCAAGAGCTAGTCTTCCCGAAGGAATGGGGAATTTTAAGACCTCCATCTCAGG
AAAAATAAGATTGTTAGCTTGATGCCCAGTACATATGACCCAGGGTCTGACACAGTCATCAATGACAGTTGGGGACTTC
ACCATAAAGCCTCAATCTACGAAAACTATCGACTTTCACAATCTACCCAAGGGAACAAAGAAGTCAAGGCTAAAGATGT
GGCCAACATCTGCTCACTCTGCAATTCAACCTTCTTGCCTTTCTTTTCCAAAACTATACCAGTTCTGATTTGAGGTTTC
AGGGTTGGCCAGTGACTTCTCTTAGGGGATAGATGGTGGCTATGAGGCAGCACTCAGCCCAGCCACAGAGAAAACTTTG
CTGGAGCCCAATACCTGCACTTCCGTTGTACAGGGAGGAAGGGTCATAAACCCTGCAAAGTGCATCCTGGGTGCAGTTC
AGGGCCGCGCCCGGGGATTTCCTTTCAAAGGTGACTTAGAGGCACTTCAGGAGGATAGCGCCCTCCCGGGCGGGTTCTA
ATGGTGAATTTGGCAGAGTCAGCGAAACTGCGCCCGGCGGACCTGGCGGCGGGGCAGCGCCCTCTCCCGCGCCCTCGCC
CTCTCCCGCGCCAGGCAGCAGCGCGCACGGGGCCATTTGCAGCCTAGGCAGCCTCGCGAGCAGCCGCTGCGCGCGGGCC
GGGAGGGAGGCGGCACCATGGAGCTGAAGAAGGACAGCAACGCTGTGGCCATCGACATGCTGCTCATCGTGCACTCCGA
GAAGCGGCGCGCGGCGCAAGCCACGCACTTGGACCCGCAGGCGAACCCGGGCGCGCTGCTGCAAAACCGAGGAGGTAAC
ACCCGCCTGGCCCGGGTCCTCAGAATCCCTGGGCACCTCGGCCACTAAGCCCCCGGGTCCTCTCGCCGGGGGGCGCCTA
AGCAGCACCCCCCTCCCCAACGAGGCTAATCCGAACCTCTCCGAACCTCTCCCAGACCGCTGCTTGTGCCCTGGCGCCA
GGGCACCTGCGTTCCTTGGCAACGCACAGCGCACTGGTTGCCCCAGGCCTGTTTTCTCCCGCTATTCTCTGAAGGGTGC
AAAACACATAGAAAAATGCTCTTCAGAAAGAAACCAGGGCCTTAGGCTGATCACGTGTAGCAGAGGCCTAGTCCCCAGT
CAGCATGCAACTCACCATAAGTTACCAGGGACCCCAAAGGGTCCCTGTACTGAGTCAGACTTTAAGATAACTTAGAGTC
TCAGTTTCCCCTTTCGTAAGCCTCTCTTTTCGCCTCCAACAGATATAAGGACTGAATGGGTGAAGGGAACCTGGGCTGG
GGTGGAGTAGTGTTTGAAGTCTCCTGACCGTACTTGAATTTAGCTTCAATTTTACTTCTTCTGCAGACTTTGGGAAAAC
GAAAACTGAGAAGTGATTGCTTATAGGGTGATTGCAGAAGGCAGAATCTGCCTCTATTCTACACACACACACACACACA
CACACACACACACAACTTGTATAGCGTATAAAGGGTGCCGAACGGACGCTCAGGAAATCACCGAAAAATGTAGGGGCCT
CGTGGCGCTGGTCTTGGAGGGAGCCTCTGAAGCTGACTTGAGGGTCTAACTCTGCACCACTTCTTTAGCAGAGATGCCT
GCCGGCTGCACAGAGAAAGATGACTGCTACCATCCCACTCTCCCTCCAGCTCCCACGTTTCTTGGGACCCCCTCCCGCT
GCTCTATCTGCCCCCCACTCCCAGCTTCTGTGCGCATGATGCACCCACAGCCTGTCCACCTGCTGTGCGAGGGCAGCGG
TTCTCTAGACAACCTTGATCCATCAGCCACATGCGCTGGAGCTATGATGCAGCCCCTGGGGAGCTGGAAGGGAGGCATT
AAGGGAAAGAGAGACTGGAGAACTGAGAGTGTTCGCAGCAGTTAGAGTTTAGGACGGAGTGTGAGGACGGGAGCTGTTT
AGGTTAATAGATCCTGTAGTTCTCCGATGCTGCTCCTGGGAGAAAGGATTAGACCCTCTCAGGGTCTTTGAAGGAGAAA
GAAAATGTCCTCCACGTCTTGATGGGAATGAGATGGCGCCCGTCGCATGTAACACAATCCAGAAGACCGCTCCCCGAGT
GTAGTGAGGCCTAGTTCCAAGTCAGCCCAATAGTCCCCACCGCCCAATCAGAGTCCCTTTGCTTCTGACACCAGAGAGG
ATAAAGAGAGAAGCCATAAAGTGCTGGCTATCAAAACTGCCCTCAAGGTACCCAAAGCCTACCCAAAATGTCCATGACT
CCAGAAGAGCATACAAACTTTGACCCTGCTTTACTTGGGGGGTAAAGCACCCCTACTTGAAAGGCACTGGTATTTTTCT
AGAAACATTTTCCCAGAGAAGGTTTCTTGAAGATGCTGGGCAGTAGAGAGAACCGTGTCCCCTATTCTTTACCAAAGTG
AAAAAGAACAGTGTAGGGTCTCCAAGGTCTGCCATCCATGGAACCCCCAGGCTGTACCGACCTGTGTAGCCACACTTTA
GGGCATAGCCTGAGGAAGAAAAGCATTAAGTCAAACTACTTGTTCAGACGTCTCACACAGATGCACAACAGCCCAAAAT
CGCCCTGCCGACTTTCAAGTCTCTTTCTGTCACCTGCAGGAGAGTTCTCCCCCTAAGGAACGGCCAAGGAAGGCCTTAA
CGCGCCCCCTCCCCACACCCATCAGAGAAGAATAAAGTTCAACTATTGTCACGAGGCAGACACGGTGGCCTTGTGCCAC
AGAGCAAGGAGGGAAGGAGTCAGAGGGACAGGACAAGAAGAGTCACCAGCAATTTAGGCTGCAGGGCTGGCCTGGTCTC
TCTTCTTTTCTCTAAGAGTCCAGCACGTTCCCAGCTATTTCCTTAGAACAGCGCTCCCCACAACACAGACTATGAAGAG
CAACAGACTCTGCAGAAAAGATCGGGGAGGGGGGGCTGAGGAAGATTTGGGGGCTTCTGGGGTGAAGGGTTAGAGAGCC
AGACCTGAGACTGAGCTTCCTGGGAACACTGCTATCAAGTGTGCCACAGAGCTGGTCTTGTGGTGGCGCCTCTGCTCCC
ACTGCTCCCACTGCCTGAGCATACATCAGGTTGCATGCCAGGGACTCAATCTCTCAACTATCACTTCCAGCCACTGCCA
GGGAGAGAGCTTCCCTTCTCTTCTGCATTACATCATTGCCAGAGCGAAACATGGGTGCATCTGATGGGTCATGCTGAGG
CCTACACAGGTCCATACTCTAGCTGCAAAGGATGCTGGGAAAGTAGGCAACTGTGGCTCTCCACTCCCATAGGAACAGG
CAATCTCTGTATGCTTTGTCCCTGCATACAGAAATAGGCAGGCAAAGCAGAAAGAAAACTCTCAGAAAATAATACTTTC
ATACTTACATATTGGAGATGTGGAAATGGGTATTGGGCATCTGTATAGCAAAAATTCCTTCTGGAAAATCCTGATAGCC
AATCCCACCATCACTAAAAACTACATTTTTTTTTAAAATTTAAGGATTGCATTGTTTCCTCAAATGTGTCTCATTCAAG
GGCAGCCTATCTCAGATCCTGAAAAAACTGGTTCCCACAGCCTTGTTTAGCACAGATGGGTGTCTAAGTGGAACAGTAG
TGCATGGTACTCGCCCTAGGGCTCCCTCCACAAAAAGTCTCACACCCAATCTTCTCTCACAGGATTCCAAGGTGTCAGA
AACGGAATCCGGAAGTGGCAAGAGTTGGAAGAAAACAGCTTTCAGGGTAAATCTCTTTTTCTTTCTATTTTCTGTTCCG
TCTCTGTGATTCAAAAACCCCGAAAAGTGGCTGGAAGAGTTGGGTTGTCCTCATTGGGAAATTGGCCCTAACATCTAAT
CGGTGAGCAGACATGGCTGCCTGTGGCTCGGCCAAGCCTCTAGGCCTCTGTGAGCCTGGAAAACTTTCCCTGGCATCGG
GGCTCCTGTGTTTCTGGAAGCTGAAAGTGGGGAATGATGCTGTGAACTTCAGCACCCATTTGTTTGCTGGCTGAGCTAT
ATACGAGGATTTGGCTTTACTTGGGGTATCGAGGGTTGTGTGTGTTCCCACCAGAGGCAGGGCTGCTGACATCACAAAG
ACTATATACAGCTCTAAAATGTGTTTGAGTTTTTTGTTGTTGTTGTTGTGTTTTGTTTTTCTGGTCAGACTGGGATAGT
GGCCTGTCTTAAATCTATATTACTTGAGGACTGGGCAGAGCCGATCAAAGGTTGTATAGTAGTCCCTACTGCCCTGAGC
TTCCGAATACAGCTAGAAGTTCATTTCCAAGTTCATTTCCAAAACCTCTTCTTTCTGGTTCCAGACAGCGCTCTTTTCT
GGAACACAGGCGATGGGCCAAAATAGCGGGTTTTGTTTTGTGTGCCTCAAAGACTGATTACCTCAGCTTCCAGGGGGAT
GCATGAGCGTTAACATGCATGATGAGAACACAGACTTCTACTAGGACCCCGACCTCCACTCGCAGAATGTTGCTGAGGA
GTTCCAGCAGACCCCACCCATGTAACCCTGGAGTCAGATGTCTGCCCCTGCACAAGAGCACAGCTGAGGAAAGGTGAAT
AACTCCGCCTTCGCCAGCCTTCAGACAGCGGCAAAACGGAAACGCAAACCAGGAAAACTGATCTTACCTCTGTGCTTAT
TCCTTCAACAGCTCCGTTTCGCAATTCCTTTGCGCCAGGCCAAAGTTTGTTAGAGATTGAACAGTTAAACAAGCAAGTC
TAGAACCCTGTCCTGGTAGAGCTGTGTTCAAATGATGGTCATTTCCCCACGTCCCTTATGCTGTTCACGGGAAGGAGTC
ATCTTCAAGATGCAAGCACACCCATTAAGAACATCCGCCTGTGTCCTGGCTAGTGGATCCGTGTAAAGGCTTCCTTAAT
TGGGGCTAAGCTATAAGGAAAATCTAACTCACTTGGGGTGGCAAAGATTGACATTTTAGCTAGTGAAGCGATACTCTAG
GCCAATAAGAAGCCTAAGAATGAGAGTCCAGGAACTCCAGCCCTAGGAATGGCCACTCAGAGCCTGTGTGCTGTGTGCT
GGGTCCATGTGTGAGCAAGAAAGTGAGTCAAGTGGGAACACTGGACAAAAAGAGAATATCCTTTATGTTGCTTTTCTCT
CTTGCCTGTGTGAGCCATCTGTCAAGCACCAAAGGCCTCTCAGAAAACCCTGGAGTCATTCCACTTTGGGCATCTTCAA
GGTTGGAATGGAGATTAGTGAAAAACTTCACAAAACAGAAAGCAATGCAGTAACTCTCAAGATGATTATTTAAAAAAAA
AAAAAAAAAAACAACCCTCTGAGGCTCTTAGTATCCATCCACAGAAGGTGATTTAAATAGTCCATGAAAAAAATCTAGC
GTTTGAAGATTTGGTATGACTCTGGCAGCAGAGAATGTCTGTAGAAACCTTAAATCCAGGAAACATGATGGTTTCGCCA
TCCCACCAACATGTGTAATTTTAATGTAAGATTTGGTCTAGAAACCAGGCAGTGGTGGCACATGTCTTTAATCCCAGCA
CTTGAGAGGCAGAGGAGGACGGATTTCTGAGTTCAAGACCAGCCTGGTCCACAGAATGAGTTCCAGGACAGCCAAGGCT
ACACAGAGAAACATTGGCTCCAAAAAAAAAAAAAAAAAAAAAAAAAAAAAAAAAAAAAAAACCACACAAACAAACAAAC
AAAAGACTCAGTCTACTTTTTAAATGACATGCACATATGGAGAAATATAGCAGCCTCTTTCCACTTTTTTTGAGGGCAA
GCTCCAGGGCACTCGCGTTGAAGCTGATTTCATCACATATGTGCCTTGCTGGTACCCAAGTCACCGAGTCCTGCTAACC
AAAAGGCTGTCCAGACCCGGTAGTTGGAGAAATTTCATCTCAGAAGGAAGTGGCCCAGTGGCATGTGCTGACAGAGTGT
GCACAAATGGAACCAAGTGTGGTGTTGATCCAAAAGGGCACATTTGTCCTCCTATTGCTACTCTGTACCCTCCTTGGGC
TTGGGTGTTGGCGAGAGGTAGGGTGGGGAGCCTGAAACACTCCAAACTTTTGGAAGCAGCAGGTGTTTGGGCTCAGCCA
CCCCTCTCCCAAAGCTCGCCCAGCAACGGGCTTACCCTGCTGTGATTGGCTGCTCTCCTTGGTCCTGGCTGAAGTCTGC
CTAGCAGCACAGTGTCTGGTGCCCTACCGCTAGAGAGAAACCACTTGTGCAGCCCTGACTATAAATACCTCCCAGGAGC
TGTGCCAGCCAATCATCCTTCTTAAGGATTCCCTTCCCGGCTCCTGTTTCCTCATGGAGGTACAGCCAGCCGTGCCCAC
AGAAGGCAGCCTCCCTGTCCTCACCCGAGTGGCCAGGAGCTCCAGCCCAGCATGCCACATCACCCCACATTGGCATACG
ATGACAGTGCATCTGGCCTTGGCTAGGCAACCATGTTCTAGAAGTCCTGGGGGCCTGACTCAACCCGATCCTAGGAGAA
GACTAGAGCATGCCGGTCCCCCAAGGCAAACCTCTGCTGGGTGGACCCCAAGTCTAGCCCAGCTGAGTGCCCCACTTAT
CCACCTTCACCAGCTTCCGCTAGGGAAGCATCGAAGCTGTGTCATGGGAAGCACAGAGTTGCCTTCGTGATTGGCTCCA
CTCTACAGACAGCAACCTTAGGGAAATGCTAGTTCCCAGGCTGAACCACTGTTTTCCCCTAAAGTGAGGCTCACTCTAG
GTCACAGGGAGATGACGAATTATAAGGGGAAATATAGACTGAGAACTTCCTTCTGCCATAATCCTGGTCCTTCCTCGAC
TCTTCCCACATCCATGAAGACAAGGTCCCAGGGCTGGCTCAGTAAGGACAGTGCTGGCACAGCCACAGAGCAGCCATAA
AGCAGAAAGGAATTCATGCCTAGGAAGACCCGAGAAGACAGCGATGGCCTGTAGCAAGAACCAGGCATCTCTCTTCAGC
ATCCCAACCCCACTGGGCCATAAGGACATGTAAATATCACCAGTGGACACAGAGAACTCAAACATGTTGAGTGCTCTGT
AAAAATGGTGAAACTAAACCAAACTGAGTATCCTCCCACCTTCAAGGATAGAAGCAGAGGCAGGTGACTGTCCCTGTGC
TCCTCAGAGGGAGGAAAGAAAGCTGAGCTAGGAGTTTGGAAGCTCAAGAGTTCAAGTACTATGTTGGACCCCCACCCTC
ACCCCCACCCCCACCCCCGCACAGTTCACTCCACAGAAAGGGATGATGACAATCGGTTAGGCATCTGTGTCTGAGAAAA
TATTTTGGAAATTGTAGCAAAAACTCCAGAGCAGCAGTTCCATAGACCAGTAGTATGAATCCCGGCCTGGGTAAGCTTC
CACTGGGAGGCAGAAGGGGTGGGCACTTGTGGACTCCCATGGGTGAGGCTATGCTGGTCCAGAGGTGTGCTCACTATGG
CAGTAGATGTGCTCAGCCCCCGCCAACATACAATTATCTCAGGTGCACCCGGCTCCCTCAGCCCCCCTCCCAGGGAACA
TTATACCATGGTCATGGTGGTCACTTGCCATCGTCTTTGTCTTTCTTAAATAGGAAACTTGCCAGAGAAGCAGTGCCTT
CAGCAGCCGCAGGTCATCACCTCCTACGACAACCAAGGTAAGAGACAAATCGCTAATGGCCATCTCTCCTGGGGTTGTG
TTCCAGGCTCTGCTGCCCAAGTCAGCGAGCCCGGGATACAGAGATCAGGCTGCAGGGAGCACCTCTGCTCTGATCCATA
AAAGCTATAGGGAGCACCTTCTCTGTGATCCAAGAAGGCTACAGGGAATACCTCCTCTGTGATCCATGAAGGTTAGAGC
ATCCTTCTCCCTGCATCCCAGAGGAAGAACTGAGACACCCTGCCCTTCCAGTGAAGAAATAAAGTCCTTGGATTACAGA
GTCCCACCATTATCGATATTGTCAGTGCTACAGCTAACACTCACTGAGTGCAAAGCATGTGTCTGCGGCTCTACCAACC
TCTATACGCACTTAAGTATCAAAGCAACCTTGACTGGGTGAGATGAGGAGACTAAGGCTTGAGACAGCAAGAGTCAGGG
CTAGCTCTCTGGTACCTTACCTCCAACCCCAGCAGGGCCTCAGTTGTTAACCTTCCCGTGGCTGGGCTTCTGCGGCTTC
CTCGAAACTGATCTCCTGCTGGCTCCCAGTATCCAAGTGCTCCCACATCCTGAGTCACAAAGGCTCCTTGACCTCTCTT
GAAGCTGAACCTGATGAAACATCCCACTTAGCGCCAAGTTTTCGGCAGCAAGGTGGAACAACCTGGTCCTTCATTGAGA
GCTCTGATTTTCCCAGAAGTGCTCTGGGTACTTGGAAATGGCAGGCAAGGGCACTCTCTGCTGGCCAGGCTGATTCTGC
AGTTTTCTAGATCTGAGACTACCACGAGGTAGAGCTGAGGTTTCCACTGTGGCTGGAGGAGAACCTATTTAAAGGACTC
CAGCATCTACCATGACTCTTCGTCAGAAGCCTGGGGTGCTCAGGCTCAACCCAGAGTTGGCTGCCATTGCTGATGCCAT
AACAAGCAAGAAAACTATGCCATAGCACTCAAGGGACATGGGTATGCCCCTTCCTGAAGCACAAGAATCAATGCAGGCC
AGGCTGTTTCTCTGACACTGACGTGGCTGTACAAGTCTCACAGCAGAGATACCTCGCTGATGTAGAAAGATTGCGAATG
GGCTGCCATTCTCTCAACACAGGGGACAAAAGAAAGGCTCCTGCATGTAGGACTGGGTCCTAGGGAGCGGGAAAGACCG
AAGGGGAAATTAAGGCAGGAGGGATGGTGGGGGCAGGGGTGATAAATCAGTTTCCTGTTGCTCATTGGCTAGAAACAGC
AAGATTTCGCCTTAAGCTTCTGGGACTGAGAAGGCCGAAGTCAGCTTTGCTGGGTAAAGGGCAGGTGTCAGCGGGCCGC
AGCCTTTGAAGTCTTGGGAGGGAATCCATTCCTTACCTCCTCCTGCTCCTACAGGCTGCCAGCATTCCTTGGCTTTATG
GCTGTGTCATTCCAGTGACGGCTTCTATTATCACATGGCCCTCTCCCTTTTTAGGTAGGCAGTTCTCCGTCTCCCTCTT
ATAAAGTTATACGTGGTCACATCTAAGGCCCAACCAGATAGCCCAGAATAATCACTCTGAGATCCATAGGTAAGGCCCC
ATCTGCGAAATCTCCCTCGCAGTCAGAGATTCTGATGGATACCCTGAGAATTCATTACTCAGCTCACGATAAGGAACCA
TTGTAAGCAGAATAGAGGAGGCTGGGAGTGTAGCTTAGTTGTTTGGCTATCATGCATGAGGTTTTTTAGTCTGATCCCT
GGCACCCCCCACCCCCAGATAAAAAGAACAGGTGAGCAGCAACTGAGATGGAATATCTGTGTAAGAAAAGAGGGGGTGG
GACAGACACGAGGGCATCTGGGGAGAAATTTTAGCTGGGAGTCATGACATGAAGGCACAGGCAGGCAGGCAGGCATCTG
CTAGGTGTGGAAAGTCTGTGTCTGTGGCCAGGGGAAAAGGGGACATGAGCAGAGTAAGAAGCAGGAGATGAGGCAGAAA
GGATTCGAGGCAGGACTTATGGTCCTAGGTGTGGGCTGCCTTCAGTGTGCTGGCTTCTGATCAGAGTATGATCAGCAGA
CATCAGATGGCTTTAGATGTAGTGCCTCTAATATTGGAAGAATGAACAGAACAGAAGGGGGTGACTAGAAGCAAAGAGG
ACTCCCCCTAGAGGTTGTATCCAATGGCAAGAGGGTTTCCCATGTTGTGGATCTGGGCTAGAAGGAGAAGGGGGAACGG
GGAGACAAGAATTGAAGCATAAGCCAGGGGTAAGACACAGCAGACTGATCAGGGGGCGGGGGTGGGGTGAAGGGGAAGA
GTTGAATGTCGTTCTGTTGAGACTAGGCATTGGGGAAACAGAAAGGATGTCCCCATCGTGTGTTGAGTTTCTACAAATC
GGCAAGCCTGGGACTCCTTGGGCTCTGTTCTAGGGACCCTGTCAGCTCCAGCACAGGAGGTCCAATCATAGCCTAGATC
AGAGGCAGAACACGAGGTGTGTGCCAGACATCGAGCTAAGCACTGTTCATGGCTCCTCATCTCCCTCAGCCACACTCTA
TGAAAGGTTTTCTTTCTCACACACACACTAAAAAAATGAAATCCACTTTATGGATGGAAAAAAATGGAGAAACCGAGGC
ACAGGGGCATCTAAGCAGCTTACCTGAAGTTATGCACTAAACAGGACAAGTCAGATCCAAGAGTTGAACATGTCTGTGC
ACCCCCTTAAAGCCAAGTGGGCTTAACTTCTGTACCACACTTCCCCCATACAGGACAGGGACCACAGAGCTGATTTGAG
TACAACGTCCCTGCCCACCCCAGCAAAAAGTCCAAGGCTCCAGATGGAGTTTCTTATTAAAAATGGCTCTGCTTTCCCC
TTCTCCTCAGTGGCAGGTTTTATACAGCAGGCAATAAAAAGCCTGCTCGTAGTGCACAGGGGCCTTAGAAGATGAATCT
TCAGTGGGCTTGTGTTTGGGTGACAGGAGAGTAGTCACCACAAGGAGGCACGATGGCTTCTGACCCTCAGGGTGGCGGC
TAAGGAGACAGTTCTGAAATGACACCACCCATCATGCGTGTCCCCAGCTTTTGGAGCTGACTGCTTCCCGACTACTACA
TCCTGGAAGCATAGAGCACGCATCTTTTAAGATCTAGCCAGCCATGGTTCATTTGAGAGTGCTTTTAAGATGACGAATG
TTTAACTAAGATTTTTCCGACTTTAAGTGTTATGGAAAAGTATGCCCAGGTTGTAAATGGATCAGCATGTACAGAGACT
CTTAAGTCAATGGTGCTGAGTATCTTGCATAAATCCTGGGACTCCTCCGCATGCACCCCTGTCACCACCCCCATGCATG
CATACACACCATGCACACATGCTTGCCTGGCGGTCTTTGTTAATTGATCAATGCACCTGGCAGCCACTTCCAATCAGTC
AGAGTTAATGAACAACACAAAACCCACTTGCCGTGCCCACGTTAGATATTCTGAGTCAATTGAGCCGTTAGACAAATAC
CGACTGAAACCTGGAGCCATTAGGAGAGCTGTCGTGTGGGAGATGTCACCTGACTGGGTAAAAGGCCAGCCTAGAACAG
TGCCCACACAGACTCGGGATGCTCTATGCATCTCAAATTTTGAGAGAGAAAGGGAGAAAAGTCAGCAGGGTTTAGAAAA
TGTCCAGCCTGAAAGCCACCTCATAGGGGTAGCAAGAAATATCCCTAAATGGCCAAGGCTGCAGTTTCAGAAGTCTTAT
TCAGCAAATGAATTGCTGGGGAAGGGTACTATGAGAGAGGCCAGGCAGGACACCCAAAGTCCCAGAAAGGGTCTCTTAT
CCTTGACGGTCAAGGTTGGTGTGATTGGCAGCTGCTTGGGATTTAGCTCTGACTTGAATTTTGCCTGAGATTCTTCGTG
TTGAGAGATAGGTCAGGTTAATATTTTTACTAAAATCTCAGTTTTATTAGATCTAAAAGTGAGGTGGGTACGCTGTCTG
CCTCTCTAGTGAATGCTAACCATCTTGACACAGGGTGATGACGGCAGGCCATTCCTAGGGGGCAGAGAAGTCTCACAGA
TGGTCTCTTCAGTCTCTGGAGGAATGCAAAACTCCATAATCAGGGTGAGAGTTTGACAGCGTTGAGAATAAAAACAGCA
GCACAGCCTAGGGACAGTTGGTCCTGGGCAAGGAGATAAAGTGAAAAATTGCAGGGAGAAGAGGGGGTTCAAATGATGT
CAGGGAGAGCTGGTGAGCGACAGCCCCTCTAAACATGAGGCCACCTCCCCGTTAACCCCAGAAGGGTCACAACTGTGGT
TTGTTTCCCAGCCCCACCACTCTTCACAAGAAACATGGTTGGAGGAGGGCAGCTAGATGTACATAAGCTAGGAGAAGTG
CGAGGGAGATGCTTACTGTTGGACCCTAGGCCCACGAGCTGTTCACCTTCGCAGCTCCTTTAAGGCTACAGTTGGTTCA
GCCCAGTAATCTCCAAACAACAGCTGCACTGGGTCAGACAGACTCCTGGGTCGGATAGACCCCTTTGCTGCGGGACTGA
AAGCATTGCGGGTTGCAACCCACAATAGAGAGAGCGTGCAGGGGAGCCTCTCACAGTTCATCTTTCAAAAAGCATCTTG
TGGCCACACACCACTTTGGAGAACACCTCAGAAAGAGTTGCACAAGAAAACAAAGAGGCCAAGTTAACCAGGGCCGCAA
AGGGAATATGCTTCGGATGAGGGTGGCACCCAATCTTCTGACAAGAATGGACTCACACCCTGAATTCTGAAATCCTCGG
CATCTTCATCCCAGGATCACAGGGCTGGTGTCATGGGCAGTGAATGTGCTAGATTCTACACTTTACAGGTGAATGCTGG
GCTACAGAGATAGCTCAGTTTTAAGAGCATTTGCTCCACAATCGTGAAGACTAGAGTTCGAACCTCAGCACCCACATGA
CAGGGCAGGCATCCTCTGACATGCCTTTAACCCAGCTCAGAGGCTGTCAGAGATTGGAGGCTCTTGGACTTGCTGGTTT
CCAGCCTAGCTGAAACACAAGCCTCGGGTTCAGGGAGAGACTCTGCCTCAAAGAAATAGGCGGAGAGTGATAGAGATCA
CCTTATTTATTGCATGTGAACAATACATATATACCCCCCACACACACACACACACATTAACTAATTTATTAGTTAATTA
AATATTTAAAATGTTTGCTAAGCCTTTTGGTCTGGGGAACACACATTGTATCTCCAGTCTCGTTAGCATGCAAAACAAG
TTTTAAAAGCGTATAAGAAAATCAATAATGGTTTTCCAAAAGAAAATAATTGCAGTATATTTTAACAAAGGATTAATAA
AAAGGAACTCATTCTTACAAAACAAAGGAAACATAATAAATCAGTAAATAATAATAACAATCAGCACTCAAAACAATTT
AAAGAGCAAATAAGAAATTTTAAATCTACACTAAAATGTTTTTAAATACATAAAACAATAAGGGACCCTTCATTAATAA
AAATGTAAAGGGTTTATGAAGGCAGGTGCCAGTAAGCTTAGCAGGCATGTTTGTGTTATCCACCACCACGGGACTCAGC
TCCTAATGCCATCGTGAGCTTCCAAGCCTGCAGATCTGCTGGACGGTCACTGTCCACGCCATAGCCGGCTGATCTCAGC
TCTTGGCTGAGCTAGTGCTGGCTGTCAGCTGGTGGGCTGGCTGGAGACCAGAGGGTTTCAGATAGCCTCACCTGAGCAG
CCCTGCGCTGCTCCCTGCGGTCTCTCACCCTTAGTCTGGTGCACACACAGCACAGCACTGTGGCAGGGATGCCAAGAGT
GGGAGCGAGCGTTGCAAAGTCTCTCCAGGGCTAAACTCAGACACTGAATGATAACACAAGTTCTACCCCATGCTAATCA
GCCATACTAACTTGTGAGGCCAGCCTACATTCAAGGGGTGAAACAAAACACCTCTCGTTGGGAAGAAGATGAAGTGTAG
GCAATCAACCAGGGCAAGAATGAGTAAAAAGGGCATTCTCCACCTCTGACCCCATTGGTGGAATCAGAAACCAACAGAA
GGATGTGTGGGAAAGTCGGCCAGTATTACAAAAGCCTTCCAAAACCCTCATTCCTTTCCATCAGTGTTTAGGAATTCAC
TCTCAGGAATTGATTGGAAAAGTGTTAGAGATGTCTTCTTTATCCTGATGTTCACCACATCATGGTTTATCACAGCAAG
CACCTGGGGAGTGCGGAGTATCCGATGCACACAGCAAGTTGTAGTGAGTACTCTGAACACGTGACGTAAATGTGTGTTC
CACTGCCTTCCAGGACTGGGGGACATTCTCTACAGCACCGCAGAAGCCACGGCAGCTGACAGCACTATTTAATGCTTCT
CCGCAGTTGCTGATTTTTTTAAATTAATCCCTTCAATCTCTGAAAGAAGAGAGCTGATATCTCTGACTATAATGTATAT
TTGTCTATTCCTCTCTATAATTCTGTGAGTTTTATTTCAGATATTTTAAATCTTTGTGTTCAGGTGACTACGTATTTGA
CATTGTCACATCTCCTTGATAAGCTGACGTTTCTTCACTATTATATTATACTATTATGTTATATTTCTCTATCTCTGGT
ATTTTCCTTTCTTGAGTGGATATGTTAATGAGCAAATTGTCTTGGTCTCACTGTACCTGAAAAAATGTTTTTATTTCAT
TCTCATGTGGAATTTTTATTGGATAGAGTCAGTTAATCCCTTTCAGAATCTTAAAGATTCCACATCTTTCTGTCCTAGT
TTCTGATGAGAAATATGTAGCCACCTTATATATAATATATCACTTATCCAGAGCGTATTCAGGGACATTGTATCTCAGT
GTTGTAATTATGTCATGTCTGGACCTGGATCTTCTTTTATTTATCATGGTTGGCACACACTAAACTTGAGTCCATTCAT
GTATGTCTTTTCTCAAATTTGAGTAGTTTGTTATTTCTTCAGCTACTTTTCTGCACACATGGTTGCCGGAGACATGAAC
AGTGGACTTCTAAATGTGGTCCTGTGGTCTCTGAAGCATTGCTGGCTTTTCCCATTGTCCAGATTGGATCCCGGCCGCT
GTTCTCATGTTCTCAGGCTCTTTCCTTTGTCATAGAAAACATTGTAGCCCATCTTCCATTTCAGGGTTAACATCTCCAC
TTTGTTCTTCCATCTTCTGTTTCTTCGCTGTGTTTTGTATCTTTTGCTTTATTCTGAAATGGCTGGCCTTTCGTTTTGG
AGCATGGCTAATGTGCCATTTTATCACCTTTGGGTTAAATGTGGGTTGTCATGGTTGGCATCTTTTCTTCTCCAACTGA
GATCTTCCCAGGTACTCTGCTGAGCAGTTCTGAGTGGTGGCCTTTGCGGGGCCCATCTGCTTGCGTGCACCAGGAAGTG
GCCAGTTCAGAAGGAAGACATGGTTTTTCCCCTAGAGTTTGGTAGTCAGACTGTGGTATAAAGTGCATGGGGTGAGACG
TGTGGTGACCATGGGAACTCATTTGCAACTTTAGGGAATTACATTTCGTCAGCCATTTCCTGTTCCTCTGGCCAAAAAA
AAAAGGTTGAAACTTTGTCTTTTCACTCTGTTGGGTACTTTTTATAACTGTGTCTGGGGACAATCAGCAGGAGAGATGA
AGGAGGGAGGAAGGGAGGATAGAGGGAGGGAGAAGAGAGGAGAGGGAAAGAGAGGGAAGGAGAGAGATGGTGGAGGGAG
GGATGGAGCGAGGGAGGAAGGGAGGGAGGGTGGAGGGAGGGAGGGAGGGAGGGAAAGGAGACAGGGAGAGAAAAATACA
CATGCCACTTGTGCCTGGCTACTAACCTCACAGCTACCCACATTCTTGCTTCTGGGCTGAATCAGGAAAATATAGAATA
AAGAAAAAAAAAAAAAAACACAGCAGAAGATGTCCCTGAGACAATTAGGGGTTCCCATTCTCACCCTTCAAGTAGAAAA
TGATTTTTTTTTTCCTTGAGTACTCTTTTACATCCATGCACCTCTGCGTAGGGATGCCTTTGCCTGAGGTGTTGCCAGA
ATGAGAAGAAGGGTAGACCGATGCGGTCCTGTCTCACAACCCGGTCGTTGCCACTCCCAACCCTGTTCTTTTCTATCAC
TGAATTTCCAGGGTCTGCAGATGGGTTTCCCCATGCATTCCACCCCCATGGTTAGATGGGGTAGAGAGAGCGCTTGTGT
TTGTTGTTTGGGTTAGTCTGGAAAACATGAATTATCTGCATATTCAACAGAAAGATCTAAGATGAAGCACGTTCTGCCA
TTTGAACATCTGTCACAAGACGGAGTGCCCTTCCTAGCAGCATTTGGCTAAGAATGTCACCTCCCCCTTTGCAGGTACT
CAGCTGACTGTGGAAATCCACCCCCAAGACGCCATGCCCCAGCTGCTTAAGAAGTTCTCTTTGGCTAAACGTACGTACC
TGTACAGGGCTGCTTTGATCGTCCAACCTGGGAGAAGGCAGAAACATTACTATTTACACCCATTGTGTTAGTTTCTATT
CTTATTGCTCCCATGGCTTTGGGAGATACAGTATACTGTGACAGAAAAAGTTTGGCAGCAGGAAGTTCCGTAATTGCAG
GAGTATGCAGCTGGACGTATCGCTGCCCCACATAGTGGTAAAACAGGAAGCAGAAAATGAACAGGAAGTGGAACTGGGC
TTTAGAGACTCAAGACCTGCCCACCAGTTACCCACTTCCTCCAGAGAGGCTTCACCCCCTAAAGGTTGTACATCCCTCC
AAGACAGCATTAATATCCAGGGACTGGGTGTCCACACACATAAGTTTATGGGAGCATTTCACAGTCAAGTACAACAGCC
AGATGCTACTGTTCTCGGGTCTCTGTAAGGAGGTCCGGGTGATGCGCATAACTAATAGTGCATTCTCTCACCAGACTGT
CACTACCAGGGTTTTAAGATGCCATCTGTAGGCTGCCAAAAACCGTGGTATGCACAGTGCTAAGTACTTCCCATGCCTC
ACCTTCTTGACCTTTATGCAGATGCTGGTATTCGCCCCATGTTTTTTCAAGTCAGCAAAGCGAGGCTCAGAAAAGAGAA
ACGACTGTCCAGGAGAGTTACTCGGCCAAAAGATAAAGACCCAGGTCCAACTCCGAAGCCTCCGATTTCAGCTATAATA
TGTGGGAGGTGTCAGTCTATGTAGGCAGGCAGGATCTTGACTGCAATGACTCTTCATCCCTGCCCCATCTTCACCCTGG
CCTGCCTCTTGGATGAAGGAGGCCTCATGAGGAAAGAGGCAGAGGAGGCTTGAGGCCCCTCCCGCTGTGTCCTCTCAAT
GATGCAAAACCCTCCAAGGCTATATCCTTGCAGAGCACACCACGACCCTTTTTTTTTTCACATAGAAAAGGAGGAAAAA
TAAGTAAGATACCCTTGTAGGATTGTTCTAAACTCCCATAAACACTAACTTCTCGGAACCCTGCCATTCCGTCTGAAGA
TGGAGGAGGAGGGGAAGAAAAGTTCCAAAGAAAAACAGAACCTATTTCTGGGAATGGAAACCACCCTCTCAGCTTTCAG
TTCCTATATTTACAGCCTGAAGTGGCTCTGGGGGCATAAACCGTCGGCCTCGGTGAGCCCACCCTCAATTCTGAATGGT
TTCATTAGACACCATGTCTTCCTGACCTGACTTTGAACCAGCAGCTAAGTCTCCTTTGCTTCTTTCCCAGGGACTCCCC
TGTTACTCACCATTCACAGTGCAGGGCCACCCACTCCAAGGGCTACATGACCTTCTGGGCCCCAAGTTCCATACACATT
ACCTTTTGTGCCCCTATTATCGCTCTTCGCTTAGTCAGTTCTTGTCTTGGCTAGACATAAAACTGCCTACATGTACTGA
CAACTGCCACGTATTATAGCTAGAACCAAAGGGTTTGGAGCTGTACTTGGGCCTTATTCTCTTGGCCAGGTAACTTTCT
TGGACAATCATTTCTCCTACCTGAGCCTCACTTTGCTGACTTGGAAAACACAGGGTGAATACAGGTCAAAAGGCTAAGG
CACAGAAAGTACTAGAAGAAACTGGTTTGTACCTATAGCGTCTGCAGCTATTTTCCAAGATGGCAGAATGCAGAGGAGG
GGTGAACCACAGCTCTGTGCAGGCCTGCTGCAGGGGATAAAGCCTTGAGATCACAGCATGCTCTGACTCAACTCAAAGA
CCATAGCTCCCTTTCCTGTCATTCATCCCCTATTCCCAGTCTCTTCTCTGGCCCAGCAGCCACAGTGCATGGTGGGTGG
GGATGGGAGCAGGGAGTCTGTAAGAGCCAGCATGAACAGGGAGAGTGGCCAGGACTACTACCTAGAAAATCGCCAGTGC
TTGCTTTTCTGTTTCTTCTGTGGTATCTCTGACCTTTGGGATATTCCAGGTTTACAAGGTGATAAAAATGGAAACATGA
GACCCCGGCAGCCTGGAGGGAAAGATGCCCACGGTGAGTCCCAGGCCTTCTCTGGGGCCTCTTTAAAAAAAAAAAAAAG
CAGTGAGTTGGCCTCATGGTCCAGTCTCCAGCTGCCAATTGGTACTGGCTTGCTGGGACATCAAGAGTCTGAGACCATC
TGTGGATCTGGGAGAAAGAGTGTCCTGATTGACTAGTAGTGTTGGCCACAGACACAGGTGAAGAGGGAAAACTCTTATA
TCATCCCAGCGCCAAAGAGTAACCCCTTTCTGAGTACAAAACAGTCTACTACAGAAAATGGTGGACCCGGGATGCAGAG
TGATGCTAATTTGGAGCTGGAGACGTAGCTCTGCTGGTAGGGTACCTACCTACCTAGCAGGCATGAAGCTCTGGGACCA
GTTCTCAGAACCACATCAACTGGGTATGCCAACATACTCCTGCAATCCTGGTACTCAAGAGGTGGAGGCAGGAGGATCA
GAATTTCAAAGTCACCCTGTGCTCTATGGAGAAAACCAGCCTCAACTGGAGACCCTATCTTTAAAAAGAAAAGAAAAGG
AAAAAAAACAGTAAAAACATAGATGAGGGACTTGGAATACAGCCCACTGGCAGAACACTTGCCCACCATGTGCAGGGGG
TCAATCCCCATTGTGACAAAAAATACAAAGCAATAAATAAAATGGAGTGTCAAGTGTTTACACGGTAGGAAGCTTGTGG
GTAGCAGGTTACGGCAGAGAAACACTAAATGGGGTGATATGAGGTGATAGATGGTCTGGATTGGAATCCTGCTTTTTCC
TCTAATTTGTCTTCTCTAAGCCTCAGTTTCCCCCTTGGTAGGCCGGATGCTAGCAGTGGCTCCGTGCACACCTGCCTAT
TTTATTTGGCCTCAAAATCAGAGTAAGTTAATTAATGTTCCTGGTGTTTTAAGTATCTTGCTATAAAATCATATTCTCC
TGTTTGACTCTTACATAATCTGCTTGGAAGGTAGATTTAACGAGGCATGAATCACCATGGGTATTTTGAATATAAAATA
TCAAATATTGTAAGAATGGAACCAGGGAAAGAGGAACTAATAAAGTGGAAATTTTAACACCATTTTAGAAATGCCATCC
TTCTAAACAGGAAGGCGGGGAAGAGCTGACCTGAGCGGCAGCCTATGTGATGTGAAAGCCCACCTGATGCCCACCTGTC
ACCGTGGCGCTCTTATCAGGCAGTGACGGGAGGCAGGCTGAGGAGAACTGAGATGTGAGGCACTCAGCAGGAGCTAGCC
AGTTATTCCCCTTCTGGTGGGGGCGGCTGAAGTATGGCTGGGTTTCGGACCACACTAGATGGTTATATCTGCATTAAGA
TGCCCCAGGTCCAACTCTATGGGTAAACACAAACCAGGATGATGTCACCTCCTGAATCCCTGATCTGCCTCCCAGAACA
GACTGGGGCACTCCTACATCCAATTGGAAAATAGAGGTGGACACTAGCCATAAACCAATATCAGCATCCTATTCTCTCT
CTCCCTTTCTACCCCCATGGCCTGACTCAAAGTCTGGGTGCCCTACTGAGACCCTGGTGACCAGCTCTACCAGACTTCC
TTACACCTAGCATGCCTTGTGGTACCTTACACCAAACACTTGGCCATGGGTCCTCCCCGATTAAGAATACCAGGGGCCA
GCAACACTACTTACAGAAAGTTAAAAAAAAAAAAAAAACCTTAAACTAATTATCAGGGGTGGGAAAGTGGATTGCATCA
TCCTTTCAGTAATTGTCTGGGTACAATTGAGTCAGCCAAGGTTTTTAATGCTGAATCTCCAGGGTCTTCAAAATAATCT
CAAGTTCCCTGTGAATCTTCAAGATGACCATAGGGGTAGTCACAGTTCCTAGGCAACTTTGCCCAAACAAACGTTTCTA
GGAGGTACAGCTCTTGGAATGAGTGTGTTGGTGTAAGAAAGGTTAAAGAGCCATGGATCCTCCAAGTGACTATTAGGAT
TGGGCTCACAGCCCTCCTCAGGGGTCCCCCACCCCACCCACCCCCCGTACTGACTTGGTTTCCCTGTGTTAACAGCCTA
CCCCTGGGACAGATCCAGTTTGAAATCCATGCCCCTGGACCTCCGGCTCTTTGAAAAACTGGATGCCTCTGCCTCACAG
GTAGGAGAATTGACTCCCTTGGCTAAAGGCCCCAAAGGTGACTTGGAGTTCCCCAAGTCAGGATAAAAGAGCCTACCTC
CAAGGCCTCTCTTGATCATACACTGAGTAAACCAGATGGATGGTCTATGGCTGTCCTTTCACAGTGTACCTTCGTTACT
TTGTAATGGCTGTGATCAAATAACTGGCAAGAGGCAAGATGATGGAGGGAGAGTTTGTTTTGGCTTACAGTTTGAGGAG
GCACTGTGTCTCGGGGCAGGGAGGGTATTGAGCGTGAGGTGACTAGACAAATTGCAACCCTAGGCAGGAAGAGAACAGA
CAGGAAATGGAGCAGGCTATAAAACCTCAAGGCCTGGCCTCCAGTGATCTACTTCTTCCAGCAAGGCTCTGCCTCCTGA
AGGCTCCACAACCTTCTCAAAGAATGCCACCAGCTGGGGACCAAGTGTTTAGATACATGAGCCTATGGAGGACCTTACA
CATTTCAATACCACCAGTGTGGATGCGGAACAGGAAGCCCAAGGGTTGTGTTAAACCCATAGGCAATGCCTTAGTTACT
TTTTTCTTGCTGTGACGAAACACCATACCTTGGGGAGAATAGGGTTTATTTCATCTTATAACTTATAGTCCCTTATCCA
AGGACATGGAGGCAGGAACTCAAAGCAAGAAGCCTAGAGATAGAAACTGATGCCTAGGCCATGAAGAACACTGCTTACT
GGCTTGCTCCTCGTGGCTTGCTTTCCTGTAGCACTCAGGACCACCAGCCCGGAGATGACAATACCTCCCACGTCATTCA
TCAGTTAAGACAATAAGACAAGCTTGTCCGCAGGCCAATCTGGTGCGGGGTATTTCTCAATCGAGATTTCTTCTTCCCA
AATGACTCTAGCTTGTGGCAAGTTGACATAAAACTAGCCAGCGTAGATCAGGTTTAGTAAATCTTAACCATGACCACAG
GCTGCTGTAGCTACCCGAATACCTGCCTGGCTGGTCCCAGATGGGAAGAGGAAAGCTGAGGTGGCTCTAGCACCTGGGC
TTCAACTGGCCAGCACACATGCCCTGTCCAACTCCCCTAACGCCACACTATTTATCCCCCACCACCCTCTGCCCTCCTG
GGCCCCGTTCCAGCTTCCTCACTGGAGAAAGAGTAGCTGGCCAGATTTGGTGGGTGTCACACTCCCATCCTCCCCTGAC
CCCCATAGAATCTGATTTTTCTGCTCCCAGGTGACAGTCAAGAGTGGCCTGAATGAGCTGGTGAGTGACTTGCTCCAGG
AAGCCCACAGCGATCTGGAAAGGGTCAGAGCCATCTGGATCTGGATCTGCCACCATATAGGTATGCCACCATATAGGTA
TGCCACCATATAGGTATGCCACTAAGGGGGTAGCACCGGGGACCCTGGATGCCCCTTCCTTCAGATCCCTGCTTCTGTT
GCCTCATCAGAGTGAGGAGTTAGGTCAGGGGGACGTGCCTGAAGTAACCAAGGAAGGTAAAAGCCACCCTTCTGAACTG
GGCCTTCACCCAGAAGCTGACCTCCCTGGGTCCAGGATTCCTAGTAAGCCCCGCTCTACAGAGATGAGAACCCAGGACG
GCCCATCACCAAGAGGGTGACCACAGACTGAGGAGGACACAGCTGTATGAACACCAGAAGGTCCTAAGACAAGTGCCAG
CTAGGGCAAGTGCTCATATTCCTGTCTCCTGCTGTCCCACCTGTGTCCCCGGCCGCTGGCTTCCACCTACTCCCAGGGT
TCTCCAAGCCATCTTAGAAACCTGGGCCTGAGCGGCTGCCCACTGCTCTCTGAGAGACAGTTAAGGGAATCTTGCCAGG
TCCTGACAAGTCACAGGCTTCCCTTGCTGAAGCCTGCAAGTGGGGGAGATGGTGGCCAACTGAGTGGCGGGGTGGACCC
TTGTTCCTTTGACATGAAGAACAGCCAGTGTCCCACCTGGATTCCCCGAGGCTCTTCTTTGTCCTCCAGGTGCAACTTA
GAAAATGTAGTCACCCAAGGTCTGAACCTGAGGGCGGGTGCCTCCTTCCCTACACCACCACCAGCTTTCTTCCCCCTCT
TAGACAAGGTTTCATTAGGCAGCCCTAGCTGGCCTGGAACTCACTATGTAGACTAGGCTGGTCTTGAATTCACAGAGAT
CTATCTGCCCACCTCTACTTTCTGAGTGCTGGGATTAAAGGTGTGCGCTATGAGGACCAGGTGGTCCTCTCCGCTTTGG
CCGCGATGTCCCTTTTGCCACCTACACAAAAGGTGACCACATCTGGCTAGGTTGGGGTCCTGTTTCTGTTCATGCCACC
ATTTCCTCCTGAGCACAGCTGGGGGGTGAAGGCTATCCTATGGGCTCTGTGGCTTTCCCTTCCTCACTGAGCCATCCTC
GTGCACCTGGGAGCCTTGCGTGCCCACAGCCGCCTCCTCTGTCCTCCAGAGTACGACGTTGAGGCTGCCCAGGAGAAGG
ACCGCCAGGCCTTCAAACCCACTGACATCCTGAGGACCCAGAAGACCAACTGTGATGGTTACGCCGGCCTCTTTGAAAG
GATGTGCAGGTATGAAAGACAGCCTGTGATAAGCAAGAGTCCCCGGGCTGTCACCCGACTGCCTGCTTCTTTCTTCTCT
TTCGTCCCTCTGTGCCTCTGCCCCCATTGCCAGGTCTGGAGCTTGAGTTTGCAAACTCTGCCGGGGAATCCAAGTGAGT
CCTGAAAAGGTCAATTTCTCCCTTTTTAACACCAGCGTAATTGACTTTGGACCATCTGCCGGGCTTCGCCATGCATTAA
CATAATGGCAGATGAATGCACAAAGATAATTTGGTTATAAAAGGCCCCTTTTCTGCCTTCTCCCTTCACTGTGCAGCTG
AAGGTTAAAAGAATGGCAGGCCTGGAAGCCAGAGGACAGTGGCCGCTGACGCCAAGGAGACTATGAAAGGCTGTCCTTT
GAGGAGGGAGAGGGGCCGTGCTTGGAAAGATCCATTGGTAGGAAAGCTCAGTAGCCAGGAAGTGGTTCTCTGTGCCTTG
GGGCCCCATTCTCAGAGCTATGGCACAGACACAGGCCCAAGTGGGAGAACTGGCTGAAGTAATTCTTGGTAACATCAAG
ACAGTCTCAAGTCCGGGGGAGCCATACGGATGGATTTCTGAGGTCACCTGGGTTCTCCTAGGGAACAAGCAGGAAGTGA
GTGATTGGCTATGTCCCTGAAAAGCTGTGAGTAGGTCTCAGATACCCAGTGTCCACCTATCGGGACTGCAGGTGGCAGT
TGTCAAACCACAGTAACAGATGCTCTCCAGTCGAGCAGCTGGCATGGCTTAGCGTTGTGCTGCTGGTCCCCTGTGGCCT
TGTGTGCACTTGTGTGTGCCCTGTCTTGAGATGCACACAACCCATTCTCGGCCTGAGCTCCAGTGCCTCCCAACCCTGT
ATTACCGCTTCCAGGTATAGGCAGATACCTGGTTCTGGGTCCCTCTAGCCCTCCTGCCCAACTCCCTGCTCCAAACTTC
CACTTCCCATCTCTGGGACCCTAGCCTCAGAGACAACCTGGGCAGGATCCATGCTGGCTGACCCACTGTTCTCCCTCCA
GCAGTACCTTCTACTTCTCCAAGTTCCCAGTGACATCCCCAGCCCCAGAGCCAGGTGCCCCATTGTCTTTGGGCATCCC
TGTCCCTGGGTTCCCAGTGTCTTTCAAAGTCCTCCAAAACTTGACCTCAGCCACCTGCTGGCTCTGCACCTCGAAGCAA
CACTCACACAACACTTCCGCTTCCGCTTCCCATGAGTGCACAGCCCTTCCTGGCATTTCTCTAGGCCCCACCCCAGAGC
CTCCTTCCTATCCTTTGACATCTGACCTTGTCTACTAACTTGTGTGAGTTACATTAGGTTTTCATCTTGTAGCTCTTTA
CTCCAGGTGATGATGAGGAATCAAATCCAGGGCCTTTCCCAGGGAAAACAAACAATCTACCACTAAGCCTTAGCCCTCC
CATGGTGCTCCAGACAGACTCTAGCTCTGTAGCTCAGGCTCGCTTTGAATTCACTGTGTGGCAAGGCTGGCCTAAGTGC
TGGGATTATGGGTATGCAACAACTGTTCTGCTAATAATTTTTTTAACTATATTATGTTTAGTTAGTTAGTTAGTTAGTT
ATGCCTCTGTCTCTCTGGGGGCGGGGGAGAGGGGAGGCATATACATGTCATAGCATTCATGTGAAGGTCAGAGGTCAAC
TTTCAAAAGTCAACTCTGTCTTTGTAACATGAGGGAATTGAACCAGGCTTGGTGGCAAGTGCTTTTACCCACTAAGCCA
TCTTGTCAGCCCACTAATAACTTTTTTGAATTAAAAAAAAAAAAATGCTTTCTGTAAATAGTCTCCAAAATGTACAAGA
CAAGGAAAACAACTAATTGGCTCTGAATCACCTAGGTAGAGTTGAGATAGTGACGCCCACGTGCCTTCCCAGGTGATAG
TGACACCCATGTCCCTTCCCAGGTGACAGTGACACCCATGTGCCTTCTCTGGCTTGTTCTCAGCACAGTTCTCTCTATG
TGCCTTTCTTCCTGTGTCTTAATCCCCCGCCCCTCTTCTGCCTCTCTGAGAACATCTGGCCCAGAATTCTCCACACAGT
AGACCCTCAATTGGCATTTACACACAGTAGGCTTTTAATAGGCATTTTCAGAATGGTGAGAAGCAAGAAGGATATGCCT
GGCAGACGTGTGTGTTTTCTTTTGAATAACAGAACACCACCGGGTTTTCAGTGCCTGCCTGGCATCTTTCAGAATGTGG
TTGTTTTCATAGGAATTTGTAAATTTGAAAACACTTGGATTTCTTTTTCTTTTTTTCTCATGATGGGTTTTGTTTTGAG
GTTTATTTTTTTAAGAAGTATTTATTTTATTTTATATAGAGGAGTATACTGTAGCTGCCTTCAGAAGAGGGTATCAGAT
CCTATTACAGATGGTTGTGAGCTACCATGTGGTTGCTGGGATTTGAACTCAGGACTTTTGGAAGACGAGTCAGTGCTCT
TAACCACTGAGGCATCTCTCCAGACCCTGGATTTTCTTTCTAGTTGATTCATTCTTTCACAATTTCATATGCATATTAT
ACTTTGAATGTCTCCCCCATAGTCCCCTCACCTCCTTCCCCTCCCACTAAACCCCTTCTTCCTAACAGACTCCCCCACT
CCTATTTTCATGACTTTGGGGGCCACTCTATTTTATTAGGGTTGTCTACAAGAGTAGGGGTTAGTTAAATAAGGGTAGC
TTACCACTGAGAAATTTGGCTCTCCTGCCCCCCCCCCCAACAACCCTTAACTGCCTAGAACTTCCCAGAAAGGGGTGGG
GCCTCATGAGCCCCGCCCCCATCCATCCTTGATGGACTCACCAGCTCTGCCTCCTCACTGCAGGACTCCTGCAGGTGGC
AACAGTCTTGAGTCTTGCAAGCATGTCTGTATGTCTCCTGAGTCTCCCGGCTCACTGTAGATGTGCCACAGGTACAGTC
AGAAAGACCAGGGCCCCCATCCCTAACTGACCACTTATGAGTTTTGTTCATTTAGGTAAGGCAGCTTCCTTTCAGGCCT
CGGTTTCTTCATCTGTATTTTAGGGACTGTATTGCTTTCAGGGCGGAACAGTAGAGCATGCCACGTGGAGGTGCCGCTC
AACTGACTTGGGAAATGCTATTTTTTTTTAAGACTTGCGCCATCTTTCATAAGCATTGGAGCATTTTTGCGGAACTTTC
CTACTGCCTCTGCTAGCCCACCCACATAGATCCAGAAAACTGACGCTTGCCTTGATTGACTCTGTCGGCTCTCTGACCT
GTTCCAGATGCTTAACAATGGCCACATCCTGCCCTGCAGCTCATCATTAAAATACACCCCCAACATTTCACATCAGTTA
AAGTTAGTCTCAACCTAGCGATGACCATGCACAAAATCCCTTGCACTGCCTGGGACACTTAACAGTAGCTCAGGGTTCG
GTGAACTCCCTTAAGTGTCGCCTTAAGGATCAGTAACCCATTCGTGCATGGCCTCCCTAAGCCCCTTGACCCCTGGAAT
GGCTGCCAATCATTTGGTAAATTCATTAGTTGGTTCCTTAATAATTGCAGACACGCAATCCACACCTGCTTATTGAGTC
TGTGGACTGCCAGGGTGGCCTCTTAGAAAGCGCCGTCCTCGGAAGTCCTGCCTAATGCTCTGCTTCCTGGCCAAGGGCC
TCATTAAAGACTGATTTAACAGAGCAGTTTGGTAAGGACTTAGATATTCCCAGGCATTCTCTGTTTCCCCCTTTGTCTT
TCCTACATTTCCGATGTGGTGTGTTTTGTTAGCTCTCTCGTCGCCCCGTGTAATTGCTGGTCCAGTTTCTTCCCGGCTT
TCTATCATTGAGCAGTAAGTCTGTCTTCAGCCCCGATTGCCCACAGCCTTAATTGATTCTGCCTAATCTCCTTGCAGGG
GCCAAGGTTAATTCCCCAGGCACCTGCCACTGAGTCAGCCTGCAGTAAATTCTCTCCCCCACTGTAATCATGGCCCCAG
TAACACCAGCCAGCAAATTTTTCCAGAGATTTGAGGTAACCGGCGCTTTATTGCCAGTCTGAAGCTTTGGCACTGAGCA
GGCTGGTTGTCACCAATCATATGTCAGCTGCATTTCCATCCATCTTCCATGACATCTTCTAGTCCCGTGAAGAGCAAGG
ACAGAGGCATGCCTGCTTGGTTAGCTGCTGGTGGCCAATGTGACCATAGTGGCCATCCAAGCCTCTAGGGAGATTCTCC
AGGAGCTGGGTGGTCTTTCTTATTTTCTTCTTTTTCAGCAGTATTGGAGACTGAACCCAGAGTCTTATATATGCTAGCC
AGCTAAGAACCCTATCACTGAGCTGCCTCTCCGTTAAGTTTTTGAGTCAGCATCTCTCTGAGTTACCCAGGCTGATCTT
CAACTCACTCGGCAACTCAGGCAGACCCTGTACTTGTGACTTTCCTACCTCAGCCTCCAGAGTGCTAGAACTAAAGTAC
TCCAGAGTAGAGAGAACTAAAGGCCTGCATCCGCCCAGAGCTGCCTTAAATAATTTAATTATTGCCAGCACTGACTTTG
TCACATAAGGCCTCTGAAAGGGACACCTAAACTCCCCCTCCACTGTGGCTACACTGGAGGAGGATACAAGCTCGAATTC
TTTCTCGGATCATCTCTTCATTTCATTGTATATCACCTACAGTCCTACATATGAAAGCAGGATGTTGGTCTGCAAAAGT
CCTGACATAGTTTGAAAGCTCTCAGACTGTGTCTCAGGACTGCTGGACCCCAGGATTGTCTTTACTTTAGCTGGCTGTG
TGTCACCAAGTCAGGTAGCCTTTCTCTCAAAGCCACAGTTAGACAGGAAACCTCTGAGATCATGCCTAGGAAGCCAGAG
GTGGACAGGTGTGTGGCAAGGATAGAGAGATACCTAAGTTTATAAGAAATCAAATCCAAGTGTTGAGAGAGATGCCGCT
GCTTATGCCCTGCTTAGAAATCACACGCCTTCAACAAGATAATGAAAGAAAAGAACGTTTCATTTAGCATGGTCAAAGG
CTGCTGTGCGCAGTGTTCCTGCCTGCCCAAGCCCCTCACCTACACTCCCAGCTTCTCACAGGCTATACCTGTATCACAT
AGCTCCTGTGGCAGGGCCTGGACCTTATCTGTATCAAACAACCATCAAGGTCTGGACTGTCAACTCCTCACTCTGTACC
CAGGGGACACACCACAGCAAGCTGGTATGCTCAGATCTTTGATAAGTGACAAGGAAATGTGCTCATAGCTCCAGAAGCC
AGCCAAGGTCACTAGGTAATGGCACCTTCCATTTGCCCACCCCTCTACTCAGTGCATATTCATCAGGCTGCAGAGGAAG
GTCAAGTGTTCTTCAAAGCCTCAGATCATTGGTTGGGTCCCCGAGCCCCAGCCCTGGCTGGGAATGGGCTGCTGCTTGC
TCCTGATGTTCTGGGTGTCGCAAAAGGATTGCTCGTGAGTCCTGCATGCAAGCTGGCTTTGCAATATCAGATGCACATC
CTCCCTGTGCTAGTGCCCCAACAGTGGTACTGTCAGGACTCTCAGATGGAGAAGCAGGATTCTGCAGCCTAAGGTTGTT
ACATAGACAGACGGCCTTGGGCTGTGTTTGGGGCTGGCTAGCCAAGCTACTCGGCAGGTAGAAACATGTCTCACCTGAG
ATCCCTTCTTCAGCACTTTTTTGCCTCAGTCTGGTGTTTCACAGATCCTCCTGCTTCGCAAGCACAAGCTCTTCTAAGG
CAGCCACTGAGCCTTGTGTTGGAACAATCTCTCACTGTGGTTCATTGTGTGTCATGTGCTGCCCCCCCCCCTTCACACA
CACACCCACGCCCAGTGCCGGTTCTTGTGCTTGACACACCATTTGTACGGTCAGAGCTCTTTCAATGATGTGAAGGGGT
CACGGATTGTGGTCTGATCAGGAACCAGAGAGGCTCGATAGATAGTTCTACAATCAGATAGATAGTTTTATGCCTGTGA
AATATTTAATTTATATAAAAACTACGGATTACTGACAACACTTTACATTGTGACTTCTGTCCAATTCATCTTACACATA
GTTGTCAGATAATAAAATAACCCCATGTCATACTCCAGCAATGCATAAACTTACAGCTGACTTCATTTTTCATCTTAGT
TCTGCCACAGGCAATCCCCACGGCCCTTTCTCCTTCTCCTCGGTCTGTCAGAGGAGAATTGCCCCCTGGAGATCACTTA
ATGCCAACCATCCTTTTTAGCCCATAATGAACCTGGCAAGGTCACTGCAGGTGACTGGTAGAGGTAGCAATAGAGTTCT
GATTTCCTGGCTGCGGTCAATGGCCACCCATTCCAGCTTGGAGCAATATAGGTACATGTCACTCATCCTTTCTCCCTCC
TATGGCTCGTTCCTGGGCTGGGCAAGACCCTTCCCCACTTGCTTCTCCTGGGTGGAAGAATACCTCCCACTCACTGTTT
AAAACAAGCTTCCCCCAGTTGGAGGAGACACAGTCTGCCTACAGGAGAGGCCAGTTCACTCCAGCACCCAGAGAAGATG
TGGATGCTAAATGCTCCCCACTCCTTCCTTGCTCCTGATGCTCTGAGCAGAAAGCAAGCACCAGACAGCAATCCAGACC
CCAGCGTTCCACTCACCGCTTGCCCTTCCTGCGAAGTGAGCCATTTGCAAACACAAAGGTTCCCAGGACTTCCCTTTGC
CCTCCACACCAGGCTAAAATTTACATACACAGTGTTTTCGAGCAACAATGGGGAATAATTCACTGAAGAATATAACCTA
AGTTTTCCCAATTCTATAACGAACACATAATCATATTTTAAAATGTTGTCGTGCTCCCTCCCCCGCCCCGCCCTGCTTC
TTTTTACAGTACTGGAGAGAGAGTCTTCGCTCTTGCATGCAAGGCAAGCACTCTGGGCCTGACCTACAGCCCCCCCCCC
AAAAAAAAGTAAGATGCAGAGGAATTTAAATAAACACACCTATAACCCCATTTCCGAGGGATCAAGAATCTCTCCCTAC
CCAACCCTGCCCTCGTTCTCCATGAATATATATATTTACACTCAGAGAGACTGTCTGCCGTGGCTTCCTGCCTCAGAAA
GACCTTCTGTTCTGGGACTCATTTTGGACCGTCACCAGTAGAAAACCCTACCACCAGGGTCTAGCAACTCTTGGTGTTT
GTCAACAGAATGTCCCCAAGTGTTCCTGAAATAACTTCACAGGGCCCAGCTGCTATAATATCGTGAGATTCCCTAGGGA
ACCCTGGAGACCTAACGCCTCTTTGGCACTGCGGACAGGAGGGGAGGGATTTAATTTAATTGATCATATAGTTCCCAAA
TAAAAGACACAAAACATTTATATTTAAAACAAGCTGTAACAGCACTAGAGCTGGGCAGATATCAGCCCTCTGTGTTATT
TTGTCTACTTCCTTGTCAATAACCCAGAGATATCACTTGCTTTGTTCCCCCTGGGCTGCTCCTACTCCAACTGGCTGGC
CCTCATGGCCATGGGGTCATGATCAGCCTACCTCATGGTATCTTCTTCCTCCTTCTCTCCTTGTGGTCTCTGCTTCAGA
CTCCAAGCCCAGAAACCAAAACCTGCCTACCTCTCTTCTGCCCAGCTGCAGGCCGTAGGCGTCTTTATTGACCAATCAG
GGATAACTTGGAGGGCAATGTTACATAGCGCCAATTGGGTGTACAATGAGGATTTCCTCGTCTCTGGAGGCAACCAGAC
GTTGGGGTTCAGTACTCAGCGTTACAATATGTAACAACAGACCAAACCTCAACAGGGACCATCAAATGTCACCCCCTGA
AAGGAGTCTCGGTGTGAGTCGCCTCAGCGTGGCTCTGCAGGGAAAGGAGGGCTACAGCGGATGTGGTGACATACCACCA
TCGTTATCTGCATGTGATGCAATAAGAGAAATGAGAATCTCTTCATTTTCATGCTACCACATTTGCCCCAGTGACCCAG
CAAATGACGCATAAGTGTACGTCAGTGACACTCAGTGTGGCCTTCTACTAAATGTGAGCTAAATACCCATCTCCATGGG
CAAGCCTCTCCCTACACTCACAGTCAGTATGTGATCTTCTGACCCCATTAGTCTAAGACCCTGTTGTTTAATGGGACTG
GAGATTCAGACCCAATGCATCCTGAGAGTGACCAGGCCCGGCTACCTGATGTGGGCCTCAGAGAGATGTTCAGGATCAG
CACTGTGTGGAGGGTGGGTAGTTGTTGAGGTGCAGATGGGGTTCCACTGACGAATCACTTTGGGAATCCAGGACTCAGT
AGACTTGTGAATTTATTATACCAGTTTTCACAAATGCAAGAAAAGTGTTGGGGCAGAGCAACTCAGCACCAGGGCCAGC
AGGCCCGGGGCCAGCAGCTCCATGTAGGTCAGACTGGTACTGTCCATTTGTCCATTGCCATGTTGGGGAAGAGCTGCTG
AAGAGAGAGGCCAGTGGGTGGTGGGGAAGGCAGGGCCCTCAGGGGACTTGCTGATTCAGCCTTTGGAGTGTTGGCCACA
GCCCAGACCTGGTTTTATGAGGTCTCTAAAAGTGACAGGCACTCCATCTCCCACAGTTCAACTTTCCCCAAAGTGATAC
CTGCATTGCTGCGTGCCATGGGGATACCCTGTCAAAAAGACAAGGCCAGCCAGTCAACGTTTCCACTCCTCGAGGAGCA
GGTAGAGACTTCAAAATGGTGGCTGTCTCAGTCAGGGTTACTATTGCTGTGATGAGACGCCATGACCAAAGCAACTTGG
GGAGGAAAGAGTTTATGCAGCTTATGCTTCCACATCACAGTTCATCATCGAAGGAAGTCAGGACAGGAATTCAAACAAG
ACAGGAACCTGGGAGGCAGAAGCTGGTGCAGAGACCATGGAGGAGCCCTGCTTAGTGGCTTGCTCCTAATGGCTTGCTC
AGTCTGCATTTTATAGAACCCAAGATCACTAGCCCAGGGGTGTCGCCACCCACAATGGCCTGGGTTCTCCCCTTATTAG
TCATTTAGTAAGAAAATGCCCTTTGATCTTGCCTACAGCCCGATCCTATGGAGGCATTTTCTCAATAGAGGCTCCATCC
TCTGATGACTCTAGCTTGTGTCAAGGTGATGCAAAACTGGCCAATGCAGAGGCCCAGGCAGGTAGTCAAGGAAGGATAT
TAATGCACCATGGTGCTTTCTGTTCCTTCCTCATGGAGGCCAAAGCTGATGGTCTGGTCTCCTGGCAGCCAGCCCATTC
TCCTAGGTTGGTTCTGGACCAGTTTGCCTGCCTTCCCAAGCCCATGCAGAGGGGAACAGCCAGGAATCAGAGCTCAGCT
ACCTCCTCTCTCATCACCAGCACCTGCCGGAGGTATGCTGGCTTCCCCGCCTCTGTGTGCAGCTCTTTCGCATTGGTTT
TCTTCCAAGAACATCTCTGTCTCCCAGCTCCCTGCATTCTCGAGGCCGTCCTCACTCTTGTCCTGATTTTTCCTCCTGA
GATGCTGTACATCGGATCATGGCAAGCAGGCCCTGGGGAGACACTTCAGAAGTAAGCTGAAGAGTCTCAGGGGAATAGC
AAACAACAGGGCTGCAGTCAGTCTGCACGGGCAGGGCCTGCCAGCACTCTGGATCCCTGTCCACACACCCCTAGCACTC
AAGCCCCTTCTCAGACCCATGTCCCATCCCCAGGGTTGCTGGTGTGCAGTGTGTCACCGTGCCTGGCTACTCCAAGGGC
TTTGGCTACCAGACCGGCCAAAGCTTCTCCGGAGAGTTCGACCACGCCTGGAACGCTGTGTACCTTGAGGGTCGTTGGC
ACCTGGTGGACAGCACCTGGGGCAGCGGCCTGGTGGACACCACCACCTCCAAATTCACCTTCCTGTAAGTACGAAGCTC
AGTTTTGTCCGTGTCTTTCCTATCTGTGTGTGGGGTGCAGACAAGGTTGAAGAAGGGAGGCATGTGGGGGAAGGGAAGG
GCCAAGTGTTAGAGGAAGACCGGACAGCCTTGCCTAGCTACTCTCGCCTTCCCAAAAGCTGGTTCCAGGTCGCTTGCAA
GGAGCTGAATTTTCTTGTCACCTCTGCCCTCTGTGACTCCTCTGACTCTCCATGAGTCCATAAAGCTAAACCCAGGAGC
CCCTCCTGTTTGCCCCAGGTCACATATGAGGAGGGGCGAGGCTAAGGTGCCTCCTTTGTGCTCCATCTTCTCCTCCAAT
TCCTGTTCTCTGAAGGAGGAAGAAGGATGCAGTTGGCAGAAAGGAGAGGTGTAGGTGGGGCTAAGCCACCTGGGTCCTT
ACGGTGCAGTCTGGATCATCCTCTAAGGCTTGTTCAACCCTGAACTTAACCTTCAGCCAAGCATGGCATTTTCATGGGT
CGTGATGTCCCTCAGCAGCCTAGATCCCCCTTTATTTGGGAAACGAACTGTTTCCTCCAATGTGTGCAAGTGAAACTTT
GGCCCTCCACACTCACCCTACATAGAGCTGTTACCCTCAACAGTGCCCCCCTTAGGCGGAGCAAAGCCCCCCAAGCCCA
GGCTGTCTCCCTTTCCTTCTCTTTGTCTCTGTCTCTGACCAGCCCTAAGGAGCCACAGAAGTTCCCCTGCTGCATACCC
CCTTCCCCCTGGCACAGGGGCAAGAAGGGTCCAGCGCAACTAGAACACTGTCCCCTTGCCTCCCTACCTCCCCATCCTC
TCGCTGTCCACACCCGCTCTACGGATCATGGTTTTGGTCCTTTCAAACCACTTTTGGGCATTAAACAGAGAGAAAGCTG
TCCTTTCTACCTCACCCTATCCATAACCTCCCAAGGCTCTGCGAGCAGGCCCTGAGTTCATGCTGTGGCCTTGTCTCAG
AAGGGACCTCAGATCCCCTGTGGCCCCAGGATCTGCACACAGCCACCCGAAGAGTCTCCAGTGCCCGCATTAGGACCAC
AGATCGTCCTGCCGACAAACTTCTGTTATCAGCAACACCCAATCCAGTGGTTGGGTCAGCTAGACAAAGATTTCCCAAA
GCTCCCCCGTGAGATACCCGGATGTGGGTGATAATGGTCAGGCCTACTCTCACACCCGGCTCCTAACCAGGTCTTCCTC
TACTCCAGCTACAATGAATTCTACTTCCTCACCCACCCCGCCCTGTTCATCGAGGATCACTTCCCAGACAACAAAAACT
GGCAGCTGCTGAAGCCGCCCCAGTCTCTGAGGCAGTTTGAGAACAGCATGTACCACAAGAGTGAATTCTACAACAAGGG
CATGCTGAGCGCCCACCCGGAGACGTCCATGATCAGAACAGGTAAGGAGAAGCACAAGGCGGAGCCCCAGTGACGGCTG
AAGCTCCCTTCCCACTAGAGTAAGCCAAGAAAATCAGACCACCAAGCTTAGCTATCTTCTATGGCCTGAGCTGACACTC
ATCGCCCCTTGACACAGCATGGAAACCATGGCTGCTGGGCGTTTGCAACACTCTTAAGGGGCAAGGCCTGACCCCAGGA
CCAGACCCCAGGCAGAGAGGATAAAGAAGTGTCATGGACCTCAAAGGACTCCCCCTAAAGGACTGTTTCTCATGCCTCT
CTGGGGATCCAGAGCCTGGTCCTGCTCTTGGCGCACCACAGCAGGGGTCAGGAAGGCTGACCAGCCCACCTCCCCCTTC
TCATCAAAGCCCAACCTGACAGCACCAGCTCTGCCACCAGGAGGCCTCCACACATCCCAGACAGAAGGCCTGAGATCCC
AGAAGCAATCAACTGGGGGGGGGGGGTGGGCATGAGGGATGATGGCCTTGACCCCACCCCACCCCACCCCACCCCACAG
GCTGATGGGATAAGGGGACAAGGCAGGGGGGTCCACGAGGGGGCAGTCAGGAGCAGGTACCTCTTGCCCATTGCACTTC
CCATGGATTCTTGATCTGGATGCAGAGCTGCAGTGGTCTCTGGTTAGTCACAGACACGTGGCCGCTTCAGCAGCCCACA
GCTGCTCACTTCAAAGATCATTTCCTGCACCTGAGTCTGGCAGAGGTCTGCGGTCTCTATCGTGAGACATGAAGCCACA
AGAAAGACTCGAGCAGACCACAGTGCCCTCGTGATCATACTGCTGAGTTGAGTTTGCCTTTTTTTGGGAGATGTAAAAA
TGTAAACACCAGATTTCTTAATTTATACTAACCTAAAACTCAATTCCATATTCATGCTCCTTATTGTAAGAATATTTCT
TGGTGCCTGTGAGTTGCCTTGAGAATAGAGCTTGAAAAGAAGCAAGGGAAGGGGGCAGGGCGTGAGGGTAGGGTGAAGA
GGAAGGAGAGAGTCACAGATACAGGGAGGAGAGAAGAGGCAGAGAGAATAAAGAAGTGCCAGCCACAGTCCTTCAGTGG
CCTTTGGGGTCCCCAATAATTCACCTCTTCTAAGATGCTCAGCACACTTCTGCCAAATGTTCTCTAAGACAAGTGCTAA
GCTCTTCCAAAGAGCCTACAGCCCAGACAAAGGCAGAACATAGAAAAAACACTCCCATGATTCATTCTGGAAAATGGTG
GGTTCTCTGGAAGAGGCCTCCAGCATCCCTCCAGCACCCCTCCAGCATCCATCCCTCCAGCATTCCTCCAGCACCCCTC
CAGCATCCATCCCTCCAGCATCCCTCCAGCATCCCTCCAGCATCCCTCCAGCATCCCTCCAGCATCCCTCCAGCATCCC
TCCAGCATCCCTCCAGCATCCCACCAGCATCCCTCCAGCATCCCACCAGCATCCCTCCAGCATGTCCAGCTCACCTGAA
GGGCTGAAGCAGACTCTTTGCAGCCAGGTCTTTAGGGTGAGTCCCCACCATACATGGAATGGAGGATTAATAGTGGACG
TGAACCAGACAGCCTTCTCCTTTGCCTTTCTCCATCCATGAGCGGGACTGGAGAAGTTACTGGGCAAGGGCTGGGGTGG
TCAGCTTCTAACAGAAGCCATGGCCGGGCTCTCAGAGCAGACACTGCCTGGGGAGCCAGACAAGCCCAGATAGAAAAAG
CCTTCCTGAGCCAGTGAAAAGCAATGTTCCAGTAGAGGAGTACAGAGGCAAGGCAAGGGGGAGCTGGCAGGAGAGGGAA
TGGATTCAGTGGGTTCGCTGAGACCCAGGTCCAGAAGCACAGCTCTGGCTCCCTGTGTGAGAAGCAAGTGTTGGGAGGG
GAGTCCAGAAAAATACCCTGTTAACACTCCTGGGCTTAGACTCCTGGAGGAAAGCCCGTTCTGGTTATGGTGTGGTGTT
CATATGACAGCTGTTGATACCATAATCTTTTCAGGGGGGTGATACAAAAGTAATACTTCAGAGTTGTGGGGGGTGGGGT
GGGAGGTGGTGGATGGATAGCTCAGTGTTTAAGAGAGCTTGGAGCTCATCCAGACGACCTGAGTTCTGGTACCCACATC
CTTAAGTCAGCTCACAATCGCCTGTAACTCCATATTCAGGGGGATCAGTACCCTCTTCTGAACCATTACACACACACAC
ACATACACACACACACATACACACACACACACACACACACACATACACACACACACACACACACGCACACACAGCATTC
ACACAAAGACATATGTGCACACACATAAAAATAAATCTCTTTTTAAGACGTAAGAATTGAATGAGACAGCACTCTTCCA
ATACTTTTAGGCCCCTCCCTGCTCTGGAATCAAATAAAATATCTAGGCAGGCTTCATCTAATGTAAAGCAAGTGGGAGA
GTAGAGGAAGGGAACACATATGGCTAGGGTAGGGTTTTCTTGCCCATCCTCCACCCCACCCCACCCTCCCCAGTTATCA
CAGTTATCAGCTGTCTCAAAAATATTCACCCAAATGAGTCAGAAGAATACCGCGTTCAGGGCTGTCACACTGTTAAAAA
TCAAGCTTGGTAGAAATCTTCACAACCACGGACATAGACACACACTGTAAGTCACACCTCCCCCCCAGTGCTTAAGCAT
CCCCCAGCACACACTGGATCCGGCTCACCTAACCACAACTTCCTCTCCGCAGTCAATGGGAAAGCCACAATCACCATCG
AGAGCCGGGCCCCAACACTGTTCATGTTCATGCTCAATGGCAAGCAGGAGCACGGGCTCCTGAGCCTCAGGAAGAACGG
GATGAAGCTGGAGGTGTACCCTCCAACCATGGGCACCCACAAGCTGCAGATCTTCGCCAAGGGCAACTCTGAAATCTAC
AGCTCGGTGCTAGAATACACACTCAAGTGCAACTATGTAGACTTCTCTGTCCAGCTGCCCAGTGAGCTCCACCAGCCCG
TGGGCCCCAGCTGGTTCTCGGAGCAGATGGGCATCACGAAGCCCTCTCACTCTGACCCTATCATTCACACCAGCGATGG
CCGCTGCGCCATCAGCTTTAGCGTGGAAGAGGGCGTCAGTGTCCTGGCATCCCTTCATGGCGATGACGGCCCCATCACT
GAGGAGACACAGCGGCGCTACATCTTCCAGTTGAACCGAGGGAAGAGGACCGAGCTCAAAGTCCAGCTGCCCCATGCCG
GCAAGTTTGCCCTTAAGATCTTTGTGAAGAAGAGGCAGGAACAAGGGAACTTCATCTTTGTCTTCAACTACCTCTTGTG
CTGCGCCAACACCAAGGTGAACTGGCCCATGTTCCCTGAGAGCTTTGGCAACTGGGGACAGGACAATGAACTGCTAGAG
CCTCTCTCCGGTGTGCTTCCCGCCAACCGCAACATAGCCTTCAAACTAAAGCTGCATGGTATCGCCAAAGCTCTGGTGA
AAGGACAGGACACGTGGCCCCTCACTCTTAACCCCGAGGGCTACTGGGAGGGCAGCTGCAACACAGCTGGCTGCCAGGA
AGTCTACGTCATGGTGCTAGAGAATGCTAACCACAACTTCTACAGCTACATCCTGAAATACAAAGTGAATGACCAGTGA
GGGGCTGCATTTCTTCACGGTCCCCCAGGGTTAAGGCCAGCCCTGCCCAGGGAGGGCCCAAGCTAAGAGCAGAGAGCCC
AGGACACCACTAATCTGCATGAAACCACTTCTAGGCCTCTGCTTCAGTCCCCTCTGCCTCAATCTCCCTGCTGTGTCAC
AGGCACTGAGGAATTTGTGCCGCCAAAGGCTCACTCAATGTGGCTGTGGAAGAAGAGACAGAGGCCAGGGCCCTCTAGA
AGAAAAAGGTGCTATGTAAATCCAAGGTATTGTGAAACGTACACCCCTGCCTGTGCCTGCTCTTGTGTTAGGACTTTGT
TGCTGTAGAGCTGAATGGGAAAGCGGAGGTGTTGCGGGTGCTGAAAGCTTTCCCCACGATGCCTGCCTGGTGCTTGAGG
CTGAATCTATGAGAAAGGTGTGCTCCCCCTGCAAGTAACATGGTGTTTCTCCCCACTACTTCTGGACCCCAGGGAATGT
CGGGCCTGCCCATCTTCCACATTCCTAGTGCTCCTATTAGCTACTTCATGCTCTTCAAGAGCTTGCAAAGGGGGTGGGT
GTAGAAAGCAAACCAGCTGACCCTCAGCCAACTGGAGGCTGCTGTCTCCTGATGCCTAGCATCTCTGAGATGTGCTAAG
GGCAGGAAAGCAGCCGTGTGCACATTCGGATGTCCTGGCTGGGGACCAGGGATGGAGTGGGTTTGCAGGTCCAGCAACC
CACATGGAAGGGTGAAGACCCCGATTCTATGTGCCTACCAGAGTTTAGCTGAGGGCCTGGAGATTGCCCCACCCCACCC
CCCACCAGCCATCCTCAGGAGCCTCAAATGCCTACATAGCCCACTGGTAGCCTGGCTGATGACCTGGGCCCTGGGCAAG
CAGATTAGCCCCAGCAGTTATCAGATACCAGGGATAGTGTCTGATAACAAGATGTTGCTCCTTCCTTACAAGCCAAACC
AAGCTGAGGGGACCACCACCTGCCCCCTAGAGAAAGTGTTGGTCTCTGTCTCTGAGGAAAGCCCTATCATAGCCATTTT
CCCTCCTGTCTTTCTCTGAGATGACAACCCCTGCCCTGAGTTCAACCTTCCTTCCATTGGGAACAGTTGAGGGCCTCTT
ACTTGCTCCGGCCTGTCCTAAAAAGCCTGAGCTGCCTAGCTGGCCCTCAGCAGCACCTGAGGCTGGTGTTTCCATGGCA
ACAGCTGAGGGGGGAAAAGCAGGCTGCTGCAAACAGGGAAGGCCTGAGGAGAGCCCCCCGACAAGAGGTTCCTGCAGTA
GCATCCCAGTGCACAGATGTGCTCCAGGAGGGTCCCTACCAAATTTCAGGGTTCTAGGACTCTGCTCACTGTGCCTGTC
TCAGGACCACCCCCCCCCCCAATCCCTCACTGCTCTCTAAGGAATGTCCTCAGGCTCAGCTGCCGCCAGAGCCAGCCTG
GGATACTCACAGCCTCTACAGTCAAGTCTTTCCTCAGTAAGAGCCCATCAGACTCCTTCGATAAGTGGCTGACCCCTCA
TGCTAGATCCTGGGACTATAGAGGTGAACACAAAGGACTCAGCCATAGGCACCCGCATCTCTGGGTGGGCAGTCTGCCA
AGTGGAACCTATCTGAAGACCTAGGAGCCCAGAACTTCAGCTCTTCATTCCCTTCTGCCCCTTTCCCACAGGTCCCCAC
TGCTACCCACCTGATACCACATAGCCCCCCTCCACCAGACTGGGTAGCCTCACTTGTGATTAGCATGGCTGCTAGGGGC
TGAGCTGCCTTGGCTCATGTCCAGGGTCCTCTGGCAGTCTCAGCCCATCAGCATCTTGTCACTCACGCCTGGAAAACGC
ACCAAAGTGGGGTGGGGTGGGGTGGGAGGTGGCGTTGTCTCCACTACAAGAAGACGGTGGAGTTTGCACTGCCTGGAAA
CAGCCTTTCCTCACCCCTTTTATTTTATGAGCAGTAAGAACTGTGCTATGTTTTAACGAAATAGTAAGTGCTTCGGCGG
TCCCTGCCACTCGCTAGACACAGCCGCGACAGCCACTGCTAGCCCTGCAGAAAATGATCCCCATGTTTTTTTCAAAACA
GCATAATTAATCTATTCTGGAGCTTGTGGAGGATGCTACCCCACAAAACAGGAGCTGTCCTCAGCACCAGAGACCCAGA
CCGAGCCTCTCCCAGCGGCCCGGGTCAACCACACGCTCCGCCCTCCTCATATAACCAGGTAGTCCCTTTGTCAAGGCAA
CTGTAGGTGCACTCGGAAAAACGCCTGCGTTTCTTTTTACTGAAGCAAAGATACACGAAACCGAATCCAATCTTCATGA
ATTTTTACACGCATGCTGCTCAGCCTGAAAATTTGGAGGCTGCGTTTTGAAGGCTTTTTATTCAAATCCCCCTCTTTGT
CTGCTGGTCCACGAGTCTCATTGGCCGATCAAATGGCACGAGCGCCCCCTGGTGGATCACGTGCGAAGTTGCCACCGCT
GCAAACCCCCAAGCTGGCTCTTTTTATGATGTTTGTTAAAAATCACTAGGTGCTTTCTCGTCCCTTGCGGACAAGTTAT
GCTGTCTACGGCATCCACATCGTGGATAGTTATCCTCGTGGTTGATATGCCAATGTCAGCGTTGTCTTGCAGACTGTCA
GAAGAGCCTGGGGAGACTTCCCTGGCCTGGCGTGGTGAGAAGATAGGATGGGATTAAGAATTGAGCATCTTGCCCAGAA
AGCTTTTCCTGAGACAGAAACCCTGGGCACAGGAATGCCTGTCTGGGGTCGCTGTGATCACACTCATTACTATGGCAAT
GACAGGCTGAAACTGATCAAACTCAGCGTTTTGCCAGGCAGGCCCCAGGATGGGCGCCAGGGTGCAGAAGGATGGGGCG
TGGTGAGGCAAAAGGGTGCAATTAAGCTCTTTCAGCTTGCTTCAAAAGTGCCACCAGCTCAGCTGGACTGTTCTCTGTC
TGATTGTGAATATTTTGAGTTCTCCATATGTTACATTGTCCCACGAGGACGGACTCCTCCCGGCCCACAGAGATTAAAG
AGACGTAAATAGATTAACTGAAGCATGAAGGATTTGAGCTAGATATAAAGAACCATTTCCTGTTGTGAAGCAGGAGGGA
CACGTTGCCAATAAACTCTCGGCGAAATTCTCAAAGGACTTGAAAAGGAGAAAAGTTCCCGCAGTGGTCCGGCATTTTC
TTTGCCGTGCTTACTGAAGCGGTTGGGTTCTCCCTCCGCTAACTCGTAACTCTTAAACAGTACTGGTTGGCCGGCAGTA
AACACCAGGTTAATGGTGTGACCATATAGCTCACTGTTGTGGGATTTCAAAGGCCGTTTATCTGAGGTCTGCCATTTCC
TTTCATCTGGAGTAAGTAAAGCCGCAGAGGTGACTATTTCTCCCCGTGTGTGCTGAGTAGTGTGGGCCACTGGCTGTTA
AAGATGCTGTCCTCACATTGTTGCTGGGGTTCTTTTTCAATAAAATTTATATTCATTTTTATCCAACAATGTAATTATC
GATCCATCCTTATCGCTGCTCTTACAAGGAGAAAAAAAAAAAAAAACAACCAAGGGGGGAGGGCAACACTTTCATGTTC
AAAGGATGCTTTTAAAAAAAAGAAAAGATCAATGTCCCCGCCATTTGAACGTGATGGGGAGATGCAAATGGGGTGTTGG
GCAAATAGCGATTCCACATTAAAGAAAACATAATTAGGTCAGCCCCGGCCCTCCGAGGCTCACGTGCCTTTGAAGAATC
CGAAGACCACGCTTCCTTCATTGAATCTTGTTTAACTTGAACATTTTAAAGTCAGCCCAAATTTCTTTTTAGAGTGGGA
GAAGAAAAACGTGCCAAAATTTTTCCTGTCAACCTACTTTTGGGGTGCTGAATATATGCTATACGTTTCTTGATATTCA
CGCACACACTCGAAACTTTCCAGGTTGCCTAAACTGATTACTCGTAAATTAGACATTTAGAGGACTGGAGGAAAAAAGA
AAAAAATGAAAATCTAGACACCTCTGAGAAGCTGCTGTAACCATGGAGACCATTCTCATAGCTGTAGTGTGAAGGGCAA
AAAGATTTGTGTTCCCAAATCTGAGCTTATCGCATCCCTCATTGCCAGACACAAAAACCCGAGATGTGTTACACTTCAT
CCTTGGGGTGGGGGTTCACAGAGGAATGCAATCCACGGGTAAGGGAAGTTTCTAATGACACACTATGGAGCAATCGGAA
CAAACTGTCTCTAGGTCTTAGGTGCAGTAGAAGGACAAACTCTTAAATTATTGGAACGGGCTGCAAGTTCCCAACCAAG
AGCTGGAATAGACTGACCTCCGATGTTTCTTCCAGTCCAGAGGCTCTGTGAAGCTGTGTCTTTGTGAACAGATGATGGC
AGGCACCAGCCTGGGCTTGTCAGTTAGGCAACATCTGAAGGGCCCTGCTGTGTTAAGAGCCTGCTCCCTAAGCCCCGGG
CATGCTACACCGCACGCCTTTTACTTTCCTGCGGGCGGGCGAGGGGATGCACAGGCTCAGCAGGTGGACAGACCACAGG
GAACCAGCAGCCCAGACAGAGGCTGGTCCACTGTGATTTGCAGACAGAACTGAACAAGACTAAGATGTCTCGAGGAAGT
CTCTTTTCTTCCACCTCATCCTCAGACCTCAAGTCAGAAAAATTATTCTTAAGGCAATCAAATTCCTGCGGAGGATGCC
TAGGGGTGTCCTGTGACCTCTACCATCCTCCATGGCAAGATCTGGTCCATATGGAGGCTTTGGGGCCTTGTCTCATGTG
CTTCTTCACCCACTGTGAGTGCTCAGGCCCACCACTCCCTCAGCGCCACTTCTTGGGCCTCTGTGTGCCAAGGTGGGTC
CTGCCTAGGTCATTACTGTCCACACCAACCTCAGATCTGAACATCCACCCCCACCTGAGCTGTGTTCAGACAAAATGCT
TTTCATGATCCTTCCCAAGGAAGTTCATGGTCTCTGGAGAAGGCACTGGTGGGCAAGGTAAGTCTTCAAACAAAAATTG
ATTTTAGGTCTACAATCCTACCTCCTTAAACACACCTGATCCAGCTTGATCTCTGAAGCTAGGCAGGGCCAGATCTGGT
TAATGCTTCAATGAGAAACAAAGGCTTATTTTGATAGATAATCAAGAGAGTGCCCAGTCACCTCCTTCTCCTCTAGAGA
CATCATGTCAAGTGCTTCATTCCCAAGGATAGTGTAATGATGGCTCTTCAAAGAGGGACACAGATGAGGGGCCATGGAG
AGACGTCTCCCCTGCAGTTGAGTGAGCTGTAAGCAGCAGCTTTAGTTCAAAGGCTGCCTTCCTGTGATCCTCCTGGACC
AGCAATGGCATGCACTGATCACGTAGAAGCACCAGTCAGAGCCAGCATCAAGCTTTGGGAATTCAGTGTCCTGGAGACC
ATGGCTGTGCAACATAAAAGGCCAGCGATCGGGACCAGGTAGGCAGCACCTCAGACTGAGATGGGACATGACAGGAAGC
CCCAAAGCACAGGTCCCCTGGTGAGTCCCCTGATGGTAGGGGCTATGGCGACAATCCTTAGGATAATCAATAGGAGACA
CCACAATCCACACTACCCTTCTTTTGAACATGTTGGTCCCTGTTGTAGCGACAGTCTTCCCTCCCTCTCTCCTGGAAAA
GCCTTGCCTGGCCCTCATCCATCCTCCGGGCTCACATCATATTTGTGACTCAGAACTCTGCACAATCGGGTGATGAGAA
GGGATTGGAACTTCACCACTGAACTGCAATTTTTTTCCATACAGTTTTATTCAAAAAATATTTTCATACAATATATTCC
AATTATGGCTTTCCCCTCCCAGATCCTTCCAAACTCTCCATCCATCCACCGCCATGCCCTTTCTTTCTCTCATTTTGGA
AAGCAAACAAGCCCATCGGTGGTGATGCACACCTTCAACCCTAGCACTTGGGAGGCAGAAGCGGGTGGATCTGAGTTCC
AGAATCTCTAGGAGTTCGAGGCCAGTCTGTTCCACAGAATGAGTTCTAGGACAGCCAGGGATACAGGGAGAAACCCTGT
CTCAAACAAACAAACAACAACAAAGCAAACAAAATGGCAAAGAAAAATAATAATTTAAAAAGAAAGAAACACACACATA
CACCAACAAAAATTCAAAATTGTGGAGCCGAAGAGATGGCTCATCAGTTAAGAGCACTGGCTGCTCTTCCAGAGGTCCT
GAGTTCAATTCCCAGCAACCACATGGTGGCTCACAACCATCTGTAATGGAATATGATACCCTCTTCTGCATGAAGACAA
AGCATGAATATATATTTTTAAAAACACAAAATTGGACACCATGATACATACATGAGGAGATCAGTAAAACTGAAAAAAA
CTGAAAAAAAAAAAAAAAAAAAGACCCAAAGCAAGATGAGACCAAAAGTCTACAAAAATAGCATTGAGTTGGTTTGTGT
TGGCCACCGGCTGCTGGGTCCAGAGCTTACATGTGTGGCTAATACACCCAATGACAGTCCACTGGAGAAATTCAGTTTT
TCCTTCGCGAGTGGGTATCAACTGCAGAGAGCTTCTTGGTTGGAGACAGGAGCTCCGGTCCACTTCCCCCTTCTCAGAA
CTGAGAATTCTTGGAACACACACTTTGGTTCTGCTTCTTGGCACACGCTGGGTGCTTGATAAATGCTCAGTAAGTGTTT
TCTTGGGAAAACTGAGAAGGGATGTGAACGGAGCTGCCAGCAACCATTCCTTGAACATTTGTAGAGTGTTTCGTTTTCC
CAGAACTGGCCCTTGTGGTTTCATTCAACTCTGCCTGCCACAGCCTGGATGGTGAGAGAGGCCGAGAGTCTCAGGGGAG
GATCCCAACCCAGCGAAGGGGGAATGGCTGCCCTGGGGATGGGGGGGGGGGGGGGGCTGAGGGCTGGTTGCTAGTGACC
TTCAGAGACAAAAGTGACCCCTTTACCTAGACCTCAACTTATTCTTGAGGCTCTCTCTGAGGGGGTGTAGGCTTAGTCT
GTGGACTGTGACTGAATGCAAGATTTCTATGTGAAGGTGGGCTCAGGGCCTCCTCATCTATGAAAGACCCATGGAGTTG
CTGTCCCCATATCTAACTGTGGCTTGGTCTGTTTAAAGGAGGTCTGGAACATGAGCCTGATGCTTCTGTTTGACCCAAA
GTAACACAAACACGCTAAAGCTCCCATTAATTGTATCCTAACCTGCCCAGAGCTCAACCAACAAACCTAGCTGCAGGAG
ACTCTCTGAGGCCCCAGGAGAACCTATTATCATATGGAAAAGCTGCAAAATGGCAAGTTTTGCTAATTGGGACTAAAAG
GCACAATATTTTCTCCTGGCAAATCAGGAGTGTGCTGGGCTGTCACAGAACTCATTATCCCTCTCCCTGTCCCTGCTCC
CATCCTTATCTTCTCTCTGCATGTGTATGTGGTATGCATTTCTGTATGCATGCCCACATGTATGGAAACACATGTGTGT
GCATGCATGTGGAGGCCCCCAAGTGGACATCAGATGTCTTCCTCAGTCACTCTCCACTGTATGGAAGCAGGGTCTCTCA
ATTGAACCCAGAGCTCATTGATCAGCTATTGTAGAAAGCCAGTTTACCCTGGGGCCCCCTTATTCCAGTCCCCCAACTT
CTGAGGTTACAGGCACTTACTCAGATTTTGCAAGGGTCCTGGGCAGTGAACTCTGATCTTCAAGCTTGCACTTTATCCA
CAGGGCCATCTCTCCAGCCCCGTTTATGGATATTTTAAACAAGGTTGCTCTTGGTATTGAGTGGAAAAGAAACAGAATC
GGCTTGGTTGGTTTGGTGACTGAGGGTTACTTGGACAGGTCCACGGAGACATTCCTGCCTCACTGGGGCTGAAGAGATG
ACTCAGTAAAGTGCTTGCTCTGCAAGCAGAAGGAGCAGAGTTTGGTCCTCAGCATCCATGGAAAAGGCCAGGTGAAAGG
GCAAGGATTTTGTCACCCCAGCACTAAGGATGGGCGGATCCTTGGTGCTTATCGGCCAGCAAGCCTAGCCCAGCTGGCC
AGCCTCAAGTCCCAGAGAGAGACTTTGTCTTAACACAAAGGTAGATGACACCTGAGGTTGACTTCCTGGTACACACATG
TACACACACTCACATGGGTAGGGCACATATGCAAAACACACACATACAAACCATTTCCTCTCTCAAGCCAACTGTATAG
ACATTTGAACATCACCAACTGAAGCCCTAGGTTTACGAGGAGTCTGTGGTCCCCTCTGAGCTCAGTAGGAAAGACCCTC
ACAGTGACCAAAAATCATAGACCCTGGGTGGGAAGGGAGTGTTATACATATTCGCCAAGCCTGACTAATAGCCAAACAG
GAGCCAAGACCAAAGGAGGAAGGAAATTACTCAGCTTCATGGGGAGGAGGGAGCTCTGGCTCCCTAAAGTCAGCCCCAT
GGCTGAGAACCATCCAGACACAAAACAATAGGTCCCTGGATGCTCTGGAGGGCCCTTTATGCCCCTGGGCTCTGGGCAG
GATCCACATGGCCTCCCAAGTTAAGTTTCTCAGTCCAGAGAAAAATTGGAAAGTTGGAGCTAAACTCACCAGTGGAGTG
CACCTCTGATTAAATACTGTCTAGCATGCAGAGTGACCAGTGATTGGTCATTTCAAAATGAAATACTAGTCCCGCTGAT
CTCAGTTACTCCGCGGTGTTGAGGCAAATGTTATGTCCTCCTCGCCTCTGATCTTATGATCCTGGGAGTGTTAGGAGTG
CCTGGGAGTGGAGCCTCCTCTGCAGAGTTCACAACCAAGGTCTTCTCAGGGCACCTGCCCAGACTGAAGGGCTCAGGAT
CTGCTCTTAAGGGAGTGTTGTGAACAGGGCTGAGAACCCGCTGAGCGAGGCTTTAAAGATGGTGTCTTTCCTCCAGTCA
ACATTGCTACCTCAGAGTCTCCCAAAAAGAGGCTGAAGAAATATAAGTACCAAGGCAAAGAAATGTCTTTGCAGTGACG
ACAGAGGATTGTTTCCAGCCTACAATTCTGGAAGACCAGGAAAGATGAGCAGGTGCTGAAGAGAAGAAATATCAATCTA
TTCCCCAGGGACGTGGTTTCTCAAGCACTAGTCAAAGAGGCCGCTTCACTTTGGATGACGTCATCCAAGGGGTGAATAG
TTCAGATATGATCCTGTGTTTCCTGGCCACCCAGGCTGCCAGGGAAATGCAATCTCAGGACAGGAAAATAACCCTCCTT
TAAAGTTGATTACTGAGGCAGGGCTCATTCCCAAGCTGGTGGACTTCCTGAAGGTGACACCTCTCCCTAACTTGCAGTT
TGAGGCCGCGTGGACGCTCGCCAACATTGCCTCAGGAACTTCAGAGCAGACCCGAGCTGTTGTGAAAGGGGTTGCCATT
CAGCCCCTGCTTGAACTCTTCCGTTCCCCAGACCTGACCGTGTCTGAGCAGGCAGTGTGGGTCCCTGGGAATATAGCTG
GTGACTGTGCAGAATTCAGAGACAATGTCATTTCCAATAATGCCATCCCACACCTTATCAACCTTATTTCAACAAACAT
ACCAATCACATTTCTTCGGAACATCACATTGACTTTGTCCAACGTATGCCGAAACAAAAATCCACACCCTGTGAGGATG
CCTCCATGAGGCAGATGCTACCTGCTCTCTGTCAGCTCCCACTGGATCATGGTAATGAGATTCTCTCAGATACCTGCTG
GGCCCTGGCCTACCTGACTGAGGGCAGCAAAGAGTATATCCATCATGTGGTGACCACCGGCATCCTGCCCGGGCTTGTA
GAACTTAAGACCAGCTCAGAACTCAGTGTCTTGACCCCTTGTCTCCACACTATGGGCTGCATTGTGGCTGGAACAGATG
AACAGACCCAAATGGCCATCGATGCTGGCATGCTAAAGGTGTTGGGCCAGGTCCTGAAGCACCCAAAGTTCTCCATCCA
GAAGCTGGCGGCCAGGACCGTGAGCAACACAGCCGCTGGGCCCAGGCACCACATCTAACAGCTGATTTTGTAACTTGCT
GCCTGTCTTGGTAGACCTACTGAGGAATGTGGAATTAAAAATCCAAAAAGAGGTTGTGTGCACCATGGCTAACATGGCA
ACAGGGGCCTCTCAGTGCCAGCTGACTCTGCTTGCCCACTCGGGAATCTTGGAACCAATGCTGAGTCTGCTCACTGCCC
CAGACATGGAGGTTGTCATTGTTGGCCTTGACATCATTTCTTATCTCCTCCAGATAGACCACCTACAGGAGAAGAAAAG
GCTGTGTTTTCAGACAGAGGAAGTTGGTGGCTTTTAAAAAGTTGAGTCCCTACAGCACCACCACAACACTTAACATCAG
CAATGGTGCTCTGGACATCATTGAGAAATATTTATGTGAGGATGAAGACAACGACAGTCTGCCCAGGCCTGGACTGAGA
GTGTGAATACGTGGAGAGCTAAGACATCTCACACACCAGATTTCAGCAGAGTACCGATCAGTCATGGACTTTCACGCGG
CTTCTGGCGACAGCACAGACCACAGACATCCACATGGTCTCTGGTGGCAGCACAGATCTTGGACATCAGCTGGGCTCTC
TGCCACAGCAAGAACCATGGACAACACCATAGCCCTCAACAGCAGCACAGGTCAGTGACGTCAACATGGTTTCAGGGGG
CAGCACAGACCAGACACAATGGCATGACCTTCAGTGGTAAAACAGGCCACCGACATTAAGACCTCCCCCAGCTGCAGCA
GGACCATGGGCCCAAGCAGTGGTCAAAAAATATACACGGCAAACGTCTTTTACCAGCTGAGGAGTCTAACTGACTAGGG
ACAGTGTTTTTTGCTTTTGGTTTTGTTGCTGTTGTTAATCTTCTTTGTTAGTCTGTTTCTTTTGATTGGGGGATTGAGA
TTATTAATACACAGTTACTGCAAAGCAAAAGCACAAACAAACAAACAAAACCCAAATGAAATATTAGGTTACTGCATTG
TTTAAAGGGCTGTAGACTGAAGGTTAATGAGTTACAGCATCCTAAATAGTAATTTCCTTCTTGCTTCCAAGTGAGTCAA
GGAGAAGATGCACAGCCTAGACCTCTGCCACTCCACTCCCGTGGGAATGTCTCTCTACAGGAAGAGAGGGCTTGCCACC
TGGCTCATAGTACTTACCTCCAAGAAACAAATCGCAGCTTGGGCAACTGATCGATGGAACCCAGGGAGCCCTTCTTCTG
GGGGAATTCACTGGCCTTGAGCTTTGCTGACATTGCCAGATGACTGCCTCCATGTCACAAGGAATCAGCCATCATGTTG
CCCTGGCTATGCAGAGGACCTGGGCACTTACACCCCCTGCAGGGTGAGCAGAATTTCAGAGAGGCAGCCATGAGTGTCC
AAAAACAGCTATGCTGTGTGATCAGTGACAGCATACAGGAGGAGAGAGGTGCCTCCATAGGACAGTGGTGAAGAAAAGT
GAGGAGGGTTTTATTTAAAATACGAGCAGAGAGTGACAGCGTATACTGAAAGCCCAGCACCACAGAGGTAGAAGCAGGA
AGAGTCAGAGGCTAACCTGGACTACATGGAAAGATAGGTAGATCCTGTCTCTGAAGAGGAGGAAGAGAGATGAAGAGGA
AAAAAAAGTGGCCTTCGGATAGCAAATTGTCTAGTGAACATTTTGCCAATAAATCTTTATGTATGTGAACAGCAAAGAA
ACCTGAAAACTTGTGTTGACCGTTTTTTTTTATTACATTATACAAAATGAACTGAAGGGCCAGCGATCTGGCTCAGTGG
GTAAAAGTGCTCGCTGCACCAGCCTGATGGAAACCTGATGACCTGAGTCTATTCCCTAGGAGCCACACGGTAGAAGGAA
AGAACCAACTCCACATCCGTGCCACAGCATGCACGCCTGAGCTCACACACATCACAAGCACACACAAAAGGGACAGCAG
TGGGTACATAAAAAGTTTAAATGGAATGGAGCAGTTCCCCTGTAGGCACTTGGAGGCCGCTCCCACTCCTCCATGGCCT
CGGCTGCCCTACCCTGGTGCGGGCATGTGTGGGTCCCACACACCCTTTGCGCACAGCACAACGTCTTGAGAATCAGATC
GCGTTCCACACCTCCCCCAAGGAACACTGGGAGCAAATCACTGTTAACCTGCTGCGGGAGGGAATCTCCTCGGACTGTA
AAAGCACACCACTTGATGTTTTTTAAAGCTCAGCAAGAATGTGAATGTAAAAGTCCATTTTGAAAAGACGCCAATGATC
GGTCTTTCCAGGAAGATGGCCTCTTAGCTACCGGTCTCGCCTCACTGAAAGCCTCCTTGTGCCATCAGGAGCCATTAAC
AGATGATTGAAGCCTCAGGTTTCCCTCTATAAACATTGATTTAACTCCGTGAAGAGTTTTAGGCTCCTCCGTACCCAGC
ACGGGCTGGCCTGGGCTGTGGATCTGATTCTGTTTGCCAACGGGCAGGGATGCACAAAGGTGAAAGGTATGTGCCTCAA
AGTGGATTATTCTGCCCCTGATACCAGCTCAGCCAACTCGCACCTAGCCTGGCAAGAGCCACATCCTCCCTGCCTGTCT
CCTCGTCAGTGAGGTGAGAAAAATCATTTGCACCCTCTCAGGAGGATGGCATGAGTCAAGAACTCAAAAAAAAAAAAAA
AAAAAAAAAACCCGACCAGCACAACCCTAGCATAGTGCGCATGTGCTCTCTAGCAGTGTCCTAGTTGGGGGTTTCTACT
GCTGTGATGATACGCCATGACCAGAGGCAAGTGGGGAGGAAAGGGTCTATGTGGCTTATGCTTCCACATCACAGTTCAT
CATCAAAGGAAGGCAGGACAGGCTATCAAGCAGAGCGGGGCACTGGAGGCAGGAGCTGGTCCAGAGGCCATGGAGGGAT
GCTGCTTACTGCCTTTCCCTACATGGTTTGCTCAGCCTGCTTTCTTATAACACCCAGGACCACCATCCAGGGATGGCCC
TACCTACAAAGGGCTGCCCCCCACCCCCTATAAATCACTGCTTAAGAAAATACCCTTCCAGGCTTGCCTGTAGCCTGAT
CTTACGGAGGCATTTTCTGTATTGAAGTTACCTCCTCTCAGATGACTAGAGCTTGTGTCAAGTTGACATAAAAATATGC
AGCAGAGTTGACCCCTTGTCATCTTGACACACAAACACGTCACTGTTAAAGCCGCAACCTTTCCTTTCTCATCCATCCC
CACAGATCTTACATTTAAAACATGAATAGCTTGAAAATTCCCACAGTCTTTACAAATTCAAAACACATTTAAAGGTCAG
TCCATTTAAAACATCCGGTCTCGAGTCTTCTCTTTGTCGCCTTCGGAACAAGATGTAGAGCTCTCAGCTCCTCCAGCAC
CACGCCTGCCTGAATGCTGCCTGTGCTTCCCCACCATGATGATAATGGACTGAATCTCAGAACCTTGCCTGGCTGCCTG
GCAGGACCTGCCTGGAGCACTGTCCTGTAATTCTATTCAAGAGACCCTGGAGTTGGACTCCATCCTCAGCCACCACTGG
TGCATTCAGGGCTGCAGTGCTGTCACAGGAGATGACTGGCTACCTGGCATCAACTGCCCCCCCCCAATGATATTTCCAG
TCGTGTCTTTACTGCCAACTGAGCTCCTTCAATGTCCCCAGCTCACTGTCCAGACCCTGTCCTCATCAGACACCAGCCG
GAGGGATGAACACCAGCTGGCCAGACTAACACTCCCAACCCCACCTCGACCTGCTGCTGCTACTGCTGCTTACTGCTGC
TCTCCCTGCCCCCGGATGAGGGCTGTCACCCTGACTCCAAAAGTGGCCTGCAGCTGCCATGCCAAAAGGAGAGGCTGGG
CTGGGAGGGACTACCTGCTGCTACCAAGGACCTGGGTGTCACCTCTGTCCAACACTGAGAATAAAGCACTCCTTGGTCA
GTTAAAAAAAAAAAATCCAAAATCTCTTTCAAACACTTGAAATCTCTCAACTACAGGCTCCTGTAAAAAACAAAATTAA
ATTAAATACTTTCTTAATTCAAGAGGGAAGACCGAGGACACACACACACAATCTTAACAAAGCAAAACCACACTCCAAC
AGCATAAATAACTCAATGTTCAATATCTGGGATTCACTCACCATCTTCTGGGCTCCTCCAAAGGGCTTGGGTCACTTCT
CCGGCCCTGTCTTCTGCAGCACACACAAATTGTCATCTAGGCTCAGGCTGGCTCCTTGCCACGCCTGCTGCTGCCTTTG
GTGGTCATCCCATGGTGCTGACATCTCCAAAATGCTTGGGTCTCTTGTTGCAACTGGACTTCGCTTTCACCAGTAGCCT
CTCCACGGCTCTCTTCAGGATCTTCAACCTAGCCACACAGTGCCAAACCTCAGCTCTTGTAAATGACCCCTTCCCCTTC
ATGTGTTGAAAACCAGTACCACGTGGGTGGCTCTTACATTACCAAATTCAGCTTCCAGTACAAGGTGCAGCCTAAGACA
CCTCTGGAACACAGCTTCTATGTGCTGGCCCTGAGGAAGCACTTGCCGGAAGATTTCACCTCGGTGCCGCTGCTTGCTT
CTTAATCGCAGCTGATTGTTCGGCCCCAGCTGACCAACATCCACCATCCCAGCAAAGCAAAGGTTTCACTTTAGTGGTT
CTGGTATCTTGTTAATCACAGTTCATTTCCTCAGCCCACGCTGACCAGACCCACAGATTCTTTACTTAAATGGCCCACT
CGAGTCTTTGCTTCCCTCTGAAACTTTACAAGCCAGCCCTCCATCATCTGCACTGCTCTCAACATCCTTATCTTCCATG
CCCCTTCAGAACATCCCCCTGAGCTCTCAGCACTCGATGGCTTTTCTAACTGAAAGCCTCAAAGTCTTTTCACAATCTT
CCCAAAAACATGGTCATATCCGTCACAGCAATACCCCACCATGCTGGTACCAACTTGTCTTAGGATTTCTACTGCTCTG
ATGCAACATGACGGCCAAGAGCAAGTTGGAGAACAAAGGGCTTATGCAGCTTATGCGTCCACATCACAACTCATGATCC
CAGGAAGTCAGTACAGGAACTCAAGTTAGGCAGGAACCTGGAGGCAGAAGCTAATCCAGATGCCATGGAAGAGTGCTGC
TTATTGGCTTGCTCCTCTTGGCTAGCCCAACCTGCTTTCTTATAAAGCCCAGGACCACCAACCCACAGATGGTTCCATC
CGCAATGGGCTGGGCCCTCCACCACCAATCACTGATTAAGAAAATGTCCTATAAGCTTGCCCACAGCCTGATCTGATGG
AGGCATCTTTTTTTTAATTGAGGCTACCTCCTCTCAGATGTCTTTAGCTTGTGTCAAGTTGATATAAAACTATCCAGCA
CACATAGTAAGTAGTCAGTACATATCAGACAGTTCTGTGATGACATCTTAGTTGTCATGTGAGAGCGAACAAGACAGAT
TATCAGATCCTATTCCCATGACCTGCAAAATTAAGAGAAGACCAATTCCTATAAGTTGCCTTCTGAATGTCCTCTGTGT
CATGCACATGTTCTCACACAGAGACACATGAATACACACATGAATCCATGCAATACATGAATCCTTGCAATAAATCCTT
TAAACATAAGTATTCTCTTCCAACAAAAATGTGGCAGAAAGCTGGTGAGGGACACTTGAGATGGTGACATAAAAAGGCA
TGACAGATTCCTCCTCATTTTCTCTCTTATATTTTTCCCTAGGTAAGTGGGCACCTCGCTGGAAAGCCTTGTGAGGCTC
CCCCTCAGATACCGCTGCTCTAGAGCCTCTCAGCGGCACCTCATGAAGGATGTTGAGCCAGACTTTAATTGTTGATCAA
TTCCTGGTCCATGAAAATCACAGGGTGGTGGTTGGAAAGATGGGCTGGTGGTTAAAAGCACTGGCTATTCTTTCGGAGG
ACCTGAGCTCAGCATCCACATGGCAGCTCACATCCAGCAGTAACTCTTAGGTACAGAGGATCTGATGCCCTCTTCTGGC
TCCCGTGGGTACTGCATACACAAGGTGCACATAAACACAGGCAAAACACTTGTGGGCATAAAATGAAAAATAAAACTCA
TATGACACCAAAAGTTTATTGTTTGGGGAGGGTTTGTGACATAGCCACAGATAACCAATACAGTACTTTCACAAATGAA
AGACGCTCCCAAGATCCCCAGACCTGTCTGACTTATAGGAGCTTAAGTTCTCTATTATTGCTGGGCACAGTGGTACATA
CCTATAATCCTAGCAGGCACGAGCAAGAAGGTAAGTGTAAAGCCAGCCTGGGCTACATGATGAGTCAGTGTCTCAAAAG
AACAGTGACAACTATCCCTGTAGCACACAGAGAGCAGACGTGAACACAGACCGTTTCAAACTCGCTAGGATGAGCACCA
GAACACTGAAGACAAAACAGGCCCCCTGAAAAGCAATAGGACCAGCTGTCTAGGAAGCATCAGGAATCAGAATGGCTTC
ATGCTTCACAGCTCAGCAGAAGCGAGTACAGTGACTCCTGCCTTCAATAGTGCTGGAAAATGATATCCAACCTGGAGGT
CCTCCAGCTAAAATCCAATCAAAGATGAGAACGGAAAAAAAAAAACATTTAGAGTCCTTCAAGGTCTCTAAGAAAACTG
AACTCACTTGAGCCAGTTCTATGATGGAGTGCTACACCCAGCAAAGGACATGGACCAAGAGAGAGACCGAATACCTGAA
AAGAGGGACTCCAGGAGTTCCTGGGACCCTGGCAATGAGAAATCTGAAGAACAGAGGTGTTGGGGGGCAGGAAGATAGT
CAGAGAACTGTGTCACCATCACACTGAAAGGTCCTCAACGAGGCTTCCTCATACAGTGGACAATACTGAGAGGGTATGG
AGCACTGTTGAATCCAGAGGACTGCTTTGTGCTAACTCAGCAAGGAAAATATGTTCCAGAAACGGAACATCAATGTTTA
CGTTGTAATAATCCAAATGCTGTCTGCTGATGTGAGAAGATGTTTGGACATCTGGTAATGCTCTCAGCCTATCCCTGCC
TCCCCCATCCCACCCCACCCCTGCCCTATCACATCTCTGCTTCCCTTGGAAACACTTTGTAGGTGACAGAAGAGTTCGG
TGTGTGGCGTATTTGCTGTTTCTGGGGGTGTATTGCTATAGTTTAGATGCTCTGGTAAATGGTCTTACCTTTATGTTCA
TTTTCTCATTGTTTGTTTCTAGTCTGTAAAATGCATTTATTGTTATGCATGGATTTTATATCCAGTGAGGCATTCCTAA
ATTGCCTTATCAACTGTTCACAGTTCAATAAGGAGGCCCTGTTGGGCTCTTTGTGCACAGCATCACATTGCCTGTGGAT
AACTTTTTTTTTCCTCCTCTCTTGTTCTATCCTTTGTTTCTTCCCCTGTCTGATTGTTCTGGGTAGATGTGATGAAGAC
AGTAGGTGTCTGCTCCGTGTTTTCTACCTCAGCATGTGTTCAATACTTGTCCTGGTTAGGGTGAGGCAATGCAAAACTT
GTATGTCTAGAATAAACACAGCCTGATCTCACTATATTCCCCTTCCTGTATATCACGTGGTTTGGTTTGGCTTGGCTTG
GCTTGGCTTGGTTTGGTTTGGTTTGGTTTGGTTTGGTTTGGTTTGGTTTGGTTTGCTTTTGAGACAAGTCTCACTCTGT
AGTTTTGGCTGGGTTGAAAATCACTATGTAGACCAGGCTGACCTTGAGCTTGCAGCAATCCTCCTGCCTCAGCCTCTCA
AGTACTAGGAGCACAGCCATGGGCCACCATGCCTGTCTTATGTCAAAGGATCTGATTTGTTGATGATTCTTATTGATTT
TTAGTCTATACTCACAAGAAAGATTGGCTTGTCCTTTTCCATTTGCCATGCCCTTGTTAGTCTCTATGGAGGTTAAGGT
AACCTTGAAAGAAACGAAAGAACTACTGGAGAGCTGGTGCAGGCTTTTTTTTTCCCTCTCCTTAAATGTTCAAAAGCAT
TTGTTGGTGAAGCCACTGGAACCTGTGGTTTTCTTGGTGGGAAGATTTTCAATTAAAAATCAATGACTTTGAATTTGAG
TTCTGTTTCTCCGTGTCTCTGTTTTGAGATGCTGTGGTTTTTGAAGACTTGTCCCTTGGATTTAAATTGCTCTATTCAT
TGGCATTGAGTTCTTTATACCTATTTGTTAGTGTCCACAGGATCGGTCCCAATCTGATGTTTTTGTTTTTCTTTCAAGC
TATTCCTGATTTGTGCCTTCTCCCCTCCCCACCTGCTCTTCAGTGGTCAATAGCCTCACAACTAAACACAGTACAGAGT
ATCGCTACCCAACACTGGCTTACCTTCCTTCTGGGATATGCCCAAGAGAGCTCGAAATGGACCATAGGGCAGTTTCATT
CTAGTGTTTTAGGATTTCCTTTGCTTTTATTTTGACTTTTGGCCAGGGTTTTTCTTTTGGTTTTGTATGTGTTATGCGT
ATGCAGATGTGAGAAGTGATGGGTGGGTACCACACAGCACATGTTAAGATCGGAGGACAACCTCAGGTGTCAGTCCTGG
TGTTCCACCTTTGAGATAGGGTCTTTTTGGTGCTTGTTGCTCCATGGGTTAGGCTGGCCATGAGTGTCTGAGAAGTCAC
GGTCTCTACCCCTCTTTCCCCCGTAGGAATGCTGGGATAACAGACACACCTATCATGTCTGGCTTTACATGGGTTCTGG
GGATTCGAACATAGATTTTCACACTATCAGGTCAGCCCTTTACCCACTGGGCTATCTTCCCTTTCCCCTTTTACAGTTT
TGAGAGGACTAAGTTAACCAGAGCCAGGCTGACTCCAAACTGGCAGTTTTGGAGACGAAGCTTAAGTTTCCTTTTCCCA
GAAATGAGAACCTGCATCCAAGAAAACTGTAGTCAGCCAACCCCAGCTTCGGGAAGCCAATCCAAGGATGCCTTGCCAC
CCTGGAAAGTCCCCAGAGCCCTAACCAATCACAAAAACACCCATACCTCACTGGAGATAGAGTCAAACAATCTAGGGGG
GGGGGAAGGTAAAAGTCACCCACTCCTACCCTAATGGCTTTTAATTGACCCTGAAGAGCACATACCTGTGTCTCCATTC
TGGAATGGGGAGACCCCTGCATGCAGGAAATTCAGCTGAATAAACGCTCTTTGCTTTTGCATGCTATGGAAGACCTGGG
TCTTCCCTCAACAATTCTTGGACCCTTACAGGTTTTGTTTTTTTTTTTTTTGTTTTTTTTTTGTTTTTTTTTGTTTTGA
GACCTAGGTTGGTCCTCAGCTTCTCAGGTGGTGATGGGGCTCTAACCACTGATCCACAGCAGGCCACAAACCAGCTATG
ATTTAGCTTTCTGATGAATGCCGAATTATTTCCACAATGACGGTGCTACTCGCTTTTCCCACCAGCAACGCGTACGGCT
GCTTTTCCTCCTGAATCCTCACTAGGATGTATTGTTGTGTCCTTGATGGCAGCCTCTAACTGGGGTCAGCTCGAACATC
AATGTAGTTTAGTACTTCCCTAATGACTGCAGATATTAAACATTTGCCCATATCTATATCTACACTTGTATGCATAAAT
AATAAATACACATATATACATTATATATTGAGCTTTTGTGCATCTTTTAGGAAGTTTTCTGTTCTGTTTTACAATAGAG
TTTCTTGTGCATGATGGATCATTCTGTTATTGTGGCAATTTTCTGAGTTCTTGGTAAATTCTGCATGTTAATCTTCTGC
CAGATCAATATCCGTCCTCTCTGCCCTGCTGTTCCCTCTGCCCTCTCTGCCCTGCTGTTCCCTCTGCTGAGCCAAACTT
TTAACCCTGGTGAGCTCTCCCATCACGATTTCTTACTCACTCCTAAGCTCTCAGGTCCCATCTGGTCAAGTTGGTGCCT
GTAATTATACTGATAAGTTTCCCCTGAGTTTTCCTCCAGTAGTTTCAATGTTTTCCATCTTACATTAAGGTCTTGGGTT
AAACCTGAGAATCACAAGAAGAAACCAAATACACAATTGTCCTATTAAATAAAGCATGAGGTATGTTGGGGTGTGCCCA
GGACTGGCCAGCTGGTGTCTCACCCTAAGTCGGGATTTGAGAGACCTTTATAGGAGCCTTTATAGGAGCAATAAGGTGT
TCACAGATGTGAGAGAGTTGGCGGTCGTGCAGTATTGGAAAGATACAATGAAAGCTATAAGGGTATGCATTATGTGAAT
GGGGTTGCAAGTTTAGTGTAGGTTGAAGAACATGTTTTGCAGTTCACATCAGCTCTAAGAAACAGGAACTAAGTCTTAA
TTACAAATAGAGACTTTAACTTGCAAGGACTTAACACAGGACAGTCAGGAACTTATTCTTAACAGTCTTAACTGCGAGC
AGAACACTGAATCTGCAAGGTGTAGTTTTCCTGCTTGGGTCTCTCACTGACTTTCAAGGTCTATTGTTTCTGGTTCAGC
CTCACACTTGGATCTGTTTGCATTTGGGTTCTGGGCAGGGTAAGAGATAAGGGTCTGAGTTCCACCATCTGAACATGGT
GTCCAGTTTTATAGTACCCTTTGTTGAACAGGCTGTCTTCCCTGCCAGGCATGGATTTTTAGTTCCTTTGTCAAAGATC
AGATGGCTGTGGTTCTGTGGGTTTATTTCTGGATCCTCTGTTCTATTTCAGCCATCTTCATGCTGGTTTTCATGACTGT
GCCTTGCTGGTTTTGTTGCCGTGACTCTACTGTAGAGTCTACAGTACTGTTATACCCAAGCCTTGCTCTGTTTGCTTAG
AACTGCCTTGGCTGTTTGTGGTCTTCTGTGCTTCCCTAAGACGCCAAAGAATTCTCTCTACTCTGTGAAGTATGTGAAG
AATCCCTTTGAATAGGGATTATATTGACTCTGGAGACTGCTTTTAGGACTATGGCCATCTTAACACTGTTAATTCTGCT
GGGCCCAGTTGCATGGGTGATCAATCGCTCCACCTTCCAGTGTCCTCTTCAGATCCTCCCTCGGTATGTCTTAGTTGTA
TTACATAGGTTGTTCACCTAGGCTGCGCTTAGCCTTATTCCAGGCTCTTTTCTTGCTAGATTCTTGGTTTGTTTTTGGG
CTATATTCCTAATGGAATTGTCTTCTTGATTTCTTTCTCCAGAAGTTCATTATTGATGTCTAGAGACACTACTGATTGA
TTGATTGATTGATTGATTGACTCCTTGTTTTCACATTCGTATGAAAGATGTATATGTGTTGTAGGTATGCATGTGTAAG
CCAGAGATCAACCTCAGATTTCTTTCTCTCTTTCTTTCTCTCTTTCTTTCTTTCTCTCTCTCTCTCTTTCTTTCTCTCT
TTCTTTCTCTCTTTCTCTCTCTCTCTCTCTTTCTTCCTTTCTCCTCTCCTCTTCCTTCTCCTCCTCTTCCTCTTCCTTC
TCTTCTTCTGACACAGCATCTTTCTGGCTGACTTGGAATTTGCTATGTAGACCAGGTTGGCCTTGAACTCACAAAGCTC
CTCTGCCTCTACCCCTGGAGAGATAGGATTAAATGTGTGAGCCACTGTGCCCAGCCTATCAGCTATCTTTTCTTAGGAA
CCTTCAACTTTGTTTTCTGAGATAGGATCTATCACAGAGAAAGGAGCTTCAGTTGAGGAAATGCCTCCATGAGATCCAA
CTCTAAGGCATTTTCTCAATTAGTGATCAAGGGGGAAAGGCCCCTTGTGGGTGGGACCATCTCTGGGCTGGTAGTCTTG
GGTTCTATAAGAGAGCAGGCTGAGCAAGCCAGGGGAGGCAAGCCAGTAAAGAACATCCCTCCATGGCCTCTGCATCAGC
TCCTGCTTTCTGACCTGCTTGAGTTCCAGTCCTGACTTCCTTGGTGATGAACAGCAGTATGGAAGTGTGAGCTGAATAA
ACCCTTTCCTCCCCAACTTGCTTCTTGGTCATGATGTTTGTGCAGGAGTAGAAACCCTGACTAAGACAAATTGGTACCA
GCAGAGTGGGGTATTCCTGTGACAACCTGACCATGTTTTGAGGAGGACTGTGGAAGGACTTTGGTTTGGGCTTGAAGAT
CCATTCATTGTTAAGAGCTCTGTCAGATGTTGTGTAGGAGCTTGGAAGATAATGTTGAGAACAGTGCAGAAGATGGAGG
TCTGGTTTGTGAAATTTCAGAGGGAAAATTAAAGACTCTTTTCAGGGCCATTGTTGTTTTGATTATGACGATTCTGTGG
TTCTGATTAGCTGGGGCTGAAGAATCAGCTGTGATTAACAAGATACCAGAACTACTAAAGCAAAAACTTTGCATTACTG
GGACTATTGATGCTGGTTAGCTGGAGCTAAGAAATTAGCGGTGATTAAGAAGAGACCAGCATCATTGAGGTGACATCTT
CTGGGAAGTGTTTTCTGAGAGCACAGTGGCTGCGTTCCAGATATAGCCAAAGTTGTATCTTGTGCTGTGGCTGGACTTG
GTAATGTGTAAGGGTCACCCAGGTGGTACTGGTTTTGAAGGCATGAAGGAGTTGAGCAGAGCAGCTGAGGCTCGGCACT
GTGAGAGGCCATGGAAGGCCATTGGTGAAAGTGCAGCCTCAGTTGCAATTGATGGCCCAGGACTGAAGGGGTCATGCAG
TGTTTTGGAGATGCCAGTACCATGAGATGACCACCAAGAGCAGCAGCAGCAGTGGAGTAGAGGCATCTGGAGCCTAGAG
GATGACTCGTGTGCGACAAAGGGCATGGCTGGAGAAGTGACCCAAGCCCTTGGAGGAGCCCAGAAGATCTTAAGTTGGA
TCCCAGACATTGGACGGTTGGAGATTGACTTTTGCTTTTGATTGTGGCTGTGCCCTGATATTTTCCCTCTTGAAGGAAG
AAACTGTTTTAGTGGAGCCCACAGTTAAGACTTTTAATTGTAAAAAGACCTTGGATTTTAAAAAAGATGGATATTTTAA
AGAGATTGAAATTTTAAGAATATGTAAAGACTGTGGGACTTTTAAAGTTATTTAGATCTTGGGGATGAATAAGAATGTA
AGGGTTGAGGCTTACTAGTGATGTGTTTGTGTGTCAAGTTGACAAGGGGTCAATTGTACTGGCTAGTTTTGTGTCAACT
TGACACAGCTGGGGTTATCACAGAGAAAGGAGCTTCAGTTGAGGAAATGCCTCCATGAGATCCAACTCTAAGGCATTTT
CTCAATTAGTGATCAAGGGAGAAAGGCCCCTTGTGGGTGGGACCATCTCTGGGCTGGTAGTCTTGGGTTCTATAAGAGA
GCAGGCTGAGCAAGCCAGGGGAGGCAAGCCAGTAAAGAACATCCTTCCATGGCCTCTGCATCAGCTCCTGCTTTCTGAC
CTGCTTGAGTTCCAGTCCTGACTTCCTTGGTGATGAACAGCAGTATGGAAGTGTGAGCTGAATAAACCCTTTCCTCCCC
AACTTGCTTCTTGGTCATGATGTTTGTGCAGGAGTAGAAACCCTGACTAAGACAGGATCTCTCATTGGAATCTGGAGCC
TACAGAATTGGCTACACTGGCTGGCCGGCTATCCATCGAAGTTATCCTGTCTCCATTTCCCCGGTGATAGGATTACAAA
TATGAGACCACCACACCCTGATTTTTATGTGCCTAGGGTGATTGTGTATCCTAGTGCTTTCTGACTTTGACAGACCTGA
GAGATATCTGTAGTGAAGCCTTTAGGGTCTTCTAAGCTAGTGATTGTATCTTCTATAGACTGGTAATTACTCTTTTATT
TGTATCTCTTTTATTTCTTTTACTCGTAAAATTGCTCTAGCTAAAAGTTTAAGTTCTACACAGAGTAAGTGTGGTGGTC
CTTATCCTTATGCCCTTAAATGGGCAACCTTCTCCTCTTCCAAATTTAAGAGGAAATTGCTTCCAATTTTCTCTGTTCA
GTCAGATGTTGGCTATAGGTTTGTAGGATGCAGACTTTAGTACGTCAGAGTCGTGATCTACCTATTTATGTAGGACTTC
TATCATGAAAGGATGTTAAATTTTGTCAAAGACTTTCCTGCATCCTTTGGGCTGATCACGTGATGTTGTCCTTACCCTT
CCTCAAAGCCCTTCCATGATGCTTCTTACATACTGCTATGCGGTGTCTCATTTTCGTTGATTTTAGGACTGCTTGTCCC
TAACTGTACTCTTCAGTATCCATGTGTTCTATAGACTCTTTCCTCTCTCTTGCTGATGATCCCTAGCCTCAGTCCATCG
TGACCTGTTATAGAAATTATCCCAGGCAAAAGAGCATCAGCAGAAGGGAAGGAGTGCAAGCAAGTCCAGATAAGGACCA
GCATTCAGGACAGTCCCACTCTTGGCCACAGTCAGAGAAATATTTCTGTTTGCAGTAGTTAACACATAGCCAATCGAAG
TGCTGCCAGTAAGTGACCATTGAGTGTTCAGCTTTAAATGAAACATCTCTAGCAATGCCTGTTAGCAATCAGGTGTTTC
CACCAGCCTCCCCTTGGGGGCCTTAGCGGTGCTTACATCATCACCTGTCACTCCCAGGTGTGGCACATAAAAGGACCTG
GCCACCCCAGACCCCATCCCTTCCCACCCTGTCTCTGTCTCATCTCATTCCTGCATGCATGTTCTCTCTCTCTCGCTCT
CCCTCTCTGTCTTGTTCATTCTGCTGTCTGTCTATCTGTATCCCTCCCTCATGTCCCTACTCTGAGACAATCTTTCACT
CTTCTCCCTCTCCTAATAAACTTCTGACACTTTATCTGTTGAATGGTGTGATTTCTTAGCTGCACACCTTCCCCACCCT
TCCATGTTCTTCCTATCACTGCCTCCAAAGTCAAGGGAATTCGACAGAAGATGGCTCAGGAAGACTGTAAGAACCTGGA
AACGAGAAAGAACACTGTGAAAAGCTGTCTTCTGGACACAAAATGGCTGTTGTGTCATGAACCCACAATGTCAGCATTT
ATCTACATCCTCCATCACTCTGGGTTCAAAAACATTGCATCATACATAAGGGAGAGACTATAGGCAGCTAGTGGTTACT
GGAGGAGGAGGAGACATGGTCTCCATTGGTGTGTGCACTAGTAAGTGGTCCTAAATGACCAATACCAGCCATGCCAATG
CAGGCAACTCTAGTTGAATGCATTAAAAGAAAGTATGGAAATAGAAGACAGACTTGCTGAGGGCTTCAGGGAGCCAGAG
GAGATAAGAGGATTATGTGGGGATTTTAATCAAAGTACAAAATATATGTGTGAAATAGTGAAGTTTTAAAAAATTATTT
CAAGTGTTTAGGGTTGTTTTTATCTTTGCTAAATTTTACTTTATAACATAAAGTATCTGATTAGGAGTAATTTATGTGA
GTAGCTGAATAGACTGTGCCTCCATCTGCTGTTATATAAAATGACTTATAGCTGTCTGTCCACTTGACCTACAGTGTAC
TTTAACCCTGATTTGGGGGACATTGGAGTTATCTATCACTATTATACATCATACCCAGTAGTGTTTATGAAATTGAATG
CACCAACATTCAATGCATATATGTTATATGTGCATATATAATGTGTTATGATGATGATGATGATGTCCTGCTAGATCCT
TTCTTTGTCTCTTCTTATTGATTCTGGCTTGAGTTATACTTTGTCAGATATGACTACAGTCATTCCTGCTTGCTTTCAG
GTCCCTTTTGCTTGGAATGTCAGATTCCCTCCTATACTTTCAGGCTGTGTTTAAGTTGACACTATAAAATAAGTTTCTT
GCAGACAGCAACTACTTAGATTTTTTTAAAAATTTAGTCAACTAGTCTGGGTCTTTCAGTTGAAAAAATAAGACCTCTT
ACATTTACAGTTATTATTGGAACGTATGTACTAATTTGTGTAATTTGATTGTTCTTCTAGCTGTTTGGTGTAGAGGAAT
TTTAATCCAGCAACATGGCTGCTTTGGCAAGAGACCATATCCAAAGACCTAGATCTATGTGATCTGGCAGGAAAGCAGC
CACAGCCTGAATCACAGTGTGATCCAGCCGGAATTCAGACATGTCCTTTGTACACTTTAATCTCAAACAATAATACAGA
GATGTCTAACTGAGAGGCAGACAAAGTGATGAATCAGAGAAAGATTTGACAGAATGAGTCAGGGATAGGACAATCCCAA
CTCTCATGAGAACAGACAAGAAAGGAAGGCTATATTGGGGTTCATCAAAAAGACCCTTACTCAAAAAGACCACAGAGAC
TGCCACCATTGCTGCAAAACACATGAGGATTTTTATTGATCCAACATGTTGGGGACTCCCCTTTCAGCACACAAGCCAG
AGGAGAAACCCAGAACAAAGAAAGAACACACTTTTTATACCTTTGTAAGGGGCAGATTTGGGTAACAGGGTTCTCATTG
GTGTAGCAAGTAACCCTTTCAGGCATTGGTTGGTTTGTATAGTGACTAAGTAACTCTTTGGCCTAGTGACTCACTTTGC
TTGCCCCCATGGTGGGTTATTATGATTTGGTCAGCAAAGTAATAGTACATTTTGAACTTATGGGTCAGTTATTAACATC
ACAGCTATTAACATCAGGGGAATTCTTGCAACAAGGTCAGGGTGGTTTATGGTCTTTGTCAGAATTCAGTGTGGGGTGG
GGAACAGGAGAATTGCTAATCTTGTTATGGTTATTTCTCTGAGAACAGCTAATATTGTTTTGGCAACTTGTAGGCTCAG
TCATTTTGACTGCTAAAACTATGTTTTTACATTTGTTTAGTCAGCCAGCTTCCTTCTATGGCTCTGCACTTGGCTGCTA
GTACAGTTTGGAAAGTCCTTTTTGAAGGGGGAAGGTACTGGGTGGTCTTTAATTCATTTTGGATGTTACAGCTATTTAA
GAGCAGTGGAGGTAGGGAGGGAGAGAGAGAGAGAGAGAGAGAGAGAGAGAGAGAGAGAGAGTTAGGAGTCAGTGCAGTG
AGTGTAGCGCACTGGAGTTGAGTTTGTGAAGCAGTTGAAGCCAGAGAATAAAGAGGCGCCAGAAGGTTAGACTAAATTG
CCAGAGTTACTTTGAGGCCAAGCAGAGCAATTCAATGAGAAGCTGAGAGACAAGCCAGATCGAATCAGTCAGCCCAGAG
AAGTTTGAGCCAGGACAGCTGAGTTGAACCAGCCAGCCAGTGTTCAGAAAGAGCTAGAAAGGGTGAGCTTATTCAGCAG
TAAGCCTGAGATGACAATGACATCTGGTGAGTAAACTTTACTTTTATAGTTTAGACTATTTTGTTGTTCTTCTTTCTCC
CTATTGGTTTGATGGCTTTGCCCTTGATGGTTTATCCTCAATAATATTTGATTCCTCCCTGAGTCTTGTTTATCTGCTC
CTCTAGTGAGATTTCTCCTTTACCGAAATCTCCTGTCATACCTCTTCTGTGTGTGGGATTAAGTATCTTATACTTAGTT
AACTAATTTAGTTATCTTACACTTAAATCAAATGCTGACCTAATGGTCATGAGCTCTTTTAGTATATGCCACTCTTTGA
TAGTTTCCATTTCTCAAACTGATCCTGAAAGATGACTTCTCTGGACACAGAGGTCTAAGTTGGCAGTTGTTTTCCCTAA
GGCCTGAAAGAGACTAACCATGCACTCCCTCTGGATCTTTAGACTCTAAAGTTCTGAGTGTTTGCTGAGAAGCCTTAAG
TACTAAAGGGATTCCCGTCAGAATCCCATTTGGTGCATCTCTTTCTTATATCTTTCAGGGTTGGGTTTTTTTTTTCCTT
TGTTCTGAGCTCTTGACAGTTTAACTATAATATGATGTGAAGAAACTCTTTTCTGAAAAAGAGGGGGGCAATTAAATCA
ATACTAGCAATAGCTTAACTACACGTAAAGGGCGGAAAGTCAGAACTTTATCCAAGATACTTTGTCAGGAAACTGAAAA
TACCCACGTGTTTCCAGACAGAATCATGAAGAACATTCCCAAAGGCCAACACTCCCCTAAGATGCATCCAGTGGAGCTG
GGAAGACGATGCAAACTCAAGCTGGGAAGAGGATGCAAACTCAAGCTGGGAAGACGATGCAAACTCAAGCCCACGTTAC
CTCCCACTTCCAGTGGAGAACATGATCATAAAAAGGAATAAGCAGTTACCATCAGTGTTTGTCCCTTCCATCAGAGGCT
GAAATCACAGATCTTGGCTAAGGAATACAGTAGGTTGCATCTTCTCCTGTCCTTTGTTCATAGTTAGATCAAAGCCTTC
AGTTCAGCTCTGCTGTGAGCTTTCACAAGGACTTCACTACTCTGGTCTTCTTTTTGTTCAACGGAAGGCACTAGTCACT
CTTCTACAACCTTAAGACTGTACTGATCAGCTGTTTTGGCTCCCCTGACAGTTTGACCAAAATATGACAAGGATGTGAG
CTCCAAGGAACAGAAAAGGAGCCAGGATCAGTCAACCCCATATACTAATGGGTTAGACACCGTGGGACTCATTAAGATG
GTCACATCCTGCTTCTCCACAGTGGACTTCTGGCAGTTGAGACTCTCAAGCCATGTGCACACAAACCATCAGATAGTGG
GTACCACTTGAGTCTCTCCACAATCTCCCTAGACTGGCATGTCTGCCAACAACTACTTCATGGCTTACACATCCCACAG
GAGAATACAGTCATCATAGCTCCAGTAGCCAGAATATGCTCCTCCTGGGTTTGCTCTGGATGCTACACACACCCAGGGA
GTGTCTCTAAATGAACAGAGGTTCTCAGGCAGAATCATGGAGGGTCTATGCCCAAGCTCCGAGCCTGGAGCCAGGTACC
TTTCCCTAGTGGAAACCAATCTGCCAAGCACCCTGGTATCCTGCTTCTCAGTAGACCTTCATTTCCCCCTTGTACGTCG
CCTGTCAGAGCAGCCTTACAGATCCAATGGCATTTGTCAAGCCTACAGAATCATGGCCAGCCACTGGGATGTGGCATTT
CATGTCCAGGATGGCAAAATTATCCTTTTTTGGACCTCAGTCAAAGGGTCAGCAGCATTGTCATTGTTGAAACTCTAGA
CTTATGCTTACTGGTAGATTTAAATTGGTAATAGTCCATAAATGGCTTCTTCGTTTACATTCATGGAGATACTTGCCTA
TAAATTTCTCATAATGTCTTTGTCAGTCTGGACTATTTTTTTAAAAATCAAAAACGATTCTTTCTTGTCTGAAAATACT
TCATTATGGTTGCTATTTTGGGGGTGTTTTTAAAGGGAGTTTTGAGATATAAATTACAGACCATGACATTTACTTTATA
TATGCATACCCTTTGCCATTTTCATAAGTTCTTGGAGTTGTATAGTCATTCCACAATGCAGTTTTAACACATGCCTCTT
ACCCTGTAAAACCCCCCAGACCCAGCTCTTACTCCAGGCAATGACTACATTTATAGATTTACTCTCCAGATATTTTCTA
CATAGACTCACGTTATCCAGGACTCGCAGGTTCTGCTGCTTCATATGGATTTTTTAAGGATTATCCATGCTATAAAATG
AAATAATAGTTTGCTACTCTGCATTGCACTATAATACTGTCCTGGTTGAATATAATATGCATTTAAGTCACCAGTTGAT
GGATACTTATTTAGATTGTCTCTGGGTTTGGGCTATTATGAATGCAGTTATAGACATTCGAAGGCTTTATACCAATATA
TATACATACAGACATACACACACACACACACACACGCACACACACACACATATATATATGAAGAGAGAGAAATACATGC
TTCCATTTTAATTTGCAGGTCCCTAGAAGTGGAATTGCTGTATTGAATACATAAAGAGCCCTTGCACCTTCTTAATAAG
AAAGCAAGCAACCCAATTAAAAACTGCACAGAAGTTTTAAATATGCATTGCATCAAAGAAAATAGAGCATGAAAATAGC
TAACAACCCTGTAAAACTCAACATCTTTAGTCATTAGCAACATGCAAATTAATACCGTAACTCCTATTAGCTTTCCACT
TCTATAACAAAATACCTACGATGAATAACCGTAAGGGGAAGAGTTCGTCTGTGTGCGTGGTGTCAGAGTCTGGACGTGT
TCAGCTATGTTGCTTTGAGACTATGGTGAGACAGATTTGGTGAGGAACAGGAGGACAATCAAAGCTTCTTCTCACTTTG
TGGTAGCAAAATAAACAAAAAGGAAGCAAAAATAAATAAATAAGGGTTAGGGTATCAGTAAACCCTTCAAGAGCTCAAA
GTCATGACGCAACTCCCTGCAACTAGTCCACAGGGACTCATGAAGGTTCCACTACCCCCTAACAGCACCACAGACTGGA
ACCAGGCCTTTAACACCTGGGCCCTTGTAAACATTTCTGATCCAAAGGTTGGCAATGAGTTACCGTGCTACATATATTA
GGACGGCTGTCAAGGTTTGATAAGGACAGAGTTAAACAGGAACCCTCAAATGTGGGCAAGTAAAATGGCTTAGCCATTT
TTGAAAACAGCTTGGTATTTGAAAAAGCCAAACACAAACCTGGCAATTCAACACGTCGCTCTAGGGAAAGTACAAGTGT
TTGAACCAAACCCAACCCCAGGGCCCGGGAGTGGCCTTGGCAGGTGCTCATTTGCTGACTGCACGTTTCACATGTGGTG
TAGCTGTTGTTACCTCTGATGACACACAGAGCTGCCCAGCTTGTGGCTGTGACATGTGAGTGACTTCACCACCACAGCA
GATGCTTCTGAAGACAGAAGAGAACTTAGAAAGGTCACAAACAAGTTTGTGTTAATCTTTCATTCTTTGTGGATTTAAG
CGTATATGATCAAATGGTGACATTTCTTAAGTCCAGAGGAAGGAAGGACATGTCTGTGCCTCTGTCTTAAAGAAAGAGT
CTTTGTCTAAAAGGAACAAAGTCCCCCACCACAGGAGCTTTATAACTAGTTTGTGTGGTAGGGCTCACGAATGTGGGTT
TCTGTGCATGTGCACATGTATGTGGACACTGGAAATCAGTGTTGAATGTCTCTCTTGGTGTCTCTCCACCTTATTTTTG
AGATGGTCACACTGTGCCTGGAGCCCAGTGATTTGGTTAAATTAGACAGATGGCCAGCAAGCTCCAGGAACCCTCCTGC
ATCCAGCTCCCCAAATGCTAGGATTACAGGCATTCACCGTAACACCTGCCTTTTTATGTGGCTGCTGGGGACCCCACTC
AGGTCCTCTTGCTTGCACAGTAAGCACTTTACCAACTGAGCCAACTCCTTAACCCCTAGCGTTTTGAGTTTGTTTTACT
ACATAGCTCAGGTTGGCCTTCAACTCCTACCTCAGCCTCCCAAGTAGTAGGATTTCAAGCATGTGCCATGGCTGGTTGC
CTTAGCTCTTAAAGGAGGTCACTGGATCGTGAAATAAGCCCTATTCTCCCTGGAGAATTGAATGAGCATGTGGCAAATG
GCTAGATCCTGTGGCTTCAGTATTTCCCCCCAAAGCACTGTGAGCAAAAGAAATGGCCTCCCCCGCTGTCTCTAATTCT
CTGTTTCCTGGGGCCCTTGCCTGTGGTGCAGCTTATGGTCTCAAACTGCCTTTATTGCTGTATGCAGATTATACAGGCA
GAGAGTGAAGACCTTACTACTTAGTGTTAAACTGGCATCAACATTTAAAGCTAAGGAAGTTTAGCTTAAAATCTGACTG
GCCATCTCTTGCTGAGCAGCTTGTGAACATCTCTGTGGGGAACCCAACTGTGCTTGTCACCATTTGGTTGATCTGGCTC
TGCGGGGCACCCCATACCAGTCCCTCTGAAGGTCTCCCCCAACCATACAGCTGGTCAGCTGTCTGATCTGATGACTCCT
ACAGCTGCTGTCTCTGCAATTGATGTTACCTGCAGCGTCTCATTCTCAGCTCTCCAGGTCTCCTAGTCAGCATCTCACA
TGGCCTGGGTCAGGCTTGATGAGTTAGAATCATAGTGTGCACTCTCAATATGAAGATTCTGCCCAAGGGCATACAGCTG
CTAAGTGGTGAGCTGGCTTTGAGCCCCTGCCCTCAACCTCTGCTCTCAGATCCATTTCCCTGGGCCCAAGCCCTGAGCC
TGGAGGCTGTCCTCAAGCATTGATGTATCATTAGTCCTGCCATATACACTTGTCAAAGATTCTAGGAGCTGGAGAGGAG
CTGGCATCCACATCACCTGTGTTGGCATCTTCAAAGGTATCTATCTTCCAAGATGAAGGCTCTGTTTCATTAATGTTTA
GAGGAACAATTAATAAATGGATGGACTGTCATCTGGGCAGCTCTCATATGGACAGTCATTAATCAAAATAGATTCAACC
ACAGAAATGTTTTAGCTGAGGCATGAAGGAAAAAGAAGGTTGGCCAGTCAAGCCAGAACCCTGGCCACAGTCTTGTCAT
CACATTTCTGACTTCTACTAGCAGCACACTGAAGGGAGAGTTGTCTGTAAAAAGTCTAAATAATTATATTTAAACAGCC
TTCAGAGGTGAATCTTCCAGAGAACTAACTGAAGGATACCTGTGATGCTTAGAATGAGAAATGTCGCCCCACACATACA
CAAACCTCCGGCTTAGGTATTTGAATGCTCGGTCCCCAACTGTTTGCTATGCTGGGCAGTTTTTATTACTTGACACAAA
CTCAAGTCAACTGAGAAGACAACCCCTCAACACCTCTATCAGAGTGGCCCGTGGGCATTCCTGTGAGGTCATTTTCTTG
ATTAATGATTAGTGGGGGAGAGCCCGGCCCACTGTGGGAAGTGCCACCATTGGGCAGGTTGTCCAGGGCTGTATAAAAA
GGGAGCTGAGCAGGGCATGAAAAATGAGCCGGTGAGCAGCACTCCTCCATGCTCTCTGCTTTGTTTCCTTCTTCCCAGT
TCCTGACCTGAGCTCCTGCCTTGGTTCTTCTCAGTGATGGGCTGTAACCTGTATCCAGAAGTAAACCCTTTTCTCCTAC
AAGTGGTTTTCAGTTAGTTTCATTACAGCAACAGAGAAACAAATTAGGACAGTGGCACTGTGCTCAGATATTATGGAAC
CTTTAGGACAGACTTGCTGAAGGAAGTATGTCACGGGGGGGGGGGGGTTCTTTGAGGGTTTATAGCCTCACACTACTTC
CAGGTCACTCTCTCTACCTCCTACATGTGGTTAGAGATGTGACTCTACTACTGCCATGCCTTCCCCATCATTATGGGCT
CTCCTTCTGAAACTGTAAGTCAAAATAAACTAATCTATAAGTCACTTCTGGTCATGGTATTTTATCACATCAATGAAAA
GTACCTAACCCGCAATCCTTATGTGCTACAGTCTACACATGGTTTGTCTCCTTGAAACTCAATTGAGGGTCATAGGGAT
AGCTCAATGTACAAAGTGCTTCCCACTCAAGCAAGCAAGAGGACCTGAGCTCAAATCCCCAGCTTCCCTGTAAGAAGGT
GGGTGCTGCAACCTCTGTACCCCCAACACTGGGTAGACTAAGGCAGGAGGATACTCAGTGCTTACTGGCCAGCCAGTCT
AGCAAAAATAGAAGTCTCTTGATTGTCTCAAAAAATAAGGTGGGAGATGATAAGGGAAGATACCCAGTGCCAACCTCTA
ACCTCCACACATCCACCATGCACACACGCACACACACACACACACACACACACACACACACACACACACACACAAACCA
AAGTCATGCTGAATTTTTACAATAGTGGTTGTGGTGGTTTGAATATGCTTGGCCCTGGGAGTGTCACTATTTGGAGGTA
TGGCCTTGTTGGGAAATGTGTGACTTTGTTGGAGGAAGTGTGTCACTGTGGATGTGGGCTTTAAGACCCTCATCCTAGC
TTGCCTGGAAGTCAGTCTTCTGTTTGCCTTCAGAACAAAATGTTGAACTCTCAGCTCCTCCTGTGCCATGTCTGCCTAG
GCACTGCCATAATTTTGGCCTTGATGATAATGAACTGAGCCTCTGCACCTGTAAGCCAGCCCCAAGTAAATATTGTCCT
TATAAGAGGTGCCTTGGTCATGGTATCTGTTCACAGCACCAAATCCATAAATAAGACAGTGGTGTTGGGAGGCAGAACC
TTTAACAATCTTGATGCTCTCAGATTGGATTAATCCCTAATTCAGGGGAGACTGAGCAAAGTTCTCGTGAGACTGTACT
ACTTGAGTGCAGTATCTCTAAAGCAAGGCTGCCTCATGTTTGACTCCTTCACACACATTCACTCCTTCCGTGTCCCTGC
TGTCCTCAGACAGTAACAGGAGGACCTTATGGGATGTGCTTGTCCAGTCTTGGATATTCAGCCTCCAGAACCATGAGCC
AAATGAAGCCTGTTCCTTTATAAATTATGATGGTGGTAGCTTGAGTGAGAGCTGCCCCTCATAGGCTCACATATTTGAA
CACTTAGTCCTCAGTTGACAGTGGTATTTTGGGGAGATTATAGAATCTTTGGGAGGTATGCTAGTTAGTTGTTTGGGTT
TTTGACAACTTGACACAAATTAGAGTTATTTGAGAAGAGGAACCTCAAATGAGAAAATGCCTCCATCAGATTGTCTATA
GGTAAGTCTATAGGGCATTTTCTTGATTGATGCTCTGGGCAAGTGTTTCTGCGCTATACAGGAAAGTGGCAGAGCAAGC
CATGAGGCGCAAACAAGTAAGCAGCATGGCTTGCTCCATGGCTTCCACTTCAGTTCCTGCCTCCAGGTTCCTATCTTGA
GCTGCTGCTCTGACTTCCTGACTCCTCTCAGTGATAGGAGTGTTAGCTGAGAGTTTTAAGATGAAATAGATCCTGTGGT
GGTTTAAATGAGAATGCCTCCCGTAGGTCATTTCGATGAGAGGTATTTGAATACTTGGTCCTCAGTTGGCAGAAGCATT
TGAGAGAGATGAAGAAGTATGACCTTCTTGGAAGAGGTTCCTGGGGGCCCCAATCTCTCAGTCTCTCCCCCCATCTCCC
TCCCCACACCCTCCTCTGCCTTGTGCTTGTGGAGAGGTGAGAGCTCTCAGCTACTGCTCTACCGCTATGCCTGCCTACC
CGCTGGCATGCTCCCCACCACGATGGACATGGACTCTAACCCTCTTGTACCCTGAGCCCCAAATTAAACTTGCTTTTTG
TAAGTTGCTTTTGATCTCATGGTGTTTTGTCAAGCAAAAGAAACCCTCAGGCATGAGGTGACAATCTGTGGAGGAAGTA
TGTTACTGGAAGGTTTTGCGGCTTTATAGCCTCACCCATTTCCTGTTGGCTCTGTGCTTCCTGTGAATGGATAAAAGCA
CGGCCAACCAGCTTCCTGCTCCTGCCGCCACAATGCCATAACTTTTCTGCTGTGAGGGACTCTCGCCTTCTGGAATATA
AGCCAAAATAAACACTTAAATTGCTTTGGGCCATGGTATTTTATCACAGCAACAACAAAAAAAAAGTGACTGGTGTACC
TTGCTTCAGGAATTCTTATACATTGTCAGAAAATGAACTAAGACAATATGAGACAAATTCCTTCACATTTTCTCCGAAA
TATGTAATTACAATGAAAAAGATAAAAGCCACACATTAGGAAAGATAGCATTTACATGAAACACTCAATGGAATCTTGA
AAAGTCTTTTCAAATGCAAATCCTAAGCTTTCTTGAGTGACCTTAACTTTTATATTAGGATTTATTCTTGAGACGATAC
ACAATCCCTGTCTAGAGATTTTTAGTGACAGCATTTTTAAGTTCTTCACAGCCCACACTGATAAGACACAAAATAGTTA
ATTTTCTTTGCAGTATTTATTCAGAAATCTTAGCAGTAGACTGTACACAAAAGTGCAATAATTGAGATTCTTCCTCTTT
TCTTTACCAAGTTTATTTCTGAACTTTAAAATAATATTATGCATTGATTTTTTAAAATAATTATTTATTATTATATGTA
AGTACACTGTAGTCGTCTTCAGACACACCAGAAAAGGGCGTCAGATCTCATTATGGATGGTTGTGAGCCACCATGTGGT
TGCTGGGATTTGAACTCAGGACCTTCAGAAGAGCAGTCAGTGCTCTTACCTGCTTAGCCATCTCGCCAGCCCCATGCAT
TGATTTTTTAATCCCATCAAATATTTTTAGACCTGATATTTTTTTAAATGAGTGCAGTGATAAAGCCCATTACCTTGTA
AGCTAATCTTAAATATTAGTGACAAACACAAATTTGAAGAACTTGTTTCTTTCAAGGAAACAGACACCCTAGTTTGAGG
TGGCTAAGGACCCCAGCAGCAGACTCCTGTCTGATGGAGTTGTTATTTGATGCATTGTTCAATAATATTCATAGCCAAG
TTTGTAGAGATTGCATAAAGATGCAGAAATTTTTGTGTAAAGGCAGATTGGGACCACTGCCTACACCCATCCAAGCTTT
GTTTTGCCTCTCCATGCTAGCCCTTCTCTTGTCTCCTCTGCCTCAGTGCACAGAAAAATGCATTTGGGCACTGCAAAGT
TTTCTTGGGGTTCACAGAGCAAGCACCAGCCATGCTATGTGCCCTTTTTCCACAGCAGAAAGTAGAACTCTCTGTCATT
CAGTCAAAAGAGATGGCCAAGGGGTCCAGAGTGTCTTTGATTATCCATAGCCTACAAAAGATGTCACTTGCGGCTGGGT
CTGTGGCAGATAGGGACTTGAGCTGTTTGACCATGATGTCTTAGTTAGGGTTTCCATTGCTAGGAAGTGACACATGACC
AAGGCAACTCTTATAAAGGCAAACATTTAATTGTGGCTGCCTTACAGTTTCAGAGGTTTAGTCCTTTATCATCATAGCA
GAAAGCATGGAGGCGTCCTGGCAGACTTGGTGCTGTAGAAGGAGCTGAGAGTTCTACATCTTGATCCAATGGCAGTCAG
GAGAAGAGACTGTCTCATAGGCAGCTAAGAGGAGGGTCTCTTCCGAAATGGGCAGAGCTTCAAAGCCCACCCACACAGT
GATGCACTTCCTTCAACAATGCCACAATTAAGAGTATCACCTTCCTAAGAGTATCACCTTCCATGGGCCAAGCAGATTC
AAACCACCACACCTAACTTTCTTCCAAAAGGACCATGGAGAGGAGTTCCAGCTCCCTGGGGTTTGACTTGGCTGCCAAA
ACCTTGAGGCTTTGTGAGCCCTGGAATCCACCTGCAACTCAAGCAAGATGCCCGACTTGTCAGACGCAGACAGTAGTTC
CCTCAGAAGCACAAATCTGCTGCAGAAAAAAAAATTTAAGTACCATTGTTTCGATAAGTTAGTTTGTTATCTCAACCCA
TTCACCTTATTCGAGAACTTGTTCTTGAGAGTTTGTGCTAAGGATCTGGAGAGATGGCTCAGGGATTAAGAGCTGCTTT
TCCAGGTGACCCAGGCTCAATTTCTAGTACACACAGTCATCTGTAACTCCAGTTCCAGGGAAACTGACACCTTCTAACT
TTCAAGGGCACCAGGCACACACATGGTGCACACACATACACATTCGGCAAAACACCCATAAAGATAAAATATGTTTACA
ATTTTTACATTAAGTATAAATGCTACCCCCTCTAAACAAGTAAAACGTCTCCAGGGAACCAGAATGAAGAGAGGTAAGT
GGGGTAAGTTTCTGAAACCTTAACCTGGCAGCCACAGACGGCATCCCCAGGAGCCTAGAGGCATAACACAAGTCTAGGG
CTCCACGAACTTGGGCTCTCTAACTGAAATGTGACATTTGTTCCATTGTGACTAGAGGCTGTAACCCACAGTGGTGTTG
CAGTACCTGTGGTTTTAGTTCCAAGAGAAATCACAGATGTTCCCACAGCTCATTAGAATGGCTGCAAACATCCCAGAAC
ATCCTCTGCACGCACGGCTGCTTCAAGGCATGGTGGGTGATAGATCTGCCATAAGGCCTTATTATTTAATGAGTTAATA
GGGAAGCACACATTAGACAGTATCACAAATTTGCTTTTCTTGTGTTTTGATAGCTCAGTGCCAACATAATTGCTGTTCT
CTTTAATGCTGTGCATTTTATTTCTTGCATTTAGTCTTTTTCAGAGAAGTCCCGGGGCTCCACCATAATGCAGGAGGAA
TCCTCAACAGAGAGGCTATCAGTCCTTCGTCCATTTGGGAAGCAGTGAGGATGGTGGGAGAGGATCCTGGCCATTTGGT
GGGGGAGGTCCCCTGGACCTGAGCTGTCTTATAATGTTTCACGTGCTGATTTAGCACATCTTTTGTGTATACACATGCG
TGTTCATGTGTGGGACTGTGTACACAGACATGTGTATGAGTGTATACAGGTGTGTATGCATGTGCACTAGAGGCATATG
TTAGGCAAGCACTTACCAATGCATTGCCTTTCTCTACCTTGCCCAGTCAAGCTCAGAGAAATATCAGAAGGGCTCGCCA
AGCAGTCTGGGGACACAGACCTCCCATTTTCAGAGAGTGGTCTGCAATCCTAGCCATGAGGCTGACCCCAAGTTCCCTG
TAGCCAGGAAGCCACTTGGATCCTGCAGCTTCACCCTCTGTAACTCTGGAAACTGCTCCTCCACAGGAGCAGCACCAAG
ACCACACCCACTGCAGCGAGCTGGAGCTGCCTAGAGCATAGGTGCTTGGGAAATCTCTCTGAGCCATGTTATCTCATCA
GCTGAAGCTTTCCACAGAAGCAACTGCTCCTGAAGTTCTATGATCCACCCTCTGACAGGAGTGTCACACTCCAGAATAG
GAGCCAGAGTAGGAAATACCAAATCCCACCACAACGTGTACTACATTTCCAAAAACCAAATTCATCTTATCTTTTCCAG
TGCTGCCTTGAATCAGGAGTACTGGGGGAGGGGGGAGGAACTTATTAAGATTAAGATAAAATTCAGAACCCTAGTGGCC
CTTGCCTATTATCTCAGTACTTGAGTGAGGTGGGTTTAACCGACGTAAGTTCAAGGGTAGCCTGGACTACACAGTGAGT
TCCAGGCCAGCCTGGGTTACAGAGTGAGAACATCTACAAAAATAAAAATAGAAAATAAAATTCATATATCATAAAATTC
ACTCATTTGAGAAGGGTCACAGGAATTTAACCCTCTGTGAAGATATATGAACAGTCATTGGCTGCTGAGGGAGGGGAAG
AGTCATATTCACCAGTGATATAGCCACTGGTTAAAGTGCCCTTGCTCAAGTAGATAGCTCTCTACCCATGCTCTTTCAG
GCAAGTCTAAATGCAGTAGGAATACAAACATACACACACACACACACACGCACCACTGAAAATAGTAAGAGGACTGTGA
AGGGGTTCAGTGGTAGGGGAAGTGGATAAAATGGGGGAGCTATTATCAAAATAGATCATTCATATATATATATATATAT
ATATATATATATATATGTGTGTGTGTATATATATATATATATATATGTATATATATATACATATATATACATATATATA
TATATATGATGACATATAAGAAAAAGATCCTCCCCAATCTAAAGCATGCAAATTCAATGTTAACTGTGATGTGCTCAGA
GTGGGGCAGTGGTCAGGGCCATGAGTGATAAAATATTTATAATTCCCAAGGTAAAGTCTATACTCTTCCGTTTGTCCTG
CTTCCCCCAACTTCCACCAAGATCTACTGACCTCCTTCTTGCCCGTATAAATTTGTCTGATCTGGGCACATTATATAAA
GAGCCACACTTTCTGTAACGTTCTGTAGCTGACACAGCACGGTAGTTCCCAGATATGTTCTTTCTCTGCATCCCCAAAT
AACACTGCACTGCATGGCTAGCCACATGCTGCTCACCTACTCTTCAACTGCAGATGTCTGGGTTGCTTCCACTGTGGGG
CTGTTGTGAAAACGCCACTGTGAACACGTGTGACCTGCTTTCTGCGTGACAATTTCCTTCCCTTGAGCATGCCTGGGAC
TGATGCTGCAACGTGATGGGCAACTCGACATCTGCTCTCTGGAGAACCAGTGTCATCTGCTTCCCCACATGCGCACCAT
CCTTCATTCCCATCAGCAGTGTAAGCATCCGACTTTTCTCACATGCTCGGCACTAATCAGAGCCCTTTTACAGTGGCTG
GGCAGTGGTATCTCACTGTGGGTTCTAATCTCATTTCCTGGTATCCAGTGATGCCAATTATCTTTTCATGTGCTTTATT
ACACATCTGCATATCTTTTTAAAAGATCCTTTGCTGGTGTAACTTTTTGTATGTGTATGGTTGGTCTGAGCTGGAGCCC
CGAGTCACGAGCCTCTTGTCCCAGCTGAGTCCTTGTTCCGCTATGCCTTGTTCCTTTGCCCATTTTTAATGATTTGTGT
GTTTTGTTTTGTTTTGTTTTTAATTACTGAATAGTTTCCATTCTCTACTACACTTTAAAACTTAACCCCAGGGAAGGAG
GATTTGACTTCAACTTCACGTCTCTTGCCAGGAAACAAGACACTATCCCAGGGGCACTTCAGTCCTGAAAGCTGTGACT
CTTAAATCTCGTTTTTGGTTCATAGAGACCTTCAAGAATCTAACAAAAACCAAATCCGATGCCAGAAAAGCACATGTGC
ACACATCTCTCTTCTCATCTGATCCCGAGGAGTTTCTGGGCCTTCCACTGCTCAGGCATCACCTTGACCGGGTGCTTTC
TTTCCCCAGGAGGACCGTAACTCACTTTTGATGGTCAAAGAGGCAGCATAAAAGGTCCATATTCTAGGTTCCCACAGAG
GAAAGTGTGAACAGTGTGTTGGGGCTACTCTAAGGCCTGCAAGGCCATCACCACCACCCCACCCCACCCAGGCTTTCCC
TTTGGTCCAGCTTCATGCCTTCATGCCCTGAACCTTCTCAGAACCAGATCTTCTGATCACACTTCAGCCCTATGCCTTC
AACCTGCAACCGTACGGAAGCAAACAAACTCTCTATCAGTCAGGAGAACACTGTATACCTGTCACCTAAACAAATCTTC
ACTAGGCCTGTACAAGCGAAACTTCTCTTAAGATAGGCATCTGCTCCAGGCTTGGAGGCGCCAGAAACCTATAAAGTAC
AAGTGTTTTCTCCTCTGCCTTTGCCCCTAAGAAGCACCTGGGCTGCCTGCCTCGAGCAACTGTGTTGGTGCATCCATCA
CGGCCTCCGGCCCCCACTCTCCCTTTGACCCAGATCTACTGTGTGGCTCTGCAAGTCCCACTGTTTTGCTGTTATTATC
CTCCTGCCTCAGCCTTCTGGGCACTGGGCCGCCACACCTGGCATGGACACAATATTTGGTATGGTAGCTCCATCTTTCA
GCCACAAGCTGACAACTCCCTTCTCTCCTCTGTCCCGCACTTCAGTGCTCTTTGTGACAATTGTGTCAACTCTGTCCTC
AGTGATGTACAGCTTATTTATAATATTTTTCTTACCTGTAACTTTTAGGTTCCAGACGCAAGGGTATTCTGCAAACAGA
AAACTCCAGGCACAGCTCTGCCAGGGCTTCCTCATCATTAGGAGAGGGGAGGCAGGGCTTGGAGTCAGGGAGCCCTCAC
AGAACAGAAGGCGACAGGCTCTTTCCCAGTCAAGATGCTTCCACAGTATGCTGTCCCAAGCAGGATTGTAAGTGCTTTA
CAAATACACTTAGTTCATTTTCACAAAACCTCTGAGGTAGGCATTGTTTGCATTGCTCTATCTTACAGATGATAAACTC
AAGTGTGGGGCTCAGTGCAGTGGCTCAGATTCACCCAGCTAAAAGGTGCGCTAGGATTAGGTCTTTAGGTCACTCGGTG
CCCAGAGTCCTTGCTACCTCTTGGCTCTGTTAGAAGGAAGGCTCTAGGACCCTCCACAGACCAGTTTAATTCCCTTATA
AAATGGGGGACATTACAGCTCCTGTGTCCTAGAACCTAGACACAAATCCATCAGGAATCCAGGGCAAGAGGCATGAACT
AACTCATCTGACAAAGTCTCTGCTGCTCCCCAGCCGTGGCAGTGCTGTGTTCTCAGTGCTCCTCGGCATTTCATAGGTG
AAGACAGGCTGCCGCCCGGGGGACAGAGGATGCTCCAGGACAGACTGGGCAACACTAGACCTTGTCTGAAATAAACTTC
CGATCCTTTCCATCTCATCTGGGAACTCTGGTCAGTGACCATTTATAAAACCTGCTAAGAAACAAACTCACTAACTTTG
GACAACTTTAGGTAGTAGGAAATCCTTTGAAAAAGCAAAGTTGAGGGTTAAACTGCAATCGAATGTTCTGACAAATTTA
GACAACAGACCATTTCAGCTTTTGTAAGAACACAGTATATTTTTAAGGAAATTCATCGCACCTCGTGATTCCTTGAGTG
CTCCCAGGGACTGATCTGTCCCTGCTCCTCCCAGTGATGACATCAGACAGAAATCTTTGATCTGAAGCTTGGGAGACTC
TGAAATTCAAACTCTTTCATCCCCACAGGTGTAGCATCTTGGAACCTGAGCCCTTTAGAAACCTAACTTCAGGAGACCC
TCTTAACCCCAGTATTCTCATTCTAGAGAGAAGAACAAGCGAAGGCTGCTGGTTAGGACTGTTACGTGCCCACCATGGT
TACTGAGTGCCCCCATATGGGCAGCATGCTGTCCAGTCCTGGGGCACAGAGAGCAAGGAAGGCAGCAGCTGCGCCCAGT
GCCGTGATGGGCACACTGGGGATGCTGTGAGAGTGTGAGCCGCTCCCTGCCCCTGGCCAGTGCATACCACGTGGGATAG
GGCGGTCACGAAAGCAAAAGAGCAGTAACAGACTGTGGGAAGAAGACAGCAGGAGGTCAGCATGTGTCGCAGCATAAGG
GCAGTATGTGGGCATCTTAAGGACGACATTTACTCCTGGGTCTACCTCCTAGACGGGCTTGTGCGGGGTGTGAGAAGCC
CCTGTCTCCAAGAGTCATAATCCAAGTAACAAAACCTTCTTAGAGGGTGAAGAGCCCACGGAGGAAGCCCTTCAGGAAA
CCTCATGTGAGCAGCTCACTGCGGGCAGCACTGTGCTGTGCACAGGCCCAGACCATGGAGACCCTGTGAGCATGACCCA
TCATGGGATTTTATTCTGAGTACAGTAAGAAGCCTCTGTGGATTGCAAAGCAGGAAGCAGTAACATTGCATTCATGTTC
TGGACACTCTGTGGAGGTGAAGTAATTGGTGTTGGATACCAGAATGGTACCAGGAGGGAGGCCACGCCTAGATTCTATA
TGAGAGTGGCTTGTGTTAGCGCAAGAGCGCAGTGGGTGGATCTGAGAGAAGCAGAAGCCGCAGGGCCTCCCAGTGAACT
GGGCAGAAGATGTTCTAAGGAGCCAGGAGTGGCATGGAGGAACTGGCAATCACAGATTTCATTTCTGAGGTGGAACCTT
GGCCAGAGGGAAAGTCAAGAGTTCTCTCCTCAGACTACCAAATAAAGGCATCTCACAAAAACAGAGGTATGTCTGATTG
CTTGACTATAGAGAACACTGGGCTACACATGGTCATAAGAGCTTGGGAACAGAGGGAAAGTTCTAGAGCAGAGACCAGG
CAGACAGAAGGGGGTCAGCAGCACCAGGTCATAGGAGTCAAGGGAGGGTGGGAAGAATGTGTGGAATGATGTCCGGAGA
TGAGGACATTAGTAACCTCCAAGGCAGGACAGCAGCTCCAGGGTGAAGAGGGCTCAGAAAGAGGAGACAACCCAGAAAC
CATCACCACAGCCACCTATTTCTAGAAATGTTTGCCAGAGAGAAGCAAATATATGGAGTAGATGGGCACTTTTTCTGTT
TCTTTTGAAAAGAAGAATCCCGGGATGTTTACGTGCTGATGGGAAAGACCCTCTAGCAGGGAGAATGGGAGGAGCTGGG
TCCTTGAGCTGACAAGTCCAGCATGTGCCTTCTCCTTGCCCTGACTGCACGGTCCACTTCTGCACTGGTGTGGCTCCTA
TGCGCCTCAGCTGCCTAGACCCCTGCTCTCCTCTGTCCATGCCCTCCTTGGTTGTCAACAATGTGGCTTCAAATCCTCT
CCCCCCTCTGACCTCTCCTCAGCATGCGAATGCTAAGCATTCGGACATCCCATGAGCTGCATACACTGAATCCAGCTCC
AACCTATACAGTCCTCTCTTTGTGAATGTGTGCAAAAGCCTCCGTGCCAAGGACTCCCCATGGCCCCTTGACACACTTG
TAGCCAGACTTTGCACCTAAAAAGGTGAGAACGCCTGAGAAGCTAGCTGAGCAACTTCACAGCCATGCTTCCACTGCAT
ACTTCCTTTAAGGGAAGCTCTGTAGTTACTCTAGTTTCAAACTGTATAGTACAATCTTTATTTTCAGTAGTACACAGCT
ATTCACATGTAAGTCGGAAAGAGAAAGCATTGCTCTGTGGTAATAAACATTCATGTGAGAAAAGTCTGCAAAGCGGTTT
ATTCTCACAAGTTCCTATGGAAGCAGTCCTCCACACAACGCAGTGAAAATACCCAAGTGCCCAGTCTGCAGACTCCTCA
GTGCCGCCCTTGCGAGCATTGCTTCATTACAACTTTATAATCCAGTCTTCCGTCTGTGGCTGTGCAGGGCTACACGAGG
GCTGTGAACTGCCTCACCGTCTTCTCACTCTCTCTTTTCAGTTCTTCAATGTGGGCGTCCAGGCGCTCTAGAATATGGT
GAGACCTCAGCTCCTCCTCTTCCAGAAACCTGGTAGCTATCGATCCCAGAGGAGAGGTGGGCAGCGAGCCCTGGAAGAG
GGACAAATCATGATATGTGTTAGGAAGCAGGAATGAATGCCCCAACATTTTGATATTTTCTGCCTAGCCCTGTTAAAGG
GAGAATTTTTCCTGAGGAGATATTTTCGTCTTAAATCCAAGAAAGAAAAAAAGGCAAGTTCTGAAAACATAGCTCCACA
GAGCTCTTTCTTTCTGACCCAAAGAGTGTCTGTGTAAAGTGTATAGGAAATGTCGTCAGTTGTCTGAGAGTACCTCGGC
TTAGACTAGAAATGCCTGCCTGCCTCTTACTGAAGAATACAGCCAACGCCTGCTATTTCAAAACTCTGAATGTTACTCT
CACTTTAAAGCACTGAAAATCTACAGGAAACAAATTAAATGCCAGTTAAAAATCAATATTTTTCCCTTTCTTAAAATTC
CACTCCATGGCCTTTGATCTGCAACTCTCAATTCTGGTGATACTTCAGATCTCAGATTTTTGAAGGTAATACAGGAAAT
CTAGCACACGCAGTTTGCTCTCATTTAATGTTATACTTTAGAAGTCACTTTAAACGCTGAGTTAGCACAAATCATTGCC
TCCGGGGGAAATAAACACACACAGTATAGACATATATACACCCTCTTGTCTCTATTTGACAAAACAGAAATGAGTTTCA
GAAGTGAGAAATGACTTTCCCACGGCTACCACTGTAACTGGTGCTGGAATCAAGGCTCTCACACAGCAGGGTGCTGCCC
GCCATCACCACATGAACACTGAGACTGGAACGAAACACAAGGCCACCTTTGCTCCCTCTATTAGGAGCGTGGGAGCCAG
CTCTCCTGCTTTCTGTGTGTCCACATGTGGGTACAGCAGGGCCACAGTACAGTTTAGTGGGCAGTCAAACCGGCAAGTG
ATGAATAATAAGGACCAACCGTGTTGGCCCTGTAGAGCGCAACCATCAGATACCTGACTTCTGAAGGAAAAGCGTGATG
CTCACACTAGCTGGAAAAGGTGACATTTGTGAAATCACATCATCATAGGGCAGGGAAGGCTGGCTGCCAAACTTAGAAG
AAAGGTACTTTTCAGGGTGTTGATTTTTTTTGTTAACTATGTGTAAGTTAAATTGGACATTTATTTTGAAAACTTTAAG
AAAATCTTTCCATGGAATTGCTGACACATTCAAAAATAAACAAACAAACAAACAAAAAAACAAAAACAAAGGTTACTAA
ACTTTCACAAAGACACACCACAGCTAACAACAGGCAATGGACAGCCCAACACCGGCTTCACGATGGAAGGTAAAGAACA
CTGGAGCCTAGTGGTGAGGGTAAGGCGCCATCATAGGTACTCAAATCATGCTCCATTCACCTTAGATGCACCACCCTCA
GCCCCAGGCCACCAGCTCCTCCCCAGCAGCCCCTCTTTTCCCTCCTCAGTCTCCATGCTTGAGACAGAGCCCTTGATTC
AATCCCTGCAGCATGGTCAGCCCTCTTGGGAAAGGCAGGCAAGAAGGCGCAGGCTAAAGTCAGTGAATGCCTGCACTCA
TATTCTAAGTATTTTAGAACCTGAATTTGAAGCTGTCTTGGTTGAATGTGCCTTCACAAGCAAAACTACAAATGTGAAA
GTGATACAGGGTACTGACTGGGACCCAGTAAGAAAAAAAAAAAATCACCCTCTTTAGCTTAAAATTAAAAATAAAAATA
AGTATTAGCACGAGAAAGTTTTCATACCGAAGATACAAACTCTTCTTGGTCATTCATACAGTCAGACAGACTGTCAGAA
AAGTTGACATCATTTATATCTAGCACTGAAGGCAAAGAGTGAGCCTCAAATAGAAAGTTGGAAGGCAGAGAGACGGTGG
AGCTGCCGGGGCTGATGTGAGAACTCAGGGGGCTGGGACCCCTGGCCACAGGGTCTATGCTATCCAACGTTTGTCCTCG
AGGCGAGTGGTGACCTGTTTTGTACTGCTCGGTCTTTATTCCGTCATGTCTGTGCTGGCCATGGATTGGCCTGGATAGC
AGATTAGAAAACAAGATAAATGAAAAACTGTAGCAACTTTTCTTTCCAATAAATGCTGAAAGAAGCATGTTCATAAGAG
GCTATGCGACAGGACTCTACTGCTTACAAATGAGCAGTCCACTCGGAGACAAGCGCTCCTCGGGCTCTGCTCTCATGCT
CCCAGCATAGCAGCGGCCAAACATGCTGCCAGTGGGGTGCAGAAGGAACAGGGCCAGGGCACCCCGTGCACAGAGAAAG
CTCAGAATGTCACCGTGGGTGAGAGTGGGGTGGGGATGCTAACAAAGGCTTCTGGTAGGAAAACACACAGGCTACACAG
AACAAACTCAAGTCAGTTGGCTTCTCATTGAAATAACCTTTCTTATGGTAACAACCTAAAATTAATTGATCAAAAGTGC
AATGGGGGGCTGGTGAGATGGCTCAGTGGGTAAGAGCACCCAATTGTTCTTCCGAAGGTCCAGAGTTCAAATCCCAGCA
ACCACATGGTGGCTCACAACCATCTATAACGATATCTGACGCCCTTTTCTGGTGGTCTGAAGACAGCTACAGTGTACTT
ACATGTAATAAATAAATCTTAAAAAAAAAAAAAAAGAGTTGGCAGGTTCTTTGGGCTGGAGAGATGGCTCAGTGGTTAA
GAGCACTGACTGCTCTTCCAGAGGTCCTGAGTTCAAATCCCAGCAACCACATGGTGGCTCACAACCATCCGTAGTGGGA
TCAGATGCCCTCTTCTGGTATTGTCTGAAAACAGCTACAATGTACTCACATAAATAAAATAAATACATTTTAAAAAAAA
GTGCAATGGGTGCTTTTTATAGAAAGCCACGTTTTACTTCTTATGGAACAGGTGTGATGAAGGTAGTGGGAGGCAGCAT
GAAAACTCAGGAACAAGCTGCTGTTCACACACATGTACACTCAGGGTGCACAGAACAAAAGCTGTGATGAAATAGGCTG
AGCCACCTGAGCCTCTTGTGCACACTGGGCAGAGTTAAACCAGAGCCTGTGATGACTGCACAGCTCTAAGCCAGAAAGT
CTTCTCAAAGTAGGAAAGCAGGCCGTAGCACATGCACTTCAAAGAGACTTTTAAGAAACTTTACTTAAGGTGCTAGAGA
GATGGCTTAGTAAAAGAGCACTGACTGCTCTTCCAGAGGTCCTGAGTTAATTCTCAGAAACCACATGGTGGCTCACAAC
CATCTGTAATGGGATCCGATGCCCTCTTCCGGTGTCCAAATACAGCTACAGTGTACTCACATACATAAAATAAATAAGT
AATTCTTTAAGAGACAGAGAGGGAGGGAGGGAGGGAGGGAGGGAGGGAGGGAGGGAGGGAACTTTACTTAAGCTCTGCA
TTCTTGAACCCGGCAGCTCTGCTGTGTGCTGGGTTAAAGATCTCGCCATCTTTTTTTTTGCACATGTTAGTAGCATGCT
CCAGCTCAGATTTGGTGCTCATCAAATCTTTCTGCAGTTGTTGATTTTCAGACACTAATTTATTTAAGGCCTCAATATA
ATTCTCCTGAAGGTCTGCTAGTGAAATCTCTTTTGCCTAATAAAAAAGAACACGAGAATCACTAGTATGTTTAAGGGTA
ATTATGATCAACCTACAACAGTGTTGGCTGAGATATTTTCTGTTTTAGTTTTAATTATGGCTTTACTTAGAGAAAGTAA
AGATTTGTCTTTAGCCCTCTTAAGATGAACACAGGAAAAGCATCAGTCTGCCTAGAGTGAAGGAAGGGACAAAGTTAAA
GGCAGGATGGCTTCCTTCTGTACATAAGCATTCAAGGCATGGAAACAAGGCAGAGGAAAGCTTCAAGAATCAGACCTGG
AAATCAAGAAGAATGAGGAGCCCTCTCCTTACACACAATACCTGTGGGAGGAAATTAAAAGAACTAACTCAAAGAAAGT
AATTTAAACACAAGAGTCTAAAGAGAATTCTGGCCAAAAGGGGTAACTTTAAAATAAATACCCTTCCATCTTAAATACT
TTTTGGCATGTAGTTTGATATGAAGTTAGCAACATAAAAGCAGGACTATTTTATGTGGCAGGAATTTACCATGAACTGG
TCTTAGTTCTGTGATCATATATCTTATTTCTTGATAATACACATCTACTTTCTTTTTCTAATTTTTTTCATTTAATTAG
CATTCTATAAAATTATGGTGATCTTTACAGTTTAACATATTTCATTTTCTGTAAAGAAAAATTGTGAAAGTAAGCTAGT
CAATAGAGTTCTGATAAACATAATTTGCCTGTCAACTCACAAGTGTGTAAATAGACCTGTAAACTAGGATTAGTAGCTG
TCCATGTTTTATAATATCTCAGAGAAGTGTATTCACAGGACAAGTGCTACACTGTCGACTACCTACCCACCTTTTTATT
TCTAAAATGCAGGGCTACGCTATGAACTACGACTCATCTTTAAAGTGGCCAACATTAATCAAAGCTGCTGCTTTCATTA
AGATAATTAGATTAATTTGGAAAAGTAAATTCACCTTCCTGGGTGGTAACATGCAAAAAGCATTTCCTAGTAATTATGT
TTTGATAATCTGTACAGATATTCATACTGTATGCAACTCTGAAACCAGAGAAAGCTAAAGCTGACAGGATTTTTACAAC
TTTGATGTCTGAAATCATTAAACCAGCTTTCCTTAACCTACACCCCTTTAGCAAATGTCTATCTCCAAAAATATTTAGA
TTACAATTCATATCAGTAGCAAAATTATGGTTATGAAGTAGCGACAAAAATGATTGTATGGTTGGGGTCACTACAACAT
GAGGAACTGTACTGAAGGGTCGCAGCGGGGGGAGGGTTGAGACCCCTTGCACATAGCTAAAAAGAAGAGAAACTTGTCT
TTTCTGTGCATCTTTCTGAAATCTCCGAGAGCTATTAGCTTACTAACAATTCCTCCCGGTGCCTGAGCGGGAAGGGCGG
CATGACACCTGGGGAGCAGGCATGCACTCAGTGGGCAAAGAGGGTCAGCGCTCCCACTAAGGTTCAAGAGAAGTTCAGC
TCCACAGAACCCTGCACAGTCTGCCTTTAGCATCTCTGGAATCTCTCAGTTCTTTAATGTAAACAGAGCCACTCTAATA
CTGACAAATGACACATTTTTAAAGAACACTATAGTGTAAACAGATTAGTCCACAAATTACTACTCGCTCGGTATTGGCT
TTATCAGGGCATACAAAGTCATTTGTTGGCTACACTCTCACTCACTCACCTACCTGCTCATCCATTTACCCACTCACCT
ACTAATCCATCCACTTATTAGCCATCCATCTAGTCATTAAGACAGCCAGCTGGTTAGCCATGTGCCCCAGCCCCCACCT
CCATCCATCTTCCACCTCCTTGACAAAACCTTATAAAATATTTAGCTATGGGATTGAGAAAACGATTCAGTTGGTAAAG
TACTTGCCGTGCAAGAGGACCAGAGCTCAGATCTATAACACTCATGTAAATACTGGCCGAGTAGACACAGTAGACTGCC
AGTAATCTTAATACTTGGAAAAAGGAGACAGGATCTCTGGAGCAAGCCCAATTTGCAAGCTCAGGGTCCAAGTGAGAGA
CCCTGCCTCAATACAAAAGGTAGAGAATGATAAAGGAAGACATTCAATATCAACCCCTAGCTTTCATACATTCATACAC
ATGTACATACACATGCGTGTACACAATCACCCACCATGCACACAAAAATAAAATTATATTAAATATTTTAAATGTTTGG
CTATTGTCTCCTCTATTTTTTTTCCCATCCATGTGAGTTTGTGCTTAAAAAATTTTTTTCATTACAGTATCACAGGGAT
GTGGAGTAGCAGAAAAATTAAATGAATGTTTCCATCTTAAATGACAGCATATTTCAGAGTACAATCACAAATCAACCAT
TTAAGTAACCAGTTTATTTCATAATACCTGCTGTGCCCATTTCTGAACCTTTACTCCCATAAGGTGGGCTCTCTGGGGA
TGCAAACTGCTGAGGACACTGAAAAATGTGACTACTAATATTCCAGGTGGAAATACCAGGAGGACAGTGAAGAATATGA
CTATTAATATCACAGGTGGAAATACCGGGAGGACTGGGGGTGTATGGACTTACAAGCTCCATGTCCATGGCTCAACTGT
ACTGAAGGCAATCTCTATATGCATGGGAGAGCCTGCTGTTAAAATACTTGCCAAGAGAGGCCATATATTAACTTTCTAA
ATCATTATCAAGCTTATTAGCAAGAAATTTTTATTTTTAAAAATTTTGGCTATTAGGGAAGTTTAATAGCTTCCCTCGC
TCACTTGAATTTAAATATCTACTTAGTTCTTTGCCCTTTTCCGACTGGGTCTCTTTCCTATCGCCTCTGTAGGAACTCT
TACTTGCTGACACTTGGTTAGCCTGTGTCTACTTCCAGGTTACTGCTCCTTTCTTTCAAGCACCAGTGCCGCCAGCCCC
GGGCCTCAAGCTAGGCGAGTGCTCTCCCTCTAAGCTCCACTCCCAGCCCCTCTGCTGTTATTTTTATTCTGAGACAGGG
TCTTGTCCAGTTTGGCCTTGGACTCTCGCTCCTCCTGCCTCAGCCTCTCGAGAGCTGGGATTATAAGCATGAGCTGCCA
CACTTGCTTCTATTATCAGTCTTTTCAATGGAGCCTTTTGCCATCCAGAAATTTTACATTTTTATGTTGTAAAATCCTT
TGTGGCTTCATGATGCTTAGAGAATCTTGCCCATCTGAAAGATTATGAAAATAGTCCCCCATTTTCCTAGTTGAAATAA
AGTATTCTTCTAGCCTTTTGCGTCTTCACTCTCGGCCTCCATGACTGTGAAATTGGAACTATTAGGAGCAAACTGGGTG
CCTTTTGTGACTATGAATCTTTTTGGAAGCAGAACACTCCCTGGAAGTTCAGAAAAAAAGAATTCAATCTTCCGACTTT
TGACCTACACCAAAAAAAGATGGATCAGAATAGATGCATCATTTTTTAAATTGTAAGACTTTTACAATATAACTTCACA
CTGTCCTGTTCTGATTTCACAGTAGCTTATATGTATTTCTCATATTCTCCACTAAATTAGTATAATGTCTTCAGAGTCA
AACACGTGATCAGTTATCCTGTGTGCAATTTAGCACTGAGTATTCTAGAATAGTTGAATAAATGAACTATGTATGCTTC
ATAGAAATAAAATGAAAACTAAAATACTTCAAGGATGGTATGCTTTATAATAAAGACACTGTGAGCACAACAGCCTAGC
ACTAAAAGCAGCGCCCAGTGTCCACTTCACAATGACTGCCAGCACTCTGCTGGCACTTTACAGATACTTCCCTTGCTGA
GAACACAGACTATATATCCATCTTGTCACACACAATAGGAAACTATCCTACTGCTTCAGCATAAACATCCTCTGGCAGG
AGGGCACCTGGACCTCATTTGTGACTGTATCTCCTAAGGGACTGTTCAAACTAGTTAATTCTACCTTCTTCTAGCATCA
ATATTAACAGTTACGTTCAAAGGCTTCAAAAACACAAAAGCTAAGTGTCGATGTGTGTACCTCATGCAAGCCCAGTTCC
AGCTTCATCACTGTTTCAGAAAGACGATGATTTTCTAATTTGAGAGATTCCAGCTGACTTAGAATCTCCTGCAAAAGGA
AAATCGGGGGACTCACATAAATCAAATATATTTTACAAAGCTTTTCCACATCATTTTCTCTAGTCTACTTAGTCCAGTC
TACATCCTCTATCCATATAGATAAACTTTTAAAATGTGTGTAGATACAGGGTGTTGTGTGTGTTGCATACACATGAGAG
CACAAGTGTGCCTGTCATGTGTATTTGCAGAGACCAGAGCCAACAAGTTCTCAGAATTCAGCTCTCTCTGCTGTGCCCC
TCCCCTGCAATGCTAGGCTAATCAACAGACCATGAAGCCACGCCTGGCTTCTATGTAGGCTCTGGGAATCCCAGCTCAG
GTCCTTATGCTTGCAGAGAGGGGCTCTCACTCCCTCAGCCGTCTCCCAGGCCCCACATATGCTTCTTAAGAGTGTCAAA
GGTGTTAGCAGGCAAAGCACTGTGCATGTGATTAAATGTCACTCAGTAATGAATGGGACTAAGGCACAAAGATTCAGTC
ACAGAAGATCTTAGACACACCCTGCTTCCAGCTCGCATCAACTTTCTGCCACCACCACCACGTGGGACTGCGCTTGCAT
AAAGCATTCATTTATTTTCAGCCCTCACTCTGCTGAGCTTTTCTGCTAGACTATCTCTATGAAAAAATTCCTGCCTCCT
TTCATGGCCTTCTTCCTCAGCAGGCACAGTCTGGGAAACTCCTTCACTGCCACTTCTTTTAAAGTTCCATCCCACTCCT
TCACTCCAACTGAGAAATCTGCGAAATTTGATCCAAGTCACTCTTAGGCATACTCTATTGCCTTTTCACTATAACTGCA
GTATCTGGGGAGAGGGATTTCAAATGCCACCTTCATCCAGGAATTCCACAACTAAATGGCCAACCCTTGAATTTCAGGA
TTTCCGTGGAGCCAACTAACCAATTTTTCCATATAAAAGTTCAGGCTTTATCTGAAACCAAATGTGCCAAACTAATGTC
TCCTCTGCTAGCTTCCCTATCCTGGGCATCTTTCATAGAAATGCATCATCTTCCACAGCACTACAACCATTCTCTGCCT
TGTTACAGGGCATTACTTGGCTACTCAAGCTTCATCCCTCAGTAATAGCTTCTTACTGTCCTTTGTTACCCTAGTCTAA
TCAAACACAAAGCCTAGCCAACCGTGCAGCCAAGTATCTCCACAACGCATCCATTCCCCATTTCCCTTGAATGGTGGCT
CCCCACCCGCTGCTCAGGCCACATCTTGCAGTTTTACTAGCTCTGCATGGTCTCTTCCAGCTTACTCATTCTCCTCTTG
CAGGAAGAGAGATCTTTACTCTAGATAAGCAACTCCTTGGCTGTGCTCCCAGTACCTTGCCCACGTACCACTAAGGTAG
TCATTTTCCTTGTCTGTATCAATCTGACCTCCCCACCAACCCTCACTATCCTGCTTGCTAACCAGCCCAAAGCAGGTGT
CTACCACTGAAATACGGAAGTTATTCCTTGAATAAATTCATTCTTTAAAAACAAACAGGTAAATATGAAGTGGAGCGCC
CTGGATGGACTTTACCTTATGCTCTACAGCCTTTTCTTCTGCCTTCTGCATCTCTGCCTTCAGCTGCTTTTCCATGTCT
GAGGAGGAACACTTGGCAGAAGCAATAGTGATATCTCGCTGGTGCAACTCCCGAGTTAGCTGGGAGATTTCCATCTTCA
TTCCTTCCAGGGCAGAACTGTAGGTCTGATCAGCCTGCAGAATCTGTTCCTTCAACTATAGAGAGGCACAAAAGAAAAC
ACCAAAAGTTCAGAGAAAGTATTTAGGATTCAGGCATATAAATCTACACAGCAGTAACTCTGACACTTAGGAGGTAGAG
GCAGAGACAGAAAGACCCCAGGATTGAGAGCAGCCTGATCTGCCAGTGATTGCAAGGCCAGATTGAACTTCCAGGAAGA
CCCCTTCTCAACAAACAAGGTTTAGAGATGTAGCTCAATGGTAGAGCGAGCACTGGCCTAGCATGTCCCTAAAGAACAA
GGTATTCAGAGAGAAGACACCTGGTTAATGGCTGCCAGGGCAGGGTTGTCATTTTCTTCAATAGTGTAGTTACTGGTAA
ATTGCTCCAGTAGATAACTCCCTGCCAACGTTCATGCAAGCAACCCTAAACAATGTAGGCCTAAAAGAAAGACAAAGAG
AAAGAAGGAAGAAGACAAGATAGGAAAGGGAGATCATAGAAGGGAATAAAAGAGGGCACTGGAGATGACTATGATATAA
TATACAGTACATATATATGTATGAAACTGACAAGTAAATGTTTAAAATGTACAGAATTTAACAAAGAAAAATATACACA
AAATTGATAAAATAAGGTAATGTCTATCTTACCTTAAGACATGAAATTTTTCCTAGATTAGATATACAGAAAATCATCA
ACTACAAGTTATCAACTTCTATAACTACTGTGAAAGTCTGGTATTTAAATTCAAAATCATGCATTAGGTCTCAGAAAAA
CATGTGTTACTCAAACACTGGGGTCAATGGCAAAGTCTATGTCTAATTTATGTAGTCTCTAAGACTTTCATTCTTTTCA
CAGCTAAAAATTAAAATTTGTTTGTTTGTTTGGGGTTTTTGTTTGTTTCTTTATCTAGTTTTCTGTTTCTCAGGAGAGA
ACTAACAGAAAGATAAGAGGTAGAAAGGGGCAAGAGCCTTTGAGGAAGACAGCTCAGTCTATAACATACCTGCAGCAGG
AGCAGAAGGACTTAGTCTAGATTCCTAGCCCCCACATAAAATTCATCCTGGAAGGTTGCATACATCTATAATCCCAGCA
TGGGGAGAGGGACAGCAGATAAAGGTTGATTCTGCAGTTCAATGGCCAGCTAAGCTAGTCAGCCAATGAATACTGAGTT
CAGTTAGAGCTGCTGAGGCAGGTGAGTGTGTGGGGAGAGAGCAATAAGCAGCTACTTAATATCTACTTCTGGGCTCTAC
ATACACATACATGTGTGCACCATACACACACATGCACAGGAACTAGCAATAATCTCAAAGTAGTGAAAAACACAAATTA
AGCCAAGTATGGTAACAGATGTCTCTAATCTCAATATTTAGAATTCAAAAGACCAGAGGATTATGAGTTTAAGGCCAAC
CTGGGCTATAAAACAAGACTAATCCTCTAAATAAAGCCTCTAAAAAAATTAATTTATTTTTGGTATTTTGAGACAGTCT
CATCTAACCCAGGCTGGCTCTGATCTCCTGTCTACACCTCCCAAAGCTAGGATTAGAGTACACCAGCACACTGGGGACA
GGACCCCTTAAAAAAAGGCTCTAGAGTACCAACAGCCAATGAGGACATTAACTACTTCATAGCACAAAGGAAGCCAATA
AGGAAATTACAGGTAATATAATGTCTTTTTTAATAAGCAATATAATTGTTTAGAAATCATCATGAGCATATTTCACAAG
TTCCCCACATGCACAGTATCCTTTGATCATCCATCCCTATCATCCTCTCATATCCCTCCTCCTCCCACTGAGTTCCAGC
AAACTCTTCCACTGACCACCCAACACATTTCCCTCACTGAGCACCTCCTGCCCAGCTCTGAGCCCAGGCTCTGACGGAG
GCTCTCACCTTCTTTATCTCTGTCCGGTACTCATTGTTATGCCCTTCCATCCTCTTCAGCTCTTCGTATTTTTCCATTA
GTTCTTGGCTCAGCTGTTTGCATGTTGCACTCACAGATTCTAAACTGTATGGCAGAAATACAACCATATATAAGTAAAA
TTCCTGAAACCCATAAGATGGATTATCTAAGTGTACCCTCTTGATGCCCAAGATACCTCCTACTAACACCTTAAACCTC
ATACCCGTCACGAGAAGTCATTTGCAATTCCCCTATCACTAGATGCAGCAAACCCATCTCAACACTGAGGTAGTTTTGT
CTTTCGTGTTTTCCTCCACTCCCGCCCCCTGATTTAAACTTTACTGGCTACAGAATTATAAAGACACCAGCCACTTTAC
TAACAGTTTTGCTCTAGCTGTATGGGTTTCTCTAGCTCTATGAGAGAGGGAAAGCCACCAAGAACTGTCACAACAGACT
CACACTTCATCACCCTTAGCAACACACAGACACACTCCACACTATACAGAACCACACTATACAGAACCGCAAGAACTCT
TTGAAGAGTCCCCAACTCATTGTTCTTACTCAAGACCAATCTTTCTGAGACTTAGCGCCACGGAGGCAGCATGCCTCTC
ACTCCAGTGCTCTGCCTCTTTGTAGCAATGCAATCGTCCCTTCACCACAAAGCACCTCCTCCCCTAGCCCATGATGGCC
ATTAGCTTCTCAGGAACCAAACTGGCACTGGCCTAATTACAGTCACTCCAGTCCTTACTCCCCTGTTCACCTTAAATAA
TTCAATTTTTACAACTTGAAGGCAAATTTTTCTAGAAATTATCTACTTTAAATATGCTCATTTAATTCCCCAAGTCCTT
TAAAATGAGTATTTTATCTCTGAAACTGAAAACTCTATGGTTAAAATATTTTACTTCTTATGCCTGCCAAACTTAGCCA
TTAGCCCTCACGTGCTACAGCATACACCTCTAAATTATTCTACAAATGCTTAGTACTATATTATTTCACAAACATAGCA
AATTTGCCAGATAAGTTATTATTCAAAAATATCATCTTTGGGAGCTGAAGAGATGGCTCAGCAGTGAAGAGCACTGGTT
TCTCCTCCAGAGGACCCAGCTTCAATTCCCAGCACCCACATGGCAGCTCATAACTGTCTATAATTCCAGTTCCAGGGTT
TCTGATACCCTCACACAGATATACATGGAGGCAAAACACCAATGCACATGAAACAAAAATAAAATAAAATAGAGATATC
ATCTTTGTAGTATAACAAAAGCCCTGCCCTTCCTGGTTTAGGTGCTGTTCAAACTAAACACCACACTGTTTAGAACAGT
CTTTTTGTCCACTAGATTTTTCAAAGAAAAAAACTGAAGCCATTCTTACTGAATACTGTTATTTATTCATTCTAATTTT
ATTTCCAGAAATTCTAGAATTTTTATTTATCTATTTACTACTAGTATATGGTTACAATGTGCTAAACACTGAGACTAGC
AGAGGAGTAAGATCAGAGATCACATTGTCCTAGCCATGCATGGGAAAAGCAGGACCTGAGGGGCTAAGGTGGTCAGTGC
AGTGCTGTGCAGTGCTGTGCTGGAGTCAAACCAGAGGCGCAACTTCTGAGCCTGACAAGAAGTCCATGAAGATTATCAG
AAAACCAACTGGAGGTCGGGGGAGGGGGAGATGACAACTATGATTAAAAACAAATTTTTTTGTTCCAATATCAAAAGAC
TAATAATCTTTATTTAGCACTCATGGTGGGTGGAGTACACCTTTAATCCCAGCATTTGGGAGGCAAAGGCAGGCCAATC
TCTAAGTTCGAGACCACCATGGTCTACATAAAGCAGTTCTAGGACAGCTAAGGCTACACAGAAAAAAAACTGTCTCAAA
AAAACAAATGATATCAATACTAGTAATAGTAGTAATAATAGTAAGTTTTGTTTGGCTCAGTCTAAATAAAGCACATATA
CACACACACCTCAGTAGAGATCACAAGTGCCCCACACACTCTAAAAGGCCTACAGCAGAGGGCTGCACGAAACACAGCA
CACTGAGGAGCAATGTATCAAGACAAGCTAGAAAGTGTAAAGTGGCACTTCTTCTTGTTATGTTTGCCTAAAGGCAAAG
AGCTTATGTAAATATTTTATCTTTTACCCACACCAAAAAAATTAGTATACAAGCAATTATAATGAGTTTAAAACAAAAT
ATCAAACTCTTCCCAATAAAAAAGTTTACAAATGTGACAAGCAAAATAAAGTTTGTAACTATGGCAAAAAATAAAATAA
AACAAAAAGCACTACCTATCACACTATGCCATGCTATGCATGCTATGCTAGAATATACTATGCTACCAAATACTATAGA
TTTGCCATTAGCTAGCATTCAATTCAAAGCCAAGAAAATCTAAATCACACCATAAACAAGAATGAAGGAAGAAAGACAT
GCCCACTGTATCTTCTCCAAGAACAGTTTCAGTGAGGGAATACAGAAGAAAGCTGAACTGAATGGGGCCTAAAAGGCAA
AGGGTGAAGTGGGAATTATCAGAATACACAAGTCTTCAAAAATTTGATTCTAGGGCTGGTGAGATGGCTCAGTGGTTAA
GAGCACGGTCTGCTCTTCCAAAGGTCAGCAGTACGATTCCCAGCAACCACATGGTGGCTCACAACCACCTCTAATGGGA
TCCGATTCAATGCACACACTTCTGGTGTGTGTCTGAAGACAGCTACAGTGTATTCATATAAAAAAAGATAAATAAATAA
TTTTTTTAAAAAAAGATTTTGACTCTGAAGAACAGAGAAAGAGGAAATATTCTGATGGTTTAAAGGGGTTTAATTGTTT
TCAAAATGGAAAAAGCTCCCAGAATACTTTCTGTCCATATAAACCATTCTGAAGAAAGCCCTAAAGAGGACGTCACAGC
AGGAGCAAGTCAGCCTCAGACACGTCCACAGAGCACAGGCTCAGATGAAGGCCAACTGGCAGAAGGTTAGGACAGTGTC
TTCTGTATTTTCAATGAACTAGGGAGTGAGGCCATTTGTGAATGCTAGAGAAAAAACAACTTCATTTCACCAATGCACT
GTTTTACTCAATCAATGTGAGAATCAAAGTTCATCCTAACAACTTCAAATTTTCAATGTGTAGCTAATTATCTACCTGC
CTTCAAGACGCGTCACCTCTGCCTGCAGGAGTTCTTCACTGCTGTGGCTGAAGTCCAGCTGGGAGAGCACATTATCCAA
GACTCCTTGCCCTGGAGAGCTGTACTTCCTTTCCTTCTGACAGTCCTCCAGAGGCCTAAGAACAGAAGGAGGGGGAAAC
AGGTCTCTCTCTTATCCTGGCAAACAAACAATGCCAGCCAGGCTGTTGTCCCAACTATTCTTTTAACTAAGCTCCTTAG
AACTGGTCAGTTTGTAGCCTGCTTTGGGGAGGAGGGGGAATACCTGGAGAACAATCCAGGGTCAGCAGCAATTTAATCT
TTACTAGGGTTTGGGGTGTGTTTCAAGGGGAAAAGCCGCATAAAACAGCAAAACCATTTTGTTAACACTTGAATCCTTC
TATCAGAAAAACTTTACAAGACAGTCTGGCAAGAACAGAAGCATGCCTGACTTACACAAAAGGAAGCTCATTTACTCTA
TTATTTTTTACTATAACCCTGCCCTAGCAATAGCCCAGGGCGGGAGATTTATAGCTTAGTTGGTAGAGAATTCCCAGGG
CATACAGGAAGCCCTGAGACTGGGTGGGGTCACAACACTGATAATCCCAGCACTTAGGAGGCAAAGGTAGGAGGATCAG
GAGGAGTTCAAGGTCATCCTCAACTGCACAGTAATTTTGAAGGTAGCCTGGGGTAATGCATAAAATCCTATTTCAAAAC
ATAGTAGTAGTAGTAATAATAATACAATAATAATGATAACAATAAAGTCAGTTCCCAAAGGGCTAGCTAAGTGACAGGC
TGTTACTGATGGCAAGCAACTACTTTCCACCATACCTTAGTCTTCTAAGGCAGAGAGGCCCTCCAAGTCTAACAAAGAG
AGATAAGGAGTTTCCAACCTTATGATCCTCAGAATCTTAGAGACTTAAATGAAAAGGAGACAAAACCATCCATACAAAT
TTTAAGACAATAAAAATCTAACTCATAAATTAAAGTCAAATAAGACAAGATGATCAAACACAGAAATGAAAATATTCGA
TATTAAAATCAGCATTCAATGCCAAACTGTCAAACAGGCCAGCAGACTAACATTTACGGTTCAAACAGACCTTTCTACG
GACTGCTGAGTGCCAACTGCCTTTAATGTCGTTTGCAGTTTCTCCTGCATTTTTGCCTCAAGGATGAAGGTTTCTTGAG
ATTGAAGACTTGCCTTCAACTCTTTCTGTTCTTCCTGCAGAGCCTGCAAAACACTCAAGAAAAAAGACAGATATTATTA
CAACTTTCCTTTAGCTCTCTCTTTTTCCTGCAGAGACTGCAAAATACTCCAGAAAAAAAGTCAAATAATATTTCAATGC
TTCTACTTCATGAGAAAAGCAACCAGGAAGGCTGACTGCAAGTTTTATGACAAGGACAGTATGAATACAGCTATCAGGA
GCTGAGCCACCAGCCTCAGCCCAAGAAGGAAGCTGGGCATCCAGGACCTAGTCCTAGGGCATGCATATACCTCCCTAAG
TTACTCATTCTAACACACACCTCTAGTAACTTCTCAGATTCCCTTAGTTTCTCCTCCTTCTGCCGATGGTCCTGCAGGA
TAGTCATATTGGTTCCCATCAGGTCGTTGACCCTTATGTTAAGGCGCTCTATTTCCAGCTCATTGGCACAGATGGTGTC
CTTAGCCCGCTCAAGCTTACTGTTCAGGTGTTGAATTTCTGACTGGCTAGATAGTTCCACGGACTCTAATTTCTGTTTC
CGGTTGGCAAGCTGAGCCTAAAAACATATAGGGAAAAGAGAGTTGATAGAAGAATAATCAATAATTGTATTCACTGAGG
AAAGAAAAGATTCACTCCTAGGAAGGCTGGGCTATCAGCAGGTTTTGGACATTTTCTTTTAGTGGCATATCCTACTGAA
GTCTATTCAAATAAAGCCACTTCAGCAACTGGCTCAGGACCCGTGGAGTACAGTGTCTAACCTTTTGGCTCTGCATGCC
AGCTGAAGTGTTTTTGGCTTCTCACATTCTGTTTTTTTCAAGTTTTAATTCAGTATCCAGACTGGTTTTTTATCTATAC
ATTAAAAATGGACATAAATCATTTGTAAAGTTAAACTTCCCTTATTTTAAACATTTCCTAAAGGAAAGGCACCCACTTG
TATTTTAGAAATTCAAGCAGAAATATCTCTGTGGAATCCATCTACTACAGATTTAAAGATTCTGCTGTACATAACTGAG
GACCAAACTCTTTTGCCTTACAATATGGTGACACAAAGATGAAAAAAAAAAAAAAAAAAAAAAAAACGGAAACAAAAAG
GGAGAGGCAAAGATACAGACAAATAATTTTGTGTAAATTAGAGCTCAAGGCCTCAGAGTAGAGGCAATTTGTTTTCCAC
CAGATCCCTAGAATGGCACGTGAAAGAAGATTCAGGACAGGGTCAACGCTAACCACTATGCATGCAATTGGCAGAAGAC
TTTCAAAAACAAGAGGAAATCTTATACAGAATCCTCTGCACAATAAGTAAATGTAGAGATTGGTTGAAGGTAGGAGGAG
AAAATGGCTGTGCTCCGTTGCTGAGCCTCAGCTCACCCCATCCCTCACCTGCCCACCAGCCCTGGAGCTCACAGAGCAC
AGCTGGGAAAAGCTGTCCAAATGAGTGGCCAGGAGGCACATAGCCCAAAACCTCAGCACTGTGACACTGTATAACACTG
TGGTCTGCATTCAATGCTGGAGCTTTAGCTGTGTCAGCAACTCTGTAACCAGGTAGTCTCCATTTGTTACTTTAGAATC
AGTCTCGGTCCTCTTTTATTCTACTATTTCACTCATGCAAAAACACAGTATCTTCATTAACTAGAAATGATAGCCCACC
ATTGCAGACACTAGCAAGAGTTTATCGAAAGGACCCAGATGTAGCTGTCTTTTGTGAGACTAGGCCGGGGCCTAGCAAA
CACAGAAGTGGATGCTCACAGTCAGCTATTGGATGGATCACAGGGCCCCCAATGGAGGAACTAGAGAAAGTACCCAAGG
AGCTAAAGGGAACTGCAACCCTATAGGTGGAACAACAATATGAACTAACCAGTACCCCGGAGCTTGTGTCTCTAGCTGC
ATATGTATCAAAAGATGGCCTAGTCGGCCATCACTGGAAAGAGAGACCCATTGGTTGTGAGCCTAGCCTTTTAACGGCT
GAGCCATCTCTCCAGCCCGAGAGACCCATTGGACTTGCAAACTTTATATGCCCCAGTACAGGGGAAGGCCAGGGCCAAA
AAGGGGGAGTGGGTGGGTAGGGGAGTTGGGGGGGGGGTGGTATGGGGGACTTTTGGGATAGCATTGGAAATGTAAATGA
GGAAAATACCTAATAAAAAAATTAAAAAAAAAAAAAAGAAATGATAGCCCAAGTTCTACTGTCTACTATGGCAATAAGA
GACTGAGCACTGAGCTGTGGCTAGTCTGACTTGAACAATGTTCTAACTGTGTAATACACAGTGAGGTGTCAATGACTTA
GTTTTTAAAAGAATGTAAATTTTGAACTGATAATATTTTGATATACTGGGTTAAATAAAATATATTATTAAATTAAATA
TATTGATTTATATATTTATATAATATATACTAATTTATAATATATTAATTTTTATATATTAATATATTAAATTAATCTT
ATATTTCTTTTCACCTTTTTAATCTAACTGCACAAAATAGTAAACTGTGTAATTCACATATTGCTACAGTGGTACTAAT
TTCAGAAATACCTCTTTTAATCCTAAGCAAGTCAGAAAATCACAGAAACAACTCCTAAAATTCCTCCTCTTAACTGGCC
AGCTTTAGAAGCACTTAAAGGTAAATATATTTGAAATATATATTTTCATGCACAAATACATTTTCTTTCAAGAAAGCAG
AAATGCCCTTCTTCACTAAGCATTCAGAAGGGTGGAGTTATCTCACTACACAAAGGGCAATGAAAGTAAGGAAACCATT
AAGGCAATTTGCCTTAGGGAGACAGAAGGCACTTCTGTCAAGGCGCACCAGGTGACAGACACCGCAGAGGCATGGTGCA
CACTGAACTCAGAGCCTTGTGGGATCCTCAGGCTGCTGCCTACAGGGATGCTATGGCCTGCGTGGCCGCATCTGAAGGC
GACCCAGATGGGCAGACAGGTACTCGTGCTGCAGTGGAAAATCAAAGCCTTTGCTGCCTCCAACCCCACTGTTCTTAAG
CAATCTATTTGTGACAATGGTTTCCTTGAAGCTCCAAAACTACATTAAGAAAAGAAAAAAGAAAAAGAAAAGCCAGACA
AAGGATGTTCTCGGGTTTTTTTGTTTTTTTTTTTTTCCCTAAAACAAGCATGGAGTATAAAACTCTAATAGCTGCATAG
ATGAATCCAAATACATGACTCAAAGTGCGTGAAGCTGTTTTTGAATCTTCTTCAATGTTAAAAATATGAAAGAGTTTTT
TTCAGTTTTTTCTCATAACATTTACCCAGACTCTCGGATTTTCTGCTGTCCCACATATCAATTAAATGCAATTAGTCAA
GCTTAACTGGATTCTGCCTCAAACAGCCACTGTGAAAGAGTAGTTTTTAGACAACTGGATAAAACTGCAGACTGAATAC
TAAGTTATATTACTATTATTTATCCTATTGATGTTACCCTATCATATTATAGGGATTTTAAGTCCTTGCCTGTTCAAAA
ATGAGTTGATGCCATGATTTGCTTTGTAACATTTTAATAGCAAAAAATAAAGAGTAAAAGTGTACCCAGTTTTAGCTTT
CCAAGATGAAAGAAGTGGGCTGGATAAGAACGCCATAGGCTACTCTTCCAGAGTTCAATTCCCAGCATTCACCCTGTAC
CTCACACTGATCTATGCCTCCAGTCCAGAATCAATGCCCTGTTCGGGCACTGTGGCACTGTGTAACAGTGGTCACATAT
ATACATCAAGGAAAAATACCAATACAAAGAAAATCAATCTTTTATTTTTTTAATGCCATGTCCCTCTTTAAAACAAAAA
AGGAAGAAGTCTCAAAGAACAGCTGCACAAAACAATGTGCACATGTTGTCAACACTACTGCGCTCAGAAAGCCAGTCAG
GGTGGCACAAGATTTAGCTCACTGGTACAGTATTCGCCAAGAATAAGTGAAGCCATGGGTTCAATACCACACGAAAAGA
AGATGAGGTATAATTTCTGTTATGAATTTCTAATGCTCATTTACATACAAGATTGGCAAGATGATGACAATCATTAACA
CTAAGTAATGGGCACACAGAGATTTAATAAGTGTTTAGTAAAGATAACAACACAGCATTGATGGACACAAACTGAGTTA
AAGGAAGCTTTCATTCTTGGTTAGTTTGCCAAGGAAAAAGAGAAAGACATTTATACCTAATACTTTTAACTAATCAGAT
AACTTTATGTTAAATAAAACTATGAGAAGGATTATTCAAATACCCTTAGTGGGCACAACAGATGTCAGTTCTTTCAAGG
TATCTTATTCTATCTCTAGTTGACTGCCTGGTAAATAACAACTCCACTTTTACTAACAGTGAAGTTTGCATTATATGGA
ATTAACCACAATAGTAAATTGATAGCAGTGACTTAAAGATAATAGTCAATAAACATGAATAAAATGAGGATTGAATAAA
CAAAAACTCACCGGGCAGTGGTGGTGCACGCCTTTAATCCCAGCACTTGGGAGGCAGAGGCAGGCGGATTTCTGAGTTG
GAGGCCAGCCTGGTCTACAAAGTGAGTTCCAGGACAGTCAGGGCTACACAGAGAAACCCTGTCTCGAAAAACCAAAAGG
AAAGAAAGAAAGAAAGAGAGAGAGAGAGAGAGAAAGAAAAGAGAGAAAGAAAGAGAGAAAAAAGAAAGAAAAAACTGAA
GTGTTTTAGAGTGTTTTAGATGCTGAAGAGGCTAAGCCACAAGTAGAGGAAGGCAGGCTTACCACACAAAGACTACAGA
GAGAATCCAAGTAAGACAGAAAGAGCATGGCAGTAAGTCCGATTCGGTCAATAGCCATGCATCGGACAGCTTAAGCCTA
CCTGGATTATCTCCGACTGTTCAGCCAGAGCCTTCCTCTGTGCTTCCAGAGAAGATACCTGTTGCTGATAAATCAGACG
CTGCTTCTCCCAGTCCAGAGACTTCTGTCGGAATTCCTGGGGAGGCAAGTGAAGTACTTAACATCTAAGTGCTCCCAGG
CTGTGAGGCTTGCACAGCGCCCTGCTCCCTGGGCGCCCTTCTCTCAGCAGGAGCCCCATTACTCACGCTGCAAAGGAGG
ACTGGATCCTGCTCACACTGTGCCTCTACATGTCTGTCTTTCTAAATGTAACACTTAGTGGTGAAGAGGAAGAAACGGC
CATGACAGTGGGCTCAAGAGCATTATTGCAGATCTGCTGCCACCTATGGGCTGTTACCATTTTGTATTTTTAGAAAAGT
GACGCTAAAATAATAATATTCCCTTTGCCATCTAAATTTCTAACATTCAGACCCAGAAACTGAATAGATTGGAACAGAT
TTCTAAACCAGTAACTCAGCAGCCTGATTCTCACTTCCTATCCTGCCAATAATAGTATCTTTGATAGTCAAAATTTTTT
ATTTCGTAGAATTGCAAAAGCTTGAATAATATGGAAAATATGCATCACATTTTATCAGGTACTTATAATCCAGAGTCAA
ATAATTCAAAAATAATAGGTAATCAACAGCAATTTCAAACTCTACGTCATGAAAATGGGCCCAACTTTTCTGAAAATAA
AGCAACTCAAAGGGAAAGATCCTCAGCCTCCCCATCTTTGTCCGCCAGGGATCTCGAGCTCCAGAGCTCCTTAGCTAAG
TGAGAAGTCAGCTTTCTGATAGTCCCTTCACTCACAGTCTGTCTGTCTATATGACATGTGCCAGCACTGACTCAGGAAT
AGCATTTAATAAGAATAAACTGAAACCCAGCCCCATTCAAGTGGAGGTGATAGACATGACATGCACACTGAATGAATGA
ATGAATGAATGAATGAATGAATGAGTAAGAACGTTCAATGAAATCAAACAACATAAACAGACTTTTGAAGGAATTCAAC
AAGGAAGCCAACAAGCATCTGCATGAAGTAAGAAGTCAATACAGGCTATGAATGAGGCATTCAATAGAGACAGAAATAC
TGAAAAAAATCAAATGGAAATTTTGTAAATAAAAATCTCATTGAGTCAACTAAAAGCTCAATGGAAAGCCTCTCCAAAT
AGAAAGCAGAGTTTCAGGGCCTAAAGACAAGGTATATGAATTAGAACATGAAGACAATGACAAAGGTAATAAGAAAATA
TGAAGGGAAATGACAAGATCCACAGGACATTGTTAAAAGGCCCAATCTAAGAGCTACTAAGATGACACGGTATGTGAAC
AATGCTTGGCATGTAAGCATATAGGCCAGCTCACTAGAGAATTCTAGGCATGGCAGCAGACATCTGAAATTCCAGTGCT
GAGGAGGTAGTGACAGAAGAATCAGGGGCTGGAGAGATGGCTCAGTGGTTAATAACACTGACTGCTCTTCCAGATGTGC
TAGAAGAGCAGTCAGTGTTATTCCACATCTGTAATGGAGTTGGATGCCCTCATCTGGTATGTCTGAAGAGAGTAACAGT
GTACTCACATATATAAAATAAATAAATAAATCTTAACAAAACAAACAAACAAAGGATCAATCTATTTGTTACTTGCAAG
AAACATACCTTACAGGTAAAGACAAATATTGCCTTAGAGGGAAAGAACAGATCATCCACTATGACCAAACACGTAACAT
TACAATGATACAAGGATGGTTCAACATACATATTAATGTTATCAAATTATGATATATACTATATATTAGCAAATATCAT
TTATCATATTAATAGAACAGAAATCACATGATCCTCTTAGTTAATGCGGAAAAGACTTCTGATATAATCCAATAGCCTT
GAAAAAACTAACAATAAAGTTAGTTCATATCTCCACCCATCACCAGCTACACACTAGAGTAAGCTGGACCTACCCCTCA
CAGGACAATGCTGGAGAGCTGGCCCTGGTGGCACGGGTGTAGATTCCAATGGCATGAGTGCAGGACAGCCAATCCCACC
CCTTGCCAGCTGCCAAATCACCTGAGTAAAGTAGGAGCGCTGGCCCTGGTGGTGCGGGCACAGGAAAGCTGGCAGGCTG
ACCATATACCAGGCCCAGATCCAAGGCTCTGAGTTGGCCAACCCCAACATCTATCCCATCTGTGAACTGCTGTAACCCA
TGAAGGGGCCTGGTCCTACAGATTCAAGGCTGGACATCTCCATGACACAGAGTAACAACAGGATATCTGAGACAAGTCC
AATTGACAATCCAGTATTGATAGTGTAGCATAAGCCAGGGGGCTCAAACTGGACCAATGACTCACTCCAATGAACATTT
GCAAGTGTAGCTGTTTGGACAAAAGGGGATACTATATGGCACACTGCCTCTCCCACAGGGAGAGGTTTGGGGTTTTTTG
TTTTGTTGGTTTTATTTTTGTTTCCTCTTGGCACTGGGGGGGGGGAGGAAGGGATGGGGAGATGAGTGGGATTGGGGTG
CAGATGTGAAATTCACAAAGAATCAATTTTAAAAAGGCTATATGTCAGCCAGGTGGCAGTGGTGCTCATCTTTAATCCC
AGCACTTAGGAGGCAGAGGCGAGCAGATCTCTGAGTTCAAGGCCAGCCTGGTCTACAGAGTACCTTCCAGGATAGGCAG
GACTATACAGAGAAACCCTGTCTCAAAAAGCCAAACAAACACAAAGAAGTACAGCTCAACATAATTAAGGACATATATG
GCAAGCCTATAATCAACACACTAAATGGGGAGAAGCCCAGAGCACTGCCACTAAAAGGAGGAATGACAGACAAAGGCAA
ACACTTTTTCCACTGTTACTCAAGTTTGGAGTCTTAGAACAGAAAGCCAAAAAGGAAAGAAAAGGGATACAGCTAAAGA
AGCTAAATGATCCTTTCTTTACACAAAATGGTTCATACATGAGACTCTGAATACCATCACTCAACAGCTTCTAGAACTG
ATAAACACCTTCGGAAAAGGAGCAAGACATAAAACCCACATCAAAACTCAGTAGCTTTTCCATAACCAATAACAGACAC
CCTGAGAAAGAACTCAGGAGAGCAATCTCATTCATAACAACTTTAAAATACTGCAGAATTAAATAAACACACACACACA
CACATATATTTATACACATACATACATATATACACAACACACACACACGTGTGAAATAACATAACTAGGGAAGTAATCT
CTTCAATGAAAACTTTAAAACATTAAAGAAAGAAATGAAAGAAGACACCAAGGACGGCAAGGCTTGTCATGCTCATGGG
TTGACTATCTTACTGAAAGCAATTTCATAAAGGTAAGAACTGAGGAATGTCAACAGGAGTAAGTGGATGACACAAGGAG
ATCAAAATAGCTACGAAGAAAGGACTCCAGGAAACTCCAAGGCCAGAGCGTGATCAGCACTATGTCTGTGGATGAAACT
CTCAAAGGTTATGATGACAAGGATTTTAAAGATAACAACGATCTGAATCCAGAGTCAGTGAAGTAACCTGGACCAGAGG
ATGGCTACCGAGGCTCTGTGCTCATGGTTGGTGGTGTAGGCTGGTGATAAGAATGTGTGGGAGCGCCGGGTGGTGGCGG
CGCACGCCTTTAATCCCAGCACTTGGGAGGCAGAGGCAGGCGGATTTCTGAGTTCGAGGCCAGCCTGGCCTACAAAGTG
AGTTCCAGGACAGCCAGGGCTACACAGAGAAACCCTGTCTTGAAAAAAAAAAAAAAAAAAAAAAGAATGTGCGGGAGCT
AGAAGAAATGGTAGCAGTAGAGAGGCTGGAGGAGAGGCAGTATCTGTGTGGTCCTCTGATTCTAAGTTCTAAATCTATA
AAAATATTGAAATATAAAAGGAATATTAAACATAGAAATTACAATTCCATAAAGTAAAGTATTGTGGTTGTTTGAATAG
GTTTGGCCCCCAGAGACTCATGTGTTTGAATGCTTGGTCCATGTAGAGTAGCACTATTGGGAGATAGGACCTTGTTGGA
GTAGGTGTGGCCTTGCTGGAAGAAGTGTGTCACTGTGGGGATAGGCTTTGAAGTCTCCTATGCTCAAGCTTCATCCAGT
GTAGAAGTCCAATGTCCTGCTTCCTGCAGATCAAGATGTAGAACTCGGCTCCTGCAGTACCATGTCTGCCTACATGCTG
CCATGCTTTCCACCATGATGATAATGGACTAAAGCTCTGAATGAATAAGCCAACCCCAATAAATGTTCTCCTTTAGAAG
AGTTGCCTTGGTCAGGGTGTCTCTTCACAGCAATGAAACCCTAAATAAGACATGTATATAAAGTACATTTCTATATGAC
AGATCACTCATACAACATTGTTAAGCAGTCACACAATGATATTGAACAGTTTCTTAATTAGGTAAGGTATAGATTCCTA
GGTCCCATGCCTACTACTGGATCAGACTCTGAAGTCCCAAAACATCCTGTGTGGGGCACTGGGCTATGCACAGACAGCC
TGGTTTCCAGTTGAAGCTAGATGTTGAACCCCGGGTCCTGGTGGTGATAATTCACCTACATGGGACAGAAGGAGTTCTC
TCATGTCTCCTGGGACCCTGGCTCCCACCCCCTCAGCCCCCCATAAGAGAAGCGTGGCTAGTAGTCATGTAGGCAATGT
CCCAAGCTTCTGACCTTCAGGCTAAACTCCTCCCCAGTTACCTAGCAACAGTAAAGATAGCAGCATACCATAAAAAGGG
CTGCTTAGCCCCTCCTCACTCTCTCACTCCTCTCTTGCTCTCTTGCTCTTACTCTTCTCTCTCTCTCCTCCTCCTCCTT
CTTCTTCTCTCTTTCTCTCTCTCCTCTCTCTCTCTCTCTCTCTCTCTCTCTCTCTCCTCTCTCTCTCTCTCTCTCTCTC
TCTCTCTCCTCTTGGCCATGGCCAGTCTCTCTCTCTCTTTTACCTCCTCTCTTCCCCCTGCCTTTCTATAATAAAGCTC
TAAATAAACTGTCTGTTCTTCAAGGCCCACTGTGCAGACTCTCGCCTGTGTGGGAACCTCTCCCCTAAGCCTTCTCTCC
CATAACCCCAGGGCTGCAGGGTGTTGCTCTGGGCCCCCTGGTTTCGGGGGCTGCCCCTTGTCCACCCCCCGCCCCCCCC
CGCCCCCGTCGAGTGGGGTCAGTGGCTTAGATGCCCACCTGGAAAGCGAGTGGAAAGCGAATGGAAAGCGTCTGGCAGC
CCTCCCACATCCGCCTGCCCAGAGCATAGGAGGAACTCTGGCCAGCGCAGGCTATCCTCCTTCCCCCTCTTTCCCCTCC
CCCTTTTAGTTCCCACAATCCTGAGTGACTGTTTCAATGTACTGGAGAAGAGAGGGGACTCACTGTCTCCTATCAGTAA
TCACAGAGTTATGGAACAAAAACAAAATCAGAGAGGTAGGCGAATCCATTGTAACTCATGCTCTACCTAAATGGGAACT
GAAAGGAAGTCACCTGATGAGCAGAGCACTCTCTACAAGAAAAGCCAAGCATCCCCCCGGTCACTAACACCTACAGGAT
CGGGGTGGAGGAGACAGAGATAAGGTAGGATGCTGCCACTAACTGATGCTCCGTGTTTCTCAGAATGGGAGGTACTGAG
TACTAGGATCTTCTCCAGGATACTGTCCCAGACATGTTGGCTATCCCTGCTACCTCTACCATGAATGCCAATTTCATGC
TCCATCATTTTAAAATAATAACAAAAAACAAACAAAACAAAACCTCCATATATTTCCAAGTGCTCTGTATGGGAGCTCT
ACACTCTTGAGATTAATTGATGTCTTGGAAGCCCATCAGCCACAGGGGAGCATGTGATGGGGACCGCCATCCTACACTG
ACTAGTTCAGTGGCAGCCCCTGAGATAGCAGGAACTTGCTCCAGAAAACAGCTCCATTAGAAATGGCATTTTCCTACAC
AATGGACAACTGCCGTTTCAACTGGGACTATTGCTGTAGACATACCTCTATTTTTCCAGTTAGCCTCTCAATCTCAGAC
CGATCCTCTCGAAAACTTTTGGTATTTCCTCTAAATTCTCTTAGTTGCTTTTTCTGCAGCTTTTCATAGCTTCTCTTCA
GTCTGCTTAACTGTAAAAACAGTTATTTAAGAGTTAGCAAACTGTAGTGGTCAGATGAATTGGGATTATACAGCAAGAG
CACTGCTAAATTACACTATTGAAAATAGATTGGCAGCATGTTAGAGCTGCAAAGCAAAATAAAAGAAGACATAAAAACG
ACAAGGCTGGGCTACAGCTCAGCTGGTAGAGCGCTGACCTGGAAAACGCTGGCCCTGGGCTGGACCAAGCTCCACACAG
ACTGGCTGTGGGAGTTGGTGCAGTGATCACAGAACTAAGTGAAGGCAGGAGAAACAGAAGGGCAAGGTCATCTTCAATC
ACATGAAGAACCTGAGGCCAGCCTGGGCTGCCTTGTCTTAAAGTGCATGTGCCTGCTTGCATGTGTATGTGAGAGAAAG
AAATGAAATTTATAAAAGTAATGAAATTTCCAGTCCAGAAAAGAAAAAGTAAAATTTAGTTTAATGGCAATTGTCATGC
ATTCATAGATGCCCCTCCACGACCCACTCCACAGAATAGAGGAAGCAGTGACTGTTCCCCTCTGAGCCAGTGGTTCTCA
AGACATACTCCTGAGGGCACTGATGATGCACGGTCAGTAGGAGACTTTGACTTAAGCCAAAACAAAAGTAATTTCCCCA
ATATTAAAAATTACATTGAATATGAAAATAGAATTTTCTTTTTAAAGATTTTATTTTTAATTTCTAGTTATGTGTGTTT
CTCTCTATGTAGGTATATGCATGCAAGTGCAGATAGATGCCTAAGAAGGCCAGAGAGGATGTCCGAGCCCTCTAGCTGG
AATTCTAGGTGTTCTGAGCTTCCTAACATGGTACTGGGAACTGACCCAGAGCCCTCTGCACGAACAGTACACTCTCAAC
TCTCACCTAGCTTTGCCTCCCAATTTTCTTGCTTAAAAAAGTGTTTTGAAAACATTTTTATTTTTTATTAGGGGAGAGA
GGAGAGGAGGTGTGTGTGCATCTCAGCCCAGCAAGAGGAGGTCAGAGGACAGTCTGCTGAAGCTGGGTCTCTCCTCCCA
CCATGTAGGTTCCTGGAATCAAATTCATGCATGAAGTTGGGTGGCAGGTGCCTCTACCCAATGAGCCATCTTACGACCC
CTGCTTTTTGCAGCTCTTTTTTTTCTCTCCTTTCCTTTCCCCTTTCCTTTCCTTCCCTTTCCTTTCTTCTTCTTCCTTC
CTTCCTTCCTTCCTTCCTTCCTTCCTTCCTTCCTTCCTTCCTTCCTTCCTTTTTGGTTTTTAGAGACAGGGTTTCTTGT
GTAGTCCTGGCAATTATAGAACTCACCAGGCAGGCTGGCCTCTAATTCACAGAGATCCATCTGCCTCTGCCTCTCAAGT
CCTGGGATTAAAGGCGTGCACCAGCACCTCATGGCTCCCAAAATATTTCTAAGTGCTTTGTATCTTCCAATATAAACTT
AGAAATTAAAATATTAAATGTTGCCAGGCAGTGGTGGCACATGCCTTTAATCCCAGCACTTGGGAGACAAAGGCAGGCG
GATTTCTGAGTTCAAGGCCAGTCTGGTCTACAGAGTGAGTTCCAAGACAGCCAGGGCTCTATAGAGAAATCCTGTCTTG
GAAAAAAAAATTAAATGTTCTGTTATCAAGATTTCAATATTATATAAACAATTCTTTTCCTCTCAGCTAACTGCTGGCC
TAGGTACTAGCAAACATGCTTGGACAAGATTCTTTACCTAGATTCAAGGTCAGAGAAAAATATTTCTACCACATTCTTC
CCACAGACTATCACACAGGCTGTGCAGTTCTCACCACTGAAATCAGAAACAAGTTGTCAACACAACAGTCAGGAGTTAC
AGAAAGAGAACGACTACACCTCACGGCACGGCACACAATGAAAGGCTCACTTCCTCCTGCAGCTTCAGTAACTCCTCCT
TGTACTCCATGGCCATTTCTTGCTTGGTTTTCTCATGTTCTTCTATCTGCTGATGCAATATTCCAACCTAAAAGCAGAA
CAGTCATTAAGTATATTGCTTAATTTCCAAGTACTTGAAAAGTTGTCTTTTATTGTGTTGAATCTTAGCTTAAATCTAC
TTTGCTATAAAAATATACAACTTAATCTGCTGGTTATGGTGATAGCCGCCTGACTGCAGTAAAATGTCCCAGTCACTTA
AGAAGAACACACTTAAGATTAACTAGGTCAAGTTGATTCTGATCAGCACTCTACCTTAAATGGCCTTTCCGTGCGCTTG
TTCTATCAACAGCAAGAGAGCTGTGTTACTTCTATAGGTTCCATGGACATAATTTCTCCCTATCTCCTGCCTGTGCTGC
TTGGTACACTTTAAGGCTGTATGGCTACTTACAGTTGGATTATTAGAGTTCCAGAGTTGAGGTCTGGGACTATTCAAAC
TATTTTCCATTTCTATTATGACTTCTCTGGGTCATTCATAACTTATTTAATTTCCAAATACACAGATTTTTTTCAAGGT
TATCTTTTTCTAACTTACTTCTGCTATGTTAAGAGAGTTTATCTATGATTTCAAAACTTTGTTCATGGACCAGGATAGA
GCCATTTTTGGAAATCATTCAGTTTGTGCTGCAGAAGAAATGCATGCTCTGCAGTTCTCTTGTGTTGAGTTCTATAGTT
ATAAACTGGGTCAAGTTTGCTGATCATGCTGTTCAAATCTGTATCTTTATGAATGCTCTCCATCATCAGTTACTGAGAA
AAATGTGTTAAAACTCTCAAGCATGACTCTGGCTTTATTATTTCCTACTGACAACCCTGGTAATTTTTACAGATTTATA
AGGAAGGTTAAAACTGTCTTACTATATTATTTGGTCTTATTTTGAGGTTTCCTAGAAGTGCAATCTGAGAGTAGACTTC
TGGGTGGATGAGGAGAGTGACCTTGGAAAGCATAGTGAGGAGATGGAAGGAAGAGCCATAACGGCCCATTCCTGGGCAG
ACTACGGCAGTAAGCAGCCGGAGCTGTCACTGGGAACCTACTAAGGAAGCAGACAGCTCTGTTTCTGTCTCTGTGAGCA
ACAGGAAGCTGCTGACTTCGCCCATCCTCACCCTGCTACGTCTAGACTTGGTGTGAACAGTTCACAAGGTCCCGAGAGA
AGCAAGCGCAGTGGAACAGTAAAGACCCAGAGAGCCACATGGGTGTTTGGCCTGTGTGTATCTGTGTACCACATCGAAT
GCCTGGTGCCATGGAGGCCAGAGGAAGGTGTGTTCTGAGACTGGGACTACAGACAGCTGTTAGCCACCACGTGGGTGTT
AAGAATGGAGCCTGGATCCTCTGAAAGAACAGCCAGTACTCTTACCCACTGACCTGTTTCTCTAGCCCACCACACTGTT
TCGTCTTTGCAGTCTAGCGTGGCTATCATTTGCTGGGCTTCCTTATCACCTTCCTGTCTCTGTGTAAGTTGTGTTCTTA
AAAGATGTGCCTAGGGGCTGGAGAGATGGCTCAATGGTTAAGAGCGCTGGCTGCCCTTCCTGAGGTCCTAAGTTCAATT
CCCAGTAACCACATGGTGGCTCACAATGCCCTCTTATGGTGTGTCTAAAAACAGCAACAGTGTACTCATATACATAAAA
TAAATACATAAATCTTTTTTTAAAATAAAACTTCAAAAAAAACTTTTAAAAGATTTGTCTAAACTTTAAACTCTAGATT
AGCAAATACCATTTACAGAAATCTAAACTAATACAGCTGGTATTACTAAAGTGTTATTTGACTCTAAGTGTAAATGGCC
AACCACTCACTGGGCGATAACTTTTTAACTCTTTGAAAATTTCACACATGTATACAGTATCATCACTAACCAAATCACA
GTTTGTGTTGTCAGTCCTGGTAGTATATTGGCCTTCAGAAGGGCAAGTGCCACGCAGGCAAGTCTGGCAGAACGAGCGT
GAGGCTTAGGGTTAGCATTTACCCACAGTTCGTATTCTTCCCAGACTAATCTGTATAGAAACTCAGAGACAATGCTTCC
ACCTACACTGCTTCCTGCTTCCCTTCCAGGATTCAGTGTTCTTCTTCTACTGCACCACTAAGTTATGAGGACTAAGTCA
GGAGCTAGTCTTAAACCTCCCCCCAGCACTACCAATATTAGTGGTGGTGAGACTAGAAATGATTTGATTTTCCTTCTCC
CTAATTTTAAAAAAGGTCTGTCTGAGTGGGTTTCCTTAACTTTGCTTACAAGGCTGGTGGTCCTGGCCGGGACTGTGTG
CATGCTAAGCACACTCCATCACTGAGCTGCTTCTCCTGCCTTGACCTGCTTAACTCTGACTGTTAAAAGCAAGGGCTCA
ACTTTTACATTTATTGGGAGGTAGAGGGGTAGAAGAATGCTGGAACTGAACCTAAGGCTTTCAGCATACTAAGCAAGCA
CTCTACTGCTACACCATGTCCCTATATCTTCAACTTTGCTGTCACCTAACTTTACAAGTGAAGCCAAAACCTATACTAT
AAACCTGGTGATGTTAATATGGACATGTAATATGATGAAAGTTATGCAAAGATTATGCAAGCCTTCTCCCATTTTCTTG
TGTGCTAGGGTTGCAGATGAATACCACCATGCTTGGCTGTATCACATGACCTCTGGGAATGCAAACCCAGGGTCTTAGA
GCTGCACAGTAAGCACTTAACCACCAAAGCCACGCCCTGGTCTCCACTGACACTCTCTTAAATACAGTGTGCATTATAT
GTTTCCAAAGTAAAATGCTCCCTGAAACAAATACTAATGTTCTTATACTTCCATAATAAAATGTCTTCTAAAAGAAACC
CTAAGAGGACTGGAGAAATGGTTCAGTGGTTAGAAGCACGGACTGCTCCTCTAGAGGACCCAGGTTGGATTCCCAGTAC
TCCACATGGCAGCTCACAACTGTCTCTAACTCCAGTTCTAGAGAATCTGTGACATCAGGCATATATATGGTGCACATAT
GTGTGCATGCAGGCAAAATACTCATTCACATAAAATAAATCTTAAAACAAGAAAAGAAAAGAAGAGAAAAGAAAAGAAG
AGAAAAGAAAAAAAGAAGAAAAGGTAACAATTAGAATAAGATTGGGCGGTTGTGGCGCACACCTTTAATCTCAGTACTC
AGGAGGCAGAGACAGGCAGATCTCTGAGTTCCAAGTTAGCCTGGTCTACAGAGCAAGTACCAGAACAGCCAGAGCTACA
GAGAAGCCCTGTCTTGAAGACACATACATACATACACACACACACACACCCCAAACAAACAAACAAACAAACCTAACTT
GGTAAACAAATGCTTACACTTAAGAAACACCTTTAGCATAAAAGATTAAACTACCACAAAGATGGATTAAAGGTTTGGA
CATGGGTTGCTCCAAGTATATTATATACATGCATGAACATGGGTGTATGGAACCATGTATGATTTAAAGCCAGAGTCAA
GATAACAAGAGAAGTGAAGCAGCCGCTCTACCTCTTTGTGCTTCATGTCCAGCTGACTCCTCAGAGCCTTCAGCTCCCG
ATCACGGATGTCCAAGCAAGTCTCCAGAGCGTGCGTCTGCCCCTCCCACTCCGACTTCTTATGAGCCACCATTATATCG
ATCTGTTTCATGAGCTCTTGCAGTTCTGCTTCACAGGATGTCAAAAATCCCCTACAAGCACCAACAGACCAGTCACAGC
TCATGCCCAAGTGGTTTCTCCTAGTTCACAGATAAAAATATCACAGACTAAACCTATCTGGAGAACTGAAACATTACAG
AAGCCAAGCCCAGGGTGCCTGGGCCTTTGCTGTCATATGCTATGCTGCTTAACTCCACACAATATTTTGCCCTCCTCTA
ATGAGTAACCTAAAACCAGGCTCACTTGCTGAAACACAGATGGATGCTTTACATCTGGCTTGCAAAGTGAGATTTCAGA
GCTACTAACCACATCTTCTGGGATATTTAAGGGATTCTTTTGGGAGAATCCAGGCAAGCCTGTGTTGCAGCTCTTTCAG
CCAAAATGAACAGTCTTAGTAGCAAACAGGCTATATTATGCAGGAAAAAAGATAACAAAGAAGAGCTGTTTCAAGAAAC
TCACCCTTGAGCAAGATCTATTGCTGTTATTTCTCCCAACTGTTATTTGGAACACACTGTAACCTACCTCACTGCTCAA
GCTACTGATACCCATCTGAGCTGAAGGGGAAAACTCAAGCTAGGATAGGAGCCACAGTCCTCCCTAGTAATGCTGAGAG
AAGGCAACTGATGTCGGAGGGATGCTGTCCACAAATGTGCCTTAGCTCAGCTTAGCTTTAGTCTAACAGAACCCAGGTA
GGTTTTTAAACTGCAATGAGCTCACAGTCAAAGGCAAACTTACCCACTATGCCCCCGATTTTGTATTCCTTCCAACAAA
GCCTCCATCTCTAAATCCTCTTTGTTTTGGCAACTAGGGGAAAAAAGAAAAAGAAAAGAGGAGTGAGAAAAATTACTGT
TCTGAATTCCAGGATTCCAAGTTAGGGTGAGTAAAAGCAATCACAGTGAGAAATACAAAGCAGCCTAAGAAGTCTGTAG
AAGCAAGGATTATCATTTAGCAATGCTAGCACCAAATACATTCCAAAAGCAAACAAAATCCTAACTGCTGCTGAAACTA
TCCTACAAAACCAATGAAACATCACATTACTCTATGCTTTTTTTTTTAATTGTTTAACTTAATTTTTTAGACACAATAT
GTCTCACTATGTAGCCCTGGCTGGTCTAGAACCAGTTATGCATGTAGACCAGGCTGGCTTTGAAGTCAGAGATGTCCAG
CTGCCTTCTGAGTGATAGAATTAAAGGTGTTTGCCACCAGGCCTGGCTTTCCTTCTATTGTTGTAGTCAAGACTTATTT
TTTAAGTATGGTCCATGGAAGCCAGAGGCAATGGAGCCACCAGATGTAGATCTAGGAACCAAATTCTGGTTCTCTTCAA
GAATAGTATATGCTCTTACTGTCTGAGCCCTCCTTCTAGCCCCTCTAATGCTTAGTTCTTAAAGAATGTCAGGGTGAAA
AGTTATTTTCTCTCAAGGGACATTAACACAAACCCTGCTACACATTGAGAGGAATCACCCAGGACCACTGCTGAAGGGA
AAGCAGCACTTCTCACTAACACAACAATTACTGCTGCTGACATGTCCCCCACTCTTCATGCCAAATTATATAGAACTGG
AAAATAAAGGTTTAGTATATTCCTCCTTCTTTCTAAGCTATTGGTTTCTCAGTGACAGAAAACCAATGTCACTCATCTC
TGAGGTCCAGAGCTGAGACCAGATTTTAACAGGGCACTGCTGCATGCCTTGGGAAACTTCATCATCCCTTAAGCAAACT
GCTCACAGATGCAGGACTGCCAAGAAGGATCTCGAAGGAAAATGAAAGGAGACAGAAAAGACTGCCTAAACAGAGAAAT
TCACACCATAAAGAAAGAATAACCCTTAAACTCATAAGTATCGAGAGTTGTATGATAAATTTCTCTTCTTCAGAAATCC
TCAATGTGTTCTTTCAGAGACCATCTTTCATTCTGAAGAAAGCGCCCCAGTAGGCTGGAAAGAAGGCCTGTTATTCTTG
CAGAGGACCCAGGTTTGATTCCCAGCACCCATATGACAGCTCATAACTCTCCATAAACTTAGTTTCAGGGGATCACAAG
TTACGTTTATAGTGCAGAGATAAACATGTAAGCAAAACTCTCATGTACATAAAATAAAATTTAAAAAGAAAAAAGAAAC
AGTCCTTTTTCCTCAGTTTTCAAAGTTTCAATTTAATTCTGAATTAAAGACAAGGCCAAAAGTTGCGATGTAGAGATTG
GGTCCCTCTGTCCTAATGCTTTTCCAGAAGTAATCTACTTCTCTGAGAAGTAGATTACCTTATTGAACAGTTTAGTGTT
GTACAAACAGCCCTCTACATAATAATAAAAGACATACTCCTTACCAAGAAATAGCCCAATGTGGGACTAAAAAAGAAAC
AAAATGGTCAACATCCCCTGGCAATGAATGCACAGACAGAAGACACACAGATGATTCTAGAGACACAGAAAGGCTGAGA
AGACCAGAGGGACAGCTAGTGTGTTGTAACTGCACCTATCTCTACATGTCCTAGCAAGGACTGCTGGCTCTTCTTGCAC
AGGGTGGCTAAGGCTCTTTCCTCCAACCAGTGTTCCTGATAGAGCTCACCATGACCCAGAGTAAAATCCTAACGGAGAG
GACTCCACGTTTTACTACACTTCCTTCTAAACCACAGTAAGGGTCAAATTACAGAGCAACCCAACCCAGCCTTTGCTCT
GCTCCAGAACTGGGAAGCAGTTGAGCCAACACTAGACAGACGCCCAGAAAACAATTCTGCTCTGCAACTAACCAGCTCT
GTGTCCTCGAACTTCGGCTTTTCCATCTGCAAAATGAAGGGTATGAATAGTAACTGCCAAGGTCTTTATTTCATCTTTT
TTATAATTATTTCTCAAAATAATTCCTACTAAAAATACACCTCTTTAGGTCATGCCTTTTTTGTTTTTTGTTTTTTGGT
TTTTTTTTTGAGATAGAGTTTCTTTGTGTAGCCCTGGCTGTCCTGGAACTCACTCTGTAGATCAGGCTGGCCTCGAACT
CAGAAACCCACCTGCCTCTCTGCCTCCCAAGTGCTGGGATTAAAGGCGTGCGCCACCACCGCCCAGCAGGTCATGCCAT
TCTTAAACAGTGATTATTTAATAATATATAATTTCTTGGCATTTATGTATGACACTATTTAATAACTAACAACGTGTAT
AATATATGCTAAACTTTAGTGAATGTTCACTTTATCTACCTGCCTCTTACACGTTCTATCTTCCTTGTAAAAGGCAGGT
GCTACCCCTTTGATGAAACAGGGAGAACGGCTTGATTATAAAAAGCTATAGGTTATATTCCTTAAGTTCAAACCCAGAT
AATGTGACCCTCCAGACCCAAGCAATGTGCCATCTTTTGGTTAACACTGCCTTCTTATGGTTAACAGGATCTCAGAGGG
CAACAGAATAAAGCTGAAGCATATTGCCTAATCACCACTAGGTGGCAGCAGCACTGTGATAAAACTACTCAGCTATAAG
AAAAGCTCAAAACTTAAATCCTAGTATTGAGACAAAGGAATTCTAGTTTAAAACAGGCACAGATGACCAGTAACATGCC
TTGAAAAACGTCGGCTAATGTGGAGTGTGTTTCTTTAACTTAAACACTCTACCCTTCTCTAGGATCCAATACACAGGGA
GGACTGAGATTTCCTGTAGATATTTATCACAGCCACATCAGTGACTCTGTCCCTAACCAACATGGCCTGCATTTACTCA
ATAAGTCTTGTTTCCTCTTTGATGGTGCCACGTGACTGTGGCTGAGAATTCTGTGTTCCTAATACTCAATACAGACTTA
AGCAAAAAGTGTTTGATGATCTGCCACCGCTTAGCACTAAGGTCAAATACTAACATAGGGCCAACAGGGCCCTCATTCA
CTGAGGGAATACTAGGAAGCTGTCAAAAGAGCATACATCTGTGGAGGGGCCTGTGATAAGGTGAAAACAGCTACAAAGC
AAGAAGAAGAAGTGTGTTCGCCTTTGGGTGCTTATTTACTGAAGAACAAACTGAGAACTACTGCCTTTACGGAGGGAAG
TGATCAGGTGGGGGAGTCAGGGATAAAGCTAACTTTCTACAGAGCAGGTTTGCTCTTTTACAGGGACGATGACAGTGCT
TTCTAACTACCACACAGAGAGGAAAGCAGCAGCACTGACCGGGATCCTAGCACTGGGGAGGTGAAGCAGGAAGATCTTA
AGTTCAAGGTCATCCTTGACTACAAAAAAACCCAGCTAAAGCAAAACTAGGAGGAAATGATACAATTTCAGGTATCAAA
AAAATGTTGGGGCTGGAGAGATGGCTCAGCGATTAAGAGTGCTGACTGCTCTTCTGAAGGTCGTGAGTTCAATTTCCAG
CAACCACATGGTGGCTCACAGCCATCTGTGATGAGATCTGATGCCCTCTTCTGTAGTGTCTGAAGACAGCTACAGTGTA
CTTACATATAATAAATAAATCTTTTTAAAAAATTGTTATATGTTCAAACAATGTAAACACATAGAAGCCTATTGGTTGG
TTGGTTGGTTGGTTTTTAAGATAAAGCCCTTGGGTTACTTTTGGAGGTTGCTACGTCACAGATTTAAACACATTCAAGT
CTATCTGTTTGTTTTAAGGTGGAGCCCTTGGGTTACCTTTGGAGGTTGCTAGGCCACCAATTCATTGCTGTAGTCTGAA
AAGAAAGGAACGGAGTTAAGCATTTTGCTTGCCATTCCTGTACAAACTGTACTTCAGGATAGTCAGCTGCGGAAGGCAA
GTTCATCATAAGAGTGCCAGCTAAGCAGCACTGGGCACATGACGCCACTAGAAAGCACCACGGTGGCTCTCACTCAGTA
ATCGGCCCAGGCACTATTAGCCATGAAGAGCTCCCTATTGACCAAAGGCTCTTGGGCAATTTCATGGTGGCTCAACTGA
GCAAACAGCACAGGAACCCCGACATACACAGCTTAATTCTAACATCCCTAGTGGGGTGACTCAGACATTACAAGTCTCC
CTGACAATGAACGCAACAGATAATTTTTATAATATAAAACCTATACCTTTGAGTTTTCTTGTACCTGCCATCAAAAATC
AAGGCTGAATCTAACACTGTATTTCAAAAGATCATTGTATTGCAACAGAACTTTCTGTAATTATGGAAACATCTTATCA
GTATTAATCAGACAATAGCCACTAGGCAGCCTGTGTGTGCTGGGCATTTCCAATGTGGCTAATGCATCTGGGGAACCAA
ACAGTTCATTTAAAATGTCAGGGCTGGCTGATGACTGCCACACTGGATAGTGTAGTTCAAGATTTAGCCAGTGAAGGAG
AGGTCATAGAAGAGGTAGAGGCATAAATTCAAAAATATATACAACCAGCTAAACCTGAGTGATAAAGAAACGGGAGGTA
AGAACCTGCTTGGGGGGGGGGGAGAAATAGGGGATTTTCAGAGGGGAAACTAGGAAAGGGGATAACATTTGAAATGTAA
ATAAAGAAAATATCATATATACACATATAATACATGTATATAATATATATGTATATATATGAAAGAAAGAAATTGAGGG
TTTTGATTATTGATTAGAGGGTTTTGAAGGCCTAGCAACCGAATGCAGCTGACAGTTCTCTGTAGGACTTTGGTCTACA
AGTCTACAACTTTGGTATTACAAGCACATATGGAATAGCTGAAGAACCTGAACTCACCGGACACTGACACTGTGTGCTT
TTTATAAATTTGTACTGATGTAAAAATAGTACTGTGGTTTTTGTAAAACTTAAAAAAGCAACTCTAGCCTTTGGCATGG
GGAGCACCTTAAGCTATGACAGTGTGGACTAATGCTGTCACCATCAGCCACCACACAGTACAGGAAAGCCTAAGTAACC
GGTCCCTACCGCTCCACGGGAGGAAGCAGCAGCAGCATGATTAACAATATCTCCATTGTTTCTGAAACTTCAGCATATA
CACATTTTAAAGGGACATGTGTCTGTGGTTTAAGTCTCTAACCCTCTTTAGTTTCGCAGCCTCCTTTACTATACTGACC
ACTGAGGACGACACAGTAAAAGACAGAGAGCACGGGACAAAAATTAACCTAAAAATGGCGCTGCATTCCAAATAAGATA
ATTCGTTTCATCATATCGTTAAGCTGCAGCCTTTAAGAATAAGTGTAAAAGCCGGGCGTGGTGGCGCACGCCTTTAATC
CCAGCACTCGGGAGGCAGAGGCAGGCGGATTTCTGAGTTCGAGGACAGCCTGGTCTACAGAGTGAGTTCCAGAACAGCC
AGGGCTACACAGAGAAACCCTGTCTCGAAAAACAAAACAAAAAAAAAAAGTGTAAAAAGCTAAAGATAACTATAGCCAT
TGATCTCTGACTTACATACAAAATATAAAATACAAATATTCGAGTTGTACAAAGAGCTATAATAAAGTAATACATTTTT
GAAACTCTAAATTGGCCTCAAGAAAGCCAGGCGAGGTGGCGCGGATCCTTAATTAGGAGACATAGGTAGGCCCATCTCT
GAGTTTGAGGCCAGCCTGGTCTACACTGCAAGTTCCAGATCATAGCTACAAAGGAGAGCCAGCGCTAGTTGGGGAGAAT
GGGGAGCACTTTTGGCAACAAGTCTACAGTCTGTAAATGAAAACTAGGTCTGACATCAGAATGCACTAACTCCACGATT
TTGTAAAGGACAAAAGCCCATTCACTGTCAAGTGTCTCCGCGTGAAAGCGCTGTTGTGGAATTCCCCTTTCCAAACTTT
CACTCCACCAATCTTGTTTCCTATGCTTGACTTGAAAGCGTGAAGCCATCTGCAATTCCCCTGCCATCAGGGGTTCCCG
CCACATTTCCGCACCTCTCATACTAACATCACCAAGGAACCCTGCGGGCTTCCCGCTGGGCGGCTAACGCTAAGGCCTG
GTCCTACACCGGCGGCAGCAGCAGCAGCCGGGTCCCTTCCCGGGAGCCATGCAGCCCACAGCCCGCAGCCCGCCCTCCC
GCAGGCCGAAGCACCTGGCCGGCCAGCCCAGAGTCCCATAGGGAGGAGGAGGAACCCAGGGGCGCGACGACCGGGCAGC
CGCAACCCGGCATTGGAAAGCCCCGCGGCAGGTGGGCCGCAACGAGCTGCGGCCGCGGGCCATGAGGCCTGGAGCCTAG
CGGCACCACCGTGGCCAGGGCCGAGACCGCACCACAGTTAGCCGCAGCTCGCCCGTCTTTGGGGCATGCGGTCGGTTAC
AGAGCGCGCCCCCGGCAGAGCGCGCCTCCGGCGGAGCGCGCCCCCGGGCCTGCCCGCCGTTCCTCCGGCCGGGGATGCG
CGCAAGTCACAACAAATCGCTGTCCGTCCCGCCCCCTGCCGCAGCGCTTGGACTCACCCACATCCGGGGCTTGAGAGCG
CCGCGAGTCACGTGACCCAGAAGAAGGGCGGGGCCGGGAGGAAGCCGACGCGCGCGCAGTGGGTAAGGGTTTTTCGCGC
CCGCGGCCCGGGTTTCCGAGGGTGGCCAAGCGTTCGCCCTCGAACTCCGGCGTCTACCGCTTCCAGAGGCGCGGGCCGG
TACTTTCAACCGAGCTTCAGAGCCACTTCTTTACTGCACGCTGTGCGGAGTGGAACGGAGCCCCCATGGCGACGCTCGA
CCTCCCCCCTTGCACTTCCGCATGTAGTATCCTCCCACCCCTCGAACCGGAAGTCGCTGCAGCGGGTGACTGTAGTGTC
CCAGGATGGTGGCCTCCGAGGGCCATTTTAGTGTAGGCGCCGTGCTCGTAGCTTAGAAATACATTTACAAAGCTGTGTG
CATGAAAGGTGTGTATGTCTCATAGGACGTACGCATCTAATGTCTAGAAAGAGATATCCGGGCAATGTGACAAGCTTTC
CTCCTGTTGTCACGTATTGTGCCCAGAGATCTAGGGGACTGGTGAAGGAATGGACCCTTGGGACTGCACTCAGCCTGGG
GTCTAAAGGAAACAATCTGAGAGCTGAGAGTTTGATATTATCTGGTATCCGGAGCGGGGGAACTTTCTGTTTACGTAAA
GGGTGAGCACCCGAGCACCTGACCCAGGAAAATAGATGTGTTTGGAAGGACGGCCAAGCATAAGTGATGAGGGACGGGG
GTGGGTGAAAAGCGTGCTAGTTTCTAAGCATGTAGAAGAGAGTCATGTTACAAAGTATTGAGGCGAACTTGTGGAAAGA
CTGGGTATCCTTACATTACCGCTGGAGACAGTAGTACCCTGCCAGTCAGTCACAAAGCTGACCTGACTTGTTTCATAGA
TCATTTGAGGCAAGCAGCAAAGCATTCAAGGACAGAGCCTGCTGAAAAGCTGGAGAGAAAGTCAGAGCACTTTAGAAAA
AGGTGCAATCCATAGGGACTGGGAAAGTCAGCACCAGAAGGTGTGAAATGCAGCCCAAGGCTCAGCTACAAAAACAAAA
GGCTTGTCAAACCCTGAGGGGTGATTAGAAGTGGCCCTTCAGCTGGCTTTGCGTTATCCACTAGCTAGGGTCTGGTTAT
GTCTGAGGAAAACTGCTAAGTTATCACCTGGTTTTAACGTGGCAGAGGGAGCTTCAGTGTGTGTGTGTGTGTATACGCG
TACACGAAAGTTGTGGTGGTGGGGGAGATTTCTGCGTACAGGTGGAGTTGTAGATGAGTGTAGAGGCCAGAGGTCAACA
TCAGTGTCTTCCTTTATTACTTTGAATCTTAAACCTGGAGCTTTCTGATTCAGTTAAACTGCCTGGCCTGGCAGCTTCC
CAGAGAACACAAGTGTGCCATCGTGCCAGGCTTTTTCTGCGGGTGCCAGGAATCTGAATTCAGGTCTTTTTGCTTGCAC
AGCAAGCACTTCACTCCACTGAACCTCCTCCCAGGCCCCAGGTTGTTTAATTTTTTAAAGTAAAAAGCCCTTTCCCTCC
TACAGACTAGGTAGATAGCGCTAGCTTGCTTGCCTTTATTCTGTTGGAGGCAAGCACATAGCCGCGTAGCACAGTTTGT
TTCTTGTATGAGTCTCCCTTCTCTCGGAAACAGAACAGTTCCTGAGAGAGCCACTGGTACTAATCCTCACAAGACCTTT
CCTTGGGTTGCCACTTTGTGGCAGGGAGCACAGTAGGGTGTGTTTGTGATAAGGAACAAACTTGGAAGCCAGAAACCCA
AAAGCACTGCTTGATGACTGAGTTAGACTGCAACAGTTTCAGGAGAAAAATGTGGAACAATCTGTGGTCTGGGAGCTTA
GCAAGCATCCTGAGCACTTGGACCAGGCACTGAAGAGAGCCAGCAAGATGGTTTAGTGGCTTAAAGGCGCTTGCTGCCA
AGCCTGGCAACCTGAGTACAATCTCTGGGACCCGCCTGGTGGAAGAAGAGAACCAAAATCCCCAAGTTGTCCTTTGACT
TCCACACGAACTTACACATATACATTGTTTCTTTCAAGAAGGAAGTAGGCTGGGTGTTGGGATCACAGCACAAAAGTTC
TTGCACCCTCACATATCCAGGGAGGCCGAGATGTTAAGCATGCAGGATTGTTCTTCCAATGTGAGAGATATAAAACTTG
TTCAGTCCACAAAGCTGGGAATTGGAAGTGATTGACAGCCTGGTGATCTGCGTTATCTGTTGGGCCAGGCCACATCAAC
CTACAACCAGGACCGAGGGTGGCTAGTAATTTAAATGACCCTGATAAGCAGGGGTTCCCTAAGCTCCAGAAGTAGCTAA
GAGACCAGATGATGTCTATGTTATTGTATGACCTTCCTTAGACCCTTAAGCTAGTACAGGTAACCTATCTCTAGAACCC
ATCGTCTTGGAAGAAATAACATACCCTAAGTCGAGTTTCAATGTAATTGCACCTCCCTGTGCACCAGAAACTGTTATTA
CACCAGGAAACTTTCTTCCAAATCATACTATGTTTAAGTTTGTTCGGAGTAAACCGCCTAGCATCAGACCCCCCAAGTC
TAAGCAAGACTGATAAAGTCAGTCTGAACCCAGTTTTCATTCTCACCTGACAGTTTGCTTCCCTCCCTGGACTCCTGCA
GGGCCCCCTCAGCTGGGGATGGAGGTCGGTTGGCAGTGTGCTTAACTGTAGTATACACAACACCCTGGTTCTGTAACCA
GAGCCGGTGGCACAGGCCTGCAATCCCATTGGTGGAGGCAGGAAGATTGGAAGCTTAAGGCTGCTTTTGGCTATAGAGA
GTTTGAGACTCTCAAAAAAACAAACAAAAAGGAGGACGCCCAGAGGGATAGAGAACCTGGAGCTGCCACCGTTGATCTT
GGATAGTTCTGTTGAGTTCAGTCTGGATGCTGTTTAAGAAAGGAAGTGGTTTCCTGGGTAAGCCCTGCTGGCCACGTTG
TTCCTGCCCTGAGAGTTAGCAGCTGGCCTATGGTTGGTCACTTCACACATCCCAGCTCAGTGTCACCCAGCTGTTCCCT
TAGCTCCTGTGCCTTTAGACTGCCAATGTTTGGGCCAAGACGGGTGGAGACTTGTGCCAAATCGTAGGGGAGGGCTTCA
AGAGCAGGAGCTGACACTCAGGTAAGTCGGTCTGAGTCAAGTCAGAGACTCGTCAAAGACATCACAAGCAGGGAAGGGT
GATTGTATAAGATGGTAAAGATAAAAGAAAGTTACATTTCCACGCAGTGTCTTCTAGGACCTTATTCTGAAGACCTGTG
TTGCTCTCTGGTTCCACTAGCAGCCTGGTGTGTTGATCAAGCATGTCAGCTGAGGTGAGGAGAGAACTGGAGTCTTTAT
GTTGTCATCTGACACATACAAGATGGGCCTTTCCTGGGGTAATGTTAAGCACAGCAACAAAACCAGTTTCAAGGTGGAA
GTATGAGGAATCCTAGTCCTGGATTATACTATACCTTCACTGTGTTAGAAAAAAAAAAAAAAAGACCTCTTTGGCTTAC
AGGCCTGACAAGATCAAAGCTGCAGGAGGATGGACAGTGAGGTACAGCGAGATGGAAGGATCTTGGACCTGATTGATGA
TGCTTGGCGGGAAGATAAGCTGCCATATGAGGATGTCGCCATTCCACTGGTAGGTTGTGATTCGAGCTCAGGAGAAAAT
GTGGTGAGACTTAGTGGAGGTTGGTGGGAAGTGAAATGCTAAGGCCCAGAAATCCTACTGCCTGGTGTAACTAGCTTCA
ATACAGGTCATACCAGGGCTGGAGTATACCCGGATTTTTGGAGCCACAAAAGCCCAGAGGGATGCCAAGTGTGAGTTTA
GCACATCACACCCAGGAGCAAGGAGCATTGCTGGCTTACCAGTCTTTGTGGGTTTTTTTTGTTTTTGTTGTTTTTATTT
GTGTGTGTGTGTATGTATATATTTATGTATGTATGTATGTATGTATGTATGTATAGTGTGAGAATGTCTGCCACCCATG
TGCAGATGGGGAGGGTGACAGAAGAAGGCATCAAATTCCCTGGAGCTGGACTTACAGGTAGTTAGAGATCACCCAACAC
AGGTGCTGGAACAAAGCTTGGATCCTCTAAAAGAAGAGTCGGTGATCTTACCACTGAGCCATCCCCCCAGCCCTTAGGA
TTTATTTCCATTTGTGTATGTGTGAGGGTCTGGGATACAGTGGAGGAGCGTGTGAGTACAGGTGCCCTCAGAGGCCAGA
AGAGGGTGTTGGGTCCCTTGGAGCTGGAATTAAAGGCAGTTGTGAACCACCCAACATGAGTGCTGAAAACCAAACAGTG
TCCTCTGCAAAAGCAGTAGAGCCCTTAACCACTGAGCCGTCTCTCAGCCCCTCTGATGCAGGCACACAGCCAGCTGCTT
ACAGGCAACCTTGCCTTTCTTCTTTGGCCTGTAGACATACAAGCTCTCAGTAAACCTTTTCTTTGCTGATCTCTAGGAA
ACTCCCTTAAAAGGCTGTTGTTGAACCTTCTGTAATAAGTAACCCCCCACTTTTGCTTATGTAGATTTAAAAAAAAAAA
CAAAAACTCATTGATGTTACAAAGGCCTAACAAAGAACAAGGCAAACAGAGTCTGGGGACTTTCTCTGTACAGTGTGAC
ACACGCTCTGGAAGAGCAGCTAACACAGCATGACTTCCAGGAGCATCACCTGCACTGCTGTTTTACAAAGAACAGACTC
CACTCGCTCACTCACCGGCACTCTCTTTCAAGAGTAAGAGGTGGGATGTGTTCAGTGGATATTCAAGTCGCAGCTTAGT
TCAAGTTCAGGACAATAAAATAATAAGAATCATAGCTACAATTTATTACCAGTTTTAAGCCATAGACTGAAATTAAGGC
TTGCATTATCTGTAATCCTTAAGACAGCCATACAGGGGAGGTGGTAGTGTCTCCGTTTGGCAGGAAAAGAGTAGGATTA
GAGAAGTACACTTACCTCAAGTCTAGTGACTAGTATGTCAGATTTCATAAGCAAAGCTCAAAGTCTGTAAGCTTTCATC
TGTCCACCCATCCATCCGTCCATCCATCCATCCAACAATCACTTCTCCAAAGTCTACTGTGTGCCCTAAGGGTATATGA
GCATAAGATAAAGTTCCTGTTTGGAGCCAGGGATCAAGAGAGGTAGGTGACTAACTAATGACACTACCAAGCAGGAGGG
AAGGATAAGCAAGTGGAGAATGGCTGGAGGCCTGGCATGCAGTAGAAATGCAGAGAAGATGTAATGCTTAAGAAAGAAT
CAGATGGTTCATGGTGCTAGACAGGGTACTGTAGCAAAGAAGAGTGTAGCAGGCCCAGGGTTTGAAACACGTTGGGAGA
TGGTGAAGCAGTGGGCAGCAATTACCTTAGTAATTAGGAGGCAGAAAGTTGGGCATAGTTTTTGAGAAAATGTTTGTGC
CCCACTTCGACCTCCTTCTCTAGGTATCTAGGGATGAAAGGTCTGTGGAGGGAAGCTGCCATAGCTCACATTTGTCTTT
CAGAAAGTGGGGTCTGTAACATTGACAGACAGCCTGATAGAAGAAAGGGCCAGGGGACATCATGTGACTGCAGTGCAGT
GATCTAGGCAAGGGAGGAAAACCACAACAGCACCAGGAAAAGTGCTGTGACTTGCTGAGCTCCGTACAGCAAGACCTAA
GGAACACTTACATGGTAGGGAATGAAGGGGGAGGTCCCTCTGCTGACTTCCTGGTGCCATGGTAACCTGATCCTGTGGT
CCATCCACACAGTGTTGTGATTCTAAAGGAATGTGTCTGTCAGTTAGCTTTTGCTGCATAACAAATTATCCTGAAACTT
AATGGCTTACAATAACAACTGTTTGGTCATAATTTTATTTCTTATTGGGGAGGTCTGGTCCACACCAGTTCAGCCAACT
AATCCTAGGCTTGCTGGTGCTGCAGTGTCAGGCAGCAGACTAGCTGGAGCCCCTCTGCCAGTTAACAGGATGTCTCCAG
GAAGTAGGGTGCCTGGCACTTGGCACACACCACCCTGCAGGTCCTCTGGGACCTCAGCCTCAGGTTCAGCAGCAACAGG
GAAGTGCAGAGCACTTAGGGCTCAGGCCCAGAACTGCCCCACAGCTGCATTCTGCTGAGATGGGCAAGTCTGTGGCCAA
TCCAAAGGCACAGTCAGGGTTAGACTCTGCGGCTTGGCAGGAACAGCTGCAGACAGCTGCAGCTGTTGGTGAATTTGTC
CCTGTGGATATTGTGCGTATGGTATTTTGTGTTGGGTGGGCATGTTTTGTCTAGTTTTACATGGTAGTATTCATCGCAA
GAATTAATAGTCACCAAGCAAACGATACATCATTTTAGGAAGCCTAGTATGCCATTAGAGAGCATGACATTAAGTCGTT
CTTAATCAAAGGCCTGTTTATTTTTTGTGACCTGTAGATAGTTATTAAGGTCAGATTTCTAAACGGACTAGAGAATGAC
AGTTCTCTGGCTCTGTTTACAGAATGTTGAATCTCACTTTACTTTCGGCATAGCAGACGCATGTTGTGCAAACACATTG
GGGTTTTCCTGTATGTGTGTACCTGTGTGCCATGACACACATGTAGAACTCAGCGTTGTCTGCAGTGCCTTTACCCACT
GAACCACTTTACTGGACCTGCTTCAAATACATCTGTACATATTGTAGCCAAGTATCATGTTCCATATGTTGAACATAAT
TTTAAAAATAAAAATACCTCCACATAGTATAAATATAAGTGAGAAATCCTAACTTTGAATATGAAAGCATCAGTTTTCT
AACACAAAGTGTAAGTTCAGGGAATTGCACAGAAATACATGTGGTGAACTCTGGAGCCATGGCTTATCTCTGTAAGAAA
ATGGCTCTTGGGGTGTGAGCTAGTCTTTACTGTGCTTTCCACTAGGGGGAGCTCTCACCTGTTACATTGTCAGTGTCCA
TTATCCAGCCCATATTGTCACTAAAGAAAGCATTTTGTTGCAGCATTTTTTCTTCTTGATACAATTCCTGTATTTGAGA
ACATATCAGCAAATCAGATTGGCCCTTAAAGCATTTTTCAATAGGTTTAGCATTGGTTCTTGTCAGTGTTCTCAGCCAC
TCAGCAGTGTGTGCCCTAGAGTACTGAGTACCCTCACAGCATGCACTGGATCTAATGTCCTTACTCTCCCCGTCCCCAA
GGCAGAGACATGGGGGTGAAAAAAAAAGCTCTTTTTTTTTTTTCTCCAATTTTTGAGAGTGGAAACAAAAGCCCCCAAG
GGTTTGAATTACCTCATCAACCCAATAAGCCAGCAAATGAAGGCTGTCTGGGCCTCCAGTCTCTGCCCTTAGCCCTCCT
GCCCCACTGCCTTTTATAAGAAAACCAGAGTCACAGGGCCAGCATTCCCATGAGGCTTCCAAGCAAGCCGCACTGAACA
GACCTCTGATATTTTCTATCCATCTGTTTGTTTAGGCTCTCTCTTTAGAGCATCATATCAGCTTTGCTGGCTGTTCCCA
GGCCCTCGGAGGCTTTCTTTCCTAATGCCTTTGTGTTTTCAGAAGTAACTGCAGGACCAGGTCCACACCTATAATCCCA
GCTCCTGGGAGGCAAAGGAGGATGGGAAAGAGACTTGGGGGTGATCGGCTGAGAGTGTGGCTCAGTGAGAGAGTGCTAG
TGTATCTCAGCAGGGCCCTGAGCGCAGTCCCCGGCCGCGCAGAAACACAGTTCAAGATTTGGGGCCAGCCTAGGCTACC
TGAGACCCATCTCAAGGATAGAAAAGACACTTCCTGATGGTCGTTACGGCTGTGCTTCCCTTCCAGAGTGAGCTTCCTG
AGCCCGAGCAAGACAACGGAGGCACCACAGAGTCTGTGAAAGAACAGGAGATGAAGTGGACAGACCTGGCCTTACAGGG
CCTCCACGAGAACGTCCCACCCGCTGGAAACTGATGCCGGGCTCCTTCCCACGGACGGAGTTTTCAAACATATGGGGAT
AAAAATGTTTCCTGTCGCCAAATGCAGATCTTTAGCAATAAATCAACACTCAAAAGCATATGCCCACTTGGTTTTCGTT
TTGTTTTGCTGTTTTGTTTAACCAACAAAGCACAGCATGAAAACATTCTGAGTGAGAAACTGAGACTTCCCAGGAATGT
AGACCGCGGCTCTGGAAGCCTGCGGCAGGTGATGCACACACTTGCGTTTGAACACCGTCGATTAAACGTTTGCCTTTGG
CTCCAGTTTTGCTTCTGTCAAAGTTTAATACTGCCCAGCTACTTTGGCACGAGTAGTTGAGAATACAAGCAGGAAAGGC
AGCAGAAACCAGGCATGAAGAGAGCCACAGACTCGCATTCCCATGCCTGAGACGTGTTCTGAGTGACGTTAGCCTGTAG
GTGCCTATGCCCCGAGCAGATACTCCACTCTCTGATAACTGGCATTCTTAAGATTCCCAAGCTACTTTTAGACATTGCA
TAAATGTACAGATTTAAAAGTTATCTCTGAAGAATTAGGGGATGGCTTAGTCAGGACCTAAGTTTGATCCCAACTCCAG
TAAAAATTGGGCTTCGTGCCATGGTAGTGTGTGCTTGTAATCCTGCTTAGCTGTTAGTCACCTCTGCTCTCCGTCTGTG
GTTATTGCCTTTGCACCACTGGAGAGGTTCTCTGCGTGAATGGAATACTCCTTTTATTCAGAATAATAATGGCATCTCA
TACCTCAGAGCCCCCTCAAATATAAAACACTGTGAAGCCAGTAGTCAGTACAATATTTATACAAAAATTTGTCAGCGGT
GGAAAGATGGCTCAAGTGGTTAAGAGCACTTCCTGCTCGTTCTTGGCACCCACATACCAGCTCATACCTGTCTGTGACT
CCAGTTCCAGGGGGTTCCTTACCCTCTTCTGGCCTCTGGGGGGGCTGCACACATGAGATGCATATGCATACATAATAGG
CAAGACACTCATAAAAATAAATTTTTAGAATTTCTAAAGACTCCACGGCATCAAGCCTTGGGGATAGAAGTACTGCTAT
AAAATGTCAGTTATTGGCTCTCCCTTCCAGCCGTCTCCCCGAGACAGTATAAGCACAGAACTCCAGAGGACGTGTATCT
TTGGCAGCCAGTATACAGAGAACGGGTGAAAAAAAAAAAACAGGGAAAGGGACATCCAAGAAGTACAGCATAGTAGATT
CCAGTAGATGTCATTCACTTTAAAGAAAGTGTGGCATTTCTTGTACCTGCCTTGGCTTTCTGAACAAACACCTGACATA
CAAGTGGCCAGGGAAAACAGTGAGGGGTGAATGTTGACCACCGAGCAAGAGATGACACAAAGCTTCAAAGTGGAACTGG
TGTTGCCAGCAAGAAACCTGGGTGGTCTAGGGGCTTCTCCACATCTCCCGAGTCATCGAAAGACTTAATCAGAGCTGGG
GACTGCCTGATCTGTTTGGTTTGGTTTGCTTTTTGTTTGTTTGTTTCATTTTGTTTTGTTTTGTTCCAAGACTTTCTTT
GTATAAACCCTGGCTGTCCTGGAACTAACTCTGCAGACCAGGCTGCCCTGGAACTCACAGAGATCGCCTGCCTCTGCCT
CCCAAGTGCTAGGATTAAAGGTGTGAGACACCACCATCCAGCTTTTATTTGTTGTTTTTGTTGTGTTGTTGTCGTCGTC
GTCGTTTATTTGTTTTTTAATGCAAGTCACCCCAGTAGATGGATTTCAGTTAAGACAGGAAATGTAAAAGACAAAAGAG
CTTTACACTGAAAAAGATGATGGTGGCTTGGACTGTGGAGGCGAAGGTGGAAGTAGAGGAGGTCGAGATAGCTTTTCCT
GGTGGACTTGTCCAGGCTTACCCACTGCACAGTATTCCCTGCAGTGAGATCCCTGGATTGTACGTGTATGGTTCTAAAG
AGACTCACATGCAGTGTAAGCCTTGTCTTATAACCCAGAACTGAATTCTCTTGAGCCAGACACAGGCCTGCAGATACAA
TCTCTGTCCCTGAGAAACATCCAGAGGCCAGGAGCTGCCCATCATCTGAAGCCCATCTTAGACCCACCCCTTCATGGTA
TCGCAACAATGGCAGCTGGGGTGGATGGAACACTTCCATGGCTCAAGCCCTGCCTTTTCTTTTTAGCTGGATGTCATTG
TCCTTTGAATAGGAGATAACAGCTTAAAATTTAATGTTAGCTTGTCAAAAGTTAAGAGACTTATAAAAGTCACTCAAAT
AGTAAGGGCTTTCCAACCTAGACTGTCACAGCTCAAAACCCATGTCGTTGCCAAAAGCCACATCAATGCCCTAGAAAAT
CCCACCAGAATTCTCAAATTTTTCATGTTTTTCTAATTTATAGAACAGAGACAGAATTGACAACATTCTTATTAGGGGA
CCTGAGATACATAAAACAGTAAATATTACTGTTTAGTTACCAAAATAAGATAATTGCTACCAAAAGAAAAAAAATCATG
GTTTCACTCATTTTCAGTTTGTCATCAGTGCCCCTTTATCACCAGCAGGGGCCGCTCAACTCCTTTTTAAAAATTTGTG
TCTGGTTCCTAAGCCGTCCTGTAGTCCTTCAGTGAACCAACCCAACGGAAGCTGCAAGTCCTGAGGTGCTGGCCCAGAA
GGGCAGCTGGGACTCAGATGATGGACACCCCCAACCTGCCTCGGCCTCTGAGCCAACCAGCTCTGGTTCCATGAGTGTG
CACTCTCAGAAGCATTCATTCAGATGAATGCTTCACCCTCTGATCTTGAGTCTTTCAATTGCTTGTTAAAAGGACCCAG
GTTTTCATCTTGCAATGGCTTCCAACTGTAGCTAGCTAATCCATGGCAGCCATCAGTCAGAGCGCTCCATGTTGACTGG
AGAGTGACTCAAATGTCACTACATTGGCAGGGTGGGCATTGAAGGTTCTATATCAGCAGACTTTAAAGCACAAGAAAAG
CAGGCAGGTCCCAGAGAAGCAGAGTGGAGAGCTAGGGCCAGCATCTTTGCTGTCACAGGGGGCTTGGGGGTCCTCTCAA
GATCTCCCAAGGTGGTAGCTGAATGAACTCAGGAAGACTTGCCTGATTGACCGTGGGGTGAGGGGCAGGTACAGAGATT
CTGTAAGCCCAGCAAGACAGGTGAGTGGACAGCTAAGAGCACTTGAGGCAAGGTAATCAATCATGTGACTCCGGGGCAC
GTCCTTACTGCAGTTTTTCCAGGCTCTTAGCCAATGACTATGTAACCTTCTGTAGCCCTGTCTCAGAGTAGACCCTTTG
ACCCAAATAAGGTAAGAAAAGCACGATGACAGCTGGGGACAGTGTTCAACTCCTCTGCCTATGACTGGTAGGTCAGTAG
TATAAAGACTGTCTGCCTATTTTTCTTTGGGTTGTTTTCTCAGTTGGCTAAACGTATGCAAAAACTATTTTTGTGACTC
AAATTTGGCCAAATCGTAGCAGTTTCCTTTGTTTTCAGCTAATGCTGTTCTGGGAGTTGATCGTCCATATGCAGAAAAA
TATGCACGCACGCACACTCATTAGCTGGATTTGCTGGGGGCGGGAGAAGGGGACAAAGGGGTGGAGAGCTCAAAAATAC
CAAATGACTGGAGAGGAAATGAGAGAGGGTGATGTAAAAGCCCATCCCTGTCTTCCCTGGTGACTCAGGCCCCCTTTAT
AGAGATGCCACCACCCGAGGGCAAAAAAGACTTTCCTCCACCCATACTCTGGTCTTGCCTTGGCTCTTCTGGCAGTTCT
GTCCCCAGCTTCCACTCCACCTGCCTTCCAAATGCTACTCATTAAGTGGCAGCCGTGCTGGCCCTGGAGGACTTTCTGC
CAAATCGCCAGTGAGCTTGCCCTTGACTGAGACCCCTCATGGTCTGATCCATCTTCTTTCAAGGCTCTGGTGTTCCCAG
CCTCTCTCCTCCCAGACTCTAGTCTCACGGTTGTGATGATTTTAGGAGATGTACCTACCCTCCATCCATCCCGCTCTCA
CCCGGGCTACCCCAGAGCTGGGAAGGTCAGGGACTTGTGCAAGTACAGGGCACCAAGGCACCTGAGCCTTGGGCTGGGT
TCAGGGCACTCATGGCAGAAGCAGATAGGGCTGGTCCCTACCCCCTGGGCTTTTCACTTTGTATCCTCAATCAATCAGC
CATCTCTCCGTGACCTGTTTTGTTTTGTTTTTTTCTGTCGCTTGCTTCTTTTATTTATTGTAATACTAGCATTTATCTT
CTTATCTAGAAGCATTCAACTTCTTCCCCTCTCTGCTTTCATTTTGCAAAGTCTCTGAAATAATACATTTTGTTGTTGT
TGTTGTTGTTGTTTTGTTTTGTTTTGTTTTTTCAAGACAGGGTTTCTCTGTGTAGCCCTGGCTGTCCTGGAACTCACTC
TGTAGACCAGGCTGGCCTCAAACTCAGAAATCCGCCTGCCTCTGCCTCCCGAGTGGAAACAATACATTTTATATCAAAT
TCACAGCTCATTTGTCTCCCTTAATAGTTGCTCATCTAACATTATATATGCATAAAATGTATGCACGGTAACTATATGC
ACAGACCTTGAAACCAAAGGACTCGAGTTCAAAACCCAAAGCCAAGCAACACTCCAGCTGCGCATCCCCTCACAGGCGA
TATTACCTTGCTAAGCCCAGGTCTCTGTGAAGCGAAGGTTGACAACACTACTATATCATACGAGTCTCAGGTTAAATGG
GGCAGTGCAGGTGATGGGTTTGGACAGATTGGGACCCATGGCAAATACCTGAAACCTGAGCTATTGCTTCTTATTAATA
TAATGCAGCAGGCACTTCAAAGGCATCCGATATTAAGCTCGTCCAGATTTTGGAGATGGCGAGGTTCAGCAGCAACGAC
TTAGAAGGCAGAAGACCTGGGTTTGAGCTCTCTCTTAAGGAAACTGTGCTGGGGGTTGAACCCAGGACCTTCCATTATG
CTCAGCAAGACTATATGGCTGAGCTCCAGCTCCAGCCTGAAAAGCCTCTGGTTTTAAGATCTAATTGACCCCTTGCTGA
CCTCGGGACCAGGAGGAGTCTGCCAACTTCTCTCAGCCTTCTGGAATCAAAGAGTAAAAATGCATTCAAAACTCCACTG
TCGCTTAAAGAATGATAAACATTTAAGTTAAGCATCCAGATTTTATTTCCTGCATAAATGTTCTGAAATTCATGTTTTA
ACAGCGCTGGATGTGTGTGCTAAGCTGATAGGTGCTTGTGCGGGCATAGCTGACTATGATTTGCATAAATATGTTTTCT
GCAGTCTGGAAGGAAAGACAACAAACCTACTGGCAAGGGTCACCTCCAGGGACAAGATTTGACAGGCTGAGGAAGGAAA
TTCCACAGCTATCCTTCAGAAAAAAGTCGTAGCTCTTTGGGTAATTTTTTTTCAGATAATCATATAAATGCTGCAAAAT
TTAGAAAAGTATTGTTTATTTTCATAAAAAACAAAACCAAAAACTCTTCTCACTGTTCTTGAAAGAAGTTCTGGGACAT
GGGTCAAAACTCTTATCTGTAGTCAGTAACTTCCGAGCAAGCGTCAGATCCACACAAAGCACTCTGGGAAATGCACGTA
TAGCTCTGAAGGTGGGGTTCGTGCCTGATAGTGCAGTGTGTGAGGCCACGTAAGTCACTCACATAGAAGAGCACAACGT
GGAATGTGTGCAGCACACAGCTAATAGAGCTCAGGAAATATCTGCTGGACCAATGGACTGCTGGGTGGATCTGTGTGTG
GCCGGCCACATCAAGTGCATGGATTCGTGGCTGGACCTGTGGATGGATAGGTAGGTGGACAGGTATGGACATGGAGACC
ATGCAAGAGGAGAGAAGGAAAGACAAAGGCCTCTGGCAGCTGAAGGCACTGGGGAACACTTGTGGGTGAGCCTTTGAGA
GGCCGACTGCGGACATTGCAGTTTGGAAGGGGTTGAGAAGGCGTCTTACAGTAATGGCACTCTGATTATTTCTCATTCA
GTCTCTTTCCCCTCCCTCTCTCCTCCTTCTCATTCAGGTGTCTTTAGAAGCATGGAGGACTTTTTTTTTTTTTAAGATT
TATTTATTTACGTATGTGAGCACACTGTTGCTGTCTTCAGACACACCAGAAGAGGGCATCAAATCCCATTACAGATGGT
TGTGAGCCGCTATGTGGGTGCTGGGACTTGAACCCTGGACCTCTGGAAGGGCAGACAATGCTCTTAACCACCGAGCTAG
CTCTCCAGACCCCAAACCCATCTTTTTAAGGCATTTGGATAACCAAAAAGTATGAAGTCATCAAAACTAATGACTGTTA
AGCTTTATCAACGGGGGAAAGGGCTTGAGAAAAATGAAAGAGGTGGTACAAGTTTTTAAAAAGATTCTCCAGGGGCTGG
TGAGATGGCTCAGCGGTTAAGAGCGCTGACTGCTCTTCCAAAGATCCTGAGTTCAAATCCCAGCAACCACATGGTGGCT
CACAACCATCCGTAACAAAATCTGATGCTCTCTTCTGGAGTGTCTGAAGACAGGTACAGTGTAGTTACATATAATAAAT
AAATAAATGTTTAAAAAAAAAAAAAAAAAAAAAAAAGATTCTCCAGGTTTAAACTATGGGAATTTGTGGGGGTGGGGGG
AGGACAGATTATTCAACAAATTATTCAAACTAAGCTAGCTAGGACAATTAGTTTTCCGTTGGTGGGGGTGGGGGAGGTG
TTCATCTAGATCCCTGGATCTTCCTCACATGACACTTGATCTTTCCCGGAAGACTGAGATGTAATTACACCTCACAATA
GAGTTAAAACAGATTTAAACATAAATTGTCTATAAAGGCATTTCGAGGGCTGGTGAGATGACTCAGAGGATATAGGTGC
TTGCCACTAAGGCTGATGATGTGAGTTCAATTCCCAGAACCCACTATGGAAGGGGAGAATTGACTCCTGAACGTTATCC
TTGGACCTTAACACTCAAGAGCGTGTGCACCTACGTATATCACATCATTGTCGTTGTCGTCGTCGTTGTCATCTTTAAA
GTAAAAGGATATATAAAATGTAGCTGTATCCTTTAAAAACTCTGAGGTAGGGGCTGGTGAGATGGCTCAACGGGTAAGA
GCACCCGACTGCTCTTCTGAAGGTCCTGAGTTCAAATCCCAGCAACCACATGGTGGCTCACAACCATCTATAAGGAGAT
CTGACTCCCTCTTCTAGAGTGTCTGAAGACAGCTACAGTGTACTTACATAGAATAAATAAATAAACATTTTTTAAAAAT
TTAAAAAGAAAAAAGAAAAAAAACCTCTGAGGTAGAGGTGCCTTCTTAAGCTACAAAAACTAAGAACTAGAAACTAGAA
AAGCAGATGAATATAAAATGCCTACATGACAAGGGATATAAAATTAGATGATGGCTCCATATATAATAGCTGAGGATTT
TCTCCAAGTAACACATAAAAACCTCAGCAAATCAAGTAGAAAAACAGGACCCCGGTAGAAAAGCAGGCAAGGGGTAGAA
TTGAGCAATTCACTGGGAAAAAAAAAAAAGGATACAAAATACAAAAGTATGATTATGTCACGAATTGCAGACTGGCTCA
GGCCATGCTCGGCATCCTGCAGCTTCCCTTCCTACACGCTGGACGCTGGAATGTGGACAGCAAAAGTTTCCAAGTCCAG
TCTCCTTAGTGCTGAGCTTTTGTGTATGGCTTGATACATTCTGATGTGTCCATCAAAAGCCACCAGCTCCACTGTCAAA
CAAGGTCTGTGTGTGTGTGTGTGTGTGTGTGTGTGTGTGTGTGTGTGTGTGTGTGTTACCTTGCATCTATATGCGGACT
CAAGATCCATGGGTATCCCAGACAGGAAGTAGGCATCCATTGTATAGCCCAGAGAGCATGGTCCTAGAGACCAGATATG
CCTGACTGAGGCTTCCTGGCTTCCAGACGGAGAGGTCTGTGATTAGGTCCTAGTTTCTCAAGTCCCCAGGTTACGGTTC
ATGGCAGAAGGAGAAGCCACGTCTGTGGGTCAGTCAGTAGCTGAGATTCCAACATGGAATCTCAACCTGGAACCTTCCA
TTCCACCTGATTTGACATCATTTTAATAGATTGATTTTCAATAATAAATCTCTTTCCCTGTGTTCTACCTGAAGTGGCT
TCTGTCATCTGAAGCTGAGCTAAGACGCATTATGGATAATTTAAAAAAAATACAGATTATCAACAATGCTTCATCAGAT
GTCAACCCTTTAAAAGATTAGCAGAGAGCCCCACACAGGCTGTCATTCCTGGAAGCCATGTCTTGAAGCAGCCATTTTC
TAGTAGTTTGGTATCGTGCACCTAGACATAGCAAGTTCATCTCATCAAGGATTGTACCTAAAGGATGTTGTCAAAGAGA
AACAGGACACATGTCCTTCAGGAAAGACTTGCCAGGGGGTCTCAGTTGCATCACTGTGAGGAATGGAGAAATGATCATA
AAGGAAAAGCTGAAGTCTCCATCCAGAGGGGATTGCCTAAAGAATTATTGTATAACTATTCCTGGGAATTCTTTGCAGG
GGTCGAGGAACAAGTCAGAGCTACCTACATGAGCAAGGGAACGTCATTACATTACATTACAAGTAAGAAGTAATTTGGT
TATCAGCGCGCAGAGCGCGACCTCGTTCATGACTGAAAACATGAATTTTTGTCTGAACACGGGTGTGTTTGCCTAAACG
TGGAGAAAGGTGAGAGAGGACACAAGGGATGATGATGGTGGCAGAAGAGCCCACGCGTGGCTTTCGCTTATCCTCTCTC
TAGAGTCTAAGCTCTCCTGTCTGACTGTTCTATGAGATTATGCTCATATGACACATAAGTATACAGTTCAACTCTCTAA
GGAGCAAGATTCAAATTTTCCAGTGTCTAAGAAAAAGATATGTGCGGATGTTTTCTAGAGGAAGCCGGGAGAAAGGGGA
AGCAGGATAGAATGTAGCGTTTCCTGAATCTAGGCCGAAGGACATGAATGCTCAGTGAGCTAGTCTTAGGACCTGGATT
CTTTTCATAACGTAGGAGAAGCTCACATTAAGTAAAAATCCTTGGACACACGCGTTTTTCCTGCATAAGCAGATTTTTC
CAGATGTGGAAGCAAAGCTTGTGGCTTGCTCAGCTGTAATTATGGCCAAGAGTTATTGGTATTCCTTCTTTCCCTCCCC
CACCCCAGCTGCTTAGGGTAAGCGTGTCCTCACCCCCGTGGCCGGTGTCTTGCAGAGGCCACAGTGTACAGTGACTGGG
TGGACAGACAGTGCCTCTGCAGCTAGGCCCCGACGGGAGCAGAGACCAAGCTGACCTTCTGGTCCCTCTTTTTTGACCC
TTTTAATTGTACACACATCTCCCAGGTGTATCTGGACTCTAGCTGGTGACAGTACCCAGAATGCTTGTCAAAAGAAAAC
ATGACTGTTCCTAGCAGCCCCTGAAGAGCCAGGTGGCACTGTCAGGATGACTTGGAGACCCCTTCCTGACCATCCCGAG
GGCTCTGAAAGGACTCTATTCAGTGGGCTTTGCTCCTTAACCTGGTGTTTATTTTTGAGATAGCAGTTTGAGAAGAATG
GGGATGGGGGGGGCGGAGAATTGCAAAAGGGGGGCAATGAGGGGCCTGGAATTTTAATGAGAACCATCTGGAGTGGTTT
CCAAGAGCGTAATGTTTGGTACAAGAAAGTAATTCCTCGGCTCAAATGGAGAGAGGAGAAATGGAAGAGATCGTTATAT
TGTGTTTACCCTCCAAATGGTGCCAAACAGCGCTGCTGAGACCGGGCAAGTCACCCTTGAGTAGGGCTGGGGTGGGGGC
TCTGGGAGGGGACCAGCAGCGTCTCTTGGCTCTGATGTGGCTGCAGGGAGAAGGAATGCTTTATTTCTGCCAGGGAGAC
TTTGAGGGATGGGTTGTGGTGGGCCCAGAGCCAGTCCCTGGAATCTGGGTAACTATGGAAACGGGCTGAGGACTACAAC
AAACACGGATGGAATTTCAGGCTTTACAGCCAGGGCAGGGAGGAACGGGAAAGTTCGGGAAAGTTTCGCTCCCTTCTTT
TTCTTCTCTCTTTTCCTTTCCATTCCTTTCTGCTTTCCTTTCCTTTCCTTTTTTTTTTTTTAAACGGAGGAGGAAGGGA
GCAGCCCCCCGCCTTGCCCCTGCACCCTAACGGAGGGACCATAAGCAAAAGTCTCTACAAGTATCAACTTTTCACTTTA
TTCTTTCATTTACTCTTAACCTGTTGCATCTGATCGGGTATTCTGTCGCCACTAAAGCCACTCCTAGAGGGAGTCTCTG
TCCACTGTCTAACAGCATCATAAGGACTGACATCCCCCTTGGGGCCTCCAGTGTGACCCAGGAGGCCCCAAGGAGGCTC
GGTTCATCCTCACCATAGCCCTGTAGACCAGATGGTAGGGTCTCTGCCCTACAGATGGGGTAAAGAAAACTCAGAGCCA
AGATCACCCAGAAAGCAGAGACCAGCTGCCTAGATCCAAATCTGGCATGCCGTCATTCTGACAAACTTTATTCTGAGAA
AAAAAAATTAATAATATGGCAGCCAAAGAGAATAAAGCAGCTTCCAGTGTCTAAATGGCTGCAGAAGTGGCTCGTGCTC
TCACCTCAAAGATATGGCCTCAAGATGGCTGAGGGAAAATATCTGTGGCGGAAATAGGGGACGTTTAGAGTTACTGAAC
AGTGAAGTTAAAGAAAAGACCATAAATCCTGGAATCATCTTCTTGGTCTTAACCTAGGAGCAGAATAGCCAAGGTCTAT
TTAGATGTGATAATAAATGGGCCTTCATCCTCCAGATGAAGAAAACAAGACTCAACCAGAAGTTCCAGCCCGGACTCCT
GGCTTCCAATACAAAGTTGTTTTCTAGTGTGAGCCATGAGTCTAGAAAGAGTGGAGACCTTGTGACTGGGCTGGGTGAA
GTCAGATGTGTCTCTGGGTCAAAATGGAGAGTGGTAACCACTCTGAAGAGCAGAGGTCTGAGTCTGGGGTCAAAGGAGG
AAACAGGACAAAGTGGACAGGCATTCTTCAAGACTCATCAGTGTGGTTTCAAGTCCATTCAAATTCCCCATCAGGAGCT
AGGAGGGAGCCTCTGTTCAGCTAAGGATTTAACAAGAAGATCAGCCTAAGTCAGCAAAGTCACAAAACCTTTCAAGAAA
CTTGCAGCTTCACTGGGGGAAGGGGCTCCTGAATAAACCAGCAGGAAGTCAGAGTGCAGAAATGTCTGGAAATGAGAGA
TGGTTTTTGGCTGGTTGGTTGATTGGTTGGTTGGTTGGTTTTTTAAATAGAAAAAAAAAAGTTTTGAAGGAAAAAGGAA
GCCTTGACCCACATAAAGATAGAGTTTCAGTAAAACTAACTTGAGAGGAAGAGGGCCAGTGCGAGAGGCTCAGCAAGGC
AGCGCTGGCCAAGCCCTTGGGGCTCTCCACACATTAAAGGCAAACCTTTACCCAAATGCATTCAGTCTGCAGGAGATTG
TCCATGGCCCTGTTGAAGTTTGTGAAAAAATTTAAAGATTGCTTTAGTGTTTGGCAATTCTGGAATGCTTGGGATTTAT
CCTGAAATAATTGATTTTCTCTAAAGCTCTGCTTCGTAAAATTGTATCCTGAAAACCCCCTGGAGGGTGTGTCACTACA
GTCGAAACTATTTATGTGTTTGCATATATGGGGGAGGGTCTGCTTGCATGTGTGTGTGTGTGTGTGTGTGTGTGTGTGT
GTGTGTGTGTGTGTGAGTCTGTATGTGTGTGTGTCTGAGTATGTGTGGTGTGTGTGTGTATGTGAGTCTGAGTGTGTGT
GTGAGACTGGTGTGTGTGTGTGTGTGTGTGTGTGTGTGTGTGTGTGTGTGTGTGTGTGAGTCTGTGTGTGTGTATCTGA
GTGTGTGAGTCTGTGTGTGTGTATCTGAGTGTGTGAGTCTGTGTGTGTGTATCTGAGTGTGTGAGTCTGTGTGTGTGTC
TGAGTGTGAGTCTATGTGTGTGTGTCTGAGTGTGAGTCTGTGCGTGTGTGTCTGAGTGTGAGTCTATGTGTGTGTGTGA
GTGTGTGAATCTGTGTGTGTGTGTGTGTGTGTGTACGTGCCTATGCCACATATCCCACATATGAACTCCAGGCGTTTCT
CTCAGAATCTGTCCACCTTGTTTTTTGAGACAGGGTGTCTCTTACTGGGACTCTGGCCAGCCTAGAGTGGTTGACAGAC
ATGCTTCAGGGATCCTCCTTTCTCCACCTTCCCAGTTCTGGGATTAAAGGTCCCAGTCCTCCCCAGTTCTGGGATTAAA
TGTCCCAGTCCTCCCCAGTTCTGGGATTAAAGGTCCCAGTTTATGTGTGCACAGGGGTAGGGGCTGCTTATGTGTGGAG
TATATATGTGCATATGTACCAGTGCATGTGGCCACGTTTGTACATGGAGCCCCCGGGAATATATCCTGTGTCCTCCACC
TTTTTTTCCTTGAGACAGGGTCTCCCACTGAGCCTGGAGTTAGGCTGCTAGCCAGAGACAGGAAGCTCCCCCAATCTTC
CTCCTCTCTCCACCCCTAACAGTGCCAGATTTGCAAGCACGTGTGTTGCCATGCCTGGGTTTTTATGTGAACGCCAGAG
ATCAAATCCAGGTCTTCACACTACCAACTGGGCTCTCTCCCCATCTTCTCGGCAAACATATTTTTTAAACTTATATTGT
ATATTTATTGCTGTGTATATGTGTGGGCATTCCATCAGAGGGCAACTTGAGGAGAGTCGGTTTTCTTCTTCTACCTGAT
GGGTACCAGGATTGAGCTCAAGTTGTCAAGCTTAGACGCAGTGTCTTTACCTGCCAAGCCATCTCGCCAGCTCAACAGA
TATTTTTAACAAGATGCCAACCCCTAAACAAGGTGCTATTAAGTTATCAGATTATTGCCTCTTGGGCTGAAGGCTCTAT
CTGAGTTTCTAATATTAAAATACAGAATGTGCTGTGAACCCATGCTGAGTTTTCCACCTTCAGATGTCACAAGTTCCTC
ACAAGCTGCAGAAGGCCACTGTTCTTTCCTAATGGGACTCTTCTGTCTATGATTCACGGATTAAACTCCTATAAAGGGT
TTTATGTACATGCTCAAAATATGTGGATCTGCAAGAAGGCTAGGAGTGCTCTGGTAAGTGTGTATCTGCTCGTGAGAAA
GTGTGCGTGGGAGGAAAGGCTGGAGTAGAAACTGCTTTCATTTTAAAAAGCCGGGAGGGTAAGCAAAATCTACTGATAG
ACATCATCAAAGAAGCAAGAACACAGGGCACAAAGTGGGAAGAAAGCCTGTGTTCTCAATGGCCATTCCTTTCATCCTT
TAAGGCGGTGGCTCTCAGCCTTCCTAACGCTGCGACCCTTAAATACAGGTCCTCGTGTTGTGGTGACCCCCCAACCATA
CAATTATTCTCATTGTTACTTTTATAATTTTGTTACAGTTGGGAATCTTAATGTAAATATCTATGTTTCCCAATGGTCT
TAGAGGACCGCTGTGAAAAGGTCATTTGACCCCTTAAAGGTGTCATGACCCATCGATTGAGAACCACTGCTTCAAGGCC
ATTTTTCCTGATGAGAAACTGGGCTGATGGTAGCCTGTACTGAGAGAAGGGTTCCGACTGCCGGTGGGCTCCACACCTG
TACACCACACTCATGGGGTGCCAGTCTGACTGAGAGGGAACTGTAGTACCCAGTGTGCCCACGTGATTGTCATGAGGAA
CAAACTTGTTCTCCAAGCCAAAGTGCCCTTTCTGGTCAATTCCAGACTGTTTCATAGGATGAGCCAAAGCTTGAGTACA
GACATGCTGTCTGGAAGTCACGATCACACTCCAGACTTCTTCATCTCCCCATCACTGCTGGGTCCCTATGGCTCTCCTC
CAGCTCTCCTGAGTGAGGCTATTAAGCATCACTTCTGTCCCCACCCAGATGCCTACACCAGGCCAGAGTTTCTATCGTC
TCTGATGAAAGTTCCATAGCTGAGCTCCACTTGGCACTGGGTCATCCATGACAGATGATCAACAAAGAAGCCAGTGTCC
AGGAAGTGGGGAGGTGGAATGCCATTGTACCTTTTGCTTTGGTTAGTGACTTAAACACTACAGGGAACTGTTATTTCGA
ATGATCTACCCAGCTCCAGGGTTGGTTAATCCAGCATCTAAATGATATCTCAGAGGTCCTTGTCTGTCTTTAAGGGTTT
TTTGGTTTTTGGTTTTTGGTTTTTGGTTTGGTTTGGTTTGGTTTGGTTTGGTTTGGTTTGGTTTGGTTTTGGTTTTGGT
TTGGTTTGGTGGTTGTGTTTTTGTTTTGTTTTGGGGGATTGTTTTGGTTGGTTTGGTTTGGTTTGGTTTGGTTTAGTTT
GGTTTAGTTTGGTTTGGTTTTTTTGCGACAAGGTTTCTCTGTGTAGCCCTGGCTGTACGGAGCTATCTCTTTAGATCAG
GCTGGTCTCAAACTTAGAGATCCATCTGCCTCTGCCTCCCAAGAGCTGGGATTTAAGGGTGTGCACTACCACTGCCCAT
AGGTTTTTGTGTCCTGTATTCATCACTTTGTACAGTCATGGTTATAGGATGCTGTCCACAGCTCTGGGCAGCCCCTGCT
CACCTCGGAACAGAAAGGGGCCTTTCTTTTCCCTGTGGTTCACCTATAAGCAGATGGCCAAATCTGGGCCATTGAGAAC
CTAGCTTTGTGGACATCAGGCAGTCATCTTGGGGCTGTGTTGTGGTGACATATCTAAGAAGGGCTGAAGTGTTTGAGAG
GAAGTTAAGTCAAGAAACAGGACATACCTGTGTGCAAATGACAACCTGAGCCCATAAAAGCTTCTGGACTTCTTCAGTG
GTCCAAAAGCCTCTTCCTCAACTTGGTTGCCTGTCACTTGTGTCCCTGTCACTTGTGTCCCTGAGGACCTACTCCTGGG
CCTCACTTGTCAAAATAAAAATCCACTGACCCTAAGCTCCAATGCCCATGTAGAGATTGGATGAGAACCTTTTGGAGTT
GCTTCTTTCCTTCCTCCATGTGGACTCCAGAGACCTAACTCAGCTCAGCAGGCTTGGCAGCAAGCCTCTTTACCTGCTG
AGCCATCTCCCCGGCCCCCAGCGGCTCCTCCTCTTTAGAACTATTGAGGCTGTGATTTAATAAGAAAGGCGAGACCTGG
TCACAAGATAAGCAGACCGGACCACTCGCTATATGTGAACCGACATCCTGGGCCATTCCTCAGGTAGGAAATGAATCCT
GGGGAAGGGAGTAGTGAAATTCAAATCAACAGTCCAGTTTACAGGACTGCATCTGCGTTCATCTCTGTCTTTTGGCAAA
CGCACTGAGCTTTCTATGAGATGTAGAAGTCGGAGCGGCTCAGTTGGGAAAGTGCTTGCTGTGAAATCGTGTGGGCCCG
AGTTTGATCCCTTGAACCCACAAAAGTTGGATGTGGTCACACATGCCTGGAATCTCAGCTCTGGAATGTTGATCTTGGA
ATTGCAGAGAAATGGAAGAGCCTTGGTGATCCCTGGCTGGCCATTCTAGCCAGATCAGAGCACAAGGCCAGTGAGAGAC
CCTGTCTCCAAAAGAGCAAAGCCAGAACCAACCAACCAGACCAAGATGGATAGATAGTTCCTGAGACATGATACCCAAA
GCTGAACTCTGGCCTCCACACGTGCAAACACACATACATGAGTACACACACATGCACACAGACACACAATGATATTAAA
GACATAAAGGAAGCTGAATAAAAGCTAACATTAGGGAAAGATGCCTGGTTTTGTAACTTTCCTGTGAATCTCAAATTGT
TCCAATTTTTTAAGAACTTTTAATGCTTTATTAGTCATTTATCTCTAGTAAGTGCTAGATCAATCAGACTTCTTCAGCT
CGAAGTTAACACTAAGTCCCAAGGAGGCTAAGGACCTGTTCATCGCACCTGGCAATCCGTGTCAGAGCTGGACCTAGGA
CCAAGTCTTGTCACCTGAGTGGATGATTGATTCATGTAAGCCCAGGGATGTAAGCCAGGCCTTTCTCACAGGACACTGT
TCCCATGGAAACAGAGCTTTTCTAAACATACTCAACTCCCTTGTGGCTCTCACCACATTAGCTCTGGATTACTGCATTT
CAAAGTCCATTTTTCACATTGATAAATTGCACAATTATAGGCGTCCAAGAATGAGCCGTAGCCTCATGCAGATGGAATT
TGTACTAGAAATTTACACTGCCATACGGCCAGCGGATTAACATTAATCGTAAATGGAAGGCAACACGCTCTCTGGTGCT
TGCCAGTCACATCCCTCTGAATTAAGTGATTTCTGAAAGGCGATAGTCGAACATTGTTGATGCCGAATGAACCAGAGCC
ACGGTATTTCCTAAGGACATTTTAAAGGGGTTATGCTCCGAGGCACGTAGGTGGGGGTGACATACTCAGGGAAAAACGC
TATATTAGATGATTCAAGAAGTGGCTTTAGCGATGACAGACGCTGATGTCAAAGACTCATTTGTAAAGTGTGGGTAACA
TGTGTCCCATAAAATGTGAAGGAAAGAAATGAGATCCACGCCATCAGGGGCCATCGCCTGTTTTCGAGAATTCTGCTGT
TTAGTGTTTCATAACCCAGTGTCAGGATGAGACGATGTTCCCAAATGAATGAAAGAGAGAGTCCCTGATCTGCTTCCTG
TCCCTAAATCCATCCACTCCTATTCTTCAGTGTCCCCTCCTGCCAAGTTCTGTCATCCGTGCCTCCCGACCATGTGCCA
GGAGCAGTGTCATCCACAAGTGTGAGATTCCCTCCTTTCCTTTCCCACCCAATAATTACCCCTCTCCCATCCTGTGAGT
GCCAGGCCCTTGGGCAGAGTCCAGGCATCCTGGAATGCTGACCGCAGATGTCAGAACCCAGGGGATCCCTGAGAAACGC
AGACAGGGATGGCTAATGAGCACTCTCCCCTGTAATTGCCCTGACGATTGGAATTATCTGATCAGAGCTACGCCACTTC
TCTTCCTCAGCACAGAGATGACTTGGGACGCACCTCTCAATGGAGGGGAAAGCCACAAGTTCTGATGTTTGCCACACCA
TCCTTCATTAGTTAATGGTTATGTGACAGATGACTTTAAAAAAAAAGAAATGATCTTGATAGACAAGAGTGATGTGCCC
CAAACTGTAAAAGGTAATTTACAAAGAATGTAGGCATTCCCTACAGTTAAAGTTACAGAAGTGCCCTGAAGGGGCTCAG
AGGACAGCATGTGACAGCAGCTAGAGCTGAGATCCAAGCCTTGGGAGCCACAGGTTCTGTCCCAGCCAGCTCTCCAACC
AGCTGGCCATACTCCACTTAATGATTGGCTTCCCTGGACCTTAGCTTCTTCATCTGAAAATGATCATCCATGTACTCTC
CAAATGCAGAACAGTCTCAGCCAAAAACAGGAGAGCCGGATAAATTGTGGAGCATCCTCATGACAGAACAGCACGCAGC
TGCTATGAGCCCCATTTCCCAAGAACACTTGATAATGTGAGAAAGTGCTTGCTACACGGTGGGAATTTAAATGAAAAAT
AGGAGGGCGCAAACTAAGTGTGGCCAACAGGCTCTAATGATACAAAAGGAAATGCAGAAGAGGGAAATTGCAGGGGAGG
GGGTGAGGCGAGGGGTGGGGGGCAGGCCAAACGTGTTAGTACAGAAAGTACTAACAGTGTTTACTATGGGAAGTTGGCA
TTAGTTTTTATGACTCAAAGAACTTAAAATTGTGCTTATTATTTCAAAAGAAGCTAGTGCTTTGTTAAGATTCCAACAA
TACACAAGCATAAAGAGGAGAAATTATAGACCCTGGGTTTCATCCTCCAGCATGGAGGAGGTGGAAAAAGAGGAGGAAA
GGATAAATGGAGGTGAGAGAAGAAAGAAGCAGGGAGAGGAGGGGAAAGGGAGGAGAGAGAAGAGGAAGAGGAGGGAGAG
GAGGAGGAGGAGGGGGGAGAGAAGGAGAAGGAAAAGAATACAGTGGGCCCTACTTATGATTTGAGAGGTATGGAAGAGA
GGAGGGAAGAGAGAGGAGGGAAGAGGAGAATCCATACATAGACATTCCTACTCACTTGAAGTTACTGCATTTCTTTATT
AAATATATGCCCATAAAGTAAAGAATATGAACTTCAAGTATAAATTTTAAAAACATACAAACTGAAACTTAAGTCAAGT
AAGCTTGGGGCAGGGGAAGGAGAAGCTGCTGTGTCAAATGCAGTTCTTGAGGCCCATAGAGCGAGCCGGGGGGCGGGGG
GGAGAGGAGCCGAAGATCTGCCAGGCATGGCCGCTCAGTGCTCACTTACAAAGAAGCCAGTTGTGGACTCCAGCATTAC
AGAGGAATGAAATGTCCCAAAGACGATACTCGGTACCCAGGCTCAACCTCCTGCTCCTTGGCAGAAGAAACCTCAGTGC
CCATCCTGCTACACTACCCACAGAGATGTACCTACGAGGACCCTAACTAACCAGGTCAGGCAACTACCATGGCAAGCCA
GAGGGTTGAGCGAGCTAGAGTGCAAAGATTCACCATTTCTGGAAATAGACTCCCTAGCTTCAGAAGTTGAAAGCGGACA
CCAGGGCCAATGAGCCCCAGCAGTAAATGTTCCTTCCACACAAACCTACCTGACCAGCTGAGTTTAACCCCAGGAACAC
ACAGAAGTTCAGATACAGGTTCTCACATCTGTGATCCCGGCACTTCTATGGGAGATGGGTGTCAGAGATGGGGGAATCT
CCAGGAAGCTAGTGGGCTAGGTAACCTGGAGCTCAAAGAGTGGCAGAAACAGTAAGAGAGACCCTGCCTTGACCAGGTA
AAAGGACAAAATCAACTCCTGAGAGCTCCACGTGTATACCCAGATGCACTCACATAACCGTAACTAGCTTCATGTTTTA
AATCTACACCAATTCTAATAAAGTAAAAGGGAAACTAAATTGTCAAAAAGATTCAAATCAACTCTGTGGGTGGGTGTGG
AGGTTAAATTCCTGAGCTTGTTGAAGAACTCACAGCTCACATCTGTAACCTTGGTCATTTTGTCTTTCTGTTTGTCTGG
TTGCCTGTCTGTCTATCTGTCTTTTTAAGACAGGGGCTCTATATATAGCCCTGAATGTCCTGGAACTCACTTGGTAGAC
CAGGCTAGCATCCTGGAACTCACTTGATAGACCAGGCTAGCATCCTGGAACTCACTCTGTAAACCAGGCTGGTCTTGAA
ATCATAGGGTTCCTTCTGCCTATGCCTCCTGAGTGCCAAGATTAAAAGCCTGTTCCCAGCTCAATCTTGGCCATTCTAA
GTAATTGAAATTCTAGGAAGATTACTTAAATCATACAGTAAAATGAACGTAAGAGTGAGAACAGATGACTTCAAATACT
GATTCTTTCTCAAATCTTTAGATTTTCTTTTCTATGTATAGTGTTTGCCTGCCTGTGTGTCTGTGTACCATGTGCATGC
AGTACCTGTGGAGACCAGAGGAGGGTGTCATATCCCCGGTAACTGGAGTCACAGAGAGCTGTGTGGGTGCTGGGAATCA
AATCCACGTCCTCTGGAAAAGCTGCCAGTGTTCTTAACCACGGAGCCATCATTCCATCTCCAACCAGCACTTTCTTGAA
TGGCTTTAATATGAGTTTAATAATCAGCCTTACAGATACTGGGCTATCTGGGGTGGTTTTGTTTTGTGATGTGCTTAAG
GAATGTAAGACAATTTGATAGGATAGATTGTAATTATAGGATTACAATGTCATAAATGGCAGGAAACTAAAGAGTTTTC
AACCAAAGGGAAAGTAATTGAAGATTTAGGTGAGTTCCAGTTATCAATGGTATAACTGTTACATGAATGTGCAGAGAAA
TAAGCTGCACTTTCAGTTAGCAGAACACAAATCTTTGATAAGTTCAGAATATTGGTGAGTAGATCATTAAACAGAGGAC
AAGAATAGTAATTATCCTCCATCCTCAAAAGCCCTCGGACATAAAAGGCTTAAACACAGCTTGAAACAGCAGCTGTACA
TGCTGAGGACTCCAGTGACCAAGGTCTCTGGGCTCCATAGCACCAAGGTATAGGAAGGAAAAAGACAGAGAACTAACCT
CTATCTTAACCAGAGAAACCCCTGCCTCTGTCAGAGGCAGCACCCTCTACAAGAGGCCAGGCCCAAATGGGGTGACACC
CCTCTGCTGTGAGGACAATGGGGTGACACCCCTCTGCTGTGAGGACAATGGGGTGACACCCCTCTGCTGTGAGGACAAT
GGGGTGACACCCCTCTGCTGTGAGGACAAAGGTGGCACCTGCTCTGGATAGGTTCCAGAATAGGTCCGAGATCTATCTC
CGCCCCAGCACCGTGCAGTGTTTCCACCAAAGATGCCACATTCGTTAACATTTGAACCCTTCTTGGTTCATCCAGGCGA
GGTGGAACCAGGAAGAAGGAAAAGATGAGAAGCTTGGGGTCGTTAGTTAGGACCCCACATGGAGAGATTTGACCTCACT
CGTATCTCCCATACTGTTGAAGAATGGCAAATTGGTTGCTTTCAAATCTGTGGTTGAACTTGCATGCTATTGTTTACCC
ACAAAGCTTTTATTCTTTTTTTTTTTCCTTTCCAGGTGTCTGGTACATTTCCATACAGGACAACCTGAGCTCTGTGCTC
AGAACACCTGTTCCTGTCCCAGCGGATGTCCCCCCACCCCAACCTCAACCCACCCCACCCCACCCCCATTCCACCAGCA
GGAATATGAGCAGATCAGCCACAGTCAAGAGTGTCACAATGAAATTCTGATGAAGTGTGGAGCTTTGGGGCTAGGTTAA
ACTCTACCCAGAGGGAGACTGGGAGAAGCCAGCCTAGGACCAGGCCTGCAGGATTCCCCATCTTTTCAATTGCACAAGC
CAAGAATTCCCCTTGGTGGCTCAAACCAATTTGATTGGACCTTAGCAGGAGTTTCTGGGAGGCTTTTGAGAATCTGGAA
ATATCTCTGGTGGTGCTGTCCTAAGGAAGAGAGAGTTGTAAGACTCTCTTCAGACATAACTTTGATGAAGAGAAAGGGG
CAAGTGAGCTTTCTAAAAACTAAAGCTGTCTTGCAGAAGAACAACCTGCCTCAGGAGAGGAAGTTATCTCCTTAGTGAG
ATAATGCAGGCAAGGTTGGATGAGGTCCTGACAAGGATGTTGGCACAGAGGTTCCTTATTTGAGGGCGTGTGGATGGCA
AACGGCGCCTTTTACTGTAACCCGCAACAGAAAGTAGAGGAGACAATCCCAAGGGGAAATGGGTGGGGCAAACGGACTT
GGGAAGCTCTAGAGAGCCTCAGTTTGGCCAATGAGAAGAGGTGATATTAGCTCTTAGAATCTGACATGGTCCTTACTGT
CACTGCTCAGTGACATGGTTCAAGTCAAAGGCATTTCAGGGAAGTATGACTTCCACATAACATGAGCTGTTTGGTGTGC
ATTCTCTAGTTTTAAAGCCGCTTCTCTCCCATGCACTTGGCTAATATGAGGGTGAACTGTGGAGGAAGCCACCCACATG
CTTGAAGAGGGTGAGGGATTCTAGCTATACCTGCACGCTTATGAGACCAGGGCTAAAGTCCTTTCAGGTCTCTCAGCCC
ATCAGCACTGGGTGTTCCTCACAGATAAGCAACTAGATTAGGCATTGCAAGGCTGAGATGCCACAGAACCAGTCATGTT
GGCATTAGCAGGTTGGTGAGTCTCCCTATCATCTGCCTTTCTTCTGTGACTTCATCATCCATCCATTCCCCACCCCACC
CCCACCCCGAATTCATCCGTACTTTGGTCACTCGGTGTCCTTTTCCTCAAAGGCGTCTTTTCTTCAAAGACACCTTGCT
CATTCCTGGTAACTCCTGTGCTCCTACCTACCAGGAAAACACACCACACACACACACACACACACCACCACCACCACCA
CCACCACCACCACCACCACCACCACCACTACCACCACCACCTACAACCAGGTTCTTGAAGTTGTTCAGCTATGAGCAGG
GATTATATCTCCTTAATGAGTTCTCTCCTGACAGCCAAGCCACATTAGCCAGCTGTGTTTCAACCCAATCCATCAGAGT
ATCCTGATCCATTCACTTCCTAAAACTCTTCACTACGAATACTGTTGTTTCTATTTAACGCTCCCCCCACTCCATTAAA
ACACTCAATAAAAACAGAGGCCATATCTGTTCGGCTCTGCCACCTTCTCAGCACTTAGAAGAATTCCTGGCACGTGGTT
TTCATAATCATGAGTGATTGTTAAATCAATGAATGGCTAAATAGATATATTCATTCTTGCCTTGACCTTAGAGACATTC
CCGCACTCTATTTTCTGTGAGTGTATAAATAAATGAAATTCAGAGGTAGGTGGGTACTCTTGTTTAAAATACTCATCCC
TCATATAGAACTTGCCTTTTAATTGACTCACGGTCCTGGAATAATCAACAGAAAGGGAACACAGAACCTTCATTCATGG
CCCAGCCCCTTTTGTCAGTATCCCTAGCACACTTTGCAAGTGCCAGCCAGCCTTATTTTTATTGGGCAATAACCTAGCA
TGGGTAGCCTAGTGCCTCGCCAGTTCAGTCTGCCTGGTGAAGACAGCAAACCCAACACAGCCTCCCTCTTCCACCTCCG
GGAAAAGCTAGCAAGTCTTGAGTGGAACTTGACTCTCCGGTATACCCATTGTTTCTCTTCCCACTATTGACAAATAGTG
ACTTGCCAGCCTGCCCAGTGCCTGAGATAATTGCCAGAAGATGGTTTTTAAGTTATGAGTGCATGTCATTAAAGCTGGG
TTTGAACCACCCTCCAGAGGACTTTGCCCCCTGGGGGGATTTCTTTCTGAACCTAGGAGGAAGAGAGACCTGAAATTAT
TTCAATGAAAGAAGGCAGGGAGGAACGCTCTGGAATGTCACCTCACAGGCTTTCCTGGAGTTAGGTGTAATCTCAAGTA
CCCTAAATATGTTGCTTAAGTGGCTACAGCTGGCTTCAGCCTCTTGGGGAAGTCTGTATGCAGGGGATGTGGCAACCAG
CTTCCCACGCGTGGGGAGAAAGGCAAAGCACCTAGTTTACAGGAACAAGATCTCAAGGTCGAGGCCACTTGGACCCTGC
CCTTTAAAAAAAAGATCAAGGGTCATTTGCTTCGGGCTAAAATACTGAATCTGGTGGGATGGCATTTATTTCTTGGTTT
GTTTTTATAGTTGCTGGAAAAAAAAAAAAAACAGACTGTGGTCCACCCCCTCTCACTTCTCGCTTACTCACCGACCAGT
AGGTTTGATTACTTGTGTTTTAGATACCATCTCCGGCACCAGGCAATGGACTCTGTTTTGGTTTTTGCTTTTGAGACAG
AGCCTCACTGTATAGCAATGGCTGGCCTGGAACTCACTCTATAGACCGGGCTGCCTGCCTCTGCCTCCTGAGTGCTGGG
ATTCAAGGCCACCACCCTGGATTAAAGAGCAAAATTGGTCCACGCAGGGATGGACCCACAGCGTTGCTGTCATTGTTAC
TATTAGCCATTCTAACCTACTGATATAGCCACACTGCCAGGCTCCCCTTGAAGGGGAACAGTGACCACTTCCCCAGCCA
ACCGACCTCCTGCTACTCCTGTGGAAACTCTTCCTCACATCCTCCTCTGTTGCCATGGTTCCGAGCCAAGGTGAGCATC
TCCACCAGAACAGCCTGGGTCCCCCAGGAGAGACAGTAAGGGAGATAAAGGTAAGACAGACACAACAGGACTTGGTCAG
GCTCCTTGAGTTGGGGAGATCTCAGGAACATTGTTCAATGGTCCCAGTTACCGTGGCTCAATGGACCAGTAAGGGCAGG
AAAACAGAGACTAGAAAGACAGCAAGCCCTACCCAGGTGGTGCTGCCCAAAGAGAAGGAAAGGGGATCGGTGTCACAGA
CCACCTCAGTGAATGAACCAGCGTGGGAGATTCAAGTAAGCCAAAGCCGCCTGATTCTCGTACCACAGGCAGCTCTGCA
CATAGTCTAGCATCTTGTCTTAGCCATAGAACAGAACACTGGAAGATGGGGAGTTCTGGAGGCTCAAGAGCATAGTGAC
AGCCTTGCCTGGGCTCTAGTTAGGGCTTCGTGGGAGATGGTGTCACAGTAGTAGAAGTGTGTGCAAAGAGACCACATGG
GAAGGCCCATTGGCTCATCTAGTCCTTCCTTTCAAAAAGCCAAAGAGATGAGAGATGGCTCCACGTTAAAAAAAAAAAA
TTAAAACCAGGAATGGTGACATACCCTTGTTATCCCAGTATTGGGAGATAGAGACAGGAGACTCCCTAGAGATCATAGC
CAGGCCAGCCCATTTAGTGAGTCTTGTTGCCCGTGAGAGACCCTGCCTCAAAAAAATAAGGTGGACAGCACCTTGGGAG
CATCCCCACGGGCAACACATGCTTAGGCACATATGCACACCCGCCTCACACCCACAAAAGAGTCCACCAAACTGGAGTC
TCTGTATCTAAGCGTCATAAACTGACTCAGTAAGAGGAGCCTTAACACTTGGCAAGTTAGAAACTTAGAAAGCCTGAGT
ATGAGTTCTTTCAGCGAACAGCATTGCAGAGGGCCCAGGAAAGCCTGCCTCCATGGTCTGGGCTTTGTGTTCTCAAAGG
TGATGGACAGCATGATGAAAATAGATCATCGCTTCTAGTTCAAGACCAAGAGAAGGCCAGTTGCCTTCCTCCACCCCCC
ACCCCCCAAACATCCTGAACAAAATTCTACATAACACTATAGAGCAGAAGGCTTCTTCCCAGCTCTTCCCAGTCCCACC
GAATGGCTACCTTCTTGTTTCTCTTTCTGTTTCCATTTGCACTTTGAGGCACTCTCGTTAATTGATGCCGTATCCACAA
CAGTTGGATGGGGTAGCTATGGACTTGTTCAAAGTAATAAATCATTTGCATTGTTCTTCAATTTGATCATAAGCTTAGT
TCCTCATGCTTTAAGAATCTGTGTCTCACTGGGAATTGTGGCATGTGCCTACAAACCTGGCATTTGGGAGGGAGAGGCA
GGGGGATTCCAAGTTCAAGGTCATCCTTGGCGACACGGAGACTTAGAGGCCAGCCTGGACTATCTGAGACCTTATCTTA
CAAACAAAAACAGAAGAAAACAAAACCCGAGTGTGGGCATCTACTCACATTCTTGCCTGGAGCCCCACGAATGCTCAGG
AGAAGCCCAGACAGTCATACCTTGGTTACGGCGAAGCAGATGTCAACACAGGGACCAGTGGGAAGTAGGCCACAGTTCA
TGAAAACATTCCAAGGTTCAGAGCCTTGCTCTGTAAACAGACCCAGACACCCTTGCTCTCTCCAGTGGTCTGCCTTGAT
CTGGGCGGTGTCAGTGGTGGTGTGTGCATCTCAGGGCTGTAGCCCAGAAGAGGAGGAACCTGCATCTCTCAGTCCTCAT
CCCCCCAATTCAGGAGATTAGCTTTCCCAGGGACTGCTCTTTGGATGTTTCTAGCGGTTCCTAGATGCCACGCAAATGG
CACGGGTGTCTTTTCCATCCAGTGTCCTTGTGAGGACCCCTCAGCTGCTGACTTTGGCTAGGCCTTCTCAAATACTGCT
CCAGGGCTCAGTGTGAGGCCTGGTCTCCTTGGATGTAGTGCCAAGGCTCGTGCAGTCTCTCCCAGAGAGCCCCTGGAAA
AGACCCATTGTGCTGGCTTCCAACCAGAACCCAGACATCTCCCAAGGACAGGCTCCTCTTCCCACACTCTTTGTCTCGA
CAGCCCTGTTCACCACGACCAATCTTCTGGAGCCTCCGACAACACTCCGGAGTCTACAGAGGACAAACGTCCCCTCCCG
AAGCAGCAGGGATATGCTGAATGCTATCTTTCTTTTTTATTTTTATTTATTTATTTTTTTTGGTTTTTCGAGACAGGGT
TTCTCTGTATAGCCCCGGCTGTCCTGGAACTCACTTTGTAGACCAGGCTGGCCTCGAACTCAGAAATCCGCCTGCCTCT
GCCTCCCAAGTGCTGGGATTAAAGGCGTGCGCCACCATGCCCGGCTGAATGCTATCTTTCAAACCAAACACTTTCTTTG
TCGAACATGAGACTCTGGAAAGAATCATTCTTCCTGAAAAGAAATGGGTTAGCTCTCAATATGTCTCCTTTGGACCTGT
CTAATCCCACATGGTTCCGTCAATGTACAAGATACTGCTACACTGTACCGATTACGTGCACAGCGAGGGGGCCGTGATG
ATGCAGTGCCCGTTTTCTCTGTAACCTCGCTTTGAAGGCTGCCTGCAGGATTTTCAGGAAAATAAATTGAAGACTAACA
TTTGGATCATGGTTATCTTAAATAAAAACGTATCCAAGCACTCTTGGACTGAAGAGAGAGAGAGAGAGAGAGAGAGAGA
GAGAGAGAGAGAGAGAGAGAGAGAGAGAGAACAGACAAACCAGCAAGATATCTCAGCAAGTAAAGATGCTTGCTGCCAA
GCCAGACCTGCATTTGATCCCTGGGGTCTGCGTGGTGAAAGGAGAGAACTGGCTCCAGCAAGTTGACCTCTGACTGCCA
CATGTTGGCTCTGGCACACACACACACACACACACACACACACACACACCAACAACAACAACAACCGTGTTCACAGAGG
AGAGAGAGAGAGAAAGACTCTGACAAGGGCAATCTACAGGAACGTCTTGAAGACAGACCAGGTCACACTGTGCCACCTT
GGCTCCCTAAAACCTGGCCTCTTTTAGCCAGTTGAAACAGTAGCCAAGAAAATAAATTGCTCTGCAATTTCTAATGGAC
AGGGTTTTCAGGTGACATCTGGAGGGAGGTCCTGGAGACAGTAATGGAAGTGGGTTAAAGGGCATAAATCATGAGTGTG
TGTGTGTGTGTGTGTGTGTGTGTGTGTGTGTATCCCTCCCCCTTGATTTTTTTTCTCTCTCTCTGTGTCTCTGTCTCTA
TCTCTCTGTCTCTCTCTCTCTCTCTCTCTCTCTCTCACACACACAACACACACTACACACCATTTAAAGAAGAAAGGAA
AAGAGCCCCTTCCCACAACTCGCTGGGGCACATTCCCACTCCCATCACTATTCTCTCAAACACTATCCCTGCTGTCACT
TCTGTCAGAGTTAGGCACTGTCAAGGACACAGTCAACACCTACCAGATGTCACACACATCTGGTCAGGAAGGAGACCTT
GAAGCTAACCACTGAGGCCTTCCTCAAAAGGGCATAGCCCTGCTTGCATGTACCCCAGAGACCTTGTAGAATGCACGAG
CTCAACCCTCTGGCTTTACAGGTGGAGAAACAAACTGACCCAAGGTTAGCCTTCAAGTCAACAACAGGGCACAGGCCTG
TGGCACGTTCCATCACAGAGAAACTGTGTGTTCGGCTCCCAGGAGACAAGCCCACACATCCATGATGAATGGGAAGGAA
CTTCCAGGGCCTTTTTATCAGTCTGAAGGAGGGACAAAGTGTGGGCAGGAGACCTGGGACAGTCATCAACAGAGTGGCT
AGCTTCAGACATGTTTGTGGCAGAAGGAAGCTCGGGAGAGGCGGAAAGGCCAGAGGCAATGGGGATTCTCCAGCCCAGG
ACATGGTGGCATCTGCTCCCTCCCTGATGCGGCACCTGCATTCACTCTTACGTACTGTGCTTGCCCTTCTCCCTGTCTC
GTCTCCTGGGTCTCCTTCTGAGATCACGGAGGGGAAGAAAGCAGATGACCAGGAGGTCAAAGACATCGAGACGCCCCAG
GGAGAAAGTGCCACGGTGCCAGCAACGCTGATGGAGGACCTCAGAGCTGTGTCCTCAGCCAGCTTCAGCGGCACAGGGG
CATGGCCTAGAGAAAATACAAATATAAATATTTGGGCACTAGAGAGGTGGCTCAGTGGTTAAGAGCACTGCCTCCTCTC
CCAGAGGTCCTGAGTTCAAATCCCAGCACCCACATGGCAACTCACAAGTGTCTGTAATTCCAGTTCCAGAGGGATCCAA
TGCCGCCTTCTGACCTCCACAGGCACTGCACACACGTGGGTACATAGATACACGCAGACTGAATGCCCATACACATAAA
AAAATTTAAAAATGCTTTTAAAGTGGTTAAAGGTGATAGTTCCTTTAAGAATTTTTCTCTAGGGCTGGAGAGTTGGCTC
AGTGGTTAAGAGCACTGACTGCTCTCCCAGAGGTCCTGAGTTCAAATCCCAGCAACCACATGGTGGCTCACAACCATCT
GTAATAAGGTCTGATGCCCTCTTCTGATGTGTCTGAAAATAGCTACAGCATACTTACGAATAATAAATAAATAAGTCTT
AAAATTTTTTTTATTCTTTAAATAGACACATGGAGCCACACCACAGACATTTTTTCTCAGTTGCAGATTGTGTGTCAGA
ATTTTAAACACCCTGTTGATTCTAATATAACCAAGGTTGAGATTTCTGTCTCAGAAGAAACTATGGTTTACTGTATACT
AGGTTTTTTACTTCTAAAACAAAAAAGAATCTAACCTAGGGTGATGGTGTGTTCCTGGACTACCTATGAGCCATCCCAA
TAGCAAATTTTAATTAATAGATGCAAATAAACAACAAAAGGCAATGTTTAGGGTTTTGTTTGGTTGGTTTTTTTTTTCT
TTTTTTTGAGGCTATCAAATTTTTTTTCATGTTCTTCATGCCTGCACCCCACAAACCCCCTGGTCCCACCACAGAGATA
TCAGGCTCCCTGTTATAATCACTTCCCTAGTATCCTAAGCCCCCGCTCCCACTGCCACTCTCTGAGCTGCAGACCTCAG
ATTCCCCTGTGCCCTTTCTGGTTCCCATGTCATTTGCTGTGGAGTTTTTTGGTTTTTTTTTTAAGATTTACTTATTTAT
TTTATGTGTATGAGTACTCTGTAGCAGTACAGATGGTTGTGAGCCATCATGTGATTGTTGAAAATTACAATCAGGACCT
CTGCTTGCTCCAGCCCAAAGACTGACTTACTATTATATGTAAGTACATTGTAGTTGTCTTTAGACACACCAGAAGAGGG
CATCAAATCTCATTACCAATGGTTGTGAGCCACCATGTGGTTGCTGGGATTTGAACTCAGGACCTCTAGAAGAGCAGTC
AGTGCTCTTAACCACTGAGCCATCTCTCCAGACCTGCTGTGGAGTTGAAACGTTACAAAGAACAGTTGAAACATCATCA
CCACTGCTATAAATGGGGCTGGAGAGATGTCTGGATAGTTGAAATCACTTGCTGCTCTCAGAGACCCAGGTTCTGTTCT
CAGGACCCACATGGTGGCTTACAACCACCTGTAACTCCAGCCATAAGATAACAGATACCCCACGGTGGCCTCCACTGGC
ACTGCACGCACATGGTAGAATACACACACAGGCAAACATTCATACACAGGAAATAAAAACAAATTTTTAAACCTGGTCA
TCAAGTCCTTCTTCCCCTACTGGGATGGTGATGCTAAGCTTGGTCTCCTGCTATACATAATGAGGGAATTAGATAAAGA
TGAGAAACCCATGCCTGGATACTGCACGTGTGGTGCAGAACTGTGATGAAGGAGAGTTGGGAAATGAACAGATACCCAG
GCTCACCCTGGCTCTCTGCAGGAAGCCTCTGTCACAGTACAGAAGAAAGGACAGGCAGAAGATTATGGTCTTGCTGGGT
TAAGCAGGCAGAGACTGGGCCTAGAGGAGTCTCCTTAAGGATGTAACTAAAAGCATACTGTGAAAGGGTAGCGTAAAAC
CCCACAAGGCCATGCAAAAGAACAAGGACTCTGCCTTCGGCACAATCCCCATCGCTTACACAGGCGGTGAGGGAGTGGA
GATGCAACCAGAGATTAGAGATGTCAACCACTGAACTCAACGAAACCCTAGAAAAGGCTTAATTTTTGTGCAAGGACTG
AGTAAAACACACCGTTGTTGTTTGGATGAGATGTCTCCCACAAATCTCGGGTATTTGAATACTTGGTCCCAGTGCGTAG
CATGATTGGGGAGACTTACGAGGTTTGGCCTTGCTGAAGGGAGTGTGTCCCTGAGGGACAGGCCTTGACGGTTCAAAAG
CCACGCACTGTTCCTCAGTGCTCCTAGTGAGTGAGAGCTCTCTACTTGCAGTTTGTGGCTCAAGATAGGAGCTCTCAGC
TCTGTGCTTGCTACCATGCCTTTGCTTGGCTGTCATGGACTGTAACCCTCCAGAACTGTAGGTCCAAAACAAACCCTTC
CTTCTATAAATGACTTGGTCATAGGGTTTATCACAGCAATGGGAAAGTAACTATACCCAGACTTAAAGCAAAGCCTCTC
TAGGTAAAGCCTCAAAGTAAACTTTAAGAAAACTGAGCTCACTCTGAAATTCTAAATGGGGATGTAAAAACAAAATTCA
ATATTCTCAAAAGATAAAAGCAAAAATCATTGCCTTTATTTCTTTTCTATTGCTATAATAAGACACCGTGACCAAGCCA
GGTGGTGGTGGCACATTGATTTAATCCCAGCACTTGGGAAGCAGAGGATGGTGGATCTCTGTGAGTTAGAGGACAGCCT
CATCTACAAAGTGAGATCCAGGACAGCCAGGGATACACAGAGAAACACTGTCTTGGGGGAGGAGGGACTCAGCAAGAAC
TTAAGAAGGGTGGACAAGATTGTGCAGTGCGTAGAGATACTTGCTGCCAAGAGGACAGCCCTGAGTTACATGAAGGAAC
ACATGGTTGAAGGAGAAAAGCAACTCCTCCGACCTCTACATACATGTTGCAGCATGTATATGTGCACATATGCACACAC
ATGCAAATAAATAAATAGATAAATGGAACTTTCAAATTAAGAAAAAAAATCAAACAAAAAAGAAAATAAATATGGGGAA
AATATTTGAAGAAACACCACCAAAGAAGATATACAAGTAATCACAACCTCTCGAAATGATGCCAAAGGTCCTTAGCCAC
TAGGAAATACAAAGTAAAAGTAAAGCCATAGCACATGTGCACACACACACTCAAACATACATTCACTCACACTCACAAA
CACACACACACACATACATTCACTCACACACTCACAAACACACACATACATTCACTCACACTCATTCACAAACACACAC
ATATAAACACTCATACATACACACTCACAAACACACACATATACACACTCACACATGCACATACACTCACTCATTCACA
CACACATACACACACATATACTCACACACTCAAACACATACATATATACACTCACACGTACTCACAAACACACACTCAC
ACTTACAAATACATAGTCACACAAACATACACACTCACACATGCACACTCACATACTCACACTTACAAACACGTATTCA
TACAAACACACACACACACTCACAAACACACACTCACAGACACACCCACACAGAGTCAGAATGGCTAAAATTTAAGAAC
TCACAGTACAAAGTGCTAGCAAAAATTTGGGACAACCAGAACCCTCATACACTGCTGATGGAAATGTTAAATAATAAAA
AAAAAAAAAACACTTGGGAAAACAACTGATACCTTTTGACAAGTTAAAAATACACTTATTCTAAAATTTAGGTGTCTCC
TCTTCAAGTATTTACACAAAAGAAATGAAAATGTAAACGCTTTGTGGTAGACAAATACCACAAACAACCCAAATGTCCA
TCACCAAATAAATACATAAGTTGATTGTGACATATCCAGTATGCTGGATACTACTTAGCAATTAAAAGTGCACACAACA
CACACACACACACACACACACACACACACACACACACATTCAGTTGTGTGTATGCATACGTGCTCACAAATGGACCATT
CTCAAGAAGCGTCATTCTGAGTAAAAAGAAACTCAGCACATATCTTACAATTCCATTTACATGAAACTCTAAAGATGGT
CCAGCAGCAGGGCTCAGTGGCAGAGCGCCTGCCAGGCGTTCCCAAAGTCTAGGCTTACTCCTTGGCACTTTAAATCAAC
AAGAAAAAAGTAACTCTGAAAGGGGCACGGAACCTAGGGTAGCAAATCGGATCAGTGTTTGTCTGCAGCCGAGAGCCAG
TAGCAGCGAACACAGAGACACTGATCTGGAATTTGTGGGAAACAATGCAAAATGAAAACACAGGGCTCCCTCCACACCC
ATCATCCCAGCACCCCAGAGGCTGAGGCAGGAGGATCATGAGTTTGAAGCCAGTCTGCCAGGTTCTGTTTCAACAAACA
AGTGGTGGCAGAGCCCTGAAGCAAGCATGGGGCCTTTATACGCTTGCACCCTGGGAGACCAACCTGGGCTTAAGAGAAT
TTTCTTGTGGTAATAGAAATATTTTGCATCTTGATGTGCATGTGTCAAAACTTGTGCATGTGTCAAGAACAAGTTGGGA
TGTAGCTCAGTGGGTGGACTGCCTTCATGCATGGCATGCATAAAGCCCTTAGTTCAGTCACCTGCATGAGCCAGGCCTG
AAAATAGGAAGTCATTTCTTTCTTCCTTCCCTCTCCCTCTCCTCCCTCCCCCTCCCTTCTTTGTTTTTTGGAGTCAGAG
CCTCATGTCCCCCAGCAGGCACCTCTCCATTAATATCTCTTCATATGCCCTATGTAGAAGACCCTCTATGTAAAAGAGT
TCCACAGAACACTCTCTATGTGGACTCTTTACAGAGGAGACCCTCCGTGGGGGGTTTCCTCCATGTGGGAACTCTCTGT
GTGGAATACCCTGTGTCAGGGAGACCCTGTGTGGGGGAGATCTTCTGTGTGGGAGACCCTCTGCGTGGGAGACCCTTGT
ACCAATCCTTCTCCTGCATTTTTTTCATTACAGGGAGTGGTTGTAAGTAGATGGTCATGATGGCTCCCTCAAGATCAAT
GATCTGGGCTTTCATTTAAGGTCTCCCACTCCTGGTTGGGGGGGGGGGGAATCAATAGGAAACCATCTGTGCAAAGCCG
CTAGTAACAACGTAAGTCACTCACTCAGCGTTCCCTGCGTGCGCGAATTCCGCAGGATTCAGCCGCTCTTTCAATGGAC
CTGCTTCTTTTTTGCGGTGTGTCTTTCCTTACTTAGCCTTTCTCTGGTTACTCTGCAGCTCGGAGCCACTCAGCTCTTC
TCATTTTCCTCGTTTTCTCCAGCTGTGTCTCTCTTACCTGGTGAAGTCTCTGGGTGGCTCGGGTGCTCCCATGGTCCTG
GCTGCTCTGCTGTTGCTTGTGAAGTTCAGTGACTAAGGCAAGCAGAATGGGAAAGGCAGCGGCGAGAAAACAGACTGCC
ACTGGGCTTCCTTCCTACCTCAGTCTTCCCGAGAGGACTATCGCACGGGCGTCCTTCAGATTGAGACCCTCTGAAGGAG
AGAATCCGCACCCCGGGGACAGCAAATCACACCGCAGACTTCCAAGACACATTTAAAATGAAGAGCCTTGTGGTTGGAC
TTAACTGAACAATATGTTGCCCAAATATGCGTTTTACTGAAGGCTGAGGCTATAGCTCAGTTGGTAAGGGTACTTGCCT
ATCACCTAGTCCCCAAAAGCATAGGTGTGTGTGTGTATGGGGTGGGGTGGGGGCCTTTTGAGCATAATACTCAGAAGGC
AGAGACAAGAAGATCTCTGCAAGATCTCTACAAGTTTATGGCCAGACGAGCCAGGGTTAAAAAGCTAGACAAAGCAAAG
TAAAAAGAACAAATAGCAATTGTTTTCACTCTTAGCACCACCTCAAAGTGAATGTTCACTCTGCCTGTGAGAGTAGCTG
TCTTAAGGGCTTCTCTGTTAGTTTCAAATCCAGGGTTAGATGATATCAACTGTGCATGCGCAAGGCTGCTCCTCTGTCC
CCAGAGTGGGCACTCAGGAACCCGCAGTCTTTCTTTCCCTCTGCAACACCTAACCATCCGCGCTAATCATCCACCCACC
CGGTGGCTCACCCAGAACTCCTCATCATTTGTCTCTGAAGGCATCGAACACAGAACTCAGGGACCAACTAAGTCTCAGG
TCCCAGGACTGTGAGTTTCAGGAAGACAAAATTCACAAAACCACTGTGGAGTCGGGGCAGTACTCTAATGTCACATGTA
ACCAAGTTCAAATGTTAAACACAGAGACTGAGAGAGACAGAGAGGGCTGGAGAGATGGCTCAGCCGTTAAAGGCTAGGC
TCACGAGGGAAAATGTAAGAGACAAAGAGCTTCAGGGGCACCTCCTGTCAGCAGATGGAACCGGGTGAGGGGTTCAGAA
GTGGCTCGGAGCTGTTTTCCCTTAGGGCACAGCAGAGAAGAGAAGAGATGTACGTCTGCCTTGGCCCTTCCCGGTCTGC
TTTTCTTTTCTGTTTCCCAAGCTACTCTGCCTTTAAGAGATGCAGGCAAAGCTTGAACGGCAGCTACAAACAGAGATGA
GACACTGGAAACCAATCTTGGGTTTCACCTGAACAAATCCCTCTCACAGCAACCCGACACCTGCCCAACTGTCAGCTTT
CCACGATCCCTAATTGGTCTTCACAGAACCCGGCCACCTGCCACCATCTGCCCTGGACCACCCTCACACCTGCCCCTCC
AGATGTTCACCTTCTCTTGGAAAGCTTCTGGTCCCCAGGCCCTCCTCCCACTTCTTTAATCTTCCCTGACCTCCAGAGT
TCTGGGGCATGAAGCACAGAGTTAGAGGCAGCTGGGTCCTGGGGAGAAAGATGATGACCACCACAGCCTCCTCTTCGAA
GTGGTCAGCAGATTTCTGGCTGTGTTATCGAGAAAGTTCCTAGAGGCCCCTCCCAAGGTATCAGCTCATCTCCTCCATG
TGAACCTCCAGGCAAGTGGGGCTCACCCCACCCCACTCCCGTTTTCCACTAAGCCTCCTGTGATTAAGCACACAAGATT
CCTCCCATTTTCCACAGGTTATATCAGGCGGCAAGAAAGCTTTAGTTAGGCTGGACAGACGTGGTCACATTTGGACTCT
TTATTTCACGAAGCAGGGCCATTTGGATGTTCCTGAACCCTCATTTTTACAACAATTTAAATAATAAATTTGAGAATTT
CATACAATCTTAAAAGCATATTCACTCCACCTCCCCCATCTCTTCCCAGATCCAACGTCATCATCCTGCCCACTTAACT
TCGTGTCTTCTTTTTTTAAAACCCACCAAACCCTGTTTGTACTGCCCTAATGCTACCCTGGGTGTGGTTGGCCCATCAA
GGGGTCACAACCTTAAAGAAAACTAGCTCTCCCTCTTCCAACAGCCATCAGTTGTCAAGGGCTCCTCAGCTAGGGGCGG
GACTTCCTGCCCATCTCAGCTCTCCCTGCTGGGATTTTGTCTGGCTTGATCTTGCGCAGGTCTTTCAGAGGTTAACATG
GCACTTGAGTTCTTACGTGGAACTGCCCCGTTGACGCCACAAAACACTGTTTCGTTGTAGCCGTCTGCGGCGGCTGGCT
CTTACAATCTTTCTGCCTCCTCTTCTGTGATCCTTGAACCTCGGGGAGAGAGGACAACACCTTTTGTTTTTGTTTGTTT
TCTTCTTTCTTTCTTTCTTTCTTTCTTTCTTTTCCTAAGATTTATTTATTTTATGTATACATGTGCACTGTAGCTATCT
TCAGACACACCAGAAGAGGACATCGGATCCCCAATACAGATGGTTGTGAGTCACCATGTAGTTGCTGGGAATTGAACTC
AGGACCTCTGGAAGAGCAGTCAGTGCTCTTAACCTCTGAGCCGGCTCTCCAGTCCATTTGTTTGGTTTTTTTCAATGAC
TCACAATCGCTTGTATTGATGGAGTTCAGAATGACATTTTGATACTTGTTAACGAGGTGCAATGATCAGATCAGGGTAA
GCCTCCTGTCCAAGATGCTATCTTGGAAGGCCTCAGGCAGCTTCCCCGACCTTCCAGCCAGCTTGGTCCCTCTTCGGGT
TCCCACTGCATTCCACACCCCTGCCTCTGGCCTCTGACCATAACCAACAGAGAACTCAGCCCCATCTTTAATCACCTCA
AACACCTGGGATGCTAAGTGCTAGGGGCAAGTTCTGGGGGTAACATACTCTCACTGGGGCAGCCACTAGAAAATTTAAA
TATGGCTGTCTGTCTGAAAGAGGCTTTATATGGGATGGGAGATGTCTCAGTGGGTAAAAGTGTTTCAACCTGATGGCCT
GAGTTCAGATCACTGAAACACACATTAAAAAACAAAAATAAAAACAGATGCAGTACTACAAAGCTGTAGTTCTAGTGCT
TTTACAATGAGATGGGGGAGAGGGGAGAGACAGGAGAATCACCTGGAAGCTACTCATTGGCCAGCTAGCCTAAAGTATA
TACATATACTTAAATACTAAAGAAGCAGAAACAAGAGACACCTGAACTAAAACAAGGTGGATGGCAAGAACCAACTCCC
AAAAGTTGTTCTCTGGCTTCTTATGTGCTGTAGTCTCTCTCTCTCTCTCTCTCTCTCTCTCTCTCACACACACACACAC
ACACACACACACACACACACACACACACACAATTTATGCCCTTTAACCCACTCACATTACTGTCTCCAGGACCTCCCTC
CAGATGTCACCTGAAAACCCTGTCCATTAGAAATCACAGAGCAATTTATTTTCTTGGCTACTGTTTCAACTGGCTAAAA
GAGGGCAGGTTTAGGGAGCCAAGGTTGCACTGTGTGACCTGGTCTGTCTTCAAGATGTCCCTGTAGATTGCCCCTGTCA
GATTCAGGCAGAGTATGATGAAGAAGTGTGTCTATATGTCTGTGTCCTGTAGGCTCCCCAACTGCCATCCCGATCATAA
AAACCAGGGCCCATGATGGTCATACCCTGCACGAAGTGGCTAAAGCTTAGTCTTCATGTCACCATAGGTGTTAGGGTCA
GAGTCCGGATCCTTACAGCCCTAACATGTTAGGCTCAGCTACCAGTCCTCAACAGGTCAATTAAACAAAGACCAGTGAA
AAGCAGAGAGAGGAGATTTATTCATTATGACCATATTGGAAAGAGGAACAATGAAATCTAGTGACTGTCCATCCACTAA
ATTGCACCACCACCATCACCACCGCCACCACCACCATCACCACCACCATCATCACCACCACTACCACTACCACCACCAC
CACCACCATACCCCTCCTTGACAGGCCATCTTCCCAGGGACCCCATAGGATGCATAACTAAGCAGTCTTAGTCAAGGTA
GAGTCCAGCCTTTCACTATCTCCTTGCAAAGGGTCTGAGCTATGTGACATCTTTTTCAGGAGACAAGTCCTCCCGACCT
CCTTCAGCTGGCACTAGCTGTTTCCTTCCCCCAACATGCAAGTTCTGGGGAATTCTATTATTGGGGGTCTGTTAGCTGA
GTGAAATATCTTCATTTATGTCAGGACTGTTACATTATGGGCCAGGCCATGTTCTAAGTATCTGATGTGGGGGGGTGGG
GGGGAGTTCCCATGGTTTTACAGATAGCAGACCTGAAAGACAGAAAAACTAAGTTGTTTCCCCACACAGCAAGCATCTG
AGGAAGCTGGCTTGGGAGGCCCTCGCGCACCCATTGCAGTATTCCTATCCTGGCTCTTGCTCGCTCCAGGCGTGGTCTC
CCATATTCTTGATCTGAGCAGGATCAGTGTCTATGAAAGCAGAGCATGGGGTTCTGTGTTGTTTTAATCCCAGCAGCCT
TCCTGCTACCCAAATAAGACTCCTGGGAAGGTAGTGGGGAGCCCTGATGGTGCTACAGCTCTTGGCCCCTTGCTCCCTG
ATGCCGAGCTCCACTTACCTCTGAGAAAGGGCAATAGGCTCCATTCAGCTCCTAAGATCAGACTCCCTAGCAACAAAGG
CCAACTGATCAACCCTGCTGGCAGATGGGGCCTCTTCATTGAGAAATGAAGAAGGCCATCTCTCTAGGGCAGTTTAAAC
ATGTCTTTCACTGTGCTAATCATTTTACAAACACTGTCTAATCCCTCAAACAACTAAGGGCAGCTCGCTGCAATCGTAC
TGTTGTGACAGATGTGCAAACGAGTTTCAGAGTCGTTAATCAATTTGTCGTAGACCACACAGTTAGTGACGGATCCAGA
GTGAAAGTTCAAGTTTATCTTTCTACAAAGCCCTAAGTATCTGTTTGACAATTTGACTATGTCCTTGGGGGGTTGTGTT
CCCCTGCCTACTGTGAGACATCACTAGGGAGAAACTTCTGCTTCTGGGCTGATGGCTTAGCAGGTTCAGGGCCTGTTCT
GAAACAGTCCATTGAAAGGGCAAACATCTCTCTCCACCCATATAACCTACTGACACTCCTACCTATGACTTAGTACAGG
TACTCAGTACCTTAGGACCTATTTACACTAGGAACAGAGGCACATCTCCATTGTTATGGTAGGATGGAATAAGGCAACC
CTTGGCCATCAGTCCTAATCAGAACGCTCTGGTCCTCAGCCTCCCAACTCATGATCTGGCCGATAGTTGGGACATTGGA
ACCCAAATGCTCCACAAACTAAGCCTCACCACTTGACAGGACATTACCAGAGTTCTTAGGGTCACACCCTGGGCCCAAA
AGCCCTAACAAGCTAGGCTCGGCCACCTGCCCCCAACATGCCAATGAACGAAACATGTAATCATGAAAAAGAGAGAAAA
GAGATTTCTTTTATGTGGCCACAGTAGAAAAAGAGACAAAAAGGAGGCTACAGGACCCGCCAATCTGCAGTTGGAGGTC
CTAACACAAGCTTTGGGTTTAAATAGACAATAAGGGGTCACACCCATCACTGACCCATCATTGTCCTGGCTCTGGTCTG
TCCAGAAAGGTGGTCTGAGAACTTATCAGAACTGAGTAAAGCTTCTTCCTGTGAGACAGGTTCTTCCCCCCCTCCCCCT
CCCCCTCCCCCTCCCCTTCCCCTTCTCCTTCCCACAACATGGGGCTCCTGGAGACAAGTTCCCTCTTTGAGGGCCTTGC
TTCAACAGTCTGATAGCAGAAAGGAGGGACACCAGCGTCTGTCGTTAGAATCTCTACTCCTGCCAGGAAGGTCACACCA
GGACCTGGGGCTGCAACCTCCTTCCCTAAGATCTAGTCTCAAAGCAAAGCCCTGGCACCCCAGTGCACCCCCTGTCCTT
GCTTCCTTCTGCTCCCCTCTGTTGGAACTCTTCCCAACCCTCAATTAATTCATAGATTGTAGCAAATTGCAAGAATGGG
TGTGGTGGCCCATATCTTTGATCCCAGCTCTTAGGAGACAGAGGTAGGTCGAACTCTGTGAATTCACTATTATCCTGGT
CTACATAAGTTCCAGGTCAGCTAGAGCTACCTAGTGAGACCCTGGCACAGAAAACAAAGTCTGGTTTGCTCGCTGTTTT
AGAGTCCTCCAGCCCTAGACTATAGGAAGTATAAGAGTGGGAGGCGGGGTGGTGAGGGATGGGGGGATGGTGTGTTTTT
GGAATTGCTGGGGGCTAGGACACAAGACCTGATACACAGTAGTTACTCCATAAATGCTGGAAAGATGCCTGCGGACTGG
ACAGAAGGGAGACTTAGAAGGCTTATGACCCTTTAATATCCCGCGGGAGTTTGGCTTTCGAGCTGTGCTGTGCCTGGGA
ACTAAAGCACACAGCAGCCGTCTTCACTGTAGAAATACGAACTGGAAAGCTGTTGTTCCATTGAGGTTATTTTGGGAAG
GAAGCACAGTAAGACAAAGCCACCTCCAGGAATGTGAAGGCCTCTTTCTGTGGGCCCCTGACTCACCTTCCAGACAGAG
GACTGACGTTGCTCTTAGCCAAGGTGTTCATCATTCCCAGCCATGACTCCCCTGGCCTTGGATGCTTGGGATGACTCAA
GGCACACTCCATCCAGACCTCCTGCAGTGGCCTGTGGCCATGCCAGCTGGGCCCCAAAGCCCAGATGCTGCAGCCGTCA
AGGGCTGAGTTTACTGTCTCCATGAATGTCTAAGTCCTGACTCTGCTCTCAGTCACTGGGGGGCGTTTTCCTCCTTCAC
CGAAGACGGATAATTTGTCACTTATTTTTAATTGCTTCGTTTGTTTGTTTTGAGAAAAAGTCTGGAAGAGCTGCCCAGG
CTTGCATCAAATTCCTCAGTCGATTCTCCAGCCTCAGTCTCCCAGGCAGTTGGAAGTAGGTGTGTATCACTGTATCTAG
CCGCTCCCGGTCTCTTTCTGAAAGGGTCTCATGTATCCCAGGATGGCCTCCACCTTGCTATGTAACCAAAGGGAACCTT
GAATTTCTGACCTACCTGCTTCTACATTCCGAGTGCTGGGATCATTGGTCTCTACCACCACATCTGGTTTATCTAGTGC
TGGGTATCAAACCCTAGACTTCATGAGTGCTAAACAAGCACTCTTGGCCCTTTCTTGAAGGAAGCAACTACAGCTCAGA
GAGACCAGACGCAGGAGGGCTAATCATGTGTGCTCTGTCTCCTTTTTTTTTTTTTTTATTATTTTTTTCCTGATTCTGA
GAACCAGGCAGGCCAACCTGTCACTATGAGACAGCCCGAACCTTCCTGAGTGTCACTGGCCAGGAACTCTTGAGAAAAC
TTTGGGAGAGATCAGAAAGACCAGGATGAGGGAATATCTGCTTGCTCCGCACTAAAGGTGGCTTGCTGTAGCTGTGTCC
AGAAGGCTCTGCCTGGTTAACGCCAGCTTTTGTGGTCCAGCTGAAGTGGCTGATGCTGCCCAGGGTAAGCAGGGATGTG
CCCATAGGTCTTGGGTCAGAGAGAAACCACTATTCTTCATATTCCAGGATGGCATCTTCTGATCCTGTCCTATTTTGCT
CAAATTTGACTCTAGAAACTCACAGCCTCCTCTCCTAAGAGATGCCTACCTGACAAGGTCATGTGGCCCATCAGGGTGG
GCAGCCAGCTTCAGGCTAGGCATGTCCCCACATGTCCCTATAACCATCTTCAGCTCACAGTCTCATTTATCAAAGTACT
ATTATCCTCAGAACATCACACAGGGCTGACTAGGTCCCTGGAAAATAACCACAGGGATGCTAAGGCAGGCCAGCCTCTC
ATTTACAATGGGGAAAACTGAGACCTGGTCTATATGGGCATCGAAAGAGCAAGCTTAAGCTAAAAGCGGGTCTTGTAAT
CCCAAGATGGGAGGTCTCCCTATGAGCTATCTGAGTGGCCTTGAGTGACACCATTCAACTTCGCTCAGTGGGCACTTAT
GACACATGTTATCTGACTTGTCCTGGGAAAGTATGAAGAAAGATTTGTTTGTACCATGGCAGATTAAAGAAACCATTTC
ACCCTTAGTCTAACTTAGTGAACCAATAAGAGTGTATTGGGGTTCCTTGGAGAAGTGTGGGTGAGGGGTTTCTTTCGGG
GATATGAATGACTCAGATGCATCTGTTGAAAAGCTCTCCCCAGCACGGTGATGACATGGGAAGGCTGCATGCCTAGAGC
TTTCTGCACAGCTTGCAAGGCAGCCCTGCCTAGCAGGGGATCTCCCCTCTTCTCCAGCAGTTTTTCCTGCGTATGTAAC
CTTGGGGTGAGAACCTGTGGCTCTCCTAAGTTTCTTTGTGTCCTGGTTCTTGTGAGCCTTGCTCTTTCCCCCTAGAGGG
GATGTTTCCACTGGCAGGAGGCAGCTATGTGCACCAATACCTGCACCAGAGTGGGGGTAAGATGGGATTTGGGAGGGAA
AGGAGGAGAGAGCGGAGGAGATTTTGTCATGGTGGGATGGACGGCTGTGTAGACGAGAGAAGCTCCCCTGAAACTCCCC
ACAGGAGCTGATCGGCACATTCCCAACCTTCAACCCTTAACAGATGAGGCAAACAACTTGGGCTCAACAAAGCAGCTGG
ACTTCTTAACTCTGCTCTATTGACCTATCTCATAATCATCTATATATCACCCGTGTGCCTACTTACCACCTATCTAGCC
ATCCACCGTCTGTCTGTCCTCTGTCAATGGTTTGTGTTAACGTCCCTCCAGGTGGCTCTGCTCTCTCCTTCCCTCTGTC
CCTCGCTATCAGTCACACGACTTCACCAGACTGAATTCAGAACTGAGAATACCCCTTTGTTTTTCTGACTTTTAAAGTT
GCCATGTTTTCTTTCAAGTCCCCTTCTTTGTCATGTGGTTTCCTTTTCTGAAACTCTTCACTGTGGGCAGTCCTGGGGT
GGGTGGGTGTGTATCTTCAGCAAGAACCCTGGTGTCTAAGGGCCTGACTCCAGTTCCCTGAAAGGTATGAAAGGCTGTG
CCTGTGGTGGTTTGAATAGGTTTGATCCCTATAGACTCATGTACGTGAATGCTTAGCCCATAGTGGGTGGCACTATTAG
GAGGTGTGGCTTTGTTAGAATAGGTGTGGCCTTTGTTGGAGGAAGTGTATCACTGTGGGGGTGGACTTTGAGCTCTCTT
GTATGCTCGAGCTATGACCAGTGTGGCACACAGTCTCCTGCTGACTTTGGCAGCTCCTCCAGCACCATATCTGCCCGTA
TGCTTCTCGCTGCCTTGATGATAATGGACTAAACCTCCCAAACTGTGATCCAGCCCCAGTTAACTATTTTCCTTTATAT
GAGTTGTCATGGTTATGTCGTCTCTTCACAGCAATAAGACCCTAAGACAGCGCCCATGAGGGAAAGGCATCTTCTTTAC
TCGCCTCACCTCAGGGTGAACTCTCAGATGTCATCTCAAGAAGCCCAGGTCTCCTTATCTACACCACTTTGATAAACTT
TGGCATTCCCTGCAGGCCCGGGATCCAGTTGCCTGGCTTGTGCTCTAAAGGTCCATGGTGCTGAGCTGATGGCCTCACT
GCGGCTGCAATCTGTCACTCACCACCCTACTAGGGAGCAGGTATTTCTCTAGGCTTGATGTGTGGATAGCCATTACTTT
TTAATTGGTGGACATATGGCAACCTTTATGGAGACAAACACCCAGACCAACCAGGTCTCATATCCAACACACAGAGACA
GATGTGAACACACATACATACATACATACATACATACATACATACACACACAGATGACACATAGCCAACTGTGTTCCAG
AGCAAAAAGAGCTTTTCAGTTGTTGTTGTTGTTGTTGTTGTTGTTGTTGTTGTTGTTGTTGTTAGCATTTTCTGTGTAC
GCTGTGGGAGGGAGGTGTAGCAGGCATGCTGTGGCTCACATGTGGAGATCAGGGGACAGCTTTGTGGTGTCAGTTCTGT
CTTTCCACCATGAGCTCTAGGGACAGAACTCAGGCCATCAGGTTTGTGCAGCGCGTGCAAATGCCTTTGCCTGATGAGC
CATGGCTGGGCTGGAGGTTGATGGGACCAGATGCGTAGGCTCCCCAGGACATATCTCAGCCCAAAACGGTACAGGGGAA
GAAACCAAGGCTGGAAAAGACAGCCTATATGAAGGAAGGAATGGATCTTTAGGTAGAGTCAAGGAGGTAGACATTTTCT
TATCAGAAGTGGAGGACAACCTCTTGTCAACCACCCCTCTCTCTGGCCTTCCTGTTCCATCTTTTGGGGAACTCCTTCT
GCAGCTAAGGAAGTTTAGCAGTGGCATTGAGAATGGAATTCACTGGTCTACCACATACTCCATCACTTGGAAGCATCCG
GCCAATGAGCTGTGGAAAGGCCTGCTGGGGACTTTGTTATGGCACTGAAAGGGAGACAATACCCAGAAGGGCAGGCTAT
GCGGTACAAGTTGTACTATAGGCTTTGACTCAGCAAATGATATGATATAGCCTATCTGTAGCCAGGAATCCCATAGCCC
TCAGCCCGGGTCTGGGAATGGAAAGCAGGAAGCAAGAATGACTCTTTCCCACATCAACTTAGCTTGTGCTGGCTTGGAG
GCCTTAATCCCCAAAAGAGGGACTATCCCACTTTTATCAGACTGAAACATCAGACCTCCATCTGGCCATTTGTGAATCT
TTGTGCTATTGAGACAGCAAGCACAATATAGATAAGGTTTGCTCCATAGGCAGGATGACTGGACCTAACAACCAAGGGA
AAGTCAGGGCCTTGCTACACAGTGGTAGCAAGTAGCACCATGTTTTGTCCACAGTGAAAATATAAACAGAAAAAAGTAA
GAGCTACTGAGATGAGCTGACCCAGGACAAAGGTTGAGTCAGCTCACCAGGTCAGGAGAGCTGCTGTCTGGGAACACTG
CATGAGTAAAAGGAGGAAGAAACAACAAATAGGTTCTGCTTCCAGAACTCTTTCAAAACCTCATGCCCAGCCATGCCTG
TGAAGACCAGAACAATAGCACCGTGTGTGTGTGTGTGTGTGTGTGTGTGTGTGTGCTGTGTGTGCGCGTGTGCTGTGTG
TGCGTGCACGTACATGTGTACGTCTGTATCTGTCTGTGTGTATACATATGTGTGTATTGTATGTCAATGTCTATATGTG
TGCATGTGTGTCTGTGTGCATGTGTGTGAATGTGTCTTAGTTAGAGTTTCCATTGCTGTGAACAGACATCATGACCAAG
GTAACTCTTATAAAGGACAACATTTAATTGGTGCCGGCTTACAGGTTCAGAGGTTCAGTCCACTATCATCAAGGTGGGA
ACATGGAAACTTCCAGGCAGACATGGTGCAGGAGGAACTGACAGTTCTACATCTTCATCTGAAGGCTACTAGCAGAATA
CTGACTTCCAGGCAGTTAGGGCAAGGTTCTTAAAACCCATACCCACAGTGACACACCTACTACAACAAGGTCACACCTT
CTAATAGTGCCACTCCCTGGGCTGAGCATATACAAACCATCACAGTATGTATGTGAAAGTGCATGTGTATGTATGTATG
TGTGTGCTCTTCTTCCCACTTCATTTTATGTAAGTTACCTATGAAATTTGTATTGTTTTTAGGTTATGAAATAATTATA
TGAGACTATGACTAAATTAGAGAAATAATTATTATCACCTATGGGTAAACATGGTGACTATGGCCAGGAATGTGTGTGT
GTGTGTGTGTGTGTGTGTGTGTGTGTGTATTCTTTTTATGTTAGTTATAATAGTGAGAAGGAATTTCACATTTTGATCT
TGATGACTGCTGAGATCAAGTTGCTCTCACAAAGTATAGCTGCACCTTGTTATGTCAAAGCAAAAACTTGCAATTAATA
TGTGAACACTGAAGTGTTGACAGAGGACTTATATTAATATTCAATATATATTGTTTGCATGAGGTACAGAAGGTATATG
GAATCCCAAAGAGACACGATCAGAAAAGTACCTCCCTGTGCCATACTGTAGTTAAAATGCCAAAAGTAGAAAACAGAGA
GAATACACAAAGCTTCAAGGGAGAAGTGAGAGCTCTCATACAAAGACAGACTGACAGACCAACAGACCCAGCAGAACAA
CATCAGATTTCTCAGCAGAAATCCTGAAGGCCGAGAAATTACAGATTGTCTCTCAAACCCTGAAAGAACATAACTATCA
GTCTAGTCTACCATATTTATCAACATTCTCCTTCCAGATCAAATTAGAAATAAAGACCTTCTAAGATTGGCTGGCATGC
TCTAAAGGTATGGAACATTAAGCCAGCCTTGAGGAAGACACTTAAGGGAATTCTGTGTCCAGAAGAGAAAGATAAACCC
AAGCACAAAAGGAAGAAAGGAATTTCACTACATGAGTAGCCAATCCAATGAAAATTAGGAAATCATCAAACAGTAAACT
AAATGACAGCAGTGCATGCCTTTAACCAGCATTTGGAAGTTAGAGGTGGGCAGATTTCTGAGTTCAAGGCTAGCCTTGT
CTACAGAGTGAGTTCCAGGACAGCCAGGGCTACACAGAGAAACATTGTCTCAAAAAGAAAGAAAGAAAGAAAGAAAGAA
AGAAAGAAAGAAAGAAAGAAGGGAGGGAGGGAGGGAGGGAGGGAGGGAGGGAGGGAGGGAGGGAGGGAGGGAGGGAGAG
AGAAGAGAAGAGAAGAGAAGAGAAGAGAAGAGAAGAGAAGAGAAGAGAAGAGAAGAGAAGAGAAGAGAAGAGAAGAGAA
GAGAAGAGAAGAGAAGAGAAGAGAAGAAAAGAAAAGAAAAGAAAAAAACTTACTGACCAAAATTTGTCCATACCTTTCA
ATTATATCCCTGAATGTAAATGATCTTACTTCTCCATTTAACAGACAGAGACTTGGTGGTTACATTAAAAAGATATTTG
TTTGCTACCTGCAAAATGTCTGCCTCATTCATTGGCAAAGATATACACAAAGGATGGAAATTAATATTCCAAGCGAGTG
TAATCACGAAGCAGGAAGGGACAGCTATGCTCAGGTATGACAAAGCTGAAGAAATTAAGCCACAACCAGTCGGAAGAGA
CAAAGAAGGTCACCATAAACTAATAAACAGAACAACAGCCCATCCAGAAGATGAAGTGGCTGTAAAAATGCACACACCG
AGTGTACAAAACAAACACTATGGAATATAAAGGGACATCTATGTCCCAATACTGGATAATAATGGGTGACTTCAGTAAC
GCACCAACACCAATACATAGAGCACCCGATCCCTCTCCCCAGAAACAGAGACACTTCAGAGTAACATTAAGCGACCCTA
CAGACCAAATGGACTTAACGGACAACTATCTACAGAACTCGTAGCTCTTCGGTTCAACAACTGCACATTCTTCTCAGTA
GCTCATGGAATTCTCTCCAAAGCAGACCCTATTTTAAGGCACAGTGTAAGACTCAAACAACGACTGAGGGTGAACTCAC
ACAGTATGTCTTATTAGATCATCGGAAGGCACTAGAAATCAAAGCAACAGAAACCAGCCAAGCACGTGGAGACTGAATG
GGCGATATTCCTTGTGAACACAAAGCTGTATAATCTTCTTCAATTACTCATCCTGGAATTACCATTCAGAATATTAATA
ATTAGATAAAAATAAAAGAACTAAACTTGGACAACAAAAGAACAAGTAACCCAAGCGACACGTGTAAAAATGAACTGAG
CACTTACCAAAGGAAATGAAAATGGCCAAGAAACACGTGGGAAAATTTGTATGTTTAATCGTCAGGGAAATGCAAATCA
AAATTGCGTTTGTCAGAATGGCTGCTATCAAAGGTGCAAGATGCTGATGAGGATATAGAGGTGAAGAAGCTTGTATGTA
GGGGCTGGAGAGATGGCTCAGGGGTTAAAAGCACTGACTTGTTCTTCCAGAGGTCCTGAGTTCAACTGCCAGCCACCAC
ATGGTGGCTCACAACCATCTGTAATGGGATCTGATGCCCTCCTCTGGTGTGTCTGAAGACAGCTACAGTGTACTCATAT
ACATAAAATAAATATTAAAAAATAACACTTAAAAAAAATAAGCTGCTGGTTGGAAAGTGAAATTAGTCCATTCACTATG
GGAACCAGAATAGGATTCCTCAAAGAGAGAGAGAGAAAAAGGGGGGGGAAAGAAAGAGAGAGAGAGAGAAAAGGAAGGA
AGGGAAAGGAGAGGAGAGGAGAGGAGAGGAGAGGAGAGGAGAGGAGAGGAGAGGAGAGGAGAGGAAGAGAGAGAGAGGG
AGAGAGAGAAAAGGAAGGAAGGGAGGGAGGGGAGGAAAGGGGAAGGGGAAGGGGAAGGGGAAGGGGAAAGGGAAGGGAA
GGGAAGGGGAGAAGAAAGAACTGCTTGACACTATTCATGATAGCCTGAGTGCCTGAACAAATAAATTATGGATTATTAT
TATGGGATATTATTTAAACATAAAGATCATTAAGGGAGAGGCTCAAGACTGGGATAAAGTTATCTGTGCTCTTACATTT
TTTTTAAAAAGGGTTGAAGTTTACAGTTGGGTTTGGGTCGAGTCAAAATGTCTCCACATCAAAACATCTGTAAGCCAAA
CAGCTGCTCCCAGTGCCGTCAAAATGGCTGCAGGAAAATTCCACAGACTTCCCCTGTAGGAGCCCCTCGCACAAACTCT
TATTTCTGTACTCTGCCAACTTGAGGTCAGTGTGGCTTAAAAAAAAGGGTGGTGCTGGAGTCAGCCAGCCCAGGCCTCC
CAGGCCAGCGCTAAGTAAACAGGAGTCCTGGGGGCGACCATTGCTCCACGGGGGCCCTGAGGTGGGATTTTCCAAAGAA
ATGAAAAGCTGCCTTGTGTGAAGAGCGAGTGTGGGCCCAGCATCTGCTTTCCATGACCTCATCTGTGTTGACTTTCTTG
CCATTTCATCTCTCTGGAGCCACAGAGAAGGCAGAGTGGAACCGGTGAACAGCAGCCTTCACCGGAGAAGGTCAGGGAA
GGAGGGATAGGTGACTAACTTCAACCTCTCAGTAGGCAGCTAGGGTCTCCAGGAGGAGACTCCTAGGCAAAGCCTAAGA
AGGGGTTGGGGGGAGCCCAGGTGTGTCCAGGTGTCAAGTGCTTCTATTGTTTTTCTCAGGAGGAACTCTGATGGAACTT
ATACTCTGTAATTTGCACACACTTCCTGGGGGAACCACAGATAGCCATCACTTTATAATTACCTGCCTCCACTCTTCCG
CTTGGCAGCTAGCTTCCTCCAGTTCTATTCTTATGATCCTTCCCAACCTAGAGAAACAGGACAAGATGCTTTAAATGGC
CTCCTGATGAGCCCTTTTCCCTTCCAAGGACCTTTTCCTACCCTGAGCTGTCTTGTGAACATCACCTTTAGCTCCTCCA
CACATGAGCTCATTCTTCTAAGAGAAGAAAGGAAGGGAGCAGAGTTATGTTCCAGTCAAGAATAGACCTGAATGTCATC
TCCTGACCCAGAGGAGCCAGCCTGGAGCAGTAGTTTAAGGAACACGGCATCATCAGCTGGCAGGAGGGACCACACCTTC
CCTGGAGCTAGTGTACCAGACAGAGAAACTAAGTTTGACCTGGTGCTGTGGCTGTGCCACCAGAGGTTGTAAGGTGGCA
CCTTACTGAGCATCAAACAACCTTGAAGAAGACAGTGAAACAGCTATTCCCTCTGCAAACATCTCTTGGTCCTTAAAAT
CATAAAGGGTGACAAAGCTTTCATACCAGGCGAAGGAGGGTTGAAAACATTTTTTAAATTATATTTATTTATTGTGGGT
GGATGGATGTCTACACATGCGTGTGGATGTCAGGTGACAACTTGTAGTAGTTGATTCTCTCCTTCTTCCATGTAGGTTC
CAGACATCAAATGCAGGTTGTCGATCTTGAAAGAAAGCCCATTTATCAACTGAGCCGACTCACCAGCACATTAAAATCT
TTTTCTAATTTCTAGTTATGTAGTGTATAATTCATTTTCTGTTTATGGTTAAAATTGGGTTTTTTTTGTTTATCTGTTT
ATTGTTCTCTTAGTTTTATGTTTTCTTTCTCAAATTGGAGGTGAAGGAGGAGGAAGAGGAGGAGGAGAGAGAAAAAATA
GGAAAGAGAGAGAAGGTAGGAAAGAAAGAAAAAGAAAGAGAGAGAGGGAGGGAGGGAAGGAAGGAAGGAAGGAAGGAAG
GAAGGAAGGAAGGAAGGAAGGAAGGAAGGAAGGACAAAGCCAGATGTTAAAGGCAAAAGTAGTTTTTAAGGAAACCCAT
TTGCCTAACACTTCCAGGTATGTAGAAAGACTGGGAGCAAGGACCCTCAGATACCTGCAGAGGCTGCTGGGTAGAAGAT
GAGAGAGTTAAGAGAGCACTTGATAAATGACTGCAACAGTTGCTTTGTTATCCATCTGTATACAAGCTAGAGCAGACCA
CACTCACATGGTCATTTCTGCTCCTGTTTGAGAAATGGGTGACGGACTTAGTCTCTTTTTAAAGTGATCACATATATGC
ATGGGCTCTCGAATTGTTTACCCCACAAAAATGGTATCAGGTTCTGACCCTGCTATCCTAAATTTTGCTTTATTCATTC
CAAAATTCTTCTGAGAAGCCCGGCACTTGTTTCTGAGAAAATACAGCACAATCAATATGAATACATGCTGTGCACTTAG
ATGGGGCAGATCTACCGCTACACTACCATCTTCTCCATCTATGAGACCCCTTAGAACTTGTAGCTTCTAAATCCACTAC
TATTCCTGTTCTTGTTTAGCATTCATTTGCTTTTGTGCATTTGTGTGTATGTGACGTGTGAGGGTATGTGCTGAGCCAC
TGTGTGGAGGGCAGAGTACAAACTGGATCCAGCTATTACTTGGTTCTGGGAATCGAACTCACCTTGCCAGGCTTTTGGC
TTTGGATTCTTCCTCCTCCTCCTCCTCCTCCTCCTCCTCCTCCTCCTCTTCCTCCTCCTCCTCTTCTTCCTCCATGTAT
TCATTCATTCATTCACTCATTGAGGACAGAATCTCATGGTCAGGCTAGCCTCCAACTTGCTATGTAGTTGAGGATGACC
TTGAAGTCTTTTATATATATGTTTTTTTAATTTTATTTTTTGTTTTTCGTAACAGGGCTTCTCTGTGTAGCCCTGGCTG
TCCTGGAACTCACTCTGTAGATCAGGCTGGCCTAGACTCAGAAATCTGCCTGCCTCTGCCTCCCAAGTGCTGGGGTTAA
AGGCGTGCACCACCACCACCCGGCTCTTTTTTATATTTTAATTAAAAAATTTTTTTTATTGTAGGCATATATGTGTTCT
GCTGTGAACATATGTCTGTGTGTCCCTTGCATACCTGGTTCTCGTAGAGGCCAGAGGAGGATGTTGAGTCCCCTGGAAC
TGGATTACAGACTGTTGTGAACTACCGTGTGGGTCCTGGGGTCCAGATCCTTTGGAAGAGTAACCAATGCTCTAGACTG
CTGAGCCATCTCTCCAGCCCCAGCCCTTGACCCCTTAAATGTTCCTGTCTGTCCCTCTCAAGTGCTGGGATTACAGGCT
TGAGCCACTGTTGCAGTAAATCTCCAACCCAAATATGCCCTGGCAATGAAAACAGGACACAGTTAATATGACTACATGC
TGTGCGCCTAGATTAAGCAGATAGACCGCTACACTACCATCTTCCACATCTATGAGACCCCTTAGAACTTGCTGTTTCT
CCACGCCATGTGCTTTGCTTTTCTTCTTCCTCCTCCTTCTCCTCTTCGTCCTCTCCCTCTTCCATTTTCTCCTTCTCTC
CCCCCACCTTTCATTCCACCTTCCCTTTATCTGCCCAATCATCAGCTCTCCTTCATTTTACAAATTAAGGTGGGAAGCA
GTTTTACAGGAAATCACCTGAGTGCTGGCTCATTCCTTGTTCACAGCCCCTCACAGGAGAATGGAATTAGCATCAAATA
TAATTAGCACCATGGCTATCCACAACTTGCTGCCACACCCCATACTGAACCACCATTATTTATCAATTTATCAATTTGT
ATATTGTACATGTTAACTCTTTCATAAACACATGATAATATTTTAGAAGACTTTTATGGATATAATGGTATATAATCTG
TTATGAAATGTATCTAACCATTCTAAGTCTTCATGCTTTCTTATAGTAAATATGTCTATCTTTGGGGCTGAGGAGGTAA
CTCAGAAGTTAAGAGCACTGTATGATCTTCCAAAGGACCCAGATCCAGTTTCCAGCACCCACATCTGGCTCACAACCAC
CTGTAACTTCAGTCCCAAGGGCTTCAACAACCTCTTTGGCATCCAAGTCAGTCCACATGTGGTGCATAGATGTATATGC
AGGCCAAACACCCATATACATAATAAAATAACATTAAAATTAAAAGAAGAAAGAAAAAGAAAATGGGCTAGAGACATGG
CTCACTAGTTAAAAGCACATATTCTTCTTGCAGAGGACCAGAGTTCAATTTCCAGCACCCACATCAGGCTGCTCACAAC
TGCCTGTTAACTCCATACAATCTGATATCCCTCTGACCTCCTCATGGAGAGAGACAGGCAAAGAGACAGAGAGAGAGTG
AGAGAGAGAGAGAATTTAAATGAATGTTTTTTTTTAATTAATCTATCATTTTTACCTTTCCCTGTTTAAAAAGAACTGT
TCTGCAGGATGGTGGTGGCACACGCCTTTAATCCCAGCACTTGGAAGGCAGAAACAGGCAGATCTCTGTGAGTTCAAGC
CCACTCTGCTCTACAGAGTAAATTCAAGGACAGCCAAAGCCACACAGAAAGACCTGTCTGGAAAAAAAAAAAAAAAAAA
GAAAGAAATAAGTTAATTTTTAAAAAAAAGCATTGGAAATGTAAATGAAGAAAATACCTAATTAAAAAAAAAAACCAAC
TGTCATACTTTGTATAAAGGACATTCTAGATTTTCTTACCCAAAGTTCTTGTTTTATTACTTTTTCAATTTTTGTGTAA
GTGTGTGAGATTTATGTGTAGGGTAAGTACACATGTGTGGAGCCCAGAGGATAACCGCTCCTTCTGAGCTGTTCACCTT
GTCTTCTGTGACAAGGTCTCTCTCACTGGGACCCTGAGGCTCACAGACTCAGCATAACCAGCGAGCCGCAGGAATCAAC
CTGTCCCCACATCTCCATGCTGGGATTACAAGTACCCATCGCCGTATCTGATGATTTGCATGGTGTTGGCTACTACTCC
AAGGTCCTTAGGCTTGCGTGTGGCACGCACCTTACTGACTGAGGTATCTTTCCTACCTGCCTTGCTTTGTTCTTTATGG
TTTATCTTTGATCAATCTAGATTTGTTTTTTTAAACAGATTTATTTAAGGATTTATTTTCTTTTTAATTTAGGGGTGTG
TGTGGGAGGGTGTGCACATGAGTTCCGGTTGTCAGGAGAGGCCTGAGGTGTTGGGTCCCCTGGAACTGGAGCTACAGGT
CCTTGTGAGCTGCCTGACGTGGGTGTGAGGACTGAACCCCAGTCTCTGCAAGAGCAACACTCACCCCTCACCACTGAAC
TGTTTCTCCAGCTTCCCTAAATTTATTTTGTAGGGTATAAGAGGCTGTGTCAAATTTCCTCTTACATTGCCTGTGCTAT
CAATAATATATCCCATAAGCCACTGGATTAATGATAAACCTATTTAGTCATAATGAGTACTCATGGGATCTGAAATCTA
TTTACAGATTATATAATTTATTTATAATTTTTTTGTCTCTGCCTGTGCTAGTATCATAATGCCTTGATTTCAGTGAACT
TGAATTGTTTTGATATCTGTTGAGGACAGACTCCTGTTATTCTTCACCTAGATATCTCTAGATATCTTAGACAGGTTCT
TAATAGTCATAGCTGTTCTGGAACTCTCTAAAGTCTACATAGACCAGGCTGGTCTTGAACTCACAGAGATCCACTTGCC
TCTGTCTCCATAGTACTAGGATTAAAGGTGTGTGCCACCACACCTAACCTGTTTTTTTAAGGTGTAATCTAAATTTGGG
GAGTATTTATTATTCCTCGGAATCATTTCCACTATTTTATTGTATTAAATAACCCTATAGACATATAATCTATCACGTG
TATATATTAGTTTAGAAACAAATGGTTGTTTATGATATTGTATCCCTAAAAAAAATATTGTTTCTTTCAAAAGGATTTC
ATGGTTCTCTACAAAAAGTGTATTTCTTTGTGCTAAATTTATTCTAAGCACTATGCAATTTTTGCTAGCCTTATAAAGA
AAATGTTTTCCCACTTTCATTTCTAGGTGCTTATTATCAAAATAAGAAGGAATATTTAGATGCACGTATCCTCTATCAA
GCTATTTCCAAAACTATTTTTTATTTTGGTTGGTTTAGTTTGGTTTTTGGTTTTTGGTTTTTTTTCCAGACAGAGTTTC
TCTGTGTAGCCCTGCCTGTCCTGGAACTCACTCTGTAGACCAAGCTGGCCTTGAACTCAGAGATCCACCTACATCTGTC
TCCCAAGGGCTAAGACTAAAGGCATGCACCACACACCTGGCTCCAAATTATGTTTTGTTGTTGTTGTTTTGTTTTGTTT
TTGTTTTTTTGTTTTTGTTTTTTGAGACAGGGTTTCTCTATGTAGCTCTGGCTATCCTGGAACTCACTTTATAGACCAG
GCTGGCCTTGAACTCAGAAATCTGTCTGCCGCTGCCTCCTGAGTGCTGGTATTAAAGGCATGTGCCACCACTCCTGGCT
CCAAAATTATGTTCTTAATCCTAGCAATCCTAAAGTCTTCCGGCTACTCTAGATGAGCTATAAGACAAGCTGTGGTATG
GCATTAGCTGTGCCCTCTAGCCTGGCAAGGTTCCACCGTCCTACACTGAACGTCCCTTTTGGTCTCTGTCACTGGTTTT
GTGTTGTGCTTTCAGGGTAACTTGATTGTGGATCCAGGTCATCTTTGCCACTGAACAGCATAATAATGACTGTTTTCTC
TTCCAATTCCTCTGATGAGCTGTATAATTGGAAAAATCGCTCTTTTAGTTCAGTATCCTTACTTTATATAAATAGCTGC
AGGTGTGCCCCCTACCACACCCCCATAGGTTCATTTGTCATCTGCCTCTTTTAAAAGCTTTATATCACTGGGGGTGGGG
TCCTTTGTCCCCCTCCAAATACCCTCTTACTCTCTAAGCTCACTGAGGTTCAGGTCTGAGCACAGGAGCCCCACTAAAG
AACGGTTGTTCTATCCGTGGTGAAAGGGGCAGTTTCTGCCCTGACTGTGACAGCTGCAGGCATGCAAGACTGTATGGCA
GACTCTGGCAGACTGCCCGTCTCCCTTGGAAGCATCTGGAAAATGTTCCCCTGGCCTGGCCTCTGAAGTCTCTCCCAAC
CTTAATGGCAAGAAGACTTAGTCTATTATCTGATACCTTTTCCGTTCTGGGATGGGACACAAAGTATAGATGACTTCAT
GGAATGTAATGGCAGCCTCTTCCTAGGGTCCCAGGTTTCTCCACAGTTCTAAAGCATGCTCTTCCTTACATTCCCTTCT
GATTGGGTGGTTTGTTTGTTTGTTTGTTTGTTTGTGAACTTGACAGAGCTAGAGTCGTCTGAGAAGGGTAAGCCAATCT
TGAGAAAATGCCCCTATCAGATTGGCCTGTGGGTGTTTTCTTGATGACCCAGTTCACTGTGGGCAGTGCTATCTCTGAG
CAGGTGGTCCTGAGCTATATAAACAACAGCAGCAGCAACCACCACCACCACCTAACTGAGCAAGCCATAGGAAGCAAGC
CAGTAAGTAGGGCTCTCCTGTAGCTTCTGCTTCAGTTCTGCCTCCAGTTTCCTGCTCTGAGTTCCTGACTTGACTTTCA
GTAAACCCTTTCCTCCCCAGGTTGCTCTTGGTCATGGTGTTCATCCCAGCAATAGAAATCCTAAGACAATCCCACTTCC
CAGTGCTTGCTTAAGCCTTACCAGTATTGACCGAACTCCTGGGTGAACAGTCAGCCCTAGCTCCCTCGCCTAACGCTGT
TTTTCTCAAGAGTGGCAACAATTCACTTGAAAGCACAGGAAAAGGAAATCACCTTATTGAACTTGGTGATGACAACCTG
CGCCCTAGATCTAACTATTGTCATCAATAGTCCAATAAAAAGAGACAAACTGATAGTGTGCTTTTGTTTGTTGTTTAGT
TTTCCTAAAGACACAGTCAACACAGTCTGCTTCAAAGTCCCAAACCTAGGTACAATTGGAACAATTGGCTCATAAAAAG
GCCTTCCTAGTGGTTGATATGTTTTATAAAACGGGGTATGATGTGGAGGGAGAGGGGTGCCTTAGCGGGCCCATGCTGA
GGCGCTCCCCACCCCCAATACACACACCAGGTGTCATATCAGCCATACAACGGGTGTAGCATAAAAGGAAGTTTATTTG
GGACGTGGGAAGGGGTTCTGAGGAAGGGAGCAGAGGCAGAGGGGAAAAAAAAAAAAAAGAGGACAGAGGGGGACAGTAA
GAGGGAGGAGAAAGAAGAAGAGGCCTCTAGGGAACAGGTGGGGAGAGAGAAAGAAGTTGGAAGGGATGAAGGGAGGAGT
AGATGGAGGGAGGGAGGGAGGGAGGGAGAAAGGGAAGGAGAGAGAAAAACAGACTGACAGAGACACAAAAAAGATGGCG
AGTTCTTTTTATCTACGAGCCAGGCTCATACCTGGCTGTTGCTAGGTAACTGCTAGGCGGAGCCTAGAGGAAATGCTAA
CACCTAGCTCTATGAAAGTCCCAGCCTCAAGGGATGGTCAGAGGGTGCTGCCTTCTGCTACCTCCCATGTCAGTTTGAG
ATTTAAGATAAAACACAGAGCAGAGGGGGTAAGCTTAGTAAAACGGTTGGTACTGAAGCCAATCAATCTAGCATACATC
CGTCCCCTCCCTCAAATCGCAGAGCCATGGCGGAGCGAAACCCACCTCAATCTTATTCAGGGTTCTCTGTCTTTGCCCT
GCCCGAGACACCCAGTCTCTGGTAGCTTAAGATGCTGGCTGAACATTTCTCCCAAATCCAAATGGTTGAGAGAGTGGGG
GCGGGGGGGGAGCGGTACGGTCCTCAAGCGCCATAAAAACAAAACAATACAGCCTTCTTCTGCAGGCGTCTGCTCTTGT
CAGTGCCCTCCTCTTGGCCCCCGGAGTGTGCTGAGCGTGTGCACGAATGTGCCCAGGAGCCCAGAGCTCCCGTAGCGGG
GCGGGGGCAAGCAGGGCGCTGCGGGGGACCAATGCCGCACAGTAATCGGCTCTCCTCTGCTGGCGCGTGGCCGAGTACC
CCCACCCCGAGGGGGTGCGTTCGTTCGCGGTGGAGAATTATCTCATTGTTCCCAGACTCAGCGGCCCCCCACAGCTAGA
GATCTTTTCACCCTGGCAGCCGGGCGTCCGGCGCTCAGCCGCTCCCCGCGCACCTGCCCTGCGCCCCCGCCCTCCCGCC
CGCCATCTGTCGTCTGAACGCCATTGTCAGCAGCCACGCCTGGCGTCCTGGACGACACCCAAGGGGACCCGGGGCTTAA
GTCCCAGAAAGAAGCAAACAAGGAGGGTTTATTCCAGTCCTGTTTGGAAGTGACCTTGAGTAAAATAGACAAGTCTGCG
CTGGGAGTGGGGGTTGGAGGAGGGAGGGTCCTGTTCTCCCGTCTGCTGACTTTTCCAAGGGGTTTCGTTGGGGGTCAGA
GGGTTGAGGGTACACAACTGGGCTTTTCGGAGAAGCTTTTCTCTCTAGGAGGAGCTACTCAGCAGGCAGATCTCGCAGC
GAGCCTCCCATTGGAGCCCCGGGTGGGAACCCATTTCAAATGCAGATGTTCTCTTTGTCTGCCTGCGAGTTTGCCCCTC
TGGTTTACCCCAATTGTCGCAGCCTCTGGGGATGCCGGGTTGAAAGAAGAACCTGTCTTTTCTGCCATCACAGGTGCAG
CGCTTTCTGGACCCACTAGCCGCCTGCCGCTCGCCTCGCTGTTCTTCTCCCAAGTTTGTTTACCGTCTTCCATCCTGCT
TTACCGTTAGAGGAAATTTCAAACACTTCCCTGAGTTTGAAAACAATCGCAAGCAATCCAAAGTTGCAGACACTGAAGT
CATGGTGACCTCACCTTTCTAAATCTCTGTGCTCACAAACCTAGGCGCCTCCTCATCCCCTGTAGGGACCTTATAGAAC
GCGCGCGCGCGCGCGCGCACACACACACACACACACACACACACACACGCACACATCTCACTCCCATGCAGTCCATCAA
CGTTTTCCCTGGATGGGAAAACAAAGCCCCAAAGACAGGCGATAGTGTGGACAGATGTGAACTTTCACCTCATTGCACA
AAAGACCCATTGGGCTCACTGCTCAATTTGGATCTCTATTAGTAGCCAGCACACATCGTGCAGAGGGAAGGTCGGGGAT
CAAGGGGGCCTTTGGGGATGGTGTCTCCAGGCAGACAGCTCAATGGGAGTTACTACTCCCTTCCTGGAGGTCTCTTTAG
TCTGCACCAAGAAAGGAGAGTGCACCCCTGAGTGTCCACTCCCCCAGGAGGCCCACTTACCTGGCTCCAGCTGTCTCCA
CTGGAGCAAACTGGGACCTGCTCTGTTAGGCTGGGACCCTGGAAAGACCCTGCCCAAAGCTTGGGGGTAAAATATTTAC
CAGACCAGAATGCATATAAAAGTTTTAATAAAGAGTATGCACTGTGGGAAGGAGAAACACAGCTGTCGGAGTTCTCAGA
GGGAGTCGTGGCAGAAGAGTGAAGAGCAAATGGGGCCTTTTGATAACAGACAAGAGAAGTCTCACCCTGTTTTATGCTG
AGAGTCACTTTATTTTATGACACCCTTTGTCCTACCTGAAGCAAGTTTTGGGGGTGAGGTGTCTCAGGCCATTCTGAGA
GAGGCTGTAGTTATTTAAAGCATTATTGCACTAAGGTTCCTAATGGGTTAAAGGTAGGAAACTTTTCATTTTCTTCTTT
CTTTCTCTTTCTTTCTTCCTTCCTTCCTTTCTTTTTTTTTTTTTCTGGCCTTCTTTGACCCTAAATCTTCTAGAATTTC
CATCAATAATTCTCCCTACAAACGGGGTACGGGGCGGGGCGGGGGAGAGCATGAAATCAGACTGGAGGGAAATACTGGG
AATGCCGATGCCTGGTGTTGTATGGACTTTCTTCTGGAACAGAACCGAATCCCTTTCACAGAGGGGTATCCTCTCTACA
AGCTCAGTGCCCACACCACCTCCCCGGGTTTCAAGCACATATGTTCATGCGCCTCAAATGTGTGCAGATAAAGAGGTAC
ACCTGGTGCGCACACCACGTGGTAAAAAAAGAAAAACAAAACAAAACAAACAAACAAAAAAACCTAACAAAAACCCCCA
AAGTCTCCTTTCACAGGTTTCCAGATGGCAAGATCTGTTCTGCTTCCCTGCTCGGCCTCCCAAGAAAGGCAAGGCTTCC
AACTCAGACTCAGGGTCTCTAAATTTGGCCTTCCTCCTCAGGAAAGGAGCAGTGACAGACAGTACTGCAGAAAGACTTA
GGAGCCGATGGGAAAGTGCCAGGCCTGGTAAGCGGGTGACCCGCTCCTGAGTTACCTGCTGAAGGCAAGACCCAGTTCC
CCACCTTGTCTAGTGAGATCTGAGCGGAGAGGGTTAGTGGCCTACCATGAACAACAACAAAAAAGAGGCCTTTTTCTTT
CCTTTCCATTTCCTTTCTTCCTGCCATTTTTATTTTGTTTTGTTTTTGAGACAGACTCCCTGGTTAGCCCCAGCTGGCC
TTGAGCCCCCCTCCCCTCCCCCCTCCCCCTCTCCCTCCCCCCCCCCTTCCCAAATGCAGGGATTACAGGGCTTGAGCAC
TGCACCTGGTTAAGGCCTCTTTCTGGTTCAGCATTGTAGGCCAGCTTCCGCTGCTGAGACTGGGGATTTGTAAAACAGC
TGGGGCACTTCTGGTCACTGTATCAGGTCCCTGGGCCTGGAAGAAGGCCCAACTCCCTTGAGGATGGTCTTCTAGCAGA
AGCATTAGATTGCTAAACTCATACAGCACCGAAGCTGCTGGCAGTAACTGCTCAGATAAGTCACGTGGCCAGAGTTACC
GTTAACAGCTGAAACGTTCCCCTCAAAGAGTTGTGTGTTAAGGGTCTGACTGACAGCTGATGTACTGACTGGATCATGA
GGACTTGGATGTAAGCAAAGGGTTAATTCTCTGAGAAGTTCTGAACTTGACCTGGCCCTGTTAAGGGGCAGGGCCTAGT
TTAAGGAAGTAGATCACAAGGGGTTTATTATGGACAGGTGTGGGAGCTGGGGGAGGGAATTGCCCATAGCCCCGTCTCT
TTGTCTGTTTCTAGGTTTGGCTGTTACAATGTTCACTTCACCTCTTGTCCAAAGCAACAGAGGTGAATAAAACCTGTGA
AACCAGGAGCCAAAGGCATCTCACCACAGTTTAGATTGTTCATATTGCGTTTGTCACATGATGAAAGGTGACCTTCACA
TAGCCCAACCCAAAGTCAATGTTCACTTCTGACAGGAAGCAACACCGTAAGCTGAACCCTCCCAGGAAGCAAAGAACCA
GTATTTCTGTGTCTTCTCTGCATCGTTTTCTGGGATGACAACACCCATCCCTGGATCCTAAGTACTAGGATGTAGTTTG
GTCTCAAACTCACTGTGGAGCCTTGGATGCCCTTAAACCTCTGATCTTCCTGCTTCCATCCTGGAATGCTGACCTTACA
AGGGAGATTCTCCACACCTGGTTTATTCAGTGCTAGGGAACTGAACTTCCTACGTGCTAGGCGAGCTCTCTACCAACTG
AGCCCTAGCCCTAGATTCTTTGAATCTTGATGATCCCCCAAAGGCTCTAGTGTTAAAGGCTTCGTCCCCAGAGTGGTGA
TATTAGGAGGTGGTGGAACCCTTCAGAGAAGGAGCCGAACTTGACCTGGCTGTTAAGGGATAAGGGGATGTGGACCTGT
TGTCCTTCTGGTGTGTCTGAAGACAGCTAAAGTGTACTCATATAAATTAAATAAATAAATAAACAAATAAAATAGACAA
GAGCTAATAAATATTGAGCCGTTGTTGTGTCCCAGATGCTGTTGTAAGCATTCTGCCAAAACAAATTCCTTTAATCTTA
GTATTACTTGTACCCATTTTACAGACAGGACAACCTGAGGTACAGAGATGCTAAGTGACAGGTTTGAGCTCCATAAAGG
AATGACAGTGCCAGCGTCCTACCTGGCATCCTAAATGCAAAGGCATGCAGTATGGCAAGTGAGACTTGCAAAGATGATG
TGGCCACAGGGATACAGAAGTGGGCCTGTCAAAAGGTGGGTTCTTCATCCACGATTCTGGCTGGCTGGCAGCATGCACC
CATCATTCAGGGCCTAGTGAGAGGTCCTTGGGTCATTGGAGATATGTCCTTGAAGGGGATTGTGGGACACTAGTGTCTC
CTCGAAGTGGGAATTTCTGGTTGTCATGTGATGCAGACTCACGTGATGTTTTTGCTGAGGTAAGACCCAGAGAGGACAC
ATGATGTTTGGAGAGAGTATAAGTAGGACTCGACGGACAGTGACCAGATGCTTGCATAGCTAGATGTGCAACTCTTTGT
TGGTCTTCTGTCTAAGCTGATCCCTGCTTTGTTGAGAGAAGCACGGCAGAGAACTCCTGGCGTTCCGGCTGATCTTAGT
TGTTCCCACTGACTCCTGCCTATCCGACAGAGACCTGCCGGTTTCTGCTGGATCGTGACACTTTTGAACTGGATTGTTG
GTATCCTGACACTACTGAACCAAACTGCTGTTATCCTGACTAACGGAGATTGGAATCACCTCCAAAGAACTACTTCTAA
ACAGGTCCACATCCCCTTGTCCAATTCACCATCTTTTCTCCTCTGCCTTTGGACAGTGGGCTAGAAGGGGGCTCAAAGC
ATTTGAGAACCCTTATTGAAGTAGGCTTGGAAAAAAATCTAAGCCTACTACCCCTCCTCATGCTCCCATTTTGCTTTCT
GGTGATGAACTGAGCAGTTTCGCTCCACCACACACTCCTGTCTCGTCAAAGCCTAAAAGCAGTGGGTCTGCCTACCTAT
GAACTGGACCCTCCAAAACCATAGGCCAAAGTAAACCTTTTCTCTTTATACGTCCACTAGCTCAGATATTTTATTACAG
TAGTGGTAGGATGACTAACACATGTATTCACTGACGATTTCCTAACTTAACAGTCCAGTCTGAGCTCCAAGTACCCCCA
ACATCCTACAATTCCCACTCCACCCACACTCCCACACCCCAATGCCTCCACTTGAACATCTCAAGACACCCCTCCTTGG
AGATTCTCCCTGGACTACGCCCCAAGGACCTCTTCCCTCGATAACTGCTGTATTTGTATAGCCCTAATGCATTCCTTCT
GTCTCATCTCAAGATATGGAGAGAATACTCATGAGTTAAAGGTGAGATTCTGTAACCCCTGTGTGAGCCCCATTTCAGA
GGGAAGTGAAGCTCCTTATAGTGCTCCCCGAGAAACTACACCTCTCCCTCATCCCCTGCTGCTTGGCCTCAGATTCAGT
TCCAGCCACAACACCCTCCCCTGTCTTAGGGTTTCTATTCCTGTACAAACATCATGACCAAGAAGCAAACTGGGGAGGA
AAGGGTTTATTCGGCTTATACTTCCACACTGCTGTTCATCACCAAAGGAAGTCAGGACTGGAACTCAAGCAGGTCAGAA
AGCAGGAGCTGATGCAGAGGCCATGGAGGGATGTTACTTACTGGCTTGCTTCCCCTGGCTTGCTCAGCCTGCTCTCTTA
TAGAACCAAGACTACCAGCCCAGAGATGGTCCCACCCACAAGGGGCCTTTCCCCCTTGATCACTAATTGAGAAAATGCC
TTACAGTTGGATCTCATGGAGGCATTTCCTCAACTGAAGCTCCTTTCTCTGTGATAACTCCAGCTGTGTCAAGTTGACA
CAAAACCAGCCAGTACACTCCCCACTGTGCTGTGTGAATGGAAGTTCCCAGAAATAAGCTGCACCTGTGTTAAAGATGC
TGCAAGGCTGATTGTTGGATTCGAGGCAATATGCAGAACTGGAACCAAAACCACTTTGAGCTATCCTCAGCCCTCCTTA
ATAAACCACTGCATGTGTTACTTTGCTCTTGCTGTGTTTAAAAAAACACAACACGGGGGGCTGGAAAGATGGCTCAGCG
GGTAAGAGCACTGACTGCTCTTCCCAAGGTCCTGAGTTCAAATCCCAGCAACCACATGGTGGCTCACAACCATCTGTAA
CAAGACCTGACGCCTTCTTCTGGAGTGTCTGAAGACAGCTACAGTATACTTACATATAGTAAATAAGTAAATCTTTTAA
AAAAACACAACACAACAAAACAAAATGAAAACCTATAACCAGATCATCTTGCAGAGGGAAGATTATTTGGTTTTAAGGC
TCCAGAGGGCTCAGAGTCTATCACGACAAGGGGAGCATGGCAGCAAGCGGCAAGCATGACAGCAGAGCCAGGAAACTGA
GAAATCACATCTTCAAATGCAAGCAGGAAGCAGAGAAAGTGAGCTGGAAGTGGGGCAGGATTGTGGACTCTCAAAGCTC
ATTCCCACCGTGATCTACTTCTGTCAGCATGGCCCCTCCTCCCAAGGCTCCACAACCTCCGGAAACAGTGCCTCCAACT
AGGGACCAAGTGTTCATCTATGAAAGCCCAAGGGCGACATTTCTCACTCAAGCCATCCTGACTATTTAGTGCTCACCGT
TGGTATATAACCAATGTCACTTCAACGATTAGGGAAAGCCTTTGAATATGTCAACTTAGCAGGCCACAAGCTTGTACTA
ACCCTGAGTGAAGTTTGTAATCTATTCTGAGAGCATCTGAGACATAGAGCCAAGAATCTCTGCTTTGTATTATGGCCCA
CTCCATCAATGTGTATGGTGTTCCCTATCATGTGTTTGGTAAATACTTTCATTCATGGCTTCTTTCTGTTCTCTGACCA
TAACTCCGTGTCACTTGTGGTAGTTTGAATATGCTTGGCCCAGGGAGTGGCACTATTAGGATGTCTGGCTTTGTTGGAG
GAAGTGTGTCACTGTGGGGATGGGCTTTGAGACCCTCCTCCTAGCTCCCCAATGAGACAGTCTTCTCCTGGTTCCCTTC
AGAATAAGATGTAGAACTCTCAGCTCCTCCTGCACCAAGTCTGCCTGGGAACTGTCATGCTTCCCACCTTGATGACAAT
GGACTGAACTTCTGAACCTGTAAGCCAGCCCCAATTAAATGTCCTTTATAAGAGTTGCTTTGGTCACGGTGTCTCTTCA
CAGCAATGGAAACCCTAACTAAGATATCACTACTCACATGTTGACACATGTTTTTCAGGGGACCTGTATCTGTGTTGCC
AGGCCAAGGACACTCACATTTGGCTCAGAATAAACTCCCTCTTACTCCCTTTGTGGTGAGAACTGCACTTTATATTGAC
ATCTGCAGATTCTGGGGATAATGGGCCTTTGCATGAACTGTGCCTGCTTCCTGGAGAGCTACCTCTTCTCCACACACGT
GCAATACTAGAGCCTTACCTCACTCTCTCAGAAGAGCTTTCTCATCCAAAGCTTAATCTAACCCAAACCTCCATCCCCC
TTTTGTCTCACCACCAGACATATGAAATGGGTTTCAGTTTGTTTTGCTTATTTTCTGCCTTTAGTGAGGATAATGTGTG
CCTGCCCAGTGCACAACAGATACCCTTACAGGGTGGTCTCAGCAAGGCAATTACATGGAAAATGGGGCTGATAGATTTT
CCTGTGATTTGTACACTCCTCTATATCTGTCCCTGGTGCCTTAGTGCAGTGCCTGGTGACCAATATATAGAAATTGAGT
GAACGAATTAATGAATGAACAATTGGAGTGACCATTTAAAATTTAAATCTGATCCTATCACTTTTCTTGGAAAAAATCA
GGGTTGGTGGTCTTGAGAAATGACTTAGCAGTTAAAAGCACAAACTCCTGCTCATCTAGGGGGCCCAAGGTTGGTTCTC
AGTGCCTACACAAGGCTCGTCAAAACTAATAAAACTCCAGCTCCAAGGAACTTGCTTCTCTCTCTCTCTCTCTCTCTCC
CTCCCTCCCTCCCCTCCCCTCCCCTCCCCCTCTCTTCCCCTCCACTTCCCCTCCCCTTCTTCTCCCTCCCATTCCCTTT
CCCTTCTCTCTCTCTCTCTCTCTCTCTCTTCCTCTCTCTCTCACACACACACACACATTTAAATAAACCTAACTTTAAA
TAGAGAGAGGCAGGCAGATCTCTAGGAGTTTGAAACCAGCCTCGGTCTATCCCTGGCCAGCCAAGGGCTATGTAATGAA
ATTCTGTCTCAGAAATAAAATAAAAATTAAATCAATTTCCTTCCTTCCTTCCTTCCTTCCTTCCTCCTCCTCCTCCTTC
TCCTCCTCCTCCTTCTCCTTCTTTTTAATCAGCGAGTGGTTGGCTCCACGTCTTACTTAAACCAAAATCCAGAATCCAC
CTTTGGAGCCTGCCTCATCTGGTCCCTTCAGGAAGAATCTCATACTTCCTCCCCAGCTCATTGAATTCTGCCAGGCCTG
ACCCCACCCGCCTCCTAGCCTCTGGCCACCTGCTCACTCCAGCCCCCTAGTCTTAGCTGGTGCTTCTTCTTTGTTAGCT
TTCCTAGGAGGCTCCAGTTCCTCCTGTAAAACTCAGTCCTAGGAGGGCCACTTCATCAAGACCTCTCCCAGGCTACCCT
ACCATGAGGTGCTGCAGCCTTTCAGACCATTCACTGCCTGCATGTGCTGGTCATGGACTTTAACTGCCTCTCTTCCCAT
TTGTCTTGTTCTCTATTGCAATGGTACTAGAATGCACGGTGCACTCTTGAGCATAAGCTGGTAGGAGAGGAGCAGGCAG
AGAGACTGGGGAAGTCAATGCCTAAGTAGGGGGAACTAATTTTACTGTGCACTATACAGGTTTTTCAGACATTGGAGTT
ATTTCCTTGGACCTTGTCAATGAAGACACTGATTGGAAAAAAAAACAATGTATCTTTTCAGCATCTAACTGGGCCAGGC
AGTCTTGAGCACATCTATACCTCATCCCATTTGACCTTCACAGCAATCTTAGAGTTCTTTCTCTTTCCAGTGCCTGTCA
TGACACCCATTCTCCACTGCTTCTTCGTTAATAGGATCTGGTTTTCTATGGAAGGAGAATGTGTCCAGCCCTGGTTGAT
TAATCAGACTCCCTTGCAGCTAGGTTTAGCTATGTCATTCTATTGTGGATGATGTGGACTAAAAGCAGTCTGTTGGTGA
TGCTGGGGTATTCTAAGAAAGCTTCTGCTCCATTTACATCTGTCTTCCTGCCTTAAAGTGGTGTGTTATCTGGAGTAGT
AACAGCCAACATGTAACTGTGAAAAAGCAAGCTGAAAAGTGAAAGCCATCTGACTAAACCTAGAGGACTGGAAAGAGGA
AACACTTTGCAATTATAGATACATTGTTAATTAGATGAACTAAACCCACCAGCAACTGTCATACTTTTTGCTAAATAAT
TGGATTAGGCACCTATTCGTTTAAGAAACCACTACCAAATTTGCTGTCACTTAAAGCAGAACACATCTGAAGTTAGTAA
GGTATGGTGTATATGATGCATGTATGTGCATGCATGTGTGTGTGTGAGTAGTGTGTGAGAGTGTGTGTAGTGTGTGAGA
GTGTTGTGTGTATAGATGTGTTTGTGCTCATGACACCACACTTAACAAATGTGTGTGTGTGTGTGTGTGTGTGTGTGTG
TGTGTGTGTGTGATCAAACTTAGGTTCTCACATTTGGCCAAGAGTTCAAATGGGGTAGTCAGGACCTTACCAGTTCTCC
AAATCTCTGGAACTCAAGCTTTCTCTACCCCACAGGCTGTTTCCCAGATGGCCAAGTCCTCACCAGAAGGGACTTTGAA
TATGAAAAGTATGCTAGAGTAGCTGGAATTCTTCATATAAATTCCAGGAAATCCAGGGATTCTGGACACCACATGAAAA
TAGAAAAGAGGGAACATCACACACACACCCCCTTTCTGAGCAAAGTGAATCAGACTTCACTTTCCTTGATGCTTGGTAA
GGTTGGGGGTGAGTATTGGAACAGGAGACACCAGTTCTGCCCACCATTCCTGCCAGAGCCTCGGGTGGAGGTGGACATG
GTGCCCCCCAAGGCTGGTAGAGTATGGCACGGAGGAGATAAAGAACCTATTGGCAGGCAGGGATGGGACAGGCAATCTG
ACACAGTGCTCTCAGTCAGAGATGTGGGGAGTTTGCCTGCTGGAGCCCATACTATCACCCATCGTATTTCCTGGCTCCC
AGAAAGAGAAAGCTTGGCTTTGCTAGTCACCGCCCCCTGCCACGATCCATACACTCACAGCTATGCTGGTTGTGGACCA
GGGACCAAGCCAATATCACTGTTCTCTTCATCCAGACAAGTTGTAAGAGCAACAGAGACTGCCAGTTTGAAACCAGGCC
TCAGCCATGTTATGGCTTCCTTCCACACAATGAATACCGGGTGTCTACTGCATGCCAGGTAATTTTGTAATCTCCTGGA
ACCTTGGCCTTACATTCTAGTGAGGACATAAACTGGACATACCAAAATAAGTGGAGTATGGTGTGCATCGGGTCCAACA
GCTGTAAGTGGAAAGAAATGGAGCAAGGACTGGGGAGCTGGAACAAAGAAGGGGCATGAGCAGAGGTGGGGGGGTCAAG
GTCAGAGTGACCCTTTGTGTGCTTTGTCTCCTATGATGGGTGTCCCCCTGATCTAAAGCAGATCAAGAGTCCTGCTGAG
TTCTGTCATTCCCCAAGTGGCCATGTCCAAGGCCCTTTCTGGTCCAGAGGAGGTCTGATGCAGCTGCCCCCCCCAATCC
AAACCCTCAAGGCTGATGCTAGCAGCTGCTCACCTTTGCTGGAGGGGGTGATCTAATTCACCCCTCAGAAGGGAGTACT
TTGCTCAAGGTCCCTCTGAGAATTGTGACCCCTAAACTTCGGGAGGTCCTGCGCTAGTTTGCAGTGTTTTCTGAGCAGT
CAACAAGCATCTCTATTTGTCTAGAATGGTTTCCAAAGCACCAGCTGTAGCTTAATCCTACGTTCCCCTGATTAATAGA
TTCCCTTCGTGCCAATTCCCATCTACAATGCTCAATACCATTCTAACATGGCTCATACTCACAGGTTAAGCTCTGGCCC
ATAGAGACCCAGGAACTCCCTCTTCTTAGTCTGAGATGGCATACCCCATGTGCCCCGCAATGCATGGGAGCCAAAGTGT
TTATGTTTCACTAGAATCTCCAAAGGCTGCTGGAGTCCCTGCAGCCATCCTGGGCAAGTATCTCCTGTTTTTGTTTCTT
CTGGCCAGCTCATGCCTGAGCACACAAAAGGTGTGCCACAGACCCAGCTCCTTCCTCCAGGAGGAACAAACCCCTGCTT
TGTCCACACAGCCACCTCCATGTTTGCGAAATGGAAAGAGGTTGGAAAATTCCAGCATTGGAGTGTTCAGCCTGATTTC
AGCCCTGTGAGTGGGAAGAAGTGTGCTTTTCAAACATTAAAAATTTCTCAACTTTTCCTCTGAAAGCAGTTCACAACTC
CCTGAGCACGTGCTCACAGGAGAATGAGGAAGGCCGAACCAGAGCGGAAGCTATGCAGCCTGGAAAATGAAGCTATGCC
AGAGGAAACACGGGAAGCTCAGCGTCTGTGGTCCTGGCTTGCCATTTTGCAAAGGATGCTTCATGCCTTTCCTGTATCG
ATTCTTCTTTAATTTCTCCCCAAATTCACTCACTCACTCATTCACTCACTCACTCACTCACTCACTCACTCACTCACTC
ACTCACACACATATTCATTCACTCACCCAATCACTTACTTAGTAACACCTTTACACACTCACTCATTCATACACTCACT
CATTCACACCTTCACACACACACTCATTCACTTATTCACTCACTCTCACACACATTCACTACATATACACACACTCATA
CACATACTTACATACACACACACTCACTTGCATACACACATTCAATCACTCTCACATATATACTCACTCACACACACTC
AGCCACACAATTCACTCATTTATACACTCACTTATTCAATCACTTTCACACATACTCACACACTCAGCCACTCTCACAC
ATATACTCACACACATACTCACTCATACACTCACACATACACACACTCACACTCACTCATTCACTTACTCACTTTCACA
CACTCATTCACATACACACACCCATACACACACTCATACACACACTTGCATACATACTCACAAACACACTCATATACTC
ACTTGCACACTCACACACTCAGTCACACACACTCACTCATTTGTATACTCACTTATCCGATCATTCTCACACACACACT
CACACGCATACACACAGCCACTCATTCACTTATTCACTCACTCTTACACATACACTCACTCAAATACACACTCACACAC
ATACTCACTTACACACTCACACTCACTAAGTAACACAGGTTCACTCATTTATACACTCCCATATCAAATCACTCTCATG
CATACACTCACACACTCAGTCACTGACACATATCATCACACACACTCACATGCACACACTCACACTCACTCATGCATTC
ACTCAGTTCCACATTTGCATACACTCCCTCATTGACACAATTCCCACTCATTCACACACACCCTCATTGACACACTAAT
CCACTCATTCACTCACACACTCACTTGGACATTCATTCATTCATTCTCTCATTTGTCCACTCACTCGTTCACTAACAGT
GATAGAAAGTCAAACATGGCTGGCAGCTTCTAACAGGGCTCCCTGTGGACCTCACTTCTGGTTTCTATCTTGCACAATC
CTCTCCCCTTGACAACCCACCACACCTAGAATCACATTCCTAGTAAAAAGAAGATGGTGAAAGTGACAGATTCGTGGTC
ATAAGGCAGTGCTAACGATACTAATTTCAACTTAGTTAAAACTACAAGGTTGGCTAGCATATGAAGCCAACGATGAGGT
GTTATAGCCTGACAGGCCATAGGACCTGTCACCTCAAAGGAGCTTAATAGGTTCAGACCCATGTCATGTGTCTAATATC
TGAAAGAACTACTTCTCACACCTAGAAGAACATTCCTGTATGTTCTAGAAACAACTTAATGAGAATTCTGGCTTCCTTC
AGGCAGCCACCAATCACAAAACAACTTGGATCTTCCTATGGGGGTGGGGAGGGATCACAAAAGTCCAAGTTTTCCTGCA
CTCAGCAAAAAATTATGGAACCCTCTGGTAAATGCCAAATGTTGTTCTACCTATTAGGGATACAGCCAGTGATAAACAG
ACAGAAGTCTCTGGTCGTGTCCAGGTTATGTCAAAATTGAGAAGAAAGCAATGGGTGGACAGCTGAGACAGACAACCCA
TAGAAAGGCAATGAGTTGACATAGGAGAAAGTGGGCAGCACAGAACAGGGACCCCTGGTGTCTTAGGGTTTTACTGCTG
TGAACAGACACCATGACTAAGGCAACTCTTACAAGGACAATATTTATTTGGTGCTGGCTTACAGGTTCAGAGGTTCAGT
CCATTATCATCAAGGCAGGAACATGGCAGCATCTAGGCAGGCATGGTACAAGAGGAGCTGAGAGTTCTACATCTTCATC
TGAAGGCTGCTAGCAAGAACACTGGCTTCCAGGCAGCTAGGACTAGGGTATCAAAGCCCACCCCCACAGTGACACACCT
ACTCCAACAAGGCCTCACCTCCTGATAGTGCCACTCCCTGGGCCAAGCATATTCAAACCACCACAGTCTCCCTGGGAAC
ACCATCTGAATCAGAACCCATCAACCACGACAGTGTATTCCCTATAAACAGGATAGAGGCAAGGACTAACTCCAGCAAG
AAAACCTGTGCTGACACAGTGCATTTCCCATTCTTAACTCACCTGTGAGGCCTGTTGGAACTGATCACAGGAATCCAAC
GGTAAGGGGTCTCTCCCCCGTACTTTCACCCTCTGCCTGGACAATGTCACTCAGACACATAGTCCCAGGTGGCAGGGTT
GAAACAGGAGAGCCATTCAATGGCATCCCCCTGACACTACTGAGAAGAGATGGTAGCTGTTTGGTGTTGGGGCATGCCT
TTAATCCCAGCACTAGGCCGAGGTAGGTGGAGCTGAGTTCCAGGCCAGCCTGGTCTACAGAGTTCCAGGATAGCCAAGG
CTACACAGAAAAACCCTGCCTCAAAAAAGAAGAAGAAGAAAAAAAGTGTAACATGTTTGTATTTGTGGCACCACATGTG
AGTGTGCAGGGTGTGTGCCCATGCACAGCACCTGGGAGTCTTCCTCTATGGCTTTCCATATTCTTCACTTGAGACAGGG
TCTCTCACTGAACTAGCTGCTCTCCGTTTTGGTTAGGCTGGCCAGCAAGCTCTCAGTATCCTCCTGCCTCTGCTCCACA
TCACTGCCAGGGTTACAGAAAAGCTCAGACAAGCTGTACTTTTTTATGTGAATGCTGGGAATTCACCCTTACATCCAGG
CCCTCTGCTTGCAGAGAAAGAACTCTTACTTGCTAAAACCATCTTCGCTGACTCAGATTTAAAATGACTTGTTCTGGGG
CCCGGGAGATGGCTTAGTTATAGAGCTTGCTGAGCAAAGATGAAGTTTAGAAGAAGTTCGACACTACTTTCATCAAAAC
AGCTAAGCGCATAAGGCCTATAATCCCAGTCTGGGGAGGTAGCGGAGAATTGGATGAGCCCTGGAGTCTTCAGTCTAGC
CAAATCGGTGAGCTCCAGGTTGAGTTGACCCTTATACCCCACACAGATGCGCACATGGATGCAAATGCACGTGTATGCA
CACATACACACAGATACACACACATGCACCCATCCACACACATACAAAGGTATTTTTAGAGATTTAAAAATCACAGAAA
AAGGCTGGCGTGGTGGCACACACTTTTTTTTTTTCTTTTTTGGTTTTTCGAGACAGGGTTTCTCTGTATAGCCCAGAAC
TCGGGAGGCAGAGGCAGGTAGATTTCTGAGTTCGAGGCCAGGCTGGTCTACAAAGTGAGTTCCAGGACAGCCAGGGCTA
TACAGAGAAACCCTGTCTCAAAAAACAAAAACAAAAACAAAAACAAAAAAAAAAACAAAAAGCAAAAAACAAAAACAAA
AAACAACAACAACAAAATCACAGAAGATATTTAAATTCAAAATGATATGTTTATATATATGTATGGTTTTATTTGTTGC
ATTGTGTTGGGACAGAGTCCAGGATGGCCATCACACCCAGCTTCAAAATGTCAAAGGCATAGATAAAGTATGGTGGCAA
CTCCAAGTTGCTATTTAATGTGCCTTATATTACAAGAGAAAATACCAATCTCTGACCTATGGGGTGGTAAACAGACATA
CAAGACAGTCAAAGCATGCTGTCCAATATCCCACTATACCCTGGTCTAATATTCATAGCCAAAAAATAAACATGCAAAA
CAGTATCTCATTTAAAAAATTTAAGAAGGATTTATATTTAACAAGTGTGGCAAGCTGAGATTCCTTTTCTCTTAAAATA
TTTCTAGAACTATTAACTTACTAGAGAACTACTAACTTAGTAAGGAACTGGTCCTTTACCAAATCATTGCCATAAAATA
TCCCCCTGTGGCTGTGGATTTGGTTCAGTTCGTAGATTACATTCTCAAGGCCCTGGGTTCAATCCCCAGCACCGCCTAA
ACCAGGCACGGTGGCACACACCTCTAACCCCAACACGGAGGGAGTAAAGGCAGAAGAATAAAGAGTTCAGAGCCATCCT
CGGTACCTAATGGAGTCCGAGTCCAGTCTGGGCTACGTGAGTCTCAGAACATTTTTTTTTTCTCTGTATCATCATACAA
GAGGGAGATGGGACCACTGACAAAGCCGGGCAAGATTATCATCAGCCTCGGCTTCTTCTGCTCCTGCATCATGAGGGAC
TGGATGCTTATTATTATTATTAATTATTACATTTATCTGTGGGGGTGGCGTTTATGCATGTGACATGGTACATCTGTGG
AAGTCACAGGACAACTTTTGGGAGTCAATTCCTTCCTTCTACCATGTGGGTCCTGGGGCTGGAGCCCAAGTCATCAAGT
TTGATAGCCAGTGCCATTCCCTGCTGGGCCATCCCACTAGAGCAGAGGCATCTTGTCCTTGCAGTTGCTCCGGGAAGTT
CGTCTTTGGATTGTGTGTTAGCCACTCTGACCTGTTCCCCTCCTGCTTCGAGTCACTGTGTTGTTCTAATAAAGCAAGC
AGCAGGGGAGAAAGCTGTGGGCTTGCGTTCTGGCCCCAATTCTTACTCTGTGGCTTTGATCTAGTTGCTTGGCCTCTCT
GTGCTTCCTTCTGCTCATCTGAAAACTGGAAATACCTAATAATGGTTTGTTCACACTCCCTCCCCCCTGAATTTTCCAC
CCCAGCCTGCTCTTTCTTTTCCACTTTCAGGAGCCTGGGTTTACATGACAACCTCAAAGATCCTTTCTGCGTCTTCTAC
AGAAATGACCTTCTTGAACTCTGTGGTGGTGGCGGTGGTGGTAGGGGGGCATGTACTAGTTGTGAGGTCTGTGGTGGCA
TTGATAGCCTCCGAAAAGCCAGCTTGCTGGCTTTCACCACTCCTGTTACTTCTCAAGCTTCCGGACTGAGAAGTGACAC
TTTGTATTCTTAGCTTATCTGTTCTCAGAGAGGTTAAATCATGGGTCATTTGTCCAAGGTTGCCCAGGGAGTAAGCCCT
CCATCTCCTTCTAAAAAAACCCAAAACAACCAAGAAGGCCAGGTAAAGGCACCTGGCAACAAGCCAAACATCCTGAGTT
CAATTCCCAGGATCCACAAGAGGGAAGAGAGGGCTGATTCCTATAAACTGTCTTCTGCTCTCCATGCCTGTACTGTGTG
GAGCACACGCACATGTGCAAGCATGCACACTCATGCATGCATGCATGCACAGACACACAGGCACACACAGAGACATACA
TACACATGCATGCACACACACTAAACAATAAAGTAATGGTTTTCTAAATTTGTTTTTTTTTTCGAGACAATGTTTCTTT
GTATAGCCTTGGCTGTCCTAGAACTAGCTCTGTAGACAAGGCTGGTCTTGTGTACTGGCTGGTTTTCTGTGTCAACTTG
ACACAGGCTGGAGTTACCACTGAGAAAGGAGCTTTAGCTGGAGAAGTGCCTCCATGAGATCCAACTGTGGGGCATTTTC
TCAGTTGTTGATCAAGGGGGGAGGGCCCCTTGTGGGTGGTAGTCCTGGGTTCTATAAGAGAGCAGGCTGAGCAAGCCAG
GGGAAGCAAGCCAGTAAAGAACATCCCTCCATGGCTTCTGCATCAGCTCCTGCTTTCTGACCTGCTTGAGTTCCAGTCC
TGACTTCCTTTGGTGATGAACAGCAGTGTGGAAGTGTAAGCCAAATAAACCCTTTCCTCCCCAACTTGCTTCTTGGTCA
TGATATTTGTGCAGGAATAGAAACCCTGACTAAGTCATCTTGAATTCACAGAGCCACCTGTTTCTGCCTCTATCTCCTG
AGTGTGCAGGGATTAAAGTTTGCCACCATGCCCGGCTGGCTTTTTTTTTTTTTAATGGTATGTGAATGATGAATTACCC
CAGCCCCATACTGGGTACTTAAGAAGGGTGCTCAATATGGAGCTGCGGTGATTGTTTAGCGGGTACAATGCTTGTTGGG
AACTCCAGCTCTCTCATAAAAACTGAGTATAGAGGCAACCTCAGCACTTAGGACAGAGACAGGTGGACCCCAGGGCTCC
AGCACCCATAGGGTGTCTCACAACTGTGTCACTACAGTTCCGGGGCAACAGACATCTTCTCCTGGCCTCCAAGAGTACC
AGACATACATGCAGTACCCACAAACATGCATACCTACAGGCGAAACACCCATACATAAAACATAAATAAATAAATAGTT
TGGGCTGGAGAGATGACTCAGCGGTTAAGAGCATTGACTGCTCTTCCAGAGGTCCTAAATTCAATTCCCAACAACCACA
TGGTGGCTCACAACCGTCTGTAATGGGATCTGATGCACTCTTCTGATGTGTGTCTGAAGACAGCTACAGTGTACTCATA
TAAAATAATAATAAATAACATTTTAATTAATTAATTAAAAGAGAAAGAGTGTTTGTGCTGGGTGTATGCCTTTGATCCC
AACACTTAGGAAGCAGAGGTATGCAAAGTGAGATCCTATCTCAGACAAACAAACAAACAAACAACAAAAACAAGGCAAA
ACAAAAACAAAAACAAACCCTCCCTCTTTATTGGAATATAGTTATATAACTCTACACACTTGCCAAAGGTCATCAAACT
GCACTAAAATGGTCAGATCTCATTATTTTCTACTTACTATTACATGCTTTTATATTAAATTCTACCGTATTACACATGC
AGCTTTAACACTGTCCAAACGTCCCACTAATGATCTGCCTGTCCCCTCTACTCTCCTCCTCTGTCACCTCCCCTCACCT
CTGACCTTCCAGGGACAAGCCCCCTGTGCTTCCCCCAGATCAATTTCTCTGTTGAAGGCCAGATTCCAAGTCACTTCCA
GTGCTATTCACTTTGAATATAGTCTGGGTTTGAGAAAATAGCTGCCTGTCTTGGTCAGCGTTCCTATTCCTGTACAAGA
CATCATAACCAAGAAGCAAGTTGGGGAGGAAAGGGCTTATTCAGCTTACACCTCCACATTGCTGTTCATCACCAAAGGA
AGTTAGGACAGGAACTCACACAGGGCAGGAACTTGGAGGTAGGAGCTAATGCAGAGGCTCCGGATGGGTGCTGCTTACT
GGCTTGCTTCCCCTGGCTTGCTCAGTTTGCTTTCTTATAGAACCCAAGACTACCAGCCCATGGATGGCACCACCCACAA
TGGGCTAGGCCATCTCCCATTGATCAGTTATTGAGAAAATGCCTTACAGCTAGATCTCATGGAGGCATTTCCTCAAGGG
AGGCTCCTTTTTCTGTGATAACTCCATCATGTGTCTAGTTGACACACAAAACCAGCCAGTACACTGCCAAAGGGTTTGA
ATATACAGGCTGGGGAGCTGGGGCCGTCATGTCTTCTGCACAGGGTTAGTCAAGGCCCAGACTTCACGTGGGCATCACT
GTTCACTGACCCTCTCTGGAAATATCTTGAATTCTCTACTAAGATGATACGTTTATTGGTTTGTTGGTTTATTTGAGAC
CAGGTTTCTCTGTTTAGTCCTGGCTCTCATGGAACTTACTCTGTAGACCAGGCTGGCCTTGAACGCAGAACCTTCTGAG
CGCAGGGATTAAAGGTCTGTGCCACCACTGCCCAGCAATGATAACTTCTTTACTCTAATTCATCTACTCCCTAGTTTCT
TTTTAGAGTGAGTCTTATTTTTTCCCACATATCCTCACACATATGGCTTCTTTCCTGCAGAGACCTGCAGTCTCTTCAC
TCAGTAGTGTGCTTCCCAGAAACCGTTTCTCTGAGTCTGTCAGGAAGGTGTGCTAACCACCCACAAAACACACCGGGAG
AACACCGGGAGAAACTCTGTACAAAGCCAGGCCTTATCTTGTCTCCCAAGAGACTCCAGCCCCAGCCCAGCCTGGATAA
TCAGCAGAACTCTTCCTAAGAGGTTGAAAGGGGCTCAGGAGCTGGCCACAGCCTGAGGAAAGCAAAGGGCCTCTTCACA
TGTTTGCTCCAACTGTTCCTACGTTTTATTGAAGAGAAATTTGCAGGCGGTGTCAGGAGTTCCCTGAGTTGCAGGTTCA
ACCCTGGGTTTCTAAATTTTTAGGCCTGAAGGACTCTTTCTTTCCAAGGTTATACCTTTGGCCTCAGAATTCTGGAGAC
GTGGAGCAGGTACCACACATCTCTGTAGTCCCAACAGACATGCCTCATCCCTGGGCCTGTCCTTGGCAGAGCGATGGGA
ACTAGCGATGGGAACTACCTCACACATGGAGGTAGTTCACGCTCTGAGGTAGTAGAACCAGCCCAACCACTCTGACTGA
GCTTGCCAGCTTTCTGTCCTGACAAGGCCTGGAATGAGCTAGCACCATGGGCAAAACCAAAAGGAGGCTGCCTGGGAGG
CTGGAGCGGGAGCAGCGCCTTCACGCAAGGCAGAGAACAGGAGGAACAAACTCTACCCCTGGGCCAAAGAAGACCTAAA
GGCCTCTCTGGACCGGAACATCCTGGAACGCAGGAAGCAGATAAAAGAGGCTCCCACTTTCTCTCCACTGTCGGGTGTC
CCCGGGGAGGACAAGGCCCTAACTCAGCAAAGCCTAGGACAATCTCAGGAAATGGAGGCGCCGGGTGCTAGGAAGGGGG
AAGGGGTGAAAAGAGGCTGCAAGCAGGAATGCTGATCAAGCTCTCCAGGGTGCCCTCCTTCCGGTGTGAAGAGGCAGAC
CCACATCTCAGCCATGTCGCTCCAGAGACACTGCGGCAGCGGCAGCGTGCTGAGGGCTGCCCAGCATGGCCCCTCTCCT
GCTTCGGCTTTCTCCCAGCTTGCTCTCACGTCTGTCAGCCCAGTTCCTTCCTACATCAGCTCAGTTTCCAGAAGATTCA
AAGCTCACTCCCTTCACCAAAAGCACAGATAAGAAATGACCTCCATGGTCTCCTCACTGTCCCCGAGGCACAGCCACGG
CCTTATTCTGTTTTTGTTTTGTGTTTTCTGAGAGACTCATTGCTATTGCTCTGACATGAAGCTCCCATTACTGCTAAAG
TCATCACACTTTTGTGTGTGCATACCCTCGCCTCTGTGTGTGTGTGTGTGTGTGTGTGTGTGTGTGTGTGTGTGTGTCT
GTCTGTCTGTCTGTCTGTCTGTCTGTCTGTCTATCCAATGGACCCCTAAGATACACTTGTCTCCCAGCCCCCAGTGGCC
TTTCCAGGCTTTTACATGGGTGCTGGGATGCCTAAACTCAAGCAACAATGCTTTTGTGTGGAGACTTTACCTCCTAAGC
CATCTCCCAGGCCCTAAATGCCTCCCTCTTAGAGAGGACCGGGCCGCCAAGAATCACATTTGAGGGAAACCGTAACCAT
GAAAGAGAGAGAGGCAAACAAACAGAAACAAGTGAACTCCAAGGAGACCAGGCAATGTGGACGCAGGCAGAATGAAGAA
TTTCTACTAGACTTTCAACTCCCAGAGGACTGAAGATGAGTTGAGAAACAAGAAGACAGTGTTAGGAAAAGGGGATCGA
ACAAGAACTATTCTAAAAGTTCAAAGTGATAGCGAAATACAGAAAGGTTGGAGTAAAAGAGAGAAAACTTCTAAGAAAA
GAAAGATACCAGGTCAGGAAAAAAAGACTTAAAAGTTAAGCAATCATTTTTTGGAAGGTTTGACATCCAAATGACTGAA
CTTTCAGAAAAGAAAAGGAAGCAACACAGCCAACCATATGTGGCGACTTGTACCTATACTGACCCTATCTATAATCCTG
TCACTATCAAGGCGGAGACAGGAGGATCTGTGAGCTCAAAGCTAGCCTAGTCTACATATTGAGTTTCAGGTCAGCTAAG
AGCTATATAATGAGACCCTGCCAGAGAGAGAGAAGGGGGGGGAAGGAGGAGGAGGAGGGGGGAAGAGGAGGAGGAGGAG
GAGGAGGAAGAGGAGGAGGAAGAGGAAAGGGAGGAGGAGGAGGAAGGGGAGGAGGAGGAGGAACCTGTATGAGGCCATC
CCAGAGAGCTTAGGGACATGAAATATGGGATGAAAGGGACCATTTAAGGACCAGAGCAAAGGATAAAAGCACCGGAAGA
CATGCCATACATATGCCAGGGCACCAGATGTGTAGAGAAATCCCCAAAAGCTTCAGGGAAGGAGAGAATGGTTTACACA
CAGGGATGTGCAGCCAGGATCCTGTTTTCCTCCGTGGCAGCAATGGGAGGAAGACAGTGAATAACTCTTTCTAAATATG
GGGGTTGGGGTAAAGATACCTTGGAGACAGAAGAGCTGGCTCAGCAATTCAGAACACTTGCTGAACTAGAAGAGAGGAC
TTGAATTCAGTTGCCAGTGCACACATGCACACATGAAGCAGCTCACAATCTGCCTGAATCAGCTCCAGGGGATCCAATG
CCCCTTTCTGCCTCTACAAGCACACACATGGCACACACACAAATAAATAAAAGTATTCTTATTTATTTATTTTATATGT
ATGGTTGTTGTGGTTTGAATAAGAATGACCCCCACAGACATGCATTTGAATGCTTAGGGAGTAATGTTTGAAGATATGG
CCTTGTTGGAGGAAGTGTATCACTACCTGTGGGCTTTGGGTTTAGTTTAGTTTTGTTTTTTCAAGAGCGACATTGTTTC
TCTGTGTAGCCCTGGCTTTCCTGAAACTGATTCTGTAGACTAGGCTGGCCTAGACCTCACAGAGACCTACCTGCCTGTT
TCTGCCTCCGAGTGCTGGGATTAAAGGAGGGCGCCTACACTGCCATCACGACCACCCATCTGGCTTTGGGGTTTCAAAT
GCCCAAGCCAGGTCCAGTGGCTCTCTCATGCTGTCTGCAGATCCAGATGTAGAACTCTCAGCTCTTTCTGCAGCATCAT
AACAGCCGATGTGCCGCCATGCTTCCCAGTGTGATGAGAATGGACTAAAACCCTAAACCTGCAAGCCAGCCCCAACTAA
ATGTTTTTGTTTGTAATTGTTGCCACAGTCACGGTGTCTCTTCACGGCACTAGAAGAGGCCAGAAGAAGGCACCAGGTT
TCCTGGAATTGGAGTTACACATGGTAATGAGCTGCCTTGTGCGCGCTGGAAATAGAATCCCAGTCTTCATGAATAGCAG
TCAAGATGACTTTAACTGCCAAGTAACCTCTCCGGTCACACTTCCTCCAACAAGGCCATACCTTCTATTGCTACTCCTT
AAGCATTCAAATGTGTGTCTGTGGGGACCATTCTTTATTTGTTTGTTTGTTTGGGTTTTTTTGTTTTGTTTTGTTTTTT
TGTTTTTCAAGACAGGGTTTCTCTGTATAGCCCTGGCTGTCCTGGAACTCACTTTGTAGACCAGGCTGGCCTCGAACTC
AGAAATCTGCCTGCCTCTACCTCCCAAGTGCTGGGATTAAAGGCGTGCGCCACCACCATCCGGCCTGTGGGGACCATTC
TTATTCAAACCACAACAACCATACACATTAAATAAACAAACAAACAAACAAACTTTGATTTGTGTGTGTGTGTGTGTGT
GTGTGTGTGTGTGTGTGTGTGTGTTTGGTTAAAGGTCCTCTGAATCAAGAACAGCTTCTTTAAAATTTGCTACCTGGGG
ACTGGAGAGATGGCTCAGTGGTTAAGAGCACTAGCTGCTATTCCAGAGGTCCTGAGTTCAATTCCCAGCAACCACATGG
TGGCTCATAACCATCTATACATAGATGGAGATCTAATGTCCTCTTCTGTCATGTAGCATACATGCAGGCAGAATCCTGT
GCCTTTAAATTTGCCCTCTGCAAGTCTGTTTTTAGGGATCCTACAAGACAGCAAACCGAGAAAGATGAAGGCAAAGAGT
CCAAAAAACACAGGACCAAAGAGAAGTAAATTAAGGGGAACCCTGAAATAACAATGAAGGGGGGATCTCAAGGAGAATA
CTGTCGGCTGGAGCCACTGTCTATGGTGTCCAGGGAGTGTGCCACCAAGACTGAGCAGGCCTGCCTTTGAAGTGGCAAA
GCTTTGAAACCTCAAAGCCTGCCTAGAGTGACATACTTCCTCCAGTAAGGCCATACCTCCTAAACATGCCCGAAGAGCA
CCACCAACTGGGGCTCAAATACTTAACACAGGAGCCTCTGGGGTCCACCCACATGCAGACCACCAGAGATGGAGATTCT
TTCAGCTCTGACGGTGCCTCTCAGGGGGCGCCCAGGACATATTTGAACAAATAAATGAGATCTGTGACAGAATAGATGC
CGGGAAGGGTGAACAGGGGAGTGGCTGTGTTTCATAAGTGTCAACCCTCTTTGTCTTGAAGGCTGTGCTCCTCTAAGGC
CACAGAAAACCCAGGAAAGGCTGAGAAGGGAGAAAAAGTCAAAAATCAAAATTGAAGCTATTAATCTGTTTTCTAAAAG
ATCTGGGTGCTGGGAATGGTGTCACACATTTAATCCCTGCACTCAGAGGCAGAAGCAGATGGATCTCTGTAAGTTCGAG
GCCAGATTGGGGTCTATGTAGTAAATTCCAGGCCAGCTGGAGCTACACAGTGAGAATGTCTTTAAAAAAAAAAAACCTG
GGAGATGTCTAGCCCTGAATGAAACCTTGTCCCAAACACTACTCTGTCACCAATACCTTACCCCAGATTTAAGACCCAC
CCTCCAAGCACTTACCCCAACAGCTGAGATGCCCAACACTAGGGGGCACTCTTCCATCACAGTGGCCCTGTCCTCACTC
CTCCTCTAGGGGAAAAAGTGGAGGCTCTTTTCTGTAAAGACTGACACCCCAGAAACTCCTCATGTTGGATGCAGCTTCT
TGTCACGGCTAGAGAGTCTTCCCAGACATCAATGGCTCATCCACTAAATCATTATCCACCATTCTTAGTTTCACAGCAA
GTAGAGGTGTCAGGGGTTAAATTCATCTGTCTTAGTTCAGGGGCCTGAAGGTGGCAGCTCTGGGCTCCCTTCCCCATCC
TCCGTGTGACAGCTATCTAGAGAAGAATAAACTAAAGGGCATCCTTCTGCAGTTTCTTCTTCTATGCCAACATCCATTT
GCCATGACTTCCATGTGGAACTAGGTTCATGGTTGGTCTGGCCACATGTACACCCACACGGGGAAGGAAATGGAGCAAT
GGGCAAAACTCCTCTCTCCTTACCATGGCCATGGATAACCCCACTCCTGCAGCATCACCAGACTGAAGACCCACAGAGG
ATGGCCAGAGGCTCGAGGAGTACACGCAGCCCGGAAAGTCCAGCCCCTTCGGTTGTAGAAAAGCCACTCCATACCTTCA
CAGACACGGGGCCTTAATTCACAAATGCTCCATCTTTTGAGGATTTAACCCCCGAGGACACAGCCCCTTCCCAGCTACC
CTATGTGAGCCTGCTGGTCTGAGACCTGGGAAGAAAAAGAGGAGGTCACAGTGATGGAAAGCTGGGGATCTAAAGCAGA
GGTAGGGGCCATTGAGGATGAGCAGAAAGTGTGCAGAAAAACAAAACAAAACAAAACAAAACAAAACAAAACAAAAACC
ACCAAAGGCTCTTGCTTGGCTCCTCCACCAGTGGAACAGAGAAGGGTTGGTATTTTCATCTCTGTGGCACTTACATCAT
CAGCTCTTCTAGTGTTTTGTTTCTGGCCCTGGATACTAGTCGGCTTCCTGTTCCCATAACCTGTCAAGTAGAGTGTCAA
GGGAAGCTGGGAAGGGGAATTTCACAACCAGCTGGTTTCCTTTGATGTTGCCACGAGAGCCCCAGAGTCCCTCCCCCCA
CCAACCAACCATTTGGGAAGTAAGTAAGCAGGTCTCTTCTGGGTAGCTCAAGGCAGGGGGCTCGGCAGAGGACCTGCCC
TCACATTCCAGCAGGGGGCTGGGAGGTGCAGCTGCCTGATCAGGATGAGGAGGGAGGAGAGGGTATGGGCATCTGAACA
ATTTGCTAAACCCAGAACACACCTCGGATGCAGCCACACCCCTGTGAGCTGAGCTCTCCAAAGCAATGGCTTTCTCTGA
GAACTGGGTCAGCTTTGCAGCTATCCCCGGGCAAGTTTCCAAACCCAGCAAGTCCCAGAGTCATCAGGGAAGAATCGTT
ACCTGCAGGGGGTGGGGAGAAATCAGGGAGAGAGAGACCGAGGTGAGGTAGGAAGCACCTGCCTCCCTACTTGGGTCTC
TTTCTCCCTGTTCTCAGTGAAGATGGATGTGCAAGCAGGCTGGCCACCCCAGGGCCCACCAGTGTTTAAGCTCCCCTGG
GACATTTGAGACAAGGCCACGGTCTCAATCCAGCACCCTGCAGAGCCAGGTGTGGTTGCCAGCTCAGGCAGATTCCACT
GAGGCCTCAGGCCTGACCTTCTTGCAAAGAGGAGAAAAAAAAATGTGTGTAAATTCCATCTGAGACTCCCTCCCCAGAC
TCTGTCCCTTTGAGCCACATACCTAAACTGACTCAGGGCTTGTTTTGGACTGAAGTAGGCTTGCCCACCCCCCCAAATT
GAACCTTTGGATTCTAGCTGCCTTAAACTGGCCCCTTTCTCAGAGTATCTCAGGAATGCTTGTTAGTCAAACATTTGTT
AGGTGTCAGTGAATCCCAGGACTGCGCCATATGGCCTTTCCCCTGATTTTGTAATGCAGAGCATATGTGCCTGCACCTA
GTAGGTGTCTCTCCACCAAGGGTTTCCAAGAATGCTGCCCATGAAGTGAGGGCACCTGGGAATCCCTTCTCTAGTCTTT
GTCATAGGCTCCTACCGCAGCCAGCGGGGACAATGGTGTGTGTGTGCGAGCCACAATTTCTCTTTGTAAGGTAGCCTTT
AGCTTGGCACATTTGTTATTTTCTCATCTGTGTCAGACACAAACAGAATCTAAAATGCAATATTTGGATTTCAAGTAAA
ACATATACACATTTTTTTGTTTTCTTTTTAGGCTTTTTGTTTTATCTTATATGTATGAATGCTTTGCTTGCATGTACGG
TCAAACACCATGTAGGTGCCTCGTACCAGCATAATTTAGAATTGCCTATCAGATCCTCTGGAACTGGAGTTACAGATGG
CTGTGAACCACCAGGTAGGTGCTGGGAATCGAAGGCACATCCTCTGTAAAGGCAGCAAGGGGGGTTAACTCCTGAGAAC
CCCTCCCTTTTAAAGGAAAGCTTTATACAAAAATAACCACATCCCTGACTATTGAGTTTGAAAGGTTTCTTGTCCTTGG
TCCCCTCCAGCAAACTTAGGAATTGAGAACGCCGAGGGAAGGAGGGGGTTGGGCCCGGCAGTCCCGCAGCAGAAATTGG
TCCTGATTCGAGGTGGATGGGACTGAGGAATGCACGCTCTAACCAGAAAGAGGGTGGGGGGGGCGGGGAGGGGAGGGAG
TCAGAGCAGCTAAGCTGGAGGAGTCTCCTGGGGAAGTAGAAGGGTCCAAATGACAAAGGAGTCGATTCCACACCAAAAG
CCAGAGAAGCGGAAGACAAAGAGGGTTGGCTAGGTGTAGACGAGGTGGAAAAGACACTGAAACTCGGGACAGGTAGGTG
GAAGCAGAGACTCTCTGCCTTGTCAGGTTACGGAGACCGGATTTTGAAGACCAAGAAAAGGGACCTGGCTTCATTGGCT
ACTCTCTGTGTGACCCTAGGCAAGTTGTTTAGACTCTCTGAACCTTGGTTTCTTATTTATTACAGACATGATAAGAGCA
CCGTCGGAGGGTTACTGGAGTCGGATGGCCGAGTAAAAAGCAAGTGGTGACCCGCCGCGTGCTTGGCTTAAAGATGAGC
GGAGTTAGGGAGGAGTTGGACCGAATGCCCAGTGAGTGGTTGATTCATTTAGTTAGGTAGTGGGTTAAATCCACCAGAT
TTTCAACCCAGATTCACACACTTCCTGTAGAGGCAGGATTAAAAGAGCTGGCCAAGGTGTTTGTAAACAATAAAAGTGC
AATTCAAAGTTTGCCGCTGGGGGGTGAAATAGTAGGAGTTAGGAAAGAGGCTGGGCAGCGGCGGGCCGAAACATCGTTT
CGTCTGCAACACTGTCAAGGCTGGGCGGATGTGAACTGCTGTGCAGTCCTCCCGCCATTTCCAAAACGCCACAGACCCT
TCTTACAGCCACCATAGGGGCGTGAGAGGCTGATCCCTGGAGTCGTCCCTCGGTGCCTGTAGGAATGGAGGGTGAGAAC
CCGGTGCGGGCAGTGGTGGGGCGATCTTGGGACGAGTTGGTTAAGACACTCCCAACAGCTAGGACACAAAGCAGGGTGG
CAGGGAATGAATGCCGCACGGCCGCCAGAGCCCAGAGTGGCAAGGGGACAAGGCTGAGGCCAGCCCAGCGGCCAGCCGC
AGCGCCGCCTCCCGGGAGGAAGGCGGGGGCTGGCCCGGGGAGCGGAGGGAGGCGGAGAGCGGAGGAGGGCGGCGCGCTG
AGAGGTTATTTGTGGTTCGCTTTGATCCCGAGGGGGAACCTGAAACTCTCACATTCCTGGCATAGCAGCCGCCTCCAGC
GCGGGCTGACCTAGAGGCTGCGCACTGGGGCGCGAGCAAGCAGATCATCGGCGCCACCGACTAGTGCGCACCTCCGTTG
CTGACTGTACCTAAGCCGAACCGGGTCTGCGTGCGCCGGCAGCCGCGGGCCGCAGCGGTAAGCAAGGTGCCGGGCACTC
CGGGCAGTGCGCGAGGCCGGCGGGGACGCTTCCCAGCAGCAGCGGGACACCGCGATCAGTCCGACCCTTTCTGGAGATC
GGAGCTGGGGTGGACGAGCCTCCCCGGGAGCGGGAGGGGAGACTGTGAACCCTTTCGAGGATCGATCCTGGGTGTCTAG
CCTAGACTGCTCGCGCTTTTGTGGGGGTGAGGACACCATTCTCCGACCCACTGGGGCTGGAGGAAGGACAGAGGATCAG
TGTTTGGGAGTGTGCGTCTCGCGTGCGGGGCAAGTGAAAAGCTGCGGTAGGCATATCTCGCTGAATTATGAGGTTACCG
TGGCTGCTTTGTCTGGATTGGGGATACAGGTGGCTTTTACCCTCAGCTAGCTCAAGAATTCCTCTTTGTCTTCCTTGGA
AAATCCTCTGCGGAGCCACGAACTGGCTCTCACTTAGAAAGAATGCAGCCTGCTGTCCAGTCCGGTGACGTCAGCGCTG
AAGTATTTGGAAAACAAAGAGGGTTAGGGAGAGAGGCGTACCCGCGATGCTTAAAGACCTCTCGCGGTTGCGGGTTTTG
CTCGCCCGGGGCGCTCGGGCAGCCACCGGTGCTAGTGGTCTGCCTCGGTAGAGGTGAGTAACGCCGGGACCCTGGACTG
GCCTGGTTGACTTGGAGACTAGCGTTGGTTCCTTTTGCTGGAGTGAGCCCAGGCCAAGGCCAGAGACCCGTGTTTGCTT
AGAAAGGTGGCTGGTTTTCCGAGTGCAGCGCTCCAGTGCAGCCCAGGTACAGCGCCCGTGTAAGGAAGTTGATTTTCAG
TAAGTGCTCTTATATAAGTATTTGAAAGAAAGATTGTGCATCTAGGGGATTCGATTGGGACGTTTGTGCGATGAAAGGC
CTCGGAAATGTTCGGTGCTCCGAGAGCCTGGCTCATAGTCGGCGCGCCTGGAATCTGCCGGGAAGGCTCAGCATTCCTT
CTAGCCGCTCCCGGATCCTTAGCGCGAGTCAGCCCAGACAGTGATTAACTTAGGAAATACCGCGTAGAAAAAGCCGCGT
GTGAGCAGACTCTTCAAGTCTTACACATTGCAGGGTGCAGTTGGGGGGGGGGGGGAGGATTAGTTGCTGGCTTGGGTAT
CGTCAGGGCTCATTACCTTTCTCCAGCTCTGCCAACATACCATTCCCAAACTGAGGTAGGACAGGGGGCTAGCATTAGT
ATGGCACAGAAAGGGGCCACCACCCCCTTCCTTTGTCTCCCCCCTCGCCTCATTACCCCATCAACTGGCATAGGTAGTT
GTTACTAATATCAACAGAGATGCAGAGGGATCATCCCCTGTGTGCCTCTAGCATACACGTAGGGAGGGGTTTTTCTAAG
TAGCAAATGTGTGTGCCAAGAAAAGAGGTTGGTGGTCATGGAAAATGTTTCCCTGGCTCAGTTACTGCAAGCTCCCCTC
TGCCTCCTCACCAATTTCCATGGGGCTTCTTGTGCTGCTCACCTTGCAGAGTGGCTGCTAAGGTCATCTGTGACAGGGA
GACTCAGATTTATTTTATCAGCAGCCTTTGAGCCCAGGGTCTGGCTCACGCGTCTTTATTCTAAAGAATCAATGGAATT
ATTTGCTTAGGGCTTCTTTCTGCTGGGCTACATTCTTTCTTTACCGCCTGCCAGTAAACTGGGAACCCTATTGCTAAGT
GGTTGAATTTGATGGACGCCTGTCCTACAGTTTGCCCATGAGATTGTTTGGGGTAATGGCTGACTGCCGGGGACTGTGA
TATGAGATAGCCTTCTGGTTTTCTGTTGTATATCTGTAAGATCAGCTAAATCTCCATAAATGTTACAATGATAAGCATT
TGCCAAGGATTTATAGCATACCAGGCGCTCAGCTTCTTACATTTCAACTCCAAGAGACACACTGTGTGTGTGTGTGTGT
GTGTGTGTGTGTGTGTGTGTACATATATATGTATGTATATACATATATGCATATATATATTTATATTAATGGCAAACTA
AGGATCAGAAGCTCAGTAACTAAACTTAATCAATAGATGGCCATATTAGCACTTGCATCTGGGCCTGTGTAAAACCACC
CACCTACCCACCCAGCCTCCTCCTTCATCCAGAGTGTTCCTGCAAGTGCCCCTCCCTCCTTTGTTTGTGCTTCCTTTGA
CTGCTATTCTTTCTGTCTCTTAGGTGCTCTGAGACCAGGTGCCTGCTGGCCATTGTCTAGGCAGGTGTGTGCAAGCCAG
AGAAGCATGAGGACACTGGAAGACTCCTCAGGGACAGTCCTGCACCGTCTCATCCAAGAGCAGCTGCGCTACGGCAACC
TGACAGAGACTCGCACTCTGCTGGCTATCCAGCAGCAGGCCCTGCGGGGTGGGGCTGGAGCTGGGGGCACGGGGAGCCC
CCAGGCTTCCTTGGAGATCGGAGCACCCGAGGACAGTCAGGTGCTGCAGCAAGCCACCAGGCAGGAGCCCCAGGGCCAG
GAGCATCAGGGTGGAGAGACCCACCTGGCAGAGAACAGGCTGTACCGGCTGTGCCCACAGCCCAGCAAAGGAGAAGAGT
TGCCCACCTATGAGGAGGCCAAAGCCCATTCGCAGTACTACGCAGCGCAGCAGGCAGGGTCCCGGCCGCATGTTGGGGA
CCGGGATCCTAGAGGAGGGGTGTCCGGAGGCGGCCGGCGACAGGATGAAGCTCTTCGAGAGCTGAGGCATGGCCATGTG
CGCTCCTTGAGTGAACGGCTTCTGCAACTGTCCCTGGAAAGAAACGGTGCTCGGGTCCCCAGCCACATGAGCTCTTCCC
ACAGCTTCCCTCAGCTGGCCCGCAGCCAGCAGGGCCCCCAACCCCGAGGGCCCCCAGCTGAGGGCCCAGAGCCCCGCGG
GCCACCACCTCAGTACCCACACGCTGTAATGGCTCAGGAGACTGCGGCTGTCACTGACCCAAGATACCGACCCCGAAGC
AGCCCACACTTCCAGCATGCCGAAGTCAGGTAACCCCAGATTTCTTTCTAGTTCGGTCTCCCAGGAGGAGGAGAACCCC
AAGATCATATATATCGTGGATCTCAACTGTCATGATCCCAATCCCAGGGCACCCCCACCAGTTCCTAGGGCTGTCTGAT
CTAGATCTACCCTCTCCTGTCTTGAGAAGGGAGAGCTGGGGGGGCTGGAGGGTAAGGGGATTTAGCTGATCCAGTCATG
GTAGCATGCCTGTAATGTTTAGGTGAGGCAGGAGGATCACACCACCAGCCTGGACAACGTAGCAAGACTGTCTAAAACA
AAAAGAAACTGACATCATTGCTTTAACTCAAAATATACATAGCATTGTCTATAGCATTCAAATAAGGAGGGCTCCCAGG
GATGTGAATGGGGTTCAAAGGTGAGCATTTCTTTTTTTCTAAGAAAGAACTAACTAAAGACAATAGGAATCCTTACCAA
ACTTCTCCCGAGTTAAGTAGGCCAAAGGTGGAACTTATTGAAGGTTTTTAAGAGAAGGTGGACATTTTTTGTTGTTGGC
TCATCATTGGGAGGTGTTGCTATTGAGGCTGAAAGAACTAGGTGGCTCGCTGGGCCACTTCTGTATAGTTACTGTCTGC
CAGTTAATTACTTACTAGCTTTTCCCTTGTGCTTATGGGCCTAGATGAGTGAGTGAGTGAGTGAGTGAGTGAGCTGCTT
TGGGGGGAAAGGGGGGGCTCAGGATGCTGTTGGACCAGAGTAGTGACTTGGCTTGACTTCCTGTGAAGTGAACTCTCGG
GGAGTGTGTGTGTGTGAACTCTCGGGGAGTGTGTGTGTGTGTGTGTGTGTGTGTGTGTGTGTGTATTGGAGGGCATGAT
ATGATTGGCTCTTAAGAGATCAATACTAGCCTTAGAGAATGGGTCATTGGAGCTAGGCTGGGAGCCCAGTTAGTATAAG
CAGGAAGCCAGATCATTGCAGGAGTCCATGTTCCTAGAAATGAGGGGCTGCCTTAGTCATCTTTATTGGCCCCTGTGCC
TTTTCCAGAGAAACAGGCACCATTGCTGTACCTCCTTTGGGGTGGGGTGAGGTGGGCTCCAAGGAACCTGGCTGGGGAC
CCTCTGGGTTCAAAGTCAGTCACCCTTGCTGAATCCTTATTTGGTCCCTCCATTTCCCACCAATTCGGTTTTCTTCACT
CTGGAAGAGAATAGCCGCCTTGGGCCTAGTAGGGGAGCCAGGGGAGCGGGGATGTGTGGGGGTGTGGGGGGGGTGGAGC
CTCGTGGGTTTACTCTAGCCTCCACTCCCCCAGACCCCCACCTCACCTCCCTTTTCAGGGCCGGTCAGGAAGAGTTTCT
TCTTTTGGACCAGCCCTATTGAACCCTGCCAGGAAAAGATAATATCCAGGCAAGGAAGTGGGCTGTTTTGCAGGAGAAC
AAAAAGATAGGGAGGAGGGCGGTGGGAAATGGAAGAACCAGGAGCAAGTGTGAACGGAAAGGAGTCGTCGCCATTCTTC
CCTGGAGCTCTCGATCATTCTCGAAGAATGTCAGTTGTGTCTGCCTGGCCTGTGGTAGGGAGGAGGGGGACAACAGTTA
TCTGAGGCAACCCTAAGAGTGACCACACTTGGCAGCAAGGGGGAGTTTAGTCAGTCTAGTGGCAGCCCTCTTCTCTGCA
CTCCCTGGAGCCTATAGGAGGAAAAAGGATGGGCAGGCTTTAGGGACTGAGTCAGGGGCTCAAAGAACAGGGGAGCGAG
CCATAGGCTAGAGGGGTGATTTTGGACACTGGGGATGGCAGAGGGGGCATGAGAGATCCAGAAGTGAAATCCAAACTTC
CAAGAGGCTTCTAGAACATTCTGAGTACAACTGAGAAGGCACTTGTGACACTTGGGGGTCACAAGGCCCCCAGAAAGAG
CCTCTGGCTACCTGGGCCTAACTGTTCTCTAAACATTAGAGTGTAAGGATGTGTTACACTCATGGCCAAGGGCCGAAAG
AACACAGTCCTGAACTCTGCTATGGAGCTAATCCAGGGGTTGCCCCTTAACTGAGGTGATCACCAACAGAGATGGAAGC
TAGACAGTCATGGGTGAACCTGCTGTTACCAGCCATTTGGTCAAGCCTGGCTTCTGTGGCTGGAGACCCTTGTGATTTC
GCCGACACAGGTGCCACTTGGCAGCTACAGCACTGGTCTGCTGAAGGCCTAGCAGCTGGAGCTGAAATCTGTTCCCCCT
GGCATCTGATTCCCTGCTCTAACCTTAGCTGGGGTCTTGGAAAAGAATTTCGGTAGTTGTGGGTAGCAAGACCCTTGAA
ACAAAGAGGAGAAAAAACTCAGGTGAGCCGTTTTAGCTGACATGGCTTACCTGCTAGAATCCACTAGTAAGTGCCCTTC
CTGGGGCCTGGGGACTCTGTGTGGCTTCCATCCCAAAAGATCCTTCTATCAATTCAAAAGGTCATGAGCGCGTCTTTAA
AGGTAATATTTAAGCTGTATTTGCTTAGGACGACCCAGGTTGCTTGAACAGAATGAGCATCTGGATACAGCGCCACCGC
CACCCTACCCCACACCCATCCTGCTCTCTGACTCTTGAGTCTTAGGCACATACCTTGTGGCACAGGCCCTCCCTCTGGT
GGCTGCCTAACACTGGGGAGGCTCAGTCACTGGCAGTAATAGTCAGAGTGCGCGTGCACACGTGCGTGCTGTGTGTCTC
GGGGCTCTGAGCTTTATTCACCTCTTCTTTCCCAGGATCCTGCAGGCCCAGGTACCACCGGTGTTCCTCCAGCAGCAGC
AGTACCAGTACCTGCCACAGCCCCAGGAGCACTCTCCACCCCTCCACCCGGCAGCTCTGGGCCATGGACCCCCAAGCTC
CTTTGGTCCACCTGCAGTGGAGGGACCACCCAGTGCCCAGGCCACCTTGGGCAGTGCCCACCTGGCCCAGATGGAGACT
GTACTGAGGGAGAATGCCAGGCTGCAGAGGGACAATGAGCGATTGCAGAGAGAGCTGGAGAGCACTTCAGAGAAGGCTG
GCCGCATAGAAAAGGTGGGGACTCCAAGGACACTCAGAGCGGTGGCCGGTGCAGAGGGAGGCAGAGGGGCAGGAAAGCC
TATCAGGCTACCTTTTGCACCATATTCTCCTACACACACCCCCAGACACACACACACACACACACACACACACACACAC
ACATCCCAAGCTGACTCCAGACAGCTGAGGACCGACCAAGAGGCCTGCCCTAATGCATGAGCAGTTGCTGGCCAGTAGT
GGTTAGAAAGGACTCATTCACTAGCTCCCTGCACACTTGTACCCTCACCCTGCACAGCCCCTCCTGTGGACACCTCCCA
CAGAGAGCCCTTTGTGCACCCACACAACAGCCAGTCTGTTCCAGGCCAACACTGGCCAAAGAGAAAGCCCCTCCTCTCA
GGGAAAAGAAAAAGCAACGCATTGGCAAAGCAAGCCAGCTAGGAGCACGTGGAAGACCTGTGGCTTCCAAGTGGGAGGG
GCAGCCACATGCTCTGGGCAGAGGCAGCTCAGGCTGGGGTCTGGCACCCCCACTTCCTCGGTGAAGCCTGGCCAATTGT
GTACTAAGGTTCAACTTTAGCAATAGCCTCAGGCTTTCCACTTGCTGTCTATCTACAGTGTTCTGGATAGGCTGAGCCA
CCTAGGTGCTCTCATCCCTGGTCCTTTGTAAACACTAGGCATGGGGCATGCTGGAGGTAGCCCCCTTGTAGAGCAGCTA
GCCCAGTGTCTAGGCAGCAGTCTGGTCTACCTAAGAGGCTGCAGTCCTGTGGCAATCTCAGTAAAGTCACTGGCCTCCC
TCCCTAGGACCCTTCCTGAAGTTGAATTAATTATCTGTCTCTTACAGCTGGAAAATGAAATCCAGCGGCTCTCTGAGGC
CCACGAGAGCCTGATGAGGACCTCTTCCAAGCGTGAGGCCCTGGAGAAGACCATGAGGAACAAGATGGACGGTGAGATG
AGACGGTTGCAGGACTTCAACCGAGACCTTAGAGGTAAGGACCAGGCACGAGGGTTGGGGTGTTGGGAGGACATCATCT
GTCAGACTTTGGGGGCTCTGTTTTCAGGGGGAAATTTAGAATCTGTTCTGAGCTATAGAGGCCTACATTAGCCCCCATC
GTTGGGCCCTGAGCTGAGCTGGGACTTCCTTATAATCCCATCTCCCCAGTTTAGAGGGTGCAAGCCTACAGTTAGGACC
CGAGGGTAAAGCCCAGGCTGATAGCATCCCTCTATATTTAAAACATCTTTTCTCCTTATTTGAAACAGAGAGATTGGAA
TCGGCAAACCGCCACCTGGCAAGCAAGACCCAGGAAGCCCAGGCGGGCAGTCAGGACATGGTGGCGAAACTGCTTGCCC
AGAGTGAGTAGGGGACCAGCTGAGAAACCTGGGTGGGTGTAAAGGCAATGAGGCACAATGACGTGGCCCCACTACCCCT
GCCACTCCCTTCCCCTTCAGGTTTAACCCACCCTCACTACCCCCACCCCCCTTGCAGAGTGGTACAGATTCACTGAATG
GCTGCTCTGGGAAGGGGTGATTTCCAAAGATGAATAGGGACTAGGGAGCCTTAACTGGCTGAGCCACACACTATGGACT
CTCAGTCTCTCCTGTAGGGAGGCCATGACAGCCCTGGCAATAGATAAATGGAGGATGATGAGGGTTCTTTGGAGTTTTC
CTAGGAATGACAGACAACAGAAAGGCTGGGGACATGGGAAGCTGCAGGGGATGGTCCACATGGTGAAACTTCCTGGGAC
AGCCACAGATGGGTTTAGTCAACAGCTACAGTCTGAAGGAGGCATTCAGAAAGTTTCTCTTTAAAACAGGGAGGTCCAG
GCATCCTGGAAGCTTTATAGACTAATCAATTTGTTCCTTCATTAGTGGAGCCAGGCTAAGCACCTGGCCAGCGCTGGGC
TGAATGTGAGAATCCATCCAGAGGATGACAGGGAGGTGAGATGAGCTTAAGGCAGGAGCAGGTACCCACAAGTTCAAGG
GAAAAAGTGTTCCTGAGCCATGTTCCTGGTGATTAGGAAGCCCCTGGTGACCCTGGGAAATCTGGGAACAGCAGAAGTA
TGGAGGCAGTGGAGGAGGTCTCAGACACTGAGGGGAAATGACAGGCTTGTAGGTAAGAGGTATTTAGGAGGAATATGTA
TGAGGGTACTTTGTTAGGGGTGTCTAAAGAGGGAAAGACTCCAGAGAGAGGGGGTTTCTGAATGCTAACCGCCCCACCC
CCTTCCTTCGGGGACTTAGAGTGCTTGCTAATAAATAAGCCTTTGGCAGGGAATGGGCTCAGATTGGGTAAGACCTGTG
CTATCCACTACTACCTTTCAAAATGAGGTGGTTAAAGGTCTCTGGAACGGAGGTGAAGGGGAAAGAGGTGTGTCGCCTA
GGGGTTTGCCCTTGGGAGTCTGTAGAAGCACCTACTGCTGTGGGAAGAGAGATTAGGGGTGCTTTGGTGGGAGGGGTGG
GTTTTGGAGCCCGGCTCTGACGGAGAAAGGAAGTCTTAAGGAGGGTTTCTGGAAGCTTGCAGAGGGGGAGGGGGGCAGA
AGCAGCCGGGAGGCGTTTCCTCTCCCCGGGGAGCAAGCTAGCGCCAGGCTGTTCTTGGCTTCTTGCTGGAGCCATTAAT
CTCGCAGCCGCGGGTGACCTGGATGCCTGGCATACCAGAGCTGCTGGGCTGTTCCGCTCCCAGCCCGTCCCCCCCTCCG
TTCCCTCCCCTGTGCGCCTGACAGTGGCGCCCTTCGGCCCCGGCGGCGCCCAGCCTGGCTTTGGGAGGAGAGAGTATGA
ATACAAAGGGAGGCTAGGACCTGAATGTGGAGAGCTTGCTAAGATAGGCTCAGCCTCCCACCCTCAACCAAGGTATCTT
AGAGATTGTACAAGGCATCTGGAAACAAAAAACACTGGATCCACAGCTGGAGGAACTAAGAAACCCCCCTAGCATTAGA
AGGCTGTTTTGCTTTGTTTGTTTTGTTTTTCTATATAATCGCCATTTCTAAAGGGCTGAGGTTGACACTTTTTTCTGGA
GGGTACAGAATTCCTCCCCATAACTGGCTTTCCCCAACAGCAGCCCCCATCTCTGCCTGAATTGTCTGATATGGGCCTT
CAGGAGCTGACTCTGAGGCCTGACAACTGGTCCTGCCTGCTTTTGGACAGGTGTTGCCTTGGCCTGGCACAGGCTACAG
AAGCATCTACCTCCTAGTACTGCTAGGTCTGGAGTGAGGCCTGGACATTCAGACACAGGCTGTAGTGCTAGTGGGTGAG
AGAGGATGCTGTTTACGGGTCTGAACCTGGCTTCTTCCCTCCACTCCACTCACCAAAGGCAAGCCAGCAGAGTATGACC
AAGTCATGTGTAAAGCATCATGGAACAGCCCCGTCTTTTCCCTCCACACCAAAGAGTGAGGCAAGCTAGGCCGATTGTA
GCCTTCAGAAGGGCAAAGGAGATAGCCTAGATTGCCCCTTAGTGCCCCTTAATGCTGTTCAACGAGTTGGTGAAGGGAG
GCCTCTGCATACTAGGGCCGTGTCCTAGCCACACATAGCCCAAAGAAAGTTAACATTTCTTCTGTCTTTCCAGCCACAT
TTTGAGAGTTCGGTAGCTGAGTGTAACCTTGGTAGTTACTGTTTTGGATAATGTAGAGCCATCCACTGTAGCAGAAAAA
TCTCACCAATATAGTTTTGTTCCAAACCCTGTTCCCTACGAACTCTCTAGAGAAATAAGCAGCCATTCTTGGTCGACTA
GCCCAAGACTCCCAAAGGGCGAACATCCAGGTTCTTTCTTGCCTTGGCCAGGCTAAATGGAGAGGTTCCTCTAATGTGC
AAAGTGCTCGGCAATTGCTGGAATCTTAGACACAAGTCTTTGGACCAGCATCCTTTTCAGTGTGATGCATGGTTTGAAT
TCTCTTATGATGTTGCATGTGGGCCCCCAGACCATGCAACAAAAGGGTCGGTGAACAGGAGAGGCTACCGTCCGCAGAC
TGTACTTAAGAGTTCATTTCGGCAAGCCTATAGGGAGAAGGACTGTGAGCAAAGCCTTATAGCCGGAGCCTCCCAGTCA
GCCATTTGGTTCCTATGTTTCTTCCTCTATAAATCAGGAGCCTCAAATTCCTCCTGGGGGATCAAGTGTGATAAGGTTA
AAAGTGCACGTCCTGCTTGCACAACGAATGACCTTGTCACAGTACCCTCCCTAATCTATAACAGGTTGGCACAGTGTCT
GCCTGAGCAGTCTAGTTATCATGAAGCTTAAGGAAAATATGTTTTGGTAATGGTCATGTCTGGCACAGTTCAAGCAGCT
GAAAGGCCACTTTGGTTTATTTGTTTGTTCCAGCAAGGGTCATGGGGGTCAGGCTCTGCCGTTTACTCTTACCTTAGTC
TGCATCTCGCCGAAGTGCAATATGTAACTCGCAGACGCGTCGAGGGGGAGAAGCAGTTGTCACAAGTAGGCAAAGGTGG
CCGCCATCACTGACCCTTTCCTCTTTAATGTCTCCTCGGACAGGCTATGAGCAGCAACAGGAACAGGAGAAGCTGGAGC
GGGAGATGGCACTGCTGCGTGGTGCCATCGAGGACCAGCGGCGACATGCTGAACTGCTGGAGCAGGCTCTGGGCAATGC
ACAAAGCCGTGCCGCCCGGGCTGAAGAGGAGCTACGCAAAAAGCAGGCCTATGTGGAGAAGGTGGAGCGGCTGCAGCAG
GCACTGGGGCAGTTGCAGGCTGCCTGTGAAAAGCGAGAGCAGTTGGAGCTGCGTCTGCGCACGCGCCTGGAGCAGGAAC
TCAAAGCCTTGCGTGCACAGCAGGTAAGCCCAGAAGACCTGTGCAGCTGGCAGTACCGGGCACAATTCAAAGAGTCCCT
CCCTGCTCTCTAGTCTTTGTCCTCTTTGAAAGATGATTGCTTCATGTTCCCCTTGGCGCTGCTTGGTCCCTCTCAGGTG
CTTTGTATAGCAAAGGCTCTGCCTCGAGCCCTACTGTGGCTAATAACAGAAATTTGGTACCTTAGTACCAGTCAGTAAT
AATGTTCGTGCAGAAGGCTTGACCACTCTAATCCATCTTCCCAAAAATAGGAAGGAAGATGTCTGAGTCTGTGCTTGGA
CATAAACATCTCTTGTGTTTACCAACCAAATAGAGTTCTGTCTCTACACACAACTTTACCCTGTCATAGAAGGGGGGCC
AAGACTTTGTCCCAATGTGATTGCCACTCAAACCCAATTCCCACTTCAGAGAATTGCTTTTTAGTCGTATGTGTCCCTA
GTCTCCTGACCACCAGAATTAAGGAGAGGATGTGAGGAGTTTTGCTATTCCCTATATCTCTGGGTGGAAGTAGGAAGGG
CTGTCTGTATGTGCTGTCCATGACTGAACAGAGGGATGCATGTGAGAGACTTCATGTGAGCCTGAGGAACAAAGTCCCC
CTCGTGCCAGCCTTTACCCTTGACCATGCTATTCCTTGCTCTACAGAGGCAGACAGGCACCCTCGCAGGTGGTGGCGGC
AGCCATGGTGGGTCCGCCGAGCTCAGTGCCCTGCGGCTGTCTGAACAGCTGCGGGAGAAGGAGGAACAGATCCTGGCTC
TAGAGGCGGACATGACCAAGTGGGAACAGAAGTATTTGGAAGAACGGGCTATGAGGCAGTTCGCCATGGACGCGGCTGC
CACTGCGGCTGCCCAGCGCGATACCACTCTCATCCGGCACTCCCCCCAGCCCTCGCCCAGCAGCAGTTTCAACGAGGGC
CTGCTGCCAGGCAACCACAGGCACCAGGAGATGGAGAGCAGGTACCACAGGGTCAGGCAGGGGTATCTGCGGTCAGGGG
TGGAACGGTGCTACCCAGTCTCTTCCCAGTGTCCTTTGTCCCTGGTAAATAGGCCCCACCCATAGCAGCTCTGTATGTT
TGACATTCCAGAAATTATAGACAATTGTTTCCCTGAGTGAATCCCTGGTATTCGCAGGCTGGAGGTGGGTGGGTACCTC
CTAAGCTCTGGCCACTTCTCCTTCTCTGTAAGAGATCTTCATCTGAGTCTTGCAATAATAGGTGGGCTTCCAAGGCCAA
GAGGTCCTGCCTGCCCCAGGGAGAGATGTCTGGGTTTCTTTGCAACTTCTGTGAGGTGGGTGGGCTGGAGGAGCTGAGC
CTGTGGGTCTGACAGTGTGACCTCCTCCCTGACAGATTGAAGGTGCTCCATGCTCAGATCCTAGAGAAGGATGCGGTGA
TCAAGGTCCTTCAGCAGCGCTCCAGGAAAGACCCTGGCAAGGCCACCCAGGGCACCCTACGGCCTGCCAAGTCGGTGCC
GTCCATCTTCGCGGCTGCAGTGGGAACTCAGGGCTGGCAAGGGCTCGTATCCAGTGAGCGGCAAACTGATGCACGGCCA
GCGGGAGGTATGAGGAGGCTTGGTGTGGGAGGGAAAGGGGTAGGAATTTTGGAATGCATATTACCAGACTCTCAGAATA
CACGCCCACTGAGACCAGGGCTTCCTGACCCCCTCTTCTAAGGGATCGGGTTTAGCCTTTGGCTCCCGTGACTGCAACC
TACATGGGTCCTGCTAGTAGAGTGGATGGATGCTGGATACAGATAGATCTAGGCAAGGGTGTTCCTGAGCAAATACTAA
GAAATCCTAGATTCCAGCTACAAAGAAGGGCCACAGAACATTGATGCCTATCCTGACCCCATTTATTCCTATTTTAAAA
GAGGAGTCTTGCTGGGCGTGGTGGCGCACGCCTTTAATCCCAGCACTCGGGAGGCAGAGGCAGGCGGATTTCTGAGTTC
GAGCCCAGCCTGGTCTACAAAGTGAGTTCCAGTACAGCCAGGGCTATACAGAAAAACCCTGTCTCGAAAAAAAACAAAA
AAACAAAAAAAAAGAGGAGTCTTTTCATTCTATTAGACAGCTTGCAAATTAAGAACTACCCAGTCCACCAAGTTTGCTT
GGGGTGTCCTCCATTGGGACCGTGTCTCCTACATCAAGCTGTACCCATCAGTGTCCATTCTTTCTTACAGACCGGGTCC
CAGCAGAGGAGCCTCCGGCCACAGCTCCTCTCCCTGCCCACACCAAACATGGCAGCAGAGACGGGAGCACCCAGACGGA
TGGCCCTGCAGACAACACCTCTGCCTGCTTGGCCTCAGAACCCGATGGCCTCCTGGGGTGCAACAGTAGCCAGAGGACA
CCCTCTCTGGGTAAGCACCCCACTTGGTTAGATGAGGGTTGGGAACATGGTAGAGGTGCAAACTGGAACGCATGGGCCC
TGTTTTCCCCACGTTTCCGCAAACTCATCCACTGTGGAAAGCCCCACCGTAGCGAACTGAGGGTTGTTGGAAGTTGTCT
CAATGGGAGGCAGGGCCATCGAGCCATTTCAGAAAGAAGGCAACGCAACAGGAAGCACTCTAACTCCTCCAGAGTTGCC
CTCACATCCTCCTGTCAGTCCAGGAGCTTGACAAGTGAACTCAATGGTGATCTTGGGTTGGGAAGCTATTTGGAAGAGC
CCAGAAAGGAGGAACTAAGCCTTTTCTCTTTCTACTCTTGTTTCACATTTGCCCTTGCATAGCTGCCTGTGTGTGCCCC
ATGATCTCAGAAAAACCACAGGCATGACAGGAACGCTACAGCCTGCTTCTAACCCTGGGAGCACCCTTCCACTGATCAT
TCAAGCTAGTTCAGAGTCTAAACACAGGCATGGGCTTCCTCGGCAGAGGGGAGGGGGCACAGCCTTGTGCTTAGTTGAT
CAAGGGAAGAGGAACCTAAGGGCTGAGGCAGCTTAGGGGAGGGGGTCTTGTTTAAAAAAGACCCTGTGTTGGGAGCTGA
GGAGAACAAGTGGATAGTACTGACAGCATACACTTGTCTTCTTGTTTTTTCTCCAGACTCTATAGCTGCAACCAGAGTC
CAGGATCTGTCAGACATGGTAGAAATACTGATCTGAAGGAAGGAGGCAGTGCCTTGGGGACCCCGAAGCCTGGCTCCCT
CCTGGCATTCCGGCAGTTGTCTTCAAATGCTGTGCCTCACATCCTCCGACCAGTGATGCCTTGGTGCATGGGGCTCAGA
GAGGAGCACCCCAGGGGAGCTAGCTAGAAAAGCCTGCACCCCCTAGAAGACTGCTTTTTGGCCTATATTTCTCCTATGA
CAATGAGGAAGGAAAAGCCAGACATCACCTGCAGCCGGAGGCCTGTTGCTGGGGCAGAAAGGAGCTGAGCCCCCTCCGT
CCTGCCTGAAGGAAACAGCGGATTCTGACGCCCAAGAATGGCTGGGCACCAGCCGAGCGGTCTGCAGGGATCGTTAGGC
CAGCTATGGTGTTCTGTGGCTAAGCATGGCTCCAGCCAACACTATCTGCTCTTCAGTCCCTGACTGACTTCCTCAGATC
ACTAAGACTTGAATCCTTGGGAGGTGGGGGACGATGGGAGTGTGAGTCTTTCGGGAGCCACCAGCATGTCCCCTTGGAG
TAGGTTAGAGGTCACTTGAGAGGCCCCGCAGAGCAGTGTGTTTTGTATATAATTCTTTTTCCTTGGGAACAGAAGACTA
AGCGTGCCGGTTCAGAGTCTCCTCCAGGGCTGTGCTGCCTGCCCCTGCTGCCACAGTTCTTGAAACATGTGACAGGTCT
ACCAGATGTTCCTCTGCCTGCAGTTCCTGGCTGTGGATTTTGATACTGGTTGGCTTTCCTCTGCTTTTTAAATCCCTGT
GTTTCGTGCCCATGGGATTCTTATCACCAGCCTTTGTGAATGGCTCCACAGCTCCTATCCCTGGGACATCCTGTCAGTT
TGGTTATAAACTGAGCCAGATGTGATGAGCCACCACAAGCGGACATCTGTCATGCCCAGCACCAGGTTCTCTTTGAAGA
AACTGGAGAAGTTGTTCTCATAAATGTATTCGTTCCCACCAGCAGGGACTGGGAGAGGGAGCTATGTTGTTAAAACGAA
TCAGTGAACTTAAAGAAAAGTCCTCATTATGGTGCCCCCACCACAGAATGGCACCCTTAGAGGCTGGCTCCTCAAGTTT
TGGTGCCCCAGCCCTGAAGCAGGGCCAGCTACTTGGAATTAGGTGAACTACCCCCACGTGGCAGACCACCAGCAGCAGT
GACTTTGACTTCTGGTCTTAAAGCAACCCCCATTCAGCTCAAAAAGCGATTGGTGGATTTCAGATCTTTTGTGTTTTTC
TCCTCTGGTTGTTTTGTTTGTTTTTCTTTCACTGTTTGAAGTTCTGTCTGTTGTTTGTTCCATTCCCATAGTTCTCTCT
GCATTTCCTTTTTAAACATTTGCATTTGCTGGGCAATTGCGTATTTTTTTAATTCCCTTTCCCCTATGTAAAGCTGAGA
AATACATCTGGTTCATGTACGTTGTTTACAAAGATAAAAGTTTTTAAAAAAAAAGGAGGGGGAAAAGAAGGCAAAAAAA
TATTGTGAAAGGAAAAAAAAAACAACTTAATATATTTTGGATTAATATTTGGTATTTCTTTTAAAGTATTTTTTTTGTG
CTGTGAACGTTTTCTGCCAAAGACCATGACGTGTGTCTGTGTGTTTAAGTTATCATGAATATTTAAAGTGTAAACATGG
CTGTTTTGTTACGCCACTCTGTACCAGGATTGCTGCTGCATTCCGCCAGGTATGACAGTATTTTAATAAAAAAAGAGCT
TATAAGGAGATGTCTGTCTGTCTGTCTATTGGTTGAGACACAACCTAGGTTTGAGCCTCTAAGTTGCCCTCAAACCAGA
AATTCTCCCACCTCAGCCTCCTTTCCTACGGTGGATTTACAGGTGTGTGCCACCACCCCCAGCTACCAGACTGGTCATC
TGCAAGGATGAAGAAAAAGAGTGTGAAGATTTTGAGGGGTCACCCAGGTCTACTCCCTCCAAGGTCACGTGACACGTCC
AACTAGAGATTGTGTAAAGTGTTATTAAGAACAGTTTAAACGACATGGCTGCCCCTGCCACCACACTCAGCCTATGGTG
ACACAGAGATCATCTGAGGGTAACCAGTTTTGATCTTGGCTGCTGTACAGTAGGCATAAGTCTGACACATTACCCCCTC
TACCCTCTCATTCAGTGCACACAGCCCTGTTAAAGGATGCACGTACCATGTGGACCCTCCCACTGGGTCCATGCACAGT
AGGTCAGAGAGTGTGATAAAGTCTTGGGCACCTGTCTTTAGCCTTCTGTTGTAATACCATCACCACCCTTCCCAAAGTT
CACAAAGTATATTTCTCCAACTCAAAAAGAAAAAGGAAAAACTACCCATTAATCTTGGCACTGAATCCAGTCAGAACGC
AAGTGGGCGGGCGTAAGGATGACCAGGAGACAGCAGACCACCAGATGGGCCATGAAGCCCATGACAGCAAAGTTAACCT
GTGACCAACCATGGGTGAAGTCACATAGGGACTCAGCAGCCACGTTGAGGAATGTCCAAGCTGGAGTTCCAAAGAGGGT
GTCTTTTGGCCAACCTCCCTTGTCATAGGAATGGAATTCAACAGGTGGGTAGAATTCAGAACACACAAAGACTTCACCA
GCAATCCTGCAAGTGACTATGGACTTTGCTGTCTGCCTTCTGTGTGACTTAGTCTATAGACAGTCACCTTTATATTTCC
TGTAGACCAAAAGAAGGAAGAAATGAATCCCGATGTGCCCAGAAAACCTCCACGTACGTGTGTGTACATCTGCACATGT
GTCCCCCAGAGGAAATGTAGGGGCAGCAATATTTTCTGCTTTCTACTCCTCCATGACCCCATGGGCTCCCTTGTGAGTT
TTCTCGGGGAAGAAACTAAACAGGTTATTCAGCGCTCTGCAATCCTCCCTTACTGAGCCAGGAAACAGAAACTGCAGCT
GGTGGAGTTGGAGAGGCCCTGAGAAGAAAGGTATTTGCCTCAGGTGTCTGGACACCTGCAAAGGGGTGGGGCCTGGGCT
AGAACCTGGGTGCTCTGCTAGGCCCTTTGGAAACCAAGTTGGTCAGAGGGGACAACCTAATCTGAGCCCCAACCTTCCT
GTCTTGTCCCCCTGTCTAGGATGACTAAATAGGGGGAGCTGTGGGGCTCTGGGGCTGGGGGTGGGGGTGATGAAGCAAA
CCGATCCAGGCACTGCATATGAGCTACTAGCCTGGCTTCTCTCCTCTCTCTCACCTTCTGGTTAATTATTAACTCTCTC
TTGGCATGAGCATGTGCCAGGCTCAAAGAGCTTGCTAACAATGTGCCAGAAGAGTGACTGTAAACAGATAGAAACCCAC
AGAAAACCAAAGTCTCTCCATGGGTCCCCAGGAACCCCAGCTGGACAGGAAACTTGTTTTCAGGGCTTCCACCTTGTCC
CTTAGCCCAAGTGAAGATCTAACGGACACCCAGTGTCTTCTGAGACCTTGCTGGGTGAGCAAGTCTGCTGGAGGAAGTC
CAGAGACCTCACAGCAGCAATGCCTTTTTGGACCGACTATATCTGGGTCTAACCCCATGCAGAGTACCACAGCAACTAA
GTGTTCAGTATCCATTGGAAATGGGAAGACTTCATGCACCATGAAATCCCCCTTTGGACGTGCATACTTCCTTCACATC
TTATATCACAGAATTTACCTTAAGCCAGAGTGGTCAAGCATGGGTCAGCTGATCTGCTTTCCACATGGCCTGTTAGTCC
CCAGGATGACTTCTTGAACTTTCTGTAGCTGACAGGATTCCTCCCTACATCCTAGAGCCAGCAAATCTGGAGCCCACTT
CCACCAGGCTGCAAAGGTCACTGTCTGCTCTAAGTTGGAGCCCTCTACCGCTAGAGCCTCCCATCATGAATCCTAAGCC
TGCTATGGGGCATAAGTTCTTCCCAAAGTATTGGGTCTACAGAGAGTCGCCTTTAAAAAAAAAAAAACTGAATCTTATT
TAATTGAATTTCTAAGAAAAATGATGCCAAAGGTTGAATCTGATTTTTGTTAAGGGACATGTTCATTATTGACTTCACA
TTAACTCTACTTAGGGGCACCGGGCATCGTGCCTGCCCAAAGAGATGATGTTTTAGGAAACGTCCGTGGCTGGGGCTTA
CCTCTGTGTCTTCTAGGTGGGGCTTGGAACTGGAGATGGAGTAAGTGGAGGTCTATGGCACTATCAATGTAGAAGCCTG
GACAGATTGGCCAACCTAGCAAGACCTGAATCTACTTCTGACCTATGTCTTGGAACTCCTTTGTGCCACAAAGCAAACC
TCTAGTCTCCAGCAGCAGGATGGAGCCCATGTGACATTGTTGAGGGGACGTGATTCTCCTCTACTCCAGCAGTCTACCA
GTTTTGAATTTAGAGCAAGGCCAGTGTCATAATCTGTCCTCAGATAGGTGTCTTTTGCAAGCCCAAATGCTCCAACCTA
AGGACACATTCCAGGTATATTAGGCAACCTTGTGATCATTTCCCTGTCTGGACTGACCCTTCCTGAGTCTTTCTGGCCC
ATGACAATGACATTTCTAGCTGAGGGAGGGAGGCCCCTGTCCAGACCCTCCTCTGTAACTTCTGCTTGTTTAACACAGT
GTACTGTGGCAATCCTCTCAACAGATTGCATCAGCAGCAGCCATGCAAGCTTCTCCGTGGTACAGCAGCAGCTGTAAAG
CCACTGCCAAAGCTGGCCCTGAGAACTATGGAGACCTTTATTTGTGTGTGTGTGTGTGTGTGTGTGTGTGTGTGTGTGT
GTGTGTGTGTGTATACAGGTACACATGCCCTTGTGAAGAGGCCAGAGGAGGATATTGTGTCTCCTGCTTTACCAATGTT
TCATCCCCTTGAGACAGGGTATCTCACGGAACCTGGTGCTAAGCTGTCAGCGAGCTGTCGGAGGAAACCGTCGGCAAGC
TCTATCTATCCTCCTGTCTCTGCACCCCACAGGACTGAGGTTACAGGCTTGCTATGGTCACGCCCATGGAGTCTAGGAA
TCCAAACTCAAAATCTCACATCTGCACAGCACAAGAGCCTTCCTTCCTAAGGTGTGGGCTCTCTGTTTTTGTGTGGCTG
ACTTCGCTTCCCTCCATCCTATGTTTCTAAAGTGGCTATGGTGTCTCTTCCTTTCTTCCTTTCACCATTCACTGACTCA
TTCATTCATTCATTCATTCAATAACAGATGTTTACTGAGGCAGACCAGTCAATGTAAAGCGAATTCTGTTTCTGAACAC
TTTTATGTCCCAACTGTCTATATGCTCGTTGTATGCTCTCCCTAAGCCAAGCTCAGAAGTGCTTTCTGAATGAGTAGTC
TAAACAGGAACCGTCACACATCTGTTTCTCTGGCTCCAGCTTTGATCAGGCATCAGACCCCTCCACACCTCCAGCATCG
AAATAATACTTGGTGGGTTCGGCTCCAAGCATCTCACGTGTCATTTCTGTGTCTAGGATGCTTTCCCCATGGATAGCAT
CTCCCACTAGCAGCATCTATTGTTTTCTTCCTCCCTTCTTTCATGGTCCCACAGGAGCAGAAGACAGAAAAGAGCTGCA
TTCCCGGGCTGAGGGACCTCTTGTCAGGAGGGACATTCTTTAGGGCTCTGCTTGGTTGAGAAGGAGCCTCAGGTGAGAT
GACACAACAGTGCAGAGGCATGCTCCCTGTTTGCACAGTCACGTGTGGCCCTGAGCAAGATCCAGACTATAGTCCCTGG
GGATCTTTTGACCAGAAGTCTCAAGCCCCTCCCCATTCACCAGACCCCCTGTCATTCCCTTGAGGTGAGAGGATGACAG
GGACTTTGTGGGTGAAGTCCTCCAGGTTAGAGGAGGAGAAGCTGAGCCCCAGGGCCTGGGCTGAGCCATAAGGAGTGCA
TGAACAGGCAGCTGTGGGTGTGTGAGCCCAGAACTGGCCACACAGGATGGCTGGCCCCTGAGTCAAGCCTAGGCACTGA
CAGCCATGTGAGCCTATGCCAGCACAGCCGTGGGAACAGCAGGTCCCTCCACCCCTAAGGAAGCTGCTCTTGCCTGGAG
CCATTCCTGCCTGGCTCTGCCAGCCCTGGGATCCCTTTAGATGCATGCCAGAAGTGGGGTGGGTACAAAGGCTCTTTCT
CAGGTTTATCTTCTGGTACTAAGGCCCCAAATTCAGATTAAGATAAAGGCATCAATATGTCAGGCACATGGGCTCCCGA
GATCATCCTGTAGTCTTCTGGTGACAAGCTCCTTGCCCTGCCTCCCTGGAGACAGAACCTCTGAAATCAAGGTTCAGGG
AGGAGGATGGGTTGCTTCTGGGGCTAGCCTCGAATTAGCTATTTTGCCAAGGGAGTAACCTTGACCTTTTGACCTTCTC
ACCTCCACCTCTGAAATGCTGGAACTATAGGCATATACCATGACGCTCCTTTGGGGACATTCAGGGTTGAACCCCAGAC
TTCGTACACATACATATTCTTCTTAAAGCAAATCTGATGGGTGTGTGTTGTATATATGGGTACCACATTTGTGCATTGC
CCATAGAGGGCAGATTAAGAGGTCAGCTCGTAGATATGGAGACAGCTGTGAGTTTCCATGTGGTTGCCTGCAACCAAAA
CAGTATCCTCTGCAAGAGAAGCCATGCCCTGTATGACAGACATCTCTCTGGCCCTCACACGCATGTTCTTATGAACTTG
CATCTACATCTACAACAGACATACAAATGAGTCCCGAAACTACAGACTCATCTGTGCTCTGAGCAAAGGCCAGCCTCTT
TGGTGAGTGGCAAGAGTGCGGATGAGATGAAGTCCACGTGTCTGTCCAAGTCGCATCCCCAACACAGCTCTGAAGGAGC
AGGCAGCAAGCGAGCCTATCCCCTCCCTCTCTACCAGCTGCAGAGAGCACAACACCAAGCAGGGTCAGGTTAGACAGGA
ATAACCTCAGAACTCCTGGGTCCTGACTCAACAGCAGAAGCAGACAGCCATACGCATTCTTGACAAGTAGGTCACCCTG
GCCAGCCCACATGCTGGGACCTAAGATCTACTGGAAAAGATTTGGGAAAAACCCAGGTGTTGCAGACAGCCCAGAGTTT
GGTTGGTTGGTGTCTGGTGCACTGGTACTGGGAAACATGTTTCACAACACCACTGGGTATTGTCACTGGGCCCAGAAAG
CAGCTGAGGAGGGGCTGCAGTATGGAGGAGCAAGAAAACCCAACCTAGCTGTGTACTTCCTGAGCCCATCTGCCTGTTG
GGTGCTGTGCTGGGTGTTCTGCTGGGACACAGCCCTATAACTTGACTTTTCTTGCTTCCCTTTGACAGACGTGGAGACT
GAGGCTACATGATAGCAATAAATTCCTCGGGGCTGGGGCTTCTTAAACTTTTCACACACATATACAATAAATAAATAAA
TGAAAATTTTAAAAGTTAATAATAGGGAGACAGGTTCCCTGAGTCCCTCTAATAAATTGGATGACTAATCTGAATTCTG
GGGCCTGACTGGAGGGGCCAGTGGGAAAATATATGAAGATCCCTTAGCATGACATTTGGGATAGAGCAAATGTCCTTGG
AGACATTGTCATTATTACTATTTTACTATTTTTTTCTATCATTATTCTAGAAGAAAGTCTAGTAGACTCTCTTGCAGCT
ACATTCTATTACTAACTTTCCAATCTAAACTTGGTATGGTGGTGCATATCTATGATCTCAGCACCGGAAGGTAAGTAAA
GGTAGGAAGGTAAATTCAAGGTCATTTTCAGCTACGTAGCAAGTTTGATGCCAGCCTGGGTGACATGAGACCTCCCACG
AAGCAGCTGGCATGCCACAGAGCAGCTGGAAGGGCTCCCCTTTACCTCCCACCAGACATACATACGAGACTATTTTAGA
CAAGTGGGTAAAAAGCTCTCCACCATCTCCCTTAGGGACAAGGAAAGCCACTCTGCCTCTCCATCCTTTGTCCCCAGCA
TTTCAAGCTGCCCTTTGACTCTCATAGTAACATTGCAGTTACAACACAAAGGCAGTGAGTGACACAGAAGAACACCAGA
GACAGCCAGGGCCAAAGCCCTGCCTGACAGCTCTAGAGTGGACCCCGTGCAATGTGAAGTCTCTGGGCTCTGGTTTCAG
TACTCTAGGCCCTGTGTCTTCCACACCAGCCTTCCCAGAGCTGGGCAATGAGTCCACCTGGAATGTGTAACTGCCACGC
TCGTCGCTGCACTTAAAGAATTGGCCTCTGCCTTCCCTGCCAAAGCAAAGATTCAGATCAGCAGATCCAGCAAGGCCAG
ACATTGACTGGGAATGGTCCCCTCAAGTCAGGACCAGCGGTGCCTCCTCTTGGGTGAGACCCGAGTGTTTTTTTTTGTT
TTTGTTTTTGTTTTGAGGACCAAATATCCATCACTTGACAGAGCCTTTATTAATGGTGATTTCATCGTGGTCCCAGTCA
TAGGTGACCTTGAGGGAATTGAATAGAAGGAAAACAAGAGACTTGGGGGACTTTGAAAGTGTTGGGACAGTAAATGACA
CAGGTCTGGAGAGTGAGGAAGCCACAACAGGATGCTCTAAGAAAACCTTTCTTTCTTTCTCTTAAAAGATTTCTTTTAT
TATTTACGTATATGTATGTGTGGGTTCCCTAGAGGGCCAGAAGAAGGTGTCCAATGTCATGGAACAAATGTGATAGAGT
ATTGTGAACAGCTTGATGTAGGTGCTAGGAACAGAACTCAGGTCCTCTGTAAGAGCAGTGGTTAGTAAGCACGGGGCCT
TTCTCTCTAGTCCTAGCAAACTTTTACAGCTAGAGAAGGTGTGGGGGCTGCCCATTCCAGGATGTTCATTCCAGCATTG
TTTAGTAACAGTGAATAATTGAAAATAACACCACGGTCTAAGCACAGGGGACAGATGAAGAAATTATGGTTTAGCCATG
CACAGGTGAAGCTGGTGGTTCACAGGTTGGTTGTCTGGCTTTTAAAGGTACATTTGGTTTCTTGCAGAGAGAGAGAGAG
AGAGAGAGAGAGAGAGAGAGAGAGAGAGAAAGAGAGAAACAGGAAGAAACCGCTACCTCTGTGAGGAGGCTGTTCCAGG
TTGTCAAATTCTCTGCCTCACCGTGGTTACTCACCACGGTCAGTCTCTATCATCACTGGGTGCAGACCTGTGCATGCTA
TTCTCTGGATCTGGAACGTTCTCCCTGCCCCTTTCCTAGCCCTCTGCCCTGGTAAGTTCTTCTGACCCCTTAGGAGTTA
GCATTAACATTATCCCTCTAGGGAAGGCTTTTTGACTGTCCCACACTGAGTTAGGTCACCCTGTTTCATGTTCTCATTG
TATCCCTGTAAAACTTCATTAGTGCCATTTAGGAGAGCATTTGTGACAACTCTCCCTCGCTTAGGCATTCCACCTAATG
AAGGCAGAGGAACGTGGAAGATCTAAAGTCACCGTCAGAAGCAGACCTCCAGGACCCGTGTCACCCTCGGATACCAGAT
CCGATGAATGAAAAGCTTATGAAGCAGTGGTATTCCCATAGTCTAGAAATGATCTTCCTTGGCTAGAGAGATGACAGGG
TGGGTGAAGGGGCTTGCTGCACAAACATAAAGACCTGAGTTCGGATCCCAGAACCCAGGGAAAGGTAGGCTATGAGCTT
AGAGCTAGGGAGAAGCTACGAGGATGTGAAGTTAGAGGGATCTCTGGGGCTCACTCGCCACCAGCTTAGTACTAGCTCA
ATGGTTCTCAGCCTTCCTAATGCTGAACTCCTTTAGTGCAGTTCCTCCTGCTGTTGTGATTCCCCCAACGACAAAATTA
CTACTTCCTAGCTGTAATGTTGCCACACTTATGAGTTGTAATGTAAATATCTGATATGCAAGGTATCTGGTATGTGAAC
CCCTGGGACCCACAGATTGAGAACCACTGTTCTAGGTTCAGGGAGAGTCCCTTCCCCAAGGGAACAAGGTGACAAATTA
GAGCAGAATACTCAGAGTTCCCTCTGGACTCCAACTTCCACAAAGATGCACGTGCCTATGATCAGTTGAATACTTCTCC
CTACCCCCCCCCCCAAATGTATTGTTAAAGACACTATCTCACAATGTTTCTCTGGCTGGCTTAGAACTTACTATGTTAA
CTGGGTAGACCTTGAACTCATGGAGATCCTCCTACCTATGCCTCCTATGTGCTGGGATTAAATGAGTGTGTCACCAAGA
CTGGCCCCCAAAACATTTTTTTAATTACAAAGGAATAAAATTGTAACTTCAGAATGTGTGGGGCAGTGGGCATGGGGGA
ATAAAGAGAGTGAGAGAAAAACGGCGTCCGGCCAGAGTTCTGGTGCTCTGGGCAGGTGGACTCAGGAGGACTGCCAGGG
TGGGTGTCTGGCTGTGGGAAGCCACAGAACTCCAGCCTGCAGTGGGGTGGACAAGGGGCGTCTCACAGAGGCCAGAGAT
AACAGGTTCTCAGTCTCGGGCGTCCCAGACACCGCTGGACACGGTGGAAGAGCTGAGAACAAAGTGGGGCCGGTCATCC
CCAGGGCCGAAGGGAGGACAGGGCAGGGGGAGAGGGGGCTCTGGGGGGTTCTCACATGGGTGAGAGTCTTTGGTCTGGT
CTGTGGCTGGAGTGCAGGAAGGCCTTCCAGCGGGAGGTTAGATGTGGCTCTTTAGAGGAAAGCTTATTCCATCGTTCAA
GCACAGTGGGCCTTGATGAGCAGAGACAGTCTATGGTTTTAGAGCTTTATTGTAGAGAGGCATGGAGAAAGAGAGGAGG
TAGAAAGAGAGAGGCTGGCCATGGCCATGTGGAAAGAGGGGGGAAGGGAGAGAGAGAAGGAGGACTAGAGATGAGAGTA
AGAAAGGTGAGAGCTTAAGGAGAAAGAGGGGGAGCCAAGCAGCTCCTTTTATAGTGGGCTGGACTATCTGGTTATTGTC
AGGTAACTGTGGGGAGGAGTCTAGCCAGAATGTCAGGAGCTTGGGGGCTTTATCTGTGTGACTGATAGTCACAGAATTA
TGGAGTTGGGGACCCTGTCGTATCAGGCACCTGTCTCTGGGGATGTGGCTCACTGTTCCTTCCCTTGTAGAGTTTTCTA
CTGAGTCTCCGGAGCAAGTCCCATTCAACCAAAACAGGCTGCCTTTCACAGCCCCACAAGAGTGGAGAAATCTTAAGCC
ATGTGACCAAGGTAAACATCACCAGTCATTGGACATAGTGCCATCATGAGCCCTGTATAGAATGTACCAAGAAGGGCAG
GTCACATCTGTGGCTCCCTTCCCACCAAGGCACAAGATGCATCTCCATATGGGAAAATATCACACAATTGCAAATTCTC
TGTTGTTTTGCTTGAGACAGGGCCATCTTATATAACCCAGGCATATAAGAGCTCATGATCTTTCTGCCTCTATCTCTCC
AGTGTGCTAGGGCTACACCGGCTAGGACTTTAAAAACAAGAACCTTTCTATTCCATTTATGATTGGGGTGGGGGTATAA
CTTTCAGGAGTTGGTTCTTCTCCTTCTACCATGTGAGCTCCAGGACTCGAACTCAGGTTGCCAGGCTTAGTGTGGCAAA
TGCTTTACCCATTGAACTATCTCCCAACCTTAGACCACTACTCTTAAAAAAAAAAGTCTTAAGGCAGCTGGATGTAATG
GTACATGTCTTTAGTTGTAGCAGTCAGGAGACTGAGGCAGGTGGACTTCTGAGAGTTTCAGGCCAGCCAGTTCAAAAGA
AAAAAAAAAGTTAGGGAGAGGTGGTTTAGTGATTAAGCGCACCTGCTGCTCTAGCAGAGCACCTCCATGGTGGCTCACA
ACTGTCTGTAACTCTAGCCCCAGGGGATCCTCATCTATGGGCACCAGGCATGCACATGGTAAAGACATACATGGAGGCA
AATCACACATACACATAAAAATAGATAACAGGTGTGCGCCACCACCGCCAGGCAGATTCTTAGTGAAAAGCTGTTGTGT
GCAAGGATTTGCTTCATGTCTATGTCACCAGATAGCCTATTAGCTTCATGGAGTCCGAGGCCACAAATCCTGTCTTGTC
ATTGTTATCTCCTGACGTGATGTACCCAGTAAATATGTGCTGATAAACAGATACAGTTACGGACATTGGGGACATGGGG
AGTCATGGAAGGATGTGGAGGGAATGGGGGAACATGGGAGACATGGGGGATCGTTGGGGGACATGGGGGCATGGGGGAT
GTCCATGATGCATTAACTGACAAAATAGGACATGTGAGGCCAGTTTTATAGCTTGGTTGGCATGACATCCTGGGCTCAT
TCATTCTCCAGCACTGGAGGCAGGAGGATCAGAAGTTCAAGATTACCCTCAGCCACACCAAGGTCAAGGCCGGTCTGGG
TTTTGTGAGATGGTGTCTGAAAACAAAGAAAATTTAAACAACCAAAACCTATGACACGAAATAACTCATATGATCTGGG
GATAAGAGCACACCCCTGTAATCTTAGTAATTAAGAGGCAGGAAGATTGCCAAAAGTTGAGACTAGTCTGGTCTATCCA
GTGAGTTCCAGGCCAATCAGAGCCACAAAGCAAGACCAGTCTCAAACGCAATTGCTTAATTAATTACAATTTAAAAGTA
AACAAAAGCAAAAATACCTATGCCAATGTTTGCTTAAATAAAAAGAACATAAAGAAGAGGGGTGGTGGTCTCATTCACC
TTTAATCTCAGCACTCAGGAGGCAGAGGCAGGGAAATCTCTGTGAGTTTGAGGCCAGCCTGGTCTACAGAACAAGTTCT
AGAACAGCCAAGGCTACACTGAGAAACCCTATCTCAAAAAGAAAAAAAAAACCATAATGATTCAGAAATAAACTGGGGA
CAGTGGCTGTCACTGAAAGAAATAGTCAAAGGTGATCTTTATTTTGGTCTTAAAAAACAAAACAAAGGGCTGGTGAGAT
GGCTCAGTGGGTAAGAGCACCCGACTGCTCTTCCGAAGGTCCAGAGTTCAAATCCCAGCAACCACATGGTGGCTTACAA
CCATCTGTAACGAGATCTGATTCCCTCTTCTGGAGTGTCTGAAGACAGCTACAATGTACTTACATATAATAAATAAATA
AATCTTTAAAAAAAAAAAAAAAAAAAAACAAAACAAAACAAACCCTTTGTGCTGCACCTGGGTCCCTACACACAGACCT
GGAGCCAGTCCCTGTGGGGCGGGCAGCCGATGCAAGAGTATGAGTTCGGCAAACTGGTACCAGGATGCAGGATAGCCAC
AGGCAGCGTAGGGATACAGTACTGAATGGAGGCAGTAATCGCCCTCCATTTCTCAGCTCTGTGATCCAGGCAGCTTATG
TTTCCTGAGCACGTCTTCTAAACTGGCACATCCATTCCCAGGAGGTCGGAACTCATGGCCATTTGTTGTGTGGCTCACA
GGAGTTTTTCCTCTCACAGTTCTGGAGCCTTCTGAGGCTAAGATGTAGTCCAGGGTACACCACTCTGAATGTGTTGTGG
GAGACGTCTTCTTGCCTCTTCTGAGCTTCTAGCACTGTGGCTCTCAACCTTCCTAATGCTGTGACCCTTTAACACAGTT
CCTCATGCTGTAGTGACCCCCGAACCATAAGATTAGTTTTGTTGCTATTGCATAACTGTAATTTGTTCCTGTTATTCCT
GAATTATAATATTAATATGTGTCTTCCCATGGTTTTAGGAGACCCGTGTGAAAGGATCAAACTCCAAGAGATCTCAACC
CACAGGTTGAGAAACATTGCTCTAGAAGCTCTTGGCAACTTTAGTATTCCTCTCTTATAACTGAAACACGTCCATCCCT
ACCTCTGTGTCTCTAGATCTAAATCTTCTTCATATGCTCTTTCTAATCCAGTGTGGCCATATCCGATTCCTTCTTCTTC
CTCTCCTCCTCTTCCTCTTCTTCTTGAGTCTCACATAGCCTAGGCCTTGAACTGACTATCCTGTCAAAGATGACCTTTG
AACTTTTGCTCCTCAGATCTCCACCCCCTGAACCTTGGACTTACAGGTACATTGCACCATGCTGAGTTTATGTGGTGCT
GGGGACAGAGGCCAGGGCTTTGTGCATACTGGGCACAATGCTCTACAAACTTAGGGACGACCACCGCTCAGATGTCATC
TGATTTTGATTATACCTTTGTTTTGGTTTGGTTTTTTGTTGGTTTTGTTTTGTTTGCTTGTTTTTTTGGTTTTTCGAGA
CAGGGTGTCTCTGTGTAGCCCTGGCTGTCCTGGAACTCACTCTGGCCTCGAACTCAGAAATCTGCCTGCCTCTGCCTCC
CAAGTGCTGGGACTAAAGGTGTGCACCACCACTGCCCAGCTTAATTACACCTTTGAAGCTGTTTCCAAATAAGTTATAC
TCTACAGGTAAAGGGGTTTAGGTCCTGAATATCTAATCTAATCTAATCTAACCCAATCTACCACTGATACCCATTTTCT
ATCACTGCCTATGGTGCGTCTCAAAAACGTAAGAAGCTGTTTAAAGTAACATTGTATCTACTCACAATTCAGGACTCAA
CAGTTAGGGCTGGGCTCAGCTGGAAAGTTTTGCTGATTTCTCCTGAGGTCATTAGCATGGTTTTTTGTTTTTTTGTTTG
TTTGGTGTGTGTGCGTGTGTGCATGCGTGTTTGTGTGTGTGTGTGTGTGTGTGTGTGTGTGTGTGTGTGTGTGTGCGTG
TGTCTCCTTCACAGCCTCTCAGGCTCTCCTGGTGGATCAGATGAGGTCTATGCACACGCAGCTAGACAGAGGATAAAAG
CATACGCTTCCATGCCTGCTGACCCTTCCAGCCTGACTGGGCTGCTGTAGGTTTTTATGGTCATGCAAGCAAGGCAAGT
TCAAATTCAAAAGACTCAACTTCTCTGTAGAAGTGGCAGAGGCAGATTACAAAGGGGCCTGCATATGGCAGTAGTGGAA
GTACTGAGCTGTCTTTACAAATGATCTCCGTAGACCTCCAGTTCTGGAAACATAAGGTAAACAGATCCAGGCCTTTCAT
GTTAGAACTCATCCTAGCAGCTGACCAGGCTCCTGTGGGGAAAGCTTGGTGAGTGCGCATGGATGTGCAAAAGAAAGCA
AGGTGCTCTATTGTGAGTGGCAGACAGCATGACTCCCATGCCCTAGGCCCCTGGTGGCCCCAATCAGAGACTAGGATCA
TAATTTAAGTATAAAGCAAAGATGGCCCAACCTCAAACCCTGAAGAAACAGCTCAGATTCATATGCAATGCTCGCTGAG
GCAAGATGTTTTATGACAAGAGCTGGTAGGGAAATTAGACTGGAGTTACTCCTTGGCAGAGTCCCCTGTCCCTCCCTTC
CTGCGGGGTGAGCTCTCTGCCCCTTTCCCCAGTGACTGCTCCACAGAGCTCTGGCAGGCCACACTGCAGTGGGAGGGAA
AGCCCTGGGGGTATATATCGGATGTCATAGGAGGTGAAGTCCTGGCTGCACTTTTCACTGTGTGACTTTGAGCCTGTTT
CCTCATCTGTGAAATGTGGGCTCTCGGAGCTTTCATAAGAACCAAGAATGCTTTGCCAATGCTGCAATCATCTCTGAGG
ACCACACAGCCCCTGGCTTGCTCATGCATGCATGCAATAGTCAACCTTGTCTGCCGAGAGCAACATACTCTTCCTAGGA
CTTTTCTCTGCCTTCTTCATCCTCTGCCAGTCCTCTCAAGCCTGAGCTTTGAATGAGAACGCCATCTTCTTAGTTATCC
TCTCCACTGTGGATCTTAGATTTCTCTCCTGAGGTTAAAACTTTCTTTTTAATTATATTAAAATTCAATTCTGCCGAGC
AGTGATGGCACACGCCTTTAATCCCAGCACTTGGGAGGCAGAGGCAGGCGGATTTCTGAGTTCAAGGTCAGCCTGATCT
ATAGAGTGAGTTCCAGGACAGCCAGGGCTACACAGAGAAACCCTGTCTTGAAAAAAACCAAAAAAATAAAAAATAAAAA
TTTAATTTTAATTCTTATTGGTTGAAATGCCTTTCATTTTTTAAATTAGGTATATATGTGCTGGCAAAGGAGTGTGTGC
ATGAGGGCAGGTCCCACAGATCTAGAGGAACACGCTGGATTCAGAGTCCCTTGTGAGCAGCCACACCAGGTAAACCAGG
AGTGAACTCTGGTGTACCCCTGAGTCATTCTCCTGCCTGACTTTTCTTCTCTTTCTGTCTTTCACTCATGTGTCCTACC
TTCCTTTCTATCTTTTCTTTTCTTTTACTTTTTTTATTGCATTCCCCTAAGATGGGGACTGATCTGATGCCAGGGACTC
CTGCAAGCCATCTACCACTGGACCACATCCCTAGCTCCTTCCCTGAGGTTTCTCAATGTGAATGGCCAAAGAACTGGAG
GTTTCAGAACCAGAAACCTCTAACTGGTTATGTGTCCCACCGTCCTGGGGAAGAACCAGAAAGGAACGGAAGAGGCCAC
TGAATCCTGGGGCTGGGTCAGGCCAGCTCCCAGCTGTTTCTGAAGACTTTTTCTAAAGAAACTTCCCCTTAACATAAAC
TTGCAGTGAAAGGAATTTTCACTAAGACGGTTGGTTTGTTCAACGTTTATTGAGCAATTCAACCTGGCCTACCCTAGAC
ACACAGCAGAGACATCGTGAGTCCTTTCCCCTGAAGAAAGAACAGGCTCAGAGTGTGAAAGGAGCTGTCACTCAGAAAG
GACATGCTGAACTCAGGGGAGGCTGCAAAGGCCTTGTGGAGGGAATGCCTTAAGTCTGTGGGTGAGTCTTTTTGGCAGT
GCTGAAATTCAAAGTGAGAAGTCTCACAAGAGACAGGAAATGTTCTGTTTTTATTTTTATTCATTTTTTTTCTCTTCCC
CCTTCCCTTTCTCCCTTTTGCTCCAGACCCACTCGCTCTGCCCCCGCCCCTCCCCTCGCTCCAGGCCCTTCCCCGCTCA
CTCTGGGCCTTTCTTTTCTTTCTTTCTCTCTCTCTCTCTCTTTAAGATTTATTTATTTATTTTTATGTATATGAGTACA
CTGTAGCTGTACAGATGGTTGAGCCATCACGTGGTTGCTGAGAATTGAATTCAGGACCTCTGTTGGCTTCAGTCCCCCC
TGCTCGCTCTGGTCAACCCGGCTCACTTAGACCCAAAGATTTATTTATTAAAATATCTAAGTACACTGTTAGCTGTCTT
CAGCCACACCAGAAGAGGGCGTCAGATCTCATTACGGATGGTTGTGAGTAACCATGTGGTTGCTGGGATTTGAACTCAG
GACCTCTGGGAGAGCAGTCAGTGCTCTTAACCGCTGAGCCATCTCTCCAGCCCCCTTCATTTATTTCTTAACAAAACCA
AACCAAATAGGGTCTCATGTAGCCCAGATCAGCTCCTGATTCTCCAAGTAGCTAGGGATGACCTTGAATGTCTGATCTT
CTGGCTCAGCCTCCTGTATGCTGGGGTTACAGGTGTGTGCCCTCATAGCCATTTTTGGGGGGATTCTGAGGATTAATCC
CGGGCCTTATGCACAGCTACATTCTCAGCTCAGAGACTAGAATGGTTCAGAAAAGCCTTGTTAGCTTCTGTGAGTGAGC
AGAAAATGGATAGACAGTGCCTTGCTTGGAACTGGAGTGTCCTCATGGACTGGGGCTCAGGCAGAGAAGAATAGGGAGT
CATTTTATTCTTTGGATTTCTTGTTTCAGTTTGGCTTGGGTTTGCTCTTGTTTCCATTTGATTTTCCCCAGATTTTTTT
TTTCCTTCTGGCTTATGAGGGCAGTAGCTCTGTGGAGGTCGTGGGGCAGCACCAACAGTCTAAACAGTTGTCGGTTCCA
TCCTACAGAGCTGCGTGAGATGGATTCTGACCACCTCGCTGTGGATTGGCGCAGCTCAGGAAGCAGTGCAGCTTGACAC
AGAGCTTGGGAAGCACACCCCCATTGATGGTGCTTGCTTTGCAAACATCCCTGATTGCTGCGGCCTCTACAATCCTCTG
AATGACGAACAACTTCATGGCCTCGTCCTTGGGCACACACCGGTCAACATCACTGCACAAGGTTGAGGCCCTTTTTGAC
GTGATCGCTGTTTCTTTTTCCTGTCTGTCTTTCTCTCTCTGTGTCTCTGTCTCTGTCTCTGTCTCTCTCTCTCTCTCTC
TGTCTCTCTCTCTCTCTCGTCACCTTGTAGCCAAGACCTAAAAATTCTTGTGGGTTTTGTTTTCTTTTACTTTCTGTAT
ATGTGAGTTTTATCTGCATGTATGTCTGCATACCACATGTATGCCTAGAGCCTGTGGAGGTCAGAGAGAACTTTGAATC
CCTAGAACTAGAGTTACATACAGATGGTTGTGAGCCTGCCCTGTGCAGAAGCAGAAAGGACTTGTAACTGCTGAGTTAT
CTTTCTGTTTGTTTGTTGTTTGTTTTTTACAGATTTATCCTATTTTTCATCACATGAAAAATAAGATCTTGTTTTCTTA
AGTAATTGCAGAGTGACAGACACCAGAGTAAGGACTTAATGAACCAGGCAGAAGGACCCTTCATCTAAAGCAGCCAAAG
AGTCGAATGATTAGAAGGGAGCATAAGAGAACGTGGTTAGCTCAGTGCAAAGGGATTACCAGGACACATGTACTCAAAG
GCATTGTTAAAGACCAAGGACAACACAGATGCCACCGTGAGGCAGTGTGAACAGGTGAGGCGTGAAATGCACATAGCCA
GAAAGGCGGCAAAGATTCAGCTCCATCTTCCTGGATACTGCCCTGTTTGCCCATCCAACCCACAAGGCACCCGGTTCAG
CTTCTGCAATAAGAGGCAGTATGATGCCCCAAAATGTTTGATACCAGGCTGTGATAGCCCTGAGGACAAGATCTGCCTT
GTTCCTGTGGCAGACCCAGCTCCAGCCTAGACCTGGCATTGGGTAGAGGCTGGCAGTTAAGAGTTGCTAGCAAATAGAT
GGCTTCAGAACTTTCCAGAAAGCTAGTGGCTGATAGAACCAAGGAATTCCTTAGACCAGAGTACAGAATGGCAGGAAAG
CACCAAAGTACACAGCAAGCTCAGACCAGGAGAGTTTGATCTCTGTGTCGAGCTCAGAGATGGAGAAGGACCCAGTAGG
GTATCATGCTATTATACCAGAGCTACAAGGAGGTCCTGGTCCTGGATAGGAGGAACTCATGGGCAAAGGGCTAAGGGCA
AACTAGGAACCTAAGACCTGTGCAACCATAGAAAGGCTCAGTAGAAGGACCCAGATATAGCTCTCTCTTGTGAGACTAT
GCTGGGGCCTAGCAAACACAGAAGTGGATGCTCACAGTCAGCTATTGGATGGATCACAGGGCCTCCAATGGAGGAGCTA
GAGAAAGTACCCAAGGAGCTAAAGGGATCTGCAACCCTATAGGTAGAACAACAATATGAATAACCAGTACCCCGGAGCT
CTTGACTCTAGCTGCATATGTATCAAAAGATGGCCTAGTCGGCCATCACTGGAAAGAGAGGCCCATTGGACTTGCAAAC
TTTATATGCCCCAGTACAGGGGAATGCCAGGGCCAAAAAGTGGGAGTAGGTGGGTAGGGGAGTGGGGGGGGGAAGGGTA
TGGGGGACTTTTGGGATAGCATTGAAAATGTAAATGAGGAAAATACCTAATAAAAATATTTAAAAAAGAAAAAGAAAAA
GAAAGAAAGAAAGGCTCAGTAGGGCCTGGGAAGATAGCTCTGTCAACTTGGGGCTTGGACTTTGATCTCTAAAACTCAT
GTTTAAAAAGTTGTGCATAGAGCCAAGCATGGTGATACACGCTTTTAATCCCAACACTCAGGATGCAAAGGCAAGCTGA
TCTCTATGAATTTGAGACACAACTAGACTACAAAGCAAGTTCCAGATTAGCCAGAGCTATAGAGCGAGGGAGACCCTGT
CTCAAAAAGAGACGGGGGTGAGGGGAGAGGAGAAGGAGGAGGAAGGGGAATGGAAGAAGAGGAAGAAGAGGAAGGAGAA
GGAAGAGGAGGAAGAAGAGGAGGAGAGAGCTATGTGTGGAATGTACGTGTAACCCTAGGGTTGGAGAAGCTGAGAAAGG
TGGGTTCTTGGGGGCTCACATGGCAAGCTTTAGGCCAGAGAGAAACTAGTCTCAAAAAAAAAAAAAAAAGAAAGAAAGA
AAGAAAGAAAAGATGGTGTTTGAAGAAGCTGATTTTTGGCTTCCACATATGTTTGCATGTACATTAGCATCTGCCCTCA
CTTGTGTTCCTACACCACACACACACACACACACACACACACACAGACACACACACACACACACACACACACACACACA
CACATACACAGCAAAAGATCTGAGGTCTGGTCCAGCTATCTCTGGAATGTTCATTATGGTCAGGCCTTGTATCCAGGCT
CAGTAAAAGTCCAAGAACTGAGTGGCCAAGATCCATACTTGGGAACCTGAGTCAGCCCTGGCAGAGTTGGTAGATACTG
CAATCGGGTGGGCAGGAGCTATAGGCAGGGTCCCTGCGGCTTGTCAGAATGTTGCCGCCTGGGCCCTTTCAGCTGGATG
CTGGGTTGGTAGGGGAAGAGTACTAGTAGGAGCAGAGCTGTAGGCAGGGTAGAGCTTTGGGTCTGACAAGGTCAGAGCT
ACTCCTGTTCTGGAAAAAGAAAGTCAGGGTAAACATCTGGCCCGTAAGTACCATGAACAAGCACTCAAGGGTACAGGAA
AAGGGTCAGAAGTGTGGCCTGAAAGGAAGTCGAAGCCATCAAGGAAAGCCAAGAGTGTTGAAGCAGGGTTGAATGCTAC
CTTGGCTGTATGTGTGACACTAGAGAGGAGATGTAGGTGGGAGTGCAGTCAGGCCCACCATCCATGATTCCAAAGCCCA
CCACACCTTGCACCATGCTCACTCTTTAACACCTTTGACTCAAACTCTCAACAGCAACCTCCGTGAAGGCCGAGGGGCA
TCCGAGAACAGGAGCAGGCAAGAAGCCTGTGCCTCTTCATCCCTAGACACATCCCTTCTTGTAGACTGACTACTGGGCA
GTAAACCGTGAGGATAATGAAACCCAGAATCCCAGGATGGAGGAGGATGCTGCGTGGCTAGCAAGCTTCAACCCTTTTC
TAGAATGGAATCCTCTTTAGTAATATAGTGGGTTCTCAAGCAACTAGGTCTGGCCTGTAGGCCTGCCCCACCCTGCCTG
ATCCTCCCAAGCCCTGGCTTCCCGTTGGGCTGGTCCTACCAAGGTAGAAGGCTCCAGGGCCATATTTTGGGCCCTTCCC
TCCCCTATACCTGCGTCAATGACTCTTTCTGCCTTCCACCCTAGCTTTAAGGAGGGTGCTCATCGGAGGCTTGGCTCCT
CATCAACAACCCAAGGCTCTCCAGCCTCATCAACTGTCAGGCAGATTGGGCTTGGCTGTGCTTCTGATCCAAGTTCTCC
ACCACTGCCTACCTCAGCACCCTCCAGTGATGTGCAAGTTCCCAAGACCCACCTTAATGCCCCTCTGCCCAGCTCCAGT
TGGTGGAGACCAAGCACATGGGCAGGGCAGGAGTGTGAGACTTCCTAGCCTTTCCCCCTTGAGCCGACCCTTCAACTAC
CCCCTCACTTCATTCCTATGGAAAGACCAAGCCATGGTTTATAATACTTCCTCTGAACTCTTAGGAGGAAGATTTTTAT
AAAGCAGGGACTTGAAGACTGGTAACACCATGTTCTGAAGGTTGCTGTAGTTTGCAATTAGTTCTTCACCAAAGCAAGA
AAGAATAACAACATCAGCCACAGGCCTGGGGGGTTGGGAGGGGAGCAGGGAAGCTTGAAAGCCAATTTTTTTTATATTT
AAAATGTTTTATTTTAAAATATTTTTATTATTTTTAATGATGTGTGGAAGTGTGTCTGCATGTAGTGTCATGTGAATCC
AGGTGCCTGCAGAAGCCAGAGCCATTGAACCCCCTGGATTACAGCTACAAGGGCTGTGAGCCACCAGATGTGGGTACTG
GGAACTGACCTCAGGTCTTCTGGAAGAAAACAATTGCTCTTAACCTCTGAGTCATCTTTCTAGCCCCATAAAATGTTTT
ACATTTTTGTGGATGTCTCTCTTGCATGTATGTCTGTGCCCAATTTGCATGCCCCATCTCTGTGTTGGACATAAGAGAG
CACTGGATTCCCTGGAATTGGAGCTACTGATGGTTGTGAGCTGCCAAATGAGTGCTGAGAATGGAACCTGGATCCTCTA
TAAGACTGACAGGTGCTCTTAACTGCTGAGCCATCTTCCCAAGGCCAAGCATCATTGTCAGGAGCTACTGGACTGCCAT
GAAGAGTAGACTGTAGCAGCTCTTGGCAGTTTTCCCTGGGGCTGTAGGCAGATGATAAAACCCACAGTATAGGAGTAGA
TGTGCCCGACAGAGGAAGCAGAGACTCTATAGGAAACACAGAGCTGAGGCTGGGTACCTGGGAGCAGCCAGAAGATCTC
ACAGTGCAAGAACATGCAGTAGATGCAGATGAGTTGGCTGCATAAGGAAGGAGAGGGAGGACAGGAAATGGACCAGGCT
GATCAAGATACCAGAAGAATTTCTATACAGCTAGAGTGAGGAGAGCGTGGGTAGGACAGGCAACCCTCAGGGAACGCCC
AAGGTTTGGAAGAAGACTCTTTGGCCAAGTGGTCATTTGATAAAGGGGGGTATGGCTTACCATTGAGGATCCTGGCCAT
GTCTCAAGAGAATACCCTCGAATACTCGCTCACTCCTGCTTTGACCCCATGAGCTTTAGATATGACTGAATCTGACACA
CACACACACACACACACACACACAAGGGGGGAGTATTGGATGTGTACAAGTGGTTTGCTGACATTCATGTCTATGTACC
ATGTGTCTAAAGTGCCAAGGGGCCCAGAAGAGGGCATCAGGTGCCCTAGGACTGGAGTTACAGTCAGTTAGGAGTCACC
ATTTGTGTGCTGGGGATCAAACCCAGGTCTTCCATAAGAGCAGCCAGCACTCTTAACCCCTGAGCCAACTCTCCAACCC
CACATGGCTGAACCTTTAAAGCCACTAGAGTGAGTTCTATCAGCTGTTCATCTGTCCTCCTGGGACAGAAGTGGCAATC
CTGTATACTTCACTTTCTTAACCATGTAAGGAACTTATTTTGCAAGTAAGTGTCTGGAGCTCAAACTGACCCAAGAATT
TGACTGAAGTCACACAACACATCAGACACAGAGGAGGTTCAAGCCTGTCTAATATCCAAACTCTGGGTAATGTAAATAG
TTGATATATGCTTGTCACACATATATTCAACAGATTCCCTGGGCATGTAAACTTGGGAAATGCTGGTTTCAGTGAACTT
GAGCAGACTCTTTTCACAGCATGGAGAAAAACTTTAGGCCATGGACTCTTGTCCCAGTTGGAGTTGCTGTCCCTTAGAA
GCAGGACCTCCTGTCCTGTAAGGTCAGAGGTGGGGCACTGGAGGCCTCTTACTTCAAGCTGTTTATATTCTCACTTTAC
ATCTATGGCTCTCCCCACAACACATACACATCTTATGTGTGAGGAGAGGGGACTGGTTTTTAATTAGACTTTGAAGAAT
CTTGGGTGAAGGATAGTGGGGAAGCCAAACACCTCTGACCCTTAGTTGTCACAAGAGATACCTTCATTCTACGTACAGG
GCCTAAGGCCTTGATCATCTATGGTGACATGTCTTTGGGACACTGCCAAACAACAAAGCCATTTCATGTATTAAAGTTT
GTTTGGAAGGGACTTGTGGATGTGGTATCATTTTAATAAAAAGCTGAGAGATTAAGAAGCAGAGTTGAGGTGGAGAGAA
AAGAGCCACATTTAGGGGAAAGAGCATACTCACATAGCCCAGTCCTGGGAGAAGCCAGGAATGGAGCTGTTCTTGATGC
AGCAAAGAACTGGATTTGGATCTGCAGGCATGAGAACTATGGGAGATGCTTGAGGCAGAGGTCATTTGATGCAATCTAG
GAGTAGGGACTGGGATATGAGTCAGTTGGTAGAGTGCCTGCCCTTTGTGCACAAAGACCTGGCTTGGGTCCCCAGTATC
GCAGACACAGAGACTGGAGGTTCGTGCCTATAATCCCAGCTCCTGAGGGGTAGAAGAAAAAGGATCAGAAGTTCAAAAC
GTTCTCTGCTACATAGCACAGTCGAGGCCAGCTTGGAGGCCACACACACACACACACACACACACACACACACACACAC
ACAAACTCTTAAGGCACCCCCCCACCCCAGCTTCTCTCTCATTTCTTAATGGAATGCCAGCTTGCACACAGCTATTCCA
CATCTTGCCTTTTTTCTCCCCTCCTCCCTCCTCCCCTCCTCCAAAGCCTCTTTGGCCCAGCGTCTTTGTCAGCAGTGTT
CCCTTAGGTTCTCGCTGTATGAAGCATCTTTCTGTAACTTCTGCTGGAGAATAGCTTCTGTGGACACCACGGAATGTCT
GGTTATTGAGAAAGTGCGGAGAGATGACCTTCCCCCCTGAAGAGTGCCATTGGCACACTTCCCTCGACCCTTTCTGCCT
CCTGAGATCAGCCTTCCTGAAGTCCATCCCTTCCGGGGAATGGGGCATGCCAGTAGGGTCCCCAGGGACATTCTCCCCA
GCTATGCTGGACACTTCCCCACCCTCTAGAGTAGATGCCAGAAGAAGAAGGGCAAGTGGAAATGGGGGTGGGAGTGGAG
GTAGCGACAGAGTGGAGACAGAGAAAAGGGTCTGACTGAGGCCTGTGACCCCTGCTGCCCCCAACCCATGCTTGTCATG
AATAAGGCCAGTGGATGGAGAAACACTAGTTTCTTTCTGGCTTCAAGGCTCTGGTTGGATTACTCCTTTGATGTGTTTG
TCCTTTGGCCTCAAAGGGACGGCTTCGACTTGGTAGCTCATGATAGCCTTAAGTACAGCAATCCAAGGTCACCAGGCCC
TCTTTCTAACACAAGTCCCCTTCTCCCTTGGCTTTCAGGAAGGACCAAGGCCCCAGAGCCTCGTTAATCTGTTGTCAGA
GTCCCTGATGGCATGCTAGGTATTTTTACAATTGTTCTAAAATCCCATTATCTCCACCGTCCGGGTTGCACAGGGGCCG
CCATTGGCTGAATACGTGACCGACCACCAATGATTCCCTCCAGGGAACGCCAGGCAGAGCTCCCTGGGCTGCTGGCCAT
CATCCAAACATGCTCCTCTCCGTGGAAAAGAAGTGATGTCATACACGGAAGGGGTGGTCTCCACGCACAGGATACCTGT
AAACACCGAAGCATGTTTCAAAGAAAAACAAAAGTCAAATTACAGAGCTGCAGAGCTGGGAGGGGCTCGGTGTCCACTT
TACTCGTTCTCTCAAGGCAGCCCAGGCTACACCGGTCACTTCCCACTCACCTGTGTGTGTTATTATCTGCTCAATTCAT
CTAGAAAATATTTATTGACCAACAAGTATTCTAGATGCTTGGGTGACATCCAGAAACGGAGATGAGCCTCTCCCCTCCC
AAGGGCTTGTGTTCCGTGGAAAGATCATTGGTAAAAGGAGAAGGCAGAAAATGTTAGAAGGTGATACGCGCAAGACAGA
TGAGCCAGGTGAAGTGAAGCTGGGGAGAGCCAGCAGAGGACACCTCTATGGAACATTCCAGAAGAAGCAGTTAGAGAGC
AGCCGGTCAGGAACAGGAGAGAAGTAGAGCAGAGAGAGGAAGCCGGCGGGGGAAGCCTGAGCTCACTTGTCCCAGCTCA
CAGTGAGGACTTAGGGTGTTAGGAGAGCCAAACAGGGAGCCAGTGAGGGAAGGGGAGTGACACAGTTGTTCTTTGTTCC
CAGGAGAGCACCTAGAAGGTGAGGTCTACCTGCAACTCCATGTCTACACAAGGTCTGACAAGAGTGCAAACGTTCTGGA
GCCTGGAGATGGCTCAGTGGGCAAGAGAGCGAGCTGAGCAAGCATAGAGATTCACGTTCGAACCCCCAGTACCCATGTA
GAATGCAGGTATCGCCTCTTGCATATCTGTAACTTCAGTGCTGTGGAGAGCAAAGACAGGACAATTCCAAAGGCTTGCT
AACCATCAGTCTATCTCCAGGTTCAGCGAGAGAGCCTGTCTCAAGGGAGTAGGGCAAAGGGTGCAAACACATGAGCATG
AACACGTACGCACATACATACATACATACATACATATACACATACACACATACACACATACACTCCACACATAGATACA
CCATATACTCACAAAAATACACATGCATGCACACACACCACACAAATATACTCCACACATACATACACAAAAATATACC
ACATTCTCGCAGACATAAACATTCATACATATACCACACAAATACACTACCCATACATACCCACACAAATACACTATAT
ATACATACAGAAATACATCACATATATACCCACACAAATACACAATATGTATACACACAGAAACACACCACATACTCAT
ACAGCCAAACATAAACATACACCATACAAATACACTACAAACACCTACCCACACAAATGCACCACACACTTAAACACAT
AAACCTGTACATGTATACACACTACACTAATGCACACATAAATGCATCGCACACACAACACACATGCTCACACACACAT
ACCACATGCACACACACACAGCACAACACCCATACACATTCAACACACACCACACACCCTCTCACACACACTACACACA
CATCTACACATTCAGCACATGTGCACACCATACATACGTGCATACCACCACAATACCCACCACGCACATACACACACAT
ACACACACCACACTCTTACACACATACACACACCATGTACACTCCCTTCATACGTGTACAGAATGCAAAACTTCCGCTG
GAATGAATGAAGAAATGACCCTCATACTTTCCCCCCCCCAAAAAAAAAAATAGGACAGAAGGGCAACTGGACAAACGTG
CCTGCAATCTGGGAACCGTATCTAGAGGTTTGTGCTTCAAATGCCTGGGGGGCTTCTCACGACCCTTGTACACAGATCC
TTACCCACAACCGTGATTCCTAAAGGTTAGGACGGTCCCGGACGGGATAGAACATGAGCGTACCACTTTAAAAAAGGAT
TTCTTTGTTTTCCTTCTGTCTGTATGAGTGTTGTGCCTGAATGCATGTATGTGCACGGTGGGTGTGCATGCCATACAGT
GCCTGAGGGGGCGAGCAGAAAGCACTGGATCCCCTGAAACTGAAACTACTGATCATTGTTAGCCACTATGTAGGTGCTT
GGAACTGAACCCTGGTCCTCTAGAAGACTAACAAGTGTTCTGATCTGCGGAGCCATCTCTCCAGCCCCGAGAGTATGTG
CACTCGCTCCGTACTGGGGAGGGAGCACCCCACGGAGACACTCTCAAACACCTTTAAATAAATGATTATTATAAATGAT
TGTTAGCTAAATCCACAGATGTATGCATGCCTGAGTGAAACGTTTGGTTGCTCAACGCCACTTCAACCGAGATGGTTGG
AACTATTGTTTTTTTTGCTGTGACTCTTACTATGATTATCATGATTGATTGTTTGTTTTTTCTAGACAGGGTTTTTGTT
TTATGTGTGTATGTAACAGTCTTGGCTGTCCTGAAACTTGTTTAGTAACCAGGCTGGCCTTGAACCCCCCAGAGATTCA
TTTGCCTCTGCATCTTGAATGCTGGGCAAGCACTCTACCAGCTGAGCTACATCCCTAGCCTCAAACACTTGGAATTATT
ATAAACAAACAACATTCCAGAGAACAGGAAACCCCATGCTGTTGCTTCCTGTCCTGCATCTACCCACGGCCCTAACAGG
ACATCTCCTCTGGTTTCTTATGTTACAGTGGTTTTTACCTGCTCTGTCCTGTCCAAGCTAGAGTGTAGGGATTTTAGAG
TGTCTAGAAGCAGACTCCTGCCTTGCACACCCCTGTGTATTCCTATGGAGCTCTGAACCAGTAGGGTTTCTCTCTAAAT
TAGAGGGTTGCTGAGGAATGAGGGTCTACTAGATAGCCCAATGTCCCCAGAGAAAAATATAACAGAGCCCGGGGTATAG
AAGCATGGGGGTGTGACAGTGGTAGAGGGGACAGGCAGGCAGGCTTCATCCCATTTCTCTCAGGAGGATGTGTAGACAG
GCTCACATGTCAGAGCTGCAGGGGCCGAGACCAAATGCTGCAGGGAATGTTGGAGCCATAAGCACAAAAACCAAGAACC
AGAAGTCCCTCCCGTCCGCAATGTCCCTTCGCTTAGCCTGATGGCATCCAGAGAGAGCCTGGAGCGCCACTCTGGGCTG
CTGAGTCTCACGATTCTTGGCCTCTGGCGTGCAGGTGCTGGCTGCCTGAGATTTTTCTGCCTGTAAACAGTCAAGGGCC
CCTGATTATCTTACATAGTTGGAATAGGCACTCTCATTTTTTTCCCCTCCTCTTCCCAGAATTCAATAAAGGCCAGAGA
TTCCACAAGCCATCTGACTCAACTTGATTTCCTCCTTCCTCCTGTTTCTCCACCCTATGACCCTGAAAAGGCCCAGAAC
CCAAGGCTCTGCAGCCAGGCCCTAGCCTGTCATTCCAGCTGCTGGTCAGGAGTCTTTAATCTTATTGGTCACCTGGTAC
ACTCGACAGAGTGGACAGCTCTATACTGCAGGAGAATGGTGGCAGGAGGTGGGGGATGGGGAGGATAGTCAACAGCCTA
GTACAGATCAGGCATCCTGAGTTCAAATCCTGGCTCCCCAATTAACAATATGGGGAATGAGTTATCCTGTGTGAGCCAG
TTTCCTCCCGTGTAAGTGGTGTGTGTTCATGGTTTCTTTTCCTTAAGGAGGCTGCAAGGATTGAATGGACAGTGCACAG
AGTTCCTAACAACGGCTCTAGTGATTATATTTCCATCAGATAAAGAGACAGGAGGCTCAGGTCTGCGGGATTGACTGGG
GTTCAAGATGGAGGGAACACTAGGATTGGCATTTTACAAAGAGAGCAAAAGGGAAGGGGTCCAGGAAAAGTTTGGAATG
TCTAACAGGAGCCCTTCAAAAAGTTGCAGAGCTGGGCTTGATGGTGCGTGCCTTTGATCCCAGCACTTGGGAGGCAGAG
GCAGGCAGATATCTGGGAGACCTACATAGGCCTATCTACACAGGGAGTTCTAGGCCAGCCAGAGCTGCAAAATGAGAAA
CAAACAAGCAAACATCACAGATAGAAACAGCTGCATAACAGAGGACTCTGAGCCCAGTCAGCAAGCTGGGTGAGAAGCC
CAGGGTGTCCAGTCTAAACTTCGAAGGTGACAGCACTTAAGATGAACAGTGTCCATCTTAGGAGGCCATGGAAGCCTTG
CCAGGAAGGACCTCACCTCAGGTCTGTCTCTTCTCTCTCTCTGCTTTCTCTGTGGTGTTTGACTTCAGAGATTGACCCT
GGACCCCCTTTTTTCTCTCTCTGTCTCTGGCTCTCTGTGTCTCTGTCTGTCTCTCTTTCTCTCTCTGTCTCTCAGTCCC
TCTCTTTGTCTCTGTCCCTCTGTCCCTCTCTCTCTGTCTCTCTCTCTGTGTCTCTCTCTAACACCCCATCTTGCCCTTA
CTCCCCTCCACATTCACAGTTCTACTTGAATTCTGAAGACCATGTGAGTTCTGAGTCCCCCCTGCCTCTATCATGCTGG
TCTCTCTGAACACTCTGCTTCTCCCCAGCTGCAAATGACAACTTCTCAGGTGTTTGGGTTTTTGGAAGAAAAAGGAGTC
CAGACACAAATGTTCATGTCTGTGGGCCACTTAAGGCAGATGGAGACACCCCCTGAACTATTGCTTTATGGCATGTTTC
TGTGAGCTCCTCTCTCTATGCACATCTGGTCCACCATCATATAGCTACTACTACTATCCTGGAACTCACTCTGTAGACC
AGGCTGGCCTCAAACTCAGAGATCCACCTGCCTCTGTCTCCTAAGTGCTGGGATTTAAGGTGTGCACCAGCACCGCCTG
GTGAAAATACTACATCTTTGGAAAAGGGTATGCCTGCTTGGCATCAAGATAGTATCTTGGCTCTCCGGGTTTTTTGTGA
CTCAGATTTGGGGAACCCTTTCATCTGCCTCTGTGCCTGTGATAACAGAGCTCTGTGGCTGAGTCAGGATGCTGCTGCT
CTAGCCTACAAACCCTCAGCCCAGTAGAACCGAGTGATTATGACCAGTCACGACACATCCTATCCTGGAAACTGCTGAG
AGAATCCATTTCCATCGTTACCATTGTAAGCTAAACAAAAAAAGAAAAAAAGAAAAAGAAAACCCGATGTGAGGCAGGA
TCTATGTTCCTTAGCTCAGTTTGGCTTCAACACGTGCATGTTTCCAAATGCCATAGACCATAAGATACACAATTTGCAT
TTACCAATTAAAAAATACTTTAAAGGTGAAAAGCGGAGCTGAGGTCAGGCTAAAGGAGAAGGGCTGGGAGAAGGTCAGC
CAAGCTACCTCCAAACCACACCCCGCAAGTCAGCTACAAAGGACTTTGCAACTTTGCTAGAGGCTGGAGGACATGCCGT
TGCTATACTCAGCAATCTAGGGCAACGAGAGCCCTGCCCTGACCGTATTTTAGGGTCCAGCTATCTGCATTTCCGCCCC
CCCCCCCCAAGCACCCAAGCTCTAGCCATGCTGGGATGTAAGCAGAAGAGTGCACCTCTCCTCTGGTAGACTCAACTGG
GTCTCAGTTGTGGACCCTTTGTAGGGTAACTGAAGGCCTCTCTTATTAGTGAGAGGTATGTAGGGCCAGGAAGGAAGAG
AGGAAGCTGAGGAAGAAAAGGCACTGGCTGACTGACCGCTGTGAGAATCTTGTACAGCAGGAATTACTGAACCCATTGC
ATGGATGAGATTAGGGTATCTGTCAAGGTCATTTCTACACAAAGAAGAGCTAAGCCACAGACTCCCATCTGACTGACTT
GAAAGCAGAGGCCTTCTTTCAAAAGCTTAAGATCTCGAATCACACCATGGCAATACAGCAACTCTATTTACTATGCATA
CATGTGTTTGTGTAATTAAGATTGGGTCTCATGGAACCACAGCTGGCTTTGATTTCACTTAGTCTAACAAGAACTGTGA
GCATCCCTCTGTATCTCTCAGGTGTTGGGATGACAGGTATGTACTGCATACCCACAGTGCTGGGAACCAAACCCAAGGC
CTCATGTACCCTGGCAAATATTCTCCCAACTGGCCTACATCCCTACCCCATTACCTAGTGTTTTTTGTTAGTTTGGCTT
TTGAGACAGCATCTTACTCTGTAGCTCTGACTGATCTGAGACTTACTCTGTATCCCCAAGGGCATTGAACTCACAGCAA
TTCTGTTTCAACCTCAACTGAGATAACAGATGTGGGCCACTAGACACTGGTTAATTTTTATTAGGGGAAGGGGCATTCC
TGGGGTTGGAACCTTGTGTATTCTAGAGAAGTTATCTACCTTTGAACTACACTTCCAGGGTAACCTTTTTAAAATTCTC
CTTCTAATTCATTTCTTGTTCTGGTGCCAAAAACTATCATGTATTTTTATGGTTGCTCATTTATCACTGTATTTTAATG
TTTATAATGCTGTTAGTCTTTATAATCATCACTTTTGCTTGAACGGAGTGGTGCATGCCTATAATTCCAGCATTCCAGA
CATAGAGGCAGGAGGATTGGCCACAAATCCTCAGTGAGCATGTCCTACAAAGAATTCCAGTCCCATCTGGGACTGTAGT
GTGCGTCTCTGTCTCAATTAAAAATAATAATAAAACCACTTTTACACCCCAGTCCACCCTGCAGACGACATATGAGTCA
GTCAGCCATCAATGAGCATTCAATGCCTCAGCATGGTAAATTGTCTCCACCCAACCCTGGTCTGGGAAGCAGGGCTCTC
ACCTGCCCTGTCTGGAAGGTTATGTAGGTCACTGGAACCTGACTCGACCTGCTCTATCGTAACAACGCGTACTAAGAGT
GTCGGGAAGGTCCCCAAATTCTCTGCATCTCCCTGTGCTTCCCTCTTATAGGCCCGGCCTGGTCTGTTCCCATGCACAC
AGGCCACAAAACTGGAAGGCACCAAGGTAGTATCTTGCTGGTGGTGACATGTCCCCGCACACAAGGACCAATGAGAACG
ACACCAAGTCAGCCATGCTCCCAGCACTGGGATGGGAGCAAACTCCCTGCCAAGAGCCCTGAGTAGCTAAAGCTTGATG
CCCATTCTCTTGAGAAAGCCCCTTCTAGAAAGTTCCTCTTTCTGGAAGCAGAAGCATTTTAGGCAAGGCGAATAGGCCA
GCGCAAAACGCCCAAGGTGATGGGCCGAAGATCACATTTTCAGGATGCCTCTCTGCTTTATGTGTTTGCAAAGCAGATA
TTTGGGGAGGTTGGGCTCCAAATTGCTTCATGGTTGCCAGCCTCGTGGGAAATGGCTCACATTCTTAGCATAGTTAAAG
AGCTGTGAAGCAACAGAGAAGATTGCTCTGAGGCCTCTGGGGAGCTAAGGAAGATGAGCCACGGCGTAGGCATGCCTCC
CTGGACGGGTTCTGAGATGGGATGCACCAGTTATTTTTTTTCCAAGAAGGCAGGGTTGTAGTGAGTTTCTGAAGGGTCC
ATTTGTGAGAGTCACTTCAGGGCTTATGCAAGCCCAGGCCTGATTGCTTTCCAAGACCACTTAAGCAGCCCCTGACCAG
ATAAGCACTCTTCTAAACAGGCAGAAGTTAGCTTCACAGCATTCATGAGAAAAGCTTACGCTATACCCACCGGGTTGGC
AATTAGCATTTCTCCTTTTTCTTCTCCTCTTCCCTTTCTTCTTTTCATCCTCTCTTTTGTAGCCCAGGTTGGCCTCGAA
CTCTCTATAAAGAGAACCTTCTTATATTCCAGCCTCCATCTGCCATGTGCTAGGGACTGAGATTTCTAGTTGACTGAGA
TTTCTGGGGTTTTGTTTTTGTCCCCTCACCCCAAGTTCCTCCCTCCCCTCAGTATACTGCCGTTGAAATTTTTCTTTTA
ATTGAGAAGGCATATCATTTCAAAATCAACATCAGTAACATTTTTATTTATCCTTTGAGAGCTTTATACAGGTATATAG
TTTATCTCAATTATATCCACCTCTCCAACTCCTCCAACACATCTTTCTCAACTTTATATTCTTTATTTCCTTCTCCTCC
TCCTCCTCTTCCTCCTCATCTTCCTTCCTCCTCCTCCTCCTCCTCCTCCTCCTCCTCCTCCTCCTCCTCCTCCTCCTCC
TCCTCCTCCTCCTCCTCCTCCTCCTCCTCCTCCTCCTCCTCCTCTTCTTCTTCTTCTTCTTCTTCTTCTTCTTCTTCTT
CTTCTTCTTCTTCTTCTTCTTCTTCTTCTTCTTCTTCTTCTTCTTCTTCTGTCACTGAGTCCGATTAGGGTTGCCCCTG
TGCTGATGAGTGTGAAGTTACTGTTTACTGGGTCATAGGCAGTCTACAACAGCATTTTAAAAAATAAGTAACCAAGTAA
AAAGGCCCTCAGGTCAAAACTGTTTATTGCCTGTCTTGATAGTAAACCCCAGTGTCTTAGTCAGGGTTTCTATTCCTGC
ACAAACATCATGACCAAGAAGCAAGTTGGGGAGGAAAGGGTTTATTCGGCTTACACTTCCATACTGCTGTTCATCACCA
AGGAAGCCAGGACTGGAACTCAAGCAGGTCAGGAAACAGGAGCTGATGCAGAGGCCATGGAGGGATGTTCTTTACTGGC
TTGCCTCCCCTGGCTTGCTCAGCCTGCTCTCTTATAAAACCCAAGACTACCAGCCAGGGATGGTCTCACCCACAAGGGG
CCTTTCCCCCTTGATCACTAATTGAGAAAATGCCTTACAGTTGGATCTCATGGAGGCATTTCCTCAACAGAAGCTCCTT
TCTCTGTGATAACTCCAGCTGTGTCAAGTTGACACAAAATTAGCCAGTACAATTGACCCCTTGTCAACTTGACACACAA
AAACATCACTAGTAAGCCTCAACCCTTACAATCTTATTCATCCCCAAGATCTAAATAACTTTAAAAGTCCCACAGCCTT
TACATATTCTTAAAATTTCAATCTCTTTAAAATATCCATCTCTTTTAAAATCCAAAGTCTTTTTACAATTAAAAGTCTC
TTAACTGTGGGCTCCACTAAAACAGTTTCTTCCTTCAAGAGGGAAAATATCAGGGCACAGTCACAATCAAAAGCAAAAG
TCAATCTCCAACCGTCCAATGTCTGGGATCCAACTCACGATCTTCTGGGCTCCTCCAAGGGCTTGGGTAACTTCTCCAG
CCAGGCCCTTTGTAGCACACGCATCGTCCTCTAGGCTCCAGATGCCTGTACCCCACTGCTGCTGCTGCTCTTGGTGGTC
ATCTCATGGTACTGGCATCTCCAAAACACTGCATGACCCCTTCAGTCCTGGGCCTTCAATTGCAACTGAGGCTGCACCT
TCACCAATGGCCTTCCATGGCCTCTCACAGTACCGAACCTCAGCTGCTTTGCGTGACCCCTTCATGCCTTCAAAACCAG
TACCACCTGGGTGACCCTTACATATTACCAAGTCCCACTGCAGCAGGAGTACATCCTTGGCCATCTCTGGAACACTGCC
TCTTTGTGCTTTCAGAAAACACTTCCCAGAAGATGTCACCTCAATGATGCTGGTCTCTTCTTAATCACCGCTAATTTCT
TAGCTCCAGCTAACCAGCATCAATAGTCCCAGTAATGCAAAGTTTTTGCTTTGGTAGTTCTGGTATCTTGTTAATCACA
GCTGATTCTTCAGCCCCAGCTAACCAGAACTACAGAATCTTCACAAACAAAACAGCAATGGCCCTGAAAAGAGTCTTTA
ATTTTTCCTCTGAAATTTCACAAACCAGAGCTCCATCTTCTGCAGTGTTCTCAACATTATCTTCCAAGCTCCTACATGA
CATCCGACAGAGCTCTTAACAACGGATGGATCTTCAAGCCCAAAGTTCCAAAGTCCTTCCACAGTCCTCCCCAAAACAT
GGTCAGATTGTCACAGGAATACCCCACTCTGCTGGTACCAATTTGTCTTAGTCAGGGTTTCTATTCCTGCACAAACATC
ATGACCAAGAAGCAAGTTGGGGAGGAAAGGGTTTATTCGGCTTACACTTCCATACTGCTGTTCATCACCAAGGAAGCCA
GGACTGGAACTCAAGCAGGTCAGGAAACAGGAGCTGATGCAGAGGCCATGGAGGGATGTTCTTTACTGGCTTGCCTCCC
CTGGCTTGCTCAGCCTGCTCTCTTATAAAACCCAAGACTACCAGCCAGGGATGGTCTCACCCACAAGGGGCCTTTCCCC
CTTGATCACTAATTGAGAAAATGCCTTACAGTTGGATCTCATGGAGGCATTTCCTCAACAGAAGCTCCTTTCTCTGTGA
TAACTCCAGCTGTGTCAAGTTGACACAAAATTAGCCAGTACACCCAGATATGCTATCTTTCTCATCCAAAAATTCTAAA
TCCTATATCCTCTTTCCAGCAGATGATTCTATGGCCAGCCACCCAGCTGGAAAAGAATATAGGGTCAAACCTGTCACTG
GTGTGTGTGTTCCCTGCTGGCTACAGTGGCTGGTGGCCAAAAACCACACCTATTGAATTCCCTGAACTGAGAAAGCAGC
ATTCCTGAGACCACTCAGTAGTCCAGGCAGCCTCAGACAGCCATGCCAGGAAATGCAGAGGGAGAAGAATTCCTTCCTG
GTACTGCCTCTGGGGCCAGCACACAGGTCCTCCATCCTGCTGCTGGGGTGGCTGAGCACCTAGGGAAGTTAACACACAT
GCCACAGAAACCTTGCCCACTGAGGCTCTGAAGGGAGTAGTACAGCGAAGCAGCTCGCTGTTCCGTGTCTGTCTGAATG
CGAACCAGGCAGAAATGCTCCCGGGGACTTGAGGCCAGGTGTGTGACTGGGATAAGCAAGGTCCTGAGACTTGGGAGGA
GGAATGAGAGGCATGTCTCAGAAGTGTGGAAGCCCAGCAGGTGTGAGTGCTAAAGGGTTGAAGGGAGACAGGGCCTCCC
TAGAGTTGGAACCTCCTGTTAAGCAGAGGTTCTCAGCCCTACCACCATCTAGAAAGCTCTTAAGGACGGCAGTATACTT
TATGCATCATAACCAATTTAACCCAATTCCTCCAAGGTGGCACCAGGATTTTTTTAAACATCCCTATAATTACAATATT
CATCAAGGCAGGAGAATCAGTGCTTTGAAGATATTAAATGTAGGAACCTCTTGAGTGATTCACCCGCCATCTTTTCTCT
GCGGGACTGATTCTCAAATCTCTGCAGTTGCCTACTGTCCCCATTGCAACCTATTTCCCTGCTGACCACCCAGCTGCAG
TGAGCCTAGCCATCTGAGGTTTACAGTCACCTAGGACCCAGGCTTATGACCACGTGTAGCTACCAGCAGGCAGGCGTTT
ATCTGTCCAGTGAAGCCGACTATACCCATTGGGGCAGGTCCTATGGTGCCACTTATGATTTCTTGACACCAGCCGACCT
ACCTCCTACATCCATGTAAGCCACATCGCATGCTCTGTTATTTCCTGGGTGATTTGCATACTAAGGCAATCTGACATTT
CAAGCAACCTTGATGGGAGAGTTGACAAAGTGTCCAATACAAATGAACAGCCTCAGCCAGGCGGTGGTGGCACACGCCT
TTAATCCCAGCACTTGGGAGGCAGAGGTAGGCGGATTTCTGAGTTTGAGGCCAGCCAGCTTGGTCTACAGAGTGAGTTC
CAGGACAGCCAGGGTTATACAGAGAAACCCTGTCTCAAAAAGCCAAACCAAACCAAAAAACAGCAAATGAACAGCCTCA
CTGTCCAGGAATAACCCTGGTCATGGCAACGGGTGTGTGCAGTATAGGGGAATATAGGAAGAATGGCCAAGCCATGACA
CTTGGACTTTCTCCAGGGAACACAGGCACAACTCACATAACTAAACCCTGGATTAGTTCTCTTTTTGCACTGATCATCT
TCAAAGACAGGGTGGGCAGTTCCATGCAGCAGTGTGGGCAGTTCCATGCGGCAGTGTGGGTGATAGAGGCTGTTTTCTG
TTAAAGACAACGTCCGATATTTGCTGCAGTCACTTGAAGAAACTTCAGTGTGGTATTCCAAACTCATGCATTTATATCT
GCTCTCTTTATTTCAAAAGGAGCACCCAGGAAACTGGTAAATGGACTGAGTGTTTAAGAGCAGGGGGAAATGGGGTATC
GCAGCCAGAGAGAGACCTGCTGTGCTAGGCAAAAGGCAACTGCGAACCTGAATGGTCCCCTATAGAACCTGAATGCAAA
TGTTCCTGTGAGTTCTGAGTGGAGGGCGGATATGGCCCTGGCGCAGGGGCAGGGGAGGGAGGGGGGACAGGCAGACAAC
CTGGGTTGAATGGCTTTGAGTCACAGACTAGAGGGGTAGATTCTAGGCTTCACCATCCAAACTTCACCATCCTGAGTGA
GAAGTTGTATGAGGGATTATGCTGTACTAGACAAGGGATGGAGGACCAGTTAAGATGCTACAGCAAGCCGAGAAAGGAT
CGTTGATACCTCCAGGCCTTCCTGTGGCTTTCAAAGAAGTCACCTGTGGCTCCATGGGGGCAGGTATTGTATGTCCTCT
CACAGATCTTACCCAAGACATACATGCAAAGATCTCAGTCACCCCAGCTCCATATCCCTGAGCTCCTAAACTAGTATGA
GAATTGGTGGCTCCCAAATGCCAGGAGGTCCACTCTCAGTTGCTCTCGCACAGGGGCCGACACCTGTACTTTATGAGGA
AGCCCACGGACATTAACAGTCACTATCCAACAGGAAACAAGCCAAGGAATCTTTAGCCTGGAATGTTTTTGCGAACATG
CTTTAGGAGTTAGAGCTGCTGGGGTTTCTGGGAAACAGATGAGCTGGAGTTAGGAATTCAAGATGACTTAAGGAGTGAG
TGGAATCATCTGTAAATGAAAGAGGCAGAAAACAGGATTAGAGAGAGTCATTGGACTCCACAGACCTGCTAGGCTCAGT
CTGTCTCTCGTGGCCATTAGAGGAGTCCACTGTTGGATAGATGTGAAGAAGGGACTGGGCTGTTAGCAGACAGCAGGCT
TGCAATGGGCAGTCCTATTCTGGAGGCAAGCATTGACTGAAGATGTCTCTGAGCTCTGCATCTGACTAAGATGTCTTAG
TGTCTGTGTTTAAGACCCCTCTCCTGGGCTCCTGGCCAAGTAGGTCATCCCTGTGAGTTGAACCACGGCCTGTCTCCAA
CAGGGGCCATTTTCATGTTGCATCATTTTACTTTTCTCCGGCCTCAGTAGGCAGAGGCATCTCTCTAGGGGGCTGCTCT
GACCCTCCCTCCCCCTTCTTCTCAGCCCTGAGTCCTTTTTCTTTTCTTCCCCATGTGAGGGAGAATGCATATGTGTGTG
CACACATGTGCGTATGGAGATCGAGAGCAACCATGGGTGTTATTTCTCAGGCATTATCCATCTTGTTTTCAGAACGGGG
TCTCTCTCTTTGGCTTGGAATTGCCCGAGTCATTGTATAGGCTAGGATGGCAATAAGCCACAGGATTCTGCCTATCTCT
GTCTCTCTGGTTCTAGGATCACAAGCATGGTCTACCGTGCCTGTTTTTGTTGTTGTTGTTTTGTTTTTGTTTTGTTTGC
TTGTTTGTCTGTTTTGTTTTGTTTTGTTTTGTTTTTAAACATAGATTTGGGACATAATGCTTACAGTGGAAGTGCTTCA
CATACTGAGCTATATGGCCCCAGCCTTTCCTTTTATCTTTTGTTTGTCTTTTGAAAAACACTCCGCCCCAAGCCCACCA
GGAATAAAATCAAAAGGTGAACATTTGCCTCATCAAATATCTGTACCTTGAGTCCCTGGGGGCTTAGCTTCCTAAGACA
TAAACTCGGCACAAGTCACAGTCGTGAACAGGCAAAGATCCCATAGTAACTTAAAGGCCAGGAAGACCAGACTCTCAGA
TGACGAGACGCTCAATCGGACTCCCAGCAAAAGAAATCCAAGCTAAAGCTACATCGAGATAGATACCGTAACCGCCTAT
CAGATTGGCAAAGATCAAAAAGTTTGATTTGGCTCTGAATTCGCCGGGGTAACAGCAGCTCACGGGCTGGGTCAGGAGC
ATGACTTGACAAAGCCGTGTGGAAGACGATTTGGCAACCTGTCCCTACGTTCCAAATTCCCACGGTCTTCAAAAGGCAG
AAGAATGTGATAATTAAGAATGTGAGTTGGAGTCAGACACCTTGGTCTGAGTCCCAGCTCTGCCAGTCATTTCACTTCC
CCGAGCCTGGATTCTTCTCGTCTGCAAAATGGTATGAGTTCGCACAGCTCTCAAGCTGGTTTCAAGCGTTGTTATGATG
CACCGATCGTTGTAGAGTACTTACGGCAAATCCCAGCTTTCAGAAATTACTATGCGAATGTTAATGATCCTTATTATTA
ATTGCCCCAGCAATTTGACTGCTAGGAATCTACCCTACAGACACCCTTGCACGTGTGCTGACCTTCCAGTGCCACTCAG
TGAAGCACCGAGGCTGCTGCACAGAACCAATCCAGATGGCACAAGCAGCTAGCTTAACTCAGGTGTGTGTGAAATAATA
TACTCGACTGATAGGAAAGAAATGGTGAGTGAACAGTTTTTTTAATTTCTGTTCAATGTGCCACAGCACGGTGCTTTAA
ATATCTGTAAGCAGGCAGGGTAGAGAGGGCCACATGCCTATATCTTAGCACCTTGTAGATCAGGAGTACAAGGCCTGAC
TGAGCTACAAGAGACCCTGTCGCAAAAAAAATAAATAAAAGGACTGCAGATACAGCACAGAGGCGGGGTGCTTATCTAG
CACATGAAGGGATATGGGTTTAATTCCCAGCACCAGACAGCTAAAACCATCACAATAATGAATAAGAATCAGGGGAGTA
CAAACTCATGTGCATCTTATCCATAATTACAAAATTCAAAAACCTCGAATTTTTTTAAAAAAAAATGGCACAAGGATGA
TTTGTAGCAAAAGCTAAATTCAACGGACTGAAGGCTGATTATGGATTTATCTTATTGGTGCAGAAATATTAGTGCTTTA
TCAGAGTGTGGCACAAGCCACAGAACACCGCCTTCCTTCATTCCTTGAATTCCCAATTCGAAAGGACATTGCTCCCGCA
TTTTTCAGGGTTGTGGACTTATAACTTGATTTATGCCCCCTCACCCTCCCTCCCTCAGTATTAATATATCCCTGCACAG
GAAAGACTAACCCGGTTGCTCTCGTGAAGGAACTGTGAACTGGGAGGGAGCGTCTTTTGAAGTATTTCAGTCTACGGTT
TTAAAGAGTATATGGATACTTTCAAAAGGGAGAGAGCTCAGATTTAAGCCCTAGGCGCGTTCACCGGAGACCCGCCCTC
TGCCCGTGCTAGGCGTGGTAAGCTGCCTGGGAACTTGGACCTGGGAAGTAGGGCTCGAGGGTGGGGCCAGGTGGGACGC
GAGCCTCACGTCTGAGTCACAGTGCTGCCCTGGGCACCGCAGTGTGGTCGCCTCCCTAGAAAAGTGCAGATGATGAGGG
TGACTCAGGTCCCCCATCGGTTTCCTATTCTACATTTTTCCCACCTGGGGGGGGGGGTCGAAATTTGCCCCTCACACAC
CTCCTCATCACATGTCCCCAGCAGAGGCCCAGAAAAAGGGCACTGGGTCCCAGAACCAAAGAAGTCACACGGGCAAGCA
AATGAAGACAGGCTGGGCAAAGCCTGGATGTGATTTTTAAAAATATATTATTTTTATTATATTTTTAAAAGATGTATTG
ATTTTTGTTCCATGTGTATGAGTGTTTGCCTGCATGTATGTAGATTGATCATGTGGGCGCCTAGTGCCCTGGAGACCAG
AAGAAAGTGTTAGATCCAGGAGTTACAGATGTTGTGAACCCCCATGTGGGTGCTGGGAACTGAACCTGGGTCCTCCACA
AGTACAGCCAAGTGCTTTTAACTGCTGAGCCATCTCTCCAGCTGCTTTGTTTATTTTTAAAATGTTGGTCTTGCTAATT
TGCCCAGGCTAGACCTGAGTTTCTGGGTTCAAGCCATTCTCCTGCCTCAGCCTTCTGAGATTACAGGCATGGTGATACC
AAATAATGACAGGAATTAATTTTATTAACACTGAGATGATCCAAATGTGAATTGAGTGTGGCAGCCTGGGATTTATGGC
ATTTCTGTCTGATCTTTTCTTCTTCTGTGTGGGTTCTTGTGAAATGTGTGTATATCCTTCCATATTTTTCTCTAAATCT
CTCTAGATAATCATGCAGCATATATATATACATATATATATATATACACACACACATATATATACACATATATACATAT
ATGTGAGTTTATATGCATATGCAAATCTATCTGTGTACATAATGGTCCACATGTATGTGTATTTCATAACTCCGCAAGA
ATATCTGCACATATATAACCACATGTACACATGCTCACACAAATATTTATATACAAGCATATGTACAGTTATATCTTTA
AGTATGTCACAAACTCAAGAATGAACCTGTCCATTATTCATTCATAGAAAATGTTCCTCAATAAATCTCTTGAAACTCA
AATGACTGATACTTAGAGAACCAATACCAATAGGACACACATATATGACTATAGAGTTCACACAAATCTATATCAGTAT
TCTACAATAACTACAATAATAATATTGTGTGGATATTGATAGGGATTGTAGTATCGTCACAGTATTGTTCACAGTGTCC
AGAAATTATAAACAAAGCAATGTCCATTCATAAGCTATGCTCAAATAAAATGCCACGCCTCCAGGTATCAGAATGCTGT
ACAAGCCAGGCAGTGGCTGTGCACACCATTATCCCAGCACCAGGGAGGCAGGTGCAGGAAGGTCCCTGAGAACCAGGAC
AGCCAGGACTACATAGAGAAACGCTATCTGGAACTCCCTTCCTCCAAAAAAGGCACTTACTCCCTGTTTTTTGAAGACC
CAGGTTCAGTTTCCAGCACTTATGTGGTGACTCAACCATCTGTAACTCCAGTTCCAGGTGACCTGACCCCCTATGGCCT
CCATGAGCTTCCTGTACAAATGCACACACACACACACACAATTTTAGAAGAAGAAACTGTCAACACCGTTAAAAAAAAA
TGAAAAGGGGGCTTAGCGGTGACGAGCACTGTCTGCTCTGTCAGAAGACCCAGGTTTGAGTTCCAGCCCTCACATGGCT
GCTCACAAACATCTGTAATTTCAGTTCCTGGGGATCTGATGCCCCCTTCTGACCTCCGTGGACACCAGGAGCACATGTG
GTACACAAACATACATGCGGGTAAAAGATCGACACAGATACAAATAAATAAATTACTTAAATAAAACAAATAAATAATT
TAAGAAACGAATGAAAGAATTAAACTAGTGATGGATTTTTGTGGGTTTTTTTTTCAGAGCATTTTTGTTTGGTTTGGTT
TGGTTTTGCTTTGTTTTTGTTTTTCGAGACAGCATTTCTCTGTATAACCCTGGCTGTCCTGGAACTCACTTTGTAGACC
AGGCTGGCTTTGAACTCAGAAATCTGCCTGCCTCTGCCTCTCTCTCTGCCTCTCTGCCTCTCTGCCTCTCTGCCTCTCT
GCCTCTCTGCCTCTCGGCCTCTCGGCCTCTCGGCCTCTCGGCCTCTCGGCCTCTCGGCCTCTCGGCCTCTCGGCCTCGG
CCTCGGCCTCGGCCTCTGCCTCTGCCTCTGCCTCTGCCTCTGCCTCTGCTGGAATTAAAGGTGTGCGCCACCATGCCTG
ACTTTTCCAGAGTATTCTTTTTTTTTTTTTGACAGCTCCATACATGTATGTATACAGTGTATGTTTGAACACAGGACTA
TTGATAGATTTTCATTGTATTAATGTATTCTGTAATGTAGCAATCCATTATTAGTATTATTTGTATTAATGCATAAGAA
AAGATGTGCACAGTATTTAAGTAAGCCATTGATTTTAGAGATTTATTTTAATTATGTATGTGTGTGTGTAGTGTTTGTA
GGGGTATGTGCACTCATGTGCAGTACCTAAGAAACCTAGAGTTACAGGCAGCTGTGAGTTATGGTAAATTATGCTAGGA
ACTGAACTCAGGTCCTCTGCAAGAAAAGTATGTGCCCTTAAGCACTGAGCCATTTCTCCAGCTCTTAAGCCATTTGTTT
TACCTAACAGTTTGAACCGAGTGCTATTGAAAGGGTCTAAAACCGTCTACTTCCATAAGCATTGCATCCGAACTCCCCT
TAGCCACAAATGCATCAGTTGCCATAGCAATAGGTATTACATTTCTTTTTGTTTTAAAAAGAATTGTTACATTTTATTT
ATTTTGTGTGCATGCCTGGCATGCATGTGGTGTGTGCTTGCCACGGCATGCCTGTGGAGAAACTTGCTGGGTCAGTTTC
TCTTTCCACCGTATGGCTCTCTGGGATTGAACTCTGGTCTCAAGACTAGCAGCAAGCACCTTTGCAGGCTGAGCCATCT
CGTTGGCCCTGATTGATTTGCTACCGTTCTCTTTCCATGTATCAGTTTAGTTGTACACAAACACGGTGGACCTGGTTCT
CCTTGAACTTGCTTTGTAGCTGAGAAAGAACCTGACCCTCCCGGCTTGGCTTTCCAAGAGCCAGGGTTGCAGATGTGAG
ACTCTGTGCCCTGCCTTATTATTATTATTATTATTATTATTATTATTACTATTATTAATGTTGACTTAATCACCGTAGT
ACTAGTAGTTTCTCATAAATTTTTTGGTTCTCTGTATGGGTCTTGTATCAGTTGCCAATATTTCTACTGAGTCATTTAT
TTTTCCAATTTTTAGATATTCATGCTTACATAGTCATCAACTTTTAAATGTGTGTGTGTGTGTGTGTGTGCCTTTTGTC
CTCTGATTTGCAAATACTTCCCAATTTTTTTTTTGTTTGTTGCCTTTGTGCTACATTTTTCACACAGAGTTCAACAACT
CTGATGTAGTTAAATGTTGTTCTTTTTCTCTCTCTCTCTCTTTTCCAAGGCACTGGTTTTTGCCAAGGCTTCTCCCTAC
TCTGTCTTCATGGTTCATGAAGGTTACTAGAACTCTAGCTTCACATGTGCATCACAGATCACAGGCAGAGAGAGAGAGA
GAGAGAGAGAGAGTAGAAGAGGATCCCGCAGGCCTTTAAAGCAGTGCCTCTCAACCCTGAGGGTCGAGTCCCCTTTGGA
GGTTGAACGACTATTTCATAAGGGCCACATATCAGATATCCTGAATATCAAATATTTACATTCTGATGCACAACAGTAG
CAAAATTACAGTTATGAAGTAGTAACAAAAATAACTATGGTTGAGGGTCACCACCACGCGAAGAACTGTGTTATAAGGG
TCACAACATTAGGGAGGTTAAGAAGCTCTGCCTTAAAGGGATCTTTCCAGAACCTTTGCATAGCAAATTCTTCAGAGCC
TTAGTTCGCTGCACGGCTGGCATGGCATTGTTGAGCAGTGCAGTCTCATGCATTCACATACCAGAACACCCTTACCTCT
TGGCATTCAGAGGACAGGAGAGAACACACACAGCTGGGGTGATCTGGAGCCATACAACCCACCTCTCAGGACAGACAGA
GCCTCTCTTCTGCCTACACAGAGCTCCCACTGGGGAGAGGTTTCAGCTCAGAGACCACATTGGTCAAAAATCTCAGAAT
GGTTGTAGTTTCAAATGGGGATGCCTCTGCCTCCCGCTGTTCTCTCTGTGGCCTCCCCAGGGTGAAGGTTTGTGGCTGG
GTGGGATAGCTAAGCCTACTGGCTCACAGGTTGAAGGTTCTGGACTGTGGGGGAATATACCACTAGGCATTTCCAGGCA
GATGGAGGCTTGAGGGAATCGCTGTGATCCATGCCAATCTGGTGAGCGTGTCTGTGTGGACAAAAAACAACATTGGAGA
ATCCTTTCTAAGTGGGTGCTTTCCCTCCCTAGCCACCCACGAGCCTGTTTGTCTTTGACAAGGGTCCAGATCAGGGCCA
AGTACATCTACCTGGGGTCAGCTTGATAAAGGCAGCAGGGAAAGGTCGATCCAATGAAGGGTAGGGGCCATGAAGGAAA
GAAATTGAGAAGGTGTGGCTTCCACCCAATGCAAGCAAGGCGCACTGACTGTGCTGCACTTGGATTCTTTGACAGGCCT
GCATTCCTGCCCAGCTCTACCAGTGGTGGCACAAGCCTTTAATCCTAGCACTCAGGAGGTAGAGGCAGGCAGGCAGATC
TCTGAGTTTGAGGACAGCCTTTTTTACAGAATGAGTTTCAGGACAGACAGGGCTACACAGAGAAACCTTCTCAACCTTG
CCCCTCCCAAACAAAACAAAACAAAACAAAACAGAAGAAGAGGAGAAGGAGACAAGAAGGAGGAGGAGGATGAAGAAGA
GGAGGAGGAGGAAGTAGAGGAGGAAGAAGAAGAAGAGAAGAAGGAGAAGGGGAGGGGGAGGGGGAGGGGAGAGGGGGAG
GGGGAGGGAGAGGGGGAGGGGGAGGGGGAGAGGGAGAGGGAGAGGGAGAGGGAGAGGGAGAGGGAGAGGGAGAGGGAGA
GGGCGAGGGAGGAGAAGGAGAAGGAGAAGAAGAAGAAGAAGAAGAAGAAGAAGAAGAAGAAGAAGAAGAAGAAGAAGAA
GAAGAAGAAGAAGAAGAAGAAGAAGAAAGAAGAAAGAAGAAAGAAGAAAGAAGAAAGACAAAGACCTATCTGGCTGGAC
TTTATCCATCCCTAATCACTCAGAAGGCCACTTGTCTTTCAACAAAGACCCAGACAAAGGCTATCTACCTAAGATTGGC
TTGGTAAAAGTCGTGGGGGAAAAGGTGGTCCAATGGAGGGCAAAGGTCATGAAGGGAAGGCACTAAGAGGGCATGGCTT
TCACCAGCTCTACATTCTCTGCTCTACCACACACTGTTGGGATGCTCGCTTGTTTTTAATCTGTCCAGTTTGGCTCTGT
GCGCCCAGTTCCATGGACTCTGCTTGGCACCTGGTAGGCACCCCAATAGTATTTGTGGGATTGGTGAACAAATACACAG
GTGTAAGAAAGTCTCAGACATTATTCAGATCCTTGTGTGGGCAGAGTTTTGCACACATCTAAGGAGTGATCAGGGATCA
GGATAGAAGGGAGAGAAGCAGAAGCCACAGTGACAACCTAGAAAAGGCCACAGCCTGGGCCCTATGGTGAGCAGGGTCA
GCCTCTCTAGTAGACCAGGGCTATCTGCTCAACGTAAGCGATACCCAGGTATACCTAGAAGCACTTTTGTACGTCCCCA
TCATTCCCCCGAAATGAACCCATCACTACTGCCCTGCCCTGGACAGTTGGCACCAAAACCCTGCCACGTCCCCACTATG
GGACTGGCAAGGCAACACACTCATGCAGAGGCACACACACCCAGCCAGAGATCCTCCCCCAAGAGGATGACTCAGAACC
ACTGGAAGACTGGGGTCCGTTAACCAGGCCACCTCTCTTCCTGGGCATCCATCCTGGGCTCCCGATGTGGACCTGCCTC
TTCACAGCCTGGACAGTAAGGGATTTTCCCAACCCCAGCCCGCTGACATGTGGAATCTTAAAATAACAAAGCCAGACTC
CAAGAGAGGAAATTCTAAGAACATGAAATAAGTCAGGAGAGCAGAGGTGGGTGTTTATTTTCCATGACCACCTACTCCT
CTGTGCCTGGGCTCCCAGGCTGGGGGAGGGGTCCGACGAGAGTGCCACAAAGCTAGAGGAAACCCTTCTTCCTGTGTTT
GCAGAGGAACAATGCTGGAGGCGCCCTTCCAAGGCCTGCAACTTTTCCTCTGGACAGAGGATTGTAGGTCTCCACGCAT
TCCTAGGAGGAGGTCCCGCAAGGAATGTCGAATATAAACATTGACTTTTCCATCACTCAGTAAAATCCGGACACACAAA
AGTCACAATCCCCTGGAGTCCTTCTTTTACTCAGGTTCACCGCCCCAGGTAGGCATGGGAGAGCCCCGCCCTGCAGCTG
GATCCCTGAGAGCATTGACCTCATTGGTTTCCTCTGTCCCTACCTCCCAGCGATGCCTTCTGCCTATGCCTCTGCTTCT
GCCCACCCCTTCCCTGGACCCTTGCCACCTCCAGCCTTCCTGGCCCCAGTGCACATTGCTTCATGCATCCTGTGTCTAG
CCCATGAACCATCCTCCATACTGTACCTCCGAGCCCGGCTCCTTTCCCTTCTAGAACTCCCCATCTGCGTGTATTCTGG
GACCTTTCTAAGAACCTGGTCACACACTAGTCTCCTCTCCTGAACACAACCACCCCAAACCAGGAAGTGACAAACAAAA
CGCCCTGCCCCGCCCCCAGCCTGCCTTTTTCTCAGGCAGTTTACAGAAACCAAACTGCTTAATGGGGCAAGTCCTAAGA
CACTGGCCAGTACTTGCCAAGCACCTACCAGTGAGGGTGCCATGCTCAAAGGGCATCAAAACCCCCGAAGCAGTGTACT
GGCTCCCAGTCCTCACGCAGAGCCAGAGCTCCATTAACTAGTCAACACCATGCGTTGGCAGAGAGCACACTCCATCTTC
TCTGTAGTTCAGCTGAGCATTTTGGCAGGCCCTTTGATGGCCACCGACACCACGTGCTTTCTCTCCATCTGCAAGATTT
CCCTTCGTCTAGAACCCTAACTCCCATTGGTCTTTCAGGTTACTCTCCAGGATCTCCTAAGGGTTCTTCCTGCATCTTT
GCCCCCTAATCTTGGTTATTCATATATCTATATATCTATATATCTATATATCATCTATATATTATCTATATATCTGTAT
ATCTATATATCTATATATCTATCTCTATACACACACACACAAACACACACAGCCCATATCACAGTGTATCACAGGCTGC
CACAATCAGGGTCCCAGTCCCTTGGGGAGAGTAGATGTTTGTACCTCTCTGTCCCCAGAATTGAGCTCAGGCTCTGGCT
CAGAGAAGAGACTTAGTAAATATTTGTGGACTGAATTAAAGCCCTACCCTTGGGTATTCAGTCACCTTGGCTGCTCTGA
GAGCCTCTAATCCCTCACTGGGTCATCTGCCTTCCTTTCTCCTGTCCCAGTCTTTGCCTTACACAGCAGGTCTCCCAAA
ATGTGCAACTCTGGGGAATCTGAGCCTGTATCCCTTGAAGCTGGTAGCCCAGAAGGACAAATCCTATGCCTCCTTCCAC
GGCATGGCCATTTTCCAAATGTCCAAATATATTGCTTTGGGTTTTTCTTAAGCCATAATCGGCCTCAACACTTCCCTGC
AGGGATCTAGAGCCAGGTCCCGCTGCCCTAAACCCCCAAGGCCTCATCCTTAACTTGGATGGACAGGGCTCCGTTCTGC
AGGCTCAGTGGGGTGTCTGACCAGGTCCTGCCTGGTGTTCAACGGAGGGAGGAGGACCAGCTTGTGCATCCAGGGCGCG
CAGTGAACACCCTGTTCACATTCCTGAGCCAGCCGGAATGCTTGGACGAGCCAAAGGCCGCATTCCTCCGGCAGAGGCC
AGATCTCAACCCAGGCTCCTGCCCCGCCCCTCCTTGGCCAGGCAAGCGCAGCAGAGAAGCCCGGCCCTAGTCCGTGCGG
ACTCCCCCTGGTGGCCAGGGCTATCACTGCTCGCTTGGACTCTCCATTTGTAGTTTGTATTGGACCATGGATCACTGCC
TTCCTTCTGCCGGAAGCTTCCAGATTCCAAGCTGTGTGATTCCCATTTGTAGCTCCAACGTTTGCCGTTGTGACCTATT
CTAATATCCTGGTACCCTCCGCCCATTCCCCACCCCTGGCATCCTCTCAGGAGGAATCACCGCCCAGTGTGTCACCTTC
CTGTAGGTACTTTCAAGGCTAGATGAGTGAGTGGCGGGCCTCACCTTGGCCCAGTTACTCAGTGCCCACAGAGTGGCTT
TTCTGAGACTCTCGTAAGGTCTTAAGGAAATGTAGTCGGTCCCTTTTCTTGGTGGCCCTCGGCACTGTGAGCAGACTCA
CATATCAGGGCTGTGTGGATAGGAGGGTTGAAAGTTGAGAGTTAGCTTCCAGGATGCTACCAGCACAGTAATACGAATA
TGCAACTCTCCCAATATCTAAACGCTGCTCAAAGAAGTCAGCAAAGGATTTTTTTTTTTCTTAACCTAAAGCCAGGATT
AGGCAGTGCATGCTCAGCCTAAGGGAGAGGGATGTACAAGGCTCACGTACTTCTCATGGAGGGACCTGCCTACATTCCT
GGTCAGTAGGGACTTTGGGCAATGGGGCAAGACATGGCTTGTGTTTAAATTGATGGCACATGCCTTTGAGCCCAACACT
CAGGAGGCAAATGCAGGCGGATCTCTATAAGTTCGAGGCCAGCCTGATCTACAGGAACAAGTTCCAGGACAGCCAAGGC
TATATAGAAATACGGTCTTGAAAGAAAGAAAGAAAGAAAGAAAGAAAGAAAGAAAGAAAGAAAGAAAGAAAGGAAGGAA
GGAAGGAAGAAAGGAAGAAAGGAAGAAAGAAAGGAAGAAAGAAAGTCAACCATTCACTACTTTGACCTCTTACAAATGG
AGCCTTGCTGTGTTTGTCTTCATACCATAGCATGAGTTCTTATGGAGCCTTGGTTGGCCTGGAACTCACAAAGATCCTC
CTGCCTCTGTTTGAGTGCTGAGATTAAATACATTTTCTTCTTCATGTGTTTAAAATCTTTTCCACTTTCCCAGATTGTT
GACCTATCTTTCTTTGGAGGAAAGGAACAATAGATGAACACCATCTACATAGGAACACAGACATGGTTATCTGCCTGCA
CACCTGCTGACGTACCTAGGAACCCAGCAACATAGCACAGCCTGAAGCTTGCATTGCTCAGGAGGGTGGATCCAGGAAA
GGCGAGAGAAAGAGCAAGAACCAAACTCTCATTGAGCAGCTTTTCAGCTTCTAGAAAGGGTGGGGGCATAGGAGGACTC
TGTTCAAGGTCGAGTGTGGTGGCTAGTTTGTCTTGTGTGGTTGCTTTCCCCGCCTCTTCAAGCAGGAAGATAAAGGGGC
TCTTTAGTTGCTGGCATAGGTCTTTTCCATCATGTCAACATGGAGACCCATAGTGACAGGGTGGAAAGAGGCCATGAAG
CCCTGGGTTTGAGAGTGCAGCCCTGACTCAAGCTTCTCCATCTTTATCCCCATCTACTCTTCTCAGGGTGTCCTGGTGG
GTCATCAAACGGACACCAGGGCGATGCTTCAGTGGGATGTGAGGATGCGTGATGTGATAATGACTAAGTCAGACTCAAA
AAAAACCACCATTTCTCAACTACTTACCAACCTTGGGCCCTATTCCCAAGAATCTCAGTATTCCTTGGAGGTGACAGTG
TGTTAAGACAGAGGCAGGTCCAGGCACAGCTGAGGCACAGATGGGTGTGTTAGAGTCACCTACAGCAGAGAAGAACATT
GGGGTGGGGGGAGCGCGGCCTAGAAAGGACTTTAGTGGAATCCTGGGAGATATAGGACCATAGAAGCTTCTCCCAGAAA
GGGGGGGGGGATCTTTCTAGAGTCTTCTTTCATACCCTGAGGCCACCATGTCCCTGTGCTAGTATTTTGCTAGAGAATT
CCTGTCATTTCTGCTACTCATGTGTCTAGATCAGCTAGCCTGTAAGCCTGTGCTCTAAAGCCACTTTCTGAAGATGGAT
ATGATCAAAGATTCCCTAGGCAAGGGAGTGGTTTCAGGAAAGAATTAGTCTCAGAGTGTTGGCCTCTTCCTCCTGGTAA
TGCTTCCTTCTGCCCGGAGCCTTCTGCATGTTAACCTTCAGACCTCTGTGTGTCCAGGGGGCTGCATGGAAGGCAATGG
GCAGGGCCCAGTCTCATAAGCAGGGTGAGTCTCCTTCTGCACAGCTCCACTCCATCGGCCCTTACCTTTCCTAATTAGG
TGGATGTCTGGCCTCCTTGTGCTTAGAATGAATAGAAAATTACCTGGCTTGACTAATTTCATAGGAAAAATAAGGCCTT
GTAAAAAGCCATTTGGTGTATATTGTTTTGTCTGCATGTATATCTGTGCACCACATGTGTGCCTGGTCCCATCAGAGGC
CCAAGGACTGAAGATACAAATGGATATGAGCTGCCAGGTAGGTGCTGGGAATCAAACTTGGGTCCTCTGGAAGAGGAGC
CTGTGCTCCTAACTGCTGAGCCATCTCCCCAGCTCCCAGATAAGAAGCTGTTTACAAGTTTTTCTTCTGGTTCTATTCT
TTATTTCTTTCACATTTATTGGCTTATTTTGTGTGCATGCGTGTGTGCCTGCATGTGTGTGCTTGACGTGGCATTGTGT
GGAGGTCAGAGGGCACCTGTAGGGAGCTGGTTCTCTTCTACCATGTGAGTCCCAAGGATCCAACTCCTCGGGTCATTAG
GCTTGGTGGCAAGTGACATTAATCACTGAACCATCTTACTGGTCTTTCGTTATTCTACATACTTTAGATGGAGTCCTTA
ACTCCTGATTCTTCTTCCTCCCAAGGGCTGGAATTACAGGCACGCACCATTCCATCCGGTTAATCTTGGAGATTCAGCC
TGGAGCTTCCTGCGTGGTAGGCAAATGAACTCACTGAGACGAACTTTGTCTTTGCAAAGTTTTAAAATTTATCTTGTAA
TGTTTGGAGTTGGGGGAGATGGACTGGGTTTGTCGATGTGCCTCCTGGTCCCACTCAGAGATTCTGAGTCAGGCAGTCT
TGAGTAGGGTCCAGGACTCTGCATATTTTGAGACTCATCCCCAAGTAATCCTGCTGCTGCTAGCTTGGACAGGAATGAT
AAAGGTGAGTTTGCATTCCTTCTCAGCAAATCCACCCAGTGTGAACTTCTCCTTTGTCAAGACTTGGACAAATCCCACA
AGATTACTTTTTAAATCCGCTGTCCCTAAAAAAAGAATTTCACGGAGGAATGTAGTTTGGAGGAAGGCCCTCCCACTGA
ACAGGGATAGGAAGTGCACGGTAAACTAGGGTAGAGCTGGAAAAGCCCCACCAAGCAAGCCGAAGAACATGCTCGGGTG
AACACGCTCGGGTGAACATGTGTCGACTCCTTTTCTTCAAGCCTCTTCCTTTCTGTACCAGGTGCCAGACGGTCCCGAG
GCAGAACAAAGCCACAGAAGACAGCTGATATGAAAGGCTTTAGCCTTCATAGAACCAAAGTCCCCTTGGGTCATGGTTC
GAGTGTCTGTACCTTGACTGCCAGGAACAGTCTTCAGAGTCCAGTTACCCGGGTCCTTGGCCCCAGACAAACTCCAAGA
GTTGATAAGATAGGAAGGTCGTCTTCTTGGCTGTGGCACACACTTCCTCAGCCCTGGCCTGATTTTGCTTGCATCCCCG
CTGTGACATGAGCAAGCACGCATGTCACATGTCACGAGCTGCTGTTAAGGTCAAGGCTCGGGGACCTTTGATATTACCT
CAAGCTCATCAGAAATGAGAGACCTGCTATTGTTTCAAAAGGTTTGACAAGCTTGAATTTGGATGGTACACCTTGTCAG
CACTGTCCTCGGTTCAGTGTCATTGCGTAGCTGAGAGGTCGGACAGGCACGGGAGTGATATCTTAGGCATTTTTCCAAG
CTCGAATGCAGGTACTGGCGACACTGCATTCGGGCCCTCATTTCTGAAGATGCTTAAACACCCCTCCCCCACTTCCTTC
CGTGAGGACTCCTTTAGTTACTTTGTGACACCCAGTCCTTCCAGTAAGTAGAAAGGGTGTATGCAATAGAATTCTGGTT
ACAGGGAGGTGACTCCACCGTCCTTCCACGCTCACTATATAGCATGCACTCTGCTGACCTTGTGACACAGGACCTCAGA
AAGCATCAGTGCCAGTCTGGATAGCAAAGGTGTTTTGTTTTTTGAGACGGGGGTGGGGGGGGTGGGGTGGGGGGTGTGC
CTCTCACATTTCTATCTCTAAAACTAACACAGTAAATACGTAAGTAAATGTTATACAATGTTCTTTCTCTTGCCCTTAA
CAGATCATTTTGCATACCCCCCAATTTGGAGATCATTGACATGGCTGGAATCTTCCTAGCCAAGGACACACATCTCTGA
GAGCCCGCATTTCTCTCTCAAGAAGGGAACACACACACACACACACACACACACACACACACACACGTATTTAAAAAAA
AACCAAAAACAAACAAACAAACAAAACACCTCAAAACCATTTGAGTAGGTCTCTACAACACAAAGAAACTCTGTCCTAG
GAGAAAAAGTCGTGCTTCTACTTCTGGATCTGGGAAGCCACACTCCCATTATTCTGGGTCGGGTAGGTCCCAGACTGGG
GGAAGGGAAGGTGGAGAGGGCACCAGGGCGTCTGAATTTGTGGAATTCCTTTGGACTCACTGGCAGTTCTCAAACTGCG
TTCCTGGAGGGATAGTGGCTGTGTTGTTGGCCTGAGCATGGGGAAACAGCGGCCCCTGGTGGTGAAGTTATGAAATGCT
CTCCAGGCACCGATTAGTAAGTCTTGAGTTTGTCTGGGGCCAAGTAAGTCTTAGTAAGGCTATCACGAGACATCTTGTC
CTTCCAAACTCTGTAAGCACTTTCAGAGAGGCTCAAATGTCCTGAAAGATTAAAAAATGAGGGAACCATTTGTTGCTGT
GCTCCCCGGTGGCTATCCTCGTAGCCTTGAGAGGTGTCGGAGCTTTTGAGGTTACTAATGTCAGCTACTCTGTGCCAGG
AAGTGTTCACACAATCAGGCTGGAAGGTGTCCATGGTGAGGCTAGGGGCTCCTGCCAGCTTGAAGCCCCTCCTCCTCAT
GCCCCCTTCCTCCCTAGGGATTCTTTGCTCCCCCACCCATTGCCTCTCACCCTCTCATTTAGCTGAGCTGGTTTCTTGT
TTTTGTAATAGTGGGTCTTGAACCCAAGTCCTCACACATGTTAGGCGAGCACTCTGGCATTGAGCTATGCCTCCTGCCC
CCCCCCCCAAACTCACATTTAGCTTGCTTATCTCTCCACTAAAGCAGAAACCATCAGGACTCACATAGCCTTGCACTGA
AATACAAGAGGACTACATAATTGCTCCTGCTTGGTTTCTGTTTTTTTGGTAGCTTGGAAGACAAACCCGCTACACTGTG
ACCATTTTCTTTTGGAAAGGTCTGATGTAGCCATTCCGCTCCGGCATGGACTGGGGTAGAGAATAGGCAAAGAACCACC
CATTCCAAAAAAAGAAAACATGATTTCCAAAGAAATGCCCTGAAGCCAATTGATCTCCAAAGCCCATCTCCTTGGATGC
TTGTGAATGCTTTTCCTTTTAGGGTTAGAGGACTGAAAACGGCTCACCCTTTCCCTGCCTTTTTCCTCCCAGGGACATG
AGGACTGTCTCTCTTGGCTCCGACCTTTCAGGGAGGAGAGACGCAAAGGCTGTGGTAAACCCATGGACAAAGGATTTTT
ATGAGCTCAAAGGTGTTTCCAATTTCTTTTCTTCTTATTTTTTTAAGATTTATTTATTATTATACATAAGTACACTGTA
GCTGTCTTCAGACGAGCCAGAAGAGGGCATCAGATCTCATCATGGGTAGTTGTGAGCCACCATGTGGTTGCTGGGATTT
GAACTCAGGACCTTTGGAAGAACAGTCAATGCTCTTAACCACTGAACCATCTTGCCAACCCTCCAATTTCTTTTAGACT
AGACATTAAACACCATTAACTCCAGGACAAGTGCAGGTACAGACACCATAATGGGCTAGTGATTCCACTAAGTATGTCA
TGTATTTATGTTGAAAAAAAAGGGGGGGGATAATTTGGCTTAGCGGTGGTGGTGGCCTTTAATGCCAGCACTTTGGAGG
TAGAGGCAGGCAGATCTCTGTGAGTTCAAGGCCAGCTTGGTCTACAGAGGGAATTGCAGGATAGCCAGGCCTACACTAA
GAAACAGAACCATCCCACTCCACCCCCAAAAGAAAAAAGTGTAATAGTTTAGCCAAAACTTGGAGACAAAACTATCCCA
GTAGGACCAAGGGACCAGCCGTGAGATAAGGAAGAGGTGTGAATGCTAACTCTTTCCCTCTTTCTTCCTTTCTTTTTAA
AGATTTATTCATTTACTTTATGCATATAGGTGCTCTATCTGCTTGTACACTTGCATACCAGAAGAGGGCATCGAGATCT
CATTACAGACCGTTGTGAGCCACCATGTGGTTGCTGAGAATTGAACTCAGGGCCCCTGGAAGAGCAGCCAGTGCTCTAA
ACTGCTGAGCCATCTCTCCAGCCCCTCAACCCTTATTTTCTAGTAACAGAAGCTAAGAGATAACATGTGGGGGTCTGGA
GAGTCAATTGTGACCAAGCCTGGTGACTTGAGTTTGGTCACCATGAGCTGTATTTACTTTAATTATTAGAAAATGAGCT
TTTCAGATACTTCTTTGATTTTTTTTCCAAACATAATAATTTAGAATCTTAAAGAAACCAGTAAAACGTGTCAATGTTG
ATAGACATTTTCAGAATAAAAAGACCCAAAGCTGGGAGGTGAGGGCAGGAGATGAAGAAGACTCAGACCAGTCCAGACT
CTAAGCTAGGGCGAACATGTGAAACTCATTGTGAATGTATCCTTTATTCAGCTAGCTAAGGTAATTGCCATCTAGGGGG
TGTACTGCTTCTGTGTGCTAACCTAGGCCTGCTCCTGTAAGCTTCTAGCCTCTATACAATCTTCTTACCTAGGCCTATA
ATGTTTTTGGCCTCTGAGACTTGCTGCTGAATAAGTTCACCCTTTCTTCTTGTAACTGAGCTCATATACAGACCAGTTC
AACTCAGCTGTACTGGCTCAAATGCCTCTCCAAGCTGACTGATTCAATCTGGCTTCTCTCAGTTTCTCCTGACTTGCTC
TGCTTGGCATCAAACAAACTCTAGCAATCTGTCCTGATCTTCTGGCTCCTTCTCACTCTTTCTCTAACCTGTCTCTGTA
CAACTGTCCCAGTAAAACTGTCTTCTTTTCTCCCGTTCTCTCGGACGCTCTCTTTTAAGGAGCTCCCCTTTCCTGTCTT
CTCCTGAGAGTTGGGCACATCCTATTCTGTCAAATCTTTCTCTGATTCGTCACTTTGTCTGCCACTCAATTAGACATCA
CTTTCAAACATGGGTGCTCCTTTCTACAATCTAATCTTACCTTTACTGGTTGGAATTAAAGGTGTTTATTAAGGGCATA
TCTGTGTTCTAGCCAGAGGGATTAAAAATGTGTGTCAAGGGCTGAGCCATATCACAACTAGGAATAGGTTTTTAAGTAA
ATAACCATCCTGGGTCCACAGTGTGATCAAATATCCTGCACCAATGTATACTTTGTGATTCTACTTATTTTATTTTTAA
AATTTATTTCTTCGCTATGTATACATTTATCTGCATGGATTTATGTGCTGTGCACCATGTGTGCTGCACATGTGTGCAG
GTGCTGGTGAGGCCATTGGATCCCCTGGAACTGGAGCTGCAAGCAATTGTGAGCTGTCTGATGTGGGAGGAGGAACCCA
ACCCAGGTCAATGGAAGAGCAGTCAGTGCTCTTAATCACGAAACCATCTCTGCAGCTACAGTGGGAAAAGTGAGCAATG
CACACCAGTGTAAACATCTTCACCTGCCTAGATGCCCACAGAACCAGAGAGCCCAGTGCTGCCTGTGGGGAGGGGCTGT
GCATGAAGAGTCAGAAGAGCTGTGTCCTTCATCTCAGACCAGAGGAATCCTTTCACTCTTTTCAAGGTAACAACATGAA
GAACATAAAATGACATCCTCCAGATGGTGGTACTTTGAGTTCATCATAATTTTCTTAAAATCATCTGCACTAAGCAAAA
AAGAAAAGAAAAGTCTTAGCCTTGTGTTTTATTTATTTATTTTTATACTTTTTGTTTGTTTGTTTGTTTTTCGAAACAG
GGTTTCTCTGTGTAGCCTTGGCTGTCTTGGCACTCACTTTGTAGACCAGGCTGGCCTCTAACTCAGAAATCCGCCTGCC
TCTGCCTCCCAAGTGCTGGGATTAAAGGCATGCACCACCACTGCCTGGCTTTTATACTTTTTAAATTACATTGATTTAT
TTACTTCGTGTTGGGGGAGATGTGCATGTGTCATGACTTATGATTGAAGGCCACAGAGCAACTTGAGGGACTTGGTTCT
CTCTTTCCACCATGTGGGTCCTGGGAATTGAACTCAGGTCACCATGCTTCAAGCTCCCTCCTCCACTGAGCCATCTTGC
TGGCCCCAGGCTAGTGTGGTTTTAAGGGTCCTCTGAGTGCAACAGAGACTAGTACAGAACACTCTTGTGTATCTGGGTG
AGATTTCAGAACTCAACGGGGAATGTGCACACGATTCCAGGAAACAAACAAATAAACAAACAGGTCAAATACATATACG
AGAGTGAGAGCCACCTTGATGACAAATTTTGTAACAGTAGGCTGCTACAGACAACAAAGCACAGTTTTCCAAGTTTTGG
AAGAAACTTAAATTGAATCTGAAACTTGATAGTCAAATTTCTAACCATCACGAAGAGCAAATAAATTTTCTGAAACCCC
ATGAGTCAGACAATCTACCCTCTCCTTGCTTATGAAGAAATTACTCCAGGGGCTGGAGAGGGGTGAAGAGCCCTGGCTG
CTCTTGCAGAGGACCCCAGCTCTACTCCCAGCATCCACATGCAGGCTCACAACCATCCATAACTCCAGTTCCAGGGCAT
CCAATACCTTCTGACCTCAGCAGGCGCCAGGCACACAAATGGCACACAGAATAAAACATTAAAACAACCCATTCAAAAA
AGAACAGCCCAAGAGTTCGTAGATGGAAGCTGTATATGAGGATAAATATTAAAGTGAGAACAAAGATGAGTTGGTACTT
GTTTGGACTGTGGTACTTGGGATATTCTTTGATCTGCAGATACTTAATAATAACCAGGGTTGTTTGTTTGTTTGTTTTG
TTTGCCACAGGCCTTACTCTGGACTCACCATCTTCCTTTTGGAGTGCTAAGATTACCTGCATGACCACCATACTTAGTG
TCTTAGTTTGGGTTTTATCGCTATGAAGAGACACCATGACCAGGACAACTCTTATAAAAGAAATTGGAGCTGGCTTACA
GTTTCAGGTGTTTAGTTCATTAACATCATGGGGAGAAGCATGGTGGTATGCAGGCAGACATGGTGTTAGAAAAGGAAGT
GAGAGTTCTACAGATGATCCACAGGCAGCAAAAGGAGATTATGTATCATTCTGGGTGTAGCTTGAGCGTAGGAGACCTC
AGAGCCCACCCCACAGTGACACACTTCCTCTACAAGGTCTCTGTTGTGTTAGAATCACGGCTTGTCCGGACAGATCACA
GCAGGTCAGTAAGTTCCACAGGAGAGAGGTTTATTGGGGGATGGGGGAGGACAAAAGAGGGCAACAAATATGATGAGGG
AAAGAGAGCAAAGGTCAGGAGTGGTCTGCCTTTTATTTGGGTTGTGACGTAACAGCTTGCAGGTAAAGGTGGGAGGTGG
GTGGACCAGATGGACACTAGGAATGTACAGTGATTGCTATGGCAACAGATGTGCAGGTCCCTGTTGCTTAGTGACCTGC
AACTGTAAAAGCCAGTTTCTGAAGCCAACAGCCACGCCTCCTTCAACAAGGTCACACCTCCTAATAGTGCCACTCCCTC
CCGATAGGCCAAGCCTTCAAACACAGTCTGTGTGGGCCATTCCTATTCAAACAACCACATATAGCTTAAGATTGCCACC
ACCCCCCTTGTTTCACATATATGTGTGTGTGTTTGTATATGTATGCAGGTACAAGTTCATGTGTGTGTAAGTGTGTGTG
AAAATTAGAAGTTGATGTCAGACATCTTCTTCAACTGCTCTCCACCTTTTAAAAAGAATTAAGGTTTATTACATTTTCA
TTTTCATTTATGTTGGTATGGCATTTGTGTGTGTGTAGCATCCGATCTCCTGAAACTACAGCTACAGAGAGTTGTACGC
CATCAACATGGATGCTGGCATCTGAATGCTGGGACCTTCTGGAATGGCAGCAAGGGCTGTAACTGCTGAGCCATCTCAT
CTCTCTAGCCCTCTGACATCAATTCAGCTATACTCGCTGGTCTGCAAGCTAGATGTGCAAAATCGGCAAGCTCTGTGTT
CAGGGAGAGACCTTGCCTCAATAAATGAGTGGGAAGCCACTAAGGAAGAAACTCAACGTCAACTTAGAGCCTCCACATG
CACATATCACACACACACACACATGCACACGCACCAACACGCACTCAAGAAGCAAAACTGAAATGTTGATGTTGTAGGC
TGGTGAATTTCTGGATTCCCAGCATTCTGGAGGTGGAGGCAGGAGGATCATGTCGTCCTCCACCCCACTTGGAGATCAA
GGGCAGTATAGGTGAAATGAAATCCTGCCCCCCAAAACAAACACAAAACAAGGTAACGTGACACACATTTCTTTTGCTC
TGATAATCTACAAAGTGAACTAGAAACATTCCTTAATTTTGTATGTAAGTTAAATGCTCTTATATTTCCATTTAAAACT
GGCAGTGCAGAATATAATGATGAATGGTGGAATTCATACTAACTGGAAAATTTTCATTTTTCCTTCCTGAGAATGACAT
TAAATAGCAACTAAAACGCCACAATAAATCATGAAGAAAGAAAAACATTCATAGTTCAGGATCTTTGGTAGTGTTTTCT
GCATTCTGAGCAAGGAGCCCGGCACTTTGTATTTTGTACAGGGTCCTGCCCGCCTGGCAGCCCAGGGTGACGGAAAGCT
GCTTCAGGATTCTACACAGGAGGTTCACCTCCCGGGACCTTGGCAAGGCACATGTCTTCTGCCCACAGTGGGGGCCAGA
GGCCCCGATGTACAAGGCTCCTGTCACATAAGGCCCTAGGCACTGAGGATCCTCTGCATATACAGCCCTCAGTGGCTTA
GGAAGACACAGTGAGGTCTCTCTTTTAGCAAATTCCCAAACTGGCATCTTGGGGAGTAGAAGAGAGAATGTGGAGATGC
TGAGTGTTCCAAAGACCCCATGGAAAGTAGCCAAACAAGGGCGGTGTTCTACTCCAGACAGACCGGAGGGGAGGGCAGG
CTGCTGGAGACTGTTCTAAAAAAAGGGGGTGTATATGGCTAAAAGGCAAGCCTAGGCTTCCCTGCTACCCTCTGGGAGG
ACCACAGACAATGCTCTGAATGGGAGATGCCTGTCTGCAAGTCAGCTGCCTTTAGATTTGTGTAAATTTTGTCTCAGAT
AAACTTCTCCCAGGCATGTCTAGAATCAAAACCAAAAACCAAAACGAGGTGACATGATGAGATGTTTCTATGTGTTTTG
ATGAAAACTCAATAGGCATATGATGATGACCTATGAAACAAACAAACAAAAGCTAACAAAAAACAACACAACTTGGAAG
GTGAGGGCTAGAGGACCAGTTCAAGGCCAGCCGTGCTGACATAAGAGCAACAGTGGCACATGCCTTTAACCCCAGCACT
TGGGAAGCAGAGGCAGTCAGATATCTGAGTTTGAGGCCAGCCTGGTCTACAGAGTGAGTTCAAACCCTGTCTTGAAAAA
CTGAGGGGGAAAAAATATACCCATAAACACACAAAATATTTTATTGAGAATATCTAATTTATTAGGAAACATATGTTAA
CACAGACAGGGCTAAAGGGCCGTGTTATGCGTGTAACAACTTCATCTTACGCAGAGTTCACGTGCTGGGACTCGTGGCT
TTTTGGTGCTAACCTGGAAGGTGCTGCCCCTGATTGCCAAGAATCCTCAGCAAACTGGTTCACAACCAAAGATCCAAAC
ACTAAGATGCAGTCATAGTCGGCAGTGCTCCCCACCCCCTCCCCAGAAGGCTCTCTCCGGTGCTTCCCCTAAGAGCCCA
GCTGTTGGCACCCAGCGAAAGGACAGGGCACCAAAAAGGAAGTATCACAGCCAGAGATTTTCCTGTCACTCCACAGGGA
CTGACCGCCGTGTCTCTGAACAGGAAGGAGAGGTACTTTTTTGGGCCACTGCCCTGTGGCTCCGTTCTACCTTTGGGTG
GATTTATTCTATTTTCATGGTTTCCCTAAAATGATAGTGGTTCAAACCCACTTCCTTCCTTTATGGCAGCAGGCCCCGC
CCACATCCTCCGCACTGGCTGTTAACCTTTCTCCCTATTTTCGGTGGTACAATAAATTAACACAGCTCACATAAAGGGA
GTGGAGGGCATTGTATACATACGGAATTCGACTGGAATTCATCAACCTGCTGTCTATCTCCCTTCCCAGTCACTGCGCA
CCATAACGCACCATGCGCACTGCGTCCCTGTGCGCCATCTCTCACTTGGTAAATAAAGCACAACGCCTCTCATTTCCTT
TGTTCACGTCTCACTTTTATGCCCTAAATCTCCCCCCACCCCACCCCACCCCACCCCCACGTTTGGGTGACCAGATAAA
CGTTAGGACACTAGAGTTAACATTTTCATTTTAGATGAGCGAAGGACAATTTTAATTTTTTTAGTATAAAATATCACAA
ATATCATATATAATATATAGAATGTACTAATCCTAGCAAGTATTTATCTCTCTGAAAGTCGGATTTTTAAGTGGACATT
GTGAGGTTTTTTGTTTTTTAATATCTTGTTTCGTTGTCGCCTTGATTTTTTTTTTTTTTTTTTTTTTTTTTTTTTTGGT
TTTTCGAGACAGGGTTTCTCTGTATAGCCCTGGCTGTCCTGGAGCTCACTTTGTAGACCAGGCTGGCCTCGAACTCAGA
AATCCGCCTGCCTCTGCCTCCCGAGTGCTGGGATTAAAGGCGTGCGCCACCACGCCCGGCTGTCGCCTTGATTTTTGAA
ACATGTCTCATTGTGTAGCTCTGCTTGGCTTGGGACATGTATGTAGACCAGGCTAGCCTTAAACTTGCTGCGATTCTCC
CACATCTGCTTCCCAAGTACAAGCTCAGCTCGGTGAACTGTTATTTGCTGGTTCTCCTACAGCCGCGGTGACGTCACTT
AATAACATGTAAATTAGCTTGTATCACTCGAGTTCCAAATCCAGCACAGTTTCCCTGGCTCTGCGCACAGTCCCTTCCC
TAGATCTCCCCAGATGTGCTCTCCCAGTCCTTGCTACCCCTCGTTTCCTCCCTCCCTCCCTCCCTCCCTCCCTCCCTCT
CCACCACTTGCTCCGAGACCACAGGAGCTTCCTTGTTCTTTGCTTCTCCCAAATCTCCACTTCCTTCTCCTTCGTCTGC
TTTAACCCAGTTGATGTTACTCTCTCTGGAAAGCTTTCTCCAACACCCCTCTAAAGCCCGAAGCCTCACCACCCTTACC
CTCTCTGCGTTTTCCCTGTATCCCACCTTCCAACCAATCACCCGGTCGGTCGGAGGACAGGATCTGTCCTGTTTAAGCT
GAATCTCCAGCCTCTGGCCCTGCCTGGCAACTGCAGACTTTCAATAAGTATTTGTGAATTAATGAGAAAACCCAAGGCC
AGGAAGTGCAGCCCGGAGAAGCCCAGGAATCAAGCCTTCGCTTTGTCTGTCCTCTACAGTCCTCTGTTGGTCTAAAACT
CCTCTTACTTTTCTCCCCCAAGGCCACCCTTGGCCACTGTCCCGGGTCTAACTAGGACTTTTCTAGGCACTGTCGAGAA
TGGTAATCTAGCATCCCTTTCCTGCCCCACCTCCACCCCCTCCATGTCTCTTTCATTTCTCCCTCTCCACGAGCGAGCA
TTTATAATTTAAAAAGGAAGCGAGTGACTGGTGCTGAGGGCTCAGTCATAGAGTGCTTGCCAGACAAATGTGAGAACCT
GAATCCAGTCCCCTGGAACCCATAGAAAGGTGGGCTGTGGTGGCATAAGCTTGTAATCCCAGCAATAGGGAGAAGCTGA
CCAGCCAGCATACCTGAGTTGAAGAGTGTTCTAGGCTCCACAAAGAAGAGGTCTGTCTGCCTGAGTGTTCTCTCTCTCT
CTCTCTCTCTCTCTCTCTCTCTCACACACACACACACACACACACACACACACACACAAGTGGGGGATGGTAACTGAGG
AGCAACACCTAAAGTTGGCCTTTGACCTCTAAACACAGGTGCATGTACCCCCCCAACACATACACAAACTAAGTGAAAA
GACTTCACTTTGTAGCCGCTGAGACTGAAGAGTGGTGGTTGGGAGGCTTTGAAAGCTGAGAACAATGCCAGTAAGCATC
CACTTCTTGCCATGTTTGGTCCCAGGCTTGGGTTCCCGGATGAGAATTACCAGCTCTCTGGGTACCAATCAGGAGAGAA
GGGACTTTGTTCTGGAAGCACAATTGCAGGCACCGAGAGCAGCCCTTCACTTTCTGTCCCCACTGGGATTCCGGTGGGA
ATTGGCAGGGGCTGCAGTTAAGTGTCTTAGACATGCAGGAAGACCTAACTGTGACCTTCTGAAGTACGGTCGCGTTGTC
TGGTCATCCTCTTTAGAGCAAGAAGGGACATAGAGGACACGCACAGGCTCCTAACCTCATTTGCATGTGAGTGAACGCC
TTCTCATTGTCCAGAATCCATCAGGTAGCTCTATGTCCTTGGGAAGGGGCACTGTCTCTTCCCCAGTACACTCTTGTGA
GAGAGGCAGAGGAACACCAGAAGCCTGTTCAAATGCAGAGATCTCTACTTACCCATCCTACCTCTCCGATGATACCAGA
GAATTAGGACAGCATCATCTTTCATTTTCCTGGAGCTGGCACTTTCTTTCCTTCCTTCCTTCCTTCCTTCCTTCCTTTC
TTTCTTTCTTTCTTTCTTTCTTTCTTTCTTTCTTTCTTTCTTTCTTTCTTTCTTTCTTAGTGTAGTAACTATGCAGAGG
GAACTTTCAAGGCTCAGAAAGGTTAAGAGAACCAAGGGCTGTGCTGGTATCTCAGTAACTCAGTTGAGCCACACCACAG
TTCCTCTGAGGGGATGTTCTAACTGTTCTAACTTCATTCCTGTTGCTGTGATAAAAATGCCCCGACACACACCTTTACT
TCTAGAACACAAGAGGTAGAAGCAAGTGGATCTCTGTGAGACCAAGGCAAGCCTTGTCTATATAGCAAGTTTCAGGACA
GCTAGGGCTATCTCAGAAAAACAAAAGTCCTAGATAGAAAGGCAACTCAGGAGAGAAAGGGTTTTTTTGTTTGTTTGTT
TGTTTGTTTTTAGTTTATAGTTATTCCAGGTTACAGTCCATCATTTTGGAGAAGTCAAAGCAGGAACTTCAAACAGCTA
GTTGCATTATGTCCACAGTCAAGAGAATAAATGTATGCATGCTCACTTGGTTGTACTCGGTTGGATTTCTTCACTCTCA
CATAGGTCAGGATCTCTTGCCTAGGGAATGGTGCTGCCCACAGTGGCCTGGGTCTTCCCACATCTATTAACTTAATTAA
GAAAATCTCCTATTGACATGCCCAAAGACTAAATCCACTGTAAACTTTGTTTTGTTTTTGAGGCAGGGTCTTACTATGT
CCTGGAACTCACTCTGTAGGCTGGCTTCAAAGTCACAGAGATCCACCTGCCTCTGCCTCCCAAATGCTGGAATTAAAGG
CATGCTCTTCCATGCCAGGCCTATAAACAATCTGTCATTGAGATTCACCTCTCAGGTGATTCCAGGTTGTGTTGAATTG
ACAATTATAAGTAACTGTCACAGGAAAGATACCCAACTGTTCCTTCAGGTCTCTTCAGCGACATTGGCGGGAAACACTC
ACTGCAAACCCTGCACAACTCACACAAGGTTGACTTAGAAGCACTATAAAGCTCAGTGTAGGAAACAGAAATTGTCTCA
CCACGTGGGAGGTGGGACAAAGTGAAGGAGATCCGAAGCATAGAGATCAGGAAAAAATCAATCTTATCACACTCCTCTC
TACTTGCCCAGAGAGCAGAGATGCTAAGCTGACCAGATTGGCAGCCAGCAAGGGCATCCTGACTTTGGGTCCTGGCTCT
GTCACCTGCTTGCCAATCAACCTCATGTGAGTAGCGTCCTTACCGAATGACTTCCCAAGCCCAAAAATGGTCTTTACAG
CATCTGCTTTCTGGGGGTTGGGTGGACATGCTGCAAGCTCACATGGAACTCAGCACACAGCTGGCCTTCTGTTAAAGGC
AGCTGTTAAATGTTGTTGGGTAGGATAAGAGGAAGCTGGAGAGACTGTGAGATTTAGAAGGAAGAGTGAAAGAAGCCAG
AGGGGGCTTCCCAACATTTCCTTCCCTTTCCTCCCTTTCTTTCTCCATCTTCTCCATCATCATCATCATCGTTATCATC
ATTGTCATACCACCATCACCACCATCGTCATTGTCATCATCATCATCAGTAACAGTAATAACGATATGCTGCACTAATG
CAAATGAAGAAGTTTAGGGGAAAGAAGGAAATAAGAGAACAAATACCCATTTTGCATTATTGGCAACCAAAATATTTTG
TTTATAAATAAGCTTAAATCCTCTAGATACTGTGTCTTGAAACCTTTTCTATGTTGCTATCAAGGAATAAGACAGGTTT
AGTACCAAGCAACCTCTAAGTCAGAGGCTCATTCCTTGTTCATCCAGTGTCCCCTGTAGCGCAGAGTGACCCTCACACA
GGCTGCCCTCCATAAGATGACTTAACAATGGAGACCTCTTAAACCCGTGGCATCTTTGGCTGAGCACAGGTCTTGATGT
AATAGAGAATTCAGAGGGTCTGGAAGGCTTGAGTTCAGAATAAATATTTATCACCTCCCACCTCCTGGTGATGGTCAGA
ACTAGTCCCTGAGGCAAGACAGAGAGTGGGGAGGGCTGCAAATGCAGCCAGCCGGGGGGCCAGGAAGAAGAAAATTGAG
AGCACCACAGAGTGATGTCTTCAGCTTTAGATTTGCATACCTCCAATGAACTCCATAATTCATGTTTAGACATTTTGAC
TCTTGCTAGTTTTTCAGTATCACAAATATAACTTGGCTCTCCAAGTTTCGCTGGGGTTGTAGTTAGAATCGGCGCTAGC
TTTGACAGTGTGCTATTATCAGATCTGGGAACCACCAGTTTTGGGCAGCTCCTCGGCTCCCATCCCCCATTGCCCCAAA
TCATACTGTTTGCATGGGCTGGGGGGTCACCATCCAACTTCTCAACCAGAAATCTGCATCAAGAGTTGCACATGAGGCT
CTGGGCCTGACACCCTTGTGGGTATTGGTCAGCACATGGGACAGATATAGTCCATCCATCCATCCTGCAGCCTCTACCC
ACACCACCTCTACTGGAGGGTGCTTCACAGAGTGATGCTGAGAATTCTGCACACACAGTATGCTGGTCTGCGGCACCAT
GCAGAGGTACAACAGTACTGAGTCCTGCCTGGCTACGGAAGGGATAGCATGACAAGTGGGATAGAGCCAGCAGGGTGTG
GACCTCCACAAGTGTTGACAGTTGCTGGGTGTGAGGCTTGTTATATATATGTATATAAAACATCATCTTCCTCTTTCAG
GAAATATTCTCCTTGCCACGGTTATTGGGGAATGTCCTCTCTGCCAAGTTAATGATTCCGTGATAATTAGAGACAGCAT
AGTCTGGGAGGCAAGGGTGAGTCTAATGTCTCAGCAAAATGGTAAACACTGGGACCTTCAGGATATCCCTTAAGGCTGT
GTGAAAGAACCCTGAAAACATGAATTCAAAAATATATAATTTCTCAACTATGTAAAATATAAGGATGCAATATGAACTA
TATGAGGGGCTTCACAGACCTAAAAGAGCAAAGGCAGCTGCACTATGAGCCAGCTTGTCAGAAAACTATTAAGGAAAGA
GACAGAGAGATTTGGGGAGTGGTGATCACAGGGCAAGATCCTAGTTAAGTTTATTGTTTGTGCTTTAAAAAGCAGGCAG
ATTTATGAGTTCAAGATCAACCTGGAAGAGAGCTAGTTTGGACCCAGGTGCGGTGAGAATCGTAATCTCAGGACAGGAT
CTCACCCAGCTACTTTATTGTCTGTGCTTACAGAGGCAGGCAAATTTCCGTATACATTTGCGATGTTAAAAACAAATGC
TGGACTGGAGAGATGGCTCAGCGGTTAAGAGCACTGACTGCTCTTCCAAAGGCCCTGAGTTCAAATCCCAGCAACCAGG
GCTCACAACCATCTGTAATGAGATCTGACTCCCTATTCTGGAGTGTCTGAAGACAGCTACAGTGTAATTACATATAATA
AATAAATAAATATTTTTAAAAATGCTGTCTCTTTCTAAGAATCAAGGGGCTGGGGTCATGGAATACTGATTCATGAGAT
AATCAAAAGGGAACCTGGAGTAAATGACTGAATTAATATGTAATTAAGACTGGGCTATGGTCTGGGAGAGCTGAACTAT
CTGGATGAGCTGTCTGGAGGTCTGTAAAAAAAAAAAAGGCTGTTTTGAGCAGAACACAGGTTGTCAGCTTGTACCCCAC
AATTGACTTCGACCAGTTCTTTAGCTACTCTCAAATACCCCTTCCTCAGAACCCCTCTCTGAGCTGAGGCTGGTCCTTG
GCACAACAGTGTGCCTTGGCTGGCTCTGTACAAACTTGGCTGCGTGGGGCCTGAAGCTGCATTGTTTGGACATGGGCCC
TCACACAGTCCGTCATCAACTCTACTCCTGTAGCTTCTCCCAAAAATGCTCAACGCAAGTTGAGTCACCTATTCTTAGG
GGGAGTTTGACTCTGATGACTCAAACATTGTCATCTCCCAAGGCCCTCACTTAGAGAGAGCTCAGCTCTCTTCATTTTT
ATGTGTCCTATCTGGTTGAATCTAGGAGCTCAATAAATAAATATAAAAGGGGGTTAAGGACAGAAAAGAGTGAACATGT
TATTAACCCCACATGCACATGGGAATATTCACCAGAGTGTGAATTGCAAAAGAAAAAGGTGTGGATTTTATGCTTTTTA
GACAAAGAATATTAGGGTTGTGAAGGAATGGCCGGGCAACGGAGATCTGGATGAGGTAATAGCTTCTCAAGACATCACT
AAGATGAATGGGGGCAATGATGAACCTGCTAGAAGATAAAGTTAATTCTACATTTGTGTGTTCAGGATCACTGCAGCCT
TACCAGCCTCCAGGACCAGGGCCATTTCCTAGCCTTGTAGACTGTGTAATCTCGATGGGCAGCTTGGTAGTATTTGGAG
TCACCTAGCAGACACATCTCAGGGTGTGAAGGACATGCCTGGAAAGGCTTTCCAGAGAGGATTGACTGAGGGGGAGGGC
TCATGTCCATGCAGGCAGCACCTTCCTCCCAGTGGGTAGTCCAGATATAGAGGGGTCTGGTGAAACATCAGGGTCACCT
GCCTGCCTTTGCTCCCCTCCACCACTGCCGTCACACATCAGTTTCTTTGGCCTCCCAATGTGGACTGAAGGCCAACTGC
TCTTCCAGGTGATCCCAGGCCTTTAACACTACCTAGGATCAATGGAAGCGTCTCTGCGGACTGAGCAGTTATCATGTTC
TTTGTCCGTTTAGCGAGTTGATAGGCATTATGGGACTATCCAGTCCCTATGATGCATACCAATCTAATAAATGCTTTTT
TTGTGATATACAGTCATTCTGTTGGCTCTGACTCTATAGAAAACCATGAATGATACAGTATGTGAAACACACTCCTCCC
CAAAAGATTTTTTTTAATTATTATTTAAAATAAATTAGTTTACTTCACGCATATGGGTGTTTTGCCTGCAGATATGTCT
GGTACCACATGTGTACCTGGTGCCTGTACAAGTCCAAAGAGGGTGTTAAATCCCATAGAACTGGAGTTATAAACAGTTG
TAAGCCGTCATGTGGGTGCTGGCAATTTGAACCTGGATCCTCTATAAGAACAACAAAATGGGGTTGGTGAGATGGCTCA
GTGGGTAAGAGCACCCGACTGCTCTTCCGAAGGTTCAGAGTTCAAATCCCAGCAACCACATGGTGGCTCACAACCATCT
GTAACGAGATCTGACTCCCTCTTCTGGAGGGTCTGAAGACAGCTACAGTGTACTTACATATAATCAATAAATAAATCTT
TAAAAAAAAAAAGAACAACAAAATGATCTTAATAATCCAGCCATCTTCCCAGCCCCTCCCCCAAAACACACACCATTTT
TTCTTTATTTTGAGACATGGTCTCACTATGTATATCTTCAGTTGGCCTGGAGCTCAGTATGAGACCTTGTTGGCCTCAA
AATCATAGAGATCAGCCAGCCTCTGCTTCTGGAGTGCTGGGATTGAAGCTGTGCACCCTGCAGCCAGCCCAAATGGCCA
TTTCTGAGGTTATAGTTCTTGAAACCATTTTTGCTTTAATCGACATTCTAACTCGGTTCATTTTGTGATGGGTTCTTCT
TTCTTAGTCGCTTTATCCTGGTGGCAGTTACTTTCATCACCGCTATTGACCAAATGCCTGGTGGATGCCTGTAACAGGA
GGAAGGTTGATTCGAGGTTATGGCTTAATAAGCTTCAGTGTGTCACAGTGGAAAGGGCATGGCAGAGCACAGACCTCAA
CGGCCAGGAAGCAGAGAGAGGATGCCAGCTCCCTTCTTCTTTCTCTTAGTCTGTCCAGGCTCCCACACACATTCAGAAC
AGGTCTTCCCACTAGCAAATGGAAACAAAGTCTCAGCCTACAAGTGTGCTTCTAATCTCATGAGACCTTCTCAATGCCT
TCACCTTGCCAGTTAAGATTAAAGATCACAAACTTCAGTGTTGCCCTTCCTAGGTAGGTCTTATTCATTCTTCACCCCA
AATCCCTAAGCAACCCCGAATATTAGTAGATATAAACTCCTACTTGCATAGACAGCCATCCTCTAACACAGCGGTTCTC
AACCCGTGGCTGTGTGTGATCCCTTTGCGCAACCTTATTTCCAAAAATACAATTATTACATTACAATTCATAACGGTAG
AAAAATTAGTTATGAAGCAGCAACGAAAATAATGTTATGGTTGGGGGTCACCACCACATGAGGAATTGCATTAAAGGGT
CACAAGATTGGGAAGGTTGAGAAGCCCTGCCCTAAAATCACTCACTGGGAGCACTGGCCATCCAGAACTTTCTGGACAT
CGCTAATGTTAACCACCATCCAGAAGAATGTCAGACTTCACTTAGACTATTTTTTGGGGTAAATTCCCAGAAGTAGGGT
ATCACGGTCCAAGCATAACAATATTGTTCATGGTTCTTACACCTAATCCTCACAGTATTCAGGAGTAGCGATTGTTTTA
ACTTCTGCCATTGTCCTGGATGGTGACGTTTCTCCTTGTTTTGATTCATGTTTCTGAGGTGCCTGCATCATCCTTCCCG
AGCTTGTCTCCATGCAGGGGATTTGTGAATGCAGATGTTGGGTAACTTCTTCAGGCCTTTCTCTCTTTCTTTCTTTCTT
TCTTTCTTTCTTTCTTTCTTTCTTTCTTTCTTTCTTTCTTTCTTTCTTTCCTTCTTTCTTTCTTTCTTTCCTTCTTTCT
TTCCTTCCTTCTTTCTTTCTTTCTTTCTTTCTTTCTTTCCTTCCTTCCTTTCTTCCTTCTTCCTTCTTTCCTTCCTTCC
TTCCTTTCCTTCCTTCCTTCCTTCCTTCCTTCCTTTCCTTCCTTCCTTCCTTCCTTCTTTCTTTCTTTCTTTCTTTCTT
TCTTTCTTTCTTTCTCTTTCTTTCTTTCTTTCTTTCTTTCTTTCTTTCTTTCTTTTCCTTCCTTCCTTCCTTCCTTTCT
TTCTTTCTTTCTTTCTTTCTTTCTTCTTCAGGCTCTCTCTCTCTCTCTCTCTCTCTCTCTCTCTCAAGGTTTATTCATT
TATTTTATGTATGTGAGTACACTGTCACTCTTTTCAGACACACCAGAAGAGGGCATCGGATTCCATGTGAGCCACCATG
TGGATGTTGAGAATTGAACTCAGGACCTCTGCGAGAGCAGTCAGTGCTCTTAACTGCTGAGCCATCTCTCCAGCTCCAG
GCCTTAATTTCTTAAACTGATTTTGGGAAGCTCTTTGTATAACAAAGAAATCAGGCTTCTGTTTGTGGTGATTGCATCT
TTGAGCTTCTGTGCAACCATACACATTCTGGTCTCTTTGTGTTTTAATTTTGGTTACTTAATTATATTGTTTTGTTTTA
TTTTCATTTTTATTTTTGTAATACAGAAGTTTTAAATTTTCATTTACACAAATCTGTCAGTCTTTTGTGGCTTTTCTCT
CTCTCTCTTCTTTGTTTTTACAACAGAGCTTACAAATATATTTCCTTTGCAAAAAGTATTAATTAGTATTTGATTCTGT
TTTCCTCTACATTGTCACATATGTGTTATATATCATTATATATTATATTAAATATATGTAGATGTAATATATAAATATA
TTTGGACTAAATGAAACATTTTAGAGTCATGCCATTTTATAATTTGTTATTATTATTATTATTATTATTATTATTGAGA
AAGAGTCTCATTGGCCTGAAATTCACTCTGTTGATCAGGCTGGCCTCAAACTCATAGAGAGCTGCCTGCCTGGTGCTGA
AATTAAAGGCACTTGTCACTATGCCCAGCCTGATTTTTTTTTTTAATTATTTTACTATTGTATTTTATATTTATGGTTA
TTTTGCCTGAATGTGTTTGTGTACCACTTTCGTTCCTGGTACCTATAGAGGCCAGAAGTGGGCATCAAATCTGCTGGGA
CTGAAGTTACAGACGGTTGTGAACCACCATGGTGGTGGGGGGAGGGCTAGCAATCAAACCTGAGTCCTCTGGAAGAGCC
TGTGCTCTTAATCTCTGATCCATCTCTCTGGTCTCATACTTTTTTTTTTTTAAAGTAAGAATCAACTCTTGTCTGTAAG
TGTATTGAAATGTTATTAATATTGTCAGGGATTGGTTCTTGACCATGGGATGGGTCTCACTTTGGGTCAGTCATTGGTT
GGCCATTCCCTCTGTCTCTGCTCCATCTTTGTTCCTGCACATCTTTGGATTTTTTGAGTAGGTTGCTGTCCTTATTCCT
CCACTAGGAGTATTGCCTGGCTATAGGAGATGGCCACTTCAGATTCCATATCCTCCATGTCTAGAAGTCTCAGCTGGAG
TCACCCCATAGACACTATGGGACATCCCTCTCCCCACGCCTTTACGCCCATATCAGGTCTCTGGCACATCCTAGAGATG
CCCTCTTGCCTGACAATTTCCATTCTTTCCTACTCCCTACACCTGATCCCCCCTTCCTCTCCCCATTCTCTCTCCCTCC
CAGTTCTCTCCCTCCGTTCACACCTGATATCTATTTTATTTCCCCTTCTGAGAAAGATTCAAGCATCCTTCCTTGGGCC
CTCCTTGTTATTTGGCTTCTTTGGGCATGACTGTCCTCTGAGAGGCTCCACTCAGCAGACGATGAGAACAGATGCAGAG
ACCCACAGCCAAACATTAGGTGGAGCATAGGGAGTGTTTTGGAAGAGTTGGGGGAAGGATTGACGGACTGGAAAAGGAT
AGGGGGGCCACAAGAAGACCAATAGAGTCAACTGACCTGGACTCTTTGGGGTTCTCAGAGACTGAACCATCAACTGAAA
AGCTAGCATGGGCTAGATCTAGGCTGCCTGCACACAGGTAGCAGATGTGCAGCTTGGTCTTCATGCAGGACTCCCAACA
ACTGGAGGGAGGACTGTGCCTGACTCTGTTGCCTGCCTGTGTGTTGTGGTGAGTTTTTGGTTGCACTACTTTGATGTGC
CTGGGTAGGCCATGCTATCAGTCACCGGCCCAGATTCTCTTGGATCCGAGGATGAGACACACACACACACACACACACA
CACACACACACACACACACACTAGCTCATTTTAACCTGCCTTTCTGGCTCAGTGGCTGGGTTCTTTTGGTTTTTCCAGA
CAGGGTTTCTCTGTGTAGCCCTAGCTGTCCTGGAACTCACTCTGTAGACCAGGCTGGCCTCCACCTCAGAAATTCGCCT
GCCTCTGCCTCCCAAGTGCTGGGATTAAAGGCGTGTGCCACCACTGCCCTGCTGGCTGGGTTCTTCTAAGCCTCTTGTG
GCTAGCTTGGCCTTCCCTTTACTCCTAGATCAACACTTCTAAATCTTCCCTCAGTTTGTTGCCCGGTTACCTTCTGTGA
AGTTCATTGGTCTTGATGCCCAAGACGCTTTCAGGCTGCCCTTCTGTGGGCTGCTTTCCCTTTCTGCGTACATTTTGGA
AGACCTCCACCAGCATCTTCGAGTCTGTTTCTTCTCTCTCCCCCAAGTATCTTGAGTTTCCTCTTCCTGTCCTCTCCTC
TCTCCTAGCCTGTGGGAACCTGGAAGTCCTGCCTCTTCCTTCCCTCCCAACCACTGGCTGCTAGCGTCTTTATTGATGG
ATCAAGAACTAATTGGGAACAAGGACCTTAGTGTATGGCCACGCAGACTCCCCGATCAAAGCATCAGAAACTTTTCCCT
ACACCCATGGAACCCGCTTTCCTAACTGGGCCACCTTGTCTGGCATCAGTGGGAGATTGTGTGCCTAGTCTTGCAGTGA
CTTGATGTGCCAGGGTGGGGTGATAATGGGGGGGGGGCTCATCAGAGGTGAAGGGTAGGGGGGAGGGGGAGGGAAGAAG
TATGTGAGGGGAGACCCGGAGGAGGGGGGGCTGTGATTAAGATATAAAGTGAATAAATAAATAAATTAATGAAAACAAT
CAAGTCTTAAGGCAGAGGCTATGTAGAGAATTGAGGGGAGAAGCCATCTACACAAGAGGGTGCTATGACAAACCTAACT
CCCCTTTGCCACGTAAAAATAGTATATTCACATAATGTGAGGGAGCCATGATGCAATCTATCATAGGGCTCAAAATCCA
GTAAGGCTGGTGGGAGTTAGGTGTGAAAGAGAGTAATGGTTTCCTCCTTCAACATCTGAAGGTGAGGTAGAAGAACAAC
CAGGCTGGGCCCTAAGCCCAACCCCATCATGTGGCTAAGGAGCTAGGGCAAGCCTTTCGCCATGTTCAGAGCTGTGTAA
ACTTTCCCCCACTATTAGCTCAGCTCCAGTTCTTGGCTTTAGGCTCCACACTAAGGAGTAATGGTGGGTGATGAACAGA
TAATTCCTTCATCTCTAATTCAGAAACATTGGCTTTCCCTGACCTCTGCAACCTCCTGACTCACAGGCACTGCGCCATC
TAGACGTTGGTGAACATCTCAGCAGTGGAGTGACTCAGAATATCATAAAGTTCTCCTCATTCGTGGAGGGAGGACAGCA
CCGCTTCTAGATGAGAGACTGCAGAATACTCACCTCCTTTGCTCTGAGAGTCAACTCCAGCTTCTGACATTTATAAGGC
AGGATGAGATAGTCTCCAAAGATGGCTGCCGGCAATCCCCTATCTCTCTAAATGCACTTGCATAGAAAAGAGGTATCTC
ACCAGGTTAGCAGAAGTGTATCGACTAATGAAGTGTAGAGTAAGTTCTGGGTTTCTTGAAGCGAAGTCACAATAGGCTC
TGCATGGTCCTCACTGCAGTCTTTCTGGACCCCTGTACAGTTCTGTGAGGAGCCCAGGATATGGGGATCCAGCTGAGAT
TAGATGAACTTCCAGTCAATAACAGGATAAACTATGAACCATCTCGCATCACCTGTGGAACAGCTCTGAGACTGGCTTT
TCATGGTCACTCGGGGACCCTGATCCTCTAATCATTACTCTGCTATTCAGATGTGACCACCACATTGTCACCATCAGGT
TTAGGCTTCTAGACAATATGGAAAAAGGAATCAAGGAGGGAGGGGGGAAGGAGGAGGAGGAGGAAGAGGAGGAGGAAGA
AGAGGATGAGTCATCACCAATGCCTGAAAGTGGCTTCATCAGTTCCCTTCAGTCCAGTATCCTTGCCAAGACCTTGATC
CCATGACCTCCCCTAAGCCCAAAGGAAAATGGAAAATGAAGTCCAGGAGGCAATGGACAAAACAGGACATTGGAAGGGC
AGTGGCACAAGCTGGGTCACAAGTTCTTATCTTTTTCTCAGTCTGGGAGCTGAGTCTAGGCAAGAGCCACATGTTCGTC
TTGGTCCCTAGTGATGAGCCAGTGATAACCCAGGGTGAAACTCCACTCCTATTTTCAGAGTAAATGAGGCCACAGAAGT
GGTCTAGGCTGGTACAGTAAAGTTGTGTGCAAATGCAGAGAGAGAATCTCTCTCCTGAGCCCGGAGAGAGAAGACAGAT
GTGGAGGAATTTAATTGGGAGAACACAGGGCTTGATGGATCTTGCCAGAACACAGAGCTGTTAATGTTATGATTTGGGG
GGGATTTAACTTGACAGCTCCTTGGCACAAGTTTAAAGAAGTGGAGCTGAATACCTCACTTTGCAGCAATTTATTGAAC
AGATTCCAAAATTAAGAAATTCCTCAACTGTTTCAAAATCATGTTAAGAAAATGCACGCCTGGAGCTAAAAGGCACTCT
GGTTCACTGCCACCTCTGCTACTATCAACAAGCCGAAGCACCCAAGTGCACATCAGAGCCTCACCTGGCTGCCATTCCA
CATCCCCGTCGGGCCTTCGTGGCTCCAGCAGACCCAGAACACAGATGCACACACTCACGTGCAGATGCCAGACACCAGT
TGTCTCCAGGAAGCCGTGCTTTGTGGCTGAGCCCGGGCTGAACATACCACTCCTGAAAGTCAATACAGGCTTTGGAATC
TGTGCAGACGGAGTCTGAGTTCGGGCTCAGCTCCTTGCTACCAATTTTGGTCAAGTTATGTCACCTGCTCAACTCTGCT
TCCTTCACCTGCAAAGTCAGGCTTTATTGGGGCTACATTACTGGGTGTGTAAAAACTGAATGAACTTCTGGGCATTGGT
CCTACCAACTAACAATTAACAGTAAACAACAATTCAAAGAATTATGAAAGCTGGGGTTTCAGGCCAGTGTGGTACTTCA
AGTTCAAGGATATTAGTAAATATCCCAAAGCCAGGAGTAGTGGCTCATGCTTATAATCTCAGTGCTTGGAGGGCAGAGG
CAGGAGAATTATCATGGGGTTGAGGCCAGCCTAGGCTAAATAGTAAAGTTCTAGACCAGAACAGAATGAGACCGTATCT
TGAATGAATGAATAGCTGACTGAATGAATACACAAATAAGTAAATAAATACATCAGAAATGATACCTAGTTATAGCTAC
TAATAAAACAGTTGTGCATACATGGAATGTTATTCATTCCTATGACTCCAGCCTGACCTCTGCTGTGATCAATCTCACT
CCATGATTCCTAGGTGAAATGTGGTGTTGCTATGTTCAGTACTCCCACTCCACGTCCTCTGTACTCCTCCTGGGTCCAG
GTGTGATCTGAGGGCTTTTCCATCAGACACCTTAAGGAGAGAAAAGTAACTCCTTTTGGTGTTTAGGTTACCCATGGTT
TGGGAGCCATGCTGTTGTTGGCTGCTGACCTTCTGTGGCCTATAGTAATGTGATCTCTGGTCAGTGGCATATTCCGTCC
CATCCTACAGATCCTCTCCTGCCCTTCCCTCAGTCACAGCAGCCAGGCCTGTCCCTTCTTTTTTCTAGGGCTGGCCAAG
CTCATCCTTCCAGTGGATGGGTATCACCCTGTAGGTCACCGTAGCTCCTACAGTCAGCTGACTGTGAGCTCACAGAAGC
TCTACAAGCCACATTTGGGGGTATGAAAAACTGGGTTCACTTAAGTCTAAAGGCCTCAAGCCACCATTCTTTGGGCTTC
TCTTTACCAGAGGGTAAAGGCCTGGGTGAGCAAGCACAACTGGGAAGCCAAGCGCCTGCTCTTCCTTCAGTCACAAAGC
CAGGCTCTCCCAGGGATGGGGCCTTCTCACCTCATAGCAGAGCTCACAGTGAAAAGAAGGGATATTTGACTATTTACCC
TCTGTCTCTGTCTCTGTCCCTGTCCCTGTCCCTGTCCCTGTCCCTGTCCCTGTCCCTGTCTCTGTCTCTCTCTGTGTCT
GTATCTGTGTATCTCTGTCTCTCTCTTTCTCTCAGCACAAAGCTTGAATACTTTGTATAAATCGCAGGGTGTGCACAAG
CGCGAGTGCTTTTCTGGCTCCTTTATCTCCCAACCAGCAGAGAGTAAAACTTTTTGACATGCTATGCTTTGGCGTTTGC
TCCTCTTGTTATCAACAGCCATCTACGGTGGTTGAGGGGATTACCAGGCTACGTGAGGGCCCAGCTATCAGCTGCCCTC
AATGGATACTTCACACTCTGACTTGTCTCAGTCAGTGCTCTTACTCGCTGAGCTCTAAGTCGCTCCGGATCTCAGTAAG
CTCCTGTTGGAAAGAGTGCCTGGTTACTCTGTCCCCGGAGTGCACAGAACCTCCCCCTGCAAGCTCAGTTCACACTCCA
CATCTCCCTCTGACCTTTCACTGAGTTTATTGTCATCAAAGTTATGTAGTTAAAACCAAACAAACAAACAACAAGACTA
GCAGGGCAAACAGTGCCCCTCTGCCTTTCTTGGAACTTCCCCAACCCATTTCGTTCCCCCAGCTGACTGCTGTGCTATT
TCCCACTACATTGCCAAAGAATAGGGCTCTATTGCTGCTTCTGGGGTTTTCAATGTAGCCATTATCTGCCAAGTTTATA
GTATGGAAGATGGAGGGTTTGTTGTTTATTTATTTGTTCATTTTGTTTTGTTTTTGAAAAAACTCTGTCACATACTACT
AGCTTCCTCTCTCTACACTACACTTAGAATTTATATTACTGTAACAATATAAACACTAATCATGTGATAATGTCCCATT
TTTATAATTGCCTTCCCTATTTAACAACCCTTTCTTCTTCCTGGTGTTAGATATTGCCCTTTCCATACTTTCCTGTACA
CTTAACTCTAAACCAGTGCTCTCTTCTTGGGACCCTCGTGCTCTCTCTGAGGACTCTGTCTTCTGACTATCGAGCTTTT
TGTTTTCTAGATCCCATGTGTTGGGTAATCTGAATCGGCTTGGCCATTCCACATGGTCTAGATTCTTTCAGGAAAGACG
TATGGCTTCTAGTGTACGTTTCTTCCTATTACTTGGAATAGGAAGTATATATATATGTACACACACACACACACACACA
TATATATATATATATATATATGTATATATATATACACACACACATTACTAATGTATACTAGAGCAAATTCTGCCAGTGT
TCAGGGGTTTTTGTTGTTGTTTGGTTTTGTTTGGTTTTGTTTTTTAACAAACAGGCATAAAGAATTACAGGGACCTTCT
GGGTGATGTCCTTCGTTTCTATCTATGGATATCCTGATGAAAATCTTTTTTTTTTTTTAGTCATTCTAGGGCAGATGCA
ATGTATTTTGACAACAGAACAGCCTACATCGCAGTAGGATTAGGTAGCATGGGGCTGTGACGTACGTGTGTTTGTGTGT
TTGCATGTTTGAGGCACAGGATCAATGAGATGCTAGACCACAAAACCTGTTTTGAAGGTGCGAGGCTTGTGAGCTTGAG
ATTCTTTACCTGTACACGAAGAGATTTTTTTAAAAGATTTATTTATTTATTTTATGTATGTGGTACACTGTAGCTTTAC
AGATGGTTGTGAGTCTTCACGTGGGTGTTGGGAATTGAATTTTTAGGACCTCTGCTCACTCTGGTCAACCCCTCTTGCT
CAGTCCCTGCTTGCTCTGGCCCAAAGATTTATTATTATAGGTAAGTACACTGTAGCTGACTTCAGATACACCAGAAGAG
GGCGTCAGCTCTCATTGCGGGTAATTGTGAGCCACCATGTGGTTGCTGGGATTTGAACTCAGGACCTTCGGAAGAGCAG
TCAGTGCTCTTACTCGCTGAGCCATTTCACCAGCCCATAAGAATAGATTTTAATAGCTAAAAAAATTAGATGCCAACAC
TCTTGGGGTGTAAGTGCTTAATTCACTGGGTGTGTTTGAAATGCCAATTCAGTGTCTCTGTGATATAGACTGACATTAA
TGTATACACAAGTGTATATTAGTGTTGTTACATTTTCACACAATGTAACAGTACACCTTCTTGTTCTTGGTTTATTTCC
TCATTATGATGCAACAAATCCTATTTAAAAAAGAAAAAAAACTTCCTAAGGAATGATTCATGGGAAAGAATAATTTAAC
CCTGTTGTTATCTTATGATGCATTTTGAGATCTTGATTGAAAGTATCTTTATTCGGCTTCCCCCATCAGTGGATAGTTT
GGCTGGGGATGGAATTCCAAGTCAGAAATGGCTGCCTCTTAAAGTATTCAAGGCAGTGCTTCCCGATGATACCACTCCT
CTCTTTGTGGAGCCGTTAGCTCCCACATGTCTGTCTCAAGCTCTCTTTTCTTGCAATGGAGCTATAGTTCTGTTGAATC
CCTTCACCATCTTCTAAGGAGTCTCTTTACCTCTCTCCTGTATAAAAGTCCAAGCTTCCTGAAATCCATGCATCATGTG
ATCTGAATTGGCCCAGCCATTTCACACCTTTAGATTATTTTGGCCAATACCCATGGACTCCACTATTAGTCTCTTCTTA
ATAACACTACTAAAGAATAACTCCACCACCAACCTTTAAGGATCTCTACTGAAGGTCTTAGAATATTATTTGATATATT
GATAAAATACATATTTTCCTAAGGATCTGGCAAAACATCTCAAGCTATAAAATTATGTCCTTGGATTTGGGAAACTTTT
CTTGACAACTCTCATTAACAAAGATCTCCTTTGTCGTCTTTCCTGGAGCCCTTGCTGATTAAGAGGACACAGCTCAGTG
ACACACACCCTAGTGAATCTCTGCTCCCTTCTCTCTGCTTTCTTTGTTTTCATGTCGCTTTCTAGGATATTCCTTCAAT
TTTATGTCCTGACTTTAATATTGCCTTTTTTGTCCCTCCTGCCAGGCTTTGCTATGAACACTCTTTGCGCCTTACAGAC
TTGCCCTTTCATGGGCTTTGTATTATCCCTGGTTTCTCTAGGAACTAGTAACCATATGTTAGGTATTTTTCTACCTTGT
CTTTTATAGACTCCTTTCTGTTTGATTTGCTCTCTGCCTTTTATGTTGAAGAGGTACCTCAGTTGTCCTCAATTTCCCT
TTCATGTTTAGGAGTGTAGTGCTCAAACTCTGATGACCTTTGACTGTTGACCTTTAGCCAGAGTCGTCTGAGTAAGAGA
ACACCATGGGCCAGTATCTTGAGGTATTTTCTCTCAGATCAGACATCCCGGGGAAAAGTTCCCTTTTGGGTTCCGGAGG
ATGAAGGTGAGAAGAGAGCTGGAGGTGCAAGCAGGGGTCTTCCTGTTCAGTATCTCACTTCTCCGGAAGCTCCCATCTC
AGCTGTCACATCTCAGCTGTCATCGGCTCTTGGCTGTCCTTCTGCTTGTGGACTTGTTTGTCCTTCTCAGAACACCATC
TTCAGATCAAGGAGACCAGGTCTCTATGTTTCTCCCTGAGACAACCTAGCCTCCCATTCTTAGTTCTTGAATGCCCCTT
TCAGAGATACCCGCAGGCTCTAACTCCCGAATTTAGCTAAGTCACCCATCTGCCTTCAGCTTTTCTAGATGCAGCTAGT
CACCGCTCTTCTCTGTTCCCGTTTCCCTTTGTCATCTGGGTTTGAGTAAAATCCACTTCCTGCTATTTCATAAAAGTCT
GTGGAGATGGCTGAGATAAGAATCTGTGTTTAATTTGCCTCCATTTTATTTAAAGCACAATTTAACAGTTTTGTTCTTT
CTCTCTTTATTCTGGTGTCGTGTGTGTTTATTGTATGTGTGCACCTATGTGTGCACATTTGGAGGCCAGATGCCAATGC
TAGGGGGACTTTCTTCCATTGTTCCCTACCTTCTGTTTTTAGATGGGGTCCCTCGCTAAACCTGCTCTTGGTGAAGAAG
GGCGCTGGCCCTCAACTGACACTGCAGTTTGATCCCTGGAATCCACACAGTGGAAAGAGAGAACTGACTTCGGCAGTTT
GTCCTGAAACCTTTGCATGTGTGCCATTGTATGGTCATGTGCCTGTGCGTGAGTGTATTTCATGAAGACAGACACAGAC
AGGCAGACAGGCAGACAGACATACACACACAGACAGAGAGAGACAGACAGACAGACACACATACACAAACAGACAGATA
CACAGACACAGAGAGACAGACAGACACACATACACAGACACACACACACACATGCACACACATACACAGACACACACAC
ACATGCACACACATACACAGACACAGACAGACACACACACACACCTGGACACACACATCAAACTATTAAGTAATTCCGG
AGCTTTCCAATTGGCCAGCTGAGCTTCAGGAATACTCCTGCACTCACCTCCCAGTGCTAGGCTTGTGTCCGCTTGGCAT
CTCGGCACCATGCTCTAGACTTGCCTTTTTTTTTTTTTTTTTTTAAGCAAAGGGGTCTCATTCTTTTTGGTCTCCTGAT
CTAATTTGGAAACTCTCCAGACTAGATGGGCCGATGCAGCGTGTTAAATCTCCTCTGTAGCCTTGTTCATTTTCCCTTT
GAGGCTCGGGTTCTGTGCACAATGGTCCAGTCTCATAGACCAACTTCTGCTTTGCCACCAGACTGTTTAACATGGGGCT
TGGTGTCACCTCAGAGGCTTCCCCCCAGTTCCAGCTTCGCTTTCACCTACGAGCAGAGCCTACAGTTCTTTACCAGCTT
CCACCGGCTTCACTGGCAGTTACACACTTGATCTTGCTACTAAGTCCCCGCTGCTTCCTTGCTCTTGGGTTTTAACTCA
GAAATGACTTTGAGTCTTATTCCAGAAAAAAAAAATAGAAGCAACCGAATGTGACTGTCTTCACTCTCTTTCTTACCCC
ATGAAACCATCTATATCTGCAGCCATTCAGGTCTCCCTACCCAGCACACGCTGTCCCGTCTCTCTAATAGTCTCTTTTT
AAGGCTGTCTGGGAGTCCTCGGATGTCTCTCCCACCACAGAGGCCATGGGTGGCTTTCAGGCCCAGGCTCTCTGCATCT
TTGGAAGATTTCCTACTCTCCTCTTGTGCTGTGTGTCTTTGACCTCTTTAGCACATTCCTTTCAACTTAGGAACAGCGT
AAAATTTTCCATCTCTCTCTCTCTCTCTCTCTCTCTCTCTCTCTCTCTCTCTCTCTCTGTGTGTGTGTGTGTGTGTGTG
TGTATGTGTGTGTGTGTGTGTGTGTGTGTGTGTGGTGATAGGGATGGAACCCAGGATGAAACCCTGCCATGTATTCCAC
AAATGCTCTATGGCTGAGCCACATCCCCAGCCCTTGGGTTTTCCCCCATTTTTAAAGAAGCCCTCTAGATCCTTAATGA
GCCCCCTGGTGCTGGTTCAGTCCTTTAATCCCAGCACTCAGGAGGCAGAGGCAGAAGGATCTCTGAGTTAGAGGCCAGC
CTGGTCTAAGGAATGACTTCTAGACAGTCAAGGCTACACAGAGAAAACTTATCTTAAAACAACAACAACAACAAAAACC
AAAAAACCAGACAGACAAACAAAAGTCTTTATTGCCTCCCTCCCCTCCCTCCCTCACACCCTCCCCTCCACTTATTATT
ATTATATTTTGAATTATCTTCTGCGTTCACTTTGTCTGCTTCCTTGTCCCCTTTTCTGTCGTGACCTTTGCTTGACATA
GTCTTCCTCAACACCTCGATGTGTATTGGTGTGTACTCGGGCAGCCTTGCTTCCTCCTGGAAGTCTTCACACAGTTGGC
CACTACCCCTTGTGCAGACCCTACAACCCCATCCTGCTTTGCCTATGTCTTCAGCCACTCCTTTTCTATCCTTTCCCTT
TCTTTCCTTGAATATCAATACCCACAGTGCTCCATCTCAGCGAACATCTACCCTTAGTGCTCCATCTCAGTCATGTACC
CACAGTGCTCCATCTCAGCCATCCACCCACAGTGCTCCATCTCAGCCATCCACCCACAGTGCTCCATCTCAGTCATCCA
CTCACAGTGCTCCATCTCAGCCATCCACCCACAGTGTTCCATCTCAGTCATCCACTCACAGTGCTCCATCTCAGTCATC
CACTCACAGTGCTCCATCTCAGCCATCCACCCACAGTGTTCCATCTCAGTCATCCATTCACAGTGCTCCATCTCAGCCA
TCCACCCACAGTGCTCCATCTCAGCCATCCATTCACAGTGCTCCATCTCAGTCATCCACTCACAGTGCTCCATCTCAGC
CATCTACACACAGTGCTCCATCTCAGCCATCCACCCACAGTGTTCCATCTCAGTCATCCATTCACAGTGCTCCATCTCA
GCCATCCATTCACAGTGCCCCATCTCAGTCATCCACTCACAGTGCTCCATCTCAGCCATCTTTTCCTTTTGCTCTGCAT
AAAGCTTTCCAAACAACATTCTACAGGAAACTGAAGCTCAGTGTATTCCAAACTGGAGTCATAACTTCAGCACTTAAAA
CTGTAATGATGTGCTTTTGTTATCTCTGAAAACTTGCGAGAGCTACTGTATTCCTATCTGAAAAATTAGATGAAAATAT
ATTCCTTATAGAATGAAAGGGCACTAGTATATCTCATGACGTATGCTGCTATGGCTCGAAGGTGTCCCCAAAAAGTGCT
GGGAATTTAATTCCCCATGTGACAGTCTTAGGAAGTGGTGCCTGATGGAAGATTATGACACAGGGGCACTACCCTCATG
GATGGATTAATTTCTTTATTACAGGAATGAGTTCATTCCATATGAAAGGATGTTTGGCTCTCTCTCCCTCTCCCTTTCC
CTCTCACTTCTCTCTCCTCCCCCACCCTGTCTTCCATAGGATATAACAACAAGCCCCCTCTACATGACTCTTGCTTCTT
GAACTTCCTTCCCATCCTCCAGAACCATGAGTAAGTCTGTTTCTATTCATTATAAATTTCCCAGTTCAAACTAAAATAG
TTTTGGATGGATGAGGTGGGGTGGGGAGGACTTGGAGTGGAGGATCAATCAGGCAGAGAGGGGGAGTGGCTGTCTTCCA
TAGGATATAACAACAAGCCCCCTCTACATGACTCTTGCTTCTTGAACTTCCTTCCCATCCTCCAGAACCATGAGTAAGT
CTGTTTCTATTCATTATAAATTTCCCAGTTCAAACTAAAATAGTTTTGGATGGATGAGGTGGGGTGGGGAGGACTTGGA
GTGGAGGATCAATCAGGCAGAGAGGGGGAGTGGCTGGGGGCTGGGAGAGGGAATACAAGAAGAGACAGATAAAATTAAG
TCCATTTAAGAGGTAGTATGGAAGTCTAATATAATAGAAACTTCCTAAAATATATACATATATGAAGGTGATCCAAATG
AAATCGACAAATAATGGGGGAGTCAGAGTTCCAGCTGAATGTACTGTCACCAAATGAAGCTTGTTACATCTAATTGAGT
AATTGACCAAAGGGGTCCCATGGGAAGCCCCAAACAGCCCAGGCTGTTGCGAAGGGAATAGGTTCCTCTCCACAAATTG
ATAGTAAGCTCCTATTGCTGAAGATGATCTGTACAACTCACGGAACCCAGAGAAGCTGAGCTGGTGCCTGACTAGGTCC
TTTCTCCCGATGGGCTAGTGTTCTTGGTGTTGAGAGGTACTCTGCATGCTACCAAGGGAGAAATGTAAACAGCAACCCG
GTTATAAACCCTTTGATCTACAAAGCTGTCATGCCAGCAAGATATGACAAAAAGCTTGTGAAAGTAACCCATCAATATC
TGATTTAACATAAGACCCAGTTCATGAGACGAAGCCCATATTCGATGCTGCTTGGATGACCGAGAACCTGAAACTAGAT
AGCCCAGGGACCCAAAGTAAAACCAAATAGTACTAAAGGAATGTAACAACAAAATGACTCCCAATGACATTCTGCAATA
TGCATAGACAGTGTCTTTCCTGACTGTCATCAGAGAGGCTTCCTCCAGCAGCACATGGGAGCAAATACAAAGACCCACA
GGCAGACAATATGCAAAGAGTCAAATCCCTCCTCTCAGGGCTCAGAGGACTCTAAGGAAGAGGTGGAAAGAGTGCAAGA
GCCAGAGGGGATGGAGGACACCGAGGAAACAATGCCTTCTAAAAACAGCAGATCAAGGCACACATGAGCTCAGAGACTG
AAGCGGCATGTGCAGGGCCTGCACAGATATGCACCAGTTAGTGTCTTAGAGTTGAAAGAAGTGGACACCTGCCTCTATC
CCTAACCCAGAAGCTATCTCTAATTGTTAACCACTTAAAAATAAAACTTTAGTTTCCTCCCAAGGAGTCTTACTAGGGT
AACACAGTACCATTAAGGCTACAAGCCCAGCATGGCCAAAAGAAAACAAACTCCACAGTGTCTTTGGAGGTTCTTTGTC
TCATAATGTCCTGTCGGGGGCTTGCTTCCTTCCTTCCTTCCTTCCTTCCTTCCTTCCTTCCTTCCTTCCTTTCTTTCTT
TCTTTCTTTCTTTCTTTCTTTCTTTCTTTCGTTCTTTCGTTCTTTCATTCTTTCTCTCTCTCTCTCTCTTCCTCCCTAC
CTCTCTCTCTCTCTTTCTTTCTTTCTTTTCTCTTTCTTTCTCTCTCTTTCTTTTTCAGATTTATTTATTATATGTAAGT
ACACTGTAGCTGTCTTCAGACACCCCAGAAGAGGGTATCCAATCTCATTAAAGATGAGTGTGAGCCACCATGTGATTAC
TGGGAATTGAACTCAGGATCTGCAGAAGAGCAGTCAGTGCTCTTAACTGCTGAGCTCTCTACAGTTCTCTTCTCTTCTC
TTCTCTTCTCTTCTCTTCTCTTCTCTTCTCTTCTCTTCTCTTCTCTCCTTCCTCATTTTTTTCTTTTTGTTTTTTGATA
CAGGATTTCTCTATGTAGCTTTGGCACTACCACTGCTCAGCTCATATCTTATTTTTCTTTCTTTTTTTTTTCTTTTTTT
GATTTTTCGAGACAGGGGTTCTCTGCATAGTCCTGGCTGTCCTGGAACTCACTTTGTAGACCAGGCTGGCCTCGAACTC
AGAAATCTGCCTGCCTCTGCCTCCTGAGTGTTGGTGTTAAAGGCGTGCGCCACCATGCCCGGCTCTATTTTTATTTTTC
TATTCCCCCCCCCCCTTTTTTTAACCACAAAGGTCTTTTTCACACACACACACACACACACACACACACACATACGCAT
ATGCATATGCATATATATGGTTTTTCTGTTTTTTTTTAAATGGGATTCCTGAGTGTGTGATTGAGTGGGTCTCTGAGTC
TATATTTGTTTCTTGAGCCTTTTCTTGACTCTTTTTCTTTTTTTTTAAAAGATTTATTTATTTATTATTATATGTAAGT
ACACTGTAGCTGTCTTCAGACACTCCAGAAGAGGGAGTCAGATCTCGTTACGGATAGTTGTGAGCCACCATGTGGTTGC
TGGGATTTGAACTCTGGACCTTCAGAAGAGCAGTCGGGTGCTCTTACCCACTGAGCCATCTCTCCAACCCCTTGACTCT
TTTTCTTTCTTCTGTTTGCTTTTGTCCTAGTCTAATGTATTTGTTTTATATTATTAGATTTTATTTTATTTTATTTTAT
TAATCCTTTGGAACCTGTTTGTTTTCTAATGAGACAGAAAGTAAGTAGATTTGAATGAGAGGGGAGGTGGGTAGGAACT
GGGAGAGAAACCATAATCAGGGTATATTAAATTTAAAAAAAATTCAAAAAAAGGCAAATAAATAAAGAAATAAGATAGG
ATATTTCCCAGCCTGTGTACTATTCTAACAATGTAGCATGGACCAAGGCCCACACCAAGGACTTATCAAGTGTCTGACA
TACTGTCTGTGCTCAATAGGGGGTCCAACTATTATTAGTAGTAAGAGTTGCAGAATGTGGTGTTTTGAATATGCTTGGC
CCATGGGAAATGATACTATTATGAGGTGTGGCCTTGTTGAAGGAAGTGTGTCACTGTGTAGGTGGGCTTTGAGGGATCC
TAGGCTCAAACTCCAGTGTGGAAGACACTCTCCTCCCGGCCGCCTGCAGATGACAGTCTCCTTTTGGCTGCCTTCAGAT
CAAAATGCAGAATTCTCAGCAACTTTTCCAGACACATGCCTGCCTGTTCACTGCCCTGTATCCCTCTGTGATGATAATG
AACGGAACCTCTGAAACTGTAAACTAGTCGTAATGAGATGTTTGTCCTTTAGGAGTTGCCTTGGTCATGGTATCTCTTC
ACAACAATGGAACCCTAACTAAGACACAGAGGGAAGACGCTGATATTAATATGACCATTATTCTTTTCACTAGCCTGGC
ACCATGCCAGCTATCCCCAGTTTACTACTTAGGATTCATCCTTATCCTCTCTGCCTATCAGTGTTTATCACCTACATGC
TCAATATTATTCAATCTGTCATCAAGGCTATGGGTCCCATTCTACACCCAGACTTCTGTTTTCTTCTCCATTGTCCTCC
CTGTTCACTCCTAATCCTCACCCATCTGGTCTACCTGGGAAAGCCATGTAGCCTGGTCTCCAGCCTTCTGGTCTACCTG
GGAAAGCCATGTAGCCTGGTCTCCAGCCTTCTGGTCTACCTGGGAAAGCCATGCAGCCTGGTTCCCAGCCTCTGGTTCC
CCTATTTTCCCTTCAGTGCATCTTCTAAATCTCTGCTGCAATAATCCATCCAACATATTTGTCTAGTGTGTCACATCTC
TCCTAGGCATGTTTCCATGGTAATGAGAATTGCAGTAGAGAAGAGGAAAGCTAATATTTAAAGTCATAACAGACCACAG
CTGCATCTTCCCCTAAGGCAGACATTCCTCTTCAGTACAAGGTTCTTTGTTCAGCAAAACACCTGGGTGGACACAGAAG
GTAAACAGCTCTGGATATAAAACAAAGAGAGCCAGACTTCTCTGCAGAGGAAACAGGGGCTGTAGGTACTGGAGGACGT
CTAGAGAGAGAAGACTATAGATGAAAGCCTTAGAGGGGAAAATGCCACCTCATTATCTCCAGGGGAAGCTGGAGGGAAA
TTAGGCTGGGCTGGGAGTAGGGAATGTCATGTAAAAAGCACAAATGTCTAGTATGAGCTTCCAAGATGCAGACAGTTTT
CCATTGCGCTAAAGCACATTATGCCTATCACTTTACATCTTAAATGAAGCTCATTACACAAACACTGCCATATATGATC
TCTCACTGATGGAAGAAGAGACCTAGGTTCTGTTTGGATCTGCTAAGAGCAGAGATGAAAACCTGAGGTGGGAAGGGGC
CTCTGGGAATTTTCAGTAGGATGGAATTGAAACATGTTCACTGGAGGAGCAGAGGGGTACAGGGAGGGGCAAGCCTGAT
GTAAGTGAAGGTAGGGTTTCAAATATATACTGTTTAAATTTCATGGTGCCTTCAAGTCTTTTTCTCAGAGATAGCCTTA
CTCTGACAGTGTTGCTATGGTGATATATGGTAGCCGTGTTTCCTTGGGACCAGACATAGATTGAGATTTGCAAGTACAA
TCTCTTGTCACCATCTCCTAGGGCCCACTGTGGAGCTGGCATTATCAATTCCACTGACAAGGGTTTATAATGTGCCTGG
AGTCATAGATCTGGAAGACTCTAGGTATTGGGGTCTGAAGTCAGATCAGTCGTCAGACCCTGGAGGATCCCCCTGCTTG
CTCGTCAGTGCTTGCCCTTTATTCTTGGGTAAATGTTCAGCTCCAGGTTTTTTGTTTTGCCTTGTTTTATACTTCATGC
AAACTTTATTTATAAAAGACTCTTAAATTAGTTGTATCATGCCATGCATTCATACAGAATACAGTGTCCCTTCAGGGTT
ACAGAAGAAGAGCTCACAACTCAAAAGGAACTATTAAAAGAGTTTCTAGTGGCTGAAAGTTAGGACATTTTAGGACAAT
TTTACAAATGAGCCATTAAAACAAACAAAACAAAAAAGATATGGAACTTAATTCTGAGCTGAGGGAGCAGCTGTTTAGA
AGTCTGTACACTAACCTAACCCAAAGTCAGGTTTCTGGAAACAGAGCATGCTCAGACTTGAGCCACCACTGCTCCTCCC
CATCTGATATATACAACCAGTTTGTGCCTGAAGTGGCCGCTTCACACTATGGGGCTTCTAGATCAGTAAACTAAAGCTG
CAGGGTGCTGAGAATGGGCAACGTCATTTGCAACTGCTCTTTATGCTCACCAGTCTCTTTTTCAAGTCATCAATGTTCT
GTTGTGGAGAAAGAGGTGGAGGAGGAGAGGGAGGAGGAGGAGGAGGTGGTCATGGCTCCTGCGGAGTGGGTCTGGTTGG
AATTCAGGTCTGAGTGCTGGCGCTGTCCCCGGGAACCCCGAAGCTGTGAATGCTTGCTACGGAGCATGTCTGTGGAAGA
GGCAACTGGAGGAACTGATGGTTTGGAGAGCAAGGAGGCCAGTGGAGGCCGGTCATCCTGCTTTGCGTTGTCAAGACCA
CACCGCTGCCGGAGAAGTTTTAGCCTTTCCAGGTAGACAGAAGGCCCTCGTTCTTCTCCGTTTGTGTTACCTAGAGAGG
TCGGGTGGGCACAATGTGATCTCCATCTGAGGGGAAATGATTGTTGCAGTGGGACTGAGGCCTTGGCTTTCTCTCTCCA
TTTCAAGCACCCGAAGGCCTCTCTCAACATAACTCTGAAAGAACTGTGAGGAAATTTTCAGAAACAGTTCAATGTCAGT
GTCTGAATATTTCTTCTTATATTCATATAACTCTGCTAGGACCTCCTTAGTGATTTTTCATCTATTCGAGAAGCTTGCT
TTTCTGTTTCCTTACCAGACTTGCTCCCAGCCTGGCCCAGGCTATGCTTTGTCCTCTGACACAGGTAGGCCCCCAGTTC
TGACCCATTCTGATTATCAATCATTGTAAGGTGGTCTAGGATCTTAGGTCCTTTTAACTTGCATGTAGAAAGGTCTTTA
GAGTCCTTATAGGAAATTCACTTTTTCACTGCTTCATTTTACTCTTTGGGAAAGACCTTCATGAAAATGTGGGTGTCCA
GAAGAATTTTGTCTAGGTTAATGTTGTTGATGGTGTCAGACAACAGTCAAGCCGTTCTCCACAGATAGAGCTTCTTCCT
AACAAGCTCTGAGAATCTGGGAGAACGAGCTGTTGGTAGCAGGATGGCCTAAAGTAAAACAAGCAGGGCATCGAGGATG
TTGGTCTGGTCTGATTTCTCCCAAACCTTCACCACCAAGAGGTTCACAGAATGAATCACCTCTGTCCTTCCTCCAGATT
CAGCTCCAGTTTTTAAATAACTCCAAGAAAGACTATTCAGTCACAGTTGTGAACCAAACTGCCAGGCCTATCAATTCAA
ACTGAAAGAGAGTACTTCAGGGAAGCACAGGAGGCCATGCTGACTTGAACAGATTTCTTTTTATCCTAAGTCTGGTGTT
CCTTCTACTGCAACAGATCAAGTCCACATCAGTGCCCATGGGTGTGCCATGAGAGAAGTGTCCTAAAGTGAAATAAGTG
TGGAATGACTGAGGTGAGCACAGCTTTTAACATGCTTCTCAGAATCGTCCATGCTAATGTGTATCTGGTTCTCTCAAAA
CACTGGCAGGCTGCGCTTTCTAAACTCAGGGACATGACTGGTAGTGGTGGCACACGCCTTTAATCCCGGCATTTGGGAG
GCAGAGGTAGGCGGATTTCTGAGTTCGAGGCCAGCCTGGTCTACAGAGTGAGTTCCAGGACAGCCAGGTCTACACAGAA
AAACCCTGTCTCAAAAAAACAAAACAAAACAACTAACAAACAAACAAAAAACAAAAACAAACAATGCAAACTCAGGGAC
AAAGAGTTTTCTGGAACAGCAATTAACCTCTTATGAAGCTGGTGTAACACAGAATAGTTTGAGAACTCCAGCTTTCCAT
GCAGAAGAATGCTTGATTTGAGGGAAGAACACTGCGAAAAGCCAGAGCTTCTGCTAACATAAACTGACTCTGGAAGAGG
TTTTATTTTTGCAGGAAGAAGGGAATCTCCAGAGTCCTGGGTGGAGATGGACTTCAAAGAAAAAGAACATTGAAGCAAC
AAGTCATGGGATAGGCTTGGAGTAAATACAACTTAGTGGGAGGGGTCTGAGAGCAAAGCTAGGTATCAAAGAGCACACA
CTAACTAGCACTAACTAACTAACTAACTAGCAAGGATCGCTCTAAGCACAAGAATGATGGCACCTTTGTTTTGTTTTCT
CCAGGACATAAATCTGTGTCTGAGGCCCACTCACCACAGTCTGCAGCAAATCCCATGACAGTCATTTCCTGGGTGTTCT
CTCCTTCTCTTAGACCATTCTGGAAACTAAGCTTGTCAAGTCAGTAACACTTGAGGGAGATGAGTTCTGGTCTTGGGGT
AGCCCCAGGTTGGTCACTAGGATAATAACCCTTGCTGAATTGTGGGCTTGAGCTTAGAATGCCATTGTGTCTCTAGTTA
GGAGTCCGAGATGATCCTCCTTGTGCTGTATCACTCACACACACACACACACACACACACACACACACACACACAGAGA
GAGAGAGAGAGAGAGAGAGAGAGAGAGAGAGAGCCTTGCAGCTCCTAGGGTATCTACGCAGTGTCAATAGATATCAAAG
CCCCTCATAGTATCTGTTATGCCCCCCTCAAAGCCTCAGTCTGCACGGTCTACACCTTCTTGCCTGGAAGGTTCAATCT
CACCGCACCCCAGCCTCACTACTACTCCCGGTACATCTAATTCACCCCCTTCAGCTTTTGAATGTAGAGGTTTGCAGAT
GTTCTTCTGGGGTCCAAGAGAGCCAACCCAACCTTGAGCATGCAAAGGCAGCATGAGCTAAAGAGTCTTATTTATTCTT
TATATAGGGTCTTACACAGCCATAGCCCAGGGGTGTCTCGAGCTTACTATGCAGTCAAATATAACCTTTAGTTTACAGT
CTTCCTGCCTCTACCTTCCAAATACTGGGACCATAGGCAATGTCTCCATGTCTCACAGGTCTGCTTTATGCTTTGTAAA
GGGTCAAACTGCATGCACACTAGGAAGGCACTCTACTGACTAAACCACATCCCCTGCTCAGTAACCCTCCATGGGGGAT
GATGTTTCTTCTTTCGTTGGCTAAAAAATATAGCAGATATCTCTCTGAAAGCACCAGTTTTTAAAAGGTAGAGTCTTTA
AAAAACAAAACAAAACTAACTTTTATTTATTCTTTGTGAGTCTCACTTCATGCACCCAAGTCCGGCTCATCTCCCCATC
CTTCCATATCCACCCTTGCAACCTCACAACTAAAGAACAGAATGAAAAAGAATCCATCTTGTTTTGGAAGCTGCAAGTG
TGTCATGCAGTCTAGCCTTTGGTTCACACACTTGCAAATGTTAATTGCATTGAGTCATTGGTCTGGTTCGAGGCCTCCG
GCTTCTGCTGCACTTTCAATACTGGGTCCTCACCTAGACTCCTCTCAGACATCCTGTTGTTGCCTTGGGTCATGGAGAT
CCTGCAGTTTTGGTTCTGCAGGACCGGCCCTTTCATACCCTCCAGCAGTTCACAGATGGGGTAGATGTTGGGGCAGGCC
AACTCGAAGGTCTGGATCTGGGCCTGGGTGGCGGCTGAGTTGGTCTGTGTTTTCTAAAAAATGTATTATATCACAAAAA
CCCAGGGAAGACTTTTATAGTGGCTATCATTATATTTTTATTATCATTATATTGCTTTGAAACAACCTAGTCTCCAAAA
TAAAAAGCAACAAAATTCCCCAAACCAAAAAACCCCAACCATCTGGGGGTGAAGAGCAGGACTCAACAAGAACAATAAC
AAACAAACAAACAAAGAGGCAGACAGACTCTGGATTACACGGAATGTAGTTCAGCATGTGACTTACTGACAGAGGTGAG
GTCCTGGGTTGCAACAAAGCCAACTGGATACTCACAGTTTGGGTCAGAAGGAGAGGTGCATATGTTGGTTAGGACAAAA
GTGATCTCATTAAAGGGGAATGTACCTGGTTTATCACAAGCTAGTATCAAACAGACAGGCGCATTCCTAGCACCATGGC
CCAGCTGTAAAACCGCAATGCTTCTCTAATGGTTGTGTCCTTTTACAGTTGTCTGGGAAACTATGTGGGAAACCCCAAC
CAGGTTATTCTGGGGCTGATCCTGTCTGCTACAACTCAAGATGGCTGCCATTATGTCAAGATGAATTCATTCAATAACG
AAGCCAGCAAAAAGAAATAGGCTTCAAGGGCGCCCTAGTTCCTGTGGGAAATCCTTCTGTTCACGTTTTGGAGGAAACC
GTGGAATGATTCTGACGTGAGTGACAGTGACAGGCCTGTGATCTCTGCTGTAGCTCAGGTGTCTGGAAAGTGTCACTGC
TGAGCACAGGAGCGACCATGTTGATAGCAATGGCAGAGGATAACGTAAATACGGCCGTCAAAGGAAGGCTGCCATGATG
CTTGAAGCACGCTGACTGACGTGATAGAACTATGGTGCCCAGTTGTTTGGTAAACACCAGTGTACCTAACGAACGCCAT
GAAAGTATATTTTAGATGTAATTAACTTTCAAATCTGTAGACTCTGAGATTGCCTTCCACAGGGTGGGTGGGCCCTGTC
TCATTAGTTGTAACCCTAACGGCAGAGACTGGTTTCCAGACAACAAAGAAATACGGGCTGAGTTTGTAGCCCACAGGTT
TCAGCCTCAAGGCTTGAATGTTAACTATTCCCTCAATGTTCTTCTTTTCTCTTTAAAATTAATTAATTTATTTATTATG
TACATTGGTGTTTTCCCTGCAGCCATGTCTGTGTGAGAGGCTTGGATCCCCTGGAACAAAAGTTTGAGGTAGCTCAAAA
GTCATGAGGTACCTTTGGCCACTGCAGGTTTCAGCCTTACCTGTCCCACTGTGAACTAATTCCTTAAAAATCCCTCTCT
GTCTCACTGTGTGTGTCTCTCTTCTGTCTTTCTCCATATGTGTGCATTTGTACTATTTTGAGCATGTCTGGATTCAATA
GGTGAAGAATTCAAGGGATTCTGGGATGAATGGGAACCTGGGTTTCGTTCCTGACACTGCAAAAACAAACAAGTTCATA
CATATATAAATAAAAATGAAAGAGAAATTAAAGGATCACATAGAAGCGGCGAGCAAAGAGGGGTGCATGCTTATTATCC
CCTCCCAAATCCCAAATCCCTTTCCTGACGTCAGGGACAACATAGGAATGAGAAGAGAGGTGGGGGGGGGGGCACGGGG
AGGGCAGGGAGGAAAACTTACAATAGAGGCAAAAAACAAAACAAAACAAAACACACACACACACACACAAACAAAAACA
ACAACGACAACAACAAAAACCAAGAAAGTGTTCAATCAGTGCCACAGAATTTCTGGGTTCTGAGAATCCTAAAACAAAC
TTGAGGAAGAATATTCACCTGGATTTGAAAGTCTAGAAAGTACCACAGGTCGGCAAGGAAGTTCTCTTTCGTTCTGGTC
TGAAATAATTTCCCCAGGCAGCCATTCTCTGTTTGTGTTGGTGGCAATGGCACGCTGTAAATGCTGTAAATGCAAGCCT
TCAAACTGTATTTTCTCCCCCTTCTTGCTCTACCTTCCCTTCCCTTCCCTTCCCTTCCCTTCCCTTCCCTTCCCTTCCC
TTCCCTTCCCTTCCCTTCCCTTCCCTTCCCTTCCCTTCCCTTCCCTTCCCTTCCCTTCCTTCCTTTCCTCCTCCTCTAC
CTTCCTTTTTTTTTTTTTTTTTCTCGAGACAGGGTTTCTCTGTGTAACCGTGGCTGTCCTGTAACTCCCTCTGTAGACC
AGGATGGCCTTGAACTCAGAAATCCGCCTGCCTCTGCCTCCCAGGTGCTGGGATTAAAGGCGTGTGCCACCACGCCCGG
CAGCATTTTTCAACTTGATACAAACAAGTCATTTGGGGAGAGAGAAACTCAACAAAGGAATCACCTCCATCAGATTGGC
CTATGAGCAACTCTGTGGGGGCTATTTCTTGATTAATGATTAAAGCAGGAGGGTCCAGCCCACTGCAGGCAGTGCTACC
CCTGGGCAAGTGGATTATCTACGAAAACAAGTTGAACAAGTCAGAGAGATGTTTCATGGTCTCTCCTTTAGTTTCTGTG
TCCAGGTTTCTGCTTGAGTTGCTATCCTGAGTCTCCTCAATGATGAACTATGCTTCTGTGAAAGGGTAAGATGAAATAA
ATATGTTGCTTTTGGTCATGGTGTTTCGCAGTAATAGAAAACAGAACAGGACAGTAGCTTTGCTAGTACACCTAAGGTG
CACACACTCCTGACTGAAGAACGTAGGAGAAGTGGAATAGCTGAACTACAGAGAAGACGCTCTCGTGAAATGGATCAAT
GACTGCCAAACCGTCTGCATAGGATACCAGTGATTTCCACTCAACCAATTATAAAAGTACCAATTTCCCCACACTGTGA
CGAGTACCATGTAGTCAAGCTGTTAGAGACTGGACCATCTAATCATTAGATTAGATTATGATGGGTTAAAGTATGGGCT
ATTGATCAGGGAAGGTTAAATTTGTATTTTTCTCTTGACTGTGATGAAGGAGGCTGGACAGACATTGATTGCTGCCCCA
AGGTTTGATTCCCAGCATCCACATGGTGGCTCACAGCCATCTGTAACTCCGGTTCCAGGGCATCTGACTTTTTCTTCTG
TCATCTGTGGGCCCTGCATGCAAATGGTGCACAGGCATACAGGCAGATAAAACTCACATACATATATTTAAAATATTTT
TAAATGCCTCTAAAATTAAGCATTTTAACACATTTTCAAATTGTTTTCATTTTTCTGTGAATTGTCTGTTTCAATAAAA
TATATTTTTATTGTTGTTGAATCATAGGTATTGTTGCATGTGTGTGTGTGTGTGTACATGTGTACACCAGTGTCTGTTT
ATGTCAGCTGGCAAAAGTTCCTCATAAAAGACAGTTCTTTGACGGTGGTGAGACTGCGAAGATTTCCTTCTGTCTGTCT
TCTGTTTTTTGCCATTGTTTATAGTGATTTTGTCATGCAGAAACATTTTATTTCTTATGAATGGATAACACACACGCAC
ACACAAAATGAGAAATCATGTAAAAGAAAGCAGATGGTATCAAATTAACAGCAAAACAAGATCAGAGAAAACCACATCG
TAAAACACACCCAGAGAAGGTCCCACTTTGGAGGTGGGAGTGACTCTGGGACAGCTCCAAGTTCTGGGTTAAGGGACTC
GGGGTGGGGGTGTGGGGGGAGTTGCTCCTGGGCAAACAGCAGCATATTGAATGTGGAGTGTCTGCTGGAGGAATCTTCA
TTCTGTTTGTTCCTCCTGTACTGAGCAGGCATTAGCAGCAGAGTTGTGCCCTGGGGACTGTGAGCTGGGACCAGAGAGG
TAGAATGATGTCCTAGCAGCAAGTAACCCCAGGACAGAGAGCATGTGGACAGCAGAGGGACCAGGTTCTCCCCAGAGCA
CACCGCTATCTCTAGAACCTGCACCTCCAAGACTAAGACACTCATAGGACACAAGTGGCTGGGGAGATAGTCCAGGAGT
TAGGGACACTCACTGCTCTTCAAGAGGACCTAGATTTGTATCCCTGCACCCACGTGGTACCCACAACTGTCTGTAATTT
CATTTCCAGGCTTTTCTGGCTCCATGGGCACCGGTCATAAAAATGATGCTCAGACTTACATGCAAGCAAAACACCTATA
CAGAGATTGCTTTTTTTTTAAAGTTTGCAGTACACAAGACCAGGGTGGCAGATAATCAATGGCTAGCAGATCATGGATG
AAACCAACATCCTGAATGAGAGTAGATACTGTTTTTTTTTTTTTTTTCCCTCACAGTCCACCAGTGAGAACTTAGGTAA
ATTGCAAGGGAGGCTGGGAAATCAGCCTAGCCAAAACCTTTATGAGTGTTATCAAAGGGGAGAATGGATTCAGGGGACA
ACTCGCGCCTGTCAGGAACACAAATGTCGCTTCCCTTTGGCTCTAATCATATCCCCAACCCAGGGTCCAGGTGGTCACC
CACTTACATCTTTTTAAGATACTTGAAATAGATCATAAATATGGACACCTCCTACTGTCAGACCTCCAGGTTTTCAATC
TTTTGGCAGACAGCGCTGCAAAAGTTATCTATAATATAATCTCTTACACAAATATACAGATATATGCATAAGGTCAATT
CCTTGGTGCTGAATGTACTGGGTCAGAAGGCACACACCTTTACAGCTATGATGCCATTGTCAAACTGCCCTCTGGAGAA
TTTGCATCAGCAGAAACCTCAAGCAACAATGTCTTAAAGTCTCAGTTTCTCCACATTTGTGCCAAAAGAATGTATTTTT
TTAAAAAAAGAAAAACCTTTTGACTTTTGGTGTACTGGTGAGAAATGAGTCCTCACTGCAGTTTTAATATGATTTCTAA
CCCAGCCAAGATTCCTAGTTCTTTTTTAGTATCAGAAATAGGCATCTCCAGGCTTTAGCCCAAGGCACGGAGTAGGACA
GATCCTCTTCCCTTGTTTTTCTCTGCCCCCTTTTCTAAAAACAAGGAGGGGAGGGGAGGGCTGGAGAGAGGCCCAGCAG
TTAAGAGAACTTAGTGTTTTGGCACAGAATCTGAGTTCAATTCCCAGCACCCACATGGCTACCTTACAACTGTTGATAG
CTCCAGTTCCAGGGGATCTGCTGCTCTCTTCTGACCTCAGGCACCAGACACTCACATGGTGCCCAGACATACATGTGAA
GAAAATGCTCATTCACAGATGATAAAAGAAATCTAGAAGCTGGGCGTGGTGGCATATGCCTTTAATCCCAGCACTTGGG
AGGCAGAGGCAGGTGGATTTCTGAGTTCGAGGCCAGCCTGGTCTACAAAGTGAGTTCCAGAACAGCCAGGGCTACACAG
AGAAACCCTGTCTCAAAAAACCCCAAAAAAACCCCAAAAAACAAAAAAGCAAAACAAACAAACAAAAAAAACCATTAAA
AAAAAAGAAAGAAAAGAAAGAAAGGAAAAAGAAATCTAAAAATAAAATTGAAAATAATGACTATGCATGCGCATGCATG
TATTTGTGTACCCAAGTGTGTATGTGTATGTGTGTACACGCACACATGCACACATGTAGAGACAGGGCTGACGTTTGGC
GTCATCCTCAACTGTCCAGCTGCTTATCTTTTTGGAACAGGTTCTCTCACTGAACCTATGTTTGCTGACTTGGCTGGGG
TGGTTGGCCCGCAAGCCCCAGAGATCCTCCTGTCTCTAATCTCCTAGCTCGGGAGTTAGAAGCCTGTCCCACCACACCT
GGCTTTTTATGTGGCTTCTGGAGGCTCAAACCCAAGTCCTCAGGCTTGTGTGGCAAAGGGGCTCCCTTTGCCAAAGGAG
CGGAGTCCTCAGTTACTTACTTTGATCAAAGTTGTAGCATTTTTGTACGTTTTTAAAAAATATATATACTCTGGGCCGA
CTTTAATAACTTTGGTGTGTGTGTGTATGTGTGTGTAATGTTTTAAGAGATAAAAATCACCTAGATACTGTGGCTGTTA
TAATCACCTACCTCTTTTAGTTTCTGCTATTGTGTAACTCACGAAACTGGTCAACTGTTTAAAGTACCATGAAAAATGT
AACCCATTAAAATGAAATCCTAAACAATCTGGAAGTCCAAGCAAGACCATCACTCCCTAGGAGAAACACACATGAGCTA
TCTTATGTGGCTTTCAAGAGTGGGGAAAAGAAAGAAAGAAAGAAAGAAAAGAAACAAGTTGGGGCTGGAGAGATGGCTC
AGCACACCTGCTGTTCTTCCAGAGTTCAATTCCCAGCAACAATTTGGTGACTCACAACCATTTACAAAGCAATCTGATG
GCCACTTCTGGCATGCAGGTGTACATGCAGGTAGAGCACTCATACATAAAACTATAAATCTTTTTTTAAAAAGAAGTGA
GGGCTGGAGTGATGGCTCAGTAGTTAAGAGCACTGACTCCTCTTCCAGAGGTCCTGAGTTCAAATCCCAGCAATCATAT
GGTGGCTCACAACCATCTGTAATGAGATCTGATGCCCTCTTCTGGTGTGTCCGACAACAGCTACAGTGTACTTACATAT
AATAATAAATAAATCTTTTTTTTTAAAAAAAGAAGTGAACTAAATTTCAACAGTATAATTTAGCACAGAATATTTAAAA
TTGTATCACTGACATGTAACCAATATAATATAGATTAATGACACTTGCACATTCTTCAAAATCTGGCATCTACTTCACT
GCTAGCCTATTTCAGTTCCTACCAGCCATATGTCAAACACTCAGTCACCGTGCGTGCATGGCTAAAATGTCTGGTGCCA
GGGGTGGAGTTCCGGAGAGCTCTATATGGAGGTGGAAGCAGGTGAAAGTTCTTATTTTACTTAAAATTCTGCAGAGCTA
CTGAGTGGAATATGCAATATGTGATGTATAATACATGGTATTTTCGACAAACGGCTCCCCATATGGAAAAAATAAAATC
GTGTCATGTGCTGTGCATAAACACACGTTCCAGATGGACAAAGAAACGATTTTTTAAAGGAGAAAAGCACAAAAGCATT
AAAAATATAAGCGTTATTAATTGGAAGTTCATTCCGAAGCACAGACACAAGATACAGAAACCATAACGGAAAGGATCGT
CGGTTATGGAAGAGAAAAATCCAAATTTTAAGCAAAATAGTAAGCAAAGTTAAAGGACAATGGGTAAAGGAGAAGGAAT
ACAAATGAGATAGAAGACAATCAGCCAACCAAAACCCATGCAAAAGTTGCAAATATTTTATTATAATCGGTATTTTATT
TATTTCAGTGTGTGTGTGTTGGGGGGAAAGGGCGGGGGCGCATGCGCACACATGTGTGGAGCACTCGGTCATCTTTTCA
CCTGTACATCAGCCCCAGGGACAGTCTGTTCCAGGGACCGAATCCTAACCATCAGGCTTTCAAGGCGAGCATTTTACCC
TCTGAGCATCTCACAGCCCACCCTGAAACCTAACACTTTAAAATGTAAATTAAAGTGCATAGAAAATTCTCTCTCTATA
TATTGGCTCTATGAAGGACGCACATGTACAGAATGCTCAAGCTCACCAGTTATGGAAGGCAATAAAGATCAAACAATAA
TAAACCAATTTCCTTTTTCCAGTGGCTGTGATAAAACAACAACCAAACCAAACAACACCGACAAAAGACAGCAGCAGCA
ACTACAACAACAAAACACAAAATAACTTGGGAGGAGGAAGGGTTGATTTGGCTTACAGCTTACAGTCCGCCACTGAGGG
GAATCCAAGGCAGGAACTTGAGGCAGGAACTTAAGGCAGGAATGGAAAGAGACACCATGGAGGAATGTTATTTAGTGGT
TTGCTCAGTTTGCTTTCTTATAAACCCAGGAAACCACCCACAATGGGTGAGGCCGAGTCTCATCGATCATCAATCAAGA
AAAATGCCCTGTGGACGTGACCAAAGGCCAGTCTGATGGAGGCAATTCCTCAGTTGGTGACTCTAACTGGTATCAGGTT
GACAATAACTAACCAGTACAATTTACCTATTAAGCTTTCTGGTAAAAAAAAAAAAAGGCACTTTGGTAAAATCTTTTGA
AGGGCAACTGAACACAATATATATATTGAGTTTGAGGTCAGCTTGGGGGTAGTGGCCCTGTCCTCCCCCTAAAAAAAAA
AACCCAAAAACCCACAATTTATGTGAATCATGATTTTATATATGAAGTGGAAAAAAATTAAGCCCAGCTGTGGATCTAA
TATATATGGATGTGTAAATCCTACACAAAAGACTATGGGAATAAGCACTGAGTTGGATGTTTAGGAAGAACAATCAAGG
TGTACGTGAAGAGGAAAGTTCATCTTCTGTGCTATGGACTTCTCTAATGCTTGATCTGTTTATAGTGGGACTGGGTTGG
CTTACGTGAGGAAAGAGATGGTTTACAGAGTGGCCTTCTTAGGTAATCCAGCAGAGGACCCTAGTGGGAATATAAATCA
GTCAGGGGTAGGGGTGGGGCGCCCCTGGCTCTGTGAACTCTGGGCTGCCAGAATATCTTTGTGGGTGCCAACCAGTGGA
GATGCTGAGGCTATGCCAGCGCCATGCATGAGACACCTGTTACTTCATCTCACAACCTGTGACCAGCCTGCTGTGTTTC
CATGCATCCATCCTGTGGTATTTCAAGCCTAAAGCTGGCCTGTGTCTAGAACAGTGAACACCAAGTGTTATGTCCTGAC
TTTTCTTAACTATGTCTTCAGCCACAGTGACAGGAAAAACCAAGGAGGTTGGCGGTAGGTGGGCAGAGTGTGGTCATGG
CCGTGGCCTCCATTTTCCCTGGGGACAAAGAAACCTCAGGCAGACGTCAGAACTTCCCAGCATCTAGATGTTGAGGCTT
ACTGGGAAATGTCAGAGACTGCCACCCACACCTTGGCAGGGGAGAGAAGAGTCTTAGAGAACTCTGTCTGACATAGGAA
GAGTCTGGAGTCTGAGAGTTCAATAAGAGTGTTGCAATTTTCTTCTTATTCAGAGATCAATATGTGAATATAGATGTGA
AGGAGGTGGGAAAAGAAGCAATAAAGATGTTGGCAGAACAAACATTCCTGAGGAAGGATTGCGCCTAAGACTGGAAGAG
AGAGAAAGCCATAATTGAAGCCATGGTAGCTGAAGGTAGGAGATACAGTCAGAAGGCAAGGGAGAGGTAGGGCTTGAGA
CCCGCCTTCTCTCCTTGCAAGAACTTTGCTTTTATTCTAGATGAGCCAGAGAGATATTGGCAGTCAGAAGGCCAGTGAA
TAATGCATCCGGCTGGTGTTTTACAGGATGGCTTTGGCTGTTGGGAACAGACTGAGTGAGCGAGACAGTAGCAGGCAGG
TGCCCTGGGGGTGGTAGGGGTGTGGGGGTGTGGATACGGGCGTGGGGAGGCACCCGTAACAGATCAAAGGAGAGGCAGG
AGTTGAGCCTTTCTTAGCTGAGGGGCCAATACCAGAATCACCTTTAGGGTTCACGGAAACACAGGTTGGCCCCCCAATT
CCAGCTGTTCCTCTCCTTATCTCCTTAGTCGGGTTTGAGCCTAGGACTTTGCATTTCTATAATTCCCCGGTGAAGCAGC
TGGTTTGGGAGTCACACGCAGAGACCCTTAAGTTTTCCCCCATAGCACGGATGAAAGCTCACATCCTTGTAAGTACTGA
AGGAAGCTCTTTGGCATTCCTGCACCCTAGTGTGCTTCATACAGCAAAAATTCATGTTGGGTACAGGCTCTGGGTTATG
CAGGGGGGGTTAGTGAAGGGACTTTTGGAGGATACCTCATTTGAACTGTTTGGTGATGAAACTACACAGAAGTGGCCAT
TAGAAGGAAGGGTTCATTATGTCAACAGTAATCATAACAATTGTAGCAGTCACCCAGTGTCCGCCCAGGTGTTTTATTT
ATAGCTTCTCCAATTAAATCCTTGTAAAAGCCCTGCAAGTCAGGCCTTACCGCTGGTGCTTAACCGAGGCTAGGAGAGT
TTAATTTTCCCAAGGCCACACCATTGATAAATACCAGTGCTTAGTCCCGCTTGACTGACACCTTTGGGATATATTGTAT
CATAGTATCTCAAGATGTCACTGGCTAAAGATATGGAAGTAAACCAGCCTCTAGAAGACTCAGCTTCCATTCTTGGAGA
TTATTAGCTTGCTGCAAAAAATGTAGACAGCAAACCTTTGCTTTCAAGACGGCTCCGCCCCCACCCCCTTTGTTTTCTT
GAGTAGAGAGCCCTGTTCACAGCATAGGTTCCTAGAGTCCTTCCTGGCAGGGCCCTGGTTCCCTACGAGGTAGCTGTGG
CCACAGGTGACTTGTGTTTTTCATCATTCACTGATGGCATGCTTTTGTTCAGTTCATGCCCACTTCCTGGTCTCTTCCT
GCAGGGCACTGTATTCTGTGCTGGGGAACTGAAGCTTGACAAATTGAGGCCAGCTTGTCTCCAAATGGAATCCATCCCT
CTCACTACAGGAGAGAGGGGGGAAAAATATCAAGATCCAACTATCCTCCTCTTCGGTCTCTCTCCCTGCCCTGGCAGGG
GATACAGGTAATATCTCTCAGGGCCTGCGTGTGGATGGGCAACTGGGAGCTTGAAGCTAGGCCGGGCAGAAAGCAGCTG
CTCTCCACAGGCAAGGAGGGAGGCATAAGGTCAGTGAACGGGTCACAGGGATGGGATGACCCTGTTCTGGAGGAAGTGA
GAAGGGATGCTTGGGAGCCAGCCTGAGTGATGGCTTGTGGAGTAAGCTTGACTGGGGCTTCCCCAAATTCTTCATCAGA
GTCTCTGGGATGTATCAGAGATCCTTAACCGGTTTAGGGAGACAAGGGCTTCCTAGAGCAAGGGATGAAATGTAAAAAC
CACTCTCCAGTATGTGAAAGCACCCATGCACACAGACAGCCATGTACAGCCATAAGCACACACTCACATACATTCCATG
TTTTGGAGGGGGGGGCTGGCATGGACCACAGGTTAAAAGCCCAGATACAGGTTGATTTACAGTAAAGGAGAACTAGGAT
AATAAAAGTTCGTCACATGTAAAAATAAGCTTGCTGGGCATGGGTGGCACAGGCCTTTAATCCTGGCACTTGGGAAGCA
GAGGCAGGCAGATCTCTGTGAGTTCAAGGCCAGCTTGGTCTACATAGCAAGTTCCATGCGGGCCAGGGCTACATAGTGA
GACCCTGTCTCAAAACAAACAAACAAACAAACAAACTGTAAACCAAAATACAAAATAAAAAGTTTACTAAGGTTTTATG
AGTTTTTTTTGTTTTTGTTTTTGCTTTCTGGAAAGTGTGTGGCATGTGAATTTTAGGGAACAGACATGCTAACTAGAGG
CTGACCTCTGATGGTGGGATAAGGGAAGATTTCTACGTACCCGTCCCTTCTCACTAAATAAAACAGCATTCTTTTCTTT
TGAGACAGCATCCAAGACTCAGGGCGCACCTGGGGAAGAATAAAGAGACCAACCGACTCTAGGCCTCAACGACTTGGGC
TGGGGACTGGCTATATTAGCCTAGAGCCCTTCGCCTGGCCAGGGCACTTCATTATTGTTTTTGATTAGTTTGTGTCTCT
TTAACTCATTTCCTTTATTCCTCGCGCGTTTCAGCCTGGCAAACAACGTAATGTTATTTATACCAACCCCTACGCGCGG
CCCCCACCCCGACCTCAGGTCTGAGACGCTCTCCCGTGCACGCGCGCCCCAGAACCAGGCGCTCTCGGTCGGGCGGCAC
ATGCGTGCGCGCCCTCGCGCACGGCGGGCACGCGCACGCGCGCGTCTCCGCCCGCAGCTCGCCCCCCCACCCCCTCCCG
TTCCCGGGCGGCGGGTCTGAAGCGGCGGCGCGATGAGCTGGCCGGCCGCCCCCGGCTCGGGGCTGTGAGGCGCTCGGGG
CCGGGGTGCGCGGCGGCGCGGCGGGCGGCGGACGCTCCTGCTCGGCGGCGGCCATGCGCGCGGGCCGGGGCGGCGTCCC
GGGGAGCGGCGGCCTGAGGGCCCCGCCGCCGCCGCTGCTGCTGCTGCTGCTGGCGATGCTGCCCGCCGCCGCCCCGCGG
TCCCCGGCCCTGGCCGCCGCTCCTGCGGGACCCAGCGTGAGCCTCTACCTGAGCGAGGACGAGGTGCGCCGGCTGCTTG
GTGAGTGGCGCGGCTCCCGGGGCCTCGTGAGCCCGCGGTGCTGCCGCTGCGCCGCCCGCGCTCTCTCTCTCTCTCTCCC
TCTCTGCAGCCTCCCTGCGCGTGTCACTCTAGGCCGCGGAGCTCCGGAGCCTCGGAGTCGGCGCTCGGGACACGGGTGG
CCGCTCCTTAGCCTGCTGTGGGTGGCCCACAGGCCACGCCGCCGCCGTGCGCTTGCTTTCTGGTTAGCGAGTGGGGGGC
AAGGTGAGCCGGGCGCCCTGAGTTGTGTGGCATCCTGCACACCTTCGGGCCGACCGGATCCCAAGCATCGGGGTTTGCC
TTGGGTTCCTTGAGTGTGACCTGATGCTGCCGTTCCAGGCCACTTGCCTACTCTGCAGACCCTGAAGCGAGAGGAGAAC
TTGGCTTTGGGGTCCGTCGGCGGTGGTTCCGTTTACCTGTTTAGCCCGTTGTTTGGGGAGTCCGACTCTGCCCTCCGCT
TGGAACTCTGTGCATTCTGAAAATCAGCCCTTGAAGGAAGGCCTGGCCAGCCATCAAAAGGAAGTCTCTGATAGTTAGG
GATACCCAGCTTTTGCCGTCTTTTGTGCATTAAGGCAGTCCCTTCACTTTTTATCGGGGTGTTTTAGAGTGAAGTGTTG
GAACTGGAAAGGTCTCCCCCTAAATATCCATTAAGTGTCACTTTTTTAGTGAGCGAGTATGCCTCCCCCAAGTGTGTGT
GTGTGTGTGTGTGGTGTGCGCGCGCGTGTGTATGCGTATGTGTGTATTAGAGGAGGTTTTTTTGTTTGTTTGTTTGTTT
GTTTGTTTTGTTTTGTTTTTCCTTTCCAGACAGGGACTTTATGTAGCCTGGGCTGTTTTGGAATCCACTATGTAGACCA
GGTTGGCCTCAAGCTCACAGAGAGCCTTCTGCCTGTTAGAAGAGTTTCTTAGGGTCTGTTGAGAGAGTTTAGCCTCGGA
ATGAAAACTGCTTTTAGCAGACTGTTTAGACATAGTTGTATGTGTAGGTTTATCGGCTTTAACTAAAGAACTGTGTTTT
CCTAACATCCTAATTTAACCTTCCTTATAGTCTAGTTGAATTAGCTGAATTTAGTCTAGCAGAATTGAAATGGCATCTG
AGTTACGCCTGGAGCATGGGAGAAAGGCTTGGGAAAAAATAACGATTTGTAGTGCGGCTCCTAGGCGTGCTTTTGTAAG
GGTTGTTTTTGTTGTTGTTAAAAGAACTTACGTAATTGTGACTTTATTGACATGTATTTCCTCTCCTGCCTTAGCCAGG
ATGGAAGTAGGGAGACAGAGATATCTGGCAGCAGACAGAGACGAGTACATGTGCCTACCGTTGCGTGTTAGAGTTTTGC
TGTTACTTTTATTTATTTTGGTGTGTGTGTACCACGATGTGTTCTGTGGAGGTCACAGGACACCTTGAAGGTGTGGGCT
GTCTTTCCACTATTAATAGGGGGTCCCAGGGCTCAAACTCATGTCATCTGACTGGACGACAAGTGCTTTTACCTGCTGA
GCCATCTAGCTGGGGCTTGATATGGACTTAAACATGTTGTTTCAGTTTCTTGTTACCCAGTGGGGCAATTATGGGAGAT
GAGAAAAGTAAGGCTTTCAGTAACTTGCTGAAGGTAACATGGTTTATTTCATATATTACATATATAATATATACCCACA
CAAGACAGTGTTTCCTGGCTGCAGACTAAGTTATTGAAGGGCATGTGCATTTAGAAGTTTGATTATGGCATGTTAAAAA
AGAGACTGTTGTTCATTAGTACGTGAAGTGATACCTTTGTAGCCTGGAACTGATTTTCTTAGGACAGTAGCTGAGGGGG
CACCTGATGGATGAGCACCTGGTCCAGTAGTGTGTGAAATAGAGTGGGGAGCATGGCTCATTAATGCTCCCATCCACCC
TTAGGTATTTCAGTTCCATGCAAGCTGAGTTGTCCTGTTACAATGTGGTCTCTAGATAGTCCTCTTGCAGAACCAGGGC
CTCTTTCTGTCCCTTTACGTTTCCCTCAGCTGTGCTGCTGTTGAAGGATTCCCATCTGGCTTTGTCTGGGTGGCAAAGT
GCAAGTACTGGGACGTTTGCTGGGCCTCCTGAGTGTGGCTGTGATGGTGTGTACGTGCGAGACTGTTGGAGATAGTGCT
TTCCACCACGTTTTCCTTTGCGTAAAGGGTTAAGTGACTTCCAAAAGCTCAGGCAAGCTAGTGTCAGTTTTACAGTGTT
GCTGAGACCCAGGGTTCAGAATGCCAGGTGAGAACTTGGAAGTTGGAAGTGACAACTCTGTGGAGCTGGCTGTACTTGA
TAGGAGAAGTGCTTTTAATCCAGACATTAGCTGCACATAATAGAAATCAATTGGATAATAGCAAAAAGGCCTTGAACCA
GAAGCCATCAGCACCCTGCCTTTGGGCTTTTTGCCCTCCAGGTCCCACTGCCCCAGTGGGCGTAGTTCACACAACTGTG
GTGGAGTTTGTCTTTCCCTTGTTGTCTTTGGAATTTCTAGACTAGTGTGGACTGAACATTTGTCTTCTGGGGTCCTCCT
TGTTCATCAGACTCCCCAGGGCAGGTGGGTTTTTTTTTTTTTTAATTTTAAAAAACATCCCAATCACAAAGGAACTCAC
ACAATATCTACTCACTGATAAGTGGATATTAGCCCAGAAACTTAGGATACCCAAGATATAAGATACAATTTGCTAAACA
CATGAAACTCAAGAAGAACGAAGACCAAAGTGTGGACACTTTGCCCCTTCTTAGAATTGGGAACAAAACACCCATGGAA
GGAGTTACAGAGACAAAATTTGGAGCTGTGACGAAAGGATGAACCATCTAGTGATTGCCATATCCAGGGATCCATCCCA
TAATCAGCTTCCAAACGCTGACACCATTGCATACACTAGCAAGATTTTGCTGAAAGGACCCAGTTGTCTCTTGTGAGAC
TATGCCGGGGCCTAGCAAACACAGAAGTGGATGCTCACAGTCAGCTATTGGATGGATCACAGGGCCCCCAATGGAGGAG
CTAGAGAAAGTACCCAAGGAGCTAAAGGGAACTGCAACCCTATAGGTGGAACAACATTATGAACTAACCAGTACCCCGG
AGCTCTTGTCTCTAGCTGCGTACGTATCAAAAGATGGCCTAGTCGGCCATCACTGGAAAGAGAGGCCCATTGGACTTGC
AAACTTTATATGCCCCAGTACAGGGGAACGCCAGGGCCAAAAAGGGGGAGTGGGTGGGTAGGGGAGTGGGGGTGGGTGG
GTATGGGGGACTTTTGGGATGGCATTGGAAATGTAAATGAGGAAAATACCTAATTAAAAAAAAACATTTATTTTTATTT
CATGGGCATTGGAGTTTTGCCTGTATGAGGGTATAGCATCCCCTGGAACTCGAGGTACAGACAGTTGCGAGTTGCCATG
TGGGTTCTGGGTATTGAACGTGGGTCCTCTGGAAGAGCTGCCAGCACTCTTAGCCACAGAGCCATCTTTAATCCTCCAG
TGCATGTTTAAACCAGCAGTCAGTTGCCACAGTGGTCTGGTCTGTGCCCTCAGATGGTCAGTATCGATGCTATAGCGTA
CAAATACATTGCCCTTTTCTGAGTTCGATATGAACTGGTAGACACCCCCTCCCACACTCACCCCCTTTGTTCGGGTTTT
CCCTTTGGATCTTAAACTTTTTTTTGATTAGCTTGCTTTGTGTCTGTACATATATTCTCTCGGGTACCCCAAGAAGCAC
GCTGAGTGCCTTTTGATCCCCAGTCCCCTTCAGGCAGCACTTTAAGACATCTGTTAGTTCCATTGGATTCTTCTCAGTG
GTACCTTCCTTGATTTAGTGTCATCCATCCCTTGCTTCAGGCTGGTCAGTAGCACTTTATACCTCTCTGTCCTCTCTTG
GTCTCCTGTCCTCCTTTTTCTTTGCTGGTTGTGTGTATCCTCAGGGGAACCCTAAGGATGGGGTTCATGGGGAAGAGAT
ATTATTTGAGGTCCTTTATGTCTGAAAATTTTCATTTTACCCTCACACTTTGTTGATGGTCTGGATGACTTTAGAATAT
TAGGTGGAACATAATTTTTGTTCACAATTTGGAGGGTTATTTTCTCTTGTAAGGATTTCAGATAAAGAGCCCAAAGCCA
TGTCTTTCTAGCTCCTTCCCCCACCCCCTTCACAGTTTTTAGAATTCCGGAGTGGTTTACTCTGGAATTACTCTGGTAT
TCTGAAGTTTGTTAATTGGGTTGCAAAGCCTTCAGTTTTGGGGAGTGTTTGTTTGCTTTTTAAATAATATCCTATGCCT
TATTTCTTCCTATGTGGGTTTTTTTTTTTCTTTCTTTCCTGAGATGGCTGTCGTGTGTCTGTTGATTCTCCTTAAGTTG
AACTTCATGCTTCTTGTCTTACCTTTATTGCTTTGTATTGAAACCAGTGGACAGAGAGTTCTCCTCAATTTTGTCTTAC
CAGCTTTCATTTTAAAAATGTTACTGATGTTTGTAAGTTTTAGAATCTCTTTTTTTTTCTGTATTTGATTGCATCTTGT
GAATGTTTTATCTTAACTTTTTTATTATTGTTGTTGTTGTTGTTGCCAGAATTAAACAGAATTCTTCTGCTTGTGGTTC
TGGCTGTCTGATCCTTGGCTTTGTGTAGTGAGATGCTAATATTGTTAGGAGGGAGAGGATATGCTCGTGTGCTGACCAT
CCTTGCTGTCAGCCAGAGTGCAGGTGGGCATTTCGCTGGAAGCCTGTCCCGAACACCAGTACAGAATTTTGTATCTAAT
TAGGGCTCTCTGCTCAGTGTCTGTAAAGAAGCCCCAGGAAACTTCCTGCCTCTGGAATGCCGGGTGATAAATCAGCTGC
CAGGCCTTGGGTTACCTGGTTGGGGAGGAATGGAAGTTTTCACCCTCAGGCTGTAGACTTTGACTTCTGGTTATAATTC
CCTGCCCTTATGACTCAATTTCCCTAGACCTGGGGTCTCCTACTGAACCTGGGGACCTGCTGCTGTGGATATTTGCACA
GTGGCTCCCTCCCTGTGCAGCCTGAGCTTCAGGGTGACCTTTGGTACCTCCCAGGTACCTCTAGGGCTGAGCCTCTTAA
GGGGCTTCTGATCGCTCCTCTACCTGCTTTCCATCATGCAGAAGTCTGATAAAGTAGATGAGTTTTTTCTTCCTTCTTG
GCTTGATAATTCAGTTCCCCTACCATCCAAAGGCTTTGGTCATTCTGAGCTGTGTCATTTGGTAGTTGTTTTGTAAGGG
CAGTGGTGGTCAGTAGTGGTGGACAGAGTGCTCATGATGTGTGGCAGAAGTTTCCCCGTGTCAGATACATAGTCCTCGA
AGGCGGGTGCTGACACTTCCACCCTGTACCCAAGCAGGCTGAAACAAGATTCCATCAACTGAGGCCCTTAGAAGCAACA
GAAATGTCTTTTTCACAGTTCTGGATGCTGGGAAAGCCAAAATCAAAGTGCTGATGGCTTGGTTTCTGGTCAGGGCCTG
TTTTCTGGTTCCTAGATGTATCCGTTCTCACACAGTGGGAGGGTGAAATGAGCTCTGTGGTCTTCATTATCAGGGCACT
GATCCTCCTTGTGTCTTTAAGACCTAATCCTCTCCCAAAACCCTGTTGTTTATCTATCTGCCCGCCATGGCGGTTAGAA
TTGTAACATGGGTTCTGGGGGAATACAGAGGTTTTTACCTTAGCACTGAGGAAGCAGACTTGGAGGGGGTCCTTGGTGT
GTGCCTGCTGCATGCAGTCGTCCTGTGGAAGTCCGCCTATGTTCTGAACCGTGTCTGTGTGGTTTCCCGTGTCACCAGG
CCCTGCTTCACTGCTCTCATTACTGTCCTTAGCAGACTACAGTACTGGCTACTGTGTCCATATGTGAAGGGTGGGATCT
TGATTCAGCGTGTTGTGGACATCGAGTAGAAGGCCAGGCCTTGACTCAGTTGTGCCTGAAAACTGGATCCCTGCTGTTT
CCAGCAGCCCTGGAGCCGCTGCAGTTAAGCCAGAACTCAAACAGTGCTGGTTTGTGGACCTGGTTACTGTCAGTGTCCT
CCTAGGTTCACTAACGTAGCCCTGTGCGCTGCAACTGCTGGAGCAGTGCCAGAGGTTTGGGAATAAGATGCCGGTGGCT
GGGAAGGCGTGGTGACAGTGATGGCCGTGATAGGGAGCTGTGGTCCATGGCGGTGAAGACAGCTTCGGAGAGAAGGAAG
CAGTTAAGCATTTCCTCTGGCTAGCTTGCTTCTCCTTTCAAACTAAATTGCTTCTGGGAAAGCCATGCTTGCTCACTCA
CAGCTTATTTAAAGACAGTTCACACTTGTTTAGGCACTTGCTTCTCAGAGCAGTGTAGGGAAGGAAAATTGAAGGATTA
TATATATGGAGATAATGACAAAAAGTGATTAGATTCCTTTCCTTAATGAAGTGTGTGTGTGTGTGCATGTGTGTATGAT
TGTCCCATGTAGGACTGTAGCTCTGGGATAAGATTATTGGAGGAGTGGTCACTTGATTGTGATTGATGGGGTGATAGGC
AGGGTTATTTTTCATTTTTCACTATGGTTGTTGGGAGGGTGTTTTTGTTTGTTTTTTGTTTTTGTTTTTATTTGTAGGA
ATGGTTACTTTTGAGAGAGGAAAGAGAGTCTTGGAGAGTTTGGGAAGGGATCCCAGGAAAGGAAACATTTACACCTCAT
CTCCAGGTTGAGCTAGACAGGCAGACAGAAGAGAGAAGCACTTAGGGCCAGGCAGAGAACATGGCATGGAGTGTGGGGG
CAGACACTGCAGAACTCTGACATGGCTGGGATGAGAGCCATGAGCCAAGGAGAGGAGACAGAGAAGACAGCTGGGAGAT
CAGCGGATTGGAGCTGTTCCCCTGGGAATGGAAAGCCACTGGAGTAGTTAGGCAGCACTCCAGAGGTGGAGGCAGGGGG
GATCAGGACTTCCTGGCTAGCTTTGTATATGTGAGACTCTGATTTACTCCCCTCCCCCAAACAAAATAACAACAAAACC
CAGCCATCAAAATACAGTACCCCACAACAAATAAAGCAGAGATAGGAAAGGAGTATGCAGTCGTAGTGGGTTGTAGAAA
AGATAGTGTGTGGCTCCTTGTCTATAGTTAAGACACCTGTCGGGGAACATGGGTTGGGGAGCAGGTGAAGAGGTGGGGT
GGATTTATCAGGAATGAGCAATGAGTTGGGAGGTTTACCCCTCTGAGACCTCAGGGCTAAGGAGAAGCTATTCTCTAGA
GTCCACTTTTTTAGATTTGGATGTCTGAGCCAAAGGACCCTGTCTCAGTTGAGATGAGCCAAGTGTTCTCCCCAGCTAA
GCTCCTCTCGTTCCTGCAGAGTCTCAGGCCAAACGCTTGGCTGGACAGGGGTGGTGTCCTCCCTGCTGGTGGCACTGGT
ATAACCTGCTAGGGGTGGCTTTGGCAGGAGTGGGTTAGCATCCTGAAGTGAACCCTTAACCCTAGGCGTTGGGTTGGGG
TTGGTGGTATTGGCACAGCTGAATCCGAGCCCATGTGTTCTTAATTGGGAGGCCGGGGCTGAGACATTGTGCAATTGTG
GGTTTGAGTTTCTTTCTCCCTGCACATATGGGGGAAAATTCTGTCCAATTATGGCTATACTTGTCCCATGTGAGTCACA
GCCTGAGTTAATGAGCGAGTTCTGAAGGTGCTGCCTCAGTGCTGCTCGGGTTTTAAGTCCACTCCAAGCGTAAGTGTGT
GTGTGTGGGGGGGGGGCACGTTTCTCAAACACTCAGAACTGAGAACCTCCCCAGCTTTGCTTTGGGGTTTTGATGCTGT
ACATCAACTGTCCTTTTAGATCTTGCCAGCCTGAGAGATAAGAAAAACCTGCCCTTGAGACCAAACTATTAAGTTACTC
TTAAACTACAGCAAAAGTACCGTGCTTTCTGTGTGTGTCATCCTTGTGGATGTATGTGTGTTCTAATCTGGATGTTACT
AAGCAACATTCCATTGTGTAGGGCCTCCTAAAACGTTATGTGCTAAAACTAATGTGTGTGTGTGTGGGGGGGGGGCTGA
GATGTAAACGCTTACTGAAGGGTCTGTTTTGCTGTCCCCAGCAATGACAATGCCGAGTGACTGTCATCCTTACATTTTA
AGTTGTAATAGAATGTGTATAGTTCTTAACTTGGGAGATGCCCATAATCTAGAGAGAACTAACACATCTTATGCACACC
AGCTATTTCACACATGTTTGTCAGCAGCATCTGGCACATTGTTTACTTTTTAAATAGATAAAACCAAGATTCTGGAAAA
ATACACAATTTGCTGGAGGTCTCAGATGCATGCAGTTACGAAGCTCTGAAGTGCACGCTTTCTACTCTGTTTCTGGGAA
GGGTAATAGTCTACCCGGCTCCCATTGAACTCACCCGGGGAGCTGCAACAACATCCAGAGTCCTGGCTATACCCTTACC
AAGTGGTGTAGTGATCTGAACTTCTGATCCTCCTGCCTTCCCCTCCCAAGCTCTGGAATTCCAAGTGTTTACAACTCCT
GCTTCACGTGGTGCTGGAGATCAAACCAGGGTTCCGTGAATGCCGTACCCCAGAGCCAGGTCCTCAGCCCTTGTAGTTG
ATCTGAAGTGATGAGTCAGCCCTTTGACTTCTGAATGCGTCACTGACTGTAAGATGCACAGCTTGTAAATTTGCAGCTG
ACTTAGTGGGAGTTCTAGTTAACAGACTGCTTTCCCCCATACCTCAGATTAAAGTGACATGCCCTGTTATCAAGGGTGA
CACTGTAATAACATCATCAGCCTAGCATTTCAAAAAGTCCAGGTGCTGTCCTGGGAGTGCCAGTGGTTTTCTCCTTCCT
GGTAAAGGGGGTCTCTATAGTAAGATTGCATACTTTGCTAGAAAGTCCTTAGGCCTGGGGCCTCAGAGAACTCCTGCTG
AAGTTCATGGGTATCTCTGAGTCTTTTGGATTTTTGAGACAGGGTTTTTCTGTTTAGCCCTGGCTGTCCTAGAATTTGC
TTTGTAGACCAGGCTGGCCTTGAACTCACAGGGATACACCTGCCTCTGCCTCCCAAGTGCTGTGATTAAAGTGTGTGCC
AGCACTGCCCAGCTGTATTCTAATTTCTTACAAGAGTTAAAACAGTTATGATGGGGTTGGAGAGATGGCTCAGCAGTTG
AGAGCACTGGTTTCTGCAGAGGACTGAGGTTTGACTCCTGGCAGCTGCATGACAGCTCACAACTGTCCATAACTAGATC
CAGGGGATCCAGTGCACTCTTCTGACCTTGGGTACCAGACACACATGTGATGCTCAGATAAGCCTGTGAGCAAAATACT
TATACACATAAAATAAAATAAACAGAAAATAAAATTTAAATAAAAAGTTGTCTTTAAGAATTCATTCTAGAGCTGGAAA
AATGGCTCTGAGGATAAATATGTATTGTATAAGGCTGGAGACCTCAGTTTGATCACCAGGACCCACCCGAGAGGAATGA
ATGACATCAACAAGTTGTCCTCACACCTGAGCCCTTCCCATAAACAAACAAACAAGTGAATAAATGTATGTATGCAATT
AAAAAGTTCACTCTGCTATAAGCTTTTATGGGCTTTGACAAGTGCATAATGTCCTCTGTGTACTTCATCATATAGTATA
TAAAGAATATATCAGATATACAGAGTAGTTTTAATAAAAAAAATCATAGGAGGAGGCATCTGCATTTATAATAACAACA
AAAACCCAACCAGTCAACCAAACAAAAAGCCAAGAGAGCCGGGAAAGAAAGTTTCCAGTATTCATTTTTCTGAAGTCCT
GCTGTTCCTCTAACCCAGTGCACTTTTTCTTATCTCTTACATTGTAGTTCTCATTTCAAGAAATTAGACTTTATAGTCT
TTTTTTTACTATCTGCATTACTTATTCTTTGTTTCTGCGGACATTTTTGGCCACGTGGAATACGGTTACATAGTTATTG
CTAGCACACCAGTGCCTGTTGGTGAGTTTTAGTTGTTATCTAGTGCTCTGTACATTCTTTCCTTTAAAAAAAATATGTG
TGTCTATAAATATATGTTTGGATGGCAGATACTGTGAACATTTCTGGGTGCTGAGTGTGTGTGTGTATGTGTGTGTGTG
TGTGTGTGTGTGTGTGTGTGTGTGTGTTGTGTGTTTTGTGTGTGTGTGTGTGTGAAATTTTTTGAGACAGGATCTATTG
CTTGCCCTAGAATTCAATGATGAGGCTCAGCTGGGTGGCCGTCCAGGAAGCTCCAGGGAACCTCCTGTCCCCATCTCCT
CAGGGCTGGAATTACAAGTGTATGCCATTGCACCCAGCTTTTTTGTGGGTGCTGGGATCTAAACTCTGGCTCTCTCTTG
TAGCAAGCATGTTAGGAGCTGAGCACCTCCTCAGCCTGCCTACCTGCCTTTCTTTCTTTGCCTTCTTTTCTGTTTTTGC
TTTTGTTTGTTGGTTTCTTTGTTTTAGACAGACACTTGTTCTGAAATTCAGGCTAGCCTCCTGCTTCATTCTTCCCACA
TGCTGGAATTGTAGGAGTGTACCAGGATGCATGACAGCTGAACATTTATGAATTCTTTTAAATATCCTTGGATTTTGTT
GTGGGATGCAGTTAAATGACTTGGAAACAGTTTGAGCCTTCTGGGTGTTACTTATAAGGCTTGTTGTCAGGCTCATTGT
TCCCCACAGGTGAGTTAAGACCCTTCTGCACTTATCCCACTAAACCGTGAAGGGTGAGCCTCCGGTCTGGCTGGTGGGA
GGATCCAGATTCTGAGTATTGGGCACTGTTCCCTTTTACCCTCTCTCTGCCCCCTTCTGGCTTCCACATTTGCATGTCG
AGTCACAACTCAGATGGGCTCTGGAGCTCAACACTCTGGACCTTGGACTTTCCACTTTGTTTAGCTCTCTGTGCACCAT
ACCTCTAGAATCTTTTTCTAGATTCGCACATGCCACAGCATTCATGGGGAGGTCAAAGGACAGCTTTGAGGAGCCAGTT
CTCTCTGCGCTGTATTGAGCTTTGGGCATCAGGCTCAGTCCTGAGACTCTGTGGTGAGCGGTCACACCTGCTGAGCCAT
CTCTCTTGACTTCAGCATCCTTCTCTGCACTGTAACTGTAGCACTTACTACTTGTGGTCTTTGTTCTAGGGATGGGTCA
CTGTTGCCTCCTGATGAGTCCTTTAAATTAATGAATCAGTTGAGTCCAGTCTTGATTATATCAGATGAGAGAATCAGTC
AATCTTCCAATATTCTCATCAAATGCTCGTTGTTCATGTCTTCCCTAAGGTTAATTCCTTAATGATCAATTAGAGGAAA
AAGTAGCCCTGCTGAAAGAAGCAGTTGTGTAAGGCTTGGATCTGTTTGTGCAAGCACGCTTGTGAGCATATGGTAGGTG
GCAAGTGTGGGAGAGTGTGGGAGCCCATATGTTTGCATGTTAGTCGCATCCCTTCCTTCCACTTTAAGTGGTTAGGCAT
GTGTAGCGGCAAATCTTGATGGTCAGGTTAACACACCTGGAAAGAGGGACCCTCAATTCAAGAATTGCTTCCATCAGCT
CGGCCTGTGGACAAATTTAGGGGGGCATTTTCTTGATTAGTTACTGATGTGGGAAGGCCTACCACACTGTGTTCTGTGT
CACCTCTGGGCATGTGGGTCTGGGCTGCATAGGAAAACTATCTGAGCTGGGTAGTGGTGGCACACACCTTTATCCCAGC
GCTCAGGAGGTAGTGGCAGATGAATCTCTGAGTTCAAGGACAGACTGGTCTACAAAGTGAATTCCAGGACATCCAGGAC
TACAGAGAGAAACCTTGTCTCAAAGTACCCCTCCCTGCCAAAAAAAGTTATTTAAGCATGAGCTAGTGAGTGGGCCAGT
ACGTGTAAGAGAGTTTCTCTGTTTCTCAGTGGGTTCTGCTTCATTTCCTGCCTGGACTCCCTCATTGATTGGCTGTGAC
CTGCCGTCTTCTTTCCCGAGTTGCTTTGGGTTATAGTTGTTTATCAGACCTACAGAAAAGCAAGCTGTAACTAATGATC
TGCCTATGTAAGATGAGTTGCTCTTCGCACATGTGCTATAATGCATTTGAATATGCTGAATGAGCCTCACAACAGCCTA
TGTTAGTCACTGCTGGCGATTTCTGTATCTTTGCATTAAAAACAAATACCCTAAACATTTTGAGCTGTTTCATTTCTGG
TTGGGCTCTGCTGAGGAAGGTAGAATGGCTCATCTGTTTGGTTCTGAGGAAGGACTGGGAGTAAGCTGCAGGACACAGG
GAAGGAGCCTGCTGATCCTCCCCAGGAAGAGCCAGATACCTGTAGCCCCGAGCCCCTTTCCTCACATTTAACTGTGTGA
GGAAACACAATTCCTGGCCTAAGACAATAGGCCACTTAAGCACAACGCACTGGAGGCCTCAAGTCACCGGGTCATTTAG
ATATTTGGTTGGTTGCCTTTCGTAACAGTATTCTTTTACAAGAGTAATATGAGCTTATTTTAGGAGCATGGGGTATCTT
TGGTGACTAAAACAGATAAAGGACCTGGCCTTGTGGAACTAACTTTTGACAGAGACCTATGTGATTTGCCTTTGAAATT
AGCTTTGGGATTGGATTCCTGAGATAGTAGCACCCTGCTGCCCGTCACTGGCAGGGAGAAGAAGCGATGCTTGTGAGTT
CTCTGTGTTTTATGATAACAGCCTACATTATTACCAGGCAAGTCTGAGTCAGTCCAGCCTGAGGTAAAGTGTGCTCCTG
TTAGCAGTGGAGGTCAAAGAAGTTGGGCAGTGCTGCCATGAAGCCCTGGGTATGTGGCTCCATTTCTGTGGCTGTGTCA
GTGGTACAGGTATAAACTGGTCATATCACTTTCTTCTTCTAGGTCAGGGAACACACCAAGCTATTGTCTAGAGTCTCTG
TCTTACCAGATGCTGGGGATTAGGGCTCTGTGGCGGGGAAGTGGTGTTTTATGTTTTAATGCTGAAGCTTGTGTATCCT
TGAGAGGGAGTTGGGAGGTGCCTTCTACACTATTGGCTATTGTCCAGATCATATGCAATCACAGTTTTTAGGGGAATCT
TCTTACGCATTTCTCTTTGACCTATATTTTCCTTGGGAGTGAAGTGTTTGGTTGTTTTAATTTAAAGTGTGTTTGCTAC
ATTTGCTATAGTGTTTGCTGAGGTGGGGAAGGTGACAGCACATCTATTTGAAACCACGCCTGCATAACTTCTTCCAGAG
CACTAGCAGAGACAAACCAGAGCAGCACAGCTTTTGTGATGGATGGCTTGAGTGTCTGTGATCAAGCATCAGAGAATTA
CTATGGGTTTTGAGAAGACAGGTCTTGGTCTGAAGGAGGGAGCCTAAAATACAAGGAGCAGAGTGGGGGAGTAATGGCC
TTTTGTTGGTCAGAGCTGTCTTTCTCAGCACCCATGCTTGTCTTGGTTTTTCTGTATGTAACTATGCATTGTTACCTCA
GCTCTGCCAAGATGTTTGAGATAGAGACAGAGACAGAGACAGAGACAGAGAGAGAGAGAGACGCATGAAGCAAACACTG
TGTGGTGGAGTGCCTGAGAGTTGTTCCCAGTGTTCCTGCTCCAGTAGCCACAAGGCTTGAAGAGACCTTTGTAGTGGTG
GAAGAAGGCGTTCCTTTCCTGCCATCAAATGTCGCAGTTCTCTGCTGAGGGCAGCCACGTTCTTCTGGGACCTAAACTC
AGAAGCTCTGCAAAAGCAGCCTCTGCAGCTCTGGCAGTCGCTGCTATGTGAAGTTAAATGTCGCTTCTCAATAAATTGT
TTGGGTGTGCACGGGCATAGCTAGATTTCGATGAACAAACTTATTTCAGTTTATTATTTTATATAAATTAGAAACATTA
GAAGTACGAGCTTTTTATTTTGTATCAGTAAGTGTACTTAGTGGTTATACATTGCTTACAAATAAACAAAAAAATAAAT
AAATTCCAAGAAAAAAACCACATTGATTACCTTTTTCTGATTAGACCTAGAAGATTGTCTTGACTTGAAATTTTTTAAA
AGTTTTGATTGGTACGTGGGAGCCATGGATGTATCATAGAATACTTATGTTTTGGGTGACATTTGGAAACTACTGCTGA
TGTCATAAAATTATAGAATTTTTAGTGGAGGAGGGGATTAACATCATCTGGTCTACCTCTTTTGTCTTATAGTTTTGAA
AGCTGACTTATGAAGATGGCTTAGGAAGTGAGTGCCAAAGGCCTCTCACCTACTTAGTCTCAGCCAGGAAGAGAGGTCT
GCACGGTGAAAGCTGCTCTGTTTTCTTATTTTAACTGATGCCTGACAGGTTGTAAAATAACTTTTTTTTATCAACAGCC
AGCTATTCATGTGTCTGCCACTGAATGCTACAATGCTACCCTAGGTAGAGGAGACTGCTGGTCCTGTGAGCAGCTCTCA
GACATATGTCCTGTCAAGTGCACTCTTAAAAGGAGGCTCTTCAGTGACATGCAACTTACCCACAGGATGGCAGCATTGG
AATCCGTAGTTAACTTTCAAAGTCATTTGGAAAAATTTTAATTAGTGGATTATTAATTTGGGACTTAAAATTGTATAGT
GAAGAACTTATTTTTCTTGATAGGGTCATGAGAATTTTGCAAGAGTAACAAATTTTATATCATCAAATATGGGTTCTTT
AACATCAAATTATGAACAAATGTTATCCTTTCTTAGAGAGAGACACACGCTACTTCCCTACTTTGCTGGAATTGGCAGC
AAGAAGCTTAAGTCGAGCTGATGAAATTGAGCAGCTGAAGTGCTTATCCTGAGTCAGAATGGCAGTATTCTGTGTGTTC
TGATGACAAAATGCAACCTAGTCAGTCCATGGCCTGTGGCCTTTGCCCTCTCTCCCTCCTCATAGCCCTTTCCACTCTC
TGCCTGTTCTCCTTTCCCTGTTTTGTTCCCTTCTCTTTGGCGCTCCCTCTTTATATGGTAGCGTTTCAGTTCTTGAGTC
TCCATGGTGCTGCTTCTTTCAAAAATCAGTCTGTCTGTCTGTCTTATCATCTATCCATCTATCATCCATCTATATCTTC
TATCTATATCATCCATCTATATCTGTCTATTATCTATCATCCATCTCTCTCTATCTAATCAATCAATCAATCTATCTAT
CTATCTATCTATCTATCTATCTATCATCTATCTGTTTATCATCCATCCATGTCATCCATCTACCTACCTACATACATAC
CTACCTATTACCTATCTCTCTAGGGTGTGTATGTGTGTGTGTGTGTGTGTGCGCGCTATGCAAACAGAAGGTTTGAGGA
CAGCCTGCAGGAATGGGTTTCTCCCTGTTTGGCTTCTGGGGTCATCTTTGGTGGCAGGCACCTTTACCTGTTGAACATC
TCACTGACCTGTTCTGTATCTTTACAAGTGGATTCACACACTATGGGATATTTTTTCTGACCATCTTCATGTAGCACAA
TGTTATGGAGGTTCCCATACATCTTTTCATTCTATTTTCATACCATAATTTACTTTTTATCTGTTCAGGGACCTTCAAG
TTACTTACATATTTTGGCTGTTATGAATAATGGTGCTGAGAATATGCAAGTACCCGACTGGATACATGTTCAAGTTAGG
TACATAGAATAGAATTGAGGGTTATCTGGTAACTGTCTTAACTTTTTAAGGCACTGCTAGGGGCATTTTCAGTGGCTGA
CTGTTTTGTATTCCTACCAAGACTGCAGGGGTCTTGTTTCTCTGCACGCCAGCTCTTGCTATTTTCTGCTTCTTTGGTT
GTGGTTATTCTAGGCAGTATGAAGTACCTCATTTTTATTTTGATTCTGTTTTCCTGGTATCGAATGATGTGGAGCATCT
TTACATGTAGTTGTTTATATGTCTGTCTTCTTTGGAGAAATGGGTGTTCAAGTCTGTTGTCCACTTTTAGATTGGACTG
GTGGTGGTTGCTGAATTGTAAGAATTGTTTATATATCCAGGATTCACATACTTGCCAGGTGTGATTTGTGGGGCCATCC
TCCAGTCTGTGTGTTCTTGTCTTTGTAATAGTAGGTTGTTTCGTTGTTTGTTTGTTTGTTTGTTTGTTTGTTTGTTTCT
GGTTTCTGCATAGAATTAAAACTTTTTTAAATATGAATTTTGGCTTATCTACTCTTTCTTTCCTTCTTTCTTTTTTGTT
TTGTTTTGTTTGAGACAGGGTATCTTTATGTATCCGTGGCTGTCCTGGAACTGGTTCTGTAGACCAGGCTGGCCTTGAA
CTCAGAGATCCACCTTCCTCTGCCTCCCTAGAACTGGGACTGAGGGCGTGTGCCACCATCACCTGGCTAGTTTATCTTC
CTTTTCCATCCCTTGCTTGGGCTTTTGCTATCCTATTGTAAGAACTCGCCACCAAGGTTATGAAGATATATCTTTAATA
TTTTTCCAAGAATTTTATGGGTTTTTTGTTTTGTTTTTCTTTTGTTTTTCAAGACAGGGTTTCTCTGTATAGCCCTGGC
TGTCCTGGAACTCACTTGGTAGGCCAGGCTGGCCTGGTTTTATGGTTTTGTCTTATGTTTGGGACATCTATTTTAAACT
AATCTTTGTCTGTGGTGTGAGGTAGGGACCCAGTTACATTCTTCTTATAGAATAACCATTGTCCTACCATTGTTTGTTG
ATGGTGGTTTTGGTACCCTTATCAAAACTTGAGTCTTCAGTTTTGGGTGGTGGGGGTGGGAGGTGGCTTTAAGACAGAG
TATTTCTGTATATTCTTGACTATCCTGGAACTCACTCTGTAGACCAGAGCTGGGCTCAAACTCACAGAGACCTGCCTGC
TTTTGCCTCTGGAGTTCTGGGATTAAAGTTGTGTGCTAACTACCACTGCCCACTGCCTGGCAAGTCTTCAGAATTTTAT
AACTTTATTTCTGGCATCAATTCTGTTCTGTTAGTTTACACAGCTGCCATTATGTTAGAATCATACTTTTTAAATTTTT
CTGAGATTATAATCATATCATTTCTCCCTTTCCCTCAACATTCCCATATATCCCTCATTCCTTGTTCAAATTTATGGTC
TCTTGGTTTCTTTCTTTTTTGTTTGTTTGTTTGTTTTGTTTCATTTTTAATGAGAGAGAGAGAGCGCCTAAATACATAA
ATACAACCTGCTTCGACTGTGATGTTATTTATCTGTGCTTCCAGGCCTCATGAGCTTTCCCTTGTCTACGTTAGATGTC
TGTTGTTGTTCTTGTTCAGTTCGTGTTTAAGCAGTCATGTTGGTGAGACTTTATGGCTGTCACTTATGACATTCTCACG
GCAAACTTCCTGTTCCTCTGATTCTTAGAATCTTTCCTTTTCCTCTTCCACAATGATCCCTGAGCCATAGTTACAGGAG
TTATGTTGTAGATGTATCTGTTGGGATCGGGCGCCATAACTCTTCATTTTGCTTGGTTGTGGTTTGCTATAATGGTCTC
CTTTCATTGTAAAACGGAGAAGTTTCCTTGCAGAGGGGGAGGACTTACCTGTGGGTGTGGGGAAATATTTAGGATGTGG
TTAGGGGTCATGATGATTTAGTAAAGTAGAAGACCCATGATTTTACTAGCTGTGGGTGGTTGGCTGGGTTTCCAGGACC
AGGCATGATTTCCCTCTTGTTGAGCAGGTCTTAAGTCCAATTAGAGAGTGCTGGTTACCGCCGAGGTACGTGTGCCACT
TCTGCACTGTCTTGATTTGCATAGCTTTGTAGTGAGTTTTGAAACTGTGAAATGCGAATCTTCTTTTATGTGCTTTTAA
AAGATTGTTTTGGCTATTTGGAGCAACTTTGCAGTTTCATATCCACCTATCTACTTTTCTATTTCTGTGTAAAAGGCAG
GTGGAATTTTGGTAGAGAATGCACTGACATTGTACATTTGGGTTATATTGCCATTTGACTAACCCTGCTGTCTTCCCAT
CCGTAAGCATGCGATGTTTTTCTGTTTATTCGGTTGTTTCAGTACTTTGTGTTTTTTAACTTAGATTTTCATTTCTTTG
GTTACATTGCTTCCTAAGTATTTTAGTCTTTGCGATGCAGCTATGAATGGAATTGGTTTCTTAATTTCCCTTTGGAATT
GTTCTTTGAGGAACTGACTCTTATGCTTTCTATCTTTCCATCTGTTGTTTCGCCTCAAGATGGTGACTCCAAACCCTCC
TCTCTTTTGTTGTAAGGTCTTTACTGTATACCTTTACCTTATACACACTAGTATTGGGAAAAAAGACCCCAAAAAAGTG
ATTCCCAAAGACTTTATTCTCTAAATCGAAATTTCTTTTTTACCTTCCTCTATTCCCCAAAATGTCAGAACCTGTTCTG
ATTTTCTTTTAGCTGTTCCTCTTTGGACCATGATGGTCCCAGTTTCCAGGAGACGTTTCTCAAGGCGCCTGCTGGGGTA
ACTAACCCTGAGGCTCACCGAGCCTTCCTCCCACCCCCTTTCCTGGTCCCCGATTTTCTAACATTCCTCTGCTCTGGCT
TGCTGTGAGACTGGCTCATTGCTGCGTTGTGGAATGTGATCCTTTCCTCAGCACCACTCCTCAGTGTCCATTTAACCTG
GTCCATGTTTGCCCACCATTCCCCATCATCATAACCTCTGCCAGCCCCTGTTTCTGAGCTCAGTGTGCATGTGATCACA
GTGGTTACAGATGATGCATGGATAACTGGTGATAGTTGCAAGGGGCAGCCTTTACTGTCTTCACTTGCCTGGTTTTCAC
TTTGAGTGAAAAAGAAAGGAGATTAAATCCAGAAATATAAACTATGATACTCCTTGTAAATTTAGTGTTTGTCAAAAAA
AAAATCAAGATAAAATTGTTAAAAAAATTTTTATTTCCTTTATTTTATTTCATGGATGCCAATGCAAAACATAGACTTT
ATTGATCATTTAGAAAATATATGTTCATATCATAAAGAAGAAGAAAAACATTAAACACTCATTATTAACTTTTGGTAAA
CAATCCTCCTAGCCTATTTTTGCATTCTTGTTTTTCTTATAAAAGGTGAAGAAAGCAGGCAGATTGTACTTCGTAACCT
ACATGTGTTTCCTGTCTCTGTGCCTTCTTCTCACCTACTGCTGACCAAATTTTGGCCTGGACATTTTCTGCCTTAAAAA
GTTGGTTTCACATTTCCTTACAACCGATAACTTTTAAAATAAATAATAATATTATTTATGTGTATGGGTAGGAATGTGG
TTGGTATATATGTGGCCGTCAGAGGACAGCCTTGAGGGGCTTCTTCCACTCTGGGATCTGAGCATTAGATTTGGCTGAC
CAATGCTTGTCTAGCAAGTCCCTTTACCTACAAGGCTAGCTTATTAGCCCAGTGTTTCGTTTTTGTTTGAGAACACTAT
TTTAACATAGTCCAGGCTAGCTGAAAATTCAGTAAGTAACTGAGATGCCTTGAACTCAGCAGCCTGTTACTAGGGTGTG
ACCAACCTGGTTGCTGATAGCTTTATATAACTGTCGGGAGGGTGGTTTGAGAGGAGACAGTTTCTATAGTGTATCTGTC
ATCTTGATGCGTGTCTTACTTATGATTATACTAATTATGGATATTCATGTCTTCTATTCTCTGAATCCTAATTTCACAC
CCTAATTGACATTCTTTATGTCTCTATGTTTAGAAATGCTTTACATTAAAAATGATTTATTTATTTTGATTGATGTGTA
TGATTGTCTGCATGAATATGTGCTTCATGTGAGTGTGGTGCCTATAAAGACCAGAAGAGGGCATCAGATCGCCTTGAAC
AGTAATTGCAGACAGTTGTGGATGCTGGGAATCAAACCTAGGTCCTCTGCAAGAGCAGCCAGTGGACTTAACCACTGAG
CCATCTCTCGAGCCTCTGAAACACTTTATGCTTTGATTTAATCAGCAAAGATTGACAGTTATTTTATCATCGTAAGTTT
CTCCTTGGTATAAAGGATTCTTTGTTCCCTGTTAAAAACAAAAAAGTTATTCTTTCTTGGTATGATTTAGAGTTACTTA
CTGGGGTATAAATATGTAATTGGCTGTTTTCTGAGGCCTCTGAGAATATGCTTTCTTTGCATAGGATCAGAATTTGTCT
GGAAATGGACTTTCTTGCTGGCCTTTTCTTCCCTGGATGCTTTGTTCCAGCATCCTAGAGTTTTCCATGCCAGTCTCCA
CAGCTAGTGAACACGGCCAGTCTCCACAGCTAGTGAACACGGCCAGTCTCCACAGCTAGTGAACAAGGCCAGTCTCCAC
AGCTAGTGAACAAGGCCAGTCTCCACAGCTAGTGAACACTGCCAGTCTCCACAGCTAGTGAACAAGGCCAGTCTCCACA
GCTAGTGAACACTGCCAGTCTCCACAGCTAGTGAACAAGGCCAGTCTCCACAGCTAGTGAACAAGGCCAGTCTCCACAG
CTAGTGAACACGGCCAGTCTCCACAGCTAGTGAACACTGCCAGTCTCCACAGCTAGTGAACAAGGCCAGTCTCCACAGC
TAGTGAACACTGCCAGTCTCCACAGCTAGTGAACAAGGCCAGTCTCCACAGCTAGTGAACAAGGCCAGTCTCCACAGCT
AGTGAACACGGCCAGTCTCCACAGCTAGTGAACACGGCCAGTCTCCACAGCTAGTGAACACGGCCAGTCTCCACAGCTA
GTGAACAAGGCCAGTCTCCACAGCTAGTGAACAAGGCCAGTCTCCACAGCTAGTGAACACGGCCAGTCTCCACAGCTAG
TGAACACGGCCAGTCTCCACAGCTAGTGAACAAGGCCAGTCTCCACAGCTAGTGAACAAGGCCAGTCTCCACAGCTAGT
GAACAAGGCCAGTCTCCACAGCTAGTGAACACGGCCAGTCTCCACAGCTAGTGAACACGGCCAGTCTGACATGTGTCTT
CCCATCAGTCCTCTGTCAATGCTGTAGGTGGAGATTCTTCCTAAACTTTGGTCTTTCTTTTTAGTACTTTAACAGATTT
TGCCTTTTGCTATATCTTGGTATTTCAAGGGATGGTGGAGGAAGGATTTTTAGTTATTAATGATTTGTCATTACTAGTG
TCAACTTTAATATACCAAAGATGACATCTTCTCAGTAATTTTTTAATTGAGAAATAATTGGGATGGGTGAGCATGTACA
GCCTTTTTTCCTAGCTCTTACTAACTTTAATGGGCTTTTAATAGAAAGTATCTTAGTTGCTTTGTTGTTGTTGTGTGGA
GATACTTGACCAGGGCAACTTAGAAAAGAAAGCGTTTAATTGAGGACTTGCTTCAGTTTCAGAGGGTGATCCATGGTCA
TCACGGCAGGGAGCAAGGCAGCTGGCAAGTGGGCACGGCACTGGCGCAGTAGCTGAGAGCTTACATCTCCCACACCCAC
AAGGCCCATCGAGAACGAATTACCTCAAAGCCAGTGACACACCTCCTCTAACAAAGCCATACCTCCCGACCCTTACTAA
ACAGCTCCATCAACTGTGGACCAAACATTCAAATGAGCCAGTAAGGGCCATTCTCATTTAAACTGCCACAGAAAGTAAT
TGAATTTGGTTTTAGTGACTTTCAAAATGCTGTATGCATATTTAAATGCTTTTTTAAAACCTTTAATTTTTTTTCACTT
ACTCTTCATAGAATATTTAAACATTGTTGTTGTTGTTGTTGTTGTTGTTGTTGTTGTTGTTGTTGTTAGATGAAGTCTT
AGTGTATTGTCTTGGATGGCCTGGCCTGGAACTCACTGTGTAGTATCTACCTGCCTCTGCCTTTGCCTCTGCCTTCTAA
ATGCTGGGGTTCAAGGCATGTACCACCTTGCCCACCCTTCATAGAAAACTTAAGGAGAAAGAAAAGAATACAGGGTACA
TAAAAATCAAGTATAACCAATCTATTATTCACTTCTGTCTTAGGGTTTTATTGCTGAGAAGAGACACCGTGACCAAGGC
AACTCATAAAGAACAACAGCTCACTGGGGCTGGGGCTGGCTGACCGTTTCAGAGGTTCAGTCCATTATCACCACGGTGG
GAAGCACGCAGTGTCAGGCACACATGGGGCTGGAGAAGGAGCTGAGAGTTTGACATCTTGATCTGCAGGCAGCAGAAGG
AGACTGGGCAGAGCTTGCACAGATATATGACCTCAAAGCCCACCCCCACAGTGACACACTTCCTCTATCAAGGCCACAC
CTCCTAATTATGCCATTCCTCATGGGCCAGGCATTCAAACATGTGAGTCTATGGGGGCCAAGCCTATTCAAACCACCAC
ACTACTTAGTATATTTTGGTATTCACTTTCTTTTTTAAAAATGGAACATATATAATGTGCACATTCATATATGCATATC
CATGTCTGACTTTAATTTCTTAGATATGTATTGAACACTTTGAGGTGCCAGGCAGTTTTAAAATTTTGCTGTATATAGT
TTACATCTTGCCTACTTTCACTTAGTGTTAAGGACTGGACAAAACTGGTTCACCAAACTGTGTTTGTAGAAGCCCCGCT
CACAGTGTCATAACTCTTTTCAGGGTTTTTTAGTTCAATCCCTCCTTCCCCTCCCTTTCCCTCCCTCCCTCCCTCCCTC
CCTCCCTCCCTCCCTCCCTCCTTTTCCCTCCCTCCCTCCCTTCCACCCTTCCACCCTTCCTCCCTTCCTCCCTTCCTTT
CTCTTTCCTTCTTTTTGTCATCAGAGTTATTTTTGTGTTGCTGGGACCAAAAAACCTGATGGAAGCAAGCCGAGGAAGG
ATAGACTTGTTTTGTTCCATTGTAGAGGGTCCAGTCTGTCAGGACAGCAGGAGTTCAGGCAGTGGCCTCTTCACATGGC
AACAGACAAGAAGCCGAAAAGGCAGGCTGCAGCCAGTGCAGACACAATCTTCAGAGGCCTGCTCTTAGTGACTTACTTC
TGGCAGGCAGGGTCTGCTCCCTGAAAGCTTCTTCCACATCTTTTGAATCAAGACACAAGCTGGGACTGGGCACGAACTC
ACAGAGACCCACCTGCCTCTCTGCCTCCTGAGTGTTGGGATTAAAGGCATACACCATCACTGCCTGGCATGACTGTTGA
TTATTAACCACTGCTGTCTTGCTAGGAATTTATATTACTCACAAGTTTAGAGTCACAAATTGCTGCCGCTCCCTGCTCA
GCATTCAGAGTTATATTTAAAGAACATAAGCATTTCTGTTATAATATCAAATCCACTCCTAAGAAAACTTTCAAGAGTG
CTTATTCACTAAAAATAACAGGATTATGGTGAAAAGAAGGTTCAAGGCAGACCATTCAAGACTTCTACTATTTCAGACC
AGAGAGAGCTAACAATAGCATAATTGGTACCTTATGAGGTAAGGTGGGTCGCCTAGTCAAACCACTTATTGTGGCTGAG
GCTCCCTGAGAGCAGAGTAAAGCTATTAAAGTGTAAGAGGATGGAAATTGCAGGCCTCGTGGTTGTGAGCTGTGGGGTT
GGCCTGAGAGTGGTACAGGGGGAGTGCAGCTTGCTCTGCCAGGACACATGCACAGGCCAGACAGTGCTCCTCTGGGGAT
AGAGCCCTTGGGCAGTGCTCACCATTAATATTCTTGAAATGGAGCTGAAAGGGCTTGCGTACACATGCCTGCCTCGAGG
CTGGGGAGGTGGCTCAGTTGTTAAGAACACATAAAACCCTTGGAGAGGACCCGAGTTCAGTTCTCAGCACCCATATCAG
GAGGCTAACAACTGCCTGTAACTCTAGCTCCAGGGGATCCAATACCCTCTCCTGGATTCTGCAAGCACTTGCACTCACA
TGTGTACACACCCTTCTGCCTCCAGTTAAAAAGAAAACAAATTCTTTATATACGGCTTTATGACCTTGACTCAAATCAA
GATATTGAACATTGCCATCTTTGCAGGAAGTCCCCTGTACTCCCATCTCCCATCCTTCTTTCTAGATGAGCACAGTTCA
GAGTTTTATCCCAATTAGTGCTATATCTTCTAGAAGTTTTATCTAAATAAAGTCTAATAATAGTTTGCTATTCTCATGT
GTCACGTTTCTTTTATTCTGAAAAGTCCATCCTTGTTCCAGAGTCTGGTTTTGATTGTAGAGTAGTAGTCCATTGTTGA
ATGTAAACAATTGGTATCAAGTTCAGTGTTTGCTGAGGAACATTTGTGTTGCTTCCACTTCTGCTTATTAGTAGTAAAA
GGCCTGTGAACATCTGCACAAGTGTTTTGTGGATACAGTGTTTTCATTTCCTTTGCAGAATTACCTCAAGAGGAATTGC
TGGCCATAGAGTAGGTGTGTGTTTAATTTATAAGCAACTGCTAGCTTTTCAAAGCAGTTGAGCTGTTTTTCACCCTGGC
AGGGATGTTCTGAGCTGACTTGCCAGCATCAATTGTAGTTATTCTCTTGGGTGCTAGTGGTTTTCATCGTACTTCTAAC
CTTTGTCTGTCTGAAGATTAATGGTGTGTTTTAGCGCCTCTTCACATTTTCATGGCCCCGTGTGTGTCTTACTACGAAG
CGCACCAATCTCCCTCCCTTCTACTCATAGAATGTGGTTGAGAGCAAAGTTTACTTAGGTCTTGAGAAGAGGCCTGGGC
CTCTTCAGGCCCATTCCTTGTGGTTTCTCTGCACAGCCCTATCTAAAACATACAGTTTCTTGGAAGAAGGCTAACCAGC
ATTTAAAGGGGCAACTGGCTTTTCCCCATAGGTTTTCTCCTAAAAGCACTTGTCTAGCACAGCCTTTCCACTACTTGAT
TTCCAGTGTGTTTAACAGTTCCACAGCTATAATGTATTACTATTATAAGTGTGAAATTGAGTGGGAGTAGGGACATCCT
TACCTTGTTAATAATTTTAGAAATGAGAATGTGAAAATTCACCCTTGCGCATGCGAGCTGTATGGCTTTGCAAGTGCCC
TTTGGTAAAGACAGAGAAAGTGTCTGTCCGTTTACTATTTGTTGTCTGTTTTTATCCGTATAGATTTTCAATCTGATAT
GCCATCACTGTTTCGTTTCAAAACAGGGTCTCGTGTTGCCCTGGTTGGCCTCAACCTTGTTAAATAGCTGAGGATGACT
TTGAACCCCTGAACTTGCAGCACTTTGCCTGTGCTGGAGTCACTGGTGTGAGTCACCACACCCGCCTTCGTTGTTTTCC
CTTTTCTACTAATGTGGTGACTCACTGACTTCTTAGCGGTCACTTGGTTATGCTGCGCTTCCCCTTTTTCATGCTTTTC
GTGGCTTATGATTGTCCGTACGTCTGCCCGTTGGGTATGGGGCTGTTAGTCTGTGGCTGGGGCTCTTGGCTTTTGCTTT
CTGTGTAGGAAGCTTTGCTTGGTACAGTGCTGCATCTTTTGTGTGTAGAGGATCTCAGTTGTAAGTTTTGTTACCTGAG
TCGTTTCACCTTGAGCTATAGTTGTGTGTTGTCATTCTGCCTCATGAGTCTTTTTCTTTTTGTTACTTGACATATTTCT
GAACTTTGTTTTAATCAATCTCTCTAGACTAACTATCTCAGGCTTGAGTGAATTTTTGTAAAAGGTTTATTATTTTTAT
GTGTATAAGTGTTTTGCCTGCGTGTGTGTGTGTGTGTGTGTGTGTGTGTGTGTGTGTGCGCGCACCTCATGTGTGCAGT
GCCCACAGAAGTCAGGGAGGGTTTAATCTCTGGGACTGTAATGAATTGTTGGGAGGTGCCATGTGGGTGCTGGGAATCA
AACTCAGGCCCTTGGCAGAGAAGTCAGTACTCTTAGTTGCCACGCCATCTCTCCAGCCCCTTAAATGAATTTAAACTGT
ATTATTGTGATTACTGATGTTTTCTTTGAATTCATTTTCCTTTTCCATTCAATCTTTCCATCTTCCTGCCTCCTCTACA
TCTTTCTCTAACAACACCAGCCCCCCCCCCCCCCATGTTCCTTAGCATTTTCTGCCTTCAGCAGGCAGAGCCTTCTGCA
CAGGCTTCCAGCTCGCCCATGTTGTATCTGGCACCCTGCGCATGATGCATAAAACAGTGCTACACAGATCTCGTTTTTT
GACTTATCATATCTGGGTCCGAAATGAAGGAGCTTTGACAGATAAGCTGTCTGTGGCAGAGCTGTTGGTCTCTCTCTGT
GTACTGAGGGGTCTGAGGTATCCAGGTGACCTCCTTCATGGATGTGCCATTTAAGTTTCTGTTTGTCCTGTCTGAGCAC
TAGGGACATCTGGACTAAACTTTAACAGTAACCATGTTTAAAGGGAGTTAACAGGCCCCTGTTCTCTCCGTTCTTTGGC
TCTTTGCCTGTCTCTAACACTTGCTGATAATACCTCCTTCCCCCTTTTGTCTCAGTGCCCAGGACTCAAGGTCACTGAC
TTGGTCGCATCAGTCATTAGCTTTGTCATTACTGGTGTTTTCTTTTCCTTTTTGTTTTTTGGGTTTTTATTATCATTAT
TATCTGACATCTTTTTCACAGTAGGTTGATTTTCCACCGAAGGCAGTCCTTAAAGGTTTTCTTCAGAGCCTGGATAGAT
GGCTTCGCAGTTAAGAACACAGACCCACATGTAGCTCACAGCCTTCTGCAACTTCAGTGCAGGTAGTCTCCCTCCTTTT
TGAATCGAAGTGTGGGCCAGCAGTCGAGAAGGATTTATGTTTCTTCTTCTGTGCTCTTTGGAGAGGCACCGAATCTAGA
AGGCAGAGTGGTTTCAGGTGGTCCTGGCACGGCTGTCTCAGAGGGGGAGCTAGGTTTTGAGTGCCAGTTTCTCTGTGGG
CTGTGGAAGCTGTAGCATCCTGCTTCACAAGGCAGCTCACATGCCACACAGGCCGCAGCTTCACGGCACCGCACACTTG
TGCGTCAGTGCATGCTCTCTGCCCTCTGCAAGAATCTGTGACACGGAAGACATTTGGATGGCTAACTACGTTTCCTTCT
TTCCCCCCTAGGTCTTGATGCAGAGCTTTACTATGTGAGAAATGACCTCATCAGTCACTACGCTCTGTCCTTTAACCTG
CTAGTGCCCAGTGAGACAAACTTCCTGCACTTCACTTGGCATGCAAAGTCCAAGGTAAGCGCTGCCGGCAGACCACGTG
ACAGGTCACCCAGTCTGCAGAGGCGAGGGCTGTCCCTGAGGATGGGCCTTCCTCTCCACAGAAGGGTCAGTGGTGGTAT
AGAGCACTGGGTCTTTTCAGGTGTATAGCTGACAGATACAGTCTTGAGCCTGCTCCTCTGAAAGTTTAGATTTAGGTGG
CTGCCAGGTGGGTGACCAGCGCATCACAGGGCTGGGTCCTTTGAGGCTTTTGCAGGGAGATCTGTACCCAGGAAAAAAG
AGAGTTGGATCTGATGGTGACCCTGCTGTTACAGAGAAGCCATATGTGGCTGGAGGATGGGTGAGTGGCTGGGGAGGAG
CATGGCTGAGCTGGCTGGCTCTTCCACACACACTTGGTGACTTGAACGTAAGTTTCCCATTTACTGTTCTGAGTCCCCC
TGGTAACCATAGATACTGAAGCGGGGAGGGGGGTGCTTATCAACTTCTGCCATTTGTGTATTGGTGAATTCTTCACCTC
TGACTGCCAAGGAACCTTACATGCTTGTCTCCCAGATTTGCCAGATGATACTGTTTGTACCCTTTACTCCCCTCCCTGC
CTGCCTATGAATCCTTGAGCTGTTTCAAAGTGCATTGAACGCATCATGTCCTCTCTCTCCTAAATCAAAACCAGGAAGT
TTGGTGTTCTAACTCACAGCACTTGGGTAACTGAGTTCTAACTCACTCATCAGGGACCCTCAGCATCTTTATCACTAAG
GTTTCACTAGAGACTGATGTTGTTTCAGTTTGTGTCAATCTGAAGTTTTGATGCCCTGCCCATGTGCTTCAGCCTCAAG
TTGTTGGGAGTGGAGAACCTGTCATGGTGGAAGCTAGCTTGGAAGGGTCGTCTATGAATCTATATGCTTGCAGGGGGAA
CACTGAAGGGGACTGGTATAACTCTAATTATCTGGTAGATTCCTCTCCTCTCCTCCCCCCTCTCCCCTCCTCCCCCTCC
CCTTCTTCCCTTCCTCTTCCCCCCTCACCTCCCCACTTCCCCCCTCTCCTCCCTCCCCTCCTCCTCCTCTCCTCCCTTT
CCTCCCCCCCCCCCCCAATCCTTCTCTCTCTTTCTCTTCTTGAGGCAGGGTTTTACTCTATAGCTCTGGCTACATGTAG
ATTCAGCTGGCCTTGGACTCAGATATCTGCCTCCCAAGTTCTGGGATTAAAGGTGTGCACCACTACACCTGGCTAGCAG
CATGTATTTAACTATACATTTGGGCTTCTTCTTGATGATATTACAGTCCCCAACTCTAGTTCTTAAGTCCTAGTATCTG
GTGATTTTTGGCACAGCTGATTAATTGCAGTTTGTTTATTTAAAAAGTTAATCGTACGAGTAGGTAGTACATGGATATG
GCCTGTAAGGGTATACAGTGAAAAGGAAGGTTTTCCGTTGTCATGGTAGCATGCTGAGCAAGCCCATCTAGATCACTGT
CTTCATCAGGCATTGTTGCCTGAGTCTTGTCTCCTAAAGAAAGGTAGTGTATATGTGTGCAGTGTGCACACGTACACCT
AAGTGCTTCCTGCTTTCGTGTAGTGTGGAGTTGTGAGCAATGTGTCCTGGTAAAGGGGCACTGTTCCTTGTTCCTTGGT
ATTGCTTTGTGTGTTCCCCCCTTAAATAACTGTATCATTTTCTCACATAGTTGTGCTCTGGTCATTTCCTACAAGAGGA
AACCGAGACCCAGGTTTGGGAAGGACTTGCTTAAATGAGTCTGGAGGCTGAAGAAACAGGTGCTAGGGGTGAGCTCACA
TGGCAGTCACCCGAGAAGGCAGGAGTAGTAAGGTGCGGTCTCTTATCACTTGATTCTGAGATACAGTCAGACTTCAGAA
GGAAGGCTGTCTCTCTCAGTTTCTAACACTCTGTCAGAATCTCTGTTTGGGCTGTTTGAGCTCTTGCCAGAAGATGAAC
TGTTGGCTTCCGAGATCTCCAGACTCGCCAGTGTATCACTTGAACACTGCAGGCATTTTAACATCAGTGTTCCCACATC
AGAGCTTTTGCTGGTAGAGTTCTCCAGTGTTTACGTGACTGGTCTTGCCAAAGATTTCAGTTCCCTCAGCGGCTGGAGC
TGTGTGTGTCTTTTCTTAACATCTATGTCACGCGCGCCTCGCTGAGTGGTTGAGAATGTGTTAATTGTATTTTAAGATG
GGAGGAGAACTCTGGTATTGATTCTCTCACAAGAGTAGACGACTAGGCGGTCTTAACAGATAATTAGTTTCTTGTATGT
TCCAGAACATTCCCCAGTGTTCAAGAAGAAACTTGCAACTGTGTCTGCTAAGTGTCAGTAGATATGCTAGACAGCCAAA
AGGCAGAGGCTCAGTAGGATGTGGCAGAGGACTCCACCACCCACTCCCTTGGTCTCCGTCCAGGAGATTCTGCGGGGAG
CTTGTCAGAGCTCCAGCAGCTGCCTCTGGGGGCCAGCCTGCTGTGTCCCAGTGGAGTGAAGTAGCTGTGAGAAAGGCAG
TTCTGGCAATTTCAGAGAAATTAAAAGGCCGTTGACTGTAGGCGAGCACATTCACTTTAGATGTGTTCCAGAAGGGGAC
TGCTTTATTCGTCGTCTGCCTATTCACACAGCCATGCGTTCCAAGTAAGGAAAAATACCAAACATGTTGATTTTTTAGC
TTATTCAAATATTTATATTTTCTCTAGTTACTTTTCTGAAGTATTTTGGCTCATTTATTTTCTGATAAACAGCTGCTGC
ACAGATTTGCTTTGGGGTGGGGGGCAGGGTAAGGCTGGGGTGCACTTTCTAAATAGATCTCTTTCTTCCAAGGTGATTG
ACAAACGGCATTCCTTACAGATCAGTACACACCAAAGTAGAGACAATTGTATTCCAGTGATTGGCACTTTCTTCTCTGA
CTCCAAAAACTACATTAAAAAAAAAAACCAAAAAACAAAAAAACCCAGCTGTCCTCAGTACACCAGTGTGAGGGGGGAA
CTGCCTTCTGATGCTTCCGTGTTCATTCATCCGTCCAAAGGAAGTCTTAGGCAAAGGGCAGGCTTCCATGCTTCTTGTT
GTGGGTTCCTCTGGGCCACTGCTGATTCTCTCAGTCCTTCCCTCAGCCACCTCTGCCTGTGCTCTGCTCCTTGTTTTGC
CGCCACTTGCAACATCATTTCCTCCCTTTCTCCCTCTCCCGTGCTTAGACTGAGATGGCCCTGCCACTCCTCTTGCCGC
TCTCCCTCAGCTCTGCCGTCAGAGCCCTCTCTTTGCTTTCCTGGCTTTGGTCCCCGGACAGCTATTCCTCTGCTTATAG
CCAGAACTTTGTAAAGGAGACCGAAAGGTTAGAGCAGATGTCCAAGAGGGGCACTGAGGGGTAAGGAGCTTCTGGAAGA
GCATTGATGCCATGGACAGACAGAGTCAGCAAGATGACGTGGGCCTCAAGCACAGCTCAGGCCCTGGCACTAGAAACGG
ACGGCCTGGCAGGGTGTCTGGGGAGAGGCATCGAGCCCATGTGATAGAAGTGGGGTCTTTGATTCCCTGGCAGGAGGCA
GAGACAGGAGGGGGAGCTGGATCAAGTAACTCACTTCCCAGGTGAGAAATCCTGGCTCCAGGATGTCTGTTAGCTAGGA
ACACACACTGTCCCAGTGGGGTGCCTGCCTACCTATGAGAGGAGGCTCCCCCATGTATGTAGGAACCCACAGACAGTAT
CCCAGTGAGGCGCCTGTGTTGATCTGTGAGAGGAGCTTGGCAATCAGGTAAGCTCAACTCTGTCTGGTAACCCTACAGC
TTCAGCCTTTGAGGTTACCAGATGGGTATGCCTAGTAGGTAGTTGGAGGAAAAGGAGAGGGAGAGACAAGTTGAAATGT
TTATCCTTGGGACTGGAGTGCAGAGGGTTAATGTTCTGATAGGTCAGCCTGATGCAGAAAGGAATAAGAGTTCTTCCTG
GAAGTGAAGAAGCCGAGCAGGTAGCGTGTGGTGCACCAGCGAGGAGCACGGGTGAGGTTGAAGAGGAGCAGCCATTGAG
CACAGGTCTGGGGGGTCATCATGTGTATCATCTCCTCAGCAAGCTGAGCCAAGGGCCATGGGGTTGCAGGCACTGCCAT
CCAAGTGTGAAGAAGAAGGAGTGAACCAGCTGAAGGTGTCAGAATGACTGTGTCAGTGATGTCCCTGCTGGGGCACAGG
CTGGGGCACAGGCGGTGGGAACATGAAACCCGGCATCCTGGCTGTGCTGGGAAGGAAGGAAGTAGTTTAATTAACCACT
GCTTTCCCCCCTCTACTAGCGCAGCCCTCGGCTCATAAACATGCCTCATAAATGTTGTCCGACTTAGAGTAGTGAGCAC
AAAGAACTGCTTTTACAGGGACCAGAGGTGGGTGGTCAGAGGCAGTGCTGGCATCTTGGATGGAATGGACGGTATTTTT
GTATCTGTTTTGGACATAGAGAAGTTGAGTGCTATGTCAGAACGAACACTGAATTTCAGAGTTAACAGAAAGATGGGAG
GAGACGGAATGAGCCAGCCTTCGAAACCTGTGTAGAGTCTTGTGTGTGACATGTGAGTGGCCCGAGACATGCACTGAGT
AGAAGAGAGCTTCAGAGTAGAGGGGCTGATTTCACGCAGGACGTCTAGAGAGGGCCTTAGAGCCTGACAGGGATACTGA
CCACATGTGCAGACCCAGTGCTCAGGTCTAGAAAGTAGACATGAGCAAGAAGAGGAGGAGCCTGAGGGGAAAGCCACAC
TGAGGGAGATCATGAGGGAGATGAGAGTATGAGAGGCTGTGCAGCCAGTGGGGTTCCTCACATCAGGAACAAAACCGAT
CCCACCAGTGCTGACAGCTCAGGAGGGTTTGCTGCAAACCCCTGGGGTTGGCAGGAGGCTGATGACCACAAAGGAGTGC
AGCTTGACAGTGGGAGAGGCTGCTGAGGCCCCGGGGTCCCGAGCCAGTGTCACGGGCCTGTTGTGTCATCAGCTTGGAA
AAGTTGCTCATTTGTGCAGGTCACGTGGCCTCCTGGTTCTAGATCCCATGCTGATCTGTCTCAGGCACCACCCCCCCCC
CCCCCCCAAGCTATGGCCTCGTGCAGAGATAACAGCCATACCTTACAGTCAGTGCATCCTCTTGAGGTTTTAGTGCTGG
GAAGCCCAGGGTACCTTAGTGATGGCTCTCTAGCGCCCCTTGGTGGCAGCCATGGCGATGTGATGAGCTGAGAGATTGA
ATGCTTCCTTCCAGACTGTTGATTTTAAGGGAAAGGGTGGTTCAGTTCCAGGTACCAAATGGACAGTAGCCTTCAGGTT
GAATTTCTGTCTGGCTGAAAAGTCCTAGTATGATTTCAGTTTTATTATTTTTATTTATTTATTTTTGAGACGGGGTCTC
ACTTTGTAGCCCAGGTTGATCCTGAACTCACTATATAAACCACACTGGCCTCAAACTCACAGAGATCCACCTACTGCTC
ACGGCTGACTGCTAGAATTAAAGGACTGCTCTTGGAATCTTTTTGGGAGTGGATTTTTATTCCACCCATGAATAGCTCT
CATACTGCTTAGTTAATGAACTTACTAATGAAGTCTTTTTCTGTTGTCAGGGGTATAATGTTTTATCTCTCTTCATTTT
GCAGGTTGAATATAAGCTGGGATTCCAAGTAGACAACTTTGTGGCTATGGGCATGCCCCAGGTCAATATTTCTGCTCAA
GGGGAGGTCCCACGCACTTTATCAGGTGAGCCAGGAAAGACGGACTTAGCATACTGCTTTCAGCTGCCTCCATCCTATC
CCTACAAGGATAGTTCACTGAGTACCGGGCCCTCCCACATCAATCATTAATCAAGAGAGTGCCCCACAGACAAACTCAA
AGGTCCCAGGGGGTTGGGAGGCAGGGGTTGGGGAAGTAGACGTGTAATTATTATTGTCATCTTTATTGTCTATTTATTT
TTAAAGAATGTTGTAGGGCTTTTCCTGGCAGTTTTATTCACAATTATTATTGGCACAAGTTCAGCTAGGCTTTAAGCAG
AGCTGGGAGGCAAGTTAATTTTTGGGGGTCAGCAAGAGTTTCAGAAATATCAAAGTCTCTGATCCACTACTCATAGATG
GTGAAATATCTTTGAAATTTGTAAGAAAGGAATCATAAATTAAAAAGGCAAAATGTTCTAAAATCTACGACTTTGTCAT
TAACATTCCTAGATATACCTTTAGAAGCTAATCCTATTTAGAAGGGCAGTGTTGTTTTTAATTCATAGCCAAGAACATG
TTAGCTTTGTTTATAGGTTTATTATAATTTCCCCCAGTAACAATGTCTTTATTTCCTAGAGGTACTGCTTTTGAATGGT
ACAATTTTTATTTTATTTTATTTTTTAAAGATTTATTTATTTACTTATTGATTCATTTATTTTATGTATATGAGTACAC
TGTTACTATCTTCAGCCACACCAGAAGAGGGCATCGGATCCCATTACAGATGGTTGTGAGCCACCATGTGGTTGTTGGG
AATTGAACTCAGGACCTCCGGAAGGACAGTCAGTGCTCTTAACCACTGAGCCATCTCTCCAGCCCTGATACGGTTTTTA
AATGTGGTTACTAAATACACATATGACATAAACATTCTCCACAGGGAGTACTTCTAAACATGTCATGCACCTGTCTGCT
CATACTATGGATATAGTTGTTATTGGTGGTGTGCTGACGTGTATTTTTGGCCATCTGTTATGGTGTGGCTTCAAGCCCA
ACAGGAACTCTCTGGCACCCAGTTCAGTGCAGCTTTGGTTTCCCTACATTTTCTTAGCCAGACAGCAGGAAAGGCTTTC
CCTCCTTGGGATTCGATGATGGCATGCTTTATTCCGGGTAGCTCATGTCTGCCCTGCAGGCCGCAGTCCACACGGTGTG
GTCAGCACTGCCTTCTTGACATTCATACCCTTCACGTTGCTAGGAGCGATACACAGGTGCATTTGGTGCTGCAGAGTCT
TTCCTTCCGTGGTGTAGTTTTGTTACCGTTGCTGGGGAGACTGGTAAGCTCAGCAGTTTGCCTCGTGATTCCTGAGATT
CAGTGCATTGGAAAGCAGAACATAGACAACAAACTGATATTAAAAACAAAGTCACAAGGAAGGCTCGGAAGTAACTATC
CCTTCATCTGTGTCCTGTGCTCTGCTTCAGTCCTCTGGATCTGCAGTGAAGGAAATGCAGGTGTCCAGAGCGGTGGTGA
CAGGGTCTCCGGAAGCTCCTGTCTGATCCGCTTATTTAGATGCGCTTCTTTATTTTATTTGAGCAGAAATAGATGAAAA
TGTTGTATAGCATTGATCCTAATCTTTAGGACACTAAAGTGTTTTCTCTTGTTTCTTTTAACAGTGTTTCGGGTCGAGC
TTTCTTGTACCGGCAAAGTCGACTCTGAAGTCATGATTCTAATGCAGCTCAATCTGACAGTGAATTCCTCAAAAAATTT
TACAGTTTTAAATTTTAAACGAAGGAAAATGTGCTACAAAAGTAAGGAATTTATTTAACAGAATGTGTTTCATGTAGAT
AAGAGGTCAATAGAAGACTGCATTTTCTGTATAGAGATTTAAGCATGACCAAGTCTTGATTATAGTTATGAGAAAAGCG
CATTAGTGGATGAAACTCTGGGTCAGCCTCTGGCTCTCATTCCATTGGAGTTCTGTGGGTGTTTCCAGAGCGAGCGACA
GAGCTGAGCATTCGCTCGGTGGGCTTGGACTCTGCAGGACCTTTGTGTTGGGGGTCACATGGGCCTGGGTTGAACCATA
TCTCTGTGTTTTCAGGACAGGGGAGATATTGCACCTCTGCAGGGCTGAGATTCTTGTCTGTGAGATGTGCATGTTGCTG
TTTCAGAGAGGTTTTAAAGGGTAACGAAACCTAGTCCAGAATTAGAAAGTCACATGTGGGCACTTAATAATTAGGGTTT
GAATTATATCATCCATTACCCAGGAAATCACCATAGATAGTAGTGAGTTCTAGAACACCAAGGCTGAGTTTTGAAATGT
TAAGATTTTGTTTTAAGAGTTAAATATTTTATGTATATGAGTACACTGTAGCTGTCCTCAGACACACCAGAAGAAGGCA
TCAGATCCCATTACAGATGGTTGTGAACCACCATATGCTTGCTAGGAACTGAACTCAGGACCTCTGGAAGAGCAGTCAG
TGCTCTTAACCCCTGAGCCATTTCTCTAGCTCCAATTTTAAGATTCTTAAAGGTTATCTAATCTCCATGTAGCCTACAG
ATAAAATTTCCAGAATTTACAAATAGGTAGAATTGTTTACTGTTTAAGGTAGAAACAAAACAAACTGTAAACTCAGTGG
ATGTTTCCCGTGATCTGTACACTTTACACGCGCTAAACCCAGCTTTAGGTGTTATGTTTCAAAAAGTCTGAGTGGCCTG
ACCAAGGTCAGACAAAGTGCTGCAGCCTGTGCTCTCCACTGCTTTGTGAAACTATTTACAGTTTCCCAGTTGAAACTAG
CAAGTGAGTTACAGTGGCAGATGCCAAGATACAGGCCAGAGATACAGGCCAATAAAGAAGCTATATTGCATTGAAAAGA
GACATTTTTAAAATTAAAAAAAAATTAACACCCTTAGCTTTAGTACTGTGAATTATATACCTACTTCAATGTAAGTTTA
AAGCCTGTAGGGACTGTAGAGGCTTTACTCCAACCTAATCTTTTTGTGATTGGCATGAGGACACTGGTCCTCGAGAGTG
GGAGGCCTCCTAGGTTTGTATAACTACTCAGTGGGGATGGATGGAGGATGGATGGATGGATATAGAACAGGTGGATGGA
TAGGTGGATGGATAGATAGATGGAAGGATAGAGAATGGATGGAGAGTGGATAGATGCATAGAAGGATGTATGTATAGAT
GGATGGATAGAGAATGGATGGATGGATGGATAGAAGATGGATGAATGGATAGAAGGAAGGATAGAAGATTATGTATATA
TGAATGGAAGGAAGAAAGGATAGAGAATGGATGGATGGATGGATGGATGGATGGATAGAAGATAGAAGATAGATGGATG
GAGGATTAATACTAGGGTTGGACCTAAGGTGTGCTAGGAGAATAGAATGCTTTACCATTGTGCTATATCCAAAACTCAT
ATTTTAGAATTTTTATTTTGAGACAGGGTTTTGCTAACTTATCCAAGCTGGTTTTGAACTCACTATGTAACCTAGTCAA
GCCTTGAACTTGTGTTTCTCCTGCCTCAGCCTCTGGGTAGCTGAGACTAAGGTGTGCACCACAATGCCTGACTTGTGAA
AACTGTCCCATTTTAGATTTAATGCATATCACCATCTTAATTTGGTGGTCCTATTTTGTCCACTTGGATTGTGTAGTTT
TTGTTTCTGACTCTTACTTTTAACATGTGATTTTGTTGTATTTATCTGGTTTCCTAGCCTATGGCACTTAACTGAACTA
GTAAGCATCCCCGAGCTGTGTGGAATAGCTGTTACTTCTGGGAGGGGGTTCTGTATCTTATGGGTGAGAATTACAGGTC
AGGAAGTTTCCTAGAACTCCAGAGCCTTTCCCCTCAGCTGGTGGCGCGGTTTCCATGATGACAGTATAAGTTTGTGGGT
TTCCCTACACTCTTTACCACAGAAGCCCATCTCATTGGGAATCTGTAAGTGACTGGCAGAGACTGTCCTTTGACTAGTG
ATTGCACTGATGGCAGGACAGCCGTTCTCATGATCTTACTGCAGACAGCTGTGACTTAGCTCACGCAGTGTTCAGGAGG
TATGTTAGTATGTAAGGATTGTTACAGAAAAAAACTTCTAAAGTACTTTTTATTTCTCTTTTAATCCAGAACTTGAAGA
AGTAAAAACTTCAGCCTTGGACAAAAACACTAGCAGAACTATTTGTAAGTGTCACTGCGTTCGCGTTCTCCACCCTGCG
AGTGTGAGCATGACTGCGTGAGGCCTGAAGCCGGGTGCCAGCACCAGTGTGCTGTCTGGTTTGCAGAGTGATATGTAGA
CCAAATGAAGCTGTTTGAGAATTCAAACTTAAACATACTTTATAGCACGCTAACAAATACCTTTTAGAAGCAAGAATTT
ATATTGTGGTTTTTCTCAGGCAGGACCAATAAAGGAAAGGATATTAAAAAGTTATGTGTGAGACCTCCATTAGCAGAGT
GTTTAAGAATCTGACTTGTAGCCTGGGCCCAGCTCTTAACTAATTTCATCTAGGTGAAAATGAAAATTTATGTCATTTA
TTCTATATTTTATTTTGATATAGCGAGATGACTTAGTTGGTAAAGTGCTTGCTATGTAAGCATGAAGACTTGTTCCGAT
TCCTAGCACCCGTGTAAAAGGCAGGTGCTGCGTATACTCCTGTAATGTTGCACTGTGGGGGATGGGAAGGTGGGAGAAG
GGCAGAGGCAGGCAGATCTCCAAAGCCTCCTGACCTGTCAGTCTAGTTAGCTAATGCATTCCAGGTTCAGTGAGAGATT
CTGACTCAACAAGCAAGGTAGGAAGTGATAGAGGAAGATACAGAATGTCAGCCCCTGGTCTGTGCATACACATGTACAC
ACATATGCACACACATAAACATCTGCGCACACACACACACACACACACACACACACACACACAGGGGGGGGGGGAAGAC
AGACAGACAGACAGACAGACAGATGAACACTCTGGTTCAGGCTGGTCTGGAGATCTGTATGTTGTTGAGGGTAACCTTG
AGTTTCTGATTCCTCTTTCTCTACCTCAGGAGTGGTGGGAATTGAACTCAGGGCCTCACACATGCTAGGCAAACACCTA
CTAACTGAGCCACACTCCCAGTCCAGGCATAGATTATTTAAATACATGGAGAAAAAAATTTTGTTAGGTCAGTTAGATT
TATTTATTTGTTTACTCTTGGTATTGATTATATTATACACCATTAACAAGCTTCTTTTTTCTCTTATGAACACATTATG
GTAGCATTAGCACCAAATGATCTTTATAGAAATAGATAATATTTTCAGGAGAAAGTTGCAAGTATACTGAAGTTCAGAG
TATGCGCTGGTGGACATTTATGTCCTCAGTAACTATTGCATGTGTTCTTCTGTGCATTGCTAACTCCAAATTTGATGGA
TAGGGGATTAGTGTCTTAAAGCACAGTCTAAACATCACATCATTTGACCCCTAAGTATGTCACTGTAGGTCACCTAAAA
AGCCCCTAGTTACCCAACACACCCACATGTTGATTTATCACATATATCATCTCTTCTATCTAATCTGTGTTCAAATTTA
CATAATTGTGCCAAACCATCTTTCAATAGTTTCCTTCTTCAAAATCAGGATCTAAATGGAGCCAATACATAGTGTGTTT
TGTCCATGACACACACACACACCACCACCACCATCTCTTCCTCCTCTTCTTCCTCCTCTTCCTCTTCTTAATTTTTTTT
TATTTTTTATTTTATTTATTTTATTTATGTGAGTACATTGTAGCTGTCTTCAGACACACCAGAAGAGGGCATCAGATCT
TATTACAGATGGTTGTGAGCCATCATGTGGTTGCTGGGAATTGAACTCAGGACATCTGGAAGATCAGTCAGTGCTTTAA
CTGTTGAGCCATCTCTCCAGCCCCACACCACTTCCTTCCTTCCTTCCTTCCTTCCTTCCTTCCTTCCTTCCTTCCTTCT
TTCTTTGTTTCTTTGTTTCTTTCTTTCTTTCTTGCATTTTTTTAATTTATTTTTTTTAATTAGGTATTTTCTTCATTTA
CATTTCAAATGCTATCCCAAAAGTCCCCCAGACCCCTCCCCCCATTCCCCTACCCACCCATTTCCACTTCTTGGCCCTG
GTGTTCCCCTGTACTGAGGCATATAAAGTTTGCAAGACCAAGGGGCCTCTCTTTCCACTGATGGCTGATTAGGCTATAC
ACCACTTCTTTATTAATTGATCATATTGTCTTTTTTTCCCATAGAATTTGCCAAAGTAAACATTCTTCTTGTATTATTT
AATTGCCTTTAACTCTTTCTTATAACTGGTAGTTAAATTTTATACTTGATTAGACTTAGGACCACTTCTTTTGGTAAGA
GCAATTCACGGGTGTCCTGTGTGCTTCTTATTTATTGTTTTAGCACCTCAGAGCACCTCAGAGCACCGAGCATCTGTCC
TAATGTAGGCTTTTGTTTGTTTGTTTGTTTGATTGTTTCTGTTTTTGTTTTTCTCTGTGTAGCCCTGGATGTCCTGGAA
CTCACTTTGTAGACCAGGCTGACCTTAAACTTTTTCTCCCCTCCCCTCCCCTCCCCTCCCCTCCCCTCCCCTCCCCTCC
CCTCCCCTCCCCTCCCCTCCCCTCCCCTGTTCTCTTCTCTTCTCTTCTCTCTCTCTCTCTCTCTCTCTCTCTCTCTCTC
TCTCTCTCTCTCTAATTTAAATGCTCACAAGGTATTTCTCCCTAAGAACAACAGTAGGATGCTCTTGGCCTCTGTCTCT
CTCTTCCTTGCTCTTTCTCTTCCAACTTTTATCACTCCTATCCAGCATTTACTGAGTCTGCAGTATACTAGGTGGTGTG
ACTGAGGCAGAGGATTGAACTGAGAAACAGCCCCAGCCTTTACGGACTTAAGAGTGTTCCGGGGGAGATAGGACAGCAT
GGTAGGCACCCCGAGGAGGGACTTGTCACTGCCTCTGAAGGAGAGCGGCAGCAGCTAAAGGAAGGGCAGCTGTGTTCTG
ACAGGGGAGTGTCAGAGAGGAGTAGGAGCAGAGCTACACCCGCTGGAAGCTGAGGGGCTGGGCAGAGTGCGGGCGGACG
GCCTGCCCAGCGGACCTGTCTGCTCCGGCCACTGCTTGGGCTGCAGTGTCCATCCACGCAGGCTTGGGGCTTTTCTACC
CCTCCTGAGACGTTTCAGCAGATACTCCTGGGAGTCTTGTTTTCACTTGACCCAAATCTAGCTGTCCCACTTGCATTAA
CCTTTTAGATTTTTATTCACTTTTTGTTCTTTTACTCCACGTTTAATTGTTTGGTTGTTGGCAGCTTAGGATCCGTCTG
CTCAGCCTTCTTCCCAGTGTTAGGCTCCCGAGCTTGTGCCGCTGTATCCAGCCTGAGAGAAGCCTGGGTTCTCCTTTAC
TGTTAAAAAACAAATCACATATGTATACAATGTATTTTCATCTTATCCACTCCCCCTATAGTTCCTACTGGGTTTCCCA
TACACACACACAATCCCTTCCCGCCTCTGTCTGTGTGTGTGTGTGTGTGTGTGTGTGTATGTGTGTGTGTGTAGTATGC
TCACTTAAGCATTCAGTTAATTTTTCTATTCCTGTGGTGTTTCTTAAAATAATGTAGCTGGGTATAATCATATTTAATC
AATAGAACCCTTTTAAAAAATCAAAGAAGCAAAATTATATTGATCAAGAGAACTGTGCAGTCTGCCCAGCAGGGTGACT
ATTAGCTGTGTGTAGCTTTGAGGCTATAAATATATTAACACAATATAAAGTAGAATACAGTGAAGTTATTCTGGTTGTT
TTTCATACCACATAGTTAAGGTAGCAAGTGGCTACTGTGCAGGGCAGTGCATTCCATCTGTTTCTGCAACTATGCTATA
GAACATTTACTGAAGGACATGCGTGTCTTGTATACTGGGGTGTTTTGTATCTACTGTTTGTGAGGGTCTGACTGTGGTT
CATATTAACCAGAAATTTTAAAGTCTTAAAACTGTAACAAAACCACCAAAATTGGTGTGAGTACCGCACTGCGGGTATC
TGGTTTTATCAAAGGACGGGTGTGATGCAGTGCAGGCCTTCCCGTGAGGAGCAGGGCACTCCCCGTGTTAGGCCACAGA
GCACCCCATCAGCTCTGTAAAAACCTCACGTGCCTCTCATTTCTGTTTCAGATGACCCTGTCCATGCAGCGCCAACGAC
TTCCACGCGTGTGTTTTACATCAGTGTAGGGGTTTGCTGTGCAGTGATATTTCTTGTAGCAATAATATTAGCCGTTTTG
CACCTTCATAGCATGAAAAGGATTGAACTGGATGACAGGTACCGTTCATGTTTTGGGGAGCATGTTACTTGCATGTGCA
TGAGTGCCCCTCCCCCAAGCCCCCCCCCCTCCATCCATGCACATTGTGCAGGGGAGGAGGGAGAGTGATGAAGCTCAAG
CCAAAGAGGAACTCAGATGTCTCGGTTATTACTGCCTTTATGTTTTTATCTTCATCTTTTAAAGTTTGTGGAGTTATAA
CCTGGGGGAGAAATAAAGGTCAGAAATGTTTTTCATGTTTGTTATCCTGATTCGCCTCCAGGTCCGACTGCCTTTTTTA
AACTACTTCCTTCTACGTCCTCCAGCCCCTCCCCGTCCCTCCTTCCATCCCTCCCTTCCTCCCTCCCTCCTCCCTCCCT
CCTGCCTTCCCACTTGAGTATCTGCTGTACTTTAAAGTTTCTTGGATGATCCTAATGTGTAGCAGAGTAGAGACACCGG
GTAGATAATTACACTAAGTGTTGGGACTATAAAGATTAATGATACTCTTCATGGTATCAAGGTTCTTTGATGTTAACCC
ATAATTATAGTATAGAATTGATGATTGTGGTATGTATAATGTAGTGTGGGAATGCAGAAGGTCCTGGCTTAACCTGGGT
GAGTCACACACATTATAGCCAGACTATAGTGAAGGGTAAAGATGGAATGGGAGATACGTGCTCATAACCCACAATCCTT
AGCGACAAAAGGCATTCTCAGCATTGTTTTTGACTTTGAACTTTGAACCCTTTCTACCTGTCTTGATCCCTAGTTGCAA
CTTGTCAGGTGATTCCATATCCCTGATGCTGCCCTTTGAGAGCTTTTGTTCATACTGGGGCCATGGGACTTCTTGCTAA
TCCAGACCCATTATTTGTACTCCAGATCCATCACCGTCTTTCCCACAACTAAAATAGAAGCTTTTTCCAGGCAGGGAGG
AGAGACCCTTCTCTCCCCAAACTCTCCTAACACTGTACAGTAGAGCCATGATATCAGCATTCCCTTTGTAAAAGATCTG
GGGGCTGGTTGGATCCAGCACTCTTTAAGTACTTTGGATCCAATACTCATGACTTAGTCTCCACTGTGCTCCTTCCCTT
CCTTGAGTCAAAAGAAGAGAGGAGTGAACATGGCGGAGTGCATACAGGCACTCTAACCTGCTTTCTGTTGCCGTGATAA
AACACTGGCCAAAACCATTGTGGAGGAGGGATGGGTTCATCTCAGTTCACACTGTCAGGTCATAGTCTAGGGGATGTCA
AGGTAGGAACTGGAAGGCTGAACCATAGGGCATGGCTGCCACTGCCTTGCTTCCTTAGGCACTGAAGGCCCACCTGCCT
AGGGGTGAAGCTCACGGTCGGCTGGACCCTCTCACATCTGTCATTAACCAAAACATCTCGCTTACATAGTCACGGGCCC
ATCTGATCTGGGCAGTTCCTCAACTGAGACTCCTTCATGAGACTCTAGGCTGTGTCAGGTTGGCAGCCAGCTCACTAGG
GTAGTGGATGCTATGTTTCAGAGTGTTTGGTGTACACCGGGATCATGGAGTTCTTTGATTTTACAGAGGAAGAACTGGC
ATTTGGAAGCCGTTGAGGGGAGAAAAGACTAGACATCTTGTAAACAATTTCGACAGATGATATAAATGATGAGAGTTAC
TGAAGAGTAGAATAGTCAGAAGTCATACTTTGTGCTTTTTGTTTTTGGAGGCAGGGTCTCATGTAGCCCAGGCTGGTCT
TGAACTTTTGATTCTCCTGCTCCACCCCCTAACAGCACATACTGTTATACTCAGCTCCACAGGTCTGATACTCATCGAG
TTGAGTTTTCCTTGACTGCTGGTGTGTGTGTTCAGGCCATGGGTTCACACAGGCCGACATTGTGCTGTAACTCATAGAT
TCCATGAAGCATACGTGTCTTCCTGCTAAGTATTCAGCACTCACAAGCAAACTCTCTAGGTTTCTAGATACTGTCTGAA
TAAAAGCAATTATGTGATTGCTTGTTTTCAGGGCACAGCCTAGTAGTTAGGAGCTAGCCTCTGGGGCCAGGCCATCTGT
ATCTGATATCCAGCTGTTCTATTTACCAGCCTCTCAGCCTTCTCACGTGTAAAGCAGAGATTGTGGGCTGTGAAGAAAG
GACGCTAGAGGGGTGGGTAGCAGATCTCAGCCGTAGCTACATGCAGTAAGTGCCGCCATGCCGACGTCATCCCCAGAAC
GATACAGTGGATAATCTGGCGTTCCCATTATTCCTGGCTTGCTTACAACACACCAGGCAAGCTAATGGTGGTGGCCAGC
ACTGGAGACACCTGCTGCTCCTCTCTACACTACATGGTTGTGTAATTAAGACTCAGAGACAGACGTAAAGACAGACTTG
TGGGATTGTGGCAATACACCAGTACAAAGCAGGAGGGCTCCATTCTGCCATTTCTGTATTGTAGTTACATCAGATGCTT
GCTGCCTGACAAGCTCTGTTCCTCGGGAGGCTTAGTGGTGCTGTGAACTCTTGGGAAGAGCCAGTGTTCTGTTACATAT
GAGGTTTCTCTGGAGGCAGAGGGTGTAGCTGTCTGAGACGTGCTCTCAGCAGGGACACATGGAGTTCGCGCGCGAGGCT
TTCCCTCTCTCCCAATGCAGCACATTGATCTGTAGTCCATTACAGCAGAGTCTGCCCTGAAGGGGCTGCGTGGTCTCCT
GCAGAGCTCGGTCTGTAGCTGCTCTCTCTGTGGTCTCCCCCTCAGGGAATGGAAAATCCATTCCTCGAGTATGGGGTGC
TTGCATGTGTTATTTGGTAGTATTTTCTTTTTCTCTTCTACTTACTGCTTCCTAGCACCTCACTACCCTCAGCATTAGG
GTGGGAGTGGGGGCTTTTTGTTTTTTCTTTTCTATATTTGTTTTTACCCTTGCTGTCGTAACAAACTGGCATACATAGT
AATATACAGAGTCTTAAAGTTTCCTCTTCCTTCTCCTCCTCCTTCTCCTCCTCCTCCTCCTCTTCCTTCTCCTCCTCCT
CTTCCTCCTCCTCCTCATCTTCTATCTTCTTCTTCTGACAGGGTTTCTCTGTATCTGTAATTTGCTCTGTAGACCAGGC
TAGCCTTGAACACAGAGATCCTCCTGCCTCTGGCTTCTGAGTGATGGGATTGAAGGCGTGCATGAAGAATGAAAAAGTC
GGTTACTGCGCTCAACCGTTCCCTCCGCATCACGTATCAGCAGCTGGAGTCGGCAGCAAGCATTCTGCCTGGCCCCCGT
CTTCCCAGTCCATGGGCGTGGCTGCTTTCACTGAGTAGCTAACCCACTGTGCTTTGGGCTCTCACAGGGGTCCCAGTTT
GCTTCCTGTGCTGGGCACCGGTGTAAGTGTTGGGGAGGTGGAGTGAGCAGGCACTTAGCTGTCCCCATGGAGCTTGTGG
TCTGCCCAGATGAGACGTTCAGCAAGAAGTCCCAACTGGAAAGAGGGTGGGAAGGTCTGTGGTGTTCAGTGCTGCCTCC
TCAGCAGCAGAGCACCTCCTGTCACACACAGACACTTGATAAATATTTATTGAATAAATATATAAATAGATGACTCACT
GAAAATAGACAGTAAGATTTATTATTTTGAAGATCTTTGTTTAAATTCTTAGCTTATCCTAAATCTAGGTGCTTTCTTG
CTTATGAAAAATCAAATTTATTTAGACTAGTCATATGCTACTAAATGTTAGTAAATATACATTTTAATCTGTTTCCTAC
CTCCTGTGATGGTGTCGGGCTGTCCTTGCTTCTCTTATAATCGTACGTTTGGCTCCAAAGAAAGTTTCTTGCTCCACTG
TTGCTTCGCTCTTCTTTCACTTGTTCATTTCTGTTAAGGAAATGAAACTCTGACATAACTAGCCATCAAGCTTGACTGC
TCTCAGTCATTTTTAGCTGACGCAAGAGCACCACCTACTGTTCAGTTGTCAAAGTTTACTCACCCGGACACATTGTTGC
TCGCAGGGAATATCTGAGTTTTCACAGATATCATACATTTGAGCCTCACCTCCTGTGAGGCAGGTCTCCTCAGTCCTCT
TCTGCGGAGGAGCTCTTATCTGTCCCCTTCTGTGATGCAGCCCTTCCCTCCTCTCTGCTGAAGACTACACTTCTAACAA
ATAGGACTTTTAGTCACATCTTTGCCAAGTACTCTGCAAAAACATGTACCTGTAGGTCACCGTTCTAAGGTTGGAGACA
TGATGCGCAGTATTCCTCATGATAAAAGAGTGGTCGTTTATAAATGCATGCCTGAGGGCCAAGCAGTGACCTCAGTGAT
GTACTTAGACATCTTCCGTGTAAGACCCTTTTAGCCGTCTTGTTGGGAGTAGCTTTATGCTTCCTTCTATCCCCACAGA
GTTCGAGGCTCCAGAAGGATTGAATACTTTGCCTAAGCCACACAGCTGGTGATGTGGGCAATTGTGATTTACAGGTTTA
TGCTCAGCATTTGCTTATGACCAACTACATATGTAAACTCACATAAATCACCATTTAGTAACTTCCAGAACTCCAACCA
CACAGTAGCCTGACAAATCTTTGTTACATTCTATGAATTGAAAGTCCCCTCAGCAAAGTTGACTGTAAGTTCCCAGGAA
GAAATAACAATCTGAAATGTGAGCGTCTCCAGGGAAAGAAGGCATGTTGAGGGCACATTAAATGAACAGGCATTTCACG
TGGAGATTGTACTGTGCAGAGTGGCTCATGTGCACACAGGCTCTCTGAATGTTTATTGGAGGACACCTCTATCTCAGTA
CTTCAGCCATGACAGTAGGTCATTCTAAAGTGTGTTAGCGATAAAAGGCTACATAGCCTCCAGAACTCACTACTTAGAT
GCCTTATGTCTGTACGTTTTTCACATGTGTGTTTGGGCTCTTGAAATTGGCAAAATACAAATCCATGTGTAAGTATCCA
GATTATATAGCAGGTGGTCACCAGTTCCATTGTAATCACTGGGGTTTGAAACTACGATGATAAGGTACAAATATCAGTC
AGTCACAAGGTTCTTCATATGTAATAGTGGGCTCCACCACCTCTGTGGTGACAGGAGTTCTGTCTGGCTCTCTGGTTTT
ACTCTCTGTGCTGAATCTCTGCTTTAACATCTCCTCGGCTACAAAATTAAAAGGAATAGGCCAGTGAGATTGAAATGTT
CCCCAGAGTGACCTGGGACAAGGTTTCTACCCATTGAGAAGATGGAAGAATATGCTTGGGAAGTGTTGGTTTATAGGAA
TTACAACACGTGAGTGACAAGATTTGCGCCCACCACCTTCAGGGGCTCCTCTTACTTGGAAAGTATGGGGTGATGTGAT
GTTTCAAGTTCTAGAGATTTCTGAGAACCATGAATTCTAAAAGTGGCATGGGAGGGGTGAAGAGGGACAACATATATGA
TTAAACAGTGAGACTGTGAGGACACCCCTGCCCCCGTTGAGCATGGCACTCTTGATTTAATCTGTGGCTGCTTCAACTC
AAGACCATTTGATTTGGGCCATTGCTGAAATGAACTTGTTTTTCTCCTTTTCTGAAAGCCAGTTCAACTGAACAGCGTG
GGGTTTTTTCTAGAAAGCCGAGACATAGTTCCTGACACACCCTGTGTGAGGTTCAGAATTGCTCTCTGAGCACGTCTAC
CCGCACTCCTGAATAATTTTGCTCTGATGGCATGCCCTCCGTCGTCACGTCCCTCAGGAATCCAGTTTGGAACGCTGAT
AGAGATGCGTGCCTTTATTGCATTGTTATCTCGACCAACTTATGTACCTTATATGTATGGGAAAGACATCTCTCACTGA
GGCTCACTTATCAAGTATTTCTGTCTTCAAATTCTTTGCAGCATCAGCGCCAGCAGTAGTTCCCAGGGGCTGTCTCAGC
CGTCTACCCAGACGACCCAGTATCTGAGAGCTGACACACCCAACAATGCAACGCCTATCACCAGTAAGAGTCAATTGAA
TCCTAAAGCTGTATGTGCTCTGTCTGTGGTTAGAGTATTTGTGGGATTAATGTACCAGTGTGTAACTTGTGTAAAAGTT
GGTTTGATCTTCGATTTTGTTTTTTTAGAGCACTGAGTTAAAAAAAAGTTGGGGTATTTAAAGTAAAAATAGTTGCTAG
AGCTAGTTTTGCTTTGGGGAGATTTCCATAGTTAATTTTATTAAAAGAGCTAATAAATCAATTTTATACAAATCCAGAC
TGAAGGTTTTCAGGTTACTTATATGGAATAAACTAATACTCTCATGGGGTACATAGAGACTTGGCATTGGTTTTACTCA
TCTGATGTTGGAGATAGAAGCCAGGGTCTCCAGCATGCCCGCTGTACTGTGTAAGGAGCTGTCCACCAGTCCATGCTGC
TGTCTTCTAATCCTAATTCAAATCTCATTACCATTGATATGGTCTGCCTGTCTGTCTATGATTTTTCAAAACAGGGGTT
CTCTGTGTAGCCCTGGCTGTCCTAGAACTTGCTTTGTAGACTAGGCTGGCCTCAAACTCAGAGATCCTTCTGCCTCTGC
CTCCTGAGTACTAGAATTAGAAGTGTGTCACACCACAGCCCAACTTTTTTGTGGGGGTGTTTGGAATTTCCTTTCCTTT
CCTTTCCTTTCCTTTCCTTTCCTTTCCTTTCCTTTCCTTTCCTTTCCTTTCCTTTCCTTCTCCCTCCCTCCCTCCCTCC
CTCCCTCCCTCCCTTCCTTCCTTCCTTCCTTCCTTCCTTCCTTCCTTCGTGTGCCATGCTGGAATCAAACCAAAGGGCC
CTCACACATGTTACAAGTACTTTACCACTGAGTGACATCCCTAGCTTTTAATTTCTCTCTTTAAAAAGAAAATCAACCT
GTGTGTCTGTGTGTCTTTATATACATGAGTTCTAGTGTCCACAGATGCCAGAGGTGTGGGGTCCCCCTTGAGCTCGAGT
TCTAGTCAGTTGGAATTGAACTTGGGTCATTTGGAGGAGCATTGAGTGCTCTTAGCCACAGAGCCATGTCTTTAGCCCT
AATTTTCTTCTTATTAGCAGAATTTTGTTTTTTAGCTTAGGCTGGCTTGGAACTCTAGCATGTAGATTAGGTTGGCCTT
ATATGGGCCACCATTACCAGCCCATTTTTATTTTTATACACTTCAGGGTTAGGAATTTTGGGGAAAGTTTTTTTCTTTT
TTCTTTTTTTTTTTTTCATTCTTTCTTTTGGTTTTCTTGAGATAAGGTTTCTCTGTGTAGTCCTGGCTGTCCTGGAACT
CGCTCTGTAGACCAGGCTAGCCTCAAACTCAGAGATCTGTCTTCCTCTACCTTCTAAATGCCAGGATTAAAGTTGTGCA
TTATTACTGCCCAACTAAAATAAATCTTTTAAAAATATTTAACTGACAAGTTATATACAGTGTGATATAAAATATGCAT
GTAATAATGTAGTGTTATTGGACTATACTTTAGATATAGTGGGGAATCAGTTATGAGATGATGATGAGAATAGACTAAC
CTTCTGAAACTGTAAGCAAGACCCCAATTAAATGTTTTCTTTTATAACAGTTGCCTTGGTGATGGTGCCTCTTTGTAGC
AATAAATGACCAACACGGGGAGGAAGATAGCCTTGATCTAATGTTATTACCAAGAGAATGTCAGTGTAAGGAAGACTAT
TGATGTCCTATAATTAGTAGCCTTTCCAAGGCAAGACCTGAGCCAGAGAGAGAGAGAGAGAGAGAGAGAGGGAGAGGGA
GAGGGAGAGGGAGAGGGAGAGAGAGAGAGAGAGAGAGAGAGAGAGAGAGAGAGAGAATGCCTAGACCTGGCATGGGCTT
TTGAAGCCTTAAAGCCAACCCCATACCTCCCAGTGACACACTCCTCTAACAAGGCCATACCTCCTAATCCTTCTAATTT
TTACAAACAGTGCCTGGAGACTGTTTAATTATGAGCCTATGGAGGCCGTTCATACCCAAACCACCACACTCTCAGTGCC
CTGCGGTGGTTTTTCTAAACTGTTTCCAACAAAAAGAGTCAAACGTGTTAGGAGAAAAAGCAGATTCCAGGTCTGGGTC
AGGAAATGAACAAGGCAAATCTAAGACATATGATTGAGCAACATATCCCACTTACCAAGGATGGAGCCACTGAGTATAC
AAGAGAATAATGACTGCAGTGATTTGGAATAAAATATGTGTAATAATCCATAAATGTATAATGCTTATAATTGCTCAAC
ATAATTATTAACTGGGGCTCCATCAATACCTTAGTATCTGACAGCTGGCTGAATGAATTATATTGCAGGGTAATGAGGT
AGCACCAGTTGCTTAGAACAAGCATTTCCTTACAGAAGGCTCCCAGCTAATGACTATGAAAGGAATGGTACAATTAGAC
AAGGACATTTAATAAAATACTTAGTCTAGGAAAGACCATCATTGATGAAAGCCCTAAGCACAAAGGAAATGGAGGCTTC
ACCATTGGCCAGTCAAATCCTTCCCTGATCCACTGATAGATAAACTTAGCACTACAAAAAGTGCAACACCCAGGTATTT
TATACCTGAGGATATGAAGTTCCAACCCCAGATAATTAGCCTGGATTTAATCAAGGCTAGAGCTTGGAGCTGTCCTGTA
ACACAGAGACAGAGGAAGAAGGTGAAGGACATGCCAGGAGCAAGGAGGGCAGTTCTGCATCATTGATTGTGGCAGGAAA
CAAGGGCCAACAAAAAACCTCAGAGAAATCAGAGCAGCACCTTTGGTCACTCTCAAGAAAGAAAGATGACAAACCCTTC
GTGAAAATGCCGTGGTAGGTAGGAAGGTCATTTCTGCTCAGAAAATGCAAACCTTTAATGTCGCTTTTAATGCTGACAT
TAGGGCTGTCCTTACTGATGGATATGACCTTATGAAAGAGACTATATACCAATGAAAATAATTTACATATTAAAAATTT
GTTCTTAAGGTGAAATTTACCTATTTTTTGTTTTTCACTGTGGACATTATCACAGAGAAACACGTAGTTCATATATCAA
TAGACGCTAAAAACACTGGAAACCTTTAACTTTTACATGTATGAGTGCGTTGCCTGCGTGTGCATGTGACCATGTGCAT
GAAGTCTCTGCAGAGGTCAGAAGAGGGCGTTGGGTCCCCTGGGACCAGCCTTTACAGCAGTTGTAAGCTGTCGTGGGTA
CGGGGAATCCCACCTGGGTCTCTCTAAGAATATCAAGTGCTCTTAAATACTGAGCTTTCTCTCCGCCCCACCCCCAACA
AATTGTCCTAAAAACTCAATATAAATACAGTTGTTTTATGACTAAAAAAGGAAGGCCAGGCATGGTGGTACACACTTTT
AATCCTAGCGCTCAGGAAACAGAGGCAAATAGCTCTCTGTGAATCTGAGGCCAGCCAGCTCTACATAGTGAGTTCCAGG
CCAACCAGGGATACATAGTGAGACCCTACCTCAAACAAAACAAAATAGGAATAGCAACAAAAGGGATGGGGTGTAGTGG
ATCATACCTATAACCCCAGTATTTGGGAAACTGAGGTAGATCATGGGTTCTGAGCCAGCATGGGCTGCCTAGTGAGACT
TGTCTCAAAAAGAAAAAAAGGGGTGGGGGCAGAAAACAAACTTAAATACTGGGCTTCGGGAGTGCTAACGAGAGTGGTC
AAAGTGAAGATGTAGTTTATCAGAAGTGATGCTTTTCAAACTTCTCCGTATTTGAAAAGATCGTTTGTCACGTGATTTA
TTGAAAAATCATTTGGGAGGGAAAACTAGAGAGGGATTAGAGTCTGTAATTCAAACCTTGTGTCATTTGTCCCAAAGGC
ATTCCAAATGACAATAATATTTTTAGTGCTTCTTGTTTTAACATTTGGAAGTAGTGGTGTCATAGATGGGACTGTTTTT
CCTTAATTTTTTAAAAAAAATTATTTTTATTTTATTCATACTGATGTTTTGCCTGACTATATGTCTGTTGTGAGGGTGT
CAGGTCCCTGGATCTGGAGTTAGAGACAGCTGTAAGCTGCCATGTGGGATTTGAAGAGTAGACAGTGCTCTTAACTGCC
GAGCCACATCTCCAACCCCTTCCCTTAACATCTTATGTGCCCTTCAGCAGCAGCTTCTCTGATCTGTGTGTATAGTTGC
TTCATTATTCATTTGCTTCATTATTCTTTGCTATGACTTAAGTCCACAGGCTGGAGTGCCTAGGTGAGCCCAGTGCTGC
AGTAGGGTATTTATATTGCTTGGTCTGGCTTTGTTGGCTCCTCAGGTTATCCTACCTTGCGGATAGAGAAGAACGACTT
GCGAAGTGTCACTCTTCTGGAAGCCAAAGCCAAGGTGAAGGATATCGCAATATCCAGAGAAAGGATCACACTGAAAGAT
GTCCTCCAAGAAGGTACTCGTGCTCGCTACAGTTTCAGTTCTGTTAAAAAATTGTCTTCATTTTCTATTTCTTTAGACT
TTATACAGTGTCGTAGCAGCTTTGATGAACATCTTGATTTTGAAGTGTGATAAAACAGACAAGTATTTGTGACCTATAA
ATGTATTGTATCCTTATTTCAAGTGATCAGTACCCAGCACCTGTATTTACAATACTTAAATTAGTTTATTCTTTCATGG
CTTGTGGATGATCAGGTGTGTGGATGGGCATTGGGGTTAGGCTCAGCGTTTGTAGCCTGAGTGACCTTAGAGAAACCAC
ACAGTATCTCAGAATTTCTGTAGAGTTCACACCATGCTAGTCTTCATCACTCTGAGACTAGCTGAGAGGCGACATGAAA
TGGTGCATTCGGAAGACTTCTCAGAGTTTGTATTTGACATGTCCAGGGCTCTTTTCACCCCGTCTTGCAGGCCCTTGAT
CTCGGCTTTGAGTTTTAGGTCTCCATTAAGGAGATGGTGAGATCGGAGGACAGAAATTAACAGTGAAATACTGCATCAC
ACGCGGTTAGATGGCAGATGCTTGTTTCCTCGCTGCAATTTGTTCTGGAATGTGTTTGGTCCGCACAACTGTTCTGTTT
GCTGGGCCTCCTGGAAGCTAGTCTCAGCTAAGTGAGGACCTAAGATGCCTTCTGAGAGAGTGGCGCTCAGTTGACGCAG
ACTCTTATTTCTGTCTGTTCTTCAGAGTAGGAACACTGCTCCTACGGTTGTCTGCTTCCTAACTCAAATAACTAGATAG
ATCATCTGCAGTCTGAGGAGAGAAACCAGGCCAGACAGCATTTCCTACAGAGTTAGTGGTTATGCTTCCAATTTCCTGT
GTTTCCAAACAGGATGCTCATACTTTGAGGAAATTTGGAGCCATGTTTTCCTTGATACTTTTTGGAGCCATAATGGTTT
TTTGTTTGTTTGCTTGTTTTTTGTTGTTATTGTTTTGTTTTTTAAGAACTTTAGCTTTCAGAAAAGAAAACATGACTGG
CTAATATTTTGAAAAGTGGTGAGGTTCACTGGAGATCTGACTAAGTACAAATCAAACAGTGGTTACACGCCACTTTTCA
TCTGTTAGATTGGATGAAATTAAAAAGAGATAGCTAGAGATCCAGATGGGGTTACAAGGTGATAAACTGTTATGCACCC
TGACCGGTGGCAAGGTAATCTGTGTACACATGTGCTGTAGTGTGGGGTTTGCCCAGTTACTTTTGCATTTAAAGTTTGT
GTTTGGAATATCTAAAGGGGACTAGGTTTAGGGAAAAGGAGACACAGCAGGGTGGACGGAAGGACCAGGTCTGTCCTGC
TGGGCAGGGATAGAAGGAAGGACCAGGTCTGTCCTGCTGGGCAGGGGTGGAAGGAAGGACCAGGTCTGTCCTGCTGGGC
AGGGGTGGAAAGAAGGACCAGGTCTGTCCTGCTGGGCAGGGGTGGAAGGGAGGCACTCCTTTGACAGTACAGAGACTCG
GAGGTGTTTGGACAGCTCCAGGCAAAGATTCTCCAAACCCTTCTGCCTGCAGCACCGATGTCACTCAGACTCTGTGACT
CAGTGGGACCTTCCACATGAGCACTGGTACCTTTAGCACACACAGTGAGATATTAAAGCCAAGGTGTGTGTAGTGTCCA
CAGTAAAGCTAAACTCTTTCAGGCATTTCTTTTAAATTATGAAAAAAAAAATGGTCTGTGCGAAAGAATAGCATGTCAG
CAATCTTTTTTTTTGAGGATCATCTCATTTAAAAAGTATTTTTAGCAATCAGGAAATTAATAATAAATCTGTAAGGATT
TTTGCATTTCTGTTTTACACTGCTGTGCCCCTCGGGAATGTCATAATTTCTTTGCTGTGAGAGCTCCTTAGGAGCACAC
TTGGCCCTCAGTGACCTGAGAGTTGGGTCACCTCACCTGAGACTGAGGGGTAGAGGCGCCGAGGCCTCTCTGAGCCAGG
GTTAGCGTTCCTCACTCTTTCATCATTGAAGTCTGCATCGCAGAAAGAGCGGCCGTTCTCTCCCTCCGTCGTTGCTTTG
AGGCAACTACCAGAGACTCAGATGCTCTGGCTGGCACCTGTAACTGCGACAGCACGCCTGACCGACTGTGTTTATTTAG
AGAAATTAAGGAAAATAGTCTCAGATATTTAGTCTAGCTATAGGATTTCTCAAGCAACCTGCTTTGTGGGCTTGAATTG
CTCTTAACAGCTTTAGTCCGGTTTATTCTGGAGGGAGAATGAACAGCAGCCACACCTGTCAGCTTAGTCGCGGTTACTA
GAAAGCTTTGTGATACTGTGAAGATTATTGTATGGCCTCATTAACTGTTATTTTTCCTTTTAGGTACTTTTGGGCGTAT
TTTCCATGGGATTTTAGTAGATGAAAAAGATCCAAATAAAGAGAAGCAAACATTTGTAAAAACAGTTAAAGGTAGGGAT
TTTTACATGCTGTTTTCATAAGAGTTTTTTGTTTGTGTTTTTTTGTCAATCACTCAAACTAGCAAAACTCTGTCCCCTG
TCTCAGTGTGTGCCAGACCTTTGGAATGACTCTGTACTAGTGTGACTCACAGGCTAATTTTTGCAAATTAGGTTTTTCT
CACCAGGTATAGAAATTAGTTTTCTAACTTACTAAACATTTATTAGAAATGAATCCAACAGTAGTTAAATTGCATAATT
GCATGCGCTTAACCTATCTGTGTCTAACTTTGAGGTTTTTTTTCCTGTTGAAACTCCCTTATACCATCCTTAATCATAT
GTAAGAAAACATTGTCATTAGTTTTCAACATATTTATAAAGAAGATAATGAGCTGTGCTCAGATCCACAGTGCCTCATA
TAGATATTTTTTTACATTGTTTACCTTTTGTTCTCTCCCCCACTTGATCTCTTACACGCTGTGTAGTGCCCTAAGACAT
GCCTGTTTCTTCAACCCTTACCCTGACTGCCACCCTTTACCCTTACCCGTGTGTTAGGTAAGCAGGTGTTCATGTACAT
GTGTGCATACATGCAGAGATCCCAGGAGTCAGCCTTAGGATTCTCTAATCAAGTGTTATCCGCCTTTTTGCTTTCTTTT
TAAATTATCTTTATTTTATTTTAGTTTAGTTTATGTATATGAATGTTTTGCCTGCATGTGTGTATTTGTACCACCTGGG
TGCTCTGGGCCCCTGGGAGGGTGTTAGATCCCCTGGAACAGACAGTTGTCAGACACCAATGGGTAGGTGCTGGGATTTG
AACCCAAGTTCTCTGGAAAAGCAGCCAGTACTTCTAACCACTGAGCCATCTCTCCCCAAATCCTCCTTGATCTTTGAGA
CATCTCTCTCTCTTTCTCTCTGGGACCTAGGGCTTTCCAGTTAGGCTAGGCAGACTGGTCAGCGAGCTCCAGAGATCCA
CCTGGATCTGCCTCCACAGCTCGGGCTGTAAGCACGTGCCAGCGTGCCCCGCTCTTTTTCATGACCATCAGATTTGCTA
GGAAGGCAAGCGCCTTACAGACTAGTCCTTCTTTCCGATCTAAGGAGTGCTCCTTTCTGAGAAAGAAACTAAGCACTTG
GCAGAGATTGAGAGGAAATTATTTTTGAGTAGAAGATGTAAAGTTTTTTTGAGATTTACAGTAACTGTTTCTAAATGTA
CGTAAGGGAGTAGGTGGGAAGGACGGAGGGCTTATGTATATTATTTCTAAAACTTCAGGTTTTACTAGTCATAACTAAA
ACATCTAGAATTTACTGCCTGTAGTTTAACAAAGTTGCCCGTTTAGAACTTCTACAAATCCTTAAACCCCTCCGCATTC
AAACGGTTCAACTCGCTGCTTTGTTTTGTGTTTGTTTCCTCCCCTTAGCTCCCAAAACATTTAATATTTTGTTAGACGA
TAGTGGGCTTTCTGACTAATTTTGAAGGATAATTTACATGACTCTTTTTACATTTTACTCTTTATAATTATAAGGTTTG
AGCCACAAGTATTGTAAAGGAACTGCTTTTTGTTTTCTTATTTTTCTTAAGGAAATACTTTATTTTAATGGCAGTACTT
TTGGATTTATAAATACTCCATGCATCATAGTGAGTCCTGAATTCAATCCTGAGTTAGTGTGGAAAGGAAATAAGAGTGA
TAAGAAAGCGCAGCACAGATCCTGCAGCTCTGTGATAAGCCTTCGCTCTGTGCTGGAGCTGTGGCCACCGCGCCCCCCC
CCTCCGCTCCCCAACCCCAGTAACTACTGTGTTCTCCCTGACGGGAGGGAAACAGGAACAAACACAGTGAGTCCTTAGC
ACTCAGCCATGGCTTATGTGGGCTGGGGACATGCAGTGGTGCTCGTTTGCATAGGCCACATGGCTGAGGTGCTCCACGT
TTATCTTTTAGAGTATTGATTCTCTGTTGATGCTGTGTCCTGCTGACAAACATCCCTCACAGGCTGGTGAGCTCTATTT
CATCTTAATGCGTGCTGCACAGATAGTAGCTCAACAAAGAATAGGGTTTGGGGGTTTGGGGTTTTGTTTTAGAGAATGC
AAATTTTTATGGGGAAAATTGAAGCCTTTTTTTTTTTAAGTTTAATAATTTTGTTCAGAGATCTAATAGATATCCAGTG
TCAGTTTCCAAAGACTGAAGTCAGAAATGTCACCTGGATCAAAACCCATGAATTTAGATACTAGAAATAAAATGGAGCC
AGGCACAATACACCGTGCTTAGGAGGCGGAGGCAGGAGGATCGGAAGTTGGAGGCCACCTTAGGCTACATACTAAGACT
TTGTAACAGTGCAGCAAAGTGTGAAATCTAAGTTCTCTCATCCCCGGAGCCCACAGAAAGGGTGTGACATGGTTCTTCT
CACCGTCAGGGGACAACATGGTCCCCAGGTAGTTTTGATTTTTCAAGTAACTTTGTTTTTAAACCGTAATGTGCCTTAT
GGAACCTTACCAGATTCTGTCATCTGCTCCGGAGTTTCTGTGAAAGCTGCCGTCTCCAGCCAGGGTCTGTCGGCTGCCC
TGGGCTGGAGGCTGCTTGTAAGTTACAATGAAAATTGACCCTAGGTAACGAAATGTTAGTGTAACACGTACAGTATTAA
TCACGGCAGTGGTTTTTGTTTTTGTCTTTGTTTTTAATACATAGACCAAGCATCTGAAGTTCAGGTGACGATGATGCTC
ACCGAGAGCTGCAAGCTTCGAGGTCTGCACCACAGGTGAGAGCGAGGCTGCGCTTCAGCACCGAGCACAGTGCGACTCC
GCACACTTACTCACTTTTTAAGAATGTTATGTCTTGTTCAGAACTGAATTCTTTTGGAAATTCTTTATTTGTTTTCCTT
CTGAGTATAAAGGTAAATGCGTGCTCATTGAAAGCAATTTGTAAACAGCAAAGGACGAAGATGGTAGAGAACAGGATGT
AAGCTATGTAAATAATAAATGTGCACAACTAAGCTTTCTAAAAGAGTCTACGTATCATGTACCTGTCTCCCTTTAACAA
ATATGACAGGGTGATGCATACATTAAAGAAAATTGCTACAAAAATTTATATCTATGGAACACCAAGGCCAAAAATAATT
AACCATCCATCCTTAGATACAATGAGGTTAATGGTCTGCCATGTACTGTTGAGTGTGTATGCATGCCAGTGTGTGTGTG
TGTGTATGTGTGTATGTGTATGCATGCCCGTGTGTGTGTGTGTGTGTGTGTGTGTGTGTGTGTGTAACTACCTGAGATC
TTGTATCTAGAAATAGCCATCTATGTATTTGTCTGTAGAGATATTTTATAATAAATTTAGTGTGTTTCCAGTGTACTTT
TAAAAAGGACAATGTTTTTTACCTTTAATAAAATTAATTTCTTTATGTAACAATAAAAAAAAAACCTGTTTCTAGGTTT
TCATGTTGGTAACTGTAAATCCCTGTCCCCATTTTAATAGGCCACTTAGTGGTTTACTGAATGACTGTACCACGTTTTA
TTTAATTTATCTCTTATGTATGCTCTTAAAATCATAGTATGATTTCACAAAATGTACCTATTGGAAGAACTTTTAACAA
CTTCTTCTAGACCAGGAATGATTGGGGACAGCAGCATCAGTATCAAGGCAAAGTTTTTGCATGTTTGTTGACATAGTTT
CTATATAGCCCGGGCTCTTCTGGAACTCACTATTTAGACTCCACTGTCTCTGCCACCCGCGTGCTGGTATTAAAGGCAC
TTTCCACCAAGCTGAGCTGGCAGTCGGGGTATGTTTGTTGGTTTGTTTGAAGCATCATATAGAGAGGTCTAGGAGGTGG
TCATGTCTCCGACCCAGAGTTGGAGGGGTACAGACAAGTAAATACCTGGAGCTCATTGGGCAGCCTAGCTGAACCATTG
TGTTCCAGGCCAGACAGAGACCAAAGTGGATAACAGTTAAGGAAGGCACATGATGTTGACCTGTGACTTCTATGCACAT
GCTTAGACTGTACATACTTATATATTCCTACATGTATATACACCACACACAAGTATTGTGTAGACTCTGCTTAGTTTGT
ATGACTACTGAGAGTTTCACATATCTGAAAAGTGAACCCTGACTCTGTGTGTTAGAAGGCTCTGTGGGCTTCTGGGAAG
GCCTTGTGATGTGTGCAGAGGGCACCATTGGCTTCCATTTGGACTTGGGCTGTTACTGAGCTCTGATAAAAGTATGAAT
ACACAGAAATTCCTTCTTTGCATTTTGTTTTTACTTTGGGTTTTGATGGCCTAAAAAGATGACAGCCACATGAAAATGA
GTTCAGTGGTAATGAAAACGAGACAGATATTTGGCATTGTGGTGGTGTAAAGAAAATAAGCCAAGAGGAGAAGACAACT
GTTTGGACTGAGATTAAACACAGCATAATTCTTGGCTTCTGATCAGCTGAGATGAAGGTGACATTAAAGTCTCTAAGTC
TCAGAAGCAGGGGGAAGAGAAAGCGCGTTGTTAATAAGCTCTTTTAGTCTCAGATCCCAAGACGGAGGTTTGCATTAGG
TTCATTATTTAATGTAGATTCTGATAATATAAAAGTAAATATTCATTTTCTAAAACTCCATTGAAAAACGAGGCTTTTG
AAGAAAAAGTTGAACGCAATATTGAGAAACAGTGAGGGTATTCCTTGGAAGAGTTGAGTAATATAACTCAAGAATGTTG
CCTTCAATTGGCCAGATTCAGCCCCAAGAGTAGAAGTCCTCACTTGTTGGGAAATAGACAGCACCCCCCCCCCCCGGCT
ATATTTGCTTTAAGAAAGGAAGGAAGGAAAGGAAGAAAGAAAAAGAGAGGGAGGGAAGAAAGAAACTAAGTTATATTTG
CTAAAAGCCAGAAACACGTCTGGAGCTTTTAGACCCTTTTTAACAGTGTTGTGAGTGAGTGCTTGATGCTGACGCAGAC
TCTAGAGGAAGCACCTTCTGGCTGATCACTTATGCTCCCGGCCAGTTCCCTGACCCTGTGAAGCTGTAACCGGCAGGAC
AGAAGCACGTGGCAGGAGTTAATGCAGACAAAGCCACAGACTTTTCCCAAGTAGGAGCTTTAGATCTACCCTAGCCCTG
CGCATCCCTTGGCTGAGCAACCTTCCAGGCAGGCACTTACGTTCTCTCATGCAGCTTTAATCTGCACTGCTTCACAGCA
TCCCTCCATGATGGGCTAGCAGTCTCAGACACCCCACAGAAGGAGAGGCGAAGCAAGTTGGTCAGAGTTCATGTCATCT
CGGCTGTGAAGTGACGTTAAGATCCCTAGTTGTGGCAGTAAAGCTGCTGGTATGCTCTATTCCCTGTAGTCCTCCATCT
GACCACACGCAGTTAATGGAATACTCAAGGCTGTGCGATTGCTTGCTTCAATTTCATTCACTAACTGCCCGTTTGTACT
TAGGATTCAGGTTGGTGTAGAATAATAATAATAATAAAAAAGGTCATCTGGTTTTTTGGTTTTTTTAAAAAAGATTTAT
TTATTTATTTCATGTGTATGAGTACACTGTAGGTGTCTTCAGACACTCCAGAAGAGGGCATCAGATCTCATTACAGATG
GTTGTGAGCCACCATGTGGTTGCTGGGACTTGAACTCAGGACCTCTGGAAGAGCAGTCAGTGCTCTTAACCGCTGAGCC
TTCTCTCTAGCTCAAGAGTAATCTTAAGATCAGTACCATAGAGTTTATTGTGCAGGCTCAGTGCACTCAGCAAGAAATG
TCACCTGTTTTCAGGTGTCACCTTTTCATTGGTTGTAGTCTGTGAGTCAGAAGGTTTGCTTTGTGTTTTTACATTCTGT
GATACAGGTTAAGAATCCCTGACACGTTTGAAAGCATCTTGACATTCTAATTTTTTTGTTAGCTTTGGTTTTTCTACTG
GAACTTGTAAGTTTTCTCATATTGAAATGCTTGCATAAATTAAAAATAAACTGCTTTCATTACTTCATGTCTGAAAACC
CCTAAGCCGTTTTTTGTTTTTTTGTGTTTTTTTGTGGTGTTTTGGTTTTTTTGTTTTGTTTTGTTTTGTTTTTGTGGTT
TGAAGTCCCCATTGGCCCAGAATGCCCAGTGATGGCTGGCCCTTGTTAATGCATAATGACAGGTAGCTTTAGGGTTGTA
AGCATGCTCAGCATGGGAGGCAGTTAGGCCCAGCCCCGAAGCCCTGCAGCCCCACCTCGCCTCCGCCTTCTCACCTCTC
CTTTACCTCCATCTGTCCATTCTTCGATATCTCAGACCTTTCTGTTTGTCCTCCTTTCCTTTGTAAAATGGGCAGTGAA
GAACAGTCATTTATTCTTGGAAACATTTTCATAAAGCTTTTTACTATTTCCAGAGTTTTTCCAGGTTTGGTTTTTGTGT
ATATGGGTGTTTTGCATGTATGTGTGTATGTCTGTGCACCACATTATGCGGGGCCTGAGGGGGCAGACGAGGCATTGGG
TCCCCTGAGACTGTACTTAGAGTCAATTGTGAGGCACCATATGAGTTCTGGGAATCAAACCTGGTCCCTCTGCAAGAGC
AGCCAGTGTTCTTAACTACTTAACCACAAGAGTAAACATTTTGGTTTTATTTATCTTATTTGTTGTGTCTGGACAAATG
CCATTAATTCTGCTAAGCAATTTCAGTCATGGGTGAAGGGACAGAGATAATCCTTTAGGGTTAAGGAAGTGGCCAGCTC
ACCTGCTTATCCTGAAGCAGGGTTAGCCCTGATTGATCCTCTAGGTGAAGCTCGAATTGGAGTGAGTGTGTGTGTCTGT
GTGTGTGTCTGTGTGTGTGTCTGTGTGTGTGCTTCTGGAAAGGAGGGGCTCTGCAGTCCTTCCTGCATTCTCCTTTATC
CTGGGAAGGAAATGTCCAGCAGCCCAGGGGAAAGCACAGGGGCGTAGAATCTGATGACACCTAAATTTCCTTCTCTTTA
TACTTGATCTTTGTCCATAGGTTCCTAACCACTCTTCAGCTGTAACGCTAAAGTCTTTGATGTGTCCGTCCAGTGCCTC
TTAGAGACTGATGCTTCTGGCAATGGGGACACTCTTAGGACACAAAGGCCAAGCAGAAACTTACTGTCATCTCACAAGT
CAGAGACAGCGCCTCTTGGTACATTTCTGCAGCTTCCCCTTTGTCTTTGTGGTTGTCCTGTGAATGTGTGGGTTGTGCC
TCAGTTTCTTTGAGTTCTTTTCATTTTTTTAAAGATATTTATTTATTATATGTAAGTACACTGTAGCTGTCTTCAGACA
CCCCAGAAGAGGGCGTCAGATCTCATTATGGATGGTTGTGAGCCACCATGTGGTTGCTGGGATTTGAACTCAGGACCTC
TGGAAGAACAGTCATTGCTCTTAACCGCTCAGCCATCTCTCCAGCCCGCTCTTTTCATTTTTTGATCGTTCAGTTGTAA
GGTGTTACTTTGTCATTCTTGGGCAACTTTTCACTGTTGATATCCTATTGACTTCTCTTGTTAATGCACCTTTTTATGT
TTCATATTAATCTTTTAAAAAACTTTTTGACATTGGTGTTCTGCCTCCAAGTGTGTCTGTGTGAGGGTGTCAGATTCCC
TAGAACTGGGGTCACAGACTGCCATGTGGGTGCTAGAACTTGAACTTGGGTCCTTTAGAAGAGCAGCCAGTGCTCTTAA
CCCCCAAGCCACCTCTCTAGCCCCCATGTACTCATTCTTTATGAAGCCATAAAGAACTAATAAATAGTGCTTTTAGGGT
ATTGTTATGTATGTGTTTCAAAAATGCATTAAATGTAACCACACAGGAGGTGGCACTGAGTATGTAAATTGAGTCTATG
TTATTTCTGGCTTAATAGAGAGGAGGTAATTATTTAAATACTTACAACCTTGGGGAAAGTGAGTTATTTTCATATATCA
GCTGGAGTGTCATTACACAGGAGGATGGGACGTGTGTGTGTGTGTGTGTGTGTGTGTGTGTGTATATGAGTGCCATGAG
AATTAAAGTATGCAAGATTGTTCAGTGCATTCTTATTTATTGTGTACATAAGAATTGTTTGAAATTCACATGTTACAAG
TTTGAAAACTAAGGCCAAGTGGGGGAGGGGAGCAGGGCCCCCATGCACTCCCATATCCACTCTCACAAGCATGCACAAA
CACACACACACACACACACACACACAATCACTCAGATAGTGAATCTTGTTTACATACACACACACACACACACACACAC
AGAGTGAATCTTGTTTTCAAAACTCAGGTTCCAAATTCTACTGCAAGCATTTGACTTTGTGACAGTTTCAACCTGTTGG
AGACTTTTGATGGTCCCGTTTTATTTGCAGCGGGGATGGGGCCTTTTTGATTTCCAGCGTGACAGTAAAGTCGGTGGGA
CAGCGTGATGATGAGCTCCGGGCCAAGCTGGCCAAGCAGCCATCAGCTGTCTGCGCCTGGCCTTTAGGGTGGGGATTAA
CATGGCCGTCAGCAAATCTAATACAAAGGAATTCATTCTGGGTAGTCATTTTTATTCTACAAAGAAAGCTCATACTTAT
GAGGACTTTTCACATCTGGTTTAAGAAGTAGGCCATTTGTAAATAAATATTTTAATGATAATCTTTTTAAGTGTGTTTG
GAATTTCATTTTGCTTTCGATTATCTTTATTACTTTTTATTTAAGATAAATCAGTAAGGTTTTAGATTTCACTTGCATT
TTTCCAAATCTCTTATTATTTTCTAGAAACCTCCTTCCTATTACTCATGTGTGCATAGAAGAAGGAGAAAAGCCCATGG
TGGTATTGCCATACATGAATTGGGGGAATCTTAAATTATTTCTTCGGCAGTGCAAATTAGTAGAAGCCAATAATCCACA
GGTGAGAAAATTTCCCTAAATATGAAAAATTCCTAATGGTTTTGCAAGTAGATATTAATAACCACACACATAGTGTCTA
AAGATTAAAAAAAAAAAAGACCTCAGAATGAACCAGGAGATATTTATAAGCTGTCGATTTAGAGGACCGTGAAGATGGC
CTGTGGCTTCCCAGTGGAGCACTCTTGGCCCATGCTGTTTCTCATTGTTCGCCACACCTTCATTCATAAATCACCTCTT
ATGTCCTATGACAGCATCTCAAAGTCTCTTCCGGAGTAACTTCTGAAGACGGCCTAGGATTTCCTTTCTTGGAATAGAA
ATCATAGCAGAGCGGTCTAACCATATGGTGCCAAGGGCACTGAAGGTTGGAGGTCAGGATCGTGGGGGATAATCAGGAA
TATCCTTAATGTGCCTGACTGTGAGACGCCACGGTTTAAGTTTCTCTCTTGTCACTACCGACGTGCTGTGGTAGTGATC
AGAGAGTCTGTTGGGTGCTTTGCTGTCTGCTATATTTTCTGTTCTTGTTAAATTGATTTTAAGACTTAAAATAGCATAC
TTCTTGTAGTTAATAAGAAGAACAAACTCAGATCTGCACTGAGTATTTGACTCTTAATGTATATGATATGTCGTTTAAG
CTAAAAGACTAAAGCTCTGGTTAGAACCATGTAGTTAGAGGTCGTGGTCTGTGGGTGTCACCAGGAGAGGAACTTCCCT
GCCCAGCCTGCAGTGCCGGCGGGCATCTCGAGGAGCGTGTCTGCAGAGAGACTGGTTTTTGGTAGAATGCTGCCCCCAC
CCCAGGGTGGTGGTGGTGGTGGTGGTGATAATCTGATAAGACCTACTACTACGAAAGAAAAGAGCCAGTCACTAGAGAG
ATACATGAAAATGATAAGTGTCATGGATAAAGTCTCATCGGTGGTAAATCCTGCTACCCAACAGGGGCTTTTGTAATGG
ATGAACAGTATTCCGTGCTGCCAGAGCACATCTTGGTTGAGAAATAGGTTTTCAAAATCTCAGTAAGTAGGTCCAAGGG
AGTGTTATGGGGTGGGACTGTAGACTCAGGTAATCAGATCCCAAACTAGTTCTGCAGTATCTACAGACTGTGTCATTTC
TTTTCCTCTGTTACCACAGGCAATTTCCCAGCAAGATCTGGTCCATATGGCTATTCAGATTGCCTGCGGGATGAGCTAC
CTGGCGAGGAGAGAAGTGATCCATAGAGACCTGGCTGCTAGGAACTGTGTGTAGGTGTCCGCCGCTCCCTGGGCTTGCC
CTCTGTCTGGGAGTCCCGGGGCACACAGACTGTTTGTGGTGATGCTGCATCTTAACACCCTGCTACCTTCTATGTTCAT
GTCTCTCTCTTCAGCATCGACGACACTCTTCAAGTCAAGATCACAGACAATGCCCTTTCCAGAGACTTGTTTCCTATGG
ACTACCACTGCCTAGGGGACAACGAGAACAGGCCAGTGAGATGGATGGCTCTGGAAAGTCTGGTTAATAATGAGTTCTC
TAGTGCTAGTGACGTGGTAAGTACTGGAGCCCAGGTCAACAGCATGTAGAGAAAAGCTTTCTGTTTCACTACAGTCAGT
GTTTTGTTCTTTTAAAAATCTTGGTGCTGTTCCTTGAAATTTTCATCCAGAGAGCCTGTGTACTTAGCTCCCTCTTGGC
CCACTTAAAGCAGAGCACCGGCCCAGATCCTGTGTTCTTGCTCACACCAGCTGAGGCAGCACCATTCCCACTGAGGGGC
GCTGAGGTTAGGGAGCGGGCGGCCACTATCATCTCCTTGCACAAGTCTCAGGATGCCTGAGTGGCTACTAAAGGCAGAA
TGGTTGCTTTCTGAGCATGCTCTCTTCTCAGTCTGCAGCCTCTCTCATCTGCAGTCCTGACACTGTTCCTGTTAGGTGT
CAGCGTAGTTCTTTCTCCTCTTCCAGAGCACAGAGTTGAGCCCTTCTGCTCAGTGATGTGCTTCCAGAAGCCGCATCTA
CTCGTCCGTTGTAAGGTTCTGTCCCGCTACTTTTTATTCTAGTCTAGATCATAATCAGCCCAGACTTGGAGGCGCGGGC
CTATCGTTCCAGACCCACCTAGGGTACATAGTGACTGTGTATCAAGAAAGAATGAAAAAGTAATATGATTTTTGTTTGT
TTTGTTTTTATCTCTTGACTGTTGCACACTGTAGCTGTGTATTTGGAAATTAGATTAAAAAGTTTGGCTATTAAGGTCC
CTAAGTCATCATTTGACAATACTACATTACTTGTAAAATAATTGGGATTTGATCTCATGTTTCAACATCTAAGACCTGG
GTTGATTGTGTTTGGGCGTCTGGCTTATTTTATTATTCAGAGCTGCCTTTCCATTTCGGCTTGTATGCTTCACACGTCT
CCCTTTAATAGTGGGCTACTGACACAGCTCCTACTCGTTACTTACATTGATTAGTGCACATGCTTTCCCCCCGTGTATT
GATTTTGCTGGCTCTATAACAAATTGCTCAGGGCTCAGATATAAATGGACTAGACATTATAAGTGTATATCATGCCTTA
TAGTTTTCATAATTGTTATAATTGTATTCAATTTATATCTGAGAGGAAAAAGAGCCTTTTGTTGGACTAAAAAGGGGAG
TATCGTTGAGGTTTGGCCTTTTGCTATGTACTGTGATGCTAAATATCAGCTCCCAAGGCCTGCTGGACCTCAAGGACTA
GAGAATCTACACAGAGAACCGACTGACAACGCTGTGGCCTTGCCCCCAAGTCATCCCTGATTGGTGAATAAGATGCCTA
CAGCCTGTAGCTGGACAGGATTGAGATGGGCAGGGCTCGGGGTTCCCAAGCTTGGGGTTGAGAAAAGGGAGGAGGAGGG
AAGAAGGAAGGAGCCATGAATTAGGTGAGTCAGTCCTAAAAGGACAACCATGAGGACTGGCAGTGAAGTTACGGGCAGC
CCAGATGGAGCATGGCAAGTGATAACTCCGGGTTACTAATGGGGAAATAGATTCTAGTAGTGTAGAGGATAGATAGCTG
CCCAACTCTAGTGCTGATTAAGTCTTGTTATGATGATAAAAGTTTCGTGTATTTTATCTGGGAACTGAATGATCAAAGG
TGGGGTAGAAACCCTGACTTGAGATTAAATAATTACAGCAATATTTTATTGCTAAATTCCTTTGGCATAACAATAGTAC
TTGGTTTTCTTATAGGTCTGTGGTCTATTTAAGCTAGGTTCTTGGCCACCCAAGCAGTGTCAGGCATGGGTTTTGTCTC
ATGGAGTGGGCCTTAAATCCTGTCACTAGAGGTGTCACTTGGTGGAGAGATGTCTAGTTGGAGGATTCTCTCCTCCATT
ATTTGGTGACTCCATTTAGATTTCTTTCATATATGTATGTATTTTAAGAAATCTCTGTTGTAGGTTTCCATGTGACTCC
TCAAATGGCCCTCCTTCATTTTGTTTTGATCATTGTGAGTCCAGTACTGGACATCTTAACATAATTCTCTAAATTTAGA
ATACCAACTCCCAGTTCAACAAAGTTCTCCCTCATTACAGCCCATGCTGGTCTTGGGCATGAAATCTTGCCTCAGCCTT
CTAAGTGCTAGGATTACAGGCATGTGTTTTGTCTTATTCCAAGTTGAATTGAGCTTAGCATATTATTGTAAGAATGTCC
CTTCATTAAATTTAACGTGGCTAACTCCTAAAAATGATCAGATTTTTCCCTTAAATTCTTCCAGACGCATTTCATATGC
ATAAATACTCCCTATAAGTATCTTTTGCCTTGAATACTTGGGACCAAAAGAAATATTTATGTCTTTTCCTGTGACTATG
ATAGGCTGTTAGTTTAAAATTCTGCCATCAAGTTGGGGCATTGCATATTGTTTTAAATTCTTAAAGGTTATTGTTACAT
TCTAACATTGGGGTTAAAAATGCTAACATGTTGAACACATGAACACATGTTGACTTTGCTCTCTTTGGGTGGAGGTGGG
ATTCGTATTCATTCTCTCTTCTCTCTCTCTTTTCTCTCTTTTCTCTCTCTCTTCTCTCTCTCTCTCTCTTTTTCTCTCC
CTCTCTCTCTCTCTCTCTCTCTCTCTCTCTCCCTCTCCCTCTCTCTCTCTCTCTCTCTCTCTCTCTCTCTCTCTCTCTC
TCTCTTCTAGGCACAGTTTCTCTGTTTAACCCTGGCTGTCCTTGAACTTGCCCTGTAGACCAGGCTGGTCTTGAACTTA
AGGAGCCAAGCACCTCTATCTCCTGAGCGCTAGGAGGGGTTGTAAAGGTTGTACACTGAGGTTGAAACTCAGTGTCATT
TCTTAAGGGTGCTGAACAGTTTTCACCATCAGGTACTAAGAACTGTAACCCTGCTCCCACTGAATCTGCACATGGGAAG
TGCACACTTGCAGGTGTGTAAGTGCATACTTGCAGGTGTAGCTCAGGACCCTTTTTTCTCCTTGAAAGAACCTTATAGT
TCTGCAGTTTTGTAGTTAAGGAGTCTTCATGATTTGCTTAGAAACACACTGGTTGGTTGTTTTGTCATAATAGTAACGC
ATTGCCACTTTGGGCTTTGTTTTTGTAATTCTATCTGGAAACATCCAATATGTTGGTACATTAAGATTCTAATAACGTT
AACATCAGCTTTTAACTGTCAGCTTAGGAAGTACACACAACCAGATCCAGCTAGTTACGAATGTCTAGTATGCCAAGAT
GGGACCTCACATAGGCACTCTGAAGACGTCTGGGTATTGTTCTTGTTCTATGTTTTTGCCAAATGTAGGCACAACTTCA
GATGTCTGTTACGACTTTTTTCCCTTTATTTGAAAAAATACTTTTTGATTGATGCCTCCTTTGAATTATTTAGATAATT
ATAGTAGCTAACACAGTTCAGCTGTCAAGAGTCTGCCACCGATTGAGTGGTGAATGCAATCAGGAAAGCACAGTTGAGA
GTTTCATGTTGTTTTTCCTCGTCTTTGTGGTACTACATTGTGTTTAAAAAGCATTTTCTTGGGAAAAACAAATCAAAGA
AATGACTTCCATGCTAATCTTATCAGCATGGTTTATGGCACTCGGGGGATCCTTTTTAAGGCATGTGAATAGTTACTAG
GCCATAGAGCAAATCAAATGCCCCCCATGTGCCTGCTGTTTCTTTCTAGACACCGGTGGACATTGTCCTGGGAGCAGAG
TCTGCAGTCATTCAGAGCCTGCATCTGCAGCATGCTCCATCTTGCTCCAGTCCGCCAAGTGCTCTAGCGGCCATCGCCA
GATACTGAGTAGGCTCAGTCAGGAGACTCATGTACAGCGGGTGGTGTCTAAGGGAAAGCTGGAGTTTCTGAAAGACGCT
TCTTATTTTCAAAAGCAGAGAACTCTTTCTGTCTCATATTTTCCATTACTAATTTTAGGTAGGGCTTAGAAGATCCTCA
GTAGTTAGTTGTGTGTTTCCTTCATGGTTGCAGATTTTATACACCAACAATCTTAGACCTATTATTTCAGTATCAAATT
CACATTAAGAGAATTAGTGTAGGGACAGAAGAACAATGTAGACATGAAAGGATCAGTTTAGACCATGGTTTAGGAAATA
GAGATTTAAGATTTAATGTTCTTGATGTTAGGGTCCTGCTTCATTGTATTGCTCTAGCGTTGGTTGTCCTGGCGTTTCT
TAAGAACGAGCAGTACAGGGATCACTCTAAGAACAGTTGCTGTATTTCCAGACGTGGTCGACTCCCCTGGCAGTGTTGT
CTGCAGTACTGCTCTCTCAGGATCTCACGCGTCTCTGAGCATCTCTCCTCTGGAGCGCTTTGGAGACGTGCTCCTACTC
TCTGCTCCTACTGTCTCCCTTAGAAGACCCCAGGATTCCGATGAAGCCCTGTGCGAGTGTCTGCTGGCGGAGAAAGTGG
CGTGAGCAGCCAGTTCTGTGATAGCCGTCGGTTGCGTGTAGGTCTGCAGGTGTCTAAGGATTGGTCACACCAGCAGCTG
CAGATGCTGGCTTTTGAGGAAGGCGGATAGACCCAGTAGCTCAGGACACAGGCTGCATTCCTCCAGCTCTGCAGCCTGG
GGAGTCCAGCATGAGGGCACTGATCAGTGTCCTGCTTTCTGCTATTTCTTCACATGGCAGAGGGAAGAGTGGGGTTTGC
TGAGGTCTTTATAAGACTTTATAAGCTCCCATTCCTGGGAGCTCCACCTTTATGGTGTTAACTCCTCCCATAGCCCCAC
CCGCTAGCTTTATCACACTGGGCATCGGGAGTTCAAAATGTACACATGGTGGAGGCATGGTGGAGTCTCTCAAGTTCTG
CTGCTGGGCCTCCTAATTCACACCCCTCATGTAGTAGATCGCTTTCATTCCTTCCTGACGTTCCTTCCTCATTTGCCTA
AAATCAGTCTCATCAGATGTGAGTGAGCCTCAAGGTATGATTTATACTCAGGTGAATTTGTTTTCAGCTCTAAGTTTAG
GAAAGGAAGCAAGTTACCGACTTCCAGAAACGCAGCGGTGGGACGGGTTCAAGTTGGTGCATCTGTCTCCAAAAGCGTA
AAACAGGAAGGGAAAGAAACCCAACAAACACAGTGCACCTTAGACTCAAGCAGGCCTCTAGCTCAGTGCCTTGCCATCC
AGGACCCTGGTCCCTTCATCAACAGCTGCCCATGAAAGTTCATTTGTGGCTCTCCACTGGGGTCCCAGCCAGGCAGGGC
AGAGCATGAGAGTATCCCGTCACACGTTTCCAGTGAGTGCTAAGGTTTCGTCTCAGTTAACTGGCTGGGGCGATTGCTC
TGCTGAAGCCTGTCTGGCATTTTAAATTCCCAGAGGACTCACACAGAAGCTGCCCCATTCAGTGACCTCACCCTCATAC
GTTAAGATGAAAACAATTGTGTACTTTCTGACAAACCATGCCAGTATATATTGTTCATTAAAAAAAAAAAAAAAAACCT
AGTTTTTGTCCTTCATTTTAAATAACAAGGTCAGAAGCTATGTCTCTTGGCGCATGTCTGTAGTCTCAGCACTTTAGGA
AGTTGGGGAAGGGAAGTTGTTGGAGTCTCAGGCCAGCCTGGGTTACAGAGAGAGACCTGCCCCCACCAGTGCCACCACC
ACCACTCGCAAAATAGAGGCTAGCATTCATCTGCACCTGTTACTTATACCTCCTTCTGTCAAAGATGGCCTGATGCTCA
CTGGTGAAAGGACAGCAGATTCTGAAAGGCTTTGCTATTCTGGCAATGCTGCCCCTGAGCACATGGATAGTGGGGGAAC
TGTGTTCAACCCCCACCCCCATTCTCCAAATGACAGGTGGGAAATTCTAACCCCTGAAACTAAGACTATAACTTTAAGA
ACACCTAGGACTTCCAGTGACCAGTAGAAGCTGGAATTAGGAAGGAAGGGATCACCTTTTAGAGCAATATTTAATGTCA
TTCCATTATGGATTTTTTGTTTTGTTTTGTTTTATAGATTCTGTTAAAAATGTGGCTATTGTTCACTAATATAGGTTGA
ATAGCCTTCGTCCAAAATGCTTGGGTTTTTTTCCCTAGACTTAATACATACATACATACATACATACATACATACATAT
GCTGTATAAATGGGACTCAAATCTAAACACAGGTCTGTTTTGTGTAATATTTTTAATGATTTTGTGCATGAAACAGTTT
CATGGCATGGAAATTTCTTTATTGTAGTGTCAGCTCTATAACTTAGATTTTGGTGTGTTTTGCATTAGGGATATTCAAC
CTGTGAAAGGCTTTTTTAAAAACAATCTGTGTATTTTACACAGTGTCTCCAGATTTTGTTCGTACTGAAACAGTAACCT
CCAGCTTTGTGCTCTGGGTGTGGATGTGCTGTGTGCCCCACCCAGCTCTGCCCTTTCACTCACTGAGATGTGTGCTTGG
CCAGCCATAGGTTTCACCTGCTTCCTCGCCTGGTAACCTAAGCTGCCAGCGTGAGGTTCAAGGGTTTGTTGTGAAAACT
GAATGTGATTGGAGGCTCATCGCAAAGCACTGGTGAGAACCCTTTAGCTCCTACACAGGTGCTGCCCCCTCTCCCCAGC
GTTGACGTGAACTCAGGTTCACAGGTGGCAGCAGGTTGTCCCCACCGTGCCCTGGACAGCAGCATAGCCGCAGCTCTGG
GTGGTGGTGGAGCCTGCCTTCCACTGCTCGTTCTTCTCATGAAGGGAAGGCCCGAGTCAGCCGGCCGGGCCTTGCAGTG
CCTCTGCTTGGGCTCTGCGCTTACTGTTCATCCCCTTACTGGTTTTAGGTAACTCTGACTTTTACTCAGCTGGACAGTA
TCTTTTCAGGGTGTTCCTAAAAGTTGTAAATGGTGACAACAACACATTGTCTCTCTGTGCATGCTAGGGTTCCATCCCT
CGCTCTGCAAAATAAGCAGATCAGAAACCCATGACTGCTTCTATGTTATGTAATCTGCATGTCTCGCTTACTGAGGGAA
TCTTCTGTCCATCTAGGTTGTTCTCCATTTCCCACCGTAATTCGTTAACTTAGGGGTAGCATGGTGAATAGCCAGTGAT
AGAAGTGGTTTCTTTGAACGGACCTAGTTACTTAGACCAAATGATACAAATGTTAACATTGAAGAATTAATGCATTTTA
ATGCTTTCTTTCCTACACCAGCTGGAGAAACTAGCCAGTATGGTAGCTTTTGTTTTATGAGCAGTACTCACTTTATTTA
GGAGTTTGTTCAGTTGCTATTTGTGACCTGTCTGTAGTCACCAGCGCCCAGTTTTAGAATGTTCCCCTCATTGTGCTGC
TGTCCTCTCCTAGTGGGCCTTTGGAGTGACGCTGTGGGAGCTCATGACTCTGGGCCAGACGCCCTACGTGGACATCGAC
CCCTTTGAGATGGCCGCTTACCTGAAAGATGGTTACCGAATAGCCCAGCCAATCAACTGCCCTGATGAACTGTGAGTTT
TTTGGATCTCAGACATGAGCCTTGGTGCATTTACTATGTTACTATAAAGCAGGAAAGCACGTAAGATACTCCTTCAGAG
TAAAGAAAAAAGTAGAGGACAGAACTCAGTGCTGACCTCTGCTCTCCACAGACATGCACAGACACATGCATACAACCAC
ACAGACATGCACATAGACTACATGACAGTAAACACAGACAGAGACAGACACCTTTCTCATCCTGGCCTTGCCTTCCTTC
CTTGCCTCCATCATGGCGGTGGGGTACACAGGGCCTGGTTGGGATGGTGGCACAGCAATGTGTTGTCTACAGAGGCCCT
AAAAGGTTTCCCTGCCAGTTTTAGATAGTAGCTTTGCTGTAGATCCAGGAGTCTTAATTTCAGGTAACACTTCTTCCTA
GTTCTTCCTCAACAGCGTCCAGGACAACGCAGCCTGTTATTCTGACTGTTCTGTGTATTTACACAAAGCTCTGAACTTT
CTGAGTATTGTATTCTCATAAAGAACTGAAGATGGTTGTGTGTAATCCAAAGAACTTAACTTCCTTTAATCCTGAAGCT
GCTAACAGTACAGCTAAGCGATTGCTCATGGCTGTCCTCCCCAGCAGCCCATTAAACAGAGCACATAACTGGCAGGACG
CTGACGGAGGCCTGACACGTTTCCATGTCACTGCAGGTTTGCTGTGATGGCCTGTTGCTGGGCCTTGGACCCTGAGGAG
AGGCCTAAGTTCCAGCAGCTGGTCCAGTGCCTCACAGAGTTCCACGCTGCCCTGGGAGCCTACGTCTGACTTCTCTCCC
AGCTCCGCCACTCAGAAGAAAGTGCCTGTCTGTCACGGATGCCCCTCGTGCAGCGCAGTGCCTGCAGGGGCACACTGTC
TCCAGATCACCCAGCCTTAGCAGTGCTTCCAAACCTCAGCTTTTAACGATGACGTAATAACGCAGAGTGTTTTCTAGAT
ACCACTTTTACTAGGTTGAACCAAAAGGGGTTTTGTACATTTTTTGGCCAAAAATTTTTTTAAAATATAGTGACTTTGG
ACTAGGGGGTGCATTCTTTTAAAAAATGAATAAACAGTTTTAAAAATTATTTAGACACAGATATTTGGAATAGCTGTCT
TAGTGCCAACTGCTTTTATTCTTAATGTTTTACTTCATTGAAGTAATGTAGGTGACTCACCTTTAAAGCTATTTTAATA
TTTTGGTCACTACTTTTGGGAGTGGTTTGTCTTCAAAATGCGGTACTTTTCTTAGGAAAAACAACATTACGAAGTTGTC
TGGTTTGCCTTATACGAAGAAAGATAGTATATTAGGAAAATTGAAAAAGTAAAAAGAAAAAGAAATTACAAAGTAAAAA
TAAAAAAAAAAAAACATATCGCCCCCGCATGGAAAATCGCTTGTTTAGTGACCATGGCTCTGCTCACATTTGGGGAAGC
AGGTCTGAGTTCACATCTCAGTCAGCTTTCCTGTGAGCTGGAAGAAGGCTGGGGCAGGCTTGTGGAAAACAGTGGTGAC
CTTATTTATTTTTGCTCTCCGGGGAAGGAGAGGACACAGTTCCTGACAGTGACCCCTCTCTACTGCTGCGGTTCCCTCT
GTGCACGCCTGGGCGGAGCTACGCACAGAGCCGGTGCTTCTGTTGTTGTGGGTTTGGGGGGTTTTAGTTTTGGTTTTTG
GTTTAAATTGGTAATTTTTATGCTTATCTTCAAGGCTGGCTTAAGTATAAATTTGTTTTTTTAAAACACTTGAAAAATT
AAAGGACTCATTTTATATGCTGGTATTCAAAATACTGCTCACAGTGTGTGACTGTTGGTCGTGTCCTGAAAGTCTTGGA
GTCACATTTTATCCCCTGAGAGTTTGACTCAGGTTCCAAAACCCTAACAGAAGAACAGCTGACTCTGCTCAGCCGCCAG
GGCCTGTTAAGAAGTTGGAGTTACTCCTACAAGGACTTATCATGGAGAGAGTCCACAAATACATGTATGTAGTTACACA
CAGGTTTGGTCTACCTAAGGGATTGTCACCTGGGCCTGTGAAGTGACTGGGCCTGCAGCTACTGCCTCTGTGTCTGTCC
TCTCAGGGATGTGAGGGAGAACATGGGTCTGTTCTATTAAAATAAGTCTTGTGAATAAAGAGAGTATCTGAAAAGACAG
CTTCCACAGTCCAAGGCTCCAGGAGGCAAGCCAGGAGCTCAGTGTCCCGCATAGGGCGTCCTGCATATGGTGTCTTGTT
TATGATATGCTTTGTCCTCAAATGTCTGGGTTTTAAAATGCCTCCTTTGAACCTTTTGTAACTTAAGCCACTTTGTTAA
TAGCCTGCATCTTAGAAGGGATTCAGTCAATGAGTGCTAGTGCGTACATTACACACTAGTACTTCAAGTCAGCATCCAG
TCAGCCAGTGTGTACATTACCTACACAGAGCAGTTCAGCTTCCCTCACCCCCCACTTCCAACACTCAGTGCACTCTTAT
TGTTTCAGATGAGAACAATGTTTAGAAATCACAGTTCTCTGTATAGAAGTTGTTTTAAAAGTCATTGTTCTGGGGCTGG
AAAGATGGCTCCATGGCTCAGACTGCTCACAGCCCTTCTAGGGCACCTGCGTTTGGATCCCTCTGGCCTCCACAGGCAC
CAGGCATGTACATGGTGTCATAAACTCATGAAGGCACATACTCATATACATACGTATGTATGTACCCATATATATAACA
TGTGAGTATGTATACCCATATATAACATATCTGAGTATATATGTATATTCATAGATCTAGACAGAACTGTTTTAAGGAA
AAGTGTGGCTGTCTGACTTGTGTCCCGGTTAAGTCGAACTTCTGTTTCCTTTGGGGGTTTGCTACCTGTGCACATGTGC
ATGCTCTCTCGTTTCAGTAGATTGTTCTACTGAACTATGTGGAGATAGTGACAAGGGAAGAAAGGAAGAGTCCGTTTTC
CACGGCTGATCCTCCTTCAGTGATTTGTATAGCTTGTGAATACCGCCGAACACCGCCCCCCACATCACTAAAAATGTAG
GTTTTTAAGAAGCAAATTGATGGAGTGCAGGATGCGACCATAAGCTGTCTCTGCTGACAACACTAAAAAGTTTTTTGAT
ACAGTACCTTGCTGTGTAACCCAGGCTAAGCTCAAACAAGTGCTAGGATAGTAAACACCACCATGTGTGGCTAAAACTA
AGATTTGTTTCTAAAGTAGTAAGGACAGCTCCAGGATTTAAAACAAAAGAAACAAACAAAACAAAACAAAAAACACAGG
TTGAAAGTCATCATCATCAAACAAAAACCTAAGATTAATACCATGGTGCCTTGAAGTTACATTTGGAATCAATGTTTCC
AGTTATTTTTATATTTTGGCCTTCTGCTTTGTTGCCACCAAGAATTAGCACTAATACTAGATAGGGGCTTACATCGTAG
TGATGGTAACTAAAAACTATTCACTCCACAGATGCTGATGGCCCTGAAGATAGATGGCTCCTCTCTAGGTCTGTCTGTC
TGTCTGTCTGTCTGTCTGTCTGTCTCTCTCTCTCTCTCTCTCTCTCTCTGTGTGTGTGTGTGTGTGTGTGTGTAAAAGC
ATGAGGTGGATGTTACATTTCTTCCTATCTCTCCATCTTAGTTTTTGTCTATCTATCTATCTATCTATCTATCTATCTA
TCTATCTATCTACCTACCTACCTACCTACCTACCTACCTTTGGCTTTTCAAGATAAGGTTTCTCTGTGTAGCGCTGTCC
TGGAACTCACTTTGTAGACCAGTTTGGCCTCGAACTCAGAAAACTGCCTGCTCTACAGTGAGTCCTGGGATTTAAGACA
TGTGCCTTAGTTTCTTAAGACAGAGTGTCTCATTGACCCTAGTGTCTCATTGAAACTTACCAGTTTGCTAGGCAGGCCC
CGGGGATCCAGCGGTTTGTGCTTCCCCAGTCCTGGAAGCCATCACACTGCTTTTCTACTTTGGTGGGTGCTAGGGATAG
AATTTAGAACCTCTGGCCTGGTAAGGTGGCTCAGTTTCTGAAAGGGCTTCCCATTAAACCTGATGACTGGAGTTCAATC
CCTAGGAAAGAGAAAACTGCCTCTTGCAAGTTGTCCTCTGACCTCCCGTGTGTCGTAGCATGCATGCCTGTGAACACAA
ACAGATGAATATCATAAAGAGGATTATGACAATAACTCAGTTCTCTGTCCTTGCATGACAAGGACTTTACTACTTGAGC
CATCTTCCCAGCCCCATGTGCTGTGATAGGAAAATGGGAACACCAGTTAGCTGAGTCCTTGTGTGAGGACGCCACTAAC
GTTCTTGTAGGATGTTTCTGACAGCATCTTGCTGGAACTATATCACATGGGCACGCCTGGCTATTAAACATTCTAGGAA
AAAAACATTTCAAGAGTTATTTTATGTGTATGGGTGTTTGCCTGTGTGTATGTATGTATGTATGTGCACAGTGTGTGTG
TCTGGTACCTGTGGAGGCCAGAAGAGGGTGTCAGATCTCCCTGAAACTGGAGTTACAGATAGTTGTAAGCCATCTTGTG
GATGCTAAGAATCAAACCTGGTTTCTTTGCTAGAGCATTGAGTGCTTTTAGTTACTGAGCCATCTTTCCAGCCCAGAAG
TTGTATTTTGTTAGGTTTTTATTTAAAAGTGGCTTTACTGAGATATAATTAACATTGCACCATAAAATAGATGGGTTTT
GATATATTCAGTGTTGAGTGGTCATAACCATAGTCGAATTCAATTTGTTTCATTTTGGGTTTTGTCATATGGTTTTCTT
TTTGAGGCAGGACCTCACTGTGTACTCCAGGAGGTTCTCAGACTGTGGCCCAGGCTGCTCTTGCCTGGCAGCCTTCTTG
CTTTAGCCTGCAAATGCTGGAAGAAAGGGGGACACCACTGTGCTAGCTCCCCTGTTGAGATGTGTGGCCCCTAGAAAAA
GCCCAATGCCCATTTGTGGTCACCCCGCTTCCTTTCTCACTCTCAGCTTCAGGCAGTAACTGATCTCCTGATCTCTATT
CGGAACTTTGCATTACATGGAGCCATGTGGTAAGTAGTCTTTTGTGTCTGATGTCTTCTACTTAGCACATGGTCTTCAG
GGTTTCCATGTTGTGACATGGCCAGCAAATGCTTCGTTCTGCTGAAAAGTATTTCCTTGTAAGGATATGCCACATTCTC
AGTTGACACCTGCTTGGGGACACTTGAGTTTTCGTTTAATCAGATCGTCACCTGGAAACAAAAAACAAAAAGAAGGCTT
TCCGTGGTAAGGATGGGGAATGGCTGTAGGTGGCTCCTAGCAGGGTCAGCCACAGTGTAGAGATGGACTCTTGACCCAG
CTTCCTTCAGCACTGGGTTTCGCACTCCACGAGTTGTCAGACATGAAGGGAAGCAGGGTGAGTCTAGGAAGATTCAAGT
TAGCAGAGACCACTACTGAGGAGAAAACTTGGTCGGAGCCACTATCTGAGCTTTTAACTTCTGGCTCCTGGTCCTGAAA
GCCCTACAGTACATCATGGCTGCTGCCACTTTGACCTCTGCTCTTTTTGCACCAACCTGTCCTTGAGCTTGCAAAGTGA
AGTATGTTCTCTGTACTTGGTACTATAAAGTCTATCTCAGGGTGCTTTCGCTTTGGCTCTGATCTAAACCACCTAGGAC
CTTTGGCCTCTGGAAATAATGTAGAAATCAGCCGTATGCCTCTGCAAAAATTGGAGGTAAATGGTCTTAAGCTTGTGTC
TAGTGATACAAATCTTGGACTAGGTCTTGAGTCTTTATCTGCATGTATAAGAGGTTTGTTAACGTTTTCTTTTGGAGAC
CAAATCTCACGGTATAGCCTAAACTCTTATCTCCTACCTCCCCTCCACGAGTGTTTCAGCCTCCTGGGCAGTGGAATTA
CAGATGTACAGTACCACGCCCAGCTCGACATTTAATTTTAAATTAACTTTGTGTGTTGTGTGTGTTTGTGCACACACCA
GGCGTCAACATCAGATGTCTTCCTCGGTGGCTTTCCATTACATCATTTTTTGAGGCAGATTCTCTTCCTGAACTGAAGT
TCAGTCTAGTCCGATTGACTGGGAAGTGGACTCTCCTGTCTCTCCCTCTCCAGCCACACTTGACTTTTCTGGATGTGCT
GGGAATCGAACTCAGATCCTGGTGCTTCTGTGACCAGCGGGCTCGGGGGCGTCGGTCAGTGTTTCTCTGGCTTCACAGA
ATCACCAGCGTTACTATTATGAGGAAAGATCCTTTGGCTCCATCTTGTCTGGAGCCAGAATGGCCTTGGCCTGACTGGG
TCAGGAAGCAGAGTGCGTAGTACGAGTGTTTTAAGTTTTGTGTTGGAGTCTCTAGGCAGTGTCTCTCTGGCCTTGGCTC
CTCTTTTCCCCTCAGGACCCACAGTTGCCTTCACTGAAGGAGAGGGTTGTGTATTCTGGTCACCTAAACAGACTCTCAG
TCTGTGATAAATGCTCCCTTATGGTCCTCCTCACCTCTTCTGGGAAGGCAGGAAAAGGAAGAGACGGGCCTGGCCTGCT
GGACTTGGTGGGAAGCTCCCCGCGCCTCCTCCGCTGGCCACTCAGGTCTCTGCACGCTCTAGGCTGCCCCACTGGCTCA
CGCTTTGCATGTCCCTATTGAAGGAACACTGATATCTTTCCACAGGATGCGGCCCTTAGGTGCATTAAAACAACATAAG
ATCGGGAAGTAGATAGAAATACTGGATTTTCCCATCACCGCTTCAGTGTAGTGCTGTGTTGTAGAGATGGCCAGCTGAT
AATGTAACTCCCTTGTTTTACAAATGAAGGAAATGAAAGGCGCTTTTGCTTGCAAACCTAAGATGTATAGCAGGCTGTG
TCTTATGTTGGTGTATTATAGGAAGTGGGTGTGCTTTTCAGGAAGGGAAATTAATTTGGTAGGATGCTGACTAACACTC
TGTTAATAGGATTTTTTGTTTGTTTGTTTGTTTCCTGAATCCATGAACAGAGTGCTATTATTGGCCAAAACCCTTCAAA
AATGATGTTGCTGGGAGGGAAGGTTCCAAGGTAAATGGGCAGAAGTGCAGTACGGGTCTAACGTCAAGAAATTCCAACT
TTGGTCTGGAGTAATAGAAACTCAGTAAAAGGCTCACATCAGAGATACACCCACATGTGTTTTAGCAGTGTTTGTGGTA
GGCAGATGTTGCCACCGTACATCAAGCATGGTACTTGTACTGGCTAGTTTTGTGTCAACTTGACACAGCTGGAGTTATC
ACAGAGAAAGGAGCTTCAGTTGAGGAAATGCCTCCATGAGATCCAACTGTAAGGCATTTTCTCAATTAGTGATCAAGGG
GGAAAGGCCCCTTGTGGGTGGGACCATCTCTGGGCTGGTAGTCTTGGTTCTATAAGAAAGCAGGCTGAGCAAGCCAGGT
GAGGCAAGCCAGTAAAGAACGTCCCTCCATGGCCTCTGCATCAGCTCCTGCTTCCTGACCTGCTTGAGTTCCAGTCCTG
GCTTCCTTGGTGATGAACAGCAGTATGGAAGTGTAAGCTGAATAAACCCTTTCCTCCCCAACTTGTTTCTTGGTCCTGA
GGTTTGTGCAGGAATAGAAACCCTGACTAAGACAGTACTAATCACCAAAAGTCCTACAGAGTGGCCTTACCCCCATTTT
ACAATTGAGGAAATGAAAGTTGAGCTTAGTTGCGTTAAGTAATGCTGTGTCTTAATCCAGGGAGTCTGTCCCCAAACCC
TGTGCTACTGAGACGGGAGGAACGGGTTTGCAAGGGAGGCAGGACACCTTAGGAGCCCCTGCTTGTTGGTTCCAACATT
TCTAGTGATATAAAAGGTAGTGTTAGTGTTTGGAGTACCAGGTTGGGGGTGGGCTTCATAGGAACTTGAAGTGTTGTAG
AGGGAAATTAAAACGGGAGCTGCCTACAAGCAAATAAGAAGGGCACACAGCTAGTGTAAGTCACATTGGGGCTGCCCTG
GTTGGTCAGCACATTTTTCTTCAGAAATTTGGTTACAGTGGAGTCTGCTATAACAAATGGTAGATTAAGTCATTGTTTC
CTTCTTACATGGTAGTCCAAAGGGAGGAGGGTGGCTAAGAACCCGTCATCCTTTCGCCCTGCCCTTCCTATCAACGGCC
ATTTTAATGTGGCTGCATGGCCAGTGCTGGGTTCCAACCACATCACTGCGGCTCCCAGAAGAGGGAGCCTTTCTCAGTA
AGTGATAGAAAGGCCACCAAGACACTTCTGCTGATATCCATCGGGAAAGACTCGGGCACCAGCAGCAAGGACGTCATTT
AGAAAAGAGTCTCCCTAGGCAGCTGGCTGGGGAAAAAAAAAAAAAAACAGTTTGCAAACAGTGGTCTGTGGAAGAGAAA
TGTTGAGAGAAGAGCGAATCAAGAAGCTGTGTTTTTCCAGATAGGTATGAAGCTAGCAGCACTCTGGAGTGTAGGCTGA
TAGGGGAAAGGTGTTACCTGGCCATGGGCTCCAGTTAAGTATCTGGTCCAAGATACTGAAGATCTGAATACCTTGGGCC
TAAGTCTCCAGAGTAAATCTGGGACTGAGACAGAAAGTAGATGAATGAGAGCTGGTATGTGTGGCTAGAGGAGAATCTG
GATCTAAGCCCAGAGTGTCTTCGTTCCAGAAGATAAGCTAGCTCCCTTGCAGTCATGGTGTGGGAGGCAAGGGTTTGGA
GTGGAACAGGCACAGCATGGTGTGGTCAGAAGTGGCATCCTAGCACACAGCACCCTCTACTCTATGTTGGCTTGCTCTA
ACACAATACCTGAGGTGACTGAAGGAAAGAGAAGAGCATATGTTGGCTTACAGTTTTGTGGAGGTTTCAGTTCATACAG
GACCAACCCTCTTGCTTTTGAGCTAGTGGCAAGGCAGTATGGAATGGCAGGGCACACGTGGTGGACTAAATAGTTTCTT
TATGGGAGCCAGAATCCAAAGAGAAAGGAGCCGTGCAATGCTTACTTGAAAGGCATACCCACTTTTGACAGGAAGGCCT
CTAAGCAGTCCCCACCTCCTAAAGGCTCTACCCCCTTACAACTGGGACCAAGCTTTAACACATGGACCTCTGTGGGGAC
ATTAGCCCAAACGTTAGCATCATCTGGTCCCTGGCTTACACACATACACACACCCGCCTTGTGCCTTCACTTCTGATCT
CCTCTGTAATGTTGTTCCATACCTACTGCAGTCTAGCAAAGCTCCCTGTTCTATAAAACCCACCTCTCAGGTTCTTCAG
TATCCTTAGTCTCTGCTTGCAGTCTGACCACCATCAAATCCACACACACCCCCAACATCAGGTTATTTATAGCATATAA
GTGTCACATGAGCAGATGGGAGGGCATCTCACATTTAGACCACAAAAGCAGCTGGCCATGCTAGAGGCCCCTTGGCCCT
CTTAACACCAGGACTATCCAGTTGGCACCCCAACTCTGTCATTATCTTCCCCTCTCTCTTGCACTCTGACCCTGCTTCC
CACTCTCATCCTCCTCTCTAGCCGCTCCCAGCTTCCCTTGAACTCCATCCTAGTCAACAGCTCCTCCTTCTTGCTGGAC
AGAGTGTTCCTAGATATCCTCTCCGTTAGCACAGCCTCCCATGCTTCTCCTGGACCCCTCAGACTTGTATGCATGGTTT
TCTCTGCCAATGACTTTCTCAGCTTCCAGCACCCCTCCCTCCCTGCCTTCCTGTTAGCATTGAGTTACTACTTCTCAGT
GAGTTACCTCCACTCCACTCAGCGTCTGCCCTGACGTGGGCCCAGGGTCCTTCCTTCCTGGGGTAATGGCTCACTTTGC
AGGCCCCTGACACCATAGGTGCCAGGTTCAGTGACATTCTCTCCGTGGCATGTGTCAGCATATCGTCCTTGAACTGCCT
TCTGTAACTTTGGCTTTTCAAATCCTACTTTGAATAGTTGTTCTTAAATGCTCCAACCTCCCTTCTAGCCCACCACCCA
CCAGAGGTAATGGGAAAGAAAGCTTATGGTGATACAGGGGCAGTGGGCCTGTTTAGAAATTGTTCTTTGGAGCAAATCC
CATCTGTGTTGTCAGGAAACCAGCAGTTCAGTTCACAGGAATCAGCAGCGGCAGCTCGATCCACTCGCAAACACTTCAC
CAATATAGCAGCAGTCCAACCTAGCAGAGACAGCCAGGCAAGGCTTCACCAGTCAGCAGGAGGGAGCAAGACCAGCAGG
GACGCCAGGAGAAGTTCTTGGCTGTGCCTCTCCCAACGAAGCCAAGATCAGTGAAGACTTGAGACGAAGAAGGGTTGCA
CAGGAAGCCGCCAGTCACTGTCCATTGAGTCCTATGTATGCTCCCCCCAAACATCATGTGTCCTCCACAGGTCTTGCCT
CAGCACATGAGCCTGTCTTAGCAAAACTCCCCGTGGGTCTGTATCAGCTGACATCACTCTGCAGATCGGCCGTGGAGCC
CGTGGAAGCGGCAAGAAGCCACGGGAACCTCTCAAGTTCTTTGGTGCATCTCTCTCTGTGGAGTCAAGACAAATGGTGC
TCAACAATGCATGTAAGGCAGGCCAATACATGCATGTCCTTAGCGAAGAATTCTTCATCACACATCCTTTCATGTGCTT
GCTTCAGCAAAATGTCCTTTCACCTGTGTCTGCTTCAGCGAAACATTCTTTGAAATAACTGACTTTCCAAAGAAAACCA
CGTTTCCACTTCAGCCTTCCTTCCACACTTAGTAATTTGGGGCTCAAGCGTCTACCTCCCCCCACCCCAGCCCCCCAAT
TTTGGGTTCCTATGGTTCCTATGTCAGTCTTGAGCACCTGCCTGTCAGGTCTTTTCTGTGCTCAGCACCTCTGCAGGAC
CATCTGGCACCCCTCAACCCCAACATTGAACTTAGTCCCTCCTTAGTCTCCACAGGGCCACCAGGAAGCCACCCTTACT
GCTTCCTAGTGCTTCCTGAGCCATCTGTGGGCAGAACTTGTGGTCTCTTGCCGGTTCTCTCCAGACTCCATTGCCCCAG
CCAGCTTCCCTCCCCTACGCCCACATTGGTTATACATGGTTTTTGATTATCTGTTTTGATAATCACTCAGGCTCTGCAA
AATTGTTATGGGAGATAGTTTTGTTCAACCAGTGATACATAGGACCATGTGAACTAAGAGGGGTGTGTGTGTGTGTGTG
TGTGTGTGTGTGTGTCTGTAGGGAATATATGTGTGTGTGTGCTGTCTATTGTTGTCTTTCCTGAAACAAAAGGCTACTC
CACCCCCTCTGCAATTTCCTTTAGCCTAGAATTTATTTTTTTTAATTTATTTTTTAACTTATTTATTATTATAGCTGTC
TTCAGATACATCAGAAGAGGACATCAGATCTCATTATGGGTGGTTGTGAGCCACCATGTGGTTGCTGGGGTTTGAACTC
AGGACCTTCGGAAGAGCAGTCAGCGCTCTTAACCCCTGAGCCATCTCTCCAGCCCTAGCCTAGAATTTATTAAACATTA
CTTCTCACTGAGAAAATACACTTATGGAGTTCAATATTCTAAAAGTTTGTATTGGCAAAAAACAAAACAAAAACTAAAT
ATATTCCAAAGGCTTAGAGGAAGGTATCTAGACAGTTAGCAAACCTCCAAAAAAGAGAGATGGACTTTTATCCTTAATA
TTGACCTGCAGAGGGAGCCATGTATAGGGGTTTGCCTTTATTTTTTTATGAAAACCCTTCTGGTAGGAGCCTTTCCCAC
AGCCTGTCTTTATGGTACCACTCACACGCCGGCCCCATAATCACTCGGCCTACATACACAGCTAGTCCATAGAGCTGCT
TTCCTGGAGAAGTAGAAATGCACGCACATGACCTGATCTCTGCTTCCAGGCCTGAGAGCACAGGGCGCCTGCTGGGGGT
GGGCTGCAGCCTGTGGGCTGGGAGCCACTGAGGAAATGGCCTGTGACCTGATATCAGTCATGTCCTGCTTCATTGGCTC
TCTCAAAAAACATCACCTAGAATGCTTCCGAAGAGGTGACACTGCTGGCTGACCTTACCTGGGGCGGCCCTGAACCTAC
AACACGAGTTTTCTCTTTTCTTTTCTTTTCTTTTCTTTTCTTTTTTTCCCTCCCCTCCCCTCCCCTCCCCTCCTTTCTT
TTCTTTTCTTTTCTTTTCTTTTCTTTTTTTTCTTTTCTTTTCTTTTCTTTTCTTTTCTTTTCTTTTCTTTTCTTTTCTT
TTCTTTTCTTTTCTTTTCTTTTCTTGTTTTCCCAGACAGGGTTTCTCTGTATAGCCCTGGCTGTCCTGGAACTCACTCT
GTAGACCAGGCTGGCCTCGAACTCAGAAATCCGCCTGCCTCTGCCTCCCAAGTGCTGGGATTAAAGGCGTGTGCCACCA
CCACCCGGCACAACACGAGTTTTCAACAGTGGCCTGGCTCCTCCATACCTCAGAAATCAGGTTCCTTGTCACTTTTTAA
TTTAATTTTATTTTATTTTATTTTTTTGTAGTGAAATGAGTACAGGGTACCTTGTTACATAGTTAACAAATACACTTTC
TTACCAGGCACAGGCTACTAGGAAGTGCCTTTGAAATTGTTGACTGAAGTTCTACTGAAATACACTTGTGAACTTGCTA
CAATAAGCATTTGATTTCTTTCCTATCTGAGAGGAAATGTCAAACTCTGAATATAGGCTAGGGATTTATGGCTGGGTCA
ATAAAATCTTAAGAGTGAGGGAAAAAAACCCTATTTTTGAAGGCTCGTATGGCCTTTTCCTATTACAGCAACCCTGTCT
TTCAGGGTTATTTTAAAATACCATTCCGCATGTTAACTCTGCCTTCAGAGGGACAATAGTCAGCAGTCTGCCTCAGCTC
TGTCCTCCACTAACAGAGAATACACTTAGGTCTTACAATTCAGTTGTTGTTTCTTTAATAAAGGCTGCACTGAACTTAC
TTAGAGACAGAGCCTGTCTCATCAAGCAGCCCTGGCTGTCCTCGAACTCCCTTGGTTGACCAGGCTGGCTTTGAACTCA
CAGAGATCATCCTGCTTCTGCCTCCCACATGCTGGGGTTAAAGGTGTATGCTACCACCGTCCAGCCCCATAAATTGCTT
TTGTCAAGAGTATTTTATGACGGCAGAAAAAGAAACCTAGACACTGGCCACCCTCTATCCTTGCCCCGCCCCACCCCCA
CCCCCGACCAATAACTTAGGCCCAGGAAGGCTTGTTTTCATTTGTTTGTTCACTCCTGCTAGGTCAGGTTCCTTGGGTC
ACTTTCCTTGAGGTGCCTGGAATCTGCACCGTGCCTTGAAAACCATCTTGAAAGCCAGCCATAGTTATACATGTCTATA
AGCCCAGAACTCTAGAGGCAGAGGGAGGGAACCTAATAGAGGCCACCCCAAGCTACAAGGAAGCCTCATGTCTCACCAA
AACAAATAGAAAACACAAAAGGGAAAAAGGGCAGTAGGAGAGAAGAGGCTAACCCAGCCTGAATATTTCTGGGAATTCC
AGGCCTGGGTTAAGAGCATCCCTTTCAAATGAAGACCTCAAGCTTCCCATGGCCGTTAGCATCCTTTTCCAAGATCACT
GCCTCTCTGGTTAGCATCTGGAATGTCTCCACAAAATGTTCACGTGTTGAAGGTTCAGTCCACGGCTGGTGGTGCTGCC
TGGGAAGGTTCAGGAACTTCAGGAAGTGGCGTCTAGCTGGAGGAGACCAATCACTGGGCATGCCTTTGGGGAGTCTGTT
CACGTCTCCCTAGTCTGTCTGTCTGTCTGTCTGTCTCTCTCTCTCTCTCTCTCTCTGAGACAAGTTTTATTCTGCACCT
TAAGCTGTTCTGCAGTTTTCTGTATTACCCAGGCTGACCTCAAAACCTCCCAAGAAAGCCAGCATGCCTGGCTCCCTTC
TTCACTTTCAGCCTCTTGTCATTCTGGAGCCGTAGGCAACACCAGAAAGCATATCTTTGCTCTCTATGCTACTAGATGT
CTGGACCTATTGGTATGTTTTGTGCTGCTGTGGCATGGTATGGCAGGGGGGGGTGCTTTAGCGGGCCCATGATGAGGCA
TTTCTGCCCCCCCCCCCCAGGTACCAGCCATACGATGGGTCTAGTATGAAATGAAGTTTATTTGGGGCATGGGGGGGCG
GGGGAAGAAAAGGGACAGAGAGGGATGGAAAGGGACAGGAGAAAGAAGGGAAGAGGCTGACCAGGAACACATGGGGTGG
GGGAGGTAATGGGGTGGGGAGGGCAAACCAGGCTCCTACCTGACTTGCTAGGTAACTGTTGGGCAGAGCCTAGAAGAGA
TGCTAACACCCTCAGCCTGTGCTTTCACATCTGCCTCTCCTAGGGTGGGAAAGCCTGAGAAAGGCCAGTCTGGCCCTTG
TTCCTTCTTGCCTTCTCAAGGATTGTGTTTTCTGTCTATTAGATCTGTAGTCTCAAACCGGAGTGAACATCATAGCCAC
CCAGAAAGTCTGTTTAGACCCAGAGCCCTGAGCCTCACCCTCGAGGCTGGGATGGAGCCTGCCTGCTAGCCTTTCCATT
GTGCCAGGATGCTGCTGTGTTAGTCTGAAAACCACAGTGGCCACTGTGCAACAGCTGTCAGCTTTTCTAAAGTCTTGAG
AGAATTTTTTATAAACTCATCCAAGATACCCTGGCTACCTACCTAGAACACTTATATCAGAATTTTAGACATCATTATT
TATATAAATATATCAGTAATTTATAATATATATATATCCTACATAATTCCAATGTGTAGCCAAACTTGATAACTGATAT
AATAGTTCTTTATTCTTCAACTCTTGTCTATGAGAGACAGACAGACACAGAGAGAGAAAGAAAAGGAGAGACAAACAGA
CAGAGACAGGGAGAGAGACAGAGAGATTAAGTGAGCACAGCATGTGCGGGCATGTGTGTCCCATGGTGCATGTGTGGAG
GCCGGAGGACAACTGCTAGTATTTGGTTCTCTTTTTCCATTGAGGTGTCAGGGATCAAACTCAGGCTATCAGGACTAAG
AGGTAAGCACTTCTAATCAACTGAGCCATCCTTCCAGCCCACCAGTGTAACAATTCTAATCAAGTTCTTAGTTCAGGAT
TTGATCAGCTGGGAAGTGTACTACATCCATCCTTCCACATGCGGTATAGCTAAGGTAGGCTTCCTTTCCGAGGCTCATG
TTACAGTGTTTCTCACTGTTGCTCTAATTAAACAGGACCAAAAGCAACTAGGTCAAGAAAAGGTTTAGTTCTCCTTACA
ACTCTGATCACACTCCATCCCATGTCAGAGCAGGACCTGAGGCAGGAACCTGGAGGCAGGAACTGAAGCAGAGGCCATG
AAAGGTGTGCTTACTGGCTTGCTACCTAAGGCTTGCTTGTCCTGCTTTCTTATGGAACCCAGGAGTGACATCACCTGTG
ATGGGCTGGTCCCTCCTTCATCAATCATCAGCCAAGAAAATGCCCCACAGGCCAATGTAGTGGTTGGGGGGGGCGGTGT
TTTCTCAGTTTCCTCTTCGCAAATAACTCTAGCTTGTGTCAAGGTGACATGAGACTAGCCAGCACACTCATCCTGATGA
TGAGACATGATCAAGAAGTGATGGGGGTCGGGGTGATTTGCAGATGATTCCGTAATGAACCCAGAAAGTGGGGAAAAAA
ACAACCATGTATCAGAGTACATTTAAAATATTAATAACTAAGAGACCTGGCAAAGAGAATTTACCTAAGTGTCTTACTT
TCCAATAGATAATAATAGAATTAAAAACAAATAAACAAACAAACAACAACAACAAAAAACAAAACCGAGCAAAGATAGC
TTTTAAAACAGCCAGATAGAAATAAGGAATAAACAAGTGAATGAATGCGCAGCACATGCAGGGCTTAGCGAGCCAAACC
CAGCTCTGATTTCATGGTGATGCTGACTGTGTTTCTGATGGGGAGATCCAAGATCATAAGCACGTCACTCGTTCACGAG
TTTGCTAGTTACAACACGGACTTGGCAAAGGCCTTCTCACATTTATCAGGAAGAGAACCCGGTCAGTAAAACAGTGCAC
GTGGCAGTTCTTCTGTGTAGTGGTAACTTTGGCTAACCGCTCTGGCTCCTACACACACACACACACACACACACACACA
CACACACGTGCGTGCACCAGTTATTTTAAAATGCCTCGACTAGCTCAAAGGTTGGGCATTTCTAATCCTTCCCCCTGCT
AGGAAACACTTGGCTCTGGTACTCCTGAGTTAACATGTTGGGGAAGTGGCCCATGTGGCCTCTTTCCCTGATTCTCACA
TGTCGGCAGACTTTTAGGTCTGGTCTTCCTTCTTCCCCATCATGGCCATCTCCTCCTTTCTCCCCCACCCCGCTTGGTT
TCACCTCAGTCTACCTGTCCAGCCATTGGCTATATGGCAATTATTTATTGCCAATCAAATCTAGCTGAGGGCAGAGACC
CTCAGCTTCTGGGAAGAAGGCGGCTTTTGGGAGCATAATTGAATCGAGACAGCATTAGAACCAATCCCTAACACTTCTG
TCTTGGAGCTTAGGAAACTGAGGCACAGAGGGCACATTTCCCAAACACATCCGGGACATGACAACCCAGGAGAGAGAAG
CTGATAGAGGGTTAAGGTGGGGCACTGAGAGAGGAGATCTCCAGTTCACAGAGTTGAGAGTTTCTGTGATTGCATTGGG
TTGGTAGTCATTGTTACAAGATCCTTAAAACCAGAACTGCCCAGAGAAGTGATAGTGATTGTTATTCTCAAATGGTTGG
AAAGCCAGGGGAGCCAGCCTGCTGGAGATTGGCATCTGGGAACCAACCGGAATAAGAGCACTTGCTCTGTACCTCGTGT
TGCTTGTTATGGTAAACTGATTACAGGTAATAAAGATCCCTGAGAAGTACATGGTGCTCTGAGGTTGAAAAATGTGTTA
GCTGACCCATGTCAGCGTCAGAATGTCTGGGCAGCATTGCGGGTGGAGGGGACCCCGAGATCGGCAGGGCTGGTTTGCA
GAGAGCGCTCTGTTCTTCTGAGTTCACAGACTTACAAAAATAGCCAAGTGTTCTAAATGTGCTCCATCCCCACTTTACA
TAACTGTGCGACAATCCTTCAGAGCTGAGGAGTTTTAGTTGAGATAGTTTGGGAGTTTATGCAAGTGGAGGGCTCAGTG
CCTCCTAGCATTGATGGTCCAACCATAGCCTCAATGACAGCACAAGTCTGGATTCTTGAGTGCTGGCAATGGCTTCTGG
TCATGAGAGCCTGCTTTGCCGGAGGCCAGCCTGAGGCCTGAGAGGAGAGGTCATGGGATGAAGACTTCTCTTCCTCTCC
TGAGGGCTCCAAGATCTTAGTCAAATCCCATGACCATACCAAGTGTCCTTATTGAAAGACTGGCTGCACTGATCATCTG
GGTTATATTGAATTCAGTGTGATGGTGGAGCAGATGGTATTCACCAACTTTTTCCTGGGGAGTAGCTGGGGAGTAGCTG
GAGAACCTAGTGGGATGGACCTGTGGGCTTGGAGGTAGACCTCACCTGTTTGTCCTGTGGACTAAATCTATGCTGAGCA
TACAAAATGTTAGATGTATCCATGTAGCCTCCACCCCCAAATCTTTAGACAAAGGCCAAACCCAAAGTAAAATGTCTGC
TAGGCATAACTGGGCAGATCCCTGGTATACAGGCAGCCCAGCTCAGGGAGCTGAGAGAAGGGAGGATTGGATAGAGCAA
CATGCACACATGATGACTGGCTTTGTTACAACCCAGAAGACAGAACTGGCTGTGTCTCGACCTAAGAGACAGAGCAGGT
ACTCAGGTGGGCAGGCCAGCGGGACTTCCTGAGGCAGTGTGGCCTGACCTTGAAGGACATGGCAACATTCCCATCGGGA
ACCCCAGCCCTTTGCAGCGCAGCCTCTTGAGACAAGGCCTTCGGCGACAGTGAGAAGAAAGTTGCCACATCTGCCACAC
CTTAGCCCTAGAACGAAGCAGTGCTGTTGTTTCTGTTTCGTTCGGCTGCAACCTGTGCTTAAGATAGCCTGGCTCTGCG
GGGCCCGGGAGGGCTGAGCTCAGTTCAGAGGAGCTGTGTGCTCCAATGGGAAGATTACCCAGAACACTGGCCTGGAAAG
ACAGTTCTCAGCACTCGCCCTCCCTTCTGTGGACACTCCCCACAGGCGTCAGTCTCAGACTGTCTTTCTCTAAGGCCCT
GGGGGCTATGAAGTCTGTGACCTGGATGTTGTGGGACCACAGCCTGATGTGCTGATTTTGTCCTGTGACAAGTACCTAA
GGACCCAGCGTAAAGTGTCTTCTTACCTCCCCAGATCTTCCTATAATCCTCTTGGCTGAGATAGCTGGGTTCTTGGCTG
CGGGGCACCATAGATTGGAATGCTGTGGACTATGTGGGGAGAGGCCCCTTAAGGAAACAGGTGCTGTTGATATCATCAA
CAGCTCGAGCAAACCAACACAGCCAGAAGGAGCTGTCTCAGGATGCCCGAGTTGGGGATATTCACAGAAGGAGAGAGGG
CGAGCTCTGGGGGACCTCTTCCCACATCCACTGTTGCTGGTGCGGGTTGTCTTGTGCCTGAAATTCCACTTTTGTGCTC
CTAAGACCTTGGCAGCCTCATTAACTTGCCAGTGCAACCTTGCTTACCTGTTTGGAATCCTGGGCTTAGTTCCCTGGCT
CTAGCAAAGTGTTATAGGACGCTGAGCTTCTTTGGCCGAGCCTTTGTGGCTTCCATGGTCCCGGCCACATTCTTTCCCT
CCACTGCTATCACCACCGTTACCAACCAAACTGCTACAGGGCCTGACAGGAAGCCAGTTTGAGATTAGGGAACAGATTG
GGGCTTCCCCACAGGCTGGTATTCCTTCAGGCAACTTCTTGTTGATCCTGGAGACTCCGGTAAACCTAATCAACATTCC
TGGGCCCCAGTGAGGCAGGCTATTGCTTCTGGCTATTTGCCTCATTGTCTCCTAGCATTGACGTCATCAACCTTGTGAT
CTTCCAGCTTGTTATCTCTAATAAGATAATAGTATTCTACCATCACTAGCCACTATCACTTCTACCAACTGTTGGTCCT
CTCAAGCCCACCCAGCTGCGTGACGAAAAACACCCTGCTACAGGACAGAAAGCCGCCGCTACCTCATCTGCTTCGTTCT
CCTCCTAGCCAATCTGAGAAGCCCAACTCTCTGGGGGGCGGGGCATGGAGCACAGCCCCCTTTTTTTTTTTGCCTTTCT
TACACGTGAGCCCTTAAAACTGGCCACGTGCCAGTCAGTCATCCTTGTCTCTGTCCAATCCAGAGGCCGCCCCCACCCC
ACCCCCACTGCCTTGTCCCTCCAAATAATAAAATCTCTGTGGTGAGAATCTGGCCCACAGTAGGAAGGGCTCCCCTATC
ACTTGATGTGATCATGGCAACCAAGGGCCCACTGGCGTGTCTGGAGGTCCATCTCCCAGGTGCCTCTGGATTGTCAGGT
TGACAACTAACACCAGCTACCACAATTACTTTATTTATTTCTGAGTTTGAGATTGTTTTGTTTTGTTTTGTTTTGTTGA
GACAGGGTCTCTCTATGTAGTCTTGGCTGCCCTGAACTGTCGATGTAGAGCAAGCTGACCTCAAACTCACAGAGACCCA
CCTCCCTCTGATTCTCAAGAGCCAGGATTAAAAGCATATATTACCACACCCAGCTGACTTCTTTTCTATATCTCACAAT
ATGAAACTTCTGTCAGGCAGATAATTTGCAAATGTTTTTCTCAATTTGTGGTTGCCTTTTTATTTATTTGATAATGTTC
TTTGAAGACAAAGTCTTTTAATTTTTAATTCACCGAATTATTGATCTACTTTATTTACTTATATTTATGTGATGTGTGT
AAGACAATGTTTCCTGACTTACTCCAATTGCTATGTCAGGATTGCTAAGCTTACTCCAGTGCTCCCGTCTAAGAATTTT
ACAGTTTAAGTTCAATTCTAAGTATTTTACAGATCTTAACACTTACACCATAATCTACTTAAACTAATTTTTACTTAAG
ACCTAAAGTGAAAACTCTAGGTCCTGTGCATATCTCATTATTTCCAACGCATTATTTGTTTAAAATAATTCTATTTTCC
TTTCTTGATTCTCTTGACTGAAAAACCGAGTGGATCCCATTTTGACTCTTGTGTTGATCCATATGCCCATCCTTTTGCC
AACACAGTTACTATCTTACTACCATATGTAAGTTTGCATGTGTGGGAGTGCACATGGTCTGGGAGGCTAGAGGTCAACC
CCTAGGGTGTTGTTCAGGGGCCATCAGTCTTGGGCTTTGGGGATATGGGCCTCTAACAAGCTAGAAACTCTTGGGATGG
CTAGAGTTAATTATCAACCTAACAGACTCTAGACTCTGCCCTCCCAGTGTTGGGGTAAAGAGCATGTGCCAGAACACTC
GAATCTTTAGGTCCCAAGGAATGAACTCACTTCCTCATGATCTGTAGGCAAGCGCTTTACCAACTGAGCCATCTCGATA
GCCCATAAAGTATCTTCTGAAACCAGAAAGCATGAGCCTCCTAAGCCTTCTTCAAGATTATCTGAGATATTCTGAGCCC
CTTGCATTTCTATGTGAATTTTAGAATCAATTTGCCAATTACTGAGTGGTGGGGAGACCCAACTAGGACTTAGCCTGTG
ATCACACTGAATCTGTAGATCTAGATGAGGTACTTGTACACCCTCATTCACTGTGAGAGCAATTGAGTGTAGCATATTT
AATTTATGTATGTAATTATGGAATGATCAAACAAAATTAATATTTGTAAGTATTATTTACATAGAAAAAAATCCAAATA
ATACAAAGAAAAAGTAGTAGAATTATTAAGAGTTTACCAAATTTGCTGGCTACAAGTTCAATATAAAAGGAAGCAATAC
CGTTTATATCAAGGGGGCTGTATACAAGGTCAACATACAAAAATCAATTATATCATATATACTAGTATTTTAGTTAGGG
TTTCTATTGCTATGATGAAAACACCATGACCAAGAAGCAAGTTGGAGAGGAAAGGGTTTATTCAATTTAAATTTCCAGA
TCATGTAGTCCATCACTGGAGGAAGTCAGGACAGGAACTCACACAGGGCAGGAACCTAGAGGCAGGATCTGATGCAGAG
GCCATGGAAGGGTGCTGTTTACTGGCTTGCTTCCCTGGCTTGCTCAGCCTGCTTTCTTATAGAACCCAAGACCACCAGC
CTAAGGATGGCACCACCCACAATGGACTGGGCCCTCTCCGATTGATCATGAATTGAGAAAATGCCTTACAGCTGGCCTC
AACTAAGGCTTCTTTCTCTTTGATAACTCTAGCTTGTGTGTCAAGTTAACACACAAAGTCAGCCAGTACAACTAGCAAT
AAACAATCTGTTTTGTTTTGATTTTTGAGACAGGGTATCTCTGTGTAGCCCTGGCTGACCTGGAACTCATTCTGTAGAC
CAGGTTAGCCTCTGCTTCCTGGATGCTGGGATTAAAGGCGTTCACCACCACCACCCAACTAGACAGACTCACACAAACA
CGTAACAATTCAATTTATAGTAAGGTCTCGCTGGCCTTTTCCTTTCTCATGGTCTCTCTGCTTCTGGGCTCACAGGAGG
CAAGCAGCTCTGCCTCTTTGAAGCCCTTTCTGCCGAGCTGTGTTTCCCCACAGACCCACAACAGTGGTACCAAACAATC
ACGGGTCCAAAGAAATCTTTCCTCTTTCTAAGTTGGTTTGCTCAGGGGGTTAGTGCCACAGTGATGGGGAAAAATGACT
AACGGAAGGAATGTATCCTGAACTTCTCTACCTGCACACCTGTTAATAGTATCATATAGTCTTTCTTTTAGCTTTTTAG
ATGGAGAACCAATTTACTGACTGGTGTCTTGGTAACACAGTAACATCCCAACCTTACATTCTGTGGGTAAATGCAACTT
TGTCCCCTTACATTATTTTTATGCTTTGTTGAGTCTGCTACAGTAGCATTTTTTGAAAGGATGCTTTTTGGGGGAGATT
ATGTTCCTGGGATAGTGGCCTCTAGTTTTCTCTCCTTATAATTTGTCAGGTCATGGTGTCCGGGTTATGGTATCACCTC
CGAAGGAAAAGTGTTTCTTCTTTTGGATATTGGAAATATTTTTTGTTTTTCTCTTTCTAGAAGAAGGCTAATAGGTACT
GGAATTGCTTATTTCTAGATTAATTAGTAGCTTAGATCTAGAGATTTCTTTATGGCAAGCCCTATGACTACTGATTAAT
TTCTCAGAGGATGTAGGACTACCCTAGCATTCTAGTTCTTCTTGCTAGGGTTTTTTTTTTTTAAATTGTTTGTTTGTTT
GTTTTGTTTCCTCTAAGAATTTCAAAGTTATATAGTTTTAATATATATTATGTTTTAATGTCTATGGCATGGTTATTTC
ATCTTTTTTTATTACTTTATTGTAGTTTTAAATTTTCTATTCTTCGTCGGGCATAGATGGTGCATGCCTTTAATCCCAG
CACTTGGGAGGCAGAGGCAGGTGGATTTCTGAGTTCGAGGCCAGCCTGGTCTACAAAGTGAGTTCCAGGACAGCCAGGG
CTACACAGAGAAACCCTGTCTCAAAAGAAAAAAAAATTCAATTCTTCAACAATGGATCTTAGCAAAATTGATCACTTTT
AAAAATTCTATCAAATAATAGTTTTTTGTCCTTCATATTGCATCTTATTTCTTTGTATTCATTTGAATTAATTTTATAT
CTTTTCCTAATCCAAAATATTTACCTTTCGTGTTTTTAAATATATTCATTGCAGTCATTGTCTTTTCTGTCACATGTTG
CTTTAGTTGAATCCCAAGACTTCGCTGTTCATTTTCATTGCTATTCAAAATAATGTCTGATTTCTAATGTGATTATTTA
ACATATTGGTTATTTATAAGTGAATTAATTAATCAATTACCAAATAAACAAAAATTTCAGTTATAGTTTATCAATTTCC
AGAATAATTACATAATGACTACAGAATGTTTTTTAGTCTCTATTTCTAGTCACAGAAAATTTGTTGTTTTTTTATGGTT
TTATGGTAAATTTTAGCAAGTATTCTAAGTGTGCTTGAAAAGAATGTGCATCAAAATGTGCCCCTTGCTACACATTTGC
TAATTGCATTGCTCAAATCAGCTCAGAATCTTGTTGATGACGGTATCCTAGAGCTGTTAGAGGTAGAGATGAGTTAAAA
ATAGTCTAAGCCAGCTTCTTCTTTCTTTCCTGTTTAAAAGAATAATTTATTGCTCTCTCTCCCTCTCTGTCTCTCTCCC
TTTCTGTCTCTCACCCTCTCTCACTCTGTCTCTCTGTCTCTGTCTCTATCACACTCTCTCACTCTGTCTCTCTCTGTCT
CTCTGTCTCTGTCTCTCTGTCTCAGTGTGTGTGTGTGTGTGTGTGTGTGTGTGTGTGTGTGTGTGTGTGCTACATATGT
GCAGGTGCCCATGGCAGCCAGGACAGGGTGTCAAGTCCCCTAGAACTGGAATTATAGGTAGTGGCAAGCCACTTTATAA
TGGGTGCTGGGAATCAAACCCAGGTCCTCTGGAAGAGCGGCAAGTGCTCTTAATCACTGAGCCACCTCTGCAGCCCCAG
CCAGCTTTCTTGTCATTGATACTTTCCTGATATAGTCACTTTCTGTGCCTGTGCATCCATTACTTTTAAGAAGTATCTT
GTTTGCTACAGTATGACACTTGTTAACCCGTTTCTACATAGCTCACATCTGAGTTCTCACTCCCTGCCCCAGTGCCCTG
TATCTATTTCCTTGCTCTTGTCTGGGCACGTTTTAATAAGCAGGATTTCAATTGTACACATGTGTGTTGTTAGTCATTC
TTCAGGCAATCATGATCGCTTTTGGTTTTCTGAAAATGAATATTAATCAGCATCTTCACCCACTCCCTGGGCAGTGGCT
CTGCAGCTCTCAGATCCATTTGTTCCTTTCCCATGGTTCTCAGGCGCAGTCTGTTCCACTGTGAGACATTTCCTTCACA
GCAGTTAGCGCACATGTGATTGATGAGGGGTGATGTCAGAATAATCCATAATGTCTATTAGTCTGGGCACGATTTGCCC
CAGTGCACTTGTGCATTGAAGCTGTAAGAGGCAAGCTTTCGTATTATTAAAAATGGAGTCTTAGTAATATGCGAAGGCC
TTTAGAGAAAAGGCAGAACCCCCTGTGTAAGTGTCCAGAGTCCATACAAAAAGGGTCATTAGGTGGCTTCCAGCGCCTC
TAGGAGGTTTGATAATCTACTCGGGAAGACCACAGTGTAAATGTAGAAACTGCAGAAATACTTCTTTATGAGTTATGAT
AATGTTTGCTTGATGGAGAAAACTACTTGAATGTACTTTTATTATTTATTTACCTTTTTTAACACGAGAGAATTTTACT
TCTCTTCTGTGTGTCATTTTATGAATTTCAACATAGCCAGAGGTTCAGGATCGTCTGTGCCATCAGGACACATAACATT
CAAAATGTCGTCCCATTCCCTCCATGTTGCTTTGATTTTTGATTAAACAAACAAACAGACAAACAAACATTCAGTTTGA
TCTTCTGTTTTTGAAAAAAAAAATGTTTGTTTGTTTTTTTCACTTGCTGATAGCAAGATTTCCCCCCTGGTCATTAGCT
TGGGGCAATTGGGTGAAACGACTTCTTGCTGCTTCTTTTCTCAATTCACCGAGTTTCAATCTGTACAGTTAAAATTTTA
CACCGTTTGGAAAGAGTTCAGCTTCTCGTGTGTGTGTGTGTGTGTGTGTGTGTGTGTGTGTGTGTGTGTGTGTGTGAGA
GAGAGAGAGAGAGAGAGAGAGAGAGAGAGCTGTTGTACACCGTTTGGAAAGAGTTCAGCTTCGTGTGTGTGTGTGTGTG
TGTGTGTGTGTGTGTGTGTGTGTTTCGTGTGTGTGTGTGTGTGTGTGTGTGTGTGTGTGTGTGTGTGTGCCTGTCAGTT
GTGTTCTGGTCATTTTGAATCTACTATGTCAGATTCCAAGTCTGGTTTAAGTTCTCTGGAGTGCATTGTTCTTGGCTTT
TAGAGTTAATCAACTCAGTTGGGTTTTGCCTGCAAGTTCCGACCCAGCTTCCGGTGTTTGCGTTTTGAAATGAGCTCCG
TTTTCAAAACTTTGTCGTTGCTAGTGAGGTGCTCTACCCTGGCATAGCCAGCTCCACCCTTCCTGTGATACCCAGATGT
TTTGGTGGATTTTAAGGTCATATCCATTCACTCACAGTTAGATGTAAACATGAGATTCTATAAGCAGTATTATTATTGT
ATTATATAATATATAATTATTAACATAATTATATAATGTATATTCCATAATATAATATATATGTATAATGTATAAAACA
TTCTATTACATCTTATTATATATTTATTAGTATATTATATTACTATATACTATATTACTATATACTATAATCTATAAGT
ATTGTGGGGCTCTGCACCCAGGCTCCTTATTCTTTGCACCCTTCCTCTGACATCCTGTTTCCCAGAGCCTCTCTTCTTG
GCTTTCTGGCTATGACTAAAGCCCCTCTTTTAGTTTCCTACTTCCCACAGCTGCACTCCTGGTTTAGGCCAAAATGCAG
AAAGACAAGAATGATTTGGAGTTTCTCATCCTCTGAGGACAGTTTTGAGCTCTCTAATAAAAGAATAAGAGTCCTGGGG
TACAGAGATGATTCGGTGGTTAAGAGCACTGGTTGGTCTTGCAGAGGAACTGGGCTTGACTTCCAGCACCCACATGGTC
GCTTGCAACTCTCTGTAACTCCATTTCCAGGGGATCTGACTCCTTCTGACCTCCTCAAGTACCAAGCGAACATATGCTG
AAAGTACATATGTGCAGGCAAAACAGTCATAAACAAAAAATAAAATAAACCTAATTAAAAACTAAGTAGATTGCTCCTC
TTCAGGGTCTTTTCCTAAGGACTGTCTGGTAGTCATACTTGCTTATTTTCCTTTTGAGTCGGTTTCTTTTGTTTCTTCT
TTTCACTAAAATTTCTGATATACTTTTTGGCTGTTACTTGTTATCTGATCTGTATGATGAAAATACTTGTCTCCTAGTC
TGTCAGGGTTTTTAATTCATTTATTTGTTTGTGGTTTTTCTTTTTTCTTTTTCTTTTTTCTTTTTTCTTTTTTTTTTTT
TTTTTTTTTGAGACACAGTCTATCTATGGACAGGGCCCTGACTGTCCGGAACTCACTATGTAGACCAGGCTAACTTCAA
TCTTACAAAGATCTGCCTGCCCCTGCCTCCCAAGTGCAAGGACTAAAGGCACACACCACCACAGTAGGCTAAAAATCCC
ACTGGTTTTCTCTCCTAATTTTTGTAGTGGGAATTAATGAGTTCTTTTCTTCATCCTTATTTTTTAAATGATTTCATGT
ATATGGGTGTTTTGTCTGCGTGTGTCTGAGCAACCTGTGAGTGCCTGGTAGCCATGGAAGGCAGCAGAAGATGTAGAAT
CACTGAATCTGGAGACACAGATGGTCGTGAGGCACCTTGTGGGTGCTGGGGATTGAACCAGGGTCCTCTAGAACAGCCC
GCAGTGCTCTTAGCCACTGAGCCATCTCTCCAGCATCCCTTTCCATCCCTCCCTTCCTTTGTCCCTCCCTCCTTCCTTC
CTTTCTCTCTTGACAAATGTCTCAGATGGCTGACACAGTGTCATAGATTGCACCCAGGGCCTTGTTTATGCTGGGCAAA
CCTCTGCCGACAGGACTTCATTTCTAGCCATTCTAACTATAAATAATCTAAATTTTCTCTGGGTCCCTTTATAGATTTT
TTTTTCTGGCTTTGTTTTATATTTAGTTCTCAGTTTCTCCCAGAGTTTTGATTGATGGAGGGATAATTGCATTGATGAA
GGTGAATTTATCCTACCCATTCTTCTATAATCAATTGTTCCCAAATGACTGGTCAAATATTACATAGCCTGCTTATTAG
CATCAGCCATGATGACAGATACCTATAATGCCAGCACTTGGGAGACTGAGGCAGAAGGATCCTGAATTTGAGGTCAGCC
TGGGCTACATAGTGAGTTCTAGGGCCAACACAGCAGCACCCTACCTCACAAAGCAAAATGAAAAACTCATCTGCCATAC
CACCTTTAATAAATTCACTTCTCTTTTATGTGTCAATTCAATTCTGTGTTTTATGTTCACTTTAACTAGGAACTTACTT
ATACCCAAATTAGCATTAAACACATTTATAGCTTGATTAATATGCTTTCTTTTATAAAATTCATTCTGCCCTTATGGAT
TTTTAAATTTTTACTTGATGAGCCCAGGATCTTATGTCAGGCTAAAATATTTTTTGAAAGAAAAAAAAAAAAAAAGCAT
GTGTACCAAATATGGACAGACCTTTTTTTTTTTTTTTGCCAGTATCCGTTATACAGTATAGTGACTACTTCTAGCATTT
GTATTAGGCATAATAAGTAATTTAGAGATGGCTTCAATAACATGAGAGGACTTGTAAGAATTATATGCAAACACTCATG
CATTCTGTAGAAAGGACTTTGAACTTCCAAGGCGTAGGAGAGAATTCTGGAGCCAAGCCTAAGCAACATTGCAAGGACA
TTTTAGAGGGTTAGCATGGTGACATATATCCATGCTATTCAATGCCACGGTGACTGTCTATTATAACAAATTACCTTTT
ATATACAAGTTATTGTTATCATTATATTTATTATTGTGTGTCTCGCACACATGTAATGTTATCTCATGTGCACAGTCAA
AGGACAGCTTGCAGGGGTAGCCTACCTCTTCCCACCGTGGGTTCTGGAGATCAGACTCAGAGCCCCAGGCTTATACAGC
AAGGGCCTTAACCCACCAAGCCATCTTGCCAGCCCATGTCCTTCAAAAAGGCACTCTACTTTACATAACAAGGAACGCC
AACAATTCTAAGTAGTATTTTATAATAATACTTTTAAAGGCCCAGAATTAGAAGTCTTACAGATTTTTGGAAAATGGAA
TAGTAATTTTTCCGTTTTATTTCCAAAATCATATCTGTGTCAGGCTGCCCTACCTCTTGTTCTGAGTGCGCGATTTATT
TTTACGGGGCTTTCCAATGTATGTGATTTTATTGCCAACAATAACAGATAACTTTGTTTGTATAGTCTGGACAGACACG
CCGCTTCTTCATTCCTGTTTGAAGACTGTCTAGGACAGTCCTCAAACATTGGCGGGGACAACTTCCATCCGCCCTCTTC
CCATCAGAGGGCTTCATTGGACCTTGTCTCTCTGTTTCTCTGTATTCTTTGTGCTCTATATATTTATTTATATTTGTGT
GTGTGTGTGTGTGTGTGTGTGTTTAAGCTAGTTCCATTCTTGAGTCGATTGGCCCAATTTAGGGGTTTTAGGGCCTCAC
AGAGCTTTCTTATCTCTTGTTCTTAGTGTTATCTGTCTGAAGAACTGCAGTGGTCACGTGACACTCTGTTCAGCGGTAC
TCAGACTGGCTTTTTTGCTCAGCAGTCCTTTTAAGCAGACCTTTAGAGGCAACCTCAGATAATCCATGACGTTGGGTGT
AAGGTCCGTCTTTTTGTTTTCCTTCTCAGGGAGGAGCTACACCTTGGTGGGGCGTCTGCCTGGATAACCTGTGCTGTGC
GGTGTAGAGGGAGGGGCGTGATCGAATCCACCCATCTCCGAAAGTGGCCCTCCCTCTTTCACTGGAATGCGGTTTTGGT
TTTCTGACAGCCAGTGTGCCCATAGCTTCTCCTTGTTCACTGGCGCTCTCCCAAAGGCATTCGGGCCCATGGCTTGTTA
CTAACTGTGGCTGTGGCTGAGGCCTCCTAGTGCGACATCTTGTTCGTATCGTTTCCCTCAGAGTGTTCAAATAGTTTCA
AAATAATTTTAAACACGATTGTGGTGGAGTTTTGTCTTTTTTTTTTTTTGTAACCTAAAAATAACAAGAAACAGAAGAT
TATTTTTTCCATATGCTTGTGCCTTGCTATAATTTTATTACTAATTTGTAATTATGCTTAACTACCATTCATGAATATG
GGTGGGGCTTAGGAGATTTGTTTTGTAGTCTATTATAGGATTTTCTTATTAGTTTACTATAGGATTTGCTATTCACGCC
TCTCTTCATCATTTCCTTCTAGATCACCCAGGGTGTACGGGTACAAGTGTACAAATCGACATTTATCAATAATAGATCA
TAAGGAAGATCATTTTAAAACAATTCCTTGACACTTATTAAAGACAAAATTATACTAATGGGATGTGTGTATAGAGATC
TAATAAACCGGTTAGATACACACTAAGAACTGTCCGTGGAAAAAAATTAGTCTTTTTTTTTTTTAATTACATAATTAAA
CCGATGTGTTTCTAAAAGAGCAGAAAAGCACAGTAGCGTCAAACTTGAGCCAAGGCATCTCAGTGAGACCTTGTCGTCG
TGTGTCGAGTGTACAGTGCAAGGCGCAAAGCTTCCGGGAGGTTGGAGGTTGCCCTGTGCAGCATGGGTGAGCATGATCG
GAAGGGGTGAGCGCGATCAGAAGGGGTGCGCATGATCAGAAGCAGCTTGGGTTTCATGTCATGTTTGTCTTGGGGTTCA
CGTTTAGTCCGTGCGCATTCAGAAACCTTTAACCTCAGCCACATTTTCACAACCCCCACAGTGAGTTGTGTGACCTCAG
GTGGGGTCATGACTTATTTTAAGAAGCTTTGCTATAATGCTAAGTCTTGTGATGACGCCAGCTGGTTGTCGTTGTTGTT
TGTTTATTAGCGTGTTCATTTTCTTTTGAGTAAAATGTCCCAACTTTATCTTGGTTTCCCTCAACTTTGCCTTTTAATA
TTCTGAACCGTGACCTCTTATGGTAAAACTGCCTGAGCCCTAGTTCCTTAGAGACATTTGGGGGAAGCTGAGGAGCGCC
CTTGAAGTCCTGTTTCTGTACTAACAGTAACTTTCTGTATTAACAGTTACACAGTTGTGATGCACACCTGCGATCTTCA
TTTGAGTAGGAAACATGTTCAGGTGTAAAGGCTTATAATCGCCATGTGCTTTTGTTACTGAGTGTAATCTTTATTACAC
ACCTTATTTAACATCTTATTAGGCTTGTTATTAGACCCCATTCCATGTCACTATGTGGCCTGTAACTTTCTTTTTTTTT
TTTTAAAGCCTTTTTTTTTATAGGATATTTTCTTTATTTACACTTAAAATGTTATCCCCTTTCCTGATTTTCCCCCTGG
AAATCCCCTATCCCATCCCCTTGCCCCTGCTTCTATGAGGGTGCTCCCCACCACCACCCTCTCCCACCTTCCCACCTTC
AGTTCTCCTACACTGGGGCAGCAAGCCTTCACGGGACTAAGGGCCTCTTCTCTCCCATTGATGCCCGACAAGGCCATCC
TCTGCTGCATATGCGGCTGGAACCATGGGTCTCTCCATGTGTACTTCTTGGTTGGTTGATGGCTTAGTCCCTGGGAGCT
CTGGGGGGTCTTGTTGGTGGATATTGCTGTTCTTCCTATGGGTTGCAAACCCCTTCATCCCCTTCAGTTCCTCTCCAAC
TCCTCCATCAGGGCCCCTGTGCTCAGTCCAATTGTTGGCTGTGAACATCCACCTCTGTATTTGTCAGACTCTGGCAAAG
CCTTCCAGGGGACAGCTATATCAGGCTCCTGTCAGCAAGCACTTCCCAGTATCCACAATAGTGTCTGGGTTTCTTGACT
GTATACAGGATGGATCCCCAGGTGGGGTTGTCTCTGGATGGCCTTTCCATCAGTCTCTGTTCCACACTTTGTCTCTGTA
TTGCTCCTGTGAGTATTTTGTTCCCCCTTCTAAGAAGGACCGAAAAACTCTTTCTTTAATTCATGGACCTGTTTTTTTC
TATGTATTCCTAACTTTCCATTCAGTATTTCACCATCTCACACACATCTAAAAAATGTTCATTATTTTTAATTATGTGC
ATGCATATATGCTAGTGTGTGTGTGTGTGTGTGTGTGTGTGTGTGTGTGTGAATGCAGGTGCTTGCCAAAGCCATAGGT
CTCACAAACACACACACATGCACATATGTATACACATATGCACACACATACCCTCATGCATGTATGCCAGTGTGTGGAT
GTGTGAGTGTGAATGCAAGTGCTTGCCAAAGCCAGAGGTCTCACACACACACATGTCAAAACACAGTCCAAAAATGGAA
CCGTGTGAGAATTCTGAGTGCTTGTGAGAACACTCCAAGAAAACAAGAATCTTGTGGTCTCAGTTTCTTCAGAACACGG
AACTGTCCTTGGAATGTGTTTCCGTGCTCCTCCCAGGTGTGGTGGACAGGAGTGAGGTTACTGCAGACTACTCATTACT
GCGTGCCGCTGACGTGCCGCTGGCGTTCAACTAAATGTCTGAACTACCCTCTCTAGGTTTCTGTGGGAAAACATGTTTT
TGCCACATGTGGCTTGTCCTTGTGGTTGCATACAGCTCGACCTCGTGAGAACTTTACTCAGGTGACCCTTCTCAACCCT
CAGAGTATACACTGTCTGGGAATCTGAGAAAAAAATGGTTATTGCATGAGACTTAGTCTGCCTGATTTATTGGCTCCAC
TCTCCCAGGTCCTACCACCTCTAGAGTTACGTGTATACACACACACACTATATTTTGATCTTATTCACTAGTTTTGTTC
TTGTTATCATTGAGTGCTGAATCTTTTTCTATCCTTTTAATTTAAAACTTGTACTTTAATATAGTATTCTTGAAGGAAA
AAAAAACAGCATAATTTTCACCTTTTCAAATACAATCTGATAGTCTTTTTAAAATAGCCAATATCAATGACATCCAGTT
ATTGATAATTTCATGAGCCAAAGAACACAGTTGGGTGAAATTTGGTTTGTAGTTACTGTGATGAGGGCAGAGGCAGCAC
CCTAAAGTTCCTCATGGGGTGTGGTCTTCCGTGTTGTGACAAAGACCTGTTCAACTAGAGCTGTATCCGTGGTACACTT
TGACGTGTGAGCGCCAACACAGTAAAAAGCACTGGCTCCCAGCTTCTCTTTCGAGCTGCTCTGTCTCAATAATAACTCC
TCTTTGTGTGCCAGCTAGCGATGTCTCACTGTGTGCCAACTTGTGATGTCTCACTGTGTGCCAACTTGTGATGTCTCAC
TGTGTGCCAACTTGTGATGTCTCACTGTGTGCCAGCTTATGATGGCTCACTGTGTGCTAGCTTGTGATGGCTCACTGTG
TGCTAGCTTGTGATGGTTTAGTGTGTGCTAGCCTGTGATGGCTTACTGTGTGCTAGCTTGTGATGGCTCACTGTGTGCT
AGCTTATGATGGCTCACTGTGTGCTAGCTTGCATCTCTACTTTCATCTCTTTGTCTCTTGCTCCCACAACTCTCAGTCT
CCATGTCTCCCTAACTCTTTCACATTCAGTCGAGCCAGATATACAGGTCAGAACAGTGACTATTACACAGTGAGCCTGG
AAATGGGAGCAGGGACAAAGATGGAGGCTAGAAATTGGGCTGAGCATAACTCTCAGAGATTATCCTAACATGGCAGTGA
AGAAGAATAACAACAAACAGCCTCCCACCTCCACTATTCTTCATACTCCTGTGGCAGCTGGAGCCTAGTCATACTCACT
GCGGGGATTTGATTTGTGTGTCTAATGAGGACCAAGACAATCCAGTTCTTCCTTTCTGTTCTTTTTCCACTTCCTTTTG
TAGCCTGCTGCCTTTCAAGCTGCAGACCTAGTGCCTTGTGGAGGCGAGGGAGAGAGGACACTGAGGCCTTGGACCAGAA
AGCAATGCGAATATGGGGAGACTCTGTTAGACTCTCCTATGCATGGTCCCATTGTGTGAAATGCCTTCCATCTCCACCG
CACAGCCATGACACATACATCTATTCTTGTTTACTTATTATTGTGGTGAGAAGGGCAGATAGTTGATCACCTACAGGAT
GATACAGGGCCAGCCTAAGAGGCAGATGATGCTAGAAGTTGTGAACCACTGTGGGGCCCTGGAGGATTGGCAGCAGTAG
GCCCAGCCTCTGGCACTCCCCGGAGGACCAGGGAAGATACTGGCCAGGCCTTAAAAGGTGAAGGAACATGGCTGGAGGA
CAGAGGCAGAGAAAGAAGGTGTTCTATGCAGACTGCACGGAGTGGAGCAGACCTGGATTAGGGCAATGTTGAGAGGCAA
GCAAGAGGGACTAGGACTGTGGGTTGGTGCACAGCACCTGGGCTGTGGTCTGGCTTTATGCCCCTGGCCACCGTGCCTT
CCCTGCATTATTGGGTCTAGAGTCTCTGTCATCAACAGGTGAGCAGACTCTCAGAGTGCCTTTGGCTATGTCAGCAGCA
GCTGCTCCTCTTTTCTGTGCTCCTTCCCCTGGTCCCAGCCCTCTAACCTAGTTATCAGTCTAGGCCCCTCTCTAGATAC
TTTAGTTTGTTAATAAGTAAGTTCCCTTGGAACATAGAAGCCAGGGGTGGGATGTAGCTCAGTGGTAGAGCACTTACCT
AGTAATACAAGGACCCTGGGTTTGGTCCCCAGCACTGGAAATAAAACAAACAAAAATAAATAGAACCAAACTAAAAATC
TAAAAGTGATCTTTTAAAAGAGAGAGAGGGAGGTATTTAAGCCATGTCTGTCCGTCTGCCTGTCTTATCTTGTGCTGGG
GATCTAATCCAGAGCCACATCAGTGTCAGGCAGGCACTTTACCATGGAACTTAGTCTGTTTGCTCATTTGTGTCTGTTG
CTAACAACTTAAAGTCTTGATTACTAGACAAGCACCTGCCTGTGCTGACTAATTCTTATGAGACCTTGACACAAGCTAG
GATCATTGGGAAAGAAGGGAATCTTAACTGAGAAAATGCTTTTATAAGATTGGCCTGTGGGCAAGCCTATGGATAATTT
TCTTGAGGTTGGTGTTAGGAGGGCCCAACCCATTATAGACAATCCCACCCTTGGGTTGGTGGCTCTGAGGTTTATAAAA
ATGCAGGATGGGCCAGCCATGGGGAGCAAGCCAGTGACAGCTCTCCTCCAAGGCCTCTGCTTCAGTTCCTGCCTTCAGG
GTCCTGCCTGAATTTTCTGGATGACGGACAACAAATCCTAAGATGAAATAAACCCTTTTCCTCTCTGAGTTGCTTCTGG
TCATCGTATTTTAACACTGCAATAGTAACCCTAGCTAAGACACTGATGGTAGCCATTGAGAGAAGGAGACTAGAACGAG
ACTTGCCACATCAATCTACTGCCTGGGTGTGGAGAAGCGTCACAAGACCTCTCTAAGCAGGAAAGAAACACCCAGGTTT
GCAAGAGGATATGTAGGAAACAGTGACACTTAAGTCAATTTGGAAGGCTAACTAATGAGTCTATATTCTAACCATCCCA
CTGGTAAGTCTCCCTTTCCGATGACTCCATTATTGTGTAGGGAAAGCAGAGAGTAGAAGCATGCAGGTAGAAATCCCTT
TGGGGGGTGTGAGTCGAATGACTCACAGGGGTCGCATATCAAATATCCTACATATCAGATATTTACACTAAGATTCATA
ACAATAGCAAAATTACAGTTATGAAGTAGCAGCGAGAATAATTCGACAGTTGGGGTCGCCATAACATGAGGAACTATTT
TAAAGGGTCGTGGCACAGGAAGGTTGAGAGTCACTACCCTATAGGGTTCCCAGCTGCCTGCTTAGGTGTCCCTTTGGTT
TGTTCCTCAGTGTGTGCTCTGCAGCCTGGTGCATCAGAATCTGGGTGCTGCCTTTTAAATATGAACTTTAACTAGATCC
TCAGCTGGTGAGTCTGCTCATTAAAATCCTGATGTATGGTTTTGGAGAATGTGGCGGGAGTTGCTACATAGTCCACAGG
TTTTGTTTGTCTGTCTTTCTTTCTTTCTTTCTTCCTTTCTTTCTTTCTTTCTTTCCTTCTTTCAAGCTCATGCCATCTT
CATATTAATCTTTTCTCGCCCTGCTAAGACAGAGCTAGGCAGTCTTCCCTGAGTGTGCAGAGGGGTGAGATGTCCCTTT
AGAAAGGGGCAACCAATGGCCCATGCCTTTAATCTCAGCACTCAAGGGGCAGAGGCAGGCTGACCTCTAAGTTTGAGGC
CAATCTGGTCTACATCGTAAGTTCTCGGACAGCCAGGATTACATTTAAAATAAAAGAGCCAAGATCTTAGGAGCTAAAA
GAATGAAGCCTGCCCAGTGCTCACATACTCCCAAGGTGGGGCATCACCCCACCAGTCAGTCAGTTGTCCCTAATGGGGA
TCCTTCAGAGACACCCCCTCCACACAGGATCTTGTCTTCTTATACATCATCTCCCCTCTCTCTGTAGCCAGGACGTGTG
TGCCACAGAAGAAGCAGAAGACCGAGACAACTCCAGAGTCACTGGTACACTCCTGTCCCCTGTGATCACAGCAGGAACA
CTGTGGAGAGTCCCTCTTCCCCTTAGGGATACCCAAAGCACAAAGCTATCTGCCTGATGAAAGCTGGAGGGATGGCTCA
GTGGTTAGAAGCACTGGCTGCCCTTCCAGAGGGCCCAGCACCCACATGGTGGCTCCCAATTATCTGTAACTCCAGGCAC
AAGGAATCTAATGTTCTCTTCTGGCCTGTGAGGGCACAAGGCACACATGTACGTAGACGTGCATACTGGCAAGGCATTC
ACATACGTAAAAATGTTTTGATAAAAAAGAAAATGCTTTCTCCCACTACAGCTGTTAAAACCAGACCAGAGATGCCAGG
ACCCTTAGAGCTGGGGCCCCTACAGTGTATCCATCCTCAAGCGGTTCTGGTAAGTGCCTGGAGTGTTTTACTACCACCT
AAGCAGCAAAAGTTTCTAGAAAGATCCAAGCCTGGCAACAAGGGACATGTTGGGACCCTTCTTTAAGTTCAGTGCCCAT
GCATCTAACACAATGACCCTGGTGGCACTCTGACCTGTTTTTAGAAAACCATAAGGAAGAATTCATCTCTGAAGGGGTT
TCCTTTGGAATCACCAGGCACATACTTGGGGTATAGAAATGTATCTCATATAGAAATGTCTCTTATGTGCAAGTGTAGA
TGAGGGGGCAGAAAGGCTTGGGAAACTCACCCCCAGGTCAACCCCTTCCCACCTGGGGTATTCAGCAGCCTCCTGTTGT
TTCCAGAGTTGATAGGGTCAGAGCCTTGGCCCTGTCAGCCCTAACAAAGTAGGCGAGGTTACCTGACCTCAGTCAGCCA
ATTAAATAGACAAATAAACAAGGACAAGCAGAGAAAGGTGATTGATTTCATGTGGCCACACAGGGAAGAGGAAAACCCC
CAGTCCATCTTTGGGGTCCCAACATGAACCTGGGGTTTAAACAAAGGCAAGAGGTCTTTGTAACTAAGCAATCCCAGGA
AGGGTGTGGTCCGTCCCATCCCTGAGCGGTCATTGGCTCCAGTCTCTCATGCAAGGTGGTCGGCAAGTTTCCCAAACTA
TGTGAAATCTCTTCCCTGGCTGGCTGGCACTCATGCTTTGACTTTTCCTTCCTCCAGATGAGACTCCTGGAGAAATGCC
CATTTCCTGGGACCCATTATCTACATAGTCTGGAAAGGGCAGTGATTGCCTCTTTAGAGCTCTCCATGCCTGTCAGGAC
CATCTGGATGCATTTCTGAGGCCAGCTGTGTCTCCAGCCAGTTCAGTACAGAGACAGATGCAGCTCAGCTCCGCCAGGA
CCCGGTGTGATACAGAGCTGAAGAGGGAGGAACAGGCCTGATGGGTCCCAGGTGCATTCTGTTGTCCCTTTATTCTTGT
TTCTGTTTTTTCCTCCCTCTACCACCCTCGGGACTACCTCCTCTCTACCCTTTCGTCAAGCTTGGGGTATTAGTTACTT
TTATCACTGTGACAAGAATGCCTTACAAAATCAGCTTCACGGAGGGTTGATTTGGGTTCAGTTTGGAGGTGCAGTCCGT
CATAGTAGGGAAGGTACGGTGGCCATAGCAGGCACAGCAGAGGTGTGGTGGGGGCATAAAGTGGCTGGCTGGTCACATT
GTGTCTAGAGCCAGGAAGCAGAGAAAGGAATATGGTACCCTGCTGCCTTCCTCTTCTGCCCCTTTTATTAAGCCTGGCA
TCTTAGCCCATTGGGTGGTGCCACTCACATTTATAGCCCATAGGGTGGTACCTCCTCAGTCAGGCCTTACTGGAAACCT
CACAGACACCCTCAGAAGTGTGTCTCCTAGGTGATCCCAAATCCCCACACACTGACAACAGAGGCTAACATCACACTTA
GTGAGAAATGAAGTGGATTTACATCTTGTCCCAGGAAAAGAAGTGAATTAAAAGACACTGCTCATCTACACAAAGCCTT
CTTGTCCCCCAGGGTAAATGTAAGGAGGAGGAGGAAGAGGAGGAGGAGGAGGAGGAGGAGGAGGAGGAAGAGGAGGAGG
AGGGGAGGAGGAGGAGGAGGAGGAGGAACAGGAACAGGAACAGGAACAGGAGGAGCAGGAACAGGAACAGGAAGAGGAG
GAGGAAGGGGAGGAGGAGCTAGAGGAGGAGGAGCAGGAAGAAGAGGAGGAACAGGAAGAGGAGGAGCTAGAAGAGGAGG
AGGGGCAGGAAGAGGAGGAGGAACGGGGAGTGGGGAGCACTCTTGGACAGGGGACTGTGGTGTTCCCGTGCTGTACAGA
TAGCTGTTGGCTAATTCACTGCAAGTCCATTAGGTTAGAGCCTGTGTTCATTGTATGAGAGCCTCTGGACCCAGCATGG
CACCCAATACACGACACATATTCAGCCAGCGTTACAATGACTTCATAACCAAAGACCTTATGTCACAGCAAAAAAACGT
AAGGGGCACTAATGGAAGTACTTCTGCCTCCCAGCCCAGCTGAGGGGGCAGGGGCCCCTCAACCTTCTCTTCATTGAAA
CCAAAGGCCCTGTTCTAGGACCTCTGTCATGAGTGACTGCCCTATGAGGCGAACAAATACCACCTTGGGAAATTCAGCT
GGGCCCCCTCCCATCCCCCACCCCCAAAAGATCATCCCAATTGGGACAATTTACACAATAGAGGTCCCCTACCACCCAG
CAACTCTGCGTGTGGCCTTAGGGAGAAGCTAGAGCATATGGTCTGGGGAAGGTTAAGAAACCCTTATCCTTGTTGGGTA
AGGCTTTCCAGATGTGCACAGTTGTGGGAGGAACACTGCATCTCTGAAAGTAACCCCTCAGTCATTTGTCCTTTAGAGA
GATGTCTGGTGGAACCCTGCCTAGGCTTGCCATTGAGACCTTGGGAGGAATGGTAGACATTATGTTATTTTACCCCAGG
GAAGGGATTTTAGCAGGAACCTCTCATCACTTAGCCTCAGGCGGTTGCTTCCTTCCACATACTGTGTTCTGTTGCACAC
GAGTTCTGCCTGCTTTCTCAAGACAAAGACTGGCGTTCCGATCCATCAACATAGACCAGAAGCCCTTCAGTGTCTAGAC
CGTTAGTTGACTCATCCCCCGCCCCAGCCCCCATTCTATATTCATTTACTCAGCATGCACCTGGTGTCCCAGGTAGAGA
GACAGACAAGGTCTGCAAGGGCCTCAAGGTCTGGGCTCTGCGTGGTGCAGTAGTCAGTTCTTTCCCCAGCCTCTGAAGG
GGTCCGCCCTCAAAAGTATTGAATAGTCACAAGGAAGAACATGATGACTGATTTTCTGTTTCAACTTAACTAGGCTAAG
GGATGTCCAGAGAGCTTGTTAAACGTTACTCCTAGGTGTGTCTGTGAGGCTGTTTCTAGAAGAAACATTTGCGTCAGAG
ACTATATATATATATATATAAAATCCCCCTGGCCAATATGAGTTCCAATACACTGAGATTCAGAATAGGACCAAAAGGC
CCACGAAGCTGTCCTCTCTCGTCTTCAGATGCCAGCACCCTGCTTCTTAAGTCTTGGATTTAGACTTTAAGATGCTAAA
GGCTCTCAGGTTTTAAAACTCAAAAGTATATCAGCATTCCTTGCTCTCTGGGTTGCAGAGGTCAACCATGAGACATCTC
AGCGTTGGTGACTGTGTGAGACAATCTTTCCTAATAAGTCTCTTTCCTCATGTCTAAGTCTAGCCTGTTGCTTCTGCCT
TTCTGAAGAATCCTAAGTACGGCGGGGATAGGTAGGCAGATGCGAAGAAGGACACACAGACAGCGCTGTAAGACCAACA
CCAAGCAGCCGTCTTTCAGAAGTTCTGTGCAGGATGAGTGTGCATTCCCCCGTGTTCTCTGTCTCTGGATGAAGCCTTG
AGACTAGCTCTGGCTAATGTAGTATCACTTCCTGGCCCAGTGCCTAGGCTAACCCCACAAACTCTTTTGCTGCTATTGT
TGTTGACTGAGACCGGATCTTTCTATTATGTAGCTCTAGCTGTCCAGGAACTCAGTATGTAAACGAGGCTGGCCTCTAA
CTCACAGAGCTCCGCCTGCATCTGCTGGGACTAAAGGTGTGTGTCACCATGATTGTCTGTGTCATGAATTCTTCAACTG
CTTTCAGTCTTTTATCTCCCTGAATACCGACCAATGACCTAGCCGAGATGACCAAGAAGTCACAAGCTAGGGGTGACCA
TTCAACCAGGGCAGGGAGGGGGGAACCTCACAAAACTATATAGTTCCTTGACCTGTAAAAAGGTGATTAAAGGCAGTGA
GGGCTTATTGGGATAAAATCCCAAAATATAAGATGCTGGCTTAGTAGTGGGTTGTAACAGTGAGGGAGCTGGTACTGGA
GTCTGGAGAAGGGACCCCTGTTGTCAGAGGCAATTGTTTGGTAGAATTAGTACTTTGTCAAGAAGAGAGAGAGTAAGGG
CACACACTACCAGGCCCTCAGGAACAGGAAGGAGTAGGGTGAGCAGCGTGCTGGATAGTGGGCACAGATGTTATTGTGT
GGGTTGACAAGGCATGGCAAGAGTGTTGCTCGCTAAGGAGAGAACCAGCCATTATCAAAGTAGAAGTGCAATAAAATTG
AGATATTCTAAAATAAGAGTGGAGTGGAGAGATGGGAAGAGTATTTTGAACCTCTAAGAAGGAATAAAGTGAGCTCTGC
ATACCAATGGCTCAATAACACATATTACTTAATGAACATAAATACATTAAAGTCTTTTTGTTTGTTTGTTAGTTTTGTT
TGCAGTAGAGCTTAGAACCTTGGCTCTTACTGTGGTACAAACACGAAATAAGAACAGTTTTTGGACATTGGACTTCACT
GTAATAAGGCTGTGCTTGAATGTCCCTCACATCACCAAAGGATTTTTACCTCCATAGTAGCTAAGCTAAGAGTTGACAG
TTCTGCTGCACCAAGGAATGAATTGTAGGCTCAGTTTTTGGACACAGATTTCCTGCTATGGTCAAAGCTATTTGACTTG
AGTGATTGTCGTCATTCTCAGCCTGCGGGGAACAGGTTACATTCGTTTAAGAAATGGTGTGTGTATTAAGATGCTCTAT
CCATGAAGTCATTCATCAACTGTTTCAATGAACAATGGCTCTGCTTGGAGAGGGTAAGATTCTGGTTCATTGGCTGTGA
TGACTCTGAAAAGCACATGGCAAACATTTTAATTTGGCTTTTTTTTGGGTTTTTTTTTTTGGTTTGTTTTTTTTTTTTT
TTTTTTTGGTCAAAATGGGTAGGCCCTGAGTAGCTGTGGTTCTGCTGAGAGACAGCAAGTGGTGGACGTGAGAAAAGAA
AGACAACGTTAAGTTTCGAGAGCATGAGAAGAAAGAGAGTGTTGTGATTAATACCCGGAACCAACTCAGAGAAATTAGC
TGTTGAGTAAGTGCCTGAAGGAATTACAGTTCATAATCTACCCAAGCCACGACCACAGTGCAACAGAAATGGCTCTGTC
TGTTCAAGACAAAACAGACATCAGCGTGATGGTGGTGGAAGAACGGGAAACGAGCCTGGGCCACTCATTTCTCCAAGCA
CAGAACGTTTTGAGATCTCCTCTTATCTCTCAGTTGCCAAGGTGTTCACAGCAAGTTCCAAGAAAACAGGCCATTCCCA
GGGGACTGAACGAGTTGCCTCCCCACAGCTTTTGACTCATAAGGTCTCAGGACATACATCACCACATGGATGACTAACA
GAGTCTTCAGGCTTATCCCATCAAAAGATGGATATCCGAGACTCCCAATGCTGAATGAGATGGATTAACAAACGGACCA
AGTTTACTTCCACCCAAGACAGACAAAACTTCTTGACAAATATGTAACAAATCTCTCTTAAAGCGTTAGACAACAAGCA
ATTAGGAGCTGTAATCTCTAACACAAGAGAAACAGCTGGCTGAGGTGCATCTCATCATGACAAGCTCATTCCAGAAGGA
CAAGCTAGGGAGGACTAAGAGAATCTCCCTAAGCTGAGAAGATAGGACTGGAGCCTACGAAGGCTTGATTTTGCAGAGG
ACATCATTAGCAAAGAGAAGCTGTAGGAAGAAAACTCTAGGAGCACACAGAGGGTCCCTCAGGTTTGTTGAGCCACACA
AGGCAAGTAGAGATTACCCCACCCCACCCCACCCTCAAAAAAGACCAAATTGGGGAAATCTTTGTAGCCCAAGGAAAGA
AAACATTCTAGCTGTGTGGACCAGAATGGAAACTTTTATAGTCAGGTAGACTGCGTGGTGCCTGCTTCAGTGACCAGAA
AAAAATTAGCCCCAGACTAAATGCTACTCTGATTTTAATATAATCACATTTAAAAGCAAGTCTTAAAAGAATTAATCAT
GGAGTTGGACAGGTGGCTCCGAACTTTAGGGCATATACTACTCTCGCAGAGGACCCAAGTTTACTTTCAATCCTCCTAT
CAGGGGCCTTGGCCCTCCCACCCCATAACTCTGGCTCCCGGGGATCAAATGCTATTTTCTGGCATTTTCTGGCCTCTCT
GGGCACCTGTACTATTGTACATAAACCCACACAGAAGCACATAGAAGTATATACATAATTAAAAATATTTCTTAAAAAA
AAAAAGAAACAGATTTACTCACATCTCATAACAAAGTTCAAGCATGTTTATAGGAAGACCAAAACATGTAGTCCCAGGC
AAGGTACTATTTACATGCTGGCATACACTCAAAGATGATCAGATTTGAAGAGATGTGGAGAGATATGATACTCCATGCT
GAGAAGCGGTTACCAGTTAGAACTAACCCAGAGCGTGCATAGATGATAGGATCAGTGGGCGGAGACCCTCACACATCCC
TTCACTACACCTCGGGGAAGACAGATGGAGGAGCAACTGAATATACATACAAAAGAGCTCTAAGATCCAGACCGAATGT
ACAGGCATGCAAATGCCCACAGCTGAGGCTTATTTGATATTAGATATGGTGGATTGGGTATGAGAGGGAGACGATAAGG
AAACTGAAGACACCTGGAAGCACAAAGGAGACACACATACACACCAAAACAAAAACACCCCCCCCCCAAAAAAAAAACC
CCACAGTGAGCTCCGGGGTAACAGTGAACACCCCAAGGCATATGTCACTGGAGACCCCACAGAAGTGACTCTGTAAACT
ACTGACTGTGGAAACCACATTAAGCACTTTCTTGATGCTCCAAAAATGACGTAAGACAAGAAGTCAGAACCGTAGCCCA
AGGGAAGAAAGATAGCGGGTGGCTTTCTTGTTGGAATCTACGAGAGCCAGAACAACATTCTTTTGCACAGAGATAAGAG
TGTTTCTTACCTACTAACAATGTCTTTCAGTAATGGAGAAATAACCTTTTCAGGTATTAAAAAAAAAAAATCCCAAAAG
AAGTCGTTGCCAAGTGCGAACTTGCACTGCAAGAAAGATCAAAGAAGTCCTTGGGACAGGAAGGAGTGTGCATTTGCAC
AGAGGAATGAAGAACCCTCCCAGGAACGGCCATGTCCTGAACATAAAAGGGAGCTCTTGGGCTCACTGAGCCCTTTAAG
AGGAACTTGTGTCATTAAAAGAGAAAAGTATTAGCATTTCTTTTTTTTTGGGGGGGGGGGGTAGAAACACACAGGGTTT
CTCTGTGTAGCCTTGGCTGTCATGGAACTCACTTTATAGACCAGGCTGGCTTCGAACTCAGAAACCCGCCTGCCTTTGC
CTCCCGAGTGCTAGGATTAAAGGAGTGCACCACCATGGCCCGGCAGTGTTAGCATTTCTAATCAACTGTGAACAATGCT
GGGCTTCCTTTTCTGCCCTGTACAAGGTTACTTTGAGGCTGTGCATCCCTGGCTCTCCTCTCTCTCCTCCTTCCCTCCC
GCCCTCCACTTCCTCTCCCTCAGCAGTTGGCCTTCTAGGATACAAATAGCCAATGGATACCTTAAAAGGTGCTCAATAT
CCTCAGCAACATTTTCTTTTCTTTTCTTTTTAGAATAACATTTTAAATTTACTTTAGGAAATTTTTATACATGTAAACT
TGGGTCATATCCAACCCCCTACTTTCCCCTTCCAGCTTTCCCAAGGATCCACCAACCTGTCTGCCTTCAAATTTCATGT
CTTTTTTTTTCTAATATCCTTCCTTCCTTCCTTCCTTTCTTTCTTTCTTTCTTTCTTTCTTTCTTTCTTTCTTGCTTGC
TTGCTTGCTTGCTTGCTTGTCTTTTGTTTTTTTATGAATAGCCCTTTGCATTGAGTTAGTGCTGACCATATGCACATGA
AGGCTGGGCCGTCATTCACTGGGGCATGGACAGCCCTCCAGTGACTTCATTCTCAAAGGAAAGTAACTCTCCCTCCCTA
AGCAGCTAAAAAATGCTAATAGCAGCTCAGCTGGGGGTGTGGCCTGAGCCCTCCCTCACCCTTGATGGACTCCTGAGTG
GTTCATGCAGGACACGTTCAGGCAACTGTCCACATCAGCCCTTCCTGGCTTTTCTTCCTCCTCTCTGGATCTTACTTTT
TTTCCCCCACCCTTTGATATTTCCTGAGACTTGGATTGGTCAGGGGGGTTGACATGAATGACCTGGTTATGACCGAGTA
GTCCCAGTCACTAACTCTCAGCACTTTAGCCAGTTATGAATCTCTGCGTTAATCACCGTCCGCTGCAGAAGCGTCTCTG
ACCGAGGCTGAAAGCATCACAAACTTACGGGCATAAACATCAATATTAAGAAGATAGTTTGACAAAATGACCACTTTCC
AAAACACCACCAGTGGATTTTCCCTCCCTAGGGCCTGTGACCTCCACACTCACAGGCTTTCGACGGGGTTTCTAGTACC
ACACATGAATTCACGTCTGTGGAGAAGGTCTCAAGTCCTATCACAAAAGGGTTGGTTACCCCAATAGCCTTCATACCAC
TATTGAAGCAGTGGGCACATCTTGCCTCATAATCTGATGTCAGTGCAAATTTATATGATTTTAGGAGTCTGTGTCATCC
CAATAAGAACAGCTACCATCAAGAAGACAAACAGCAATACTTGAAGATGACGACGTGTGCAAAGAGAAACTTCTCACTG
CTGGTGGGAGTGTAAGCTTGTGCATCCATCATGGAAATAGTGTGTGTAGATTTCCATAAACAAACAAACAAACAAATGA
TAGGTAGATAGATGCATACATACATAGGTAGATAGACAGACAGATAGATAGATAGACAGACAGATCCTTTGTATAATAT
TATACCATTTCTAAGCACATATCCAAAAGACGTCTTATTCTACCAGAGAGGTGCTCACTTCTCTATTCGCAATGGCAAG
GAGATGGAGATAGCTTAGATGTCCATCAAGAGATGAGGGGTTAACGAACATGTGGTATATATATGCAATGGAATTTTAT
TAAGTCATAAAGAAAAATGAAATTATGAAAATTTCATGGAAAATGGGTGGATCTGGAAGTTATTATATTAACTGGGGTG
AAGACAGAAAGACAAATACCACATGTTCTCTCTCAGAAACGGATCCCAACTTCTAATTGTTATGCCGTGTATTTGTGTG
GGACTGAGTGTAGATACGGGCCATAATCTGAGAAGGGACCCTGAGAGAGACAAGGAGAGTTGAAGGGAGAAAGACAGGG
AGGGTAAGAGAGCATTTGTGATGTGGACGTGGAAAGGGAACTATTGGGCACGGAAAGGTACCACGGTGGGCCATGAGGT
GGGGGAGGGGAGCGGGGAAGGAGGTTCAGCCAATACTGTGTATGAAAATGACATAAGGAAACCTGTTACTTTGTACGAT
GATTTAAAATCTCCCTTCTCCTTTCCTGCTAAAAGAGAATTGTGTGTGTTGACATGGAAAATATTTATGTGTGCATCTG
CCCGCAATTATCCCGTCTTGCAGAGAGAAACAGTGAAGCCACTTTGGTTGTCCTGTGCAGAGAGTATGTTCTGCCCTTC
CCAGCCGGCATCTCAACATGCTTGACCAACTGACCACAGCAAGGAATTTCCCATTACACACTTAGTCACATGGATGCTT
TGCGGCACTTAGTAGTTTAAGTCCACCAAATGATGTACTGGCTTAGGAGCAATGTGAGAAAGCCTACAAGTGTAGATCC
TCTGAGTGATCGCTCAGACTCTCGAAGATTATCTTCTTCTGTGAGCCCCAAGTAATAACAATTTCCGGCCCTCTGCTCA
GTGTTCAGTGTGTCTGAGAGCAGAGACAACCAACCTCACTCCATCTTTTGCGTAACCCCTATGTGACACTTAGGAAAAG
CAGCTAGGTGGCCCCGTGACATCCCCAGCTATGGTTTCTTCTGCCTCCCAGGAATGTGGTCAGCTGGAGGCATTCCTCA
GGGTCACCAGTCCCTGCCCTTATGAAGCAACAAGCCATTCCTTGGTGTTTACAGAGCAAAAGCCACCATTTGAGAACAA
CTGTGATGTAGAGACAACAGTGAAAGCAAAGAGTAAGTCCCATTGTTACCTTGCTACATCTGAAGAAGGGACATCATTC
CTGGAGGAAATGAGCAAAATCAGGACCCTTTAGCCCTGACTGCTAGGCTCCCCAGGTGCTCCAAGCAGCAGCACCCACC
TCCCATCCCCCACCACTACCCGGTGCGCTCAAGCCAAGCCCTGCCTGCCCATGGGCAGCTACAGGAAGAGACTAACAGC
ATCCTTCTTCAGGCACTGCTGGCCACAGAATGCCAGGAAGAGGGAAGTGGGAGGCAGAATCCAGAAAGAGAAGGAGTCA
GCTGGGTGAAGCTTCTCTGTGGCTAATGTCATCATAGGGGCCAGAGTGCAGGGGCTTTGTATGGATGTCTCCTGCAGGC
TTGATCTCAAGCCTGCCGTTAGCTGGGCAGTGTCCCCTTTCTCAGTGGCTTCAGGGAAGGGTGTGCTGTATATATTTGT
GTTTGTATATACAATACGTTTGGTGCACACAGACTAGCACTGGGTTGCCCAGTGGTCAGCGTAGCTGCTGTGCAAGGAT
AGCGTATAAATTCATGATGAGCTCCACTTAAATGAATTCTTTTATGTGTATAGGTGTTTTAACTGTGTGTATGTCTACA
TCATGTGCACTCCATGGAGGTCAGAAGAGAGCACTGGGACCCCTGGAACTGGAGTTGCAGTTGGTTGTGAGCATTGTGG
AGGCTAGGTTCTCTAGAGGAGCAACCAGTAAGAGCCTGGGTTCTCTGGAAGAGCAGCCAGTGCTCTTAAACATTAATCC
ATATCTCCAGGCCAAGTGTCCCATAGGGTTAACAAAGCAGCTGGCATCAGAGGCAGGATGACAAAAGTTGGTCACCGGC
CTCCACGTGCATGTACACACATATGCGCCTGCAAGCATCCACATAGAAACACACACACACACACCCCACATGGGCAGAG
AAAGGATTTAGTGCCTACCCAGCACTGAGCCTCAGAGACCGCTGTGTTCTCATCACTGTCACTTCCACTGACCTCCATT
CATTCATAAAGACAATTACTATCTGACGGGCAAGAGACTTGTCAAGCACCAAGCACGAAGAACTCGTTGAAATATTTTA
CAGACTATATATAAATATACCCATTTTAAGCATACAGATTTATAGATGCTAAAATCTGAAACACCGGGATAAACACAGT
CCCTGTCAACATAGAATTTCTTCTTCATCCCCAAGAAATCCCATAATCCCCCGTGTAACGTCTTTCCCCACCCCCAGCC
CAGCTCTCAGCCACTGTAGGTTTATTTTGTTCTTATGGAGAACCATATAAGAGAATGAGTATAGTGTGTGTTCTTCTGT
GTCTGGCCTCTTGAGCTCAGCATAATGGGGTAGGGAATTGGTAACTGGTTGTTTGGAGTGCTGAGTAGTATTCCATGGT
AGATGTAGACTACACTTTGTTTATCCTTTTGTCTACTGAGAGATAATTGGGTTAGTTGTAGTTTGGAGGGTATTGCAAG
CACAATTCTTTTTTTTTCTTCTTCTTCTTCTTTTTTGGTTTTTCGAGACAAGGTTTCTCTGTATAGCCCTGGCTATCCT
GGAACTCACTCTGTAAACCAGGCTGGCCTAGAACTCAGAAATCTGCCAGCCTCTACCTCCCAAGTGCTGGAATTAAAGG
TGTGCGCCACCACTGCCCAGCTCACAACAGACAATATTTTAAAATATTTTTTCCTAATATGGAGCTTGGTTTTTTATTT
TTTTAATAGTGTTTTTGTTGTTGCTGTTTTCAAAAATGGCTTCTGACTGTGATAAAATCTAAGTGACCACTCTTTCTTT
CTTTCTTTCTTTCTTTCTTTCTTTCTTTCTTTCTTTCTTTCTTTCTCTCTCTCTCTCTCTCTCTCTCTCTCTCTTTCCT
TTTTTCTTTCTTTCAGGTTTACTTATTATATATAAGTACACTGTAACTATCTTCAGACACACAAGAAGAGGGCATCAGA
TCTCATTACAGATGGTTGTGAGCCACCATGTGGTTGCCAGGATTTGAACTCAGGACCTCTGGAAGAGCAGTCAGTGCTC
TTAACCACTGAGCCATCTCTCCAGTCCAGACTACTTTTTCTTTTATGTTTGGTTCTTTTTATACACCAGGGAATCCCAC
ATTCTTTTTTTTTTAAAGATTTATTCATTTTTATGTATATGAGTACACTGTAGCTGTCTTCAGACACACCAGAAGAGGA
CATCGGATCCCATTACAAATGGTTGTGAGCCACCATGTGGTTGCTGGGAATTGAACTCAGGACCTCTGGAAGAGCAGTC
AGTGCTCTTAACCATTGAGCCATCTCTTCAGCCCCCACATTCTTTTTTTCTAAAAAATTTATAGTTTTGGCTTTATATT
TGTTTTTATGCTTTTTCTTTCAGTTTTTGCATATAGTCTTAAGGTAAGAATTGAAGTTCCTTTGTATTTCTGTTTATAG
ATATTCAGGTGTCTTGCTTCATCTGAAGAATAAATTATATTCTTCTACCCACTGAGCTTTTAGGATTCCTTATTGTTTT
TTTTTTCCTGAGCTTCTATGTGGTTATATTTTTGCATTGATGTGTTGGTTCGTTTTAAAGTCAACTCTAAAACCAACAT
GTATGGGTGTTTTGCTTGCAAGTATGTCTGGGCATGCAATGCCCACAGAGGCCAGAAGAAGGCATCTGATCCCCTGGGA
CTGGAGTTAGACATAGTTGTGAACCGCGATGTAGATGCTGGAAATCAAACCCCAGTTCTCTGGAAGAGTAGTCGAAGCT
CTTAACTGCTGGGCCATCTCTCCAGCCCTGGTTTTAGGTCACCTAGATAAAAACTAGAGTTATTTGGGAAGAGGTACTC
TCAACTGAGTTTGGGTAAAGGCAACTCTGTAAAGCATTTTTTTTTTTTAGAGAAATTAATGATTGATGTGGGAGGATTG
AGCCCACTGTGGGCAGTACCATCCCTTAGGCTGATAGTGCTGAGTTGTATATATAGGAGAGCAGACTGAGCAAGCTGTG
AGGATCAAACCAGTGAGCAGTATTCCTCCACAGCCTCTGCTTCAGTTCCTGCATCTTGCCTTTAGGTCTTGCTCTGGCT
CCCCTTGATAATGGACTGTGATATGGACATGTAAGCCAGACTCACCCCCAGTACATGTCACTTTTATTCCTCAAGTTAT
CAAAACAATCAATACCCCGATTAAGACAACTCTCTGATCTTGGGCCTTGGATTTACAGCATATCTGAAAATCAAATAGA
ACACCAAGTCTGCCAACGGATATATCTTTAAAAAGATTATTTGTCTATTGTAGGTCCTTAGCATTTCTATATAAATATT
GTTATTAGTTTGCCTATTTCTACAAGGAAAACTCGTTTGAATTTTTATTAGAATTTCATGGGTCAAATTGGAAATAAAT
TGATTTTTTAGCAACATAAGACCTTCCAGTCCATTAACATGGTATATATCCTCATTTATTTAGATTCTCTTTATTTTTT
TTACTAAAGATTTCCCATAGTTTTCAGTGAATAGGGCTTGAATATACTTAGTTTAAAATGTCTCTAAATAGTCCATATT
TTTTTTAGACGACTTAGGGTTTTTTTTTTTTCCCAGATGTTTATTGCTGATGGACAGAAACAAAATATTGTATGTATTG
ACTTGGCCTTTGGTAACCCTTCTCAATCCTGTTATTGCCAATAGTAACTTTCTAAGATGAACTCCTTAGGATTTTTGAT
GATTACTGTTTGCAAATAAAGACAGTTTTACTTGTCTGTTTCTAGCATTTTTCTTTTCTTTTCTATTGAAATCTAAGTT
GGAATACATCCCTCTCCAGTTCCAAGCCCTTCAGTGATTTCATTCCAGTAATGTATAGTCAAAGACCTTATACTAGGTC
CTCTGTCTAGGCTGAGGGGACCCAGTGACACTCCCCCCCTGCAAGAACTTGACTTTGGGGTGGTGGTAGCTCAGGCATG
AAAACTGGGGGAGTCGTTGGGAGCAGACAGATAAAGGAGGCCATAGTCTGCTAGTATGGAGTTGCCCTGCCCTCTGGGA
AATGTATTGTTATGCAGCTAAACTCTATATCCTCCTTGAGGTAACAGGACTGTCTTAGTCAGGGTTTCTATTCCTGCAC
AAAACATCATAACCAAGAAACAAGTTGGGGAGGAAAGGATTTATTCAGCTTACACTTTCATGTTGCTGTTCATCACCAA
AGGAAGTCAGGACTGGAACTCAAGCAGGTCAGGAAGCGGGAGCTGATGCAGAGGCCATAGAGGAGTGCTACTTACTAGC
TTGCTTCCCCTGGCTTGCTCAGCTTGCTCCCTTATAGTACCCAGGACTACCAGCTCAGGGATGGCACCACTCAGAATGG
GCCCTCCCACCCTGATCACTAATTGAGAAAACGCCTTACAGCTGGATCTCATGGAGGCATTTCCTCAAGAGAGGCTCCT
TTCTCTGTGACAACTTCAGCTTGTGTCAAGTTGACACACAAATCCAGCCAGTACGAGAACCTTGTAACTAGACACAGAC
CAATCTCAAGGGAACACTGGTCACACAGCCAGTTCTCACAGATCAGGCAAGTGAGTGATGGGGACCTCCTTCCACCCCA
GGGTTTGTATATTCCAGCAATCAAGAGGACAGCCATCTCTAAGTGCTCCTGGAGTGAGATGGCCCTTCAGCATGCTTGG
CCTGGGTGAGTCTCGAGGTGGGTGTCAGCTGGCACCAACTGGGAGACAGGGGCAAACCTGGTACTGCCATACCTTCACA
CTGCATTTGGGGGAGGCCTTGCCCTGAATGCCAGGCCCACAGTGATGGAGACAGCCCTGCCTTTTATGCTCATCCAGTG
AGGAGACAGAAAGAAAAGTCACCACAGACATTGGGTGGGCAGGTACTGGGAGAAAATTACTCACCTGGTGTACTGGCTA
GTGTTGTGTCAACTTGACACAGCTGGAGTTATCACAGAGAAAGGAGCTTCAGTTGAGGAAATGCCTCCATGAGATGCAA
TTGTAAGGCATTTTCTCAATTAGTGATCAAGGGGGAAAGGCCCCTTGTGGGTGGGACCATCTCAGGGCTGGTAGTCTGG
GTTCTATAAGAAAGCAGGCTGAGCAAGCCAGGTGAGGCAAGCCAGTAAAGAACATCCCTCCATGGCCTCTGCATCAGCT
CCTGCTTTCTGACCTGCTTGAGTTCCAGTCCTGCATCCTTTGGTGACCAACAGCAGTATGGAAATGTAAGCCGAATAAA
CCCTTTCCTCCCCAACTTGCTTCTTGGTCATGATGTTTGTGCAGGAATAGAAACCCTGACTAAGACAAATTGGTACCAG
GAGTGGGGTATTCCTGTGACAACCTGACCATGTTTTGGGGAGGACTGTGGAAGGACTTTGGAACTTTGGGCTTGAAGAT
CCATCCATTGTTAAGACCTCTGTCGGATGTTGTGTAGGAGCTTGGAAGATAATGTTGAGAACACTGCAGAAGTTGGAGC
TCTGGTGTGTGAAATTTCAGAGGGAAAATTAAAGACTCTTTTCAGGGCCATTCCTGTTTTGATTGTGAAGATTCTGTAG
TTCTGGTTAGCTGGGGCTGAAGAATCAGCTGTGATTAACAAGATACCAGAACTACTAAAGCAAAAACTTTGCATTACTG
GGACTATTGATGCTGGTTAGCTGGAGCTAAGAAATTAGCGGTGATTAAGAAGAGACCAGCATCATTGAGGTGACATCTT
CTGGGAAGTATTTTCTGAAAGCACAGTGGCTGTGTTCCAGATATAGCCAAAGTTGTACCTTGTGCTGTGGCTGGACTTG
GTAATGTGTAAGGGTCACCCAGGTGGTACTGGTTTTGAAGGCATGAAGGAGTTGAGCAGAGAAGCTGAGGCTTGGCACT
GTGAGAGGCCATGGAAGGCCATTGGTGAAAGTGCAGCCTCAGTTGCAATTGATGGCCCAGGACTGAAGGGGTCATGCAG
TGTTTTGGAGATGCCAGTACCATGAGATGACCACCAAGAGCAGCAGCAGCAGTTGAGTACAGGCATCTGGAGCCTAGAG
GATGACGCCTGTGCTACAAAGGGCATGGCTGGAGAAGTGACCCAAGCCCTTGGAGGAGCCCAGAAGATCGTGAGTTGGA
TCCCAGACATTGGACGGTTGGAGATTGACTTTTGCTTTTGATTGTGACTGTGCCCTGATATTTTCCCTCTTGAAGGAAG
AAGCTGTTTTAGTGGAGCCCACAGTTAAGAGACTTTTAATTGTAAAAAGACTTTGGATTTTGAAGGAGATGGATATTTT
AAAGAGATTGAAATTTTAAGAATATGTAAAGACTGTGGGACGTTTAAAGTTATTTAGAATGGGGAGGAATAGGATTGTG
GGGGTTGAGGCTTACTAGTGATGTTTTTGTGTGTCAAGTTGACAAGGGGTCAATTGTACTGGCTAGTGTTGTGTCAACT
TGACACAGCTGGAGTTATCACAGAGAAAGGAGCTTCAGTTGAGGAAATGCCTCCATGAGATGCAATTGTAAGGCATTTT
CTCAATTAGTGATCAAGGGGGAAAGGCCCCTTGTGGGTGGGACCATCTCAGGGCTGGTAGTCTGGGTTCTATAAGAAAG
CAGGCTGAGCAAGCCAGGTGAGGCAAGCCAGTAAAGAACATCCCTCCATGGCCTCTGCATCAGCTCCTGCTTTCTGACC
TGCTTGAGTTCCAGTCCTGCATCCTTTGGTGACCAACAGCAGTATGGAAATGTAAGCCGAATAAACCCTTTCCTCCCCA
ACTTGCTTCTTGGTCATGATGTTTGTGCAGGAATAGAAACCCTGACTAAGACACCTGGTCTTGGGTTATAGCAAGCAGT
TGGATAAATCTTCCTGGGAAGTGATAACCCAATTTCTAAGTTTAAAAAAAAAAAAAAAAACCATGGTCGGAGAGTTCAC
TGATTCCTTTAAGGGTGGAGGCAGAAACTTTGAGGATTTCCTGCAGGTCTGATAAGCTGGGCTTTGTCATCCACTTCCC
ACCACACCTGTGCCAGTGTTACCTGGCTGTCCTGAGTGAGTCAGAACCTTGACTCAAGCAAGCCATTCGCAGCACAGTG
GATCAAAGACTGTCCTGAGGAGTGTTGGGCATCCACTGTGTGTCCCATATACTGTTCTTGGAATACACCTTTCCAGAAT
TCTCTGTAAGGCTGGCATCGTTACCTTTGATTTAAAGTATATGAACCGAGGCTCAGGGGGTCTCACTGTGTGCCAGGCT
AGCCTAAAGCCAAGCCTAGATTTGCACACGTGTCTGTCAGCCTGCAAAGTGTGAGAGCCCTCCTTTCTTCCTTCTTGTT
CTCAAAGGCGTACCCCAAGTCAATAACGGTGACATTTGTGATGGCATCCTCCTGGCCTTGGGCCTCTAAGTGTGACAAA
AGCCCAGGCTGTGACTCAGACAGAGGCTTCCATGTCTGCCCTTGGGCTTCAGTGCCCTCAGCCCCCCTCAGACATTCTC
ACTCCCTGAATATGAAGTTCAGTGGTCAATGTTTACAGTGAGTAAGACCATGAGGGTGAGTGAGCCCGTGTGCTAGTTA
TATGGAAACAGACGGAATCATCTCCTCCACCTCCCTGACACAGGTCCGGCTTGGGCTTCCCTTAGCACCACTAACAGGC
ACAGAGAAAGACAATTTCTTACATGCTCGCTTTAAACTGCAAGGCAGTCAGAGCCACTAACCCCAGGCTGCAGAAAAAA
AAAAAAAAAAGTAGGCTCAGATAGACAAAGTTATCTGATCTGGGATCAGACTGACCTGAAAGCCCACCTCATATTCCTG
CACCCCCACCTGCTTTTCTCTATCCCTTTCTGCGATGCCGTTGGTGGGAGCCAGGAGGCAGAGGCTCAGCAGCTCTCCC
AGAGCAAACAGCCCCAACCTGGGACTCTTTTCCAGACTGAGGAATTCTGCCGCTTGCTGGGCTACACCTTACCTGGAGA
AGAGCCTTTTAGCAGGACATGGTAATGTATGGCCCACGGTGACAAAATTTAAGGTCATAAGGTCACTGCAGTGTCATGC
CCTAGCTCCTTCATGTCACTTTTTCACATTGCCCATCAGGAGGAGTTGGGGAACAACCAGAGCCCAGAGGAGATCCTCC
ATCCTGGCTACGTGCTGCAATAGCCAGAAAATTTTTATAACTCATCAGTGCCTGGGCCACACCCCAGACACCTAGAGCG
GGCCAGAAATCTTGACAGGCTAAAAAGTCTTCCTTGCACCACTGACTGTGTGTGGCAAGCCACCCAGGTTGAGGGTCCC
TTGCTACGCGGTGCAGTCTCTGCTGTCCCCATCCTGTCCTCCTGAGTAAGCTTGCTCATTGTAAGGGCTCAGAACTCAG
CATAAGGACAGAGTGGACCACTGATATCTGCTCTCGATGACTAGGTCATCCAGGGCACTGAGGCACCTCTGAGAGCTTT
GCTCTGAGAGATTTTCTCATCCCTGGAAGCTGAGGAATTTTGGTACTTTGGACCACTTTCCTTAGAAATCTGACTCTAT
AGCTCCCAGAGGTTGGCCAAAGGTAGCTAATTTTGTAGCTATGGAGCCAAGGGCCAATAGAGTGGGGCACTTCCAGGAA
GGCTCCCAAGGCAAGCCTTTCTGGCTCCTATTGATTCAACCTCTGCCATCCCAGCTTCCCAGGCAGGCCTGATACTGCA
GTTGGGTCCAGGAACTAAGAGATAACAGGTAACACACTTAGAAATGACAGGCATCGGAGTGGCCTGACTGCTATGTGCA
GGATGCAGAGTTGATGGGGAGGCCAGCAGGAGACACAGTGTGTGCATTTGCAGGTGACACAGTGTGCCATTTGGATAGA
AGTGCTCTTGCTTTTTTGACTTCCAGGTTTATGGATCCAAACCCGAGGCTATATCCCCACTCCACCATAAAGAGTCTGT
GAGTCTAGAAGGTCAGAGAAACACTGGGACTCCTCTTTGGGATCTGAGTGCCTCTGGGCGAGATACACCCAGGGTGGGT
GGACCCACAGGAGATTTTCCTAGGGACTTGGTGTCCCTGGCACCCTGTCCATCGTGACTGGGCTGCCACAGTAGCAAGG
GATCAGTTGAGAGTCAGGGAAAGGGGACACTAGGCCTCTGGAGGCGGTGCTCTGCCACCCCTTACACGCAGAGACCTTC
ATCTGGGGATGGGGTTCTTATTGGAGGGCTTCTCCTCTCTAGTGGCAGACTGGAAGGTCACAGGTAGGCACCCAGAAGG
CTCATTTCCTTTCTTCTTACCCGGATGGACCTCTGTATAAACTGACAGCATGACCACTCCAGGTAGGCTTTTATTGCAG
AAGAGAGAGAGAGAGAGAGAGAGAAGAGAGAGAGAGAGAGAGAGAGAGAGAGAGAGAGAGAGAGAGTATTTAGTCTAGG
CTACTCCCCACAGTTACCTGGCAACAGCCAGGTGTGCCTGACTCACTATAAAAGAGGCTGCTCTCCCTCACCTCTCTCT
CTTGCTCTTCTGCCCTTGTCCCCTAACCTTCCTCCCCCTCTCTCCCCATTTCTCCCCCCTCTCTCTCCACATGCTCATG
ACTGGCCTCTTCTCTCAACTCCCCTCCCTATGCCCTGAATAAACTCTATTCTATACTATACTGTCATGTGTGTGGCTGG
TCCCTCAGGGGGAAGGGATGCCTCAGCAGGGGCCCACAGAGGCACCCCTTCCCCCACACCTTACCTCACCTCCACCAAA
CACATTCCGTCTCTCTTTAGTTTTAAAAGACACAACAGAGAGAAGGAGTGGGAGAGTAGAATAGCTATAGTCATCTGTA
AGAGTCCAGAGCAGAAAATAGCAGGGGAGAGAGAATAGAGAAGACATGATGAAAGGAGTAGGGGACAGCACAGAGAGGA
GAGGGAGGGAGAGGAGAAAGAGGAGGGGGGAGGGACAGAGAAGGGAGAGAGGAAGAGGGGGGAGGAGGGAGGGAGAGAG
GGTAGGGGTAGGAGGGAGAGAACATAGTGGGGGTGGGGGTGGGGGGACAAACTGCCAGGTTAAGTTGAGAATGAGTAGC
TGTGGGGGAAGGGAAGCCCAGGAGCTGGAGGAAGTGAAAAGACCGGGAAGCCAGCGTTACCTTTGAAAGGGGTGACAGA
TACTAGCAACAAGGAGCAGACCTGGAGGCCAGCTTGTGCTTTGGTATGCTAATAGGCACCACAGGTAGCCGTTGGTCCC
TTCTGCCACTGGTAAGGGAAATGGCTCCTTTTGGTAGAGGGAAACTAGGTTCACCGGTCCCTGAGAAATACTGGCTTTT
ATCTAGTCACGGGAAATTCTCCTGTGGTCCAGGCTGAGCCCATTTCTGGCTATTTGGACCGCCTTTTGGGAGTTCGGGG
AGTTGGAGTCTCCTCTGGCTCTAACAACTTGCTTGTGCAGCCTGCCCAATTTCCTGGGTATGAGTGTGGATCCTGAGGA
AGAATTTACAACCCTGTTACCAGGAAGAGCTAGAAACTTTGAAACTCTGACAGGGACTTCCTGTAAGCCATGGGGCTCC
TAGGGTCAGCCTTCTAGAGCCTAGAGTCCAAGAACCCTCTCTCAGGCCTGAGCGGTAGATGGGGCTTCATTAAGATTGT
GCTCAGTTAGAGGTCCTTCAAGTATGGCTTGTAGGTCTGTGTCTCAGATACTCAGCCAGGGTTTTCAGGGTCTGATAAT
TTTTTTGTTTTGAAATGGGAGAGGCCCTAGCCCAGGCCTGTGTTGAACTCCTGAGCTCAAATGATTCTCTAGACTCAGC
CTTTGGAGTAGCTAAGACTGCAGGGGTGTGTCATCTCACCCTTGTTCTCTAAATGAGTGAGCTGGGAGGGGCTGAGTCC
CTCTCCGAGCTGCCCCTGGCGCACACCATGTCTGAGTGCCGGCTGACCATACACATGTCAGCTTCTAGACTCCTCCTGT
CACCTTGCAAAGGCCAAGATAATTTGGAGGTCACACGGGCCAGGCCTCCTGTGATGGGCGACTTTCCTCTCTGCCCCCT
CCGTTCCACGTGTAGCTCCTCACTCTCCCAGCCACAGCCATAGCCAGCCAAGGATTGCAAGAGCCTGGTGGTAAATTCC
AACCCAGCTACCCTCCTCATCAGGTCGGAAGTTTACAGGATCTGTCCCCTTGCCTTCCCAGATAGGTGTGCCAAAAGCT
TATAACCTGGAGATCCCAAGGAAGGAATTCGAGGCGGGAAGGGAGGACCAATGAGAAGAGCCCCAGCCCTTTGGTGCAG
GAAGACTGGGACCAATGAGAAGAGCCCCAGCCCTTTGGTGCAGGAAGACTGGGACCAATGAGAAGAGCCCCAGCCCTTT
GGTGCAGGAAGACTGGGACCAATGAGAAGAGCCCCAGCCCTTTGGTGCAGGAAGACTGGGACCAATGAGAAGAGCCCCA
GCCCTTTGGTGCAGGAAGCCTGGGACTGTTCTTCATGAGCAGTTTTAGAGCATCAACAGACACCGTCCCCATTCTGCAC
CGCGTCACATGCTTATGGCTACGGGGAGGGTGCTATGGAGGTCAAGAAGGGAGGACCAGAGGCGGGCGCAAGGATGAGG
AGGCTGTCCCTGACACCCCCTCCATCAGAAGGGTTCTGGCGTGCAGCTCATTGACATTTAAAACATCTGATGTCTTCTG
CTGGGTTGACAGTAATGGTAGTTTTACCCTCTCTTTATACTAATAATTTCCAGAAAGTAAATTTAAAACAGGCCGTCGG
CTTAGGTATAGACGCAGGGCAAAGTGTTCCCAAGTGTGGTTTAAGGAAAGAGGTGGCCTCAGCCTTTGCAGAGTGGACT
TCCCTTCTCAGACAGACGAGAGCTTTAATTCTGCTCAACACATTATTGCCATTTAAAAATTTTTCTTCAAGGTTTTTTT
TTTTTTAATCTGAGAAGGAATAATTATTTTGCCTAAAACCACCACTTTCTACCATGTAAAAAGTCTAACATGAATGGTG
AAATCCGTCTGCAGTGTGCCATGAGCAGCTTTAATAATAACCATCTGCCCAGCCTTGTTCATCTCCAGCTCTCTCCCTC
GCCTCTGGTCATTGGATTACCGGAAGGCCAGCTCTAGACTTGAGGGCTTTCATCTGTGAATACTTAGTGCTCTAAGAAA
TAGGGCTTTCTCTTCAAAACCAGACGTGCAAGCTAATGCAGCAGCCTAGAGAGTTAACTGTGGCTCCTGAGTGTCATCA
GGTTCCCCCCAGTGATTAAACTCCCCCTGCTGCCTCCTTACGGGCACGTGTGGCTGTGCAGCTGTGTGTACCCCAAGAG
CAAGAGAAGAGCATCAATAGTTCTGCGCTATTCCTCTCAGCCACACCCCCTTGAGATAAGTTCTCTCACTGAACTCAGA
ACTCCACTGAGAGTCAATGAGCCTCCGTGTCCGTAAGATCTTCCTGTGCCTGTCCTCTACCAAGCTGGTTACTGGTTAA
TAGGTGTCCACACCGGTGTTTTCCTCTGGGTTCCAGGTTCTAAACTCAGGTTCTCACACTTGGACACCAGATGTTCTTA
TCCATTGAGTCACATTTATCCAGGTCCTACTTGTGTTAGAATGGCGGCTTGTCCGGACAGATCACACCAGGCCAGCACA
GTTCCACAGGGAAAAGGTTTATTGGAGGGGGAAGAGGACGAAGGTGGGCAGCGAAGAAGAAAGAGAGAGAGAGAAAGTC
AGGGGGCTCTGCCTTTTATTTGGGCTGCGATGAAACTGCTCACACAATTGTGCACAGGTGAGGACAGGCAGGTGAATGG
AAGACGGTTGCCATGGCAACAGATGCAAGTCCCTGTTGTCTATGGGTGACATCATTGTATTTGAAAGTTTTCTTCTGAT
GCCAACACTACTAATGGGTTTTCATAGATGATTTGTTGAAACAAAGTTTGGACATCGATTGTGCTTGGTTAACACGCCT
CTTAAGCTTCCTTGAGACAACCATTTTTCTTGTAATATATTTGTTTTTTTAAAAAATCATATGCCCTGCAGAATCTTTC
ATATCTTGACATTGTTGATTGTACCGTCCTGGTGCCTTTCATGTATTCCTCTGGTCTCTCTTCCTGACAACAGTAGTTA
GATTTGGAGGTTTCATCAGACCCATGGTAAATTCTCTGTAAGAAGTCGTTGACAGTGAGATTAGTCTTTATTCTAGCAA
ACATGTCCTTTTTTATTTTTTTATATATTTTTTTATATTTTTGGTTTTGTGAGATATTCATTGCAAAGTTTTTCATAAT
CTCTGGCTTTGAGTTTTAAATGGCATCCGTGGGCCCACACGATGGGTAAAATAAGGGTGCTCACTGCCAAGCTTGACAA
CCTGGGTTTGATCCCTGAAACCCACATGGTCTGACACCTGGAAATTGTCCCTTGACCTCCACCTGTGCACTACAATACA
CACGCCGACACAGTCAAATCAATCAATGTAAAAAAGTGTTGACGTCATCCCAGAATGCCATGGTCCATCATTATGTCAT
GACATGCAAAACAGTGGTTTTTAAAGTCTGCCAAGCACTTCTGAATTTCTTACCTAAGACTCTTCCCTACAGCGATTGG
CTAGACCCTTGGTGACCCTGAAACACGGAGGGCGGAGGAGCTCCAGATAAACCTTTGACTCCGCTTGTGTCCCAATACC
TGTCACAGGCAATTAGTGAGACGGGTGTTAACCTCTGAGTATCTTTCTGAATGCCACCAGGCTAGCCTGCCACCTTTGT
GGGTGCCAGCTGAAGATTTGTGAGGTCCAAATCAGAGGCGGTGATGTTCACACCGATTCTCCCCTCTTCCAAGTCTCTC
CAGGGAGGGATGGCGTAACCCAGGCAGGTACTGTCTATACAGTGGGGTTGTGTGGTAGCCGAGCCACACTGGACCTAGG
AGACCATTGAGAGATTCACCTTGGCTCTGAGTATGACATAGTTTGACCCAACATAATTACTCTATGCACACATAACTAA
GATAGCCAGTCTGGGTTAGGTGGGGACAAGGCTGGAGAAAAGCAGGGGTGCTGGGCTTAAGTCCTGAGCTTCTCGAATT
ATTATCCAAAGGCACAGTTATTTTTAAATACGTTTGATGTATTTTATTCTGTCGAGGTCATTTAGCTTGCTGGTGCTCA
GGCGTCCCGTATATGACCGGTGGGAGCCTTTGATGTGGCTCCTGTACCCTTTTGGTATAGTCACAGTGGTCCTGCATAG
TCTTCTAGTCTGACAAGACCTTCTGGCCTCACCCTGTTCAATTCCTACCTCAGAATTCATATATTTCCTCCTTTCTTGG
CTATTGGTGTTTAGATACACAAAGTAGGTTGAAAGTGTGCTTTTAGGTTAGTATCCGTTCTGTGTCCTAGGGAAATAAG
TATTTATTTTGAAACATAGAACTATTATTTGTCATATTGATATTTTAGATTAAAATTTCAGATTATAGGGCTCAACTTT
AAATTTTTTGTTTTCTTAAAAGTGTGTGTGTGTGTGTGTGTGTGAGTGTATATATGTGTGCATGTTTTGTGAACATGTC
GGTGTGCATACATTTGTATACACATGCATGTGTAGGCTAGAGGTTGATATTGGGTTTCTTCTTCTATCAATGTCTATTG
TTTGTTTGTTTGTTTGTTTGTTTGTTTTTGTATCTAAGACAAGATCTCACACTAAACCCAAAGCTCATCAATGACTAAC
TAGAGTGATGGTTGTCCATCTTTGAGGATCTGTTTCCTCTATGTACCTCCCTTCCAGCCCTCTGAGCCCCCAACTCTAG
GGGTTACATGTGTGAAGCAAACCTGGCCTTTTCATAGACCCTGGGCATCTGAACTCAGGATGCTTGCATGACAAGCACT
TCACCGACTGACCCTTCTCCCCAGCCCCTATTCCTCTAGTTTTTACATAAAAGATAACGTATTGTCCATACTGTCTGGG
CAGTGGTGACACACACTTTTAATCTGAACACTCCGGAAGCAGAGGCAGGCAGATCTCTGAGTTGGAGACTAGCCTGGTC
TACAGAGTGAGTCCAGGACAGCCAGGGTTACACAGAGAAACCCTGTCTCAAAAAAACACAACAGAAAACCAACCAAACA
AAAAAGATAACATGCTGTTGCACGGTCTCCCACAGGTCTGTATCGTTGCTGACCAATTTGTGGTGTTATTTTGAAGACT
GTGTTGCCTTAAGTGGCCAGGCTGGAGGAAGGAGGCCATTGGATCAGGCCTTTGGGGATTATACCTGGCCCTGGTTCCA
GCCTGAGCTCTGAGCCCCCTTGTCATGTGAGAGGTGGTGACTTCTTTGCCCTCAAAAGGAGCCGCTCCAGATGTGCCTT
CCCTACCTGAATAGACCATAATCCCTCTGAAATGGTGAATCAAAATAAACTCTCCCTCCCTTAAGTTGGTTCTCTCAGG
TACTTTGGCCACAGCCATAAAGAAAGCAGCCAACTCGCATATTATATACATGGTCTGCACCTTCCTCTGTTTCACATTA
GATGCCAATACATTGTCCTTCTTTCTAACTCCATCTTGGCTCTGTATTGCCTAGTCATGGTGGGTGGGGGCTATTGGGC
ATTCTCCTGTGTTTCAAATGAGTGTTTCCAGCCTTCTGCTATTACAAGCAGCACTTTAAAGAATGATCTGACGATAAAT
CCGTTTGGATCATTTGCTGGTAAGTCTGGGACTAGATTCTTAGAAGTCCAGTGTAAGAGTGACCAGCGCAGATTCTAAG
CCCAGCCCTAAGGTTACCGGGTCCTGTGAGGTCTCTGAACCTCTTATTGAAAATGAACCTTGCTTGCCTACAGGCGGTG
AATGCTGTCTGGGGGAGGGAGTGCTGTTCATTTTCTGTCATAACCTTTCACAATAAGCCTTTTATTTTATTTTTTTTTA
AGTTAGTTTATAGTTCTAACATCTGTCTCTCCTCCCTTCCCTTAGAAGGATGGTAAATAAGATCTTTGACTTTTGAATT
GTTTTAATTGCACAAGTCATGAGTCATGAATAGATCTAATACAAAAAAAAAAAGAGTAAAGGCTAGTGTAATTTTGTTT
GCTATCATCATCAAATTTCCTTCCACACTGGGCTGGTTAGTTTTATGTCAACATGACACAAGCTAGAGTCATCAGAGAG
GAGGAAGAGCCTCAGTTGAGAAAATATCTCCATGAGGTAGGGCTGTAGGCCAGCTTCTGGCACATTTTTCTTAAGTAGT
GATTGACAAGAGAGAGTCCAGCCCATTGTGGGCGGTTCCATCCCTGGGCTGGTGGTCCTGGGTTCTATAAGAAAGCAGG
CTGAGCAACTCATGGGAAGCAAGCCAGTAAGCAGCACTCTTCCACCGCCTCTGCATCAGCCCCAGCCTCCGGGTCCCTG
CCCTGTTTGAGTTCCTGCTTGAGCTTCCTTCAGTGACGGACTACGATGTGGAAGAATAAACCAAATCAACCTATTCCTC
TCCAACTCACTTTTGGCCATGGTGTTTCCTCACAGCAATAGAAACTGCAGCTAAGACAGACAGGGTTGGGCCTCGCCAC
TTTCTATCACTGAATACGTCATCAAGAGTGATGTGATATTTTTCTTAATATTTTCAGTATATCTGAAATTACTTATTTA
CAGCAATTGAGACGTATGATATAACCTTTTTACTTAATTTTAGGAGAGTACAAAGATCTTTCAATAAACTTTGTTAGGT
TGCCCAGGTTGACCTCAGACTTACTGTGTAGCCAGAGCTGGACTTGAGGTTTTGATCCTCTTGTTTTCACCTAAGTGCT
AGGCTTGCAAGCATTTGTCTCCATGCAGCGGGGTGGGGTGGGGGGTGTGAGGGGTTGGGGAATCTGTCTTAGTCATGTG
ACCAAAGACAACAAGTACGGAAGAGGGTGTGAAGAAATGGATCTTCTGCACACTGATCATAGGAATGCAAAGTTGAACA
GCCATTATGGAAAGTAGTAAGGTAGGTAGGTCCTTGAAAGGTTTAAACATGAGCTAGCATATGGTCACACAACCTCTCT
ATTGAATATACACCCAGAGAAGGTGGAGTCAGTGTGTTTAAAGAGACACCTACATCCCAATGCTAGTTGCAGCACAGTT
CCTAAGAACAACAACAAAAACAAACAAGCAAACAAAAACGGCAGCCATTAACTGATGAGTGGGTGAAGAATGTACAGTC
TGTACGCAGTGAGAAACAGAGAACTATGTCATTTGTCACAAATGGGCCTGGAGGTCGTCATGTTATAGGAAATAAATTA
AGCACACAAAGGCAAGTGTTACATGAAGTTATTCTTACGTAGAATCTATGAAAGCTGCTTTTATAGAAGTTGACAATGG
AGTGGTAGTTATCAGAGTACAGGGAGAATTGGAGAATGTTGATCGGTGGATTGTAAGTAATGGTTGAGAGGAGTAACAT
GTTCTCGTGTGCTATGACACAGCCATGTGACCATAGATAACGATAATGCACTGTTTATTTAGAACCACTACAAGGGATT
TTCACCATTCGCTAGTGAGGGACTAAAGATATAGCTTGTACTGGCTAGTTTTGTGTCAACTTGACACAGGCTGGAGTTA
TCACAGAGAAAGGAGCTTCAGTTGGGGAAATGCCTCCACGAGATCCAGCTGTAAGGCATTTTCTCAATTAGTGATCAAG
TGGGGAGGTCCCCTTGTGGGTGGTGCCATCTCTGGGCTGGTGGTCTTGGTTCTATAAGAGAGCAGGCTGAGCAAGCCAG
GGGAGGCAAGCCAGTAAAGAACATCCCTCCATGGCCTCTGCATCAGCTTCTGCTTCCTAACCTGCTTGAGTTCCAGTCC
TGACATCCTTTGGTGATTAACAGCAATGTGGAAAGTGTAAGCTGAATAAACCCTTTCCTCCTCAACTTGCTTCTTGGTC
ATAATGTTTGTGCAGGAATAGAAACCCTGTCTAAGACAAATTGGTACCAGGAGTGGGGTATTCCTGTGACAACCTGACC
ATGTTTTGGGGAGGACTGTGGAAGGACTTTAGAACTTTGGGCTAGAAGATTGGTGTTAAGAGCTCTGTGGGATGTTGTG
TAGGAGCTTGGAAGATAATGTTGAGAACAGTGCAGAAGATGGAAGCCTGGCTTGTGAAATTTCAGAGGGAAAATTAAAG
ACTTTTTTCAGGGCCACTGTTACTTTGATTGTGAAAATTCTGTGGTTCTGGTTAGCTGGGGCTGAAGAATCAGCTGTGA
TACAAGATACCAGAACTAGTAAAGTGAAACCTTTGTATTACTGGGACTATTGATGCTGGTTAGCTGGAGCTAAGAAATT
AGAGGTGATTAAGAAGAGACCAGCATCATTGACGTAACATCCTCTGGGAAGTGTTTTCTGAGAGCACAGAGGCTGTGTT
CCAGAGATAGCCACGGTTGTATCTTGTGCTGTGGCTGGACTTAGTAATGTGTAAGAGTTACCCAGGTAGTACTGGTTTT
GAAGGCATGAAAGGGTCACGCAGAGCAGCTGAGGCTCAGCACTGTGAGAGGCCATGGAAGGCCATTGGTGAAGGTGCAG
CCTCCATTGCAATTGATGGCCCAGGACTGAAGGGGTTATGCAAAGGAGTTGAGGCTTGGCACCATGAAGAGTGCCTATG
AGAGACTATTGTTAAAGCCAAGTTACAGTGGAAGACAGCAGAATTTTGGAGATGCCAGTACCATGAGATGACTACCAAG
AACAGCAGCAGCAGTGGAGTACAGGTGGCTGGAGCCTAGAAGACAACATGGGTGCTACAAAGGGCATGGCTGGAGAAGT
GACCCAAGCCCTTGGAGGAGCCCAGAAGAGTTGGATCCCAGACATTGGATGGTTTGAGATTGATTTTTGTTTTTGATTG
TGACTGTGCCCTGATATTTTTCCCTCTTGAAGGAAGATTTTTTAGTGAAGCCTCCAGTTAAGAGACTTTGAATTTTAAA
GTACTTTGAATTTTAAAAGATACTGGATATTTTTTAAGGGATGAAATTTTAATATGTAAAGACTGTGGGACTTTTAAAG
TTGTTTAGATCTTGGGGATGAATAAGAAACTAAGGGTTGAGGCTTATTAGTGATGTGTTTGTGTGTCAAGTTGACAAGG
GGTCAATTGTACTGGCTAGTTTTGTGTCAACATGACACAGGCTGGAGTTAACACAGAGAAAGGAGCTTCAGTTGGGGAA
ATACCTCCACGAGATCCAGCTGTAAGTCATTTTCTCAATTAGTGATCAAGGGAAAAAGGCCCCTTGTAGGTGGGACCAT
CTCTGGGCTGGTAGTCTTGGGTTCTATAAGAGAGCAGGCTGAGAAAGCCAGGGGAGGCAAGCCAGTAAAGAACATCCCT
CCATGGCCTCTGCATCAGCTTCTGCTTCCTAACTTGCTTGAGTTCCAGTCCTGAAATCCTTTGGTGATTAACAGCAATG
TGGAAAGTGTAAGCTGAATAAACCCTTTCCTCCCCAACTTGCTTCTTGGTCATGACGTTTTGTGCAGGAATAGAAACTC
TGACTAAGACATAGCTTGTTGACAGAATGTTGGCCTAATATTTGTAAGAACCTAGGCTCAATCCTCAGGGAAAAGGAAA
GAAAAAACAGAAATGACAAACATTTGTGGTGATACATATGTTTGCCCCAATTTAAAAAATTGTACCAGGCTGTGGCTAT
AGAATGTTTGCTTAGCACATATAAAGACCTGGGTTTTGATCTTCAGTGTGTGTGTGTGTGTGTGTGTGTGTGTGTGTGT
AATCCATGGGTTGAAGACTCATACAGTTCCCCTGAATATGGATAATTTTGGTTCTATTGGTTTAAAAGCAAACATTTTC
AAAACACAGGTGGTATAAAAGACTAAGTATTTGTATCAGTCCTGGGTAAAGTGCAAGGCTTTGTTGACACATAGACCTG
AGCCCCATTCTTGCCTTCTCATCTGTTGGTCAGGTGACCCTTGGGGAAGCATTATTGGGAAGGGAGGGGTGTGTGAATA
CATAGAAAGCCCATGGCTGAGTCTGGGAGTCATTGCCTGGGAGAGACAAGGACCACCAGACTTCCTCGTGCCAAGCACA
CACGACCCTTTTGTATTCAAGGGTCTGAGTACAGGAGATATTGAGGCTAACACTAAAGGACTAGGCCATAGGTCAAATA
ACTTGCCCCAGTTTCCCCTGAATTTCTCTGGTTTTAGTTCTGAAAGTCCCTGCTCTGGGAACCCCCTCTGTCCTGAATA
AACCACAACAGATGGCTTCCTTATTGGAGAAAGAGACCTGGATTGAGGGGTCCTGAGACCCCTCAACCAAGTTGGAGGC
AGCTACCTCACCCTTGTCAAACATTCATGTAGCCCAGTGGCTCTCAATCCTTCCTAATGCTTCGACCCTTTAATTACAG
GTCCTCATACTGTGGTGACCCACAACCATAAAATTATTTTTGTAATGTAAATATCTGTTTTCTGGTGGTCTTTAGCAAC
CCCTGTGAAAGGGTCCTTTGGGCCAAAGGGGTCATGATCCACAGGTTGAGAAACACTGACATAGCAGAACAAAACAAAC
ATAGCTATTGTTGCCGAGGGGGCTGGAATTGTCTTGAAGCTAAAGTGGAGCTATCACCTTGAGGAACCAGTGCCTGGTT
CCTTTCTCCTGTCTGTGGCTGGAAGCAGACTTAGAAACGGTCTCTGTGGGGTCTAGGGAGATAGTTGTCTGTAAATTGT
TTGCTTTGCAAGCACAGGGATTTGAGTTCAACCCCCCAAGCCCCTGTAAACATCTAGTCTTGGTGGTGCACACTTAGGA
TCTCAGTGTTGGGAGGCAGAGACAGAAAGGTTCCCTGGAGATCACCGGCTAGCCCGTCCAGCACGTGGCAAGATCCAGG
CTAATAAGAGACTGTCTCAAAATAAAAGAAAGGTGGATAGCATCTGAGGTATACCAGTGAGGCTGCCCTCTGGCCTTCG
CATGCGTGCTTACATGTGTGCATGCCTGTGGACACACACACACACACACACACGGCACATGGATCTTTGGCCTCTTGGT
AGCAATATTAACTGGAAAGACAGCCAATCTCTTTCAGGCTGACGGAGGCTAGTATTTTATCAGTAATAATGGTGAGGTA
TGCATCAGCCTTTAGCTGTTCTGAATTATGGCTTTCAATATAAGAAAAAGCGATCCCTGGAACTGAATTTTCTCATTCT
TATTCACTAGGGGTTAGTCATGCCTTCAGAATGGCCAAGTGAGAACCTTGGTATTTGGCAGCCTGGGCTTCAGGCCTCA
AGGCAGGAGTAACCATGCCAGACTTGGGTCATTGATGGAGTTTCTCCACTCTGATTATTTCATCATTTTTATGAAATCA
CAATGTCCTTCCACGGATTATTAAGTGTCCCCAAGATTGCCAAAAAGGAGGCTACTCAGCCAGAAGGTTGTGAGTTGTA
CTGGGACCTCACTATGTCCCCAACATCTTGAGCTTCCAACTCCCTGCTCTTTTACTAGAAACCAAGGAACAGGCTTGGG
TGTGGCTCCTCAGACCCAAGGGGGGGATTTATAACTTGAGTCATGCATTCTAAATCCTATTAGTTGCCTCTGAAGTGTA
ACTTCACCTTCCAAATAGCACAGTCAACCTCCAAAGCCTGGGTTTTCATCCCTGTGAATGGGAAATGAGTGTAGTCTCC
TGTGGCCTATTACACACCCTTTGTTCCCTTTTATTTGACCATCCACTCACATTTCTTCCCCCTCCAATTTCAAGTGCAT
TTGTTCTGCCCCCACCCTCACTCTCCTGTGGGGATGTGGGACCACTTGTGGCTTGGTACCCTCCTGACACTGCATAGAA
CCGATTTCCTTCAGAAATGAAGCCATTCCACCATCAATGACCCAAGGTGGTCCCTCTCTTACTACTTAGACACAGCCCA
GGGTAGCACCAGGCACAGGACTGCTCACTGGGTCTTTCTCTCCAGAGACCTTATTCTCCAAGACAACACCAAGAGGGCT
GAGCAGTGTTTACACTTGAACCCGCTCAGTATAGCTCCCGGAGTGGTGCAGAAGCAGCCTGTCTGCAGGCTCTGACCTC
CTGGCGGCTACCGTGTCTCTTCCACTCTTAAGGCTCTGCACAAAGACTTCCAGAGCCTGGGGTGTGCTGGGTACTGGGG
AAGGTGGGCGTTGCTGGGTGAAGAAAGTCTGTGGGCAGCCATGATTGACGACTTGCCCACAAAACAGCCTGGCTCCTCG
GAGCCTGGAAATTGAAAAAGGACAATTTTTTTTTTTTTAAAATTAAGTGCTTCTTTTCTTTATGCAGTGTACAGCCCGA
TACAAAACACAAGGCACATCACAGTAAAATGTTATCAGTCTTCTGTTCCCATCCCCCACCCTCATCCTAGTTTCCTACA
GATTCGACTCACATCCATGAGAGTGAGGGGTGAAGTAATGGCTGGGAGGCACAGCCTCCTCAGGCATCTTCCTCGTGCA
GCCCTTGTGACCACAGCTGACATTTCTCGGTGGTTCAGATAGAAACAGGTAGGTATGAGGTTTTGTTGGAAGAAGCAGG
GTCTCACTGGAAAAAAATTGTCTGGAGGTGAAAGGTGATCTTGGGCACTGGTGGGCAGGAATGGCTGCAGCCTGTGAGT
TGTCCCATGGGTCTTTAGCACTGCAGCCCTTTCTATTGGGAGATGAAGTAAAAGCCACACAGAGGTCTCAGTTGAGGAT
GTCTTTGTGATGTGTGCATGTCTTAGTCAGGGTTTCTATTCCTGCACAAAACATCATGACCAAGAAGCAAGTTAGGGAG
GAAAGGGTTTATTCAGCATACGCTTTCACACTGCTGTTCATCACCAAAGGAGGTCAGGACTGGAACTCACACAGGGCAG
GAACCTGGAGGCAGGAGCTGATGCAGAGGCCATGGAGGGGTGCTGCTTACTGGCTTGCTTCCCCTGGCTTGCTCAGCCT
GCTTTTCTATAGAACCCATGACTACCAGCCTAGGGATGGCACCACCCATAATGGGCTAGGCTCTCTCCCCCTTGATCAC
TAATTGGGAAAATGCCTTACAGCTGTATCTCATGGAGGCCTTTCCTCAAGGGAGGCTCCTTTCTCTGTGATAGCTCCAG
CTGTGTCAAGCTGACACACAAAACCAGCCAGTACACTGCGTGACGCTGGTACCTGCTGTCCTGTAAATGGAGTCAGGAA
AGCAGATCTTTTCCATCCTGTTAGCACAAAGGCCCAGCACACAGTAGGCATTCTGGAAACCTCTTTCTGCCCATGCCCA
CAACACAAATACTGCAATCTGGCCAACTATGGGATTGCATCCTTGCCAGTCCTTGCTCAGGAAGCAGGTGTGTGTGTGT
GTACTGCTAGGTATGAGGGCTACGGCTGTGGATGACATAATGTCCAGTCCTAGGGAAGCTTCCGTCATGGGGAGGAGTG
TGATCAATAGCCAGATAGCTGTGTGTCCGCAGTGCCAGTCCACAAATGGCATAGCAGACCAGGATGCAGAGTAGGGGTA
CCTGCCATTAATTTCATCAGGAGGGACTAGGTAGGCCTCTGAAGAGGACACGAAGGAGGTGGGTAATGGGCAGGCCATG
TCTGGGAGCTGATCCTAACTAAAACCATCCAACCAGAATGGCTGAATGTGCTGGGAGAGGGGGTGGCAAGAGTCTGGGA
GCAGGAAAAAGGAACCTGGAGTGCCAGGAGATGGAAGAGCAATGGGGCAGAAGTATGGGGGTACAGGTAGGGCAGAAGT
GGGGGGCTGGCTTTACTCTGAGATATGGGAAAGGTCTCAGGGGGCTACAGCATCCCAGGTCAGTGACAGCATCAGACTT
GAGGACAAAGCCATTTGCTCTGCAGCTGTGTAGCGGCTGTAGAGGTTGAGGGCAGACACAGAGAAACACTGAAGAAGAG
GCCCCAGCAGTGACTGGGCCTGGGGAGGAGAGTGCCTTGGCTAGGGTGACCCTGGATGTAGTGAGGGATGATCTAATAT
GGGCAAGATCCAGAGGCAAAGCCAGATGGATGTTATGATGAGTAAGATGTGTCTTATCCACCCATCCACCCATCCATCC
ATCCATCCACCCATTGTGACAGACATTGGTGGGACCTCAGACTTTGCCTTAAGTGCCTGAAGGTACAGGGAACAGCAAG
ACCAGCCACACTGGTGAGGTCTGGGTTTGACTGAAAGTCTCCACAGCAGTTGCATCTCAGATATCCTGTATATCAGATA
TTCACATCATGATACATAACAGTAGCAGAATTACAGCTATGAAGTAGCAATGAAATAACTGCATGGTTGGGAGTCACCA
CAACATGAGGACCTGTATTAAAGGGTCACAGTGTTAGGAAGGTTGAGAGCACTGTTCTACGTCAACTTCAGATCTCCAC
AGTATGCATATACATGCATGCATGCCATACATGCACGTATTTTACACACACACACACACACACACACACACACGGAAAA
GGAAAAAAAATCTCAAAGAATTGGTCAAAGCAGGCTACTTATGTGTGTTCTTTACAGTCTAGAGTCATGATGGGGTCTC
TCAGAGGAGAAGAGCAATAGCCCTCCCAACCCCCGTAATTGGGCAGCTGATGTTGCTAGGTAACCAGACTCAAAAATGT
GAGCAATAGCCCCTTTCCAGCTCCTCAGTGAAAGATGGACTGTGTAGAGTCCATGAGAGATGAGAGAAGGAACCTGCTC
AGGACAGCCAGCACTAAGGGCGATGCTTACATTTTAGCAGGCTCCAATGTTCTTAAGGACACTTCGCCCATGTTGAAAG
TAGGTCTGAATTCCTGAACCTTGCAATTGAGACCTGACTGTGAGTTTACAGCAAAAGTCAATACTTAACAAATATAGCA
CCTGCCAGAATCTATAAACTGCCTTCTGATTCAATATTGAGAAATTTAATTTAAATAGGTCATAAAGAAATGGGGCAAG
AACCTGTCAGGAGTCCTGAAAGATCTCTCTCCTCACAGGAGACCCTGTTGATCAGTTAGGTGAATCCTAGATAGTGTAG
GGACTTGGTGTTTTCTTCATGAATGTGTCTTGAACCACTGTCAAAGTGTGTGTGTGTGTGTGTGTGTGTGTGTGTGTGT
GTGTGTGTGTTGGGGGCAGGGGGTCTTGAAGCTGTGAGGAGGGTTTTTCTGTGGCCATATCAATCATATTGAGAATGAG
TGAAATGTCTGTTCTTGACACCTGAGTGTCTGTCCCCTCTGGGAGCAGGGTGCAAATCACATGATCCAATACAAGAGCC
TTCAAAGTGACAGCTGCCCTTGGTTAGGGCATTGTTCATCTTGTCACCAAAGCTAATTCTTTTCTACACACCCTCACAA
GATCTCTCTGGGTGTCCCAGGGGGATGGCACATAGTCTCTATCCTCAGGGAGTTTGTAGACAAGCAGAGTAACACCTTT
AATGAGTAACACCTTTGCCCTTGAGACGCCCACCTCTAGAACTAGATGATAAAGCTACTTTCTCTCTGTGTGTGCAAGG
TGTACCCTGAGAGGTGTGTATCTCTTGGGCTCCCTTACAGGGTTGCAGACTGAAGCCACCAGCCCGTCTGGCCATAGAC
CTTTCTATCTAGATTTAAGACAGAACAAAACAAAACAAACAAACAAACAAAAAGTTGTTTGTTTGTTTTTTTAAATCCA
TTTTCCTTAGGACCAGCAAGATGGGTGCTTACTGCCAAAGCCTGACAGCATAAGTTCAATGTGTGGGACGCACATGGTA
GGAGAAAAGCAATTTGTAACTTCCACATGTGGTACACGTGTGTGGGGGTGGTGGTGGGAGGGGTGCATATGCACCCGCA
AGTACACACAGAACAAGCACACACAAATCAATAAATGTAAAAATATAAAAATGAATCTCACTTAGAAGCCTAAGTCAAC
AGTGGCTTATTAACATAGTTTTATTCAAGGTCTGTCAGAGAACAATAAGGTAGTCTATTAAGTTAACATAGACACTGGA
AACCCAGGGGGACAGGAAGCAGGCAGTCTCAGACCAGCCTAGACCTGCAGTGCCTTCCCATGTATTGATTCTCTCTATC
TCAGCACTATCAGGTGCCAGGTGCCCCAAAGTCACTGGCTGGCCTGGGCCTTGAAAGACATTTACAGAAGCACTGATCT
CTGCCAGACACCAGGAGTGGCAGCCACTTTGTTTAAGTCAAAAATGTTTCCAGACATTTCCCATGTCCTCTTGGGTTAC
ACGATTACCCCAGTCAAGAACCACTGCTCTCTATTTTGAATGAAAAAAAAATGTATTAATAGGGATCTCTCTCTCTCTC
CTGCCCCCCTCGTGTGTGTGTGTGTGTGTGTGTGTGTGTGTGTGTGTGTGTGTGTTCACTGTTCCCAACACTCTTGGAA
TTCCCATGAATTACATAGACATTTTATTCTAAGGTGGGCCTACAACCAACCCACAATACAAGTTATTAAGTTGGTAGTT
TTCAATGTACTAAAATTTGTATGTAACACATTTGAGTGGGTGTGTTGTTTTTATTACAATTTTTGAGGAGTAGGAAAAT
CTTCATGTTAAAAACATTCAAACCAAATGTTGGCACATCCCTTGAAAGCCCTTTGAGAGTCAGCTTGGAGCCAACGGTG
CTGGCTTGGATCTGAACATGGTCACAGGTTAGAATGGGAGGGCAGCCTAGCCATTGCCCCTGGGACCCCTTGGCTCTGT
CCAATACAGGCCCGAGGAGGAGGAAATTGTATGTACCGGCCTGGGAACCTCTCAGAGGGTTTGGAATTGAAGCAAGGAA
CTCAAGATTGATTTAGGGTGTGAGCCCAAGGGAAAAACAAGCCCCTGGCCCCGAGCAGCCCTAAGATTGAGCCCGAGAT
CCTGGTGACGCAGGGCCAGGAGGTTAAGCCCAGAATAATCATAATGAAAACAATCTGTTTGCACCATTGATGTTTCCAG
AAATTCTTGGGAGCAAGTCCAAGGTGGAGAACCCCAACCGGAAGTGCTGCTGGTTGGAACTGAGAGGGTAGCGGTGGGA
CCAAGGGCCAGAAGAGAGCATCTTCCTCTGCTTCCAAGAGCAGGGGCAGGGTGGGAGGGGAGGTGGCAGGCCCAGGGAA
GCAGCAGCCAGGGGAGGGGGAAGGGGGTCTGTGAGCTGCAGAAACAACAGCTGGATTTAATGTTCTTGGAAACAGTCCT
TTGCTGGAATCAATTTGTTCTTCCTCTTCTGAAATTTCAGGGCTGAATCCTCAGGAAATCTGCCTACAATGAGGTGGGA
CAGCCGACCACAGGCCACCTACCACCACGTCCAAGGGGATATAAAAGACACTAAAATAAGGCAAAGGTCTGACAGGGCA
GCCAACTGTCTGCTTGTATCTCCACAACTTCAAGGGTAGTTCTCAGCAGGAGCCTGGCCTGGGGCTAATGAGGCAGAAA
GAGGCCTTGCTTGATCTTAATGGAAGACACCTTTCTCTCCTCCTCACTAGGGCCACTTAGGGGAAATCCCATTCTTGTC
CTAGGCTTGATCCATTACCATGTATCAGAACTTTTTTAAAAAATTATTTTTATTCTATATGTGTTGGTGTTTTACCTGC
ATGTATGTCTGTGTGAAGGTGTCAGAGCTTGGAGTTACAGAGTTGTGAGCTGCCAAGTGGGTGCTGGGTCCTTTGGAAG
AGCATTCAGTGCTTTTAGCCACTGAGTCATCTTTCCAGCCCGTGTGTCAGAATTTTGTGCTAAGAAAGACCTTGGAAAG
AATATGGTTAGAGGGGTCATTGAGATTTTAGCAAGATGACCTTTCTAGCTACCTGCCCAGGCTTCCTCCTGTCTCCTGG
CTCTGTCTTCCTTTAAACCTGCCAAATTCTTCCCAGTAGGAAAGGTTCAGGGCTTCCAAGCTTGACCACCCTGGGTCTC
CTTGGAGCCGTGGGTGTGGATCTGTATACATTGGGATTGTGTGGGCTCTAGTGTGTGTGAGTCTCTGCACACTGGAGGA
CACTCACCTGCTAGTACATATGTAGTGTTAGGCCCTGGAACTAGGGTAAGGCTTAGGGTGGGACTAGACACTGGAGTCT
TGGGACTCAGGTTGGTTCCTGGAGGACTTTGGCTGAAGCTGATATTAGATTGAAGGCAGGCCGGTCAGATAAGTCATCC
CAGAAAGAATGGCTCAGGGAGGACATTTAGAATGTAACTGGAAGAGGGACTTGGGAGGACACCCAAGGCAAAAGGAGTG
AGCCAGGGAGCCAGAAACCAAGAGCACAGTTGGGAAACACCCACTAGTCCTTGCTGTCTGCAGGACTGGGTCTACATGA
GGCTCAACAGCCATCTGGCCACCATCTGTTGAGTACCCTCTGTATGTGTAGTGTTGTCCTAGGTTCTAGAGGCCAAGCT
GGAGGAGACAGTTGAGAGTTCAGCATGAGTTCCTGCTTTCTGTTTCCCACACACACAGGGACCCTGCTCTGTGGGTTCT
AGAAGAAACGAGACATGGTCTATACCCTCTAGGATTCCCTGAGCTCAGGCAAGACTCCATAGGTCCATTACAAAACGGA
GTGCAGTGGGATGTGGGAGCTGCCAAGGCAGGTTGTTGGAAATTGTACTTACTTTCTTATCCTAATCTTAATCTGCATA
CACCAGGGCTGCAGAGCCAGGTCTGTGCATCATTCTACCTGGGAACGAGCATCCAGACTCATGGGATATACACGTATGT
TTTCCTTGCCTCCAAGGAAGATTCTCAAAGGATGGCATCCCGAACAGACGCCTGGGCCTCGGTGTGCTCTGGGAGCTCA
GTGTTCATATCTCCTTGGGAGAATGTGGGCCTGAGTATCAGAGGGTTTCCATGGAGACCTCTGGCCTGGCCTGGTGTGA
GAGTTCCAGCGAAGGGAAGCGAGTGCGGGCAGGGAGGGGACATCGTTTCTGATGCTTCTGTTGCTGCAGTTGGCTCCAC
CTCCGTCTCTGCCGTGCTTTGCTTTCCAGGTTACTCAGTAACTCTGCACTGAGTCGGGTTGGACTGGGCCAGTGAGAGA
CCATCCGACTAGTCAGTGAGGAGTGTGGTGGAGCTTCAGGCAGTGTTTCGGGAGAGCAGACCTCTTTTCAAGTGTTACA
GCTCTTAGGACAGAAGCTCTTGGATGAACACAGTCGTTCTCACACACCTCTAATCCTTCCAGATAGGATTCTTATATAC
AGTTTGGGGGTGGGTCAGGGTCTGACAACAGGTTCTTCTCAATGGTTTGGTCTGAGAGCTTTGGGGAAACCTTATTTGC
ATGTGGGAGGGCTTGGTGCTGCTGACTGATGGCCACACACCTCTCTGCAGGGGGCTATGGGAGGCTGTAGCTGCAACAG
GAGCCAGGGGCCCAGGAGTCATGATCGAACACCTTCTATCCAATGCAAGTGGAAATCACCACCCACTGGGTCACCAGGG
TTTCAGACCTTTGCTCGACTGGGGACCAGGCTGCCTGTGCACAGTTCACCGCCCCACAGGTGAACAAGACCTAGCACAC
TAACTTCCCACACTGTGGGTGTTATCAGGTCCCAGGCAAAGAGAAATGCAGCCTACCAGCTCCCTTGCTTCATATCTAA
TGGCCGGCCGACCCCTTAGGCAGACCTTGGTATCTCCCTAGGATAGCAGGGGAGATGTTTTGAAAACACCTTCCTTTTC
CTGCCACCACAAAGTCCTCCACAGGACTTGATAGAGCAGGTTCCACCTTATGGACAAGGCTACAGAGGCTGGGGTGGTA
GAGTAGCTATCTCAGGAGCATGCATTGCCACTACTGTCTGCCTCTGGCAACTTCCCCTAAATACAGGTCATATGTGCTG
TGCTCCTATGTGACTGACTGACCCATGTCCAAAACCAACTGTGGGGTTTTCTGAAATGTGCTTTGGAGTAGCCAGCAGC
TTCAAAGACTCCTGGCAAGGCCCTGCCCAGGAAGCGATGAGCCAGCACTTCCCTGGCTATGTGCTTGTGGCTGACCCTG
GCCTCAGGGTCCCTCCCCTCCTCATTAGGGAAGGATGCTGAGGAGGGTGGAGTAGGCTCCGGAGAGAGCCAAAAACCTT
CTGGGAACCATCTTAAGGGAAATGGATGCCCCAGAGTGGCTCTGCCCTCCTCTAGACCTTACCCACCCTCGGCTTCAGC
AGCATTTGGTGCTGGAAAGAATGGACCTTGGTTCCTGAACCATGCAGAATAAAGAGGTCAGTACATTCCAGGGCTTGGC
CTCTCTTCTTCGGTCAAATACTCTAGCAGATGGAAGATCTAGGCCTTGTCCTATCCTTAGATTAATCAGGGAGTTGTCA
GGTCTTTCTCTGATGGACAGAGGTGTTGAAGAAGTGCCTCGTGGTGGGAACTGAGGCTAGACCCCCATATCAAATGCTG
CTGGGCCCAGGATCACTGCCTGCTCCCAGGGCCCAGCCACATGGGACAAGCTCTTGTTCTAGTCCTGTGGCTCTTAGGA
CATCTCTAGCTGTTTTGACCTTCTGTCAGGGCACAAGGGTCTTCTTAAGTCCTTACACCCCTGTCCTTGCCTTCTCCTC
TTCTAGGATCACCTTCTCACCCATCTTTCTCTTGATGACTCCTACACATTCCCTAGCCCAAGCCCTACCCAACTTTCCC
ATGATCCTATGTATGCATGGGAGGGTTGGTCCTTGGGTCCCACACTCTGGGTTTCTGCTCTTTTTGTCTTTCTGGAGCT
TCATACTCTAGGATAATTCCAGTTAGTTCCCTTTCCTAGACAAACATAGAGTGAAGGTGATAGCCCCACTCTAGGCCTG
GGCACTCAGCCCAGGCTGGCTCCGCCCTTTTCTGAGAGGATGGATTCTCTGTCCTTCCAGTTGCGCAGGCCAAAATCCT
GGAGTCATCCTGACCCTCCTCCCCTTTCTCTCATAACCCACACCCAGATCCATTAACCAGCCCTGTCAACTTGGCCTTA
AAATATGAGCAGAGGCTAATTCATGGAAGCAGGAAGCAGCCTTGTGGTACCTGGAATATGGGGTGAGGGGTGGTGACAG
AAAGGCTTAAGGAAACTTTGATGACGTGGAAACCTAACTATCTCAGTAATAGAGATGGTCTCATGGCTGTTATATACAT
TAATGTATACATTACGCTGGGCTCAATGGTTGCCACTAAGTTGTTGGTTATTTAAATCAGAGGTTCTTCATGACCTCTG
CAGTTCTCTGGATAGATCTCTTTCTTCCTCTTGAGCTTGCTGTACTGGCTGGTTTTGTGTGTCGATGTAATAAAAGCTA
GAGTCCTCAGGAGAGAAAGGAGCCTTAGTTGAGGAAATGTCCCCATGAGATCCAGCTGTAAGGCATTTTCTCAATTAGT
GATCAATGTGGGAGGGCCCGGTCCATTGTGGGTAGTGGCATTCCTGGGCTGGTGATCCTGGATTCTATGAGAAAGCAGG
TTGAGCAAGCCATTGGGAACCAAGCCAGTAAGCAGAACCCCTCTTTGACCTCTGCAACAGCTTCTGCCTCCAGGTTCCT
GCCCCACTTGAGTTCCTGTTCCGACTTCCTTTGGTAATGAACAGCAATGTGGAAATATAAGGTGAATAAACCCTTTCCT
CTCCAACTTGGTTACTGGTCATATTGTTTTGTTGCAGCAATAGAAGCCCTAACTAAGACACTTGCCCACATATAAAGTG
GGATCCCCATAGAGTCTTCCAGCCGGGCCATCTGCATTAACCAAGCTTATCATGTCACCCGGAGAGGCTGCAGTGAGTG
GGCCGTGTCTGTGTGACTCAGGTCTATCCCAGGACTCATCAGCCCTTCCGGTAAACGTGGTTTAGACCTAGCTAAGGGA
TTAGTTAGAGATGGGGGTTTGCCAGGGCGCACAGCAAAATCATGCAGGGAAAATAAGGACACTTCCTAGGGTCTCTGCT
GCATGGAGCTCTCTTCAGGCTCCCCCAAACCTCTAGAGCTTGGGGAGAGGATCAGGGACTTTCATCAATACCCATATTT
GACTGATAGGAAAACAGAGATCATCTGGCAAGTCCAGGCATCATCTGGGTACTGATAGAGCTTATACGGGAATGTAGAC
TGGTAGATTCTTTCTTTCTTTCTTTCTTTCTTTCTTTCTTTCTTTCTTTCTTTCTTTCTTTCTTTCTTTCTTTTCTTTC
TTCCTTCCTTCCTTCCTTCCTTCCCTCCCTCCCTTCTTCCTTCCTTCCTTCCTTCCTTCCTTCCTTCCTTCCTTCCTTC
CTTCCTTCCTTTCTTTCTTCCGAGACAGGATACCACAAAGCTGTCCAGGCCTTGAACATGAAATCCTTCTGCCTAGGCC
TCCCAAGTAGCTTAAGTGGCAGACCTATGCTACCAGGCCAGGTCAGGCTACTAGATTCCTAAGCTAGTATCAAGTCACT
CCTTCCCTGACCCCTGTTTCTTTGTTTGCATAACATCTTTTTTTGCATTGTTTTGTTGCAGCAATAGAAGCCCTAACTA
AGACACTTGCCCACATATAAAGTGGGATCCCCATAGAGTCTTCCAGCCAGGCCATCTGCATTAACCAAGCTTATCACGT
CACCCTGAGAGGCTGCAGTGGGTGGGCCGTGTCTGTGTGACTCAGGTCTATCCCAGGACTCATCAGCCCTTCCGGTAAA
CACGTGGTTTCTTTCTAATGTATAACATAATTTACTTATTTATTCCAGGTAGTCTTGCTCCTTGGGAGAAGGTAAGATC
CACACGGCTAGAGGTGGGTGTCTGTTCTGTAAACCGAAGAATTCCGAAAACTTAGAATAGCATCTTTCACAGGCCGGGC
CCAGAACCAGTCCTTAAATAAATGTCTTAGTCAAAGGTCACTTCTCTGCAGAGCAAGGACTTCTAGACGATTCTATTGC
ACTCAGTGGTTCACTCCAGCACTAGCTGCTTTATCTCACCCCCCTTAATCCTCTGTTTTTTGACCTCCAAAATATGGTT
TCCCAGAATTTTTACAAGTAGTGAGATGCCTAGCAGGGGCCAACTGTAGGGAGAAGGGTCTTTGTTTAGCAAATAAATG
TACAAAGCAAAAGCAGGGCAGGCAGAGGAGTGGCGGGCTTGATTTAGGTGTGAAGCCCTCAGATGAGGTATTTTCTTCT
CTCCTCGTAGGAAAATGTTCCGGTTTGAGACCCAGGCATTAAAACTGTTCTGCAGTGGGAGAGGATACACGGCACTCAA
CCCTGGTGACCCTCACTTGCTGGCAGCCAGGTTTGGGGGTCAGCTAGTTCTTTGAGGACCTTTGTCTTCCTCTCTGTGA
AATGGGACATGAATGTATTCTCCATTGACTTCAGAACTGATAGGAGGGTGAAAGTGCTCCTGAGAACACTCTATGAGCA
CTGTGGGGCTGTGCCTGGGGCAGGTGTCTCCAGCTAACAGCAGGCCCACAATGCTGCCTGCCTGGTTTGAACAATGTGC
TTGCTGCTTGGGCAAGTCGTGTTCCCTGGAATTCATATGTTGAACTCTAACCCCCCAAGACACTCCACAATGTTTCCAT
AATTGGAGACAGGGTCGGTCATTAAAGAGCCAGAGAAATTACAGATAGGCCATTAGGATGGAATGTAATCCAACCCCGA
TGTTCTCCCTGTAGGAAGAGGAGTTTTGACATAGATCTTCACAGCTAATATCAAGATAGAAAGGTGACCATCAGTAACC
AAAGAGCAAGAGAGACACCAACACCACTACCATCACAACCACCACCAAGAAACCTGCCCTATCAATACCCTCACCTTTC
AGCCTTCCCAAGGCCTAAGCTGTCCAGTCTGTGGTACTTTGTCACAGCCGCCAGGAAACCAGAGGAGGGACTGCCTTAC
TCTTCTACCATGCAGATCCCCATACCACACATTGCTGCCAACACCCCATCTCCAGGAACCACTCTCCTCCTGGATTCCA
GAGTGAGGCAATCGCAAAATCCCTCTTCCTTCCACCTGCCTAAGGTCTTGTGTAGCCACACAGAGCTGTTAGGGTTGGG
GACTATTTCTGCACTCAGTGAATGCTGCATCCTGAGGGATGCAGGGACTCTCAGGTCACCCACAGGGGAGGGCAGGGCA
TGAACCAGCTGCCAGGCCTGTCCTGCTTTCTCTACTCAGTAGGCATCCTTGTTGGGCAGCTTATCTGGACACCCTCTGT
TCTGATCTGGGCCTTGACTTAGTCATGAGATGTCACAGTGTCCTCTTATCAGGATTACCCCATCCCCCATTCTGGCCAT
GAGAGCTCTTTCAACTTCAATAGACAACAATACAGGCTAAAGGCCACAGGAATGAGCTCAATATATCATCACTATTGTG
AACATTACTGACATCTTTTTGGAAGAGCGTCCAAATCAAAAGGTGGGGGCAGTAATTGTGAACAACCTAGTAGAAAGGA
TCTTACTTTCCTTTCAGGATAAGGGGAAAAATAGAAAGAAAACAAGGCCACCCACATACATTCTATTCTTCTCAAAAAT
CCAGCCCTGCCAGGAGTAGCTATGAGTTTTGGTTCATTGTCATGTGACCATCACTCTGCAGCCCCTGGTCTGTGTCTGT
CTCATTATTTGACACAGTCTTGATTTAAGAAAAAGGAGCTGCCAGGATCCAACCTGTCAATTACACTGTCTCCACCCTT
TACCCCAAGTTCCCCTGGCTTTCCCTGTGTATCTGTGACACACCCAGGGGTATGTAGGAAGAGTGGATAAAGTCCCAGG
CCTACTACCTTGCTCCCACATACTTCCTGAGTCTGAGAACCCTAAATTCAGCTGGGGGGAGGAGCAAGCCCATCAGAAC
TGGTTGGTGTTCAAATAGCTGCTGTCGCTGGGTAGTGTGCAGAGCCCCTAGGAGGTCTTCTGGGTGTTGGAGGAACATT
CAGCTCTCAGATGGATGTCCGGTTCACTCAGGTGGTTTTAATGATGTTTTTCAATCCTTCCATCTTCCTATGTTACATC
CCGTCTGCCCTACATCTGGATGTTTTCTTGTAGAGGCAGAGCAATGCTCAGATGTCAAAGTCTATGACCTCTAATCTGT
TTGTACAAAAGGTCAGGCTGAAATGGGCTTTTCCTGGCAGTTCCAAGAGTGGATTAGCAGCCTGTGTTTGCCGGTCTTA
TGGCTGGAACGACCTGGGTAATCCATCTTTCATCCTTCTGTCAGTGTGGATGGCTCCCAGGAAGGGAGATGATGGAGGT
GCTGGCCTTGGTCCCCAAATGTCTGAGAACTCTCTAGATGTCCTCCACACCTATGGCTGTCTCAGCAACCCACGCTAGA
AATGACAAAAGCAGCCCACAAAATGTTTGGACCTGCCCGTATTTGTTGTGGACGCCATAGCACCCAAGTTCATTGGAAT
CTATTGCCAGGGACTTTTTCTCCCCAAGTTGCCTCAATAGACAAGGTGGGGGGTGGGCAGAGAAGCAAGCAGGAATGCA
TGTGTCAAAGATGTCGAGGGAGTTTCCTGGCTGTCGCCACACACTGACTCCTTGTTTCTTTAACAGCTTGGTCTAGTTG
GCATTCAGAACCCTATCCTGGAAATCCTAAAATTCTGACTAATTTTGTAAAAAGTGAGAATGTGTTGGCTAGATGAATC
TTACAGAGTCAGAAAGATGTACTCTTTCTGAATAAAGAGTACCAGTCATGGTCCAGAGGACCAAACAGTGGCTCTGACC
ACAGCCGAGGTCTCACTTGAGGAAGAAGCTGGCTGGCGAGACAGGGGGTCACGGGCTCATCTGGGTAGGTGCTTTGCTC
TCTTTACTTCAAAGTAGCTCCACGCTGGCTGACCAAATGCTTCTCTCTCTGGGACTGTCTAGTCAGAGACTATCTTAGT
TACTTTTCTGTTGCTGTGAAAACCACCATACCCAAGGCAACTTATGGACTCATGGTTTCAGGGAGCTGGAGTTTATGGT
GGCTGAGCAAGGTGCTGGGAACACCTGTGAGCTCACATCTGGATCTGAAAGCAGGAGGCAGAATAAACACATAGGCAAT
GACACAAGAGTTTGGAAACCTCAAAGACTACCCCCAGTGACACAACCCTTCCAACAAGGCCATACCTCCTAATCCTTCC
CAAACAGTTCTACTAATTGGGGACCAAATACCCAAAACATATGAGCCTATGGGGGCCATTCTCGTTCAAACCACCACAG
GGACAAACAGAATAGAAAACAGAGGAGGTGGGGTGTAGATGGAGGGATGAAAGAGATGCAGAAGTACCAGTAAGTTATG
TCCCATGAGTGGCAGATCTGTCAAGACTTAAGTCACAGATCCCAGCCTAGGGGAACAATGAGATAGGCATTATACTCCT
ATTGGCAGAATCCTTCCCCTAGGCTCCAATAGGTTAGGCTCATATTCCAGAGCTGAACACATTGCTCGTGAGACTTAGA
GGAACTCACAAAGCTCTCCGAGTCTCCACAGGCTTCCAACATGGTTGATGGCTGTGGCTTGTCTCCTCAGCTGTAAGAC
TGTAAAAGACAATGCCCATAGAGTCTCTGGTGCCTTGTCAGAAACCCAGGCAGAGCAAGTGTTTGACAAGCAAAAGCTA
TCATTATTGTCAACCTGGCCTTAGGATCAACCTCCAACCCCCAAGTCCTTGCTATAGGCACTGCTGATGTTCTGTTTGT
TAATGGATCCATTTGTCCAGCCACCCATCCATCTGTCTATCCAAACTTCCTTCTTTTCAAATAAACAGCTTTGATGTGA
AGTAACTTGCATGTCTGTGTTTCTTGCATCTTGGAGGAGGCTGTTCAGAATGGAAATAAAAAGAACCTTCTAGGTGCAC
TGAACCCAGGTTACCACACCACTTAATCCATGTAGCCCTCAGAGGACCTGGGCTTCAAAATGTCTTCAGTATAAACAGG
ATAGACTATAAATAATGTTGAGAGTGATGCCCTGAAGGCTAGGGTAAGGGACATTTTAAAACAAACTTTGGCAGGGTGC
ATCTAGGGTCTTGGGGCTTTCTGAAGGAATTCTAGAAGCATACTCAGTGACTTAGTGTTAGTTCAGAGACCATCTACTT
GGTGTGTGTGTGTGTGTGTGTGTGTGTGTGTGTGTGTGTGGTGGGTGTGTGAGGGACAGGAATGGTGGGTATATAATAT
GGATATCCTATGTCCATGGATATCTATGTTTGAGGCTAGGATGGATGAGTTCATGGGTGTCTTCTGGAGAGGGGTGTTA
TGCAGTTTTATATCTGGGGAGGGATATGTGTGCAGGTAGGGAGGTGTGGGTGAGGGCATCTCCTGTGAGGATGGGCACA
CTCACATGTGACCATGGGGAGTGTTCCCAGTGTGTGTGTGTGTGTGTGTGTGTGTGTGTACTGCAATCTCTGTGAGTGC
CTGGTGAGGGGACAGCTCTGCTTTACCCTCAGGAGCTCCAGCCACCAGGTAAAATGGTGCCGGCCAGGCCACATGGTCA
CTGGCCATAGAGCTACACTGACAGACTTTACAATGGCCGATTGCACCCAGGAACCAAACTCATTCAGGAACCCGTGCCA
AAGTCCAAAAAGGGGGGAGTTCCAATGACTTTCCTGGGATTTCATCTCAAGGGGCACAAAGTGACCTTTGACTCTTACA
CCTGGCCAAGTTCCTGGTCCCTTCCCTCAGTGAGGGAAGAGAGCCCAGGTTCCTGGTTCCGCCCCACAGCCAGGGAGGG
GAAGAGGTTTCACTTTTCTTCTTGTCATTTTCGCTTTCAGACTCTCTTGCTGAAACGCTGAGGAAGAGAAGCCCAGGGC
CACCGTGAGCAACGCTGGGTGGAGATGTCCCTGCCTCAGGAACTGGCCTGGTGATCAGCCTGATCCAGCTGACCTGGTA
AGACAGGCTATGACCTCACTGAGCATTCTACACTAGCTCTCTGTGCACTTAAGAAAGCAATTTCCAAGAAGAGGTGTAA
CATGGTATGGACATTATGGCCCAGGCCAGGTGGCTGTCAGACCTAGCACTGAGAAAGGACATTAGCTGCTGGTTGGCCC
AACCTCAGGTAAAGGAAGATGCTAGTGTCCAACCTCACATGTTAACATGTGAGTGTCAGGGATTGCGGCCCCCAAGAAA
ACCTGGCTCCCAGAGATCCCCATCCTGACCTTCAGTAGTCATGTCGTAGAGCCTGTGACTGTGTTCTCATGCCTGGCCA
GGTGCTAAGAAGTTGCTGGCCACTCTCAGAGCATCTTATCATACAGGTCACATCTACTCTCTGGTAAATCCACCTTGTG
GCATAGGCTATGAAAAACAGAACCAGCCTCCCCAGCTGCCCACAGCTAGTCTCACTGGAGTCTGAGCCTGGCCCTACAC
TCTGTCTTCCCAGGGTCTGCATCAGATCACATCAGCACACACAGACATAGACACAGATACACAGATGCACAGAGGCACA
AACACAGGCACAGACACAGGCATAGACACAAACACACACACACACACACAGGCACAGGCACACAGACACACTTAGACAC
ACACACACACACATACCATAGATATTTCATACACATAAGCACCACACACATACACACACACACTCTCATATACACATAC
ACAGGCACACACACACACACACACTCTCATATACACATACACAGGCACACACACACACACACACCATAGGTATTTCATA
TCCTAAGATGTCTAGTCTACTCTCGAGCTGCTACCCATCCCTCACGGTCCACCCAAGCTGTTCTTCTCTCTACCCTCTG
CTTGTCCTCCTACCCCCAACCCTCCTTTAAAGGCACCCTTTGTTAACAGGCTGTACCAACAAAACATGTCCCGGAGGAC
TCTTGCCATCCCTCCAGCTGCATCTCAGAGAAAATAAGAATAGGCTTAACTCAGGAGAAATGAAATTCCTGTAAGATCC
GCATCTCCTCCCATCAGGCACTTGGCATTGCAACCTCAAAGGCAGAAATCATCACAAATTTTACGTATAGCATCTAGTT
CACCAACTTCAACCTTCAATCTGTCCATTCAAATTGCCATTAATCTTTCTACAGAAATACTCCGTATGCCCGAGACAAA
ATATCAGAACCATGACATCTCCCCTCTGGAATGAATTAAATTAAACTGAGGTTCCCTTAGAGGTCACTTGAGAATAGCT
TTCCTGTCTCCTGCTGATCAAAGAAGCTTGACTGGAGTAGATGTTTATCAGTAGCATCTTGGAGATGGCTCAAACAGCC
TTTTGTCACTTAGTAAAGGGCCTTCGGGTTTAGTATTTTATTGTCAGGACATTTTGAATTTTAGACCAGCTTTTAGTAT
AAGCATGAACCCCCCAAAATGGGATAACTTTCATGGTCTGCTATACACAACACAGAACATATGGTTTATCTGAAATTCA
AATTGACCTGGCATCAGGTGTCTTATCCAGTGACCTTAAGCTCCTACATCCAATGGCTGTGCTATCAGGCATCAGAGGC
TCAGCAAGGGAATCTGTTGCCATAGCAACCACTAAGCTTGTCAATGATTTTCACTGAGGACAGAGCCAGGTTCTTCCTA
GCACTCACACCCTCTCCAGGGTTCTAGAAAGTAAGCTTAGCCAATACCCTGGATGCCTGGTCCTGAGGTCACTCTGGTG
TCTTTATGTAGCAACTGCAAGCCTGGTAATGCCATAAGCTCACACTTCCAAGTTCCTTCTGTTTTCCTTTCTCTTCTTC
CTGTGAACATGTTTTCCAGAAAGAAGGCAAGCTCCATCAAGAGAGTGGTGAAATCAACCATCCAGCGACACTGTGTCTG
AGCAAGGGCGACCCCTGTGAACACAGCGGGTATAGCTTCCCCACAAGGCCAGAGTTGGGCTTTGGCTCAGCACCATTCA
GGATAACACTCATCTGTAGGTTAAATTACAAAGATTACTCCCTACATCATCTTCAGTGATGCTTCCAGTCTCACTAAGG
GCATCAATGAGGATAGGCAGCCAGATTAGTACTCATTGAAAGTGAGGTATTTGCGAGTTTAGATTGATGTTGCTCATCC
ATCCTGTAAAACATGACATTTTGGGTTGATTTGTTTACTCGTGTAATTGTGAAAGGGCTTTGGCACGTATGCAGCTTCC
AAATTCCACAGCTGTGGCAGGGTCTGCTTTGCTTCCCTGCACACACAGGATTTTGGAGACATGCTGACAGCTGGGGTGG
ACCTGTGAGGGGCTTGGGGGGCTGACTGGCACAGAGCATTGCTGAGAGCTGTCCTTTCCACAGCTTTTAGAACCTCGCC
AGACATATATCCTTCAACAGCAGGCTTTGTTGAAACCACAGGCTGGTTAATGCAGAAACCTGCTGGGAGCTTTCTATTC
CTTCTCGTCGAGGTTTTCCTTGAACTAGGTCCACTGTTGAGAGATCTTGCGTCTTTAACTTGGGCTGGCAAAGGGTCTG
GATTGGGAAGGCAGTGGACAGACCCTACCTTGGGAGATTTGGAGAATGCACACCATGTTCACCGTCCTCAGTGTCTCTG
AGGCACTTGGGAATCTTATTGTAGATAGGCAACTTGGGCTGCAACTTTGGATCACACAGTCCAACTTCCGTCCCTGCTA
GCTGGACTTGAACAATAGTAGTCGTTGGCCACAGCTATATATGGGAAATCTTCTATGCCCAAAGGCCGTGGAAGTAATA
TCTCTCAAGGAAAGCCACTCGTTCCATTGTACCGCTTGATGTAAGTTTAGTCTATAGAGGCTGGTGTTTCTGTAGAGGA
TGATGAATTAAAGCAAGCTAGAAAGAAAGGTTTGGTCCCCACTCCCACATACCCATGCCTTACATCATGACACACTGCA
GAGTGAACTGCAGACCACGCTGCTCTGCCGTATCTCTTAGCTATTTTAAGGAACTTGGACGCATCTCCTAGTCTATGGG
ATGTGGGGGCAATCTGGCTGCCATATCTGTCACCCCATTGATTGACAGGGTGGGTTTGACTGACCTGAGTGGCTAGGCG
GGGGTTGCTTTCTTCTCTCACTGTTCCACATATGTCTATCCTGAAGCTATGTGCTTGGTTGAAGAAGATGACCTTCTCT
GAAGAGAGGAAGATTGGTCTCTGGTCAAGGGTACCAGTCAAGGGTATACAAGTAGCTGCATTCCCCTGCTAGAACTTCC
AAACAACAAGGTCAACCAAGCATGAAAAGAGACACAGCTCTGAGTGGCTCTTCCTCATCATTGCCACTAGGCCAGGAGC
TTGATTGCTATGTACTGATGGCCAAATCAACCCTTGAAAAACATATGCATCTCTTTTTATTGGCTCCTTCAATCGTTCA
TATCTCTGAAGCCCGGGGAATAAGGAGTACCACTTTTTGACTGAGGAATTCACAACGACAGGCGGAGATGCTCACAAGC
ATCCCCTTGCAGCTTCCTGAGCCTAAGTGTAAAGAGAAGCATCTCACTGGGGGCTCAGCAGAGACATCAGTGGGAAAGA
TCCGTTTCATTCCAGATAGTCCTGAGGCCCACAGTGAAGGAATTTTAAGTTATGTATTGCTGAGTGACACTGTCTACTG
ACTCCAAGTGACCCATCCTTTGTTCCCTGGCAAGCCAGACTGCAGGATAAAAGAGAATCTGTTTTATGTCCATTTTGGT
CCCTTATGAAAGGGAAGGGTGAAAAGAAGAAAAAAAAAAATCCTACTGAAATGAGAGCAGCCAGGATCACCTTGGATCT
GCTGGAGTGGACAGACTGTCCAGGAATGAGCACGCTCATTTACTTGCCCTGAAATTATTTATTGACCACCTTCAGCCAG
CTAGGTGATGATGACCCAGGCCCTGCTGCCTCGACATTAAAGTATGGCTGTTTTGAATAATTAAATCAGATCTGGATCT
TTGGGAGAAAGCAAAGACCATTTTATTCTAGCATTCACCAAAGAAAATAGCAAATACTTTTAGGCTTCCTCCAGGGAAA
CGTAATCCCTGCCCCCGCACTTGGTAAAATGTGAGTCCCTGTACCTTCCTTCAGCCCTCTGGGTATCAGCTGCCTTCTT
CCTGTGCAGATAGGATCAGCCCTGGGCTGTGGAAAACAGGGCAGGCATTTGGCACGCTCTCGAGGTAAAGCCATGTGCA
GACAAAGGCAGAGAAAGGAGCCAGTGACTCGGAGGCTGTGCCCCTAGGGAGCTTTGCTGACCTCTGTGCTGAGGCTGGC
CATGAGTTACTTACATCAGCAAATGCCTTTACCTCTTTCCTCTCTGGGGCTGGTATCTTTCTAGGCCTCAGCACAGTAT
CTGGGGACGGGGCAGAGGGGACTGAGGGGTGCTAGAGAAAAATAAGAACCTAAGCTGGGTGCAATGTACAACACTGTGG
GCCTCTGGAAATGTGGCTTTGTGTCCTATTAAAACACACAAGGATGAGGCCTAGAAAAAAATGCAACATGAGGAACCAG
CAAGATGGCTCAGTGGGTAAGGGCATCTGCTGCCAGCTCTGACAACCTGCATACCATCCCTGGACCTACTTGGTAAAAA
GGGAGAAGCAACAGGTTACACACACACACACACACACACACACACACACACACACACACACAGAGAGAGAGAGAGAGAG
AGAGAGAGAGAGAGAGAGGCATACACAGACATACACAGACATACTCAGGCATACACAGATTCAGGCATACATACACAAA
CACAGAGACACACACACAAACACAGACATATATACAAACACACACACACAAACACAGACCCACTCACAGGCACACACAA
AAACACAGACACATGCATAGACACATGCAGAGGCATACACAGACACCTGTACAGGCACACACACACACACGAACACACA
CACAAACACAAACACATACACAGTCACAGACACACATACATGCATACACCCCCCCCACACACACACACACTTTTTAAAA
TGCAATGTGTAAGGTCTCTGGGGTAGGGACAGTCACCACCACTCATGCCTTGCACATGACTCATGCCATTCTCTGCTCT
CGAGTCACAGCAGAGGTGAGCAAGAGTCAGCTGGGAAATGAGGCAGAGGTGAATCTAGTCACTGAAACAGATCAGTAAC
AGGGGACTCGCCTTCGTCAGTTAACAGAGAGGGTGAACTGCCCCTCCCACCTAGTCAGCTCCTAGTCCTCTTGTGTGGG
CCCTGTAGTACTCATTGACAGTACCCAAAACAGCACGATTTCCTCTAAAATCAGGATGCTGCATTGTGCTTGTAGGACC
TGCAGCAACCACAGCAACATCTGCTAACTTATCGGAGCTGCATTGACTCCACCTCAGACCTCCTGAGTTAGGGGCTCCA
GGCAGGGCCCAGAGACCTATGTCTGGATAATCTCCAGGAGCTTGTGGTACACACTCAAACATGGAAGCCACTGCTCCCC
ACATGCCACCTCACTCTGAGGGTTTTACAGTCACCCGGGCCAGGCCACGCAAGCACTGCTGCAGACTAGATCTCAGGTG
CAGCCAGGGCTGACAGAGTGATGCTTGCGGGGCCTGGCTGCTACTCTCTAGACTTTCTTCTCGTAATTTTCATTGCAGG
GCTACAGGGTGTGGATGGCGGTGGGGGAGAGATGACCGCAGCCTGGGTATACTAGAGATCTAAGGGGCTATCTTCTCTA
GAATTCATGACTCCTCTCCTCAGGATCATGGACAAGGAGATCTCGGAACGCTGGACCCATGCCAGAGAAGGGGAACAAA
CTGGGTTCTCATCATAAATCAATGTTAGGCCTGCTGAGGGCAACAGACTTCATGTTACCTACAAGGCATTGCCTTTGGA
ATGGGCTGCCCCTAATTGATTTTAGGTCATCTGACACTTAAAAAGAGAGAAGCGTTTGGGCTAGGGTGGGGTGGACAGG
TGTCTCCTCTCTTTCATCATCAAGAGTGTGATGCCTCCTGCCTTGGAGCGATGCTTCCTTACCGAGGAAGAAGCACCAA
GGCTCATGGAGAAGCCCATGCTCTATGTTCACATGGAGCAGCGAAGCGTGGACTTGCGCTTATCCTCGGTAGGACTTCC
AGGGACTGAGTTTGAAGAAGCCAGAAAAGGGGGTGGAATTAGAGGCAGCATGGAGTCCAAAGGTGGGGGCGGGGTCAGA
ATGGGCCACCTTCTCTACATCTGCAATGCTCCTGAGGAATGTCACTGTCTGGGAATGTCACTTGTACACTTGCCACCTA
TTCAGTTCCAGCATCATCACTGGCCCAGAAGCCCCTTTATCTGCAGGGGTTACCTCCAGGACCCCTTATAGACTGATCC
TTGAAATGGCAGACAGTTTCTAGCTCTACAAATGTACTATACATATACTTACATAGCCACGATGAAGTTTAATTCCTAA
ATCAGGCACAGGTGACTCACCACGGTGACAGTAGAATGGAGCCGTTGTTACAACAGGTTGTAATGAAAGTCACAGGACT
AGCCTCGGTCAAGAGATCCCTGGTCAGTTCATTATTATTTCTATTTCTGTGACAAAATGCCCGACGGAAGCAGCTTAAA
GTTATGTGAGTGTTGTCTCTCCCTCCCTGCTGGTGAGATTGTAGAATGGAATGTCTTCCTAAAGAGATGGGGTAAAGGG
GGCGAGGCAGGAGCTGTGCTAAAGTCCTGAGGCACTATTAACCTTAAGTAATCTTGAGTAGACGTCATTGAGCCAGGAT
GGTGCTGCTGAAAAGCAGCCTAAGGAGGAAAGGACTTTGAGGTTTGGTTGGTTGGTTGGCTGGTTATTTGTTTGGTTCA
CTCATATTTCAGGTTTATGGTGTGTGGTGATAGGGGAGTTACCATGGCAGGGAGCACGAGGCAGCGGATGCATTGCATC
CACGGTCAGGAAGCAGCAGTGACTGGTGATGCTTAGCCTGCTTTGACTGTGTACGCAGTCCACGACAGCAGCCCAGAGA
CTGGTACCTTCCTAGGTACCATCTCAATGAATCCATCCTCATACGATTCCTCACAGGAAGCTGAGGTAGTCCAGGTGAC
TCCTCCCATGAGGGCCTGAAGCTTTGCCTCCTGGGAAATTCCACATTCTGTGAAGTCAGCAAGCAATATCAACTGTCAC
AGGGTAGAAAGTCTGGCAGTTCTCTGCGAGTCATTGAGCAACAGGTGGCAGCTGAGCTCGTGGGATATGAAATGAGAAA
GGATCTGAGATGTATCAGACATGTTTCATGCACAGTTAACATGACAATATATTGTGTTGTTGTAAAGTTTATGAGAAGT
AGAAATAGACTATTATGACACTATAGCCCTTTTTAGGCTATAAGTAGAAACTGTGGTGTATCCTGCATACCGCCTATGA
GATGATGGTCCCATGTCCTCAGCAGGGTACGTGCGTTTCTCTTTGTCTGTTCTGAGCTGCAAGGATGGGCTGGTATCTC
AGAGTTCCTCCTGTGCAAACAAGAGTCATGATATGTACATAACTGGTGCTCAGCAAATATTTGTGCAAGGAACAAATAA
ACATGTCACCCAGGAATGTTCTAGAAGGGAGGCAATGTCAGTGTGGACAGCGGCTTGGACTTTGGAATAGGCCAGATTG
CAGCTTGAGTTCCAACCCTGCCTCCAATCAGTCCAGTGAAGCAGATCCCATAGTCAGCCTCTTCCAGCCTCAGTCTTCA
CTCCTACATGAAGGACACGAGGCCCACGGCTTCTCGCCAGCTTGGTTTTAAAGGCAATATACAGCACAGTAGCTATGAA
GGCAGGATTAGGTAACATGACCCGTGCTCACCGGGAGCTAACAGGAGTAGCAGACTCTAACTCACCGTCTAAGGGGTGG
GCTCCCCTAGGATGCAGAGGATAAATGTGAGGCTTGACAGTCACAGGAGCTAGAGCATCAGCTTGGAGGCTACCTGGGT
GTATGGAAGCAACAGAGAGGAGCTGTGACTGCTCCAGAACCACAAAGGAGAGAGAAAGGCAGGACAGGACCTAGAGTGT
CCCCTTGACCCCACCTGAGGTGGGGACCCTGGTGATGCTTTCCATTCCAAAACTGGGTAGAGAAGCTGATGCGTGTTCG
GGAGACTGCTTCTTCCTCCTCCCCCTCCTCTTCCTCCTCACCCATCTCCTCCTCTCCTTCCTCCTCCTCTCCCCATTCT
TTTTATCAAAGCCCATTATGTTTGCTTCATTATACAACAATGCTGCTAAGATTCAAAAGATAAAGAAAAATGAAATTAT
ACAAGAGCAAAAGTCCACTAGATGCAATTATAATCTTTATACCATACTTTACTGTTTCTCCTAGCCTTACATTGCCTGT
CATAGCTCACGTGTGGTAGGTGTACATGTGTATTCGTGTGCACATGGATGTGTGAAGGCCAGAGCCCAATGCTGGGTGT
CTCCTTCAATCACTCTCCACTTTAGTTTCTGAGATAGGCTCTCATGCTGAAACTGAAGCTCACCAATTCAGCTAGGCTG
GCGAGCCCCAGATCTGCCTCTCTCTTTCTCACCAGTGCTAGGACTACAGACACACATACTTCTGCGTCCTCCTGGAACA
GCATTTTGAAATCACAAATGGCACATATTATATATGAAATATATAATTTTAGAAATTTAAATCGCATTATTAAAAATAT
CTAATAAAAATTGTGTGTGGGTGTGTGGGTGTGTATGTGTGTTGGTGTGTATGTGTGTAGTTATGAGGATAACTTGGGG
AAGTTCTTCTCTCCTTCTATCATGTGGCTCCCCAGGATTGGACTCGGGTCCTCAAGCTTCATGGCTAACAGTGAGCCAT
CTTGCCCACCCAAATTGGCCTTTTTATTTGACATCATGATATAGATGTTTTCTTTGTTATTATAACTTTTTTTGTGATA
ACTTTTAGTCCTGCAGATAGCCTATGGAGCTGTGTTTCTGAACACTTTGGATCCCCTCTTCTCCAGGGGCTGGGAAGTC
TTGCCTCTGCCCTGGTAACCTCTCAGCCATGAGTGCTTGAGGCCAGCAGGGTCTAGTGTGTCTGTAGTATGTGAGACCA
GAGAGACAATGGCTGTACTCAGAAGACCTGAGAGCCAGGTCACATTGACCTCTCCATGGGACAGGCCAGCCCTTGGCTT
CCAGTCTTCTTTGAAATGGGATCAACAACCTGCCTCACAGAGTAAGTGCTAGGCAAGTGAGCTATCAGCTCAGCCCAAA
TCTTGGTTTATTGGATTTACCAGAACCTTCAGAATCCAGCAGCAGGAAATGCAGCCCAGCAAAACTTAACCATAAAGAG
AATTTATTAGCTCACAGAATTGCAAAGTCCAGATACAGTGACCCAGGAGGGACACAGAGCCTGGAGGATATGGCTGTGG
GTCTCAGTCATTGTGGTCCCACCTGCCTACCTTTCTTGTCACCCCTTTCTAGGGAACTTTCTCTCCAGTACTCTCCAGA
CCAACTTCTGTATTAGTCAGGGTTCTCTAGAGTCACAAAACTTATGGGTAGCCTCCATCTAGTAAAGGAATTTGTTGAT
GACTTACAGTCTGTAGTCCAACTCCCAACAATGGTCAGCAGCAGCTGTGAATGGAAGTCCAAGGATCTAGCAGTTGCTC
AGTCCCACAAGGCAAGCAGGAGGAGGAGGAGGAGGAGGAGGAGGAGGAGAAGAAGAAGAAGAAGAAGAAGAAGAAGAAG
AAGAAGAAGAAGAAGAAGAAGAAGAAGAAGAAGAAGAAGAAGAAGAAGAAGAAGAAGAAAAGAGAGAGAGGGAGAGGGA
GAGGGAAAGGGAGAGGGAGAGAGAGAGGGAGAGGGAGAGAACTGAGGACAGCACTCCCATTCCTGGCATCCCCAAGAGA
AACATTGGCCTGTCTGCTTCATTAGAGGTCCCGATGACTAGGCCTGGCCTATGTCCTCCTGCCTCAATTGTCATCCATT
CACTTATACCTCCTAACCTGTGAGTGGGTGAGGGTGGTGGTCCCAAGCAGGGTTAGGAGGTGCTTTCATCAAAAGAGAG
GAAGACTTGGGGAGGGGCAAATAGTAGCCATGCCCTTCACAGACTACCAGTTCCACTGTGGCTAGAAGGAAGTTCTCAG
AGCAGGGAGCCCAGCATCCCCTGTGGGTTTGACAGTCACAATCCTTTGTGATGTGCTCAGAATCTGTCTTGGCCACTCT
CTTCCTCTGCCAGCTCTACCCTAACACAGTAAGCATTTTCTCTCGAATGTCCAATGCAAAGAACTGCACCCTCAGTGCC
TGTGACCATGAACTGGGAGGAGGGGCCTTCAGTGACCACATCAGGTGACTCACTCCACCTTCACAGATATGGTCCAAGG
TGTATTACAGTCCCAGACCCAGCTGAAGTGTCCTGAAACAGGAGGAGGTTGGAACTCTGAGATGGGGCTGGAAATCCCT
GTCCAGTCTCAGCGCCCAGGACCTATCTGTGTTCAGCAGGGAACAAAGATGTGCAGGAAGGTACGTCTCCCATCACCTT
GTGTGCTTGAGAGGCCAGGAGAGGCAGGTGCTCATTGGATCCACCCAGCTGAGTGTTCTGCAATGGCCTCCTGCTTTCT
GCTCTTGTGTGCACTTGGTTGGTCCCTGTCCTGAAGTCTCACAAGTCACCTGGTAGGAAGTCGACCCAAGCAAGGCAGT
GAGGATCTAATAATGGCAAAGCAGGGCACCGGTCCCTTCAGAAGTGAGAAAGTCAGGGCCCCACACTAAGGGGGTAGGA
CCGTGGCAAAGATGCTGAAGGAGGGGAAGGTGGGATGGGTAGCCCAAGGCCCTTCCAGGAATGGAGGACACCACAGATA
AAGGGAAAAGAGATTGCAGGCACTGAGGAAAGACTGAGGAACAAAGGTCTGAGAAGAGAGGGGCCCACCTAGATCCAGA
GCCAGGGGACAGGGCACAGAAAGGACACCTGCTGCAGAGAGGTCAGGAGCTGATCCAGGTGTTTGTGGGAAATCTAGGA
AGTAGGCAAGGATCCTCAGGCCTCCTCATGAGGACTTCTAGGGTTGACACAAGGACAGGAGGGGAAGGTAGGCATTCTG
AGAGGACTGAGGAAGCCTGTTGTCAGGAAGAGCTCTCTCCTTTCTGTGTGTCTTTTGTGTGTCTGTTTCTGTCTGTCTG
TCTCTCTGTTTTCTGTCTGTCTGCCTGCCTGTCTGTCTGTCTGTCTCTGTCTCTTTTGCATGCATGTGTGTGCATGTCT
GTCTGTCTGTCTACATACTGCAGGTAAGACCCACCCTAGCATGGCTGGAGGAAGAATGGAATTTGAGGCTGGTGCAGAC
TCCTAAGCTCGCCACATGAACTTAGGGAGAAATTATGCCAGCTGTGGAGAACACCTGGGCCTGGAACTACAGCCATCAT
GGGTTTGGAAGGAGGCTATGCCAGCCGTGGAGAGGACTTGGGTCTAGTCGAGGCAAAAATCAACAAACAAAACAAGTTG
GGTGCATCCAGGGAGGGACCAAGAGGACAGCACCTAGAAGACAGCCACAGCTCCAATAATGGTGACCTGAGAGTCCAGC
CACAGGAGGGAGTTAAGCGACTTGCTTGAGAATATGGAGGATAGAGCCAAGAAGGTAGCCCCGCTTTGGATCACAAAGC
CCAGCACTTAGGGTACGTAGATCCAGGAGGGCAGAATCCTTCTTCAAAACTGGATCAAGGCAGCTTCACTTACCGCACT
CTCGGTCAGCTTCAAGATGAATGTGTGACCTTGAGCTGCAGAGCTTCACAAGGAATGTTGGGAACAAAGAAGACCTGAG
GACTCCCTGGGAGGTCTTCCGCAGCTGGCTTAGTCAGGTTACGCATCCCACTACACCCCACCCTGGAATGTTGGCCTCG
CACTGTGGAGGCCAGAAAGATGTTGCCACTAGGAAGAAGGGATGAACATGCAACAGGAAAGGTGATGTTAAGTGAGAAA
AAGATCCCCAGGTGAGTTCATGCCCACTGGACTTTGCCAGTTACTGCTGGTCCTCGGTCCCCAGTCAAAGGGCTTGAGA
GGGGAAAAAAAAATCACTATACAATAAGCACATTAAATAATTTTCATCATTCTAACCCAGCAGGTGGTTGAATAACTCC
TGTTTGCTGGCACAGCCATTCATGAGACCAGGAAGAAAAGCCCCTATCATGTATAGCAATGCACACAGTAAAGCCCCTA
TCATGTATAACAATGCACACAGTTAAGATAACAGCTGAAAGCTGCTGTTGCTGGCTTTAGTTTGGTTTCCAGCACCCAT
GTCTGATGGCTCACGACTGCCTATAACTACAGCCTGGGGAAATCTGTATTGGGAAAGAATTAGGAGAAGTAGAGAATTC
AGCAAAATCGTGACACAGAGTGATGGGATTTCAAAAAACCACAACCTTCGCAGCAGAGTTAAACCACTGTAAACCGTTT
TTAGAAGACTATCAGGTTCAGATCATCAGCATGTTAGAAACAAGTACCGTGGCAGAGACCAGCCGTAGCTCTCTATTCA
CTCAGCAGCCTTGGGACAGCAAGACCCGTGGGTCTTCAGTCCTCTTCCTGTGGAGGACTGAGAGAGCATAGAAGCTTGC
TGAATGTGTGCCTGCAGAGTGGATCCCTCTACTCACAGGAGTGACAGCCAGCCTGCCTTAGCATGGGCTGGGGCTATGA
CCTGGCCATGAATGGGCAGTGTGCAGATGGGGCAGGCTAGACCCCCTTCTCCAAGAAAGAGTGAGATCACTGCTAAGGG
AGTGATTTCGGGAGATGTGTGGGAGAGGCCTGTGGAAGTTTCTCCTTTCTTTACCAAATGACCCGCTCTGGGTAAGACC
AGGAGCTAGCACAACAGAGCCAGATCCTGAAAAAGTCATCGTGAATGACCACTGACATTATCCTAGGGGTGTGTGCCAG
GCCCTGGTACATCCCAGAGAAAACGGAGAGCAGCAGGGGGCATGAAACTCTGGGGCTGTGATAGGCCCCACTGGTCACA
CTGCACTTTCTTGGGGGAGGGGAGGCTGGGGTGTATCTGAGAGCTGAGAGGGGGAGACAATGACAGGTAGGAGGCCTCC
AAGGACACCCATGTTGGAGGACCAGAATCTCAGGACAGCAAGAGCAAAAGAGTGGTCTTGTGGCTGGACCATCAGGGCC
CACCAATGGCTATAGCTTCCCTTGGACTTTTGTTTAGAGAACTTACCAGGCTGGTTGTGATCGTGGCAGCAGGGTTTAC
ATTTTTTCAGTAGAAGGGAAGGGCTTTCTAAGGGGCAAAGATGGGAGATGCATCCCTCCATGGGCTCAGGACTTGGCTA
GCCTATAGCTGTGACCCTCAGACTGTGTGAAGAGCCCCCAAGTGCTCAGACTCTGTACCTGGCTTCCATGTTTCTATTT
GGGCTCTGCCACTTAGAAGCTCTGTGACTGACCAAATTATTGTACCTCTCTGTGCCTTAGTTTTTCTAAAAAAAAAAAA
AAAAAAAAAAAAAAAAAGTTCATTATGTGTATCTACATGTGTCTGTGTAAGAGTATGAGCATGGGAGTGCAGTTGCTCA
TGGAGGCTAGAAGAGGGTGCCAGATCCCCCACGCTGTACTTACAGGCAGTTGTGAGCCATCTGACATGGGTGCTGGAGA
CTAAACTCCAGTCCTCTGCAAAAGCTGCACTTAGGCTTAATCACTGAACCATCTCTCTAGTCCTCTTGCCCCAGTTTCT
GCAAATGTAAACCAGAACTACAAAAAAGCGTTATCTTTCCTTGGATTGTTTAGAATATCCAATGAATTTTCCATTGTTG
GAAGTATGTGTTAAATAAAGATAGAAAACTGTGTAGGATATCTCATGAGTTGTTGGCCAGGAAGGACCCAATGGTCCTC
AAATCAATTCAGGCTATTGCCATTGCTCTTGATTGCCCACTAGAACTAGCTGATAAAGACCATATTGCTGAAGGTATCA
TATACTTTAGTTGCAGAACATAGAGAAATCAGTCTAAACCTGAACTAGGAGTGTCTTACTGCCAGCTGGTCTCCAGAGG
GAAAATGTTCTAAGTGCAGCCCAGGCACTGGAGAAGGAACACTGTCAATGGTCTTATCTTGCTGTGAACCCTGAGAGTT
ACACCACCAACCAACAGTGCTGTGACTATCATAGAGGTAACCAACCACTTTCTTATTGGTTTGTAGACCTGCTTCACAG
GAGGAATTCAAACCAGGTACTCTAAACCTGGTCAAAATCCCACGGCTAGGGAGGTCATAGGCCCTAGAGGGGTACCTGT
GACTTTTGTTTTGCTAGGTGGACATGGTGTCAAACTGCCCTGTAGATATCTCTGTTTCTACTAAACATCAGTACTGTTC
TCAGCCTTGGTCAGAGAAGCATCTGCACTGATAATAGAGATTCAAATGGCCAAAGTGCTGAGAAGTGACCATTGAGCTC
GAAGCACTAAACGGGACAGCCCGAGGGCAAGAAGGAGTACCATAAAATGCTGTCCGTGGCATCATGGACATGGCTTTTG
GCATCATGAGCTCACAGCTGTAGCGGCTGCCTGCACAAGACTGGGTCCATCAACATTCCGTCATGGACAAGGGAGGGAC
TCACAAGGCCCCACCCCTCCCCGAGGAACCATAGGCAATTAATGGTTGCTGAGGCAGAGAGAGTCCTCAGTGGTCTAGC
CACTGGTAGGTTGTTCTTGCTCAAGTAAATAACTCTCCACCCATGCTGGTGCAAGCAGCCCTAATTAAATGCAGTGGGT
CCCAAAAAAACAAAACAAAACAAAACAAAACAAAACAAAACAAAACAAAACAGCAACACCAGAGAGAAAGGTATGAAAG
TAGGAGGAAGGTTGCTGGGAACACGAAGGGGTTACTATGAGGGGGCTGGAAGAGAGGATATGGGGGGGTGGGGAGATGT
GGCCAAAGTAAGTGTGTGTATGTGTGTGTGCGCACGTGTGCACAGGTCCCTGTAAAAGAACAAAGAAAAAGCAGTTAAG
ATAGTGAAACATATACAAGAAAGACTTGTGCCTTTAGCCATCACTCAATTTGACCCAATTATGACCTGTGACTAAAAAA
ACATCTAGGAACATTGTGCGTTTACACTTGCTCCTTTTTTGAGTTCTCCTGGACCCATAGAATTTGGCCTTCGACCCTA
TCATCCACTGTTAACACCCTTGCTTGGCTCCGCAGTGCAGGACCTGGCCAGCTCAGTAGCTGCCCCTCAGGTCATACCT
TGCTCACAGCATGGACAGTCTTTAGTCTTCCTCTTTGAACATGACCTCTGGTCTCTCCCCACTCCTCTCTCCCCTGGCT
TACCGCCTTCTGCTCTGGGTCTATTTCTTGGGCAGATGTTTCTGCAGTCTTTTCTGGATGTCCTTCTCCCCACACTCTC
ACGGAGAGACTTCATCCTTCCTGGAGGGTTAGCATCACCTCCACCCACCCTTTTCTTGACTTCTGTGTCTATCTGGGAC
ATTGAGTCATCATAGCCGCCCACCAGCTGCCCACTTTAAAAAGAATTTATTTTAATTTTAAAAATTATAATAACACTTT
CCCCTTCTACTTCCTCCAACTCTTCCTCTGTTCCCTCTCAAACTCATGGCCTCTTTTGCTTTGTTGTTTTACACACACA
CACACACACACACACACACACACACACACTATATGTAAATATATAAATGTAAACCCAACTGCTCAGTCCATTTGGTGTT
ACTTATATGTATATGATTTCAGAGCTGACCACTCCGAATTGGGCAACCAAGTAGAAGGCTCCTCCTTGGGGAAGACAAT
TTCTCCCACTCTCCGCATTCCTTAGCTGCCAATAATTCTTTGCCTATGGGCGGGGCCCTGTGAGATTCCCTCTCTCTGT
GTTAGCACGTCTGTTGCTATCATCCTTGTACAGGTCTTGTTTAGACACCCATATTGTTGGGTATCAAAAATGAAGCTTT
CCTTTTGTTTTTAGGAGGCAGTCTCACGGCAGATTTCCCGGTCCTCTGGCTCTCAGATTCAAGTGCTCCGCCACATCTT
CCAGAACTTTCCATGAGCCTTCAGTGCAAGAGTTGTGTTGGAGACCTATCCCCTGGGGATCACTTGCTCTTAGTACTTT
GACCAGTGGTGGTTTTCTGAAATGGTGTCCGTCTGTTGCACAGATAAGTTTATTTGCTGAGAGACGAGAGCTACAATTA
TCTGTGGCCATATGGATAAATATTTAGAATCCAGCTGCCCGTCTTTACTTGTATGTAGTTCATACTGGGTAGAGCCTCA
GGACACCACTGGCTTCCCCCACCCCCACCCAGGGCTGCTAGTCCTTCTGGGTCCCCTCTGCTGGGAATGAGCATGGCAA
ACTCATGGCAAATGCTGTGTTGGAGTCCTCACTGACGTGGGTACCACCAGCATGTGAGTGCTGACTCCCTGCAGTATTC
CCTGAATTTTTCCTCCCTACCTCTTGCGCAGTCCAAGCTTGTATCGCTGTTTCCGGAACTCTTTCCGGATCATGGGAAA
TGCAAATCAGCTTAGAGCCCATGCTACTCAGAAATCTTCAATGTATTGTCCCTGAGCTCTCGAGATAAGGCCTCCGTTC
TTAGCATGCCAGTTGGTTTTCCAGTCTCTCCCCAGCCTCAAGTATTCCTGTTGTTCCTGGTTGTGTACTCCAGACAGAA
TGACACCAGGGAGTAGATGTACCCTCCTTCCCTCTATCCCTCCTCCTCATCCTTATTCTTAGGGGGTCACTTGACAGTT
ACCTCTTCAGATAGTTCCCCAACCTGCTGTCCTGAGTGCATTGGGGCCCCTCTCCTGCATGTTCGTAGCTCCTGTGTGC
AAGTCACTCTGTAACATGGCAGAAGCCTCCTCTCTCCCCACACAGACAGAATGGCTTAGCGACCAGGGCCTGCCACTGT
GCACTGGGACTGGGCTCTTGTGTTTTTAGCACTAAAAAATATTTCCTGAAACCAAGGGTTGGGAAGTCCAGCAGAGAGA
TACTGGTGATGCTCTTTTGAGGATGCGGATAGCTCCACGTGGAGACACTCAGTGTTGATACAACAACCTTTCTCTTCTT
TTCCCTAGCAGAACTTCAATGTTACCCTGGAGGGCACCATTTGTGTGAAGCTCGTTTCTTAGTATCCTTTGTAGGAGGT
TACTCTGTGGTCCAGCCAACAAGATTTAAGGCAAAGTCAGTGTGTGAGAAGTTGCTTCTCGGCTGTGAGCCTGGCCCTT
TCCTGTTTCCTGTCTTCTACTTCTTTCCTGGAATAAAGAGAGGAGGCTGGAGGAGGAGCAGCCATCTTGTGACCATGAG
CTAGCCCTAGTCATGGGAGCCACATAAGGAACCCTGAGGGTGTCAGGTCATGACCCTCTAACTACCAACAGCCAACCTC
TTACAACAGACTGTGTTCCAAGGGAGCTCCTTTTCCCCCAAATCCTGGTGGTTACTCATTCCCTTTGTAGCCCTGCAGG
TTCAACTACGATCCCTCTTTTTTGATTCCCCTCCCCCCATCTCAATCTCTTTGTCTCCCCCCTCCTCCTCCCCCTCCTC
CTTCCCTTCTCTAGGTTTCTCTGTCTTTCTGCTCTTCCTCGGCTTCTCTCATGGCCAGGTCTGGGCTGCTGGCCATGTT
CAGTCTACTGCTTTCTCTCTGTGCTCTGGGCCTTTCCAGATGTCTCTGTCAGTTCTCTCCCTCACATCGACAACAAAAA
CCTTCCCCTTAACCATACCGTAGAGTATCCATGTTCATACACAGACAAATAAGTCTCACTGGAGTCATTGCGGTCAGAC
GCCACTGCATTTAGCTGAACTCTCTTGATAACATTTCTGAGTAAGCATTACCCTTGGAGGTGACACACTGGCCGTGATA
CCAGGCCGAGGGCAAAGTTAAAGGAGCAGGACAGCATCTACACGGGAGAGCTGGATTCTCCCTGGGAGTCTACTAGAAG
GATCTACCTGGGAAGGACACGTGTTGAGGAAGAAACTCTAATCACTGAGGCCCCAGGGTGAAATGCAATTGCTGTACTA
GATAACTTTAAAAGTGCCTGAGGCTAGAGAGATAGCTGTCAGTAGTGGGCCTGCCTGGCAAGCAGGAGGACCTGAGTTC
AATCCCATGTAATCAAAGAGAACAATTATGGCAGCAGGCACTTATAATCACAGGCCTGGGGAGGCAGAGACAGGTGGCT
TGCTGGCCAGCCCCAGGTCAATGCCAGGCCAGTGAGTCTGTTTCAAAAACAAGATGGAAGACATCTGAGAAACACGTGG
GGCTGTCCTCTGGCCTCCACCCTCCTTCATTCTACACAAGAGTGCTTCATGGCTGGGCTTTGGCATCAGGCAACACTGA
GTTCTGGGTCTAGTTCTATTACTTCCTTGCAGTGTGGCTTTGGTCCCTCTAATTGATCCCTCTGGCATCCTTACCTGTA
AAGTCCAGATCATCAAAGCAACCCTCTCTCACTTAGATCTAGCACTGGTGGTACAAGAAATCTACATAGCATCAGGCAC
AATCCACCATGGATGGGGCCTTCTGTGTCCAGTGTACACTGTCACCTCTAACTACCTGTGTCCCACGGTGGTCCAGTGA
GCCAGTCTGTCTGTACTTTTCTCTGCAGGTGAACAAAGCAACGAAGAAGTTGCCCACTGTCCAACAGCCTCTGGATTAT
TGCTGTGTCCAGAGTCCTTGGCCTCGCTTGCTAGTGCGTAGGAAGAAGTCCCCAGACCGACCAGACCAGAGTTGAGAAA
ACATCAGCCTTCAGAAATAACGAAGCAGTGGGCTCCATCCTTCACCCATATTGTTCTCCATATTGACAGCATCTTTTCC
TGGGCTGGGCTGGAAGAGGTGGTTCTGCCCAAGACAATAGAGTAGGAAGCTGGAAGGGCGCCTCCTCCGAACTGCCTCA
AGAGCTTTTGCGGGATCTATTTTGTCTTTTTCTGGAAAAGGCTCACCTTCTTTCCCTAAGGTCCCAGTCCAGGAGAGGA
AAAAATATCTTGCTCACTCCAGCCTCGCAGAGGAGGTCAGGGTTGGGGCAATCCCTGTCAGACCAGCGCTTCCTTTTGT
CCCAACCCCCAGCACTTCAGGCCAGACCCGCTGACACTCGACAGCGCCTGCAGTTTACCTTGGCTCCGGTCCAGTGAGT
TTGAGCCCAGCCCTGGGGCGGCCCCCACCTCTCCACCTTGTTACGCCTTCCCACCCTCCTCTGCAGCGCAAAGAGCAGT
TTAAATATAAATCAGTCCTCAGCACAAACAGAGCTTGGGCAGCGAGTCTCAGAGCCATCACCGGAACCGAGGGCCCAGG
TTTGCGGAGCGAGTGCAGACACGCAGAGCCCTGCTCTGGACAACCCCAAGAGCCACAGAGACTCCTCGCTCCCTTCCAT
CACCCCGTGCCCCTCGAGTCCACTCTAGCTCCCCACCCCTTCCCCAGTGCCGCGCCCACCTTAAATCCCCAGGTTTCTC
CTGGCCTGCAGCCTCCTGCCTCCTCCATACGCGGTCTCCTCTTCCTCGGGGACCCGCCATCTCCCCACACACTACCCCC
AACCCTCAACCCTGGCCAGCAGGACCTGATAGGCAGCCAAGGCTCACCCAGCTCGAGTCCCAGAGCCTCTGGGCTTCCG
CAGCCGCGACTCCAGGACCCAAGACACCTGCCTGGGGGAGGCGACAGCGGCTGGGCGGGGGCTAGCAGCACCTCTGACA
CCCGAGGAAGAGAGGGAGGAGAGAGAGCGCGTTTCATCATCGCTGCCACTTATAAAAACTTCTGGGCGCTCACTCTCTC
GCTCAGTCTCCACGTCTCGCTCCCCATAGCCCGGCTACCGCCGCTGAAGCCTGAAGCACCCAAGTCCCGCAGAACCTGA
CCCCGGCCTGTCGCCACCACCTTGGCCCGGTCAGGGGACGTCGCCTCAGTCACGATGGGGCTCCTGCCCAAGCCCGGAG
CACGCCAGGGCAGCGGCACCTCCTCGGTCCCAGCCAGACGTTGCTCCCGCTCGGTCTTCAACAACATTAAGGTGAGTAG
TGTTGTGAGTAGTGTTCGTGTTCGGGGCAGGAGGGCGGCAGAGTGGGTGACACAACCTAGGACGTCGATGAGGCCAGTC
CGGGAGCTCTGGGTTGCACCCGGCTCCCTTCTCTGTCCCCGGTGCCACATCCGTGGGGCCTGGCCCGGCGCGTGAGCGT
GAGCGTGAGGGGGCGACACCTCTCTCTCTCTCTCTCTCTCTCTCTCTCTCTCTCTCTCTCTCTCTCTCTCTCTGTGTGT
GTGTGTGTGTGTGTGTGTGTGTGTGTGTTGCGCGCATATGCTCATAGGCTCTCGTGGGGAGTAATAATCAGAACAGACG
TAACTTTGTAAAGGGGAACTGTCCTGTTCTTCCATGGAGAAAGAACACCTCCAGGGAATTCTGTTGGGTCTCTGCTGTG
GGTATGCGCTCTTCCTTAATGAGAAGGGATGCAGAGGAGTTTAGCCAGCACCTTGTGGGCAACAGGCTGTGGGCAGCCT
GAGATGCAAGTCAGAGCACAGGCACCTTGTCTCAGTGGATGGTAGAAGCCTGCATTCCTTGCCTGGGTTTTCATCTTTG
CAATAGTTGGGAGTCGCAGATTAGATTGCTACCTGGCTGCATAGCTCCCAGCAGTTTTGAGGATTCCCCAGCTCTCCTG
GTCTCAAGAAAACAGCAGGCACTCGAGGTTTATGGAGAAAGGCCACCAGAGGTGCCTGTGGCCTGAGAGTTATGAGGAG
TTAATAGAAAAAAGAGGAAGCTGTTAGCATGAGAATGCCTTCTTTGGTAAGGGTCAAAAGTAGGGTCCACTTCCCCCAG
GTCTTGAAGGACCTGGAATGGTTGCGTCCTCACAATATTTGGGAGAGAGGTTCCTGAAGAAGGTATCTCCTGGAAGGGG
CTAGACGACCTTGGTCAGACATCCAGGCGCCCTGGGGTCCGGCAAGCATATGGTGCAGAGAGATTATTTCCCACAATTC
CTACCTTAGATGTAATGGGTGCCCAGACCTCACATGGAAGGATTGGAGAAATGTGAACAGGCTATGTGTGTCTAACGGA
AAGAGACTGGGGTTTGGGGGGTGGGGTGGGGCAGAGCGAATGCCACCTGCATGTTCTGCCTCAGGCTGTTACTGGTAGA
ACTGGGGTTCCTCGTGGGGATCCCTCTTTTGTTACTACCACCACCACCACCATGGTTTTAAAGGGCTACCTTGATTTCC
CATTGGAATATTCCTAACACAGAAAATTGGAGGTAATTGAAAACAGTCCTCAGATCTCCTCCCCTCTAGCCAGACCTGG
ATGGGAATTCCATTTATTATTTTGGTTCTACCAATTTAGAGGGACTTGGAGAATTATGGAGATTTTTTTTAAAACTTGC
TAATTAGAAGGAAAGGGTGTGTCTAAAGGATGGGTGGTCTCAAAGGAATGGGATTGTGGCAGCACGAGAAGGAGGTCAC
TCTCATTTTCCCCAAGAATGGAAAGAGAGGTGGCTGTCCCAGGATTCCTGATGGTGAGGGTGACAAGAGTGACTCAGCA
CCTCCAACCCCTAAGAATAAGTGGGTGGCAGCCATTTCGTTGAAAAATATAAAAATAAGATAAAACCCACATTCATATG
CTGAGATTCATGCCTGAGACCTGGACCTAGGCCAGTTGGCCTCAGAAGGGAGAGTCAAGAGCTCTTATCAGTCAAGAGG
TTTTGAGTCTGTTAAAACATTTCCTTGGTTGGAGGATAATAAGCATCAGATGACAGGCAATTTGGAGAGCCCCCACCTT
AGCCAGGTTCGTCCTGGAGACCCTAGGCACACCTGAGTGGAGATCCTAGCTAAGCTTTTTCTTGCTGGTGACTCTATGC
CTGGGCCTTTGCTATTCGAAGGGAGATTTTCTCCTCTTGATAACAGGCTGGGTGATTACCTTATACCTTCCCAGCAAGG
GAAAGGTGACACAAGTGACACAAGTGGGGCAGGTGACAAGGGACATCCAGCCCAATAGCTTGTCACTTTGCTGGCATCT
TTGTCACTGGGATGGACTGTCAAGAGCGGATGTTGCTATAAACCCATGTGCCACATGATCTGAGGGAGGAGTAGAGTCT
GAGAATACAGATCCACGGCCCAGCCCGGCCACACTCACTTCCTGGGTCACTCAGGACAGACACATGGCTCACCTTTCTT
GGCCCTCTGGGGTCCTTTTCTGAAAGAGTGGGTGTCATGAATAGTTCCCACCATGCACCTCAGTAAGAATGCCCTAGGG
TAAGAGTTAAACTGGGCCTCCCCAGGGTGAGCCCCACTTCTGTAAACAAGGCATCGCATTCGATGTTGTCCAGGAGCTC
CGGTTTCAATGTTAGACCAGCTCTGAATGACGCCCTGGTCTCCATCCTTGACACCACACTGTGAGCCTGCACAGGTCAA
GCCAGATAGGAGGGTACTGAGGTGGGAGAGTGAGTCCCACCTCTAACCAAGATGCTATTTGTAATTGATACTTACCAAC
AAAGGCAAACATCCGTTTTCTTCAGTGGAGTGTCCCTGTGAATATCAAACCACACTTCAGAGCAGACCCGTATCCCCGG
GGTAGCTGGCCAAGATAAAACAAAACCCATTTTTGTTTGTTTGTTTGTTTGTTTGTTTGTTGTGGGCTTTTTGTTTAGC
TTGGGCATTTTTAGCTTATTGTTTTGTTTTGTTTTGATTTTTGTGAGATTTATTTATTTATTTATTTATTTATTTATTT
ATTTTAAAGCCTACAGCACCCTCTGGTCTCCCAGTAGTAACCAAGCCTTACCCTACTTAGCTTCCAAGATCAGACGAGA
TTGGGTGCATTCAGGGTGGTATGGTCATAGATGAGTGCTGTTTTGTTTTGTTTTGTTTGAAAGAGAGAGAGAAAGCATA
AAGTTGAGTGGTTGGTGAGGTGGAGAGGACCTGGGAGGAGTAGGGGGAGAAAAAACATGATCAAACTATAATATTGGAC
AAAAGTTGTTAAAAATCTTTAAAAATGATTAAAAGATAGATTTTAAAAACTCAAAATAAAAATTAGAAAAAAACTGGGT
GTGGTGGTCTTGTAATCTTAGCATCCAGGAGATAAAGGCAGGAGAACTAGAAGCTTAAGTTATCACTGGCTATAGAGTA
AGCTGGAGACAGCCTGGGCTACATGAGACCTGTGAAAGAAAGAAAGAAAAAGAGAGAGAGAGAGAGAGAGAGAGAGAGA
GAGAGAGAGAGAAAGGAAGAAAGGAAGGAAGGAAGGAAGAGAGAAAAAAGAAACCATTGTCCCATTAGTTCCATGATGC
AGTTATTAGTTATCAATGACAGTTAATAATATTAATCACAATGTCCATAATAATAACAAATAATAGCTAACAGTAATTG
AGCTCTATGAATGTACAGACCTTGAGGATCTTGCACGCACATCCCATCTGCTTTACAACTCTAGCAGAGGATAACATTA
CCAACCTCACTGGTAAGGCAATCAATTCTTCATGGACCAGGAAGGGAGGCAGGGAGAAGCAGGAACAGCTATGGCACAA
AGTACTGTCCTCATGAGCACTATCGTCTACGCTGGCTCTATAACTGGCGACAACACAGCCATCACTTAACAGTACTTTC
TCCAGGACCAGAAGACATTCAGAAGTGGGTACAGAGGGGACCCAGACATGAATCCCCAATGCTGACCCACTCCTGCCTC
TTCTCTCTTCACAAGGCTCCATGAAAGAGCCTTGCACCTATTTATTATTATTATTATTATTATCATCATTATTATTATT
ATTACATGAAACGGTGCTGGAATTAAAGGTGTGAGGCACCACCATGCAGCCAGGGGAATTTTTACATAGCCTGTGTGTG
TGTGTGTGTGTGTGTGTGTGTGTGTGTGTGTGTGTGTGTGTGTGTGTAACAAGTTGATGTGCAGCTATGTGGAGGCCAG
AGGACAATCTACAGTATCAGCCTTAGGGACAGCTTCCATCTCCTTTGAGAAAGGGTTTTAAATGGCCTGAAGCTCACTG
ACTATGGTCAACTAAGCCATGGATCCCTAGCCATGGATCCCTAGGGCTCCCCTGTCTCTACCTACTGCTAGGGTCAAAC
CCACTCTGTGTCTGGGTAATGTCATTCTTACACAGGTACTAAGGCTAGAACCGGGATCCTCCTGCGCATGCGGCAAGCA
CTTTATAGGTTGGGAAGTGTTTTGCTTCTGGTTTATTTTGTGGTGCTGTTGAATCCCAAGCCATGAGCCATATAAGAGA
GCATTCTACCACTGAGTCACCTCCCAGGCCCTGTGGGGTGAAGATTTATATATCTCCTCCTGCAGGAGACCTCTCTCTC
TCAAGATTTATTTATTTTGTCTATATGAGTACACCATTGCTCTCTTCAGACACACCAGAAGAGGGCATTGGATCCCATT
ACAGATGGTTGTGAGCCACCATGTGGTTGCTGAAAATTGAACTCAGGACCTCTGGAAGAGCAGTCAGTGCTCTTAACCA
TGGAGCCATCTCTCCAGCCCCCAGGAGACATCTCTTGAGGTTTGGTTTGCAAGAAGATTCTTAGGAATCTCAGAACCTG
CTCAAACATCACTGTCAATTAGTCTAGTACAGGCCCAGGACTCTAAATTAAAAGCAGGTTCCCTCGGAGACCCTGGGAG
GAGGTAGGCTCTGCTCCTGACTTCTCCTGGCAGCCTCAGACTAATCTGAAGCTCCCTAAAGTGAAACACCATCGTGGAG
CTAAGTCGAGGTTCTTCTGAGGCCTTTGACCCCCTCAGCCCTAGTGAGGCATCTTGAGTGCCACTTCTTAGTTTCCAAA
ATCCAGGGCAGCATGCCAACAATCTAATCCATCCCCAGGAAAACACTCCCACTGGACTCCCTGAATCAGAGAAGAGCTA
ACGGTGGCTCGCCCACCTCCCTCCAGGGGGCGCATTTCCATAGACTTCAGAACAGTGATCTGTTCTCAGGAGGCTGGCT
TGGCAAGTTTATCAGAAGGCAGGGAAGGAAGGATGAGGACTAATGAGTTCTCTGGTATTAGAATACTGGGATTCCTCTC
TGGGATGATGTTCTAAGCCCTCTATAGCTTTTCATCTCCCAACACAGAACAAATGAGAGCAAGTTAACATTTCTGAGGG
TGCAGAGTCCCTTTCATCTGTCCTGATTGTGACAGGACTTTCTCTTTTTCCAAGCTAGGAGACCCAGCCTGGGCTGTTG
GGATGAGGGCACGCTTCTCCTATCTTCTCTTGTCTCAGCATGTAATTTGAGACAAACGGTGTTTGTAGGGGAAAGTTAG
AGGTCTCTGACCCTCCTCGTTCTCCCCTTCCCACCCTTGAATTGGTTGTAACCACCTTTTTGTCTGTAGAGACACTGGG
TGCACAGTGTCTACTATGTGCCCAATCCCAAGGATGGGGAGGGAGGTACCAAGAAGGCAAGGATAGGGAGACTCAGCGC
TGTGTAGATAGAGGATAGGGGATAGAGGATTGCTCTCTGTTTATTATTTTTAGACTCTCTAGAGATGGTTTTCTCAAGG
AATGCTGTGAAGAAATGAAGAAATGGGGTGTATGAGTTTGCCCTTCTTCATGCTCTACATGGGTCACCATCACTGGGGG
CTCTCTCACAGTGGCCCCATGAGAAAGTCACTTGTGTTGCTTAGTTCCAGGCACAGCTTTATTTGTTTAGAGTCTTTTA
GAAAATGGTTTTCAGTTTGAAACGATAACAGATTCTCAACAAAGCTGGTCTTAGAGGTCCTGTGTATCCTACACCCACT
CACCCTCAGGGTTCCATGCTATATGACAACAGTAATGACGAAGGATATCAAAAAAGCAGGAAATCACCACTGCTATCTC
GTGCACGTACAGTCCGGTCCTGTACTGCTTTATCACAGGTAGATTTGTGCAGACACCACCCATCTGAGGATACAGGTGT
GTTTCACCACCCACCGCAGAGAAGTGCCTTGTGCCTGCTCGTTGAGAGTCTCATCCTCTGACCACTGTCCCTAACCCCC
AGCACTGTCTAGTGTCCATCTCCAGGATTGTATTATTTCAAGGCTGTTACATACAGGGAAGCATGTAACAGGCGACCTT
TTGAAAAACCAGCCGTCTTCATGCAGAATAACGTATTTGCGTTCCAGTCCGTCTAAGCTGTGACACAGATCAGGTGCTG
GTTCCTTTAACGGCTGAGTACTACGCCAAGGTGTGGATGTGCTGTGCTTCGTTTACACATGTTCACTTATGGAAGAACG
TTTGGCTCATTTCCCACTTGGGACTAGTTCAGATAAATCCACAAGAGTGGTGACGTACAGGCTTCTGTGTGGACATAGC
TCGTAATTTCTCTAGGGTGAATGCCGTGGAGTGTTGCTGGGTGGTGTGGTTGTTGAACAATGATACTTTTTTTTTAAAA
AAAGATTTATTTATTATTATAAATAAGTACACTGTAGCTGACTTCAGACACACCAGAAGAGGGTGTCAGGTCTCATTAT
GGGTGGTTGCAGAGATTTGAACTCAGGACCTTCCTTCGGAAGAGCAGTCAGTGCTCTTACCCACTGAGCCACCTCACCA
GCCCTGAACAATGATACTTTTTTAAAAAGGATCTTCCTAACTCTTTCCTGGAAGGGTCGTCTCACCTTACACGGGTGTC
AGCTGCTTAGCAGTTGGTCAGCTTTTGACATTACCACTCTTTTTTTGTAAAAATTCTAATAGACATGCGGCACCACCTC
TTTGTGTCTCGTTCATGTTGTCCTTGTGGCTGGAGAGAGGAAGATTGAGCTTCTTTTCATGTGATCATCGCCCCTTCAT
GTTGTCGTTTTCCTTTAATGTTGTGTAGCTTTAAGAGCTCACTGGGCACTCCAGTTATAAGTCCTTTGTTGGGTTATTT
GGTCTGCAGATTTTGTCTTTGAATCTGTAGGTTGGTTTTTTATTTTTTTTAATCATTTAAAATGGTTTTATAGAGAAAA
TACTTAATTTTGATGAATTCCAATTATTGGTCTGTGTGTGTGTGTGTGTGTGTGTGTGTGTGTGTGTGTGTGTGTGTGT
GTATACACCTGCTCACATGTGAGCACACAGTAGTCAAAGGACCTTAGGTGTTGGTCCTCAACATTCACATTGTTTGAGA
CAGGGTTTCTTGTTTACTGCTATATACAACTCCAGCCTTTGTTTGTTTGTTTGTTTGTTTTTAAGCTCACGGAGGCAGA
TTACCCACTACTCACTGTGTAGCTCAGGTTGTCCTGGAATTCCTGATCCTCTTGATTTCTATCTCTGAATCGCTGGGGT
ACTAAGTATGTACTGCCATGTCTGGCTTACATATATCAGCCTTCAGCAGTTTGGGTCCTCCTCTTGGTGCTACATCTAA
GAAGGCTTGCTTCACTGAATCATAAATCTATTGCCTTTCGAGTTGTTCTGTGTAGAGGTGAGGACCGGGTCAAAGCCTT
GTCTGTTTTTACCTCTAGATGTTCTTGTGCCACGTCTCTTCTCTCCTAACCTGTCTCCGCGCTCTTGTCCAAAGCCAGT
TGGCTGTTCTCCTGTAGGTCTCTTGGTTCTTCGTTTAGCTTCACTGCTACACACCTTCAGGCCCCTCCTTGTATCGCTG
TCTGATTATTGTAGCTACGGAGCGAGGCTCGACGAGGGAGGAGCTTGCTTTCACCTGTAACGGTGCAGTTATCAAGCTT
GCTAACTCACGGGGCTTCCCTTGCCCTCTGGCTTTTGGCATGATTTCAGGGCAGATTTCAGCAGTGGGGATGAGCTCTC
TGTCAGCACCCCTGTCTCCTGCTTGCCTTCTGGTTTCAGCTGTTTGGCATGCTTTTCTCCTTGGACTTTTAGATCTGTG
CCTCTAAATCCTTCTCTATGAGGGTGGGAGATGTCTCAGTCTGTAAGGTATTCACCATGCAAGCATGAGAACTTGAGTT
CAGAACCCCAGGATACATGTAAAAATCTGGGAGCCATGGCCCAGGCCTCTAATTTCAGTGCTGGGAGGGTAGAGATAGG
TTTCCTGAGGCTCCCTGGCCAGCCAGCCCAGCAGAACCCATAAGTTCCAGGTTCAGTAAGAGAATTTGCTTCAAAACTA
GAGACTTGCTGTCAACCTCTGGCCTCCACAAGCACATGCATGTGCACTTGCACATACATGTATACACACATGTATACAC
ATGCAATAAATACACTTTTCCTTTATAATCCTAATGACAGCCCTGAAGAGAGGTGTCAACCCAACACCTCCATCTCACA
GCTGAGGAAGAAGAGAACTGCACAGGGCCGAGTGCTGAGTAACTGACAAAGCAGGAATGCCCACTCAGCATCTCCCTCC
CAAGTCCCCCTTTTCCCGTGACCACAGAAGGACTCTGTCTTCTACTTTCTCTCATCCGTGACCTGCAGGCTTGGGCTCC
ATGGTCTCAGGGTTCTTTTCCCAATCTCAAATTCTCAGCTCATGCTAGCCATCATGGATTAAGATGAGACTAGGAGCGA
GCCAGTTGGATCTGTACTGTGCTTGGAGAGTTTCTGTGGACCCAGTGGAAGCAATGAGATTCTTCCATCAGTGTCCTGC
TGGCTTGGGTTGGAGGACCTTGGTGGCCTGGGTCTGCCTTACTGTTGGAAGTTGATTAAATCTTCTCAGGGGTGGAGAG
TGAAACTAAGGCAGAAGTCAACTTGGACTTCACTGTGGGGGTGAGGGGGGTGGGCTGATACTGTTGGGGGTGGGCATCT
TCATGAGCTGATCTTCCCAGCTCCTTTCCATTCTGGGTCCTGAAGCTCAGCAGTATACCCAAGAGGCTCAGGTCCAGCC
CAAGGGTGAAGCAAAGAGAGGGAGCCAAAGGACTTGTGAGGAACTCTTAGAACATTCAATGCGATCAGTATTTGGTGCT
AATGCCCAGGACTGCTCTTGGCTTCAAGAGATGTGGTGGACTCTCTTCTCCTATCTTAGGGTTTCTATTGTGGGAATGA
AACACCATGACCAAAAAGCAAATTGTGGGAGAAAAGGGTTTATTTGGCTTAGACTTCCATATTCCTGTTCATCACCAAA
GGAAGTCAAGACAGGAACTCAAACAAGGCAGGAACCTAGAGGCAGGAGCTGATGCAGAGGTCATGGAGGGATGCTACTT
ACTGCCTTGACTCCCATGACTTACTCAGCCTGCTTTCTTATAGATCCCAGGATCACCAGCACAGGGATGGAACCATCCA
TACTGGGCTGGGCCCTTCTCTATTGATCACTAATTAAGAAAATTCCCTAGAGCTGGATCTTATGGAGGCATCTTTTCAG
TTAAGGTTCCCTCCTTTCAGATGACACTAGCTTGTGTGTCAAGTTGACATAAGTCTACTTTAGCACACCTCCTTAGAGA
ATTAATGAGCATCTGGGTCCTGGAGGAGCCTGGGGTCTTCTTGACAAACCACATATGTTCAGCAGGGTGTCACACCAAA
TGTCCCTGGGATATGGGCTAGCCTAGAGCACCAAGAAACTTGGGTAAGATACAGAGGTCCTCAGAAGGGGTCAACATGG
AGGTTCACCTTTGTCACATGCCTCACCTCAAGGCCCTGGGTTCTAAATAATAAATAGGTTTCCACATCCTGGAAGGGCT
AGAGAACAATGTATCTGGAGATAGGGCCTGACCTGACTAACCCCAAGAATTAGATTTTTCCCCCTGAAAACCAAATGAA
TATTATATTTTGTTTCACAAATCATCTATTTCTACAAGTCTGTTCTTGTTCCCCAAATCTTGGAGTAACCTCAACATCC
AGGGACCTGTTTTGTGTTTCTCAAACGCAGGGTCCCAGAAGAAGCCCGTCAAATTTGGGGACTACCACCTAGATAGAGC
TCAGGAAATAACTACTTTATCTGGCTAGTTCACTCAGTCAGCTTGTTGGCTACAGAGGGACAGACTCTCCACAGTTTAA
ACAGGATGGGAATGTGGGGTGTGGGTCAGGACATTTGAGCCCAGTGGGACACTGGCAAAGTGGGACCAGTTACAGAATC
TGGTGGGGTGCCCCGGGTTGGGGGAAAAGGGCACGTTGGTAGATCGCTACCAACATCTACCAGTAGAAACGACACAGGA
TTTTCCTGGTGTCTTTTGGTTGCCAAACAGAACCCTAAACAGATCTTAACTGACCACTTTCTCAGTCAGCTTCAAACTG
TTCCTTCCTTGCGCCTCGGGTCCTCTTCTTTTTCTTAAACTTACTGTTTTTCTTTGGCTCACAATGCAGGTGGAGGCAA
TAGCCAGGAGCTGAGCCAGGAGTCTGCAGTTGATTGACTGGTTGTGGGTGAGACCTTTTCTAGCTAGGCACTGCTGTTC
TGTCTGGCTCTCCGAGAAGCTCCAAAGTTTCTGAGATGGATTGCCTGTATGTTTGCTGGTTCCCAGCCACCCGAACAAA
CCACCCCCGTTTGCCCTGGGACACAGGACTTTCAGTTTTAAAACTGGAAATGTTCTAAGGAAATTGAAATAAGTGAGTC
AACTTACTGCCTCCCATGTAAGAATAGCTTACGAAAACAAGCTTCTACTCTCTGACTACCAGAGGCAGCAAGGAGGGTC
GCAGATGATGTTGCAGGGTAGAAATGAACCCCAGAGGCTCATGGAGGCTTCCAGAGAGCAGCTTATCATGGGCCAGATC
TTGTGCCTTGCAAGCCTCATTAGTCTCTCCGATTTACAGGTGAAAGCCTTTCTCCAAGCTTCCTACGCCCATTGTGGAT
CATGGTTCATGACTAGTCCATTGCGTAGAATCTGTACAGATAAGAATATGGACAGATAAAGCTCCTGGTCTGGGGAGCT
ATTGAATTTCAGAATTGACTGTGATGTGCAAACTCATCTCCTCAAAGATGCAAAAATGTGCTGATGTCTCTGTCTTTGC
TAGCTGGCTCATTCACAGGATAGCCTTCTTCTACAACCCAGGCCCACCTGCCTTGGGGATGGCACCGCTCATGGTGGAT
GAAGTGCTCCACATCCACCGTCATTAAGACCATCCCTCACAGGCATGACCAAGTAATCCCTCAGTGGGAACTCTCCTCC
AAATGACTCTAGGCTTATCAAGTTGATAGCTGAATCTAACTAGGATATAACCTATTATATACTTAATGCATAGGTATAT
AAGATTTATAAGGAGCAGGGATAGCATTGTTCATACTTGTTTGGTTGGTTGTCTTATTTGTACTATATTTTAGTCTAAT
TTCGTTTCATTCTTGCATTTTTTCTTTCTTTTCTTTCTTTCCTCCTCTTCCTCCTCCTCCTCCTTCTTTTTGAGACAGT
ATCTTGCTCTGTGGCCCAGACTGAGCTGAAATTCACTAAGTTAACCTGGTGTACTTTGAACTTGCAATAATCCTCCTGC
CTCTGCCTCCCAAGTGTGATTACATACATGAGCCACTGTGCCTGGTCTTGAACATTCAGAGTACTGGCCACAGTTCCAA
CCCATTCTTAGTAGCCAGTACAAAATTCCTTCCATTTGGACCATGTGCGTGGTGATCCATAAAAAGAAAAAAAAGGACA
GATATTCAGCTATGACTATAATTATCAATATATCTGTGCTTTCTGTAAGAGTGCACACCCACAGTGCACACATTTAGTG
AGCTAATGTGAACAAAGCTAGGTCTTCCAGAACGCTGACTGATGAAGCCCTTTCCCTATGCCGAGAAGGCAGCCTGTTA
ATTCCTACTTTATCATGGAGGAAACTAGGAGGAGGCCTATATGAACTGCCACTCACACAAGTGGAGAGCTGAAAGTATC
GCTTTCTGGGGGTGCTGTCTTGAGTTTTTCTCCCCTCTACAGCTGCACATTGTCCTCCATAAATCTCCAGTCATTTAGC
CAGAGTGGTACCTAGCCATAGCGTCCTACCAGAGATGTGGCAGAGCTAGTGCTGTTTTCTAAGTCAGACATATCGACTG
TTGTCCCAGAACTCTAACTTCCTCACGTTTGCCTCTAGATGCACATTTCCTCTTTGGTGTTCAGCCAACACCAACACTC
CATCCAGCACAGGACACTTAGATGGAGTGTGGACGTGGGGCTATGTCATGGCTTTAAAAATGTTGATTTCTAAATGAAA
GAATTAGTGGAAACCCGATCATTTTCACAGTGTCTTAGGCTGTAACTCATTTGCTTAGAAACTCAAAGGGAAGGACTAC
TCTATCATCGGAGTGTCAATAAATAAACTGCAAGATGTCTGTGGAATAGTCGCAAATCTATTGTGTGTACATGTCTTGT
TGGGAATTGTACTACACATCAATTTTAAAGTTTTTTTTTAACTTCTTATTGATTCTTGTGAACTTCACACCATTCACCC
TAGTCCCACTCATCTCCCCATCCCTTCGTACCTGCCCTCTTCCCTTGCAACCTCCCCTGCTACAGAAGCTGTAGTGTGT
CCCAGTGTGTCCCAGAGTACACTCTTTCGTCCATACTTATTTATTTGCCAAAGTTCATTGCAATGACTTTTTGGTTTGG
TACAAGGCCTCTGACTCCTGCTACTGTATCAATACTGGAACCTCTCTGGAACTCCTCTTAGATATCCTGTTGTTGCTCT
GTGTCATGGTGATCCTGTAGTTTTAGATCTGTAGGACTGACCCAGCCATTCATGCACTCCAGCAGTTCATCAATGGGGT
AGATGTTGGGGTGGGACAATTCAAAGCCCTGGATCTGGGCCTGAGAGGTACCAGAGCTGGTCAGCCTTCTGGCTCTCCT
CCTCTCATTGCCCTTGGAGACAGCTCACCAGCGTCCCCCATATCCAGACCAGCTCGGCTGTGCTGCCCAAGGAGGTGCA
GGGCCTGCTCTCCCAAGTGCTGCAGCAGGGGAGGGGCAGGGCCAGATCTCCTGCTCTGATGACCCAGGGCAGCTCTCCT
GCTGCCAAAGGTAACAAGGGGTGAGGGAGGGTCATCTCTCCCTAACCAATGTCACTACACAACAGGCAAGGGACGGGGC
CAGCTCTCCCATACATGCGCCCTTGGAGCTGGCTCACCCACAACCCTGCTATCAGGGGCAACTCTACTTCGCTGCCCAG
GTGAGGTGGAGGGCCCAAGTGCTGCCGCAACATGACCTCCTTTCATGACCCCAGGGGCAGCAATCCCATGAAGCCCAGG
TGAGGATAGCGTCAGTTCTACACAACACTCAGACATCAACACGTCCCTGGGTGGTATCCCAGACCAGGGACATCTGCCT
AGCTGCTGCAGGGTTACAGACCAAGATGTGCCCTCTCCCTGTGACAGCATAGGCCAGGGCCTTGCTATGGTCCCAGGTG
GCACCACCAGCTGCTCACATCAGGTTCCTCATGACCCTTGAGTCTGCAGTTCTGCCTTTCTTCATTGTGCCCACATCCT
TCTGTTTCTTGTTCTCTTCCTTTTCTCCACCACTGACTTGCTCCTCTTTGTGGTGTGTGTGCCTGGAGACTCTGAGTAT
CCGGGGTCACCTCAGGAGTGCTGTGCCCTGATTGTGCATTATGGTGCCAGGCAGGGGTTATCTCGGGCACAGTCTGGCC
ACTGCTGGACTAGTGGACATCTCGGGCAAGATCCCTGTCCAGGCTTCATGGTGCCAGTCTGGTGGTCATCTTGAGCTCA
CTCCTCTCCCAGCCTGCCAGAGTGGCCCTTTGCAAGGGTCATCTGTCTCAGGCTCACTGCCACCTGGGACCCTCAGTCC
CAGGTGGGATTCTTCTAGTCTCCAGCTCACTCTCCATCCTGGGAGCCCATGTGGTCCTGCCTGGCAGCGGACTGGTGGT
CATCTCAGGCTCAATTATTTCAGGAAGTGTTAGGCTACTAATCATTCAGATGTTCATAGGTCAGAACACCAAGCACAGA
TATAATCTCTTCTTTTTGCCACCTACTGATATGCCTGTGACAGAGCAGCCATGCCTGTCACACCTCTAGGGACAGGGAA
GCTTTCTAATGATTTATTTATTTATTTGTATTTTCTGTGCACTGGTGTCTTGCCTGCATGCTTGTCTGTGTGAGGGAGA
CAGATCCCCTGGACTAGCATGACAGACAGTTGGGAGCCGCCAAATGGGTGCTGGGAATTGAACCCATGTCCTTTGGAAG
AACAGCCAAGTGTTTTCAACCACTGAGCCATCTCTCCAGGCCCCAATCTTAATGTTTTAAGAATAAATCAAACAATGGA
AAGGAGCTTCTCTGATGTTAAGTAAAATGAGGCAGGATGGACCACCGTATGGACCAAGGGTGTGGATATTTCTGCTAGG
GCACACAAAGCAAGGCAGCGCTAAGGAAGAACACCCAGACAGAAGTGGTTCTCCGCTGGGCGGGGACAGGAAAGCCTAG
CAACAATGTCCCTTTGTTCTTTATGGATTTGTATGTTCTTTATTGTCCTACAACAAACATGTCCTATATTTATGCTTAG
ATGAAACTATCAACTCCAGACTCTAAAGTGACATCCACCCTCCACTGCCAGGTGCACCAAGACATTACACTGGTGGTAC
ATGAAATAAAAGCCATGGAGCACAGAAGTGCTGTTTTCCAGGACTCTGAGAGTGGACCAAGGACGCTGCAGGATTGCAG
TGAGAGGGATGGGGTTGTCCTGTAGTGTGGTTGCTATTCCCTTTGCATTTTTACGCCTATTATTGCATTCGAGGCTCAC
TGCTTCCCAGAGGTGGACTCAATTCAGATAATGATACTTGAAGCCTTAAAGAGTGGTAAGAATGCAGAACACTCTCCAT
TCTGGAAAGATGGGAGACAGGTATATCCAGGAATCCCTCTCCACTCTGCCAGCACCCACTCACAGTGCCCAGCTCAGAG
CTTAGGAATCCAGCCCCAAGGGTTGGCCAAACACCTTAGATAGACGAGTCTATCTATCAGATCTGCATCTTGCCCTGTA
GGAAGGGCAGCCAAGGGCGAGGCAGCAAGGACAAGAGCTGCCACTGGATCTGCTGAGTACTGACTGGAGGTCTAGTCCT
GTGCCTGGGGATTTATGCCTGGGAAGACATGGAAACCATCTTAGTGGGCTTTCCTGTGGCCATGTTAGTAAACCTGGAT
TGCCTGCCACATTGTTTGTAAGGCTGCACTCTGCAGTTGTTCTAAACAGCAGTGACCTTTGACTCTCTGAGGCCAAGAG
TAGTAAGGTTCATTTATTTGTGTGTGTGTGTGTGTGTGTGTGTGTGGTCAGGAGTCACCTGGGGTTTTGTTGTTGTTTT
GTTTAAGACAAGGTCTCTCACTGGCTTTGAATTCATTAAGAAGACTACCCTGGATGGCCAGTGTCTTAGGGTTTTACTG
CTATGAACAGACACCACAACCAAGGCAAGTCTTATAAAGGACAACATTTAATTGGGCTTGCAGGTTCAGAGAGGTTCAG
TCCATTATCATCAAAGCAGGAACATGACAGCATCGAGGGCAGGCATGGTGCAGGAGGAGCTGAGAATTCTACATCTTCA
TCTGAAGGCTGCTAGCAGAATACTGACTTCCAGGCAGCTAGGATGAGGGTCTTAAGCCCACACTCACAGTGACACACCT
ACACCCAACAGGGCCACACTAACTACTAGTGTTACTTCCTGGACTGAGCATATACAAACCATCACAGCCAGAAAGCCCC
AAAGGTCTGCTTTCTCAGTGATGGGATTACAAATGCACACCAACACGCCCAGCTGCTTCTTCCTTTTGTTCTGAGGATA
AGCCCAAGGTCCTCATTACTGACTGAGCTAACTCCCCATCTTCACATTCTTGGTCGATTACTATCAAGCATTGGCTATT
CAGTGATGAGTAAAAGCAGAAGAGCTCTGTCCCTCCAGTCAGATAAACAGTGCACAGTTATGCAAATGACAGCAAAGTC
ACCAGGCATGTCATATAATCGGGGGAGGAAATTGCCTGTTTAAGGTAACAAATATGGTGGATTCTGCTTTACATATCTG
GGTCATGGACTGTGAGTTTTAGCGTCATCCTCACTGTCCTCATACAGAATGACTGAGTGGGAAACACCATTAGGAGCAG
AAAAAATGTCTCTGCCTCCCAAAGGCTGTGGTTAGATGGCTGGATCATAATAAGTTCTAGTGCATTATGGTTTCCATCA
ACAAGACAGGCCCATGTAGCACAAAAGACCTCTTAATGAAAACACTTAAAGGTGCTTCATAAAATAAGTAAAATCAGAG
TTCCCATGTATAGCTGAGCTTTCGAGAAAGAGAGGGGAGTGGTCAGGTGAGAGAAATGAAGAAGGCACAAAACAGCAGA
AACTTGACACACCAGTCACCGCTGTGGGGGACAGATGGGAATGGAGCATAGTGGCTATGAGAGCAGGAAAGAGCCCAAG
AGACTGTCTGAGAAGGATGTGGTGTTAGTTACAGTATGGGTACCTAAGATGACATGAGAGGCGGTGGAATCCCATGTAT
AAGCTACACGGAATTGCCAACTGAGGTACCACATGATGGACAGACTTTATACTATATAAAAGTTAACTCAAATGGATCT
GAGACTTAAATATAAGATCCAAAACTATAAAACTCAAAAGAAGACATGGAGATCAAGCTTTATGACACAGAGCTGGGCA
AAGCTGTCTTAGATGTGATGCCAAAAGTATAGGCAATATATATTAAAATTGTTAAAAGTTATATGATGTTGAATTTTTA
AACATTTCTGAGTGTCAAGCAAGACAGTCAATGGCATCTTAGAAGAGGCAATCTATGGACTGGAGAGATGGCTCAGCGG
TTAAGAGCACTGGTTGTTCTTCCAGAGGACCTGGGTTCAATTCCTAGCACCTACATGGCAGCTCACAACTGTCTATTCC
CCAGCTCCAGGGGACACTACACCCTTACATAGGCATACGTGCAAGCAAAACATAAAATAAAAATTAAAAACAGAAAATG
CAATCTAAGACATGGGAGAAAATACATGCAAATTTATGTGCAGTAAGAATTAATATCTAGGAGCCAGGCATGGTGGCGC
ACACCTTTAGTCCCAGCACTCAGGAGGCAGAGGCAGGCGGATTTCTGAGTTTGAGGCCAGCCTGGTCTACAAAGTGAGT
TCCAGGACAGCCAGGGCTATACAGAGAAACTCTGTCTCAAAAAACAAAACACAAACACAAACAAACAAACAAACAAAAA
AGAATTAATATCTAGGACATATAAAAAATTTCTTCAATCCAGCAACAAAGAACAACTGGAACTGTAAACTGAATAAATC
CTATTCTTTACTTTGCTTTTGGTTCAGGTACTTTTATCCCAGCAATGGAAAACACACTAGGACATTACAGGAGGAAGAT
CTGAAAGCAGAGGCTCTAAGCAATAGTTAAACACCCTTGATCATAGCAGCGCTAAGGTAGAAGGAACCCAAGTCTCCAC
CAATGAATAAACAGACAAGCAAACCAGACATAGCCACAGGGTGGAACATTAGTCAGCCTCAAAAGGAAAGACATTCTCA
CGCATGCTATAAAATGGACAGACCTGGAGGACGTTCTGCTCAGAGAAGTATGCCAACCACAAAAGAGCAAAGATATGAT
CTCATTTAAGTGAGGTCTGTAACACGGCTAAATGTATAGATAGGGACCGTGAATGGCAGTTTCCCAGGGTTGGAGGGAT
GGTGGGAGAATGGGGAACTCCTACCCAATGGGTATTCGTTTCAGCATCACAAGATGAAGTGTCTGAGAGGCAGATGATG
GTCATGGTTGCACAGCCTTAAATGTGTGATGCCACAGGAGTTGGTCCTGGAAATGGTCGTGATGGTTGGTAGATTGAAA
TGTGGTTTTCCTCCATTGGAAATATGTATGGGTGATCAGTAAAACATCACTAGACACAGGCCTCCCAGGGAGGGGAGAA
TAAAAGGTAGACTTACAAAATGATAATAAAACAAAATGTAATCAAAGGCTGTAGCAACGGAAGGTTGCGGAGGCAAACC
CCCTTCGGTGGAGCCTGATATTATAACTAAACCGAGAAAGAACTGCAGCGCATGCAAATGTCCTACCCTCATCATTTCC
ATTTCAGAGAGTCTCAGGTTGGATTAAAAAAAAGAGAGAGAGAGAGTCAAATTGCTTTTGAAAAGGGACATCCAAGTCA
GTGGGATGTGAGGTCACCTACATTGCTTCATGTCCCACCTCTCCCTCCATTCTCAAAGATGGTGGCTTAGCATCTTGAA
ATCTATCAGCTCACCCTCTCTCCTCTCTCATGAAGACTTTTGTCATTATACACACATGCACACACACACACACGCACAT
ACGCAGCCATGCATCTTGAATAAGCTCCCAATTTAACATCATAGTCACGCCTTCAAATTTCATTTTGCTACATAAGCTA
ATATAGTCAAAGGTTACACCTGTAACCCCAGCATTTGGGAAGTGGAGGCAAGAGGATCAGGAGTTCAAGGCCAGCCTTG
GCTACATAGCAAGCCTGTGCTACGTCAAACCTTGACTCTAAAACTAAATAAATTACCACAAAACCAAAATCCACAAAAA
TAAACATTAAAACACACAGAAAGTTTGAAAATCAAGGGGCAGAAGATTACCAGGAGACCAAGATGTAAAGATGATTTAT
CCATTTTTAATAACAAGTACAAGTGCCTATAACAAAAAAGAATGCTAGACTGTGGTATATTTGTAATATTTAAAAATGA
ATGAGACTCATAGCTACAATGTACCCAGAACAGAGCCCACAAAATCCAGCAAGGAAACAGTGGCAGATGTGACCAGGTG
GATGAGAGTATGTATCTCTGAATGTCACTGTCATTTTGTCTCATGAAGCTCAGAGTCACAGCCAGCAGCCAGAGCATGT
CCATTGCGGTTCATTTAAATGCAATTTGAAAAAAAAATCCCGGGACAGACTCTAATTGGCTCTGCTGGGTCACATGTGG
CCCTCCCAGTGCAGGACACCATACTGGTATTGTCTTCTTGAATCATGGGTCCAACAGGGACCCCTCTAGAACTGTTCTT
ACAAACAAGGTGGGTGGATAGGGCAATCCAGACCTGCTGTGTTAGGAAGGTGAACAAGTGAAAGAGACGCCAAAGAAGA
GGTGCGGTCCTTGGTGCCGTGGGAGACTCCTTGGGTGTCATGGTAAGCAGATTGTTTGAGCAAGGAGCAAAATGAAAGG
GGTTCGCCCCCTCTGCACTCTGCAGTCACAGCAGTTCTAGGGAGCCACCAACAAAACCACCACCTTAGAGGAAACCGGA
AGTGAGGCTTAGAACACTTCTCAATTGGCTACAGCTCAGCAGTCAGCCAGACGGCTGGCTACGGCGTAATTAATTGGTT
AACTGCAATGCCCCTCCCCTCCAAATGTTATTTAACATCCTTTGCTGCGGAGAAAAGGTCCCTCCAGAAAGAGGGCAGT
CAGGTACAGGCAAGGGATCTTTCTGAACTGGACTCACACCTGTTTCTTATCGCCGCTGTAACAAATGATCCCAGCCATG
ATGCTTAAACAAGGACTTACTGTAGGGAAAGCCTTGGAAAATGTGGTGCCAAGTGATTTCCTCACCTTCTTCCACTTCT
ACAGTCACCTACATTCCTCCATCCTCAAAGATGGCAGCTTAGTGTCTTGAAATCTCTCCCCTCCCCCTTCTCCTTCTTA
TCTCATAAAGACCCTTGGAATTATATTGCCCACCGCTCTCCATGGATCTTGGATATGCTCCTAATTTAAAATCCTATCC
ACACCTTCAAATTTCCTTTTTGCACATAAGCTACTACTATGTTCAAAGGTTCTGAGGGCCCCCTTCTAAATAGGGGAAG
ACATTGTTTTGTCCAATTTGGGGTTACTCAAACTAAAGTCAGTAGAAGGCATTCAACACATATATTAAGATATAGCACA
AGGAATTGGCTCACACAATATTGGAGGCAAGCAGTCCAATCACAAACAGGCTCTTAGGATTCACCAACTTGGGACAAAG
CTGCTGTCCGTGGTGTGTCTGTGTGTGTCTCTGTGTGTGTGTGTCTCCTGCACACACTTGTCAGTTCTCTTAAGTTTTG
TGGTTGATTGGCTTGGGCCAACTCAGATCATACAGGATCATATAGATCATCTTCCTTCCTTCAAGTCAGGCGATTCTGC
ATTTTAATTACATCTGCAGACCTCGATTGTGTTTGACTAGCCAGAGGCGAGGCTAACCATGCTGGCCCATCCAGTGTAC
TGTTACAATTAGGACCTGTTGGGGATAGACTGTTGCAGCTCCAGGAGTTGGGGCTACCATGGGAACAGAGGGAATCCCC
AGAAGGTAGCGCCTTCTTGAAACTGTTGATTTGAAGAATGCATGCTTGGGGTTGGGGATTTAGCTCAGTGGTAAAGTGC
TTGCCTAGCAAGCCCAAGGCCCTGGGTTCGGTCCTCAGCTCCGGAAAAAAGAAAAAAAAAAAAAAAAAAAAAAAAAAAA
AAAAACTTTAAAAAAAAAAAAAAAAAAAAAAAGAAGAATGCATGCTTGAGTGAACTGTAAGAAGCCCAGGAGGGGGTGA
GCACCTTCCCACAGTTTGAAAAAGCTGTGTCGAGAGAGAGAGAGAGAGAGAGAGAGAGAGAGAGAGAGAGAGAGAGAGA
GAGAGAGAGTCTGCTTCCTTCTACACCAACTTTGCCAGGCCACACAGTGAGCGAGCTACCTGTGACTACAGAGATGCCC
CTTCCTTCTGTTGCCTTCCCATTGCTAGGTCGCAGGCCCCTGGGGTGCAGACTTGAATGGGCGGGTGGTGGAAGGCCGG
TGAGCTCATGTCTGCTGCTCCTGGAACAGGAGGCAGCTGTAGGCGTGAGTGTTTGCTTGGCTTATCTTTTCCCATCTGA
AGATGGTCATTGGTGATTCATTCCGGAATCTTGGAGTCTGCGGGGAGAAGTCCCAACCCAAACCAACCAGGTGCAGGTA
AAGGGACACCCATCCCCCTGTGTCCCTGCACTTGCCTTCTAGTGTTCTAAGAGAAAAAAATCGGCCTGGGGAGGGGGCT
CCCCAACACCCACTGTGCAGGCAGACTCTCAAGAGGATTCCCCATGCCCAGATAGATAGCCCAGAAGCGGGAGAGAAAT
CTGTAAGTCCCAGCTTCTCACTCCATGAGAAGTTTACATTTTAGCAACTCTGTTCACAAAATGTGTTTGTCCAGAGGTT
GAGCTTTGTCACTGGGAAAAAAAAGTTGTCAGGGAAGAAGGACTTAAGGGCTTGGGAGTTCTTCCTTTGACTCGACAGC
CATGATTGTCAAAATGGAGTCTATGAGCTGGTGGCACCCTCCACACAAGCCAGCTTATTGTAAAGACAAATTTTCATAC
CCCATCCCTGACTACTGAATGACTGATGGAAAGACTTCTCGGGTACTTCTGATGTGCTCCAGCGTTCAGTGACATCTCT
CGGGCAAGCACATCTTGAGCCCCTGTTGTGCATGCAGAGTGTGCTATGGTTGCTGCTATGAATGTGGTGGTGAAAGTGA
ACAGCAAGAAGTAATTGGTATTCAACTCCCACGGTTGCCAGGTAACTCGACTGGCTGATTGTAATGGATGGAGGAAATT
TGCCTGGCCTCTGAGGTTGATGAGTAAAGGCCTCCCAGAACTTTCTGGTGTGGCTCAGGTAAAGGCCAAGGACTGTAAT
CTCCTGTCCCAGAGACCTCTCTGTGCAGGGAGACTGGAGTGGGACTGTATTAAAGCAGAACCTCCTTAGCCAGGAGGAA
CAGCCATGTTGCAATCTGCAGGCTTTCTGGGGGGGGGGAGGGGCTCAAAACACACAGGCTGGGTTCCATAGCAACCTCA
TTTAAGCCATGGGAAAGGACCAATTGTCTGGGAGGCTGAGGTCAGGAGTTCAAGTTAAATAGTCAAGGTAAGCAGGGAT
CTGAGAAATGGGCGTTCTCTTCTCTGTATCTACTCCTGGCTGCAGACAGTTTGTGGTGCTAAGAATGCCTGGTGCTCTG
AATGAGCCATTCCAGAGATTGTGGGAATCCCTATGGCCATTCCCTTGATGCTCTTTGGGGCCGTGGTGTGAGTGTGGGT
TGGGAAGAAGCACCAGGGGGTTGTGGAGACCAGGGTGCCATATTTTTGTGCATGTTACGAAACTCACATCTTCCCGCCC
TCCTTTCTTGACCTCTCCATTTGTCTTTTATTTTCTTCTGTCACAACAGCCTAGGACCTGATGAAGCTTTTCTGGGAAA
GAACTTGGTCTCAGTTCCGTGGTCTGACTGAAGACCCCTCCCTTTGAGGTTTCATTCAGTTCTGTCATGCTCTCTCTGT
GTTGACCTTGAAAATATTGCTTTCTCTTTTTCTGTTGCTCCATAGCTCCCAGCAAAAAGTAACCCACAGTTAAGAAAAG
GTTTGGCTTGGCTTATTCTGGATTGAGGGTACAGACTGGCATGGCAGGGCTGGCATGGTGGGAGTGTGCAGGAGCTGGC
TTTATGCACCTACAGTCAGGGAGCAGAGAGAAAGAGATAACCATCAATGCTCCATTTTCACTCTGCTTTTGGTTTAGTC
TGGGACCCCAGGTAATGGGAGAGAGCTACTTCCATCCTTCATGGTCTTCTCTCTATAGCTCAACCTCCCTGAAAATGCA
TAGCGATTTGTCTCTTAGGCAATTCTAAGTCTGGGCAAGTTGATAGCCAAGATTAAGAATGTGTGTGTGTGTGTGTGTG
TGTGTGTGTGTGTGTGTGTGTGTGTGTATGTATGTTTATATATATATGACATGGCAGCTTTGGGGGAGAGGGGCAAGTA
GGGTCCATATTCTGAGAGTGAGCACAGGACTCCAGAGCACCGCTTGGCGACCAGCCCTCCTGAGAAAGCTTCTACTTCT
GGGGAGGATCACTTGTGCAGACTTCTACCCATGCAAAGACTAGACCAGAGACTCAGCTTGGAGCACATCCCAAATAGCA
TTAGAGATCAAGTGGCCCTTGTCTGGCTGCAGATAACCACCTCACACATCAGAGTTTAGATGTGTTAGGGTGTCTGTCA
AGTAACTGGGGCTTTGTCCTGTTTTTTTTTTTTTTTTTTTTTTTTTTTTTTTTTTTTTTTTTTTTTTTTTTTGTGCCGC
TGTAGCACCACAGCTGTCATGAGGCACCCAGGAGGCTCTAGGTCAAGTAAGCCTTCCACCTTCTTCATGGGGAAAATGG
AGTCTGCCAGCGAGGCCCCCCGGCTGCGTCGAGCAGGAGTAAAAGCTAATAAAGATAAAGGAATCAGTCATGGGTGGGG
ATATAGCTCATCCTAGTACGCACAGGCTCCAGGGCTTGATTCCCAGCATTACCAGAAAAACAATGAAGAAGGAAGGAAG
GAAAACAGAATGGAGAAAAGATTTTTTCCCTCCAGCTGGAACGCGCTCAAGGGGCTTCAGTCCTACGGAGCCCAAGAGG
GACTTATTTCAATGCAGCCCTGGGTTCCTGTTGTCCACTGGGCTTGAGAATTGCATTCCACACTATCCCCCCACCAGAA
TGAGAAGTTGAATAATGAGCAGAATTGAAGTCCTCTTGCCCTGGAACCAGTTGCTGGCCTGGCCGGGACCTAGAGGTCA
CTCCCCGTCAGCCCTGAGCCATCCATTCTCCAATCGTGCCACCAACCATTGACAAGACCAGAGAGAGCTGGTCTTGTCC
TTGGTAGGCAGTGGTGCCTGCCCAGCTTTCCTCCCATGCCAGGCCTCTCACCGATGCTTGCTTTCTTTGCCACCCCTGT
TCCCTCCTTTCATTCTCTCTACGGGTCCCTCTCCCCTGACCCATCAGCACACTGACCTCTGCGCACCCGCTCCCACCTG
TTCCCCCGCAGCCCATTGGCTCCTTCCTCTCACCACCTGCCCTGCCCTGCCCTGCCCATGTTCTGACCTCCTCACTTCC
CTCACACCACTCTCTCCGGTGCCCCTTACCACCCCTGGGCCACCTCAGCTCTCAGGCCTTCCCTTGCCAGAATTCCTCT
CCCTTGGCTGCTCGCTCGTCCTGGCCGTTGTCCAACTAGAGACTTCCTGCCTTGTCTTCGCAACCTCGCCTGACTGCTT
TCCTGCGTTCTGCCCTGTTACATGACAACCTTTGCAGGAGGTCCAGCATGTGTCATACCTGCTTAGAAGTCTTCAGTGA
TGACCAGATGGAGATGAACTCCTATGGCTCCCCAGGGAGGCAATTGTCACTCACAGTGTAATTTCTTCCTGCCACACCC
CTAGAATGTTCCCCAGATTCCTCTGACCCTATCACCGTGTGACAGATGCGCAGCCTGGCTTCCCTGCCACACAGTCACC
TACAGGGAAACCTCCTCCATGCCTTTGTCACTTCATTGGTAAAGTCAGACCATCAATGGCAAGCGCATCTCATGAACCA
CCAGAGGTCATGTGGTAGAACTGCGCTCACAGCCTAAGGCAGAGAAGCATTTCCTTCTCCGGAGGTGTCTGATGCAATG
TGGAGATCTGAATGTTGGGTAAGGGCTTCTGTCTCTTCCTAGCATCCTCTTCCTTGCCCAGGGGAGAGAGGGGGCAATC
TGCTCTGGCTTGATGAACCTGCTCTGCACAGGACCAAGCTTTCAGGGGACTGATGTCATGTTGAGTAATGGGAGAACGT
GTGGAGACTGCCGCTAGTTCTGTGGATCCTCTGGCAGGCTGGGAAGGGGGATATGAGGTGACCATGATAGAGCATGTTG
TGTCCCCATGTCAGAACAAGTGTGTCTGGTTGTGAGTACTGATTATGGCGAGGATCCTGACCTGTGATCAGTGAGTGGG
GGGAGTGCTCACCTGTGGGTATGGATGTATAGACTCTGCAACACTGTCACCTGGAGAGGGACCTTTACTTAGGATCAGC
CAGAGGAGACAGTGTTGACAGTGAGTGGGGCCAGCAATCCACTCAGTGGAGGTAGGCAGGTGTCTGCACACACACACAC
ACACACACACACACACACACACACACACAGGGTCCTCAGGTCCTCTCCTCCATGTTTCTTGTACATCTCATTGGGGACC
TACTGAAGCTTTGTTCTCAGACCTCCTCTGTGGCTTCCAGCAAGTATGTTGCAGTTTTTCGGAAGGTCTCCTGGGAGCT
GCTGTTGATGAATGAGTGGTGGGTGGACACAGGCTGCCCTGGGCAGGGGTTTTCCTGAATGAAAGTTCTTTCCTGTCCC
ACCAGGGCGCTGACTCATGTCTGATGGGACTTGCTCCGCTCTTGCCTGGGTACTCCAGGGGCACAGCTTAACACTCTGT
TTCTCATGCCCAGAAAAAAAAAATTGACAGCCCTTTGTCTGTCTGCCAAATTAAACCCACAATAAAGACCAAAAGTCAA
AACTGAGTCCAAGGCTTCACTTCTCCATAGGGAGATGAGTTTGTTGGGAGCTCTGGGCTAGAAAATGACTGTGGGATTC
TGAAGAGACTGAAAGAACCGATCCACAAGAATTGATGACAAAGAAATTTGTCTTTGTCTCTAGAACTTTTAGGGGGAGG
CATGGCTACAGGAAAAGGAAACCACCTGCTTCTACCGTGAATTTACAACCTAATTTGACAACTTTGTATTTGTATGCAT
TTAATGCTAGCTTTTTGGTGTCTGGATAAGAGTGGGCCCCTCACTGACAGTCACTCCTTGCCTTATCCATGGTCTTTAG
TGTTCCTGGAGAGGATCGCTTCTTCCTCATGCTTACCCTGCCTCTGTGGTCATTTCCTTCGCGCCCTGCTGCTGTGTGC
TGGATGCTGAGAATGGCTAGGGCCCTGAGCCCCAGTGATTGAAATCACACTCTGGGCTCAGTTGCCTGAAGGAACAATG
GAGAGCTGTAGCTCAAGGGGCCGTCCTTGACACTAGCCTGCTGAGTTCATGAAGAAAGGAGCTGGAGGCTGGGGGGCAG
ATCAGGCGGTGAAGAGTTTGTCATGTTAAGCATGAGGAGCTGAGTTCAATCCCCAGAGTCCACACTAGAAAATAACAAG
GATTGAGGAATCTGGAGGGGGCAGGGACTCCACAGGAAGACCAACAGAGTCAACTAACCTGGACCCTTGGGGGCTCTCA
GAGACTGAACCACCAACCAACGAGCGTACCCAGGCTGGACTATCTCCATCCCCTGCATAGTTGTAGCAGCTGTGCAGTT
CCCCCAACAACTGGAGCAGGGACTTACCCTGACTCTGTTGCCTGCCTGTGGATCCTGTTCCCCTAATTGGGCTGCCTTG
TCTGGCCTCAGTGGGAGAGGATGTGCCTAGTCCTGCAGTGACTTGAGATGCCCGGGTGGGTTGGCACCCAGTGGAGGAC
TTCTTTCTCAAAGGTGAAAAGGAGGCGTGGGGGAAGGGGCCGTGTGAAGGTAGGACTGGGATGATGGGGGGCTGTGATC
AGGGTGTAAAGTGAGTAAATAAATAAATTTAAAAAAAAAAACAGTAACAAGGCCAGGCATGGGGCACATGCCTTTAATC
CCAGCACTCGGGAGGAAGAGGCAGGCGGATTTCTGAGTTCGAGGCCAGCCTGGTCTACAAAGAGTTCCAGGACAGCCAG
GGCTATACAGAGAAACCCTGTCTCGAAAAAAACAAAACCAAAACCAACCAACCAAACAAACAAAAAAACAAACAAAAAA
ACCCCAAAAAACAAAAAATAATAACAAAACCGAGTGTGGATGTGTGGGGTTCTTGTTATCCCAGCACTGAGTGGGAAAG
AGCGCAGACGGGAATCCAGAGGCTTGCTGGCCAATCAGCTCATCCTACTTCTCAACTCCAGGTCAGTGGAAGACTCCGT
CTCAAAGAAGAGGATGGCAGCTGTCTTAGTTAGGGTTTCGTTGCTGTGAAAAGATACCATGACCAAGGCAACTCTTATA
AGGGACATTTATCACCACAGCAACTGAGGTTGTTTTCTGGCCTCCAGACACAGACATGCATACGTATACACAGAGAGAG
AGAGACAGACAGACAGACAGAGAGGCTTGTACACAAATGTATACCACATGCACATACACACACGGGCGGTGGCAGGGAA
GAGGAAGAGGGAGAGAGGCACACATGCAAACACATGCACATCACGTGCATACTACATGTGCGCGTGCACACACACACAC
ACACACACACACAAGGAAGGAAGAGCCGTCAAAGAAGAAAGCATTTCTCACCATCATTTGTTGCCCCAGCAACTTCACG
CTTTCTATTACGGACACACTTCGGCACTGGGTTGTGGCCACTGTGCTGGGAAGCTTAGGCAGAGGGGAAGGCAGATGAG
AGTTTGAGTGTGGACAGCGCTGTAGGCTGTGGACTGGGCTCAGATTTTCATCCAAGATGGTGGGAACCCACAGGCTTGT
CACTGTCACAGCAGGCTCTGGTCTCCATTTTCAATCATGCTGCCACTTAAAAGTCCCTTCCCACAAAGCCCAAGGGCAA
ACTGACCCTAGCTCTTGGAACTCAGAAGAGTTTCTACCTTGGAGGTGAGGCAGGTGGCAACTGAAGGGACCCAGAGACC
TTTGGGGAAGCTGGTACTGATCTAGTTTTTATTATGGGTCCTTGAACTGTAGCCAGCTCGGGAATCTTTAAGCTGTACT
CTTACAACAGATGCATTTTCTGTGCGAATGTACTCCAGTAAGAGCTTTCTCAGAAGACTTCTCTGGCTGTTTAAAGAGT
AGATCAGAGCAAGGAAAGAGTAGGTATAGGAAATGAGAATAGGGATGTGTCTATGAGTCAGGGGATGTCACCAGCTGCT
GGTGTCAGGGACTGGAGGGGACCAACATAGATGAAAAATGTAACAAAATTTGAGATTTGGCTTGGAGGCACCGAGGGCA
AAACCTAGAATCCAGAAAACACTGTTGGAAGGCAGGAATGACGGGGCATGGACTTGATAGGAAATGGGTGGAAATAGGA
GAGGCACAGTTGAGAGGAAGTCAGCCTGGGGAGGGAGGGCTTCAGTTAAGCATCCATGCTCCCACAGGTGGGTAAACAA
GACACCAAAGGTTGGTACATGTGAAAGCACTGATATACATCCCGGGGACCATCAACATCTGGGGGATAGAGAAGACATC
TCTTATCAAGGTTTTACAATAGAAACAGACCTAGAGGAAGTGACATCATGTACTCCAGTGCCCATCCTTGTTGAATTAC
CTGGTACAGAGGTTCACATCTGTGATCCTGACTCTTGACACTTGGGAGGTAGGAGTTTGAGGCTAGCCTGGGCTATATA
GCTAGACCCTATCTCAGACAGAGAGAGTGACAGAGACAGAGACACAAGAGAGAGACGGGTAGGAGGTGGGATAGAAAGG
AGAGATGAGGTGGGGGAGTCCTATAGGACTTAGATACTTTTTGGAAAGCCTTATGTGATCGCCAGGTACTGTCAACTTC
AGCAAAAACAATCTCTGTAGCACCTCCTTCCTCTGAGCCCTCAGAAGAGTCAACATTGTCACACAATGGAAGAGTAGTA
TGACTTAGTGTCTGTTGGCTGTTGTCATTTGCCAACTACAATATGAGATGAGCTTGCAAGTTGCCCTGGGCCTTCGTCA
CCTTCTCCACAGGGTTATGTGAGATTATCTAGGTTTGCAAGCATTTACTGAACATGTACCATGCATTGGCTTACTGATG
TGACAGTGAGAGCATGCCTGGAAAAAAAAAAGCAATGGAAACAGATAATAGAGACAAAGATGATGTGACGGCCCCACAT
GCCCTCCCTCAGAGCTCCCTAGCGGTCATTGCCCACTGATAGGACCATAGGACCCCTCCTTGGAGGGACTCTTGTGAGA
CTGTCTTTGTATTATAGTTTGCACTTTCTCTATCTGAAAAACTGGCTTCCCTTTGCTTGAAGGCAGGAAGGGATGGGCT
TTATCTTCAAATCCTTCCAGGATGTGAGAAAAAATATTGACATCCCATCTTGTTACCAGAACAAAGACGAGGAAGGATA
TAAAATAGCAACGTTTCCATATTCACAGGGTCTAGATGTCCCTTCCCTGCCATAAATGCATTCAAGGCACGTTGGACAA
CGGCGGCTTCCTTTCAACCCAACAGGTGACTGCGAGCCAACTTCCCCCAGCACAGGATGGTGCTTGTTCTTCATTAAGG
AGTGTTTTCACTGTCTTAAAAGACAACAAAAGCTTTTCAGAATCTCTGGAGAAGAATTCAAGCATATATTGACATGAAC
ACTAGGGATAATTTTATTTCCAAGTGTCTATTTGCCCAGGAAAACGTTCTTCTAGTGAATATGATAAATCCATAGAGTC
TCACATGCGTGCATTTAACCTCCCCTCCCCCAGGCGATCTCTCAGCTTGCTCTTCCATGACACCTCGTCACCACCTCCT
TGCAGTGGTCTGCCTCACACACTCCTGGGGCTGAGCACCAAGCACAAAGCCCCACCCCCACACCGGGATGGGGGAACCA
GAGCATCTCGGAACATCCAGTGCTGGACGCCTTTTAGGGTTCCTAGTGTGGTTTGGGGTCCAGGATTCCCACTGCTTCT
CTCCTTTGTGCCCCAGATTTAAAATGAGGATGCAGCATGGAAAGCCACAGGCTTCCTGTCCACAGTGAAGTTCTACATT
TTCTTTTACTTCAAAGGACACCCCAGGACCCCATCTTATCAAAGATCCTTTTTAGTGAGATTATAATCCCAGATCCAGA
TTCCCAAATTGCCTTCTTCCTTCCCTATGAAGAGACAGGAGGTGTCTTATATCTTCCGTGCTCCTCTTTAGACTACTCT
GGTACTTTCTTTTTTCTCTTTTCTTTTTTCTTTTCTTTTCTTTTCTTTTCTTTTCTTTTCTTTTCTTTTCTTTCCTTGT
CTTGTCTTGCTTTTCTTTTGTCTTGTCTTTCTTTCTTTCTTTTACTTTCTTTCTTTTCCTTCTTCCTTCCTTCCTCCCT
CCCCCCCCCTCTTTCTTTCTTTCTTTCTTTCTTTCTTTCTTTCTTTCTTTCTTTCTTTCTTTCTTTCTCTCTTTCTTTC
TTTCTCTTCTAAGAACCATCAGGACACAGTGCTTTTCTAGTTCCTAACAATGCTAATGTTCCTGATGCTACCTTGGCTC
ATTTCTCCTCCAAAGGACATCAACTTTGAGCCCAGGCTGGCTATTTTGAATCTGAGTGTTATCTTGTGTAGACATTCTT
CCTGCATGGGAATATACTTGATTTCCTGAATGATTGTGTGACAGAGACACTCCCCACGGGGGCACTGGGCTATGCCCGG
CAGAAGGTACAGGAGGCTTAGGCAGGCTCCCTGGCTGTTCCAGGCCTTTCTCCCTAGGTCACATCTTTGTTTTACATCC
CACTGTCCCTTTGGAAAGACAGTAATAAGGATTCACCATCCATCTTCCAATTCTCTGGGCCCTCAGGGGGGTCTCAGAG
GCACCAACTCAGTCTCTCTCTCTCTCTCTCTCTCTCTCTCTCTCTCTCTGAAATGTCAGATGACTCTGGAAAACATCTT
TATCTGTGTTGAATAGGGTACCTTGAACCTAGGACCTCACCGTTCAGCACTTAACCCCTGGTCCACTGCCGGCCAGCAA
GGAGGATGAGCTGTGGGCAGGGAAGTTACGTGGGAAGGAGCACACACAGAGTCAGAATCACCATCAGGCCGAGTGCCTG
CAATCAGAGGCACACCTTGCTCTGCAAGACTCAGCTAGCGAGATAACAGTGTCATAACCCGAATGTGCTAGGGTTATGA
GGGAGGATCTGTTTGTACTTTGGGATTGACAGTTTAGTCCACTGCCCAACATATAATAAATGGTCTCTTAATGGTGTTC
TTGACACCACTGTGATTTGAAAAAAGCACACCCATACCACCACGCTGTCCTCCAATTTCAGTAGTGGTCAGTAAACTAT
ATGAGGTAGAGCCAACAGTTTGTTATGAAATAGGCTTTCTCTTAAATGATTCTGCTCCATGATAGGCTGATATAAATGT
CTTACCTGGCAAGTGGGAGAAACATAGACATGTAGAGCATTTTCTATTTATGAGAAGTTTATTAAATATGCTTCTTGGA
GCCCTTCTTTATTCATTGAGAAAGTAGGGGCACAAGGATGGGAATAGATTGGGTTTGTAATTCAAGACGGTAGACTAAA
CACATGCTCATTTCTCCTCAGCTCCAACATCCCCATTATGATGAAAACGGTGATTAAGGATGATTAAAAAAAAGGACCA
GAAACAGTTAAAAAGGGGGACACACTATGAATGGATGAAAGAACTCAATAATTTCTGTGGCATGGACAATGGTTAGTGG
ATGGGTCAGACTGGGAGTCACAGACTCTCAGGTCCCTTCAAGGGGTGTTCAGTGGTGGGAAACCTGAAGCCTGCTGCAA
CTCCAGAGGCAGCAGGGATAGAATCTGTGAGTATTATGAGGTAGAAAGCTGAATTCTTGGGGTGATAGTCAGCAGAGGA
CAGCCCTTTGCCCAGGGGAAAACCCAAGCGTCCCTTCATTGTGAACCAAGGGCACTATCACCAGGGGGTTTGGGGCACT
GGTTCCTGTGGCTTCCAGTTTGTTTGCCACAGAGTGGGGTGGTCTGATAATAATAAAAGACCGGCAGAACTGTGAACAG
CTGGGAGGAACAGGGAGAAGGACACATCTAGGTAGCCAAACCCCTATCCACGATGGTGCATGCTCTAAAACGGCAGAGC
AAGACGTCCTAGAACAAGCATAGCGGCTTGAGATGTGTGATCAGCAGAAAGCCTGTTCCGTGGACCTGCTAGAGCGGCT
AAAGCTGCTTGCCCATAGGTTTGCTACTCTGAGCCCTTCTGTGCTGCTTGAGGTTTTTTTGTTTTTGTTTTTGTTTTTT
AAATTTACACGTTGTTGTATAGATGATAAGATGAAGGGGGAAAACAAAACATGTGAAAAAAATGTAAACAGATTTTAAT
GTTCTGTGTGGAATCTGGTTGACAGAGGCCAGGAGTTCCTTTGGGCTAGAGCTGCGATTGGAAACCCATCTGGTCAAGA
ATTCCGTTCCTCTACACAGTAGTTAGTATTCCTGACAGCCTAGGCTGTCGTTAGCTCCAGCTTAGAGATGGAAGAGGAA
GAGAATGGTCTCTGAGCCCAGGGGTCTATGCTGTTGCTGTTGCTGTTAGGATAGCATCTTTCTCTAGGATCTGGGTCTC
CTCCACTAGGCTGTCTAGCCAGCAAGCTCCAGGAATCCTCCCACCTCTGCCATCGCAGTACTGAGGTTTCAAGTGCACA
CCACTACACCCAGTTCTTTGGGGGTTTTCCCACAGGTTCTGTGGTCTGATTGATTGCTATAAGAAACATCTCACAGACC
GAGATATCTCCCAAGTCCTCTCTGAGGTCAGAGAAACTAAAGCAGGCAGCAGAGGACTCAGAGCAGCCCGGGCATACCC
AGAAACACCCAACACTCATGTGGCATCAGAGGAATGTTTCTTTATGTCTGTGGCTTTTCCTTCTTCTCTCCTTCCCTCC
CTCCTTCCCTCCTTCCCTCCCTCCTTTGGGAAGGACTGCTTCTTCTAGACCACAGACAGCTGCCATCTAGAAACACCGG
AAGGCCATCAGCTGATGCCCTGTCAGGCCACTTAAAGCTTTTTATCATGCTAGCCAGCTCCAGTCTGAATTATCCCAGT
GAAATCACATCCTAGTGGCCATGAGGGCTCATGAAGGGAAAGTCCTCCCTCCCTGAGAGCTGTGTTCACAAAGTCAGAG
CTGGGTGAGAGCAGGAGCAGCCATTACCTGGGGGTCCGTGCGTCAGACCTGCCTGGCAGCTTCAGGGCCAGCCAGTGCT
TCTGTGGTCTAATGCCAGTTAGCTATAGCTCCAATGTCTAGACTAGGAAAAAGAACGAGTCAAGAACATGACAATGAAA
ACTGACCAAACAAAACTGTGTCCCAGGTGTCCTTGACCCTTCCCCATTTATCCTGAGTTCTCAGCAGTCCCTCACCCTG
AGTGCTTATGGTACAGTTAGTTGTCCTCCGCATGCCACTGAAACTTGCCTTGGGCCCCAGACCTCTCTCTATCATCATG
TGCATCCTCTCAGCCTTCCTTTGGTCTTTTTTAAAAAATATTTTTATTAGGTATTTTCCTCATTTACATTTCCAATGCT
ATCCCAAAAGTCCCCCATACCCTCCTCCCCTTCCTTTGGTCTTTAAAGGTCACTTCAATTTCTCTGCTTTTTTTCTCCT
TTACTCTCCCTGCCACGCCATCCTCATTTGTTAGGACTGAGGAATGGAGCTGTGAGCATGACCTGCACATTTGGATGTC
TGAGAGTCTCCCTCATATCCAACCCTGCAAGAAAGGTCCCCAAAAGGGAAGGCCTTTGCTAACTTCCTCTGTGAGATGT
ACCTGTAAGAGTCTGTCTCTCTGTCTCTGTCTCTGTCTCTGTCTCTGTCTCTGTCTCTGTCTCTCTCTCTCTCTCTCTC
TCTCTCTCTCTCCCTCCTTCCCTCCCTTTTTGGAATAGCATGCACACACAAATCTAAATATTTACACGGGTTTTGAACT
TTTCAGCATAGAGCCCTTGAGTAAACAAACACTCTCACAATGTTGTCAATGCTCATACTTTAAGACAACAACAAAACCA
GAAAACTTTGCGGAATGCCCTTCAAAGGGTCAGGATATTATTTTGAAAACCTTCATGCCTCTGACTCTGTCCTCAAGGG
AATTTTCCTTTAGTCAATTTTATTGAGGTCTACTTTGCTTATAATAAAATGCACACACTTTAAGTACAGACTCTACCTG
TATAAATATCACTGCTATAAAAATGTAGACGACATCAACCACATCAGAAAGTCCCTGTATTCATAGTTGCAAATTTTTA
ACTTTTGTGGTTTGGGTTTGGCATTCTCAGGAGCCATTCTGAGTGAGACAAGTAAGCCAGGGGGATAGCTGAACCGTGC
TTACAAATTATAGCCACGTCAAAGGGGAATTTTATACATGACAGAGACTGATCATTGCAATGAACCTGCAGTACCCTGG
CTTTTCTGACGGCTGAAGCCTCTAGATCCCAGGTTATTGTGACATTTTGAAAACACGATGCTCACCTGCTTCCTCTGAG
CCAGATATTGCTTCAAGCCCTGGGGGATAATTTGTTCTAAAACTCTCCAGTCATGTTTTCTCCTGTAAGTCTAGAGCCT
GTTGAGGAAATATCAATAAAGAAGAAATCTTGTGTGTTGTACAATCTATAGAAGCAAGAAGTGCCTGCGAACAGAATGA
GAATAGAGGGAGGAGATGGAAAGTGGCTGACCGTAGTAATCCTCGGACTGCGTCTTTACCTTTCCTTGTCTTTCTGTGA
AGCATTTTGGAGTGTTTTGTTGTTGTTGTTGTTGTTGTTGTTAAATGGAGTTGAGTGGAACACCTAGCTTCTTATAGGT
AAAGGGTGGGCCAGGTTCTGGGGACCTCAAGCAAGTAAAGAACTTGCCTCCCAAGCAGAAGGGCCAGAGTGCAATCTCC
AGCATCCATGTAAAAAACCATGTGTGGTGCTATGTGCTCGTAAGTCCAGTGCTGAGTTGTAGACACAGTGGATCCCTGG
AGTGGATCCCCATGGCCAGCAAGCCTTGCCTAGTCCGCCAGCTCCAGATCCCGGAGAGAGTCGCTGTCTCAAAAAAACA
AGGCAGATGGCTCCTGAGGGGTTGACTTCTGCTCTTCATGTGTTATGTGCATAGACACACACACACACACACACACACA
CACACACACATAGGGGGAATTGGCTTAAACAGAGCTGAGCAGGTCTTTAATGAAGTCTTTGACGTACTAACATAATTGC
AGCTTTTCCTGAGGGAAGGCTGTAGGACGCACCAATCTCCAGATATTTTTCTCCTGTAAATCCCACTGGATTTGGCGTG
TGTGGAGCAAGGAGTCATTTTTACAGCTCCCTGAATGTAGCACATGCAGCTTCCGCTTCTCATGGCACAGAGCTGAAAG
CCACAGAGAAGTTCATGACTAGGGGCAAGGAAGGGAATGAGGTTGGGCAGCTTGTGGGTCCAGCATGGGGCCAAGAATC
CCAAACACAGCCCTTGGGTAATCTTTTTGACTAGGGTGTTACAGCTCCTAGGTACTGTGGCTCAGAGTGACCCCATTGG
TAGCCAAAGATTCCATGCAGAGCCAGGATCCGAACCTAGGCCTGTTTTACTCCCAAACCCAAACCTGCCTACACCAGGA
TGGCTGTCCTAAGTGAAGTATAGAGAGGCTGTAACTCAGCAACATGCCCCCACTTCTCCACAGTTAATCTACATGTCCC
TTCAAGCCACATACTCTTCAGGGGGCATTTACCACTTTTTCCCCCCACTGGCAGGTGATCGTTTTTTCTTCTCCTGCTA
GTTATGAGTGAGTATTTGGTAAGTCAGAGCAGACAAGGACACGGTCTCCTGGTTCTGTCCTCATGAAATGGTATGCAGG
GCCAGATGCCTGTGACCCTGGGAGTGGCCCCTTGCAGCAAGCTCTGCCAACCTACCCCTCCATGGCTTCCTCTTTCCCC
TGCATTTTCTCCTGTTGTCATAGCCGCACATCCCACCTGTCTTTATCTGCTGCATCCCCTGGAGGATGGGGCTCAGACC
CGCATCAGTACCTCTGTCCCAGCATCCATGAGGTACCCAGTCTGGTCACAGCTGCAGTGGCTACTGCTGACGTGGGCAT
TGCCGCAAAGGGACATGGCAAAGAGATATAGCAGGGTCCTCACTGTAGCCCAGGGGTGAAGATGTGGAAATCCAGCACT
TACTGGAAATAGCAAAGGAGTATCTCTCAGGAAAGGCTCTGAGGCAGTTTGTCTCCCACCATCCCCGTCTTCCTCTCAG
GAGACAACAGAGGAAGTTGGTAGGAATTACTCACGTCTGCTAATTCATTACTAATTGAAAGGAAGGGAGATGGGTCTTC
TCTAAGCTCAACGCTCAGAAGCTAAAGTATACTAACTCTGACCTTGGGTCCCCTTTTCACGTCTGGCCTTGCCTCCTTG
GCTTCTGTATTTTATTCCATTTAGAGTTGCTGACCACTCAACTTCTGTGGGAGTCTTTGATCTGGTCCCTTTTCACATA
TCCTGCAAGACGTCCCTGGCATCACCAATACCATCAGCGACACCTTTATCCTATCTTCACTAAAATTCACTGGCTTAGT
TAGCATCACCTGTCAACTTGACATAGCCTAGAATCATCCTCCCCCAGCACCCAAAAAAGAATATTTGTTGAGTAATTGT
CTTTATGGAGTTGATCTGTGGGCATATCTGTGAGGGCTTATCTTGATTGTGAATTAATACAGAGAGCTCACCCCATCAT
GATGGCACCATTCCCCGGGAAGGTGACCCAGTGCTGTGTAAGGAAGCTAGCTCTATAAGAACAAGTCTGAGAAAGCCAG
AGAACAATGCTTCTAATGACTTCTGCTTCAAATCCCTGTTTGAATTTCTGCAATGGCCTCAGTTTCTCCATTTTGGAAA
ACAAACTGGGACAAAAACTCATCTTCAAAGCTGATTTCATCATAATATATTTAAAAATAGGGGTTAGAGAGATGGCTCA
GCGGTTAAGAGCACTGGCTGCTCTTCCAGAGGTCCTGAGTTCAATTCCCAACAACCACCATGATGACTCACAACCATCT
ATAATGGGATCTGATGCCCTCTTCTGGTGTGTCTGAAGATAGCTACAGTGTACTCATATACAAATTACATAACTTTAAA
AATATTAAAAATATTCCAGCCAATGAAAGGAAACACAGAAGACACTTTCTGGGAGGCAGGACTGAAGAGATTTCTCTGG
CCAGCAGGTTCTCTGCTGCTTCTGGTGAGGAGGGAGCTGGTTGGTGGGGCTCAGAGGCAGGCAGCAGTTTGGAGAGCTA
TCTATTTCTCTGAGTACGGTGGCCTTCTTGAATATAGAGGCCATGAGTACAGACGGACATGCAGTGAGATCTGGTCTCT
GTCAAAGAAGCCTCGAGTTGGCCTTGCCAAGGCTCTGTCCAAGCAGCTAGGTCATTCCACAGGCTGGAGGGAGGCCCCA
GCAGCAAGACCAGCTCAGTTTCGGAGGGAAATGACAATGAAGATGGAGACTTAGTTGCTCTTCTCAGACACCGGCCCTT
CAGTCCAGAGAATAACTTTAGCAGAGTATGAAACATAACAGCACCCTACCCTTCTCTGGAGGAGAAACACTACCCAAAG
GAAACCTTCCAAGCACAACTTAAGGATGTGGGTCTTGTGGCTTGGTGCCTGTTCATGCAGCAGCTGAGATCCCAGGGAG
ACACAGCCTGGAGCTGAGGACACCATCAAATTCTTCTTCCATATTGCAAGATGATATCTAACCCTGTCTAGTATGGAAC
TCACATTTGCTCAGTACACACAGGACAAGGCATGTGAGGCCAGCTGGGACACAGTGACAATTAACCTCTGGGCATTTCT
CCAAGGCCTTGAGCATTCATCCAGAGGGGAATATGACCAGTCAGAAATTTTCTTGGTAGGAGGTCAAGATAGCCCTGAT
AAAAGCCCAGTAAGACAGAATGAGGATATTCATTTAAGTAGATGGTAGGAGGACTCTGTCAAACCACCTTCCTAGAGAC
ATAAGAACTTCCTGGGCGGGCTGGAGAGATGGCTCAGTGGGTAAGAGCACCCGACTGCTCTTCCGAAAGTCCGGAGTTC
AAATCCCAGCAACCACATGGTGGCTCACAACCATCTGTAATGAGATCTGACTCTCTCTTCTGGAGCATCTGAAGATAGC
TACAGTGTACTTACATATAATAAATAAATAAATCTTTAAAAAAAAAAAGAACTTCCTGGGCCTTGGAGGATGGAGGTTA
TGAGTGAGGACATGCCAGGAGAAGTGGAGCATCCAAACTGAGGCCCAGATTGAGTAGTGAATGACCTTCAGCCCTCTCA
TGGCACAGCAGGAAGACCAACTAGCAGTTCATGAGAAAATCACGATACGGTTAGGGAGCAACTCAAGGTGGCAAAGGCC
CTTGACACTTGTCTAAGGGGGGGACCTTGCTTGGGGATGGCATTTCCCATGGTTTTAGTGGGCTCTTTGTGACAACAGT
TATAACTCATTAGGTAGAGTGCTTGCCCTGGTCTGCACAAAGCCTTACGTTCAACCCCCAGCACAGCACAGAAACAGAA
TGTGGTAGCACAGGCCTGGGAGCTCAGCACAGAGTAGAGGTAGAAGGGTCAGAAGTTCAAGGTCACCTTCAGCTTCAGA
GAGAGTTTCAACCCAACTTGGGAGACAAGAGACAGGGTCTCAAAAACCAAACCAAACCAACAACAAAACCTGGGAAATC
TGGGAGTGACTAGCACTTTCAGACCATTTGCCATGGGGTGGAATATGTGGTATCTGATAGAGTTTCACCCTCAGAACCA
TCCATGAAGTGTTTCCATGAAGAGACAGTGCCAACTGTCTCAGAGAGCCCTGGATGGAAGGCTGGGCAGGCACCCGGGA
CACTGGGCAGAGACCTCACAAGCCTGTCATCTGTCCCCCAGGTCTTCGTGCTTTGTCATGGCCTCCTACAGCTCTGCCA
GTTGCTCTACAGTGCCTACTTCAAGAGCAGCCTCACCACTATCGAGAAGCGCTTTGGGCTCTCCAGTTCTTCCTCCGGT
CTCATCTCCAGTTTGAATGAGGTGAGTGGGAGGCCCTTTATTTTAAAAGACTTTTAAAATCAGACTTGTGTATTGTATG
TGTGAATGTTTTGCCTGTATATATATATATATATATATATATATATATATATATATATATATGTATGTATGTGTGTATG
CATGGATGCATAGCAGACAGATGTTTACTGCCTGAGGAGATCAGGAGAAGGCATTGGATCTCCTGGAACTGGAGTTACA
GATGGCTGTGAACCACTACGTAGGTGTTGGGATATGAACCTGTGTCTACTGCTAGAGCAGCAAGTGCTATTAAATACTG
ACCATCTCTCCAGCCCTGAGTGGGACGCTCTTGCCAGGTTAGGTCATTGTATGCACTGACCTAATCTCTGAGAGGTACA
TAAGAGGGGCAGGGTTTACCTCCTAGTGCAGAAAACCACCCCTAAATTTTGGTCTTTGATTTACTATTGTCCTCATAGA
CAACGGACGGCAAGGAAACAAACCTTTGCCATTTATGTCACCAAAGCCTGGCCCTGGCCCTTGGATGTATCACAAGTCA
CCCACAGCTCTTGGTGAATCCAGACATGGCCTCTGGATTCTTCTCACACCATGTTCTAGGCTCCGTGACTAAACAAATG
AGATCTAGCATATAGGATAGACCCTCTCTTACAGCAGTCAAGAGGAACCAAAACTATGATTCCCACACCTAAACTTTTA
TCTGCATCATTAAATGCTGGGAATAAAGCTGTGGTCCAGGAACACATGGAGTTTGTAGGCTGCTGTTGCTGCTGGCGGT
GGTGAGTGTGTGTGTGTGTGTGTGTGTGTGTGTGTGTGTGTGTGTGTGTGTGTGGCCAGGGGTGTGTAAAGAGAGTCCA
GCCTGGTGCCAGGTTAAGTGAGGGCATCTGAGTGTGTGGTGAGTACAGACCTTCAGACTGAAGCTCCAATCTCAAAGCC
TTCCTGGCCCCAGGTGATATGAAAGGACACAGAATGCCTATGGTAGTTCAAAGGCAGGTGAGGGGCTAGAACAGAGAAG
CCATGGGTATCTTGGCCTTGGAAAGCAGCAGCTCCTATTATTCACTCTGACATGACATTGAAGGATGAACAGACATGGC
GGGTTGGATCCCTAGATCCCTAGATGTTAACCCCTAGTCTTTAGAGCCCTTTGGTTTTGAGACACAGAAGGGCAAAGTG
TGTTCATAATGGGCTTTATGTCAGATTGCAAATGTTTAACACCAGCGAGTCGGTGTTAAGCTGTTTTAGAGGCACTCCG
GGGGTGAGACCTCAAGTCCTCTCCTTGGCTAGAACAACTGCAGCTTTGAGGTCTAGCAACCCATGGCTTCTGCAGGTGA
GCGCAGGCCCACATGCCCCGACCTTTCTTCCTGATTTGTTTTGGACCCCTCCACCATCTGTCATGCACAGACCCTTTCG
AGTCAGCTGACAGCTGAAATGGTCCAACACTTTAGTCCACATACAAAAAAATAATAGAGATGCTAAAAGGAAAGAAATG
AAACCCAAGAAGCTCAAGAAGAAGCTTTTCCTCTCTCTGCAGAACCCGCTTCAGAATGTTCTAGAACCCTCAGGCTGGA
GGGCTCTCTGCTAAAGCCAGGCTGCCTCCGCATACACCTCACACACCCTCACAGCCTCCTGTGTGTGCCGCAGCCTCTG
TTTGTTGGTCATGCTCTTTGACACATGTCAATGAGCACCAACTTTGGGCCAGGCACTATCCTAGATGCTAGGGAGGCAG
AAAGGAACAGACAGACAGAAAGCTAAGACAAACATGTAGAAATAAATCTCTAGTAGGTAGATGGTAGGCTCCATGAGAA
GGTGGCATGGGAGAGGAAGAACATGCAGGGTCAAAGTGGTGGACACAAAGGGACATCCCTTGTAAGGAGCACCAGGAAC
AGTGTTCCTGATGTCCACACTGAGCAGGACTTGGAAGTGGTATGGTCCTTGTCCTTTGTTTTGAAGAATTTAGCATGGG
GATGGGGTGGGTTAGAGTTATTGAGGCAGAAGTCCATTCTTCCAGAAGATTGTTCTAGGACAGTGTAGACAACCCAAAA
TGGGCCTCCGTGGTTCCGGTTACCTCCTGACTTCATGGATGGAGCTATGACACTTACTGTTTGACTGTCAAGTTCTAGT
TTTCTTTCGGTTGCTCTGATAAAGACCATGAACCAAAAGGAACTTGGAAAAGAGAGTATTTATCTCGCTTACACTTCCA
TCCTAGGTCACCATCACAGGAAGCCAGGGCAGGGACTGAAGCGGGAGCAGAGGCAGAGATCACACAGGAAAGCTGGCTT
CCTCCTTCAGCTTGCTTAGATTGCTTTACAACCCAGGACCGCCTGACCAGGGACGGCATCACCCGCAGTAGGCCAGGCC
CTCCCACATTAATCATTAATCAAGGTAGATGTCCCACAGACTTGCCTACAGGCCAACTGATAGAGATATTTTCTTGATT
GAAGTTTCCTCTGCCCAGATGGCCCGAGTTCGTGTCAAGTTGACAAAAAAAATTAGCCAGCAGAAATTTGACATTGAGA
GTAGTAACATGGTGTCTGGGGCCATGCACATTGCTTGGTTGTTATTCTGACGTTCAGTCCAAAGTCCCTGAGTCCATTA
CTTTGGACCTCATTTAAGTTAGGAGTTTAATTTAAAAATATATGCTACACTAGCAGCCAGCCAGGACTGGAGCTTCCTT
GGACTTTTGCCCCAAAAGACTTTTCTAGAAGGGCTAGGGTAAAAGCTTAGTTGGTAAGGTGCTGATCATGCAACCACAA
GGGCCCAAGTTGTCCCATCCCTAGAACCTACATTTAAAAAACCAGGTGCAGTAGTGGCATGTGTCTATACTTCCAGAGT
TGGGGAGGTAGAGACAAGGGGATCCCTGGAGTCAACCAGCATAGACTATTTGCCTAGCCACTAAGAAACTGTCTGAGAG
AGAGAGAGAGAGAGAGAGAGAGCACAGAAGCACACCCACTTGCTAACACACACACCCTACACACACCCACTTGCTAACA
CACACACCCTACACACACACACACACACACACACACTTAGGTTTGTGTATAGACATCCAATATTTAGATTAGTTCTTTA
TGCTTTCAGATAATTTTTTGGGGTTGGTCTAAAAACCTGAGGTCGGGATGGGTTTCTGATGGCCAAGGGAAAGCCAATG
CCGTGAATCTACAATGTGAGCAAGACCATCTGGGCAAGGCTAGTGTGGCTTTGTCAGGGACTGCACTAAAGCCAGACGG
CCCCTTCACTGTCTGTTCTCCCTAGGTGAGCTATGGTAGGTCTCCTCTGGGCTGGAGGAGGGTGGGACCTGGCTCTCAC
TGCATCCCTTGTCCTCCTCTGCAGATCAGCAACGCTATCCTCATCATCTTCGTCAGCTACTTCGGCAGCCGGGTGAACC
GCCCACGGATGATCGGCATAGGGGGTCTCCTCCTGGCTGCAGGGGCCTTTGTCCTCACCCTCCCACACTTCCTGTCAGA
ACCCTATCAGTACGCGTCGACAACTGCTGGTGAGTGGCTCCGACTCCTGCCTGGAGGAACTGAGGCAGGGTGAGCACGG
TGCAGAGCAGATGGTGGTGCTCCTGGGGTTGGGGGTCTCCGCTCTGAGTCACCTTCTTCCCTCTCCCGCTAGAGACTGT
CCTTGACTTCAGTAGTTCATTTTCTCTGCAGACTACATCTGAAGTGCAGAACCTATTGAAGCATGCAGAAGCATGAAGT
AGCCCAGCTACCTGGTTGTTAAGGATGTGGTTGCTGGCCTTTCTCTGTGAGTCCTTGTGCTTTGTGCCCAAGGCAATCC
AAACTCCACCTGCCTAGAACCAGAACCCACGGAGGCTTAGAGAAAAAGAGGACCAGAGTGTGGGACATGATGAAGTTTG
GGGGGTAGGGGGGGTCCTGTTTGTTGTACTGTCAATTTCGTTTTAACTAGCATATCGCTTGTATGGTCCTTTTGTACGG
TCCACTCGCTGATGCCAGGATATTAGTGGAGTGTAGAAAAAAGTTATAATATGAGGTTTTATGTAACTTCTCCTGGAAA
AATATGAACAAATGTCTGTTCACGCCATATAAGACACTACAACAACCCAAATTCTACTCAACTGTAGTTGGTGAATCAA
TAAATTCATTCAGGTTAATCACAGGAATATAGGTAAGAGATGATAGAAATATGGGTAATTCAAAGGCAGCTACATCTCC
AAAAGGCATACCCATCATGGGTGAAGACTCACAAAAGCTGTATGTTTGGAGCCTCCTGGAAAGGTCTAGGTAACTCTAA
CGAGAGTCTCCTCTTCCCCAGCAACTGATTCCTGCTTTGTATGACCTAGGAGGAAGCTTTGTAAATCTTGTAATTTTCG
TGAACTTCTGAGCCATACAAGTTTCTATAGCTCCCTTCATCTTACGAGTTCCCTACTTCCTCTAACCTGAAGAGAAGGT
TTCAGTTGGGAAGAAATGGCTGCATCGTAGGTCTTGACAGTTGAAGGTACTCAGATACTATTTCATGTTCCAAGTATCT
AAGAAGAGAGAGAAGATGTGGGGGAGGTCTTATCTCCTGACCCTCAGATAGGGGGCTTTTTCTGTGACCCAAACTTCTG
CATTTTATTGGGGTGTCTTGTGGCAGAATGAAGTAGACTTTAGAATTTATGTGGTTAAACATGGTATTGATTAGTACTG
AAGTATCTATGAAAAGGTAACTTTTCTTTAGTCTTAATTTAAAATTATTTAATTAGCATATATTAATTATACATAATAG
GTTTCACTGGGACATTTCCGTACATGTACATGATGTACTTGATCATATTCACGTTCTTTCTCCCACCCTTATTAATCCT
GTTTCTTTTCTACTGTTTCGTGTGTGTGTGTGTGTGTGTGTGTGTGTGTGTGTGTGTGTGTGTGTATTTCATTAGGGTT
GATTAAAGGAGTGTAAGTGAGGGTTTGTTTATAAGAACATGGGCACCTTACCACAGGCTTTTCCACTGAAGAAAACGTT
GCTCTTTTCCCTACCAACCCATCAACTGATTGTAAATTGTTGTTGTTTTAAATTGTTTAGTTTGAACTTTATACAAATT
CTAGACAGCTCTTTGTTGATATAAGCTGTACAAATATTTCCTCCCCGTCTCTAACTCATCATGATATCCTTTTTAACAG
ACTATAAAGCCCTTCCAGAACAGAAAGAGGTTTTAATTTTGACAAAATTCAATTTTTCCTTATTTTTTTCCCTTCCATG
ACTCATTCTTTCAGTACTGCACTTAGGACCTCTGTCTGACCCCAAGAGAGAGATTTTTCTATGCACTTTCATGGGGTGT
CTCCATTTTTTACATTTGCATGTAGACTTACGATCTGAGTTAATCATTTAGTTATAAATGCTCAAGATTTCCCTCTTGT
GTATGAATGTCACTTTTCAGCCCAATTTATTACAAAAACTGTCTTTTCAGCATACCATAATTTTGTACCATTATAGCAG
ATAAATTGTCTTGGGCTAAGGCTGCAGGTCAGTGGTAGAAAGCTGACCCTGAGTTCCACCAACACAGAGAAGAAAGCTG
ACGGTGTCTGTGGGTTCATCTCTGGACTTCCCTTCCCACCCCATGGATCTGGGTGTCTCCTTTGCCAGTACTGCAGGCC
CCTCCCTCCCCTCCCCAGTGTTTTATTACATTTCATATATATATATATATATATATATATACTTTGAGATCTAGTTGTT
TATATTCAAAAGAAAACATTTTTTTCTGGAATTTTGATTGGGACTGCATTAAATCCATAATCAACTGGCACACCTGTTG
TGTGTAATCCTCTCATTGTTAAATAGTTTGGCTCACTGCTGCCCTGTGTTCACCACTGACTGATGACTGAACAGGCTCT
AAGCTGATGAATGCCTTTATCCTCCAGGAGAACATAGTCCCTGGATGCCTCAATGCCCACTGTCTATCACTGCTGCCCA
GTGCTGTGGATACTCCTAGCTTCCCCTCCCCACCCTACTCAGTGCTATTAATATTCACCCACAAGGCTAGAGGTTTCTG
TGTTCCTATTCTTCTGGGGAGGGAGACTTTAACATACTTTGTTGCTACAATGTTCCCCTATTCCTGAGCTAGATCTTTT
GTTGTTACTTTGATGAGTGATAAAATGTCAGAAAAGATCTTCCTTTCGCCCTTGCTCTCTAATTGGTTTAGCTGCAAAC
AGCCATGAAATGAGTAGTTATCCCTGCTCAGAACTTTAAGGAAAGTGCATCTTTGTCTTTTGGCGATTCTTAATGGACC
TTCTCCATCTGTCTCATTATCAGCTCTTTATTTCTAGGCCTCCTGGTTTTAGTCTCTCTAGTTGATCGTTTTCTTCTTT
GCTTTGCTATCATAACATGTTTGAATGTGGGCCAATCTGTATCTGTCTGGGAGTTCAGGTTTGTTGGGGGTTGGGAGTT
AGTTGTTGGGATGTATAACCAAGATTTTTATGTAATTCTAAAATATGTCAGTCAAAAATGCTTCTGGTTTTCTTCATCC
TTCACTCTGGAACTTTTATGTAGATATACACGGCAGTCACCCTCATCTTGTAACCTCACTTTCAGTGGGTTGTCCCTCT
GTACCATCTTTTTAGTGATTTCCTTGAAGTACGTCTCCCCATTCTGTGAGTCCCTCTCTAGCTTTGTAAATCAGAACCA
AGCCCTTCCATAATGTAAAATTTAAGAGCTGTCACTGTTTTGCTAATTTCTAGGAGATAGGATTTGCTTCCAAATTTTT
CAGCCCCAATTTTGTGATTTCTTAATGCTTTTTTACTGACATACATATACATAGGTATGTTTCTTTGATGTCTTCAAGT
ATTAAAATATATTTATGTATGTAGCCTTTTTTGATATTGTTCCAATAGCTCAAGCTTTAAGAATGTGGCCCTGTCCCCT
TCATTTTGTCTGCTTGCTCACGTTCCTTGTGGGTCCTCCCTTTGTATGTTCTATCATGTACCATGGAGCAAACTGTAAT
AAGTTATATGTGGACAGATTGGGAGTGGATCTGGTTTAATATCCGTTTGTGTACCGAGTGTGCACTATCTGCAGGGATC
TAGGGCTCTGACCCAGCTGGAGCAACCAAAGAGCCCCAAGAGTTGCAGTTCTCCGAGAGGGAGTCAAAGAAAGGCAGCT
CTTCCACTGCGGATGCTGCCCAGAGTTGGTGGCAGGGGCAGGATGCAGTGGGCAGCTAGGAGCCAAGGTTGGGGTGGGG
TTTGGGGGTCACAGGACAGGAGCCAAAGTAAGGCAGCTCTTCCACTGCGGATGCTGCCCAGAGTCGGTGGCAGGGGCAG
GATGCAGTGGGCAGCTAGGAGCCAAGGTCGGGGTGGGGTTTGGGGGTCACGGGACAGGAAGTGGCTGAGTTAGCCTTGA
GCAGCTTCCAGCGACAAAAGCTTCTAGAGAGAAAACTCTTCCCTAGAGTGTTACAGTTCCATAAGACAGGCACTCTCAG
ACGATTCGGTGAAATAACTCATGCCCTTTATTCCTTCTGGATAGGATCTTATAATACGGTTTTCGGGGGGGGGGTGGGA
ACTGACAGTGGGTGCTTCCTATTGTCTTGGTCTGAGATGTTAGGGATGCCTCATCTGCATGTGGAAGGACTTCAGGTGC
TGTCCCTGCATGACTGATTGTCACAGTCCTCTCCATGGGGTGTCGTGGAAACCCTGTTCCAGGACAGGAACCTGGCCGG
GAGTAGATTTAAACACCTACAGTTCTCAAGTATGATAATTGCCAGGGTTTCTGAATCCACTCCACCTTACCAGGTTTTC
TGCCAGGTGGCCCCACAGGGCAGCATCATGCTTTACATCCTCGTGTGGACTTAGTGCTTCAGGACCACCGCTGCTTTGG
AGGTACCTTTGTATCAACCTGTTAGCTCAGGATGATACTGCCCTTGTCTTGAGAGAAGTGGGGGGAGGTTATGGCTTGG
TGATGAGCGGCAGTGAGGGCCCCGCACTGCAAATGTTCATCCTTAGTTCGATGCAACAGAGCTGTGTGATGTTGGTTGA
GGATGGGTGAGCCACCCAGGAACGTGCTGAGCAAGTAACTGATTCCTGTTTGCTTGAACATCAGGCTCTTCTAAAAGTA
GATGTAAGGGCCAGAGATGGATCATTTAGAATGGCCGAGGGAGGAAATTCCTCTATGGGTTGTGAGGCCTGTGCTAGAG
ATGGGTAGTTGGTTTGAATGGGCGTGGGGAGGATTATAAGCAGGAGTGGGAGGGGTCTACAAATGAAGTGTCTACAAGG
TTCTGGTACTGTCCCTCCTTCCTCTGGAGCGTCCTAGTCATCTGCATAGGCGTGTCGCAGTCGCAGTCCTTGACTGTTT
AAAGGCTGAGCCTTGCTTCAGGAGAGACAAGGACGGAGACAGACCCAAACCTGTGGGTTCTTCCCTGTCCTTTCTCCCC
TCTATCTGGGGGGGAGGCATGGAAACCCAGCTCTGATGGAGAGTCAGGCCTTGACCTTTTTGATGCATGAAGACGGGGC
TAATGAGATCAGCAAGGGAGCCTGGAGCACTGGGGCCGAAGGGAGGGCACTTTGCCAGACACCACACACCAGGCTGGTC
GGCTCCCCGCGGCCTGGGCCCACAGCCCATGGCATTTGCTTTGCACAATGTAGCCACGGGAGGAAAATTAGCGATGGCC
TCACTCTGCTCCTTATTAGGGGTGGCTATTCAGATTGAGTGGGACTTTACCACAAAGCCCAGATCACTACCAGCCCAGT
CTTAACCCCGATGCTCCTGGCCCAAATCATCTGAGAGACTGTGGAAAGGGCTATTAGAAAGAGCACAGCTTGCCTGACA
GGACCACAGTGTGCACAGGCTAGGAGAAGGGGCTGGGCTGTTGTTGCTCCTGTCTGTGCATGTTCTGATTGCAACGAGG
GTAGCACTTGCTCTGACAGACACTCAAGCAACATCTGGAAGCGTTCAGGGGTAGACTGCCTTCGGGGTCCACCTTTCTA
GGGCCAGGCAATAAGAGGAGGAGGCCCGTGACCCAGGAGTCACTCTGTGTGCTTTGGCTGGGCTATGTACTAGGTGCCG
ATGCAGTGTGGAAGTATGGTGTTAATATGTTCAGATAAAAATAGTCATTAAGTCTCATTTTGTGGAAGGAATTATGATT
TGTGGCTCCACTTCCAATATACTCTTATGGGAACTTCAACTTTGAATTATGTGAGGTCATCAGAGTGGGAGCGACACCC
AAATGTGGGTGTGTCTGAACTGTCTTCTGGAGCCAGGCAGTCCTAGGGCTGAAACTAACCATTGAGACTCTCTAATGGG
AACTACAGCCTTGAGCCATTTCCTCCTTGCTTTGAGTCTTAGCAAGGTCTAAAGAGAAACACTTCCCCATCATAAGGCT
CAGGTGTAGCCCCTCAGAGTCCCCAGTGAGAACACACATTGTGTCCTCTGACAAGTGCTTTGCTGTGGGCTGGGTAGCG
TGGGAGGACCTGCAGGTGATCTCTAGTCTTCATGCCTGGTTCTCCAGCACACCCTCATTTGGGTGTATGGTCCCTCTGG
ATGAGAACTTGGCCTGCTGTTCTGACTAGTTCCCAGAGCACGCTGAATGAAGTTTCATCTGGAGCCTCTTAAAGTCACA
GTGTAGGAAAGGCTCGGTCCTCACTCCCATTGGTAGGCAGAGCATGGACTTTGACAGTCCAATCCCATCTCAGCTGCTC
TCTTGCCAACTCTTCTTAGGGGAGGCACTCCTCTTTTTTTCTGAACCTTACCTGTAATACAGGAGCAACAATACCTTCC
CACTCTGTGTTCCCGGAATAGAAATAGACATGAAGAGCGTGGCTCATGGTGGCTATTGGGGAAACCTACCTCTATTTGC
TTGCCTTGCCGTCGCATTTGAAATCTGTAGTCGATCAGTTTCCGCTCCACTCCTCTCTTCATGAGGATTTGCTGATTTC
TTCCCCCATGGAGCAAAGCGGCCCCAGCAACGACCATGGGAAATGAAGGGAAACTATGATCTTCAGAGGGGGAAGAAAA
CTGAAGGAAGGCTGAATGTTGTGGGAAATCACAAAGACCTTTACAACTAATTGCTAATTTAAAAAAGTCCATGCAGGCA
TTTATGGGTGTTTAGATTTTCTAAATGTCACTGGGGTCCGGAAATGTGCCTTGGCGCCTTTAGAGGCTAGCTACCCAGC
CAAAGCCTCCATCCAAGCCCATGTCTAGAAGATACAGGGAGGCTTTTGTGGATGGGAAACAAGCCAGCGTGAGACCGGT
TCCCATAGGAGAGAAGAGAGGGGACTTATGGGAATCAGTGTTTGGAAGGACTAGGTGTAACCTGGTGAAAGATTCAGTC
TAGTCCTTCCGGAAGTCAGCCTGGAAGACAATGGTTGCTGGGGCAGGAAGTCTCTTGAAGGCTAAGCAGGAAATGAAGG
GAAGCGTTGTATTTTGGAAGCAATCAAGAAAAGAAAAGGAAGAAGCCCTTCCTGGTCCTTGATGTCTGAGGCTGTTGGT
CCCTAGGCTGTGCTCTTCGTGATGTCCCCAGGAAGATGGGCAGAGGGAAAACACACAAAGCGGAGCCTTGGGACCCAGA
GTGACTTCAACCCTTCCTTCCTCGGCTCTCGGCCTCCAGAGCTCAATCCATCTCCTAAGCCTGGAAGGGGCCCAGGCCC
GGGGCTCAGACAGAGTCACTCTGGAACACGAGCTCGGGTCTGTGGTAAACACCCAGCTGTGGCATGAAATGGAGATGCT
AGAAGCTCCGGGAAATGAGGGGCAGGCTCATGGCGTGCAGGTGGCCCACGTGTGCCTGTGCAGGGTATGTGCAGGGCAG
AGCTTCTCTACGGGCCGATGTTGGGTGAGGTAGGGAAGTGGCTGGGCATGCAGAGGAGAGAAAGCTGGTGTGTGGGGGG
ATGGGTACTGGTGGCAGGAGTGTGTAGACGCAGGGGTGAAGGTAGGGCGGTAGGAGGGTTGTGAGGAGGTGGGAGTATC
TGGGAAGGAGGGTGAAGAGAACATACATAAGAAGAAGTGTGTGGGTAGGGATGTGGGGGACAAGCGTGCACGTGATGGG
ACTCGGGTGGGGTGGCAGTTGGCTGGAGAGCTGAGATAGGGTGTTACTAAAGAGTAAAGGGAGCATGCGTGTTGGGGTG
AGTGGGTGGGTAGTCAGTGGTTGCACAGCCTGGCTAATTGGAACTGTTTAATCTGGAAAAAAAGGAAGAAGACAAAAAA
ACAAACAAATACAAGAAAGGAAAATATCAAAAAAAAAAAAAAAAAACCACATACATGCTATTAACTCAACTAAAAGAAA
ATCAGTTCCGAACAGATGAGTAGACCAAAAGCAAATGTGATTTGACGTGGACCTTCTTAAAGTCATGGTATAGGAAAGG
AGAGGTGTAAACCTGAGGGATGATTGTAGGCACCCAGCTGCTGCACTGAGTGGCAGGGAAGGTCACAACTCTGAGGTTG
GTGGGGCAAGCTTCTCCACTGCAGTGGCATGAGAGACAGCCCCTCTCCAGGCACTAGCTCCTGTCCTAGGCTGTCCATG
CTCTGGGTCTTTGAGCATTGTAGTGGGTTTGGTCTGATGCTGCTTGTATTCTAATGCGGAATACTGGTTCCTCAAAACG
TGGTTGCCCTCCGCCCCACGAGCAGATCCTCATGTGTTCAAGGGATGCCATGTGAACCTTCTCCCCAGTTTCACTGGTC
AATAAAAGGCCTGTGATTGGGCAGGGAAGGGAGAAAGGTGAGACTGGAGGTTCAAGAGATAGGGTGGCAGGTAGAAGGG
GGAAGGAAGAGGAGGGATATAAGGGAGGAAGAAGCTGCCATGGATCAGAACCGTGTGGCCAAAAGGAACAGCAAGTAAC
AAGGGCCCTTATAGCTAGGAAATACGTTAGTATAGACCTGCCCAATCTAGGCATATGGCTTATAAATAGAATTTCTGGA
TTGTGTGTCTTTTATAAGGGCTTATTAGGATTGAAATTTTAACTACATAGCATCTGTGTTGTGGGCAAGTCAGGTGCAT
TGAAAGCATCCTCCTCGTCCTCCAGTAGGAGGCTAAATGTGGCTGGCTCCTCTCTACCTTCTGGGCCCTTGGGAACTAC
TTACTATGCAGCCATTTTTCTTGTTCAACAGTGAAGCCAGGTAGTGGGCCTGCTGCAAGTGTCTTTGGAGACAAGCTCC
TTCCTGCCCTCCATTGAGTCACTCTTCCTGGATGGTTGGTAGACTCTGTCTCAGTCCTACCTAGGACGGGGGAAGGTCT
CCCTAAGAGCTGTCATTCAAGGCAGAGAAGAAAGGCTTTGGGCATCCTAGGAAACAGTCACTATCCCACTGTAGGATGG
GGTTTGAAGAAACCGTTAGCCATCACTATAGGAGGTAGTGGACTCCTGAAGGCCCAGGGAGTCAGAAAGGCACCTTCTA
TTCCTCTTCCTGTACTTGGTGAGGCTATTGACTGCCCAGACACCTCCTGTGACTGAAATACTTGACATGGATGACCCAG
GCACACCTAGGCAGTGGGCACCTTTCTCCCACGACCATGCTTGCGCCGTCCATAATCAGAGAAAATGGAAGCTCGGGCA
TTGAAATAGGGAAAATAACACAACAGTCAACTGACCCACATCCCAGGAACTAGCTGTTAGCAAAGGCTTGTGGGTATTC
TGGAATGTTCCAGATATCCCCTTCCTGTCTTCTCCCTAGCCTGGGGTAGAAGAAGTGAGGAGAAGGCTGAGTAGGAAAA
CTCCCTCCTCCACCACACACCCATCCTTCAAGAGCCCTGGTTATGTCTGGGTTGTATTCCATATCTCCAGAAGCTTTGG
TTATAGAAAGCTTTAGTGGCTGAAGTGCTTGAAAACCATATCAGGCCATGGGCAGACATTTTTATTCAAGTACCAGGTA
GCAAATATTTCCAGCTTGCCAACCCCAGAGACTATGAACCTGTTTAGCACTGTCCCAGGAACACCAGCTTCCACAGGAG
TAGAGACCAAAGTGTCTAGGCGTGTGCTGTAAAACTCACGGGCACAAACAGGGCAGGGATCCATCCGATCCTAGCCTCA
TTAGTAGTTTCCCAAGCCCTGTGCTACATGGTTCTCCTGGCCTAGGCTTACCCTATCCCTTAGAGCTGAAACCAAGGCT
ATGAATCCACCAGGCTGCCTTGATGTGCCCAGTCACTCTCTTTCTTAGATATGGTACTATCTCCCATGGGTTCTAGTCC
CTCCTAGAATCATCCAGAAAAAGTCTGTTAGTCCCAGCTACAGGAATAGCCACCCCATAGCTGGGCTGAGCCTGCTCTT
CCACTGCGGGCTCTTCACTGGACCTCAGATAATAAGGTTGCAGGGCTTCGGGGTCTCCTCAGGAAAAAGACAGAAGTTT
CCGCTCTGGATCCGAGGATCCTAAAGCAGGGCTTAAGATGTGGATGTGTGATCAAAATAGCCAGAAACTCAACCCTGAG
GATGGTTTTGTTGTTGTTTGGTTTGGTTTGAGACAGGGTTTCTCTGTGTAGCCCTGGCTGTCTTGGAACTTGCTCTGTA
GATGGGACTGGCCTTGAACTCAGAGATCTACCTACCTCTCTCTGCCTCCCGAATGCCAGGCCTTGCCTTGCCTATTTAC
TGTCTAGCTGAAGCCAAGCCTTGTATTTGATCCCTGTAAGAGTCACTCTCCTTGGTTGGAACCCTGCTTTTTTTCCCTT
GGGTTTAATTTTTTTTTTTTTTACTTTTCGGCCTTCGGGATGTTTTATCGGCCATTCTCCTGACTCTGTTGTTCTTAGG
CCTGCCAGCCATGTCCCCAGGACAGAGCATGAAGAGTGACAGACACATAGCCCTTCTACCTCAGGTATACAGTAAGCTG
GTACCCCTGAAGATGCTCCAGATATGGGTCCCCATCTTACCTAGCAGATATAGTGACAGACTTTGTCAACAGGCTGCCT
CCAGTCAAGTCATGCCACAGCTTCTGCTGGCTAAAGAGCCTCACTAACAAAGAAAATGTGTGTGGGGGAGGAGGCATGG
ATGACTTTTGATGAACTGATGTTGGCTCTGCTAACTACTCTGGGTTTTCTTCAAAGAGCTCCCCGGCAGCCTGGGGAAT
AAATCTGTGAGCAATAACTTCTATTTCACAACAATGAAAGGTGCTAGTGAAGTGCCTATCTCCTTAAATATTAAAGTCG
GTGCTGCTAGCTGTCATCATTTTTCTCCCAACCACTAAAGAAATGAGTCTGATGCTCAGGGTGCCTGTGCACTGGCAAA
GGCTATAAGGAACTAGGAGAGGGGAGTCTCAGGCCAGCCATATGGCTTGGGATTTTAAGTCTTGCATACAGCAAGCCTG
CTCCCTTAGGCCCAGTACAAGTAGTATTATTTTAGAACCCTCCTATGACAAGGGAGGCAGTGTGGGAAGAGAGTTTCAG
TCTCAGTGCACACATACATGTGTGCACATACACAGACGTGCCCAACACTAGCACACTCCTTTCCTGTACATGTACGAAC
TTTTCCAAGAACACACTTTTGCCCTGTGAGTTCTTTGTTGTAATCTGCTATTGCTGGAAACCGCCCTCAGTCTTGCCTG
TCACTACTGGAGCCTGTCCCTGAGGAACATGGCCTTATCCATTTGAGTTTCTCCAAGTGATTCATCATTTTGAATGAAA
GTAGTTTTATTGGAGGAACTTTGGGTCCTCGATTATGATATACTAATTATTTCTTATAAAATAATGCTTTATAAAACAA
AGTTTTATGAATAAGGAGAGCACAAAGTTGTGAAGGAGTGGGAAGGTGGGGATGGACGTGGGAAGAGCTGGGGGGATGG
GAGGAGAGTGACTATAATAAAAAATACATTGTATAAAGTTCCCATAGGATCGTAAAATAGTATATTAACTGTTTTTCAT
TGCAATGACACATAGTGATCACATAAGCATAGCATGTGACATTTCAACCTATGTACACATGTGTGCTGATCTGATTGGA
ATGGCTGACATACCTTCTATCATGCTAGCCACTTACCATTTCTTTATGTTGGGAACATCATCCCTGCTTCAGCCCTGTC
TCATGCCTGCCTGAGTCCATGGGTCACATCTCAGGAAAGTTGACTTCTTGACACAAAATCTCCTATATTGCAAAACCAC
AGAGAGATCCAGAAGTCAGGACTGGAATTTTGCAGATATAAAACTCAGCGTGAGTCAGGAGGTTGACTCGTGTGCTGCC
AGGGTGGGGCTGAGTAACCTCAGGAGGGGTGAAGCCAGCCTGTTCCTAGTTAGCACTGCCCAGTCCTGTAAAGACTAAT
GGAACCGGACCCCTTGTGTCCTACTGGGGTTAAAGAATGTGCTTTGATGAACTTGTGCCTTCCAGGAGTCTGCCTTGGA
GGAGATAGGAAATAGACTAAGCTCCTGTTAATAAAAAAAGTTTCTTTTCCTCCTAAGGAGCCCTGCAGTATAGAGGCAG
GCAGCCTTGGGTGAGCAAATGGATTTCAGAGAAGTTCTGTAGTGGCTGCAAAGGGTGCCACTTATCTGTCTTATTTCAG
GACTTTTATTATTTTTAAAACGTTGTGTGCGGGGGGGGGGGGGGGGGAAGGGGACTGGAGATATAGAGATGCACACCTT
TGATCCCAGCACTCCGGAGACGGATCTCTGTGAGTCTGAGGTCAGCCTGGTCCACAGAGTGAGTTCTAGGACAGCCAGA
GCTACAGAGTGAGTCCCTATCTCAAACAAACAAACAAATACACCAACAAAAATGTAGGACTGGAGAGATGGCTCAGTGA
TTAAGAGGACTTACTCTTGCAAGGATCCAGGTTTGGTTCCCAAAGCCCACATGGTGGCTCATAACCATCCATAACTCCA
GTTTCAGGGAAGTCAATGTCGTCTTCTGATCCCTGAGGATACCGCGTGCACATACATGCAGGCAGAACACTCATACATA
TGAGATAAATAAATCTATAAAAAAATTTAATTTGTATGTGAGGTAACGTGTATGAATGTGTTTGGATGTATGTTCATAT
GTGCACATATGTCCATGCACACATTTATGTGGAGGCTAGAAGTCAATGTTAGATGATTCTCAGTCATTCTTAGCTGTAT
TTCTTTGAGACAGCATCTCCCACTGAACCTGGCGCTCGCCTGTTTATCTAGGCTGTAGGCCGTGAGCGCCAGGAATTGG
CCCTATCTCTGCCTCCCCAGTGCTGGGATTACAGGTGCACGCTGCCACGCCGGAGCTTCTCTCTGTGTGCTGAGGAGGA
TCTGAAGTCAGGTCCCCATGTTTGCTCGGCCATCACTTCACTAAGTGAGCCATGTCCCCAGCCACAGTGAGCAGCCGGG
AAAGCGCTCAGACTTGAGAAATGAGATACTTGTTGATCCCTTACACGGGCTCAAGCTCTTGGAAAAAGCTAAGAACTTT
GCCCCTAGGGAAGAAATGGGAGACTGCAGCCCAGAAAGCCAATCTGTCCTTCTGTCTGTTGAGAACCTGCCTGCAAGGA
TGGTCCCCTCCAAGGCCTGTTCTTCCCATCTTCCTGCCTCTGCAGTCACATATCTATGATGCCCACCTCATTCATGCTG
ATTATTTTTGAAAAGAGCTTAACGGTCTTTAAAAAAAAAAAAAAACTAAGACCCTATTTTCACCCAGGGTGTGGTGACC
TAGACACCCACTAAAGGGGGTCCATGCCTTGTTCCTAAGCTCCTGCATAAGGCTCCAACTGCTGTCAACCGCCCTGGAG
GGCAGGGAGCAGCAGACCTCCTCAGAACATCGTGCCCACTGCTCTTCTCTGTTCCTCGGTGCTCCAGGGTCAGTGCTCA
CCACCTCCAAGGTAGCCGACTGCTGTTCCTCTGAGATGGCACCCATAGGGAAAGAAGCCCTGCCCTAAGGGCTTTGTTT
AACTACTTTTGCTCATACATGTGTGTGTGCATGTACATGTATGCATTCATACATGCATGTGGGGGGGTGGGGGGGAATA
CATCCGGAGGCCAGAGGTCATCCTGGGTGTTGTTGCTCGCTCAGGAGGGTCATCCACCATATTTTTCGAGACATATTCT
CTCACTGGGACTTGGGCTGGCCAATGAGTCTAGGCTGGGTGGCCACATGCCATGTGATCCTCACCTTTCCAACACTGGC
GTTACAAGCGTGTGCCCTCATGCTGGGCTTTTTATATTGGTTCCAAAGATCATATTCAGATGTCATGCTTATGAGGGCA
AGCACTTTATGAACTCAGCCATCTTCTCAGCTCCAACTACTGTCCCTTTGCACCAGTGTCACAGCTGGATCTGAAGTAG
GATTGGGCCCCCATTCAGGACTGGCATCGGGAAGGGCATGTTCTGCAGGGAGATCTTGAATCAATGTGGGAAACAGAAT
AAAGCCATGGAGAATTTGGAGACTTGGATGTAGTTGGGCCAACTGATTTTTTTATGCATATTTCGAGTAAGATGTATTT
CTGACCTGCATATTGACACTTTTAAACTTAATAGTAGTGAAACGATCCCCAGAGACTTTGGTGGCTGAACACTTCGCTG
GATGAAACTTCAGGAGGATTTCTGTGGCTTTGGCATACCACGCAATATGGCACATGAAGACTTAATAAGGCAGTCAATG
TTTTTACGATCTTTGATGACCATTAAATCTCTCTCTCTCTCTCTCTCTCTCTCTCTCTCTCTCTCTCTCTCTCTCTCTC
TCTCACACACACACACACACACACACACACACACACACACAGAGCCTTTGACAGCCAAAGCAGTAACGATGGTTCTCAT
GAATGTCTGTTTCTGTCAAATAATGAGGACGGATGAAATCTGGAATTAGAGTAAACTTAGAACAAACTCTATTCTCTGG
GACTTTTATTTCCCCGGAGAGTCCCTCAAGTCGTCATCCCCTGCCCCCTGCTCCAGTTCACTCCATTCTCCCACCACAG
TCCTACCTATTCATACTCATACGACCATGGAGCCCCCGCAAGCCCTGACCCTGAGCACACAGCGACAGCCTCACCTCTT
AGAGCTCTAGGCAGTTCTGGCTGAGGATCTTCCTGCCCTTGAACTAGGGCCTTAGTCTACCCAGAAGCTGTATTACAGT
GCCCTGTCAGGGTCCTCACCTGTCTTGGGGTGTCCTTGGGGTACTTCCTAAGGCAATCTACCCACCTGCAGTAGCTAGA
TTGCATACCCCCCTCCCAAACTTCCCTGTGAACTGTGTCCCTCACTTGTGAGTGCTGCGACACCCTGGCTTCCCATTGT
GCCCTCTTCTTGGTTCAGAGGCCCCTGGTCTCCAGAGAACTTTTTCCAACACCTCTCCATCCCCCTGCCATGCCAACTC
TGAGTTTCCCATTTAACCTTTACTCTCTGTCCTTTGTGTGCTTGGCACTATTTTTTTTTTCCAGTTACGGTGAAATGTG
TAACGTGAAGTTTGCCCTTCTACCACTGTAAGATGCGTGCTGGTGGGGCTAAGTCAAAGCCACCCGCCTCCAGGACATT
CTTATGTGAATCGATCCTATGCAATGTCTTCATTCGTTTCTCCCTTAGCCCTTGACAAACTCCCTGTCTTTATGATTTC
AGCCATTTTAGAAGCCTCCCATTAAGGGAGTCAGGCAGGACTTGGCATTTTGTTTGGCTTCTTTCACTTAGCACAGTGT
CCCCAAGGCTCATATATGTTACCATACAGCAGAATTTGCTTCCTCTTTAAATTGAAAAAAGATCCTATTGTATGTACCA
TGTTTGACTTAATTACCAGGTTGTTTCTATTTCTTGGTTTTCACCAACAATGGTGCCATAAATATGGGAACATTAAGAT
CTCTTCAGGGCTGAAGAGATTGCTCAATGGTCAAGAGCACTGACTGCTCTGCCAGAGGTCCTGAGTTCACGTCCCAGAA
ACTACACAGTGGCTCACAACCATCTGTAATGGGATCCGATGCCCTCTTCTGCTGTGTCTGAAGACAGCTACAGTGTACT
TATACACATAAAATAAATAAATCTTTTTTTAAAGCGGGGAGGTGGATCTAAAAGAGGAAGAAAAAGAAAAATCCAGCAA
GGGCAGTGGCCGTGCACACCTTTGATCCCAGTAGTTGGGAGGCAGAGGCAGGCAGAGGCAGGAGGATCTCTGTGAGTCA
GGACAGCCAGGGCTATACAAAGAAACCGTCTTGAAAAACAAAAGCCTCTTCAAGCCTCAGCTTCATCTCGATTATTACG
GGACTCATTGCAGAGTGGCTGCAGCCTTTCCAACGCTTCGACAGCAGTGCCCAGGGGTCTCTCCGTCTCAGGATCCTCA
CCAACACTCGCTGTTTTCCGGCTTTTTGATGCTTGCCATCCTGTGGGACATTACATGCTATCTCATCGCTTCCTGTTTC
TGTTGGCAAAGCAATACTGTAGTTGCTTTTTTCTTTTTTTTAAATAACCCAGGGGCCCTTGTGGGTTGGAGACTAGGTA
AGGGCCATGCCTTTGTCCCTCTGTCACCTGCATGAGGAAAAGGCCTTCTCTCACAGTCACTAGCCAGATGGCTGGGAGA
CTAAAGAGGATTTGAATCTTGGTGTGACTGTTTTTCAAGAGGCAGGCTTCACCCACACTGCTAGTCAGAGGATGGTGTC
TCAGATAGAGGCACATGCCTTCCGTGACCAAGCAGGCACAGGGACAACTCTTTCTTGGCATTATCATTTGATTTCAGAT
GGCCTTTAAAATATTCTTGAATAGATAATGCACACCACAGGACACTCACTAAAGGCGACCAAGGCCCCTGTCTCCGTTA
AAGTCATCTGCATTCTGTGCCACCAATGAGCCTTGGCTAGTGGTTGTAGTAACAGTTTGGTTTGTTGAGAGGGGTACAT
GTTATGTGGACCAGGCTGTCCTCTAACTGGTAATCCTTCTGCCTCAGCTCCTTGAGGGCTGAGATCCCTAGTGAGCCCG
CCATGCATGGCTTCCCAGAGTACTTGATAGTATCACACCTGGCCTTCGTCCCTCTGTTTTATCTGAGTCTCTCAGTGGC
CATTAAAGGAGCCCTTTTGCTGGAAGTTTGCACATGGGTCTAGTCTAGACCCTGGCATTGAGAACAGGAAGTGATGGGA
TTCGGCCATAGGAGGCCTGTGTGGACGGGGAATGGGGCATCAGGGAAGGCGGAGCCCCTGCTCCTGCCCTACCAACTAT
TCCATGGCCCCAACCTTTTCTCTCCAGGGGGCTCAGGGGCCCTCTCACTCAGGGCCACATCTCTAGGAAGATCCTAAGT
AGGAATTAAACTGATTCCATTCGTGTTAATGAAAACCCCACAGAGGACGGCTGGTGACGTCAGAGGCTTCCATTGGCCA
GAATGAAGCAGGAATAAAAGGAATCTGGAAAAGATTCCCTCAAACCCCTCTAGGCCTTGGAAAGCTGACAACGCTGATT
GTTTGGTGTGGGGCAAATTGAAAACAGAGGCACAGAAGCAGCTGCCAAGCCTGGCAAAGCCTACAGCCGCAGGAACCAC
AGTGTCCAAAGGCCATACTGGGATGACTGGAGCCCTCCCAGAAGGGCCTCCAGGGGCAGCCTCGCTCCCCAATCTGTAA
TATGACAGGGTCTCCAAATCCCCTTGTTTTCAGAGTCTGCCGTTCTTCTCTTGGTCCCGGCCAAAAGGCCCAAGAAGCA
TTAAGAGTCTATGATTCTGGGGGGCTGCCCAGGTGTGGTCAGGTCCCTAAATACCTTTGGCAGCCAGTCCTTCGCCATG
GTGTGGTGCTGGGAGCATTCAGAAGTGAAGGATCAGGGGTCAGGATGCAGGGAAGGCCAGAGCCAAGCCCAGCGGTGAC
ATAGTCCTTTGCTGAGGAGAACTCTGGGTTTAGCCTGTGGATCTCCTCTTCCAGATGGGTGGCGCTTTCCTCCAGGACT
GAAATACGGATCCACTATGCTCAACCCTCTGCCAGCACCAGAACAGAGGGAGAAATGGTTGTGCCTTCTCCTTCCTGGG
CAGAGCTGCTCCTGGTGCAAGAACCGCCATCCTCCTTGCTCTCGCCTCAGTCTCTGTAGCAAGCAAGTCTTCGGCCAGG
CAATCAGAGGACTACTCCTCTAGGACCATGTCCCATTTTCCTAACCCTGGCCCTCTTTCCCTTCCTCTGGGATATGGAA
GAAAGGCTAGAACAAGAGCGGGATAGAAGGACAGATGGTGGAGGCGGGCAGCCAGGCTGATGGTGACTACTGGGCATGC
TCATTGCAGGAAACAGCAGCCACTTTCAGACCGACCTCTGTCAGAAGCATTTGCCAGGCCTGCTCCCCAGTAAGTGCCA
CAGCACCGTGCCCGATACCCAGAAGGAGACCAGCAGCATGTGGAGCCTGATGGTGGTCGCTCAGCTGCTGGCCGGCGTT
GGGACGGTGCCCATTCAGCCATTTGGGATCTCCTATGTGGACGACTTTGCAGAGCCTACCAACTCGCCTCTGTATATCT
GTGAGTCTTAAGCTTCAGCCGGGCTGCGAGGGGTGGGGATCAGGACCTGGTGCAGCACCTGCTAAAGCTCTTGGGGATG
AAGTGGGGTCTGATTCACTTGGCCCACAACATGGTGGATGACAAAGACCCATTGTTAATGCCAGTTCTGCTTCCTTCCA
CTTGGCTGGACCTCAAGTGGCTAACCCAAGTCCCCAGGCTTTTACTTAGAGGACGGCACTAAGATTTTTTGTGTGAGCC
TTGTGTTTTGAGGTTAGGTGAGCTGATGTAGATCACCATTTAGCCCTGTTTTGAGCCTTTGACATCACAGCATGATATT
GGATTCTATCAAGTTCACACTAGAAAACCATGCAATTGAGGTTTTTTTAAAAAATGCAACAACAACAACAACAACAACA
GCATAATGCTTTAAGTTTAAATTTGGTATTGGACCACGTTCACAACTGTCCTGGAGACCATGTGGCCTATGGGCCAGGT
GTTAGACACTCTGTAGATCCTCAACAAATTATAGGCTCTTCTAGGTGATATACCAATACTCCGAGTTGTGGACAGGTTA
GCATGCATGAAGAAGGTAGCAGATGGCCAACTGGTACCTAATCCCTTCCCTTAGAGAGAAAGCCACATCGAGCTTTCTC
AGGGTCACAGCCTGTACCTTTGACTCCACGTGCACCCGTCAGAGCCACCAGCACCGTGCACACACAACACTGTAACTAT
AACACAGAATCCGCGTGATGCTGTACCCATCCTGGATTTAAACTAATGGAGAGTAAATAAATAAAAGTAGATTTGTGCT
CTTGTAAAAAAAAAAAAAAAAAAAGATACCATTGAGGAAAGTTCATTCCAGGCCAGCAGATCTCTCTGGCAGGTGCTGG
AGGAGCCGCAGGCTTGGTTCTGCAAGCCTTGGCATCCGGCCCTTCCTTATCTGCAGGAGCTGTAATAGGCTTGGGCTTC
AGGAGGAGTTACAGGCATGGGCTTGTTGGTCCCAGGGGACAGCGAGTGGCACCTTAGGAATCTCCTTCAGTTTGGGAGA
CTAGGGATGCTGAACTCCCCCCAATGCCCCTCACTCGGCTTTTTATCCCTTGCTTTAATTTCCAGCCATCTTATTTGCT
ATCGCCGTGTTTGGGCCGGCTTTCGGGTACCTGCTGGGCTCAGTCATGCTGAGGATCTTCGTGGACTACGGCAGAGTGG
ACACGGGTGCGTATGCAGAGGACACTCATTCTTACCTATCACCCCTTTACTGATGCTTCTGGTTTAGCTCCTCCCTTGT
GGCTGCCCATAGAGAGCAGCGATGGAGCTCTCAGCCCATGTGGGGCCCTGCCCTGAGGTGCCTGTCACTGAGTGACTGG
ACACTATTTTGCTACTTTCTTCCTCCTTCTGTGTCCATGTCTGATGTCAAGGAACACAGAGGGGGCTGGAGTGCAGTGG
GACAGATTTTCAGGGGATCATTGCTGTTTGTAGAACAGGCAACCCACTTTGTTGATGGCGATGTCCTCCGGCTCCTAAG
AATTATGGGACCTCCTTTCTTAGGGCTCCTCAAAAGTAAAGTGTAGCTGGGCGTGGCAGCGCTCGCCTTTAATCCCAGC
ACTCGGGAAGCAGAGGCAGGCAGATTTTTGAGTTCGAGGCCAGCTTGGTCTACAAAGTGAGTTCCAGGACAGCTAGGGC
TCTCCAGAGAAACCTGTCTCAAACAAACAAAACAACCAAACAACAACAGTAAAGTGTTCTCAAGCTTAGTGGTTACGAG
TGCAGGTGAGGATGGCAGGCACACAGGTTTGGAATTGACTAATGGACAAGAGATTTGGTCTCCTGATCAGTTAGAGGAA
GTCAGATGTGTGTAAGTCTTCCGTTACTGGGATGCTAGAAGAGCCTGTAGAATGGTGGCGGCAAAGTGTGTAGTAGTGT
ATGAACCATGTCAGCCCTCTGGAGACCAGATCATTTCACCAATTATTCCTGCCAAGAGCTAGAGAGGAAGCACAGCAGT
GGGAGGGTTAGCATTTGCCTTCTGTGCAGAGGCTGGGGTGCTCTGGGAAGACCAGAAAGGCCTGGAGAGGGAGAGCTGT
CCCACCACTGTGGGAAGAAAGTCAGTAAAACACCCCCCTGAACCAGAGTTCCCTTTCGAGTCAGGTCAGAGAGATCGGG
CATTCAGCCAACAGACACTTCTATCCCTCGGTTTCTTCTCAGCTACAGTGAACCTGAGCCCAGGTGACCCTCGGTGGAT
CGGAGCCTGGTGGCTGGGCCTGCTCATCTCCTCAGGCTTCTTGATCGTCACCTCTTTGCCCTTTTTCTTCTTTCCCCGA
GCGATGTCCAGAGGAGCAGAGGTAAGTGTCCCAGGGCCCAGGACTCCATGGATGTAGCCACGTAAGCAATGGACACGGG
CTTGGAAAAGAAACAGCTGGGAAGCTGCAGTGGCCTTGGCAAACTGGGGGAAATGAAAAGAGGTCTTAGGACTTAGGGT
TCATCAGAGGCTGAGAAGAGGTACCCCTCAGCACCTTCTTATCAGGCTGTCATCTCGAAGACCGGAGGGTTGCAAAGGA
ACATAGTTTGGAAATCCCTGAGTTCATCTAAGCTGGGCTAAAGAGTTAAGAAGCAATTCACAGTGCTCAATGGGATGTA
GAGACAGCGAGACAACTCAATCCTTAGAAAGCCGGCCATGCAAACGTGAGGCCCTGAGCTTAAGCCACACACCGCCTCT
TTTTTTTAAAAAAAAAAAAAAGCCAAGCGTGGTGGTATATAATTGCAATCCCAGAGCTGGGGGGGGGGGGGGTCAGATA
AATGGAAGTATTCCCTAAGGCTTGATAGCCAGACAGCCTAGGTGGGGAGTTCCAGGCTACTTAAAGACCTCTTTAAAAA
TCAATATGGGGGCTGGAGAGATGGCTCAGCGGTTAAGAGCACTGACTGCTCTTCCAGAGGTCCTGAGTTCAACCACAGC
AACCACATGGTGGCTCACAACCATCTGTAATGGGATCTGATGCCCTCTTCTGGTGCGTCTGAAGACAGCTATAACTATA
TATTCTTTAAAAAAAAAAAATCAAGATGTGTGGTGCCAGAAGGATGACACCCAAGGAGGTTGGCCCATGACCTCCACGT
GGACGCACACATGCATGTACACATGTGGACACACACACACACACAAAAGCTGAGCAGGTAGTGAGGCACAGTTAACTTG
GACATTTAGTGGAGTTTACTAAGGTTTGAGCCTGAATGCCTGGTGAGAAGGGGGCGTCCACTCAAGGTGTAAGTGAGGG
TGTGGGGCAAGGATGGGCTGAGAAGGAGCGTGTCTGGGACAGGGTTGTATCTGCTAGGGAAAGGAACCTGAAAGATGAG
ACTAGGAAGCAGCAGAGAGGAGGTTGAGCGGAGCCTTTATGTTACACTAAAGGGTCTCACGTTTTCTCCTGTGGTTTCT
GGGCACTGCAGTGACTGTGTGGTCCCATAGTGACAATATGGCAGTTGGCTGAGATTGGGGCTCATGAAAGAATGAAGAT
TGGAGACCTAAGAGGCTCAAGAGAAAGAAGGAAAACACAGTTGAGGGTCAGGGCAGTGGCCATCAGAGAGATGGGACAA
AGTCCTGCCTGGAGCGGTAGTGCACAGACTTGGCTGTGGATAGGCGTTGGAGCTGCTGTTTTGTGTCTATGACTTAAGA
CAGAAAGGGCCCCACTGTGGGAAATGGAGCTGTGAGCAGAGGTCCAAAGCTTATCCCGGGGAAGCATTTAAGAGGTTAT
GGGTGTATTTTGATAGGCTAAGAGTTGGACAGCTCTGAGCTTGAAGACTGTTCCACTCGTAAACTTGTTGAATGATGCT
AGGCAAGTTGCTTTGTTTTTAAGCTTCCTTTCTTGTAAAGTTCTTGGGAGTAATTAAAGAATCTGTCTGGGAAGGAAGT
TGTGAGGGAAGAGGCGATGGATGGAGAGTAATGGGCATGTTGCCCAGAGCAGGAGGGCTCAGTTAATGGGAGCATCAAA
AAATGCTTATGGTAAAGCCCTGGCCTCTGTCTATGCAGTGGCTTGGAGAGAGCCGAGGGCTCTGACTGGAGCTGCTAGC
TTCAGAGACTGGCGAGGGCACTGAGGTAATGTCCCCAGAATGATTAGAACAGAACCTAGGGTAGGGGTTTCTTCTGGAC
TGAGTAGAAAGCAGGGTCCCAGAGAGGACACAGAAAGGGGGAGCTGAGAACTGCAGACATCGTAGATCCCTGTGTCCTA
GAAGCTAGCCATCTCCAGGATCTGCATATGGGACACAGTGTAGTCATAACGCAGACAAGGGTAGGGTCCAGGATGATGC
TTTGGGCATCAGTCATGGGAAAGTCAGATGAAATAATATGCCCATAGGTATAGTGGGAGGCATTGGCACAGATTCACCC
TGGCCTCCAGCCAAGGCACCAGGCTCCTGAAAAACACAGGTGGTATCTGCTTCAAGGGAGCATCCTGCAGATGCCCTCC
CCCACACACGTGTGGTCCTCACGCCGCTGAGTCAAGGGGCTCAAGGATGGGCCATTAACATCACCATGTTTGCTACCTT
CAGAGGTCTGTTATCGCAGAGGAGACCATGAAGATGGAGGAAGACAAGTCAAGAGGCTCCCTGATGGATTTCATTAAAC
GTAACTGAGCGCCCCAGCAGCCTCGGGTGGGCTGGTTCTGGGAGGCAGCAAGCCAGGTACAGGGTAAAGGGCAACAAGA
GACAATAAGTAAGGCCCGTGACTGCCTCACCTCCCTTCAGTTCGGAGGGATCCTGCCAAGGACCCTGGTGACCGGTTCT
TTACAGGAACCAGTAAATCCCACTTCAGGCAGAGCCAGTCACCCCCTCTCAAGTCTCCCCTTCTGCTCTCTCTCTCTCT
GTCTTCCTATAGTGGTGGAAGTTGTGGGAGGAGACCTTCCCCAGGGTGAGCAGTGTTTCTATTTACCCACCACCAGCAT
CCTCTTAGTCAGACCACAAGCGTGGTGAGCAGGAATCCAAGGACCCTGGGCTGACTTCTGGGAGTCTGGGTGTCTCTGA
TTCTGCCCCGAGGAAGAGAGGAAGCTGTCCTTGTGGATGAGTCAGGGTGACGGCAAGGCTCTAGGAAGCCTGTGATGCT
CTTGCCAAGGCCTGCCTCCTGACAGCTGTTTGCCCGCAGGGTTCCCCCGCATCTTCCTGAGGCTGCTGATGAACCCACT
CTTCATGCTGGTGGTCCTGAGCCAGTGCACCTTCTCCTCAGTCATTGCTGGCCTCTCCACGTTCCTCAACAAGTTCCTG
GAGAAGCAGTACGATGCCTCGGCAGCCTATGCCAACTTACTCATTGGTGTGTCAGAGGGCACTGCAGGGCCTGGGTGGT
GCCCTAGGGAGGAACTGGGTACTGTACAGTCCATCCAGAGATAACTGAGAGCCAGACCGGATGCAGGCAGGAGACAGGA
GGGCTTGCCGGAGAGAAAGAATTTTAAGAGCATTTTTCCTGGTTGGCGATCTAGAGTGATTTTGGCAGGATTCTGAGAC
TCCTATTCTATTTAGGAGTGGGTGAAGACTAGGGGCTGCTTTCCTTCCCATCAAGAGGGTAGGAATCTGATATCCTCCC
AACTGACCTTATCAGGGGTAACAGAGGAGAGAGGGAACATGGAGCTTGAGATATACATAACACCTCTTAGGAGTTGCCT
TCTCCAGGAACTTGAGTCTTGGCCCTGTGACACGTCAGCCTCCTTTACACGATGGCAGTGCAGATGCTTAGCCCCCACC
CACCCAGACTAATGAACCCAGATTCTGTGGCAGGGGTGCTCGTACTTCTTGCAGTAGATGCTAAGAACCACTAATGGGG
GTTCTACCAAGTGCCTAAATGAATAACTGGGCCCCATCTATAGGTGAATTTGACCAAAGATTTGACAAGATAATCAGGG
CATGAGATCTGGGGTGACTTCCCTGTTTGCGCTGAAGTCCTGTGTAGCCTTTAGGGATGCTATCATTTCTCCAGCCTTC
AGTGTCGGATCAGGGCATCGCCACCCAAGAACGATCTACTTCCTTATTGTTGTCATTGTCTTCTTGTTTTCAATTTGTT
TCTTCGAAACAAGTCCTAGAATAGCCCAGGCTGACTCTGAACTTGCTAGGTAGCTGAGGATCACCTGGAATTCCTGATC
CCCCTGTCTCCACTTCCCAAGCGCTGGGTTATAGGTGTCAGAAGTTGACTGCCTCTTTGCTTTTTGATCAGGCTAGCCA
ACCCTCTACTAAAGTAAATTCTCGGGATGTACCCAGCAATCACCCAACAGTTAGTGATATTCGGTAGTCACCCATCGTT
TCTTTACGAAGCTGTGCTCCTTCCCTGTGGTTCAGCTCAAGGCTCCCAGGCTGTGCATCCAGCCCCTCTCCTTCTCACC
TAGGTGCTGTGAACCTTCCAGCTGCGGCCTTGGGGATGCTGTTTGGAGGAATCCTCATGAAGCGTTTTGTTTTCCCTCT
GCAAACCATCCCCCGAGTAGCTGCCACCATCATGACCATCTCCATAATCCTATGTGCCCCTCTCTTCTTTATGGGATGT
TCCACACCCGCCGTGGCTGAGGTCTACCCTCCCAGGTAATGGACAGCCGGAATCCAGCCACTGTATGTCTCTCTTCTCT
GCCTTTTACCTCCTCCGTCCTGCTCATTTGATCTGATGTCTCACATGGTGACACAGGAAGCCAGGTCTCAAATAGTGTG
TTCTATTATGAGATGAGATTAGCCAGCCAGTGGGGTTGGGCTTAGGGTTTGGTTTTGTAAGAAGCCACAGAAGCTAGCC
GGCTTAGTGTCTGGATGAGCCTAAGCCATAGAAGCCAGGAAATAAGCAATGGTTAATGCCAGCTCTGAACCAGCTAGAG
CTAGAGTCTCACTGAGATGTCGAAGAAAGAGGAGAAGAGACTTGAAAAGGTTTAGAGATGAACAATTAAAATGGCGACA
CACTGTAAAAAACAAGGGCTGCAGAGGCAGGGGCAGGTCAAAGGACCAGTCTGCTTGCTTAAAGCAGCGTGAGACGTAA
GCGTAGGGCAAGCTTTATCTTCAGAAAGAGTGTTACAACCCCATGAGCAAGGAACATGCCACTCCCCACCTCCTCCCCC
CTCCCCCACAAACCCACCCCAGGTAACCACCTTGAAACGTTTTCTTTTTTTGAAAGGAAAACATATTTTCTTTATTTAT
ATTTCAAATGTTATCCCCTTTCCTAGTTTCACCCCCTCCTGGAAACCCCTATCCCGTCCCCCCTCCCCTTGTTTCTGTG
AGGGTGTTCATAAGGGAAATTGGTCTGAAGTTCTCTTTCTTTGTTTGGTCTTCATGTGGTTTAGGTATAAGAGTAATTG
TGGCTTCACAGAATGAATTGGGTAGTGTTCTTTCTGTTTCTATTTTGTGGAATAGTTTGAAGAGTATTGGTCTTGGGTC
TTCTTTGACAGTCTGATAGCATTCTCCACTAAATCTATCTGGTCCTGGGCTATTTTGGTTGGGAGACTATTAATGACTG
CTATTTCTTTAGGGGTTATGGGACTGTTTAGATGGTTTATCTGATCCTGTTTTAACTTTGGCACCTAGAAAATTGTCCA
TTTCATCCAGATTTTCCAATTTTGTTGAATATAAGCTTTTGTAGTAGGATCTGATGATTTTTTTGATTTCCATGTCTCC
TTTTTCATTTCTGATTTTATTAATTTGGATACTGTCTCTGTGCCCTGTGGTTAGTCTGGTTAAGGGTTTATCTATCTTG
TTGATTTTTCTCAAAGAACCAGCTCCTGGTGTTGTTGATTCTTTGAATAGTTCTTTTTGTTTCCATTTGGTTGATTTCA
GCCCTGAGTTTGATTATTTCCTGCCGTCTACTCCTCTTGGGTGTATTTGCTTCTTTTTGTTCTAGAGCTTTCAGGTGTG
CTGTCCCCGCTGTCGTTGAAACTTTTTCTTGAGGACTTTGCCCAAAACATTTGCAAGATTTGGAGACTCAGAACCTTTT
AACCCCAGCATAGTCTCTTTCTCGTGGAGAGCAACATCTCCAAATACACCAACAGCATCAGGCAAAAACATAGTGTGAT
ATGACCTCCTCTGTAGCTGACAGATGACAGAGGAAAGCAGAACAAAAGAGGGGAACATTGCCTCGAGTGAGGGAGTGAG
AAACTCACCACCGTTCTGCAGGCTGACTGGGGACCCAGAGAAGCTGGGGACCCAGAGAAACCTGAAAGCTTGGGGTCCT
TGAGGTGGTTTTCAGTGGGAGTTTGGTCCCACCTCTGTCACCTGCCTGGCCTGAGTTCTAGATATGACACTCTTTGTTG
CTATGAGGAAGTTATCCGTAAACAAAAAGGCCCTTCCATTGTGATGTCCCATAAATGCCAACATCCACTGCTACTGTTT
ATCAATGCACTACTCAGCCATCAGAACTTCCCCAAAGAAGATCAGTAAGAACAGCCATCGAAATCCACTTCGATGAAGT
TCTGGCCCAGGATAGGAAGGCGAATGGACAGACCCAGATCAGTGAATCCATTTGTTTCAGGAGATGAACAGTCTATAAA
AACCTCAGTGGCCTCCAAAGGTCTCAGCCAGCACCTAGCTGGGCCATAAGAGAAGGCAAATGTTTCTAATGACTTCACT
GTAGCGTAGACCACTTCCTTCAACAGAGCTTCAGGCTGTCAGTCATTTTAACTCTGACAGTGGCATGGGTGTTTTCTGG
CTAGACCTTTACAACTGAGTAATGGGTGGGTTTGGGTTCCCAGGGTCAGGAGAATGGAGAGGGCCATGATGTCCAAACC
ATGGCAGACTCACAGCCGGCTCCCACCGGCTCCGTTCAGATTCTGGGACAGCACTGGCCTAAGACAAACGGGGGTATGC
AGGCACATCAGCCAGGCCAGGACCTCGTGCTGGGCTGGAGTGTGGTGCTGTTTCTTGGTCTTGCTTTGTTTGATTCTCT
TCTCTTCCTGTCTCGCCTGGCAGCACACCAAGTTCTATACATCCGCAGCCTCCCGCCTGCCGCAGGGACTGCCTGTGCC
CAGATTCCGTCTTCCACCCTGTCTGCGGAGACAATGGAGTCGAGTACCTCTCCCCCTGCCATGCTGGCTGCAGCAGCCT
CAACGTGAGCTCAGCAGCTTCTAAGCAACCAGTAAGGACAACGACGAAGGGGGTCACAGGGGTCGACAGAACCACATGG
AGCTTTGGGGCTCAGTGTGTCACCTCAAAAACCGTTCCTTGGCCGTCAGTATCAGCGTCTTAGCCCCCTCCACCATCTC
TCATCCTTCTCTGCCCCGGGGTCATGACCAGATGCCCACAGCCCAAAGTCAGTTAAAGATTGGCTGGAGACCAACGAGT
TCATTCTTGGGAACTTGGCAAAACAACAGAAACAAGTCCGAGCAGTCGCTCTCAGCGGAAACTTGTGACTGATACTAAT
GGCTCCCTGTGGCAGGGGGGAACTTCTGGGTTCTGGGTTCTGGGTTCAGGCCATATTACAGAGTCACATGGCCTGAGAG
CAGAGGGTCCCCTGTGACTTGGACCTTAGAGGCCAGTGCTGGGAGCAGCAGTCGTTTCAAGCCCTCCTCTCCCAGGAGT
GCCACAGAGTTGGCCTGAAGCCATGAAATTAAGTTCAAATCTAGGATTAGAAACAAAATCTCTCTTCACCTGGTCTTCA
AGGCCATGTGTCTCCTTCTTAGACCTAGACCTATGGGGACTTGTCTGACAATATGTGAGGACAGTGACCCCAGGCCTTC
TGGGATCAGGAAACAGCAAATGCCTCCTCCAGGTTTGTCTCTTAGTCAGAAATCCATGTGTGCAGCCACCATGTCAACC
AAAAGCCCTGGTCTCACAGTTTACATCCAGTCCGATAAATGCACACGATAAATGCTGAGGGACTTCCTGAGGTGACTTA
CCCTTGAGCAAAGACCAGAAGAATCCTATGGAAACCTGGAAGCCCATTGCACTCGAGGGAAGCACAGGTGCCAGTGCAC
CAGAGAAGCTGAGGAAAGGCCTGGTCGGCGCTAAGCGACAAGTGTCACAGCTATCGGGACAAGGGATCAACAGGTCCAG
AGCTGGGCAGGGCCAGGCAAGCCAGACTTAGGAGGGAGATTATTTCCCCTCTTAACTCCCTCTGATGAGAACAATGGAA
CGTCTATGTCATTACTATAGGATGCCCCCATAGGAAGAATGCACCTGTGTGTCGGCCATGTGTGTTGGCCATGGGCCAG
GCTAGCCCCCACTTACCACCTCTTGCGAGGTCACAGAAAAAAGCTTCCCCTGTCTGTCACTATGGGCAAAGGCCCTTGG
CTCTCAGGTAGAGAAGGGTGAGGAGCTAAGACAAGATGGCCCCTTAGTTTGCCTCTTAACTGGAAGAGTGGTGGCTTCT
GTGGTTTTCTTATCTTTATTTACTCTCCGCTGACTCATCTACTTCCAGAAATAATCTTGACAAGCTTCCAATAACAGCA
CAAGTACATCAAGACAAAATCCATTACCATGATAGCAAGGGAAAAAATAATAAATTATAAGGGGGATAAAGTCTTAGTA
TTTTAAGATCCAGATTGCGGGAGGTTACGGCAATATCGTGTGTTAGGAACTTCTGAGCTTGAGGGCCACAGTCCCACTG
ACTGACAGAGGGAGGCCTCCTCTAGCTCATTAGTTGGCTCAGCCCCATAACAGCTCTGACACCAACGTCATCATAGGCT
GGGCCATCAGCCACTGCAAGGAGGGAAGGCAAAGATGACCAGATGAACGGTGGCCGCCAAATGAGTCGAACAGCAGTGT
TGAGCCACATAGAATTATGATGAGGCAGGGTCCTCCTCTGGGGGCTCTTCTTAGGTCAAAGTACACCTCTTCAGTGGGG
AGTGCTACAGAGCATTCAAGAGACTCTGTTATTGTTTCCTCTACTCCCGGAACATACCTTCTCCCATAACAACTTGCGC
AACCACTAGAGCGGGCTGGACCGGGAGGAGAGCTCCCAGGTTCCAGGCGCTGAGCTGATGAGGGTGCTTTGCCTGGTGA
TGGGATCTTGGGCATTCAGATGTTGGAAGACTGCAGGAGTTCATCCCATGCTGGACTCTTGGTGAAGACCATTTCTTTC
TTTTTTTTATTTTAAAGATTTGTTTATTTATTTTATGCATGTGAGTGCACTGTCACTCTCTTCAGACACACCAGAAGAG
GGCATCAGGTCTCATTACAGATGGTTGTGAGCCACCATATGGTTGCTGGGAATTGAACTCAGAACCTCTGGAAGAGCAG
TCAGTGCTCTTAACCGCCGAGCCATCTCTCCAGACCGTGAAGACCATTTCTAATGTCCCCAAAGTGAAAGAGCCAGGAC
CCCATGGGGCACTCTAAAACCCTCATCTGACCTCTTCAGTCTTTGAATCCTAGCTTTTCCTCCATCCCTGGAGGGCTGA
AGGGAGGGCAGAGGGATTCGTTCATATTAGAGGGAGGCAGTGTGGATATGTGAAACATACAGAGGTTAAATCATGACGT
GGCCCCTCCTGTTCTTCAAGATCTATTTGAACTGTAGCTGTGTGACTGGAGGATCCGCATCGGCCAAGACAGGCTCCTG
CCCTACATCCTGTGCACAGCTGCTGCTCCCGTCCATCTTCCTCATCTCCTTTGTGGCACTCATTGCCTGCGTCTCCCAC
AACCCCCTCTACATGATGGTCCTACGGTGAGTGAAATCTCTGAGCCTCTGGCTGCTGCTTCCACACCCTCTCTTTGACA
GTACATCCTGTCTCCTACTCAGAGTCTCTCCTCCCTTAACTGGGGAGTCTTAACAGCAACCTACAAGTGTCTAATGGTG
AGAAGACAATAGGTACACTGATGGCAGGAGTTCCCTGTCCCAGGAGGAGCTCCTGGTAGGGAAGCCTGGCCCAGGCTCC
TAGTATCCATGAAACATAGGCCCTGTTGGCACCCCCATCTTTATTTGTGGGAAGTTAAATCATAGCCCGGGATGGTGGA
ACTGTCGAAAGGTTGAGCCGCAGGTTCAAGACAGGCTGTGGGTAAAGATTCACTTGTTCTTCAATATTAAAAGAGGAGA
AATCAGCAAGTCAGAAACTGAGGAAAGTTCCAGAAGCAAAGCGAACACTGTGAGAAAGGGCTGAAAACGTGAAATTTGC
AGGAGACTGGGGACTCAGTGCTCAGAGTGGAGGGACAAGGGACCAGGAACCAGGGTGGGGTCAAGAGAAGTGTCTGGTT
TTTAATAGAGAGCGTTCCCTCTTCTCATTCTACCAAGAAGGAAAATGTAAGAAAAGAAAAAGAAAAAAGAAAAGAAATC
TCACCCAAGTTCATCTAACCACCTCCTGCCTGCCTCTCTGACCTCCCATCCAGCCCCATCAGCTTACTTGGAAAGCAGA
GAAGGAGAAACACAAAGGTTGAAAACTCCCTATCAGATTAAAAGTCTCTACTTGAGTGTCTTGGGTGTTGCCTGACCTC
ATGACTCCCAGTTTCCTTGACTATGAAAGGAAGATAGTGATACCCACCTCCAAGTGTGAGTGTGAGCAATTACAAGGTC
AATCGCTTCGTAAACAGAAGCTCCTCTGCTGGGCGTGGTGGTGTCATCTATAAATCTAGTGCTTGGAAGTAGGAGAACC
AAGAGTTCAAGGTCTTCTTTGCCTAGATAGTAAGTTACAAGCCAGCCTAAGCAATATGAGACCCTACCTTACAAGGTTC
TCAATGTTTGAGTAACAATCCCTTTGGGGGTTGACTGACTCTTTCACAGGGGTTGCCTACTACGACCATCAGAAAACAC
AGAATTTACATTACAATTCATAACATTAGCAAAATTAAAATTAGGAAGTAACAACGAAATAATTTAGTGGTTGGGAGGC
TCACCACAGCATAAGGAACTGTATTAAAGGGTCGCAACCTTAGGAAGGTTGAAGACCACTGCCCTACCTCAGAAAAGAC
ATGGGGGCTGGTGTTCTCCATATTGATTAGGACCTATCTCTCCAGAAGGCTAAGCAATGAGGAAGGACCAGCTGCCATG
TCAATAATGTAGCTTAGTAACAGAGCACTTGGTTAGCACATGTATTTTACTCTATCCAAGTCTAGTCTCTTTCCATTCA
TCCCAGAACCTCAAACTACTAAATAGTACCATGAACATTCAGGATTACGTCCTCCCAACTTAGTCAAATCCCTCAGGAT
ACATCTTCATGGATACACCAAGAGATTTGTTTCCCAGGTCATTCCAGATCCATACGTTAGCAATGAAGATTGGCCATCG
AAGTCATCCATTATGGATCGGGCCATTGGAGACAAGCTGATACAGAGGGAAAGAACATCCATTCAACTGGAATTCCAGG
CACTGTCCACTGGGAGATCCCACATGGTCCCTCTTTCTCCTACTTGAACTCCAAAGAGCCTCCCTTCACTGGGTCATCC
CCCTGGGGATGTCTCTCAGATGCCGACTAACTTTGGCAATGGTTGTAAGATAATATGGAATGATCTGGAGGCCACTTTT
GAGTTCTTTTCCACTCTGTCCTCGGCTCCAAATTCTTTTCCAAATGATAATCACCCAGCCAGGAGTATGTGGTGTGAAA
ACGTGGAGAAGCCAGAGTCTGGTCACACAGCAGGCGCTTCTACCACTGCTCTGAGCTCCTCAACCCTGTGTGTCAGATG
CCAACCCCCTTTTCACTCTCCAGTTGAGGTGGCAGCTCTCTAGGGAGAGCTGAACCTCTTTACCTGGCTTTGCCATCCC
CCTCTTGAAGGAGAAAAGGTAGAAAGCAGGACCACGCACAGAATCCACAGGACCCAATGCAAATGAAACTGTAAAGACT
TTGGCTTGTGAATCATTTAAGAACTCCAAGACATACGTAAACCAAAGCTGGGCCTTTCTGACGGCAGCATCCTATGCAG
CTATTCAAGTCACACCTTACAAAGCTGGCCCAGGGCAAGGAAATGTTTCAGATCTGCACAGAAGCTGATAGCCCAGGGC
CCTCTTTTCCTGGTACAAGATATTCTGTGGGTGTTGTTCAGACCTGCTGTCTAAGCATCCAGCCAGAAATTCCTTTCTA
CTTGGTCTCTCTTGCCTGCTTTCTTTCCAAGAAGTCTCTGGACAGTCCTGAAAACAATACAGACTATTGGTTCTCAAAC
CCAAGTTTACATCCAACTCTCCTGGAATATCCACGTTTTTGATAGATGCCAGGCGGAGAATCTGTATTTTGAACGTAGC
CTGGGCGGTGCCTCTGATCCAGCAACAGTGCTTTGAGAACGATGGGTATAACAGGCATTCAGCAGATAATGCGCATCAT
CCATGTGTCTGGTCAGACTCCATGAGGACCAGTGCTGACCTGCTCTGAGTCTTTCTACCCCCTACACCTCATACCCTCC
AGGTGATGCTGCAGTCTAGAGTCCTACTGGTGCTAACTTCCTGTTTTCCTTTTCAGTGTGGTGAACCAGGATGAAAAGT
CGTTTGCCATTGGAGTACAGTTCTTGTTGATGCGTTTGCTGGGTAGGTGATTTAGGCCCTGGACCGTGGGCATCTAAAA
GCCATGTGGGGCGGGGCAGGGTTTGGAGAAGTCCCAGTTCATCTTGGCTGCATATTCCTAACAGCAAGAAGAACCAAAC
CCTGACAGATGACAGTTTGCCTGATTGCTTGAGATCGGGGAAGATTCTGTCTACAGTATTCAAGCCAAATTTAAATTAT
GTAAGAAAAAGAAAAGGTCATAGCTGAGAGTGCTGAATACAGAGTTAAAGGCAGGTATTTTTAAATCTGTCTCCAAGAA
TCCGCCCTAGGAAACAAGACCTTGCATTCCTGCCCTAGACAGAGCAGTTTCTGAGCTGAGCCCTGGCTTCCCTCCCATT
TTCCAAACCTCAGTCCTCTGCCACGGTTCAGCAAATGTCTCTTCTGTCAGGGGATCCTGCCTCCAAACCCTGTCTGTCC
TCAAGTAGCCTGGAGCCCCCAGCTCAACACTCAAAATACTCAAGCTGTGCATACACATAATCAGCAGAGACCTACAGGG
AGAGAGAACTCCCACGGGAGCAGGAGGCATCTGGCTTCCCTGAGTGCAGGGACTGCAGGGAGAGGAGACACACAGTAGG
TTCCTTCCCAGCTGGCCAACTCTCATCTGCCCGTTGACATCCATGGCACAGTCATGCATTAGACTGAACCCCAGGCACT
GATGTGGAGGTCTTGCTACAATGGATGAACAAAAGTATAAAGATTGAATTTAACAGAGGATCTTTGTACTAAGAATTTC
AGGGGTGGGGATTTTGAGGTTCCGGGCAGAAGGACTTGAGTTACTATCAATGTGAGCCTTCCTACTTTAACCACTGACA
CCCTCTGCATTATTATACAGGGGTGCAGGTCACATCTTGCCCTGCCATGGCTTCCATTAGCCTTCCAGCGTGCGTCATC
ATCCCAGCTGAAGTCAGATGGGCAGGTGCCTATGCAGGGTCTGAGCCAGCATTTTCAATGGAGTTTCTTAGCCGCAAGC
CATTTATCCTATCATGAAGCGTCTCAGTTCCAAAGGACCCTTAACCCTCTAAATGACAACCGTCACATTCCTGGAACCA
CACAGGGGACACAGGGTATCTTGTCCAGGTTGAGGCTGGTTCATTAGCACAGCTGCTTGTATTTATTTATTTATGACTT
ACCATCTATAGCTGGTTTATCACTTACTCCAATGCCCTGGCGGGGAAAGAGCCCTGGCATTCCTCCCAGAGGACCTTCT
GCCCTGCTTCTATTGGTGACTTAGAGAATGGCCCCTCTGCCCCGCTGCTCCAAGCCCTTGCTGCTTCCTCTTTCCCACC
TGAGCTCAGCTAACTCTGTGGACCACAGTTGGAAAACACAGGCCTAGAGGAAATCCACTGGTCACTTAAGAACACAGCT
TCACTCTGGGTTAGATGAAAAGACTGCCTATTTATAAACCCCAGCAGGCTCACAGTCACCCACTGAGATGTGGTTGAAA
ACTCTCCTTGACTTCTTTTCTATTTAGGGATGGGTCACTAGGGCCAGTTTCCAGCCACTGTTCACCTGGAAACTGGAGT
GTGAGCAGGGGCTGAGGGGCTGCTCTTGGGAATTTCTCTATGTAGGTAGGGAACAGGACTGGGTTGCCTCTTTCTTCCA
GAAACAGGAACTCACAGGGTGCTAGAGTGTCTGGTGTTTTCAGCACCGCGTTTCTGAGAATGGGATGGCCCATCTGCAA
CGTAAATCCTGGACAAGTCCACCCTGATCCACTGACTGCTGGACAAGTCCACTCTGACCCACTGGCGGCTAGACAAGTC
CACCCTGACCCGTTGGCTGCTCACAACGTGGCTAGCACCACTGAGTTTGGTGGGGTTGGGTAGTGGGCATCTAAAATAT
TCATCACCCAGTAAGGTGTTGTGCCTGCTGGACTTCATCTTAACATTCAGATGCTAGGATGATTTGGCAACCTGTGTTT
CTGAGCAAGACGGGGAACTAAAGGTCTCCAAAGGGTGTTGTCCGATCTAGTGGGCTAGTTTGGAGTGGGAGAAGAACGT
GGGATTTGAACTTCAGTGAACCCTTGGGTCCTCTTGTTCGCTTGCACTTTATTCCAGTGACTCCACCCACCCACAGAGG
CTGGGGGAGTCCTTGGAGGCGTTAGCACTCTCGAGATGGAACTTCTACCTGGGGCCAGCCTTGAGCTTGAGAACAGTGC
TGTGTGTCTGAGCTGACTCCAGGTTGAGCCCGTGATTCATTCTGCCCTGAAAGAATGGATTCCCTTTTATCTCCTAAGC
CTTCTGGTGAAAGGGGAACTCTTGCTGAGCTTTGCTGCAGCTTTCTGCTTTCCCGAGTCACTGTGATTCCGAGGGCAAT
GTGTGAACCGTGCCATTGGTGTGGGGGGCTCGGACATCTCTGACTGCAGATCCAAGCCACCCAGACACCCTGAATTCTC
TTTCCCTTTGTTGCCAGCCTGGCTGCCATCTCCATCCCTTTATGGCCTGCTCATCGACTCCTCCTGTATCCGGTGGAAC
TACCTATGCTCAGGGAGACGAGGGGCCTGTGCGTATTATGACAACGATGCTCTTCGAAACAGGTGAGAGCTCCCACATA
CACAGGTGTCTAGGAGATTAGGTCTGTTGTCCCAGCACGGGGGGGGGGGGGAAAGCCCTTTTTTTAAACCTCATGGATG
TGGTGGAGGCTGTCAGCTTTCTAAGGGGCAAAATAGGAGGGAATGTCTCTATAGATTCTGCCATGGACAGAGAGCAGAG
GCTACCATAGCAGGCATTTGGGGACCTATAAGGAGCCATTCAGGTGAGGAGACACAGGGTCTGCTTTGAGGTGTCCCCC
AAAGTACTGTCCCTCACAAGCCTACTCATAGCAGCAGACAATGGTCACCAAAGTTAAAGGTGTACCTGGAGCCTGAGAG
AGATTTCGAATATGGAAAAGATACCAGTCACTCTCCACTGCTCAGAGAATGGGGAACACAGCACGGCGCCCAGGAGAGG
TCCAAAGAAGCAGGAGTCCAACCTATGCCTGTGAGCCAAATGCAGCCATCTCTTCTGTTGCTGCCGTTCCATCATCTAG
AAATGGTGGAGAAGGTGGGCCTGCAGGGGCTAGAAATACTGAGGACGGATAGAAAAGGCCAGGTTAGAGAAGGCCAGCA
GAGAGGCAGCTGAAAGATACAGACCCTCTGGAGACAGCTGGGACAGTAGTGTCACCTCTGGCCATCAGTGATGTCACAG
GAGAGCAGAGGATCACTAGCGTCATGTGTCTCTCCACAGTGACCACCTGAGAAGTGACAGCTCGTCACCTGAGTAACGA
TCTTCACAGCTTCTAGTGAACTGTGAAAACAAAGATCATCTTCCCGCTGCCCCTGGGCCTCACCATACCTGTCTCTTCC
TGCCTCATAGGTACCTGGGCCTACAGGTAATCTACAAGGTCTTGGGCACACTGCTGCTCTTCTTCATCAGCTGGAGGGT
GAAGAAGAACAGGGAATACAGTCTGCAGGAGAATGCCTCGGGCCTCATCTGACCTTCAGCTGGGACTACTGCCCTGCCC
CAGAGACTGGATATCCTACCCCTCCACACCTACCTATATTAACTAATGTTAGCATGCCTTCCTCCTCCTTCCCTCTCTC
TCTCCCTCTCTCTTGCGCACACACACACACACACACATACACACATACACACACATGCGCCAGTGCGCGCACAAAAGAG
AGAGAGAGAGAGAGTTAGTTCACTCACCCCTTGTCTCACCGGCCTCTTCCTCCTAAAGTCTCCCGCATGGTTCTTAGGG
CCTGAAGGGTCCTGAGCTGAATGAGCGCTGGACTGAAGGGTCTAGTTTCTCAGAGTCCTTGGAAGGGATCCTCTCCTCA
GCCCTGGGTCTTCCACTGTCCGTACTAAGGCAGCCTCTGTTCTCACCAGTCTCTCAGGAACACTTCAGTGGTGGGAGAA
ATGGGAGCCTTGACTTCCGTGCCAGGCAGCCCAGCTCCTCTGTCTCTGCCCACACCCAACAGAGAGGCAGGGGAGCAGC
AGGTGGTTGTTTCTTAGCAGCTACCACTGGGCTAAGGGAGCTTGGCTGTGGCCGCTTTGCATCTGGCTTCAGTCTAGCA
TGGAACCCAGGAGGGACCTATCTCCCTTTCCTTTCCCACTTTCTGCCCTCAAGGCTGATTTGGAAACCACCACTTTGGG
AAGTATAACCCTCTCTGTATACTACTCCCTGGTGTCAGAGCAGGAACGAAGGAACCAGCAAGGCTAGGTCATCCAAGCA
CTGTTCCTAGGAACCTGAGGCCTACCCTCAGGTCAGCATGTGCTTCCTTCTGCCTTTCAAACCAACAAAGCCCATGTAA
GGAGCCCATGTAAGGAGGACCCAGTCTCCCACCCTCACAGTAGAGACAAGGTCTTTCCCCCTTCAGAGACGCAAATAGC
CATCTTTACCATGCCCCGGAAACAAAAGAGTGACCTCACATGGGCTTTGCTGTCTGGACTTCAGCTCATGTGCAGAGGA
GTAAAGGCGGTGAATGGGGGGTGTGATCCTGAGATGCAGTCAGACCAAGGAATGGAGCAGAGTGGATGCCACCTGTCAC
TGTGCCAGATGGCAAGTTGCAGCCCACAAAGAGAGTAGCCGGGTTGACTCGCTTGCAAACACATTGTCTTCGTTGGCAT
TTTCTCAGCTTTTCCTCACTACCTCTCTGGATGTGGAGGTGGGCTCCTTCTGTGGGCCTGGGCTGGGGGCCACCACTGC
CATGCAGTGGAGAGGCAAAGGCAGAGGCCCAGGAATGAGGCCTTTTCTCAACGATTCTGTTTATCAGAGAACTGGCTTG
GTGTTTGTCAGGGATGCTGTATGGTTCTCTGAGAGCTCCCCTGGAAAACCTTACCTCCATTCGCATTGGGATTGCTCCC
AGAGAGCGCTCGGTGGGCAGCAAGAACATGCTCACACACTTGCCAAGCATATCCAGAACCAAAAAGGCTGGCGGAAAAG
ATCCTGGTCTGACTGCCCATGCACACCCTGAGGCTCCAGCAGGTTGACTGTGTGCCTGAGCTGGAGATCTGGCTCACCG
TGTCCCCGAAGCAGCTAGGCAATTGACATTGCCCTATGTGACATTTAAGTGCCTTTCAGAAATGCCTTATATGGTGAGA
AGCCAAATGGTTTATGTCGGCGTGGCAAAGGTCCTGTGAGACTGAAGCCTTCAGGGAGCCTTTGTTACTGGCAGTGTTC
TTTCTGAAGCCACCGGGCTCATTTCCACAGATCTTATTAAGGAGGAGGCTCCACACAACCTCACGGGCCAGTTTCAGCA
TGTGGAACGGTTCTGCTTGGAACCTGATTCTCTGCAACTAACCCTGGGCTTACTCACTGCAGTTTAACCAGATTCTGAA
GGCATAGCCTTCCACCAATCTCGCAAACAATGAACGTCAACCTTCCGTTCCCGGAAGATCAGCTGTCCCCACAAGTCTT
TATTCTATTATATTGCTATTAATATATTATAATTCTGTTCTGGGTGTAAGTTGGTTGTAAATTTGTGCTGTCCTGGGTC
TATCAGAGAACAGACAGAATTTGTGCCTTCTAGACAAAGAAGTAGCCATGCTTTAAACTTTAGAGGCCTGTAGCCAAGG
GTGTTAGAGACCATGTTACTCTCAAGCCACCTGCCTGGTGCTGAGCAGGTCCCAGGCATTGCTGGTTGCTGTGTGGGGC
CTTGTGCTTTCTGTGCAGACCAATGTCAAAGACTCATGCTCTTGGGAGGCCCAGTCACCGTCCTTGAGTTCATATCCAG
AAGTGGGCTCAGTCACAAACACTATAGCCATGAATATCACAGTCATAATTGATCATTTACTACTATTCAGCAAATCTTG
CCTCTCAAATGCCAGAGGGGCTTTAAAGATCTCACTTTTTTTTTTCCAATTAAAGAGCAAATTGTCACAGACTTCCATG
AGTGTATCATGCTCAAGATTGCTGTTAAAATACAGGAACACCTGGGCTGGAGAGATGGCTCAGTGGTTAAGAGCACTGG
CTGCTCTTCCAGAAGTCTTGAGTTCAATTCCCAGCAACCACATGGTGGCTCACAGCCATCTGTAATGGGATCTGATGCC
CTCTTCTGGTGTGCAGGTGTACATGCAGATAGAGTACTCATACATCTTTTTAAAATGCAGGAACACAGCCGAGCAGTGG
TGGTGCACATCTTTAATCCCAGCCCTTGGGAGGCAGAGGCAGGTGGATTTCTGAGTTCGAGGCCAGCCTGGTCTACAGA
GTGAGTTCCAGGACAGCCAGGGCTACACAGAGAGCCAGGCTACACAGAGAGCCCTGTCTTGAAAAACAAAAGAAACAAA
AAATGCAGGAACACCCTTCCCAAAGCCTGAGGCCCCTTTCTGTGACTGTAAAAGGAGTCCTGAAATTCCACCTTCCAGG
AAGATGAAGGTAACCCCTGAGCCCTGTGTGATGTGGGTCACCCATGCATAGAGCCAAATCCAGGCAAATTGACCGTAAG
GATTAACCACCAAAGGTGCCTTTATATGTAAGAAGGTCATAGTAGGTCTTTGATCTCTTCTCCTTGCTTCTCTGTGGAG
CTTAGGAACCCTGTAGAGTCTGGCTCGGGGACAGAGTTCCATTCCTGGGCACAGCCAGAGCTATCATTCTCTGCTGCCC
CACCCAACCTAGGAAATGCACCATCCAGCCTCACAAAGAAGAAACCAAAGAAACAGGAAATAAAGGGTTTGCCATCCTT
TGGAAGGGAGCGATATCTACCAAGTGTCCTTGAGTCCAAAGCCTCTGGCAGGACCCTCGTCCCAGCCTATGATGGGAGC
CACACTAGTATGTCTGAAAATGTAGAATCCTAGGCATGTGGAGCATGCCTTTAATCCCCGTACTTGGGAGGCAGAGGCA
ACTGGGTGTGTGAGAGTTCGAGACCAGCCTGATCTACATGATGAGTTCCAGGACAGCCAGGGCTACATATTGAGACCTT
GTCTTAAAAAAAGAGAAAGAAAGAAAGAGAGAGAGAGAGAGAGAGAGAGAGAAAGAAGGGAGGGAGGGAGGGAAGGAGG
AAGGAAAGAAAGAAAGAAAGAGAGAGAAAGAGAGAGAGAGAAAGAAAGAAAAAAAAGGAAGGAAGAAAATGAAAATGAA
AAAAGAAAAAGAAAAAAAGAAAGAGAAAAAGAAAGGAGAACTCCAAAATCAAGGAAGCAGCCAGCAGAGAGCTTTCACA
GAAAGCCCAGGTCTTTCTGGCTGCCCCAAGCCCCTCTCTTCTTATAAGTCATTCTGAAGTTAGGGCAAGCCTTGGGTAA
TGAGAAGCCCGCCTCTTTTCCCATTGAAGTTCATTGGCTGGTGAGAAGAAAGAGGAGGGATCTCTTTAGGGTTGTGTAG
GTTGGGTGATAGAGGTTGGGAGACCAGGTGATGTCTCAATTATTTACATTCTAGTCAAGCATCCCAAGAACATTGTAAC
TATTCATCAAACAAAATCCAGTGAGCCCTCTGGGTACCACAAGGTAAAGACCAGACGTGGAGAAAAGGGACAGAGAGGA
GAAAACTTGGAGAAGCAGAGCCATGAGATTGAAGCACAGACCTTTGGGGAAATGTCCCATCTGGTAACTGCTTATCATG
TTCTCGCTTAAGAAACAAAGCCATGTTGTATTTGCCTTCAACACTTTCAAAGATGGAGAGATGCAGCTAAGCTGGGTCC
TGAATTACTGTCAACTTGATAGTAAAATATTGTATTACAGCTTCCCAGAGAGATTGGCAGTGGTATGTGTATGTGTGTG
TGTGTGTGTGGGGGGGTAATCCTTGCAAATCCAGAAGAAAAAAAATTCCTATCTTTCCCAGCCACAGGGACTAAACATT
GGAGGTAAAAATGTCCATTCCCTGCCAAGAAGGCCAGATTTGCTAACCTTTCATCGGTGATTAAATATGTAAACAGGTC
CTGGGCAAGCCCTTGGCAAATCATTAATGAGAGAAAGCCTTCCTCTCGTGACAGGCCCGGCCCATTTATCAACCTCCAC
ACCCATTCCCAGCCCTGTTTGGTGGCCACAGGACACAGGGCTCTCTACCTTGACAAAGTCTCTGCTCCTTAGGCACCTG
CTACACTTTGATAACAATAATAAAATGTACATAGTTCGCTACAGTTTGCCAAGCCATGCATTTATTTACTGAACTCCTC
AAACCACCCAGAAATAGGCTTGGCTAGGCTTCAGTCACATGACACAACACACCTTTATCTCTTGTTTGCACAAAGCCCG
TGGCTTGTTTGGGTGACTCTCCAGGGCAGTGGCTTCCAAGGGTGGCTCAGAATGCCAGCTATTTGGACTTGAGGTACCT
CTGTTTCATCAATCCACAATTAATGAGGCAGGAAAGGAAGCTAAGAAGGTCTCGCCATGGGAAGCAAGTGTTTTGGCCA
GAAGGCGCATAGTCTTTCTGCTCCCAGGCGCTTGGCCAGAACTAGTCTCACGGCATTATCTAACTGCTGTACAGATGGA
GAAATATAATCCTCTGTGCTCAGAGAGGAGAGGAGCAGACTTAGGCAAGTGCTAGAATCTTCCACCATGGGGAGTGATT
CTAGGTGAACCAATATGCTCTCTGAGACCCTTCAGTCTTGTCAGGCTGTTGGAAGAGGGATGAATACAGTCAGAGGGAG
GAAGCATCCACAGCGGATCCCTAGAGGAGAAAAGATGATATCTCAGCAAAGCCAAGGCTGCCTTAGAGATGGAAAAGTG
GAGAGGACAGGCCCAGAAGAGGCAGAGCTGATGGATCAGAGGTTTAGAGATGCAGGGTCAGGAAAAAGGTTCTCTTTAG
TTGACAAAGACTTAGGCAAAGGATGAGAAGGCGGAGGAGCTAGGGGGGATGACAGTTGATTGAGCATGCCCCCCAAGGG
GCGGGGCTTATCTCGAGGGGAGGAGTCTCACCCAGAGCTTCTTCCTGAATGGTGAGGCCATCAGGACCATCACATCGAT
AAATGAGGTCCCCTCCGGTTGTCAATCACATTTTATTTGTTTGGTAGCTGGTGTGTGCAAGAACCCGCCATGACACATT
TCCTGACCTTGCAGCGTGTATACTTTGACCTAGGGTAGGAACTTGACCAAGTGCTGTGGATTCCATTGGGAAATCAGAG
AAGGGACCAGGGCTGGTTTCGAGGGTCAAGAGTGTAGGGAGAGAGGACAGCTAAGTTGTGAACAAAGGTAGAAAGGCGA
GCAAACCTGTGCACATTCTGAGAATCCCCTGATCAGGGAACCTGAAGGAGAACAGGAGTAAGGCTAGAAGGGTAGGGTC
TAGGCTTAGCGGGGGCCCCTTAGGCGTCCTTCGGGACTGGCTTAGACCAGCCCATTCAAAGCCTGGAGAATGGCCTTAG
AGACCAGTCAACCAGTCCCAGAAGGGCGTTCCTACCTCAAAATACAGCCCCGGGTCCCTGAGAGGGAACTGCTACACCC
CAGAGACCAGAAGAGCCGTCCTCCTGAGCAGCCCCAGCCAAAGTTGGCTCCACTATATGTCCTCTCTCTCTCTCTCTCT
CTCTCTCTCTCTCTCTCTCTCTCTCTCTCCTCCCCGCAGTGTGGGAACTGGAGTCCCAGGGGTGTAATTGAAAGCCAAA
TGGGGCAGCTTATTTGAACAGGTTTTCTGTTCAGGCTCCTAAACTTCTCTTTGCACTGTGGGTTTCTCAGTACAGCATT
TCAAATGTATACAGCCCCTAAACCTTAGAAGTCTCAGGTGGGGCAAGCATTTGACTGAATGTTCTTAACTTTCACAAAC
ACCAGCTTACAGAAGAAAAATGGAGGTGGGAGTGGGGTGGGGTGGGGTGGGGTGGGCCCATACTGGGAAAAGGCATTTG
AAACTCCAGAACAGCTCCAGAAGTCGGGAGTGAAGATCAGAGAACGCCAGGCCCTTTGTGCTTTGCGCTTCTAGTGAGA
TGCAATTATCAGACGGGGAGTTTGGAGTGCAACTGGTCTCGCTTCCAGCAGGGTCCAGACCTTATTCTTGCAGTGGCCG
GCGCTCCGGGGCACTGCTGTCGTAGTCTGCCACTAGGCGGCGCCGCTCACCAGCGCCGCAGTGAGGCAGCGCCACAGCG
GGATCACCGCATGCAGCTTGGCAGAGAGGGCGTTGCTGAGGCCAGGTTGCTCGCTGCTCAGGGCACCCCTCAAATACAC
CGCCACCCTCTGACACTTCAGGCTCCCCACCCAAGCATTCTTACAGACCCTGTGGGCACTCCCAGGCCCTGCGAACTGG
CATGGGTGGTCACTCTGCTCCAACGTGGGGCCCCTCCCATCCTGGGGCTGTCAGCCTCGCCATGATCTTACAGGCTTAA
GTATTCAGTGGCTTCAGGGAACTCAGTCACCTTCCACCTCCGCCTTCTAGGTCTCCGGTATTTACCAGTGTACCCCTTG
GGCCTCAGGAACGTGCCTCTGAAAGAAATCTCTCATAATCGCAGGCACTGCCCGTCTTCAGAAAAGGTCTCTGTGCCCC
AGTCACCTTCTAGGGCATTCGGAAAAGGACTGAGCTCCCTAGGGCCAGGATAAACAAGACTAACAACACTCTTGCTCCT
TGGAAGCAAAGGCAGAAGTAGCCAGGAAAGCTTTAGAAACTGACGCACCCTCCTGACCCCCCAGGGTTGGCTGATCAAT
TCCAGGTTCAGCAGAGCTTGAAGGAGACCTTGACCGACACCAGCATCCCGATGCAGGGGAAACTGGATTCTCCACCTCT
TGCCTTAAGCCTCCCTTCCTTGACTTCTCTATGTCACCCATTAGCATTCCAGCCTTAAGTGATTAGGCCAAAATTTTAT
AAACAAGATGAAGACATATTTTTAAAGCCCGTTCCTGGCAATGTACGACTAACATCATTTCACCGCTTATCGTTCCGTA
CATTTTATAAATGTAGATGAGAACACAACCACCGTGGCCATTAAAGTGTAAAACAGTGTAACTCCCAGCAACTAGGTGG
ATATTGGGTTGAGTACAGTCTCTGCCCATTTTACCACCCTGCCCCCTTGGTATAAGTTAACCTAACTTATTCGAAAGCT
CAATGTAAATGGTATTTTGCAATCCATCCTAATGTTTTTGAGATCCATTGCTTGTGCCTGTGGTTATTCTTTTTTTTTT
TTTTTTAATTGTTCCGTGACACTCTCTTGGTTGAATATGACACAAATTCTGTATCTATCCATCAGGTTATTTAGTTAGA
TGTCAGGCCATTTTTTTTTTATTATGATGAATAAAATTACTATGGAGATTCGTGAGTGAGTTTTTTGTGAGTTTCCATT
TCTGTTGGAGACATGTCCAGAAGTGAAAAAGCAAAGGGATAGCTCATAGGCTATCAGAGATTAACTCTTTCCAAAGTTG
AATGGCTTAGCATCTCACTAGCGATGCAGAAGTCTCTTAGTGTTTCCAAAAGGAGCTCTGTTGAGGTTTACGTGGGGTG
CAGTCATATCCACACATTCACAGTCTTCTGTCAACTTGTTTGGATAAATGTATGTGTTTATCCTAGACTGCTGTAGCAC
CACACATGGGCTCATGTACTTGAATATGTACTTGAACCCCCAGTTTGTGGCACTGTCTGGGGAGAGAGCTCAGCCTTGC
TGGAAGAAGTGCCCTGGGGAAGCCAATTTTTTCAGCCTCACCCTACTTCCACATCCCTTTCTTTCTACTTCCGGTTGCC
ACTGAAATATGATTTCTAAGATTTCTCCTCCAGCTCCCAGTCCTGCCCACCTCCCCCCCAAACAGTAATGGACTCTCCC
TAGGAAGAGTGAATCAGGCTTCGTATTCACTGAGCTATTACATCATAAGTGGTTTTGTAATTCATATTTTATACTCTTT
CACTGTGGATGACCTGAGACACCTGGAAGATCCCTGGTCGTCATCCTCCTTCGCCTTTTTTTTCTTGTCGGTCCTCACA
TTACCCTTTCAGGGAGTTGTCTTCAAACTCATCAAGTTTTCTTCTGCACCCTGTAAATATATTCTTGCAACCACCCACA
CATATGTTCATTTTTGTTTTATGTTTCTCAGGGCTAAAAATACTGTTTCTTTTTTTATCACTTCCATAATCTCTCTGCT
GAGTCCCGGTTTATTGATTCAGATTGTAGTCAAAGACTGGAAGGTCTTTGAACTATTTATAGGAGCTACCTTCAACTCC
CTGTCTGCTCAGGTAGACATCTGGGTCATCTCATACCTTGGCTGCTTTGATTTCTGGACTCTGGCCACATTTCCCTTTT
TATTTGCTAGTCTAGTTCTTTTTAATATACCCTGGACATTATGAGTGATGTTCTGTAGAGGCTCCAGATCCCATTATTG
TTCCATTTCCCTGATGTTTGGGATGGAACATTAAGGCCTTGCAGATGTGAGTCAGACAATCAGCCATTGACCTTCATAC
CCAATCCTCTGTTATTATCTCCTAAGGAACCATGGTTCATATATATATATACACACACACACACACACACACACACACA
CACACACACATATATATATATGACTGATCACTTAGGACAGTGGTTCTCAACTTGAGGATCACGGCCCCTTTGGCAAACC
TCGATTTCCAAAAAACATTTACATTATGATTCATAACAACAGCAAAATTGCAGTTATGAAGTTGAAGTAGCAACGAAAA
CAGTTTTATGGTCAGAGGTCACCACAACATGAGGAACTGTGTGAAAGGGTCACAGCATCAGGAAGGTTGAGGACCGCCG
ACCTAGGGGATGCTTATTTGATTCACTTTGTCACCAAGAGTCAGCAAACCCTAAGATAGTTATCAGATTACCCAGCCTT
CAGATAGTTAACAGATTACCCAGCCTTCAGATAGTTATCAGATTACCCAGCCTTCAGATAGTTAACAGATTACCCAGCC
TTCAGATAGTTAACAGATTACCCAGCCTTCAGATAGTTATCAGATTACCCAGCCTTCAGATAGTTAACAGATTACCCAG
CCTTCAGATAGTTAACAGATTACCCAGCCTTCAGATAGTTAACAGATTACCCAGCCTTCAGATAGTTAACAGATTACCC
AGCCTTCAGATCTGTCTCCCTTCAGGGTCTCCTGCAGGCTTGAATGTAGGGATTTTGAGGCGGGTCTAGAGTTGACACC
CAGATGCATCTGTCCGTGCTAGCATCTTAAGGCTTTGAGGTTGTAATGAGACAGGGACTGGAGAAATAGCTGGCATTGG
GGTCACAACTGACCACCCTTCTACCTATGGAAGGGAGCTTTCTTTGGGCTCCTACCTGCTTTGTCTTCCTAAAGAGCAG
CCAAGAGACACCCAAGAAGACTTTCAGGATCACATACATGATCCACGTGTGTCTGTCTGTTGGACCTGATTCTGTTACA
TGGATATGCAGATGGACTAGACTAGCCCAAATGCCCACATTCTTCTGTTGCAGGAAATACTAAGCTTATTGAAATAGGA
GCTGAACATTTTCCTTTTGTTTTGTTTCTTTGTTTGCCCAGGTACATGAGGATTCACCAAAGGTGAAAGAGCCACACAC
CGAGTCTTATGTCTCTTCAATGGCTTTGTAGTCACAGTGTCTGAAAATGAGTCACACAGTCGGACCCCGATTGCTTGTC
TGCGTTTACAGTTGTCTGAAAGATGGGAAGAAGGTTCTCGAATTCTGCTTTTAATTTGTTGGACTGAAAACCCAAGACC
TCAGAAATAGTTTCCTACACAGAGCAAAGTAGCAATAACCATAAAAATGATTGGTCAGTTAAACCTTATTGTTTGCGTT
TCCATTGCTTTGATAAAACCCTGGGACAAAGAGCAACTCAGGGAGGAAAGGGTTGATTTTCATCTTACTATCCTCATCG
TGATTTATCGCCGGAGGGAAGTCAGAGTAGGAACCTGGAGGTAGGAGCTGATGCAGAGGCCATGGAGAAGTGCTGCTTC
CTGGCTTGCTCCCATGCCTTGCTCAACCTGCTCTTTTATAGAAGAACTCAGGACCACCATTCCAGGCCACAATGGGCTG
GGCCTTCCTAATCACACTAGTTATAATGCTGCCAATGCATAAACACACGGCATCACAGGTAAATCTTGCAAGTGTTTTG
TAGAGTGAAGGCTGAAACACAGAACACAGAAACAACGATTCCAAAAACAGACAAACAGCAAGATGGAAGAGGTTAAATT
CAGAGGAAGAAATAATAGTGGCCGGGAGGAGGAAGGAGTGTTGATTGTAGCAATGTTCAATTTCTTGACCTCATGGTGG
GTACATTGTGCTGTAATTCATTCCAACGTGCATTCTTACCCCTTGTTCTTTTGTGTATTGAACTTCCCAGTATAAAACA
TTACAATGCCATGCATATGCCTCAGTTGGACACGATAATAGTTGCCCCATAAGCCCAGGAATTAAACAAAGAATCGTCT
TTGAAGTCAAATTCATACCTAATATTTTCTACAGGTTTATTTAATTAGGCGTTTTGATGGATCTCAGATTATAGTCAGC
ACTCGGGGTTCTATTATATTAATAACATGCTTCAGATTTTGGAAAGAAATGTTTTCATGTTTAAAATGTCCTGAGTAGT
GAGCACTCTCCATTGTGGAATTCATTCCCCTTTGTCTCCGTTTATGAAGTTGTTTGAATGTGCACTGCTAAGAGTGCGC
TCCAGGGGAGTGCCTGCTCTGAACTTCATTTTCCCTAGACATGGCCTCGAGCCAAAAGTCTGATTTTTTTTTCATACTG
AAATCTAAGAGAAAAGTGACATTTCTTCCTTGCGTTCTCAGTCTGCTGTCATGAGGAGGAAACAATTAAGTTGTAACAC
TAGGCATAATTTATAATTACACACTAGCCTATATTGCTTGAAGCTCATTTGGAACAGAAAATATTACAGTTAGTAGATT
TTTAGCCCCAAACATCTTTATCTATTTGCCTCACCTCAACAGAGTGCAGTATTTACTTATTAGATGAAAGCTTAATTAT
TATTATTACTATATGGCTTAATTTTACACTTGCAAAGTACTTATTCCAAAAACGGTTTGGTTTGTTTCTAAAAAAACAA
AAAACAAAAAACAAAAAAGGCTCTATCCATGAGTTTAAAAAAAAAATAACTCATTTAAATATGCTTACCCACATCTCCA
AGCTTAAAACCCCTGTTTTCACTCAGCTTTCTATGGGGTTTCCAAGATGGCCGCTCACCCGCCCCACCCCTGGCTGAGG
AGACACAAGGAAGGCAGAGGAAGGAGTGTGCCCATCGCCTCTGCTGTGAGGACTGCGAGTCAGGAAGCTCCAAACCACT
CTGGTGTTTATCTGTGTTGCCACAGCTTTGGGCTGATAATCTGCCAGGGCTTAGTGGGTCAGAGGTGGGGTGTCAGGTA
GAAAGGTGTGATGGTTTTCATCTTGACAGGATCTGGGATCACCTAGGGGACAAGCCTCTGGGCGCAGCTCTGCAGGATC
ATGTAACCTCTGTGACAGCAAGCAGTTGTGTTGGATTAACTGGTGTGGGAAGACATGGGCATTGAGTGAGCAGCCTCGT
TCCCTGGGGTCGGGTCCTGGGCATTGTGAAAAGGAGCAGCTGAGTTGAGTACAAGCTCTCTGCCTCCAGCTGCTGGGTC
ATCACAGTTCCTTAGTTATCATAAAAGAGATGCCATTTTTATTTTAAAGTGAGTCTGCTATAAATTCTTACCTAATAAT
AATAATGCTCTTAAGGAGGGAAGTTTACTATTGCTTTGTCTTTCAGTATTGAGGTCAAACCTTGTGTCTTTACCACCGA
GCCACACTCATAGCCCCCTCCCCCCCTCCATGCTATTACACTTTTTTACTCCTCAGATACTTAGTTTATAAACTCTGTG
ATCGGAGCTGAGACGAAAGGATGGACCATCTAGAGACTGCCATATCCAGGGATCCACCCCATAATCAGCTTCCAAATGC
AGACACCATTGCATACACTAGCAAGATTTTATCGAAAGGACCCAGATGTAGCTGTCTCTTGTGAGACTATGCCGGGGCC
TAGCAAACACAGAAGTGGATGCTCACAGTCAGCTATTGGATGGATCACAGGGCTCCCAATGGAGGAGCTAGAGAAAATA
CCCAAGGAGCTAAAGGGATCTGCAACCCTATAGGTGGAACAACATTATGAACTAACCAGTACCCCGGAGCTCTTGACTC
TAGCTGCATATGTATCAAAAGATGGCCTAGTCGGCCATCACTGGAAAGAGAGGCCCATTGGACACGCAAACTGTATATG
CCCCAGTACAGGGAAACGCCAGGGCCAAAAAAATGGGAATGGGTGGGTAGGGAAGTGGAGGGGAGGGTATGGGGGACTT
TTGGGATAGCATTGGAAATGTAATTGAGGAAAATATGTAATAAAAATATTAAAAAAAAGAAAAAAATAAACTCTGTGAT
CAATCACATCAAGACGAGAGGGACCACAACCAAGGATTCCTTGTCGAGTGATTAGAGAACAAATTCAAGACCCTGGCAT
AAATATGGTGAGGGGCCAGAGAGTTTATAAAGTGTTCCCTTGTACATAATCTTTTTTCCGTAGCAAATATACAAAATAA
AGCTAGCACTATAATTGTGGTTTCTACAGCCTCAAAGTGTGTGTGCGCGTGCACGCACTTGTGTGTGTGTTTGCATGGT
GATGGTGGTGTGGTGGTGGCAGTATTGGTGGTGGTGGTGTTAGAATGTATGAAACTGAACCCAGGGTCACACTATACAC
TAGGTAAGCACTACCACTGAGCTGTACCCCCAGCCCAGCCCCCAAAGCCGCAAAATTAATGACTAGATTCCTTCTAGAA
TTAACAAAGAAGCCTAGAGTTAAAGTGCAGAAAGTTAGAAATCTTAAGAAAACAAACTACTTCCAGGTTATGACATAAT
TAAAATAAACAAAGAACTAATATTTCCCATTTTGTCTTTTATATAAAGAAACTCAGTGTGTGTTTGTGTAAATGTCTCT
TTTATTTCCTCAGATGAAAGGATCAGAAGAGAGCTGTACCCAAGCTATGTGCACACACAAGTTGGGCTGAGCCCAGAGT
GTTTGTTTCTCTGTTGTAATTATCCCAAGGCCTAGACCTGGAAGCTTCTAGCCTCCATACAACTTCATTTTCCAAGCTG
ACTGATTCAATCCAGCTTCTCTTGGCTTCTCACTGAATTTCTCTGTTTGACCTTGTACTAACTTTGGCAATATGTTCTA
ATCTTCTGGCTCCTTCTCATGTTCTGGCTAGTTCTGTCTTCACCTGTCTAGCTTGTTCTCTCTGCCACCTGTCTTTGTA
AAGCAGTCTTGCTAAAACTACCACACACAAACACCATCCACCTTTCTCTCTTGCTGCTCTTAAGTAGCCTCTCTTTCCT
GTGCTGGTCTTGTGTGAGCTGGGTGTATCCTATCTCCGACTCATTCTATCAAATCTCTCTCTGGTTCATCACTTTGTCT
GCCCCTCAATTAGACATTACTTCCTCAATTAGACGTTACTTTCAAACATAGCTGCTCCTGTCTACAAACTAACCTTACC
TTCATTTTGAGTGATTAAATGTGTACACTAAGATCTGTATTCCAACCAGATCACATAGACCTAGAAGGTCCTTGGATGT
GCTCCCTTGCCAGAGCAGCCATGTTGCTGGATTAAAATTCCTCTACAGGTGTGTAACAACAACAACTACTACTACTACA
ACAGCTACAACAGCAGCAGCAGCAGACCTGATTAGTATAAATTATTCACACACTGCAACAATTGGGGTGGAAGTTTCTG
CATATGTCAAGCAATGCAGATTTACCTGGTGTTTTGCTGAAGCAAGGCCCATGGGAGGACGCGTGATGTTTGGAGAGAG
TATAAATAGGACTCGGTGACAATGACGGTGCCCTTACATAGCTAGCTTTGCAATGCTTCATTGGTCTTGCGTCTTTATC
CTCGTTCATCTTCCCTTTGTTGAGAGAGACACAGCAGAGAACTTCTCCTGGTGTCCAGACTGGTCCTGTTCATTCCTCC
CTCTGGCTCATGCTGATTCTGTGGAGGCCTGGCTCTTTCTGTTGCTTTTTCTGTGCCACTGCTGCTGATTCATGTTTGG
TATCCTGACACTACTGAACTAGACTGCTGGTATCCTGACAAACGAAGATTGGAATCACCCCCCAGAAAACTACTTCTAA
ACAGGTCCACATCCCTTTATCCTATTAACCTAGAAGGGGGGTCAAAATGTTTGAGAATCCTTATTAGAAGTAGGTTTTT
TAAAAAAAAATCTAAGCCTACAGTTGTGGTCTAAAGTGAAGGTTTTGAGTATCAAGTTTCCAAAAGGTGTACTTCTGAT
GGTTAATTTAGATAGTCAACATAGTTGGATTAATAGATACCTGAGGTATTGAGATACACTTCTGGTTGTGTCTATGAGA
ACTTTCCTAGAGAGCACTGAAGAGAGATGGCCAGACCTGAATGAGGGCCTCTCAAGATTCGGGGTCCTAGAACAACTAA
AAAGAAAAAAAGGAGGAGGAGAAAGAAGAGAAAGAAGAGAAGGAGGAGGAAGAAGAGGAGGAAGAGGAAGAGGAAGACA
AGGAAGAGGGGGATGAATAGGAGAAAGAGGAGGAAGAAGAGGAAGAGAAGGGAGGAGAAGAGGGGGAAGAGGAAGAAGA
GGAGGAGGAAGAGGAGATCAGTTGAGCACTGGCATTTTCCCTCCACTGTTTTCTGGACCACTGAGAAGCTAAATGGTGA
GAGGTCACGGGTGGAGTTATGCTTTGCCTGTCATTCACATTTTGCCTGTCCTGGTAGACTCTATACCCTCAAACCATGA
ACCAAAAGAAATGAATTTTCTCTCAAGTTGTTTTGTTGTCAGGCATTTGGTCATAGCAACAAGAAAAATAAGTAATACA
CTAGTTTAAAAATCATGTTGGTCTAGGAAATCAATAACCCGTGTCAACTTATCATTAATATCCCATTAAAGGGGTAATA
TATTACTTTAAAATAACCCCAAACTTACAAACATAAGGCATTCTTCACAAATGTCTCATACTTTTGTAGCCAATGTATA
TAAGAGCAATAATTATTATTAAAATATGCATATTGATTCATTTTCAAAAAACTGTTTCTAGTCATTATTTTTGGTTTGT
ATTATGAAAAGCTGCAAAATAAATGTTTGTTCTTATTTTGCCAGATCATAAATAATTTTCCCTCTTTCTTTGCCATTTC
CAAAATAGATAACTTCACACAAGAGTGTAATACCAGGAAGGAGAAAAAAATCCCACTGACATTTTTAACTTTGTTTATT
GAATATCTGGCCAACATTTCTTTTGAACTTCTCATCAGTCTGGGTTTTTAAACTCAGTGCTGAAACACTTTCTGGCATG
ATCAAGCCTAATTTTATTTATAGCTAGCTGAGATTGTTTTTGACATATATAAAATATTCAAAATATTCTTATTTCAGAT
TCAGTTCAAACATTTAGGCCGCAAGTGGACAATATTTTTCAAACTAATTTGGAAGTCCTCGAACATATGAAAATATCAG
ATGAAAATATCATATCTCTTACGCTACATGAGTTACTGAAACTTTCAACAGTACCTATAATTTTTCTAACATTTAGATC
AATCATTTATGATATTATGAAGAAGGGAATCTACTCTACAGAAATCTTCAGTTAAGAAGATTAATTTTGGCCGGGCAGT
AGTGGTACACACCTTTAATCCCAGCACTTAGGAGGCAGAGACAGGCGGATTTCTGAGTTCGAGGCCAGCCTGGTCTACA
AAGTGAGTTCCAGGACAGCCAGGGCTACACAGAGAAACCCTGTCTCGAAAAGAAGAAGAAGAAATCTTTTCTAGTCAAA
ACTACAACTTAGATCTTGGGAAATATATTATATATTTAATTCTAATTTCAGGATAATTCCACTACTTCTTATTACCTGA
AATTAGTTTGTTAGCAAGTTCAGCATTAGTTGAAAATATCTACAATTTTTGTCTCATTTGGTTTTGTTTGTTTGTATGA
TTGTAGTTTTTTAAGACAAGGTTTCTCTGTGTAGGCCTGGCTGTCCTGGAACTTACTCTGTAGACCAGGCTAACCTCAA
ACTATCAGATCTGCTTGCCTCTGCCTCCTGAGAGCTGGAATCAAATATTTCTCATACACAGGAATTTCGTTTTTGTATG
CTGTAGCAAGTTTTAGTTGCTCTCAGTATGACATTTGTACATAACTTCCTCTAATTTTTTAAATTGTGTGTGTGGTGTG
TGTGTGTGTGTGTGTGTGTGTGTGTGTGTCTGTGTGTGTGTAACAGAGAGGTCAGTCAACATTGGATGTCTTCCATGAT
CAACTTCCATTTTACTTTTAAAACAGGTTTCTCACTGAACCTGAAGCTCACCAATTTGGCCAGACTGGTTGTCCAGCAA
GCACCAGGAATCTACCTGTCTCCAACCCCTCCACGCTGGGTTTACAGGCATCCGTAGACCATGCCCATCTTTTTGTGGG
TGTTAGGATCAAACCCAGGTCCTCACGCTTGCGCAGCCAGCACTGTACAGACCGAGCCATCTCTCCTCCCCTGGTTTCT
TTTTCTTTTGTTCTGGTGATAGTACTCTTGTCCCCCTAGATTCTCATTCATACTCTCATTTTATACTTAAAGCTTTTTG
CACTCATTCGCTCCTTAATTAATTAACTACTGTGTGTGGTGTGTGTGAGAGCGTGTGTGTTGTATGCGCAGTTACATGT
GCCTATGTGTGTCATCTGAAGTCAGAGAATGAGGTCAGGTGTCCCGCTGTCACTCTCCATCTTGAGATTTTTGAGGCAG
GGTCTCTCACTGAGAGACCAGGCTGGCTGAAAACAAGCCCGAGTGAGCCTCCTGTCTCTAAACGAACACAGTGAAGGAT
TTCCAGGCTCAAGTGACCACATCTGGCTTTTCTTTTCTTTTCTTTTCTTTTTTCTTTTTCATTCTTTTTCTTTTTCTTT
TTTTTTTTTTTTTTTTTTTTTTTTTTTTTTTTTTGAGACAGGGTTTCTCTGTATAGCCCTGGCTGTCCTGTCCTGGAAC
TCCCTTTGTAGACCAGGCTGGCCTCGAACTCAGAAATCTGCCTACCTCTATCTCCTCTGCCTCCCAAGTGCTGGGATTA
AAGGTGTGCACCACCACCACTCAACCACACCTGGCTTTTTGATGTGGTTTCTCAAGCTTGCCCACAGAGCAAGCTTATT
ATCCATTAAGCCATTTCCACGGTCCCTAATCTGTTACTTTCTAAACTAGAAAAATAATTTCATTAGTAATTACAACTTA
TATGAGTCCCACTGTACCTATATTATCTGAATATAATGTTGCACCATTATACTGATGTATAAATATATAAATAAATTCA
CGCTGAGTCAATCCATTAGCACTGACTAGAAACACGAAGTGCTTATGCATAATTATAGAAAACCCTGTGACACAAGGAT
ATAATGTTACGTAATGCAATATAATTTGTTAGAGCAAATTATAGTCCATAAAAATTATAAAGTTGTGGTTTTTTTTTAA
AGTTGTGTTTTAAAAAGAAAATGTCTTATACTGTTTTGGTGTTTAAGTTGTGATATCGCTATTTCATATTGGTGTGGAA
AACACACTCTTAGGAAAACAGTCCAGATGCTTCTTCAAGTTAGCATGTGACAGAGAAGTCTAACTCCTGGGCACTCATG
CTACTGGCCTGAAGGTGTATATGTATATGTATATGTATATGTATATGTATATGTATATGTACATATATATGTTAACGCC
AAGATTGGTACATGTATATTGATGGCAGTTTTATTTATAATTTCCACAAATTGAAATAATAAAACTGTATCATAATTGA
CAAATAATAAAATATGACAAATAGCATATCTAAATAATGAATTTCTGCTTACAATATAAAGAAATAAACAATTTAGTAA
TTCCACAAACTGGACACAGCTTAACTAATTTTTCTAAGTGAGATAGAATAGATCCCAAAGGCTATGTATTGAATGCTCC
CATTTGTATGACCTTCTGGGAAGCACAAAGCCGTAGGAACAGAAAGCAGGTCAGTAGTGTGTGAGTCTGGAGAGGAGGG
ATATGTTCAGTGTTATGAGCTAGAGAAGGGACTCCCAGGACGGTTCTTTGTGATGCTGTAATAGTGGGTAAATAACTCA
AAATCTGTAGGAATTAGTACAATAAATAGCTTTACTGTATGAAACGTCATGTGAGACTAGGTTATCAAGTGAACCCAGG
GTGGGATGCAGGCAGATAGGTGAATCCAGCTCTATTATAATCAGTGGCATAACTACTTCCTATTTTATTTCCCTGTTAC
TGTGATAAAAATACTCTGATAAAAGCAATGTAAGTGGTAAAAAAAAGTTTGTATTGGCTAGTTTTTTTCTCACCTTGAG
CCAAGATGGGTCACGAGGAAGAGGGGTCCCAGGAGAAAAAATGGTTCCATCATATTGACCTGTAGGCAAGTCTGTGTGG
GCATTTTCTTGGTTTTCTTGATGTGGGAAAGTCCAACCCACTGTGGTCAGGCCACCCCTGGACAGGTGGTCAAAAAAAA
AAAAAAAAAAAAAAAAAAAAAAAAAAAGCAAAGCAAAGCAAAAGAACAATAAGAATCTAGGATCAGCAAACTGTGAAGA
GCTAGCCAGTAGTCAATATTCTTCCATGGCCTCTGCTTCAGTTTGTGCCGCCAGGTTCCTGCCCCGACTTCCCTCAACG
ATGGACTGTAATCTGCAAGGTGAAATAAATCCTGTCCTTCTAAAGTTGCTTTTGGTGATGGTGTTTATTACAGCAATAG
AAACCTAACCAGAATGGGCTTCATTTTAGCTCACGATTCCAAGAAAAGTATCCCAAAGGCCAAACAAAAACAAAACCAA
AAACAAAACAACAACAACAACAAAAAACCCTCACTCATAGGAAGCTCTAGCTTGTGAAGATTCAAATTCATTTAAAGCA
AGAAAGCCCAACTTCAAAGAGTTCCATGCTCCTTGAAAGCAACTGCCTAGGAAAATGTCTCCCCAAGGCCAGCACACAA
AAGCCAATGTGGCCGTGTAGTTCAAGGGTACCAGGATCTATCCCAAGCTAGTAGCAGAATCTACAGCGTGGAGAATATA
AGATGTAGAGACTCTTGATGAGCAGCGGAGGCCCGGCAGTGTGTAGCAGGGCCGGAGACCCTAAATAGAGGTACTAAAA
GGCCATTGTATAGAGTTGTGAAAATTAAGCCCCAGTGTTATGGAGGCCTCCTAGGGTATCAGAGGTCAGAACTAAGGGA
CATCTGTCAAGGAGATCTGCAGGCATGGAGAGCAGGTGGCCTGGGGGAGACTCTGTGTGTTCTACAGGTGACAGAGTCA
GAGGAGTGAAGCGATGGAGCCCTTTGATGCCCAGTTGACTACGTTACCAGCTCCAGATGCTGGATAGGAAGCTGCAGGA
TCTCCTATTCATCCTGCTGGATTTTAGTTTTGTTTTGGTGTAATTGTACTCTGCTATGCCCTGGTTCTCCCATTTTTAA
ATATATTTACTCTGTGCCATTATATATTGGAAGTATGAACATTCTTATCATTATTATTTTATAGGAGCTGACAGTTAAA
AGACTTTGGACTTTTATTTATTTTTTTAAATTTATCATATGCAAGTACAATGTCTTCAGACACTCCAGAAGATGGCATC
AGATTTTGTTATGGATGGCTGTGAGCCACCATGTGGTTGCTGGGATTTGAACTCAGGACCTTTGGAAGAGCAGTCGGCG
CTCTTAACCGCTGAGCCATCTCACCAGCCCCGACTTTGGACTTTTAAAATACTGAAGTTATTAAAGACTATGGGGACCT
TTAGTGTGGGGATGAGTGCATCTTTCATGGTCTTGAGCCTGTGAGGAAGGGAAATGGAAGGGCATATTAGTTATTTTCC
TGTTGCTGTGATAAAACACCATAACCAGACAGACCTGACTCACAAAAAGAAAGAGCTAACTTTGGCCTTCGGTTCCAGA
GGAAGAGCCCATAATGACAGAGGAGACATGCAAGGCAGCTGATGGCCGCAGCTGTGGAGAAGGTCACATCTTCAACCAC
AAGCAGAGAGCAGAAAACCAACTAGAAATGGGACAAGGCTATAAACTCTGAAAGCCTGGGACATCTGACATACTCCTTC
CAGCAAGGCTCCATCATCCAATGACTCCATAATTTCCCAACAGCTCCTCCAACCAGGGACCGAACCCCAACTGTGTGAG
ACTGTGGGGGACATTGCTCACTCAAACCACCACAAAGGTTATGGTTTCAAAGTGATGTGTTTGATCCGCTTCCCCCAAG
GCTTACGGAAACCTCGTGGAAGAGGAAGGAGAAAGACTGTAAGGTCCAGAGGCCAAAAAGTGTCTTCTGTATATGTCAG
GACCACAGAATTTATAAGCTCAGAGCAGAGCAGCTGTGGTAGTCCACACAAGACTCACACAAGAGAAACGAACAAATAA
TATCAATATATCAAAAGTGCATTGTTTAGGATGATCAAGGCAACCAATAGACCTCTAGATAGAATACTGGGGGCAGGGA
AGAAGACAGCTATAACCTGCCAAAATCTGGAATAGGAGACATATCACTAGACAGTTTATAGAATTAAAAGATTAATAAG
GCAACATTACAAATAGTCTCTCTCACACACAAGTTGTGTAGCTTAAGTGGAAAAATTCCTTTAAAGACACTGACTGTTG
GTGATCCATCAAGAAAGAGAACAGAGAACTCAAAAAGTCTAATATTTACTGAAGAAACTGAATTGGTATTTTTAAATCT
CCCCATAAAGAAAACCAAGAATCAACGGCTTCATTCAATAATTCCATCCAACTTAAAATTGTTTCACTAACAAATTATC
TTAGCTGAGCATAGTTGCTCACACTTTTGATCCCAGCACTCGGGAGGCAAACACACGTGGATCTCTGAATCCGAGGCCT
GCCTGGTCTATGGAGGACGGCCAGGTCTACACAGAGAAATCCTGTCTTGGAAAACCAAAACTAACAATAATTTTTAAAA
GTACATAAAAAGTTTAAATATTTACGTGTGTCTATGTGAGTATATACCTGTGAGTGCCCATGGAGACCAGAAGAGGGAA
TCAGAGACCACTGGTTCTGGTCATGAGCTGCCTGATGTGGGTGCTCAGAACAGAACTCTGGTCTTTCTGAAGCATGGGA
AGTGCTCCTAACCACTGAGTCATCTCTCCAGCCCTTCCGTTCAACATTTAAGAAACAATTCCAATTTTACATAAGCTCC
TGCCACAAATGGGTGATGCCCGTGTACTTCCTGGCTCATTTTCTGAGGCCAGCATGACTGTTATCCAAACCAAATGATG
ATATTAATTTTTGTTGTTGGTTTTGTTTTGTTTTTGCTTTTATTGGATATTTTCTTTATTTACATTTCAAATGTTATCT
CCTTTCCTGGTTTCCCCTCTGAAAAACACCCTCTTCCTTATCCCCTCCCCCTGCTCACCAACCCACCCACACCTGCTTC
CTGGCCCTGGCATTCCCCTACACTGGGGCATTGAGCCTTCACAGGACCAAGGGCCTCTCCTCCCATTGATGTCTTACTA
GGCCATCCTCTGCTACATGTGCAGCTGGAGCCATGAGTCCCACCATGTGTACCCTTTGGTTGGTGGTTTAGTCCCAGGG
AGCTCTAAGGGTACTGGTTAGTTCATATTGTTGTTCCTCCTATGGAGCTGCAAACCCTGTCAGCTTCTTAGGTCCTTTC
TCTAGCTCCTTCATTGGGGACCCTGTGCTCGGTCCAATGGATGGCTGTGAGCATCCACTTCTGTATTTGTCAGGCACTG
AAAATGATGATATTATAAGAGAAGAAAATTGCAGGACAACATCACTCACAATCGTAGACAAAAAAAAAGTGCCAACATT
TTAGAATGCCAAATTTAATATATATAAAAGAACAACTTATTATCATTGGGTAAGGTTTATCCAAAGAATGCAAAGAATG
CAGGCATCTGTTGTGGGTGAGGGAAGGAAGAAACTACTGTGGTCCACACCATGGCACACCTCTCAGTAGTAATGGAGTA
GACTACTGATACAAACAGGAACTCAGAATCTGTCCATGGAGTTATCTCAGGTGAGAAGAAAAAAAAAAAAAAAAACCCA
GCCCCCCCCCCCCCCCCGCCCCATGTTCCGTACAATATAATTTCGTTCAGATTCTTGAGTCTAAGGAAATGAAATAGTT
CAGTGATTGAGAGTGAGGAAGGGATAGGTGTGAGGAAGGCAGGAGCAGGAGTGTTCCCATGGTGATGGGACTCTTTGTA
CTTGATTGTCTATATACGGGCTCGACAATGAACTTGATACACAAGATACTACCATGGTGGAAGTGGGTAGGGCAGGTTA
GATAAAGTACCCACGGGTCTGACTTTTTTTGCAACTTCTTGTGAACCCATAGTGACTTCCAAATGAAGAGAAATCTGTA
GTTATGTTTTTATGTAAATAGCTGTTGGGAGCCGCCCCCACATTCGCCGTCACAAGATGGCGCTGACATCCTGTGTTCT
AAGTGGTAAACAAATAATCTGCGCATGTGCCAAGGGTATTTTACGACTACTTGTACTCTGCCTTTCCCGTGAACGTCAG
CTCGGCCATGGGCTGCAGCCAATCAGGGAGTGATGCGTCCTAAGCGAAGAATAACTCCTCCTTAAAGGGGACGGGGTTT
TCCGCCATTCTCTCTCTCTCTCTCTCTCTCTCTCTCTCTCTCTCTCTCTCTCTCTCTCTCTCTCTCTCGCTGGCATCTC
TCTGGCTCTGCGCGCCCTGCGCTCGCTCGCTGCCTAAAGATGTAAACAATAGAGTGCGCTCTGCGCTGGCTCCTAAAGA
TGTAAATAGAAGGGGCTTTCGCTTTTGGGGCGGAGGGTTTGCGCTCCTAGCTCCTGAAGATGTAAGCAATAAAGTTTTG
CCGCAGAAGATTCTGGTCTGTTGTGTTCTTCCTGGCCGGGCGTGAGAACGCGATTAAGAAATAGCCAAGGGCAAATAGC
CAAGCCCTTCTTGAAGAACATGAAGAAACATGGGTGGTGGGGTAGCTATATGTTCCGACAGCGATCTTTGGTGTAAAGA
TAACAACATACATCAGGTTTTAGCCCTTGATGTATTTCCTCTCTGCAGAGCTTTGGAACCTTTCCGCAGGTGCACCAGG
AGACAGGTAGAGAACAGTCCTATCTGCACCATTTGCAAAGCAGAAAGAAGGCTGGGTGCTCTTTCCATGGTTAATTTCC
TGGCTCTGCTAAGGTACCGTGGTTATGTAAGATGTTATCGTGGGGGCTGTTGGATGAAGAGACACAGAAACTTCCTGTA
CTATTTTTTGAAACCTCTATGTAGTCTAAAACTATTTCAGGCTTTAAAAACTGGACACATTTTTACTGAAAATGGTTTC
AAAATTGGGGCAGACGATGGAATGCTAAGCAGACACGGGAACCAAAGGCTCTGCTCTATGCATCAACAGGAATCTTGGG
AGTACAGCGAGAAGGGAAGAGCAAGTCAGAAGACAGGGTTTGAAATATGAATTCAAAAGACTCAAGAGAAATGAAAGTG
TTGAGAGTTTGGGTTTTCTGCCTTGGGGAAGGAGGAAAAGGGGGAGGGGATAAAAGAAGAATTAGAAGACAGGTGTGTG
TTCACTGCGATATGATGTCTTTCCATGTTCCTCATCCAGAGAACACACTCATCAGGAAGGGCAGAAAGATGCCATGCAG
AAGAAACTCTTTCTAGTGAGACTACCAAAAAGAGGCTTATAGTGGCTCTTTTTATCTATCACATGGGAAATGCCTGATA
TCCCAGGACAGAATAAAGATGATCCCTTCCCCTAAGAGACAAAGGAATGGCAAGGGTAAGGGAGAGACTTGGAAGAGAG
CAGAAGCATTCTAAGGTTAGGATTCACATACAGCATGAAGACCATGCTGTGTAGCTCTGCCCAGACTGCAGGAGCCAAC
CCAGCCGACTGAACCAGTACAGATGAGGAAATGCTGGGTGGAAGGTGTGACACCCCCCAACCCCCTGAATGCCTTGACC
TCCACAGGCAGGGAGGGGTGTGGCTTAGGAGTAGTTCTTTCACTGCTGGAGTGTCCAACTTCTAGCTACGGAGACACAA
CATTGCAATCTACAAACTTCACAATGTAAAACCAGGCAATGGGATCAACAACAATAAACAAAAACTTGCCCCAAAAAAT
GTAGAAACCCATCCAGTATCTCATAATGTTCTACATAAGATTACAATATTGTGTTGTGCTGAATTCAAAGCTATCCTGC
AAGGCATATGGCCTGTGGACAGTGGGTCGGACACACCTGCCAAAACTTTCCTCAGCCCATGCTGGATCCCGAGACAGCA
ACACACTCGGGGCAAAAGTAGGGTGGAGTCTGAGTTATCTTAGTCTGGTGCCCAATCTGGCATGCTTATATGCTCAGAG
GGATGACCTCCGACTCCAGGGACTTCAAACCGAAGAAGACCACAAGAATAGAACAGTTACTCTGATTTGAGAGTAGTTT
TAGAGGTTAATTCGAGCATTCAGCAACTGTTTCCTAAACTCTAGGTGAAGTGGAACCTCAGCTGCTTCCATGGAGTTTC
CTGTGAGGGCTCAATGTGCGGTGGGAGACTCTAGTGGGTACATTCGGGGTAAATTCATAAGTGTCCCCTGGGAAATCCG
TAGGCACGGGTGTGTGTGTGTGTGTGTGTGTGTGTGTGCATTTCACTCCTGGCTTGCTTTGTGTAACATACACTACACA
TTCCAAACAGTCCCAAACAAACATTCCCTGAATGGCCAGAGAAGGTCAAGACCAGCAAGTGGCTGGAGAGGAAGAGGGG
AGGGGCTTTGTAAAGCCTCAATTAACCCGATGCCTTAGAGTGTACTGCTTGGGGACTGCGTTTAACCTTAGTCTGGCGT
CTACTCCTTGCTCTCACGCTACTGTGTGTGCCCTGCAAACTTAGAGGTCGCTCTCTTATACTCTTGTAGCTCATTACCC
GAATAAACCTAACTAGCAGGGCGCAGGAGTGTGGTTGGGCTGACGGTCTCAGGATCAAAAGAGGCAGGGCATTGTCTTT
GGGTTAGTGGAGCTGTCTTCTACCAGGCAGGTTAGGTTTCAAACCCTAGTAGGCATATCCTGTAAGGGTGTCTTCTCTC
TCACTGGCCAGCTCCTCTGGGGACAACCACAGATCCCCTCCGCATGAAGAGTCTGAGCCTAGCTAGATAGGAGGTAAGC
TAGAGGCCAGCAGGGGCCACCGAGGAGCCATACCCCAGGTCTGAGCCAGGTATCCGCACATCTTCCTACTCACCACCAC
ACCACACACTGACCCTTTCCTATGTTCCCGCCCTGTCTGACCATCTATCTGGGTCTGAGACGGAAGAAGGGAACCGCAT
TTAGGTGTCAAAGACCAGAAACAAATGTCCTCTTGACCAAGTCCTGTCTTTTTTTTTTCCCCCTAGGTGGGTGGGTGAG
ACAGAAGCAGCAGGGCAGAGCAAGACGCTCCAAAGAGGGCACCTCTCTTAGGCTCAAGAGGAGGTGGCTCTCCGGAGCC
GGCTGCCCGGGTGGGGGCTGGATGGCGCACGCCCCCCAAGCCCCGCAAACCCACGGGCTCCGCATGACATCAGAGGCTT
GGGAGCGCGCAGAGCGCAGGCGCGGGCGGAGCAGGCGGGCGGGAGGGGGCGCGTGGCGCTGCTCGGAGAGCGCTCCTCC
GCCCAGCTCGGTCCCTGCGCCCCGCTCCGCCCGTGCCTCGCTGCCCGCGCCGAGCTTCGGGCGTCCACAGCGCGCCCGT
CGCCCGTGCAGCCAACGCCACCCAGGGCTGCGCCGCGCACCCCGCCTCCTCCCTTTCCGCCGTCGCCGCCGTCGGACAC
GCAGCCGCAGGCCGGGGCCCGGCCGCAGCTGGGGAGTCAGGGGCGCGCGCAGCCAGCCCTTCCCCCTCCGGCTCCCGCA
CCGCTCGCCGCCTCCCCTCGCCCTCCTCCTCTCCCCTCCCTGCTCCTTCACCGCTTCCTCCTCCTCCTCCTCCTCCTCG
CCCGGCCCCAGCTGCCAGCACCATGTCCGCAGGGGGAGATTTTGGGAACCCGCTGCGAAAATTCAAGTTGGTTTTCCTA
GGGGAGCAGAGCGGTGAGTACTCGGCTTATTCTCTCGGCTCGGAGCCGAGTCTTTTCCCCACGCCGCCCATTCAGCCAC
CCCACTAGGGACCCTCCCAGCCCTGGCTCGCCAAGGCCCTTCCACGCCCCGGTAGAGGAGAGGGATGCAGATGGGGAGA
TGGGGCTGGCTCGGGTGGGGCCGGGCTGGGGAGGACCAAGGGGGAAAGGAAGAAGGTGGTTCTGGGGGTCAAGGGATGA
GGGTGAGTGTGAGATCTGGGTACGGGTACCCGGTGCAGGTGCGTCCGGGAGGACCGAGGGCGGCGGCTGGCTCACCCGC
TCTAGGCGCCGGGCTCGCGGGCTCGCTGACTAGCTCGCACTGCGGCACAGGCTGCGGAGCACTGTGCAGGTGTCTGGGT
GCCGGCGAGGGTGTGGGCGAAGGGACAGGAGCCTCTCTTGGGAGAACGAGGTGGGGCTGGGAGCTGGTTGCCCCCACCC
CAAGGTTGCGCCCGAGGGGCTCCCTGCGGACCCTGCCTGGAATCTAGGGAAAGGACGCGTCCAGCTCTGGAGCAGATTG
CTGCTGGGAAATGGGGAACACGACACCTGTCCCTTTTCGAAAAGAGTGGGTGCAAGTGGTAGGGTAACTGGGCACTTAG
CTTCTCTGGCTTACATCCGACTGGGCAGAAGGTTCTAGACTCACTGTCCTTCACTAATGTGTTAGCCTCTTTGGGGCTT
AGGGGTGTGGATCGTGAGAGTGAAGATTCTTCCCATAGCAGGTGACTTGGGGGATGGTACAGAGGCGTCTCATATCTGT
GAGCTTGGCACTGGGCAGAGAAAGGCCTAGGCGACACGCCCTGCCTGGCTTCCCTGCCCCCTCTAGAGAGCATCAGTGG
AGCCGGTGGATTCTCCCACCCCCCATCTCCCAGCTCACCGCCCTTCTTGGGGGAGGGGAGGTCACCGTGGCAGCCAGCC
AGAGCCTAAGGAGGGGGAGAGTAAGGGTTTCTTTGCTGCCCAGGAGTCTCCCCTCCCAAGTATCTGACACCCAGGTTGG
TCCAAGGTGGGAAGCTCAGACAGAAGAGCAGCGACCCCTCTGATACCTGTGGGAAGGAGTACCTCCTTGAGAGCCTCGG
TCCAGGAGTCACATAACCAGGGGGTTACAGACATAAGCTGGGCTTCTGAGCATTTCTGCTGGAAGAGAGGGGGATCCCG
GGGGGGGGGGGGGCGGGATTCCCAGCTCTAGCTCTGTAAACCAGTTCTGTTAGCTGGTTTGGAGGCCAAGAGGAGGAAG
GCCGTGGGAGGACCTGGTGGGCCCAGGCACCGTGCAGCTATGACGTGTGCGTGTGGGCTGTGGAGGTCACATGGCCACC
TCCTGTCTGCTGATGCTCAGTACCTGAGCTGGAGGGTTGGGAGCCGGGTGGAAGTCGGGGTTGCCTGTCCCGGAGAGCT
GGGTTTGGGACATTTCACATCGTACCCAGCTCAGCTAGGTAGCCAGCTGGATCTGATTCCCTGTGCTTTGTAGATCCCA
AGTGTCACAAAGGACACCTCCGTTCCTTGCTGTGTGGAAAGGATTTTGGGAGCACCTCAGCCCTAGGAGGGAGCCTGCA
GGTGCACAGCAGCCTTGGGGGGTGGGGGGGGCTCTCAACTGTGTTGTCATTTGCCTGATTCCAGGCCTCCTGGACACTC
AGTTTCTGTCTCTGAGTAGTGGGTAGCTGGAAGCAGCCCTTATGCCTCATGTTTCCCCCAGTGCCTGGACTATGCTGGA
GTTCAAAGAATATTTGTTAATTCTAAATCTGAACACAGTTCCATAAAGAATCATATGTGGTGAGTTTGAATGAAACTCT
GGGCTCCCTTAGCAACTGCTGATGGGTGGAACACACACACACACACACACACACACACACACGCCACCCCCAGTGAGAG
TTCTGCCAACCCCTCCAGGTCTGGAGTCACAGAAGTGAGAGACAGCCTTTCCTCACATGCTCATGTGGAGAGAGAGTGG
GGAGGTCTTGCCCAGAGACCCACTGTGAGTTGTGAACACTTTGGGAGCAGGAACCCCCACTTCCATTTTCCCGTCTGCC
ATTTTTAACTAGAGTGTCATTGGGAAATAAGATGACCTTCAATGCGGAAAGCCAAGTCTGGAACCTCTTTGAGAGGATT
TATGGGCTCAGTTAGTTGGTTGTGGCCTGGTGGAATGCTTGGCTAATTGGTTAGGGGCAGGATTCATAGGCCCTTGGAA
CATAATCCATCATTGTGTTATTAGTGAGTTGTTTACCGCGGGTGTACAGAGCTTGTGGTGTCTGTGAGTCTCAGAAGTT
ATGTGTATTCCGGAGCCTAGTAGGCCGTGGCTGTAACCCCTTCCATCTTACCTCCTGACAGTTTGCATGCCAGCATCCT
CTGCAGCCTGTGCTGTGGAGGGCGGCTCCTGACATCTGGTCCAAACCCTACCCAAGCTCTCCCTTCCTGTGTGATCACG
GAGACCCCTCACGTTCCATACCAGGGCACTTGAGCCAACTGGAATCCGAGGCCTAAGCTTCCCTATAGAGGCCAGCTAA
TGGAGATGGGGGAGGGAGGCGATAAAAGAGGTTGAAAGGACACAACCTTCTCCTGATCTCTATTCCTGACATTGTGGTA
GCATCCCTCTAGGCTTGTGGACAGAGACAGCTGGATTCTAAAGAGGGGTACCAGGCTTGGAGCAGGCTAAGGTAGGAGA
TACCCTGGAACAGATAATCATAGGTAGGCATGAGGCCTTCAAAGGTACCGAGGAACTGGTTCAGGTAGGAAGCCTTTGA
GTGCCTGCTCTCCGGAACGCGCCTCTCGCCTGTGGACTGTAGTCTGACTGGCAGTGCCTGTGTCACATGGAGTAGGATC
CTGGCCAGGTGCTGTGGACTTAGGGTGAGGTGTTTCCTTGCGTCAGGTAGGTCATGCAATGCTGCTGGCCTTCAGGTCG
CTGTGTGGCGCCTCCCGATTAGCCCTAACACGGGTGGCAGTGGTGGCGAACCCAAGAGGGTGGTGCACGCCAGACTGGT
GTGGAGCATCTGAAAAAGACAGGCAAAGTCTGAGGGAGAGTGGGCCTGCGAGGTGTCCATCTTTCTCCCAAGTTATCAG
AGCCTCCCAGGGGATCTGGACCTTACCAGACACATCCTGGTGTGTGTGGTGAGGAGGGAGGGAAGGAAGAGTGGACAGA
CATGGGGGGAGGGGGGCTGTCTGCTTTCCCGGGCTGAGGCAGTAGGCCATCCGTCTCTATAGGCCTGAGTACAAGGAGT
AGGGGTAGATTTCAGAGAAACCCCTCTCTCCTTGGCCCAGCTCTGCAGAAAGTGTAGGTAGAGGCACGCCTGTCAGGAG
CGACTCTAACCTTCCGAACGCTACAGCCCTCTAATGCAGTTTCTCGTGTCGTGGTGACTCCCAGCCATAAACGCGTTTT
GTTGTTGCTTCATAACTGTAATTTTGCTACTGTTATGAAGAGTAATGTCAATATCTGATATACAGGATAGCTGATACGT
GATCCCAAGGAGGTCTCGACTCACAGATTTGAGAATGATGGGATTGCTGGCACCCGGTTGAGACCGTCCTATACATCCT
CTTCAGCTAAGGGTTAAGAAACAACTGTCCACAGACTGAGCCCTGTTTCCTGCAACCACCCCATGCAGCACAAACCGTC
CTGTCCTAGCTTGGTGGCAAGCCCACTGTCCCTTTTAGAAGCTTTTCTCCTTTCAACTTCCAGGCTTGTCACATGGACA
CAGCTTTGATTCTTTTAATGAACATTAAAAAAAAAAACCCAAAACCCCACAAAACTGGTTATGTGCAGTCCCATGACGC
CTCTTCTGTCTCAGCTAGGTAAGGATTTTAATTTAAGGATTTTAGGGTGAGTTTTAAGCACCCTAAGTGGGTGACCAAA
GCACGTTGAGAGGATTGTGTCTGAGTCATCTCGCTCCCTGCTCCCGTCTGTGGGCTGTGCGTGCTCACCGAGGATCTTG
ATTCGAAAACGATGACATCTTTGATGTGAGAGATTTGCTGATGGCCTGTCAGCAGATTAACAGTGAAGGGAGGTGAGGC
AGCTTTGTGTGGTGTTCCTGGCACCTGGCACTCTCTCAGGCCAGATTCTTCTTATCGGGGAGTTGACAGTTGCTTTGTC
TTGTTTTGTTTTTCCAGAGAATTGCATCATTATGCCATGGTCATGCCCAAGCACCTGAGATTCTCAAAGGGTTCCCCAA
CTCCCTTAATATCTCTGAAGAAATATGGAGGTGGAGTAGGGGCTCCTGTACTACCAGAGGTGGGGAAGGACACGGCAGA
CCAGACCAGATCTCTTGGAGGCTCAGACTCAATCCCCATGGTGTTCTGTGCCTTGCTTTCTCATCTCGGTTTTTTTCCC
TCACCTTCTAATTTCTCTCTCCCATCCCTCTCTCTTGGGTGCTAGTACAAGAGAGAGAACCTTGGGCGTTGCGTATAGA
CCTACAACCCTTGATTTTTTTTCCCTATGTTTAACAAAGTGCGTCGGAATGACACAGACAGTAAGATGAGGCTGTCTGT
ATTCCTTCTGTTACTATAATGAAACACCCGAGTCAGGCCAGCTTTATAAGGAGAGCAGATTTGTGGAGCTCACACTCTG
GAGGGTCAAGGACAGGGTGCTGGCATTGGCTCCATTCTGGTTGAGGCTCTCATAACAGATGACATCATGGTTGGGGAGT
GATTCTGAGGGCACGAGGTCATATTACCACAGGAAGTTAGATAACTTCACAATCCTTCCCCAACACTGGCTCCAAGGGA
TCGAACCCCTCTTAGCAGGTTTTCAGGCTTACTCTTTGGGGGAGGGGTTAGGTGAAGGTCAGGGGCTAGGAAGATGGAC
AAGGGTCTTACACAGGCCTCACTGGCTTTGAACTCCCTGTGTGAATGGGGATAACCTTGAGTTCTCCTCCTCCTCCACC
TCCTGAGTGCCAGGGATTGAATCTAGGGCCTCATGCATGCCAGATGAAGCACCAAATCCCCTGGTCCCGCCTCTTAAAG
GACCCGCTGCCACATGAGGACTGAGCCACATCCAGACCAGAGACTTAAAGGTTAACCCTCGAGAGAAAAATGTTGTTAT
TTATAATCCTCAAATGCTCATAAATCATTTTAAAATAGAACAAAATAACTTCCTGTCCTTTGCTTCCATAGTGCACCCC
TAAAACCAGTCTGTGTTGCCCTGACATTGCAGACCATCCTTAACAGACCTGAGAGAAGCGGCCTGTAGGTTACCTCCAC
CTGGCTCTCCCCACCCAACTTCCGCACCCAGTGCCTTTCACTGTGGCTTGACACAACAGGGCTCCTTGGTCTCAATATG
ATGACATTGTTGGCCACAACTGTCTGGGGAGCTGAAAGGTTTCGTAGAACAGCAAAACATAAACAGGATTGAACTACTG
TGCTGGACACTGTCTGTCTGTCTGTCTGTCTGTCTGTCTGTGGTCCTTTGTTGTTTCTTGCTGTGCAGAAGAGATGATG
GAGGAGCCCTTGCTGGAGGTTGCCAAGGAGAAGGACCAGACACGCCCTGAGATGGGCAGCTCTTTTGTTCGAGCCAGAA
AGACAAGCTGCTGGGAAACAGCTCCAGGCAGGGCCTGGGACTTGAAGTCCCAAGGGGACTGGGAATGGCAGGCGCTTTG
TTTCTAGAGCCAGGGAGCCTCCCCCCCCCCCCCCATGTTGGCTTACTTCGAAGGGCTCCTGAGGAGGTCTGTATTATAG
GTCTGGGCTTCAGAAATGAAATTTTCTTCATTATTTCTATAACTTCTGCTTGAAACTTAAGAGCGATCATTTTAAAGAG
TAAAATTTTTGTTGAATACTTCTTATCACTTTAATAAAGTAGCTTATTTTTAGAAGAAAAACATATTTATCCTGTTCTC
TTGGTAACGAGACCAGTGGGAGTCCAGGTAACTGGGGCTACGTACCTCGGCCTAGCATCGTATCCAGGGAGTGATGTAC
TCAAGGGACAGGCCTGGGTCCTGAAGAGTACAGCTGACAGTGTGGCCCTGAAGGCAGAGTTGATTCTTTAAAGTGGTCT
CCGAGAAATTCACTGAAGGGCTGGTTGCCCGTGTCCTTCCTCTGTGAACCTCAGGTCAATGCCCCGGGCTCTCCAGGGG
CACTTTGTACCTTCCTGGTCACTCTGTGATAATCATGCACTGATTGCTATTTTGCGGTTCGTGAGGCTGCGGCTTGGAA
AGAGCTGGTCCTGCCTACCATTAGTGTAACAAATTAGAGCTTGGAGTGCCGGGGTTTGGGGGACAGCTGAGTCAGGAGA
GTGCCTGCCTTGCCAGCATGAATAGCTAGCCGAGCTTGAGCCCCAAAACTCACAAAAAAAAGTCGAGTGTGGTGGCAGA
TGCTTTTAATCCCAGCACTGGGGTGGCAGAGGCAGGTGTATCCCTGTGGCTTACCAGCCAGCCAACCTGGTCTACGAGG
TGAGCTCAAGGCCTCCGGGTCAATGAGAGACGCTGTTTCATGAACCTTTGGATCAGGTCATTATCCAAGGCAGGGCCAG
GAGTGGGGACAGAAGAATATTGAGGACTTAAAAGCAGAGTCTGCCATGAATGAATGACTCAGAACACCTGTACCAAACA
CTTTGCTAAAGAGGAACCAGTAGATCACCGTGTAGCTCCACTGACCATGAAGGATGCTGGAGCCAACCACAGGGAGGAC
AGGCTTTGGGGAAGGAGGCAGGCAAGCTCCCCACGAAGGAGGCTGGCAGCCCTGGCATTGTGTGGCAGGCAGTCTGTCT
CCCCACACAAGGAATTGCTTACTTTGGATGGCCTGGAGAGAACCAATAGAGAATCAGCCTTCAGCCTACTTCTACTGGG
GACATGCTGCTGGGGACTGTTCCCAACAAGGGGAAAACCAGTCAAATGTGGACCAAGCCCTGCTGGGCCTTGTCTTGCT
CCTGGGACTGCCGTGTCCTGGAAACACAGATGGTTTTTGCCACCTGTTAAATGAGCCCCTGCTCCACTCTGGCTCCCAA
GGCTCCTGGGTACAGTGGTTTCTTAGGCCAGATGTCATTCAGTGCTGGCATTAAGCAAGATGTCAGGCTTATAATGATA
CTTCAGCCTGGAGATGAGCATGCCGCTGGCGTGAGGTGCTGCGGAGAGGCTCTCCCGATGTGTGCTTTGGTCCATCCTG
TACTTCCTGTCACCAGAAGGCACTTCTTCCACATACGGATGGCCTTAGAGGAAGGCAGCAAGGAAGGTACACCTCCCAG
GCACTCGGTGCTCAGCACAGGGAGAGAGCCAGAACCAAGGTGGGTGGTAGTGACCTTGCCTAAGCTCCTGCTCCGACCA
TCACTGTGCCGGACCTCCTGAGTCCTGGGCATCTGGCCCGACTCACCCCCGTCACTTGTCTGGGTGGTGTCTGGGGTGC
AGTAGAACCGTGCACACTCGTTCTCCTCAGCTGGCATGACCTTGCTGGAATTTCACAAAGATCAAACGCATGAACACAC
AGCATGCAGGTAAAGCTCGAGTACCAGCTGGCTTTGTCAATAAAATTGTGACGGAGCCTCCCTCTCCCCCTCCTCACCT
TGCAGCTGTTAGGGAAGGAGTAGAGATGCATGAAGCATTTCTGCAGGTAGGCTGCACCTCGCAGCCCCGGGACAGCACA
TCCCAGTTGACAGCTGCAGAGATGGAGGCTCTGAGAGGAGGGGCTTCTGTGTGCCCAGCAGAGCCCAAAGGCAGACCCC
ACTCCGCAGGAGAGAGACTCAGGCCTCTGGCTCAGTGCTTGCTTGCTCCTGCTCATCGCCCGCAGAGGCGGGAGGCAGC
ACTGATATACCAGTTTCCCCACGTGAGGGCTACCCATACCCTCATGAGCACCTCATTCTCACTGGCAGACCACAGGGGC
AGAAGCTGCTCTGGTGTGACCTAGACCGTTCAGATCAGCCTAAGGTAAGCGGGAAGAAGCCCTGGTCCTTATAAATAGG
AAGCATTAGATTCAGAAGCAGAGCTATGGCTGTGGTCTGCTTGAGCAAGTCGTTTTATGGTGAGTGGGAAAGGCCTGTA
GGCATGGGGATGCGGCAGACACAAGGGCCCCCTCTGTGCCAAGGCAGGAGAGGGCTTAGGGCCCCTGAAGAACTGAACA
GGTTCAGGGCTGCTGGGACTCTAGTGCCCTGCAGGTGTGGGAGAGTAGCAGGTATAAGGGTTGAACCTACAGAAGATGG
CAGGGCCAGCCCGAAGAGGCCTCCTTGCCTTCCCACACTTGGTGTCTGAGCCTTTCCTATAGAGAGTGGTGACCCCTGG
AGGCCGGGACAGGGGAGGCCCATGCTCATGGATTAGGAGACAAAGGCAGAGTGTGGCATATTTGAGGGTCCAAGTGACT
GACCTGGGGTCAGACAGGGGGCATTTGGGGAAGTGTAAGCCCAGCTTCTGCCTGGCTCTCTGGCCTACTCAGTTGGGTG
GGTCTGTTCTCTCAGTTTGGTCTGCAGAGACAAGACTCAAGACAATGAGATGAATGAGGGAGGGACTCCCAGCTTTCTC
CATACTGCCCTCAGATGTCCTAGAACCAGCCCCTGGGAGCTCCCCCATCTACACTGCCTCCACAGCAACCTGGGGTCCC
TGGATGCTTTGGCCTTGGTGACATGGGTGTGACAGTCTGCAGCAGTCCTTCCAGACTTCCCTCTGCCCGTTGCTCTGGC
AGATGTGGCATCTGATGCAGTGACGATCGGGCTCTGATTAGCCTCCTGCCGTTCCTCCTCTTTTGGGGGCCCTTGCCAC
ACACGTCCTTTGCCTTCTCCTGTGCTGCTTTCCTTTAAGGTTAGGAGATTTGGTCGCACAGCGCAGATGAAGAGAAAGT
GCTGTTGTCTGCCTTGACGACTGAAACTTAAGCTTAAACTGGCTGCTCCAAAAGCCAAGGTGTTTGAGAGCCAGGGACC
AGAGTGAGTGGAGGCAGAGGACTGCCACTCTTGAACCCACCCCTAGCTGAGAAAGAGCAGCCTATTGGGATCAAATGAG
AACAGGTTTTCAGATGACCCATGACCTCTGCTCTCTTCCCTTCCTGCCTCAGTAGTCTTCCAATGCAACGGAGCACCGC
CTGGTATAGCTTTGGCAGCATGGCTGTAGTTCTGATTGGTTCATTTACAATGACAGCATCTCATAGTGACACTCGCCCC
TTTAGCAGCACCAGATCTATCATCTCTGTGGTCAGGGTGGGTGAGGACTCTTCTCTGTGCTGGTGTTCAGCAGGGGAAA
GAGGGACAACTTTGGCCCCTTCCAGCCTCCCCTGCAGGTGTGGGAGCTGGAGACCCATCCCTGGTTCTGGAAGAGATTG
CTGTAACTGTGACCAGCGCACTAAAGCCAAGTCCCAGGGGACAGTCAGATAAGCTTCTGGCTCACTCTGAGAGTCCCAG
TGAAACATCCCACCTTGACCCTGTGGTGAGCAGGAAGTAGGTCATAGGACAGAGCGGTGGAGCCATTTAGGACACGTTT
CTCATTTTTTTCCCCTCCTGTCCAGTATAGTGAGCAGCCCCGGAGGGAGCCACAGGTGTAGCCAGAGGGAAGAGAGACC
ACGGGTGTGCTGAGTCAGGGAGAGTGTGCTTCCTGCTTCCAGCACAGGCCAGGCTCTGCGGCCACACTAGGTGTGCCTT
CAGGGCTTGCTGGCTTCCTGTGAGGCTTCCAGAGCCAAGATGCTTGGTGGTTCTAACGATGCTATCCATCCTGGGATTC
TGAACAAAGTCCGGTTAAAGACTGGAGGTTCTGTCAAACTGATGCTGATTCCTGGGCTTTGTATGTTGTGACTGTGAAG
GGCAAGAAGAGGAGTGGGGCAGCAATGGAAAGGAGGACTCTGCCTGGTGCTCCCTGGAGCACCCCCACTGCCTGAGCAC
TCCCTGTGTGTGTTGCACCGTGGGGTGATGCTAAGCCTCATCTCTCCCTCCTCCAGGGGTCTGCGCTGCTGCCGCCGTG
ACCCTGCAGATGTACACTTATCTGGCCACTGTAAGAGAATGCTTCCAAATTGTTTTTAAACCCTCGGCATATCCTGTGT
GAAGCCCTAGAACCTGTAAAGTTCTGAATTCTGCCTCACTGGGTTCCCTTCCCCTTCTCTACACCCTACCATAACACTG
CAGGCCACTGCCCAGATCACAAGGAGCAGGAGGCCTGACAAGGCACCTGGCCAGTCTCCCGTCCTGAACCTTTCCTAAC
CACATCAGAAAAATGCCAGAGCCCCACCTGTAGAGCCAGGAAAAGTCTGCTCTTCTCTAGCTCTGAGAACAGAAGAGAT
GCTAGAGCTGGCATCATCTGGTGTCTTCTGGTTGGGGGGGGCGGGTATGGCATGGGGGTCTGGGCAGAGGGTGACCAGT
GCCTGGACCAGTAGACCCTTCAGAGAAATCCTCCATTCTGCCTTCATCCCAGCAGGCTGGGAGAAATATCTGCTGGTTA
GGAGAACTTGTTCCAGGGGATCAGTCCAGATCACAGCAGTAGGAAGGGGAAGGGAACCACTTGGTAAGTGGAAGGCAGC
CCGTTACTGTGAGCCCCATGTTCTCAGATGTCCTTCTCCTGAGTGCAGATAGGACTTGGGACTTGCTGCTAGCCCGTAC
AGTATGGCAAAGGTCGCGGGAGGTCACTCATTTAATTGTGTCATTGGGAAAGGTAACAAGATATTTGTCCCTGGATGGT
TTCATTTTATTTATTAATTAAAATTTACTCTCTAACAATTCCACATGTGTATGCAGTGTACTTTATTCATAACCACTTA
CTTTCCCAACTTCAGCCTCCCCCTCCCCCCCTCAGGACCACGCCAGGTGACATCGTCCCCTGCTCGCCACTATATTTTT
TTGAGGCAGGGTCTCCCAGTGAACCTGGAGCTCACTGATTGGCTAGATTTGCTGTTCGGTGAGCCCTGGGCAATGTTCT
GCCTTTGCCTCCTGTGCTATGATTTATAGGCCACCGATAGCTTTTCACACGGGAGCTGGGGATCCGGTCTCAGATCCTC
ATGCTGGTGTGGCAAGCCCTTTCTCCACTGAGCCATCTCCCCAGCCCTTCTTGGTTGGTCTATTAGAAAACTGTCCCTC
CGTGCTTCGGAGAAATAAGCTGCCATGCTTTGGATAAGTGTGTGTAGAGAGGGGCTGGAAACTGTCTGTGGCTGACCTC
GAACAAGAAAGTGTCTCCAGTTTTATAAGCTTGGAGGAGGACTCTAACTTCGGAAGAGAAATACGGTCTGGCAGACACC
ATGTTTGTGATCCCGTGAGACCCGAAGCAGAAGGTCCTTCAACCCATGTCTGGACTCCTAGCTGGCAGGGACTGAGAGA
TCATAAAAGTTCACTGTTTCCAGCCATTGTAACAATTACCGATGGCAGTCGGCACACAGAAATAGATAGTTTCTACAGA
GGAGAGAAAGATCTTAGGGTGGGGAGATGCCTTTATCAGAGAGGGAGTGGCATTCTCAGGAGGGACCCCTGACCAGCCC
TGAGTCAAGCAGCTACCCAGGCCCAACCTGTGAACCCCTGATGTGTGATCTGCTTATGTTCTTCATGTGTTCCTGTCTT
AGTCGGGGTTTCTATTCCTGCACAAACATCATGACCAAGAAGCAAGCTGGGGAGGAAAGGGTTTATTCAGCTTACACTT
CCACATTGCTGTTCATCACCAAAGGAAGTCAGGACTGGAACTCACGCAGGTCAGGAAGCAGGAGCTGATGCAGAGGCCA
TGGAGGGATGTTACTTACTGGCTTGCTTCCCCTGGCTTGCTCAGCCTGCTCTCTTATAGAACCCAAGACCACCAGCCCA
GGGATGGCACCACCCACAAGGGGCCCTCCCACCCTTGATCACTAATTGAGAAAATGCTTTACAGCTGGATCTCATGGAG
GCATTTCCTCAACTGAAGCTCCTTTCTCTGTGATAACTCCAGCTTGTGTCAAGTTGACACACAAAACCAGCCAGCAGAG
TTCCCAAATAAACCTTGATTCGTGGCATTGTTCCCTGTCAGATGCAGGACTAGAACATTCTGTAGGGCCTCTGTCATGT
CCTTGTGTTCTGACCCCACTCTGATCGATGGCCCTCCCAGGAACCAGGTTTATTGTCCCTTAACCTCTCTGCTGACCCT
TGGCACTTCCCATTGCATGTTTACAGTGGAGCCTTAACAAGTGAAGTCTTCCTGGTCTGGTGACACCTTGGTGACCTTG
TGTTTTTTATTTTTATTTTTTTCTTTTTGTGATTTTTCAAGACAGGGTTTTTCTTGTGTAGCCCTGGCTGTCCTGGAAC
TCACTCTGTAGACCAGGTTGGCCTTGAACTCAGAATCTGCCTGCCTCTGTCTCCCAAGTGCTGGGATTAAAGGTGTGTG
CTACCACTGCCCGGCGACCTTGTGGTTTCATATCAGCAGCAAGGACAAGAGTAAAAAGAAGAGCTTCGGAGGGTGGGTC
TCAGTTGTTCATTGGAAGAGACAGTGCCTGCATGTGGCCCTGGTTAGACAGGTGGCTTCTGAGGGTGATTTCTCCGTTG
TGCATTGGAAGAGATGGTGCCTGGATGTGGCTTTAGTTCCGTACCCCCCATTCCTTCCTCTGGCTTCACAACTCTCTGG
TAAGATCTGCATCAGAGTCTTCTGTGGTTTGGGCCATTATGGGGCTGCTTTTAGGAATGGCTCCTTAGAGACCTTGAGC
TTACAGAGTCAGAAGAAGACTAAACATTTGCTCTGGTTCCCCGTTTCCCCATCCAGTCTAGTGCCGGACAAGCAACCAT
CTGAGTTCCACAAAACTGGAGGAGACACAGCGATCCTTCCTGTATCCCAGATGGCCGTTATCCACTCACAGGCCCAGGG
CCCTGAGGTCTCCAGTGTGTGTTCCTTCCTCATGGTACTTTGGCAGGAGGCCTGCCTCTATGCAGGTGTCTGAGGAGCA
GGAGATGGTCAATTTTGTCTGAATGGGAGGTCTAGAAGTTTCTCTCTTGCTCTTTTTTTTTTTTTTTTTTTAAAGATTT
ATTTATTTATTATATGTAAGTACACTGTAGCTGTCTTCAGACACTCCAGAAGAGGGCGTCAGATCTTGTTACAGGTGGT
TGTGAGCCACCATGTGGTTGCTGGGATTTGAACTCCTGACCTTCGGCAGAGCAGTCGGGTGCTCTTACCCACTGAGCCA
TCTCACCAGCCCTCTCTCTTGCTCTTGTGTTCCCCTTTATAGCTGGCTTGAGCAAGGTAGGCCTGAGCCTCTATCCACC
TCCTCCTGGGCCAGCTGAATGTTGAGCTGCTGTGTGAGGGTCTGTAGGAGGACAGGAGAAGAAGCAAGGGCCCACAGAG
GCAGCATCAGAAGCAGCCCCCTGTCTGGAGACTAAGAGCATCCCAGTTTGCCTCTTGGCACGATGCTCTACCCCTGTAC
CACAGTTCCTTTGAGAAGGGAGTAGACTTCTGGGAAGGTGTTTGCCAGCATCGGTCTTCAGGTCCCTTCCACATCCCTG
AGCAAGCTTTATCCCATTGTCATGTCAAAGTCGTGACCCTAGTTTGAGGAGCTTTAGGTAGTCAAAAGTCTCTCTGACA
ACTTAGGATGCATAGCCATCCATGCACTCTGTCCTCCATCTTGCCACCTCACCCCTTTCTTGTATTCCTCAGACTTTTA
GCATCCACAGCACCAGCCTTGGGAAGAAAAGGGTGAATATGCCCATTACTTTGCCAACATTATGGCTGGATGAGCCAAG
ACACCTATTAGATAAGCTATAAGCTTGCAATAGCAGGAACTTACATTATGGCTGGATGAGCCAAGACACCTGTTAGATA
AGCCATAAACTTGCAATAGCAGGAACTTCCTAAGGGGGCAGTGGGAATATAGCATTGCTATCTCTCTTCTCTGCAGTAT
GTTGTGTTCGTGGTGAACCAGTTCTGCACCGCATGGATGTGTGGACACAGTTGGCCTGGAGGGGCTGGCTGGAGTTGGG
CTGAGCCTCAGAGCAGTTGAATGGGAGCACATTTGCCCATTGCAGTGTGACTTTTCCTGGGAAGCCCAGGGTTGCTATG
GGTACGGTGGATGGGGACCTGCCAGTGTGGTGTGGCTGGCACTCAGATGTTTTTACTTGGCCCCAGAAGGAAGACACCA
TACCACTCTGAAATTGCTATGAGTGTGCAATGCAATGAGGCAGAAAGGATTCAGACCTGGGTAGGTCAGCTGGGAGTTC
TGCAGCCTACAGAGGGTGCCAAGATCTCGGGAGGGTCTTAGAAACCGTGAAGGTGATGTCCTTGATCATCAGTCCCAGT
AGCGAGAAGCCCAGGGAAGTCAAGACGTTTCCACATCGACCCATTGTATTGGCCATATATGTGCATACACTGTCTGTAT
GTGTACTACATACATCTCAAATGTGCATACAGCAGTGGCACCCTGTGATAAGAGCTCCCAGCAGCCACTGACCTGGCTC
AGTCCTGTTCGTCTATGAGGCTTGAATAAATGTACAGTAATATTCCAGTTCCTTAGGAAAATTTCATATTCATCAGGGG
ATATGCAGTCCTTAACAGAGTGAACAGTTCTTTCAGAGGACCCAGGTTTGGTTTCCAGTGCCCACATTGGGTGGCTTAT
GACTACTCCAGGGGTTCTGATACCCTTACTCTGGCTCCGGGGGTTCTGATACCCTTTTCTGTCCTCCTCAGGTACTTCA
CTCACTTTGAGTACATGGCCCCTCACATACACGTGTACTGAAACATGTACTTAAAAATAAAATCTTACAATTTTTATAT
TCAGCAGCACATTTGTTTAATCAGACAGAATGCACCATTTCCTAAATATATCGGGTATCTCAGAGACTGTGTGTATATA
AGCATATATGTTACATATTAATATATAATATTTCCCCTTTGCTGTTCATTTTAGCATACTTTTAAGCTTATAAAAAAGT
TACAGAAATAATACCAAAGCTTCCCGCCTGCCTTTTACCCAGGACTCCCAATTTTTTAATTTTTACAACTCTCACAGAG
TTCTCCAGACTTTTGTGAGATAGATATTTCTCTCTCCATTGAATGTCTGAGGAAGCTGAAACCCAGAGAAGGTGGTAAC
TGACATAAGATCACACAGCAGACCAGAGGCAGAGGCAAGATTAAAACCCAAGCCCGTTGGTCCTTAGAGCATCTGTGTG
AGCAATGAGGCTGTGTGACTCCGTTGACGTCTCCTCTTCTGCCCTGTGTTTCTTTTCTTGTACAGTAGATCTGCGAGCA
GTGAGTTATCTCATCTCATCTGTCTTTATCTCACTTACATTTCTGAAATGGTTTTTTTTCCCCCTGGGGGTAGAATCTG
GGGCTGCCGATATTTTGAAGATGCCCCTTGCTCACTCTGTCATGGCCACTGGAGCCCTAGGCCAGAGGCCAACTCTGAA
GGTTCCAGTGGGCCAGGTCCCTGTCACTTACTCCAAAGAAGGCAGGTGGGATGGCGGAGATGCAGCAAGGAAGGATGTT
AGTCAGCACTGCTGTGCGGGGAAGCAGCCTTTGTTAAGCCTGTGCAGTCTGTCTTCTGGGGACGACTCGGGCTTTAGGT
TTAAAGAGAGGGAGATTGGGAGATACATAAGTAAGCAGGCTTGGTTAAACTGGTCTAGGTGATTATATCAGTTCTGGCT
CTGCCAGCTGACTGAAGTCCTTCAAGGAGGCTTCCAAGGGAAGGGACACTGCAGGCAGGCATTCTGTCCCCAAGGTATC
CAGGTGGTGGCAGGTTTAGAGCCGTGAGTGGCTACTTTCTGGTACGTTGTGTTTCATTCACTTTGTTTGGGGTGGGGGA
GTAGAGTGTCTTGAACAGAACTTTGACAGGAAGATGTTTTTATCTGCATGCTTTCAGGCTTGAAGAGAGCGAGATACGT
CACTGACGTTTGCGCAGACCGCCCCTGAGTAACTAACATGCCTATGTGCAGAGTTAGGCAAAGCCGGAACTTGAGTCGG
AGCAGGACCTCACTGTGTAAGAGACCAGCCTACTTCTGCCTCCAGAGGGCTGTTGGGATTAAAGGCGGACACCAGGGTA
TTCAACTCTGACCAAGTTTAAGACCAAAGAGGAAGATGTGAAAGTGAAGGCTTTTCTCCTGCTTTAGTTTTAGTCTAGT
TTTTGCCTCCTGGGGCCAGTGAGGAGCCAAGTTTCTTGGTAAACGCAGTTTCCACCTGCCTGTTGTATCGCTTCAGAGT
AACAAGGACTCTCATAGTTCTCTCAGGTTTATTGTTATTTTTGTTTAAATAGTTACCTTTAAAGCCACTTAAATGACAA
AAGTCTTGGTATCTGCCCACGATTGTCGATTGTCCTTAACTCTCTTTTGTGTCTGTGTGTTTCTACCTAGTGTCATTTC
CTGTATTCCTGAAGAATTTCCCAGAACAGTTTTTGTCATGAGGATCTGCTAGTGATAAATTCTGTTAGCTTTTGTATGT
TTTTAGATAGATAGGTAGGTAGATAGATAGATAGATAGATAGATAGATAGATAGATAGATAGATAGATAGATAGATAGA
TGGATGGATGGATGATAGACAGAGAGGCCTCTTTATCGTGCCATTGCTTTTAAGGATATTGTCCCTAGGTATAGAATCC
TACGTTAATATTTAGTGTAAGTTTTTACTTTCAGAACTGTTTTTTTTTTAAACCTTAGGACTGGGAATTGAATCAGGGC
CTAGTGAATGTTGAGCACTCCGTTGTCTTCTTGCTTATATCGATTTAGGGAAGAGCTCTGCTGCCCCCTTGTCTTCGCA
TCTTGGTGTCACCGTCCAGCTGGCTTGAGCACCAGAGGCATGATTGGACAGGTCAGAGTGGAAGGCTGGAGCCTCAGAC
TTGGAGCAGTAGCCGGAGTCCCATAGGGGATGTGCCCCACCCCCCAGCCCAGGCCCTGTGTATACTTTCAGAGATGTCT
TAGGGTTTTGCTGCTGTGAACAGACACCGTGACCAAGGCAAGTCTTTAAAAGACAACCTTTAATTGGGGCTGGCTTACA
GGTTCAGAAGTTCAGTCCATTATCATCAAAGCAGGAACATGGCAGTGTCCAGGCAGAGCTGAGAGTTCTACATCTTCAT
CTGAAGGCTGCTAGTGGAAGACTGACTTCCAGACAGCTAGGGTGAGGGTCTTAAAGCCCATGCCCACAGGGATACACCT
ACTCCAACAAGGCCACATTTCCAAATAGAGCCATTCCCTGGGCCGAGCACATACAAACTATCACAAGAGGTTTCTGCTA
ACCACTGGCTCTGTGCAGCTGGGAAATGGAGCTTCTTGGTGGACTCTTCTCCCCCTCCCCTCCCCTCCCCTCCCCTCCC
CTCCCCTCCCCTCCCCTCCCCTCCCCTCCCCTTCTCTCTCTCTCTCCCCCTCCCCACTCCTATCTCACACTTCAGCCTT
TGAGACCTCCAGTCACAGATAGAGAAGACACTGGACACTGCCCTACAGCTAGCTCCCTGGTATTTTGTTCATGTTGATT
CTTTTATAGCTCATCTTTGATAGTGTTTATCACTGTTCGAAAGTTCATTGCTGTTCTCTTCTGTGATGTGCAATCATCT
TTGACATCATAGTTTTCACTGCTGGGATTTTGATTTGTGTCTTTAAAAACCTTTTCCTTGTTTCTGTTTAATTTTTTGG
ACATATGGAATGCAGCAATAACAGTCTCATACGTAATGTTGAAAGACCCTCGTTTCTGGGGAGACTCTTGCTCAAGTCC
TGGGATGAGCTGACGCCCCAATAACTCGAGAGAAACCGTTCTTGATGCAATATCACAGGAGGTTTATTTATCAGCATGC
TGAGGCTGAGCTCGTAACCCACACAGGGGCAGAGGAGATGACCCCCAGCAGTTGCAGTCGAGGGTTTTTAAAGAATAAA
CTGCAAGGTGAGGGGAGGATAGGACCACAAAGAATGGGGAAGCTGAGTAAACACTGAAAAATGGGGATGGTGAATTACG
GCTCATCTCTCACGGAAAGGTTACAGGCTATCTTTGGCAAACATTCTTGGTCCCTTACACTATGGGTCAGGCACCTGGG
TGGGTCACCCAGTGGTCATCATTCTCTCAGGCTGAAGGCGAAAGAACAAAGAACTCCATGCTAGGCTTCGTTTCTAGGG
AGTCTAAGAAACACATTGAGTTGGGGGTCTTACAATGTCTTTATCTGCTAATTCTACTGCATCAGTTTGGGTTTGGTTC
CAGCTGATTTTTGTCTCTCCTTTTTTTCCCCCCAAAAAAAGATTTATTTATTTATTTACTACATGTAAGCACACTGTAG
CTGAGTTCAGACACTCCAGAAGGAGGCTTCAGATCTCAGTATGGATGTTATTGAACCAGCATGTGGTTGCTGGGATTTG
AACTCCAGACCTTCAGAAGAGCAGTCAGTGCTCTTACCCGCTGAGCCATCTCACCAGCCTTTCTTCTCTCCTTTTATGT
TCCCATTTTCAGGCTTCTTTGCATGCCTGGAGTTTTGGGTTTTTTTTTTTTAAGGTTTTAATTTTTTATATGTATGGGT
GTTTTGCCTGCAGGTATGTTTGTGTACCACATGTGTGCCCAGGACCCAGAAGATAGCGTGGAATCCCCTAGAACTACAG
TTAAAGATATTTGTGGGTTCTAGGAATTGAACACAGGTTTCCTGGAAGAGCAGACAGTGCTCTTAGCCTCCGCACAACC
TCTCCTGGTGATTTTCTTTTTTAAATTGTTCAGGTTTATTAATTAGAAGGTGCCATATCCTGACTCTGTCTTCAACAAT
TATATTCCAGGCTTCTTTTCTTTCTTTCTTTCTTTCTTTCTTTCTTTCTTTCTTTCTTTTCTTTCTTTCTTTCTTTCTT
TCTTTTTTTTTTTTCTTTTGGTTTTTTGAGACAGGGTTTCTCTGTATAGCTCTGGCTGTCCTGGAACTCACTTTGTAGA
CTAGGCTGGCCTCGAACTCAGAAATCCACCTGCCTCTGCCTCCCGAGTGCTGGGATTAAAGTCGTGTGCCACCATGCCA
GTCTTATTTTCGAGAGTTATGAACAATCTTTTTTGGCACAGGGAAGGAATTATCTAAGTAATTAAATAAGGGCGGGTAC
TCCTGGCACACTGTGGTTCTAAGCCTGAGAATACAACTGTTACCCTCATGCTGGCTACCCCGGCTCTCCTCTGCCTTCC
CACCACAGTAAGCAAGCAGCCAGACCTTAGTTCTGTCCTTTGGCTTCAGGACTCTGGGCTGATGGGAGGAAGTGGGACG
TCACTAAGATTATGAAGCCCTGGGGTAAGAGGATTCTGCCCACAGCAGTAAAGGAGTCTTTTCTAGAACTTCCATCCCA
CAGTATATTAAAGTCAATTTGGGTCTTAAAGACCATTTGGCTCAGCCTCAATGGAATACCAATGAGCCAAGGCAAAGCC
AAGACGTGTTCAGGGCACATTGGCCAACTTAGGCCTCCATCATTTGACAGGCAGCTCTGGCTGGGTCTTGATGATTGAG
CAAGTCACTGTTATATCAATGAACCCATCTCACTCATGAACAGTGCCTTTCTCAGTTCTGGACTGTTTGTCCCACATGT
CTGTTGTGGGACACAGTGTCTTTATTTCGGTAACCTGAGGCCTTACTCTGCAGAGCCACCTTCAGGCAAGCCCGTCCTG
TGTTTCTAGTTCCTGGTTTCCCTTCTTTAGCCCTTGACCATGTGATGTCCCCTTCCCTTTTGTTGTCCACGTCTTTCAG
TCACTCAGTCCTGTACCTACTACCACCCTGTATGCCTCCTGACCTCAGGTGATAGAGGTTGGGGTCGGGGCTCTATGTC
ATTCCCTGACCTTGAACTGAGAAAGCCTCAGGTCAGAGCTCAAGACCTCTTCCTGATCCTGGCCTGAGGTTGGCTTTGG
CTTGTTTTAGTGTCGTAGGGTTAAGGAATGGGACACTCCTGTAGCTCATGCACCCCAAATCATTCATTCTCACAGTGGG
GCTGGCCAGGAGTAATGCCCGAGGTCTATTTAGGATTAGGGGAGAAGAAGAAATCTCAGTTAGGTCTGGGTGGGCAGGG
ATGATTTGGTGTGAAATCTCTTGAGGCTGTGGGGAAGGAGAGATAGAAGCAAAACTAACGGCTTGCGAGCTCCCAGAGG
GCTTTGGAGGGTAAAGAATGGACTCAGAAATGTGAAGTACTGCATAGTAGTCTGTGTGGGTACTCACCCCACTTGATGC
TGGGTCTCCAGCGCTTGCTTTATAGCCCCCAAGTTTGTACCTTTGACTGGCATCTCCCCATTTCCTCCGACCGTGTGCT
CCAGCAATCACCTGCAATTCTTTGTCCTCTGTAGATTGAACATACAGGTGAGACCATGTGGCTGTGCTGTGTCTTTTTG
TGTGCACAGTATTGTCATTACAAAAAAAGGGTATCAGTGGCCCATGCACACACATAGGCATGCACGCACACACATATAC
CACAGGCACACGTATACACATGCCAGGAAGGAAGCTGTGTTGTGATGAATACATCAGCTGGATTAACTGCCATATCCCT
GCGTACATATCTATAGAGAGAGGGAGTTCTGTCAGAGCATCACCTCCTATATGTTAACTCTTTATAGCATTGACTCGTC
AGCTATGCCTCCGTACACCTGGGGGTGGGGAAAGAATGGCAGCTGGAGAACACACGGATGAGCATCATGCAGGAAGGTG
GCAGAGCCCTCCCTCTGGGCAGCCGGAGGCCCGGGTTGGGCACCTTTGGAAGAGTCTCACCTACCTCAGCCCTTGGGCA
GCTCTTCCCTCCAATTAACTTTCTACTGAAGGAGGAGCCACTGGAAAAGAAGCAAGACAGCCAAGAGTGTATGTGTAAA
ATGGGAAACTGAGGCTGGGCCTCCCAAGGCACTGTCTGGTGGCCGTGTGCAGGCTTAGCAATCCATTGTCATTATGTCA
CAGAGCTTTGAGGAGGGTGTCTGGAAGACTGACCACAGCATACCTCAGGCTCCTAGACAAGGGAAGCAGGCTTGTCTGT
AGTATTAGACTTTGTGGGGAACAAGGAACTTTTATTTTGCCCTTCTGGTTTCTGCCTTATCCTGTCTACATGGCTGAAG
AGTGGGTTTCTTTTTTATTTGACAGCATTTTATTTTTAATTCTTCTATTAATTCATCATCACTATTGAAATTATGTATA
TGTGTCCAAGAAGGCCAGAGGTATCAGATCCCCTGGATCTGGAACTGGAGATAAAGGTAGCTGTGAGCCACCGGACATG
GGTGCCAGGAACCAAGCTCCGGTCCTCTGCAAGAGCTGTAAGTGCTCTTAACCCTAGAGCCATCGCTCCAGCTCCTGAG
AGTTGAATTCTGTGTTGCTAAGCTCTTTCTTTGGATCCCCTGATCGATCCTGCTCTTTCTTGCTCTCACAGAAGGGCTG
TAATCCTCAGGGATTGCAATGGCTTCAAGGTCAACACCCAGTCAGGGCCACATAGGAGGCCAGAACTCCCTTCTGTTGG
CCTGGATCCCCACTTCTCCAGCCAGCACAGAGGATGGTAATGAAGAGACATCTGAGTCAGGACAAGCTTCCAGAACACT
GGGCTTAGAGGAAGTGGGGCTGTGGGGGTGGGGTGGGCGGGGAGACTGAGGCAGGAACACTCAGAAGGGCAGAGGCTCA
GGCATGGCCAGCTCTGGCTGGTATGGAAGGGCCTAAGCCACACTTGCCTGCCCCATGCCTTGCTACCCTCAGCCTCCCT
CTTTGTCCTGCCCCCCATCCCCTTGTTCCATCTTTACTGGCCCCCTAGTGAGGCCCAGGCAGCTGAGCATCCGCTGGTG
GAGGGAATTAACATACTTAATTAAAGTGTCCACGAAGAGCTTTGCATACTTCTTAATTACTGTCTGAGTCTGTGGGGGG
AAGGTTTGGAATGGGATTTTTTTTTTCACCTGTTTCCGAATTTAGCTGACAGTGAGCCAGCTGGGCCCTGAGGGCTCAG
GTGGGAGCTGTCAACACCGCTTTGAGCTGGGGTGGCAGAGCAGGGTGTGGAGGGGAATCCTGGCCCCAGGCACATTTGC
CTTTCCGCAGTCAGAGAGGGCTGGGGTTTCTGTTTCTTTAACCCAGAACAAAAGGAGACAAGACTCAGACAATGGTAGC
TGGTGTCTTCTCAGCTCCTCTCCTCCTCATAGGGCCTGAGTGCACACCACACCGCCACGACTGGGCCAATTTCAGGGTG
CCTGTTGTGCAGAGGTTTCAGGGGGTGGTGGGGGCATCTTTTGGGAGTGCTATGAAACAGTGACACGGGGTCAGGATGG
CCCTGGCCTGTCACTTCCGGTTTCAGGCCCAGGCTGTGAGTGAGCTCTGTCCATCATCAGGAGGACTAGGCTGAATTTT
ATCTCTGTCCAGTGCTGCAGAGCAGTCAGGGACAGTAACGTGAGCTTGAGTTGATGGCAGGCTGCAGGCCCAGGCTCTT
GTAGGTGGCACAGCTTTGGGCAGGCTTTGGCAGATTTTCCATCAAATGATTTCTGCAATGGTTTCTTTTGCCCTCTCAC
TCCCCGGCCCTAACAGCAGTCTCTCCACCCACATTCACACTCACTTGGAGAGGAGAGTGAGGGGGAGGTGTGTCCTTCA
CAAAGTGAGACAGCAGCAGGACGTGGGTCTGGAACTCACCATCTATTCAGCTCTCATCCTGTGAGCCAGGCCCAAGCCA
CACCCAGTGTCCTCATGAGTACTGACTCGGGCATGCCACCCGTGGCACAGTGTGGGTGGATGACGTGAGGTGAAGGGTA
ACCCCATCACCCAGCCCTCAGATCTTCACCACTCCACACCAAACCAGGTGTCAGCTCCCCTCAGAGAGGATGTGTGCTA
GGACCGCCCAGCCCAGTCACAGTGCAGCCCCTCCCTGAAGCTTGGCAGGTCAGGTATTTATGGCGGGGTGTAGCTCCAC
GTGGCCAGGGCTGTTGCTGGAGAGCAGCCTGCTTCCTCACTAAGAACTGGGCTCACAGGATGAACCTGACATAGTTGGC
ACCCAGTAGGGGGTCAGCGAATGCTGAAACTTCACTGTTTTCTGCATCTACTTGGAAACCACCAGAGCGTGCACAAGTC
ACTCTGTCTGGAACTTGTGCTGAGATGGGTCCCAGAGCCTGTGGGAAGCCAGTGGAGTGCATGGACCCCAGGGAGACAG
ACAGGCAGGTACTGGGAGCGGGCCATCAAGGCTCAGCGTTCAGTCTATCTAGCAGCTGGCAGTAGTGCCGTGGTGTGTG
GAAGTGAGCGCCTCACAGCCTGTGGGTATGCGTGAGCCTTGTCCCACAGCTCAGGAGAGAGTTCTGAGAAAATAAGGTT
TTGTGGGAAATATGCATAAATCCTTTGCTCGTGAGATTGAATGATTGCTGTAATATTTACTTCCTGGACACAGTGCTTC
CTTGTGTGTCCTGGTCGGGTCGTTATTATACCTTCATGGTGCTCAGAATCTAAGCTCAGTACCTGATCGAGCCTTGTTG
GCTGGGATTCCAGGGATGGTCACAAAGCCAGGTGACCTGAGACATCCTGTGCTCTCACTTGACTCTGACCTGCCAGGGG
TCCTGTCACCTCCTATGTTAGATCACACCCCACTGCCCCTGCGTCCTTCTGAATAGTCCATCTCTCACCAGACTTCAGC
CCCACCTCCTGGGTGGCTTCTGTAGCCAGTCTCCTGGAGCAGTGTAAGAGTTCCTTTTAAAAGCTCGGAACTGGCTGGG
CGTGGTGGCAGCACTCGGGAGGCAGAGGCAGGCGGATTTCTGAGTTCGAGGCCAGCCTAGTCTACAAAGTGAGTTCCAG
GACAGCCAGGGCTACACAGAGAAACCCTGTCTCTGTGTATCTCATGCTGTGGATCAGACCACCCAAAACTCAGCTGCCC
AGAGATAGGGAGGGTAGTCACCCGAGTCTCTCGAGTTCATAACTGGAGCAGGACACAGCGGGGTAGGTATTAGCTCTGA
ACATACAGCATTGTGAGTGCTAGAGTCCTCGGAATGAGAAGGCCCACGCACTCACAGGTGACTTGGGATGGGAGATGTC
TCGGTTTCTCGTCACAGGAGCACCAGAGTGGTCTCACCCAGGTGGGCTGGCGTGAGAGCCCAGTTCAGGGTGTATAGAC
AGGAGCACACTCCTGGCAGGTGATCTGCCCTTTCTCCCCAGTGACACACAGAACCATTTGTGTCCCCAGAGTAGGACCC
TCCAGACGCAGCCCCTGACGGATGCCGGGCTTGCATTGTGAGGGCATATGGAGTGGGGACCGTCCCTGTGGTGGGAATG
TTGAACCACCATCCCTGGGTACATCCACATCCTGCTGAAGCCTCCTTGGGCGCTCGCGATGCCTTGGATGCTTCAGCTA
TGGCTGCCACACCCGGCAGCGAAGCCTTCTCATCTGCCCCTTGTAGCTCCACATCCGGTGCCAAAGGTGAGGTTTTGTT
TAAATCGATCCTGCAGCTTCATGGAGCTTCCTGTGTCCCTCATGGGAACAGTGTTTTTATTTCTTTCTTCACACACTGT
CTGCCTCCATTATTCTCCCCCTCTCCCTCTCTCCCCCTCTCCCTCTCTCCCCCTCTCCCCCTCTCCCTCTCTCCCTCTC
TCCCCCTCTCCCTCTCTCCCTCTCTCCCCCTCTCCCTCTCTCCCTCTCTCCCTCCGAATTTGCTAGCTCTTCCCCGCTG
CCTTGGGGTCTTGGTCCCACCAGCAGCTTTGCTGACAGACCCCAGGATCTGCTACTTGCCAAGACCTCTCTCCAGGAAG
GAGGCAGAGTGGTACTCACTCCTTCACTGCCTGTTCACTTGGAGACCTTGGGCATGGTTTTTTCTTTTCATTAATTAAT
TAATTAATTCACTTTTCATCCTGATCCCCGCTCCTCTCCCTCCTCTCCTCCCAGTCCCACCCTCAGAAGCCCCCCCACC
CCACCCCCGTGGTTACTAACCCACACATCAGACACATCAGTCGCAGCAGGACTAAGCGCATCGTCTCCCACTGAGGCTC
AGCTATTAAAAACAAAGATATGGGGCTGGCAAGATGGCTCAGTGGTTAAAAGCACTGACTGCTCTTCCAGAGGTTCTGT
GTTCAATTCCCAGCAACCAACCACATGGTGGCTCACAACCATCTGTAATGGGATCCGATGCCCTCTTCCGGAGTGTCTG
AAGACAGCTCCACTGTACTCATATGCATTAAATAAATAAATAAATCTTTAAAAGAAATAAAAGAAAGATATGGTGCATC
CATATGAAGGCAAATAAATGGAGCTAGAAAATACCATCCTGAGTGAGGTTACCCCAGACCCAGAAAGACACTCATGGTC
TGTACTCATAAGTAGATATTAGCCATAAAGTACAGAGTAACCATACTGTAATCCACAGACCTTAAGCTAAGTAACACGG
AGGGCTCAAGGGAGGATGTTTGAATCTCACTCAGAGGGGGAAATAGGCATCGGAGATGACTAGAGGGAGGGAACCTGAC
CTCGGCTATCTTAATGCATAGCATGGAGATGGGGATTCAGGGGTGGGTGGCCTGCTTGTTTCCAGTAAAGCCCAGCCCT
GCTGTGCTGCACTGTGTCCTGAGCCTTGCCGCCAGCAGTGCCAGTGCAGTAGAGTGACCTTGAAGGCAGAGCCCGGTGG
AAGGCTGGCTCTCTGAAGGGTTCCTGCAGGAATTCAAAGCTGAGGTTCACCAGCATTTCTTGCCCCTCCTCTCATTGCC
AATTCTGGTGTGTGCTGACCACCGCCATCCCTCTCAGCACACTGCCCCCCACCCTCGCCATGACCTCTAGTAAGGCCTA
ATGAGGTCTGTTTCCAGATTCCAGCAACTTCTACCCAGGGCCGTTGTCGAGGACAAGAAAGGGACAGGGCAGGACCTTC
TGTCCTCCGGGGTGGGGTGAGGTAGGCCGAGAACTCCCCAAGCATGCCCCACAGGCATGCTGTCCTGTAATGCTGTGGT
GGAGGCCAACGCGAGTGAACAGAGGGACTGCCTTATACTCTGCTCAGGCCTCTGGAGGTTCCAGGAGACAGAATGGAGG
GGGCCTTTTCCTGCAGTTCCTGGTGTCTGCTAGTGTTTTCAGACTTTGTGTCCAGAGCCAGGCAGTCCAGTCCCTTGCA
GACTGTTGAGCCCAGAGACCTCAGAAGCCAGGATCAGGGCAGAGACCCTGCGGTTCCAAACTTGGCCAGCATGGGGCTG
CGGAAACAAATTGATCAGAAATAAAGAGCAGGGATAAATGCTCTGGGAAGCATGAGGACCACGGGAAGGATGAGGCGTG
CAGGGGTGTCTCCAAGAAAAGAAGCTGGAAAATGTTGAGGGGCTCCCCAACACATCCATACTTCTGACCAACTATTTCT
AAATCCAGGGGGTCCCCAGTGCTCCTTAGGTTCAAGAACGGAAACTCAGGAAGCCAGTGGCGGGGGTGAGGGGCAATGG
AGAGATGGCTCAGCTGGTCACTTGCCGTGCAGTCATGAAGACCCGAGTTTGGCTCACCAGCATCCACGTTAGAAGCTGG
GTGTGGTGATGCTGCACATCTGCAACCACAGCCGTGGAGGGGGGAGGGTGGGAGAGACAGGCAGATCCCTGGAGCTAGC
CAGCCTCACCATTCAGTGAGTTCCCACGCAGTATGGCTGTGCCCTCTCCTCACAGAATCACAGCTCTCCCCCTTCAAGG
CATATCTCACAACCCAGGAGGCTATGCAGGGCCTGGCTGTCTGGAATTCTTTGGGATTTCAAAAACAGGCAGAGCTGGT
TGAGTGTTGTCCATGTGATGGAACTCAGTCCCCAGCCTGCCTTCCTTCCCTGGGGGTTGGACTGACTCTGGGCCCCAGC
CCTCTGGTCTTAGGATTGACAGCCCCATCCTGAAGCCACCTAGGGAACCACCACCTCATTAATATAGGCTCAGGTAGAG
TGACTAGGGCTTAGGACAAACAGAGATATTCCTGTTGTGCCCCCCCACCCCCCACCTCCGCCCTCAATTCCAATCGCAG
CATTTTCCGTCCTCACCCCAAGCCGAGGAAGAGTCAGTTTCTTCATTACACAACCTTAGTGGTGGTGGTTTTGTTTTTC
TCCTGTCATTTGTCATTCTGGAAATTACCTCTGCTATCTTAAGTGACCTGACACCTCTTGCTCTTTAGCATTTCCTGTG
TATTGTTCCTCTTATGACCTTCTCACTAATTAACATTCTCTGATGTCTTTGTTGTGTTATAACGAGGGAGGTCCAGAGG
AGTGGTGACCACCTCAAGGTGGTCATGACCACCTCAAGGTGACACAGCTAGTAAGCGCCCCAGTAGGATTTTCACCTCA
GCTGGGCTGGCCATGAGGTCTTCTGGCTGCAGCTCAAACCTAGTCTATCGGACAGGTGACTGCCTCTCCTTGGCCACTG
TTGGCTGTCAGGAATGACTACACTTGTCTGTTACGTGCTGTGCACAATAGATTCAAACCCAGCAGAGAGCTTTTCTATG
GATCCCATTGGATTGACCGGCATGCCACTAGTCCCAGCCTGGGGATGGCCTGCTAGACAGTGGACAGGGCAGAAAGGCC
TTAGGGACCTTTGCCTTCCCTGTCACGGGTACTTATCTCCTGCACTCGCTTCTGAACCTCTCTGGACTGTGGCTGAGTC
CTGGTGGGGCAGAGGAGAGAAGAGCTCCGAGTAGTGACCTAACAAATGTCCCTTTATATTATCCTTCCTCCCCTCCCAG
ATGGCCTGAAGTACAGCAGTTGGCATTCTTGTCACTGCTGTGTCCCAGGGGACCTGCACGGGGTTGTGTCAAAAGCCAA
GCCCTGCAGTTTGGGAAATTAGCAGCATTTATGGCTGTCCCAAGAGACTCTTGGCATCTCAGCCAAACTAGCAAGTCTT
CAGCTGGGGACATTTCTGCCCCAGTAAGGGAGTTTACGGACTGCAGTTGTCACAGTATTTGGGGGGGTCCTGTTGTCAA
TTACGTAGTGGGATCTCGAGGTGCTAATGACCCAGCATTGAGCTGGACAGTCAGACACACTCTGTGGGGAATAGGCTTG
CCCTTGAGAGACCTGAGAAAGGTCTGCTTCCCTGCCCCTTTCTCACCAGGGTTTAAGTTGAATAAATGGGAATCAAAGA
AAGTCTCCCTTGAGCCGATGAGTGGTCAGGTGGTCTATCCAGGGGGGCACAGGCAGCCATGAGAAGAGCATTCTGTTGG
GATCTCATGTCAGCTGGGGCCTGGGGTCAGGGCAGACCTGGACTTGGGTGGTAGAGGGTGAAGAAAGGGTAGGCCGCCA
CCTCCTCCGTGGCAGCCTGGGGACTGACGAGTGTGGCCCCCTAGAGCTCACATCAGCACCTTGGCTTGGGCTCTTTCTC
CTGGGGTCTGCTTCTCTGCTTTCTGTGGTTTCTATGAGCCAGCCTTTCAAGTGCGCGTGTTTAGAAGACCCTAGCCATA
GGCTGGTCTTACGGCTGAACCTCTCTCTCCTTTCTGCCTTGCAGTCGGGAAGACGTCTCTGATCACGAGGTTCATGTAT
GACAGCTTCGACAACACCTACCAGGTAAGACTCCCCACTTCCCATGCTCCCCCCCCCCACCTCCCCTGCCTCTGTCTCT
GCCTGTGGACCCTGTCTGGAGAGCACTGCCAGCTGTCTCCAGGGAGCATTGAGCTCAGAGTGGGTGGGGCCACTGCAGC
TCTCTCAGGCAACTTACCGATTGGAAGGAATGCCATGCCCTTCCTGGTAACCTGGCCTAGGCCGGAAATGAGCTCAGAG
TCTAGATGTTGAAAAGGAAACTTTTATTTTTTAAGGGAGAAATATCAAAACCAGAGAAGGGATCTTTTGAAGAGGCAGG
TTGGAAGCATTACAGAGTTTGGTTATGTCAAGGGGCAGGCCGAAGAGGATAAGATGAAGTGCAGGGGCAGTTGGAGAGG
GTGCAGCTCAGGAGTGGTCACACTGGCTGGACTTGACATACACATAACCCAGACAGACCACGCACGGACTGTCACACAC
GCTCAGTCCGCCCTCATCCCCTGCTGCTGAAGCACACGCTGCCACAGAGAGGCGTGGACGCTTAGTTGACCCTGCCCTG
TGTGGTCAGGAGACTGGGCATAAAGACATCTGTGGAGCCTGGTTTGGGAATGGTAGCCTGGGCTCAGTCACAGGCCCAT
AGGTGACCCCAAACCGAATTCATGAGGGGCAGAGACATATCTGTTTGGTATCAGTGGTGGTGGTGGACAGGGCAGGCAG
TACACGTGAGTTTCCTCACAGCTAAAGCATTTTGCCAAAGTTGTTATCCCTACCACCACCTTGGACTGTCTGTCCACAG
TTAGTTCACCAGTTCATTTCTCTAGGCTAGGGTCCTGTGAGATACTAGCTCCCAGACAATGTTAGTAGCTGTTACTTGG
CAAAGGGAGTGTGTGGTTTCACAAGCAGAGCTGGGTTGTTTAGACTGGGGGGGGGTGGTGGGGGGAATGAGGGTGGGAG
TGGAAGGGGACTGCTCTCGCTCAGCACTGAATCTCAGGGCTCCCCCTCAGCCCAGGGCTTCAGTCTGCTGAAAGCAGAT
GCAGTGGTTGTTTGAATGTAGAATCCCTTTGTCAACACATTCTCAAGGACAAGTATTTATAGATTCACTGGGGCAGCTG
TTCCAAGGTGCCGCTCTCCCCGCTGCTGGGTGTGGAGCAGCCCACGAGTCTCCGATGCTTGTCCGTCCGTCAGTGCCCT
AGTGCAGTCACCCTTGTCTCAGATGTCCTCTGAGGACCCCCTTTCTGTTTCCCTCAAGTTCTTATTCCACTCTGCAATG
GGTGGACTGAAATCCTATATCACGTGGACTCCAGAGGGATTGCCTACGGGGAAGGACAGGAGACTCTGGGTGCGTCAGA
GGGTGTACGTGGCTTTGGGACATTGATGCCGGTCATACTGTTGTGTCCTCCCCCAAGCCAGGACTTTGCGTCACTTTGG
TCTGACTGTGGAGCAGAGGTGACATCCCTAACAGACTCCCCTCCTGAAAGAAAGATGAAATTTCAAGACCTGTAAGTCA
TATAAAGTACTCAGAAATTGCTGGTTGTTTGTGAGCCTAGAGGCTGCCTGGGGCTGAAAATAAAGAAAAACAAACCTGG
GTATGCCACATAGTTAAAACATTCCTGGGAACAGCTTAACCTATAAGATAAAGAAGACTGTGAGGACAAGCAGGGCTAT
CTTGTCTGGGTCAACACCACCTGGCCGGAACCTCCCCTCTGTCTACTGCTCCTTGACGCCGGGTAAAGTCATACATCAA
CTGGTTGCTATGTGAACAAAGATAAGCCCCCAGCCCACAGAAACAAAGTCCTGATGCCCTTTTGCTGACATGTAATCTT
TCTGTTAATGTTTAAATAAGCCAATAGTGTGTCTCTATGCTGAATTCCACACCCCTAAGCCCCTTACCCCATAAAAACC
CCTAGCTTCTGAGCCTCGTGGCCGACATCCGTTATCTCCTGTGTGGGATGCATGTCGGTCCGGAGCTCCATAATTAAAC
GTCCTCATGTATTTACATCAAGATGGTTGTCTGTTCGTGATTCTTGGGTGCACGCCGAATCGGGAGTTGAGTGGGGGTT
TCCCCACTAGGTTCTAACACTCCTAAAGTCTCCTTGTGCTCTGTGTGTGCACATGCACACGTGTGAATGTGTGCACCTG
CGCACATGCTTGTGTTTTTATTAGTTGACTTTTCCCTTTTTGACACAGAGACTCCTGTGGCTCCAGCTGGCCTTGACTC
TTCTGGGTAGCTAAGAATGACAGTGATCTCTGGCTATTTCTGACTACTGCTTGATTTTTTTTTAGCGATCTTCCTGTTT
TTCCTATGGCACCGCATTGAGATTCTTAGCAGCAGTGGACAAATTACCTTTGAAATTTTATCTCCCTTCTTCCCACTGT
CACCCTCATTGCCTGACGCTTGTCACTCAAATCAGGCTTTACTTGTTCCTGTCACTGTGTGGTGGCTGGCGATGGCCTA
GCCTGGACATCAGCTCCTGTCACTGTCCCAGCTCCGCTCGCTCTGCTCTGAAAATTCTTCCAATGCCTGAAGCGTGGCA
AATGTTTGCCCTGAGAACAGAGCCCCACCTCTTGCATCAGTTCCCATGAGCCTTTGGCTGTAGCGTGTGATCCTGAAAG
CTAGTTGGGCCCCTCAAGTCTAGGGCTACTCCTCTGCCCTTCTGGTTCTCACCTGTGTTTTGGGATGTGCCAAGTCCAG
GATCTTCTTGGAGACATCACTGTACAAGGCCTGGCTGAAGATGGTGCCACAGGTACCTACGGGCACAGTAATGGCTGCT
TGCCTCAGTTGACTGGTGCCATCAGACTGAGCGCCTCCCAGGACCACTGTCATGGTGAGTCAACGGAGATCACAGAACA
GATCCGATGCCGCTCTCCCCATGCGTGGGAGAATTGTCTGACTCGGTTTCTTTACATCACCAGGTGGAAATCCTTTCCT
TAAGCCCTTTAGAGCAGTAATTAGGCTGAGAGGCTGGGCTCTGCTTCTCTCCGTCATTCATACACACACACACACACAC
ACACACACACACAAAGACATACACACACACATATACACATACAAAGACATATATATAAACACACAAAGACATATACACA
CAGACACACAAAGACATACACACACATATACACACAGACACATATATACACTCACATATACACACAAAGACATAAATAC
ACAGATACACAAAGACATACACACACATACATATACACACATAGGTACACACAAAGACATACACAGACACACAGACACA
CACAAACTCACACACAAAGACATACACACAGATACATACACAGACACACACATACAAACAAAGACATATGCATAAACAC
AAAGATACACACACACAGACATATATACACAAAGACACACAGATACACAAACACACACACACACACACACACACACACA
GACATACACACACACAGACACATGATTGCTTGTTAATCCTCTGGAGATGGAGGAGGACAGACTTTGTTTATTTTCTTTT
TCTGAGCATAGCAGCAGAGGTGTATGGGAAATAGATAAGTCCCCAGGGACCCGAGAAGATGAAATGTATTTTCTCTCAG
GCTGTCCCACTGCACAGGAGCCGTGCTTGTCACCCTCCCACCAATATCCTGTCTGTCCCAGCAGCAGTACAGCATGGCA
GAGTCTAGGCCCACTCAGTCAGCTCCCAGGACAGTGTTCCCTCTCTCTCCTCATGGCTCCAGACCCTGTGCTCCCCTCC
CATTCACTCATCCTGACAAAAGACAGCTGTGTGCTGTAGTACATGGCCTGACAGAAGGTAGCAGAAGGCAGCCTGGCCC
ACCCTCAGCGGGGCACAGAGGGCAGGGCCTATCCTCAGCCACGGCCAGTGCCACCTTGATGTAGAGCTGAGTGTGCAAG
AGGCCCCAAAGGGCCACCATGCGGCCCTGAGTATGGTAGGCTGGGGTCCTCAGCTGAACCTCTCAGAAGGTTCTGTTTG
TGGCCCTGGTGAGCTGGCACTTCTACAGCCCTGGGGGACCTTTGAGAAGCATGTCTTCGTTCTCTACTTACCTGGCAGT
TACACACATACACACACACACACACACACACACACACACCCCTTATTCTCCGCTAACACATGTACTCTAGTCTCTCACC
GCCCTGCCTAATCACACCATACAAACTGATTCACTTATACAGTTTTCACTTGGTGGAAAACCAAGTCTCAAGCAGAGGA
AATTTTGTCTGTGGTGATTCCTTCATGTAAAACCCCAGCTAAGAGGTAGTATGTTTTGTAATGTGGTAGCATGATGCGG
CGGAAGTGGGTGCCTTAGCGGGCCCATGTTGAGGTACCCCCACCAAGGTACCAGCCAGACAATGGGTCTAGTATAAAAT
GAAGTTTATTTGGGGCATGAGAGGAGGCTGTGGAGAGGGGGTGGAGGCAGAGAAAGAGGACAGAGAAGAACAGAAAGAG
AGGAGAGAAAGAAGGGAAGAGGCCAGCAGAGAACATGCAGGGAGAGAGAAAGGAGGAGAGGACAGAAGCGGGAAGAGAG
GTCACACAGTCTTTTTATAGCCAGCTGGGCTCATACCTGGCTGTTCCTAGGTAACTGTTGGGCAGAGCCTAGAAGAAAT
GCTAACGAGGTTTTCTTAAAACTCTATCTAGGGAAAAAAAAAATCTGGGCATATCTTGTAATAAGAGGTGGTTCTTGCT
GTGCGCTCCCCCACCCATACCAGCACATACCCAGGAAACCCCTGTGGGCCCTGGGAGGGTCAGCTGTGTGAAGGAGCCC
TGCTAAAGGGAGGTGTGGTCCTCTGAAGGTCACTCCTGGCCGAGGCTCTCCAGGGTGCTCTTTCCAGCCTGCAAAGCTG
GCAGCTCAGGCCTTAGCGTCTTAGAGAACTGAGAGGTGGTAAGAACTTAACACTGAGGACCCATGGCCCCTCCTGTCAT
CCACACCAAGTTAGAACAGCACAGATCTAATGGGCTGCCTCAGGGAGAGAGGCGCCCACAGGCCAGGAGGGCTCTTCTC
AGAGGACACTTGTGAGATGGGAAGGTGTTTCAGACTCTGAAGGGGGTTCCTAAGAAGCAAATGCTGGTCTTTCTGGCAG
GCTCAGATCTCCTGAGATCTCTTGCCGGCAGCTGATCCTCGAGCCATGGCAGTCTGTTCTGCCCTGAGGCTTCCCACAC
TCAGTCTTGGGGCCGCCGCCACAGCAAATTACCACACACTGAGTAGCTTCAAAGGAACAGGAGTGTATTCTGTCCTCAC
CTTCCTGGGGGCCTGAGGGTGGAACACATACAAGAGAGCCCTGAGCTTTTGGGGGTTGGGGGGAGGGCATTCTCCTTGC
TGTTGGCTTCTAGTGGCCTCAGATGCTCTTTGTCATAGGGCTTCAAGATTTCCATCTGGCCGCCCTCTTCATGAGATCT
GAGTAGATAAGGTGGATGGATAGGTGTGGATTCTCATCTGGGCCCTTGAAGTGGACGCAGCATGCATCTGTATGCATCT
GTATGCATCTGTATGCATCTGTATGCATCTGCACTCGGGGAGAGGCTCCTAGTCACGTCACCTCACGTGGTGCCTGAAG
CCTTGGATTTTTATTTCTGTCTCCTGCCTTGTCCTGATTACGTGCTCTTGCCGTGGCCACAGAGACTTCTCCCTGACAC
AGTGCGGTAACTGGCCTCTTACCTGACAAGCGATGCTTCCTCTTCAAGGTGAATACATATATGCTTGTACACACATACA
CTCACATGCAGATACATACATGTGCACACACATACACTCTCACACGTGCCTGTGCACACACACGCACACATACATATGC
ATACACATGGCACACACCAGCACACACACATTTATGCAGTGCGCACACACACACACACACACATATACGCCAGCCTTTC
CTGAATACTGAATAAAGCTTCTGCGTGCACTCGTGCCTCTCTCCGCTGTGGCTGCATCAAATCCTCCTCCTCTCCTATC
GGCTCCACTCTTGTCTTCCGGTGGCCTTCCTGCCCACTCCAGCAGCCATCAGTCGCTGGCTTGTCTGGCCCACACACCC
TAGGGACCACGTCACTAACACTGTTTTTCACAGGCTCAGACACTACTGGAGGGGAGGGTGAATGGGCAAAGACTTGGTT
GACCACAGTGATACTTCTCATGATGTGAGCACCATGACCACCCAGGGACCAGGTAGCAAGGTGTTTTCTGTATTAGTAT
TATGATGAACAGAGCCAATTACATGTATGCACGTATGTATATGAATATATGTTATTGTACACGTACACACACGATTACA
AATTGGACAGCCATTCTTCATAGAGAAGAAAGTAACCACGGGACAGATTGTGACCTTGAAAAGCCAGGTGCCTGCCCTG
TGACCTTGGGAGCCAGCATCTCCTCCTCCAGGGCACTAACTGAGCAGCTGTCATTGGCTGGCAGTGACCCGGCCCTACC
TGTTCCCAAGAGGCTGTGAGCTCCTCTCTACAAAGCAACCACTTTCTTGGCTGAGTCTTTAAGTTTACCAGGCTCATTT
GCATGCTAATTTGCATAACTTTACCCAGATACTTCGGTCTGGTGGTTGGCTGTGCCTGAGAGAACAGCAGAGTCATTGT
CAGGGGCTTGTCATGCCCAGCTGCTTTCTGCCATTTACGGATGCTTCTCTCCAGCGCCGGCCGGCCGGGCTCAAAAAGA
AGACGCACGCACATACTTGCCTTTTCATTCTCTTCCCCTGAAGAAATAAATGCTGGCGTCAATTTATGCTAATTGCCAT
GCAGATTTCCTCCGGTAGACTTTATTGCTGTATCTTGTCAGAATGTGGATGCAAATTTATATTTCATAATAAATGCACA
GAGCTAAGAAGATTTCAACAAGTGCCGTAGGGAATATCTTGCTCAGAGATCTTCTTGCTCGGATGTGCTGGTGGAAGGT
CTGTGCAGAGGAATGCAAGTACGCCACCGTCGACACCCCTGTCGATACTGTGTAATGCCACACTCAAAGGAAGATAACC
GTTGGGAGGAAATCTGTGCTTCTTAATATTCTTTGCATGTGTAAAATAAAGTGGCTGCTATTTTTCATAGTCAGTGAGT
GCCGTTTGCCAGCGCAAAAGAATAAATTAGCATTGCCAGGTTCGGGGCCACGTATAACAGTAGACTACACCTCCGTTTC
CTTCAGAGAAGACATCACGCAATACAGGCAGAGAAGGCACAGCTGTGTGAGGGGATCACGGGGCTTCTAGACTGACAGA
GGACTCCCAGGCACATGCCTGTTTGTATCTCTTGATATCTCATCCCCTGTGGGCATCTACCATCGGAAATGATTTGTTT
CATACCTCATAAGATAAAGAATAGAAAAGCTACCTTGACTATAACTCCTTGGCACAGTGAAAGAGCGGCGTGCCTCTCC
TCGGCTCCACCTTCCTGAACCTTTGCTGAAGCCCTGGGAATCCCAGATCCTTGGGATGTCGATGAAGAATAGGACAGCA
AAGGTTCCTGAGGGGCTGGGGGTGGGGGTGGGGGTCTGACAGATTAGGAAAGAAACAGTTCCTGTCTCTCCACTGCAGG
ATTCAACAGAGCCTTTAATGTGCCAGGAGAGTCACTCACTTGCTTGCTGTTTCTGCTCATCCTGAGCAGAGACTCCGAG
GCCATACCGCATAACCAGACAGACACCGGGCAGTCTCCATGGCTTGGCTGTGCCGCTTTGCCTGGAGAGCCCTGGGTCA
GCTGGTTCCTGGTAACAATTGCTCATTTCTGTTGACATAGCATATGACAGAATGAAGTGCCTTCACAGAGTCTTAACTC
CTTTGGTCCAACAGTCCTTAGAGGGAGCTCTGGGATCTTCATTTGAGAGGTGAGGGGGTTGGGGGCTAGGGCTAGGCTG
GGGGCTAATTGGACTCCTTAGTTCAGTATGCACGAGAGCTTGGGTCTTCAGTTATGGGGCACCTGTAAATCCCAGCACA
GGGAGGTAGAAGTGTGAGGATAAGAAGCTCAAAGCCACCCCCAGCAACAAGCTAAAGGCCAACTTGGGAGCTGGGGTAC
AGTAGATCCTTTCACAAGGCAGAAAAACAAGATAAATAAATAAGCGCAAAGAGCAACAAAGAAAATCCCACTGGCGCCC
ACTGGACACATGACCCACTACTGATGGCATGTTGGCCTCTCTGGGGCCAGCTGTAGCCTGTCCTGAGTGGCCCTGATAT
ACACAGCCTGAGTGCGCTCCCTTTCCAAAGAACCCGTGAGGGTTCCTCATCACCTGGGCCGCAGGGCAGCGCTGGGGCT
GTGTGTATCAGAAATCCTGGCATTAATCCTGGAATAACACACACACACACACACACACACACACACACACACACACACA
CTCTCATACTCATACCAGTCTCACGCACCCATTCATGCCTTTGTACAAATACAGTGTAAACTTGAGTGTGTTCCATTCC
CACGCACATATAAACACACATCCACCAATGCATAACTCTCCTGTGTGACCTGTGTTGACCCCTGAGAGGAGGCTGGTCC
AGAGGAGTCACCAAGGATCCCTGGGCCTAGCCGAATAGTTAGTTGTTCTTGCTATCTGGTGTCTCCTTCCTCCAATGTT
CACCTGAAGTGGGAGTGTCCTTCATGACCAAGACTGCAGGTGCAAAGGAAAAAAAAAAACTAGCTCTGCAAGCGAGGGC
ACTGGGCTAAGTGTGGCAGAAATACCGCCTGGGGCTCAACATTTGATCCCAGGTTTCCTGGTGGACAGGAGAAACTATA
TGCTTGGGTCTTGTAAATATAAATACAAGAAGTGTTCAGGTTTGTGTTCTGATCAGATGTTGCTACCCTGTAAACTAAC
CCACATCACCCACAGGCTGGTGTGTTTGGATGCTGGGTCACCAGCTGGTAGGGATGTTTGGGGAAGTTGTGAGATTATA
TTTAGACGACGAGATGTAGTGGAGGAAGTGTGTCTGGGGAAGGCAGAGCTGCAGTGGATTCCGTTTATGGCCTGCCTCC
AGTCCTGATCCTCTGTGGTGGAAACAGCCTCACGCTCCCACCCGCCATGGGCAGGAGCTGCTCTCACCTCCCCTAAAGC
CATCAAAATAGAGCCTTCCTCCTGTCAGTTCTTTCTGTCAGGTATTCTGTCTCAGCAACAGAATAGTCCCCAGTGTCTA
GGGTTTCCTGGGGCCAGCCTACAGAGATGTACACACATGAAGTGGCTTGGCAGGTAGACTGGCTGGTAGTAGTGTGAAC
GGCGAGGTGGACTCCTCACGTGGGCAGTCTGTGCTTCTGACTCACCGGCCTCTAAAATGTGCTGCCCGCCTACCCGCCT
CACTTCCTGCTGGCACCATATTGTACTGTGTAGACAAACACCTGAGACCCGTGGCCTCCACAGTCAGAGCTGACACAGG
TCAGAGCCTGTAGGGTGGTACTGAATAACAATTCAACAGTGCTCTCAGACAGAGCCCAGGAGCTCCACACACTGTGCTC
CGGCCATCCCACCTCCTGCCTTGTGGGAATGCCCATCAGTCTGGATCTAGCGTTGTGGCTCTCCACTTGGGCAGTATGA
GTGATGGTCTGGTACTGCCTGCTTTCACTAGTTGGTGTGGTGTGGTTGCGGCTAACTTTCTGTAGTCTGCTCCAAAAGA
GTCAGCCTATATTAGCTACTTTTCCACGAGTATCACCAAGCACCCAACAGAAACAGCCTAATGTAGAAAAGGTTGATTT
GGGCGTGTGATTTCAGAGATGTCAGTCAGTCATGGTAGAGAACAGAGCAAAGCAGTTTGCATCATGGTGACCAAAAAGC
AGAGAGTCGGAGCATGCAAGCAAGGGTCTGGATAAGGACACACTAGTGACTTACTTCCTCCAACTAGCCCCCATCTCGT
ATGCCTTACTATGTCCCAATAATGCCATTGTCTTAATGAACCCATCAAAGGATTGCGCCATTGATCAGACCAGAGCTCT
CATGATTTAATTGTCTCTGGAAATGCCATTACACACAAGGGCGGGTAGACAGATAGACAGACAGACAGATGGAGAAGTA
CATTATTTATCTCCTAGGTGTTTCTCAGTTTGTTTGTTTGTTTGTTTATCATCCAAAGGCTTATGTTTTGAATGCTTAT
TCCCCAGCCCGTGGCACTATTTTAAGAGACTGTGTGATTTTTAAGAGGTGGGACTCTATCTGGTAGAAGTAAGACACTG
GGGGTGGGAGGGTGGACCCTTGAAGATTATGCCCAACCCCTTCTTCCTATGTTGCTCTCCTTTTCCCGGCCTGCTGTGA
TGTGAACAGCTTTGGCCACATTCTGCTACTGCCAGATAGCCTTCCCAAGCAGGTGGGACCAAACATCCATGGACTGAAC
TCTTTGAACTGTAAGCCAGAAGAAAGTCATCCCATCCTTGAGTTCTTATTTCCATTGAGTATTTTGGCTGCAGTGATTC
AAGAGTCTATACTAATCTACTTAATAAACTTAACCACCATACCTGGGCAGTGGTGGTGCACGCCTTTAATCCCAGCACT
TGGGAGACAGAGGCAGGCAGATTTCTATGTTCGAGGCCACAGAGTGAGTTCCAGGACAGCCAAGGCTATACAGAGAAAC
CCTGTCTCAAAATGAAAACCAACCCCCCCCCAAAAAAAAAAAAAACAAAAAAAAGCCAAACTTAGCCATCACTCAGCGC
ACAAAGGCCATCTTTATGTCCTCATCTGAAGCCATGTCCTAGTAGCAGAGAAGGTGTGGGGTGGTCCTTGTCACCCTGC
TGACTCACTATCACACCCTGGGAAAGTCATGTCTCTAGTCTGAACCTCTAGTTTGTCATCTGCTGAGTGAATATATGTT
CACCCATATACCGGCTACTCCACTTGTTAAAACCTGCCTCAGCCACGCACACAGCCTTTCTACATCTGTCCACATTCGC
TAAGTCTGACCTGTCCTGAGTATCATCCACATACCCTGCCCCGGAGCCTGCTCCTTCCCCTTGCATATCTTCCAGATAT
ACACAACAGTTCTGTGTATCTTTCTTACATCTGTCCCATCTACCAGCCAGGATGATCTTTCTAGAGTGCCGGCTATTAG
GAAGTCCTTCTGAAGTTTCACTTCATCCAGTTCCCTGGCTTCCTCAAGTCCCCTACAGCAGCCATTGGCCCCAACTGTT
TTCCATTTTCTGAAAGAACTACCTGGCTTCATTCTTCAGGGTGCTCTCTCCTACAACACTCTCTTTACTGCCTTTACCT
GTGTACTGACCCTCTCCTGTGCCCGTAGTCCTTGCAGAAGACCCAGGTCCTGTCACCACCATTTCCTTTCAGGCTAAGG
ATCGTCTTTAACATAGACTCTTTGTCCCCGTTCATTTAAAAGGTGCTTTTAGTTTATCTGCACATGAACATTTTTTGCT
GGGTTTTAAATTCTAGCTCCACTTGCTATCTGTCATCATTATCTTCCCTGCTCTTCCATCCTCGGGTACCAGGTGCCAT
TTTCCTCTGGCTGGTCTCAAGATTGTATCTTTGGTTTGGTCCTCATTGATTTGACTCTGATTTTTAAAAGCTTTTCTGG
GCTGGAGAGATGGCTCAGTGGTTAAGAGCACTGACTGCTCTCCCAAAGGTCCTGAGTTCAAATCCCAGCAACCACATGG
TGGCTCACAACCATCCATAATGAGATCCAACTCCCTCTTCTGGAGTGTCTGAAGACAGCTATAGTGTACTTACATATAA
TAAATAAATAAAATATTTTTTTAAAAAAAGCTTTTCTGTACTTCTTGTCAATTGTGGTGGCTTCATGTTCTGTCCTTCA
CGTTGTGTTCTAGTTGGTATGATATTATATACTTGTGTATGCCTATGTGTGTACTGTACATGTTCTTGTGTGTGTGAAT
GTGTGTGTGTGTGTATGTGTGTGAAGAGGTACATTTCTCATGGCACGTGTGTGGACATGAGAAGACAACTTGTGGAATT
AGTTTTCCCATTTCTACCATGAGGGTTCCTGGGCCAAACTGAGGTGGTCAGGCTTGGCAGCAAGCACCTTTACCTGCTA
AGCCGTCTTGCTGAACTTGCCCATCTCTGTCTTTGTTATGAACATAACCTTCTGTAGTTGGGCATAATAAATATTGGTT
ATCTTAAAATATTTCTTCCTACTTTCAATGTCCGAATCATCTCAGGATTGATCCTCATTTTCCTTGTGTATGGCTTGCG
TTTTCCTGTCACCTCATGTGTCTACTCGGTTGAGATTACATCCTGCGCGCGCGCGCGTGTGTGTGTGTGTGTGTGTGTG
TGTGTGTGTGTGTGTGTGTGTGTGTCTGTCTGGATTCTGGTTGCAGCTTTGAGTCCTGCTGGTTCTTTGTTTTAAACCC
TGATTCTCAGCTCTGTCCCCTGTGCTGGGCAACAACCCTCTCTTCCATCTGTAGTCTTGTTTTGCTTCTGGCCTTGGGC
AGATTGCTTGGGATCTTCTCTGGCCATCCAGTATTGGACAGCATTTCTATAGAGACTTCAGAGCCCCTTCTGTGGCTTT
CTCATGTCTAGGATTTTTCTGTACTTCTCGTCAATTGTGGTGGCTTCACGTTCTGTCCTCTCGTGTTCCAGTTGGTATG
ACTGACTGGGTTTCTTCATGAGTCTGAGTTTTTACCAGCACTTCCTGGTGCCTTCCTCGCCTGTTTTTTCTAGTTGATT
CAGAGTTAATAGCATCAATCATCCAGAGGGCTAGATGACCTCGGATGATGAGAACCAGAGTCCACCTCACTCCTCCAAG
ATGCTTCTCCTATCCCCACTATTCCCCGACTTCTGCCTACTGGAAGGTCCTATGTACTGAGGTCTTGCGTATCCACTCC
ACATATCCATCAGACACCGAGCAAGCCAGGCCTGCTGCTCTGACCTTCATCCCTTCCACGCTGGCTCTTCCTCTCCATT
TGCTGTGAGTGACAGTTTCTGTATGTGTCTTCTCCTCCAAGTAGGAAGATCCTTAGGGGCAGGGACTGGGGATTTTTTT
TTTTACAACACACAGTAGGTACTCAAGGGTGAAGTGAAGTGGTTTGACTTAATTATTTACACCATCTGCCACGAAGAAG
CTGCCCAGGGAAGACCATGACTGCCACCTTCTCTGAAAATCTGGCCTCCGTGGGAGACACAGGCTCCAGCTGGCAGCGG
TGTGGGCCAGCTGCTGAGACTCATGTCTGGGAAATACATGGTGCCCAGGAGCTAGAGCTATGTTCTGGTCATGGAGACC
CAGCCAAGTCTCTCTTTCAAGCCCTTTTCCCTATGTCCTTTGAGGGCTCACTTTATTTATTTCTACTAAAATGCAAATG
AACTCTCTCTTAAGAGGGCTCTGCAGAGCTGTTATGGCCAATGATTACCGCTTTCTGACAGTCGGGAGCCAGACAGGAT
TTGACTCCAGGGAAACACAGTGACAGCTTGGAAAATGGACTTCTAGAAGCCGCAGGACTACAGCTCAACAGCCCAAAGC
AGAGCCTTTGACGTCCGGGAGAGCTGGATTCAGATCTCAGGTCTGCTACCCAGCCTGGGTGACAGACCTTGGTTCGGAG
TGAGCCTGGTTCCTTCCCTGTGCATAGCAACTCATCCACTGGTGTTATCTCCATCTCCCCCACCCTCTTGTTATCAGTC
TGTGGCCCTGGAGAGCACAGCCTCCTCAGAGCTGGATCACAGCACAGAGCAGTTTATCTGCACGCTTCGCTGAGCAAGT
CACTGCTCTGAGAACTTGTCTGTGATTCTGACACGCAGAGCCTGTGCTTGTGTCTACCTGAGTGGGCCCAGGAGTCGCA
GTGTTTAAGGAAGCTCCTGGGGTGACACTGAAGCACATGATCCACATGGTACATGCTAAAACCCCCCACATGGTTGACC
AGAGGCAGAGATTAGGGAGTCTGAGACATTTCCTATTTGGTAGAGAAGGTATTGAATAGCCTCTGGGCTATCCCAAGTG
TTGATAATCTGATTTGCGGAGAAGCATCTCAAATTCATAAGTACTGATTATGGAAGAACATTTCACAGGAGGGACAGCA
TCAGGAAAGAGATGCAGAAGCTGACATGGGAAGGGCCTGTAGACTGACTCAGTGGGTAAAGGTGCTTGCTGCCAAGCCC
GGTGACCTGAATTTGGTCTCCAGATACATGTGGTGGAGGACCAGCTCCAGCAAACTGTCCCCTGACTTCCACACAAAAG
CCATGCATGCATGCATGCACACACACATACAAAGTGAACAAAAACATGCAGAGAAACATGTGTCTTAGTTAGGGCTTTA
TTGCTGTGAACAGACACCATGATCAAGGACAACATTTCATTGGGGCTGGCTCACAGGTTCAGAGGTTCAGTCCATTATC
ATCAAGGCAGGAGCATGGCAGCATCGTGGTGCAGGAGGAGCTGAGAGTTCATCTTCATCTGAAGGCTGCTAGAAGACTG
ACTTCCAGACAGCTAGGACAATGGTATTAAAGACCACGCCCACAGTGACATACTTTTTCCAACAAGGCCACACCTCCTA
ATAGTGCCACTCTCTGGCCCAAGCCTGTACATGACATGTGAATTCTAAACAGCATTATTCCTTGGTATAAAGTCAAGCT
GGTTATGAGGAGTACAAGGTTATAAAAAGCCAGTGGTGACTCTTGAACAGTCAACCACAGGTGCTTAGACTGTTTCCTG
GGAGCTGTAAGGAGGAACAAAGTCAGGATGTGTGTGTGTGTGTGTGTGTGTGTGTGTGTGTGTGTGTGTAATATTTATA
TTGTATATAAATATATAATACATATTATATATATTATTAGTTTTGTTTCTTAAGATTCATTTATCTTTATTTCATGGTT
GAGTGGTTTGCCCCCATGTAAGAAAATGCACCATATATGTGAAGTGCTGGTGGAGACCAGAAGAGGCCATTAGATTCCC
CAGAACTGCTGCAGACCCTCTGGGCCCTTTGTCTGCGTGGAACGGGTCTCTCTAGTCGCGGGTAGGCAAAGCATCGAAT
GAATTGACAGACAGATGCACACAGGAGAGGTTGTGTAGAATCTGAATGTAATGTCAAATCCAGCATCAGACTTTTTATA
CAGAAGACAATAAGGAAGTTGGGTGACATTCCTGCACGGTAAAAAGAGGTTACTGGATTCTTACATAAAACAGAGGAAT
GCAAACACAGAAGGTCTAACAGGAACCACCTGGGATAGAATTCATTGTTAACAACTGGGATCAACAAGGGCTCCACCTA
AGATTCACTTAATCTTAGAAGCCCAGGGTCAAGGGCTTCGTGCCCTTGCCATAGTTCCTATTTTAGTCTATTGTATAGT
CCACCTTCCCCTTAGGCCATTGTAAATACGTGTGTGTGTGTGTGTGTGTGTGTGTGTGTGTGTGTGTGTGTGTGTGTGT
GTGTGTGTGTGTGTGTGTGTGTGTGTGTGTGTATGGGTGTAACTCAGCTATAGTCTTAGAAGCCAGGTGTGAGGTCTTT
ACTCTTCTAGGGCAAGGGCTTTCACACCCAAGTCATGGTTCTAACTAGGGAGTTCCTTTCTAGCTAACCATCTCATGAA
TAATGCAATACTCTAAAACCATAGCCCGATCTACTTCCTAAACCATTGTAAATTCCTGTATATGGGTGCGACTTGGCTT
TTATTCTAAGTGATAGTGTAATACCAGAGGCTATTTCTGGATGTCACTGAATAGCAATATTCTTACTGAACTTCTAGCC
CATGGTCTTGCTCAAGGACGTTCTAAGACTGTTGGAACACTGGCGGAAGGCTTTAGCTATGTCAGAATTCAATCTTAAA
AAGCACTTATAATAGGATAATACTAAAAGAGAGCACGTGGATCCGTACACTAGACTAACTCGGGAATGGAAAATTAATG
TATGGGTTAGAGAGAACGCCAGACTCCAGGAGTGTTTCCGTGAAACTCTTCCGCCTCATGAGTAGCTTCCAAACCTCTC
GGCTTGTCAAACTGACTCAACCGGAGTGCGTGGCATAGAACAAGCTCTATGGAGAGTTGTAAGCTGCCCTGTGGGTGCT
AGGAACTTAACCTGGGTCCTTCCCAAGAGCAGCCAGTGTAATTAACTGCAGAGCCACCTCTCCATATCCCTAATGTCAT
TGGTTTTAAACTCAAAACTAACCTTGCCTGCCACATGAAGGTTGCTTATGGGGCAGTGGTGAGGACAGGGAACCCAGGG
AAGATGCTACTGAGGTTACTCCCGTGGGAGGTTCAGTCTGCACGAGGGAGCAGTGAGATCGGTGAGAAGGGGTGAGGAT
GGGAGCAGGTGAAACCACAAGAGGTGGCACCGTCATCTCTGCCTTCCCTCACCCCTGTCTTGATGGTTTCAGAATGTCC
TCAGAGTTCTTGAGACTCATTCCCACATCTATTTTCTTCTTTTAAAGCCTAGCTATTTGTGTCATCTAGGGGTCTGTTC
CTCTTGAGGTTTTTTTTTTTTTCCTCAATTATGATTCAAATTTCTTCTTTGCATAGGTGGTCTGTTTTTATTTTGTGGA
CAGGATAATTTAAATGCATAGCTTTCTTTGCTTCCCCAGAGACTTTAATCCCTTCATTGTTCACCAGCTTGTGGTCTCT
CTTACGTGCTTGTACATTGTTGTTTCTTGAATTTTTTTTCTAAAAATCAGAATAGCCTGATCCAATCTGCTCAGCTCTC
AACAAAAGAAAAACAGTGACATCAGAGCTTAAGAGCAAAGATGGCTCAGACACCCAGAGGTGATGCCCATGCTGTGCTG
TACAGATGTAAGAAGATACACATTAGTTGAATGAATTACATTTTTTATGTTGTTGTGATTAAGTTACCTGACAGAAACA
GTTTATGGAAAGAAAGAGTTTTGGTTTTTTTTTGGGGGGGGGGGTTGTTTTTTTTGTTTTTGTTTTGTTTTGTTTTTTG
TTTTTTTTTTTGGCTCATGGTTTCAGAAGAGTTCAGTCCTCATGGCAGGGAAGACACAGCAGGGTTCACAGCAGTGCCA
GCTTGTGGTGGGAGCTCCTCAGACCACAGTAGACCCTGAAGCAGAGAGAGCAAGAACCAGCTATAACCTGGGGTCCGTG
TCAGACACCCACCCTAAATGTCCTGTCTCCACCAGCTAGGTCCTGCTTCCCAAAGGTTCCAAACTCTCTCCAAAGAACA
CCACCAGCTGCAGAACAAACACTCAAAACCTAAACCTGTGAGAGACTTCCAGTCAAGCCATAACATTCCATCTTGGTTG
CCAAAGGCTCACGGCCATCTTAAAAGACAAAGACACACTTATTCCAATTTTAAGACGTTCTCACAGTCTCAACATTGAC
CAATAGTCTAAGTCCAAAGTCTCCACTGATGGTCAAAACAGTCTGTGGTCTCCTGGAAATAAGAATGTGTTCAAGATTA
GAAAAAAAATAGGAGACCAAAAGCCAACAGGGGAAACACTTAAGTCTTCTACCTCCGTGTCCAGAATCTGGGCACATCA
TTTGGTCTCACACAGAGATGTTCCTTAAAAATCTAGGTGCTAGTCTCTGTGACCCCATAATTTACATTCTGCACACCTG
AAAACTAGCACCAGATAGGTAAGTCAAAAGTCAGCTGCCGCAGGGACCCCTTCGATTATGGCTGCTTTTGGCTTCTGAG
TACCTGAGAAGCTGAACCAAAACCTAGAAAACCATCTTCTTAGGTGGCCCCTTCCCATCGGAGCACCTTGGTGACTCTT
CAAAATACATTCACCTTCTGAAGGAAAGTATTTTAAGTGATTAATTGATTCGTCTTCTATTTCATACCCTGGAGCCCTC
AGAATGGGGACAGATTCTCAGCTCACCTGCTCTGTTGCCCCCGTGCCAGGTGAGCATCAGTAGCATGCCGTGACCCCTA
GTCTCTTATCCACAGCTTTAAACATCTTCTCCTTTCTTTCAGGGCCAAATTACACATCTTGAAACTTCTCTGCATTTTG
CCCCCAGTCTCACTGTGAAGGTAGCTAAAAGTAACCAGCCAGAACCATACTGGTAGCAGGTTGACCTCTGTCTGGGTTG
CTTTGCATTTTCTCCATTACCTTTGAAGTAGTCCACCACCTCACTCAAAATTTCAGGTCATGGGTAGAATGTAAATAAA
TTCTTTGTCAGATTCCAGTGGCCTCTAGAAGCCAGTGACCAGTGGAGTCCTTGTTTTGCCCAGAGATCACGTGGGTATG
GTCTTTGCTGCTCATATTGTTGTTAGTGTTTGATCCTCCAAGTTCTCAAGGGAACAGTGGATCTGGGGCCTTAGAGTCC
ACATGGTTAAACTGTTGCAAGCCAGTTTCAAAGGCTTAGAAACCACCTGGTAAGATTAGCCATCTGAATGTTGCCACTT
TGCTGGGATCCGCTCTCTGCTTCTCACTTTAGCATGGTTCTGAGAGAAACAACTTGAAGAAAACACTCTTTCTGGCTCG
TGGTTTTTCAAAGGGCTTCAGTCTATCCAGCAGTAGCAGCATGAAGTAGAGGCACCTCACGCCACTGAGGCAGATCAGG
AAAGAGCGAGGACAGAGGCTTTGTGTAACCTTCAAAGCCTGCCCCCACCCAACTGCTTCTACAAGGTATGTCCCATTCT
GAAAGGTTCCACCGCTCTCCAAGTTAACACTGTCAGCTGGAGAACAAGCATTCAAAACACGAACCTATGGGATGTTTCA
GATTGGAACGGCCAGAATGAGTCTGAGAGAGTGACAGCTATGCGATTAGGGATGGCTCTTAGGTAGTAGCTTGAAGATC
AGATAGAGGTGGGAGGCAGCTGTGGGGAGAGGAAGTTGGTCCCTCTCGGCGTTGGCTCATTGCTGTCTCCTTGGTCAGT
CTGTTTCGTGAGGCTTAATAGAGATATAGTCTGTGGCTCAGTGAGCTTTAACGATGATAAAAGTCACTGGGCTACGTGT
TGCTGCGGCTTGATCCAGTGGCATGACTCCTCGTCATATTATCTAATGATCTCTCTCTGCGCCATGGCAGCGAAGTGTC
TTACATGTGCACACAATGGGGGAAAAGGATTGTCGCCGTTACAGTAACATCCCTGTCGCCACCCAGCTGCCGACCTTAG
GGGATAGGATTTTCCATGGTCCTTCACTCTGTTGATCCAGGTTAGTTACGCCGTACTGACGGCGGCTTGAACAAAGTAG
AAAATGAGATCTCTGTTACTTGTAGTACTGCCGAGGTGACTCTCTTCACAGTCCAGGAGTCAGGCTCCGTTGAAGTCTT
CCTGCCCTCTGGTCCTCAGCTGGACGAGCCACGATCACCCGCCCCACGAGTCTGCATTCCACGCAGTGGGAAAGGGGGC
AGCTTAGTGGGGCGCACTAACCCAGGAAGGGCTCATTCCGGATGATCATCACCTACACATCCTGCGATCAGAACTCAGC
CACCCTGCAGCCAAGGCTTCTGGGAAACATGGCCTTTGACTGGGGCAGCTCAGTTGTGCATTTTCTAAATTCTGTATTG
AGGGATGCTGGCAGCCTCTGCCTCTGATCCTGAGCCCAGGCATCTGGTCTTGCTTCAGGGGTCACTAAAGAAGGAGTCT
GGTGTCTTCAAGGATCCTGTGGCACATAGAAAAGTTGACATTTCTGCCTGCTTGGCATATTCCTGGTCTTCGAGCGCGC
ATCAGTTTTAGACTTAGTTCTCATGGCTGTGGTAGGCACTTGGGGAAGTCAGGCAGGAAGCTGGAAGCAGGAGTTGAAG
CAGAGGCCATGGAGGAACACTGCTTACAGGCTTGCTCCTCAAGGCTTGCTCAGCCTGCTTGCTTGTAGCATCTAGAACC
ACATGCTCAGGGCCTTCCTGCATCAGCCATGTATCAGGAAAATGCCTCCCACAGACGTGTCCACAGGCTAGTCTAGTCA
GGTGGAGCCAGCTGAGAGCCCCTCTTTCTGCAAACCTTTCTGTATTACAAGAAGATGATTCTAGGCACAGGGTGGAGCA
CGCGACTGGAGCCATGCCCTGGATGTCTAGCTGTGTCTGAGGGTTCGTTATCACTTAGTGGTGTTTGCTCTGTTTCACA
CCGACAGTATCTTGGCTCCTGCTTGTAGACATGGGGTGCAGGTAAGGACCAGAGAGGTTGTCTACTAGGACAGAAGAGG
TGCCAGGTGGCACAGGAGTGTGGGTGACATCCCTTGGCTTGGCAGCATGAGGAGCAAAAGAGCTCTTTGGGCTTCAGGC
ATTGTGGATGGTCCACAGTACCCCATCCAAGGCAGGGCACGATGCTCTCTGTCCCCATGCAGTGACAAATCCTACCCAA
CCCTGCCTCCCCGAGAACAATGCCGAACTGAAGTCCAAGTCCAAGGGAGAGTCTAGGAGCTCAGGGGATGCTGGAGGCA
GGTGGGGACTGCTTCCTGTGCCCCATGCTCTCTCACCCTTCTAGAGGCACCGTTCTCTCTCTCTGCGTAGAACATGCTC
TGCAAACAAAAACCTGATCTCACCATCATTTGCTCAATCTCCTTCCTCAGTGGAGGGACTTGGCTTGAGTGTCCCCTCT
GTTGTCTGTGCCATTTCCTGGGGTCCCTGGCCTTCTGGCTCCTTTGTGTGATTCCTTTTTCATGTTGACCTTTTGGTGT
TGGTTTCTTTTTTTTAAACAGGCAACCATCGGGATTGACTTCTTGTCAAAAACCATGTACTTGGAAGACCGTACGGTGA
GTTCCTGGTCTTAGAACTGGAGGACAAGGAGGGCATTGTCGGGCTTGTTCCCTAGAGCCCTCACTTGAGCACTCTTGGG
AGTCTCTGCCAAGACCAGGAGGGAGCTAGCAGTGCCATCATCGTGGGGTCTGGGCTTCCAACCCCCTCTACCACTCCTC
TACCGATGCCTCTGTTTGGGCCTTGTAGGTTCGACTGCAGCTCTGGGACACTGCTGGGCAAGAGAGGTTCCGCAGCCTG
ATCCCCAGCTACATCCGAGACTCCACGGTGGCTGTGGTGGTATATGACATTACTAGTAAGTTGGAGTCTGTGTTGGAAG
GAGGGGGCTCTTAGGACCCAGTGTGACCCTGACCAGACCTGTGTGTGTGTGAATGTGTACGCCAGCGTGTGTTCAGTGT
GGGGTAGTGTGTTATCTTAAACTGTAGTGGATTCATCAGTGTCCTTCAAACTCCTGTGACAGATTCGACTGCATAATAC
AGGGTTGATCCTGCTTGGGGCACGGGCCCCCCGGGGTGGGGGAAATGGCAGGTGTTCACAGGGTTAGCTCTCTGTGTCC
TCCCTGGCCCTGGCTGGCATGTGTGTGCCAGCTTTCCCCAGGCATCTCTCGAGGCAGTCCCTCTTGTATACACGGTTTT
TGAAAGGGCTGCACAGACTCAGTGGGGGACCAGACATTGGGGCAGGCCTTATGCAGAGCCCAGGTACCCCCAAATCATC
CAGAGCAAAGATTCTCAACCTGTGGGCTGACACTCTTCTAGGATCAAATGACTCTTTCACGGGGATGGCATACCAGATA
TTCTCCGTATCAGATACTTACATTGCAGTTCATAACAGTAGCAGAGTTACAGTTTATGAATTTGTTACTGTAGCAACAA
AAATAGATTTATGGTTGGGGCTCACCACAACATGGGCAACTGTGTTAAAGAGTCATTGCATTGGGAAAGATGAGGACCA
CTGAGCTAGAGATGAGCAACTGTGTTAAAGAGTCATAGCACTGGGAAGATTGAGAACCACTGACCTAGAGGAACACACC
TGGGAAGCCCCAGGCTTTACTCCCAGAGTGCTCTGAGGACCCTGACATCACATGCGGTTGTGCACGCCTCACTGCCCAG
TTCTGCCTTGCCCCTCTGTCTACCTCCTCCTCTCTGAGCATATGCTCCTTACACCCCCTAGTGAGGTGGGAGTTGTGTC
ACAGGCTGGGGAGAGCAGCCACCTCCCCCCCACCCCCAGGTGCTGAATTTGGATGTCTGAGGGAGATGACCCTGAACAC
AGGTGACTTGCTTCTGTGTTGATATGCCTCTAGGGGGCGCTTTATCTGCCTACCCTTCCCTGCAGGGTTGCAGGTTCTC
TTCCCCAGCTAGCCTGGCCTTCCTCAGGCTCCTCTGAACATCACTTTGGGGGGACACCATTTCCTAGGGGCCGCCATAT
GCTCCCTTCACAGGTCCGCGGCTCGGCCAGGCCATGGCCAGCTGTGACTCTTGCGTGGTCTCTAGAGTCACTGTTCTGT
GTAGAAATTGTGACAGCCTAGCTTCCTAGGTACGGTGACTTCTCTCCCTAGGGTGGCTGAGCAGTGCTGGAGGTTCTCC
CAGTATCACAGGGTAGGAGGCCATCTTTCCTTCTGACCCCTCCGGGGACCTCATTCCCACTCTGTTCCCACTTTCTGCC
TCCAGATCTCAACTCCTTCCAGCAGACTTCTAAATGGATTGATGACGTCAGGACGGAGAGGGGCAGTGACGTGATCATC
ATGCTTGTGGGTAACAAGACGGATCTGGCTGATAAGAGGTAGGCAAGCACTGGAGTGTGGAGGTGCTATGACTAACGGG
CCCATGCTTCCTCGCCCCTCTGTGGCTGTTCCTGCCCAGGTCTGAGATGACAGGGCAGCGAGGCTGATCTCCACGCACA
GGGCCCCCGACACGCCTGTTAGCCCCCATACACTGCAGGCTTCTCATCTCTGATTTTCCTCAGCTCAGCAAAGGCAGGG
CAGGGCCTGTCTGCACAGGCATTTCTATCATGGTCCCAAAGTAGCCTGTGACACAGCTTCTGTCCCTGGGAAATCCTGG
CGTTGACATGTGAGGTCCTCAGGTATGAGCCTGAATTATGTCAGCCGAGTACCGACTTTGTCCCCTGCCCATGCATCCT
GGTTTATGGCTGGATCTGGGCATGGAGTATTTTTGGAAAAGGTTTCTCCGTAGCTGTCCCCTGATGTCACTGCCCATTA
AGGTGTCATTAGCATATATGTCCGCTCTTGGAACCCTGTGCTAACTGGGACAGAAAAGCCGTGTGTCGCGGTTTCTAAT
AAAGCATGTGGCTTCTTGCAGCAGCCCTGCCGAGGGGGGAGGGAAATGGTCTCCTCTGCAGAGCAGTATGGGCCAAGGC
GAGCTACTTTTAATTTTGGTGTTTGCATTAGGAAATGGGGGCTGAGGCTTCACTCCAAGAAAGGCTGCATGTGTCCAGG
AGATCCTGTTCTAACGACTGCTGAGAAAGCCGTAGGGGGCGTGGCTCAGTCGCAGAGCGCTCGCCTTTCCAAGTGTGAA
GCTCAGCATCATAAAGCCAGGCATGGTGGCATATCCTACAGTCCCTGCTCTAGGGAGGGACATATCATACTGAATCAGT
AGTTCAGTGTCATTCGTTGTTACATCACAAATCCAAGGCCAGCCTGGGCTACATAGGTAAAAGGTAGAAGGTAGCCTTG
CTTCCTAGTTCAGAAGATGTGGGAAAATGTGGAAAAGACTTGGGGTTCTCTGTGCCCAGGTGCCACATTCTTGCTAGAC
AGACTATAGCAGGCCTCCTGGCAGGGACCCCTGGGCAGGAAACCTGTCTTCACGGCTGACCAATGGGCCTGGCAGTCCC
TACAGTTCTTTATCGCAGGCTGCCTCCTCTACTTCTGCCAGGGGTTGCCTCTCTGCCCCCTGATTTTCCTTCTCCCCTT
CATTTCCAGGCAGATAACCATCGAGGAAGGAGAACAGCGGGCCAAAGAACTGAGCGTCATGTTCATCGAGACCAGCGCG
AAGACTGGCTACAACGTGAAGCAGGTTAGGATACAGCTGGCTTGCTCGGGACTGGAGGCCCTCCCCTGAGGTCTTCCTT
GCTCTGAGTGGCTAGCGACTAGGATGGGGCAGACAGCCAGTGCATATACTTATAGCTCTGGGCAGTGGGGGATGGCACT
GGCTTCCAGCGCTGGTAAAGCTGGTGGCGTGGGGGGTGGGGGAGGCACTCCGCTAGGGAGCCGCGCAGACCCTGTCAGT
CACTAGTCTGTCTCCTCAGCCATCATCAGGTGTGGGTCCCTGGAGCAGCGTGTGTGAATGAAAGTCCAGCATGGACTTC
CACCTGGCTGAGGAAGCTGTGGTTCTTAGCATCTCATTTCACTTCACATGCAAATGTAGGATGTTGAATCTGATCGACA
CGTTGGGCTTATGTCTTGTACTTGGCAAGAACCCGGGGCCATGAAGGGTAACTCAGAAATGGAGCAAAGAGACTCCCTT
GGCAGTCGGGAATCATGGGAGGGAGCCAAGGTGTGGCTGGGACCCACAGGACCAGAGTAGTTGGTGGGCGGAGCTTAGC
AGCTCAGCCGACCTGGGCTTCAGAAAAATCCCACAGGTATTGTGACTGCTCCCTCATCTGTAACCAGCTCTTCAGTGAT
GAATACTGACAGCCAGACAGCCTCAGTGTTAGCAGTGAGTCCTGTGACTGTCCCACTGGCAGAACTTCACAGTATGACA
GGGATCCCACACTTCACAGTACTGGATCTCAGCATCCCACTAGCCGTTAGACCACCTGTAATCCTGATGTGAACATGTA
TGTTTGTAAGGAGACACGGATGTCAGCGTGGCTCAGATTTATGATCCTTAAATATTTGGGAAGTTTTATTCAGAAGCAA
ACGGTTTCCTTTATCATCCATTATAACTTGACTACATCTGAAAAAAACGAGTCCACCGGCTTCAGCAGTGTGAAAGGAA
CCCATGGCTCAAACAAGGTGAAGAACCCCTGTCTCGGAGCAGGAGGAGGGTGGTAGCAAGGAGGAAGGACATCCTAGGC
AGGGCTGATGGGCGTAGAGCCTGGCAGCAAGGTGCCCGTAGCACGGGGAGGGACCCTGAGTAAGGAACGTGGCTTGATG
CCGCCGTGTCTGCTGCGGCCCTCGACTGACTTCCCAGGCATACCTGGGCACCACTTGGCTTTTGAGAGAGAGTGATGGT
TCACTTCATATTGATAGTGCTGAGATTAAGGTTGACAAAGGAGCTAGAAAGGACAAAGTAGGAGGGGCACTGTGGCCAT
ATTAGGGAACCCCCGGCCCCAGCTTCCGGAACCCAGTGCCCAATTGGAGGGCCCTTCAGCTCCATTCACTCCAGCCCTT
TCCAAGCCTCTGTATCAGATGTGAGCCTAACCACCTCAGAGAGGAGAAAAAGAGGCGGGGGTGGGGTGGGTGGTGAGGC
CGCTGCTCTTTGGGTCCAATGACATCATGGGAAATCGAAGCCGAGGACAGTATCAGGCATCCATAGAGCAGGAGGCATC
TTCAACCTGCTGGGCCAAGGTGAGACTGGTCCCTTCCCCCATCCTGGAATGATCTGGAATCTGAGCAAGGGTTTGAGCA
AGAGTTAAGTCTGGTGGGTTTGAGCTGCTATTGCAATTGCTACAGGCTATGCAGCTCACAGGTAACGGAACCTTCTTCC
TCCCTGCTCTGAAGGCTGAGGACTCCAAGATGAATGCGCTGGGAGATCCAGTGCCTTGCGGACTCTGCTCCCTCATATT
TGGCACCTTCCAGTTGTTTCCTCACATGAAAGGAACGTGAAGGCTCCCTCAGCTTCTCTTCCAGTCAGGAGGGCTCCTT
AAGGCAACACCTCCTCACACCGCCTTGCTAGGAGTTAGATTTTTTTTTTTTCATTTGTTTAGTTGGTTTTGTTGTTCGT
TTGGTTGGTTTGCTTTTCAGTTTTTCGAGACAGGGTTTCTCTGCATAGCCCTGGCTGTCCTGGAACTTACTCTGTAGAC
CAGGCTGGCCACAAGCTCACAGAGTGCTGGTGTTAGAGACATACACCACCACTGCCTGGCCAGGAGTTAGGTTTTAACT
TATGAACTTGGGGGAGACCCAGACATCCAGCCAGGCTTAGAATCTTCTGTGCTCTTGGCTTCTGCTTGTACTTGTTACT
TTCAAGATGTCACCTCTGCCACTGTCCATCTATTAGGTGCCCCTGATACCTTCTGTCCTCGTGCACACTCAATTAGGTA
GACTTGCACGTCGACCCACACTCCACATGCTTGCTTCTCCCACACCCACTTTCTCATATACACGCAGAAACATGGCATT
TACCATGATACACACACATACATACACACTTACACCCAAAAACACACTTAACTTTTTATACCCACTCTACAAACAATAT
CAGGCATACCACGCATAGCACACGCATGTAGCACACCACATTGACACAAATTTTCACATCCTTCACTGTGGCTATGGCC
CTGGCTCCCAGGATCTGTGTCCCTGGGGAGAGTCGTTTGTCTTACGTAAGGCTAGAAACTGGTTTTCTACACCTAGTCC
CCATGTGAGAGTGATGGACAGACACCCACTGAAGGGCCTGCTTCCTGTGGCCTGGATGATTTCTGTAGCAGAGCAGGTC
CCTTGCAGTCACCCTCATGACCCCTGCTGACTGCCTGTGGGCCAGCCTGCCTCTAGGAAGAGCCCCAGCTTTGCTGTAT
GTGTGGACATGTGTTTGTGTGCAGGTGTGTGTGGGCATGCATGTGTTTACTTACACCTGTGGCGGTCACAGGTTAACTT
CTGGTGTCATTCCTCAGGTGTCATCCACCTTATACTTTGAGATAGGGTCTTCGACTTTACCTGAAGTGTACCAGTTCAG
CTAGCCAGGGAGCCCTGGGAACCTGTCTTTGTCACTCCATCACTAGAATTATAAGTGTGTGCGGCTACATGCAGCTTTT
TACGTGGATTCTGGGGACTGGATTTGAGTCCTCTTGCTTGTGTGGCAAGCACTTTGTCTCCCTAGCCCCTGTTCCCTCT
TCCTATTAACATCCTGAGTCGCTCCAGGACCAACATTGAGAGGGGCTATGGTGATGGCAGAGGACTTAGAACAGGCCTG
CACTCTGGGGCAGTCAGTGGGCAGTCAGTGGACAGACAGGCCACCAATCCTCAGGCTCCGTACACGAGGAGAGCAGTAC
AGGGGGAGACCAGGAGAGGGAAGGAGGGGGACTGGGCAGGCCTCACCCTGCATCTCCTGCCTGCAGCTCTTCCGACGTG
TGGCGTCAGCTCTGCCCGGCATGGAGAATGTCCAGGAGAAGAGCAAAGAAGGGAGTATCCTTTTCCTTTATCATGTGAG
TGAAAAGATGGCTCCCCAAGCCCGCGAGTCGTTTAGTTCAGTAAGCAGATGAAGACCACCTTGCCTCTGTCGCAGCCCT
CCCTGGTCTGATGCAGAGAGCCGGGCCACCTCTTTCAGTAGCCAGATGGGCTCCACGTTCTCTGAGCTCCAAACCTTCT
CTAACCAAGGCTGCCTCTTCTTTCTTAGCAGTGAGGAGAGACAAGGGCTGTGCAGCAGTGGGGGATTGGAGGGTGGTGG
CTCTGTGTTGCTTTGTAGTGAACACTGCGTGTGTTTCCTGAGTCCCCTGGAGATCCCAGACAAGGAAGCTTCCATGCAA
TGAGCACTTGATTTCAACCTGCCAATGCTTCCTCCATCTGCCCACTGCTCTGTGGGGAAAGCTTGCCCAACACTCATCC
AGTATAACTAAAAACCTCGCTTACACCCAGATGATGAATCTGAGGTGCGTAGAGCAATCCAAGGCCCGCTGTGTGTGTG
TAAGTCAGGGAATTAGCCTTTACACTGAGACTTCCTGCATATCTACCCCTACTCCGTCCTGGAGGGTTGTCTCTCAAGG
ATCCCAGCGAGGCAGAGATTAGTAGCGCTGTAGGTGGCTGAGGACATTGCCCACAAGCAGGCTTTCTTTGAAGTTTATC
AGATGGCCCTACCTGAGCAAAAACCCACCTGCAGAGTCAAGAAAGGAGCAGGACCGATGGGAAGCCAAGAGGTGTAGTG
ACCCTGTGCCCACTGGGAGGGACAGATAGCCTGCTTTTATCCTGTCCACTCCAAAGGCAAAGCTGACATACTAGCATGC
ATGGCGGTCATTCATTCATGTTCTCCCCGAGGCCCCGGTGGCACTCCATGCAGGATTCACAGTTGGGTCCCCCAGGCTC
CCACTTCAGCATGACAACTAACGTGGCGTCCTAGTGAACCTAGCGACCCGCCCAGCTTTAGGGAGAAGAGCGCTGGGCA
GATGGCAAGCAGATCACACAGGGCACTGTTTGCCCAGCTGTGGGGTGCCCCCATCTGGCAGATGCAGCCATCCGTACCA
CTCCCAGGTGCTCATGGCTGGAGCCTCCTATGAGGCAAGACTGGAGCAGCCTGGAGCAGACTCTATAGACAGCCCAGCA
GGGGACAGGTGGAAGCAGCTGCCACCTCAGCTTGGTGCTGAGCCAGCACTTGTGTTGACTGATGGTTCAAACCCAGATC
CTGTCATGATGTGTTAGGGATCATGCTTGGGATTGCATCAACATGAGGAACAAGCACACAGAAGTGCCACTTGGTGATA
TATGAACGGTTCTCATGTGGCCTTACTCCTTGGACTGGTGTTGGGGGGGGGGGTGCAGAGCTTCTGTCTTCTGCTTCCA
GGTCCCTAGAGGGTGTCTGCACTTCACATCTGCTCTGCACAGGAAGCCTGCCCAGGGCCTGTCTAGCAGGTCCCCTTAC
CCACCCTCCAGCGCTTGATCTCTCAACAAAGTTGAGCTAAGGGACCACAGAAAGATAGGGCCACAGCCCTTTGCTGTAT
CCACACACACAGGGCACTCCTTTCTGGAACAAGGGTTTCGTGTGCCAAATAATGACAGTAACTTGGCAGTAACTAATAG
ATTTCTCCACCAACGAAATGAACCAATTCAAGCCAGATCAAAAGTGTAAAGGCAGGTTTATTGAGAGGCAGCTGTCCGA
CGAGGCACACTTGGAGGTCAGTAAAGTCACACGTCCAGGCTAAAGCAAGGGAGTTATGTGGGTTTTAGGCACAGAGTGA
TGACGTGTGAGCTAGGAGCTGGGATTATGCCTGTGTAAAGTAGAGAAGCTGTGTGGGCACTCACTGTGCGTGGCTGGAA
ACAGAGACAGGGAGAGGGGTTGTGTTAGCCTGGAATTTTCCTCTTGCAGGGCCGGGTTGGGGGAAGAACAAATGGGGTT
TCTTAGCTTGTGCAAGGGATATGCAGGGGCTCCAACCAACCTTCCTGACCTCTTTGGGTAGAAGGAAGGGCACTGATTC
AGAGCTACATCCTGCTGCAGAGGGAGAGAGTCGGGAGTCAGTGGGTCCGAGTTCCTCGGCAGGTATGAGTGCAGAAGGA
TTTGGTTGACAGTTACTCGGGAAACTTTGAGAATCCGTTCTGGGAGAAAGCGGAGGATGCAAGGTGCTAGGAGGAAAAA
AATAGATTAATACCACGGCCCTGTGAACGGGGCTAGCTAGGTGCAGAGTGAAGACTGCCAGGAAGAATAAAACGGAGAC
TACCCTGGTTGTCTTGGCAGGGTTCTTCAGAGTTTGTGAGGTGACTCAATGTTAGCCTCTACTAGGCCAGGTTTGCTGG
CATAACAACATTCTTTTCCCAGGGACATACAGGTGCCTCCTGAGGGATGAGCCTGCTGTGAGGAGGACCAATGCTCCTC
ACAGGTTTTGCATGGCCACGTGAATTGATCTCATGCTGGAGGAGTGGCCACCAAGTTGTTGATGGGCTTTTGGGGACAG
TCAGACACCTCTCTGATCTCAGCCACCTGTATCCCATGCCCCCCGCAGTGGAGGTCACAGCAGCAATACCTGTTACTAC
TGTGATCTGTGTGGGCAGAGGGCACCTGAGATTGGAAAGAGCTGGTAGGATAGGAGAGCGTGGCTGTGTCAGCCTTTCC
ATAAAGCATCTGGTTCGGTACTGGTGTCATTGGGATACACAGAGAGGAAGGATCACCAGGAGGCAAGCTTTTTGCTATA
GAGCCGCTGCACCGAAGAATCCCCTGCTGTGCCTGGGGAAAAAAACAAAGTTGTGTTAGTAGTATTGCAAAGGGAGCCA
GGTCCAGAGTAGCAGAAATGGAAGTGAGTGTCTGGAAGAGGAGTGCGGCTTGTATAGTGATAGCCTTTGGTTGGAGGGT
CAGCCCTTGGCCTCACGAAGGGACCAGCAAGGGAACTGCTCTCAGAAGAGCGCAGCCCAGAGCAGCCCAGAGAGAGCAG
TTGTTGTTGTCAAAGACTTTAGAGAGGTTAAGTAGGATTGCTCCCTCCTGGATGAGGCCCAGCCAGGGGAAAGGTTCAT
TTTCTTTAGTTTTTACCTGGGGTTGGGAGGAGTCTCTCGGGTGTGATTGGAGGGACTCCTGTTGTGGTGTGGTCTTGGT
GAGGTTTGCCGGGAGCTGGAGGGAAGAGGGTCTGGATGTCGGGTCTCCAGATTTCTCTCTGTTCACATGGTTACGAGGA
TGTTTCGCTCTGATAGACTTGGCTTATTACCCCGAGCCCAGCGGTCATTCCAAGGATCTCAGACGCTAATATAGCTGTA
GTTTAGTGGGGAATATCCAGCCACTGGGCAGGCTCATCCCTGTCCATGCTCTCAGCAGCTTTCTTGTCTGCACCCTCCT
CGGATGTTCATTTTACAAGGGCCCCATGAGCAACCCCCTTGTTCTTTGACCCTTTGGGAATGACAAACTTCCTCCATCT
GGTGGTCGTGGGTAAAGCATTCATAGAGGAGCAATACTCCCTGTGCATTTAAAGAAAGATCTGGGATGGAAATACCATC
TTGGCACCCCTTAGAAGGACAGTCTGTTTGGCCCGCGATGTCGTTGTGGGTTTCACCGGCTTGATCGCAGAACATGGAA
GCAACAGCAGTATGTTGGAGCTGATTTGGTCTCACCTAGCTGGACAACCAGGCAGGGGTGTCTCGGTGTCTGGCACCTG
TGGCAGCAGAGAAAGGGTGTGACCCAGGAAAAGGAAGAGGCAAATAGAGTGAATGTTGTCACGTTTGACCATTCAGACC
TGGTTTTGAGAATCCCTGTAGAACCTGAGAGCGGTGGGTGCCAACTGCTAAACAGACCAGCCATCTTGGGCTGGGGCCT
TTTTGAGCCGAGATAGATGGTGCCAACACTGATATCCTAGGAGTTTGGCAGCTGAGGGAGTGGTGATTACCATGTAGAG
TCCGATCCACTGGAGCTCTAAAGATTTGGAAGACAGTTGTTTGAGAAGCACCTGGTCCCCTGACCCCGGGAAAGGGACA
GGGGTGGGCAGTGGCTGAGTCTGCTGATATTGGGGTAGGGAGATAGTTGTCAGTGTGTGAGCCGATAAGGGAGCACGGG
AGGGATAGGGTAAGTAGCTGGGGGAGTCCGGGCCCGCGGATGTTGGTTGAGGAGAAACAGCCTTCCGTGCATGAGCTCA
GAAGGACTGAGGCGCGTAGGAGAATGTGGGGTAGCTCAGAGGTGAGAACACTTGGGAGAAGGGAAGGCCAGGGTAACCT
GGGCTCAGGTGAGAGTTCTGAGTTGTTTGATAAGGCTCTCTCTACCTTTCTCAATGACTGGGTGGCACGGAATGTGAGA
TTTTCGGGTTCAAGGCATCCCTGGCATGCAAAACTGAGCTCCTGTGTCCCAGGAGCTGTCACATCCGCTGCTCCCCTGG
AGGTGGGGAGCATTTGGATCCACCCTGTAAAAGTGTCAACGAGGGTTAGGAGACGGCAGAGTCTTTTCTGGGCAGACAT
GTGTGTGAAGTCAGTTTGCCAGTCTTGTCCTGGTTGGTGTCCTTGGAGCTGGTGCAGGGTCTGGCGTATCTGGAGAGCC
CCCTGTGAGTTTGTCTTGGCACATGTTTGACCGGAAGGATGAGGCTGTAAAATATGGGCTCAAAGGTCAGTGGAGTCAG
TGGGGAGGGGCAGCTTTAGAAATGGGAACAGAGCCTTGGGTCTGATGTGTAGGCTCTGGTGGATGTCTGAGATAATAGA
AGGTGCCAATTTGAGGGGGAGAATAAAGCTGTTATTTAGGCAAAGCCATCCATCTTTTGTCTGTGTGGCCCCTTTGTTA
AGGAATCTGGCTTTATCCTCCATCTGACACTGAGGTTTGTAGGAAGATCGTAGGAAGAGGATGTGCCCCGTGCGTCTGT
AGGAGCTAGGAGCCAGACCTCAGACCACTGAGTCAGCCCTGGAATTATCCACAGGCTCTGGATCTGTGGAGGTCTGGTC
CCTCCCTTACTCCTGCGCTGACTTATGGCCACCTCTGCAGGGAGTTGGAGGGCTCCAAAAGCTTGGCTATAAGGGGACC
ACCCATGGTGTCAAGGAACCCCCTTTCCTTCCATAGGACAGAGGGGCTGTGAGCTACAAGAAAGGCTTACTTTGAGTCA
GCATTGGCTCATTGTCCTTTGTCAACATGGAGTGCCCTGGTTAGAGCAATGAGTTCAGCCTTTTGTGAAGAGAGGTTCC
ACTGCGAGATGGTTCGACTCAGTCATTTCAGCTGAGGTGACCACCGCGTATGCCGTCTGGTGGGTCCTGAGTTATCTCT
AAGGGAACTTCCATCCACAAAAAGGGTGAGTTGTGGGTCTGTGAGAGGCTGGTCTGGGAGGCTGGGTTGGGGTGAGCGT
AGGTCCTCCACAGCTCTAAGCAAGAGTGGGAAGGCACATGGAGGAGGGTGGACCAGGAGGAACAGCTGCTGGGTGTAGA
GCAGGGCTAGGGGCCAAGGTGACCTGGGAGTTTCCCAGGAATAACAGATAAAAGGGTTGGGCCCATGAGGGTCTGAGGA
GAGAGAAAGAAGGGTGGCTCAGGAGATCAGAGAGGCAGCGGGTAGAGTATACAGTAATAGGCTGGAGTAAGGTGATCTT
GAGTGAGTTCAGCCATTGCTGTTAGGTCTCGCAGACATGGCTGCCATCGCACACAGTAGGGTCCAGTTGTTTAGATAGC
AGAGCAGTGGCTGGGGGGACTGGAGAGATGGCTCAGCGGTTAAGAGCACTGACTGCTCTTCCGAAGGTCCTGAGTTCAA
ATCCCAGCAACCACATGGTGGCTCACAACTATCTGTGATGGGATTTGATGCCCTCTTCTGGTGTGTCCGAAGAGAGCTA
CAGTGTACTCATATGTATTAAATAAATAAATCTTTAAAGAAGAAGAGGAGGAGGAGGAAGAGCAATCAATGGCTCAGTG
AGAGGGCCCAGTGGGTTGGACTAGGGCCCCAGCCCCTCGTCAGTAAAGAGGTGATAGGACTGAGTAGAGTCTGAAAAGG
CCAAGACTGAGGCTGCTAAAAAGGCATCTCAGAGAGTAGGGAAAATGATGGTGAGCTATAGCTGAGTGGGTGAGGGGCC
CACTGGGGGCCCCCTTGACTGCCTGGTATAGTGGCTTAGCCATATTAGCTAAATATGGGAATCCAGGGTCTAAAGAATC
CAACCAAGTCCAAAAATGAAAGAATATGATCTGCCATAGTTTGGGGCTATAGATCTCTCAGAACCCGCGCTTGTTGAGG
GTCTTAGAGCCTCGGCTAAGTTGAACACCAAGTATATATTACAGTGGGAGAGCATAGTTGAGCTTTAGATGGGGAGACT
TGATCCCGGGTAGACAAGGTAGTTTAGAAACAAGAAGTTGGCCGTCTGGGACAAAGACAGGGAGGGGCTACAAAGTAAT
AGGTCATCTACATACTGAAGACGTGTATTTAGCATTAAGGTCTAAGGAGAGAGCCAGGCAGTGGTGGCACACACCTTTA
ATCCCAGCACCTGGTAGGCACTGGAGGGCTTACGGAGAGGGAGAATGGAAGAGTTGCAAGTCCTATAGGGATCAGAAGT
CCCTGACACGCGAGGTGAGTATTGATGGACTTGAGACAGTGACGATGGGGCTCAGAAGTGGGGAGCTGGGGTCTGAAAG
GGGAAAGAAGAGGGGTAAAACTAGGACCGGCTGGTGGGGCGGAGCGATTACCAGGGTGGAGATATACCATACTTGGGGG
TCAACAGGGTCTGGTAGAGTACATCCAGGGTAGTCTGGCGTAGGGATCTGTGAGGCAACCAAAGGAAGAAGAAGATGAG
AGTGGGGAGAGGTTGTGGGGATTCAGAGAAGTGGCTGAGGATATTGTGGTCAAGTAAAGGCACAGGGCAGACAGGCATG
ACTAGGAAAGAATGTGTAAAAAATGGTCAGCCAAGGATATAGGAAAGTGGCATAGTCGGCATGAAAGGAGGGGATCCCA
TCCATCCTCATAGCAGAAACTGATGAAGGAACAGCGGGATCCGAGTGGGAGGTCAAGACAGAGAAGGTAGCCCCATGTC
CACCCGGAAGGTCATGGCACATTACCCTAGGATCTGCAAGAGTGACAGGAGCCCTCGAGTCTGGGTGCCATCAATCCTG
TGCCAGGCCGAGGAGCCCTAAGGCAGGAAGAGTTTGTGCTACCTGCACTGATGGCTCTGGACCTTCGTGACCTGGCCCA
GAGGACAAGCCCACACTGGGGCATTCTGACTTCCAGTGGTAGGGCAGTGAGCAGACAGCATGGGTTGCTGAGGGCTGGG
GCAGTTGTGGGATCAGTGGCTTTGCTGGCCGCATTTGAAACAGGCCCTTGTTGGAGTTGACATTGACGGGATGGGGTCT
GCGGGATTGCCAGTGGCCTCAGGTCAGTTGCCAAGTCTTAGGCTTGGAGTGCAACCTTTTGCTGTAGCTGAGCCTGTCG
GGAAGACTCAGTTGCCTCCCCTTGGGCATCGAATACCTTAAAAGCCATCTTTACCAATTCCTGTACGGGGGTTTGGGAA
CTATCTTCAGTCTCTCCCCGCCCCCTCCGAATATCTGAAGATGACTGGGAAATAAAATGGGTAGCCAGGACTGTAGCCC
CTGCCGGGGAGGCCTGGTCAAGGCAGATGTGTAGACCATGGTTTGTTGTAACCAGTTTTTTAATGGCCAGGATTTCATT
AGCTTCCTGTGTAATTTTGCAGAGATTGCCAAAAGTCAACAATCTTATTTGAGACCATTTCCATTCCCTGAAGGAGACA
ATGGACCGTACTCTAATCGGTGGTCAATGTGACCTGGCTAATAATTCCACTTAGGCTCTGTGGTCAGCACCGTTGTGTC
ACTCACAGGGACTGTATTGTCCACTAGGTGGCCCTGGTCTGCATACTGTCTGCCTGCAGCCTGAACCTGTCCATGTTCC
TCAGGAGTGAGGGTAGAGCCTGAATGACATAAAGATCGTGGAGTTAGGTCATAGTCCTGACAAAGGAAGCAGAACTCTT
TAATATAGGCAGATGGGATGGCAGAGAAGGGGCCTCTCCACTTTTCAGTCTGGGAGAAGTCTTGAAGGGAGAAAGGAAC
ATGAACTCCCACAGCTGTTTCTGCTCCGGCCACCTCCTGGGAGGGCAGAAGAGCTTTGGAGTATTGAGACTGCATAGGA
GAGGCTACAGGGGAGGGTTCAGGGGAAGTGAGCCAGGGAGTGCATGGGGATCAGGGTGTGGGTTGACCCCTAGGTGGAG
CCTGTGTTGGTAATGAAGGAGGAGGGACAATGGGAGGAGAGAGGAGGGGAGGGACAAGGGGGACAAGAGTTAGGGGGAG
GAAGTTAATTGTCCTTGGCTTTTGTCTCAGAGGGAGGGGAAGAAAAAGGGGTGGGTACCAGGGAGAAGGCTAGCCAATA
GGCGGGTTATCAATGGTGTAGGAAGGAGGAAGGAAGGAGGAAGGAGCAGGTATAGGGAGGAAGGTTGGCCAATAGACTC
AAGCTTATGGTGCTATAGGAGTGGGAGTAGTAGACAGGGCTGGGGAAGGGGTTGGTGTGCCCATGATTCAAGTGGTCCC
GCCAGGGTAAAGGGTGTCTTGTAGTCCAAGTCCCCAGATGAATGTGTGTCTGGAGGTGTCACAGCCTTGGCCAACAAGA
CTTGAGCCATTGAACACTGACTACAGAAGGGCGGAAGTGCAGTTCCCAAAACATTTGTACATAGGGGAGCTCAGGCCAT
CTGTCCATATGCCAGCAGAAAATTTCAAGATCATGAAGGATGTTAAGTCAGTAGTACCTCCTGGTGGCCATTTGGACTC
ACTGTCCAAGGCGTATTGTGGCCAAGCCACAGAATGAAGAGGAACTTAGGGTCCAAGACAGCCCCAACTTGGATAAATT
GCATAACCGCCACCACATGGGCTACTGAAGATTGGGTTTAAACTTGGCGTTGTCTTCTCCCGGACTTGCCAATGATGCA
GCGACCCATATGATAGACTGGGATCGAAGAGTGTGGGGTGGAGAAACCTTGGAAAGGACGTCTCTGAATCCAAGGCCTC
CCTAGAACAAAACGAATCCAAAGCCTGCCTGGAACAAAGACTGAGTCTTTGCTCTGAATGGACAGGCTTGTCCTGGCTC
GGCCGAGACTTGTCAGGGGATCCCTAGCTTGGTCCTGAACCTGGAAGAGGCACCCGGTACCTGTTAGGCTGTGGCTGGG
AAGTGGCTCTCATTGAGTAGAGAGAGGGAGAGAAGTGGTCCCCACATGGCCTGAGGCCTGACCCACTGGACTGGGGGCC
CAGCTTCTCCCAATTCTTCAGAATCATAATAGGTTTCTCCACCAACGAAATGAACCAATTCAAGCCAACTCAAAAGTAT
AAAGGCGGGCTTATTAAGAGGCAGCTCTCCAATCTCATAGGTGGAGGTCAGTGAAGACACACATCAGTCAGGGCTAAAG
CAAGGGGAGTTTAGGGGCACAGGGAGATGATGTGTGAGCTAAGAGCTGGGATTATGCCTGTATAAGGTAAAGCATATTA
GCCCAGAATTTTCTTCTTGCAGGTAGGGTTGGAGGGAAAAGAGCAAACAGGGTTTCTTAGCTTATGCAAGGGATAACCA
GGGGCTCTAACCAAATAGTAACCATGTGTCCCAAGGAGAGAGTGTTAGGATTAGGCATTGGGGGTACCTTGGTGGGTCT
GGGCCAAGGTGTGCTGCTAAGAGATCACTCTACATAGCAGACCTCACACACAAGAGGTTTATGGGAGAGGGGAGGTAAA
AGGCCATCTTGGAGTTGAGATATAAGAAACAGACAGAGAGACTGGGAAACAGAATTAACAAGACACACAGAGAGAGGAA
GATCAGGGATGGCTTGAGACTTAAAGGGTGTGTGTGTGTCACATAGGGGAAATAAGCAGCCATAGGACGGTAGAAATGC
ACCACACCTGGCCACAGCGGGCAATGACATAAGCTACTAGCTCTGAGTTGCTGAAGGACAAGCTGGTGGGGCTCCTGAT
TTATAGTATTCCTCCTTCTTGTTTATTATAAAAGGCAAGAAAAGAGGAAGGGGTCGTGGTAAGGTGGCAATGGGGGTGC
CTATGCTTTTTAGACTGCTCCCTGCTATCTCAGAGCATGGATATCTTTGGGGACCCAAGAAAACTGGGGTGCTGGCCAA
CTCCTGAGAGTGCTGGCCATTTCCCTAGCTGTGTAGGCTCTGTGGGACCATCTGGGGCTAGCAAAGTGCAGGCCTAGTT
GAAGCAGTCTGTGAGGCTGGACCACCTGGGGCCAGCCACTTTCAAGCTATCCTAGATGCTGACTTTGAGTTAACATGGG
GACCTGGCAGGATGCTGGGACAGATACATGCAGGAGAAAATCTTTTCTTAGGTGTACATTTGAAACTTTTAGACCCAGG
GTCCTGGTAGTTGGGAGAGGGGAGTCCCCAAAACCAAGGAAAGGGGATCCCACCGTCAGAAATAAGTGGACAGTAGGCA
GGTAGGGGAACAGGCTGTTGACTGACAGTACTTATCTGGAGTCCATTCACCAGGAGAGAAGGATTCATCCTATTCCCTG
AAGCTTACGAGAACTTAAATTTACAAAAAGAAAGAAGTTTTAGGCATGTTACCATTGCCACTGTTTGTAATCTACATTG
AAATCCATATTGTAGAGAACAGACTCGCCTTTCTGTCATAGTAGAAGCTCAGGATATGATTCTGGGAGGACAAGCTGGG
GGAGGGCAGGGACCTTCTGTGGAGCAGCAAGGCCAACACACACTTGATCTTGATATTCAGTACAAGTACAGACCATGAA
AGAGGGGCTTCCTCCCTCTGTCCGGAAGACTGGATGTATCTATCAGACAGACAGTTTTATCAGCGCAATAAAAAGCACC
TGTAAGTCTATACTTAGAAGACAGCCATAGGAAATCTAAAACCTTGAGCTTGTGACTGTTATAAAAGCAGTAGTGCTTT
TCCAGAGCTAGATTGATAGCTTATTAGAACTGCATTGACTCGGGTTAAAACTCTGGGTTTTTGAAGTCTGAATACAACC
ATAGCACAGCAAAGGAAAGAAATCTGAAGCATTTTTTTTTAATATATACCTTGTTACTTTCTTACGCCTTTACAAATTG
CATTTACATGCCTTAGAAACACCTCCTCAGACCCTCAGACATTTGCTTAGATCCTCAGAGCTTAAGCTTTAAACTTCAC
ACCTTTTGTTCCTACCCAGCCGTCGACTGAGAACAGTCCTCGGAAAGCAGAAATAGTGGAAAGTTACACTGGACTCTAT
CTTGTGAGTTTGACTCTTTTCTGAGTCTGGTAACAAGGCACACTGGGTCTCAACCCAGTAGGAGCTCTAGGACAGTGAA
GCCTGGGGCCTGATTTTTACACCTGAAGACAACTGAGCAGCGACTGAAGCCTTGGTTGCTGCTGTTAACAATTTACCAA
GCTGTCACTAGCCGAGTCCTTGGTGCCAGAGCTCTGAAAAGGATAGATTTCATTTGAGTTAAGTAGGAAGTAAGGCCAC
GTAGCTTCCGAATCAATTAAAAATGACAGAGACTTACCAGCTACCTGGACAGTCACCCTAGGGTGTCTCTGTGGTCATT
GGGGACAGAGGTCTCAGGGCTGTGTCAGACTTCACCTGCCAGGCTCAGAAGGTCCTGACAGATTGTCCTGTGGAGTAAG
AACTTCGGGGGGCACTTGCCTACCTTGTCTAGGCAAAGGAAGGCAATCTGCTCCCTAGTGTCTTACTTGTCCTCAGGTT
GGACAGTAGCATCCTAGCAGCAGTAGAAGTGAGGGGCAGTTTTGGGCCCAGTGTCCAGCCTTGCCACATTTAAAGCAAG
CTCCAAGTGAAGGTTCTTCTGTGCCCATCATCTTCTTTGAAGGAGCTTAGGGGTGCTGCCAGGAGCTGTCATAGCATGT
CTCTCTAGCATGAAAACCTTTTTTAAAATTATTATTAATTTACAATGCCATATTTTGCAGATCTCTGAAGCATTTGAGG
ACCATCTATTAGTATAAATGATTTAGTGGTCAAAGGTTCTCCGAGAGGCATCGCAAAGGGGAGTGAGGAGGTAAATGAC
ACAATTCCCATGGTGACATAAAGGGGGAGGTCCAAGGCCTAAGGTATCCCAAGGACTTAGGCACAAGTTGAACAGTGGG
TCACCTCACACAGTTCTAGGACCAGGGCTAAAAGCCCAAGGAGGCACGGGATGCCTGGTACCAGGACTTTCTAATGAAG
CCAGAAGATGAAAACCATACTCAAAAACAAAGCGTCATCCAATGGGAGTGATCAGGGGTGGGTTGCTCTGCCAGAGACT
CTGCCAGTGGACAGGAGGTATAGCTCCCAGTTGAGTATATACTTGATGTGTCTGAGGCCCTGGGTTCCAGCCTCAGTCC
GAGTAAGTAAATAAACCAACTCCAGGTGGGAAGGTCACGTAGCTGTGGGGTTCTCCCAGGCCCCTCAGCCTCCTGTAAG
GATGATGGGTGAAGTCTGATGCTGAAGTTAGGTGGCACGTCCACTGGACCTCAAGCAGTGCTAGGGACAGAGTTCACTG
CGACCTGAAGAGGCTCCACAAAGGAACCTGGCTTAGAATGAGGCCACTTAGAGGCAGAGATAGGGAGGGGGCCTGAATG
GGGCAAGGCTGTGTGCGGTACTTCTAGATGGAATCTGTTGAGGAAGGGGACAGTCTTGATTGCTGGGACCTCCATGTAT
GGTAGGGGGGCAAGGATCATCAAACCAGAGCTGATTCATGGGAAAAGACTGGATGCTAGTATGAGAGATCTTGGATGCT
GTGCCTCTGCTCCAGGCGATGGGTGTCACTGAGCCGGCTTAGGGATGCCATTCTGCTGAGCAAGGGGTGAGGTGGCTCA
GAGGGGCACCTGGGAAAGATGAGAAGACCCCAGTGAGGCCTGTGCTCGGGACCAGCAGTGAAAGCCAGGACCTGGAGTG
TCCTGGGATCAGTGGGGACCACCACAGAACCACAGTTAGCAGAGACTAGCATCACGGTGGTCTAGGAAGCGTTTGTAGA
GATGTAGGGAGCAGAGGAAAAGGACCATGGGATGGGAGAGGGCAAAGCTGAGCTGAGGGGGAGGGGGAAGGAAGCAAGT
TTACTTATGTGTACTCTCCAGTGGCATCAGGCATGTGGGGGTAAGTACACACACACATACCAGCAAGGTAGCACTGTAT
GTTTTTCTGTAAGCACACATACAAGATAGAAGGTAGGGAGAAAAATCAAACTGAAAATATATACCGTGCTGTGTGATTG
ACAGAAAGCATAAAATACTGGCTGCAAGCCAAGTAAAACAGCCAAGGCAAAGAGACAATGAAATTCAGGGTATGTTATG
CCAAAAGAACCTCATATGTTACCCCCAAAGACGGGACACAGAGACATCCTTAGAATGCTAGCAGCAAGCTCCATTGCCA
CCCCACCCCACTCAGCCCAGCCAAGGATCTGGGTGGGGCTGGAGAGCATCCAAGGGCTTGGTGCACAGTAGTGGTGAGA
TGTCCTGGCTGGAGGCAACGCTAAAGTCTTGTACAATCAGTTAGTCTGGGTTTGTAGCCAGAGATGATGGGAAGGTACA
GGCTGCCCTGCACTTTGCATCCGCTCCTCTGGTGTTCTTGGCAAGTGTGATTCAGCCCCCAGCCCCCAGAATGCTGTAG
AAAGGGGCTGTTTAGTCCGTGGATGCAGCTTCTCACTGTAACGGCCTTGAGAAGTAAGGACCACCACCTCACATCCTCC
TGTACTTTATGATATGGACACTCAATTCTGATCCTGGCCAGGGGACTCTTCCCTCCCAGGCGCTTTGGGGGAGGGCCAG
CCGTTAACCAGCTGGTTGCTAACCATCTATTGCTAGATGCTGGAGTTGAAGCACAGTTTATCTGTCACCGGAGGAAGCT
TCTAGCCAGACTCTGCCTGGCCTCTCTCTGTGTGGTGTTGATAGTGAGATCACAGCCCGGTTCACACTGGGTCGACAGT
TTTGAGGGGCGGGGTGCAGGCAGGTAGAGACAGGAGAGAAACGGGTGGGAAGCAGTTCCTTCCTACTCCAGCCGAGCGA
AGAGCTGAGGCTGTGGGTTTGCAGAGAGAGAGCATGGCGTCTTGGTGAGCGGCACTTCTTCCTTAGCCCGCCTCCTACA
GTGATTGACATCAAGCTGGACAAGCCTCAGGAGCCCCCGGCCAGCGAGGGCGGCTGCTCCTGTTAATGCACCGCCCACT
CGGCTTCCTCAGCGCCACTCACTTGTTTTGCCTCCTATAGCTTCCTAACGGGGTGGGAACTGAGTTTATCAAGACTGGA
GGATCTTTCTTTTCTCTCTCTCTCTCTCTCTAGGAGTAGGGTGGGACATGGGGAGGGAGGCTGGGCATCAGGGACCACG
TCACTCTTAACAGCTGTTACCTAAACAACTATTTTTTGGTTTGGTTGTAATATATTGTACTTTATTAAGATTGCCAAAA
ACTGTTAAAATTTAAAAAAAAAATTTAAATCATGTGTATACAACTTTTTGCCAGATTAGAAAAGTAGTCATTTTTATTT
GAAAGAAGTGCTTTTTTGTTTGTTTGTTTTTGTATATTTGTAAACTTACAGAGAACCTCTCCACACACTTCTTCCTTCC
TGTTCTCTTGGAACTGTGTGTCACCTCTATTTTCCTCCTACCCCCGCCCCCCCCAGCCCAGAAAATTAAAGCAATTAAC
TGAACAGTAGTAATTACATTCTAGTTCTGGGTCACATGGCCCAAACCAACCAAACCCGCACTCCACAGTCAAATCCAAC
TTTAATCTAACAAAACAGCCTCTGAGGGGGTATTGTCGAGTTCTTCCCTGGCAGAGTGGGACACATTGGCAGGCCCCTG
AGAGGAGATGAAGGCCCGTGGACTGTAGATTCAGCAGCAGCTCCTTGGCTGCTTCCGCCTCTTCTCCTTCCCTGAAAAA
AATAACCATAGAGCCAGAAAGCACAGGCAACAGTGTGTTCTCTGGGCTGACCCGGTGACAGACAGCAAGAAGTTACTGG
AAGGATGGGGTGCGCTTGGCAGCTGAGGGCTGAGGCAGTGTGTAATCTACTGGCCCAACCATTGACACACATGGTTAGG
CTGACTCGCCAACTCAATGTGTGATGCTGGGTGGCTCAGGGACACTGAAGCCTAGGGCACCTGCCATCACTGCAACTAC
CATTGAGGAAGTGAGAGGAGTCGGCCATGACTCCGGACACTCCATGTTGTCAGACCCTTGGATACTAATCTTGCCGAAC
GTTGTTCTGGAAAAGCTGATTCCTTGATGTGTCCTCACCTCTGGCGTGGTACGTTTGAAATCTTTGTATGAATACCTTT
GGGAGTGTTGGCAGCTGCACTGCACGCATCTTGGAGTCACTGTGGGGTTTCCAGAAGGCTGCTGCCCCAGGGTACTGCA
ACTTGCCCCCCAGCAGGCTGTCCTTGCTATTTCCACTCATTCCCCAGACTGAAGACCTTCAGAGTCTCTTAGCAGAGTG
CTCTTCTCAAAGCAGAATAGCTCTTATATTCTAAACGCTCCCGGACTCACTGCCCCTGTCTGCCTTTGGGCAGGCCTGG
GGCAGTGACTCTAATCAGAGCAGCCTAGCCCCATAGCATTGGCTCTTCTTTCAGACTGCTGGTGGGCAGAGTGAATTGC
CTCCACAAGGCAGAACTCCAACAAGGAGGTTGGGATGAATTATGGAATCTCTCAAAGAATGAGTTCAAAATGGCAGCCT
GTGTGGCAGGGCTGATTCTGTGAGTGGGCCCGTCATGCGACTCCATCCTGGGAGACTGTGTCAAAGCCGGTTCTGATGA
TGAAGAGAGGAAGCAGGACCGCCCTGGGTACCTCCTCCAGAAGGCAAGGACCAATGTACGAGCATAATCGAAACGTCAC
GTGTTTAGTTTTTATATGTGTGTACATAATTATACATAGAGATAGACTTGTGTATACACCCTTCGCGCGCACACATACA
CACACTCACATCCTCACATATACATGTGCTCAGTGTATATCCTCGTCTCTCCCGCTCACAACTTGGAACTTACATTGTG
ATTCCGGTTTTTGGAAGTTCAAAAGTATGCAGTGTATTGAAATAAGAAATAACTCAATATTGTCAAATAACTTGTGGTT
GTCTTGCCTTCAATAAAATAGTGCATAGATGTGTTAAACTACAAGCAAAAGTAGTCCACAGAACTACCTTTACCACTGC
TTTTTGTACCTGTGTGCACAGGTGTGCATGCCGTCGTGGGCCAGTGTCCCCCACTGTGGACACCCCACCCATGTGGTGC
TTGTTGGAAGAAAGCATACTTAGCCCGTGGTGACAGCAGCCTGGTTGGCAGTGAGGGGCTTTGCTGGTGGCCTCTGGCA
GAGCCCCACTGACAGCACTCTCTACTGGCTTTCACTGAATGAATGTAGGGTGAATTTTAACCTTCTGGACACTGAATAA
CCTTTCTTGTATTCCTGTAACTCGAATTAGAAAATCCGTTCACTTCTCTTGTGCACACAGTCTAAGACATCATGGCCTG
CTACTAGAAACAGCAGGTACCATGGCAGATGCCATTTCTGGTCGATCTGGCCTAAGGAGCCCTGCCTTCCTAGCTTGTA
CACAAAACCCCCTCCTTGAGTTTAGACTCTCCCAGCCCTGCGGCCCCTGAGAATTAGGGTTCTGCCCCATTGCTCCCCC
ACTCCAGAGGTGCCCTGGCCTTATTTCCTCAGCCAAGCTACCCATCTCCTTCCCAAAAGGCAATCAAGGCAGCCAGGCC
CCAACAGAACTAACTGTAGTGGACCTGGGCTTTCCCCCTGACCGCCACCACCATCCTACTTGTACGTAGGATCCAATCA
GGTTCTCATAAAGACATCCTGAAATTATCTGTGCCCCCATCTTTGCTAAATTCAGATCAGTCAGAGGACAAAATGGAGG
GTTCCTCTTAGGGCATGATCCCAATGTCGTAATTCAGTTCCTCTCTCTGGACACTGCCTGGCCTGGCAGATGGGCATGG
CCCTCCTCCTTTTCTTTAAGAGACTTGAAAGAGAGTTGTCAGCAAAACTGTGAGCAGTGCAGAGATTGTGAAAGGGCAG
GTAGTGTAAGTAGTATTGTTGTGGAGTCAGAGGTTAGAATGCTGGGTGGTTAGAGCCTTGCTGCTGCCAGTCACTGCTC
CCCGTTGCCATCTTTAAACATTTCGCAATATCTCAAGATCCAGGAAGGCATGGCCATGTCAGTTCAATGTCTCAGGCAA
CAAAGACAAGGGTTGCAAGGTGGTAGCTAGGAATATAGACGCCTGGGCCTAGTCTCTGTAACCCAGTGGCTAACCAGTG
TCAGAGATCTAAGCAGGGCTGGCTTCAGCCTCCTGTAGGCAGGGCAGTTTATCCCTTTTCCATATGGATGGGGGAGAGG
CTGTCAGCAAAGTGGCTGAAGAGAGCTAAGTTAGAGCTACCCAAGAGCCAGCCAGCAGGAGTCTGTGTCAAATGCTCAG
GGCTCGATGCTCACTAGTTTCTAAACTACCTCTCCCCCAAGAATGGGAGGCACCATCACCTTGCCACAGCACTGGGAGC
CAAACCCTTCCTGTTTCACGGGTGGGAGAACCAGAACAGAAAAGGTCACCTGCAAGCCAGAGAGGATCAGAACTAGTGT
TGGCATTCTTGATCCGTTGCTGACCTTGCGGTGTCCAGACAGGACTGCTGTGCTAGCGTCCCTTAAGCCATCTCTACTC
CATGGCTAGTACCTAAGGGTCTTCCCAGCCTGGCTAGCTAGAGAGAAGATAGGTGCATTTTGGGCTCTCACTGTAAAGA
AGAGTGGTCCCCAAATCTACTTGCATTGTCTTGTGTACACACACACACACACACACACACACACCCCAGTAGTCAGGGT
ACCCTTTTAATTTTTGTTTGAAATCAACTTCTTCACTGTTTGGAAATCTTGCAGTTTCAATGTGCACACTCCTTGGACT
CCAGACCCTGTCTGATTGATACTCTCTGCAGGGTATAATTATCAGGAAATCCACGCAGCGGGAGTTCAGATGGGCCCTT
CAGGAGGCAGGAAGCCTCCATAGCAACGAAGGCCAGCCTGCCATTGTGATGTGTTGACTTCTCACCTCACCTGTCCTTT
AAAGTGAGGAGCAGAGGGCGGCATTTCTATCTGTACTGGGCTCAGAAGGCACAGTGGCCATATTGACTTTACATTCAAC
TGTGTAATATGTGGAAAAGACTCAGCATGTTGGTCAAACAATAAACTGTCCTAATTCTCGACACAAAGCTCCTTGTTGA
CTCTTTCTAAGTGGTGTCGTTATATATTGGGGCTTAAAAGCGGGTTTCCTCAAAAGCCCATCCTCTCCTGTCTGGGTGG
TCTATCACCTCCACAGAGCCCTTCCCTCTTGTCATTGCTCACCTGGGCTTTCCACCAGTTCTAAAAGAAAACTATGGAC
TAGTGAGATTGTGTTCACAAGCCTTCCTTACCTGTCTGGGAAGCTCCGGGAGGGACCAGGACTTGGGAGTGTATTTACC
ATCTGTCTTAGTCAGGGTTTCTATTCCTGCACAAACATGACCAAGAAGCAAGCTGGGGAGGAAAGGGCTTATTCGGCTT
ACCCTTCCATACTGCTGTTCATCACCAAAGGAAGTCAGGACTGGAACTCAAGCAGGTCAGGGAGCAGGAGCTGATGCAG
AGGCCATGGAGGGATGTTCTTTACTGGCTTGCTTCTCCTGGCTTGCTCAGCCTGCTCTCTTATAGAACCCAAGACTACC
AGGCCAGAGATGGTCCCACCCACAAGGGGCCTTTCCCCCTTGATCACTAATTGAGGAAATGCCTTAGAGTTGGATCTCA
TGGAGGCATTTCCTCAACTGAAGCTCCTTTCTCTGTGATAACTCCAGCTGTGTCAAGTTGACACAAAACTAGCCAGTAC
ACCGTCACTCCCACACTCTACTTGACATGGCCAGGGATTAGGAGGACAGAATGCAGGGAGGAACTAGGTTTCCTATCCT
CTTGGTTTCCAGACTATCATTTAAAAGGTAAGAACGGAAGAGTAATTCTGATTACCTTTAAAATGACGCCAACTGTGAC
CACCCGCAGCTTCTCCCACACCAGTTAGGGAACAGTCTCTGAGAGGTTCCTCAGATCTGGACAACCTCCAACCTAGCTG
TTGCCCTCAGCCAAGCTGGCTCTCAGAACAATTCCTCAGAGTGCTGGAAGTGCCACTCTTCAAGTATAATAATAAACGA
TTCTGAAAATTCTGGAACACTCCAGTTTGCCGTAATTAGAAGCTCTGACTGTCCCTGCCGCTGCCTTAGATGGGCATCT
AGTCTTAAGGTGCGAGGCGAGCAGGTGCAGGAATGGTGAAGGGTAGAAGGCTGAGAGCCTGAGAAAATGACTATGTGGC
CTAGAGAGTAAAAACAGCCAGTCCTTCCCCAGCACAGTAGTGGCGGGGCCACAAGGCTTCACGATACTGAGAGAATGGT
TGTTCTCTTCAAGTGAGGTGTGAGCACGGCTGCTCAAAGTTCCGGAAGACTTGAGGAGGTACTCCAGACGGGTACACGA
AATGACACTGACTGCTCTGCAATAAAGTGCAATATGGCAAAGTCAGGGCTACTGGGTGACTTTCCTAATCACTGCAAGA
GTGGCCACTGTTTGTTAAGCTCAGATTTATAGATTTCAGGGAAACCTTGTAGCCTTGAAAAATACACACACACACACAC
ACACACACACACACACACACACACACACACACACACACACCCTGAATGCGTACACAAATACACATCTTTTTTCCAGGTC
AGTAGAACTAGGTATCTACAGGAAGAGAAACAGCCTACCCAGGACCCCATGTAGCACAGGGCAGCGGGCAGCAGAGACG
GGGTAAGAGTGGACTGAGCCAGCTGAACTTTGGCAAGTCTTTAAGAAGCAGATGGAAGCAGCAGGCTCTGGATGGAATG
ACGCCAGCAGGACACGGTTGTAGTTGCCGGTTAACCTTACTCAGATGGACCCGGTGGCTGAGGCAGCAGCACATTCCTT
GCTACCTGCACCAACGTCCTGGGTTCCCAAATGAAAGCCTGATATCTTAAAATGCCTCGAGCAGCTCAATGGCTGGGCT
ACTCCCAAGCCTCCACAGAGCTAACACCTCCCCTGATATTCATGAGTTATTGCTTATTAAAATCTGTGTTTTATCTTTG
CTGCCCCCTAGACCCAGTTGGGGGTTGGGGGGCCTGGGGCCACTCTTCCCCAGCTCTCACGTGATTGGTATGCTCTTTT
CTGCACCTCAGGCCTGGGCCTTACTTCTTTCCTAGCATGGCCACTATATCTTCCTCCTCCTCCCATGTTCAAAGAACCC
AGCTGCCTGCAATGGCATAGACTTTTTAAATTTCCTTTAAAGCAAATACCATCATTTCTCCTTTCTACCCTTAAAAACA
ATTAAATCGATTTTTATCCATTCTCCCTTCTGTGGAGATTAACATCTCTGTGGTTACATATGTCACCTTTCTCGTATAA
CTTGAATTAACGTCTTTTTTATGTATTTAACTTTAATTAAAATTTCCATTTTTGTATGGACCTATATTTAGGCTTATCT
TTTTAAAACAATTTTATTTTTTATTTAGGCTTGTCTTTAGCCTGTCTTGTCTCAGCAGAAGCTTTTAGTATCTGTGGCT
TAAGCTCTCTTTGTAGCAGCCCAGAACAGGAGTTTCTGGCTGAATCTTTAGCCCACTGCCCATGACCCTGGGTCAGCCT
GGGTGTGTCCTAGCCTTGAGCCACAAGCCCCAGAATCATGTGTGCCAAACTAGCATGAAGCAAAACCTTAGTTTTGAAC
CTTGGGGAGGAACCACATGACTCAGCTCAGCTCAGAAACATTCTCCTTGCCTCATAATCTTAAAGGGAGGCATGTGTAT
TCTTGGGAATCTCTAACTTTTAAAAGTGAGTGTAAGTCCCACATTGGGTGACACCGGTTGTCAATTTTACTCAAATCTA
CGAGCGCGCTTGATACCTACACCAACATTCTGGGTTCCCAAATAAAAGACACACACATAGCCTTATATTTTATTGTGCC
TGAAATAGCTCAATGGCTGGGCCACTGCCTCCCCTCCCCTCTGATAGAACAGCTCACGTCAGGAGGTGCTGGAGGCCCT
GGGAAGCAGTGGCAGGGGCCAAGGCCTCCCGAGAGACCACAAGGCACCTAGCAGTGAGAAGCTGCTTCTGCCGTGGCTC
CATGGAAGAGTCCAGACATAGAATCTTTGCTGCGGCTGCCTGTTTAGAGCTGGCTTTTACAGCAGCCCACAGCAAAGCC
AGACCCATGCGTTCCAGGTAGGCATTCTACTAACCTGGTTCCCAGCCCTGCACAGCTTACCTTTTGCTCAGGACACAGG
CTATAAATAAATAAATAACATTTATCCTTGCTCTCCATCCTTGTCACTTTTTTGATGTACTGATTCTCCCACTAAGTAA
AATCACTTTATTATGCAGACAAAAGGGAGGCCAGCGAACACATTTTCTAACTGAAAGGTTTTTTTGATGAGCACCTACT
GTGATGTGAACGTCCTTCATCGTGCCCTTCCCATTTGTCCGTGACCAACATGAACAGCAGTGTGCAAAGGGCAGTAAGA
ATCCTAGCAGCAATACTGCCTCCCAGTGAGAACTGAGTCATCTCATGGCTTATCTGTCCTGTGCTGTGCTGTATCTGTC
TCATACACCATAAGCAAGGCCAGTAGATATTTTAGGAGTGGGGAGCTGAGTACTTGATGGGAATCATGGTCTGGGACTC
TATTATCAGCCCAGGTGACCCACAGGGAGGCCATGTGTCAGCAGGCAGAGGCTTGGGCTGGTCTGCACAGAGAACACCT
GTGTGTTTATCCTGTCCCTCTCACTGGTCCAGGCCAGCCCAGAGCGCCACACATATTCCCTGAGCACTGCACCTGAGTC
AATGCTCTGCCTGTCTCTTTAGTGTGGCTTTAGTGAAGCCTGACTCTGAGTGTGAGACGAGACCAAGAGTCTCATATAT
GCAGCGATCTGTAGGCTCAGTAACCTGGAGCTGGGGTTCAATTCTAGCTCAGGTTCCCACTTGTACTCATCATTTGACT
CAATGCTTTCAGTATAGTCATTTATCAAGATACCAGTCATTTATAAAAGCAATGAGAACACAAATGTTGAAGACAGCAT
CACTITAAAAAGGTAACATTTTTTAAAGCATCATGAATAAATATGTATTTAAAATGCACAGTGGACATCTTCAGTTTGT
ATTGTTCCATAGCACTCTAGCTGGGGTGACACAACAGGAGCTGATCAAGTAGCACAGGGGACAGCCTGGGCTCACGCAC
GCCCGAGGCAGCAGTGTGCTGTCTCCCTGCTCTCCCCAGTGGAGCCTCTAGAACACTAACCTAGGAGTGTCTGGGGATT
TGGCTCCTAGAGCCACCTTGTGAGGGTGACTCTTCGGGGTTGCGGCAGCTTTTGAACCTAGGGTGGTGTGGGGATGGTC
ACCGAGCCCGTGAAGGACACACTGTCAGCTAGGGTGGTGTGGGATGGTCACCGAGCCCATGAAGGACACACTGTCAGCT
AGGGTGGTGTGGGATGGTCACCGAGCCTGTGAAGGACACACTGTCAGCTAGGGTGGTGTGGGATGGTCACCGAGCCCGT
GAAGGACACACTGTCAGCTAGGGTGGTGTGGGATGGTCACCGAGCCCGTGAAGGACACACTGTCAGCTAGGGTGGTGTG
GGATGGTCACTGAGCCCGTGAAGGACACACTGTCAGCTGTGCCTGTGGCTTTGAAGCTGTCTTCACTGTAGACCTTCAC
ACCCCAGACTCCACTAAGAACTGACACTGTATTATGCCTACACCAGGGGCAACTGCAAGTTCACTTATTCCACAAGCAG
GCAGATCTGGTCCCAGGAAAAGGGACCAACACAGAGGCAGGAGACAAGGACTTCTCAGATGCGACCCTACTCTCAAAGC
GATGCCCTCTCTGTTATGTCTCACACTAACATGATGCTACACCTAACACCTAGCAAAGGGAGAAAGAATATGGGAATTA
AGAAAGGACTAGCTGAGAAAGGAGCTGACGGGGGTGGGGTGGGGGTGGTACAATTGTTTCAAGAACTCAAGAAATGCTT
CAACGACATGCCCCCTCTTTATCAGTCCACACCACCACCGCCCTTTCTCAAACTGCAGGGTCAGTCTCACATGACCAAC
GCTTGTGGCCAGCGATGCTCCTCAGGCAATCTTGGCCAGCCACTTCTCCAAGTCCTGGATGTCAGCAGAGCCAGTGTCC
CCTCGTCCACCCTTGGCACTACACTCCAGGAACTCCACTTTGAGTGGCAACTGGGAAAATTCAAATTCTTTGCCTTTCT
TCCCCAACTGAGCAGGTGCGGTGCTGGAACTGTCCAGTGTGCTGGGAGCCGCGGACCGGGTGACTCGTAAGGTGTTGCT
GGGGGCAAAGGGAGAAAAGTCAGACGCAACAAAGCCCAAAATCCTATGAGCTCCTAAATCAAAGGGATAGCACCAGTCG
GTATTGACACTGCTGGCTTGTCCTTTATGTCCATGGATCACTGTTTCAGACAGACACCAGTGGGTTAGGAGACCCAGGT
CACACCAGCTCTTTGAAGCCTCTACCTACTTCTAAGCTCTCCTGAATGGCCCCACTGTATTATAAAACTCATGGTTTTG
AAACTTCAGAAAGGGTAGATAGGGAGCCTTGGCTATGAAGCTCACACATCCACAGACTTCCGTCTCATCTGTCCTGTAT
CTGTAAGCAGGAAAACCTTCCCAAACTGTCACTGTGCTGCCAGCCGCTGGCCCTGTAGAGCACACAGGCAGCATGCTTG
CTGCCTTCCTGCTGGGGACATTTCATAAATACTACATCTGACTAAATTTACAAGCAGGGCATGGTGCCACACACCTTTC
CCTAATTTGTGAAAAACCTTAAATGGCTATAAACACCCACGTCTTTTATAATTCTAATAATCCCTTTAACACATATTCC
ATACTACCCCAGCTACAACTCTGATCACTCGATCCTAAGCTGCGAATGGACTCCGACGGTCAGGACGCCACCCGGAGCA
CAGCCCCACTTACAGCTCCTTCTCAAGCTGCTGCTGGATCAACTTCGCTGATTTTGCCATTGCGATATCTGGGAAGGAA
AAGAAGAGCATTATTCTAGTTTAAACCAGGATCTGTCTCCTCCCTGGACTTCCAGCACAGAAAGAAAATTCCCAATTAT
ACCAACTAGTTCACCCCACATTCCTTTGTTGAAACACTTTTTATCATTATTCCTTTCTGTCACAGTAAATGCTGTATTT
GCAGGTTTTTAAAAAATGTTTTAAAACATAAAATACAACAAAATATTGTTTTAGTGCTAATGACCTTAAAACTAACCAA
GCTTAAGTTTCCCACACCTTACAAGCCCTTCAATATGTAACCTGTCCTGTCCATTGAAAGAAAGCAAGCATACGTGAAC
CATGACTGACATCTGAGGAGAACTTTCAACACAACACCACATTAACCCTTAAGAAAAGATGATGGCTAGGGCTAGAGAT
GGCCCAGGGGTTACAGCACTGGCTGCTCTTCCAGAGGACCAGGGTTCAAGTACCAGAACCTGCATGGCCAACTCACAAC
TGTCCCAGCAGATCCAAAGCCCTCTTCTAATCTTCTCAGGCACCGGGTATGCCTGAGGTTCAGCCCTGCACACCCCCCC
CCCCCCCCCGCCCCACATACACACAAAACAAAAATACTTTTACAAAAGATGCTAAGAGCTGCACCATTCATCAGGTATT
AGGAAATGTAGCCGTGAAGGAGTTCCCGAGGACCAACTCCTGACGTTACTCCGCCTGGCCACAGAGCTGATGCCCAGCC
AACCTGACTGTGAGCGCTGGGGTAAGAGGGAACAGTGGCGCAGCCTGTCTGGAAGGAGAGGCCCAATAATCCCCCCAGA
ACCGATAGTACTCGGTCTCACAAATTAACATTTGGAAAAGTAAGATAATTTATCTTTAAAAAGCACTGTATCATGAAAA
AGATATAATATCAACAGAGCCCCCAGCTGCCAGTCCTTGGGACAACCTGGTAAAAGACCAGGAAAGTAATAGAAACAAT
TTTCAGATTTAATCCCTTAATTAATGCTTAATTCCAGCCCTTTCCCCATGCTCAGAAATAACAACGGCGGGTAAATGAA
CTAATTCCCAACAGCAATCCTCAACGGTTGGCTGCCTTTGCCAGGAAGCACCTTGCTTATTGCAGGCTATTAATAAGGA
CGGTGAGTTCTTCAGAGCCATGCTGTCGATGAGGACCTGGTACAGAAATTCGGCCACATCTTTCACCTCCCGCTGGAAC
GCCGCACTGTCCACCACAAACACCACAGCCCTGCAGGGACAGTTAAAGGGAAGGACACATGAGCACACACGGCAGGCAG
GAGCCACAAGACAGACCCCTGGTTTCTCCACTCAGCCCTCCACCACAGCACACATGCACGCATGCATGCTTTGATTTAA
GTAAAAAAAGAAAACAAAAACAAAACATGAAGAAGCTAAAAGGACACAAGAAATGACTTGGGCTTTCAAGGGTCAGAAA
ACCATCTGACAGATCTAGGCGATGAACACAGGGCAGAATGTACCCACAGTGGGAGAACAAAGAGGGAGACAAAAGAAAG
ATGTAAAAATCTCGAGAAGAGCACAAAGGCAGGGTGAACGGGGGAGGCCAGGCCAGAGGGGAAGGGATGAGGACACTGC
CCTGTGAAGCTTGTGCTGTGAAGACTACTGGGGCCTAAGTGGAAGACAGAACACTCTTGAGGGAACTCAAGGATTGTGA
CTATGTGGGACCTGACCTCAGACACAGCAGTGACACCATCAAGTACCAGAGGTACTGCACGGGAGCCTCAGACATCAGG
TCCTGGGGCAGAGAATGTGCAGTGGCTAACAGGGTCTGGACAACTGGACCAAACCTTACCCAAAGCCTCCAACTCTAAG
GCAGTGAAATGGAGGCTGTGGTTAGAAAATAGTTTTAAAGACGTTAAAACACCCGGTCTCCAATGGCTGTAGCTATGGG
GCATAAGTGGACACTCCCTTGGAATAAGAGCCCTAAGCAAGAGATTATATAAAAATTGGGGGCTGGAGAGATGGCTCAG
AGTTCTTCCAGAGTCCTGAGTTCAATTCCCAGCAACTACATGGTGGCTCCCAACCATCTGTAATGGGATCCGATGCCTT
CTTCTAGTGTGTCTGAAGACAGCAACAGTGTAGTCATACAAATAAAATAAATAAAACTTTAAGGAAAAAAAAAGTTAAG
AAAACAATTTTGGACCATATTCATCATCAACCCCCGATGGTGCTAACAAATGAGGAGAGCGGTGTGGAGCTGGCCGCTC
ACGCCCTACACTAACAAAGACTACCAGTCTCATCGATGGCACCCATTCTCTTAGAGGAGGAGTTCTGGATCAAAACAGA
AATTAAAATATGCAATTATAAAAGAGATTAACCAGCACCCCCAAAACTGGACTTTAGAGCAATCTACAAAGCACATGTT
TATGGGCTGGACATGTAGCTCAGTTAGCAGAGTGCTTGCATAGTAGAATATATATATATACATATGGATGTATATGTAT
ATGTATATGTGTATGTATATGTATCCATCCCATCCCACCCAGCATTGAACCAAAGTGATCACCTGTAATCCTAGCACTG
AGGAGGTAGAGGCAGGAGATCAAAAACTCAAGTTCATTTTTGGTTGAACAGTGAGTTCAAGGTCAGGCTGAGCTACATG
AAATTCTGCCTCCAAAAAAAATCATAATGTATGTTTAAAATTATTTTAGAGAATAATACTAGAAGCAAGTAAAAAGAAA
TGGGTGGAGTTTTAAAGGGTATTTTAAAAAAGAACACATTATAAAAATAGTAAATAAAATTAGCAACACAGTGGAAACT
AAACAGGTTCTCTCAGCTGAAAAGAACACGGCAAACTAGGCAGCGGATCTGAGGGGCTAACACTCTGAGGGGCAACACT
CGAGAGAGAAGGATGTGTCAGATAAACTACGCAAGAGCTAGGGCAGAGAGAACGGCCCATGCTGTGACAAATGAGGCAG
CAGGCACAGGGTCGGATGAATCTGGCTTGATGTTTAGGCTAATCTTTCTCTTGAGGCTCTTCTACCTGTAAATATCCAC
TTGTGCCTTGTAGCGGCGAGGCATGGAGACCGGGTGTTTCAGTTTCTTTGGAATTCCGTTCCAGCTACGGTCTCCATTA
GATTACCTTTGAGTGGCAAGCTGTGCACAGGGTGACTGGTCCAGCTGCCCCCCAGGGCCTGCACTTAACAGATGATAAC
ACCCTTCTGTGTAGGGTGCTACACTTGAATTCCAAATACCAGAAACCCAAAGACAGATGCCTCAGAGGGAAATGACAGT
TACACTGGCACTCTGTAAGAGCAGATGTGGAGTCGGCGGTCTCCAGGGACCACTCGGAGCTGCTACCCAGGACCTCACA
TGCAACTAAGACCAAGGACCATGAAAAAAAAAGAGGCCAAATAAAGGTTGCTTTCCGTGAAAGACAGCCAACAACTTCA
CGACACACTCATCCTCTAGAAACATTTCTAGCAGATACTCTGAGGAAAACAGAACCTGAAAGGAAGGAGCAAAATTTGG
CAAAGAGCAAAGAAATCAAACATCAGGGAGCCTCAAAACACAGGTGCTTGTCATGGTTTATAAAAAAGAAATGGGTCCT
GGTTAGATACTGTTTTTTGTTTTTTAAAATGGGGCAGGAATCCACAGAAAGAAAATATAATATACTTTGAAATCCCTAG
ATGGAAAAACAATCTTAGGTCACAAGGAAGAATTTTTTTTTTAAATGTCACATTGGGGTCATGGTAAGAGTTCTTGTTG
CTCTTGTAGAGGACCCAGGTTAGGTTCCCAGCACCCACATCAGGCAGCTCACTACTGCTTGTAACTGCAGTCCAGGGGG
CCCAGCGTCATGTTCTGGTCCTTTGGGTACCTGCACACACACAGTGCACAAACAAGAACAGGGGCATGCACCTAAATTT
TAAAAAGAAATCTTAAAAAGAAAAATGTCATATACCATAGTAAAAGTGTTTTCGATTTAACAGTTTTATGACTGAATGA
AGTTTGTTAACTTAGGTTTTTTTTTTTTTTTTTTTTTTTTGGTTTTTCAAGACAGGGTTTCTCTGTGTAGCCCTGGCTG
TCCTGGAACTCACTTTGTAAATAGATCAGGCTGGCCTCGAACTCAGAAATCCGCCTGCCTCTGCCTCCCGAGTGCTGGG
ATTAAAGGTGTGCACCATCACACCCGGCTTATTAACTTAGTTTTATCTTTATATGCTGAATATTCTATTTATCCAAAAT
ACTTGGAAAAAAGTGTAATTATACTATAAACTCTAAAATATTTGCAAGTGACAATGGAAAAAAATTTTTTAAAAAGCTG
TTCTTGAGACACTCTGACAAATTAATACAAATACAAATTTTCCTTACTTTTCTTAACAATGTTAGACAGCAAACATGAA
GAAAGCATTTAAAACTACAACATACAAATTTTAGGAAAGAATTTAAAAATCAATGACATGAGGACTTACACTAAAAATA
GTTCTTGAGGTATCAATTTAGTGTGATTTAAGAACAGACATGCAGCCTCTAGCTTTTGGCTGGGTTATACGAGGGAGAT
AGTGAGGAAGGTCTCTATACGGTTGTTCCTATGAAGTGGACAGCTCCATACCCACCAGCAGAAAAGCACCTAGTAAACT
ATTAGCTCCATAGCTGCTTGCACTACTGCAGGGGTGAGGGGACCTCTCTGTGCCACGTGGTACTGTGGCACTCTGTTCT
GCTGCACTTCTGATCCAGACTCTGGTTAGCATCTGGGCCAGACCCAGGACGTGAGTACAGCTACTGGTGCTTCACAGGA
CTCAAGCCAGGCCTTTCTGAGGATACCAGCTGTGTGCTAGCCATGCAAACTAACAGTTATGCCAAAGAACTCCAGCTAG
CATGCCTGAAGGCTTAAGAATCTACAATAAGAGCCGAGCATGGTAGAGCACACTGTTAGTGCCAGGAACCAAGAGTCAG
GAGGCAGTAGCAGGCAGATCTCTGAGTTGGAGGCTAGCCTGATCAACTGAGGGAGTTCCAGGATAGCCAGGGCTACACA
GAGAAACCCTGTCTCAAACCCTGACCCCCCAAAAAGAATCTACTATGAGAGAAATATAACAAAGCGAAGCAAACAATAA
ACCCCTTTGTCCTGCTATCATCAGTAATTCTGAATGTCAGATTCGTCCCTGTGGGGTCAAAAGGCATGATTCTGCGTAG
AAAAATGGGGCAGAGTCAGGTGCTGGCGGGCTTTCCATTTTCATTTGTACTCGATTTCCAATCCAAACACGGGAGGTAA
AGCCCAATAGAGCCAAGCCTTTCTTTGGGCAACTCCCAGCAGCTCAACTTCAAGACAATTAGAAATCAATCTCTTACAG
TTTTTTGGACAATGCTAGCATTTATATGCTAAAAAAGAAACAAACAAACAAACACACATACACAAGGGAATTTCTTATT
GATGACCAAAAATAAATAAATAAATAAATAAATAAATAAATAAATAAATAAGGTGAAAAGAAGGTAAGAGGAAAGAAAG
CCTTGCTAGTTATGGTGACACATACCTGTAATCCCAACACTTGCAAATTCAAGGTTCTTTGTTTGGCTATATAGCAAGT
TCAAGGTCAACCTGCAGTACCTGAGACTCTATCTTGAAAAGCCAAAACCAAGCAGGTGGACAGGAAAGAAAAGCCACTT
AGTTTGTATAAGCCAGGAGGCTGGAATGGAAAAAGCTTACAGTTCAGGGCCAGCCTGGGCTACATGGGCTAGAGAGATA
CTGCCACCTTATCAAAACAAAAGAAAAAGCCAGGCGTGGTGGCGCACGCCTTTAATCCCAGCACTCGGGAGGCAGAGGC
AGGCGGATTTCTAAGTTCGAGGCCAGCCTGGTCTACAAAGTGAGCTCCAGGACAGCCAGGGCTATACAGAGAAACCCTG
TCTCGAACCCCCCCCCCCCCCAAAAAAAGAAAGAAAACCAAAAAGAGTATGATTAATGTTTTGAGTTTAGTATCTTCTG
GGATCCATCCTAGCCTTACAATTTCCTTTTCCAGATTGTAATAGCCTTAACATGTCATTAAATCTATTTTCAGAGTCAG
TGGCTAGAGAGATGGCTCAACAGTTCAGAGTGTGTTCTGCTCTTGCAGAGGATCTGAGTTCAGTTCCCATGTTGGGAAG
TTACAACCAACTGTAACCCCAGCTCCAGGGGATCCAACACCCTCCCTTCCTATGCTGTACCTCACACAAGTGCACATAC
CCTGCCCCACATACACATAGTTGAAGTTTAATCATGCTAGTAGAGTGACACCCCCTGCGCAATCTGAAAAGCCAGCCTT
AAGCAGGCTCCTACGTCTTCCGAGTTCTAGCACCCCAGAAATGGCCACTCCAAGGTTCATCCCATACCAGTGTCAAAAG
TCTTGGCAGAGGAACCAGCGTGAGCGTGCGCATGGACGCAGTGCAGACTTGAAGGGACCCATGTCACTTCATCCCTGAC
TTACCTAGCTGAAGACTTAAAGCGATCTAAGAGCTGAAACCTCAAGCTCTCATGCCCGGGGAGGTCGATCAGAGTCAGG
CTGTTACCCTGAGGACAGCAAGAGTGACATCACATCACCATTCGGTCCAGCTCCAGGTTCACATAGCATAGATCTTCAC
CATCAGATCAGCACACTGGAGCTGAGCTCATGAATCAAGCAAATGTTTACTGCAGGCAGCAAGTCAGATGGATTTCTGT
TGAGGATGTCTTAATAGTAAACACAGGTGAAGGAAGGGTAGTGGCTTGCCTAGTATATGTGAGGCACAGAAAAAAAGTT
TTAATCCCAGCACTCGGGAGGCAGAGGCAGAAGGATTTCTGAGTTCGAGGCCAGCCTGGTCTACAGAGTGAGTTCCAGG
ACAGCCGGAGCTATACAGAGAAACCCTGTCTCAAAAACAAACAAACAAATAAATAAATAAATTTTTTAAATTAAAAAAA
AAGGCACTAGACATTAACAAGGCTCTGGGTAATAAAAATCTAACTATGGGACGGCTTCTAAAGAGAAGTCTGGCTAGCA
GAGGCAGAAAAAGACAACTACTTTTAGCCAAATGATTGTCCTGTGTCTACATACTGCCTCCTTATACCCGAAAAAGACC
CAGTACTTACTGAACCTCATAGTAATGTTGGACAGACAGAACCTAAAAATAAAATGTCTTATACCCTGTACGTAAGTTA
CGAGGATGGGTGGGCAGGACTAAATCTGCTACCTATATTATCGAGGGCAGATCTGTTTGTTATACAGAATATGTTCTAC
GTAAAATGAAGCTACACAAAAGGTACCTACATCTTCAGACTACTCCATCCAAGAAGGTTCTTCCTTGACAAGCCACAGT
GCCCCAGTAAGCTTTGTTAACTTGACACAGCTTCCAGCCATGCAAGAGAAGCCTCAACAGAAGTCCCTCCATGAGACTG
GCCTGTGTGCATGTCTATGGGTCATTTTCTTGAGTCCAATGTGGGAGGCGCCATGTTTAGGCAGGTAGTCCGGAGCTAT
GAAGAAATCTAGCTAAGTGAACTGAAGAGTGAACCAGCAAGCAGCATTTCTGCATGGCTTCTGCTGCCAGGACCCTGCC
CTGAATTCCCTTAACAATGAACTACATCCCGGGAGTGTAAACAGATTAAATCCTTTCCTCCCCAAGTTGCTTTGGGTCA
GCAACACACATGACAGTAGAACTTAGTAAAGAAGAGTGTCAGATTCTAGAACATTCCAGATACCTCTTACCCTGTTATT
GTTGACTTTGTATATGGCAGAACTATCGGTAATGGAAGTCTGTGTGTCTCTGTACTGGCCAGTTAGCAACTGTAAACAA
AACAAAACCAAGACAGACAAATCAGGGTAAGCGAGTTACAATAACACTGAATGCAATGTAAAAAATGACATTTTCATTC
TGTGGAGAGTAAGGTCAAATGAACGAATGCTACTTGAAACAGCTGAAAACGATCATACTGCTTTATTTTTAACTTGTAG
AATAGTGATTAATTACAGCCGGGCAGTGATGGCACACGCCTTTAATCCCAGCACTCGGGAAGCAGAGGCAGGCGGATTT
TTGAGTTCGAGGCCAGCCTGGTCTACAGAGTGAGTTCCAGGACAGCCAGGGCTACACAGAGAAACCCTGTCTCGAAAAA
CCAAATAATAATAATAATTAATTACAAGCTTTATTCCTTCTTTTTGCAGTGCCATCAGAAAGTGGCACCCTGGGCCCAA
CATTATTAGTATTATTTTTAAACAACAGCAAGGGGCCAAATTACTGACCTGTAAAGATTTTAGGCACCAAAACCAACTC
AAGGCCTCAGGAGATGTTCAGTGGACATAACACTTCCTGTGTAACCTTGATGACCTAAGTTCAGCCCCTCTGAACCCAC
ATAAACCCAGATCTAGTAGTACACACATTCACAAGCCCAGTACTCCTATGGGGAAAATGGGAGGGAGACAGGACAATCT
CCAGAAATTCATACTAGCTTGCCTGGCACAGCAATGAGAGAAGACCAACACTTCTGGTCCTCTGACCTCCACAGATGTG
CCAAGGCTCACACGTACCAGCCCTTACACACATGAATGAACACACACACACAATTAAAATAATAATAGCTATTACTACT
ACTACTACTACTATTATTATTATTTATACCCTCCAAAGGAAGAGGGTAAATTCTCCATAGTAAAACATGTTCAGTTAAA
ATACACTGGCTTACATAAAACTAAGTGTTAGTAAAGGGAGGCCTCTCTAGCTTAAGACTGTCGAAGGAGGGTAATTTTT
GTCATGATTGTGATAATGCTGGATTGCTCAGAACTAGCCATGCTGGGACTATTTTAAGTCACAGAAATCAGCAAAAGTT
ATTGGGCTTCCTTTATCCTTTATTGATTGTTTAAAGAAAGAATAAGAACGCAAGCTACACTTAAGAATATATGTCTATC
CAGGCAGTGGTGGCACAGGCCTTTAATCCCAGCACTTAGGAGGCAGAGGCAGGTGGATTTCTGAGTTCAAGACCAGCCT
GGTCTACAGAGTGAGTTCCAGGACAGCCAGGGCTATACAGAGAAACCCTGTCTGGAAAAAAACAAAATCAAACAAACAA
ACAAAAAAATGTATGTCCATAACCATTATATTCTGAGTAGCCCAAGAAACTGGTAATGCATTTTTTAACAGGTGTATGT
ACACTGAAGGTTGGTTGATGTCGGGAGTCCTTAATCTTTCTCCACCTTATTTATTTACTGTTTTTGCTTTTTTTTTTTT
TTTTTTTTCCCTGACATAGGGTTTCTCTGTGCAGCTCTGGCTGTCCTGGAACTCATTCTACAGACCAAGCTGGCCTCAA
ACTTGAAGAGATCCTCCTACTTCTGCCTCCCAAGTGTTGGCTTTAAAGGCATGGACCACCACCACACAGCCAGCCACCT
TTTGTGAGGCTGTGGTCTCTCACTGAACCCGGGGAGAAAACCAACTAGCATGGGTGGTGGTGAGCCAAGGAATTCCAGG
GATCCATACCTCCTAGGCCCTGGGATTGCTGACAAGAACTTCTGGACCTGGCTTTCACGTATGTGCCACCGATCCAAAC
TCAGACCCTCATTTTTTTGCCAGGCAAGAAAACAGACTGAGTCACCTCCCCATCCCCAGACCACGTATTCTAACAGCAT
CGTGTGTGTATGTGTGTGTGTGTGTGTGTGTGTGTGTGTTTTTACAGGTTTTCCTAGAGTCTTTTTTATATAACTCCCA
GGGGGCTGGAGAGATAGCTCAGTGGTTAAGAGCACCGACTGCTCTTCCGAAGGTCCTGAGTTCAAATCCCAGCAACCAC
ATGGTGGCTCACAACCATCTGTAATGAGATCTGACTCCCTCTTCTGGTGCATCTGAAGACAGCTACAGTGTACTTAGAT
ATAATAATAAATAAATCTTAAAAAAAAAAAAAGAATTAACTCCCAGGGCTGGAGACTCAACTAAGTTGGATAAGATCCC
ATCCTGCTTCTAGCAAAGGGACCTGAATTCAATTCCCAGCACCCACATCAGGCAGCTTTGAAGACCGACTCTACAAAAT
CTGACACATCTGGCCTCTACAGGTACAGGCACTCATGTGCATATACCCACACACATACATATAATTAAAAAGAAAAAAA
AATATTTTTAAAAACATGTCCTAAACTTGCTGTACCAAATAAACTGCAAGATGACAGGGCTACGGAAATGCCTTACCCA
TCCCTCTTAAGTCTAACCGAGGTGAAAATCAAAGCATTACCCTGACAAACAGCAACGTTTTCCCAGAGTCACAGAGACC
AACGAAGAGAACAGCTCTCTGACTGCTCTTTCGGCTCCAGATGAACTTCCAGAACACTGCAGAGAAGAGAAAGGCAGCC
TTCATTTTCTAAAGACATTATTAGTAGGCATTTACGACAAAAAAACAAAGCGTCCATCTGGACTACTTTCATTGTCACA
CGGATTAGAGTCAGTTTTGTTAGGAACTCACGGAGCGCCAGCCACTATCAACTGTAAACCTTTTCACGTCTATTTCCCT
CATCCAAATGTGGAGACTAAAAGTATACACAGAATGATGGATCTGGGAAAAATTAGTGGCTTGCTACATTTGATTGGTG
GATTTCTACTCTACCTTAGTACCCCAGTATCTCAGAGCCCAGTTCAGACACAAGTGGCTCAAAGTTGGAATGAACGATG
GCGGCCGCAGCGCTCAAGCGCACAGGGCCGCCTCATGTAAGTCCTGTCCCAAGACCCAGGTCACTTCAGCGTCCCCTTT
CCACACTGCTGGGTCTGGAAGACGAGTAGTAGAAGAGGGAACGCAGCCGTCCGCCTCCCTGGCCTGCGGCGCCGAGCCA
CCCTGCCCTCGCCGTGAATGCCGGCCGCCTCACCCAGCGTCAGCAGCACCGCCAGGAGAGCCACCGCCACGGAGAGCAG
CGTCGGATCCCTCTGCTGCAGCTCCTGTCGTAAGGAGTCGAGGTAAGGCTGGAAGGCGCCACCGGCGCCATCGCCAACT
CGCCGGGTGTTCGCCGAAGCCATGAAAGAGGTGTGTAGTCTTCCCGGGCCGCCAAAGTTACGTGGCTCTAGGCTCCACG
CCGTGGTGGGGCGCGGGGCATCACGGGAGTTGTAGTCCCTTAGGGGTATCTCGGCTAAGTGCCTGATGGGAGTTGGAGT
TTTTTGGTTTCTACAACCCAGTTAGCGAGTGTATTCATATCGGCATGCTTTGAGACATGTATAGCTTTGTGGAATTTTT
TTTCTTTGCATTTTAATTTTTTATCTTTGGAGAATTTCATAAATGAATATGATGTCTTTTGGTCAAACCCACCCCTCTA
CTCCCATTTCATTTCGATTTTTGAAAGAATGATGACTTTTAGCAAAATTAACGGCTACAAAACTTCATTTGAGGGTGAG
GATTTCTACTCGGCCGTTACATGGGATGAAATTTATGAGAGATTTTACCACAGTATGATGTGACCGAAGATGTGATGGA
GTCACAGAGAATCCACAAAGACACATCAAGTCCTTTATGAGGTCAGAGAAAAGTAGCTAGAGATGGACCTGAATCTTGG
AGGATGCATTAACCTATACCGGCAACTAAAGAAAACAGAAAAAGACGCACGGAAGAGAAGCTTGAGTAAAAGCCAATGA
CATGTGGGAAACTCGGGAATTCTGTGTCCTGCATTGACACGTCCAGCACGGAAAAAAATGACTGCATTTTAAAAAGCAA
TCAGGAAAATCAGTGCTCGGGAGGATGTGGAGGTGTCGACGATAGATTGATCATTCCCACCCAAAGGAAGCAGGCCTAC
TCAACCAGGTAGGCCATTTGAGAGGCCCAGAGTAGACAACATTTTTCAGTTTCTCAAGAGGACTTATTTATAAAAGATC
TTCATGGGAACTCTTCTACTTAAGATTTCATCGGGTAATCGAAACATTTAAAAAAAAATGTGAGCTTCAATTTAAAAAT
ATCTCTGCGAGTCAGAAGTGGCCAAGCCTCGAGGGCCATTTGCAGCCTCTGTCATTAAGTAGCTGTCATTATTTTAAAG
TATTTAAGTACAGGTCTGCCTGGGAGATGACAGGAAAAGTCGATGTCACTTAAAGGCTAAACAAATTCATTAAAATGTC
GCACTGCCACATAAAACCCCAACTCCTGCAGGTACCAGGAAGAGAGGAAATGAGACATTCCCTTCCTCTCTAGTGTGGC
AGTGAGTGATTGGGTAGGAAATGAAACAAAGATGTTAAAGTTTGAGTTTGGAAGGTTCGCAATGTGATTTCGATTTCCA
TACATCCTCAAAAGGCAGAGGGCAGGTGAGAAGAAGCCCACTCGAGAGGGCCACTCCGTTGGCCTTACCATCGCCAGAT
ACTGAGTCGCTGGCTACAGGCTATGTATAAGAATGATTAGATTGTCCATGGAAGCAAAAGTGGCAGAAAGGCAGCTGGA
AAAGTTTGTAGGAATCAGACCTGGGAGTGGTTTTGTGTGCTATGCTGAAGAACTCAGAGTTTACTCATAGTATAACAAT
AAGCTGAAGGTGACATGGATAATTGGCAGATCTGTGGAGAACTGTGACTGGAGAGAGAAAAGACTGAGGCTGGGGGAAT
CAATGGGAGTCTCTTGTCGTATTTAGGCAAAAGATACTTGGAGTCTAACACAGGATAAAAGTGTGAAATCCGGGGCTAG
AGAGATGGCTCAGTGGTTAAGAGCACTGGTTGCTCTTCCAGAGGTCCTGAGTTCAGTTCCCAGCAACCACATCAGGTGG
CTCACAGCCATCTGTAATGGGATCTGATGCCCTCTTCTGGTGTGTCTGCAGACAGCTACAGTGTGCTCACATACATTAA
ATAAATAAATAAACAAACAAACACTGAAAGTGTGAAATACAGGGTAAAATTTCTGAGATATTTAGAAGTTAAAATATGT
AGGTTGTAATGACTATAAAATATATAGTTGCTGTTGTTCTATTACTGTGAAAAGACACCATGACCAATACAGAAGAAAG
CATTTAATTGGGAGCTTTTTTGTTTGTTTGTTTTTTTGAGACAGGGTTTCTCTGTGTAGCCCTGGCTGCCCTGGAACTC
ACTCCGTAGACCAGGCTGGCCTCGAACTCAGAAATCCACCTGCCTCTGCCTCCCGAGTGCTGGGATTAAAGGCATGCAC
CACCACCGCCTGGCAGAAGAAAGCATAGAAAGCATTTAATCGAGAGCTTCCTTATATTTCAGAGGCTGAGTTCATGAGT
GTCGCAGTAGGGGATGTGGCAGCAGGCAGGCATGGCACTGACACAGTAGCTAAGAGCCTACATCCTGATTCAGAGGCAG
AGAATAAGAAACTGGGCCTGGTGTGGGTGTTCAAAACTTCAAAGCTCACTCCAGTGACACACCTCCTCCAACAAGGCCA
CACCTCCTAATCCTTCCCAAACAGTTTCACCAACTGGGGACCAAGCGTTCAAATGTATGAAGCTATGGAGATGTTCTCA
TTCAAACCACAACACAGCCTAACCTACACAGTAAATTCCTTGGCTACATAGTGTGAGATTTTGTATCATCCTTTGTTTT
GGTAAATCTCCATCCCAAATATACCCCGGCGATGAAAACACAACACAGTTAATATGAATACATGCTGTGCACCTAGGTT
GGGCAGATCTACCACTACACTACCATCTTCCACATCTATGAGACCCCTTAGAACTTGCAGTTTCTCCAGGCCATGTGCT
TCTGCTCTGCTTTTCTTCTTCCTCCTCCTCTACGTCCTCTCCCTCTTCCATTTTCTTCTTCTCTCTCCCACCTTTCACT
CCACCTTCCCTTTTATCTGCCCAATCATCAGCTCTTCTTTATTTTACAAATTAAGGTGGGAAGCAGGTTTACAGGAAAT
CACCTGAGTGCTGACTCATTCCTTGTTCGCAGCCCCTCACAGGAGAATGGAATTAATATCAAATATAATTAGCCCCAGG
GCTATTCACAACCATCCTTTCTAACAAAAAAAAAGTTGTTGGACGAAAGATTGTTGTCATCATATGTAAAAAGAAAATT
GCGTACCTATATGTATACAAACACATACACAAAATAAAAATTAATATTTAAAAAATGACTTGAAGAGACATTTTTTCCC
ACATGTTGCAAACTATCAGGAGGAATGTGAAGTGTGCTTAATGTCTTTAGCCAGTGAGAAAATGAAAATGGAAACTGCT
ATGAGATACTACCTGATACTCATTAAGATAGTCACTATTAAAAAAGTCAGAAATATACCAAACAGTGCTGAGAGGAAAG
GGAAATCTGTTACACTGTTGGTGGGAATGTAGCTTACTACAGCCATTATGGAAGACAGCATAAAGGTTTCTTAAGTTAA
ACAAAAAAAGAACGGGTGGTAATGAACCCTGAAATCCTAAGTACTCGGGAGGTGAAGGCAGAAGGGTCAGGAGCTCAAG
GGCATCATTGGCTGCACAGCAAGTTCGAGGCCAGTTTGGATAAAATGAGAACGTGTCTTAAAATGCACACACACACAAA
TACGGATGTTCGCATGCACCATTTGTGGGTTTAGGGACCCACAGAGGTCAGAAGAGGCATTGGATCCTCTGGAAATGGA
ATTAGAGAGATTTGTAAATATTTTATTTTAATGATGCATGTATGTGTAGGCGTGGGGGGTGTGTGTGTGAGTCTGTACA
TGTGAGGGTGCAGGCTGTGGGCTCTCATGTGAGTCCTGAGGTTTGTAAATGCTCTCAGATGCTGAGCCGCTTCTCTGGC
CCTCCTCGGGTCTTCAATACTTTTTTATAAAAAAAGTATAACTTAAATTTTTAAAAATATTTTGTTTTAATTATGCATG
TACGTATGGGCATGTGTGTCTGGATGACTTTGTGCCTGTGAGTGCAGTACCCAGAGAGTCCAAAGGAAGGTGTTGGATC
CCATGAGTTTGAATTTCAGGTGGTTGCAATAGTGTAGATGCCAGGATCTGAATCCCCCACACCCTCTACAAAAGTGGCA
TATGTTCATAAGTGCTGAGTCATCTCTAAATTCTAAGAGCGGCTTGCCTAGTATATGTGAGGCACAGAAAAAAAGTTTT
GAGGCAGGCAGTGGTGAAGCACGCCTTTAATCCCAGCACTCGGGAGGCAGAGGCAGATGGATTTCTGAGTTCGAGGCCA
GCCTGCTCTACAAAGTGAGTTCCAGGGCAGCCAGGGCTACACAGAGAAACCCTGTCTCGAAAAACCAAAAAAAAGTTGC
TGTGTCATCGTACTGTTGATGGGCCCTAGAAAGTCCTGTTATGGATGCTCCCTCTAGGTTTGTCTGTTTGTTCGTTGGC
TTTATTTAGTTTGTGATGCTGAGGAGCAAACAGAGCAAGTAATGTCACTGAGCTATTCCTGTAGCCCCTGCCTTTGATT
GGTGGAGTTTCTGATTTCTGTAATATTCTAAACTGTAGATCCACAGGTTGTAGTGAAGGGACAATATGAACCCCGTTTG
TCCTCATTTTGAGGACCAGGCCTGATTAAAAAAAAAAAAAAAAAAGCCATAAGGCACCAGCTTCGGGAAGAGACTCTAA
GTATCAGAAACTAGGCCATAAGACAGCAGCTCTAGGAACAGACCATAAAACCCAGAACAAGATCATAAAAGCCCCTCCC
AAAGAACAGCCTGGGATAACCACAAAACGGGGAAATATCTCAGAATGAGCGATCTGTGCTGGACAGCCCTATTTTATGG
TTGGACACTCATCCATAGGAATGTAGACCACTGACCACCTGTAACCTCTAGCTCACCTGTAACCCACCAGTGAAATCTT
ACATTACCTAATCCTTCCAGAGAGTTTCCTGCCCCCTCTAAGAAGGCCTGCATGCCTTTATCTAGGTTCGACATTTCAA
AGACTGGTTGACCTCTTCATGCTGGCTGCCTCTGCAGAATAAATGCTCTTTTGTTTTTGCATACTGAGTCTGGGGTCTT
CCTTCAGCGGTTTTCAGACCCTTACATAAGGAGGTGTAGATGGAGGATGCTGGAGACTTGGGTCTCAAGTATAAATATG
AGTACCCCAAAGTTGTTGGCATTGCTAGAAGGGAATCTGAAAAGAGAGGGGAACGCTGGGTCCAGAGGAGAATTCTTAA
GATACCCAGATTGGTAGGATAAGCTCAGGTCATGAGTGAACACAGAGAGATGGGAATCAAAGAGAATGACCATGTCAGA
GAGGGAAAACCATCCTAAGAAAGGGAGGGTAGTTGGGCGTGGTGGCGCAAGCCTTTAATCCCAGCACTTGGGAGGCAGA
GGCAGATGGATTTCTGAGTTCGAGGCCAGCCTGCTCTACAAAGTGAGTTCCAGGACAGCCAGGGCTACACAGCCTGTCT
CGAAAAACAAAACAAAACAAACAAATAAGAAAGGAAGGAAGAAAGAAAGAGAGAGAAAGAGAGAAAGAAAGAGAGAAAG
AGAAAGAGAGAGAGAAAGAGAGAGAGGAGAGAAAGAGAAAGAGAGAAAGAGAGAAAGAGAAAGAGAAGAGAGAAAAGAG
AAAAGAAAGAAAGAAAGAAAGAAAGAAAGAAAGAAAGAAAGAAAGAAAGAAAGAAAGAAAGAAAAGGAGGGTAGACTCC
CTCATGGAAAAGCTGGCGAGTAGCAGCAACTTCTGTCAGGGTGAGACTGTAGAGCCGATGACTAGTCTCTGTTTGTTCA
GCCAACTGCTTATTACTAATACATGGGGAGAAGGAGACGTAGAGCCTGAACCTTCCAGGAAAGTTGGCTGAGGAGTGGA
GGCATGGGGGTAGAAATTAGACAGGGAATCTGTCTAAAAGTCACTGTCAGTGTTAATGCTGAGCTCTTGAGCCATCCTT
CTATAAAGTACTCTTTTTAATGTTCATTTCGTACAAATTAGCCAAGGCCTTGTAGGGTGGAACTTTCTGATTTCCTAGC
ATGGGCCCTTACTGACTTAGCGGACTGCAAAGCTAGCCTGAATACCTGCCGCCTACAGGACTGTAACACTAGAGGGCGC
CATAGACATGCCCGCCCTCCGCAGCTCCTCCCCACCCTCACATCCTATACACCAAAGCTCCCAACACTTCTTCGACCAG
CACTCGAAGAGCTTCCCCTCGCCTGCCCATGACGTCTGCCCATGACGTCTAGCTGACTGGTGAGAAAGAACCTCGCCCA
CGGACTGACAACCAATTGTTTGCAATATTGTCGGGCTCGCAGGGAGATTTTTTTTTTTTTACGCAAAGCTGATTCAGAT
TTGGTTTTGGACCATGGCTGTTCCATCGCAATGAATTAATACAAGTTCTGTCAACTTTCTCAGTACTCACTAGGGCATC
TATTTGTAACAAATTCTTCTTTCTGGCATGTGCACATGTGCACATACGTACGTGTGTGGTCATACAGTTTTTTTGTTTT
TTGTTTTTGTTTGTGGGTTTTTTTGTTTTGTTTTGTTTTGTTTTTTGTTTGTATTTTCGAGACAGGGTTTCTCTGTGTA
GCCTTGGCTGTCCTGGAACTCACTCTGTAGACCGGGCTCGCTTCGAACTCAGAAATCCTCCTGCCTCCCAAGTGCTGGG
ATTAAAGGCGTGCGCCACCACGCCCGGCTAAGATTCTTATTTTTGATCTTTTATTTTATGTGTATGTGGTTGTGTGAGC
TTATGTGCCTCACATGAATGCAGGATCTTGCGGAGCAAAAGAGGCATCGGATCCCATGGAACTGGAGATACAGACAACT
GTGAGCCACCATGTGGTTGCTGGGAATTGAACTCAGGACCTCTGGGAGAGCAGCCTGTGCTCTTAACCTCTGAGCCATC
TCTCCAGCCCCAACTACCTGAATCTTGAGCTCAGGAGACAAGGTTCAGTTTATATGATATTTAGTCAGATTGTACAAAG
AAATCCTGGTGAAAATATCTAGAAAAGAATGGAGTTTGGGAAATATAAAGTCAGCAGTCGTTTTTATTTTGTGCTCTGT
GTATGTGGTAAGGCACAGCAGCGAAGACTACACCAGTTAGCCCCAACCCCTCAGGGCATGAAGACCAAGAGAAGCCCAT
GGGCCACGGGAGGGAGCATCTGTCTCCACCACAGTGGCAACCCACCTCTTGGATTTTAATGTTTGTGGAAAGTGCAGGC
TTCCAGGAGTCCTGGGGAGAGAAGAAAGATATAGGACATTGAGAATACTCTTACTTTTATGAGCTGTTTAGCAGAATGA
AAGGAACCTGAATGGGCAATTCAGTATCACATAAATTGTGCCAAGGCTCATTGTTCTGCTAGACTCATGCATGCTGTGC
CCCATCCCTCCCATCCCTGCTTCCCTACACAGCTCCTGAGCCTCCCACGGGGAGGGCTCCACACAAGGATAGAGAAGCT
GTCATGTGACTTTCCTGCCCTACAGGCATCCCCAACTTTGCTTTTAACCAGTGAGGCTCTGAACTTGAATTCACATAAG
GAGAAGCCGCCTAGGAAGGCCCTTCTTCCCTGAGAATGCGAGGCAGATGGTAGCTGGCAGTCCCCAGCAACGTCTGAGC
TGGGTCTAAGGATGGAGTGGAGAAAAACAAAGCTAGACTGGTGTTCTCTGGAGCATACAGGTAAGGGAAATATTAACTT
GGATTCTGTCACACTAAACCTCAACAATCACATTGCTCACACTAGAATTCCATGTGGCAACTTGTAAAACACATATATA
GCATAGCTTGGCACAGTGCAGCACAGTGTAGTATAGTATAGTATATTGTCTCCGACCGTCAGATCTAGGGATTAAACTC
AGGTCATCTAGCTTGTGCCACGGGCTCTTTTCCCCACTGAGCCATCTTACCAATCCACATGGGGCAACCTTGAAAGGGC
CATCACCCCAGAGCAGCACAGTCTCCGAGGCTGTATCTCCAGCACAATAACTTAAATGAAGGCCAAGACTCACCTCCAA
ACTCCAGTGGGAGACTCACCACTGTATATCCCATGCACCCCCTCGCACTTTACAAATGTTTTCAGGTGTCCCCGCTAAT
CCCCAAACAGATGGTAAAATATATTTTATCCTATTTCAATTCCTGGAATATGGCATTGCAGATGCTGCTTAGCAACTTC
CTAGCTAGCCAGAACTTATCATTATTGAAGTTCCCTAGAACAGAGCTGTCTAAAAGGATGTTCTATGAACAGAGCTGTC
TAAAAGGATGCTCTGTGATAATTCTTCTTGCTATGGCTACTTTCAATTAAAATTGTAGCTGGGTGGAGTGAGGATATGA
TATCTAGATTTAATCCAGCTGTCACCTGAACTTGCTCTGTCACACCTTGCTAGCCATTGCCATATTGGACAGGGACCTC
TAATAAGTTCAGTGCCCCTTTTTATCTTCTTAGGAATTGTGTGCATATAATTCGTCCACTGCCTTAGTATCCTGGGTCT
GCGACCCCTTAACAATATGTGCATATAACCCACGTGGTTGTATATGCTAGGTTTTGCCTTGCTCACGTGGCTGTTTCCT
AAGGGTTTGAGTTCTTGTAACTACCATTCCAGCACCCATCGCTGGGTTTCTCTGCGACCTCTCCACAGGGTTCATTCTA
CTTACGTGAGGTTGAGCACTTCCTCATGTTACCGACAGATTGCATGTACTCCGCTCCTAAGTATTTTTCAGGTGTGGTA
CCCTCTGGAAGTTTAACGAAACATTTGGTGTCATCCCTGAACAGAAGGTCCTTGGTGGTGGACTTGAACAAACAGAAAT
TGCCGGTGCAGTCACTTCCCCCAAATAAAGTCTGTCAAATGAGCAGAAAATAGACGTGAACCTATGTCTCGGACTGGAA
ACACCTGCAGGAAACTGAAAGGTCCAAGCCAGCCCTGGGAACAACAGAAAGCTACAGAAGATATTTATAATTGACATGG
CATTTTTTTAAAAATCGACACAAGAAACAGAGGTATAAAACGCTGTAGAAAGGTTAAACATTTCACATTGAGTTTCTTT
AAATATTTGGTAATGCTGCTATGAAACTGTTAGTGATTGTAAGACTGCTTGACTCAAATCTAATGTCAAACTAGAAACA
CCACTGAAGATTATCATAGGCTTTGGAAGGAACTTTTCAAAGTATGCTAGCCTATTTCTTTTAAAACTAATGACAAATT
AAAAGGCAGGCAGCTATACCAGAAGGAAGGGTAATTTGTGTGTGTGTGTGTGTGTGTGTGTGTGTAGAGTGGCCCTAGG
GATAAAGTGTTCCAGTGGCCCCTGTACTCGCTGCCCCCCAAGGCTGGCCCTGACAGGATTTTTCTGAGAGTAAGAGTCT
TGTATTTTCCAGACTGTTAAGAATATGGTGCAACTGATACAAGCAAGAGAAGGAGTAGTCAATTCCGGTCCTTAAGACT
CATACGAAGGAACATTAGAAATTGTTTTCAGAAAAACATTCTCGAGGAAAATAAAGTCCCGAGTCAAGATCCAGATGAG
CTGGAAGGCAGATTCTAGGCTCGGAGGGGTTATGGGTCAAGTGGGAATTTGTCTGTCCTGACTAGGAGTTCCACAGGAG
CAGAGCCAGGTCTGAGGAATCCAGTCCCAGCTAGCACACTGTGTGCCCTCCCTGTAAACACACATTCCCTAAGACGTGT
GCATGCACCACTTTATTTATTTATTTTTTTGTTAACTTAGAAACATGTGTGTATGTGGTATTATTTCCATTTAATACGT
GAAGAAACCGAACGTGGACATTTTAAGCCATGTGCCTAAGATGGCGTGGACCGAAAGCTGCCGAGCTGAGATTTGAACT
CAGATATTCTGATCCACGGTCTGTAGAGTCCAAATTCTAGTTTTTAGAAAGGAAATGCTCACTCCGGAGCTCCGTTTAA
CTCCGAATAGCCTGCCCCTGCTAGGAATAAACGGTAGCAGACCCTGGGTAGTTCATACCTCCTGGCTAGTCAGTACAGC
CTTAACCCGGGCTGCCTTCTCTTTTCGTGAGACCACAACATGGTTTGGAGCTTGGGCCAGGTGGCAGCTGGCAAAATCT
TTCACAGGCTTCCTGGTGCCATCAGGGCAGAGCAACTCGAAGTCTTCCTGCTTCAGATTCTTAGCCCATTCGGCAGGGT
TCTTTCCTGGGTAGAGAAAAGGGGTGGATCCGCCAGGTGGAACCGTTGTAGTCACTGGGATGTCACTGACCCACAGGTG
TATGGAAGGCGTGTGCCTTCTGTCCAGCACAAGCCCATGTTTAAGGTTATGGTGGTGTTAGGAGGAGAGGATGGTCGTG
TTCATTACAGGTAGCACTCGATTCACAAGAGCTTTTTAGTGACCACTCTCCTCTGACCTGCCCTCTCAGCCAAATGAAA
AAAGAGCCACAAGCCAGGCAGTGGTGGTGCTCGCCTCTAATACCAGGACTTGGGAGGCAGAGGCAGGTGGATTTCTGAG
TTCGAGGGGCCAGCCTGGTCTACAGAGTGAGTTCCAGGACAGCCAGGGCTACACAGAGAAACCCTGTCTTGAAAACAAC
AACAACAGCAACAATAACAAAACAAAACAAAAAGAAAAGAAAAGAAAACAAAGAAAGAAAAAAAAAAAGCCATGTTCTA
TGGGTGGTTTTTTTTTAAAGAAAAAGAAAAAAAACTTCTATTAAATTCCAATGCTAAACAACAACAATGCATTTATTTA
AATAAATAAATAAATAAATAAAGCAAGCAAGCAAGCAAGCAAGCCAGGTGTGCTAATGCATGCCTTTAATCTTAGCACT
TGGAAGGCAGAAACAAATGGATCTCTGTGAATGTGGGGCCAGCTGGTCTACACAGTGAATTCTAGGTTAACGGGAGATA
CAGAGTGAAGCCTGTCTCAGACAAAATCCCGAGACCTTCTGTACTTCTAGCTCCATCAAGGAGCGGGGAGAAGGTGGTG
CTCTAAGGCAGTTTCCCCGCCTCTGTGCTGCCCTCTCAGCTCTCCAAACGGAAGACCCGCCCGGAAGACGCTCTCATAT
CGATACTCATCGATATTTTCAGTTTGACTTCATGCTAGTCCCAGGAGCTAATGTCCTATCTCAGCTGCTTACTTAATCT
TTTCTGCATTCTCTTTGCAACAGTTAACCAACCGAACAGTCGATTTAAAGACCTCCGCCCTTTCGGAGGTTTTCCGCGG
TTCCTCCGGGCATTTTTTATTGCCAGTTTTCATTTCTCGCTCATAAAGCGGGATCGTGACCTCTCTCGATTCATTCACT
GTCCGCTCAGCTTTTCCCGTAATTGAACAAATACTGTGTGAGACCAGCGTTATCATATTTTAAAATTATTCCCTCACAA
ACTAAACACCCTCACTTCTGCGTTCCTTTACTCCCAATGTTTTCTCTGGCACCAAGCCTGGAAATCACAAGTTGTGCTT
CCACGCATGCGCCTTGTCCTCATTTACCTATATACAAGTCTGTGTGATGTTACAAGCCTACATTTTTTTTCTTAGCAGT
AGATCTTAACACATATGAACTTCTGTAGCTCTCAGCTACTTATATGCGTCACAGTTTCTTCTGCACCATTATGCAAATC
AAGGTAATTCTTTAAAATCATTGGATCTTATTCTATAGTGTGACAATAACACAGTGTTTTTAAACCATTCCTCCATTAA
TAGATATTTGGAGTAATTATACTTTTTTTTTTTTTGCCACTACGGTAATGATGAGTGTCTATTGAATATGAATGTGCTT
ATGTAGATGTAGAACAGTTAATTCAGCTTAATTTTAATATAATCAAATTGCTTCCACCACCCTACGTGGTAAAGACTTG
ATTAAGCATGATCCAGGCCTTGGGTTAATTTCCAAGTACTAAGGTGGGCTGATGGAGGGACAATGGGAGGGACTGGCAG
AGGATTATAACAAGGTTCTCTAGAGACAGAAGCTATGGAAAGAGAACTAGGAAGGGCTTGCATTTGTGCCAACTGAGCT
TGTCGTGCCAGCATCCTGTGCATAAAAATAGCAGCTTGTCAGTCTGAGGAGCTGAGGAGATGGAAGGTCAGGTCTCCTA
CAGCAACTGTAACCAGGAGGTTACAGGTGTTGGAGCCTTTATGAAGAGTGGAGAGTCAAGGCCTAGAAATCAAAGACTT
ACTCAGAAAAGCACAGAAGAAATCAAAGGTGACAAAGAACCAAGACCAGGATGACACTTGGGTGGCATGAAAGAAAGCC
TTTAAAGAAAGTTTAAAAATCATGTGGGGAACAAGGGAGGGAGAGAAGGGAGAGAGAAAGGGGGGACTGAGAGAGAGGG
GAGAGGGAGGAAGAGAGAGAACAAGGTAGGAAGAGGGGAGAGAGGGAGGAAGGGATAGAGAGAGGAAAGGAGAAGGAGA
GGAGGAGGGAGAGAGAGGTAGGGAGAGAGAAAGAGATAAGCAGAGGGGAGAGAAAGAGAGAGGGAGGGAAAGGGGAAAG
AGGAAGGGAGAGAGAGGTGGGAAGGGGAGAGAGAAAATGTGTGTGTGTGTGTGTAAGAGAGAGAGAGAGAGAGAGAGAG
AGAGAGAGAACACAATCAAATCAGTTCGTTAAATAAATTCTTAGTGTCTTCTGAGTGCAGTCTCAGGTGCTGGGAGGAT
AAAGAGGAAGAGAAAGAGCCCAGTGATTGCCCACAGCCAAAGTGCACACAGATACTTTGTAGCCACATAGACAGAAGAT
TCTCAGCAGAGTGGGTGTGCCGCCTGGGAAGGCGTCTCAGAAGAGCTGGTGCCGAGAGACAGTCCATCCTACATCAGTT
GCCCAAGGCAGTGAAGAGAACAGACCTGAGAGCTGACAGGGCAGTGGTTAATGGCCGGAACGGCAGTTCCTCAGGAGCC
CTTGGTGACATACAAGGCCTGGCGTGCTCATCCTTCCTGATACTCAAGCCCATCTTCCCAACCTTGCCATCCCACCTCA
TTCCTTAGCTAGCATTCCATGGCCCGCAAGAGCTATCTCTTCATCGTTTATCTAGTCTGGGTTGCATCATGGATTCTTA
CTTTAATCTATGGTTTGCCATCTGTTACTGTTAACATTAGTTTCATGTCCAACATTTCCAGACATGGCACTGGGAGATG
CTATACACTGGCTCCCTGTGCTGTATCCCATCCTCCTTTGCACACGGCAGTGCAAGCAGCTTCCCACGCATATTCACCC
TGCCCCAGCCTTGCAGGGACCCTTGCCATAGGGATCACTGCAGAGCAATTGCTTCTCTCTCCATTGAACATACAAGTTG
AGAATTAGAACTCTCGAGCCTGACGGTTTCTGCACAGCTCCTATGGAGCCATCCCTGAGTCTCAGCAAATCCCAGTGAC
CCAGATTCTGGAGGGAACCAACAGAAGAGAGCGCACACATACCTTCGGTGTTATCCAGGACAGTCTGGTGTTTCACAAA
GGCTACATCTCCTTTCTCAACGAGACACCTGAACAGGTCCAGATTTGGAGAAGAGAGAAGACAGGAGGTCAGACTGGCA
CCTGTCATTCAGAGGCACCTTGGGGATTCAGGTTGGTCACCTGATGTCATCAAGTGTTAGGGCCACTCGTTCTATCACT
CAACAACATGCAGAATAAGGAAAGCAAAAGGCCCCAAGTTGCTGTGCAGTCAGTCCCACAAGCTCAGCTCCACACACCA
TGCTTTTTTTTTTCTTTATTCTTTGTGGGTGCGAGAGGAAGGCGTATATGCACGTTCATGTGAGTATGTGTGCATGTGC
ACATGTGTACATGTGTGCAGAGGTCAGAAGTCAACATTGGACATCTGCCTTTATCATTCCCCACCTTACTGTTTGAGAC
ATACATGGTCTCTCCCTGAGCCTGGAGCGCCTCAGTTTGGCTAAGCTGGTGGCTAGTGAGCTCCAGAGACCCACTTGTT
TCTCCTCCATCCCACACTCGCAAGTGCTGAGGTTAAAGACATATATTCGTGCTTGGTTTTTATGTGGATTTTAGATATC
CAACTCTGTGTGTGTGTGTTGGAAAACTCACCTGAAAGCCCCTGTGTAACCATTATATTCCTCTTTGTTGTTCGGAGCA
CATTTGAGTGGGCCAATACACAGGTCACAGAGGGTGGAATTCTTCTCATACCCGGGAGCGCAGCCTTGACTGAAAAATT
CATCTGGACAGAAGAACAAGAAAATGTCAGCTTTGTGTGTGTGTGTGTGTGTGTGTGTGTGTGTGTGTGTGTTAATTCT
AGTGGCTTACCTAACCCCTGACAGGCTATGAAATAATTCACTCTGCAACCTGCCACCCACCAACCCAGAACCACCCAGA
CTATAGGTCTTTGGAGGAAACTTCTCAAGGTTGGGAAAGGATTTTGTGAGCATTCCACTTCAGGGTAAAGGAGACCCCT
GGAGGACTGTGATGGTACCATCTCTAGCCTGTAGAATGAAGAAATGGAATTTCTAAGGTTGTACCATTCTTTCTTTCTT
TGTGAGTTTCCCCTTCCCTGCCATTCATTAGAAGAGCTACACTACACCTCAGAAATCAAGAGAGGGATAGGAGACAGCC
TCTGCCCATCAGCTGCTTCTATGGATGTGAAAATATAAGGAGGCTCAGGGAAGCAAGTTCAGGAGCCTGTGCTTTCTGC
CTGTCACCCCAGGTGTCCTTTGTTTCTGAGACAGCAGAGCATCTCTGTGCAGAAATGTGTCCCCATCTCCCCTCCCTGC
ATATTCTAAGGTCGCAGAGTTCATAGTCATGTTTACAGTTCTATCATTTTTAAGGAGTTGCCCAAATTTAGAGGCATCA
GGAAAGAAGATCTGAGGAAGCCAATATGAAGCAAAGCCATGGCCAAAATTTTCTGTTGGGATCTTCTACTCAGAAACAT
AAGGAGATAGAAACAGCCTCAGGTAGAGGACATAGTCAACTGAAGAATCCTCAGGGCTGAGCAGGGACTCGGTGAGATG
ACCAACACCTTAAGGGACCCAGGAAACGGCAGCCCACATAGTCATATCACAGAACCCTGATGGCAGAGATTGCTTGATA
TCCACCCAATGTCTGTTTCCCTTTGTTCCTCCGTAACAAAAATCTAATTTGGTTTATAGTAGGTACATGTAGGTAGGTG
TCTGACAGGACACCTAAGTTCTGCACAATGGCAAGTTATATGCAAATAATTGCTTTCAAGTCCAGAAGGCTCTTTTCAA
GCACTGACCATAGTGGGTGTAAATTTCCACTTGTTCTCCTTGCCTGAATTGTGACTGCCCAGGCAAGGTTGCTTTGAAC
ATGGAAGTACTATGATGGAAATCGTGGACCGGAAAGAAGGAGAAGCTCTCAAGACCTTATCAGCCGTGGACTGCTCACC
TCTGATCTCCATCATGGGAGAGGCAACTAAATGTATATCTACTGACGCCATCATTTGCCACTGAGACAATCATCCTGAC
TCCATGGCTCAGCTCCGCACCCCTCCTAGCTTTTTTTGCTATTTCCTTGAGGTTCATTTTTGTGAAACTCACTTTTATG
AACCCTGAGCCCACCGCCTCCCTCAGGACCCTGTTTTTCTGCACGGCTCCTCCCAAGCTGCCTTCCCAGCTCTGCTCAC
CGAATTTGCAGTGGTTGATCCTGTTGTACAGCATGCCCATAGGGATGTTCCAACCAGCGGTTCTGTCTACCCCAGTGTG
GCAGGACTTCTTGCCTTTCAGGTTGTTCCAGGTGATGCTAGTGTCCGATGCCTTCACCACAGCCACGGCATAATACCCT
TTAGGAAAGATACCTGAAAAGAACAATTAATATCGCTGGGGCCTCCCAAAGTATCTGCTTCCAACAGAAGCCACTGTCT
CCCTAGGACAGCGAGGATGTCCTAAATAGCATTGTGTCGTGAAAGGAATTCCACAACATCTAACTCCGGTGAAGAACAG
GACAGTCTTGCAGGAAGAATCTTAAAAGCAAAGTACTAAGATCACATGGTGCCCCGTGATTATGTCCATATTAAAAATG
CTTTGATGTATTGATTTAAAAATAAAATAATGGGCTCAGGAAATGACTTGGTTGGTAAAGTTCTTGCCATGTAAGCAGT
TCGGTCCCCAGAACTGATGTAAGATAAAAGCCAGGCATGGTGGCATGTGCTTATAATCTCATTACTAGGAAGATGGGTA
CAGACAAATTCCTGGGCCTTACTAGTAAGCCAGCTTAACTTACTCCAGACCAACAAAGATCCCATCTCATAAAACAAAG
TGGATGACTTCTGAGAAATTCCACTTGACGTTGACTTCTGACCTCTACATGCCCCATCACAAGTGTGCACATGTGCCCA
CATATACATGTATACACATAAAATAGCAAATATTAACATATAATCATTAGGAAGAAGGCTAACATACAGCCCTTACCTG
TATGCATAAGGTTATTGAAGTTAAAAGCCAGTAACTCACTTTCCAAATTATTAAATCAAAGACATGGGTACAGAAAAGT
TAATGGAACTCTGGCATTTTGTATATGAACATGTATTGGGGTTAATCAGGCCAGATTCCCTCTGATAATAAGAATATGA
TTTTATACCAGGATAAACATAAAAAAGGAAATACCAACAACACATTGGTTGTAATTTTCTATAGCACAAATGTGACCTC
AGTTGGGGCTGGAACACCTGTGATTCTGTTTTCTGTTTTAATTAATTCAATATACTTTCTCCAATTGAAAACAATCTGT
GGAATAATAATGGCTCCTTCTAGATATGCTAAAAACTGGGAGGTTAAGTTTAGCTGCAGGGACAAGACTACAGAATTGT
ACACTCATAGTTCTGTGGAATACAACCTAAGGAGACTGAACACTAGGACTCAGGGTCACTTTGGCATTTGAATTCCTGT
TTGCTCTGGTGCCATCTTTTCAGATCCACTCCTAATCAAAGCCTTAGTAAGAGATGGGCTAGTCTGGTTTCCTGGGCCC
AGCCTGGATGGAATTCCATGCACTTAGACATCAGCATTTTGAAGTGCTCCATTCAGTCCTGCAAGGACTACATAGACAA
GGTCTGTGCTAACTCTCATCTAAAACTCTGAAGACTTCATAGGATTCAAAATGGTAGGAAGCAATGGGAAGAACCTAGA
TTGTCCCCAGGATCAGTTGACAGGGGCAAGAAATCCTAGCTTTGTCAACAGATGTTCTAGTTACTGCTTTGTTCAAAGA
TTTGTTTGGAGACCATTCATAAATTCTCAACCCTTGGGTTCCCTCATGCATCCTTATAGAGACAATACCTACATATTAA
CAGGAGATGAGTAACCCTGTATCTGAGTCACCACACACACACACACACACACACACACACACTCCTGATCAATTACTAT
TCTTTCATCTCACTTTGCCTTCTAAAATTGGCTTTCTCCATTGACTTATAAATTTGCCTAACCACTTCTCCCAACAATG
AGAATTTACCTTCCTGTGCCCGAGATTACCCGTTTCAACTCACCTTGTTGTGATGGGATGGCACAATTAGAGCTCTCTG
AAAGAGAATCAAGAAACCATTAAACATTTATGTATAGGATAGAAAACCCACACCTTTCTCATGAGGCAACTAAAACTAA
GAGGCATGGATAAGACCACACACACCTCTGATTTACAATAATGTCAAGACTCTCCAGATGTTGAGAGTTCACCTGGCTG
TTGACCTCTGGGACTCATTCACAAACTGCATTTCAAGTGTCTTGCTCACTGTGTACCAAGCCCACAGTGGGATGTTGAC
TGAACTTATTTGTCCTGCTACAAGGTAGCAGGAAAAGTGAGCCTTCTGGATATCGCAAGACTTTCCAGACTTCCTATAT
GTCCTCTGTAATTGGATCCTTTTTATACCAGAAATCTCATCTCAGGGACTGAGGATCCCACCACTCTCATCCTTTAAGA
TGACTGTGGAGATTCTAGGTGAGGGCGTCTCAGAGACTGAGAAAAAGCTCATGCAAGGAGCATTTTATGGTGGCTGTGG
GATAAATTGGGCTGTGATTCTCCTTCTACCATGGCTCAGAAAGAACACAGAGGCACTGTCCTCACTCACCGTAGTACTC
TGCCATGACAGGCACTAGACCACACTGGCCTGCAATGTAGGCATGTCCTCCATCCAAAGTCATGGCGTCCGCTTCTCCG
TTCTGCAAAGACACAGGAAGACACAGCAAATGAAGAGTTGCTATTTCCTGTGCCACCTGCCCTTTTAGACTGGCCTCTT
GAAGGCCCCTCTCAGCCCAAGTTATAAAGCCAAGGGCAACAGTAGATGTTGGTACCGGACCCCTGATGATCAGTCAGGC
ACGCCCAGATGTTAGTGTATTTTTATATAAACTCTGGTTCTGTGTTAGCAAGCTTTGTATGAAGTTGGTTTGATTTTTC
TTGCCTTGACTCAGACAAAACAAGAAAATGGTCTGTAGCTAAAAGAATGTAGTATCTGAAAATGTAGATAGAAGAATGG
GGTTCGCAGTCAGTTTTGCTTTCTGATAGATATCTTAGAAAGCACAAAAGAGTCAACTCAAAGAATAGGCAACTGGAGA
GGCTCCATAGAGCACAGAACAGAGGCAGGGGTGTGAGAGCTTGGAGCTTCCTTGCCCTCTCCAAGGCTGCCACCCTGCA
GAACCTCAGTGTATTCTCTGAGGCAGAAACGCCAGGGTTCGAAAGACACAAGAAAGGCTCACAAGACACGATGAGGTGC
TAAGGTGGGGTGTGCTAAGCAACCCACACAGCACACTCTCAAGAAGAGGGTTTTCTCTGAGTCACGGTGATGACAAGGG
GTGCTGTTTTTCTTCGTTCTCGGGCTCAGGATTTAGAAAATTCTCTACAGGCAATTTAAAAATGCTATCTCGATCAATG
AAGTGAACATGTACTTGCTTGCGAAATCAAAACGGAGCCCTTTCCACACTCCCCAGGGCACATCCTGAGCCCAAAAGGC
ACTCTTGTCATGGTCCAGTGTCCTTTGACAGGAGATGGCTCAGTTTACCCTTCTACTGCGCTAATGTAAAGGGCATCCT
TCAGAGCTGAACTCAAACCATGAGAGCAAGGAGTCTGGAAAGGGGATTTCCATGCAAGAGTTACACTTGCTAACTCAGC
GGGCCAGCAGGCCATAGTGTTGGGGACCCACCCTGAGAGGCAGGAGACACGTACCACAATCTTTTCAATGCAGTCCTCA
GTGGTCTCTGCTGACTCACACTCTATCTTTCCCTCACTGATGATGCTCCACTCGTCACACTTGGTTCTCTCCAGGTGAC
TCAGTGCACACCACTTCACTGGCGAGTTGTCGATCGAGCCCTCCGGGCCTGTGGTACCAGAAGAAGAGCCGGGGCTCAG
GTAAGAAAGGCTGCAGCAGCTGTCTGGTAGATGTCAATGCTGCTAAGTGCTTTATGGAAATGATGAGCTAAATAAACAG
ATCCCACCAAGGAACTCCTAATCGTCTAGGGAAGCAGATGGGACACAGCCCAACTGTAGTTGATTTCATTTAAGTTCAG
CTTTTCTTCCGAGGTAAGATTTAGTTTTCTTTAATTTTAATCACGTGGGGTGCGTGTGTGCGTATGTGCGTGCATGCAT
GCGTAAGTGCATGAATGTGTGTGTGTGTGTGTGTATGTATGTTTGTACATGTTAGTACAAGTACCCTCAGAGGTTTGAC
TTTGGTTTTCACTACTGTAGGACTTTGATTTTTTTTTTGTTGCTGTTTTTCATTCTTTCATTTTGTATTTATCTGTTCA
GTAGTGTGACTATCTCTCAAACATTTGTCCTCTCCCTGACCTGAAATTCCTTCCCCAAACAGCAGAGTCTAGTATGTGT
TTATAAGTTAGGCACCCAGCCGAGTCTGTGGCTGGTTGTCTAATACATACCTACTGAGTGAATAAATTATTAGGCAAAC
CCCCAGTCCTCCAGTGAAACCCAGGGCCAGATCAAACTCCCTGCATCTCCAGCTTTCATTACGCCCATGTTGACCACAA
TATTGGCAAGAGATATACAGTCTGCAGAAACATGGAGTTATTTACTTTCTAATAGTCTAATTGGCTTCATAAAGGGCAG
GGGGCTACCCTAATTTTTGCAGAGGAATGATACTAGTATGAACCCAGGTCATTTTAAATGTGACCAGCCTTTAAAGCAC
TTGGTGACCTCTGGGTCCTCTCATGGTTGATGCCAGCCAGCATCAGTCTAGCCCTAGGCTCACAAACAGGATGGAAATG
AGAACAGCAGGAGAAGCTGTCAGTCCCCAGAAAGACCATGGCTGCTTCTTGACCTTACCAGGTTCCCCACATTCCTGGG
GTCACCTAGTTTTCCCTGAATACTTACACACGCCTTCCTGCTGATTCCGAATGGCAGTGACATAGTTATGGCCAAGGTA
CAGCCTGTAGTCCATCCTTGGGGGGACCCTTAACAGCCCAAAGGCAGAATCTTTAAACAGCAGGTCTTTCCCAAGAGGA
GAGCTGAACAGTTGGAAGTCTTTTGATTTGCCTTTGCCAAAGTGTTCCTGTTTCCAGAAGGAAAAACAACAACAACAAA
AACAAAACAAAACAAAACAAAAAAACTATAAAAACAGTGGAGTGAACAGGGAATTAGGGAGGTTAAAAAGAAGAACAAG
AACTGAAGAGAACAAGAGAAACTTCAGGAAACTGATCTTAAAAGTGTGGGAAACTTGGAGGTACCAGGAGAGAAGTTAT
TCGGGCATGTTCTCCATCACCCAGCGCCTCTTTGTCCGGGATCCTGTAAGGACCATCCCACATTCCCTCTCCCTGTCTG
CCTGAGTAGTTAAGTGAGAACTAGCTGAGAACAAGTGAATCTAGTGCAGAGGCTGGCATGAGTAGGCTTGACCAGAGGA
AACTGTGTTAACCGACCTCAGCCAAGAGGCAGGGGAAGTCAGTTCCTCTGCAGTCTGGGTGTGTGCGCGTGTGCCTCTG
TGTGTGTGTGTGTGTGTGTGTGTGTGCGTGCACGCGCGCGTGAGCGAGTGTGACGGAGATTCTCTTTCCTTCTGGGATT
CTCTCTGGGCCTTGAGGGCCTAATTCAGATGGAAAGGGTATCATTGGTCAAAAAGGTGGTGGATGTTGATACCAGAGGA
GACACTGGCTACTCTATGAGGATGCTGGAGAGGTTGGTGACCCGGCTGTCTTAGTGTGTCCAGATGTCAAAGAGATCTC
TGCACAGAGCGGTAAGCAGGACAGAGGATGGCGGTAAAATACCTGTGCCACTTTGAGAATCTCCCAGATCAAGTCTTCC
TTGCCATTGTTTTTTCGAGCCACAACAGCATGAGAAGGGATCCGAGCCAGGTAGCAATCCTCATACTGATCCACTGGCT
TGCGGGTATTGTCAAGGCAGAGCAGTTCATATTGGTCCCTGTCAGCCTTCTCCGGCAAGACCTCTAAGGAGGGAAAGTT
CAGTGAGCCTGTGGCAGGCTGAACCCCTCCCCATTTTTGAAGTCCTGTTAGCATTGAAAGCATGAACTGAAAGGTCTAG
AGGGATCTCTGAGGGTCAAGGAATATGCAGGAAGGTGAGCCTATGACCAGTTAAAGACACAGAGGCTTCTGTAGGCCAG
TGAAGCAATGGTTGCCCCCATCCCCTGACTCCAAGCTCAGCAAGACTACTGACAGGCAAGGTCAGCCAGGCCAACCTCC
AACCCTTGGCTGTGACACTTCTTCCCTAGAGGGAGAGCCATTGTGTGGTTTGAGTGTTGGAAAGAGACCCATGAATCTT
GGTAGAGACCCCCAAAGTACCTTCCTCTGCATATATAGAGACTCAAGCAGCGGGAGAGAGACCCTGCATGCTCAGGTCT
GGCCACTAGCCATGAAAAGGATGACAAGGAACCGGCCAGAGTCTTTCCCCATCACTCACCAAATATGGTTGTGTGCTTG
ACAAAGGCCACATCCCCACCGCCATCTTTCAGACACCTGTGGGAAAGAAGCCCATGAACAAGGAGTCCCAGAAGGTGGA
CCCTGCTCCTGGTCCAGATCACACTGTCACCTTTCAGACAAGGCCTGAGGCTGAGTGGCCCTCATAGTGGAGACAGCTC
TCTAGGGTGGGATGCTGACATCCACAGTACCACTGGGATGGGGGATGTGCTCACGTACCCCAAAGTGGCTGACAGGAGG
TGAAAATAATGTAAAAATCTTCAGATCCTTAGTATGGAAGATGACAGTATTTCTACCCTGGCTATGTGGATTTCAGGGT
ATCAGAAGACAAAAAAGAGAGAGCAAGAAATTGGGCATAAATGACACAAAATCCTATTCCTAAGAGGCTACTTGCAATT
GATGCTGGCTTCAGAAAATCAGGGTTGTTTGTTTGTTTGTTTGTTTCAAGATAGTGTTTCTCTGTGTAGCCTAGCTGTC
CTGGAACTCACTTTGTAGACCAGGCTGGCCTTGAACTCAGAAATCTGCCTGCCTCTGCCTCCCAAGTGCTAGGATTAAA
GGCGTGTGCCACCACTGCCTGGCGAAAATCAGTTGTTTTTGTTTTGTTTTGTTTTGTTTTTGTTTTTTGTTTTTTTAAG
GGAGTATATCAACCATATTTCAGGACCAGTCTCATGCCCAGGAGTAGTTGGCCAACACACACACACACAGAGGACTTCA
TGTTTTGTTTTGTTTTCCCCTGTGTACTTTTGGTTTGGTTTAATCTTCAGTGTTGGTGTGTGTGTGTAAGAAGGTATGG
GGGTGCAGTGTCCTCTGGTATGGTGATAGAGACCCAGGGGTAACTTAGGCAGAGCTGGGTGGTAAGAAGCCAGAGAAAC
CTCTGTAGACTTAAAGACAGATGGTCCATCTGTAGCATCATTCCAGGAGAACAAAGGCCCAAGAGGGACCGGCACAGCG
CCTCATTGTCCTTACCAACCCAAGGCTCATGGAGCCATAATAGAGGCTCACATGCCCTGCCTCCCTCAGAGTATTTTAT
GTCCACTGGACAGTTTTATATATGATTAAAATATATTATATGTAAAAACATAATTTAAAAAGCCACATGTACTGCTGGG
GTGGTGCGGGGCAGCGTCTAGTATCCTGAGCATGGTCTACTGTGAGGCACTCGGGGTATGTAGGTCCCTTCAGATGCTA
CCCAGCCCACTGAGAGGAGACGCCAGCCAGATGCGGAAGCTCTGAGGAGAGAGGACTGCCAGAACAGGGCTTGAACTTT
GACATCAGATGGAAGGGGACATAGGTTACCTTGGCCTTGAGAGCCCCAGGTTGTAACCCCGCCTTCCTGGGAGGACCTT
AAGCCACCTGCATGCTTTTAGGTAGGTTGGCTCAGCAAAGAGCCCCCATTTGAGGACTTTTGGCACTGGCCACCACAGA
GTGTCAATTCCACTCACTTGAATGCGCCTACGTAGCCAAAGAATGGTTGAGTGGAGGAGCAGCCACAGCCTGGGCACAG
TTGACACAGTTTGGGGAAGGCCACTGGATCTGCACAGGGGACACAACTGCCCGAGAAGAAACTGGACACAGCTGCTCGA
TACAAAGAAATGGACAAGGCATAATAAGCATAATGCCATCACCCAGCCTGGGCTGGTGAAGGAAGGCAGAGGCACAGTC
CCTGCCCAGCACAGTCCCTGCCCAGCCTTTCATGTACTAAGCAGGGTTTCTAGACAGGAATAAGTTAACCCCTGCTCTT
CAGTTACCCTCCCGGGGACACAAGCAGTACTTCTTGCTAAACAAGGCTTGCCCTAGACTTTGCCCACTCTGTTTCCAGG
TTTTTTTTTGTTTTTGTTTTTTTCAAGACAGGGTTTCTCTGTGTAGCCCTGGCTGTCCAGGAACTCACTCCGTAGACCA
GGCTGGCCTCGAACTCAGAAAGCCACCTGCCTCTGCCTCCCAAGTGCTGGGATTAAAGGTGTGAGCCACCACTGCCAGG
CTCCAGATCTTTCAAAGGGTGCCTCTGGGGGCTGTAGTACAGCCTAGAGAGGTGCAGGACAACCTTATGACCAGCAGGT
GGAACCAAAGCATCCTTTAACGGAGCAGAGGTGTGTGTGGTGGTGGGGGTGATGGGGGTTGAGGGTGTGTGAGGGACTG
AAGTGAATATGGAAATCCACTGTGGACCCACCTGCCCTTTCATTCCTCCTCAGGTCAGCCTCTGCAGGGGTGTTGGGAG
CTCACAACAACAAGAAGGTTCAAGTTGCCACTTCTAATTGTTTCCCTCTTCCTCCACTTCCTTGGAGTTCAGCCTACCT
GCCTGACTAACCAGGACTGTGTGGCCCCAGCAGTACAGGATATTCAGAATAGAAATGGCGGCTTACCTTTCTCAAGAGG
ACTGCGGGGCTCCGACAGCTTACAGAAGAGCAAGCCAATGGGGATGACCCAGCCTGCAGACCTTCCCAGGCCTGTGTGG
CAGGACTTCTTGCCTTCGAGCTGGTTCAGCTGGAAGTCTGTTCCCTTCTTTACCACAGCCACAGCGTAGTAGTAGGTCT
GTGGATCTGAAAGGGGACAATGTGGAGGGAGGACTTTGACATGGCCCAGAGAAGCACTGCTTGTCAGTGCTCTGTCCTG
ATGAAGGAGAGAGAGAGACCCAGGGGTAACTTAGGCAGAGCTGGGTGGTAAGAAGCCAGAGAAACCTCTGTAGACTTAA
AGACAGATGGTCCATCCGGGAAAACAAAGGCTCAAGAGGCATCGGCACATGGGTCATGAGCGCCTCATTCTCCTTACCA
AGCCAAGGCACCAGGAACATGTGAGAGCCACAACAGAGGCATTCTCTGTCTCCCTCAAAGTATTTTACATCCTCTAATA
TGGTGACAGGGACCACCAGAGCTATCTCAGAAGAGCTTCTTGGACTGCTAAGCTCCCTCCGGGCACTATAGGGGTGGGT
TTTCTCTTGTCCATGGCGCCTGAGGCTCTGGGGAGCTTGGACACTTCCCCAGATCCAGTGAAGGCCAAGCTGGACCCCA
GCCTGCTCTCCATTGAGGATGCCTGACTCAGAAGGTCCATACCAGCCTCCAACCAGCCCAAAGTCCTCAAGATGTCTCC
ATGTGTGCCCGGAGGGCTAGAAGATCTCATTCCCCATGGACTCCCCAAAGAAAAGGCTTCCTAGCGTTTCTAATGTCGG
CTACCTGCCTACAGAATGAGATTTAACATCTACTAAACCACGGTCCCCCTCCTGGGTATTCTGGGAGAACTCACGTTCC
ACTGATCCATAAAACTCCGCCGCCACGGGCTTCAGGTTGTTCGGAGTCAGGCCGGCATCGTACACCCAACCCCCATCCA
AGGTCATAGCATCGGCTTCACTTGCCTAGAAGAGAGCGAGTCCCAAAGACTTATTGCAAGGAAGGCTTCCCTACACCAG
AACAAGTGGGAAGGACCTGGCAGCGCTCCATGGGTCTCGGGCTAGAAAATCCCAAGCACAAGCACATCCAGCCCTGCCG
GTTTGGGTTGATTCCATCTAGAGGAAGAAATGGAGTCTTTTTTTTCCTCACTTTTCCCTGATGATGTGCCCAGTACCTG
GACAAAATGCGGATTTACCCATCGGCAGTGGTCGAGGCTTGGTCTGGCAGGCTTGGTAGGGGGGAAGGGTCTCTCCCTC
TTCAGAGGTGGGCACTGCTATTATACCAGAGGCTCTGGCATGGTTGTAGTGGAGCACCCAGGGTCTGTGGGTGGCTGGG
TTCTTATATCTGTTTCCATGCTCGGCCACACAGTGGGGTTTGTCATTCAGAGACCCTCGTGTTTTGAGAGTCCCTGTAA
GCTCCTCTGTGGGTGCTGTCATGGAGGTGAAAACCCTGAAGGTGCTGTCTTTGTTTTTTTTTTTTTTTAAAGATTTATT
TATTATTATATCTAAGCACACTGTAGCTGTCTTCAGATGCACCAGAAAAGGGTGTCAGATCTCATTACGGATGGTTGTG
AGCCACCATGTGGTTGCTGGGATTTGAACTCAGGACCTTCAGAAGCCCATCTCACTAGCCCAGAAGGTGCTAGTCTTAA
CACTGAAAAGCTTACTGCTTTTCCCTATAGTCCTGGGCCCCTGAAACAGTAGGAGCTAGCATGCCATGGCCACCTACGT
GTGCGGCCACACCCGGATGGACAGGAGAATTCAAGCCTTGGAATGATCCTCTTCCTGCCACTCTTGGTATAATTGTCTA
CTTGGACACCTGACAGTCCCCACCCCCCAGTTCAATTTTTTTTTTTCCACAAGTGAGTCAAACCAGAGGCGTATAGGGG
CTACCGTTCCCGGCAGCAGGACTTACAGAAATGGCCTTGATGCAATCCGGATAGGAGGTTTTCTTCACACAGGCAAGCC
GGGGGCCATCAGGCGGAAGGACGGTCTTCATGTGGTCACGGAAGCTGATGCACTTGGTATTCTCGTGCTCTGACACTGC
GCACCATTTGACCGTTTTGTCAGGGACAGCCAGACACAGCCCTGCAGGAGAGAAGGCGGAGGCATAAAGGACCCGCTCC
CCGTGCCTGGGGAGAGAACGCACCACTTTACGAAGGGTCTTAATGGCCACCTCTCCTCTGTTCCACCCTCCTCTCATCC
CTGGTGGCAGTCATGACAGAGCACAGGGCTCTGCTGCACTCCGATCCTGGGAACAGATGAATCCGTTCGCCCCAACGGT
CTGCCATGTTCCCACCTAACCCTGGGCTGCTTAGAGAGATGCTGGGGTAGCTGAAGGTGACAACCTGCTCTTCTTTTGC
CTTGGCTGAAGGTCCACATCAAAATGTGAACTTCAGTGGGCAAACACCATCCTCAGCCACCTTCAGACAAGGCTCTAGA
CACCAACTCTAGGAAAGGCATACCGTCTTTTAGAAATGAGAAAGCTGGCCTTGGGGGAGGAAGCAGGTTTGTCCTACGT
CATCATGTTTGTTAGCAGCCCAGACACTAGGTCTGATGGCCAGGCCCCAGGGGAAGATAACGATCTTAGAAGCTTTGCG
TCTCTCTGAGCGACAGTTTGATCACGAGTTCACCTGTGATACTCTTCAGCTGTCTTCTGTTGAGAAAAGGCTAGGAACT
CCCTTCTATGCAGCAGGCTTCTGTTTCTACCAAACCTTCCCTGGATGCTTTACCCCCTTTGGGCCGCCATTTAGAGAAT
CAGCTGAAGACAATTACGTGTATCACGATGTGTGTATGTGCTTATATAATCGGGCTCCCATGTGGTGTGTGCATGTGCA
GATGGGAACACATGGGGGGTGGGGGTGGGGGACAAAGGGCAACGTGCGGTGTCTCCCGCTATTACTCTCTGCCTGATTT
TTTTGGAGACAGTGTCTTTCACTGAATCTGAGCCTTGCTGGTTCCACTAGATTGTCTGGCCAGAAAGTCCCTGGGATCT
TCCTGTGTTTGCTTCCCCAGGGCACTGTGGGTTCCCTGGGATCTTCCTGTGTCTGCTTCCCCAGGGCACTGCGGTACCC
AGCTTTTTACATGGTTGCTGGGGTTCTGAATTTAGGTCCTGGTGTTTGCATGCTAAGCATCTGCCCAGTTGTACCATCT
CCCCAGCTGGGTCACCACTGAAATCCACACGATGGAGAGATGCCGTCTGTGGGACCTGGCACTCCTAGCTCTTGTCACA
TCCCTTCCCTTTCGGGCAATTCAGCAGGGCTGACTTACTGACTCAGCAAGCCCACAAATCACTAAGCATGGATCGGGGT
GGGTGAGGCCAATGGACCTCAGGATGGATGAGGAAGGACAACAGGGAGACTGATCGTCCCCAGCTCCTTCCCTTTAGTT
CACCGTGGCCAGAGGGATAGACGACCTCTCTAGCCTCTTCAAACTAGTTCGTCTAACTTGTAAATTTTGACCTTGGTCC
GGTGTCACTGTGCATAGCCACACAAGGTGTCCTGAGCTAACAAGCACGGAAGCCTGTTTCAGGCTGACAGTTGTTAGGG
ATGACAAATCACTCAAACTAGACAGCCCCAACACTGTGACAAATGCTAACTACAGTCCAACTGGAGCAGGCATTTGGGT
CTTTGAGACCCCCCCCCCCTCTGGTGAGGAGTCAGCAGGATGCAGGACTGGGACCTGTGACCTCACCCTCACCTGACCC
TCCCAGGCATGTGCGGTAACAAGCAAGACCCGTCGCAGGAGAAATACAGGTATGATTTGAACCCCAGAATTCTGGCTTC
AAATCCCACACCCTAGTCTAAGCCACCAGCGCCAAAGGCATCCAAGGAGGCATCAGACAAAGGAGAGATAGCAGGATTA
GATCTCAGGAAGTTGTGACTACCACACCATGCTGTTTGGACTATACTGAGGCCCCGGGATAGCGCCTGGGTAAACTGGT
TAAAAGTTTTCTAACATCGCGTATACCATATCTTCAAATTACTGGACATAGGGGAGACAGCGTGATGAGGATAGTGAAA
GGTAGAGACTGAATCAGAGCCCCAGATGCATGTGGATCCACGTTGTTCCTACGCTATGGAAGATGAAGATACCACAGAG
AAGAAGCAAGGGGCTGGAAGCTGGGACTTCCAGCTTTAGCTCCTAAGGGTTGCATACATAGCCAGCCAGTCATCCCCTG
CACGCACACTCACCCAGGGCAGCGCAGGCCAGCAGGGCACCCACGGTGAGCCTCATCCTCTCGGTGTGTGTGTGGCGAG
GAGCGGGGAGTACAGACCGACCCGCTTCTGCGCCGCCTGCCCGTGGCCCGCTCGCCTTTATGCACGGAGGGAGGGGGCC
GGCTGGGCGCAATCTTTGACCTCTTGTGTTTGCGCAGTCCAATTGCCCAATCACCCCGCATCCACCCCCTTCCTTTCTT
GCCCTGATGATCACCTCATTTCCTGAGCTGTGGGACAGAACTGCGCATGGAATCCACTACCACGACAATCACACACACA
CACACACACACACACACACACACACACTCACTCAAAAAGCCTGTGTTTAGAAGGAAGCTAAAAGCAGAACCCACTCTTT
GTTATCACTGCCTGGAGCAGCATGGTACAGCTGCTTGGGCGGGAGTGGCTTGCTCCCGGGTGCCAGGGCTTCTACTTGC
CAACAGCTTCATCAACCTTATAGGGGGGCGGGGGGGGAGACTGAGGCTTGAGCGGAAGGGAAACTGCCTAGGACGGCAG
ACTAGAACCGGAGAAGGAACCTAACTGGGAAACTTGGCTCAGGTCAGAGAGGCAGCACGCCATGATCCCAGCAACAGTC
CGGGGGCAGCTCTCCCTCCCTCTATCCCTGCCAGGCCTGGCCTGCTCTGGAGCTGAAAGCTTCCTGCCCTTGAGCTTCT
GGTGAGACAATCCGGGCTAGAAACAGTCACAGGGACAAGAAACTCTCTCCCACTGCCAGGAAGTGGTCAAACTGTGAGG
CTCAGAACAAAGGGCCAGTGTAAGCATAAAGAGGATGCTTCCTTTTTTTTGTTGTTGTTATTTTATTTATTTACATTTC
AAATGTTATCCTCCTCTGAAAAAAACGCTCTATCCCATTCCCCTTCCCCTGCTTCTATGAGGGTGCTCCCCCACCTCTC
ACCCCCTCCACCCCAACTTATCTACCCACTCCTGCCTCACCTTCCTAGCATCCCCTTACACTGGGGCATCCATCCACAG
GACCAAGGGGCTCTCCTTCTATTGATGCCATTAATAAGGCCATCCTCTCCTACATATGCAGCTGGAGCCATGGGACGGT
CCTTCCATGTGTACTCTTTGGTTGGTGGTTTAGTCCCTGGGAGCTGGGGGGGGGTGTCTGGTTGGTTGATATTGTTGTT
CTTCCTATGGGTTTGCAAACCCCTTCAGCTCCTTCAGTCCTTGGCCTAACTCCTCCATTGGGGTGCTAGTCTGATGGTT
GGCTTTGAGCATCCACCAGTCTGATGGTTGGCTTTGGCTTCCTTGGCATCCTGATACCCCTGATTAAGTAGTCACCAAA
CTGCTTTGACTGCATTCATCACAGAAACGTTTCGCTTGCACCCTCCATACGTGCCGCCGTTTCAACTCTCACTAGAGTT
GTGCATTTCAATCCTGTACATGGACTGGAAGATTCTGAAATGATGAAGTCAAAAAAAAATGGGCATTTGAAAATGTCCC
TCTGGGTATATCACCAAGTGTACTATCCCAGGCTCCATATACACTCAGGGAAAGGTCAAGGCGAATCACCAAGGGAATT
TAGGGTTTTCAACAACCGTTTCTTACTGGATTTAATCAGGGTCCTGTCCTCTCTGGTCCTTGGTTTCCTTGTCAAGTCT
GCAGGATGTTGACGCTCTGATTTCAGGCTGCGGAAAGAGCCCGGTGAAGCTCTCAGCACATCTCGGCCATAGGTATTCA
AGAGGAGCCGTGGGTGACCAGAAGCTCTCTGGTGTGGAATTAAACACACAACTGGGGACATGTGCAGATGTGTCTTGGG
CCACCAAGAACACTGAACGTCATGGCGCCAGCCTCTCATCTTCACATCTCCTGTAGACATTCACAGACCTGGGCCTCCC
GTGCAAGCATGTGGCATGTACATCCCCATGGCTAGCCGGGTCCTGTCAACCCCTCAGAAGAGTAGCAGACACAGGACTC
TGTTGCTGTCCTTCTCCTGTGCAAGAACTGGTAGCCTGGACGTCTGTAGCAGGAGCAGGAAGGTGATGTGGGTCTGATT
CTCTGTTTAGTTGACAGAGAGGAGCTCAGGCCAGACTTGGTCGGTCAACATGCTAATTTGGCTGCTTTGGTTTTTGTGC
ACTGGCACTTATGAACCCAAACACAAAGTGACTTTTCCCATTGTAATCCCAGTCTCTGACAGGAATGTTTTAAAGGTAC
GTGTGTGTATGTCCTGGGATGGTTAGAGAGAAAGTTGTGGTATGTCCAAGGGCAAGCACACATGTGTCATATGTCACAG
TGCGAAGGTCAAAGGACAACTTCCAAGAGTCAGCTCTGTTCTTCCACTGTGGAGGAAGGTTCTGGAGATCAAATTCAAG
TTATCAGGTTGAAACTGGTTAGCCTGCTGAGCCATCTCAGCCCAAAGGTCAAATGTTCTAACCTAACACACCCATGTAA
CTGGACATATGAAAAACTTAAACATGGAAACAAAACTGCCAAAAAACCAGGACAGGGACAGAGTGTCGCAAGCATTCAG
AACTCCTTTCCTTTGTCAGTCATTTGCTGAGAGGACCCCCATCTCCCCCCAGGCCCCTCAGAAGCTTCATATCACATGT
TCCTGTCTGGCCTGTGGACCCAGGCGAGGAAACAGGGCCAACCCACACGCTGAGCACCAGTGCTGGCTGGCTAATCTTT
TGCAATAGCAGAAAGTATCACTGGGCCATTACAATAAATGGTGTCCCTGAGAAAGGAGCACTTTGGAGACCATCGGTTT
ATAGCAGGGACACTGGGCAATATGTACATCACTAATGAGGAAGAGAAGCCACAGTTGCTCTGTGCTCTGTCCCCCTGAC
CCTCTTGGGGGTCCTTATGCAGGAAGGCTATATTCCCACTGCCACCCCACAGCCGGCGTTAGGATGGAGTCTGGATTCA
CTGGACACCTGGAGGCAGGAGACACCCAGCAGAGCGATAGATACACATCCAGCGGATGCCTTGGTTAGGCCCTGCAGCG
AGCTTGCAGGGGCTGCCAGGAAGCAGGAAGCAGGGGGGAGGGGCGTTGTGAGGTGTTGAACGTATAACACAAACTTAGG
GAAGTTCAGAGGAGGGCATGGAATACAACTAGAAAGTGACTCTCCCTGCCTCATCCTCTCCCATGGACACATAATGAGT
CTACCTCAAGCTATTCCTCCAGCCACAGGCTTATTAGCAAAGTGTCTGGCCTCACTGGGTCCTCACCAGACCAGCCACC
TCAAGGTCTTACTTCAGAAGGATCCCCTGAGTTCAATCCCAGAGGGGCGCATAGCCCATGGAGAAAGTTCCAGTTTGAC
ATCAGTATCTAGAGCTACCGTGTCATCCACACATACCTGGTAGAGAGGTCCGTGCCATTGGGTCTTAATCAGGAGAAGC
CCCGTGTCTGCCATTCTTCAGACAATGTTTCCTTTTGAGGTGTACGTGTGGATACAACCCTGGTTATATTGACTGCTCA
GGCCTATGTGTCTCCGTAGGAATGGATGTGTTGGGATGGGAAGTTGGCATCACAGTGCTCTGTGTTCTTGGGGGCTGCA
AACATCTGTGTCTGTGTCTTCACTTGTGTGTTTAATTATTCTAAACCAGAGACCCTCTGGATACTCACTGTCCCCCTGA
GCACCTCACCAATGGCTGAGACTTTCAGCGGGGCTTCACCGATCTCTCACTACAGCCCCGGGATTGGTGCTTACGAACC
TCCGTCTAGATATGAGAAAGAACCACAAAGGGATGTGGTAATGCCAGCATACAAAATCAGACACACTGGTTGTAGGTGA
ACTTCTCAACCAGGGACACAGCTTTTTCCAGCAAAGCAGGACTTACAGAGGCCGAGAAGGCTCATCTTTGGTCACACTG
AGAAGGTTACAGGCAAGGATGGCCTCCAGCTCTGCCTTTTTTTTTTTTTCTTTCCCACAGCCATTCCCTCACCTCAACC
ACCTCTGCTGCCAGTTCTGCCCTGGTCAGCCTGGGAAAGGAATGAGTGCCGGGCCACAGAACATCCGATGGGGGCTGCC
TAGATTGTGCCCTGTTGAAAGGAAGCGTGGTTTTAGCCTCTTGCACGTTCCAGACTCTGTTCTGGGGCAAGAGTCTGTG
GAGTTGATCGACAGATGACGTCAGCATCTGTGCTTCCAGACTTATCCAGTCTGTTAAAACGAGGTCTCCTAGTTCACAA
GCTTTGGGAGTACAACTCAGAACTCCTAATGTTAGCCTTCTTCAGACCACAGGGGCTTAATATTTGATATCTCTATTTA
GAAAGAGAACAAGAGGAGAGGAGGGGGCAGATGGGAAGGGGAGAGGCCAAGAGGGGAGTTAAAGGGGGCTTCTTGTTTC
ATGCCAACCTACAGGAGGCCGCAGTCATGTACCACAAAGAGAGTAGAACCTCTCATTTCAACAACAGAGCTGACTTTCT
GGTAGAAACAACTGAACTTGTGTCTACGTGCAGGGGAGTTTGGGGTGCTGCCCGGAATGGGGTAGGCAGGAAGGCAGTG
GGCCTCTGAACCAATATTTGCTGTTTACAAATGTTGCTCAATTTTCATAGAAACTGAGCAAACAAAGAACTTCTGTCTG
CTTCAAGCATTCCTCCCTCCCTCCCTTCCTCCACCCAGTGCAGTGTCCTCTGACCCACCGCCAGAGCCTTCTCTGAAAT
CTCAGTCTCAGCAGTCTTGGGGAAGTAGTAACCTGGAACCCCTCCCCACCCCCAAGGCCTGTCACTGCCAGCCTGCTGG
GTCCCAGAGAGTATGTGAGGCAGGTGGAAACTGGGGCAGGGCCTCGATGGGAAACTGGCGTTCAGATGTGGCAAGCAAC
ACTGTTTCCCTGTCTCTTCCTCCCTCTGTCTACCCTCCCTCTCAGAAGTCCGAAGACAATGGAAGGCTTTTATTCTTTT
CACAGCCAAGAGCACACATAGTAGCATTCTCGTAAACAGTAACAGTCCACTGCCAGGTGGGCTGAATTCAATCCAACAT
TTAAGAAAAACTGCAACAGTCTTACACAGGCTTCCTGGGAACTAAGTCTAGGAAAGTCCGAACTAATGTTTTGAGGACA
GAATGTATACTTTGAAAGGAAAAAAAAATCAATAAATATATCACAACAAATACAAAATATCTTCTGAGAACACAGATGC
AAAAATGCTATGCAAAAAAAATTTCATAGCTGGGCAGTGGTGGCATATGCCTTTAATCCCAGCACTTGGGAGGCAGAGG
CAGGAGGATTTCGAGGCCAGCTTAGTCTACACAGTGAGTTCCAGGACAGCCAGGGCTACACAGAGAAACCCTGTCTTGA
AAAACAACAACAACAACAACAAAAATCACAAGTAGGGTTGAGAAGTGGCTTGGTTGGTAGAGTGCTCGCTTAGTGTGGC
CGAGGCCCTGGATTTGATCCCTAGCAATGCATAAATGTGGGCTTGGACACACACCAGTAAACCTACTATTCATGTTAAC
CTTGGCTACAAAATGAGTACCAGGCCAGCCTGGCCCGTACAGGAATATCTAAAAAAAAGTCACAAAGAGGATCCACTAA
AATATAGCAAAGATAATAAACAGTTACTCTCAATTTGACTCCTCCAGGAATGCAAATTATCTTTTGAAGCATCAATGTA
ATTGAATAAATTAGTATAATTGTGGAGGAAATTAATAACCACATCTATCACTATCAGAGCATCATTTGATATAGCTTAA
CATCCACACTTAATGAAAGATCTTAGCAAACTTGCTCCTGGATTTGATGAAGGGTATTTAATAGAGATCTACAGATATC
CTGCTTTGTGGTGGAATGTGACATGAAAGCTTTCTCTTTGAGAGCAAGAACAATACTAAAACATCTACTGCTATCATCT
CCGCTGAACGTATTAGTGGCGGCAGGTCTGAGCCAGACCTCTAGGCAAGAAAAAGAAATAGGAAGCAAAATGACTGAAA
AGAAGAAACAAACAAAACCTCTTATTTTTATAGATGGCTTAATTGCATATGTATAAAATTCTAAATACATTTATTTTGC
TTTGTAGGATAAATGGGCTAAGAAACATCAGAATGGAAGGTAAATTATACAAACGCAACTCATTGCTATATACAAAATC
TAAAAACGAAAGAATTCTACCTAAAGGACAAACAGAGGCATCGGGATTGCCTTGCACAGAATGATTAAGTCAGTGAGGA
AAATAAACTTGAAGTGAGCGGGAAAACTAAAGTGTGCAGCGTCAGAGCCAGAATTAGGAAAGTCGTCGCTTCTCTCCAA
ACTGGTCTGTAGATGGGGGTGGGGCATATTGGGAGTTAGAGGTTTAATCCGGGATGGGGCATGAGAACAGGGCCTAGGA
GGAAGTGATGGGTAGTTAAACTAAGGGTGTGTGGAAAACGCTATGTAGAACGACTACTTTGTAAGCCAATTGAAAACAC
ATGACTTTCTAACAAGGAGTTTGGGAACAGGCACCCTGCTTTGGTGGACAATGCTTCTCTCCAGATGATGGCTGCTATT
AAATGAAGATCTCATTGCCAAGTGTGGGATCCCTCTCGATGAATTATTTGGTCAAAAAAATAAAAATCCCCCAAAACAG
CACGGGCTGTTGCCATTGCTTTTGATCGTACACCATAACCAGCTGGTAAGACCCTCCTGCTGAAAATATTTTGGTTTCA
GGACATAGAGAAAATAAGCTGAAATTGGCCTGAAAACTGTCTTCCTGCTGGCTAGCTTTCACTGTGCTGGAGGGTGCTA
CAAAGGCCACTGGGGGACGAAAAGTCATCAGTGTGGCTTACCTAGCAGTGAACCCTGAATGCTCCAATATTGACCCACT
AGGCAAGATGCACCCCTAGTGTAATGGTGCCATTAAGGTTATGGTGGTAACCAGCTCCTTTCAGATTGGTTTGAAGCCT
CCACCGAAGGGAATTCACTCTTCATGTTGTAAACGTGGTCCAAGGGTCAGAAGGTTGCAGGCTATCGTGGGGCATACAC
TGCTGCTGCTTTCCTACATGAACATGTCAAGCTGTCTTTTAAGGCCTGCGAGATGGCTCATCAATCAAAGGTGCTTGCA
GCCTGACAACAGGAGTTTGATCCCCAGGACCCAACCGGTGCAAGGAGAGAATCAGCTCCTACAAGCTGCCCCCTGAGCA
TCACAGGCAAGACTTAGAATGCACATTTACACACACACACACACACACACACACACACACACACACACACACACACACA
CACACTGGATGGATGAATGAATGAATGAATGAATGAATGAATGAAATTTTAGAAATTAAAAAGCAGAGCCTTGCCTTCT
AAACAGTGATGGTTATCCCCAAAGGTTAGTTAGTGCTGCTCTCTCCCTTGGTCAGAAAAGCCTCTTGGTACGCGGAGCA
GCAGTGAATACAGAGACTCACAGCTGATTAAAGTGCTGAGCGTATGGGACTGTTGAGTGGTCAGCCCCAAATAGGACAT
TTATATCAATCCCTCCCTCAAGGCTTAGGGAAAATGGTGAAACGGCCTAGACTGTAGTAGCCAACCACTGGAGAGGGGA
GGCTGCGAAACACTGTCTCCTGGAGATGACATGGCTGCTGCTCTCATGAACTCACCAAAACTGTGGGTACCTGTGTGCC
AGCAGCATCAGTCAACTCCCCAACAGCCAGCACTAGTTAGACTCGATGTGTCACAAAATAACAGTAATAATAACCCTAA
CACCAATAGAAGACGTGAGGGTGAGGATATGTTGGGGGTGGTGTCCGTGCTGTGCTGTGGGCAGGGGAGTGGGAGAGAG
GAGGTTGGAGATTGATATTATCAGATACACTGTATACCTGTATGGGATTGCCAAAGAATAAATAAAAGAGATTACTTTA
AAAATGACTTATAGATTCCAGCACGTGAAATGTTTGCATGTCTTTGATATAAAATGACCATATATTTCCACAGGTCACA
TACAAATACAAAAGTCTCCATGCGTTTGCTGGTTGTACAAGGCAAGGCATACAAGATAAGAATAGATTGCATTTAGGGC
TTTTTTTTTTCTGACCTCCTTGCCCAACCCTGCACCAAGATCTATAGTATAACCAATTCAGGTGGTGATGGTGCATATA
GTAACATAAGTTGTTTCTAGAGTGCTCTTGTACTAAAGGCAGTGAACAAAAAAGACACAGTCAACCACACACCCTTTCA
AAAAATATTTTGTATACTTTCTGAGATTATAATTACATTATTCCACCCTTCCCTTTCCTCTCTCCAAACTTTCCAATGT
ACCCTTCCTTGCTCTCTTTCAAATTCATGGCGTCTTTTTTTCATTGATTGTTGTTACATATATACCTGTGTATTCACCT
GTATTCCTAAACACACACATACAGGCTGCCTAGCCTGTATAATGTTACTTGTGTATGTTTTCAGAGCTGGCTGAACATT
TGGTATTTGATAACCAGTTGGTGTGCTCTTCCCTGGGGAAGGCTATTTCTCCTGCTCTCAGCAATCCTTGGAGCCTAGA
GCTCTTTGTATAAGGTTGAGGCCTTGTGTGAGCATGTCTCTTGTTCTTGTCCTTGTTTGGCTCACTCAAGCTCGTTCTT
AAGGGTGTGTACCTACACATCACCGCAATGGCTAGTCGCTATTCTCACTCCCACTTCCTACATTAAGAAGGAAAATAAA
CTTTAGATTTTACTTCTGGGGTTTGAAGTCCCTTTCAGATACTTTCCCTTCCTTCACATGAGAGTTTTCAAATATCCAC
AAAAGTGAGTCAGTAACATAGGAAACGCCCACAGACAACCCCCAGTTCCAACAATGCTCAGTGTTTTGTCTATTTTCTT
TCACCCGTCTTCCCCCTTCCCCCCTCCTTTTTTTTTCTGAAGTGACAATTATCTTATTTCCCCCAGTATGCGATATATC
TTTAACACACAGGAAATTTTGCATAACACTACTGACATCTATAGAAATTGATGTTGATGCTCTATTACCATCTATTTGC
TACTCTCCAACATGACTTTGTTATTTCTTTGTTATTTGTGTCTGCATGTGTGCACATGTGCTCGCTTGCAAGTATGGAG
GCCAGAGGACAATTTTCAGAGTTGTTCCTCTCCTTCCACTGTGGATCTTGAGGTTGGACTCAGGTTGTCAGACACAAAG
GGAAGGTCTCCTAGTTGCTGAATGGTCACCAGCTCCCTTATTGCTCAGTCAATCTACAAATGTCTATGCGGGTCTAAAA
GCAAATTAAACTAGGAGCTCAAAGTAGATCCTAAATGGGTTCTACATGCTACGTGAGGTCTATCGAGATCTGCATGCTA
CATGAGGGCTATCCCAGAGTCTCTTTTGCTCTAAAGTGATCACCTACATTTTATGCTGTTTACTTCAATAAAGTATCTG
AAAGGGACTTCAAAGAAACCAGATCTTTGTCCCGCAGAATTTCCAGTGTTCCGGATTTGGCTGAGCTGTATCACGCTGG
TGGGATTTAGCGTGCTCTTTTGTATTTGACAGCTATTTCTGGGGAGAGTTCCTTGACCTGGGTTTTTCTGAGATTACCT
CATCATGAGACTTTGATTTCCTGATTCTGGCAACTACCTAGAAGAGGTGACATTGTATCACATGGCACAGGCTGCCATG
GTGACTTGTTGCCTTGCTGTGTGGTTAACTGTTTCTTGGTGAGGGTATCTGGTAGGTTTTACCACCGAGCCCTGTTTTC
AATTAGTAAGAAGTCTCCAAAGAAATACTTAGAGACTATTTCACATTTTTCTCCTAGTAGGATTTTTGCCCGCTGGTCT
TAGCATTCAGTGGTGATTCTTGCCAGAATGACTTGGTCCTGCACCGATAACCAAATGTTGACACTCTGATCCTCTCATT
CCCTCTAGATTCATTGATGAGCATCGTAAAGTAAGGAAAAGCCTCCCCTTCACACATTTATCTATCATTTAGATCAGTG
TGGGCTCATGGGTTCCGATTTTATGCTGTAGATTATAACCCAGAACATCACTAGTCACTTTATTTGTCTCTCAAGGATA
GTTGCTTTGTTTATATATACTTACTTAGTCATTTCACACCTGCATGTGTATATTTGTGAGCACCCGTGTGCTGTGGCAG
TGTGTGGAGATCAGACGACAGTGTGGATTCCTGGGGCTGAGCTAGGACTATCAGGCTTAGTGGCAAGTGCATTTACCCA
CCAAGCCATCCCTCCAACCCTTGTCTTCTCATTATCACCCCTCTGTTGCCAGGACAGACTGTGTCCTCTAAAAAAAAAA
AGCCCCATCAATCAAGTCCACCTTGTGTTTTCTCTGCACCGTCTCCGGGGTTTGTGTTTATGGAACCAAAAACTCCATG
GAGACTTAATTAACCTTGTAGTGGAGAATGGTGTTCAGAAGTGCATTCTGAGAGCCTGCTGCTGAGGACTCATAGACCA
CAAGACTCTTCTGCACACACAGCTAGGATGCACATGTATGTGTGTGTGTTTGTGTGCACCCGCTTGTAAGTACACACAT
AGCTGTACCTATTTTGCATTCTGTGTGTGTGTGTGCCTTCTCACTGTTTCTGTCTTCCTCTCTGGCAACCATGAGTTCA
CACTGACTGACTGAGCGAGCCCCAGTTAAACCACAGTATGCATTCTAGCTTTCTTCTCTCCATCATTGCAGGGAGAGCT
CAATGCAATTGAACCATAACCCACCATCTATCTAGATGTCTCCTTCCCCGTCCTATCAGTGAGAACTGGGTACTCCCAT
CCCCCCATCTCACTCTCCTTTCTCTTTGCTTCTGTGCATCATTATTCTCCTTATCCTCCAGGTCCCTTCACAGCCTCAG
GCTCTTATGTGCTTCAGTCTCAGCCACTCCAGGAGAAGAGAAGAGAGGAGAGGAGGGGAGGGGAGGGGAGAGAAGGGGA
GGGCAGGGGAAGGGAGGAGAGGAGAATGGATCCAATTTTATTGTTTTTTGTTTATTTCCAGTAAAAGGACAAGAGAAGG
AGAGGGAAAGGGAGGAGAGAGAGGAAGACTATCTTTTCTCCACAGTACCCAGAGGACTGTGAAGAGCAGAGCAGAGCCT
CGCAGAACCTTCCAGTGAAACAAAGCTTTGACTCCTTTCCACCCATCCAGTCATTCTGCTGCGGTCAACTAGGAGAGAC
CAGAGCTGTATGTGAAAGCCCAAGACTTTCATTCTGCAATGGAGGAGCTGCTAAGAAGTTCCTTTCCTAGTCCAGTACA
ACCCAGCCAGGCTCTACCTAACTCAAAAGCCAACTAGAGAGGCCACTGACCCCGGAATTGAGTGGACTCTGTCAAGTCT
CATGTGTAAAGGAACAAAAGTCCCTGACCAAAGCGGGGCCTGCAGGAATGCAGGTCTTCTGTGGCATGCTGTTTACCAG
ACATCTGGACAGACCTGCAAAAGGTGAGGTTAGAGTCCAGGGTCACAGTTTAATGTCCCACAGTATGGCAGATTTGGGA
AGGAAATGCAAAACAGTGACAGAGACACCACATCTGTCACAGAAACTTCTTCAGTCCCCAATTCCAGGGATTCCTCTCC
CAGGGGACAAAGTAGGAAGCTTTGGCCTGGAAAGGAAGGCAGGGTATTCTGAGAACTATAAAGTAGGCCAGAGAACTAG
ATGGCAAAGAGTCTGGAGTTTCAAACACTGGGAGATTCTCAAATAGAGAAGTTGGCTTGCAGAAGAAGAGTCAGTCCCA
GATCCTGATTTGTAGAAGGTCTTCACAGATGCCATCCTGATAGAAGAGGAACTATTCAAACATTGGAGGAAGTCCTAGC
AGGAAAGACAAGATGGGGACAAGAGGTCACATCGTGGTCCTCCCTGCTAAAGGCACCCTTAAGTCTCCAGCGACTTAAG
TGACTTGATCATATAAATGAAGACCTGTAGGGTAGATTATGAACTAAGCAAGTTAGTTAAGCCCCTCCCTCCTGTGGCT
GCTCCTCATCCAGTAGGAGGATTGGATTAGTAATGCCTATCCTAGCCAGTTGGAGAGATTAGTAATGCCTACCCTAGCC
AGCTGGAGAGATTAGTAATGCCTACCCTAGCTGACTGGAGACATGGCTAATAAGTTGGTAAAGTGCTTGCCGAGCTGAC
ATGAAGACCAGAGTTCAGATCCCGGCACCCATATAAACAGCCAGGTGTGGCTGCTTACAGCTGTGATCCCAGCACTGGA
GAGCAGAGACAGAGGGTTGTCGGGCCTCACTTGCTAGCCAGACTAGCTGAATTGGTGAACTACAAGCTCAGTGAGAGAC
TCTTGTTTTAAAAATATAAGGTGGAGAATGATGAGGGAGACACCCAACATTGATCTATGGCCTCTACACACATACATGT
GCACAGCAGCTACATACATACATGCATACATACATACACACACACACTCACAATGTGCATGCATGTAATCCTATCACTT
GGGAAGTAGAGACAGCAGAATCAAGAGTACCAACCTAGTCTTAGCTATATAACAAGTTTGAGGCTATCCTGGGATACAT
AAGACCCTGTTGTGTGTGCGTATGAGTGTGTGTGTGTGTGTGTGTGTGTGTGTGTGTGTGTGTGTTTTGCCTAGTTAAT
AGAGGATCTAAATTAGTGAGGTGTCTGATATGGGTACTAGAAAATGAACTAAGGTCCTCTGGAATCTTAATCACTGAGC
CATCTCTCCAACCCCGTTTTATTCTTATTTTTAATTATATGGTAGAGGCAGAGGGTTTTCATGTGAGCTAAGGCAACCA
CAGAGGTCAGAGGTGCCAGATCTCAGGATATGTTAATAATTGACCTAATACAGTGTTGATATATTGCTATTTTTTAAAA
ATTTTGTCTATAATCTGACCAATATTCAGCACCCCCCCCCTTAAGTCCTTTAGGTACAGTCTTCAGAACTTAGCTCCTC
AGGTCCAATTTCTTGTTTTGGTGGTTATTTTTATTATTGTTAGGGTTTTTTTGCTTGTTTTTTGAGACAGGTTCTTAGT
ATGTATCCCTGGCTAGCCTGTACCTCACTTCGTAGACTAGGATGGCATTAAACTCACAACCACTCAACTACTTCTTCCT
CCTGAGTACTCACCTCTCAGGTTCCATTTTATCGGGGAACCTTTTAAAAGGTGCTGATCAATAGATCCTAGGCAGTGCA
CGCTAGAAGACTTAGCTAGGAGTTGTTTGTGTGTCTGTATACAAATTACTGGTGACCTCCATCTATACATCTAACCTGG
GCTGAGTACCATCTTGTGCCATCCAAGGAGTAATAAAACATATAAAGACTCTACTTCAATCCTAGGCCACAAAACAAGG
TATCTAAAAACAGGCAAGCTTTTTACTCTTAAGCCCCACTATCCCATTAGTGATAGAAATGCAAATATCTTCCCTGTTA
TGACAGCTACTGACCTTGCTAGTGAGATGCTGGCTCTGAGCTGACAGGTGGCAATCATGATCCCCTCCATTACTACTGG
GCCTGTCAGCAAGACACAGGTAGGGAGAGAGCATCTACTATAACAACCTCACTTCACAGATTAAAAAAAACAAAAAACA
GAAAACTGGAGCCAGGCAGTGGATATAGCTGGTCCACTGCCCAGTAGAGCAAGGACACAGGAGCCTAGAACTGGGCTGG
TGCCCTGAGATGTCCCCTTTGTCTTGTTCCTGGAAAGTACCTCTCATTTCCCCCAGGTTTATTTCAGAATTTAATTCTC
CCTGTTAGTTCGTCAAGAGATGTTAAGACTCGGACTTTCAGGTGGACTCATAGGCAGGTGACCAGATAAACTGAGCAGA
GTCCAAGGCTCCCAGGGCCAAGGCAAACAGAACACTGGCCCCTCTGCTGTTCCTACAGCCTATGCTGTTGTTGAATGTC
CCTACTTGCCATGGAAAAAGAGGACCGAAGTCCACCTTCCTTCCCGGCTTGTCCAAATTAAGCCTCTGACCTGTACAAA
TTCCCAGACATACAAGCCATCAGTGTCAACTGTTGGTTTCTTCAACTAAATGGCCTTATCCTTTTTAGTTGTCAGGAAT
GTTACTCATGGACAAATCTTTAATCACTATATAACTACTCTGTATGCGCAATTTAACAAAACCTACCAGCCTTTCAGCT
TAGCACCTAAAATGAACTAACAAGCCCCTATTCCCATTCTCCTCCATGAGGAAGGAAGGGAGAAGTCTCGGGAGACCCA
CTGAATTTGAGACACAGATGCCAGAAGCTATATACAAAGGTGTGTGTGTGTGTGTGTGTGTGTGTGTGTGTGTGTGTGT
GTGTCTGTCTGTCTGTCTGTCTGTCTGTCTGCATGAGTGTGGGTGTGTGTGAGACAAAGGTGAGCCTCAGATTTTAGTA
ATCCTCGATAGGATCCATCAATTGGTATTCAATATGTCAAAAATCTCCACTGCTTTTACCAAGATCTTAGGTTTGGGAG
AAGTTGAAGACACTCGACAGTGGTTCCCAGTGCCAATAAAAGACACCAGTGAAGCCTGGCGTGGTGGCGCATGCCTTTA
ATCCCAGCACTCGGGAGGCAGAGGCAGGCAGATTTCTGAGTTCGAGGCCAGCCTGGTCTACAAAGTGAGTTCCAGGACA
GCCAGGACTACACAGAGAAACCCTGTCTCAAAAACACCAAAAAAAAAAAAAAAAAAAAAAAAAGACGCCAGTGGAACCA
AAGCTCAAGATCTTGCCCCAGTTCTGTGTCACTTAGGACCACAAGGTTGACTTTCCTGGTGGAGCAAATGGTAGCAGAA
ACTGAGTCAATATTGTCTAAGGCTTTGGTTCATAGCCTGGAGATTTTGTAGCAAGTGAAACTCTGAAGGAGAATCTTCT
AGAACCCGTAGCATAAAAGACTGGCGTGTCTGTGACTTCCTGGGGCAGTCTTTAGGGAGATGGCATAAGACCCAGAAAG
AGTAATTCCCCTGCTCCAGAAACTACCTGAGCCTGACTTAGTCAGGGTTTCTATTGTTGTGATAAACACCATGACTAAA
AGCAACTTGGAAGGGAAGGGGTTTATGCCACTTACATTTCTAAATCACGATCCATCAATAAGGGAAGTAGGGCAGAAAC
TCAAGGCAGGAACATGGAGGCAGGAACGGAAGCAGAGGCTGTGGAGGAGTGATGCTTACTGGCTTTCTCTTTATGGCCT
GCTCAGCTTACTTTCTTTTTTTCTTTTTCTTTTTCTTTTTCTTTTTCTTTTTCGTTTTCTTTTTCTTTTTCTTTTTCTT
TTTCTTTTTCTTTTTCTTTTTCTTTTTCTTTTTCTTTTTCTTTTTCTTTTTCTTTTTCTTTTCCTTTTCCTTTTCCTTT
TCCTTTTCCTTTTCTTTCTTTCTTTCTTTCTTTCTTTCTTTCTTTCTTTTTTTTTTTCGAGACAGCGTTTCTCTGTGTA
GCTCTGGCTGTCCTGAAACTCACTTTGTAGACCAGGCTGGCCTCAAACTCAGAAATCCGCCTGCCTCTGCCTCCCGAGT
GCTGGGATTAAAGGCATGAGCCACCACGCCCAGCTTCAGCTTGCTTTCTTATAAGCACCCAGGACCCACCAGCCCAGAG
ATGGCACCATCCACAGGGAGCTGGGCCCTCCCACGTGAGTCATAAGTCAAAGCAATACACAACAGGCTTGCCCCCAAGC
AATTTAGTGGGAGCATTTTCTCTGTTGAAGTTCCCTCTTCCCAAATGACTCTAGCTTGAGTCAAGTTGACATGGAATTA
GTCAGCATAGCCTGAGATCTTTCTGCTACCTCTCTGGGGACTGAATTATAGGCTGGGGAACGATCTGACCCATAGTCTT
CCAATGTTTACATCGGCTCTGATAGTTGAATGATTTGGAAAAGAAAACCCCGTGTCTAGGGTTGACTAGATAAGGACCT
TGAGGCTGGAGCTCAGAAGTTGGGAGAACTTTTGGAGGATTCTATCTTGAAGCCATCGATTCCTTCCAGTTCTCCAAAC
CAGGCTAAACCATGGCTTTGGCTGCAGCTTCTCAAAGCTGAAGTGCTCCATTTTGTGGATTTCTGGCCCAGGAATCTTC
ACCATAATGTATGAAGTTAAAACTGCCGGCTTTGGAGCAAGGAAATTGGAATGAATTTGAATATAAAACTCTACTAGAG
GGGGACTGAAGAGATGTCTTGGTAGCAGTTAAGAGCACTGACTGCCCTTCCAGGGGACTCAGGTTCAATTCCCAGAACT
CACATGGTGGCTCACAACTATCGGTAACTCCAGTCTCAGGCCATCCAATATCCTCTTCTTGTTTCTGCAGGTTCCAGAC
ATGTATGTGGTGAACACACATACATAGTAGCAAAATACTCATGCACATTTTCTTCTTCTTCTTTTTTTCTTTTAAGATT
TATTTATTTATTACATGTAAGTACACTGTAGCTGTCTTCAGACATCCCAGAACAGGGCATCAGATCTCATTACGGATGG
TTGTGAGCCATCATGTGGTTGCTGGGATTTGAACTCAGAACCTTCGGAAGAGCAGTTGGCACTCTTAACCGCTGAGCCA
TCTCTCCAGCCCTCATACACATTTTCTAAAGCTTCTAGAAATGTTTATAGGAAATAGATGAAACTGGAGAGTGATAGGT
TAAACTAAACTCGGACAAAAAATCACGTTTTCTCCTATATCTAGATTATAGATTTTTAATGTATCTGTGTATTTGGATG
GACGAGTGTGTGGTGTGGGGTGTGTGTGTAAGTATGGTGCCTGTCAAGGCCAGAAGAGGGTGCTGGATCCCCAGTACTG
GAGTAACATGCATTGTGAGTAACTCTCTGTGGGTGTTGTGATTGAAATTCTGTCTCGTGACTGAACAGCAAGCACTCTT
ACCTGCTGTTCTGTCTCCCCAGCCCTGCTGCTTCTTTCTTACCTTATACGTTTTTCTTTGTTATAGTCACCGTTTTCTC
TAAATCCTCAGATGTGTTTATAACAACTCTTTCTGGAGTTGTCTGGAGACCAACACAAGACTGGTACATGGAACCGTGC
TGATAAAGGTGCCTGCTCCTGGGTGTGTAGTCTCCAAAACTGAGATAACAAATCCCCTTTCTTTTTTTTTAAATATTTT
ATTTGCATTACATTTATTTTTAAATTTTATGCATTTGTATTCATTTACATAGCTTCTCCGTCCTCCCTCTAACCTCTTC
AAATCCCAGATTCTTTTCATGGGCCCTTTACTTAATATTATTGCATATATATGTGTGTGAATAAATATATAAGTACCAT
CTTCTGAGTCCATTTAATGTTGCTCGTATATATGTTCTTTAGGGCTGATCACTGGTATTGGAGAACAAGTTAGGGGACT
CATCTCTCTAGAAGAATAATTCTTCTCTCAGTACCCATTAATTTCCTATAGCTCTTCATCTAGGCGCTAAGTCCCAGAT
TTCCACCACCAGCATTAATGTGCCATCTAGTTGTTGTCTTTGCCCTGGTCCTGCTTAGGCAGTCATAAATGTTGACATT
TCACGAGTACAGCTTCCCTGTCATATAGAAGACACATATGGAAGGTATAGTCTTAAAGATGCTTGTTCTTCCTCTGGTT
CTTATAGTCTTTGCCCTCTCTTCTTCAATGTTCCCCAAGCCTTCAGTGTGGGGGTCATGTTGTAACTGTATCAACTGGG
GATGGGCTCCTCACAGTCAGTTGTTCTGTTCAGGTTGACCAGTTGTAGCTTCCTGCAGTGGTCTCTATCCACTGCAAAA
GGAAGCTTCTTTGATGGGGAGGAGGAACTATATGTGGGTATATGGAGAATTATTTAGAATGTAGTGCTGGTCTAGTTAA
AGTGGCTGTCATAGGTTCTCTAAGAACCAGAACCTCACTAGCCTTGTGTATTTGGCTAGATTTCCAGCACCAGGCATGA
ATGCCCTCATTGCTTTGTCTAACAAGAAAAGATCATGCTGGAGCAATGGCTCATCAGGAGCTGCTCTTGCAAAGAACCC
AACTTCTGACGCTCACAACTGCCTGCACTCCAGGTCCAGGATGTCTGCTGATCTCCTCCTCGTCTCTGTGGGCACTGCA
TTCACTCGTGCAAGCCCACTCCCACTCACACATGTGACACGTAATTTTTAAATTCTTTTGAAATTAAATCTTTTAAAAA
GGTTATTGTTTGAATTCCCTCATCTCTGGGTTTTAAACGTGCTTTGGTTGGTAGACCTCGCTCCTGACTTTTTAACAGT
TCAATGATTCCTTGCATATCTGAAGATTTTTTTAGTTAAGATGCAACTAGGTGAGTTGCCCTGGCAAGTACTTAAATTT
TGGTTGCCTTGGCCTCATGGTCTTGGATCTTGTGTTGGAGCATAGTTAAGATGCCCACAGACCAGTGGGGTCCTTTCAG
GGCAGTGCCAGCTCCACTGGAGGCTGGAAGGAGTAACCTCCAATCAATGGCCATTTAAAATGTTCGTGTGTATGTGCCT
GTGTCTCTGTGGGTTTATGTTCACCATATGTGTGCAGGGACCTGCAGAGGCTAGAGGGTGTTGGATCCTGAGGAACTGG
AATTACAGGTGCTTGTAAGCTGCCTGAAGTAGGTTCTGGGAACTGAACCCAAGTCCTCTGCAAGAGCACTGAGTACTTT
TAACTGCTAAGCCGTCTGTCTTGCCCTCTCAATGGCCATTTAACCCCACATCCAAGGCACACCCTGTAGTGAAAACCCT
TTGTGTTGAGCGAGGGCTCTTTGCTCTGGTTGCTAGAAGCTTGCATGATTGATGACCTTAAGCCCTGGCAGCTGTGTGG
GGTTTAAGTCTCTCTGTTACCCTCTACCCCTCTTGTGGCTTTTGATCTCAGGCTACACCAGTGTAGGTACATCAAGGAC
ACTGGCATGCGGATCCTGGAGAGTTTCCTGGCAAAGTCCCATCCTTTTTGGCACTTGATCCCAGTCACATTGACCTCAG
ATCACTATCTTTGTTTCTAGAAACTTCAGACTGGCAGAAGTCCAGTCATCATCTTCTCACCTCTTCTTTCCCTTCCTCC
GTGGACGCTAGTCCCTCACTGTCATTGTTCAATGTCCACAGAGAGCTGTTTCATACGTTCCCTCAGATTTTTAGCTGTT
TGTGGAAGGAGGGTATGCCCTGCCCCAGGCACGCATTCATTCACCCAAGTGAGTCTGACTTTTAACAACATGTCTTGGC
TCTCAATCTATGCTTGCTAAGAGGCTGTCGAAAGCTGACATCCTGCTACTAACCAGCAACCTCGAAATCTCTGATAAGG
AACTTGTCACATTTTCAGAAAGCATCCTGCAGATGCAGTAAGATACACTGTTGGCAGTGATTTTGATATTTTTCAGGAA
ACATTAACTAAGACTTTGATTGTCTTTGACATTAATTTCAAGTGTCAAAACATAATTTGTTTTACTGTATTTCTATGTG
TCAGGTCAGGGTGCATGTGAATAGACACACATGCACACACACACACACACACCACACACATGCGTGCATATGGAGGCTG
GAGGTAAACTGGAGGTGAATGTTGAATACTGTTCTCTACTGCTCTCCACCTTCGTTTTTGAGACAGGGTCTCTCAAACC
TAAAAGGCATTTGGCCTGGCCACCCAGGAACCCTGGGGATCCTCCCATCTTTGCTTCCCCAGCCTTAGGATTACTAGTG
CACATCACTATACCTAGCCTTCTCCGTGGGTGCTGGGATCCAACCTCAGGCTCCTGTGCTTGTACTGCAAACACTTTCC
CAACTGAACCACCTTCCTGACCCCCAAACCATGCTTAAAAAATACACAAAATCATCCCTTGTCCTTTCTTGTTATTATG
TGAGTCATTTCTATTGAGCATTGATGCGATTGTGTGTGTCTGTGTGTTCTTATATTATTGCTTGGATGGTATTTAGGCA
GATTTTTTTTTTTTGCTCAAACTATAATTGAATTAGTTATCTCTTGTGTAAAATAATCAGATTATAAGGAGACAAGTCA
AACTAACCTGGTATAATTATTTTAGGAGTACATTATTTTTATTTTGAAAGTGTGTGTGTGTATGTGTGTGTAAGTGTGT
GTGTGCAATGCATGTACACTCACATGTATACGCATATGGAGTCTGTAGTTTGACACCAGGTATCTTTTTCCATCACTCT
CCCCTGTATTTTTTGAGAGAGGGTCTCTTGAGGAACCTGAAGTTGACTGTTGCAGCTCTGCCAGATGACCAGCTGGGTT
CCACCATCTCTGCTTTCAGCATTCAGGTTACAGAAATATACAGCCACAATCAGGTTTCACTCGAGTGTTGGGAGTCCAA
ACTTCAAACTAAGCATCAACCCAAGGGATAATCTTCCAAAGGTATAATTTTACACTTATTTATTTGTGGATGTATGTGC
ATGGTTGCACACTCATGTTGCTATGTCCGTATGGAGGTCAGAGGACCACTTGTGGGAATCTGTTATTTCTCCTGTGTGG
GTCCCAGAGCTCAAACCTAAGTTGTTACATTTACCCATCTCACCAGCTATAAGATATAATTTTTAGTAGATACTAAGCT
CAGAGTCACAATTTTAATACAAAAAGTCTTATTACCTTCAAATCTGAGAACACTCAGTGAAGCTTTCTGGGAAGATACT
TTTATTCATTCTGCACAAGTCCACATGGAGGCAAGCAGTTGGGTCCCCAGCCCCTGGGTTACCGCCCCCCCCAGCTGAA
TGGTGTTTAATATTTATGAAATGTGCAGGCATCCAGCAGTTCTGTAAATTAAAACACAAGGGGAAGAACATCAGGCTCT
GCCTGCACTTGCCAAACTCGTCTGCTCTGATTTCTCATGCTCTTAAAAGTGAAATTCTTGAAAGTGTATTGGAAACACT
CCTGTCTTCTAAAAGTAAGCCACAGTTGAGATGAGTTAAGACCCTCACTGGCCATCTCTGTCCTACCATGTATATCCTT
AAGTATCTGTCCTTCCTTCATGTCCTTAAATCCCTGTGCTGTCCTTCCTTCCTATCCTTAAGTACCTGTCCTTCCTTCC
TGCTTACATTATCCCTAACACACAACACAATGCCACAGAGTCGGGCATATGCCCAATGGTTATCTCAGTTTTAATTTTA
TTTTCCCAATTTCTATTTTTTTGAGACATCTATGCCATCTAAAATATGTATCCCAAGATTCCTACAGAGCTAGCCATGC
TGTATTTACTTTTATTAATGTTTGAGCATTTTATATAAAACCATCAAAAACCAGCCCTTCACGGGTGGTATGCACAGTG
TGGTGGTTTTAATATACTTGGCTCACTATCACAAGGTGTGACCTTGTTGGAGAAGGTGTGTCACTGTGGGTGTGGGCTT
TGAGACTCTCATCCTAGCTGCCTGGAAGTCAGTCTTCTCCTAGTGGACTTCAGATAAAGATGTAGAACTCTCAGCTCCT
CCTGTACCATGCCTGCCTGGATGCTGCCATGTTCCACTTTGAAGATAATGGACTAAACCTCTGAACCTGTAAGTCAGCC
CCAATTAAATGTTGTCCTTATAAGAGTTGCCTTGGTCGGTGTCTGTTCACAACAGTAAACCCTAAGACATACAGCTTGT
ATCATTTCCCAAGCCCCAACAAAAATGGGAATACACATGAGAAGAGCTTCATTTCCCAAATGGTTTCAAGTTCTGCTAC
ACTTCTTGTCTCCTTCAGACAATTTAGCATTACATGGATGGTGTCTTTCATTATTTTCTAATTGAATTGGCTCAATGGT
AACTCTAAACCTTCAAGTCAAAGAGAAAGTTTCTGCTTCTCCATGCCTTTGTATCAACTGAATACTTGAAACAACCGAG
CTCTTAACATAAACATGCTGATTTCGAATCTCCTGCTATTTCTCCTTGGTTGTTTCTACTTACCAGAGGACAAGCACTG
TCTAAAGTTATCCATCAAGGTAAGATACTGTGGTCCTAGGTATGTTTTATATGTTGTTTTGTTCTGAAGGTTAGATAAA
CATTCTGTGTCATCACTGAAAAGCAGGTCCTTAGCTGAGGATTCAAACATCTGGAACATCATATATTCAAATCCATTTC
TTCCAAAGAGCTCCTGGATTGGAATAAACAGAAAGTCACTAGGGGTGCCAGGAAGCATAGAGGTGTCTACTCTTTCTAG
AAAACCAAAGGTTTCTGGACTGCTCAGCTCCAGTCCTTGGGGAATCCCTGGACACAACAACAGTTCAGGGAATGCTGTA
GTAACAGAAAGCATGGTCTGTGGGTTTGAATCCTGGCTTCATCTTTTTCTTGCTATGTGAACTTAGGAAAATCCTTCAC
CACGCTCAGTCTACCTCTGTTTGCTCATTTGTAAATGGAGACACTAACGTCACATTGTGCAATGCTGTATGTAAGTGAT
AGAACCTAGTGGGGGAAACCCCCACTCAATTCCCGATTCGGCGTGCACCCAAAAAATCACGAAGGACCATCTTGATGTA
ATTACATGAGGTCATTTAATGACGGAGCTCCGGACCGACATGCATCCCACACAGGAGATAACGGATGTCGGCCACGAGG
CTCGAAAGTTAGGGGTTTTTATGGGGTAAGGGGCCTAGGGGCATGGAATTCAGCATAGTGGCACACTATTGGCTTATTC
AAATATCAGCAGAAAAATTACATGTACGTGCAGGGTGTCAGAGTTCTGTGAGTTGTTGACTCAGTTTAGATAGCCCTGT
TCTGTCCTCACATTCCTCTTTATCTTTAAAGTTAAGCTGTTCCCAGGAATGTTTTAACTCCGGGGCATACCCAGGTTTG
TTTTTCTTTTTTCTCAGCCCCAGGCAGCCTCTAGGCTCACAAACAACCAGCAATTTCTGAGTACTTTATATGACTTACA
GGTCTTGAAATTTCATCTTTCTTTCATAAGAAACACAAGTAGAAAGCTGGCCATATGTCACCAGTTAGCCAGCCAGTGC
CAGGTGCTTTCCCAGCTGTATGGATCATCCTCCTGTAGGGGGAGGTTCTGTCACTAACGCTATTTCCCCAATTGGCTCT
TGATGTGTCAATAAAGAAAGCCGGGGGCTAATTGCTGGGCAGGCAGTACAGGTGGGACTTCCGGGTCCCAGGAGGAAAA
GGGAGATGCAAAGGAAGGAAAGAGGCTTTTTCTGCCATGCTTTGGAGGAAGAAGGACACAGCAAACATGTAAGGCCTTG
GGGGAAGCTAGGGCCTGTGGCTTCGGTTACAGGCAGGTGGCCAAAGATGTTTGGCAGGGGCTATTTGGAACAAGCCACT
AAGCTTAGGGCAGAAGGAAATATGGAGATAATAAATTGGTAAGGGCATGTATTTCCAGGCAGGAGATATTTGCACCCAG
CAATTGTGCCTAGCAGGCGAGTTAAGGTAACAAAGCTGTCTGTGTGTGTCTTTTATCTTCGGATTCAAGGGTTTTGGAA
GTGGGTTCATAGCAAGACACGCCCCCCCCCAATGGAGCTGAGCCAGCTTCTGTCCTAGGCAAAGGCAGTAGTGATTTTC
TAAAGCTACAGGCAAAATCTTCCCATGTCTTCCCTTGCTGCTTCCTCTTCTTGTCTCTGAACTCCAACCAGTTCTATAT
CTCCATCCTACTTCTCTTCCTTAGTTGATTTCCATAGTAGCCAACATGGCAGCTTATCTTGTGTGAGACTCCCCCCCAC
CTCTATGCCACATGTCCACAGTCAAGACTCTCTTATTTCAATGGTTTTCCTAGGTGTGAAGGTTAATTTTGATTGTCAA
TGTTACATACCTGGAAAGAGGGATTCTCAGTTAGCTACAGTCTCTTAGATTGGCCCGTGGGCATGTCTATGGGTATTTT
CTTAATAGTTGATATAGGAGGGCCCAGCCCTTCGTGGGTGGTACCATCCCTCAGCAGGTTGGCTGAGACTATACAAGAA
AGGCAGCTCAATGCGAGTTATCAAGCAAAACAGTAAGTGGTGCTCCTCCATGGTCTGTTTTAGTTCCTGCCTTCAGGTT
CCTGTCTTGAGTTTCCTGCCTGACTTCCCCAATGATAGATTAAACTTGTAAGTCAGATAAACCCTTTCTGTGCCCAAGT
TTCTTTTGGTTATTGCCCTAGCACAACAAAGAGAAGAAAACTGGAACACCAGGACACTAGGTCATCTTTTTTTTTTTTT
TTTTTTCAGGGATGTGAAGGTGATATATGATAAAACATGGATTTCTTCTTTGAGAAACCGCCAAGAACGGGATATCTAT
TGCAGTAGGCAGAGAAGGCTATAGGTTTTCCTTCAGATCATTTGGGTTAGGCATCTGATACTCCATAACATCAGCAACT
GTTGGCTTTCAATACAGTCAGAAAGTGTCTAGATGTTTGGCTCCTTAACTTTCAGCAAGCCCAGATGGTGCCCAGCCTA
TCCAGGTTAAGAAGACAGACTCAGATCAACCCACAAGTCAGTTAGAGAACCCACCATTCTGCTTTTGTTACACTTGGCT
CAGCCACTGAACCAACAACTCCTTTACTTAATGCACCAGAAGAAGAGAGAAGAGATTCATTCTCTTGGAAATTGACCGG
GCCCAAGAGATCCTGTGTGTTTCCTCAAGGCTGCAAATCTTACACTCCTAGAGAGCTGCAGAACAAGTGGGCACCAGAT
ATAACCAGAGTGAGGACTCGTAGGTCCAGGGCCCCCTGCTGAGGGAGAAAGAGCATGAGCTAAGCTGGGTGCACAGGCA
CACGGCCATCAGTGCAGCTCTTGGGAACCAGGCACTGAGTCACAGGGGGTAGGCACTGGTGCCCATACCTGTTGGTTGA
AGAGTATTCTTCGAACAAAGTCAGCCTTATCTTTCCTGGAGAACACAGCACGGTTTGGCACTCTGGCCAGGTGGCAGCT
CTGAGCCTCAGTCACAGGCTTCCTGGTGCCATCAAGGCAGAGCAGCTCAAAGTCTTCGTGTTTCAGACCCTTAGCCCAA
GGCTCAGGGTTCTTTCCTAGGGAGAGAATGATGTTGGGGCCAGTGAGGTGGCTCAGTGGGGAAAGAGAGAAAGAGAGAG
AGAGAGAGAGAGAGAGAGAGAGAGAGAGAGAGAGAAAGAAAGAAAGAAAGAAAGAAAGAAAGAAAGAGAGAAAGAAAGA
GAGAGAGAGAGAAAGAAAGAAAGAAAGAAAGAAAGAAAGAAAGAAAGAAAGAAAGAAAGAAAGAAGGCAGTTGCTGCCA
AGCCAGAGGACCTGAGTTGGACCCTTGGGACCCACATAATAGATAGAGGGAGAGAACTGACTCAAGTAAGTTTTCCTCT
GACCTCATAACAAACAGACATTAAGTAAATACGTGTAAGTTTAAAATATAGATATAATTGTTTAGAGACATGGCTCAGA
GGTTAAGGACCAGAGGACCTGGGCTTGTGTCATAGCACCCACATGGTGACTCACAAGTGTCTGCAACTCCAACCCCAGG
GGATCTGATGCTCTCTTTTGGCCTCTACAGGCAACAGGCATGCATGTGGTATACAGACATACATCCTGGTAAAAGACTC
ATAGCTATAAAATTCAAAATCAATTAATCAATAAACAAATCAAATGCCAGGGCTGCAGCTCACTGTAGAGCATTTGCCT
AGCAAGACCCTTGGTTAAATTCTCCAGAACTGAATAAGAATTTAAAATAACAGTCCTGGGAGTGTTAACCAAAGGGGAA
AATTCAACACATTGGAGTGTTTTAAAATTTAAGACTGTTGTCAGACAGTGATGGGTACGCTTTTAATTCCAGCACTTGG
GAGGCAAAGGCAGGTAGATCTCAGAGTTCAAAGCCAGCCTAGTCTACAAAGTGAGTTACAAGACAACCAGGGCTACATA
GAGAAACTCTGTCTCAAACAAACAAACAAACAAACAACCCAAAAAACAAAAAACAACAATTAAAAAACAAACAAACAAA
GGAAGAGGCTGGAGAGATGGCTCAGCAGTTAAGAACACTATCTGATCTTTCAGAGGTCCTAAGTTCAGTTCCCAGCAAC
CACATGGTGGCCCACAACCATCTATAATATGACCTGATACCTTCTTCTGGTATTCAAGTGTACATGCAGATAGAGCACT
CATGTACATAAAATAAGTAAATAAATCTTTTTTTAAAAGTTATATAAAAAACTCAAAAACTCATTAATATTATCCACCT
GGGGTCAAAAGATCTGGCTCAGGGGTTAAGACCTCACTGTTCTTCCAAGGACCCAAGTTCAGTTCCTAGCCAACTTCAG
GCAGCTTCAGGGTCAGTTGGTCTAATGCCCTCTGGCTTTGGGCTCTTGCACACATGTGGTGTGCATAAATCCTCATGAC
CACTCACATACAAATAAATATATAAATAAGTAGACAATTTTTTTAAAGAAAGTGAAAAAAGTCAAGCTACAGAAACAGA
CAAGACATTTTCCAACACGGGATGGCTGTCAAGAACTTTAATCTGGAATACCAAAGGAATGCCTGTCAATCAGGGAGTC
AGACCTACTCACACAGCCCATGGTTTCTGTGGGCTTTGTCAGCCAGGTTCAAGGCCAGGGTGATAACTAGCATCAAGTC
TGAACAGACTGGAAGACCGTTTCAATGCTAGATTAATTTAAAGTGCTACGATCCTAGTCACTGGAGTCTCCTGGGCTTA
GCTATTCAACTTCCCCAGTTGCCTCTTGGGGAGCCACTCTGCAAGGGAGACTCGAGTGTTCCCATGGACAGAAAGCACA
TTGCAGGCGCCTACGTACCATCAGTGTTCTGTAGAACTGTAGGGTGCTTCATGAAGGCCACGTCCCCCTTCTCAACCAG
ACACCTGCACAACAAGGCCCAGGCCAGCAAGGAGAATCAGCAAGGAGTAAGAGGGAGCCACCAAGGGGGAGTCACACCA
CTAGGCACCCAGCACCCCACACAAGCAACTGTAGTGCCTGCAGGGCCCCAGGAAGGAAGGTGATGGAGAGGCAGAACTG
CTCATTGAGTTTCCCTTGTGGAAAGCACCGTTCAGGCCTTGTTTTAAATCCTCACCACTTTCCCCAGACAGGTTGCTTG
TGTACTCCCACTAACAGAGATATCTATGGGATGGCACTCTAGTTAGATCTACAAGACCCACGTGCTGTAGTATCACACC
ATGAGATACTACAATCCGCGTGGAAATATGGCTGTGAGGTGATTTTATTGCACTCAATTGCTCAGCTCTGACAGCACTC
ATCTGCTTCTCTAAACACGACACAATCTTTATCCCATGGGAAAATGTGTACCTGTGGCGACATCTATAACTCCAGCATT
TGAGAGGCCGAGACCAGAGAATCACAAATTTCAGGCCAGTCTGGGCTACAGAGTGAGAGTCTGTCTTTACAAAAACAAA
ACAAAAACAAAAACAAACAAACAAACAAACACTCACTCACCAAACTTGACAATCTGAGTTTGGTCTCTGGATTACAGAT
GGTAGAAAAAGAGAATTAACTGCCTCAAGTTGTTTTCTGACCTCCACATGTGCACTGCTGTGCACAAGTCCTCCCCTTT
CCAACATAGATAGATAGATAGATAGATAGATAGATAGATAGATAGATAGATAGATAGTCAGACAGATAGATGATAGATG
GACAGATAGATAGACAGACAGACAGATATAAATATCCTGGAGCATATGCACCTTACACATACAAAATAATAAGTAAATA
AAATAATAAGCAAATAAAAATGATTTGAAAAAGTATTAAAGTTGGGTCAAGCTTAATACCAGTTACCTTGTGATATAAA
GATAATGTAAGTTAGTTTGGCTTAGATTCAACATTCAGCAGATAGATATTGATGTCACTAGCACATGACTGATAAGAGG
CAAATGTTTGGAGGGCAGGATGAAGTCAACTGATGTATACGGGGGCAGGGGAGTTTTCTAGAGTGCCCCATGCTGCCCA
CAGAGCTTTTACTCATCCAGTACAAACAAAGACAGACAGACATACACACACACACAGACACACACAGGCACACACACAC
AGACACACACAGACACACACACACAGGCACACACACACAGGCACACACACAGGCACACAGACACACAGACACACACACA
CCAATCTGAACATATCCAGCATGGCTGGCTCATCATATTTAGAACTCAGTTTTCCTGTTCAGCCAGGACTCCAGGGTTC
AATAGACATGGCCACCACAGGCAGAGGCAGCAGGTCACAACCCAGACACCTTCCTTCTCCACACTTCAGTCCACAGAAT
TTTATTGCTGGCCTCACTCAGTAGGGTCTTTGCCACACATGCCTCACCCGTGCTGATTCACTTCTCGATTACTCTTGCT
CCAGATTCTCTCTGGCCAATTTCATCTCTCATTATTTAGTTCTCAGCTCTCCTGATCTCTCTGCTCTCAAAGACCTTCC
CCATGTACCTTTTCTTAAGCTGTTGCCTGCCCTGGCCATTGCCACATTACTCCCTGCTGTGCTAGGATCTTGAACATCT
TCCAAAGGCACTTGACTATCAAAGGCTTGGCTCTGGGACCTGGAGAGATGGTTCAGTGTTTGAGAGCACTTGCTGCTCT
TCCAGAGAAGCAGAGTTTGCTTCCCAACCCCCATGTTGGGCAGCTGACAATCACCCCTAAGTCCAACTCCAGGGGTTGG
ACTGGTGTCTGATGCCCTCTTCTGGCATCTGCAGGCACCTGTATGAATATGATCATATTTAAACAGACACACACACAGG
GACACATGTACACACATAAAAATTAAAATCAAATTTAAACTTAAATTTTAAAAAAAGAGCTTATTTCTAAGGTGGTGGT
AATTAGAGGTGAAACCAGAAGGAGATGGGTCCTACTGAGTGATCCCTGAGTCGTTGAGACACGCCTTTGAAACAGACGG
CCGGATCCCAGTTGCATTGGTTCTACTTAGAACCACTAAGATCATGAGCTAAAATGAACCTTTTTGTCTTATAAGCTGA
TTGTCTCGGGTGTTTTGTTACAAGGATGGAAAGCTCCCTAACTCGTGCCTCCTCTTGGTCTCTCTATAGCATATTCAGT
TGAGAACAATTTTCTTTACTTGTCTGTTTACGGTCCTATTTTGTACTGGGACACAGAGCAGACAGGACCGTGCGAGTCT
TGTTGCTTGCTAGCTACCTAGACGAGCACCTGCTACTCAGTGCTCTGTAACTGCATCTTCTTTCATTTAAATGAAAGGC
AGTACCTTGACAGGTCTATTGTAAAAGATCTGTCGGTGTAAAAGAGCTCAGTGGGGGAAGCCAGAGTCTGGGTCTCTCC
TGTGATTGACAGCTGAGCTCTAACAGAACCAATGGCTTATCTACAGTCACACAAAAGATAAGAGGAAAACTAGACTCTG
TACTACTGATCTTGCCCTATCCAAGTCCCTGAAGTGCCCAGGCACCTGGGCCAAGGGAGTATTCTTTATAGAACCAGGC
TGAATATCAGCAGTTAACTCTGGTCTCCAATCCCAGATCCTCCCAAATCACCACCCAGATACTGATATGATGAATGCAT
GAGGAGATGAGGGGGTCAACAGGGTGATGCCAAGAGAAGGAAAGGCACAGACACTAACCTGAGAGCTCCGCTGGAGCCG
TGATACCCCTCAGCGTTGTTGGCAGCACACATGTGGGCTGGGTTGTTACCCCCAACACACAGAGCGCAGAGAGGAGAGT
CAGGGTCAGACCCTGGGGCACAGCTGCGACTGAAGAATGCATCTGCAAGGAAGGACAAGCCAGAGTCAGCTCTTCCCGT
GATCACAGGAAAGCCCCGGAGGTTTGTCCCTGAGACTGCCTGCAACACAAGCACACAGCTTGTTATTCAGCAACATTAG
TAAGGGCTAGGGAGATGGCTCAGCCAGCAAAGTGCATACCACGCAAGCAAGAGGACCTGAGTTTGGATCCCCAGAACCT
ACGTAAAAGCTGGGTGCTGTGGTGTAAATCTGTAACTCCAGTGCTGAGAAAGGCAGAGACAGGTGGATCCCTGCAGCTC
GCTGACCTGCCAGCTTAGTCAAAATGGTGAGCTCCAGGTTCAGTGAGAGACCCAGTCTCAAAAACTAAGACAGGAGCTA
TAAGTACCAGCACTTAGGAGGCAGGGACAGTTGGATCTCGGAACCATCAGGGCTACACAGAGGGACTCTTACTCAAACA
ATAATAATAATGTGGAGATCAACTGAAGAAGACAACCAGCCTCTATCTCTGGCTTCCATAGATGTGTGCATACATGCAC
CTGCACATATACATATCCATGTCCATATGAACACATACATACTCTACATATACAAAACTCATTTTTTAAAAAAGAACAA
GAACATCATGGAATAAAAGAAAAGATTCCAAGCCAGGCAGTGGTGGTGCACGCCTTTAATCCCAGCACTTGGGAGGCAG
AGGCAGGTGGATTTCTGAGTTCAAGGCCAGCCTGGTCTACAAAGTGAGTTCCAGGACAGCCCTGTCTCAGAAAAAAAGA
AAAAAAGAAAAAAGAAAGAAAGAAAGAGAAAAGAGAAGAGAAGAGAAGAGAAGAGGAAAGAAAAGAGAAGAGAAGAGAA
GAAAAGAAAAGAAAAGAAAAGAAAAGAAAAGAAAAGAAAAGAAAAGAAAAGAAAAGAAAAGAAAAGAAAAGATTCCATA
CCACGTAAAGGGACTGACTGGAGATGAGCCGGCCTGAGAGCTCACAGAAGTCTACCTGTCCTCAAACAGGACCAGGGTG
TTGAAGGGTAGGTAGAGAGTGTAACTCTAACATAGTGGAAAGGGAGTGGGCTGGCTTGTTTGACCTAAACCCATGCGTT
CTGGTCTCTGCTGTCTTGGTTTTCCCTTTAGAAAGCTTGCCATTGTGACTTCAAGTTAGGAAAGCCATGGCTGCCAAGC
CTAGCACTGGGTTCCAGGGAACTACACTGACCATGGGCCCTTCCCTTTTCCACTTACTCTCTGTGGGTACCATTCAGAG
CTCAAGCAACCACACCCATGGATCTGCATGGCCCCCGTTGCTCTGGGAAGAAGGAATATGATTTCCTGAAACTGGAGAT
AGAGGGACCTTCCATAGACCAGGGAGTCAAGAGATGGGGAATGAGTAGGCAGTCCCCAAGGGAATGGGGAGAAGAGAAG
CTTACAGACAGGGGACTGGCACCTGAGAGCAGGACCCAGACATAGCATAACAAGCTTAATGGGGGCCGTTTGAATAGAC
TGTCAAGAGAAGGGAGTAGGGCAGGGGCAAGGTTCAGACCCCAGGGGATGTTACTGTGTAGCTACTGTTGTTTATCTCT
AGAGTAAAGGGAGTCTCTGAAGTGATTTAGACAATGCTGGGCCCAGTGGATTGGCACACACAATCAGAACCACACTTTG
CAGAAGTCTGACTGAGAAGTAGATGGATGTAGGGTTGATGTGCAGCTCGGGTGGCAGGCCACTGCAGTGGGCTAGGAGA
GGGAGCGTGAAGTAAGAAGACGTGGGTGGGAGGAGAAAGAACTGACGTTGCTGGGCAAGTGGGACTCCAGAGTCCTCCA
CGGTGCTAGGCAGTCCTGGAGCATCACCAGGTTAGGATGAGAGAACACCGTTTTGGATAATCGAGATGAGTTTAATATG
CCTTCGAGATCTTAAGTAGATATGGAAATAGTTCATTAGATACATGTTTGGGTTGCATGTGGTCATGCACACCTATAAT
CCCAGCACTTGGGAGGCGGGAAGATCAGAGCTTCAATATCAGTCTCAGCTGCATCGCGAGTCTGAGGTGAAGCCCAACT
TCTTGAGACTGTGTATGTGTGTGTGCTGCAGGGGGGGGGGTGTGTGCGTGTGTGTTGCGGTGTGTGTGTGTGTGTGTGT
GAAGGAGCAATCTGTGCTTGAGAGTTATCGCCCTTTAGACACAATAAAAGCAACAGCAGTCAGCATTTATCCAGTGCAT
ACCGAGTACCTGGTTTTGTATGGGCAGCGTAATGATCCAGCTGCATTTGGATGTGAGTGCTTAGGGATGATGCTTAGAC
GGGAAGAGAACTGCTTTATGAAACCCCGATGTTTCTTAACCAGGTTGGAAAGGATAGACTCCTTTAGGAGAAGGAGAAA
AACAACATCTAGACATCATCACGAAAGCCAGGAATAGAGGGGTGGTGGTGCTGGGAGAGCAGGAGCTGAGCAGCTGGAG
GGCACTGTGGGGGTCTCCATCAGAGTGATGCCCTCGGGATGGATGATGCAAGAAGACAGACAGCAGGAAGTGGAGATGT
GAGAGAAAGGTGTGTGGCTCCTGTAGTGTTTTTAAGATCTGGGAGGAAAGGAAAAAGTGAACTTAGACAGGGGCTGCAG
GAGAATGTTGTAGGAGTTAAGAATCTTAAAGATAGAAGACATCAGTGTATTGACGTGTTGAAAGGAATTGTTGGATAGG
CTAAGAAAAGAAAAATAGTTGAGTGTCTTGGGCTTTGTCGTGAGTGGTACCCAAGTGCAGGGAGAGGGATCTGGGCATG
TAGGAGGCTGAGGAGAGGCAGCAGTCAGGAGGTCCATAGACTCAGCAGCTTCTGCTGATGGATGCTGATGGTTTCAGTT
GTCTTCTGATGGTGTCCACTGACTGGGTCATCTGCCAGAGAAGGTGGCAGGTCGGTGTGGGTTTGAGGTGTGTGGACAC
AGGCACAATTATTGGAAGTGTGAGGGGCAGCTGCACTCGGGAGTGTTGGGGGCCCACTGAGGCCACTGGTCAGAGCTTT
TCCAGAGCAATGACTACTCTGTTGTCCTGGGCTCTTCTCCAGCCTGGTTCCTCTGTTCCAGAGAAGAAGACTGGGATGT
ATCAAGTGATAGAGGCAAGGAATCTGAGGTACCCTTGAGGGTGCAGCTGAAGTGGCTAGGGTGGGAGTCAAGGGAGCAG
GATAAATGTGCAAGGGGAGGCAGCACTCCAGGGCCTTCCTGGTGAAAGGGCTTCAAGTGTGAAAGCTGTCAGTTCAGGG
TATATGTGAAAATAACACACATGTGCACACTTACACACACTACTAAGGCTCCATTTATTCCCAGGACTGTTCATAAGAC
ATAACAGGGCCCTTTCCCTGAGATCTGCCTTCAGGGCTATGTACTCCCATCAAAAGCAGGTAGTGAAAGTAGGAGAAAG
GGGAGGAGTTACCTGGGAAGGGGTGGAGTTCACTTTCTGTCAAGCCCATGACCCAAATATCCTAGGTGGCCAGGACATT
CCTTGCCATCTCCTGAACTGAATATCCCCCCAACTCAGGAACAAGCCCAAGGAAGGCACCGCCTTACCTTCAGAACACA
CTTACCAAATTTGCAAGACCCAGTTTGGTTGTATATTAAACCCATGGGGACGTTCCAGCCTTCAGAAGTGCCAACGGCC
GTGTGGCAGGACTTCTTGCCTTGCAGAGATTTCCAGGTGATGCCAACATCCGATTTCTTAACCACAGCCACAACATAAT
AACCTTGCAGTGGAGACACCGAGACACAAGCTCTTTACTGTTTGGAGACAGAGAGTGGGCAAAAGCAGGATCTGGCACA
CTCCCTTCCCCGGGAACATTTAATGGAGTCTCTGTGTGGAGGAGAATGTGAACTTGGTTTCTCCATCTTCTGTTCAGCT
CCATCCTTTGGCTGGTGTGCTGAAACTACATAGCCATTTGCCTGCAAGTGTGACTTTAGCATGGTTCAGGATCTGTGAC
AATGGGAGTGTGGGACTGGTCCAAGGGGGCCCCTGCTTCTCTGGCAAGACCCCCTCATTTTCTAATCTCGCTGCCTTTA
CTTCTAAGGTAATCCTGTGGCTCTCTGGTGGGAGTGAGCATTCCTGCCTTCTTCCTGACTTATGGGACTATCATTAGTG
CTTCAGGTTTTCCTATCTGAGGAATACACTACTGAGTCGTGCTCATTAGTAAGTCAGAGCTGAAGAGTGGAATTGGTTA
GGTTAGACAGATAAAGTTATAAATCTTCAGAATTAGGAAATACCGTCACTCACCCCCACCTCCATTACACACACACACA
CACACACACACACACACATACACACACACACACACACACCCTGCCCTCCGTGTTCAAATGTGGGAAAAACTGGGGCTCA
GCATGGCAGGTGTAGACTTGTCTCACTAGCTATCTTAGATGACCTTGGGTGCCTCTATATGTACCTACACTTCTCATTA
GTACAGTGATGGCTAAAACTCGTCATGTGGGGTGGGGGAATCTGTTGTGTTCCGAGCATCCTGCTTTGAGTGGGGAGAG
TAGATGAATCTGTAGGTTCCCAACAGTGGTGCTAGTGGCAGAGATAATTCTAGATTCGCTTGTGGAAAAGCAATTTCCA
CTGACTGGACTCTGTAATACAAGTAGCTACACTATCTACTACTGATGATGATAATAATAATAAATTTATTATTATTATT
ATTATTATAAAATACTAATACTGTCTTCAGGTCTAAGATTTTTATTCTTATTTCATTAAATGCTATCATCTATCTTTGA
CTTTGTGTGAGAAAGACAGAAATAAAAGATGCAGAGATAGAAAAGAAAGAGGGAAACAGATGGGAGAGACAGAGGTGGA
GAGATATACAGGAGAGAAAAAAGAGATAGTAGAGACATATAGAAAGATAAGAGACAGATTTGGTGTGATTGTTTATGTT
GACTGTTGACTTGATATGACTTAGAAGCACCTTGGAGATAGAGCTCTGGGCATGTCAGGGAGAGTTGGTCTTGATTGGG
TTAACTGAGGTAGGAAAGCAGATGCCATTCCCTGGGCTCCATCAAAGGAGAAAGCTAGCCGAGCCCTGACACTCATTTC
TCTCTGCTTTCTGACTGCTGATGCAACAAGACCGGCTTCTGCCATGCTTTCACCACTGAGGGATTGTCTCCCCTACAAC
TGTAACTAAAACAAACCCTTCCTCCATTAGGATGCTTTTTGCTATTGCAACAAGGAAAATAGCTGATACATTTGGCTAA
ATACAGAGCCCTCTCCACCCATACTCAGACTGAACCTTCTCGATGACAGCCATCATGTGTCTGTCTAAATTGTCTTCTC
AACATCCTTGCTGACCTACATTTTGCATGTGACTGCAGCTCCTGGATATTTCAACTTTTCTTGAAGCAGACATGTTGTT
TCTGACCATAAATGATCAGACTGGAATACACGGCTGATGGAAGCCAGCTCTCAGTTTTGAGTAGGAGGACGCGATTCAG
AGAAGATTTCTTAGCCATGAATATAGAGAGTGGGGAGCTTCAGGCTCCTATCACAGGGAGATTAGGGTGGACTGCTGTA
GTTGAGCAGGGACATGAAAGCATGGGGACCTCTGTGGCCTGGTACTCAACAGGGGCAAAGCCCACCTGAGGCTGTGTGT
GCTATACTGAGCCAAACCTTCAACTCATCAGATCTCTGCTGAGCCGAAGTAAGTATCTGGTATTCATCTTGGGGCTCTG
TCATTAAATCCAACAAAGCAGTCTTCTGGCCTCTTCCAGAAGTATTTGACTGGGTAGAATTAGAGAGAAGTCAAGAAAT
CTCATTTCCAATGGATTCCCAAATGATGCTGATGGTCCAGGGAGCTTACCCATGGCCACATTCCACCTGATTTCAAGGC
TGGATCCTTCAGGGGAAATATAAACATCAGCCATGGAGAGATGTGGGCAGGAGACTTAACTTCTGAAGGTGTTTGCTCT
AAGGACCAGGTCAATTCCCCTGTTATTAAGTTCCAGCTAACCCCAGGGTGATTCTCATTTTCTTCTTCCTCCTCAGCAG
CCCCTGGGAATCTCCTTCTCTCACAAGGCCTAACCTGCTCCCAGATGACTTCTGCCTCTATGCTGACCTTCGTGCAAGA
GTGGACACGTGACAGAAACACCGTGCTGTGCCAGGAGGACTTGGGGGTCTGCTCACCCCAACTCTTCTCAAACTTAACT
GCAGCCACCCCTGGCTCTTTCCCCCTGGGAAGACACCCAGTCCCTGAGCCTCAGTTTCCCCAACTACATCCCAGTGGAG
CAATAATGCTCATTCTACCAGGTTGCTGAGGAGAACAGACAGCAGTCTCAGAGTTCACAGGAGTCCTTTCAATTGTCAA
GTGCCCTGCAGACATCAATTATTATGGCTGCTTTAGGGCAGTTGTGTATTTCAACAGTGAACCCTGGCATCTCTTTTCA
ACTCTATTAAGTTTGGTTTTATTTGTTATTATTTTTTTAATGTATGTGTATGTGTGTGTGCCTGCATGAGTGCATGTGT
ACCACATTCATAAGGGAACGACAGAGGCCAGCAGAGGGCAGCAAAGAGGAAACTGGAGTTACAGGTATTTGTGAGCCGC
CTGATGTGGGTACTGGGCATCAAATCTGGGTCATCTTCGAGACCAATCATCATACTTCACTGCTAAGCCATTTCTCCAG
CCCCGATTTTGGTCATTTTTTAAGGCTTCCTTTGCCTTCTTCCCAAGGATAAGGTTCTGCCTTTGAACCCCAAAGTTCA
AAAAGCTGACTCACTCACCTTCCAAAGGTGCGTTCACACACTTAGACCCCAGCCTCCCACTGCTGTGGGTAGACACTAA
AAAGAAAAATGGAAACACTGAAGGTCCACGTTAAACTCTCACACGAGTTATTCTACCCGAGCTGTAAGCTTCTCTACCT
CAGCTGAGATGGAATAAAATGAGGAATGTTGGCTTAGCAAGCCGTCGCTGGTTATCACCAGTCAAAGGTTCTGCAGCCC
ATTTAGTTTCTCCCCCTAGTCTTTCCTATTATAACATCAGGTTCTACCCCCAGAATCTCAAAACTTAAACAGATCCAAA
GTACAATAAGATGCCCATAGAAGGGGAGCAGAAGAGAGATGGCTGCACATCTTGGCAGAGATGCTTTTGAAGCAGCTGT
CTGGATCTGACATCTTCTCTGAGCTACAACAAGTCTAACCCAGGGGCTGTTTGGCAAGCACTACCCACTTCATGCCCTC
CAGTATCATTCTAGCCAGAATAAGAGATATGATGTTAAACTCTCTCTGCCTGTAACTGTTCCAGCAGGGGCCAAAGATA
CTGTAGAGACAGATACCTGTTGCCCTCACTTTGGCTCTCAGACTATTGGAACAGTAGTCCCCAAGGCACTGAAATGCCT
TCAGGAATCTCATGCTGGAGAAGGGAATGACTCAAGAGTCACTGCAAGTCTCTGAGGAAGAACTTGTCTCCCAGGGAGA
GGTTTCATACAGTTCTACCACCCTGTCAGTCCACCTTGTCAGTCCACCTTGTAGGTGAGACTAAAGCCAAATAGCATGA
TGGATCCATGATGTGGGAGACCACATCATGACAAGGATTGATCATCCATGCATGTCTCTTGCCCTCTTATTTAAACCTG
AACCTTCATATCAGAATCCTGAAGATGGACTTAGGGGTTGCAGCTCTAATGGGTCCGCTTCCTTAAGTGGCTATGGTAG
ATAAGATCAATCAATCTCTCTCTCTCTCTCTCTCTCTCTCTCTCTCTCTCTCCTCTTTAATTGTTATCTGAGGGAGTGG
CTGAGCCTAGCCTGTCATGGCTGCTGAGACCCGGGAGCTAGCAGCAAGTCTAACCCAAGGGCTAGTTGACAAGCATTGT
GGTGGCTTTACCCACCACATGCCCTCCAGTATCATTCTAGATAAAACAGGAGGTATGACGTTGAACTCTCCTTGCTTGT
AACTGTCCCAGCAGGGGCAAAGACACTGGAGAGACAGACACTTGTTGCCCTCACTTTGGCTGCTTGATTCTAAGACCTA
TGGAAAGACGCCTAACACCCACATCTGCAGCTTATCTGCTTCTGACTGGGGAGTCCAAGATTCCACTTCAAAGAGCCCT
AAGCTGCAAAAATAGTCATCCTCATCTTACCAGAAAATGACATTACTTCTTCACCTTTCTGTGCCCATGGCCCAGGGAG
AAATGAAGAGAAGCGCCCCACTCACAGTAGTTCTCTGCCAGGACAGGTACCAGGCCGCAGTGGCCTGCGACGTAGGCAA
ACCCTCCATCCAGGCTCATGGCGTCCGCTTCTCCTTTCTGAAGTTAAGAAAGAAATCAGTCGTAAACTGTGTGGCTCTC
ATTCCTCTGACCCTCAGAGACTTCATCTCATGCACATTCTGTCATGGGTCCTTATTTAACCAGACAGCAGAACTGGTGG
AAATACGGAGTTTAGAAAACAAGACCTGCCTCTGGCCTGTCAGCTAGAAACATGCCCGATTCAAACCATGCTCTCTGGA
CATCCCTGTGTCCTCCTAGAGGACCCTCTGACATGCCCAGAACACACTTTCTTTATGACCATTGTCAGTAAATTCAGAA
CCCCCATGGTCAGATTCAGGTACTATATTTAATCTGTCTCACGGGAAAATGTTTTCTTACAACTAATGGAATCAAATCC
ATTGCCTAAATCCCATCAGCACCACACTCATAACTGCGGTGCAAGAAACGTTTTCAATAAATAACTAACAAAATAATGA
ATAACCATTAAGAAAGTCATTCATAATTAACTTGATATTTTAATCAAGATTCTAAATAGAGCAACTAATGTATTCTTAT
AGTTGTAAGTATGATCCCTGAGATAAAATAGTTATATGCAATGTAGCCCAGATGAAGGAGCGGGGTTTCCTACCATGGT
GGCAGCGATGCAGTCCTCAGGGGTCTCCTCCGTGGCACACGCCAAAGCACCACCGCTCACAGCACTCCACTGGTCACAT
TTGGTCCTCTCCTGCTGGCCCACTGCACACCACTTCACCCTCTGGGAGTCTTCCAGACCTAGGATGCAGAAAGATGATC
CAAGGACCCAAAGAAAGCCCCAGATGGCTGCAGACATGATGCCAGGCAGGGCATCACTGATGGCAAAGAGCGGGTGCGA
CTCATTCCTTGCCATAGCTCCTTGCCATCAGTCATTGTCTAGGAGAAGTAGAGACCTAGGCATTCATAAAGCAGCTGAG
GTGGAGTTTTCCCCTCCCTCCTGATATCACCTCCCCAGGGAAGCGTCTTAGCTCTCCCTTCCAGAACTTCCATCCAGGG
AGCAGCCCATGGCAGTCATGTGCTCTGCTTGGATGGTCTCATCGCTGTGGCCCATCTGCTGTGTCAGCTCCCATCTAAC
ATCTAACACTTTCTTTTGTAGATGCTCAGTGACTATTGTTTGACTAAATTGGGGGGCAGGGGGGCTGGGGGTTGAAAAC
AGAGAAGTGAAGAGAGGGGCGGGCAGCAGAGGCCAGTGGAAGCGGGGGTTGGGGGTGCGAGGGTGGCGCTGCACTCAAA
GCCTCCGCAATGCCTGTTCTAGCTCTGCTCCTGACTGTGATCATGGATGTGTTTCCTGGTCAGTTGAGGATGAATTGTC
CTCTCTGTTGAGCAAACCCACCACTGGGAGAATAGACTCAGTTAACACAAGAACCTGGAACCACCGTGGCTTTAAATTG
TCTATGGTAGGGAGCTGGAGATGGCTCAGTGGTTAAGAGCACTGGCTGCTCTTCCAGAGGTCCTGAGTTCAGTTCCCAG
AAACCACATGGTGGCTCACAACCATCTGCAGTGGGATCTGAGGCCCTCTTCTGGTGTGTACTCATATACTTAAACAAAA
CCTTTAAAGAAAATCTCTATAATAGAAAGATTTTCAAATCCTTTATGTAGGGACCAGAATACCCCAGTAATCAAGCCCC
TTCGTGACATCTGTAAGGCTCTGAGTTCAAGCCCAGCACCACCACTTCCACCAATATAGTGTTCTCGTCCTTAAATAGC
GTAGCATAGCCCTTTCTCCTGGCTTATCAGAACATCTGCTCGTTAGCCCTGGGTATTGAGTAGCACTTGTGGGCTTTTC
TGACCATTAAGGTTAGGTGAAACTTGCAGCCACCAGCAAAATCTCAATCCAAGGCCTCTGCCACACCCGGTGGCTGAAG
CTTGGCAGGTCCCTCCCGAGTCTGACATACCTCTTTTAAGATTCCGAAAGGCAGAAAGAAACTCATATCCCAAGTACAG
ACTGATGTCTATCTTTCGAGGGACCCTTAGGAGCCCATGAGCAGCATCAGTAAACAGCAGGTCCTCCCCGTGAGGGGAG
CCAAAGAGCTGGAAGGGTGATGACTTGTCTTTTCCAAAATGTTCCTGTCCAGAGGCAGGAAAAGAAACAGAGGATCATT
GTTGACACGGAGGTGAAAGTAAAGACAAAAAGAAACCAAACTAGGTAAGGGAGGGGGGTGGGAAGCCATGCGGCCATCC
CTGTCTGTAGTGAGGAATTTGGTTTCTTTAAAATCTCACTTAGGTTATGTAGGTAGACATGTTGTTGTTTTAATCCCAG
GTGTGAGATAAGGGGCTGCTTCAGATTATTCAAAGCAGCTGACCTCCTGCCTCATGCTCTGGCAGGGATGTAATTATGC
TGGCTGCAGATAGTTTAATTCTGAGGACTCGGGAGAGGGTAGAAATGCAGCCCCAAGAGAGGCCAGGAGGGACTCAGAA
GAGGAGGATGGGGGGGGGAGGAGGAGGAGGAGGAGGAGGAGGAGTGGTGGAGGACATGGAGGGGGAGAGGAGGAGGAGG
GAGGAGGAGGAAGAGCAGGAGGAGGAAGAAGAGCAGGAGGAGGAGGAAGAGCAAGAGGAGGAGGAAGAGGAGTAGGAGC
AGAAGAAAGAAGGTGGCAGCTGTAGCCTTTCCATGCTGCTCCTGGTTGCTGTTGTTGGGGTTAGTCAAGTGGTCATACG
CAAAGAGTAAAGAGACAAGAAGAAGTTGAAGATATCCTCACTATGAAGATCAGACTCCCCCACCACCTCCAAGGAACCC
AACCCCAGTCAGCAGAAAGTATTCTAAAGAGAAACCAACGCCTCCTGTCCTCTCTAACCTTCTTTCTCTCCTCCCTGGT
GTTGGGCTGTTGGAAGGAATAAGGGTTGAAAGGGAGGTAGAGGTAAAAGAACCCAAATAAAATAAATAAAACAAATATG
CCTACAAGTTGTGCCCAGATGTGAGCCTTGAAATAAATTAGATAAATAATAATAAAAATAATAATGATAATAATAATTA
ATAATAACACTAACACGTATCCACAGATTCTTTCTGCGATTTCAGTTGCCAACAGTTAACAGCATTCTGAAAATACTAA
GGGGAAAAATTCCAGACAGAGGCATTAAATTTTAAATAACTTTAATTGTAGTATATGGATGTATTTTGATATTATTGAT
AATCCCTTATTGTGCTTAATTTATACATTAATCTTCATCATACATTTGAATGCACAGATTGCTGACTTACAATGGTTTG
ATTTGATTTTTTTTTTAAGCACAGTGACAGGTTTACTAGAGTACAGCTCAGTGAATCAAGGAGTGTCTACCTCCCTATC
TATTATTTATTTACACATCTAACTGGCAAGCTATCCATCTGTATATTTATCTATCTGTAGGGCTTGGGACTTTTTTACA
ATCACAGACATCCACTAAAGCTTTTTAAATAACCCCTTACACACAGATAAAAGGAGATAGCCACACACAAAGACAGTTC
CAGGGCTTCTAACAAGTTCTTTGAAGGACAGTTTTACTCAAATCCCATCTAGCCTGTGCCGTATAAACTTGGCAAACTG
CTAACTCCCGACCTGTAGAAAGGGGGGTCTGAGTTGGTCATGTGCCAGGCAGCTGCCCGGCTCTAGTAGGCTCTAGTAG
GGCTCTTGCTGTGTGTTCACATGAGTGATGACTTTTTCCTCCCTGACTGGTTGCCCTGGTGATGCTAGACGTTCCCTGA
AGTTGCCAGCAGGGATGCAGGGTAGGTGTCCTGGACCTTCTCTTTACCTCAGGCTTGTTGCTAAGGACCAGTTATTAAA
CAGTCTCTTTTCCTTTCAGGCTTTCAAAATACCCCAAATGCCCGTTGCCTGTGTCTCCGTTGCCTGGCTCACAGTTGTT
CCTGATTTCAGCTTTTCGTGGTACCTGTCCAAGTGCTCTTTCAAAGGACTGTGTTTGCTAGGTATGGCAACACATGTCT
GTATTCCCAGTACTTGGGAGCGTAGGGAAGGAGGATAAGGAGTGTGCAAGTCCACCTTTGGCTACTTAGCATAGTCAAG
ACCAGTCTAGGCTACATGAGACCTGTCTCCACAAAAACCTAAGCACAACAACAATAACAATAGCAAAAAGGTTCAAATG
ACTGTAGTTTGCTCTTGCAGTGGCTCTGCATAAAATCAGCCACCTGCTGATTTTTCTAATAATCCTTCACCCCTCTTTT
GGACGGATGGGGACACACACACACACACACACACACACACACACTCCTTATCCCCAGGCCTCAGGATTTATCCCAGAAT
GCCCTTCCAATCAGTTCCTCTGTGAAAGCACAGAGTACAAGGCCCATGTTCTCAAGGTGGTGCAATTCCTCCTGGTGCT
AATGCATGCATGCTCTCCTTGTGCCTGGGTGCTTCATCCCTGAGCCTGAACACAGTGCTGGCACAGATAGGGTCCAGAG
ACTGTCTGGGAGAGATTTCCACCAATACAGAGATCTTGTTTCTGTTCCTCCACCAGGAGAGTCACAGGCCAGGGTAGGG
GGTCACAAGGGAAGTGCTTTGTTGAAGAGGGTGGGACTCCATAGAATGAAAAAGAGAACAGAAATGAGACAGGAAGTGC
TTAGCCCTGGGTTGGTGATGTAGGTCACATGGTCCTAATGGCTTCTACTGTCTGGAATAAACACATAGCAGGTAGATTG
TTGGTGAATGCATCGCCCATTGTATCCTGAATGCACAAAGACGGCTAGTGTTAGTGTGGTCAGATGGAGGAAACCCACA
CATACCACACACACTGAAGCCAGGAGCTTCGAGCTGAGGAAAGGATGTGGGAATGGGGTACCTGGGCCACTCTGAGAAG
CTCTTGGATGGAGTCCTCCTTGCCATCCACACTTCGAGCCACCACAACATGAGAAGGGACCCGGGCCAGGTAGCACTGT
TCATATTCCTCCACTGGCCTGCGGGTGTTGTCCATGCAGAGCAGCTCGTATTGGTCCCTGTCGGCCTTTGTTGGCATGG
CCTCTGAGGAAGGAAAGTTCGGGTGAGCAGGCTGAGCCTGGAGCTGTGCTGACCTCTCCCCACCACCACAGAGCGAGTG
GCCTGAAGGGGACAGAGCTAGAATCCTTTCTAAATACACTTTCCACAGATGAGAGAGCAGCGGGGCTCACCAGGGGAAT
GACAGAGTTATAGTCCCACTGTGGCTCCCACAGGTAGGGTACCATGCCTGACCCTGGCCCCCTCCAGCTGCCTACATCC
CTGTGGATCTGAACATACAAATGGTGGCAGCAAACACACGCTTAGCAGTGATGACCCACACGGCTGTATGCAAGACTTA
CTGCTGCCCAGGCCTCTTTACCATCAATCCCCCAAGCTAAAGGAGGCTGGACATAGAATGATCACATCATAGGCACGAA
GAAACAGAGGCAGAGAGTTAAGGTAACTTGTCAAGGTCTCAGATATGCTGCCATGCTGGGGCAATTCATGTCCCTCATG
AACGCAGCCATGTTCTCCCCGAGACAGAGCCTGCTTGGGGAAAGTGCTGAGAGAGCCGAGGGTAGGAAAGGATACTGGG
GTCCCAGTCAGGGAACTCTGCAGGTGTGAAGCACAGGTTCCTTGGTTGCTACTATGTTGATTTGGGTGTTGTGGACCCT
GTCCCATTCATAGGTTGAAGTCATAATCCACAGCGTCCCCAAGTGTGACCTCACTTTGAAGTAGTCTTTACAAGTGTGT
GCCATTAAGATATGACATAGTGGAATACAGTGGGCTCCCAATTCAATACAATCAGTGTTCTTGTGGGAGAGGAAACTGA
GCCAGAGACGTGCACACAGGGAGACTGCCATGCAAGCATGACATCAGTGTGACGTCAGACAGTGACGATATTTATGTGC
AAGCCAAGGAAAAGCAGAGACGGCCACCCAGCCAGGAGAACAGGACGGGAGATTCTTCCTCACGTCCTCAGAAGGAGCA
GGCACTGTTGACACCCTCATCTTAAAGTTGCAGCCTTAGCTGGGCAGCGGTGGCGCACGCCTTCAATCCCAGCACAGAC
ACACATAAACACATACACAGATAAACACACACACACATACACACACACACACACATACACACACACATACATAGACATA
CATACACACACACACACACACACACACACACACATATACAGAGAGAGAAAGACACATATACAAATACATACACACACAC
ACACATACACAGAGAGAGAAAGACACATATACAAATACATACACACACATACACAGAGAGAGAAAGACACATATACAAA
TACATACACACAGATACAGTTGTTGGTATTCTGTCTAAACTCTACCCCCACAGTTCCTGGCAGCAGCCAGGTAGACCTG
GCCCTATAAAAGGGACTGCTTGGTCCCTCCTCTCTCTCTCTTACACTTTTCTCTCTCTCTTGCCTCTTGCCTCTTGCCC
CCTCTCTCCCCATTCCCTTCCCCCACCTCCTCTACACATGGTCATGGCTGGCCCCTACGTTTCTACTCTCTCCTCTCTG
CCTTTCTCTGCCTCTGCTACCCTCTTAACTCCCCTCCCCATGCCCTGAATGAACCCTATTCTATACTGCACTGGTGTGT
GTCAGGTCCCTCAGGGGGAAGGGATGCCTCTGCATGGGTCTGCCGGGGGACACCCTTTCCCCACACCCTGCCAGAACAC
ATTCTTATAACTCTTTCTCTTTTTATGATCCCAACAGTTGTCACATACACACATACACACCTCACAAAACCAGAATATG
TCATCTTAACTTGTCTGAAAACGTTGCTTTGCTTGTTTGAGCTAAATTGTCCAAAATGGCTGGTGGAAAGGTTTGCCAT
GTTACTTTTGATTTTAATTTTTAGAATGGGGGGGTTATCAGGGTAAAGCCTTTGTCTGGTATATACAAGGCTCTTGGTT
TAATGTGGGCCACTGCAGAAGCGACTTCTTTCATTTGTTGGTAAATTGCAAATAACCGTCCAAAATTCATGTTCCCTAG
ATTTATAGAGGCATCAGCAGGTTGGCTAAGGCAGCCAGAGAGGGATGGGTGCAGAGCCCTGAAATGGGTGTGGTCACTA
GGAGACGGATGTGTGCTAAGAAGAATAAGTGGGGCCCTAAACAATGTAGAAATGGTGGAAATGCTTTCATAAAATCTCT
TCAATGGAGTTAGCCTCTCAATATCAATAGTCTCTAGAAGTTAAAAGCAAAAAAAAAGCAAACAAACAAACAAAAACCC
TTTAGAGACAAGAGCCAGAGCCTTTGGTCAGGCTGGGGCCCACTTTGCTCTTCGTCCAGCACTTACCAAACACTGTCAG
GTGCTTCACGAAGCTCACATCCGCCGTGCCATCCTGCAGACATCTGCAAACAGGACAGCCAAGGTCAGGCCCTCTGCCT
GGGAACACGGTTCATCTGCCTCTTGCGCAATGCCCCTTACAATCTAGGAAGGCTTTGGTAGAAATGGTGGCGCCCATCT
GCCTTCAGAGAGGCAATGGCCTTATCTGGGGCCTTTGAACATTATACAGCCATGCCGAGACCTGAAGCAGGCAGGAGTC
TGGAAATCATCATGGCAGACAGCTCCAGAGAGGGGTGATGAAGCAGACAGGACCCTCACATTCCTCCTAGGGAGCAGCT
CCAAGCAACTGGTTTGGTTTTGGCTACTTACAAGTCATCAGATAAAACCTACTGGTATGAGCCACCATGACCAGCAATA
TAATATCAATCTACCCACAAAACCTTCAATCTCAAATTTGTCCTGCCTACAGGATGTGCAGAGATAAAGATGGAGCAGA
GAAAGAAGGAATAGTCCAACCTGAGACCCATCCATGGGAGAGAGCCAACCCCTGACACGATTAATGATATACTCTGCTA
TGCTTAACAAAACTGTCCTCTGAGAGGCTTCATCCGGCAGTGGACGGAGGGATGCTGATTGACAGACCCACAGCCAAAC
ATCAGATGGAGTTTGGGAAGTCTTGTGGAAGACTGGAATATAGATGGCACCACAAGAAGACCTACAAAGTCAACTAACC
TGGGTCCCTGGAAGCTCACAGAGACTGAAGAGTATGCAGGGGCTGGACCTAGGACACTCACACATTTGTAGGAGATGTG
CAACTTGGGCTTCATGTGGGTCCCCTAACGAATGAAACAGGGGCTGTCTCTGTCTCTGTCACCTGCCATTGGATCCCCT
TCCCCCTACCTAGTGTTGGGCCTCAGTGGGAGAGGATATGCTTAGTCCTGTTAGGACTAGATATTCTAGGGTGGGGCTT
CCCTTCCCCTCCTCTGAGGATAAAGGGAGGGGTAATTGGGTGAGGGATTTGTAAGGGTGGGACTGGGAGGACAGGAGGG
GGGCTATGATTGGGATGTAAAGTGAATAAAAATAAATAAATTAGGAAAAGAAAAAATAAAGGCATCAGATGCTCTCAGT
GACAGGGAGACCTCTTTTGCAGAAAATAGCAGACAGAAAATAACCCTTCCCCAAGCCTCTGAATGCAGTGTTTGAACAG
CAACAACAACACGACTTTGCTTCCAACACTTGAGAGGCAGAGGCAGGGGATCTTTGTGAGCTTGAGGCCAGCCTAGTCC
ATAAAGGGAGTTACAGGACAGCCAGGACTGTTACACCAAGAAACCCTGTCTCAAAAAACAGTAATGAAAATAAAACAAC
AACAACAACAAAAAACCCCAAACAAACAAAAACCTGTCAGATAACCTCAAAACCCTGCTTTGGTTTGAGTCACCTTCTA
CAGAGAATGAAAAAACACAGGTAAAATGCCAAAGGTGGTTCGCTGGGAGACTCCTGAGGCCTGTGTCTATGGACCTCGG
TCTCCAGAAAAGAGATAAGTCTGACCCCTTGGCACTTCTGTTACCATGGGGCATGTCATGGCCCCAGCTTTGGGGAGAC
AATAAGGTCTCCCACAAAGAAGATAGTTCCTCAGGATGGTTAGAAACAGGGGTAGGCCACGGGAGGGACTCTGCACCCT
GATGCTCATGCCATCTAGATGCCAGGAGTATGTCCTGTTCTACCCTATGCCTTCGTCTCTCTTCGATGGCTGATATTGG
TTGTCAACTAGACTGGATCAGATAACATAGGAGACAAGCACAGGTCGTATCTTCGAGTGTGTTTCTAGGTTAATTAAGG
TGGGAAGACACACCTTGAATGTGGGTGGTGTTACTCTATGGGCTAGAGCTTGGCAATGAATAAAAAGGAGAAAGTGAGC
AGAGACCAGCATCCCCCACCCACTCCTGGTAACCAGTTAGCTCCTGCTCCCAGTGAACACCAGCATCCCCCATTCCTGG
TAACCAGCTAGCTCCTGCCCCTGCCCCTGCTCCCACTGAGCGCCAGCATCCCCCACTCCAGGTAACCTGCTAGCTCCTG
CTCCCGCCACCACACCTTTCCCATCATGAAGGATGGTATCCTCCCAAACAGTGAGCTGAAATAAACTCTCACAAGTCGC
TTCTTGTCAGGCATTTAGTCACAGAAAGAAGAAAAGTAACTAAGAGACTGGAGAGATGACTCAGCAGTCTTCCAGAGGT
CCTGGGGTCAATTCCGAGCATTCGCATGGCAGCCCACAACTGTCTGTAACTCCAGTTCCAGGGATTCAACACCCTCACA
CAGACAGACGTGCAGACAACCACAAATACACATAGTTTGATTATTTATGTAAAGTATTATATAACATATAATATAAATT
CTTTTTAATAATTTATTAATTTTTAGTAAATTAATAATCTGATAATAAATTAATTTCATAAATACTTTTTTTTTTTAAA
AAGAGAAAAGTCACTAAGAGACCCCCTTGTTCCAGAGCAAAGGTTTCACTTACTTTAAGGCTCCCCAGGAGCCAAAGTA
TGGTTCCCGGGAGGAGCAGGCACACTTGTCTGTCCCCTTCCCCGCACACAGTTGGCACAGGCTGGGGAACATCTTTCCA
TCCGCACAGGGCACACAGCTGCTGGAGAAGAACGTGGCTGCCGCTGCTCAACACAGAGACAAGGCCCCAGGGTGTGAGC
TGGCTCAAGGCTCCAGGTTACGCATGTTTGTGGGGGAGTGCCCTATGGGAGAGCCTAAGTCTGTGGACATCTCCCAGGC
CTGCTTCTAAGAAGGGAAAGAATGTGCAGGGAGCCTGCCTTAGGTAGTCGGCAGTGCCCACGTCAGAATGAATGGATGC
ATGGCCCAGGGTCCTGTGTGTTTGAGAATCACACTCAGGTGAGCCCAGGGCTCAAGCCCATGAAAATGCTTGCCGGCTT
GTCTGCTGTAAGGTGTGGGAACTGCTGACCCACGTGAAGACAAGACGTGACCCTGTTAATTCACCAACCCCTTACAGGG
CCAGACAGAACACTGAAGACCCTGTGCAGATCGTCCACCACCCAGTAGCCTTGTCTCCCTGCATGAAGCTCACCCACTT
CATCCCTTCTGTGCACAGAGACTATGATGCCTCATGGGATCCCTTTGGTGGTGGGGCATGGGGGTATTTGGTAGATGCT
GCTGGTGAGTCAGGAGAGGAGCAAGCCAGTAGCCTAGCTGCCCAGGGAGACGTCCACGGGTATCTGCCACCAAGGCAAG
GCTGTTCCACTTCACCAGACTCCAGCAGACCCACAGAGTCACCTGTCCCTCTCTGTTAAAACACGAGTACTGGGGGCTA
GAGAGGTGGCTCAGTGGTTAAGGGCACTCACTGCCTGCTCTCCCAGAGGTCCTGCGTTCAGTTCCCAGCAACCACATGG
AGGCTCACAACCATCTGTAATAGGATCTGATGACCTCTTCTGGCATGCACATGTACATGCAGATACAGTGTACTCATAG
ACATAAAAATACACAAATCTTTAAAACAAACAAACAAACAAAAACCCCCAGAATATCCATGAATACTACATTGTCAGCT
CAGAAAGGGTACCACTTTTGCAGAGTGTAGGATCTGGTAATCATCTTCAAGGGTTGAACAGGTCTGGGCTCACTGTGGC
TCATTCTAAATGCTCGAGAAGCCTGGGGTATCCAGAGATGTCCTAGCATCGACCAGTCCCACTGTCCTTGCCCATGCCC
CAAGCCCTCGAATGAATACTTGGAAACCCGAGGGGCTGGTGAAGTTTCTGGGAGTCCCCAGAGACCCTTCCTGGGAGGC
TTGGAGGGAGATGACCTTCCTTGGGGACTTTCAAGGCTACCCTTGCCAAGACAAACTGCTGCAATTCCCAGGGAAGAAG
AGACTGACGGCCCAGCAAAAGAGAAGCACCTCTATTGAGAGATGACTCTGCCAGCTATGTGATGCTAGTGCATACTCTT
ACTCCATCTTGGAGAACATAAAGCATGACATGTTCGTCAGGGAGTGAGCGATGGTTAACATGCATTATCAACTGGATTT
GGAATCACCATGGAAACACATATCTGGGTGTGTGTCTATGAAGATGTTTCCAGAAAAGTTTAACTAATGAGGGAAGAGC
TACCCTGAACATGGGTGTGTCCCCACTGATGGAATTGGGTCCTGGGTTAAATGAGAGAGAGAGAGAGAGAGAGAGAGAG
AGAGAGAGAGAGAGAGAGAGAGAGAGAGAGAGCGCTCCTGCTATCATGAGTTCCCCACTGAGATGGACTGTTCCCTCAG
ACTTCGGGCCCTTCCTTCCTGAAGGTGCTTTTGTCGGGTATGTTTCACAGCAGCAAGACAAATGACTGACCCATTGTGG
AACCCCAACATAACCCATTTAGACCATCCAGTGCAGGAGCCCCACTTAAGGGCACCCAGCCCCAGGTGTCTCACCTGTT
TCCCGAGAGCCAGAAGGAAGCAGGGTGCTGAGGGGAACGTACCACCCAGCAGACCAGCCCAGGCCAGTATGGCAGGACT
TCTTGCCCCGGAGCTGGTTCAGTTGGAAGCCTGTTCCCTTCTTTGCCATGGCCACAACATAATAATGGGTTTTTGGATC
TGTAGTGGAGCAGAGAGAAAGAGAAGGCAAAAATGAAGTGTGTCATTACAACCAACCTTCCAGGGCATTCTCAATGCGG
ACCATCAGAGGACCCTGGGCCCAGCACCACTCCCTAGAAAGAAGTGTGGGGGGTGGGGTGGGGTGGGGAATGAAAAAAT
GCCTTTTTCTGGCAGGAAGAGAGAACTGATCCTTCCAAGGCAATAAATTAATATCACAGATGCTCTCTGACTTACAAGC
TAGACTTGTGAGGCTTTTACTTTATGGTCAATGCAGATGACAGTAGCATCCTTTGAATTTTCAGTTTGGTCTTTCGAAT
GCATGCTGTGCCCCTCCTCTGAAGCTGGACAGAGATGTTAAACCATGGTGTGTGTAGTTAGCCGTGGGATCACCACGGG
AACAAACACTCATCCGCAGCACTGCGGATAGGCTATTAGCCAGACCAGCTGTACTGAAAGCATTGGGCTTATAATATTT
AGTTTCTGCAAGTCATTGTAAGTCTGCAAAGCCTCCAATGCTTCATTTCAGGACTCGTGGGGGTTCCAGGGACCCCCAA
GCTTTAGTCCCAGTCATTGCACTGTTGCTGTCTCTATGTGGACTTCTCTTCCTTTTGTGGTTCTCTGCTTACAGCTCAG
GCACATAGTAAAGTTGTGAGAAGAAAGACGGAGAGTGTTCGTGGACTACCAGACTGAGCCGGGCTGTGCTTTCACAGGC
TGATAGAAATAATGGACGCGAGGTGAATCTCCCCTCATTCACTCCCCCAGAGCTTCTTTTCATACCACCTGTGCCATAT
AAGGCCTACAGGAAGCAACAAAAAGAAGAGCCTTGTGGATCCTCAGAAATGGTATCTTATTGTCACAACCCTAGAGGTG
TGTGATAGGCTCTAGATAACGTTCCTCTGGGGATGTTAACTGTCCCACAGACTATAGAACCAAGGATATGTCTGTCCAT
CAGGATTCATAAAAGCTACAGCTTCCTGTGGAGAAATGTCCCAAACCCTGCGGGTCAGTGAACAACACTGCCAATCGGA
AGAGCTCTGGGGACTTGGTACCCGTAACGTTGGCATGATGCTTCCTTTACACCATTGTCTTGGCTAGATTTGCAACCAT
GTAGGAGACACATCTCTGAGTGTCGTTAAGGGTTTTCAAAGAGGTTTCACTGAGAAGGGAAGAGTCACCCCTTGAATGT
GGGTAGCACCATTCCTGGGATGAATAGAAATGAGAAGAGAGTGGACCGAGCATCAGTCCCCCTCGCTTTCTCCCTGCTT
CCTGACTACAGATGCAATGTGACCAGCTGCCTCGCGCTCCTTGGCATTGCCCTTCCCACAGTGGTGGACTGTATCCTTT
AAAACCGTGAGCCAAGATAGACCTTCCCTTCCTGAAGTTTCTTTTGTTAGGCAGTTTGTTACGGCAACAAGAAAAGTAA
CCGCCACTCTTGGCAAAGCCCCCCCCCCCCAACCATGGTGGCCATCACGCCACACCAGTGATACTGGGAGAACACACCA
TCTTTTGATCCATAGTATTCTGCCATGATAGGTTTCAGGCTGTGGTGAGGCAGGTCAGCTTCAGCCACCAAAGCTCCGT
CAACAGTCACAGCATCTACTTTATTGGCCTGAAAGACAAGGGACCAGACATGAATGAGACTCATCACCCCTGGCGAAGA
CTCTGCTAGTGTCTTTCCCGGGACTCTGATGCCACAGACTCTTCCATAGCTCAGACTTCCTTCCTCTCATTCTTTTTTG
TTTTCCTAGGTTGTCAATATCCATTATTTTTTTAAAAGATTTATTTATTTATTTATTTCATGTATGTGGGTACACTGTC
ACTGTCTTCAGACACAGCAGAAGAGGGCATTGGATCCCCATTACAGATAATTGTGAGCCACCATGTGGTTGCTGGGAAT
TGAATTCAGGACCTCATAAAATAAAAATAAATACGTACATAAAAGAAAGACAGAAGGACGGAAGAAGATTTGGAGCAAC
ATGAATGGACTTGACATGAGCTCCAGCCCTCTCTGAGGCTCCAGTTCATGGCGGCTTTTCTCCACTTCGCACATCCTCC
CTTCCTGAGTCCTTCCCCTTTAGGGTCCAGCATCAGATGAAAAAGGCAAGTCTTAGACAGTTTAACCTGCTCTGCAACT
GCATAAGGACAACTAGCAAATATAATTTATATTTATAGCTATAAATCCATCTCTGCTTACTCTCCCACTTGTCTGCCTC
TGTCTCTGTCTCTGTGTCTCTCATACACACTCATACACATGCACACACACGTATGCATATTAAACAAAGGCAAATTTCA
TGTTAAGAAAAAAAAAACAAGTTTAGCTGGGTAGTGGTGGTACACACCTTTAATCCCTGCACTCGGGAAGCAAAGGCAG
GCATATAGTTCAAGACCAGCCTTGTTAAAAGAACAAAAGCAACAACAACAACACCCCAGCTTTTTGTACTTAATATTAA
AACTCCACCAGGTATGGTGGTCTACACCTTGAGTCCCAGTGCCTGGGACAGAGGAACGGGGACACTTTGAGTTCTGGAA
AAGCCTGGTCTGCATAGAGAAAGTTTCTTGTTTCATTTTGAGTCTTTTTTTTTTAATTTTTAAAATTTTTATTTCATAT
GCATTGGTGTTTTGCCTGTAAGAGGGTGACAGATCCTCTGGAACTGGAGTTACAGACAGTTTTGAGCTGCCATATGGGT
TCTGGGAATTGAACCCTGGTCCTCCGGGATAACAGCCAGGGCTCTAAACTGCTAAGCCCAGTACTTTTGAGTCTTTATA
GATTCTCTTGATGCAGTTTTAGGTTTTGCTGTGTCATGGCTACATTGCTAAGTTTGAACCCTGTATTAGTTGTTTGATT
AAGATGATGACTTTTCCGACAGACGAGCACTGAACAGCTGTGTTCTCCCCAGCTCTGTAAAATACAGGAAAAGGACAGC
CTTTCTTCAGCTTTCTTTCACACAGCAGTGACTTACCGAGATGTCCCGGATGCACTCAGGGTGAGACATTTTCCTTACA
CAGGTAACAGCTGGGCCACCTGCAGGAAGGACTTTCTTCATATTGTCACGGAAACTAGAACACTTAGTGGCCTCATGAT
CTGACACAACGCACCATCGTATGGTCTTCTCAGGAAGAGCCAGGCACAGCCCTAGGGGAGAGACACAAGAGGTGTCAGG
GACCCACAGCACTTACCTTCCTCTGCTGGCAGAAAGGAATCAAACACAAGACAAGGAGCTAAGTGGCCTGGACCGATGG
CACAGAGAGATGGTGTCACCGTTAAGTCTGCATTCAACTCTTCTGGAGAACCCAAGTTCAGTTCCCAGCCCCTGAGTCA
CAGCTTACAACCTCCTGTAACTCCAGTGCTGAGGAACTGGACATTATCTTCTGGCCTCTGTTGTGGATACCTCAATTAT
ATGCACAACCCCCCCACAAACACACACACTATGTGTGTAATTAAAAATATCTTAATACTAAAAAATAGAGCCAACTGTG
TGTCATCCACACACTGAATTAGCTGTGTTCCTTGAGGGAATTCTCAGGGCCCTTTTTTTCTGACTCTCTCCAGATATAT
TAAAGTCCCCCAAGTCAGGCGTGGTGGCGCAAGCCTTTAATCCCAGCACTTGGGAGGCAGAGGCAGGCGAATTTCTGAG
TTCGAGGTCATCCTGGTCTACAGAGTGAGTTCCAGGACAGCCAGGGCTATACAGAGAAACCCTGTCTCGAAAAACCAAA
ACCCAAACAAACAAACAAACATCCCCCAAAAGATAACCACAGAATTAGCAATATGACACAGCATTTTCACTCCTAAATA
TATATTTAAAAATTGACAACAGGAACTCAAACAAATACACAGATATTCACAGCAAAACTTTCTTTTTTTTTTTTTCAAT
AACTAAAAGAAAAACATTCAGGGCTAAAGGTTAAAAATGCTAGCTGCTGGGCTGGTGAGATGGCTCAGTGGGTTAGAGC
ACCCGACTGCTCTTCCGATGGTCCAGAGTTCAAATCCCAGCAACCACATGGTGGCTCACAACCATCCGTAACAAGATCT
GACTCCCTCTTCTGGAGTGTCTGAAGACAGCTACAGTGTACTTACATATAATAAATAAATAAATCTTTAAAAAAAAAAA
ATGCTAGCTGCTCTTCCAGAAGTCCTGAGTTCAATTCCCAGTAACGACATGGTGGCTCACAACCATCTATATGGGATCT
GATTCCCTTTTCTGGGTTTGTGTGTGTGAAGACAGATCATTCATACACATTAAAGTAAGTAAATAAATAAGTAAACATT
AAAAAAAACCATCAAGTGTGCATTAAAGGGAGAGTAGATAGGTACCATCATGCTTTAAGTCCTGAATGAACCTCAAAAA
CAGCAAGTGAAAGAAACAAACAAAAACCCTCAACATATAGTTACTAATAGGACCCAATAATTTTAGATATTTATACAAA
AGAAACAAAACCACGTATCCTCTCAAAGATGGGCCCACTACTGTGCATGGCAGTTATTCATAAAAGCCTCTCACTAGCC
GGGTGTGGTGGCGCACACCTTTAATCCCAGCACTCGGGAGGCAGAGGCAGGCGGGTTTCTGAGTTCGAGGCCAGCCTGC
TCTACAAAGTGAGTCCCAGGGCAGCCAGGGCTACACAGAGAAACCCTGTCTCGAAAAACCAAAACAAAACAAAACAAAA
GTCCTCAGGGGACATGTGACCAACTAAAGTTGCCTTCAGCACAGTGATACAGGGTTTGGCCATTGAGAGAGTGAATGTG
GTATATGCCACCTGGATAAATCTCCAAACAACTATGCCAAGTGACAGAAGCCGCTGGGACTGTGGAGGTGGCTCAGTAG
ATAAGGAGCTGCCTGGACTCAGGAGGCAGAGACCCGGATCTTGTTTAGCTAGACTAGCAGAGTTGATGAGCTTCTGGCT
CAGTGAGAGACCCGGTTTCAGCCGCTAAAATGGACCCAGTGTCAATTGCCAGCCTTCGCACAAACTCACACAAGTACAG
TGTGTGTGCACACGAGGACACCCACATGTGATTGAATGTATGAATGTAGCACACATAAATGGGGAGAGGGCAGTGGGGA
AGGAGAGGGGAAGGGAGGGAGGGAAGGAGGGAGAGAGAGAGAACTCCCAGTTCTGTGAAGTAGACCCCTTGGAACCATT
ACAGCCCCTCCACCATTGAGGGCTTTATCCCCGCTGTCTACAGCAATTGAGAAGGTTTCAAGGAATGGGTCATTCAAAT
ACCTATGAGTTATTGATGTTTATTGATGTTTATTGTCTATGTATGGAAACTGCCCTTACCTGTGATCTCCCCTGCTTCC
AATGGGGTCCAAGCCAGACTCCTCACATGGCGGTGCACAGCTAGATCTACTGGAATCCCTGCTCAAGACTTCAAGGTTG
TGGCCCTTACCTGCACTCATTATGGATTCTTGATTCTGAGAGCCATAGAAATCATTCTAAAATCCAAGTGTAACTAACA
GCCCTACCTGCTCTCCCACTCAAAGCCCAATTCTTTCCTCCAACAGGCCTCTGTATTGTTGGTGGGAAGGAGGGAGTGG
CTACTTGTGTTACTGACAATTTTTCCCCCCAGAAATTCCAGGTTCACTTTGGTTTGAGTATTGCACACTTGCATCCAAA
TTAATAACTTATTTAATTCCACTTCTTGCTTAATAATTACAATCTAATGCGGGGGTGGCGTGGTGAGAAGGAGGAGAGA
AAGGAAGAGGAGGAGAAGGAGATGGAAGAAGAAGAGGAAAAGAAGAAGGGGAAGAGGAAGAGGGAAAAAAAAGAAGGAG
AAGTCAGTAGTCCAGGTCGTGGAGATGGCAGAGGGTAAGGGTGCTTGTTGCCCAACCTGATGACCTGAGTTTGACCCCA
GACCCCATAAGATGTAAGGAGAAAACCAACTCCAAAAGTCTTCTCCTGCAGAGCACATACACACAGACAGAGCACACAA
TAAAGACATAAATGGAAAACACAGAGAAGCCAAACCTACAGGGATGTGTGCTTACACTCCAGATGTGTGAGCCTAGGAG
GCAGGGTGTTTGCAGGGGTGAGGTGGGGGTGGCCGAGAAAGGAGGAGGGGCAATTTGAAAAAGTTAAAAATGTTCTTTA
TCTCGATTATGGAGGGGGGTCACGTTAGCCGAACTGTATATATCCTTTAAATGAGTGTAGTTTATCGTATGCAAACAAT
GTGTCAATATTCTGGGGGAACACTGCTGAGCCACTTCAAGTCTCAGAACAAAGCGGCTTTGGCCTCAAAGCAGGCTGGG
CTCAGAGCAAGTCACTACTGCCTGTGAACGGGACTACTGCTCTATGACAAAGACTTCATCATAACACGCCCTAGCTAAA
AATGATAGATGGATGTCACGTTAGGACTGGTAGGTTTTACTGAGCCATTTCTAAGTCACAGCAAGATCATCCTAACCTC
AAGGTCAACCTGTTGATAACCATAAGCCTCAACTGCCGCCATTGCTGGAGGACTGCCTACATAGAAACACACACATACA
CAGACACACAGACACACACAGACACACACACAGACACACACACACACTCAAGCAAGTACACATGGAGGACTGCCTACAT
AGAAACACACACAATACACAGACACACAGACACACACAGACACACACACACTCAAGCAAGTACACATGGAGGACTGCCT
ACATAGAAACACACACAATACACAGACACACAGACACACACACACACACACTCAAGCAAGTACACATGGAGGACTGCCT
ACATAGAAACACACACATACACACACACAGACACATACACACACACACACACACACACACACACACACACACACACACA
CACACACACTCAAGCAAGCACACATGCACCCCTCCCCAGTTCTTACAAAGTTTCTGTTTAAACTGTTTCTACTGCCTAC
TGGTTGTGCCACAGTGTAGCTAATTCTCTACTACTGCTTCCTTCTGTCTTTGGTGAATTCATTCCCTGCCTGAGCATCA
CAGCTCTGTCACCACTGTCCTGGCTTGGCAAATAGAAATATTTTAAAAAGAGGACGTGTACAGACAAGCTAAGGGTGGG
TGGAGTCTGATAACATCAACAAGGTCATCAATAGCATGCCCCCACTAGCCTCCTGACAGACACAGGAAGAGGTCTGAGC
ACGCTCTGACCTTTTCAGGAGGAAGAGAAAGGCTGCTGGTGGCCTCCAGTCACTCACTGAATGGAGAAAGTTCCTGGAC
CCCAGAAGAAACCGTTGGCTTGGCTCTTGACTTTTGCAAGTTTTTAGGATATGTAACCCTCAGTTACGTGTTTCCTATT
TAAGCTGCTTTGGCTGGGGTTTTTTGTTGTTGTTGGTAGTGGTGGTTTGGGGTTTTGTTTTGTTTTTTGTCATTTGACA
CCACAAGTATTCTTATTGGACTGGAACACTGAGTTTTGAGGAATGAAGGTTCCAGACTCCGGCCTGGTCTGGTAGCCCG
GAGAAAGGTCGTGAAGAAACGAAGCCCGGAGGGGCCTTTAGTCTCTGACATGTAAACATGAAGCCTGTTGGGAAAATGA
ACTTCTGGTCTGTGTCTGACATTGCTGGCAATGGTGGCGGAACGCTATTTAGCAGAACACTGGCTCAGTTCAGGGGAAT
TCTGAAAGAGATCAGGCAGCTGCATTCTGAGAGCGAATGACCCTCTGGGTGGCTACAGATGGCACTGCTGGGCAGAAGA
GGCAGACATATACTGTGCACCATTGCCGGGCTCTGGCCACCCTAGGTATTATTTACCACGGTCTCAGATCAGACAAAGC
TAAAGGGAGGAGGATCCAACCGTGGTTGAGACAGGAAGAGCTCTTCACAGTGCATGAGTTCTTCCCTGGAGCCTGTTCT
CCCTACCCACGAAAGGGCTTCTTGTATTTGTGAGCGTAGAACTCTGCCTGCCTCTGGCTGTGTTAGCTCATTTCTCCAG
CAACTGTGTGTTTGTTGGGTAAACATAACTTTTTTTAAAAAAAAGTTAACATTGTGTGGAAGCCACATGGGGGTCAGAG
GACAGATTTCTTTTCTTTTTTTTTTTTTTTTTTGGTTTTTTTAAATTTTTATTTTATGTGCTATACTTATTATTACTAC
AGAGGACAGATTTCAAGAGTGGATTTCCTCTTCTACCATTTGGTCCTGGAGGTCATATGTCGTCAATCACAACATCAGC
CCCTTTACCTACCAAAGCAGTGAAACAAGTTGTGGGGTTTTTTTGTTTGTTTATTTGTTTTGTTTTGTTTTTTTTATTT
TCCTCTCCTATCTCTCATATATTGCTGCAATTTCCCCTCCTTCCTCTGAGTCCCTCTTCACATCCCCTGTCACCAACTA
CGTCTCCATTTTCCTTCAGAAAAGGGCAGGCCTCCCAGGGATATCAACCAAACGCGACATAACAAGTTACAAAAAGACT
AGGCACCTCCCTGGTATTAAGGAGGATGTGGCAGGAAAAGGGTCCCAAAAGCAAGCAAAAGAGTCAGCGACAATCCACT
ATGACCGCCTCAGTGAGGGCAAAGGACAGCCGGGGGACTGCGTGGCAGGTGAATTCCAGTCCAAAGTGATTACTCTTCT
CTAGGCTCATAGTCTATCCAACCACATTTGATCCCTGAAGTGTATGGTCAGCAAATGACACCTGGTCCCCTCCCCAGAG
GGCCGGCCCCCTGCCTGGCTCTCAGCACACTCACCTAGGGTCCCCAAGCATAGAAGGGCGCAGATGAGCAGCCTCATTT
TCAACTGTGGAACTGCGTTCTGCTTGCTCTCCCCCAGCCTAGGTGCACTTTACCCAGAAGGCAGTGTTGACTGATGAAT
CTGCCTACTGGGAAAGGTTCTTCAGCCCCAGTCCGGGCTGGTCGCCACTGCCACACCCTCCATGCCTTCCTTATCTGGC
CAAGCAGATACTCAGGCGGCTAGGGACACTATTTTTTCTCTCTCTGTCCCCGGTTCGGTCCCTGGGTGGAAACGGTGCT
TCTCCGGGAAAGCCGGCGCGCACATGCATAAGACCTTAACACAATTTTCTTTTGGAAATTCTCACTTCTCACTAAGGAC
TCTAAGTTGACTAAGCTGAGGTCCTCCCGCTGTCCTGCGACCCCAGTGGAGCTATCTCTTCTGTGACACAGCCCATAGT
TTCTCCTCTATCTCCCCACCCCCACCCCCACCCCCACTCCACACCACACGCACCAGTGTTGCTTGTCCCAGCTGTGTAA
GGCCTGGCTCAGGCACAGATCTGACATGCAGAGTTTCTCGCTCACCCGGCTGCAGCCCTGTCCGAAAGGCTGTGCGACC
TCTGCCTAGAAAAAGTCTGGTAATTTTAAATAAAACTCGAAGAACTTCTAATTAAAATATAGTAGTAGGTGTACAACAA
ACCCTGCTAGCACAGTGTAATAATTATCACTAAGAGGACTCCGGTAGAGCCAGTCCACATCCAGGAGGCCGAATCCCTG
CAGAGCTTCTCCCACATAGGTGGCCCCTACATGGAACAGAAACGGAAGTCTGCTAACTTCAGGACTCCACAGAGATGAA
AACTTACAGCGCAGAGCCTGGCTTCTCTCACCCAAGTTTAAATTGGTATGATTTATCTATGCAGAGGTGTGTGGTTGCC
CACCAGCTATCAGTGTGGCCTATTGTTTCATATCATGTGAATGAAGAATATTTCATCTCTCACCCTGATTGACAATTGT
AGTACCGATTCCATCCTTACAGACAGTGCCGCTAGGAACAGAAATTTCATTTCATTTTATATACATTACTAGGATCTAA
AACTAAATAAAAAAAAGCAGGGCCTGGTATGGAAGTACAGGCCTGAAACCCCAGCATTTGGGAAGTGGGGACAGTGGGA
TTAGGAGTTCGAGGTTTCAACTACGTGCCCTATTGGAGACTTCCCTAGGCTAGAGACCTTGTCTCGAAAACCAAGCATG
TAGGGCTGGAGAGATGGCTCAGCGGTTAAGAGCAAGTGCTGCTCTTCCAGAGGACCAGAGTTCAATTCTGGCACCCATG
TTGGACGGCTCACAACTAACTACCTGTAACTCCAGCGACAGGGGGACCTGACACCCCTGGACTCCAGCTACAGGTCATC
TGGCTTCTGTGGGGGCTCACACTCCTTTGTATATACAAAAAGCAAAAACAAAACTTAAAGAAAGAAATAGAAGACACAA
TCAGGAAAACGGCACAATTTTTGCACATTGAACTTGAGCACAGTGTCTTTCTTGAGTTATTTTGTTAAATCTGTTTCTT
TCCAGTGTTCTGTTTGTGTTCTTACATCTTTTGTTGAATAATGCCAGTTTTTCTTCCCTTTCTTTCTGATTTTTAGCAT
CCCTCCTTATCCCAGGTTTGGCTTACTATAAACAGTTAGTTTGGGAATAGTCTAGTGCATGCCTTTGAGTGCAAATAGA
CAGGCATCTCTGCAGCAGACTTTTCTAGGAGAACAACTGTTTGGTCCAGAAGTAGGTGGAGGCCTGGTTTCATAGATCC
TGGAAACTCTTAGGACCCAGTCAAGAAGCTCTGAAAAGGGTTATTACAGAAAGAAATGTGTACTGTCTTCTGGTTTTAG
GTGTTATTGGCAATACTAAGGTTCTCTCTTTCTACATGAGTTGCTTACATCTTAAAAACATGACTGGGATTGGATTTTT
TTGTATTTATCAAAATAATGATATGATTTTCCTGCCTTGTCTGTGGGGAACTATGCAGCAGAGCATGAGTTTTCTTCTT
TTGTTGTTATTTGCTTGTTTTTGTTTTTGTTTTTTAAATGTTTTGTTTTGTTGCTTTTTGAGACAGGTAGGGTCTTGCT
ATAAACTAGGCTGGCCTCAAATTTGTGATCCTCCTGCCCCAGCTTCCTGAGGCCTGGACATATGGGGGTGTATAACCAC
ATCTGACTTCTAGTTCGCTTTGTTTGCTTGCTTTGTAATGGAGTTTGAACCCCGGGTCTCACATTCGCTGGGTAAGCAT
TTCACCCCTGAACGGCATCTCTAACCTGCTAACTGGATTCTAGATTTATTTCCCTTTATGGATTAGCAGTGCTTTGCTT
ACATGTGTGCCTTCTGCTTGTGACAGTGAGAACAGGGTGTCGAATCCCCTGGAACTGGGGTTGCTACTGGTTGTAAGTC
ACCATGTGGGTACTAAGAACAGAACTCTGGCCCTTTGTAAGAGCAACAAGTGCTCTTAGTCACGGAGTGGTCTCTGCAG
CTCCCTGCTAACTGACTTTTAAGTATTGCCACTGTTAGATTTCTGCAATAAACCCCATTTGGTCATTATATGTAAGATT
ACCCATGTACTGTTGGGTTGGTAATATTTTCTTTAGTGTTCCTTTCTGTATCTATTCTCTTGAGAAAAATAAATCTGGG
GGCTGGAGAGAGGTCTCAGCATGTTCCAAGAACCAGAGTTTGATTTCCAGAACCCGTATATGGTAGCTCACAGCTGCCA
ACTCCAGGAGGATCTGATGCCCTCTTCTTGCCTCCACAGACACCTGCACTCGTGTGTGTGTGTGTGTGTGTGTGTGTGT
GTGTGTGTGTCTGTCTGTCTGTCTGTGTGTCTGTGTGTCTGTGTATATATGTATATATACAAGTGTAGTGGCTATTCCT
GGTTGTCAACTTGACTATATTTGGATGATCTACAATCCAGAATTGGAAGGCTCACCAGTGACCCTTATCTGGAGGCTTG
GAGATAGAAGTTTCTGATCTGGATCTTGGTATGGAGATCTTGAGGCATAGTGGCTATGGATTAAAGGTGGAATACACCT
TTAATCTGGGCTACACTTTCTGCTGGAGACCATATAAGGACATTGGAAGAAGGAATCTTGCTCTCACTCCTTCGCCTTC
TTGCCGTGTGGGACTGAGTAACTGCTAGATCCTTGGACTTCCATTCACGGCTACTACTGAACCATCGTTGGGAATTGGG
CTGCAGACTGTAAGTCATCAATAAATTCCTTTACTATTTAGAGACTATCCATAAGTTCTGTGACTCTAGAGAACCCTGA
CTAATACATGCAAGTATATATACATACATATATGTGGGAATATATGCATACATGATAAAAATAAATACATCCTTTTTAA
AAAGAGAAAAATAAAGAAAAATTTAAAAGAGAGAAATAATCTTACAGTTTCTCTTTATTCTAATTTCCATATATCTTTT
GCTTTAACATTACAATGATTTTTGAACTGAGAAATGTCACCTCTTACTTTCTGAAAAAGGCTATGTAAGAATAACATTC
CTAGCTGGGCATGGTGGTGCACGCCTGTAATCCCAGCACTTGGGAGGCAGAGGCAGGCAGATTTCTGAGTTCGAGGCCA
GCCTGGTCTACAGAGTGAGTTCCAGGACAGCCAGGGCTACACAGAGAAACCCTGTCTCGGGGAAAAAGAAAAATAGAAT
AACATTCCTTTTCCCTTAAATGTGCAGAAGACATCAGCAATGACGTCCCCTGAGTTTAGAGCTTCCCTTGTGGGAAAGT
TTTCAACAACACACTAACCATTGTCTCCTCCCTCCTCTCTCTGGTACTAGGGATTAAACACAGGGCTTCATACATACTA
GGCAAGAACTGTGTGAAAGAGTTCAGCCCTTCACTTTTACTTTAGACTTGATCTCACTATGAAGCCCAAGCTGGCCTAC
GATTCATAATCCTCCTGCCTCCATCCCAGTAGCTAAACTTAGAGATGTGCACACCCAGGAAATTAAGATTTATTTATAT
TGCTGGGCAGTGGTGGCACACACACTCTAGGACTCGGGAGGCAGAGGCAGGCAGATCTCTGAGTTCGAGTCCAGCCTGG
TCTGCAAAGTGAATGCCAGGACAGCCAGGGCTACATAGAGAAACCTTGTTTGAAAACAACAACAACAACAACAAAAACC
CAAAGAACAAAAAACAACCCCTCCCCCCCCCCCTTTTTTTTTTTTTTTTTTTTTTAAGACAGTGTTTCTCTGTGTAGCC
CTGGCTGTCCTGAAACTCACTCTGTATACCAGGCTGGCCTCAAACTCAGAAATCTGCCTGCCTCTGCCTCCCAAGTGCT
GGGATTAAAGGCGTGCACCACCACACCCAGCTACAAACCCATTTTTATATTTATAGAAATATCCATAATTTCTAATATT
TCAAACCAGAGTATAGGCAAATATTGTCTTTTACTTATTTGTATGTGTATGAGTGTTTTGGCTGCCTGTATGTCTATGT
ACCACATGTGTGCCTGTGGAGACCATTGCCCCTGGGACAGGAATTACTAATGGCTGTTAGGATCTGTTTATGGATGCTA
GGAATCAAACCTCAGTCCTCTTAAAGAGCACCAGTGTTCTTAATTTCTAAGCCATCACTTCAGCCAAAGTATTGTAAGA
AACTTATCTAGAGGCTGAGGCGATGGCTCAGTCAGTTAACTGCTCCTTGTGCAAGCACAAGGCCCTGAGTTCAGATTCC
TGACATACTACTTAAAAATCCAGGCAAAGGGGCTGGAAAGGTGGCTCTGAGGTTATGAATACTGGCTACTCCTCCAGAG
GACTGAAGTTTGATTCCCAGCAACCACATGGAAAATTGGAAATGGAGATTTGAAAGCACACAATTTTCTTTAGCTGGGC
CTGGTGGCACACACCTTTAATCCCAGCATTTTGGGAGGCAGATCTCAGAGTCCAAGGACAGCCTGGTTTACAGAATCCC
AAGACAGCCAAAGCTCCATAGAGAAACACTATCTTGAAAAAACAAAGCAACAAAACAACCAGGCATAGTGGAGGCTGCG
AATCCAGAGATGGGGAGGCAGAGATCCCTGGCCAAGCTGAACCAGTGAACCCCTGGTTCAGCGAGAGACACTGCCTCAA
AAAAAAGGTGGAGAGTTTCTGAGAAAGACAGCCAGCCTTGATCTCTGTCCTCCAAGAGTACATGCATCTCACACATCTC
GTGAGCATGTGTACACGCATGCACATACATAAATCACATACACACACACACACACACACACACACACACACACACACGC
ACACACACACACACACCATCTACATTTCAAAGTTACTGAAGCAAAGTCACTCATCACATTATCCTGTAACTGTTATTTG
GTGTTCTGTACTGGCGATTGGATCCAGGGCCTTGCACTTCGTAGGCTCCAGATCTGCCACTGGGTTAGGTCTCTAGTCC
TCCTCCCTTTAAAAAAAGCAAAAACAAAAACAAACAAAGAAAAAAAACCACTTTGTATTCTAACACAGGGTCTCACTAA
ATCTCTCGGGCTGGCCTGGAACTTATGACCTTCAGCCCCTTGAGGTGGCACAAACTGCCACCAGATCTTGTAGATGACA
TTTTAAATGTATGACGGATTCTTCCTATAATACCTTTTTCCATTGTTGACACTGGTAACTGTTGATTACAGTTGCCGAG
GTTTTAGCTATTTTATTAATTTAAGAAAACACACAAACTTGGGTTGGGGAGATGGCTCAGTGGTTAAGAGTATTGACTG
CTCCTGCAGAGGACCCAGGTCTGGTCCCTAGCATTCATTATCAAACAGCTCACAACTGCCTGTAACTCCAGGGCCTGTA
ACTCTAGGAAACCCAATGCTGTCTTCTGTCCTCCACAATCATTTGCTAGCACTCACACAGCATACACAGACTCGAACAG
GCACGGACATACAGAAATCTTTAAAACAATATCCCCTACATACAAACTTTTGGCTTTGTTGATTTTTCTGTATTGTACA
CTCATTTTATTTCATTGATTTCTGCTTTCTTGACTATCTATGGATTTTATCATTTCTCTAGTGGTTTTTGTTTTTTTGT
TTGTTTTGTTTTTTGAGATAGGGTCTTTGCTATGCCCTCAACCTCATCTGGAACTTCCTGATTGCCTGATTTAATTGCT
GTGAAGAAGAAATATTCAATATTTTTTGGGAGATGGGATTTTCGAGACGGTTTCTCTGTGTAGCCCTGGCTATCCTGGA
ACACACTCTGTAGACCAGGCTGGTCTCAAACTCAGAAATCGGTCTGCCTCTGCCTCTCAAATACTGGGATTAAAGGTGT
GCACCACCACTGCCCACTAGAAATATTCAATATTCTAATCTTGGATTGGATCATGGTGTCTGATTATGATGCCTGCTAT
AATATTCAAACATTTATAAAACAGATGAATAAATGCACCAAGACTATGCAGGGCAGTCTCTTCTGCAGGCCTGTAAGCA
AAGCCCACAGGGTCCAGGAGCGACCATTTCTCCTAGAGTTAATGATCTATCTAAAGCTAACACACTCTAAATCCATAAG
GGCCAAAGTACCTACTGACCTGAGTGGAGTATGCTCTGAAAATGTCTCATGTCCAAGGACAAACTCCTATAGCAAAGAA
AGGACATCCAAAGTGCTAGAGTCATCTTGTGGGCTCAGGCAAACAGACACCAGAGAAAAGATTAGAAAGATAGGACACG
GTGACTCCTGTCTGCAGTTGCAGCACTTGGGAGACCAGAGAACTAGGGGTTCAGAGGCAGCCTTAGCTACATAGTAAGT
TTGAGGCTAGCGTGGGCTACATGAGACTCAAACAAAACAAACAAACAAACAAACAAACAAACAAACGCCAAATCAAACC
AAACCAAAATCCAGAAGATTAAAAGAAGAAACAGTTTTCAGGACTTTGAGCCAAGAGTGATTTTTGGAAAACTGCAGAT
TTGGGCTACTCTTTACTAGACACTACACTAAGTGTTTTTGTAGCATTAATTTATGATGAGCTTATAAGTAGTATTTTAC
ATGTTTTTTTTTTTTTGCATTCAAGAAAAAAGGAAAGCAGAGAAGTTAAGAAATATGTCAAAGGTCCAAAGGTTCATGG
TTTTTGCACATGTTTTGTGCTCGTTGGTTGGTTTTAAAACAGGGTTTCTCTGTGTGGCCCTGGCTGTGGCCCTGGCTGT
CCTAGAACTCACTCTGTAGACCAGGCTGGCCTCAAACTCAGAGATCAACCTGCCTCTGCCTCCCAAGTGCTGGGATTAA
AGGTGTGCGCCATCACAAGATCTTTCTCTCTCCTTCCTTTCTTTCTTTCTTTCTTTCTTTCTTTCTTTCTTTCTTTCTT
TCTTTCTTTCTTTCTTTCTTTCTTTCTTTCTTTCATTCTCTCTCTCTCTTTCTTTCTCTTTCTTTCTTTCAAGATTTAT
TTATTTATTACATATAAGTAACACTGTAGCTGTCTTCAGACACACCAGAAGTGGGTATCAGATCTCATTACCGATGGTT
GTGAGCCACCATGTGGTTTCTGGGATTTGAACTCAGGACCTTCAGAAGAGCAATCAGTGCTCTTAACCTCTGAGCCATC
TCGCCAGCCCCCACAAGATATTTCTTCTCTCTCTCTCTCTCTCTCTCTTTTTTTTTTTTTTGGTTTTTTGAGACAGGGT
TTCTCTGTGTAGCTCTGCTGTCCTGGAACTCACTTTGTAGACCAGGCTGGCCTCGAACTCAGAAATCCACCTGCCTCTG
CCTCCCAAGTGCTGGGATTAAAGGTGTGCGCCACCACGCCTGGCTTAAGATATTTCTAATGCTTAATTTGATTAGCAAA
GGCTCAACAAATGGGGAAATGAGACAGGAAGAGGAAAAGGCATTCAAACAATGTGTTAACAAGTCAGTAGCCACTGTCA
AGACTGAGGCTTAATTCCACTGGGGAAATTCTACGAGCCAAGGGGCACAAAAATAAAGGCTTTATACAGCTTCCTGTCA
GTTCTTTTTCATCGGTCATATATCCACTGGAGACACCTGCTTTGTTATGCAGACAGAACAGCAGACTCCTCATGCTCAG
AAAACACCTGCAAGCAAAGAACCACTTGCTAGTTGGTAACACCGTCCAGAGGTCTGTAAGAGCAAAGAAACACTTGCTA
GTTGGTAACACTGTCCAGAGGTCTGTAAGAGCAAAGAAACACTTGCTAGTTGGTAACACTGTCCAGAGGTCTGTAAGAG
CAAAGAACCACTTGCTAGTTGGTAACACCGTCCAGAGGTCTGTAAGAGCAAAGAAACACTTGCTAGTTGGTAACACTGT
CCAGAGGTCTGTAAGAGCAAAGAAACACTTGCTAGTTGGTAACACCGTCCAGAGGTCTGTAAGAGCAAAGAAACACTTG
CTAGTTGGTAACACTGTCTTGAGGTCTGTAAGAGCAAAGAAACACTTGCTAGTTGGTAACACTGTCCCAAGGTATGTAA
GAGCAAAGAAACACTTGGTAGTTGGTAACACTGTCCAGAGGTCTGTAAGAGCAAAGAAACACTTGCTAGTTGGTAACAC
TGTCCAGAGGTATGTAAGAGCAAAGAAACACTTGCTAGTTGGTAACACTGTCCAGAGGTCTGTAAGAGCAAAGAAACAC
TTGCTAGTTGGTAACACTGTCTTGAGGTCTGTAAGAGCAAAGAAACACTTGGTAGTTGGTAACACTGTCTTGAGGTCTG
TAAGAGCAAAGAAACACTTGCTAGTTGGTAACACCGTCCAGAGGTCTGTAAGAGCAAAGAAACACTTGCTAGTTGGTAA
CACTGTCTTGAGGTCTGTAAGAGCAAAGAAACACTTGCTAGTTGGTAACACTGTCCCAAGGTATGTGAGAGCAAAGAAA
CACTTGGTAGTTGGTAACACTGTCTTGAGGTCTGTAAGAGCAAAGAAACACTTGCTAGTTGGTAACACTGTCCCAAGGT
ATGTGAGAGCAAAGAAACACTTGCTAGTTGGTAACACTGTCCCAAGGTATGTGAGAGCAAAGAAACACTTGGTAGTTGG
TAACACTGTCTTGAGGTCTGTAAGAGCAAAGAAACACTTGCTAGTTGGTAACACTGTCCCAAGGTATGTGAGAGCAAAG
AAACACTTGCTAGTTGGTAACACTGTCCCAAGGTATGTAAGAGCAAAGAAACACTTGGTAGTTGGTAACACTGTCCAGA
GGTCTGTAAGAGCAAAGAAACACTTGCTAGTTGGTAACACTGTCCCAAGGTATGTGAGAGCAAAGAAACACTTGCTAGT
TGGTAACACTGTCCAGAGGTCTGTAAGAGCAAAGAAACACTTGCTAGTTGGTAACACTGTCCAGAGGTCTGTAAGAGCA
AAGAAACACTTGCTAGTTGGTAACACTGTCCAGAGGTCTGTAAGAGCAAAGAAACACTTGCTAGTTGGTAACACTGTCC
AGAGGTCTGTAAGAGCAAAGAACCACTTGCTAGTTGGTAACACCGTCCAGAGGTCTGTAAGAGCAAAGAAACACTTGCT
AGTTGGTAACACTGTCCAGAGGTCTGTAAGAGCAAAGAAACACTTGCTAGTTGGTAACACTGTCCCAAGGTATGTAAGA
GCAAAGAAACACTTGGTAGTTGGTAACACTGTCCAGAGGTCTGTAAGAGCAAAGAAACACTTGCTAGTTGGTAACACTG
TCCAGAGGTATGTAAGAGCAAAGAAACACTTGCTAGTTGGTAACACTGTCCAGAGGTCTGTAAGAGCAAAGAAACACTT
GCTAGTTGGTAACACTGTCTTGAGGTCTGTAAGAGCAAAGAAACACTTGCTAGTTGGTAACACTGTCTTGAGGTCTGTA
AGAGCAAAGAAACACTTGCTAGTTGGTAACACCGTCCAGAGGTCTGTAAGAGCAAAGAAACACTTGCTAGTTGGTAACA
CTGTCTTGAGGTCTGTAAGAGCAAAGAAACACTTGCTAGTTGGTAACACTGTCTTGAGGTCTGTAAGAGCAAAGAAACA
CTTGCTAGTTGGTAACACTGTCTTGAGGTCTGTAAGAGCAAAGAAACACTTGGTAGTTGGTAACACTGTCTTGAGGTCT
GTAAGAGCAAAGAAACACTTGCTAGTTGGTAACACCGTCCAGAGGTCTGTAAGAGCAAAGAAACACTTGCTAGTTGGTA
ACACTGTCTTGAGGTCTGTAAGAGCAAAGAAACACTTGCTAGTTGGTAACACTGTCCCAAGGTATGTAAGAGCAAAGAA
ACACTTGGTAGTTGGTAACACTGTCCAGAGGTCTGTAAGAGCAAAGAAACACTTGCTAGTTGGTAACACTGTCCAGAGG
TATGTAAGAGCAAAGAAACACTTGCTAGTTGGTAACACTGTCCAGAGGTCTGTAAGAGCAAAGAAACACTTGCTAGTTG
GTAACACTGTCTTGAGGTCTGTAAGAGCAAAGAAACACTTGGTAGTTGGTAACACTGTCCAGAGGTCTGTAAGAGCAAA
GAAACACTTGCTAGTTGGTAACACTGTCCAGAGGTCTGTAAGAGCAAAGAAACACTTGCTAGTTGGTAACACTGTCTTG
AGGTCTGTAAGAGCAAAGAAACACTTGGTAGTTGGTAACACTGTCCAGAGGTCTGTAAGAGCAAAGAAACACTTGCTAG
TTGGTAACACTGTCCCAAGGTATGTGAGAGCAAAGAAACACTTGCTAGTTGGTAACACTGTCCCAAGGTATGTGAGAGC
AAAGAAACACTTGCTAGTTGGTAACACTGTCCCAAGGTATGTAAGAGCAAAGAAACACTTGCTAGTTGGTAACACTGTC
CAGAGGTCTGTAAGAGCAAAGAAACACTTGGTAGTTGGTAACACTGTCCCAAGGTATGTAAGAGCAAAGAAACACTTGG
TAGTTGGTAACACTGTCTTGAGGTCTGTAAGAGCAAAGAAACACTTGCTAGTTGGTAACACTGTCCAGAGGTCTGTAAG
AGCAAAGAAACACTTGCTAGTTGGTAACACTGTCCCAAGGTATGTGAGAGCAAAGAAACACTTGCTAGTTGGTAACCCT
GTCCAGAGGTCTGTAAGAGCAAAGAAACACTTGGTAGTTGGTAACCCTGTCCAGAGGTCTGTAAGAGCAAAGAAACACT
TGCTAGTTGGTAACACTGTCCAGAGGTCTGTAAGAGCAAAGAAACACTTGGTAGTTGGTAACACTGTCCAGAGGTCTGT
AAGAGCAAAGAAACACTTGCTAGTTGGTAACACTGTCCAGAGGTCTGTAAGAGCAAAGAAACACTTGCTAGTTGGTAAC
ACTGTCTTGAGGTCTGTAAGAGCAAAGAAACACTTGGTAGTTGGTAACCCTGTCCAGAGGTCTGTAAGAGCAAAGAAAC
ACTTGCTAGTTGGTAACACTGTCTTGAGGTCTGTAAGAGCAAAGAAACACTTGCTAGTTGGTAACACTGTCCAGAGGTC
TGTAAGAGCAAAGAAACACTTGCTAGTTGGTAACCCTGTCCCAAGGTATGTGAGAGCAAAGAAACACTTGCTAGTTGGT
AACCCTGTCCCAAGGTATGTAAGAGCAAAGAAACACTTGGTAGTTGGTAACACTGTCTTGAGGTCTGTAAGAGCAAAGA
AACACTTGCTAGTTGGTAACCCTGTCCAGAGGTCTGTAAGAGCAAAGAAACACTTGCTAGTTGGTAACACTGTCCAGAG
GTCTGTAAGAGCAAAGAAACACTTGCTAGTTGGTAACACTGTCCCAAGGTATGTAAGAGCAAAGAAACACTTGGTAGTT
GGTAACACTGTCTTGAGGTCTGTAAGAGCAAAGAAACACTTGCTAGTTGGTAACCCTGTCCAGAGGTCTGTAAGAGCAA
AGAAACACTTGCTAGTTGGTAACACTGTCCAGAGGTCTGTAAGAGCAAAGAAACACTTGGTAGTTGGTAACACTGTCCA
GAGGTCTGTAAGAGCAAAGAAACACTTGCTAGTTGGTAACACTGTCCAGAGGTCTGTAAGAGCAAAGAAACACTTGCTA
GTTGGTAACACTGTCCCAAGGTATGTGAGAGCAAAGAAACACTTGCTAGTTGGTAACACTGTCCCAAGGTATGTGAGAG
CAAAGAAACACTTGCTAGTTGGTAACACTGTCTTGAGGTCTGTAAGAGCAAAGAAACACTTGGTAGTTGGTAACCCTGT
CCAGAGGTCTGTAAGAGCAAAGAAACACTTGCTAGTTGGTAACACTGTCCAGAGGTCTGTAAGAGCAAAGAAACACTTG
CTAGTTGGTAACACTGTCTTGAGGTCTGTAAGAGCAAAGAAACACTTGGTAGTTGGTAACACTGTCTTGAGGTCTGTAA
GAGCAAAGAAACACTTGGTAGTTGGTAACCCTGTCCAGAGGTCTGTAAGAGCAAAGAAACACTTGCTAGTTGGTAACAC
TGTCTTGAGGTCTGTAAGAGCAAAGAAACACTTGCTAGTTGGTAACACTGTCCAGAGGTATGTAAGAGCAAAGAAACAC
TTGCTAGTTGGTAACACTGTCCCAAGGTATGTAAGAGCAAAGAAACACTTGCTAGTTGGTAACACTGTCCAGAGGTCTG
TAAGAGGGATGTGGTGGCTTGAGTGAGAAATACCCCCAAAGTCTTGGGCATTTGAACAATTTGTCTTCAGGTGATGGGG
TGCAGGTGCTGGCTAGTTTTAGGTCAAGTTGAGACAAATCAGAGTTGTTAATTGGGAACAAAGAACCTCAATTGAGATA
ATGCCTTCACCAGATTGGCCTGAGGTCCATGTTCTTCTTGATTGATGATTGATATGGGAGGGCCCAGTTCAATGGGGGT
CCCTTGGGAAGGTGGTCCCGGGTGCTACAAGAGAACAGCCTGTGTGAATCATAAGGACTAAGCAGTAAGTGGTGCCTCT
CCGTGGCTCCTGCATCAGTTTCTGCCTCCAGGTTCCTGCCTTGAATTCTTGCCCTGACATCCATGAATGGGTTACAAGC
TGTAGAATTAAATAAATGTCTCTTCTTCAAGGTGCTTTTGGTCATGGTGTTTAACCACAAAAATAGAAATCCTAAAACA
TCGGTGCTGTTTTGGGGAGGTTTAGGTAATGCTCTGTTGATGGTCAGATCAACGGAGTCTTTTCCTGAGGCTCTGATGT
ACGGAGAATGAACCTGCTTGGCAGACCCAGTAATGGCCCTGGGCCAGGGCTTTTGGGTGGGGATCTGTAGCTTCTGTTC
TCTTCCCAGCGTGTGGGGCTATGGTTATCAGTCCAAGGCCACTGTGTACCCGGTCTGTAATGTTCTTGAGATACCCCTT
GCTCCCCTTGTGCAACACTGTTTGATTACCTTCCTGTTGACTTCGTCCCTTCGTAGGACAGTTTCTGCTGACTTAGTCC
CATTTCTTCTCTCAAAATGGTGTCTGAGATGCTGTAGTTGCTTGTCCTAAGACATAGCTCGCATGAGACCTCCCGACCC
CAGATTTTCTCTCTATCTTCTTATCTAATGTCCATCTCCCGCTTAGGACCATGTTACTGAAGAATGACTCTCCGACCCA
AGTCAGTGCAGTCGCGCTTGGACAAAGCAGATCACTGGGGTTGGAGTTTAAGACTCAAACGAAACGACTTGCCTACTTG
CAGTTTGCTCTGCCTTGTGTTTGTAGTTCAAGAGCTGAGGAAGCTGCCAGCTGCTATGCTGCCCCGACCACTGTGGACT
CTGACCCTTTGGAGCCATTGTAAGTCTCCTTCAAGTAACAAGACAGTCATCCATGAAAGAAGCATGGACCAGTTGTGAT
GACTCATTGCTACAATCCAAGCATTTGCTAGGCTGAGATAGGAGGAACAGCACAGGCACTAGGCCAGCCTGGGCTACAT
AATGAGTTCCAACCCAGCCTGGCCATAGAGTGAAACAGAATCACAGAAAACCAAAGAGGGAGAGAGAAAGAGGGAGGAA
AGAGGGAGAGGGAGGGAGAGAGAGAGAGAGAGAGAGAGAGAGAGAGAGAGAGAACGAACGATGTTGGTGGTAAGGATAA
AGGTAGAATATTAACTCCAGAATCCTGAAACAACAGACATTGAAGCCATTGTTTCTGGAATGGGAATATATCTCACTTG
ATGGCGCCTACTCAGCCCAGAAGAGTCCTATACTCCTCCATCTTTCCTCCATATATAGGCTCTCATGGCCATGACTCAA
AAGCCTCTTAGGTTTCTCTTCTTTTTAGGACCTAGATACAATTGGCTTTTCTAACAATGTAGCCCCCTACATTTTTTGG
CAAGGAAGCCACTTTTTTCTCAGAGTGTCTCCTTACACGATCTACTTAAACACAGCCGGGAACAATCTACATGTGATGT
TGGCATTCTACTTTAGAGCCCTCTCCCTGGAACTCACACTGTCGGTAGGCTGTACTTTCCAGCTAGCTGAAGCTATCAG
CTTTCATAGCTGCTAGGCCACTTCAAGTTAGCTCTGTAGCAATAGAGGCTGTTTGCTAAGCTCTCTTGTATTTATACAT
ATTCACTTGAAATGCTGGGAATTTAAATATAAAACCCTTTAAGTAAAACAAACGAGCCCTTTTCAACTAAAAAAAGAAA
AAAAAAAACATCAAGGTGGGTGATACCTGAGGAATAACAGCTGGGGCTGGCACCTGACTGTCATATACTTGAGCACACA
TGTGTACCTGCACACATGTGAACATACATAACACACGCCTCAATAAAATGTATGTTGTGGTGGGGCTGCAGAGGTGCGT
CAGTGGTGAAGAGAATTTGCTACTCTTCCAGAGGACCCAAGTTTTGTTTCCATGTTAGACAGCTCCCAACTGCCTGTAA
CTCCAGCTCTGGAGATTTGATGCCACCTCCTGGCTTCTATGGGCATTACATTCATGTGCACAAACACACATAATCAAAG
TAAAAATATACTGTGTTAAATGCATAAACATATACCATGGTCATTTATCAGATCGCCTATAGACTGCTCTGAAGGGCAT
TTTCTTGATTAGTGATTGATGTGGGAGGGCCCAGACCATTGTGGGTGGTGCCACCCCAGGGGAGGTGATCCTAGGTGAT
CTAAGAAAGCAGGCTTGAGCAAGCAGTGGGTGTAAGCCTGGTTGTCTTTGGCCTCTGCTTTAGTTCTTGCCCTGACTCT
CCTCAGTCCTTGGTGACCTATCAAGTATCCTACAGATATGATGACAACTTCAGGACAGAACTGCATTTTAGACATCAAC
TGTGGCTTCTTTTTCACAGCTCTAATAATTTCTTCAAGGCACTGCAGGGTCTCATGTATCCCAAGATACCTCCTGCTTA
GCTAGGATGCAACCAGTGTTATATGGCCCTGAAGATGGAACCCAGGGACTTTTATGCTAGGCAAGTGCTCTACCAACTG
AGCTACATCCTCAGACCCTTACCTCCAATACTAAGTATTTCCCTTCTTTTCCCTAGTGGGCATTTACCTCTGCGCCAGT
GTTATCGATATCCTGTAAATGAAAAAAGTTAATGATACCTTTAAAGCAGGACCATTATAATCACTACAGTGACCAGCAA
CCCTAAATATATTGTACTTAAAAGAATAGAGTTTGTGTTGGGCGTGGTGGCATACCTTTAATCTCAGCATTCCGGGAGG
CAAAGGCAAGATCTCTTGAGTTCAAGGCCAACCTGTCCTACACAGTGAGTTCCAGGACAGCCAAGGCTATGCAGAAACT
CTGTCTCAAAAAATAAAATAAAATAAAATAAAGCTGGGGGTGGCTAATAATTCAGCATTTTATCAATAATTTACCCTTA
GCAACTTTTTTTTGTTTTTGTTTGTTTGTTTGTTTGTTTGTTTTTCGAGACAGGGTTTCTCTGTGTAGCCCAGACTGTC
CTGGAACTCACTTTGTAGACCAGGCTGGTCTTGAACTCAGAAATCCCGCCTGCCTCTGTCTCTGCCTCCTGAGTGCTGG
GATTAAAGGCGTGATCCACCACTGCCCCCGGCTACCCTTAGCAACTTTTAAGAGGTAACATAAGAATGGGGTTTTGGTT
AGAACCTAAGAGTTTTCTTACTGTAGATAGGCCAGAATAGTCAGATATTACCTGGGGACAGTGAAAAATGAGAAAGGGC
ATGAGCTATCAAAGGTGGCAGGATCTAACTGGATTTTTACAAGGAGAACGACCAGTAGTCAGACTACAGGTTTGGCTAA
GTAAAGATTCTTTGTCACAAAATGCCGGAAGTACACATCAGAAAAGAAAAAAACCAACTTCTGTAATAAACTGTGCCGG
GAAAATTGGATAGCCATACATAAAAGAAGGAAACTAGATCTTAATCTCTCTTGCGTTACACAAATATCAACTCCAAATG
GATTAAAGACCTTAATGTCAGAACTGAAATCCTGAAACCAAAATAGTCAAGGGCTTTCTGAATAGGGCCCTAGTTGCTC
AGGATATAATACGAACAACGGACAAATGAAATGGGATTGCGTGAAGTTAAAAGGTTGTGCACAGCAAAGAAAAATTAAT
CAAATGAATAAGCATACAGATGGGAGAAAATCTTTGCCAATTATACACCTGATAGAGGATATCTAGAAATACTTTTTTT
TGGGGGGGGGGGGGTGGAGTTTCAAGACAGGTTTCTCTATATAGTCCTGGCTGTCCTGGAACTCACTTTGTAGACCAGG
CTGGCAACTCAGAAATCCGCCTGCCTCTGCCTCCCAAGTGCTGGGATTAAAGGTGTGCTCTACCACTGCTCGGCTTAGA
AATACATATTTTAAAAGTCTTGAATGTGAATATAACCTAATCAATAATCTAGCGTGCCTTTCATCACCCAGTCTTCTTT
CCGTTACTGTTTTTGGCTTTGGTAAGGATTGATTGTTCATCCACTTTGGGGAGTCAGACCTTGACTTTCTTAACATCCT
CCCACCCACAAGCCGCTATTAGCTTCATGCGCTGCCCCGGCACCGTCAGGAGAACTCGCCACTGGACCCCCTCGCCCCA
CTTCTGCACGTTCTGGACTTAAGGCTGATCGGTCCGGCCGCCCGCAGGCCCTCGCCACGAACGATGAGCTGCGCCGCAG
CCGAAACTGTTGCCGCAAACCCAGACCCCAGAGCATCTCGGGAAAGCGTGCCCAAGGACCGCCCTCTTCCGACCGCTCC
GCTTCCCAGAGCGGGGGCCCCGATGACGCCACTTCCTCCGGAAGAGGTGTGGCGTCCGCTCGGTTGGCGCGAAAGTCGG
TTCCCGGTCTTGGCCCTTCCGGGTTCTGCAGCGTTAGCTTCGGGTTGGGGGCGCCGCCGAGGGCGGGGGCTGCGCGCCG
GGCTGGCGCCCGACCCCAGCCGCCGTCCTGCCGGCCGCGCGCCCCCCGACTTGGTGCCCGTGGGCCCTCGGGCTCCACC
TAGGTGAGCGAGCTTCGGCTCCTCCCGGCCGGCGTGGCCGCCCGGCGCCTCTTGCGGCCTTCGCGCCTCTCCTAACCGG
CGGGTGGGCCTCAGGTCCCTGGGGAGCCGCGGCCTGGACGCTCCTTTCCCTGGGAGCTGGGCCGAGCGTGCACGACCTT
GCACGGTGGCTGCTTGCGTTCAGAGTTCGTTAACTTAGGAGCAAATCTTGCGGGCTGTGGGTACCCGTAGCCGCAGCGG
CGCCCTGCGTCGTCTTAAGCCCCATGCAAGTGAACAGTGAGTGACTGAGGACCAAACCAAGGGTCTCAGGGGATTCAAT
CAGGAACGTTCATTTTGTTCTCACGTTTGCAAGGATCCGTGTCCTTTTTTTTCTTCTTCGACTTTGCCCACCTTCTGGG
GCCCTTTGTAAACATCTTGAATGAATTGATGAACCAAGCCAGATAGCTATGTCTTAGGCACTCTTGTCTGCATAAGAAA
ATAGTTGATTTGCAGGCCGGGCGGTAGTGGCACACTCCCTTTTTTGCCAGCTTGAGTGAGGCAGAGGCCGAGCATCTCT
TGAGTGCCAGGCAGACCTAGTCTACAGAGCGAATTCCAGGACTGCCAGGGCTTGTCTCAAAACTAAAAAAAAAAAAAAA
AAAAACCAAAAACCCTACAAAAATAGTTGACTTGTACATTTAATTCCCTGATTGACTGACTGACTTTTGTTCTTCTTGA
CTGCCTTATTCTCACAGTTCAGCTATGTCCAGAAATGACCAAGAGCCGTTTCTTGTGAAGTTTTTAAAGTCTTCGGACA
ATTCAGAATGCTTTTTTAAAGCTCTTGAGGTAAGAATTAATGGATATGTCTTATTTGATACTTGAGCTCATTTTCATGT
TTTAAATGTTTTTGCTTTGTTGGATTTTATGTCTTAGAAGTAGATAATTTTAATGAAATTTTGCTATAGCATATGCTTA
ATACAGATAAATCACTGCTATATAATTTTTAGTTGATGCAAGTTTACCATTATATTTTTTGGGAGGATTGAAATCTATT
GTGACAATTGGATGTTAACCTACAGTTTGATCCCCTACCCCCGCCCGGTCTGTGTCTGTTTGTGTGTGTGTCTGAGCCA
TCTTCCCAGTCCTCTGACTTAGAGTTCCTGACTTGTTTTGTTTACTAACCCCATTGATCCTTTAAGCACTGAAAAACGG
AGTCACAATGCAATAGTTTTGGTTCATTGCTTGCTCTCTCTCTTTCTCTCTGTCTCTCTCTCTCTGTCTCTCATACACA
CACACACACACACACACACACACACACACACACACACACATATTCATGAATGAATGAATGATGGGAGTAGTTTTGAGCT
TTGCCATTCACAAACCCTAGTAATGTCCTTGTAGCTTGGGAATCTATTAGAAATGCAGAGCCTTGGGATCCCAACCCAC
ATTTGACAATTAGAATATGCATTTTAAACAAAAGTCCCAGTGCATATTCAGGTTTGAGAAGTTAGCTGTTTTTTTTTTG
TTTGTTTGTTTGTTTTGTTTTTTAAAGTTCACTCACTTAGCAATCATCAATTGAGTGTCCGTCATCTGACAGGTTTTCC
TCTAGCATAATACTTGGGGTACACCAATGATCAGAACAAGCAAATATCTCTCCTCTTTCAGCATACATAGAACAGGAAA
TCGGTATTAATCAGGTGATAAGCAAGAAACTACACAGTATGGGGGCAGTGAAAGAGTTGAGACTGAGTCTCACAGTGTA
GCCCAGACTGATCTGGAACTCTGTGCTTCTGCCTCAGTTTCCTGCATGCTGAGATTACAGGTGTGTGCCCCAAAACCTA
GTACCTATGTAATGTGTTATAAGGGGTCTAGTACTGTGGGAAAATGAAAAAGAAAAAGCCAAAACAATTTAAGGTTTTC
CAGAGGATGTTTGTTGGAGGAGAAAGACATGGAAGGGTTACAGCTTAAAACTGAATTTAAAAAAAAGCAAACTATTTCT
CTTAAGATTATAGACTAGGGTCTTGTATAAGGTACTAGGTATCCGGATATGCTTATAAACAAAATACATCATGGAATGT
TCATTTGTGTTGGTGTGTGGGGATGGTGTTTATGTGGGTGCTCTTGTGCACATGCATTCGGAATAGTATCTGCATACCA
CAGTACATGTGTAGATGTCAGAGGACAACTTGAAGCAGTTGGTTCTCCTTTTACCCTGAGGTTCTCAGGCTGAATGGCA
GGCACTTTTACCTGATGAGCCATTTAACAGAACCAACACATTCCTTCTCACAGGGAAGAAATAAAACTATGTACATTTA
CAAAAAGAACCATTTTTTTTTCCTTCATAAAATGTAGTCAAGTGGTAGAGGGAGTGTAGTTAGAAAGCAGGATGACCAT
GGGAATATTGCTTAGTGGTAGTTGTATAGTGTGCATAAAAACCTGGTTTTAGTTCCCGGTGCTGCAAAGCAAACCCACC
GTGGTATCTAGAAAGATCTAGACAGGTATCTCTAGGAAGTGACAGTGAAGCAGGCGTTATTGCAGTGAAGAACCACTTC
CAATGAAAGCTTAAGAAAAGAGTAGCTCCTGTAGTAGGACCAGAAGCAGAACCGCTTAGTAGGTCATTAGTATCTTCCA
GGTGTACGGTTTGGGGATGACTGGAATTAGCCAGGAAGGTGGATGTAAAGATGAGACTTGAGATAAGTGAGGGCTAAAT
TTTATGATTTTGTAGTCATGAAGTTGTATGGTGCTGATGCATCTTTAATCCCAGCTCTTGGGAGGCAGAGAGATCTCTA
TGAAATGGAGGCCAGCCTGGACTACGGAGTTAAGTTCCAGGACAACCAAGGCTACACAAAGAAACCCTGAATGGGGGGC
GGGGGGGGGGGGGGAAGAATTGGGACTGATCCATGTGCCCTTTCTTTTTGTCCAGTGGTTCATTTCTGCTATATTCCTC
AGTTTCTCTCCATCTTATTTTTTTGAGATAAATTTCTCACTGTTGTAGAGCCCACTGATTTGCTAGACTGGTTGGCCAG
GGATCTGGTGGGCTCCAGTCTCTGGCACCCACCCCACTGCCCAGTATTGGGATTGTGAGTCCATGCCTCCACACTAGGC
TTTTTACATGGGGCCAAACTCAGATGCCCAAGCTTACACTGCAGGCATTTTACCCACTGAACCCTCTGCTCAGCTCCTG
GGTGGTTTCTTTAAAAGGATTACTAACTGTGAAGAATAGAGAGGAGACCAGTTCAGAGGCTTCTGCATGGGTCTAGGTG
AGAAGCATGCATGGGTCTAGGTGAGAAGCTTTATTTAATAAGGAAAGGGCTGGGTTTGAAATTAGCTCTGAGCACTTAG
TAGGACTTAAATTTAGGGTACTAATTTCTACTACAATCTTACTTGTTTTTTCTTTCAGTCAATAAAGGAATTACAATCA
GAAGATTATCTTCAGATTATTACAGATGAGGAAGCATTGAAGATAAGAGAGAATGACAAATCGCTTTATATCTGTGACC
GTTTCAGTGGCACTGTTTTTGATCACCTTAAACAGGTTTGCTGTTTCTAGAATACTTATTTGCTCTTTCACCCTCTCTT
TTAATCTGTGTGTACCTGTGCTTGTGTGTGATGTGTCTGTCTGTCTGTGTGTGTGTACATGCATGCGTGTGTAGGGTCT
CATTCTTCATGAAAACTATCATGAGTGCTACGAGTACCTTGGGATTCTTTGGGCTTGGGGTTCTTAGATATCTGAGCTG
CTTTATTGGCTGTTGCTTTTTTGAAAAGCATACTTGAATGTTTCTCAGTTGTTATAGCATAAGATTATTGCATTAAGAT
TGTATTTCTTGGGAAAGGTGCCCTAGTGGTTCAGGGCACGTACTTCAAGGGATCTGAATTTGATTCACAGCACCCATGT
CAGGTGGCTCATGACTGCTTATAATGCCGGTTCCAGTACCTCCAACTCCAGGTTTATCTGTACAAAATGTGTGTATACC
TACATAAGGATACATACATACATACATACATACATCATATAATTTAAAATAATAAAAAGTTTTATGTTGTAAGAGTTTT
TACCTGCATGCATGTTGGTGCACCATGTGCACACTTGATACGCTTGGGGGTCAGAAGAGGGCATTGGATCCCTTAGAAT
TGAAGTTACAGGTTGTAAGCTACTGACTAAGGTACTGGGAACCAAACCTAGGTCCTTTGTAAGAACAATAAGTGCTCTT
AACTTTTTAAAATTAATAATGATAATAATAAGACAAGGAGGAAAGTTTGTTTTAAGTGGTTGAAGTTTTGGAGGCAGTT
ATGAGCGCTCTTGTGGTTTTGCTTTGGAGGGTGCGTGTCTATTTAGTGCTTGCTTGAGAAATTATGTGATAGTCTTTTT
CTCCTAACATTTCATGGTTTTCTGCAGTAGCTGTTAGCTTCTGTGAGTAACTAATAAAATGTCCCAAGTTTAATTTTGT
GATTTTGTCCCAAACTTTTTACAGCTTGGCTGCAGGATTGTTGGTCCTCAAGTGGTCACATTTTGTATGCGCCACCAGC
AATGTGTCCCAAGAGCTGAGCATCCAGTCTACAACATGATAATGTCTGACGTAACTGTATCCTGTACAAGCCTGGATAA
AGACAAACGGGTAAGCACTGAAAGCAGCCGGGCTGCCCCCACCTGACTTACCCAGGGCTCAACAGCAGCAGGCCTCACA
CGTGGGGTTCACAGCTACAGGCCTCACACGTGGGGTTCACAGCCAGCAGACTTGTGCATGGCTCCCAGTGGTATTTTTT
TCTAAAGATTATTATATAATTCCATCATTTCCTCATCCCTTTTCCTCCCTCCAAATCCTCTCATACACCATTCCTTGCT
TTTTTTTTCAAGTTTTCAAATTTATAATCTTTTTTTCATTGTTATATGCATAAATATATACATAATCTTAGATAAATAC
AACCCGCTTAGTCTGCATAATGTTACTTATATGTATTGGTGTGCTCTTCCCTGGGGAAAGTGGAATATGATTGTAGAGA
CACTGGTTAAGTGCTTTGTTTTGATTTAAAAGAAAAGTTACTTTTTTTTCTACAGTCAGTGAGTTTTGTTTTAAATCAT
TTAATTTTTGCAGAACAGAAAATCTTTCAAGAAAGGATTCTAATCTGGGTGTTGTAGTGCATGCCTTTAATCCCCAACT
CTTGGAAGGTAGAGAAAGGCAGATTAGTGAATTCCAGATCAAATAGGGCTACATATTAATAAGACCTGTCTCAAAAAAA
AAAAAGGAAAGGAAAGGAAAGAAAAAAGAAAAGTGGCTGGCACCTTTAATCCCAGCACTGGAGAGACAGAGGCAAGTGT
GTCTAAGTTCAAGGTCAGCATGGTCTAAGGCCAGGATAGCTAAGGCTACACAGAGATGCCCTGTCTCGGGGAAAAAAGA
AATAATCAGAAGCAACATAGTTTTGAATTATGGAATTTAAAAGAATAAATAAGGTCACTTATTAATGATAATAATTCTA
CCTGAAAGTGTTTCTGTAGGTGACTGAGGGTGCTTAAACTTAAGAAGGCTATGATGTCATTAGCAATATTAATCTGCAA
GACCACATTGTTATAAATGTGGTTGATTAGAAAGTATTGTTAAAAAGTATGTGACTGTTCAAGAAAACAGTTCTTTTCA
GGTTTTTTGTTTTTTTGTTTTTAGGGGAAGGCTGTGGATTGAGCCCAGAGCCTTGTGCATGGTAGGCAAGCATTCTACT
ACTGAGCTACATCACCAGCCTACAAATAGCGATTTTTAAATTTAAAATTGATACACATCTTTCCAAAAATAATTACTTA
TTTTTTTTAGTAGCAAAAAACATTTGTATGTTTAGTCTATCAACAGTAAATGATACTTATGGGGGCTGGAGAGATGGCT
CAGCGGGTAAGAGCACTTATTGCTCTTAGAGAGGACCTGGGTTTGGTTCCCAGTACCTGCTAGATAGCTCACAACCATT
TAAACCTTCAGTTTCAGGGGGTCTATCTGATGCCCTCTTGTGATCTCCAAGGCATGCAAATAATGTATAGACATATACT
CAGGCGAAAGAAACACTCATACACATAAATTTTTTTAAAAAAATTACGTGATTTTTTTTTTTTTAAAATAGAAGAATTG
TTGTTTTCTCCAGCATTAACATATTTTCTTTTGGGTCTATAGGAAGAAGTTCATAAATACGTACAAATGATGGGTGGAC
GAGTATACAGAGACCTTAATGTATCAGTCACTCACCTTATTGCAGGAGAAGTTGGGAGCAAAAAGTACTTAGTTGCTGC
TAATCTGAAGAAGCCTATTTTGCTACCTTCTTGGATAAAAACCCTTTGGGAGAAGTCACAAGAAAAGTGAGGCACATTC
ATATGCTTTGTCTGTTTGAAAAAATGATGCATTTGGATAGTTTTGACGGTGTTTGGTTTTCATGGGGAAGCTTTATGGT
ATCTCTGGACTTGTTACTGAGAAACAAAACAGGGTCTTTGTTCATTTCTCCAGTGACAGTAGGGGAGATGGTCCATAGA
TTCAGCAGTGCCTAGAGGGCAAATGCTTTGATAATGAAGTTCTTTTCTGCATCAAATACATCTAAAATAATTCAGTTTG
GCTTTTGTGTTGCACTGTGTAATACTGTTCCCCAGTATTAAGATGGAGAATAAAGTACCTACTTGGGCAGCTCTGTTCC
CTGCTGGGTAGGGTGGAGGTGCAGAGAGGGGTAGAGGTAAGATTAATATACATATATGTAAGCCATCTGCTGAGAGGTG
ATCATTCCGTGTACATCGAGCCTATTTTCTGCACTGGGCTGGACATTAGATGTATGTAGAGATCAGAACAGGATAACAG
TTTACCTTATGGAGTTTGGAGGTACACTTCTGTTTTCCCTAAACTTGGGTTTATAGTAATAAATCCGGGTATCTGAATT
ATATCTGCATTCTGTGGCATTTTTCTGCACTTATTTCAACATTATTCAGCATGTACTCAGTACATTTCCTAGTTAGTAC
CAGCCTGGTGAAGTTTAGCACACCTACTTATTGTGGCAACAAAATGGCAGTACTATTGTTGGAACTCTGCCGAAAAGCA
TTCCTTTTACTTATCAAGAGTAATGGAAGAATGTGTCTGTTTTATACCAGACAACCTGTGTAAACGTTAGGTTTTTAAG
TACAGATCCAGTCTTATAATTCTGCCAAATGCTCCCCATTTATTAGCAAGGACTTAGGAGTTAATAGTGCTTTCTTTAA
GATAGTCTTGGGACTGTTGCTGAAATACAAGTTTTTATTAGAGACTTGGGACTGAGCTAGATGAGCAGTTAGTGTAATC
CTCAATGTCAGTTTTCCTTTCTGAAAAATGTTTATAGATCCTAAAGAATAGCAACTGAGCAGACAGGGAGAGCAGTAGG
AGCTAGCACGGTCTGAGTACTCGGGCTCAGTTGTCTCCTCTTCTTACTTTCTCCAGAAAAATAACCAAGTACACTGATG
TAAACATGGAAGACTTTAAGTGTCCTATTTTTCTTGGTTGCATTATCTGTGTGACTGGCTTAAATGGAATACACAGAAA
GACAGTCCAGCAACTCACGGCTAAGCACGGAGGCCAGTACATGGGACAGTTGAAGATGAATGAGTGTACACACCTCATT
GTGCAAGAACCAAAAGGTAAACAATGCCTTAGATGTGGTTGAGCGTGCAAGTCCTGTTTAAGCACTAATTCTCTGTAGA
CCACCTTGTGTTCTGATGTGTCATTGCCTTAGTTTATCTGGGTTTTTTTTTGCCTTTTAAATTCTTGAGAAGATAGTTT
GGGTCACAGTCTAGAAAAATTAAGGAACTGTCCTTGTTATTGTCCAGAATATGGAATAAACATAAAATATCAAAAGTTG
CCCATGATGTTTCACTACCTGACTTAGACCTTGATGAAAAAAAAACAAAACTCTTCACAGCATAACAAATATGTATAGC
TGAGTGGTATTCTTTCTCATGACTAACTTCAGAAGCTTAGTTAAGCACTTAGTGGGATGAATTGGTTTATATTACTGCA
TTTGGATTGGGGTGCGGGTGGGTGGTATGGGTAGAGTTCCCGAGTGCTGGGCAAGTGCTCTACCACATTTTCCAACTAG
TCTATGAACTAGAATTTCTTTCTTTCTTTCTTTCTTTCTTTCTTTCTTTCTTTCTCTTTTTCTTCTTTTTCTGAGACAG
GGTTTCTCTGTGTAGCCCTGGCTGTCCTGTAACTCACTCTGTAAAGTTTTACTATTGAGAAACTTTAAAATTATTACTG
TTTTTGATATTTCGGGAATTTTATTCTAGGGAATAGTTTTGCTAATACTCCTAAAATCAGGGTTAGGGTTTATACAAAT
ATATAAGAAGAGTCTTGCTGTATTTTTAGTAACTCCTTTGTGTTTGTACTGTTTTACTAAGCTACCTTGATAAGAAGCA
TTTGAGAGTGATTGTTAGTTACTTGATAATTGTCACTTGATCAGGAGATTGGTGTAATGGTTATGATAGGACAGTTACT
GTGGCTTTTCTCAATCTAAAGGCAGTCTGTTTATCTATTAACTATGTTTTAAGGTATGCGGGATTGAGCCTAGGTCTTG
CTTATGCTAGGCAAGTGCTTTCCCACTGAGCAATGACCCTAGTCCTGCTTTCTGTTGGAGACAGGCTCTCGTCAAGTTT
GCCATGCTGCTGTGAGATGTATGATTTTCCTGTCTTACAGAATATAGACTCTACCAGGCCCTGCTCCCTTGACTTTATG
GAGTACCAAAAGTTCTCCATAGAGCGGGGTGTCAAAGGAGGAGGAGGAGGCAGGAAATCAGGGCTACACATCTTTGTCT
AGTCAAAGATAGTATTTATTACGTTGCATACATTTATGGTATCTGCAGTTGTATTATATGTTCTTATTAAACAACATTA
ATAGCCGGGCAGTGGTGGCGCACGCCTTTAATCCCAGCACTTGGGAGGCAGAGGCAGGCGGATTTCTGAGTTCGAGGTC
AGCCTGGTCTACAAAGTGAGTTCCAGGACAGCCAGGGCTATACAGAGAAACCCTTTCTCAAAAAACCAAAAAACAGAAA
CAAACCAAAAAAACAACATTAATAATGTCAAGCATGATGGTGTCTTCAGTCCCAGTGCTTGGGAGGCATAGGCAGGCAG
ATCTGTGTGAGTATAAGTCCAACCTAGTCTATCCAGGCTAACTAAGCCTACAAATGAGACCCTATTCCAAAGCTGGTTG
GCTGGAAACTTGACTCAGTGGTTAAGAGCACTGGCTACTCTTTCAGAGGACCCTAGCTTGATTCCCAGCACTTATATGG
CAGCTCACAACTCTCTGTAGTTCCAGTTCCAGGGTGTCCAACACCCTCTTCTAACCTCCTTAAGCATCAGACATGCAAG
TAGTACACAGACATACATGCAGACAAAACACCCAGACACATTAAATAAGAAATAAAAAATTCGCTGGGCGTGGTGGCAC
ACGCCTTTAATCCCAGCACTCGGGAGGCAGAGGCAGGTGGATTTCTGAGTTCGAGGCCAGCCTGGTCTACAGAGTGAGT
TCCAGGACAGCCAGGGCTACACAGAGAAACCCTGTCTCGAAAAAAAAAAAAAAAAAAGAAAGAAAGAAAAAATTCTTAA
AGGTAAATATATTTACTGGTAAGCTTTAATCATTACTTTTGTTTGGAGTGACTTTTAAAAAAATAATTTACTATGAACT
AACTATATAGTCTATGTATTTCTGTATTTCTTTCGTAATGAACACAGGACAAAAATACGAATGTGCCAGGAGATGGAAT
GTGCACTGTGTGACCCTGCAATGGTTTCATGACAGTATTGAGAAAGGCTTTTGTCAGGATGAATCTATATACAAGGCTG
AAACCAGAGTAGAAGCAAAGATGGTGCCTGATACTTCAACACCCACTGCTCAGAGCAATGCTGAAAGTAAGTCTCTTTG
AGATTAAAATAAACAATTACTTGTTCACATGATAATTGATTGACTGGGGATGTAGCTTAGTGGGAAAGCTTTTGTCTTG
CAAGCCCAGGAACTCAGTCTTAAACACCAAGGAAAAAGTGAAGGAGTTGATTTGTTAACAGGACCATAGGAATATAGTA
GGGACTTTATTTTCTCCCTTTGCCCCTGGGTAGAATTAAATAAAATAGCCATGCGTAGACAGCTTTCCAGAACTTCTTT
TGTATGCCTTTTGGAATGAGAGATTGCTTTCTTTCACATCCTAATTCACACAAGAGGGGATTAAGAACACTAGTGTATG
GGCTTAAGGGAAGAGTTGTTCGCCCCTCTCCACATTTGTTTGCTTGGTTAATTGGTTTTTCAAGACAGGGTTTCTTTGT
ATAGCTCTAGCTGTCCTGAAACTCCCTCTGTAGATTGCTGAGCCCGGCATGGCCCTGGTGGGGACAGTTCTTGCCCCTG
GGACAAGACCCGGTGTGGGCCTCCTCAAGTGTTGATGGCTGGTGGGTAGAAGACTTGTTGTGTAGTAATGTACGTATTT
TCTGGACCAGCAGTGGGCGAGTCTTTCCTTCTGAAGAATGTCCTCCCTGTTAACTTTAATGATTCCATGATAATTAGAA
ATAGAGTCCAGGAGAGTGTGGCTGTGTCTCGGACCTTCAGGACAGCCCTTAAGGATATGGGAAAGAACTCTAAATACGT
GAGTTCAAAAATGTAAGGATGCAATATGAATTATGAGGGGCTTCACGAATCTAAAGGAACAGAGATAGCTACACTATGA
GCCTGCTTGTCAGAAAGATACAAAGGCAGGCGGATACAAATGTCCCAGGCAGATTCCTGGGACACAGCAAGATTAGGTC
CAAGTGTGGTTGAAATGATAATTTCCAGTTCTACCTAGCTAGTTTAGCATCTGTGTGTAAGAAACTAGCAGATCTCTGA
ATTCTTTTGCAATGTTAAAAGAAAATGTGTTTGTTGTCTCCTAAGAAACAAAAAAGTCACTGATGCTGATTCATAGGAT
AATTAAAAAAAGGAACCTGGAATAAATAACTGAATTGTTATGTAAATAAAAAACTGGGCTTTTGGTCTACCTGATGTGA
ACTAGCAGAAAGCAGTAGCAGATCCTTTTTAGAATTTTCTCTAGTGAGAGCTCTGGAGAACAAAAACATCTCTGCAAGA
ATTTTTCTTAATTTTCCAACTTGGTAGGAAGATAAAATAATTTTTTTATAGCAGTTTTTCTGACTATGGTCAGAAAACC
CATGAGCTATCCAGATAGCTTTTAGAATTTTTCCTAGCAGAGAGAACTGTCTCAACCAGAGTTTTTAGAATAGTGAGAA
AAGGCTGTCCAGAGCAGAGCAGAGCACATACACACTCATACACACACACACACACACACACACACACACACACACACAC
ACACACACACACACTAACTCTCACACACTCACACACTCAGACTGAGAGATCGAGCAGTCTGGAAAGCCATCTCAGCAAA
ACCTAGGCTGCCAGCTTGGACCCACAATTAGACTTCGAGTTGTTCTTTTCGCTGCTCTCAGACACTACTTCTCTCAGAA
CCCCTCTCTGCCAAGGCTAGTCCCTGGCAGTAGATCATTGAGCTGGCCTCAGATTGAGATTGCGTCCACTTTCTGAGCA
CTGGGATTAAAGGCGTGTCCACCATGCCCAGCCTATATTTTCTGTATTGGTTTACTGTAATGATTATAAATCATTACAT
AAAAATTCGGCCTGCATGAAGTCCTGAGTTTGATTACCTTTTGATTACTACTACTGCATTATAAAGCTGGATGTGGTGG
CACATACCTATAATACCAGCACTTGAGAGTTGGAGATGGAGGGATCAGAAGTTTAAAGTCTTCTTTGGCTACAAAGAGT
TCAAAGCCAACCTGGATTTGGTGAGACTCTGCCTCAGAAAACAAAACAAAAGGCCAGGGACAGTGGTATATAACCTCAG
TGCCAGCACTGCGGGCTGAGGCAAGTTCGATGTGGTCCTGATCTGGGTAGTGCAGTCCTTTTCAGCCTTCCTAATGCTG
TGACCCTTTATTACAGTTCCTCGAATTATGGTGACCCCGACCATAAAATAATTTTGTTGCTACTCTATAACTGTAATTT
TGCTACTGTTATGAATTGTAATATAAATATCTGTTTTCTGGAGGTCTTAGGTGACATCTGTGAAAGAGTTGTTTGACCC
CCAAAGGGCCTCAACCCACAGATTGAGAACCACATGCCCCTACATCCACATGCCACTCTGATGTGTCAGCTAGGCTAGC
ATATTCAGTCAATACTGAGGTCTTATTTCGGAAGTTCCATTTAGCAAAGTCTTCCTCCTTGGACCTTAAAGCCAGCCTT
ATGGGCTATAAGCCACTTTAAGGAAATATTAAATATAATTTCACCTAAAGAATGAAACTTTATAGCCGGGCATGGTGGC
GCGCGCCTTTAATCCCAGCACTCGGGAGGCAGAGGCAGACAGATTTCTGAGTTCGAGGCCAGCCTGGTCTACAGAGTGA
GTTCCAGGACAGCTAGGGCTACAGAGAAAACCTGTCTCAAAAAACCAAAAAAAAAAAAAAAAAAAAAAGGATGAAACTT
TTATTTTTTTTTTCAGTAAAAATCTCTGAATTTTTGTAGGTTTATGCCTTAAGCCCTTTCTAGGAAAAGTTAGTTTATT
AGGAAGCAGGTAATGGCTCTTTTACCTCAGGAATTTTCATTTCCTTTCACATTTTAGGTCACACGCTCGCAGATGTCAG
CCATATATCCAACATAAATGGCAGCTGTGTAAATGAAACAATGTTTGGTTCAACTACTAGCAAACTTGAATGTTCCCTT
GAAAACCTAGAAAATCTGGACATCAGTATGTTTCAAGCTCCTGAAGACTTATTAGATGGCTGTCGGGTATGTCTTTATT
ATGTAACAAAGTCAGAAGGACAAATAAGAGACCTGAGTTTAGGGCTAGCTTGGGCTACACAGGTCCAGACATCCATACA
CCCTCAGCCTGACTCCAAAGACCCCTCACAGATGGACTTGCTCCTTATGTGCGTAAGCAAACCTTGCACTAAATTAGGA
AGCTGACACTTGGCACACACACGCTGTGCCTGTGGGTCTGTCTGGGCTGTAGCTTCATCCCTTCTATTGCTGAGTTCTT
AAGTCTGCTCTGAAACCTTACCGCCTACTTTACAGATGTTCATCCTTATCATTTGTTTACAATACATTAATGACGGTGA
TCATTTCATGTTACATTATGTTATTTAAAATATAACTTAATCCCCATGAGTAAAGTGGTTATTATCTTGAAGCTAATAC
TTAGATGATTAAAATCCATTTTTAGGGCACTTAGGCTAACGTGCTTGTTGCTAAGCCTGACAGCCTGTGCTCAGTCCCT
AGCACCCCATGTGGTCGAAGGAATGAACGTAATCCTGTCCTGTGACATGTACTTGCGCCACGCCCACACGTGTATATGT
ACAAGACTTAAATACAATAATGTGCTTTCTCAGAGTCCTAGACAGATAATACTGTGGTCTTAAAGTCTGCCTTCTTAAT
TGTGTACAAGACCTTGGGTTCAGTGCTCAGAAATAAAAAGAGAAAAAGATTAGATTTGTAAGATTATTTTCAGTGTGTG
CATGGAAGCTCCGTGATGGAAGTGTCGCGTATTTAGACCCACACACCCCACACAGTGCTAGGAGGGGAGTGAGAAGCTA
CACATTTTTCCTCAGAGTAGGCAGTTAGGTTTATTGTTAAGGCCACATATCTGTGATCGCTCCTAAGATTTATCAACTT
ACTGGTGGGATAGAACGACACTTTGTGTAATCTTTTTTCTTTGATCTTGGGACAGACTAGTTCTAGATGTAACTTTGAA
TTTTTTTTTTTCTATGTAGGAAGTATTTGATTCCTAATTTTTGCTAGGATGTATTCTAGTAATGGTGATAGTTTGGGAC
ATGTGGAAATAGATTGTCCTTTTTGAAATTTTTTAAAGACTTGAAATTTTTAAAAGACTTGAAAAGTAATGTCGGCTAT
CCCTCACATCTACAACCCCTGTACACATGTTTCTTCAAAGCATTGGGCTCAGCTCCTGGATTTGTTGTTTTGGTTAATT
CAAGTCGAAAAGAAATTTCAGGAAAGATAACTATGTAGGAAGGAGTTGGCTCCGAGCCTTGAGGAGTTTGCTCAGTTCA
TATGGTTGGTCAGTACCAACTGAAAACATGCAAGCCTGGGTGCTCCTGAGTTTACAGTGAACTGCAGTGTTTCTCTGTA
ATTATTCATCTACAGGCAGTCACTCCTTTACAATTTAAGGAGCTATTTGTATGTTAGAAATAGCTCTGCCACCCACCAA
ACCTGATGACCTGAGTTCCATTCCTGGGACCATAAGGTAGGAGAGAACTGAGTCCCTCATGTTTTCCTCTGGCCTCCAT
ATATGTATTCTGACACCTGTGCATGTGCACACATATGTACACACACACACACATATACACACAGTGAAAATCTTATAGC
AAGCTGTGCACCATCATTTAGAAGATGTTGCAGTTTGTCCTGTAATTCATCTGCGGCCTCAACCCTCCTTCAGGTTTTT
ACTGAGAGATGACAGTGCTGTGGTTAAAATACCAGTTTTAGGCTGAGGAGATGGGTGAGTGGGGCAGGCACTTGCTGTG
AAAACATGGGGGCTGAAATTTGATTCCCAGCACCTATGTAAAAGCTGTGAGTGATGGTGTCCAGCAGTGGGGGGTGGAG
GGGAGCTAGCTGCTAGTGTGTGTGCACACATTAGATGTAGACTATAGTTGACTCCATGTGTATCCCAAAATGTACATGA
AGTATCTTGTTTACACACAGTGGATACAGTTTTCCTTTAAATTTGTTTCTGTTGAGGAAAAAAATAACTTGAGTATGTT
AATCCAAAGCAAATGTTTTCTTTGCAGATATATCTTTGTGGTTTTAGTGGCAGAAAGCTGGATAAGCTGAGAAGGCTTA
TTAACAGTGGAGGTGGAGTTCGATTTAATCAACTAAATGAAGATGTAACTCATGTAATTGTGGGAGATTATGATGACGA
CGTGAGGCAGTTCTGGAGCAAATCATCTCACAGGTCCTGTCAGTCTTCAGCTCAGAGCACTTGGTACAGGGATGGTTTG
GGTTAGCTTTGCATGTCTGTGCGTGGAGCTGTGGGAATGATGGCCAGTGGAGTGACGATCTTCTACTCGGGAGCCTAAC
TCTGCTCTTTTTATAGGCCTCACGTAGTGGGAGCAAAGTGGTTGCTGGAGTGTTTTACTAAAGGATATATACTTCCTGA
AGAGTCCTATATCCACACTAACTACCAGCCAGCTGGAATTGCAGTTTCCGATCAGCCTGGAAACCAGACAGCTGTCTTA
GACAAGAGCGGCTCATTCTCCAAGAGCGCCCTTGTTCCTGCTGAGAGGCTTCAGCAGGCCGACGAGGATCTGCTTGCTC
AGTATGGAAATGACGACTCCACGATGGGTGAGGAAGAGTTGATTAGCTTTTGTAGTTAAGAAGCAATAGATAATGCATG
ATAGCTGCCATATTTTTATGAACATTTTATTTTCAAAAACTTTTAGATTTGTAACTTTGTAACCAGGCAAGGCCATCAG
GCTCCAAATGATTGAATCATGCTCTCAGTAGCTCTATGTTGAGTATGAACTGTTTTTGTTTGGGGTGTGTGTTTGTGTG
TGTGTTGGTGCCAGAGGTCAGAGGTGAGACCCTCATGGAGCTAGAGTTACAGGCATTTGTGTCTAATGTGGGTGCTAGG
AATAGAACTCGCGTACTTTGTAAGAACTGTGCATCCTTTTAACCTCTGAGCTATCTCTCTGGCACCTCTGTGTGAATTG
TAATGGTAGAAAACAAAGGCCCTCTGACTGGGCTGTCGGAAGTCTTTCCTGCATGCAATACTGTTCCTGGTACTGCTGT
CTCAGCGTATAGTTTCATCGGTGTAGTAAGGTAAATTACCAACAAAGAGTTAGAACTAACCTTTTTAGAGTGTATTATT
TGATACATCAAAAGATAGGGTTTTGTGGTGACTGTCACGTACTGTTTGTTTATGAAAATAGAGCATACCCCTGTGCCAA
GAGCATTCCTGTGAAGTCCTCCTGTTTTTCGCTTTCTAGTTTGTGTCCTGTGTAGGTTTATAGATGAGCCTTTGGCCTT
CGTGGCTAGGTTGTTTAGTTGTTTACATTGCTTATTGCAATGCTGAGGCTGACTCAGGCGTAGGCTCTATCACTGAGCT
GTTACTCTTTTTATTTTTAATTTTAAGGCTTAGTCTGCTCTTGGACTTCCTCCGTGAGGCAGGTAGATTTTGAACTTGG
AGTCTTTCTGCCTCAGCTTTCTGAGTAGTTGGTTTTTCAGGCCTCTTCTACTAGGGCTGGCTTCAATTTACATAAAGTA
TATGTACTTTGTAGTTGTAAAGACATAGTTTTCAGTTCTTTTTTTTTTAAGATTTTATTTCTTTTAAAAAAAGATTTTA
TTTATTTTACGTATATGAGTACTATAACTGTACAGATGGTTGTGAGCCTTCATGTGGTTATAGGAATTGAATTTAGGAC
TTATGTTCGCTCAGTTCAACCCTGCTTGCTCTGGCCCAAAGATTTATTATTATATCTAAGTACACTGTAGCTGACAGCT
GACTTCAGATGCACCAGAAGAGGGCATCAGATCTCATTACGGATGGTTGTGAGCCACCATATGGTTGCTGGGATTTGAA
CTCAGGATTTTTGGAAGAGCAGTTAGTAGTGCTCTTACATACTGAGCCATCTCATCAGTCCCCAGTTTTCAGTTCTTTT
TGTATGTGTGTGGTTTTTGTTTTTTGTTTTTTTTTGTTGTTGTTGTTTTTCGAGACAGGGTTTCTCTGTGTAACCCTGG
CTATCCTAGAACTCACTTTGTAGACCAGGCTGGCCTTGAACTCAGAAATCCATTTACCTCTGCCTCCCAAGTGCTGGGA
TTAAAGGTGTGTGCCACCACTGCCCAGCCAGTTTTCAGTTCTTATTGAATTTTAATTGTTTAATTGTGGAAAACAAATT
TTTTTATTATTTTTCTAAATCTATTCAGTGGTACACATTTGAGTTTCAGCACTTGCGAAGCAGAAAGAGGCAGAAGGAG
CTTGAGGCCATCCTGGGCTACATAACAAGCTGCAGACCAGCCAGGACTAGAGAGACCGTGTCTCAAAAACAAAACAAAG
AAACAAAACAAAGCATGTTTACTAGACGGTGATTTTTCAGGAAATTTGGTTTTCTACTCTGGTTTCATACTTAGAATAG
ACATGACAGTTGTTCTCTGATTGACGATGGTGATACTTAGCATTTGGGATAAACCTGAAGATGGAATGAATACAGAGTC
TCCTTTCACTGTATATTTAAACCTAAGTTTTATAAGTATTAAAATTATCAGACTCTTACATTCATGTCTTTGCTAGAAA
ATCACTGTGTAGCTTTGGTTGATTTGGATATTGCTGTGTAAACCAATTTGGCCTTGAACTGACAGAGATCCACCTGCTT
CTGTTTCCCAAGTATTGGGATTAAACCTGTGCATCACCACACCCTGTGCAAATAAACTCTTTTTTTTCTTTCTATTATT
CACTGTACATCCCAATATCCATCCCTTTCCTCCCAGTCCCCTCCATAGCCCCTATTCCCCGTCCCCCATTCCCCCTCTC
CTGTGAGATGGGGGACCCCCACCCTCCAATCATCAATCACCCCATCATGGCACATCAACTCTCTGCTGCACTTGGTGCG
TCTTCTCCCACTGAGGCCAGACAAGGCAACCCAGCTAGGGGGATGGGATCCACAGACAAGCAACAGATTCAGGACATCC
CTGACTCCAGTTGTTAGGGGACCTGCATGAAGATCAAATAGCACATCTACTACATATGTTTGGGGAAGCCTGGGTCTAG
CCCATGTTGGTGGATTTTTGGCTGGTGGGAAATAAACTTTGTTTTGTTTTTTCTCAAGACAGGGGGAAATAAACTCTTA
AGTCTAGTAATTGTCAAATAGAAAACTTGCCTTTTTCTTTTCCAGTTGAAGCTAAGCTATCTGAAGCTTTAGAGCCTGA
AGTCGGGCCTTGCCCTGGTTCTGCTCACCGTGAGCCCTGTGATGATTCCACTCACATTTCTGTGCAAGAGGAAAACAAG
TCGTCTGTCAGTCATTGCATCCTTGATGACTCTACAGTTCGTGAAGAAGGCTTATTTAGCCAGAAGAGTTTCCTTGTTT
TGGGTTTTAGTGTTGAAAATAAATGTAATATTGTAGACATCATAAGAGAGCATGCTGGCAAGATTGTGTCCCTTCCCAG
CAGAATTGTTGCTGACTATGCTGTGGTTCCACTGCTGGGATGTGAGGTAGACGTGACGGTGGGAGAAGTTGTTACAAAC
ACGTGGCTGGTAAGAAGCTGTGGCAGTCGGAACCCTGTTTTGAAGGAGTATTGGCTGCCAGAGTCTTTATGTTTACTTT
TGAGCCTGTTCTGTTTATCTAAATTGGCATTTGGTTTGGGCAACGGCAATTTTAAAACATTAGCCTGGGAGAGCAGCAG
GATGGCCCAGTGGGTAGAGGCCCGAGCTGTGGGAGCCTGAGCACCCGAGCCTGAGCCCTAGACCCTGGTGGGAGAGAGA
ACTCCCACGAGTCCTCTGACCTCCGTGCTGCAGACACTTTCTCTCCCTCCTTTTCCTTTTGCTGTGCCCCCTCAAATGC
ACCGGCTATACTTCTGGCCTCAAACTCAGAAATCTGCCTGCCTCTGCCTGAGTGCTGGGGATTAAAGGCGTACACCACC
ACGCCCAGCCCAAACCTGTATTTCTTGATCCTAATACTAACATCAAGAAGTTGCTATCACAGGGCTAAGGCACCAGTAT
TCTTTAAAGTAACTTGCAATTGCTGTATTAATCCATCTTACTGATTTTGATATGCAAATGTGAAGGATTGGTATCTGTA
TTTTTCTTCAAATATCATTTGGAATATGTCAAGAATGAGCATACTCAAGTCTATGTAAAATTCCTTTTTCCTTAAACTA
AAATTGCTACTATTATAACTTGAGCTTCTCTTAACCACTTGTTTCTGATAGTAGCTTTATTGCTTTTGTTTTCAAAGGT
TACGTGTATAGACAACCAGACATTAGTTGATCCCAAGTCGAATCCCCTCTTCACACCAGTCTCAGTAATGTCGGGAGTG
ACTCCTTTAGAGGACTGTGTGATTTCCTTCAGTCAGTGTGTGGGAGCAGAAAGAGATTCCTTGGTATTCTTAGCAAATC
ACCTTGGAGCAAGGTATGTAATATTTTCAGTATATCTCCTGCCTGTGAGTGAGTGTGCATGCACACACACACACACACA
CACACACACACACACACACACACACACACACACACACACACACACACACAGTGTTAGGCAATAAGCGGAGGGCCTTGTA
CATGCTAAGCAAGGGCTCAACTATGGCAACCCTAACTGCATCAAGTTTTGTTTGTTTTGGCTTACTGGAAAGTGTATAA
TTACATTTGCCTAGGATTTTGTTTGTATATGTGGTTGATGGGTAAATACTGGGGCATACACAGCTAGGTGGATATCTGG
CAAACTTGCAAGGCTGTGGGCAGGCATTGTTTTTTTTTTTTTCCCCCATTGGCTTAGTCACCATGAAAGGCTGTTACTA
AATTGTGCTTCTCTAAGCACTGTATGTGCCCTTCAGTGCCTCCTCCTCTTCCTTCTCTTCCCCCCTTCTTCCCCCCACC
TCCTTTCTCTTTCTTATTTTAAGTGTATATCTATTGCTTGTTTTTATCGAGAAATACAAATGGAGCACTTTTTTTTTTT
TTTTTTTTTTTTTTGGTTTTTCGAGACAGGGTTTCTCTGTGTAGCCCTGGCTGTCCTGGAACTCACTTTGTAGACCAGG
CTGGCCTCAAACTCAGAAATCCGTCTGCCTCTGCCTCCCGAGTGCTGGGATTAAAGGCATGCACCACCACACCCGGGGC
AAATGGAGCACTTTGCAAGGAATGCAAGGAACACTTTGGAAATAAAGGAATTAAAAGTTTCCTATAAAATCCTCATTGG
TCATTACGTAGTAGCATTTGAAAAAGAGTAGAAATCAGCTGTATCAATGCATTTCCATTAACCAACCTCATATTTAATG
GGGATATTTTTAGGTTAAGAGCATAATGAGCATAATGCTTTTAAGCAACACTCTGAACATTCTGAGGGGTAGAGTCACA
GCAGGGCTTCTCTGTGTAACCCTCTCTCCGTAGACCAGTTTGGCCTTGATCCAACTCAGGTCGGCCGCTCTTGCCTCTA
GAGTCCTGGGATTAAAGGCGTGCACTGCCACCACCCAGAGTATGTTTCTCTGACATTAACCATGCTATTATTTTTTTAA
AATGAGCTAATTGTGTGTTCATTTGCTTTATTTCCATGTAAAATTTTAGTGTTCAAGAATTCTTTGTTCGCAAAGCCAA
TGCAAAGAAAGGCATGCTCGCCAGCACACATCTTATAGTGAAGGAACCGACTGGTTCCAAATACGAAGCTGCAAAGAAA
TGGAGTTTGCCGGCAGTTAACATTTCATGGCTCTTAGAAACTGCGAGAATCGGGAAGAGAGCAGATGAAAACCATTTTC
TGGTTGACAACGCACCTAAACAAGGTTAGAAGTCCTTGTTTTTTTTTTATGTATTTTACAACTTGATGGTTTCTGAAAT
AGGGATGTTCCAGTACTTGCTTTAAAACATTTGTATGACCCTAACCTCAGTCAGTGGTGCTTACTTCAGAACCCCTGAG
TGAAACACGGAAAGCAGATCAATGAAGAAGCGCATCAGGGTCAACCCTCGATTAGTCCTCAAGGCGAGTGACGAGAAGG
TGACCCCCGAATGGCTGTTAGAAGCAGTTTTTATACTTTTTAGTGGCACAGGTTACATCAGCAAGGTAACAGTTCATAC
TTATTGCCTAAGCATATTGACCTTAAAATCTATTGGCTAGCAAGCATGACACACATTTGAACTCTACCTAGGACTTTCC
AGGGGGTCCGATGACTATGAGTCAGTACGTTCTGCTGTTTTTCTGAGAATTTTTTTACTCCAGGATGTTCCTGTGGGTG
AATGGAACTTGGCCTAGCTTTGACCCCAGGTGAGAGGGGGAAGCTGTAAGGAGGGTGTGAGACTGGAAAAGCCCTTAGG
GTCCCTCACAATCTTTTATTTCTGCTATTGTTTATGGTAGGTCCTGTGAGTCTTGGTTGTTTGTCAGTGGTGCCATCTC
TCAGCTTAGTGTGTACTGTACCAATTGTTGTCAGTACGGCCTGAAAGGAAAGTGCACACACAGTCTAGTTCAGTGCTGT
GCAAGGCGTGAGCCTCTATCCCAGTTAGTGTTAATTCCTTTTATGGCTTGCGCTAGCATGCTGGGTAGCTAATGTGCTC
TTGCTGCTTATCTGGGTTTTTCGTATGTTCCCACAAGATAACTTACGACTTGGCTACTGTCCTAGTTACTTTTCTATTG
CTGTGATAAGGAACCATGGCCAAAAGCAGCTCGGGAAGGGAAGCATTTATTCCAGCTTACAGTCTGTAGTCTGTCACTC
AGGTAAGCCTGGAAACTGATGCGGAGGCCATGGACGAGTGCCGCTCACTGGCTTATTCCTTATGGCTTGCTCAGCTTGT
TTTCCTTTACCATCCAGGGACCAACTGCCCAATAACGTACTGCCCATAGTGAACTGGGCCTCCCAAATCAATCATCAAT
CAAGGAAACATGCACAGGCCAATCTGGTGGGCGTACTCTCAGTTAAGGCTCCCTTTTCCCGAGCCTGTGGCTGGTTGTC
GTAAAACCAGCCAGCACAGCTATTTTCCTTTGTCTTGAGTTTGAATGCCCCTTTCTCTGGGATAGATGGCTTCTTTGAC
TTAACAGTTATGGCCTTGTCTCTTCACTTTTCTCCTTTTTGTAGGATTCTTGTTGCTTAGAGAGGCTGGTTTGCTTTCT
TGTCTCAGTCAAACTATAAACTATAAAGGCAGGAACTGTGGAAGTCCTGTGGATTCTTTACTTTTATTGTTTGGCAATG
GGCGTGCTGTGAAGTAGTCAAAAACGTTTTGTTTAATGTTGGATAACAGTGGAGAAGGCAGAGATGGGAGGATGTGAAC
AGCCTCTGAAAGGCAGTGTTGCTGGGCAGACTGCAGAGCCCAGTCAGCATCCTGGGAGCACCTGAGAGCTGTTAGCTGC
TACCAAGGCGGCCTAGACATGTTCCGTTGCCACAGCAGACTAGCTCACTAGACTTTCCAAAATTTTTGACTACACTTAA
TTCTAAAGACATCTTTCGGGAATTTTCTTCTTACTGTTTTGACTAGGTTAATACACTGTTTTGTTTTGTGAATGGATTT
ATAATTATTTGTTTCACTTAATGTGTGTGTCTGATTCAATATATACATTCATGTACACATACATTCATGCACACATATG
TACACATATGTGTATGTGTGAGTATATTTGTGTATGTGATGTATGAGTGTGCATGTCTGACCACAGGTCAACATGGTGT
GTTTTCTCTGTCATGCTCCATCTTGTTTTTAGAGTCAGGGTCTCTCACTAAACCTGGAGCTCACTGATTAGGTGAGCTC
CAGGAATCTGCCTGCCTACACCACTGCACCCAGCTCTCCTTGGATGCTGGAGACCTGAATTCAGGTCTTCATTCTTGCA
TAGTAAGCACTTTACTCACTGGGCCATTTCTCCATTCATCACTGTATATTTTAATATATCTTCTGGAGTCAGGGGCACA
TCTCTGAAGCCACACTTGAAGAACACTAGTGAGGATGAAGCAGGGGGGTCACATACATGTGTGTCCAGCCTATGTTCTA
TGGAATGCATTCATACAAAGATGGCTTTGACTGTAGCCCAACACAAAATCATAAAATACCTGGGTTGTTTTTTGTTGTT
AAACCCTGATTGTGATCTTCTCTTTGTAGATGACAGTGTTCTGTTGCAGTGTCAGTCAACAGGTTCCACGCATCTGCAA
GGCTTTATGAGACCTGTCTCAAAACAAGTTTATCTGGTTTGTTTTTTGGAAAGTAGGAATATAACTTTATGGTTTAAAG
TGTACTGAGACAATATGTAAAATCTAACAAAATACTAAAATGTCACTTTGCCTCATATGAGAGAAAAGGCTCATATTAA
TGGCTCATTTGTTTTTTGTTTTGTTGTTTTTTTCATTTTCAATTTGTAGAACAAGTTTTAGAAACTAAGATACCAAATG
GAGTGAGTTCAAATCCAGATTTACCAGCACATCCTGACGCACACTTGGAAATTCACAGAAAAAAGGCGGTTACACCTTT
GGACATGAATCGCTTTCAGAGTAGAGCCTTCCGTGCTGTCATTTCACAGCAGAGGGGGCAGGACCCCACCTTTCCACCA
GTACGGCAGCCCCTTACTAAGGAGCCCTCTTTACACCTGGACACACCATCAAAGTTTCTGTCCAAGGACAAGCTTTTCA
AGCCATCCTTTGATGTGACGGTAAGGTTTGAAGGAAATGTTACTAGTGCTAATGGTTTTATGGTTTATAAAGGTAGAGC
CCCAAATTGTGCGTTACTACTAAAGTTTGTAATAGAAAGTCATCCAGAGATGTTGATAAATGGGCGCTCAGAGCTGAGA
TAACAGCTGTGCCTATATAATATGAAGTTAGGACTCTGGGTTTGCTCATGAACACAGTTCTAGGCAGATGACTTAACCT
CTGAATATCACTCTGAAATGAAATAGTCTAATGTAATGGTTTTGTAAGCTTTAAAATAGCAAATGTGTTGCTACCGTTT
CTGGGTGACTTAGTGTGCCTTGGACTTGCTGAAAGCCCTAGTGTTGCCTTACCTTTTCAGTCACTCCTCTTAAGGAGAC
AAGTGTTGTTTCTCTGTGTGATCTGAGCAGTGGGGCCAACACCTTATGAAATTTATTCATGAATCAAAGACTATTCAAA
TAGTCTTCTTTCAGATTCTCAAGATTCCTCCCCCCCCCCACCTTTTTTGGGGGAAGGCTTTTGGCTTTCTAAGTAGCTG
TTGAAGTAAGTCATTGCCTGAGATTTCTGTATCCTTGAGCCCACTTACTTTTGATAGTTTGCTTATAGGATGTTAAGAA
ATGACATTTTAGCTGCACCTAGTAGTGTTTCCTATAATCCCAGTAACTCGGAGGCCAAGGTGGAAGATCATAAATTCAA
GACTTGTCTAGGTTACACAGTGAGTTCAAGGCCTGCCTCAAACAAAAAGTACTTTTGTTTTTGTTTTGCCTAGAGTTTT
TTGTTTGTTTGTTTGTTTTGTTTTGTTTTTTTCTGAGATAGCTTTTCTCTGTGTAGCCCTGGCTGTCCTGGAACTTGCT
CTGTAGACCAGGCTGGCCTTAAACTCAGATCTGCCTGCCTCTGCCTCCCTAGTGCTGGTATTAAAGGCTTGTGTCAGCA
CTGTCCAGCAATTCTTTGCTTTAAAAAAAAAAAAAAAGAGTTGTGGAGGTAGGTCTCTAATAGAATAGTGGCCTTGTGG
ACATGAGAAGACTATGGGTTTCATCCATAAGAAATCCAGGTGCATTTTAGACATTTTTACTACTGTGTTTAGGGGCAGA
TTATTCCGAAAATAAATATTGATATCTAGTACCATTTTATTCTAGGCTGATGTATATCCCTAATCTGAAAATCAAAATG
GCTCCTTTAGTATTCTACAGTGGTCCTGCAGTTTTAAATCCCTTCCTCTGATTAGTGCTCTGCCCCATGAGCCTTCAGC
AGAGGAAAGGCACTGTCTTAGTGCTATGACTTCTGGAGTCAGGATGACCATGCTTCATGCTGCCTTCTGTCTGACACGT
GGGAACTCCCTTGAGCGTCACCATTCTTGTCCTGGGATCATGTTAAGTCACGGAATGAGTCCCAACAACTTGTACAGTT
CTCAGACCCCTTAAGTAGTAAACACAGAAAAGGGATGCACTGCTAAGTGAAACTGCAACCAACATTTGGGCAGCCACTG
TCCGAGCTCAGATAGGACTCATTCTGTGTGCCCTTCCTCATGCTCGGTATTTCTGTTTCTCCTCCCCACCACTTGTCAG
AGTTGTGTTGTGCTTGGTTTTGGCACTTACAGAGGCAGTGTTAGGAAGTCTCTTGCATCTGTTTTGTTGGATTTGTTTA
GCCTCTATTGTGGAGATTTGCCCATGTTCTATATAACTGTAGTTAATCATTTATCATAAGATGGTATTTTTTCTATCTG
AGGTAGTGTTTGCTATATATCCAGTATATTTATATGAAAACTGTAATTTCTGATTCCCAATATGTGCTTATTTACCCAT
CCTGTATATTAAGTGATGTTTGCAAGTTTCTTGTGTTGATAATTCTTGTTTCGGTTTTTGGTTTTGGTTTTTGATTTCT
CTGTGTAGCCCTCACACTGTAGACCAGGCTGGTCTTGAACTCTCGGATTTACCTGTCTCTACCTCCCAAGTTCTGGGAT
TAAAGCCTGTTCCACCATGCCCAGCAGTGTTGGTAATTCTTCTTCTGAGATTTCACATGGTTTTGTTTTTTGTAAGTAG
TCGCTTTGTTAGTTGGCACACTGATGTGTGACTTGTATTAATTAGAATATAAAATGCAACTTTTGATTTTATAAAAGAT
CCTGTCTTGTTTAATGCTTTCTGGCTTGAGGGCTGTCTGCTGTGGTTTTAGGATTTCAGTGTGCTGTATTTATCTCAGT
TCTGTCATGTATATAGTAACTTACACTTGCTTCATATACCTTTATATTATGTTTGCTTGATGTTCTTTTTTCCTTGTTT
CCTTTTTGTATGTAGAATAGAACCCCTGCTCCACTTTTGAGACAAGGTCTCCTATATAATGCAGACTAACCTTGAATTC
TGAGATCTACCTGCCTCTGCCTGTTGATGACTGGAGTTAAAGGCATGGACCTCCATGCCTAGCTTTTTCTCTTTTCTTT
CCTCTCCTCTCCTCTCCTTCCTTTTTTTTTTTTTTTTTTTTTTTTTTTTTTTTTTAAGATTTTAAAACAGTTTTACTGT
ATAGATAGCCCTGATTGGCTTGGTACATAGAGCCAGGTATTCATCACTGTTGTGTATGATGCTGGAGAATATGCCTAGG
GCTTTGTGCATGTAGTACTCCCAGCCGAGCTGTATCCCAGTACAAACCATAAACATGTGTTGATCATTTGCCATTGTGG
TTACTAGCTAGTAAATTCCCTACTCTTTGCTTAGTTTCAGCAAAGAGTAATTGAGGCTTTTCCCTTCTCTCCTTTCTAG
CCTCTCCGAATCTTGGGAGAGTTAGCATTAAAGGTGTATGGGATTGTCAAAGCCTAGAGTTGACATGACAGGTAGTGCA
TCCTCTCCATATTAACTGTCCACTTCTCCTGCTGGCATATTTTACTTAGTTTGGATATTATAAAATTTATGCAACTGCA
TTCCTGAACATATTCATTCATATTATTTCTGATCTTTCCTTCTTGAGGTGTGTCACTTTTTGTTAATCCACATCAACAG
TAGAAGGATCTGTTCTCAAGAACTTTGTTTCTCAAGAACACTTCTCTCTTTGTGATCATGCATTCCTTGGTATCATGAG
GCTGGATGAAAGAAAAGAATGGCTTCCTCCATTGTAGTCTGCAGAAACCCCAGATGAGAGGCATCTATCTATCTGTCGT
AGAACTTTCAGCACCCATTGTCATGAAGGGATATTAGAACTGTCCTCTAAGGTGCCCAGAACACTTACGCCTGTCTCTA
AAGGTGTCAGATGCTTGCCCACTTTCAGCGTTAAGTGCAGTCCTGGTTAGCTCTGAGCTCTGTGGACTGCTTGGGAAGT
AGCCAGACCCTGCATGGAGCTCTCTGCGTCCAGTTCTTAGCCTCCCCTCCCTTTGAGCCTATATTTTATATCTTGTACA
TTTTGTTGGTTCTTGCCTCAGTCTGACTTTTTACCTAATCTTAAAATTAATTTCTTATACCCATCCATTCTTTCTGGTT
TCCTTCTGTGTTCACTTTAGTTTGGGGTATTTTATGTAATTGCAATTACAATTCTTAAGTGTGGTATGTATGCACTGCT
GAAAAGGTAAGTATGCCTAATGGTTTTGTTTATCTGTTTTAAAATCTATTTTTTATGTGCATGGTTCTTTTGCCTACAC
ATATGTTTATGCATCACCTGCGTGCCTGGTGAACATGAAAACCAGAGGGTGTCAGATCCCATGGAACTGGTGATACATA
TAGTTGTGAGCCACCACGTGAGAGCAGGGGATTGATTCCCTGGGTCCTCTAGAAGAGCTCTCGCAGTACTCTTAACTGC
TCAGCCAACTCTCCAGCTCCTTACTTAATGCTTGGTGAAGAATATGAAATTCTTTTAACTCTAGTATAAAAATAAAAAT
TAAAGTTCATGCTTTTTATTTCAGAGAAAAAGAGGTCAAAGATGTAATCTCTTTTTTCCTTTCTTCACTACTTTGTCTC
TTTCCTCTGTGTCCCCCTCTTCCTCTCCTCATTTTTTCCTTTTTCCTGTTCTTAAACACAGGATGCACTTGCAGCCCTG
GAAACCCCAAATGCTGCCAGCCAGAAGCGGAAACTAAGCTCACCACTCTCTGAAGTCATCGTCAGAAACCTGACAGTTG
CTTTGGCAAATAGTTCCCGAAACACTGACAGTCATTCTGCCAGCCCTCAGCTGAAGGGTGCCCATTTGGAGGAGGTAGA
CATGGTTTTCTTATTAAATGGAAGGTGTCCCTAATGCATGTCAAAGAACTGTGGCTGGTCTGTTTCTTTATTCTCCATG
TGCAGGAAGAGACTCGGAAACCACTTGACAGCGTTGTGGTGTGTGTGAGTAAGAAGCTCAGTAAGAAGCAGAGTGAGCT
CAATGGGGTCGCAGCATCACTGGGAGCAGAGTACAGGTAGGGACAGCTCTGTGTTGGCGGCGCCAGCCACAGCTCAGAC
AGCACAAAAAGCCTGTATTCATTTATAAGGAAGACTTGGCTTTGCCTGCTTGTGTGCATTATCTAATAAAACCTCTCCG
ATTAATTAAAACTGTCCTCTTAGGTACCCAGAACACTTAAGCCTGTCTATAAAGGTGTCAGATGCTTGCCCACTTTTAG
CCTCCAGTGCAGTCCTGGTTATGGACTGGTCATGGGTTTATAGTCAGCACATCTGGGACTGACTGCATTTATTATCAAT
CTTAGTGATTTCCTGTGAGTAGTACTGACTGACCACTGTAGCAAACCTTCCTAGATTCCCCTGACTTCCACACTCCATT
AAAGACATTTTAGTTTGCTCTAAATAAAAATTTATTTGTGTGTGTGTGTGTGTATGTTGGCATGGTGGTACACTCCATT
AATTCCAGCGCTTGGGAGGCAGAGGCAGGAGGATCTCTGAGGGTCTACATAGTTCCAGGATAGGCAGGGCTACAGAGTG
AGAGACCCTGTCTCTAATGTTTTCTTAAGAGACGTAGTCTCATGCTGTGGTAGATTTCTTGCCTAGTGTACTCAGAGGC
CTGAGCTCAGTTCTCAACATAGATAGTTTTGTGATAGGGACTAACTTGATAGAGTGAATAAACAGGGTGGTGGCCAGTG
ACTGGACAGTGGATTTGAATGCCTTAAGTTTTATTAACTTGAAAATACTTTTTATTGTAATTAGAAAGTGATATACATT
ATAAGACAAAATGGAAGGATTCTTAAAAATATAAAGAAGATAGTAGTATTTTAAAAGTATTCTTCTGGCATCTACACTG
TATAAATGCTGTGTAAATGGAGTCGCTAGCATTTGTCAGGATACAAAATCTGCCATTTACTACTCTTGCTTATTCTCTA
GTTCTTTGAGTTCTGTGTGTCAGAACATTCTGTTCAGAGTAGACTGCTGTTTCCCTTAGTTATTCCTCTTGCATATTTG
GTTGTTTCAGGTGGAGTTTCGATGAGACTGTTACTCATTTCATTTACCAGGGTCGGGCAAATGACAGTAATCGAGAATA
TAAATCTGCAAAGGAAAGAGGGGTGCACATCGTGTCCGAGCATTGGCTATTAGAGGTAAGCAATGCTTTTCCCTCTCTT
CCTTGTTGGTTGAAAATACACAAATATTTCAGAGCACAAACCAGTTTCATTGAATGCAAATAAATTTGCTAATCTTGGC
TAACTGTGTGGTGGCATGTCGTGCCAATACCTGCCCATTTCATGGCTGGGACATGAAAGAGGTCGTGAAAGGGTTGGGA
TTGGACTGCTGTCCAGGGCACACCCCGAGGGCCTGTTGGATGCCATGGGAACTGTGCTTGTAACATAAGGCCTTGGGAC
ACTCAAAATCTGAGCTATATGTAGGTCATGCTTGGGGCATTGTATCGTTTTAGCATTAGAACTTAAATTGTTTTAAGAT
TAATTGGTTGATTGGTTGATTGATTATTTTTGTATTTTTATGCACATGAGTGCTCTATCTACTTGTACACTCGAGTGCC
TAGAAGAGGGCATCAGACCCCATTATAGATGGTTGTGAGCCACCACGCGTGATAGATGGGGAATTGAACTCAGGACCTC
TGGAAGAACGTACATCTCTCCAGCCCTAGAACTTAAAATTTTTATTGCTTGAATATTTACCAAGTTTTAAATGAATACT
TATATCATGATTCCTTTCCCTCATTGACTATTAGATGAAGAGTAGCTAAGGGGCTGGAGAGATGGCTCAGTGGTTAAGA
GCACTGACTGCTCTTCCAAAGGTCCTGAGTTCAATTCCCAGCAACCACATGGTGGCTCAAAACCATCTGTAATGAGATC
TGATGCCCTCTTCTGGTGTGTCTGAAGACAGCTACAGTGTACTTACATATAATAAATAAGTCTGAGAGGGAGAGGGAGG
GAGAGATTGAGAAAGAGAGAAGCTGAAAGAAAGGGTGTGGAAGGTAAAGGCTCTCACCACCAAGCTTGACTATTTGAAT
TTATTTCCTGGGACCCATACAGTGGGAGGAGATAACCAACTCCTACAAGGTCTGCCCCCCATATAAATAGATAGAAATT
AATTTAAATCATATAAAAACAAAAGATGTTTTTGAGGGTAGTTGCTAGCATCCTCATACACTATAGCCATGCTTTTCTT
GGTGCTCTCTGGAATGGCTGATACAGAGGCTAAATGCAGAGGCAGGATTAGAGTTTATACTTTAATAGACAGTAGATTG
TAAAAGTGGGGATAACTTGTTCCACTTTGTTTAATTTACTGTGTGTGCATAGGTGTGCTCAGAGGGCCTTTTACTCTTT
TTACAGTTTTAATATGGTTTCAGTGATTAAACTCATGTCACCAACTTAATAGGACAAGGACATTTACTGGCTAAGTCAT
TTCCTGGGTCCCAATTGGTTATTTACATGCTAGAGTTTTCCACTGTAAATTAATTTCCTTCCTTCCTTCCTTCCTTCCT
TCTTCCTTCCTTCCTTCCTTCCTTCCTTTCTTTCTTTCTTTCTTTCTTTCAAAGATTTATTTATTTTTTATATGTAAAT
ACACTGTAGCTGTCTTCAGACACTCCAGAAGAGGGCATCAGATTTCGTTACGGATGGTTGTGAGCCACCATGTGGTTGC
TGGGATTTGAACTCGGGACCTTTGGAAGAGCAGTCGGCACTCTTAACCACTGAGCCATCTCACCAGCCCCTGTAAACTT
CTTTCTAAAGTGTACACTTGTGTTTCAGTGTGCTCAAGAGTATAAGCATCTTCCTGAATCTCTTTATCCACACACTTAC
AATCCCAAAATGAGTTTGGACATCAACACAGTGCAAGATGGGCGGCTCTGTAACAGCCGGGCACCCTTGGCAGTTTCTG
CATCTAAGGATGATGGGGTAGGTGGTGTGGACAGTGAGCCCCTCCCAAGCTGCATGTAGATGTCTGTGAAACTTTATGC
AGTGAACTTCGTTTGAGAAGTTGTCATTTTTCTCTTTGAATAGCCAGATCATCTGTCTGTAGAAGGAAATGAGACAAAC
ACTATGGGCACAAATGACAAAGAGTCACCTCTGTTGAATGGGAGTGGAAGAGATGACTGTAAAGGAGGTAAGACACTTG
TCACTTTTTACCCCTTACTCTCACGCCATGGCCTCCCAAGACAGGGTTTCTCTGAGTGGTTCTGGAACTGACTCTGTAG
ACCAGGCTGGCCTCAAACCCAGAGATCTGCCTTCTTCTTTCCAAGTGCTGGGATTAAAGGCCTGCGCCACCACACTCAA
GTGCACTTTTTACTTTTGACAACGTTTGTTTTGACTTACAGTCCCAGCTGTATTTTACCACTAATAGAAGAACTGGGAT
GGCCTTCCAGCTTTGCAGCCAAACACTGACTTCTCTCCACAAAACCCTAGAGAGGTGTCTTCTTCCAGTCTGAGTCAGC
TGCTCATTCTCCTGCAGCTTCGCATCAATGAGGAGCTGTGCCCACTGCAGGAGCACTTGGAATTTCTCTTTGCAGTCAC
AGCTTGACTGTTCAGCAGAAGAGCCTTTTGACCTAACTTGACTTTCATGCATGCCTTTGTCACTTGCCTTAGTCACTGC
TAGCTTTACTTTAGAGCTAGAGAGAGGAGTGTGACTCTTCTCTTCACTTGAACACTAAGCCACTGTAGGATGTTAATTG
AGCTAATTTTAGAACTGTTGTTTCTTAGGGATTGCGGAAGTCCTTGGAAGGAAAGAGAGGAGGAACAACCAGTCAGCAT
ATACAGCTTTTATCTGTAGCTTTTGTGTAGATATGGTTCACACAGAATCATTTGGAAGAGTTGGACAATTGTTAATATA
TGGTTGCTACAGCTCTCCATTTGCAAAAAAAAAAAAAGAAAGAAAAAAAAGCAATGTTTTAGTGTAGCTGGAGCTGAGA
AATATATAGTAAAGGGTACATTTTTAGCTCAAACAGCCTTAGAAAATGAAAGCCCAAGCTTGATTGGTTTGGACTCTGA
TGAAGACCTGGCTACATCCTATCATGTCACTATCAGAAAGGGAAAGAGTGCAAGTGGGTGTCACCACATGAAAGACTGC
AAGCAAGTTAGACCAGGCTCACTGTTGTCATAGCAACCCACAACAAAACTAGCCTGAGTTCCCCCTGAAAACTGCATTA
CTTCTGGGGTGGTGTTGCTAATGACCCAACCCCCTTAGACTAGATCTCACTCTTAAGGAGTCTCCTTACTATACCACAC
CACACACAGGAGGGTGTGCACTCAAGCCAGAGAAGAGTGTCTGGGAAACAGGGGCTGCTCCAGTCCTGGGTTTTATTTG
CTGGTGTAGTGTGTGGCTTCTGTCCTGCTTTATTTTGCTGTTTCCTGTTCAGTGTCACTAGCAGTTATTTTGAATTTCT
TGCTATTACAGATAGTGCTGTGCTGATTACCTTACTTAGATGTGTTACTCTCTGACTTCTCCTTATTCAGCCTGCCTAC
TAGAACTTGCTTTCTGACTTAACTGTTCCATTCTGTTTATTTCAAAAATGCCTACATGGTATCTACTTCAGTGTCTATA
ATGGGAAGGAAAGACAAAGACGTTGTGGTGTGTTCTTTCAAGGATTAGTGAAAGCTCGGCTAGTGCTTTACAGCAGCAA
TCCCAGGCTTGCTGCTGAGGCAGGAGGGCATTCAAGGCCAGCATGAGCTATGTGGCAAGATCCAAAGCAAATGGACAGA
CAGCTATACATACAAATGACTGTGAATCTCTGTAGTATGCATCCATGAGAAAGGGTCAGACACGAGCAGGGAGCTCCTC
AAAGGAGCAAGTTTTCCTCCAAGGGAGTCTTCATCGCTTCAGAAACAGTCCTCATGGCCGCCTTTGTGTTTTGTGACAT
TTTAGCCTTGTATTCCTGTATAAATGTTCAGTAAATGGCAATTCTTTGTTCAGCTAGATCTAGACAAAATAGTGTAAGA
TATGATTGACAAGAGAAGTTAGTAACTGTGGTAATGCTTGCCTGTAATCCCAGAACCCTAGAGACTGAGGCAGGGATTA
CAATGGGAGGTCAGCCTGGCCACACAATCAGATCTATCTTCACACCAGCAAGGTGGAACGGGGGGGCACATCTTTCTTG
ATTGATATCGATTACTCTGTTTCTAGCTCTGACCCAGGCCTTGGAGATGAGAGAGAACTTCCAGAAGCAGCTGCAAGAG
ATCATGTCAGCCACCTGCATTGTGAAGACGCCTGCCCAGAAGACTTGCATGTCAAGAAGCAGCTGTAACAGCGCCTCTT
CAACTCCTGACAGCGCTCGCTCTGTGCGGAGCGGACGAAGCCGAGTCCTGGAGGCACTCAGGTTTGTGCGCTGTGTTGT
TTGCATAAAAGCCCCTGGTAACTTAGGTTGGTGGGTTAGGCTCTTTTTGTTGTTTTTGTTTTTCGAGATAGGGTTACTT
TGTGTAGTCCTGGCTGTCCTGGAATTCTGGAATTTGCTCTGCATACCAGGCTGGCCTTGAACTCAAAGATTCATCTGCT
TCTGCCTCCCAAATACTAGCAATAAAAGGTTTGTGCCACCACACAGGACTTTAATTTTCTTTTCTTTTCTTTCTTTCTT
TTTTTTATTTTAAATAAAGTGGAAATTAGAATATTGAGACCAGTGAAGGGGTTTGTGTTGGCGCTTTGTTTAACTCAAA
CAGTATGCATTATATCCCACTGTCATCTGGGGTTTTGTGTATTGCTGCTGAGTTTTTTGTCTTGTTGCTCAAGCAGTTG
TGAGTTCTTACTTTGAAGTATGTGATTTTAGGTGCACTTTTCCACTTGACGTAAAATCCGGGAGCAGTCAGTCCTCTCT
GTCACTTAGTGTTAGCACTAGACAGTGAGGACACAGAGTACTTCAACTTTAAACAGCTTTTTTATTATCTTGTGTTTGA
GTGTGATATGTGGGCGTGAAGACATGCATGCCATAGCACCCATGTCGAGGTCAGAGGACAGCCTGTGGATGTCACTCCA
CCCTTTCCTCACTTTTTATTTCTTACTTGAAGTGTGTGTACGTTTTTCCTCTGTGTTCTAGGAAAGGTGCCACAGTTCT
TAATGCAGTATAACTTAAGCTCATTGAAATTACTGTATTTTTCTTTGTCTTTATAGTTATAAGACAAGGTCTTATCCCA
GGCTGGCCTGCAATACTGTGGAACTAGTGTTAGCCCTAAACTCCCAATCCTCCTGCTTCAGTCTCCTGACTGCTGGAAT
TACATGTGTACCGCCACTCACCCTCTCTCTGTATTGCTGTGTAGCCAAGGTGGGCTTTAAATAAACTTGGTGTTTTTCT
ACCTCAGTTTACCAAGTGTTGGGTTACTGGGCCCACCAATAGCATTTTTTTACCTCTCTCTGTATTGCTGTGTAGCCAA
GGTGGGCTTTAAATAAACTTGGTGTTTTTCTACCTCAGTTTACCAAGTGTTGGGTTACTGGGCCCACCAATAGCATTTT
TCTACTAGAAGAAAAAATCTCTGAGGTGTAGGGTGAGAGATTTGAGTCCATGTTGACTTCATTTATATCGTACTCTGTG
TTTTCCTTGGGGTAATTTTGAATTCTGAGAAAAGTAGCTTTTCCCAACAGTGCAGGTCATGTTTTAGATATAGAACCTT
ACTCTGTGCCAGGTCGTTTGGGACTAAAAGGCTTTCCTGGTTCATTGGCTTGTTTGTTTTTAAGACAAGGTCTCACTAT
GTAGCTTGAGCTGGTCTGGAGCTCAGAGATCACCTGCCTGACTCTGCCTCTGCCTCTGCCTCCATCCACTTTGGGATGT
AGTCCTTACTGTCCTGAAACTCAATATGTGGACCAGACTGGCCTCAAATTTACAGAGACCCGCCTCCTACTGGCTACCG
AGTCACTTACTAACTGCATGTAGCTTGGTGATGGCGCAGGCCTGTAATCAAGGCCCCAGGGAGATAGCCAGGTGGTAAA
GGTGCTTCACGCCAAGCGTGATGACTTGAATTCCGTCCCTGGAATGGTGGAAGAAGAGAGCTAACTTCTGTAAGCTGTC
CTCTGGCCTCCACATAAGGTCACTGTGTCACATATGTGTATACATACACACAAAGTAAATAAATAAATGTAATGAAAAC
ATTTTTAAGGGACTAGAGAGATAGCAGTTAATGAGTGCTTGCTACTCTTGTAGAGGCCACAACTAACTGCTTGTGACTA
CAGGTCGAGGGGATCTAACAACTTCTTTTGGCCTCCCTGGGCACCCACATCTGTACATATAAACAAAATACTTGAAAAT
ATTTTAATGAATTCATAATTCTGTAATTCAGTAAATGTCTACCATAGACTGGAAATTTTGGTCACCAAGTGTACTGGCT
AGTTTTGTGTCAACTTGACACAGCTGGAGTTATCACAGAGAAAGGAACTTCAGTTGAGGAAATGCCTCCATGAAATCCA
ACTGTAAGGCATTTTCTCAATTAGTGATCAAGGGGGAAAGGCCCCTTGTGGGTGGGACCATCTCTGGGCTGGTAGTCTT
GGTTCTATAAGAGAGCAGGCTGAGCAAGCCAGGGGAAGCAAGCCAGTAAAGAACATCCCTCCATGGCCTCTGCATCAGC
TCCTGCTTCCTGACCTGCTTGAGTTCCAGTCTTGACTTTCTTTGGTGATGAACAGCAGTGTGGAAGTGTAAGCCGAATA
AACCCTTTCCTCCCCAACTTGCTTCTTGGTCATGATGTTTGTGCAGGAATAGAAACCCTGACTAAGACACCAAGGGTTG
AAAGACCCATTAGTTATATCTTCAGCAATGTCATGTTAAAAATACACTTTAAAGCTGGGTATAGTGGCACCCACGAGGC
AGAAGCAATGGATCTGTGAGTTCAAGACCAACCTGGTCTTCAATGTGAATTCCAGGACAGCCAGACCTACATAGTGAGA
CTCAATGAGATATAATTTAATTACTAAGACAGGTACGGTGGTGCATACCTACAGTCCTAGCACATGGAAGCTGCTGAGG
GGAGCTCATGGTCGTCCTTCACTACAGAGAAGCGTCTTTAAAAGAAAATGTAAATGCAATTATTAACCCACTAGCTACA
GTTCTCTAAACATCACCCTGGTTCCCTAATTTTTTAGAATTTAAAAAATACCCGGGCTTGATGGCGCACGCCTTTAATC
CCAGCACTAGGGAGGCAGAGGCAGGCAGATTTCTGAGTTCGAGGCCAGCCTGGTCTACAAAGTGAGTTTCAGGACAGCC
AGGGCTACACAGAGAAACCCTGTCTCAAAAAACAAAACAAAAAAAAATTAAAAAATATATAATTATTTTTGAAATACAG
TTATAGACATTCACTTAAATTGTCTAGTAGAAATATTTTAGAAGTAATTAACTGGGTGTATTGGTGCATGCTATGCTGT
GTAGGTTTTTGTAAACTTGGGTCATTTAAGAAGAGAAACCTCATCTGAGAAAATGTCTTTATCACTCTGGCGTGTAGGT
AAATCTGTAGAATATCTTGGCTAATGAGTGATTTAGGAGGGTCCGGCCCACTGTGAGCCCCTGGGACTTCCTTTGAGCA
AGCCATGCAAGTCAATAAGCAGTTCTCTTCTACAGTCTCTTCAGTTCCTGCCCGGACTTCTCTCAGTGATGGGCTACAG
CTGTAGGCTGTAATAAATCTCACCAGGCTGCTTTTGATCATATCTTATCACAGCAGGGGAAGCAAACCAGGATGCATGC
CTATAATCTTAGCACCTGGGAGGCAGAAGCAGGAGAAGCACCTCATTTAAAGCCATACTCTCAATAATGAGACCATATG
TCCAAAAAAAAAAAGAAAAGGAGAAGAAAGGATGTCCTCTTGATTTATTCAACAAATACTGTGTGTCTTTGCTGCTTAC
TGGTTTTCCGCACTTGGGTTCAGTGTGGCTGCTATTTAACACTGTCCCTTTTGTTCCTTAGGCAGTCTCGGCAGGCAGT
GCCTGATGTGAACACGGAGCCGTCCCAGAACGAGCAGATCATTTGGGACGACCCGACAGCAAGGGAAGAGAGAGCAAGG
CTTGCCAGCAACTTACAGTGGCCCAGCGACCCCACACAGCATTCTGAGCTTCAGGTTGAGATAAAAATGCCGGATGACT
CTCCCTCTCGAAAGCCTGTGTACCATTCAGAAATTGCTGAGCAGGGTAATAAGACAGACATTGACTTGTGCTTAAGAAT
GCTGACCTCTTAAAGACACCATGGTTCTCTGTTACATATGCGAATCAAAATGAATTTTCTAGTACTGTTTCAGTCAAAT
GAGAAATGTTTTTTGATTTTTAAATATAGAAATTTAGCTATAAGTTTCTGAAGAAGAAATTGTCATTTTTGAAGCTTCT
AGCCTCCATACAATCTAATCTGGGGCCAGAATATTATCAGCCTCTGAGCCTTACTGCTGACTTAAGTTCACCCTTTCTA
ATTCTTCTGAGCTCTAGCTGGATGGCTCAGCTTAGCTGGTCAGCTGTAAACTCCTCTCCAGAGTGACTGATTCAGTCTG
GCTTCTCTCAGCTTCTCCTGAACTGCTCTGCTTGGCCTCAGACTGTCTTTGGCAACATGTTCTAATCTTATTGCTTCTT
CTCGTTCTCTGGCTTGTTCTGTTTTCACCTGTGTTTAGCTGTTCTCTCTGCAACCTGTCCTTCTATAATAATGTCTGGT
AAAACGGCCTTTCTTCTCACTGTGCTGCTTCCTATAGCTTCCCTTTCCTCTCCTTGTTATTGGGCCTGTCCTAGTCTGT
CAGATCTTTCTCTTGATTCAGCACTTTGTCTGCCACTCAGTTAGACATGGCTTACAAACATGGGTGCTTTTTTTCTACA
ACTAACTTTACCTTCATTGCTGGGAATTAAGAGCAAGTCTGTATTCCAGCCAGAGGGATTAAAGGTGTGTGCTGAAACT
CAACCACACCACAAGTAAAAACAGGTTTTCTCAGTAAAGATCACAATCTTGGGGTTCACCGTGTGATCAAATATCCTGA
AATATTTAGGATCAGCCTTTTTTTTTTTCCCTTTCTACCCTCTTCTGTTTGTGAGGTAATGTCTGATGTTGTTTGGCTT
ATGAGCTTTGCCTGAGTTCCTTTTTTTTTCTCCCTTCACCTCGGTTAAGGTTATCTTCCTGTGCTGGATATACAGATCT
GATTTTTTTCTCCAAGAATTGCTTTCATTTTAAAAAGTTGGGTATGTTATACTTGTGAAAAGATGTTTTAGAAAGGGAT
TCACAAAACTCAATTAATAGCTGCCCTTTCAGAGCTATTTAGTCAGATGTACCTATAAGCTGGGGAAACCAACCACTCT
TTCCTCTATGTGTAGTGCTTGCTTTTGAGCCATGCAGGGTTGTACCCATGCAGGGCTCAAGCCTGAGAGTCTCCTGTCT
CAGCCTCCCAAGTTACTGGGGTTACAAACAGATGCCACCATGTCTGAGCCTTTGTATACTTTTGATTGCAGAATTCATG
GCTCATTTTATTTTGGCCAAGACAGGTGAGAACATTTCCAGAGTTTGTTCTAAGTTCCATGTGTACACTCTTACACAGT
ATTTCTTTCTCCTTACCCTTAGCCTCGTGTGTTACTCAAGCCCCAGGGCACCCAGGCTCTGAAGAACCAGAGCCTCCAG
TAGCAGAAAGGCCTTTGATCCCCGAGCCGCAAGCCCCCGCTGTAGCTTCCCCCCTGGCTAAGCCGCCTGTGGCCCCACA
ACCTGCAGACAAGGTTTGTTAACCTTCGGTATGGTGATGGCGGGCGGTTTTGTGTATTTTATGCTGGAGTAGGAAGTGT
TGGCTGCAGCAGGCTCATCACTACTGAAAAGTGCATCTCTTTGAATTACAATTTGTATACTTGGTCCCTTAGAAGACTA
GATAAAATGTCACTATAAAATAGCTATATCTGATAATAGTTTTAATGTTAATATTTTTCTAAAATAAAACTATTGTGTT
TTAGATTGAAACACAGGAGGAGACGCACAGAAAAGTTAAAAAACAGTATGTGTTCCAGATGTCGTCTCTGAATTCTCAA
GAGCGGATTGATTACTGTCGCCTGATTAAAGACTTAGGTGCCATTATTTTACTTTTTTTTTTTTTCAATTTTCTTCCAA
TATTTTACTTTAAAACATTGTTATTACAACTTATTTAGAATACAAATGCAAACATATTTCTATCATGTGTAAAGGGGAG
GGCAGTTGAGAAAAGAACATGGTTAAGTTTTGGATTTTGTTGGTTTTTTTTTTGGTTTTGTTTTTTTTTTTTGAGACAG
GGTTTCTCTGTGTAGCCCTGGCTGTCCTGGAACTCAGTCTGTAGACCAGGCTGGCCTCAAACTCAGAAATCCACCTGCC
TCTGCCTCCCAAGTGCTGGGATTAAAGACATGTGTCACCACTGTCTGGCTATGGGCAAGTTATTTAAGCCTACACATTG
AGTCTGTTCTGCCTCACAGACCCAGGTACACAGATAGGCAAAATACACATACATATAAATAATATATATATATATATTT
TTTTTAAGTCAAGGGTGGGACTGGGGGTTGTATGGCTCAGTGTGAGTTTTTTTGGGGGGGGGCATATATGAAGCCCTGA
ATTTCAACTGTATACACGGGTCAGCATTGGAAGTTTTATTTTTTATAAAACCCCAATCTACATTTCAAATCACTAGATC
TTGGAACGCTGAAGGCAGGGATGGAGGGCGATAAATTAAAGTGAATGTTACTTTTACATCTCTAGGTTGATCATTTTAT
ATAAATAATTTTTATGCACAGTTAACATTTTTCTAGAAAGAAAGTTAAGAACTAGTAGATGCCGTTTCTCTCCATACAA
GGTGGGTCGGTGATCGAGAAGCAGTGCTCTGACCCCAGCTGCACACACATGGTTGTGGGCTACCCACTGCGCAATGAGA
AGTACTTAGCTTCTATGGCAGCTGGTAAATGGGTGCTTCATCGCTCCTACCTAGACGCTTGCAAGACAGCTGGGCGCTT
TGTGCAGGTGTGTATTCATATTCCTGTGAAGGTTTGTTCTCTTGTTAATGACTTAGGAGATCCTTGGTCATCCCCTCAC
CGTGTATTTAGTTTAAATGACCACACGTGGCCAGTCAGATTACAGCTGTTCTGTGAGGATCTTTGAAACAGAACAAAGT
CTGCAAGGTCGGGCTGCTTTATTCACATCCCTTTTTATTAAAATATTTTGGTTGGCATACAAAAAAATGAGTTTTTATT
GTGGCCTGCTCACTTTTTGTTACCTAATTTATCGGTGCTTTTTTATTGAAATGATTTTCTCTTAATGAGCAGATTCAAG
ATAGCCCATTATAAGGCTTTTTCTTTGCTGTTAGCTTATCCATATTAAGCAGTTGTAACAAGCTGGGCATCACGGTAAT
ATCTACTGTGTCGTTTCCGAAGCTTCCAATCTGAGCTCCTTGGGACTTGTCTTAGTTCATACCTCCTCAGGCTGTGCTC
TCATGAAGCCAAATACTAGGGTATTTTACTAAGTTAGGTATGCTACTAAGTTGCCAAAATACAGCTGTCTGGCCAAAAG
GTTTGTTTTGGGGAAATTAGTTTCTGGTTTTAATTAAAGCCAGCTGTACTGGTTCTTCACATAAAACTGAATAAATGGA
ATGAGTTCCCAAAGTAGTGTTCTCTATCATTCGTGTCTCTGTAACGATTGAACTTTCAGCTTTGATCTTGATAGACTGC
AAGCTGCTGGGGGCCAGATACCCATGCTTAGTTAGCACAGTGCTGTGAAAGGAACCCACAAGTTCACTGGCCTGGTTTT
CTAGGAAGAAGACTACGAGTGGGGAAGTAGCTCCATACTTGATGCTCTCCCTGACGTCACTGAGCACCAGCAGAAGCTC
GCACTGGCGGCAATGAGATGGAGGAAAAGAATCCAGCAAAGTCAAGAATCCGGCATTGTTGAGGTACTATTGTGGGATT
CAGTATTGTGACTTGTTTTAAAGAGCATATGCCTGACCAAGTAGTTCTGATTGTCTTTTATTCCATAATTGATATATTT
AGTTGCACATTCTGTGTTGAACTAAAATTTCTGTTGTGCAGGGAGGCAGAGGCAGGAGAATGTTTGAATTCCAGGATAT
CTGAGGCTATGTAGAAATCCTGCCTGAGACAACAAAGTATTGTGTTACTGTAAGATAGGGTCTTCTAAAGATAACTTGT
CTTTTCAGGGTAGAGCATCAGGAGTCCTAAGCCAGGTCTGCAAATTCTCTCTAAGGAGTCTATATACTTTTGAGTAAGG
AAATTATGTCCTTTCTTTCCTAATTGCTGATTGCTAGGGTACTCCTGTAATCCTAGCACTTGGGAGGCAGGAGAAGAGC
AAGAGGTCAGAGCTAGCCTATGAAACTTTGTCCTTTTTCTTTTCTTTCTTTCTTTTTTTTAAACTAATAATGGGTTGAA
GAGGCCGCCCAGGGGTAAAGGCACCTGCGCTGCTCTTCCAGAGAACTCAGATTTAATTCCTATCATCAACATCTGTAAA
TCTACTTCCAGAGGATCCAACACCCTCTTCTGACTTCTGTAGGCCCTGCATGCAAGTGATACTTAGTATATGTAAATAT
ATGCAAAAAACCCACTGAGTTTTGTGTGTGTGTGTGTGTATAGATAGATAGATGAATGACAAGAAATTACTTGACACTA
AACAATTAAATTCATGCATTATCTCTGCATTTTGAATGTTTAGTATGTTAAAATTACATGTACTTATTTTTAAATAGGG
AGCATTTAGTGGCTGGAAAGCTATTTTACGTGTTGATCGGCCCCGAGAAGCTGGGTTCAAACGCCTTCTTCAGGCAGGA
GGAGCAAAGGTTTGTCCTGAATTAATTTACTGCTATCCTAGGGGCAGGTTTGCACCAACTTGTCCAGCAAGGTTTCTGT
GATGTCTCCCTGCCCTCTGCCTTTGAGGGGAGGAGCATCTGCTATGGAGCATGAGGGGATTAACCCTTCCTGTTTTTCA
TTAGGTGTTATCTGGTCATCCAGAACCTTTACTTAAAGATGCTACGCATCTCTTTTGTGACTTCAATAAACTGAAACCT
GATGACTGCAGAGTTTTCATCGCAGAGGCTACTGCCCAGAACATGGTCTGCTTGAAAACAGAATATATCGCTGATTATC
TCATGCTGGTTTGTCACATTCTACTCTTCCGTTTATCATTATCATTTTTATTACTTGTGTGTATATGTGGGGTGGGGAG
TTGGCACATGTGTGCTCGTCAGAGGATAGCTTAATGGAGTTGGTTCTCTCCTACCATGTAGGTTCAAACTTAGGTTGCC
AGGCTGGTAGCAAGCGCCTTTACTTGCTGAGTCATTTTGCTGGCCCCATACTTCCTTATTTCTAGAGATATGTGTATGT
TTGTAGATGAACATCCACACATTTACTCTTGGCTTGCTGCTAATAGAATTGACAGTCTGCCATTCTCTAGTCTTTCAGT
TTAGTTCCATTTCTATATTGGATGCCTGTAAACTTTTTAGCATGAAATTTAAGTATGACAGGTTTATGAAAATCTGGGT
AGCTATAGATGTTTTACAAGTTCTTTAAAATATTGGGCTATAAAGAAAGCAGGGGGCTAGAGAGTTGGCTCAGAGACAA
GAGAACTGGCTGCCATTGAAATCAGACTCAGTTCCTACCTAACAGTAACAGACCTACCGTGTGTACCTGTGTTCGTGTG
TACCTGTGTTCGTGTGTGTGCTCGTGTGTGTGTGTGTGTGTGTGTGTGTGTGTGTGTGTGTGTTCGTGTATAGAGGTGT
CTGTGGAGTTCAAAAAAAAAAAAAAAAAAAAGAGTTCTATTCCCTGGAGCTGGAGTTATAGGAGGCTGTATCCTGTCCA
GTATGGGTGTGAGAATCAAACTTAGATCTCTTAAGTGCTCTTAACTGCTAAGCCATCTCTCCGGCCCTAAATGAATGGA
TTTTTAAACTGTATACTTGCTTCCTAGGTCAAGCAACATTTTAATATAATCAAGTAACATTGATTTATTACATAGCCGT
TTCTCATTTTTTTTATGCATTTCAGAGTTTTGGGGAAATCAGAACATGTGTCTCCTCAAATACTTAGCATGTGTATCAT
TAACTAGAATCCAGTATTTGTTTACTTTTCTCTTAGAAGAGCTGTTGTACAGTGAAATTTGTAGATAACAGTTCCATCA
TGTGAGTCAGCCTCCTGATAGATGATGGCCTTCCAAAACCCTTTGGTATCAAGAGCATGACCTCATTTCAACAAGCATC
CTTGGGGCCCTTTTCAATGACCTCTACCCCAGCCCCACAGAGATAAGCTTGTTTTATTATTTGTCCCCAGAATATATTA
ATCTTTCCTTAGTTTGAGAGCTTTTTATACCTGGCCTTAGGGAACACTTAGCATACTGTCCATGTGTCTAGGTCATGGT
GCATGTTAGCTAGCTCATCCCTTATTATAGAACGTTCTGTCTGAACAGAGCCCCTGGGTGACTTCCCTTCAATGTGAAG
TAGTGTAACTGCTGGGCTAAGTATACATTTAGTTTATGTGGTCTGGATAGCTTTAAACTTGCAGGGCTTCCTACTTCTG
TCTCCTAGTACTAGAATTGCATGGTATTCACTATCAGACTCTTCCTAGAAGAGATTTGGTGTCACTTTATAGTCACTTG
ACTTTTAGCATCTGGTATGGCTACAGTGGAGGTAGTAGCATCATGCTTTAAAAGAATCAGTCTTTACCTCTCTTACTCT
GCCTCTCTTTGCCTCCCATCCTTGTCCTGCTAATTGCTGTTATTACCAGCATGTATCTCGTTGTTTATGAGCTTTTTTC
ACTTGGTACTCCAGATTGGCCTTAGGCCTTAAACTGGTTTTGTTTGTTTGTCTGTTTTCTTTCAATTCTGATGGAAAAT
AGGTTATAGACTATAGATCCTGGCATTTATCTGTTTGCATTACTTAACAAATAACAGAAGCAGCTGAACTGTCAGTTCA
CATTTTAGTCTTATTAAATAAAGGTTGTGTGTGTGTGTGTGTGTGTGTGTGTGTATGTATGGCTCAGAGGCCAAAGATT
TGGCCAAGCTCCACAAACTATTTCTGGCTTCCAGACCTTTGCTCTGGGTTCCCAACCTTTTTTTTCTGAGGAAATAGTT
GCTTTCCTACCTTGTTCTTCAAGCCATTTCTATTAGAATTTTAGCCAGCCTGTGGCACACATAAAAGAAACAAAATGAG
AAAGCCCACAAAAGCTAAATTGACCCAGGTCTGACCTGCCCTGTAACAGTTACTTGGTTTGTTAATTCTCCAGCGTCTT
TAATTAGAATTTAAGTTCAATTCCCAGAACCCAAAAAAGGCAAGCATGATGTTTGTAATCTTAACACTGGAAAGGCTCA
GTTCCAGGCCCATAAGTGACTAGTGGGATTGGCATGGTGACTCAGGCCTTTAATCCCAACATTTGGGAGTTAAAGGTAG
GAGGATCACTAAAAGTCTGAAGCATCCTGGGCTACAAAAGGCCAGCTTGTCTTATTTATTTATTTATTTATTTATTTAT
TTATTTATTTTATGAAAATAGAAAAATGGCTGCAAAGGTAGCCATTGCAAGGACTTGGTGTCAGGTAGAAACACTTAAA
TGTCCTTGCTACCTGATAGTTAAGCCCATTGCACATTTGTAAATGGGTGTAAAAACACTTATAGTAATTCACACTACTA
GCTACTGACCAGCCTTTCCCCAATTTAATCTATATTTTAATCCATGGAATCATTAAAATCTGAACTAGCCATGCTTTAC
CTGAACTTTGACCCACTGGCAAGCTTTGAGGGGAAAAAGAAACCTGGAGACATACATGCACTACAAATTTGAAGTTTTC
CTCTTCCCATTCCAGGAATCCCCTCCTTGTGCAGACAATTACCGTGTATCCGAAGCTGCTTTATTCCATAATAAGAAAG
GTGGGCCTGGATTACCACAGAAGAGGAAAACTCCTGCAGAGAATGTAGTCAAACGGCCTCGAGTACACTGAAGTGAGCC
ATACACAACCACCCAACGAATGTTTTTGAGTTTAGTGTGCTTGCCTAAAATGTATAAAGTGCACTAGAAAATTTTCAGC
TACAACCTGAACATTGCTGTGATGCATTTGTGTAGCAGTTTAAAGGCATACATCTGAAGGACTATGCTTCAGATTCTAA
TGATCCTGTAAACTGGATACCTTTAACCTGAATTTGAATCACTGGTTATTGACTGTTCCTAATGAGGCTGAAATAGTTT
TAACAAGGAGATTTGTTTCAAAAATGTCATAGTTCATAAAAGCAAAAGTTATACATTAGGGTTATTTCATGTTTTCCTG
ATTTTTATATATGTATTCTTGCCATTTAACCTCTTTAACAGCCTGAGCAGAGAGTTTAACAATGAAGCTGGGGCTCTAA
ACTTAAAATATGTATATATGTAAATGTGTGTATGTATAAACTTCTATCATTTGCCAAACTTGGGCACCAAAACTTTGAG
ATAAAGAATAAAAAAAAATAGCAACTTAAACTGTATTGATTTGTTCATTTAGATCTGTTGATATGCCAGACTTAAAAGC
TGTCTCAAAATACACTCACGCACCTCACCTGCAATCCCAGCACTCAGGTATTGAAGTAGGGTCATTGAGTCCAGCCTAG
CCTGGGTTGGAATGAGACGCTCCATTAAGCAAAGGACTAAAGAGGCATCAGTTGGAGACAGTGGTGGCATATGCTACAC
AGAGAAACCTTCTTGTCGGGGTGGGTTGGTGGAAAAAGCAACCCTTAGAAGGTGTCTCACAATTGCCTATAAAACTATT
AACTCCAGAAGCATCCGGGCTCACTCCATGGATGCCAGCACTCATGTGCAGACAAGTATCTTTTTAAAAGGTGACAGAA
ATTTGTTGTGCTTCAAATAACTTGTTGCACTAGCCCAGGTTACCCAAATAATGTCTTGGAATAAGGGAGATGGATAGCT
TGGCTCAGGATAAAGTAGGCATGAAGAACTGGTTAGGTCCTAAAACACACATAAATCCAGGTGTAGGGCCCCAGAATCT
AAACTGGGATTCACTGGTTAGCAGAACAGCTTCAGTGACTATCTCAAAAGGGCAAAGGCAGAGGGGCTCAGAGGACAGA
AGCATTGGCTGCTCAGAGCACTGGAGTCCCAGGAGGTCCAGTGCCTTGTGGTTCTATAGGTACCAAGCAGCACGCAAAT
ATTCAGGCAAAACACCCATGTTAGAAATAAATGTAGAGGGCCAGGGAAATGGCTCAGGCTCAGCAAGCCTGACAGCCAA
GTCTCATTCTCCAGAACCCACTATAGAAGTAGCTCAAGTTGTCTTCAGCATCCTCAAGTTTCAAAGACACCTGATCTGC
TGTTAGTCTCTGGCTTTCATATGCTCACATAAGGATCCACCACCACAAACTGTATGTGTATTTTTAAAAAACAAACAAA
AGCCAGGGATGTACTTTAGTTGCAGTGTAGGAAGCCTAGGTTCAGTCCCAGCACGGCATAAAAACCAGGCATGGAAGGA
GGTAATATAATAGGGTCAGAACGAGGTCATCAGCTACACCAGGTTGAGGCCAACCTGGGCCATGTGAGATCTTGTCTCA
AGACTACAATAAAAGATGAGACAAAGCACTTTACAAACCACAAAAGGTACTGATGTCTAGATATATAAAGAACTCAGTA
ATAGCCCAAAATGCTGGGAAGGATACACATAGTCACTTTAAAATGGTTTCAGGTCTGACATTATCATGTGACTCTGATT
TAGCTTTAGGTATACACCAAAAATAGGCAAAAGCATGTTGACATTAACACTTGGCAACTCATAGCAATACTGAGGCAGA
GTGAAAACGAATGTCCACTTAGGAACCCATACAACTGGTTTACTTAGCAACATGGTAGTACAACCATGGATGGCCTCAA
AAGCATGTTAGTGAAATGCCAATCACAAAATACCACCTACTGTTCATGTGAATGCTCAGAAGAGGAAAAACCATAGGCA
GGGGGACAGGGCAGTATGTGAGGCAGAACAACAAATGTCTGGGAATGAAGAGTTACAATGGGCATGTGCCCTTGAGAAA
ACCAAGAATTTTGTCAGCCGAGTTGTTTTATAACCCCAGGTAGCTTTGCAACAAGCTATGTTGATTAGGTTTGCCACAA
AATATCTTCCTGCCCATAAAGACGTGTTGAGATTTATAGATACAAGTTATTAAATATATACAAAATCAGAATCTCAGCC
AGCCTTAGCTACAAAGCAAGCTTAAGAGTAGCCTGACCTCATGTGAGACCCTCTCTAAAGAGCCTGTGGAAACTTAGAC
TGAGATCTTGAGTTCAAAGCCCATCTTAAATTAACTACACAGTAAGACACTTAAAGATAAAAAAGTTGTATGTAGCCTG
AGAGTAGAGTACTTTGCCTTGAACATTTCTGGCCCTAAGGAAGAGTAAGTCTTGTATTTTCTTTTAAATAAGCAGTTAA
GGAAAAAAACGACCCTCAGAACTTGATGCTCAGTTAAGAGCACTTGATGCTCTTGCTGAGAATCACCCATGTAAGGAAG
TTCATGCCTCAGACACTCTAGGGCCAACACATTTGTTTCTGGTCTCTATAAGCACCTGTACACAGTAGCATATGTTCAC
ATACATACATGAATATCTAAAGCCAAAGCACAAAGAGTAAACAGTAAATATTGATCCCATTACCAAAAATGGCTTAAAA
TATACCTTTACTAAGACTATAAACCAAATCCTAAAACTGGAAAGTGCTGTTCCTTTTAAAGGCGTGTAAAGGCTAGAGA
CAGCATTGGCCGCTCTGGACCTAGATCTGATTCCCAGTGTCCACACAGTGGCTAACCTTGTTAACTCCAGTTCCAGTAA
TTTCTTTGGCCTCCAGCACTTCTGACATGTACAAAGGCAAAACACTCATTCACATTTGAAAGGGGGTGGGGGGGGGGAA
CCAAAACCCTAAAAATTAATATTTTGTATAAGGAGCCCAGAGGTGGCCCAGAATACGTTTAACACTTTTTCATAAGGAG
TGTCTCTAAATTGCAGCCATTTTCACTCATGCCATTTAATATCTACAGAATGTGGCAAACATTACTAAATGCACTCTTG
GAGAGCAGGGTCATCTCCACAAATGGACTGCACACTGTTCTCCATTCCCTAGAGTTTAGGCTAAGGGGTTTCAACAGAA
AGCATCACATTCCACCATCCATTGGTTTACTGTTTATTCAATGTTAAATGTTACAGAGTTCTTACACTGTCAGAACCAT
GCCTGAGAACCCAAAGAAAGAAATGGTGCAATGGACAGCCTCATCCACCCAGACAGTGTATTAAAACTTGATTCATATG
CATTTTGATAATTTCACAATCTTAAAAAATAACAAGACTTGGAATTTACATCTGCTGCAGTTCTTCAGCGTTCCAGTAC
AGTATGCCATTAAACAAACCTCATCATGTTTCTGTTCACGTCTTAAACCATAACCCCAAACAGAATCTGTGTTTGTGTG
TCACGCTGGAGTGAAGCATACTTTAAGGGAAGTTTGTGGCTCAAGGTGTTAACGTTTCTGGTGCCCAAATGAAGTCTTC
AGTTCAACTAAGAATCTCAAGCCTCTAATCACTCAACCTCCTCCTGGCTGGTTCAGATCATGCCAACATTATTGCTCTG
AAGTGGCATACAGTCTGGTCAGGTGACACTGGCCTCCACCTCCTGCTTCCTACACTGCTGCCCTAAATCCACTAAACAT
GCTCTCAAGCTGGGAAAACATCCATTTCCTGTTCCACTCCTGTCAGTAGTGAGCAAGTCTGACCTGTGTTTGGCAAAGG
GATTCGTTTACAGAGAGAAACCCAGGCACTAGTATTGTATCACATAGTCATATGCCAACATAGAGTATGTGTACTGAAC
CATCTGTAGTGACAAGGTAGGTAACTGACAGGCTATTTCATTAGGTAGAAAGAAATTTAGCAGAAACCTCTTCTAAGAG
CCAAGTACTACTAGATAGTTAAATTGAAATTACAACAGAAATGCTACATTACTGACTATTCCCCTGCGTCTCCAAGTGA
TTACCAAACATACTCCCAAGGTGAATGTCAAGAGCTGGCTAAACAATGAATAGCCCATAACCTTCACATTTGGGGCACA
CACAAGGATTTATCAGACACCATGCCAGATTCATGCGCAACTTGGGTGTTTTGCTCCTGTTGCTTTGAACTGTTAAAAG
CCAGGTCAGTGAAACCCTCTCCTCCTGAGCAGACGTCACACTCTGTCCACAGCAGTGAGCAGACGCCACACTCTGTCCA
CAGCAGTTCAATTAGACCTGATTAGGAGGCTTGAGCAGCACCTGGAGTGCAGCGGATCCGCTGTCCTTTATATGCATCA
AAGGCTATCTGGTTCCACCTAAGGATTGGCAAATTCATAGGGCATTTTACAATTCCAATGCTTCTTTCAGACATATTTC
AGACAATATGCCCTTAAAGAACTTACTCTGAGTCAAAGCAAGGCCTTAATGTGGAACCGAACAAGCACTATCTGAATGA
AAAATTATTCAAAGAAATAAGACTACCCCCCCACCCACTCCCCATTTGGTGGACCAGAGTTTGGTTGAATTAAATCCAG
TTACCGCATAAAACTAAAAACTTAAATTATAAATCATAAGCCCCACACAGATGATCCAAACACATCATTTCTGACAGCG
GCTTGTTCCAGGGAGTCTAACACAGCCACAGCCTACAGAGTATGCCTTAGGATGGGGCACAGAACAGGTTAATTAAGGT
CACTTAACTCTTCATCTTTTACAGCGGCTCAGAACCCAGATGGCTGACTTCTGAAGGCTTTCTGACAGGAATCCAGTAG
AGTTGGTTTCAAGGTTCACACAGACACTAGTAGCTGTAACCTTATGTAGAAGATGTGATCCACATGAAATCCACAACTA
AGGGCAGCAAATCTGAGGTAGTCAACCTTGCGAAGGCTCAGTATCTGAACATAAAGATGTTTGAATGACCACTGGCTGC
AGGTTTGGTTTTATACGCAGAGCAACTATGGAAACACTGTTGAATCTAATTCACAAATATTTAAGACAATGAAACACCC
CTAAATCCAACACACATCAAGATCAGTCGTGACTCTTGAACTTCCATAGTGCAACAGGGACAGTCACTGGACTTGAGGT
CTTCAGTCAGTCACTGTAGATCCAGAAATCAAAACGATGAATGGCTGTTCTTGGTGGTTAGCTGTGGTCTAGTTACCTT
GGAAGGCTTAGCAAAGACCATTCCTTAGCTGTACTGTGTGTGGCTGTACTTCTGATTCTCAAGCACAGCATACTGGTTG
TCTAGCTGAAGTTTAAGGGCCTGGTTTTTTGAAACCTCCTCCCTATCTCTATTTTTGTGTCTTACTACTTCAAAGCTCT
TCTCCATTTCTTTATCCCTAAGGGAAAAGAAATGTAATCAGTAAATATTTCTTCTTCACTAGGGAATTTTGAAAGTACT
CTTCCTCGAATTTAAAAAGAAAAAAAAAAAAAAAAAAAAAAAAAAAAGACCCTAAGGATAATCCTGGAGAGACAGGAAG
AGAATACAAAAATCCTTATCAAACCATTTTAAGGCTTCAATTGAACAGAAAACATGTAATACTGTACTGAAGCTCCGAG
GTCCCATCTTCTGCATATTTTGGGACCAACTTGAAAACAACCAGAAAGAAGCTGTATAATGACATTCCTTCTAAGACTC
ACTTCTAAGTTTTCGCAGTTAGTAGATAATACGTCTTTATGCATAAGGGCAACAATTTCCTCATTCAAGTAATGTTCTC
ATCATTCAACAATTTCTCCTCCCTTTTGCTTTGGGGGAGTGGTCTGATTAGATCAGGTACAGAAAGATGTGTGTGGCAA
GTCACTGCTCTCCCAGAGTCCCCCACATGTGAGGACAGAACGGAGAAGCAAGTCCAAGTAGAGGTCTAAATTCAAGCCA
GCTGTGCTCTCAACGAGGTGAAAAGGCTGGGATTTACTTTAAAACCACCCAAAAAAATTTTCCATCTGATGCCATTTAC
ATTTCTTCCCACTTTATTTTTGAAAATTCATGTCCCTAATAAGATGTAGATGTGCCATATGTGGTCATTTAACTTCAGG
TAGTATTCATTTTAAGTACCTGCTGAATGAAATAAGATTATTTATAGTATTAGATTTATAAATGCCAACATCTTTCATC
TTCTCACATTTACTGTGAATGCAATGATAAATGCTTCTACAATTCTAGTTTCCATATTTAAAAGGAACAGAAGCCAGTA
ATAATGTACTTAAAGGACTCTTCCCCCACCTTCTCCTTCCCTCCTGGGTACCAAAGCCTCACCATGTGCCCAGCTGCCT
GTCAGAAAGCCTAGCTCATAGCCTCACATACTTACTTCCGGCTCTCTACATGCTTGGCAGTGGACTGCAGGGATGGGAA
CTGCGTGTCACTGTATATTTCTGGTGGTCCTTGTGGCGTTTTCCTTGTTGTGGTTAGCCTTGCCCCAGGAGGCCTGTAT
ACACCACTGGGCATTGCTGGCTCCGGGGTTTCTGTAACTAATAGATAAACCATTCAAATGTTTGACTTTCTTGTAACAT
TTTCCCACACTCCTGATCCTATAACAACTGTAGGAAAGGCCACCCTGATTTAGAATGGATTTGGACTACACAATAAAAA
CAAAGTTCTGTGAGAAAATGTCTCAAGTAGAACCTTGCCCATCTCTTAATCTCTTCTGAAATTCAACACTGCTGTCGCT
GGTGTTTCTATCAAAAGGTGACATCTACTTTCTCTACTTGAAAGGTGGGCTAAACAAGGTATTTTATATAAATTATTTA
ATAAAATACACATGCAGTATTTTAAATTCCTAAAAATAATAAAGGTCTTTATTTCATTAAGACTATTGGATGTTAAGTT
TCTCTATTTGCTTATAACACAGGAAAAAGCACCTTGACTTTAAATTTACTGTGACTGAATTTGGGGGCCACAATGTTTC
AGGTTTTTCCTGTCTCCTACCTTCCCAACTGACCCTTGATATGTATTCAAGCAGTGTCGTTTCCCACTTTATGAAAAAT
TTCAAAGTTTCAGGCTGGGGAGGCTCACTGGGACAGCACTGTAATCATCTACTAGCTGAAATAAAATGTTCTTATAGTT
TAAAGGATTGCTTTCTATAGGCTTTGTTATGCCAGAGGGAAAGCATACAAGCTTTTACTGAGTATCTAAGCTGCACTTG
AGATACACACATTAAAAACTGCCTTGAGGCTGGCGTGGTGGCGCACACCTTTAATCCCAGCACTTGGGAGGCAGAGGCA
GGCGGATTTCTGAGTTCAAGCCCAGCCTGGTCTACAAAGTGAGTTCCAGGACAGCCAGGGCTACACAGAGAAACCCTGT
CTCAAAAAAACAAACAAAAAACAACCTGCCTTGAACAGTGGAACATGCTTGCAACATGGGAGGCTGAGACAGGAGGATC
TGGAGTTCAAAGCCAGCCTGGGCAACTCAGACCCATCTTCAAAAAAACCAGACCAAACACTAAATAACTACTGACCCTT
ACATTTCAGCCACCACATGTGGCTTTTTAAAAAAAATTCGTTATTTGTGTTTGTGGGTGATATGACTTGTGAGGCTTGC
CTGCTCTCTTATGCACTCATTCATTCATATGTTTTTTTAAAGATTTATTTATTTATTATATGTAAGTACACTGTAGCTG
TCTTCAGGCACTCCAGAAGAGGGTGTCAGATCTCATTATGGATGGTTGTGAGCCACCATGTGGTTTCTGGGATTTGAAC
TCGAGACCTTGGAAGAGCAGTTAGTGCTCTTAACCGCTGAGCCATCTCATCTCAGCCCCGTCTCTGTAGCCCTGGCTGC
CCCAACTCAAACACCATCTGTCTGTGTCCTGAGTGCTGGGATCAAAGCAACACATGTAGCTATTTTAGATGAGTAAAAT
GAAATCTAGGTTTCAATTCCTCAGTCACATTAGCCACCATGTCCTAAGTATTCAACACAGCTACATGTGACTAGCCATC
CCTCTCTCACTTGAGCTCATCCAGCACCCCCCAAAATGCTACCTAATGGGCAGTATATTCTAGAAGAGACAAAAAAAGG
GGAGAAGGGGAGAAGGGGTGCCATGCCAAAAATAACAGCAGGAGTACAAAGGAGCTACACTTCAATGTGTACACACATC
ATGTAGATACACAGATGCCCCTGGTGGCCAGAAGGGAAAGGTGGATTCCTTGAAACTGGAGTCATAGATATTTGTGGTC
CTCTGATAAGAATTACTAAGATATAATTCTGGTGCTGGTAGAGTGTAGGTTAGTACTCTTAACTGCTGAGCCCCAAAGA
GGTTACATATTAAAAGGGGGCTTGGGAAGGGTTTTATTAACAGGGTAAAATTAAGCAGATATGAAAAGACCCTCTTTAT
ACAAACCTGGTGGCAAGATCCAGCTCCACAAACTCACCACACAAATAATAAAAAGAAAGCCAACACTTAAAACCAAATA
TTAGTGAACAAGCTGAATCCGGCCCAACAACTGAGCACAGCTATCCTCACTGCTGTTAATTCCACATTACTGTCTATGC
CACAGCAGCACAACAGAGACCACAGTCATCTACCACCTGGCTTTTCAGGCACCTGATAAAAAGAGGAAAGAGAAAGAAA
ATACTCCCAAAGCTAAGAACTAAGGGTCTGCTGGAGCTGTGTGTCTGGTGCATTCCAGGAGTAGCTTGAAAGAACATCA
GGTTCAGGAGAAAAAAAAAAAAAAAAAAAAAGGCAGCATTTCCATGGTGATTCACACTAGTCACTTCAGCACTTGCCAT
AAGCATTAGAACTTAAACTCATGTGCACCAAAGCCCAGGCATGGCAGCAGCACATGCCTGTAAACAGCACAGGATGGGT
GGGTGGTGACAGAGAAAAGAACATCCTAGGAGTGCGCTAGCTAGCTAGTACAGCCATTCAATCATCTCTAGACTCGGTG
AGAACTTGTCTTAAGCATTTAGAGTGACGAGGAAGACACAGCCAACCTCTAGCCTCGATACCCACACAACAAGACATAA
ACACACACACACACACACACACACACACACACACACACACACACACACACACACACACACAAATTCAGGGCTAGCCTGA
GCAGAGTGGGGATGAATATTACCAAAAATATACTGATGGCATTCTCAAAAAATAAGAACTTTACATATAAAAAATTTTT
TTAACTTAGAAAATTGCCAGGAAAGCTCACACCTGTAATCTCAGGTTTTGGGAAGTGGGGTAGCATAAGGTCATCTGTA
TTACAGAGGACTCAAGGTCAGCCTGAGCTATATAAAATAAATAAAACTAACAATTTTGAGATGAAAATGCAGCTCTGTG
GTACAGCACATTTAGCATGTGCAGAGTTTTTAGAGTTCAATTTCTAGCACAGCAAAAACCAGACAAACACGCTGAGCTA
GGAAGCTGGCTCAATGGCTACAGTCTGCCGAGCATGTGTACAGGATGGTCAGATCCATGTAAGCCTAGGCAGCCATGGC
AAGGCACACAAACAGGATCCTAAAAGCAAACTGGCTAGCTAGGATAGCTAGAACTGGTTTGAGTTCCCGGTTCCTTGAG
AAACCCTACTCTCAAAAAATAAAAATGGACAATGAGACCGGCACCAAGCTGTGGTCCATCCACAAGCACTGTACAAACA
TGCAAACACACATCCAACAACACACATAAACCCCTAAAAGTTCTTTAGTTCTAAAGAAATTTTACTCACTCCCTTCTGC
TGAGAATGTAAGCTTCAAGACCTAAGTGCAGCACCAAGAATGTGATTTAGTGGTAGGATGATAGCAGGAGGTGAACTAC
TTGGCTTTATTCCCTAGCACCAAAAACAAAAGCAAAACTTTGACAGCCTACAGGACAAAAAAAGTATGTCCCTCAATTT
CTACATTCCTTCCACTAAAGCAGCATCCATTTGGATCCACTATGCCCATCCCTCAGGAGGGAAAACAGAAGATCACCTG
TTACTGGAGCAGGAGGCGCTTGTACCGGAGCGGTTTTATTCCAGGGACCTGAAGATTTTTCTGCTCCACTGCCACCTCC
ACCTTCTTCCCAATTATCTCCTGGATCTTCTCTCTTCTCATTATCATCATCTTCCTTTTCACTATTGAAAAACAAGCAC
ATTGAACTTCCCAAGAACTGGAACTAGATGTATGCACCACCATATGAAACTTCTACAAAAAAATACATTTCTTTTGAAA
ATATGGTCCAATTATACAGTCCTGACTGGCATGGAATCAGATACGTAGGCAAAGCTGATCGACATCTCAGAGACCTGCC
TGTCTCTGCCTCCCTCTGCTGAGACTAAACTCTTTAGGGGCGAACTTTTGGGAATCAGTTCTCTACCATGTGGATTCTA
GGGAATAAACCCAGGTCATCAACTTTTAACAGCAATACCCAATAATAAGCCATCTTGCTGGCCCCCATAAAAGATATTC
CTATTAAAGCAAGATGTGTCCTAGCTTTAAGCCAAATTTCTTCTGGCTTAGTGTTGATTTTTTTTTTCCCTCCATTGGT
GAGTGGAGTCTAACTTGGATTCTCATGTATGCAACAAAAGCATGCTAAACTGAGCCATACCTAGAATCCAAGACAAGGC
CTCACTCAGGTAGCCCAGGCTGGCCTTAAACTCACTATATACTCAAGTAAGCTGACGATCCTGACTGATCTTCCTGTCT
CTATCTCCCAAGTGCTGAAATTAAAGGTGTAAACCACCATACCCATCTTTATTAAGGCCCTTTAAAGACACTGCCCACC
AGCTGGAAGTAACCCCAGCATTTAAAGACTTATGATGTCAAGAAAGAGGAACAACCTAATTTCCAATCTGTATTTAAGA
CTAAGACTGTCTCTCAGGGCTCAATAACAGAGCACTTCACCTGTAACTCAAAAAGACAAACAGAGAAGTAACCACCGTT
TGGAGGCTGACTGGTGACCTCAGCATGCAAGCTGAGGCAAGAGAATGATGACGTCACTGATACTTTCTCCAAAAACTAA
AGGTCACACCTAGATGGTCCTTGCCACCAAGCCTAACTACCAGAGTCTAATCCCCAGGATCCACAAGGTGGAAGAGAAC
TAACTCCTGTTGGTTTTATTCTGATATGCATGCCACAGCATGCTCACACAAAATAAACTGCAATTTTTAAAAGACAAAG
GAAAAAGAGAAAGCCAAATTTCAGTTTTCCCTTTTAACATACAACCTGTCCAGCCATATAAAATGATGCTGGTCACTAA
CAAATAATATTCATGCCATTTAAATCATCATCTAATACATTATACTTATCATAAACATCAAACATCCAGAGAGAATCCT
AAAGATCTGTAATTTTAATGAGAACTTTGATAGCTAAAACAATGTTAGGAACTGATTGCTCAAGTCCAGGTTCTGCCAT
CTCTGTCATTTAATGGTCAGGCTTTCAAGATGATACTGGCTGGCTTTTAGATATCACCAATACGAAGAGCAAATTTATA
CACTCAGTACATATATCACCTTCGTAACAGGAAGTAAAAAATTCTAGCTTTCATTTGAAAAAGAGATGGGAACATGTTA
TTCTCTAATGGATCGTAAAAATCTGATCAGATAGCACAACACCATTGTCTAACAGTAGCTTATTAGCTAGTATGAAGTT
TATAATTACCCAGGCTAATTGTGGTTTCCAATCTTCATAATTTTTTCAAGAGGTTTTTTTTTTTTTGCCTTTTTAAATT
GTAAAGCCATGTCAATACTATAATTGCTTCAGGGATGAAATAGGTAATCATCTGGGTGTGGTAATATCCCAACAACCTA
ATGCATCCAAAAAAGGTGAAAAAGATTCCCACCTACATGGCATTTACACCTGCATACACTGAAGCAGTTGCTTTCAGTT
ATTCATTCACTCTTTGAATCTATTCACTCACCAACACAGTAAATCACAACTGTTCATCTGTATATATGGTAAGAACACT
TGCTGTAAAAGTAAAAAGAGCAGAGTTCAAACCCCTGGCCCCCACATGAAAGCCAGGCATGTCAACACTGCAGGGCAGA
GACAAGTAGATCCTAACAGTTTATTAACAACTTCCTGACTCTAAAAAAGTTAAAATAAAGAATTTTATATCCTGTTAGA
AAACCAGTTCAATTTAAATGTTCTCCATAATTTAACAAAATCAAATTTTATACTGAAAAAACTTGAAGGCCACCCCTCT
ACCTTCAGAAAGTGTTACTTTTACCCACTAAAATTCAAGTCAATATGTCCAGAAATTACCACTCAAGGGCATAATTTAA
CTTCAGAGCAGGGACCACATCCAGATAAAAGAAAGGAACCTGTAAACTCCCTCTCCAGATTTATAGATCAGACTTGGAG
ATACAAAACAAGAACATTTTCTACTTTTTCTTTTAAGTTTTGAGATAGGGTCTCACTAAATTGCTCAGAGTAACCTTAA
ACTCACTCTAACCCAAGCGCACCTGATTTTTCTTATTCTCCCCACCTCAGCTTCTCAACAGCTGACAGTTAAGGCTTTC
ACCACCAAGTATTTTCTAAAATTACTCATAAGCTTATATACTGCTCTTGTAGAGGATACAAATTCAGTCCCTAGAACAC
AGCTCCCAACTACCTGTAACTCCAGTTTCAAGGGAACTGATGCGCTCTCTTCTGGCCTCGACAGGCACCTGCATGCACA
TACATGTACATATACATCCCAGACATACATATGTAATTAAATCTTTAAAAAAGGAAAAACAAAGCAAAACAAAACACTA
AAGCCACACCAAAAAGGGAGATAACTTCTAAGTTCCCTACTATAAAAAACAATGTTTAATTTGGTAAATTCACAAGTGA
GAACACCTAGGGATATGAATGCCTGGGTGGTACAGACACTAACCATACATTAAAATATACTACCTGGCTTTTCAATAAG
TTACCTCAGATCATATATAATCTAGATTTTAAAAGATTAATTTAGAGTTAAGAAAGTTATTTCCTCAACAACTGTCCCA
TATGGTCACTGGAATTCTCTACAAATTGCAAGCTTCAAACCAAAGACAATTTCCAATCATTTTGCTTGTGTAAGATGAG
TAAAGGATTTTAAGGCAATAGAGCCCTACTCACTTTTGAACTTCAAAAACCTTACCTTAAATACTTACCCTTTCTACTT
AAAAAAAAAATCTTTCCAAACATGTTACTTTTAAAACCAGATCTAAAATGAACTACCACAGATTGAACGTGACAATGTA
GGTTCTCTTAAATCAACCAATCCAACTGTGAAAATGACTGTTTTCCTGAACTTTGAAAACCAGTCACCTCAGAGCCCGA
AATGGCAGGTAGCACAGGCCTGCAATTCCAGCAGCTCAAGTTCAGTCCGGAATACACAGCTAAGAACTGTGCAAACGAG
GGCTAGGGTAAGCTACTTTTGGGGATAGGTTCAGAAGAGCCTCTATTAACGTTCAATTTTTTGACTGGGGTAGTGGGTA
TTCAAGGTGGCTTCATGGTCAATGCAAATTCGTGTATGTTGGAAGTATCCTACACTGCAATTACCAGAGAGAACTAGAA
AACAATTTTACTAAGTAAGTAAAAGAAAAAACTAAGTTCCTGCACAGCTTGGTGGTACATTTGGGTGGACACTTTAGAA
TTAAGAGTTCAAGGTGACATGTCGCTCAGCGGTCTTCCACAGATCAGGGTCCAGCTCACAGAACCCACACTAACAGCTG
TAATTCCAATTCCAGAAGACAGTACAGACATGTATTACACAGGCAACTCGCTTCAAATATTTTTTTTTGGAAAAAAAAA
AAAAAAACAAGCCCCTTCTTCTCCTGAGTCACACAGTAAGTTCTCAGGGCAGCGAGTGAACTACAGGAGCCCTACTAGG
GGTAGGGAAGACCACCTAAATTCAAACACGAAGTGTTAAAAATTTTTAAATGACAAAAATCCATTTTAGTCAAGCCAAA
AATCCACATAGCTGCAAATAGGGAAACCACAGGATTTTAGAGTTGGCAACTAATTTAATGACACAGAGGGCATTTAAAA
AAAAAAAAAAGTAAACGCGTGCACTACTTAACAAGGTTACCTAATCCCACGTGTAATCACATCCTACCTTATTTGCATT
GCCTGAACTCTTAATCCGCTGTAATCAACCTCTCTTTGCTCAAATTCTTTCCACTCATTTTCATCCTATGGAAGAAACA
ACACCTGATTAGTTTTTGGTAAGCCCACTTCAGACTAAAAGGCATCAAGGGCCAACGGGATTCCCCAAACTGGTAAAGG
TACCCGCGAAACATCGAATTAATTAATTAGAGATCTTGGTAAACAGATTCCAGACTCGGAAAAATTCCATCAGTGGTCG
CCAGGATTCTTGAGTCGGTCTAAGAATCGGCGGCAGTCAACACCGAGAACCAGAGAGTCTAACTCTCCAGGCCCACGTG
GTGGGAAGAGAGAATTTACCCCGGCCTCTAACCTCTCCGCACACGTACACAGGAGTGCGCGCACACAAATAAGCAAATA
AATGTGATCTTTAAAAAAAACAAAAAACAACAACAACAACAACAACAAAAAAAAAACAAAATTGCAGACAGTGACACAG
ACCTTTAATCCCAGTACTCCAGAGACAGAGGCCGGAGGCTCTTTGTGAACTGGAGGCCAACCAGAGCTACACCGTGAGA
CCTTGTCTCAAAAATTGGGGCTAGTGGCCGGACGGTAAAGTTTAGCCCGTTCCTGCAAGATCCGGAGACGTGCCTAATT
CCCAAACGCCCTCTCTGCCGCCGCTTTTACTTAAACCCAAGCCCAGGGCGAGCTGAGCGGCGGAGAGAAGGCGACAGAA
ATTCCACAACTCAATTCCCAGCCCTGCGTGGCCGTGGTTGGGAGAGTAAGCCACGCTGGCCCGGGCGGCACAGAGGAGC
CTCGGAACACCTTAAGAACATGAAATCCGGCCCCAGCGGGGCTCAAGCGGGACCACGAGGACTCGGGCACACGTCACCC
GGGGACCGGCCCAACCCCCGTGGCCCAGAGGGCGCGGCGCGCAGAGGGCCGCGGACGGGGGCGGCCAGACGAGCCCCGG
GGGCCGAGGACCGCGAGCCCGCCCGCCCGCCGGGCCGACGTGCGAAGCCCGAGTCACGTGGCCTCCCGGGCCGGCGGGG
GCGGGCACATGCGGCCGGCCGCCGGCCTCCCGACCCTCACCTTCGTTATGGCCTTGCCGGCGGGGCCCGCGCTCCCGCC
GTCTCCGGACCTCGAGCTCCCGCCGTCTCCGGACCTAGCACCAGAGCCCGAGCTCCCGCCGTCGCCCGACCTGGAGCCG
GAGCCCAAGCTCCCGCCGTCGCCCGACCTGGCACCGGAGCCCAGGCTCCCGCCATCGCCCGGCCTGGAGCCCGCCGCCG
CGCTGCTCCCGCCCGCGCCGCTCGCCGCGTTGGCCGCGCGACTGCTCCGTTCCTTCTTCTTCTTCTTGTCCCTCTTGGC
GAAGAAGTTGTCCAGGCTCCGCTCCTCGGTCTCGGCCATGGCCGCGGTCCGGATGGGTGGGGCCGGCGGAGGGCGCGGC
GCTCGCGGCTCCGAGCTCTGGGTCAAGGCCGGCTGTGCGCTCAGGCTGCAGGGTGCGGCGTCGCCTCAGCCCCGCGGGG
TCGCCGAGGCGCGGGCGGCAGGGCGGCCGGCTCCCCCCGTGCTCTGGTGGTACGTTCCTCGCTGGGAACCGCGAGCGTG
GAGCAGGGTCGCGCCCGCCCCGCTGCCTGAGGGACAAGGAAGGCGCGCACCGGCGAGCGCTCGGCTAACGACGGCGCGT
GCGGGAGGAAGACGCGCGGGCCTGAGGAGGGGGAGAGGGGACGGGGAGGGGAGGGAGGGGAGGAGGGAGGGCGGGCCAC
CAGCAGAGAGAGGCAGCGCCGCGCCTGCGCGCTCGGTTCCGCCCGCCGCTGTGGGCGCGCCGAGGGGGGCGGGCGGCGG
GATGAGAAGGGGGCGGGTCTTCCGGGAGAGCCAATCAGATGCCCGGACGGAGCGCTTAGGTGACAATCCGTTCCTTCTA
CGGGGCGGTGCCCTGTATGGGGGCGGGGAGAAAGCGGGTGTAGGCAAAGAGAGTGACGTCCCTAGTGACTCCTGCCTCC
GATTGGCCAGGGAATTTGCCTTGAGGGCGGGCATTTAGAGGGTTGGTGACTTGGCTGAAGAAGACCAGCCGGAGGGGGC
GGGTGTGCCTTGGTTGCGCGCATGCGCAGGGTACACGTGCGTCTGCTCGCCAGGACTGTGGCCTGGTAGGCGTTTGAAC
TTTCAGGAAAAGGAAAGAGACCATGTTAAGCCAGCTATGTTCAAGCTTGGTCCTCCTGCCCTGCTTTTCTGTACTCGCA
CCCTCTCTGGTCGGGCACCTATTACTTTTCTTCTGAATGGAATGCTTTTGATGAGGAGCGCTGGATTAGTATTCGTGGT
TCCATTTACGGAAGGATCTTAAATAAGCCAGTGCATGAAAGGAAGGGAACTGATTTTGACTAGCTGTGTCTACCAGGGT
CAGGCTAAATAAATCTGACCCTCTAACGCTAGCTCTTGTGAGATGGAGAATGGCTGGGAATGTGATTTTGGTGGTAGCG
TGCGACAGGCGCATGTCAGCGCAGAGTCTGTCCACAGAATCACAAAAAGAAAACACACAAAACCCCTCCTTTTCCTGGG
TCTTCACCCTATTGGCACATACTATGTGAATACTTGATCCCCGAAACATCTGCAGCCCAGAAAGCTTTTTGTTTGCTTG
GGGGAGATTGCTTTGTTTTGGGACCGGGTCTCACCTACCCCAGGCTGCTTTGAACGCCATACATAGAAAAGATAATGTG
TTTCTGACCTTCCAGCCTCCACCATCCCAAGTGCTGAGAATTCAGGCATGCACTTTTGTGCCTATGTTAGCGATACTAG
GGGTTTCCATTCTTGCTAGAGAGGCTCTCTACCAGCTAAAGAATGAATGACCCAATACAGATGTTGGAGTTTCCTTGTT
TTTAGTTACACAATTGCACCTAGAATTGCTCCTGCTCTGACTTGAGTTTGAGTGATTGCTACAGTTTAACTTTGGCTCC
TATGCTGGATCTTAGGACAGAGAAGGGGATAAAAAATATCCTTGTTTCCACCTGACTTGACTTTGGGGCCTTGGAGAAT
CAAATGTGTGTTTCTCTATGAGACGTGTGGTCTGGGTATGCATTAAACTTCTGCTTCCTCTAAAGGGTAGAGGAGAAAG
CTGTGACAACCACTGAGGAAATGGCTAAGTCCTATGTCTGTAGCCTTGGGGGAAAGATAGGACCCAGCTAGTAAATGGA
GGGATGTCTTTCCACACCTGTTCCCTCCTGTCTTTCCTTACAAGTCCTTCCCTAGTTGTGGCTATTGAAGACCTACATT
CTGAACATATCGATGGATAAATGAAGGCTCTATGGCTGTAGCCAACAATAAGAAGACCTTTCTTTTGTTTTGTTTTTTG
AGACAGGTTTCACTATGTAGTCCTGGCTGCCTTGGAACTGGCTCTGAAGACGGAGATGACCTCAAACTCAGAGATTCAC
CTGCCTGGGCCTCCTAAGTGCTGAAATTGAAGGTGTGCGCCACCACACCTGGCTAATAAGCAGACATATTTGTTCTCTT
CCCCCAGCCCAGGATGGTTCCTAGGTGACTTCCTTTTGTGACACCACATATCTTCCTGTGGTATTGTCCAAGTTCAGCA
CTGCCCAGTGCCACCAGCTTTGCTTAACATCTCTTAGCAAACTTTCTTTTTACCTTCCTTGTCTTCTTTCCTCTTTCCT
TCTTTTTCTGCCCTTTCCTGCTCCCCACCCCCCTCATTTTAAGACAGTGTCTAAAGTATCCTAAATTAACCTTGAACAC
AGAGCCAAGGATGGTCTTGAATCTCCACTTCCAATTCTCTCTCTCTTTCTCCTTTCTCTCTCATTTTGTTTCTGTTTCC
TTTCATTTGTTTTTAGGATAGAGTCACCCTGTGTAGCCCTGTCTGGCCTTGAACTCAGAGATCTTCCTGCCTTTGCCTC
CCTCTGCTGAGGTTAAATCCCACCACTGTCTACAAAGCTGTTTCCTGTATCCTGCAACTATTTTATCAGTTGAACACCC
CACCCATTTTTCTCCTTTCCAAAAAGATGTATTTATCTTTATTTTATGTGCATGCATCAGTACATGGATGTGACTGTAC
ATCTGAACCCCTAAGCCTGGATTTACTGTGAGCCACTTGATATGGGAGCGGGGAGCTGAACACAAGCCTCTGGCAGAGC
GGTAAGTACTTCTCATCACCGAGTCCTCTCTCCAGCTGGCTCTCTCTCTTCCTTAAACAAGGTCTTCCTGTGTAGCCCA
GGAGGGCCGAGTGATAGATAACACTCCTGTCTCTGTCTCCAAAAGTGTTGAGGTTCTAGGCCTACACTGCCAAACGTGG
TTTGCTGTTGTTTCTCATTGCTGGTGGTCTAGGTGAATGCAGGTGTGGTACACAAGCACCTGTGTGTTCATGATCGCCT
TGGAGGCCAGTGGACAACCTTAGGTGTCCAGGCCTCAAGTGCCGTCTACATTTTCTGTTTGTTTGTGTATATATGCATG
TGATCCCAAATGACATGGTGTATATGTCGAGGTCAGAGGGCAATTTGCAGGCAGTAAGTACCTGTATCCACACAGCCAT
TTTGCCACTCCACCTTTTTTTTTTTTTTTTTTTTTTTTTTTTGATGGACATAGTTTCTCACTGGGGTGCACTTGGAGTG
CACTAATTCAGCTAGGCTGGCTGGTCAGTGATCACTAGGGATCCCCCTGTCTCTGCCTCCCCAGAACTAGGGTTACTAG
GACCCCTGTAACCTGCCAGGAGGAGGGTAGCCAGGGAGGCTTAAAAAGAGCAGCTCGAGAGAATAGCTGCCATTGGTTT
CTGGGCATTAGAGTCAAAGAGCAAGGGACCCGTTTCATGCTGCAGAGACTAACTACAGGTGACCCAGCCGCAAAGACAC
TACTCTCTGTCGATCCGACCTCAATTTCTCCCCCACAATGGCGTTTGGGACGTATGCCATCCATCACACTGCAGACCAC
AGGAGGGACTGCTGTGGCGTCAACCCTTGGCTGCTGCTCCTTCTCTGCATTTGCTTGCGCCATTGATCCCTTCAAGCCG
GTCATGGATTATTGATGCAGGTCCATTTATTTGTATCTAGATCTTGTCTTCCAGATTATTAAAGAGTTGAAGGCAGGCA
TTACTCAACTCTGAATAAGGCACAGTGTCTCAAGTAAGTGCTTCTTCATAAAGGAAGAGAGCCGGGGAGGGAGATGGCT
CACTTAATACGCAGCTTGCCTTGAAAGCGTGAAGGGCTAGGTTCAGTCTGCAGAACCCACATAAAAACTGTATCCCGTG
CAGTACCCCAAATCCTGCCATGGCCACCCCTTCATCCTTATCCTCCAAAGCGTTTTTAGCTCTTGCAGGACTCTTCACA
TCAATGTTCCAGTGTGTGCACACTGTCTCCATTCTTAAAGCCAAGCAAATCTTCTCTTGTCCTTGATGCTGGGAGAGAG
GAAGTGACCAATTGAGGCCATTCTAGGATATTTCAGGAAGTCTGGGAGAGGTTTTAGTTGTCTCTTTTGAAACAGGGTC
TCTGGTATGTGTATAGAGTGAGGACATGATCACTCCAATGTACAGTTGAAGAGAAAGTCTTTATTGTAGACATGAGGGA
GAGTACAGCAAAAGGCATCTGGAAGAGTCCAGAGCAGAGGAAGTAGACTGAACATGACCATGAGAGAAGGCGTGTGCTG
TGTGTGTGTGTGTCTCTGTGTGTCACACACACAAACACACACACACACACACACACACACACACACACACACAGAAGAG
ACAGGATACCAGTAGCATGGACTCTGTATCAGATATTTGTAATGCTGAGAGAACCAGAAGGCCAACATGGGCTTTGATA
TGCTAATAGGTACCACAGTTAGCCATTTGTCTTGAGTTTCTTTTGAACCTGACAATACATAACCCTGGCTGGCCCAGGA
TTTGCTCTATAAACCAGGCTAGCCATGACCCTGCCTCCTGAGTGCCTGGACTTAAAGGCATGTACCACCACAACAGGCT
TCTTCAAAGACTAAGACTGCCCAAACATGGCACTTCTCTCTGGGTCCTCAGAATGCCCAATTTGATGGAGGTCAGTTCT
CCCCATTCAGCAAGGGCTGCTGAGCTCTGATATTCTATCGAGAGCTAGCAGAAGGCAGCTGGGCAACCCCATTGTTGCT
GGGTTCTTTTCTGCTGAGCTATTTGTTCCAAGTTCCATTCTGCTCCCGAGGCTGGAAATTCCACCAGTGCTCAGCTCCC
AAGAATGCAGCACACACTGGCCAGACAGCTCAGCAGGAAGCGGGTGACCAGGATCTGCCGCTGCCTGAGTGTTCTCCCC
CAAACTGGCCTTACAGGTCTCACCTTGGGGGTGGTGGACATGGGTGCTGTGTCTCCTATGGTCACCACAGGCAGACAAG
GTATCTGACCTTACAAGGTCTTGGACCCTTTCTTTGGGTGATTCGATGCCTTGCTGATAGTCCCCTGATTTCTATTTTC
TTCAACCACTCTCATTCAGTGATCTAAAACATCTTAGCAATGTTTACTATACTACCAGGCCCTATGTTAGGAGTTAATG
ATAGGAAAAGTATAGGTTGGTGGTCGCTGCCTGTGACCTGGACTGCTTGCCGCTGGACCCTACCCACCCTCGGAGGTTG
GAGGTGAGGTGCTGCAGAATCGATGGCTCAGACTGGGGGAGCAGGTGAGAAACACCACAGCGAGCTGTTATGAACGCTG
CTGCAAGCTCCTTTAAAATCCTCCACCAGCACACCAAGAAAGCATCTCTTCTAAACAGCAGTTCCTGGTTGGCTGACAT
TTTCTGCGTCACCAATCCTTGGTCTCTCAGGCAGTCCTCAATTAGGTCCTCCTGCAGGCGATGCCTTTGCAGCTGTGCG
GCCTCCCTAGCATTCCTGCAGAGGCAGCCCCGCCATTCCTCCTACACGTGGTAAAGCCCTTGCCTACCCTAACGTGTGG
GAGGTACTGGGTTTGACCTGGAACTTGAATTCCTGATCCTTCTATGTGTGGTGAATTTTTTTTTTTTTTTTTTTTTTTT
TTTTGTCAACATAACACAAGCTGGGGTCATCTGGGAGGAAAGGACCTCAATTGACAAGGTGTCTCTATCACTGTGGCCT
GTAGGCATGTCTGTGGGCATTTGCTAGATTAGTGGAGGACCCAGACCTTTATAGGCAATGCCACCCTGGGCAGGAGATC
TTAAGTTGTATTTAAAAACAAAAACAAAAAACAACCCAAGCTTAATGTGCCCATGGAGTAAGCCAATAAGCAGCTTCCT
CCGTAGGTCTGCTGCTTCCTGCTTCTGCCCCTGCTTGAGTTCCTGCCCTGCCTTCCCTCAGTGATGGATTATGACTGGG
ACATAAACCCTTTCTTCCTCGAGTCGCTTTTGCTCATAGTGTTTATCACAGCAATTAACAGCAAAGTAGGCGACCATGC
CTCCGCCTTCCTCGGGCTGGAATTCCACTTGGGCGCCACCACACCTGGTTTCCTTTTGCTTGCTTGGTTTGGTTTGATT
TGGTTTTGCTCTCTCCAGGCTGGCCTCAAAGTCCTGGGCTTGCATGATCTTACTAGCTTACTATCCTAAATAGCTAGGT
CTATCTTTGACTTGATACAACTTCTTTTTTTAATTATGTGTGATTGTGCTGACTAGTGTTGTGTCAACTTGACACAGGC
TAGGCTCCTCAGAAAGGAGGGAGCCTCCATTGAGAAAATGCCTCCAATAACATTGAGCGGTAGGCAAGCCTGGAGGGCA
GGGCCCAGTCTACTGTAGGTGGTGCTGCCTTGGGCTGGCTGTCCTGGGTTCTATAAGAAAGCAAGCTGAGAAGGCCAGA
AAGCAGTAGTCTTTCATGGCCTCTGCATCAGCTCCTGCCTCCTACCAGGTTCCTTCCCTGTTTGAGTTCCTGTCCTGAC
TTCCTTTGGTGATCGACAGTACTGTGGAAGTGTAAGCCAAATAAACCCTTCCTCACAAAGTTGCTTTGGTCCTGGTGTT
TCATCACAGCAACAGTAACCTGAACTATGACTCTCTCTCTCTCTCTCTCTGTGTGTGTGTGTGTGTGTGTGTGTGTGTG
TGTGTGTGTGTGTGTGTGTGTATCAGTACCTGGGAAGCTATAGAGGAAGGTGCTGGATCTTCGGGAGCTAGAGTTAAAG
GCAGTTGTGAGTCACCTTGTGGGTGCTGGGAACCAAACTGGTCGTCTGCAAGAAGAACAAGCACTTAACCACTGAGCCA
TCTCTACAGCCCAGTTTCCATGATTTTTGGTTTTTTGGAGGTATGGTCTCGCTATGTAGGCCAGGCTGGCCTTGAACTT
GTGAGCCTCCTGCTATTGCTTCCTGATGAATGGGATTTTTAGAGTTGTGCTGCTGTGCCCAAGTAGCTCAATCCATTTA
TTGTATAAAGGACACAAGTTGAAGGGTGAGACGATATTGGAGACTAGAAAAGGAAAGGAAAAGATAGGATAAAGGCTAC
AGGACCTGAAGCATCTCCCACCCCTGTCCAGAAAACAGCAGTGTGAATTGGTGCTCTCTTGGACCAGCCTGCTGTGAGG
AAGAGATGAGTCACTGGACCCCACCCTGGCTTGGATGAAGTGGCCTCAAAGTGTCTGCCTTGCTTAACTCGGGATACAC
TCAGTAGCCAACCCACTGATGACTGCTTTGCCTCCCTGGATTGCTAACATTGAAAGGGTGCCCCAGCTGCAAGTTACTG
AAGGCTGATCCTCAGCCTAACACATCACTATGCAATTGTATACTTCTGGCTCACTGTGCACTGGATGACTAGGGACAGA
TGAAAACTCCCAGCCTGCAATGATAAACTCACTGAGCTACCAGTCAGACAACAGGCACAGTGCAAGTCCTCCTGACTCA
TTCACTTTGATCCCGGAGCGCAAAAGATGGAATTCCATTGTCAAGGTGGGATTATCCTGTCCCTGACCCCAACTCTGAC
CCTGTTCCTACCTCTTGACCCAACAAGGTGTGGCATTTTCTGCTTCTGACTCACAGCTTCCCCAATCCTGGTTATCAGG
TCAGGTCAGTAGGTCAAAGGCATTGTCTCCCCCCACCCCCCCAAAAAAAGATCGGGGGTGGGGAGAGAGGGAGGGGGTG
GGTCCAGGAATGGAAGGACACAGAGCAGAGCAATCTTCCTGTGCCCAGGCAAGTCATTTACTGTCTCTGACCATTTCAG
TTCAGCAGTTTGAGGACTTGGTCAGGTACACACACACACATACACACACACACACACACAGAGAGAGAGAGAGAGAGAG
AACATGAGAGAACAAGAGAGAACATGATAAAACATGTCAAATAGCTGTTTTCAATTAAAATAATTTATGAACCACCTTT
TTGTTTTAACCAAGCCAGGGTCTCACTACAGAGGACTGGTTGGTCTGGAGCTTGCTATGTAGATCAGGCTGGGATTGAG
CTCAGAGATGTCCCTGCCCCTGCCACCCTCTGCTAGAATTAAAGATGTTCACCTCTTTTAGTTTTTCCTTTTTTTTTTT
TTTTTTTTTTTTTTTGAGAACGTGTTTCTCTGTGTAGCCCTGGCTGTCCTGGAATTCACTTTGTAGACCAGACTGGCCT
CGAACTCAGAAATCTGTCTGCCTCTGCCTCCCGAGTGCTGGGAGTAAAGGCGTGCAGCACCACCACACCCGGCTAACTT
GTTATTTTTTTTAAAGTATGTAGCTTGAATTTTCCTTGAACTTCTTTCCAGTCCTCCTGCCTCCACCTCCTGAGTGCTG
GGATTACAGGTTTGCGCCACGGCACCTGCTTTTGAGAGGTGCTGTATCTTTAGCTCTCCTCTTACTTCCAAGGCAGAAC
AGCGCAGATCCCGGCCTCCTCTCCCTATGATCAGCGTAGTATATGGAACCCGGTCCAATTCCCAGGCATCCGCAATTCC
CCAGGATGGCCGGAGCCTCCCGTCCTGGGAGTAGATGATATGAATGAATCCTGGGAACCTCTATCCTTACATCTTTCAC
CTTCGTTGTGTGTGTATAAGTGTTTTGCCTGCATGCATATATGGGTGCCACATGTGTGCCTGTTCCCCTCGGAGGTCAT
AGTAAGATGTTAGATCTCCTGGAACTGGAATTACAAATGGTTGTGTGCCTCCATGTGGGTGCCAGGAAGTGAACCCGAG
TCTACTGCGAGAGCAGCAGCACCACTGAGCCATCTCTCCAGCCTGTCTTTCCTGCATTTTATTTAGTGTTATGCTTTGC
CTTTTGGGCTTTTGCTGGACCCTGACTACTCTTCTCATATATATTCATCCATGAGATTCACAGGGACACAGTTAAAGAT
TCATTGTGAGCAGAAGAGTCATGATTTTGAGGTTAGCCTGGGCTACGTAGTGAGTTGGAGGCCAACTGCAGGGGTCAGT
TCTCTCTTTTCACTACATGGACCCCAAGGATCGAGCTCAGGTTACCAGCTTGGCACCAAGTGCTTTTACCCTCTGGCCC
ATCTTACCCACTCACCCATCTTACCCACTGGCCCTCTTTAAACATTAAGAGACAGAGTCTCACTATGTAGAGCAGGCTG
GTTGTCAAACACTCTGTGTAGCCAAGGCTGACTCCAAACTTAAGCACTTCCTAACAATCCTAGATGTCACCAGAAAATT
TCCACCACTACCACTGCTAGTAATGTTCCAAAACCAGCCTATTATCCTAGACAGCAGTGTTGTACATATGGACAGTGCA
CACCATTGCATCTATGTGTCCAGAAAAACGTACAAAGGTCCCACAGCTCCAGGACACACTGTATCCATCTTTGGATCTT
CACATATGTCTTTCTCCCTTCTAAGAATATCATGCCCTGCTCCTACCCACCACCGGTGGAAGGATACCATTCCACTTAC
TTATTTACTTATATTTTTGAGACAGGGTCTATTTAGCCGTGGCTGTCTTGGAATTCTCTATATAGACCAGGCTGGCCTC
AAACTCACAGACAACTGCCTGTATTTGCCTCCATCTACTAAGATTGCAGGCATGCCTCCCAGTTCACTGCCCTGCCGTG
GCTTTAAAATGGTTCCATTCTCTGTCTCTCCCTTCCTCCTCTTTGCTAAAGCATTGAAAAATTCTCTATCATAAACAGC
TTTGGGAGAAGACTGTTATAATGAACAGTTTTGGGGGGCCATAGCCAAGCTGGAACGTGGACTTCTGTTCAAAATGTAA
TAAGACTTTCAGTCTGGCCCTAGTGGAGTATTGAATCAGGTGTTCAAGTGTGAGTCCTGGGAAGAGCAGGGCCCTGTCC
CGTCCCCTCCTCAGATGGGAGGTTAGGCTCCGAAGCTTTAGCTGCCTTCCCTTCCCAAGTGCCTGTACCCTGGTCCCCA
TCTGTTCTATCCATATTTGATGTAAGGAAGAACAGGATTACAGCACAGCCATTGTCGGACATCAAAGTAGGCTCACTTT
GTCTGCCATAAAATATGTTAATCATTGAAATGACAAGTTTTGCCAGAGAGAATGTGTTTGTGTGGCTACCAGGCAGATG
GGAGCAGGAGGCCCTACCTCACTCAGCTCTGCCTTCAAGGCATAGATGTGACAGTGTTTGCAGGATGAACAAGGTGATC
GGAGGTAATTGGAATGATGGGTGATTTGGGCAAGAGTAGCCATAGTTCTTGCTTATGTGTAAGACTCATGCTCAAAAAG
GCAGCAACATTAAGAGGGAGTTGTGATGGCAACCATTCTTAACTTCAGTACACAGCAGTCTGAGGCAAGATAATGGAAG
TCAAGACCAGCCCAACTCTATAGTAATAGTCTCTCTTCAACAACAACAACAACAATATCAACAACAGGAGCCAGGGTAG
GTGGCAAATGCCTGTAATCCTAGCATTTAGAGGGGAGGGGCAGAAAAATCAGGAGATCAAGGCACGTGCCATCTGCAGA
GTGAGTTTGAGGCCACTCCGGGCTATGTGGGACTCTATTTCAACAAAGCAAAACAAATAATGAGGAAAAAGAAGGGGAT
ACAGAGATGGCTCAGTGGCTACAAGTGTTTGTTAACCTTTAAGAAGCCTGAAGTTCAGTTCCCGGAAGCCATGATTTAT
AACTCGAGCTGTAGGGGATCTGACACACTCCAGTGGTAGGGGATCCGATGCTCTCTTCTGGTTTCTTCGGGCACCAGCA
CACAAGTGACAGACACAGAAATGCACACATACCCAAAAACAAAAAAATGATAGAACAACAAGAGAAGGACCTGATGGGC
CAAATGTCTCTAATGTCAAAAGTTGTCCATCCACAGAGCTGCTGTCTGGAGTAAAACTGTCAGGGGCATCTAATACTTC
CTAAAGTCCATGGTGAAATGTTGGCAATGTGTAAAACTGGACATATCATTTCAAATGCCAAGCCTCAGTGTGGTGGTGC
AAGCTCCTAAGATGTGGAACAAGAGGATAAGGAATTTAAGGTCAGCTTGAGCTACATAGCCCATGAAAAGCCAGCTTTA
CCTACATAAGACTATTTGGCATAGAGGAGGGAGAAGAAAAAAAGGCCCGGAGACATTAGGGGACTTTGTGTATGTGGGT
GGTTGCTCACTCTGCCCACATGTTGGGGGGCAATGGGAACTGAGCCCCCAGCCTGGTCTACTGAGCTGGAAAATCCAGC
CTCACACACATCCCTTACACCCGCACACGGCCCTGAACCACCTGTCTTGTCTACATTCCACTTAGTATGACATCATATG
TGGTTTTCCATGTTGCTACAAAGTCTTTGAAGCCTTCCCTTTACACTTAAAGGCCCCACACTAGTCCAACTAACATCTT
CATACCATTCCACTGGTGTGAGTATTTGTGTTCCTCCACCCCCTTTTTCGAATTACAAAGAATTCTGCAGGTAACAAGT
TATATCAGGTTGGCTCAGAGGGAGGGAGGCCATCTGCATTTGGCATCTCCTTTCTGTTCCTTTCTCGCCCCTCCTTGCT
AACCTCCAGGCTTCTACCTGGAGGCCCTCAAAGAGCCTGGTTACTCTGTCAGGGAAGAAGGGAGCTATTGTGTCAGAGG
GTGGAGAGGGTGAGTGGGAGAAAACCAACTCCCTTGGAATTCACATGCCATTCAGGCTGAGATAATCACCTTTAAGCAG
TTTAGCCAGATCTCATCAATCTTAAATAGCTTTGACAGCCAGAAAAATTAAGACCATCCCAGGATGCTTACCAGTTTTG
AGAGATTATAAATCCTTGATCACAAAGGGACCAGGTGAAGGATTCGTAAATCCTGTCAAGAATTTTAGCCTTCAAAGCT
GTGTGTAGTGTTACATGCCTGTAATTCCAGCAGTCAAGGGGGTGGAGACAAGAGAATCAGCCGTTCAAGGCTATGGTTA
CCTACATAGCAGCTCCTAGCTAGGCCAGGCTACAGGAGACCTCTCTGAAGAAGCAGAAATAAAATAATAATAATAATAA
TAATAATAATAATAATAATAATAATAATAAAATGAACCTTTATCCAAAGGGTTATAGGTAGCTGTTGAATTTATGACTT
TGTTTTTTTTTTTTTTTTTTTTTTTTTAGGCAAGGTCTCACTTAGTAGTGCAAAGTTGTCTGGAACTCATGGCTATCCT
CCTGCCTCAGCCCCCAAGGTATTTGGGATAGAAGGTATGCGGTACTGCATCCAGCTCCCACTTAACGGCTTTAAGAATG
AGGAATTGTGGGCTGGTCAGATTCTGGTCCGAAGGCACTTGGAGCAAGGGAAGGGAGGGTGGAGGAAGGAAGGTTGCCT
GCATGACACAGGATTCTACCCAGGATTACTGAGCAGGTAGGATGTAAGCAGGAATCTGGCTCCCAATGATGGGAGATTC
CATTCTTTTGGACCTGGCGAGTTAGGGGTGATCTCAGGCAAAGTTCCAGCACAGCCGTGATTTGGGGAAGGCAAGTCAA
GGGCTCCGCACTCATTGCCTGGGGCTCTTGTGGGCAGACAACTTGATCATACAGACCTGGGACCAATTGGTAAATCCCT
TACTGGTCTGACCAGCCCAGGGAACTGGGTGTTCTGGGAAGCCACAGTGGGATCTGCAGGAGAAAGGGGACAGTAGAGA
GATTCCAACATCTGTGAAGTCGACTGAACCGGAAGACTACTAATCTCCCCCCAGCAGAGGGTTCTAGACCACCCCATCC
TTCCCACTGCTTGAATTATAAGCCTACTTAGAATTCAGCTTAAAGAGTCAGATAGATTTATTTATATTTATTTATCTGT
GTTTGGTGGAGCTACAGCTCAAACCTTCCTCAGACTCCTCCTAATTCCTCCTAGCCAGGACGGCCTCTACATCCCTCCC
CCCCACTAAATTACATACCCTTTTCTTTTTGCTAGCAAGTCATCTACCTACTTTATGATGCCGGTATATTTCTGGACTA
GGGATCATCCACTTGAGCACGGTTGAACTATCAGGAGCTGTACCCTTAAAGAAACCTGACTCTTCTCCTGGAAGCCACC
AACTGTCCACAGCTCCTCAGGGTCTCATGAGCCCCCTTCCCTCCAAGCTTTGGTCTTGTGCAGATAGGAGTTGGCTGTG
TAGATTGTTGGTCTTGAGATGGGCTCCCGGCTGAATTCATAGTCTTCATTTATTTTTGTTTATTTATTTTTTTTAACCC
TGTAGCCAAAGTGGCTGGAACTCACTATGATCCCAGTTGGGTCTCAGACTCACACTTATTCTACTGCCTCAGCTTCTGG
ACGTCTGAGTGTTCAGATCTATAGGCAAGAACACCACAGTTAGCTCCTGATGATTTTAAATACAAAGGTTATTAGCAAA
CCATGGAAGGAAGAATATGGGCTATTTTTGTTTTTGTTTTTGTTTTTCGAGACAGGGTTTCTCTGTATAGCCCTTGCTG
TCCTGGAACTCACTTTATAGACCAGGCTGGCTTCGAACTCAGAAATCCGCCTGCCTTTGCCTCCCGAGTGCTAGGATTA
AAGACGTGCCCCACCACCGCCCGGCTTGACTATGGTCCTTTTGTCTTCCTTTCGGCTTTTTCGTGTCTGTGATCCTTCA
TTTACAAGGCATGATAGGGACTGCAGGATTGCACCGTTAGGATGGGGGGGGGGCACCCTGCTGAGTGATTAATTAGGTC
ACCTCTGCTCTCTCTCATTTCCCATATCCATAAAGTGTAGGCAGAAATGTTCACCTTGCACGGTACTGTGAAGATTTGA
TATGGAAGTGCTCATCTCCCAGTGGTGGAGAAATAGAGAAGGAAGGTGCTGGAGCAAAGGAAATAAACATTTAAAGCTT
TACTGCAAACCCCGGGAATGCACAGCCTAGAGGTAGGGCACTGGCCTAGAATATATCTTTGGCCATGGATGTAGTCACT
GGTGTGAGAATTAGTTGTTTTTTTTTTTGGGGGGGGGGGAAGGATTAATCTTGCCACAGTTTGAGAGGGTTACGGTCAC
CATGGCAGGGAGGGCGTGGCTGAGTGCAGGTCAGCAGGATGGTGTGGCTGGAATTCCTTATGTCCTGCCAGACCAGACA
GCATCTGCATTCTCATCCTCACCAACACCCTCTGACAGGACGAAGCGACACTCTCAAAGGCTCCCCTTCAGCATGCGCT
CAACCTGTGTCCTTGATTCCACTACTTAGAATAATAACTACTAGGCCAGCCAGACGCCTCGGCATGTAGAGGTGCTAGT
GTACGGGCCCAGGAGATAAGTGACTCCCAAGAGCTGTCCTCTGACCTCCACAGCACACTCATGCCTGCACACACACACA
CACACACACACACACACACACACACACGTGTGCACACACAAAATTAAAGTGAAAGATAACAGCTTCTGTGAATTCAGAA
ATTGCTCTGTGCCATGATATTTCAACTGTCTTTATAAATTCTTGCCATAACGCAACATGGATTAGTGGGGGCGGGGGGC
ATGTAATTGTTATCTCACTTTACTAATGGGGTTCAGAGGTTAAATAGCTTGTTCCAGGGATCCTAAAAAAGAGGCCAGA
TCTGACATGTAGCTATATTATCTAGCTATGTGATCTTGATAGTCCCAAACCATCTCTCTTCAGTATCTTAAGCCTTGCA
GTGGAAGAGGAGTCTCTGTGAGGTTTATGAAAAACATATATGAAATAATTATGCCAATGCCTGACATTTCATGGGTAGT
AACTTTTAAAAAAATAAATGGTCAATGTCTTTGTTACTGTTCTATTGCTATTACTGTGAAGAGAAACCATGACCAAGAC
AACTTATAAGAAAAAGCATTTAATTGGGGCCTTGCTTACAGTTTTAGGTTCGTCCATGGCTGCAATCATAGCAGAAGGC
ACAGAGGCAGGCAGGCAGGCAGGCAGGCAGGCAGGCAGGCAGGGAGGCAGGCATGGTGCTACAATAGTAGCTGAGAGTG
CCTTTGATCTGCAAGTTGCAGGCAGAAAGAGAGGGAGGCTGGGCCTGGTGTGGGCCATCTCCCAAAATACACTTTTTCC
AACACAGACACACATTTTACTCTTTACCAAACAGTTCCACTAACTGGGTGAGGATCTGGCCCATTCAGACCACCAAAGT
CAGTGTTATTGAAATTGGGTACCCTTCAACGATGTTGAAAACCTAACCACCCGATGCCTATAAATGTGGCTCCAGTTGA
AACCAGAGTCTTTGCTGCTGAAGAAGTAAAATTGAGGAGTCCAGGGTGGAAATGTCTATGCAAGTAGACGTGCTCACAG
AGCTTTGTTTGCTGGTGCAGGAAGGAAGGCATTGGGGATGATGCCCCAACAAGCCCCAGGGAAACTAAAGGCTGTTGGC
CAAACTATAGAAGCCCAGGGGAAGCCCTGGCATGACTGCCCACCCTTCCTGGCTGCACAGGAGCCAACCATGCTGACAC
ATCGTGTTGGAAGTGCAGCCTCAAGAGCTATCAGAAAAGGCCGCCCTGTTATTTCAAGCCACCCAAATGGCAGTGCGGC
TTTTGTTTTTGAGACAGTGTCTAGCCATATGTGGCCGGGAACTCCCTTTGTAGCCAGGTCACCTGCCTCATGCTGGCTG
TGACCAGCTTGGTTCTGCCTCCCCAGGGAAGGGATTACACTATGCATCTCTGTGTCCAGCTTTCCCACATGTTAACTGC
ATCTTTTTATTTTGCTTTTGGTTTTGTTTGAGATAAGGTCTCCTGTATAAGGTCTCCTGGTCTCCTGGGGTGACTTCAA
GCTAGCCAGGAACTAAGGGTGACCTTGAACTCCCAGCCTCTACCGCCTGAATGCTGTGGTTTGTGGACCACCATAGCCT
GATGTAAAGGCTTTTTTTTTTTTTTTTTTTTGGTTTTTCGAGACAGGGTTTCTCTGTACTGTATAGCCCTGGCTATCCT
GGAACTCACTTTGTAGACCAGGGTGGCCTCGAACTCAGAGATCCACCTGCCTCTGCCTCCCGAGTGCTGGGATTAAAGG
CGTGCACCACCACGCCCGGCTGGCTTTTTTTCTTAATGAATGGATTAAGAGAAAATAAAACATGGCTGCCATGATGGCT
CAGTAGAGGAAAAGCTTCAAAAACACAACTCAAAGACCTGAGTTCAAATCTCAGCACCCACTTGGCTACTGCATATATC
TGTAAGCCAGCAGTGTGGGGTGAGCCTGATCCTGGGGTCCCGTTAGCTAGCAAGCTTTGCTAAAATGGCAAACTTCAGG
TTCAGTGAGAGACTTTGTCACACACACACACACACACACACACACACACCAGGCCTCCAAGCTCACTGCATATACACAG
AAACCTGCCAGTGTACATGTAATTAAAAATAAATCTAAAAATATAAGATGGCGAGTGATGATAGAGGAAGCTAGCCACG
CCCTCCTCTGATCCCTGAACCCGTGCACTCACATATACATCTGTAACCCCCAAAATTCTGAAGAGGGGCAGGATTCTGG
AGAGACGGCTCAGCTGAGAGATTGCCTGTTGCATTACTGTGAGGACCTAAGTTTGATTCCCCAGCACCAGCCTAAAAGC
CCAGGCACGGTGGTGCGTGGTTCTAGTCATAGCAATGGAGAGGCAGAGACAAGAGGCTGCCCAGGCTCACTGCAGCTCA
GCTCAGCCTAAGGAGTGAGTCTCCAGGCCCAGGGAGGGGGGTCTTTCCCTTCCCTTCCCTTCCCTTCCCTTCCCTTCCC
TTCCCTTCCCTTCCCTTCCCTTCCCCTTCCCTTCCCTTCCCTTCCCTTCCCTTCCCTTCCCTTCCCTTCCCTTCCCTTC
CCTTCCCTTCCCTTCCCTTCCCTTCCCTTCCCTTCCCTTCCCTTCCCCTTTTCTTCCTTCCTTCCTTCCTTCCTTCCTT
CCTTCCTTCCTTCCTTCCTCCCTTCCTTCTTTCCTTTCTGGTTTTTTTTTTTTTTTTCTTTTGGAGTAGTAGTGTCACA
ACTTTATTTATGGTGCCTGTGCTTTGTCTCAAAAATACCTTCTCCCCCTCCTCAGACAATGGATGGGAAGGAGGCAGCA
AAAAATGGAAGACATCCCTCCCTTACTGCACACGGATCCTATATCCAGGCCCACCTAGCAGAGGCCAGTGGGACTCTTG
GCACATTCCTGGATCCCTGGGGAGGGGGAGACCTTTTCTTTAAGCACACACACACACACACACACACACACACACACAC
ACACACACACACACACATTTTCACAGACAGGAGCTTGGGGGTGGGGGAGAATACAATGTTAAACTATTTTATTTAGAGC
CAGGACAAACAAGTAAAGATTATGGCTATGCACAAAACAGTGAAGATTCAAAATGGGTGCTCTCTCAGCAAGGCTAGAA
ATCACCATCTCTGCTATTTGGAATTTAGGCTCCAGCCCTTGTTTTGGGGTGGATGTGAATTACATTCTAATCTACTCTG
AGAGTTTCAGGTGTGCACATCAGCCCCTCTTGAGGGTTCCCTGAGGGGAGCTGCGCCGAAGCCTGGCTCTTTTGACAGG
ATCCGTCTTACAGGATGGACGGACAGACGTGATGACGTGGTACCAGTCAGCTTTGCAGGGGTCCTGCCTGCCGTCTGTG
CTCCCCCTGGGTTACTTCTGACTGCCCTCATGCCACACTGGCCCGGGAGAACCGTCTAATTTCAAGCATGTCTTTTGGG
TGCTGAGTGAATACGTCACACTATGATGGTGAAGTTTCAGATACCGGGGGTTACTACTGGAAGATTTTGAGAGACTCTC
ATAAACAAAACATCTGCCTGACTTGTAGGCACCGTGTTGTTGTGAGCCTTATTCGGTACACAGAGTCCCTTCTGCTGTA
CTGGAGAGATCCTTACTAGCTGTTTAAGCAACCCAGGTAGGCACCTCAGGCCTTGAGGGAAATTAGGTGCATGGAGCCG
GGAGAGGGTCTCATGGGCCTCGTGACCCTTGGGGATTATGGTGGAAACTTAGAAAACAATTACAGTGGAGCAAGCTTCT
CTTGCTGCAGCTAGGGAGGCCCGCCCAGTTCTGCCCTTCCAGGAACATGAGAAACCACGCTTCCTCCCTCCGGTTGGAA
AGGAATGCTTTAAACAGATGATTATCTTAGCTGCTCCAGACAGAGTGAGAACAACCCACTATGCCCTCTCTATTATCTG
ATGGGAGACCAATCTATCTACATAAGATGTCTATTATTATGTAACAAATTAGCCCCAAATTTAGTGCCATTAAAAAAAA
AAACCAACAACAGATATTCACTGTCTCCTAGTTTCTGACGGTCAGCTTAGGTGAGTGGTCCAGCTTGGGGGTTTCCTAT
GGGACCAGAGTCAGTAGGGACTCAATCAATCCAAGTCTCAGCTGGGCTGGAGAACTCACTTCTGAGATGGCTTCCAGTG
GGGCTGTTGGCTGGAGGCCTCTTCCACCCAGGCTTGTCTGGATGCTTCTGTTCCATACCACAGGGGTAAGGTGACCAAC
CATCTGTGTTGGTCCAGGACTGGGGCTTCTCAGGATGTGAGAGTTTCTATGATAAAAGCAGGATGGTCCTAGTAAGATC
AAGACTAGTTGGTCACCCTCTATGAGCTTCTCCATGAAACTGTTCACAGCATGAGATGGTCTGTAACCGTGACTAAGAC
TGAAAGTATTTCATAGTCTAATCTTGGAAGGAGCATACCATGCATCTAAATGCATTTTTCTGGTACATTCTATTGGCCA
CACAGACTGGCTTTGATAAGAAATGCAAAGGTTAGACTGGAGAGATGGCTCAGCAGTTAAGAGCACTGACTGCTCTTCT
GAAAGGTCCTGAGTTCAATTCCCAGCAATCACATGGTGGCTCACAACCATCTGTAATGGGATCTGAGGCACTCTTGTGT
GTGTGTGTGAAGACAGCTACAGTGTACTTGTATAAACAATAATAGATAATATTTTTTAAAAAAGAAGTGCAAAGGTCTA
GAAAAAGGGTATGACTATCAAGAGGTTGGGTTCATAAGGACCATGTTTGAGGCTGGCCTCCATATTACTCTAGAATTAG
ATTCCTTTGTGTGTGTCTCTGTGTGTGCTTGTTTGTATAGTTCTTATGTATCATGCATGATGGGGTAGGTTGGCCTCAA
ACTTATGATGGCTTTGAACTCACTTCCGAGATGGCTTCCGGTGGGGCTGTTGGGGCTCACAGATGGTTGTGAGCCTCCT
CCACCTCCCTCATGCTGAGATTACAGGTGGGTGTCACCAGACCTGTCTGGAACTATATTTCAAACATCTGTATTTGCAC
ATCATTTCTCTGTGTTAAGAGGTCTCCAGTGTGGTGACCCTTCTGTTCCAGAATAGGTTGTTTAAAGCTGCAGGCATCT
GAGGCTCAATGAGAGTGGGATCCAAAACTCCCTCGGTAGGCTGGCAGCTGGTGCTGTGGTCACAGGAGAGAGCCGTCTA
TCTCCACCTGCAGCCTTCCCATACAGAACAGCTGTGTTCTGGTAGCTCTCTCTGAAGATGCAGAAGCTGCCTGGCTTCC
TGGGATCAGATAGCCTTCAATACATCACCATGCATCCTACTCCCAAAGCTGACTGACACAGGCCAGCCCTGACACAGGG
CAGGGGAAGTTAACACTGCTTTGGGCAATGAGATGGGTATGTATACTAGAAGAGTTACATGAGTCTACCTACTCTCTAA
AGCTGAGACTTTGGGGTCTCTCCTGAGAAATGCACAAAATCCTCAAGACAATGGGTGATCCTTACAAAATCAGTGTTTA
TTACTATAGTTCATTCATTCATTCATATATATATATATATATATATATATATATATATATATATATATCCTCTCTCTCT
CATTGATTTCCCCTATGAATCACACGGGGAAGGTGCTCTTTTCATCCGGTGCATGGGGAAACTGCATTTCCAGGAGATT
AACTTGCCCAAGGCCAGAATGCTAAAGCTGAGTCCAGCTCCAAATCAGTGTTTTGAAGCAGCACTCCCTATTTTTAATT
TTAGTCAACTTTTCACTTAATTAATTATAAAGAATTTCCTTTTGTAAATGGAATTATAGGGTGAATATATGAGGTTAGA
GTATTCGAGTTTAGGAATGAGAGAGGAGTGTTAATTTAATATTGTTTTGTTTTGTCTTTTTTAATTTTTATTTTGATTT
GTTTGTTTGTTTGTTTTGTGAGGAGATCGAGACAGGGTTTCTCTGTGAGGCTTTGGCTGGTTTCTATCTGCCTGCCTCT
GCCTCCTAGTGCTGGCATTACAGGTATATGCCATCATTGCTGATGTGTGTGTGTATTGTTGTTGTTGTTGTTGCTTGGT
TTTATGAGACAGGGTTGATCTGTGTAGCCCTGGCTGTCCTGGAGCTTGCTCTGTAGACCAGGCTGGCTTCTGATTCATA
GCAATCCACCTATCTCTCTGCTACTGAGAGCTGGGACTAACGGTGTGTGTCATCTCTGCCAGGCTTATGATGTTTGTTG
TTGTGTGTGTGTGTGTGTGTGTGTGTGTGTGTGAGAGAGAGAGAGAGAGAGAGAGAGAGAGAGAGAGAGAGAGAGAGAA
GGAGAGAGAGACAGAAGAAGTTGGGTGGGTCTGAAGGTTGGAAGTGTAAGGGGCCCCTCAGAGTCCCTACAGAACACAC
CCAGATACCCAACGCTCAGCACAAAGGTAATTTATTACCCCTAGGGACAAGAGGTGGGAAGGGCAGGAGGAGGAGGGGG
GTGTACTTCCCCTGGGTTAGACAAAGACAGACAGCAAGTGGTATTTTGTTGTTGATGTTGTTGTTTTCTGCTTTTTGCT
TTGTTTAACAGGAGTGAATTTTTAAGGAGAAAAAAGGGAGAGTCTGTGATCGGGTGAGTTGGTCAGGCCAGTCAGTGTA
GCCAGCCAAACAATGAATTTAGACTGCTGGATCTTGGTGTTCTGTCTCAGGAAGGAGTCAGTGGCCAAATAAGAGACTA
GACCTTGGGGGCTAGCCTTAAAAATATAATCTAACAGTTTAGCAAGGGTGAGGGAAAGGGAAATGGCAAAGACTGCTGG
GGTCACGTTTGCGATGCTCAGGTCTATTAGCCCTTCAAGGAGGACCTAAGAGGGGTTACGGAGAAGGGAAAGAATACGG
CAAAAACATATTGTAGGATTTTTTTTTTAATTAACAAATGGGGGCTGGAGTGGCTCAGTGGTTAGAGCATTTATTGTTC
TTGCGGAGGACCTGGGTTTGATTCCTAGTATTCACACGGTGGTTCACAACAATCTATTGCTTTAGATCCAGAAGATCCG
AAGATCTCATTTGGTCTCTACCAGCACCAGGCATACATGTGGTACACACATATTTTTAAAGCAAAATACCCATAAAATA
AAATTAAAAAAAAATATTTTTAAGCAGCAAATAATTAGTGGATTTCGAGACGAGGTCTTGCTATGTAACACAGGCTGGC
CTGGAGTTCAATGTATAGCTCAGACTACACCAACCTTCCCTCTGGAAGGCTGAGATTACAGACACAGGCACCTTGCTCA
GCCCCTCTTTAGGACCTCTTGCTATGAGAATTCTACCTTTCCAGTCCCGGCCACTGCACTGTGGGTGGTCCACACACAC
AGGAGGCCAGGGGTAGACATGCCTCTGCACTGTCCACATCTGAGCTGACAACCATCAGCAATTAGCAGCCGTCTGAAGA
GCCACACTGGAGGTCCCAGTCTAGGTCAAGTCCCCAGGTGCTGCAGCCCCTACTGACATCTCTCAGCCTGCGCAGACGA
GCTGCCAGCAAAAAGAACAATAAAATGGCAGACAAGGTTTCGGCAGGAATTTTTATACACAATTACAACAGGGTAGTTG
TACTTCCTTGGGTGAACCCCAGCAGATCCTGAAAAGGGGGTTCCTGCCCTGGGAAGTGTTTGAAGTAGGGAACCTTTCA
ACGTACGGGCGAGGCCAGTGCACATAAGAGGCTGCTGGGTCAACCTCTGACATTTCTCCTTGTTTCCTGACCCAGCTGA
GAAGACTGCATGGAGTCACAAGACTGGGAGGAGAAAGCGTGTGTGAACGAATTAACAGAAATCCGGGCAAGAGTCCCAA
AGTAAAATAATGTTGATTCTCAGCACAAAGGAGGCTTTGCTGCTTGGTGGTTGAACTCACAGAAACAGTCATTGCCTGC
TTGTGACAGATTTACTATTTTTGAATTTTTCTAATTTCAGGGGGAAAAATGACCATAATAAGCGCCATTTAAACACTGG
GAGCCCTTTGGAGATGTCTAAACAGTGTGTACAGTTCCTGAGGGGGCACAAGGGGTTGCTTGTCCTTGCAGATTAGTCT
ACACACAGTTTTGTAGACAGGGGGTGGTGCCAAGATGACCTTGAGTTAGCCTTAGTTGGCATTGGATCTCGACTCCTTC
AGAGTATGAAGTGGGCAGAGGGGGGCTCCAGTGTCCCGGGAAGAGAGTGGCTCTGTGGCCTGCACCAGTCACATTCATA
TGCTCTCCACCCCCTCACCTCTCAGCCTTTCCCAGTCGAGTGTCTCTCAAATTTTAGGGCATCCATGCCATCTGGGAAG
GATGTAAAAGATGTAAATTGCGGAGTTCTCCCTGAGAAGGGTCCAGTTCCCCATGTGCGGGGTCAGTTTTCTGCTGTTT
TCTTTGGATGGCAACCCTGCAATTCTGTGAACCAGGTTGATTTCACAGCTTCTTTGCTCGTAGTTTGTTTTCTGCTTTG
TCCTATTTTGCCCACTGGCATACAAATCCTCAAATGTGTCCCCTCCCCCCTTCCTCACTCTCTCAAGTGCTGGGATTAT
GGCCTTGAATCACCCAGCCCAGTTTATAGAACTCTGCAGCTGAGATCGGAGTCTGGCTGTGCTGACACACATCCGTGAT
CCCTGTGCTCAGGAGGTTGAGACAGTTACATGGTGAAACCCAGTCCCAAACACAAAGGGACGTGCATAGCAGACGAGAA
GACCTGATCCCACCTTGAAGCAGATGGGATCTTTGTAGATCAACAAAGTCAACCGGAACAAGAGTTTATTTTATTTTGT
CCCAGAGCACTTCTCAAAAATTCTGTCACCTCCAGGAGAGCAGAGTTTTTGTTTGTTTTGTTTTTTATGTTTCACGATA
GTGGATTTCTGAGAAAGATCTCATTAGAAGAAAAAGATTGCAGGGCTATGATTTAGTGCTTGCCTGGCAGCTTAAAACT
GGTGTCCAATCTCCAGGACCATGGAAAAGAAAATAATAGAAAAGTAAAACAAGATAAAAACAAGTCCAGGGTAGTGGCT
CCCCCTACCCCCACCACCCTCGTTTTTCTCTTTTGAGGCAGGTTCTCTAGCCAGGTGACGTCAGACTCACTCACTATGT
AGCAGAGGTTGACCTTGAACTTCTGATCCTTCTGCCTCCGATTTCCACAAGCTGGGATTATAGACTTGCACCAGCACAC
CTGGCTTTATATGGTTCTAGAGATGGAACCCAGGGTCCCTGGGCATGGTAAGCAGGCACTCTGCCAGCTAAGCTACACA
TACACACACACACACACACACACACACACACACACACACACACACACACACAGCTCAGGGATACTCTACAGCTTCGGGG
AGGCAGCA

[0137] An exemplary human Ky DNA is provided below:

GenBank Accession No. NC_000003.11 (GI224589815: c134378285-134311000)
(SEQ ID NO: 302)
CAGCCCACCTTTGGGCTATTGTGAAGACTATGTGAGTTCATGGAAATGGAAATGCAGAATTCTGCACAGA
AGGAGGTGACTGGTATGGAGCAGACACTGAAGCCTCACCTGCAGAGGACACCTTGTTTACGTCAGAGAGA
GGGGCGGATCGAGGAATATGCAAGGGGCATTTCAATAGCTGGGTAATCAACACTTGGCTAGGTTAAAGAG
GTAATCTCTCCATGCGCTCTCATGTGCCACTGGATACCTCTCTTGGCATTGCCCAGGATATTTTGGAAGT
GGTGGTGAAAGACAGATTGATCTTCATCATCTCCCTCCCCAGCAAAGGGCCAAGAATGCCATGGAGTGTA
AAGACTCCAAAATTCAAAGTACCCGAAATTTGGAAAGCAGTGCTTCCCACACTTGCACATTATTATATGC
AAGAAGATGAGATTTTAATGAGCTCTGGACAGAAAAATATGGAAAATCAATTAAGGTGTCATGAACAGAA
ATACTTTGAGAAAGGGAGTGGCTGACAAACTGATCAGGAAGAGACATACCAGAAAGGTTAAGAATGAAAA
TTGCTCTTAACAGCATGAATCGTGGCTTATGACTCTGATCGGAGCAGGGAGCAGGGCTGGTGTCTGCATG
GGACTGAGCAGCGCTGTCTCAGAACCAAGCTCTCCCCAAATTCATGCTCCAGATGGTTCTGTCAATGTGG
AGGATGGTGCCTTCAGAGCTTCTTGTCCTCGTTTAACCTTCTTCTTCGTTCCCTGTAGGTCTGTGAGACA
GACACAGAAGAGCAAATGCTACACATCTCTGGAAAGCTCAGTTCTACCTCCAGGCTAAAGGAAGAAGTCT
CAGCTTGCTGGCAGCATTAATTCTGTCCAATTTGATTCAAACATTTGTTGAGCACTTTCTGTGTTCAACA
AACATAGGCACAAAGTGTTGGGGGATTCAGGAATGAGTAAGACCATGACCTGGCCCCCTGGCCCTCAAAG
AGCTTCAAGTAATCAAAGCTATGACCATGACTCTGCCACAGACTTTGCTACGAAATACAACAGATCTGAG
GTAGGTTGGAAGAGTATTTTTTTTCCAACCAATATTTAAATATTTGTGCCACTAAACTAGGAAAAAGGAA
CTAAGGATATGAATTTTTTAAACACACACATGCACACACAATACACACACACAAGGTAAATTTATGCTTA
AAAATTGTTCAATCTCCATGGTAATAAAAATGAAAATTAGAAAGGGTTACCATGTATCAGCCGGGCGCAG
TGGCTCATGCCTGTAATCCCAGCACTTTGGGAGGCTGAGGCGGGCAGATCACAAGGTCAGGAGATCGAGA
CTATCCTGGCTAACACAGTGAAACCCCGTCTCTACTAAAAATACAAAAAATTAGCCGGGCGTGGTGGCAC
ACACCTGTAGCCCCAGCTACTCCGGAGGCTGAGTCAGGAAAATCGCTTGAACCTGGGAGGCAGAGGTTGC
AGTGAGCCAAGATCGCGCCACTGCACTCCAGCCTGGGTGACAGAACGAGACTTCATCTCAAAAAAATAAA
TAAATAAAATAAAAAGAAAAGGTTACCATATATCAATTATCATAATGGCAAAGGTTGATGTACCAATAGT
TTTCAATGCTTGTGATAGTGTATGGAGAGGTTGACATACACAGCTAATGAGTGTAAATAGGCACAGTCTT
TCTGGAAGGCAATTTGACATTTCATATATATATATCTCAATGTTTAAAATAGTCATAGTCTTTGACTCAG
TAATTCCACTTCCAAGAATCTATTCTAAGGAAATAACCAGAAATGTAGTCAAAGATATTTATTATCACAT
TATTTATAAAAGTAGACAATGCAAAACAAACTAAAAGTCCAACAATGAGAAAATAGAAAAATGGATTGTG
GCACGTCAGTATAAAAAGTGACTAAGCAATCTTTTAAATTAGCTTTTGAAGAGTTTTTAGTAAACTATTC
ATTACAGGTTGAGTGAAAAAAAATCATGATACCAAACTATATATGGTGCAATACCAATTATACTTTTTAA
ATAAAAATATTCATTTTTATTTCACACCTATTGATATGGTTTGGCTGTGTCTCCGCCAAAATCTCAAGTT
GAATTGTATCTCCCAGAATTCCTGTGTGTTGTGGGAGGGACCCAGAGGAAGGCAATTGAATCATGGGGGC
CAGTCTTTCCCATACTGTTCTCCTGATAGTGAATAAGTCTCACAAGATCTGATGAGTTTATCAGGGGTTT
CCGCTTTTGCTTCTTCCTCATTGCCTTTCGCTGCCGCCATGTAAGAGTCTTTTGCCTCCCATCATGATTC
TGAGGGCTCCCCAACTACATAGAACTGTAAGTCCAATTAAACCTCTTTTTCTTCCCAGTTTCAGGTATGT
CTTTGTCAGCAGCATAAAAACAGACTAACACACCTATATATAATAAATGTTCACTTATTATACTCTATGT
TGTAGTCATAATGAAAGGAAATACTAAATAACAAAATGTTTAGAAGTGATTATCTCTAGATGGTGGGATG
ACGGGATTTAGGTGGCTTTATTTTCTTCTTTATATAGTTCTTGCACTTTCTAAATTGTTAGTAATGAGCC
TGAATTTGACAGAGCATCTTGTCTCCTGATGGGACTTTATGACCCAGCTCACCCAGATGGGTCGCCTGAG
TCTGACAACTGAGCTGGGGCGTGGCCCTTCAGCTTAGGTGGAGGCTCTGTGTCTCCCCTGCCTGTCCTCT
CCATCTGAGCCCAGTTCCCCACTTCACCCAGGCACTCTGCCCCACACTACCCCAAAATATCCTCCTTTTC
TTACACAGCATCTGTATGTGGTGCTTGACTGTCTCTTCCTATCATCACCACCCTTGCCTAGCATCTTCTC
CAGAAGGCCAGTTTCGGGTGACAGTGGTTTTGATCATGTCTAAGGCAACCGTGGGACCTGCACCCTCACA
CTTGTGAACAGTCCCTGCTCTTCCATCCCTGCTGACCAGGATCAGCATCGCCACTCAGATGGGCAGCTGA
AGCTTCACCCACAGCAGACTGGCTTTGGCTGCTCTTCTGCTCCTCTCAGTGCTCTTCCCCTGCACCATAG
CACCAACCAGACTGGCCTGCTTTCACTTCCTGAGACACGCGTTTTTCTCTTTCACCTCCATCACTCCTTC
CAGCTCCTCCTATTTCCTGCTCAGGCTCCTTCTTGCCTGGAAAGCCTGTCCCTCTCTCCTACTCATTCAT
CCCTGAGGACACTGTTTGGGGATGTAGCCTTCCTGGCCCCTCCTCTCTGGGAGGACAGATGCCTCTCCCC
TGTCCTTACTCTTTCATTTCATCCTATGGCATTGCACATAGTGAGGTCTCAAGAACAAGCCGTCATCTGT
GCTGGGAAACGTCTTCATGGCAAACCTAGCAGAGGTGGAAAGCTCTCTTTACAGTGTAACCATCCTCACC
CCAGAATGGTATGGAACTATCACAACACACTTCCTCTCCATCCCTGGCAGGGCTACTGCTCCTGAAGACT
GCTGAATGCTCCCAGCCACCAACTTTTTACTACTGCCACTGCCACCAGTTCTCTCTCCACCCAAAACAAC
TGATGCCACAGAGCCTGTAAAATCTGTCCCCAAAGGCCCAGCTCAGGGCTTGAGCTCAAAGAATTTTTCC
AAGAACCTCAACAGAGGTCTTGAAACCCCGAGTCAAGGTGTGTTCATCGTGATTGTTAAGACCATCTTCC
CCATAGGCTGACAGCTGATCTTTTCCTTGGCTCGGGCACTATGCAGCCTCAGCTCATGGGCATGTTATGG
CCATATAGGGTAGGGGGGCAGGTGTTGTTCAGCACATGAGCTTTGGAGCATACAGAGTTGGGTGGGGTGT
CAAGGGTTGGGTGTCCCCTGCTACCTGTAAGACACATGTGAGACCTTGGGTAGGTCACATTAGGTTTCTA
AACCTCTGTTTTCTCATCTATAAAATGGAGATAATGCAAAGGTTTATCCTACTGAATGCACACAGAGAGT
TCACAAGTGCCATCAGGGTGGGAAGGAAGCAGAACTGTGCTGTGCCGTAACTCCTGCCAAACAGGCTGCA
GCCGCACAGATCTGACATCAGTTCTTCAAGGAATGGATTCTGTGGCTCACTGAGGTTTTCTGTGTTTGAG
AACAGTGGCCACAGAGCAGTGATATGAGAAGGAAGGCAACACGGAGGTCAGAGATGGCTCTGGTTCCTTC
TATACTCCATCTCCAACTGTGAAACCACATCCATGAGACCTTCCCCAGAGCAGGACCCAGCAGGGGGTCT
GGCTGGAATACAGGAAGTTGCCATAGCTATAACTACCCATAGCTAAGTACTTTATCTCATTTAATCCCAG
CAACACCCTCACCCACTTGACAGATGAGGAAAACTGAGGCTCGGAGAGGTTAAGTACATTGTTCACTATC
ACCCTACTGGGAGACAGTGTCTGGAAACAGGTTTGCCTGGCATAACTGCTCCAGAGGGGATTGATATGAT
TTCCAAATTTGGTGGGTGTGGGACAAGAGCAGGGGTGAGCTTCCAAATTAACTATTGGGATTGTAAAAAG
AGGCACCACAGAGAACTGGCATTCCCCAGAAGCTCCAAGGACTGGGGTACCCAGGAAGGCTTCAAAGTAG
AGGGGAGGGAATGGCTCCAGTTCCTTCTATACCCGCCCTCCAACTGTGAAACCACATTCATGAGACCCTC
CCCACAGGGTCTTGAAGGATGCTTAAACTGTACTTGCCAGGGAAGTCCAAAGGGGTTTTCCAGGCAGAAA
TCATAGCAATAGCAAAGGCTCAGAAGCAGAATCAAGCTAAGCCAGGCCAGTCAAGAGGCCATGGGAAGCC
TACACTGGCTGAGGAAAGGTTTCTGGGAAAGGTATCCAGTATCCCATGTAAGGATTCACTCATCTCAGGG
TAGGCTGAGGGAGTTAGGAGACTGGAACTTGGTCTGTTACTCTTCACCAACTCACAGAACTCTCTGTGTG
CCTCTTCCCCACGTCATCAATGGAGAAAATTCCCTGCCAAAAGCCTTTATTGCATTGGCTTACTTACTCT
ATCTCTATAGAGAAGAGAGAAACTTGCCTCTTGGAATCCCAAGAGTGGTAAAAACAGCTATGACTGATGG
TCCCAGCAAAACTACCATTTCTGAGGGAAAACAGTGGGGGTCAAAACACACTCCTCTCTGGTGACAGCTT
CAACTGCCAGGAGCAAGCCCTGCCCCTGGTGAACCCTCCTTATCTCCAAGACAGCAGAACCAACTCAGGG
CCCAGAACCATTCAGACAACTGACAAATCTCACCTTCTAGCAGAGGAGTATCGGATGCAGGGCTGCTGAC
AGCTGGATGTGTCTAAGTGTTGAATTTGACAAAGGTGACAATACAACTATTTTGACTGTCCTTTGTCTTT
CTGTATCCTGGAATTCCCACTCATTTTGATTAAAATAAAGTTTTGCTCAAGAATGGAGAAAGCCCCTGGT
TTGTCAGCTACTAAGACAAGGATGCAGATTAATTATTTAGGTCGGAATACAGAGAGCCTTGCATCTTTTT
TATTCAAGATGGTAGCAGGATGGAGGGGCTAGTATGGTGTGTTTGGGGTGTAGAGGACATGGTTTCTGTT
GAAGCATGTGTGGGTTTGGTAGGGAAAAAGGAAGAGATGGGTCTGGAGATTTGCAGGCTGAGCGTTCTGT
TATTTGTCCCGTTGATTGTGTGAGCAGCTGGAGGGAGGATTTGAGCAGAAGGGATACAGCCTCTACTTGA
ATGATATCCCAGCCACCTCAGTGTTCTCTTGTCTCTCCTTCCCCTTTCCTGATACATCCAAATGCCTTCA
GCCACATCACCTTCCCCATGGTGTCTCCCTCTCAGCCCAAGAATGGATAGTGGGGAAGAGGGGAAGCAGC
TAAGTCAACCCAGGCCAAGGATGGGAATAGAGTTGGCATTAAGAAGAGCATCTCATCTATGCTCCTGGCA
GGCCCCAGAAGCTAGGCTGTTGGACTGATGGCCATGGGTAAACCTCTGAGAAGAGGGTCTAGGTGTCAGG
CACCATCAGGATCCAGGGGCAGCAGCATCTCCCAGAGCAGTCGAGGTGACTCCAATTTCAGGAGTTTGCT
CCAAAGCGGTGTTCACACTGCAATTCTTTCCAAAGGAAACATTGGTCAATGTCTGGAGACATTCTAAGTT
CTCACAATAGGGAAGTGAATGTGATTGGCATCTAATGCGTAGAGGCCAGGGATGCTGCTAGACATCCCAC
AGTGTACAGGAAAGCCCCACCAAAGAGAATTATCTGGCTCAAAATGTCAATAGCGCCAAGGATGAGAGGC
CCTGCTCCGAAGCTGTCTTCAGACATAGCAGAGAGACAGGAGGCCTCCACACCATTTCCCCAGACCCCTG
GCAGCACATTCCCAGGTCAGAATATCCTTCTCCAGAGGCAGTTCTGGGAGGGGGCACCAGAGTTTGCGAG
TTCCTAGCAATGACACTTTCCAGCAGGAGAGCAAGGGTTGGGAGATGGGAATGCAAGTGTAAGGAAAGGG
GACTTCAGCTCCCCCCACCATCACCAACACTCAGACCCATCCGGCAACCAAGGGTGCTGTACACAGGCTT
CTAGTTGATTTCAGCACTTCAGACAACCTGACACTTGAAGGAGTTAGACAACACTGACTGGCCCAGGGTA
GTTGGGGGGACTCTGGGACCTGAGATCTGCCTCAGCAATCTCCAACACCCCAAGAGCTTTGCATAATGCA
TAGTTCTTACTTCCCCAGCCACATAGAGAGTAAGTGTTAGCCAGCCTCCCAGGTGTGCGCGCGCGCGTGT
GTGTGTGTGTGTGTGTACCTGCACACATACAGACAGGACAAGACTCACTTTAGCAGAAGGAAACCTGCCT
TGGAAGTCAGCCATCTCCACTTGCCTGTCTATGGCCTCAGCTCTCTAGGGACTCCAGTTCAACATTACTG
GAAGCCAACAACCTCTCCTTCCATCAGATGCCCAGTGGGTGAGTCAGGGGGTGGGGTGGTGGGGGGGGGC
GCTGGTAATGCAATAAGACAACAGCCTTTACACGGAACCAAACTCTGAGCCACTGTTATTGGAGGAAGAC
CTTCAGAATCTCAGAGTGTGGCTGTGACATCTCTCCTGCTTCTCTGCTCCATCAGTCACTTGTCACTCCA
TCTTTCCCTTTCCTCACCCTTAAAATGAAGTAAGAATGACAGCTACCATATGAAGACCACTTTCTATACA
CCAGGCGCCTTACATTCATGCCATTCTCACAACAGCCATGTGAGAAATTTTTATCAACCCAGTGATAAGG
GTGAGAAGGTGGAGGGAAAATGGCTGGTCCAAGGTCACACAGCCAGGAAGTGATGGAGCTGGTACTGGAA
TGCAGTCTGTGTGACACAGGCTGCTCCAAGGAGGATCTGGGAACTCTCAGGACCATGCTACAAGGTGGGG
TCCATACACTCCAATGCGGGGAGGGCTCCCAGAGCAAAGGCCTCCATGTGGGGGTGCATTTATTAACAGT
AGAAACTCGAATTAGGGGAACGCCCCCAGCAGGGTGGGCCCGTAGTGCCCAGGGGTACCAGGCAGAAGCC
TATGTAAACACTCCTGAGACCTACAGCCAAACCCCTGCTGCTGTTGGCTGGGCAGGCCAGGCCGGGCTAA
AAATAGAAGGCTTCTCAGGTCCAGCTCCCTGTGCCCCAGCCTCCTCCTCTCCCCCTCCCTCCTTCCCCAC
AGGGCAGGAGCCAGGCTTCTAGAACGAACCGAGACTTTAAGACTTTCGTTTCAGATCAAAGAGGATCGTT
AGCTTGATACTCAATGGGCATGTTCCAAGTTCTACAGGGGCCGTAACTGGGGGGAGCTCCTGACTCCAAC
ACCCCACCCAACTCCCTCCTAGGGAGAGAGAGCTGTCAACCTCCAAAACCAACCCAGGGAAGGAGTGAGG
TCGAGGCCAAAACTTGGACAATCTCTGCACATCTTGCAATTCAATCTGGAGCCCCTTTGCTGTCTTTCCT
TTTCCTGAATCTACTCTCAATGTTGACAGCACTGTGCGATTTCTGTATTTGCCAGGGGCTTCTCGTGGGA
GGTCGGCTCCAGCCCTCTCGAGAACCCTCCGGAGACCGTGGGGATGAGGCAGCGCTCAGCCAGAGAAGCC
CTGGAGCCCAGGACCAGCGCTTCAAGTGCACCGGGCGGGAGGCAGGGGCGCAGGGAGGGAGGCTCTGGAC
CGGCCGCCCCTGCTGACTATGGCCCCGGTGCAGGTCAAGGCTTGGGCCCGGGGATTTCCTTTCAAAGGTG
ACTTAGAGCCGCTTCATTAGGGTAGCGCCCTCCCAGGCGGGCCCTAATGGCGTGTTTGGCAGAGTCAGCG
AAAAGCAGCGCCCTGCGGCTCCAGCGGCGGGGGAGCGCCCTCTTCCGCGCCCTCGCCCTCTCCCGTGTGG
GGCAGCTGCGCGCACGGGGCCATTTGCAGCGCAAGCAGCCTAGCGTGCGGCCGCGGCGCCCAGGTCGGAA
AGGAGGCGGCATCATGGAGCTGAAGAAGGACATCAACGCTGTATCTATCGACATGCTGCTGATCGTGCAC
TCGGAGAAGCGGCGCGCCGCACAGGGTACGCTCTCAGACCAGCAGGCGAACCCGAGCTCGCTGCTGCAGC
GCGGAGGAGGTAACGCGCGCCCGACCCGGGTCCCCGGGTCCCCCGGCACCTTGGCCTCCTTGCCACAAGG
GCCTGCCCGCCGGGGGGCGCCCATTGCTCCCCCGAACGAGGTCAGCGAACCCGACCCTCTCCCCCATGGC
TGCCGTCGCTTCCCCGCAGTGGCACCGGCGTCCCGTGGCAACGCGCAGTCCCGTGGCAACGCGCAGCCCC
GTGATTGCCCCAGTTTCACTCCCTGTGCAGGCCTGTGGGTGCTTCCGTCACCCCTGGGAGTCTTTTTCCT
CCCAGCCACTCCCTAACGGGTGTAGAGCAAGATTGGAAGATACCCTGGAGGAAGGCGGCCAGAGCCTCAG
GGCTGACTCATGGGTAGCAGAGGCCTGCTCCCCCCCACAGCACACTGCAGGGCACAGGGGACGCTGGGAA
ACCTTTGGGCTGAGTCAGACTTTTAGATGGGGAGCTCCCTGTGTGGCCTTGCACAATTTACAGCCTCAGT
TTCTCCTTTCTTGAGACTTTCTCCCAGCCTCCTATAGATGGAAGGCATGAAAGGCGTAAAAGGAACGCAG
GTTTGGATAGGGTAAGATTTGAAACCTGCTGTCTCCACTTGAACTTATCCATCAATTTTACTTGTCCTAC
ACACTTTCTGGGTAAATTTGTAAGTTGTAGATTGGTAAAATAAAGTGACTGTTTATAGAGTGATTGTGGA
AAGCAGGATCCGGGCCTCTCTGTTCTCCAGACGACAGAACACAATGTGAATGGAGTACAGAGGGATGATA
ATGGAGGTTAAATAAGCCCCTGAAAAGCCAGAGAACCTCAGGGTCCTGGATGGCAAGCTGTCTCCGAGGC
TGGTGTGAGGATGCACTAGGCGGACTGCGGGCCAGTTCTTTAGGAGTTAGGCCTGACAGCCCATGCAGGA
GAATGACTTCTGCCTCTCTCCTCCCCTCCAGCTCTGGAGCTCCTTGGAATTCCTGCTGCTGCTCTGCCCT
TGGTTCTTCTGTCCCCAGAGCCTCTGTGCTCATTGAACATCCACCTTCCACCTGCCTTGCTTAAGTAATG
CTGCTGTGGATGGCCTTGCCACTACCAGCCACATAGGCTGGAGCTGCCTCCAGAGCCCTGGGAACCTCTT
GGGAAGGCAGGCAGGGGAAAGAAACAGAATCTAGAGGGCTGAGTATGTTGACAGGCGCTCTAGTCTCAGG
GCTGATTCCTGACTGAAGCAGGAGTTGTTTGGATTCGTTGGCTCTTTAGTTATCAGACCTACTCTTGGGA
GAAGGGGAAATGGCCTGCCCAGGGTATTTGTAGTTAGAAAGTCAACAGAGGGCATCAACTTCTTGATAGA
AATGAGACTGCTCTGAATACATGTACCACAGTCCAGAATGCCTTCTCCAGTGTGTGGCGAGGCCTAGTTC
CAGGTCAGCCCACGAGTCCCCTACTCCCAATCCTCTCTGATCACATCACTTCTAAAGGCTCTGACACTAG
AAAGGGCAAAGAATGCAGAGAAGCCCAGGAAACACCAGGCATCAGGACTGCCCTGAGAGGTGCCCAACAC
CTAGCACAAACTCGCCATGGCTCCAGACTCATGTATGCACACTAGTGACTATGACAGAGAAAAAAAGACC
CCTAATGGCTGGGCCCTTTCTGCTGAACTTTTTCTCCAAATATTTTTCTGATGGCCGTTTCTCACCGATG
CTATGAATGACAGTGTAGAGATCTGTGTCACTTATTCACAACCAGAGCAGAGAAGAGGAAAAGTGCATGG
CTTTTGATGCCTGGTGGGCAGAGATGATATTCAGGAGACCCCAGGCAAAGCCAGCCTGCAGACCCTTTCC
TCGAAAAACAGCCTAAGGGAGGAAAATGCCCAATAAGACCAGCTTGTTCCAAAGCCTCCCATGGGTGCAA
GATATAAAACAAACTCTTGCTCACTTCCAGGTATCTCCTCCTTTCTCCTCCACACTCCAGATCCTCCACT
GGAGAGTGGATCTTCCTTGGTTATATAAAAGAGGGCCTAGGCTCCATGTCAGAAAAGATCAAAGCTCAAT
TATTGTTGCAATGCAGAGGATGGAGTAATCCGTAACGAGTGGCCCTTCTGCTGGAAGGGCCTTCTGCTGG
AAGTGGCCCTTCTGCTGGAAGAAAAGAGTCAGGGGGACAAGAAGGCAAGGAGAGTGTGGACAGGCTAGGT
CACTAGGAATTTGGGCTGCAGAGCCAGCAGATGTTCTCTCCCATTTCTGTAAGGCCCTAGCAGCCTCCCA
GTCATTTCCCTAGAACAGTGCTTCTCCAAAACGTGCCTGAAAGCCCTCAACTCCTATCAGAAAGTAGAGT
GCATATACTCCTGCAGCAGTAGAGGATATAGCCTATAGCTGCCTGGGGCAAGACCCAATGAGCTTTGAAG
TCTTAGGTCTTATCCCAAAAGTCTATGTGGTTTGTGTATTCTACTCCATAGGTGTGTCATGAGGGTTCCA
AGTGGTAAGTCACTGGCACTGGCTATGGGGGGCTCTGCAGAAAAGAAGGGTGTTAAGAAGAGAGTGGCGG
CCCCTGAGTGGTTGAGAGGGCTGGAGAATAAGACTCAAGGCTGAGCTTCCAGGAACAGTACCGTAAGCAG
CACCAACGAGCTGGTCTAGTGAGGAAACCTCCTCGGCCACCAAGGAGCACTGAATACTCCTTCCGCGCCA
GGATCTCAATTTTATTGCAGCAGCTCCCGCTGCCAGAACGTATCCCCATGCTGTGCCAGGAACTCGACCT
TGCGGCTACCACTTGCAGCCGCAGCCAGAGCGAGAGCTTTCCTTCCCTTCCCTGTTGCATCACCAGGTCC
CAAGGCAGAGTGAAACACAGGTACATCAGATTGGCCATGGCTAGGCCATACGTGTTTACCCTCTAGCTGC
AAGGGAGGCCAAGAGAACTGGCAACTGTCATTTTCCATTCCCATTGGGATTGACGGTCTTAGCCCACTCC
CCCCACTCTATATCAAGACTCTAAAAGTGGGTGATTCACCACATACAGAAATAGGCAGGCAATGTGGATA
GCAAATGACTTCTAAAATAATGCTTTCATATGTATGCAGTGGAGAGGTGGAAGTGGAAAATGGGCATCTG
TACTACAAAAATTCTCCCTAAATGACCCTGATAACCAACCCTGCTGCCCTTGAAAACTGTTTTAACAGTT
TTTAAATGTTTTGAATTTTGAGAGTTGCATTCATTCCCTCAAGGGCATCTTATTCATGGGTAGCCTCTCT
CAGATTCCAAGAGAGCCAAGATCCACCTGCTCTACCATAACCTAGATAAGTCTGCAACTGGTACATCACT
CTTTTGCCCTGAGTCTCCCACCTCAGAGAAGCTTGTTATTTTGCAGGATTCCAAGGTGTTGGAAATGGAG
TCCGAAGATGGCAGAAATTAGAAGGAAATGACTTTCACGGTAAATTCTCTTTTTCCTTTCAACCTATAGG
ATTTAATACATTGAATAATAACTGGAAGAATTGGGTTTCACTCATTTGAAGACTAGCCCTAGACATCTAA
CCACTGAACGGAAAGTGGCTGCTCCTGACCCAGCCAGGCCTCTAAGGGCCACTGTGACTGTGGGAAGTGT
TCCCTGGAGTCAGGTCCCCTGCTCTCCTGGAGGCTGTGGCTGAAGAGCAGTGCCAGGAACTTGAGCACCC
ATTTGTTTGCTGGCTGAGCCGTAGGGGAGGACTTAACATCCCTTGGGATGGTGAGGTTTGAGTGTGCTCC
TATGAGAGGCAGCCATCTATCTTTTGAAAATGTTTCCCAACAGAGAGGATAGTCGTCTGCCTTGGGACAG
TATGACTTGAAGCCTGAGAAGATGCCACTCAAGGGTTCTATAGCTCCCTGCTGGCCTGGGACCCAAAATA
CAATAAGAAGTCAGCTTCCAAAGCCTCTTTTTTCCAGTGCCAGGCATCTGCCACCCCAGGCCCAGGATCT
CTGTGGTAACACTAAGGGGCCAAGTATAATGGGCTTTATTCTATTCCCTTTAGGGTTCATTAGCCCAGCC
TCCAGGGACAAACATCAGGGACACTGCACAGTGGGCACGTGAAGGTTCTAATAGAGACCAAACCTCTACT
CCCAGAGCCCCAGTAGAGAACTCCATCAGCCCGCAGCTATGTGAGCCCTAGGATCAGATGACTGGCTTAT
CAAATGCCAGTGTAAAGGAACCACCCTCCATGACACAAATGGGGAAATAGGATTGCAGATGAATAGGACT
AAACTGCTATGTTCTACCATCCTTCTGACAATAATGAAAGGGAAAGATGAAGTTCTAAAAGTGAATTCAT
TCACTCATTCTGTTCACAAATGCCTATAGTGCTTACTTTGTGCCAGGCATGATTCTAAATATTGGAAATG
AAACAGGGAAAAAGACAGCCAAGAACACTGCCCTCAGGGGAGCTACATTAAAATGATTGGAATTATAATG
CACTGCAGGGGAGTCTCAACACCCTGGAGTTGAAGAGTCTTCCTGTGTCCCCTGCCTTTGGTAAGAGTCC
TCAAGACACACTCCCCATCCCCACCCCACCACTGCCAGGGAGCCACCCTGACAGGCATGCATGGGTGCAA
TGGCTTCCCTGTAATCTTGCTACAGGGGCCATCAGCTGGTAGACATGCCAGCTTTAGCTCTACTGAAGTA
GACGCCAAAGCTAACAAAACTCTGCTATGGGTTATTGAGAATTTTAATAAGAATCAGACCCCCAGAGACC
TGTTAGCCACAGAAATGGCCATGCAGGGCATGGAAGGTATGCATGCTAAGCCCATGTGTGAGCTGGTGAG
TGGGCAAGCAAGCCACAGGTGGAAACAAAGAAGCACAGCATCCTTGTTGGTTGCAGCTGTCTCATACCTT
GCCTGAGTTGTCTGACACTCATCTTAGGGCTTCTCAGGCATGTTATTACATCAGGAGAGGATTGAAATAC
ACTGAATTCATTCTATTTTTACCATCTTCCGGGTTTCTGATTTGGGAGAAGTTTAGTGGAAAAATATCAC
AAAACACAAAGTGACACATTGACTATTACAAGACCATTATAAGACTCTTGTAAAAGACATGAAGTGGGTC
TTAGCACTATGTGTCAGCTGATAGAAGATGACTAAAATAGTTCTTGCAAAACCACCATGAGAACTGGAAG
TTTCAGGTAAATGCAGGGCTGGACAGAGGCTCCACAGAGGCCCTGAGCCCAGAAAAAATGACGCTTCTAC
CACTCCATCAACATGTGTAAAGCGAAATTTCATTTATTTTTCAAATGGTACGTTTGCATGCATGCAGAAA
TTAAAATTAGTTTCTTTCTGTGTTTTCTGATGTCGAGATTCTGAGTGCAGGTATTGAAGCTGACCTTTTC
TCATACCTGCCTTACTGGTGCCCAAGGCACCCAGCCCTGGTAACCAGCAGGCCGCCCAGCCCTGGTAACT
GGATGGCTTCCATCTTAGAAGGAAGTGGCTGATGGCATGTGCTGGTGGAGTGCACACAGATGCTGCTGAG
CATGGGGTGGATCCAGAAGGGCACATTTTCCCCCTCTTGCTACCCCGTGCACTGCTTGGGCTGGAACACT
GGCAGGGTGTTGAGACTAGAGAGCTCCAAACTTTTCGAAGCAGCAGGTGTTTGGGCCCAGCCGCCTCCTC
ACCCTCCTACCCCACCCCAATAGCTTGCCCAGCAACGGGCTTCCCCTGCTGTGATTGGCTACTTTCCTTG
GTCCTGGACAAAGTCTGCCTAGTAGCACAGGGACAGACGCCCCACAGCTAAAGGGAAACCAATTGTGCAG
CCTTGACTATAAATACCCCACAGCAGCTATGCCAGCCAATCACCCTCCTTGAGGATTCCCTTCCCGGATC
TTGTTTCCTCCCTCAGCCAGCCGAGGCACTGCCAGCTGTGCCTGCAGAAGGCGGTCCTGGCCTCCCTTTC
CTCGCCTGATCTGGGGCTCCAGCCCCGCATGCCACATCACCCTGTATTGGAATACACAGTGGACCTAGCC
CTTGGCTGACTAGTGTGGGGCTCAGGGACCTAGCTGGGCCTGTTCATAGGAGAAGGCTGGAGGAGGCAGG
CTTTCCAGGGCAGGACTCTGTCAGGTGGATCACAAATCCAGCCTGGCTCAGTACCTCACCCCCCACCTTG
ATTGGCTTCTGCATGGGCCCAGGCACGGGAACCACTGAGCGGCTGATCTGCACAAGAAGAATCATCTAAA
TGCACCTGTTCAGGCCAATGCCCCAGAGGCATACTTGTTTCCAGACTAAGGCACTGGTCCCATTGGTCAC
TTCCAGTGACAAGCCCACTGCAAGCCAGCAGGAAGCTATAGAGAGAAGATGGCAGGCCAGAGTGGTAGTG
GTGGGGGAACCTCCAGCTGCCACCATCCTCCCCTTGCCCAGCCTTCCCCCCACCCCTCTGAAGCAGAGGT
TCAAGGGCAGCTTCAGTAACAGCAGGCCACAGCAGCAGCTGTAAAGAAGGGAGGAAAGGTCATGCTTCCC
CTGGGAGGGCAAGTAAGCCTGTGAGCTCCCGCTTCTTGGCCTATGGCAGGAACTAGGCATCACTCCATGG
CAGCCTGACCCCACTAGGCTCTGAGGACAACTCTGTGTCCCAGGGACAGAAATATCCCTGCATGTGGAGA
GAACGTGTGTAGCGTGCATGCCCTGCAAATGTTTGTGAAACAGAACCAAACTACACATCATCCCGTCTCC
TAGGCTGGGGTAGGAGGCAGGCTGGCCCCCTGTTCTTCTCATTAAGAAGCAGGAGGCTCGGCCGGGCGCG
GTGGCTCACGCCTATAATCCCAGCACTTTGGGAGGCTGAGGCGGGTGAATCACAAGGTCAGGAGATCGAG
ACCATCCTGGCTAACATGGTGAAACCCCGTCTCTACTAAAAATACAAAAAATTAGCCAGTGTGGTGGCGG
GCACCTGTAGTCCCAGCTGCTCCGGAGGTGGAGGCAGGAGAATGGCACGAACCCAGGAGGCGGAGCTTGC
AGTGAGCAGAGATCGCGCCACTGCACTTCACCCTGGGTGACAGAGCGAGACTCCGTCTCAAAAAAAAAAA
AAAAGAAGCAGGAGACTCAACTGGGAGTCAGAAGACCTGAGGTTCAAGTCCCAGGTCAGAACCTCCCAGC
CTGCTCCACAGAAATGTGTGAAGATCAATGAGGCATCTGTGTATGCAGTGCTTTTGAAACTGTGCCTGGT
GACACCAAAGTTGGGAGTTATGGCTACAAAGACCATGGAAGACTGGTAGCCTGTTCCAGAAGAAACCCAG
CCTGTGCTGGCACCTGCTAAGAGGCACAAGGGGTGTGTGCACAGGGGCTTCCAGGCATTTGTCTCCATGC
ACAGTGTCGTGCTGGTTTGCACATGTGCACACTGTGAGGGTGTGCACACATTTAGGCCTGGGGATGTGCT
TGGCCCCCGCCAGCCCACCTTTCCCGCAAACACATACAGCTCTTTGCTCTGCCTGGGGAAAATTCCCCAG
TGGTCACTGCAGGCCTCTCTGTCTTCCTTAAATAGAAAACTTGGTGGAGAAGCAGCACCCTCAGCAGCCC
CAGGTCATCACTTCCTACAACAGCCAAGGTAAGTGATTCGCCGCTAGCCGTGACCTCCCCTGCAGAGGTG
TGCCCAGACCTGATGCTCTGGCCAGCGACAGCCCAGGATGTGGAGCTCAGACTATGGGGAGCAGGGTCCT
CTCTGCTCCCATGGGTGTTGGAAAACCCTTTTCCTCTCCCTGCGTCTCATGGGAAGCAGCAAGAGGCTGC
ACAGTCTCAGTCTTCCCCTCACCATGAGATCAAGAAATAAAGCCCATGGGCCTCAGAGCACGCTGCTGTC
ATCATCATCACTATTACTGTCATCACTATTCAACATTCAACATTTGTTGAATGCTAACTATGTGCCAGAC
ACCCTGCCAAGCCACTTATGCACTTATTCTCATGTAAATTAAGCTTCACAGCAACCCTGTTTGACAGGTA
CTCCTCTTTACCATCCTCAAATTACAGATGAGTAAACTGAGGCTTGGAAAGGCTGTCATGTGTTCAAGAT
CACATGGCCAGCAAGAGTCAGAGCTGGGCAGTCTGAGCCCCAGCAAGGCCTCAGCTGTTAACCTTCACAC
ATCTCTGCTTCCTCATCTCCCCTGGAAACCAGCCTCCCTCCCTCTGGCTCATGGCATCCAAGCCCTCCCT
TGTCCTGACCAATAGCAGTTCTTCGGCCTCTCCTGCTGAGACTGAGCCTTCCCAGGGCATCCCACCCAGT
GAGTTTGCCACAGCAAGGCAGAGTGAGAGGCACCTTCATTGGGAGTCCTCACTTTTTGGGGACAGGCTCT
GGGGACTCGGGGAAGGCAGGCAAGGGCATCACTGACTACAGTTGACTGGATCTGAGCACACGACAAGATA
GAGACAGGAGGGCCCCACAGCAATGGTGACAGGAGGCCAGGTTAGAGACTCTCACGCCCACCTTGGTTAA
CTGCTGTGCATTAAATACTGGGCCCTGGTGTCTGAGTATTCTCACAGGCTCAGCCATAAGAGTTCATCAC
GCTTGCTCTGAGAGTTGATGTCCTAACCTATAAGGAAATTATCTGATCAAATTCAGAGGCAGTGATTTCC
CCCATGCCCCATATGAAACAGGAGGACTCTGGAGGCCCCGGAGGATTGGAGCCTCTCAGGGAATTGCTCT
CTGAAATACAGGTGGACAAGCTTCTCTATAGAAAGGCGCTGGCAGGTAGTGATGAAAGGCCAGCCAACTG
GGATTACCAGCATGGGGGAGCTGGCTCTCCTCACAGTACAGGCCAGTGTCCCTTTAAGCCAGAATTCCTG
AGAATGCAGCTCTATGACAGCCTTAGAGACCTCTGTGGGCCCAGCAGGACCTGCCACCAGCCCTGAGAAC
TACAAGGACAAGCCCATGCTCTGTCCTGTTGCTTCTCTAAAATGAACTCAACTGCACATGGCTCAACACA
AAAAAAAGGACTCAGAGATATCTGGCTATAATGAGAGTGGATTAGCACCACTTACCTCACTTAGTGAAGA
AGACAGACAAAGGCCCCTGTCCTTGTGGAGCTGACATCCTAGTGAGGAGACACAGACAATCCTGACAAGT
CAAACACCCTGAGCCAGATAAGGTATAAGGGGGAAGTAAAGCAGGAAGGATGATAAGGGGTGTGTGCGGG
TATGGGGTCTGGGGCTGTGCGGGGTTGTATATTCATTTCCTATAGCAGCTACAGGAAATTTCCACAAATG
AGGTGGCTTAAAATACTGCAGATTTATTCTCTTACACTTCTGGAGCCCAGAAGTCCAAAATCTGTTTCAC
CGGGCTAAAGTCAAAGTGTCAGCCGGGCCAGCGTTTTTTAGAGGCTCTAGGGGTGCATTCATTCCTTGCC
TCTTCCTGCTGCTAGAGGCTGCAGGCCCACCATGGCTTGTGGCTGCCTCACTCCAAACTCTGCTTCCATT
GTCACATTGCCTTCTCTGCTTATAAATAGCTGACTCTCCCTGTGCTCCCTTGTTTAAGGATATGTGTGGT
CGCATTCAGAGCCCAGCCAGATAATCAGGATGGTCTCCCTATCTTGAGATCCTTAATTTAATCACATCCA
CATAGTCCTCTTTACCATATTAGGTAACATTCACAGGTTCCAGGGATTCTGGCATGGATATCTCTAAAGG
CCATTCTTCAGCCTATCCCAGGGGACAATTTAAAGTGGAGTAGGTGAGAAAGGCCTCACTGAGAAAGTGA
CATCTAAGCAAGGAAAGAGGTAAGAGCAAATGATGTGGGTATCTGGGGAAGAGCTTCCAGCAGAGGGAGC
AGTGAGCGTGAAGGCCCCCAGGCAGGAGCGTGTCTGCATGTTCAAGGAGCAGGAAATTGTGCTGTGGAGA
GGAAGAGAGGGGCATGGGCAAGGTGGGGGTAGCAGAAGAGCCAGAGAGGACACAGGGCAGAGTTGGCAGG
GCCTGGGAGGCTTCTAATCTGAGTGTGATTGGAAACCATTAGATGGTTGTAGACATCCAATGCGTAGAGA
ATAAACAGAGGGGGCAAGGTTGGAAGCAAGACAACCCTTAAGAGGCATTGTGATAATCCAGCAAGAGAGG
TTCCCCCATGGTGTGGATTTGGGGTATACAAGAGAGGAGTCAAGGCTTGGGACCTGAGCAATGGGGAGGA
TGAAGATGAGGGAGATGCAGGAAGAGCAGGTTGGGAAAGAAACATGAATTCAAATTTGGCTTTGTTGAGG
TTGGTGCCAGCACCTGCCATTTTGGAAAGCTGTGGCCAGGGAATCGTTACTCCATGTGCCACTTTCTTAT
TCATCTCATGAGCCTTGACAACCTTTGGGCTCTGTTCTGCGAACCACACCGGCCCCCAGAGAAGCCTTCT
TGGAAGCTCTATCACAGTAATAGCGTTGACCAGAGGTGGGACACTTGGTGTGTGCCAGATATTAAGCTAA
GCCCCTCTCACGGCTCACCTCATTTAATCTCCACAACCACCTTTTGTGGAAGGTTATCATCCTCATTTTA
CAGATAGGGAAGCTCAAAGATATTTAAATAACTTGCCTGAAGTCGCATACCAGACCCAGAAGTTGAACCC
ATGTCTGTGGGCTCTCGAAAGCGGTGGGCTTAACTACTCCCCCATACTGTCTCTTCCATACAGGACAGGG
ACCAATCTGGTGGTGTTGATTTGGGTGCAGTACCCCCCACCCAACCCCCACCCTCAATGTGCAGTCTGAG
ATTTCAGTCTGAACTCATTGCTCGGAATGGTTCAACATTTTCTCTCCTCCTCAGCCTCTCTTTCAATGGT
AGACTTTATGCAACAGGTGGCAAAGGAACATTGGAATCTTGGGTCATGGGAAGGGGCTTTGGAGATGGAT
CTGTAGTGGGTGTGTGGGTTGAATGAATTTGTAAGGAGAGTAATCACAAGGAGCCCCTGCAAAGAACATT
CTTTCTTTTTTTTTTTTTTTTTTTTTTTTTTTTTGAGACAGGGTGTCACTCTGTGGCCCAGGTTGGAGTG
CAGAGGTGCGATCATAGCTCACTCCAGCCTCAAACTCCTGGGCTCAAGCAATCCTCCTTCCTCAGCCTCC
CGAGTAGCTGGGACCACAGGTGAGTGCCACCACATGGCTGGTTTTTTTTTTTTCGTTTTTTGTAGAGATG
GGGTCTCACTATGTTGCTCAGAATGGTCTCAAACCCCTGGGCTCAAGCAATCCCCCTGTCTCAGTTTCCC
AAAGTGCTGGGATTACAGGCATAAGCCACCATGCCTGACCCCAAAGGACATTCTTGAGGAGTCAGTTTTC
TGTTGAGGCTTCTGTCCTCAAGGTCATCAGCCCTTATCCCCATGCAAACACTTTGTAGAGTAGTCTTCTT
TGATGTGTGCACTAGGGTCAAACTGCCATGTTTCCAGACCTCAGACCTCCCTGTGGAGCTCCAACCCATA
GAAGGAATCATGAATGGTCCTTTGTTTTCCGTTCCTAATGGAAGCCATGGGCAGGGCTGCCAGTGATGCC
CTTCATCATGCACACCAGCAGATGCCCAGTCACAGCCCTGAGCTCTGGAACACTAGGTTGTCATCTCATA
ATGAGAGCTGCTGAGTGGGGTTTTCATGCTGTGTTTGGCAGTACCCCCTAAGGGTGGTGTTCCATCATGT
TCTACAGAGCTAGACAGTCCCTGTCACCATCTAGCAGGCTCATTCCTGGGATGTCACTGCTTTCCACTTC
CTGACTACTGCATCCTGGGTGGAATCACAGCATGTCTCTGTTGAATATCTAACCAGGGACTCTTTAAGGG
TATTTTTTTTTAAACTACCAATGCTTTAGCTGTTTTCCTGACTCTAAGCTACTGCAGGAAAAAAAAAAAA
AAACTCCAAAGTAGAAAAAAAAAAAAGGCTGTAAATGTGCCAACCTGTTATAGAAAAAGTTAACAAACAC
CTTAAACCAATGATGGCAAGTATTTCACATGAATCCCATGACCCCTCCACACACATATACACCCGTGTGC
ATGTGCACATGCACACACACACACACCTGACAGTCTTCGTTAATTGATCCCTTCAGGCAGCCACTTCCAA
TCAGTCAGAGTTAATGAAAAACATGAAACCTGTTTGCCATACTGCGTTAGGTGTTCTGAGCCAATTAGGC
CTTTAGATAAATCCTGATTGAAACCTGAAGAGATCTGGAGAGCAGCTGTCAGGTGGAAGAAACCTGACTG
GGTGAAAGGCAGGGCAGTAAGCATGTGGACATTCTTGTGCTTGCCTGTATGCTCTGTTTCTGAGAAGGCA
GGGAAAAGCAAGGAGAGCTGGCGGGGTCTAGGAAAGGGGCCAGGGAGCCCGTTCTCAAGATTAGCAGAAA
ATAATCTCTAACATGCTCTTAACTAAGACGGTCAAAGCTGCAGCTTCAGAAATGTGATTTTGTTGACAAC
TGGTGGAGCTGGGGAGGGATGCATGAGAGAGGCCAGCCAGGCAGCCTGGAATCCCAGGAAAGGCCTCCTG
TAGGTTTGGTTGTGGTGGTTAATAGTCAAGATTGGAATAATGTACTGTACTTAGGCTGTACTTAGGGTTT
AGATCTGACTGCGAATTTTACTCCAAATGATCTACTCTCTGTTAGAGATTGGCCACACTAATATTTTTTC
TTAAATTAAGAGTTTTATTTGATCCAGTAGCGTCATAGCCAGCAAACTCTCTCCACTCCATGCCTTAAGG
AAGCATAAAGCTATATTGTGAATGCTTTTCCCCTTGAAACAGCGTGTCCAGCCCAGGCCCAGTTCCTGGA
GCCAGCAAAGCCTCCCAGTGGTGCCCTCACACAACAGTAAGTGAGAGCAGGAATCACACTCCCATGCAGA
TCAGGGAGGACGAGAAAGTGGCTGTTTTCCTTGAGGGAATGCTAAGCAGCAGCACAGCTTTGGGGGAGAA
CCGGGAAGTGGGATTCAGGAAAATATTGGACATTGACCCCTGTCCAAGAGGGAAGAGGAATCACAGAAAG
GAGAGAAGGGATTAGGAATAGTGATGGCTGGAGCATCTGGGCCAGGGCCGTGCTCCGAACATGAGCCCAC
CTCAACACCCTGCCCTGGAGGGGCTTTAACAGCAGTTTGTTTTTCACCTTGATCACTCTTTCACAAAGAG
ACATGGCTGAAGTAGGACATGGCTAATACCCATAGAGACATGGCTCAGGGCATGTAACGCAGGATGGCAA
ACAAGTTTCATGTTTTTCATTAACTGTGACTTATTGGAAGTGGCTGCCTGAAGCGATAAATTAACAAAGA
CTGTCAGATGTGCGTGTGAAAGTACCTGGGCATTATGAGAAGTTTGGGGAAGAGATTTGTTGTTGAACCC
TATGCCAATAAGTTGTTCACTTTTGCAGTTTCTCTAAGCTTATGGAGATTGTTCCAGTCCAGCATTTTCC
AAATGGTGTTTGACAAAATAGTACTGGGTCAAATAGAGTTCTTTACTACAGGACTACTCAGATCATTGTG
TATTGTGACCTATGAGAGGGGAGAGAGTGAACATGTTTCTCAATTCATTTTTCACAAGGCATCTTGAAGT
CAAGTACCACTTAGCACTCACTTTAAAAGACACCTCAGAGGGTTTGAGGTGGAGAAAGTGAAAAGGAAAA
GAACAGGCCCATGCCTCACTGATGATGGGAAGACACACAGAAAGTATTTGCTGCTGATGGCGATAGCACC
CAGTCCTACGACCAGAACTGAATTATGCCTTGAACTCTGAAATGCTTAATGTTTTAATTACAAACTCACA
AGGCTGATTTTCTCTCAACATTGAATATGCTGGAAACTACACTTCAAAATGAATGTTAACCCCTTCAAAG
CTATGCTTTGCAGAGGCCACATTGTATCTTTTCAAATTGTTTGAGAATGACCCTCTTTGGCATGCAGAAC
AAGTTTATGAGCTACACAAAAAAGACAGTATTGTTATTCTATGAAAAATAATTGCAATGCATTTAGCAGG
CAAAGGGTTAGTAAAAGGAGGTTTTACAAAATCAATGAGGAAAAAATAATACTTCAATAGGAAAATAGCC
AATTCACAAAATAAGAATTTAAAATGGTAACTAAGTATAGGCAAAGACTACTACAATAAAACTAAAGAAA
TATACAACACAACCAGGTATTATTATTCACTGATAAAAATTTAAAGGGTTGATAAAACCAAACATCAGTG
AGTGAATATGTGATCTATTTTTGCATTACAAACCACCACACAACTTAGCAGCTTTAGACAATAAGCATTT
ACGAGCTCACCAATCTGCAGGTTAGCTAGAAATTCTCATTGGAGCCACACCCAGCTGATCTTGGGTCTTG
GGTGGGCTTGCTCATGTGCTTGTTGTCAGCTGGTGGGTTGGCTGGAGACCAGCTGGTCTGGGATAGCCTC
ACCTGAGAGGCTATGCTGTGCTCCATGTGGGCTCTCATCTACAACCTGGCTCATTCACATGGCTGTTATG
GCTGGGATCCCAAGAATGAGAATGGAAGCCTCAAAGTTTCTAGAAGCCTAGGCTCAGAATTTGTGCAACA
TCACTTCTGGCATGTGCTAATTGGCCAAACCAAGTCAAAAGCCCAGCCCAAATTCAAGGGGTGGAACAAA
AGACCTCTCATTGGGAGGAATTGCACTTTGTGACCAGTTTTGCAATCAAGCACAGCAAGAATGTGCACAA
TGGGCATTCTCTTGCACTACTGATAAGATCATAGATTGATAAAATCATTCATAAGAAAATTTTGCCAATA
TCTAACAAAAGCCTTTAAAATATCCATATTATTTGATTCATACTTCAGAATTTATTCAAAGGAACTGATT
TGCAAAGTGTGCAAATCACTTTACATACATACAAAGATGTATGTATCTGAGTGTTCATCACATCATTTCT
AATAGCAAAACTGTAAAAAGCTAAATATTCAACAAAAAGGGATTGCTTATATGGATTATAAACCATCTAC
AAAATAGAATACTATGTAGCCATTTGAAATGATAACATATGGCTATGCTCACTGACATGTAAAGATTTAA
ATGAAGAAAGCAGGTTATGAAAAATATGTTTACTATAATCGGCTTTGGATTTTTAAATGTGGAAATGAAG
TCTTAAAGGAGTTTCACTTTCTGCTTTATATCGTTCTGTATCATCCAAGTTTTTGTTTTAATTCTGCTTG
GGTTTTTTTGTGTGTGGTTGGTATTTTTGCTTTTATTTTTATTTTAAATTAACATACAGTAAAATCGAAT
GTTTGTAGTGTGTAGTTCTGATTGCTAACACATGCATAGATTTGTGAAACCACCACTATGGTGGTTACCA
TCATCAGAATATCCAGAATACACCACCATCGGAATATACAGCAGTTCTATTTCCCTCTTTAAAATTATCT
TGTGTGGACTCTAATCCTCCCATCACTCTTAAGAGTTCCTTTGTATTGTTGAGAAGTACTTTTTTTTTTT
TTTTTTTTTTACAGAGTCTCGCTCTGTTGTCCAGGCTGGACTGCAGTGGCACGATCTCGGCTCACTGCAA
CCTCCGCCTCCCAGGTCCAAGCGATTCTCCTGCCTCAGCCTCCCGAGTAGCTGGGGTTACAGGTGCCTGC
CACCATGCCCAGCTAATCTTTGTATTTTTAGTAGAGATGGGGTTTCACCATATTGGCCAGGCTTGTCTCA
AACTCCTGACCTCAAGTGATCCACCCACCTCGGCCTCCCAAAGTGCTGGGATTACAGGCATGAGCCATCA
TGCCCAGCTGAGAACTATTTCTTGATATGGATGTACCACAGGTTGTTTATCCATTCACTCATTGAAGGAC
GTTTAAGTTGTTTCCAGTTCAGGGTGATTATGAATAGAGCTGCTATACAAACATTTGTGTACAGGTTTTT
GTGTGAACATAAGTTTTCATTTCTCTGGGATAAATGCCCAACAGGGCAATTTTTAGGTTGTATGGTAAGT
ACATGTTTTGTTTTATAAGAAACTGCCAAACTATTTTCCAGAGTGACTGTTCTATTTTACAATCCCACTA
GCAATATATGAGATCCAATTTCTCTGCATCCTTGTCAGCATATGATATTATCACTATTTTTAAATTACAG
TCACCCCTCAGTATACATGGGGGATTGGTTCCAGGACCACCCACATATAACCAAATGTGGGCATACTCAA
GTCCCACAGTCGTCCCTGCAGAAACCCCATGTAGGAAAAGTTGGCCCTCTCTATGCGAGTTTTGCATTCC
ATGAACAGTACTCTCCATCTGCATTTGGTAGAAAAAAAGGACCATATGAGTGGACTCGTGCAGTTCAAAC
CCATGTTGTTCAAGGGCCAGTTGCATATTGTTGCTCTTCTAATAGATGTGATGTCTCATTTTGGTTTTAA
CTTGCCTTTTCCTAATGGCTGATGATGCTGAACATCTTTTCATGTGCTTATTTTCCATCCAAAATCTCTT
TTATAGTAAAATATCTATTCTTTTGCCCTTTTTCCAACTGAATTGTCTTTGCACTTTTGTAAAAATTTAT
TTTGCTATGTTTGTGTGAGTCTATTTTTTATTATTCTGTTTATTGATCTGTTTATCTATCCTCTTACCAA
CATCACATTGTTGTGATTACAGCTTTTCATTAATGCATCTTAAAATCAAAGAGTGGGAGTCCTCCCATCT
TTTTTTTTCAAAATTAGTTTAGTTATTCCAGTTCCTGTGCCTTGATGTCTATATTTTATAATTATATATT
TGCACAATTCCCCCAAAATGTTTGGTTGAACTTGCATTAAATCTGTAGATCAATTTTGAGAGAATTGCCC
ACTTGACAATTTTAAGTCTTCCAATCCATAAACATGGTATGTCTCCCCATCTATTTAAGTCATCTTTAAT
GTGTGTAATCATATTTTGGAGTTTTCAGTATGCGATTATTGCACATGTTTGGGATTTTTGTTTGTTTTAG
ATTTATAACTAACATTTTAATTTTGGAACTATGGGAAATGGTTATTTTTAAATGCCATCTCCAATTGCTT
ATGGCCAATATACAGAAATACAATCGATGTTTGTATGTTAACCTTGTATACCGTGACCATGCTAAACTAA
CTTATTAGTTCTAGGAGCTTTTTCTTGTAGATTACTTGGGATTTCCTATGTAGACAGACATATCAACTGT
GAATAAAGACAGTTTTATTTCTTCCTTGCCAATCTGTATGCCTTTTATTTCTCTTTCTTGTCTTATTACA
CAGGGTGGGACTTCCAGTACAATATTATTAGGATCAGTGAGAGTGGATATCTATGACTTGTTCCCAATAT
TAGGAAGAAAGCATAACCATGTTTCACCATTAAATATGCTGTTAGCTGTATGCTTTTTGTAGGTTTCCTT
TTTCAGATTAAGAAAGTTCCCTTTTATTCCTAGTTTGTTGAGAGGTTTTATCATGAACGGATGTTAAATT
TTGTCAAATGCATTTTTCTACACCAATAGGTGTGATCCTAGTAGTTTGTCTTCTTTAGCCTGTTAATATG
GTGAATTACATTCATTGATTTCCAAATATTTAACCAGCTTTGCATTCCCAAAATAAACCACCCATGGTTG
TAGTATATTTTTCTTTTACTATATTGTTGGATTTAATGTTGTAATATTTTGTGGAAGATTTTTGTGTTTA
CATTTATAAGGGGTATTGGTCTGTAGTGTTCTTTTCTTTTGCTGTCTTTGTGTTGATATCAGATTAATGC
TAGCCTCATAAAATGAGTTATGAAGCATTCACTTCTCTTCTGTTTTACGAAAGATCCTATGAAGAATTGA
TGTTATTTACTTTAAATGTTTGTTAGAATTTACCACTGAAGCTATCTGGGCCTGGCTTTTGGGGGGAAGA
TTTTAAACTACAAGTTTAATTTAACAAATAGGTATTGGGAATACTTAGGTTATCTGCTTCCTATATGAGT
TTTGTGGTAGTTAGTGACTTTTAAGGAATTGGCCCATTTCATCTAAGTTGTAGAATTTATGTGCACAGAA
GTTTTGTAGCATTCCTTTATTATTATTTTAATACATATGAGGGTCTGTAGCGATAGCCCTCATTTCATTC
CTGATATTGGTGTATTTACCCCTGATTTGTGTCTTGCCTCTTTTTTTTCTTGGTCATTCTAGCTAGAAGT
TCATCAATTTTACTGATCTTTAAAAAGAACCAGCATTTAGTTTCATTGATTATTCTCTGTTGCTGTTTTT
AACTTCAGTGATTTATTCTCTTATTTTTATGATTTTCTTCCTTCTGCTTGCCTTGGATTTAGTCTTCATT
TCTCTACTTTCTTAAAATGGAAGCTTAGATTGTTGATTTGAAACCTTTCTTTTTTCTGTAATAAGAATTT
AATGCTACAAATTTCCCCTTGAAGCACTGCTTTGGCTTCATCTCACACATTTTGATATGTTTTATTTTCA
TTTTCAATGAGTTCAAAATATTTTCTAATTTTCCTTGAGACTTCTTCTTTGATCTATGTGTGATTTGAAA
GTATGTTAATTTTTAATACTTGGACATTTTCCAGTTGCTTTCTGTTTTTTACTTCTAGTTTAGTTCATTT
TGGTCAAAGAGGAGTTTTGTATGATTTCAGTTCTCTTCAACTTTTTAGGTTTGTTTTGTGACCAAGGATA
TAGTCCATCTTGGTGATTATTCAATGGGCATTTGACATGAATGTGCGTTGTGCTGTTATTAGATGGAATC
TTTTATAAACATCAAATAAATTTTATTCATTGTGTAGTTCATTTCTTCTATATATTTGCTGATTTTCTTT
CAATTAATTCTCTCAATGACTGAAAGATTAGTGTTAAAATCTCGAACTATAATTGTAGATTTGTCTATTC
CTCCTTTTAGTCCTATCAGTTCTTGTTTCATGTATTTTAAAACTTTGTTGTTTGACGTATGCCTATTGAA
GGTTGTTATGTCTTCTTGCTAATATTCCTCTATCCCTGATATTTTCCTTTCTCTGATCTGATATTAACAT
AGCAACTCCAGCTTTCTGTTATCTTTTCACTTAACCAACCTATATCATAGTAGTTAAAGTTGGATCCTTG
GAAAGTGAATATAGTTTAATCTTATGTATTCACCCTTTCTGAAAATCTCTATTTTTCAATTAGTGTGTTT
AGACCATTTACACTTAATGTAATTACTGATACATTTGTATTTAGGTTTTCTACTTTATTATTTGTTTTCT
GTTTGTGCCTCTGTTTCCCCTTTCCTGCTTTCCTTGCCTTTCAGAATTACATTTAAATTTGCCTATTTTT
TTACTATATCTCCATAATAGCTATTTTTGTATGTATTATATGTACTTAACTTTTCATAATCTATTACAAT
GAATATTAACATTTCAAGTAGAATGAGGAAGTCTTACCTCCATATAGGTAGATTCACTCTCCTACTCTAT
GTTGTAGTTGTCATATATTTTACATCTAATATATCAAAAACCTATCAGATGTTATAATTATTTCTTTCAA
TTATTATTCATATTATCAAGAACTTGAGAGGAGGGCAGACTAATATATTTATCTAGATATTTACCATTTC
TCTCCCTCTTCCAAGTTTTCCTCTGGTATAATTTCTCTTCCGTCTGAAGAACTTCCGTTAGCATTTCTTT
TGGAGCAAGTCTGTTGGTACCAAATTCTCTTGGCTTTACATCGCTTTTCACTGGCTACTTTCCATATTTT
TTTCTTTAATAGTTTGGTTATGTGTCTGGACTTGGATTTTCTTACATTTATCCTGTTTAGAATTCACTGA
GTTTCTTGAATCAGTAAGGTTTTATGTCTTTTGCCAGATTTCAGAAGTTTTCATTATTTTCTCAAATATT
TTTTCTGCATCATATTATTTCTCTTTGCCTTCTGAGACTTCAATGATGTGACTGTTAGACTTTTGGGTAT
TGACCTACAGATCTCTGACGCACTACTTACATTTTCTATTGTTCAAACTGGACGATATCTGTTGATCTAT
CTTCAAGTTCTCTGACTGTGTTCTCTGTCATTTTCATTCTGCTATTGAGTATATCCAGAGAATTTTTAAC
TATATTTTTCAGTCTAAAATCTTCACTTACTTCTCCTTTATATCTTCTTTTTTATCGCTGATACTTTATA
TCTTTCCATTTATCTCAAAACTGTTTGCTATTACTTGTTAGGGCATGTTATTGTGGCTGGTTTTTTGTGT
GTGGAGTTGGCATCTGTTGGTTATCTTTTCCTTTTCAAATTAAGACTTTCCTGAGTCTTCCTAGCTGAGT
AATTTTGAACTGTAGCCTTTGCAATGCTATACAGATCTGCCCTGCATGTGCACCACCCAGTGGCCAGTCT
GGAACCTGGGCCTTAATCTACCCCACAGTTTACTTCCTGAAGACTGTGGTATGATGTTTAGGATGAGATC
TATGCATGCACAGTTCAGAGGTGACCACAGGAGTCCATCTACAACTTTATGGAATTGCCTTCTTGAGCTC
CCTCCTCTTCATGACCCATTTCTCATTCCTCTACCCAAAAAGCTGGAGCTTCAGTTTCCTCACTCTGCCA
TATAGGCCCCACAACTGTGTCTGCCTCTGGGGCAAATCAGCAGAAAACAGAGAGAAAAAACAGTAAATAT
TTGCCCTCATATTCTTGGGATTATAACTTCTCTGGTAGAAGAAAATAGTTATGCTTGCTCCAGAGTTGTA
GGTGGCTGCATGGCCACCAACATCACTGCTGCCATTGCTACCAAGAGAATTGCCTGGGGGCTGAGTTGAG
AAATAACAGAATAAAGTGGGGGAAAAACAACAACAAAAGATTTCTTTCACTCTCTCTGACTCTTAGGGGT
TCCCTTTCTCACTCTGCAAGCCAGAAAGAGAGGATTTCTCTTGTGTGCTCTTTTTCTGCATCCACTGTAC
CCTTCTGGGTTTGGGAATGCCTTTAAGTCCAGTCTAGATGATACCAGAGGGGAAAGAAGAATGGTAAATT
CACTGCCAATTTGCTAATGCTTTAAAAATTCTTCCCACTCTTCCCCAGTTATTCTATTATTTACTTTGCA
GAATCCTCTAGTAGTTGCCCCTTACATTCAGTACATTGTTTATAATTGCATTCAGTGGGAGAGACAGGGC
TGAGTGTGCTTTACTCCATCTTGCCTGAATCTGGAAACTATCTGCTTGGTTTGTTGTTGTTTTGATTTAA
AGAAAAAAACAAGGATGATTTGTACACACAAAAGAAAGTTCTAAAACTAATTGTTTTTTTATTCAATCAT
CAGTCATGAGGCATTCACCCTTTCCTGGCAGCATCTGGTTGAGAATGTCATCTCCTTTTCCTTTGTAGGG
ACACAACTGACTGTGGAAGTCCACCCTCGAGATGCCATGCCCCAGCTGCTCAAGAAGTTCTCCTTGGCTA
AACGTATGTATGACACAGGTACTCATGGTGGAGGGCTGGCAGAGAGGATTGAAGGCAGCTGGTTGGGCCA
GATCCCAGCCCAAGCATCTTCTGAGGGAAGGAGAAGAGTGACATGGGCCTGCAAACTGGGAAAAGGCAGA
AGCATGACAGCTTTATCCTGGGAGACTCTTTTCTCTACACCCAGCTACCGCTGATTTTGCATCTCTGGAA
CTAGTCATAGGTAACACAGACATTTAGCTGAAGACACATTGCATCACAAGAGTGTTGTTGCTGTTGCTTT
TAGATACCATTTGTTTACTGCCAGAAAAGTGGCATGCAAAATGCTAAGTACTTTAACATTTATTAACTTT
TTAACCTTTTGATGTATACTAATATCATCCCCACTTTTTAGATCAGCAAAGTGAGGCTTAGAGAGGTGAA
GTAACTACCCAAGTCACCCAGCTAAGAAGTGGGTCAGAACCCAGGTATGACTCTGAAGCCTGTGGTCTTA
ACCACCATACTTTGCTGCCCTCAGTGCAGTGCACATAGGCCCAGGCCCAGGACGATGATGTCTCCCCAAC
TCCCTTCTCGGTCCTCTCCCTGCATCTGTGCACCTTATGGTTAAACAGGGACCTCAGGAAGAATGCAGGT
TAAGTAACAGAGGCTGCAGAACAACTGAGGCTCAAGTCCTCTTTAGGTCCATGCAGTGAGCCAAAGTCCT
CCAAAACTGTCTGGTCCTGTAGTCATCAGCAGTCAGGATCTCAAGAAAGTAGTCTACTGTAAAGAGGGCA
GGCTCTAGGGTCGACTGACTGGGTTCATGTTTCAGCTGTGTGACCTTGGGCAAGTGGCCTAACCCCTCTT
TTGAACTCAGTTTTGTCAACTATAAAAGAAGGAAAATAAGCGAATCTGCCTCATAAGATTATTATGAGAT
TAAATGAGAGAGTAAATATAAAGCCCAAGCCAGGCATAGTAAGTGTGTAACAAATGCTAGCTATCATTTC
GAACCTTTATCATTCTATCAAAAAGGTAGGTGGGAAAAAAATGTAGGTGTGAAATACAAAATGCAGGTGT
GAGAAATAAATGGAGCACTGTTTCTCAGAATAACCCATGTGTGGTTGCAATCTTCTTTGTTATATTTATA
GCCTAAAGTGGCCTTCAGGGGCATAAAACTACCTGCCTTGGCATCCCCACCTTCAACTCCCCTGATCCCA
TCAGGGACCCAAATCTTCCTGACCTGGTTCCAGATCGGCAGGGAAAGTTCCTTTCCTTTTGCCCAGGGAG
TCTAATAACTATTGGCTACAATTCTGCCTTTACGGTCTTAGATTTATGGGATTCAGTTGGCCTTTAATCC
TCCCAAGGAATAATTTAATTATGACCTGACCTTTCTAGGTTTTGACCTTCACACGAACTGCTTTCCCCTT
CCTGCATCTTTGTTTCCATCCATGGTCAGTTCTTATCCCGGCATTATCTGGCAGTGGATTCAAGAAAGCA
GGAAACTCCAAAAGAGGGCAGGAACACCAGGTTCCAGGAGGACCCAATGAATCACCCAAAGTGTTAGGTC
AGAGCAAATACTAACTCCAGTTGCAGAATGCAGCTCCCTTTCTTGTCAGCCACTTCCTGGTTCTTAGTCT
TCCTTCTGCCACACCAGGAAGTTCCTGGCAATTCAAGCAGCAATTCAGTGGTCAGTGGGGTGGGAACAAG
GAGACTGTGAAAAGGAGAGTAAAGAGGAGGGGTCAAAAGCAAGGACCACCAGAAGGTGAGTCATCAGTGC
TTGCATTTCTGTTTCTTCTGAAGTATCTATACTTCTGATCTTTGGAATATTGTAGGTTTACAAGGTGATA
AAAATGGAAACACAAGACCCCGGCAACCTGGAGGGAAAGATGCCCATGGTAAGTTCCAGAGTCTTCCAGG
ACAATTCTCAAGAGAGCACATGGGTTTAGCCTCATAGACTAATCTCCAATTGACAGTTGCTTCCTGGGCC
ACTATGCTGAGAGGCTGGGGCCACCTTTGGGTTCAGGAGGGGAAGAGTGTCATGATTGATTAGCAATGTC
TGCCATGGACACAGGTGGAGAAGGAAAAAGCTCATGCACCAGATGTCATCCTAAAGCTAAAGTATAAACC
CCACCAATAACAAGGCAGACCATTATAGGAAACATATTAAAATCGTAATTCAGGATTATGTTAACTTTAA
ATGGAATGCCAAATGTCTGTAAGGTAGGAGGCATGTGAATAAGCAGAGTGAAGCAGAGGAAGAAACACTG
AGAGGGATGATAGACAGCCTGGGTTGGAATCCTGCTTTTGCCCTTCATTTGCCTTCCCTGTGCCTCAGTT
TCCCCCTCAGTAGACCAGATGTCATCTAAGGCGGGGTGCAGCTCCATACTTCTTCCTATTGTTTTGCTTT
AAAATCAGAATAATTTAGTTAATGATACTGATGTTTTAAATGTATTTATGTAGAATCATACTTAGATCTT
ATATAATCTCCTCACAGGTAGATTTAATGAGGCATAAATCATGGGCATTTTTAATGTTCAGATGTTGGAA
AATGGAACCAAGAAAGGGGAAAACTAGTAATAGGATTTTCAATACCATTTCAGAAATGCCACCTTTATTC
TAAATAGGAGTGCAGGGAGACCTCATTTGCAGAGCTATACTGAGTGGAAATCTGTTCGATGTGTGAGTCC
ACTTTGAATGCACTTAGATCGCCCTGATGGCTCTTGTGAGAGAATGATAGGAACAGATTCTGCAGAGCAA
GAGGGCACTGAAAAGAGGCAAGGCTCAGCAGGGGCCTGCCTGAGTATCCCCAGTCTTCTCTGGTTGCATT
TGGACCACACAGCACAGCGGTTGATGACATAAGTCATGGTGGCCAGGCAAGAAACCCCTGGGCCCAAATA
TTGGTCAGCTCCCCAATAAGTGGGCATTGCCTCTCAAACCATGCTGGCCCAGAAGAGGGTCATGAAGGGG
CTGGAGCCAGGTCTAGAGGTGACACACACCCCTCCCCACCTTCTCCCCACATCTCTCAGGTCTAATAGCA
CCAGATTAAGGGACTCTCACTGACAGTGGCAGCCCTGACGACGTGTGGGCAAATGCACCTGCAGTGTCCC
CCACCAGGCAGGGAGGCCACATGTCCCTCCCTGCATGTACCTGCAGAGGAGCCCCACAGCCTGCACCCTC
CCAGAGAGCAGTGTGACGCTAACATCACAACATGATATGCTCCCAGGAATCCCACAGATGTGTGCCTGAG
GCCAGAGGGCTGGGTCCAGTCCCTCCCAGCAAGGTGGAAGTCAGAACCAGACTGGAACCAAGGTAGAAGT
GCAGGTCCATCAGGTGCTTTCTCACATAGCCCTACTCTTCCCAGACTTCCCTACCATACCCTGGGGTCTC
TCCAGCACACCTCACTTGCCCAGCACCCAGAGGCTCCCGACATGGAGGCTGAAGGTGGGTGGGTCCACCT
GGATCAGGGGCTCAGTTCCTCTTTGGTCCCAACTTCTTCCCACCCCCATCCTGTCTTCCCACCCAGCTTT
CCTGATTTTGATCTGCCTGACTCAGGGACCCTTGGTTAAGAAAGGCTCTGCCAGAGCCAAGGCTCTCTTC
TGGGCCGGGACAGGGGTCTGCTGTCCATGCACCTGTTGGTCTAACCATTGGCCAGGCAGCCTTGCAGCAG
CCTCCCAGCAATAGCTGATTATGGCTCTCCTATGTCCAGTGGGAAGCTTGCATGATTGCTGGCCCTGCAT
CAGCACTGGTCTCTAGTTTTCTCTCCTTCCTGTATCTCTGTCTCAGAGACCTGACTCGTGGTTTGGTCTC
TGGTCAGCAGGCTCCCTGTGAGTAAGGCTAAGCATAGATGAGTGATTTGGAGGCCCAGCCTTTCTCAGGG
CCCTGTTACCAGAACGCCATCACACATGGTTGAGATGCTCAGGTCTCCAGTTGACCAAGGGCAAAGGAGG
AAGCCTGTCTGGGTGCCAAACGCACCTCGCCCTGCAGGACCCAGATGGCCCGGCCTTTCCATGCCCTCCT
CCTCCACTGAGGTGTCCTTTGGCACCTCCACCCCAGGGCCGTGGCTGTGGCACAGACCTCCCTCCTTGAG
CTTGTGAGCACGAGCAGCACTGCCTGGACACTCCCCAAAGAGCATTCATTCCTGGGAAAAATAACAGGGA
ATCCACGGAAAACCAAATGGTGGGAAAAAGAAGATTCCATCATCAATATGTCTGGGAACTACTGGGTTAA
CTAAGGTTAAGCCCGTTTCCTACTTCTGACTTCTCAGAGTCTACAATAGGCGTATGTTCCCTGTAGGCCT
CTAAGAGGACTATGGGAGTTGCCATGGTTCCCAAACTAACTTGATCAGGGGACCCTTCTAGGAAAGTTCC
CATATAGCTCTTAGGCTCAATGTTTCAGGCTTTGAGAATTGTGTTAAAGGTTGGACAGTCACAGCTCCTC
AAAGAGACAGCAAGGCCTAGGCCAGGCAGCCCTCTTCAGTGGGTCTCAGCTGCTGACCAAGGTGCCCTGT
GTTTCCAGCCTACCCCTGGGATCGATCTAGCCTGAAATCCATGTCCCTGGACCTGCAGCAGTTTGAGAAA
TTGGATATCTACGCCTCACAGGTAGGACAGCTGGCCGCTCTGACCATGGGCCCCTTCAAGGTGGCTTAGA
GTTCTAGGGCAGCAAAACCTCTCCCCAGACACCTCCTGAACATATCCTGAGTGGCTTGGTTGGATGGCCC
TGGAATGCCTTTTCATAGCATATGGGTGGGGACAGAAGGCACTAGGCAGCAGCCCCTGCCCAGAGCCAGA
GGCCATTCCATCCCCCAGCCCACCCACGATCCTGTTGCTCCCACCCCATACAACACACCCTGGAGCTCTT
CATTGGCAAGCCCCTCTGGCCAGCCCTGACCTGCCTTCTCCATGCCCCTTTTGGCATTTCTGCTCCTAAG
CTATGCCTGCCTCCAGTCCATGGAAGAAGGGAGGAGAGGATGGGAGGACCGTGGATGCAGATGGCCAGGA
CCATTATAATCACAGCTGTGCTCACCTCTGAAGTGCATGAGCTGCCATGCTCTCATGCCTCTGGCCCTGA
GCATGTCTCAGGTGCAGGTGGGAGGAGCAGATGAAGAGCTGAAACACTAGGGACATATGGAAGTCATTGG
AGCCAGGCAGGAGCTTCAGCACAGAGAGTCTGATAGGAGGAACAAGGTGTTGAACACTTTTGTGAAGTCA
GGACATTAAGTGGTCTTAAAAAGGCCACCTTATAGGTACTCAGGAACCTTGTTTGTTGAAATAATGAGTG
GATGGTGAGTGCATGGATCAAGAAAGCCAGATGAGAAGCAAAGACATAAGTTGAGGACATCCTTCTGTCC
TGGCAGAAGACATGACCTGGATTAAGTGGAGACATTGAGGAAACAGAGGAGTGGAAAGGCCAATCCTGAG
CTAGGGGCAGAGGGGAAGAACTCTAACACCAGTGGGTGTGGAGTGGGTGGGAGGTGGGGGAGAGGGGCTC
CCAGATAGCTGGATTGACTCCTGGAGGGTGCATCAGTACCTCCTCACGAGGAGCAAGGGAGAAGGAGCAA
GTTTTAGGGGATGAGTGTGTTTGGGATATGAGGGGCTCTAGTGTCTGTGGCACATCCAGGGGAAATGCCC
CCTGGGCAGCCAAATATACAAGCTTGGAAAGGTCTGGGCTGGAGACACTGATTGGTAGTCATCAGATTTC
GTTAAGAGCTGAAGCCATAGGACGGGCATCATATTGCAGGGGTGGAGGAAGCCCATAGGGCCTGGAGCCA
TCAAAGGGGCTGGGGCAAGGCCAGGAAGGGTCAGAGTTCTGGAAGGTCCAGGGAGGGGCTCCCTGGGGCA
GACGTGGTCAACAGCGTGAGCTGTGCTATCTGCTCAAGTGAGATCAGGACAGACGCCATGTCGGCTACTG
CAGCATCAAAGTGCACCTTACCTCCAGAGGGGCAGTGCACAGGGGCTGGAGGCCTCAGTCCTCAGGTGGG
TGGAAGAGCAAGCAGGAGGTGAGTAGTGGGGAGTGAGGAGAAGATCCCACAGGAGCCTGCAGAGACGGGG
AGGCTAGACATGAGCAGAACTGAGGAGAGTAGGGGGGCATCCTAAGGTGGGGGAACAAGGGGGCATGGAG
CAGCCAGGAAAGGAAGGGAGGAGGTGAGGACATACGAGAAGGAGGCCATTGATTGAAGAAGGGAAGTCCC
TGTAAAGGCAGAAGACCTGAGACATAGAGAAGGCTGAAGCAGGAGGGGAGGATGAGACTCTTAGTGAGGA
AGTCCCACCTGGCCTGCCGTGAAGTGGAGGCCAGGCCATTACCTGTGAATGAGGAAAGTGGGTGGGGTCT
GGAGTCTGCAAAGGGCCCAGATTTTTGTAATGGCCATCGGAAGGGATGGGTCAGGCTGCTGGCCATACTC
AGAGAACAGTGCCAGGAAGCCAGCGGAGGCCAGAGACCCAGCCACAGAGCAGGGAGTGGCCAGAGCAAGC
CAGGCCCAGGTGGGGCCAGGAGGTGGGGACCAAAGGACCAGAAGCCATGGCACTGAAGTAGAAGGCTAAG
TCAGGACTCCAGGCTGCAGTGCAGGCCTGCAATGCTGAGTACCATTCGGGGCCCTGGGAGAGGGACAAGG
ACAAAGTCTGCGGTGTTGGAGCTGGACGTAGAAGAAAATGAAACAGAAAGCAGCTGAGAGAGTAGAACAG
GGGTCCAGAGGTCTCCAGAGGTCAGAGTGCCAGTGTGCTGGGCCAGTGGTCAGCAGGTGAGTCCTGGAAT
CTCTTGTGAGCAGTGAGATGTTTCCAGCTAAAAACAAGGTCCTGGAGTACCCTCAAGCTGGGAGCTGAGG
GGAATGTGGGCACCATTGCAGGACCTAGTGGCCCAGCTTCTCTACAGAGATTAAACATGGTCAGAGCCAT
CTTTCCAGCAACCTCAGCCCTGTTTCCCTGAGGGCCCCTACGAAGAAAGCTAATTTGTTCTTTTTTTATC
ATAAAATAACATAAAATTTGCCATTTTAATAATTTTTAAGTGTACAATTCACTAGCATTAATTATATTCA
CAATGTTGTATTCTCATCACCCAAAACAGAAACTCTACCCATTAAGCAATGAAATTCCCATTTCTCCTCC
CCCAGCCCCTGGTAATCTCTACTTACTGTCTATGAACTTTCCTATTCTAGATATTTCATATAAGTGGAAT
CATACAGTATTTGTCCTTTTGTGTCTGGCTTATGTCACTTAGCATCATGTTTTCAAGGTTCATCCATGTC
GTAGCATATACAGAACTTAATTCCTTCTTTTTGTAGTTGAATAATATTCCCATGTATATATGGTATATAC
TCTATTTTATTTATCCTTTCATTCATGGATGGATGTTTTTTAACCTTTTGGCTATTGTGGATAGTGCTGC
AATGAACATTGGGGAAACAAATGTCTGTTTGAGTCTCTGCCTTCGGTTTTTTTGGTTGCGTACCTTGGAC
TGAAATTGCTAGATCATATGATAATTCTACATTTAACTTTCTGAGAAACTGTCAAAATTTGTCTACAGCA
GCTGCACAATTTTACATTCCCACTAGCATCGTACAAGAGTTCCAATTCCTCCATATTCTTGCCAACACAT
TATTTTCTGGTTTCATTTTTCAATAGCCATTTTAGTAGTCTGAAGTGCTATCTCATTGTGGTTTTGATTT
ACATTTCTCTCATGACTAAGGATGTTGAGCTTTTTTTTATGTGCTTATTGGCCATTTGTATATCTTCTTT
AGAGAAATATCTGTTCAAGTCCTTTGCCCCTTTTTGAATTGGGTTGGTTTTGTTTTTGTGGAGTTGTAGG
AGTTCTTTTTATATTCTGGATATTTAACCCTTATTGGATATATGATTTGCAATGTTTTCTCTCATTTTGT
AAGTTTTCTTTCTGCCTTCTAAATGATATCCTTTAATGCACAGAAATTTTTTATTTTCACGAATGCCCTT
TTATCTGTTTTTTCCTTTGTTGCTTGTGCTTTTGGTGCCATATCTAAGAATTCATTGCCAAATCCAAGGT
CATGAAGATTAACCCCAGTGTTTTCTTCTGAGAGTTTTATGGTTTAAGCTCTTATATTTGAGTCACTGAT
CCATTTTGAGTTGTTTTTGTATATGGCATGAGGTAGAGATCCAAGTTTATTCTTTTGCATGTGGAAACTC
AATTGTCCCAGCACCATTTGTAAAAGAGACTATTCTTTCCCCACTGAATGGACTTGACACCCTTGTCAAA
GATCCACTAACCGTAGATATGTGGGTCCATTTCTGGACTCTCAGTTGTATTCCATTTGTCTATATAATCT
TCATGGCAGTATCAAACTGTTTTGATTACTGTAGTTCTACAGTAAGTTTTGAAAATGGGGAACTTGTGTC
CTTCAAATGTGTTCTTTTTTCAAAATTGTTTTGGCTGCTTGGAGCCCCTTGGAATTTATAGGAATTTGAG
AACTGACTTTTCCATTTCAGCACAAAAAGCTATTGGAATTTTGATAAGGATTATGTTAAATCCTTAGTAT
TGACCACGACCAGGGGCTGCTACAGCTGTCCAGATGCCTGCCTGGCTAGCCCCCAGATCTGCAGAGAAAA
GCTGTGGTGGCTCTAGGGCCTGTGATTGAGCTGGTCAGCACCACCTGCCCTGTCCAACTTCCCCCACCTC
CTCCCAATTTGTCCTCAGCCAGCCTTTGCCCCTCAGGACCTCTCCTCCAGCTTCTCTGCCTGGAGGAAGA
GCAGCACTGGCTGTAGGTGCAAGATGCTGGGCCCCCAACAGCCCCTCCTCGAGGCCCTAATACAGCACAC
CCTTCCTGCTCCCCAGGTGACAGCCAAGAGTGGCCTAGACGAACTGGTGAGTGACCTGCTCCAGGAGGCC
CACACTGACCTGGAAAGGGTCCGCGCCATCTGGATCTGGATCTGCCATCACATAGGTAGGCCCCCCTGTG
GAATTTCTGGCTCTAGAATCCCTTGCTTCCATTCCCTGCAGGCCTCTGCTCCTATCAGCTTATTCACGTG
TGCAGAGTGACATGAAAGGTGGGGGACAGGGACCCAGAAGACTGGACTGATGAACCAGAGAGTAACCAAG
GAGGATAAAATTCACCATGTGCTATGAGTCTCCATGAAAGTTAGTTGGAGGAGAATCCCTTGCAGCCTTC
TGCCCATAACCAGTGCCCAGAGCTGGAAACTTCATCCAGCAGCAGCCTTCCCTCTGTCCCAGCCTTCCCT
CTGTCTTATCTCCACAGAGATGAGAGCCCAGAGCAACAGGTCATCTCCAAGAAGGATTACCATTGGTGGG
GAGAAGTTGCAGCTGTTTGAAAAGTGATTGCAATACCAGAGGGTTCATTAAATACCAGGGCCAGGAAAAG
CGGGTTCTCCACTTCCTGCTCCCACACTAGCAACATTGGCCACTGGTCCCAGCGCAGTCTCCAAGGTTCT
TGGAGCCACCTGAGGGACCTGGGCCTATGCAGCTGCCCACAGCTCTCCACAGGATGGCCTTGGGAAGCTC
CCGGGTCAAGCAGAGCTGCAGAGGTGGTGGCTAAGGGATGCTGCCCCTTGCCGCCTTGCAAACACAAATG
AGAGTGGGCAGGGCCAGATCACGAGGTGGACTCCTAGTCCTTTGACATAAAGACCAGCCGGGTCTTTCTC
GACCTGCTGCCACTGGGCTTTTCTTTTATTCTTCTGGAACAACAGTTTGGAATGCAGCTTAGAGAATGAG
CTCGCCTGGCACAGGTAGGAGGTCCAAACTGAGGACTTGAGAGACCCCCAGCTCAGCTCCCATCCCAACT
CCACCAGCTGTGCCTGTGCCTTAAAGGGGCAGGGTCAGAAATGGGACATTTATAGGACTTCGTTACTGCT
CTATCCCCATGCCAACACACACATACACAGTCTCAATGGGTCCTCAATAGCTACAGAGACTTCTGCCTTA
GGGCCTCACCACAGGCCTCAGGCTTCTTTGCAATGTCTTCATCCCCTCCTTAGTGAAGTGACAGGCTGTG
GGAGAGCAGCCTTCTCCACTTGGAGACGAGCTCTGTGTGCCCCATGGGTCAGCATGAGGCCTTCGGGCTG
CAGGAAAACGGGATGAGTGATTTCACTGGAAATGTGTGCAGAGCTGTGTGGTGGGGATTAGCAGAGAGAG
CCCCATGCCTCTGCACTGTCCTGGTCCCTTCTCCTCCTAGCCCCTCCTCAGAGGCTTGGGGAGCCAGGTG
GCCCCCTCTGCCAAGGCCTGCTCTTCCTCTCACCACTTGCACAAAGAGGTGATAGTTCCCAGATCCCATT
TGTGCTGGGGCTGTAGTTCCATTCAGCCCACTGTAGTTTCCTGGGGCTGGTGATGGCCAGAGCACAGCTG
GGGGTTGGGGTGGAGTCTTCTCGCCTCCCAGGCTCAAGCTCTTCATGATCCCCTCACCTGCCCTATAGAG
TATGACATTGCAGCTGCTCAGGAGAAGGACCGCCAAGCCTTCAAACCCACTGACATCCTGCGGACCCAGA
AGACCAACTGTGATGGCTATGCTGGCCTCTTCGAGAGAATGTGCAGGTACGAGAGACAGGAGTCCCCATG
CTGACCACCGGACCCATCCCTCTCCCTCTTCCACAGTGCCATGTGCCTTTGCCCACATGCCAGGCCTGAA
ACCTGAGTTTACAAACTCTGCTCTGGAACCCAAGTGAGTCCTGAAAAGGTCAATTTCTCCCTTTTTAACA
CCAGCATAATTGACTTTGTACCATCTGCCGGGCTTCGCGATGCATTAACATAATGGTAGATGAATGCACA
GAGATAATTTGGTTATAAAAAGCCCTTTTTCCGCCTTCTCCCATCTCTATGCAGCTGAAGGTTAAAAGAA
TGGCAGGCCTGGGAGCGGGAGGACAGTGACTGCAGATGCCAAGGGGACTGTGAAAGGCTGTCCTCAGGGC
TGACACAGGGAGCCTCTTTTGGGGGAAACAAAAGATCTCCCACCTGAAAAGATTTGTCAGTTGGACAGCT
GAATCACTACGAAGCGGCTACTCTTGGAGTCGCTGGGCTCCATTTTCAGCACTCTGGGAGTGGGCATATG
GCCAGGTTGCTGGGGTGGGTGACAGCTCTGGCCTGAGCAGGAGAACAGGCCATTGCCAGTTCCCAGTGAC
TCAAAACAGGCTCAAGATGTGGGGTGGGGGGAGGGGATGGCCACTGACCCCCACAGCTTCCTGAGCCTAC
CCTCTGAGGTCTGCTGGGTTCCTCCAGAAAACAGTCAGCTAGCCCTGGGGCCATCAAAGAACCCCTCCCC
AGGGGGTGGATGAACAGCGGCCCACTGTCTTTCTAGGCTTCTGGGAGTGAGTCTTCTTAGGCACCCAGAT
GTCAGCCCACCAGAACTGCAGGTGGCAATTCATCAAACCAAGTGTAACACTTAGTCCACAGGCAGGCAGT
TGTGATGGCCTCAGTGTTGCAGAGGCGGCAGCTGCCGAGCACTGGGTGCATGCAACCTATTCCTGGCCCA
AACCCCCTGTTGTGCTGCCTCCTGCCCCCATCACCACTGCCAAGCACAGGCACCTACCCGGCTGCTGAGT
TACTCTAAGCCTCCTGCTCTGCTTCCTGTACTTCCCTTTTCTCACTTTCAAGGCCAATCCCTGAGACCAC
AGCCCCAGACGCAGCCACGGTGGGTCAGGGTACAGAATATGCCACCCAGGCTGCTTCCCACCCCCTACCC
CAGACCCAAGCATACCTCCTGCTGCCTGCAGGCCTCTCCAGGAACCTGGATCCTCACTGGCCTCTCTGTC
CAGGCTTCCCTGGTCCTGGGTTCCTAACATCACTAAAGGATCACACTATCTAGCAAAGTCCTCCAAAATC
TGACCTCAGCCAAGTTTCCAGCCCTGCACTGTGTGACACCACCTTCCTGACCACCTCTGCATGCACACCT
GCTCCCTCTCCCCAGAGCTCCTTCCAGGCCCCGCTCCAGGACAGCCCACAACCTTCCCCTTCCTTTGTAC
CCCCAGCCCAGTTGCACACCAAACTCATGTGTTGCCTTATGCTTTCAATTAATAACATTTTTAAATTTAA
AAAATACCATTCATTGTAGATGGTTTATAAAATGCACTAAAGCAAAAAAGAAATTATTACTCTGAATCTC
ACCACTTACAGCTAACACTGGTAACATTTGGTCATATTACTTTCCAGACTGTGTTCTGTGCATACAGGAA
TTACCTGTGCTCGGTTGTTGTCATACATCCTATCGATTGTATACGTCTATATTTGCCTTTATCTCCTCTC
TCCTTCTACCTCCCCTGCGAATACCCATCTCAGAATCCTACACCCAGTAGGCCCTCAATAGACATATATA
GAAATGACAGGATATTCCTAGCAGACTTATGTGGAATGGAATGTGGAATTCTCTTTTAACTGATGAAATA
GCCACAAGTCTCTTAGCTCCATTTGTGCCTAGCATCTTTCAGAACATGATTATTTTCCTCTGATTTTACA
AATTTGAAAAATGCTTAGCATTTTTTCCAAGTTCCAGGATATATTCCTCTTTATCCAGTATAAGCTTTCT
AGCATACTGTAGAAGGAATGCCAGATTTGAAGCTAGAAAGACCTGGGTCTACCACTTAGAGTGGTATCGC
CTCCTTGATCCAGTATAAGCATCCTAGCATCCTTTAGAAGGAGTGCCAAAGTTAAAGCCAGAAAGACCTG
GCTCCCAGTTTTTAATTTACCACCTATTAGTTTTGTTCTTTGTGGTAAGGCCCTTAACCTCTTGCAGCCT
CAGTGCTCTCATCTATATATTGGAGACTAGATTGCCTACCTGGCAGGGCTATAGGACTCAATGAGACTGC
AGTTTGGGGGTTACCAACCCGATTTTGGGGTGGGTGTTTTTTGACCTATCTTGTCTTTCTTGAGTATTGA
TTGGAGTCCTTTTGCTCTGTGGAGTTTTCCTACAGACTCTGCCAGCCTACATAGATTCAGAAAATTGACA
CTTGCCTTGAGTGAAACTGTCAGCTTTTTGCCCTGGTCCAGATACTTAACAATGGCCCTATTCTGGCCTG
CAGCTTATCATTAAAACTCTCCCTAACATTTTGCATCATTTAAAATTAGTTCCAACATGGTGATTACCAT
GTGCAAAATTCCTCACACTGCCTGAGATGTGTAGCAATAGCTCACGGTCCCCTGAATTCCTTTAACTGTT
TCTTTAAAGATCAGTAACCTATCTATGCATCCCTCTACTAACTCTCTTTACCTTTAAAATAACTGCCAAA
AGTTTGGTAAATTAATTAGCTAATTCCTTAATAACTGAGGACATATAATCCGCACTTGCTGATTTATCCC
TTCTTGGTTGTCAGGGTGGACATCATTACTTTTTGCCAGTCCATTCCACCTCCCTGAAATTGTCTCATTA
AAGACTGATTTAATAAAGTAATTTGGGGAGGAATTCAGATATTTTCACAACATCATTCAGTTCCTTCTGT
CTGTCCCAAGTCACTGATGTGGGGTTTTTTGGTTAATGCTATAGCTTGTAACTGCTGGTCCAGTTTCCTT
CTGACTTTCTATCATCCAACATTAATGTCTCTCTTTTTGCCTCAGTTGCCTGCATCCTTAGTTGATTCTG
CCTAATTTCCTCGCAGGAGCCAAGCTTAATTCCCCAGACTGCTGCTCTTGAGTCGGCCTCCAGTAAATTC
TCTTCCCGTTAGCATGGCTTTAGCATCACCAGCTAGCAGGTTTCAGAGACGTTGGATAAAGCCAGGCACT
TATTACGAGTTTGAGCCCTGACACTGAGGGAGTTGGTTGTCACCAATCAGATGTCAGCTGGCTTTCCACT
CATCCTCCAGCTGTCACTGAGAGCAGGGGCAGGAGTGTGTGCAGTCAGATGGCTGCTTCTGGTTAGCAGT
ATGTCCCCTATAATCCTAAAACATCACTTGGTTCCAAAGGCCCCAAAAGATAGGCAGTGGCCATCTAAGC
CTTCTGGGAGATGCAGATTCATTGGATAACCTTAAATTATCACCAAATCTGATGCTGGTGTATAAGGCCT
CTGAAAGGGACATCTTAGCTCCCCCACCCTTATAGCTACACCAAAGGATGGCACTCACAAAGATGAGTTA
TGTCACTGGTGCAAACCACCTTTCCATTTCACTCTCTATACCACCTACAAGTGTATAGATCAAAACAAAA
TCTTGATTTACAAAAGAGCTGGTGCAACATTGTGCACATGTATCCTAAAACTTAAAGTATAATAATAACA
AAAATAAAATAAAATAAAAAGAAAAAAGAAAAAAAATTAACTTACCATGTCAGCTATGAGGAATATGAGG
TCAAATGATTTTTCCATTTTCCCAATAGATGTTTTCACACGTGAAAAAAAAAAAAAAAAAAAAAGCTTCT
TGAACTATGCATCAGGACAACTGCATCCACTGCTGCTCCGGCCACTGGCTAGCTGTGTGTCCCCAGGCAA
GGCAGCCTCTCTCTCTGAACAGCTGACGCCTCCCTCACCTTCAGAGAGGAGGCCTCTGAAGTCACGTCTC
ATGAGGTTCTGCATGGGGCCCTGGAGAGAGAATTATTATCAAGATTACTAGTTATTGACGTAGCTGTAAG
GGTAGTGTGTAAGAAAAGGGAAAAGAGAGCACATGGGAGAAATATAAACACACTGTCAGATTATAAGAAA
TCAAGTACATAAATTGTGAAAGATAAGTCATGGTTTGTTTGTCCTGCTGCAGTATAGAAACCACAGTATT
TTCAACAAAATACCAAAAGAAAAGCATACTTCATAGTCTCTCCTACAGGCACACTCCCTCCCTTTTTCCC
TCACTTGGCTCACACATCCTAGGAGAGGTGATCAGATTTGGGAAAGTCTACTGCGGTCAGAGCCCATTGG
TGTAGGGTGCACCTGTCCACCCAGATATTTCAGCCACACAGCTGTTGGGGCCTGGCCTTGGTACTGACTG
TAGGAGCATCATACAGTTCCTATGGCAGGGCCTGGACCATCTCAGTATAAAATAATACCAAATTAATACA
CTAGGATACAGTGCACCAAACTGGAACACACAGATCTTTTTAAATAATAAGGATAATGCATTCATAGAAG
ACTCAGCAGCTTCAGGGTTCATCAAGGGTAACCCAGGTAATGACATTGCCTTCTGCTTGGCTGCCCCTCT
GTTCAGTCTCTTCCCATCAGGCCACATTTGGTGGCCATGTGGTCCTTTGCAGCCCTTGGGGCTTCTCTGA
TTGGGTCCCTGAGCCCTGATATTGCTGGAGAGTGGGGGCTGCAGCTTTCTCCAAATCCTCCAGGGTGCTC
CTTGGCAGCTTGTTCAGGGCATCTTACATCCATGTTTTCATTGTGGCTTGGGATATATATCAGCCATGAG
CTATGGAGGCAAAATTGAGGTTGTCAATTCTGTAAAGTAGAAGCGAAGATTCTGCAGTCTGAGGTCATTA
AATAAATCTCCTTGGGTGATATTTTAGGCTCTGGGATGGCTGGTCGGAGCTCTTCAGGAGGTGGAAATGT
TTCTAGTCCTCGGCCCCTCCTTCCGTGCTCTCTCAGCTCCTGCCTGCAAAGTTAATTCCTCCACCTTTGG
GCTCTCCAGGTCTTTGCTTATAGACTGGGATTTTATAAGCAAAGTTCTGGAGACAGTTCCAGTGACAGTT
CCCATATCCACCCTCCTTCCAACTATCAGCACATCTAGGGCAGCCACTGAGCCTTATTTTGGGGATATGA
TATTTTTTTATGTTGTTACATTGTGTTGCGTTGTATGGTGCCATGTCATGTTATAGCATTCCCTGCTACA
GTGCTTTATACACAGTGTGTGCGGCCAGTGATCTTTTGATGACATGAAAGAGTTGTGGTTCATCCTGGCT
AGCAAGAGTGGCTGGAGACAAAACTCCTGTGGGTTCCACAATCATCGTCTTATACATACAGAGGATTTTG
CATGAGAATTATGGCATATTAACAATAATGCTTTACATTATGACCTTCTTTGTCCAATTCATCTGGCACA
TTGCTGCCAGGTAATAAAATATCCTCATATCAGAGTCAAGCATGGCATAAGCTTATAACTGAGTTTATAT
TTTCATCTTTTTTCTGCCCCAGGCATTCCCCACAGCCTTCCCAGCTTCTCCTCAGCCTGTCAGAGAAGAA
TCAACCCCTGGAGATCATTTAATGCCAACATTTCTCTCTGCCCATGATAAGCCTGGCAAGGTCACTCTAG
AGGTGACCACCAGACCTGGGAGGTGACCTTATTTCCTGGCTCAGGGGCCATCACCCCCACTCAGAGCAGT
ACAGGTGGACATCCCTGCCCCTTGCTTCTTCCTCCTGCTCTCCTTTCCAGGGCTGGGGCAGGCTCTCGCT
GCTGCTCCCTGACTTGGTTTTTCCAATCTTGCCTCCACTTCACTCCCTTGAGGGCAGGATGTCCCCCTGG
GCACACGGCCTAGGACATGGCTTCTCCCAGGAGGACATTCCATACCCATTCTGATTTACCCCACCGCCTG
GAGGCTGCACAAATGCTAAATTCCTCTCCTTCCTTCCTTGACTCCAGGTGGCTCTGAGCAGAGGACAAGC
ATCAGTGGGCAGCATGTCCAGAGGTCCACAGCGCCGCTAAATCAGTTCACCTTAATGCAAAACGAGCCAT
TCTCCAAGCCCCATTGTTCCCAGGACTCCCCTTATCCCTCCACATCATCCTAGAAAGTGATATGCACAGA
CATTCTAGGCAGCAATGGAAAGTAATTTCCTGAAGAATATAATTTTAAGTAGTATTTATGGCTTTTTTTC
CAATTCTCAAAGTAACACATAATCATTATTAAAAATTTAGAAAATACAGAGAAGTTTCAAGAAAAACATT
AAAATCACCTATAATCCCATTGCCAAAAGATCAGGTGCCTTTTGTGCCATCTCTCCCCCTCTCACTCCCT
GCCCCTCCTTCTCTGTGCATGCAGGCAACACACACACACACACACACACACACACACACACACACACACA
CAGCATCGGCGTGACATTGTGCTGACTGGAGAGATTGACATGCTGTTGTCAGTTCACATCGTGTCAGGGG
CACTGCTTAGCTCACTAAATATTTTTCACAACATTTCTTCTCCTCACCCAGTCTCTGAGTAGATGGGGCC
CCACCTCCTATAGAATGTCTATCCCACCCCTACACCTCTACCCACTCCTCTGGCCTTGCTTTCCTCTGGT
CCTTCTCTGCTAGCTGTTTCCTCTCAGACTATAAACACATCCAGACTTCCTCATCCTGAGAACAACCCCC
TCAGCCTTGCATCCCCTCAGCACTCCCCACCACCTTCTGCTCTCTGCACTGCAGAGAAATGAGGAGAGAG
CACTCCAGGTATGCAGGCTGCCCCTTCTCCCCTTCCTTCCACGGTCTCCTCAGCTACTGCCTCCTTCTGC
CCTGGAGTGGCTTATGGCCTTTGCCAGCAGAAAATCACAACACTGGGATCTAGTTTCTCTTGCAGTCTGT
CCCCATGCCCTCAAGTGCTCCCAGAAGCCATCCCACAGAGCCAAGCTGGTATGTTCTTATGGGATTCCTT
AGAGGGCTTAGGAGGCCTGAACCTCCTTTTGTGAAGCAACAGGCAAAAGGGCGGGGGCTAGAAAACTTCC
AAGCCCCTAAGGAACCTCAGCACTAGTGGCCCGGACTTTCCACAGGTGAGCAGAGGTTAAGGCAGACATG
GTAACACCTCATCATTGCATGCATGTGAAGAAACACTGATGGCTGGGAAAGTAGAATCTGTTAACCCTCA
GGACATCACATTTGATCCCAATGACTCTCTCAGCAAGTGATATGTATTAGTAATATTTAATCCAATATTT
TGCTAATTTTAAATTACATGTTCATTTTTACAAGGAAGATTCCCCCAATTCCTATAGTAGATGCATGGCC
ATTTCACCCCATTCCCCTGGGAGGCTCCGTGGCCCTCTTGTTTAGAGCAACTGAGGCTGCAGCCCTGGTC
TGTGGAAGGGCCCAGCCCCATGGGCCCATCTCACTGAAACAGACCCCACCAACACCCTGGACTGCAGACT
CAGCTCAGCTGAGTACAGCACAGGGTCACCACTGAGTTGGGGACTGAGCAGCTTGTGTGGTACTCAAAGG
AGCCCCATCAAAGGGGCATCAAGCACATCCTCGGTTTCACAGGTTGTGTATCTATTACACCAATTTTCCA
TGAGTGCAAGGAAAATGTCTTGAGGAAGGGGAACCTTTTCTAATTTACACAAAGGCCCTAGGAGGGCTAG
CATGGGATGTCCCTAGGTCAGACTAGCAGTGAAATTGTCTGCACAGTCCATCCCCTTGGCTGTCCTCAGG
GGAGCAGGGCTGCTGAGGAGCAAGACCAGCTGGCCATGAAAGGACACCCAGGGGTCTTGCTTTGGCCTTG
GACTGGTGCCCACAGCCCAGGCCTGGGCCTCAGGGTTTTAGCTCCAAATGTCTCATTTTATATCTTCCCC
AGAGGTGACCCATGCCCATCTTCCCATCCAGGTTCCCAGAAAGCAGTGCCAGCTCTACTATGAGCAGTGA
AGGAGCACAATGTCAAAAGGACCCCAAAGCTCAGGTTGACTGGTCGGCATTTCCATTCCCCTCAGGACAG
CCACAGGAGACTCCAGAATTGTGGCCAGGGCAGGCAGTCAGCAAATGACCTTAATGCACCATGATGGCTC
TTGCACCATGTTCACAAAGGACAGACCCACCAGTCAGACCTGAGCAAACTGGCAGCTGGCCAGTCCTCCC
TGGGCCAGGGCTGGAGACATCCACCGCCTGCCCCGGGGTTCCCCTGCAGGCATCCTTGGGAGGAATAGCA
GGGGGGTAGGGCTTGGCTTCTGTACCCTCACAACCAGCAACCCCACAACACCTCACCCATGTCACGAGAC
CCATCTCTTCAGTCGCATGTCCAGAAGCGCCCTGGTTCTCCCAGCAGCTGTGCTCGCCCCTTACATGTAG
GTTTTGTTGCAGGAACATTGTCATTTCCCCTGCTCCTATTTTCTTGAAGCCAGCCTCACGCTTGCCCCCA
TTTTTTCCTCCTGAAGAGCTGCTTGAGGAGCGTGTCAAGCAGGCTCTAGGGATGAACATTTCAGAAGTGA
TCTGAATGGTGTTGGTCTCAGGGGAGGAGCAGACAGCGGAGACTGCAGCCAGTCTGTACCAACAGGACCA
GCCAGCACTGTATCTCCCTGTCCCCAGTGCCCCGAGATAAAAGCCATCAAGGCTGTTTATATGTGAGTAC
AAGAAGCAAGGAAAAGGATAGACAGGGAGGACTGATGGGCAGCAAACATGCCTGAAACCTGAGACCATGG
ACAGACTTGGAGGCAAGCCACAGCGGGATCCCCCTCTCAGACCCCCTGTCCTGCCCCCAGGCTCGCCGGA
GTGCAGTGTATGACCGTGCCTGGCTACTCCAAGGGTTTCGGCTACCAGACAGGGCAGAGCTTCTCGGGGG
AGTTTGACCATGCCTGGAATGCTGTGTACCTGGAGGGAAGATGGCACCTGGTGGACAGCACCTGGGGCAG
CGGCCTGGTGGACACCATCACCTCCAAATTCACCTTCCTGTAAGTACTTGTCTCAGTTCTGCTGGGCGTC
TGGCAGGTGGAAGTGGAGGATGTGCCAGGCAGCATGAAGCAGCAGGTGGAGAAGACCAAGCGGGAGGGGA
AGGAGAGCCAGGAGGCCCCATGCCCACTCCTCCTCGGCTCTGAAGTGGGCTGGCTCCAGGCCAATTGTGA
GGGCCCAGACCCTTTTGTCACCTCACCCTCCACTGACAAACTCCCCACTCTGACTCCCTATAACTCCCTC
CACCAAAGCACTGAAAGCCTGCAGCATTTGCCCCCAGACCACACATGAGGAAAGGTGGGCTAATAGCCTT
CTTTAGTTGTTGGCAGGTTCCCTTCCAGACTTTGGCCATTGACCACATTACCAGGCACAAATGCCAGAAT
GATCTCTTACTGCTTTGCCCAGACACCAGGCTCCTTCTCCTCTCAGGTCTGAGTGAGACCGTATCACATT
TCTGAGGAAAGGGCTGTGGTTTTTGGGGAAGGGGTGCTATTGGCGGTGCAGGGTCACTGTGAGGCACAGT
GGGGCAGGGCAGCCGGGGTGCAGAGGACTGGAGCATTTCTGTCCTCTGGGGCTCTGGCCAATCCTGGCCT
TAACCTGAGGCTACATACAATATTCTTCATGGATCATGATGTTATCAGCAGCTCAGATTCCTTTTTATTC
AGAAACATGAGTGTGCTCTCTCGATTTTTGCACCTTAAATCTTGACACTCCCACACATGGGACAAATACA
AGCCATGTGCACACACATCCTACACGCAGGGCTCGCGTACTCACAGATACCCTCTTTACCTCTGTTATTC
TCAACACTGCTCCTCTTAGGCAGAGCAAAGCCACCCCCATCTCAGGAAGGGCCTCTCTGTTCTTCTCTTG
ATCCCCATTACTGACATCCAGAGAGGCAGCACTCCAGTCGGCCCTGGAGAGCCACAAAAGGTCCCCGCCA
GCACAGCTGCACAGCACAGAAACAGGTTGGGGTAGATGGAGGCAGTGAATTCAAGCACTCTGTCTCCCTG
CCTTCCCACGACCCCACTGCGTGGTCCACAGGCTATGCCTTTCCCCCCTTTGAACTTCTGATTGTCTTTG
AGCATGAGGCAGTCAGTTTTCCCCTCGACAGCCTAGGGCACTGAGTGCAGACCACAGTTGCAGGCTGTGG
CCTTCCCTTAGAAGGGACCTCAGACCCTGCCTTGACTACAATTTCTGGAAGCATCCACTGAGGAGGAGTC
TCCAGTGCCCATGTTAGGGTCGGAGATGGTGCCTCTTCCCATCCAGGGTGTCCATAGGACCACTCCGGTG
GGTGTATTGGGCCCCTGCCTCCCCTGCATGGAGCTGGCTGCTAACCAGCTTGTCTCTGCTCCAGCTACAA
TGAGTTCTACTTCCTCACCCACCCTGCACTGTTCATCGAGGACCACTTCCCAGACAACAAGAACTGGCAG
CTGCTAAAACCTCCTCAATCTCTGAGGCAGTTTGAGAACAACATGTATCACAAGAGTGAATTCTACAACA
AAGGGATGCTGAGTGCCCACCCAGAGACTTCCATGATCAGAACAGGTGAGCCCGGAGCAGGTGCCAGTGT
GCTAGCAGCAGGAATGGAGCATTTCGCACTGTCCTCCAGGAGCCCGCCTGAGACTGCGCTTTCAAGGCAT
GCCCTTCCAGACGCATGGCTTGTGAGCTTAGCACAAAGCTTGTGTGTGCATGTGGATGAGTGGAGGCTGC
TGAGGCAGCCCAGGCCATCAGGGCAGGGAAGGGCCATAGGCCACATCAGCAGGGACAAAAGCTCACTCAC
ACTAGCATAAACCCAGAAAGGGATGTGTCTGAAGGCTGCAGGTTTCCTAGAACTTGAAGGCTGAACACAC
AGCCTGGCATGTCACAGAAGCCAGGGCTGGGCACTTCCTAGCTGGGTGAGTCTCTCTCAGTTCACATAGC
AGGGAAAAGGACTACGTCACCCTGGCTACACATAGCCTCTGGGCTCAGGTCCCCAACAGAAGCTACTGGC
CTGCTGTGTTCTCTTCCCCAACTCCTGCTGGAGAGAATACATGGCCTCAGCAGAGCTGGAATCTGGGTGT
TGGTGGTCCAACCAGCAAGGATGGGGAGCAACATGGGTCTCCCAGGACAGGTGGGGGCAGTCCCACCCAA
GACAGAGAGTTGGGGCAGACTTCCTTAGGGAGGTGGCCACTGAGCTGGGTCTTGGGAGAGGAGAACAGGC
CTAGTAGCTAGACAGAGATGGACATGTTCTAGGCAGCAGAGGAGAGGCGGGGACACAGTAAGCCCCCAGC
CTCCAAACTCAGGCACCCCTGGATGAGGGCCAAGCTCCAGCACCTCTGCCTGGCTGGCTCAGTACCCCTC
CCTTCTGGAGGCGGGACCCAGCCGTTTCCAGCCCACTCCCCTGGGGCAGTATAGGATACCCAGCTTAGCC
ATCTCCCATGGCTGGCCTGGGCTGACATGTGCTCTCCCAACCTTCACCACGGAGCCATGGCAGCTGAGTA
TGTTTGCACACTCTGAGGCATACGGGGGCTGCCCTGGAGGGCCAGAACTGGTCACAAAAAAGCAGGGCCT
TCTCTGGAAGATTGTCTCTTATGCCTCTCCAAGGCCTTGGCACCTGATCCAGTGCTGGGCACACAGCCTG
GGCACGCTGCACAGCCCTGTAAGTCGGGTCAGTCCAGCCTCCCACACCTCAGCAAAGGACTGCCTGGTGG
CACCGTCTCTGCCACTGGGGCCTCCATCCGCCCAGGACAGGAGGTCTGAGCTCACACTGACTATTAGCAC
AGGGTGCCTGTGGGTGGGCCCAGAGCCCCTGGGGAGCTCCAACCCACATTGCAGGGCAATGGGGCAGCGG
GGAGCACAGGTGTCCCCAAGTTAGTTCCAACTGACTTGTCCCTTCCACCACACAATGACTTCCTTTGCCA
AGTTGCTGAGCTCTTGCAAACTCTTCCAACTCCAAATACCTGGCAGCTCCTGCAGCTAAAATAACAGCGT
GAAGTTGCTCAATTTGAGAATCCATTTCCTGTGCTTACAACAGATGCAGGGCTTGTTCAATGTATCATAG
GCCGTGGAAATATCGGAAAGAACTGACCAGGTCAAAGCAACACCAAACTGATGTCATTGAGTGGAGTTTG
CCTTTTTAAGAGACATAAAAATATAAACACCAGATTCCTTAATTTATAGAAATCTAAACCTAAATATGAT
TCCATATATCTGATACTTATGTACAGAGTATTTCTTTGTGGTAGCTAGTTCTGTTAAGAGAGGGGAGGGG
AAGGAAACAAAATAGGGAAACTGAGATGAGCAGAAAGGAAGGGAAGGAAGAGGGCACCTAGATAAGGGGC
TGGAAAGCTGCCAGGCTCTAGGAGAGTGCCGTGGAGGGGAGAGGGGAGGAGGAGGAGGAAGAGGGGACTG
GAAGAGCCGTGGACTCCCATAGAGGTCTGCAGGGGTGGCTAGTCCTTTATTTCAAGTCTTCCCAGTCATT
CAACACACCTTTGGCAAGAACCCTCTGGGTGAGGCACCACAACCAGGCACTAAGACGTGGCAGGAAATGA
AACAGGCTAGCCCCTTCACCACAGAGCCCACAGGCCAGCAAGGAGTTCGGACACTACACAAAAATGATCA
CATGATGAATTACAGCAGTGGAACGTTCCCTGAAGGACAGCCAGGGCTAGGAGAGAAGCTGCCAGGGAAC
TCAGCCTCAGCTGAGGGGTCCGGGTGGGCTGCTTTGCCACGGGGACATTACCATGAAGCCTTATCCAGGT
TTGGGGGAAGTGGTGGGGAGGGAGGAGAGGGTAGGAGGAACCTGAGGCATGAAGGGTTGTGGCCTTGGAG
GATCTGAGAGAGTGCTTGATACTGGCGAGGCAGGAAGAGACAGGCTTCTCCACGGGTCTCCAGCTTGAGG
GCTCTGCCGTGAGCCCAGGAGTAGCCAGGTGGACGTTTTCAAAGGAGCCCTGGGGCTGCTGTGTGGGGTG
CTGGGTGGTGCTCCACAATCAAAGGTGAATCTCAGGGGGATCTGGGCTTCACTGTGCAGAAAAGACTCAC
AGCCAGTTGTGAGATGGAACAGGACCAGGGGCCGTGAGCAGTGAGGAGCTGAGGTAGCTTCTGCCCACTG
AGCTGGTTCAGAAGTGAGGGGAGAGGAGGGTTTTCACCAAGAGGGGATAGCAACTCTATTGATCTTGGTC
ACTTTCCTTTGGAGGTTACCATGGGACAGATGTGGCATGCAGTGGCTGAAGGCAGTAGAGAAAGCATGTA
GACAAATAAAATAGCATGAAAGCACCAAGAGTCACACAATTTCAGTGTAACAGAAGGGGAAGCAATGGCA
TTGGAGTTAAGCAGTGCTCAGAGAGTGGGATGAGGGCCAGTCCTCAAAGAGTGGGGGTCGCAAAGAGGGG
AGAGTACTCAGAGGAAGGCGTGGAGGCCAGCAGCCTAGGTCCTCCAAGGTCTGAGAGGCCTCGTTATTAG
GAAGTCACTGGAGGGTGGGGGCAGAGGGAAGTCACTGCAGTGCCAGAGAGCTGACCGGCAGAGGGGAAAT
GGAGGCAGTGGGGGGATGTGTGGGAGTGTAGGGCAGGTGCGGAGTGGGCAGTATGTGACAGGGTTGGGAC
AGCTTTTGAGCTGGGACAGCCACGAAGAAGGTAGAGGGGCTGTCTAAGCAGCCTCCCCATCATGCTGGCC
CATGTGGTCTTCTCCCATTCCTGAGGTGGGAGTTGGCATGGAATGCAGATTCAATGAGAAGTCTATTAAG
GCCTTTGTCCTAGAGCCCAGGCACAGTGTTCTGCCTCCCCTACCAAGAGTCCAAGCTAGGGGAAAGTTCC
TAGGGACATGGATCAGACAGCCTCTCTCCTTCCTTTGCACTCAACTGTGAACGGGGCTGGGGAGGTTGCT
GGGGCTGGGAGCAGATGACCAGCTTCTGAGAGAATTAAGACCAGGCTCTAAGAGAAGCCACGGTCCCTCC
CTGTGGCCCTGGAAGCCAGGAGGGACCAGGCAGGTGGGTCCTCATGGGCTACAAAGACTGGAGAACTGAC
CACCTGTCCCTCAAAATCAATGACCAGGACAGACGAAGATGAAACTTCAGAGCAAGGGGAGAGATGGGGG
GTGGCAGTGTGGGGGTTGCAAAAGACCCTCCTGTGCACACACTGACTCTTCAGGACCCATTCCTGAAACA
TGGCTAAGATACACCTATGTGAGAAGCATGGGGTGGGGGAGGTGGGGATCAGGGAACTGCCCCACCCCAA
CCTCCTATGCACAGTCTCAGGGAGTGAAGCCATTCTCACTAGTTTTAAGGACAATGCGTTGACATGACAG
CATTGACACTTAGACAGATGCTACAGGGAGCAAGGTGCAAGCTAGACCTGAGACTTGGGGGAGATGGTGC
CCCTCCTGACCCATGACCCTCTCTGGACACAGGCAACCTTCATCTAATGTGAATCAATTGGGCAGGATGC
ACACATACAGCTTGGGATAAATTTTTCTAGAGGCCCCTTAGCTTTCATTTCTCTCAAAGAAAACCACCTG
AAGGGAGCAGGGAACCCTTCCAGCGGTGTGCTGCCGCTGGCTGATGCCATGCTCAGTGAAGTCATATTGG
TTGCTTGAAATGGACTGTGGTGAAAGTATTAACACCGTGGAAATAGACAAGCTCTATAAGTCAGGACGTT
TTTCTCCCAGGGAGACAGTTGTTAAACATTTACCAGCACATCAGCACGTGCTGGACCCATCTCTGCTGAC
CCTGACTTTCTCTCCTCAGTGAATGGGAAGGCCACGGTCACCATTGAGAGCTGCGCCCCGACGCTGTTCA
TGTTCATGCTCAATGGCAAGCAAGAGCATGGGCTGCTGAGCCTAAGGAAGAATGGGATGAAGTTGGAGGT
GTACCCTCCAACCATGGGCACTCACAAGCTGCAGATCTTTGCCAAGGGCAACTCCGACATCTACAGCTCA
GTGCTGGAGTACACGCTCAAGTGCAATTATGTGGACATGGGTGTCCAGCTGCCTGCTGAGCTTCACCAGC
CCGTGGGCCCCAGCTGGTTCTCGGAGCAGATGGGCATCATGAAGCCCTCCCACCCTGACCCTATCATCCA
CACCAGCGACGGGCGCTGCTCCATCAGCTTCAGCGTGGAGGAGGGCATTAATGTCCTGGCTTCCCTCCAC
GGGGATGATGGCCCCATCACTGAGGAGACACAGCGGCGCTACATCTTCCAGCTGCACCGGGAGAAGCAGA
CCGAGCTGAAAGTCCAGCTGCCCCATGCAGGCAAGTTTGCCCTCAAGATCTTTGTCAAGAAGAGGCAGGA
ACCAGGAAACTACATCTTCGTCTTTAATTACCTTGTATGCTGTGCCAACACCAAGGTGAACTGGCCCATG
TTCCCTGAGAGCTTTGGCAACTGGGGACAGGACAATGAGCTGCTGGAACCTCTGTCAGGTGTGCTTCCTG
CCAACCGGAATGTCCCATTCAAATTGAAGCTGCATGGTATTGCCAAAGTCCTGGTGAAGGGGCAGGACAC
ATGGCCCCTGACCCTGAACCACGAGGGCTACTGGGAGGGAAGCTGCAGCACAGCTGGCTGCCAGGAAGTC
TATGTCATGGTGCTGGAGAATGCCAACCACAATTTCTACTCCTACATCCTGAAATACAAAGTGAATGCCC
AGTGAGGGCTGTGCCCCGGTCTTACCCTCCCAAAGGGCCAAGGCCAGACCTCCCCAGGGAGGGCTCGAAG
GAAGTGCAGGGAGCCCTGGACACCACTGAGTCTGCATGAAATCCCTTCTAGGCCTCTGCCTCAGTGTCCC
ACCTCTGCCACAGGAGCTGTGATCTTTGTGTTCTGAAGGCTTCACTCAGGTGTGGCTGTGACTGAGGGGG
CAGAGGCAGTGGCTCTTTAGAAGGAAAAGGTGCTATGTAAATCTAAGGTATTGTAAACTGTACACCTGCA
TCCAGATGCCCCTTCTCGTATTAGTGCTGCTGCTGTTGTTGTTGCTGTAGGGTTGATGAGGGAAAGCAGG
GATATTGCCCAGGTTGACAGCTTTTCACATGATGCTTAGAGAATTCTCTTCCATGCCCAAGGGGACATGA
TTTGCAAGGCTGGGTTGTCCTTGAATCACAGAGCCCCTTTCAAGCAATATCACCGTGCCTCTCGACAGCT
CCGAGCCCCCAGGGAATCTTGGACTATCTTCTCCTCCCAGACCTGATCATCTTCTGCATCCTGCTGCCTC
TTCATTAGCTACTTCTTGTTCTTCAAGAGCCCAAGAAAAAGGGTGTGGTGAGGAAGCCAGCTGACCCACA
ACTGGCTGGAAGCTGATCGTCTCCAACATCCCTAAGTATAGTCAGGAATGTGACAACCAGAAAGTTGTGA
GGAGACTGCAAAGCAAAGAGCAGCCCATGCCCGCTGTGGCTGTGCAGGTGGGAGGGACACTGTCGGCAGA
GCTGCAGCCTTGGTCTGAGGGTGTAAGACCTCCAGCTCTGCTCTGAGAGGAGTACACAGGGCAGGTAGTT
CAGTCTAAGGCCTGGAGTGCCCTCCAGGCCCTCACAGAGCCTGGGCCTCAGGCCCCTGCCCCACCTCCAC
AGAGAGCCTCCAGAGGCTGGCCAGGCCCTTGGGGAGTCTTGTGGATAGCCCTGAATAAGGACCTGGGCGC
AGATCAGGTGAGTAGTGCAGTGCGGCAATGCCGAGGAGACTCACACTTTAACAGGGCTCTGCCTGCCCCC
AGTGTCTCTACCAGCAAAGCCAGGGCTGGGAAGAATTCCAGCTGCACGAGAGCAGCTTTTGTGCCTGTCT
CGGAGAAAACATCCTATCCCGTCTCCTTTCCTCCCTTCTCTGAGAAGACAGCCCCCTCCAGTCTCACCTT
GCATGGGGACAGCTCAGGGCTCCTTGCTTGCTCAGGCACAGACTGAGAGGCCTCAGCTGCCCAGCTGGCC
CTCAGCAGCGCCTCAGGCTGCCGTTGCCATGGCAACGGAGGAAAGGCTGACTTCAGCGAGGGCAGATAAG
AGGGAAAGGCGAGAGAGGCCCCACATGGCCACTGCAGAACCATCCTGGCACACAGACATGCTCCCTGCTG
AACTCCCGGCTTCTCCAGCTCCGTGGCCCCTGGCTGTCTCAGTGCCCCCCAACCCCTGAGAGCCAGCACT
GCCTGGCACCTCTCCCCACAGCCCCTCCACAGGCCTCCAGGCTCAACCACAGCCAGGGCCAGCTGGGACC
CTCATAGCTTCCTCCGTGGCACTCACCCTCACATCCCTGTATCCAACAAATGCTCACAGAAGTACCAGAT
GCTTGGGCTACAGAGGTGAACCAAGGGGGCCCGGCCCCTGCCATCCAGAGTACAGGGTGAGGAAACTGCC
AGGCAGCAGCAGCCTTCCCTGCCCAGGCCTGACTGAAGATCCAGGCTCCAGACACTTCTGTTCATTATCC
CCCGGGATCCCTCCCCTAAAAGTCCCCACTGCCACCCAGCACGGTGGCCTAGCCCAGAACCAGCTCACAA
GGGTGCCCATCATCCAACAGGCCGGCGGCCTCGAGCAAAAGGGGTGTCTCCCCTGGGGGGCTGAACTGTC
CTGGGCAGGTCCTGCGCCCTCCGCAGTCTCTGCCACCGAGGCCACCCAGCCAGCCTCGTGTCACTCACAC
CTGAAAAATGCACAAAGGCCCCGGAGGCATAACAGCTATGCACCACCACAGGGAAACAAAGGGAGTTTTA
CACCCTGAAAACAGCCGTCTTGCACACTTCTGATTTTATGGGCTTAAAGAAATGTGTTTGTTTCATCAAA
ACAATAAGTGCCTTCGATGACGCATGTCACTCACTGGACCCCGCGCTGGCTGCCTCGCTTAGTCCTGCTG
GAGACCCCCATACCTTTTCGATATGCAATATAATTAATCAATACATCCTGGAGCATTGCAGAGAATGCCA
CCCAGCAAAATAGGAGCTGTCCCCAGCACCAGAGAGGGAGGCCCCGCCCCTCAAAGCACCGCAGGGCATC
AGCAAGCCCCTCCCTCTCGTTTAACTAGGCACCCCCTTTGTAAAGACAGCTGTAGGCGCAGTCAGAAAAT
CACCTGCATTTCTTTCCACTGAAGTAAAAATACATGAAATGAAATCTAATCTTCATGAATTTTTACACGC
ATGCTGCTCAGGGTAGACATTCGGAGTTGCATTTTGAAGGCTTTTCTTTAAATCCCCATCTTTGTTTCCC
GGGCGACGAGTCCCAGTCGCCGGCGGAATGGCACGGGCGCCCCCAGGTGTCCGAAGTGCGGAGCTGCCGG
CGCTGCACACCGCGAGGCTGATCTATCACCGGGCTTTTTCGCAGAACTTGAAAATGCTGTGGAAATGTTT
ATGTTAAAATCACTAGGTGCTTTCTCGTGGCTTCTCAGCGCTACCTTATGTGTACACGGAGGACATCTTT
GTCACGCACAAGCTGTGAGGGCATCCTGGGGGACAACCTGGTGTGTTGAAAAGACAAGGGATGTGATGGG
ACTGTTTTGCCTGGAAATAACTTCTTGAAACAGAAGCACTTGACATAGGACTGGATGGAACAGCTGTGAC
TACACTCATTACTATACCATTGAAGGATTGGAACCGATCAAACTCAGAAAGTATCTGCTTGCAATTCTCA
GGATGGCAGCCCCCAGGCCACAGGGCAGAAGGGAACCGAGGGTGGAGGAGTGGTGGGCAGAGGCACTACA
ACCACAACTTCAGTACACTTCTTTCCAGCTTGTTTCAGAAGTGCCATAGCTCAGCTGGACTCCATTTTCA
ATCTGATTATGATCATTGTGAGTTCCCCATATGTTACATTGTCCTACCAGGACAGCCTCCTCACTGCCTG
CTAAGATTAAAAGTAAATAAATAGACTAACTGAAGCATGAAGGATTTCGGCTAGACATAAAGAACTATTT
CCTGTTGTTAAGCAGGAGGGACAAGTTGCCAAGAAAGTTTGTGAAATCCTCTTCTCAAAGGACTTGAAAA
GGAGAAAAGTTTTCCCAGTGGTCTGAGGTTTTAGATGCCATGTTCACTAGAAGGAGTGGGTTTTCTCCTC
TCCAAACCAATTAATTCCTGAGATATCCTGGTCTGCCTGCAGCAAACAGAGGGTTAACAGCATCACTACA
TCATTTGCTATTGGCAAAATTTTCGAAGATGGTGTGCCTCTATTGCCCGCCTCAGTTTATCTTAGGTCTA
TAATTTCTTTTCATTTGGAGTAAGTAGTCGGCAATTGAAAGAGGTGATTACTTCTCATAATGTGTGCATT
GAGTTGTGTGGGCCGGTGGCTGTTGAGTATGCTTTCTCCATGTTGTTGCTGGTGTTGTTTTTCAATAAAA
TTTATATTCATTTTTATCCAACAATGTAATTATCGATTCATTCTTATCATGTATCTCACAAGGTGGGAAA
TGGAGAGAAACAGGAAAAATGCTTTCATGTTCAAAGGAAGCCCTAGAAAAAAATCAATGTCCCAGCCAGT
TGAATGCGACGGTGAGATGCGAATGGAATGTCAGGCAAATAGCTATTTCACATTAAAGAAAACATAATCA
GGTTAGCTCCAGCCACTCTATGGTTCACATGCCTTTGAAGAACACGAAGGCACTGTTTCTTTCATTGAAT
CTTGTTTAACTTGAAAATTTTAAAGTCAATCCTAATTTATTTTTACAGTGGGAGAAAAAAAATTACCAAA
AATGCCTATCAGCCTACTTTTCTTTTGAATGTATATAAATATGTACTTCTTGATATTCATATACATGCAG
AAACTTTCCAGCCGGTCACCTAAGCAGATTATTCATAAACTAGACATTTAGAGAAATACAGAAAATGAAA
AATCCAGACATTTCTGAGAAGCTGCTGTAACCATGGAGACCATTCTCGTAGCTGTAGTGTGAAGGACAAA
AAGAACTTGTGTTCCCAAATCTGGCTTCGTCATGTCTCTCGCTGCTAGATCCACAAAAACGAGGCCCAGC
ATGCTTCTCCTTAGGAAGGAGACCCGGCAGCATATTAAGAGGAAGTCAGAAGAAACAGTCTTCCACACAA
AAGAAGGAGTAGCTCTTGAGTTATTAGAACAGTCTGAAAATGCCATCCCCAAAGCTGGAGTGGATGACCT
CCAATGTCCCTTCCAGTCCGGAGAGTTTGTGATGCCGTGTCTCTGTGAACAGATGCTGGCAGGCAGTGGG
CCTGGGGTTGTCAGTTACAGAACATCTGAAGGGCCCTGCTGTGGAACATCTGAAGGGCCCTGCTGTGTTA
AGAGCCTGCCCCTGGAGCCCCTGGCAGACTGCACTGCTGGCTCCTCTCTTGCCTGAGGGCAAGGGGCTGG
AGAAAGCCCAGCAGAGGGACCAAAGGGGAAGAACAGCCTCTGACAGGATGCTGGTTCTGTCTGATTTTGC
AAGCAGAACTAAAGGAAACTGAAAGTTAACGGGGATGTCCTCTTTGGGGTGTCCCACAGGCATCTCCGAG
TCAAAAGATGCTAAACTGGAGTTACTTCTCTCCCTCAAATTACTCCCAACTCCTCCTGGGTCCCCAGTTC
AGTAAATGCATCCCTATCCAACCAGATAACTAAGTTAGACTCATGGCAGTCACTGGTGATGAAACCCAGT
CCCTTCTGGATGTGTCTCACCTCCCACCTGCTCTCCCAACTCCACCTTCTCTCCTTTCCCACGACCTGCT
ACAAACCAGGTCCTCATGATCTCAGCTATACTGTTTGTGTCTTATACTTTCCATGGGGAGATGAAGCCTC
CCGGCCCTATTACTGTCCACAATGGCCTCCCATTCATATATTCTTATCACACTAGGACGATAGGGTTGTT
AAGACAAGGTTTCCAAGAAATCCTTTCAGAACAATCTCACCATCTCTGGAAAGACATAATTGGTATTAGG
CACTAGCGGGAAAGGCAGGTCTTCAACAAAAAACTGGTTTTTATAGGGAATCGGAAAGAAGCACTGTCTC
CTTTTTCTCTAAAGAGACAAGGTGCCAAGGCCACCCAGTCAGCCTCGTGTCACTCATGCCCGAAAAATGC
ACAAAGGCCCCAGAGGCATAATAGTTATGCACCACCACAGGGAAACGAGGGGTGTTTTACACCCTGAAAA
CAGCCTTTTTGCACACCTTTGATTTTACGGGCTGAAAGAAATGTATTGTGTTTCATCAAAATAATAAGCA
CCTTCGATGATGCATGTCACTCGCTGGACCCCACACTGGCTGCCTCGGCCTACTTCACTACTGGGTGAGG
GTATGCAGGGTGGCTCTTCGTACCACAGCCAGGCGGGGGACTCAATGGGGTGCAGAGGTGGAGCCCTACC
TGCAGGTAAACAAGCTCCATCTTGAAGCCAGACTCTCCACATCCATGGCTTCCAGCTTATTTCCCTCCTG
TCCTCCTGCACCAACAGCAGCACAGATCATATGTTCAGGTGGACCAGTTCTATTCCCAGGAGAACAGATG
CTGAGACACAGTAGGAATGTAAACAGTGTGCTGGAGGCAATACCTGTGGAAGTTAAAAGGGAGGGGGGAA
GCAGGATGAGTCAGAGAGAAGCTCAGACAATGGTGCAAGTCTGACCAAGTCCCAGCCAACCCAACAGGAA
GTTCCAAAACAAAGATTTGTATTAGAAGAGTCTGGAGCTGTACAGAAATGGCCAGGCCCTAGAGAAACCA
TCATGCTCAGCCACTTGCTGGGGCTGCCTGGCAAGAGCTTGGCCTCAGTTCAAAAGCTCAGGCAGACCTT
GAAGGTGCTAACACCTGGAGTCTCTCCGCGACCTGCACTCCTTGCAGAGAATCAGCAACTTCTTCCAGAA
GGGAGACCTGTGCAGCACACACAAGTTAACTTGCCTATGCTATGGAGGGTTCAGGAAAGACTGGGTGAGG
GTTCTGTGTGTGCAGTCAGCATACCCAAAGCCATCTGGGATCCAGCAATCACTGAAAAGTCTTCACAAGA
TGGTTTGTGGAAGGGACAGCGGCCTCTACATAGGAGAAATATGTACTCCAAGGGCCCACTTTCAAGGTGT
TGTGGACTAATTTGATGAAAGGCAGCTTCTTTCTTATTTCTCCTTCTCTCCCTCTTGCCCCTGCCATCCA
GGGAAGCCTCAACACAACAGCCAAGAGGATCGCTCCATGCTGCACTCTTACTTAAAACCGACCAATGGTT
CCCCATTGCTCAGGGATGAGACTAGACCCCCACTCTGGCCTCACACTGCTTTCTCCACTTTGTCTCCCAT
CACTCTCCCTGAGAGCCCCTTAGAATCATCAACCATGTGACACCAGGCAGTCCATGTACCTCCCACCAGC
GTGCTTTATACATGCTGTCCTTTCTAGCCAGGACGTCTTTTCCTGCCTGAGGAAGCCCTGCCTGGCCTTT
GTGGATCAGGCCAGCCCACCACTCTGTCAGACCTTCCTAGTCCTCCCACTGCCCAAGCCATGGGGAATTA
TCTGCCTATCTTCCATGTTCATGTCACACTTTGTTGCTCATCTGTTAACCCAGAACCTTCTACAAGATTC
TGGGATTCAGGAAGTACTTGGAGGTTCTGCCCCTAGGATGTGAATTCCTTGAATATATATGCTTTGGTTC
TGCTCCTCGGCACACAGTAGGTGTTTGGTAAACGCTTGGCAAGTGTTTCACTGGGAAAACTAAGACAGAC
TAGGAAGACAGGGCCAGGAAAGTACTACTGCCTAGCAGTCCATAACCATCCACTGAGCATTTGTCAAAGC
ATGTTCCCATTTCACCAGGTCTAGCCCTTGTGTTTTTGCCCAACTCTGTATGCCACATACTGGACATTGA
GGAGGGGAACCCAAGATTCTCTCAGAGGAGGGCCACATCCTGGGGAGGGCTGGGAATGTGGGGTGAAGTA
ACCACCCTGGAGGAGGCTGAGGATGCAGCTAACAGTGGTCTTCAAAGGAAGAGGCCCTTTACCAAGTCCA
GCATCTAAAAGAGGACACATACTGACTACTTGGAAGATAGAACAAGTCCTGAAAGTAGGACTTGGTCTTG
ACTAGAGAAGGATGGCCACCCTGCCTGTAAAGGTGGGTAGCAGAGGGTTGTCAGGCATTCTTTGGCTGTG
AACAGTTTTAATGGAATTTTCTTTCCTTTATCTAGATTTGTTCCCGCTCCAAATTTTCCCCATGGCCCTG
TTTGAAGATTATATAACCTAAGCTTGATGCTTCTATTTAACCCAGAGTGACATAAAAATTTAGCTGAGGG
CACCTGCTGATCCCATTCCCACCCACCCACCCAGAGACCAACAAACAAACCTTTCCACGGGAAAGCTTCT
AAAGCCCCAGAAGAACCTGTTTTCTCGGGAAAGAGCTGCAAAATGGCAAATATAGCTATTTAGGATCTAA
AGGCATTAACATCTTCTACAGCAAAGCCTGAGTATGTGGGGCTGTCTTGAAGACCGTTGATATATTGGAA
AGTAATGCTCCAGGGAACACTCAAACTCATGGTTTCTTTGAGCACAGTTGTCCTCAAGGCTGATCCTCTG
AAGAGGAGCCCCTGCAGGATGAAGTGTAAAAAAGACAAAGCACCACGAAGTGGTATCCAGTGGTATCCAG
TGTATCCAGTGGCAAAGCCAAGCCATGAAGGATTGAGAATGAGAAGGCCACCTAGACAGGGCCCACCAAG
AGATTCCCTCTCTCCAATTAAACCAGCACTCTAGATGTTTAGTCATCATTGCCAGGGGTACTGGGTTTAG
ACAGATTCTGAGGCCACAACTGGGTTCACTAGGAAAGAGTGTCATGACTAGCTAGTGATCCATAGACAAT
GGATTGAAGGGTGAGGTGTGCCATGTATTTGCCAATCCCAGCTTAAAGGTAGCTAAATCAGGGCTCAGAC
CAAAATAATGAAGGAGACTGTTTAGTCCGTTCTCACACTGCTAATAAAGACATACCCGAGACTGGGTAAT
TTATAAAGGAAAAAGATTTAATTGACTCACAGTTCAGCATGGCTGGGGAGGCCTCAGGAAACTTAACAAT
CATGTCAGAAGGGGAAGAAAACACATACTTCTTCTCATGGCGGCAGCAAGGAAAAGTGCTGAGCAAAAGG
GGGAAACACCCCTTATAAAATCATCAGATCTTGTGAGAACTCACTCACTATCACGAGAACAGCATGAGAG
TAACCACCCCCATGATTAAATTACCTCCCACTTGGTCCCTCCCATGACACGTGGAGATTATGGAAACTAC
AATTCAAGATGACATTTGGTTGGGGACACAGCCAAACCATATCAGAGGCTATTCAGACCAGTGGGGAGCA
CTGGCTTCCCATTAAGCTAGCCCATGGACTGACAACCAGTCAGCTTTCAAACCAAAGGTCCCAGGATGTG
CTGGGGGCCTCCTGACCTCACCTGAGCTCCAGGAGGATTCCACGCAACATGCATGCCACCCAGCTCAGAG
GACACAAATGCACACAGGCATATCAACTCTAGGGAGAAGGAGCCTAGGCTGAGTGTGTTTGCTCTTTTAT
CTCCATGATTAAACAGTGCCTTGCATTTAGAATAAGTGATCAGTAAATTTTTGAAGTGAACATTGCCTTG
TCATTTCAAAAACAAAATGATAGATCTCTGGGTTGTTTACATGGCTGTTGACCAAAACAGCTGTTGAGTT
ACAACATCCTAAATAGTCATTTCCTTCTTTTGCTCAACTAGGAAAGCATATGCACAGCAGTGTACTCCTT
TGCCCCTGTGGGAAATGTATATTTACAAGAGGAGAAAAATTGCCACCTGGCTGGGAGTGCTCATGGTGTT
TGCCTCTGGGAAACAATCAGTGCATGGGCAACCAATCAATGGGAGGAGTGCCGTTCTTCTCGGGGGAATC
CGCCCGCCCTGAGCATGTGCCGAGATTGCTTTGTTTCTATCAGGGGGAATGGCTGACTGCCTCTGTGACA
CAACGAATCAGCCATCATTTCGCCCTGGCTGTGCAGGGACCAAGGCAGTGACGTCCCCCTTTATGGTGGC
AGGGGCAGCTATGGAGAGGCTGGTGGCATGAGGGCAGAGGGGCAGCCACAACTGTGAGTACACAAGAACA
GCTGGGCTGAATGACTGACGAAGTGCAGATATTAGGAGTGGGGAGCCCCTGGCAGCTCCCATCTGGGTAA
AGGATGGTGGTGAGGAAAAATGAGGAAGCGTTTATTTAGAACAAAATGACGGTGGGATTACAGATTTCCT
AGTGAACACTTTGCTCATATTTATATTTGTATTTGAATGTATGTGAACACCAAGGAGATCTGGAAATTAA
CATCCACCATTTTATTCTATTTAAAAAGTTAAATGAAGCCAAGATACTGGCAGCACTTGAAGGCTGTCCC
CTCCTCCTATGCCCTTTGGGATAGCCCCACCCTAGGGACTGGGCAAGTGTGGGTACCATGAACCTTTTGG
CATTCATTTCATGAGTATCAGATCCCCTTCTCCATCTCCCAGGAGCAACACAGTGGAGAGAACACGTTAA
CCTGATTGTGGGAGGGCATCCACTCTGGCAGTGAAAGCTTCACTTGACATTTTTAAAGCTCAACAAGAGT
GTTAAAGTCTATCTTTAAAAGAAGTGAATGGGCTTCCTCTGGAAAGATGGCCTCTTAGCCACTGGTCCCC
TGTTAGACTGAAATCTGTCTTGTGTGGTCAGGAGCCATTAATGTGTGATTGAAGCCTCGAGTTTTCCTCT
ATACACATTGATTTCACTTGGAGAAGCCCTGTGGACCCCTCCTCCTCCTCAGCGTTGGCAGTCATGAGCC
TGGGGAAGCCTGTGGCTCAGCCCCTGTTTGACAGCAGGTAGGAGAGTGTGCCAGCTAAGAGCACACACCT
GGAGCTGACCGCCTGATTCCTAACCCCAGTTCTGCCAGCTCCCAGCTGATTTGTGCAAGTTACTGAACCT
CCCTGTTTTTGTTTCCTCATCAGTAAAACAGGGATACTCATAGCACCTACTGTGTACACTTCTTATGGGG
ATTAAATGAGCTAACATATGGTACAATGACTAGAAAAGTCCCGGGCACATAGTAAGTACTCAGTAATTAT
TGGCTACCATCACGATGCATCAGTCATCATCAGCATAATGAGGATGACACTGATGTATTGTTCCCTAAGG
AATCCAAAAGTCTCAAGCCCCTCATAAAATTGTGGCAATCACTGATTTCAATGCAGAAATCCCATATCCA
AGACGCAATCACCCAGTCTTTCCTAGAATCCTTCCAGGGACCAGGAGCTCTCCACTCCATGAGGCAGCTG
TCCATTACTGGACACCTATGTTAAGGCCTTACCTATACAAAACTGCCTTAAATTAGGGCAGCTGAGCCAA
TCCACCCACTGGGCTCAGTGAGTTGTCTATTATATGATGGGACAACCATGTAGTGGGAGCCCGGAATCAC
CAGTACAAAGCCTGGCTCTAGTCTGAGGGTTCCGGGGACTAGGTAGGAGCAACTGCAATATACTCAGACA
CGGAAGGGAGCCAAAAGAGCAGATGAAAAGAAAAAGAAAACCTTCCACTCGAGAGAGCTGTAAATCAACA
TACGAAACCACATGAAGAAAATTAATAGTTAAAAAAATTAATGAATTGTTTTCAAAAATACAATCTGCAT
ACTGAATGGTGAGACCACCTCAAACCCTGATGTTATTTAACTCCCCAAACCTGGCTGGCTGACTTTTGTC
CTCAAAGCAAAAACTGGAGGGTATCACTGAGAAAACAGATCAACCTAAGAAAAAAGGCCTACAGGTACCA
TCTGTAACCACCACCCCAGTGAAAAGACCAGCACCCCATTTGCCCATCTTTGGGAAGCCAGTCAGTCAGT
TCCTCCATACACACACACACACACACACACACACACACACACACACACACACACCAGTTTGCAGATGGCA
TTTGTGGTTGTTTGAAAAAATGTCCATGAATTCTTTGGTGCTCCTACATTCAAAAGGAAGAGCCTAATTC
CCATCCTTTTATGTGCAGGCCATACTTAGTGACTCTCTTCTGACAAATAGAATGTCGCAGAAATGATGGT
GTGTGACACTCAAAACTAGGATATAAAAGGCATTATAGCCTCCTCCTTATTCTCTCCAGATCACTTGCTC
TCAGCAAAGCCAGCTGCTAGTTGTAAAGATGCTCGAGCAGCCTCTGGAGAGGCCCACATTTTGAGGAACT
GAGTGAGTCCTCCTGC

[0138] An exemplary Cep63 human DNA sequence is provided below.

gi|224589815: 134191182-134307246 Homo sapiens chromosome 3,
GRCh37.p13 Primary Assembly
(SEQ ID NO: 303)
GGTCCCAGCTCTGTAGTTGTGTTTCTCACACCTGCAGCACTCAAGAGGCTCGATTCTGCAACAGCTGCAT
TGCTGTGACCAGGGTGACAGAGTGCAAGTTCATATAGTAGTTGGCTAAGAGCCAGATGAAATTTAGGCAG
GGACATGCCCTGAGATTGGGTGATAACCTCACCTCAAGTTCTGTACCTCTCCTTCCTCCCATGGTCAGTG
AGGCTAGTTTTCAGGAGGCAAAAAAGACAGAGGGTTCAGTTGAGCTGAGGAACCGATTTCAGCAACTGCC
TAGGAGATCATTCGAGGACCTGAACCCCTGTCAGGACTCTGGCAAGCCCGGGGGTCTGACCCAGCATTCT
CCCTGTCGCTCCTCCTGGCCCTGGTTGCTTTTCTGTCACCCCAAAGGCCAACACCCACAGTCCCTTGAAT
TCTCACTTCTAAGGTGAGGGCATTTGCTGGGTTTAGTCACTGTCCAGCATGGAACCCTGATGGATACCAT
AGATTCAAGGATCAGCTACCCAATTTATGGGGCCAAGTACCAAATGAAAATGTGGGTTCCTTGTTAAAAA
ATTATTAACACTTTCAAGACAGCAAAAGCGGAGCATTATACCAAATGCAGGCCCTTTTGAGTGCAGGCCC
AGGGCAACTGCCTTGCTTGCACGCCTGAGCAGCTAGCTGGTCCAGGCTGGTTCCGGTGCAGAGGCCAGCA
CCATCCATCATCTGGGCCAGGAAGGCCACAAGGTATGAAGTCCCTTTAGGAGACCACCCAGCTGCCTTTT
CAGGCCTGCCACTACCCAGTCTTTCCTCGAGAGCTCACTGATGGCGTATGGCACAGTGAGAGTGAGAAAC
TGGTGAACAAATATAACTGTGGGTAAAGCGGGGCCAAATCAAGAAAGGAAGCTTTGAAAAACAGTCTTTT
CATGGAATTAACCTAAATGCCCACCAATGGCAGACTGAATAAAGAAAATGTGGTACATATACACCATGGA
ATGCTATGTAGCCATTAAAAAGGAGATCAGGTCCTTTGCAGGAATGTGGATGGAGCTGAAGGCCATTATC
CTTAGCAAACTAACGAAGAAACAGAAAGCCAACACTGCATGTTTTCATAAGTGGGGGCTAAATAATGAGA
ACCAATAGGCACAAACTGGGGAAAAGCAGACACTGCGGCCTACTTGAGGGAGGAGGGTGAAGGAGGGAGG
GGATCAGGAGAAATAACTACTGGGTACTAGGCTTAGTACCTGAGTGATGAAATGATCTGTATACCAAACT
CCTGTGACAACAGTGTCCCTGTATTAACAAATCTGTACATGAATAAGAGTTTTTGTTTTGTTTTTTTTTT
TTTTAAAAAGAAAAACAGTCTTTCTAGAGCCTAATGGATTATTCCTGGATGATGCCTAAATTATCCAAAC
GATTTCATGCAAAGATCTGGGAAACAGCTTAATGAAAGAGCCCCAGGCCTGACTATAAGTTGGGGACACA
GGTGGGCAAAATTCCTGGTTCCAGACCTCTTTTTCTTTAACCAAAAGTTCTGAACTGCCCTCAACTTTTG
GGTGCCCTCACTTTGCCCCCGACAAAGCATGAGTGGGGAGCCCACTAGGTGAGCTGCTCAGTCCAAGCCT
GGCTGGCCAGAATCCCAGGAAGGCTGTGCTTTCCTCACATAACCGCTAGCTAGCACTTTGGGCAGCCCAG
GTATGCAGAATCACTTTCAAGCGAAAGATCACACGTATTGAGAATCTTCAGCGTTCAGAGCTAACAATCA
GCCAGTGATTCAAACTTTCTAAAAGGAATTGAGCGCCCCCTGCTGGGTATTGTAGCATTGACATTAAACT
ATCCTCTCAAATGCATCAAAATCTGAAACTACAGAGATTTAATCTCGTATAAAATCCAGTGACAACAGGA
CTCATGGTGACAACATTATATATGAGTTTGATAAAAGGTTGAATCTTTAAATGTTTCATGACTCCCATGC
TCCTATTAAAAATGCTTCTAGTTCTTTATCTCAATTTTAGAAACAAGGTACACACTTTAAAGTTCTAAGT
ATTCTGGTAGGATTTTCTTCCCATGTCACAGAAAGTTTTACAGGAAAGGTAACATGGTCCTGGGAGAGGA
CATGGGTTTTGGGATCAGACAACCTAGGCTGGAATCCATTTACTATTTGAATGACTTGGAATAAGTCTTT
TTTTTTTTTTTTTGACGGAGTCTCACTCTGTCGTCCAGGCTGGAGTGCAGTGGCACCGTGTCAGCTCACT
ACAACCTCTGTTTCCTGGGTTCACATAATTCTCCTGCCTCAGCCTCCCAAATAGCTGGGATTACAGGCGC
CCACCACCATGCCCGGCTAGTTTTTTGTTTGTTTGTTTTTGTTTTTAATATATTCTTAGTAGAGACGGGG
TTTCATCATGTTGGCAAGGCTGGTCTCAAACTCCTGACCTCAGGTGATCTGCCCGCCTCAGCCGCCCAAA
ATGCTGGGATTACAGGCGTGAGCCACCGTGTCCAGCCTGGAATAAGTCTTTCAATGTTAACTTGGAACAA
ATCATTTAAGTCACCATCTCCTGATCAATAAGGACAATGCTATCCACCTAAAAGGTGAATGTCAGGGCTG
GAACTCATGTGTTTAAAGTGCATAGAAGTGCTTGATTAACCATCGTGTCATCGTTACGATACTATTACGA
TGTGAGTCTAAGTTGGGTTTCAAAGGATGAGCAGCCCCTGGACTCAGACCTTGTTTCCAGAGACTAGGGG
CTGTAACTTTAGTCCTGTGTCTAGCTCAGAGATCTAACCCCTGGGTCATGAGGGCAGTGCTCACACTGGG
CAAGTCTGGACAATTCCACCTCGAACAAATATTTCAAGTCCTTCTACTTTTACCTCTATCTTGCCAATCC
AAACTACCATCATTTCTCACTTGAGCCAAAGCAAAGCTCTTCTAATTTTTCTTTCCACTTCTATTCTTAT
CTCCAAAGTGATATATACATATATATATATATTTAAATCCAATCTGATCAGGCCACTCTCTCTAGTTAGA
ACCTTTCAATGACTTAGAAAAACTTTTTTTAGCCAGACACCTGCCTACCCACCTTGCTTATAATGCCAGT
CCTACCTCCTGGCTTTATGCAGTTAGCTCTCTCTGTAAGCAATCCTCATCTCCCAATTCTTTCCCTTATT
ACTACTACTCATCCTTTGGGTGTTGGGTCACAAGCTCAAGGAGGGTACAAGAGATAGCACATTTCTTTTT
TTCAAAGCAAATTAAGTCCATTTGGCCTCACTCTGCTGCACTGCAAGCAGAAATTAATTCTGTGGTCCCT
GGGGTGTCCTTTCCCCTTCTTAGGGTCTTGCAAGCATTTAGGACACTCATGAATGACCTGGAAAAATGGG
TAAAGACCTCTACTCTTCAGTCTATCTGGGTCGTTGCTATTATCTTCACTGCCAAGTCTGAGGGGGCCCT
TGTAGGAGGGGGTTCCAAGCTTGGAGGTCTTTGCCTTTTCTGGAAGACTCAGTGTTGAGGTGCAGGTTTC
CTCTGGAGCACCCAACAAACCATGAAACTCTGAAGTTCACCATCTCACTGTGGTACTGAGTGGAACACAG
CTTTCCACTACTCCTAAGAGGTTCCTGTCTGCAGACCCTCTTCTCTCCCACCCTCCCCTGCTTCCCAAAC
AAGGACTAGGGTTATTATTAAGCATGTCCGCTTCCTGATGTGCACGGGAAGCACACAGGACCTGGTTACT
TCCTTGGAGATTGGAAAAAAATTCAGAGAAAAAATTAGTATTTCAAATTATGTGCTATAAAAGCTGCTAA
TCACAAGGTCTCCCTTGGATTATTCAATATAAATCAGATCCCCTCCAGTCACATTCTCCTATACTGCAGC
AGTACTGTTGGTACCCATTCCCCCAGCTACTGTGTATTGGCTGTCAAAGGCTCACAGCTGTGAGAAGAGA
TTTTAGTTATTCAGTGTTTCCAGAGTTTCAACAAGGGATACGGACACAAGCAGCCGAGGCTGCTTCTTAC
AGAGTGTCCTCTGGAGAGGCGTGTCACCTGGCAATGCCTGGGAGGTTATGCTGTCACTGGGGGATTGTGG
GAGGGGCCAAGCCAATGACTGACCAATTCATACTCAGTACAAAGGCCTAACCCCTTGCCTCAAGGTGAGA
AAACTCTTGGCATCGTCATGGGCCAGAAATCCCACTGGATCAGACTGAAGCTAGACTTCAGCTCAAACCA
CATCTTGGCTCAGCTTCTTTCCCTGCCCTATCCTGTTTACCTTACAGGACTCTTCTGAAAGCACCTCAAT
AAATCACTTGCACAAGAAATCTCTGCCTCAGGCTTGGCTTCTGGGAACCCAACCTAAGTCACATCTTTTA
TTTTTCCTTCCTAGCATACGCCCCAAATTGAAATCATGTATTTGTATGGCTAATGGTTTAATGCCTGTCT
CCCCAACTAAAGGCTCCATGAAGGGAGAGGCCACACTTACTTTGTTCATTGCTATACTCCCAGTGCCAGG
CATGGTGCCTCCCACAGAGAAAAGCAATATGCAGGCTCTAAACTGGAAAGCTGTCAGGAACCAATAGGCC
ACATAGCCTCTTGGCCTCCCTCTCCAGATACTTTCCTTTTTGGGTGTTTTGGTACAGACAATTGAAGAAA
GCTACCCTGTAACAGCAACTTAGCATTTCTTGTGCCCATCATCCTCAAGCCAGTCCTAGACGGAGATTTC
GAAGCCCTGGTTGACAAAATCTGACTAGCCCAAATTAGGTCACCTAATTCCTGATACAATGAGCTACAGT
TCTGGCACCATAACACAAGTTACGAACTTGCCCAGAGGCTATTCCTGGGGGTGGCGGCAGTTCTCGGATG
AGTGTCATAGACACAAACCAACAGCTGTCTTACAGATATCATATTCTGGTTCAGCAGAAATCAAGAATAG
CTTTCATATTTTACTGGTCTACTAATATTCCAGGGAAAGGCTAGGCAGGATTCACATGAACATTTGTCAA
GTTCTTAGATGTTAGTGTCTCAGAGATTACATACCACAAGTAAGCTGTAAAATCCTCATTTAACAAGAAT
GTGAAAGAACTGTGGCGTTCTAGGTATTTTAATTTTTTGAAAAGCTTTTTCTCTTGTATAAGTTTTTTTA
ATATTGTAAGTCTCTTTTCTATTAGGTTGTCTTTCTTTGCTTACTGAAGGGACTGGTGCCTTGGGGTCTT
TATTCTGAAGATAAAAGATTTCTAGGCAGAACTACTGATGCAAAGAGAAGAAATCAGCCTGGATGTATCT
GGATTATAGGATAGCTGCTAAAATCATGTTTGTGATTGAAAACCTAAAATAAGCTAATTTGTTTTTTCAT
GTACCTCTTCCTCCTAAAAGCTAAGTAAACAAAAAGACCCAGCATAAAAAGGATGAGAAGAGATTTTAGT
TATTCAGTGTTTTCAGAGTTTCAACAAGGGATACAGATACAAGCAGCTTCTTACAGAGTTTACAATCTGG
GGAGAGAACATGAAAGACACTGTTTAACAGGCAAATAATTCCAGGAATAAATATACATGAATGTGTTTTT
CAAAATACAGGTTCTTATACAAATGTATAACTAAATACTGATTCCATAGTGGGGTGGTTGTAACTGAAAG
GGCTTTGAGAAAAGGCTTTGAATAAAACTAGTCATCCACCTAGCCAAAGATCCTTTCCAGCAGCACAAAA
GGAATTTGTAAGGAGAACAGAGATTAACTGTCAGATATCTTTCTAATCTGTAAATTTATCCAAAGTTTGA
AAATACCATGAAGAATCTTAGGAATGCCAGTAACCAGGGAATGGGATATTTGCATATCACAACATCTACA
GGCTAAATACACTCCGAATGCTTCTCAATGTGGGGAAGTATGAGAAGTTAATAATTCTCCTAGTGTCTGG
CTTCCTTTTTCTTTGCCTTTCCCTCTCATACGTTCAATCACCTGTGTTACAGGACACACATAAGTAGTTG
GAAGGTGTTAAACTTTGACAGCAAAGCAAAATCAGAGGTAGAGGCAAATGTTTAACCAATCATGTTCAAA
TATAAGCTACTCAATGAAGAGTTTTAGGTTTAAAGAGCGAAATATTCACCATTACTGAGAAATCTCAGTT
TCTCATTCAATTTCGCATTGCACTTTGCTACCACAAACTAAATGGGTGTACATTTTTGAGTGCTGATTTA
TTACTCAAAGGTTTGAATTTGGAGACTGAAACAAACCATGCTTTATCTGTGTACTTTGAGAAAATCCATC
CACAAGAAAGGAGCCAAGCGTCAGTTTCCAATGGGGGGAACATTCTCATGGAGGTACTGTAAGGCTAAGT
CTGTCCACTTCATTTCTTGTTCTTTGACAGATTCTGTGGTGCCACCATTGTCTTGTTCAGGTTCAGGAAG
CTCATTCTGAAAAGGTACAATAGAAATTCAGAACAGTAATATATTCTGCATCTTCTTGGAACTCAAGAAC
ACTTAGAATTAAAGCTTGTGAGTTCCTAGGAACAGGCAACATAATTGATATGTGTATTCTAAAAAAGCTA
AAATCATACACGTGAGGAAACTATCAGAAGTATCATTCAAACATGGCCCGGGCCTTCTTCAGTAGGGAAT
GATGGGCATTTTGACTCTGACATTTGTGAAGGAGGCACTGTGGCAGAAAGGTTAAGGGCAGAGGCTTTTG
GAAGCCAACTAGGATCCAAGACCACAACTCTCCCATTTGCTGGGTTACTTGGGCAAGGTATGCAAACCCT
TGGGGCCTTTGTTTCTTCCTTGGCAAATGGGAGAACAAAAGAGCCATCACCTCACAGGACTACTGTAAGG
ATTAGGTGAGGTAATTCAGATCAAGTGCTGAGCACTCTGTGGGGTATCCAGTGCTCAAGGAATATTTGCT
ATTATTATTAGCGGCTAGGAACACTGAGATGAGTGAATCCTAAATCTTCTTTAGCGGGAGCGTGCTTTAA
AAGAATACTAGTTTGCTGGCATATTCCTTAGACACAAGAAATGTATCCAAAAAATTATCTTGGACCCAAC
ATGTCTTTTTTTTTTGAGATGGAGTTTTGCTTTTGTTGCCCAGGTTAGAGAGCAATGGCGTGATCTCGGC
TCACCACAACCTCTGCCTCCCGGGTTCAAGCGATTCTCCCGCCTCAGCCTCCCGAGTAGCTGGGATTACA
GGCATGCACCACCATGCCCGGCTAATTTTGTATTTTTTTATTTTTTTTTAGTAGAGATGGGGTTTCTCTA
TGTTGGTCAGGCTGGTCTCGAACTCCCAACCTCAGGTGATCCACCCGCCTCAGCCTCCCAAAGTGCTGGG
ATTACAGGCGCGAGCCACCGCGCCTGGCCCAACATGTCTATATTATAATAAAAATGGAGGTAGGGCAGGA
AACACTGAAAATGTAATTAATAGATAAGACCTCCCTCTAGTGGTGGAGCAGAGCAACAAAAAACACAACA
AATGACCAATTCACACCCTACCAGCAATTTTCTTAAAATGGTAAGTCATGGGCCACACTTACTGTAGGAT
CTGGGATCATTTACTTGTATTTTAAGTTTAAATGTATTACTACTGAAACTCTGCTTTGTACCAGAGTTCA
CAGATACCAATATATTTCTTTTCAATTATCTGTGTTTTGTTTTATGGTTAGCAAACTGTTATGCGATATC
CAGACTTAAAATTTTCCACTGGATTCTAATTTGTAGTATGTGAATATGTTTTCCCCTCTAAAATTATGCT
CAATATATATTAAATGATATTTACTTATCTATATTTGAATCACATACATCTTGTTCTACAAGACAGATTC
AAACATACTTGAACAGATTGAGAAGAGCTATCATTTATTGTAACGCAATAATATATTATCTTAAACTTAA
AAAGAAAGTTCAGTCCTAATAATTACTTATAGATGACAAAGAATAAATAGGTCCTTGGTTAATGAATTCT
TTAATTCAGAAGCAGACAACGTTGCTTAATTTCATCCTATCTGTGGTATGCTTTCTAAAATAATGTGTCT
TTCATTTGGTATCTACTGTCCCTTGCAATACATGCCAACACATAAAATGGCATATATGCCTGGAAAACAA
AAACAAAAGTATCATAAACCCAGCCACCCATTATGGTGTACTGTAAAATGCCCTTAGTTCTTTGCAGCTA
CTCTTATCAAAAGGTGAAACTGATTTCCCCAATCTTGGATTTGGACTGGCCCTGTGAGTTGTTTTGGCCA
ACAGAATGAAGCTGTCATGCCAGTGGGCCAGTTCTTGGCCTAAGCTCCAAGAAGCTCTGCCGTTTCCTCT
CAGGTTGCTCTTGGAACCCTGAGATTGAGAAGTCTGGGCTAGCCTGCTGGATACCAGAGACCATGGCATA
GTCACCCCATCACCCAGCAGACAGCTTGTTAACTGCCAGACATGTGAGACAGTCCTAGATTACCCAGCCT
CCAGAGTCTGTTGGCTGACTGCACAACACAGGCAAGCCTGGCAGGGATCAGCTGAGCTGGTGCAGACTAG
AAGTCCCTCCCAGCTGAGCTACAAAATCATGAAATAAACAGTTGCTCTTTTAAGTCACTAAGCTTTGGGG
TGACTTGTTATGCAGCAAAACCTAACTGGCATACACATTGCCTTAGAATCGCAAGACAAGCGAAAGGTGT
GGATTAGCAGCAGGGCCAAGCCAACTTCGCCTGGAAGTCAGCAGGGAAACCTCCTTCCACCCCTGCCACC
CAAATGTTCTCCAATCTGAGCCATAAACTTCTCCAGAAATGGACGTCTCCTTTATTTTCTTGACTTTGTT
TAGGCCCTCCTCCCTTGCCTAGACCACAACAGCTTGCCAATTGGTCTCACTTGCCCCTATCTCCATGTCA
CACCATCTCTAACAATGCTGGCTAAACTGATTTTCCAAAAGCCAAATCTGAGCATAGCAGTCTTGCTTTT
AAGACCATTCATTCCTGGATCTCCTGAGGATGAGGTCTAAGTGTGATATCAAATACCACTCTCAATCTGA
TCCAAGCCCAACTTTTCAGCCTACTTATGTGACAAATGTATTCTTCATCCACAGTGAATGACTCACCATG
TCCCAAAGCCTTTCAAAACTCTGGGCCTTTACACATCTGTCCCCTCTGCTGCAATACCCTTGTCTACCTC
CACTAAACTTCTGGTCCTTCCTTATGACCCAGCTTAAACATGACATTCTCTCAGAAGCCTTTCTGATGCC
CACCAGGCAATCAGCCACTTCGTATATGATGTGGCTGTTTATGCCCCCACCTAGAATATTTATTATCACA
ATTACTTATCTATAAGTGTTGCCTTTCTAGACCCCTCAGGAGGAGGAACTGTATCTTATGTTCACATAGT
CTTATGGCACACAGTAGGCTTCAAAAAATGCTTGTCAAATGAATGAATGAACAGAAGTTCACAAGACAGG
ATTTGGAACTTCACAGACCTAGGTATATGTTATATGAAGCCCTACTTACCTGCTACCAGACTTTGGGCAA
GTTGCCCTTTCTGATCCTATTCTTTTCCTATAAAATGGGAATAACAGCACCTCCCTCACAGGGTTGTTTA
AGAATTAGAGATAATGTATATTTCCAACCTCAGTCCATGGCATAAAACTGGTATTCAATAAATGACATCT
ATAATTCTTATTATGCTCTCTCTTTTGACTATTTTCCTAAGCTTGAACTAAGCTATGACTTATTTGATAT
GTATATTATTCATTGAACATATTACTATCTCTTATTCGTAAATGAAAATACAGATGAACTATTTTATTTC
TTTGCAAACAGCAACAGCAGATATTCTAACTATAAATTATATTTTATTCAATACTAACTACTCTTCTCAG
GGCAGCTGGCATGCTTTAAAGAAAAACAGTCCTGTTTTCCCTTTTTTAGGCCTCTATGACATAAATAGGA
TTTTAAACAAACATTTATATAAGCAAAACTTTTGGATCACTTATTACATGAGGTTTAACAAACTCCCTGC
AGCAGAGTTTTCCAAAGATGGGGAAGAAAAGAGTATTCCAGAAGGCCACTGGCCTAAACGCAAAAGAATA
CCCAGGTATCTTCTGAATATTTTCCAGGGAACCTAAGATAGGTGTATGCTCCAAGAATGTAAGTTTCTAA
AAATGCTGAAAGACTGATGAGCCACAGGCAGGGAAGTAAGAAACAGAGCTCATATGCTGCTGCTTCTTGT
TCTTCCCCATCTTGCGCATTAAACTCTCATTATTTGGTTTCTCTGGTTTTCGTGTGGTGGACAGAACATG
GCTCAGAAAATCGGGGCTCTAGTCCTGGCATGACTCCTAACTGACCTGGCCATGTTAGCTCCCTGAACCA
CATTTTTCTTCAAATAAAACATACAACTGGATGCTCTCCAGAAGCTTCTAGAGTTAGAGAATTCCACAGC
TTTGATTTCTTTGCCACACTAGTTTATCTTCCATTGATATCCCTCCTCCACTAGTTACTGCCAGATCAAT
ACCTTTAACCCATCCTCAGCTCAAATCATAACCTACCAGTGGTATTGCGACATCCTCATAAGGCAGCTTG
TCTTCTCGCCAAGCATCATCAATCAAATCCAAGATCCTTCCATCTCTCTGAACCTCACTGTCCATTTTCC
TGCAGCTTTGATCTTGTCAAATCTGTAAGCCAAAGAGGTTATTTCTTAAACACGAAGACTGAAGAGATGG
TATAATCCACTATTAGGATTCTCCAGGCTTTTTAGTCTGGGGCCACCTTTTGGGAAAAGGTTCATTTTCT
CATATGGGCCGGGTGACTACTTTGATCACAGTTCCTCTCTCCAACCCCAACTGATACATATTTTATAGTG
TATACTGGACAGGCATAGCCCAGCTGACAGACCAGTGTCATAGAGTGTGACAGGAGAGCAACACGTTAAA
CGAGGCCCTCAAATATTAATATGTTGCATCTCAATGTAGCTCTTCTCTTCTAACTTGAACATTCACCTTT
TCCTGTTTGTGATGCCTTTGATGAGTCCCTGATTCATAATGGCCAGCTAAGTTTCCTTTCTAGCCCCTGG
CTCAAACCTCAGCATTCTTAGGCACAGGAGTCACACGAACATACTGTAAAGGAAACGGCTTCCTTCCCTA
AAATAGTACCCAGGCTGAGATCTGAATAAAGCACTTCTAGGTGAACACCAGTGGTAGAACCTCATACTGC
TAAAGTTTCTCCAGTTTCTGCTTCCCTTTGGGGTAGCTCCTTCCTCGGAGGTTCCTTCCTCTAATTCTTA
ACGCTACACTCCCTTCAATTTCTGGCCCAAATGGTCACGATGCTTATTTAGCTCCTTGACCATGGCTGAT
TCCCCATTTTTCTCTGAAACTGCTATAATCTAATCCAAAAGGCTGGCTAGCTTGTAGGATACTTCTGGAT
TTCCCTGTTTCCAAGGTTGGGCCCTGACTCATCATAGGCATCATCCTATGGGTGCTCCCTGCTACCAAGT
GACAATCCAAAAAGCCCGGAAGCCACTGGCATCAAAGGTACTCTCAGTTTCTGAGACTATGGAGACTCAC
ACAATAAGCAATTTTGGGGTGGTGGAGCGGGGTGGAACCCACCATCTGGAGGTGCTTTTTTCAGAGCTCA
GCCTGGGTGATATTTTAAGGAAGGAAGCCATTTCCTTTACAAGCTCAACTTCAGACATCGTCTTGCCTTG
AGGATTTGTGTCAGGTCTGTAGTTGGTCCCTTCGCATAGTCCAGTTTAGTGTTATCTCAGTATGTTCATG
AGCTCCTGTGCCTAAGAACGCTGAGGTTTGGGCCAAGGCAGGTGGAAGTTTTTGTAAAAATGGCTCACAG
GGCCGGGCGCGGTGGCTCGCGCCTGTAATCCAGCACTTTGGGAGACCGAGGTGGGCGGATCACGAGGTCA
GGAGATCAACACCATCCTGGCTAACAGGGTGAAACCTCGTCTCTACTAAAAATACAAAAAATTAGCCGAG
CATGGTGGCAGGCGCCTGTAGTCCCAGCTACTCGGGAGGCTGAGGCAGGAGAATGGCGTGAACCTGGGAG
GCGGAGCTTGCAGTGAGCCGAGATAGCGCCACGCGCCACTGCACTCCAGCCTGGGCGACAGAGCAAGATT
CCGTCTCGGAAAAAAAAAAACAAAAAAAACCAAAAAGGCTCACAGCTGTCCCCCATAGGATAACTGCAAG
ATATCCCTAACACCTTGGCAAAAATTATACACAGATTGGTGTGGGAAAGGGTTTACACCCCCATGACAAG
GATCTCGGCAAAAGTTAAGCAAAATGCGCCCTGCTACTTCTGTCACCGGTGAGCCAGGTGAGGGCTTAAT
TAATCCAGTACTCAATAATTAACCGAGTACTACCCAGTGGATAACTCAAAGCAAGACGAAGTTTTGGTTA
TACTTTTGAAGTCCCTGTCTTACAAGTGCTCCCCACTTTCCTGCTGCTACTCCTTTGTCCTTGCTGCTCT
GTCTCCTGGGATACCCTTCTCACTTTCCTCAGCTGATCCAAACCTGACTTTCGGAGGCCCACGTAGATTT
TCCACCTTTGTAAAGTTTTCTCAAATCACTCGAGCTTCAGTAGGCCTTCTATCCTTGAACTCTTGCTTCT
TGTCCTAACTTAATCTACTAAACAAGCTAGGTCAGCTTTGTGGTCAATTGCTCAGGTATTATTGCCTCCA
ACTGTTACGTGTACATTTTGTACCCATGATTCCTTAGTAGATCTTTCCACATTTGGTCTCAATCTTTTTC
ACCTGTCCCTTCTCCAAACACCTCCAACCCTGTCACATTTTCCAGCCTTGACAGTTAAAACCCCCTTTTC
CACATCACTAATGCCACTCTTCCTTTCAAGATAAACGCAGGCGTCAGCTCTTGAAGGTCAACATCCCATT
TCCGGGATTAGGCGCGAAGGTGCCTTCCCTCATAAGGGGCTGGAAGGATGGGAAGCATCAAGATAATCAA
TGCCCAGGGCACACTGATTATCTTGTGTATTAAAGCCACCGTCCCAAGTACTCGTCACCCAGTACGACCA
CTGTTTCCTGAACAAACTTTTCTTACTCACGTGACAGTCCCGATGCCTGCAATGCTCTTTGTTTCTTCCT
TTTTATTCCAGTGAACCCACAGTCAGTCTAAAAATCTTAGGTCCCAGGTCGCTTCCTATAGGAGGCCGCC
TCCAAACCCCAGGCTGAGTGCGGTCCCGGTACCCACCCCTCCAGGGGTCTCACAGTTCCCTAAGCACAGA
GCATGGCACCAACTGGGGAGTCTGTCAAACAGCCCAGATGAATGTCTTTCCAAACACGCGGTGCCTGCGT
TTCCAGGGACAGGGACACGTCTTATCAATTTCTATATATTACAGCTTTGTAAACATAATATTTATAAAAT
CAAAGCGGGAAAGCCTTGTTCCTTGCTAGAAATGAGCCTCGCAGGCCACCACCATCCGCACCGTACGACA
GGCCGTCCCTCAGCTGCGGCTTCCTGCCTCAGGCAGGATGTACCAAACGTGGAAGCGGAGACGGGGAGGT
CTGGGGGTGCCACGCAAGTCCCTTTCCTCCCGACACGAGTGCAGTAAAGAAAAACGGTTATGAGCGTAAA
GTGACAGCCTCGGCCGATGGGAATAGGGGGAAGTCCGACACTGAGCAACGAACGCATTCCCGCGCCTCCA
AAACCTAGGCCGGGGGCGCTGGAAACCCTTACCGGCACCCGGCCACCGCGGCAGACGCTTGCTCCTGCCA
CGCCCCCCCCCCCTCCCCCGCATCACGTGTCTGCACTCGCTTTCCTCGGATTCCCGGATGTGGGTGAGTT
CATTTGCTCGCGTGCAGGGGAAGTCTGGAGAAGGCATTGTTTCAATTATTAAAAGTGTGGGGGCAGTGGG
CGGAACAAACGCGCCGACTACAGAGGCTGGACGTAAGCTTAGCGGTGGCGCGCGTGCGCAGCGCCGGCCC
GAGGTAACGGCGGGAAGGCTCAGGGGCGTGCTTGCGGCAACCCTGTAACCGCCGGTGCGCAAGTTGGAGG
GGCAAGGGGCTGCCGTGTCCTGGTCTGGAGGCGGCCCAGGCTGCCTTGGTGATTCTGGCTTCGCGGCCTC
ATGGCTTGCGGCCGGTTTGCGCAACGGCCTGCGAACCACCAGGCGCGTCCCCGCCGGCTTGGGTCCGCCC
CGAAGCCCAGTCCCTCGGCCTGGCCCGCTATGCCCTGCACACTGGCGGAGTCTGGCGTGGCGCAGCCCGG
CGTGGGGTTCGGCCCCGCCAGGTGGTCAGCCCTTCCTCGGAGTCCAGGTGGCTGGGGGCGCTTCGGAGAG
TGGCCAGGTGGGCGAGCGAGCTGCGCCCAGTACTCACCTTCCCCGGCGGACCCACCTTCCTTTTCAGCGG
AGAGACCCCAGTGCGGCCTCCCTGCCAGGGCTGCTGTCTAGCTAGCGCTGTTGGGACTACTTCATTCACG
GCACAAGGGGACCCGCTCATTTAGTGTGGCATGTTAAGGTTGGCAGCTTTTAAAATAGTGAGTTGGTTTA
AACGGTTATGTTAGTACAAGAGGTACGGAAATGTGGCATAAATCGTGGACTGAAATTGGAGAACCCTGAA
CTAACGGCTCCATGCACACAAATGAGGGATAGAAAGAAATAAGGACGGTTTCTTAGGAACACTTTAATCA
TGGAGATACTTGAAGACAGTACATTTAGGCTTATAATGTGGTTTTTCTTACGTCCCTTACGACATCAGGA
GAGTAAAGATGAGTATGATGTCAGAGACAGGTCGTCTTTTACAGTTTCAGCACCGTACGCTGATATGCAC
AGAGTAGTTTTCCCTGAGCCTTATGTCTGGTTAAACTTATTAAAAGAATTTATTATTTTAATAAAGCAGT
ATTGTAGGGTAGATGCCCTGTATTTATACAGTTCCTCAAGTGCTTGCATTTATTTTTTAGATACGAGGAA
ATCATAAGGATCGTTGATTAGATTTCTGTTAGCTGTAGCTTAATGATAAAGTGTATATATTTTCTTATTT
GGCATGCAGTACCATTTTTAGATTGATTTTTATTTTGAGTTTGCTTTTTGACTGTGGCATTATCAGTGAT
CAGGGTAGTAAAAAGCTCTGAAACTAAATTAGAGTAGAGATTTATAAACAGGCACACTGCCTTTTAAAAT
GTATGTAGATGCAAATCTAAAAGTTGTTTGTAAAAATTGTGTATGTTGATTGTACTGATGCCATTTCCTC
TCGTTAAAATGGTGGAAGACCTTTGCTTAGTCCTTTCTGTTCTAATTTATGTTGTGCTGGCAGATGGTGA
CAGCATCAGTAGTCCACTCTGTCATTGCTTCCTGCTTTCAAAAAATGTCAACTTGACTTGAAATTCAGCT
AAAGCCAACATTGACAGAAGGTTTCAGGAACTGAATCTCCGATCTTTATGTTATTTTAGTCCGCCTCCCC
GCCCCCATCAGGAGCTAGGTTTTTCAGTTTTACAGAGCCACAGTACTGTCATTACACATACACAAATTAA
TAAAAATTCTCTAATGTCAATATCCAGTCAGATAACGATTTCTTCAACTGTCTCTTAAATGTCTTTTTAC
AATTAGCTTGTTTGAACCAAAATCCCACAGGGATCTGCCTATTGTGTTTGGGTGATGCACATTTGACATC
TTTTAATCTATATTTGTTCCCTCATAGTTATAGCTATGGGATTAGCCCCTATTTTTCCTTACAGTTCTAA
ATTTAGCAGATTGCATCGCACAGTATCCTTTAACATGTATCTCTGTTGCCTTTGTGTCCTCTAAACCAGG
GGCCCCCAAACCCGGGGCCGCAGAGCAGTACCAGTCCGTGGCCTGTTAGGAACCAGGCTACAGAGCAGGA
GGTGAGTGACAGGCTAGTGAGCATTACCTACCACCTGAGCTCTGCCTCCTGTCAGATCAGCCGTGAGGTT
AGATTCTCCTAGGGGCACGAACCCTATTGTAAACTGCGCATGCAAGGAATCTAGGTTGCACACTTATAAG
AATCTGACTAATGCCTGATGATCTGAGGTGGAATAGTTTCATCCTGAAACCATGCCCCTAACCCTGTCCA
TGTGTATTATTCATATTACTGAAGAAGTGGTTGGCCGGGCGCGGTGACTCACGCCTGTAATCCCAGCACT
TTGGGAGGCCGAGGTGGGCATGAGGTCAGGAGTTTGAGACCAGTGTGGCCAACATAGTGAAACCCCGTCT
CTACTGAAAATGCAATAAAATTAGCCGAGTGTGGTGGTGTGCGCCTGTAATCCCAGCTACTCGGGAGGCT
GAGGCAGGAGAATCACGTGAATCCGGGAGGCGGAGGTTGCAGTGAGCCGAGATCACACCATTGCTCTCCA
GACCAGGCAAGAGTGCAAGACTCGGTCTCAAAAAACAAAAAAAAGTGGTTTGGCCATTCCTCCCCCAAAA
CATTTCATATGAATTTTAACAAAAAGATATTTACAAAATGTGTTATTTCCGCCCTGTCGGTGTTGAGAAA
TTGTCTTCCATGAAACAGGTCCCTGGTGCCAAAAAGGTTGGGGACCACTGCTCTAAACCAGTAGTTAGAT
GTAGAATTGCACTGTCCGGTATTGTAGCCACCAGCCAGCAGTGGCTAGTTAATTAAAGTGAAATAAAATT
AAAAATTCAGTTCCTAGGCTGGGCGCGGTGGCTCACGCCTGTAATCCCAGCACTTTGGGAGGCTGAGGTG
GGTGGATCACGAGGTCAGGAGTTCGAGACCAGCCTGACCAACATGGTGAAACCCCGTCTCTACTAAAAAT
GAAAAATTAGCCGGGCGTGGTGGCATGCGCCTGTAATCTCAGCTACTAAGGAAGCTGAGGCAGGAGAAGG
AGAATCGCTTGAACCCGGGAGGTGGAGGTTGCAGTGAGCCGAGATCACGCCACTGCACTCCAGCCTGGGT
GACGGAGCGAGACTGTCTCAAAAAAAAAAAAAAAAAAAAAATTCAGTTCCTAACTTGCATTAGCCACATT
TCAAGTGCTCGGTAGCTACAGATTGCCTGGTGGCTGCTTTTTGAACAGTGCAGTTATAAAATATTTTCAT
AATTGCAGAAAGTTGTATTGAACAGCACTGCTCTAGAAGCCTGATGAGATTTCACCCTTATATTTGTTTT
TGTTTTGTTTTTTGGTGGGATAGTTGGGGGGGTTGGACAGATAATTTCATAGGTAATGCAGTATACTTCC
TATTTCATTAATTATCAGGGAAGCAGTGTCTGAGTTGTTTTCTTTTTTTATGATGTTAACATTAAACATT
ATATTGGGTTTAGGTGTAGTTAGCTCCATCCACCCATAGTGAAATTCCCCAAGACTCTTTCACTTAGTGG
TGAAGTCCTTTTGTGGGGTTATATTGCCTGTATCCGTTATTGCATTAGAGGTTGCAACGTGGTGATTATC
TAATTCTATTATTTCTTCAATATTTATCAACTGAGAGTCTTTTATGAAGAACTTTCCCTTTCCAGCTGTT
TGACTACCCTGAAATACAATTTGTACAGGAAAGGCAAGAAAAATGCTTAATTCTTTGCCTCTATTTTCAG
ACCACAGTAATGAGTTGGTGGCCTAGCAGCCTCCAAAGGTAACCATGAGGGTTTTTGCCTTTTTGTAAAC
CTATAATCATGAACTTATAGACTTTATATTTAAACTGTTTCAACATATGGCAGTTGTGTTTTTAATACTC
AAATTGTTTCATCTTTGGCCAGTGGGAGCTCCTTAAAGTTGGCTCCTATTCCATTTGATATGACCAATAG
CTTTGGTAATTTCCTTGCTTTCTGGTAAATAATTTTCCTGGCTCATTTATAGATTTCTGGTCTTCAAGGA
GCCGTGGTTCTTTTGAGTCTGAGATAGTATTTGGAGACCACAGTCTTACCTAGGTGGGAGAGGTGTTCTT
GCTACTAGGTTAGTCGTTAGTTCTAGGATTTATGGTGGCCAGAGTTAGGAAATATTATATATTAAAAAAA
ACACAAATATGCAAAATTCGCATTGTTTCCAACATTTAACATTTAAATTTCCAAAATTTAAACTTAATTT
TACAGTTTTTTCACACGTTGGATTTATGTTTGTATCTTTTTTGCTGAGTCTTGGTGCCTAGTGCCATTAA
TAGAATTAGTTTTTTTTCCTCATCCTATGTTATATATAATGGTTTCAAGTTAACAGGCTATTTTATTATC
AATATGATTCCTGAATAGTGCTTAGGATTTCTTTGCAACTGTCTTTTATCCTTATTTTATATGTCTCTAG
GAAAGTGTATAGTAAAATTATTGTATTTAAAGGCATATGAAGTAATTTATTGTATAGTTAGCCTATCAAG
TTGATATCTAGTTGGTAGTTGATTTATTTTATTTTGTTTCCAATTTTTCAGTACTGCTTTTTTCCCCATT
TTGATTTGTTTTATTATATGCAAAACCTTAGCATAATTCCCATAAAACAAGTACCCATAAAACAATTTAG
CTTTCATCTCTGTTTCTTCCACTCTGCTTATTTTCCTTCCTTACTGATACTGTTTTTACTAGTTTTGAGT
CTATCCTTCCATTAAAAAAACACATACCTAAAAGCAAATCTACATGGACAAACATACCTTTCTTTCTTAG
GTAAAATGTGCTATTATGTATACTGTTTTCCATCTTGGGTTTTTCACCTAGTGATATATGTCCTGTAGAT
CCCCTCCTTAGGAGTATGTAGAGATTGTTATTCCTTTTTACAGTTTCGTAGTACTCCATTGGTGGATGAA
TATTTAATTCGTCCCCTCTTGATAGACACTTGTGTTATTTTCTGCTATTACAAATAGTCATGCAGTGAAT
ATCCCTGTGGATATGTTGTTTTGCATTTTTGCCAATGAGCCTGTGGGATAGATTCTTAAAAGTAGCGTTG
TTGGATAAAAGGGTAAATGCATATATCAGTTGTTAGGTATTACCAAAGTCTCCTCTATAGCAGTTGTGTT
CATTTTGCATTCCTACCTATTATGTATATGAGTGCCTGTTGTCCCACAGCCTTGTCATCAGAGTGTATTA
TCAAACATTTAATTTTTGGTTAATCTGGTACAGAAGAAAGGGTAACTTACTGTAGTTTTAATTTGTATTT
CTCTTATGAGCAAGGTTGAACATCTTTTCATATTTTTACTGTCATTTGTATTTTTCTGTGCATTGCTTGT
TTATACCTCTCGCCCATGTTTCTATAGATTTTTTGCCTAATCTTTTATAAGCTCCTTATATATTTGGGTA
ATTAACCGTTTGTGGTAAAACTTTCAGGTACTGTTGTCATTTGTCAGTTAACTTTGCTTATGGCACTTTT
TCATATAAAAGTTTGTTTTTATGTACTCCTATTTCTCAGACTTTCTCATTGTTCTTCCTGGATTTTGAAC
TATAGTTTGGACAATTTTTTAAAAACTTTAATATTTTGAAAAGTTTCTCTAATACCTTATTTACTGGTAT
CAGTTTAATTAGGAGCCTTTCTGGAAAATGCTTAGTAATACTGATTGTTCATCGGAACAGCCATAGTTTA
CTGGCCATGGTATATCTGACACAATCATAGAGCTTTGTAATGAAAACGACACCAAGGCAGGTACAGGGAC
AGAGAGCATTGTTATCCTCCTTTAGACTTGAAGGTTAGGCATATCCCTTCTCTTAGTATGTACACATTTA
TTCATAATTCTGTCTGGAGTTTTTATTTTCTTCCTGTGTCCCATTTTGTGAATAATTTGGTCTTGGGCAT
ATACTATGATATTTTTCCTGATCTGTAAAATGATAAAGTTAAATTAGAGGCCTGAAGTGCTTTCTAGCTC
ATAAAGTCTATGTTAATGAATTTCAAAGATTTGCCTATTATAAGACATTCTATTTGTATTCTTTTTTTTT
TTTTTTTTTTTTGAGACGGAGTTTTGCTCTGTCGCCCAGGCTGGAGTGCAGTGGCGCGATCTTGACTCAC
TGCAAGCTCCGCCTCCCGGGTTCACGCCATTCTCCTGCCTCAGCCTCCCGTGTAGCTGGGACTACAGGCG
CGCGCCACCATGCCCGGCTAATTTTTGTATTTTTAGTAGAGACGGGGTTTCACCGTGTTAGCCAGGATGG
TCTAATTTTATGTAATTATATGGCACATGCAAAGAAGAAATCAAAGTGACATAGTGCATAGAGTTGAATG
ATGGTCAGGTTGGTTAGGAAAAGAATCAGTGATATAACTATGAGCAACTCAGATGACAAACATCCACAGA
AAATCAGCCCTTACTATTTGCCTGATCCTGAGAATTGATGGTGTTTGGCACCAGGCAGATGGTGAAGGTA
TTACAGAAACACTTTGCACATTAGTAAGTTTACTTTATTTCTCACATAGGATATTACTGGTCCACTTCCC
TCCTTTTTTTTTTTTTTTTTAAACAGGAATCTCTATCTTAGACCATTTTGATTTCTAAAATAGCAATATT
TCTTATGTGACTATTTCATTATTGTGCTGCTGCCACCTGGTGGCCACAGTAGTGATGTCATACTTCAGTT
TAATTTCTTTTTTTATTGCAAAGACACTATTAAGCCAAAAGATAGGCTGATATATTTTAAGATATAGAAT
ACTGTAAAATATATAAAGGTTGCACATCGATTGTGACTCAATTGATTGCCACAATGTCTAGGTTGAATCC
AGGACTATAATTTTTAGTTTATCATAGTCAAGTTATTTAACTCTCTAAGCCTGTTTTCTCAAAGTAATAG
TATCTGTCTTTTATGAGTATAGTGAAGATTGATTTAGACAATGTGTACAAGGCAGCTGTTGAACATTCAG
TAACTTAACTTCTAAGTATATTATTAAATAGTCATAGAAAATATATTAATGTATATTACTAAATATATTA
ATGTTTAAGAATAACATGACCTAAATAAGTATAATTTTACTAATGATAATTTTGAATAACTGTGATAGCA
CTGTCAATAAGAATAGCACTTTCCTACATGTTAGTTAAGTATCCGTGTATGGTTGTCAGGAGCATGCTAC
TTACAGTGGACATTTAATTGGCTGTTAGAACCCATGAAAAAGCTGGAAGAAACCTTAGAGAATATTGTTC
ATGCCCCTCATTTTGCAGATGTTAAAACAAGTCCGAGAATATAAAGCTAGTTAGTTGCAGAGTAGGACTG
TATCCTGGGTCTCCATCTAGTGTGGTGTGGACCGTGTACTGCCTCCCAGTTCTCCTAGAGTGGACCAAAA
CATGGAATCTTGGTTGCATTGTAGTTGGACTGTATTGTGATTTGAAAGTGGAGTAAAACATGGGAACCTT
TTTCTTTAGGTTTTTATTTTTGCAATTTTGGTGTAATATGTAGGATAAACCAACTAGAAAAAAAATCCTC
CCTGTCACGTTTGTGCACAAATAATTTAATACTCAGTTTGTTAGTATCTTTAAAAATAGATGCAAATAAG
GTGCAGTGGTTCTATTTTCCAGTCTTCTCATTCTCCTCTGTGTCTCTGGAACACCCTGGGCATGTCTCTC
ACTATATTTATCACACTGGGAAAGCCTTTTTGGCTCATTTTTTTCTGTCCCATACTAGACTATTAATACC
TTGAAAGGGGCCATATCTTTCATCACTATATATCTAGTTGTTAGTACAACATTGAATTACGTGTTGAGTA
AAATAATCTACTTCTTACAGCAGTATAATTTTTAGATGAGGATTAGCCCAGGGGCAGAACCTCTACACCA
CAGTCTGGTTATTGTCTTAAGGGTTTAAGGAAAAAGCATTTTGGAATGAAAAGTGGTTTGACATTGAACA
TTTTGAAGATTTATTATAAAAGGCGAGAAGCATACACATATTAATCAACACTACTGAGTTTAAGGGTCCT
CTTTCCTTTCTCACTGTCACCTTTCTTCATGGTGTATCTTACCCTTTATTTTATATTTATTTATTTATTT
ATTTATTTATTTATTTATTTATTTGAGATGGAATCTCTGTCTGCCACCCAGGCTGTAGTGCAATGGTGTG
ATCTCGGATCACTGCAACCTCCGCCTCCCGACTTCAAGCGATTTTCCTACCTCAGCCTCCCCATGGCTGG
AACTACAGGTGCATGCCACCATGCCCAGCTAATTTTTTTTTTTTTTGGTAGAGGCGGAGTTTTACCATGT
TGGCCAGGCTGGTCTCAAACTCCTGACCTCAGGTGATCCGCCTCCCTCGGCCTCCCAAGTTCTAGGATTA
CAGGCGTGAGCCACCGCACCCAACTGTATCTTGCTGTTTATATGGCAGTCTTCTATCTCCCGTTCCCTCT
TTCTCTGCTAGACCCTTCATGTAGTTCCCCAGCTGTGACCAGTTTGCATGGGGGAGAGGGTAGGTAAAAG
AGGGAGGGGAGTTAAGTTCAGCCAAAATAATCTGCCACGTGCCATGTTGAAATGCTGCGTTGAGCTCTGC
AGCTGCAGAGATGAATAAAATTGGGTTTCTGCCCTGGAGGGATGAATAGTCTAGTAAGGAAAAATAGTAT
GTAAAAAACTCACTTCCAGTGTGGTGCAACTCCTATGAAAGAACGTATTAAGCACTGGGAGCAAATGAAG
TGCAGAGGTGGGAGGGCCCTGTGGCTGCCTTTCGGTGGAGAGAGGATGTTGCATGCAGGAAGCTCTATGA
GCCTGTCTTCAGGAGTGAGTAGGCTTTCCCATGATAGACCAAAGAGTTTAATCTCAGTACACTTCGCATT
TTTTATACTATCTCTTTAATTTTTAAAAAGCTATACTTTCCCTCTGACATGTGTGAACCCATTTCTTTCT
CATTTTGTTAAGGGAGTTTGTGTATCCGTCTGCTAGAGAGATCCCACCTCCACCCCTGCTCACCCGACAT
TAGGAATTAGGCAAAGAACAATGAGATATTTGATATTTACACGGAGAGAGTGTCAACCGCAATTCAGATA
TTTTTAAGTTATTCTGTTTTAGTCCGAAATAGTTTGTTCCTAGTATTCCTGAAGTGATGTTCTTTGACTG
CTTCTACAGTCATCTTAAGAAGTGCTGCATTTTTTCATTATTATGTATGCTTTCATTCACATTCTTAAGT
TGTAAGTTAGAATGTTAGAACTGAAGAAATGAATTGTCTCATGACTGATATTTTTTTCTTTGTCAGTTGC
CAAAACAAAGGGGATTTGGTGATGGAGGCTTTGTTAGAAGGAATACAAAATCGAGGGCATGGTGGGTAAG
TTTGCTTTTTTTAAAATTAATTTTTTTGGTTAATACATGATTACATATTTATAGGGTTCACATGATACTT
TGATACATACATATAATGTGTAATGATCAAATAAGGGTATTTAGTATACCTATCAGCTCAAGCATTTATC
ATTTTTTGTGTTGGGAACATTTCAATTCTTCTAGCTACTTTGAAATATATAGTAAATTTTTAAAGTTTAA
GGAACCTTACTGTGCTAGTCACCCGACTGTGCTAATTACTTAACTAGTTACATACTAGTTACTTAGTAGT
CACCTTACTGTGCTATTTAACACTAGAGCTTACTCTTCTACCTAACTGTATGGTTTGTACCCATTAACCA
AACATTCTTCACCCCCAACCCCTTCCCAGCCTCTGGTAACCATCGTTCTACTCTCTACCTCCATGAGGTG
AACTTTTTTAGACCCCACATATGAATGAGAACATGAGATATTTGTCTTTCTGTGCCTATTATTTCACTTA
ACGACCACCAGTTTTATCCATGTTGCTGCAAATAACAGGGCTTCATTCTTTTTTATGGCTGAATAGTATT
CCATGATGGATATATTTCTGACATTTTCTTTATCCATTAATCTGCTGTTGGACACTCAAGTCAATTCCAT
ATCTTGGTTATTGTGAATAATGCTGCAATAAACATGGGGGTACAAGTATCCCTTTCACATACTGATTTCC
TTTCCTTTGGATAGATTACCCAATAGTGTGCTTTCTGAATCATATGTGTTGTGAGTGGTGCAAAGTCAGA
CATAACCAGGTCCATACATGTTTGTGTCTTTTCTACAAGAGCAAACTTTTATTGATGCTATTTCAGTCAT
AAAAGCCACAAGCTACATGGAGTTCCCAAGGAGGCATTTCCCCCTAGTACTACCAGTTCACTCAATAGTC
AGAGCCATGGGCATACAGGCTCAAGCCTCTCCACAAGTCAGTCAGTATTGCAAACCATACATAATAGTGT
ATTAATATATGTAAATGTTGCAGTGTAAACATTCCACATCAAACAAAGTAACATTTAACAGGAGAAAAGG
ATAGAAAAAAAAGGGGGGGGGGGCTAAAGAACTAGTCCAAAGAGAACAACTGGACAAAGAGAATATTCTG
GCCTGATCTGGACGGTTGTCAACATTCTTGCAAGGAGGAGCCTTTGGTGACAGATGCCAGGTGCTGATCA
CAAGTGACAGCCAGACAGGCTGTTATCAAGACAGCTGTTTTGAGCTGGTAAAGTCTTGCTCTTTTTGTGG
CCACAGAATCTTCTGGTGATAACTGATAGTGAAATATTGTGCCTGTTTATGTCATTATCTGATTGAGTGC
AGTCTTTATTGATAAGGTGAACATCGGGTCCCTGTGGGCATGATGTCTTTTGAAATGTGAGATGCAATCT
CTTTCTAAAATGGAGTTACTTATGTTAAGGGTGCTATATACAATATGGTAGTTCTATTTTTAGTTTTTTA
GAAAACTCCATTTAGTTTTCCATAATGGCTGTACTAATTTTACATTCTCACCAACAGCATATGAGAGTTC
CCTTTTGTCCACATCCCCCCCAGCATTTGTTATATTTTGTCTTTTTGATAATCATTCTAACTGGGGTGAG
ATGAATCATTGTGGTTTTCACTTGCATTTTCCTGGTGATTTAGTGGTGTCGACCATTTTTTCATACACCT
TTTGGCCATTTGTATGTCTTCTTTAGAGAAATGTCTATTCAAATCCTTTGCCCACATTTTAATAGGGTTT
TTTGTTTTTTTGCTGTTGAGTTGTTTTTCTTGTATATTCTGGATGTTTAGTCCCTTGTTGAATGAATAGT
TTGCAAATATTTTCTCCCATTCTACAAGTTGTCTTTGACTCTATTGTTTCCTTTGCCGTGCAAAAACTTT
TTAGTTTAACTAGGTCCCAATTGTCGGTTTTTGTTTTGGTTGCCTGTGCTTTTGAAGTCTTAACCATAAA
ATCTTTGCCTTGACCAGTGTACTGAAGCATTTCCTCTATATTTTCTTTTTGTTTTTTTAGAGACGGGTGT
CTCATTCTGTTGTGCAGGCTGGAGTACAGCAGCACAGTCGTAGCTCACTGTAGCCTCAAACTCCTGGGTT
CAAGTGATCCGCCTGCTTCAGTGTCCCAAGTATCTGGGACCATAGGCATGTCATCTGGCTAATTTAAGAA
GGTTTTTTTTTTAAGAGATGAGATCTCATTGTGTTGCTCAAGCAGTTCTTGAACTCCTGGCCTCAAGTGA
TCCTCCTGCCTCAGCCTCCTGAGTAGTTGGGATCACAGGCATCAGCCACTGTACCCAATCCCTATGTTTT
CTTCTAGTAGTTTTATAGTTTTGGGTCTTACATTTAAGTCTTTAGTCCATTTTGAGTTGATTTTTTTTTT
AATATGGTGAGAGATAGGGGTCTAGTTTCATTTTTCTGCATGTGAATATCAATTTTTTCCAGCACCATTT
ATTGAATAGGGCGTCCTTTTCCCATTGTATGTTATTGGCACCTTTGTTGAAAATCAGTGGGCTGTAAATA
CAATTTCTGGGTTGTCTATTCTGTTCCGTTGGTGTATGTTTCTGCTTTTATACTAATACCATGCTATTTT
GGTTATTATAGCTTGGTAGTATATTTTGAAGTCAGGTAGTGTGATACCTCCAGTTTTGTTCCTTTTGATC
AAGATTCCTTTGGCTATTCAGGGCCTTTTATGGTTCGGTGTGAATTTTAGTATTATTTTTTCTATTTCTG
TGAAGCATGTCATAGGTATTTTGATAGAGATTGCATTGAATCTGTGGATAGATTTGGATATAATCATTTG
AATATATTAATTCTTCTGACCCATGGGCATGAATGTCTTTTCATTTGTATCTTCAATTTCCTTCATTAGT
GTTTCATAGTTTTCTTTGTAGAGGTCTTTTATGTCCTTGGTTAAATTTAATCCTAGGTATTTTTTTTTTC
TGGTAGCTATTGTAAATGGGATTGCTTTTTTGATTTCTCTTTCAGCTAGTTCATTATTGGTGTATAGAAA
CATTACTGATTTTTGTATGTTGATTTTGTATTCTGCAACTTTACTGAATTTCTTTATCAGTTCTAAGACT
TTTTTGGTGGAGTCTTTAGGTTTTTCTGTATGTCAGATTATGTTGTACACAAAGAGCAACAATTTGACTT
CCTCCTTTCCAATTTGGATGCCTCTATTTCTTTTTCTTGCCTGATTGCTCTGACTAGGACTTTCAGTTAT
GTGTTGAATGGGAGTGGTGGAAGTGGGCATCCTTGTTGTGTTCAGGTTCTTAGAGGAAGGGCTTTCAGCT
TTTCCCCATCCAGTATAATGATACCTGGGGAGCTGTCTTATATGGCCTTTATTATGTTGAGGTATGTTCC
TTCTATGCTTGAGAGTTTTTATCATGGAGAGATGTTGAATTTTATCAAGTGCTTTTTCTGTATCTGTTGA
GATGATCATATGGTTTTTGTCTTTCATTCTGTTGATGTGATGTATCACTTTTATTGATTTGTATATGTTG
CATACCTGGGATAAATCCCACTTGATCATGCTGTATTATCTTTCTGTTCTGTTGTTGGATTTGGTTGGCT
AGTATTTTGTTGAAGATTTTTGCATCTGTGTTCATCAGGGATATTGGCATGTAGTTGTCTTCTTTTGTTG
TGTCCTTGTCTGCTTTTGTCATCAGAGTAAAGGTGGCCTTGTAGAATGAGTTAGGAAAATTTTTCTCGCC
TTCAATTTTTTTGGAATACTTTGAGAAGAATTGATGTTCTTCTTTATGAAGTTGGTAGAATTCAGCAGTA
ATGCCATCAGGTCCTGGGCTTTTCTCTCTTGGGAGACTTTTTATTCCTGGTTCAGTCATGTTACTCATTA
TTGGTCTTTTCAGGTTTTCTAATTCTTCCGAGTTCAATCTTGGTAGGAATTTATTTCCTCTAGGTGTTCC
TATTTGTTAGCATATAGTTGTTTGTAATAATCTCTAATGACCCTTTGTATTTCTGTGGTTATCAGTTGTA
ATATTGCCTTTTCTGTTTCTGATTTTATTTATTTGGGTCTTCTCTTTTTTCTTGGTTAGTCTAGCTAATG
GTTTATCGATTTTGTCTTTTTAAAAAACCAACTTTTTGTTTCATTGATTCTTTGTATTGTTTTTTAGTCT
CTATTTTGTTTATTTCTGATCTGATCTTTGTTATTTTTTTCCTTCTGCTAATTGGGTTTTGTTTGTTCTT
GCTTTGCTACTCGAAGTGCATCGTTAGGTTGTTTATTTGAAGTCTTTGTACTGTTTTTATTTTTTAGATT
CAGGGGTACATGTGCTGGTTTGTTAAATGGGTGTATTGTGTGATGCTGAAGCTTGGGCTTGTATGTATCC
TATCATCCAAAGAATGAACATAGTACACAATAGATAGTTTTTCAGCCTTTGCCCACCCTCTGCCCTTGCC
TTCTTTTGGAGTCTCCAGTGTCTGTTGTTCCCATCTTCATCTTTTTTTTTTTTTTTTTTTTTGAGATGGA
GTCTCGCTCTGTTGCCCAGGCTGGAGTGCAGTAGCATGATCTTGGCTCACTGCAACCTCTGTCTTCTGGG
TTCAAGTGAGTCTCCTGTCTCAGCCTTGCAAGTAGCTGGGATTACAGGCACACACCACCATGCCCAGCTA
ATTTTTTTGTATTTTTGGTAGAGATGGGATTTCGCCATGTTGGCCAGGCTGGTCTCGAACTCCTGATCTC
AAGTGATCCCCCCGCCTCAGCCTCCCAAAGTGCTGGGATTACAGGTGTGAGCCACCATGCCTGGCTTATT
ATTCCCATCTTGATGTCTGTGTGTACTCAATGTTTAGCTTCCACTTGCAAATGAAAACATGCAGTATTTG
GTTCTCTGCTTCTGTGTTAATTTGCTTAGGATAATAGCCTGCAGCTGCATCCACATTGCTGCAAAGAACA
TTTTGTTTTTCTTTTATGGCTGTGTAGTATTCCATGGTGTATATGTACTACATTTTCTTTATCCAGTCCA
CCATCAATGGGTACATAGGTTGGTTTCATGTCTGCTATTGTGATTGGTGTTGCGATGAACATGTGAGCGC
ATGTGTCTTTTTGGTAGAATTATTTATTTTCCTTCGAGTATATACCTGGTAATGGAATTGCTGAATCGAT
TGGTAGTCTCATTCTATTTTTAGTTATTTGAGAAATCTCCAAACTGCTTTCCACAGGGGTTGAACTAATT
TACATTCCCACCAACGGTGTTGCCTTTTCTCCACCGCCTCACCAACATCTGTTATTTTTTGACTTTTTAA
TAATAGCCATTCTGACTGGTATGAGGTGGTATCTCATTTTGGTTTTGATTTGCATTTCTCTGATGATTAG
TGATGTTGAACATTTTTCAAGTTCCTTGTAGTTTATGGATATTAGCCCTTTGTTGGATGCATGGTTTGCA
AATACGTTCTCTCATTCTGTAAGTTGTCAGTTCGCTCTGTCGGTAGTTTTTTTTTCTGTGCAGAAGCTCT
TTAGTTAGGTCCCAATTGTCAATTTTTGTTTTTATTGCATTTGCTTTTGAGGACATATCTTTTTGAGTCA
TAAATTCTCTGCCTAGGCCAGTGTCCAGAAGAGTATTTCCTAGATTTTTCTCCTAGGATTCTTATAGTTT
GAGATCTTACATTTAAATCTAATCCATCTTGAATTAATTTTTGCATATGGTGAGGAAGTGTAGGGGTTGA
GTTTCATTCTTCATACAAGTAGCCAGTTTTCCCAGCACCATTTATTGAACAGAGTATCCTTTCTCCATTG
TTTGTTTTTGTCAGCTTTGTTGAAGATCAGTTCATTGTAAGCGTGTAGCTTTATTTCTGGTTCTCTGTTT
TGTTCCATTGGTCTATGTGTCCATTTTTGTACCAGTATCATGCTGTTTTGGTTACTATAGCATTGTAGTG
TAAAGCAAGGCAATATGATGCCTCTAGCTTTGTTCTTCTTGCATAGGGTTGCTTTGGCTATTTGGGCTCT
TTTTTGGTTCCATATGAATTTTAAAATAGTTTTTTTCTAATTCTGTGAAGAATGACAGTAATTTGATAGG
AATTGTATTGAATCTATAGGTTGCTTTGGGCAGGACGGCCGTTTTAACTGTATAAATTCTTCTAATCCAT
GAGCATGGAATGTTTTTCTATTTGTTTATGTCATCTGTGATTTCTTTCAGCAGTGTTTTGTAATTCTTTT
TGTAGAGGTTTTTCACCTCTGTAGTTAGATGTATTCTTAGATTTTTTTTTATGTGTGGCTATTGTAAATG
GGATTGTGTTCTTGATTCAGTACTCAGCTTGGACGTTATTGCTGTATAGAAATGCTGCTGATTTTTGTAC
ATTGATTTTGTATTCTGAAACTTTACTGAAGCTTGTTTATCAGGTCTAGGAACATTTTGGTAAATCTTTA
GGGTTTTCTAGGTAAAGAATCATATCATCAGCAAAGATAGATAATTTGACTTTTTCTTTTCCTATTTGAA
TACCTTTTATTTCTTTCTCTTGCCTGGTTGCTCTGGCTAGGACATCAAGTACTAGGTTGAGTAGGAGTGG
CAAGAGAGGACATCCTTGTCATGTCCCAGGTGTCAAGGGGAATGCTTTTAACTTTTGCCTATTCAGTATG
ATATTGGCTGTGGGTTTGTCATAGATGGCTCTTACTATTTTGAGGTCGGTTCCTTCGATGCCTAGTTTGT
TGAGGGCTTTTAACGTGAAGGGATATTAAGTTTTATTGAATGCTTTTTCTGCGTCTATTGAGGTGATCAT
ATGGTTTTTGTTTTTAATTCTGTTTATGTGATGAATCACATTTATTGATTTTTGCCTATGTTGAACCATC
CTTGCATCCCAGGAATAAAGCCCACTTGATTGTGATGGATTATCTTTTTGATGTGCTGCTGGATTCAGTT
TGTATTTTGTTGAGGATTTTTGCATCTATGTTCATTAGGGATATTGGTCTGTAGTTTTTTTTTGTTTCAT
CTTTGCCAGATTTTGGTATCAGGGTGATGTTGGTTTCATAGAATGAGTTAGAGATGGATCCCTGCTCCTC
AATGTTTTGGAATAGTTTCAGTAGTGGTACTACCTCTTATTTATATGTCTGGTAGAATTTGGCTGTGAAT
CCATCTGGTCTGGGGCTTCTTTAGTTGGTAGGCTTTTTATTACTGATTTAATTTTATAACTCGTTATTAA
TCTATCGAGGATTTCTCTTTCTCCCTGTTTCAATTCTGGGAGGTTGTGTGTTTCCAGGAATTTTTCCATT
TCCTCTAGATTTTCTAGCCTGTGTGCATACAGATGTTCATAGTAGTCTGTGAGGATCTTTTGTACTTCTA
TGGGATTGGTTGTAATGTCACCTTTGTCATTTCTGATTGTACTTATTTGGATCTTCCTTTTTTTTGGTGA
TTTAGCTAGCAGTCTATCAATCTTGTTATCAACTGTTTATTTCATTTGTTTTGGTCTCAATTTTGTTTAT
TTCTGCTCTGATTTTAGTTACTTCTTTTTTTCTGCTGGCTTTGGGTTTAGTTCTTATTTTTCTAGTTCCT
TTAGGTGTGACATTACATTGTTTTAGGTTGTTAACTTGAGATCTTAATGTAGGTGTTTAGAGCTGTAAAC
TTTCCTCTTAACATGGCAAAGAATTTTTTCATATCTGCCTTTGTTTACCCAAAAGCCATTCAAGAGCAAG
TTGTTTAGTTTCCATGTATTTTTGTGGTTTTGAGAATTCCTCCTGGTATTCTTATTTTTATTGCACTGTG
GTCTGAGAAGATACTTGGTGTGATTTCAATCTTTTTTTTTTTTTTTTTTTTGTCTTTGTGCTGTTTTGAT
GTAGGCATCTATTGCTATAAACACTCCTCTTAGCACTGCCTTTGCTGTATCCCATAGGTTTTGGTATGTT
GTATTTTCATTTTCATTTGTTTCAAGACATTTTTGCATTTCTTTTTTAATTTCTTCACTGACCCAGTGGT
CATTCAGGAGCATGCTGCTTAATTTCCATGTATTTGTGCAGTTTCCAAAGTTTCTCTTAATCTTGATTTT
TAGCTTTTGTCCATTGTGGTCTAAGATACTTGATATGATTTTGATTTTAAAAAATTTGTTGAAACTTGTT
TTGTGGCCTAACATATGGTCTATCCTGGAGAATGTTCTGTGTGCTAAAGAATGTGTATTCTGCAGCTGTT
ACATGAAATGTTCTATAAATGTCTTTAGGTCTCTTTGGTCTGTAGTGTAGAACAAACTGGATGTTTCTTT
GTTGATTTTCTGTCTAAATCACTTGTCCAGTGCTCAAAGTGGGGTACCGAAGTCCCCAATTATTATTGTA
TTGGAGTCTGTCTCTCTTTAGCTCTAATAATATTTGCTTCATATGTCTGTGTGCTCTGGTGTTGGATGTA
TGTATATTTACAGCTGTAATATCTTGTTGCTGAATTGATCCCTTTTCATTATATAATGACCTTCTTTGTC
AGTTTTTATGTTTATATGACTTAAAGTCTATTTTGTGTGATATAGGAATAACTACTCCTGCATGTTTTTG
GTTTCCCATCTCTTCATTTTCAGTTTATGCGTGTCTTTACAGATGAAGTGAGCTTCTTTTAGGTAGCACA
TAGTTAGGTCTTGCTTTTTATAGAGATATTCAGCCATTCTATATCTTTTAATTGGGGAATTTAAACCATT
TACATTCAGGGTTGTTATAGATAGGTGAGGACTTAACTCTTGTCGTTTTGTTAATTGCTTTCTGGTGGTC
TTGTATATCCTTTGTTCCTTTCTTCTTCCTTTATTGTTTACCTGTGTAATTTGGTCTCTCTCTCTTTTTT
TTTTTTAGTGATAATGTTTGATGCCTTTCTCTTTCTCATTTGTGTTTCTCCTCCACGAGTGAGTCTTATA
CTTTTTGTGTGTTTTCACGATAGTAGATATCATCCTTTTGCCTCATGATGTAGGAATCCCATATGCATTT
TTTGTAGGGCTGGTCTAGTGATGATGAATTATCTCAGTTTTTGCTTGTCTGGGAAAAACTTTATTTCTCC
TTCATTTTTGAAGGATGGCTCTGTTGGGTATAGTATTCTTAGACACCAGTTTTATTTGTTTTCTTTTAAC
ACTTTGAATATATCGCCCCATTCTCTCCTGGTCTGTAAGGTTTCTGCTGAGAAATCTGCTGTTAGTCTGA
TGGCAATATCCTTATATGTGAGGAACTCACAGAACATCTGACATTTTTCTCTTGCTGTTTCAGAGTTCTT
TGTCTTTGACTTTTGACAGTTTGACTATAATGTGCCTTAGAGAAGACCTTTTTAGGTTGAATCTATTTGG
GGATATTTGAGCTTCCTTTATTTGGATATCTATATCTTTTGCAAGAATTGGGAAGTTTTCAGCTATTATT
TTGTTAAATTGGTTTTCTGTACCTATGCCATCTTTTCTCTTGCTGGAATAGCAAGAATTTGGATATTTGA
TCACTTTATGGTCTCCCATATGCCATGTAGGCTTTCTTTTTTCTTTTTTATTCTTTATTCTTTTGTTGTT
TTTGTTGTTGTCTCATGGGGTTATTTCAAAAGGTCCATCTTCAAGTTCAGAAATTCTCGTACTTGTTTTT
ACTCTGTTGTTGAAACTCAATTGCATTTTTAAATTTCATTTATTGAATTCTTCAGTTTCAGGATTTCTGT
TTGGCTCTTTTTAATGATATCCATCTCTGTTGAATTTCTCTTTCAGAACATAAATTGTTTTCCCGATTTA
TTTTTATTATCTGTGTTTTCTTCTATCTCACTGAGTTTATTTAATAACATTATTTTGAATTCTTTTATAG
GCATTTCATACATTTCCTTTTCTTTGGGATCTGTTACCAGAGAATTATTGTGTTCCTTTGAGGTGTCCTT
TTTCTTTCCTTTTTCATTTTTCTTGTGTCCTTGTGTTGATTTCTGTGTATCTGGTATAATAGTCACTTCT
TCCAATTATATGGATTGGCTTTCATAGGGAAAATTTTTTTCATATAGGTGTATCTATAGTGTTGGTTGGG
TAGGGTGCTTTTGATTTGATTCTCAGTGGGTGCAAGAGTGTAGTTTCTATGATTTTTCCAGCCATAATCA
GTATCAGTGGTTTCTGTGAGTTTTTCAGTGACTTGGACTGTGATTGTCAGTGGAGGCTATAGCAAGGCTC
TGCTGGGGTAGGGACACCAGGCAGACTGGTCATCACGTACCAGACAGTGATGCCAGTGGCAGGCAGGATG
GGCTTGTCCTCAGGCTCCCAGATGGCATGCACAGGCACTGATAGTAGCAGGCAGGGCAGATCAATCCCCA
GGCCCGTGGGTGACATGCACAGGCACCAGTGGTGGCAGTAGTGGGTGAGGCAGGCCTCTCCAAGGTCCCT
GGATGATGTCCATAGGTGCTGGCAGTGATCACGGTAGGTTGATTCTAAGTCACCTAGTGGTGGCAGGAGG
GGCTAGGCTGATCACCAGTGCCTCAGACAATGTGCCTGGTAGTAGTGATGGGCACAGCAGGCCTGTCCTC
AGGTCCCTAAGTGGTGTGTGTGGACTCCCAGTGGTAAGTTTTCTTTTAACCTTAAGCTTCTCACTGCAGT
TTAAAAAACTTATCTGAGTTGTGCCTCTGACCATATTGTGCTTTGGGTACAGAAGCAAAAGTGTTGAGCA
AAAGCTAAGTTGATCCATGTCATGGTCACAGCATTTTGGGGGGACTTTTTTTGGGTTGTTTGCCTCATCA
CAGCAGTGTGAAGCTAGTTGTTTGCCTACATCCTATCTTGAGTTTTCTACTCTTAAGAAGCAAAAGTACA
AAGGTTCTGTCACACTAAGAACAGGTGCTTTTTGAAAGTATTTAAGCCTTACTGAGAGCTGTCTTGTGGC
CATTTCTGGAAACCTCTTTGAATCTAATATATCTGTGTCCACTTCTGTTTCTCAGCAATATCTGGCATCT
CCTGAAATGCCAGGACATCAGTAGGTTTACAATAGTAAGGTAGACTACAGTAAGTTTCTGACAGAAAGGT
GGGCAGAAATAGTTGAAATAAATCTGGCTGAAGGATGAATTTCTTGAAGCAGCTCTTACAATTGTATTAT
CACTTTCCTGCATGATAGTCTGCTTTCTTCCAAGGCTTTTTCCTTTAGCTAGATGAAAATGTGATGTATA
GGCTTGTCTGGATCCTTCCTGAAAGCTTCCTTAATATGTTACAGAGGCGCTTGTTGGCTGTAGCAGCCTG
GCTCCACAAACCAGACTTAAAACATCAATCTTGTGCTTAACCAAACAACTTGGGCTTTAGGTTGGCTATG
AGAGGAAGATAAGATATTCTGTGGAATAAGTAATCATCTTAATATGAGCATTAAAAGTAAAAGCTCAGGC
CGGGCACGGTGGCTCACACCTGTAATCCCAGCACTTTGGGAGGCTGAGGCTGGCCAGATCACCTGAGGTC
AGGAGTTCAAAACCAGCCTGGCCTACATGGCAAAACCCCATCTCTACTAAAAATAAAAATTAGCCGGGCA
TGGTGGCGCATGCCTGTAATCCCAGCTACTCGGGAGGCTGAGGCAGGAGAATTGCTTGAACCCGAGACGT
GGAGGTTGCAGTGAGCCATGATCATGCCACTGCACTCCAGCCTGGGCAACAAGAATGAAACTCCATCTCA
AAAAAAAAAAAAAAAAAAAAAAAAGCTCAGCAATCCTATTCTTTGCTTCTGGTAATTTATTAATTTACAT
TAATGTCATTTAATTATTTACTTCAGGTAGATTTACATCTGCTATATTTTTACATGAAAAAGATGAAAAG
CCACTTGAACATATCTTCTGTTTTTTTAATGATCTGTTCTTCTTTATAGGGGATTTTTGACATCTTGTGA
AGCAGAACTACAGGAGCTCATGAAACAGATTGACATAATGGTGGCTCATAAAAAATCTGAATGGGAAGGA
CGTACACATGCTCTAGAAACTTGCTTGAAAATCCGTGAACAGGAACTTAAGAGTCTTAGGAGTCAGTTGG
ATGTGACACATAAGGAGGTAAAGCAATTTATTTGTTCTTCTTTTTGACATTTTTATCTTGTCTTTTATAT
TAAATGTGTTTCTTAAGTATTTGTTGAAGAAAGAATTTGTATACCAAGTTAGTTTATTGTTTTTTATTAT
AATTCTGCTGTTTTATTTTAGAAGAAAAATTCATTGTGAAAATGTATAAGAATGTTATCATTTATTTCAA
GGATCATTTTACCTTGGTTACATATAATATATACATAACTTCTTTAAGAAAATGTAAAAGGGTACCACAC
ATTGTTTGTTTAACCTTCATCATATTACATGTTTATATTAACATTCACTGAGTTTCATGGAAATTGCTTT
TGGCTTCACTGTATGGCTGGTATTACAAAAGAAGTTCCAGATTAAAGAATTTGCCTCTTTTGGTTAGATT
TAAAACAAAGTTAAGAGAATCTTTAAAAAAAAACAAAACAAAACACGTTTACCATGTTGAAAATTAGAGG
AGAAGAAAGAAAAGAAGAAAATAAAAATTACTTGCAGTCCCACCACTCATTGATATTGGTAATTTGGGGG
AAAAGTTTAATAATATTTGCTGGTTGCCTTCTCATAAATTTAGCTGGTAAATTAGGAGGAAGTACACAGA
ATATTGGAAGGGAAGTAGAAAGCATTTATGTGTGAGAGTTGCCTGTTAATTTTTGGTATGGATGTCAATC
TCAGAAGGATTGGAAGAGTTAGAGTTATAGGGGAGCACTGGTCCCATTTCTCACTCTGAAGACCTTTTCT
ACCAGTAGGGTCACCATTCATTAAGGCTGTCATCAGCTTATTCAGGTACACTTCTGTGAGTGGTACACAC
TGAGATTGTGATTTTGTTGAGAAAACTTATTAAGAATAGTTTAGAAATGTTTCTCGTAACAAAGAGTTTG
ACTTGTTAAAAATGTTATTATGCTTACCCAGAAAATTTCTCCTTGGTTGGCCATTTGCAACTTGGGTCAA
AGTAGTGCGTGGCAACACTGGCTGTATCAAAGTTTTCTGCTAATGCTGTTTGCTAAATTGCAATTAATTT
AAAATTTGACTAAAACTTTGAGAATATATTTTAAAATTACACACCATGCGAAAATACAGAAGGTGATGCA
AAAGTACAGTGAATGGTGATCTTGTTTGATTTTTTAAAAATCATAATTTAGGCAGGGTCAATGTTCCTTT
TATGGTAGGCTACTTAGCTAGCACTTTGTTTCTCCTAGGGCAAAACAAAATTCTGTTTAGCAAGTTGAAA
TGAAAGTGGTTTTCTGGTTGATAAATAGATTGTTTATTTTGTTAGAAACTCATTAAAGAATTATGTGTGA
TTATGATAATATTTAGTCACTGTAATGCTAAATTTGAACTTATTCCTGTGGCTTAGTTTTGACGCCACGG
GCATTGTTGCCGTTACTTAATGCCCTTGACATCAAAATTTCTCTCAAAGAGAAATTAAGAGAGATTTAAG
GGATTAAATGGATAGATTCCATGGTAAGGATATGAAGATGTTAAGTTTGGCCTGGGGACATACAAGAAAT
TTAGAATTGCAGCTCTCTGGTTAATTTGCTACTTCATTGATTGGGCTGCTGAAAGTTGATTAAGTTTCTA
GAAGTAGGTTTCTGAAGATAATCTAGTAATGGGAATCTATTCCATAGAATTTGTGTGTGAGATTGTGTTG
TATTACAACACTTCTTTCTTGCTTTTTTTTTTTTTAAGGAACAAATGTGTTTATTATTGTGCTGAAAAAT
TATGACCACCAACAACCAATGAAGGGCAGGAAGGAACAACACTATGAGATCATGAAAATATTTTGCTTCT
TGTATTAGTCTGTTCTCACATTGTGATAAAGAAATCTGAGGCTGGGTAATTTATAAAGGAAAGAGGTTTA
ATTGGCTCACAGTTCTGTAGAAACATAGTTGCTTCTGGGGAGGCCCCAGGAAACTTTCAGTTATGGCGGA
AGGCAAAGGGAAAGCAGGCCTATCTTCACGTGGTGGAGCAGGAGAGAGAGAGTGAAGTGGGAGGTGCTAC
ACACTTCTAAACAACCAGATCTCAGGAAAACTCACTACAACGAGAACAGCACCAGTGGGGACATCTGCCC
CCATGATCCAGTCACTTCCCACTAGGCCCCACTTCTAACATTGGGGATTATAGTTCCACATGAGATTTGA
GCAGGGACACAGACCCAAACCATATCACTTGTCAACAAACTTTCTTCTCTTGCTTTAACATTTTTGACGA
TTCTTTCCCAAACCTATTAAGTAATGATGATGGTTACAAATTTTCCAGTTCTACCACTCTTTCCAGTGCA
TTATTTTTTATATCTTCATTAAAGGAGCAAAGCAAATCCCCTACTTGTAATAATAAGACAATATTGGAGA
CTGCCATTAAAACACAGGAGAAGTAAAAAAACAGATCTGTTCCAAGACACACAGGACTATAAATTTAGGA
AATACACAGAAAATTAAAAGTTAAACTCAATTGGATACATTAAATATGTGCAGCTTTTTGTATGTCAATC
ATACCTAAATAATGTCATTTTGAAAACAAATGGTCCAACCTGTACCACCAACAGGTTTTGAGTATATATA
AATCTAATATGTATTTATGAGTAGGGAGCAACCTTAAACATTTTAAACAGCAGAAATACACAAAGCAATT
ATAGGTGGAAGTAATACAAAGTGCCTTGTGTTTCTATCCTAGAATCAAACTATAGAAGTCTCAGGTTATT
AAGAAAACAAATATTGTTTTGAATATTAAAAATCATGTGTTTTGGAGAGGGAGAGAATTAACAGCCTTTC
TCTGCCTTAGAATACTTTACATTTTGTGAAATTTACAATCAGAATGGAGCATCTCCTAAAGTTGTCAGTA
TGCTAGGGAGGGAAATTGAGCACAGGAGCAAACCACTGTTTTCTTAGTGCTCAGCTGAAGAAATTTTCAC
TTAAAAGAGCTGTAGCTGTTGAAGTCATTTCCATTTTAGAAGCGTACTATAAATGACTTTTTCTATGTAT
TAACTAGAATTAATGGTAATTTGTGAAATGTTTTATCATTTTTAAAATTAGAGTCTATATCTCAGCCAGT
GAAGCAGCAGGCACTGCTGCATGTCATAGTCTAACACCTGCAATCCACCAGTCTGCATGGACTGTAAGCA
GGTATGGAGAGAACCGGAGTTCACCTATCAGCAACACCACCATGGAATCGACTGTTGAGCCTTTCTACTA
TTAATTACCATATATGTGCCTTTTTTCTGGTATTTTATTCCCACTGGATGCTTTTTATTAAGACCTTGTA
CCTGTGAACACATTTGGGGCACAACTTACTGTCTTCAAGGTGCAGGGGTGGGAAATTGGGAGGCGGGAAG
CAAGAAGAGTGCACTCACTCTCCCTTCTTGCATTTCTGGAGCCCAGGCTTGTCTAGCATGAAACTGGAGG
TGAACCCAACCATCTGTATCTGCAGGGAGACTTCTCCCATGGTCTTCTCTTGTGGAGATTCCTCTGCCTC
TGGTGTCCCACCCTGGCTGCAGTTCTGGCCCTGGAGGCCAGCAAAGCACCTGGGGTAGAAGTTTTCTTAC
AGCTGTATTAACTCCTTCAAGGAGAGCAGCAGACTCTTCCAAGGCAGGCAGCACCCCCCCAAGAGGGAAG
AGCCATCTCAGGAGGATGTCTCCTCAGAACTTTTCAGGGACGTTTACCCCTTGTCCACCTTTGATTTTTT
TTTTTTGTAATGATTTCTGAATTCTGGCCTCTTTTGCTGTGCTACGAATGTCCTTTTATTTTGGGTAGGT
GAAGGCACACGGGTGCTTATGTGCATCTAATTTCTGGCCTTTGGTGCTCAGCTTTAATTGTTGGCACCAG
GCACACAGAATGTCCTGGCGAATCAGGTTAATGGGTAGCAGTTTAGAGGGTAATGGAGGGATTGATATCT
TCTTCTGAGGTTTTAGGTTGTTGTCACTGAACTCTGCCTTCCTCTTTGGGCAGAGCACTTTGTCACCTTT
TCATTTGGTCCCCTTTGCTGATGTTCCTGGCAAAGCAATTGTGCTTGGTTAATTAGAAGTTTACTAATCC
TCTTCCCTTGACTTCTCTGTGGATTTCCACTCTTTGCCTTTTTGACTTCTCCATACTCGGAAAAGAAGTG
GAGGTTGACGAAATTTTTCCAGAATCAAAATACTTCTTTCAAGTATGTGTTATAACACATTCATAATCCA
ATTTGAGCAGTATATGAAATAAGAACTAGAAAATAGGGCTTTATGTTTTTGTCATTGTATTAGTTCATTC
TCTCATTGCAATAAGGAACTACCTGAGACAGGGTAAGCTATGCAGAAAAGAGGTTTAATTGACTCACAGT
TCCACAGGCTGTACAGGAAGCATGGCTGGTGAGGCCTCAGGAAACTTAATCATGGCAGAAAGTGAAGAGG
AAGCAGGCACATTTTCACATGGCGGAGGAGGAGACGGAGCAAAGGGGGAAGTGCTACATACCTTTAAAGA
ACCAGATCTCATGAGAATTCACTATCACAAGAACAGCAAGGGGGAAGTCTGCCCCCATGAGCCAGTCACC
TCCCACCAGGCCCCTTCTCCAACATTGAAGACTACAGTTCAACATGAGATTTGGGTAGGGACACAGCCAA
ACCACATCAGTCATTCTTACTTGTTTGAAAGGTACAGACCTAGAAGCACTTAGTCCTAGGGTGTAAACCA
CTGCTAATCAAATGACAGGTCCATGATGAGATTAAAAGCTTGCACCAGAATGTAAATCATTGTAGAGAGC
AAAACCCCTCATCTTTCATAGTACCAAGTCATTAAACAGCTAAAACTGTTAACAGCTAAAATCAGTGTAT
ATCCATCTTTTGCTGAGAAAATTTTGGTTGTAAGAATGTCTGTTACACTGAACGGTGTGTTTCAAGACAT
ACTTGATTTACACTCTGCCTCAGGCTTCTTGTGCTGGATTGCTGTCTGTGAATAACTTCAGCCCACCTGC
AAATCATACTTGGTGGATCACTAATATAAGCAACTTGTTTTGTAAGTTAAGGCTTTATGTGTTTCTGGTT
ACAGTGTTGGCACTGGGTTGGTTTTAATGGACATTCCTGCTGTTACTATCTTCTAGCTCCCTACAGGGCA
CGTTGACTTTGTGAAATGAGTAAGAAATTTAGAGTCCTGGCCCTGCCTCTTTTCAGCTGAATGGCCTTGG
ACAAGTAACTTCCATCATTATTAGCATTTAATGTTCCTAAACTTTTCTTCACCTTTATATTTATACTTGT
CACAGTAAATAAAAAGAAAAATGATTCTACAAGGCTCATAAGAAAAAATAGTAATCTTCCCCACCCCTCT
GAACCTAGGATTCTTACTTCTGTGAGGAGTAATTTCAAGCCTTTAACTCTTTCTTTTGGCATTTTCCCTA
TGTTTCCAAGGAAGCTTTTTTACTGCTGTATTTTCATTTATAGTTTTAGCTGTTTAATGACTTGGTACTA
TGAAAGATGTGGGGTTTTGCTCTCTTACATACAATTATCATCCCCTCATCCTTCCAGGAGTGTATATCTT
AATTTTTTGTTAGATTAATATTCAGTATTTACATCATTAAATGGTAAATATTATTCACAGTTGAGTCAGG
TAGTGTAATTATAAGCAGACTTGTTTTTTGTACTGCTTTTTTGTTTTCCTGGAAATTACTAATTGTCTCA
CTTTCATTTGGTTTTTTAAACATACCTACCATTGATTCTTTCTGAAATCTCTGACACAGGTGTAAATCTT
CTGCCATTGTGTTTAAACAAGGCAATTAATCTGTCCATTTTCTTTTCTTTCATTTCTTTTCCCTGTGAAG
ACATCTCTCCTGGAGCTTGCCATTCTCCACCGTGGATAGGTTGCTTTCAAGGATAGGTGTATAGCTGTCA
TCATGAGAACTCCCTTCATCATTATTCTGGAGGTTTTCTGTGCTCCTCTATTTGTGCTTCTTTGCATTCT
CTGTCACCATATTTATATGTTTACATTTCTATTTTGATAGAGCATAGTTTTGAGATCTTGTATATCTGAA
AATAATCTTTATTCTATTTTCAGGCCTGATTGAAAGTTTGACTGGCTGTAGAAATCAGCTTTAGAAGTAA
ATTTCCCTCAGGACGTTTACAGTTAAATATGAATTATTTCAGACTTTAATATTTGATAATGGCAGATTAG
GTAATTTGGGCCAGTCCACTCACCGAGGACAAATAGGTAAGTTAGATTTAAAAAAAATTTTGCTTGAAGT
AAAATGCTATCAGGATGGTGAACAATTACCAGGCTGGGATCTGGGCTGGGCAAGCGGTTCAGGGAGGTGT
GTCCAGGGTTTGGGGCCATTATTAACTGAAAATAAAGAAGGCAGCCGAGAGGATAAAAGGTTGAGTGGTG
TTTTTGATAACTTTAAGGGGCTAGGGGTCCATGATGGCTCTGAACGCCTCCTCAGTTTGGCTAAAGACCC
TGAAAGGCTGCACCCTAGGAGTAAGGATGGACCAGAACAGGCCCTCTTGAAAAAACCACTCAGCTTCAAA
CATCTAAATCCCTGAAATCAGTTTTAAGTTAAACTTAAGAGTGCTACTGTCCCCAGGCATCTCCAAAGTG
CTAGGGCTTCCAGGAACCTGGAAGTAGCAAATATAAATTTTCTTCAAAGGAAAAATTACCATTCTGGGTT
TCAGATTATTCAAATAATTTTGCAAATAATGCTTGGTACTTGCTCAGAAAATAACCTGAGACAACAAAGA
CCAGGAGACAAGACAACACAAAGGAAAAATAGTAGAAGCAGCAGAAGATAGAAATAGACCCATGATAAAT
CTAGATATTTGTCATTATCATGCACACAGTTTACAATAACAATGTTTATTGCATTCAAGGCACTAAAAGA
TAAGATTGAGCATTTCGAAAAAGAATTAAAAACTGTAAAAAAAATGAGTGGAAATTTTAGAATTGAAAAA
TAGAATGACTGAAATTAAGGTCTTAAAGATTAAGGGATAATTAGTGAACTAGATGATGTGACAGAATAAA
ATGTCTAGAATAAAGCACAGGCAAAGTGATAGAAAATATAGATGAAAGGATATGAGAAAGAGAAGACAAC
AAGAAAGTCTAATATAAGTGTTTTTGGAATCCCTGAAGGAGAAAAAAAATGAGAATGGGCACAAAAGATA
TTTGGAGAGATACTGGCTGAGATTTTGCCAAAAGTGAGGAAGGTCAAGTATTTAAGAAGTCCAAGAATCT
CAAGCAAGATAAGTAAAAAGAAACAGTTGCCATGGTTGAAAACTAAAGACAAAGGGAGGAATCTGAAAAG
CAATCAAAGAAAAAAAAGATTATCTACAAATAGCTCTTAACAGTTGACTTGTCAGCCAAAAAAGTGAAAG
CCAGAAAACAATAAAATGTCTACAAAGAAAGAACATGACTTTTTCCTCTACCAAACGAGAATTCTGTATC
CAGAATAAAGGTAAAATAAAGACATTTTCAGATGAACAAAAATTGAGAGAACTGGTTACAAGCAGACCTG
CACTAAGGAAATATTAAAAAATGTTCTTTAGGTAGAAAGACAGTGATCCCAGATTGACCCTCAGAGCTGC
AGGAAGAAATGAAAAGCAGTAGTAAATGTATGGGTAAATCTAAATGAATATTGATTGTATAAAACAACAA
TAATAGATGGAGTTTTGCTATGTTGCCCAGGCTGGACTCGAACTCCTGGGCTTAAGCAATCCTACCTCAG
CCTCCCAAGTACCTGGGACTACAGGTGCATGTCACTGTGCCCAGCTAACGGTAATTGCCTTTTGAGTTTA
ACGTATATGTAAAATTATGGTGGCAATGGTGTTATATTTAAGTCAGGTTGGGATAAATGGAATTGAAGTA
TTTATAGCTAACATTAGACCTTGTTAAGTCACAAATCCATGTTTTTATCTTGAGGGAACCATTAAAAGTA
TATATTAGTAGAGAATATCTTCCATGCTAATAGAGAAAAATGGAATGATAAAAAAAGTAATCAGTCCCAA
AGAAGGCAAAAAAGAAGAGAAAAAGGAACAGAGCTTATTAAGTACAAATATTATGTAACAAGATGAAAGC
TTTAAATCAAAATAGGTTTGTTAAATGTAAATGCAGTAACTGGCTTAATTAAAAGAAAAACTGTCCAACT
GGATCAGATAAACAAATGCAATTATTATTTAATGTTTATAGAAATATAAAAACATTGAAATTAAAAGGTA
AAATATATAACATGCAAACAGTTTGACTAGAAAGATGGTATAACTATATTCTTACCAGAAAAAGTATGAT
TGGAGCAGAAGCCGAAAGCATTACTCAAGGTGAAGAAAAACACTTCATAATGAGAAAATGTGAAATTTCA
GGATATGTAACTTTAGTAGACATTCTTTGTGCCCTGTAGTATGTCCTCTTTGCCTCCTGATTTCCTTTTA
GCTATTAAATATAGGTCCTTATGCGCTGCCAACATCTACTATAACAGGAGTTTCCAATCTTTTGGCTTCC
CTGGGCCAGATTGGAAGAAGAATTGTTTTGGGCCACACATAAAATACACTAACACTAATGCTGGCTGATA
AGCTTAAAAAAAAAATCTTGTAATGTTTTAAGGAAGTTCACACATTTGTGTAGGGCTACCTTCAAAGCTG
TATTGGGCCACATATGGCCTGTGGCTTACAGGTTGGACAAGCTTGTAGTATACTTTGTTTGAAGGGGTGG
GTTGCCCCTCCACACCTGTGGGTGTTTCTCGTTAGGTGGAATGAGAGACTTGGAAAAGAAAGAGACACAA
AGTGTAGAGAAAGAAAAAAGGGGGCCCAGGGGACCGGCGTTCAGCATATGGAGGATCCCGCTGGCCTCTG
AGTTCCCTTAGTATTTATTGATCATTCTTGGGTGTTTCTCGGAGAGGGGGATGTGGCAGGGTCATAGGAT
AATAGTGGAGAGAAGGTCAGCAGACAAACATGTGAACAAAGGTCTCTGCATCATGAACAAGGTAAATAAT
TAAGTGCTGTGCTTTAGATATGCATACACATAAACATCTCAGTGCCTTAAAGAGCAGTGTTGCTGCCTGC
ATGTCCCACCTCCAGCCCTGAGGTGGTTTTCCCCTATCTCAGTTGATGGAACATACAATCGGGTTTTATA
CCGAGACATTCCATTGTCCAGGGATGGGCAGGAGACAGATGCCTTCCTCTTGTCTCAACTGCAAAGAGGT
GTTCCTTCCTCTTTTACTAATCCTCCTCAGCACAGACCCTTTACGGGTGTCGGGCTGGGGGACGGTCAGG
TCTTACCCTTCCCATGAGGCCGAATTTCAGACTATCACATGGGGAGAAACCTTGGACAATACCTGGCTTT
CCTAGGCAGAGGTCCCTGCGGCATTTGTGTCCCTGGGTACTTGAGATTAGGGAGTGGTGATGACTCTTAA
GGAGCATGCTACCTTCAAGCATTTGTTTAACAAAACACATCTTGCACAGCCCTTAATCCATTTAACCCTG
AGTTGACACAGCACATGTTTCAGGGAGCACAGGGTTGGGGGTAAGGTTACAGATTAACAGCATCTCAAGG
CAGAAGAATTTTTCTTAGTACAGAACAAAATGGAGTCTCTTATTTCTACTTCTTTCTGCACAGACACAGT
AACAATCTGATCTCTCTTTCCTTTCCCCATACTTTGTTTCTCTCTCTGGGGCCTTGGAAAGCTGCTTAGA
TGAAATCTGGAAGTGTTGAGGAGTTAATACTCTTAGATCTTAGGTCAAGGTTCAAGTAGTGGAGGGACTA
GGTGAATTCTCCAACTTCCCATTCCTCAGAGAGACGATTCTGAAAGATTCCATCTGGTTCCTTAGTGGAT
TCCCAGTGGAATTCATCACCAGCTGCTTACTTCAGTAATATGCTTAATATGCTCAATAGCACGTCCTTTA
TTAGCTTTCCTTCCTTCTCTGCCTTGCTCTCTGTGTCCTCACTGTGCTTTCTGGGGTCACCTCCAGTTGC
CCTGAAGTCCATGTCTCAGCCCACACTTTGCTGGGGGACTCAAACCAAGATGAAAATGTCTGCGTATCTA
ATGTGTCTAGTTAAATAGTTTTAAAAGAAAATCCTCTTTCTGTCTTATCTGTATGTGAAAAGTGACAGAA
CTAGGAAAAAACAGATGAAGCCACAATCATAGGGGAGAATTTTAACACATTTTTCTTAGTAACTGATGGA
ATAAGAGACAAACATAAGAATATAGATTTTAACAGCATGATCAGCGAACTTGACTTAATTTTTATATATA
GAATATTATACAACAGAATTTCAGAGTACACATTCTTATTAGCACAAAAAATACCCTTACCAAAATTGAC
CATATGCTGGGCCATAAAGTAAATCTTGATACAGTTCAAAAGCTTGACGTCACAGGTGTGGTCTCTGAAC
ATAGTGGAAATAAGTTAGAAAAAGATAACTTGAAAATCTGCATACATTTGGAAATTAGGACATGAAGTTC
TGAATAATTCATGGATCAGTGAGGAAATCACAATGGAAATTAGAAAATACTTTGAATTCAAAATGAAAAT
ACAACATCAGACATACAGAATGCAGATAAAATATCTCAGAGGGACATTTATAGCCATAAGAGCATATATT
AGAAAAGAGGAAGGGCTGAAAATCATTGAGGTATTGATTCATCTCAAGAGGTTGGGAAAAGAACTTGCTA
AATTTGAAGAATGTAAAAAGAAGGACATTTTTTAAAAATGAAAGTAAAAGCCTGGAAGTGATATGACATG
AGAAAACTTCCAAAAGAAAACTGATGTAACTGTATTGGCATGAGACAAAGTAAACATCAAAGCCAGAAGC
AATACTAAAGATCTAGGGACACTTAAAAATTATGAATGGGTCAGTTAACCAGGTTGCTTTAATAATTCAA
TTCTATAAATACTTAATAATGTAGCCTTAAAATATACAAAGAAAAATGGGCAGAATCAAGGGAAAAATTA
AGTACATGGTAATCATGGAAGACTTAACAAGTAGCTCTCAATTAATACAACAAGCAGAGAAAACCTCAGT
TCAGGTGAAGATTTGATCAAGATTAACAAACTTAACCTAGTTAATAAACTTGACCTAATTAATCTAAATA
GAACATTGTACCTAGTAACTGCTGAATACACATCCAAGTGAATATGGACCATTTACCACTACTGCCGTAA
AGCATGTCTCAACATATTTCAGAGGATTAGAATCATGTTTTTTGACCAAGGTGGATTTAATCTAGAACTC
AGAACAATGAAAGACATCCAGAAAAAATCCTCAAAAGCTTGGAAATTAAGCAATACACTTCTAAATAACC
CATGAATCAAAAGAAATCAAAATGAAAATTAGAAAATATTTTGGACTGAATAATAATGAATATGGTACGT
ATCAAAACTTGTGGAATGCAGCTAATGTGGTGCCTAGAATGTTAGCTATGTGTGTATACATATAGCTACA
TTTTATATACAGCTAAAATTATATATATTAGAAAGGCTGAAAGTGATCTAAGTAGCCATTTCAAGAAAAA
CAAAAAAACCCCAGCAAATTAAAACCAAAGAAATGAGAAAGAAAAGATGTAATAAAGATAAGAACAGAAA
CTAATAAAATAGGAAACAAATGTATAAGAGGATGAACAAAGCTATTCTCTTCGAAAAAAATTAATTAAAT
TGATAACCTTGGCAAGACTAATTAAGAAAAAAGGGGGGAAAATAACTAATGTTAGCAATTAAAAAGAGAA
ACCATAATAGAGCCTCTGAATAGTAAAGGGGTTATAAAAAGATACTATGAATGACCATGTACCCACCCCC
CCACCACAGTAAAACATTTAGATATAATAAAAAATCCCTAGGAAAGCACAGCATACAAGAAAGGTTGAGA
CATGTGAATAGTATCCTATTAAATTGATTTTTTTTTTGTTTTGAGATGGAGTCTCACTCTGTCGCCCAGG
CAGGAGTGCAGTTGCGTGATCTCAGCTCACTGCAACCTCTGCCTCCTGGGTTCAAGCGATTCTCCTGCCT
CAGCCTCTCGAGTAGCTGGGTCTGCAGGTGCGCACCACCATGCCCGGCTAATTTTTGCTTTTTTTTTTTT
CTTAAGTAGAAATGGGGTTTCACCATGTTGGTCAGGCTGGTCTCAAACTTCTGACCTCAGGTGATCTGCC
CGCCTCAGCCACCCAAAGTGCTGGGATTACAGGCGTGAGCCACCACGCCCGGCTGAATTGAATTTGTTAT
TGAAAAACCTGCTCATAGATAAATCTCTTGGGCCCAGTAGACTTCATTGGTGAATTCTACCAGACATTTT
AAGAAATAAGTAACATGAATTTTATATAAAATATTCCAGAGAACAGAAGAAAAGATAAGATTTTCCTAAC
TCCTTTTATGAAGCATCATAATCTTTATTTCAAAACTTAACAAGGATGTAGCAGTTAAGGAAAATTACAG
GCCAGTCTTATGTGAATGTTAATATAAAACTGTTAGTCAAAATATTAACAAACTAAATCCAGCAATATTT
AGAAATTACATACTAACTTAGGTTTATTCTAGTCATTCTGGGTTGTTTCAACATTCATAAATCAACATAA
TTCATCATATTATCAGAGGAAAAAACACCATAGTTATCTCAATCCAGGAAAAGAATTTAATGAAATTCAG
TTATCCATTTGTGATAAAAATATTAAAATCCCTTAGAAAATTAGAAATGTTAAGGGAATTTCCTTAATCT
AGTAAAATGGTATATAAGAAACATAGCAAGTAGCAATTAATGTAACCCATTGTTAGAAGCTTTCCTTCAG
AGATTGTGAATGAGACAAGGATGCCCAGTATCACCACTTTTTTTGTTGTTGTTATTGTAGTGGAGGTGTA
GCTAGTGCAATAAAGCAAGAAAAATAAATAAAAGACATAAGGATTAGAGAGGAAGAAATACCACTGCAGT
AATTAGCACATGCTTTGTTGGTGTACACAGAAAACCCAAAAAATCTATGTAGACAGAATTAACAAATGAA
ATAGTAGATTTGCTGAGTTAAAGGTTAATTTACAAAAATTTATTGATTCTTTGTACCAGCAAAAAGCAAT
TAAAAATGAAGTTAAAAAAGATACCCTTGACAAGAGTATCAAAAAAGCACCAAATAGAGTAAATCCAATG
AAAGAGGTATAAGACCTCTGCACAGAAAGCTCTAAATTATGGAGAGAAATTAAAACTGATATAAATGGAA
GAATAGATGTTCATGGATAGAAAGACTCAATATTTTAAAGGTATTGGTTTCTCCAATTTTGATCTATTCA
GTATTATTCTAATTAAAACTCCAGTATATTTTAAAGTGAAAATCAACAAGGTTGATTCTCAAATTTATAT
GGCAGTAGCCAAAACAATCTTGATGAAGAGAAATTAAGGTGGAGCACTTAGGGTACTAGAAAACAAGATT
TATTAAAAACTATATTAAGACAGTGTGGTATTGCAAGGATAGAAAAACAGACCAATGGAACAGAATAAAG
AGTCCCGTAACAGAGATCCCACATATGTGAACATTTGATTCATGACAAGATGACACTGCAAGATGGTGGG
GAGTCTTTTCAATACATGTCACTGGATCAACTGAGTAACAATATGGGGGAAAAAGAAAGATTTTGACTTC
TAGTTTTATACCATATACCAAATTCAATTCTAGATGGATTACGAATTTAAATGTGAAATGCTGAAGATTT
TCTAGAAGATGACATAAGAGAAAATCTTAGTGCCTTGGAGTAGGGAAAGATTTCTTAAAAAATAGTGATA
AAAGGTTACTAATTTAGACTATATTAAAATAATGAACATTTCATATATTTACAACATACAACCAACAAAA
GATAAAGAACATCTATAAATTAATAAGTTAACTGAGTAGAAAAATGGGCAAAAGACAAATAGTCATTTCA
CAAAGGAAGATATCAAAATGACCAGCGAGCATGTGAAAAGGTGCTTGGTTTCACAGGTTACTAGGAAAAT
GCAAATTACAATCACAAGATAACCCTAAACATACACCAGAAAGGCTAAAAGTTAAAAGACTAATAATACT
AAGTTACTATAGGGGTATGAAACAGCTCAGTATTTTATCAAAAAGAGTGCTGTACTTTTCTGTGCAAATA
TTTACTTTCAATTTAATTTTGTTTTAAAAAGCAACAGTCAATTCCCATTTTCAGTAGTAGAAGATACACA
TTTTGTGTATTTTTTCCCATGGGTATTCTGGATTGTTCCCCCGTTGGGCCTGGAAGTTTGGAAATGGTTG
AACATGACTTAGCATGTTTGCTTTCTGCTTTAAACACTAAAAGTCCTTGTCTTTTCACATTTTACATTTA
TGCAAAGTACATTTGTATTTTTCTCCTTGCTTATTTCTTTTATATTAATATATTCTGTTTACATGCATAA
TTTTTCCCACTTTGTTTTATTCTAGAACTCTTGTAGTAGGAAGTACTAGAAGATCTGTGAATATCTTAGT
CTTGTTACCTTCATTAACAGCTAATATTCTCACTTCTGTTTAATGATCAGTGACTTAGTATTGCATAAGA
ATCAATAGTCCAATTAACTAAATTGAAGCGCTAATTTCTCCCTTTCAGTGTTACTGAAGTTTTATTTTCT
GGGAGGGGGATGTTGAATTCCACATTATTGTTTTTAGTGTTTTTTCAGAATCATTTTTCCAGAATACTTT
TTACCTTTTTGAGGATGGACTTTTTGCAGTGCACTTTAACTGTATAGAGTGTGCAAATGACATTTCAGCT
GGACTTGGGGGAGCTGTTCTGGCATTTTGGTTTGCAAATCAAACATGCACTCTCTTTTAGTCTCTTTTCT
TTGTATTTCTTCTCATTGTTTCTTTTGGATCTGGTACTGTCATCTGCATTTCTTCATTAATTAACAAATT
TGCCTGGAGATAATTTTTACTGCTCCTTGTCTTAAAAACATTTTACTTCCTACCTTTCTCCTTGTCAATA
AACAGGATATATGTAATTTGGGATTTATCTAATCTGTTAGTGATGGATGAAAAGACTCAAAGTGCCAAGA
GATCAGGAAAATTCAGATCAATCCAGGCAGGAGGAATCATTAGGTGTGACTCTCAGAAGGACAGGGATCT
TCAAGTGGGTCACAGGGTCAGACTGGCAAAGCGTTTTCTTCTGGATGTGGGTTCACAAGGGATATAGGTG
ATTCTAGTGAAAGAAGAGAGCCAAATGAGAGTGATTGTGAAGCGTTGTAGTCAGAAATGTGATTGTTTTT
CTTTTTTTAAAATTTAAATTTTATTTTAAATTCAGGGGTACATGTGTAGGTTTGTTATATAGGTAAACTT
GTGTCGTGGGGGTTTATTGTACAGATTATTTCATCACCCAGGTATTAAGCCTAGTACCCCTTAGTTATTT
CTTTCCTGATTCTCTCCCTTTACCCTCCAGTAAGCCTCAGTATGTTGTTCCCCTCTATGTGTCCCATGCG
TTCTCATCACTTAGCTCCCATTTATAAGTGAGAATATGCGGTATTTGGTTTTCTGTTCCTGCAAAAGACG
TGATCTCATTCTTTTTTATGGCTGCATAGTATTCCAATGTACCTCATTTTCTTTAGTCTACCATTGATGG
ACATTTAGGTTGATACTGTGTTTTTGCTCTTGTGAATAGTGCTGCGGTGAACTTACGTGTGTATGTGTCT
TTCTGATGGAACGATTTACATTTTTTTGGGTATATACCTAGTAATGGGATTGCTGGGTTGAATGATATTT
CTGTTTTTATATCTTTAAGGGATCACCATCATCTTCCATAGTGGTTAAACTAATTTACACTTCCACCAAC
AGTGTATAAGCGTTCTCTTTTCTCTGCAACCTTGCCAGCATCTGTTATATTTTGACTTTTAAATAATAGC
CATTCTGACCAATGTGAGATGGTATTTCATTGTGGTTTTGATTTGTGTTTCTCTTAAGATCAATGATGTT
GAGCATTTTTTTATATGATTGTTGGCTGCCTGTATGCCTTCTTTTGAAATGTGTCTGTTCATATCTTTTG
CCCAGTTTTTAGTGGGGTGGTTTGTTTTTTTCTTGTAACTTTTAAGTTCTTTATAGATGCTGGATACTAG
TCTTTTGTCAGATGCATAGTTTGCAAAAGTTTTCTTCCATTCTATATGTTGTTCACTCTGTTGATAGTTT
CATTTGCTGTAAAGAAACTCTTTAATTAGATCCCATTTGTTGACTTGCTTTTGTTGCAGTTGCTTTTGGT
GTCTTTGTCGTGAAATCTTTGTCTGTTTCCATGTCCAGAATGGCATTGCTGGGGTTGTCTTCCAGAGTTT
TTTATAGTTTTGGGCTTTACACTTAAGTCTTTAATCCATCTTGAGTTAATTCTGTATATAATACAAGGAA
GGGGTCCAGTTGCAATCTTCTGCATGTGGCTAGCCAGTTATCCCAGCACCGTTTATTGAATAGGGAGTCC
TTTCCTTATTGCTTGTTTTTGTCAGTTTTGTTGAAGATCAGATAGTTACAGGTGTGCAGCCTTATTTCTG
GGTTCTCTATTCTCTTCCATTGGTCTATGTATCTGTTTTTGTACCAGTGCCATACTGTTTTGGTTACTGT
AGCCCTGTAGTATAGTTTGAAGTTGGGTAGTGTGATGCTTCTAGGTGTGTTCTTTTTCCTTGGGATTGCC
TTAGCTATTCAGGCTCTTTTTTGGTTCCATATGAATTTTAAAATAGTTTTTCCTAGTTCTGTGAAGAATG
TCATTTGGTAGTTTAATAGGAATAGTGTTGAATCTATAAATTGCTTTGGGCAGTATAGCCATTTTAATGA
TACTGATTCTTCCTTCCATGAGCATGGAATGTTTTTCCATTTGTTTGTGTCATCTCTAATTTCTTTGAGC
AGTGTTGTATATTTTTTCTATAGATTTTTCACCTCCCTGGTTAGCTATATTCCTGGGTATTTTATTCTTT
TTGTGACATTTGTGAATGGGATTGCATTCCTGATTTGGCTCTCAGCTTGACTGTTCATGGTGTATAGCAG
TGCTGTGACTTTTGTACATTGATTTTATATCCTGAGACTTTGCTGAAGTTGTTTATCAGCTTAAGGAGCT
TTTGGGCTGAAACTATGGGGTTTTCTAGATAGAGGATCATGTCGTCTACAAACAGGAATAGTTTGACTTC
CTCTCTTCCTATTTGGATGCCCTTTATTTCTTTATTTTGCCTGATTGCTCTGGCCAGGACTTCTAAAACT
ATGTTGAATAGGAGTGGTGAGAGAGGGCATCCTTCTCTTCTGCTGGTTTTCAAGGGTTTCCAGCTTTTGC
CCATTCAGTATGATATTGGCTTTGGGTTTGTCATAGATGGCTCTTACTATTTTGAGGTGCGTTTCTTCAG
TACCTAGTTTATTGAGAGTTTTTAACATGGAAGGGTGTTGAATTTTATCAAAAGCCTTTTCTGCATCTAT
TGAGATAATCATGTGGTTTTTGGCTTTAGTTCTGTTTATGTGATGAATCACATTTATTGATTTGTGTCTG
TCGAGCCAACCTTGCATCCTAGGGATGAAGCCTACTTGACTGTGGTGGATAAGCTTTTTGATGTGCTGCT
GGATTTGATTTGCCATTATTTTGTTGAGGATTTCTGCATCAATGTTCATCAATGATATTGGCCTGAAGTT
CTCTTTTTTTGTTGTGTCTCTGCCAGGTTTTGGTATCAGGTTGATGCACAACCCATAGAATGGGTTAGAG
AGGAGTCCCTCTTCCTCAATTTTTTGGAATAGTTTTAGCAGGAATGGTACCAGCTCTTCTTTCTACATCT
GGTAGAATTCAGCTGTGAATCCATCTGACCCTGGGCTTTTTTTGGTTGGTAAGCTATTTATTACTGATTC
AATTTCAGAACTTGTTATTGGTCTGTTCAGGGGTTCAGTTTCTTCCTGGTTCAGTCTTCGGATGGTGTAT
GTGTCCACGAATTTATCCATTTCTTCTAGATTTTCTAGTTTATGTACATAGAGGTGTTTATAGTATTCTC
TGACGTTTGTTTGTATTTCTGTGGGGTTAGGGGTGATATCTTCCTTATCATTTCTGATTGTGTCTATTTG
AGTCTCCTCTCTTCTTTATTAGTCTAGCTGGTGGTCTGTTTTAATTTTTTCAAGAAATCAGCTTCTAGAT
TTGTTGATCTTTTTAATGTTTTTTCATGTCTCAGTCTCCTTCAACTTAGCTCTGATTTTGGTTATTTCTC
ATCTTCTGCTATGTATGTCACTGCATGTGAGATGGGTCTCTTGAAGACAGCATACCAATGGGTCTTGATT
CTTTATCCAGCTTGCCATTCTGTGCCTTTTAATTGGGGCATTTAGCTCATTTGCATTCAAGGTTAGTATT
GATATGTATGGATTTGATTCTCTCATGATGATGTTAGCTGGTTATTTTGCAGTTTTTTGTGTGGTTGCTT
TATAGTATCACTGGTCTGTGTACTTTAGTCTGTTTTTGTAGTGGCTGTTAATGCTCTTTGCTTTCCATAT
GTGGTGCTTCCTTCAGAGCTTAGTTTGGCCAGATAATGAAATTCTGGGTTGAAATTTCTTTTCTTTAAGA
ATGTTGAATATGCCTTCAATCTGTTCTGGCTTGTAGGGTTTCTGCCAAGAGGTCTACCATTAGTCTGATA
TTCCCTTTATAGGTGACCTGATCTTTCTCTCTGGCTGCCGTTAACATTTTTTTCCTTAGTTTCAACCTTG
GAGAATTTGATGATTATGTGTCCTGGGAATGATCTTGTGAAGTATCTTACTGGGGTTCTCTGCATTTCCT
GAATTTGAATTTTGGCCTCTCTAGCTAGGTTGGGAAAGTTCTTATGGATGATATCCTGAAATATGTTTTC
CAGATTGGTTCCATTCTCCCCATCTCTTTCAGGGACACCAATGAGTTGTAGATGTGGCATCTTTACATAA
TCCCATATATCTTGGGGGTTTTATTCATTCCTTTTCATTCTTTTTTTCTCTATTCTTGCCTGTCTTATTT
CAGAGAGCCAGTCTTCAAGCTCTGAGATTCTTTCCTCTGCTTGGTCTATTTTGCTATTAATACTTGTGAT
TGCATTATAAAATTCTTGTGGCATGTTTTTCAGCTCTATCAGGTTGGTCATATTCCTTTCTATACTGTCT
ATTTTGTCTGTCAGTGACTGTCTTATTTCAGAAAGCCAGTCTTCAGGCTCTGAGATTTCTTTCCCCTGCT
TGGTCTGTTTTGCTATTATTACTTGTGATTTCATTATGAAATTCTTGTAGTGTGCTTTTCAGCTCTATCA
GGTTGCTTACATTCTTCTCTATACTGCCGATTTTGTCTGTCAGTTCCTGCATTGTTTTATCATGATTCTT
AGCTTCCTTGGACTGGGTTTCAGTATACTCCTGTAGCTCAGTGTTCTTTGTTCCTATCCATGCTCTGAAT
TATATTTCTGTCATTTCAGCCATCTTAGCCCAGTTCTGAACCCTTACTGGAGAAGTGATATGGTTGTTTG
GAGGAAGGAAGATACTCTGGCTTTTTGAGTTCTTGGAGTTCTTGCACTATTTCTTTCTCATCTTTGTGGG
CTTACATTCCTTCAATCTTTGAAGTTGCTGACCCTTGGATGAGGTTTTTTTTTTTCCTTTTACCATATTT
GATGACCTTGAGAGTTTTATTGTAGTATAAGGTGGATTCAGCCAACTGGCTTTGTTTCTGGAAGATTTTC
GGTGGCCATTGCTCAGCCCCCAACTCCTAGACTGTGTGCTCTAACTCTGGGGGGGCTCGTATTGGGCCCC
AACTTTTTTCTCTGGCTCCTTGAAGTTAGGAATCCACTGCATTGGGGGGTCAGAGTGCTCCCAGACCACT
AGTCACTACACCACAATGGGTGGTGGCAGCCAAAGCATTTCATAGTGTGGTGACAGTGGGATTCATCCTT
GTTTACATGTGCCAGCAGCAGTGGTAGCAGCAGTGCAGTGGGGGACACACTTGTCAGCTATGCCAGGGTG
CTGGTGGGTGCCAGGGTGCCTGCCTCCCTGAGAGCATTCACCACAGTGGAGGAGGCAACACAGCTGGGAG
GTGAGCGGGGACCCCTGCTGGCGACTGTGCACAGTGGCACTGGTGGTGGTGTTGGCTTGGGGGCAGGGCG
CTGGCAGTTGCAGGTCTGTGTGCCTTCTCTGTGTACTGCAAACAGGAGTGGTTGCTCCATGCAGGGGAGG
ATCTGTTATTCTCTGTGCCTAGTTTCACTCCTGCGGCAGTGTTGGTGCAAGGAAGGGGCACTGGTGGAGG
CAGGGCTGGCTGGTTTGGTGCCCACCAAGGTTCTGTCTGCAGTGGTGGTCAGTGGGGACATGGGAAATGA
ACTGCACTCCCGCCACAGCAGTGTCAAGGTGGATACATGTACACTTGCCTGCTGGTGGGGCAAGAAAAGC
AAAACCTGCCGGCATAGGCACATGCCAGCAAAGCCATGTGGGGAGTTGCTATGGGCCTAGGGAAGCTGCA
GTATGGGGACTGAATGTACAGGCTGGTGCATAGCCATGGGGGCCACTCTGCTGGAGCTCTCTGCTGGTCA
GGCATAGTCTGCCAGCACAGAAGCTATGATGCAGTCCCCCAGGCCACCCAAGGCTGCCCTGTAAGCATGT
GTGGCCAGGCTGGGGCCCTGGGAGAGGCCAGCAGGCCAAGGGGTGGTCAGATGAGACCGGCCCCATATGA
TGGACAAGACTACCCTGCAGAGTTCGGGTCCAACAGTTGCCTTAGAGCTAAAGTCTCCTATGGGTGCCAG
TTAAGCCTAAGGGGATGGCTATCCCTGGCCATGCCCCACCACAGATTCTCTCACACCAAACCCTCTGGGC
TCCATATCAGCTGGCTTGCTGCCCCTATCACTTCTCTAAGTGGCTCACCCTGTCAACTTGAGTGTTCATG
GTGGGCGAGAGGTTCCAGAGGCCCGTGGCAAGAGTGGGTTGCTCCTTGCTAGTTCAGCTCACTTGTTTTT
CCAGAGCTGTTTGGGCCAGGAATGAGTCCAGGTGCGTAGTCGCCTCATGTATGGTTCCCAGCTTCCTCCC
CCTTCAGCCCAGCTTCTGTGTCTTCCCTCCATCCACTCTTCAGTGACCCCCTCTGAAGATCTGTTAGGAG
CACACCAGTTGTCTCAGTCCCTCATTGGCAGCTTTTCCTCCTGGCTGTGTCTAGTCAGCCATCTTGCCCT
CCCCCTGGTTTTTTTCTCCCCCGTTCTTTGTCTTCAATTTTTAAAAACCTTGGTCAAAGAACTCTTTAGG
CTAAGTTTGAGAACTCCGTAGTCAGCTTCCATGCTGTTAGCAGATCTTATGAAATCATTTAAAGTTTTTA
TAATTCTGCAGGTGGGTCTTGTCTAACATGTGATAGAGGGCCAAAAGGCCACACTACTGAAAGCTTAAGG
AGGGGTGTGTGTGTGTGTGCGTGTGTGTGTGTGTGTGTGTGTGTGGTGTTTTGAGGGTTGCCTTTTCTCT
TGGTTGTGGTATGTTAGGAGTAATGGCTGTTACATACTGATGTGCTTGATGTGCTTTGTCTTTACGGGTT
ATAGCAGTGTAGACATGAGTCTCCTTTTGGGATAATCTGTTTCCCTTTTTTCTTCTGTCTTTGCTAAAAG
CTATTGCTCATTTCTGCTGAGCATTGCAGTTACCCCTTCTACCTACCATACTTTCTAATTTTGGATCTTC
TGGTGGATTGTGGGCTAGGAAATACGAATAGTTAAGACTCTTCAACTTGTTTTAATCAAACAGATGAGTC
CTCATGATCTTTATCAAAGCAAAGTAGGTGGGCTTAGGGTCAGCCTCTTTTCTTTTCTTTTTTAAAATGT
TCTTTTCTTGCTAATAAAAGCAGTAGCCATTGGAGAAAATTTAGAAAAGACCAACTATGAAGCAAAACAT
AATCATAATACCTTGAATCAGAGTTAATCTGTATTAACATTTGGTGTATTTCCTTTAAGCTATGTAAGTA
GACTTCAGTAAAAATCCTTCACAAAATTGGGATTTTAGTATAGTATACTTTTTATATCGATATGTCTTTT
AAATGGTAAGCATTTTTCATGTTAACTATTTTAATACAGCTTAATGTTTGCATATTTTATTATGTACATT
CATTCATTATATTCATTCACAGTTTATTTATAAACATACAGATTTTTTCCAATTTGTCCAGTTTTTATAA
AAGAACAAATCCCCATTGACTTTTTTTTTTTTTTTTTTTGAGACTGAGTCTCACTCTGTTGCCCAGGCTG
GAGTGCAGTGGTGCCATCTCAGCTCAGTGCAACCTCCACCTCCTGGGTTCAAGCGATTCTTGTGCCACAG
CCTCCTGAGTGGCTGGGATTACAGGCACCTGCCACCAGGTCTAACTAATTTTTGTATTTTTGGTAGAGAT
GAGGTTTTGTCGTGTTGGCCAGGCTGGTCTCAAACTCCTGAACTCAAGTGATCCGCCTGCCTTGGCCTCC
CAAAGTGCTGTGACTACAGGTGTGAGCCACCGCACCCGGCCCCAACAAATTCTTAACATCTACATTTATT
TTCTTCTTTTCCTTTTTTGTAGAGAAAGGGTCTCACCATGTTGCCCAGGCTGGTCTTAAACTCCTGGGCT
CAAGCCATCCTCCTGCCTCTGCCTCCTAAAGTGCTGAGATTACAGGTGTGAGCCACTCTACCTGGCTCTA
CATTTATTTTTTTTACATGGATTTCTAAAAGTAGTGTTTACCAAGTCAAGGTTAAGAAATTTTTTTTTTT
TTTTTTTTTTTTTAGACGGGGTCTTGCTCTGTCGCCCAGGCTGGAGTGCAGTGGCACGATCTGGGCTCAC
TGCAAGCTCCGTCCTCTGGGTTCACACCATTCTCCTGCCTTGGCCTCCCGAGTAGCTGGGACTACAGGCA
CCCGCCACCACACCTGGCTAATTTTTTGTATTTTTAGTAGAGATGGGGTTTCACCGTGTGAGCCAGGATG
GTCTTGAGCTCCTGACCTCGTGATCCGCCTGCCTCAGCCTCCCAAAGTGCTGGGATTACAGGCATGAGCC
ACCGCGCCCAACAAGGTTAAGAATATTTATAAGTGTTTTAATATCGACTCCCACATTGCTTTCTGGAAAA
GTCATGTGCTTTGTATTTCAGCACTTTATGGGTCTTTGATTCCAGATAACTTACCCGCACAAGTTTCGTT
TTATAAGATCTTTGCTAATTTGATAGATATAAAATGCCATTGGATGTTTTCCTCTGATTGCTAGTGAAAT
TAAGCCTTTTTTCATGTTTATTGGACATTTATATTTTTGTGGGAATCATTCTTGTCCTTGAGTTATTTTT
CTGTTGAGAGCTTAATACTTTTTACAAATTTGTAAGTCTTTTGTGTACTAAAAGTTAAAAGCCCTTTGAT
TTTTTTGTAAATATTTTTCTCAATTTATTTACCTTTTAATTTTGTTAATTGGATTTTTTAAAAATAGAAG
TTTTACATGGTTAAATTTATCATTTTAAAATTACTTTTTCATTAGTTTTAAGCTCAGAAAATTTCCTTTC
ATCCAGAAATTCAGTTACATCATTCACTTACATCTTTTTTTAAAACTAGACTTTTCCATTTTATTGGCTG
TATTTACCCATTCTTCCAGTTTGAACTTTAGAATGACTTTTTCAAGTTTCTTACAAAAATAAATTCCACT
ATAATTTTTTATTGGAATTGCATTTAGTCCTCATTCTTATAAGTAGCTTATTTCTAGTACTTTAAAAAAA
TTTACTGTTGTAGATTGTGATTGTTTACTCCCTTGTGTTCCCTGTTTTCCCTCTCCCTCCCTACTTACCA
GTAGATGAAATTCTAGCTGGTTATTAAAAGAAATACTGCTGGATACTTGTGGAGGTGAAGGCTTGGCAGA
AAATAGGTGTCACTGGTATCAAATCATTGAAAAGTGGGTTAGGATAACTTCCTTACCATGGTTGGTGGAA
CTCGTTTCTCTGGAGTTGGGTGAATGGTAAAGCAGGCACAAACCTCCTTTTGTTTTCCTGTCTGACGTTA
CTATTCTGTACTTTATTGTAGAGAAATTATTCCTAAGGTCTTCTAGATTTTTTATGAAGTATTGTTGGTT
TCCAGGACTCTCAACACTTTATATTTCTTATTTTCATGAGTTTTTTTGATGAAAAGGGTTGAGTAGGATA
ATCAGACAGAGAGACACAGTTTCGGCCGGGCGCGATGGCTCACGCCTGTAATCCCAGCACCTTGGGAGGC
TGAGACAGGTGGATCACGAGGTCAGGAGTTCAAGACCAGCCTGGCCAAGATGGGGAAACCCTGTCTCTAC
TAAAAATATAAAAATTCGCCAGGTGTGGTGGCATGCGCCTGTAATCCCAGCTACTTGGGAGACCGAGGCA
GACAATTGTTTAAACTTGGGAGGCAGAGGTTGCAGTGAGCCAAGATTGCACCACTGCACTCCAGCCTGGG
CGAGAGTGAGACTCCCATCTCAAAAAGAAAAAAAGAAAAAGAGAGAGAGTCTTCATCTAAACCTAGAAAT
TCTAAAAACTAGCTGTTTGTTCACTATTTTTTGGCAGTGTAAAGAATTCTTAAATAACTAGGTATTTGAC
TTCCTAAGAAGTGGGGTATCACCATATATATGCATTTGAGAACTTGAATTTACAAATAAATACAGAGATT
ATTTTCTATTTTTATATCTCAGGGATGTTATTTCAATGCTAATAGTGAAAAATACTACCACCTTTCTGCT
TTTAGGTTGGAATGTTGCATCAGCAGGTAGAAGAACATGAAAAAATCAAGCAAGAGATGACCATGGAATA
TAAGCAGGAGTTGAAGAAACTACATGAAGAAGTGAGATTTTAGTTTTGTTAAATGTTGTGTGTGTAGTTC
TCTCTCTTTCACCCTTGAGAACTTTGTTAATGAAAGCCAGTTTCTACTTTGTAAAGTGGGAAATACATAC
TCCATCAAAGATACAGGAGTGGGAATCCATTTCTCTGTTCTTTAATCCAGGTAAAGAGGTTTGCCTAACT
GTAGGTTTGATACTACCTAGAAGAGATGCTAAAATATGTTTCTTGGTTGAGTACCTGAAAGAAATAGAGC
TGTTTTTATGTAATACTGTGAAATACTTGATACCAAAAATTACATTTAATATTTTAATTTTTATCAGTTA
CTAGATTATAAATAATGGAGGATCCAAAGATTTAAGAAACATTTTGGGATAAATAAGACAAGTAAGAAAA
TTCTGTCCATTAACTCAATTTTATTCTTCAGATTTGGAAAAAACTGCTTTTATTCTGATTTAATTGCAAA
GTACTCTTCTCCTGCATCCTGAATATCAGTGCCCTGCAAGAGCATGGCTTGAGAATCACAGACCTAGAGG
AAAGAAAAAGAGTTTTTATTTGCTGCTTTATTGTGGGGCTGGGTGGTAGGGTCTTTAAGTGCAGGGCTAT
TGTAATACAAAACTTTTGTTTAAAATTTTTTTTAAAATTTTTTCTTTGAATATATTTCTTTAGTAGTGTT
TGTTTTACATATTTAATTTTTAGTTTCCTTTTGTGTTTTAGTTTGGAAATCTAACATGTTCTCAGTAGTA
CTGGTTAGCACTGCTCTTGTTTTCATAATACCAATTTGTCTCACCACTACTTCTTACAAATTCTTAAACT
TTAAATATAGAAATAACTGTTTCTACAGTTATGCATACTGAAGAGAAGCTATGAAAAGCTTCAGAAAAAG
CAAATGAGGGAATTCAGAGGAAATACCAAAAATCACAGGGAAGATCGGTCTGAAATTGAGAGGTTAACTG
CAAAAATAGAGGTATGTTCATAGTAATAATTTGTTCATAGTGATTGTCAGCCTTCACGTAGGAAAATGCG
GTTTCTAATGGCACTATTTTCTGGAACCAATTTTCTACTATCTTAAGGACTGCCACTAAGCTATTTCAGA
GGTGAGAGGGTGATCCACCATACATCCTATCATCATCTAGTTCCCTGGGTTAACGGGGTTACTGGCCATC
AGTAATTCTCAACAGGGCAGTACCACCCTTAGGGAGCATTTGCAAATGTACGGAGACATATTTTTTTGGT
TGTCAAAATGACTGAGCTTAATAAAACTGGCATTTAGGGGACAGGGACCAGGGATACTAAACATGCCTAA
GAGTGTTCCACACAGGAAGGATTATTGTACCTCAAATGCCAGTAACTCTCCAATTGGGAAACATGACCAC
TAGTTATAGGCAGTCCTCTATGGACATTGTTCTTGTCTTATATATCATTGTATCTCAAGCACCTAATAAA
GTGGGGGCTTAGTAAATGTGGAAAGTACATGGCACTTTTCGTACAAAGTAATCTCTGTATCAGATTATTC
TCAATTCCCATTTAGATGTAGTAAGGCATTCACTTCCTTCTCTGCTGACTTTGTTTTTATTAAGACTGAA
TAACTCCATGATTATTGTATATATTGAGAACTTAAGGGGAGCTGGTGAGCTAATAGTACCAAGAGTAGAT
GAAGGAAGAGCACAAGGCTGTCATTCTCTTCGTCTGTCCTTGCCATTAGTTCTTCACTGGACATAAGAAT
TCCCAGGGTGCTTTTAGGCTCTCAGAAATGCTGATCCAGCAGTATGGCATAGGACCTAGGGATCTGCATT
GTATCCAGCTCCCCTAGCTTATTCTGATTTGAGAAACATTGTTCAACATCTTTGTGTGATCACTTACAAG
TTTGTACTCTGGGTGACCTGTCACCCACAAATGCCAGTATATTATTATTACTTAAAATTATAATTTCTGT
GTTTAATATTCCTTTATATCTCAATATTTTTTTACATTTGAAGAGCTTAGAATCAGAAGACTGCAGCTAC
TGCTTCCCTTCCACCCTTTTCGGCAATACCTTTTCCCCCCAAACCCTATATCCTTCTTGCTTCTCATTGC
CACTTCCTGACTATTCTCTTTTCTTTCTACCTCAAAAACCCCATCTTTGATTTTCATGTTACCAGCCTAT
ACTGCCAGCCAATGAACATAACAACCAAAATAGTCATCGTCTGACCTCTGGGTTATTTCCTTGGCTCATT
GATTTCAGCACCCAGCTCACTGTCAATTCTCTCTGACATTACTCTTATCATAACTTTGAGGATCTTAGGA
TCTGGAGAGATGATGCTTATAATACTCTGACCTTACAGTTTCTTGGCTTTCTTTCCTCCATAGATAGTTT
GATTATCTTTGTGTCTCATCTACTTATTCCCACTGCCATTCCTTAGCTCTTGTCATTACCAATATATGCC
ACCCCTCTAGAATCTCATTTTCAAGCATTCAATTATCAGACTACCAATCCCTATCTTTTCAGCTAACTCT
CTCTAGTCCTTTGACTCTCAGTAATCATTAACCATCCCTTAAAATGATTAAATTCTGCCACCTTTTTACT
GCTCCATTATCTACTTGGTGTTCTCACTTATCGGTCCTTAGCCAGCTTTTAAATTCTGTCATTACATTTT
TTACTTTCCCCTTCATCTCCTGTGCTCCTCTCTTGCTTCCTCATATTTGCTTGGCAGAATCACAGTTCTG
CTTAAGTCCACCTTTCTGCCCACTCTCTACCTGTCATGTATCGCTGAACGTGGCTAGAGAAAAACCTAAT
CATACTGTCTGTTCTCACTTTAAATTCATGGTCACTAACCTCAAATGGGTCCTAATGCTACCTGGAATCA
TACTGTATTTCCTCTCATCTCCTACTTTCCACAATGAGTATTTCAGACTTCTGCTTTTCTCCTCAAACTC
TCAACACCTTTCCCCACATCCTCACCTTTGGGTTATATCTTCCTTTCTGTTTATAGACTTCCAACTCTTG
TGTCCACCCACCTATCTGCATCTGTGCCCATGTACCCTGCCTTCCTTCCTGGAGGAACTACGCATGCCCT
CCCCCTTTTCTACCCAAGGCATTACCTTAGCAGTTCACCTTCTCTTTTCTGCACCCTTAATTTTTTTTCT
CTACTGGATATTTTTTACCAGCATCCAAATTTCCCTCCTCTTAAATATCCTCTCTTGACCCGTCTCTTCC
TCCTCTGCCCCATTTTATTTCTTCCATTTTATAACTAAAAAATTACTTCAGTCATCTATACTTGTCTCCA
GTTCCTCTTGTCTCATTGTTCTTGTACCCACTCAATAAGGCTTTTGTCCCCTCACACTGCAGAAGCTGTT
CACATAGAGGTCACCAGTGACTTCCACATTCCCAAAGCCTGTGGGCTGGTCCTTATCTTCCTCATCCTAC
CTACAGCTTTGTAGGAGAGCTGGTCTCTCCCAACTCCTTAACCACTTTCTTGACTTGGCTTGAGAAAAAC
CACATTTCTCTCATTTTTTCCTTGTTCATCACTCCTCAGTCTCCATTATTCCTTAACCACCTAGGGTCAT
GTCATTGGACCTTTCCTTTCCTTTTTTTTTTTCCTATCTACGCTCACTCCCCTATTGATCCCATTGAATT
TCATAGCTTTAACACTGTGTATATGCTGACAATTCCTAAATTTATATATCTAGCCAAGACCTCGCCTCTT
CATGACAGAATAACTTTCAACTGCCTGTTTCCTATCTCCACTATGATGTCTAAAATGTGTCAAACTTAAC
ATGTCCAAGCTAAAGGTCCTGTCTTTCTCTTCCTCATCTCCCCAACACTGATTCATGTTTTAGTTGATAA
CAACTCAATTTGCTCAACCTAAAACCTCGGAGTCATCCTAGACTTCTCTTTTCTCAGCATGATAGCCAGA
ATGATTCTGCTGTAATGTAAGTCAAATTATATCACTTCCTATACAAAAACCTTCCAGCAGCTTCTCTTAA
AAATCTGTTATCCTAATGGCCTACGTGGTCTCATTCCCAGTTATCTCTCTTACCTTGTCTTCTCCTACTT
TCCCTTTCATTCACTTTATTCCAGCCACACCAATTTCCTTTCTCACCCTTAAACACACCAGGATGCTCTT
ATTTCAAGGCTATTCTTTCCACCCAGAATATTGTAACTTCACCCTCATCTCCCTAGGTGTTTACTTAAAT
GTTTTTCACTCAGTCTGGCCATCCCTTTTAAAAATTACAACCCCAACTGTGAAGACTTCATGCTCTGTTT
TCTCCAAAACGTGTATTACCATCTGCTATACCATACAAGAAATGTGTCATCTGTTGCCCCCAGTTGAGTA
GGACTAGGGTTTTTGTTTGTTTTGTTAAGTATTGTATCCCTGACTCCTAAAGCAGTACCTGGCATATATA
GTAGAATGATTGAATGAATGAATGAATATCAGAAATTTGGTTAACAACACTTATCTTAAGGAGCCTGAGA
CTTCTGGAGTTGAGGGTCCTGGAAGACAGTGATAGAAAGATTGAGTTTCCTTTCCCTTTGATTTGCCCCA
TTTTCATAAATATTGAAATCACTTTCTTGATCATGCAATTTGATGTTACTATTGATCCATCATTAATTTT
GAACTGTTTGGCTTTGGGTTACAAATATTTGTTAAAATTTGGTACAGATTTTCTTTGTTATTCAAACTTT
TGCAGTTCCTCTGTTGAGATAATACAAATTTGGATATCAAAGGATATTGTGTTATCTGAATCTACTTGGT
TCCTTAGTTTTAGATACTGGGAAGTAAGATTTGGGTTACCAAGGGACTTATCTGAAAATTTAATCTGTTC
AATTCCTGGGTCTGGATATCAAGAATTTGGATAGCGAGGGATATCTGTAATCATACTTTAAAATTTTAGT
TATCTTAGCATCAGTTTTCTGAAAATTCACTAGAAAATTATAACAACCCTTAGGTGGCAGCAAATCAGTG
AAAAACATCTGAATCCAGTGCTTAACATCTGCGTGTCATACTCCTCACCATCAGGGTGTTAAATTTAGAA
AGACAGATATCCAGAGGCACAGTATGTGAGGAAGTTAGTATTACTCTCCAGCTCTGTTAGCTGAGTGAGT
AATGGGGCTCCCGCTGTGGAGAAAGGTGCAAGCGTACCCAGGGACATGGGGAGAAATTAAAGTTAAAGGG
AGTCTGGGAAGTAGTGACAGTGAGGAGAAGCACTCAGAAATTAAGTACTCTAATTGCCTCCTCAGGAATT
CCGTCAGAAATCGCTGGACTGGGAGAAGCAACGCTTGATTTATCAGCAACAGGTATCTTCACTGGAGGCA
CAAAGGAAGGCTCTGGCTGAACAATCAGAGATAATTCAGGTAGGCCTAAGACTTTTTAAAATAATGAGAA
GCAGATAGGTTTTGATCAAGTTTGAACTACCTTAATGCAGTGTCCTAGTACCATTTAGCCTCTTTCAGCT
TCTCTCCACGAACCCTGCTCTCTTGTTTAGGAAGCCTCTCCTCAGCATCTAGACTCAGCTCCTTCTTCCC
GCCTGCCCTCACACATGCGTGCATTCACTCTCCTGTCCAGGCTCATGTCCTTGTGCCCGCTTGCTGCTTT
GCCTCCTTGCTTGTTTCTGACTTGCTCACCCACTCTCTGTCATTGTCTTGCTTACTCAGGCTCACTCTAT
GCTTGCATCCATGTTCACTCTCCTCATCTTGGTCCCTAGCTTTGTCGCCCTCTCTTCCTCCCCTCTCTTT
CTTCCCTACCACAGTCCCATTCCTCCCTCTGTCTCCTTTTCCATGTCTTTCTGTCTCTTGTTGGGTCTCT
CAGCTCTACTATAGTCTGTGCCTTGCTCCATCCCTATGGTCACTGGGGTATCTTGGCCGAAGTGTCTCAG
CTAGGGAGCTTCAGTTAGTCTGCCTATGCGGACAGATACGGAGAGAGTCACATGGCAATGGTGTGCACAC
CAACTAAAAGTGGTGTCTTTGTGGTAACAAAAACACTTATTTTAGAACATTGATAGAAACTTTTCTTGTA
ATGGCTTAAGCAAAACCAAAAAACAGACACCTACTTTAGGAATATGTCTTGTAAGAACATATTCAGCTCA
TTCCTTTTTCAGTTAGAATCAAGAACATAAAGGAAACTAAAAAAATTTGTGATCATCTGTTATGTGCTAG
ACATTGACCCAGTGCTTCTTGTATGTGTTCTCTGTTTAATATTATGATAATCTGTCAAGGTTGGTAGTTA
TCTTAGTTTTATAGAATGAGGGAACAGCCTGGGTAAGTTGAAATAGCTAGAAGGGAGGGTTTTTTTTTTT
TTTTTTTTTGGCTTTTTGGGTTTTTAAAAATAATCTGCATTTATTTGCTATTTTAAGTCTCAATAATGCA
TTAACTTTTTGTTCGTCTCCCTGAAATATCAGCAGTCTGATAAACTACCGACAGTGGCTGTGGCTCTGCT
GTGAGTGACTTCATTCAAAATGGTAGGAAAAGTCCACAACAATTGCAAGGAAGAAATTTATTTTCTAGGC
CACAGCAAGCTGTGCAGCCAGACAGACCAGTGAAATCCTGAGATGTCTGGACCAGTTTTTTTGACTTGAA
TGCCAAAGCACCATAGAGACCTAATAAGAAATTGTGTGTGTGTGTATATATATATATATATATATGTATA
TATATATTTTTTTAACAACAAAAAATTTTTTTTGGTTTTCTTGAGATGAGGTCTTGCTGCATTGCTCAGG
CTGATCTTGAATTCCTGGGCTCCAGCAATCCTTCCACCTTGGCCTCCTAAAGTGCTGGGATTACAGGTGT
GAGCCACCACACTTGACCAAGATATTGTTATATTCTAGTTGTAGCCTTCAGATTGACAAAAAAGCAAATT
GAGTCTTAATTTTTACAGTTCTCAATTATTTATCCATGGAGTATTATTGATTATAGATTCTCTCTTCAAA
TTACTGTTATCCTATTTCATATTACTGTTGTGATTATTGACTCTATGTAATTAAAACTTCATTATTAGTA
AAAATGGGATTTTTACTTACTGTAATTCAGCTAGGGCTAGGGTAAGAAGCCTTTCAACAGCCAACATTTG
TTTTTCCTACTAAGGGTGTTTGAATTAATTCTTCTGATAGTTTTGTTTAACCTAAAACTGTCTGATTGTT
TAATAAAAATGTTACATATAAATGTATTTATCCTTCTCCCTTAGCAAACTAAATAAAATTAAATCTTTCA
GTGATTCAGTATATACCAGTGCTGTATGATCATCATTTTTTTAAACATCTAAATAAACTTATCTATATCC
ATTAAGTAGCATTAATAGTTGTCATCATCTTGTCAATCTTTATTTTAATTATGGTAAAATACACATAAAA
TGTTCCACCTTAACCATTTTTAAATGTATAGTATAGTAATGTTAACTATATGTACACTGTTGTGCAACAG
ATCTCTAGAACTTTTTTATCTTGTCAAACTGAAACTCTATACCATTCCCTACTTCTTATTTTTGGGTGGA
ATATTACAGAGCAAATCATAGATATCATCTTATTTCCCAACAGGTAAGGACTTAAAAAATAACAATATAT
CAGTATCACATTAATAGAATAATAACTTCTTAATATAATTTAATATCCAGTCTGTTCACATTTCTCCAGT
TGTCCAGAAAACTATCTTTTTACAATTGAATGTTTGAGTCAGAATCCAGTCAAGGTTGATGTATTGCATT
TGGTTGAAAGGTGGGTCACCATTGAACAATGACAGTAGAAAACCTGGGAGGCTGAGTAAGTGGATATTAA
CCTACCCTCCATTAAAAAAAAATCTCTGTATAATTTTTTTCTTATATGTTTTTAACATCTAAAAGTATAA
TTCGGAAACAACTTCTCCTTCTTTGACATATGTTTGCTTGAATTCATTTCTTTTAATCAGCTATTAAAAT
TACATAATACATGCTTATTTTAGAAAAATGAGAAAATGCGGATAAAATGAGAAATAAATAAATCACCCAT
AATTCTACCGTTAAGAGATTTACGATGAATAAAATTTTGGTGTAAATTTCTTCTGACTTTGTGTATGCTT
ACATACAGTGTGCAGTACATTCATGTACTTTTGATAGGAAAAACCTATATGCACTGTGAATGGGAAAGGA
GGGGTAGTTGCAAACTTTAAAAAGTCCTGAGAGTAGCAAAGTGTTGATAATTTTTGAAGCTGTGTGATAG
GGGTTCATCATCTTACTCTCTCTATATTTGTGTATGCTTGAAATTTTCCATGAAACAATAACTTTAAAAT
ATATAGAATGCTTACTAAGTGACAGGTACTATGCTAAGCACGTCACAGCTTTAAAATTTTTCCTTTTTAA
ATATGACATGTCAACAGATTTGTAGTCATAATGATTGTGTAGAATTCCCCCCTATCGTTAAATGTATAAT
GACATTTGTAACCAGTCCCTTATTGTAGAACATTTAGTTTTTTACTTTTCACTTTTGTAAATAGTGCTTA
GATTAACATCCTTATATAAACATTTAGGAGTATTTATTTTCTTAGGAAATGGCCCTAGAATTGGATTTAC
TGTATCAGAGTACCTTCAAATATTTTAATATATATTGCCAAAGTTTTCTCCAATGATGGATTGATAGACT
TTCTCTAGCAGTATGTGAGAATATCCATTTCCTCATACTTTCCCCACATTGAGCGCTATTATTTCTTTTG
ACTTTCCCCACTTTTAGGCTTGTCTTTGCCAATCTTATAGGTGAAAAAAAATGATACCATTGTTTTAATA
TACATTGTTTTAATATGAGTGAGGTTGAGGACTTTTTTCATCTGTTTATGGCCATCTTCATTTTTCATAA
ATTATTTGTGTCCTTTATTCACCTTTGTTTTAGGATTTTTTTTTTTTTTTTTTAAATCTTAATTTATTTT
CTTTTTTGAGATGGAGCCTCGGTTGCCCAGCCTGGAGTACAGTGGCCTGATCTCGGCTGACTGCAACCTC
TGCCTCCCTTCAAGCAGTTCTCCTGCCTCAGCCTCCTGAGTAGCTGGGATTACAGGTGCTCACCACCACG
CTCAGCTAATTTTTGTATTTTCAGTAGAGACAGGGTTTCACCATGTTGGCCATGTTGGTCTTGAACTCCA
GACCTCAAGTGATCTGCCCACCTTGGCCTCCCAAAGTGCTAGGATTACAGGCGTGAACCATCGCACCTGG
CCGGATGTTTATATTTTACTATTCTGAAAGAGCTTTCCATACACTTAAGTATGAAATATAAGCCCTTTGC
TATTATGTTACAGTTGCGTATGTGTACTCAATTTACCTTAATTTTTGCCCAGTATTTTTTATGGAAGTAC
AATTGTTTTATAAACAGTTAATTAGAATTGCTTAATTCTATCAATTTTTTGTTCAGCGTTTCTATCTTTG
ATATCATACTATAAAGTCTTACCTAAGTCAAATTTCTTCTAATGCTTTATCATTTCTTTTTAATACATTT
TATCTAAAAATTACTTTAGTGTAAGGTATTTGATAGGAATCTAAATTTGTTTTTTAAATGGTTATATAAT
TTACTGACTATTACATTTTCAGGATTGGACAAAATGACTCTAAAATTCATATGGAATGATAAATGAACGA
TACTAGCCAACTTTTTTTTTTTTTTTTTTTTTTGAGACGGATTTTCGCTCTTGTTGCCCAGGCTGGAGTG
CAGTGGCACAATCTCGGCTCGCTGCAACCTCCGCCTCCCAGATCAAACGATCCTCCTCCTCAGCATCCCA
AGTAGCTAGGATTACAGGCGTGCACCACCATGCCCAACTGATTTTGTGTTTTTAGTAGAGATGGGGTTTT
ACTATCCTGGTCAGGCTTTTCTCGAACTCCTGACCTCAAGTGATCCACCCGCCTCAGCCTCCCAGAGTGC
TGGGATTACAGGTGTGAGCCACTGCGCCTGGCCACCAGCATTTTTTAAAAAGGAGTAATGGGGGGATGTT
TGTTCTATCAAATATTAAAATGTATTTTATTAAAAAGTACAGTTGTTAAACTGTAATGCTAGATGTAACA
AAAGAGTCGTGGTTATATAGTATAGGAAAAGGATCAGTACAGTCTAAAACTAAGGTCATTTCTGTTTAGA
AGGCTACTTTTTCTGTTGCCTACATAATGCAAAGGAAATGTTCAAGGAAATCTTAGAGAACAGTAAGAAC
ATTTGAAAAAAATTAAAATATTAAGCCAACATAAAATGTAAAATATTTAACTGATAAACAGTATGTGAAA
AAAGTAGAGGTTGCTCTATGTTTTCCTTTTGAAATACTTAGATGAGCTGTAAAATATTCTTCAAGTTAAT
TTTAAATCCACTGTTAATTATATGTATATAAATATATTTATACGTATATATGTTGTATTTTTAAAAGCAT
CCTTTTCCTGTCACAACTTTTGAAGAAAAAAATGACCCTAACTCAAATGTTGATCTGTTGTCTTGGTAGA
ATTATCAGAGTTAATTGAATTGGCTTAGACCTACTGTTTAAAAGTTCGTAGTAGCATAGACACAACAGTG
ATAAGAGAATCTTACTAGGAGCTGTGTTGTTAATAGGCTCTTTAGGCTGCTCTCTAGTGGAAATGCTGTG
AGGCTGTGGCCTGCACTGGCGCATTTGGAGTTGACAGTGATGGGGAGCTTGGTAAGGGATTGATGCTTAC
AATGGCCGTACCTTCATACTGGGATTCTTTGGAAAATAAAAAGCCTTGTTGCTTCATATCACATTGTTCA
TAGTAATCTCACTCTCTGGGAGAGTCATTTTCTTGAAGCACCAGGAAGTAGCTATCACAAATCCAGAAGA
GGATTTGAATTCAACCCCCACTCCCCAATTTCTTCTCCACTCTCTTTCACACTTTAGCTGGCCACACTGG
CCTTTTGTTTCAGTTTCAGTCTCCCTGATGTAAACTGCCTTCTTGATTGCTTCTTTACTTTTAACCACCT
CTGCTGTGATTTGTATTGTTGAAATAACTTCTACCCACTCCAATAGAATGCTAAATGTTAGATTAATAAG
AGGAATGCCTGTTTCTGGCTCAAAGAATTAGTGGTTAGTGCAAAAAAAAAAAAAGTTTAAAAATATGCCA
GCCTTAAAATACCTCTAAAGCCAGATAATTATCAGAAATAATCATTATTTTAGAAGTTTTTAAATAATTA
TTTCTGACTTTCTTAGTATTGATGAAGTGTTCTTGAGATTAGTGTAGTGCTAATAGATATTGGTGAGTCA
CATGTAATTTAAAATTTTCTACTAGTCACATTAAAAAGTAAAAAGGTGAAATTAATTTTAATAATATATT
CAACTCAATATGTCAGAAATATTACAACATTTACTTTACATTTTTTTAATGAGTCTTTGAAATCTTCAAC
TGAATTTGTATTTTACGGTTAAGAGCACATCTCAATTCAGATTAGCCACAGTTCAGTTGTGCAATATCCG
CGTGTGGGTGACTGCAATGGTATTGCAGCCCTAGTGCATTCTAGGCAATGAAAATTTAGAATTTGTACTT
GAGTTGATTAATGTACTTTTCACTATGCTTAAAAAACACTGTATTTTTGTGTGACCAAAATAGTAAATCA
GTGAAAGAAGGTTATGTTCTCCATTCTTCAAAACTGAGAAGTTTATTAGTATTTAGCAAATCTAGACTCA
CTGGTTAAAGTATGCCTTGGTTTAACTATTAGTTTATTATATCAATACTGAGTTTAAGATCACAGATTTG
AGTTGATAGTGTTAGGTAGCTATTACAGTATTAAAAAGATAGTGTTTTGCAATTATGTATTATCTGAGTG
CCCATTTTGGCAGTGGGTTTCTAGTTGTGTTTTGCTGAGACCCAGGGCTGCTGTACAGATTAAGGGTAGG
ACTAAGGGACATTTCAGCAAGCTGGGCTCTAACCCTTTTCTCCTTCTCACCCTCACCCAATATCTGCATT
TATTTATTCTGCACAGGAAACCTTTCCTCTTTGAAAGAAAAGTTTATATTATATTTAAAAGTTTGGAGAC
AGTTCCATGCTTAGCAGTTGTTCTAGTGAATCTAAACCTAAATGTTGATGTTCTTCCTTTATACCATTGT
AGGGATCTGGTTAAAAAAAAAAAAAGGCTCTTTGCACTGAAATCTTGATCGGTAATTTATACAAACAGTA
TTTGTCTATCTCTTCACCTCTCTCCTACCCTCTCTCTGGCTTATGGGAAGTTTTTAGCATCTACTTTATT
TGACTACAGTATATAGTACAGGATTTGGACCTGTACTGTAAATAATAAAATCTTTAAATCTGCAATAGAT
AGATTTCCCAGAGATATTTCTACTTGTATTTCTAAAGTAAAATTGTGTGATTTTACCTTTAGAAATATTT
CGAGTAAGGGAAGTTTACCTCTACAGATTATTTATATTCATCTTCAATGTGTAGATGAAGTACCAGCCAG
GATGCTGGATTAAAACTTGTAAAAACTAAAAAGTTTGGAGCTAAAACCCAATACTGCTGGGATGCATAGC
CTAAAACATAGTAGTCAGTAAACGTATCATTCAGAGAAACCAGTTTGAGATGCATTATATTTGTTTACCT
CTTTTAACTCAGGAAGTGTCCAAAAACTGATGACAGAACCAATCTCTCCTCCCTTATAAGCACCTTTTCC
TCCAATAAACAAAAGACCACAATTTCCCCATTTCTCTGAATTTAAAGAGCATTTTATGGTCACGATGACT
AATCTAAATATGAATGTTTATAATGTTAAAACAGAATAATTACAACATGCTCTAGGTGGGGGGGGGAATT
TAAACTACAAATTTAGTGATTTTGAAATTCTAATTTCTAAACTTCCATCAGAAATATAATAATGCATTAT
AGTTCCTATTTCCTATGTTTTAAATAGGAAATAATTCCAGCCAGGTTGCGGTTGAATTTCTGTGTGAGTA
GGTAGAATACTGTAGCATCTCTTCTCCTGAGGAATCCCTTTACTTTATCCATTCTTTTCTATTTATTTAT
TTATTTGAGACAGGTTCTTACTTTGTCACGCAGGCCGGAGTGCAGTGGTGCGATCTTGGCTCACTGCAAC
TTCCGCTTCCTGGGTTCATGTGATCCTCCCATGCCACTGTGCTCGGGTAATTTTTGTATTTTATTTGTTT
GTTTGTTTGTTTTGAGACAGAGTCTCATTCTGTCACTAGGCTGCAGTGCAGTGGCGCAATCTCGGCTCAC
TGCAACCTCCAACTCCCTGGTTCAAGTGATTCTCCTGCCTCAGCCTCCCGATCCCGAGTAGCTGGGATTA
CAGGCACGCGCCACCACGCCCAGCTAATTTTTGTATTTTTAGTAGAGACGGGTTTCACCATGTTGGCAAG
GATGGTCTCAATCTCCTGACCTCATGATCCGCCCACCTCAGCCTCTCAAAGTGCGGGATTACAGGCGTGA
TCCACTGCACCCGGCCAATTTTTGTATTTTTTATAAAGACAGGGTTTCGCCATGTTTCCAGGCTGATCTC
GAACTCCTGAGCTCAAGCGATCTGCCTGCCTCAGCCTCCCATAGTGTTAGGATTACAGGCGTGAGCCACC
ACTCCCAGCCTCTCAATTCTTTCTTACCCCTTCGCAATATATATATATATATTTTAGTGAGCCAATGCTT
TATGTTTTTATGGAAATAATAGTTTCATTTTAGTCTTATTCATTGATTATTTTATCATTTCCCTTTTACC
TATTGATTGATAGTCTGTGTTTCTAGGCTCAGCTTGTCAATCGGAAACAGAAATTAGAGTCTGTGGAACT
TTCTAGCCAATCAGAAATTCAACACTTAAGCAGTAAACTGGAGCGGGCTAATGACACTATCTGTGCCAAT
GAGTTGGAAATAGAGCGCCTCACCATGAGGGTCAATGACTTGGTTGGAACCAGTATGACTGTCCTACAGG
AGCAGCAGCAAAAAGAAGAAAAATTGAGGGAATCTGAAAAACTATTAGAGGTATGTTTTAAAATCACTAT
AATTGGGGGAAGTGTGTGTATGAGTATTTTAAGAGAGTGTTATTAAGCTAGAACTAGGTTCTACAATCCA
TACTTTCTTCCCTACTTTATAAATGATGGATCAGATATTGATAGTTTTACTAATATTGTGACTTTATTAC
AATATTTACAATATTGTAATATTGTTACGTAACTTATAGTCTGACTTCCTGGCTTCTCGTGAAATAGAAA
AATTGTAATAATAGCTGGCTTAGAAATTTCTGAGTATTTTGCAGGTTCTGCAGGAATTAAAAAGAAGGAA
AATTATAATCATATTTGACTTTTTTGCAGGCTCTGCAGGAAGAAAAGAGAGAATTGAAGGCAGCTCTTCA
GTCTCAAGAAAATCTCATACATGAGGCCAGAATACAAAAGGAGAAGTTACAAGAAAAAGTAAAGGCAACT
AACACTCAACATGCTGTAGAAGCTATAAGGTAAATTTAATCTTAAATATTATTCATCTTAGCCACTTAAT
GACTAGGTATTAAGCACTAGGCTTATTTTTATTTTTATTTTTATTTTATTTTCAGATAGTCTCCTGTTGC
CCAGACTGGAGTGCAGTGGTGCAATCTCAGCTCACTGCAACCTCAACCTCCGAGGTTCAAGCCATTCTCC
AGGCTCAGCCTCCCAAGTAGCTGGGACTACAGGTGCATGCTACCACACCTGGCTAGTTTTTTGTATTTTT
AGAGACGGGCATTCATCATGTTGGCTAGGCCGGTCTTAAATTCCTAACCTCAGGTGATCTGCCCACCTCA
GCCTCCCAAAGTGCTGGGATTACAGGTGTGAGCTGCCACGCCCATCCAAGCACTAGTTTTCATATTGCAT
ATTCATAATTTTATGTTTGATCATATTGTGGATTTTCTTAATTGGCTTTAACTTCTGAGTTAGGTTTTTA
AAGTGTTATAAAATTTTGTGTGGTTAATTTTCTTCTGCCACCAGTTAGGGTCCCTAACAGAGACTCTCAT
GTTTAGAAAGTTAGAAACCAAGGTCAGTTTGCATGCTTGGTGAAAATCCAAATGTGCAGGGAATTGTCAT
CCATGTCTCCTGGAGGCCTCACTTTGTTGGTGGAATAAGTTGTGATTAGTAGCTGCTTATCATTAATAGC
AGCCAGCCATTGGGCTAGCCCTCTTGCTTGATTTAAGTCTGATGCACACTTTTATTTTTGCCAGAATTCT
CCTGTAACTTTTCAGTTTTTTTGGTACAGGGTTTCAAGTGTCACTGAAGTGATTTTGCCATTTTGTCTTT
TTCCCTTGAAAAAAGGCCAAATCCCAGTTAAGAAGGGAGTAAATTGCTACTTTTTGAAGTATCAGCATCT
CTTGACTCTTTCTTTCCTCTCCCAATATTCTTTTTATAAAGCAGGAGACAAACTTGAAGAGTTCCAAAGA
GGTTACCAAAAATGATGGGGAAACACAGACTAGATGAGCATTATTTTTGTTTGCAGAGATAAAGGCGTTA
ACAATCATCCTATGTCTTTCCATAGGCCACGGGAAGAATCTCTGGCAGAAAAGAAGTACACCTCTCAAGG
GCAGGGGGACTTAGACAGTGTGCTCTCCCAGTTGAATTTTACCCATACTAGTGAGGACCTTCTGCAGGCA
GAGGTGACTTGTCTTGAAGGCAGGTACATAATTATACACACATTTCAAAAATTTCAAGTTGTTAAAATGA
ATTTTTGATCATCATATTGTAAATGAATGTAATAGTCATAGTAAAAAAAATAAGATTTTTTTCTAGTATC
CACAAATGGCCTAAGTTCTTATTTCTTTTTTTTTTTTTTTGAGACGGAGTCCGCTCTGTCACCCAGACTG
GAGTGCAATGGCACAATCTCAGCTCACTGCAACCTCCGCCTCCCGGTTCAATTGATTCTTCTGCCCCAGC
CTCCTGAGTAGCTGAGATTACAGGCGTGCACCACCATGCCTGGCTAATTTTTATATTTTTGTAGAGACGG
TGTTTCACCATGTTGGCCAGGCTGGTCTTGAACTCCTGACCTCAGGTGATCCACCTGCCTTGGCCTCCCA
AAGTGCTGGGATTACAGGCATGAGTCACCGCACCCTGCCCTAAGTTCTTATTTCATTGAGAAGACAGAAG
CAATTAAAGGAGAACCTCTTAATCTTTCTGTCATCAAATCTACCAGTCTGCCCATACCTGTGCCTTTCTG
CACTTCTAAGACCAACCACTCCACTTGTGTCCTTTTTCTGTAGTTATATCCTTTCTCTTCTGCATCATCA
AGTTCTTTCTGTCTGCTGAATCTATCCACTGGTATAAAATACGCTGTAACATCACCCATCTGGGGGAAAA
ACCATCCCTTAATCCTATGTCTCCGTCAAGTTATTTCCACATTTCTGTACTTCTCTTTAAGACCAAATTC
TTCAAAAGAGTTGTCTATACTGACTCTACTTCTTTACCTTTCACCTGTTTAGCAGCCCTTCACTTAGGTT
TTCCTCCTTGCCACCTCAGAAGCAGGGTAGGAAGGGGTAACAGTTGACACATGGTGATCCTTTTTGTTCT
GCTGTGGTGTTGTTACTTCCTTGGGTGTTAATTGAATCCTGACTAATGCTATACCATACCCACCTAAACA
CTTGTCATTGTCGTACTTATAGAATTTTTTTTGGTTTTTCATAACCTCTCAACTTTTTGATTGGGAAGAG
TGTGATATCTTGTTTTAAACACATGAATCATGATCATTTGTACACTGACATTTTCTGTATGTAAAAGATA
AAATTGCTTTTAACATGAACTGTTAACCTTTAGGCAAACAACAAGAGAAATATCATTTTACACTTTTTAG
GTTATCTTTAAGTAATACATTTTTTGTTTTTACATTTATTTCTGGTTTTGGAAACCAGTAAGTATTTTCT
TACTTTTATCTACATGTTAAATACACAAACATGCATACACACACATATTTTCTGCTTTATTCCTTTTGGA
ATACTTGGAGTACTTGAGATAGTCTTTGTTATTATTGAAGTATATGTGTACTCTTCCGTTTGACTAAAAT
TAAGTTTATTATTTTTGACGTTGGGACAACAGTTTACATTTTTATCACAGTTTTTTTATTGATTGGCTTT
TTAGTAATATTTTAAATGACTGAGGTGATGTTTAAGATATTGGCTGGATATTTTTTGGATATCAAGAATG
TAAATTAGATAGTCCAATTTATAGGTTTCAGGATTTTGGTTTTAAGTATGGGATCTTATTTTTGTCATAC
AGTTTGGAATCTGTGAGTGCAACGTGTAAACAGCTGAGCCAAGAACTAATGGAAAAATATGAAGAACTGA
AGAGGATGGAAGCACATAACAATGAATACAAAGCAGAGATTAAGAAGGTAAAAATCTGCATACCTAGGAT
TGCAAAATTGTATGTGTTTATGGACAAAGCTGTGGATTGGGAGATTATAGGGGTTATTTTTAATGAGAAA
AAAATGTAGTTCAAGGGACCACTTGATATTTAGGAGTGGAAGAGTTTGTGGAATGTGCATAGGGAAAGTG
CCTTCTTTCTTTGGCATCGCCCCTGATGCCCAATAAATATTTTTAAGATAATTGAAGGCTGTCCCCTTTG
AACTCAAAAACTTTATTTTAAACATGTTTTGATGAAAAGTTTTCTAAAAGACATACACTCTGTTGCTTGC
AAAAAAATATGAACTGTCACTTAATATTTTCTTATTGCCTAAAGATAGTATTTATGTATTGTCTCCTGTG
CTATGATGTAGTTAGTATCCTTGTCAGCTATTGAGGTATGCAGAGCTGTTTGTGTCTATATGAATGGGCC
CTAACTGTCCTATTTGTTTGATTTGTATTTTTTGTTACTTCTTTAAGATTACTTCTAGTTCCTTACTTCC
TCTTGTTCTATTTGTTATCCTGTGGACTAAGATACCATATGAGCAAAACTTTTAGATTCACAACTAAAAA
AAAGAATGAAGGTCACAAGTACTCTCCTCTAAATTGTGTGCATGGACCTTGATTCTGGTCCTCAGCACTT
GAATAACCCATCTCTCCCTGTTTTGAGGTATAATAAATGATTGTAGGTATAACCACCTGACCTTCAGTAC
AGATATGCAACTTGGTAAATTGCTAATTTTTCTGCAGATTTAATTTAAGAGAAATTTAATGTCTTGAGAT
AAGGTGAACTTTTATTTTATTAGCTAGTAACATATTATTCTATCTAAATGCTTTCTCTTAACTTTTGGTG
CTTTCTTTTCTGCTTCTTTATAGTTGAAAGAACAGATTTTACAGGGTGAACAAAGTTACAGTTCTGCACT
AGAAGGAATGAAGATGGAAATCTCCCATCTAACTCAGGAGTTACATCAGCGAGATATCACTATTGCTTCC
ACCAAAGGTTCTTCCTCAGACATGGAAAAGCGACTCAGAGCAGAGATGCAAAAGGCAGAAGACAAAGCAG
TAGAGCATAAGGTGAAGCCTGAACAAAACCTTTTTTAAATTTGAAATTTGTTTTAAAGATGGAGTTGATT
AAAGACATAATTTTCATAATATTTAATTCAGTGAATTTTTATTAGATACCTGCTTTGAGCTGAGAGTATG
CTGGCTAGCAAAGAGTTTAGTGAGCATGGTGGGGAGGTGAGAGTAGACACAGACAAGTAAAGTGACTGTA
TCAGTGGTGTATGGTGAGAGTCACTAGAGATCACAAGCAGCCTGAATCTAGACCACTCGCTGCAAAGGCC
TTCCAGAAGGTGTGATAGCAAAGCTAAGTTAGGAGCAAGCTGGGTGATGGGGAGGAAAAGTGTTTCAGGC
ACAGGAAAATACAGAGGTCTCTAAGAGAGAGTAGAAACACGCTTGCTGTGGTTGAAACTAGAGTACAAGT
GGGATGAGTGGAAGGTATGAGACTGGAAAGCAGGGACTGGCTGCTGAAGGGCTACGTTAGCCACGTAAAG
GAGTTATACTGTGACCTTGAGGTCAGTAGGGAATGGCTGCAAGCAGGAGTAAAATTCAGTGGTCCTTAAA
TGGAGAATAAGCAGGGAGACAGAGCACCCAGATGCTGTTACAGTGGTAAGATGGTGGCCTGAGCAGTGGG
CAAGGGAGGCAGAGGGAAATGGATGAATTCTGGAGATACTGGGCTGGTAAAAATGACTGGGCATTGTATT
TGATTGGCAGGGAAGGTGAGGTAGGCAGAGTTAAGGAATGGTGCTCCACAGGATTTAAACTTAGGCAACT
GATGGAAAGTGATGCTTTTTAATGAAATAGAGAAAAGACAGGGAGCAAGTTTGGTGAAGGATGATGAATT
TGTGTGAAAAGTACACAGACTGGGGAAACTGGTGGAGAGGACATTGGTTTGACACATTTGTTTGGAATAA
AGGCTGGAATTTTGTATGGGTAATAGTCAATTCCACAGAAGGCCTGGAGTTGAAGATTAAAATCAGGATT
AGGCATTTAGCTGTGGCTGTCCTTTCTTCATGGTGACATTTGAAACCCCCTGAGAGACTTAATGATTATA
GTGAGAAAGCATAGCGTAAGAAGAGAAGTGACTCAAACCAAACTTAGGATACTTCTCATTTAGTGTAAAA
AAGATGTTGGAATGAAGCTTAAAAAAAGGAGCAGTGAGGAGGGAAATCAGATAGTTTTTGCCAAGCCAAG
GAAAGAAGGAATATTTTCAAATGGGAATGGTCAAGCACAAAAGCTGAGGGGAATGAGAACTGAATATAAG
TTGTTATTTTGTGAATAAAGTACAATTCCATGTGACGTTGCAGGTAGAAGCCAAATTGGAGGAGGCCAGC
ACAGGAGAATGGGTAGGGATTTAAGGGGTTCAGTGGATTGAAACTTTGCTGCTTTGTCACCTGATTTATC
CTATTAGAATGATATCTTCATCCCATTCATGTTCATTCACCTTAATAACATCTTAAAAATCTTTTTAGAA
AGTCCATATATATATATATATATATATATATATATACACACACACACGTACATATATATATGTATATATA
TATATAAATATGTATATGTATATATATATAAATGAAGAATATGACTTAGCCTAATGAAAATTCCATGTGG
AAAAATTTTGTAAGATGCATGTGATTTACATGTTATATTTATTTTTTTCTGTTTTCCCCTTTTCAGGAGA
TTTTGGATCAGCTGGAGTCACTCAAATTAGAAAATCGTCATCTTTCTGAAATGGTGATGAAATTGGAATT
GGGTTTACATGAGGTACATAAATAGAAACTTAAGTTTTTCTACTATCCAAGCCTTCAAAAAAATTACTTT
GTAAATATTTACATTATAAAGAGAGAATTAAGATCAACTTAGATCCTTTTGCAGAAATTTTCTCAAAGAA
AATGAAGGTAAAACAATACTGGAAGTGAGCAAAATATGACTCTCCACTCCAGCAGCAGGAAGGGTTTTTG
TTTGTTTTTTTGAGACGGGGTTTCACTCTTGTTACCCAGGCTGGAGTGCAATGGCGTGATCTTGGCTCAC
CGCAGCCTCCACCTCCCGGGTTCAAATGATGCTCCTGCCTCAGCCTCCTGAGTAACTGGGATCACAGGCA
TGCGCCACCACACCTGGCTGATGTTGTATTTTCAGTAGAGGCAGGGTTTCTCCATGTTGGTCAGGCTGGT
CTCGAACTCCCAATCTCAGGTGATCTGCCCGCCTCAGCCTCCCAAAGTGCTGGGATTACAGGCATGAGCC
ACCGTGCTCGGCCAGGAAGGTATTTTTTTATATTATGTATGTGATAAAATTTACCTACAGTCTGTGTTCT
TAGTTGGAAGAATGTATATGAAGGACTTAGCATATAGTACATAGTACCTGACACTTAGTAAGTATGCAAT
ACATCCTAGATGGTGGTATTATTATTATTATTATTATTGTTAATGATTATTATGTTTGTTATCTTTTTAG
AAAGTATATTGTCTTTAAAATAATTTAATTTTAATTTTATTTCTACAAGATATTCACATAATAAAATATT
TTAGAATCTTTTATATCCAAGGACTTTTAGTAGGTGCTATAATGAACACAGGCTGAATAAGATAGCATTC
TTGCCTTTAAGAGAGATTTTGGATCAGCTGCAATTACTCAAATTACTCTAGCCTTTAAGAGACTAGAGTA
ATCTAGTAGCAAGGATAAGAAATGCATACAAGCTTCTGTGAAACCAGAGAGAACATGATTAGCCAACAGT
GAATTACAGTATAGATGCTCTTTTAACTGTTTTGTTACAAAATTCCTATAATTTGCAAAATGACTCATCT
ATTCTGACCCATCTTTTCTTGGTGTAGGTCAGATGTCTGAAAATTGTATAAATGCTTTTTTCCTGCATTT
CCAGAGAGTATTCCTCCAAAAAGATATATGGTTCCAACATGCTCCCTGTTTGCTCTGAAAAATTCTAATT
TCACAATCCAGGATTGTGGATACTGGGGTGGAAGAACATGCAAAAGACTATTATAGAGTACCTTATTTCA
ACTGGAAAAATGGGGGACTATTTTTGTAATCTTTCAGAAGGGTAAGATTCTCCAAACATCATGACGCCAT
AGAGGATTTTACAACATAAAAATGTGAAGTTTCTGGATGGTAAAAGGCCCTATTAAAAAAGACTAATAGG
GAGAAAACAGTTTATAATCAGACAAAAGGTTAATGTAAATTATTAATATATAAAAATTCCCTACAAAGAT
AATAAGGAAAAGATAATCTAGTAGAAAAATAGGCAAAGAATGTAGATAGATACCTCACAGAATTAATATA
AATATCTAGTAAACAAAGAAAACTGTTCAACCTCTCTAATAAAGCAAAATAGACATTCTTTTACTAATTG
GTTTGATAATAACCTTTAAAAACTAATATATAGCCAGTGTTAGAAAGATGTAAGGAAACAGACTTATTGC
ACTGTCAATGAGAAAGTGAATTGATACGGCCTTTCTAGAGGACAGCTTAGCAATATCCATCAAATGCGTA
AATACGTATAGCCTCTAAATTCCTGGGTCATGTGTGTTTCTGATTTTGATAGTCCTTGCTGAATTGTTTT
CAGAATGGTCTTATCTTTTTACATTCCCATGGAAACCATTCTCTAGGAGCAAGTGTGCATAAAATGGTCA
TTGAAGTATTGTTCGCAATATCCAAAATTTTGAAATAAACTATATTTATTTCAATGGTTAATTTTTGATT
TTATGAATATTACACTGTCATTGAAGGTGGCAGATGAAAACACTCATCTGATCTTGCTCTATCCTCAAAT
CCCTCTAAAACTGTCATGAAAGGATTTATTTTTGTTCTATTTTATTTTTATTTTTTTCCTTTTATTATTA
TACTTTAAGTTTTAGGGTACATGTGCACATTGTGCAGGTTAGTTACCTATGTATACATGTGCCATGCTGG
TGCACTGCACCCACTAACTCGTTATCTAGCATTAGGTATATCTCCCAATGCTATCCCTCCCCCCTTCCCC
CACCCCACAACAGTCCCCAGAGTGTGATGTTCCCCTTCCTGTGTCCATGTGATCTCATTGTTCAATTCCC
ACCTATGAGTGAGAATATGCAGTGTTTGGTTTTTTGTTCTTGTGATAGTTTACTGAGAATGATGATTTCC
AATTTCATCCATGTCCCTACAAAGGACATGAACTCATCATTTTTTATGGCTGCATAGTATTCCATGGTGT
ATATGTGCCACATTTTCTTAACCCAGTCTATCATTGTTGGACATTTGGGTTGCTTCCAAGTCTTTGCTAT
TGTGAATAGTGCCGCAATAAACATACGTGTGCATGTGTCTTTATAGCAGCATGATTTATAGTCCTTTGGG
TATATACCCAGTAATGGGATGGCTGGGTCAAATGGTATTTCTAGTTCTAGATCCCTGAGGAATCGCCACA
CTGACTTCCACAATGGTTGAACTACTTTATAGTCCCACCAACAGTGTAAAAGTGTTCCTATTTCTCCACA
TCCTCTCCAGCACCTGTTGTTTCCTGACTTTTTAATGACTGCCATTCTAACTGGTGTGAGATGGTATCTC
ATTGTGGTTTTGATTTGCACTTCTCTGATGGCCAGTGATGATGAGCATTTTTTCATGTGTTTTTTGGCTG
CATAAATGTCTTCTTTTGAGAAGTGTCTGTTCATGTCCTTTGCCCACTTTTTGATGGGGTTGTTTGTTTT
TTTCTTGTAAATTTGTTTGAGTTCATTGTAGATTCTGGATATTAGCCCTTTGTCAGATGAGTAGGTTGCC
AAAGACAAAAACCACATGATTATCTCAATAGATGCAGAAAAGGCCTTTGACAAAATTCAACAACCCTTCA
TGCTAAAAACTCTCAATAAATTAGGTATTGATGGGACGTATTTCAAAATAATAAGAGCTATCTATGACAA
ACCCACAGCCAATATCATACTGAATGGGCAAAAACTGGAAGCATTCCCTTTGAAAACTGGCACAAGACAG
GGATGCCCTCTCTCATCACTCCTATTCAACATACTGTTGGAAGTTCTGGCCAGGGCAATTAGGCAGGAGA
AGGAAATAAAGGGTATTCAGTTAGGAAAAGAGGAAGTCAAATTGTTCCTCTTTGCAGACGACATGATTGT
ATATCTAGAAAACCCCATTGTCTCAGCCCAAAATCTCCTTAAGCTGATAAGCAACTTCAGCAAAGTCTCA
GGATACAAAATCAATGTACAAAAATCACAAGCATTCTTATACACCAGCAACAGACAAACAGAGAGCCAAA
TCATGAGTGAACTCCCATTCACAATTGCTTCAAAGAGAATAAAATACCTAGGAATCCAACTTACAAGGGA
TGTGAAGGACCTCTTCAAGGAGAACTACAAACCACTGCTCAAGGAAATAAAACAGGATACAAACAAATGG
AAGAACATCCCATGCTCATGGGTAGGAAGAATCAATATCGTGAAAATGGCTATACTGCCCAAGGTAATTT
ACAGATTCAATGCCATCCCCATCAAGCTACCAATGCCTTTCTTCACAGAATTGGAAAAAACTACTTTAAA
GTTCATATGGAACCAAAAAAGAGCCCGCATCGCCAAGTCAATCCTAAGCAAAAAGAACAAAGCTGGAGGC
ATCACCCTACTTGACTTCAAACTATACTACAAGGCTACAGTAACCAAAACAGCATGGTACTGGTACCAAA
AAAGAGATATAGATCAATGGAACAGAACAGAGCCCTCAGAAATAATGCCGCATATCTACAACTATCTGAT
CTTTGACAAACCTGAGAAAAACAAGCAATGGGGAAAGGATTCCCTATTTAATAAATGGTGCTGGGAAAAC
TGGCTAGCCATATGTAGAAAGCTGAAACTGGATCCCTTCCTTACACCTTATACAAAAATCAATTCAAGAT
GGATTAAAGACTTAAACGTTAGACCTAAAACCATAAAAACCCTAGAAGAAAACCTAGGCAATACCATTCA
GGACATAGGCATGGGCAAGGACTTCATGTCTAAAACACCAAAAGCAATGGCAACAAAAGCCAAAATTGAC
AAATGGGATCTCATTAAACTAAAGAGCTTCTGTACAGCAAAAGAAACTACCATCAGAGTGAACAGGCAAC
CTACAAAATGGGAGAAAATTTTCGAAAGGATTTATTTTTAAAGCGCAAACCCACGAGGTTGGGAATAATA
GGAGAGGAGACAATAGCTAAACATTTTGTAAGGGGGAAAGTGGGAAGGAGGGAAGGAAGGAAGGAAGGGA
GGGAGGGAACTTGATATCCCCTAATAAAGTCAATACTAAGCTAGTAGTGGAGAACTCTAAGAACTAAACT
GATTTACACCACAGAATTCTGTAAAGGCTTAGGATTCAGCAGTACTTGGTTGAGAGACTCTTATCTTATG
CAGTGATTATCTGTTCATATTTAAGAATTGAGAACTCTCAGGGGAACTTAAGCCAGACCATGACCAGAGA
TGCTGTTCAGCTTAATTTCTCCTGAAACTTCCAGCTATCAATAATAGTGGTAATACTGTTCTTTCTTTAG
ACAGCTAGATGTGTGCTCGCTACTCAGTTTTCATATTACCTTTCATATTCATTTATCTGTAGTAATTGTT
TATAAAATAATAACTTAGAGAAATTTTTAAAACATACCTGAATGAAGGTAAGCATTATCATTTTTTAATA
AGTATGTTTAATGACATCAGACATCAAACTGGTGAAAACCTTGTCAGCAGTTTAAGCTTTCTCTAGTTTT
GAAATTACATACAGTGTGAATATGTTGTACATATTATGAAGAATAATTATTAGAAAATGCCCTTTTGTAT
TTTACCATGTAGGAAGCTGAAGTTACTTGTACAAATGAATGTTTGGGTTAAATGTCTATTTTAATAAATT
ACCTAATTATCTTAATAATGAAAGCAACAGCTCTGATAAATTACTGACCATGTTTTAAAAACCGATAATA
GTTTCATTTTAACTCGTATGTCCTGCAGATGTTCTTCTCTGATATTTTATCTGGCATTGACAACTTGTTG
AAAGATTTTGTAGCTCATAGTCACTACTTGTACACAGATAGTTCACAGGTATATTTTAAAGTTTATGTTT
TTGTTAGGAAAATTATGTTTGTCAGACCACTCTTGACCAGCTTACTTTCATAATTTGTTTTTTTTTTTTT
TTTTTTTTTTTTTTTACAGAAAAGACCAAGCTAACCATGGTATTAAACTCCAAAGATTACCATAACTTTG
CATAATACTAATTAAAATATTTTGTCATTAGAAAAAAAATCACCCAGACTACCATTTTTTCAAGTAGTGT
CTTACCAGGAAACACCTAGAATTGAAGAGCAATAAAATTTATGATACCAGATCAGAATAGTAATTCCCAC
TATATACTTGAATCCTGCTTTATCATGTCCAAATTTATATATGAGTAGATACCAAAGTTGTAGAAAAGTG
TTTAAGATTAGAGATTATTTATTTAAAAGTTGTCCCTGCCAGCCAGAAGATTTTTCTCACAACTTTTTGT
TCAAATTTCTTTCCTTGAACTAGGTCTCCGTTTTCTTTCATTAGTATTCTGGGGCTATTCAACCTTCACC
TTCTTGCAGAAGAAACATGGCTGCTATTTTCCTTCTTCTTCCCTGTTTCTGATTCCCTCTTACAGCTTTC
CTCCATCCTGATTCCATCCTTCCTCCACCTTCTTGGAATTCCTTGCCACACAAGGAAGCCCGTTGTGCTT
CTAGTGTTCCACTACCATTTACTTGAAGAATTCTTTATCTCTGTTAGTCTTAGGAGGCCTAAAAACAAAG
CTTCATTAAAGCCATAGATTAACTACTTACAACTAAAAAACACTGAATTTTCCAACCAGCAGTATCACAG
ATCACAGGTATTCTTGTACAGATTAAGTGACTCTAGTATTCTTTTTTATTAGGCAAAAGAGATTTCACTA
GCAGACCTCCAGGAGAATTATATTGAGGCATTAAATAAATTAGTGTCTGAAAATCAACAACTACAGAAAG
ATTTGATGAATACCAAATCTCAGCTGGAGATTTCTACTCAGATGTGCAAAAAACAAAATGACAGGATCTT
TAAACCAACACACAGCAGAACAACTGAGTTCAAGAATACAGAGTTCAAGTAAAATTTTTTAAAAGTTTAT
TTAAAATGTGTATTGGTACAATATAATTCTCATTTCTTTGAGAATAATTTTTGACTTACAGAAATTAAAT
CTTCATCAAAGGACTCTATGTTTAATTCTGAAGTATAGTGTGCACAAGTAAAGCTATGATCATGTTAAAA
AATGGCTGGGGGAGGTGTATAGCATTTTCATTAAAGCTTTAGTTTTGTACACTCTGGATATCAGTGTAAA
CAAGATGTGTATTACCTGAGGCTTTTCATGCTGCCTTCCACCTCTTCAACCCCATTTGCCCATAAGAAGT
AGAATTTGGCTTTTTATAAACAGCTTCCTTTGTCTTTTTAGTCAATTTGTTATAGGCTGTTACCGTAAGA
AATAAGCATTCGGTGAAAAGCCACTTGGCTTCAGCTCATACTATATGGCTTACATGTTTTCCTACCCAAA
GCCTTTGCTGACACCCTCACCTCCACTCCTACACCCACCCAATCCCCTAGTTAGGTTAGGTGCCTTCTTA
TGTGCACAGCACTTCTCCTGTCCCAGCACTAACCACACTAGATTACTCTGGCAGCTTGTTTGTCTTTCTT
GCTATACCATAAGTGTGTGAGGGCAGGGACTTGGTAGTTGGAATTGGATATTTGGGGCCTGAATGAATGA
AAGAAATCTCTTTCTGATCTGAGTAGGTTGCTCATTTTGTAAATTGTAGCCTTATTAGTTAGGCTATTAA
GCAAATTTCCTACATTTCTGTTGGAAAGAGAAAAGTTGCTACAATTTTTTATTTGTTTTGTTTTCTAATC
TACCATCCAGGCCAACCCATGGCCAGCACAGACATGATGGAATAAAGACTGAGCACTACAAAACAGATCT
TCATTCTCCAAGAGGACAAGCGTCGGATAGTATAAACCCCATGTCTAGGGTGCTAAGCCCCCTGAGTCCT
CAAATCAGCCCTTGCAGCTCCACCAGGTCTTTGACTTCCTACTCTCTATGTAAAACTCATTCTTTGCCTT
CAGCGCTAGATACAAATGAAGCCAATTTTTCTGACACTATGTCTGAGAGTATGAATGACCAAGAAGAGTT
TATATCTTCGGTATGGAAACTTTCTGATCTTAGTAATTTGTTAGTTTTTTAAGTTTGCTTTGATTTTTTA
TTTTAAGGGTGAAGAAGGTGATTTTTTTTTCCTTACTGATTCTTTTATCATAAGTACTCTTCATTATTCT
TAGGTATCCCTGTCATACAGTTTTTGCTTGTGAAGACACTTTCGGCCAAGACTACTTTTCAAAATGTTCT
GAAATATGTTATACGTATTCATTTGTCTTTAACCCTTATTGGAAATTCCCTTCTTGCCCTTTTCAGTGAT
GCTCAATTTTCTTCTGGAATGGTTAGTTCAAGAACTGTCTCTGGATGCCAAGATAGTCCTGAGGCACAGG
CAGTGAAGGAGGAAAAGAGGAACTGCTGGAAAGGAGAAAGGGAGTGTGGAGGGGGAGGAAGGCTGTGCCT
CTGATGTGTGCAGAGCATGGCTTGGGGGTCACAGATGGTGGCCCTCAGGGCAGAATGTGCCTTGGACACC
ATGCCGGTCCCTTGCTCCTTCCATTGCTGGGCAGGCTGCACCATCTTTTTGCCTTCTGCACCAAAGCACT
TGCCATGGGCCCTTCATTTCCTGTCACCAGCTGTGGCCATATAGATGTGAAAGTGCAGTATTTCTGACTT
ATTAATGTGCTACCAAGTCCATGGAAAGGTTTTCTTTTATTTTTCAAAATAAGTCCTCACTTCACTTTCT
TCCTAAGTTTAGCAGCAAAATTTTTTTGGCACCAGAACTTTCCCTGGCCTGAACTGATGTGTTAGTATGT
ATAGACTTTCTCTATTCCACTTAGTGTGAGTATCCATGTGTTTTGCTTCAGAAATATCAGTGTGTTTGGT
GATGGGATGTTCCCTCAGACTCCACTGGGGTAATACAGTTGATCCTCATTATTCACAGATTTTGTATTTG
TGAATTTGTCTACTCCCTAAACTTTATCTGTAACTCCCAAATCAGTATGCGCAGCACTTCCACAGTAATT
CGTGGACATATGCAGAGTGACAAAAAATTTGAGTGACCGACTTGCACAATCCCAGCCAAGGTCGAAGTAG
GCAGCACTCTGCCTTGTTGCCCCTGCTTATGCGGAGGTGACCATAGGGTGGAGATGGACGGGACAGCGCA
GTGTAGGGAAAGAAGCTCAGCTCCATGCCAGCTGGATAGAGTCTGAATCCCAGCTTCAGCACCAGTTAGT
GGGGCAGCCTCAGGAGAGTTACCACTTCTGAACCTCATGTCTCTCATGTGAAATAAAAAATACAGAATCT
ACCAGAATGATTTGTTCTAGGATTTAGGATTATGCTCTCTGTGTGGGGTATGTGTGTATGTGTGTGTGTG
TGTATTTGTTGTATGTGTGTATTTTCCCTGGGCCAAAAATTCTGTGTTTGCTAATTCAGTGTTTTGGGTG
ACTTTATAGAACACAACTACTGCTATTGTGAATGAGTATTGACTGCATATGGCATATGTTCTATGTTACC
TTTCTAAAATCAGAATTCTGAAATATCACTAGCCTCAAGGGTTTCAGATAAGGGACTGTGGACTGAAAAT
TTGGAGGAGAAAAAATAATTGATTTTAGCTGGCATCTAATTTATTTTTGTTAAATTTTTGTGCTTTAAAA
TAAAAGTGACATACTTAGGTTTTTAAAGTGAGTTTGAAATAATAGGCATTAACTATGGAAGCATATATAA
GTCTAAATTGAAACATTCTTCAGACCAATAACTAATATATGATACTTTACATTGTTACAATTTGGGTCAG
AAACGGAGAGATCTGTGTTAATTTTTGCAGAACTTACTGATTTTTGTTCTTTTATTGCTCTTGTCATTAG
GATGAAAACCAAAAAAGTATCTTCAGAGGAAAAAAATCACCTTTTAATATTGCTAGTTAGAAAATGTCAT
GAACAGTGTATCTTAGAAATATAATATTCTACTTATTTACACATGTCAAAATTTGTGTCTCTTCCAGTGT
TCCTTGCCTGTATCTCCCCTTGGTTCAATAGCTACCAGATTTTTGGAAGAGGAGGAACTGAGGTCTCATC
ACATTCTAGAGCGCTTGGATGCCCATATTGAAGAACTAAAAAGAGAGAGTGAAAAGACAGTGAGACAATT
CACAGCCTTAAAGTAGCCTCTTAAAAAAATCACTATCTTGGAAATAAAAATAAACACCAAAGAGTTACTG
TCATCTGAAGTAGCAGCTCTTTAAAAACATGAAGAGATAAAATTATAAAAATGATACATCTAAAGCAGTG
GTGAAGAAAGCTGAAAAACTGATACTTTTGATAGGCATTTTCTCTGCACTGGTTTGTTTAAAGGACTTCT
TCCAGCAATAAGTTGAAAGAATAAACCACTTTGCTAGACTTTTTTCTCATACGAATATTTATTATCATAA
AGTGATACTTACCTTGCTGACTTAAATGTGAATAGCTATGTACTAATTGAAATAAGGATTTTATGATACA
TGTTGAAAATAAAGTAACTGCAGGAACTTTCTTTAGGGGAAATGTGTAGAAGCATGGATTTAGGGGTCAA
ACATACCTGGATCGATAGACTGGTTTTGCCACTTACCAGCCAACGGGGCTTGTTATTTACTGGGCTGGTA
GCCCCTCCTAGCCAAGGGGCTGGTAGTGTGTAAAGTCAGGCTGGTAGTGAATAAGGGGGGGGTGTGCTAA
AGAACCTTATCAAGCAGTCCTCTCTTGCTCAACACTCATGCAGAGGAGAGAGGCAGGGAGGGCAAGGGAC
TGGCTGTCATGCACGGTGCCCATGGAATATCCATTGGAAATAAATGTTCATCGTCTGCACTGCTGAGGAC
AAGTTTAGATGGGAGACAAAGATCTGGATGTTGATGTGCCGCAGGCATTTGAAACGATGGGAGTTGATAA
GATCCACCAGGGAGGCTGTGGAGAGAGAGAGGAGCAGGAGGCTGGGTTTGGGGCCCTGAAAGATGCCAGC
ATCTGAGGATCACAGGAAATAGATCTAGCAAAGGAACTAGAATGTGCAGTTACAGATGAGAAAGGTCAGT
GTAGTGTACTTGCCAGCTCAAGGGTGTGGCCTCTGTGAACCCTCTTTCTGTAGTGGATCTTTCCCATCAG
CGTAAAACATCCTGTTATTTCCCCTTTTTAAATAAAACCTCAGTTTTTTTTAATGCCTCTCTTTTACTGC
TCTGTATGTTTGCTTCCCTTCACCCAAACACTTCTGGAAAGAGTTGTCTGCAGTGACTCTTTCCAGTTCC
TCACCCCGCCCCACCGTAGTTCTCTTCCTAACCCTCTCCAACACCACTTCCATCCCCAGACTGCTTTCTT
GCTCTTGAGTTCACCAGTGACCTAATCAGTGTCTGAGCATCATTCAGCACAGTTGGACTCTCTCTTGGCT
TCTGTGACCTGGAACTTCTGGTTTCCTCTCTACCTCATCCTCCACTCCATCTCATGGCTTTTCCTCTTCT
AACCTCTAAGTCAGAGGGCCCCCTAGAGCTCTGTCATGGGTTTTCTCCCTCAGCATTCTCTTCCCTAGAA
GTTTCCATTCCATTCTCAAGCTCTTAATACCACCTATAGGCCAGTGACCCTTACATTTATTACTAATCTT
GACCTCTCCCCAGAGCTGCTGTCTTAGATACCTAGCTGCTTATGCGATGTCTTCACTTGGATATCTGACA
AACATCTTGTTTCCAAGAGAGAACTCTTTATTCTCCCTCTTGCTAAGATTCCATATCAGGACATAGCATT
ATGTTTGCCAGTTCCTAGGAGTTACTTATAATTCCTTCCTTACCCACATCCGCATATCCAGTCATTTGGG
AGGTCCTGTCATTTCTTCCCCCAGAATCTTATCTCAGACCCAACCGTTTCCCTCCTGCACTTCTACCACC
TGATCCAGACTACTTCTCTCTCACCCTGATTCTGGCAGTAGCCTCCTAACTGATAGTACTCACACCAGTA
ATTCAGGGAGCTTCTGGAGTTATCCTTTAGAAATGTAAATGAAACAGTGTCACCACTGCTTCCCTTCAGA
CTCTTCCAAGGCTTCTCTTTTTTTTTTTATTGAGACAGAGTCTCACTCTGTCGCCCAAGCTGCAGTACAG
TGGCAGGATCTCGGCTCTCTGCAACCTCCACCTCCCGGGCTCAAGTGATTCTCCTGCCTTAGCTTCCCGA
GTAGCTGGGATTACAGGCGCATGCCACCAGGCCCAGCTAATTTTTGTATTTTTAGTAGGAACAGGGTTTC
ACCATGTTGGTCAGGCTGATCTCGAACTCCTGACCTCAAGTGATCCACCCGCCTGAGCTTCCCAAAGTGC
TGGGTTATAAGCGTGAGCCACTGCACCCAGCCCCAAGGCTTCTTACTGCACTCAGAATAAAATCCAAATG
AATTAGTATAGCCTACAGAGTGTCAATAATCTGGGCCTAATCACCCATTGCATCATCCTTTACTGTGCTC
CACCCATGCTGGCGTCCTTTCTGTTTATTGAGTGCAGCAAGCTTTAACCTGTTCGGGTCTTTCATTTGCA
GTTTACCCTGAATATTCCCTTTCTCTTACCTCACCTTTGATTGGCGTTTTCCCCCTTGCAGACCTGCACT
CTGGCATCCTCTCCTGAGCAAGCCTTCTTTGATTGCTGCCTCCCAAACCTGTTTCTCCCCATTTCTCTAG
CTCATTGGCCTGTGTTACTTGCTTCATAGTGCTCACTACTATCTGAAATCATTTCATTACTTGATTTATG
TTTGTACTGTCTATTTCTGTCTTTAGAATTAAAACTCCTTGAGGGCAAGGACTTTGCTTCTCTGGTTCAT
GGTGGGATCCTCATCACCCAGCACAAGCCCAACACTTAGGAGAGGCTCAGCTAGTTTGAACCAATGGAAA
ATGCCATTCCTGAGGTGCACCACATCGTTTCTTTTGTGTTGGTGTGCATGCTGTCCTTCAGTTTGTCTCC
TCTTCCCACACCCTGTCATGTGCTCCTAAAACTCCCCCTTTACTTGGCTACTTTATCTGGCTTGGCAAAG
CTTTCCCATATCCCCTGACCCATGTCAGGGAACGTTTCTCCTCATTGCTGTCATGGCACCCTGTGTGTGG
CTCTGACCAGACTTTGCTATCCGCTTTGATTTCTGTCTTTCAGGGGCTAAGTCCTGCCTACATCCTCAGT
CAGCATGCTGCCTAACACATAACAGATCCTAAGCAAATATTGGGTGGATGAAAATCACTACCATTCAAGG
CTTCATTGTATTTATCAGTAAAACTGAAATAATATCTAATGGGGTCGAGAAGATTTACTGAAAATATATA
TTTGAAAGGGCTTTGCAGTTTTAAGTACTGTACCTATGTGCATTGCTGTTACATTCAGGAGATTTCTGAG
TTTTAGACAGTCCCAAGCTTCAGCTTAAAATCTGTAGACTGCAGCCCGTTTCTGAAACGTTTGTACTACG
TGTTGACTAGGAGGAACAATGACAGACTCTGTAGTCACCGGAAATACTTAAGGAATCATGAGGTACTATG
TATTTCCTTAAATTATACTGTTTTTTAAAGCTGAAGTATCTAATAGTTAATGGGTTGTCCAAATTTGTCA
GAACATTTGACTGTAATTTAATGTCTCACCATTTTTCAAAAAGATATATTAATACCAAATATTAAAATGT
GTCAAGACTAAATCTGAGTTAGTGTCTTAACACACATTTTCCAAAATCTGTCCGTGATCAGGGTACCCAA
ATGAGATGAAAAGATTAGGGATTTGTAGTCTACATCTGGTGTTTACAGATAATGTTTTATTGGGCAAGTC
ATCTCATTCTTCTTGTCCTGGATTCCCATGAATTTTCATCTGGATTCCTACGCAGATTTTAGCTGAAGAG
GGCAAAGTTGACTTCCCACTGTGGGCTGGACATTACCTTCCCTTGCAGACTCATTTGATCTCAACAAGTG
TAGAAAAAATACTACAACACTCTGTTTCTGTGACATCTGCTTAAACCCAAACAATTCTTACCTTCTCTCT
CTTACATACACATAACACCTGGTAAACTGTGGGTGATGATTTTCTGTTTGCAAAACACTCGAGTCCAGTA
CCTAAAAGTTGCAGATAAGAAAGATAATTATAAAATAAGCTCTATGGCATGAGAACATACGTTAAGCAAA
CAGTTGTCATGAACAGCACTGAAATGTAGAAAAAGTTAGAAATGTGTCAGCTTGTCCCAAAACAGTTTGA
AATAGTATAAATGCATCAAAAAGTAACAAACAGAATCGGGGCAGAGGGAAAATGAGGGCTGTAAACATTG
ATTCACTAATGAATCTAGTTGTCCAGTCCAGTTGCTAGAGGAAGGCAGCCAAGTTACCTCTGAGCTTCAG
AGGGGGAAAAGCAGAGGAGAAAACATTTACCTAAAAGTTTTATGGTGCCCATAAGATAAAAAAAAAAAAA
AATCATAGACTTAAGAAAAGCACAGATTTTTTTTGTGTGTTTGAATAAGCGTTTTGTAAAGTATGTGAGT
ATCCAGAAGAGAAGTCCAACATTTTCATAACTGGTAATAATAATCTGCACAGCTCCCCCCACAGTATGCT
TCACTGTGGGTTGATGGCATAAGGCTGACATCCAAATTCAGAGGAAACTGTTCTGAGAGGGCCACAAACA
TGATTGCGTAAAGCTCTCATGGCCTGAAAAGGGAAAATTTAGAGGGATGATAGACTGCTTTAAACCAATC
TTTTGTAAAAGCTATTTCTCCGCAGTGCAATTTTGATAATTCAGACATACAATTCACATCTTTTTTTTTT
TCCCTCTCTGTGAGGAACTAGAATTTGGGAATTTTATGTTGCCCATTAAGACCAGGTTCAATTATTTGAC
AATCATCCAGTCAGAAGAACTTTTGCACTCCTCTTACAAAAAGAACGTAAGGCAGTAGTTGATAGGGGAA
GGTCTAAAACTCCTTGATATTAAATGCAAAACATTTATTAATGTTAATAATAGTAATATAATAATATTAA
ATGCAAAAAATGTGCATTGTGCATTTTTCTGGGGAGAAGGTTCATAATTTTCATTAGAATCTTGAAGGTG
TCTGTGAATCAAAAAGAGATTAAAAACCATAGCTTTAGGGACTAGAGTTGTCCCAGAATGGTATCCCATT
TCCTGGGGAGAGACATAAAATTGGAGGAGTCCAACCTCTCCCTTCTGGGGCTGAATTTTAAAGTGCAGTT
GAATAGTCATTCAAAATTTAAGCTTTTCAATAATAAAAAGACAATTCAGTTCAAAAATGGACAAAAGATT
GGAATAGACATTTCTCCAAAGATGTACAGATGGCTATTAAGCAAATGAAAAGATGTTCAACATCATTAGT
CATCAGAGAAATGCAAATCAAAATCAAAATAAGATACCATTACACATCCACTATAATAAAAAAAAAATGG
ACAATCACAAGTGTTGAAGATGATGTGGAGAAATTGGAACACTCATATGTTGCTGATGGGAATGTAAAAT
AGTGCAGTCACTCTGGAAGACAGTTTGGCAGTTCCTCAAAAAGAGTTACCATATTACCCAGCAATACCAA
TCCTAAATATATGCTCAAGAAAAATGAAAATATATCCACACAAAAATTTGTACACAAATGATCTTAGCAA
CATTATTCACAATAACACCAAAGTGGAAGCAACCTAAATATCCATCATTGATGAATGAATAAACAAAATG
TATATCCATGTAATGGAATGTTATTTGGGAGCAAAAAGATTTGAATGAAGTATTATACTACTGATGCCAC
AGCATGGATGAACCTTGAAAACAGGAAGAAAGCAAAAAAAAAAAAAATCACATATTGTATGACTCCATTT
ACATGAATTGCCCAGAATTGACAAATCTGTAGAGATAGAAAATAGATTGGTAGTTGCTAGGGATTGGCGG
CGGAAGGTTGGGGTGGGAAATGGGGTGGGGATAGGAGGATTGGGAGGTGAAGACTAAAGGGTATGGGGTT
TCTTTTTGAGATGAAAATGTTCTAAAATTGATTGTGATGGTTGCACAACTCTGAATATAACAACTAAAAA
CAACTGAATTGTGTACTTTAAATGGGTGAATTATATAGTATGTAAATTATATCTTAATCACTGTTACCAA
AAAAAAAAAAAAAAGCCTCTGATGCATGGCAGCTCCTTAAAAATATCAAGTTTATATTAAGGGAATACCA
CAACACATATAGCACAAGCTATTCTAAAGTTTTCTATTTTCAACTCTCAGTTCACAGGAGTAACGGTACC
TTTCTTGGAGAGAGTGGATGTTCAAGCTCTGTTAATCATTGCTTGTGGTGTGGGGTGGCTCTGCACTGTG
CAATATTGTGGGGCAGAGGGCCAGGGGCCTGCACACCGCAGGGGTTCCTGCTCTTCCGGGTGGGAGTTCA
GTCTTGGTGCTGCTTCCTGTTAGGCGAGGTTGCAGGCAGCAAAGGCCACTCATCAGCCAGGCAGTGTCTT
GGCTAAGTGTATTCTAAGGAGAAGCTGCAGGAATGCTTGGCGCTAACCTCAGTGCTTAGAGGAGGACTGT
TTACAAACACTTTAGAGGGTTACAGACCACTGATGTGGAATATGAGCATATTGAAGTTCTGCCCTAAGAC
TGCTTAGCAAGTCCCTCAGTATCTCTACAAGCATGACTGGGCAAAGTAAAGAAAGAAAAGCCAAGTACAT
TACCTAAACCTGCTTTATTTCTTTGGCTATGAGAAACAGATGAGCTAAGATACTCTTTGAAACTAGTCTT
CCTAGTCCTTTTCTGGAGTGGCTATCCCTTTGACAGGCATCCACTGTGGATGGGCTAATCATCAGTTCCC
AGAGCTGTCCTGATTTCTGTGGCACCAGCTTTGGGAGGTAATGGGGGCCTCTCAGTGGGCCAGCTCTTGG
ATTTGTCTTGCCATTGATGTATAGCATAAACCCAAACAGCCCACCAGTCCCTGACTTTTCTGCGACCTAG
GACATGTGTTTCAGATCCCCAACTTAAATAAAATACAACAAACAAGACCGGAAGTGTTATCTCCCAGTTA
GTTTCTTCAGCCACAGGCAAGCATAGCCCTTGGTCCCAACAGGAGCATGCACTGCAACCCTGCAGGTTCC
TGTGTAACCCAACAGGGCAGTGGCTGGGGCAGGAGCTCAGTGCTTCCCCAAGGATCCCCTTTTCTGGAAG
ACAGGCCCCTCAGCCCAGCATGGAACCCCAGCAGTAGCCTGTTCATATTAATAAATTCTGGACCATGGGC
AAAGGACAGGAAAGGTTCCAGATTGGTGATATGTTCAACCTGCTACCTCCTGCATGAGCTATGGCTTGTA
GACTAAGAAGGCATCACCTGATCTGTTTATTTTGCTCCAAAAAGGTTTAACATTAACCCATTGTTTAACA
ACACCAAGCAATTCCAGACGCTTCCCCAGGCAAAGTCATTCCTTAAATCCACATTTCTCAAGCTGTTTTC
CAGAGATCCAAAATATTTGAAGTATTAAGTGTTTTATTAGTCCATTTTCATGCTGCTGATAAAGACATAC
CTGAGACTGGGTGATTTACAAGAGAAAGAGGTGTAATAGACTTACAGTTCCACGTGGCTGAAACCTCACA
ATCATGGCGGAAGGCAAGGAGGAGCAAGTCACATCTTACATGGAGGGCAGCAGGCATAAAGAGATCCTGT
GCAGAGAAACTCCCCTTTTTAAACCATCAGATCTTGCGAGACTTATTCACCATCACGAGAACAGCGTGAG
AAAGACCTGCCCCCATGATTCAACCACCTTCCACCAGATTCCTCCCACAACACGTGGGAATTCAGGTGAA
ATTTGGGTGGGGCCCCAGCCAAACCACATCATTCCACCCCTGGACTCTCACATATCTTGTGTCCTCACAT
TTCAAAACCAATCATGCCTTCCCAACAATCTCCAAAAGTCTTAACTTATTTCAGCATTAACTCAAAAGTC
CATAGTCCAAAGTCTCATCTGAGACAAGGCAAATCTGAGCCGATGAGCCTGTAAAATCGAAAGTGAGTTA
ATTACTTCTCAGATACAATAGGGATACAGGCGTTGGGTAAATATACCCATTCCAAATGGGAGAAATTGGC
CAAAACAAGGGGGCTGCAGGCCCCATGCAAGTCCGAAATCCAGCGGGGCAGTCAAATCTTAAAGCTCCAA
AATGATCTCTTTTGACCCCATGTCTCACATCCAGGTCACGCTGATGCAAAAGGTGGCTTCCCATGGTCTT
GCACAGCTCCACTCCTGTGGCTTTGCATGGTACAGCCTCTCTCCCAGCTGCTTTCATGGGCTGGCATTGA
GAGACTGTGGCTTTTCCAGGTGCACGGTGCAAGCTGTCGGTGGATCTACCGTTCTGGGGTCTGGAGGACA
ATGGCCCTCTTCTCACAGTTCCACCAGGCACTACCCTAGTGGGGACTCTGTGTGGGGGCTCTGACCCCAC
ATTTCCCTTTCGCACTGCCCTAGCAGAGGTTCTGCATGAAGACCCAACCTCTGCAGCAAACTTCTGCCTG
GATATGCAAGCGTTTCTATACACCCTCTGAAATCTAGGTGGAGGTTCCCAAACCTCAATTCTTGTCTTCT
ACACACTTGCAGGACTAACACCACATGGAATCTGCTAAGGTTTGGGACTTGCACCCTCTGAAGCTATGGC
CTGAGCTCTACGTTGGCCACTTTCAGCCACAGCTGGAGTGGCTGGGACACAGGGCACCAAGTTCCTAGGC
TGCACACAGCATGGGGACCCTGGGCCTGGCCCATGAAACCATTTTTTCTTCCTAGGCCTCCAGGCCTGTG
ATGGGAGAGGCTGCTGTGAAGACCTCTGAAATGCCCTGGAGATATTTTCCCCATTGTCTTGGGGATTAAC
ATTCGGCTCCTCATTACTTATGCAAATTTCTGCAGCTGGCTTGAATTTCTCCTCAGAAAGTGGGATTTGC
TGTTCTATTGCATTGTCAGGCTGCAGATTTTCCAAACTTTTATGCTCTGTTTCTCATTTAAAACAATGCT
TTTAACAGCACCCAAGTCACCTGTTGAATGCTTTGCTGCTTAGAAATTTCTTCTGCCAGATACCCTAAAT
CATCTCCCTCAAGTTCAAAATTCCACAAATCTCTGGAGTAGGGGCAAAATGCCACCAGTCTCTGCTAAAA
CATAGCAAGAGCCACCTTTGCTCCAGTTCCCAACAAGTTCCTCATCTCCATCTGAAACCAGATCAGCCTG
GATTTCATTGTCCATATAGTTATCAGCATTTTGGTCAAAGCCATTCAACAAGTCTCTAGGAAGTTCCAAA
CTTTCCCACATTTTCCTGTCTTCTTCTGAGCCCTCCAAGCTGTTCCAACCTCTGCCTGCTACCCAGTTCC
AAAGTCGCTTCCACATTTTCAGGTATCTTTTCAGCAACACCCCACTCTACTGGTACCAATTTACTGTATT
AGTCTGTTTTCATGCTGCTGATAAAGACATGCCTGAGACTGGGCGATTTACAGAAGAGGTGTAATGGACT
TACAGTTCCACTTGGCTGGGAAAGCCTCACAATCATGGCAGAAGGCAAGAAGGAGCAAGTCACATCTTAC
ATGGAGGGCAGCAGGCAAAAAGAGAGCCTGTGCAGAGAAACTCCCCTTGTTAAAAACATCAGATCTCATG
AGACTTATTCATCACAGACTTATTCTGTGCTGTCATGAGAACAGCACAAGAAAGACCTGCCCCCATGATT
CAACCACCTCCCACTGGGTCCCTCCCACAACGTGGGAATTTAAGATGAGATTTGGGCAGAGACACAACCA
AATCACATCAAGTGTTTTTTAAGAATATGCCAAAACAGAATGGAAAACACAGCAAGTCAAATTCCCCAGA
GCCAGGTCAGCCTCTGAATGGGATTAGGAGTGCCCTCTCTCCCTCCCACTGGCAAGCATCTTGCCTCAGC
CTCCTCTGTTGCTTCCCAAATGGAATGGGAGCTGGTGGCTTAGGTACTTAGAGGTTCTTTACCTTCTGTG
TGTCAGGGATGCCTCTGGCAGAGTTGAGGAGCCTATGGACCCCTCAGAATAATGACTAAGTGCATAAAGT
AAGATACAAAGGCCGGGTGTGGTGGCTCACGCCTGTAATCCCAGCGCTTTGGGAGACCGAGGCAGGTGGA
TCATGAGGTCAGGAGATCGAGACCATCCTGACTAACATGGTGAAACCCCGTCTTTACTAAAAATACAAAA
AATTAGCTGGGCATGGTGGCGGGCACCTGTAGTCCCAGCTACTTGGGAGGCTGAGGCAGGAGAATGGCGT
GGACCCAGGAGGCGGAGCTTGCAGTGAGCTGAGATCGTGCCACTGCACTCCAGCCTGGGCAACAGAGCGA
GACTCTGTCTCAACAACAACAACAACAACAGCAACAACAACAAAAGATACAAAGCATTAAATGGAAAATA
AAATATCATCATTCAGTTATGAAAACCTAAGAAAAAACAAATTTGTGATGTAGTATTATATGCACTTCTT
TGTTAACTCATTAAATAACAAGACTGAGTGGCAGGTCTATCACCTACCATGCTTTTGAAGTGGGGACATA
TGAAAGTAATGTTTTAATATGTCCATCACAATTGTAATGAGCTATGAAAATATCTGTGATTTCTATTGGA
ATAAAGCTAAAGGTACTGCTAGCACTGTGGCCTATACTCATAATGGAAGAAAAGTACATTTCAGTCAGAG
GTTATTGAAAATAAGGATGTCAGTTTTTCCCACCCAAGTTCATGGAACCCTAAATTGTATCCTTGGATCC
TTGGGAAGTGTCTGTGGACTCCAGGTTAAGAATTTAGAGGCCTACTTATGTTTTATCTCATGCCTGGTCA
TGTTGGTTCCCTGCGAACATTCACTTGTTTACAGGAGGCAGTATTTGTGCTTAATGTCAGTCTTGACTCT
AAGAACTTAGTCTTTTTTTAAAAAATAATTTCAACTTTTATTTTAAATTCAGGGGGTGCACGTGCAGGTT
TGTTACATGGGTGTACTGCATGATGCTGAGGTTTGGGATATGAATGATCCCAATACCCAGGTAGTGAGCA
TAGTATCCAATAGACAGTTTTTCAACCCTTGCTCCCCTCCCTTCTTCCTCTTTCTATCCCCAGTGTCTAT
TGTTGCCATCTTTATGTCCGTTACTACCCAATGTCTAGCTCTCACTTGTAAGAGAGAACATACAGTATTT
GGTTTTCTGTTCCTGCCTTATCTTGCTTAGGATAATGGCCTCTGGCTGCATCCATGTTGCTGCAAAGGAC
ATGATTTCATTCTTTTCTATGGCTATGTAGTATTCCATGGTGTATATGTACCACATTTTCTTTATCTAAT
CCGCTATTGATGGGCACCTGGGTTGATTCTATGTCTTTGTTATTGTGAATGGTGTAATGCTGAACGTATG
AGTTTATGTGTCTTTTTGGTGGAATGATTTATTTTCTTTTATATATATACCTAGTAATGGAATTGCTGGG
TCAAATGGTAGTTCTGTTTTAAGTTCATTGAGAAATCTCCAAACTGTTTTCCACAGTGGCTGTACTAATT
TATATTCTCACCAACAGTGTATAAAGCATTCCCTTTTCTCTGCGACCACACCAGCATCTGTTGTTTTTTT
GACTTTTTGATAATAGCCATTCTGACTGATAGGAGATGGTTATCTCAGTATGGTTTTCTTTTGCATTTCT
CTGATAATTAGTGATGTTGAGCATTTTTTCATATATTTGTTGACTGCTTGTATGTCTTCTTTTGAGAAGT
GTCTGTTCATCTCTTTTGCTCACTGTTTAATGGGGTTGTTTGCTTTTTGCTTGTTGAGTTGTTTAAGTTC
CTTATAGATTCTGGATATTAAATCTTTGTCAGATTGTTTAGTTTGAGGATATGTTCTCCCATTTTGTTTA
CTCTGTAGAAAGTTTCTTTTGCTGTGCAGAAGTTCTTTAGTTTAATTAGGTCCCACTTGTCAATTTTTGT
TTTTGTTGCCGTTGCTTTTGGGGACTTAGTCATAAATTTTTTGCCTAGGCTGATGTCCAGAATGGTGTTT
CCTAGGCTTTCTTCTAGGTTTCTTATAATCTGAAATTTTACATTTAACTCTTTACTCCATCTTGAGTTAA
TTTTTGTATACAATGAAAGGTAAGGGTCCAGTTTCAATCTTCTGCATATGGTTAGCCAGCTATCCCAGCA
CCGTTTGTTGAATAGGAAGTCCTTTCCCCATGGTTTATTTTTGTTGACTTTGTTGAAGATCAGATGGCTG
TAGGCATGTGGCTTTATTTCTGAGTTTTCTATTCTATTCCATTGGTCTATGTGTCTGTTTTTGCACCTGT
ACCATGCTGTTTTGGTTACTGTAGCCTTGTAGTATAGTTTGAAGTTGGATAGTGTGATGCCTCTGGCTTT
GTTCTTTTTGCTTAGGGTTGCTTTGGGTATTCTGGCTAAGTAAGAGCTTAGCCTTTAAATGGGCTGAGAT
AATAAATCAACTTACCCAAGCAAGGTAATATTAATTTTTTTTATTCATGACATACTTTTTGGAATTTTGG
AGAACTATTGTTCTGCATCTGACAGATCAGAGCATTCTGCCTGTGTTAGAGTTAGGCCCTGAGGTTTTGG
AAGCCCTCAGCATTTAGGACAGCATTTAGGGCAAGCCTGGGATGGTGAGTGCTCTTCTCCTGGGTCTTCT
TGGAAGAAGACCAGGTTTGAACAAGCACACTACAGTCTCTGTAGGTCACAATCCCAATGCTTGACATGCA
GCCTCGTGGGCTGGCTGCATATGATCAGGGAGAAGCTGGACCACTCAGCCATTTCCTCTGCAGAGTTGCA
GGGTATGCTACTGTCCTCTGTGGACAAGGGGCCTATAGCACTATTGGAGGAGCTGGTGCTCTGTGTGCTC
CAAGATAATTGCTCACTGCCGAAGTGCAGCTCCTTAGGACTGGGGTGAGAAGAGAGATGGAGGAGCGGCT
TCTGCAGGGAGACCAGACAGAGCTCAGGTGGGCACAGCTCTAGACAGCAGTCCCAAATCTGTTTTTACAA
AGCAATCCAACAGTTTCTGAGTCTTTCTGAAATCTCAAGATGCATTTTGGATCCTTGACCTAAACTTAAA
CACTACAAACAAGGCCAAAACTATTATCTAGTGATGTGTCAGACAATTATGTCTGTCTGCTGCTGGCATG
CTCTGCTGCCTCTCATGCCAAGCTACAGGGTGCCTGCTCCAACAAGAAATATAATTCTTCAAATTAGCAT
TTCTCATTATTTTTTAACACTGGATCTAAAAATATTTGATTAGATTCAAAATTTATCCATAATATTGCTA
AGATTTTGTTTTTTTGGTTATAGAGTCCCACTCTGTCACCCAGGCTGGAGTTCAGTGGTGCAGTCACGGC
TTACTGCAACCTCCACCTCCTGGGCTCAACTGATCCACCTCAGCCTCCTGAGTAGCTGGGACTTCAGGCA
CGTGCCACCACACCTGGCTAATTTTTTATATTTTTTTTTGTAGAGATGGGGTTTTACCATGTTGTCCAGT
CTGGTTTTGAACTTCGGGATTCAAGCAATCCGCCAGCCTCAGCGTCCCAAAGTGCTGGAATTACAAGTGT
GAGCTACCACCACTGGCAGTTAAGAATTTTAACAATTTGTCAATGAAACAAGAATCTCAATTAGAGTCTT
TATATACAATCTGTACTGTTGGAATTTTCAAATAAATATTGTAAAGAAAATTAACACTATTTTGCCAAAG
CTTCTCATCAATACGGACTATGAAGAATTTAAAGACTGTCACTAAAAACATCAGGAATTTTCATGCTAGA
AAGCTTAAGATAACTCCTTCCTTCCTTCCTTCCTTCATCCCTCCGTCCCTCCCTCCGTCCCCCTTCCCCT
CCCTCCCTGTCTCTCTCTCTCTTCCCTCTTTCCCTCCCTCCCTCCCTCCCTCCCTCCCTCCCTCCCTTCC
TTCCTTCCTTCCTTCCTTCCTTGCTTCCCTCTTTCCCCCTCCCTCCCTTCCTCCCTTTCTTCCTTTCTTT
CCTTTTTTCTTTCTTTCTTTGGAGACAGGGTCTCACTCTATGGCCCTCTTTCTCCCTCCCTCCCTCCCTC
CCTCCCTCCCTTTTTTCCTTTCTTTCCTTTCTTCCTTTCTTTCCTTTTTTCTTTCTTCCTTTGGAGACAT
GGGCTCACTCTGTGGCCCTCTTTCTCCCTCCCTCCCTCCCTCCCTTTCTTCCTTTCTTTCCTTTCTTCCT
TTCTTTCCTTTTTTCTTTCTTTCTTTGGAGACAGGGTCTCACTCTGTGGCCCTCTTCCTCCCTCCCTCCC
TCCCTTTCTTCCTTTCTTTCCTTTTCTCTTTCTTTCTTTGGAGACAGGGTCTCACTCTGTGGCCCAGGTT
GGAGTGCATTGGCATAATCACGGCTCACTGCAGCTTAGGCATCCTGGCCTCAGGTGATCCTCCCACCTTA
GCCTGCTGAGTAGCTGTGATTACAGGTGTCTGCCACCACATCTGGCTAATTTTTTAAATTTTTTGTAGAG
ATGGGGTTTCCCTATGTTGCCCAGGCTGGTCTCGAACTCCTGGGCCCAAGCAATCCACCCTAGGCCTCCC
AAAGTGCTAGGATTACAGGCTTGAGCCACTGTGCTGGGCCATAGGATTTTGATCAAATATTTTTGCAAAG
ATTGTATTAGAAGTTTCATATAAATGCAATATTTCTTAATACTTGCATTTTATTTTCATCATCATAATTA
CATATTGCAGAGAAATGCAATGACTTTTACATGTAAGCCCCCTTAAATTCTCTCCAGTTTACCCCACAGG
TGTAAATATAATTGTTTATGCTTTTCACGGGAAGTCTTCTCTTGAATGTTGGGCCTTTGGATGAAAGAGC
CTTGGTGGTGAAGCCCTGGTATGGTTTCTGGGACATTGCAAGCCAGCCCTTTCTCCTCTTCTTTTATGCT
TCCACTAAAATATTTCTGCAGTTAAAATTTATTTTGATTAATGCTTAAACATACATGGGCTACTCAGAAT
GACAGTTTATCCATTTATTAATTCATTCATCATACATTAATCAAGCAAACCCCTCATCTTAGAAGACTGA
GTTCCTGCTATTCCCTGAAGATGCCAGCACAGAAGACACAGATGCCAGCTCCCTTCCTGCTCCAAGAACC
TCTGACAAGTGCGCATGGCAGTACTAGTAACACACCTGTGCCCTTAGCAATTTGTATCACCAATGCTTGA
AACCCCAGTGCCCAGGGCAGTGAGGCCCAGTGAAATGAGACTGAGAGCGGAGAGGTAGGGCCTCAAAGCC
AGCTTGCCACTTAGCAGCTGTATGCCCTTGGGCAGTTTCTTCATATGCAGAATGTGGACTATGATCCTAA
TTCATCAAGGCTGTCACAAGGCCAGGTGAGATGCTGAAAAGGGAAGACAATAAAAATGCTGTAGATGGAA
CTCCGTATGTAACTTCAGCCACCCAAGAGGGCAGCTGTAGGAAGGCATCAGGGCAGGAAGTTGACCCTGG
CCTCGGGGTCTGGGAGACAATAGAGGGGCACGCGTGGGGTGACTTGGAGAGCCAGCCCATCCAAAGGGAG
GAACTAAAACTTGGCTCCCTGTGTTCACGGGCTTCTCAGGAAAAGCTGGCTGCTCAATTTTTTAATGCCA
TTTTCCTGGTTTTCAAATGTTAGCACCAATTAACTTAAAACAAACAAAAAACAACACTGCGCAGGCCAAA
CAGTAAAGTTTGTAACCTCTGCTCACACTAGTGTTGGCGTAGTAAAGATGTCCTGGGACCATGATGCATT
ACTGCAGTTAAGATTCCCAGGAAAGGGAGTGGGGGCCCAGCAGGAGGAGAGCCATCTCCCCTTGTCTGCA
GGGCTCCAAACAAGACTGGAGCCACAGAAACTGGCCACCCATCATATGTCCCTTCAACCAGAATGGGGCT
GTTTTTGCAATAGAGTGCCATCTATAAAGAACCAAAGCCAAAAAACTTCTAGGAAAAAAAAAATAGGAGA
AAATTGTGACCCTGGGTTAGGCAAAGCTTCTTTTTAAAAAATAGTAGCATGGATGATTTTTTCTCTTGGA
TTTAACAAATGTCAACATTTCATCATATATGCTTCACACTTGTATGGAAAAAAAGCTTACCAAAAACTTT
TTTGTGGCCTTTTCTAATCCACTTTTTTTTTTTTTTTTTTTTTTTGAGATGGAGTCTGGCTGTGTCACCC
AGGCTGGTGCAATCTTGGCTCACTGCAAGCTCTACCTCCCGAGTTCAAGCAATTCTCATGCCTCAGCCTC
CCCAAGTAGTTGGGACTACAAGTGTGCGCCACCATGCCTGGCTAATTTTTTATTTTTAACTTTTTTTTTC
TTACTTTGAGTTCTGGAATACATGTGCAGAATGTGCAGGTTTGTTACACAGGTATACATGTGCCATGGTG
GTTTGCCGCACCTGTCAACCCATCATCTAGGTTTTAAGCCCCAAATGCATTAGCTGTTTGTCCTAATGCT
CTCCCTCATCTTTCCGTCCACCCCCGCGACAGGCCTCAGTGTGTGTTGTTCCCCTCCCTGTGTCCCTGTG
TTCTCATTGTTCAACTCCCACATATGAGTGAGAACATGCAGTGTTTGGTTTTCTGTTCCTGTGTTAGTTT
GCTGAGGATGATGGCTTCTGGCTTCATCTGTGTCCCTGCAAAGGACGTGATCTCATTCCTTTTCATGGCT
GCATAGTATTCCATGGTGTATATGTGCCACATTTTCTTTATCCAGTCTATCATTGATGGGCATTTGGGTT
GGTTCCATGTCTTTGCTATTGTAAACAGTGCTGCAATAAACGTGTGTGCATGTGTCTTTATAGTAGAATG
ATTTAAATTCCTTTGAGCGTATACCTAGTAATGGGATTGCTAGGTCAAATGGTATTTCTGGTTCTAGATC
CTTGAGGAATCACCATGCTATCTTCCACAATGGTTGAACTAATTTACATTACCACCAACAGTGTAAAAGC
GTTCCTATTTCTCCACAGCCTCGCTAGCATCTATTGTTTCTTGACTTTTTAATAATCGTCATTCTGACTT
GTGTTTTTTTTTTTTTTTTTTTTTTTTTGAGATGGAGTCTTGCTCTGGTCACCCAGGCTGGAGTGCAGTG
GTGCGATCTCACCTCACTGCAACCTCTGCCTCCTGGGTTCAGATGATTCTCCTGCCTCAGCCTCTTGAGT
AGCTGGACCTACAGGCATGCACCACCATGCCTGGCTAATTTTTGTATTTTTGTAGAGATGGAGTTTCACC
ATGTTGACCAGGTTGGTCTTGAATTCCTGATCTCAAGTGATCTGCCCACCTTGGCCTCCCAAAGTACTGG
GGTTACAGGCGTGAGCCACCATGCCCAGCCCTCACTGTGATTGATTTGCATTTCTTTAATGATCAGTGAT
GCTGAGCTTTTTTTCATGTTTGCTGGCTGCATAAATGTCTTCTTTTGAGAAGTGTCTGTTCATATTCTTT
CCCCACTTTTTGATGGGGTTGTTTTTTTCTTGTAAATTTGTTTAAGTTCCTTGTAGATTCTGGATATTAG
ATCTTTGTTAGATGGGTAGATTGCAAAAATTTTCTCACATTCTGCAGGTTGCCTGTTCACTCTGATGACA
GTTTCTTTTGCTGTGGAGAAGCCCTTTAGTTTAACACTTGGCTAATTTTTGTATTTTTAGTAGAGACATG
GTTTCACCATGTTGGCTAGGCTGGTCTCGAACTTCTGACCTCAAGTGATCCACCTGCCTTGGCCTCCCAA
AGTGCTGGATTACAGGCGTGAGCCACTGCACCTGGCCCCCACACCATTTCTTTAGCAGAAACAACTGCTA
TCCTGGTGATGGTGTTAACACTTGACAACCGTATTTTTGTATGTATACATATTCACAAACAACACATAGT
GTGATTTCATGTATTATAAGAAGTATATAAGGCAACACCATACATGAAATTTGCAACCAGTAAATGAGAA
CCTTACCAGGTAACTTATATGTTGTCCTTGGGGTAGGTTTGGTTTATGCAGAGCTGGTTTTTGCACTTTA
CCGGGAATAATGTGCTTTCCCAGGAATTGCTGGGTTTATGTTTAACTTTTAAAAATACCAAGCTGTTTTC
CAAAGTGGCTAAGCTATTTTATATTCTCATCAGCAACATTTGAGGGTTTCAATTTAACCACATCCTCACC
AATGCTTGATAGCTGTTAGTCTTTTAGATTATAACCATTCTAGTGGGTGTGTACTGATAACGCATTGTGG
TATTAACTTGCATTTCCATAATGACTAAAGTGAGCACCTTTTCATGTGCTTATTAGCTATTCATATGTTT
TCTTTGGTGAAATGTACATTCAAACCTTCTGCGCAGTTTTTAATTGGGTTGTTTATTTTCATATTATGAA
AGGGTAAGAGTTCTTTATATATTCAACACAGTAATTCTACTGCTAGGTACCTAGAAGTAAGAATATATAT
CCACATTTGTATGTTGATATAAAGACATCATTCGAATGTCTATAGTGGCATTACTCATAATAGCCAAAAT
GTAAATGTTTATCAACTGGTAAATGAATAAAAAATAGTATATCCATGCAAATAATACTATATAGCAATAC
AAAGGAATGAAGTACTCATACATGCTACAACATGGATGAAACACTAAAACACACTAAGGGCTGGGCGTGG
TGGCTCATTCCTGTAATCCCAGCACTTTGGGAGGCCAAGGTGGATCACCTGAGGTCAGGAGTTTGAGACT
AGCCTGGTTAACATGGTGAAATCCCATCTCTACAAAAATACAAAAATTAGCTGGGCATGATGGTGGGTGC
CTGTAATCCCAGCTACTGGGGAGGCTGAGGCGGGAGAATCGCTTTAACCTGAGAGGCAGAGGTTGCAGTG
AGCTGAGATTGCGCCATTGCACTCCAGCCTGGGCGACAGAGTGAGACTCCACCTCAAAAAAAAAAAAAAA
ACACTAAGTAAAAGAAGCCAAAAGATTATATATTGTATGAATCCATTTATATAAAGTCAGGAAGGCAAAT
CTATAAAGTAGTGGTTGCCTGGGGCTGTGGGTGGGTATGTGGAAGCTTTCTGGGGTAACTGAAATGTTCT
AAAACTGGATTGTGGTGATGGCTGTACAACTCTAAGAATTTACAAAAATTATTAAAATGTGCACTTATAC
AGAGTGAATTTTATGATCTAAAATTTACATCCCAATAAAGCTGTTTAAAAACAAACACACAGACAAACAG
AAATAATACCAACCATAACTAAATTCATGTAGAAAGTAGAAGAGAATTCTTTTCAACTTTTTCTTTTAGG
CTGGCAAAACCGTGATACCAAAAGCTGACAAAGACATTATTAAAAAAGAAATTTATGGACAAATATTCCT
CATGAACACAAATGCAAAAGTCATTAACAAAATATTAGCAAATTAAGTCTATTAATAAAGAACAAGCTTA
ATACATCATGACAATATGGGGTTTATCTCATATGAATTCAAGGTTGATATAACATTTGAGAAAAAATAGA
GTTCACCACATGTGAACGACAGCCCTCCAAAAATATCTATGCCCTAATAATCCCTGCAACCTGTAATTAT
CTTGCATGTCAAAGGGAAATTAAGGTGCCAAAGGGAAATTGAGGTAGCCAATGTAATTAATCAGCTAACC
TTAAAATATGCAGATTATCATGAATTACCTAGTTGGGTCTCATGTAATCACAGGGACCCAAGTGTGGAAG
AGGGAGGCAGAAGAGTATCAGAGTGATGTGGTATGAGAAGGACTCCACTGGCCATTGGTGGTTATGAAGA
TGGATGGGGGCCATGAGCCAAGGAATGCAGGCAGCCTCTAGAAGTTGTAAAAAATACAAAAACTAATTCT
CCCATAGACCTTCCAGGAAAGAACACAGCCCTGTTAACACCCTGAGTATAGCCCAGAGAACCTCATTTTG
TACTTTTGAATATACAGTAAATTTGTGTTAAGTCACTAGCTCTGTCGTAGTTTGTTACAGCAGCAATAAG
AAATCAATATACCACATTAACGAAATAAAAAATTATATGGGCCAGACGCGGTGGCTCACACCTGTAATCC
AAGCACTTTGGGAGGCCAAGGCGGTGGATCACCTGAGGTAAGGAGTTTGGGACCAGTCTGGCCAACATGG
TGAAACCCTGTCTCTACTAAAAAATACAAAAATTAGCCGGGCATGGTGGTGGGCACTGTAGTCCCAGCTA
CTCAGGAGGCTGAGGCAGGAGAATTGCTTAAACCCAGGAGGCGGAGGTTGCCAGTGAGCCGAGATGGCGC
CATTGCACTCCAGCCTGGGCAACAAGAGCAAAACTCTGTCTCAAAAAGCAAACAAACAAACAAGCAAACA
AAAATTATATAATCACTTTAATGCAGAAAAAGCATTTGACAGAACTCAATACACATTCATGATGAAAACA
TTTTTTTTTTTTTTGAGACGGAGTCTCGCTCTGTTGCCCAGGCTGGAGTGCAGTGGCGCGATCTCGGCTC
ACTGCAAGCTCCGCCTCCCGGGTTCACGCCATTCTCCTGCCTCAGCCTCCCGAGTAGCTGGGACTACAGG
CGCCCGCTACCACGCCCGGCTAATTTGTTGTATTTTTAGTAGAGACGGGGTTTCACCGTGTTAGCCAGGA
TGGTCTCGATCTCCTGACCTCGTGATCCGCCCGCCTCGGCCTCCCAAAGTGCTGGGATTACAGGCGTGAG
CCACCGCGCCCGGCCGAAAACATTTTTTTAAACCAGAAATAGAAATAGCAGACTTTAAGATAAAAAGCAT
GATCAAATAAAAAAGGAGAGATTTAATGATGATAAAGTGTCCATCTGTCAGAAGATATAAAATTCTAAAT
TATATGCCACTAATAATATAGCCTCAGGGAAAAAAACTGGCAGAAATAGAAGGAAAAGGAAATTATAACT
ACAGTGGATGGGTTTTTTAAAAAATTATACTTTAAGTTCTAGGGTAGATGTGCACAACGTGCAGATCTGC
CACATAGGTATACATGTGCCATGTTGGTTTGCTGCACCCATCAACTCATCATTTACATTAGGTATTTCTC
CTAATGCTATCCCTCCCCCAGTCCCCCATTCCCCTACAGGCCCCAGTGTGTGATGTTCCCCAGCCTGTGT
CCAAGTGTTCCCTCTGTTCAACTCCCACCCAAGAGTGAGAACATGTAATGTTTGGTTCTCTGTCCTTGTG
ATAGTTTGCTGAGAATGATGGTTTCCAGCTTCATCCATGTCCCTGCAAAGGACATGAACACATCCTTTTT
TATGGCTGCATAGTATTCCATGGTGTACATGTCCCACATTTTCTTAATCCAGTCTATCATTGATGGACAT
TGGGTTGGTTCCAAGTCTTTGTTATTGTGAATAGTGCCACAATAAACATATGTGTGCATGAGTCTTTATA
GTAGCATGATTTATAATCCTTTGGGTATATACCCAATAATGGGATTGCTGGGTCAAATGGTATTTCTAGT
TCTAGACCCTTGAGGAATCACCACACTGTCTTCCACAATGTTTGAACTAATTTACACTCCCACCAACAAT
GTAAAGGCACTTCTATTTCTCCACATCCTCTCCAGCATCTGTTGTTTCCTGACTTTTTAATGATTGCCAT
TCTAACTGGTGTGAGATGGTATCTCATTGTGGTTTTGATTTGCATTTCTCTGATGACCAGTGATGATGAG
CATTTATTCATGTGTCTTTTGGCTGCATAAATGTCTTCTTTTGAGAAGTGTCTGTTCATATCCTTTGCCC
ACTTTTTGATGGGGTTGTTTGTTTTTTTCTTGTAAATTTGTGTAAGTTCTTTGTAGATTCTGGATATTAG
CCCTTTGTCAGATGAGTAGGTTGCAAAATTTTTCTCCCATTCTATAGGTTGCCTGTTGACTCTGATGGTA
GTTTCTTTTGCTGTGCAGAAGCTCTTTAGTTTAATTAGATCCCATTTTTCTATTTTGGCTTTTGTTGCCA
TTGTTTTTGGTGTTTTAGACATGAGGCCTTTGCCCATGCCTATGTCCTGAATGGTATTGCCTAAGTTTTC
TTCTAGGGTTTTTATGGTTTTAGGTCTAACATTTAAGTCTTTAATCCATCTTGAATTAATTTTTGTCTAA
GGTGTAAGGAAGGGATCCAGTTTCAGCTTTCTACATATGGCTAGCCAGTTTTCCCAGCACCATTTATTAA
ATAGGGAATCCTTTCCCCATTTCTTGTTTTTTTCAGGTTTGTCAAAGATCAGATAGTTGTAGATGTGTGG
TATTATTTCTGAGGGCTCTGTTCTGTTCCATTGGTCTATATATCTGTTTTGGTACCAGTACCATGCTGTT
TTGGTTACTGTAGCCTTGTAGTATAGTTTGAAGTCAGGTAGAGTGATACCTCCAGCTTTGTTCTTTTTGC
TTAGGATTGTCTTGGCTATGAGGGCTCTTTTTTGGTTCCATATGAACTTTAGAGTATTTTTTTCCAATTC
TGTGAAGAAAGTCATTGGTAGCTTGATGGGGATGGCATTGAATCTATAAATTACCTTGGGCAGTATGGTC
ATTTTCACAATATTGATTCCTCCTATCCATGAGTATGGAATGTTCTTCCATTTGTTTGTGTCCTCTTTTA
TTTCGTTGAGCAGAGGTTTGTAGTTCTCCTTGAAGAGGTCCTTCACATCCCTTGTAAGTTGGATTCCTAG
GTATCTTATTCTCTTTGTAGCAATTGTGAATGGGAGTTCACTCATGATTTGGCTCTCTGTCTGTTGTTGG
TGTATAGGAATGCTTGTGATTTTTGCACATTGATTTTGTATCCTGAGACTTTGTTGAAGTTGCTTATCAG
CTTAAGGAGTTTTTGGGTTGAGATGATGGGGTTTTCTAAATATGCAATCATGTCATCTGCAAACAGGGAC
AATTTGACTTCCTCTTTTCCTAATTGAATACCCTTTATTTCTTTCTCTTGCCTGATTGCCCTGGCCAGAA
CTTCCAACACCATATTGAATAGGAGTGGTGAGAGAGGGCATCCTTGTCTTGTGCCAGTTTGCAAAGGGAA
TGCCTCCAATTTTTGCCCATTCAGTATGGTATCGGCTGTGGGTTTCTCATAAATAGCTCTTACTATTTTG
AGATATGTTCCATCAATACCTAATTTATTGAGAGTTTTTAGCATGAACTGGTGTTGAAATTTGTCCAAGG
CCTTTTCTGCATCTATTGAGATAATCATGTGGTTTTTGTCGTTGGTTCTGTTTATGTGATGGATTACATT
TGTTGATTTGCATATGTTGAACCAGTCTTGAATCCCAGGGATGAAGCCAACTTGATCATGGCACATAAGC
TTTTTGATGTGCTGCTAGATTCGGTTTGCCAGTATTTTATTGAGGATTTTTGCACCAGTGTTTATCAGGG
ATATTGGTTTAAAATTCCCTCTTTCTTATTATGTCTCTGCCAGGCTTTGGTATCAGGATGATGCTGGCCT
CATAAAATGAGTTAGGGAGGATCCCCTCTTTTTCTATTGATTGGAATAGTTTCAGAAGAAATGGTACCAG
CTCCTCTTTGTACCTCTGGTTGAATTCGGCTGTGAATCCATCTGGTCCTGGACTTTTTTTGGTTGGTAGG
CTATTAATTTTTGCCTCAGTTCCAGAGCCTGTTATTGGTCTATTCAGAGATTCAACTTCTTCCTGGTTTA
GTCTTGGGAGGGTGTATGTGTCCAGGAATTTATCCATTTCTTCTAGATTTTCTAGGGTTTTTTTTTTTTT
TTTTTGCATGGAGGTGTTTATAGTATTCTCTCACGGTAGTTTGTATTTCTGTGGGATTGGTGGTGATATC
CCCTTTATCATTTTTAATTGCGTCTATTTGATTCCTCTCTTCTTCTTTATTAGTCTTGCTAGTGGTCTAT
CAATTTTGTTGACCTTTTCAAAAAACCAGCTCCTGGATTCATTGATTTTTTGAAGGGATTTTTGTGTCCC
TATCTCCTTCAGTTTTGCTCTGATCTTAGTTATTTCTTGCCTTCTGCTAGCTTTTGAATGTGTTTGCTCT
TGCTTCTCTAGTTCTTTTAATTGTGATGTTAGGGTGTCAATTTTAGATCTTTCCTGCCTTCTCTTGTGGG
CATTTAGTGCTATAAATTTCCCTCTACACACTGCTTTGAATGTGTCCCAGAGATTCTGGTATGTTGTGTC
TTTGTTCTCATTGGTTTCAAAGAACATCTTTATTTCTGCCTTCATTTTGTCATTTACCCACTAGTCATTC
AGGAGCAAGTTGTTCAGTTTCCATGTAGTTGTTTCCATGTAGTTGAGTGAGTTCCTTAATCCTGAGTTCT
AATTTGATTGCATTGTAGTCTGAGAGATAGTTTGTTGTGATTTCTGTTCTCTTACATTTGCTGAGGAGTG
CTTTACTTCCAATTATGTGGTCAATTTTAGAATAAGTGCGATGTGGTGCTGAGAAGAATGTATATTCTGT
TGATTTGGGGTGGAGAGTTCTGTAGATGTCTATTAGGTCTGCTTGGTGCAGAGCTGAGTTCAAGTCCTGG
ATATCCTTGTTAACCTTCTATCTCGTTGATCTGTCCAATATTGACAGAAGGTTGTTAAAGTCTCCCATTA
TTATTGTGTGGGAGTCTAAGTCTCTTTGTAGGTCTCTAAGGACTTGCTTTATGAATCTGGGTGCTCCTGT
ATTGGGTGCATATATATTTAGGATAGTTAATTAGCTCTTCTTGTTGAATTGATCCCTTTACCATTATGTA
ATGGCCTTCTTTGTCTCTTTAGATCTTTGTTGCCTTAAAGTCTGTCTTATCAGAGACTAGGATTGCAACT
CCTGCTTTTTTTTGCTTTCTATTTGCTTAGTAGATCTTCCTCCATCCCTTTATTTTGAGCCTATGTGTGT
CTCTGCATGTGAGATGGATCTCCTGAATACAGCACACTGATGGGTCTTGACTATCTAATTTTCCAGTCTG
TGACTTTTAATTGGGGCATTTAGCCCATTTACACTTAAGGTTAATATTGTTATGTGTGAATTTGATCTTG
TCATTATAATGTTAGCTGGTAATTTTGCCCGTTAATTGATGCAGTTTCTTTATAGCATCGATGGTCTTTA
CAATTTGGCATGTTTTTGCAGTGGCTGGTACCAGTTGTTCCTTTCCATGTTTAGTGCTTCCTTCAGGAGC
TCTTGTAAGGCAGGCCTGGTGGTGACAAAATCTCTCAGCATTTGCTTGTCTGTAAAGGATTTTATTTCTC
CTTCACTTATGAAGCTTAGTTTGGCTGGAAATGAAATTCTGGGTTGGAAATTGTTTTCTTTAAGAATGTT
GAATATTGGCCCCACTCTCTTCTGGCTTGTAGGGTTTTTGCTGAGAGATCTGCTGTTAGTCTGATGGGCT
TCCCTTTGTGGTAACCCAACTTTTCTCTCTGGCTGCCTTTAACATTTTTTCCTTCATTTCAACCTTGATG
AATCTGACAATTATTGGTCTTGGGGTTGCTCTTCTCGAGGAGTATCTCTGTGGTGTTCTCTGTATTTCCT
GAATTTGAATGTTGGCCTGCCTTGCTAGGTTGGGGAAGTTCTCCTGTATAATATCCTGAAGAGTGTTTTC
GAACTTGGTTCCATTCTCCTCGTCACTTTCAGGTACACCAATCAAACATAGATTTGGTCTTTTCACATAG
TCCCATATTTCTTGTAGGCTTTGTTTGTTTCTTTTTACTCTTTTTTCTCTAATCTTATCTTCTTGCTTTA
TTTCATTAATTTGATCTTCAATCACTGATATCCTTTCTTCCACTTGATCGAATTGGCTATTGAAGGTTGT
GCATGCATCACGAAGTTCTCGTGCCATGGTTTTCAGCTCCATCAGGTCATTTAATGTCTTCTCTATGCTG
TTTATTCTAGTTAGCCATTCGTCTAACCTTTTTTCAAGGTTTTTAGCTTCCTTGCGATGGGTTAGAACAT
GCTTCGTTCGCTCAGAGAAGTCTGTTATGACTGACCTTCTGAAGCCTACTTCTGTCAACTCGTCAAAGTC
ATTCTCTGTCCAGTTTTTTTCCGTTGCTGGCGAGGAGCTCTGATCCTTTGGAGGAGAAGAGGTGCTCTAG
TTTTTAGAATTTTCAGCTTTTCTGCTCTGGTTTCTCCCCATCTTTGTGGTTTTATCTACCTTTGGTCTTT
GATGTTGGTGACCTACATATGGGGTTTTGGTGTGGATGTCCTTTTTGTTGATGTTGATGTTATTCCTTCC
TGTTTATTAGTTTTCCTTCTAACAGTCAGGTCTCTCAGCTGCAGGTCTGTTGGAGTTTGCTGGAGGTCCA
CTCCAGACGCTGTTTGCCTGGGTATCACCAGCGGAGGCTGCAGAACAGCAAATATTGCTGCCTGATCCTT
CCCCCGGAAGCTTCATCCCAGAGGGGCACCTGCCTGTATGAGGTGTCTGTCGGCCCCTACTGGGAGGTGT
CTCTCTGTTAGGCTACACAGGGGTCAGGAACCCACTTGAGGAGGCAGTCTGTCTGTTCTCAGAGCTCAAA
CACCATGCTGGGAGAACCACTGCTCTCTTTGGAGCTCACCTGGAAATGCAGAAATCACCTGTCTTCTCCA
TCGATCACGCTGGGAGCTACAGACTGGAGCTGTTCCTATTTGGCCATCTTGGAATGGACCCCCCTATAAA
AAAAAAAAAAAGGAAATGGATGTTTTTAATACATCTCTCTCAGTAAACCTAAGTAAAGATGTAAGAGATT
TGAGAAACAAGACTAACAAACTTGAATTAATGGACATATGAAGAAGATTCCACCCCAAAATGTCAGAATA
TGTCCCTCTTCAAATACAAGTAAAACTAATATTGGCTGAGCATGGTGATGACGTCTGTAATTCCAGCACT
TTGGGAGGCCAATGTGGGCGATCATTTGAGGCCAGGAGTTCGAGACCAGCCTGACCAACATGGCAAAACC
CCGTCTCTACTAAAAATACAGAAATCAGCTGGGTGTGGTGGCACGTACCTGTAATCTCAGCTACTCAGGA
GGCTGAGGCAGGAGAATCACTTGAGGGGGATAGAGGTTGCAGTGAGCTGAGACAGTGCGGCTGCACTCCA
GGCTGGGTGACAGAACAAGACTCTATCTCAAAAATAAATAAATAAATAAATGAAAATAAAACTAATATTA
AACATATGTTGAGACACAAATGCTCAACAAATTCAAATGAATAAAATAATATAATCCTTGACTGAGTAGA
ATTAA

[0139] An exemplary DNA sequence of human Anapc13 is provided below.

gi|224589815: c134206112-134195297 Homo sapiens chromosome 3,
GRCh37.p13 Primary Assembly
(SEQ ID NO: 304)
CTAAAAATGGTACTGCATGCCAAATAAGAAAATATATACACTTTATCATTAAGCTACAGCTAACAGAAAT
CTAATCAACGATCCTTATGATTTCCTCGTATCTAAAAAATAAATGCAAGCACTTGAGGAACTGTATAAAT
ACAGGGCATCTACCCTACAATACTGCTTTATTAAAATAATAAATTCTTTTAATAAGTTTAACCAGACATA
AGGCTCAGGGAAAACTACTCTGTGCATATCAGCGTACGGTGCTGAAACTGTAAAAGACGACCTGTCTCTG
ACATCATACTCATCTTTACTCTCCTGATGTCGTAAGGGACGTAAGAAAAACCACATTATAAGCCTAAATG
TACTGTCTTCAAGTATCTCCATGATTAAAGTGTTCCTAAGAAACCGTCCTTATTTCTTTCTATCCCTCAT
TTGTGTGCATGGAGCCGTTAGTTCAGGGTTCTCCAATTTCAGTCCACGATTTATGCCACATTTCCGTACC
TCTTGTACTAACATAACCGTTTAAACCAACTCACTATTTTAAAAGCTGCCAACCTTAACATGCCACACTA
AATGAGCGGGTCCCCTTGTGCCGTGAATGAAGTAGTCCCAACAGCGCTAGCTAGACAGCAGCCCTGGCAG
GGAGGCCGCACTGGGGTCTCTCCGCTGAAAAGGAAGGTGGGTCCGCCGGGGAAGGTGAGTACTGGGCGCA
GCTCGCTCGCCCACCTGGCCACTCTCCGAAGCGCCCCCAGCCACCTGGACTCCGAGGAAGGGCTGACCAC
CTGGCGGGGCCGAACCCCACGCCGGGCTGCGCCACGCCAGACTCCGCCAGTGTGCAGGGCATAGCGGGCC
AGGCCGAGGGACTGGGCTTCGGGGCGGACCCAAGCCGGCGGGGACGCGCCTGGTGGTTCGCAGGCCGTTG
CGCAAACCGGCCGCAAGCCATGAGGCCGCGAAGCCAGAATCACCAAGGCAGCCTGGGCCGCCTCCAGACC
AGGACACGGCAGCCCCTTGCCCCTCCAACTTGCGCACCGGCGGTTACAGGGTTGCCGCAAGCACGCCCCT
GAGCCTTCCCGCCGTTACCTCGGGCCGGCGCTGCGCACGCGCGCCACCGCTAAGCTTACGTCCAGCCTCT
GTAGTCGGCGCGTTTGTTCCGCCCACTGCCCCCACACTTTTAATAATTGAAACAATGCCTTCTCCAGACT
TCCCCTGCACGCGAGCAAATGAACTCACCCACATCCGGGAATCCGAGGAAAGCGAGTGCAGACACGTGAT
GCGGGGGAGGGGGGGGGGGCGTGGCAGGAGCAAGCGTCTGCCGCGGTGGCCGGGTGCCGGTAAGGGTTTC
CAGCGCCCCCGGCCTAGGTTTTGGAGGCGCGGGAATGCGTTCGTTGCTCAGTGTCGGACTTCCCCCTATT
CCCATCGGCCGAGGCTGTCACTTTACGCTCATAACCGTTTTTCTTTACTGCACTCGTGTCGGGAGGAAAG
GGACTTGCGTGGCACCCCCAGACCTCCCCGTCTCCGCTTCCACGTTTGGTACATCCTGCCTGAGGCAGGA
AGCCGCAGCTGAGGGACGGCCTGTCGTACGGTGCGGATGGTGGTGGCCTGCGAGGCTCATTTCTAGCAAG
GAACAAGGCTTTCCCGCTTTGATTTTATAAATATTATGTTTACAAAGCTGTAATATATAGAAATTGATAA
GACGTGTCCCTGTCCCTGGAAACGCAGGCACCGCGTGTTTGGAAAGACATTCATCTGGGCTGTTTGACAG
ACTCCCCAGTTGGTGCCATGCTCTGTGCTTAGGGAACTGTGAGACCCCTGGAGGGGTGGGTACCGGGACC
GCACTCAGCCTGGGGTTTGGAGGCGGCCTCCTATAGGAAGCGACCTGGGACCTAAGATTTTTAGACTGAC
TGTGGGTTCACTGGAATAAAAAGGAAGAAACAAAGAGCATTGCAGGCATCGGGACTGTCACGTGAGTAAG
AAAAGTTTGTTCAGGAAACAGTGGTCGTACTGGGTGACGAGTACTTGGGACGGTGGCTTTAATACACAAG
ATAATCAGTGTGCCCTGGGCATTGATTATCTTGATGCTTCCCATCCTTCCAGCCCCTTATGAGGGAAGGC
ACCTTCGCGCCTAATCCCGGAAATGGGATGTTGACCTTCAAGAGCTGACGCCTGCGTTTATCTTGAAAGG
AAGAGTGGCATTAGTGATGTGGAAAAGGGGGTTTTAACTGTCAAGGCTGGAAAATGTGACAGGGTTGGAG
GTGTTTGGAGAAGGGACAGGTGAAAAAGATTGAGACCAAATGTGGAAAGATCTACTAAGGAATCATGGGT
ACAAAATGTACACGTAACAGTTGGAGGCAATAATACCTGAGCAATTGACCACAAAGCTGACCTAGCTTGT
TTAGTAGATTAAGTTAGGACAAGAAGCAAGAGTTCAAGGATAGAAGGCCTACTGAAGCTCGAGTGATTTG
AGAAAACTTTACAAAGGTGGAAAATCTACGTGGGCCTCCGAAAGTCAGGTTTGGATCAGCTGAGGAAAGT
GAGAAGGGTATCCCAGGAGACAGAGCAGCAAGGACAAAGGAGTAGCAGCAGGAAAGTGGGGAGCACTTGT
AAGACAGGGACTTCAAAAGTATAACCAAAACTTCGTCTTGCTTTGAGTTATCCACTGGGTAGTACTCGGT
TAATTATTGAGTACTGGATTAATTAAGCCCTCACCTGGCTCACCGGTGACAGAAGTAGCAGGGCGCATTT
TGCTTAACTTTTGCCGAGATCCTTGTCATGGGGGTGTAAACCCTTTCCCACACCAATCTGTGTATAATTT
TTGCCAAGGTGTTAGGGATATCTTGCAGTTATCCTATGGGGGACAGCTGTGAGCCTTTTTGGTTTTTTTT
GTTTTTTTTTTTCCGAGACGGAATCTTGCTCTGTCGCCCAGGCTGGAGTGCAGTGGCGCGTGGCGCTATC
TCGGCTCACTGCAAGCTCCGCCTCCCAGGTTCACGCCATTCTCCTGCCTCAGCCTCCCGAGTAGCTGGGA
CTACAGGCGCCTGCCACCATGCTCGGCTAATTTTTTGTATTTTTAGTAGAGACGAGGTTTCACCCTGTTA
GCCAGGATGGTGTTGATCTCCTGACCTCGTGATCCGCCCACCTCGGTCTCCCAAAGTGCTGGATTACAGG
CGCGAGCCACCGCGCCCGGCCCTGTGAGCCATTTTTACAAAAACTTCCACCTGCCTTGGCCCAAACCTCA
GCGTTCTTAGGCACAGGAGCTCATGAACATACTGAGATAACACTAAACTGGACTATGCGAAGGGACCAAC
TACAGACCTGACACAAATCCTCAAGGCAAGACGATGTCTGAAGTTGAGCTTGTAAAGGAAATGGCTTCCT
TCCTTAAAATATCACCCAGGCTGAGCTCTGAAAAAAGCACCTCCAGATGGTGGGTTCCACCCCGCTCCAC
CACCCCAAAATTGCTTATTGTGTGAGTCTCCATAGTCTCAGAAACTGAGAGTACCTTTGATGCCAGTGGC
TTCCGGGCTTTTTGGATTGTCACTTGGTAGCAGGGAGCACCCATAGGATGATGCCTATGATGAGTCAGGG
CCCAACCTTGGAAACAGGGAAATCCAGAAGTATCCTACAAGCTAGCCAGCCTTTTGGATTAGATTATAGC
AGTTTCAGAGAAAAATGGGGAATCAGCCATGGTCAAGGAGCTAAATAAGCATCGTGACCATTTGGGCCAG
AAATTGAAGGGAGTGTAGCGTTAAGAATTAGAGGAAGGAACCTCCGAGGAAGGAGCTACCCCAAAGGGAA
GCAGAAACTGGAGAAACTTTAGCAGTATGAGGTTCTACCACTGGTGTTCACCTAGAAGTGCTTTATTCAG
ATCTCAGCCTGGGTACTATTTTAGGGAAGGAAGCCGTTTCCTTTACAGTATGTTCGTGTGACTCCTGTGC
CTAAGAATGCTGAGGTTTGAGCCAGGGGCTAGAAAGGAAACTTAGCTGGCCATTATGAATCAGGGACTCA
TCAAAGGCATCACAAACAGGAAAAGGTGAATGTTCAAGTTAGAAGAGAAGAGCTACATTGAGATGCAACA
TATTAATATTTGAGGGCCTCGTTTAACGTGTTGCTCTCCTGTCACACTCTATGACACTGGTCTGTCAGCT
GGGCTATGCCTGTCCAGTATACACTATAAAATATGTATCAGTTGGGGTTGGAGAGAGGAACTGTGATCAA
AGTAGTCACCCGGCCCATATGAGAAAATGAACCTTTTCCCAAAAGGTGGCCCCAGACTAAAAAGCCTGGA
GAATCCTAATAGTGGATTATACCATCTCTTCAGTCTTCGTGTTTAAGAAATAACCTCTTTGGCTTACAGA
TTTGACAAGATCAAAGCTGCAGGAAAATGGACAGTGAGGTTCAGAGAGATGGAAGGATCTTGGATTTGAT
TGATGATGCTTGGCGAGAAGACAAGCTGCCTTATGAGGATGTCGCAATACCACTGGTAGGTTATGATTTG
AGCTGAGGATGGGTTAAAGGTATTGATCTGGCAGTAACTAGTGGAGGAGGGATATCAATGGAAGATAAAC
TAGTGTGGCAAAGAAATCAAAGCTGTGGAATTCTCTAACTCTAGAAGCTTCTGGAGAGCATCCAGTTGTA
TGTTTTATTTGAAGAAAAATGTGGTTCAGGGAGCTAACATGGCCAGGTCAGTTAGGAGTCATGCCAGGAC
TAGAGCCCCGATTTTCTGAGCCATGTTCTGTCCACCACACGAAAACCAGAGAAACCAAATAATGAGAGTT
TAATGCGCAAGATGGGGAAGAACAAGAAGCAGCAGCATATGAGCTCTGTTTCTTACTTCCCTGCCTGTGG
CTCATCAGTCTTTCAGCATTTTTAGAAACTTACATTCTTGGAGCATACACCTATCTTAGGTTCCCTGGAA
AATATTCAGAAGATACCTGGGTATTCTTTTGCGTTTAGGCCAGTGGCCTTCTGGAATACTCTTTTCTTCC
CCATCTTTGGAAAACTCTGCTGCAGGGAGTTTGTTAAACCTCATGTAATAAGTGATCCAAAAGTTTTGCT
TATATAAATGTTTGTTTAAAATCCTATTTATGTCATAGAGGCCTAAAAAAGGGAAAACAGGACTGTTTTT
CTTTAAAGCATGCCAGCTGCCCTGAGAAGAGTAGTTAGTATTGAATAAAATATAATTTATAGTTAGAATA
TCTGCTGTTGCTGTTTGCAAAGAAATAAAATAGTTCATCTGTATTTTCATTTACGAATAAGAGATAGTAA
TATGTTCAATGAATAATATACATATCAAATAAGTCATAGCTTAGTTCAAGCTTAGGAAAATAGTCAAAAG
AGAGAGCATAATAAGAATTATAGATGTCATTTATTGAATACCAGTTTTATGCCATGGACTGAGGTTGGAA
ATATACATTATCTCTAATTCTTAAACAACCCTGTGAGGGAGGTGCTGTTATTCCCATTTTATAGGAAAAG
AATAGGATCAGAAAGGGCAACTTGCCCAAAGTCTGGTAGCAGGTAAGTAGGGCTTCATATAACATATACC
TAGGTCTGTGAAGTTCCAAATCCTGTCTTGTGAACTTCTGTTCATTCATTCATTTGACAAGCATTTTTTG
AAGCCTACTGTGTGCCATAAGACTATGTGAACATAAGATACAGTTCCTCCTCCTGAGGGGTCTAGAAAGG
CAACACTTATAGATAAGTAATTGTGATAATAAATATTCTAGGTGGGGGCATAAACAGCCACATCATATAC
GAAGTGGCTGATTGCCTGGTGGGCATCAGAAAGGCTTCTGAGAGAATGTCATGTTTAAGCTGGGTCATAA
GGAAGGACCAGAAGTTTAGTGGAGGTAGACAAGGGTATTGCAGCAGAGGGGACAGATGTGTAAAGGCCCA
GAGTTTTGAAAGGCTTTGGGACATGGTGAGTCATTCACTGTGGATGAAGAATACATTTGTCACATAAGTA
GGCTGAAAAGTTGGGCTTGGATCAGATTGAGAGTGGTATTTGATATCACACTTAGACCTCATCCTCAGGA
GATCCAGGAATGAATGGTCTTAAAAGCAAGACTGCTATGCTCAGATTTGGCTTTTGGAAAATCAGTTTAG
CCAGCATTGTTAGAGATGGTGTGACATGGAGATAGGGGCAAGTGAGACCAATTGGCAAGCTGTTGTGGTC
TAGGCAAGGGAGGAGGGCCTAAACAAAGTCAAGAAAATAAAGGAGACGTCCATTTCTGGAGAAGTTTATG
GCTCAGATTGGAGAACATTTGGGTGGCAGGGGTGGAAGGAGGTTTCCCTGCTGACTTCCAGGCGAAGTTG
GCTTGGCCCTGCTGCTAATCCACACCTTTCGCTTGTCTTGCGATTCTAAGGCAATGTGTATGCCAGTTAG
GTTTTGCTGCATAACAAGTCACCCCAAAGCTTAGTGACTTAAAAGAGCAACTGTTTATTTCATGATTTTG
TAGCTCAGCTGGGAGGGACTTCTAGTCTGCACCAGCTCAGCTGATCCCTGCCAGGCTTGCCTGTGTTGTG
CAGTCAGCCAACAGACTCTGGAGGCTGGGTAATCTAGGACTGTCTCACATGTCTGGCAGTTAACAAGCTG
TCTGCTGGGTGATGGGGTGACTATGCCATGGTCTCTGGTATCCAGCAGGCTAGCCCAGACTTCTCAATCT
CAGGGTTCCAAGAGCAACCTGAGAGGAAACGGCAGAGCTTCTTGGAGCTTAGGCCAAGAACTGGCCCACT
GGCATGACAGCTTCATTCTGTTGGCCAAAACAACTCACAGGGCCAGTCCAAATCCAAGATTGGGGAAATC
AGTTTCACCTTTTGATAAGAGTAGCTGCAAAGAACTAAGGGCATTTTACAGTACACCATAATGGGTGGCT
GGGTTTATGATACTTTTGTTTTTGTTTTCCAGGCATATATGCCATTTTATGTGTTGGCATGTATTGCAAG
GGACAGTAGATACCAAATGAAAGACACATTATTTTAGAAAGCATACCACAGATAGGATGAAATTAAGCAA
CGTTGTCTGCTTCTGAATTAAAGAATTCATTAACCAAGGACCTATTTATTCTTTGTCATCTATAAGTAAT
TATTAGGACTGAACTTTCTTTTTAAGTTTAAGATAATATATTATTGCGTTACAATAAATGATAGCTCTTC
TCAATCTGTTCAAGTATGTTTGAATCTGTCTTGTAGAACAAGATGTATGTGATTCAAATATAGATAAGTA
AATATCATTTAATATATATTGAGCATAATTTTAGAGGGGAAAACATATTCACATACTACAAATTAGAATC
CAGTGGAAAATTTTAAGTCTGGATATCGCATAACAGTTTGCTAACCATAAAACAAAACACAGATAATTGA
AAAGAAATATATTGGTATCTGTGAACTCTGGTACAAAGCAGAGTTTCAGTAGTAATACATTTAAACTTAA
AATACAAGTAAATGATCCCAGATCCTACAGTAAGTGTGGCCCATGACTTACCATTTTAAGAAAATTGCTG
GTAGGGTGTGAATTGGTCATTTGTTGTGTTTTTTGTTGCTCTGCTCCACCACTAGAGGGAGGTCTTATCT
ATTAATTACATTTTCAGTGTTTCCTGCCCTACCTCCATTTTTATTATAATATAGACATGTTGGGCCAGGC
GCGGTGGCTCGCGCCTGTAATCCCAGCACTTTGGGAGGCTGAGGCGGGTGGATCACCTGAGGTTGGGAGT
TCGAGACCAGCCTGACCAACATAGAGAAACCCCATCTCTACTAAAAAAAAATAAAAAAATACAAAATTAG
CCGGGCATGGTGGTGCATGCCTGTAATCCCAGCTACTCGGGAGGCTGAGGCGGGAGAATCGCTTGAACCC
GGGAGGCAGAGGTTGTGGTGAGCCGAGATCACGCCATTGCTCTCTAACCTGGGCAACAAAAGCAAAACTC
CATCTCAAAAAAAAAAGACATGTTGGGTCCAAGATAATTTTTTGGATACATTTCTTGTGTCTAAGGAATA
TGCCAGCAAACTAGTATTCTTTTAAAGCACGCTCCCGCTAAAGAAGATTTAGGATTCACTCATCTCAGTG
TTCCTAGCCGCTAATAATAATAGCAAATATTCCTTGAGCACTGGATACCCCACAGAGTGCTCAGCACTTG
ATCTGAATTACCTCACCTAATCCTTACAGTAGTCCTGTGAGGTGATGGCTCTTTTGTTCTCCCATTTGCC
AAGGAAGAAACAAAGGCCCCAAGGGTTTGCATACCTTGCCCAAGTAACCCAGCAAATGGGAGAGTTGTGG
TCTTGGATCCTAGTTGGCTTCCAAAAGCCTCTGCCCTTAACCTTTCTGCCACAGTGCCTCCTTCACAAAT
GTCAGAGTCAAAATGCCCATCATTCCCTACTGAAGAAGGCCCGGGCCATGTTTGAATGATACTTCTGATA
GTTTCCTCACGTGTATGATTTTAGCTTTTTTAGAATACACATATCAATTATGTTGCCTGTTCCTAGGAAC
TCACAAGCTTTAATTCTAAGTGTTCTTGAGTTCCAAGAAGATGCAGAATATATTACTGTTCTGAATTTCT
ATTGTACCTTTTCAGAATGAGCTTCCTGAACCTGAACAAGACAATGGTGGCACCACAGAATCTGTCAAAG
AACAAGAAATGAAGTGGACAGACTTAGCCTTACAGTACCTCCATGAGAATGTTCCCCCCATTGGAAACTG
ACGCTTGGCTCCTTTCTTGTGGATGGATTTTCTCAAAGTACACAGATAAAGCATGGTTTGTTTCAGTCTC
CAAATTCAAACCTTTGAGTAATAAATCAGCACTCAAAAATGTACACCCATTTAGTTTGTGGTAGCAAAGT
GCAATGCGAAATTGAATGAGAAACTGAGATTTCTCAGTAATGGTGAATATTTCGCTCTTTAAACCTAAAA
CTCTTCATTGAGTAGCTTATATTTGAACATGATTGGTTAAACATTTGCCTCTACCTCTGATTTTGCTTTG
CTGTCAAAGTTTAACACCTTCCAACTACTTATGTGTGTCCTGTAACACAGGTGATTGAACGTATGAGAGG
GAAAGGCAAAGAAAAAGGAAGCCAGACACTAGGAGAATTATTAACTTCTCATACTTCCCCACATTGAGAA
GCATTCGGAGTGTATTTAGCCTGTAGATGTTGTGATATGCAAATATCCCATTCCCTGGTTACTGGCATTC
CTAAGATTCTTCATGGTATTTTCAAACTTTGGATAAATTTACAGATTAGAAAGATATCTGACAGTTAATC
TCTGTTCTCCTTACAAATTCCTTTTGTGCTGCTGGAAAGGATCTTTGGCTAGGTGGATGACTAGTTTTAT
TCAAAGCCTTTTCTCAAAGCCCTTTCAGTTACAACCACCCCACTATGGAATCAGTATTTAGTTATACATT
TGTATAAGAACCTGTATTTTGAAAAACACATTCATGTATATTTATTCCTGGAATTATTTGCCTGTTAAAC
AGTGTCTTTCATGTTCTCTCCCCAGATTGTAAACTCTGTAAGAAGCTGCTTGTATCTGTATCCCTTGTTG
AAACTCTGAAAACACTGAATAACTAAAATCTCTTCTCATCCTTTTTATGCTGGGTCTTTTTGTTTACTTA
GCTTTTAGGAGGAAGAGGTACATGAAAAAACAAATTAGCTTATTTTAGGTTTTCAATCACAAACATGATT
TTAGCAGCTATCCTATAATCCAGATACATCCAGGCTGATTTCTTCTCTTTGCATCAGTAGTTCTGCCTAG
AAATCTTTTATCTTCAGAATAAAGACCCCAAGGCACCAGTCCCTTCAGTAAGCAAAGAAAGACAACCTAA
TAGAAAAGAGACTTACAATATTAAAAAAACTTATACAAGAGAAAAAGCTTTTCAAAAAATTAAAATACCT
AGAACGCCACAGTTCTTTCACATTCTTGTTAAATGAGGATTTTACAGCTTACTTGTGGTATGTAATCTCT
GAGACACTAACATCTAAGAACTTGACAAATGTTCATGTGAATCCTGCCTAGCCTTTCCCTGGAATATTAG
TAGACCAGTAAAATATGAAAGCTATTCTTGATTTCTGCTGAACCAGAATATGATATCTGTAAGACAGCTG
TTGGTTTGTGTCTATGACACTCATCCGAGAACTGCCGCCACCCCCAGGAATAGCCTCTGGGCAAGTTCGT
AACTTGTGTTATGGTGCCAGAACTGTAGCTCATTGTATCAGGAATTAGGTGACCTAATTTGGGCTAGTCA
GATTTTGTCAACCAGGGCTTCGAAATCTCCGTCTAGGACTGGCTTGAGGATGATGGGCACAAGAAATGCT
AAGTTGCTGTTACAGGGTAGCTTTCTTCAATTGTCTGTACCAAAACACCCAAAAAGGAAAGTATCTGGAG
AGGGAGGCCAAGAGGCTATGTGGCCTATTGGTTCCTGACAGCTTTCCAGTTTAGAGCCTGCATATTGCTT
TTCTCTGTGGGAGGCACCATGCCTGGCACTGGGAGTATAGCAATGAACAAAGTAAGTGTGGCCTCTCCCT
TCATGGAGCCTTTAGTTGGGGAGACAGGCATTAAACCATTAGCCATACAAATACATGATTTCAATTTGGG
GCGTATGCTAGGAAGGAAAAATAAAAGATGTGACTTAGGTTGGGTTCCCAGAAGCCAAGCCTGAGGCAGA
GATTTCTTGTGCAAGTGATTTATTGAGGTGCTTTCAGAAGAGTCCTGTAAGGTAAACAGGATAGGGCAGG
GAAAGAAGCTGAGCCAAGATGTGGTTTGAGCTGAAGTCTAGCTTCAGTCTGATCCAGTGGGATTTCTGGC
CCATGACGATGCCAAGAGTTTTCTCACCTTGAGGCA

[0140] An exemplary DNA sequence of human AmotL2 is provided below.

gi|224589815: c134097340-134071166 Homo sapiens chromosome 3,
GRCh37.p13 Primary Assembly
(SEQ ID NO: 305)
CTCAGGGGCCTCTTCACATTCCCTGCTGCCTCTTGCCAAGAGCAGAGGATCTTTCCAGGCAGCAATGGCA
CATCCACCAAATCAGTATTCACTCAGTATAAGGTAGCTTTGCAGAAAAGGCAGGTGTCTGGGGTTACATT
GATATTTCAAAATGGTCTTCCTTTATTCACCGGCCAGAATGTGCCCATTCTTAGATCCCCACCCCATTCT
TTCCCAGTCTGATGGCTACCCACACAAAAATATACTCAAGTGTGCGCTCCTGCAGTAGTTCATCTATGTA
TTCACCAATATCCAGACACGTCTTCCATGCAGGACTGGAAATTGTGAAGGCGCTGGGCAGTTACACACCC
TAGAAAAAGGGGAGGAAGTGGGAGCATTGTTCAGAGCTCCCTGCCCATTGTGTAACCTCACCATTCACAG
GAATCCTCTTAGCCCTGGGCTGGCAGGGGCACCAGAAAGAAGCAAAGGGCCACAGAGGAAGGCCAGGGGC
TCAAGGAATGTGTGCAGTTTGGAGAGGCAGGGCTTCTTCTTCTTCTTTTTTTTTTTTTAAACAGAGTCTC
ACCTGTCACCTAGGCTGGAGTGCAATGGAGCTATCTGAAGTCACTGCAACCTCTGCCTTCTGGATTCAAG
CTATTCTCCTGCCTCAGCTTCCTGAGCTAGGATTGCAGGCGTCCACCACCATGCCTGGCTAATTTTTGTA
TTTTTAGTAGAAACAGGGTTTTGCCATGTCGGCCAGTCTGCTCTCGAACTCCTGACTTCAGGTGAACCAC
CTGCCTTGGCCTCCCAAAGTGCTGGGATTACAGGCGTGAGCCACCGCACCTGGCTGCTTCTTCATTTTTT
TAGGACAACATCCTCTTACCTAAACCACTGTGGGGCTAATTTCATAAATCTCCAACTCTGGAGGATTTAA
CCCCCAAAGACACAGACCCCATGAGGCCCTTTGTGCATAACGGAGATTCCAGACCTGAAGCATGAGAGTG
AAAGGGAGAGGGGGCAGCAGTGGAAGGAGGAGACTTGGGGGAGAAAACCTAGAGGCAGTGATGAAGGCAG
GGGAGGAGAAAGGGGTGAAGGGGGGACAGGGGTTTGCAGAAGGACAAAGAGAAGAAAGTCCCCCACTTGG
GTCTTCTTCTGTTCTTGGAACTGGAGCACTGGAACTTCCATCCTAATGTTCAGATTCTTCCTATGAATTT
GCTTCATGCTCCAGATTCCGGTAGGTTTCCTGTTTCCATAACCTGTCAGAGGGAGTGTTCAGGGGAAGCT
GGAAAAGTGAATTTCACAACTAACAGTCATCCTTTGATCTTGCCACCTGCACCCTGGAGCTCTCCTCCAC
TAAGCAACCATTTGGGAAGTAAGGGGAACATTTCCTTCCCGGCTCCATGGGAGGAGGCTGCTAGGGTCCC
ACCAAGAACTCACTTTCATGTTCTGGTTGGGTGCAGTGGGATGCAGCTGCAGGGCCAGACTGAGGCCATA
AAACAGGCACAGACCCAGACCGGGGCTAAGGAGAGGCGATGGTGTGGGTGCCTGGATCCCTTGCTAAGCC
CTGTACACACCTATGATGCAGCCACACCCCAAGGAGCTACACTTCCTAGAGCAAAGGCCTCCAGCCTGGC
TTACTCTGAGAATTAGGTCACCTCCGCATCTTTCCTGGATAGGATTCCTGACCCAGCCAGCCACATTGTC
ATCTGGGAAGAATCATAACCTGTAGGAGGAAGAGAGGAGGTAAAGGAGAATGGGACAAAGTAGATTGAGA
CAAAGGTGGAAGAAGAAAGCATTGGCTCACTAAGAGAGCCTCTCTCCCCTCTGCTGTAGGTGAAGATTCA
TATGCAAGCAGGCTGGCCGGCCCAGTGTCCCCTGTGCACATCTGCCTCTGGCACATCTGAACAGTGGTCA
CCTTCTCCACCAACTATCCTGCAGAGCTGGGGTGGCCGCCAGCTTAGGTAGGCTCCACCGCAGGCCATGC
CTGACAGATCTTGCCTTCTGTTCTTTCTGCAGAGAGAAAGGGAAAGGAAAAATAAAAGTACATGCACATT
TCTCATTTAGGTTTTGGGATCCCTCTCCCGCTTCTGTCCCTTTGGGGACAGAAATTAGCAATCATGGGGG
CCTGTGTGGCTCTGCAGCAGGCTTGTCCACTCCAAGATGTACCTCCTTCACCCTAGCTGCCTTGAACTGA
CGCCTTTCTGCAACCATCTCAAGAATATTTGTCAAACATTTTGTCAGGTATCCTCCCAAATGCCTGAAAG
ACAGGACTGTACCATGTGGTCTTTCCCCTGGTTTTACAACCCGAGTGCACATGTCCACAACCACTCCCCT
GCCTCCACCAATTATGCTGTCCATAAGGTAAGGCCACTCAGAGACCTCTTTCCTTTCACTTCTAAAATTC
CTACCTACAGTGGTATACTGATCACAGCTTCTCTTCGTAAGGGGATCCTTGGAAAGACAAATATCCCGTA
GCTTGGCACAAATGATCCATTTGCTCAATCATCTCAGATCCAATCACTGTTTGAAACACAGTATTTGACT
TCCAAGTAAAACACACACGTGCGCACACACACACACACTTTTTGTGAGTTTTATTAAAAATTAACAATGT
CCCTGGCAATTAAGCTTGCAGAATTTCCTTGTCCTTGTTTCCCTCCAGTGAATTTGGGACTTGCAAACTC
CATGCTGATGGGAGGACCCAGCCAGGGGTAGAAATCAGCCCTGACTCTCTGGGTGGACAGGGGCCTGACT
GCCCCCACCTCACCCCAACTGACTTGTAGAGAGGGCTTGTGTGATGGGGAACGGGGACAGCATGTGTCAG
AGCGAGCTTTCTGAAGAAGGGGTTTCCATCTAGCAGTGGAAGTGTCCTGGGGGCAGAGGAGAGGATTCCA
TGCAGGAGCCACAGAAGTGGGTACAGGGGAAAGCCCCTGGCTGGCAGGGGTGTAGGGGGAGGTAAAGAAG
AGACTAAAGCAAGGACAGGGTAAGTGGAGAGAGGAGGGCTCCCAGTGTCTGCCCTGTCCATCTAGGGAGC
CTGGATTCTGATAGCCAGGGAGGGGTTTTGAGAATGAGAAACCAAGCAGCCCAGTGGTTGATTACCTGGT
TCTCACTGTGTGTGACTCTGGGCACGCTGCTTAAGCTCTCTGAGCCCTGGTGTCCTCATTTACAACACAG
GGATGATAACAGAACTCCGTTGGAGGGTGCTTGGCAGGGCTGAATCGGATGACTGGGCGAAAAGCCAGCG
GTGGCACACCTTGCACTCTGCGTAAAGGGGCGCCTATTATCACCTTGGGGAAGAACTGGACAGAGCGCCT
GGCGGCGGGTGATTCAGTTGGGTAGGTGGGTCAAATTGACCGGATTTTCCAACCCAGATTCACACTTCCT
GTCGAGACGGTCGTAAAATAGCTGGCGAAGGTGTTTGTAAACAAAAGTGCATTCAAAGGTTGCCGCTGGG
GGTGAAAACAGCGGGGGTTAGGGGAAAGAGGCTCTGTGGCTGGAAGCATTCACTTAGCCCGGGGCACTGT
CCCAGCCCAGAGGATATGGATGTCTTTGCAGTCCCTCCTCCCTTTCCCACCTCCCCCGGTACACACACAC
GCACACACACACACACACACACACACAGCCGGAGTCCCCTCCCGCAGCAACCCCAGGACACGCGTGGTAC
AGCCCTTGCTGTCGTCCCGTCGATGGGTTTAGGGATGAAGGGTGAGAGCGGGTCGGCGACTGGGAGTGGA
GGCGATAATGGGCAGAGTTGGATTAAATTGTCTCCAGCAGCTCCGAAGGCAAAGCATGGGGCAGGGGCGG
ACACACCGCGGCCTGGAGGGCGCTGGGCGCGGAGGAACGGAGCTCGGGGGCCGGGCCGGCGCTCGGCCAG
CAGCGCCGCCTCCCCGGAGGAAGGCGGGGGCCGGGAGGAGGGAGCGGGAGAAGGCGGAGGGCGGAGGAGG
GCGGTGCGCTGAGAGGTTATTTGTGGTTCGCTTTGATCCCGAGGGGGAACCTGAAACTCTCACATTCCTG
GCATAGCAGCCGCCTCCGGCGCGGGCCGACCCTGGGGCTGCGCGCTGGGGCGCGAACAGCCAGAGCGTCG
GCGCCACGGCCGAGAACACATCTTCGCCGCCGAGCTGAGCTGGGCCGAGCCGGAGGTTGTGGTGTCTGAC
TGCGCTGGGCACCCTCGGGCCGCAGCGGTAAGGAAGGCCGCTCGGCGCTCGGGAGAGCGCGCGAGGCCAC
AGAAACGTGCCCCAGCCAAAGCTGGAGTCTCGGCGCAACCCGGCCTTTTCCGGGAGTCGGAGCCTCGAGG
ATCGAGCGTCCTCGGGGCGCAGTGCGCCCTTTCGAGGCAGCCGCAGTGCCTGGCAAGGGCCGCTCTGCCC
AGGGAGCGCAGCGCGCTGGGCTTTGCGGGGCTCTAGAAACGCGCGGGTCTCTTGGGGCTGGGGGAGAGGG
GAGAGGGCCGACTCCGGAGACAACAGCCACAGTGTTTCGGGTTGCAGGTCGGCGGGGGTGGGGGTGGCGG
GGGACAGGGATGGAGGCGCCGCTTGGAGCTCAAGTTGCAGGGTCCTGCGGGCTGATTTGGTTAGGTGGGG
GTTACAGGTGCCTTTGCCCCCAACTAGTCCAAGAATTCCTCTTTGTCTTCCTTGGAAAATCCTCTCTGGA
GCCACGAATTGGCCCTCACTTAGAAAGAATGCAGCCTGCTGTCCAGCCCGGTGACGTCAGCGTTAGAGTA
TTTGGAAAACAAAGAGGGCTCGAGAGGGAGGGAGGCGGACCCGCGATGCTTAAAGACCTCTCCGGGCCTC
GGGCTACCCTCACCGGCTCGCCCCAGGCGTACCAGCGGCCACCGGTGCTCCAGGTCCGCCCGGGCTCGTG
GTGGGGCGGGAGCCCTGGCTGGGGTGCCAGAACCTCCTAGCTTGGAGACTGTCTTTGGTTCCTTAGGCGA
GCAGGAGCCCAGGCCAAGGCTGGAGACGCGCGCTGGCTTAGAAAGGCGGCCTTCAGAGAGCGCAGCGGGC
GAGTGCAGCAGAGGTTCGCGGCCGGGGGCGCGGAAGCAGGTTTTTGTAAAGGCCCAGGCGTTTGATGTCT
GAAAGGACGTGAATCTGAGGGGCTTGGCCGGGACAAATTCGCGATGAGAGGCCTTGGAGATGTTCCTTGC
TCCCAGTCCGGGCACACTATGGAGCGCCTGGAATCTGTCAGGAAGGCTCCGCATTCCTTCCTGCCGCTCC
CCTGCCTTCTCTGTGGGAGTCGGCCCAGAGAGTGATTATCATAGGAAATGCCCGCAGATAAAACTCCAGG
GCGAACTGAATCCCATACGAATTGAATCCCATTTGCTTGCTTTGCCTCGGGTAGCTCTGGAGTCTTGCAC
ATCTACCCCTCGTTGTGTGTGGGGGGCGCATGACTGGGTGCCAGGAAGGATGGGTACAGAGGTGCCCTCC
AGACTCATCCCCCACTCCCCAGCTCTGGGCAGCTGGAGTACTGGGGTGGGGAGAGGGAAAAGATCGGGAA
TGGCTGCTCTGCCAACATGCCATAGCCCAAACTGAAGCAGGACACTAGGGCTAGTTTAGTGGCAGAGGAG
GGGCCACATTCCTCCCACCCACCCCCCCAACCCCTGCCCATACACACAGGACCTGTGGCAGTGTGGATTC
TGTTTAGTTTTCCCTGGATCCCAGTTTGGAGATTTGTGTTGGAAGAGGCTGTGGAAAGGAAGCTGGGTGA
GAGAGGCAGGCAGATTTCCAGTCCATGAACCACTGGGAGCCCAGGCTTAGAAGGGAACTCCTTTCTCCGA
TATAATCTCCCAGCACTTTAGGCTCACAGTCCCCTCTCCCCTGCCCCAGGTCTCTCAACCAACAGCCTCC
CCTTACTTCTCCAGTTGGCCCAAGTCAAGATGGGCTTCCTTGACACTGATGTCAAGAAAGATGCTGAGTG
CCCATCCCTTATGTGCCTAGAGGACCAGTGGGGGCTTTTCCAAGTAGCGTGTGTGTGTGTTTGTGTGTGT
GTGTGTGTGTGTGTGTGTTGGGGAGGATAATCATAAAATCAAAGACATCATGCCATCCTTCCTTTTTCCT
GGAGCTCTCTTGCAGTTACTGTCAGCACAAAAGACTGACCCACTAACCTTAATGGGTGGCACCTTTTTGC
CTCATCTTACAAAACCATTGTCCTCTTGAAGCATTTTTATTCATCCTTTATTCACCAATTCAGGTGCAAT
TACTCCTTCTTCCTGTTCACCTTGCAGAATGACTGCCAAGGTCATCCCATGACAGGGAGCCCCAGATTCA
TTCTGTCAGCAGCGCTTGATGAAGCAGAGCCCAAGCCCATCCTCCAGGAGTTCTCTGGTTCAGGGAGAGT
GGGAAAAGTGGCCAGGGGTTCAGCGGGCTAGAGGGTGGTAGGTTGACTGTGCCAAGGCTCTGGGATGCCT
CAGTCTAGAGGGTGGTAGGTTGACTGTACCAAGGCTGGACTCTGGCATGCCTCAGTCTAGAGGGTCCTAG
AGGCCTTTCGCCTAGGGCTTCTACTGGACTGCATGCATTCTTTATCACCTGCCAATAAATTGGGGCCCCA
TCCACCCCTAGACTGAATAGCTAAGTGGTTAGATCTGAACTAGGCCTGCCTTAGAATTGCCCATCAGGCT
GTTTGATGTGTAGCTGGCTGTACGGGTGGTGGTTCCTGGTGGGTTATCTTCTGGTTTCCTGTTGTCTCTC
TCCAGGAATAGTAAGTCTCCATGAATGTTATCATTAGTAATCGTTTACCAGGATTTTCACTGTGCCAGGA
GCTCGCAGGCCACTGCCTCTTTTTTTTTCCTCATCTCCATGAGTCAAGCAGAATTCTTTGCATTTTTCTG
GTGGAGAAACTGAGGCTCAGAGATTAGGTAACTTGTCTTAATCAGTAGATGGCAGCACTGGTACTTGAAC
CCAGGCTTGTGTGAACCGCCCCACCCCTGCTCTTCACTTTTATGCTTTCCACCAGAGTAATAATGGAAAT
CCTGGAAAGCCTTCTCCTTTCCCATGGGTTCCCACTGATTGCTTTTCTCTCTCTCTCTCCCCACCCCACT
CCAGGTGCTCTGGGGCCAGGTGCCACCGGCCATTGTCCAGGCAGCTGTGTGCAAGCCAAAGAAGCATGAG
GACACTGGAAGACTCCTCGGGGACAGTCCTGCACCGCCTCATCCAGGAGCAGCTGCGCTACGGCAACCTG
ACTGAGACGCGCACGCTGCTAGCCATCCAGCAGCAGGCCCTGAGGGGTGGGGCTGGAACTGGGGGTACAG
GGAGCCCCCAGGCCTCCCTGGAGATCCTGGCCCCAGAGGACAGTCAGGTGCTGCAGCAGGCCACCAGGCA
GGAGCCCCAGGGCCAGGAGCACCAGGGCGGTGAGAACCACCTGGCAGAGAACACCCTCTACCGGCTATGC
CCACAGCCCAGCAAGGGAGAGGAGCTGCCCACCTATGAGGAGGCCAAAGCCCACTCGCAGTACTATGCGG
CCCAGCAGGCAGGGACCCGGCCACATGCGGGGGACCGAGATCCCCGTGGGGCCCCGGGAGGCAGTCGGAG
GCAGGACGAGGCCCTGCGGGAGCTGAGGCATGGGCACGTGCGCTCGTTGAGTGAACGGCTCCTTCAGTTG
TCCCTGGAGAGGAACGGCGCCCGGGCCCCCAGCCACATGAGCTCCTCCCACAGCTTCCCACAGCTGGCCC
GCAACCAGCAGGGCCCCCCACTGAGGGGCCCCCCTGCTGAGGGCCCAGAGTCCCGAGGACCCCCACCTCA
GTACCCTCATGTTGTACTAGCTCATGAGACCACCACTGCTGTCACTGACCCACGGTACCGTGCCCGCGGC
AGCCCGCACTTCCAGCATGCTGAAGTCAGGTAACTCTCCCCACCTTGGGCTTTCCAACTCCTGGCTTTCT
TCCAGCACAGGTCTCTCAGGGAGGAGAGCCTCAAGATCACAGCTTGTGTCAGAGCTAGCAAGATCCACCC
CACCTCCAACCTGAGAAGGGAGAGCTAATGCCTGGCAGAGAAGAGGGACTTAGCTGAGGTCCCCTAAGAA
GTTAGTGGTGTCCCTTGCCTTAATTCAGAGATAGGCACCATTGTCTGCTTAGCTGTAGCATTCAAGTAAC
TAGAGTCCCCAGAGTACACAAATTGCAGCAGGGGGTTAAAGGTTAGATTTCAGAAAGAACTTCCTAAAGG
CAAGGTTGGGAATGATTGCCAAACTGTTTCCAAGTTAAGCAGGAAGAAGGTGGGACTTCCTTCTCTGGAG
ATTTTTTAAGAAAATATGAGCAGCTTGCTTTCTGTGATTATTGGGAGGCATTCCTAACTAGAGGCTGGAA
AGGCCCAGTGGTCTGATTAGAGACCTCTCAGCATCTTACACCAGGGCAGGAGCTTACTTGTCTCTCCTCT
TCATTTCCTGCCATATGCTCCCTGCGTCTGCAGCCTGCAGTGGGAAAGGATTCTGGGTCCAAGTGGGCCC
TTTTCTGGTGAGGCTCAGGAGAGGCTGCTGGGCCATGGTAGGGACTTAGAGTTTGATTCTGAGTGTGCTG
GGAGGCCCTCAGGGGATGTGATTTGGTTTACCTTTTCTAAATGCTCTCTCTGGCTACATGCAGAGCATGG
TTTGTAAGGGGCCAGAATGGAAGCAGGAAGACCCGGGGAGGCAAGAAGTCTAGAGAGTTTGGAGAAATAA
GTGTTCCTAGAAACAAGGCCCTGCCTCACGCTTCTCATCTTGCCCAGCATCTTTTCCAGAGAAGCAGACA
CAGCCATCACTGCTGCATCTCCCCCTATGGGAGTCCAAGAAACCCCACCAAGGGACCCCAAGGATTTCAG
ACTCTTCCTCTGGTGGCCCAAGGTCAAAGTCTGGTTCTCTTCATGCCTGCTGTGTTCCTTTAGTAAACAC
CCACTTTCCCACCGTCCGGCTTTCCTTGCTCTCGAGAAATGAGTGACATGATGGGGTTGGTATGGCGGAA
CCAGAGGTTGGAGCCTCATAGTTTTTCTCCAGCCTCCACCCCTCCAGACTCGCACTTTATCGCCCCTCTC
AGGGCTCGGTCAGGAAGAGTTTCGGAAGCTGAGTGGTGGTTTCTTCTTTTGGACCAGCCTTATTGAACCC
TGTCAGGAAAAGATAGTAATCACGGCAAGGAAGTAGACTGTTTGCAGGAGAACAAAAAGCAGGGGAGGGA
GAGGACGAGGAGAAAGGAAAGCAAGTGTGAAGGGAAAGGAGTTGCTATTCTTTCTCAGAGCTAAGTCATC
CCCAAAGAATGCCAGTTGTGTCTGCCTGGCCCAGTGCAGGGGGGAGCAAGTTCTTGAAGCAACCTTGAGA
ATGGCCATTTTAGCAGTGGAATGGAGAGTTTGAGCACTCCAGTGGGGACCCTCTTCCCAGCTCTTACTGG
AAGCCCCACCTTAGGTAGTAGGAGAAATACATCTGCCCAATATCTCCTTTCAGATGATCCAGTGAAGATT
ATTTGTTAGGAAACGGGCTAGACTCCTAGCCTAGGGTCCTGAGAAGAGCAGGGGGGCCATAGGCTGCATG
GCAGCAAGAGTCAGGGGCAGGCTGGGTGTGCATTAGTGCTGAGATGATGCACCCAGAAGGGGAATTCGGT
TTTTGCGGGGCTTCTGGGACTTGGAAGATTCTTTGTGAAACTGAGGCAGTTGTGACACTGGGAATCACAA
GGTCCCAGGAAGGCCCTTGGACTCCCCGTGCCTCTTGCCCTTTGCTCCTTCCCTCAACATGGAGCCCTGG
GGGTGATGTTACACCAGTGCCAGAGGCCAATAGAATATTGTCCCCTGAACTCAGTGACCACAGTAGTCCA
GAGGCAGCCCTTACTCCCAAGGAAACCAAGAGTTTGGGCCACATTTGTTCTCTAAACTGAGGGTAAACTG
AGGCTCCTACTAGAAGAGATGGAGGATGGGCCACCATTATAGGAGCACCTGCCACCCGCCCAGCACTGGC
CCAGCACTCTGCCAGGCCTTACATAGCGTCATCCTCAACAAATCCCAGCGAGGCTGGAGACCCTCATGAT
GCAACAGAGCAATGCCCAGTCTGTGGGGCTGAGGCACTCGCCCAAGGTTAAACAGCTGGAGCAGGGATTT
GAACCCCTATTTGTCAGACTCTAGAGCTCAGACTCTTACCCTGACATTTGTCTCATTGCTCTAACCTTAA
CTGGAGTCTTCTAAAAATGACTCTGGGTGAGTGGGGGGTGGGGGGTGGCAGGACTTGAAATAGGAAGGAG
AAAATGAGTGCTGCTTTGGCAGTCTTGAAACTGGCGACTCGTGTAATAGACACAAGGTTGCTGCTGGGGC
CCAGCCACCAAAGTTGTCCTGGGGCCTGGAAGGTTATATGCTCAGTCATGATTGACATGGCCTCCAGCCC
CAAAAATAACCTTCCATTGATTAGAAGTGTCAGGGTGCATTTTTTAAGATGATGTATTTAAGCATTAGTT
GCTTAGGAGGCCCAGGATTGCTCAGGCTGATCCCCAAGGCCCCAGCCACTGTGAGGCGGGTATGAAACAA
GCATCCTGACATTAATCCCCTCTAGCCCTGCTGTCTGACTCTTGAGAGCCTCAGGCAGAAACATTTGGAA
AAGGCCTTCCCTACTGGTCCCTGCCTAACACTAGAGGGTTGAATAATTATCTGCAGTAATTTTAATAATA
TATTAATTATTGATAATAATTAACCATCTTCCCAGTATGCCTAGGAGTGGGGTGACCCCGGGCTGCTCTG
GTGGGAGCCATGAGGGTCTGTGCTGTCTCTGAGCACCGTCTCTTCTGTTCCCCAGGATCCTGCAGGCCCA
GGTGCCTCCTGTGTTCCTCCAACAGCAGCAGCAGTACCAGTACCTGCAGCAATCTCAGGAGCACCCCCCT
CCCCCACATCCAGCTGCTCTCGGCCATGGCCCCCTGAGCTCCCTCAGTCCACCTGCTGTGGAGGGGCCAG
TGAGTGCCCAGGCCTCCTCAGCCACCTCGGGCAGTGCCCACCTGGCCCAGATGGAGGCCGTGCTGAGGGA
GAATGCCAGGCTGCAGAGAGACAATGAGCGGCTGCAGAGGGAGCTGGAGAGCTCTGCGGAGAAGGCTGGC
CGCATTGAGAAGGTAGGCCCTGCTGGGGCTTCAGAAGGGCAGACCAGAAAGAGACCCCGAGGGGCTACCT
GGGGAGTGGGTAGTCCAAGGAGAGGCAGAGGAGCCTGAAAACTGTTTGGCTGGATTTCTCCCTATCCCTC
TGTCTTCCACCTCCCTCACTCCTCATGCACCCTCCTGAGCTGACTCCAGACAGCTGGGGAACAGCCGAGA
GGCCGGCAGAGCAGGCCTGGAGCATGAACAGTTGCTGGCCAGTGGTGATTAGAAAGAGCCCATTCACCAG
CTCCTTGCACACTCGCACCCTTGCCCTGCACACACCCCCTCCCATGGACACCTCCCACAGAGAGCCCTTT
GTGTCCCCCACACAACAGCAAGTCTGTTCCAGGCCAGCCCTGGCCAAAAAGAAAACTTCTCCTCTTGGAA
AAAAAATGGGCGACTTGTTGGAATCACAGGCCAGCTAAGAGCACGTGCGGAACCTGCCAGCAGCCAAGTG
GGAGGAGCAGCCGGGGCCCAGCTGGCCCTCTGGGTGGATGGTGATGCCTGGGACACCAGGCAGAGGCAGC
TCTGCCTGGTGCCCGCTTCTTTAGTGAAGGGTTACCAGTTTTCCGCTGAGGCTCAGTTTTAGCAGATGGC
CTCAGGCCTCCCTTGACTGTCCTGTGGTGTCCAAGTTAGGTCAAACCACCCCATCATGGCTGGAGTCTTT
CGGTGCCCACTTCTGGCCAACTGTACTCAGTTTCTTGGTGGAAGCCAGCCAAGAGTAGAATGTTTCCTTC
TGGACACTGGGCACAGGGAAGCTGTGTTTAGTCACCCCGCAGGCAGCTACTTCCAAAGTACCTGGCCCTG
GGTTCACTCAGCATCTGGTCCTTGGGGCAGCCGATGGGACCGTTGCTTGCTGGTCCCAGCAGTCTATTCT
ACTTCCGGAGGCTACAAGCTTCTGACCATCCCACCATAGTCACCTGGAGGTTTTGCTCCTGTTTGGTGGC
CTCTCATCTGTCACCTTTTCTGATGGAGAGTAGTGGGTCAGCCTCGAATCACTCCCTGGGAGCTCTCGCC
TTCATTCAGCTCTGCTGTCTGACTCTTGCAGCTGGAAAGCGAAATCCAGCGGCTCTCTGAGGCCCATGAG
AGCCTGACCAGAGCCTCCTCCAAGCGTGAGGCCCTGGAGAAGACCATGCGGAACAAGATGGACAGTGAAA
TGAGGAGGCTGCAAGACTTCAACCGGGATCTTAGAGGTGAGAGCCAGTCACACAGGTGGAGGTTGGAGAA
CCTCTGCAGAGGACTTACTTCTTTTGTTCTAGAGAAAAATTGGGAATCTCTATTCTCTGTCAAAAGTGCA
GATGAACTCAGAGAGCCAGGCTGAGACCCCTTTGGAGCTGCCCTGATAGAGAGATGCTTGTCTCTATGTA
CTGGGCCTAGGATCCCCTCAGGGATGATGGCTCTTGACAGAGGAGGCTCCCACCCATGGGGCCCTGAGCT
GAGCTGGGGTTTCCTTATGAACCCATCCCCAATATGGAGGATACAGCCCCATCCTGATAGGACGTCAGGA
AAAATCCCAAGCTGGCAGCTTCACCTGACACTAAAACATCTTTCCTTCCCTTGAAACAGAGAGATTGGAA
TCTGCAAATCGCCGCCTGGCAAGCAAGACACAGGAGGCCCAGGCCGGCAGTCAGGACATGGTGGCCAAGC
TGCTTGCTCAGAGTGAGTAGGGGCCCCACTAAGAAGCCTGGCCTGTGTGCAGGCAATGGGACTGCTGCAC
ACCCTCTGGACTAGGAAGATTGGCCTTCCCCCTTGCAAAGTAGTACTTTGGGAGCAGGTTTACTGCCCAC
TGTATGCCCAACACTAGACTGGATCTGGGGATAGTGGGGATAAGTGGCTTCCAAAGAAGAATAGGATCTA
GTTCTGTATCTTTTAAGAAGATCAGCTGACACAAGAGGGAAAGCCAGGGAGCAGTGATTTGCTGAGCTTC
GGTGCTGACCACCAGTGCAGTGCATTGGGCAGTGCGGGAGGCAAGGTAGCCCTGAAGACAGATGAGGTGA
AGGAGAAGGACAGGTCTGAGAGCTTCCCAGGGAGTTCCTGGCAACAGAAAGGTCGGGAGTGTGCAATGGG
AATGTGAGAGGTAGGGGGGCATGGTGGAGCTGAGCCATAGCAAGCCAAGTGGAGGCATCTGAGGCAGCCA
AAAATGGGATCCTAGACCTTAACCAACAGATGCATTCTAAACGGGGCGGTCTAAGCATCCTTGAAGAATG
GGCAAGTTCATTGACTAGTCCATTTATTCATTCATTAGCAGATGTGTTTTAAGCAACTGGCAGATGTTCA
AGAGAGAATGGGAGCAGGCCCAGGAAGGTACCATGGCAGGGAGGTCAGGAAGGAAGTGGTGAGCTTAAGA
AAGGAGCAGGTTCCCACAGATGCAAAAGAACAACGGGGGTGGCCCTAGAAACCGGTGATTAGGAGCCCCG
GTGGCCTGAGAGAGGGGCTCTGTGGGGATGGCAGGGGTGGAGAGCCAGCCAGAGGTGAAGGAGCTATTGG
GCAGTTCAAGAGGTACATGGGGTGGGTGGCAAAGGGAGCCCTGAGCTCAGCAGCAGGAGGCTCTAGCAAT
CAGAAGAGACTAAGAACAGTTATTTATTGAGCTCCTACTAGGAGCTTTAGTGCTGTTCAAGGTGTTTGCA
GAGAAGTGGAATGGGAGTGGTTGGTAGCTGGGTAAACATGGCTTTGAGTCTTCACAGGAACCCTACTGTG
AATGGCACAAAGGGTAGTGTGGGGTGCAGAAATGGAGGAGCAGCTTGAGGACTTAGCTCTGGCTGGCAGC
ACCCCTATCTTCCTTCAAAGAGGGTTCAAAGACTAGGGCAGGGAATGGGGGAACACAGCACTGAAGGAAT
TGACAGGGTGGGGCAGGAGGTAGGCTGGTCTCTTCTGGCTGGGTGGGGTGAGATGGCAGCGGCTTAAGGT
CTCTGGGAAGGAGTCAAAGGGAAGGAGGGAGAAAGGGGAGGGGGCAGCCCTGGGGTTTCCCTGAGGAGTC
TGGGGAGGAGAAGCTGCAAGGGCACGGCAGATTAGGGTGCCTGTGGAGGAAGGCGGACTTCTGGAGCCTG
ACTCTGCCAAAGAAAGGAAGCCATGGGGCGGGTTTCTGGGAGCTTGCTAGTGGGTGAGAAGAGGGGGGCC
GGCCGGGAGGCGTTTCCGCTCCCCGGGGAGCGAGTGAGCGCCGAGCTGTTCTTGGCTCCTCGCTGGAGCC
ATTAATCTTGCAGCCGCGGGTGACCTGGATGCCTGGCATTCCAGAGCCGCGAGCTGTTCCGCTCCCGGCC
CGCCCCCCGCCGCTCCCTCCCGTGCGCGCTGCCTGGCGCCCTTCGCCCGGCTTTGGGAGGAGGGAGGGTG
AGCACAAAGGGAGCCTGGAACGTGGAGGTGGGGGCTCGCTCGCTGCCCAAGGCGCATCCCGGGTCCCGTC
GGCGCCTCGCCTGCCTTCCTGCCCTCCTCCGCTGGCCTTCGGGCGTCCTCTTCCCACCCGCACCCAGACC
ACTTATTTCTTACTAAGGAGCTCTCCTTCCCGAGATCCCGCAGGCCCAAGGTTTTATCAGGGTCCTGTTG
GTAGGGGATGGCCAGAGCTCAAAGCCTCCCAGCCCCCACCAGGGCCTTAGAGGTTGGACAAGGCTGCAGG
AAGCTTCTGGAAGCAGAGGGCTGGGTCCTCCGGCCCCTTCCTCCCCCAGGGCTGAGGAAACCCAAGCAGC
TCTTCCTTGCTCCCTAGTAGCTATTGCAAAGGGAGGTGTCTGATTGACCTCCCTTTTATCTGGGGTCAGT
CAACACTAGGAAAGTGTGGCCATTATCACCAATGCCATCTGCTTTTCCTCCTAGGCAAGCCACGCAGCCC
CCCAGCACTGCCCTTCTGGCCCTTCTAGGCCAGCAGTGCCCCCTGGGGATCTGGCCTTGAGGCCTGAGGC
TGGCCTGTTAGCTCCACCCCCTTGGGAATATTTCTTCTCTCCCTGCGCCCCAGATTCTCCAGCTATAAGA
TGAGACAGAGTCCTTCCCCACAGAGTCATGCTAAGGCTGAAATGAGATGCAGGCCCTGGGCAAACTGAAC
GCACAGGTGGACTAGGGGAGGGTCCTCCCTGCCTGAGTCCCAACCTGGCTGCCCCTCCTCAATGGATGTT
AACACCCCACTCAATGGATGTTAAGCCAGCGAAGTATGAACACATCCGTTTCAATATTATTGGACTTCCT
CGTATTTTCCTCCATGCCACAGAATGATACCATCCTGGGCTCAGCCTTCAAACATCCAAAATGAATCAAG
AGCTAACCTGAGTTGCCTCTGTGTCCTCCCTGCCCTGCCCCAGGGACCTGAGTAAATGAATCCTCCCTTC
CACATGCCAAGGTCTCAAGCCTTCACCCTTCTGTTCCAGAACTTGCACTGTCCTATATGATAGGTACTTA
GCTGCATGTGGCCCAAAGATTGAAATTAATGAAAATAAATTAAATTTAAAATTCAGTTCTCCCATCTTAC
TAGCCACATTTCCAGTCCTCAGTGGCACGTGTGTCTAGTAGCCACTGCATTGGAGGGTGCCGTATAGAAC
AATTCCACTCTGGCAGAAAATTCCACTGAATCAGAATGCTGTTCTAGAGACAGTGCCTTTAGGTTCATTA
GCGGGAGCCCATAGCCCTGCCCCCCACCTGCTCTCCAGCAAGGTAGGCAGCTGACCTGCTCCTCAGGGGG
CAGCCTGGGACTCTCAAGGGGCAGGTGCCTGGGAGGTGGATTTAAGGCTAGAACATCAGATGGAGGGCTC
TGTGGTCTGGCTTGGGCTTCTCCTGGCCCTATGGAGAGGGCCTCTGAGCAGTTTCTTTGGGCAATTAACA
AAATGATTTAAAAGTCAGGATAGCTTGACCCTTACACACTAATCTTTGGGCCATAGTCATTTTCACTGTA
CTGCAGACTTTGCATTTCCTTCTGAGCCTGGTTGCTTACATCTCAGTGTTCTTTTCAGACCATGGAAGGA
AATGTAGCCCTCAACGGACCTCTCGGCCTGGGTCTGCAGAAGGAGCCCCAGAGCTCTGGGTGGCCTATAA
GTACAAACGCCTCACCATGTAGCCAGAGGCAGCCTGGGCCTTTGTAGTGTGGCCAACTGGGGTTTCCATT
TGGCAGCACCATTCACCTCCTATGTTTCTCCCCTATAAGTTGGGGATCCCAAATCCTCCCTGGAGGGGCT
GGAGGATTCGTGGAATAAGATGTGTAAGGGCCTGGTGTGCCGACAGCCGATGGTGGTTCTGTTCCCCCTT
CTTTCATTCTCCCACTGGAAGGAGGACCATGTCACAGCCTACCTGAGTCTCTATTTTCTCATCTGTACAT
GGGCATCACAGTTCCTACCTCAACAGTCTCGAGCCGTCACAAGGTTCAAGGGATATTGTGGATGTGTTTT
AGACATGGTGCCCCTGGCACAAGTGGATGGTGTTTGGGGCTGTCCCATGGCAGTATGTCCCAGTAGAAAG
GCAGGGTAGCCCAGTTGTTACTGCAAGGGTCCTGGAATTGGGCTCTGTCATTTACTCCTGACTTAACATG
AGCCTTGGTTTCTTCTTCCATGAAACAGGGTTAATAGTGGTACCTTATTCCTGTTATTTTTGAGAGAATG
AGAAGCAACTGTGCTCATCCAGTGGTCAGCACTGAGCCCAGGAGGCAATGGGGCCAGCCAACGTGGTCAC
TGTCACTGATCAAGCCTCTTTCTCCCTACAGGCTACGAACAGCAGCAGGAGCAAGAGAAGCTGGAGCGAG
AGATGGCACTGCTGCGCGGCGCCATCGAGGACCAGCGGCGGCGTGCCGAGCTGCTGGAGCAGGCTCTGGG
CAATGCGCAGGGCCGGGCAGCTCGAGCCGAAGAGGAGCTGCGCAAGAAGCAGGCCTATGTGGAGAAAGTG
GAGCGGCTGCAGCAGGCGCTCGGGCAGCTGCAGGCAGCCTGTGAGAAGCGGGAGCAGCTGGAGCTGCGTC
TGCGGACTCGCCTGGAGCAGGAACTCAAGGCCCTGCGTGCACAGCAGGTGAGCTGAGAAAGTCTCCAGGC
TAGGGCAGCATCTGAGGATGTTGGCTTCCCTTCCTCCTCGGGGACTGTAGGTTTGGAGGCCAGGGCTGAG
GCCCCGGGAGCCCCTGCTTAGATCTAGGCTGCAGGCCCGTTGGAAGGCGGCGAGGATGATTGCTCTCTGC
TCCACCTTTGCTGCGTGCTCCCTTCCACTCGTTGTCTTAGTAGAGGCCCTGCCACCTGGCCCATGTCCAG
CCTCGGGGGACTCCTGTCCTCGGCAGCAGCAGGGCTAGTTGTCCTTGACCTCTAGAGAAAGTAAGTCAGG
AACCTGGATATAGAAGGCCTGCGAGCTTTTTTTTTTTTGAGATGGAATCTCATTCTGTCGCCCAGGCTGG
AGTGCAGTGGCGCGAACGCTCACTGCAACTTCCACCTCCCAGGTTCAAGCCATTCTCTTGCCTCAGCCTC
CCGAGTAGCTGAGACTACAGGCGTGCGCCACCACGCCCAGCTAATTTTTGTATTTTTAGTAGAGATGAGG
TTTCACCATATTGGCCAGGCTGGTCTTGAACCCCTGACCTCACGTGGTCCGCCGACCTTGGCCTCCCAAA
GTGCTGGGATTACAGGCATGAGCCACTGCGTCTGGCCACCAGCCAGCTTTTATATGCCTCCCCAAGATTG
GGAGGAAAGATGGTTGTCCAGATCCACTGTGCTTAGCCTCACTTCGGACTTCTGTGTAAACAACTCTTGG
TGTTTACAAACCAAATAGAGTTATTTCTCCACTCCCAAACCTACCCTTGCCACAGAGGTAGTGTGACTGA
ACCCCCTGGTTTGCCCAGTTCTGTTCTAATGTACACCAGTTTTCCCAGTATAATTATTGATAGCACCCCC
TTTGCCAGTTTGGAGGATTATCTGTCTGGTCTCTATGCCCTTGCCCTAGGATTCAGGGCAGGGGTATGGG
GACCTGTGCTGTATCCCCATTTCGGTAGAGGAAGGATGGGGAAATGTATGCTGTGTATGGCTGAACACGT
ACATGTACAAGTGACAGTCGTGTGGAGGCGAAGACCAGTGGCTGCCACACCCCAACCTGCACCCTTGACC
ACGGTCTCTACTCCTTGCTCTGCAGAGACAGGCAGGTGCCCCAGGTGGTAGCAGTGGCAGTGGTGGGTCT
CCAGAGCTCAGCGCCCTGCGACTGTCAGAACAACTGCGAGAGAAGGAGGAGCAGATCCTGGCGCTGGAGG
CCGACATGACCAAGTGGGAGCAGAAGTATTTGGAGGAACGTGCCATGAGGCAGTTTGCCATGGATGCGGC
TGCCACGGCTGCTGCTCAGCGTGACACCACTCTCATCCGACATTCCCCCCAGCCCTCACCCAGCAGCAGC
TTCAATGAGGGTCTGCTCACTGGTGGCCACAGGCATCAGGAGATGGAAAGCAGGTTCGGCATTGCAGGCC
AGGCACCTGAGGTTGGGGGGGTGGGTGGCAATGTCCAGTCACTGCCCTGCCCTTGATCCCTGATAAACAG
GCCCCTTTCCCCATAGAGCTCAGCAGTCCCTCCTGCTTCTGAGCTGAACCTGCATGATTGGCACACCAGG
CACTGTAAACATGCATTTGCCCAGAAATACCGAGTCCTTGGTCTGCCCAGGAGACTCTTACTGTGGAGGT
GTTGGGTGCCATCCAGTGCTTGGGCCCTGCCTCCCCTCTCCGGAGTGCCGCCCTCCAGGATGAGGGCTGT
GCCGCCACTATCATCTGATGAATCTGGAACCCATCCTTAATGGCCTGCCTTTGCTGGTGTGAGAAGGGCC
CAGGGCCTTATGCACTGGTGGTTTTCAGAGCCTGGGCTCTAAGAGCATCAAATTCCAGAGCTGTGGTGCC
ATTTCTAAGCCCTCTCTGGGTCCCTGCTACAAGCACAGAAGGATCCAGCCTGGCAGGGTTGGGGGAGTTG
GGGGGGGCTTTTCCTCTAACTCCTATGAGGCAGGAAGGGTGGAGGCTGTTGGATCTGTGGGTCTGACAAT
GTGGGCATGGCCTCTCACCCCTCAGGTTAAAGGTGCTCCATGCCCAGATCCTGGAGAAGGATGCAGTGAT
CAAGGTCCTTCAGCAGCGCTCCAGGAGAGACCCTGGCAAGGCCATCCAGGGCTCCCTGCGGCCTGCCAAG
TCGGTGCCATCTGTTTTCGCGGCTGCGGCAGCAGGAACCCAGGGCTGGCAAGGGCTCTCTTCTAGTGAGC
GACAAACAGCAGACGCCCCTGCTCGGCTGACTACAGGTAAGAGGAGGCTACTGCTGGGATAGATTGAGAG
GTAATTTCTCCTGGGCCTGAACACAGATTGCCAGACCTTTCCTCCCAGAACTGAGGCTATAGGAGCCAGG
GCTTCCTGACCCTCTTCCAGGGGAGCTGGCTTATTCTCTGCCTCTAGTGACTCTACAGCGCAAGGCTCTC
CTGCCAGTGTGAAGAGGGGTACTTAGTCCCCATCACCATAAATTCTATCATGCTTCAGCCCCAGCCACTG
AACTAAGAAAAATAGAGCTTCCTGTGCAGATACACCTTGTATGCAAGCTCCCTCCACTCTTCCTTCTAAG
CAGATGCCACAGAAACTCTAGAAGATTTAATCTATAAGGAAGGGTCCCACCACCCAAAACATTTGGAAGC
CAATCCAATCTGGTAGTTATTCCCATTTGAAAATAGGAGCATTTTTAGTCTTAAAGTTCTTGCAAATCAA
GAGCAGCCCACTCCACCTTGAATCCCCAGCAGGGACAGTTAACTTAGAGTGTCCTTCACCAGGGCCACAT
CTTACAGGCATGGCAATAACCATCCACCTACCTTTCCAGCAGACAGAGCACCCACAGAGGAGCCAGTGGT
CACAGCTCCCCCTGCTGCCCATGCCAAACACGGGAGCAGAGATGGGAGCACCCAGACTGAGGGCCCCCCA
GACAGCACCTCCACCTGCCTGCCACCGGAGCCTGACAGCCTTCTGGGGTGCAGCAGTAGCCAGAGAGCAG
CCTCTCTGGGTAAGTCCTCCTGACCCCACTTCTGTGCTAGGTAGGGCCGAGGGGGCACTGGGGTGTGAAC
TGGAACACAAGGCCTTTTCTTCCCAGACCCCCTCCGGGTCATTGCCCGCACTCCATGGGGAGCCGTGCAT
AGCCAGAGGTGAGCAGGGTGCCTGGCCCACCTCAATGTGAACATGAGGGATGGCTGGTTGCATGAATAGG
GAAATTGGAAACCCTGATTAGAGGCAGATCCAGAATTCAGAAAGAAAGCAACCAGATGGGAGGCACTTTA
GCTCCTCTTTCATGGTCTTCCCTACATAGTTAATTTCCAATTTGATTATCCAAGAGAATGGAGCTCGCAA
GTCATGCCGATGGCACTCTGGAAGCCTGTTTAAAGAGTCCGGGAAGGAGAAATCTGAGAAGATGCCATTT
CTTTTTCCACTCCCCTTTCACATTGGCCTTTGCATATTTGCCTGTGCCTCATGATCTCAGAAAACCACAG
GCATGAAAAGAATGCTGCAGCCTGCCTCCCTCAGGGCTCTCCATTGCTCTCTCTAAGCCCTCCAACCAGT
TCAAAGTTAGAAACAAATGCATCCTACACATCGGAGGTTGGTGGGCTGGGCTGAGCACTGAAAGGGGGCA
GAGCATTGTGCTTGGTTGGCCGAGTTCTGGGAACCTGGGCAGCAGAGGTGGGAAAAGTTGGTGAAGAACG
ATCTTTGTCTTTCAAATGTGCCAGGATTTTAAAAGCAATCTAGTAACACTCATTGGCATGTGCCTGTGTT
CTTGTCTGTCTCCAGACTCTGTAGCTACATCCAGAGTCCAGGACTTGTCAGACATGGTGGAGATACTGAT
CTGAAGGAGGTGGTGCTTCAGGACTCTGAGCCATTCTCTCCCCTCCTCTGCCCTGTGCCACTCTCAGCCA
TTTCAGCAGCCCCGTCAACCGCTGCTCCGTCCCTTTCCCCAGCCAGACACTCATTCCCATTGACCATCTG
GTCCCAGGAGCTCAGGAGGAGGACCCCAGGGGAGAGGAGAGCTGTGAGAGCACCGGCACCCCCAGAAGAC
TCTGCTTCTTAGCCCACATTCCTCCGGGCCTTATGGAGAATGAGGATTCAGCCTTGACTTCTTGCCCAAG
GCCTGCTACTGGGGTAGCAACTGACAGCTCAGAAAGGAGCTGAGCTCCCTCTGCCCTGCCAGTTGTCAGT
CAGGCAGGGAGGGAGTGGCTGTGTTGGTTTGGGGAACTAATTTCCACGGACGGCTGCCCGTGGACACCAG
GTGGACTGGTTCACTAATCAAGTCAGCCATATTGTTCTCTGGCTAAGTTTGGTTCCAGCCAACGTCATCT
GCTCTTCAGTTCCTCACTGCCTTCTTGGGATACTAAGACTTGAATTTTTTGGGGACTATTAAGGGTGTTA
GTCTTGGAGAAGACACAGCCTCACCTTCTCACTTGCTGTGGGTGAGGGGCCATTTAAGTGGACTGGGAGA
CAGTGCGCAGTTTGTATATAATTCCCTTTCTTGTGGAACAGAAGACTGAGGCCTGCAGGTTCCGATGTGT
CTCCATGGGCTGTGCTCCCCTCTTCCTACTGTCAGTTTCTGAAACTTCTGACTGGCCTCCCAGTTATGCC
TCCTCCTCAAGTTCCTGGCCCGTGGATGTTAAAGCTGCTCGATTCCCAGGATCTCGGCTGCCTTTTCCTC
TATCTTGAGCCCTATAAATGCCCACGGGACCCCCACCACCAGCCTCTTGAAGTGGCTCCACAGCTCCTGT
CCCTGGAACATCCTGTCAGTTTGGTCATAAACCCTGAGCCAGATGAAATGAGCCACCGTGAACAGACATC
TGCCATGCCCCCAGGTGGGCTTCGGTGGCCCTACCCGGTACCAGTTCTTTCTGAGAAACTGGAGATGTCT
TGTTAGCATAAGTGTCTTCATTCCCACCTGGAGGGTTTGGGAGAGGAGCAAAGCAGTTGAAAACTAGTTA
ATGAGCTACAAGAGTCAAATAGTCCTCTGAATGGAGCCCCCATCACAAAACAGTGCCCAGGAGGCTGGCT
CCTCAAGCTACCCATGCCCAGCGCCCTAAAGCAGCACCAGATGCTTTGGAATTGGGGTGAAACACCCACA
TGGCAGCCTGCTAGCAGCAGTGACTTTGACTTCTGGTCTTAAAGAGTCCCTCACTTCAGCCCCAGGAGCT
ATTGGTGGGTTTTAGCAGTTTTGTCTTTACCGTTTTTAGTTCTCCTTGATTCTTTGTTTTCTTCCTTTAT
CGTTTTTAGGTTTGGTATGTGTTGTTTTATTTCCATGGTTCCTCAAGTTTCCTTTTTAAACATTTGCATT
TGCTGGACAATTGCAATTTTTTTTAAAAAATTCCCCTACCCCTGTTTAAAGCTGAAAAATACATTTGGTT
CATGTGCATTGTTTACAAAGCAAAAAGAAAAAAGAGGAAAAAAAGGCAAAAAATATTGTGAAAGAAAAAA
AACAACTTAATATATTTTGGATTAATATTTGGTATTTCTTTTAAAGTATTTTTTGTGCTGTGAACATTTT
CTGCCAAAGACCATGATGTGTGTCTGTATGTTTAAGTTATCGTAAATATTTAAAATGTAAACATGGCTGT
TTTGTTATGCCACCCTGTACCAGGATTGCTGCCGCATTCCACTGGGTATAACAGTATTTTAATTAAAAAA
AAATAATTAAAAGTGATGTCTTTGCACAGGTGAGACTTTGCACTGAGGGAAGGGAAAGGGTGAGGATTTT
GGGGGGCCACCCAAGTCATAGTCCAATCTCTTCAAGGACCCAAGATAGAATTTAGGAATTTTGTGAAGCT
GCATTAAGGATAGAGTTGGAATGAGGATGTGGCTGGCATTTTTCCCCTTTCATAGATAACATTTCTTGAA
GGCTGGGAGGGGAAGGAGGGCCTGGCAGATGGCAGCCTCCCGAGGTAGGGCTGTGTTCTAATCAGCTTTG
TTCGGCCACACGCTGTGGTTATCCACAGTGGGAGTGGGTGTCCAAAGATGGCTTTATCCTTCCCCCACTC
CTTTTCCCACTCCCACCTAGCACATAAAGTTTTGTCCGAAACCATCCAGAAGGCCAGGCACCATGCAGAG
GACATTCAAGAATGTGCATGTTCTTAGCCACCGCCTCCCTCCTTTGCTGTGACATCACCACTCTTTCCTG
ATGCTCAGGAAAGCATATTGCTCCAATTCAAAATTAAAGAAAGCCATTCTCAGTCTTGCTTGTTCTTGTA
TCAGAAACAAAATACCTGTCTTGTGCTTCTATAAGTGTGTTAGGACCCTGAGGTTCCCAGTCAGCATGTG
GCCAGCAGTTAGCTGGCCATGAGGCAGCAGCAGGCTACCAGACAGCCTACGTGACATGTGACAGGAACAG
TTTCCCACCATGGCCGTGAGTGAAGTGTCTTCGGGGCCAATGTGGGAACTCGGGAGCCATGTTGATGAGT
AACTAAGTTGAGATCCTAGAGAAGGTGTCTTCCCGAGCTGGCCTACCAGCCCACAAGTATGAAGACAAGC
AGGTGGAAGAATTGGAAACATCCAGAAACTTTTCTAGCAACTTTGCAGATGGTGATGGGTCCCACTGGAT
GAGGAGCTCTCCATGCAGAGGCATCAAACCCACCCCATGGCCACACCTCCACCCAACCCTCCAGCCTGCC
TCCTGCCACTGGGGCACTATCTATGCCAGCCTTTCTCCCATTGAGCCCTGAACTAGAGTCAGCTTCACAA
ATAGGTTACTCACCTGACATGCAGGCCTAGTGCATGGAGGCGGCCTGAACAATAGGGCTCCTTCTCACCC
TCCCACAGCTGCTCCTCCCTGGGCCACAGCAGCCCATGGCTACATTTGCTGACTTGCTGTCCAAAACAAA
ATGTCGGTGCCTGTGGCAGGGAGTTCCAAAGGACAGCTTGGCAACTCAGACCTGTGAACAATAAGCCCTG
ACAACAGTGCCATCTCACCCCAGTACCTTTGGCCAGGGGCTTCCAAAGCATCTGCACCTTCTGTGAGATC
CAGTCTGTGGAAAGTCACTTTAATGTTTCCTTGGCACAGACCAGGAGGAATAAGAAATCGGTCCCAGTGT
ACCCAGCACATGTACGTGCATGTGCATTTGTGTGCACATGTGTACATGCGTGCCTGACCATGTGTCCCAG
AGAAAGGTGTGAGGGGCACCAATATCTTCTGGCTAGTGTCCCTGCAGGGCATGGGTGCTCTCCTGCCACA
TGGTGACCAGTGCATCTGAGTGACATTTCCTCTCGGGAAAGGGGATGAGTGAGCTGCTCGGTGCCCTGTG
AAATGCAGTCTAATGAAGTTTCAGAACTAGTGGAGCTGCAGGCTGTGGCAGGGATGGTGAGGCCTTGTGG
AGGGAGGTGTTTGCCTTCTGTGTCTAACACCTGTGAAGGGGTGGAGCCTGGGCCAGAGCCCAGGTGGCTC
AGCGGGGCCCTTTGGAGGCCAAGTTCCTCTTTGAGGGGGCAGCCCTAACCTGCCTGCCCTGCCTCCACCC
AGTGTCCCCACCAACAGGGCTGGGGATGTGGCTCAGGGGGCAGCCCATGGCTGCAAGGGCTGGAGGGCAG
CTTATGAGTGGCTGCCCCAGCCTCTCTCCCTCCTCTCACCTCCTGGTTAATTGTTAACTCTTCCCCTGGC
ATAAGTATGCACCAGGCTCAGCAAGCTTGGTGAAAATATGCCAAGACAAGGGCAGCAAATTGGGGCCCAG
TCACCCAGAGATAGCCAAAGCCGCTTTACTGCACCCGAAGAACTCCAGCTAGACAGGAAAGTTGTTTGCA
GTACCACTCTGCCATCAACTAGCACAAGTAAGGGGCTGGCCAGGATGAAGCTGTCCCTGATCAGGCCTTG
CTGGGAGCGACCGACCCCTCTGGAGGTGGTTCAGAAACCCCCGCAACCAGCAGTGCATTCCTGGACGTGC
CATGCCTGGATCTAACACATGGGTGAAGTGCCACAGCAATTGAACCCTAAGCATCTTTTTTTTTTTTCCA
AACAAGATAGAATTCACATACCATAAAATTCACCCTTTTGAAGTGCACCATTCAGTGGTGTTTTGTATCA
CAGCATCTACTTTAAGCCAGCGGTCAACCACGGGTCATCAGCAAATGCCCCACCAGTGGGCCATGTGGAC
ACAATTAGAAGTGTTATTGGATCTGCTGCCTTCACACTTGTCGGCTCCTCTTTCCTAGGCTGACACTTTG
AACTTTCTATTGCAGAGAGTCCCCTTTCACCCATCCTGGGCCCAGCAGCCCCAGAGTACCTCTGCTGGGC
TGCAGCCAGGACACTATCTGCTCTGAGCTGGAATCTCCCACATTTCATTCCCTAGGCTGCCAGGGTGGAG
GTCCTGAGGTTTGGAAAGGAGGCCCATGAGCCCTGAGCCCAAGGCACCCATGTTTGCTAAGGTTTGCCAG
AGTCAAGGAGAATTGGCAGGGGTCGGTCCAATTTTGTGAGGCCTGAAGCCTGTATAATTTGGAGGACCCT
CTTGAAGAAAAAGAATGCAAAGTGGTGAATACAAAATTAGATCTAGAGTTTTGGAAGGGGCTTCTTCAAG
TGAGCACCCCGAGGTACAAGATTCATTAGCTTCACAGTAAATCTGTCTGTCTGGGCATTGGGCATTGTGT
TTCCCTGATGGGAATGGAGCCCTGGGAAGTACCCAGGACTTGGGTTCATCCTTGTCTCTCCCAGGTGAGG
CTTGGATCTGGAAGTCAATGAAGTTGCAGTTTTTCTTCTGCAGATGAAGTGGCTGGTACTGGATATCCAC
TAAAAACAGCCCCCTCTGTAGGGTGGAGGTACCCACAAAGGGAGCCTGCGGTCTAGGCGCAGGATGGGGT
TATCACCACAGAGCCTGGATGAAAGGGCTGACCAGTTTGCTGAGGACCAAACTGTAAATGACTCTCATGT
GCACCCTGCTCTCGCCCACCAGCCAAACCTCCAGCCCCCAGCAGGAGTGGGAGTGGGGCACATCTGACAG
TTGGCTCTCGGTGCCCTGGAGAGCCATGCCACTTGCACTTGATTGCAACAGGGACACATTCTACTCTACT
CTGTGGGCCCATCAGCTTTTGATTCTGAGCCAACCTGGTGTCATGATCTGTCCTGAGATAAATGCCTCTT
GCAAGTCCAAAGGCTCCTACCTGGGGGCACATTCCAGGTGTGTTGGGCAATAATTTGGTTATTTCCCTGC
ACAGGTTTGCCTCTTCTTGCATCAAGTTGGCCTTCTTTTGAAGCTTCAGGAGCCTTGAAAAGAGC

[0141] An exemplary DNA sequence of human Ryk is provided below.

gi|224589815: c133983626-133861936 Homo sapiens chromosome 3,
GRCh37.p13 Primary Assembly
(SEQ ID NO: 306)
AAGATGAACTTCAGGCAAAAGGTAAATGATTCCAGTTGGAAGTTCTGAGATACGAAAAGGAATGGTTGTA
AGTGTAACTAAGCAAGCACTGACAAAATCAAGTAACAATAGTAGCATTAAACTTTTGTGCATGTAGGCAT
AGGCTAGAACTAAAATTGTTGACAATAAGAGCAAATGAGTGGGGGTGGGGGTGATCATAAAGTGTTTTAA
TGTTCTCACGTTCTTCAGGAGAAGGGTAAATATATGGATTAAATTTAGACCTGGTTAAGTATGAGTTTAA
TATAACCAGAACAATCATTAAAAGAACAGCCATAAAGCATACGACTTCCAAAAAAAGTAGAGACAAAAAA
GTAAAATGAGAAGGAAAATCAATCCAAAAGAAGGCAAAAATTGGTTGGGGGCATGGGAGGAGAATAGCAT
AAGAAAGAAAATAGAAAATTTGTAATGAAATAGTTGAAATAAATCCAAATATACCTGTAGCTCCAGTAAT
GTAGTGAACTAAATTCTCAAGTTAAAGACAAATATTGTCATATGTAATAAAACAAAATCCACACTTAACA
CATTGGGACACAGAAATGTTGAAGCTGACAGGATGTAAAATGATATACAGGCAAATGCTAACAAGAAGAA
AGCTGGCAAGCTGGTATGGCTTTATTAATTTTAGACAAAATAGACTCTAGGCAAAAAGCATCAATGGAGA
TAAAATGAGTCATACATAAGAATAAACAGCTCAAAATTTCCAGAAGACATATCACTTTAAAATTTCCATG
TCACTAATAATATAGTTCCAAAATACATAAAGCTCAAACTGACGGAACTACAGGAAGAAACAGATAAATC
TATTATCTTAAGGAGAAATTTGCATACAGTTGTCACAGTAAGAGATCAGGCAAAAACAGAAGAGTAAAAA
GAAGGAACATTTGATCAACACAATAAAAAGGTTGAGGGGTTGAAGTAATGCACATTACACAGAACTTCGC
TCTCAACTATTGTAGAGCATATATACTTTTCACATGAAACATTTATGAGAATTAAACGACATGCTACACC
ATTAATCTAGCTTTAACAAATTTCTTTTTTTTTTTTTTTTTTTTTTTTTTTTTTTTTTGAGACGGAGTCT
CACTCTGTCGCCCACGCTGGAGTGCGGTGGCGCGATCTCCGCTCACTGCAAGTTCCGCCTCCCGGGTTCA
CGCCATTCTCCTGCCTCAGCCTCCTGAGTAGCTGGGACTACAGGCGCCCGCCACTACGCCCGGCTAATTT
TTTTGTTTTGTTTGTTTTGTTTTGTTTTGTTTTTGAGATGGAGTCTCGCACTGTTGCCCAGGCTGGAGTG
CAGTGGCAGGATCTCGGCTCACTGCAAGCTCCGCCTCCTGGGTTCACGCCATTCTCCTGCCTCAGCCTCC
CGAGAAGCTGGGACTACAGGCGCCCACGACCACGCCTGGCTAATTTTTTTGTATTTTTAGTAGAGACGGG
GTTTCACTGTGTTAGCCAGGATGGTCTTGATCTCCTGACCTCGTGATCTGCCCGCCTCGCCTCCCAAAGT
GCTGGGATTACAGGCGTGAGCCACCATGCCCGGCCAACTTTCTAAAGATTGATATCTGAGCCCAAAGCTA
GTATCTGTGAAGCTTTTAGAATTTTTTTTTTTTTTAAGACGGAGTCTTGGTCTGTCACCCAGGCTGGAGT
GTACTGGCATGATCTCGGCTCACTGCAACCTCTGCCTCCTGGGTTCAAGCGATTCTCCTGCCTCAGCCTC
CCGAGTAGCTGGGATTACAGATGCCCACCATCACGCCTGGCTAATTTTTGTATTTTTAATAAAGACGGGT
TTTCACCATGTTGGCCAGGTTGGTTTCAAACTCCTGACCTCAGGTGATCCGCCCGCCTCGGCCTCCCAAA
GTGCTGGGATTACAGGCATGAGCCACCATGCCCAGCCTTAGAATTTGACCTAGAGACAAAAACAGAACTA
CCATGTCTCAGAGCTGTGGAAAGTTCAGTAGTTTCAACTAAAGAATTCCTAGAAAGGTGTACTGATCTGT
TCTAAAATGAATTGTGATAGTGGTTGCACAGCTCTATAAGTATACTAAAACTCATAGAATTGTTAACTTT
AGGTGAATTGTGGCATGCAAATTATATATCAATTAAGTTTACGTATGTATCAACTTGAGAAGCTAGAAAA
CTATGGAAACCTGTCTGTTTCTATGAGGAATTTTAAAAACTTTCAGAAAGAAAATATGAGCTAATGAAGC
TAAAGTATTTGGGGGAAAAAAAGAAGTCTGACTTCCAATGCCTCAAAGAAAACATTAGACTTAAGAGTAC
TGAACACTTACTATAGAAACCAGGAGACATGACGAAGTGACATACTGCACTCAGTGAATTAATCATGTAA
TAGCTGAAATCCTAAAGGCTTAGAAGAAGAGAATGAAATTGAAATATGGACTAATTGTATTCCACAATTA
GAAGAACTGGAGGATCCCCAGAGTAAAAAAAATTAACAACTCAAAGATGATGGACAAACAAACAAACTCC
ATTAACTCTAACAGAAAGTGATTAGAAACCATTTCCAATGCTAACTGAATAATGAGATGTCAGCTAGGTA
CAAGAGGAAGAACAATTGAAAAGTTGCAATATGAACCTCTTTGCTATATTCACCAGAAAGTTATAATGAA
AAGTGTAATGGACTGAATTGTGTCCCTCCATAATTCATTTGTTGAAGCTCTAACCCCCAATGTGACTATG
TGCTTGGAGGCAGAGCTTTTTAGGGGAGTGATTAAGGTTAAATAAGATCAGAATAGTGGGGGCCCTAATC
CAATTGAACTTCTATTCTTAAAAGAAAAGGAAGCGACACCAGAGATTTCTCTTTTTCTGTGGGGACACAG
AGTAGAGGTCATGTGAGGGCAGAGCAAGAAGGTGGCTGTCTACAAGCCAGGAAGAGAGGCCTCACCAGAA
ACCCATCTTGGCAGCACCTTGATCTTGGACTTCTAGCCTCCAGAACTGTGAGAAAATAAATTTCTGTTGT
TTAAGTCAGCTAGTCTATAGTCTTCTGTTACGGCAGCCTGAGCTGACTAACACAGAAAGCAAATACAGAA
GCTTCTGATTAAAGATAGTAGAGCAAGAACATGCATTAATCTACAATCACTTCTAAAATCCCTTTAAAAC
CACCATTAAGAGATTTTTTAAAGGCATAAACAAACAAGGACAAAAAATATGGCAGAGGAGACAATAGCAG
GAAGATGTTCAAAGCTGGAAAGCAGGACATGTAGTAACTTATTTTGCTGATCTGAGAAAGAGGAATTCTA
AGGCAGAAATAGGGAAAGCAGAGAATCCATCCAAAAGACTCAGGAATTGGTGGAACCAGTTAACTTTGCA
AGTGAAAATGAAGATGGTATTGAAAATAAGAGAGTTGTTTAAATAGATTAAAGAGCTAAAAGGTTGTTAA
ACCTCCAGATACCTTCCTGCTATAGTTTGCATGTTTGTCCCCTACAAACCTCATGTTGAAATTTGACTCC
TGATGTTGCAAGGTTGGGTAGTGGCACCTGGTGAGAGGCATTTGGGTCATGGGGGCAGATCCCTCATGAA
TAGATTGATGCCCTCCCTGGGGGTGAATTCTTTCTCTGTTAGTTCTTTCAAGTTCTGGTTGCTAAAAAGA
GTCTGGCACCTACCCCCACTTGCTTCCTCTCTTGCCATGTGACCCTTTTGCACATGCTGGCTCCTCTTCT
ACTTTCCACTGTTGAAACGACTTCAGGTCCTCACCAGATGCAGATGCCCAATCTTGAACTTTCCAGCCAC
CAGAATAATGAGCCAAATAAACCTCTTTTCTTCGTAAACTATCCAGTCTCAGATATTCTGTTACAGCAAC
ACTAAATGGACTAAGACACCTCCCCAACTCAGCACAGCAAGATGTCTCACACCACCTCCCCAAATCTGGC
AAAGTACTGGAGTTTTAAATATTGGAGAGGATAAAACTAAGGGTTAAGTTGAAGGCAAGAGTACCATATT
AAAAATAGGAAGATTTTGAGATATTCTATCTACATATTGATTTTAGGATTATGGGTCCTTCTTTTCCCTT
GGCTGCTGGAATGCTGTTAGTTGGGCCTGTACTCTTTGGTCAAGAGATGGGGAAAATATTCCGTGGGAAA
TTAGACCAGCCCAAAAGATACGTGGAAAGATATGGACATTGGGGATTCCTAAATAAGTGGCCAGATGAGC
CACTGAGAATTTCATAGTCAACAGATTCCATCCATATCTATACAGTTTCCAATTCAATTTTTAGTGCTCC
TCTCTTCAATGAGCAACCAGGCAAGGATGATTTCAGGAACTGGTCTAACAATAAAGACTAAGATTAAAAA
CAAACAAAAGAAAACGGAAAAATTAAAACTATACAGAGAAATAAAACTTTTTCAAAAGTTTTTAAGAAGT
GTTTTAAAAATATATTATTACTATCAGAGCTGTAAGAGAAGATAATTATTATGAAGCAAGAATATACCAT
TAGGCCTGGCGCAGTGGCTTACGCGTGTAATTCCCGCACTTTGGGAAGCCGAGGCGAGTGGATCACGAGG
TCAAGAGATCAAGACCATCCCGGCCAACATGGTGAAACCCCGTCTCTACTAATACAAAAATTAGCCGGGC
ATGGTGGCGGGCGCCTGTTGTCCCAGCTACTTGGGAGGCTGAGGCAGGAGAATCAATTGAACCTGGGAGG
TGGAGGTTGCAGTGAGCTGAGATTGTGCCACTGTACTCCAGCCTGGTGACAGAGCGAGATTCCATCTCAA
AAAAAAAAAAAAAAAAAAAAATATATATATATATATATATATATATATATATATATATATACACATACAC
ACCATTAAAAAGGACATTTAAGAGAACAAACAAGCTCTGGGAAATGAAAAATTCGAGCAGAGTTATAAGA
TAAAATTAAAGAAATTAGTTAGAAAGATTAGCAAAGAGATGCTTTAACAGCCAGAATATAGGAATTTTAG
AAAGAAGATGGAAAACAGAGTGGGGATATCATCAAGGACATAATTCAAGAAAACATCCCAGAACTGAATA
GCCAGTGTTTGCAGATTCAAAGGATCCACAAAATACTCTAGACAACTGATTAAAATAGAAACACATCAAG
GTACACATTAAAAACTTTCAGAATATCAGGAATAAAGTATTCCAAAATTTTCCAGAGGGCAGAGGGCAAG
GGGAGGAAAAGGAGAGTGGGAGAGAAGGTTTTATACAAAGGGTCAAGAATCATAATGGCATCTGACTTTC
CAAAAGTTACACTGAAAGGCAGAAGACGATGTAAAAATACCTTTGAAATTCTAAGGAAATGTTATTTTTA
ACATACAATTCTATGCTTAGTCAGTATTATGAATAAAGTGTTTATAAAGATGTTTGGAATAAAGACTTTC
AAATATGCAAACTCTCAAAATACTTATCTTCCATGTATACTTTCTTAGGGAAGTGCTGGAAGAAGTGCCC
ACTATATAAAGAAGGCAAATCAAGAAAAAGGACGCTATCCAGGAAACAGGGAATCTAAAAAGAGTTACAC
AGGGAGGTCCCTGCATGATGGAACATTGCAAGATGATGACTTTACAGCATCTAGGGAATAATTAATCCAA
ATGTCCAAGATGATGAAACTGATGGATCAGCTGATGTGTTTGAATACATTGAGAGAAGTTTTAAACAACC
GAGGGATGAGTTTGGGCATGAATTATTGATGAATACGTAGAAACCTAAGCAAGTGAACTACATGCTAACT
TTAGTGGGGAAAAGGGCTGTGCAAGAAAGGAAAAATTATTGTCACATGGCTAAGCTATGAATAGCATTTA
CACAGTCATAACTATATAAACAGTGTTTATGGTATGATGGTAGTAAGAACAGGCAGTTATATGTGTGTGG
TATTTTGGAGGGTATAAAAGAGAGCAAAATATACATAGTTTTCTGAAGGAGCAAATCATTTTAATACATA
ATGCCCAAAATAGAAAAACCAACAGGTCGGTCATATAAACATATTATTTCAAGTGATAGAAGTCAATAAA
CAGCTAAAGGGGTTTAAAGCAGCTGCCAGGTGAGAATGGAGAACAAGTGGTAATGTTGTTTCTTGGTAAT
ATGCCTTGTGGAATGGTGGCTCACACCTGTAATCCAAGCACTTTGGGAGGCCGAGGCAGGCATATCACCT
GAGGTCAGGAGTTTGAGACCAGCCTGACCAACATGGTGAAACCCCGTCTCTTGGGGGCCGGGCCCGGTGG
CTCACGCCTGTAATCCCAGCACTTCGGGAGGCTGAGGCAGGCGGATAGAGAGTCAGGAGATAGAGATCAT
CGTGGCTAAAACGGTGAAACCCTGTCTCTACTAAAAATACAAAAAATTAGCCCAGCGTGTTGGCGGGCGC
CTGTAGTCCCAGCTACTCGGGAGGCTGAGGCAGGAGAATGGCGTGAACCCGGGAGGCGAAGCTTGCAGTG
AGCCGATATCGCGCCACTGCACTCCAGCCTGGGCAACAGAGCGGGACTCCATCTCAAAAAAAAAAAAAAG
AAAAAGAAACCCCCAACTCTTCTAAAAAAGCTGGGCATGGTGATACATGCCTGTAATCCCAGCTACTTGG
GAGGCTGAGGCATGAGAATCGCTTGAACCGGAGAGGCAGAGGTTGCAGTGAGCTGAGATCATACCATTGC
ACGCCAGCCTGGGCAACAAGAGCAAAACTCCATCTCAAAAAATAAATAAATAAATAAATAAACCAACAAC
AAAACAAACTATTTGACTCTTTAAACTATATTTGTATATAATTTTGTTAAAAATTAACAGGCCAGGCGCG
GTGGCTCATGCCTGTAATCCCAGCACTTTGGGAGGCTGAGGCAGGTGGATCACAAGGTCAGGAGTTCAAG
ACCAGCCTGGCCAAGATGGTAAAACCCTGTCTCTACTAAAAATACAAAAATTAACCAGGCTTGGTGGCGG
GCACCTGTAAACCTAGCTACTCAGCAGGGTGAGGCAGATAACTGCTTGAACCCAGGAGGCAGAGCTTGCA
GTGAGCTGAGATGGCGCCACTGCACTCCAGCCTGGGCGATAGAGTCAGGCACTGCCTCAAAAACAAACAA
ACAAAAACACAAACAACAACAACAACAACAAAAAGCCCTAATTTTTTAAACAAAGAAAATGCCTGGGCCA
GATGCGGTGGCTCACGCCTGTAATCCCAGCACTTTGGGAGGCCCAGGCAGGCGGATCACGAGGTCAGGAG
ATGGAGACCATCCTGGCTAACACGGTGAAACCCCGTCTCTACTAAAAATACAGAAAGTTAGCCGGGTGTG
GTGGCAGGCACCTGTAGTCCCAGCTACTCAGGAGGCTGAGGCAGGAGAATGGCATGAATCCGGGAGGCGG
AGCTTGCAGTAAGCCGAGATCGCGCCACTGCACTCCAGCCTGGGCGACAGAGTGAGACCGTCTCAAAAAA
AAAAAAAAACAAAAACAAAAAACAAAAACAACAACAACAAAAAAGGAAAATGCCTGAAACGTATTATGAC
ATAAAACAGAAACATTTAATGTTCTCTAAGCAGAAAGACATGACTCTGCAAATGTAGGTGACTTGAAACC
AATATGAGAATGAAACAAAGAGAAATTATCAGTTGTGGAAGACCTAAAAGCTTCTGAGCAGAAATTTCAA
AAGTAAATAGATAAATACACAAAATAAATTACAGAAAAAAGAGAAATATGCTGTCACGATAGGAAGGTTG
GTGAAATCTGGCTTACTGCTTGTGTTAGAATAAGCTCTTACTTATTACCATGAGGACTGTAGTAATTTGT
TACAGCAGCAACAAAAAACTGATGATGATGTCGCCCTCGATCAGTTGTACCTTTTCCTCAACTGTGGAGA
CCTCCTCACAATTTAAAAGAACATCACCTAGGTTTTCTCCAGGAATAAGGTCCTGTCTTCTGAGAGGCCA
GACTAAATACATTAAATTAGGTTAAGACAAAGCCATTGTAACAAAGAGACCTCCAAATGGATTTAATAAG
ATAAAAGTTTATTTCTCTGTCACATAAGAGTCCGGCCAGTCTCAGCTGACAGTAGGTTGTGCTCATGTGG
CCCCAGAGGCTTCTGAGCTCGTCCACCATGTTGCTCTTCTCCCTCGAAGCACCCTGCTTACCTCCGCAAT
CAAGGTGAACCATCGCCACTCACACAGAAAGTGAGGAAGCAGAAGCTGCGCGTATCACTTTTGCTCACAT
TCTACTCGAAAGAATTTAGTGAAGTACAGGGAAGGCTGTGAAACTAGCACAGCAAAAATTCTATGAGTAT
GGACAAAGGAGAGAACAGATTTCAGGGGACAATTTGTGTCCATCACCTGCATGACCCATTCTTTAGATTC
TTAAGTCCCCTCAGCCCAAGGAAGTCTCTTCACTTTGGCCCCACATTGTGCATCCCCATTACAAGGTTCT
GGTGGCCACCCTGATTCTTTTGTGAGATGCTCACTTTCTTCCAACTTAGCAAAGATCCCTGGCTCCCTTG
TAGGATAATAAAGAGGCTTCTCCAGGCTTTCAGCCCAAGACACTGAATAAGGAATGTTTTTCATATTTCA
CATGCCAATATAAAATTTACTTTGATGATAGACATCATTTTTGCCGAATTTCTTTTTCACCTTGGGGAGA
ATGAAATTCTGCACATTTGAGCTAAACAATTCAACATTGAGGTTTGTGGTTAAAAAAAATGCTTATGACA
AGTGAAGATGCCCTATAATACTGTGACTTCTCATAGGATCACTTGCCTATTTTAGTTTCAGTTACTGTAG
CTAATGCCATTTGTCAATTGTTTAAAGTGCTATGAAAAATGTAATTTTTAAAATGAAATGCTGAACAACC
TGGAACTAATATCTAGATCAGCACTGCCCAATAGAAATGTCAGGCCATAAACATAATTTTCTAGTAAAGT
CAAAAAAGGTAAAAGAAACATATGAAATACATTTTAATAATATATTTTAACACAATATATCTAAAATATT
ACCACTCTAACATTCAACCAATATAAAAATTATCAATGAAATATTTTACATTCTTTTTTTTTTTAATACC
AAGTCTTCAATATCTGGCATGTACTTTGCACTTACAGCACATCTCAATTCCTACCAGCCACATTTGAAGT
ACTTTATAGCCACATGTGGCTAGTGCCTACTATACTGGCCAGTGTAGAACTACATGATCTCAATGTGAAA
GGTATGTGAAGAAAGAGGGAAGTGAAAGCAGGCTGAAATTCCTGTTTTGTTTAAAGTTAGATATGGCCAC
TAAGGAACATTCAGTAAATGTAATAACTAGTGTTTGGTACAAATGGTTAACCATATGGAAAAAATAAAAT
TGTATCATGTGCCATACATAAACATAAATTCCAGATAGATTAAGGAGCTATTTTTTAAGAGAAAAAAGTA
CAAAATACAAAAAGTATTAATTGGGGGACCTTTGAAAGACACAAAATGCGGAAGCCATAAAGGAAAAGAT
TGTCAGATTTATCTAAAATAGAAATCCAAAATTTAAGTTAAGTAAAGAACATCATAAGAAAAGTTAAATG
ACAAGGGATACAGTAAAAGAAAACATCCATAAATCAATAAGAAGACAAATAAGCTAACTAAAAAATAGAA
TATGTGGGCAGATATTTCAAAGAGTAATTTGAATATGCAATAAGTATATGAGATACTTAACCGCACTAGT
GATGAGGGCAATGCAGATTAAACAACAATAAGCTATTTTTCTTTCACTAGACTGTCAACAGCAAAATGAA
AAACATTGGCCTATTACCTTGTGTCTCTCATTTATGCCACATTTGGAAATGTATATTTGTAAAATCTTTT
GGAAGGCAATTCAGCAGAATCTATCAAAATTAAAACATAACTCCTTTGGACTTGAAGATTCCATTTCAGA
GAATCTGTTCTTCTAAATATTTATACATATGCACAAAGATGTATGTGCAAGGATTTGATGTGTATTACCA
GAACTGGTAAAATCCATCAGTTCATCCCAACCAAAAGAACACCACAGGGATGCCTCTGTATGCCCTGTCA
TGAGAACATCCTCGAGATCTCAACTTACTTAGATCAGTCAAAAAAGCAAATCCTGTAGATCACAACTTTT
TGTTGTGTTGTCCATTTCTATAAGGCTGAAAAAGAGCACACACATACAATTGTGTGTTTAAACCCATATA
TGTGTGAGTAACTGCCTAGAGAAAGGGCTCTCAGAACATACATCAAACTGGGCAGTGGGTAAGAGAGACG
AGGGTGTGTGTGGAGGGACATATTTATATTTTATTTCACATACTTCTGTGCTGCTTGACTCTTTTACAGT
GCAAATGGTTTAATATATTACTTGTGGAAGGAGAAGGTTTATAGAGAGAGCCACATTCCCAACTGCTCCT
GGCAAAAGACGAGGCTGATTTCAGGACTTGGAGCCACCCCTTCTCCAACCACCCACCCCCACCCAGCTGA
GTGGTTGGGTCAGGTCCATGTTGCTGAGTTGTCTCTGGGTGTCTGTCCTTGCGGGCACCAGGTATTCTCA
GCCCACACCAGAGGTCAAACATGGAACACCCATCATCTCTGTGTAGCTTTGACCCCACGCTCCCATCTAC
CCATCTACCCCATGGCATCTCAAGTCCAAGACTGGCTTTTTAAAGTACAAGTCCTGCTGATGGTATTTCC
TGGCCATGCTGAAATATGTCTCCTGGAGGAGGAGAATAAGGTCAACCACTGTGACAAACAAAACCAAGAG
TGGAGGGCCAATGTGTGGATTGTGTTGATGACTGTGGCTTTCATTTCCCCAAGGCAAAGAAACCTCAGGA
GGCTGTGGTCATGGTTTCTCATTTTCATGCTGAGGCTTTTTGGGAAATTTCAGAAGTTGCCACCCACACC
TTGTTAGGGGAGGGAGAGGAAACTTCCTCTTCAGGATGGGCTGGGGATTGTGGGAAGACCTTTGTGTGAG
ACCAAGTGTCATGCAGAGACAGCAAGAGAGAGACTGGGAATCAATTCCTTCTCCAAGGGTTTAATTAAAG
TGTGGGGAAGTTTGCAATCTTATTCAGAAGTTAACATCTGAGCATAGATTTGAAGGAGGTAAGAGATGAA
GCCATGTGGGTGTCAGACAGAAGCATTCCAGAGACAGGGAACAGCAGTGCAAAGGCCCTGAGGTAGGATT
GTGTCTGGTTTGTTGGAAGAACAGAAAGGAAGCCTTTGTGGTGTGGCAGGAACTAAGGGAGTAGGCGGTG
AGCAGAAGATAAGGTCAGAGGGAAGGGAGAAAGGTGGAGAGTGAGAACTACCTTGACATCTTGGAAAGAC
TTTGCCTTTTATTCTAGGTGAGTTGGGGAACCACTGGTGGTCTGAAAGCCAGAGAGTACATGATCAGGCT
GACGTTTAACAGAATGCCTCTGTCTGCTGTGTTGGGAACAGACTGAGCGAGTAAGGGAGAAAGCAGGCAA
CTGCAGCTGACCAAAAGAGAGACAGGAGAGCTGAGATATTAATGGAGTGACCAGCAGCATCAGAATTACC
AGGAGGCTTGGGAAAACAGATTGTTGGGCCCCAGCCCTGGAGCTGCTACCTGTTAGTATGGGCAGTGTCC
AAGGAATTTACATTACAAGTTCCCAGGTGATGATACTGCTGGTCTGGGGGCCACACTTTGAGAACTTGTC
TTTGTAGAATTTATGAAAACATTTGTTTATCAAAGTTCTCAAGGAAGCACATTGCTCGCTCCTGTGTCCC
CAGTGCCTAGCGTGATGCCTGGCACGAGTCTTCATCGAGCTCAGGCTCTGGGCCAGGCTCAGTGCTATTG
AATGAGGTTCATGAGGGTCCCAGGTTTGAACTGTTTGGAGGTAACTGGTGATGAAACTTTCACAGGAAGT
GGTCATTAAAGGGAAAGGATTCCTTGTAATTACAATAACAACAGGTGTGACACCTACCCAGCGTCTGCCT
AGATGTTTTACTTGTATCCCTCTCCAATTAAATCCTGTAAAAGCCCTGGGAGTCGGGCATTATCCCGGGA
TTTTTATGAATGAGAGAACCAAGGCTTGGAGAGTTTAATTTTCCCAAGACCACAGGATTAACAAGTACCA
GAACCCAGCCAGGCCTGAGTGGGAGCTCTCTGCTGTTTACATCATAGGCCGCCTGAAGAAGTCACTGACA
AGACCTAGTAATTAAAGAACCTCGAGAAGCTAGGAGTTTCATTCTTTGAGGACTGTGAGCTTTTTTAAAA
GTGCAAAGAATATGCCATCCTTTAAAAAAATGCTTCCCATCTGAATTGAGATTCCTGTTCACACAACATG
TTTTGAGCCTCCAGCCCTTCCTGGCAGAACCCTGGTAGCAGTGGCTGTCCCAACAGAAGTATTTTTGCTG
ACTTTTGTGGCTTAAAAGCCTTCTCTGATGGAGCACTTTTCCTCCCCTCTTCCTCTTCTCAGCCTCCTCC
GGCAGGATGAAGGGTGTAAGATTTTGTGCTGAGGCGCTGAAGCTTGACAAATTGAGGCCAGCCTATCTCT
AAATGGAATCCGTGTATCTTGCTAGGGAGGGAGAAAATCAAGTTCCAGCACTTCCCTCCTTATCAGCCTC
TCCTTTTCCCTACCCTTCCCTGAGGATAAAAATAACCGCTTCCCAGGGCCTCACTGCGATGGAGCAACTG
TGCCCCGAAGCCAGGCCTAGCTGTCAGAGCAGCTGCTCCCCGAGGCACGGCCCCGCGAGAGCCTTGGGGT
CAGGACGGGGGCCTGTCCGCAGGGACGAGGTGTCCCAGGACAGGGCAGGGGCCCTTGGAGCCTCACCAAG
AGAGGGGGCACTGGTGCAAGTTTGACCGCGATGGTGGGCGGCTCACAAAAATACATCAGGAGGCCCGGAA
GTCCATGCACTGGCTGGCTCCACCGCCTTTAAGTACACGAGGTCTATCTGCAGTTCTTAACCTCTTTGAG
GGCACAAGGACTCCCTAGAACAAATGATGACATACCACCTCTCTGTGTGCAATCAAGCATACACACAACA
CACAGAAACATGGACGTGGACACAAATACGCACGGAGACACATACACTTTTGCACACAGTTTCATATTAT
TGGAAGGCTGTCGAAGCCTGGTATGGACCACAGATTAACAACCCCAAAGGCAGGTTGATTATAGTGATGC
AGAACGATTATAAAAAAAATAACAATTTGGCAGGGCGCGGTGGCTTACACCTGTAATCCCAGCACTTTGG
GAGGCCGAGGTCAGTTGATCACGTGAGGTCAGGAGTTCGAGACCAACCCGGCCAACATGGTGAAACCCCG
TCTCTACTAAAAATACAAAAAAATTAGTCGGGCATGGTTGCGGGCGCCTGTAATCCCAGCTACTCGGGAG
GCTGAGGCAGGAGAATGGCTTGAACCTAGGAGGCAGAGGTTGCAGTGAGCCGAGATCGTGCCAGTGCACT
CCAGCTTGGGTGACGGAGCAAGACTTCGTCTCAAAATAAATAAATAAAAATATAAAAATAAATAAAATTT
TGTAACGTAAAAATAGGGTTAGTAAAGCGTGCTAAGATCTTTCTGGAAAACAAATATATGTAGTATAAAT
TCTAATAATAGATACGGAAACGATAAAGTTGATCACCGATGGTAAGATAAAGGATGATTTCTATTTATTT
GAGTTTTCCCACTAAACAGGAAAGCATGCTGCTTTTTCGCAACCAGAACGGCCGCATCCAGGCGTTTCCG
GGGACCTGGGGCGCCCACTGAGCTGCAGGCGCGGCCGGTGGCTCCAGCCTGGCCCGTCCGTCGGGAAAGG
AGGGTTACAGACAATAGACAAGCAAACATTAGACGCAGTGACCGCGTGGGGCGGGGACCGGCTCTTGCGG
AGAGGGTGACCCGAGCCCTTCGCCCGCCGAGGCACTTTAAAACCCCAGCGCGTTGCCCAGGCCGGCCCGC
CCAGAGCGAAAGGTGCGTGCGCGCTCCCGGGGAGGCGGCGGCGCGCACGGGCGCGTCCCGCGGGCAGCCC
CCAACTCCGGACGATGCAGCGAGGAGGCGGCGGCGGCGGCGCGCTCCGGAGGTCTGAAGCCACTGCTGGC
TGCCACGGGCCGGCGGTGCGATGAGCTGGGCAGCCGCCCCCGGCTCGGGGCTGTGAGCGGCTCGGGGCCG
GGGGTGGGCGGCGGTGCGGCGGGCGGCCGACGCTCCTCTTCGGCGGCGGCGGCGGCGGCCATGCGTGGGC
GGCGCGGCTGGGGCGGCCGGGCCGGAGTTGCCTCCCGGGGGCCCGCGGCTGAGGGCCCCGCCGCCGCCGC
CGCTGCTGCTTCTGCTTGCGCTGTTGCCGCTGCTGCCCGCGCCTGGCGCTGCCGCCGCCCCCGCCCCGCG
GCCCCCGGAGCTGCAGTCGGCTTCCGCGGGGCCCAGCGTGAGTCTCTACCTGAGCGAGGACGAGGTGCGC
CGGCTGATCGGTGAGTGGGGCCGCCGAGGCCGGGGCGGGCAGGTCGGGCCGGCTGGGGCAGCTTCCGGCC
GCCGGCGGATCAGTCTGCGAGCCGTGGACCTCGGGCGAGTACCCTCCCCGCCCCCCGCGCCCGGATTCGC
CTCGCGGCCCGGTCTCTGCCTGCCGTGCTGGCTGGGAGGTGTGGTCCCTGCCCGGTCCCCAGCTCTGGGT
CAGCCTTCGTGCCGCCCTCGCTGCCCCGCCGCGATAGACCCAGATTCACCCCATCCCATCCTCCTCACTG
CCTCCTTAGCCCTTCTCCCTAGAAGAGTCAGTCACCCTTACAACTTTTTTTCCTTGCTGCACGAAGTTTT
TTTGACGCTTTCTATGTGTGTCACTCTAGGGCCCTCGATTTTGAATATCTCGAAATTCACGTTTTAGACT
GAACTTGCAAACCCTTTGCTGTGGTTTTGATGCTCCAGTAGAGGCCACGCTCTGTGCTTACCCTTTTACA
AAAAAAAAAAAAAAAAAAAAAAAAACGAGAGAGAAAGAAGGGGAGGTTATAAGGGCACCAAATGTTCGTG
GCAGCCTCCAACTCTTGGGACGTAGATTTGGAGCATATGCTTAGATTCTAAGCATATTTTTAGTGAATGA
ATCGCCAGGTAGCAGACCTTTTTAGTTTCAATACCTTTTTGGTTTTTGCATTGGGTGTGTTGGGAGTTTG
GACTGACTCTGTACTTCTGGGCCACTCTCCTACTTTTGAGTATCTTGAAGGGAAACAAGAACTTAGTCTT
GGGTCGGTTTGTGGTTCCATTTACTTGCTTAGCTTTGTTGTTTGGGGAATTAATTTGAAAAATTGCTGGG
GTCTTATGTTAGGACTTTGTGGATTCTGGAAATGACCCCTTAGAGGAAGATCTGACAGGAACGACCCCCC
AAAAAGGAAGTCCTTGGTACCTAGACGTTTGCATTCTTTTGTTATTATGGCAGTATCTTTATTTCATCTG
AAGGTGGTGCTTCTGAGTGTTTGAGGGGAAAAATTATTCTCTATTGCATCCATTATTTGTCAGTATTCTA
TTTTTTTTTAAGTAATAAGACTTTGTTGAGGTGTGTTGAGATTGACTCAGTGTAGAAATGGAATTACTGA
AAGCAGACTCTTTAGACATTACATGTACGGATTTGCAGTTTTTAGCCAAAGAAGAATGCTCTTTTTATGA
AGTCGTGCTCATTCTTAATCCTTCTTAGTCTAGCTGAGTTAGCTGAATGTAGTTTAGCTGAATTAAAACT
CTACTTGGGGTAGTACTTGGAACACAAGACTAAGATTTAGGAAAAATAATACAAGACGACTCATATCACA
TTAATTTTAGAAATATTAACGTATTATGCATGGTTTTGTAAAGGCTTTTTGGTTAAAAGCACTTATATAG
CTTGTGACTTTGTTTACATGGGTAAACAAAGTCAGAGGTGTAGGTAGGAGACAGAAGACAACCAGGGACT
GACATTGAATTCCTGCCATATACCTGCCCCTACATGCTTTATACACATAATTTCTTCTAATTTTCTCGGG
GCCCAGTGAGGTAGGTGGCATTATGCCTATTGTAGAGATGAGGAAAGTGGGGTTTTAAAGTAACTTGCTC
AAGGTCACACAGTTAATTTTTTTTTAGACGGAGTCTCGCTCTTGTCACCCAGGCTGGAGTGCAGTGGCGT
GATCTCGGCTCACTGCAATCTCTGCTTCCTGGGTTCAGGTGATTCACCTGCCTCAGCCTCCCAAGTAGCG
ACCACTTCTGGCTATTTTTTGTATTTTTAGTAGAGACAGGGTTTCACCATGTTGGTCAGGCTGGTCTTGA
ACTCCTGAGCTCGTGATCTGCCCGCCTCGGCCTCCCAAAGTGCTGGGATTACAGGTGTGAGCCACCGCAC
CTGGCCTAGTTCATATTTTTGAAAAAAATGAAACAGTGTTGACATAGGCTGCAAAGTTTTATCGAATGAA
ATGAAGATTTTGTCTGTAGAAGTTTGATTATGTCATGGTGGAAAATAAATCATTGCTAATTAGCACTTGA
GTTATATATTTGTTACCTTATTCAAAGGTTGGCCTGGAACTAATTTTCTTAGCAGTATTTGCAGCAGAGG
AAGCTCCTGTTTGATGAGCATCCAATTTATGCCCAGAAATGCTGTTGCTGGGAGGGTAGGAAGCATTGTT
TCAATTAACTCCCTTGTCTATCCCCGGGGGCGAGAGAGACTTCTAGTAGTATTTTCTCTAGTGCAAATAG
GGTTGACCTGTTACAGAGGATCTCTAGTCACTCCATCCTGCCAGATTCAGGTTCGTTGTTTCCATCCCTT
CCCATCTCCCTCATACATTCTACCTTTAAAATAATTCCTTGGCTCCTCCAGGTAGGGAAGAGCCAAGTGG
GTAGGACTGAGATGTGTACTGAGATGTGTACAAGGCACTCCGAATTCTCAGAATGCAGTCTCTCACAGAA
GCTGTTATGGTACTTAAGGCTTCTTGGAATAGTAGCTTTGCACCGTATTTTAGAATCACTACAGATTTTG
TGCCTTCTGAACGCTGGCATAGGAAACGAACCATTATTTTATAATATTTTTAAGACAGTTTAGAGTTCCA
AGTAAGAAACTTATAAATGAAGTTGATAGTGACAACTTTATAAATTGAACTAATTACCCTTGATATGAGA
ATAAATTGTTTTAATCCAGTTAATATATGCATATAGTTTTAAGAGAACCAAAAGGCTTTTTTTTTTTTTT
GAGACGGAGTTTCGCTCTTGTTGCCCAGGCTGGAGTCCAATGGTATGATCTTAGCTCACCGCAACCTCTG
CCTCCAAGGTTCAAGCGATTCTCCTGCCTCAGCCTCCCCAGTAGTTGGGATTACAGGCACGCATTACCAT
GCCCAGCTAATTTTGTATTTTTAGTAGAGACGAGGTTTCTCCATGTTGGTCAGGCTGTTCTCAAACCCCC
AACCTCAGGTGATCACCCACCTCAGCCTCCCAAAGTGCTGGGATTACAGGTGTGAGCCACCGCATCCGGC
TTAAAAGACTTTTGACAAACACAGCAGGCTCTTGCTTTTGTCTTTTTTATCCCTCAGGCTCTACTTTCCA
GGGGTAGCTACTACCTCAGCTAGGTCTGTTTATTTTTTCTTCCTCTTTTTTTACTTTCGTCATTCTAAAT
CAATGTAGAATAAGTCTTTGACTTTCTAGTATCATAACTGAGCTCTTTCTCATTTCTCTCTTAAATCCTC
CAATGTAGTTACGTAACTTTTTTGTAAAAATAGCAGTATTTACATTATTGTGTACACAGGTATTGCTAAA
TAGTGACTTATGATTTTTTTTATACATTTTTGTTTTTCCCACAGCAAATAATTGCATTTTATCAAAATTG
CGTTTTGATTCGTTACCTATTTATCTTTGGCTGTGTTCCCTCAACTACTCCAAGAAGTATGTTAAATGCC
TTTTGATTTTTTTTTTTTCCAGGTAGCACATTAAATCATCTATCAGTGCCACTTGGTTTCCTCTTAGAGA
CTTCTTGGTCTGGAGCATTCCATCCTCTTGCTCCAATCTAGATAGTACGATTATTTTTTCTGGGACTTCC
TGTTACTTCTTTCCTGTCTTGGAACCTCTGTTTTTTAGATCTCCTGTCTTCCTTTTTCTTGGTTTGCTTC
ATTTTGCTACTATGTATGTATCCTCAGTAGCTTCTTAGGAAGGAATGATGGGAGATAAATTACTTGAGGC
CTTGAATGTCTGAATGTATCTATCCTGTCCTCATACTTTATAGATGGTTTGGCTGAATTTAAAATATTAA
GTAGAAATACATTTTTTCATAATTTTGATGGCATATTCACAGTTTTCTGTCTTAAGGGTTTTTGATGAAA
AGTCCAAAGCCATTCTGATGCCTCTTTTTTTCTGTTTTTTTGAAGCTCAGGTTCTTTTTCTCTGGCATTC
TGAAGTTTTATAAGTTTTTGTGTGGTTGGTTGGTTGGTTCTTTCCTTCCTTTCTTCCTTTTCTTTCTTGT
ATTACCTTAGTGGGTCCTTTCAATCTAGAGACTCTTTTTAGTTTTCAGAAATGCTTTTTTTTTTTTTAAT
AATTCCCACCCTTTATTTTCTCTCTCTCTGTGTGTGTGTGTGTGTGTGTGTGTGTGTGTGTGTGTGTGTA
TTTCTTTCTGAGATGTCTGTTGGTTTGGTTGTTGAACCCACTACAAATGATCTTTAAATTTTCTTAACTA
ATCTCATGTCTTACGTATTTCTTTGTACTGGAAGGAGTGGGAGGGGGGGAATGGTTCTCAATTTTAATGA
TCATGTTTTTAAATTTTAGAATCTTTTTCTGTTTCCATTTCATTGCATCTTATTTTATGGATGTATTATC
TTTACTTATCTCTGATGTGTGTATTTTTATTTTTTCTTTGTGTTTAATATATTTTTAATATTTCTTCTGT
TTCCTCCAGTGTGGTTATTCATTTCAGGGATCTTTTCTTTGTTTGTTTAAGTCATAAATATCTGGTGATC
CTTGACTGTCTATAATGAAGAAAAAGATCCTGAGGAGCTGATTGCAGAGGAGAGAACATGTGTGTATTGG
TGGTCTAGTGACTTGTGAGTTCAGGTGGACTTTTCATTGGGAGTCTGCCCCGAATATCAACACCTTTACA
TCTCGTTTGGGGCCAGTGTTCACAATGAAGAAATCATCATCTCCTGCCTCTGGTATGCTTGGTGATATGC
CAGCTGCCAGGGTTTGGGTTACCTGGCTGAGGGAGGGATGGAGGCTGTAGCCTTCGACTTCTGGCTACAG
TTCTCCTGTCACTGTGATTCAGTTTCTTCAGAAAAAACTTTGGGTTTCCTGCTGGAACTGGGGATCCAAA
AGCTTTGAACACCTCTTTCGGTGGCTCCCCCCTTGTCTAGGCTAAGCCTCACATCAGCCTTTGGCATCTC
CTTGGTGCCTCAAGACCTGAGCCTCTTGGAGGTCCTGAGGGGCAGTGACCATTCCTTCAAGTACTTTGCC
ATCTTGCAAAAGTTTGTTTAAAAAAGCATGTTGTCTTTCCTTTTCTGTTTGTCCTTATGGTTTGATGTCT
TTGTGATTTTTTTTTTTTAAACTATCATTTTAGAGGAATTTTGGAAGGAAATGGAGGTAAGGGATTATGG
TCATTCCACAATGTGTAAATGGCAGTTAGGGTTTGGGTTTAACTATTGAAGATGACGTGTGGCAGTCTTT
TTATATGAACAATATTACGAGTAGTTAATGGTGGTTGTAGTAGTAGTTGACACTTTTAAAAGTGCTGTCT
TTTGTCTGTGTGGGGCATAGAGGTCATCCCTGTGTTATGTACTGTCATTTCCATTTTATAGATGAGTGTT
AGTCTGCTCAGGCTGCTGTAACAAAGTACCATAAATTGGGTGGATTGTAAACAACAGAGATTTATTTCTC
ACAGTTTTGGAGGCTGGGAAGTCCAGGATCAAGGCTTTGGTAGATTTGATATCTGCTGAGAGCCCTCTTC
CTGGTTTATGGATACTGCTTTCTCCCTGTGTTCTCACATGGTGGAAGGGGCAAACGAGCTCCCCTGGGTC
TTTTTATAAGGGCTCTAATCCCATTCATGAGGACTGCTCTTATGAGCTAATCACCTCCCAAAGGGCCCTA
CCTGCTAATACCATCCCTTAGTGGTTAGGATTTCAACATAGAAATTTTGGGGTGACACAGAGAAATGAGA
AAACAATAATCTTAGAGTAGGTATGTATTAATGACTAGCCTGGTTTTTTGGTAGTAGTAGGGCACACGGT
CCTGATGGAAGTGTATAAGTTCTGAAACACCGAAAGCTTCAGAAGCTTTTAAACTCTGGTTGGCCTTCCT
GTGTTCCTGGGCCCTGGTTCATCGCTTGCATTTACAAGCCTGTTACTTGCATAACAGGCTGCAATGTAGG
CATTCATTTCTGCATTTTACTGATGAGGACCCTGATTCAGGGCCTTTTGGACAGTGAGTAGAAGGCCAGG
TCTTGACTCAGTCCTGCCTGAGACCTGAATTCATACTGTCTCTTTATCAGCTCTGGAGGAGTGCAATTAA
CCAAAAACTCAAAGAGTAGAACCGCAAGCCTCCTGCCACAGGTGCTTGTTTGTGGTCTTTATTATTATGC
TAATTATTCTTGCATCCTCCCATGTTCTTTAATTGATAATTTTCATTGTACTGAGCTCTGTGGAATTCCG
GAGCCTGTGAAGGTGGCATATGGCTGGGCAGTGCCAGAAGCTTGGGAAGAACATGCTGGTGGGTGGGTGG
GGAATGGTATAAACTGGTTATGCCAACAGTGGTGGTGGTGATAGGGGTCAGGGGGACTTTTGGGAAGAGG
CCCCATCTCCCACCAGTTAGAAATTAACTTTGGATAACTTGCTTCTCCTCTTAAAATAAATATCTTCTGG
AAAAGTCAAGAATGTTCACATTTTATTTAAAATCAAGTCAATACTAGTTGAAATCACTGTGTCCCAAATC
AGTCCAGAAAATTTTTTTGAAGCTAAACCAAGTACCATATATTGTGGTAGAAAATGACAATTCAAAATTA
TTACACTCCTTTCCCTGAAGATCTCAGAATTTTGTAGGGGAGACTTGCATTTATGACTGTAACAGAGATA
AGAGTTATATTGCTGGTTGACATAAGTTATTGTAGGAGCACTTACTTTTGACTGTGGAAAGGGCGGAGGG
GAGACAGGCTTAGAGAGTTTAGGAAACTTGTCCCAGGGAAAAAAAAGACATTTGAGCCTCATCTTGAAGG
ATGAATTTGATAGGCAGAAAAGAGCAGTTCATACCAGGCTGAGAAAGTAGTGTGAACAAAGACATAGAGG
GTGGAAGCAGCTGTGTGAAATTGTGGGGTAGGAAAAATCTAATGTGGCTGAGGTGAAAAATTAGCAAAGC
CATGGAGCGCCACAGGATAAAGCTGGAAGGTAGGCTGAGGTTAGAGTAGGAATTTGAACTCTTACAGGTG
AATTCTTCAGTGAGCTGCTAAAGAATGCAGACTAGGAGAGTGCGCAGTCAGGTCTGGGTTATAGGGAAGA
TAACTTTGGCCCCAGTGAAAAGGATGGCTTTGGAGAATGAAATGCTGGATCTGGGAAATGAGATAGAGCC
AACCTTGTGATGATAAGAGGGATCAACTAAGGCAGTTGAAGGGGTGGGATGGATTTGTGAGGAATTTGGT
GAGTTTGGAGAAGACTTAGTAGAAGAGACTTTAGGGCTAAAGAAAGGGGAGGAGTCACAGAGGAATCTAG
GGTTTCAGATTTGGGCAACTGAACCAAAGGACCCTTTCCTTTTGGGAGAAGTGGTTGGTCAAGGGAAAGA
AAAAGGAGATGAACCATGTATTCCTCTCCTCCCAGCACCCCTCTCTCCTAAATCTCAGAGCCCATGCTTG
GTGGGGAGGAGGGGTGGAGGGTTGAAGGTGTCCTCTGCCCATGAGTCTGGCATAACCTGCCAGAGGGCCC
AGATCCTGGGTGGGTTTTTGGGAGGTTAGCACTCTGCAGCAAATCCTTAACCCTAGGCGTTTTGGTGGAG
TTGGTATTTATTTGAATCCATGTGTTCTTCATTGGGAGACAGGCAGAGACATTGTGCAATTGTGGGTTTG
AGGGTTGTTTTTTTTCCTCATGCTACACATGTGAGAGAACTCTATCCAATTATGGCTAAACCTGTCCCCT
GTGAGTCACATCCTGAGTTGACTGGTCAATTCCAAAGGTGCTGCCTAAAATGCTGTTTGGATTTTAAGAA
TCACTTTTGGGACAAATCAAACATGTGAGTATTTATTCAGGCACCTGAGTTGAGAAGTTCCATAGCATTA
CTTTTGGTGTTTTGATGCAGTTACGCCAATGTTCTGAAAAATCTTGCCAGCTACACATCCTAAAGCAAAA
CAAAAACTTGTACATGAAACAGAACCATTAGCTACTCTAAAATTATGTCACACTTAAAGGTATACATTTT
TGTGCGTTGTTGATGTAAATCAAGTGCAATATTTTCTAATAAAAATTTTATTAAACAGCATTCATTTGTG
AAGGTCCTCTTAAAATGTGCCAAAATAAACGTGTGTGTATTGCTCAGTTACATAATAAACAGTTGTTGAA
TGATTCTTTTTGTGTGTTCAGCAGTGATAATGCTGAGTGGATTTCATAGGTCTCATTCTTATCTTTTTTT
TTTTTTTGAGACGGAGTTTTGCTCTTGTCACCCAGGCTGGAGTGTAATGGCATGATCTCGGCTCACTGCA
ACCTCTGCCTCCTGGGTTCAAGCAATTCTCCTGCCTCAGCCTCCTGAGTAGCTGGGATCACAGGCGTCCA
CCACCATTCCCAGCTAATTTTTGTATTTTTGGTAGAGATGGGATTTCAGCATGTTGGCCAGTCCAATCTT
GAACTCCTGACCTCAGGTGATCCACCCACCTTGGCCTCCTTTCAAAGTGCTGGGATTACAGGCGTGAGCC
ACCTTGCCCGGCCTCATTCTCATTCTTATATAAATTTTAAGCTGGAATAGACAGCACACAAGTCTCTAGT
TAGGGATCACCTGTAATTTAGGGAGGAGGAGGAAGAGCGTATCTTGCTGTATGCCAGGTACTTTACATAT
GTTCTCTTTTATCAACCATAGGAAGTCGGTGGCATTGACTGTTTTTTGTTTGTTTGTTTTTAAACAGATA
AAGCTGAGATGCTGAGGTTGTGGGCAATTAACAGAATTTGCTGTAGGTCACAGAGATGTGTGGGGCTATG
TGACTCCAAAGTGCGTGCTTTCTCTACTGTGCTGCCTTTGAAGGTTGACAGTTGACTTAGTCTTTAACCA
AAATCATCTGAGAAGCTTTAACAAACTACAGATTCCTTGACCTACCCTGAGCAATTTGTTGAATTGATCT
GAGATGGGGCTCAGGTAAATTAACGTTTTGAATGCCATGTTTAATTAATTACAGGAGGTACAGGTTTTCC
ACATTTGAACGTCTCTGAAATCAGAACCATGTTATAATCAGTGGGGAGAGTCATCAGTTAATAGCTTTTT
TCTTTCTTAGTGGCACAAAAAATAAGGATGTACTTTAGATTAAATGAAATATGATATTATAAAAAGGTGA
TACTGTAAAGGGAACTTAAATACATAGTTTGTCACCTTTCTTTTTTTTTTTTTGAGATAGAGTCTTGCTC
TTTCTCTCAGGCTGGAGTACAGTGGTGCAATCTCAGCTCACTGCAGTCTCTGTCTCCCAGCTTCAAGCGA
TTGTCGTGCCTAAGGCTCCTGAGTAGCTTGGGACTACAGGCGTGCACCACCACGCGTGGCTAATTTTTGT
ATCTTTTTTTTTTTTTTTTTGGTAGAGATGGCGTTTCACCATGTTGGCCAGACTGGTCTCGAACTCCTGA
CTTCAAGTGATTTCCCTCCCCCACCAACCCTGTCTGGGCTTCCCAAAGTGCTGGGATTACAGGTGTGAGC
CACCATACCAGGCCTCCACCTTTTTTATGTGCATATGCATGTGTTTGTCACAACTTTCAGAATTGTAAAA
TTCACTGGTGGTATTTATTATTTGCTTACAGCAATAGCTGTGTAGTAATGCCCTTGCAGGGAAATCATAA
AATGAATGAGATATTGTCATTAGATTAAGAGCAATAGCAAGGTTACTTTTCAGCCAAGAAGCTGCAGGCA
AGGAGAAATGTCAGTGGTTCTCAGCCTTTTTTTGTGAAAGCCTTAGGCCCTTTCCCTAGAAAAAGGCATG
AATGTCCACACATACTAAAATTTGTATACTGTGCTAGGACCTCTAGACTTTTGGGGCCTTTGAGGGACTC
CTGATGAAAAGCTTAATGGGTACACCTGAGTGTCACAAAAACTGGTATATGTCATATTCTGTTTTACATC
CTAAGATCTGACCTCCTACATGAATTTTTTTGAAAATTTGCATATATTAAGATTCACTCTGTTGAAAAGT
TATGTAGGTTTCGACAAATGCATAGTGTCCTATATCCACTACAGTATCATAGACAGTAGTTTGCACCTTT
AAAAAGTCCCCTGTGAATGGGGCATTTGTATTTATAAATACTCCCTCCCTTATATTTTAAATAAGGTGCT
TTAAAAATGTATTTATTATGGAACATTTCAAAAATTCAAAATAAGGCATAATAATATAATGAATCTCTGT
ATACCCGTCATCCAGCTTCAGCAGTTCTCAACTCATAGCCAATTCTGTTTCATCTCTACCACCTTACCCC
TACTCCACTCATTTGCCCTCACTCTCCTTATCCTCTACTTAGATTATTTTGAAGCAAATCTAGACATAAT
TTCATAAAAATATTCCAATATGTATATCTGAAAGAAATTCTTAAAAAATCTAAAATAACCATTATTGCAC
ATTATTAAGAAATTAAGAATTTATAAATATCAAATATCTAAGCTGTTGAGCTTTTCCTGATTTATAAATA
TGTAAATGTATATGTAGAGACTCTTCTTGCCTACGACCTGGATCCACTCTTATCCCTGCCCCTCCCTGCA
CCACTCAGTTCCCTTGGTGCCAGACTCCTTCTCACCCTGGAGTCTACATTAGATGGCACCTCTGCCTTGC
GTTCTTTCCCCAAATCTTTACATGGCTGGTACTTTCTAGATCTCAACTTAAAATGTCAATTCCCCAGAGA
GGCTCATCTTCCTAGGGTTGATCCCCAGTGCCTCTCTGTGCTATCACACTGTTTTAAGCATCTGATACTT
TTTTGGTTGTTTCCATCTCCTTTAGTGAAAGTTCTGTTTGAATAGACACTTTTTAGGTTGTTCCACTTTC
TATTTTTAGCACCTAAAACAGTATCTGACATGTAGTAGGTTTTCATTAAAAGTGGAACAAATGAGTAAAC
AAGTGAATCATACTTACAAAAAAATTCACTATCCTGTGCCTTACTGGAGTCATCATTCTGTTGATCATTT
CCCATGGCCTGCTTAGTTATTATCCAAAAGGGAAATTAGACTGAAGCTATACTTACTAATGGAAGTTTAC
ATATGTTAATTTTTTATAGCTGCTTTTCTTTTCTTTTTTTTCCCCCTTTTTGAGACAGGGTCTCTCTTTG
TTGCCCAGGCTGGAGTGTAGTGATGCAGTTACGGCTCACTGCAGCTTTGATCTCCCAGACTCAAGTGATC
CTTCTGTCTCAGCCTCTAAATAGCTGGGACTACAGGTGTGAGCTACCATACCCCACTAATATAAAAATTT
TTTTTTGTATAGATGAGGTCTCCCTGTGCTGCCCAGGATGGTCTGAAACTTCTGGGCTCAAGGGATCCTC
CCACCTTGGCCTCCCAAAGTGCTGGGTTTACAGGTGTGAGCCACTATGCCTGGTCTTGATAACTTATTTT
CTTTGGAGTTGCCTAATTTGCCTCTCCCATTCCCTTGCTGTCTCTGGGTAAGGCGCCTCCCATGTCGACT
TCCATAGCTCCATACCCTGCATAAGCAGACCTGTATCACTGCACCCATCATATTTTGTCTCTCCCCTACT
GCACCGAGGCTACCTTATGGCTTGGCACAGAGCAGTCTCTCAATAGACTGTTGGCCCACGCTACAATTGG
AGGATGTGAAGTATTCAAGAGAGATTCCGGCAAAAGCCTTTATCAGTAATGAAAAGCTAGGAAATACAAT
TTCTAATTTTTTTTCCCCAAAATGCATAACCTGCTGTCCTATCCAGTCTATTTTCCATCTTATATACAGT
ATAGTTTTCAGCCCTAGCAATTTGACTTGGGTCTTTTTGTATTTTCCATGATTCTACTTAACTTTTTGAC
CATGTGGAGTACAGGTATAATAGTTGTTTCAGTGTCCTTGCTTGTATTCTAACATTTGTGCCTGTTCTGT
GTTGATTTTGACGACATATCATGTTTACTTCCTGAAGTGGCACAGTTAGGAAAAGTTAGTGCCTGCAGAT
TCCTGGCTTTTCCTTGGGAGGAACAGGAGATTCCCTTCCATGTCTTCTTGAAGCTGATTTCTAAACCACC
TATCAGGACCAAAAGGGTAGGCTTACCTGCTTTTCTTTAGGCAGAAAGAAGGCAGTCTGAAGGACGGAGG
GGAAGAAGGGGTATATTTATGTTGTCTGCTGTTGTTGGTCATGCATACGTTCTTTCTCTGGAAAGCTCTC
TCTAATCCTCCTTTCTGTGTATGAACATACACTCTCAAGACAGTTCTATCAAGACACTTAGGGTTGCAGG
ACAAATATATGAGGAAATGCTGAAGAATGTGGCAGAGAATTACACGAAAAATCATATTTAATCCACAGAT
TATTGCTTGAACAGCTATGGGATTGAAGATTTACATGCTTATTCAACTATGGGGAAAGGATGCCCCTGTT
CTACAGTCTAATATTTTAATTCCTTGTCTTATAATGTAGTTAAACATTAGGTCTCAGCTAATTTTCTAGG
CATAATATGACCACAGCTAGATTTATTACATTCTGATGAACAAACTGTTATTTTATCGATTTCAGCTTGT
TACTTTCCATAACCTAAGAGCATTTGAAATAAGAGCTCCTTGTTTACTTTCCTTTTAGCATTCATTAAAA
TGTATTCAGTGGTTTAATACATGTTAAGTGATATTGGTTTTTTCTCTGATTAATGGCTCATATTACCACT
GTCCTCAGAATCTAGAAGATTATCTTGACTAAATGAATTTTTACTTAAGGTTTAAATGGCATATGGAAAC
TGTGGATGATATAATAAAATAATAGTGTTTTGGCTGACACTAGGAAACCATGGATGATATCATAGAGTAA
TAGAATTTTGCGGCTGAGGAGAGGGACATTAACATCATCTGGTTTAACTTTTTTGTTTTGTAGTTGAGAA
AATTGTTGTCTAGAGAGGGCGGTTAAGTAATTGGTTGCCAAAGGTCATTCAGCTACCTACTGGTGAAGCC
AGGGGAAGGGAAGTAAGAACTGTGAACTCTGCTTTAGTTCTCTTTCTATGACATCACTTTTGTTTTTTTG
CCTTAACTAATGGTTCTTGACATTTTCTTTAAAGTATCATTTTCTTTAAAACCCATTTTCTTTAAAACCC
ATCTTTGATGTAGTTGACTTTTATCGACAGCCAGCCATTCATGCATCTAATATTTAAGTAGTTACAAGTA
AACTAAGACCCCAGCCTTGTTTGTGAGATGTGCAAGGTAATAGGAAGATGGACATTTGAAACAACTCCCT
GAAATATGTTTTGTTAAGTGCTATAAAGGTGGCTTTTAAAATAAAGAGAGATGGTTTGCTGATTTAGCAC
GAATGAACCATATGTACAGCTTTGAGAAACCAATAGTCAACTTTTAAAATCATTTGGAAAAAATTTTTGA
ACTGTTGAATTATTAGAACTTGAGTTAGGCCAGTTCATGTGGATCACAGACCTTGAAATAAATTTGAACT
TAAAATCGTCTAGGGAAAAATGAATTTTTTTTGATAAGCCTTAAGAGTTTTGCAAGAATAACTTTGGTTT
TTTAGCTTTGAATTTGAGTTGTTTAAAAATAAAATTTTGAAAAAATGCCATGCTTTCTAACAAGAGAGCA
ACATTTTTCCTTTGCTGGAATTGGCAATGGGAAATTTAAGTCTGGTTAATGTAACTGAACAGCTGAAGTA
TTTTCATCCTAAATCAGAATTTAAAAATTCTGTGCATTCTAATGACAAAATGCTACCTCTTTAGTTCGTG
GCTGTCCATTCTTGTTCTTGTCTGCTTTCCAGCACAGCCCCCTTGTCTCTTGGCATCCTTGTCAAAAATT
AATCAGCCCAAAATATGTAACTTTCTTTCTGGACTCTCAGTTCTCTTCTGTTGGTCTACATGTCTGTCAT
GCCAGTACTACACTGTTTTGATTAAAGTAGCTTCGTGGTGATCTTTGAAACCAGGAAGTGTGAGTCCTCC
AACTATGTTCTTTTTAAAAATTGTTTTGGCTATTTTGGCCTGCTCACAATTTCATATTAATTTGAGGATC
TGCTTTTACTCTTGTGCAAAAATGGGAGTCAGAAGTTTGATAGGGATTTTAGTGAATCTGTAGCTCACTT
GGGTAGTATTGTTATATTAACAGTGTTAAGTCTTCCAGTCCATGAACATGGGTGTTTTTCCATTTATTTA
GGTCTTTAATTCTTTCAGCAATGTTTGTAGTTTTCAGTGTACAGTTATTCCTAAGTATTTTATTCTTTTG
GATGCTATTGTAAATGGAATTGTTTTCTAATTTCCTTTTTGGATTGTTCATTGAGGGACCAGCTCTTATT
ATGCATTATACCTCTCCTTTCCTACTTGGATTGTTTTGCCCACTACAGTGTCTCAGCATTCTCTTTTCTT
TTGATTTCTATGATCTTTACTTACATAACCTTTGACTCATTAGGATTGTTGGAGTCACCAGACCTCTACA
AAATGATACTCAGTGACTTTATTTCCCTGACTCTAATTTTCATTTATTCCCTCCCTTTATCCCAAAGGGA
TATTAGAACCTACCCTGATTTTTTTTTTCCTTTGACCATGCGGGTGTCCCAGTTCCCAGTTTTCTTTTTT
TTCCCAAATAAGGCACTCATTGGAATGACCACCTTAGAAGTGATCTGTCTCAGCCCTTGGAATTTCCTAA
CTATAGCACACCTACCTTCCTTCTCAGTCACTCCCTTCTATTGGAACCAGGCTCTGTTTCCTAGTCTCAT
AAAGAGTTACCCTGCTCCTGGCTTGCCACAGAACTGGTTCCTTAAAGCATTACTGAATAGATTGTTTCCC
TCACTGCCTCTCTAATCATTTCTCACTACTCACTTAACCTCTGTGATGCTTAACACTCCCTGACAGTAAT
AACCCCTGCTGTCCACTGTCCCTGCTTTCAGACTGCATTTGATTGCTGTTGTCGTATTTGAAACACTAAT
AATTAATAGTAATTAGAAACAACTAGGTTATCTAGCCCCTGTCTTTATGTGTCTTTTGCTTTTCTCTTTT
AATTTTTTTCAAGCGTATGATGGGGAAGGAAAGAAAAAGGAGTTAAAATTGAGAGATAAAGTATGATATT
CTCTATAGATTTCATCTTTTTCTAAAAGTAAATTTGTTTAAAATTCTTTTATTTCATTAATTTTATTTCC
TGATTATTAGGGTAAAATATACTCATTTATAGACTATTTGGAAAATATACAAGAAAAGATATAGACTGGA
AAATATACAGGAAAAGATATAGACTAGAAAATATACTCATTATAGACTATTTGGAAAATATTTGTAAAGA
AGAAAAATGCCATATATTAACCATGCATTGACAATTTTTGATGAATGTATTTTCAATTTTTTTTCATGTT
CTTGTTTTTTCTTTATGTAGTTGAAACCATTTGTGATGGTTAAGAATATAGGTAACTCTTTGAGATAGAT
GGTACTTAAAAATGTGTATGTTCAGTTTTGCCTCACTCCCTGCCTTCTTACCATTGCCCGGTGGTCATAT
TGTGGCCTATACATTTTTTCCTTTAAGAAATTGATTATGCTTTTCCTTATAGCTGATCACATTTTGTAAA
TATCTTACAGATGATTTGAAGTAAGTCACATTTCCTATAGAGTACCATCTTGATAGATGTATTAATTATG
GCTGTACCTATAAACTATATCTTTTATATGCTAATATCAGTCATAGACTGATAGTTTTGTACCATGGTCA
TACTTATATTTGGTTCTCTTCATATTTCTACTATTTTGGTTTTTAAAATTCTTTATAGTTTGATACAGAA
CAGTGATGATTCATGATTATTATACCTTCATCCTGAAGCATAGCTCTTCTCAGTATAAAACAGTTCTCTA
TCCCCTATTAAAAACAAAAGTTTTATTAATCTCTCAGTATGTTTTAGAGAAACTTTTTGGGAAGAATACA
TAATTGCGGTGTTTCCTGAGGCCTTCTGAGTACTATTTTTGCATATGATGAGAGTTTGTCTAGAAATAGA
ATTCCTTGCCTGCTTCCTCTTCTCCTGAAAATTAAAGCTTTGTTCCATTCCCTGTCATCTTCAGGGTTTT
CCATGTTATTCTCATTCAGATAGCATGGGTAACCCAATAATTTTATTTCAGTCCCATTGTCAAATGTTGC
ATGTGGAAATTTTTTCCAAGTTTTGGTCTTCTCTTTTGGTCTTTCTCTTCAGTTTATAGTACTTTGCCAA
ATTTTGCTCTTTGGTTTAACTGGGTATTTTAAGGGAAAGTTGGAGGAAAGTGTTTTAATCATTAATAATT
TATCATTACTGGTGTTAACATTAATATACCAAAGATAATGTCGTTACAAATGTGATTTTCTAAATTGAAT
TTTATTTTTGAGGGCCTTTTCTGTATCTCTTATCAACCTTCATGGGTTATTTTAGACAGTAGTTGGTTGT
ATTTTTGTATTAATGAGTTGTCGCAGCTGTATGCATATTTCTTTAAACATGTTTTTGAACACTTTTATTG
TTTTTCCAGCTTAACTTTCATAGAAAATTTAAGAGAAGAAAAAGAATAAAAGCATATAATAAAAATCATC
CATAATCCACTATTTATATTCAACCACTGTTAACATATTTTGCTATTTTCCCTTTTTTTAAAGTGGAACA
CAACATGCATATGAATATATATTTAACTTTGATTCACCGGATGTTTATTGAATACCTGTTACATGCATGA
ACTATTCTAGGTGCCAGACATTGTTAGAAATTTGCTGTATACAGTTTGTATGTTGTAATTTGCATTTACT
GTTATATTCTAAGCAAAACTCATTTTACTACAGTATTTATAACAGTTTTGTTCATGGCTTCATAGTCTTT
TTTCAGTGTTTTTTAGTCACTTATTTGGTCATTAAAACCTGTCTTCAAAGAAGCCTAATATGTTAGAGAG
ATGAACAGGGAGCAGTTTAGTTGAGAGGATATCATGACTTGAGGTATCACCTCTCTCCTCCAAAGAAAGA
TAAACTGTTGAAAACTGTTGTTCTATCTTCTGGATGTATTACAGTTTATTAATTATTGCTCTGTTGCTGG
TAGTTTATATTGTTACTTTTCTTCAGTTTTAATTTTTATTAATATATTTGTACATAAAAATTTGTGTCTG
TCTTTCGTTTCCTTAAGATGGATTTTAGTAATGGAATTATTGGGTCAAAGAGTATAAATATTTATAAAAC
TTTGTATAGAGTCACAAATTACGTGTCATAACCTGTGTAACAGTCAGTATTATTTTTAAATAATATAAAC
ATTTCTGTTATAACATCAAATGTATTCCATAAAAACCCTTCAAGTTTACCTATTCACTAAAAATAACAGG
ATTTATGAGAAAAATAAGGTTAAGGGCCAGCCACTCAAGATTTCTGCAATTAAAGCAGAGCACCAACAAA
AGCATAATTGGTACCTTGTGAGATCACTTGGGCAGCCCAGTCAAACCATTTAGCATGGCTTATGTTGCCT
CAGAAGAGAGTGAGAGATATTAACATATAGGGTGTGGTCTTGAGACAGTACAGATGAAAGTCATTTTCTT
AGCCAATGTGGTTGCCATAAAGGTGGGCACCAGAGTAAGTGCAGCTTGCTGTGCAAAGGATGGGAATGCT
CCTTTGAGCAGGGAGTCCTGGGTACAGGTGCTCATTTTAAATATTCTTGAAATAGAGCTGAGAGGACTCC
TGCTTGGCAGCAGCTGAGCTAAATGAGGATCTTTTTCTTTCTCACTGAAAGTTATAATTCTATTCCTGCT
ATTCCAGATCCCCTTGCCTAGGAAAATTAATATGTGAACCCACTTGTTATACTGGAATGATCTTACTTAC
CACTTAAAAGCTGTGTTACAGAAACATGTCTCACAATATAACAGACTGTATTTGCTAATTTGATGCGTGA
AAATTTGAACAGAATTTTATTGGTTTCTTTCAAGCCTTTTCAAACTGGAAATAACTACCTTAGCTAATAA
AGAATGGAGTATCTGTTTCAAAACAAGTGTTTTCAAAACCTATAGTCAGAAAACAGCAACTGTGTTTAAT
GATTATATTGCAATTTAAACACCTCAGTCTATGGTAGTGAATTTTAAATTTACAATTTATTTTGGTGGTC
ATTAGGTGTTCATAGGCATTTGGATCACAGGGCTTTAAATTGTCAGCAGCTTATAAATATTTATTTGTTG
AGGGTACAAGCATCATCTTGTAGTGAGTCATTTGTGGCAATGGCTTAATCCAGGATTATGCAGCATTCAA
TTATAGCACCAGAGAGGACAGGAAGTAGAGGAGTGAGTTCAAGATTGGGTGTTTTTTTCTGAGCTGATGG
TGTATGTCTGATGTAGGCTGTGGTGGGTGAAAGTGGAAACCTCCACTGGTAAGAAAGTAATTGAAGTAAT
TGAGGTTGAGGCCTGTAAGAAGAAACTGAGGAAATGATTGGTACAATAGAATGGGAGAAACAAGAGGATT
ATAGATACTGGAGACAGAATGACCCTGGGAGCAGCTGTTGTTAATTGTAAAGAGCTGAAGAACTACTAGC
TGTTGAGATACTATAGTTCAAGATTTTAGAGGCAGAGTAATTCGCATATTGCTGCTGTCCATGAGAAATG
AGTTTCTTTGGTATGGATGAAGATTGTTGGAGTTGAGGAATAAAAGAGACATTGAAGGGCAGATTGAAAG
TGGGTTAGTCTCAGGGACATTGGGAGTCTGCCCTAATGAGACATAGAAGAGGGGTGCATAGAACTTGTAT
AAACTGGTCCCAGAATCCTCAGTGAATGAGGTAACTGAGATACTGAGAAGGATAGAGGGTGGCATAGTTT
GATGGCATGATTGTAAAGAAACAGAACTTTGGGTAAGGGTGCTCAAGCAGTCATCTGAAGTGGCCATGGC
GATCCAGGGCAGTGTCCACTGAGGGTAAGAGAATGGGCCCTTTGGGCTCCACAGGGCCAGGGGAAAGTTG
TACTTCCGAAGGATAAGGAGGTTGGTGGAAGTCAGAGGGGTATTAGTGGGTGACAGTATAGAAGTAGATC
ATTGAAGGGGGATAAGGGGTGGACGGCCAGGGTGCTAAGCTACTAGCACAAGTTGAAGTCCAACTAGGTT
TTAGAAGCCTGAGAAAGTTGGCTGACTGCAGTCTTTGCCCTGTCTTCAGTTGAAATGTTGTGAAGTTGCT
CTGTTATGTTCAAAAAGAATATTCCCTACTTAGGAGGCATGGTTTCTGTTGAAGTTGGTAGTTTCTGTTT
GGGCTGGTAAAACTAGAGAGACCTTGAGCAATTTGGGGAGAACAGATGTTCCCAGGAGGCTGGGAAGGAA
TTGGCTATATCCACCCGTCTCCTTGACAGATAAGATAAAATTTCTAGTAGAACAAAACCACGAATTATCA
AATGACTGCATGTATGACTTGAGGACGTGCCTGCATTTTCTTCTTTTTTTTTTTTTTTTGGTCTTGTCTG
GCTGCTTACAGGTACTTTTTATCTAGCTTAACATGGAGTTGAATTTACAGAACTCCTAGATGCTCTTGAT
ACTTTGAACTGTGTCTGGAAAACTTACTTACATATTATTTTTTGTTATTATTACCAGTAATAACAATAAA
TTGTTATTAGGAACAGAGTTCTTTATTTTCCTGGGAAAGGTGTTTTGAAGTTTAAATATGGAAGTTGGTG
ATCACTTAAGATTAATTTTTTCTAAAACTTTTTATGTTAGTACAAATACTATGCTATGATTTTGCAAGCT
TCTTGAGATAAGCAGAGAGGTAAAAACCATTGAGTGTTAATTCCTTTTTTCCATCTTTTAAAAAAATTAG
TTAAACTACGTATAATGAAATACACAGATTTTAAATGTTCTCTTGGTTGAGTTTTGAAAAATGCATACAC
CTATGTAACCACCACTCCAACCAAGATATAGGACATTTCCATCACCCCAGAAATTCCCTGATGCCTCTTT
GTAATAAATTCAACAGTTTCCCTTCCACTCCCCTTTCCAGGGTCACCACTGACCTGATTTCTATCACCAT
AAATTACTTTTGCCTATTCTATAACTTTATATAAGTGGAAATATTAGTATATACTCTCTTGTGTAGTTTC
TTTCACTCATACAGTCTATGAAATTCATCCCTATTGTTACAAAGTCTCTTATTTTCATTGCTGATTAGCA
TTCCATTTATATATATGCCACAGTTGGTTATCCGTTCATCTGTTGATGGACATTTGTGTTGTTTCCAGTT
TTGGCTATTGTGGATAAAAGGGCTGTGAACATGGCCAGGCATGGTGGCTCACGCTTGTAATCCCAGTACT
TTGGGAGGCCGAGGCGGATGGATCACTTGAGGTCAGGAGACCAGTCTGGCCAACATAGTGAAACCGCGTT
TCTACTAAAAATACAAAAATTAGCCGGGCGTGGTGGCAGGTGCCCATAATCCCAGCTACTTAGGAGGCTG
AAGCAGGAGAATCGCTTGTACCTGGGAGGCAGAGGTTGCAGTGAGCTGAGATCCTGCCTGGGCAACATAG
TGAGACTCTGTCTCAAAAATAAAAACGTTCGGGGGAGGGATATGAATATTTGTGCATAAGTCTTTTTGTG
GACATATGTTTTCTTTTCTTTTGGATAATTACTCAGAAATGGAATTCTTGGATCATAGAATAGGTGTATG
TTTAACTTTATAAGAAACTGTGTTTTCCAAAGTAGTTGAACATTTTTTACACTCTTAGCAATGTGTAAGA
GTTGTATAATAGTTACTCCACCTCCTTGCCAACGTTCAATGTTATTCTCTTGGGTGCTAATGGCTCTCAC
TGTGGTGTTCATTTGTAGTTCTCTGATGACTAAGGATGTTTAGCACCTCTTCATATGCTTATTGGGTATG
TATATAATTATGAAATGTCTGCTGACATCTTTTGTCCATTTTATTTAATTTGGTTAAAAAATTTTTGGTT
CTTTATATATTCTAGAAACAAATCATTAAAAAAAATTAACCAACATCTCTCCCTTCCCCCAGCTAAGTTC
TTTCTTAGATAGATGTGACTGTTTTCTCCTAGTTTGTGACTTTAATTTCATTTTCTTAATGTTTTTTGAG
GGACAGAAGTTTTTAATTTTGATGAACTTCAGTTTTTAATTTTGATGATTTTTAAATTTTGATAAGGTTT
TAAATTTTTGATAATTTTCAGTTTTTTCTGGTTGCTTTATGTTCTGTGTCACCTGTCCAGGAAATCTTTG
CTTACCCCAGGTTGTGAAGATTTTCTATCCTACGTTTTTTTTTTTTTTTTTTCCAGCCCAAAGGAGAGCA
AGGGAGAGAGGGAAGGAGAGACAGAAGGGGTTGGGGGAAAGAGAAAGAGAGAGAGAGAGAGAGAGAGAAG
GCAGTAGAGAGAGTGCGAGGCGGAGGGGGAAGAAGAAAAAGAGAGAGGGCGAGGGAGCCAGAGAGCAAGA
GCGACAGAGCCCCAGAGAGGGAGCGCTCCGCTCTGGCAGACAGGGCCTCTTCTATCCTACGTTTTCTTTT
AGAAGCTTTATAGTTTTGGCTTTTACATTTAGGTTTATATCTCAGATTGGGTTTTGTTTGATATGTAAGA
TAGGGGTCAAGGTTTATTTATTTTTTTACTTGTAACCCTAGGAAGAGTTTTTTAAACATTTATTTTTTAA
ATTTTTATTTATTTTTTATTTACACATTATTATTGTACATATTTATAGAGTACAGTTTGGTGTTTTGATA
CATATCTCTGCTGTATAATGATCCAGTCAGGGTAGTGTATTCATCACGTGATACATTTATCATTTCTTTG
TGATAATAACCTTGAAAAGCCTCTCTTCTAGCTATTTTGTGATATACAGTGTTTTACTGTTAACTAGTGA
CTCTACTGTGTGTTAGAACATCAGAATTTATTCCTCTTATCTAACTGTAAGTTTGTACCCACTGACTAAC
CTTTCCCCATCCTCCACTTTCCCCTCCCCGCCTCAGTCTCTAGTAATAATTGCTGTGCTCTATTCCTATG
ATATCAACTTTTTTTTTCTTTTTTTTAAAGATTCCACATATGAGTGATGTCATGCGGTATTTGTCTTTCT
GTGTCTGGCTTATTTCACTTAACATGATGTCTTCCAGGTTCATTCATGTTGTAGCAAATGACAGAATGTC
CATTTTTTTAAAAGTTGAATAATACTACATTGTGTACATTTACCATATTTTCTTTATGCATTCATTCCTT
GTTGGACAGTTAGGTTGATCTCATATCTTGGCTATTGTAAATAGTGCTACAGTAAACATGGGAATGCAGA
TACCTCTTCGACATACTAATTTCATTTTCTTTGGATATATACCCAGTAGTGCGATTGCTGGGTCATATGG
TAGTTATTTTTTTTTCCCCCTACACACAGAGTCTTGTTCTATCTTCCAGGCTGGAGTGCAGTGACACGAT
CATAGCTCACTGCCGCCTCGAACTCCTGGGCTCAAGCCAGCCTCCCATCTCAGCCACCCAAGTAGTGAGG
ACTACAGGCATACACCACCATGCTTGGCTAATTGTAAACATTTTTTGTAGAGATAGTGTCTTGCTAATGT
TGCCCAGACTGGTCTCATACTTCTGGGCCTAAGTGATCCTCTGGTCCCGGCCTCCCACACACTGGGATTA
TTGGCATGAGCCACTGTACCTGGCCTTAACTTTTAATTTTTTAAAGAACCTCCAAAGTCAGGCCAGGCAC
GGTGGCTCACGCCTGTAATCCCAACAGTTTGGGAGGCCGAGGCAGGCGGATCACGAGGTCAGGAGATCGA
GACTATCCTGGCTAACATGGTGAAACCCTGTCTCTACTAAAAATACAAAAACAAAATTAGCTGGGCATGG
TGGCAGGCACCTGTAGTCCCAGCTACTTGGGAGGCTGAGGCGGGAGAATGGCGTGAACCCGGGAGGCAGA
GCTTGCAGTGAGCTGAGATTGCGCCACTGCACTCCAGCCTCGGCGACAGAGCAAGACTCATCTTAAAAAA
AAATAAAAAAAGAACCTCCAAAGTCTTTTTCATAATGGTGTACTAGTTTATAATCCTACCAGCAGTATAA
TAGCTGTCCTAACAGGAATGAGGTGGTATCTCATTGTGGTTTTAATTTTCATTTTAAGGTTTTTTTTTTC
TCTGTATATTTATGCATCTAGTTGCTTTACATCGCTTGTTGAAAATACTAAAGTTGAATTGCCTTGTTCC
TCTTCCAAGGCATTTTCATTTTCAAGATCGTTGTTGGCATGTAAATTTCACGATTAATTTATTTTTTCAA
AAAAATCTATTGAGATTTTGATTAAGATTACTTTGAATCTGCAGATCAATATGAGAGACTTGACATGTTA
ACAGTATTCAGGCTTATCTAAGGAGAATGGTACAGTATGTCTCTCCACTTTTTAAGGTCTTCTCTAATTT
TTCTTAGCCATGTTTTATAGTTTTCAGTGTAGAGATCTTACATAGCTTTAGAGTTATTCCTAGGTCCCTG
GTGTTTTTTAATGTTATAGTATTGATTTTTTAAGTTTTATTTTCTAGTTGTTGCTAATATAGAAATACAA
TTGATGTTAAAGTATTGGCTTTGTATTCTGAGACCTTGCTAAATTCACTAGTTGGTTTTAGTAGTATTTT
AGTAGATTTCACAGTGTTTTCTATACATATGATTATGTCATCTGTGAACAATGACAGTTTTACTTCATCC
TTGTGCTTTTTATGTCTTAATACATTGGCTAGGACCTCCGGTACAAGGTTGAATGGAAGTTGTGGAAGTG
GACATCTTTGCCTTGTTTCTGATCTTAGGAATAAGGATTTAATAATTTACCATTGAGTATGATATTAGCT
GTAGGGTTTTTTTAATGTTCTTTACCAAACTAAGAAAGTTTCTGTCTATTCCTAGTTTGTTGACAGTTTT
TATCATTAATAGGTTTTGAATTTTGTCAAATGCTTTTTCTGTATCGAGATGATACGGGTTTTTATTTTGT
TAATATGGTAAATTATACTGATTTTTAAAAGGTTAACCTTTCATATATAGTTGGTCATGATGTGTTAATC
CTTTTATGTATTCTTGTATTGAATTTGCTAATATTTTGTGGAGAATGAATCTATGTTCATAAGGGATGTT
GTTCTGTAATTTTCTTTTCTCATTATGTTTTAGTAAGTTTTTTGTATCAATATGATGCTGCTGGCCTCAT
CAGATGAGTTAGGAAGTATTCTCTTCAACTATTTTCTGATAGAGTTTATGTAAGATTGGTGTTGTGTCTT
CCCTAAATGTTTGATAGAATTCACTAATGAAGCCATTTGGACCTGGAGCTTTCTTTTGGGATAGGTTTTT
AATTGAAATTTTTATTTCTTTTAGTTTGGTAAATTATGTTTTTAAAGGGTGCTTCTGTTTCATCTAATTT
GTTGATTTTATTGTCAAAGTTGTTTATAATAATCTTTTTATCTTTTTAACATCTATAGGATTTGTAGTAA
TGTTTCATTTTCATTCCTAGTATTGGTAATTTGTGTTTGGTGTTTTTTCTCTTTTTTCCTTGATCAGCCT
TGTGAAGGGTTTAACTGTTTTATTAATCTTTTCAAATAATACTCTTTTGGCTTCATCCTTATAGTTAATA
TCTTTATCATATGGTATTTGATCAGGGAAGGTAGCCTGTATGATTTTGGTTTGAATCTGTTTTTATATTT
TAAAAAAATTTTAAATGCATGTGGTCTAATTCATGATTAATCCCCCCTCACTTTTTCATGTCCCATAATT
ATATGTTCAAATCATCTATGTCCACACTCAATTTGGTGACCTTTGATCTTTTTTTTTTTTGATCTTTTTA
TTTTTTAAAGAGAGAGGGTCTTGTGTTACATAGACGGGAGTACAGTGGTGTGATCATAGCTCATGGTAAC
CTCAAATTCCTGAGCTCAAGCCATCCTCATGCCTCATCCTCCTGAGTAGTTAGTACTACAGGTGTGTACC
ACCACTCCCAGCTAATTTAAAAAAAGTTTTTTATAGAGATGGGTTGTTGCTGTGTTGCCCAGGCTGGTCT
TGAACTCCTAGCCTCAATGGATCCTCTCGTTTCAGCCTCCCAAAGAGCTGGGATTACAGGTGTAACACCA
TGCCCAACTGTTTTGATCTTTTGATTTCTGAGAGGATGTTAGTTTCCAATTGTGATTGTGGATTTGTGTG
TTTCTTTTTGCCTTTTTGTCCGTTGGTTTTTGCTTTCTATATTTGAAGCCCTTTTTTTTTTCAGTTGTAC
TACTGTATCTTCTTGTGTTTTTTATTAATATGAACTCATTAGTAAATTTTATATTAATACATTTAGTATG
AAATCCTTTCAACTTGAGTCCTAGTTTGTCTCATGTCAGTACTGCCTCATGTAATTTTCTTCTTTTTATT
TATCTGACATATATTTCTAAGTAAACAGCACCTATCTAGACTAGACTAAGACCCAGACGTAAGAAAAAAG
GCAAATTTAAATTATTTACAATTTTTCCTCTAACCCCTTTCTCCAGCACCACCAATCCTCCATTCCTGGA
TATTTGCTAACACTCCTGCCAGCAGGGAGAGGCTTTTGCAGAAGGGTCTGCATTTCTGTCTCTGCTTTCA
GTATCTTTTTTAGGATAAATAAAAGCAGTGCTACCCAGCTAGTGCTGTGGATGGCAAGCCACCCAGGTGC
CGGGGCAAGAGACTGAAGGCACAAGCTGTTCCAGTATAATAAAGAAAATATATAGAACAAGAATAGTTAT
ACTAGAAATAGAATATAGATATGATTATATATGAATATGATTAATCATTAGTTTGTAGCATTACTCTTTA
TTCCAATATTATAATAATCTCTGTTCTACAATTACAACCTAGAAAAAACCAGGCCATACAGAGATAGGAG
CTGAAGGGACATGGTGAGAAGTGACCAGAAGACAAGAGTGTGAGCCCTCTGTCAAGCCCGGATAGGGCCA
CTAGAGGGCTCCTTGGTCTAGCGGTAACGCCAGTGCCTGGGAAGGCACCCGTTACTTAGCAGACCTTGGT
CTAGTGGTAGCGCCAGTGCCTGGGAAGGCACCTGTTACTTAGCAGACCAGGAAAGGGACTCTCCCTTTCC
CCGGGGGAGTTAGAGAAGACTCTGCTCCACCACCTCTTGTGGAAGGCCTGACATGAGTCAGGCCCGCCCG
CAGCCATCTGGAGGCCTAAACGTCTCCCTGCGATGCTATGCTTTAGCAATCACGTTCCTGGTCCACTTTC
ATGTTCCATCCTGTACACCTGGCTCTGCCTTCTAGGTAGCAGTAGCAGAATTAAAGTATTAAAATCTTTG
ATCTCTCCGAGAAATGCATAGAAGAAATAATGACATAAGCTGCCCCCTCTCTCTCTCCACCTCAGCTACC
AAATAGGGAAGGGCTGGCCCCCTGTCCGTCGGACACGTGACTTATGTGACCTTACCTATCATTGGAGATG
ACTCACACTCCTTACCCTGCCCCCTTGCCTTGTATACAATAAATAACAGCACAGCCAGGCATTCAGGGCC
ACTACCGGTCTCCACATCTTGGTGGTAGTGGTCCCCCAGGCCCAGCTGCCTTTTTTCTATTTCTTTGTCT
TTTGTCTTTATTTCTACGATCTCTGGGCTCCGCACACAAGGAGAAAAACCCACAGGCCCTGTAGGGTTGG
ACCCTACAAGTTCAGCAGCTTTCCCCTATGTGGCGTGCCTTAAATTTCATTTCTGCATTAATGATTTTAT
TACACCTAGTTCAGAAACGAGAAAACTAATTTTACAGGATAAATACCTGTAGGAGAGTGATTTGTTTCTA
GGTCTATATTCTTAGGAGGTATGAGATCTCCATCTTGACCTCTCTGCATACTGTGAGGTTTCAGACCCCA
TAGTGCCGGCTCAGTAAATGTGAAATTTGCATTTTGGCTGTTCTCCTCAGTATCTTTCCCCCTCTAACTT
GTGGAATATATATGTCATGTATTACTAGAGGGACACCTGGATAGAACTTTAAATAACAGTAAATCAATTC
AAGAGAAAGTTACTCCCTGCTCTTAGTCTTTCAGTTCCTTGGATGATCATGGAGAAATCCTCTGTGTGAT
TTTTTTTTTTTTTTTTACATTTCTCAAACACTTGATTATACCTCCCTCCTCCCTTTTTATAAACAATGAG
CTAGGCTCAAGTTCACTGCCTTCTTGGTAGGCACCAGAATTGAGCTAGAATTTAGTACATTTGTTTTTCT
TTTGTTTTTTTGATAACTCTTTTTTTAACAGTAACTGTTGATTTGCCACTGAAAAGTAGTGATTAAATTT
TGCCTTAAAAATTTTTATTTTAACAAATTAAATAAGTTTTAAAGAAAAATATTAAATACAGGCAGGATAA
AAGGGTGTGACAAAATTGAGATCCTGATACGTATGGAAGATTGTATGTGCCCTGGCTGAGAAGGTGGTAT
GGGAGTGAGTGAAACTTCGGAGTCACTTCTCCGGCATTCCAGGCTTTTCATTTATTTTTGTTTTGTCTAT
AGTACTAACCTCTTGGTTAACAAGCATTTATGTTTTGTGCAGAGAGCTGTGTCCTGCAGATACCATGAAA
AACATAGTGTTCTTCCCTTTGTAGTCTTGGTAGGGAAGACAGCATGTGCCTGCAAAACACCTGGTGCAAG
TGTGTACCATGGTAAATGCTATCAGAACAGCAAGGACCTTGTGTTGTCAGAGGAGGTGGAGGTCATCTCT
GGCTGGAGGCTTGAGGCTTGGCTCAGGCTTATGTTTTATCCGAGGGGCCTTTCTCCCTTTCATTTTGAAT
CTCCCTTCCTAAGTCTACGTAAATTTTTTGGGGAAGGGGCATTTCTTTGTAGCTGTTCCTCTAAGAAGCA
CTGTGTCCAGAAGAAAGAGCATCACACTGGCCCTCAGAAGACAGAGTGGCTCCCAGAGTTCTATCTAGTT
CTAGCACACCTGTTTTCAGCTGGATAACTGCTTAATTGTTTCAAGTCTCAATTTCTTCATCTTTCTTGGT
GATGATAAAACCCCGTGTCTTTTTTGCTTCATAAGGCAGCCCATGTTAGGGCCATTTGTGATGTTCATTT
GCTTATCAATATTATCTTCACTCTATTTGTATTTGAAATACTGATAGGGATGATTTTGAGAATATTTTAA
GTGTTTAATTATTTTTTTCCTATTTTTTTCTAGGTCTTGATGCAGAACTTTATTATGTGAGAAATGACCT
TATTAGTCACTACGCTCTATCCTTTAGTCTGTTAGTACCCAGTGAGACAAATTTCCTGCACTTCACCTGG
CATGCGAAGTCCAAGGTAAGAGAGTGGCTAACCACAGACATCATGACAGGGTCACCCAGCCACAGAGGCA
AGGGCTGTGTTTGAGGACTGGGCTGCTGTCTGTACTGAAGGGTCCGCTGGTGATGTGATATAATAGTACT
GAGTCTTTTCAGATTTATATTTCAAATATTTGGCCTATTCCTCTAAAATTTCTTGAATCCTTTAAAACGA
AGGTGGCTATCATTTAATTGATTAGCACATGACACAACACTTAACATCCTTTTAGGCTCTTCAAACAGAG
ATCCAGACCTAGCTTGAAAAGGGTACAGTTGGACCCAATAATGCCTGTGCTGCTGTGGTGAAAGGAGATG
GGTGTAGGGGTGGAGATTGGTAAGATAGGCTTTTTAGACATGTTGGACAGAATGGATACAGTTCTCCCAC
TCATGGAGAAACGGTGTAAGAAAGGTACAGCAGATGCAGCCCCCATGTGTCCTGTGGTGAGGCTTCTTTA
CCCATAAGGGCTAAACCCAATCACTTAAGAATCTCTTGCCTGGGCTACTTGTTGCTGAATTCTTCACATT
GCCTCTGACTGCCTGGGTCCCTCAAACATGGTAAGTTTTCTCCTAAGTCAAAGAGTCGGAGGCTGAGCAT
GGAGGTGCCTCCTGTACCCAACCAACTTCAGTTTCTTTTATCAGCTTTATATAGGCTTTTGAATAGGATT
TTATTCAGGAAATAAAAATAGTCTTGCTACTATAAATAAGAATACCTATTGTAGAGTTTTTAAAAAAAGT
ATTATAGAGTAGTGTCTGTCATAATATTTGCTCCAAGTTATTTAAATTGGCCACTTTAATATAGATTTTT
AAAAATCTTCATTTTTTTCTACTTAGAAAACAACAGTGATTATTGGGAAAATTTAAATATTACAGAAATG
TTTTAAGAACTGTAAGACTAGGCCTGGCGTGGTAGCTCACACCTGTAATCCCAGCACTTTGGGAGATTGA
GACAGGTGGATCACAAGGTCAGGAGATCGAGACCATCTTGGCCAACATGGTGAAACCCCATCTCTACTAA
AAATACGAAAATTAGCGAGGTGTGGTGGCACACACCTGTATTCCCAGCTACTCAGGAGGCTGAGGCAGGA
GAATCACTTGAACCCGGGAGGCGGAGGTTGCAGTGAGCCGAGATCGCACCACTGCACTCCATCCTGGGAG
ACAGAGTGAGACTCTGTCTCAAAAAAAAAAAAAAAAAAAAAAAAAAGAAAAAGAACTGTTAAGACTTTGT
AGTTCTATACTCAGAAGTAATTGTTTATAGTTTGGTATAACTTCTTCAAAGTCCCCTTTTTTCCCTTTTT
AAACAAAAAAGGGATTTTTAGACATGTATGTTGAACAGTACTTTTTCCCCTACAGAATAACTTATCTAGG
CATCTTTCTTTTTCTCTCACTCATTCTCTTTAGTGGTTTTATAATATGAGATTGTATGGATGTATGCTAT
ATTGCTATCTGTGAAGTACCTCGTTGATGGGACACATGGATTTTTAATAGCATTTTATTATTTCAAACAA
TGCTTCCCTTCACCATTACACAGTTTCCCTCATTTCATTTTATAGGCAAAATCCAGGTAATGGGATGATG
AAAACAATTGGTAGTTCATCTTTTATTGATGTTTCTACCTTTGCTATTTCTTTTATTTAAAAATTTTTCA
ATCTTTGCTTTTGATGAATATAGAAACACAGAAAAAAATGTGTGTTAATGTGTATCCCTGTGTGTGTATA
TGTACATATATATGTGTGTGTATGTATATAAATATGTTAAGAACATCTTTGTTCAGAAGTTTTTGTGCAC
TTGTGGCCTTATTTCTGAATAGTAAATTACTGCTGAGAAGTCAAGTGGCTAGGCCAATGTGTGTGTCTTT
AAAACTTTGAAAGATACTGCCAGATGTACCAGTGAATAAGTGCTTATTTTTGACCTTCATTTTCTAATAC
CAACATTTTAAGTATACTTGTTTGCCTTCCAGTCTCCCTCTCCCTCCCCCTCCCCATACGTCAGTGAGTA
TTTTCTAAGAAAAAGGGCATTCTTTATACAACCAAAATACAATGATCAAAACCAGAAAATTTGACATTAT
TATGTTATTATCTAATCCACAGTAGTCACATTTTATCAATTATCACAACAATGTTCTTCATAGCTAATTT
TTTACTAGTTGATGTCTCTTAGTTCCCTATCAGTCTGGAACAGTTCCGTAGCCTTTCTTTGTGTTTTTTG
ACCTTAACATTTTTGAAACTTACAGGCCAGTAATTTTGTAGAATGCCCCTCAGTTTGTGTTGTCTGAGGT
TTCTTCATGATTAGATTCAGGAATATCTCTTTGGCAGTGATACCACAAAGGTGCTGTCCTTCCCAGTGCA
CAAGGTGCCAATTTGTCCCATGACTGGTGGTGGTAACTCCGAACACTCTTGTCACCAGATTTCTCCCCTG
TCAAGTTTTTTACTTTATATATAGTTAGTAAGTAATTTGTGGGGAGATAATTTGAAACTATCTTTTAAAA
AAATCTCATTCCTCATCATCCTTTCAACCACTACTTTTTGCATCTGTTTTTGGAACTAGTTTCGTATTTC
AGCCTGTGGTGTGGTGAGGGTAGTGTGTTTCCTCTCACTGGAAGAGGTCAGACCTACACTGGATAACCAT
TCAATAAGGCTGTTATAGAAGGAATTCAAGTATTTGTGGAGTGGTTGTTACTGAATTTTAAGTTCCCTTG
CAACTCTGAGGTCCAGTGTTTCTATGAACATCTTTCAGGCAGAGAAGCTTCTTATATTCTCCAAAAAGTT
GATAGCTAATTCTTTGTTGTTATTCTTACCTTTGATGTTGATACATATAAAAACAAATAATAAATGTATT
TCAAAATGGTGAAAGGTTTATTAGAGAATTCTGTTCTAGGTACTTCTATTGACTTTGAACAGAGTGTGAA
TATTTCTGGGCACACTTAGGAAAAAAGAATGCTGATATGAGAAGGTTTCCTGGGCAAGTGTATGGGTAGT
GATTTGTGAGTACAAAGGCAATGTGGGAAGTGGCAGTCAGGACTGAACAAAATAAAACCTTCTTTTACTG
ATTCCTTTAAAACAGTTAAAATACACCGTTTGTTATTTGGAATGAGCTCAGGGCCCTGATGTTGCTGGTA
ATGGGTGTCTGAGTCTTAGGAGCCTGTTACAGGGGGAAGTTGGAGTGGGAGAGAGCAGGTAGGAGGGGCT
CGGGTGAATATATATGTTTGAAGGGGAAGCAGTGTTAGCATGGTACATTTTGGGTTAGGAGAAGCCTTGG
TATAGCTGTAACTGTACTCCCATATCATTCACATTATTTTATAGAGCATAATTTCTAAGTTACCTCTTTG
GCAGGTATAAATATTATTAGTGCACATTTGGGCTGCCACTGCTGGTATGATATTCTTTGTGAGGCAGAAG
TTTCCTGATTTTTTTTGGAGGGTATGACTATTTTCATGTCTAGGCCAGAAATGTAGAAGGGATCCTAGTT
TCCTTCTCCTATACTTTCTAAATCTAGTTGATTCTCTCTAATAATTACATCTTAAATTTGTTTCCTACCT
CTCTTGTGACCCAATGCCTCACACTTAGTTTGGGCCTTCATTGTTTCTTGCTGGATTCGGAAGTGGTCTT
CTAACTGGTCTCCTTTCCTCTGGACTGACCTCTTGTTGCACCCTCCACAAAGCCACCTTAGGCTTCTCTG
TTGCTACTGGAATAAAGCTCTTGATTTCGTAGGAGGCCTTTATGATCTGGTCTCGGCCTTTCTTTTCTGC
CTCCTATCTAGCCAGTCATTTAGTGTCATTTTTGTCTGTCTTGGAATTTCATGAATGCCCTGTGACCTGT
CACAGTGCTGCTGTTTGCCACAAATGCCGTTTTTTCATTCTTTACCTGAATAACTCCTGTTTACCTCATA
AAGCTGTGACCTGTTGTCACCTCTTCTCCAGCTGTGTCAGGTGCCCTTTTCTGTCTGCACAGTGCCCTTC
TCTCTCATAGCCCTAGTTATACTTTAAGAATATTGTAATAGTTGATTTTCTTTTCTTTCTCCCTCCTACT
TGCTGAGCACCTTAAAGGGTATCCTCTGTGCTTGGTATAGCACGTGGTACTAACTGCAGAAGAGATGTGC
AGGTAGAAGCCACAGGGCCCAGCTCAACAAATGGGGAGCTTCTGAGCAGTTAGGGCTTTTCAGAGTTGGG
ATGTGCGGCTTTAGGAGTGGTGACTTTTCTATTTCTGGAAGTGTGAAAACATATAGGCTGGGTACACTCG
ACAGTAGTTGCACAAATGGGATTTTTCAGATATTTTACTCATAATAGAGTGAGGTTATAAGTTTGGAAAA
ATGAGTGGGTTGAATATAAACCTAAACTGATTTCACAAGTTCATCTGTAACAGGTATAAAATTTAGAGGA
AAGTAACCGTCTTACGATGTTTTTTTAGTAAAAAACTAAGGAAATATGTCTGTGTTAATCTAGTTTCAGG
CTTCAGCCACTATTGCAGTTCCCAATTCTAGGTAATAATCTCTGGTGATTTTAGCACAGTTGATTACGTT
TATTTATTTTAAAAATTAATCTTATGAGTAGATAATATATGCACATAGTAAAAATTTAAAAAGCATAAAG
GGTATACAGTGAAAAATAAGTCCCTTGCACCTTCTAGTACCATCCCTGAGCAATCCAGCCACTTAGTTCC
CCTTGCCTGAGTCAGCCACTGTTGCCTGATTATTGTCTTTCCTTTGGAAATAGTTCGTGTGTATATAAGC
TTCCATGCATATATGTATATATACATCTTTCAACAGCTAACATACCACCTACTTTTCTGCAGTTTGCAGA
GCACTGAACAATATCCTGGTCAAGGATCTCTGTCACTTGATACAGAGTTGTACTTTTTCCCCCTTCAAAT
GGCTGTATTACTTATTATTATATAGTTGTACTTTGGTTATTGATCAGTTCCTGTGAGGAAATTAAGACCC
AGATTTGGAAAGGGATTTGCTTAAGGTAGGAGAAGTAGGGTTAGAGGAAGCAGAAGGTAGAGATGACCTG
AAATGGGAAAGTCACACGTGAGGGCAGGGGAGGCTTGATGAAGGGTTTGTCACCTGATCATTTAACCCTG
AGGTGTAATCATGAACTTTCAGAAGGAGGGCCGTGGCTCTCAAGCTCTAATACTTTATCAGAAACCCTCG
GTTCTTGCTTTTTAAGGTTTGCCAGAAGATGAAATATTTGCTTCCAGAGATCTGCAGGCTCCCTGATATG
TGTCGGTTCAACATCGTAGATACTTTAACATTAGTTTCACATATCACAGCTTCTGGTAATACTGTTTCTC
AGTGTTTTCGCCATTTTGTCTTGCCACACAGATTGTGGTCTCTTCAGAGGCTTGAAGCTGTCTTACTCTT
AGCGCATAGGTCACACATGCCTTAGTGAGTGGTCAGGAAAGACCATTGTGTTAATTGCATTTTGAGTTGG
GAGTAGAACTCTGGTATTGCTTCTTTTTCACAAGACCACACACTTAAAAGCAGGCTACTGAGAGGCTTTA
ACAGATAGTTTCTTCTGTATTCCAGAACATTCCCCAATATCCAGGAGAAACATGTAACTGTGTCTGTTAA
GTGTCAGTAGCTTTTTTTTTTTTTTTTTTTTTTTTTTTTTGAGACAGAGTCTCACTCTGTCGCCCAGGCT
GGAGTGCAGTGGCGCTTTCTCTGCTCACTGCAACCTCCACCTCCTGGGTTCACACCATTCTCCTGCCTCA
GCCTCCTGAATAGCTGGGTCAACAGGCGCCCGCTACCATGCCCAGCTAAGTTTTTTGTATTTTTAGTAGA
GACAGGGTTTCACTGTGTTAGCCAGGATGGTCTCAATTTCCTCACATCGTGATCCACCCGCCTCAGCCTC
CCAAAGTGCTGGCATTACAGGCATGAGCCACCGCGCCTGGCCGTCAGTAGCTATTTTAGATATCTGAAAA
GCGAAAATTTGCCAGAATGTAGCAGAATATTCCCACTACCCACCCTTACCCCATGGCTGTTCTGTGCTTT
CAGGAATTCGTCATCATTTTCTAGGAGTTGCAGGGAACTTGTCCAGAGTTCCAGCAGGCACTGCTGGAGG
CCAGCAGCTGTGTCCTTTGCAGAGTGAGGTTTCTATGAGAAAGGCATTACTTCTAGTAAGTTCAGAGAAA
TTAAAAGGCTATTTGGCTGTAGACAAGTGTATTCACTTTAAATCTGTACTCTCTGTGTTCCAGAAGGAAA
TGGCTTTACTTACCAGCTTCCTATTTGTAATTGCCATTTGTTTCCAAGTAAGGGAACATAAGCAAAAATG
TTTATTTTTCAGTTTATTCAAATGTTGATATTTTTGGTAATTTGTTTCTTTTTTTTTCCTTTCCTTTTAT
TTTCTTTTTCTTTTTCTTTTTTTTTTTGAGACTGAGTCTCACTCTGTCACCCACACTGGCGTGCAGTGGT
GCGATCTTGGCTCACTACATCCTCCGCCCCCCAGGTTCAAGTGATTCTCCTGCCTTAGCCTCCGAGTAGC
CGAGTAGCATGTGCCCACCACCATGCCCACCTAATTTTTGTATTTTTAGTAGAGACGGGGTTTTACCGTG
TTGGCCAGGCTGGTCTTGAACTCCTGGCCTCAAGTGATCCACCTGCATTGACCTCCCAGAATGCTGGGAT
TACAGGTGTGAGCCACCACGCCTAGCCTGTAGTTTCTTTTCTGAAGTATTTTGGCTCACTCTACATTCTG
ATAAACAACTGCTGTTCAAATTTCTTTGTCCCAGTAGACTGTACATTTAACTTTTGAGCAGATCTGTTTC
TTTAAAGGATGATTGGCAAGTGAGAGTCCTTACAGATCGATACATGCCAAACTAGAGAAAATTGGACTTC
AATAATTGGCAATTTCTTCTCTAATCCCAGAAACTGCAGTTTTAAAATTTATATCTTAAAGACTGCAGAG
GGAAAAGAGAACTACCTTGTGAATGCCTCCCATTTTTAGACAGTTCCTCAAAAAAGGAGCCAGCAAGGAG
GCTTCCACAGTTTCATGCTTCATATTCCTCTAAGCTGCTGATAGGACCAAAGGGGCTGCCTTCTCAAATC
TCCTCCTCAGCCCTTTGCACCTCTCCCTGTGCCCTCATTGGCCAGCTACACTCACAGCCTCATTTCCTTC
CCTTCTCTCCTCCTTTTCACCTTGCCACACTGAGATGCTCAGGCGCCAGTCTTAGCTGCTTTTTTAACTG
CAGTTATGGCCCTGGACCCCTTTGCCAGGCCCTCTCTGCTTACTTTGGGGTTCTGGTCTCTGGTCTGCTC
CTTCTCTCCTTGTGATAACTGAGACCTAGAATAAAGGAGACAGCAAGTTTCTGGGGAAATAGTAAGTGTG
GCTTTGAATTTGTTAAGTTGGAAGGCTGTAGGATAATTAGATAGAATTGCCTAGTAGGTAATTGGACACT
TGAGAGGGATTGAAGGTAAAAGAGAGTGAGAGAAATTGACGATTAAGATATCCCATCAGTGGTGAAATGG
GCTAGAACCCTAGTGTACTAGGATTGAAGGATTTACATTTGGAGAGGAAAATGGACCTTTCCTTGGGACT
AGAATGAAAAGAATAGATGCTCTAATAGATCTGCCGGGGTGTTGAAAAGAAAGGCAGAAATGGGGTTCCT
CTGTACTAGTGGAAAGGGACAAAAACATTGAGTGTGAGGAGGTGGGGAAGGCCTGTAAGGTTGGAATAAG
ACGAGGGAAAAGAGGGTCAGTGAGGAAGGGATTGCTGAGTAGAACTAAGGGCCTCCCCTGAGACTGGAGG
TCATTGTTGTGTAAGAGCTCCTTTTCTGTAGGATGGATTTCCTTCAGCAGTGCTGAGCAGCAGGAGTAGA
GTAAGAAGGGGTGGTCAGGATGCTAGAGCTGCCCTTTGAGGGTTTGGAAGGAGTCAACCAGCTGAAGGTG
CCAATATGACTGTCAGTAATGTTGCCTTCTTTAGGGCTTGGGCTGTGGAGAACATGAAACTAGGTGTTCA
CGGCTATACTGGAGAGAAGGGAAGTGGCTTTAACTGGCTGCTGCATCCTGCTATGAACACAGCACCTGGC
TCATAAATGTGCCTCATAAATGTTGGCTGACTTGGAGTGATGGAATCAGAGAACTAGTTTTGTAGGAATC
AGAGGTGGTGATGGGATCTTTGATAGAATGGCATTTTTGCATTTGTTTTGGTAGTGAAGTAATTCTTTAG
CGTGTCAGGATATTGAATACTGAATATTGAAGCCAGGGAGAACATGGCAGGAGACCAAGGCCTCTGCAAG
TCCTGTGTGGCTTATTGGTGTTGATGGCATGAGAAGTAGCCATTATGAGTAGAAGCTGTGAGCTTCGGCC
GGGCGCGGTGGCTCACACCTGTAATCTCAGCAATGTGGGAGGCCAAGACAGGTGGATCACTTGGGGCCAG
GAGTTCGAGACCATCCTGGCCAACATGGTGAAATCTCGTCTCTACTAAAAATACAAAAATTAGCTGGGCA
TAGTGGCGTGTGCCTGTAGTCCCACCAGCTACTCGGGAGGCTGAGGCAGGAGAATCGCTTGAACCCAGGA
GGTGGAGGTTGCAGCGAGCCGATATCACGCCACTGCACTCCAGCCTGGGTGACAGAGTGAGACTCGGTCT
CAAAAAAAGAAGTTATAAACTTCAAAGTAGAGGGGATTTGCATGAGGGCATGAGGAAGGGATGTCTGGGA
AGGACCTAGTGATCCTAAAGAGTGCCGACCCTACTGTCTAGGCCCTGAGGGTCAGGTGTTGTAGGAACTG
AATGATAGGAAGGGGAACAGATGACTTCTGAGGAAAGCCAGGTTGTGGGAGAAGGTGGGAAGACATTTGT
GAAGAGGCAGAGAGTGTAGGAGGCTGTTCTGAATAGGGAGGTTCTCAGAATGGGGAAAAAACAGAAGGCC
TGCAACAGTGTTCTTGACAGACCCAGGAGGGTTTGTGTCAGAATCCCTGGGGCCAGCAGTGGGCTGATGA
TTATGGAGAAGTGCAGCATGGCAATAAGGTAGCTGTTCTGGAATGACTGCTGATGCTGCTGATGTCAGAG
GAGACTTGTGCCAGGCTAACAGTATGTATTGCATTAATGATCTTATTTGATCCTCATAACATGTATTACC
CTTATTTTACAAAATATGGAAACTCAGAGAAGTTACAAATTTACCTAAGAGTCACATGGTCTCATGGTTC
CAAACCCAGTTCTTGCTGGCGGTGCTGATTTCTTTTGTGCACCTACCCTTCATGTATGGTCCTGTTCAGA
GATAGCATCGGTGTAGGGATGTATAATGCATTCTTTGATGTATTGCTGGAGAGCTTGCTCATTCCCTGCC
CAAACTTGCTTGGCTGTGGCTCTCTAGCACCCCCTGGTGGCAGCAATGGTATTGTGATATGCTAAGGTGA
ATGTGAACACTTCCTAGCCAAGGTACCTCGAAGTCACTGATGTGCTGCAGCAAGAACATTTCCTTTGTTG
GGAATGTGGCACTTATCAAACACAGCCTTTAACAGTTGTTTACGTACCTATCTTAACTGCAAAGGAAGAG
TTTAATGTTTGCATACCCCTACAGTGTTTAGCTAAGACACTTTAAATAGAGTGTGAAAGGAGAAACCCCA
AGGGGAATCAAATTCTGGACTGAGCCCTTCTTATTCATGGGTAACAACGCCTTCCACCTTAGCCCAAGCG
TAAGGGCCATCCCTTCCCTTATATCTGGGATGATACTCTTTCCCTCTTTTCTTTCATCTTTATTATGTAC
CATTTCGTTAGCTTTTTTCACTAGCATATATACATATTTGAATATCTCATCTAAAAACAAAGAAAAGCTT
TGGAACACCCCCCACTTCACCATCTGTCTCCCATTCTTCTAGTTAAGTTTCTTGAAGAATGGTTTATCGA
ACATCTTTCTTCTCACTCTTTTCCCAACCTGCTGCCTCGTGGCTCTGCAAATCTCAGTCTGCCACCAATG
ATACCTTTTGTGACCACTGAATGAGAGAGGGATACCATAGTTATCAAGAACCTGTGGGCAGGGCAGAGAG
TGATGTGAACTGTAGGGCTTCATTGAAAGTCTTGATGCTGGCAGCCATTCTGAATTTCAGCTATTGCTTT
GCAGTTTGAGCTGCTTCTTTCATGAACTCTCCATAGCAACAGAGCCTTAATTATTGATGCTGATTGGTTC
TGTTAAGCCACATTGGGTAGGCCAAGTATTGATAGATAACATTGGTGTTTTAGAGACATCTCATGGGTTG
CCTGTCTTCCCTTCTGGATTCTGAATCACTTAAGAAGTAGATCCAGAGGTCAAATGGGGATCTAAACATG
AACTTTCTTTTTGGTGAGAGCAAGACTAGAGGATGTGACTTAGATATTCTATGAGAAATCTACCTTGGAA
TCTGCTTATTGTGTGAGTGGGTCTGCAGAGCAGACCTTCCTCCACCAGCCACAAGGAGGCCCTCCGAGCT
TGGCTTTCATTTATCAACCAGAGAAGGCATTGGTAGCTATTTATGGTCTGTCAGTTACATATCTCACCGC
TTTGGTTCTTCATATCTGGCTCTCCATGGCCTCTCTGTCAGTGCTGCATAGTTCTCAGCAGGATTTCTGA
CCCTAGATGGCAGGTTTTATGGAAGAGTGGTGGTCCTGTTGTGGACTTAAAATAGAGGGTGGCTTACTTG
GTTGAATTTTTATCCAATTGAAAATTCTTAGGACTGTTTCTGACAATTTGCATTTTTTTATAGCTAGATT
ATTTGTACATATGAAAGGCTCATCCATTGATTAATGAGCCAATTAATGAAGTCAAGCTGATAGTATCCTT
CTTGTTATCACAGGTCCATTTTGTTTATTTTTGTCTATTTTACAGGTTGAATATAAGCTGGGATTCCAAG
TGGACAATGTTTTGGCAATGGATATGCCCCAGGTCAACATTTCTGTTCAGGGGGAAGTTCCACGCACTTT
ATCAGGTAAGTAAGAGTCTTCAAAGACAGAGTTAACATACTTTTTCAACTGCATCCCCTATGGCCCCAAA
ACAGAAGTTTACTGATGTGTAGTGTGTATTACTTGATAGGCATAAGATGTATGAGTACTGTGAAAAGTAA
TTTTTGTAAATATTTGCACTGTGTTCTTAAACCATTCTCTCTTTTCTGTCCTTCTGGAACTCTCTGTGCT
CCGCCCTCCCTGTCTCTTTTTCTGCATTGCTGGTACTTACCTCCACATGAGTCCCTGTGCCTGATCTTGT
TTCCCTTTGATTAGGCACCACATTTCACCCTGTGGCCCAGATGATCTTTGCACGGTCATGTTTGACCCTG
TGACGTGAAGCCCATCAGTGCTCTCCACTCCCATCAACTGAACATTCCAGACTCACCACCTTGTGTCCTG
GATCCTTTACCATCTGCCCCTGCCTGCCTGTCTAGCCTTGTTGCTGCACTTGCCCCAGAGTTGTAGCAGT
TCCAGACTACATGCAGTTCTGATCTTCAAGCCTTTGCATGTGCTGGTCTCAGTATTTGGGATCATCTTTT
CCTCTTTCTGCTCGTGAACTCCTTTCTATTCATCCTACTCATTCTGCAAGACTCAAGATCTGCACTGTCT
TTTTTCTGCCACCTTCTCTTCTTTCATTTGTTAACTTCTATTCTTCCTACCCCTTAGAACCTTATATTTA
ACTGTTTTTGCACTGATTACATATCTAGCAATTCCCTTGATGCATAGCATAGAGTATGGTGCAGGATAGG
CACTCAGTACAGTCTGAGTAAATGAATAAGTGTATTATTTACACCAATTTAACTGCTTTTGAGCTAACTT
CTTAGGCTCTTGAAGTTGTGGTATTTGTAAGAAATGGATATTTTTAAAAATTGAAAGTATCAGCCACAAT
AGTGTTGTGAAACTTTTTCTGGCAGTCATATTCACTGTTATCAGTGACATACATTAAGCTTAAATAAAGC
ACAGGAGGGCTGCTTAAATTTTTATGGGCAGTAAAGGAATTTAGAAATGCCCATATCTTTAATGCAGTCA
TACAGATGGTAGAATGATAGGTTTTAAATTTGTAGGAAAAGAATCTTAAAGATTGGGGAAAAAAATTATA
TGCACTGAAGTCTGTTATCCCATTGTTACAATTATGGATTAAAATCAATTTCTGTTGAGAAAGGTGATAG
CTGACAATTTATCAGATTCATTTACAGGTTTATATTTAATCTTTTTATTAAGAGCAGACATACTTGCATT
TTGGTAGTGAGTTGTCTTTCCATTTGATCATGTAATTTCTGTTGTTACTATTGCTGATGTGTCTGTTAAG
GTTTGCCTTATGATCCTTCAGTTTTAGTGTACTGGAATAGCAGGACTTATGAGACAAAGTGGTGTATTAA
AAACAATGAGCAGAAGTTGAAAACAATTATCTCTTCATTGATGTCTTGGTTTGTTCTTTAATACTAACTT
TTATATCCATAATGAATTAAATGCTTAATGTCTAGAGGTGTGGTAGTCTGAAGATCTCTAAAAACTTTTG
TTTAGTTACTTTATTTAAATGTATTACTTTTAGTTTTCTTGCAGCAAAAATAAGTAATTCTAAAATGTTT
AAAAGAATCATTTTGGGGCATTAATGTTGATTTTTAGAAAATGTAAAATATTTTTCTTATCTTTTTTAAA
CAGTGTTTCGGGTAGAGCTTTCCTGTACTGGCAAAGTAGATTCTGAAGTTATGATACTAATGCAGCTCAA
CTTGACAGTAAATTCTTCAAAAAATTTTACCGTCTTAAATTTTAAACGAAGGAAAATGTGCTACAAAAGT
AAGGAATTTATTTACCAAAATATGTTTTACATGTATGTGAGAAGGTGAAAAATAGAGTTTGTTGTTTTTT
CACAGATTTAAGTATGTCCAACTCATGATTATAGTTGCAAGTGAGAAAAGAGCACTGGCAGGTGAAGTTT
TGAGATAATCCCAGATGGTTGGTAGCCAAGAATCTCACTCAGGCCTCATTCAGTCCATGCTTTCTCAAAT
CTTTTGTCAGAATTGCTAAGATGTTTTCCATTAGGAATAGTGCTAAAATGGTTGAAGAGGTAAAGAAATA
AGAAAAATCTGTTGGGACTTCTGAGTAACTATGTTAACTGTGTTTCCCTTATCAAGTTACTTTTATGCAG
AAGCATTGCTCTCGGGTGAGATAGACCTGGGTTGGAATGGCAGCTCTGCTCTTTTCAGGATATTGATACA
AGTTACTTAACCTCTCTGAGGCTTAGTTTTTTCATCTGTAAAATGGGCATAATACCTGTTTCAGAGGTTT
GTTGTTTTTTACGGTTCATTAAATCTAGCCTAAAACTTAGAATACCGTATGTGGGTACTTAGCAAAGTTA
GTTCTTTTTGGTTTTGAATTATCTGTTACTGAAGAAATCGAGTGGATATGAAAGAGTTCCAGCATGCTAG
GTCATAAATCAAAGAATTTTAGAGTTCTCCTTACAAGTTTAGTCCAACCCACTCACTGTAAGTTCCACAA
AGCTACAGTGACCCAAATTTACAAGGTCACGTAGGTAGAATTGGTTAGTATCTAAGATGGGGGGGGGAAA
TATACTTTAAAAAAACCTCGCAAACCCTCAGTGCTTACTGTGTTCTAAGTGCTTGATAGGTATTACACCT
GTTTAATCCCTACAGCAACCCTAGGCAATGGGTTCTCTCATTGTCTTCATTTTCAGAAAAGGAAGCTGAG
CTTCAGAGAATCTAGCTTGTCAAGATCAGATAGCTAAGTGGTGCAGCTAGGATGCAGACCTGTTCTCTCA
GCCTCTTTGTTAAACTTTCTTTTAATAAATTTCCCAATTGAAATCAGTGCTGAGTGTTATGAAAACACCT
AAGGCCAACAAGTGAGTTGAATTGGCTAATGTCTGGGTACATGCCAATAAAAAAGCTGCACTACATTTGA
ATAGACATTTTAAGAAAGAAGAGTTAGCATCTTTCAGCTTTAGTGTTTTGGTACAATTTTCAGTTCTACT
ATATTCAGTTATATACCAACTTCCATGTAATGTTAAAGACAAAGGAGATTTCAGAGACTCTCTACTCCAA
TGTAGTCATTATATATTTGATATAAGGAGATTGGACCCTTGGCCACCTAGGCTACCACAGCTAGCCAGTG
AGGAGTGTAAAACATTCAGTTCCTTATCCTCAGAGAGATGGGCATGACTGTACCATGGTGCTTCATCTGT
TACTCTTAAGTAAGGCAGAATGATAACCAGACATGGTGTGGCCTCTGGATCCCACCAGTGCTAATATCTG
CTAAGGTTAATGATCAGCTGATACTCAAAATGGTCACATACTTTCTCCATTTTCTTTAATATGTGTGTGA
AATTAACATTAAAATTCTGTGTTGGAGTAATTTTCTATTCTGTTTTAGACTTAAGTTTTTCTCTGGCCCT
CTGTATTTGTTGGTCATGGTTTTGGCCACCCTAGTCATCCAGTTCAGGCTCATGACTCTTACTTTATTAT
GTGATCCTAATGTATTTATTTATCTGGTTTTCCAGCCTACTATATTTCAAAAACTGTCTGCAACAGAAAA
CATCTGTACTATATGGAATGTTAGTAGGTGTTACTAGCAAGAAAAGTTTCTTTTATCATATGAGGATGGG
AATTATGGGTTAGACAAGTTTTGTGACCCCATAACTCCTTTCAGTCTTTATATTCTAATGTTCACTGTGA
AGCTCCAAAGAGACACTATAGTATGTGGCTTTTCCCAAACTTCTTGATCATAGGAACATTTTCACTGAGC
ATCTAGAAGTAACACCCTTTGGCTAACAGTGGTATAGACTATTGATTGGTGACTGTAGTGGTGATTATCA
GAATAGTAACATAGCTTTCATTATCTCGCAACACATACCTGTTGCTGAGTTCCAGCAATGTTCTGATAAT
TATAGTAATTAAGGATTTTCATGGAAAAGAGAATTTCTAAAGCATCATTTTTCTCCTTTAAATTCAGAAC
TTGAAGAAGTAAAAACTTCAGCCTTGGACAAAAACACTAGCAGAACTATTTGTAAGTGTTACTGTATTAT
CTTTATCCATTATTAGAAATGAAAAATGGTTGACTGCATATAAACATGATTGCATGAAGCTTGGAGGCCT
CATGGTATCAAATGATAATGACACCATGCTGTTATTTTGCTGGTGCTTTGTAGACTGGTGGATAGGTCAT
GAAACTGTTAGAATATTGAATATTTTGAGAACTAAAATTTATACGTATTTTGTAACGAGTAAGCTAAAAA
GTTTTACAAGCAAGAATATCATATATTTTTGAGTAGTCATAATTAAAGTATGACCATGAAATATGTGTAA
GATGTTTATTAGCAGAGGGTTAGAAAATCTGGCTTGCAGTCTGGACCTAATCTTAAGCTAATTTCATCCA
GGTGAAGGTGTAAGCTTAAAGATATTATGTTACTTAAACCTACAGAGCAGGTATGCAAAGTAGATTTTTA
TTTTTTGGTATCGGTTGTGTTTAGATATTATTACAAACTTCTTTTTTTTTTCTGACATGAAGACATCGTT
GGGTCTTACTCTTCTTGCGGTAGTGTTAATAGCAGTATCTTAAAAGGATACTAGATTCTCTTCATGCAAG
TAGACTTTAAAAAATTGGTTTTGAAAACTTCAAGTATATAAAAGTTCAGAGTACGCTTTGATGAACTCCC
ATGTGCCCATCCCCCAGCCTCAGTAATGATCAACACTTTGCCATTGTTCTTCCATTGATTCCCTCCTTTT
GTGGTTGGTTAGGGGTGGAGGAGAGTATTTTCAGGCACATCCCAGGCATCAGATTATTTCACCCATAAAT
ATTTCAGTGTAGATCTCCTTTAAAAGGGCCTTTAAAAAACCCCCACAATCACCTAATACCTATTCATTTT
GATTTATCACATATAACAAAATTAACAGCAGTTGCTTAGTATCTCCAATAGATAGTCCATGTTCAAATTA
ACCCGATTGTCTTTAAAATGTCTTTTTTTCCTCCTGAATCAAGATCCAAATGAAGCCTACACAACTGTTG
GGTGATATATGTTTTGTATTAATCAGAAACCACCAACCCTTTTATTAATATTATTTATTTATTGAAGAAA
TTATGTCATTTGTCCCATAGAATTTCCCACATTCTGCATCTTCCTGAAATCATTGAACATGTTTGTTTGT
TTGTTTTTCTGTAAACTGGCAGATAGATTTTGCACTTGATTAGATTTAGAACCAACTCTTTTGGTAAGAA
TAGTCCATAGATGGTAGGTACTCTGTGCTGCCTATTTTGTCTTTTCATCACCTTGGGAGGCACAGAGTAT
CTGGATGTCCCAAAGGGGAATTTTTTTGCCTGTAAAATAATGTGACATATCGTCTACTTGCTGGAATATT
TCTGAAAAGAAAGAAAAAACATTAAAAAAAATGTCACTGTTGCCAAAGTTTACTTTTAAAATTCTGGTGA
CTTTGCCCATTTCTTTTATGCTAGTAGGATATTACTTCTCACAAAGAGCAGTACTGCATATTCTTGGCCT
CTGTCTGTGTCTTCCTTGCTGCCTCTCATCTTCCCGCCCTTTCTATTTATTCATCCACCCAGTACCTATG
GAGAGTCTGTGGTGTGTTAGGCGGTATGACTGAAGCAGAGGACTAAACTGTGAGCAAAGAGATCCTTTCC
TCGGGGGTTTATAATGTAGTGGGAGAAATAGACGAGGCAATATAGGCAATGATACCAACATAGCATGGCA
AGCTATGATAAGGCAAGCACAGGGGATTTGGGAACCCAAGGATAGCTTCCTGAGAACAGTGACAGCTCTT
CTGAGAGCTGAAGGGTGACCAGATGGTGGCAAATGAAGGATGAATGAGGGAATGGGAAAAATGCATAGGA
AAGCCTGGAATTTGGAGGTAATTGAGCAGGGCGCATCTAGGGGGATCTGCCCAGCAGAGCCGTATCCTTG
GCTCTGCTCTGGAAAGTGCTTGGACAGTACTGCTAACATATGCCTCCAGAATTCAGAATTTTTTTCTGTC
CCTCCCAAGATTGAATAGCTTTCCTGTGGCATAAGGTAATTCTTGATGAAAGTCATGCCTTCATTCAGGC
TACAGCCAAGTCTAGCTGCCCTAGAAGTCATTTGGTCTCTACGTTAATCTGTTCTGATTTATTGTTTGTT
GATAGGAAGGTTAAATTTTAGAAAAGTTTTATTTTTCTTATTTCCATGTGTTTTTGAAAGCTGTAAGTTT
TATCTTTTATCCTGACCTATCCCCAGAACTCCAAACTTGTATATCTGTCAGTTTAACGTCTGTGCATGGA
GATATGAGGTACCTAGTTAGTAGACTAGGTACTCCAAATTTAACTTGGGCAAAACTCTTGATTTTCACAT
CCCCAACCTGCTTATTTTTATCTTTGTAAAGTTACCCTTATCCAAGTTATTGCTTGAGCCAAAACTTTTC
ATTCTTCTTTTTCTTTCTACTTTGGTACAATCCATTAGTAAGGTATGTTGACTGTGTTCCCAAATCCACT
TACTTCTCATCTTCACTGTGACACTCTTGTCCAAGCCAGTGCTGTCTCTCTGAATTACTCTGGTAACCTT
CTAACTTGTTCCCTGCTTCTGCTCTTGCTCCCCTACACGGCATTCTTCACACATCATGCAGTCATTTTTT
GTTAAGTGACCGTGTGAAATTGCTTTGCTTGAAACCTTGCAATGATCCCCCATCTCACTTAGGATAAACC
CCAAATGCCTCAAGTTTTGTTCAGTAGAGTTATGATGTGAGTACTCGTGATCAAATCTTTCATGAATCTC
CAGTCACACCAGTTCTACTTCTGTTTGCATCTTCCACTCTGCCTGCTTATGTCATTTGTATCTTGCTGTG
TGTTTTTTCTCAGTTTGCTTCTGCGTGTGTGTGTGTGTGTGTGTGTGTGTGTGTGTGTGTGGCTGTGGCT
GTGTCATTGGGTTATTTTCCCTGTTGCTGAGGCTTTCTTTTTGTCTCTCTTATTTATATATTTATTTATT
TGTTAATTATTTTTGAGACGGAGTCTTGCTTTGTCACCCAGGCTGGAGTGCAGTGGTGTGATTTTGGCTC
ACTGCAACCTCTGCCTCCCGGGTTCAAGTGATTCTCCTGCCTCAGCCTCTCGAGTAGCTGGGACTACAGG
TGCGCACCACCATACACGGCTAATTTTTGTATTTTTTTTTCAGTAGAGATGGGGTTTCACTATGTTGGTC
AGGCTGGTCTCAAACTCCTGACCTCAAGGGATCACCCACCTCAGCCTCCCAAAGCGCTGGGATTACAGGT
GTGAGCCACGGCACCCAGCTTGCCTCTCTTTTTAAAATAATATAAAGCTGAGTATCATTTTATTTAATGA
ATAGAGCCTTTAAAAACAGAAAAGCAAAACAATTTCTGTTGTACTCTCAAAAAAGAATAAATGTTTTTAT
AAACTTGTGGACCCTTCTGTCACTCAGTCTTCTGTGAGTCAGTGGTCCCTGGCAACAAAATGATGTCTGA
TTCCTCTAACCCAAACATTGTTGTTGAAGAAATATGAAGAATATATAGATCTGCACTGTCTAGTATGGTA
ACTGCTAGCCACATGTGGCTTTTTAACTTTAATTACAGTGAAGTAAAATTAAAACATCAGTTCCTCAGTT
TTACTAACTACATTTCAGTAGCTTTAGTTGTACTTATATTTGAATGCTTAATAGCCACAGGTGACCAGTG
GCTACTGTATTGGACAGTACTCTAGAGAACATTTTCGTCACTGCAGAAAGTTCTGTTGGACAGCACTGCT
GTAGTATATTTTATGCACTGGTATGTTTTATGTATACCACTTGTGAGTGACTGTTATACTCATTAGCCAA
AAATTCTATTTAAAATCTTTTTTCTTTCTTTTTTTTAATCTTTGTAAAGGTACCCTTATCCAAGTTATTG
CTTAAGCCAAAACTTTTCATTCTTCTTTTTCTTTCTACTTTGGTACAATCCATTAGTAAGGTCTGTTGAC
TTTTGTATTAATCAGAAACCACCAACCCTTTTATTAATTTTATTTATTGAAGAAATTATACCATTTGTCC
CATAGACTTTCCCACATTCTGCATCTTCCTGAAATCATTGAACATTTTTTTTTTCTGTAAACTGGCAGGT
AGATTTTGCACTTGATTAGATTTAGAACCAACTCTTTTGGTAAGAATAGTCCATAGATGGTCTGTCGCCC
ACGCTGGAGTACAGTGGAGCGATCTCGGCTCACTGCAACCTCTGCCTCCCAGGTGCAAGCGATTCTCATG
CCTCAGCCTCCTGAGTAGCTAGGATTACAGGTGCCTGCCACCATGCCCAGCTAATTTTCGTACTTTTAGT
AGAGGCGGGGTTTCACCATATTGGCCAGGGTGGTCTCAAACTCCTGACCTCAAGGTGATCCACCTGCCTT
GGCCTCCCGAAGTGCTGGGATTACAGGCGTGAGCCATCACACCTGGCCTAAAATATTTTTTTTAAACTAC
AACAAAAACATCAAAAAAATTATGTGAACTTCCACCAATATGCTACTGGTAACTGATCTTACAAAGAATG
GGCACATGAAAAGAACAGAATACTTATTTATGTATATTGGGTCACAAAGCAGTCATATTTGTTTAAAAAG
CTAAATGTGCTTTTTGTTTTTATTTCAGATGATCCTGTACATGCAGCTCCAACCACTTCTACGCGTGTGT
TTTATATTAGTGTAGGGGTTTGTTGTGCAGTAATATTTCTCGTAGCAATAATATTAGCTGTTTTGCACCT
TCATAGTATGAAAAGGATTGAACTGGATGACAGGTATTGTACATATTTTGGGAAAGAAAAAAAATGAAAG
CAGTTATTTGTATATATGTGGGAGCCCATACACATCGATGCACAGTGGTGCAGGGAAAGGAGGGAGGATG
ATTAAGCCCCAGCCAAAGGAAAAATAAGATGACCTAATCACTGTCTCTGGTTTCTCTGATTTTATTTTTA
TTTTTTAAAAATTAAGAAGTCAGAAATTAGTTTTTTAGTTGTTGAGGAAGAAGTGGAGAACAAGTAGTTT
TTTCTATTCCCTTTGACATGACTCTACCTCAGACCATTGCCTTTTCAAAATAGCCCTGTTTCTTCCTTCT
AGATCTTGCCTTCATCATTCTCCCTTTCTCTCTTCCTCCCTCCATCCATCCAGTAAACATGTATTGAGCA
CCTGCTCTGATTTAAACCATTGGTTCTCAACCTGGTTACACATTAGAGTCAAGGAGAAGCTTTGAAAACA
TACTGGTATTTGGGTCCACCTTCCAGAGATTTTGATGCAGTTGGTTTGTGGTAGTATTTGGGGATCAGTA
TTTTTCATAAAGCTTCCTGGATGATTCTAATGTACAGCCAGTTTGAGATATACTGGGTTAGATACTATGC
TAAGTGCTGGGAACAGAAAGAAAGAATGATATACTTTATAGTTTCAAGATTTTAATCTTTTACATTAACC
TGTAATTATAAAAGTATGTAATTTGATGACTGTGATATGTATAGTAAAGTGTGTGAATACAAAAGGTGCT
TGTCCAGCCTCAGTGAGTCAGAGATGACAAGGAGGACATTATAGTCAAGTTAGGGTGAGAGGTACAGATG
GAATGATAGGTTTATTTTCATAACAAACACTTCTTACTTCCCTCCTCTGTGATTTCCAGTTGCTGCCTGA
AGACATGCCCCAGCTTTGTGACTTCTTTGAAAGCCCTCCTTTATGTGGAGACGTATCATCCATACTCTTT
GAACCTTTTCTCCTCTTATTGCTGTATCCTTACTTGCGCTCCAGTCAAATGATCACTTATTCCTCACTTT
CGCCCCACACTTTGCCCTTCAGGACTTTTGTTCATGCTTTCTTCTTCCCACAAGCCTCCATGCATTTTCC
ACCAGTCCAAACTTGGTCCGTTCTTCAAATTCCAGCTCCATTGCTGTCTCTTTCATGAAGTCTTTTCTAA
GCCTCCCAAACACCCCTTTCTCTTTGTCTCTGTCTCTGTCTCTCTCTCTCTCGTAGCAGTTATTGCACTT
TTTCTTCTATAATTTTTTGTGTAATTGTCTTACCTTTAGAATGTAAGCTTTTTCCAGTTAGGGAGCAGTG
TGTCTTACTCATTGTTGAGTCACCAGTCCTAATTAGTCTTAACATGCAGCTGGGAAGCATATTTGTGGCG
TAAGAATATGAAGGGGAAGGGAGCTGGTTGGATTCAATACCTGCCCCTTAGTACTCTTTGTCCCCACTGT
TTTATTTTCCATTTCTGTGTGGAGAAAGAAGAGAAAAGGGATACGAATGAGAAGGAAGTACGTATATGAT
TTGTTTCAGAATATGTTTTGTGTACATGATGGTGGTGAAGTTAGGTTTAGATTTTACAGGGGAAGAAATG
GCATTTGGAAGCGATTGAGGGAACATTTTGATAGGACTTTGAGAGAGGATACAGGTAGAGAGGTGACTGA
AGAGCATGACATTTGGAAGTCAGTCTTGATATAGCCAGAGAGTTGCGTTTTCCTTGAATGCTTGCATGCG
TGCTAGGGCTGTGAGCCCACATAGGCCAGAATTTTGCAATAACTTTCAGATTCCATGGGGCATCTACCTC
TGCCTGCTGAAATAATTAGTTACCATCCATGAATTGGTGTTCCAGTTCTCTTTAGTTTTCAGGCAAAAGT
TTCCAGACATTACCTGAGTAAAACCAGCTTATATTATCACGTTTTCAGAGCATAGTCTAGTGGTCAAGAG
TACGGACTCTAGAGCCAGACCATCTCTGTTTGAAGCCTGGCTATTCTGTTTACTAGTTTTATGGGCTACA
TGGATTAAGTTATATAGCCTATGTGTGTCTCAGTTCTCCTCTGTAAAGCAGAAATACACACCTAGTAGGT
ATGTTGTGAGGTTTTAATGAAATACAGTAAGCTCTTAAAACAGAGCCCTACGTATAGTAAATGGCATTTT
ATGAAGTTTTTAATAAAGTTGCAATATGCTAGTATGTCCAGAATTGGTTCCTTCTGGTGGGTTCTTGGTC
TTGCTGACTTCAAGAATGAAGCCGCGGACTCTCGCGGTGAGTGTTACAGTTCTTAAAGATGGTGTGTCTG
GAGTTTGTTCCTTCAGATGTTCAGATGTGTCCGGAGTTTCTTCCCTTCTGGTGGGTTCATGGTCTCACTG
ACTTCAGGAGTGAAGCCGCAGACCTTCGCAGTGAGTGTTATAGCTCTTAAAGGTGGTGCATCCGGAGTGG
TTCGTTCCTCCTGGTGGGTTCGTGGTCTCACTGGCTTTAGGAGTGAAGCTGCAGACCTTCGCAGTGTTAC
AGCTCATAAAGGTAGTGCGGACCCAAAGAGTGAGCAGCAGCAAGATTTATTGTGAAGAGCGAAAGAACAA
AGCTTCCACAGCGTGGAAGGGGACCCAAGCAGGTTGCCGCTGCTGGCTTGGGTGGCCTGCTTTTTTTCCC
TTATTTGGCCCCACCCACATCCTGCTGATTGGTCCATTTTACAGAGAGCTGATTGGCCCATTTTACAGAG
TGGTGATTGGTCCGTTTTACAGAGTGCTGATTGGTCTGTTTTTACAGAGTGCTGATTGGTGCGTTTACAA
ACCTTTAGCTAGACAGAAAAGTTCTCAAAGTCCCCTACCTGATTAGCTAGACACAGACCACTGATTGGTG
CGTTTACAAACCTTTAGCTAGACACAGAGTGCCGTTTGGTGCATTTACAATCCTTTAGCTAGACAGAAAA
GTTGTCCAAGTCCCCACCCGACCCAGAAGCCCAGCCAGCTTCACCTCTCACTAGTAGTGATGGACAAAGT
TCTTCTGCCCTTTCCTGTCCTATTAACAATTATTTATTACCTGCCAGGCAAGCTAACAGTGGTGACCAGA
AAGCTCACATCCAGTTATCCAACAGCATTTAAGAGACATCTGCTGCTTCTCTCTCTGCATAGGGGCCACT
GGGATTACCATTTATTGAGTGTTTTCTGTTTACCAGTACTGTACCCCAGGTACTTTATATGTATTATCTT
AACACAGCCACCTAGAAATAGGCTTGAAGAGATTAAATAACTTTTTCAGGATTGCTCTTCTAGGAGCAGG
GCAGAGCAGGCGGGACTCAGTGTTGTAATAGCTATGTGTTAATAATCCACTATTGTCATTGTATAAAACA
CTTGCTGTGTGCCAGGCACTGTTCCCTGTGCTTTACATTCATGAACTCCGTTAATCCTCACACAGTCTGG
TGAGGTTAGATGGAGCCCATGGCTCCGTGGAATTCATTAGAAAGGGATGGTAGTGTTCTTCCATTCCAGG
CACTTAGGAGCCACTGCTTGTTATAAACAGATCTCATTAGAGGCAGAGAATTAACACTGCCTGAGATATG
CCCATGCCAGGGCAGTTGGAGCTCATGTGTGTGGCTTTCCCTCTCTCAACACTGCAAATTGATCTTTTCA
GTCTCTTTGTTACGCCTGATGAGTCTGTCCTGGATAGGCAGAGCTTCTCTTTACATTCACCCTGAAGTCC
TGCAGAGGGGTTGGTCTGCAGCGTGTCTCTACTGTAGTCTTTCCCTGTTAGTTTGTGACTGTGGGAAAGT
TTATTACTCCTTTGTGGGATGCTTGAACTTGTCATCTGGCAGCATCTTAATTTTTCTCTTCCAGTTTCCA
TTATCCCCACCACCGCCCCCATGCCATTACTGGTGACAGAGTTTCCCTTTAAAATCTTTGATTTTATATT
TAATGCCTAACTGTCTGACACATAGTAAAATACTCAGTAACTATTTGGTTGAATAACCAATGAATAGAGG
GAGGAAAAAAACCATTTTGTTTTACCAATCATTCTTTGCTTTTTTCACAATAGTTTGTGCCAGAAATGAC
CATTCTGTCTGGTTTATGTTTTCTGTCCCAGGGAAGCGTGGTTTTCTCTGTTCATTGATTGACTCAGTGT
TAGTTGAGCTGTCACTGGGGCTCACTCTGGCCCACTTGCGGCTTATTGTGCCAGGTACTGGCATAAGTGC
TGGGGAAGGAGAGGTGAATAAACAGGCACTTGTCCTGCCTTTGTGGAGTTTATAGTCTGGTTGGATGAGA
CAGATATTAAACAAAAAAAATCCTTACTGGAATGTAGGGGTCACAGTCTTTGTCTGTTGCATTCATTGCT
GTATCTCTAGCACCCAGTACAGTACCTGACATGTAGTAGATACTTAATAAATATTTGTGGAATGAATGGA
TGAAGTGGAGTTACAGAGAAAAATAGAAAAGTACAAATTGTTGTCAGTGTTTTGAAGGAAAATTATGATC
TTTCCCAAAGTTCTGACTTCATTCTAAGACAGGGTTAGTATCTCCATACATAATTTTACTTGCTTTTGAA
AATCAAATGAGATAATCTATTTAGATTGATAATTTATTTAGACTGGCTATAAACTATTAAGTGCTAGCAA
ATATACATTTTAATCTCATTTTCCACCTCTTGTGATATAGCTATGTAGGTGTTGACTTTAATGGATGTCA
GGGGTAGGTCCCTAATTGCTTCTTGCTTCTATCATAACAGTAAGTCTTGGATTCAAAAAAAAATTTCGTT
CTGACCACTTAGCATAGTGCTTTGCTTATTTTAGGGACCCACTTAATATCTGTTGAGGGAATGAAAAATT
GACATAGATGTCCCTGTAACGCCTTTGTGTGCCTACAGTCTTTTCAAAAATTCTGAGGTAGCACAAGAGT
GCCACCTACTGTTAAGTTAATGGAGAGACTGTGTCTGTGCACTTAGTCATCAGTGATGTTGGTTGCAGAT
AATACTTAAGAAGTACTTTCACATATCTCATACAATTTGAGCCTCACAAAAATCCTGTGAGGTAGATTAT
CTTAATCCCATTTATTTCCTCCCCTTTTGAGGATGGTAATGCTCCTCTTCCCTCCCCATTATTGAAGTCT
GGACTTCTAACAGCTTTGATATCTGGTTTGATTTTTGAGTGGTACTCAACTGTAAAACAGAGTCCTGTAA
TCCCTTTTTGCTCTAACGACTGGAGATGCATAATATTCACATAATTAATATAACTATAGTAGTATACTAT
AAATTAGTAACAATAATTTATAAAGATATGTTTGAGGGCTAGGCAATAAATGCTTTACTTATTTATTTTT
CATGTAATCGTTTTAGCAATCTTATCAGAGGATAGTGTTATGCACACTCTGTCCACGGGAATTTGAGGTT
CCAGAGGATTAAATAGTTTGTCCTAGGCCGTACAGCTAGTAATCGATGATACTGGCAGTTCTGACTTCAC
GGTTTATGCTCTTCATCTCTTTTCTATATTGACCTATACCCACTGCATTATAAACTCATATAGATCAATT
CTGTAATAACGTTGAGCCAAAGAAGCTCTTCCAGCACTCTGACCAGATGATAGCCTAATGAATCTTTATT
ATAGTCTCTTTGAGTTGCAAAGTATCTTCGCAGAGTTGCTGGAGAAACAGGGCTAACTGCAGCATCACAA
GAAGAAGTATCAGGTTGGTGCAGTAATTGCAGTTTTTGTCATTAAAAGCAATAGCATTAAAAGCAATGAC
AAAAACTGCAATTTGCAATTACTTTTGCACCAATCTAATAGATAACCTAAAATGATGGACATCTTCAGGG
AAGGCATGCTGGGGGGGCATTTCATTAGGCAAACATGTATCTTGAGATCTATGGTTGTGCTGAGCAGAAT
GGTTTGCATATTATAAGTGCTCTCCAAATGTTTATTGCAGGACATTTCTATCTTAATTTTTGCTATGACT
TTCTACAGATGTTTGGTTACAATAGCAGATAGTAGTATATTGTATTATTAGCCATAGAAAGGCTACATAA
AGACTTACAGTCCTCATTGCCTGGATGTTATATATTTACATTTTTCAGATTTGTGTATGGGCTCTTGAAA
TTGATAAACATTCATATATAAATGTTATAGATTACATAGCAGCCGTGTGTGTGTGTGTGTGTGTGTGTGT
GTGTGTGTGTGTGTGTGTGTTTTGTTTCAGAGACAGGGTCTCACTATGTTGCCCAGGCTGGCGTCAAACT
CCTGGACTAAAGTGATCTGCCTAACAGCCTTCCAAATAGCTGCAGCTACAGGCTTCACACCGCACTCAGC
TTTATTATGTATTTTTTTAAATCACCAGTTTTTGAAAATACAGAATTATTATGTGGGAAGTGGTCAGTTA
AAAGATTTTGCATATTAAGGAAAGTTGGAGACTTGATTGGGCACTGCTGATCCTGTAGCTAAGAGAGGCA
TTGAAAGACCTATCCTGCTATCTGGTTTCACCCTTCATGCTGAATTTCTATGTTTCACGTCTCCACTGCT
GCAAAATTATAAGAACTAAGGCAGTGAGACCGAAATGTACCCACGAGACAAGGTTTCTCCCCACTGAAAA
GACAAAACTACATGCTTGAGCAGCATTACTTTGCAGTAATCTTGAACACAAGGTTTACAATTATTTGAAC
CTATCATCTTCTTGGTGTCCTGTATTATTTAGAGAATATGGTGTAGTGTTTCAAGTACTAGAGATTTCCC
AGAAGTTGGATGAAAGGGAGGGATTGGGGAAGTAGAAGAAGCAAAATGTATTGTGTTTAAATAAACTTGA
ACCAAATTTGATACTTTTTTTTTTTTTGAGATGGACTGTCACTTTATCGCCCAGGCTGGAGTGCAGTGGC
GTAATCTTGACTCACTGCAAACTCCACCTCCCAGATTCAAGCGATTCTCCTGCATCAGCCTCCCGAGTAA
CTGGGACTACAGGCACGCGTCACCATGCCCGGCTAATTTTGTACTTTTAGTAGAGACAGGGTTTCACCAT
GTAGGCCATACTGGTGTCGAACTCCTGACCTCCAGTCATCTGTCCGCCTTGGCCTCCCAAAGTGTTGGGA
TTACAGGCGTGAGCCACCGCACCTGGCCAATACTCCTTTCTAAGCTCCGAGCATGTTGGCACATTTGATT
TGGTTTGCTCTTTCTTTATCTGTAGGCCATTTGATATTGGGCCATCATTGAAAGAGGCCTGTCTTTCTTC
TTCTTTTCTAAAAAGCAATCTAATTGAATGACATGGGCTCTTTTTTTGAGAGATGATCCGTAGTTCCCTA
ACATATTTGTGTGTGAAGTTTAGGACAATTAGCTGAGGTGTCTGAGCACTAGTACCTACATTTCTGAATA
ATTTTGATAAGATGAACTCGCTTAATGATTTTGGAGATAGAAATGAAAGAAAAAATAGAGCTCTATAGGA
GTTAGATTAAAATATCAGTATTGGAACATCATGAATTATTGTGATCTCCGTAAGGATTTTAGGCTGGTTT
TAATGGCTATGTGCATTTTGTATGTATGGAAAAAGGAAATTTCTCATTGAAACTGACTTGTCAAATATTT
CTCTCAAAAATTGTTTGCAGCATTAGTGCCAGCAGTAGTTCCCAAGGGCTGTCTCAGCCATCCACCCAGA
CGACTCAGTATCTGAGAGCAGACACGCCCAACAATGCAACTCCTATCACCAGTAAGAGTTAATTTAATTC
TAAAGCCAGTTTACTCAAGTTGTCTATGCTGCTTCCCAGTGGTCTTGCATGGTTAGTGTACTTGTGGGAC
ATGTTGTGTAAATCGTATCTAAAGTATGCAAAATTAGGTATGCTCTTCAACTTTTGCTTTCTAGAGCATT
GAATGAAACATTCTAAAATTGAGGTATCAAAAATGAAATTTAAGTTTGCTAGAATTGGTGTGGCTTTCGG
GAGATTTCCATAGATTTATTATACTAAAAGGGCTACTAAGTCACTTCTATAGAAATTCAAAAGGAAGATT
TTTCAGGTAACTATATGGAATTAACTATTGAGCTGCATAAAGACAGAGACTTTAGACTGTAAGGAATTGT
TTGATGGTCTTATGGGCCATGGTGAAGACTTTACATTGTTTTTTAATCATAATAGGAAGTTAGCTACCAC
TGGAAAGTTGAGAATGTCGGATCTGATTTCCTTTTTTGGACTGGCATTTATTCTTTAGTAAAATAAGATT
AAGATATCTGTCCTCTACCCAGTGCCCTATTGTGGTTTTCCAGTACTGTCTCCCATGAAAAAGAACCAGG
ATTTTTTGGAGAAATGGCTGATTCCAGGTCTGAGTTAGGAAGTGAACAAGATAAGCCTGGGACATGTTGC
TGAGTCAGATATCAAGGAAATAGCTAAGACTTGAAGAGCTTCCACTGGCTAAAGATAGGACCATTTGATC
ATCAAAATGAATAATGACTATAATGAATTAAAACGTAAAATGTGTAAAAATCCACAAATTTGTAATAATA
CATTATTTAACAAAATTGTTCATTATGAGAGGTGACTAAGGCTCCAGTGAATACCTTACTCTACCAACTG
ACTACATGAACTGTATTTCAGGTTAACCAGATGGTGCTGGTGGATGAGAGAAAATTTTTCTTTACAGATG
ATTCTCAGCTAATAAATGTGGAAGAAATTATATAATTAGAAAATCACATGTGCAACTCCTGATAAAATAG
TTGATTCAGAAAAAGATCATCAGTGATTGAAAGGAAAATGGGGAACTCTGCCATTGAGGGATCAGGCTGT
CACCACCTGAATACACTGATGAACTCAGCATTACTAAAAGTAGGGGACCTAGGTATTTCGTACCCAAGGA
TATGATGTACCATTCATGGAGCATTCTTTTCTGTCCCTGCTGCACCCCCTACAAGTTAACCTGGATCTGA
TCAAGGTTATAGACCTGACTTACAGTTTACAGGAAATACTACTTGAAGAAGTAGAGGCCAAACATTTTCC
AGGGTAGCCGACCCAGTTTCTTCAATAAGACAGTGGCAAGAAAAAAGGAGGAAAGAAGGCATTATACAGT
AAACAAAATTTAAGGGAAATAATAATAGCAGCTACTCTTCCCACTAATGAAGAAAGAAATATATGCTTTT
TAGGAAATACGATAGATGTGAAAGTAGTTTAAGCTACTCAGAAGAGGCACATCATTGCTTTTAATGTTTA
AATATCAATCTTTGCTCATTAGAATGGATTCTTAATTGTTATACGTGACCTCAAAGAGGTAGGGAATTGT
TGTTATACATGCTAAAATACTTTCTTAAAAAAGTCAAAGGGGCCGGGTGTGGTGGCTCTTGCCAGTAATC
CCACCACTTTGGGAGGCCAAGGCGGGCGGATCATGAGGTCAGGAGATCAAGACCATCCTGGCTAACACGG
TGAAACCCCATCTCTACTAAAAATACAAAAAATTAGCTGGGTGTGGTGGCTCGCGCCTGTAGTCCCAGCT
ACTTGGGAGGCTGAGGCAGGAGAATGGCGTGAACCCAGGAGGTGGAGCTTGCAGTGAGCTGAGATCACGC
CACTGCACTCCAGCCTAGGCAACAGAGTGAGACTCCGTCTCAAAAAAAAAAAAAAGTCAAGGGAAATAAA
TTTATTTATCTTTTAAAAATTGTTGCCATCAATAAGAAATTTACTTGTTTGTAATCATGGCCATTACCGT
AAGGAGCTAGATAATTTACTTACTACATATATATATACTGAAAACAAACACTTTTTAAAAAAGTCAATAG
AAATACATTTGTTTACAGATAGAAAAAGAGGAAGAAAAAAATATTTGAAGACATAGTAGCCAAGAATTTT
CTAAGATAACAACGCAACAGATCACAGATCCAGGAAACTAAGAGAACTCCAGGTAGAATTAAACATTCAC
ATATACTCACACACCTAGACAGTCTATCACAGTCAAACTGCTGCCAATCAGTGGTTTCAGGTGGTGTCAG
TCTACATGCATTGTAAAGTTGCCCAAAACTTTTCATGTGGTTCTCCTGGCAACCATTGATGATCATTGCA
TAGGTCCACTAATTTTGGGGGGAGGTTTCTTCCCATTATCTGGAGATGCCATTCCAACTTCTACTTGCTA
AAGCCAGATTTTCCTTTTATTCTAACATTTTTTTTCTTGAAGTGAAAACTAATTTGTGGCTGTAAATTCT
GTTTTTACTGTCATTGAATTAAGAATGAATGGGAATTAAGGGAACTTATTAAATTTGAATCTCACAATGG
TTTTACTAGGATGTGGTAATACCAGAATAATTACATTGATTATGTATTTTGTTTGAAAAAAGCCTTTTCA
AACAAAAATAACTTTCTGTTTGAAACTTTTTGTTTGTTCAAACAAAACAACTTTTCAAATGAAGAGATGT
TTGAAAAAAATCTTTTCAAACATGTCTTCATTTGAAAAGTTGGTGTGTTATGAGACTATATTAGAAAACC
TTTTGGGAGAAAAACTGTCCATAAGAAGGATTAAATGAAATTTCACAGATCAAAGCTTGTTTCATTTGGC
TAAAAGGCAATTGAAGTGGTGGTCATGGTAATACTATTTTTAGGATTTCTTGTTGCAGTTCAGAATTTTA
ACATTTTGGAGTAGTATTGTGGTGGGTGAGGAGACATTTCTTTAACATTTAGTGTGGCCTTCAAATAACT
CTCCTAGTTCATATATATGCCTGTTTCCTTTTATGATTCTTACACTCATTCCTGTGACCTGAGTCCTGAG
GTTCTAACTGAACTAGTTGACTCCAATACCATAATAAGGGTATTTATATTGCTTGGTTTGGCTTTGTTGG
CTCCTTAGGTTATCCTACCTTGCGGATAGAGAAGAACGACTTGAGAAGTGTCACTCTTTTGGAGGCCAAA
GGCAAGGTGAAGGATATAGCAATATCCAGAGAGAGGATAACTCTAAAAGATGTACTCCAAGAAGGTATTT
ATTATCTCAAAGTCGGTTTTTTAAGTATGATTTAATGTTACCACTATAGACACTTTTTTCAAAAATTTAA
AAAATTTCATCTCATTTTGTGTCTAAGATAAGGATAGGAAGCAGTGTATGGTTTTTCTTTTATAAAAATT
ATTTTCATTTGCTCCTATACTTGAATGGGCCTTGTACAACTTTGGTGCAGTTCTTGATTTTCAAGTATAT
TAAAGCACGTATATTATTGTTGGCTATATTTAAGGTGTATTCTCTGTTTGGTTTTTATTTAAAATGGCCA
CTACCTGGCAGGTCTCTCTGAGATAGTCTAAGTTACTTTCTCTCTGACGGATAACTTGGGGGTTGTAGCG
GAAGGAATGGACATGGGCTTGGGCTTTGGTTTTGGTCCTTAGTTCCAATCCCACATTTTATTCTCCGTGT
GGCTTTGGAGAAATCACGTAATGTCTTCAGTCTCCAGTTCCCTCCTCTATAAATTTGGACTGCGTTGTCA
TCTCTTAGACTAGTTATAAAGATGAGATGAAATTAGGTACAGTAAATGAATGAACACATAATAGTGTTTG
CCAGGTGTTAGTATGCTTCCCTTCACCTCTCACTGGGCCTTGCTTTCCTTTTTGAATTGGAGGGTATTGA
TTAGGGAGATGCTGAAAGAAGAAGACAGAAATTAATAATAAAATACTGCACTGAGCTCTTCATGTTGTTA
AATAGAGAATTACTTTTTTACCTCCACTGTAATTCAGTTTGGAATGCTTTGGATACTTATGAGTCCTCCT
TATGTATTCCTTTGCTGGTTGGGACACATTTAGGTCAATCACAGCTAAGTCAGGTACTTAAACTGTCCCC
AGTAGCAAATGGTAATTAATGGAAGCAGATTTTCTGGTATGTCTTAAAATGCATGATTGCCACTTGTTAA
TAGTTGACTGTTTTCTAAGCATAACTAGTTTGCAGATCTTTTTGCAATCTGAAGAGAGTAAGTAGACCAG
GTAGCATTTCCTAAAGAATAAAAAAAAATGAGAGATCAATTAATGTTATATTTGCAGTTTCTTTTGGTCT
CTGAATGGGATAGAATAGGCAATCTGTTGTAGTGGTATGATTTGAGAAGAAGGAATTCTGAACCAGGTAG
AGTTTTTCTTTATTGGTCTTTTCAGGCCCATAATAGTTTATTTTAAAATTCTTTTGATTTCAGAAAAGAA
AATATGGTGGCTGATTAACATTTAAAAAGGTGGTCAGGTTCACTGGAAATCTGATAAATGCAAAGAAAAC
AATAGTTACATGCGATTTTTTTTTTTTACGTTAGTTTGTGAAAAAGTAAAAAGATAATTTCTAGGTTGAC
GGGTATGGAGGAACACATGCTCTTTTACATTGCTGGTAGGAATGTGAATTGCTGTAACATTGTGGTAAAG
TAATATGTACATATATATTTTTGTGTATGTTCCTTACTTCCATTGTTTTTAAGTATATGTAAATCTGTGT
TTGAGAGTAATATTTAAAAATGGGACTAGGTACTGGGAAGAGGAGACAGGAGGTTTTGCAGTGCTTCAGT
GCAAGAGAGTTAAGAAGCTCAGTCAAGCAAGGTGAACTTGGCTGGAGAGAGAAGGGAAAACCTTTGTGAG
GAAGACAGGTCAGGGTGTGTAGCTCTATGTATTGACTAGAGTGTTTGAAGATATTTACTCAGCTTCAAGC
AAAATGTCTTAAATGAAGATTATCCAAAGTCTTTTCTGCCTTGAGCATACAAGTTACTCTGTCTCTAGGC
CACAGTGAAACCTGATGATACATGGATACCAACAACTCCACCTCATAGAGTGGAAGGCATTAGAGCAAGC
CTATTTGTATGCATGGTATCTGCAGCAAAGTGAAACTATTTGCAAGCTTATCTTTTAAATTGTGAAGGAA
GGAAAGTAAACAATTTTCTAGTGAGAAAGAGTAAAATGAGATTCATTTTCAGTGATCATCTTGTTTGGGA
GTTTTCTATGGGCAATTACAAAATTGGTAATAAAATCTAGATGGATTTTCTTAGTTCCTTCCCTAGCACC
CGCAAAGGTCATAACTAACTTCTCTTATTACTATAAGAGTTTTTGTTTTTTGTTTTTTTTTTTTTTTTTT
TTGGCGGAGTCTCGTTCTGTTGCCCAGGCTGGAGTGCAGTGGCACAATCTTGGCTCACTGCAGGCTCCAC
CTCCCGGGTTCATGCTGTTCTCCTGCCTCAGCCTCCCACGCCCGGCTAATTTTTTTGTATTTTTTTTTGT
ATTTTTAGTAGAGACGGGGTTTCACCGTGTTAGCCACGATGGTCTCAATCTCCTGACCTCATGACCCGCC
TGCCTCGGCCTCCCAAAGTGCTGGGATTACAGGCGTGAGCCGCGCGCAGCCTCTTCTCACTCTAAGAGTT
TTTAGGAACACATTTTACCAGTGAACCGAGAGTCTAATTGGCTTGTCTGAGACCTTCTGAGGAGTGAGTG
GTAGAAGGAATGGAACCCAGGACTGTCTGGATCCAAAACTTGTACTCCCTGGCCTTCCCTTGAAGCTACT
TTTTAAGGCTCTGCGGTAGAGAGGAAAGTTCATTTTTGTCTTTTCGTCATTTCTCTGAGGCTAAGCCTAG
AAACTCATAAATGCCATTGTGGATACCTCATTACTGAGCTCCAATGCTCCTGGCTATATCATTAGTTTAT
TTAGTATAATTCAGGAAAATTTTCATATACTTAGTTTAGATATGGTGTTTCTGAAAGCAAGTTAAGATGT
GTAATAGTCACAAAAAACTTTTAACAGTCGTTAAAACCAAAGATTTGGGTCTTTTTACTCTAGGGCTACA
GTAATGTTGATCACATATGACCTTGTTATTTTTGTTTTATGTTATATTGTGCCAGAAAGTTTTGTACTAT
AATTTTATGAATGTTGTATGATCTCATTAATTATTACTTTTCCTTTTAGGTACTTTTGGGCGTATTTTCC
ATGGGATTTTAATAGATGAAAAAGATCCAAATAAAGAAAAACAAGCATTTGTCAAAACAGTTAAAGGTAG
GATCTTTTTTCCATAGTATTTCCATGATGCTCTTCTGTCTCAGGTGGCTCCTGCCAGCAAAATTCTGTCT
CAGTTTCCCAATGTGTGCCAGACCTTTTAAATCAGTCAGTGTTAATTTAGCTGAAAACAAAAATTGTCTT
ATATGAGCCTAATTGTTTTGGAAATTTGGGTTGTTCTCATTAAGTATAGAAAAACAGAAGTCTGTTAAAT
TAAGACATAAGACATTTCTTAGATATTACTCAGTTAATTGCAAGTCAAACTGCATCCACTTGATTTCATT
GTTACTATGTTTAGTGTTGGTATACTTTTGCAGGTATAGCCATAGTTGGAATTGCTGGCCTAAGGGTGTG
TACATTTAAAATTTTAATAGAGCCCAGGTGCAGTGGCTCATGCCTGTAATCCCGGCACTTTGGGAGGCCG
AGGTGGCCAGATCACCTGAGGTCAGGAGTTCGAGACCAGCCTGGCCAGCATGGTGAAACCCCTGTCTCTG
CTAAAAATACAAAAATTAGCCAGGCGTGGTGGCTCACGCCTGTAATCCCAGCTACTCAGAAGGCTGAGGT
GTGAGAATTGCTTGAACCCGAGAGGCGGAGGATGCAGTGAGCCGAGATCATGCCACTGCACTCCAGCCTG
GGCGACAGAGACTCTGTCTCAAAAAAAAAAAAAAATATATATATATATATATTGTTAGATTGTCCTCTAA
AAGATAGCACTGGTTTATATTGTCATGAACAGAATAACTGTTTTCACATATTCTTCTTTTGGGCCAGCGT
TTGAAATGTGACGCCTAATTTTTAATTTATTGATGTGTATAAGTTATTTAATTAAAGATTCCCTATCAAG
ATACTACAGTGTTATTTATGCAGGCATATGGCTTATTTCCTATTACTGGTAGATTTGCAAGACTTTAAAA
AATACTAGAATTTTAATTACTTACAACAGATGCTTGTGAAAGCTTAAATAGTTCTGAATTAAGAGCTGGG
TGCAGTGGCTCACAATTGTAATCCCAATGCTTTGGGAGGCTAAGGCAGGAGGATTGCTTGAGTCCATAAG
TTCAAGATCGGCCTGGGCGATATAGCAAGACCCCCCGTCTCTACAAAAAAAAAAAAAAAAAGTAGCTGGG
TGTGGTAGCATATACCTGTAGTCCCAGCTACTCAGGAGGATGAGGCAGGAGGATTGCTTGAGCCCAGGAA
TTCAAGGCTGCAGTGACCCCTGATCATGCCACTGTACTCCAGCCTAGGTGACAGAGCAAGATCCTGTTTT
AATTTTTAAAAATGATGATAATAATTCTGAGGTAAGTCTTATTTGCTTATCTAGAGAGAAAGAAAAATGT
GATAATTTATAGGGTGCTTAATGTCTATCAGGTCTGATGTAAATTGAGAAGACATGCTAATAATATCTAA
AAACAAATTTAGCACTTTCCCTTCAGAAACTGAAGGGAAGATTAAATTCAGTTTTATGAGTAGAAAGTGA
TAAAATTTTATACAGTTTATGAAGTTAATTTATAAGAACTGTTTCTAAATTTACTTAAAGGAATACATGG
AAAGTATGAAGGGTTTATGTTTATTGGTTGTAAAAAGTTGGGTTATACCAATCTAACAAAAAATCTTTGG
AATTGCTTTTAATTGAACAAAATTGTTTGTTTAAGGCTGCTACAAATACATCCATACACACACACCTCTT
TAATATTTTCTAAACAAGTGGTTTAATTTACTATATCATTCAATATTTATTTTATTCATTCACCCCTTCC
CAGCACCAAAAACACTTTTAAAGGGTAATATTTATGTGTTAGGTCCATCCTTTCGGCTAAGACCAAGTGT
AAGTTAGGTCCCAGTAGGTTTTCTGACTAGGAGAGTTTACATATTACTTTTTGTAAATGTAAAATTTGAA
CTATAAGGTTATTAAACAACAGCCTTTTGTTACTCTTTTCTCATTTTTTTTTTAAGGAAACTCCTTAATT
CAAATATTTCTTCCGGGGTTTGTAAGTATTCTATAGACTGTGTAGAACTGGGCTATTATTGACTTGTTCT
GAATTAAGGAAGGAGGTTTTTATACAAAATTGGGTTGATTTAGGGTTGGAAGGGGAGATAAAAGGAAATA
ATAGTGATAAGAAAACACAATGAGTATACTTGGACTGTTTCACAAGATAAGACTTCTCTTTCCGTATATG
CTTGACTTGTAGTCACTGGTTGTTTCTGTGCTTTACCACTGTAATTATAATGTTCTCTGTGAGCTGTGCG
GAAATAAGAGAAAGCACAGTGAGTCCTTATGGGGGACAGAGGGGAAGTGCATTGCCTCAAATTTGTTAGA
GAGATAGCGCCACATGACTGTCTCTGAGATTGATTATTTTGGAATGCTGTTTTTATGGTTTTAGTTGTAG
CCACATAGAGCTGACCAAGGTCTTTCACAAATCTGTATGCTTTGTTACATGTTGCACAATTAGAAGTTTA
GCATAAAATAAAAAAACAGTGTTTTAGAAAGCACTGACCTTTGCCTTTAGGCATAAGCAGAAAATTGGAG
TTTGGCTTTTAAAAATATTCATAATTTTATACAGAGACTTCATAGATACTCCAGTATAAATTTCCAGAGA
TTGAAATTAGCAACCCGAATCTTACACACTAAATATTGTGAAATTGAATTCCATAAAATAAATGAATCAG
TTTGGATTTACTGGTATTAAGTTCTTATTTTCTTTATTATAGCTACTAAATTTTTATAGTTTTGTAAATA
AGCAAGTGTTTGTTTTTAAAAATCATTTTGTGCATCCTTGTAACTTTTAGAATATATTTAATAGTACCCT
TTTCAAATGTGTACATCTTGAAGATAGACCTTTCATTATGTAATTAAAAGACTAGGATGAGACTGGGAAA
GGAATCCAAGAAAACGAGTTTTTCTTACTAAATGGATAAAGTTATTTTATCTTTAATTGAGTTTTCTTAG
ATCATCATTCAAGTGTCCTTTGCTTTAATAGAACATGCTTATCAAAATAAAAACTTGAAAAAAGTAAGTA
TAAAATGACACATTCTGAAATTACCATTTGTTGTACTTAGATCTCCTTACCAGTTGAGGGAATGGTAAAA
GTCTTTTTAACTGGGCAGGGACCTCCAACTATTACTAGTTTTCAGTCTTGAAAAGATCCTACTAGCCTCC
AGTAGTCCTGGCCATAATTTCATTAGAAATTATTTAGGTTATAGAAAGAGTAATAAAGGCACATTTTGCT
ATTTACTAAGAAATCCCACAAGCAGTTTGTAGACACTTAGAGTTTATTCCAGCAGACATTGATATGAAGC
ACCTTTTCCAAAGAAGTACCGAATGTTTCAGATCCTTGGCTTTTTGTCTACCCATTTTACATTCCTACAA
AAGTCTTAACTAAGAGAAGTTGCTTGGAAAGGGGACACTTAGTAGCAAGTAATGGAAGTGAAGCAAGACG
AAGTGAAGCAGGAATGAGATTCCAATGGGTAGATGTGGAAGTAAATGAAATTTGAGATTTCTCAGCTTTG
ACAGTTCCACATTTAAAGACCAAATGTGACAATCATAGTATCTGAATTCAGTGGGGTGGGTTTTATTGTT
GGTTCAGCATTTTCCTAGGTGGGTCTAGAATATGAATCTTGGCTTTGCCAGTCTTTTACATTTCTCTCTT
CCTCTTATTGCATTGGTCCGAAGCTTTATAAATTATTATTTAATTAATTAATTAATTTATAGATGGGGTC
TCACTCTGTCACCCAGGCTGGAGTGCAGTGGCACAATCATAGCTCACTGCAGCCTCAACCTCCTGGGCTC
AAGCAATCCCCCACCTCAGCCACCTGAGTAACTAGGAATACAGGTGTGCAACACCACACCCTGCTAATTT
TTTTTTTTTTTTTTTTTTTTTGTAGAGATGGGGTTTCACCATGTTGCCAGCCTGAGCTTTACAAATTATT
ATTGCTGTTTTTACTACTGATGTAAAAATTCGTTATGGGTTTCTTTGAAAGGGTTTTTAAGAATATACTG
TTAAGTTTGTTTTAACATTTAAAAACTATTTTTTAAAATTCAAACCCACTTCTTATTTGTTTATTATTAT
TATTTTGGGAGACAGGGTCTTGCTCTGTTGCCCAGGCTGGAGTGCAGTGGTGCAATCATGGCTCACTGCA
ACCTTGATGTCCTTGGCTCCAGCAATCCTCCAGCCTCAACCCCCTCAGTGGCTGGGACTGCTAGTGTGCA
CCACCAGGTCCAACTAATTAAAAACACTTTTTGAAATAGAGATGGGGTCTTGTTGTATTGCTCAGGCTGA
TCTTGAGCTCCTGACTTTAAGTGATCCCCCTGCTTCAGCCTCCCAAAGTGGTGGTATTACAGGTGTGAAC
CGCTGTACCTGGCTGCATTTTCAATTTTATAATAGAAATATTCTTTTCAAGCAGTGGAGAAATTCCTCTA
TACTGTTAAGGTCGTGGTCCCTATAAGATGAGGAATCCTTGTGGATTTGTGCAAATATTTGAAGGCTTAA
AAATTCCTTTGGAGATGTAGACTTAAAGATATTGGTAAATTGCATTATCATGTTTTTGTTTCAAAAACAT
TGACCTAAAAGTTCATTTGTTCTGTTTTGCTACTTTGGACCAAAAACCATGAGTTTAGAAACTAAAACTA
AAATGGCATAATTCTAATTTTGGTTATCATATGAAAGTTAACTATATTTTTACTACTGTATTATTAGTTC
TTTTTGTTTGTTTTTAACCACAGAGAAGTAAAAAGAAGAAAGCAACAGAATAGGCCATAATCTCCAATCA
TAACTTTTGTAGTCATTTTATACCTGTAATGTTTGTTAGGTTAGGAAGTATAAACAGAACAGAAAGGTAC
AAAACCTAAATTCTCCCATCTTGAAAAGTAGCCATCATATGTAAACAATTCCTTAATATGTAAGAAATAT
TAGGATATGTAAACACAAGTTGTACCTTGTTTTTGAAATTTAATATACCTTAGAGATCGTCCTCTGTCAG
TACATATCTCATTTTTCAAAAGTAGCCACATAGTATCCCATTGTGTCAATTTAATTAGTTCTTTGTTAGT
GGGTACTTTGGTGGTTGAGTTTTTTTGCCATTGAACAGTGCTCTTATTACATTGTACATAGATGAGCTTT
TGTGACTATATCTGTAACAGAGACTCTTAGCAGTGGGATTGATGATGGAAGGTATATCTGCATTTCAAAA
TTTTGTTACATGTTGCTTTCTCCATCTATCCAAGCTACTATTGATGAACCTGTTTTCTCACACTCTTGCC
CAAATTCTTAATAGTAGGTAGTGGAATTTTTTGTGTCTCAATTTGACAGGGGAAATGGCATCTCCTGGTT
TAATTTGCATTTCTTAGGACTGAGGCTGTGAGTCGTTTTGTAATCTTGTGTGTCATTTGTTTTTTATTTT
CTCAGTGAACTGTGTGTTTATATCCTCTGCCTCTTTTTCTTATTGATTTATATGAGCTATTTAAATAGGA
AAAAAGGAAGTTAGCAGTATATATGCCTTATGTGTTGCATATGTTTTTCCAGTCTGTTATTGCATTTTCT
GCTTTGTTTATGGAAACTTAATTGATTTTAATATAAAAATTTCTGGGAAAATTGACCTATTTAATGAGAC
TGCAGTAGAATTTTTATCTAGATCTATTTAGATTTACCTGTAACTTATAATGAAAACCTATGTACCTTAT
AGTTCAAGATAATTATTTACTAATAGCAGAAAATGTTAATGCCATATATGTAGTATTATTATTCAAGACA
TTTTCTTTTCTTTATATATAGATCAAGCTTCTGAAATTCAGGTGACAATGATGCTCACTGAAAGTTGTAA
GCTGCGAGGTCTTCATCACAGGTGAGAGGAGAAACCACCAGCATTTCAGTGTTGAGCATGGCAACACTTG
ATGCCACATTTTTATGTGCAGAACATTGTGATGACTTCTGAATTGAAAGCTTTGTGGAATAGCTTAATTT
TTTTTTCTGAATATAAAAGTGAAATGCATTCTCATTGCACAAAACTTACAAACACAGTAAAGTATAAAAG
AAAACAAAGAATAGTATGTAAGCCCACATCTGGATAATCATAGCTAATCTAGCTGATCTTTCCAGAAATA
ATTTATACATATTTATGTGCACATTTCCCTTTAAAAAATAGGATGATGGTTTACATATGTTAAAAAATAT
TTGTTATGAGATTTTTGAACGTATAGGACCTCAAAGTCAAGTATAATAAACATGAATAAATCTTCCTTCT
AGATGCAGTAATAGTTAACATTTTGCCATATTTTCTGTGTTGTGTATGTTTGTGTATTTATCCATCTGTA
TCTAGAGACATATCTCTAGATACAGGTATCTATATATTTGTGTATATAACTATTTTATAATAAATTAGAC
ATCTCAGTACTTTTAGTGCATGTCCAGCATGTATTTTCAATAAAAAGAAGATAGTTTTCTTTATAATCAT
AATATCACTGTTGTCTTTGACAAAGTTAACATGCTTCTTAATTTAATGAAACAATGTATCTGACTTTTGA
TATTGGCAACTGTAAATCCATGTAGCCATTTAAAAAGGCTACATAGTAGTCCACTGAATGGATGTACCAC
ATTTTATTTAACTAATTTCTGGTATACAATCATTATGCCATAGCATGATTTTTAAAAACTACTTATAGTT
CTATATGAAGACCTTTTTTTTTTTTTTGGAGACAGAGTCTCGCTCTGTCACCCAGGCTAGAGTGCAGTGG
TGTGATCTTGGCTCACTGCAAGCTCTGCCTCCCTGGTTCACGCCATTCTCCTACCTCAGCCTCCTGAGTA
GCTGGGACTATAGGCACGCCTGGCTAATTTTTTCTATTTTTAGTAGAGACAGGGTTTCACCGTGTTAGCC
ACGATGGTCTCGATCTCCTGACCTCATGATCTGCCCACCTCGGCCTCCCAAAGTGCTGGGATTACAGGCA
TGAGCCACTGTGCCCGGCCATGAAGACCTTTTTTAAAAGCTTGGTATTGGTCCTGTTCACAGAACTGTAA
CAAAAACTTCTACCTTTTGAGCCAGAAGCAGCTTAAATGTAACATCATAATGTGTGACAGTATCAACATT
AGAGCAAATTTTTTTAAAGCACTATATAGAGTCAACATAATTTGTATGTCTACTGAAAATTTGATCACAT
ATGTTTAAAAAAAGAACTGTGGTTATCTCTGTTGGAAGATGTTTATAGGCTTCTGAAAAAATATAGTTTC
TGTATACTTTAGACAGTTCCTTGAGTTCTGCTGAAAAATAAGGTGACTACCCAGAGCCTTACTTTTAAAT
TTAGTTATATTTTGGTTCATATTCAGAAGGATTTGAGGACCTAAAAAGAAGGCAGCCACAGTAAGATAAA
TAAAATGGTAATGAAAAAGAAACTGAGTTTTTTGGCATTGTGGTGGTAAAAAAGAAAACAAATGAGCCAG
CAGTAAGGAGAACAAATATTTTTACTGTGACTGAACATAAAACACCTCCTAGCTTCTCGGCAACCAAGGG
TGAAGGAAACACTAAAAGTTGATAATCTCAGTAGCAGAAGGGAAAGAAACAGTTGGAATATTGTCCTTTT
TGGCAGTGTTGAAAGTGCTTAATGGTCTATTACACTGACTCTAGGGAGAAGGGCCAAAGGTGTTTAATCC
TAGTATATAATGTTAACCTATTACTTAGATACCTAGCCAATGTTCTTACCCCAGTGAAAGGTTTGCATCA
CTTCAGCACAGAAGTGAGTAGCAGGGATAAATGTAGACAAAGCCAGGATTTTCCCAAGAAACGGTTTTAT
ATTCACTGTAGCCTTAAAGATGTCTTGGCTGAAAAATGCTCAGAGCAAGCATTTGCAGTGTTGTGTCTCA
TGCAGTTTTAGATTGTAAGGTTTTGCAGCATCCCATCAGGATGAATTAGCAGTCTCAGGAGGTCCTTAGG
GAATTGAATGACATTACATACTAAATTGGGGTTATTTGATACTGAGCATTCAGTCCTTGAGGAAAGTCTT
GTAAAGGTAGGTTATAGCTTGATTATGCTTAATTGTTCTTCCTTCTATGAGGTGATAGCAGGAGTCCTAG
TTACAATGAATAAAACACATTGTCAGCATGTAGAAAGTATATTATTCTTTCCATTCATTGTAGCAGTTCA
TTTCATTTTTAAGGTGACCAGGGCCTATCACACATTTTGTTTTGATCCTTAATATGTATAGACTGTTCAT
AGCTATACTTATGTATTTGTTTGTTCATTCTTTTATTCTAATTCATTCAGTACCCATTTTGCACTTGGAA
CTGTGTTAGGCAGAATGAAAATGAAATGATCTTCAGAGATCGTATTATAGAATTTATCAAGCAACAGAAT
ATAGAATTTATTCAGCAAGAAAAGACACCTGTTTTTAGATTTTACCTTGTGGTATGTAATACAGCATGTT
TGCTTCATGTTTTAACATCCATGGTTACGGATTGTACGCGTATTGAAGTGTTTTAAAGCATTTTGAAATC
CTTTCTTTTCACACATTTTTCCACTGGAATTTATGAAAATAATTTTATTAAAAGTTAAAATAGCTGTATA
CATAAAAGATATTAACCTATTTTAATTTCATTAGAAGTGCTTCACATCAAAGTACTCTTGCGCTATTTCT
GCTTGTAGTTTGGCCCCTTCATTGGCCCAAAGATGCCTGATGGTGAACACTTCTTATGCCAAATGGCTCA
CAGCTCTCCCTCTGCAAACGCCCTCAACAAGACTGAGAATTAGAGGCAGTTCTTGTGCCAAGCCCCACAG
AACCTACCCTTCCTGTACCTTCTTTCTTCACTATAGCATCTCCTGCTTTCATTCACTCTTCTTAGAGATC
CAGACCTTCCCCTTCATCCTCCTTTTCATTACAAGATGGGCAGAATGAAAAACAGCCATTTGTACTTTGA
AACATTTTCATGAAGTTTGTTAGCTCTACCAGTGGATTTTTAATCCTGTGGTAGTGGAATAAAAGATTTG
ACTTCACCCAGCAAACCTAATGGATAAAATGTCTTTAACTCTGCTAAATGAATTTCAGTCACAAAGAAAG
AAACAGAAGTAATCTTTGGTGAGTTAAATAGATTGGGCAACAGTGTTTAATGGTATGCCCAAGTTAATCC
TTAGTGTAAACCTGTAGTCATTTTAGTATTCATGGGAGTTGGTGGAAAGGAAGCTCTGTAATCTCCCATG
TGATCTCCCTTGCTCCTCTGGAGAGAAAGTCTAGTGGTCCAGGGGAATGCAAAGGGTATTGAATCAGATG
AAGATCTGATATTTTTCTCCGTGTACTTGCTCTTTGTCCTTGGCAGGTTACCTAAACTTTCTCTCCCAGC
GTGGATTTCCTTGCATATAAAGTGGAACTCCTAATCGCTGCCACTTGAGCGGTTATAGAGAGGTTGCCTC
TTAGAGGTTTACTGATCTTTAAGTCCTCATTTTCCCACCTCCTCAGGGTCAGTGCTTTCCATGTTAGTAA
CTCCTGCAAATATGAGGGGAGCGCACAGCTTTGCCACTTGTGCATTGGTGATTGTGCCACGGTTTTATAA
CTGGGGTTTAAAAAGTGATACATGCTCAATTAAGACAATTTTTAGGAAATACAGAAAACAAAGCTGAAAT
TATCTATAGTCTTACAACTTAAAGACAACTCTTAACTCTTTGCATATTTCCATGCAGACCTTTATTATTT
TTCTCCATTTTTATAATTATCTTGCAAATGGGAATTTTTTATCTTACTTTCTTGTAAGATAAGCTTTTAC
TTATATTCTCATATTGTGACCAATTGTGACTTATTATCCTGTTATTCTTTCCTTATTAAACATCCTTAGA
AGCAGGATTTGCCAAGTTAAGGAGTAGGAATGTTTTAAGGCTATTTGTTACTGTTATTTGTTATTAAATG
TTTGTTTTATATAGCATAGATTACGAAGTGTTGGGTATAAAAATTGAGTTTACCTTAGTTTTTGTCTTCT
AGCAATTTTTAGCTTAGTGGGGAAGATGATATAATTATGTAAAAAGTTACATAACCTTGGGAAAAATTAG
CAGTTATTTCCAGATGTCAGTGGAGGAGGTGTTATTAGACAGTAGGATGAAATGTATGTATGTATGCCAT
AGAAATTAAAATAGGAACGGGATTGTCCACTACATGCTTGGTTTTATTTTGCACATCACAGCAACCTTTT
ATGGTTGGTGGGGTCCCTATGTTATAAGAATGGAAACCAAAGCCAAGAGAAGATGGTCACTCTGATAGTA
ATTGGTAAATCTAGGATTCAAAAATCTGATTCTAAATCCAGTGTGACCAGCTAAGAACTTTTTGGCTTTT
GTGGCAGTTTCAGCCTTTTAGAGACCTTTTTTGATGATCATATTCTTGACCACCGTCTGGATTGGGCCTT
TTTTTTTTTTCATGTGTGATAATGGAGTAAGTGGGATATTGTTATCATAATACACTCATGGGCAAGTCAG
TTTTTAGATGTCTCTGATTAATTGCCCTTTGGAGTAAAGATATAGTGTGGTTAGAGTGTGCCTTCAGAGA
ATCCAGCCCACAGGAAGCAACTTTGAGTTTATGATTTTTCCCTACCAAGAATGTGCATATATGGGGATAT
ATGCACATATATAGGGGACACTTAAGTCTGGTTTAAAATACAGAACACTTATAATTTTACATTTTTAATG
GTAATCATGTTTTTAAGTATTTTGGGGATTTTGTTTTGTTTTAGATTATTTTTATTAGAAGTAAGCCCCT
AACATTTTGGATTCCTTTGTCTTTCTCCCAATTTTTTATTATTTTATAGAAATCTTCTTCCTATTACTCA
TGTGTGTATAGAAGAAGGAGAAAAGCCCATGGTGATATTGCCTTACATGAATTGGGGGAATCTTAAATTG
TTTTTACGACAGTGCAAGTTAGTAGAGGCCAATAATCCACAGGTGAGAAAAATTTGCCCAAATACCAATT
ATTTACCAGTAGTTTCTGATAATGTCTTTGAAAGTAGATATTAACATTCTTAAATATAAACTGTTTAGAG
GCCTGCAAAAAAGAACCTCAAAATGAACCACAAGATATTTATAACCTGTTGGCTTAAAGGAAAATGTTGG
CTTATGTTCCTGCCTTGAGGCTTACACTGTGCTGATGCTGAAGTTTTCCTTATATTCTCGTTGTGTACTT
ATTCATAATCAACTCAAACCCTTTGTAATGCCATCTTAGGTGTTTTCCTGATAACTGAGGGTACTTGTCC
TAGATCTTCCTCTTAGGAATGGAAACAGACTTTCTAGAGCCATTTGGTTCATACTATACCAAAGTCTGGT
GATGACTGGAGGTCTAGATTGTGGGAGATAATTGGATGTATTGTTAATATGCGTGGCTGTAAGATGGCAG
TCATCTAAGAGTGTTTCTCTTCCCTGCTTGTGTTTATAACTGTAAAGCAAAGGTCAGATACCAAGCATAT
TATGATGGTAGTGGTAGTAAAGCCTAGTGGGTTTTTTTTGCTGTCAGCTGTATCTTGTTGTCCCATTAAG
TTGCTTTAGGATTTATAATAGTATGCTTATTATAGTTGCCAGGAGAAAGTGGGTTCAAAGGCTGCATTCA
GTATTTGGCCTAATATGTATCATATGCTTTGTAAATTGACAAGACTAAAGCTGGGATTCTCAATAAGTGG
TTAGAGGCTGTGGCTCATCTGCATTACCTGGGGAAGGATTTTATTCCTCAGCCCCAAGTACTGTCATACA
CCTAGAAGAACACATCAGCAGAAAAAGCTAGGAGCTCGTACTTTGGGTTTGTGTGTGGTTTTTTTTTGTT
TGTTTTTTGTTTTTTGTGTTTTTTTTTGAGATGGAGTCTCGCTCTGTCGCCCAGGCTAGAGTGCAGTGGC
GTGATCTCAGCACTGCCAGCTCTGCCTCCCAGGTTCACGCCGTTCTCCTGCCTCAGCCTCCCGAGTAGCT
GGGACTACAGGCGCCTGCCACCACGCCCGGCTAATTTTTTGTATTTTTAGTAGACGGGGTTTCACCGTGG
TAGCCAGGATGGTCTCAATCTCCTGACCTCGTGATCTGCCTGCCTCAGCCTCCCAAAGTGCTGGGATTAC
AAATGTGAGCCACCGCACCCAGCTGCAGGGTTTTTTTGTTTTTTGTTTCATTAGACAGGATCTCAGTCAC
CAAGGGTAGAGGGCAGTGGTGTGATCACAGCTCACTGCAGCCTCAACCTCCCATGCTTAAGCAATCCTCC
CACCTCAGCCTCCTGAGTAGCTGGGACCACAGGAACATGCCACCATACCTGGCTAATTTAAAAAAAAATC
ATTTTGTGTAGAGACAGGGCCTCAGTATGTTGTCCAGGTTGGTCTCGAACTCCTGGGCTCAAGTGATCCT
CCCACCTCAGCCTTCCCAAGTGCTGGGATTATAGGCATGAGCCACTGCACCAGGCTTAGATTTGTGTTAA
TTTGAAAATAATCCCAAAGAGAGAATCTCCTAATAAAAACTACTGTTTGGGGGAAAAAAAGATTACTGAA
TTATAAACATTTGAAATATTACCTTGAGAACTCAGCATTCACTGAACAGATGTATTGAGCAGCTGCTGTG
TGTGCTGGATATTGGGGAGATACATCTAACAGATGAAAGGAGACAGAGTAAATGGTAGATTACAGAATAA
TAAGGACTACAGTTGATATAAGTATAGGGATATATGGGAACATAGTCTTGGTCAAGAAATAGCTTTTAAA
AATTCTGTGTGTAGGTTTAAAGCAGTATTTTTGGATGGAGTAGGATTGTGGAATAAAAAAAGTAAGAAAG
TGCCATCATATTTGTGTGCTATTTGCAAACCATGTTATTTTTTGTTACCACAGGCAATTTCTCAGCAAGA
CCTGGTACACATGGCTATTCAGATTGCCTGTGGAATGAGCTACCTGGCCAGAAGGGAAGTCATCCACAAA
GACCTGGCTGCCAGGAACTGTGTGTAGGTGCCATGAGCTTGACGCTGTCACTTGATGTAGAGTGCTTCCT
GGATTTGGGGTTCTCTGCGAGTCACAGTGGGACTTGTGTTGTATTTAAGGGTGGTGATGATCCCTACTTT
TTAATACTCTGATTGCATTTGATGTTCATATCTTTACTTTTCAGCATTGATGACACACTTCAAGTTAAGA
TCACAGACAATGCCCTCTCCAGAGACTTGTTCCCCATGGACTATCACTGTCTGGGGGACAATGAAAACAG
GCCAGTTCGTTGGATGGCTCTTGAAAGTCTGGTTAATAACGAGTTCTCTAGCGCTAGTGATGTGGTAAGT
GCCGGGACCCCCAGATAGCAAAAGAATAGAGAAACAGCTTTCTGTTTTTAAATGTTCTACTATTTTTATC
TTTTGGGTTTTTAAAAAATCTGCTAGCTGTTCCCGGAAATTTTTATCCAGAAAGCAAGTGTAATTAGCTG
CCAGTCAACCAGTTTATGGAGAGGAGCTGTGACCCAGACCATAGGCCAGCACTGTTTGTAATCTCATTTC
ATCCTCACAGTACTGCTCTGACAGAAGCACTTTTTTTTTTTTTTTTTTTAAGACAGAGTTCCACTCTTGT
AGCCCAGGCTGGAGTGCAATGGCGCAATCCTGGCTCACTGCAACCTCTGCCTACCAGGTTCAAGCGATTC
TCAGGCCTCAGCCTCCCAGGTAGCTGGGATTACAGGCGTGTGCCACCATGGGCACATGCCCAGCTAATTT
TGTATTTTTAGTAGAGACGGGGTTTCACCATGTTGGCCAGGCTGGTCTTGAACTCCTGACCTCAGTTGAT
CCACCTGCCTCCGCCTCCCAAAGTCCTGGGATTACAGGTGTGAGCCACCACGCCCATTGACAGAAGCACT
ATTAACACTAGGAGATAGGCTGTGGTATCCCAGTTTTAAAGGTGAGGATTTTGAGACTCAGAGCAGTTAC
AGTAATTTCATTATTATTTCTTTCTTATATAAGAGGCAGACCAAATAGTTGCTAGATCATAAAGATGTTT
TCTTTTTTTCAGGTGACCTCTTCTAAGTGTTATGGCTCATAAAATTTGTAAATCCCCCCGTCATCCTCTT
CCTTTTGTCAAGTTTCTGGGTGGTTTTGCCACTTAGCCAGATCATAGTTGGGCCCTTTGTGATGTACAGT
TTCAGAAGCCACGTTCACTTGTTCATATTTTACAGCCATGTAAAATTTCTGTCACTTGATTTCTTAGTCT
TATTTGGAAGACTAAGTGTAATTTATTTTCCTGTCTCTTGCCTGTTAGACTTTATTATTGTTGCAGAATA
TTTAGGGATTAGGTAAAACTTCTGCTTATAGGGTCCCACATATGTTCACTCAGTGATAATCTGTTTGTGT
TATATGTAAAATCCTATAGAATAATTTGCTTCTAAGCTTCAACTGTAAGAATTGGGCTTACTGTATCATT
GTATTTTGTGTGTCTATATTTTAAAATTTAGGGCTACTCTTTTGTTTCAAAGTGTGTATGTTTTAAGGAT
TAATCTTTTAATCATGTATTACTGTACGCTAATTAATTATATTAATTGGTATATACTCATTTCCTCGGTG
TATGAGTTTTCTGTGGCTGCTGTAGCAAATTACTACAACCTTGGTGGCTTAAAACAATAGAAATATAGTC
TCTCGTGGTTCACTTCTGAGGCCAAATGTCTGAAATCAAGGTGTAGTCAGGGCTGGGCTCCTTCCAGAGG
CTCTAGTGGAGAAGCAGTCCTTGCCTCTTTCAGCTCTGGTGGCTGTTGGCATTCTTTGGCTTGCGGTTCC
ATCCCTCTGTTCCAAGTTCATACCACCTTCTTCTTCACATACGTCTTTCAAACTCTCTTTGCCTCCCTCT
TAAAAGGATACATATGATTTAGAACCCACTTACATAATCCAGAATAAACTTTTCCTCTCAAGATCCTTAA
TCACGTTTTGTCATGTAAGGTAATTACAAGTTTCAGGGAGTAGGACATGGGCATATCTTTGGGGCTACCA
TTCAGTTCACTGCAGTCAATAATTGAAATGATCTAAGATTTCTTTACTGAAAAACTGATATTCTAATTTA
AAATCCTTAAAATGAGAATAATTTGAGAAAGGGGAAAATTCCTTTAATTAACTCTAACTACTAAATAAAT
TTTTTTTCCTTTTTAGAAACTATGTGCTATTTGATATTGATATGGTTTGGCTATGTCCCCACCCAAAATC
TCATCTTGAATTGGAATTCCCATAATCCCCACGTCAAGGGCGAGACCAAGGGTGGAGATAATTGGATCAT
GGGGGGCAGGTTCCCCCATGCTGTTCTAGTGAGTCTCACGAGATCTGATGCTTTTATCAGCGTCTGGCAT
TTCCCCTGCTCACACTCACTCCATCCTGCCACCCTGTGAGGAAGGTGCCTGCTTCTTCTTTTCCTTCGTC
ATGATTGTAAGTTTCCTGGGGCCTCTCCATCATTGCAGAAATAAGTCAATTCAACCTCTCTCCTTTATAA
ATTACTCAGTCTTGGGTATTTATTCATAGCAGTGTGAGAAGGGACTAATACAGATATATTGCTCCTTTTA
CATACCAAGTATTTTGATAAAATGTGTTCACTTAATGTGAATGAGCAATTTACTTATATAATTTTTAAAT
TTTTTTTTTTTTTGAGACAGAGTCTCGCTCTATCACCAGACTGGAGTGCAGTGGCGCGATTGCAGCTCAG
TGCAACCTCCGCCTCCTGGGTTCATGCGATTCTCCTGCCTCAGCCTCCTGAGTAGCTGGGACTATAGGCG
CGCACCACCATGCCTAGCTAATTTTGTTAAAATCAAGGTCTTTCATTTTATATATCTTCAAAATACTTTG
TTTTAACTCAAGATAAACTATTCTCAAAGAAACAATTTATCTGACATTTGTGAGATGAACAAAGTAAATA
TGAATGATTATGAGAAGGGATGTGATCTGCTTCACAGAGCAGTCTCAGAAGCTAACACTGAATGACAACC
TGTTTCATGTTGTCCACAGCCTCTCCTAGCCAGAGAGGCATCGGGCATGGTGGGTGATGGGTGGCAGGAT
GAGGGAAATAAAGCCAGACTCTTGGATACTGAATCCCAGGGTTCAGCTTATAGAGCAGTGGGGTACTAGT
CCTGGTCTGTTTTTCCAGAGCTCTGATGATAAAGAAAAAATCTCTCTCTAGCATTAATGTCTAGAAGTTA
AACATACCAAGTAAAGCAGTACAAATATGCAAAGCAGGTTATATTCTTTTTAAATCTCTACGTAATGAGA
ACCTGGGCTTTTTTTTAGGGAGAGAAAGGTTACATTTTTGGTTTTGATTTTTATATTTTTCAAATGACAT
ACGAAGGGAAAGCAGAGTTTGATTTTAGACCAATGCACAGCTGCTGTACTGAATGACAGTAAGGACTAGT
TCTACTCTTTGATAATGTTTTTGGTTTTAGAGTTGCCAAATCTTTATTCAGAAATTCTGAATTGTAGCTG
GAACTGTTTACCAGCTCTACATTAAGCAAAGCTATTTTCATGGAGTGGGAAAGGGGACAGGAGGAATTGG
TTTGGCTTTGGTTGTAGAACATAATTTTAAAACATAATATCAGTTGAATTAGAGCAGTGTGATCTCAAAT
TTACTCCTTTAGTAAAAGCTCACATCTAAACATTTTTAAATGTAGAAAAGTGAAGTAAACTTTTCTTAGT
GTTTACTTTGAAAATTTTATTCCGTAGTTGATTTAAAAGATGGATTCACTCGTCTCTTTGGGATGTTAAT
TTTTTTATTTCCAGTGGTTGATTTAAAATTTTTATTTTGTTATTTATTGAAATATAGTTGCCTTTGCTGA
AATGATATGGCTGTTGTGGTGAACCAAAACTAGTTCGATGGGCAGAAAATGGAAGATAATTCTTAGATGA
TAATCTATAAGTATTTCGTGTAATTTGAAGAGGTTGGAAATCTTTTTATTATTCTCTTAGAAAAAGGAGC
ATTGATAGCTTGTATTTCAAAGGGGTATGCAAGATGGCAAGTAGTGCTATTTGCTTGCACAGTGGAGGCC
CCCAAAATATGTATTACTTTTTTTTTTTTTCCTTAGCTACTTCTGTTGCCCAGGTGGGAGTGCAGTGGTA
CAGTCATAGCTCAGTGTAGCCTTGTACTCCTGGGCTCAAGTGGTCCTCCTGCCTCAGCCTCCTGAGTAGC
TAGGACTACCAGTGTGTGCCACCACACGTGGCTAATTCTTTTATTTTTTGTAGAGATGGAGGCTTGCTGT
GTTGCCCAGGCTGATCTTGTACCCCTAAGCTCAAGCGATCCTCCTGCCTTGACCTCTCAAAGCACTGGGA
TTACAGGCGGGAGCCACTGCACCCAGCCTGTATTACTTAATTTAACGTATTTATTTCTGTGTAGGTATAC
CATTGTATAATTAAGCGATGATAGGAATTATTTTTTTGTAACATTTATGATTAAATATTTTGTAGGACCT
ACAGAGTGAAAATTAAGTTAGATAATATACTTTCAACAAATGAGGCTATAGCTAATAATAAATCTCCAAG
CAAGATGCTCCAAGAGCGTTGAGTCTCTTCAGCTGGGTATTAGCTGGCAAAGTTCATGTTGAGGATACAT
GGTTTGGTTAGGCAGAACATTTCAAATTATATCAGAAATAGTTATTTTTATGGTTATGACATTTTGCAGG
AGTTCACACATTTTATGTAAGAATCTGCCATCATCAGAATGCAGTTACACCAAATACTTAGTTGCTTGTT
CATGTGGCAGCTTTATTTTAAAATATCACCATTAACTTAATGGTGAGCAGATTCACAAGAGAATTACTTT
AGTTAGTTATTTAGTTTGTTATTACAGATAGAGTTTTTTATTCATTCTCCTCCTCCGCCTCTTCCTCCTC
GTCATCTTTGCCTTTCTCTTCCACCTTTGTCCAGACAACTTTAGTGGGACCTTTTGCGCCATCAGATTTT
CCTTTAGACTTGCAGTTAGCAACATCCTTCTCATACTTCTCCTTCAGCTTTGTTGCCTTTGTGATGCAAA
GCTGCTTTTTAGTGTCACTTAAATTACTCCACCTCTCACCTAGCTTTTTTGCCACATCTCCAATAGAGAT
GCCAGGGTCTGAATTCTTGGGGCAGAATTCTGAACAGAACAGGAAGAATCTGGACAGTGACCTTTTGGGG
ACATTGAGGTCCTTTTTGTTTTTTATTTTTTTGTTTTGCCTCCCTTAGATAGTCCATAATCCTTCATTTC
TGAATCATAGCATATTTTATCTACTTTTGCCATTTCATCAGATTTAGACTTCTCTTTCCCAGACATTGTC
TTCCACTTCTCAGTGTACTTTTGGACAATTTTGCAAAAATTGACAGGGATCTTTGGGTTTTTCTGCTTAG
GTTCTCTGTATGCCTGCACAAAGAAGGCATAAGCAAACATCTTGCCTTTTGGTTTTGTGGAGTAGCTTTT
AGCCACCCTGACTGAATTGTTCATGAGTCTGGGCAGCACAGGGCATGACATGTAGCTTAGTGATTCCCCA
GCCTCACGCTAGCTGCCTCCACAAAAGGCACCTCAACAGGAGAATTACTTTAACATCATAATTACTTTCA
GTGTGTTTTGGCATAAACTTACTTGAAATAGCTGTGTGACCCAAATTTTCTGAGCTATACTTAGCATGTG
ATGTTAACAATATCCTCCGATTTGCATTTAACGTGGTTAACTCCTAGAAAGTGCTCACATTTTTCTTTTG
TAGCTTATTATAAATTTGTTTCCATATATATGTATGTGTGTATATACAATCCCACACACACATATGTATG
TATGTATCGCCTTTGCTTTAGATAATTGGAATTGAAAGGACTAGGAACACCCTTCTGTTTTCCATGACTA
TGATGTGACTGTTCGTGTAAAAGTCCTGCCTTTTAGTTTTTTGGGATTGAATTTTTTTTAATTCTTAAAA
TATTTTAAAGCACACTTGTTGAAGATTGCTTTTTAACATTTGGGTTGGAAATGTGTACACACAGTCATTA
TATTCTGTTACCATTTTTTCTTTATGGGTGAAGTTGGGGGCTTAAAAGTTACATTTAATATTCTATTTTT
GGACACTTCCACCAGAGTCTATACACATGTGAAATACATATTTTTAGATGTAAATGTAGCACCCAACAAA
TGATACTGCTGCCTTGGAGGGAACATTTTCTCGGTCCTTTAAGACATCCTTAACATTTTTGCATTTCTTC
ATAATTAAAAATTCTACACGATTTATTTAGAAATACATTGATGTTTTCCATCATGAAAATAATACATTGC
ATCTCTGGGCTGTGTTTTCAGAATTTTTACTGAAAGGATTCAATATTTCAGTATGTCCAGATTCTTCTGT
TAACGTCAACTTTTAACTGTTGAGCTTAAGAACTATGCACATCAAGATTTGACTAGTTATAAATGTCTAA
TATTATTCCAAGATATGACATCATTGTAGGCATTCTTAAGAATTTCTGGATATTGTTTTTATTGTGTTTT
CATCAGATGTGGATACCACCATAAATTTTTTTATGTGACTTTCTTTTCCTTTATTTGAAAATAGAGTTCT
TGATTTACATCTTCTTTGAATTACTTAGCTAATTATAGTAGCTAACGTAATTCTGCTCTTAAGAACTACT
TTCTATTAGGAGATTACTAAATGTAATCAGGAGTATGCAGTTAGGAATTTCTTTCTTATTGGTTTTCTTG
TCTTTATAGTATTACATTGTGTTTAAGAAGCATTTTCTTAAGAAAAACAAGTCAAGGAAATAACTTCCAT
GCCAAATATTATCAGCATGGTTTATGGCAGTGAAGAGATCCTTTTAAAAGTATTTGAACAGTTTTTAGGG
GATAGGACAAATCAAAATGTGTTGCTTGTGCCTTTACATTATTTATTTTGTGACTATCAATGATCACCTA
GAAAATAAAAGGAAGTCTGGAGTTATCCAGAGACTGCATCTGCAGCACATTGCTACGTATGACTCTTTTA
ACTCCCTGTTTGCCCAGTGCTGTGGAGGGAGCCCAGTGCTTGTTGTATCCTGAGCGACCTGAGCGGGAGA
GTCTGACATTTATTATATACCCATGGAAAGTAGTCTGCTGAACTACTGTGGTATCAAAGAGAAAGCTAGA
GTTACGGAGGATGCTTCTTCTTATTATTATTATTTTATTTTTTATTATACTTTAAGTTCTAAGGTACATG
TGCATAACATGCAGGTTTGTTACATATGTATACATGTGCCATGTTGGTGTGCTGCACCCATTAACTCATC
ATTCACATTAGGTATATCTCCTAATGCTATCCCTCCCCCATCCCCCTACCCTACGAAGGCCCCGGTGTGT
GATGTTCCCCTTCCTGTGTCCAAGTGTTCTCATTGTTCAATTCCCACCTATGAGTGTGAACATGCGGTGT
TTGGTTTTTTGTCCTTGCGATAGTTTGCTGAGAATGATGGTTTCTAGTTTCGTCCATGTCCCTACAAAGG
ACATGAACTCATCCTTTTTTATGGCTGCATAGCATTCCATGGTGTATATGTGCCACATTTTCTTAATCCA
GTCTATCATTGATGGACATTTGGGTTGGTTCCAAGTCTTTGCTGTCGTGAATAGTGCCTCAATAAACATA
CGTGTGCATGTGTCTTTATAGCAGCATGATTTATACTCCTTTGGGTAGATACCCAGTAATGGGATGGCTG
GGTCAAATGGTATTTCTAGTTCTAGATCCTTGAGGAATCACCACACTGTCTTCAACAATGGTTGAACTAG
TTTACAGTCCCACCAACAGTGTAAAAGTGTTTCTATTTCTCCACATCCTCTCCATCACCTGTTGTTTCCT
GACTTTTTAATGATTGCCATTCTAACTGGTGTGAGATGGTATCTCATTGTGGTTTTGATTTGCATTTCTC
TGATGGCCAGTGATGATGAGCATTTTTTCATGTGTCTTTTGGCTGCATAAATGTCTTCTTTTGAGAAGTA
TCTGTTCATATCCTTTGCCCACTCTTTGATGGGGTTGTTTTTTTCTTGTAAATTTGTTTGAGTTCTTTGT
AGATTCTGGATATTAGCCCTTTGTCAGATGAGTAGATTACAAAAATTTTCTCCCATTTTGTAGGTTGCCT
GTTCACTCTGACGGTAGCTTCTTTCGCTGTGCAGAAGCTCTTTAGTTTAATTAGATCCCATTTGTCAATT
TTGGCTTTTGTTGCCATTGCTTTTGGTGTTTTAGACGTGAAGTCCTTGCTCATGCCTATGTCCTGAATGG
TATTGCCTAGGTTTTCTTCTATTGTTTTTATGGTTTTAGGTCTGACATTTAAGTCTTTAATCCATCTTGA
ATTAATGTTTGTATAAGGTGTAAGGAAGGGATCCAGTTTCACCTTTCTACATATGGCTATCCAGTTTCAC
CTTTCTACATATGGCTAGCCAGTTTTCCCAGCACCATTTATTAAATAGGGAATCCTTTCCCCATTTCTTG
TTTTTGTCAGGTTTGTCAAAGATCAGATAGTTGTAGATGTGTAGTATTATTTTTGAGGGCTCTATTCTGT
TCCATTGGTCTATATCTCTGTTTTGGTACCAGTACCATGCTGTTTTGGTTACTGTAGCCTTGTAGTATAG
TTTGAAGTCAGGTAGCATGATACCTCCAGCTTTGTTCTTCTGGCTTAGGATTGTCTTGGCAATGCGGGCT
CTTTTTTTGGTTCCATATGAACTTTAAAGTAGTTTTTGAATCTGTAAATTACCTTGGGCAGTATGGCCAT
TTTCACGATATTGATTGTTCCTGTCCATGAGCATGGAGCGCTTATTATTTTTTAAAGTATAGAAAACTTT
ATTCATTATTAATTTTAGAGTAATGCATAGATTCCTAATATTTGTTTCCTTTATAGTTGTAGATTTTATA
TACAATAATCTTGGAACAATTATTTAAGTATTAAGTTCACATTAAGAGAAATAAATATTAAAGACAGGAA
AAATCTAGAGGTGCAAGGATTATTTCAGACTTTAAGAAATAAAAATTTAAAATTTAACATTAAGATATTG
TTTAGTTTTATTTAATGGTATTGTTTTATTCATCCTAATATTTTCTTGGAATGAGGAATAAATGGATTTA
CTTTAGGAAGAGTTACTGTATTTTCAGAGGTGAGCACTTGCTGTCCTGTGATCAAGTAGTTGGCCTGGGT
GTTTTCTGTCGTTGGCTCTCCCTCAGGATAATTTACTGATAAAATCTTGTAAACAACTCTTTACATTCCT
TTAAAGAGACTTGTCCTTATTCTGTTTAATATTCCCCTCAGATAGCCCCAGTGTTCTGATGGAGTAATGT
CTATGCATCTGATACAGTGGCAAAAAGTGCCATAAATAACAGATATGTGTAATGGCCTGGTTAGCATCCA
ATGTTGGCTCCTCTGTCTTTCCTAATCACAGATCGTGGGGCAGATTCATAGCAGAAGTAGTCACTTTTCA
ATCACGTATAACACTCTGCTTAAAGATTGCTGATGTTTGAAGTTGAGTTGGTGTCTTAGTGTATTGGAGC
CACTGTAACAAACTGCCATAGACTGGATAACTTAAATAACAAACAATGAATTCTCATAATTCTGGAGTCT
AGGAAGTCCAAAATTAGGTACCAGCAGGTTCGGTGTCTGTTGAGAGCCCCTTTCCTGGTTCATAAATATC
CATCCTCTCTTCTGGGTCCTCATGTGGCATAAGGGGTGAGGGAGCTCTCTGGTGGTCTCTTTTATAAGAG
TACCAATCCCATTTATGAGGGCTGCACTCTCATGACCTGACCACCTTCCAAAGGCCCCAACTCCTAATAC
CATCACTTGGGGGTTAAGGTTTCAGCATATAAATGGTGGCAGGGACACACACATTCAGTCCACCACATTC
TGCCACTGGCCTTCCAAAATTTATGTCATTCTCACATGCAAAATACATTCATTCCATCCCAACAGCCCTA
AAAGTCTTAAGTTGTTTTAGCATCAGCTCCAAAGTCTTAAGTCCAAAGTGTCATTTAAATGTCGTCTAAA
TCTGATATGGATGAACCTCAAGGTACAGTTTATGCTGAGGCAAATTCCTCTCTAGCTCTGAACCTATAAA
AGCAAATAAGTTATGTGCTTCAAAAATACAGTGGTGGGACAAGTAATGGATAGACATACTCATTCCAAAG
GGAAGAAATAGGAAAGAAGAAAGGAGTAATGCATCTAAAATAAGTTGAAAACCTAACCGAACAAACAATA
TTAAACCTTAGGACTCAAGAATAATTCCCTTTGGCTTCGTACTCTGCTTTTCAGGTCCACTGGGGTGGGA
ACATCATCTCTCAGCTAGGTGGAACGTACCTCAGTGGCTGTTTGCCAGAGCCCCACCCCAGAGGCACTGA
GGTCCTTTTTTGGCACTTGGGGCACACCAGACCTAAAGAGGCATCTAAGAGGAGGCATGTCCCTCTGGAC
ATCTGCTCTAGGCCTGGTAAAGGGCGTCTACAGAAAAACCTATAGCTAACATATTTAGTGGTGAAAGGCT
GAATTGTTTTTATTTAATACCAGGAACAAGACAAGGTTGCCCACTCTTACCACTTCTGTTACTCAGCACT
GTCCTTAAGATTATAGCCAGTGCACTAAGGGAAGAAAAGAGTAGATAGAAAAAAGTAACTATTTGCAGAA
TAGTATGATCATTTATGTAGAAAATTCAGTATGATATACAAAAAAGCTACTAAAACTAATAAGTGAGTTT
AGAAAGATTGCAAGATCAGTGTACAAAAATAAATTGTATTTTTGAACACTAACAATGAAAAATAAAGTTT
TAAAAAAGTTTATAAGAACATCAAAAATACGAAGTTCTCAGGAATAAATCTGACAAAAAATGTGAAAGAG
CTATACAATACATTGCTGAGAGAAATTAAATAATACATACACAATAGGAGAGGTACACCCTTTTTGCCTT
GGTCAGAAAACTCAAGATATTCTCTCCAAGTTTGAAAAATATTATCAACATTATTAGTCATTCATTAGGG
AAATGCAAAATTAAACCACAATGAGATACTGTTGGTTTGGCTAAAATTGAAAAGTCTGACCATACCAAAT
ATTGACAAGGATATGAAAGAACAAGAGCTCTTTTACACTGCTGGCAGGAATGTAAAATGGGATATTTCCA
AACTTTGGGAAACAGCTTGGCAATTTCTTAAAATGTTAAATATGTATGTACCATATTCAGTCATTTTGCT
CTTAGATAAATGAAAACATGTTCTTACCAACACTACGCAGATGTTCATAGCAGCTTTATTTTTAATAGCT
AAGGCTGAACATAATTCAAATGCTTATCAACAGGTAAATGGGTAAACTGCAGTATTCATATAACGAGCTA
TACTACTAAATAAAAAGGAATGAACTGTTGGTACATGCTACATCACAGATGAATCTCAGAATCATTCTGA
GTAAAAGAAGCTAGGAAAACAGTATACAGCTTGAATAATTCTATTTATATAATTCTAGAAAACGCCAACT
ATCTAGTGACAGAAAGCAAATTAGTGGGTACTTGGGGATGGTAGTGCTGGTGGTAGGGAGGGGTGGAAGG
AAAGGATCAAAACAGAATCATTTGGAAGTGATAGATATGCTCCTTATCTTGGTTGTGGCAGTGGTTTCAG
GAGTGTTTATGTATATCAGAACTTATCCAGTGGAATACTTTATGTGCAATTTCTTATGTGTCAGCTGTAC
TACAATAAAAATAAATGAAAACTGTCTTTACTGTCTGATCACTGCAGCTAACAAATCTAGGACTACTTGC
TAAATTTACCCAATCTTAAGACCCACCAAGGACTTTTGTTTAAAGGGATGTGATCCAGGCCTGTCATGGT
GGCTCATGCCTATAATTCCAGCACTTTGGGAGGCCACGGCTGGTGGATCACTTGAAACCAGGAGTTCGAG
ACCAGCCTGGCCAACATGGTAAAACCCCATTTCTGCTAAAAATGCAAATAAATAATTAATTAAATAAAAT
AATGTGATCCAGGCTTCAGAATTATTAAGATAGGACAGAGGAACTGGACTTTTTAGCAAGCACCCCAGAT
AATTCTTCTCCTTCTTATAAAACACTTAACCCAGGTTCATTTAATTGCACTTTGGTAATCTGCAGCCATG
TCTTTATGTGAGAAAGGGATATTAGGTTTCTAATATGAACAGAAAGGCCTAGCCATGGACCACCTGATGA
TGCTTCCACTGTGGTCAGATAAGATAATTTACAATTGAATGGAATTATTTTCCTTTCAGTTTATAGTTTA
CTGAAGTGAGCCTTGCATTGTAAGTTCCTGAAGTAATCACTGGAAATGTCTTAATTCAGTAGCTCCATCT
TTAGTTAATGCTGCACTAAAAGAAAAAAGGAATTTTACTTACATACTTTTTGACAAGTCACATTCATATA
TGTTTTAGTGGAAAAACTGTTTTACATCTTATATATAGAAGCTGTAAAATAACATGTTCTGGGGAGAGGA
ATAAGATGAATAGAATAACATTATAATTATCTAAATGTTCTTTAAATGGAGATAGCCACAATCTTTCGTA
AAACTCTGGAAAGAACAGCATGACCTTCTTATTGCCCCCTTTCCACCGACGTCAAACAGAAGGAAATTAT
AGAATAAGTCTGTCTAAATTTTAAATGGTTCAGTTATCGGAAGACCTTAGAGAGCAAGTTTTCCACAAAT
CATCTCTGCGCCATTTTGTCTTGATTATTTTTTTAAGGGTTGGTTTGCCAACATGTAATTAATCACTTTT
GTTAGTTTTTAAGGAAATGAAACTGCATTGTTCCCTTTGGCTTGACTGTTCTTTTTTATGGCGTCTTTTA
GTGTTGTAGTTGTAATATGAAAACCTTAGGTAAATGTTGGGCAGTAATGTGAACAAAACAGTGGGAAGGG
AGTAATTTTTAAAAGCTTATCTACATTGCTGCTGTAATACTTACATTCAACTCCAGATCTCAAATACCAC
CAACTTTAATATCAAAGTCCCTTAAAGTCAGAAGGTGTTATAATGTCAGTGGATGGGGTTATTCCCTGTG
TACAAAGAGTCAGGATGCACTTGTCACCAATTCCCATGGTTTCTTCTTCCAAAATCTAGTTTGAATGGAT
CATTTCATCTCTGGAGGAAGGGATGGGAGCACCCTTCCGACCAGTTTCATTTCTTTGGGCTCTGTTCCAT
CTGTGCAGGGAACTACCTTCTCTATGGAAATTGGACACGATTTTAAAAATAAAGCATTGCATTTACTAAT
GACTGTCAGTATTAAGATTTCATGTAGATCTTGTTGCTTCTCAGAAAAAAGTTTCATATACAGTAAGGTT
TTAAAGATAGGCAAATAACTAGTTGTGAGCAGGCACCATCCTTTAACTTTTATTAATTTGAAATCATTTT
TCCATTTTTAAGCAGAATAGAATGTCCCAGTAGGTGTAAGGGAAATTTCAGTAGCCTCCAAGACTCTGTG
GAGATTTTGAAACTATACACGCTTCTCCATCTGTCGCCTGCCCCCTCCTCCCAGAGCATAGACTTCAAGG
CTGGACTTTGCTCCATGTTAATGATCACTGTTAATGAAAAAGATAATAGGTTCCAAAAGGCTGACCACCT
GTTTTTGGTATTTAGGGTAATGCTGCTGTCAAAGTGAATGAGATATATTCCTTCCTCTGTGTTCTGAAAG
TTTACGTAGGGTTGGGTGTGTAATGGGTTGAATTGTGTCCTGCGTCTCCACCAAAAAAAAAAAAAAAATG
GTTGAAGCCCTAACCCCCAGTACCTCAGAATGTGACCTTATTTGGAAATAGGGTCATTGCAGATGTAACG
TTAAGATGAGGTCATACTCAATGAGTATGAGCTCTAATCCACCCTAAGAAAAGAGACACACACATGAGGA
GAAAATGTCACGTGAAGATAGAGGCAGGGACTGCAGGGCTGCAGCTGCAAACCAAGACACACCAGGGGCT
TCCGGCAACCACAGGAAGCTGGGAATAGGCAAGGAAAGATTCCCCCTACAGGTTTCCGGGGAAGCACAGC
CACGCTGACACATTGATTTGGACTTCTAGCTATCAGAGCAGTGGGACAATAAATTTCTGTTGTTTAAACT
ACTCGTTTGTGGTATGTTATTATGGTAGCCCTAGAAAACTAATACAGATTTATATTTTCTTTCAAGTTTG
ATAGAATTCACCAAACAGTGTTGAGTTTTCTTTGTGGAAAGGTTTTGAATTGTGAATTCAGTATCTTTAA
TAGATGTAGGGCTATATAGATGTTCTGTTTACTCCTGTGTCTGTTTTGGTAATTTGTATTTTAAGAAATT
TGTTTATTTCATTTAAGTTGCTGAATTTATTGGCATAAAATTGGATTGTTCATAATATTTTTTGATGTCT
TAAAGGATGGTGTTCCCTCCTTTATTTCTGATATTTTAAATTTTTTGTTGTTGTTCAGTCTAACACAGTG
GTTCTTAACTGGGACAGTTTTGCTCTGGCTAAGGACATTTGTCTGTGCCAAGGGACATTTGGCTATGTCC
GGAGGCATTTTGGGTTGTCACAGCTTGGAGGATGTGCTACTATCATCTAGTGGGTAGAGCCCAGGGAGAA
TGCTAAACATCCTACAATGCACAGGACAGCTTCTCACAGCAAAGAATCCTCCAGCCCACAATATCAGTAG
TGCTGAGGTTAAAAAACCTACTCTAGGCTTTATAGTGTAAACCTTCTATTTTCCAAAAATATTATATCAT
TTCATGTTTAATATAGTGTTTCCATTCATCCCCTTCCAGTCTTCAAACTGGTTGTGGGCATACCTTTTAC
TTCTCTGTATATTATAAACCCCACGATATATTGTTAGCTGTTTTTGCTTTAAATAGTCTGTCAAGGAAAT
TTTAACATAAGAGAATATGTTCAGTTGTTACTAATATATTTTCAGCACTCTGTATTCTTTGTGTTGACTC
AGATTTCCATGTGGTATATTTTCTTTCCACATGAAGAACTGCTTTCATACATCTTACAGGTCTGCTGGAA
ACATAGTCTCTCTGCTTTTATTTGTCTGAAAAACTCTGTATTTATCTTCATTGTTGAAGTATATTTTGGC
TCTATATAGAACTTTCCATGACAGTTTTTAATTTTTTTTTCTTTCTTTGAGACAGAGTCTCGCTTTGTTG
CCCAGGCTGGAGTGCAGTGGCGCGATCTCGGCTCACCGCAACCTCCGCCTCCCGGGTTTAAGCGATTCTC
CTGCTTCAGCCTCCCGAGTAGCTGGGATTACAGGCATGCGCCACCATGCCCAGATAATTTTGTATTTTTA
GTAGAGATGGGGTTTCTCTATGTTGGTCATGGCTGATCTTGAACTCCTGACCTCAGATAATCCTCCCAAA
GTGCTGGGATTACAGGTGTGAGCCACCGTGCCTGGCCCTAAAATATTTTAAAATATGTCATTTCATTGTT
TTCTTGTTTGCATAGATTCTGGGGGGAAATGTAGCTATTGTTCACTATTATAAGGCTTTTAAAAAAATCT
GTGTATTTTACAAAGTATTTTGGGATTTTGTTGTTATTGAAAAATAATAACCTAAAATTTAATGCAACAT
GTTTAGATTTTACAAACAGACTTGTATTTGACTTGCGTTTGGTATTTCTCTTTTTTCCTTTTCTTTTTTT
CACTTTTTTCTCTTTTACTCATTAAAATATGTATTTTGGGGCAAGCTATTTCTCTGAGCCTCAGTTTTCT
CACCTGTAAAATTGAGCTACCAATGATTCTCACAGGTTTATTGAGGAAATTAAATGTATTGAAGGATGCA
AAATGATTTGAATTTGTAGGTACTCATAAACCTGATACTACAGTACACAGGTATCCCCCTCCTCATCCAA
GTTCAGTTGTTCTGACCTCAGGGTTCACACTTGGCGGCAGATCAGTGGATGTACCGGATCTGAGTCCTTC
CCAGCCATGTGGCAGCAGCTCTGTGTAGAGACGTTGCCTGCCCCCCGCCCCCTGCACGCTCTCCAGGAGC
CAAGTACAGCCAGGAATTGGCCAAAATGGAGAGCCCCGAACGGACCATGAATGGACACTGTTGCCACTGT
TTACTATTCCTGTTCCTTTCTGTAGTTTACCTGCTGATTTTAAATAAACCTGATTGCTTACTCAAGCAAG
GTTGGAAGTTTTTTTAATCCTTTAATTTAAAACTTTAAATACAGTAAAAATCCATGACTTCTTATATTTC
CCCTCATTTGCGTATTTCACTTAGGATGCTCTTCCCTTTAATTAAACTAAAATTCTGTTCATTTTCCACT
TCTCAATTATGCAGACTAGCTATAATATTTAAAGTTACAAATTCTCATATTAGAAGAATCTTGGACATAA
TTCATAATACGTAGCTTGTAATCAACAGTAAACTATTACTTCCAATGGATCTAATTACTTAGAATTTATA
ATACTAATATTGGATGCACTCTTTTTTATCTTAGCAAGGGAAACTAACTGTGTATGATAGACATTTTTTT
GTAAATAACATTTCGCTTTTCCAAAGCATGAGTTGAGCTGTTATTTTTTGTCCTGTAGCTGGCTGTGGGC
GCTAGCCCCCTGACTGTTGTTTTAAATGTCCCCTCATTGTGCTTCTGCTCCTTTACTAGTGGGCCTTTGG
AGTGACGCTGTGGGAACTCATGACTCTGGGCCAGACTCCCTACGTGGACATTGACCCCTTCGAGATGGCC
GCATACCTGAAAGATGGTTACCGAATAGCCCAGCCAATCAACTGTCCTGATGAATTGTGAGTTTTTTTGA
GCTTGAAGGCATGAGTTTTATTCCATTTACTATATTGGAATAAAGGAAAAAGAGCAGGTTTCCATATTCA
CACAGAGCCTTCCCTTTTGAGAATAATGACTCTTTGGATTTAAATTAGACTCTTATAAAAAACCACAAAG
TCAGGGAGATTCGTTCACTCTTTCATGCATTTGATATTAGAACGTCTTGCATTTTATTTTATAGTGCATA
ATCTAAGCACTATAAATTAGTCTGAGAGGACGTACTAAGAAAATTGAATGCTACGTCAGTTATTCTATAT
AAAGTGAGTATCTGACTTTTATAGTTATAAAGTAGTTATAAAGGACATAGTAGTTATAAAAAACCTCTCT
CGTTGTCATTTTGCCTTGCCAGTTAGTATCAGCTAATACAGGGAAGATGATCTGGACTAGTAAGCCAAAT
AGTTGCTTTCTGTTTCCTGCTTCTATCACATAGCTTATCTTGCCATGTAATGAGAATGGGATAAACAGGA
GGCTATGCAGGGTGATTGATCGTACAGATGAGTATATTCTCAGTTCCAGAACCTCCTGAAGGTTTCTGCA
CCATGACAAGGTGGCAGCTTTTGTACTGATTTTACTCTAGATCCAGGGTTCATAGAACTTAGATAAAACT
TTCTCTTCCTCCAAGTTCTTTTCTTAATTTAACTACAGGAAAACACACATTCTTTTTTTACTGTGTTTTA
GGTTTTTACATGAAATCTCTGTATTTGCTGAAATATTTTGATATGTTGTCATGAAGAATTGAAATTCACA
CATAATCCAAATAATTTCTTTTAGCTTCTTTCTAGAGCTGCCAACAGATAGTAAAATGGATCCGTTTTTA
ATATATCATCCTCTCCATACCCACCTTTAGACAGGCAACATAACTGGCATCAAACTGAGCAAAAGTTATG
AATACTGTATCCTTACTAGCCCAAATTTTCATTTTTGTCACTCTGCAGATTTGCTGTGATGGCCTGTTGC
TGGGCCTTAGATCCAGAGGAGAGGCCCAAGTTTCAGCAGCTGGTACAGTGCCTAACAGAGTTTCATGCAG
CCCTGGGGGCCTACGTCTGACTCCTCTCCAATCCCACACCATCAGGAAGAAGGTGCCTGTCGGGGCTCAC
TTGAAGCCTGTCAGGGATGCTTTGTATCTAACACAACGCCAACAGAAGCACATTTGTCTTCCAGAACACC
GTGCCTTAGAAATGCTTTAGAATCTGAACTTTTTAAGACAGACTTAATAATGTGGCATATTTTCTAGATA
TCACTTTTATTAGGTTGAACTGAAAGGGTTTTTGTAAATTTTTTGGCCAAAATTTTTTAAAACATACTTA
CTTTGGACTAGGGGTACATTCTTACAAAATAAATAAACAGTTTTTAAAATTGTTTAGACACAGATATTTG
GAATTAGCTATCTTAGTGCCAACTGCTTTTTATTTTTTTACTTCATCAAGGTGATGTAAGTGACTCACCT
TTAAAGTTTTTTTAGTGTTATTTTTTATCACTACTCTGGGAAATGGTTTGTCTTCAAGATGCAATACTTT
TCTTAGTAAAGGAAAAACAGCATAAAAAGATACCTGGTCTGCCTTGTACAAGAAAAGGCAATATTAGAGG
AAGAAAATTTAAAGAAAAGCTAGAGGAAAAAAAAATTTTTTTAAAAATACTTATTAGAAGCAAACTGCCC
TTGCATGGAAAACTGTTTATTTTTTTCAGTGAAAAGGAATTCTGCTTTCGTGTTTTTGGGAAAGCAGGAA
CTGAGTTCATTACATCTTTAATTTGGCAGAAATTAGCCTTTCTGTGAACCAGATGTGGTTTGGGGCAGAT
CTGTAGTAAACAATGGTGATTTTATTTATTTTTACTCTCTGGAAAAGGAGATAATACAATTCCAGAAAGT
GAACTCATATTTCTAAGGTTAAGATTCCCTTTTATTGCACCTAGAATAGTGCTATGCACAGAGCGGGTGC
TTGAGTTGTTGTCGTTTTTTGTTTGTTTTTTAAATGTAAACTGGTAAATTTTGTGCTTATCTTCAAGGCT
GGCTTAAGTATAAAATTGTTTTTTAAACACTTGAAAAATTAAAGGATTTGTTTTATATTATGACAGTATT
GAAATTATTTTTCATAATGAATGATTGGTTATTGTGTCTGGTAAGTCTTTGAACATTCAACAGCCAGACA
TTTGTGTTTTATTTCATGATGTTCCAGTCAAGTTCCAAAGCCCTAACACAGTTAAGCTGGCTCAGACTCC
AGGTTCTAGTAAAAAGTTGGAATTAATGTTATAAGGAAGTATTAAAACACTGAAACATTTCTCCAGAACC
AGCAAGTAAGGGATATGTATGTATTTATGCTCAGTTTTAGTTGGCCTAAAGCAGAGTTGAATGGGCTTTC
TAAATAGCTAGGCCTGCAGGTACCTGCCACTACTCCCATCTTCAGAGGTATATAAGGGAGAATGTGTAGC
AGTTGGAGGCTTTTGCTGTTTTTAAAAAAGCCTTATGAATCAGCAGCACATCGGGAAAAATAGCTCACAT
AGTACCTGGTTTTCCACAAGTAAGCCAAGGGCATGATTTTCTGTGTACATTTATTAACAGTTCTTTGGTT
TTATGAAATACTCATATGAAGCCAGTCCCTGGAGTACTGTTTTTTAAAAGGTCCCTTTGAACCATTTGTA
AATTATATTTTCATTCATAACCTGCATTCTTAGAAGGCATTCAGTCAACATTTACAGCACTTACTGTGTA
TTTTCCACATGGAGTGGTTCAACTCAAGCGTCCCTTCCAGTATTCAGGGCATTCTTATTTCATGTTCAAG
TGAGTGCATTGTTTAGAAATCACAGTTTATTAACATGTACATGATCTATTTTAAAAAAAAAATAAGTACT
GACACCTGACTTCTACTCCCAATTAGCAGATTGTAAGAAATGTCCTCAGTTTGGTGGATGGTGTGGTGCC
TGTAACCTTATCTTTTTGTGTTTGTGAGCACTTTTATTTTATGTATGTATTTTTATTGTAGTAGATTTTT
CTTGGTGAGCTACTTGGAGTCTTTGACATGGGAAGGAAAGAGCAGTTATAAGATCTCCCTGACTCATGTT
CTTCCAGTAGTTTTATTGTAGATTGTGAATGTTACTGAAGTTTTACATTTTACTGATTTTGCAGAAAATA
TAATTTTTATGGAAAAGAAGCAAATTGACAAAGCAGTGTTGTGGTATTATAAGCTGGCTCTGGTGACCTA
GAGATGCATTCTATTCTGTTTTTTCTTGTAATCCTCCTGTTCTAGAAATTTTTTTTTTTTTTATTGATAG
AGGGAGGATTGGGTTGCTCATTCAGTATATATTTATTGAGTGCCCACTGTATCCTGGCTCTCGGGATAAT
GCAGGGAACAAGATAGATGAGGTTCTTCCCTTTCTAGATTTTGCATTCTAGTTAAGAAAAACAGGTAATG
AACATAAATAAGATTTTGGTAAGTGCTATGATAGAAATAATAGAGTGATATTAGAGAGTGTAACTTTAGA
TGTCATAATTAGCCAAGCTTCTCTAAGCAGGTGGCATTTGAATTGTGATCTGAATGGCAAGAAGCAGCCA
GCCATGAGAACACAGAGGCAGAAGGCACATAATTGCAGAAGCCTTAAAGCAGAAGCAAGCTGGCCTCCAA
TCTCAGCCGTTCCCCTTCATTCTCTAGCTGCTGCTGCTGTTGGAAAAAGAGAAAGGTAGCTAGCGTGGCT
AGAATGTAGTTAGGGAAGGGAGTGGTACAAAGAAGCAGGTCTTTGTAAGCTGTGGCATACATTTATATTT
TTTGCTGAATACAATGGGAATTCATTTGAGGATTTTTCAAGTAAGTAGCGATATGATCTGATTTGTCATT
TTGAAAAGGTTGTGCCATCTCCTCTGTGAAGACTGGATTGTGAGAATTCAAAGGAAGAAGTAATGAGACC
CTTTAAGAAGCCGTTGCATAGTTCAGAAAAGAAAAGATAGTGGTTTGGACCACTTTGAGTAGTGAGGAGA
TACAGAGAGAAGGGGCAGATTGGAGATATGTTTTGAAGATACACCAGGACCTGGATCCATTGGATGTTGA
CGGTGGGGTGAAGAAGGAAGCGGGGAGGTGAGGAATGACTAATTGATTTGGGGCTTGAGCATCTGGTTTT
ATGGCCAAGCTATATACTGAGATGGGGAAAAATCTAGGAGAAACTGAATTTTGCATTGGCCAGAGAAATC
CATAATTTGGTGTAGACTGTGTTTGAGATGCCAGTTGATCATCTGTATGGAGATTTTTGATAGATGAGAG
TCTGCAGCTCAGGGAAGGTCTCATTGAACATACAAATGTAGGAGTATAGCATATAGACTATTTTTAAAGC
CATGGTACTGGATGGAGTTGATAGGGAGAGAGTGTATAGATGGAGAGGAGGTCCTAGGACTGAGTCTTGA
GCATTCTAACCTTCAGTTCCAGCTAGTGAAGAAAGAAGAGATAACAAAGACAGGAAAAGCCACTGTAATT
GATAAAAGCAACAACAAAAAAGTGAAAATGAGGTGTTGCAGGAGCCCAAGAAAGGTCGTGTTTCAAAATG
GAGACGCCTCCATCAGATTTGGCAATATGGAGTTAACTGGCAGGAGCATGGGGACTGGAGCAAGTCGAAG
TGTGGACACAGGTGGGGACGTAAAGGCCTACCACTGTCAGCCCTGCTGTGAAGGGAAATGAAGCAATAAC
TAGAGGAGATCAAAGGGGGTTTTTCGGGAGAAGAGGGACAGGGATGAGAGTGTTTTCCAGATGAAGGTAC
AGTGCCAGAAAATGTTTCATGGGCTCATGGGAATGATCCGGTAGAGGGAGAAAAATCCCTCTGGGGTATG
GGCCACTGCTCTTCCTTGCCATTTGGTCCACAACCATGAAAGCCTTTCACTCTGGCCCCGAGCCCTTTTG
TTGTATAAGGGTTGTGTGTTTACTGGGGGAGAAATGTGAGGGAGGTAAGGTAAGGGAGGCGGTACACAAA
ACTGCCACCGTCCCATTACCCAACAGCCTGCCTCTGTTGAGGGGCTTTCCTGGGACTTCAGACTGGCACC
CTCATTGTGCTTGCAGCTGTCATGTTTCCTTGCCCAGATTGCCCATAGCTGCTTCCCTGGCCTCGGCCTT
GAACCCCTCTAGCCAGCAACTGCCCAGGTAACACTTTATAAAACTGAGCCGCTGTCCCTGCTTGGAGCCT
TCAGAGTAGACTTCAGACCTAGGCAGAGTATCCACTCAGCTCTGCCGTTTCTCCTGCTCCCCACTTCGGG
CCTGCACGCTTCCCGCCGCTCGGCATGCTCCTTCCCCTTCTCCGAGAATGACGTGCTCCCCGCACTCCCC
ACACTGCCGCCTTGGGACCAAGAAGGTGCCTCTCACACCTTACTGCTCTCCTCCAGGCTTCGTGGTTGCT
TTTCAGCCTTTTTCCCTGGATTTGAACTTTAACAAAGGTAAGATGGAGGTTTATTTTTCACCACTTGGCT
GTGAGTTCCTTGAGGATAGGAACTTGTGTTTTACTCAGATCTGAATCTCCATTGCTTTAGTGGTGTGCTC
AATACATGGTAGGGGTGAATATTTAATGAATGAATGAGTGAAAATATCTAAATTTTGCACAGGAGAGCAA
TTAGAGAGGCTTAAACAGGAAGGAAGTCTTCTAATTCCTTAAAAGCATTATCTCATATTTGAAGAGTTCA
AGTTTGATGCAACATAAACTGATAAAGTTTGAAATAAAAAGAGACAGGTTGGTAGGAAAGACCATTCATA
TCCTATCCCCAAACTGGCTTAAGTCCACTCCCACTGCCCCCAGCTACCACCTTTTTACTTTATTCTACCT
GCTATTTCTTTGGCCACCGGAATAATAAGCCTGATGTAAATTCTGTTTCATACTCCCACAGGTCAACTTT
TTTTGGAGTTTGACAATAATTATTCCAAGTCAAGTAATTCATTGATTTTAGTGGAAGATTGTTTTCCAGG
TGTTATTCTTCCATGCGCCTCACCCCCATCTCATAAAGTAGAAAAGAGATGATTTAATTTATGGGTCTAG
AAAATAAAAATGTAAATACTTGCTTGTTAAATTAATTTTTTTCTACCTTCATTTTTACCTTTAATATTTC
AAGATAATATTGGACTTAATTCTCTGAGACACACAAACATCCTGCATAAGTATATTGACAACATACATTT
TATATGTAAGTGAACCATATGGGTGAGCCTCTGCTTTCTCCCTGACAGCGCTGTTCTTTAAGAAATTAAG
GCTAACCAGGTCTATAGGTTTTAATGGGAGATGTCTCCTAACTTTTCAAAGACCAGATGTTCTTGTTATA
CTGATAAAAACTTATTAAAAAAAAAAAGAAATAGGGATTGATGATGTTCAACATTATTCTCTTTGAACAA
ATACATCATTTGTTCATACTTGGTTTCTCAGTATTTCAACAATAAAGCATGTTTTAATGATTTGTCTTTA
GAGGAGTGAGCACTCCTCTGGGGGTATATTACAACTGGGAAAAAAAATATAGTTTGAAAATAAAATAACT
GTTTACCCTTAAAGAAATTAACTCTATGGTGCCTTAAGGTTACATTTGCAATAAACTTTTTTACATCTTT
CTGAGTCTTTTTTTGCTTTTTGCCTTCTTGGCTCTGAGAATAAGCATAGGCTGATATTAGATAGGTTTGT
ATCATTAGGGATAGCATTTAGCTGCAAGTAATGGAAAAATTCAACCATAATCACTTAACCAAAGGCAGGT
CATTTTTCTCCCATAACAGCTCCAGAGAGAGATAAACCAATGCTAATGCAGTGATCCCAGGGTGTCATCC
ATTGCCAGTCTCCTCCTGTTTTGCTGCTCTGCCGTCTTTAGCATGCTGTGGTTCTTAGGGACCCCAAGGG
CCTAGAGCTTGTTCCAGATAGGAAGATGAGCAAGGGCAAAAAGCAAGAGGCATGAGTTACTGAGTCCTTT
TTGTGAGGAAACTACTAACTTCCTGTAGTATGCTTCCACCAACAACTTAATATCCTGAACGCACATGAGC
ACTCCATGCGCTACAGGTGGGTAATGCCAGGAAATTAGATTTTGTTATTTTTTGAAAACAGCTTTATTGA
GATATAATTCTAGTATCACCCATTTAAAGCGTGTAATTCTCAGTGATTTTTAGTGTAGTCACAGAGTTGT
ATAATCATCGCCACAATCTAATTCATTTTTATTACCCTAAAAAGAAACCCCATACCCATTAGCAGTCACT
CCCAATTCCACCCTCACCCTCAGCTCTAGGCAACCACGAATCTACTTTTTGTCTGTATAGATTTGCCTGT
TCTGGACCATTCATATAAACGGAATCACACAACATGTGGTCTTTTGTGTTTGGCTTCTTACATTTAACAT
AGGATTTTCAAAATTCCTTCATGTATCATGTATCAGTACTTCATTCTTTTTTATTACTGACAGATATTCC
ATTGTATGGATATAAACCATTCATCAGTTAATGCATATTGGAGGAAATTGAGTTTTGAGTTGATCACGTT
CTTGTTGTATACAAAATTGGGCTTCTATTGGTAAGGAAGGCGATGGCTCTTGAGGAACGGCTAGCAGTGT
CTGCCGCTTTGCAGAAATGTGCTGGTATTTGGCTTCCTTTAGCAATATATTTAATGCTTCAAAAGTTCTG
TCAAAGTACAGTGATTGTGAAGAGTCTTAGTGACTGTAGGGAGTGTCCAGTCAGCTTGGTGTTTAAGTTG
GTGAGTCCTGCCATTATTTGAGATGAAAGCCTGGTAGGAATTACTACCTCACCTTTAGCTTCTAAGTCTT
TGACCAGAAAACTCTACTGCTGTATTCCATTGTGAATGCTGTTACTTTGGCCTCTGGCCCACTGTTTTCC
ACCTGTTCATAATTCTGCCACCACCTTATAGATTTGAGCTTGCAAAGTTATATTTTCTTCAATATTTGGC
GTACAGTATCTACCACCAGGTACCTTTTTGCTAGCTTCATGATCTGACTATTTAGGGCCTTTAGACGTAA
GCCAGAGACTGGCTGTGTGTGTCCATTGAAAGTCTTATTAAAAGAGCTTAAAAAATATTTAATGATCTAT
TACATAGATTTATTGTACTATATTTCATATGCCTTTATTTAGACAATACTTGCATTCCTACTAGGTTTTT
TGACTTTTTAATTGATACTATTTGGTCATAGCATTACTTAATAGGCATCTGAAGAACACTTTAGACATTG
CCTAATTTAGAGAACAGGATACCGTCCTGGAGACTCTATGACGAATTGGTTGTGGGCCCTCATTCTAGAA
AAACACTGGAATTAATATCCTGAAAAAAGTTCCTCTAGCCCAATGTGGTTCAAGCCAGAATAGGTTTGAC
TTACCCATAATCTCTTTATCAGGAAGTGCAGTGCTTGATAAATCTGTGTTCAAGTTTTGTGTTGGGATCT
CTAAGCAGTGTCCCTCTGGCCTTTGCTCTTCCCCCTGTCCCAGTCCTCAGAACGGCCCACAGATAACTAA
GCTTAAAGGATAGGGGCAGCTTTATGTGACCTGACAAGCATTCTTGGCCAGCTGAGCAGACTTGTCTTGT
GGTAAGTACTCCCTTAGGGTCCTTCTCACCTCTTCTGGGAAGGCAGGAAGAGGAAGAGACAGGAGCTTGG
CACTGCCGGGCTTCATGGAAACCTGGACTGGCTCCCACTGAGGGGCTTCCCCTTCTCCATTTTCCTCTGT
GTCCACTCTGGACCTTTTATTCTTTAGTGTCCCTCTGTTGCCAGCCTCACCTTCTGGCTCTTGTCCTTAT
GTCCCTCTTAAAGGAACTTCATTCCCTTTCCACAGGGTGTAGTACTTCAAGTGCATTTAAACAATGTATT
AAGACTTAAAGTAGATATGAAGATTAGTTTTTTCCACAGCCACCTTAGCAGGGCATCACATTTTTGAGAT
GAAAGGAGGATTACCTGTTTTATTTTACAAATAAGGAAACTGAATTCTGTATCACTTCCTAGATACGAGA
TTGAAAATAGGCCTTTTTTCATGTTGGCATGTTTTTAGGAGGTAGTTGGAATTCCCCAGGAAGGGAAATT
AATTTGTTGAGTACTTACCAGCACTCCAATAGTGGGCATTTTAATATATGTCTGTCAAATAAGTGGAAGT
TGATAATAGATTTGTGGAGAGTTTGGTAGTATTGGAGCATAGTGTTTAAAGCAGAGGGTGGCAGAAGATT
CGAAGAGTAAATGGCAGATGCTGTGAGAGCCTAACACGTTAAGACTTTGTTCTGGAGGCTTTGTAGATTC
AGTAAAAGGCTTTCATCAGGTAGTGATGCAGTCACATTTGTGTTAGCAATGATAGTAGCAGGTGGTCATT
GCCTACTATACAGCCTTGTACTGATTGCTGTACATGCATGATCTCATTTAATCTTGACAACAATTGTTAC
TAATTTCCATTTTACAGTTGAGGAAATGGAGGTTGAGATAGATTGCACAGGTCATAGTGGAGCTGTGATT
CTCATCTAGGGAGTCTGACCAGAGCACGCACAGGACACCTGTACAGTTGGGATGAGAGGAAAGAATTGAA
GGATGTGTTAGGAGAGCCTACTTGGTGGTCTCAACATTTAATGACATAAGAGACGGTATTGTTGGTTCAG
AGTGAGAGGTGTTGGATAGGAGTCTGTAAGCATCATAAGAGTGTGAAGGTTTCTCTAAGGGAAATCTGAA
AGGGAGCTGACCAAGAGCAGTGCAAGTGAGGTCAGCTGAGGTTAGAGACAGGAATTTATAGCAGTACTGC
CCTGACTGGTTATGGCATTTTTCTCCGTGAATTTGGCTGCAATAGAATCTGCTGTAATACAGAGTGGATT
AAATAAGATGAATGTTCTGTCTCTTATATGAGAGTCCAAAGGGAGGAGAGTGGCCCAGGCTGGTGGTGTG
GTTCATGTTCAGAAACATTCAAGATCCCAGTTCCCTTCCATCTTGTCCTGCCATCCCATAGGCCATGTTA
ATGTGGCTGCATGGCCAATGCTGAGTCTCTACCACATCTCAGCTTCTGGGAGGGGGCAGGAGCAGAAGTG
AAAAGCAAGTTAATTCCTTTTAGACAAATAACAGAGATGTTGTACACATCACCTTTGCTCACATTTTATT
GTCAAGAATTTAGGCACCTAGATGCAAGGACCTCTGAGAAAGGAGTCTAGCTGGCATCCAGGTTCCCAAC
TAAAACTATTACTATGGAAGACGAAGATAATGGATTTGAGGGGCCAGCTAATTGTCTGCTACAAAAGAGA
AGGCTGGCTGTGGGGTTAATGCAGGATTGGAGTTTTTCTGGACAGGTGTGAGGATAGTGGGGCAAGAGAG
TTTTAGGGTGTTGGTGAGATGTAGTTCAGGTGGATAGCCATGAGCTCCGGCTGGGCGTGGTAGTTAGGTC
AGGAGATTGAGGACCTGGAACCCTGCAGAGTAGATGTGGGACTAAGGGAGAAAGTGGTTGGAATGGGATT
AGTCATTTGTGGCTAGAGTAGGATCTGGGTTGAAGTCCAGAGGTGGCAGAGTTCTGAGAGATGAAACACC
TGGAGTGAAGCCATGGTTTGGGAAACCAACCATGGTGAGCTGGAGGTTTCCAGAGTTGAAGCAGGCACAG
AGCATGTTTGGTGTTCCTGCACAGCAGTCACACTGCCTACACACATACTCTATTCTCATCATATACTTGT
ACCACACTCCACTTCGTGTCCATCTGGGTATCTCCTCCTCACCTACAAAACCCACCTCCCACAAAGCTGT
TCTTGATCCCTAGGCTCTTAAAGTCTCCACTCTGTTTCTCTGGCTATCAGCTGGCATCTTTCTCTGCTTC
TTTGTAGTTTGTAACTTAAGCTTACATATGGCCAGTTGTATTAGGGTTCTCTAGAGGGACAGAACTAATA
GGAGATATATATATATCCTTTTATATACATATATATATACATATATATATGTATATAAAAAGGGGAGTTT
GTTAAGTATTAACTCACATGATCACAAGGTCCCAGTAGGCCGTCTGCAAGCTGAGAAGCAAGGAAAGCCA
GTCCGAGTCCCAAAACTGAAGAACTTGGAGTCCAGTGTTCGAGGGCAGGAAGCATCCAGCAGGGGAGGAA
GATGTAGGATGGGAGGCTAGGCCCATCTAGTCTAGTCTTTTCACGTTTTTTTTTTCTACCTGCTTTATAT
TCTAGCCACGCTGGCAGCTGATTAGATGGTGCCCACCCACATTAAGGGTGAGTCTGCCTTTCCCAGCCCA
CTGATTCAAATGTTAATCTCCTTTGGCAACACCCTCACAGACACACCCAGGATCAATACTTTGCATCCTT
CTATCCAATCAAGTTGACACTCAATATTAACGATCACACCAGTTCCGGCCTTTCTAAGCCACTACATATA
CACCACATATCTGCTGCAACCTGGCAGTTGCTGTGCTTATTTTCACACCAAATTCCCAAGACAGGCAATC
TGATTGGCCCCACTCATCACATCTTTTCACACTGGACCATAGCTAGCAGGTCACTTGCAGGACAGAATGG
GCAGATGGCTGCTAACCCAGCTGCTCCCCATGTTGGGTTCAATGCCAAGCCTATGACCCTGTGGGTGCAG
AGGCGCAAAGGAGTACAGCACTATCGTTGCTTTATCTTTCTGCCAGCCCTTGGGTGTGGGAGGGGTTTTT
AGAGAGATGCAAGTTGGCTGTGTCTCCTTGCCACTCAGGAACAGTGAGTTTATACTACACCAAAAGGGAT
TTGATCAGCTGGTTGAGAATTCAGTCATCGGTCTGTTCATTAAACTAGAACAGTTGAGCTCTGCCAGGCC
CTGGGAATGAAGAAGCCAAGGAGGCCATCCTGTCCTCACTGTCTGGTGAGGGTGGCGGGGAGGAGTAAGG
TGGTGGTTTGGGGTATATAACCAGCCAGTTACGGCACAGTGTATGTGGGAAGAGAGGCTCTGAAGCTGTG
GCCACCCCCAGGGTTTGAGCCCCAGAGAGCCTTCCCCAAAGGGCTGGTAAAACCTAGGAAGCCTAAGCAC
ATGGGGATCCCGTCCAGAAACACAGGTGATCCCTGGACGGGAGGCAGCCCCCTGCCCTAAGAGGGAACTG
CCTGAGCTGCTGCCTCTAGGACAGGAGTGCTGCTAGAGTTTGTGTGTTAGTAACAGGACATGCATGGCCG
TCTGTTCATGCAAGTGGCCATCACGTCTGTCCTTGGGTATGGCTTTCTCATTGGACACAATAGTATGGTG
AGAGATTGCATCTCTGAACCTCATACTACCCTGGTCTCAGGGTGTGACTGCAGCTTTGCACACACCCTGG
AGTGAGCCTCAGCCTGAGAGTAAGGAAATCACTTCTGGCATCAACTGGATAAGTTTTATTTTATTAAAAC
TTTTTTTGCAAAGCCCAGTCTTTTAATCCAAGAATCAGTTTTTTGGAAAACAAATGCTTTATTTCCCAGA
GGTGAAAACAAAAAAAAAGCTCCTGTGGAAAACTGCATCATACTAGGTCAGGGAAAGAGATTTCTTTTTT
CAGGTTAGTGAGAGAGGTCTGGCCAGTCCTTCAGATCCAGATGGCTATCATTGCTTCCAGGGCAGGAGCT
GGGAGATAGGGGGCTGGGACAAACATGGTCCCACCAGCATGGGCCTCCTAGAGCCACCCCAGAACTGGGC
TCAGACCTCGGCCCCGAATCTCTCAGGGAAGTCCCTGCAGAGACTGAACCTGAGAAGTGGCCCCTCTCAT
GCCTCCATCCTGTCGTTCAGAGGCCCTGTTCACATTCCATCCCCTCTCAGGAAAGCAGACATCTGCTCTC
TTCCCTGAGATTTCCCAGGCTTGGAGAAAACACACTCGGATATCACACGCTCACCTAGTGCACTTCTTAT
TCAGAAGCCTCTCGTCCAGATGACAACATCCAATGCCACTGGTATGACACCAGCCTTGTTTTCTTTCTCT
CACCCCGTACTAAATCCACTACTTATAAATTTGCCTCCGCATCTCCGTCTTCTCTTCACTCCATCTCCAT
CCCTCTGGACCACACAACCCTTCCTCATAGGGCTGCCTCCAGCCTCCCCAACTCTAGCCTATTCTCACAG
CTGTCAGAGCCATCCCATCATGGGGGGATCCAAGGGCCTGTCTGGGTCATCACAGTGGGCAAGAATGGCA
CAGCTTGACTCTCCAGGATAGCTAGAAACTCCCACAAGGCTGGGCAGGAATTCCAGGAGGAATTGCACAG
GAAACATCACCTCACTGCCCTGGAAGTTGTGGGTGAGGGGAGGAAGCCTCAGAAACAAACCAAGAAGCCA
GAAGGACTCACTGGGCTGGGGGCTGTCGGGAGTGTTCCCAGAAAAGCCGCCACTAGCTGAGTGGTTGCCT
CTGTAGACCTCAAGGTCTCCACGGCTCTAGAAAAAGGAGGGCTGGCCCCAGCGTGACCTCAGGTTCATTT
TCTAAGCAGCAGGTAAGGCCAGGGGCCCTCTTGAGTTTGTGATGTGGTCTGTCCAGTTGGTATCCAATCC
CACAGACGCTCATCACTGTCGTCCTTGTCCTCTCCCTCACCCTCTCACCCTGCCTGGCCCCCTCATCCTC
TCCTCTCACCCTCACCCTCCTTTTCTGACTCTCCCCCTGTGCCTCTTTAACCCTGCCTTGTCTCAGCTCT
AGTCAGCAGCTCCAAATCTATCCAGGGCTCCTAGTCAGCCTGCCCCTATTTCAGAAGAATGTTCTCATCC
CTGTGTCCCTCCTGTGAATACTACTGTCCCCTTCCACCCTGGATTCCCCAGACCTTGTTCTATTTATGGT
CTTTTCCATCTGTGATTTTCCCATTTTTGGTCACTCTCTTCTTGTCTACATGTGAGTGGGGCCGTGAGGG
CCCCCTGCCCTCCACTCCCCTGACCTGGGGCCAGTGCCCTCACTTTCTGGAGCTGCTCCCTCTGCAGGCT
CCAGACTACAGCTACCAGATTCAGTGACCTTTTCTCAGTCATCCTCCTGACTGCCGACCACATCACCCTG
CTTAAAACCCTCTCTTCCTTCAACGCTTCTCTCTTGGGGCTTTTCTTCTTCTCACTTTATGCACAGGCTT
CCACCTCTCTCCCACTCCCCAAAATATCAGGGGTTTCTAAGGTTCCTGTCCCAGTCTTCTCCCTCACATC
TGTCCCTCAGTGACTCCATCTGTGCTCAGATACCTGCTCTGTCCCCAGCACCCCATACCTGGTCACTGGT
CCAGGACCTCTGGACATCTCTTTCTGACATTGTCCCCCTGGATGTCACAGAGCCACCTCAGCTAAACTCA
TCCTCTCCCTTCCCGGCCCTCTACCAGGACCACCCAGGAAGCCACCTCCACTCCTTGCGTTGTTTTTCCT
GAGTCATCCAGGGGTAGAGCTTAGGGTCTCTCTGACAAGCTCTGTCCAGCCCCTAATCCTCTTGAGAGTG
CCTGCAGGGTTGATGGGGCCAGCCTTTCCTACCCTCTCCACTCCCTTTCCCAGACATTGTCAGTAACATC
CTGTTTGGGCCTCCTGTCCCCATTTTCCTCGATGCTACACTGCCTGCCAGAGTTACCTTCATTTTCCTGT
TTTGAATATCACTCAAGCATTTATTTCAGACATTCATAATACTGTCATGAGAAAGGTTTTCCTTCAACAA
GTGTGGATGCATAAAATCATGTGAAAAAGACTGGGTTTTTTGTTTGTTTGTTTTTTGCCTATTTTATGTT
GTAAGCTCCCCAAGGGAAGACGGACCACTCCACCCGCTTCTTTGTGACTTCCTGTAGCACTTAGGCTTTA
CTAAATATGATGATTTCTGGGAGTGAGAGAGTACTTCTACTGACCAAAGAAAGCTAATCCTACCATAGCT
TACCCAGAAATATATATATGGAATTCATTATTCAAAGAGTTCCTACTGACAGAAAAAACCTAAATGCATT
CAAAAGACTTGGAGAAAGATCTGCCAGAGACAGGGTTGGTTTCTAAGACACATATTCCCAAAAGAAATAC
AGACATGGACACATATCCTTAATGTTTACATACAGGGCGAGATGGCCATGTGTTGGGAGTTTTCACACCA
GCCCCATGGATGGAGTGCCTTTCCACCAGCTGGAGTGCCTTTCCCCCAGCTGTGTCCCCATGGCAGTGCA
CAGGCTTGTAGTGTTTATTTACTCAACCTACACTTACGCATGTACATGATCCAGCCAGAGTCCCAGAGTT
GCTTTTCTAGTGGTGGTAACAACTTCAGCCCAATGGCCTTGACCTCTGGACCCAGAGGTCACAGGGCACT
GGCTGGGGTTGGGCTGCAGCCTGTGACCATGAGCCACTAAGGAAGTAACCCGCGAACTAATTGCCACCTC
CTTACTCTATTTCGCCAGCACGAACATCACCTAGAGTGTCATTATGAAGGTCTGACACTGTTGGCTGTCC
TACCATGAAAGGGAGGTACCAACAACTGTGAAGGTGATTTCATGACAAATGACACTTCTCTTATTCTTTC
CCACCTTGGGAATTAGGTTCCTTGATTTATTTTTAAGTTTAAAAAATTTTTTTGCGGTAAAATTATAAAG
TACACAGTGCCGTTGTTAAAAATACACTGTCTTATCTAGGCACAGGATACCAGGAAGTTGCGCTGAAAGT
GTTTTTGAAGATCTAAGGAAAATATTATTTTATAACTAGCACATTGCTACAATTAGCATTTGATTCACTT
CCTGTTGTCTAAGAGAAAATGTCAAGCTGTGGGTTTAGAATCAGAGTTTATTGTTGGGTTAATTAAAGTC
TAACAATAAGAGAGAGAAAACAAATATTTTTGAAAGCTAATATTGTTCCTTCCTATTTTATCTTCCATAT
CTCATAACCTCTTTTTTAAAAATATTTTTCTTCTTTTTAACTTTCTGTACTGCATTCTAGGTGTACTTTT
TCCAACCTACCTTCTGATTTTTCAGTTTTTTTTTTCAGTTTTGTCTTTCTACTGTTTAATGCATTTGGGT
TTAAAGTTCAATGTCTATATTTTTCATTACTAAAAGTTTTCTTTTAAAACTTATCTTTTTAATCCCAGTA
ATTGCTTTTGTTTTTATAGCATTTATTGTTTCTTTAATCATTGTAAACAGGCTTTTTAAGTCATCTAAGT
CTGTTAATTACATTTCTTAAAGTTCTTAAAATTCTTTTTTTTTTTTTTTTTTTTTTTGAGACGGAGTCTC
ACTCTGTTGCCCAGGCTGGGGTGCAGTGGTG

[0142] An exemplary DNA sequence is human Slco2a1 provided below.

gi|224589815: c133763526-133636932 Homo sapiens chromosome 3, GRCh37.p13
Primary Assembly
(SEQ ID NO: 307)
GAATTTTGGAGGAATCAAGTAGGTATAAAAATCAAATGCTTCCACTTTTGCTCATGAAAAGATATTTCAC
TAAATTATTGCAAACTATAAATCCTTTATGAAAGAAAATTTCCCTGAATCTGAAAAATAGAGCACATAAA
TAAAGAACTAACCATTCTTGTCTCCTTATGTAAGCACTAGGGAAAAAAATCAACTTTATCAATTATCAAC
TACTTAATTTCATGTAATTAATTTTGCTGTTGTTTTGCTCAATTTTGATTAGCAGTTCCAGGAAAAGCAA
TTTTGGACTATAAATGGTTGCAAATGCTTCCAGAGAAAAATTGAAAACAATAACTGTGGGTAACAAAAAC
CTAGAACAGCCAAGCTCAAACATCTGACAGAAGTCCACAGTGGACAAGGAAATTTAGTTATATTTGTGTA
TATAAAAATTTAACATAATAGCCTAATCATGACTGATAGTACATGTCATGACATATCAGAGTTTTAGAAC
TCTCACACAATTTTGGAACATATTTTAATACCACATGTATACAAATATAACTTAAAGGAAGTTGAACATC
ATTTCTTAATTGATAATGCTTCCCCTATGATTTCTCAATAAGCCTAATCATTTAATCTTTATGCAAGATG
AGAGATACATTCTTTGAGGCTCTCCAGGAGCCCACGTGGAAAATCCCAAAGTTAATTTTAGGCCAAAAAG
ATTTAATTTTGGATTTTGATGCAGGGGAAATCTACCAAAGATGTCAAAAAGTCTAAGGTACTTGATTGAA
CAGAATCATAGGTCACTGCTAAATAATAGTTATTCATTTAACTAGAGCGGTAATCAAAAGACTTCAAAAG
CACTACAGAAAGTTACATGGATGTAAAAACCTTAATCCTTTTAAAGTTCAATTTTCCTAAATATCAAAAA
CTCAATAAAGATAACATGAAACACAGGAAATTATCTTGGTAAAGCATAGAATCTTTGTTTCCTAGGCCAG
TTACCTAAAAGGCAAAGAAAAAAGAAAACCGCCTGTAGTGTGATTGCTTTTATTTATACAATGTTCCTTT
AGATAACTTGTAAGTTAAGCCTAACAAAAAGAGGACTTGAATTTAATCAGGCACAGGATAAGTTCATCCA
GGGTTATGAATGTACTTTATGTTATAGAGAAATGTAAGCAAGAAAACTGGCACCTTGCACAGGAGAATGT
CTGGCTTTTAGTAATGACATAGGAAATTTCCTGGTTACATGAAACAATTAAGACTTATCAGGAAAAGTCA
AAAGTACAGAATCAGGCCGGGCATGGCAGCTCATGCCTATAATCGCAGCACTTTGGAAGGCCAAGGCAGG
TGGATCACCTGAGGTCAGGAGTTCAAGACCAGCCTCTCCAACATGGTGAAACTCCATCTCTACTAACAGT
ACAAAAATTAGCTAGGCATGGTGGCAGGCACCTGTAATACCAGCTACTCAGGAGGCTGAGGCATGAGAAT
TGCTTGAACCTGGGAGGCAGAGGTTGCAGTGAGCCAAGATCACACCACTGCATTCCAGCCTGGGCAGCAG
AGCGAGTCTGCATCTCAAAAAAAAGTACAGAATCAAGTTGTACTGTAGGAAACACTGCTTTCCTAGACCT
TCAAGATAAACACTTATACAAAAATTAGCTGGGCATGGTGGCATATGCCTATAATGCCAGCTACTCAGGA
GGCTGAGGCAGGAGAATCACTTGAACTCAGGAGGTGAAGGTTGCAGTGAGCCAAGATTGCGCCACTGCAC
TCCAGCCTGGGTGACAGAGCAAGTCTCTGTCTCAAAAAAAAAAAAAAGATGAACACTTTAGTGACAAATT
GTAATGGCTGTGCTAAAACCAGGGAAAAAGTTACAGGACTTGGCAAAAATGTTGAAGGAGAGGGTAATCA
ACCCAGCCAAGCAAAAAGATAGACCTTTTCAAGGGTAGAAAGGAGAGTTGCATTTCCAACCTGAAACTAG
GGAAATTTGATAGAGCTCAGGAAGAAATGTGGCAGAAATAGAAACTGTTTGTAGTTTAGAGGATTACTGC
TAAGAAACTGATTTCAGAACCAAAAATCAAAACTTCTTACAATTTTATTAAAAGCAAATCAACATTTTAT
GAAACACCTCATTGTTCTAACATAGGGGACCAACATTTTAAGTTCTGTATTAGTGTGTTTTTAACATCAA
AGTTCGATCTCTAGAAAGGCTCATACACAAGTTCCTTCCAATTGTAACTCACTTGATCACACAGAAAATT
CCTTTTATAAATTGTCTTTTCACAACATTATCATGATTCACTTAGATCATTAACAACATGCTTGGACTTT
CTGGTTTGTCCCATACTTCCTCTTTCATGAATAATCAGTCATTTAATCTAGAATGGAAATTTACCACCCA
AGATTTTTTCTCACATAAATTATTTTCTTTTCTTTTCTTTTCTTTTTCTTTTTCTTTTTTCTTTTCTTGT
CTTTTCTCTTTCTTACCAAATATACATCTTACCCTCCTTATACGCTTGCACACAGAATAGTCTTTCTCAT
CAATAGTGGTTTAATCACATACATTAATTACAATGTTAACTCTTGGTGACCCTAATTTTCGGTAAAAACC
TAGAAAGCAAGCAGCTTTTAACTATCAATCATGTACCAACAATCCAAGAATATACATTTTACAATTTCCA
GGAACACATGCTTTCTAACAGAACCGACTCTTTAATATGGAACAGGATATTTTTACTAGAAGATCCACTT
ACGTTTCTCAGAAATAAGAAGCCAAAAGTATATGAACCTAAACCCATAATATTCAGCAGTAAATGTCTCA
GCATTACATCTTATCTGAAAATGATCTAGACATTCAATGTATATCCATCATTTAATTTAGCTTAGCAAAC
CCTAAGGATATCATTACTAAAGACATTTGAGAAATCTTCTTAAGTAAACATATAAAACATAACCATTATC
CACAATTCATTTATGAACTTTTATTTCATTTATATCCATCCAATTCATTCGCTTTTAAAAATTATATTTG
GAAAACTTCATGACACACTAGACAAATCTAGCTACCATCTTAAGCTAAATTTTTTCATCAGCAAAATTTA
CATTATTGCATGCCAGGCAAGTATCATAAAAGCAAGAACCCTAAAGTTAAATACATGCATATTTTTCTAA
TAACTCAGAAGACATAGTGATTCCCACCAAACCAACAATATTAGACTAGTCCCACCCACCAAAAGACTAC
TAAGTTACATGAACTTGAAAAGCATTTGGGCTTATTTGCTTAATTTACGAGTACCCATTCATTTATAAAC
CAATTTGGTGGCATAGACAATATACAAACAGATATGTTTACACATATATACACAAAAATACAAAAAGGCG
CAAAGATTTTACAGCTTAATTTTAAAACTCACTAGTTTAAAAGGACAGTTGGATTCAAAACTGTGTTTCT
GTAAATGTAATAGGCTGAAATTTATCTGTCCCCCGTGGCCAAAGCCTTTACCGAATTTCAGATAAAACAG
CGTATAAATTTGTATCTCAAGCACAGAGAGAATTTAAGTTTTCTCAAGAAGGAGTTTGGGTGTGCTAGAG
GAGGATTAAAATGCATGCCAAGGTGACATAAATCATAGGAATTTATCACACAATGTTACAAAGAAACATG
CAGATGAGCCTAGAGAAAATGTAGGAACCTTTTCAAGATAACCAGCTGAAAGAGTGAAAGAGGAAGGAGG
GAGTGAACAATAGACCAGAGACGGTGAAAAAGGTGCAGAAGTCAGGCAGAGGTGGGCAAGGGGGCTAGTG
GAATAAGGGTCTTTCAAAGGTGTTTTAACAGTTTTAATTTCAATCTTGCAAGCACTATCTCTTTCTGTTT
CATTAAGGCACTCATTCAGTTGGGAATTATTTCTCTAAGGGAGGCAATGGTAGCCTCTTGATTCAATTTA
GAACTTTCGAAGGGCCAACTGAGAATTAGGCTTCCTTTCCATTTTCTCTGGGAGGCTCAGTATTTTCTTT
GTTCCAATTGTGCACGCAAATAGGCAAGTTTGGAGTTTCAAAGGAGCCCCCATTTTTGCCAACAAAGTTT
AAGATTACCCTAAGTAGTTTTTGTCCAAAGACTTAGCCTATTACAATTCCATGGACCATAATTTTTGCTC
ATAAGGCCAGCAGGAGAAAAGCAGTGCCGGAAGGTGGCTGATCAGCAGGGGAATCTTAAAATGTGGGTTA
TCCACTGCACTGGCCTGATGAAAATGTCCCTTCCAATGCCCTTAGTGTGACCCTCCCCACGAAACCTTAC
AGACGAGCCAAGTTCGACTGGGAAGAATCCCCCCAAAGGCAGAGTCAACTGGGATGGCAGATCCACCATC
TCCCCAAGGTGCTGGGTAGTCCCACCTCCATCCTGAGTACCTTCTTAGCCACCAGGGCCTGATCCCAGCA
GGGACAGTAGCTCCTTGAGACCCAGCAGGAAGACAAGGTCTGTATTCAGAAGTCCCAGGTGCCAGGTCAC
AATGACCTCTCACAGTGGGGGTGCCAGGTCACACTAACCTTTCACAGGGACCTGGGAGCCCTTAATAACC
AAGGCTTAGTTCCTGTTCTTTGAAACATAGATTACAACAACCGGACCCACTTCCCATGGTAGCTGCAGGG
GTTAAGTGAGATGCTGGCTCTGAGGCTGCTGTGTGAATTGCCCGGTGTTGTTGAAAACTTGGTTTATTGG
ATTCAATAGAACTCTTCAGATGCCAGCAACAGGAAATCCAGTTCAACAAAACTTAAACTATAAAAAGAAT
TTATTGGCTCACAGAACTGCAAAGACCAGATGCAATGCCCATTGAGACTTAGAGCCTGAAGGATGTGGCC
ATGGGCCCCGATGACCTCTGGCCCACACTCCTGTTCCTTCGGTGGCCACATCCTGGGGCAGATTCTCCCC
ACTGCTCCCTAGACCTTGACACTGAGGGAGGAGGCCCTCTGCCCTGACCCTGGCCCTAGGAGAGAGCACA
CTGTCCTGGTCGCTCCAGCAGGGGGCCCAAGTGGTCAGGCCTAGGCCCCATGCCCTCCTGCCCCAGTGAG
TGTCAGCTTACCTAGGCCTCAGAACCTGAGAGTAGGGAGGGCTGGGACCCTGAAGGAAGGTCAGGGAACT
TTTACGAGAAGAGGGATAGACTTGGAGAGGAGTAAACAGCAGAGGTCTACCTTGCTGACCATCATTCCTA
CTACTGTCGCTGGAGAGAGGTTCCTAGAGCCGGTGAGGCCAGGAGCCCCTGCGTGCATTTAGTCTCCACA
CCCTGGTGTGAGAGAGCCATAGGCTTACTGTCCTCAGGTCAGAGTCCTCCCTGGTCACTCTCCTCGGCCT
CCTAGCCTGCTGCCTGCACAGGGAAGCAATGAGCATTCTCTTCCTGAGTGCCCTGCAATGGAGCCACACC
TCCAGGCACTCCCTCCCTGTGACCATGAACAGGGAGGAGGCCTGACTTCTAGTGACCTCACCAGGTGACT
CAGAGCACCATATTGGGCCCAGGGTGTGTTGCAGACCAGGGCCCAGGTAAAGGGTCTCATTGAGCTTTTA
TTGGCCCTGATGTTTACAGCAGAGAAGGGAGAACTGACGCTGCGTGGGAGAGACAGGCTGGCCTAGGGCA
GGGGCTCAAGCACAGGAAGAGGCTGTGGTCCAGGACCCAGGAGCCGCTGCCCACCCCCAGTGCTCTTGGC
ACTTTCTTTGTTCAATTGGGAAATAAGGTATGCACTACATGCATCTCCCATCAGCCCCTCGCGCAGGAGT
GGTGGGGAGAGGCAAGCTCTTCTGACAGATCAGCCCTGCTGTGTCTCCGGTGGTGGCATCCTGCTATCTG
CACTTGTGTTTGTACTTGGTCCCTGCCCTGAAGGCTCACAATCTACCTGATATGGGGTCAGTCCAAACAG
TGCAGAGAGGGCGTGTGCATGGCAATGCAGGGCACCCGCTCCCTTTCCCAGGTGAGAGAAAAACAGGGCT
CAATATGTATTCCTTGGGCTCTGTGGAGGTGCAGGAAGGCAGGAAATCGGGAGCCTGGGGCCTTTCAATA
AATGAGGAAGCCACAGACCTGGGCAAATAAAGAGAGGGGAGAGAAAGGGCCCTAGAAGCAAGACTGAGGA
AAAAAGAGATCCCTCCCAGAAGTGAGGTCAGGGCAGGTGGGAGCATGGGCCCAGACCAGGGGCTGGACCC
AGAGCAGGGTACACGAGCCCCAGAGTGATCATACAAGTGATACAGGCATTGTGGGGAATCCAGAAAACAA
ATAAGGATGTGCAGGGAACCTCTTCATTAGAGCTTCCACGGGCTGACCCTGCTATGAGCAAGGTGAGGAC
ACAAGGAGAGCACTTCTCACCAGGAAATGCCAAGACAGCATTAAGGAAGCCTGCCTGCCAAGTGTGTGTG
TGTGTATGCGTGTGCATGTGCATGCGTATGCCTGTGTGCGTGTGCGCCTGTGTGTGCGCGTGTGCCTGTG
TGTATTGCCTGTGTGTATGTGCATGTGTACCTGTGTGTGTGCCTGTGTATGTGCGTGCATGTGCCTGTGT
GTGTGTGCTCACGCCTGTGTGTGCATGTGTGTGTGCATGTGCATGTTTGTGCCTGTGTGTATGTGTGCAT
GTGTGTGCCTATGTGTGCCTGTGTGTGTGCGTGTGTGTGTGTGTGTGTGTGTGTGTGTGTGTGTGTGTGT
GTCCTGCTGCAGCCTCTTGACAGCTCCCAGGGTTTAGGCTCCAAAGGCAGAGGGAGGGAGTTCCAGGGCT
GGCACTGGGACTCCCAGCTTGTCTCAGATGTGCATAGCAGGAAAGTTTCAGGGAGGAGATGGGAGAGCAG
GGTCCTGAGCCTCTTCCCATGAGCTGTATATACTATACTAACTGTAGAGCCACCCAGGCCCCAGAGAAAG
CAGGGCCTCCTGTAGAGAAAAGTGAGGAACAACTGGGGAGGGAACAGGGGACCATGAGGGAAGCACTGCT
AAATTCAGAAGAAAAATATGATAGTAATAATGGTGGCCATTATTGAGGGCTGTGAGACCAATTCACTCCT
CACAAACACCTCTGTGAATTAAGCACTGCACAGAGAAGAAGTTAGGTGACTTGCCTGAGGTCACATAGCT
AATAAGCCGACAGTGCTGGGATAGACCAAGAGAACAGCCTGGCTTTGGACCTAAAATCCAACACTTCGGT
TATGCCGGTGAGGAATCCAGTTCTTGCTGGGAAGGCACCCACATAAGGTCTCTGGCCTATAACCCTGGGT
GCTGAGTTCCTTCTCCAGAACTGGGGGTGGGGGGGGTGCTGGGTCAAGGCAGCCACACTCCACTGCATCC
TTGGGTGAGCCCCAGGTTGGCCAGGGTGGTGAAGGCGACGAGGCTCTCAGAGCTCATGAGGTTTGTCTGG
ACTGCTGGAGACAAGGAAGCCCCGGGGAGTGCCCAAGGTCTGTGGGGAGGGAGTGGGGTGGAGCTCTACA
GCTGGTATTGTCATGCCATTCTCCTTGGAGTGCTCCCCTTGCTCTATACAGGCCAGGAGAGGTGTCACTG
TAAGGAAGAAGGGGCCTAAGGGATGGAAATGCAGCATGAGGAAATAGTTTCAATGCCATAGAGAAAAATA
TCTAGAAGTGTTCACACCCATGGGGCTTAGTAATTATACCACTGTCAGTCAGTCCTAAGGCAAAGAACTA
TTTGCAAAATGTTATCCATCAAGTCACTATTTGTGAAGGATGAAAGTTAGAGGCAGCCTTAACTTTCAAC
ACCAGCAGAGGGTTTAAATCTTTTAATAATTCCTGGTTGCCCATGGCTGCCCATGTAGCCATTCAAGAGA
TGGTGAAGAGCTCCTCTCAACACAGAACAATGTTTACTGTAAAAGGTAGGATACTAATGGCATACCATGA
TTTTTCTTGGTAAAAACATGTTTATGGGAAAAACTGGAAAAAGTAGAAAATTCAGTAAAATTTAAGTAGT
GGTATGGAATGATAGGTGAATGAAACAAATATTCTATCTCCCCCAGTAGAGTCAAAACACAGTTATTTTT
GAAAGAGTATAATATAAAAATTAGCAGGCAGTTTAAAAACAAGCATCAAGGCAGAGAGACAAAGTCTGGT
TCTCTATTTGTTCGGCAACATCAAGATGGCAGGATCCTCTGGGTCACCAGCCCGGCACAGGACTGAGGAC
ATTATAGGTGCTCACTGAACATGTGTTGCACTATACATGCAGGTTCCAGAAGCAGAGATGGAATCCCTGC
TCCCCAAGAGTGGCTGGTTATCACACAGCAGTGCTGATGAGTAGGCACACGGGCTGTGATAAACACCCCT
TGGGGGAGGGTATGACCTGAATCTAGTTGGTTGGTCTGCAGACGGGGCCAGGCTGGGGCTCCCTCCCCCA
GGGAGGAGGCTGCTGAGGGACCAGACAGGGAAGGGGTGCACGGTGAGGCCTATTGGGGTTTCTCATGTTC
CCCCAAAAGCACAGAATGTCTTCTACTGGGTGAGACCAGGAAGTGGAACAGACAGCCAGACCAGGCTTTG
AGCGAGTCATTCATGGAAGACAATGGAAACCCCATCGTCGTGTGCCAGGCGCTGTGCACAGAGGGTAGAC
CCCAGGGAAAATGCAGAGCAGCTGGGGTCCCAGGAGGACACTCTGGTGCTGTGGTGCCCCTCCCTTGCCA
CACTGCATTTTCTCAGGTGGGGGCAGGAGGGCAAAGTCTGCCTCATGTCCTGAGCGGGAAGAGGGGGTGG
GAGGTAGAATGGCACGCAGTATGTGCCGTGGAAAGCCATGCTGGAGGAATGGAATGTGCAGTCAGCAAGA
GCAGAAAAGAGGTTCTCGGGGCTGGATCTAGTGAGGGCCCACCAGTGACCCCAGTCTGTGCTCAGGCCTT
CATTTAGGGAGAACTCACCAGGCTGGGTGTGGCCTCGATTCCTGAGATGGCATCCCTGGGAAGAAAAAGG
GAGGGCTTTCCAAGGGGGCAGGGATGGGCAAGGCACTAAAGTAGGCTTCTGACCCTGAAGGGTCATGCTG
TGGGTGGGCGGTGGACTTGGTCAGCCCACATGTTGTGGCTCAGTCCCTTTGAGCAAGAGTTTCCCAGCAG
CTTGGATTCTGTACCTGGGCTGCCTGGGCTTTAATCCTGGCTCTGTCACTTACTACACATGTGGCCTGAC
CAAGTTATTTTACCTCTCTATGCCTCAGTTTCTAATCTTAATCTTCTCAGTCCTACTAGTTCTTAGGGCC
CCGCTTGACAATCTCCTCCTCCAGGAAGTCTTCCTGCTGCCCAAGGTGAATTAGGGCCCCTCTTCCATGC
TCCCATAGCAGCTATGCGCAACAGCTTTCTTCCTACATCACAGCCACGTTTTCTCTTTTTGTTTTCCATT
CTGAGACCGTAGAGTTTTTGAGGTCAGGAGATGTTCTTGTGGCTAATTGTTTTGTTTTTTAGGTTTTTTT
TTTTTTTTTTTGTATTTTCTCAGTGCTAGGAAGTATTTGCTGAAATTCACGTAAAATGGAACTAATGAAA
ATAACCTTCCTCATTTGGTGGTTTTGAGGATTAAAAGAATCAACCTTGGCAGGGCGCGGTGACTCACGCC
CGCAATCCCAGTGCTTTGAGAGGTCGAGGAGGGTGGAACCCTTGAGGTCAGGAGTTTGAGACAAGCCTGG
CCAACATGGTGAAACCCCATCTCTACTAAAAATACAAAAAAATTAGCCGGGTGTGGTGGCAGGCGCCTGT
AATCCCAGCTACTTGGGAGGCTGAGGCAGGAGAATCTTTTGAACCTAGGAGGTGGAGGTTCCAGGGAGCC
GATATGGCACCACTACACTCCAGCCTGGGCAACAGAGCGAGACTCCATCTCAAAAACAAAACAAAACAAA
ACAAAAAAGAATCAACCTTGTATTAGAACCTGGCACAGACTGTTGGCACTGTTAAAATATAAAATAGTGG
TCAGGGTGACTTGCAGAGGAACAGGCTGCCCCACCAGTGACAGTGACAAAGCAGTGGAGCACTTGCTGCA
AACATGGCCTCTGACTCAGGAGAGGCAGTCACTGTTGAGAGTTAATCCATGATCACACTTGGGTATCTAA
ATTGCCAAGGAAGCTTCATCAGCTGCTGCAGGAGTGGGCAGTGTGGCCCACCAAGTTCATGGCCAGCCAG
TGGTGAGAAGAGACAAGGCTGAGACCCAGAGACAACCCAGAGGCCTTCAGGGGGCAGAAGGAGCGGGGTT
TGGGCAGAGAGAACAATGGCATGGAGGTCTAGGAGCAATGAGGCCTTTTCCAGTCACGAGGGCCCTTTTA
GAATTTATTTCTGCTTAATAGCACTTAATAAACATTTTTGAGCAATGGGATATGTTAGGTCAAATGGGGG
ATATAAAGAGAGTTGACACAGAACCTTTGCCCTTGAAGAGCCCACAGCTGAGTTGAAGGAAGAGACCTAG
AGCACAGTTTACTAACATCAAACCACCAACCCCCACAGCAAGAGCAGCTTCCCAGCATTGAGACCTCACT
ATGCTCCAGGCATTCCATGCATCATCTCATATGCACTTCATAACAGCTCATCACGAAGAGAAGTCACCGC
AGATCCAATGGGTTAAGCAAGCTATCGAAGGTAGTCAGCAATTTTGTCTGACTACAAGTTCGTGTAATAA
TAATGTGAACCACTCCTTGAAGAGTAGAATCCAAGCATTGTGAGGCTGGCAGTGCAGGCAGGGGAATAGC
ATGAGCAAAAACCAGAGGTGGGAATGAATTTAACTGCCCCAGGAGGAGGCCCAAGACAGCTGGAGACAAT
TCAGGCAGACAGGAGAGCCCGTAGCTGCTCAGCTGCTCCCTGTCTTTTTCCTTCCCTCCGCAACCTTGAG
AAAGTTGTCGATGGGTTCTATTTGCATTTTCTCCTATCCAGTTCCTCCTGCCCACATCACCCACTGCAGA
CACTCTTGCCAAGTTCCTCAATGCCAGCGTTGCCAGCCTGGTGGCCACTCCTCAGGCCTTCTCTTGCCTC
CCCAGCAGCCTGGCCATGTGCCCGCCCTCCTCCATTTTGAAAGAGTACCCTCAGCTCTATCAACACCTCC
TCCCCTGGTTTACTTTCCTCCACTCTGGCTCCGTCCCTTGTGCCACCTTGATATTGCTGTGGCCCATCCT
GGACCTACTTCTCATCAACACAGTCTCCCTAGGAGACTCATCCCTTCTTGAGGCTTAACCACCACCTCCA
CGTGGGATTTCCAAGCCCATATCTCTAGCCCAGTGTCCACCCTGAGTGCTGGACCCATATACCCATCTGA
CTCCTGAAGATCTTTACTTGGGTATAGTCTGGGAAATTTGAATTTCAAATGTGACCAGGATACTCACTGG
CTTCCTTCAATAGTGACTGCTCCTTCTGGGCCCCCTCTGTCAGGAGTGGGCATCACCAACGCTAGTTGCC
CAAGCCAGATCCTGGGAGTCATCACTAACATCTCTCCTCTCACTGATATGTGGGTGCCACCTCGCTTTGA
CATTTCTTAAGCTTTTCTCTCCTTCCTACCACCATCCCACTGCTGCCATGCCAGCTTTTATCATAGCTCC
TGGGATTCCTTCCACAGACTACCTAATTCCACTCTGGCTGCCAGAGAGGTCCATGTGAAATGCAAATTAG
CCCAGGTCACCCTTGGTTAGAAGCCTTTAACGGCTCCCCATTGTGCTGGGGAGAAAACCTAAACTCCCAG
CCTCTTTGCTTCACACACACATACCCACTGCGCTTGGTCTTGAGCTCCAGCCAGACTGAAACCATGGAGT
AGGTTTACCCTCTTTACCCTAATCCTCTCAATCCTACTAGTTCTTAGGGCTCAGCTTGACAGTCGCCTCC
TCCTAGAAGTCTTCCTGCTGTCCAAGGTGCATTAGGGCTCCACTTCTATGCTCCCATAGCAGCTGTGCAC
AATAGCTTTCTTCCTACATCACAGCCACACTTTCTCTTCTTGTTTCCCACCCTGAGACCATAGAGTCTTT
GAGGTCAGGAGATGTTCTTGTGGTTTAGCTTTTTTTAAAATTTATTTATTTATTTATTTATTTATTTATT
TATTTATTTATTTATTTGAGACAGAGTCTTGCTCTGTAGCCCAGGCTGGAGTGCACTGGCACGACCTTGG
CTCACTGCAGCCTCTGCCTCCCAGGTTCAAGCAATTCTCCTGCTTCAGCCTCCCAAGCAGCTGGGACTAC
AGACACCTGCCACCATGCCTGGCTAATTTTGTATTTTTAGTAGAGAAGGGGTTTCACCATGTTGGCCGGG
ATGGTCTCAATCTCCTGACCTCAAGTGATCCGCCCGCCTCAGCCTCCTCAAGTGCTGGGATTAGAGGCAT
GAGCCACCGTGCCCAGCCTATTTTTTGTATTTTTTCAGTGCTAGGAAATATTTACTGAAATTTAAGGATG
GAAAGTCTGGGAGACCGACTCTAGGAGTGCTCTTGAAAGGAAATGGGTTACTCCATGTGTAGGTGTTGAA
AATGTAAAACACAATATTATTTCTCCCTTTTTCCCTAATAAAACCCCAATTTTGTTCAGAGGACAGCAAT
AGTGTTAATTACACTTCTTAGCATCCTTTGCAGGGGGTAGCTATGTGACCCAGGTTTGGCCAAGAAGACT
TAAGTAAAAGCAACTGTGCACGCAAGGGAGAGATTTGCTCCCTTGATGTAAGCATGGCCCCTTCCTGTTT
CCTGTCTTCCACATCTTTCCTGGAATTAGGAGAGGAGGCTGGAGATGGAGCAGCCATCTTGTGACAATGA
GCCAGCCACAGGGATGGGAACCACAGGCTAAGGAATCTTGAAGGGCCTAGGTCATGACCCCTGGACTACC
TACTAGCAGACTTCTAATTATTGAGAGACAAATAAATCTCATTTAAGTCATTTTGGTTGGCTCTCCATTA
CATTTAGCTGAACTCCACCCAGTAAAGGTCAATGAAGGAAGATAAGCATCTGTGAGCATTTCTGAATAGG
CTTTTCCTTTGGAGATGATGCTGGCGCTGACGGGAGGCAGAGGGCCAGGTTAATGGAACAGGACTAGGTG
AGGGCTGGAGAGGCTGATCCTCCCAGGGGTTCTACCAGAGGATCACAGTGAGGCCTCAGGGTTTGAGAAA
GAAGCTCCAGGCATGGTAGCCCTAAGGTGTCTGTGACCTTGGCCTGGGGGTTTTCTGGTCCCTGTTTGGT
TCAACTTGCAAAATGGGGCTGTTGGACTAGACAACTTATCAGAAGGCATAGTGCTTCAAGTCTGGGCTTA
GGAGTCAGACAAGGCTGAATTCAGGGTCCAGCTCCACCACTTGCTAGCTGTGTGGCTTTCAGACAGCTTT
CTTAGCCGACTGCTCTAGCATCCTTGTTTGTGGAGTCCAGACTCCATCAGTACCTATACCTGTAGGGCTA
ACGTTGGGGCTTCATGAAATCATGCATGTGGGTGCTCAGCAGAGGGCCTGGTATGCCCAGCACACACCAA
GTGCTCCATGCTGGTACCTGTCCTTGTGTGCCATGTTCTCCCAGTGGACAGATGGGACCTGGAATTCATG
CCTCCTCTGGGGCTGGGGCTGGGGCTGCTACAGTGCTGTGGAAAGCCTGTCAGGATGTACCTCGCTCTGT
GGCTGAGTGAAGAGGCCAGAGGCTGCCCACTGTTCAACATCTTTGGAATGCTGCCGTGTCCAGGGAACTT
GGGTCGCAGGTGGATAGAAGCCCCCAAGCCCAGGCCAGGCCAGACCAGGCCCAGAAAGGTATCAGGTCTT
GGGTAGAATAAGAAGCCTATGTGGTCTATCTATCCTGTGGCCTTTGTCTTAGCCAAAGCCTCCTGGATAT
TGACGGCATCTTTTCCTGGGTTTGGGGTGGGCTTGGAGAGGTTCCCTCTGCACGGGACTACAGAAGTGAG
GGAGCTGGAAAAATGCCTCCAGAGCTGGATTCCTCACTGCAGCTGCTTTTGGAAGAACCTTCTTATCCTT
CCCTTGAGAAGCCTCACTGTCTCTTCTCGGCGCTTGGAATCCTGTTAGTAGAAAATCTTGGGGAAAAAAT
AAACCCACTATTCATTCCAGCACTGAGAAGGAGGTCAGTGGGGTGCGTCCTGTTTGTCCACACCCCCCCC
ACCCCCTCTACCCCTCCCCCCAGCACCCCAGGCCAGACCCAGCCATGCTGACACTTGACAGCCCCTGCAG
TTTACCTTGGCTCAGGTCCAGAGACTTCGGGCCCAGCCCCCACCTTTTCACCTTGTTACCCAGCCCCCTC
TCCAGCGCAAAGAGCAGTTTAAATATAAATCAGTCCTCAACACAAACAGAGCTGCAGCGAGTCTCAGAGC
CATCACCGGAACTGAGGGCCCAGGTTTTCTGCGAGTGCAAACAAGCAGAGACTGGCTCCGTAAATCTCCC
CAAGAACGTCGGGAGGGGTGCTGGGGCTCCCCTCCACCCCCGGCTCACGTTGGCCCCTCCAGCGCCCGCC
TCGGGCACCCTCATATCCCAGCCTTCCTGCCCCCCAGCCCTGCCAACCTCTTTCTCCATCCCCTCCACTC
ACCCACCTTCGCTTCGCCCACCCTCTCTTCGCCAGTCCCCAGGAACCTCCACCCCCTTGCAACCTCCTGC
CCCCGCACAGCCCTCACCTCCCCTCCCCGGGCCCGCCACCTCCTTCCCTCCCTCTCCGCCTCCCGGCAGG
CGGGATCTTCTCGGGGCAGTCAAGCCTCGCGGGTCGCTGCGGCGTCACACCTGTCTGAGGGGGCGGCGGC
GGCGGCGGCGGCGGGGCGGGGGCTCGTAGCGCCTTTGACACCCGAGGAAAAGAGGGAGGAGGGAGAGCGC
GTTTCATCATCGGCGGCGGCCACTTATAAAAACTTCTAGGCGCGCACTCGCTGGCTCAGTCTCCGCTCCG
CGAATCTCCTCCGGCCACTGCCGCCGCGGTCGCCTCTCACCCGCCCGGCCGCTCCAGCCCGAGGCGCCCC
GACCCCGCGCCACTCCGCGCCCGGCCAGCCGCCCGCAGCCATGGGGCTCCTGCCCAAGCTCGGCGCGTCC
CAGGGCAGCGACACCTCTACTAGCCGAGCCGGCCGCTGTGCCCGCTCGGTCTTCGGCAACATTAAGGTGA
GCGGAGTCCGCGGGGTCTTCCGGGCCGGAGCCGCGCCTGGCGCACCTTCGGCTGGGCACCCGCTTCTGTC
TGCCGGAGCCAGGAGGCTCCGGGAGCCCCGGGCTCCCTCCTGTGCCGCGCTCCGATCTCATCCCCGGGCG
ACGCGTGCTGGGCGTGTGTGTGCGAGTGTGTGTGTGAGCGTGTGTGTGTGTGAGCGTGTGTGTGTGCGTG
CGAGTGTGTGTGTGTGTGTTCACACGCCTTCATCGGACTAAGTAATGGGACAGTGGAAGTACCTGCTTAC
CGCTTACTCGGACAACTCCAGGCAGAGTTATAAGCGAGAGAATTGTCCTCGATGATTGAAAAAGATCATC
TCGAGGAACGCTTTTTCGGCCTCCAGCGGGCGGTTACTTCGTCAATGGGATGGGCTTGGAGGTGCCAGGG
GGACCCCCCGCGCTTTGGGGGACAGACTGTGTCTCGTCCGAGCCCCCTCGTCCTGGGGTGGGTGGCCTAA
GGGATGTTCTCCTTCCCCAGGCTTTCTTCTCCCGCCAACGGGGGCGGGGGGCTCTGCTACCTGGCTGTGC
CGCTCGCAGTTATGTTTAGAATTCCCTCTCAGCGGGCGGCTTCCCCAGGCTGGCAACCAACCCGCGTGCT
CAGATTGGCTTCCCTGGTCTGGAAATGGCCCCAGGAAGGTCACAGCTCTCACGGTTCAGTAAGGTCTAAG
CAGGTCCACTCACCAGGCAAGTTATGGGGAGCGGGTGAGAAGATAGGGTGTTGGCAGCTGTTAGGATGAG
AGCACCTTTCCCATGGGGTCGGAAATGCTTTCCACTCCCTCACAGGTCCAGGAGGACCTGGAATGGTTCA
ATCCGCACTCGGGCTCTTTTGCCCGTTCTGCCTAGGCAGAAGTAACAATGGAAGATACCTCCTGAGAGGC
CAAAGCTGCTGCGGTGAGGATGTGGGAGACTGCAGAGACTGCATCAAGGCCCCTTCTGGTCAGGGTGGGA
TCATGGTGTAGAGAGGTTGTTTCCCACAAACATACAGTCAGATGGGACTGAGTAAAGCCTCCGGTGGTGC
AATTAAGGGGAAGCCAGATTACACAAAGGGATGATGGGGGTGTCCGTGGACTGGTTATATGTGTCCAACA
GAAAGGGATCTGGAGGTCAGAGTGGATCTCACCTGCATACTTACTCAGCTGGGATCTCCACTCCTGCTTC
TGCTCTTTCCGCACCGCAATAAATACAGGCTGAATTGATTTTGTAGTTGTATATGGATAAGCAACAGAAA
TTTTGAGATAGCTTAAAATAATCTCCAAATCTCCTCATTTTTGGCCAGACCTGGATGGAAATGTTGTGCG
CAGTTTTGGTTCCACCATTTTGGAGAAATTTCATCAGGAATTTTGGAACCTTTGGTATTTATAAATTAGG
AATTGAGATGAAAGGGTAGGGACTAGGATTAGATGGTGTAAAGAAAGGGGCCTCTGCAGGAACCAGGGTG
GGGCAACCTCACTTCATTTTCACCAAGAAGGGCAGGAGGGACGGGTGTCCAGAACAGATTCCTGACAGTG
AGGGTACAGCTGAATGAGACTGATCCGTTTAGACCCACCCTGGTTCCCTAAAATAAATGTTTATGGCAGC
AATTTATTTGGAGATCTATATAAATAAGATGATTTCTCATGTGTTGATGATTTAACCACACGTACCTGAG
GGCTGGGCTCAGGCCAATTGGCCTCCTAAAGGAGTTAAGTACTCATACTGGCTAAGAGTTTTTCTTGACT
CTAAAAATGAGATTCTGTTAGTCATCACCTCCTTTGATCCATACTAATTGCAAGACCAGAGTTTGGAGGA
CTTCCATTTAACTCCACTTATCAGCCTGAAACCAGGTACGAGGTTGGATAGCTTAAGGTAAATCTTGAAT
CTCAAATTCCATCAGTTAAAGTCACTTGCACCTTTCCCTCCTGGGGCAATAACTGGGAGCTCTGCTATTT
GAAGGGATATTTCCTCCCAATGAGAGTGCTTGTAATAGCCCTGCCACTTTGCAGTGGGGGATGGGTTGCA
CATATCTTGGGACATGTATGACATGGTGGTGTAGCAGGACGAGCCACAGACAAAACTCCTCAGACACTGA
GTTAAAGAAGGAAGGGGTTTATTCAGCCGGGGGCATCAGCAAGACTGCTGTCTCAAGAGCTGAGCTCCCC
GAGTGAGCAATTCCTGTCCTTTTTAAGGGCTCACAACTCTAAGGGGGTGCACCTGAGAGGGTCGTGATCG
ATTGAGCAAACAGTGGGTACGTGACTGGGGGCTGCATGCACCAGTAATTAGATCGGAACAAAACAGAATA
GGGATTTTCACAGTGCTTTTCTGTACAATGTCTGTAATCTATAGATAACATAACCGATTAGGTCAGGGGT
CGATCTTTAACTACCAGCGCTAGGGTGCGGCTCCGGGCTGTCTGCTTGTGGATTTCATTTCTGCCTTTTA
GTTTTTACTTTTTCTTTCTTTGGAGGCAGAAATTGGGCATAAGACAATATGAGGGGTGGTCTCCTCCCTT
ATTCCCCTCCTTTGAGATTCTCACTCAATAGTGGGAGTTCTCACTTTCATTTTTACTACCTGTGTCTTCT
TGCAAGACAGATCGATAGTGATTCATATAGTACACTTGTGCTGAACCTTTTTGGTGAACTAAGGTAGCGA
TGAAGCTTTTTATCATTTGAAGAAGTATAGGTAGCAAACAAGGGAGCAGTAAGCAGGTTCCTATTACTAT
TATAACTCTTATTATTAGAGTTTTAAATTCTCTTAGCGCTGGGAACCATTTTCTAAACATGGCCCCAGGA
TCAAATCCATGCCACACTTGCACAGGCACATGTGCCAGTTTTGTCATATCTCTTAACTGTGTCTTCAACT
ACTTGCCCTTGATTATCTATATGTAGGCAGCAATTAGAAAGGTTAAATTTCCTACAGACCTCTCCTTCAG
CTGCTAGCAAGTAGTCAAGAGCTAATCTATTTTGATAGGTAGCATTTCTCATCTGAGTTTCTTGCTGGGC
CAGAATAGTCAAGGCTCTGCCGGTTTTATTAGTGATTATTTTTAAGACAGCTTGTAACCGTATGATTCAG
TTGATCACGTAAATGGGGGTCTGGTATCCTCACAAGCCGTCTTGTGCCTAGCAGGCCTATAATATTGTAT
GATTTTCTCAGGGGGCCATTTATCATTTTTTCAATTTCCTATAGCTATGCTTCTCTTTTCGCGGGAAGCA
TAGACAGGGAAGCCCAGGAGTTCGCCTGTTTTTATGGGCAGTAGGAAAAAGATGGTTTAATAGTGCCAAT
AACAAAACTACCTGCCTACTGGTCAGGTAATTTGGCGTAAGCTCTATGCCTACGTATCTAGTATAATCCA
GTGGGGGCTGTCTAGTCCCGGTGGGACTCCGGGTGGGTCCACACGGTTTGCAACTTTGGGAATTTACTAA
ATGGATTTCTCTCTGTGTGATTAGAACTCCACCAAATGACTGTTTTTGTGATACCATTATAAGTTTCTGT
CCTAGACAAAGAAGTCGTCCTATGGGGTGAGTAAATTCTTTTCCTTCTCTAGCTATGCAATATTGTCCAA
TAATTGAGGCTTTTAGGACCTAGAAATTATCAGGGTGATTCTTCTGAGCTGGGAATTCATCAGGAACTGG
GTCTGTAGGTACTAATTCTCGGGCTTCCCATGGTCATTGATCTCTTATTACAGTTCCTCCACATACATAA
CATGAAGTGACATTGAGAGAACATGCTCAGCTAATTGCAAAAACAAATTTCTTGTTTTTCCTGGAATTTC
TGGTACTGGCACATTTAGTTCATCATAGAAAGTTTGAAACACTGGCTTAGGAGAGCGTTTGTAAACTTCT
CTTCAAACCAAGATATTTACTCGAGGATCCAGTCCAGCCCCATTGATTCCTAAGGTCACACGCTCCTCTT
TTTTCCAGCGAGGATCAAGGGGATTGGTTATTACTAGCTCTAAGGGGTTACATTGTCCCTTAGTACAGGA
AGGGCCATTTTTTCCTTTCTGAAGGTGGACTGGATCTTTTTCATTTTTTTTTTATCGAAGTGGCCTAAAT
GACACAAGACCAGTATTTACATTTCTTTCCACACAGTCTTAATTTATGACAGATGTACTTATTTTCTGCT
ATATAGCCTCTTTTCTAATTAAGAGAACCACAGCTTATTCCTAACTTATTACTATTAATGACAGCACAGG
CATCAAATTTTAAGATGACTCGTTTGGGCACCCCTTTTTCTTCTGTTTTGGCTAGCACTTTACTCATATC
ATTTGTGAGCCCTCACCAGTCCTCAGTCCTCAATCTAATTTTAAAAACTGTGGTCATGGGAGGCTCAGAT
GGGTCATAACACACATCAGGTTGGTCATTTCCTGGGCTACATACCTTGTATAGAATTATATTATACAACA
AGTTCTTTTTAGAGTTCCAGTACGCTTATAATAACCATAAAATAATAGGACCGTAGCAACCTTTTGTCCT
ACCTCAGTGACTTGATGTATACACTGGGAATAGTCCTCAGTCTGAGGAAGGTCAGTTGAAGTCCTTATTG
TAAAAATGCAAATTTTAAGGAAAATGAGTCCCGCAATGAGTTTTCTCATGCTTCGGCCGTGCATGGACCA
GTCAGCTTCCGGGTGTGACTAGAGCAGGGCTTGTCGTCTTCTTCAGAGTCACTTTGCAGGGGTTGGCAAA
GCTGCTCCCGTCCACATACTGCTCACAGTCTACTGATGTTTAAGGATGGTCTCGGAGGTTGGGCCTGTTA
GAATAAACTGAGTCCAACACCTCTACACAGTTATGTTCAACTGGGCTCTCTGATACTGGGAGCAAGGTGG
TGGGGTTTAGGGTGTTGCAAACTTCAATGGTTATGTGGGGATTTTCACATAGCAAGCTTTGGTACTTGGT
TAATCTAGCATTTGTTAACTAATGATGTCCTTTGGTAGTCATTAAAGTTACCACAGCATGGGGAGCGTTT
ATATTCAGGTTTTGCCTAAGGGTTAGTTTATCTGCTTCTTGTGCTAACAGGACAAGAAGGCCCTTGTTGC
TGCTAGGGCCCTTAAACCTGGGGGCCAGGCTTTGGAAACCCCGTCTAGTTGTTTTGAGAGACAGGCCACT
GGCCTTGGCCAGAGCCCCACAGTCTGGGTTAAAACTCCAACTGCCATTTTTTCTCTTTCTGACACATAGA
GTGTAAAGAGTTTTGCCAGGTCATGTAGCCTCAGGTCTGGGGCCAACATGAGTTTTTCTTTTAACTCATG
AAAAGCTCGTTGCTGTTGGTTGTAATAGATGTAGTTTATCTAATCTACATTTTTGTTAACTGTCACCCAC
AAAAATATTGACTCAAATCCTGCAGCTATTTGATTTCAAGCTTTAAATTGATATGGTATTCGTCATGGGA
CTCCAATTGTGTCTAAACAGACATGAGAGTCGAAAGACCTATAAGGGGCTTCTCTCGCTTTACGATGTCT
TATTTTTCTCCTTCTGGTTGATGAAATGCCAGGGTGAAAGGGATAGCCAATTGGACTAAAGTACAAGTGC
CACTCCATTTATTCAGCAGAGTGCCCAGTAAAGGTCCACCACAATACCACCACACATCTGCTCGGGGATG
AACAAGGGCTGACTGATTGATAAGCTCTTGAAAATTCTTAAGCTAACTGCATCCTTTCAGGTCTCCAAGG
AACACTAAGTTTCCTCCCTGTCATGAGAGACATGAAGTGACTTAGTGTTGGGAAACGGAGGCTGGATGGC
CTTTGGGGGCTGACCCGCAGGGTGCCAGACTTTGGGATATAGCAGAGAGAGCTTGGCATGACTTATTACT
CCAGGCTGTAGAATCCTGGAAAAGAGCCATGCAGCCTACACCTGGTCAACTGGAGGACCACCTTAGTGGA
AAGGGGACAGTCTGGGCCTCTGACCTGCCATGTGCACAAGCATAACAATTGCTTTTGTTTAACGTGCAGA
TGGAATATTTGATCCATTTTAACCAAGCATTTGCATCTTGGTATCCTGTCTCAAATTGCTAAAGTTTGTT
TTAAGTCTTTAACTTCCATGATCCTCTAGTAAAATGAATGTATGATTTTAGGAAATTACAAAAACTGGTT
GGGGCAGTCCATCCTTGCTCTTTAGTGGTCCACAGAACATTGGACCAACTATGGCATGAAAGCTCTACAT
CGGGGGGCAAGACTTCTGGTTGGCACTGGGGTCTTTATTGAAATCTCCCCAGATTAAATGGTCCTACTTT
ACTAATGCCCAGTCTGAGGAGAGTCAGGAGGGACAGAAGTACTTTTCTAAAGCAGAAAGCTGTCTTTGAC
TTGGCAAGTCCTCACAGGGTATAGCAAGGCAAGCATTAAATGCAATAGTTTGAGGAGAAATTGACTTGGT
TATGTTAATAACTAGATGGTCAGCAATAGAATGAGGAAAGAAGAAAGAGTAATAGAATAGATTAAAAGAG
TTAAATTTTTCTTAGCTTTAGTTTGATAGGGTTTTCCCCTGGGACTATGGCCCACAATTCTGGAGGGGGT
GGCGCTTTCTTGACTCGGGTGTAATGAGTCCATTCTTTTGTTTGTTTGTTTGTTTGTTTGTTTGTTTGTT
TTGCTGTATGAACAGCAGTCTTGTTGGTTAGCAGCACAAGGTAGGGTCCTTCCCAGGCTGGCTTGAGTTT
TTCTTCTTTCCACCCTTTGATGAGAACGTGATCTTCAGGCTGGTGCTGGTTTACTGGAAATTCTAGGGGT
GGTACATGTGCTAAAAGACTTAGTTTTTGAGAGAAAGGAAAGTGGAAGATAAACCAAGTATATAATTTTT
AAGACATCGACCTTTTGTTTTAACTGTGGGGACCTGGACAGTGGACTTTATAGTCCTTAGTGCCTTTTTA
CTGAGAAATTTCCTTTAGCACCTATTTTTATTAGTTTTTAAACCAAAGAAAGCCAAATACCATTTTGCAT
TTAACAGTGCTTCTCATATGATTTTTACACCAGATAAGCTAAATTTTACCTTTATATTAGTGTGTTATTA
ATGTTAAACCTAATTTTAATAAAACCTTCTAGACATATTTATCTAATTTTTAATGTTTGACCATAAGGTA
AGATTTTATAGACTCTTTTTAACCTTTTATAATTTTTGCTAAAGAGCAGGTTGGTGCTTTAAGAAAAACC
TGTTATGCTTTTACTTTAATGTCCAGTTCACAGAAAAACTGGATGATACTTCTTTAACTTTAGCTAATAT
GTTTACACACAGAATTTTCTTTATAATTAACGTTTTAAAACTTGCTTAAACCTTCAAAACAATAATTTTT
TTTAACTTTTTAATGTAGGTAAAAATGTACATTCTTATGCCTCCTTATAATCTTTTTACCAAAGGTATAT
TTTACTTTTCTTATACACCTTGCATACAAACTGTTTTTTAATAGTTTTAAATTCAGGAGGCCTAGTTACT
TTTAAATTACACCACATTTTTTGCATAAATTCTTTTTTATAACTTTTTTCTTTCATGACTTTCGCAGATA
ATTCTTCGACATGCCTCAACTTTTTGACTTATTACAAATATTTCTTTCTTTAAACAACTAGTTAATTTAT
TTCAGGACAAGAATTTACCATATAATACTCTTTTTACATAAATTCCGCCCCTCCTCTTTTTTTCTTTTTT
TTTTTTTCCTTTAGGATACTTCTGAACTGGTGAGGTGTGCTCACAATGAGGTTTCCTCTAAAAGTTTTTT
TTTTACTTTTTTTTTTTTGTTAGCAAAGCAGTTGCAGCTACAGATTGAATGCATTTGGGCCATCTGCGGG
TTACTGGGTTAAGGATTTTTTATAGGAAGGCCTCAGTGCTTTCAGGATACGCCCTTGTTTACACTGACAA
CAAAGTGGTATTGGAGTGTGATAGGTTACAGAGAATACCTTCAATTATCAATTATAGGTTTTAAATTTAC
CTTGGCTTTTATAGGGTACACTTTTTTTTTCTTAACTACTTGTATATCTCTCTCTTTCTTTCTCTCTTTG
ACTTTGTCTCTCTCTCTTTGACTTTCCTTTTGCCTCTGTCTCTTCTTCTCTTTCACTGCCTTTCTCTTTC
TCTCTCTCTCTCCTTGACTCCCTCTTTGTCTGTCTCTTCCTCTCTCTTTGCCTCTTTTCTTCTCTCTTTC
CTTTCTCTCTCTCTGCTGGTCTTTCCTTGCCTCTGCCAGCCACTTATGCTGCTGTTCTCTCAACCACTGT
GTGTTGGGGGCGGGGGGTCTAAAACCAGCTGTAACCAAGTGTCTATGTACAGGAACTGGTCTGCATTCCC
TGGCTTACAGGTTACCTTGGGCCACACCTTTGAAACAAGGGACCTGTCCAGGCTTCCTTCTAATGGCCAA
CTTACCTCTAATGCTGGCCAGTCTATCTTACACAAAGTTTTAAGTTTTCCTAGTGTCACAGTACTCCATA
GTCTCCTTTAAATTCTTTTTTGAAATTTTTCAACATAGTTCCTAGTAGGGTGGGCTTATTTGTGCCTGAC
CTATGCTTCTTCGAGACAAAACACGCTCATACCACATGCACACCACAAACCAAAGAACAGGTAAAAAGGG
CACGCACACACTTTTGCAGTTTGCACCAAAGCAAAATCAAAACCAAAATCAGAGTATCCAGAAATCCAAG
CCAGGTCAAAACCAAAACCAAAGTATCAAGCAATCCAAGTCAAGTCAAAAACAAAAACCAAAGTGCCGGT
ACAGGCATGCCGTGGGTGATGAGGCCACGCTTCCACTCAAATGGAGTGGGCAAGTTCCCAAGACCAATCC
TGTCAAGCAATTCAAATCAAGTCAAAACCAAACCAAAGTGCCGATAAAGGCACACCATGGGTGATCAGGC
CAAGCTTCCACTCAAATGGAGTGGGCAAGTTCTCACGACCAGTCCTGTCAAGCAATTCAAACCAAGTCAA
AACCAAAACCAAAGTGCCGATAAAGGCACACCATGCGTGATCAGGCCAAGCTTCCACTCAAATGGAGTGG
GCAAGTTCTCAAGACCAGTCCTGTCAAGCAATTCAAACCAAGTCAAAACCAAAACCAAAACCAAAGTGCC
GATAAAGGCACGCCATGGGTGATCAGGCCACGCTTCCACTCAAACGGAGTGGGCAAGTTTTAAAGACTAG
TCTTACTAAGTTTTAGATGTCCAGACCGGTGAAAACCTTCCTGGTGTTCAGCCACTGCGTTGCTCCTCTA
TGGGGGCCTGCCACACACTGCCCTGGCAAGGCGTCCCACTGGGGCAAATGCCTACCCCTGAGCGCTCTCA
GGATCTGCGTTGCTTGGGCTAGTTGGAGTCCCCCGCCGAGATGTTGCACAGGGCAGGCTTAAGCCGCCTA
AGGAGCTGCCTCGACCATCCGCCAATCACCTCGCTTCCCGGTCAGGGAACCAAGAAATGTAGCAGAATGA
GCCGCAGACAAAACTCCTCAGACACCGAGTTGAAGAAGGAAGGGGTTTATTTGGCTGGGGGCATCGGCAA
GACTCCTGTCTTAAGAGCCGAGCTCGCTAAGTGAGCAATTCCTGTCCTTTTTAAGGGCTCACAACTCTAA
GGGGGTGCACATGAGCGGGTCATGATCCATTGAGCAAGCAGGGGGTGCGTGACTGGGGGCTGCATGCACC
GGTAATTAGATCGGAACAAAACAGGATAGGGATTTTCACAGTGCTTTTCTATACAATGTCTGTAATCTAC
AGATAACATAACCGATTAGGTCAGGGGTCGATCTTTAACGACCAGGCCTAGGGTATGGTGCCGGGCTGTC
TGCTTGTGGATTTCATTTCTGCCTTTTAGTTTTTACTTTTTCTTTCTTTGGAGGCAGAAATTGGGCATAA
GACAATATGAGGGGTGGTCTCCTCCCTTAGTGGGAACAGCGGAAACTCAACCAGAGGGTCTGTCATTTGT
CTAGGTTCCTTGTTGCTGGACAGACTAACCAATCCACTTTGGACATTCCTGCAAAAACCCACATACCATA
TAGTTTAGGGGAAGCGGATAAAGCCAGAAGACTCAGATTTAAGGTCCCATCCCAGCCACCTGCTAATGGG
ATGATGCAGGGAAGCATTTCTCACCTTTTCAGGGCCTCAGCGTCCTTACCTGCAAGAGCTGGTAATTGAC
CAATATCCAGCTCATGGGGCTCAAAAAGGATTATGTGGAATGAGGCATAGGAAAAAGGCTTTGTAAACCA
TGCTGTGCTGTCAGGATCAGTACCCATCTGAGATCAATTCTTGCTTCAACAAATAGGATTTGTTCACATT
CAAACATTTAGGAACAATTGTTCCACCAATTCCGTGAGGCATAGTTATTAGTTAAGAAAAACCACATTTA
ATAATAATAATGATGATTAAAATAATAGTAATAGTGGCTAACAGTATTTGAGCTGTATGAATGTACCAGG
AACTATGGAAGTACTTTATCTATATTTAATCCTCATTACAACCCTATCAGGTGGATACTATTATTGTCCT
CATTAATAATGAGGAAAACAAGGCATTGTGAAATTGTTCACATAACCAGAAAGGGGTGGACTATAGAGGA
ACCAGGTATGTGAGACTTCAGAGTCAAAGACCCAAACCCCTGTTCAAGCTGGCCCTCACCATCAACACTA
TGCTGTTTAACACTGGTTTAGCAGGGGTGTGCTTATTCCCAGTGGCCAGTGGTTTCTCTGGGCCCTGTTG
ACACATACATCCCAGCTGTGACCAAGGGGAGCAGCAGTGGCTTCAGGTGGATGCTCCCAGTGGCTAACGG
GCTGATACCCTTTCCCTCTTCATAACTCTCATCTCCAGAATGTGGCAGCTTTCAGGTGGGTTTTATGTGC
CTGCTCCTGCAGTAGTAAACCAGATTTAATCTAGAGTCTCTGTTGCCTCTAGCTTACAGGAATCTTAAGA
AGCAGAGATCTGCTCCACAATCACTGTTCAGCATTTGGTGTCCAGAATGCTAAATTAAACAGGTTCATTT
AGTAATCCTGAGGGTGGGGGTGGGAGGCAGCTTTTGCAGCTGACTTATCCTGGCGGCTTCAGGAAGTTCT
GTTTCTCCTTAAAATAAAACTTGCCCTTGGGACCAAACTGAGGTTATCTTATAGAAGGAGTGGTTGATGA
CTGCTGCCAAATTTCAGGAAATCACACACCCAGAGCTCCAGTAGTGAAGTAATGTATATCCAATCAGTGA
GGGAACATCCCGGTGGAGACTGAGGGCTGGAGAATAGTGGGAAGAAGGGAAAGGCAAACCTCACAGCTTG
GCTTCGGTGGCCCTGGTGACTTCTGGCCTGGGAGGACCAAAAAATGGGGGGAGAATTACTTTGTCTTGGC
CTATGTCCATCACTTCCTGAGGCTTCTGACCCCCAGCAATGGGGAGGCATCTTGGGCTTGCTTAACTAAT
CAGTTTCCAGAGCAAAGTGCTCTATCCCAGCAACCAGATTCATGCTCAGGAAAACACTCTCAAGAAAATC
CCCTGAACCCAAGAATTCCTTTACCCACCCAGTGAGTTAAGATATGCCCACTCCTCCCCAGGGGTGGTGT
TTCTCTAACATTGAAGACAACATTGTTCTGTTCCTAAGCATCTGCCTCCTGAGAGGCCTGCTTCCCCTGC
TTGTAGGGAGAAAGGAAGAGAGAACAACGGGAACGGGTAGGATCAGGTGGGCCATGGGTCGCTCAGACCT
CCTCTTCCTGGATGATGCTGAAAGCCCTCCTTAGCTTTCAGTTTGTCTTCTGGTGGTACTCACATGGAAC
AAATGGAAGAGTGTTGTATGTTTCGCAGTATAGATAGCTCATTTCACCTCACCTCTTTCTGATCACTGTC
TTTTGTTGTGACAGTGACTACCTGTTTTTTCCATTCTGAGAGATCCAGAAGTGATGTTGGAACGTTGAGA
TGTGCACGTGGCTTCCCTTTGCCTTCTTTTGTCTTGCTTGTGTAATAGACCAGGGTGTATGCAGAGGAAT
GGAGGGGGTCCCCTGGCCTCGCCCCTCTTCATTCTCCCTCTTCTCAACCCCCACTTAGTTTTATCCTGCT
CCATGTCTTTAACCAGCCCCAGCACTCACTTCAAGCCCCTTTCTGCCTGTGGCGGCGCTGGCCTTCAGAC
CATTTATGTGCCAGAGCCTGAGAGCCAGTGATGGTGGAACTAAGCAGCCAGGGATACTCCCAGGGCAAAT
GAGCCCATCAGGAAGCCTGCACAGGGCCAGGCTAGTTTGGCCCCTGTTCTGAAGTTAAGTTCACTAACAT
GTGCTTGGCCATCCCATTCTGTTTCTGTTGAGGAAGGACATGAAGACACAGCTGTGTGAATCTGCACCTG
TCTGTATCCTGGAGGATCAACGTGGATGGTTATCACTGCGGAATCTGGGGCCTCATGAGCCACCATAGAG
AAAGTCAGCTGAGTTCCTAGTGCCAGACAAAATGATTGATTTAGAATTGAAAAAAAACTTTTTATTTTAT
AGCAATTACAGATTCATAGGAAAAATAGTGCTTACAGGTCCTGTGTAGCCTTCACCTAGTTTCTGCCAGT
GGTTGCATCTTATATAATTTCAGTATAATATCAAAAGCAGAACATTGACATTGCTATCAAGTGTGTGTAT
AGTTCTGTGCCATTGCATCACACATGAAGATTTGTGTAACCACCGCCCCACCACTTCAAGATACAGAACT
ATTCCATCACCACGAGGATTTCTCCTGTGCTGACCCGTTTATAGTCACGTCCCCTTGCTTCCGTGACTAC
CATCTCTAACCCCTGGTAACCACTAATCTGTCCTCCACCTGTATAATCTTGTCACTTTGACAATGTTATA
TAAATGGAATCATACAATCTGTGACCTTTTGAGATTGGCTTTTTTCATTCAGCATTATGCCCTTGAGATC
CATCCAAGTTGTTTTGTGTATCAATAGTTTGTTCCTTTTTATTGCTGAGTAATATTCCATGGTATGACCG
TACCATAATTTGTTTAAACGTTCACTTATTGAAGGACATTTGGGTTGTTTCCAGTTGGGGGCTATTACAA
ATAAATCTGTTATGAACAATTGTGTAAAGGTTTTGTGTGGACATTTTCATTTCTCTAGGGTAAATGCTCA
AGTGTGTTTGCTGGGTTATATGTTAGTTGCATGGTGAGATATTTTTTAAAAAACTGCTGAACTGTTTTCT
GGAGTGATCACACCAGTTTACATTTTCACCAGCCATATGTGAGAGACCCAGTTGCTGTGACACCTCATCA
GTATTTGGTATTGTTACAAATTTTTATTTTAGCGATTCTAATAGATATGAATAGTGACACCTCATCATGG
TCTTGTTTTGCATTTCCCTAATGGCTCGTAATATTGAACATCTTTTCATGTGTTTATTTACTGTTTGTAT
TTCCTCTTCATTGGAATGTTTTTTCCTATATTTTGCCCATCTTCTAATTGTAATCTTTTTTTTTTAACAG
TTGCATTTTGAGAGTTCTTTATATATGTTAGGCACAAGTCTCTTGTGGGGTATGCAGTCTGAAATGATTT
TCTTCTAGACTATAGCTTATTTTTTCATCCTCTTAACAAGGTATTTTACAGAGAAAATGTTTAATTTTGA
TGAATTTTAATTTATCAATTTTCAATTTTCTGGATCCTGCTTTTGGTGTCATGTCTAAGAACTCTTCACC
AAACCTTAGTTTCCGAATGATTTCTTCTATATTTCATTCTAAAAGTTTTCTCATTTACATTTAAACTTAT
TTTCTATTTTGAGTTAATTGAATGGATGTAAGGTTTAGGTTAAGGTGTTTTTTTTGTTTGTTTTGTTTTG
TTTTGTTTTTTTACCTATTGCTATCCAGTTGTTTCTCCACCATTTTTTTGAAAAGACTATCCTTTATTGA
GTTGCCATTGCACCTTTGTCAAAGATCAGTTGGCTGTACTTGTGTGGATCTATTCTGGGTTTTTTATTTT
GTTTCGTTGTTTCTGCTGATACCAGTCTGTCTTCATTACTGAAGCTAGAGCAAGTCTTTATTTTTATTTG
ATGAGCCCATCCATCTTTATTTTCTTTAAAAATTTATTATTTTTGATTGACAAGTTTTTGATTGGCATAA
TTGTATACATTATGGAGTACAATGTGACGTTTTAATCTGTGCAATGTGGCGTGATTAAATCAAGCTAATT
AATGTATCTTGACCTCGCTTATCTATCATTTTTTATGGTGAGACATTGGAAATTTACTATTGTTTTGAAA
TATATATTACATTATTGTTGACTATAGTCACTCTGCTATGCAACAGATCTCAAAATCTATTCCTCCCATC
TCTCTGAAACTTTGTACCTTGGATCAACCACTCCCCATTTCCCCCCTCCCACCCCACCCCCAGCCTCTGT
AACCATCATTCTACTTTTTACTTCTATGAGTTCAGCTTTATTAGATTCTGCATTTAAGTCAGATCATGAG
GTATTTGTCTTTCTGTGCCTGTCTTATTTCACTTAGCATAATGTCCTCTAGATTTATCCATGTTGCAGCA
ACTGACAAGATTTCCCCCTTTTAAAAGGCTGAATAATATTCCATATGTATACATGCCACATTTTTCCTTA
CCTATTCATCCACTGATGGATGCTGAGGTTGATTCCATATCTTCGCTATTGTGAATAATGTAGAGCAAGT
CCTGAAGTTGGATAAAAGCTTGGTTTTATTGGGCAATGGTATGTGTTTATCTTATGGATACCAAATTTTA
TTACCTGTTCAGTTTTTCTTCTATTCTGGCTTTTAGGAAGATTTAAGGACAGGTTTAACGCTTGCTTTTG
GTAAGTGAGGGGATCTTATGTATTTATGTGCTCCAGCTTTTCTTCTGCCCTTAGCTGATTGGTATGTTTT
TTCCCTTGAAGTTGATTTTCAAGTCTATGTTCCTAAATTTTTTCTAATCTTAATGACAGCCCTGCAAGAG
AGGTATCAACGTCTCCATGTCACAGTTGAGGAAACCAAGGCTCATCCAATGCCACATATCCAGTAACTGG
CAAAGCAGGGATTCCCACCTGGTCATCTCACTCTTCTTCTTCCCGTGACCACGGAACATCTCTCAGCTCT
GGATTCTCTCATCCACCAGCATTTGGGCCTGAGCTCAGTGATCTCTGAGGTCCTTTCAGACTCTCAGATT
CTTATCTCATGATGTTAAGTTGCTGATTGAGATGAGACTAGGAGCAGGGCCAGTTAGGTCTGGACTCTTC
TAGGAGACCTGTTATGAAACCTGGCGAAAGCACCCGCATTGTCTTTGAGTAATCCCCAGCCCTTTCAGTT
GAGAGGACCTTAATTCCCTGGGTGTGTCTTACTGTTTGGGATGGATTAAATTTGCCCAGGGGTGGAGATG
AAACCCAGGCAGGAAGTCTGAGACTGCACTGAGGGGTTGAAGGATGGGATGATACTCTGCAGCCAGCAGC
TCTCTTCCTGAGCCTGTCTTTCCAGCCTCTTTGCCCTGCTGAAGGGAAAAGCTATGGAGGCTCACATGGA
TACACTGGAGGCTCAGGCACAGCCAGAGCAGTAACCCCAGGACTTGTGACCTTCGGAACACTCAGTCTGG
TCAGCATTTGGCACTGTCTCCCACCCCCGAACAGGGCAGACCCCTACCTTCAGAAATGTGGCAAACTACT
GGAATCCTGTAGGAACCTGAGAGTCCTGATGACAAGTTTCATTTTGTTTACCCAAACATCAGTCATACTT
GTTTATGTCTAAAAACTGCTCCATCCAACACCCTTGAGAAATGCTGGCCTAGAGCACAGACAGCCTCAGT
TAAAATGCCTGTGTTATCAGAGAGGGCTACCTTGAGCTACTGTTTATCAAACTGCCCCACCAAGAGGCCC
TGAATTCTAGAAGGGAATGAAGAAGTTTCCATGTAGGGGTAGGACAAGGTGCGTGAGGGGAGATGTCTGG
GGATGTGGCCTGACTCCTGAGTATTACATTTCTTTGATATATTTTTATACTTTAATCTTAAAATCAAATG
AATGATATATTGTCCTCCACAATCTATGTGTTTCCAAATAATATGTCATATTTCTCTCCAAACCTTGGAG
TAACATTGATGCTCTAGGAAGATGTGTGTGTCTAACTTGGCTCTCCCAGATATGGACTCCCAGGTGGAGT
GAATTGAGTTTGGGAAATACAACACAGGCAGACCTCACATTGGAACTAGTTTATCTGGTTGACTTACCCA
CCCAGCTTGTCAGGTGCAGAGGGAATGGTACCTAGACAATTTAAGTGGGACAAGTGTGTGAGGTGTGGAC
ATCAGAAAATTCCTGGGCCGGGCCCCATGGGACACCGTCAGACAGAACCAGCTAGAGAGCACAATGAGGC
CCTGTTGGTGGGGGGCAAAGGGACAGCAGTGGAAGGGAAGGGTGGGGAGAAAGCAGGCTTCCAGAGTCAC
ACTCCTGCTGCTCGTTTGGCTGCCAAAGAGATTGCAGAATAGGATTAAACTGATCTGTTTCTCAAACTGT
TTTATAAGTCATTCTTCACTTGTGCCACAGGCCCTTTTGAAAACTTCCTCCTGTAACTTTGATTTACAGT
GTATTTGGGGTATGTGTCTGGGAGCTGAGACTGATATGGAGCTAGGACCTCACTCACTCAGTGAGCATTT
ATTGAGTGTCTACTGTAAACATCTATTGAGTGTCTACTTTGTAAGCATTTATTGAATATCTACTGGGTGA
AGCTCTTTACTAGGTGTTGCTGTTTATACTTGGCTCCCTGAAAGTCTCCCAAGTTTCCAAGAAAAAATTG
CCTATAAGTTCCCTGCCTCCCAAGGTGACCAAATGTCTTCATTTGCCCAGGACTGAGGGGGTTAAGACAC
CAGACTTTCAGTTTTGAAACTGGGAAAGTTGTGGGCAAATTGGAACGAGTTGGTCACCTCACTGCCTCCC
TTGCTATGACATTTTACAAGAACAAACATGCACCTTCTGACTGTGGTGCAGGGGAAGTGCCGAGGAGAGT
CAGGGATGGTGTCCAAGAGTGGAAATGAACCTTAGGGACCTATGGGGAGAAGAAATGGGGGCTCCCAGAG
AGCAGGCAAGTGACAGCCAGGATGGCAGTTGCTGGGCTTCTGCACAGCGGTGGAGCTCATTTCCCTCTCT
GGTTTCTATGTAGAAGTCCTCCCACCTAGCTTCCCACCTTCATTACTGGCCATGATTTTTTACAGTGTTT
TTCAACATCTTATTGTATAGAATCTATATAAATGTTGATAAAGCTGAGCTATTGAAAGATGGTGCTTCCT
GGCTTATGGAATTATTGACTTTCAGACTAGACAGTGATGAGAAAGCTCATCTGCTCAAAGACGCAGGAAT
CCTCTTGATGTCCTTGCCTCTGCTTGCAGAGTTCTGATGGGGAGCTCACTGTAGCACAAGGCAGACCCAG
AACATTGTAGCACCCCAGGCATGTACCAGGTTTCTCCTGTGTGGAGCTGAAATCTTTACCTGCCCTTCCA
TGTGTGTTCCCCAGAGTGAAGCTTGAAGCTAGCAGAACCCATTACTTCCTGGTCACTTGCTTCACTGTTT
CTAGTACAATACTGTCTCCCCTCTCCCAGAAGCCCCTCTAACTGTGGACTGCTCAGCAGGGTTGAAATAG
AAAACCAGGTAGTCAGTGCCACCCTCCTCTGAAAGCCAAACTAGGCTCTGAAGGTGGGCGTTGCTGGGAC
ATGTGTGGCCCCCAACTCCTGATGTCCCAGATCACAAAGGTTTCATTGCTGGTTCTGGTCACTGACAGGA
GCCTGGTCACCACTCATGTGAGTGTCTCAGGCTTTGTGGCAGCAGCTGGAAAGTGGCCCAGCAGAGACCC
TCCCATGATGCCCCCTGCACTAGGCCTTGCAAGTTTGTGATGCCCTCATCAGCCCCCAGATCTGTGCCCA
CGTCATCTCTCACACTCCTCCTTCTTACCCCCGCCTCCCTCTGTTCTCACACCCCAGCTCTCACTGCTCA
GCAACTTTGGAAGCTTTCATGGAGTATCCTAGACAGGTCATTGACTTCACCCTCCAGCCTCTAAAAGGAC
AACATCTCTCTGGAGGAAGTAGAAAAGGGGCTCACTGGAGACAACATTCCCTGGCTTCATTGCCAGAGGG
CTAACAGAGACCCCTCACACAGGGCATCTCACCCAGTGCTAGTGGGAACGGGTCTTATGGGTCCCAGCCT
GTGCTCCAGGGCTGCACCCCGCAGGGTGGTATGTGGCAGGTCCAAGTTAATGAAGAACCAGCCTTGTATA
TGGCAACTACTCCACCTCTGGAACGTGTCCCTGACTTGGAAAGTGAACTCACAGGGCTGTGGTTGCCAAT
TTCATTTTCAAATTGCCCTTGATATCAGGACGCTGCCTTCCGCACAGCTGAGATCGTCCTCACAGCAGCT
CAAGCCTCCTTCTTCTTCAGTCCTCAGAGTCCCAGGACTCCCACATCATGGGCCCACTGAATCCATGTGT
AAATTTAATGTGTAGGCTGGGCACAGTGGCTCACGCCTGTAATTCCAGCACTTTGGGAGACCAAGGTGGG
CGGATCACAAGGTCAGGAGTTCAAGACCAGCCTAGCCAATATGGTGAAACCCCGTCTCTACTAAAGATAC
AAAAATTAGCTGGGCATGGTGGTGCACACCTGTAATCCCAGCTACTTGGGAGGCTGAGGCAGGAGAGCTG
CTTGAACCCAGGAGGCGGAGGTTGCAGTGAGCCGAGATCGCGCCATTGCACTCCAGCCTGGGCAACAGCA
GAGCGAGACTCCATCTCAAAAACAAAAAACAAACAAACAAAAAAAACAGACAAAATTTAATGTGTAAATG
TGTAAAATTTATAAGGACTGGGGTTGGGCATTAGTCAAGCCTGTTTTGATTGCCTTAAAATCACAAATAT
TTAGAATTCCCACCTGATATGGTTTGACTCTGTGTCCCCACCCAGATCTCATCATGAATTGTAAGCCCCA
CATGTCCGAGGAGGGACCTGGTGGGAGGTGATTGGATCATGGGGGCAGTTTCCCCCATGCTGTTTTTGTG
ATAGTGAGTGAGTTCTCAGGAGATCTGGTGCTTTTTTTTTTTTTTTTTTTTGGACAGAGTCTCACTCTGT
CACCAGGCTGGAGTGCAGTGCTGTGATCTCAGCTCACTGCAACCTCTGCCTCCCAGGTTCAAGCGATTCT
TCTGCCTCAGCCCCTTGAGTAGCTGGAATTACAGGTGCGTGCCACCATGCCCAGCTAATTTTTGCGTTTT
TTTAGTAGAGACAGGGTTTAACCATGTTGGTCAGGCTGGTCTTGAAGTCCTGACCTTGTGATCCGCCCAC
CTTGGCCTCCCAAAGTGCTGGGATTACAGGCGTGAGCCACCGCGCCCGGCCGAGATCTGATGCTTTTGAG
GTGTTTGGCAGTTTCCCCTTTGCACTCTCACTCTTGCTCTCTCTCCCTCTCTCTCTCTCCTGCTGCCTTA
TGAAGATATGCCTTGCCTCCCCTTCACCATCCGCCATGATTGTAAGTTTCCTGAGGCCTCCCCAGTCATG
TGGAACTTTGAGTCAATTAAACCCCTTTTGTTTATAAATTACCAAGCCTCAGGTAGTATCTTTATAGCAG
TGTGAAATGGACTAATACACCACCCTTAGCACCAACACATTTTTAGCAGCAATTATAATTTTCTGAGCTA
CTATCACAAATATGGGCACATTTCATTAGGACACACATGTGGTAAAACATAGGGTGGTGTATGGATATTT
AGTTGTGAATGCAAATACACTTGAGGCCTCTTCCTGGGAGCACCCATTATGTACCAAATTTACTGAGATA
ATATGGACAAGGGTAGGTCCTTTCAGAAACACTGACCAAACCCTCCCTGCCATACTGTGAGGTATGCATT
GCCCACATTTTATAGTGGAGGACATTGGGAGGCAGCCCATGGGAATTGCCACATTCCACAGTGACAGATC
TGGAATTGGGGCTCTCTGGGAGTCCCCGTCTTAAGATTTTTTCTCTATGTACTTCACCACAAACCACAGA
CTGTTGAGCCAGACTTTGCTATTTGATTGCTTTATAACAATGGACACACCAGAACTGCCTATTTATATCT
GTTGTTGTATTTTCCCAAGCCAAATTCATCAGTGGTGGTCCTGAAGGTCTTCATTCCTCAGTTTCCTCTT
TCTTTGCGCATTCCCTAACCCATGGTTGTAAGCCTAGACGCACACTCCAGCTGTATGGCACATGAGCATT
TACGCCCTTCATGGGCGTGGGGCAGTCAAGTGGCTTAAACTCTTGATTTCTAAGTGAAAGAATAAATGGA
AACCCAGTCAGCTGCATAATGCTTTATCATATGACTCACCTTCTCAGAAACTTACAGTGAGGAGGTGACT
TGTATATCCAGCAATCAGAGAGTCAATAAATAAATCATGGGACATCCATCTATAAAATACATGCAAATCA
TTTTTTAAAAAGTCTTATGGAAAATAGTTGAAATTTGGGGGAAGAGTTCATTCTCTAATGTTAAGTAAAG
AAGGCAGGATGGATAAGCACATGTAGAGATGATCCAAATTTGTCAAAATCACAGTATACAGAGAAGGAAG
ACTTGAAGGGCACGTACCTATACTGTGTGTGAAACCTATAAATGGTTTTGTTTTTTGTCTTTGTGAATTT
CAGTGTTTTCCATTTTCTACAGTAAACATGTCCTGTATTTATGCTTAGAAAAATCTATCCATTAAAAAGC
CCTACAGTCTGTGGTCATGCCCCAGCTTCCTTTGGCAGGCATACCAAGACATCTCATTGTGGTATGTAAA
ATGTGATGTACGATGGAAGTGGCTCTTCTCCGATTACCTGAGGGTGGACCAAGGATGCAGCTGGGATTGC
AGCCAAGAGGATGGGGTTGTCTAGAAGGACTGACCCCTGCAGTGCCATCACTGTTCCCACTGCATTTTTC
CATCTGTTGTCACAGTTGAGTCATGGCTTTCCAGAAATTGAGGCAAAGTCAGATAACAATACTTGAAGTC
TTAAAGGGAGGCAAGAATGTGGAGCCTTTTCCTTTCTGGGAAGATCAAGAAGTGATTCTGTCCAGGAATC
TGCTCTCTCTGCTCTTCTGGTGCCCACTCCCAGGGGCTGGCTCAGAGTGTAGGAATTCAGCCCTAAGGTT
TGGCCAAACATCCTGGAGAAGCAAATGTATCTGATTGGCTCCTTGCCATGTAGGAAGAGTAGGCCTGAGG
GTGAGGTGGTGAGGACAGAAGCCAGGATGGGATCTGCTAGGTGCTAACTAGGGGTCTGTTCCTGAGCCTG
GGGTTTTCTGCCTGGGAGGATGTAGAGAACATTCTTGGGTGGGTTTTCACCCAGTTGTTGGTGAGAGTTT
ATTGACCATCCACTGTTTGAAAGGTAAAACTCTACTAGTGTAAACAGCAGGGGTTTCTGAATTTTGAGGC
CAAGACTGGTGTTGGGATGGATGCTGGAGACCCATTTATTCATTCATTTATTCTTATTGACCTCCTGTCA
TCAACCACTGGAGATCCGATAATGAATAAAACAGAGTGGACTATGCCCATATGAGTGAGATAGACAGTGG
ACAGAGCACAAATAAATACAAAGTCACAAAGCATATCATATGATAGCAAAAAGGATTTGGTTTTGTGAGA
GAGAATGGGGTAGAGACATTACTGGATTATATTTAATGCATCTGGGGTCATGGACTGAATTTTAACAAGT
CACCTTCACGGTTCTCATACAGAACCTCCGTATGGGGAGCACGACTGTGAATCAGACAAGGTCCCTATCT
TCCTTCTAAAGGCTGTGGTTAGGTGGGGTAAGATGAACCATAAGCAGCTATTGTGAATTATGGTTTCCAT
CAACATGACAGGTTCACATGGAATCCCTCCTACTACAAACACCACATAAAATAGAACAGCACCAGAGATT
TAAATACATGGCAGAACTTGCAAGAAAGAAAGTGAAATCTTTAGGTGAAAGAAATGAAGAATGAATTGAA
CACAGGAACAATGAGGACATCAGTTGACCCTGCACAAGGAATAAGGAGGAAATATGTGTGGTGTGATTAG
ACCAGTAAAGAGATGCTAAAGGAACTCCTAATGGATGCTGGAATTTAGTACTCACACAGGTACTCAAAGA
TGATAGGGGAGTTGAAACTGAGACCCATTCATAAAGCTAGGTGCCTTGGTGAAAAGGGAACTAATAAAAC
CCTGCCCACTACTCCAGGGTCAGCAGGGGTTTGTCTCTAACAAGATCTCTGGGTAAAAAAATTTCTCTGA
GAAACTAAAACCCCAAGGCTATATCACATAGAATCAGAAACAGAATTTATGCCATCCATATGGTATAGTG
ATGCTTACTTTATGCCCTATATAGAAATTAACTTCAAATGAATAAAAGATCTAAATGTAAGACCTAAAAC
TATAAAACTCTTAGAGGAAAACACAGGGAAAGCTTTATACCATTGGATTTGGCAAGGATTTCTTGGATAT
GATACTGAAAGTACAGGCAACAAAAGTTAAAATAGATAAATTGTATTACATCAAAATTTAAAACTTCTGT
GCATCAAGTGACACAATCAAGAGAATGAGAAGGCAATCTACAGAATGGGAGAAAATGTCTGCAAATCATA
TATCTGATGAAAGATGAATATCCAGAATATATAAAGAGTTCTTAGAACTCAACAACAACAAACCGAATTT
AAAAATTGGCAAAGGACTTGAATAGACATTTCTCTAAAAATGATACACAAGTGGCCAAAAGGCACATGAA
AAGATGCTCAACATTGCAAATCATTAGAGAAATACAAATCAAAACCACAATGTGACATCACACCCATTAG
GATGGCTACTATAAAAAAACAAAACAACAGAATATAACAAGTGTTTTTGAGGATGGAGAGAAATTGGAAC
CCTTGTGCACTATTGGTGGGAATGTAAAATGATGCAGCTGCTATGGAAAACAGTATGGCAGTTCCTGAAC
AAATTAAAAGTAGAGTCATAATATGATCTAGCAGTTTTGCTTCTGGGTATATATCCAAAAACATTGAAAG
CAGGGTCTCAAAGAGATATTTGTGCAGTTATGTTTCTAGCAGCACCATTCACGATAGCCAAAACGTGGAA
ATAACCCAGATGTCCATCAATAGATAAATGGATAAACAAAATGTGTATATACATACAATAGAATATTATT
CAGCCTTAAAAAGAAAGGAAATTCTGACACATGCTACAATACAGATGAAACTTGATGACATTACTCTAAA
TGAAATAAGCCAGTCACAGAACGACAAAATACTGTATGATTCCATTTACATGAGATACCTAGAATAGTAA
AATTCATAGAGACAGAAAACAGAATGGTGGTTGCTAGGAGCTAGGGGTAAGGGGAAATGGGGAGTTATTG
TTCAAGGGGTATAGAGTCTCAGTTTTGCAAGACGAAAAGAGTTCTAGAGATGGATGACGGTGATGGTCGC
GCAACACGTGAATGTACTTAATGCCACTGAACTTGAGATAGGCTAGGCAGTGGTGGCTCATGCCTGTAAT
CCCAGCACTTTGGGAGGCTGAGGCAGGAAGATTGCTTAAGCCCAGAATTTTGAGACCAGCCTGGGCAACA
AAGTGAGACCTCATCTCCACAAAAAATTTAAAAAAATAGAAATAAAAAAATTAGCCAGGCATGGTAGCAT
GTGCCAGCTGAGGTGGGAGGATTGCTTGAGCCTCGGAGGTCAAGGATGCTTTTAGCCATGATTGCACCAC
TGCACTCCAGCCCAGGCAAGACTCTGTCTCAAAAAATAGTATTAATAAAAAAGGGTAAGATGGCAAGTTT
TATGTTACACACATTTTATCACAATTTTTAAAATATGTGGGTAATCATTAAGACAAAAGACATTGAATAT
ACCTTCTAAGACAAAAGAGAGTAAAGAATAAAGAAACCTAATTAAATAATAAAAGCCTAGAAAAGGAAGG
GGAAATGGTTAAAAATAAAATAAAATAAAACAGCCAAAAATAAACTTCATGGTAAATAGGAACACAATAT
AAATATAATCAGGTTGATACAAATCTAGATTTATCAAAAATTATAATACATGGGCCGGGCACGGTAGCTC
ACGCCTGTAATCCTAGCACTTTGGGAGGCCGAGGCCGGTGGATCACGTGGTCAGGAGATTGAGACCATCC
TGGCTAACATGGTGAAACCCTGTCTCTACTAAAAATACAAAAAATTAGCCGGGCGTGGTGGCAGGCGCCT
GTAGTCCCAGCTACTCGGGAGGCTGAGACAGGAGAATGGCGTGAACCCGGGAAGCGGAGGTTGCAGTGAG
CCGAGATTGCGCCACTGCACTCCAGCCTGGGCAGCAGAGCAAGACTCCGTCTAAAAAAAAAAAAAAAAAA
ATTATAACACATGAAAATGGACTACTCATTATTTCAAAGCTACAGCATCTCAGATTGGATAAAAAATAGA
GATAAAATCTAGTTACATGCTCTTTAAAAGAGACATCTAAAACAATATGACACAGAAAGATTGAAAATCA
AGAAACAGAAGAAGATGTAATAGAAGAATGCCAGCTAAAGAAAGATGATTTATCTACTTTAATAACAGAT
AAGAATGTTTAAAATAAGAGTGTTTAAAGCAAAAAGAATGCCAGAATGTGAGATGTTTGTAATGTCTAAA
ACTGACGAGGGACGAATATACAGAATGCACAAGGAATCTTGATAATCTACAAGAAACCTAATAGGAAATG
TGTGAAGGATTTGGACAGGTGGACTGGCATGCCAGCTGGGCTCGCCCTACCCTCTATACTTTTCTCTGAA
TGTCATGGTCATTGTTTTCCACTGTAAACCTCTGTCTTCTCCATGGCTGAGTCATGCTTGGCAACTAGAA
AGTGCCTGTTTTCCTTCACTGGAAAGCCCCCAATTTGACAAATTTTCTGTTAGTCTCCTATTGCTGCTGT
AACAAATTATCACCACGGAGTGGCTTAAAACAACACAAATTTATTGTCTAATGGTTCTGGAGTTTGGAAG
TCCTTGATTTCTTAAGGTGTTGGTAGGGCTGTGTTCCTTCTGGAGGCTTTAGTGGAGGATCTCTGTTTCC
TGGCCTTTTTCACTTTCTAGAGTCACCCACATTCCTTGGCTTGTGGCCCCTTCCTCCATCCTCAAAACTA
GCATGTCACCATCTGAATCACTCTCCTTTTCACCTTTTTTTGTTTTGGACCCTTGCCTCCTTATTTTAAG
AATCCTTGTGGCTGGGCGTGGTGGCTCACACCTGTAATCCCAACACTTTAGGAGGCTGAGGCGGGTGGTT
CACCTGAGGTCAGGAGTTCAAGACCAGCCTGGCCAACATGGCGAAACCCTGTCTCTACTAAAAATACAAA
ATTAGCCAGGCATGGTGGGGCACGACTGTAGTCCCAGCTACTCAGGATGCTGAGGCAGGAGAATTGCCTG
AACCTGCGAGGCGGAGGTTGCAGTGAGCTGAGATCATGCCATTGCACTCCAGCCTGGGCGACAAGAGCAA
AACTCCGTCTAAAACAAAAACAAAACAAAAAAAACTCTTGTGATTAATTTAAGACCACCCAGCTAATCCA
GGATAATTTCCCAATAAAATCCTTAATCACATATACAAAATCCCTTTTCTCATGTAAGGCATTTATTTAC
AGGTTCTGGGGATTAGGATGTAGACATTTGGGGAGGCCATTATTTTGTCTAACACATGGTTCAACCAAAC
CAGAGACAGTAGAAGATACACACACACACACACACACACACACACACACACACACACACGAAGAGATTCA
TTACAAAATTTGGCTTACATAATTTGAGGAGCTGGCTAAGCAGCTTCAAAATTCACAGGGCAGGCAGTCA
GGAAGGGATGATCCCAGGCAGGCTGGAACTCACAAGCACAAAAGCTGCTGTACACAGGGAGAATTTCTCT
CTCTTTTTTTCCCTCTCTCTCCTTCTGTCTGTCTCTCAACCTCTGCTTTAAAGGCCTTCCAACTGATTGA
GTCTGGCCCACCCAAATTATCTAGGATAATCTCCCTTACCCAGTGTCAACTGATTATGTATTTTAATTAC
ATCTGCAAACTCCCTTCACAGCAACACCCAGATTGGTATTTGAATAACTGCAGACTGTGGCCTAGCCGAG
TTGCCACATCAAAAACACTGCCATGGGGGCCAAGGGCAGTGACACTCAAGACAGGTATAGGACAGAATGT
GGCAGCAGCAGGCCAAGGGCTCCAGGAATGGTGAGCATCATTGAGCAATAGGAAACCCCAAATGGAGGAT
GCAGGGAGCAGAGGTATTTTGTTGAAGTCACTGATGAGAGGAGGAAGGCATGCTTGGGGTAAGCTTCTGC
AAGGAGACCTGGAATGGGGCATTCTGTCCATGCCTTCCCACAGTTTGAAAATCCCATGAGGGCTCTGCTT
CTCTCCTATACACAAATTCTGCCAGAGCCATAAAGATCAGACGCCCAGCGTATCACCAGTGTGTAGATGT
CCGTTCCTTATGTGGCTTACCAGTATGTGTCCTGTGACCTACTGCTAAGGTCACAGGCCCCTGGGCTGCA
GACGTGAATCCACCCATGTGCTGGAAAGGTAGGTGAGCTCATGTCTGCTTCTCCTAGGGCTGCAACTGGT
AGGTGTCAAGTGTTTGCTTAGCTAATCTTTCCTCATCTAAAGATGCTTATTGATGATTTCATTCAGGAGT
CTTGAAACCTACAGGTAGAAGTCCCAGACAAAACAAACCAGGTGTAGATGATGAAACCACATTCCCTTGC
ACTTGCCTTTGAGAACTCCAGGTGAGGGAAGCGGAATGTTCAAAGTAGTTGGGAAGCGGATCAGTCCTGG
AATGCTCCTGGCCCACACCGACAGTGCTGCCAGACCCTCCGTGTGGAGTTCCCATGCCCAGGTGGGCAGA
TGGCCAAGGGGAGTACAGAGAAATAAAGGAATTGAATCAATTTTACCCCAGAGAAAGACTTTTTTTTTTA
GCTGCGCTGTTTTATGCAATAGATTTGCACAAGAGGTTTAGCCTTGTTTCCAAGAAAGAGTTATCAACAA
GGAAAGATTTAGGTTAGAGCTCAGGAAGACCTACTTGGGTCTAAGGTGGTTGTTCTTAAAGTACGGTGCC
TGGAGTAGCAGTGTTATCATCACATGAGAGTTTATTATAAATGCAAATTCTTGGGCCCCATCCCAGACCT
ACTGAATGAAAAACTGGAGGTGGGGCCCAGAAAACTGCTCCAACAAGCCCTCTAGGTAATTACAATATAC
CCTAAAGTTCAAGAACATCTGCTCTGAGGCAAACACATCTCAGGGCAGTGATTCATATGCAGCACTCACT
GAGGCGGCTGTGATATTCTGGTGGCCAAGTTATTCATTAAAGTGATTTGTGGGAAGTAATGGATATTCAA
CTCAAATGGTTGCCAGGGAACATGAGCTTCTAAATGTAGGAGCTGTCATTGATGGGAGGAACTTCAGGAG
CATCTTAGGTTTGCCAGGGAAGGCCTCCCAGAGCTTTCTGCTGTGGCCTGGGGCAAAAACTGAGGGCTGT
GAACCTCAGTCCCTGAGAACCCCTGGGCCAGGAGGCAGGAGGGTGCTGAGGACGGAGCCTTCTCAGCAAG
GAGAGACCACCACATATTGGAATTTGGAGAGTCTGTAGGAGTGCTCACAGCACACAGGCTTGCTGTGCTA
GGCTGAGTTCCATTTCTGTCTTTTTGCCCCCAGATAGTTTGGAAATGGCAAACGTTTTGGGAGGCTGGAG
TCAGGAGTGTTCTCACTAATGATGTTTACAGGTTCAAGTTAAATACTGTAGGTAAGCAAGGAATTTGAGA
AACTGGCTGGTGGGGGTCCCCTTTGTGGCTACTCTTGCCCTTATTTTCCATGCCTTAACTAAACATTTCA
TGGTGCAGAGAAGACCTGGATGTCCTGAGTGACCAATCCCTTTCACGAGGGTGGCGATCGCTGTGGTCTA
CTCGCCTTGTTCCCTGGGGTCATGGCGGTGGGGTGGAAGAGAGGAAGTTCTTGTTGCTGTCATCTAAACA
CGGTTTTCTGATAGGAGAGGAGCAAGCATGCCTCTCTTGATCTCCTGCCTTGACCTCTGCATGTAACAGT
TTCCTTTCCTCTCTCACATCAGCCTGGAACCTGGGGGAGCTTTTCTGAGAAGGGATTTGGGTATTTTCTG
TAGCATTGACTGAAGCCCCTCACTCTCACCTTTCATTCCGTTTCTCCCACCTTTCCTTACCCAGACCCTG
CAGATGTTTCTCACCCTCTTTCCCTGTCTTTGCTGATCTGAGGAGTAGAGAGAGGGGGAAGGCAAACAGA
GGGGAAAGGGAGGAGAAAATGCCTTGGGAGACACAGGGAAAAGTCAAAGAGGTGAGGTCACAGAAGGAGC
AGCCAGCCCTCTGTTGAGAAAAGTCCAGTCCGGTGCAGCCTCCAGTGATAAAGCAGACTCCTCCCATCTA
AAGACTAGACAAGGCTGGGCGTGGTGGCTCACATCTGTAATCCCAGCACTTTGGGAGGCTGACGGGGGTG
GATTACCTGAGGCCAGGAGTTTGAGACCAGCCTGGCCAACATGGTGAGACCCCACCTCTACTGAAAATAC
AAAAATTAGTTGGGCACGGTGGCGTGGGTCTGTAGTCCCAGCTACTTGGGATGCTGAGGCAGGAGAATCC
CTTGAATGCAGAGGTTGCAGTGAGTTGAGATCGTGCCATTGCACTCCAGCCTGGAAGACAGAGTGAGACT
CTGTCTCAGAAAAAAAAAAAAAGACCAAAGACTCTGTGTGGACCCACCCACCAACAGCCCCCATGGGGCT
CCAGATCCTTGCTTTCTCAGAAGCCAGGGATCAGATGTATTAGAACATATGCCAAGTGATGAGGCCTTTG
TCCTCCTGCTTTCTTGCTAATTTAGCAAGAGAAGTTCTGTTAGGAACAGGTATCCTTGCGGCTGTATTTC
AGGCAAGCCCTCCATCTTAGCAAGGGAAATGTGCAGATGTGCAGAGTTTAACAAGGCACAAAGCTCTGGT
CTCAGGGAGCAGAAGCAAAAGGTAGCAGACATAATAAGACAAGACATTTACCTTACCTACAGTCTGGCTC
AGGGAGCTCCAACATTGTGTAAAGCCCAAGGGGAGTTTATTTCAAAATCCCAAATGTTGCGACTGGGTTG
CCATTTTAAATTGGGGATTGGTCTTGGATTGATTCCATGTGCACCAGAAGGGACCTTACCTTTTCTTCCA
GGGTGTGAGGTTGAATAGTTGACAGAAGTGAGGCTGCCTTTTCCTAGAGTTAGTTTCCCTAGAGTTAGAG
TTTCCGTAGGCTAAAACCCAGTGATCTATTCCTAATGCTCCTGCCAGTTAGCTCCCTGCACCGCCTTCCC
CAGGTGTGTGACTCAAGTTGTCACAATCTGTTTACGAGGCTGGAGAGAACTGGTCTTATTGCCCTAGGTG
GTCAGAAGGTGCCTAGCTTCTCCCTCAACACCTCCCATCGGCCCTTTTCCCTTTGCTGTATGCACCCCCA
TCCCTACCTCCCTGACCCCTCTCCTCAGTGACCTCCTCTCTGTGGAATTGAAGAGAGGACCACTCAGACC
CGTGTCCCTGGCCTGACTGCATCTGCATGTGCTCCCACACTCCCAGTGCCTCCCTGGACATCTCTACTTG
GTCTCCCAGCCCCACAGCCTCAAGCTGCCTCCCTGCACTCGTCCGGCTCCCCCTGGCATCTTGAGCTCCT
TGCTTCCCTGATGTCACCCTCCCTTCTCTTGGACTCAGATATGCACTCGTCATCCCCCACATCTCCTAAT
CATCGGCCATTGCCTCCCCTCAGTGTCTCTCCCTCTGCTGTCCCCTGGCCACTGCCACCGCCTGACTGGA
GGGTTTTGTTTTGTTTTGTTTTGTTTTTGCCTTGTCCCAAGATCTTGCGTGGCCTCCGTGCCTCTAGCCT
GTTACAGATTCCTCTTTCTAAAGTGTTTGACATGCATTATCTCTGCTCAGAAGTCTTCGGTGATGGCCAG
ATAGAGATAAAATTCCGTAGCTTCTCTCAGGTACCAACCCTTTTTCTGACTTGGTTTTCTCTTCTCACCT
ACCTGGAACTCTCTCAGACTAACTCAATCTTTTTCAGACCTCTAATCACCCTTACATTTTTCCTCTCCTC
ATCTTGTCTCCTAGGACTAGGGATGACCCCTTTTTTCCTACCCACTTTCTGAAATTCTCCTCATCTTCAA
AACCTCAGCTCCAGCCTCACTTTTCCAGGGATCTCTCCTCATCTTCCTGTGTTCTGAGCCCCTCTGACAC
CACTACTTGTACCTCTCCTTGGCATCTGCCATATCACCCTGAGAGTAGCTGTCACTGTTTTGTGCATGTG
CCTCATCTTAGTAATAGTATGCCCCTGGGGGGCTGGGGGAGGCAGCCCTGCTCGGCCCTTGGTCTCCCAT
GAATGTGCTTGGTCTAGAATAATAATCAATAAATACTTGCTTACCATATAATTTCAAATGTTCCTTCTGG
GCAAAATTAGCAATAATACACCCACCCATACTCACACACAGCCCCTGATAAAATCTCTCCAAGCTGGCAG
GCCAGGGGAATTGTAAACTGTGTGCATCATTGCCAGAGGAAAGCACCATTTCAGTCATCACAGGGAGACC
CAGCATCCATTTCCTGATAAGTCTTGAACAGTGTGTGTTTTGAACTGCGATCTTCAGGAGTGTATCTCCA
TGTAAGCCATGCCTGGCCTGGAATCACAGGTGTGATGGTAGAGAGAGGCTCACAGGTCCCTGGGGGAGCC
TGTAAGCCGAGGAGTAACCTAGAGAAGGGATCAGGAAAGGCATCCTGGCGAGGCGGTGTTCCAACAGAGC
TGCCAATGGAGTCAGAGCTAGGCAGGCAAGAAGGCCAGAGAGGGGGCAAGAGAGTGCTCTAGGCAGAGAG
TTAGAATACGCAAGGAGTCAGGATCCAGATATGGAGGTATGGCAAAACGTCAGTGTGACAGCTGCCACCA
CCTTCCTGAGCCGGCCATGCCAGGGGAAGAGGCCTCTTCCAGGGATGTGTGCTGGGAGGCACAGGTTTAG
AATGAGTCTGGAAAAGCAAATCAACATGGAGCTTTGTCCTTTATAGGATCTGGAAGAATCGGTGAATTCA
CTGGTCGGTGGAGAAATGTCTGTAGACCCACTCTGGTGGTTGCAAGAATTTGCCATCAGCAGAGAAGGCA
GGGCGCCATTCTGCACGACAGCTTCGAGAGGAAGGAGAGGAAAAGGTTTGACTTACGGGGAAAAGGAAGG
CCCCTTCAGTTTGTGTGGGCTTCCTGTAGCTACGTGGCTCACACAGAGGACAGGTCTGTGCATTTGAGGA
AGATGCTCATGGGACATGAACAGTCAGAACCCTCCAGGTGTGGACAAAAGGCCAGTGTGGACAGGAGCGC
CTGGGAATGAGAAAAGAGGATGCCCAGGCAGGGGAGTGGAGCCCAAAGGCAAGACAGGTCAAGGGGTGGG
AGCAGGGGGAGGCAGGACATGGGCGGCAGACACAGGAGGCCTGGCTGTCCCCACATCTGTCTCCAGCAAA
CACTAACTGAGTAACAGACGAATTAAGGAAATAGTGAGCAAATTTGGAGGGACTTGAAGAATTTAAAAAT
AAAGTGACTGCTTCCTAAGTCACCTGAGAGCCAGAAAAGGATAAGCAGACTCTCCCCAGAGCTGGAGGAG
GAAATGTGTGGTGGGCCTAGGAAAGATGAAATGGGAAGCCTGCGCTGGAAGGGACAGGATTCTGCCATGG
AACCAAGGGGATCCCATGGCATGTCTCCTGCTGCAGCTGTGCACCTCCTGGAGCCTGCCTGTATAGAGCA
GGAGGCGGCTCTTGCTGAAGGCAGGTTTTCTGATGAGCGATCCCTGGCATAAGACAGCCAGCACCTCCCC
GGCACCGTGAGCAAGGCTGTGAGCTAGGGCTTTACAATGTCTCCAAACACTCCTAGACAGTCACTACTGT
TATCACCACCTCACATGTGAGAATACTGAAGCTTAACATAAATAGTGTAACTTGCCCGTCATTTTACAGT
CTGTAATACTGGGCAAAGTCAAGAATCAAATTCAGGTCTCTCAACAAAGCTCATGCCCTTACCCTTGCCT
TCAGGCCAAACCTCTGGCCCGGGTATTCATTTCTTAGAGCTGCCATTTAAAAAATACCACAAACTTGGTG
GCTTAAAACAACAGAGATGTATTCTCTCACAGTTCTGGAGACTCAAAGTGCAAGGCAAGGTGTTGGCAGA
GTTGGTTCCTTCTGAGGGGGAACCCATTCCAGGACTCTCTCCTTGCTTCTAGCAGTTGTTGGAAACTTGT
GGTGTTCCTTGGCTTGCAGACACCCTACTCCAGCTTCTGCCTCGATTGTCAAATGGTATTCTTCCCTGTG
TGTCTTTGTATCCAAATTTCCTCTTTTTGTAAGAATGCCAGGCAATGGATTAGAGCCCACTTGATTTCAG
CATGGTCTCATGTTAACTTGATTACATCTGTGAAAACCCTATTATTTCCAAATAATGTCACGGTCATGAG
CACCGGGGGTTAAACCCACCACATATCTTTATGAGAGGCATGATTTGACCTGTGATACCTAGCAAGGAGA
CTGGGGGCAGAGAATGTCCTCAGCATTTTGCTTTGAGTTGCAGAGGCAGAGGGAGTAGGGTGGCACCAGC
CGTGGGGATCATAGCAAAGAGTGCTGGGGGCTGCTTTTGGGGCTGGAGGTGAGAGGCACTCTGGGGAGGG
AAGTGGAGATCCCCAGGGTGTGTTGAGGATGGACATATCCAGGAGATGCGGCCCTTCAGGTCTGTGTCTT
TGGTACTTTGTTCTTGATCATTGGTAAGCCAAGACAGTCGGTTATGTGACCCTCTTATGATCCACAGGAG
GTCAAGTGGAATCTGGAATTGTGCTCAGAGCTTAGCACTTAGGGAGGACTTTCTCTGGAAGTATCCCATA
GGACAGAGAGATTTGAATGTTGGACAAAGCCTTCTCCTACTGCCATCCTTCTACCTGCCACCAGAAAAAC
TGGGACGAGTGACCACAGAAGTGTGCTTTTTTCCCATGTGGAGGGAACCTACTGTGTTGCACACTGGGTT
TTTATTTTGTTTATTTGACCACTTTATCCTGGCTGCCAAAGACTTGCTGTATATGGGACGCAGTTTTCAG
GGGGCTGCTCATCACTTTTGGAATGATGAGGTCTTGGAAGACAGCCTGTGGTCATGAATCCCAGATCTCT
CGGCAGGCAGGGGAATGCCAGGGTGACCAGACTGGGGTGTGGAAATGTTCCCATGCCAGAAGGTGTGTCT
GTCAGCAGCAGGCTGTTGCAGGGGAGCCGCCGCCTCTGCCAGTGTCGTGAGGTTCAGCGGGAGGCTAAGC
TAGCCTGTCTGTAGCATGTGTGACTCCGGAATGCCGTAGCCTCAGGAGCAACTCCACTGTCAGAGCAGAG
CACTGGGGAGAGCCGACAGGCGTCCATGCACGTCCGTCCTACCTTCTGCTCTCATGGGGTGGGCAGCCTG
CCCGCCCTGCTTCTAAGCATCTGTTGTTTTGGGTCTGATTACAGACTCTTGAAGCTTTGTTCTTAGACCC
CCACTGTGGCTTTGAAAAGGCCGAGTGTGTTGTGGTTTGTTGGGAGGTCTTCTCAGAGTGGCTGCTGCCA
AAGGTGGTGGGTGGGCCTAGGCCACCCCCAGGCAGAGGTTCCCCCAGATGAGGGCTCCTTCCCCATCCTG
CCAGGGCACTAACTTCTTCTTGATGAAACCTCCTCGGGCTGTTCACCACCAGCCCCAAGGACGCCCTCTC
CTCCTCACTGCAAAGAGGAGTGAGTCTCCAGTCTCTTGCCTGCTACAGAAAAACCTTGAAAAGGCCAAGA
GTCAAAACTGGCTCCAATTCTCCAAATGGAGATGGTTGTATTGGGAGCTCTGGTATGGAGCTGGCCCTAA
AATGTCGACAAGGGCTTGCTGAATAACTTACTATTCCTGCAGAAATTTGGGGGGAGATAAATGGATACAA
TAGAAGGAAAATACCTGTTTCTACAATGAATTTATAACCCAATTTGTTAATTTTATATTCACTCACTTAT
GGCGTATGAGTGCCTAGGTAACCAGTGGGGTCATTCGCTGACATTTATTCTTTTCTTCTGAAATCATTCG
TCATTGTTTGTGGAGAAGATTACTCCCTGCTTCTTTGGTCATTTCCCTCCTCTGCCTTGCTGGCACCACA
GGTGTGTCCTGGGTGACAGAATTGATGTGGGGCCCTAAACACTCATGGTGGTTGTAATTGCAATCTGGGC
TCAGTGCCCTGAAGGAACAATAGAGACCAGGTAACAGGAGGGACATTCTTTACTACCAGGAAGATGGATA
AGTAGAAGCTCACCCCAGGCAGTGGGGATGGCCCCCACCCACAAAGACTCTGAGACAAAACATCACCTGA
GGAGGGCCATGCATTTTCCACTCAGCTACAGATTTCTACTGCTTATTTTCAAGCAATGATGTAAGTAGCT
TGGTACGGAGAGGCAGCCACGGTGGTGGGGAGCTCAGTGACAGGGGGAGGAGTAGGGGTGCTTTGCCTGA
ATTTTGATCTGAGGTGGGGGGAATCCATTGGAGGGTTTTTACAGGGCTGTGACAGGCTCTGATCTCCATT
TTTGAAGATCATGCTGACACACTATATGATTCTATTTATATAAAGTACAAAACAGGCAAACTCATCTTTG
CTGTTAGAAGTCAAAAGACTGGCTCCCCTGGAGGTGTGTGGTGACTGAGAGGGGCTCTAGGGGTTTCTGG
GAAGCTGATGATGATCTCTTTCTTCATCTGGGTACCAGTCCCTCGGGTGCACCTAGCTTGTGAAATGTTT
CAAGCTGTACTCTTATGATTTATGCATTTTTAAAAGATGAGTGTTATATATCAGTAAAGTTCTTGAAAGA
TTACTCTGGCAGTTGGTTAAAGAATAGATCAGAAGAAAAGAGTAGGAAACGGGTAGGAAGTCATGATAGT
TGGCCAGATGAGAGCTGACTGGGACCTGGACTGGAGGTGGCCAAGCAGGTGGAGCGTGCAGAGTGGACTT
GGAGCTTGGTTTGGAGTTGGAAGAAGCGGGGCAAGAACTGGAATGGGGAGGAGACAGTGTGAGGTCCCAA
CAATGGTTGGGGGCATGGATTTGAGGAACTGAGGGGAAGTCAGAGTTGAAATGTGTAAGATGCAGTTTGA
TACGAGGCCTGGCAGACTTCAGTGTGAAGCCCAGCTTCCCCCCAAGGGTGCATGAGCAGGGCACCCATGG
GAGACATGGCGGAAGATGGGCACAGGACTAATGACAGAACCCAGACACCATCAACATCATGTGGGGAGAA
GGAAGAGGGCTGCCACAAGGATTTCAAAGAAGGAACAGTCAGAGAGAGAGAGCTAGAACACAGGGACAGC
AAGTGACATCACAAATGGCAAGGGGAACCCTGCAGAAGGTAGGTAAAGCCATTGTTGGAGGGCCCACTGG
ACATGGCACTGAGGTAACTGGCAGTCTTGGTAAAAACAATTCGGTAGCACATTCCCGCTCACCCCAGGCA
GCATGGTGGAGCAAGGTGATGGATTTGGCATCAGTAGCCTGCTACTATTTGCCAACTCTGCCCTGAGCCT
CAGTGCCTCAACTGTAAACAAAAGGGATCACATGTACCTCTCAGGGCTGATATGAGGATTAACTTTATTC
AGCGAATATTTATTAAACATTTATTATATCTCAGATAGTCCGCCAGACACAGAAAATACAGAGTGACCAA
GAGTGACAAGTGGGGAGACAGAAATAAGTAAATCAATGAGTTGATGGGAAGAAAATAAATGCCCCCCATG
CTTCCCTGCAGCCACCACCCAGCCTTCTTGGACTGCAGGGTCCCTCCTTTCCTGACTGGATTCCTTGGGG
TCAGCTCCTAAGATCCTAGCTCTTCTGATACCATGTCCCCAAGCCCCACTTTCTCACTCTGAAAAACTAG
CTTCTCTTTCCTTGAAGGCAGGAAGAGAAGGGCTTAATCTTCAAACTCTTCCAGGATGCAAGAAAAAATA
TTGACATCCCATCCTATTATTAGAACAAAGAGTAGGAAGAATATAAAATAGTGAAGTTTCCATATTGATG
TTTGAATAATATCTAATAGGTCTGAATGTCCTATACCTGCCATAAATGGATGCAAAGCAGGTTCTTTTCA
ACCTAACAAATTACTGCCAAGTTCCCAGAAAGACAAGATGGCACTTGATGAAAATGTTTCTGGCTTAAAA
AAAAAATTAATTGGAGAATTTCTAAAGAAGAAATTGGACACATATTTACATAAATATCCGTGATAATTAT
GTTTTCAAGTGTTTTTTTTTCTGGGAAACCAGGCTTCCAGCTGACCTGGAAAATTCATCTTGTCTCACAT
GTTTATGTTTCATCTCTTCCAGAATTTTTTTTCAATCTGTGGTATCTAAAGCCCAGACCCTTGGCCCCCT
GCCATGGGGCAATCTTTCACTTGTGAGCTTCCCTTTCACCTTCTTTCACAGACCTCACCACTCCAGCTAT
CCACATGCTCCATTCCTACTCCTGAGCTTTGAACAGGGCACCATTAGAAAAGAAACACAACACAAAACAA
CGGAAGCAGGATATTTCCCTTACCCCTTCACGGGCGGGAACTGGAGTGCACGGGAACTGGACCTAGCTGG
TCGCTTCGGCACTGGCAAGGATGAATTCCACTCACTCAAGTCCACTGTGTTCTACTCCCTGGGGAGGGGG
AGCACAGGTCAGCGGGTGCAAGAGCTCTGGGGCTAGTACTTTTGGACTCCAGCAGGAGCAAAACTCCTTG
TGGGCCCCACGGCAGCATCTGGAGGTGGGGTGCCCATGACCCCTGAAGCCCCAGAAGGAATGTTACAGTG
CCCTTTTAGCCCATCTGTGGACGGCTTAAGTGTTAACAGCTCAGTGCAGGGTCAGTGTGACAGCACTCAT
GACAGCACCCACACTCATGACAGCACCCACACTCATGACATCTGAACTCTTGTCTGGCGTCCAAGAGTAA
TAAGGTTGCACGAACGGATTGAAGATGGCAAATGCAGGGGATTTAACAGCCAATGAAAGTGGCTCAGCTG
GAAGGGGAGCTGAAAAGGGAACAGGAAGGTAATATTCCCTGGAGTCCAGCTGTCCCTGGACAGACACCTC
TCTGAAGCTACACTGTCAAACTGTTCCTCTGAAGTCAAGATGCTTCTCTCCAACATCCAACTGTAGTCTC
TGATGTCCAGCTGTTTCTCCTCCCTCTGCTGGCAGAGCCTGGGGTTTTTATGGGCTCAGGATGGGGGTGC
AGGGCGGGCCATGGGTGGTTATGGAAAAGGCAACATTCAAGCCGGAAAACAGGAATGTAAGTTCTCACTT
TGGGCCACAGTTCCAGGCTTGAGGGTGGGGCCCTCGCCAGGGACCTGCCCTCTTCTGCCTGCCTGGAATT
TTTCTGCCTCCTGTCCCTATCACAGCCACAATACAAAGCTTTTTAGGATGACTGGTGTTATTAGGAGCTA
AGAATTTTTTCTACCTCCCTTTCTTGTGCTCTATCTTCCTTCAAACAATGCCTCTGCAGTAGAAATCTGT
TTCTTTTTCAGATTGTCCTGACCTTTGTCCTTTCAAGGGCCCCCAGGAGCCTGTCTTATCAAAGGCTTTT
TTAAGCTTATAATAACACAAGGTGCAAAAATACAAAATAACAACAAACACTACAGAATTATGCAGTTTGG
GATTTCCAGTGTCCATTTAAATTGTATCTTATATGATGACCTTCAAGTGATTTTTGCTGAAGTTGAGCGT
ACTAAACTAAAAAAGTGGTCAAGAGATCCTGGGCAAGTCCGATTCGGTCAGGACTTTGCTCAGAGAGTTC
CCCTAACCAGGGTTCCCCAGGCAGTGTTAAAGGTGGAAAGAGAATCCACCTTGCAGTTTGCTTCTCTGTG
CCTGTTGTGGTTTCCTGTGGCCTCCACTGAGGACAGATGTGCCAGTCCTCCCAGAAGCTGTTCTCATAGG
CCTCAGAGGGTGCCTTTGCTCAGTCATATTGGGGAACTCTGCCAAACAGTAAGGTCAACTTTGTGGGCAG
TAAAGGCTGGCAAAGGGAATCTGGAGAGAAGAAAGCGGAAGAGTTACACTGAGCAGTGAGAGATCTGTTG
GAGGCCTGGCTCCTCCGGCCCCCTGCAGCCTCCCCTCCCAGGCAGGGTCTCAGGCCCAGCTCCACAGCCT
AGCCACTCCCCTCTTAAGGAACAAGGAAGCTGTGATGGAAATCTATGTGTTTCTTCCTAGATTGTTCTGA
TTTTTATATCTCCAGTGACCCACAGGACCATGTCTTATCAAAGGCTTTTTCTAATTCATAATAAAATGAA
TAATACTAAAGATACCTTTTGTCATTGCTATGAGGAATATCACCAACTTTGACCCCAGGCTGGCTATTTT
AAATCTCTGAACTTTATCTTGTGCAGGCATTCTTCCTGCGTGGGAAAATATTGGATTTCCTGAATCACTT
CTTGAAAGAGTCATTCCCCTTTGGGGCATTGGGCCATGGTTTAGATTCACAGCCACACCCTGCAGAAGGG
ACAGGAGGGGTGAGCAGGCCAACGGCTGATGGAGGGCTTTTATTCTAGAATGCACTGGACTCTTGCTTTG
CTTCCTTCATTTTAGGGGTTGGGGACAGGGAGAAGGATGCTACTCCCTGCTTCAGCTCCGAGGATCTTTC
AGATGCACCTCAGAGGAGCCAACCTAGAAGCCTGCCCACCTTCAGATGCCTGCAGTTTTGTTTTTTGCTT
GTTTTTTTTTGTTTTGTTTTTTTGAGATGGAGTCTTGCTCTGTCACCCAGGCTGGAGTGCTGTGGTGCGA
TCTTGGCTCACTGCAGTCTCTGCCTCCCAGGTTTAAGCGATTCTCCTGCCTCAGCTTCCTGAGTAGCTGG
TATTACAGGCCTTTGCCCCCACACCTGGCTAATTTTTGTATTTTTAGTAGAGATGGGGTTTTACCATGTT
GGCGAGGCTGGTCTTGAACTCCCGACCTCAGGTGATCTGCCCGCTTCAGCCTCTCAAAGTGCTGGGATTA
CAGCAGTGAGCCACTATGCTTGGCCAGATGCCTGCATGTCTGATGACACTGGGAAGCAGCCAGGAGTCAC
CCTTCTGAGTTCACTTCTTTATCCTTATTGGCCTCTTAAGCCCCAAGCCTCACCTCCCAGGTGAGGAGAA
CTGCCAGCCAGGACCAAGAATGAGTTGTGTGAAGGCAGACAGTGCGATGGAGAAGTGGAGATGGGCATAC
ACCCAGAGCCAGCACCACTCTCAGGCCACCTGCCATCTGTTGGAGACACACCAGGCATTTTGGAAGACTT
AGTCAAGTAAAGGTGGTATCGGGACTCATGAGTGTAGTGGGAGGAGAGGAAGGGTTCGGTATATTTTTTG
GTTTGACAGCCTAGTCCACTGACAAGTACATATTTCTTGAAGCCTTTCTTTTTCCCATTGAAAAACGGGA
CAGAATGATTTGTCTGCTAGGTTTAGCACCAGGAAATAGATTGGTTTATGATTCAAGATTGCTGACTGAA
CACATTTGTCTCCCCTCCTCTCTGACACTTTCATTATAATGAAACTAATGAAGAAAAAGGAGAAAAATCA
ATGACAAAAAACTGAAGAAGGAGGGAGACTATGAGTGGATGAAAGATTTCAATAATTTCAGCAGGGTGGA
CAGTGGTTGGGAAGTGTTGATGGATAAAATAGAATGGAGGAAGACAGATGGTCAACTGCGTGCACGGGGC
CTGCAGTAGCGGGGAGCCCGCGGGCTTGGCACAGCCCGGAGAGGCAACAGATTTAGAATTGGCGAACGTG
GCAGAAGGAGAAGTGAGATTAAGGGATTAAGATAGAACAGCCCTTTACCCCACGGAAAACACAAGAAACC
TTCTCTCCTAGAATTAACGGGAACTATCACACAGTGTGAAGGTTTGTGCCCAGGAGGGAAGCCCTGCTCC
TCTGGCTCCCAGTTTGCTTCCCACAAAGTGATCTGATAATAAAAATACTGATAGAACTATTAAAAGTTGG
GAGGAGTAGGGAGAAGGGGGCTTTGCAATTATAACTGTGCTAAATCCTCTTCTGTAGTAACAGGCACCAT
AAAATGGTAAGTCAAGAAACTGCAGAACAAGTGTATTATTTTGAGATGTGTGGATGTCATCAACAGAAAA
ACTAAAAACTAAAAGCAGAGGGGGTTATTCCCAACCTGCGGTACTGGTGGTGGGCTGACTTGAGTGTAGA
GTTGGGCTTTGTCATTCTAAGCCCTTCCACACTACTTGATATTTTAAACACATGCACATGTTACACTGAT
TCAAAAAAATAAAATAAAATGTGGAAAGAATTGCAAATTGATTTTAATTCCATAGGTGGGTTCCAGTTAA
CTGTGGAATGGGAGGACTGGATGCCTGTCCAGTGTTGCTCAAATCCAGGGGGGTTGTCAGTGTGGTTGTG
CAGTTATGCTTCTTCCCAAGAGAGGGAAGTCTCAGAGGGGTGTTACCACTGGAGGGTCTTGACTATGAGT
TGTCCAGGTCCTTGGCATTTTGAACAAAGAACTGAACAAAATGCAGAAACAAAGTACCAAAGGAATGAAA
CACAGGAATGAAGCAGTGAAAACAGGAATTTATTAAAGCAAGAAAGAACTCCGCAGGGTGGGAGTGGGCC
CTAGCAAGCAGCTCAAAGGCCCAGTTATAAAGTTTTCTGGGCTGTAAGTAACCATTTGAGGTTCTTCCCT
TTATCTGGATGAAGGATTTGGCTTGTGGCTAATTAAAGGCTGAGGTGAATTGGCGCCATATGCAGATAAA
GGGAAGGTCCCTGCAGGGCCCGCCGGCCAATCTAAGGCACTCTCCTTTTCCATCTGAGACGTGGTGGAAG
GGGGAGGGTTGCAAGGAGAGTAGCCTTTGATCCTTTGTTACTCAGAGTGGGAAGATGGGGTTTTCCCTTT
TGCTTTAGCTTTAGGAAGTTTGTGTTAATTGGCATTAGATTCCCTGCCCCCAGACCTTGATGTTTTCTCT
TTTAGGAAGTTAGCACAAACCGGCCTTAAGTTCCTTGTCTCCAGACTCTGTTCTCCTGTCTCACGTGTTC
CCACCTGTCTGGTATGCAGTCAGCTCGGCCTAGAGAGCAGAAGAGCAGAATGTCCCCTGAGGCCAAATTG
ACTTTCAGAGGTTGGGAGGGACTAAAGCCAGCAGCACATGGCTGTCCCCTCCCTCTTTCAGAGAACAGCA
GCATGGTCCTCAGTACCCCGAACTCTCCCTCCCTGCATCCTGTTGTCGACAAAAAGAGTCAAACTCTGGC
TCCGAATACATCTCTTCAAATATTTTACAAATGTGAGTGACCATGGCCTGTGACACAGCCCTCAGTAAGT
CCTGAGAACATGTGCCATGGTGGTCGGGGTGCAGCTGGTTTTATACATTTTAGGGAGACATGAGACTTCG
ATCAAATACATTCAAGAAATACATTGGTTTGGTCCAGAAAGGCGGCACAACTTGCAGTGGGGGCTTCCAG
CCTATAGTTTAGGTTCAAAAATTTTCTGATTGACAGTTGGTTGGGTTTATCTAAAGACCTGGGATCAATA
GAAAGGAAAGTCTGGGTAAAGTTAAAATAAAGGATTATGGAGACCCAAGTTCTTATTTGCAGAGGAAGCC
TTCAAGTAGTAGGCTTCAGAGGGAATAGGTTGTAAAATGTTTCTTATCAGGCTTACAGACTGTGTCAATG
TTAATGCTGGAGAGGTATAATGAGGCATGTCACCTTATTATACTCCCACTTCCTGTCATGGCCTGAAACA
GTCTCTCAGGTTAAATTTTAAGAGTGCCCTGACCAGGAGGAAGTCCATTCAGATGCTTGGGGCAGTGAGG
GGGAATACTTAGAATTTTCTTTTTGGTTTACACTCAGTGAGGGTGAGAATAAGGTTTTTCTGTGCTGTTC
TTTTCTTCTCCCTTTTCCTCCCTCCTTTCTTCCTTCCTTTAGAAGAACTGTTTCATTCAGATTGCCCTGT
CAGAGTCCTGTTTGGGAAAGCAGATAGCTGCCATTTAGGGATAGAATCAGTTATTTCAAACTGAGAGGTC
ACCGGCTGTGTGTCTCAGTCCAGCCACATCTCCTGCCCTGAATGGTTTTCCTCCAACTCCTGGACTCTTC
CAGTACATTGAATCACCTCAGAGAAGTTGCATCCTAGTGGATATCGATGAAAAGAGTCAAACTCTAAGAT
ATTTGAAGAGATTTATTCTGAGCCAAATATGAGTGACCATGGCCCGTGACAGGGCCTGAGAACATGTTCC
CAAGGTGGTCAGGGCGCAGCTTGGTTTTGTACATTTTAGGGAGACAGGAGACTTCAATCAAATACATTTA
AGAAATACATTGGTTTGGTCCAGAAAGGCGAGACAACTTGAAGTGGGGTGGGGGGAGGACTTCCAGTTTA
TAGGTAGATTTAAAATTTTCTGATTGACATTGGTTGAGTTTATCTAAAGACCTGGGAACAATAGAAAGGA
AATGTCTGGGTTGCGATAAGAGGTTGTGGAGACCAGGGTTTTATCAGACAGATGAAGCCTCCAGGTAGCC
GGCTGGCTTCAGAGAGAATCGATTCTACATGTTTCTTATCAGACTTCAGGTCTGTGTTGATGTTAATGCC
AGAGAGGTATAATGAGGTCTGTCTGACCCCCACTTCCTGTCGAGACCTGAACCAGTCTTTCAGGTTAAAT
TTTAAGAGTACTCTGGCTGAGGAGGAAGTCCATTCACAATGGGGATGGGTGGGGGTGGCGGGGCGGGGGC
GGGGGGGGGGGCTTTGAATTTTATTTTTGGTTTACATGGACATAAGACATCAGTTGAAATTTTCTAGTCT
TCCTTCCCTGGGGTTTGTGTGGAAAACATCAGAGTGGGTTGACAGCACAGTCAGTCATTAAATAGGTAAT
AACCCTATGGGGATCACATTTCAGACCTTCCGCTGGTGTTCCTATAACCACGGTTAGATGCCACTGTGAC
CTAACAATGGTTAGATCGTAGTTCCGATGTTTAGTTTGGAAAAGAGAGGCATGAACATGTAGATCAAAAA
AAGCCATGTCTAGACTGTTCTTTGATGCTTTCTCCTTCATCCTGAGCTGTGGGAGCCTCCCTCCTTGTCC
TGTGGCTTATCCACCATGGTCATCTCACTTATGTCACTGAAGCGTGGCTTGGGCCAAGTCCCCCACACCC
CCAAATTTACCTTGCATCTCAGTAGCTTTTTAGCCTTTCTTAGCTCTTTGACACGGGTGGTAAAAAGTTC
TCTCTTTATTAAAGAACTTCGTGGCCACTCCAGTTTCCCCGCTTCCTTCCTCTTTATATGTTTGTTAGGA
TTGGAGAATGAATGAGGCCGTCATGAGCATGGCCTTGACAGTTAGAAGCCTGAGTGCCTCCTGCCCTCCC
TGCCCTGCAAGAATGTTGCTCGTCCTCTGTGGGGTTTCTCTGCCAGCTTCCTTCTATAAGATGTGTCTCA
AGTGATGTGTTTACCTTAACACACACGCACAGCCCTTGTCAACCTAGATGTTTAGATTAGCACACACACA
CAAACCTAGATATTTGCCTGGGTTTTGAACCTGTCAAAATAGGACTCTTGAATAAACAAAGTTATTCCAA
TGACATTGCCAACGCTCATGATTGAAAAAACAAAAAACAAAAAACAAAAAACTGTTTGTCAAATTCCCTT
CAAAGCCCCAGAACATTATTTTGAATACCTCATGGTTGCAAATCTTTTTTCAAATGAATTTCTTCTTTAG
CCAACTTTATTGAGGTATCTAGTTTACATATAATAAAATGCACACACTTTAAATATTTGTTGAGTTTTGA
CAAATGTATAAACCTGTATAAATACCACCACAAAATTAAAAAGTAGAATATTTCCACCACGGTAGAAAGT
CCCTTCATACATGGCTGCAAATCTTATTTCAGTTTGGGTTTAGCCAAGTAAGTAAGTAGGGCAGCTGAAC
TGACAAATGCTGTTTTGTGCCTTGTAAGTTGTGTGGCTTGTAGATTGATCAGAAGCAGCACCAAAGGGGC
AAATGTATAAATGATTGCAGACAGACCACTGGAACAAGTCTGCAGCCTCCCAGAATGACTACTGTGGTGG
ATGTATATTCTGGAGCTTGGACTTATCAGTTAGAGTACTTTATAGACATATTGTTCATTTGACAAAGATT
GAGCCCCAATTTTGAACTGGGCATCATTTCATGCACTGTGGATTTGTTCTAAAAAACACACATTGTATTT
CCACCATGAAGTCTATATTCTGGTGGGAGGAAATGTCAATAAATGAGAAATCAAACGCATGATGTAATTT
GGGGAAGCAATACATGCCGAGAAAAGAAAAAAAGTCGAGTGAGGAGATAGAAAATGATGGTATATACCAT
TTTAAAGAAGATAATGCAGCCCGTGTAATTCATCTTCATTTTCTTTTCCTTTTGTGAAGAAATTGCAAGA
CTCAAATTCTACCAAAGGTGTTTTATAAAAGGCACATGTTATCTTTCCATAAAGTGTATTCTGGAGAGTG
CTAGCATCTATTATAAAGTAGTGGTGATGTGTGTGTGGATGCGGAGTTACATAGTTAAAGAAGCATGGGA
AGGTTGACTTAAACAACTTAACTAAGTCTTTACTACGGAACTCAGAACCTTTAATATGCAAATGTGATTG
CACATATTCGTGAGGGAGGATTGTAGTACGTTATGTTTTCCAATTTGTTTTCTCCAGGGAGTTGTTTGGC
CTAGAGCATCTTAAGCAAGTGATGTTCTGGTAACACATTGTGGGAAATTCTATTCTAGGGTTCTCAGACT
ACCGGAGAACTGAAAGCAACCGGGAAGTTAAATTACTCAGAGGGCAAGAGGAGGGAGTGGAGGTAGCTTC
AAGTTACTGAATATCCCTCCAGGATGTGGAGCACTCACCAGGCAAGGTGTGGGACGGGCAGGTGGCAGGG
GCCTGCAACATTCTGTGGTGCAAGCCTCACAACTCAGGTGTTATCATAGTTTTCACTTGCTAATGGGAAA
ACCTGCTGCTCAAGGAGACCCAGTTGGTAGCCAAAGGTCACACCATGGCTTACAAAGTCAAGACCTGAAC
CTAGGCCTGTTTGACTCCAAAACTCAAATCATCAAAAACTATAACACTATATTGCCTAAATAATGGGGAA
GGGTAGGTTGCAACCCAACTAGCAAACCTTTTCCTCCCACCAATACATCTCCATGTACTCTTGAACCTGT
GTCCTCCTCAAGGGATGGGCTTGTGTTTTATCTGCACGGTGTCAAGTGTTGCTTGCTCTGTCACATGCTG
GCCATATAGGAGGTACTTGGTAAGTTCGAGCAGCCGAGGTCATGGTCCCATCACATAAGCTTAGTATGTG
GGGCCAGATGGCTGTGACCCTGAGTGGCCCTGACAGAACCATCCATCGACTTCCTTCCCTTTTCCCTGCC
TTTTCTCCCTGCCTTTTCTACCTTGCAGCCATCAATCTGATCCCTCTCCATATCCACTGGAACCAAGGGG
TCCAGATATATACAAACACCTCTGCCAGGGCCCCCATGAGGCACCCAGACCTGACAGGGCTTGCAGGGGC
CAATAGCTGGTGGCGAGATTGGCTCTGTGAAGGGGTGGGGGATGTGGAAAGGAGCCAGCTCTGGCTAGAG
TCTTTCACCCAGTAGCACGGGGGAGAAAGTGGGGGAATTTCTGTACTTAGAGGCATGTCTTTCAGGAAAA
GATCTGAGACAAATTTCCTCTCCCACCATCCCCATCTTCCTCTCATGAGACAACTGGAGAAGTTGGTGAT
GATTAGTCACTCCTGTTAATTCATTACTAATTTGGATGGAGGGAGACTGGTTTTTCTAAGCCTCAAGCTC
AGAAACTCAAGTGCTCCATAACTGAACTCTCAGTCCTTGATCTCCTTATGCTCTCCTCCTTCTGGATCCC
CCGTTTCCATGCATGCATGCCTTTGACCTCTTCCTGGCCCTCAGGCTGGAAACAGCCCCGTCTCTTCTTT
CACGTTGAATCGGTGACAGCGGTGTCAAGCCAGCCTTTGCAAGAGCCTCTAATTTGGTGCCTCTCCAGAC
CCACTACCCCAGCCAGCCCTCGTCTCTCCCAAAGCTGTATGACAGCCCTCATTCCTCTGCTAGATGCTAC
TCTTGCCACCAGCCATGTGCCAATCCTTCAGATGCTTCTGTACAGGAGTCAGCACAGGGTGCTGGGATTT
TTAGAAGCAACCTTGAACTAGACACACAACTGATCTCCATGCTGGGCCCCACACTGCTCCTGAAGGGCAG
GGGAAGTTATCCAGACAAAGAAGGGGAAGACTGTGAGCAAAGGCACTGACATAGGGCCTTCAGGGAACTC
TGAGAGTGTGACCTTGATGTGTTTGAAGGACAAGGTGGCAGCAGGTGCTGCAGCTGTCTAATGCTGCATA
CCAGAACAATCCAAAACTTGGTGCTTAAAACAATGGCCACATTTAGGTTGCTGACAAATCTGACAAATCT
TCAATCTGCACAGGGCTCATTGGGGTAGCTCATTTCTGCTTCACTTGGCATCGAGGGCTGGGACTGGAAT
CATCTGAAAGCTGGCTCAGTAACATGTCTGGTGGTTGATGCTGGCTGAGGACCAAAATCTGAACCGAGTT
ATCCGTGGAACATTAACATGTGGCCTCGCCATGAGTAAGGAAGACTGGGCTTCCTTATGATGTAATGTCG
GGGTACTAAGGGTCTCAAGGGAGAAAGAGCCAGCCAGATTCTTTGTCCACTTTTAGGATCCAGCCTCGGA
AGTCACATAGCGTCACTTCTCTTCATTAGAAGCAAGGAGCTAAGATTGGCCCATATTCAGAGGGAGAGAA
CACAGAACCCACCCCTTGATAGAGTGTCATTGTAAGAGGTGTATGTGGATGGGAGAGATTGGTGTGGCCA
TCTTTGCAAAATATGATCAGTCTCAGCAGAAAATATGGAGGCAGGCTGGGTCCAGGACTGTAGCATCTTG
GCTATCACCCCTCACAAACCAACACAGCTGTTTGGCTAACAGCAGTGTTGGTTTTTACCTTATAGAAAAT
GGGACGCCAGTGAGAGAGGCCAATTCAGGCGTGACCTGCTCGTGTTTGTGCTTGAGAAAGCTCCCCCTGG
GGTGGTGTGGTGGAAGATTTGAGAGGAGCAAGCAGGGGACCTGTGAGAGGCTGTTGCAGTGATCTGAGGA
GGGATGGTGAGGGCCTGAGCCAAGGCTTACACCAGTAGAAGAGGCAGGGCTCCAATGTGGGAGACACCAA
GAAGAGACCATGGGGCTGAGGGATGGGGCAAACACCAGAGGGTGAGGAGGAGGGACATCAAGAAGGATTA
TTGGTTTCTGGCTTGGGAAACTGAGTGAAGGTGATGGGGAATGAAGGAAAAATGGGAGCAGTTTATGGGG
GAAGATGATGAGTCCTATTTGGGAAGTGATTAGTTTGAGGGGCCTAGGAGTGTCCAGGTGGATACGTCTA
GCAGACAGTGGAGTGGACCTGCTTGCAAAACTCTGGCGAAAGTTCTGGGTACAGAACTGAGATTGGAGGC
CATCATCCTATGGCAAATGGGATTGCCTATGAGCAGGTGCAGAATGGATCATGTCCAGAGAAGGGGTCTA
CAGGCAGGCTTTGGGGGCATTAGTCTTTAGGGAGTGGCTAGAGGAGGAAGATCTGGCAAGGCATCTGAAG
TCAAATTGTCTCTTTCCCAGGTCTGGCCTGGACCAGGGAACAATCTGGGTTCAAGTGAGCTTTGGTGTCC
TGTTTCCATGGAAAATGACAGAACGTTGACAAATCCCATCCCCATCACTGTCACAGTCTTGTGCTGCTTT
CTTATAACCTATAACCTATAATGTGGCTCTTGTCTTTCCTTCAGCCTTATAGTGGCAATTCCTATGGATT
AGGGAATTTCTATGACTGTTTTTCTTTTTCTTGTTTTGTTTTTTTTTTTTTTTTTTTTGAGACGGAGTCT
CGCTCTGTCGCCCACGATGGAATGCAGTGGCACAATCTCAGCTCACTGCAACCTCCACCTCCCAGGTTCA
AGCGATTCTCCTGCTTCAGCCTCTTGAGTAGCTGGGATTACAGGCATGTGCCACCACGCCTGGTTAATTT
TTGTATTTTTAGTAGAGACGGGGTTTCACCACGTTGGTCAGGCTGGTCTCGAACTCCTGACCTCATGATC
CGCCTGCTTCGAAGTCCCAAAGTGCTGGGATTACAGGCATGAGCCACCGCGCCCAGCCTTGCTTTTCTTT
TTCTAATCTTTCACATCTTACCCTTTACAAGGATGGTCAGAGCCAGAAAGAGTCTTCTAGTCCGGTGACT
GGAAACCACGTTGTCCCCCAGACTCTGCTGGTAGAAGTTTTCCAAATAAAGCATTTGAGGCTTCACTCCT
GCTGATTTTGATTCAGTAGATCTGAGCTTGGGCCTAGCCTCTGTGTTTCAAAGGCACTCCCACCTCCCCA
TCCATGTGATTTTGAATCAAAGCTGAGTTATGAACCATTGACTTAGTCCAGTTACCTTGCAGTTGGGAAA
ACCCAGGGCACAGAAGGGGGAAAAGCACACACAAACCGAGATTGTTCCCTGGTCCAGGCCAGACCTAGGA
ACGAGGCAATTTGACCTCAGATGCCTCGCCAGATTCTCCTCCTCTGACCATTCCCTAAAGACTAATGCCC
CCTAAACTCTAAACTCTGTCTCTAGACAGAGACAGGACCCTTTCTGGCTAAGCTTGCTCTGTTGAATAAG
AGGCAGGTCCAGATCTGGTCCATGCCAAGCGTCAGGTGACTAGCATCTAAGCCCCAAAGTGCCTACTGCA
TACAGGGCATGGGTTGGGCACTTGGGTTACCCCTTGCTGGACTTCAGTTTCCCCATTTGTGAAAAGAGAG
TGGGATGACATTATTACAAAATATTAAGAAGAATTTCAGAATACAAAAGAAAGCCCAGTGGAGCCTCTCT
AGCATGGCAGGGGTGGAGTGCCACCATGCCCCCAGACAGGCAGGCTTCCTTCTACCACCTGGGAGGAGTG
GGGTGGCCACACAGGTTCAGGTGGCAGTCAGGAGAGGTGTCTGGTTTTGTGGGTGTAAAGACCTCTCCAG
ACCTGGAGGCTGTGAGCATGGACACATGGATAGGCAGTGAGTTCTGGGCTCTGTCTGACATCCCAAGCTG
GCCTCGCAAAGGTTCTGCCCTGGCAGGAAGGAAACCCCACAGCCTGGAACAAGGGCACCTATAGAGGAAG
GCTCAGCTTCGGAAGGAAATGGAAATGAAGGTGGAGCCCCGGTTGCTCTCCTGTGATGGCAGCTGTTCAT
TCATGGAAAGAGCTTTGGAAGACTGTGAAATGGCACAGCACTCACCCTTCCCTGGAGGAAAACCTCACCC
AGAGGGGCGCCTTCCAGGAGATGCTTGAGAATAGGACTCCTGGCTCAGAGCCTGTTCGGTGTCAGCGCAA
CAGCTGAGAACCTGGGGGAGCCCAGAGCTCAGCCTGGAGCCAACTAGGGACATCATGAAACCCTTCTCCT
ACCCTCCCTGATGTGTTATCTGTTCCCATCCACCATGGAACTCACATTTACTCAGTACCCCAGGACCAGG
TACGAGGCCAGGTGAGATACAGAGATAAATGGCCTTGGCCCCTTCCCTGGGGCCTTGATCATCCATTGAG
CAGGCAGCAAGCACAGTCAGTCACAGACATTCCTGAGAGGCCAAGATAGTCCTGGTAAGAGATGAGGACA
TGGATGGGAACATTCATTCAAACCAGGTGCTTTGGGGATTGCATCATGGTGCCTTACTGGAGGCATTAGA
GGTGGGCCTCAGAGGACAGGTGTTGGGAATGGAAGACAGGTCAAGAGAGATGGATCCATGTGACCCGGGC
TTGTTCATCTCCCAAGAGTGGTCTGAATTGGATGGGGAGTGGCCTTCAGCCCTCACAGGGCACAGGAGGA
GGGCAGATGTGCAGCCTGTGGAGCACTGTGGTGCTGTTGGGGAATAATCCAAGATGCTCAGCTGAGCAGT
TAGGCCCTTCCCTTGGGGGTGAGTCCCCAACCCTGTCATATCTTCAACACCCTGTGGTTTCACTGGGCCA
CATATCACAGCAGTGATAAGAATGCAGTAATAACAGGAATGGCTAGCACTTTAGGAGTGCTTCCTGTAGG
GTGCAACACAATGTTGCAATGATGACGTTTCATCCTGGAGACCCTGGGAAGTAACTGCTCCTAGATAACA
GGCGAGGAAACAGAGGTCAGCCTGCCGGGGCCCCTAACAGATGGCTGGGAGGGCGCCAGGGCTTGTCGTC
CAGAAACCTCACGGGCCCATCACTCTTCCCCCAGGTGTTTGTGCTCTGCCAAGGCCTCCTGCAGCTCTGC
CAACTCCTGTACAGCGCCTACTTCAAGAGCAGCCTCACCACCATTGAGAAGCGCTTTGGGCTCTCCAGTT
CTTCATCGGGTCTCATTTCCAGCTTGAATGAGGTGAGCAGGAGGTTCTGGTCCATCAGACTCCACTTGTG
CACCACGCTGACCACAAGATCCAGGAGAAGCAGAGGAACAGGGGGCTGAGATGTGCACATAGGTGCAATG
CCTCTTTCTGCCGGGTAACAGCAAACGAAACAGCAAAGATCCAGTGGGCACAGTGAGAGCAGCTAGATTT
CCTGAGGCCTGACTTGTGCCAGGTACTGAGCTGAAAGCCTCCCATGCCTGACCTGGGGGCCTCTTCATGG
CAGCCTTGCCAGCAGGTACTATGTTCATGCCCACTTCACAGATAAGGATGCTGAGGCTCAGGAGTACAAG
TGGCTTGCTCCAGGTATGCAGGGCTGTCCGCCTTCAAATTCTGTGCTTCTAATTTAGTTCTGTGCAATCT
GCCAGCCTGTGGGGCCCCTGCCCCATACATAGTCTAGAGAGGATAAGCCCCAGGCATGCAGGTGGGTCAG
CAGCCCTGGGCCCAGGCATCTCCTGTCTTATGAGGGCCACAAGAGCCAGAGCTCTTAATGGCCTTGACTC
CCTGAAGAGATCAGAGCTCTATGGCCTCCGAGCATTTCCTGCCATCCCTCAGTGACTGCATATCAAAGTT
AGAGGAAGACAAGATGGGCCGAGAAGCCAGAGGAGGTGGGAGGTCAGAGGGCAGGGCCTGCCAGGAGCCA
CTGGAAGCTGGGGAGAGAGAGTGAGCGGAGGCAGCAGAACCCCTTCATCCTGTCTCCATAGTCTGGAGAC
AGGGCTCCTGGGCTGGCTTCCATCTTCTCCCCAGGGCCACTCTTCCTGGATGGAGGCAGGCAGTGGTCCC
TTCCCCAGAGCCGGGTTGCTCCTCTGGAGCATCATGAGGTCTTCCCTTGACTTAGTGAAATTCAAGTCAG
TGCAGTCACTTAGAGCCCGGGCCCCTGTCCTGTGGCAGCTTCTGGCCAAAACAGAACTGTAAAAGAAGGC
AGGTATCTCCTCTCCCCAGCCTTCTCCTGCTGGAATAAGGCTTTCCCTTTCACCCCTCCCCCTTCCTTGA
TGGTCCACATAGCAGTGACCCCAGGACCACTTTCCTGTGACAGTCCCTTCTACGGTCCTAGGAGGGAGGC
ACTCTTCACAGTCGTGTTTCTCAGACAAGGAACCCGGCATCAGAAAGCCTGAGTACTCCATCCAGGTCAG
CCCCCTGTCATGTGCATGGTGCAGCCAGGGTCTGAGCCCAGGGCTGTCTGAGGGCTGCATGCCGAGGCCT
CCTCTGTGGATTCCTAACTGTCTTCTCTACCGTTCCTCCAGTCTCTTGCTCACAAGCACTGCTCCAGCCA
GTCTCAACCTCCACACACATCGCTGGAATCTTCATTGGTGCCCCTCACTTCATGGGCACCCCTCCATGGG
CTCTTTCGCCACATATATGACATGCATGCACATATACACGCACAGTCCTGCAGCCTGTCTAAGTCATCCC
TGCTGGCCTGAGACCTCCTCCTCTGAGCTTCCAGGCCTATGTGTGTGCCTTCCCTGCTTTCTGTGCCAGG
TGTGTGTCTGTGTACTGGTCTGTGTGTGTGCCTGTGTCTCTGTCTGTCTGCTTGTATTGCTATCCTGAGC
TTCCTGGTGATGCCTGGTGACTGGGTCTGCCTGACTGTGTGGTTGCCTCCTTTTCCAGGACAGCACCCTG
GTGTCCCTGCCCTGCATTCACACAGAATGACCCTCATCGATGTTGACCTCTGACTTTGGTAATTCCCCTG
GCACATGTTGTCCTCACTCATGATGGATATCAGGGAAAACAAATCTCCGACATTTGCGTCACCACGGTCT
TGTTTCATGACCCTGGCAGGCATCCCTAATTACCCACCCCATCCCTTTCCTGCTGAGTTCATGCACAGCC
TCAGAATCCTTCTCAACACAATATTCTAGGCCTTGCTACTAATCAAAGTCAGAGCTGGCATGTGAGGTGA
ATCTTCTCCTTCACCTCAGCCCAGGTGGTAGCCAAATCTGTGATCTCCCATGGTTAAATTTTCATTCATG
TTGACCCTATGCTTGGAACAAAAATGTGGGCCCGGAAACAACTGGATTCCTCAATGGGCTGGGAGTAGCT
AGCTAGGACTTGTAGCAGGATCTGCTTAAGACAGGAGGTTGATTAGGCAATGAAAGAGCTTAATATTTTC
CCAGGGATGGAGTTCAATCAGAAATAAAAATAATTCACCCATTAAAATCTTTCCCAGTCTCAGATGAACT
TTTCAAGAATCTGAATTCAGCTCATGCCTGTGGGCATGATTTGAAGCAAATATCATCAGATAGTTCACTC
CTCTGACCTTATAACCCTCTGTGTGTGTGTATCTGTGTCTGTGTATGTCTGAGTATTTGTGTGCAACTCT
GTATGTGTCTGTCTGTGTACAGTATATGCCTGAAGGCTAGGGGGGATGTGAGAAGAGAGCCCGGCCTGGT
GCAAGGGGAAGGTGAGGCTGCCCGGGTGGTGGAGTGTGCGGTGAACCTCCAGGAAGCATGAACCTTCAGT
CTGCAGCTTCCAGTCTCAGAGAGCCTTCTGGGGGCCCAGTAGGTGAGGTGAAGCCTTTGACAGGCTGGGC
GTAAAAGGCCAGCACCAGCAGGAGGAACTTAGTTAAGAAGAGAAGACATGGAGCAACTTGGCTTGAAGCA
GCAGCTTCTCTTGTCCACTACGAAAGGCTAGGGCTGAGCCCTAGAGGCTGCCTGCCCTTCACGCCACCCA
CCAGTTGTCCCTGCGGCCCTTTGGTTTGAGATGTTGAAGGGCAGGGGCATGTCATGATGGGCATTGTAAC
AGCTTTCAAAGAGTCTCACAGCAAGTCCATGGTAGTGTTTTAGGGGCTGCTCCAGGGCTGAGGAGACTGA
GGTCTTGAGGCTCTCTTCTCAGCCGGAACAGCTGCATTTGGGGGGTTGTTTTATATTAGGGAAAAACAGT
TTTTTCAAAGGGACTCTGTGGCTGAAGAAAAGTTTGAGAACAAGGTCTTAAGCCAACATTAGCTGTAACA
CCTGTGGAGGTTCAGCTTCCCACAGAGAAACAAGTGCAGGCCCCTGGAGAGTGCAGAAGAGCTTCTCCTC
TGTCCCTCCTCCCTGAGATCCCCTTCGGGGCCCTCCACTGACCCTCACCCAGGCCTTCTAAAGTCAGCCA
CAGTCAGCACAGCTGATATGATCTGACATTTACAATCATTTTATGAAAAGCAATACGGAAACAAGAAGGA
AATAAACGAAATCTGGGAAGCATAAGAATAAAGCTCTCTTTCCAGGTGTGGGTTTCAGGATGTCCTAGAT
CCACCTTTGGCAGGAGCTGCCTCTCACACACCTTCACATCCCCTTTCTCTGTAGATCATAAACCATCTCA
CTCTTGGCCATGCTGGAGGGGTCTCCTGGGCAACTATGTCCTCCTCTTGAAAAAGTCTACCATTTACTCA
TTCATTCATTTGTTCAACAATATTTAACGAGCACCAAGTATTAGGCACTGTTCTAGGTGCTGGGGAAACA
GGAATGAACAGACAAAAATCTCTGCTCATATATCATTCTAAGGATAAATATAGTATTTATGGAAATAAAA
CATACTGTAGATCAGGTTATGATGAGTGCAATGAAGAGAGAGAGTCATGGATGGGAAAAGGTATACGGGG
CCTCAGTGTTGGGGATGTAGGTGTATTTTAAATGACGAGGTCAGAGAAAGACCTTCTTGAGATGATTCAA
TCTGAGCAGAGGCCTGAATCTGGTTAAGAATGGAGTCCTGAGGACGTAAAGTCAGAAGGAGCAGCAAGAA
CAAAAGGGGCTGGGGGAATGCCTTTGTTCTTTGGTGTGGTCAAAGAACAGCTGGGGGCAGTATGGCTGGA
TGGAGGGAGGGAGAGGAGCAGAAGAGTGCAGACCTGAGAGGTGACCAGGGGGCAGGCTGTGTAGGACTCG
GGAGGCTCTGGGACAGCCTTTGCCTTTTTCCACTGGAGGGTTTGAGCTGAGGGAACATGGTCTGATAGTT
CAGCAGGACCCTTCTGGCTGCTGGGTGGAGAATGAACAGTAGCAGGACATGGGTGAAGGCAGGGTCCCGT
TAGGAGGCTACCACAGTAATTCAGACAGGATTGGAGGTTGAGGAATCACTGGCTTCCAGGTGGCTATGGA
AGGTCCTGCCAAGGGGATTTGCTGATCGATTAGATATGAGTGTGAGAGAAGTCAAGATGATGTTCGAATG
TTTTGTGTGAGCCACTGGGAGGATGGAGGTGCCATTTACTGAGACAAGGAGGACCAGGACAGGGGACTGG
GGTTTTGGAGGAAGGAAGAAGAGTGAGAGTTTAGATGAGCTGAGACTGTGGGACTTAGAAGCACACGCAG
AGCATAAATAGCCATGGAACTGGACACACTTAGGGGCAGAGCTCTGGGCCCAATGTTGAGAGTCCAAGGA
GATAAAGAGGAATAAGCCAAGAAGACCGAGAAGGAGCAGACAGGGGAAGGGAAGCAGGAGAGGATGGTGT
CATGGGAATTCTGAAAGAAGTGTTTCAGGAAAAAAGAAATGGTCAACTGAGTCAAATGGAACTGAGCATT
GACCAGTACATTTGCCAATGAGGAGGCCACTGGTGACCTTAGTGACAGCCATGTTCTGAGGCTCTAGCCT
CTGTTTCCTGACATAGGAGTACCCGTTTCTCCACCCAGGAGGAAAGTGGGGTGTAACAAGGCAGGGCTAT
GGCTGCAGATTTACAGAGCTCCTCCAGTCCAGGTGAACTGTGCTCTGAGGAGAGGACCATCTTTGGTGGA
GACGTGGTCAGAAGGCCTGGCAGCATCCCCTTACCATTGAAGACCTTACTCCCCATGCTGGAGCCTTCAG
TTCCCTTCCCTGGTTCTGGGTGGGGCTCAGAGAGCACATCTTCCAGGGAGCACCAGGAGCATGGAGTTAC
CCATGTTTCCAGCTGGAAGGGTTTTAGGGGTGCTCTAGTTCTTATCCTTCATTTCACAGAATTGAAAACA
GACCAAGGCAGGGGAAAGGGCAGGATAGTAGCAGAGCTGCTTGGGCAGAAACCCTCTTCTCCAAGAGGTG
GCAGACAACTCTAGTTAAGCCTTGGTGTTTTAGAGTCAGGCAAGACTGGTTCAAGCCATGCCCTAACCTC
ATAGTGATGGGTATGTTACTTAATATTCTGAACCCCAGTTTTGTCAGATAAAATGAGAATTGTTTCATGA
TTAAATGAGATAAGCATGTTGCTTGCTTGTTATTCTGGCCACCAAGCCAAGGTCCTTGGGTCCTTTAATT
TGTACCTAATTAAACTTGGGATTTTGCCTAAACTTTAGGTACAAACTCTCAAGCTTAATTAGGGAATGTG
TTTTATTCCTAGGAGCCAGCCAGAATTGGAGGTTTCTTTGGCTTTTTCCCAAAAAGGTTTGGTTCTAAGA
TGGTTAAAGTTTAGGTTTTGAGTGTTTCATAATCTCCAGATACTTCCTTTGGTCTGGTCTAGGAGATGGA
GACCCAGAAGGGTTTCTGATAACAGAGGGAAAACCAAAATTGCTTATGCTTGCCCCTTGTGAAGCTCTCT
GGGAAAAGCTGACACTGTAACTCTGTCTGGGCCCCAGCTGACACTGGGCAGCCCCCTCCCTTTCCAGTTT
TCCTGGATGAAGTGTGATCGGGTCTTCTCTGTGGGTGGGTGAGGACAGGGCCTCTTGTCTCACTCAGCCC
TTCTGCTCTCTTCTCAGATCAGCAATGCCATCCTCATCATCTTTGTCAGCTACTTTGGCAGCCGGGTGCA
CCGTCCACGTCTGATTGGCATCGGAGGTCTCTTCCTGGCTGCAGGTGCCTTCATCCTCACCCTCCCACAC
TTCCTCTCCGAGCCCTACCAGTACACCTTGGCCAGCACTGGTGAGTGGCTTCCAACCCCTGCCTCAAGGG
GTAAGGAATGGGTGAACATCTCACAAAGTTAGTGGGGATACTCCTAGGGCAGTGGATACCACTCCAGGAA
GAGGGCATATGAAGCTCAGACTATACTGAAGTATGTAGAGCTATGGAGCAACTGAACTCTGGTTTGTTCA
GGAAAGTGTGCAGTGCATGGCTCACCTCCTGCTGTGATTCCCTGTGCTTCATGCCAGGAATGACCCAAGC
TCCACCTCCCTGGGGACACTGTGAGCAGTTTCTGCAATGGGGCTTGGCAGGAGGAGGATCAAAGCATTAA
ATCATGATGAAGTCTGTGGATTTTGTCCATGTTTAATCATAGCACTTCGTGACATTTGTACATTCTTCTG
TCTTTAGGTGACAGTGCACTTGCACGATCTCATTTGATCATGTTTACTATGTTGAGTTTGCCGATCCATG
AACATAGGATGCTCACTATTACCCTTATATTTAACATTGATGTATGACTTAACAACCACTGAAGTTCATT
AATGTCTCTATTCTCCAAGAGAGCAAAATAAGGATCATAGATGCTTTTTTGCCCACCATCCTCTCTCATC
TTCCACTTATGGTTGACCCATATTTTTGTTCTACCTCTCTTTAACCTCCCCACAGTGGTCATTATTATAA
ATTGTTACTATACTGTTATTTATAAATAAGTGAGTGGTTATTTATGTACTCACAAGTTTACTGGTTTCTT
TGTTCACCATTGATTGCTTCTTGCATTTCACCCATGCTGTTGATTAATTTTTTTTTCCTGAAGGATATCC
TTTAGTGTTACTTTCAGTAGGCCTATGAGTAAGAAAATCTCTAAGTCTTTGTCCGAAAATGCCTCTATTT
TACCCTTGCTCTTGAATTATAGTTTAGCTACAAACAGGATTTTAAATCAATAGTTATTTCTTCTCAACAC
TTTGAAGGTACCATGCCTCTGTCTTCTGGTATTGGGACTCTTCCATTAGTCTAATTGTCATACCTTCTTA
GGTATCCTGTTTTTTCTCTAGTTCTATTTAGTATTTGTTCTTTTCTTTTCTTTGTTGTTCTGTATGTCTA
CCATAAGGTATCTGAGTATGGCTTAATTTTCACTTATCTGTTAGAAAGTTCGATGTGCTATTTCTTTTGA
AAATTAGAGTTTTTCTTTAATTTTGAAAAATTTTCTGCCAAAAACATTCCTGATATTGCACATCCCTGTT
TTCTCCATCCTTTTTTTCTGGAACTCCTTTTACATATGGCTTCACATTTTCATTTCTGGCCTCCTTGTCT
CTTAACCTCTCTTTCATAGTTTTCAGTGCTTTATGCTGCATCCTGGGTAATTTCCTTAAAGTATGACTTC
CTGTTCACTTAGTCTCTCTCCAGCTTTGTTAATTGGTGTCAAACCCATTTTTTACATTATGAATTTGAAT
GGCACTACATATTTTGCTAATTCCTGAAGTTCTTATAATAGTTGTTCAAATCTCTCTGCTCTGTGACACT
ATTTTTTGGTGTTTCCTTATGATTTCTTTTGTGTTATTGATGTCTTCAGCTATTTTAAATATATTTATAT
TATACTCTTTTTCAGATCGTTCTAGTAGCTCAAGTTTTAAGCATGTTAATCCTCCCATTGTTTTATGTCT
GCTTGCTCTTGTTCATGGTGGATTACCTCCTTGAGTTTGACCATGAGCCATTTGCAGTGGGCTTTTTTGC
CCTGTGGAAATTGTATGTGGCCTGGGTAAGGAAATAGCCCTACAGAGTGGTTTGGCATTTACATTTACTC
AGCACCCAGGACCGTCATTGCTTTGGAACTAATTTTATGTTAATGTGTTGACTTAGGATGAATTTGCACT
TGTTTTAAGGACTGTGGAAAGTGGCTGTGGTTTTGTGATAGACATTTGTGAGAGGCCTAGTTCATAGATG
CTCACCCTTAGTCCACTGTATTGGAGTTGAGGTTAAATGAGCCCCCAGGGAGGTGCTGAGGGAATAATCG
ATTTTGGTTTGCTTAGAAACCAGGCTATTTTTTCAATCAGATATGTAGACCAGGTTTGAGAGATGAACCA
CTTAGAATAATAGAGGGCAGCCCTTAAGATTGTCAGGCCAGTGATGGAGAGAACGAAGTGCCTGGAACAG
GAAAAGAATAGGGCAAGAATGGGGGTGTCTAATGATGAAATATCTGCTGGGTTCTGGTCATGGAACTCTT
TCCCCCACCTTTTTATAAATCTCCAGTGAACTGGTCATTTCTCATAAATGTATGGACTCTGTGGGGCTGA
ATCCTGCTTCAGGTGGGCAGAGGATGAGGAAAGATCCGAGCCCCAGGCTCCTGCCATACACTTTCTCCCC
CTTGGTCTAATGAGAGCTTGAGGCCAGCTCTGAAGCGAGTCAGGAGTTGCTGGCCATCTTCTCAGAGAGC
AGTGTGGCCAGCCTGGCTGCACTGTCTTCTTTCCAGAGCCACAATCCCTGCCCTTTCTCGTCACGTGAAG
ACTGGGATAATGAAATCAGCAAGGGAGCCTGGGGCACTGTGGCCAGGCCGAGGGGAGGGCCTCCTGCCAG
GCGCCACACATCGTGGCCTGCTCAGCCTGGCAAGTCAGCTCCCATGGCCTGGGCCCACATGCCAGTGGCA
TTTGCCTCACACTGAGCAGCCACAGGAGACTGGTTAAGACAACTTCACTCTGTTCCTTGTTAGGAATAAT
CAGTCAGTTTGGGTTCAGCTAACCATGACCCTCTCAGCTCAGAAGGAAACACTGTGCTGTTCCAGCCTTG
ACCTCAGTGCTCTAAGACAAAATCTTCTGATAGAGGAAAGAGGGGCTGTGAAAAGACCACAGCTTGCCTC
TCAAGGCTGCAGGGGCGCACCATAGGCCAGAAGAGTGGGCTGTTTTGTAGTTCTTGTTCATTGGTGCAAA
TTCTATATGCAACAATAGGGCACAGCAGTCTCCCTCAGTCTGGCTGGGATAGAAGCAGATGCTGGAAGTG
CTCAGAGCTGAGCTACCTTCGGGCATCTTCCTGGTGCCAGGGGGTGGGATGAGAAGGACTTTGGCCCAGG
AACCTCATCCATGCGATCTAGCTGGGGCTGCACACGGTGCCAGTGCACCACGTGAGTGTGCTATGCTAAT
ATGTGCAAATAAAAATATTTATAAAGTCTTACTTCATGGGAATAGCTTAAAATGTGACTCCTACTTCAAA
TGTATTCTTATGGAAATTTTAGTTTTGAATCATGCAAGGTCGTCAGGAACAAATGCATTTCATTAAATGT
ACCACTCTGAGTGGGGGTGTGAACCTGAATGGTCTACTGGAACCAGGCAGTCCTCAGTCTGAATCTGAGC
TATGGGACTCCCAAGTGGGCTCGAGCCACCTCCTCCCTGCTCTGAGTTTCAGTTCATCCCTGAGTGTCTA
TTTTATAGCCCTCGTAGGGCTGCAGGGGCTGAGAAGGTGCCTGTTCAGAATTTAGCCTGGTGGCTGTCAC
ATGCAGTAATCACTAAGTGGTGGCTTTTGTCCCCACGGTGGTAGGGACAATACATGATGTTGTGTAAACT
AGTAGACTTTCTGGATCCCAAAGGAGAAAGCACCTTACTTCCTGTGAAGAATGTGACAGCTTATGGGCTG
GATGGCCTGGGGACATCTGAAGGCAGCTTCTTTCTGGTCTACATCATAGGTCCTCTGCTCTGTTCTGGAG
CAGGGCGCCTCCCTTGGCATGGTCCCTGCTGCATCCTCACATGTGAGTCCTTAGGATTTCTGTTGGTGGA
AGCTTAGGTTGCTGTTGTGCTCTCTTCCCAGATTCTTGTGTTGGTGTGGCCTGGTATGATGGGTAGACAT
GCACCCCACCCCACTCCATATGGACTTTAACATTTGAATCCTAGCTCAGTCACTTACCTGCCAAGTCTTC
TTAGGCAAGCTACCTCACCTTTCTGAACTTTAGTTTCCTTACCTATAAAATGGGAGCAAGAATACCTTGA
CTTTCAGTGTGTTCTGAGAGTAAAAGTAAAATGAAATAAGCCAGGTATGCTGTAATCCCATCACTTCTGG
AGGCTGAGGCAGGAAGATTGCTTGAGGCCAAGAGTTCGAGACCAGACTGGGCAACACAGTGAGACCCCAT
CTCTACAAAAAAAAAAAAGTTAGCCGGGCATTATGGCACATGCTTGTAGTCCCAGCTACTTGGGAGGCTG
GGGTGGGAGGATCACTTGAGCCCAGAAGTTTGAGGCTTTAATGAGTTATGATCATGCTACTCCACTCCAG
CCTGGGCAGCAATCAAGGCTCTGTCACCAGGCTGGAGTGAAGTGGTGCGATCTCGGCTCACTGCAACCTC
TGCCTCCCAGGCTCAAGCAATTCCCCTGCCTCATCCTCCCGAGTAGCTGGGACTACAGGTGCCCACCACC
AGGCCCAGATGATTTTTTGTATTTTAGTAGCTACGGGGTTTCACCATGTTGGCCAGGTTGATCTCGAACT
CCTGACCTTGTGATCCACCCACCTCGGCCTCCCAAAGTGCTGGGATTATAGGCATGAGCCACTGCGCCTG
ACCTGCTCAGCATATTTCTATTTGCCTGCCCTTGTTGTGGTATTTGAAATCTGCTACTCAGACCTATTAC
TTGTGTTGATTACTGATTCCTTCCTCTTGGAGTAAAGCTGCTCCAGAAACGAACATGGGAAAGGAAGAGT
AGCAATGTGTTTTAGGAAAAAAAAGTTAAAGAAGGGCTAAACATTTTGGGAATCACAGAGACCTTTAACA
ACTAATTGCTAATTTTTAAAAGGCCATGAAGACATTTATGGATATTTAGATTTTCTAAATGTCAGTGGGG
TCCGGAAATGTACCCTGGCGCCTTTAGAGAAAAAACGAGCTATCCAGCCAAAGCCTCTAAGACCACGTCT
GGAAGGCGCGGAGAGGTTTTCCTCTATGGGAAACTGGCCAACGTGAGACCAGTCCTCCCAGGAGATAAGA
GAAGGGGCTTCGGAAACCAGTGTCTGGTAGGACTAGGTGTAACCTGTGAATGATCCTTCAGCCAAGTCCA
GAGGGAAGTCTGCCCACATGCAGACAATGGATGCCGCAGGCAGGAAGCTTCCTGGAGGTTAAGGAGGGGC
AGGGGAGCACTGTATTTTTGGAGCAGACAAGAAAAAGAAAGGGAAGAGTCACTTTCCAGTCCTTTATTCA
TGAAGTTGCCATCCCCAACCTGGGCTTGCATATCCCAAGGGTGTCCCTGGGAAAGAAGGCGGTGGGAAGG
CACAGGGCCGGGGAGCCTCGGGATCCTGAGTGAACTGGTGAGGACAGGGAGCTCAGCCTTTCCACAGTGA
ACACCCACCTATGGTGTGAGATGGGTGTGCTAGGAAGCCCTGGAGGAATGAGAGGGGCACCCGTGGTTTG
GGCAGCCTGAGTTTGTTTGTGGGTAATTGTGTATAGGTGTGTATGTGAGGGAGGCGTGTCTATGAGTAGG
AAGCTAAGTAGGTGAGGAGGTGTGTGGGTGCGGAGGGGAGGTAGGTGTATGTGGAGATGTGGGGGGCATG
TGGGGATGGGAAGGACTTGGGTAGGAGGCAGAGGAGAGTAAAGTATGTGGATGTGTGAGTGGAGTTGTGG
GGTGAGGGTTGGGGTGTATGTGAAGGGGAAGGTGTGAGGGAAGAGGTGGTGTGGGGGAAATGTGTGGAGG
TGGGGTGGGGTGCCTGTGATGGGGAAGTGTGTGTGCATGTGTTGGGGGGGTGTGGAGGTGAGGAGGGGTC
CATGTCGGGGGAAGTGTGTTCACATGTGTGGGGGGTATGGAGGTGGGGTGGGGTACATGTCGGGGGAAGT
GTGTGGGGGTGTGGAGGTGGGGTGGGGTGCCTGTGAGGGGGAAGCGTGTGTTCATGTGTGGGGGGTATGG
AGGTGGGGTGGGGTGCCTGTGAAGGGAAGCATGTGGGGTGGTAGGTGATTGGAGGGTGGGGATGGGCAGA
TGTGCAAGGAAGGAGGAGAAAGGGTGTATGTATTGGTGGAGGGCGGGGTGGAGCATCCTAGTGGGAGTTG
CACAACCTGGCCAGTGGATCTATTTAACTCAAAAAGAAAGAGAAAATAAACAACAGAGAAAATCACAAAA
CACATGGGTGTTATTAATTTGACTGAGAGAAATAGAGCCCTGAACGGATGAGCAGAACAAAACTTAATGA
GATTTGATGTGGAACATTTTTTAAATGCGTGGTGTAGGAAAGAATAGAAATAAACATGGAGAAATGATAG
AAAACACTAGACTGCGGTAGAGAAGGCCCGGGAAGGAGCGAAGCTGGAAACTGGTGGGAGAGCTCTGCGC
TCCATGGTGATGGTGTGACAGCCTCTCTGAGGGCCTGAGCCTGAGCCGTGACATAAAAGTAGCTGACTCT
CTGTCAGGCTTTTCTATCATCTGTTTTTGTGGGCAAGGCACAACTCCCCTTGGCTTACCTGGAAACTGGA
CCCCTTGTTCTGCGTCTCTAGCACAGGCCTGGTGGAGACCTAAGTGTGGACCCTCAGGCATGCCTGATCA
TTTCCCTTGCTCAGGAATGAAGCTGAGTGACAGGTCTGCTTGGGGGGAGGGTCCAGGAGGCAAGCTGCAG
CCTGCTCCGCTGAGAGTCGCTTCTCCAGGAAGGCTGGCAGACTGTGTCTTGGGCCCACCTGTAGCAGGAG
GATGGCCTCCTTGGGAGTTAGTATCCAGGGTAAAAAGGAAAGCGGGCTTCTGTTCCAGTGGCTTTGGGCA
TCCTGGGAACAGTGTTGAGAATGAGGGAAAGCCCCACAGAAAAAGGGAAATGTGGTTCAAAGAAACCATT
GATCCTCCCTGCAAGATGCCTTGAGGTCCCCAAGCATCCCCAAGGGAGACAGGGAGGAACTTTCTGCTCT
TGCTGCCACACTTAGTAGAGCTGTAGAGCTGGGACACTGACTGTGTGCACAGGCATCTCCTGTGGCCCTG
AAGCCTTGAAATGGGAACCACTGGGCCCAACTGGGCAGCGTGCTACCCACCAGGAGGTTGGAAACAACAA
GGAGAGTTTCTTTCTTTCAGGAACAAAAGGACTTTTCAGGATTGAGAGCTTGGACTGGACACAGTCAGAG
AGGATGTGAGCCTCAGAAATCTAAAAGAGGGAAACAGCAAAGAGAAGTTAGCGTGACAGAGGACTGACCC
ACAAACCAGGACCTAAGGGGGCTGGCTGGTGCTCTGGAATGTTCTGGAGAGCTCCTTCCTGGCCTCTTCT
TGGCCTGGGGCTGCAGTGCGGAGAGGTGTGAGCAGGGGACTCCATACTCCCCTCTCATCGTCTTGTGCTG
GTGACACCTGCTCTTGTCTGTCTCATACATTGTGCTTCTCCAGAAGCATTGGTTGCAGAAGATTTGGTGG
CTGATGTGTTTGAACACCATGGGACTAGACCAGGGGTCAACAGACATTTTCTGTAAAGGGCCAGGTAGTA
AATATGTCAGACTTGTATACCATAAGGTCTGTGCTGAAATTATTCAACTTTGCTGTAGTGGCACAAAAGT
TCCCCTTCCCAATAGATAAGCAAGTGGGCGTGGCTGTGTCCCCATAAAACTTATTGATAGATACAGGCTG
GGAACTGAACGCAGCCCACGGGTTGTGGTTTGCCAATCTCTGGACCAGACAGTTCTCTCTGCCAGGCCCA
CTACTGCCCTCAGGCATCTGGAGCTGAAGCTCAAGAATGGGGACTGTAAGGCTGCCTGAATGTGGACAGT
CATGGTTTGTGGGAGCAGGCCCCTCCCTCTCTCCCATGTCACTCGTTTTCCTAGATTTCCCTGAATTCTC
TCTTCCTATACTCCACTCCATCAGTCCCAGGTCAGTCTTCTGGAACCAAGCAGAACCAGCCCATCAGTCC
ACAGTGGTGGAAACAGCCATCACATAGCCCAGAGCCTTTGCTTCCTGAGCTGCTGGTCTTTACACAAAAT
AAGGCTTCCAGCCCTTTGGGGGCCCAGTGCGGTGCTGTCAGGGTGGTCTCCCTGAGAAGAAGACAGAGGG
AGGCTCACATCTGAATCTGAGGGTCCTCCTCACAGGCTGGAATTGTGAACTTGCGGTCAAAACACCAGAG
ACTTGTCCCCATACATTGTGCCAAGCTGACTAGCTGAATTCCTTGAAGCTACGGTCAAGCTTCATATTTT
CTCCCTGTAGGAATCATTCTCCTTGGTTGGGGTCCCTCCTTATAGCCGTGGGTCTAATTTTGAGTTATCA
GCCGTTGGACTGTCCAATCCTCCCAGCTTCGTGTCATCCATGTCATTCACACATTTGTAAGCAGTTTCCT
TCTTTCTCCAAAGTCCGTGACAAGCGTTGAGTGGCATGCGCTCAGAGCAGCTTCTTTCTGGGTGACGCTG
GCCCACGGGCACCCGAGCCGGGCATGCTTTGAGCCAGTTTTCCCTGAGGACTCCCCAGCCATGTGTCCTC
ATCTTGTCTAGCAGGATGTCATGACAGGCTTTGTCAAAAGGCTTCTTCCAATCAAGTAACACCATGTTAT
GGCTTCCTGCTGGGTCAGGAGCCCCATTAACAAAGGAAATGAGGTTGGTTTGGCAAGACTGGCTTTTGAT
GAGCTCATGTTGGCTCCGCTAACGGTTTTTTTTTCCCCCTTTAAAGAGCTTCTCATCAGCTTACTGAATA
AATCTGTGAACAATAAATTCTATCTCACACCCATCAGGGTGGGGGAGTACTAATTAAGCTCACATTTCTT
TGCATGTTAAAATTAAATGGCTCTGAGCTGCATCCTGCTCCCTCAGGTATGTCTTCCTTCCCTTCATCCA
CTAAAGAACCAGCTCTGATGATGAGCCGAGCCAGGTGCTGGTGCCAGACCATGTGCTGGGCCAGGGTGTG
GGGGTGTGGGCAGCGGAAGAGAAAGCCCCTGGCCAGCAATATAGCACCCTGCCTTGTTGGGCATGCACAG
TGAGCCTACCGTCTTGTGCCCAGCTCATTCATAGCACAGCCTCCTCAATACAAGTAGGCATTTTCCCTAG
GGCCCCCTCTAGTGCCAAGGTGGCAGTATGGGAAGGGACATCCAGCCTCAGCCTCAGAACTAGTCTTGGA
AACCCAGTCTTGAGAGAGAAGCAGAGCAGTTCCTCCTTCCACTGCCCTGAGCTTCTTTTCCTCCACAGAT
GTGAACTTCTCCAAGCACACTCACTTGTCCTGTAACTGCTTTATTATAATCCATCCATTGCTGGTGACCA
GCATTGATCTTACTGGTATCTAGTTTCTGGACCCAGTTTCCAAGTTCTTAAAGGCCTGGGCAACATTGCC
TGTCTCCAAGCTTCTCCCATTTCCCTTATCTATTTGAGTTTCTCACAGTTACTCATCTCTTTGGATGAAA
ATCGATCTCATCGTATAATCACTATGTCCCAGGTTATAATATACTCATTATTTTTAATTCTCATAAGAAT
ATTGTAAGACAGGTATTATATCTGTTTTGAAGACGAGGACACTGAGGTTCATTCCGAGAGGCCTCTGACT
ATCAAGCAGTAGAGCCAAGATTGGAACCTCATCTGTCTGGCTTCAAGGTGTGAATTTCTTCCATTGCCCC
ACAATGTGCCCCAGACTGTCAACGTCAACTCATTTTTTCCTCTGGGGCAGAAGACTATGTTCTCCTAGTT
TTCCAAGATGAAACTGAGTGCATTTGCCCATAGGAATCATTTTATAAATGGAGGCTTAGTTTAGCTGGAA
TAGAACACATGTTATTACTGGGGCATTATGGATTAACTAGGCTTTGTGGACTACACTGGAAACCCAATCA
TTTCTGATTTGCAAACAACCCAATTTACAATCGACTTTGGGATCTCAGATCATGAGTGAGTTTGGGACAG
TCTGTTCCAAGCCTGCCAGTGGGTGTTGCCAGAGTTTCAGGAGGAACTGTAGAGTAGCTGAATTTAGGAG
ATGAGGAAATAAGTCCTTCAGAGTGGAACATTCTGAATGAGGTTCCAGGAGTCGTGCTGATAGTTTAAGG
GCTTGGCACCTTGGCCATGATTCCAGATAACTCTCTGGAAACACCCCTGCCTTTCTCTGTTGTTCTCTTA
TGGATTGCTTCTGAAGTTTGGGGCTTGCTAACCTCTTCCCCATTTGACCCTACTCACCCACACACTCCCA
GATGACAGCCATGTCTCCTTCTGAGCAGGGAGGGGATGGGTGGCTCTTAAGAGCCATGACTTGAAGGAGC
CCTCCTCTTTCCTGGCAGAAGTCTCTCTCTTTGCTTTACTAGAATGATGAGAATGACTAGTCAAAGGAAA
GCCCCTCTTGCCATGGCCTTCTCTTGTTGCTTGGTCGTTCTAGGGTCCCCTCCCTACCCCAGCTCTAGAC
CTTGGTGCAAAGCCCTCTTACTATTTATTCCCTTGACAGCTGGAAGGCTGGCCTCAGCCTGGCCATCCCG
AGGGGTGGGACGGAGCGCTGAAACATGTGGCTTTGAACACCGGCATGGCTAGACCTTGGCCTGCCCCAGA
TCTACCCCATCTCTGGAGGTTCCTTTCTAGGGAAGTAGACCTTCCTGACAGAGACTCCTACATTTCTAAA
GCTGCTGAGGGTCCAGAATTTAGAAATGAAATTCTGCATATTTAAATGGTGGAGTGAGTCAGAGGGTTGA
CTCACATGCTGGTGGGGTGGGGCTGGGGGAGCTGGAGGAGGGAAGAGGTCCGGCCTGTTTCTAGTTAACA
TTTCACAGCCCTGTGAAAACTAGACTGGCAAAGCCAGCCCTCTGGTGTTCTATGGGAAAAAATGTGCTCT
GATGAACTTGAGCCTTCCAGAAGGTTGCCTGGGGGAAGATGAGAAACAGACTGATACCTGGCTAAGAAAT
AGACGCCCCTCCCTCCTCCAGACCCCTCCAAGATAGGGGCAGGTGGCTGTGTTTGGGCAGGCAGTCTCTG
GAGGTTGTGGTAGCAGGAAAAGGCAGGCATGTTCCTGACCTTACTACAGGATTTGACTTGGTGGAAAGGT
CAGAGTTAGCAACCTCTAACCTGCCATGCTTCTATAAGTTACGTGGAGTAGCTGTGTTCCAGCCTTTACT
AGAGTGCTTGCGAAGCAATGAGAGGTTGCTGTTTCTTCCTAATGTGTGCCCGAGTTCCTGAAAAGGCTGG
AGCTTTTGCTCCAGGGAGGAGAGGTGTGGAGTGGTGCAAAGAGACTCAAGTCCCCCATTCTGTCTGCCAG
AGGCTGTCCATTATCAATGTCGCTAGATCAGAGGCTGCCCACGGGGTTGGTGCTCATACAAGGTCTTTTT
CTTCCCCTTCTTCCTGCCCCTTGAACTCCTATCCCTGTCCTCCTATTTTTTTTTCTTTTTTAAAATGTGT
GTCCTCTTATTTTTATAAGGGAAGAGCTTAATGTTCTAAATTCTAGAAGACTTGGCTGAGCGCAGTGGCT
CACGCCTATAATCCCAGCACTTTGGGAGGCCGAGGAGGGTGGATCGTCTGAGGTCAGGAGTTCGAGACCA
GCCTGGCCAACATGGTGAAACACTGTCTGTACTAAAAATACAAAAATTTGCTGGGCGTGGTAGCATGTGC
CTGTAATCTCAGCTACTTGGGAGGCTGAGGCAGGAGAATCGCTTAAACCCGGGAGGCAGATGTTTCAGTG
AGCCAAGATCATGCTATTGCACTCCAGCCTGGGCGACAGAGCGAGACTCTGTCTCAAAAAATAAAATAAA
ATAAAATAAAAATAAATTCTAGAAGACTCTATTCTGACCAGAGTGAGCTAGCCAGGGCCGCCCACTGCCA
AGGGTGTCTCAGGCTTGATTGTCTGGGAAGCCCACACTACATCTGTCTCTGACATAAACACCTGTCCCCG
CATAAGGCCGGTTCTGTTAGTGGGCCACAGCTTCTCTGATAGCACTGACCTCGGGGTTGCATTTAACTGC
TGTTCCCTTTTTTATATGTGTCAGAACTTGATCTGGGATGTGGGATGGGTTTGGGCCCTATTGAGTTGGC
ATAAGGAAGAAAGTTCTTTGGAAGATCTTGAATCAATTTGGAATGTAGAATAGGCCAAGAGGAACTCAGT
AGACTTGGATGTAATTGGGGCCCATTGATTATTTTTAAATACATATTTTAATAAAGGCAGTTTCTGACAT
GTAATCCGACATTTTTAAAGTTAGTGGTAGCAGTTAAACAATCCCCAGAAAGTTTCACCTCCTGAACACT
GCATGAGATGAACTTCATGAGGATTTTTGTGGCCGTGGTGCAGCAGGCAACATGCCGTATGAAGACTTAA
TAAGTCATTCAATGTTTTTACCATCTTTGATGACCATTAAATACCTTGCAAAAAATGATTTTGCTAGTCA
AGTCAGCAACAATGTTCAAATAAATATGTATTAAATAAATTAATGAGAATCAGTAGAATCAAGAACTAGC
ATTCAAAAAACCCACACATTTTCTGGCCCTTTCTTTTCCCGGTGATGTTTCTCATGTCATGCCCCTGCTA
TCCTACAGCAGCCTGGCCTTGTGTGTCTACGCACACACCCTCTGGGCTATGCATTCACCATCCTCGCAGC
CACTAAGCCCTGCCCCTCATACTATGCATTGACTGCTTCTTGATGGAATCAACTCCCCTCCTTACCCGTC
TCAGTTGACAGGGCCTTGCACATTACTCCTAAGTCCTCTAGTGTGTTCATTGCACTGACCCCTCATGATT
TTCACCCTTCTGGAGTTTTCCTTAGGATACAATCCAGGCCCCTTCCCATCATGCACAAGTCCTCCAGGGG
CAGCCAGGCCTCACCCTGGAGGACTTGTGTTTGAGCGCCAGCCTCACTGACCTTTATTCATGTTGTGGAA
TGTACCACCCCCGCATCTGAGCCCTTCCACACTCTCTTTCTCTCCTCCTCACCTCCCCACTTCCCCACCC
TTATCTTCTATCTATGCCTGTCGATTCTTCTCAGTTCAGAGGCCACTTTCTCCAGAAACCTTCTCCAGAA
TGTCCTCTCCTACAACACTGGGTCTGCTGCCTCTCTCATATGCTCCCTGGCACCCTGTCCCAGCTTCACA
TGTCCTGTGCAATATTTTTAAATTGTGGCAAAATATATATAACATAAATTTTACTGTTTAACCACTTTTA
AGTGTATAGTTCAGTGGCATTAAGGTACGTTCACAATGCTGTGCAACCATCATCATCATCCACACCTGGA
ACTTTTTCATCTTCTCAAACTAAAATTCTGTATCTGTTAAACACTAACTCTTCATTCCCATCTCCCCCAG
TCCCTGGCAACCACCATTCTACTTTCTGTTTCTGTGAATTTGACTTCTTAGATCCCTCATCTCAGTGAAA
TCACACAGCATTTGTCTTTCCGTGTCTGGCATATTTCACTTAGCATAATGTCCTCAAGGCTCATCTGTGC
TGTAGCATGTGTCAGGATTCTCTTCCTTTTTACAGCTGTATAATATTCCATTGCATATACCACATTTTGT
TTACCCATTCATCTGTTGATTAATATTTGGGCTGTTTCTAACTTTTGGCTATCAGGAAGATAGTGCTCTG
AATATGGGGGTACAAATATCTCTTTAAGTCCTTGCTTTCAATTTTTGGGGGTATATACTCAGAAGTGGAA
TTGCCAGATCATATGATGATTCTATCTTTATTAGTATTTATTTATTTATTTATTTATTTATTTATTTATT
TTTGAGACGGAGTCTCGCTCTGTCACCCAGGCTGGAGTGCAGTGGCGCCATCTTGGCTCACTGCAAGCTC
CGCTTCCTGGGTTCACGCCATTCTCCTGCCTCAGCCTCCCGAGTAGCTGGGACTACAAGTGCGAGCCACC
ATGCCCACCTAATTTTTTGTATTTTTAGTGGAGACAGGGTTTCACCGTGTTAGCCAGGATGGTCTTGATC
TCCTGACCTTGTGATCTGCCCGCCTCAGCCTCCCAAAGTGCTGGGATTACAGGTATGAGCCACCGCACCC
GGCCCATTAGTATTTATTTTTTTTTGAGACAAGATCTCACTCTGTCGCCCAGGCAGTGGCAGGATCTTGG
CTCACTGCAGTCTCTGCCTCCTGGGTTCAAGCCAACCTCTCACCTCAGCCTCCCAAGTAGCTAGGACTAC
AGGCACGTACCACCATGCCCAGCTAATTTTTTGTATTTTTAGTAGAGACAGGGTTTTGCCATGTTACCCA
GGCTGGTCTCGAACTCCTGGGCTTAAGCAATCTGCCCCTCTTGGCCTCCCAAAATATTGGGATTACAGGT
GCGCGCCGTCACGCCCAGTGTTGATGATTCTATTTTTCAGTTTTTGAGGAACCACCCTTCTTCTTCCCAC
ATTGGCTACACCACTTTACATTCTCACCAGCGATGCATAGGGTTCTAATTGCTCCACACCCTTGCCAACA
CTCGTTTTCTGTTTTTTTTTTTTTTGGTAATAGCCATCCTGATGGGTATGAAGTGATATCTCATTGTAGT
TTTGATTTGATAAAGCAATATTACGGTTGCTTTTTTGATGCTCTGGGTACCACAGTGGACCACAGGGTTT
GTTAGGCACAGTACCTGTGCCTCTCAGTCATGCCCACATCTCCCACCCAAGCAGAGTGCCCACCCACAGC
CACTATCAACCAAATAACTGAGCGACTGAAGAATGAATGTAACTGGGTCCAGGTCCTTTTCAGGACTCCG
CGTTCTCCTTTTCCCCTGTGACGCAGGTATCACTCATACTGCTGCTGAGGGGCAGCTGCTCAGACCTAGG
CATCTAGGCATGGTCCTTCAGTGGCTGAACTGGGAACAGAGGCTGATTCTTTGCATCTCTTTCCAGGTAT
TGTGATTTGCTTTAAACCGTGCTCCCACATAACTTAGACTTGGTCCTGCCACCCCACGGCCTATGAGACA
ACGTGCCACAGAGAGCCACTGTCACACCGAGGGGAATGGCTCAGCCAAGCACACTTGTGAATGACAACAA
CCTGAGGTTTTAGGGAACTCAGACTTTGTTTATTTCTCCATACACAGTGTACCCAAGATTTGTCTGAATC
TTCAGAAATAAATACCCACTTGGAAATGTAGCAGCAGCCCTTTTATTTATGGATGCAAAGTATATGTCCT
TCAGAAATGCATCCGTTTGGTCAAAGTTGGCACAGAGAAGTTAGCAGAGAAGTGTGCGTGTTGATTTCTT
TGAGTGACTGCACAGCTGTGTTGAGTCAGTTAGCCATGCCAGGTCAGGTGGGTTTGTATAAATGTTTGAA
CACTTCCCAAGCTGAGCAGCTGGCTTAGCTCTCTTTCCCCTACATGCCTATTTGGTCCTGAGAAGAGCAT
GGGGCCATGTTACCTGTCCCTCACTCCCTCCAAAGACCAGCATAGCCTGTGCATATAAACTCTTACCCAC
CTGGGGCAACAGCCCCGGGTGTCCTGTCTGGCTGCTGCACTGGGGGAGTGACCAGTGAGCCTAACACTCT
GCCCACCAGATCCACCAGCAGCCTCTCACCCTCTGCTGTGCTTGGTCCTTCCCTGGAGTCCTCTGAGAGC
TTTCAAAGTCAAAATCACCAACATAGAGAGCCACGAATTCAGGGTCATAGGAATCTGGGTCCCAGGCTCC
CAGTCCAGGCCTTCCAACATCTGTTAGCCTTGCCCACTCAGAGCCACCCTGACCTCACCCTGGGATCTGC
AGGAGTCAGCCAGCGCCACACCCAGTTCTGGGTGTTGGAAATGGTCCATTTGATAGATTCCTGAGTGGGA
GGGTGGGCCAGACAGCCCCTGTGGTCTTTCAGCAGGAGCATTTTACAATTCTGTGCTTCAGGACCCTTGC
AGCATCACTGAGCTGCACCAGCCTTCTTTCAAGATGGCAGACACAGCCTCTAGACCTGGTGTGGGACTGG
CAGGGTCTGACTTCTCATGCTTGGGCATCTTTTTGGAACCATAGTCTTCTACCTCTTTAATGACACAGAG
AATCTTTCTATCTAGCCACCTTATGGCCTCTACGCCAAGGGAAACTAAGGCTCAGAGACATTTAGAAACT
TGCTCAAGAATACATAGGGATAAAACCAATTTTTATCTTACCTAGGGATAAAGCCAATTTCTTAACTCCC
TGTACTGTGTTTATTTCATCTTATTGTCCCAGATTCTAGCACACATCCCAGCAGCCAGCCCCTTTCCTGA
GAGGAAGTAGGTGTAAGGTCCCAGCCACCTACAGAGGTCAGAGAGCTCATATGTCTGAAGGTGGCTAGGG
ATGGAGGAAATCTTCCCATGCCATGTTCTTCCATCCCTGAAAAATGTGTGTTCTGTCTTTTCAAGCTGCC
ATCAGACTTGATTTCAGTTTGGACTTTGAGTCAGACACATGCAGGTTCGGATCCCAGCTCTACCCCCAAA
CCAGCTACTTAGGTATGGTCTTATGTAGTCTCCTGCTCACAGTAACCCCTGTGAGCAGGAGACCACATAC
ATCACAACCTTGGCACAGGGCCTGGCCCTGTCAGTACATGGGTGTTTGACATTTCTGGTGCTAGGACTTG
GATCTCTACGGTAGAGCCTGTAAATCAGAGAGAGGCCCAACACTCCACGGGGGAGAGGTGGTGGTGGGCT
CTGGTGGGACTTAGGCTCACCTAGCTCAGGGCAGCACAAGTGAGAATTAAACTGAATCCCATCAGTGTTA
AGTGAGCAAGATCGGTGACGTCAGCGATGGGTTGTGGTTGGTGGGGATGGGCAGAGACTCAGCTCCACTG
TTGCAGGCCTAGAGCCTAGAGCAGAAAGAAGGGCAATGGGAATGGGACAAAGAAGAAATGGGAGAGACGT
TGTTAAGCTTTGGATATATTTATTTACAAAAACCTTGAATTTAAAAACTTTGTTGCTTTATTTCAAAAGT
ATTTCTTTTAACACAAAAGAAATGTGTTCATTCCAGACAAATTACAAAATAAATGAGGCAAATAAAAAAA
GATCAGCACAATCTCATCACCCAGAGAGAGCCATCATCTTCCAGAGGTTTTCTCTGCATATTCAAGTAGT
CCACAAACGTTTTATAAATTAGGGAACATATTCTTCTCCAAGCTACTAGTTACTATTTTTTTATTCTAAC
AAGCTGTTCCAGCTGTCTTTCTGTGTAAAAAAAAGGCTATATTTTCACCCCAATTCTAAAAGGTTGCATA
TTATATCACCATGTGGTCGGGCCACTCTATTTGAATTCTGCATTGAAAGGCAGGATAATGAACATGGAGT
GGGAAGAGGGAGGTACAGAGGGACCCTGACTACAGTCCCTGGCTGCTTGCCAGGATGCTTCCTTCCACGG
ACACAACTATTGAAGGTCTAGATGACCCTGACCAAACAGACGCCTTGGCTTCCTTTCCTTTTCCTGGGAC
AGGCTTCCCTGACTGATGGGGGAGCTCCCATGACAGCAACTTTCTAATGTGTCCTGCATAGACACCACTG
GAGAGGGCAGACAACAGTGGGGCCAGGCTGGACGAGGCGTGTGCGACTGGGGAGAGGGGAAAGGGCAATG
AAGAGCACAGACCCCTCTCCCCAGCCCCACCATCCAGGGCAGCCCTGAGCCCAACAGCACCGGCAGAGTC
CAGTGTGAGGAGCAGGGCTAGTCTACGGCGCTCGGTTTTCCTCTCTGTGGGACTTAGGCTCACCTAGCTC
AGGGCAGCACAAGTGAGAATTAAACGGAATCCCATTAGTGTTAAGCGAGTGAGATTGGTGACGTCAGTGG
TTTCCATTAGCCTGAATGAGACAGGGAAAGGGGATCTCATGGAAAGGAGCCCTCGAGAACCCCTAAGGCC
TTGGAGAGCTGCCAATGCTGATTGCTTAGTGTGGGCCAAATTAAAAACAGAGGCATGGAAGCGGCAGCCC
AGCCTGGCAAGGGCCACAGCCACAGGAACCATAGTGCCCACAGGCCTCACCCAGGGTGTCTGGGACCCTC
ACAGAAGGGCTTCGAGAAGCAGCCTCAGCTTCCCCATCTGTAATATGAGAGGCTGAACGAGAGGGTCTTA
AAGCCCCTCCAGCATCAGAAGTTCTGGGAGCTTCCCCGGAACGGTAAGGATATTAAATGTCTTTGGCAGT
AGGTCTTCCAGTGTGACTTGGAGCTGGGCTCACTAAGAAGCAAAGGCCCTGGGAGTCACAACCAGGGACT
CAACCCACGTTGTAGGTGACACCAACCCGGTGCAACAGCATGACCTCTGTCCTGCTGAAGAGAACCCTGG
GGGCCCAGAGCCCCAGGGCTGAGCACAGGGTGCTGGAGGCCGACGGGCCTGGGCTTTGACCCTGGACCCC
CTCCCCCTTTTCCAGCTGGGTGCCCCTTTCCTCCACAGATGAAGGTACTGACTTCTCCGTGCTCAGCTCC
CCACCAGTGCCCATGGAGGAGAAGGCATGGACACTCACGAGAGGAAGATTCCTCTCCACCTGAGAAATAG
CAGCTCCTGGGGCCGGGGAGCCCACATTCCACCTCTCTTTCACACCTTTGTTTCTAGAGTCCCTCCTGCT
GGCCAGACAGAAGGACGCGGTCCTCAGGAACCATGTCCCATTTGCTAGCACAGCCTCTGGCCAAAGTTGG
TCCTTCCCCAAGGGGCCTGGGAGAAAGGCCGGGTTTGGAGGCCAGCCGGTGGAACCAGGAGACCAGGGTG
GTGGAGACCAGCAAGCACTCTCGTTGCAGGGAACAACAGCCGCTTGCAGGCCGAGCTCTGCCAGAAGCAT
TGGCAGGACCTGCCTCCCAGTAAGTGCCACAGCACCACCCAGAACCCCCAGAAGGAGACCAGCAGCATGT
GGGGCCTGATGGTGGTTGCCCAGCTGCTGGCTGGCATCGGGACAGTGCCTATTCAGCCATTTGGGATCTC
CTATGTGGATGACTTCTCAGAGCCCAGCAACTCGCCCCTGTACATCTGTGAGTCACCGGCTTGAAGAGGG
CTTTGGGGAGGGGTGAGGTCCTGATGTAGCACTTGATGAGGCCCTGGGGCACTAAACTGAGGTCCCACCC
TCTTTGCTTACAACCCAGCAAATGAGTTCAGAGGCCTGGGGATCCGACAGACTTGGTTTGAATGTCAGCT
CCATTACCTCCCAGCTGTGTGATCTGAGGCAAATGGCTGAACCCCAGGGCCCCAGGTTTCTCACCTCCAG
GAGGAGGCTGATATTATCTGTGCGCTGGATGGCTGTGGGATACATGAGATGGCATATGTAACCACTTAGC
TGGTGTTGGGCACTGGATGGACCCTAAACCAACAGCACCTACTGTTGCTCTCTGACTAGTCCTTCAGGCA
CAGGCCAGGACACACATATCTTCTCTGAGACATCCACTTAGGAGCAGGTTGGCCTCAAAGAAGCCCATGC
AAAGCAGATAGCAGATGACCACGTGAATGCCCAAATCCTTCCCTTCGAACAAGCCACTTTGGGACGGGCG
TGGTGGCTCATGCCTGTAATCCCAGCACTTTGGGAGGCCAAGGCAGGCGGATCACCTGAGGCCGGGAGTT
CGAGACCAGCCTGATCAACATGGAGAAACCCCGTCTCTATTAAAAATAAAAAATTAGCTGGGCATGGTGG
CGCATACCTGTGGTCCCAGCTACTTGGGATGCTGAGGCAGGAGAATCACTCGAACCCAGGAGGCAGAGGT
TGCAGTGAGCCAAGATTGCACCATTGCTCTCCAGCATGGGCAACAAGAGTGAAACTCCATCTAAAAAAAA
AAAAAAAAAAAAAAAAAAAGAACACACCACTTTGAGCATCCTCAGGGCCTATACTCCAGACCACACAGAC
CACCCCCACAGGCTCTGTGGCACCATGAGCTCCTCCGAGGGCCCCCAGCATCGTACCCACAGGGAGCATC
ACCTGGCATTTTTAAATGCCTTGGAGCCTGTTTCCTTCCTGGCAAGCAGGTCTCTTTGGAAGTTGGCTGG
AGGAAGAAATAGCCTTGGTTCTATATGTCTTGGAATCTTGAGTGGTTCTGGCCTTGCTGGTGGGAGATGC
CACAGGTGTGGGCTTATCAGGCTTGGGAACAGATGAAGTGATATCTCAAGACTCCCCCTCAGCTTGGGAG
CCCAAGGCTGCCAAACTCTCTCCATTTATCTCAGTCTCCTTCCCCTTACTTCCTTTTCCAGCCATCTTAT
TTGCCATCTCTGTATTTGGACCGGCTTTCGGGTACCTGCTGGGCTCTGTCATGCTGCAGATCTTTGTGGA
CTATGGCAGGGTCAACACAGGTGAGTATGTGCAGAGGACACCCATTCCCATCCCCAGCTCAATAAAGCAG
CCCCCAGCCCCCTCATCCAATCAGAACAGAGAATGAAGCTTCAGCTCCAGATGCGCTCTGCCACCTCCTC
ACTCGCTCACTCATCCCTGCAGTCCCTCGGAGAGCCAGGAGCAGACAGTGTGTGCCTCCTCTCTCAGGGC
CCACGCTGGCCACTGTGAGGAACAAGCTGCTGAAGCAAACTCACTTTCTGCCCTTAAGAAGTTTGGAGAC
CCAGGGCAGGACCTCAGGTGTTGCCACCACAGCGCCCATCTTGGTGGCATTAAAAATATTTCTATGGGCT
GGGTGCGGTGGCTCAAGCCTGTAATCCCAGCACTTTGGGAGGCTGAGGCGGGTGGATCACGAGGTCAGGA
GATCAAGACCACCCTGGCTAACACGGTGAAACCCCGTCTCTACTAAAAATACAAAAAAATTAGCCGGGCG
TGGTGGCAGATGCCTGTAGTCCCAGCTACTTAGGAGGCTGAGGCAGAAGAATGGCGTGAACCTGGGAGGC
AGAGCTTGCAGTGAGCCGAGATCATGCCACTGCACTCCAGCCTGGGCGACAGAGTGAGACTCTGTCTGAA
AGAAAAAAAAAAAATTCTATGGTTCTTTGATTCTAAGATGTTGCTGGTTCTTTAAGATTTAATAAGAGCT
CTTTTGAGGAAAAAAAAGAAACATCATATAAAATATACACACGGATGATGACTCACATCCAGAGGGTATA
ACATGGTGTTTGACTGTGTGGGCGCTGGGACGGGACTGCCTGGGTCTCATCCTGGCTCCATCTCTTACTA
GCCAAGTGATCTTAGGCAAGTAACTTTGTCTTTCTGTGCCTCAGCTTCCTCATCTGTAAAATGGAGCTAA
TGATAGTAAAATAAAGTTGTTTTAAAGATCAGAACAAGCCTAATGTATATTAAGAAGTCAACAGTATGAG
TTCGTATTCTTCAACAAGTGGTATGGATGAGAATATATAGTCCCTAGACACCAGCATAAGTTCTGAGTTA
ACCATTCAGGGAGCCAGCCCCAGGATGAATGGAGCAAGGGCTTCCTGCCTTTGAGAGTGTGTCCCACACT
ACCCAGTCTCCCACAAGATGGGGAAGGTCAGCACCACAACAGAGGGACAGGCAAAGTGCTGTAGGGTGGA
GAATGTGGGGAGTGTGTGGGTGGGATACGAAGTTCCAGCTCGGCTGAAGGGGTGGCTGAAAGGCAGGACT
GAGCCAGACTCCAGGAAGAGCACTCCCACCACTGCCCTGCAAACAAGTCACGTCACAGATATCTGGCAGG
TGCTAGTTGCAACCATGCTGCTAGAGCCTAGACTCCCGTCCCTAAGACTGTCAGACCACAGTGCCATCTG
CATGGTGTCATTTGGCTGTACTTCCAATGAAAGTAGAAAGCCAGGGGGTGTCTTATGCCTCAGGATCAAG
CCATCCCTGTCCTTTTGCTGGCACTCCCCGAATTGGTTCCTGGCTCTTGGTTGCCCAAAGAGACCAGCAA
CTGAGTGCCCAGTCCACTCAGGGCAGTGCCCAGGGAAGCTTGTCATGATTTGACTGAACCGTTCTGCCAC
CTTCTCCTTCCCTTTATGCCCGGATAGTTTCTTTACACAGAGAAACACAATGGCAGACTTTTACACGTGT
GCAAGAGAATTGCCAAGAGAAAGCTGCTCCTTTGGAAGCCAGGCAGTTCACACAGTTGATGGTTGTTTCT
TTAGGCTTCTAAGGATTATGGGGCCTCCTTTGTTAGGGATCCATAAAGTTGGGAGGCAGTAGTTTAATGG
TTAAGAGGGCAGGTTTGCATACCAGGGAGACACAGGCTTGAAATTGACCAATGAAATGGCACTTACTAGC
CTTTACCTGAGGCAAGGGACTTAACCCCTTCTATCCTCAGTTTCTTGACTGGTGAGAGGTGGGCAGACTT
GCTAGAGAACCCAGTGGAAAACAGATGGAAAGCACGTGGTCTAGAGTCTGGCCCATGGTGTGCCCTTGTG
AGTGAGAGTCAGCTCCCTTCTTCACTACTTCTGCCAAGGGCTGGGAGTTGAATAAGGAGGTGAAGGTACT
GCTCCCTCCTGCCCGGGGATTTTCTGATGCTGTGCTTCATGTGCAGTGGCCTTGGTCCTCTGGGAAGACC
AATAGCTGGGAGAGGGAATGTTGTTTTGACCAAGAATCTAGCTCATGGCTTGCCTCTTCTGCATCCTGGG
AAGAAAATCAGTGAAACTCCCCCTGATCAGAGGTTCTGTTTCCAGTAAGGTGAGATCATGCATTCAACAA
ACATTTGCACTCTTCGTTTTCTCTTCAGCTGCAGTTAACTTGGTCCCGGGTGACCCCCGATGGATTGGAG
CCTGGTGGCTAGGCCTGCTCATTTCTTCAGCTTTATTGGTTCTCACCTCTTTCCCCTTTTTTTTCTTCCC
TCGAGCAATGCCCATAGGAGCAAAGGTAAGGTTCCAAGAGCCCATGACTCTACCTGATGGAGTTGAAGAA
AGGGATGTGGGGGTAGAAAATAAATAGAGCTAAAAAGCTGCAGCATGTTAAGCAAATTCAGGGTGAAATC
TAAACAAATTTCATGATGCAGGACTTCCCAGAGGCTTTAAGAGGTGAGGGTGTTGGTGAATTTCCAAAAG
GTGGTATCTCCTATGTGTTCCCGTACCATGTTAGCATGTCAAGGATCAGGAGACCTCCAGGGAACAGTTT
GGGAAACACTGAGCTTATCTAAATTGAGCTAAAGAATTAAGAGCCAATAAAGGCCAAGTCTGCGACCTGG
TACAGTCAACTTTTACATTTAATAGGGCCTATCAGTGTTCAGTGTTTGAACCTGAAAAACTGAGTAGGAA
GGGATTCCTAGCATTGAACAGTGTTGAGGGTGGCTGAAATTGGAGCATATTTTGAGCAGAGGACCTTCCA
AGCATCTTCCAGTCACGCCTGCTGGGGAAAGGAATCAGGGAAGGATGAGAACGGAGAGCAAGGAAGAGAA
GTCTGGGTAGGGGCTTGATGTTCAGCTGAAGGGTCTAAAGATTGTTCTAATTCCATGAAGTTCTAGAGCA
CTGCAGTGACTGGGTGGCCACTTGGGTGGCAATATGGCAGCTAGGTTGAGTTTAGGGGGTAGGGAAGGAA
TGGAGGCTGGAGATCTGAAGAGGCCAGTGCAGAGACCAGGTGAGAGATGGGGAATGCAGCAATGGTTGTC
GGAGAGCTGGGACAGGGCAAAGATAAGGATAGACATTCCTAGGGTGGATGCCCAGAAGGACTCAGCAGTG
AGCTGGCTTGGAGGAGAAGAAGGAGCTAAAGTTTATGCCTAGGCTTCAAGTCCCAAAATAGAGCTCAATG
TTTGACAATGAGGTATATAAAATCTAGGCCCAGCCGGGGGGAGAGGGGCAGGGGTGGGAGGACCTCAGCT
TGTCTTGGGGAAGAATTTCAGACGTTGGCTACACATCATGCAGGTGCTGGGGTCAGGCAGACCTGGGTTT
GAATGAAGCTCTGCTACTTATAAACCAGCTGAGTTGGCCAGGTGTATAATCTCACACTTTAGGAGGCCAA
GGCAGGAGGATTGCTTGAGCCCAGGTTGAGATTGGTGGGTAGGGAAGGAATGAAGTTCAAGACCACCCTG
GGCAACATAGCGAGACCCCATCTCTAAAAAAAAAATTATTTTAAAAACTTAGCTCAGCATGGTGTTGAGT
GCATGTAGTCCCACCTACTTGGGAGGCTGAGGTGGGAGAATCACTTGAGCCCAGGAGTTCGAGGCTGCAG
TGAGCTATGACTGCACCACTGCACACCAGCTTGGGTGACAGAGTGAGACCCTGTCTCTAAAAAAATAAAA
ATAAAAAATAAAAAACAATGAACTAGCTGAGTGAGCTTCGCCAAGTTTCTTTGTTCCTAAGCTTCCTCTT
CTTTACAGTGCTCCAGCTAATTAGAGTAGCAGTATGGGAAAGCGTTGTGAGGAATGAGACAAAGCATATG
AATACTGGGCACAGGTCCAGCAGGGAGTAAGCACTCAGTGAATGGGAGAGCCTATTCCTGGAGATGAGTT
CCCAGCAGGATCCTAATGCTGTCAGAGCCCAGGGGCCTTGCATCTGAAAGGTAGTTCAGAGCTGCAGGGC
CTTAGGCTGGAGCTGACAAGGTCAGAAGAGGTAGGAAGGTTCCCTGGGGTAGTATACCCAAGAAAGTGCA
GGTAAAGGTTTAGGACAGAGCCTTGAGCAGCACTCACCTTTAGGCTCAGGAGGAAGCAAGAATCCCAGAG
AGGAGATAGAAAGGGGGAGGACGGTGGGGCTGGAAACAGATGGCATTCTAGACCAGAGTGTCCCAGAAGC
CAGTATCCCCTGGAATCTGAGGGTAGGGGAGAAGCGTAGCCATGACAGATGGGGGTGAGGGGTGGGGTCC
AGGAAGACACCTTTGGCAACAGTCATAGGAAAGTTAGATATGAAATGATATGCCCACAGGTATCGTGGGA
GGCATTGGCATAGATGTGTTCTGATTGTCGGCCAAAACACCAGGCTCACGGAAATGCAGGTGCTGTTTGC
TTCAGGAGAGCATTCTCTGGATGCCCTCCCATGCACACACGCCTGGAGGGGGCTCACCTCCACCCAGCCC
TGAGCTTCTGAGGCCAGAGACTCAAGGGCTCAGGGAAGGGTGGCTACAGTGAGCCTGGGCCGTGAACACT
CACCCCTTTTATTGCCTTCAGAGGGCTCCTGCCACAGCAGATGAAGCAAGGAAGTTGGAGGAGGCCAAGT
CAAGAGGCTCCCTGGTGGATTTCATTAAACGTAACTGACCCTACAGCCCTGGGTGGGCTGGCACAGTGCG
GGGGAGGGGATAGTGGCCAGGGGGACCCCAGCCCCTGTGGTGTTGTGTGCGGTAAGGGACAGTAGGAGCA
GAGGGCCTGTAACTGGCCCATCCCCTAGGTGTGCCTGCAGCCCAGGGGTTCTGCCAGAGCCTTGACAGCG
GTCTGTTCACAGGGTTTCCATGCATCTTTCTGAGGCTCCTGATGAACTCACTCTTCGTCCTGGTGGTCCT
GGCCCAGTGCACCTTCTCCTCCGTCATTGCTGGCCTCTCCACCTTCCTCAACAAGTTCCTGGAGAAGCAG
TATGGCACCTCAGCAGCCTATGCCAACTTCCTCATTGGTGAGCCCAGAGGGTGCTGCAGGATCCGCAGGG
CTTGCCTGGGCCAGGAGGCAGGCACTCCAGCCACCCATCCAGGGATGGGCGCAGGCCAGACCGGACATAG
GCAGGGTCCGGAGGAGGACTGCCCAGGAGAAAGAATTTTAAGGACAGTTTTCCTGGTTGGCAATCTAGAA
AGTTCTTGGCAGATTTCTGACTCCTGTCCTTCCAGTCAGGAGTGGGTGGAGGCTGGGGGCTGCCTTCCTC
CCTGTAAAGGGGCTGGAAGTCTGACAGCTTCCCAAAGGCCCTGACATCATCAGGAACAACACAGGAAAGA
GGGAAGGTTGAATTTGAGGTTAGACAAAATGCCTCCGGGATTTTCTCTTCTTCCCTAGGGACCTGAGTAT
ATTTGCTTTGGTTAGACAATATATGGTCCAGAGATTCTCAACCCAGGCTGCACCAGAGGCTCCTCTGGAG
AGCTTTACAAAACACAGATGCCCAGCCCTATCCCAGGTTAACGAAACCAGAATCTCTGGAGGTGGCACCC
AGCAGTAGTATTTTTTCAACTGTGTTGAGAACTACAGATGTGGTCCCACCAAGTACCCTAGGAAATCACT
GGGCCCAACCCAACCCACAGGTGAGTTTAACCATATGGAGTTGGCAAGGTGATCAGTGCATGAGATTGGA
GGGTGACTCCCGTGCACCCCCTGGCTGGTCCTTGGCTGTGGCTTTACCCCTCTGGCCTTCCATCTCTGAC
TGGTACATAGGGGTCATCACTCTTGTGTTGCTAACCCCATGCGGTCCCATGCAAAGAGGCCCCAAGGAAT
GAAATGTGCTTAATAAATGCATATTCAACCCACATCTCTTAAGCTGCAAGAACCCCACTTCTGTATTTTT
TGTGTAGGCAAGGCAATCCTGTCTCAAGATATTTCTCTAGATGTGCCTGGCAAGCAGTAAATGCTCAATT
AATGTCAGCTACTTCGATTACAATTTAACATACCAAATGTTCCTTCCTGAAGCCATGCTTCCTTCTCAGT
GATCCAGCTCAGTGTTTGTAGCCCACATGCAGTCCCAGGCCTGTGCACCTGGATCACCTCCTTCTTTCCA
CTTATAGGTGCTGTGAACCTCCCTGCTGCAGCCTTGGGGATGCTGTTTGGAGGAATCCTCATGAAGCGCT
TTGTTTTCTCTCTACAAGCCATTCCCCGCATAGCTACCACCATCATCACCATCTCCATGATCCTTTGTGT
TCCTTTGTTCTTCATGGGATGCTCCACCCCAACTGTGGCCGAAGTCTACCCCCCTAGGTAATGGGAATAA
GGGGTAGAGAGATCCCCTTTAATAAGGCCAGGGCTTAGATCTGGCTGTTATACATCTTCCTTCCTGCTTC
CTTAACTCTATTCTTTGCTGTACACTTTTTTTTTTTTTTGAGACAGAGTCTCGCTCCGTCACCCAGGCTG
TAGTGCAGTGGCGTGATCTTGGCTCACTGCAAACTCCACCTCCCAGGTTCAAGTGATTCTCCCAGGTTCA
AGCAATTCTCATGCCTCAGCCTCTCGAGTAGCTGGGATTACAGGTGTGTACCACCACACCCGGCTAATTT
TTGTATTTTTAGTTGAGGCGGGGTTTCACCATTTTGGCCAGGCTGGTCATAAACTCCTGACCTCAAGTGA
TCTGCCTGCCACAGCCTCCCAAAATGCTGAAATTACAGGTGTGAGCCACCCCGCCCGGCCCACTTTTGAT
CTGATCTCTCACGTGGCAACTTAGAAAATCAGGTCTTGAATGGTCTGCTCCATTATAAGAAGAGATCAAA
GGCTCTTACTGGGCCACCAGCAATCAGGGTTAGAGTTCTGTTTTCTTAAGAAGCACCAAAAACTAATTTG
TTTGATTTCAGGATGAATTTGTAGGGCTGTGAGCCACAGGAACCAGGAAATAAGCTATGTTTAGCATCAG
CTCTGTGCTGGCTAGAATTTCAGTTTCATTGAGCTGCTGAAGAGAGATGAAAGGAGACTTGAAAAGATCT
GGAGAAGAATAATGAGAGTGATGGCAGACTTGAAAAATTAGGGCAGGTGAGGAGAAGGTCAGGTAAAGTC
TGCCTGTTGGTTTGCAGACAGCAATATGGGTCACAGTGTTAACTTTGGCTTTATGTTCAGGAAGAGCTTC
AGAGCCCTGTGAGGGGAAGGATGCCAACCAAGGGGCATTTTATTTTATTTTTCCTGGGTGCCACCTGTCA
ACAAGCTTTTTTTTAAGACTTTGCCTAATGAAGTTGCAACATTTGGAGATGCTGTACCTTTCAGCCCTGG
TATTTTCTCTGTTTTTTTTTTTTTTTCTTTGAAATGACCTCCTCTGTCTTTGGTGGGTGAAGGAGAGAAG
GGGTTTGGGGGAAGGGAGGGTTGCTCGGGGTAGGGAGCTCACCCCTAGTCTGTACGGCACTTCTGCAGGC
TGACTGTGGATTGAGGAAAGCCGAGAAGCCTTTGGGCCTTTTGGCAGCGTCCACTGGGAGTTTAGCACAT
GGCTTTGTCCTCAGACAGGCCTGGACTGTATACCAGTGTTCCTTACTAGTTGGGGGAAGTTGCTTACCTT
ATCTAAGCTTTGGTTTTCTAATCCACAACAGGCAAATAATTCACTGTAGACTCGTTGTGATGATTGTGCA
TGTAAAGCCCCCGGGCACAGTGCCTGGCACGAGATGAACTCTCATTCGTATAATTATACTAGTGAAATAT
CTGGACAGTGGTTTGTCAGCCCCTTTCCCAACCCTCCCCGAAGAAGGTCATGAATATCAGATACCGGGGA
ACAGTGGGAACAGTGAGATCAACCAGTGAAATCCCTCTGGTTGAAGCTCAAGGGGATGGAGTAACTCTGG
GCAAGGTCTACATTAAGCCAGGAGACAGACAGCAAACTAAATCCTGGATTGCCTCAGCGGTCCCAGCCAC
TGTTTTTCGGCTGAAGAAGAGGGAAGGCGAATATTGTCTGTGACCTGCCCATTGCAGCTGCCCTTTCTGG
GTGGTTGGTTGTCTTGACGCCTACTGTGGCAAGGGATTCACCAGCCAGGCCTTCCCAGAGCATAATTAGT
GGATTTGGGCTCCCAGTGGCAGAAGAAATGGAGAGATGCCGTGACCACTAAACAGTGGCAAATTCACTGT
TGGCTCCACCAGGCATAATTCAGATCCCAGGGTGGCACTGGCCCAAAAGAAATAAAGATGCACAGACACA
CTCACCAGGCCAGGAACTCACACTGGGCTGGAGTGTAGGGTTTTTCTTTGGTCTTGCTTTGTTTGATTCC
CCGTTTCCTCTTTTGCTGGCAGCACATCAAGTTCTATACATCCGCAGTCTCCTGCCTGCCGCAGGGACTG
CTCGTGCCCAGATTCTATCTTCCACCCGGTCTGTGGAGACAATGGAATCGAGTACCTCTCCCCTTGCCAT
GCCGGCTGCAGCAACATCAACATGAGCTCTGCAACCTCCAAGCAACTGGTAAGGGCAGCCAGGGTCCAGA
GGCAAGAGGAGCCCCACAGGATCTCGGAGCTCAGCGCATGCCCTCAAAGACTGTTTCTCGGCTCCAGGAT
AGGCAGGGCTCCACACACACACTCATTACCAGCATCCTGGCCTCCTCTGAGCCACATCCAACCTCTCTCT
ACCTCCCTACCCTGGGGTCATGACCAGATGCTGACAGCCCACAGTCAATTAAAGACTGGCCGATGTCCAA
CAAATTCACATTCTTGAGGCCTAACTGCTCAGAGCAGAAACCAGTCAAAGCACTCCTTCAGCTGAGGCCT
TTGAGCCCCATCCTGAGAGATCCTCATGGGCATCTCTGGGTCCTGCAGGCTGGCCGTGGCCCAGATAAAT
CGAGGGCATTAGGCTTCTGTGACATGGACCTGGAAGGGTAGAGCCAGAAGCAGTAGCTGAGGGCACTTGG
TTCAACCCCTCAGCTCCCAGGTGTGGCCACATGGCTGGCCTGAAATCATGCAGCTATTTCGGGCTGACCT
GGCACTTGAACCCAGGGCTCTGCCTCAGTCTGGGGCACTTCTATTCAAAGCCATGTATCTTCTGGCCACC
AGCTTTCCACTTGGGCAACCTCCATTCACTAGACTCACTTGGCAAAGTACAGTCCTTTTTTCTGTGGCTC
CACACCTCCTAGGATCAGCCAGCAGCAAACTGACTTGAGTCATTTGTTTAGTTATTCAATAAACAGAACA
CTGGGCACAGCCGTGAGTGCTGAGGATGTGATGGTGAACCCATCAGACAAGGTCCCTGTTCTCATGGAGG
GTGCATTCTATCAAATCAACACACAGGATAATTCTAGAAAGTAACCCATGCCATGGAAGGACTTAATAGG
ATGGAGAGTTCCCAGGGGCCTCCGGGAGAGGGTGACATTAGAAGTGAACAACCAGAAGAACAGAATTCTA
TGCACACCAGGAGCAATGCATTCCAGATAAAGGGAGCAGCAAGTACAAGTCCCAAGGGCATGAATGTACT
GGGCATGCTGTAGGAAAGAAGAGAAAAGGCCGGGCTTGGTGCTGTAGGAGGAGTGTCACACCCAGCTGGC
CAGGGAGCAGGCAGGAGCCAGAGCCAGGCAGGCCAGGCTTAGGAACTGCTGAGCAATGAGAAGACTGTGC
AGTTAGTGTAAGCTAGGAACATGCCTTATTCCCTTAAGCCCATATGGAGGGGATGGGCAAGCCTAGTGCC
TACTTACCAACCTCCTCTGAAAGGACAGGGCAAGGCTGCTGCCACTGCCACCTCTGCGGGCGAAGGAGCG
TGGCTCCCAGGCAGAGGAAGGACAAGGAACTTGGACAAGATGCTCTTTAAGTTGCCTTCCAGTTGTGGTG
GCTTCTGTGGTTTTCTTATCTTTGTTAACTTACCTCTGAGTCACCTACTTCCAGAAATAATCTTGGCAAG
TTTCCCGTAACAGCATACATACCTCAAGACAAAAACCCATTAGCAAAATATCAAGAAAAAAAATCAGTAA
ATTATAAAGAAAAAAAATCTCTAAAAAATCCAGACTGAGGAAAGTAACAGCAATATTTTATATAACTAAC
TTTGGAGTTTCCTAGGGGCCAAGTGAAGAGGGTGCATAGTTACCACTGTCGGCAGAAGGAAACATACTAG
TCCCTTAGTTCCAATATTAGTCTTGTAACTGCTTGGACACTGAAATTGTCACAGGCTGGGCCATCTGACA
AGGGCAGCGAAGGAAGGTGAAGACCACCAGACAAGGGCAGTGGCCACCAAAGTGAGTTGGACAACAGTAT
TGAGCCATATGGACTTGCAGACTTGAGACAGGGGCCTCCTTCTCTGGAGTCCCTTCTAGGCAGGAGTTCC
TTTCAGGCAGGGAACTCCAGCAAAGGCCTGACAGAATCAGAACCCAGGGAATTCCACTGTGTTCCCACTG
CCCTCCTACTGTTTATGCCTCCCTCTGCAATAAACACACAAACAGCAAAAACAACAATCTGCAAAACCAC
CACTGCTGGGCACAAGCCCTCCTGGGCCCCTGGCTCCAAGCTGGGGGTTGGGGGCCTAACCTGGCAGTGT
TCCTGGGCATCCAGAGGCAGATATGACTTCTGGAGGAGCCCAGCCCAGCCCAGAAGATGGTTTCTGTTGC
CCAAACAGTGACAGAGGTGGGACCCCTGGGGCAGCTTGAAACCCTCACCTGGCCCCAGGCTCACCCAGCT
TCCCTGGGAACCAGACCCAGAGGACACAAGGGTTGAAACCTCAGTCTCCAACAAGAGCTGGTGCAGACGT
CTGAAGTGTGTGAAAGTGAAATAATAACAAATTTCCCCCTTTTTCCCTCCCCTTCCTCTTGAAGATCTAT
TTGAACTGCAGCTGTGTGACCGGGGGATCCGCTTCAGCAAAGACAGGATCGTGCCCTGTCCCCTGTGCCC
ACTTCCTGCTCCCGGCCATCTTCCTCATCTCCTTCGTGTCCCTGATAGCCTGCATCTCCCACAACCCCCT
CTACATGATGGTTCTGCGGTGAGTGGCAAACCTCTGTGAGTCTGGGGCGTGGCTTCTCCTTCCCCACATC
TCCCTTTGACTTTGCGCCTAGTTGCCTGTTTCTCATCTCTCCCCCCTTTTGTGGCCCTCAGAGTCCTTTA
AATGACAATGTGCAAGGTTCTTTTGCTGAGGGGAAATAATACTAATGGCAACAGTGCTGGGAGCCCTGCC
CAGGGAGGCTCTGTGCTGAGCTCCTCATTGCAGGGCCTCATTCAGTCCCACAGCGTCCATGTGACACAGG
CCCTGTTGGCGCCTCCACTCTGCACATTGGAGGTTAAATCACAAGCCTAGGCTGGGCGCGGTGGCTCGTG
CCTGTGACCCCAGCACTTTGGGAGGCCAAGGAGGGCAGATCACCTGAGGTCAGGAGTTCAAGACCAGCCT
GGCCAACATGGCAAAACTCCGTCTCTTCTAAAAATACAAAAATTAGCTGGGCGTGGTGGCCAGTGCCTGT
AATCCCAGCTTCTTGGGAGGCTGAGGCAGAAGAATCACTTGAACCCAGGAGGCGGAGGTTGCAGTGAGCC
AAGATTGTGCCACTGCACTCCAGCCTGGGTGACAGAGTGAGACTCCGTCTCAAAAATAATAATAATTAAA
AAAAAAATCACTAGCCTAGTATGGCAGAGCCAGTGAATGGCTGAGCCATGTGTTGAAGCCAGGCTGCCTG
GCTCCACACCATGGAAATGCCTGTAGGTTTGCTTATTTTTAAATCCTAAAAGAAATGAGAAGAGCAAAGA
GAATTTAGTTGGATGCATAAAACCAAGGCAGGAAAACGTGGAAAGTTTCAGAGTCAGAGTGAGGGCTATG
GAAAAGGATGAAAATGAGAAAATCCTGGTATGATTGGCTCCAGGACCAAGTTCCCAGGTCAGGAAGGGAG
CCGCTGGCCAGAGCTGGAGGGGAGGAGCGGGGTGTCCCGTTACAGCTGGCAGCTGGCAATGAATGCTTCT
GAGGTTTTCACTGGGAATGACCCGCTCTTCACCTCACTGGCTGCAAGGAGAAAACAACATTTGTACCAAA
TTCACCTAACCCACCCCCACTGCCCTCCCTCCTGTCCTCACTCACCTCGCAAGCAGAGAGGGCAAAAACA
CAGGATTTGGACTCCCGGTGCCAGGATTAAAGTCCCTGCTCTGCCACATACTGGCTGTGTTAGGGTGTTG
CCTAACCTCATTGAGCCTCAGTCTCCTTATTCATGAAATGATGATGATGATATCGAACTCAAAGGGTTGG
TGTCAGGATTATATGGTAAATTGCTTTGTAAATATAAGGTGTTCTACATATTGGTTAATTATCACTATTA
ATCAAATAATAATAATAATAATTCACAGCTAGCTAGGTGTCTGTGACCTATTTTCCCCAGAAGGCTAGGA
GAAAAGGAAGGAGCAGATGCAGCCACTTGTTGGGATCTGGGATTTTACCCTATTTATAAGTGAGCTATCA
AGTTAGTGTGAAAGCTATCAAATCAAACTACTATTTCAAGGATGCTGGCAGAAGATGTGAGACTCCTGGG
TCAAAGACAAAATACTTTATTACAGCACAGAAAGCAGCACAAAACTTAGGGTGTGTCAGTTATCCTTGAC
CCCCAAATCCTACAGGGGTGACACAGAGAGGCCCAGGTGTACACTTTGCAAGAACACTGAGCATAGAAGA
GCCACCACTTCTATGGTGAGCAGTGAGCACCGCTGCTCCTGGTCTTGGAGGAAACGTTAACTCATGCCTC
AGAGTTGCTCATTGCAACTACAACCCGGAGAAACGGCACAGGAAAACAGTAGTCAGGACCTTGCATTCTG
AGCTTACTCAGCAAGAAGGTGCAGGGATGCTTGGAACCCACGGCGTGTTGCCTCCTTTGACACCACTGTC
ACCCCCTTCTCTACCGCTCCCCATCCTGCGCATTCAAAGCACTGACAGCTTCACCTGAGACTCTTCAGCG
GGCTTCCCTTCTTGCACCTTGGGTCAGATGGACCACAGTGGACCCTCCAGCCCTGACATAAAACTACATG
AGGCCATGATGAGGAGAGGGCACAGAGTAGGAAAATCTCCCTGGCAAGTCGCTATGCAGCAGGAAGAAGG
GCAATCCCTGTCAAATCACCTCCCAGAGGACTCCTGTCAAACCCTAGGTACAAGGAGGTCGTGAAGAACA
GAGCATCATTTCAACCACAGGATGGGCTTCTCTAGAAAATCTCTCCTTTCTAGGTCGAGTTGGGGTAGGG
GGTGGAGAGGAGGCCCCAGGATCCCACAACGATTTAAAGATAAATCCTACTGGGAAAGATGACAGAATTG
ATGCTATTTAGTGTGAAGAAGGAGAGGCTTAAAGATGACTTTGTAGGCCGGGTGTGGTGGCTCACACCTG
TAATCCCAGCACTTTGGGAGGCCAAGGTGGGTGGACCACCTGAGGTCAGGCGTTCAAGACCAGCCTGGCC
AACATGGCGAAACCTTGTCTCTACTAAAATTACAAAAGTTAGCCGGGCATGGTGATGGGCGCCTGTAGTC
CCAGCTACTTGGGAGGCTGAGGCAGGAGAATTGGTTGAACCTGGGAAGTGGAGGTTGCAGTGAGCCAAGA
CTGAGCCACTGCACTCCAGCCTGGGTGACAGAATGAGACTCTGTCTCCGAAAAAAAAAAAAAAAAAAAAA
GATGACTTTGTAGGTGACCCAAGCATTATTTATATGAGTCCTGGCCCCCAATTAGCCATGGGAACACAAG
CTGGAAGTGAAGGCTAGCTGAAAACGTGGAAGGAGAAAGAGAGGTCAGAAGGTCAGCTTTCATTCAGGGC
CACATGGGACAGAGACTAGAAGGGGCCCAAGATCTCAATCAAAAGCCAAATTGGGGTGGCCAAGTCCCGT
TTCATTGAGAATCTAGGGGAGTCTGCCCAGGGCAAGGGCCAAGACAAGGCAGGTATCTATTATGAACTGG
ACCACTGGAGGGATCTGTAGACACAACAGGATTTGAGACACTTTGCATTGTGGGGGTCCCAAGGGGTGCC
TCTTCCCCTGCCCCAATGAGTATTTGTCTCACTGGGCCATCCCTCAGGGGGACTGGGCAAAGGTCCCTTT
CCAGTTTGCTAGCAGAACTGTGATGGTGGTGGTGAAACAAACCACAGGTAGAGGCCTGGGGATTACTTCT
GAGCTCCCTTCCTCACTGTCCCCTAGCACTGAAGGCTCTTCCTGACAAGCACCCACCGGGAGTGTGTGTG
CTCAGAGCACAGAGAGTCCTGGAGTCAAGTCACTCATCAGGTGCCTCTGCTGGCCAGCTGCTGGCTCCCC
ACCTTGTGTGGAGGTGTCCTCCCTCTCTCCACTCCCCAGCTGGGATGGCAGGGCCGTCCCCTGCTCTCTC
TGAATCTCCTTCCTCAGCCAAACACATTTTCCTCTCTTGAAGGAAGATGGTTAGGGGCAGGACCAGCTAC
CTAATTTGCAGGACCTATTGCAAATGAAAATGTAAAGCCCCTGGCTCAGAAATTAAGAATTTCCAGACAG
CTGCAGCAGAGCATTAAGCCAAACATGGGACCTTTCTGAGGGTGGAGTTGTATGCACACACCCACAGAGC
TAGCCTGGGGTAGGGAATTCTTTTAGCTGTGCACAGAAGCCTGCAGCCCAAGGGCCCTAATTACACTTTG
CAGCAGGGCTGTCTTTTACTGTTATAAGACATTCTGTGGGAGTTGTTCAGACCTGCTGCTATCAACACAC
CCACAGCATCCTTCTCTCCACTCCTAGCCTCTACTGCCCTCTGCTTCTTGAAGGGGGCTCTGGGCAGCCC
TGAAAATCACACAGACTGGTGGTTCTCAGTGATGCATCAGAATCTCCTGGAGGTAAAATACAGATTGCTG
GGCCCCATCCCCAGACTTTCCGACTCAGTAAGTCTGGGGTGGGCCTGAAAATCTGCATATCTAACAAGTT
CCCAGGGGATGCTGATGATCCAGGGACCACGCTTTGAGGCCACTGATGTAAAGAACTAGAGCATTCAGCC
CAGGTGAACCCGGTCACCAGAGGGCTCGTCAGGCCACATCAGGGCTGGTTCTGACCTGCTCTGAGGCTGG
CTGCCCCTTACCCAAGGGATCGTGCAGCCCTGAATCCTCCCACTGCTGATTTCCTGTCTGTCTTTTCAGT
GTGGTGAACCAGGAGGAAAAGTCATTTGCCATCGGGGTGCAGTTCTTGTTGATGCGCTTGCTGGGTAAGT
GTCTAAGACCCCTCTTCCCAAGAAGTGGCCCCAGGCGATGGGGCATCTGAAGGCTATGGGTGCAGGGTAG
CGATGGAGGAAGCACCATCTCATCTCCATGGCGAAGAGAAGCTGTGCATAATCAACAGCAGATGCCAAAA
TCCATGTGGACGGTTTCCCAGATTGCTTGAGGTTAGGAAAGACTCCATCTATGGCATTCATTCCTAACTA
AGTTATGTAAGAAAAATGAAAAGTGAACACAGCTGAGAATACCTAATAGAGTGTTAAAGGCAGGTATTTT
TAAATCCTTCTCACAAAACTCACTGTAGGAACAAAACTTTGCATTCCTGCCAAGCCAGAGCAGCGGCTGA
GCCCAGCCCTGGCTTCCTTTCCATTTTACAAAATTCACTCCTCCTAAAACTATTTAGCAAAAGTTTCTTC
CCTGTGGGGTCCTCTGCTGGTGAGTCCTGCCTGCCCTCAAGCAGTCCAGAGCCCACCAGAGGAATGGAGC
TGTGCACAAGTGATCAGCAGTGCCCCAGGGGAGAGCGAGCTGCTTGAGGCAGCAGGAGTGCTCTCCCGGG
GTGCCTGGGCTGAGGGCTGGGGGCACAATGCAGGCCCATTCCTGAACTGCTCACACTGGCTGTTCCTTCT
TGACATATCTGTGCACTAGACTTAACACAAGGCAGCAATAGAGAGATCCTTGTAATGACAGGCACACAGT
AGTAAAGGGACCTAATTGAACTGAGGATGTGTTAATTAAGGGTGCAAACTACAGAGGGGAATATGGAGAC
TCCAGCAAGAGGAACTTCAGTTACTATAAGGTGTCGTTTCTGACTATAAATCCTGAAATAATGTATAGCC
CACTGTGCCTCATTACCCAGGGGCCAGGTCAACACCGCGCCCTGCAGTGGCTTCCATCCCCATTTTGAGA
TGTATTGGTGATGTCTCTACTGGGGCCAGGTGAGCGGGAGCCCTTGCTGAGCCCAATCCAGTCCCAGGCT
GGGAGAAGTGTTTGGATGATGGGAATGAACCAGCTTTTTCAGTGGGATTTCTTGTTCCTCTAGTCCCTGC
AGAGCCCCTTCAGACCCTGCTCCTGCTGCCTGCATTATAAACACAGAGGAAGCAGGGCGGCAGGATCTAC
CTGTCCTCCCAGCAGAGGCTCTGCTGTCATCAGAGCTCCTTATTTTCATTTATAACTTAACTTTCTCTAA
CACTTCTGCTGGGAAAGAGACCTCACATTCCTCTCAGCCCATCCAGCACCTAGGATAGGCTCTAAAGAGC
CCTTTCCTGCTTCCTCCAGCAACCTTGAAAATGACCTTGAAAACAAGGACTCTCTCGGACTCTCTCGCAC
TGCTTGAAGCACTCGCTGCTTTTGCTTTTCCATTTGAGCTCAGATAACTCAATGTGGGACCACAATGAGA
AAACCCAGGCCTGGAGGGGTTCCATTTATCACCCAAGAACACAATCCACTCTTGGGTAAAAAAAAGGACT
TCCTATTACAGGTTTTAAATTACACATTGGGATTGGGTTGACAATGTTTCCGGACTTTGCTTCTACATAA
GGAAGTGTCATATATCACTCTGGCCAGTTTTCATCCCCCTGTTCACCTGGAGACTTGAGAGTGAGCAGGA
TCTGAGTAGAGAGGCTTCTTCTTAGAGTTTCCCACTTGTGGGCAGTGCCACAAGTGGAGCATTGTCTGTC
TTTCTTCTGGAAGCAGCTGCTCACAGGGCCCTAAACAAAGTCTGGGAGGCTGTTGTCAGCACTGTGGTGC
TGAGAATGGGATGGGCCAGCCTTGGTGTAAATCCTGGACAAGCCCTCCGCAGTCCAGTAACTGCCTAGAG
CTGTAGCTAGTGGTACGCTACCCACAGGTAGTGTGGCATCCGGAATATTAGACAGCCAGGAAGGCATAGC
CCCTGCCAAGCCAAATCTTAACACTCAGCTGCTGGGAAGTTCGGGGTCCCAGAGCAGAAGCTTTGAGCAG
CCAGGTATTGGGAGGTCTGCAGAGGGGTGTTGTCTAATCCAATAGGGCAGCTTGGTGTGGTGGAAGTACA
TGGGATTCGAACCTCCATAAACCAGGGTTCCAAGTCTGGCCTTGACTTCTCTTGGCTGTGTTACAGTGTC
CCAGCCAAGAACCCCTTCCTCTTCACTAAAAAGTGGGCACCCACACCTCGGGGCCAGTGTGAGGACCTGA
GAAGTCGATGCCTGGAGAGCCTCCTGCCACACAGTGGAGGCCCGTGTATCTCCACTCTGAGCTGATCTCA
GGAGAACTATGTTGGATGTCTGAGCCGGCATCAAGGTGATCCCTGTGACTTACTCTGACTTGAAAGAATG
GCCCAGGTCCCTTTTGTCTTCTAAGCCTTCTGGTGAAAGAGAAATTCAGGCTTCACTGAAAGCTATTCTG
CTTTCCAGAGTCACTGTGAGTCCTATGGGTACGGCAGAGCCGTTCTCATGTATGTGAACTGTGTCGGGGA
CTTGGCTCCCACACCCCTGCTGGACACCTCTGCCTGCAGTTCCACCTGACCAGGGCTTTCTGAACCCTCT
TCCAGCCTGGCTGCCATCTCCAGCCCTCTATGGCCTCACCATTGACCACTCCTGCATCCGGTGGAACTCG
CTGTGCTTGGGGAGGCGAGGGGCCTGCGCCTACTATGACAACGATGCTCTCCGAGACAGGTGAGGGCCCA
TCATGTATGTGTGTCCCAGAGCCAGGCCCTGGGCTTGAGATGACAGTAGTCATATGCCCAGTGGCTACTG
TGGGGGCTGTCAGGCTTCCAAGGAAGAGAACATGAAGGGCCACCTCTGCGGCCCTGCCATGGACAGGGAG
CAGGGGCTACTATAACAGGCATTTCAGGGCTCACAGGGAGATGTCCAGGGACTTCCATGACCCGAAAGCC
CTTGGAAGGGGCAGCAGACCCAGGGACTTCCCTGACCCGAAAGCCTTTGGAAGGGGCAGCAGCAGAAAGA
AGGGGCGGGGATGGCTGGAGCCCAAGGAAGAGGCCATGGCTGTGGAAAAATTGGGGGCAGCCTCCTGCTG
CTCAGAGACAGAGGGGGGCCACATCATGGCTCCTGGCAGAGGTCCAGGGCAGGGGGACCAACCTGCCTCA
ATGGGCCAAGTCCAGCTGCAGTGCTATTGGGTTCTGCACCCCTTCCAGCCACCTCACCTGCTGCCGTTGT
CATATGGCCCAGAAACCACAGGAAGGTGGGCTTGAGGGGACTGGGCAGGGGCTGGAAATGGTATGGGAGT
GGCAGAGAAGACCACAAAAGGGACAGGCCAAGAGGGCAGTGAGAAGATGCCTCTCTCCTTCTGGCTCTGC
TTGGAGGTCAGGACCGTCTGGGGGTGGCTGGGGCAGCTGGGTCACCTCTGGCCCTCTGGAAAGAGCCAGT
GGAGGGATGATGAGCCCTGGATTAAGAGTCCCATGCCTACTCCCTGCCTGCTTCCCTACAGCTTTGTTCC
CTTTTGGGTCAAAGAAATGAGGAAAGTGATCCTCACCTGGATGGTGCCCACACCTTCCGCGGGCCAGCGT
GGGAATGATGTGGTTCTTCCCAGTGGTCCTGGCCCTGGGATGTGGGCTGCAGAGCCCCCTCCCTCACCAG
TCCTGCCTCCTCCTGCCCACAGGTACCTGGGCCTGCAGATGGGCTACAAGGCGCTGGGCATGCTGCTGCT
TTGCTTCATCAGCTGGAGGGTGAAGAAGAACAAGGAGTACAACGTGCAGAAGGCGGCAGGCCTCATCTGA
CCCCACCCTGGGCCACTGCCCTGCTCCAGAGAGTGGACCTTGACTCTTCCACACCTGCCTATACTCACTA
ATGTTAACACGTCATTTCCTTTTTGTATTTTTAAACAAGAAAGAAAACCCCAGTCCTCATTTGCCTTCCC
TACCTCTTCCTCCCAGAGTCCTCCCCACAGTTCCTAAGGGCCACTGTGTACCCGGGCTGTGTGGGCCAGA
ACTGGGGGGCTGAGTCTTCCCTGGCCCCTTGGAAGAGGCCCCCAGATGCCCAGGCTCACTTCAGTGTTGA
GTCCTCCATTGAGGATGCCCACTGAGGCAGCCAGGCCCCTCACCAGCCCTGGGGGGAATCCTAAACAGAG
AGAGAAAAAGGGTATCTGCCCTTCTTGCCAGGCAGCTCCACTCTCCCGCTGACTGCCCACACCCTGCAGA
GTGGCAGGGGTGAAAGGAAGAAGGAAGTGGCTGAGTTATTAATAGCCAGAGCCACTGGGAGACTGGGGAG
ACTGGCTGTAACCCCCTTCACACCTGGGTTTGGCATCAGCACAGACTACGGGAGGGGCTGGCTCCCTCCC
CCTCAGACCCTCACTTCCTGTACCTAGAGGCCATTCTGGATGCTGCCATGTTGGGAAGTACAGTCTCTGC
CCATTACCTGCATGCAGGCACCAGAGCAGGGACTGAGAAACCCCAAGGATGGGTCATCTAAGTGCTGTCC
ATATGAACCCTGGACTTTCTGTCCTTAGATCCTCACATGTTATCCCTGTCTTTCTGGGGTACGTTTCAAA
CTGAGGAAGCTACAACACAGTGAAGACCCAAGGAAGGCCTATGAAAAGGTCCTGATGCCCAACCTCCCAC
CCCTTCAATGTGGGGACGAGACCCCCTCATCTCAGAGTAATGGGAAGAACCTCCCACATCTCCCTGGCAG
CAGATGAGGTGGCTTCACATGCACTTCCCTGTCTGGACTTCAGCCCGTATTCCGAGGAGTAGAGAGGCAG
AAGAGATGTCAGCAAAGCAAGTGATGAAGCAGAGTGGATGTCCACTGTCACCAAGCTGGATGGCAAGCTG
CGGCCCACAAAACAGCCAGTCAGGTTGGCTTTCCTGGTTTCAGACATGCTCATACCATTCCCATTTTCTC
AGCCTCTTCTCACTGCCTCCAGAGAGGTGGGTGCCTGGGTTGAGAGACACAGCTGCTACGTGATAGATGT
TGAGAGACAGAAGCCAACGAAGGAGGTCATTCATCAACAAATATATTTATTGGAGACCGACTTTGTGCAA
AGCAATGCTAATCAGGGTTCTCCATGGAGCTTCCCTCAGCTCTTACCTCACCTCCCTCCATTTACATTAG
GGCCTTCTCCCAGGGTGTGCTCGGTGGGCAGTGTGGGACTGGGGGTGTGGGAGTTGGTGAGAGCAGGAGG
AGAGGTGGGGACAGCAAGAAGCCACAGATTGGCATGAAGGATCCTGACCTGACTATCCATGCCATCCATG
GCCCCCAGACTGACTCTGCACCTGGCCCTTTGCCAGACAGCTCTGTCTCCCCATGTCCTCTGGAACAGCT
GGGCATGGGTCATGGCCATTCATGACCCTTAAGTGCCACCCTTCTTGGAAGACCCCCTCCAGAAGCATAC
TGGAAGCCACCTCTGGAAAAGCCTCATATGGTGATATGCCAAAATATTTATGTCAATGTCCAAACAAAGT
CCAATGCCATGAGACTGAAGTCTTTGTGGAAACCACTGTTACAGACAAGCTTATTTCCAAAGCCACCTCA
TTTCCAAACATCTCACTCAGGAAGGGAGGCTCAATGTAACCTCAGGGGCCAGTTTTAGCATTTGAAATGG
TTCTGCTTGGAAAATGATGCCCTGCAACTAACCCTGGTCTTTCCCATGGCAATTTAACCACATTTGGAAG
GCACTGCCTTCAGCTGAGTTTATGAACAATGAATGCCAACCTTCAGGTTCTAGAAGATTGGTTGCACTCC
CAAACCTTTATTCTATTATATTACTATTAAAATATTCTAATTTTGCTATTGAGGTAACTTGGTCATGAAT
TTATGTTGTCATATACATCTGTCAGAGAACAGACAGCACCTGCACTTTTTAATTTTATTTTATTTTTATT
TGTATTTTATTTTTGAGATGGAGTCTTGCTCTGTCACCCAGGCTGGAGTGCAGTGGCACAATCTTGGCTC
ACTGCAACCTCTGCCTCCTTGGTTCAAGCGATTCTCCTGCCTCAGCCTCCAGAGTAACTGGGATTACAGG
CCTGCGCCACCACACCTGGCTAATTTTTGTACTTTTAGTAGAGACAGGGTTTCACCATGTTGGCCAGGCT
GGTCTCAAACTCCTGACCTCAAGTGATCCTCCCGCCTCAGCCTCCCAAAGTGTTGGGATTACAGGCATGA
GCCACTGCGCCCTGCCGGCACCTGCATCTTGTAAACAGAGGAAGTGCTCATGACATAGACCCCAGGGGCC
CATGGCCATGGAGATTAGAGGTAATGCAACTGTCAACCCATTAGCCTGGTATCAGGCAAGTACCAGACAC
TGCTTATTCCTTCAGTGAAGTTCTGCTGGGCTCTGAGAAGGCCGCATCACTGCTCTTGGGTTTATATCCA
GAAGCGGAGCTGGACGCAAACAGCTATGTCCATGGCACAAAACAGAATTAATATCATAATCAAATTGATC
ACATGGTCACAACCAGTACTACTACTCCCAAGAAAATCTTTCTTTTCAGCTGTCAGCAGGGAATATAATA
GTGTCACTTTCATTTCACTTCTAGAGCAAAGCTTAACAAACTTTCTTGAGTGTGTGACACTCACAGAGGA
TGCAAATTCCCAACACCCTCCACCCAGCCCCAGCGTCTACTTCTGTGGGTCTAATGGGGACCCAGGAATG
GCTCTTTTAACGGCCCCCTCATGAGATTGATGTGGGTAGTTCCCAAATCCTGTGAGGTGGGCTGTCAGTG
CAATAGAGCCTGGGGTATGCCCATTTGTGCTTAGGCCACTGAGAAATTTACAGGCTCGATAGGCCTTTGG
TATGTTCAAAGGTGAGTGAAGGATAACAAGGTGAAGAGATGCCTGTGAATCTGATTTTTTGGATGGCTGC
AACTAAGAGTCAATGGGCATGAAAAACAATCCAAGAGCTCACATTTATATGAGGCCCTTATCAGTACTGA
GAGAGACATTCTCACTTCACAAGCTTGGATGTGCAAAAAGAAAAAAATCACTTATTTCTTTAAATCAGTT
ATTGATTTCAAACCCCCCATCCTACTGTCTGGCTGGAAATTCAATATCAACCATGCTTGGGTCTGGCTCC
TAGAGCCATCTGAAGGTCCTTGGATGCCTACGCATTCAAGGGTGCCATTGTGGGTCTTTGGTCCCTTTCC
CATTTGAGGCTGTTTAATGGCCCTGCTTCTCACCTGAGCCTGGAAACCCTACAAAGCCGAGACCCCAGGG
TTAGGCCCACCTCCCTGTGCACACTCGCGGCTATGCCCTCTCCCGGCCCCAGTCCTAGGAAGCCCACTCC
TCTGCACCACTCCCTCTCCCTACAGAATCCCGCTCCTCAAGGGCTGAACAAAAAAGCCGGAAAAGGAAGA
GTGTGCAGGAACCTTTTTTATTCAATCCTTCTTTTACCCTTCTTGGAAAAAGCGCAAATACAGTGATAAC
TAAATACCGTATCTCTATCAATTATCCTTTGGCCCAAAGCCCTTTGGGGTGATCCTCCATGATGGATGCC
CCATGTAAAGGTGAGGAATCTGATCCCGAGGAAGCAACCATTGTGGCCAATTTCACATAGATAATAGCTG
GCCAGGTCTAGACTCAAACCAGGCTGTCCACTTCTCTCTGGTCCAGCCCAATTGCCCCAGCTGAGTCATT
CTGAAGAGTCAGCATGGACTAAAATGGTGGGGAGGCCCCTCTTTTCCCACTGATGTTCACTGGCCCATGG
GAGGGAAGTGGGGGAATCTCTTGAGGGCCATTAAGGTGGGTAACAAAGGCAAAAGAACCAGGTAACAGTT
CATTTACTTACCTTCTATTCAACTAGCAACAACATCACAACTATTCATTAAACAGGGCCAATTTATCCCT
ATAGCACCATGAGTTAAAGAGAGTTGTGGAGAAAAGAGACAAAGAGGGAAGGGTTTTGAGAAGAAAAGGC
CCTGAGAATCCTGCACACAGACCTTCAAGGGAACAGCTCCATCTGGTGACTGCTTAGCAGATTCTTGCTC
AAGAAACAAAGCCATATTGTGATTTTATTCAACCACTCTCAAAGATGGAGAGATACAGTTAAGCTGGAGG
CTGAAGCCAGTCAGTATCAAATTGATACTAAAATATTATATTGCAGCAAATCCAGAAGAAATACATCCTA
TCTTTCGCAACCACAGGAAGTAAATACCTGGAAGAAAGGTCCATCTCCTGCCAGTAGCACCAGACACCAG
ATTCATTATAACCTTTCATCAGAGATTAAATATGGAAACAGATCCTGGAAAAGCCCTTGGCAAATCATAA
ATGAGAGGAAGTTTTTCTCCATGGCATACCCTGGCCATTCCTCCACTCTCCAGCCACATCATGTCTCCAG
CCCTGCTACAACTTGACAGCAATAATAATAACTAAAATGTGCACAGATCTTTACAGTTTACCAAGCCATT
AACCCATTTAAAACACTTCTTTAATCAGTAAATCAGTGGGGAAAGGCTTGGCTATGCTGTGGTAACAAAC
CTCTCGAATCTTAGTCACTTGACACAACAAAAGATGGTATCTCGCTCACAGAACCTGTGGTGATCTGGGT
GACTCTCAGGTCAGTGGCTCAGTAGTGCCCCTCTGCCTGCTCAGGGCCTGGAGGATTGGCCTGAGAGCCC
CCCCAACCAGTGTCTCAGTAACTCAGACTGTTTGGAACCTGAGGTACCTCCATTTCATTATAAGCTGCCA
TGATGGATGGGGCAGGGGAAGAAAGTCCTGGAAGATCCCGCACTGCTAAGCAATGCTTTGTCCCAAAGTA
ACGCTCTTCACTCTGCTCCCAGCCTAGCTGCCGCAAGAGCGGAACAGAATATTCTGTGTGCTCAGGAGAA
GAAAAGAGCAGATATGGTTGAGCACTAAAACCCTCTACTGTGGGTAGTGAACCTAGGTGGACACAGTTGC
TCACCGGGACACTTAAACCAGCTTTGCGGGGCTGTCGGGGTTGGGAAGCACAGTCTGGAAAGATTTCCCA
ATGGAGGAAGCACCAATTGTGGGTCCCTGAAGCTGAGGGGATGATGCCCAGGCAAGGCCGAGGCAGTCTG
CAGAGGGCTGGGGAGGTGGGAAAGACGATTTTGCTCAGAGGAGGCAGAGATGGGGTGGTGGCTGAGAGAG
ATGCAGGGTCAAGGAAAGGATGGCTTCAGAGAGGAGAGATTTGCTGGGGCAAAAGGCCACAGGATGGGGA
GGCTGCGGGGTCCAAGAGGACAGCTGATGGAGCGAGACCCTGCAGGCAAGGAGGAGATGGGGTGACTCAT
GGCAGAATCGCACCAGAGTTCCCACAGCCCTGTGCGGCCACTATGACTAGTCCCATCCTGTACATGGAGA
AAACGAGGCTCCTTCCAGTTGTCCCTCACGCCTCCCTTGATTTATGTACTACCTGATGTGTATAAGGACA
GGTGGTGACAAACACATGGTCCCTACCCTTCAAGGACATATAATCCAGAGCTAAGACAAGACCTTAACAC
AGGGCAAAGTACTATGCTCTGAGTTCATTTGATGAGCGATGGGAGAACGGGCTTGATCCTAGCCATGCGG
GAGAGACTGGAATTCAAGAGAGTCAAATGTGCTGGGAAAGACTTTCTGGGCAAAAGGAATAAGCAAAGGT
GTGCAAAGGTAAGGAAGCAGGAAACCTTTGCACATCTTGAGAACTCGCCGGCCAGAGGCCTGTGAAGGAG
CGCAGTGGTCAGGCAGGAGAGGCAGTCGGATGCAGGCTGAGACCATCCTGGAGGGTCTTGAGGCTGGCTT
ACCCCAGGCTGTGAGTAGTGGGCTCAGCCTAGTCCCGGCTCCTGGGTTAGTGCTCACGTGTCTCTCTGCC
CCCTCAGGGCCTGGAGGAATGGCCTTAGAGCCCCCACCAACCACGCTCAGGAAGGCATTCCTAGCTCAGA
GTACCCTCCTGGAGTCTACACTGGAAGGGGCTCCTGAGTGGGCCGCGCCACACCCCGAGGAGCAGAGGCG
CAGTCCTCCCGCGTGCTCCCAGCACACTCCACCCCTACCCAGCACACCCACGGGGCCCCCACCTTGCTCA
CCTGGGGGGAACCACCCACTCTGCGCCCTCTCAGGGAGAGGTGGTGGCCGCTGCTCTATCCCCTCCCTCT
CTTCCTCTTCCACCTTCTCTCTCTTCTCATCTGGGTGCTGGAACCCAAGGGTGAAACTGAGAGTCAGAAA
GTCTCAGTCTCAAGGCAGAGCGGGGCAACTAATTTAAAACGGCTTCTACTCCGGCCCCCAGTGTGACTAA
TCTCCTTCTCTTCGCTCCACAGGTCTATAAATGGGCCACAGTAGGCACCCCTTTTTAAATCTGTAAAATC
CCCAAATCCATTAAAAGTGACTTCAGAGGTCCCAGATAGGGACCAACATTTGTTTAAACCTTTTCCTCAT
TACATCTCATGACCGCCAGCTTACAAAAGAGAGACTGGGGGTTCTGGATGAGACGTATGCAATCCCTGAG
TCCACCTTGGAAAGGACAGAGGCAGGTGTCACACCGTTCCTCTTTGACCCGAATCGCTTGAATCCCAGAG
TTTCAACAGCTCAGGTGGGTTGAAGGCTCAGAATGTACCAGACATCCGAAGCGCTTTACATACATTTGCT
CCTTGAATCTTCACGACAGCCCTGTGAGATGCAATAATCATGCCATTCCACAGACGAGGAAACGGGCCCA
GGGGACTGCGGTCTCGGCTCCTTTCCTCTGGCTTTCTCAGAAAAGGCGCGGAGGCCCCCGCCGGGTGGGC
GAGGCGGGGTGGGCGGCCCCTTGCGCCCTGGAGTCGCATTCCGCCACCAGGGGGCGCCGCCCCTCCGCCG
CGGCCCGGGGAAGCCACCCGCGGAGGCGCCACGCCCAGCCCGCCCACGGGACGCCCCCGCGGCCCCACAG
CCAGCCGGGCGGGACTCCACCACCCGGCTCAGCGCGCCTCCGATAGCCCGCTTCCCCGCCGGGGCGCCCT
CGGGCCTGCGGGGCTCCCCGCGCCCACCGCACGCACGCACGCACGCCTTCCCCTACTCGGAGGGCCCGGC
GGCTGAGCCCACCGGCGCCTGCTCACGGGACACAGCCTCGAGAAAACTTCCTCTCTGACTGCCCGCGATA
AAGCACCGTTTAGTCTATTTATGTTTTCTGCACGAAAGTGTATTAAACACGTTAGAGAACAAGAGGAGTA
GAGAGTAAGGTGCCACGAGGCACCGAGAGGGCCCGCGGGAACACACGGCTTCCTCAGGCTCTCTGACCGG
CCGTGAGCAGGGTGGTCCCCGGCCGCATTGTGGGGCCATTCGCACCCAGAAGCTGTCAGCCTCCCCACTG
CGTCACTGGCACCATCTGGGAACCATTATTCAGCCACTGCAGGGGGCTAGGTAGCCTCTGCTTCCTCCTT
CCAATTCCCAAAACCTTCACCACAGCACCTCCTGGGGCCTGGCCCCGAGATAGGCTTGCATGTCGGAAAG
AAACTGTTGTCAGCATTCCAGGCACTGTCCACCCCGGGAAAGGGGCAGGTACCCATCCCGTCACAGACTC
AGGTACCCGGGCAAGCCGGGCACCAGGCCTATAGAGGTGAACAAGACAAACAGAAGGCAGACAGACAACC
AAGAAAGCATCCAAACTGTGGCTGCAATTGGCTGATCAATTACAGGTGCAATAGTGCCATGAAGGAGAAG
TGCAAACAGACAGACAGATGCCTGCATGGAAATGCAGGGGGAAGCCGGTGTATGTGGTGGATTAACAAAG
GTGAAAGAGGCCCGTTCCCTAGGGATTGGAGATCTGGAGCAGAGATGAGCTCTAACTGTGCCTGGAAGGA
TAGGGTAAGTTTGTTGACAGGGGCCTTAGAGAAGGTGTTCTGGGCGGAGGGGACTGCAGGAGTGAAGACT
CAGAGATGAGAAAACTGGACCATGTTTGCCTGGAGGGCAGGGTGTAAGTAGCGCCCCCAGTTGCAAGGTG
CCTCAGGCAGAGCGTGGTGAGTGGTGGATTCTAGAGGGAGAGAGTGTATCATGTACATCTCCTTTAGTAA
CTAACAGGGTGCTGCTGGTGGATGATGGGGCGTCGCTGACAGAATTTTAACAGAGGCAAGATGCAACCAG
ATTTCAGGGTGTAAAAGGCCACTGGGGCTACATGTGTACTTGGAAGAGGGAACCTGGCTGGCAAAGGTCC
TTAGGAGGGAGGCCTACTTGTCATTATGGCCACTGGGATACTAGAGTAGGAGACGTCAGAGCCGAGGGCA
GGACCAGCAAGCAGCAGGAGCATCCCAGGCACCCACAGGCTCCTGGCAGCCAGGATGAGCCAGCGCAGAA
TGCAGGGTTAGCAAAAGGCCATGCGGGAGCCCATCCCAGCACCAGAACTTGCCTTGTTATAAAACAGGCA
TTGGAAACTGGCTGAGCCTGGGCCCAGCACAAGAGTTCTAGTTGGCCTACAAGATATTTGCATGTCTTTA
AGTTAGCTCCAAACACTGGGAGAGTTTGACTGGGGTTTTCTCTTGAAAAACCCTGGTGCAGCATTCCAGC
CCAAAAACAATGGATTGGAGCTGAGTAGAGGGCAGTCCTTCAGATGGACCCTGTCCTCTCAGGGTGGCTG
CGGTTCCCACATCATCTGCCTGGCCCTTGTAGGTATTTAAAACTTTCACACACACACACACACACACACA
CACACACACACTCAAAAAAGTCAAGTTAAAACACCAGAAATCCAGGTGGATGTTGGAAAAGACAAGCCCA
GAAGGAAAGAAAGGCTGTTTGAGAAATAATGACCAGGGAAGATTGGCCGTGCTTGAGGATGGATGGGCAG
AAGATGTGAGGAACAAGTGGTGATCGCCAGGTGACTGCTTGTGGCCTGCTAGAGAATCAAATCCAACATT
GAGCTCCTCGTCCTCCCCAAACCTCCTTTCACTGACTTTCCTGTCTCAGTTAATGGCATTCCAACCTTAG
GTGATTAGACCAAAAACTTGGAGACAATAGAAAATAAGCTTTAAAAAGACTTTTTAAAATCTGCTTTACT
GACATATAGTTTATGAACAATGAAAAGTATTAATTTTAAGCCTACTTGCTGTTCAATGAGTTTTGACAAA
TGTATACAACCACACAACCACCATTTTAATCGAGATATAGAACATTTCCATGACCACCAGAAAATTTCTT
GATACTTCCTTCCAGACAATACTATCCCCACCTCCTCACTCCACCCTCCTTCCTTGTGCAAGCAACCAAT
AAGCCTTATTTCACTATAGATTAGCTTAACCTGTTCTAGAATTTTATATAATCGGGGTCATATAATACAT
TATGTATCTAGTTTTTCTTGCTTAGCATGTTTTTGAAATTCATTCGTGTGGCTATGTGTATAAGTAGTTC
AGTCCTTTTCATTGCTTGGTAGTATTTCATTGGATAAATAGATCATAATTTGTTTTTCTGTTCATTTATT
TTTTGGCATTTAGGCAAAATATGTTTTTCTGTTCATTTGTTTTTTGGCATTTGTTTATAATGTTTTTACT
ATTGTGAATAAAACTGCTTAAAAATTAAGCAGTGCACATTTGTGCACAAGTCTTTCTGTGGACCTATGTT
TTCTTTTCTCTTGGGGAAATACTTAGGAGCAAAACTTGCTGGATCACAGGGTATGTGTACATTTAACTTT
GTAAGAAACTGCCTATTTCCAAAGTCATGCCATTTAATGCTTCCCACTGGTATGGGAGAAGTCAGTTGCT
CCGTATCATTTTGAAAACTTGGCATCATTAGTGTTTTTAAATCATTGTCTTGAGGTTTAACTTACATGCA
ATAGTATCCATATATTTTTATTTTTATTTATTTTTTGAGACAGAGTCTCGCTCTGGTGCCCAGGCTGGAG
TGCAGTAGTGCAATCTCAGTTCACTGAAACCTCAGCCTCCTGGGTTCAAGCAATTCTCATGCCTCAGCCT
CCCGAGTAGCTGGGATTACAGATGCACACCACCACACCTGGCTCATTTTTATATTTTTAGTAGAGATGGG
ATTTTGCCATGTTGGCCAGGCTGGTCTTGAGCTCCTGACCTCAAGTGATCCACCCACCTCAGCCTCCCAA
AGTGCTGGGATTACAGGCATGAGCCCACCGCACCCAGCCAATATATTTGTAGAATAAGGTAAATTTGTTC
TGATAAATGTGTACATCCATGTGACTTCCATATCCAAATTAAGATATAGAACATTTCCATCTCCCAAATA
AGTTCTCTCCTGCTCCATTATGGTCTCCTCATTACCATACCTCTTCCCTGCAGGGAACCTCTGATCTGCT
GTCTATCACAGTAGATTAATTTTGCCTGTTCCGGAATTTAATGTAAGTGGAATCTTAAGTATGTCCTCTC
ACCATAATGCCTTCGAGTGAGATTCATCCATGTTATTGTATGAATCAGTAGTTTATTCCTTCCCCCACAT
GCAAAATGAATTTTAACTTTAAAAATCGTTTTTAAATCTTTACATTATCAACATCTTTAATAGTCACGAA
ATCATTATTTCAAATGGCCTAAGCCCATCAGTTTGTGTTTCAAATGATTTTACTACATCTTAAATATCTA
ATAAAATATGTAGTTTTAAAAGTCACATATTTGTAGAATGAACCTAGTAAAGGCTTATCATGAAGACTGC
CTGTTGAATATTCCTGTTTTCCATTATATCCATAAGTAGCTTCTTAAGTAGGATCAGATTATGACAATCA
GATCATCTAAGTTTCTATGAAGGCAAAAATTTAGTGTCTGATTTTTCAGTTTTCACATAAAAATGCTGAT
AAGACTATCTGAAAAAGTGAAAATACTATCTTAACTATCCTATGCTTGGTTAATTTTCCACAAGATATTT
TTAATTGAATTTTTTGAGATATTTGTAGATTTGCATGCAGTTGTAAGAAATAATATAGACAGTGGCCGGG
CACAGTGGCTCACGCCTGTAATCCCAGCACTTTGAGAGGCTGAGGCTGGCAGTTCACCTGAGGTCAGGAG
TTCGAGGCCAGCCTGGCTAACATGGTGAAAGCCTGTCTCTACTAAAATACAAAAATTAGCTGGGTGTGGT
GGTGGGCACCTGTATTCCCAGCTACTTGGGAGGCTGAGGCAGGAGAATCGCTTGAACCCGGGACGGCGGA
GGTTACAGTGAGCCAAGATTGCACCACTGCACTCCACCCTGGGCGACAAGAGCAAGACTCCATCTCAAAA
AAAAAAAAAAGAAAAAGAAAAAAAAATACAGAGAGATCCCTTGTACACTTTGCTTAATTACCCCCAGTTG
TAACATTTTACAACACTATAACATTGCAGCCAGAATATCGACATTGATACAATCCATTTATTTTAGATTT
CTTCAGCTTTACTTGTACTCATTGGTGTGTGCATATATGTGTGTGTGTCTATAGCTCTACACAATTCTAT
CACCTGTGTAGCTGCATGTATCCACCACCACAGTGGAGATACTGAACACTTCCATCACCATAAAAATCTC
TCCTGTTGCCTTTTTTTTTTTTTTTTTTTTTTTTTTGAGACAGAGTTTCACTCTGTCACCCAGGCTGGAG
TGCAGTGGCGCAGTCTCAGCTCACTGCAACTTCTGCCCCCGAGTTCAATTCTCCTGCCTCAGCCTCCTGA
GTAGCTGGGATTACAGGCACCTGCCACTGCACCTGGCTAATGTTTGTGTGTTTGGTAGAGACAGGGTTTC
ACCACATTGGCCAGGCTTGTCTCAAACTCCTGACCTCAAGTAATCTGTCCACCTCGGCTTTCCAAAGTGC
TGGGATTACAGGCGTGAGCCACTGCACCCAGCCTCCTGTTGCCCTTTTATAAACACACTCACCTCCTTTC
CTCCTGCCCCCTCCTACCCCATCTCTAGCCCCTGGCAATCACACTAATCTATCCTTCATTTCTAAAATGT
AACTAATCTATCTTTCATTTCTAAAATCTATCCTTTGTTTCTAAAATTCATTTCTAGAAGGTATATTCTA
GAATGTATACACACACACAACATGGATGTATCTCACCCAGAAGGCTTAATGTGAGAGGACATATTTAAGA
TTCCACTTACATTAAATTCTAGAACAGGCAAAACTAATCTACAGTGATAGACATCAGATCAGTGGTTCCC
TGGGGAGTAGAGGTATGGTAATGAGGATACCATATAGTATATATAATGATACACATAATATATGGTATAT
ATAATCATATGGTATGTATTTTTTCACTCAATATCAATATAATTCATTGGACAGTCATTCAAGTTGTTGC
ATGTATCAGTAGTTTGCTCTTTTGTATTACTGAGTAGTATTCCATGGTATGGATGTACCACAATTTGTTT
AACCATTCACTTCTTTTCTTTATATATATACTTTAAGTTCTGGGGTACATGTGCAGAATGTGGAGGTTTG
TTACATAGCTGTACATGTGCCATAGTGGTTTGCTGCACCCATCAACCCATCATCTACATTAGGTATTTCT
CCTAATGCTATCCCTCCCCTAACCCCCGTAACCCCCTGACAGGCCCCAGAGTGTGATGATCCCCTCCCTG
TGTCCATGTGTTCTCATTGTTCAACTTCCACTTATGAGTGAGAACATGTGGTGTTGGGTTTTCTGTTCTT
ATGTTAGTTTGCTGAGAATGATGTTAACCATTCTTTTCTTGAAGGACATCTGGCTGATTTGAGTTTGAGG
CTAATAATGAATAAAATATACTATGAATATTTGTATGTAGGTATTTGTGGGAAGAAAAGTTTTTATTTAT
CAGGGATAAATATCCAAGAGTGTAACTGCTGAGTCATACGATAATTGCATGTTTAATATTTTAAGGAATT
GCTATTGTTTTACAGAGTGGCAATATCATTTTACATTCTCACCAGTAATGCATGAGTGATCCAGTTTCTC
TGTATTCTTGTCAGCATTTGATATTGTCACCCTTTTAGTTTAGTGATTCTGATAGGTATGTAGTAACATT
TCATTGTGGTTTTAATTTGCATTGCCCTGATGGTGTTGAGCATCTTTCATGTGCTTATTTACCATCTGTA
TATCCTCTTTGGTAAAATGTCTGTTTACATCTTTTGCCCATTTTCTAATTACATTGTTTTTTAACTGTTG
TGTTTTGAGAGTTCTTTATGCTCTGTAAATATTAGTCCTTTGTTAGATGTGTGATTGGCAAATTCTTTCT
CCCAGTCTCTAGTTCATTTTTTCCATCCTCTTCACCTGAACTTTCACAAAGCAAAAAGTTTCATTTTTAT
GAGATTTGATTTATTAATTTTTCCTCTTATGAATTCTAGTTTTGGTGCCAAGTTCATATTACTCAGTAGT
TTTCCATTGTATAAATACCATATATCTACATGTTTCGGCCTTTGACTTGTTGATGGACATTTGGGTTGCT
TCCAGTTTGGGGGCCATTATGAACATTTGTGTTACTGTCCTTTTATATACATATGTTCTCATTTCTCTTG
GGTAAATACCTAGATGTGGAAGTGCTGGATCATATGGCGAGTATATATTTGACTTTATAAGAAATATTAA
ACTATTTACCAAAGTTATAGAGTTGGATTACTACTTACCATTTTTGGCCTTCTTCATTACTTTCCATAGA
TCCAAGTTTCTACCTGGAATCCTTTACCTTTAGCCTGAAGAACATCCCTTAGAATTTCTTGTACCACAGT
TCTCATGGTGACAAATTGTCTCAGCTTTTGTTAACCTGAAAATGACTTTATTTAACTTATTTTTGACAGA
TGTTGTTTACTGGATATAAATATAAAGATCTGGGTTGGCAGTTTTTCTCTTTTGCACTTTAAAAATGTCA
TGTCATTGTCTTCTAGATTCCATTATTTACGCTGAGAAGTTAGCAGTCCATTTGTGCCATTGATCTCTGT
ATGCAGTGTGTCTTGTTATGTTTTGTTTTCTAGCAGCTTTCAATATTTTCTCTTTATCTTTGGTTTTCAA
CCATTTGACATGATGTCCCTAAGTGTGCTTTTATTTATATTTATATTTACTTATATTTATCTTTTATTTA
TATTTATCTCTATATATTTATATTTTTAGTTCACTGGGCTATTTTATCTTGCTTGGGATTCACTGAGTTA
TTTTTCAATTGAGAAAATTTCAGCCTTATATCTTGAAATATTTTTTCTAGCCCATATTTGTCTCATCTCC
TTCTAGAACTGTGATTAACCATATTGGACCATTTGATACATTCCACAGGTCTTGTCCATTTTCCTTCATT
TTTTTTCCCTCTGTGGTCCTCAGATTGGATAATTTCTATTGCTCTGTCTTAAGTTTATTTAGCTTTCTTC
TGCCATCTTCTGTTAACCCACTCTTATGACCATCCAGTGATTTTTTTAATTTCAGTTTTTATATTTTTCA
CTTACAGAAATACAATTTGATCCTTTTTTAATAACTTCCATTTCACTGCTGAGACTCCTGAACTATTCAC
TCATTAAAATAATATTCTCATTTAGTTGTTTGAATATATTTTCCTTTAATTCCTTATTTTTAATTTATAA
TTCCTTATTTATAATAGCTACTTTAAATTTTCTGTCTGCTAAATCCAACATCTGGGCCATCTCATGCTCA
ATTTCACTTGATTACTTTTATTTCTGGACTTTAGGTCATGTTTTCGTTTTCCTTTGCTATTCTAGTTATT
TTTTAGTATCTGTTGGATATTATGAATGACATCCTGTAGAGACTCCAGATTCTGCTATCATCATCTAAAG
AATGGTGATTTTTGTTCTAGTAGATAGTTCACTTATTAGCTGACCACCTTGAACTTATGTAGGCTTGGTT
TTATATACTTTGTCAGGAAAAATCTATAAAAATCCCAGATATTTGTGAAGCCCTTCTAATTTATTGGGTC
TCAACCTCCAAATTCTGTTTCCTCTAAGGATCTCATTAGGGCTTGATTTTAGGCATTTGCAAGGCAGGTC
TAGAGTGTACTTTGTTCTAGGACATGTTCCTACTCCTCCTCTAATAGCACAGGGGTGTGAAGGCTTGCTG
CCCCATCCCAATGTTTTCAGGCTTTTGGTTTGTATAAGGTAGGAGATGAAGGAAATAGGTGGTGTTTCAG
CCATAGCCAATCACCTTCTGCATGTCTGCACCACCCAAGGAAGGCTTCTCTGATCTCTTGTTCTGCCACG
TCTTTCTAATAAGCACCCAGGGAAGAACCATGGAGAATCTTGTGAGTGTGTGCAAATTCGTATCTGGAAC
TCTCAGTTATTCCCGATTGATATGTTAGACCAAACTCAGCTTTTAGGACTTTATGAAAATATTAGCTGAT
TTCTTTCCACCCACTTAGATGGTGGCCTCCTCTTCTTCCTGTGTTTCACTAAAGGTAAAATAGTTTTTGT
GTTTCTGGGTTGCCATGCAACCTCAACTCTCTGATGGATTTATGAAAAGTTATGCCTTTGCAGGCTGCCT
GAGCTTGTTGTTGTTAAGAATGGGAACAACATTCACGTGCAGCTTTCTACCTCCCAGCAGAAGTGGAACA
CCTCAGTAATGTCCCCTTATAGAAAGACATTACATTGTACAAGTAGCACTAACCATAAAAAAAATTGATA
AATTAAACTACATTAAAAGTAAGTACTTATTTTCATTGAAAACGCCATTAAAAGAGTGAAACAGCAAGCC
ATGGAGAAGAAAAGAAATTACCAACTTATACAGCAGACAAAAGATTTGTACCAGAATCTGTACACAAAAC
TTCTACATGTAAACAATAAACAGATATACCCAATAGAGAAATGGGCAAAAGACTTAAACAGATACTTCAC
AAAAGAGGATATCTCCAGCAAATATATTAAAATGTACTTAATATCATTAGTCATCAAGGCAATGAAAATT
AAAGCCACAATATGAATCTACAATACCCCCACCAAAATGACTAAAGTTAAAAAGACTGATGATACTAAGT
GTTGGCAAGAATACGGAACAATAGGAGCTCTCATACATTGCTGGTGGAAGTGTAAACTCGTGTATTCATT
TTGAAGACATTTTGGCATTTTCTACTAAAGTTGAATACTTGCATATCATCTAACCCAGAAATTACACTCC
TAGGCACATACTCAACAGAAATGCACTGCACACGTGCACCAAGAGACGTTTAAGATGTGTCCTAACAGCA
TTATTCATAGTAGCCCCAAACTGGAGACAATACCACACATATACACAAACATATCCAATATACATACACC
AATAAACATAAATGAACCACAGTAATCACAACATCATGGATGAACAGTACAAACATTTCATTGAGTGAAA
AACTAAAACACAAAAGAACACATAACCAATAATTTCAAAAACAGGCAAAACTAGACTATCATATTGTAAG
TTATAAAAGTGGTTAAATTTGGGAAGGAGAGAAATTTAGTAATGGGGAGGGGCATGAGGGAGGTTTCTAT
GACTGTGGCAACGTTCTACTTCTTGAATTCATGGTGGGAAATTGTTTTGTCATAATTCATTGAATTGTAC
ATTTATACTTAATATACTTCTGTGTATTATATTCT

[0143] An exemplary DNA sequence is human Srprb provided below.

gi|224589815: 133497257-133545954 Homo sapiens chromosome 3, GRCh37.p13
Primary Assembly
(SEQ ID NO: 308)
CAGGAGCTGTGCAGGCAAGTAGAAAAGAGCACTGGGAGAACGGCCCAGTTCACAGAAGAGGAGGCAGCAA
GTCTGCACACTTTGTACTATGCTGAAATTGTTCAATCACTCGACAGTTCAGAAATAAATATAGGAAGATT
TTGAAAATCCTACCTCTCTGCTCTGCTCCACAGCACTCCTGGAAGCCTGCACTTTCCGTAGACCTTAAAA
TCTCAGAGGTAGGGCTGCCACCAAGGTGAAGATGGGAACGCAGATGATCCATGAGTTTGCCCTGGTTTCA
CTGGCCCAAGTGGTTTGTGCTAACCACGTCTGTCTTCACAGCTCTGTGTTGCCATGTGTGCTGAACAAAA
AATAAAAATTATTATTGATTTTATATTTCAAAAACTCCATTCTTTCCTAAATATTTTCAACAAAGGATTT
CTTTATGCATTCTGCCTAAATACCTATGCAACTGAGCCCTTCCTTCTCAGCTCAAGATTCGTCTGGTCTT
TCCCTACAGCTTTGTGTGTGCCATGGCCACATCTCCTGGGTACAGTTCAAGGAGACATCTTTTCTAAAAG
GGTCTGCGTGATCATTAAAATATAATCAAATGTATACTGGTGTGTGTGTGCACGTGCGCGTGCGTGTGTC
ATGCTAAGGAAGGGGCAAGAAGGAGGATGCAGAGTGAGTTACAGAGATCAAGTACTCAAGTGAGTACAGA
AAGACTACAGAAGACTTACCTTTATTTGGTATTTTAAATGAATTCCATCAGGCTGAGGTCCTGATTCTAA
CTAGCTGAAAAAAGTGAAACACTGACATCTTTTTTGCTGAAAAGCATTCCCTGAGCTTGATGCCACAGCA
GTTACTGCCCTGTCTCCTGCCCTTCTCAGCCCAGCTTCCTGTAAGGTGGAGGCTGACTTTTCTGTCTCAC
TTATTATTGGCTGAACATACAGAATTTGGTCTTCTGCTTCACCAACTTACCTGAATGTACCCTGGCAAAA
GTCACCGTCTACCTGCCAACTGTTAAACCAATTCAGGTCTTCCATTCCTGAGCCCATTTCCTGCAGTTGA
TAAAGTTGACCACTCCCTCCTCCTTGGAACTCTTTTCCTCAGTTTCTCTGACATGGCAGGTCTCTGCTTT
GATTCCTACCTCTCTCTGTTCATTTGTAGTCTTCACTGTGGGCTCATCCTACTGGCCTGGAAACCTTAGG
GAAATCTTCCTGGGGTTTTCTCTTGATCTGGTCAGTGCTCCTCTCACTTTGCAGGCCCTCCTTCAGTGAT
GCTCATGACTCCTAGGCATCTGTATCTATAGCTGTGACCCCAGCCTCCAGCAGTATCCCTGCACTTATAC
ATCCTACTACCTACCTGTGGGTCTATACTCGAGTCTTGCAGCAGTCAGAAACCCAACAAATCAAAAATTG
AAGTGATCATCCTGTTCTTCTCTCTCTTGCTTCCCTAAACCAACTGTTGTTATAGTATATTCCATATCAG
CTGAAGACCTGGTCATCTACCCAATCACATAAGCCATAAATAGAGGGGTGAAATTTCAGTTCGCCATTTT
CCCTCACACTACATCCAGCGTCACCAAGTTCTGTTGATTTTGCTTTCTAAATAACTTCAGTTGGCTCCTT
TCTTTTCCTGACTCCTAACACAGCCTCATCTTATACTCAAATACAGAAGTGCAGATAAGGGGTATCTGGA
CACAACATTCCACACCTCTCTCAACTGTCTAGTATTCAAGAAAATAGGACTCTGGGTCCACTTTGCAGTC
CAGACCTGATATGGACCGTTTTACACACAGCCCTGCTTTCCTCTGAGCCTATCAACGATCTGCCTTATTT
AATATTAACCTAAACTTACCCCAAATCCTATAACTCTGCCTTTTCCTTTGTTTGGTGAGATACCCCATGG
CTCCCCTGGGACGCAGTCTGTCTCATTGCAATGGATCAATAAACCTAATTTTATTACACTACAGGTATAT
TCCTGGAAGTCTTAGACAACTGGGCTAAAACAAAAATATTCAACATCCATTCTTAATTATTAAATTAGTT
ACTAAAATAGGATAGACAGATGTTATTTGGCCATAATTTTATATACATGTAAACAAAAGCTAATACATAC
CTAATGATGAAGAAACAGAAGCATTCCTACTAAAGTTAGGAACATGAAAAAAATTGATTACTATCTATCT
TATTTTACAGTGTTTTAGAACAGGTGGCCAATCCAATTATACAAGAAAAATAAGTTATAATATTTAAAGA
AATGCCAAAATTACTTTTATTTGTAAGTGATTATACACCTAGGAAATCCATGAGAACCAAATAATAATAA
AGTATTATGGCCAGGCGCAGTGGTTCATGCCTATAATCCCAGCATTTTGGGAGGCTGAGGTGGGTGGATC
ACCTGAGGTCAGGAGTTCAAGACCAGCCTGGCCAACATGGCGAAACCCCATCTCTTCTAAAAATACAAAA
ATTAGCCTGGTTTGGTGGCACACACCTGTAGTCCCAGCTACTCAGGAGGCTGAAGCATGAGAAGTGCTTG
ATCCTGGGAGGCAGAGGTTGCAGTGAGCCAAGGTCGCACCAGAGCACTCCAGCCTAGTGACAGAGCAAGA
CTCTGTCTGGAAAATAATAAAAATAATAATAATAGGCAGGGCGTGGTGGCTCACACCTGTAATCTCAGCA
CTTTGGGAGGCCAAGTCGGGCGGATCACCTGAGGTCAGGAGTTCGAGACCAGCTTGACAACATGGAGAAA
CTCCATCTCTACTTAAAATAAAAATTAGCCGGGCGTAGTGGTGCATGCCTGTAATCCCAGCTACTCGGGA
GGCTGAGGCGGGAGAATTGCTTGAACCTGGGAGGCAGAAGTTGTGGTGAGCCGAGATCGCACCATTGCAC
TCCAGTCTAGACAACAAGAGCAAAACTCTGTCTCAAAATAATAAAAATAATAATAATAATAAATAAAGTG
GTAAAAGTGGTAAGATAAAATTCAGTAAAGTGAAAGGAAATATTAAAATAAAAAATAACTTTCTTTTATA
CAAATAATAGTGAGTTAGGACAATAATAATTAACAAGAATAAATAAAATGTATCATTTAGTAAATTAATA
AAAGCTACATTTAAACCACACTTATCAAAGTAAAAAATAATGTAAAGAAGACATATTGCTTTGGATAGGA
AGACTCAGTATTGTAAAGATGTCAATTCTCCCTAAATTAATCAATATACAATTTTTTAACTTGACAAAAT
GATACTAATCCTCAACTAAAAAACAAAAGTGAGACAGATAAGAAAAATTCTGATGAGAGTGGAAGAGCTC
TTCCAGCTGTTAAAATGTAATGATAAGCTCCTGAACCTTGGCCTTAGCAATGATTTTTTGGCTATCACAT
CAAAAGCCCAGGCCACAAAAGCAAAAATAAATAAATGGGACTACATCAAGCTGAAAAGCTTCTGCATAGC
AAAGACAACAAGCAACAAAATGAAATGGCAACCTATGGATTGGAAAAAATATTTGCAAACTATATATCTA
ATAAGATACAACAAATTGATAAAGAACTCATACAACTCAATAGCAGGAAAACAAATGATCCCAGTTAAAA
ATGGGCAAAAACCTGAAAAGACATTTCTCCAAGAAGAAAAATGGCCAAGATGGATATGAAAAGGTGTTCA
ACATCACTAATCATAAGGGAAATGTGAATTGAAACCATTATGAGACACTAGATAATAATAGGATGACTAT
TATCAAAAAGTCAAAAGATATTAATCATAAACGTGGATAAGGGTGAAGAGAACAGAAAACCTTTGTGCAT
TGTTGGTGAGAATGTACAGCCATTGTGGAAAACAGTATGGAGGTTTCTAAATAAACTGAAAATAGGGCTA
CATATGACCCAACAATCCCTCTTTAGGGGATATACACAAATAAAATGAGATAGCCACCTTGTAGAGATAA
ATGTGATCCCACGTTCATTGCAGCATTGCAGCCAATATAGGGAAGCAACCTAAATGCCTGTTGAAGAATG
AATGGATAAAGAAACTGTATACACACACACACACACACAATGGAATATTATTCAGCCCTAAAAAGAATAT
CTTGCCATTTGCCACAACATGGATGAAACTGGAGGATATTAAGTGAAATAAGGCAGATACAGAAAGAAAA
ATATTACACGATTTCACTCACATGGGGAATCTAAAGAAAACACTCAAATACAGGTATACAGAGATAACAA
AACCTGAGGTGGAGGAGGGTGGAGAGATGTAGGTCAGAGGATACAAAGCAGCAGATAGGAGGGCTAGGCG
CAGTGGCTCACTCCTGTAATCCCAGGACTTTGGGAGGCAGAGGTGGGCAGATTGCTTGAGTCCAGGAGTT
TGAGACCAGCCTAGGCAACATGACAAAACCCCATCTCTGCAAAAAAAAAAAAAAAAACAAAAAAAACCCC
AAAAAACCAAAACAACAACAAACAAACAAGCAAACAAAACACACACACACAAAAAAAATTAGCGAGGAGT
GCTGGTGCCCACCTGTAGTCCCAGCTACTCAGGAGGATGGATTGAGCCTGGGAGGTCGAGGCTGCAGTGA
GCAGTGATTTGATCGTGCCACTGCACTCCAGCCTGGGGACAGGAGACCCCGTCTCAAACAAAACAAAACC
AAGTAGCAGATATGCATGATGAACAAGCCTAGAGATCTAATGTACAACATAAGGACCACAGTATAGGTAA
TAAATTCTACTTTATTTGGGATTCCTCCTTCACTGTAGTAATCTTTTTTTAACTATGTATGTATCTCATA
ACATGTTGTATACCTTAAATATATTCAACGAAGCTTATTTTAAAAAATGAAATGTATAATGATGACTGGA
AAGGGTGGTAGTCACATGGAAATAATGAAGCAGAATAAAAGTTCCAGATATTAAATGCAAATGAGAATTT
ATTACATGATAAAGCTGGCATTATACTCGGGGGGGACAGATAGGCTACTCACTGAAGTGTTTAGAAGCAG
AGTAGCTGAAAATTTTGGCGCAGAAGAAAATCTCGTGGACCTCCAACTTACCGGTTAAAGTAAAAACTTT
CGAAACGTATAAAGGTTTAAATATAAAATTAAAATCGTAAAAACAATTACTATGTTAACATATTTCTTAT
ATAGTACTTAGATTTTCCAACATTCCACAAACCTAGTAGCAATTAAGGAAAATATTAATTTCAGATCATA
TAAAATTCAGAAGTCCTGTAAGACAAAAATAGACAAATAAAATGTGAAGATTTTTAAGAAAGAACAAAGG
GCTAATCTATATTTTGAAATCAGTATAAAAAGACGAACAGAATTTGAGATGTGAGCGCGGACAGCTCTGC
TGGGCCCTCCAGGCCCTCCGCCCGGTAGAACCCGGAGCCCTGGCCGCGGCTGCCCCACCGGGCCCATTTC
TTGAAGCAGCGGCGAACCACTTTTCCTCCCCGACCTGCCGGCTGCAGGGTCTCCCCGCCCAACCCTGCCA
GGCTCAGACGAAGCTTCTGCTGAGCCGCCTGGACGCAGCGCCCCTGGGTGGCGGCAGGTATAGCAGGGCG
GGAAGCAGGGAGGCGGCCCCAACGCCGCGGAGGCCACCAGCGGGTGCAGAGGGCCAGGAAAGCTGGTCTG
CGCGCGGCTCAGCTGCCTCCGTAGGCCATGGAGCCGAGCAGATCCGGGTCTTCGGGTGGCCGCAATGTCC
CAAGTGGACGACACCCACCTAGTCCCGAGGACAACCGACAAAGTCCTTAATGGGCCCAGAAGGTGAGGGG
AGTCCGGCAATGAGGGGTGGTAGGGTTAGCGGCCATCGCCCAGCTCGTCTTCCTTCTACCAGACGCTGGT
GCTGGAAAAGAGAAGTGTAAGAATAACTTGCGCCATTAGGCCCATCGGAAAGGCCCACCACCCTTTAGGA
AGATTACTGGCTGTTTATAGAAGGCCCGTGTATATCCTATGAAGAAGCTGCTCTCAACTTCCCCCCCAGC
CTTTTAAAAGAAAACATTTGCTACATCGAGCCGTTCTAGGTGTAAAGAGGTTGTGACTTATGATAGAGTT
AGAAAATCACACATCTTGTAAATTCCCATTTGTTAAAAAAATAATAATAATAATAATAATAATAATAATA
ATAATAGGACATAAATGGCTTCTGGAGATGACTTTTTGCAATGAAGTTGTTAGACCACCTCTGGAAGTGA
CAGCAGGAGCCACACATCCACGTTTATTAAGTGAGTTAGAGCAGGAGTCCCCAACCCCTGGATCTAGGTT
GCACGCTCCTTATGAGACTCTAATAATGCCTGATGATCTGAGGTGGAACAGTTTCATCCTGAAACCATGC
CCCTACCTTCCATGGAAAAATTGCCTTCCGTGAAACCATTCCCTGGTGCCAAAGAGGTTGGGGACCACTG
GGTTAGAGGACATGGGGCAGAAGACCTGAGAAGGAAGAGAGGACAGTTCTGTGCCACACTGGTCATATTT
AGAAGACATTTTCATATTCCAACCATTGTTCTGTGTGTGCATTTTATTTCTCACGACTGTATATGTAGTT
AACAATACTATTTTTTAGGGAGGTGGGGGGGTCAGCCCCCCGCCTGGCCAGCCGCCCCGTCCGGGAGGGA
GGTGGGGGGGTCAGCCCCCCGCCCGGCCAGCCGCCCCGTCTGGGAGGTGAGGGGCGCCTCTGCCCGGCCG
CCCCTACTGGGAAGTGAGGAGCCCCTCTGCCAGGCCAGCCGCCCCGTCCGGGAGGGAGGTGGGGGGGTCA
GCCCCCCGCCCGGCCAGCCGCCCTGTCCGGGAGGGAGGTGGGGGGGTCAGCCCTCCGCCCGGCCAGCCGC
CCCGTCTGGGAGGTGAGGGGCGCCTCTGCCCGGCCGCCCCTACTGGGAAGTGAGGAGCCCCTCTGCCCGG
CCAGCCGCCCCGTCCGGGAGGGAGGTGGGGGGGTCGGCCCCCCGCCCGACCAGCCGCCCCATCCGGGAGG
GAGGTGGGGGGGTCAGCCCCCCGCCCGGCCAGCCGCCCTGTCCGGGAGGGAGGTGGGGGTGTCAGCCCCA
CGCCCGGCCAGCCGCCTCGTCCGGGAGGGAGGTGGGGGGGTCAGCCCCCCGCCCGGCCAGCCGCCCCGTC
CGGGAGGGAGGTGGGGGGGGTCAGCCCCCCTGCCCGGCCAGTGGCCCCGTCCGGGAGGTGAGGGGCGCCT
CTGCCCGGCTGCCCCTACTGGGAAGTGAGGAGCCCCTCTGCCCGGCCAGCCGCCCGTCCGGGAGGGAGAG
TGGGGGGTCAGCCCCCCCCCGCCCGGCCAGCCGCCCTGTCCGGGAGGTGAGGGGCGCCTCTGCCCAGCCA
CCACCCGGTCTGGGAGGTGTGCCCAACAGCTCATTGAGAACGGGCCAGGATGACAATGGCGGCCTTGTGG
AATAGAAAGGCGGGAAAGGCGGGGAAAAGATTGAGAAATCGGATGGTTGCCGTGTCTGTGTAGAAAGAAG
TAGACATGGGAGACTTTTCATTTTGTTCTGCACTAAGAAAAATTCCTCTGTCTTGGGATCCTGTTGATCT
GTGACCTTACCCCCAACCCTGTGCTCTCTGAAACATGTGCTGTGTCCACTCAGGGTTAAATGGATTAAGG
GCGGTGCAAGATGTGCTTTGTTAAACAGATGCTTGAAGGCAGCATGCTCGTTAAGAGTCATCGCCAATCC
CTAATCTCAAGTAATCAGGGACACAAACACTGCGGAAGGCCGCAGGGTCCTCTGCCTAGGAAAACCAGAG
ACCTTTGTTCACTTGTTTATCTGCTGACCTTCCCTCCACTATTGTCCCATGACCCTGCCAAATCCCCCTC
TGTGAGAAACACCCAAGAATTATCAATAAAAAAATAAATTAAAAAAAAAAAAAAAAAACAATACTATTTT
TTGAACTATCTACCCTTTCTAGATGTTCTGAAATGCCTATGTTAAAATTAGAGATAGTAAAATAACACAT
TTTGTAAATCTTTTTGTTAAAATTCATATGTAATGTTGTTTTGGTTGGGGGGGGTGGCCAAACCACCTGT
TAATAATACACATTGTGTTTGTGCACTGGTTCAGGGGAGGAGAGAGGAAAGGAAGTGTAAGAGCTCTATG
CCAATGTGCTTATAGTGAGGCAAGGTTAACCATTGTCTCATGCCTGGGCATTTTGTTTTACTTATCTGGG
TATATTGTGGATCTAAAGGACAAATGAGTCCTGACTTTACATCTAGTCTTTCTAGATGTTAAAGAGGTTG
CTAGTGTATGACAAAAGTAGTTAGTAAACTAATATATTTTGTACATTTCGTTTTAAGATTCCCAGGAAAG
ACAGTCTTCTGAAAATTTGAGCATTATTGCCCAGTGGGTTGATGGAGATGGGAAGGTGTAGGCCAGAATG
TTCATACTTGGAAGACTCAGTCATAACTGTTTTTACATGTGTTCACTTTATTCAAGACTTCTGTGCATAT
AGTGGACGAATTAACTTCTTACCTGAAACATCTTATCTATGTAGATGTTCAGAATTGCCTGATGTATGTT
AAGTGTAGAGGTAGTAAAATATCACCTTGTAAATATCTTTTTGCTAAAATTCTTGGGAAGTACTGTCTTT
TGGAAGTGGAATTGTGAAGCCACCTCTGTAAGCAGTATAGTACTGTCTATACTTGTTCAATGGTTTAGAA
ATGGGAGGGAAGAAATTGCCAAAGGTAATATGCTAGTGTGTTCATACTTGGACATTTCACTTGCCATTTT
TCTGTCTGTTTTGTGCATTTTGTTTTGCTGTGTATGTAGAGTACATAATGGACAAATGAGTCCTAATTTT
GCAACATTTGGTCTCTAGATGTTTAAGAAGTTGCCAGTGTATGACAAAGTATCTAGTAAAATTAGCACAT
TTTGCACACTTTGTATTGAAATTCATAGGAAAGCTTGTCTTCTGTAAATGATTTTTGGGTATGAATTTGT
TCAGCCATCTCTAAGCGTTACACATGCCTGTACCTGTCCACTGGATTGAAGACAGAGAGAAGGGAGTGAG
GAAGGACTGGTTCAAGGTCAAAATTGTCATATTTAGAAGATACCTCCGATTATAGCCACTGATACATGTG
CAATTTTATTTTACAGTGCTATGTACACAGTGGAAAGTTATATGAAATATCTGGTCTCTCTAGATAGTTA
GAAATGCTTGATGTATTTAAAAGTAGAAATAGTATAATAACACTTTTTGTAAATAGCTTTTAAAAACTGA
TGGGAAATACTGTGTTTGCAAGTGGGATTGTTAAATCACCTCTGTGAACAGTGTTACTTGTTCATTCAGT
TGAGGAAGGTGAGAGGGAAGAAATTACAAAAGATGTTTTGCTATTGTGTACTAGAAAATTTCAGTTTATC
CATTGCCTTATATGTTAAATGCATTGCAAGTAACTTTGCTATACTACATATTGTGTTATATACTGGAAAA
ATGAGTCCTAATTTTAAAATATCCACTCTCTAGATACTAAAGAGGTTGCCAATGTATGACAAAAATAGTA
AAGTAACACATTTTGTACACTTTGTGTTAACGTTTATAAAAAGACTATCTTCTGAAAACGACTTTTGGAA
GTGAAATGATAACATCAACCCTAAGTGACACATGGGCCCATATCCACCAGGTTGGTGGTGCAGAGGAGCT
GGAAGAAATGAAGGATTCTAGATCAGAATATTCCTATTTAGAAGACAGTTTAAGATAAACCATGTGTGTA
GTTTATTCAACCCTACTGATGCAAGAGAATAGGGTCTGGAGGCAGGAAACATAAAGCAGATTCATGCAGA
CTTCCTAGAAATAAATGAAATGGAAACACATCAGCTATGACAGGACATATACTCTCCAACAGAGTAAATG
ACTTTGTAACTTTATTTCATCCTCTCCATTTACATAGGGCGTACATCAAGTAAATGACTAGGGTGTATAC
TAAGTAAATGACTTTGTAACTTTATTTCATCCTCTTCATTTACATAAGGCATATACCAAGTAACCAATGG
AAACCTTGAGAGGGTATTTAAACCCGAGAAAATTCTGTAACTGGGCTCTTGAGCCCCTAAGCACAGGCCT
TCTCCCACCCTGTGGAGCGTACTTTCATTTCATAAATCTCTGCTTTTGTTGTTTCATTCTTTCCTTGCTT
TGTGTGTTTTGTCCAATTCTTGGTTCAATATGCCCAGAACCTGGACACCCTCCACTGGTAACATATTTTG
GCAAGGCAGCCAGGAGGTAAGCCCAAAGTTTGGGATTTTTCATCTTTTCTTTTCCACTCCATACAGGGGA
ATCTCTCCCTCTGTCTCTTTTTCCTTTCCAACTCGGGACCCTTGGTGGGCAGCGCCTAAACACGGAGGCA
ACCGCAGGTTTCTGGGTGGGGCCATCCTGAAGGACTTTTTTCTATCTTTTCTGGTTGTGGTCCCTGATTC
CTATGTGTGGCGCAGCTCAGGGCAAACTTGCAGCTCAGGGTGAACTTGCATGTGTTTCAGGCGACGGAAA
CCCTACTTGACTGGCTAAGGACAAAAGAAGCCTACTCAGCTTCCATTTCCTATCATTACAGTTCATGGCT
ATCATGCTAGTGGAACAGGAAGCATGGGATAATGTGGCCTTATCAAATTATAAGGATGCTAAACGCCAGT
GATTACACCCAGGAACCAAAGGACAGCTCACAATTGCCTCTGGAGGGAAAATATGCAAAGCGGCACTGGT
GCCCACGTAAGGTCAGAGATGCCTGACACTCTTAAGACTGGACCCCAAAGGGGGATTCCCCAGGGGATCC
TCCAGACTTCAACCTCTCCAAAGGGGATGCCCTTGGCAGCAGTTCTAAGGACTAGTACTAAGCCCTCCTT
AGAATTTTCTCTTGCAGTTGCAATACTGTTTGGCCCCAATATGGTTTGGATTCTGGCATTTGCTGTTGAA
TGGGAAAGCGGGATGCAGTTGCATGTATCCAGGCTTTGGTGCTGCTGTTCTAAGCAGGGGCAGGCCTAGT
TATTATGTGATGTTCTCCTTTGGTGCTGTTTGACCCCAGTGTTCTTTCGAGTCTGGGGAGGTTTGGCCTT
TAAAAATCAAACTGCCATGGAAATTGCTTTACCTGAAATAATAGTTCACAGCCTTCATTGGATTGCTTAT
TGGGTACACAAAGTAAAATTGGCAAGCTTGTATTGCTATCTCATGGTTAGGGTTCCAAGGTAAAAGCTAT
TGAATCTTCATTTGTGTGTGTGTATACACATGTCTAGATGTGTTTATTTGCACATTTGTTATATGTTGTG
TTTTGGCATATAAGTAAAAGAGCACTCATAAATTAAGTAAATAAGTCGAAGCAATTTTCAAGTTCACATG
ACTTAAGTATAACTTTCCTAAACAGGCTAGTTTTAAAATTATTGGTGAAGTAAAAATAGAAATGCCTTCA
GAATTGTCAGCATATATTTTTGTCTGGGTTTTATATTTGTCTCTGCTAGATATTTTGAGGTGTTAGGGTT
TGGCATAGAAGGTTATAAAACTATAAACCCAGCCAAAACAAAACGATCTCGTTTGCGTTTTTTTTTTTTT
TTTTTTTTTTTTTTTTGACAAATGAGCATAATTTAATGTTAGCTAAATCTTCTGGGTTACTGGCAAAAAT
ACGTATGTATTAACTTTGAGGCTCTTACTTAGGTTTAAGTGCACACCTGGCTATTCAAAATGTGGTTAAC
AGGGAAATAACTGACTTTAAAAGATAGTGTCTAACATTTCGGTTTACAGAGGTAATCTAGATAAACTGTT
AAAAGTGAAACAATTGAGTACAGTGAATGGGACAAATGTTTTAGATAAGCTTTTTGTGTAAAGTCTTAAA
ATCATTTTTGATGCTCATTTAAGATCTGGGCCATTTCCAATTAGAAAGGTTGTGATATGGGGAAATATGT
TTCTAAAATTGTGGAATTGTTCTTAACTATAAATTCCCATATCTGATAGTTCAGGATTTCTAGCTTTTTA
GCGTTTCACTAAAGTTTTAGGTTACTAAGGATAAGAATTCTAGTTAACACATAATTCTGTATACAAAACA
TGCCAGAAAGTTTGTGTTATTAGTGAGAAAAAGAATAATTTAGAAGTTATCTAAAAGTTAGTTCAAATTA
CAGATTTGAAAAGGTTACTTATGAAACAATGTAGTAAGGAACCAGTAAGTAGAGGAGAACGATATGGAAA
AAGTTTAGATAATAAAATATTCTTTAAAACCTGATAGAGAATTGGAGATATTTGGCTAATTAACATTTTC
ATAGTGAAAGCTGTTAGTCTTGATAAAAGTAAAATAAGCATTGTAAAGAAATGCATCGGCAGTTTGGCAA
TTCCTTTTTACTATAGTTAAGCATGAAGCCGGATTTGGTGTGGAGCCAAATTTCACATACATGCTTGCAT
TGCTTCACACTGTTTACTGTTTTGTGTGGATAGTGCTGGCACTGGAGTACTTATTGGTTATGTGCCTATA
GTGTATTTCTTGATTGCACAGGATGTATGGTGATATTGGTGAACTTAAGGATACTGAATTGTGTATCAGG
AACAAAATATTCATTATGTGGGTTTTGGGGGGCCCTAGGTAAACACTGTAGCCTCCAGGGTAGATTGAGA
AGGAAAAATTTAGGGTTGGGTTCCTATTTGTTTTTGCTTCTAATTTTCATTTGTTTGCCATTTATTCTCC
TCTGGCTTTGCTTGTGTATGCACATATAAAATCATATATATTTTTTTTAAATTTCTAGTGGAAGGCTTTT
ATTTGGTTCTGTGAATAGTTATTTTGTTCCCTATGCATTTCTAGCAAGTCATCATTTGTTCCATTTATCT
GGAATTCCTAGGCTACCTTTGTCAGGCTGGCAGGAATTGATGGAGCACACCAGCTTTTTAACCTTGAACT
AACTCAAATTCTGTTTATGATACTTTAAGTGTGTTGAGTATATTTTCATAAACAGAATTTGAGTCATATT
TCTCTGTCTGCCCATTTTCTCCAAAATTCGTAAACTATTTGTGAATATTCTTAATTCATGGCAATGTGTT
TGTTTGCATATAGTCAAGCAGGGTTCCTAGGGCTGCTTTGGGAGACAGAACCCAGAAACCTGGCATACTG
GCAAAAGGGTAAGAATTTCTTACCAGCCAGACTCTGGTCTCTGTCTCTCTGTGCAAACTGCATAAATGAA
TAGTAAAAGTCACTGTTTATCTCCTCTGTAAAGTTTTGATTAATATAAAAAAAGAATTCTGAGGCCGATC
TTAAGCTGTAGTGAATCTGGTGTGCTTTGTGTCTTTCTGTATTGTTTTGTCATAAAGAGGGGTACCTTAG
AATAAAATGTGTGCTTAGGACCCCATAGACCTGCTGTTCAAGACACACCAGCAGACTGGTCAGTCATGTC
TTTGGGAGCTTGACCTTGTAACCATGTGGCCATGCTTTCTCTTTTCACAGTGGCAGCCTGGGTTTAGGGT
TCAATTCCTGGCTTAGGGAATGAGTCCTTTATCTTCTGTCTGTGTATTTATATGTGTTGTGTGTGTACTA
TAAAAGAGCATTAATTAATTAGCTTAATAATAATAAGAGCTTAAATCAAATATTTTATCAGAAAAGTAAA
AAATGTAATGCCTTCTATTTACTTCATGTAACTTAAGTAATCTTTGGGAAATAAAGACAGTTTTAAAGAT
TATTGGTAAAATAAAAATATCTTCAAAATGTAAATATTTAGTCTAAATTATGCAGGTCAGATATTAGATT
TGCAAAATGCTTTAAGGTCATAAACCGCTTCTTTGACTTTTAAAAATTGCTCAATTTATTTTGGAGCATT
AGATTCTAGATAAGGCCTGGGGACAAATAGAATTAGCCATGTCCCCTAGCTATGCAAAGAAGGTTATAAA
GAAAGGAGATTTTATATAAGAAAGGATCTTATATCGTAAATTCGTGTCCTAAAGTAAAATAAGCGGTTGT
TAAAAAAGAGGGATGTTTAGGACAAGTTAGAAAGTCAAAGCATGTCGTAGATGGTCTGTGTAAGTCATGA
AATAATTTACAAAAGAGAATTTATGCAAGAAATATACAATTTAACGGTGATTAGACCTCCTAAATGCTTC
ATAAAATGCCACTATGACTCTTAACTCTACAACTTGCCTGCTTTACAGCTCGGTAAGGCCTGAGACACGT
GGAGTCAGATGCTGGAGTCAGACCTTAAGTGTACTTCTCTCTGGGTCCTAGACTCCACAACTAATATATA
ATTAAAATCCTTAACTTACCAAAGTTTTCACCAAAAGTAAAACTCGCTAAGAGTTAACATTGTAACATGT
AAGTGAGACTACTGAAGCAACAGTTTTACATGCAAGTTACGTAAGAAAAGTGAATGCATTTTCAGTGAAA
GATTATAACAAGGCATGGGAATGTAGATTTTTTTTTCTGTCTAAAGGGTTAAAGGATTGTTTTAAGTTAG
GATAAAGCTAAAAGTTTGAATGAGTTGTGGAAGATTTATAAAAATTAATATTGTAAAAAATTATGTGTGT
GAACATATTGACTAAATTTAAAGGGGTATTTTCTGGTTTTTCCATAAATTGAACATCAAAATAAAAGCAC
AAACAGGGTTTTCTTAAAGCACCGATCTGCTCTTTAACAAACATTTGTAAAGGATTATAAAAGGTTTATG
AGAATCTCACCTTATGGTCAAACGGATTAAGATTGGAAAGATATGTCTACAAGGTTTTCTTAAAAATTGG
GGTTGACATTAATAGCACACTAATGCAAGGGTGAAATTTGGCTTTCTCTCTTGAACAAGATTTTCATGCA
GTATTAAAAGATAATGAAAGATCTTTGTTTGCCTTTTGAATAAACTACCCCCCCACCAAAAAAAAGGAAG
GGAAAGACAAGAGACAGATTGTTTGTAAAGTAAGTCTTCCATCTATCAACATGGAAAGGTTTTTGCCTTT
TAAAACATTTTTGAGTCATCATTTTGCTAAATGAATGACTATGGTAACCTGGAATTCCATTTCATAATGT
CAAGTGTTTTAAATCTTTAACATATTTAATAGGCTTCCCAAAATCAAATTTCAGCTTCAAAATTGTCTTT
TCTAACCTCTAACTTTGAGATGCTGCAGAGGGCCCCTGAAGCATCCAAAAGAGAGGTAAACAGAATTATT
TGACATGTTTAATTACATGGGAAGCATTGTCAAAAAGAAAAAAATTTAATCTTCTTCAGGTTATATTTTA
GTGAATAATATTAATATATGTTCCAAAATTGTATGAGATTTCTAAAATTCCAATATGTCTGAGTATATGC
TATCAATCATAATTATGATTATTATGTTATTGTAGACCACAGAAATAACCAAATTTCCTTGTCAATTGTG
TTTTTAACTATAACTATTTAAAGTCATTTCCACAGTTAATTGCTTAATGCTGATGCAGTTTCTGAAAACT
TCACAAGCATGCAAAGTCCTAGAATATGGTGTCTTTTAGGAGATTCATGAAAGATTGGAAAGGACCCTAA
AAAGCACTCTTGAATACAGGTTTCTAATAAGTTTAGAATTATATCATTTGAACTGGGTAAGAATTCCTGG
AACTTTAATGAAAAGACTGACTGAGTTCTAAAACTGCTAACCCAAGTAGAACAAAAATTAATTAAATACC
AAGAAAATACTTTGCCAGATTTTCATGCTAAATCAGCTGATACTGAAACTGTTTAGATATAAAATTTGAA
TAAACTCCATCATTTAAATCAAATTACCTATGATAACCCATCAGTTATCAGTGTTATGCACCTAATTTGG
GGAAACAACTGGTATTCAAGAGGATATGAGTCTAATGTTAATTAAGCATGAACTCATGGAGAACCAGGAT
GGCCACCTTGTCCTTCCTAAGTCGTTAAAGCTTTTGTTAGTAAAATTTCTGCATTACATGACTCGTCACG
GAAAAGATAAAATGATCCAAATTGAATATATTGATGTGGTGACTTATAAATTGCTAAAATAGTTTATAAC
CAATGTTTGGTCCCATATTCCTGGGAAAACAATCAAAGCTTCAGGTACATCCAGTCACCTGATAGGCCAT
TTAAACATTTTATAGAGGGATTTTATTCAATTGTTATTTTCAGTGCATGTTTTCTGGTTGTATAAAAGCT
TTCCCATGCAAGAGGGCTGATGTTATAACACTAAGTTATTATGCCACCAAGTATTTTCACAAGGTAAAGA
AAGCTTTTTATGGTTCACTGAGGACAATCAACTCCTTCACAACCTAGAAACTGAAGATTGTATCTTCTGA
AAACATTGGATAAAGACTGTCCTTGCCATCCACACTACAGCAAAACTTCTGGACTTTGAACTTTGGGTTC
ATGATCTCACAACTGAGAAGAGTCCCTCCACACTCTTGGAACTGTACACCCATTGGAACCCTTAAGGTAA
AGCTAACCAGGGAAGTTTCTCTCCCGAAGAAGATGGCATCCTTGATGTGAACAGCTTTTCCCAAGATCAT
GAATCAAGACTTCTCTATTATCATGAGACTCTTATCTTTGAATATTTTTTCCTTGCTTTTGCCTCTATGA
AGAATAGAAGTGGAAAAAGGATCTGTTGTGTACAATTATGGGTTATACTTTTATTTGTGAAGAATTTTGC
AGCCAGCTTTAGGTCCTTTTTCCATGATTTGGAATAAAAGAGGCAAATGTATCCCTCATAATAGGCTCCA
TAGCAGTTTACTGTAAAGGCTATGGTTACATAATAGACTAAATTATCTTAAGAAAGTTATGCTAAATAAT
AGAGTTGGCTAAACAGAAGAGTATCTGTGCAGCTGCTGGCACTCATGGCCTATGGAGAAAACATCAGGTA
TTATAGAGATTCAGTTGTAGCAAATTAATGAAGAGACTGCTTAGTTAAGTGAGTAGACTCTTTAGCTCAT
TGTTTAATCTATTTGAGTTTAGGAGGTTTGGTTTATGGTGACCCTGGATAAGGAGCATACTTACTCTCAA
CTCTTGGTATTATCCTCCTGATAGTCATAATAATAGTCTCCCTGGTGTGCTGTATTCTCTCAACGGTTTT
AAATGTTTGCATGCTGCCACCTCTAGAATGTCAAATGGCCTCTCTTCAACTGGAATGACAAGAGCTGAAA
GAAATTGCAGCCATGAGGACACTGTAACCTACGAATGATGTGCTGAGTCCAAAAGCCCAAAGTGTTGGTA
ACTGAGAGTGGTGCTAAGTAAGGCCCTAAGTTTTGGTCACACTCTCACTTAAGTGAGAACCTGACCAAAA
AAGTGGAATTTTTTTTTTTTTTTTTTTTTTTGAGATGGAGTCTCACTCTGTCACCCGGGCTGGAGTGCAG
TGGCACGATCTCGGCTCACTGCAAGCTCCACTTCCCGGGTTCACGCCATTTTTCTGTCTCAGCCTCCCGA
GTAGCTGGGACTACAGGCACCTGCCACCACGCCCGGCTAATTTTTTTGTATTTTTAGTGGAGACGGGGTT
TCACCATGTTAGCCAGGATGGTCTCGATCTCCTAACCTCATGATCTGCCCACCTCGGCCTCCCAAAGTGC
TGGGATAACAGGCGTGAGCCACTGCACCTGGCCAAAAAGGGGAATTTTTTTTAAACAAAATTATGGGAGG
TCATTTTTTTGTACTGAGCCCATGCGCCAGGCCCCAACAGACCAAACTAAACCAAAACGGAGTCACGTAT
GCCAAGACCTTAAGGAAACACATAGATCCTAGAACAGACCACAGGCCAGGTTTTGTTTTTCTCCTACAAA
TCTCTATAACAAACATTCCTGACAGCATAGATATCCACCCCCTGAGTTCCCATTAAATCTTTTAACCAAA
TTAATTTCCTCTCGCCAAAAGACCATCAAGCTTCAGATGATCATGCAACAAAAGTTTCATCCAGTTCCAC
CACCCCTGGCCATCAAGGAGCTACCCTGCCTTCACTAGAAAGAGCAGAGCAGGACTTCTGTGATCCTCAA
TAGGTAGGGACTAGGCCTCAAGCCAACATGAAGCAGTTACAAAAGAAAGACCATCGGCCCCTCCACCTCC
CATAAAGATTTATGGGGATCCCATCTCTGGAGGGAAATGAGGCAGAAGAATAGGGTCTGTAGGCAAGGAA
TATAAGGCAGATGCATGCTCACTTCCTAGAACTAAATCAAATGGAAACACTTCAGCTATGATGGGAAATG
TCTTCTGTATTTACATAGGGCATACACTGAGTAACCAATGGAAACCTCTAGAGGGTATTTAAACCCCAGA
AAATTCTGTAACCGGGCTATTGAGCCCCTATGCTCAAGCCCTCTGCCACCCTGTGGAGTGTACTTTTGTT
TTCAATAAACCTCTGCTTTTGTTGCTTCATTCTTTCCTTGCTTTGTTTGTGCATTTTGTCCAATTATTTG
TTCAAGAAGCCAAGAACCTGGACACCCTCCAGTAGTAACACTACTGGACATATAGTGGACAAAATTAAGT
CCTTATTTGAAACATCTAGTCTTCTAGATGTTTAGAAGTGCACACAGTATGTTAAAAGTAGAGGTAGTAA
ATAACACATTTTGTAGATATCCTTTTGATTCATATGAAACATTGTCTTTTGGAAATTGATCAAACCACTT
CACATTATATTTATGCTGATTCAGGGAGGAAGGAGCAGAAGAAAGTGCAAAGGGCTTTATATCAGTGTGT
TTACAGTATGACACAATTGACTGTTGTCCCTTATATCTGCATTTCCTTTTACTTTGCTGTGTATACAAAC
AAACATTTACATAGCTTTGGAATTTTGAATTGGTAAATATTCATGATGTGTGAAAAAGCATGATACATAC
TGTATGATCCCAATTGCATAACATTGGATGGTGTCCTAATTTATAACATCTAGTCTTTCTAGATGTTAAA
GAGATTGCCAGCATATAACAAAACTAGAGTTAGTAAACTAATACATTGAGTACACTTTGTGTTAAAAATT
CATAGGAAAGATTGTTCTTAAAAATGCTTCAAAAGTAGAATTGTTAAAATCCCCCCTAAGCATTACAGAT
GTTTATACCTGTCCACTGGATTGATAGAGATAGGAAGGGGAAGGGCTTTAGGCCATGTTCCTATTTAGAA
GACACATCCAAATTATAGCCTTGCTTTGTATGTGCACCATTTATTCAATGCTACTGTGTATAAAGTGGAA
AACTCAAGTCCTATTTAAAACACCTAGTCTTCTTAGATGTTTAAAAGTGCACAATATAGATTAAAAATAG
AGGGCTAAAGTAACACCCTTTATGCATTTTTGTGGTTGGTGTTATTTCCTAGGGATGGTTGCATTTGAGA
ATGGAATTTTTAAACTTGATGCTGACTGTTCATCAGGTGTCGGCAGGTGGGAAGAGGAGGAGGTATGCAG
GGAGAAGGGTTCTGGGCCCGTGAGTTAGATTAGTTCAGATGATCTAGCCATTGTTCTGTATGTGAATTTT
AGTTAATATTGGTGTGTTTTAAAGAATAAACAAGTCTTAATGCTCAAGGTAGTTTAAAAGTGGAGGTAGT
AAAATATCCCTTTATAAATGTCCTTTTGTTAGTTTTTAGGAAGACCTGCCTTCTGGGAGTAATCTTTGTT
AATCCACCCCTTGGAGCTAGACATAGTCCTGTACTTAGTCACTGGCATGCTAGAAGAGGGAGAAGGGGAA
GGGTGAAGGGAAGGGCTTTTTGCTAGTATCTCGGTATCCAGAAGATAGTGTGAGATAACAGCCATAGGTC
TAACAGCATTTTAGTAAAGTGCCTGCATTTATTGTGGACAAAGTTTATTTTTTGGAACACTTAACCTTTA
TGAATGTCCTGAGGAGACAATGTATGATTAAAAGTAGAGCTAGCGAATTAGCCAATTTGTAAATATCTTT
TTGTTATAATTGATAGAAAAGATGCATATTGGACATGGAATTGTTAAACCACCACTGAGCAGTGTATATC
AGGACTTGCTCATTAAGTTGGCAGCAGGGGGGCAAAAGGAAGCATAAAGGGAGAGATATATGCAGATATA
CATTTACATTTTGATGATAGCCACTGATGTATGTGCATCTCTTTCGGCTGTACTATAGGAATACATTAAG
TAATTCAGTGAAAATATGCCTTCTTGCTAATATTTTCATGGCATAGAACTACTAATGAATTCTCTTAGAA
ACATTATACTTAGTGTATTCTGTTGCTTTATGTTTCATTTTAAATTGAACATTAAGGGAATGCAGTATTT
TAATTGGAACTCTGCCAATGCTTTTATCTCAAGGTATGATGCCATTTTTGTCTTTTATAAAATTTTTGTT
CCAAGAAAGGCAGGATTACATTTTTTCCTAATAGATTGAGTTGGTGTAGTGTTTTCTTGACTATCAAAAT
ACTCATATAGCTTTAGGATTTTGAATTGGTAAATATTCATGATGTGTAAAAAAGCATGACACATAAAATT
GCATGATCTCAATCCCATAAATTTGGATGTTGTTGTCTATACACACACAGGACCTAGAAGGACAAGTCAA
ACTGTAAACTGCCTGTGATTGTGGATGACTTTGCTCTTTGCTTCATGTGTTTTCCAGTTTCCTAAAATGC
ACGTTAGCTTTTTAAAAATAAAAGATATTTTAAAAACATTAAAAAAGAGATGAACATTGTGATAAAAAAT
AGGCAAAAAATACTAGAGACAGTTACTAGATAACACACATAGAGCCAACACACATCTAAAATTTGAAGCA
ACTCACTCATAAAGAAATAGAATGCATGAGAACATGCACTTTTTTAGATCAGCTAAAGTTAAAGAAAAAC
TACTAATACCCAGAGGTGGGAAAGGAATAGAGAAAACAGTTACGGTTACTACTTTTGATGTGACTCTAGA
TTGGAGAAATCTTTCTCTAGAGGGATGTTTCGCCAAATCTATTATACTTCAAACACATATGTCCTTTATT
CTTGATTGCACTTCTAGGAATATATCCCATGGAAGTACTCTCACAGGGTGTTTATAATAAGGTGAAAAAA
TGAAATCCTAAATTTCCATCATTAGAGGACCACAGTGATTTAGGATATATCTAAACACTGGGATACTCTG
CAGCATTTACAGAGAGTGCAGTAGAGCTATATGAACTGCTGGGGAAAGGTGGTTCAGTAAAACAAGTTTC
ATAATCAGATGTATAGTATATAATCATATATTTGAATAAAAACATGAACATATATGCTTGCGTGTGTGTG
AAAGGACAGTTACATATGAGCAGTAGCCTTGGAAGGACAGAGAAAAAAATAATTATTTTAATTTTGCATT
TTTATGTACCATTCAACTTCTCAAAATGAAGATCTATTACCTCAATTACTTTTTTCAAGTGGCTCTCGGG
GAGAAGTTTAATAGTAAAATAATCTGAATTTTGCAGTTCCTGGTATTATGCAATTGTGTATTTTAAGGTC
TAAGGAAAGTATGCCCAGATAATTCTCCAAAGGTCCCAGCTAGATTCTGTTAATATCAAGAAGGATTTAG
AAGTAGAAGAGACCCCTTCTGTGTTTAACAGACAAAAAGTTATCCTTGAATGTGAAGGAAAAAGTGCCAT
TGGGTGGAAAAGGCTGGGAAGGATGAACAGAAGTTGAATGGAATGTTCCCTTGTAGAACACCATGGTTCC
TCTTCTCATCTACGTCACTGTAACGCCAGCATGTGCACTTCCACATGCCAGCGAGCAGTAATGACAGCAC
GCTTTCAGTAAAGCCAGGACAGCTGTGGCTGACATCATCTTCCTTCTTCCCCCAGGGACGAACCTAGAAG
TGTGGCACTGTTCCTCTGTAGTACCAGGCAGCCTATGACTGAGGCTCAGGGCTGTAATCTGGCCTGGCCT
TAAATCCCCCTCCTTGGTCTCAAAAGGTTAAGACATCATTTGTTCTCTGTGCTGCTCCATCAGCAGATAG
GGACCACCTAGGACCTCCGGGTGTTTCCTTCCCAGATCAAGTCATTTAAATAAGTGCAAACTGGGTGCCT
GCTAAGAGCCAGCAGTTTTGGTATAGAGCCAGACCTTCCCTATGCCTACACCTGAAAAATGAATGATTAC
ATTGTACAATGTATGCTGTGGGACTGTCCAAAGTATCAGAGCTGAATAAGCTTAGATATGGTGCAATCAA
GTGAGTGAGTCAGCTCTGAAGTGGAGCTCTTTGTCAGGACCTCTTGTGTTTCCAGTGGACTCACCTTTCT
CCCCTTCCATCCTTTAAGGGACTGGAGGGAGCTGCCCAAGCTGCCTGGCCAGATGTCTGTGGACTAAGTG
TGACTGATGGATATAGGGGACTGATCCTACTTGTATCTGACGAAGAATATTGAATGATGTTAGAGAAAAT
CCTAAATGGTGCCTCTATTCAGATGTAATTATTCTTACCAGCAGATTCTACTTTCTGAGAAGCTAAAATT
AGAAATTAAATTTGGTAGGCTAGGGTGACATGTCCTCAAACCCGCTAAGGCAGGGATGTGAAGCAGGAGG
ATGTCAGACAGGAGCCTGGGGCACAGCAATGGACACAGTAGGCCTGGGATCATTCATTCAACAGTTGACC
AGTGCCTCCCATGAGCCAAGTACTGTTCAGGGATGGGGAATACAGAGGTGCATACTATAATCTCTTTAAA
AATAACGTGTTCGTTTGTATTTACTGCTCTTATCCATACAGCCTTCTTATTAGTACATATGTACAGAGGA
ATGTCTTAAATATTTATCAGATACTATAGGTAGAAAAATAGAGGTGATTTGTGGCTTTCATTATTGCTTG
AGTTTTTAATATAATAAGCATGTGTTAAATTCTGTTTTTAAAAATCCTCTAAACGTTTTTTTAAACAAAG
CCATAGCAGGGGAATCCCATGATTGGTATCCCTAGGTCTGAGGTATGTTCCATTGTACATTGGAGCTTTG
GGGAGCGGATGGAAGAAGGTGTCTGGTGAATGGGACATTTTAGTTTATGGAAGAGAAGAGAAAAATTCCC
TGACTACAACTGGTTTCATTGTAACTTTCCATCTGCTATTGGAATCAAGAACTAAAAACTTATCAGCAGG
CAGCAGTCAGTATCGCATGTCCTTCCTCTGCATTCGTGCCCACGGAGCTCCTGATGGAGATGGGTGAGTA
CAGGGAAGCAACTAATCTCACCCCTCCTGCTCATTCCTGAGAATGGGAGTGCTAACTTCTCACTGAGTGT
GGGAGCTGTGCACATTTCTTCTGCCCAGGAAACATACTGAAGAAAAAAAGTCTCTTTTCTTGAACCTTTT
TTCTTCCTTTCCCAACTTCACCACCACGGCAGCCCTCTTCATTCACATAGCTCTGACCAAATATCCTCAG
CGAGTTAAGACAGTTACGGTTGGAACTCTCCGTGTCTGGCTCTTCCTTCTTCCCTGCATCTTTGGTCCCC
AGTCAGGAGGTCTAATGGTAATATCCAGTGATTTTTCTAAAGAGGAATCAGTGGTTATATTATACAAGGG
GTGTGTGCGTGTGTTTTGGGTGGTGAATACAGAGCAGCGGTTAGGACCATAAGAAATAAGAGAAATGGAA
TGTGGCATGACCGCTGCCAGTTCTGATATTTTTGAAATTGGTAATTTAAAATAAAGTAGTTGGTTTACTT
ACTTAAGCCTCACATCTTAACCGTCCTTCCTTGATCTGGAGTTCCTATCGCCTACCTTTATCAATTAAAA
ATGCCTTGAAAATGAATCCTACTATGTTAAAGCATACGGTTAAGTAGATAGAAGCCCAATTGCCTGGGAT
GAAGTCCCAAGTCTGCTCATTACTATATATCCTTGGGGAGGTTACTCAACCCTGCTTCAGTTTCCCCTCT
GTAAAATTAGAAAATGAGTCAGTGTGAGAATTAAACAAATTAATACATTAGGCAGGGCGTGGTGGCTTGT
GCCTGTAATCCCACCACTCTGGGGGGCTGAAGCAGGAGGATCACTTGAGCCCAGGAGCTCAAGACCAGCC
CAGGCAGCAGAGAGAGACTGTGTCTCTACAAAAATAAAAATAAAAAAACTACCTGGGCATGGTGTTTGTG
CCTGTAGTCCCAGCTATTTGGGAGGCTGAAGCAGGAGGATCACTTGAGCCCAGGAGTTCCAGGTTACAGT
GAGCCCTATTGTCACTGCACTCCAGCCTGGGCAACAGAGTGAGACCCTGCCTGAAAAAAAAAATTAAAAG
TATTTAGAATGATGCTTGGCACCAGGAAGTGCTCATTAACATTAGAAACTATCTTCATGCCCCACTGTCT
TCCCCATACACCATAGTCTTGCTTCCATCCCCACACTGCCCCATCCCTTGCTTATCCCCTTGAGCTCAGA
CTCATTCAAAGCCTTGTCAAAGGAGCCTCTCTGCTACAGAAGATGCTACTGACCACTTATAGGACATGTC
TGTTTTACTCCTGTGCCACTGACTCTTCCTTCTTAGGCTTTTTTGTGGGTTCCTTTCCTCATTCTTCATG
TTCTCCATGATTTTAATGACCACTTATTTATTCCTGACTCCCAAATGAAAATCTAGTATATACTTGTGGA
ACTTTATTTGTGTTTACTCATCACTTGCTTGACATAAGCTTTTAGATTTCCCAGAAGCACCTAAAACTCA
ACATATAGAAAAGAGACAATTTTCATTCTGGCTACTCTTACGTTGGATCCACAGCCCCAAGCCCTCTCCC
GTTGAGGTCCCTAATTCATTTAATGGCTTTCTCATCTTCCTAGTCACCCACACCCACCACCTAGGATGCA
GCCTTGATAACATTCCTTTTACTTAATTCACAATATCCAACTAATCACATCCTACGTATTTTAACTCTCA
GACATCTCTCAAATTTGTGCTCTCATTTTCATACCTATTTCTGTCTCTGTATTAGACTCTGAGCATCCTT
TGCCTAAATACTGCATCTTTTGCCTAAATGCTCTCAGCTGGTCTCTCTGTCTGAAGTTTTTTTTTTCCTC
TCAAGTCATAGTCCTCCATAGATCTGTCAATTATCTATGTCACCCCAAATGAAACTTCTACACTTGATCT
TAGCCAAAAGGCCGAGAAGCGATCCCCAAATGAAACTTCTTATTGCATTCTGGACAAACTCTTAAGTTCC
TCAACATAGCACAGAAAATCCCTTCTGGTCTGATTCCTGCCAACCTTTCTAGCTTCATCTCCTGTCACTC
CTACTTAAATTACTGCTCTAATCAATTTTTATAGATTTTATAATTGATGATTTGGCATCTGTTGATCACT
AGGCCAAACTAACAGCCAACATTGTTTACATTTCCCCTGTGGCCTGGCTTTTGAGGGTGTGCCTAAATCA
TATTGCAAATCTTCCTAATACAACCCTTAACATCTGTGTTTCGCTTCTTGCCCAATCAAAAACATCTCTA
TCTAGCTACTCGCTGACACATTAGTAATAAAGGAAGAGTCCCAGTTCCTTTTTTTTTTTTCCTTTTTTTG
GAGGCAGGGTCTTGCTCTGTTGCCCAGGCTGGAGTGCAGTGGCATGTGATCACAGCTCACGGTAACCTGG
AATTCCTGGGCTCAAGCGCTCCTGCCTCAGTCTCCCAAGTAGCTGAGACTGCAGGCATATGCCACCATGC
CTGGCTAATTATTTTTTAATTAAAGAAAATGTTTTAGGCCGAGGTGGGTGGATCACGAGGTTAGGAGATC
GAGACCATCCTGGCTAACATGGTGAAACCCCGTCTCTACTAAAAATACAAAAAATTAGCCGGGCATGGTG
GCAGGCGCCTGTAGTCCCAGCTACTCGGGAGGCTGAGGCAGGAGAATGGCGTGAACCCGGGAGGCGGAGC
TTGCAGTGAGCCGAGATCGCACCACTGCACTCCAGCCTGGGCAACAGAGCGAGACTCTGTCTCAAAAAAA
AAAAAAAAAAAAAAGAAAAAAGAAAATGTTTTTTGCAGAGACAGAGTCTCACTATGTTGCCCAGGCTGGT
CTTGAATTCTTGGCCTCAAGCAATCCTCCTGCCTTGGCCTCCCAAAGCGCTGGGATTAATAGCTGTGAGT
CACCGGGTCCTCCCCCAGTTCCTCTCTTTTTCCTTGTCCCTGTGCATGGTGAGGTTTTGTGTGGCCCTGA
GTGGTATCAAGCTAAATAACAAGCAGAGAGGGACGCTCTAAAAGAAAATAATATTTATTCTGGAATAGGC
ATTGCAATGGGACTACGCATGCCATAGTCAACTATGTGCATATTCAGGGGGGTGTAAAGGAAGACAAAGA
TTTTTAAAGAAAAAATGAGTCAGATTCCATAATTGTTTTAAGATAATTATCCTTGGCTACAAGGATCAAA
TGGCAAGGATGGCATCAGTACTAGGTTGGACAGGGAGTTGCTGGGTAGCCGTCCTAACAGATGTATTTTT
TTGTGTGTAAGGTTGCGATGGCCTTTGTGCAAGTCTGTGGTTTTTGCAGTCTTTTGTGACAGTTTTTGTC
ATCAGGCATGGGTGCCTGAGAACCCTCCCTCCATGGCCTTTCACCAGCTCCATTTTTCTGATTAAAAAAA
AAAATACAAGTGACTCCATTTTGATGCTGACAACTTTTTCAATGGCAATGTGGAACTGTAATAAACTTTT
TTCAATCTTTCAGTGACACTGACATCTTCATGTCTCTACTCAGCCATACAATTAAATTAAATAATGTGTA
CATTTTAAAACAATGACAGCTGTTTAATGACAGAGACTGTGAACTGGGACCCTCTAGGCTGGCCACTTTT
GGTGTTTTATTTGGGCCACAAGTTTTTGAATGCTTTCAATTACCTACAGAAAATTTCAAAAGTGGAAAAT
TTCCTATAAAAATCTGCCTTTATTGCTTCTCTTGAAAACTGGAAGAACCGGCCACCCAGGTCCCATAACA
CCTACCTGGCTGAATAGGGTCGGCCCTACTTTCAGCAGAAATACCTCCTGCAGTTTTCAACAGCCCCAGC
TCTCCTGGGCGTTGATTTTCCTAGTTGCTTCCTTTAATGCAGACATTTGAGTTTGCAGCCCTAGATTGAC
AGTGTAGGGGCACTGAATTACTTAGGGTTCCCACATACATCGTTTCTTACACTCATTTTCTTCTGCACAG
CACCTTTTTTTCCTTTAACCACTCGCAGATGCTAACTCATTCTTCAGGACTCAATTCCAATGTCCAGAAG
CTTTTCTCTGAACTCATGATGGACTCCGCGTCCCATTATGTATTCCCACATCGCTCCGTACATCCATCTG
TCACATCCCTTGTCACATTAAATTCAGATTAAATGTTTGTAGGATGCTTGAGTTCTTCACAAGTCTCACG
TCACTTAGCGACGGTCGGGAACTCCTCAGTGGTAGTTTCGGGAGCCATTCATTCATTTTATTCATTTCAT
CATTCTTTCAACAGTCATAACGTAGGTGACGACGACTGACTCATCTCTTAAAAGATGTGTGTGTCCCTCG
ACAAATAACCTGTCTGCCCCTATCGTTCTGTAGGAGGACGGAGTCCCAGAGAACTACAACTCCCATCAAG
CACTTGGGGGATCGCCGCGGCTGAGGGAGAGACTATGGCTTAGGAACCACCATTCGCGTGAGGCTCTGCT
CCCCGCGCCTGCGCAGAGTGCAGGGCCACGTCGCTTTTGCTGTACCGGGGACCACGCGTCTCATCCATGG
CTTCCGCGGACTCGCGCCGGGTGGCAGATGGCGGCGGTGCCGGGGGCACCTTCCAGCCCTACCTAGACAC
CTTGCGGCAGGAGCTGCAGCAGACGGACCCAACGCTGTTGTCAGTAGTGGTGGCGGTTCTTGCGGTGCTG
CTGACGCTAGGTAAAAGGCGGCCGGTGGTCATGGCGGGTTTGGGGCGGGCAGAGGTCCGGGCTTTGGCTG
CACCGCTGCAGGCCGGGGACGCGGGGCTGAGAGGGCGCCTTGAGGGCATCAGGAGGGTGAGACCCACCCA
GTCTACACCCCACCCTCTCTCCTGAAGCAGCGGCAGCAGCTGGGCGTTAAGGGGGATGCCGGGCAACCCC
CGGAGTTAACGTCCTGGTCCTTGGGGCGCAGATTGCTCTTCGTCATCTGCCCTGTTACGCTTGAGCGCGC
TGTTCCTCGCCTTCCGCTGTTCTCACTGCAAAGACTCAGGGTCTTGACACCAACTTTCAGCCTCCCGTGT
TTGCGTGCGGGCGCTGGGATACCAAGGTAGTGAGATAGCACCTGAGTCCCAGTCAGAGTAAGGACTGCAA
AGAAAAGTTGACAGTTGACAGTGCCTGGCTCTCAGTGGATCCCTAACAACAGCAATAGTAACCATTATGA
TAAAAGTCAGTTCCAGGTGAATGAGGTGTTTCGTCACAGACTTCTGTGAATTTCCCCACCCCAGCCATGC
ACATATACTGATTCCCAAGGCGTAATTTTTGTTGTTTTTCTCTGTCTATTCCACAGTCTTCTGGAAGTTA
ATCCGGAGCAGAAGGAGCAGTCAGAGAGCTGTTCTTCTTGTTGGCCTTTGTGATTCCGGGAAAACGTTGC
TCTTTGTCAGGGTAAATGATTTCATTGACACCCCTGTTAAGCTTAATAGAAAATTTTATAGATCCCAGTA
TTCCTGTCATCTCACGGTTTATTTTGTAAAAGAAGCTGATGCTGTTAAATTTGGAAGTTAATTCTTGACT
TACTTGGGAGAACAAAAAGACTCGTAGAAACCCATAATTGAGAAATATTGGTCATTTCTCCTTTTTTTTT
TCTGTTTGCCCTTGCCAGATGCTGATATTTAGTCTTTATCACATTCAAGGATTTTATTTAATTAGTTTCA
TTCCAGAATAGCAGAAGGCATAGAAGCTAGTGTCCTACAGTTTATAATTCCTTCGTTAACAAATTCTTAG
GACAGTTTATCGAAGACACTTTTTCACAGGGTGATCCTTCTTTGACATAGTGGGCTAGTTAGGCTTCTTT
TTACTAATATTTATTTTTAATACATTTAGTATTTTTAACAGTGTATTTTAATGTGGTGAATAGGAGAGGT
TTTCTGCTTTTTAACTCTTCTTTTTGAGAGTATAAATTATTTCCCTTCCATTAAAGAAATACCTCCATTT
TTTTTTTTTTTTTTTTTTTGAGGGAGTGTCTCACTCCAATGCCCAGGCTGGAGTGCAGTGGCGAGATCTC
TGCTCATTGCAGCCTTGACCTCTGGGACTCAGATGATTCTCCCACCTCAGCCTCCGAGTAGCTGGGACTA
CAGGCGTGCAACACTACGCCCGGCTGATTTTTTATATTTTTTGTAGAGATGAGATTTTGCCATGTTGCCC
AGGCTTCAAATCATTTTTGTTGGTTAAAAATCTTTACAGAAGCTTGGCAAATTTGGCCACTAACTGTCTT
TTGAGAATAATGTTGTTTTTATTCCACTGAGGAGTAAAATATGCAATTAATTAGATTTTTTTCTACAGGT
AAAAAAAATCAATATCGTCTTTTTCACCTGTCGGAAGCAGCATTCATTTACTTAACCTTACACCTGGGAG
ACTTAGAATAATATAACTCAATTTAGGTGTGCTATTAAAATGTTGAATATCACCCATCTTGTTTTTTTTA
CAGTTGTTAACAGGCCTTTATAGAGACACTCAGACGTCCATTACTGACAGCTGTGCTGTATACAGAGTCA
ACAATAACAGGGTAAGATGTTTGTGGAGTTTTGGAGTCTGACAGTCTTACTTTACTGTGGTGTGTCAGTT
AAGGACATTTTTAGGATGAGTTCATCTGAGGATGTAAGTACCATTTGTAGCTTATTTTTATGGAGAAACA
TATTCTTTGTGACAAATTCTCTTGACAATCTGTACAGTAGATTTAATCATGCCCTCCTCTGCATTGTTGT
ACCTTAATGTACAGTAATGTTATATCACATTTTATTCTTATTTTTTGTTTCTGTGTCTTCTTTCCAACTT
TACAATGAGTTCTTAAGAGTGGGCATTAAACCTTTTAAGTTTTGAATAGGTAATACATGCACATGGGACA
AAAATTCAAAAGGTTAGAAAAGATATTTGGTGAAAAGTAATTTTTCCTTTCCTTTCCCCACTACCTAGTT
TTCTCCTCAGAAGCAGTGACTTACTTTTTTTTGTATGTAGTCTTCCGGATGTTCTGTGCATATACAAACA
TGTCTGTATATCCTTTATTGTTGTTTTTTTTTAAATGCTGTTCTGCCCATTATTTTTCTCATACGGCTGA
TACAACTTGGGCTTTTCTTATTGTCCTACATTTGTATACATAGTACCATCTGGTTGGTTTATGAGCTGCA
TAGTACTCCACTCTGTTGCTATACCATAAAATTAAATTCTTACTTAATCTGGACCGTGTTAATAGACATT
TAGTTTTGTTATTATAACCTTTGCTTTTACAAACAGTGCTGCAATGGATATCTTACAGAGTATATATGAG
TGTATTTCAAATATAAGGAATCATGGGGCCTGGCTTGGTGGCTCACGCCTGTAATCCCAGCACTTTGGGA
GACCAAGGTAGGCCGATCACTTGAGGTCAGGAGTTCAAGACCAGCCTGGCCAACATGATGAAATCCTGTC
TCTACTAAAAATACAAAAATTAGCCGGGTGTGGTGGTGGGCGCCTGTAACCCAGCTACTCGGGAGGCTGA
GGCATGAGAATCATTTTAACCCGGGAGGTGGAGGTGGCAGTGAGCCAAGATTGCGCCACTGCACTCCAGC
CTGGGCAATAGAGCGAGACTAAGTCTCAAAAAAAAAAAAAAAATATAAGGAATCATGGGAAAGACATTTT
ACATACCTCTGTAACTTCAGAATGTAGACAGTGACTACCAAACCGATTGTAATGCATAAGTTTGTTTGTT
TGTTTTTGAGACAGGAGTCTCACTCTGTTGCCCAGGCTGGAGTGCAGTGGCATGATCTTGGCTCACTGCA
ACCTCTGCCTCCCGAGTTGAAGCGATTCTCCTGCCTCAGCCTCCTGAGTAGCTGGGATTACAGGCGCCCA
CCACCATGCCTGGCTAATTTTTGTATTTTTAGTAGAGATGGGGTTTCACCATGTTGGCCAGGCTGGTCTT
GAACTCCTGACCTCAAGTGATCCGCCCACCTCAGCTTCCCAAATTGCTGGGATTACAGGCGTGAGCCACT
GCACCCAGCCATGTAATAAGTTTCGGTGAGTGAGTGGAGTGAGGGCTCGTTGGAGGATGTGGATGGATAG
ATGGATGAATTAGAATTGTGGTTTGAGACCTTTTCTTCTTCTCTTTGTCTTCTTTCCCCTTTCTCATGCC
TCCAGAATTAAAGATTGTAAAGAAAAATAAAGGGACATGTTTTTAAATATCTTAGCGATATCTTTGTTTT
TTTTTTCAATGATGACACTCTTTGTGGCCCAGACCTTTTTAAACTCCCAAGGATTCAGATTTTGAAATTC
CAGGTTTGCAAGATCATCTAGTACCTGCACTAGATTTTTAACTTAGGATACTCCAGGATATGCTTTAAAT
CTGTACCTTCTAATATGTAGCCACTGGCCACATGTGACTGTTGAGCACCTAAACTAGGACTAGTCCAAAT
TGAGGCATGCTGTAAGTGTGAAGTACACACCAGATCTTGAAGACTTAGTATGGAAAAAAAGAACGTAAAG
TATCATTAATAATTTCTTTTTTTATTACATTTTAAAAGATAATATTTTGGATATATTAGATTAAATAACT
TAAAATTAATTTTACCAATTTCTTTTTACTTTTTTATTATGGTTACTGGAATATTTAAAATTACATATGT
GGCTTCTGTTATTCTATATTTCTACTATATTTCTATTCTATCAATATTTCTACTGAATATATAGAGCATT
TTTCCCTTCCCTCTTCACTCTTTCTCCTACCCCCTTACGTTTTCGATCTAATCTCTTTAGATAGTAATAT
ACCTAGTAATGTATCTTCCAAATTGCTTAGGGTGTGTGGTATAGTGCTGCTTTTGAAATGGAGCAGTTAA
GTCCCAACCTGGGATCTCCAGACTCTTAACAGTACTTAAAAAAAAAAGAGAGGGACTAATAAAAAACATA
TTTGTCTATAAAGAAATGCACAGGCTATGTGAAAGGTAAGGTCATAATAAACCCAGCTGGAATTGTGTTA
AATCTGTGCAGGATACTGATTGCCTGCTTCTGAACTGTGGGTATGGTTGGCTGTGGATAATGTAGAACAT
GTAAGAAATGATGGTCTGCTGCATGTACCAGGCCACATCTAAGAGTCTTATTGTTGAGCACAGCCACGTT
TACACTGAATATAAACTTTATTCACCATTCCAGGCCTTGACCTTATATTCAGGAATGGCAGCCTGGCATG
GTGAATAGAACTTATTAGGGTGCATCGTAGATTTGCTCAGTAGGGGCTCAGGAATTGACACAAATGCTGA
CGGAGTTGGAACAAGTAAATTATATGTCTGGAAGATAAATATTTAAATAATTAGATTAAGGGTGGAAATG
ATAAAAGTGTACTTTGTTATAAAGATTGGAGATCCCAGTAAGAGTAATATGCTCTATGAAAAATTGTAAG
TTCTTATATTACATTATTAGTTTATGAGTACTTGTTACTGTTTTCACATTTTTGCTTATACTCATACAGT
ACTCCTACTTTGCTATACTCACACTGGTTTATCTCCCAAGCCTCAGGTAGATCATGCTTCCCTGACTCCC
CCAGACAGGTTTTTCCTGTACCCTCAAAACATTTATCAGTGTTCTCATTTTATATTTATGTGTAATTTTA
CATTATGTTCACCTTTCTCATAAATTTTGCCAGATCAGGAACCGTGTCTTTGGCCACTGTTACATCCCCA
GAACGTTGACTAGTGTTTTATGAGTAGAAGATGCTTTGTGAACATTTGTTTGGTTAATTAGGTACCAGTT
TGGTAGCCAATATATGATACTAAAGGTTTATATTGTGAACGTGGAACTGTATTGAAACGTTAATGTTATT
GCTGCCATCCCCAGGGCAATAGTCTGACCTTGATTGACCTTCCCGGCCATGAGAGTTTGAGGCTTCAGTT
CTTAGAGCGGTTTAAGTCTTCAGCCAGGTAAGAAGGAAAGAAGTGAAGTGGGCTTGTCTAGGTCTGTATC
TGTATATCAAAGCCACTCATGTGATTTGCTCTGGTGGTGTTTGGGAGGCAGCATGGTATCCTGTGGTAGA
CCTTGAGGTGACCTTGGGGTCAGCCAGTTCTGGGTTGCAAGTCCACCTTCACCTGGATGATGAGGATTTT
ATGGGATTAAAATGCTTAAAAAGTGTTTTTTAGTGTTTAGGAAATGTTAACCCTTCTTGTCATTGTTACT
AAATGTTTGCATTTATTCTGAAGGTGAATTTAATAATGTATATGACTATTAAAATCTGAAAAAAGAATTT
TAAAGCTGGGATGAATCCTAGCAGTTTTTAAATGCCAACATCATTTATATATATAGTGTTTTTTTGTTTT
TTTTTTTTGAGATGGAGTCTCACTCTGTTGTCCTGGCTGGAGTGCAGTGGTGTGATCTCGGCTCACTGCA
ACCTCCACCTCCTGGGTTCAAGTGATTCTCCTGCCTCAGCCTCCTGAGTAGCTGGGATTACAGGCACGCA
CCACCACACCCTGCTAATTTTTCATAATTTTAGTAGAGATGGGGTTTCACCATGTTGGCCAGGCTTGTCT
CGAACTCCTGACCTCATGATCCGCTGGCCTCAGCCTCCCAAAGTGCTGGAATTACAGGCGTGAGCCACTG
CACCTGGCCCATATATATTCTCAAATTACGTAAAATTGATGTTTCAAGAAGTACAGAACAATATTTCCAT
ATTTCTTTTAGTGTGTGCTCTGGTGTTACTGACTCTTAAGTTCTTCCCTAAAAAGTCTTATGCTGCAGTT
TCAGATGCTTCTTTTTTGGTCTCTAACATTAATAAGAACTGAAGAGGAAAATCAGTATGCCACATTTCAC
TGATTTGAAGACACATTTTAATATCTCTGAATTTAGAATATATCTTATAGTTGATGGTGTCATAGTTTAA
TTGGCAGTATTTTCTCTTAGCGGTCCCTAAAATAATGTCTTTAATTGGCAGCATTTTAGTTTTGATGGAA
TGAAGTAGTAGATTCTTTGCCTTTTATTGAAGATGTCTAGACTGAAATTTCATTATTGCATCTTTGCCCA
CAAGATGGTGGTGATGAACAATTTGTCACAGATAAGAAAATTCCTTGGACAATTGAGACAAATCTAGAGC
TGGTAAATTTTGCCATAATTGGGTTTTTATTTCCAATTAAATGTTTTTTCTTTTTCTATTGCCAGTTCTA
AATATTTTATGATTTGCAGTATAACTACTCTGTGATTCATGTATTTTGGGTAAATAAAACATGCAAAATA
TGAAGATAAAACTTAGTTCAAATAAATTATAATCATGATAACATGCAAGTTGAAAAGACATTTACTATAT
TGGTATGTGACTTTTTTTTAATCCTACTTTCTGGCTTCGCCAAGTTTCCCTAGTGGCTATTTTCCCTCTC
CTGATTTGAACATATGCTGTTGCTGTTCTTATCATGGTTCCCCTCCCCCATCTTTTAAACATTGCCTATT
TGATTGTCTGAATCCAATAATATCAGTTTCCTTTTCCTGAACCTTAAACACTTTAACTTTCATCTTCCTC
ACATCTTCCTTTTATTTATGCTCCTTTTTAACCCCCATCCATACTTTTTTTTCCTCTTACATTCAGTGAT
GAGAATTACCAGGATGCTTATGGTCTTTTGCTCCCCATTGCTTCTTGAATTTTACTTCTTCCCTTTAGAT
TCAGTTTTCCCTCACTGAGTATATCTTTTAGAAGTGTTTCCAGAGAGGGTGATGAGTAGTCAAATGTTTT
CAGTCTTTGTTCATTTGTAACTCTATTTGGCCAGCATTTTGGAATGTCTCTTTTAGCTGAGTGCAGAGTC
CTGGGTGGCAGCCGCATCACTCCTGACCTCATCCATCTGTTGCAGATGAGAATGTTTTTGCCAGTCAGTC
TAATTGTCATTTCACTGTAGTAAGTCTGCCTGATTTGACCTTCTATCCAGGGATAGATTTTCTTCTGTTC
AAGGATGGATTTAGCTTTATCATTCTTGGAATTCAGTTGTGCTATTCCAAACCAAAGATTCTCCTCAGTT
TTGGAAAATTCTCACCATCGTTTCTCCAGGTAGTGCTGTTTCCCCATGATCATTTCTCACACTCTGGAAT
TCTTATGAATGTTATTGAACCTTATTATTTTTGCCTTTCTTGTTTCCTCTCTATCGTATCTTCCAGATCT
TTCTACTTCGCATATTGTAAGATTCCCTCAGATTTGTTTTCTAGTTTATTACATTATTTTCAGCTGAGCA
TGATCTCTGCTTAACTTTTCCATTGATTTATTAATATCATTTACTATATTTGTCTAAAATACTTACCTTT
TCAAACCAGCCTGTTTCTTTTTATACTATTCTATTTTTTATTGTAGTTTGTAGTATTTTCTTAAATAATT
TTAAACATTTACTTTATAGATAGCTTTATTATCTTAGTTTTGGGGTGCTGATTATTCTCTTTGGGGTACC
AGTTATTCTCCCTCATAATTATTTTATTCTGTGCCTTGTAATTTTTGCTCCAGAACCTTTCTTCAAGAGT
GACACATCATTGATATTGTGGTGGTTCTTTAATCCCGTAGGATATGAAAGCCTTGCTCCATAAGCGGTTC
ATAGTTCCTTCTGTTGGGGCCATAGGGCTTCAATAAGTCTGGCCCAATTTTTATGTAAGCCTTTCCCCTT
GGGGGTCTTACACCTGGAGAGAGTATAAATTCATACCCTATATCTGTGTGAGGCAGTGGAGGCCCGCTGT
TTCTAAGGGAACTTTTTTTGCAAGCCCCGACCTCCCTGAGACTATTTTAAGTTGTAGGCTTTGTGCAGGG
CATTCAGTTCTAGCTCCCCAGCTGCATGTTGGCCATTGCATGTCTCTTATCTCCACCTGGGCATTCAAAC
CCTTGTCCATAAGGCTTGTATTTTTTTTTTTTTTTTTGAGACGGAGTCTCGCTCTGTTGCCCAGGCTGGA
GTGCAGTGGCGCGATCTTGGCTCGCTGCAAGCTCTGCCTCCCAGGTTTACGCCATTCTCCTGCCTCAGTC
CCCTGAGTAGCTGGGACAACAGGCACCCGCCATCACACCAAGCTAATTTTTTGTATTTTTAGGAGAGACA
GGGTTTCGCCGTGTTAGCCAGGATGGTCTCGATCTCCTGACCTCGTGATCCGCCCGCCTCGGCTTCCCAA
AGTGCTGGGATTACAGGCGTGAGCCACCGCGCCTGGCCGGTTTTTTTGTTTTTTTGTTTTCTTTGAGATG
GAGTTTCGCTTTGTCACCCAGGCTGGAGTGCAGTGGCATGATCTCAGTTCACTGCAACCTTCGCCTTCTG
GGTTCAAGTAACTCTTCTGCCTCAGACTCTCAAGTAGCTGGGATTACAGGCTCCCGCCACCATATCTGGC
TAATTGTTATATTTTTAGTAGAGATTGGGTTTCATCATGTTGCCCAGACTTGTCTCGAACTCCTGACCTC
AAGTGATCTGCCTGTCTCGGCCCCCCAAAGTGCTGGGATTACAGGCGTGAGCCACCGCACCCGGCCCCCT
AAGACCTGTTGTCTGCAGTTTCCCTGGGCTGCTGCACTTTAGCTTTGATATCTCTTTGTTTCTGTCACAT
GAGGAGTCCCACTATGGCTGCCTTAGTTCAGGCCCTACCTGGTCACTGTGCTTCTAGTTCAAGCGCCCTC
TAAGATTGCTTTGTCTTCCATTTAGGCACCAATATTCTTCATAAGACAGAAAAGCATGAACTCCACAGGT
CATTGTGTCACGCCTCACTGTCTGACTTGGTTCTCCTTCATTTCCCCATCTCCCTGTGTACCAGCTTACC
TTGACTTCCCCAGGGAATGTGTTTCACGTATTTGTGGCTTGAACATACTGTAGGCTGAGTATCCCTTATC
CAAAATGCTTGGAACCAGAAGTGTTTTGGATTTTAGACTTTGGATTTTTGGATTGGGGATACTCAACCTG
TACTTTCCAGACAGCCTGTGCCCCAATTTTTGGTCTAGCTAAGATTCAACTCAACTGTTACATTCTCCTT
AAAGTTGCCTTTGACCTGGTCTCATTTAAATGATCTTTCTCTTTATTCCTGTTACACATGTGCATAGTTT
TGTCTTGGCATTTATCATATGGTTCTCTATATGATGATTTGTCTTGGAGGACAGGCATCATTTCTTACTG
TCTTTTTTCAGCTTCAGTCATTGATACACAGTAGCACTCAATAGTTCCTTGTTAAATGAGGATTTATGTT
ATATGATAACATATGCACAGACCTGCATGTGTGTCTGCTGAGTGTTAATCACCAAGATTGACTTTGAAGA
AGTTCAGGATAGTTTTTCAAGATAATGATGTCCTGTTACACGTTCACATGCCAGTTTTTCTTGTTTTCTC
CCTCCAGGGCTATTGTGTTTGTTGTGGATAGTGCAGCATTCCAGCGAGAGGTGAAAGATGTGGCTGAGTT
TCTGTATCAAGTCCTCATTGACAGTATGGGTCTGAAGAATACACCATCATTCTTAATAGCCTGCAATAAG
CAAGGTGCCATCATGTTTTCTTGCAATAATAATTGAGTTTTTTGGGGATTGCTGCTACTAAGAATTATTT
CCATTATTTACAGTTGTTATTATTGAGGATGAGATACAATTGCTGTAAAGAACTATAAATTGAAGGATTT
TTAATCTTAAAATTTATTTCTACTCCTACCTTTTCACCAGTCTTCTAACCAGAAGACCAAGGAATGATAA
CCAAGTGACTGCTAACTGATTTTTCTTTGATACAGTGTTTTTTCTGATTATAAATTATTTTACTTTACCA
AGTTAAGTTCATCAGATTGACAATATGTGATATCAGATGCACAGTTTTGCAGGGTGGAGTTTCTGCTTTC
AAACAAGTTTACTGTACAGCACATTTTATCAAGGGAAGTTTGCTGAAGTTGTTTTCTTTTAACCTGATAA
CCATTGAAAACTTTTCTAGTAATCCCCAATAAAACTGGGCTTCAGTTCCGTTACCTGTACAATAAGACAG
ACTAGTGGATCTCTTCAGGTCTCTTCCAGATCTGAAATTCTGATTCTATGAAGAGTTCAAGGCATTTCTC
AGAAGTGACCAGATAATATTGATAATGCCTTATTGGGAATGCAATTAGCGTCATTACCTGACCTCTTTAT
TTCCCTGATTGAATATAAGGAAGGGAGTTATTGTTTATTTGCCATGGGCTTTGTGCCAAACCAGAGCTTG
TTTCTTACCTTTAGTACACTTAATGCTTTAAACATACCGTCTTAGGATCAATTGGAAACATGCTAAGTTT
ACTTTAAAATGACAGATAGGGCACTGTCTTTTGGCATGTGAAGGCACTTCTCATAATCACAGCACTGGTA
GGTTTTCTTTCTGTTAAACTGAGTAAACTTATATGTTTTGAATTGAAAGGTCTATAAGGTGTGGAGAACT
TTAGGGAAAGCTAAAGTCAGTTTTAGGGTCACCAGCATAATATGTTTATAAGCATTATCTTGGGAAAGCC
CCTAGTGCAAGTATAAAGCTTACTTTGATAGAGAAGGAACTAGTGATAAAAGGTCTTTTTTTAAAAAAAG
AGAAAAACTTACTGGTTTAAATAGGAATTTTCCTTCTGTGTAAGAAGTCTTGGGGAAAAAACTCATTCTC
GTTTAAACTACAACAGTGTCTTTATTTCTTTACAGATATTGCAATGGCAAAATCAGCAAAGTTAATTCAA
CAGCAGCTGGAGAAAGAACTGTAAGTGTGAAAGAGGCCTGTTGGTTAATTATATATCTTAACACTTAGAC
TGTAAGCAGCATATTCATGTTTCTTTTGTTTGGTTTTATGTGATTATCACAATTATAGACTGAAGATTAG
TGTGATAAATATTTGTTAAATAATTTACAAAATAATGGAATCACAAAAACTTACTAGGGTGCTTATAGAT
ATTTTAAAATTTCATGGAAAGAAGATTTTTTTGAAACCATAAACTTAATTTATTTTACCATTGTTACTAA
ATCATTTATAGTTGAAAGGTTTTAGAAGCTAAAAAAGTTTACATGCCAACTTGAGAACGGTGTTATTTCA
GTGAGTGGAAGTGTTTGTTCACCACTCAATAATGCCTGTGAAGTGGTATTTAAGGATGCATGTAAATAAT
AAAAAATAAAAACTGAGAATCAGGAAAAAAGAAATTAAAACATTTAAAAGCCACTTTGGAAATTATTGTT
GACAGAATAAGAACAGAACACTGAGGAAGACTACAAGTCTTTGATACTACATTATAGCTTCTTAGATTGT
TAAAATACTTGGCAATATTATATATCCTGCTTTGAGTGTTTCAAGGTTTGTAAATTGAGCTATAAGCTTT
TGAATTTTAAGGCATCTAGCATGTCTTCTGCGTTATGCCAATTTGTAAGAGCTAGCCAAAAGCTGGTGTA
GAAGAAATGATCAACATTTATAGTAAAGCAAGTTATGTTTTCTTATTGCTTTTGTGTAAGGCCTTGAAAA
GGATCTGATGAGGAAAAACTGTATAAATTCAACTTTTAGAAACTTTTCTCCCCACTATGACTTACTGACT
CCCTTATTCATTTAAGAAGCACCTGTAGTGCATCTAGTGGATGCCAAGACTGCAGTTGGGAGCAGCTGTA
GGAGGAAATGTGTTCCTGTACTCAGGAGCTTAGAGTCTGGTAGAATCTAGTCAGCTTCGGGCATTGGCAA
ACTCCTGCCTGGGCCTGCAAGCCAAGAGTAAATCGACATTTTTAAAGGGCAGGTAAAAAACAGAAGAAAA
ATATGCGACAAAATATTTAATTTCTGGCTCTTTGCAGAACAATTTTGCCAGCCCTGCCTATGCCATTTTC
AGTGGTTCCTTTCCCGTCTGGAGCTGCGAGTTTATCACCCTGTCCTCCTGTGCTCTTGATGCTCACTCTC
TTGGATTGTATCTGTTGCTGCCATTAGGTTAATAAGGACATTGGAACAATTGGATGGTTGGGTTTTTCTA
AAAATTCTCTTGAAATTGTTGGGAATTGTTTTGGGGAAGCCAAAACTGTCATAATGTTATTTGTGAATCA
GTCTTGGGTTATTTTTAACAGTACAGTCCAAGTCTCCCGTGGTTAAAACACATGTTTTCCATAGGCTGTT
TGCTTTTCACTCTATAGACTTAGAGAAAAACAATACAGAAGCCAATCCTTTTTTAAAAGCATTGAAAGGC
AATGCTTTCTTAAAAGGCAGTGAAACAAAATGTTGACAAATTGTAAAGGTTAACATCAGTTAAAATTCGG
AATCTGACTAATTTTAATCTCAGATTTATGAGAATTAGGCCCTGTTAGCTTAGAGGCATTTCATAGTCTC
TCAATAACACGGTATATTATATTTACATGGCCTTGTGGCAAAAGCTGAATACATGTTTTACTTTTTTCCT
TAAAAAATTTTTATTGTAAAATATCTTACTTATAATAGTATATATGTCACATGCATTAAGCTTAAAAAAT
ATTAAAATGAATACCTATGTACTCACCACCATGCCTAGAAGGCCCCTGTTTCTCCCCAAAAGCTTTTCCC
TCAAGAGGTCAGCAATATCCAGTTTTGTATTGTTTTTTAAAAATACTTTTACAGTGTGTGTGTGTGTGTG
TGTGTGTGTGTGTGTGTGTGTTCCTTCCTAAACAAGGTATTGCTTAGTTTTGCCTGTGGATTCTTCACTA
ATTTTGAAGCAACTTTACAGAACAAGAAATGCTTTATTTTGTAAGAAAGAAGATTGGCAGCATGTATTCC
TCTGCTTCTGGATAGCAGAAAGGGGAAGGGGAGGCCGACAAATGAGTGTTGCTTATGCACCCTTTATTAG
GGCCAGCAGGTGGCAGTAAGGGGACTTACATTGGGAAGGTTTTGGTGGTTAAAGAGGTTGGATAATAGTA
ATTCTGCCCTAGTTAGATATGAGAATCTGGAGTTGGTGGATTTCTAAACTCCATATCCAAATAGACTCAA
GATAAAAATACATACCCTATCTACCCACACTTAACTTTCAGAAACTTATGTTTTTATAACACTTAAAGCA
TGTATTTTAAAAATATATTTTTAGACGGCTTCATTCAGTAGATCCTCTTAGAAGGGGGCCTTGGGCTGAA
AGAAAGTTGGTGTGACCTGGTCTACTGCTGACCTGCCTTCTAGCCCTGTGAGGTCTGACCCCCCCAGCCC
GCCCCACCTACCTCACCTCTCTGTCCAAGAGAGGGACTTATAAATGCAAAGGATTATTCAACAATCTTAA
TAGCATAATTGGCAATTCTATAGTTAAGTTTTAAATGAGTGCTGAAATGTTTAGAAACTAATATGATTTA
ATTGCTGTATAAAAATTTTGCCTCCTGACTTCTTTCCTTTTGCCCCACAGCAACACCTTACGAGTTACCC
GTTCTGCTGCCCCCAGCACACTGGACAGTTCCAGCACTGCCCCTGCTCAGCTGGGGAAGAAAGGCAAAGA
GTTTGAATTCTCACAGTTGCCCCTCAAAGTGGAGTTCCTGGAGTGCAGTGCCAAGGGTGGAAGAGGGGAC
GTGGGCTCTGCTGACATCCAGGACTTGGAGAAATGGCTGGCTAAAATTGCCTGAGAGGCAGCTCTAAAGC
ACAAGACCTGGATGTGTGACACACAGTTTTGGAAAAAGGTCTGTGGTAGTCTGGAGTTGATGAGGAAGGG
GTACAAGATGTGGTTAGAAACATTTCTTTGTTCTGGAAACAAAGTACTGTTGAAACCAGCTTGGAATTTT
TTTTTTTTTTTTTTTTAAGTTCAGTTCTCCCTTATGGCTGCCTTTCAAACAAGTACCTTTTATCTGATGC
CTGTATCTTCCCTTTGTTAAGGTGTAACTTGATGTAGGGTCAAGGTTTTTGTGACAACAGGCAGACTCCA
CACAGAGAGGATATGATGAGAATATGGCCATCACCTGAAAAGTTTTCTTATCTTCTGTGCTTTTGGTCCC
TGGAAACAAATCCGCCTATGTATGAAGCTAGTTGATTTCCAGTTGCACTATTTCCAGTTGCCTCTGAAGT
TCACAGGCAATACATTGTCTAGTCCTTTGCGAATTTCTCTGATTTGTGGGCACAGTTATGAAGTTTCCCC
ACATGTGAAGACAGGTACAAAATAGCAGAGCCAAGCAGACAGTGGGTCTATTCTTCATTAGCTCAGTGAC
TTGTCCACACTCGTCTTAGCACTTACGTTTCAAAAGCTTGTCACAAACCCTTGGAGTCATTCCCAGATAA
TAGAACTGGAAATGATAAATCCCCTAATGCCAAGGGTCTAGTGTGTTCTTAGTGGTTATACTGGGAAGTG
TGTGGAGATTTAGGTGCTGCTCTGCTGCTCTGGATGGCTGAAGGCTCCTGGGCCATCTTCATGTGCTGCT
TGAAGAGCTCCTATTTTGTACTCCTGGCTAGAATGCTGTGGAACAAATACAAAGTGAAAAAAGTTCTCTG
TAGATTTCTGAAGTGCATATTCATTGATGCCAAGAAAAAAAAAAAGTTGCCTTTTTGAAGTGATGTTTTT
TGCTGTCTTCTTAAACACAAGGCTTTTTTGAATGATTAGTATATTTCATGGTAAAGAAAACAGCCTGTCT
GGCTCAAAGCAATTAAATAGAATGTAATGGTGAGTACAAATGAGTGCACATGTCAGGACTCAGGTCTAAC
TCCTTGTCTCCTGAGCCTAAAGATTGCAACATACACAAGAACACACTCCTATTCCTACCCCACACACTCA
GGGACAAGCCCAACTAAAGCTTACAAGGAGACCAGGGTGGCTCTGTCCAGGGGAGAAGCCAGTTATGGAA
CAGTGCATTGAGAGCCATGGTAGGAGAGGCCCACAGTTCTCTGGAGCATGCAGCAGGGGCACCCCACCTG
GCCTTGAGGATCAGGGGGAGTCAAAGGATAAAGCATGGGGCTGATGACGTCTGAGGGAGTGTGATCCTCC
ATGTATGGCCTCTGCCTGCTGTCTCACATGTCCCTTCTGGTGGTCACTTGGGCTCTAGGAGTATACGTCA
CCTCAGACCATCTGGCAGAAATACTCCAGGCTCCTACCCCAAAGCACATGTCAGCCTTGCTGCTGGAGCA
CGAAGACAATGTAAATGAAACATGAAATGGAGGAGTTGTGAGACCCTGACCCTGAGTCCTTACTTGAAAG
CTGCTGCTGGTGTTCTGAGTGTCTTTTGGACTCTTATTTCTTGCCCTTTTCCTTATTAGGCAAGCAGTAA
CTTAGGAAGTAGGTAAGAGCAATAAATGTGACATGTTATGTCATCATAGTAGGAGCTCATGGGAATAAAA
GTCAGTGGCTTGATGCTTCTGTTAGAGGCATGTGTCCCTCTCAGCCTCTTTTATTTTTTTCTGGTTAATA
TCTTACTTTATTGGAGGAAGCAGCACACCAGAAAAAGTGACTGAAGAAGGGCTGCAAGTTTGAGTTTGAT
TCAAGGCCTAAAGAAGGTCTTCCAAAAAAGGATAATTCTATCTGGAACACTGGTCTCAAATGTTAGTGGG
CATCAGAATTACCTGCGATGCTTGTTAAACTGATTTGAGGACCCTACTCTCAGACAATTTGATTCAATAG
CAAGTCTGGTATTGCCTCAGGAATCTGCATGCTTAATAAGTCTTTTGTCAGTCGCATGGCACCCCTAGAG
ATGATCTGGCCTGGAGTGTCACGTGTGCCTTTACTTTGTTTTTAAAGTCTCTTGGGGCACACACCCTGCT
GAGTTTTTCTGACAGGGTCAAGTCAGCAGGCATGGGAACTCTGACCTTGCTTCTTACTCCTGTACTAGTA
GCAGGCATTCCGTTCTTGTGGCTTTGGGCCAGGATGAGGTCATGGTGACTAGTCTTTGGGAACTGGGAAG
GGTTTTGATGGGAGGTCAAATGTGCTCTCTCCACTCAGGTGGTGCCCTTTTGTGGCCCTGAGGGCATTTG
ACTAAAGTAGGCCCATTTCATGAGATGGGCAGGTGTGGCCAGAGTAGAAGGATGGATGTCAGGTCTTGGA
GACGGGCCAACTAGGCACGACTGTATGACATAGATGAGACTTTTGAGCTTGAAACACCTTGGGAACATGG
CAGTGTATGGACACCGAGACCTCCTAGGACAGCAGCTGCCTAATGCAAATGACCCTGTTCCCTGCTAAGG
CTGCAGTGAGATGCCCTCATGGAGGGGCAGCTGTGATGAGTGAGCCCCAGGCACTCTGTTGGTGAATATG
TCCACTTCTGGAATGGAATCTCCCTAGTGGGTATGGACACGGGCAGACCCAGAGGGGTCTAAGCACTGCA
CTGTTTCTTCCTTTGGCTCCTCTCCAGTCCGGGCCTTGGTAGCCTCTCCACTACCAGGTGCCTGACAGTC
TACTGGGGGTTCCTAATCAACAGCAGCTGCTGTTGGTGGGGAGTCCCTGGGGTCTGTCACTTCTTCCCAC
TGCCTCTGTCTCAGTGCCTCCTGGGCTGTCAGTGTTCCCCTGTGGTCCTGCCTTGTATGAAGCGCTGGCC
ATGCTCTGTTGACTTAGATCATTTCAGCCAGTCTATGTTTTTTCTTGTTTTTGAAGTTTTGGGTTCAGCA
CAATTGTCAAAGCTTCAGTTGGCTCATGCCTGTCCTCACCTGAAGGCCATCAGTGGCAATTAAGATGCCT
ATCTCTTTATCTCATCCCTTCACACATTTAAGGAAAGGTGATCACCCACCTACCTTCATTTAAATGCGCA
GGAAAACAATCCCACTTCCCTTCAACTGTAAACCTCGAGAAACTTGACTGCTCACAAGAGCCTTGTACGC
ATTTATCCATTGGGTAAAGGCCACGCCTTGCAGCAGACCATGGAAATACTAAACAAAACGCAATTCCTGC
TTTAGAGGCTAGTAGCCCCATTCTGAGGTTAAGAAACGTGCCCTTTCAGTGTGGTTTCCCTGCTCTCTCA
GTAGTGTGAGCTCCATCACTGCTGCACTTGACTCCTAAGCGCTGTGTGGGCTTGTGGTCAGCTGCCAGCC
ATGCAGCCCCAACGGGACTGCCACTTTTCCACTGGCCTCTGAAGTGCCAGTGTTCCCATGATGCTGATGT
GTGAGGCACATGGCCATGTTCTGTTGACTTGAATATATTGTTTCAAGGGTTTTTTTGTTTTGTCGAGACA
GAGTCTCACTCTGTCGCCCAGGCTGGAGTGGCAGTGGTGCCGTCTCGGCTCACTGCAACCTCTGCCTCCC
GGGTTCAAGTGATTCTTCTGCCTTAGCCTCCCCAAGTAGCTGGGATTACAGGCCTGTGGGACCACTCCTG
GCTAATTTTTAGTAGAGATGAGGTTTCACCATGTTGGCCAGTCTGTTCTCAAACTCCTGGCCTCAATGTC
TCTTCTAATCAAAGATGGCTTCCTTGAGGTGGCAGCAGATTGGAGGGTGTTCTGGAACCTTTATAAGCTT
TAAAAGGAAAGGTAATTAGTGAAGTTGGACTTGAAGAAGAGTGAGATTCCCGGGCAAGGGCAATTTACCT
AATCTTGGCCTTTGTTCCTCTTTGGATTGGTCCCAGGACTGTGCTGGCTTTCTGAGCATCTTTTAGTCTG
GAGATAACTGAGACCTGGAGGGGCCACTCAGGGATGTTCCTAACTGGTGTGGTGTGGGGCTGGGGATGGA
ATATGGCAGCTAGATGTTGTCAAAGGTCATTATAGTTCACCTTAAGTTCTTGCCTTTAAATGGCTTTCTG
AAAATCACCAGAAGCATGAGAGATCCAGTCCCTGTACCCTCTCCCCCCTTCCTAATCCCCTAGCCATGGC
AAGCAGAGTGGGGATGAAGGAATATATCGTACCCCTGACTCAGTTCTGCCTGGAGGCTCCCTTCCCATCA
GCCTTTCAGCAGAATGGAGATTAGGGGAATGCGTGTGGATTTACTCTCATGAGTGTGTCCCATCTTTACC
CCTTCGGAGTTGGTGGACAGCCCAACTCCACCAGTAGGAGGAAGAAGCAAAGCAGCAAAGGGCTTTAGGT
AGTGGACATACCACCCAGGCATGACAAAAGGGACTCTGTGGAGCACACACTTCAGGAACTGTTTTTGAAC
CCCCCCATTTATGACTGCACCACTTAAACACAGACAAGAAGCTTTGTTTTGAGAATTAGGACAGTTTATT
GTTTGACCAACATGCTGAGTCTTTTCCACATTTTACACAGTTTAATGTGAAATCAACATGGCGGCTATGT
CTTCTGAGCCCATAACAGATGGAATTGCCACCCTCTGTGCTCCTCACAGCCAATCACTTTAAAGGGATGG
GTGAGGGGAAAGTGAGGGGAGAAGTGGACACACACCGCGAGATGCAGGCTGGCCTTCAATGCTATGGAGG
CTTCCCACCTCCTGAAGGAACCATCTAAACCCCTGCTGCAAGGATTTCCTGATGAAACCACACACTGCTG
GGAGTGCCAACCAGACAGGGGTCTGGAGTCCAAGGAGTTTGCACATTGAGATCCCAAGGTTTTGGAACAC
CTAAATAGTTCATGTCAAACAAAAATTCAAAGGGTGTCCTGATCTGTGTGGGTGCCCATGACAATCAATC
AGAGTAGACTTGGGGACTGGCCCTTGTGCAGTAGAGGAGCCCAAAATACCACCAATATTCTCACTCATAT
GCTGGGAAGAACCTAGTGTCCTAACCAAAAAGAGTAGAGATGGTCTGAGGAACACACCCACACACAGCAG
TCCTTGCTGTGTAATAAATATGGAGTCACATTTGTTCACACACAGGGCAGCAATGGATGAAAAATGGAAA
CTTCACTGGTTCTGATCACTCCTAACTTGCTGGGTGATCTTAATAAGCAAGTTGCCCTTCTCCATCCTGG
TTTTCCTGCCTGTAGACAGGAAAAGTTGTGACAGCTCTGCTTCACATAGCTGTAACAAGGTGACAATGCC
TCACATTCTTTGGGGAGAGGCAGTTCGGAAACGAGTGTGCGCACAATCTGCTCGGTTGATGCACACAGAC
ATCCTTCTGTTCAGCTGCCCCTCAAGTGGCTCAGACATGCCTCACTGTCCTCGGCTACCTGGTCCCATCT
CATCCTGACATCCTCACCTGCCTTCCATCTTGTGAAGGAATGAGGCTGCTCTACCTGCAGGATGCTGAAG
CCAGGAGGGCCATCCCTTTATTGTCACAACTGGTATCCCAGGGCAGGGCCTCCCCGCACTGGCTAGCCAC
CAGGATGATGCAGACGTTGCACCCCAGATGTGTCTGCACTCTTAACTACCACCATTTCAATCCTTGTTTC
TGTTGCCAGAGATACTGAAACTGGTCTGGCCATTGCTCCCCTCAGACCTGGGAACATGACTGAATGTTTA
AGGATGACAAGAAGAGAGCAGCGATAGATAGCAAGGAGGCCTCTGACCAAGGGAAACTGCTGCCAACAGC
TACCAAGCCAACTAGCCTTGGATCACACAACTGCAGCCATGGTGCTCATGATTCTGATGTCACACCTTCA
TGTTGATGTATGTATGATCACCCAGCAAGTTAGGAGTGATCAGAACCAATGTGTTTCCACTTGTAAATAG
GCTGTTTGCTTTTTCCATCTTACACTCAACTTTCCTGATGCCTGCAGAACAGGAGCTTTGTTGATAAGCT
TTTAAGATTCACCCCCTTCACTCCCACCATCCCCAAAAAAGAAGGCCAAGAGGATCCTGCTAATCTGCCA
GGTCACGTCTAGTCTTTGGGGAGAGGGACTGAATTGCTCAATTGAGAACATTTCCTCAAAGGAATCCTCC
AATTTGCCCTCTGCTAACCCATCTGGATTCAGCAAAGATGCAATGCTCTTGCTGGGGTGCTGAGGCAATG
CCATGACATCTTCTTCAAGAGCACCTAACAGTTTATTATGGAACCTTAACTCTGTGCCAATTCTACCTGC
AAGCAAGGGGACAGGGATGGTGCCTGCTCAAGACAAAAATCAGGGAACCAACAACTTCTGAAAAAGAGGT
CTGGCTGCCTTTCCACACCCCAGGAAGGGAGGGGCGGAAACCGCACGTGCCGAAGGGAGCGCCATGGAAC
CACTGAGATGGGAGGATGGGAGGAAGCCACCCTCAGCCTCAGAGGCCAAGGGGCTGGGGAGAACCCAAAC
TCAAAGAGAGGATGTTGTGTGCATGCTAGGAAAGGCAGGACTCACTAAGGCCATGTCAAACCAAATGCTA
TCTTTTACTGCTCCTCTAGGCCAGGATGGAAACACAGTCCACGGTGCCTTGGATGTGTGTGCCCCTGAGA
AGGGAACTGAGTTTCTACTGTTTTATGGGATGTTTTTTTAAAAAAGCTAATCTTTAGTGCCAAGAAAATA
AAAATCTACCATACGTTCATTCACTGAGACCCAGTGCAGATTCCTGTAAATGGGGCGGTCTCAGAGGCCA
CAGGTGATGGCCCCCGCTGCCAACCAGGCAGGACACTGTCATGTGGACTCCTGTAAATTCTCTCGAGGTA
AGTAAGCACTCTTCCAACAAGCACCACTTGGGGGTGTGCCCATGGTGGGGGGACACTGGCCCACACAGGC
ATGCACACCCGTGCATATAAAGTACATAGAGAAATGGTGGAGATATTCCCGTGGGCTATGTTTGCCTGTA
GTTTAACACAACTATGCATTATTTTATTGATGGCAAGACAATCACAAGTTATTTGACAATATTAAGTATT
TCTTATTTCAACACGTTGCAGTACTTTTGAATTTCCAAAACTTATCACAATGCAAGTTCCAACTTGAGAG
CAGGAGAAACAAGAATATACATTGAGCACATGTATCTCCGTGAGGATGTGTTTGTGGAAGGTGTATACAC
AAGTCTATCTCTATATATAATTATGTACACACATATAAAAACTAAACACATGACATCTGAAACACGTTCA
AACATTGGTCCTTGCCTTCTGCAAGAGGTGCTCAGTGGGATCCTGCTTCCTCTCTTCTTCACCTGAAGAT
AAATTCCTTGCTAGAGATGAGCTCTGGCATACAGCCTCCTAGGCAGAG

[0144] An exemplary DNA sequence is human Trf provided below.

gi|224589820: 73915262-73965820 Homo sapiens chromosome 8, GRCh37.p13
Primary Assembly
(SEQ ID NO: 309)
AAGTGTCTAATCGATTTGCTCAAGGGTAAAGAGAAATTGGTGGAGAAAGAATTCAAACCTAGGCTGGGCA
CGGTGGCTCATGCCTGTAATCCTAGCACTTTGGGAGGCTGAGGCAGGAGGATCACTTGAGGTCAGGAGTT
CGAGACCAGCATGGTCAACACGGTGAAACCCTGTCTCTACTAAAAATACAAAAATTAGCCCGGCGTGGTG
GGGGCCCCTATAATCCCAGCTACTTGGGAGGCCAAGGCAGAAGAATCAGTTGAACCGGGAGGTGGAGTTT
GCAGTGAGCCAAGATGGTGCCACTGCACTCCAATCTGGGCAACAGAACAAGACTAATCAAGAAAGAAAAG
AAAACAAAAGAAAAAAAGAGAAGAGAAAAGAAGAAAGAGAGAGGGAGGGAGAGAGGGAGGGAGACGGGGA
AGGAAAGGAGGGAGGGAGGGAGGAAGGAGGGAAAGAAAGAGAGAAAGAAAGAAAGAAAAGAAAAAAGAAA
GAAAGAGAAAGCGAGAAAGAAAGAAAGAAAAATTCATATCTAGAACTCTGACTCCAGAGCCTGAAATCCT
AACTGCATGGGATTGTGCTGTCCAGTATGATAGCTACCAGTCATACTTGGCTATTTGAGCACCTGAAATG
TGGCTACTCCAAACTGAGATGTGTGTAAGTGTAAGATACACACAGGATTTTGAAAACTGTTTTTTTAAGT
AAAATATCCAAGTTTTAAAATTACATGTTGAAATAATAGTTGGAATATATTTATAAGATTAAAATTAACT
TCACCTGTTTCTTTCTATGCTTTTTAATGTGGCTCCTAGAAAATTAAAAATTACATATATGTGGTTCGTA
TGCTGCTTCAAAAAGTAGAGGCTGTTCATGGTTTTCTTTCTTAGGGCTGTCAAGGTCAAGGCGCTTCCTG
TTATTTCTCTATTCAAGGGTAGAAAACATCACCAGGGTACGTTGTTTTATTGGGCATTGGTTTATTTCTA
GGGGGTGGAAACGGGATTCTTCCCCTAGGTCCCCAGCTGTTTGTAGTCATATTCTTTTACTCACACACAA
TTTTATTGCTTTTGCTTTTGGGAGATGTGTTTTATTAAAAATAGTGGCTAATCAGGGACTTGTTAACGGC
ATACACTAGAAGGTTTTTTGTCTGTTTTTTGTTTTTTTGAGACGGAGTTTCACTCTGGTTGCCCAGGCTG
GAGTGCAATGGTGCAATCTCGGCTCACCTCAACCTCCGCCTCCTGGGTTCAAGCGATTCTCCTGCCTCAG
CCTCCCGGGTAGCTGGGATTACAGACATGCGCCACCACGCCTGGCTAATTTTGTATTTTTAGTAAAGACA
GAGTTTCTCCATGTTGGTCAGGCTGGTCTCGAACTCCCGACCTCAGGCGATCCGCCCGCCTTGGCCTCTC
AAACCGCTGGGATTACAGGCATGAGCTACCGCACTCTGCCTTGTTTTTTTTTTTTTTTTTTTTTAACAAA
ACGATCAAACAAACTGACCATGGAAAGTCAGTCCTGGGTTCCAGTTTTCAACTAACTGCATTTTCTTGCA
GAGTGAGCCCGCACCATCACAGTGCCTGTATTCTGTATTCTGTCAGACCCAGGCTACACACGGATCCTGT
AATGCATAAAACAACTTAAAAAAGTCTCAAGAGGCTACAAAGATCTTTTAAATACGTTAAAAGCTCTAAA
CGATTAGAACTGCCTAAGATAATGTTTCTCTTCCTGAAACCTGCTTTGCTTTAAACTCAAAACATTCCTT
CAGTCCTTGAGCATTACCTTATTGATTCTGAAAAGGGAGGAAGTCTTCATGAGTAGGAGTGTGCTTCTTT
ATCATTATTATATACTATGTCCACTACCTCGAAATGGAGTGGTTCATTTTATTTGTATGGTTTGGTAGCT
AGCGACCCTGGTTCTATACTGGAATCGCCTAGAGATACTTTGAAAAACACATATGCTTGAGCCTTGCCCT
TAGAAATTCTGATTTAGTGAATACAAAGTATAACTCAGCCAACTGAGAACATACGACGTGCGGTCGGGGT
TGAGAACTATTTATGAGGATAGCGAAACTAGTGTTTTAGGCCCTGTAAAATTTACTTTAAAAAAAAATCA
GTTCATACCCAGGTACTTCCCCTCCGCATCTCTGTTCAAACCTTTTTAATGAAATCCCACTGGCTTAGAC
ACTCTCCCTATGAAACCGCCTTTGCAAAAATCATAACTGAGAAATTACAGTGAAAGAGGTCTGACCTAAC
CGATACTACCTTTCTTCTAACATTCAAGCTGTCCATTCCTAGGTGTAGGCCAAACTAACTTTGGGAGGAA
CTTAGTTTATAGTTTAGCTTGGAAACAAAGAATATAACGGTGCTTTCCCCCAAACAAACCCCCTTCCTGC
CTGGGGACTAGACTGCCTTTGCAGGACTAACAAATTAGCTACAAGATTAGAAGTTATGGTTTAGCAGTCA
TGAAACTGGAGGCTGCAAGATTGTAAACCTCCCCAAATGGCTCCTGGGAATAAAATCACTATTGTAAAAC
CTAAGATCAGTGCTTGAGATATTTTGCAGACCCTGCACTCAATGCATCAGCTGGCACCACCCAGATCAAT
AAACAGGCTCATCTAGTCTTGTGGCCTCCACCCAGAAAGTGACTCAGTGCAAGAGGACAGTTTTGACTCC
TTACGATTTCATCTCTGACCCGACCAATTATCACTCCTGACTCAGTGGTCCCCTACCCACCAAATTATCC
TTAAAAACACCAATCCTCGAGTTTTCGGGGAGATTGATTTGAGTAATAATAAAACTCTGGTCTCCCACAC
AGCCGGGTCTGCATGAATTACTCTTTCTCTATTGCGATTCCCCTGTCTTGATAAATCAGCCTGTCTAGGC
AGTGAGCAAGGTGAACCCGTTGGGTGGTTGCACCCCCACCAAACTCCTATTAAGGTTACTGTTAGCATCA
CTCATTAGTCTGATGTTTATGTACAATGTGTGTGTGTGTTGCTTGTCTTACCAACTGGTCTATAATTCTT
TATGGAGAGGAGTAGTATCTTTATATTTACCATGCACCATCCTAGCGCAGTACATTTCACATAATAGGTA
CTCAATAAAGGATGTTTCAAAAGTACATATGTAGTTTGGATATTCACGAGACATTTATAAATGCAAAAAT
AAAGCAATGTATATAATTCATAATGAGACCATTAGCTTATATTAGCAATGGGATAGACTAAAATATGGGT
TAAAACACAATTATTTAATATGGTAGACATAAGAATTTAGGAAACTTATAGATTTCAAAGTGTTGTTTAG
GAAATAGTCCAAATCAAAAACAGTCTTGGGAAATGCAACAGCATGGGGAATGTCATCTAGGCTTTATGGG
AATCTTTCCACAGTATCTCTGACTACTGGCATCCAGAATCATAGATGTATACTTACCTGGCAGGGGAGAT
ACCATGATCACAGGATCATTAATGATTCCAGTGGTGAGAAATCAGTACCTGGCAGTAGAAATCGGCACTT
TATTGTGGGAAAGCCTGAATGGTTAGGAACCATGTGGGATATGAAGTCAAATCTGCCACCCCAAACCTTC
AAACTTTGGTTTCAGGTTGTGCTCTTAGGATCATCACAAAACAGATTGAATCTCTCCCCTCATAACAGTC
CCATTAAATGAGGTAAAGTCAACTATACTTGCGAGTCTTACTCCATGAACTCATGCAAGAAACATAATTT
TACTCAAGGGATGATTTTTAAATCACCAAAATCACACAGGATTCTCTTTCCTAACCCACTCCAGCACAAA
GGCACTACCTCCCAATACCATCCCATTGGGGGTTAGGGCTTCGGCATGTAAATCTGGGGAGAAAACAAAT
ATGCAGTCCATAATACTAGGTTCATAATGTGCTGTAACCCTTATTCCCTTAGCCTCTATCCCCATTCCAC
TGTATTATTTCAAAACAGACCTTACTTCCCATGGGACAATTAGAGCCTGAAGAAGAGATCTCTTCTGATG
CATCATCATTTTTCCTGGCAGCACAAATATTCTGCTCTTCCTGCTAATACTAATTGAGCACTTACTATTT
CCCTGGCTTTTTTTTTTTTTTTTTTCGGTAGAGATGAGATCTCACTATGTTGCCCAGGCTGGCCTCAAAC
TCCTGGGCTCCAGTAATCCTCCCACCTTGGCATCCCAAAGTGCTGGGATTACAAAGTGAGCCACTGTGCC
TGGTGAGGTTTCGTTTTAAACTCTTTTTTTTTTTTTTTTTGAGACGGAGTTTCGCTCTTGTTGCCCAGGC
TGGAGTGCAGTGGCCCGATCTCGGCTCACCGCAATCTCCGCCTCCCGGGTTCAAGCAATTATCCTGCCTC
AGCCTCCCGAGTAGCTGGGATCACAGGCATGCACCACCACACCCGCCTAATTTTGTATTTTTAGTAGAGA
CGAGGTTTCTCCATGTTGAGGCTGGTCTCGAACTCCTGACCTCAGGTGATCCGCCCGCCTCAGCCTCCCA
AAGTGCTGGGATTACAGGTGTGAGCCACTGCGCCCGGCTGTTTTAAACTCTTTACATTTACCAAGCCCTT
TAATCGTGCAGGTATTATTATTATTCACATTATACGGACAAGAAAACTGACACGTAATTTACCCAAGGTC
ACACAGCTAGTGAGTAACTGGTAGGGAATATTCCAACCTAAGCATTCTTAATACTAGAATACAGTGCCTT
AGTTACTCAACACTTAAACTGTACCACCTTAAAGACAATAACAAGAAGTGTGTGAAAATGTGGAAAGGCT
TTGATGATGCTGGATGCGTTATAAACAGAAAGGCTTTTAAAATAAACTTTTTATTCAATTATGACACACA
TACTGAAAAGTGCATAAACGATGTTCAGTGAATTTTCATAAAGTGAACCCACATCAAGGAACAGAAAACG
GAGCCAGGCGTTGTGGCTCAGGCCTGTAAACCCAGCACTTTGGCAGGAGGATAACTTGAAGCCAGGAGTT
GGAGACCAGCCTGAGCAACAGAGCGAAATCCTGTCTCAAAGGAAAAAAAAAAAACAAACAAAAAACAAAA
ACAATAACCAGACCACCCATCCCCATTTAGAATTTCTTTTTGTGCTAAGTTTCAAAATTCAAAATAAGCA
TTCACTTGTTTTCTACAAACTGCATTCTATAGTCGATCTCAAACCTTGATTGAGATACATTTCCATTATA
GTATACTCTTTCTAGAGCACTGATCTCAAAATGTGGTGCCCAGCCAAGTAGCGTTGGACTTTCAAATTCA
AGGATCCCAAGCTAGACCAGCAGAACAGGAATTCTGGGAGTGGAGCCCGGCAATTTGTGTTTTAGCAAGC
CCCCAGGCTGATTCTGATGCATCTTAAGGTTGGAGAAGCATGGATATTGTCAGTTGTAATAGTTGTTGTT
CGTGATCACGTAGTAACTGTTAGATGAAAACTAGGGTTTAAAAGTGTTACGCTTGTCTAATAGTGACAAG
TTCTCATTACCCATCTCTTTCTGAAATAGGCTGCAGGCAAATGCGTTTTCATTTTAAATAACCGTGTTGT
TGTTCCAGTCAAGGTTGCATTTTACAAGGAATAAGGAAGATAAAGCTGCCTCCTCCTATCCTAATCTCGC
TCCTCGCTCAGTATGGAGTCGTCCGGTTTACCTACAAAGCCCTGCCCTAGACTGGCGGCAAATTCAACGC
CCAGAGGCAGGAACAGGTGTCGGCCAATCAGAAGCCGGAACAGGTGTCGGCCAATCAGAAGCCAGGCTTG
AACCGCTCGCCCATGTCCCGCCGGCGGAAGAGACTCTCCGCGGCCACGCCCCGAGCCCTCGAATGCGAGC
CAATCGTTGCTCGGCGCCTGAAGGGGCAGTACCCAAGCGAGCCATTTAACATGGCGGAGGATGTTTCCTC
AGCGGCCCCGAGCCCGCGGGGCTGTGCGGATGGTAGGGATGCCGACCCTACTGAGGAGCAGATGGCAGAA
ACAGAGAGAAACGACGAGGAGCAGTTCGAATGCCAGGAACTGCTCGAGTGCCAGGTGCAGGTGGGGGCCC
CCGAGGAGGAGGAGGAGGAGGAGGAGGACGCGGGCCTGGTGGCCGAGGCCGAGGCCGTGGCTGCCGGCTG
GATGCTCGATTTCCTCTGCCTCTCTCTTTGCCGAGCTTTCCGCGACGGCCGCTCCGAGGACTTCCGCAGG
ACCCGCAACAGCGCAGAGGGTGAGTGCAGACCGCGTCCGGGCCGGGACTACGCGGGGGGCGGATGCGGGC
TCCGTGGTGCGCGGCAGAGGGCTGGTTCCCTACGTCGCCGAGGGAGGGGCTGCTGCGGCCGATTAGCTGG
GAGTCCGAGGCTCCGGGCTGAACTTTGTTCGAATCCCGGTTCGCCCGTTGTCAGCACCTGAGTTTTTCTC
AGATTGATTTCCTCTTCGATAAAATGAAAATAAGACCCTGTTTAGGTTTGATGCAAGCATTAAATGAGTT
AAAATGTATACAGTTCCACTCAACCCAGTACCTTTGTCTCTTTTGGCGCTTTCTACTCAGGTATTCCTGT
AGTAATATTCAGCAGTCCCTGTGGCCTCCAGTAACCCCCGAGGCATCAGTGTTTTATGTTAATTTGTGAG
CTATTAAATCTCATTTGGCCTGCTGGCTCTACAGCAGTTACTTTTATTCTGTGTAGTCTCAGAATAAAAG
TAAATGTTGGCCACATGCCTGCAAGTCCCAGCTACTTGGGAGCCTGAGGTGGGAGGATCGCTTGAACCCA
AGAGGCAGAGGTTGCAGTGAGTCGAGATCGTGCCACTACAGTCCTGCCTGGGTAACAGAGTGATACCCTG
TATGAATAAATAAATGAATGAATGAAACTGTTCATGAAATCTGCTGCACCCCGCCCCCGTCCCAAGATGG
GGTCTCACTGTCACCCAGGCTGGAGAGTGTAGTGGCGCCATCACAGCTCACTGCAGGCTCGACCTCCTCA
GGCTCAGGTATCCTCCCGCTTCAGCTTCTGGAGTAGCTGGGTCTGCAGGCGTGCACCACCACCCGCAGCT
GTAAGATTACAGGTATGAGCCACCGCGCCTGGCCTAGTGTAGCTTTTTGAAAAACAACAGAAAGATGTTC
TGGTACTTCATTCATAGTTGGCGCTAAAATTACTGTGCAAGTATATATTTATAATACTATAATTATGCTA
TTTAATAGAATTCTTAGACATTTTGACACATTTCATCTTCACCATAATCCTGTGAGTTAGGCAAATAATC
TTAGTTTTAAGGTACTGATAGGTTAAAAGGGAGTGTTTCAGCCCCATCCTTTATCTTCCAGTTCAAGGAT
CTTTCCTCTGTATTGCGGTTAACACTGGAGCCAGGGATAATTAACATTAAGTAGAAAATTAAATCCTGGA
ATGAAGCTAGTTCCTCAGAATTCTCTTAGAGTTCTCTTAGAGTTGGAGACATCAGTATGAACTGTTTAGC
TCATGTAGGTATAGATGACTTAGAAATATTTGCATATGCATGTGTAGACATAGGTTACTATACAAATATG
TATTTCCTTACTCTGTCAGATAAAAGGGCACAGAAGCAACCTAACTCTAGTAACAATGAGTACACCTAGC
ACCCCGATCTTGTTTACAACTAAGTTTAGTTTAAAGACCTCACTTGGCTTTATTGTGATTCTGGATTCAG
GTAATACTTTATTCCATAAAATAAGTGCTCAATGAATTGAGCAGTTGGGGGTTGGCTTTATAGACAGTAA
GGACTTAAGGAAGCTGAAACAGAACAAAAAGAAGATTGGTTATTTCACAGTTACTTGTAAGGCTGGGACA
GGGAGACAGAACAATAGATACATGGGATGCAGAATGGATGTTGTGTTATCAGGCATGAAAGCAACAGTAA
TTTCCTTGTATGTACGTCTCCCTCAGAGCTCTTGAGTGGTTAGGCGCATTATCAATGAGCAATGGTATTT
TGAAAGGAATCTTTTTTCCAAGCAGTAGATCTCAATAATGGGCTTAAAATATTCAGTAAACCATGGTGTA
AACAGAGGCACTGTCATCTTGTTCCATTTCTAGAGCACAGGCAAAGTTGATATATCATTTGAAGGGCCTT
AAGATTTTCAGAATGAGAAATGGGCAATGGGTTTAACTTAAAGTCACCAGCAGCATTAGTCCCTAAGGAG
AGTCAGCCTGTCCTTTGAAATATTAAAGTTAGGCATTGACTTCTCTCTGGCTATGAAAGTTCTCTATGAC
ATCTTCTTCTAATATGAGGCTGTTTCATCTACAATGAAAATCTGTTGTTGGCTGGATACAGTGGCTCACA
CCTGTAATCCCAGCCCTTTGGAAGGCCAAGGCAGTTGGATCACTTGAGGTCAGGAGTTTGAGACACCAGC
CTGGCCAACATGGCGAAACCCCATCTCTACTAAAAATACAAAAATTAGCTGGGCATTGTGGCACACATCT
GTAATCCCAGCTACTCAGGAGGCTGAGGCACGAGAATCAATCACTTGAGCCTGGGAGGTGGAGGCTGCAG
TGAGCTGAGGTCACACCACTGCCCTTCAACCTGGGTGACACGGCGAGACTCTGTCTCACAAAAAAACAAA
ATCAGTTGTTTAGTGTAACCACCTTCATTTGTGATTGTAGCTAGATCTTCTCAATAACTTGTAGCTTTTA
CTTCAGCACTTGCTGCTTCACCTTGCACTTCTATGTCACAGAGATGGCTTCTTTTCTTAAACCTCATGAA
CCAACAACCTCTGCTAGCTTCCAACTTTTCTTTTGCAATTTTCTTACCTCTGTCAGCCTTCTTAGACTTG
CTCTGGATTAGGCTGTGGCTTAAAGGAATGTTGTGGCTGGTTTGATTTTTTTTTTTCTATCCAAGTCAAA
CTTTCTCCATATGAGCAATAGGCTCTTTTACTTTCTTATCATTTATGTGTTCAGTGGATTAGAACTTTTA
ATTTCCTTTGAGAACTTTTCCTTTGTATTAACAACTTGGCTGTTAGACACAAGAGGCCTATGTTTCAGCC
TATCATGGCATTTGACATCCTTTCCTCACTAAGCTTAATCATTTCTAGCTTTTGATTTAAAGTGAATGAC
TTGCAACTCTTCCTTTCACTGAAACACTTGGAGGGCATGTAGAGTTACTCATTGGCCTAATTTCAATCTT
GTTGTGTTTCAGGAGATAAGGAGGCCTGAAGAGAGGGAGTAAGGGGAAGGGCTGGTCAGTGGAGCAGTTA
GAACACACACAATATTTATGGAATAAGTTTGTGTCTTATGGGCATGATTTGTGGTACTCCAGAACCTTTA
CAATAGTAACATCAGAGATTATTGATCACAGACCACCATACAGATATAATAATAATGAAAAAGTTTGAAA
TATTGCAAGAATTATCAAAATGTGACAGGTACAGGTACTGTTAGAAAAATGAGCCAGACGCGGTGGCTCA
TGCCTGTAATCCCAGCACTTTGGGAGGCTGAGGCGGGCAGATCACGAGGTCAGGAGATCGAGACCATCCT
GGCTAACATGGTGAAACCCCGTCTCTACTAAAAAAATACAAAAAAAATTAGCCAGCCTTGGTGGTGGGCG
CCTGTAGTCCCAGCTATGCGGGAGGCTGAGGCAGAAGAATGGCATGAACCTGGGAGGCGGAGCTTGCAGT
GAGTGGAGATGCACCATTGCACTCCAGCCTGGGCGACAGAGCGTGACTCTGTCTCAAAAAAAAAAAAAGG
TGCCGTTAGACTTGGCTCAAGCTGGGCTGCGGTAAACTTTCAATTTGTAAAAAACATGCAATCTGCAAAG
CACAATAAAATGAGGTATGTCTGCACCTATCCTTCGTGGTACTCATTAAAATTTTAATTAGTTACTTACA
TAACTTTTTGTTTAATTGTGTCTTCTCAGATTAAAACCTTCATGGGGGCAGAGACTGGCTATCTGAAGTC
ATCACCTCCTAACACAGGCTGGCAGTAGATGTTCAGTAAATATTGAATGGCTTGTGTTTAAATTCTATAT
AAATTTTGTGCTCTCTTAAAATCCTGTTAAATTCTATTATGACTGTGTATGGTCCAGATAATCTCTGGTG
TAGCATAAGATTATGTTAGAATTGAGGGAGGAAATTGGGTAAAAATATATTCGTCTTATATGCTTAATTG
CTACAGAATTGCTTTTCAGTTTGCTAGTTATTTAAGTTTTTTATATATACACCAACCAAGCCCTGGGTTA
GGTATAATGGTAGTAGTGGCACCTTCAGGTCTTAGGTTAGACATTATTTCCTCAGAGAAGCCTTCCCTGA
CACCTCCTCTGTGCAGAAGATACTTAAACACACAGATTTCTTGTTATATGCTTCCAAAGCATTCTGTACT
TGTCTTTTTAAAGTTTTCACAACATTTTTACTTCAGTAGTTCAATCGCTTGTCTCATTGCTACATGGTAA
AAAGCTCACTGTGGTCCAGGAGTATGGCTTACTTGGTATTGTATGTAATCACTGCCTGACTCAACATCTG
GGTGGGCATTCAAGTTTGGGGAGGTTAATATTAATAGGTTTTAAACTTTGTAAGCTAAACAGACTCACTT
AACTGAAACCTAGATAGAAATAATATAAAATATTTTCTATTATATGAAATGTTTCTAGGTATAAGTTTCC
AACCAATGATTTTACACATTTTACAATTTGTATCTAAATCTTTTTTGTTAATGTAGACTGCTACTTGTGA
AAGAATTTTCAACAATTTTTATTCTACATGTGAAAGTTATATTTTGTAAGAAATGTCTTCATTGCTATTC
TTTTTTTTTGTTCTGAATTTTAATCAGATCTTAAATGTACAACTCTAAATTTATGATAATTTTTACAATA
TGTTTGTAGCCTATTACTCAACAAACCACACAGTGGCACTACTGGATCAAGTTTGATTTTAATAAAATTT
ACTTTTTTTCTTTTTTAGCTATTATTCATGGACTATCCAGTCTAACAGCTTGCCAGTTGAGAACGATATA
CATATGTCAGTTTTTGACAAGAATTGCAGCAGGAAAAACCCTTGGTAAATATGTTTTTTTATTTTATATT
GGAAATATTTCAATCTGTTTCTAATGTAAGACAATGGGAAGAAACAGACGTTTTTGGGGGAAGTTTGCCT
ACAAGTGTCTGGTGCATAGGGGTGTGGGGGGGTGGTGTGTGTGTGTGTGTACACATACAGTCATATCTAA
AGCAAGTAAAAGAAATGTAGTCCCTGTCATCTTAGAACATTGGTTCTCAAACTTTAGCCTGCTCCAGAAT
TACTTAAAGGGCTTATTAAAAAAAAAAAAACATAGTGCTGAGTCTCCCTAACTCTCATGAGTTTCAGATT
CAGTAGGATGGGTATGGGGCTCTGAAATATACATTTCTAATAAATTCCCAGGTGATTCTGATGCTACTCT
TGGGGAAGTGTGTTTCATTGACTCTATTTGCTAACTTTGTGGTGACTCCAATCATACACACTCTGTTTTT
ACTGGCAACTATTATATTTGAAACCTTTTATTTGAACTTGATGCCAGCGCTTACGTAAGAAGTACAGTTT
ATAGCTGTAATCTCTCTCCCTTGTCTCTGTAGTTCCATTTTAGATTGTAATGGGCAAGGCTGATTCAGTT
TATCAGTAATGGCTGGTATTTACAACATGGTCATTTTAAAAGGCTATTTGATGGAAATAATTTTGTATTT
AGATTGGTTTTTATAATTTACAAAATACTTTTCCAACAATCCTGAGTAGTGGGCAGTACTTACATAAAAC
TGCTTGCTTATTGAAGTGTTGTCTTACATAAAATCCCAGTGTATTAGCACCACTGTCAAGGCCTTCACTA
AAGTATCTCTGGCTGATGTAGTCTGCTTTGTTTGGGGGGTGAGGGTAGGTCTGGAGTTGGTGCCAGGACC
ATAAATGGATAGAACTAGATAGAGGCAGAATAGTTGTGAAAGAGACAGAGCCATAGGTAGGCCTGGGCCA
GTTGCTGGAGAAGTAGCAGGCTGGAGCAGAATTCCAGACCATGCAGACTATAAGTTGACACTGTTGTTAA
CAGGGTTGTTTTCTACATTAAGGTGGAAAAGTATTCTAAAGTGCCTGGCAGTGCTTTACACATAGCAGTT
GTTCAGCACATCTTAGTTGCTTCCTGGATAACCTTTTCTCCAAAAAAGGCAGGGGGGAATCCAGATTTTA
TGTGTGATCTCATGGTTTAATCTTGGAATTTACCAGGATACTCTTTTGGATATATCCTAGATATAATAGG
CCAGGGTCAGCTGTCAAGAATCAATGTATTTCACCATAATGCACTAAACTGAGGCAGCATTTAAAATTTT
ATGTATTGGATTTTTGGCTATACATAACCCTTTTGCTTTTTTTTTTTTTTTTTTAATTTTGCTCTATAGT
GGCACTGCCTAATAGAGATATGTGAGCCACATGTCTAATTTAAAATTTTCTAATAGCTATGTTAAGAAAA
GTAGGCCAGGCATAGTGACTCACACCTGTAATCCCAGTACTTTGGGAGGCCTAGACAGGAGGATCGCTTG
AGCCTAAGAATTTGACACCAGCCTAGGCAACATAGCGAGACCCTGTCTCTACAAAAAATTTAAAAAATTG
GCTGGGCGTGGTGATTCACGCCTGTAATCCCAGCACTTTGGGAGGCCGAGGTGAGCGGATCACGAGGCCA
GGCAATAAAGACCATCCTTGCTAACGTGGTGAAACCCCGTCTCTACTAAAAATACAAAAAAAAATAAAAA
TAAAAAGTTAACCACGTGTGGTCCTCTGGAGACTGAGGTAGGATCGTTTGAGCCCAGGAGGTTGAGGCTG
TGGTTAGCTGTGATTGTGCCACTTCACTTCAGCCTGAGTGACAGAATGAAATCCTGTCATGAAATTTAGA
AATTCCCATTCCAGCAGGTGTAGCTAAAAAATAATAATGATAATTAAAATAGGTGGAATTAATTTTGATA
ATCTTATTTAACTCAATATTTCTCAAACACTATGTCAACAAGTAGTCAGTGTAAAAAATGTTAGTAAGGC
CAGGCACATGGCTCACACCTGTAATCCCAGCTCTGGGAGGCTGAGGTGGGTGGATCACTTGAGCCCACGA
GTTTAAGGCTGCAGTGAGCTATGATCACACCACTGCACCCCAACCTGGGCAGCACAGCAAGGCCCCCATC
TCTTAAAAAAAATCAAATGAGATATTTTACCTTTTTTTGGAGTAAGTCTTTGAAATCTCATGTGTACTTT
ATACTTAAGGTGCATCTCAATTCAAACTAGCCATATTTTAGCTGTGCAGTAATCATGTATGGCTAGTAGC
TGTGCAGTAATCATGTATGGCTAGTAGCTACCATATTGGGTTTAGTCTCCTACCCCACATAGGTTTGACA
AGATTGGACATGTTTGGGGTGATGTGGCTGTAGACCCCCACGTAGCTCTGAAATACAGCAGATATCTTAA
AGGGGAAATGCTTGTCATCCTCCTCTTATGGAACTTTAAGCTTTTTTTTTTTTTTTTAGCCAGGGTGTCT
CTCTGGCCCAGGCTGGAATGCAGTGGTGCCATCATAGTTTATTGCAGACTCAAACTCTTGAGCTCAAGTG
ATCCTCCTGCCTCAGCCTCCTGAGTAGCTAGGACTACAGGTGCACCATCAGGCCCAGTTAATTTTTTAAT
TTTTTGTAGAGACGAGGTCTCATGTTGTCCAGGCTGGTCTTGAACTCCTTGCCTTAAGTGATCCTCCCGC
CTAGGCCTCCCAAAACTCTGGGAGACTTAATGTGCCTTTCCACTGCAGCCTATTGCATTGCCGTGGAACT
CAGCACATGTCCTGTGGAGAAAAGCCAATCATGTTTGCAGTTTCTCTAGTTTCCAGTCGACGTGCCAGCC
CCAAGGAAACCACCAGAAGCTGTTCTTATTTGTCTTTCTCCAGTAAAGTCTCTCTGGCTGGAGTGCACTG
GATCCTCAGCCTTATCCAAAATCAGCAAATCGGCAGCTCACCTCAGAAGGGATTCTCTCTGGAATTTTAG
TTCATCTCATTTTCATTGCTTCCATGGCTATCCCATGTCTTTAGCAATGTGATTTTGGAGTTTATCTAAC
TGTTTTCTAGCTGTAGTGTGAGTGTTTTGTTTGCTGCAGTATACTACATCCCACCTGGAAGTGAATGTCT
ATACTGTAAATTTTTTGAAGCTAAGATCTAACATACATTTTTCTCTATGTCACATTTATAAGAAGGAAGG
CAGATAAGTGAGAAGGGTTAAGTAATGTCAGTCAAGAAATACTTATTTGAAAATGTGTGTTGAAATTAGC
TCTTGAAAGAAAGCAAGCAGATGAAAAATGAGGAAGAAAAATTAGGCAGTCTACCTTTGCATTTTCATTT
CACTACTTTTGAGGCACAGTAAGTGATATTTAAGTGTCTTGGTGTCTGCTTGTACTACTTGCTTGGTGTG
TGACCTCTCTAGCTCTCAGATCTTACTGTATAAAACAAGTGCCACAGTGCCTGACACTCAGTGTTAGTTA
CTAGCATGAATATCTTTTGTACACCTCTTTCTTACCTTATGCTGCTCCATTTTCCTGAAGTGTTCTCCTT
CCCATCCTTGTAGTCTACACTTAGTTATCATCTGTTTATCCTTAATGCCCCAATTTGGATGACTTCTGTT
TCATGAGGGATTCACTTCTGCTATTCCTACTTAGAGTTAATACCATGTTCCTCAAATACACTAGACTCTG
CTTGAGAATTTAATCTCTGGGAGATGGGTATAGGCATCAATATTTTTTTTCTTTTTTTTTTTTTTGAGAC
AGAGTCTCACTCTGTCACCAGGCTGGAGTACAGTGACGCCATCTTGGCTCACTGCAACCTCCGCCTCCCG
GGTTCAAGCGATTCTTCTGCCTCAGCCTCATGAGTAGCTGGGACTACAGGCGTGCGCCACCATGCCTGAC
TAATTTTTCTATTATTAGTAGAGACAGGGTTTCACCATGTTGGCCAGGATGGTCTCAATTTCTTGATTGG
CGGATCTCGTGATCCGCCTGCCTTGGCCTCCCAAAGTGCTGGGATTACAGGCGTGAGCCACCGCGCCTGG
CCATGCATCAATATTTTTCAAAAGCTCTTCAGATGTTTCTGAGGTATAGCAAACATTGAGAACCATTGGC
ATAATGCACAATTCCATTAAAGTACCAGTTATATTGGTTTGTCTGCATGTCTTCTTCCATAGCTAGGATG
TGAGTTCCACAAGGTCAGGAACTTTTTTTTTCATGTTTGTATCTTAAGTACCTGACACAGAACCTGGAAT
ATAAAGAGACTTAGTATGTGAATGAATATATTTTTATATCTAAAATGTTGGAAAAACAATTTGGAGAGGA
CAACAGGAAATAAAGTAAAAATATTTGAAACTACGAATATTTAAACTGCATGCTCACTCTGGTTTTTCAA
GGAAAAAAGGATGTGCTATTTAAAATTCTCTTTATTCGGTCGGGCTTGGTGGCTCACGCCTGTAATCCCA
GCACTTTGGGAGGCTGAGGCGGGTGGATCACCTGAGGTCAGGAGTTCGAGACCAGCCTGGCCAACATGGC
AAAACCCCGTCTCTACTAAAAGTACAAAAATTAGCCTGGCGTGGTGGTGGGCACCTGTAATCCCAGCTAC
TTGGGAGACTGAAACAGCAGAATCGCTTGAACCCAGGGGGCGGAGGTTGCAGTAAGCCGAGATCGCGTCA
CTTCACTCCAGCCTGGTCAAAAGAGCAAAGCACTGCCTCAAAAAATAAATAAGTAAAAATAAAAATAAAA
AATTCTCTTTATTATGCTTATTTGTTGCATACTTGCTATGGAACTACAACTGTGCTAGGAATTACAGGGA
TTTAGAAAAATACACTTAAGTGGCTTCTGCCCCCCAAAATTTGAAATATGCATTATAGAGTAAGAAGTTT
TTTGTCTTCAAGACACTGTAAAAGCTAATAGGGTTGTTGAGGTAAGTATAAAGTACTGCAAGGCATTAAA
AAATGAATAATGATACAAGAGTTTCTTTTTAATTAATGCAGTGCTCATGAATTTTTGTGTCATCCTTCTC
GAGGGGCCATGCTAATCTCTGCATTCTTCCAATTTTTATATATTTGCTGCCAAAGCAAGCACATACAGGA
GATTTAGAGAAAGGACATTTCCTAGTCTCTTAGCTGCTGGGGTAAGGACAGCATTCAAGAAAGAGGTGCT
GTTTGCACTATGCCTGTAAGAATTGCTAGATTTTGTCAGAAAGAAAGTATAAAAATGGTAGTCTATCCAC
ATCCTCAGATGTGGTGTGGGGGTGGGGGGAAGGTAGTCTAGATAAAATGAAAACATTAGCATTATTTTGA
AAATAAACTATAGTTTACCTGGATAATAGACTCTTGATTTCCATATACAACTTCATAAACTTGGTCCTCA
CCCAGGCTTCCTATGATAGTAAATGTTAGCACCATTTATCCAATTATTAAAACCCAAGAGTCCTCCATTT
TTTCCTCATGCTCTACATGCAGTCCATTAGCAGGTTCTATTCTACATTCAAAATAAGTTCCAAAACAGAC
AACTACTTGCCTTTTCCATCATCTTTCTAAGAGTATGCATCCAACTTGCCCACCGACCTTCCTCCTGCCC
TTTGTATTTGTTTTTTCAAGACAAGGTCACGCTGGAAGGCTGTGGTGTCATCATCGCTCACTGAGCCTCA
GACTCCTGGCTCAAGCAGTCCTCCCACCTCAGCCTCCCAAGTAGCTGAGACTACAGGCACACGCCCCCAC
CTGGCTCTTCCTGCCCTTTGAACATCAAACTCCTCCTCAGGACCTTTGCACTTGCCATTCCCTCTGGAAT
GTTTTTCTTCCAGATCTTTGTGTGACTGTTCCTTCTGCTTCACATTACGCTGTTCTCAGCTCCACTGTCA
CTTCTTCAGAGAGGTCTTTAACCTGTCTGAAAGAGCTTCCCTCTCCCCTACCATTCTTCATTTCCAGAAC
CTTTTTTCTTTCTTCTAGCCCTTACTACTCTGAAACTATATTGTTTACTACTCTGAAACTGTATTGTTTA
CTACTCTGAAACTGTATTTATTTCTCATTAGCATGTGCGTATCATAAGAGCAGGATTTTGTCTTACTGAG
CCATTCCAAGTTTTTAGGCGAGTGCCTATATATACTGAGTGATCAATAAATATTTATTGAATGAATTGTA
GACTGTAGATGCTAGACATGTAAGACATTATCATGAAGGCTCTTGAATGTCCGAATGGGTTGTTGCTGTG
TAATTTGCTAATTAGTTATCAGCTGTTGTGAGTCTTTGTTCTGAATAACTTGATCACAACTCTTTTAGGA
AAGCTTAATAATAGTACAACTATTATCTCATTATATATTCACATAAATTCTGTGAGATAGTATTTATTCT
CACCATTTTATAGGTGAGAAAACTGGCCTGTCTTGAGGTTTGTTATAATGCATTAGACTTAGGAACCACT
TAAGAATTCTGTTGCTATGACATGTTATGTAAAATAGTTTACTTTCGTTCTTAAAATTCATGTTTTTGTA
AAGAAAATCTTCAAATGTTTGTAATCTCATCAACCTTTTTCTATTTGAAATTGATCTTAATGAGCAAATT
AACTTAGAAAATAAAATCACTTCTAAACTGGTATAAACAAGAAGAGTACCTAGCACATAGTATACACTCA
GTAAATATTTAAAGGAATGCATTATTAAAAACTGACAAAGTTCTACTTAGCTTTCTGAGTTACTTATTTT
TGTTCTGTTTTTAAAAGATGCACAGTTTGAAAATGATGAACGAATTACACCCTTGGAATCAGCCCTGATG
ATTTGGGGTTCAATTGAAAAGGAACATGACAAACTTCATGAAGAAATACAGAATTTAATTAAAATTCAGG
TATGAATAAATTACTTTTATGCTTATTATATTTCTAGAAAATAACATTTAAAAGAAATTAAGAGGAACCT
AGTAGAAGTTGAGCAGTAGTAAAATTTAATGTATTGTTTCTCTTCAGAAATTTGACCTTTGGTTTATAGT
CTTAACATGAGCACTGGGGGCTGGAACTTAATGTGCCATACTTAAGCATATGTTGCCTCTATGTTGTGGA
AAATTTAAAAACCAGGGGTTTGTGCACTCTCAATTGATGCTTAAAGATTATGTAAAAAGTAGATACTATT
TTTAATTAATGGTAAATTTTAGATTTTTGTAATCAAGAATATATAAAATTTTAACCAAGTAGGGAGAATT
TTAGTAGACAGTAAGTAGCCCAAAACGTCATTCAAAGATACAATAGCTAGCAGTCAAAGCAAATACTAGG
TACTTTCTTAGTTAAATAAACTTTTTCTCTTTTGAGAATTTTAAAAATTTCTTTTCAGGTTGGATAAAAG
AAAATCCAAGTCATTCCCCACCTTCCCAAGAATTAGTGTGGTGATTGTCAAGTAGAATTAGGACCTGAGG
AAAAGAAAATAGGCAGAAAAACGACTGCTTCCTTTATGAATTCAACCCAGAGCAAAGAGATTTGTCATGT
TATTGCAATCTTTTAGGCTGCTAGAGAAAGCAAGTCTTTCTTAATACACTACTGTAAAATCAAATGGGTG
ACAAAGTTTATAGCAAACATTTAATATATTCCTTACTATTTGCCAGGCACTGTTCTAAACTCTTTCACAT
AAAACTCTTACATCCTCATAACAATCCTATGAAATAGGTACTATTGTTTCCACCATTTTACATATAAGGT
AACTGGGACACCAAGAGGTTAAGTAGCTTACCAAGTTTACATAGCTACCCAAATGGTAAGTGGTCCTGTC
TTACTTACCACGTTACCAAAAATGCCAATGCATGAAAAAAATGATCATTAAAAAACATCTAGCTTCTTAG
GTGTGTATTAGATATTTTCCAGGGATCTGACTAGCAAATTTTATGTATCCTAATCATCACAAACATCATC
TACCTCCTCTCATTTCCCTTTTACTCAAAATTAATATTTAGGTGGGTCCTAAATGTGTGTGGTATGGCTT
CTAATTTATTTATTAATACATACTTTTCATTTGGTCTAAATTAGAGATAGAATGCTGGGCATTTATGAAT
AAATGTGCATGGGACCAGTGCAAATTTTTCATGTCATTTCAAGCGACACTTATTTTGTCTTTGAAAAATA
ATTTTATATCTTTTATCAAATTAAAATTATTAAGCTACATAAAAATGTTCTCAACAGAGGATTTCAGACT
TACCTGAGTTATCTTAATAATTAAATAACTATTGGGTATTTATAAACGCAGTCTAAGGTTGGTATTTTTC
ATCTTTTAGGCTATAGCTGTTTGTATGGAAAATGGCAACTTTAAAGAAGCAGAAGAAGTCTTTGAAAGAA
TATTTGGTGATCCAAATTCTCATATGGTAATTATTTAAATTAAAACCATAGAATTTTAGAAGTGTTTATG
TAGAGTGAGGAAAACTGAAAGAAAATTGGAGGAGAAAAGAAATGCTTTATCTTTTAAACAGTATAGAATA
ATACCGTGCAACAGAAAAACTACGCAAGTCACATATGTGATTTAAAATTTTCTAATAAGCTGGACGCAGT
AGCTTACACCTATAATTCCAGCACTTTGGGAGGCTGAGGTGGGAGGATCTCTTGAGCTCAGGCATTCGAG
ACCAGCCTGGGCAACATGGAGAGATCCTCATCTCTCCAAAAAGAAGGAATAATAAATAATGAAAAATAAA
TACAATTTTCCAGTAGTCATATTAAAAAAGTAAAAAGAGGCCCGGTGCAATAGCTCATGCCTATAATACC
AGTACTTTAGGAGGCTGAAGCAGGAGGATCATTTGAGGTCAGTAGTTCAAGAGCAGCCTGGGCAACACAG
CGAGACCCTGTTCTCTACAAAAAAATTAAAAATTAGCCAGGTGTGGTGGCGCAATACTGTAGTCCTGAGG
TGGGAAGATTGCTTGAGCCTAGGAAGTCAAGGCTGCAGTGAGCTATAACGCTGCCACTGCGCTCCAGCCT
AAGCAACAGAGAGAGACGCTGTCTCTAAAAATAAATAAATAATAAAATAGTATAGTATTTGCATATAACA
TATGTACATCCTCCTGTATAGTTTAAATCATCTCTAGATTATGTATAATAACTTACACAATGTAAATAGT
TGTACTGTTTAGGAACAAAAAGATACAAAAAATCTGTATGTGTTCAGTACAGGTGTAATTTTTTCCCCCA
TACATTTTGTGGAACAAATATATGCATTTCTTTTGGGTTTATATGAAGAGTAGAACTGATTAGTCATAAG
ATGTGTACATACTCAGTTTTAGTAGATATTGCCAAACTGTTCTCCAAAGTAGTTATGTCAGTTCCTCCAG
TAGTGTGAAAGAATTCTAGTTGCTCCACACACCTTGTATCTGGGTTTTCATTTTAGCCATTCAGGCAAAT
ATGTAGTGCTATCCTGTTGGATTTTAATTTGTTTCCCTGATGAATAATCAGATTGAGCACCTTCCCTTGA
TAATGTTAGTAGATAGAGTTGGAGAGTGACTACCTTAATCCAGTAAGGAACCTGGGCCTAGTAGAGAGTA
GGTTGGGCAGTTTTGGCAAGGCTTTGTCTATCTCTAATTTAACCCTGTACCTGGGGTATAACCCTCCAGA
AATTTCAGCCAATAGCCTGATATGTCTGTTGGGTTTTCTACCCTTAATATTTTCTCCATAGCACTATGAG
ACTACTGAAAATTCTACTCTGCTTATACCTCCCAGAAGAGGAAAACTTAATGGCCAGGAAATATTAAGAG
GTTAAGATAAGTACTTGACCTCACTAGTATTAATGTTGCCTCATTAGGGCAATATTAAGTACTATATTGA
AATACCACTTTCCATGCCTCAGACTGGCATCAATTAAAATGTCTTAGAATATCAACAGTTGTCTCAACAA
ATTGAGAAATGATTGTACTGCCTGCCATAACTTCCTTTCAAGACTGTAAATTGGTACTTCTTTGGGAGAT
CATTTTAGCAAAATATTTTAAGCATGCATTCCAGCAATTCCACTTCTAGACAATACCTTAGAATAGCTGG
TTTCACTTTTAACTGCATATTTTAAAAGCCATGAAGTTTAAAGGCAACAAAAAACCAAGGCCTTCCTGAG
ACAGTTGCTCTGGGATTGAGCCTAAGAATTTTTTTAAAGTTCTACTTTTTTTATTGTGCAGCCAGCATTG
AAAAAGCTACTGTCCAAGAAAAACACATACAATGCACAGAAGATAATGTAGAAAAATGTTGAAGAGCGAT
ACAATAATTGCAAGTAGCCTAAATCCCTCAATAGGCATGAAGAATGGATGAATAAGTGATGTTTTTGATC
AGTGTAGTACTTTACAATGGCAAAAATAACTACTTCTAGGAATATCAAATCAGCATGGATAAATGTTGTA
AACATAGAGTTGAGTGAAATATAGCAAGTTTCAAAAGAATACGCATCGTACAACACTATTTGTAGAGTTA
AAACCATGCTAAGCAATGCTACATATTTGTGGATACATACATATGTAGTGCAAGTAAAGGAATTCCTGGG
AATGGTGAATTCTAAATTCAGGGTAATGGTTACAGTTAGGAGAGGAAAGGGAATACAATCAGATTATGGT
AGTAAACAGGGATTTTAACCATATTGATTATGTTTTATTTCTGAAACTGGGTAATGGATACTCTGGTTTA
TAATACATATCTTTTTGAATCTGTCTAAAATGTAAAATATTTTTTAAAATGAGGAGAGGCCAGAAGAAGT
CAGAAAAAGGTACATTGGCATGCCATTTAAAACTTAATTTTAAAAATATCTGTGTCTCTTGAGTTTGTAA
AGTGATTTCTTTTCAATTAAATAATATGTGACAAAAATCGTTGTATCTGTAACTTTGTGTGATTTATGTT
AATATATTTCTTCTGTTTTCTTTAGCCTTTCAAAAGCAAATTGCTTATGATAATCTCTCAGAAAGATACA
TTTCATTCCTTTTTTCAACACTTCAGCTACAACCACATGATGGAGAAAATTAAGAGTTATGTGAATTATG
TGCTAAGTGAAAAATCATCAACCTTTCTAATGAAGGTATACATATTATTCAAGAGTGACTAATAATAGAC
TTAAAGGAAACGTTATAATAAAGGAGAATACTTGAAATAGAAATCCTTTAAAATTAATCAGAATTTTTCA
TTGTGGTTTTGTAGAAAGGTGTGGTAAAATGTTACATTTTGTGGACCTAATTAAAAGATTTATGAGTGAT
ATGTACTTTTGTAACTTTTCAAAATTAGTTTGGGGAAATTTTCAAAAGAAAAAGTTGAAGGGAAAACTTA
GAATGAATTAAAAATAAGAAATAGGCAAAAGCAAATATTTTAATTTAAGTAAATTTTAAAGACTTTTTAA
ACATATTTTTGGGGAAAAATAGAATTGTATTAAAGAAGGGCCTTTTAAAATTTTTCTAGGCCAGGCGCGG
TGGCTCATGCCTGTAATGCTAGCACTTTGGGAGGCCAAGTTTCAGGAGTTCGAGACTAGCCTGGGCGACA
TGGTGAAACCCCTTATCTACAAAAAAATACAAAAAAATTAGCTGGGCCGGGCGCGGTGGCTCACGCCTGT
AATCCCAGCACTTTGGGAGGCCAAGGCAGGTGAATCACACGGTCAGGCGGATCACACGGTCAGGTGGCTA
ACATGGTGAAACCCCGTCTCTCCTAAGAAAATACAAAAAAATTAGCTGGGTGTGGTGGCAGGTGCCTGTA
GTCCCAGCTACTCAGGAGGCTGAAGCAGGAGAATGGCATGAACCTGGGAGGCAGAGCTTGCAGTGAGCTG
AGATTGCGCCACTGCACTCCAGCCTGGGCGACAGTGAGACTCTGTCTCAAAAAAAAAAAAAAAAAAAAAA
AAAAGCTGGGCATGGTGGCATACACCTGTAGTCCCAGCTACTTTGGGGAGTTGAGGCTGTAGTGAGCTGA
GGTTGAGCCACTGCACTCCAGCCTGGGTGACAAAATGAGACCCTGTCTCAAAAAAAAGACATTTCTGGTC
AGGCGCAGTGGCTCATGCCTGTAATCCCAGCACTTTGGGAGGCCGAAATGGGTAGATCGCTTGATCCCAG
GAGTTTGAGACCAGCCTGGGCAACATGGCAAAACCCCATCTCTACCGAAAAAATAGAAAAATTTAGCCAG
ACATAGTGGCACACGCCTGTAGTCCCAGCTACTTGTGGCGGCTGAGGCAGAAGGATTGCTTGAACCCAGG
AGGTTGAGGCTGTAGTGAGCTGAGATTGAACCACTGCACTCCAGCCTGGGTGACAAAGTGAGACTTGTCT
CAAAAAAAAACACATTTCTAGTCAGGCGCGGTAACTCACGCCTGTAATCCCAGCACTTTGGGAAGCCAAA
ATGGGTGGATCGCTTGAGCCCAGGAGTTTGAGACCAGCCTGGGCAACATGGCAAAACCCCGTCTCTACAA
AAAAATTACAAAAATTTAGCCAGGCATAGTGGCGCATGCCTGTAGTCCCAGCTACCTAGGAGGCTGATGT
GGGAAATCACCTGAGCCCAGGAGGTTGAGGCTGCAGTGAGCTGTGATTGTGCCACTGCACTCCAGCCTGG
GTGACAGAGTGAGACCCTGTCTCAAAACAAACAACAATAAAATTTTTCTAATAACATTTTATTTTCTGTC
TTGGCCTCCAAATTTTTAAGTTGACAGTGTTATAGTGGAGCATCTTGATTGATTTGAGATAGTTTTTATT
TGAAAATATCTAGAATTTTTATTTTTTTTTTTTTTCATGCAGCCTTTTCTCTTAAAATTGCCTAGAGAGC
ATTTTGTCTATCAAATATATTTACAAGGAAAGACCACCTTCGTAACGCTGATAAACCAAGCAGATAGCTA
ATGTAGCTGCTGGCAGTGTCATAATTATTGGTGAAAATAACAACACAGTGCCCTTCATTGGCCTGTGAAC
AGATACATTAGCTATGACTATCAAAGAATTACAAGGCTTAATTTAATGCTATTTGTTTAAAATGGCTTAA
TGCATTTCTTCCTATCCTTCTACCTCCACGCACGTTTTTTAAGGCAGCGGCAAAAGTAGTAGAAAGCAAA
AGGACAAGAACAATAACTTCTCAAGATAAACCTAGTGGTAATGATGTTGAAATGGAAACTGAAGCTAATT
TGGATACAAGAAAAAGGTTTGTAATTTAATCAATTTGTATATTTTTTGTTTTATGAATGTTCTGTCTTTA
TGTAAAATTGATATGTCTTTTTATTAAAAATAATTATTGAGTAGCATGTTATCTTGCTGATGATTAACAT
TTAGGTATTTGAAGTACTGTAGAGTTATTTCATGACTTGTGCAAATTATATATGCTAAGCAAAAGTAGAG
AATAAGAAAATATTACAGTTTAAATAATGTGGATAGTTTACCATTCTTGGGGTATGCTTAGGAACAAGGG
TGAGGTTGGACTCCTGTGCCCCTTAGTTGTGTTTAGATTCTACATGTTCTCATTATGTGATTCATGTTTC
ACTGTACTAAGAGTCTAGTATTTTAAGATATTATTCATATATCTTCTCTAAGCATAAGCTCACTGCTTCA
TCTGGTGCTCAACTGAAGAAATAGTGATTTGCTTTAATACTGGAGGAAAACAAGTTGTGTCAGTCCTATA
TATTGAGAGATAGTTGTTAAGTCTCCAAAATTATTTTTTCTTTAGGGATTTTCAGGGGTGATTGTTGTCT
TTTGTTTTAGAAGCTTAAGTATCTTCCCCTATTGAGAAAGATATAACTCTTAACATTATAAAGATCTTCT
TTTCTGTTGAACCCATGGTCTGTTTTCTCTGTTCTTCTACCCTTAAACCAAGGCCAGATAATCAAATCTC
TGTGGTCTCTGGATGGGTATATTTGGAAATGGATGTAATATTACTTTCTTCTTGGGACCATGACCTAAGT
GTTGCAGGGACCCCATCTTAACTACTTATTTAGAGGTGGAGATTGGGGTTCAAGTTGGATCTACACTGCA
TTTGTCACATCTTAGGACTGAGGTTCTGTCATCTTATAGTGGCCCCTCCTATTGTTCCTGCCTGTCAAAG
CATGACTTGTTCCTCAGGGGTTCATCTCTCCAAAGGCTGTACTAAAGTCTTATTTCACATTGATGTACTT
TTTTCTAAACTCCAATTTAAGAAGTAGAGATTCCATTTTTATTGGCCCAATTACTTCCTTTTGTTTCAAA
AATCAAAGTTGAATGATACTAATACCCAGTACATTCTTGTGGCCAAGCCATCCTGCTCATGATAATATTG
CTAATACCATGGTTCTTACAGATAATCATGAGCACACTTCCTATGGACTCTCCTTATATAGTGCTACCCA
CTTATTTCAGATGCTCTCCTAGACACAAACACAGTGCAATCCATGTGTACCAAACAGAACTCTTCATGTT
CTCATTTGCCTCTCTACACCCTGCCTCTCTTTAACCTCACACATCCAGCTGCTCTCCAAGTATTAGGAAC
CGCACCTCAGAAATGCTTCTCCAATCTATTTTTATCTATATAGCTTTGTACCATTCAAATCCATCCTTGA
CATAACTTCTAGAGTTAGCTTCCACAAAAATAAATCTCTTTAGATCACTCCCAGCTTAAAAACCTTTTGG
CTCCTATTTCCTACTAGATGAGTCAGAATTTATTGGCATGGCTTATAAAGCCTTACGTAGACCCATTTTT
TTTTTTTTTTTTTTTTTTTACATACAGTCTTATCCCTAAGCATGAACTCCTCCCTGTCCACATACATGGT
ACTTTCTAGCAGCACAGAAGCTTTGTTCCTTCTATTTGAATTCCTATCATTTTATTCTCTCCAAGGCAAG
CTCTTCCTTGCCATTCAGTCTATCTCAGAGATCACCTATATGAAGTCTTGCCCAGCTCTGTAATCAGAGT
TGTTACTTCTGTGCTTTCATAGCATACATCTCTATAAAAGGACTTATCTTCGTTGGTAACTTATTTGTTT
ACCTGATTCTTTCAATAGATTGAGAATTATTTGAAGGTTCTTACTTAGCTTTGAAGCATCTTAATTAGCT
TGGTATCCTTGTTGCCTCATTCATTACCAGGCATACATTAGAACTTGCTGTACACTAGTTACAGGGAACA
AAACTAAAACCAGAAACAGGGTAAAGATCAAGAATCGAGCAAATACCAAAACCATCGTGGAAGCAGAACC
AGGGCAAATAAAGCATCAAACCACCAGTGTCATGACAGTTACCAGTAAGGATTCAAGTAAAGCAAGTATA
GAATCAGAAGTGTGATTGTGAGGTCAGACAAATCCTAGAAAAATGGAAACCTCCATGTTATGAAGACTAG
ATGAAATAAATATTTTGCTCTGATAAAGCTTATACAGTTGTTCCTTGGTGTTTGAAGGGGATTAGTCCTA
GGACATCCATCCTTCATGAATACCAAAATCCATGGATGCTCAAGTGTCTTACAAAAATGGTGTAATAGCC
AGGAACAGTGGCTCACACCTGTAATCCCAGCACTTTGAAAGGCTGAGGCAGGAGGATCACTTGAGCCCAG
GAGTTTGAGACCAGCCTAGGCAACATGGCAGAACCTTGTCTTTACAAAAATTAACCAGTCTTGGTGGTGC
ATGCCTGTAGTGCCAACTACTTAAGAGGCTTAGGTGAGAGGATTGTTTGAGCCCGGCAGGTCTGCAGTAA
GCTGTGTTTGTGCCACTGCACTCCGGTGACCCTCGGCGAGACCCTGTCAAAAAAAAAAAGGGGGTGTAAT
ATTTGTATACAACCTACACACATCCTCCCATATACTTTAAATCATCTCTAGATTACTTAAAATATCTAAC
ACAGTGTTGAAATAGTTGAGATGGACAGCTTCATGGAGGTAGTAGTCTTGAACAGGGGCTTTTGTAGGAT
GGTTAAGATTTTTACAGATGGATAGAAGAGGAAATATCATTTTAGGAGAGAGGAATATTACTAGTGAAAG
CATGGAGGTGTAAATAGTCATGCTGTGTGTATGTGGAAACCATTTTAACTATAACAAACGGGAACTTAAT
CGATTCCCAAAAGTTCAATTGGAGACTGGTGGGGAGAACCAGAAATTAAAATTGAACCCATCAAATTGTA
TACTTTAAACATGTGCCATGCTTTTTATGTATCAATTATACCTTAATAAAGCAGTTTTTAAAACTTGAAT
TCATGGAAATAAAGTGCCGTAGAAGAGTTTTTGAAAGAGTGTTATAAATGCTTGACTACACCATTAATTA
TGCTTATGTTTGGAGAAACTTGGTTTAATACCTCTTATAAGCATGTCTGGACAAGAATTAGCCATGTTGT
AATGGACTGTATATGTCCCGATGTTACCAAGGTTTCTTTCCAAAGTTATTTTTTTATAAATTGAAATATG
CCTTGACTATGTGGAAAGTACTATCCTTATGAAAAGTTTCTTTTGTTTACATTCTTACAAATTTTTTCTT
CTTTTAAAGTGTTAGTGACAAACAGTCTGCGGTAACTGAATCCTCAGAGGGTACAGTATCCTTATTGAGG
TGAAGTAAATTGACGTTTTTCTTCTTTGTCTTTCAAATCTTTGATTGAAGCAATTCATGCAGACCTAATA
AAAACTACCACATAAATGGTACAATTGAAAGAATATCTCAGGGTCCTAGTTAGCCCAACAGATAGTCACG
ACTCTGAGACATCTTGAAATTCCAAACTGTAGAGACCTGCTCTGAGACTGGGTTGTTTCACATTGTTTCT
ACAAAGCCATTATTGGAATACACATATAGGGAGTTCTTGAGCTTAAAACAGATGTTTAGTAAACACTTCT
CTGTCACAGAAACAAAGATATGATACTGGGGCAGGAAGGGGATGGCAATTACATTTCTAATGAATGCCCC
ATGCCAATTTTATGAAAGTTACTTGAAAAACTTTATTTGATCTAATAGAATCGCTGTGACAGACAATACA
ACCTGTCCCGAGGGCAGAAAGTCTGCATGAATGATTTCTAACATAGAGCAGTTGGGATCACAAGTGGAAC
CATGGGGAGGAGGTGGCTGACTTCATGTGGAGGAGGTGATTGGACATGAGGAACTGAGAGGCCAAGATGG
TATATGAATTGTCTGTGAGAACACTGAAATAATTCATAATAGCAGCACTTAGGTGTAGAGAAAGATCTGT
GAATGATGAAGAAGTGCTTGGAAGGATGGTAAATGGCTGTGAAGAATGATTGAAGGTGATACATCTCAGT
GGCATGAATCCTCAAGGCTGAAGTTTCTATGGAAGCAGGATCTTGAAAGTGGCATTCATTAGGAAATGAA
AACTGCTGTCTCTGGAGTCCTATAGTTTATGGAGGGTGGAAGATTAAGCCAATCTCTACTTGAGAAGGCT
ACCAAGGAGAGAAACATTGTCCCCAGGGGAAAGCTAGATTTTAGACAAGGCAAAGAGCGGAGAGGAATGG
GTGAAGAGATTGAGAATGACATTCTAGAAAGGACAATAGAAAGTCTTAGGAAGGAGGGACAGAGGGGAAG
AGAGAAAGGATGGCTGGTCACCTAGAGTATCTATAGGGATAAAAGTATAGCTAAAATAACCTACATTTTA
GGTGGAGATAATACAGCTGCCTAAGCTTAGGTGAACTGCTTTTTGAATCTTAGTTTGCTCCTTCATAAAA
TTGGATTAATATAATACCAATTTGGCAGAGTTTTCAAAAAAAATGATGCCACATCCTGTGTTTCCAAACA
GCCTTACCTTTCAAAACTCTTTTTGGAAGCTGTAAAGATAATCAAGTGATACCTGCCATTATGTAAAGGA
ATTTTGGAATCCGTCTTTGGGGAAATAAAAGCCATAAGAGAGAATGAAAGCTAATACTTTGTAGTTTAAG
GATTTTTTTCCTTGATGTATCTAATTGGAAGGCCGAAAGAGTCTTGTCTTTTCTTTTTTTTGCCTGCTTC
TTCTGAGACATCAAAAAACATCTTGATTTCTGCGGAGTAGATGAGATGGAGAAAGATGAGACAGGCAACA
GAAATCTTAAGAGGCCACAGGTTAAGATGGGGTACTAAGCAGGGAGAGCACCAAAGGAAGTAGGCCAAAG
TATTAATAGAAGATCCTAGAACAGATTAAGGCAAATCATTTACCTGTTTTCCATTGCCTTACTATCTTTC
TGGAGCCAATTACAAACTTTCCTGTTTTATTTTAGGTCTCACAAGAATCTTTTCTTATCTAAGTTGCAAC
ATGGAACCCAGCAACAAGACCTTAATAAGAAAGAAAGAAGAGTAGGAACTCCTCAAAGTGAGTACTGTTA
TAACAGTTTTAGAAGGGGAGAATTGATGTGTCCTCAAACAATCCAGCCATTGACTTTACCACTATAGCAA
AAAAACACACACTTCAGAAAACTGAAGCACAAAGTCTTGACTTCATAGAGTTAATTGAGATAGTGTTTAA
TTTAGAAAGTTAGCTATTTTGACTGTCTAGCTTAGGGTTCTTTTGCTATGGTGGTACACTGCTTTTCTAC
CTTCACTGTGTTCAGCAACTTCAAGTATAGTCATATGCCACATCATGACATTTCAGTCAAAGACAGACTG
CATTGCATATAGGATGGTGGTCCTGTAATAATGTAATGGAGCACATATGGAAACTTGATAATGTGGCACT
TGATATTGGCATTGCATATCAAGTAGGGGAAATGATTGATAATTAGCAATGGTACTGGGAACCGTGGGTT
TTCTATATGAATATATATATATATATGTATGTTTGTGTAAGTGTACTCTTAATAATGTTCACATAAGGAC
AAAATCACCCAACGCCCCATTTCTCAGAACATATCCCCCTTGTAAAGCAATCCGTGACTGTAGTTACTTT
TCAGAAACATTAAGTACAGTTGATTCTTGTTATTCACAGTAGTTACGTTTAATAAAGTCTGAGAGCGTTG
ACTTAGCAAATTACAAGTTTCTTTTTGGTATGTAGTCATTTAACAAATGTTTATTGACCCCACAGTAATA
TTTTAGGTACTGAACTGATACTGAGATTTTTTTTTTTTATACTTTAAGTTTTAGGGTACATGTTCACAAC
GTGCAGGTTTGTTACATATGTATACATGTGCCATGTTGGTGTGCTGCACCCATTAACTCGTCATTTAGCA
TTAGGTATATCTCCTAATGCTATCCCTCCCCCCTCCCCCCTGAGATTTTTAATATGGATCTAAACCTAAA
TACTTATTGATAAAAATAATAGACATAATGAAATTAGGTTTATTTCTCCATGCTCATAAGGTACCATCTT
GGTGCCAGGCAAATGATAGGCCTGCAGTAAATATTATAGAATAAATTTGTTCATACCTGATGGCTGATGA
CATGGCAACCATTAGCAAATATTTGTAAATAGAGTTCTAAAATATTTACATTCATAGATATCATTCCCAT
TTTTAAAGATGAGAAAACGGAAACTCAGTAAAGTTATGTGCTTAATGTTGGTGGAGTTCCAAGATTGGTT
TTCTATACCTATTGCTGCAAGACGGCTGGGAATCATTTTAAATGAGAATAATGTGAGCATTTTCCTAGGG
TTTTAATTTCATAGTATGAAATTCAAAGAAAAGGAAATGTAGGCCAGGCGCAGTGGCTCACGCCTATAGT
CCTAGCACTTTGGGACGCTGAGGCAGGTGGATTGCCTGAAGAGCTCAGGAGTTTGAGACCAGCCTTGGCA
ACATGGCGAAACCCCGTTTCTACTAAAAATAGAAAAAATTAGCCAGGCATGGTGGTGCCTGCCTGTAATG
CCAGCTACTCAGGAGGCTGAGGCACGAGAATCCAGCTTGAACCTAGGAGGTGGAGGTTGCACTCCAGCCT
GTGTGACAGAGCGAGACTGTCTCAAAAAAGAGAAAACATGGTTTATCAGCAAACTCGAAGACTATAAACT
CTTTGCAAACTGGCTTGACAGTGACTGTGGCTATTGAGTCTATAAGGTCTTTGAGTTTTAGCACATTTTA
TTAGGTGTCAGTAATAAGTACGTTTTCTTAAAAAAATTCAGTGTACTTCAGTGGTACCCAGGTACCCCCT
CTTTATAGTTTGAGGCTAATAATTTTGTTTGTGCTAAACCTTTTTTTCTCTTCTTTTTCTGTTTTTGGAG
ACAGAGTCTTACTTTGTTGCCCAGGCTGGAATGCAGTGCAGTGGTGAGATCTTGGCTCACTGTAGCATCT
ACCTTCCCAGGCTCAGTTGATCCTCCCACCTCAGCCTTCCAAGTAGCTGGGACCACAGGCACATGCCGCC
ACACCCTGCTATTTTTTTGTTTGTTTGTTTGTTTGTTTGTTTTGAGATGGGGTCTTGCACTGTCACCCTG
GCTGGAGTGTGGTGGATCAATCTCGGCTCACTGCAACCTCCATTTCCAGGTTTCAAGCAATTCTCCTGCC
TCAGCCTCCTGAGTAGCTGGGATTACAGGAGTGTGCCACCACACCCGGCAGATTTTTGTATTTTTAGTAG
AGACGGGGTTTCGCCATGTTGGCCAGGCTGGTCTGGAACTCCTAACCTCAGGCAATCCGCCCACCTCGGC
CTCCCCAAAGTGCTGGGATTACAGGCGTGAGCCACCACACCCGGCCTTTTTGTGTTTTTTGTAGAGGTGG
GGTTTGGCATGTTGCCCCTGCAGGTCTCTAACTCCCAAACTCAAGCAATCTGCTTGCTGTAATTGTGCTG
AGATTACAGGCATGAGCCACTGCTCCCAGCCCTAACCTTTTTTTCAAAAACTAATTTTTGTGTTGTAAAA
TTGACATATGCTTAGGGAAAAAAAATCAAGTTAATTCAGAAAACTTGAAAGAAAAAGCCAAATCATCCAG
ATTTCATCAGTGCAGAAAAACTCACCAGCATTGAGTGAAATTATTAATATTTGAGTTGAAAGCTTTTTAT
AGGTAAATGCATTCAATCCTCAAAACAACCTTATGAGATTAGTGCTTTTTTTTTTTATCATCTCCATTAT
ACAGATGAGGAAGCTGAGACTTAAAAAGGTAAATAAAATGCCTTTGGTTACACAGTGTATGAATAGAACA
GGAGCCAAAATTTGAAATCAGACAGTCTGACTCCAGAGCCCAGGCTTTTAATTGCTTAGATGGACTACCT
CAGTAGAAGAATGTATAGATTGAAAGCAAATCAAATTTTAGAAAAATGTCATCAAGTTACATATGTTACT
TTAAAATATATTTACATTTAATTTTTAATATGTAAAACTGAAGGATTCAGTACTTCAGATAAAGGTGGTT
TCACAAGAAATCTATCAGTAACCTTTATGATCTGTGTAAAATAAAGAATATGAAATGCTTTAAGAGGTCA
TTCAACTTTAGTTAATCAACTTTAGTCTGTTGATTGACCTTAGCAAAAATTTCTTCCACCAATCCCCAAA
TTTTCTTGGTTATATTTTATATAATCAATAGTTGTAGCATTGTTTTCCCATGTTGGATTTTCAGTTCAAA
ATACTTTTTCATTTTTGTAGAGACTTTTTTACTGACCTATGAGGGAAGTTGTTTAATTTCCAAATATCTT
TCTGTTACTGATTTTTAGTTTAATTCTATTTCAGTCTGTGAATATGCTTCGTAGATTTTTTTTTTTTTAA
GATTTGTTTTATGGCCCACAGTATGGTTTATTTTGGTCCATTTGGATGTGCACAGAGAAGAACGTGAATT
CTGGCATTGTTGAATGAAGTGTTTTAAAATGTCAATTAGGTCAAGTTTTTAATAATGCTGTTCAGGTATT
CTATATATGTACTCATTTCCTGTCTATTGTTGTATCAATTAGAAAAGTGATAAATCTCCCAAATATAATT
ATGAATTTGTCTTTACATTTATGTGATTATTTGCTTTTTGCTATTTTAGTCCCCTAGCACCTGTTTAAAC
ATTTCTCCTAATGCTAAAATCTCTCCATCAGAGCTAGTGTGGTTTCCATTTTCCTGACTGGAACACACCC
AGTATATATGTCAAAATCCCATATATGTCAACATCCCATGTTTGTAGTAGGGTAATCTTATTGTTTTTCA
AGAGTATCTTGACTATTCTGGTGTTTTGGTGTTCCATATTGTCAGGGAAAAAACCTAGCCATAGGGCTTT
ATAAGCAGTAAACCTGCTGCTACTTTATAGATACAAAAGGTAGACAACAAGACTTAGTGACTTAATGAGT
TAGAGTAAGACAGATTATTATAGCAAACAACATGGCATTGATGTAGTTGTTCAGATTTCCCTACCCCAAG
TCCGGTGGACTATGCAACAGGCCTAAATGGATGCTGCGAAGGCAGTAAGTTATATTTCAGCTGAGGAAAA
CTCAGAGCCAAGGGCCCAGTGCTTTTTGAGTAAGCAACAAAACATTGTAACAAATAGCAAACAAGCCAGT
ACCCTCTCCCAGGAGAGAGCAGTTGGCCTGGTCATCATGTTGTGGTTTCCTTGACCTGCTTAATTGCCTA
TCTGACTGGCTATAGAAAATGCACTATTTCAGGAGATGAATAAGGCTTTTCTACATTCAACAGGAATTGC
AGGGGTGCTCAGAGCCAATAGTGGACTACCTGTCTTAACACATAATTTTAGAATAATTTTGTTAAACTAT
ACGAAGAACCCTGTTGAGATTTTTATGTGAAATTGCATTGTTAACAATAGATGATTTTGCAGAGAACTGA
CACCATTACATTAAGTTTCCTGTGCATGAACAAAATACATTTCTCTAACATGTTTTTATATATACAGTCA
TCCCTTGGTTTTCACAGGGTATTGGTTCCAGGACCCATCCCCCCGCCCCCACAGCAGGGATACCAGAATT
CTCAAATGCTCAAGTCCCTTACATAAAATGGCATAGTCTTTGCATATAGACCTGTGCACCCGCCTACCAC
ATGCTTTAACTCATCCCCAAATTACTTACAGTAACTAAAACAATGTAAATGATAAATAACTAAATTGTAG
TAAATAATTGTTAGACTATATTTTTTATTTGTATCACTTTTATTATTGTAGTTATATATAAATATATATA
ATATATATTTATATATAATATATTATATATATATGACCTATGAGGGAAGTTGTTTAATTTCCAAATATCT
TTCTGTTACTGATTTTTAGTTTAATTCTATTTCAGTCTGTGAATATGCTTCATAGATTTTTTTTTAAAGA
TTTGTTTAATGGCCCACAGTATGGTTTATATGTAATATAATATATAATATATATAATATATAATGTACAT
AATATATAATTATAATATATATAATAATTATACTACATATAATATATATCATATATTATATAAAACCCCA
TATATACTATATAATTAATAATTTATATATTATAATATATAATAATTTATATTATAATATATAATATAAT
AATATATATTATATAATATAATTTATATATAATTATAATATAATAATTTATATATAATTATAAAGCTTTA
CTATGTATATAAAACATGTTATGAGAAGCTTTATCTATCTTATCTACCTATCTACTTACCTACCTACCTA
CCTAACTGTTGGCCCTCTATATTCACAGATTCCACATCTGTGGATTCAACCAACCTTGGAATAAAATATT
TGGGGGGAAAATACATATAAATTTTTATATATAATATATAATATATATTATATATGTTATATTAACATAT
AAAATATATTAAATATATTTATATATAATAAATTTATATATTTGGAATAAAATATATAAACCTTGGAACC
TTGGAATAAAATATTCGGGGGGGAAAATATATATATTTTTTATATATAATATATATAACATATCATAAAT
TTATTATATATATTATATATTATATATAACATATATAATATATATTATATGTATAATAATATTATATTAT
ATATAATATATATTATATAGTATAATATTATATTATATATAATATATATTATATAGTATGAAATATATAT
TATATATAATATTATATAGTATAATATATATATTATATATAATATATAGTATAATAATATATATATTATA
TATAATATATAGTATAATAATATATATAATATATAATATATAAATATGATATATAATATATATAAATATG
ATATATAATATATATAAATATGATATAATATATAATATATATAAATATTATATATATATAAAACATATAT
ATATTTTTCCCCCCGAATATTTTATTCCAAGGTTGGTTGAATCCACAGATGTGGAACCTGCGAATATAGA
AGGCCAGCAGTAGGTAGGTAGGTAGGTAAGTAGATAGGTAGATAGATAGATAAAGCTTCTCATAACATGT
TTTATATACATAGTAAAGCTTTATAATTTACTACATACAAATGTATCACTTTTGATAAAGTTATCTAAGA
GGCCATGACCTGATGGCTCATACCTGTAATTCCAGCACTTTGGGAGGCCAAGGCAGGAGGATTACTTGAG
CCCAGGAATTAAGAGACCAGCCTGTGCAATATAGTGAAACCATGTCTTTACAAAAAAATTTTAAAAAATT
AGTCGGGCATGGCGGCCGGTGCCTCTAGTACCAGCTACTCAGGAGGCTGAGGTGAGGGAGGATAAGGCAG
AAGTATCACTTGAGCCCAGGAGTTTGAGCTGTGATCATACCACTGCACTTCAGCCTAGGCAAAAGAGAGA
GACCCTATCTCTTAAAAAAAAAAAGTTACCTCTAAGAATGTTAGATTTTTTTGTGGCTATTGTAAATAGT
ATCTTTATATTGTTTTAATTAAATTATTTTAACTGTTTGTTGCTAATGAATAGAAATCCTATTGCTAATG
AATGAAATCCTTTTTGTGTATTGATCTTACTGATCTTTTAATTCTATTTGTAGATTCTCTTAGGTTTTCT
GCCTAAACAATTATCATTTTTCAGTAATTACAGTTCTGTTTCTTTTCAGTTACATATATTTGTCTTACCA
AACTGACTATGAATAAGAAAGAAGGAGTGAGGAAAGGATTATGCTTCTTAGTACTCCTAAAACATTATCG
TAAGAAAATTTCAACGATCCTATGCAATAAATATTTTTCCTTTTTTTTTAAACAGATAATGGAAAGACAG
GTTCAGGGATGTGAAATGATTTATTTAAAGACATATAAAAGAATCAAGACTCAAAACACTCCCCCTCTGA
TTTCAAAGGCTGATCTTTGCACTATACCATACTGCTTCCAGATTTGAAGGAAAAAGTTAAACATGTACTT
TTTCTTAGAATAGCTTAGAAAAGGAATTTCATTATAATCATTAAAAATATAATTGCTCTTTTTTCTTTAA
TGTAAATCAATATTTATGACATTATTTTTCTACTTTTAGGTACAAAAAAGAAAAAAGAAAGCAGAAGAGC
CACTGAAAGCAGAATACCTGTTTCAAAGAGTCAGCCGGTAACTCCTGAAAAACATCGAGCTAGAAAAAGA
CAGGTATTTGGTTTTTTAAAATTCGAATAACGCTTATGGACATTAAAGTTATAACTTGAATAATTGTGAT
TATTTCTGTTCAACCTCCCCAAAATTTTGAGTGTAAAATATTTGCCCTTTGCCATCTTTTATTTTGCCGT
CTTAGATAGGTGACTAATCAGCCTATTCAAAATGAAATACTTCACCCATATTTAAAAAGTCTTAAGTTGG
GTGTTGGTACTGACATCTGTTTGGAATTATTGTGATACTATCATAAAATCTGTTTATTAGATGTAAGGTG
GGACTTAACTCCACATTATAAGCTTTGATGTTTAAATTTTCCTAACAGGGATCCAGTGTAAAAAGAGTTT
TCTTTACTTAAAAACAAAGAAAAGATACCATTTGATCACAAAATTTTATTAAGGTGGGTCAATTTAGGGC
TTGATTCATTTGCTTCCCCTTTCAGTGACTATAGTCTTGTGCCATCTGTCCAGTGTCTGAAACCATTATT
TTATGTATTTTTTGATTGTCTAGTTGTTCACAGCAGATGGATAAATCTGGTCTTTGTTTTTGTGGTGTGT
GTGTGTGTGTGTGTGTGTGTGTGTGTGTGTGTGTGTGTGTTTCCCCCTTTTTTTTGTAGAGATGGTGTCT
CACAATGTTGCCCAGGCTGGTCTTGAATTACTTGGCTCGAGTGATCCTCCCACCTTGGGCTCCAAAAGTG
CTGGGACTGTAGGCATGAGCTACTGCACCCAGTCAGGCCCTTGTTTTCTTTTGTGGCTGGAACCGTTTTC
TTACTCGAAGGTGCCTTTTTTTTTTTTTTTTTGACAAGCTAATTGCAAATAGTTCATACTGAGGTGCTGC
AGATAGTGTCAAGTTGCACGCTACTCGGAATATCTTCTGTGACTCAAAGTTATGTTACCCTTCATTTCTC
CCCCAGTGAACATAGCAAGCAACTTCTACTTTTCATTTGCTTCCTACACATATTACTTGCCTTTGTGATT
CCCTTTTTTAGCCTTGCCATCTCTGGCCTTTAGTAGGTTGAGGGGAGCTCCTGCTGTTGCTGACCAGAGA
TTTAGGGGGTGTACCTCAGGGTATTTTCATTAGAAAAACAGATGGCACACACTTCCTGAGATCTGTAGAC
AGAGTTGCTTTTTCATACACCTAAGTTGCACTGATTATTTATACCCTTTCTACCTACATTATGGTTCAGG
TTGTAAATTTCTCTTAACTTTTTTCAGAGTTTGGGATTTTATTTCTTGTTGCTTTTGGGTGAATTCCCAA
AGGAGAAGAGGGAAATGCTAACCTTATGCTACCATATGTGACCACAGTCATGCATATGTTTTGTGCTGGA
TTTTTTTTGCAGTTTGAATATGATGTACATGTATATAGTTTGTTATTTATCCTGCTTGGTATTTTCTGAG
CTTCCTGAATCTGTAGTTTGGTGTCTGTCTTTAGTTTTGGAAAATGCTCAGCCATTATTACTTCAAATCT
TTCTTTTGTTCCTTTCCTTCTTCTTCTGGTGTTCCCATTATGATTCCAAATGTTACACCTTTTAAGATTG
TCCCACTGTTCTTAGTTATTCCTTTATCTTTTTCATTCTTTTTTCTGTTTACTTTTCAGTTTGAGAACTT
TCTATTAATATATCTTCAAATGTACTGATTCTTTCTTCAGCTGTGTTTAATCTGCTTATGAGCCCATCAG
AGGCATTGTTCATTTCTGTTACCATGTTGATTTCTGGCATTTCCCTTTGGTTCTTTCTTAGAGTTTTCAT
CTCTCCATTTACATTTACCCATCTGTTCTTGCATGTTGTCCACTTTTTCCATTAAATCCTTTGACATATT
GATCATAATCATTTTAAATTCCAAGTCTGACAATTTCAAAATCTGTGCCATATCTTGAGTGTGGTCCTGG
TGCTTGCTTTGTCTCTTCAGACTGTGTTTTTTGCTTTTTAGCATGTTTATAATATTTTGCTGATAGCTAG
ACATGATATATCAGGTAAAAGGAAATGAGATAAATGATCCTTTAATGTGAGGTTTTATGTTTATCTGTCT
AGGAGTTACCGTTTGTAGCTGTAGGTGTCAAAGGCTAAAATTTCCTTTAGTGTCCTGTTTTTGTCTCTCT
TGTTGTCTCTGGGTTTCCCTAGAGACTGCTTTTTAATAAGAATCTGAGGGACCTCTTTCAACTATAACGC
CCAGGATCCTGACTAATGTAGTGGTAAGGTAAGGGGAGGTGAAGCGTTCTGGAGTCCTGTGCATAGTTCT
CCTTCTTTTAGTAAGCCTGTGTCCTAGGCTGTGACCTTCATAAGTGCTTCTCAGCCCACCACCCCTTGGG
TGAGACATGAAGGCTAGAGAGGGGTGGAGTTGAGTATTTCCACAGGTAAGTTAGGTTCTGGTAAAACCTC
AGTTGGTTAGGTTCTGGCAAAATTAGTTTCTCTTGAGGAAAGGATTTTGTTAAGAAGACCAGAACGCTTT
CCTCATTTATTTTGAAATGGGGAGTATTTCTAATTGGGGAGTATTTCAAAATGGCTACTTTTTCCCTCCG
CCTGTCAGAAGCAGGAAGGAATTTTTGTGTAATCTTTACCCTGAGACCTGGGGGGGCTCCTGGAGATAAA
ACTCACAAAAGTTTGTGAGTCCCTCTGAAACTGGGCCCTTGGAGTTTTTAACTCTGAAGCTTATCCACAC
GGATCCTCCATCAGTTCCTCAGTCACAGTTAATTGCTCCTACCAGTATTGGCTCCAGCTGTGAGCTTCTG
CTCCTGGCCTTTCTGTCCCCAGTAATTCTTGTGATTTTCTCAATCTGCCTCTCTCTCTCTTTAGTTTTCA
GGACAGCAGTTTGCCCTGTGACATTTGTTCTTTGATGTATCTAAGAAGAGTTACTGAGTTTCAGTTTGTT
CAACAGCTTTTTTCTTCTGGGGACTGTAGTGATGATTTCCAAGCTCTTCACATGTTAGATTGGAAACCAG
AAGTCTCTGTCTTATACATATAACTGATCTTTCCCTATAGTTCTTCCAGCAGCCATTCCAAATGAGGTGT
TATTTACAGATATATATGAGGAAAACAGTTGTTTCTCTTCTATTCAAAACGAAATATAGGATATCGACCA
CATAATCAGTGATAATATCTATCACCATTTCCTATGCCAAAAAAGAATTCTGTGGATATCACAAGGGCCT
GGTTTTATTTTTTAGCTTTCCGTTGTTGGCCTTTTGTTAAAATACTTGTTTTAGAAGATAAGTGACAGAC
TTAATTTTATTTTGTATTGAGGTTTTTAAAAAAAAAAACTTACGGCAATAGCCCATGTCTACTTGGACAG
TTTTCTTTTGCTGCATTGGTCTGTTAAAGATATTTCTTCCTTCCTCATCAGAATTAAAGAGCCCTCCTTT
TATAAACTTATTCCATTAAAGAAGAAAAGTAAATGCCTTTCAAACTGTTTTCCATAAACAGTATGTAATG
AGAAATACTGTAGCAGTATTTTCTTTTACTATTCGTAGTATCATTTTAAGGCATTAAAAAGCATTATTTG
TTCTTTAGAATGGATATACAGTGCAGATCTGAGTTATGTAATCTCTAGCCTTGGGAAAGAAAAAGATTGG
TGTGTTTTAATTTGTTATGTGCTCTTTGTATCTTTTCAGGCTATTGGCATGGCTGGGGTTGTTAAGATTT
TGTATTTGATTTTTTGAGAAAATAAAAGACAAATGACAATAAAACAAAGGAAATGGGTTGTATGGGTTTA
ATGTCCAGAAATACATCATCTTAAACTCTTCCCTTAATTATTACTATCAGTGGAATCTGGTACAATCAGT
TAAATGTATAAAATGAGGAAATGGAAAGTTTTAAGCACAATAGTAGACTTTATGAAATTGTACTGCCCTT
ATGTTTTCTTTCTGATCTGACACAGGTCAGTTGTGTCACTCATTAAACTCTAGCTATAGAAAGTAGAAGT
TGGTACCAATGACTACTAGGCCACTTGAACCTCTAAACTTAAAAATTACAGCTTTCCTTACTTGCCAGAC
GATAGCTTATTCTGTATGATGTTTTCAAAACTCTTTCAGTCACAGGTAAAATTAAGCAAAGACTGAAAAC
ATTCAGATCAAGCAAAACAATCAAGGCATAATCAACCATGAAATAACACTATATCAAGCTAAAGTTACTC
TTTTTCAATAGAAGAAAAAAATAAAATACTTAATGCTAAACACTGTTAGTTTTCAGTTAATCTATACTGA
CAACATTACTACTTTCCTCTAGGTTAGGGGTGAGCAAAATTTTTCTATAAAGAGCAAGATTTATAATATA
TTTATTACTAATGTATTTTATGTATATTTCACATACATAGTTTCTGTTACATATTTTAAATATATTTTTT
AAATGACTTAAATTTTAATATGGTTCTTAGCTCCGGGGCTGTAGAAAACCAGCCTTGGGCTGGGTTTTGG
CAGTGGCTTGCTGTCCCCTGCTATAGATGATACATGGGAAAATACTGCTTAAACATACTGCACCCAGGAC
CCCAAATAGGATTCAGAAAACATTGGTCATTTCTTGAAAGAAAGGGGCTTTTGTATTGTATCAAACGTCA
TCTGTGCACCTTATTAAAAATACTACAGCTCAGATAAGAACAAGAAAACAATGCTGTATATGTGTATGAA
ATTTGTCTAAACCACAAACTACTTTTTAAAGCTGAATAACGTATATGGCAAGTTTTTGAAAGAACAGAAA
TGCTTAACTTGGAGACCATGGAGTTGATAGGCTCTTTAAAGAGAGTTTATGTGGCCCCCAAATTTGTATA
TGAAATTTTAGATACTATACTTTTCTGTGGAGTACGTCTGTAAGATTTATATGACCCCAAAGATTAATAA
CCCACTGTTGAAGTGCTTTTAATCAGTCACCCCACACATGAAAAATTTATTAATGCATCTCTTGGTTTTT
GTCAGTTAATGACAAGCAGTGTAGTGAGGTTTTGTAGGAGTGAAGGCCGAGTCAGGCAGTAATAGATGGT
CATAGGAGGCTGTCAGCCTTTGTCTAGCGATTGAATAGCCATGTACTTGTAAGCAGCACAGTTGCCGATA
GGTGTGCTGCAGACAAACAAAAGCAAAAGCACGTACAGAAGAGACCAGGTTCGTATCTTGGATTTAAGTC
ACAAAGCAGAGGAATAGCAAGAACAGGGGATCAGGTTTAAGGTAGCTCAAACAAACTTCTGCATGGGTTT
GGTTACGGTCACTGCCAACTTTTTGGTACTGAGTCATACACGAGATGGTTCTCATGTCATGTTTGTATTC
TTCAGGCCACCTTGAATTCTTTCTAATATTGCATTAGACAATTGAACTGGATTTTTTTTTCTTCGATTAT
AGTAAAGTACACATGATATAAAATTTACCATTTGCCATTTTAACTATTTTTAAGTGTACAGTTTGGTAGC
ATTAAATATATTCATATTGTGCTACCATCACTACCATCTATCAATAGCACTCTTCCTCTTACAAAACTGA
AACCGTACTCCTTAAACAGTAAGTCCATTTCCATCCTCCCAGCCCCCTTGCCACCATCATTCTACTTTCT
GTTTATGAGTTGGACTATTCTAGGCACCTCATATCAGAAGTAGCATAGTATTTTTCTTTTTCTGTCTAAC
CTAATGTCCTCAAGGTTTATCCATGTTCTAGAATGCGTCAGAACTTCCTTTTTAAGGCTGAATTATATAA
GTATAATATATAATATAATTTTGTTTATCCATTTATCAGTTGATGGACAGTTGGGTTGCATCCACATTTT
AACTATTGTGAATAATGCTGCTATGAACATGGATGTACAAATACCTCTTCAGGTCCCTGCTCTCGACTCT
TTTAGATATGTACCCAGAAGTGGAATTGCTGGATCATATGGTAGTCCTTTTAAAAAATTTTTTGGGTAAC
TGTCATACTGTTTTCCATAGTGGTGCTATAATTTTACATTCCCACCACTAGTGCACACAGGTTCCAATTT
ATCCATATCCTCACCAACACTTATTTTGTGTTTTTTTGATAGCAGCCATCTGAATGAGTGTGGGTTGATG
AACCGGGTTTTTAAAGAAAATCTGAAGTGCTGGAGAATTTCTTGTAGTCTAGACACAGTAAATAACCACG
CAGATGGTCAAATTGCTCTTTCAGCATGCCAACAGAAGGAATAATTAGTTAGTTGCCTGTAGCAAATGCC
AAGTATCAGTAATTTTTCTGTGTATAGTATTAAATTTGATTTTTAAAAATGTTTAGGAATTTTCTCCCAG
CATAAAATTAAATGTTTTTAATTAGTTTATGTTAGTTGTATTTTTGAAAGTCTATTTTAGACAAGATTTG
AGTTTTATATGGGTGTGTAATACTTCCCCTACCATAGGCAGAACAGGTTTTTCACTGAGTTCATTAGTGA
ACTACTAAACATTCACAAAGCCTATTTGGAGATTTGGAGGATAATAAATACAACTATTAACAATTGTAGA
AGAGCATTTTAAGAGACAGTGTGGGCTTAAAGTCAGACAAATTCAGTTGACATGTAGCACTGCCACTTTC
TAGCTATCTGATCTTGGGCAGCTGAGCTTACATAAAATGAACAGTAATAATAATGACCCCTAAAAATGTT
ACGATAAATGTAAAATCTTTTAAAAATCTAAGAAATGTTTAGAGAAGTCTTCCGTCTTTAAGAAACTAAG
CATTATTTTGATTTTTTAAAACTGGCATTTATAGTAGGTATTTTCTTTTTGAATAATTGTTTCTGTAAAT
AACTGTTTTACTTTTTATCAAAAGGCATGGCTTTGGGAAGAAGACAAGAATTTGAGATCTGGCGTGAGGA
AATATGGAGAGGGAAACTGGTCTAAAATACTGTTGCATTATAAATTCAACAACCGGACAAGTGTCATGTT
AAAAGACAGATGGAGGACCATGAAGAAACTAAAACTGATTTCCTCAGACAGCGAAGACTGATTGTGTTTG
TAAAAGCTTGATGAAAGGACAGTTAAGTATTTTGATCACTGCATTTTGTTTGAAACTTGTGTCATTGATG
TAATTTAAAACTTTTGTTTAAAGCATTACAGTATTTTTCTGTGACCATCAATTAATGAGGGTTTGTGCTA
CCAGAGTTAAAGCATATGCTATCATTGTATTCTTTAAGAACCTTATTTTGATAAAATGTAAATTTGTTGA
ACCCTGCCACATTTAGTATCCCCACCCCCAAATCCTGTTCCAATGAAAAAATTAAAACCTGATACGAAAA
AAAAAAAATTCCAGTTAACCTATTTTGTGTCTGTAGGCTGACCTCAACCCTGTAACGTAACCCATTAAAA
TGAATTTCTTTTTTTTTAAGACAGAGTTTCTCTCTGTTGCCCAGGCTGGAGTGCAGTGGCGCAATTTCAG
CTCACTGCAACCTCTGCCTCCCAGGTTCAAGTGATTCTCCTGCCTCAGCCTCCTGAGTAGCTGGGATTAC
AGGCACACACCACCACGCCCAGCTAATTTTTGTATTTTTAGTAGAGGCGGGGTTTCACCATGCTGGTCAG
GATGTTCTCCAACTCCTGACTTCATGATCCACCCACCTCGGCCTCCCAAAGTGCTGAGATTACAGACGTG
AGCCACTGCGTCCTGCCTAAAATGAATTTTCTAGATGATTGAATAACAGTAGTCCTTTGATAGAAGATAA
TGACTTGGTTTATGGCCTTAATATACTACTTAATTACTTAAGATGTTTATTAATAGAATGATAAATGTAC
AGAGTAACCTATAAGCATGACATACTTTTGCTTTCAGTAGTTTCATGTAAAGAAAAAAACTTGAAAATAG
TAATACCTGAGTACCCATGGGAATAATAGACACTGGGGAGGTAGGGTGGGGAGCGGGAGCAAGAGCTGAA
AAACTTACCTACTGGGGACTGTGCTCACTACCTGGGTGACAGGATCATACGTACCCCAAACCTCAACATC
ACACAGTATACTCAGCTAACAAACCTGCCCATGTGTTTCCTGAATCTAAAATAAAAATCGAAATAATTTT
TTTAAAAAAGAAAAAGACAATAGTATTACCCATGGGACAAAATTTGTACTATTAGCAAGAATCATTTTGT
GTCTCATTTAGAAACAATTTGACTTTTGTTCCAGTGTTTAAACTTTGACAAAAATGGTTTTGAATAGATC
TTTATAACCTGATGCCATAAATACAAGATTCTCTGATACCTTCATTTAATATATCAATATTGGGCCTAAA
ACAGTATTCTGTAAAGCTTAAATTGGTATTAACTATGATCATCTTGATGTCTATGATAGATAATAAACAA
GGTCATACATACCTTACTAAACAATTTTGGTTTTTCACCAACATTTTATTCTTTAAAAGATTTAGACTAA
CAGAATTATTTAGCATTTCGAGTCATGTGCTTTATTTAGCAAGTGAGTAAAAATATTGGAATATTGAAGT
ATTTGCATAAAAAATCAAATGGTGGTGTTTTGTAATCTCTATTGTATTTCCTATTAAGGTTTCATATATT
ACTTTCCCATTGTTCCTGAATTTGTTATCCTATATATAAACAGAAACATGGATGAGTACCATATACTTCC
TGACTCCTTTATCTTGTTACACCACAAGATACTGCACTATTTATTGGAGATATTTTGATGATTAGTGCCA
AGGCTGGCATCATGAGCCAAAATAGACTTGTTAAGTCAACCTCATTCCAAACACCTGCTATAGATCATCA
AATCTAAGTTGCCATTAATTGTAAGATGTCCTGTTATTTCACACACACAACTAGAAAAGAAAAATCGGTA
TCAATTATAGTATGGTGCTTTCTTATTTTGAATTTTACTTATTAGAAGAGCTATTTTAGATGTATTTAAA
CATAAGATTTTTATCACATAACTTGTGGATACAAAAAAAGAGAAATTGTAAGCAAAATAAGTTGGGTAAT
ATATTCCTAAAACCTCATCTTCTCCAGTCTGAGTATTTTTTTGAATCCTTTTTTTTGGTTTTGTTTTGTT
TTGAGACAGGGTCTCACTTCATTGCCCAGCCTGGAGTGCAGTGGCACAATCACAGCTCACTGCAGCCTCT
ACTTCCTGGGCTCAGGTGATTGTCCTACCTTGGCCTCACAAGTAGCTGGGACTACAGGCATGTGCTGCCA
CTCCCAGCTAATTTTTGTATTTCTTTGTAGAAATAGGGCTTCTCCATGTTTCCCAGGTTGGTCACAAACT
CCTGGGCTCAAGAGATCCATCCACCTCAACCTCCCAAGGTGTTGGGATCACAGGCATGAGCCACTGAGCC
CTGGCCCCTGAATTCTTTTTAGTCAGAATTTCTGTTGAGGTAATGTAAATTCACATGCAATTGTAAGACA
TAATATAGAGATCTCTGTACACTTGGCCCTGTTTCCCCAAATATTAATATTTTGTAAAACTATAGTGTAT
CACCACCAGGATATTGATATTGATACAATCCATTCAACTTATTTCCCCAGTTTAGTATTCTGTGTATTTA
GATCTAAACAGTATTATCACTTGTGTTCATACATCCACCACCATGAGGATCCCTCACATTGCTCTTTTGT
AAGCACACATACCTCTCTTTCCCCAAATCCTGACAGCCACTAACATATCCTCTATTTATAAAAGTTAATC
ATTTTAAAATCTTATATAGTGACATCACCAAAAATAGCAAAATGGGGAGCTCCAAAGATCTGTCCCTCCA
CTGAAGCAACCATTGCTAGCAAAAACTTAAGATCAACTTTTTGGATCTCTACTAATAAAAACAACAACCA
GAGGAATGCTTAATGAAAAGGCTATTTAGCTTTGGTAAAAGAGTTTTTGTGGTTTTGCTTACGTGCCTAC
CATGCCCTGTCTCCCAGCCAGGCAACAGCTGAGAGGACAGTGGCCTGTGCTCCTAGTGCATCTTGATACC
AGAACGGGCAATACAGATCTTGCTCTCACAGAAATGTGGGTGTGCTTTGACCTGCCTGGCAGTTCCTGAA
GGTTCAGCTCAGAGGGTTGCCTTTGTTTTGCCCCCTCCACACTAGAACAGCCTCACAGTGCTTATCAGAA
GCATTACCTGCAGCCATCTGGGGCTGGGGACGGCAAACGGGGCAAGCAGCAAACAGACCAAAAAACTTGG
AAAGGAAATAACTGGGAGGAAGATACGTGGGAGAGAGAAGGCTCAGAAGGGCCCTTGTCTGTACTAGGTA
GTCCGGAAGGCCACACACATGCCTAACACTGGACACATTTTTGGAAAAGACCTGAGAGGACTCTAGGCCT
GCACCTCTGACTGATCTTTAGGCTCCACAGAAGTAGGAGGTGGAAGCTAAAGCAGAATTTAGGTGACCTG
GCTAAGCGCTGAAGGAATGCCCAAGTCAGGACGAATCTACAAAGCCTGGGAGAATTACCATTTTTAACTT
TTTATTTTATTTTATTTTTTTTAAATAGAGACATGGTCTCGCTTTGTTGCCTGGGCTTGTCTTTAATTCC
TGGCCTCAAGAAATCCTCCTGCCTCAACTTTTCAAAGTGAAACAGTATCTTTTGTTCTTTTGGACTCATG
ACAGTTAAGGAAATTAAGTGAAATGCTGTACGTATTCTTTGCCATCTTTCAATCAGCATGTTTGTACAAT
TCAAATTGTAGCTGTAGCTTGTTTATTTTTATTTCTACACTAATCCACTACATGATTCTATTAATAATTT
ACGCTGTTGATGAGCGTTTGAAGTGTAAAAATAATTGAAGACCAAACATGAGAAAAACAGACTTTTTATT
CAGAGCTTGCGGTAGCAAAGGAATCAGCCACGATCTCTTGTGTTTAGCAGACTCAGAGGCAGATAGGTTT
ATAGTGGGGGGAAAGGGGCAAGGTTCAGGAATGCTCTGCTTGGAGGGTGTTGGCATGAGGAAGCTGGAGG
CTGATCAGCTCACTGCAGGTGTCTTACAGGATTGCTTTGGGGAACCTATTTGGCTTTCTCTGATTGGTCC
CATGTTGGAAGAGGGAGCAAAATGTTGGGATGATGGCAGTAACTGAGTAAGTCTTGACCATTCTGAATGG
ATCACTGGGGAGATTGTGGTTTGGCTTCCAGGAGTGGTTGCTGCAGAGGGTCTGGGTGAGAGTTCTATTG
TCACAGAAGCTCGTCCATTGTCCGTGTGTATGCCTAGTCCCAGAGTTGTTTCCAGTTTCTGGCTGCTAGA
CTTTTACATTTCACAATGAAGTGTGATTTTAGAAATAATATGAACTCTTGCCTGCCAGAACAAGGGCCAG
TGAATTTTAAAGGAAGGAAGCACAATCTAGAACTCGACAGCAAGGGTCAACCATGAAAAGTTAGGTATGA
ATATTGTTAATTCCTAGAGCAAGAATTTTTTCAAAAATATAGATAGATAGCCAATAGAATACTAAATTAC
TCTATTTGGAATACTAATAAACCCAGAAACAAAAAGTAGTGAAACAAAAACAAAATCACAGGGACAAACA
GAAGAAATAAAATGGTACACCTAAATCCAACCACATCAATAATTATATCAAATGTTAACGGTCTAAGCCA
GAAGGTGCGTGGCAAACTTCTTCTGTAAAGAGCCAGATAGTACATATTTTAGGCTTTGCGGGCCATACAG
TCTGTATACTCTGCCTCAAATTAGCCATAGGCAATATATAAATGAGTGGGTATGGCTGTGTTCCAATAAA
ACTATATTTACAACAACAAACAGGCTGGATTTAGCCACAGGTTATAGTTTCCTGACCTTTGCTGTGGAAT
TCTAGAGTGTGTTTCCTTCCTTTAAAATTCATTGGACCTTGTTCTGGCAAGCAGTTAAATTACTTCTGAA
TCTGGGAACTTCTTTTAATTCTCTTGGCTTTTTTTCCAGTTTTGGAAGTTTCCAAGTATGGAACCACTTA
TAAATTAACAGGTTGGTTTTCCAAGATCAGCCTGGTGATGAGAATTTGGGCTACAAATAGACAGGATAGC
TGACTGCCAATGACCTCTTAGTCCCATTCAGTGCTGCCCAGTTCCTTGAGCCTTAAGGGAGGGTTTGAGG
TGACTTCTGGTTCAGTCTCCCCCTAAGAGTATAGTCTTTCAGTGTCCTCATTTAATTATTCCCATCTCAA
TGTGTCCTTGGGCTTTGACTTCTGGCCCCCTTGCTGAGGAAGAGAAGACAATAATGGAAGTAAGAAGTAT
AGGACCCCCTTTCCTCCAAGGCTAAGATTCAGACCTCTTCAAAGAGAGGACCTTCCTACACCTGGACCAC
AGCCCACAGCGGGGAAGAAACTGGCCAGAGGGCACAGGTGGTGCTAACCTGGAACAGCAGCCCAGGAGGG
TGTGGCTGGGTGGAAAGGTGGCCTGGGGGCAACTGGAACTCATCCACATCACTCCCCCCCTGAATAATAA
TGATAGGACCAGGACTGGAAGGGAATGGTCTTCCTGTCCTTTCACTCCAGAGACCCTCCAAAGCCCTCTG
TTGGTAAAGCTTAATGATCATTGTGTCAACAGATGTTTACAGAGTCCAGCCCATGTCCATCTATCACAAA
GCAGGGCAGAGAAGGGTGGATTTGGAGCTGAGAGCCATTATATTGATAACTGGCACATAAAGTGCTTTTA
TTTTTTTCAACTTACTCCCAACACACACACACACACACACACACACACACACACACACACGCACGCACGC
ACACCCCTTCATATGTCAAAATGACATTAAGTTTCATTTAAATGTATCCTATATTGAAAGAGCAAAAAAA
AAAAGTGACAGTTTGACTCAAGAAATGCAATGGTTTATATGACCTACAACTCTCGAAGGAAAAGAGTAAT
AATTTTGCAATGTTTTGATGATATTTACAAGTCATAATTTAAAGAGATACATAATTTTTCCCTTTCTACG
TAAGTCCTCAAGGAACTCACATCTGTTTTAGCCCAGATTTGTATAGTGTTTTGCTTTGCATGGATTATCT
CATTTAATTCTTGCAGAACTTTGATGAATGGTATTATTAATTAGCAGAATGGTAGTAGTAACAGGCAAAG
TGGTATTGTTAATTGCATGTAATAGATAAGGAATCAAGCTTCAGTTATTTTGACTTGCCCAAAATTGATT
TGGTAAGTGACAGAACTTTATTTGCTGATAGTCCACAATTAAAACTTTTCATTATTCAGGTAGAATTCTT
TTCCCTTTTATTCTATACATGTTGATATGCTTGTTATAAAGAAGCCTAGGCCTGTGATCTCGATACCCGT
GGAGCTCTGCAGCTGCAGCAGATAGTAGAATGTATGGGAATTCACCCAAATGCACCTACAGTAGAAGTAT
TATTCATTATTTCAGAGATGCTTTTTCCTCTGTGTCTGGTTATAGATCAGTTGGCATGGCATCAAGCAGG
TTGATGTTCCTCTTATCCCAAGCCCCAAGCCTTACTTTTTCTTTTTTTTGTTTTTGTTTTTTTGAGACAG
TCTCACACTGTCGCCCAGGCTGGACTGCAGTGGCACGATCTCTGCTCACTGCACCCTCTGACTGCTGGAT
TCAAGTGATTCTCCTCCTCAGCCTCCCAAGTAACTGGGACCACAGGTGCTTGCCACCACACCCAGCTAAT
TTTTTTGTATTTTTAGTGGAGACAGGGTCTTGCCATGTTGCCCAGGCTGGTCTTGAACTCCTGGCCTCAA
GCCATCGTCTCACCTCGGCCTCCCAAAGTGCTGGGATTACAGGCATGAGCCACCACGCCCAGCCATTCCA
GCCCTTTTTACTTTTACCAAGTGGTTACCACAACAACTTTGATGAGCTGTTATTCAAAGGAATCCTGTGA
TGAGCAATTTTGAAAAGAAAAATGATCTCTGTATTATATATTTGGAATTTTGAATAGGAAGTAGGTTAAA
CATGTGTTTAACACTTAACACATCCCAGGGGCCTCTCAATTGTGGCACAGTGTGACCCCTACATGCTGTA
TGTGTATGAAGCACAGCAGAAGCACAGAGGCAAAACACACCTCAGTCGGCTTCCCTTGAGTTCCCTTTTA
AAGAGTCTTTTCTATATTTCTGGATCATTCCTTTCTTTTTTATGTTTTTTTTGGTTTTGTTTTGTTTTGA
GACAGGGTCTTGCTCTGTCACCCAGGTTGGAGTGCAGTGGTGCAATGACTCACTGCAACCTCTGCCTCCT
GGACTCAAGCAATCCACCCACCTTGGCCTCCCCGAGTGCTGGGATTACAGGAGTGAGCCACCATGCCCAG
CTTTTTAATTTTTTTTTTTTGAAACCTATTACAGTAACTCCCTGAGATGAAGATGAGACGTTTAGCTTCC
TCACACTCCCTCCTCCTCCTCCTTCCCCATGCACCTCCCATGCTTTGTTCAATGTTACTCTCCTTTTACT
TGCTTAAGGTACTCTTTCTTATGCCATTGACTTTAGACGGAATTCCTTGGCTTTACTGAGTAAGATGGGG
AAATTAGAAATCTGCAGTC

[0145] An exemplary DNA sequence is human Topbp1 provided below.

gi|224589815: c133389958-133310251 Homo sapiens chromosome 3,
GRCh37.p13 Primary Assembly
(SEQ ID NO: 310)
ATACTTGATATATTTATTGGAGCCTCTTCAAGGTGTGGCATTATCTTTTTATCTCCCATTCCATGGAACT
TCAAATTGTGCCAAGTATCTTAAGGAGAAAACTGGCCCTTTGTCAAGCTTAGTTCTCTGCTCCTCCCTTC
TCAATGGGATCTTGCCTCCACTTCTGTTTTTCCAGCCCTGAGACTGCCATCAGTTCGGCTGGCTTCTCTG
TAAGCCAGCAGTGACCCTCTGCTCAGGTAAAGCCAGATTCCCCCTGGCCATGTGCCGAGTGGTTCATCTT
TAACTGTCCTGGCTCTCCCTTCACTTACTCATACATTTGAAAGGAAATAGGATCTATGAGCGCAGAGATC
ACTTTTTTCTTGTCCAACATTCTAACACAAGGTTGGAAAATACTGTCTGCTATAGTATTGGGCTCAAAAA
ATCAAACAGATCAATAAATGCACACAAATGTCTCAAAAGTGGGTTGAGCAATCTCCTATGCAGGCCTATG
GACAAAAACCAAATAAAGTCCAGAGGTGATCATTCCTTCTAAGGTTAATTATTCACCTAAAACTAACACA
GCCTAAATCCAATAGCAGCCACTGTGCCCCCGACCCTAGATTAGATCAAACTCTGAAAACTTCGTGTGTA
CTGGGACAAAGTGATATTGCAAAGATAGGACATCCAAAGTGCTAAAGTCATTTCTGTGCTTTGGTACAGG
CTCTCATAAATAGCAAAGCAGAAGGTTAGATGCTTGTATGGTGGAAAACAGTTTTAAAACTTCACGGCAA
AGATGGTCTTTGGAAAACTTGGGATTTATAGATTTATTAGTGTGTACCAGGCATTGTACTAAGTGCTTCC
CAAATGTTAAATGATAGTAACCCCATAAGGCTATTGCCATCCTCTTTTTGTACAGAGAGACAGTGAAGCA
CAGAAAGGTTAACCAGTGACTTGCCCAAGGTCAGGTAGCTAGTAGGTGTCCAAGCTGGCATTCAAACTAG
GCAGCCTGCTTCCATAGTCCATGCTGTTTCTCATGTGGCCTCTGACATTTGTCTCTGGAGCAATTTCACA
CTTTCCCCTTTCCAAGGCATCTTGAAGTAATAACGGCATGGGGCACCATGTTTGTTTAAACTGTTTCCAA
GTTCAGAATTGGTTGGATTTAACTGTCCTGGCTCTCCCTTCACTTATTCATACATTTGAAAGGAAATAGG
GTCTATGAGGGCAGAGATCAAATTTTCTTGCCCAACATTCTAATATAAGGTTGGAAAATAGTGTCTCACA
AATAGCACTAACTGCTATAATAGCAAAGCTCCAAAATCTTAATGGTTTAACACAATAGGAGTTGACCTCT
TAGTAACATAAAGCCCATCTGGCAGCAATCGTGGTGATTTGTTAGGGTGGGAGTGGGGAGTTCACTTTCA
TAGCTCCATTCAGTCATTCAGAGATCCAGGCTGAGAGAGGTTCTGCCATTTTCAACACATGGCTTCCAAG
ATTGCTCTGTGTGTTGATATTCAAATGACAGAATAAGGAAGAGCGTGGAAGGTAGTGCAAGAAATTTCCT
TGGATCAAGCTCGGATGTGACAAACATCACTTCTACCTATATTCTATTGGCCATAACTCAGTCCCATGAC
CCCACCAATTGTAAAGAGGATGGGAACCATAGTCTCTGGCTAGGAAACTACTTCTCAGCAACAGCAAAAC
ACTATGAAAGGGGAGCACATGTCTGGGGTCTTTTGTCTTAGTTTGAGCAGACCCAGAAAACAGACTTTTA
GACAAGCCTTCTCAGATGTTTTATTTGACAAGTAAAGAAACACAGGCAAGACAGTAGAGATGTGGCTGGG
CACGGTGGCTTATGCTTGCAATCCCAGCACTTTGGGAGGCCTAGGTGGGTGGATCGCCTGAGGTCAGGAG
TTTGAGACCAGCCTGGCCAATATAGTGAAACCCCGTCTCTACTAAAAATACAAAAAATTAGCCAGGTGTG
GTCGCAGGCACCTGTAATCCCAGCTACTCGGGAGGTCAAGGCAAGAAAATCGCTTGAACCCGGGAGGCGG
AGGTTGCAGTGAACTGAGATCGCGCCATTGCACTCCACCCTGGACAACAGAGCAAAACTCCGTCTCAGAA
AAAAAAAGAAAAAAGAAAATAGAGATGTGAGACAGGGAGAAAGGCATCCAAAGAATGTGTTAACAAGTCA
GATGCCACTGTGGACACTGGGACTTAATTCCCCTGAGGAAACTATGAGAGTCAGAGTGGATGTCCCATCC
ACGGGACATGCAAACAAGGGTTTTTGTGCACCAACTCCTGTCAGCCATCATTTAAGGGGTTTTTTTCCCT
ATAGGTCATAAATCCTCTAGCCCTCTGGCCTACTGTGCAGGTGGCAGAGCAGATTCCTGGTGCCAGAGAA
TGCCTTCATGCAATGAACACAGATGCTGGCAGCTGGAAGTTTCCTAATGTGCATGAGTGCTAAGGGTGAG
GGGGTATGGGTGGGACACTAAGGGTTTCTACATGGTCTCTGCCAGAATCCAGACATGTTTTTTTCCCTCC
CTGCCCAAGCACACATCTGCTACACACTGGGGAATGGGGAGGCACAAACAGAATAACAACAATAAAACTC
CCTTTCAGAAAAGGGAGGAGTGGAGACCCATAGCCATCATTGGTCAGTATCAATTTTGAAGTTGGGCAGG
CACTAGGAGGCTCTCGATTGGGGGTTCTGATTAGATCAGATTCTGTTCTGTGACAGGAGCTCCTTTGCTC
GTTGCTCTCCAGGATCCCTGGTACCTCCTTCTGGGAGGATCTTCATTTTCTATTACCCTCTCTATCCATA
TCTGAATACTGAGGAGTTTGTGCTCCTTGGGGCTGTATGACTTTCCACCTACTTGTGCTGCGAAAATTTG
AGGATTAAATCAAAGTCTGAATACTCCAGGTTTCTGGTTGGGTTCAGAAAGCAATTATCTCAAAATGTTC
GTAACCTTCAGATCTATTTGGTTCCAGTCAGTTTCACGTGGTAATTGTCAACCTCACACATACAAAACAA
GGTCAAGGGTAGGGCCTGATTCCACCAGTGAACATACTTGAGACATTTTTAGATTTAGATGGTTTATTAC
TTCCATAGATAGCAACAGAGAAGAATAAGTGAAAGATGTCTTCTCCCTGGGTCTGATGATTGCAATGCGA
GTTGTAGGATACTCTATTACTAAGGAGTCAAATCTAGATGGCAGCTAGTGCTTTTATATTCTGCAGGCCT
ATCATGAGGGGAGTGGGGCAGAAAGCCCCATATCTCATCAAAACCTGGGAGGTGATGAGAAACTATGTCA
TGACAGCCTCTTAGGAGAGATAGAAAGGTGAGTGAGAGATGCCTTTCTAGTAGCTCCTTAGACACCTCCC
TTAAGGATGACAAGGTGTTGTGCCAGGGCTCAGATAAGTTGCAATTCAAGCCTTTGCCTCTATTGATATG
TGTAAGCTTATCAATAGAGGAAGTCATGGCAGAGCTGTTCTTCTACAGAAGTAGTCCCCTCCCTAGTTCT
TTCCTAGACATAATTTTCAAACCTGATTGCTATCTTTGGCCCCATACCTCTCTCTCTCTCTCTCAGTTGA
TGGTGCCTACCTAGCTTGGGTGACAGGACCATATTCTTTAACTAGATCTTTTCCACATGGTCGGGTTGTA
ATGGACATTTGTTGCTCAAAACCTTTCTCAGGTTTATCTCTTGTTTTTAGGACACAGATGAAGTCAGCTT
TTCCAACCTTGCAAAATCTCACATACTTGGGTTTTTTTTTTTTTTTTTGAGTCAGAGTCTTGCTCTGTCA
CTCAGGCTAGAGTGCAATAGTGAGATCATAGCTCACTGTAACCTCAAACTCCTGGGCTCAAGCAATCCTC
CCACCTCAGCCTCCCAGTACCTGGGACTACAGGTGTGTGTCCTCCACACTCAGTTAATTTTAAAAAAAAA
CAACAAAACTTTTTTTTAGAGACAAGATCTGGCTGTGTCGCCCAAGCTGGTCTTGAATTCTTGGCCTCAA
GCAATTCTCCTGCCTCAGCCTTCCAAAGTGCTAGGATTACAGGTGTGAGCCACTGCATCCGGCCTGGATT
TTTTTTTTTTTCTTTTTCTGAGACAGTGTCTCGCTCTGCTGCCCAGGTTGGAGTGCAGTGGCACGATCTC
AGCTCACTGCAAGCTCCACCTCCCAGGTTCACGCCATTGTCCTGCCTCAGCCTCCCGAGTAGCTGGGACT
ACAGGCGCCCGCCACCACGCCTGGCTAATTTTTTGTATTTTTAGTAGAGACGAGGTTTCACTGTGTTAGC
CAGGATGGTCTCGATCTTCTGACCTCATGATCTACCTGCCTCAGCCTCCCAAAATGCTGGGATTACAGGC
ATGAGCCACCATGCCTGGCCAGGCCTGAATTTTTAAATTCTCTTTATTTTTGTTTGCAAACAGGCCAATT
CCCTGAGCTTGTCTTTTGCTTATCTAATTAAATGCAGCCAGTAGCAACCCACATAGAATAGAATGTGCTA
ATGACATTCTATTTTACCTCCTCTTTGCTAGAGGAGACTTAGTAGGCCTATGTTCTATCTTCCAGGTTAC
TGAAGACAATAGTTTAAACAAATGTTTTGCTAATCAGACTATTTCTGTAGCGATAATATCATTTGCTAAT
TTCACTTCTAAATTGTACATTCAAGGCCGGGTGCGGTGGCTCATACCTGTAATCCCAGCACTTTGGGAGG
TCGAGGTGGGTGAATCACAAGATCAGGAGTTCAAGACCAGCCTGGCCAATATGGTGAAACCCCATCTCTA
CTAAAAATACAAAAATTAGCCAGGCATGGTGGCACATGCCTGTAGTCCCAGCCACTCAAGAGGCTGAGGC
AGAAGAATCGCTTGAACCCAGGAGGCGGAGGTTGCAGTGAGCCGAGATCATGCCACTGCACTCTAACCTG
GGCGACAGAGCGAGACTCCATCTCAAAACAAAAACCAAAGCAAATTGTACATTCATTTATTTATACGTAT
TTATTCATTTACAGCATTGGAAACAAACATAAAACTCTATAACTCAAAAAACCTATTTTTAGTTTGGCTT
TAATTTTGAGAAATATTATCTATGTAGTAAAATATAATAATAAATATTCATATTCCCACCACCCACATTG
TAAAAGTAACTATTTTGTCATATTTGTTTCCTGTGTTTTCTTTCCCGTTCTTTTTTTTTTTTTTTTTTTG
AGATGGAGTTTCGCTCTTTTTGCCCAGGCTGGAGTGCAATGGTGCAATCTCGGCTCACCACAACCTCCGC
CTCCTGGGTTCAAGCAATTCTCCTATCTCATCCTCCCGAGTACAGGCGCCTGCCACCATGCCTGGCTAAT
TTTTTTTATTTTTAGTAGAGATGGGTTTCTTCATGTTGGTCAGGCTGGTCTCGAACTCCCGATCTCAGAT
GATCTGCCCACCTCGGCCTCCCAAAGTGCTGGGATTACAGGCATGAGCCACCACTCCCGGCCTCCTTTTC
CATTCTATAAACAGATAAAGTTGCCCATAATGTCACCCCAAGCAGGGTCTGGAGAGACTGGCTCTAGGTG
ACAGAAGTGCCAGAGAAACAGGAAACTGATCCTAAATGCCAGGAAAGTGAGGGAAAAGTTAATTCCCTAC
CCCAACTACATTTTTTTTTCTTTTTCTTTTTTCTTTTTTTTTTTTTTGAGATAGGGTCTCACTCTGTTAT
CCCAGGCTGGAATGCAGTGGCATGATCATGACTCACCACAGCCTTGACCTCCTAGGCTCAGGTGATCCTC
CCACCTCAGCCTCCTGAGTAGCTGAGACTACAGATGCCCGCCACCACGTTCAGCTCATTTTTGTATTTTT
TGTAGAGATGAGGTTTCACCATGTTGCCCAGGTTGGTCTCAAAGTCTGGGGCTCAAGCAATCTGCCCACC
TTGGCCTTCCAAAGTACTAGGATTACAGATGTGAGCCATAGCACCCGGTCCCCAGCTTCTTTTTTAAAAA
AGTTTGTAAATATTAGAGATGGGGGTTCTTGCTACGTTGCCTAGGCTGGTCTCGAACTCTCAGCCTCAAG
TGATCCTCCAGCCTGGGCCTCCTAAAGTACTAGAATTACAGGCGAGAGTCACCACGACCGGCAAATATGG
AATGCTTCACAAATTTGCATGTCATCCTTGCACATGGGCAATGCTTATCTCTGTATCATTCCATTTTTTT
TTCAGTAAACATGCTGCCAAAGTAAGCACCGAAACCTCAGCTTCCGAGGGCATATCATAACCTTTCCCTG
TTTTCACCAAAGTCTTCAGGGACCACAAACCCATATACAGTTAGTTCCTTGTATCTGTGGGTTCCACATC
TGAGGAGGTCAACCAACCGGGGATCAAAAATATTCAGAAAAAAAATACAATTTTTATGTAAAATTTGCCA
TAGTAGAAAAAATACAACAATAAAAAAACAAAATTTAAAAATACAGTATAACAAACGTTTACATAGTATT
TACATAGCATCAGGTATTATAAGTAACCTAGTGATTATTTAAAGTACATGGGAGTGGCCAGGCGCAGTGA
CTTATGCCTGTAATCCCAGCACTTTGGGAGGCTGAGTCAGGTGGATCACGAGGTCAGGAGTTAAAGACCA
GCCTGGCCAACAAGGTGAAACCCGTCTCCACTAAAAATGCAAAAATTAGCCGGGTGCGATGGCAGACGCC
TGTAACCCCAGCTACTTGGGAGGCTGAGGCAGGAGAATCGCTTGAACCCCGGGGGTGGAGGTTGCAGTGA
GCAGACATTGTGCCAACTGCACTCCAACCTGGACAACAGTGAGACTCCGTCTCAAAAAAAAGAAAAAAAA
AGTACATGGGAGTATGTGCACAGGTTATATATAAGGTACTTGAGCATCTTCAGATTTTGTTATCTGTAGG
GGGCCTTGGAATCAATCCTCCGTGGATACTAACCATTTCACCCTTTCCTGAAGGACTGCTGTTCAAGCAA
ACTTTAATGTGTACCAAAATCACCTGAAGGGCACAGATTGCTAGCCCTACCCCAAGTGCTCCTGACTTAA
TAAGTCTGAAGTGGAGCCCAAGAATTTTCATTCCCCCAAAATTCCCAGGAGATGCCGATGCTGCTGGTCC
AGACACTACACATCAGAACCACTGCTTTATCCATTTTCCAGGAGTAGATACTAGAGACAGACCCTCTCTG
CTTATCTGGAGACACAAGATGGGAGAACTTGCCCCCTAGTGGTGAACTCTTACTCTAAAGACAGGTCACT
CCTCTGGTATCAAGTTCCGGCTGGGTAAAAGCTAAAGGGTGCATTTTCTTCATCTTCATTAGCAGCATCT
ATGAATCTCCTTCTCTTGTGAGGTCTCTACTTGGCCCAGAAATGCCAGGAATGGGCTCCCTCCCCGGTGT
GGAACTTCACACAGAGATGGGCAGACAGCACGTGCCCAGGAGCAGTGTGGTGTGTCAGGAAAGGCACGGG
CAAGTGACACAGTCCCTGAACTTCACTTTCCCCATCTCCATAACATGAGACAATGATACCCATCTATTAT
AGGGTTGCTGAAAAGAGTAAACGGGAATAGTGTGAGCAGGAGTCCCATGTTAACTGTAAAGTGCCCTAGA
AATATTAATTGTTATTACAGATTCAGGTCAGATTTGCACCTTAACAATTAACTGTGGTTTCTTTTTTTTC
CCACCTCTAGTGATTTTTGTTTTTTTGCTTTTAAGGCTTTCTTCACCCTTCCCCCAGCAATAGGCCTTTA
CCTTTGAGCCCCAGTGTTAATTGATTCTGACTCATTTCTGGTAAAAAAAAAAAAAAAAAAAAATTAATGA
TATTTATTAAAGCACAGTAAGACAGATTTTATTCCGGACCATCAGGATAGGTATAGCAACCATGGCAATG
GGATTCTGAATTAGGAGAGAGAGAGTGGGCTCAACTCTAAATACACCATGGGCAAGTGGGAATTTATAGC
CAAGGAACAAAAAGCTTGGGGTCACTGGATAAAAAATTACTAAGAAGGAACTTCAGGAGTAAAGGGGTTT
CTTGCTGAAAATAGGTCAAGGTGATCAGACATCACCTTGGATGGTAGAGGATGAGGAACCTGATCAGATA
TTGAGGGTAGAGGGTTCTAACTGGATTTTCCAAGGAAATGCACAGATAAACCTACGAGAAGGTTGAGGAG
TCTGACTAAAGTTTGGCCAAGCAAAGAATCTTTGTCACCTTCCATCGGTGTATTCAAAAACTTAAGACTC
AAGCTGCTCATTACTATCTTTAGGCTCTAAAAAGAAAAGAAAAACAAAAACAATCAAGGGACATGGCATT
ATACTTTTACATTAGTAAATCCAAAGTCATTTTCTCAATCTCAGCAGTGAATAATAAAATGATCCTCATT
AGTATAGTGGCTAGATTTTATAAAATAAGAAAAAATTTTTTTAAAAAAGAATAAAATGAAAAGAAGCAAC
AACGAATCAGTTTTCCGCTGGTTATCACTAAGGTTTGCAGGCCCATCTTATCCCCTCTCCCTTTGCTCTC
TGCCATCTGAATCTTAGGTTCAGTCCCAGAATCTCCCCAGTACTGAGGCAGATGCAGAGAAAGAGAACGG
CGATGTCCACTGAAGGGGAGGAGGAGGGGAGACCATTGAAGATCTTGACAAAGATCCCTTTGCATTAGCT
GTGTAATAAGTCATCCTTTCTTCCCTTGCCATCTTGTGGCTGTGTTAGGCGGTGATTCTATTCCTGCTGT
GTTGGAGGGAAACCACCCAGTCCGTAGTCAGAAGACCTGGATGCAGTATTAATTCTACCACCTACTAGCC
GTGTGCCCTTGAACCCATCATTTAACTTCCTCCGTTTTTACATCTACAAAATGGAACTACCACTATTTGC
CTCACGGAATTGTTTTGGATAATACCTTTTCCCGTGCATGCCTGGTATAAGACAGGTGTAAAATAAATAT
CTATTGAGGAAATCCTTTCTTTCCCTGGCTTTTTTAACAGTAAAGGAGTATTCCTGGCCTGTGGTCCTAC
CTCTTGAACCGACGGCGCTGGGCCTACTCGCAGCGGAGACTAGGCCCGCCCAGCAAAGCCCTAAACCCAA
AGGGTCCGGCCCAAGCTTTCCCTGAAGCCCCACCGCCCACAGACTGCTCACCTCCACGTTTGACATTTCC
GCTCTTCTGCTGCAGCTGCCGATGGCGTCACTTCCACCGGAAAAGGCAAGCGCGGCCGCGCGGTTGGCGC
GAAAGTCGGTTCCCGTTCTGGGCAATTTCCGGGTTCTCCAGCGTTTGCTTTGGGGTAGGGGCGGCGCCGA
GTCGGGGGAGGGGGCTGTGCGCCGGGCTGGCGCCCGACCCCAGCCACCGCCCTGCGGCCAGCGCGTCCCC
CGACTCGCCGCCCGGAGACCCCGAGGCTCCAACGAGGTAAGTGAGGCGCGGAGTGGGGACACAGCTCCTC
CCCAGCCCCAACTGGGGTTCGCGATGCCTTCTGTGGCCTTCAGGACCCTCTTTTCCTGTCCTGGTAACTG
GCCCTGGAGCCGGCGGGTGGGCCTTTGACGCCGAGAGGACGTGGCTTCCGTGATCCCAGAGCCAGGCCTT
TTCCTGGAGATGGGAACCGGAGCATCTAGCCTTATGCAGGGCCAAGACCATGCTAACTGGCTTCCATGTT
TATATTTAAAATCTGTTTACTGAGGGATGAACGTACCTCGCAGGCCGTGGGTATCCGCAGGGACAGATAC
ACTCTGTGTATCCTTAAAACAAGTGCAATTGAATGTCCATTGGCCTAAAGGGCTTAGAGCCTTCATAGCA
GGGCCTTCCTCAGTGTATTCAATTCGGGTTAATTTTGCTGTCTGATTTGCAAGGATTGGTGTTGTCATCT
TTTACCTTGGCTTTGTCCAAGTTCCAGGATTTCTTAGAAATGCCGTTGACGAATTCACGGGCAGAGCCAG
AATGTCTGTCTTTAGGCATTCTTGTCTGCACAGAAAAATAGGTAGGTTAAACATGCAACTTTTTATCTAA
TGTGGTTTTGTTCTTGTTAATGGTTCCTTTATTTTGACAGTTCAGAAATGTCCAGAAATGACAAAGAACC
GTTTTTTGTGAAGTTTTTAAAGTCTTCAGACAATTCCAAATGTTTTTTTAAAGCTCTCGAGGTAAGAGTT
GAAAACATCTTAATACCGTGAATTCATTTTCTTGTTTTTAAGTGTTTTTGATTTGTTGGGCTTTATGTCT
TAGAAGTAGATATTTCACTTTCATAATAATTTTATAGTCTACATTAATACAGATATATCATTATCACATA
TTTTTGAATTGATCTAAGTACATCATTATGTATTTCGGGGGGCTGGAAGTCTATTATCACATTGCTGTTT
AATATGGCTGACCTACAGTTCTTGGAAATTAAGTTGCTTTCATTTGTCTCCTAGCCAGAGTGGTCCTTTG
CGTGCTGTAGAAATTTGAGTCAGTTGTGTACTGGTCATACTTGAAAATTTTTTGGTTAATTGTTAAAAAT
TATGTTTTATTATGTACAGTATAATAATTGGATGATAGTAGGGGTGATGTAGATCCTTGCTTCTCACAGA
ACCCAGCAGTATCAGCATGGCCTGGAAGTTTCTTCGAAATGCAGAATCTTGGCCTCCAACCCAGACTTAG
AATCTGCATTTCTAACAAGATCTTCAGTGTGCATTAAAGTTTGAGAAGCATTTGTAGCAGATTTTTTTAA
ACTTCATTCATTCAGCAAGTATTTATTGAAGTGTTCATGATTTGATAGGCACTTCTCTAGTACTTGGGAT
TTATCAGTGATGAGAACAGGCAAAGATTTCTGTTCTTTCAGAGCTTACATTCTAGCAGGAGGACATAGAC
ACTAATCAGACATGATAAATTAGGAAGAGAAAAAAGCAAAACACGTTAAGGGGTTCCAGAGGATGTTTCT
TGGGGTGGGAAGAGAAGGGGGTTATAATCTTAAATAGGGTGTGATCAGGGTAGGCTTTATGAAGAAAAAG
ATATTGAGTAAACGTGAAGGAGGTGAGATAGCCTTGCAGATATCTGGAGAAGAATGTTGCAGGCAGAGAG
AGCAACCTTATACAGCCCCTGGGAAAGTGCCTGTAGTCTCTATCCAAGTTTAGTGTACTGTTGTGTAGTG
AGTGAGGGATGGGGGAAGAGTACTAAGGAATGCGTTAGAGAATAATGGTAAAGAGGTCATGTAGGGCCTT
GTGGGCCATTTTTCTCTCAGTGGAGAGCCATTGGAGGGTTGATAATCAGAAGAGTAAACATGATCTGACT
TACAGTTTTAAAGGGATTACTGTATTTAACATAAGGACCTCAAAATTGGTTCAGAACATTTCTGAGTGCT
TACTGGGTGTCAGGATATAGTAGCAAACAAGATACATAGAAACTTCCAGGGGAGAGAGACAAAAACTATA
TATATATATATAAATACGTATTTTTAAATAGAATAGACTAGAAGGGTAGAGGAAGGGTATTTGAGAAAGC
CTGATTAGGATGGGCATCTCTGGGGAGGTGACATTTAAGCAGACCTGATTGAAGTGGGGGATTAAGTCAG
GTGAAAACCTGGAAAAAAAGTATTCTGTGCTGCAAGATCAAGAGCAGAGCCTCTAAATGAGGTTATGGTT
GGCTTGTTCCAGGGTTGGCAAGAAAGCGGGAGTGGCTGGAATAGAATAAGCAAGAGAGATGAGAAGTAGG
AGGTAAAGGTGGAAAGATAGGCAGGAAACCAGACTGTGTTGTCTTGAAGGCTGTAGTAAGAAATGTGGAT
TTTATTCTGGGTGTGGTGTGAAGACATTAGGTTTTGAGCAGATAGTGACATGATCTGACTTGTGTTTTTG
AAAAGATTATTAGCTGCTGTGTAGAGAACAGATTTAGGGCAAGGAAGGGAAAAAGAGACCACTTGGGAGC
CTTCTGCAGAGGTCTAAGTGAGATGTGATGGTGGCTTTCAATAGGGAAAAGGCTGGATTTGAGATGGAAT
TTGAATAGGACCTAAATACAGGAGAGTAATTTCAGGTACATTCTTATTTTATTTTTTCTTTCAGTCCATA
AAAGAATTCCAATCAGAAGAATATCTTCAGATTATTACAGAAGAAGAGGCATTGAAGATAAAGGAGAATG
ATAGATCACTTTATATCTGTGACCCTTTTAGTGGCGTTGTCTTTGATCACCTCAAAAAGGTTTGCTGACT
TCTAGTGTGTACCTTTGGTAGTCTATTTTTTGGTTTATCTTTGCTTTAATGGACATACATTCTTTGCGGA
TTATAAAGTACTATGCAACTTATGAGTACATTGGAATTCTTTTGGTTTGGCAAGACCAGGATTGAAAGGC
TAATTATGTTACAGTAGGCTTTTTTTGTTTGTTTGTTTGTTTTTGTTTTTGTTTTTTGGAGACAGAGTCT
TGTTCTGTTGCCCAGGCTTTAGTGCAGTGGCACAAGCTCAGCCCACTGCAACTTCTGCTTCCTTGGTTCA
AGTGATTCTTGTGCCTTAGCCTCCTGAGTAGCTGGGATTACAGATGTATATACACACCCGGCTGATTTTT
TTATTTTTAGTAGAGAAAGGGTTTCTCGATGTTGGCCAGGCTGGGCTGGTCTTGAACTCCTGCACTCAAG
TGATCCTCCCACCTCAGCCTCCCAAAATATTGGGCTTATAGATGTAAGCAGTAAGGCAGTTTTCAGTGAA
AGGGGCTTTTGAAGTTTATTTCTTTTCTTTTCTTTTTTTTTTTCTTTTGTTATAGGGTCTCACTCTGTCG
CCCAGGCTGGAGTGCAGTGACGTGATCTCAGCTCACTGCAACCTCCGCCTCCTGGGTTCAAGCAATTCTC
TTGCCTCAGCCTCCCTAGAGACTGGGACTGCAGGTGCCCGCCACTGCACCCGACTAATTTTTGTATTTTT
AGTAGAGACGGGGTTTCACCATGTTGGCCAGGCTGGTCTCGAACTCCTGACCTCAGGTGATCCACCCCCG
CTCGGCCTCCTCTGAAGTGCTGGCATTACAGGCGTGAGCCACTGTGCCTGGCCTGAAGTTTATTTCTTTT
GATAGCTTGCATTGTTTGATTTGCTTTTGTGTGTGAGTGTTTAATGTATAGTATCTCTGAGAAATTATAT
AGTCATCTTTATTTTTTTCTTGTAATGATTTGCTGATTTCTCTACAGTGGTCATCAACTTTGGTAAAGAA
TTGGTGAATGTTACAAAATGTAATTTTGTAAGACTGGTGGTCTTTTCCTTCTTAACTCATTTAAACTTTT
CTCTTTTTTGTAGCTTGGCTGCAGAATTGTTGGTCCTCAAGTAGTCATATTTTGTATGCACCACCAGCGA
TGTGTCCCAAGAGCCGAACATCCAGTTTATAATATGGTTATGTCTGATGTAACCATATCTTGTACAAGTC
TGGAAAAAGAAAAAAGGGTAGATATTGATCTCATGATGATTGATCAATTTATATATCTATCTCTTATTCT
TAATTTTTCACTGCATAGAAGATAGCTTAAAAGACTTTCCGCTTATTGTTCGTGACTTTTAACAAAGTTC
AGTATACAACCACAGTGTGTATATATGTATACATGTACATTTTTTAAGTAAATTGAATATAGTAGAATTT
GTTTTGTTGAAAACTGGCTAATTGAAATTTTTTGTTTTAATTTAAAAGGACACTCATTTTTTAATCACTT
ACATTTTTCCACTATAGGTGGACAGTCTTTAAAAAAAAGGATTCTAAATCGTTTGAATCAGGGAGGTGGA
GGTTGCAGTGAGCCAACATCACGCCACTGCACTGCAGCCTGGGTGACAGAGCAAGATTTCGTTTTGGAAA
AAAAAAAAAAAAAGCATTCTAAGAGAGAGCTATAGAAATACATATATATATTTGGGACAGGGTCTTACTG
TCACCCACGCTGGAGTGCAGTGGCACAATCACAACTCACTGCAACCTTGATTTCCTGGGCTCAAGTAATC
TTCATGCCTCAGCCTCCCGAGTAGCTGGAATTACAGGCATGCACCACCAAGCCTGGCTAAAAATAAATAT
TTATATATTATATAGATATAATTTATGTTGTTAAAAATACACATGTATATTTATATAGAAGCAAAGATTA
AGATTTATACATCCTTTGTATAATAGTTTAATACATTCATGGAGTTGAAAGGGATAAATATAGGAAAATA
ATATTTTAAAAATATAATTCATACTTATCTCCCAAAAAATAATTTGGTTAATTATTTAACTTTATAATGT
TATGTAACACTTATGTATTCAAACTGTCAACAGCAAAATGTATTTATGAGATAGTGTATAAAAGTGGAAG
CAATATTGTTTGCTTCAGCATTAATGTGTTCTCTTTTGGGGCTGCAGGAAGAAGTTCATAAATATGTACA
AATGATGGGCGGACGAGTATACAGAGACCTTAATGTATCAGTAACTCACCTTATTGCAGGAGAAGTTGGT
AGCAAAAAATATTTAGTTGCTGCAAACCTGAAGAAACCTATTTTGCTTCCCTCTTGGATAAAAACACTTT
GGGAGAAGTCACAAGAGAAGTAAGAAAGACATTTTTATATTTTCTAGATTTGAAAAAATGATGCATTCAA
TCATTTTTGGCATGTGATATACTCTTTGGACTTACTATTCAGGGAAAAAAATAGTGTCATTACTCTTTTC
TCCAGCGAAAACGGAAGAGCAGAATCTACAAGCTCTTATTACCAAGATATAAGTTGACAGGCATAGAATG
GGCCAAGGGTTTAGCATTAGCTACAGAGTAGGAAATGCTTTGGTGATAAAGTTCTCAGCTGTAAATATTT
CTGAAATAATTGAGAAAACGAGTTTGGCAATTCTGTAGCTTTTATGTTGCATTATCCTTCAACACCATTC
CCATATGTTAAGATAGATAATAAATTAGTCATTTTGGCAGTTGCATTCCTTCCAAAAGATGGCATATGTA
AGGTTGAATATAAACATATGCAAGTCATCAGCTGAGATGTGATCATTTAATAAATGCTAATTGAGCCCAT
TTTACGTATCTGACTTGAGGTAGGCATTAGGTATATGTAGTAAGCAAAACAAGATAGTCACTTCCCTCAT
GGAGCTTAGAGCCTATTTCAAGGGGCACACTTCAGTTTCCCCTGCAACTAGATAAACAACCACAAGACCA
AACACCACAGAATTGTATTGGCATACGAATTATATCGGCACTTTTCTGGGCTTGTTTTCAACACCATCCA
GCATATCCCAAATATGTCTCCATGTCAGCAACTCTCATTCCCAATGTGATTACTTCATCAGCACACCTCC
CTAGCATGGCAACAGAATAATGATATTTTTGTTGGTATTTTGCCAAAAATCATTGCTTTTACTTGTATAG
AATAATGGAAAGATTAAAAAGTTCATTTATCTAATAGGCAACCAAATTACCTTTGGGTTTTTAAGTAGAG
ATTCAGACTTATCATTTTGGAAAATATACTATGACCAGCAAGGGCTAGAGTTAAGGAAATATATATTTTT
CCCTTAAAATGGTTTTGAGAGACTGTATCTGAAACAATTACTTTGTTTTAGAGACATGTTATTGAACTAG
GTGAACAATTAGTGTAATTCTGTTTTGGTGGTTCTCCTTTGTAAAAAAAAGATTATAAATCCTAAAAAAT
GAGGGAAGCAATAGTGATATTTGTGTTGTTTTTCATTATTCTTCTGGTAAATTTAATATGTTCTTTTTTA
ACCATTTGATTCCCACAGAAAAATAACTAGATATACTGATATAAACATGGAAGATTTCAAGTGTCCTATT
TTTCTTGGTTGCATAATCTGTGTGACTGGCTTATGTGGCTTAGACAGGAAAGAAGTTCAGCAACTCACAG
TTAAGCATGGAGGTCAATACATGGGACAATTGAAAATGAATGAATGTACACACCTCATTGTGCAAGAACC
AAAAGGTAAAACTGTGTTTCACAAAGGGACAAATGAAACATTTTCTCTAGTATTTAATATTTTATTTTTA
TTTATTTATTTATTTATTTTGAGACAGAGTCTTGCTCTATTGCCCAGGCTGGAGGGCAGTGGCACAATCT
CAGCTCACTGCAACCTCTGCCTCCCTTGATCAAGCGATTCTCCCAACTCAGCTTCCCGAGTAGCGGGATT
ACAGGCACCTGCCACCACGCCTGAATAACTTTTTATTTTTAGTAGAGACGGGCTTTCACCATGTTGGCCA
GACTGGTCTCTAACTGACCTCAATTGATCTTCCCACCTCAACCTCCCAAAGTCCTGGGATTACAGGCATG
AGCCACCGTGCCCAGCCACTAATATTTAATATTTTAAAATCTTTACAGAACAGCTTTTACTTCTGACATG
TCATTAATCTAGTTTGATACTGTTTTCTCTAACATCTTGCAAAGATGTTTTCTCTAACATCTTGCAAAGT
TTTAACTGGAAGACACACCTTGCGGCACATGAGGCAGTAAAAAATGAAAAAGACATTACGAACAAGAAAA
ATTCTTTAAAATTGCTATTAAGTTTGGTGTTACATAACATTATTCTGGATAATTTTTTATCAGCACTCTT
AAAATATACACAAATTGATAAAAGATGAGTTTTGTTAATGTTTTTATTATTGCCCTTTATATGTATACTG
TGTTTTACTAAGCTATCTAGATTGAGAAGAAATTACGATTAAATGGTAATTGTCCTTAAGTCAGAACTTT
GAGTATGGCTGATTGTGATAGGATCACTGTGAGTAGAGTTGATACTGCTGTTCTTTTTCTGAATCTGAAG
ACAGTTCATTGTTGATTCTCTCAAGAATGCCAAAAAACCTTTCATGTGACATATTGACCTCAATTCCTCT
GTGATACTGCTTCAAAATACATTGTGTTGAAGATTTTTAAGGTAATAAAAGATACATATTTTCAATATAA
TTTATCTTTTGGCTTATCTATCCTGGACTTTAAGTAGAAGCCTGTTGACATTGGAATAGTCTGTTCAAAG
TTGGGATTTATTATATAGCACAAATTTACAATTTTCACATTGTACAAGCTGGTTTAAAGAAATTAAGTGA
TGGAGCCTATATGCAAACCCAAGTCCAATATTAATTAAGTTACCCCACAGTTGCTTCTGTCTTCCTGCAG
TTTGTATAAAAGATAAAACCTCTCACATGGCATATGTATTTATACTACACATAGAAAATATAATTAGGCA
ATAAGCTAAAATACTACTTTGTAATAAACTGTGTAGCATACTGTTTAAGAGTAAGTACTGGTAACTTTAA
TTTTGTTGATAGGTTTTTGAAATAACCTGTTATAGCCGGGCGCGGTTGCTCACGCTTGTAATCCCAGCAT
TTTGGGAGGCCAAGGCAGGCGAATCACCTGAGGTCAGGAGTTTGAGACCAGCCTAGCCAACATGGTGAAA
CCCCGTGTCTACTAAAAATACAAAAAAATTAGCCAGACATGGTGGCACACGTCTGTAATCCTAGCTATTC
AGGAGGCTGAGGCAGGAGAATCGCTTGATCAGGAGGGAGGTGGAGGTTGCAGTGAGCCAAGATCTCACCA
CTGTACTCCAGCCTGGGCAACAGAGTGAGACTCCATCTCAAAAAAAAAAAAAAAATATTAACCTGTTATA
ATTTGAATATTTCTGCAAAGATAGATTGTAATGGTTTTCATTTCTTGGTTTCTCCTATTTTCTCTATTTC
TTTCTTAATGAACGCCACAGGTCAGAAGTATGAGTGTGCCAAGAGATGGAATGTACACTGTGTGACCACA
CAGTGGTTTTTTGACAGTATTGAGAAAGGTTTTTGTCAGGATGAATCCATATACAAGACAGAACCTAGAC
CAGAAGCAAAGACTATGCCCAATTCTTCAACTCCTACCAGCCAGATCAACACAATTGATAGTGAGTCTCA
TTGAGATTAAAATAATTATTCTGAAGACAGTCATATTTCTATGTAATAATCAGTATGTTAATAGGATCAC
TGAGATAGGGAATTTCTTTTTCTTGTTTGCTGTGCTTCTAGGCATAATTGTATAATAGTCAAATTGTATA
AAAAGTTAGCACTGAACTGTTCGTAATTTTCTTTTAGAATGAATGAATGCTGTCTTTTATACTCTGTTGT
AATGCAAAAGATGATCAAAGAAATTAAGAACAATGGTAGCTGGGGGCTTAAGATAAAAGTATTAATCTTT
TAAACATTACATGCATATATTAATCTTTCCTTAATTTACAGTTTTGCTGCAGTTATAGATCATCTGTATT
TGTATAAAAATTAAAACCATTTCTATTTTGTAGGTGTCGTGTTGGCAAAATGTTTAAAATATTTTTTCAA
ATGTAAGCTTCTTGGACCTTAAAGTCAGCAACTTCAGATTTTTATGGGAAACAAGACACTATTAAGAAAA
TGTGTTAAATCTATTTTCATTTAAATAAGATAGGAGGCTTAATTAATTTCATTTTCCCTTTTTATACTTT
GCCACTAAGATTTCAGTAAACACCCCTGAATCTTACTTTGGAAGTTGTTTATTGCCCTATATTTGTAAGA
AAAGTTAATCCATAGACAATATGTAATCATGATTATTTTATCTCCCATAAATTTATACGTTTTCAAAATA
TGTAGGTCGTACTCTTTCAGATGTCAGCAATATTTCCAACATAAATGCAAGTTGCGTAAGTGAATCAATA
TGTAATTCACTTAACAGCAAACTGGAGCCTACACTTGAAAATCTAGAAAATCTGGATGTCAGTGCATTTC
AAGCACCTGAAGATTTATTAGATGGTTGTCGGGTACGTCTTTATTATATAATACATGCAGTAGATGATAT
ACATTAGCATTTCCTAGCCTGACTTTGAAGACCCTTCAGAGTTGGGCTTGCTCCTTACTATCTATGTAAA
CCCTCCACTCTAGCTAAGTAGATGCACTTACTAGACCATGTCCATCCTTTGGCTGCGAGAGTCCCTCTGC
CTGCAAGGTATCTTCCTCTGTTATCTTTTAAAAGTTCATTTCAGGTTTTAACTCTTCTCTGAACCCTCCT
AACTACATTAATCTTTTCATCTGCTATATTTCGAGAGCACTTAGTTTCTGAACAACTTATTGGATTTTTT
TTTTTTAATTTTTTTGAGTTAGGGTCTCACTCTGTTGCCCAGGCTGGGATGCAGTGGCACAATCATAACT
TCCTGTAACCTTGAACTCCTGGGCATCAGCCACCCCTCAGTCTCCCGAGCAGTTAGAACTACAGGCATGT
GCCACTACACCTGGCTAATTTTTAAAATTTTTTTGTAGAGACAAGGTCTCACTATGTTGCCCAGGTTTGG
ACTTTAAACTATCATCCAAGTGTTTACAGTGTATTAGACACTGTGCTAATCATTTTATGTGTGTTAATAT
ATATATAAAATCGCATTTAAGTCCCACAAATAACTCTAAAATGGATATTATCTTGAGGGTAAGACTTAGA
GAATTAAAATTCTTGTTCAGAGTCACACAGAGAGACATTAAGTGGCCAGTTATCTACTCCAAAGTCTGTA
TTCCTCACCATTAGAGCCACTGCTTTGTTTGGTATTTCTTGGGTTATTTAGTTTTTTAGTATATGAATAA
CTGTCTTATAAGTTTGTTGATGGAAACAGCATATGCTATACTTTTTCCGCTGTCTTAGATTGGAATACTT
AATGTATTCCTATTTGTAGAATGACTTGGCTGTGCACTAATTTTCACAGAGTAGCAAAAATTTAACCCTA
CCTTATTGTTAAGAAGGGAAATTGGAGCTGGGCTTGGTGGCTCATGCCTGTAATCCCAGCACTTTTGGGA
GGCCAAGGTGGGCAGATACCTGAGGTCAGGAGTTGGAGACCAGCCTGGCCAACATGGTGAAACCCTGTCT
CTACTAAAAATACAAAAAAAATTAGCTGGGCGTTGTGGCAGGCCCCTGTAATCCCAGCTGCTTGGGAGGC
TGAGGTAGGAGAATCACTTGAACCCAGGAGGCGGAGGTTACAGTGAGCCGAGATTGCGCCATTGCACTCC
GGCCTGGTCAACAAGAGTGAAACTCCATCTCAAAATTTAAAAAAAAAAAAAAAAAAAAAAAAAGGGAAAT
TCGGCAAATTACCTTTTTTTTTTTTAAACTTGCCAACTTACAAAAGGTGGGTTTTTTGTTTTTGTTTTGA
GACGGAGACTTGCTCTGTCGCCCAGGCTGGAGTGCAGTGGCGTGATCTCAGCTCACTGCAACATCTTCCT
CTTAGGTTCAAGCGATTCTCCTGCCTCAGCCTCCTAAGTAGTTGGGATTACAGGTGCATGCTAATTTTTC
TATTTTTAGTAGAGGTGAGGGTTTCACCATATTGGCCAGGCTGGTCTTGAACTTCTGACCTCAAGCAGTC
TGCCCACCTTGGCCTCCCAGAGTGTTGGGATTACAGGCATGAGCCACCACACCTGGCTCAGAGGTGTTTT
GTATGATGTTTTATCCTAGACTACTAATTCTAGATATAGCTTTTAATTATTTCTTACATATAGAAAGTAT
ATGATTCCAAATATTTGTTAAAATATATTCTAGTAATGGGGGTGATTTAATTTGGGGTATAAATGCAGTT
TGGAGTAGATTTGTCATACTTAAATTTTTTTAAGGGCACCTTATGTAAAATAGAGGTAAAATGATTTTAT
ATTGATTAAATTGGTTTAAATATATATATACTGATAGCTAAAAATAAATTACTGCATACATGTTATCCTC
AAAGCATTGTGTTCAGTTCTTTGACTTATATATATTTTTTGTTCAGTCAACTCTGTGAGTAAGGTAACAT
CAATTTATAGGTAAGAAAATTGATTTAAAGAGCGTAAGCAACTTGCCTATTGTCGTTAATCATAGGCAGC
TGGAAAAAACAACCCCTCCCCCCGCCCCCCACACACACACAATTTAAGCCCAGGTGTTCAGAATTCAGAC
AGTTAACTACAGTTTACTTTTATAATTACTTTAAAATTTACAAGTAAGCTTCACAGTTAAAGAAGTTACC
TGCATTTTAGGAATTGGTATGCACTAATATTTAGAAGATGTTGGACTCTGGCTTCTATTTTCTTTATAGC
CACAAAATACTTATCAAGTATCTACTGTGAAAGATAATGCTGTATGAGATTGTAAAGAGTGATTAAAAAC
TCAAAGTTGCAGAACTGTTAAAAAATCAAAAGTTTCAGAATGTATTTATTCATATATCTTAAATGTACAC
AAGTTGTCTTATTTATACACAGTGGATTTAGATATATATTTTTAGTTTTTTTCTATTGAGAGAAAGCATG
TTATGTATATTAAATATTTTCTTTCTTGCAGATATATCTTTGCGGTTTTAGTGGCAGAAAGCTAGATAAA
CTGAGAAGACTTATTAACAGTGGAGGTGGAGTTCGTTTTAACCAGCTAAATGAAGATGTAACTCATGTTA
TTGTGGGAGATTATGATGATGAATTGAAGCAGTTTTGGAATAAATCAGCCCACAGGTTTTTTTCGTTTTT
AATTCAAAGCAATTTCTACTACATAATTTTTCTTAAAATTGCATATCCACGCAGTTCTGGAAACTGCATG
ACAAGTGGGATGATGGTCTTTATAGCTTGCACTAATACATAACTATGTGCTATTTTTGTAGGCCTCATGT
AGTGGGAGCAAAGTGGTTGCTAGAGTGTTTCAGTAAAGGTTATATGCTTTCTGAAGAACCATATATCCAT
GCTAATTACCAGCCAGTGGAAATTCCAGTTTCACATAAGCCTGAAAGTAAAGCAGCTCTTTTAAAAAAGA
AGAACAGCAGCTTCTCTAAGAAAGACTTTGCTCCTAGTGAAAAGCATGAGCAAGCTGATGAAGATCTGCT
CTCTCAATATGAAAATGGTAGCTCCACAGTAGGTAAGAAATGCTTGATTAGTATTTGTAGTTAGTAAGAA
ATATTTTAGTAGCCTAATACGTACATATGTGATTTCTGCCAAGTTTTCTAGATTTTAAGTTAAATTAACC
TTTTTCTTTCCTTAAAATTTTCCTCATAACTTTTTTTCTGAGCAGGCAAGACAAGAGGGTCCTGAACCCT
TTAACCCTCTCTCCTGTCTCCAGCTAACTAGCTCTATTTTGATTTGTTATATATACAGGCATTGCTTGGT
TTGTGTGTGAGTTTGTAATATCATGAGCCTTTTATTAAAACCTTGTAACAAATACCTCTTACTGGATTAT
TGTGGTCTTTAATGCATGAAACTGTACTGTGGACTACCACCTCAGTATGTACTCTTATCATGTAGTAAGG
TAAATTGCCAGTGAAGCATTATAAACATCATTACTTCTTTTTTATTAAAAAAAAGCCTTTATAAAATACC
TAATATAGCCAAAAATATATACATTTAAGTAAATTTAATGTGTATCATAACTTAAAATCTGAAGTTAATC
AGAATTTTAATCTACCTCGAATAAAACAAGAACCTTAGAAAACTTTTTTTTTTTTTGAAGCAGGATTTCG
CTCTTGTTGCGCAGGCTGGAGTGTAGTGGCATGATCTCAGCTCACTGCAACCTCTGCCTCCCAGGTTCAA
GTGATTCTTTCTGCCTCAGCCTCCCAAGTAGCTGGGATTACAGGCATGCGCCACCACCCCTGGCTAATTT
TGTATTTTTAGTAGAGATGGGGTTTCTCAGTGTTGGCCAGGCTGGTCTTGAACTCCCGACCTCAGGTGAT
CCACCCGCCTTGGCCTCCCAAAGTGCTGGGATTACGGGCGTGAGCCACTGAGCCCAGCCTAAAATACTTT
AATGATCACAACTAGCCCTGCTCCCTCTCTCCACTCATCAACATACTCAGCTTATGTGATTTTGTCTAGT
ATTTTCATTATCTTTTAACATCTTACAATTAGGCGTTATTATGCTTTTATATGGTCAGTATTTGTTTCAT
TTACTAACACGTTTAACTGTTTCTTTGCTCTCCCCAGTTCTTTTTACATCTGAGACCTCTCTTTTGGAAT
CATTTTCTTTCTTCCTAAAACAATATCCTTTAGAAACTCCTTTAGTTTCTCTAAGACTCTTCGGCTGGGT
ATACAGTTCTAGACAGTTTCTTTAAGCACAGAGATATTGTTTCATTGTCATCTATTTCCCTGACTGCTGG
ATAGGAGGTCAGATATCAGTCTGTCATTCCTTTACAGATAATCTGTCTTTATCCTCTGGCTGTTTTTAAG
ATAGTCTTCCTTTTGGTTTTTGTGTCCTAGAGCTTTACCATTTATTTGTCCTGCTTGAGATTCACTGTGC
CTTCTGAATCTGAGAATTAGTAGATTTTTTGCTTTTTGTTAGGTCAAGAAATGTTTATTATCTCTTTGAA
TATTGCCTCTCCCCCATTCTCTATATTCTCTTAACTCCCATTTGCTTTGCATATAGGTCACTTAACCTGT
CCTTATCTTCCATCTTTTTGTCTTTCTGTGATTTATTATGTGTAATTCCTTCAGATTTTTTTCCAGATCA
CGAATCATCTCTTCCGCTATTGCCTAATCTGTTTTACCCATCCATTAAATTTTCTGTTTTAATAATTAAT
TTTTCAATTCCTAGAAGTTTTAGCTTTTTAAATAGTCTGTCATTTATTTTTTTACTTTTAAAAATAGAGA
TGGGGTGCTACTATGTTACCCAGGCTGGTCTTGAAGCACCTCAGCCTCCCAAAGTGCTGGGATTGCAGGT
GTGAGCCACCACACCCAGCCAAGTCTGTCATTTTGTATTTGTATTTTTTGTTCTTTATTTCTTAAAACAC
ATTAAACCTATCAAAACATCTGTGAATTGTTCTGTTGGCTGTTGTTTATGGTGCCTGGTTTTCTTGTGTT
TTGTGATTTTTATTGTGAACTTGTACTTACTAGGACTCTAGGAATTCTAAGAAACTTGGGGTAGGGGTTT
GTTACCCCAGAAAAGGTTCATGTTTGGGTCTGCTAGGTGCCTAGGAGTTTACAAACTCAATATGCCTTTA
AGTTGGTGTATTGGCTGGAGGTTTCTTAGACCTCCAGCTATATGAATTTATACCCAAACCTACTTTGAGG
ACCAGCCTCTGATGAACAGATTCTTAGGAGAGATGTTGTTTCCCCTTGACACAAAGCCAGTGTTCTTGAC
CTCTTCCTTTACAGGGCAGATTTGTTGTTGGTTGGTTGGTTAGTTTTGGTCTGTTTACTAAAGATATGTC
TCTTCATGGGTTCTGGGCTTGTTCTCTCAGGGTATACTCTCCTTCACCTCTAAGTTTTATGAAACCAAAG
GATTGGCTCCTATCTCTTGTGTGATACCTTTACATTCCAAGGGTCTGGGTTACTGCACAGATATTTAATA
GATTTTGACTAACCATTAGCTTTAGTAACTACTTAATGTTCTGGATTTAGTAACCACTTTAGTGGTCTGG
ATTTTAATATTTTATCCTGTATTTTGAAGTGTTTTTAGTGAGAGTGTTTCAAAGATCCTAGCCCACCATA
TTTCTAGAGAGGGAATTCCTAGCATTCCTTTTTTATTTACACTATTTCCGTACTACAAAATTGACTTTTC
TCAAACCATTTACTTATGCTTTAGTATTGTATCACATCAGGAAATCATCTTGATTTTCCAGGATGCTGTG
GTATAACTGAAAGTGATTTTTTTTTTTTTTTTTGGAGACAGGGTCTCACTCCATCACTGAGGATGGAGTG
TAGTGTCACAAGCTTGGATCACTGCAACCTCCTCCTCCCGAGTTCACGCAATTCTCTTCCCTCAGCCTCC
TTAGTAGTTGGGAGTACAGGTGTGCACCACCACGCCCAGCTAATTTTTGTATTTTTAGTAGAGATGGGGT
TTCACCATGTTGGCCAGGTTGGTCTCAAACTCCTGGCCTCATGTGATCCTCCTGTCTTAGCCTCCCAGAA
TGTTGGGATTACAGGCTTGAGCCACTGCACCCAGCCAGCAATTTTACATACTATCCTTCAGCCAAGGGTA
CTTGGTGTAGGGCAGGTGATTAGTTTCTTAAACCTTCCTAAGACAGCTAGTGGTTTACTGACTTTATAAG
GATTAAGTGATGGTAAATCTTAGTGGATCACCAAGCATCTTAGAAAGTCTATAATAAAGTATTTTATAAT
TAATTCTTAAAATGGCTTTTGATTTAAGGGAGTTTTTTGTTTTTTTTTTGAGATGCAGTCTTGCTCTGTC
ACCAGGCTGGAGTGCAGTGGCGTGGTCTTGGCTCACTGCAACCTCTGCCTTCTGGGTTCAAGTGATTCTC
CTGCCTCAGCCTCCCAAGTAGCTGGGATTACAGGCACGTGCCACCATGCCCAGCTAATTTTTCTATTTTT
AGTAGAGATGGGGTTTCTCCATGTTGGCCAGGCTGCTCTTGAACTCCTGACCTTGTGATCCACCCACCTC
AGCCTCCCAAAGTGCTGGGATTACAGGCATGAGCCACCGCGCCCGGCCCTAGGGGAGCTTTTTGAATGAT
AGGTTTATTATGTAGTATCTCTTAGGCTTTTGGGTGCGGTCTGTTTGAAAAGAGATCCTACTGCTAAAAT
AAACGGAAAGAACTGCTGTAGAACATGTTAGTTTATTATGAGTCTCTTAATAACTTCAGAGTTTTACTGA
TGGTTTATAAGAACTTAGTATTTCTACTTTGTTTTTATAGTAGTAGTCTAAAATTCTACTGGATTTCTTC
CTCCTTCCCATCTTACCAACAACATATAGACGTCGAAAAAAGTTATTTTTTTCTCCTAGATGTGACTGCA
AAATAATTGTACTTGCAAAAAATAAGAAGGTTTTTACTTATAAAACAAACTTTACATTTTAACAAAACTG
TTTAAAAAACTTTCCGGAATGTTTTATAGTATTGCCTCACCTTTAATTCCATCTAAGCATATTCATTCCC
ATGAGTATATCTGTAAATTATAAGTATACTATTACCCTTTATTCCTTATATTATGAAACCAAGGGTCAAA
GAGACTATAAAACTAGAACCCAGCTCTCCTGACTTACTGACCAGTAAACTCCCTAGACAAAACTATGCTT
CCTTAGTGCGAATAAGTACAATTTTAATACTTATGTTTAGTAGGAGTCATAAGTTCCTAATATATATTGC
AGTGTACTTAATTTACAAGTTCCTAATGTATATTACAATTTACTTAAAAATGAAAATGCTAGTGTCTGTT
GGAGATGAGGATAGAAGTACGAAGATGGCACTATAACATGGTGGTGTGAACTCTGGAGTTAGACAGACTT
TGGTTTGTATCTCATTTCTGCCACTTAACTGTGTGACCTTAGGCAAGTTACATAACCTCTTCAAGCCTGA
GACTCCTTTTGTACAAAAGGGATGTACTGATAGTATCAGCCTCACAGTTAGCATTATGTGAGCATTACAT
GCATTTGTAAAGCACTTAGTCACAGTGCTTATATAAATGAAAGAGTGATTCTTGGATAGCTTCCAGCCTT
GTTGGAATCACATAGCAGGGCAAACTTTTTCTCTAAAGGAGTAGACAATAAATATTTTAGGATTTGCCAG
CCACTTCCTTATAGTTATTTCCATGTTAACATGTTCCATGTTAAGGACTTGACAGTTATACCATTTAGAC
TTGTTAATTTTTTTCTTAATGATAGTTTCTTAATTTTATGGTGAATCATCTAAACCAGTTTTGGAACTAA
GTCCTGTTGGAGCTATATAATTTTAAACTAATTCAAGTTTCCATTATACTAGGAATACCTAGAACTAACA
TGATTGCTCTTGTCCTTCCCAATGGATGATGGTAATACTGATAAGGACTCTTGGTAACCCCGAAGACGGG
GTGAATCCATATCCCTTTATTATACACGTAAGCTTTAGTTTTGTAAGTATGGTCAAAATTATCAGATTCC
ATGTTACGTTAATATCCTTGCTAGGAAGTAAACTGTATAAGGTAAATTGTTGGTTAGAAAACATTTACTT
TTCTCTTTCAGTTGAGGCTAAGACGTCTGAAGCCAGGCCCTTTAATGATTCTACTCATGCTGAGCCCTTG
AATGATTCTACTCACATTTCTTTGCAAGAAGAAAACCAGTCTTCTGTCAGTCATTGTGTCCCTGATGTTT
CTACAATTACTGAAGAAGGCTTATTTAGCCAAAAGAGTTTCCTTGTTTTGGGTTTTAGTAATGAAAATGA
ATCTAACATCGCAAACATCATAAAAGAAAATGCTGGGAAAATCATGTCCCTTCTGAGCAGAACTGTTGCG
GATTATGCTGTGGTTCCTCTGCTGGGGTGTGAAGTGGAAGCCACTGTGGGAGAAGTTGTTACAAATACAT
GGCTGGTAAGACAACACTAGTGGTTGAAATAAAGTATCGAAGGATATCTGAATGCCAAGAAGGTTAATGT
TTATTTCTTAGACAGTTCAGTTACAGTAAATCAATGCTTGGACTTGAACACTCTTGATTTTGCTTTTAGC
AAGGGAAATTCAAAATTAAATGTGCAAGCTTCTTGGCCTAATCCCGATACAGTAGAGATTACTGTTTCCC
AGGGCCACAGCAGCAACATTCCTTCTTAGGAGGTCACTCTAGGGTCATCTCATACTATTTGTCTTGTTTT
CTCATAACCAAAGCATCACTGGTAATTTCACTGTTGATTTTTTTTTTTTTAACATTCCAAGAATTATGAG
AAAAATAGTATAAACTAATACATTAGAAGGAATGAAATTTAAAGCAACATTCAGTAACTCTAATAATAGA
TCTTACCGATTTTAATAGCCTAATGTAATTAGTCGATGTATGTATATGTGTGTATGTATATATATACTCT
AACATTATGATATGAAATGTATTGAGAATGAGCATACACAAGTTTGTATTAAAGTAAAATTTCTTCTTAT
CAAAACTAAATTATTGCTTCTGTACCTGAACCAGTGTTAACCACTGGTTGCTTATTTCAGGTTGGCTTTA
CTATTTCTTTTGTTTTTAAAAGGTTACTTGCATAGACTATCAGACTTTGTTTGATCCAAAGTCGAATCCT
CTCTTCACACCAGTTCCAGTAATGACAGGAATGACTCCTTTAGAGGATTGTGTTATTTCATTTAGCCAGT
GTGCTGGAGCAGAAAAAGAGTCTTTAACATTCCTAGCAAACCTCCTTGGAGCAAGGTATGTAATATTTTT
AATGCACCTGTTGTATTGGTGTATCTTTTTATTTATTTTGACTTCTTGGAGAGCATTCAAATTAGAATTT
GGTTGGGTGTCTTTATTATATTTATGAGTGTTATGTGGTTCCTTCTCCACTCCCACTGCTTCACTTGACT
AGCCTTAAAAAAAAAAAGTGCCTCTGTTGTCCAAAGATGAAAACTTAGGTATCATTAGAGGTAATAACTG
CAGTGGGTCCAAACACATGAAATAGTGTTTAAGTTGTGACTTCATAATGACACCAAATAAAGTAAGGTAA
TTGGTCATCTTTGAAAGATGCTAGAGAACCAGTCCATTACTTTGAAAGCTGACAAAAGGAAAGGATCAAG
GAATTACCTTGCATTTCCTGTGCAGTTTGCATCAGGGTAACATGATAGTGGATACGACAAAGTTTCCCTT
TATAAAGATGTTTCAACAAACAAATAAATAAATAAGGAATGATAAGACTGTAACCCCTAATGAATGAAAG
AATCTAGGCATTGAACATCAATAGTCGATCACACAATAAAGGGACAAGACATGATGTGCCTTCTTACAAA
GAATACACCACCACTTTGAAGTAGTCTTGCCAAAATAATCAAACCTCAATCTGATGATGCTTCTAGATCC
AATTCCCAATTTATAGGAAATGCAAACAGCAGAATAACACGTTAAACTATACTACAGTGATATAATCAGC
AAGACCCAGACTTTAGTACAACTCTGGCATAAATGATCCAGTGTCTTCAATGAATATATATTAAGGGCAT
GGAAAAGAAGGTAGGAACCTATAAGCTAAAAGACTTGAAAAAGCAAAAGCCTAAATGTAGTCTTTAAAGT
TGCCATTATTTGATTATAGAAAAGTAAAGAAGTGATTACTATAAGTATCCAAATAGGCCAAGCACAGTGG
CTCACACCTGTAATCCCAGCACTCGGGAGGCTAAAAGATTGCTTGAGCTCAGGAGTTCAAGACCAGCCTG
TACAACATAGTGAGACCTCGTCTCTATTTAAAAAATAATAAAAAAAAATGAGCCAGGCATGGTGGCATGT
GCCTATGGTCCCAGCTACTCGGGAGGCTAAGGCAGGAGGATTACTTGAGCCCAGGAGACCAGGGCTGCAG
TGAGCTATGATCACACAACTATACTCCAGCCAGGGCAACAAAATGAGATCCTGTCTCCAAAAAAAAGCCC
AAATAGTGGCTACTATTAAGAAGGGAGGGAAGGGGGTTTATATGGCATGTTGGAGAGGTTCTGGGGTAGT
TAGCAAGATTCTGTCTTCTGACCTGGGTGGTGGACTTAAGGGTTTCACCTTATAATAATTCGTATAGCTG
TATATTTCTTTTTTTGCTGTTTTCTGTTTGAATTATATGAAATAATAAAATTCTTTTAAAACTGAAATTG
TGGAAGATAATAACATACATGATGACAGACTCCACTGGATACAGCTAAAGCTGTACTCAGCAGGAAAGTC
ATGCAAATTCTGAAATAGAATAATTGGGACTAGCCCTAACAGTTATTAAAATATATTTTGTGGCCAGGTC
TGGTGGTTCATGCCTGTAATCCTAGCACTTTGAGAGGCCGTGGCAGGAGGCCAAGTTCAACACCAGCCTG
GACAATATACTGAGACCCTGTCTTTACAAAAAATTTTAAAAATGAGCCAGGCAATGTAGCATAAATCTGT
AGTCTCAGTTATTTGGGAGGCTGAGGTGGGAGGATTGTTTGAGCCTGGGAGGTCAAGGCTGCAGTGAGTC
ACAGTGGCGCCACTGTACTCTAGCCTGGAGGACAGAGCAAGACCCTGTCTCAGAAAACAAACAAACAAAT
ATATATTTTGTGAAACTTCACTAAATAACAGTGTGGTTACGTGTAGCAGAAAGTTTAATTAATGGACAGC
AAATGTAGCAGGAGACCCAAATGTAAAAAGGAATTTACGATACAAGTGACATTTCAAATATATATAAGGA
AGACATGGCTTATTCAATAAATAGGATTCATTAAAGTTGGAGCAGTATCTCATATCTAAATAAGTACTGA
ATGGATTGGTGGGTTAAATGTAAAAAATGAAATTATAAAAGTACTAAGATAAACACAAAACATAGAAAAA
AAAAGTGCTAGGAAACATGGGAAATTTAAAAATCTGAAAAGTTGGGAACTAGAACATAAAACCCAGAAGT
CATAAAAGAAATCACGGAATTCTGTTCAATCTCAAGTCGTAGACTTCTTTTTCTGCCCCGTATTCTCTGT
GTTTAATATCCTATGATCTTGAGGCACTTAATTTCTCTGTATTTTTTCCCATGTCTATACTTAAATATTG
AGAGGATCAAATGAGATAATATGTAGAAATGCTTTGGAAAGTTGTAGTAGGTTAAAAAATAATAATAATG
TTATTTATACACTTTGCTCCTGTCATTTTTTCTGTGCCTTCTTTTGGGAGGAAAGGACAAGGTGTGGGGG
TGATAACTAATTAAGGAGGTAATTTTGGCTGTGTGAGGTGGTTCACGCCTGTAATCCCAACTTTAGGAGG
CTGAGGCAGGAGGATCACTTGAGCTCAGGAGTTCGAGACCAGGCTAGGCAACATTGTGAAACCCCATCTC
TACAAAAAATACAAAAATTAGCCAGGTGTGGTGGTGTACACCTGTAGTCTTAGGTACTGGGGAGGCTGAG
GTGGGAGGATGGCTTGAGCCTGGGAGGCGGAGGTTGCAGTGAGCTGTGATTGTGCCACTGCACTCCAGTC
TGGACAACATAGCAAGACCCTGTCTCAAAAGGATTTTTGCTGTCTGTTCTTTGCATGTCTAATTATGTTT
TTATAAAAAGTTTGTTACAGCAATACATTTTTACCCTAGAGTAAGCATTTGTAAGGGGATTAGCTTAATT
TCAGATAGAGTAAACCAACTTTTAATCAGTATTTTTTTTTATACTTACATGATCTCTAACCACACTGTTG
TGTTGGAAATTTTGTTAGTTTTGCGGGTTAATTGTATATGTGACCATTTCCACTTCTTTAAACATAAATT
TCAGTGTTCAAGAATACTTTGTTCGCAAATCCAATGCAAAGAAAGGCATGTTTGCCAGTACTCATCTTAT
ACTGAAAGAACGTGGTGGCTCTAAATATGAAGCTGCAAAGAAGTGGAATTTACCTGCCGTTACTATAGCT
TGGCTGTTGGAGACTGCTAGAACGGGAAAGAGAGCAGACGAAAGCCATTTTCTGATTGAAAATTCAACTA
AAGAAGGTTAATACTTTTATTCTGTTCTTTTATATATATTTACAACTAGATGGTTTCTGGGATATAAATG
TGCCAATGCTTGTGTTTAGGAAGGGTCATTGATTTTTGCTTTTCACATTGGGTGCAGTGAGGGTCTCAGT
GTTCGAAGTCTACAGATGTAAGCTTGGCTCCTATTTACTGTTGATTCTTTCTATGGCTCATAGTAACACA
CTATATAATTAACATGCTATCTCTCCTCTTATCTTTGGGCTTCTGCATGTTTCCTGTAGACCACCTCACA
GTTGCCTGCTCTTCCTGCTTATCTTTCAGTTCTCAGCTAAGATACCACTTTCCCTGGGAAGCCTTTCATT
TTTTCTTTTTAATTATTATTACACTTTAAGTTCTGGGGTACATGTGCACAATATGCGGGTTTGTTACATA
TGTATACATGTGTCATGTTGGTTTGCTGCACCCATTAATTCGTCATTTACATTAGGTATTTCTCCTAATA
CTATCCCTCCCCCATCCCCCCATCCTACGACAGGCCCCGGTGTGTGATGTTCCCTGCCCTGTGTCTGTTC
AATTCCCATCTATGAGTGAGAACATGCGGTGTTTGGTTTTCTGTCCTTGTGATAGTTTCCTCAGAATGAT
GGTTTCCAGCTTCATCCATGTCCCGACAAAGGACATGAATTCATCCTTTTTTCTGGCTGCATAGTATTCC
ATGGTGTATATGTGCCACATTTTCTTAATCCAGTCTATCATTGATAGACATTTGGGTTGGTTCCAAGTCT
TTGCTATTGTGAATAGTGCTGCAATAAACATATGTGTACATGTGTCTTTATAGTAGCATGATTTGTAATC
CTTTGGGTATATACCCAGTAATGGGATCGCTGGGTCAAATGGTATTTCTAGTTCTAGATCTTTGAGGAAT
CGCCACACTGTCTTGGGAAGCATTCTTGACTCACCAAGGATGGCCTTTGTCTTGGTATAATGTTTTTTGT
TTCACCATGACACTCTGTATCATCCCTTTTATCTCTTACCTCAGTGTTATAATGGTTGTTTATTTTGTGT
CTTCCTGCTAAATTTAAAGTTCCAGAAAGGCAGTGAACATGCATGTCTTGTGAATTCTGTATTTCCCATG
TCTAACACTAGGCCTGGCATGGAGTAGCTATCTAATAAGGTTTTTTGTTAAATGTTGAAAAAAGGTGGAA
GGCATAGGTGGAAGAATACAGTACCCTCTCTTGTAAGATAATAGCATCCATGGGCAAACTTCAGGGACAT
ATCAGCAGCTTGGGAATACCTCTCAGAGTCATTACTTATTTTGCCAGACAGACTGGTAATTTTATGACTG
AGGCTAAGTGATGTTCAGGTCATATTAAAATTTGATTAAGGACTTTCCAAAACTAGACTGTAGTTAACTC
TGAGTACCTGTAATTGAGATTTTTCTTTTTACTCTGTCATTGACTAGAAAGACATTCACTGATAACAATT
TTTGGCAAATAGGCTTATTGAGACATAGCAAGATGAAACAGGAAATCTATTATTATTTTTTCAGTTAATG
TGCTTGTCTAACTCAACATATATTTAATGCATAATCTGGTTTGTTTCTTGGAAAGTAGGTATATAATTTT
GTGATTTAAAGTGTACCTGAGAATTGACATGAAAACTAACAGATTAGGATGCCGAGGTAGATGGATCTCT
TGAGCCCAGGAGTTATGCAAGAAAGAAAGGAAAGAAAACAGTATAAAATATTACTTCTTGTGTACCGGGA
AAAAGTGGGCATTAGTGGCTCATATTTGTTTCTTTTCATTTTAAATCTCTAGAACGAAGTTTGGAAACAG
AAATAACAAATGGAATCAATCTAAATTCAGATACTGCAGAGCATCCTGGCACACGCCTGCAAACTCACAG
AAAAACCGTCGTTACACCTTTAGATATGAACCGCTTTCAGAGTAAAGCTTTCCGTGCTGTGGTCTCACAA
CATGCCAGACAGGTCGCAGCCTCCCCAGCAGTAGGACAACCACTTCAGAAGGAGCCCTCGTTACACCTGG
ATACACCATCAAAATTCCTGTCCAAGGACAAACTCTTCAAGCCTTCCTTTGATGTGAAGGTAAGGTTTAT
AGGCAGTGGTCCCAGAGTTAACAGTTTTACCGTTTATAAAGTTAAAGCACCAAATTTGGCATCACCTCTG
AAGTGTAGTAATAAATTTTCCAGAGACATTGGCAAGTAGATTTATGTTACTGAGTTTGAACGTTTTGAGT
CCCAGCATACATTTAGGGTTAAGGTAACAGCTATAGATAAATATGGTGTGAAATTAGGACATCTGGGTTC
AAGTACTGGATCGATCTTGAACTGTATGACTAGGCCAATCATTTAACATATCTGAGCTTCAGTTTGTTTT
TTCATACAAAGAAGATAATATTTGCTCTGAAAATTCATAGATTATAAAGATCAAATGATGAAATCACTTT
ATAAACTATAAAATGTAAACACACTGATACTTTATATATTGGTTCTCAGAGTACACCCGGGATTTGCCTT
CTGAAAATGTGTGTATATCACCTTACTTGAATTGTTTCCTGTAAAGACATGAGTTAAGTCTGTGTTTTAG
TTTGATCTCGTGAGCATTGTAGTATGGCTCCCTTTCTGAAAAATGCATTTGTAAATCAGGGGCTAATGTA
ATCTTCCAAATAATTTTCTTTGATTTTCCAAAACTGATTTTCATCATTATTTCTTTAGTAGCTTTTGACC
TCTTAAGTGGCTGTTCAAACCCACTGTCTATGATTTCTTTATCCACGAACCTTTGAAGAATTATTTTACT
CATTCACGTGTTGATATTTTTGCTTGTAGGGTATTTAGAAGCAATATTTTAATAATTTTTATTGTGTTTT
GGAGTGGACTTACTAAAAAGTTTATAGATTATTCATATTCAGAAAATAAATATTAATTGATATCCAGGAC
AGTTTTCCCCAAGCTAATTTATGCCTTTATTTTTGGTCAGAATTCCAGTGACGCACATTAAAAAAAGTGT
GTCTTTACTATTAAACTCAAAATTCTAAGTTTTCACATGAAATCTCTTCTGAGGTAACATTTTGTACTGT
GATTAATACTCAGGTCCATATCCCTTAAGACATAGAGGAAAATCAGTCTTGAGAACTGTGAGGTGTAGGA
TCAAGCCTCTTCTTTGCCTCCTACTGCCTTTTAAAAGCAAGTCAACCTCTTTCGGCTTCATTATTCTCAT
CTATAAAATCCAGATGATCTCTAAAGTGTCATAGCTCACAGACTCTCTGAAGAGCAAATGTAATAATATT
GGTGGGCAAGAAAATAGTAGAGATATTTTCAGTCATTGAGACCATTCTTATATAGATACATTGCAATAAA
AGTTTTGCAGTGGAAAGCTGATAGTTCTGAATAGCCTCAATACAAAAAACACATTAAAGATTTTATTGTT
TAGAGTCATAGTTTATTGAGCAGTGTTTTTCCTCTTTTTTCTTTCTTTTTTGATGGCACATAAATAATGC
TTCATCTTATAATCTTATAAGCATTATAATGCTTCATCTATAATCTTATAATCAGATGATAATCTTATCA
TCTTCAAACTGATATAATATGGTATGTTGAATTCTTTACTTAAAACATGAAAGGGCCCATGGAATAATCA
CAAAATTGACCATCTATTAGGCCTCACCCTTGCCCCCCTCAAAAAAACTCACCACTTATTTAAACTTAAT
TTTTAATTAATATACATCAGAGCAGTACAATAAATATACTGCTAATGAACTATCAGGGTTAATCATTGAG
AAGCCACTATACACGTTCAGATAGAGACCATGGTCAGTACTGTAAACCCTTCCTTGTGGCTCCATCGCTG
CTTCCTCCCTAAAGTATACTCCTGACTTCTAATAACTATAGTTTTGTTATGCTTGTTTTTGACTTTTAAA
TATGTGGAATCATAGTATGTATTCTTTTGAGTCTGTTTTTTTTTTATTGTTCTTTAACCCTTATTTAGAT
TTGTCTGTTTTGCTGCATGCAAATATAGTTCATTTATTTATTCCTTTGTATGGATATACAGAATTTACAT
TTCCAGTGTACTGTTGATGGGCATTTAGTTGGTTACTAGTTTTTTGCCCTTACAAAATAATTTTACTGTG
AACATTCTTGTGCGTGTCTCTTGGAGTCTATGTGTGTGTGTTACTATGTGGTATATACCTGGAAGTGAAA
TTGTTGGGTTATATTTCAGCTTCAGTAGAGAATGACAAATTTTTTGCCAAAGTGATTATACCAGTTCATG
CTTCCACCAGTAGTGTGTTGAGTGTACCCAGTGTTCCTCATCTTTGCTGATACTTGCTATTATAAGTTGT
TTTATTTCACTTTTTACTTCAAAATAATTTCTAACTTACAAAAAGTTGCAAAATAAAAGTGGTACAAGGG
GCTGGGCGTGGTGGCTCACACCTGTAATCCCAGCATTTTGGGAGGCTGAGGTGGGAGCCTCACTTGAGAC
CAGGAGTTCTGGACCAGTCTAGGCAATATAGCGAGACCGCCATCTCTAACAAATTTTTTTTTTAATTAGC
TGGGCTTGGTGGAGTGCACCTATAGTCCTAGAACTCAGGAGGGTGAGGCAGCAAGATGGCTTGAGCCCAG
GAGTTTGAGGCTGCAGTGAGCTATCATCCTACCACTGCACTCCAGCCTGAGTGACAGAGCAAGACCCTGT
CTCAAAAAGAAATAAGTACAAGGATGGCTGGACATAGTGGCTCATGCCTGTTATCCCAGCACATTGAGGC
TGAGGTGGATCACTTGAGGCAAGGAGTTGGACACCAGCCTGGGCAACATGGTGAGACCCCACATCTACAA
AAAGTTGGAAAAATTAGCTGGGCATGATGATGCATACCTCTTCTTACTTAAATAGTATTCTTTATTATTT
GTCAGTTTTAAATTATATTTTTGACTCCCACTAATTGCCTGTATAGAAGATCTTATTCTCTTTCCCCCTT
TTCTCTCTTCTATTTTTCATTGCATATTTTTTTACTTTGTCAGGAGGGAAAATATATTTTTTCAACCCAC
AGACCCCACCCTCGTTTTGGTCTTAACTCTACAATCGAATATATGAAATGTGTACTCTTCTTTTTGAAGC
TTACCTGTCACTTTTGGTAGGATGAAGTTCATTTTCTAGTAGGTTCCTCAGGAATCTGTGTGTACACACG
TGTACAGTATTCCTTGAGTTCTGCATGTTCATAACTTTTACTGTGGCCTTGCTTCTTCTACAAATTGTTT
GGATGTACTATTCTTAGCTTGCAGTTTTTTTTCTTGAGTTTCCTGAAAATGCTCTTCCACTACTGCCTTG
CTTTGTATGTGTTGTTTTTGAAAAAAAATCTGATGCCAATCTAATTAAATTACTTGTCTTTGGAAGTTAT
TTCATCTTTTTGCCTGGAGGTCATGTGGATTTTTCTTTTATCTTTTATCTTTTTTTTTTAAGACAGAGTC
TCGCTCTGTCACCCAGGACCCAGGCTAGAGTGCAGTGGCACAATCTCAGCTCACTGCAACCTCTGCCTCC
TAGGTTCAAGCGATTCTCCTGCCTCAGCCTCCCGAGTAGCTGGGATTACAGGCATGCGCCACCATGCCCG
GCTAATTTTTGTATTTTTAGTAGAGATGGGGTTTTGCCATGTTGGCCAGGCTGACCTTGAACTCCTGATA
TCAAGTGATCTGCCTGCCTTGGCCTCTGAAAGTGCTGGGATTACAGGCATGAGCCACAACACCTGGCCTT
TTCTTTTATCTTTGAACTCAAATAGTTTCACGAGGATGTCTAGATGTTAAGAATTCTCAATCATTTGAAA
TCAGTTTTCCACAATACATGGTAGGTTTTAAAATTTGATTCTTTTCAAATTTTTGGTCTGAGAGATGAGA
AGAATGGAGTTGCCAGTCCAAACTGAGTTGAACAGAACAGGTTGGGATTGGAGCCTAAAGATCTAGAGTT
CACATGTTAGACACATTAAGTTTGAGATGCCTATTAGATATCCAAGTAGTTGTTAAATAGGCAGTTGCAA
ATAACGCTGGAAGTTTGAGGAATGGTTTGGGCTGGAGATAAAAATTTGGGGTTCTGAGTTTGTAGGTAAT
GTGTAAAGCCATGTGAGAATAGATGCCAAGAGAGTAGGAGAAGGCAAAGAAAGGAAAAAGGTTTTGTTTT
GTTTTGTTGTGTTTAAGACAAGGTCTCGCTGTGTCGTCCAGGCTGGAGTGTAGTGGCATGATCACAGCCC
ATTATAGCCTTGACCTCTGGACTCAAGCAATACTTCCACCTCTGCCTTCAAAGCAACTAGGACTTCAGGT
GCATGTCACCACACCTGGCTAATTTTTAATTTTTTTGTAGATACGGGGATCTTACCACATTGCTCAGACT
GGCCTTAAATTCCTGGACTTGAGCAATCCTCCTGCCTTGGCCTCCCAAAGTGTTGGGGTTATAGGTGTGA
GCCACCACGTCCAGCCAAAGAAAAGAGCTCTAAGCAACACCTTGAGGTGCTCACCTTTAGAGGAGGAACC
AGCAAAGGAGACTGAGAAGGAGCTATAAGAGAAGAGGAAAGCCTAGAGCTTATTTCAAAGAGCCAAGTAT
TTCAAAGAGGGAGGAGGGGTTAACTATGTCCAGGACTGCTCTAAGATAAAGAAAGGTGAGAATAGAAAAT
TGGCCAGTGGATTGAGCATTATGAAGGTCAATGGCGTCATCATAACAATAAGGGTTTTGGTGGCATGATG
GAGGTGGAAGCTGGTGTGGGTTCATAAAGAAATGAGAAGAATCGGAGACATTGAGTGTAAACAACGATTT
TTGAAGGAATCTTGCCATAAAGGGGAGCCAAGAAATGGAGTTGTAGTTATGGGGCAAAGTAGGGTCAAAA
GAAGGTTGTTTTCTTTTTAAGGTGGAAGAAATAGCCAGGCTCAGTGGTGCATGCCCATAATCCCAGCACT
TTGGGAGCCCAAGACGGGAGGATCACTTGAGTCCAGGATTTCAAGACAAATCTGGGCAACATGGCAAGAC
CCTGTCTCTACAAAATACACAAAAATTAGCTGGGTGTGGTGGTGCACGTCTGTAGCCCCAGCTAGTTGGT
AGGCGGAGGCAGGAGGATTGCTTGAGTCCAGGAGATAGAGGACGCAGTGGGCAGTGATCATGCCGCTGTA
CTCCAGCCTGGGTGACAAACTGAGACCCTGTCTCAAAAAAAGAAGAAGAAATAACTATATGCCAGTGTAA
CTGCCATTAGAGAGCCAATTGATGATGCAGATGAGAGAAGGAAGACTTGCAGGAGGCTTGAGTCTGAGAG
GCATTGGGATCTACTTCTTAAGTAGAGGAAGGTACTAGTGGCACGTGTGCTGAAGGCAGATAGATGTGGT
ATGGGAGCTTCTGATTTTTATATAAGGAATCCTCTAAAATGCTTTGAAGAAATTTTAAAAAGTTTAGCAT
ATAGAAAGACTTACCATGTTCTTGCAAAATAGATTTAAACATTGTCAAGATCTATAAAGGTGTATTAATC
TGTTTGCACATTGCTATAAAGAACTACCCCAGACCGAGTAATTTATTCTTATTTTTATTTTTTTATTTTG
AGATGGAGTCTTGCTCTTGTCACCCAGGCTGAAGTGCGGTGGCATGATCTCGGCTCACTGCAACCTCCGC
CTCCTGGGTTCAAGCAATTCTGCTGCCTCAGCTTCCCAAGTAACTGGGATTACAGGCGCCTACCCCCACA
CCCGGCTAATTTTTGTATTTTCAGTAGAGACGGGGTTTCACTGTGTTGGGCAGGCTGGTCTCAAACTCCT
GACCTCAAGTGATCCACCCACCTCAGCCTCCCAAAATGCTGGGATTACAGGCGCGAGCCACCACGTCCAA
CTTTATAAAGAAAAGAGGTTTAATTGACTCAGTTCCACAGGCTGTACAGGAAGCACCACTGGGGAGGCCT
CAGGAAAATTACAATCACGGTCGAAAATGAAGGGGAAGTGAGCACGTCTTTCATGGCTGGAGAAGGAGGA
AAAGATAGCGGGGGGAGATGCCACACACTTTTAAACAACTGGATATCAGCCAGGCGCAGTGGCTCACGCC
TGTAATCCCAGCACTTTGGGAGGCCAAGGTGGGTGGATCACCTGAGGTCAGGAGTTCAAGACCAGCCTGG
CCAATATGGCGAAACCCCATCTCTACTAAAAATATAAAAATGAGCCGGGTGTGATGGCATATGCCTGTAA
TCCCAGCTACTCGAGAGACTGAGGCAAGAGAATCACTTGAACCAGGAGGCAGAGATTGCATTGCACCAAG
GTCGCGCCACAGCCCGGGCAACAGAGTGAGACTCCATCTCAAACCAGATATCATGAGAACTCACTCATTA
TCACAAGAACAGCAAGGGGGAAATCCGCCCCCATAATCCAGTCAACTGCCACCAGGCTCCTCCTCCATCA
TTGGGGATTACAGTTCAACATGAGATTTGAGTGGGGACACAAATCCAAACCATATCAAAAGGTAATGTAG
GTCCTAGAAAAAAATGCAAGCAGAAACAATATTAAAAAAAATCTGAAAAGTATAATTGCAGGTAGGCAGT
AGCCCTACCGTTTATTAAAACCTCCTATAAAGTTGCAGTAGTTAAAACAGTGTGGTGTCACGTGAATAAT
CAAGTTAGTGTATAAGATTATACTCCACAAATAGGGGAATTTATTATGTAATAAAGGTGGCATTCAAATT
GGACAATTAGGTAGCCATCTGAAAATACGTTTGTAATTAAAGCTCACACTTTACATCAGAATACTTTTTA
GATGATCAACTTTTGGGGTTTTTCTTGAAATAGGATCTCACTTTATCACTTAGGCTGGAGTTCAGTGGCA
TCATCGTGGCTCACTGCAGCTTTGACCTCCTGGGCTCAAGCAGTCCTCCCACCTCAGCCTCTGGAGTAAC
TCAGACTAGAGGTACATGACACTGTGCCCAGCTAATTGTATTTTTTGGAGAGGTAGAGTCTCACCATGTT
GCTCAGGCTGGTCTAGAACTCCTGGGCTCAGGCAGTTCTGCCTTGGCCTCCCAAAGTGTTGGAATTACAA
GCGTGAACAACCACACCCAGCCTAGATGATCAGATTTAAACATAAGAAATGAAGCCATAAAAATTCCCAA
ACATGTCATGAATTTGTTTCTAAAATAATCCTAGTGTGGGGAAGGCCTAACTATAACATACACTCCAAAA
GAAATAGAAGATTCGTATGAATTTGACAGCATTAAAAATTCTCTAACTGGGTGTGATGGCACATACCTAT
AGTCCCAGCTGACAAGGGAGGATTGCTTGAGCCCTGGAGGCAGAGGTTGCAGTGAACTAAGATTGAGCCA
CTTCAGTCCGTTCTGGGCAAGAGAGCAAGACCCCGTCTCAAAAAACAAAAAAATTACAGCGAGTCACCGT
GACTCACACCTGTAATCCCAGCACTTTGGGAGGCCAAGGCGAGAGGATTGCTTGAGCCTAGGAGTTTGAG
ACCAGCCTGGGAAAGACGGCAAGACCCTGTCTCTATGAAAAATTTTAAAATTAGCTGAGCACAGGGTTGT
GCATCTGGAGTCCCAGCTACCTGGGAGGCTGAGGTGAGAGGATCCTTGAATCCAGGAGTTAGAAGTTACA
GTGACCTATAATCATGCCACTGTACTCCAGCTTGGGTGACAAAGCAGGACTCCATCTCTGAAAAAAAAAA
AAAGCTCCATGGCAAAAATTTGACAAATGATAAATTGAAAATAAATACGTGGGTATTATATCACAGTTGA
TACATGCACATATAAATTCATACAAATGAATATAAAAGTATATTCATACAAGCGAATATATTAAAAAAAA
GACTAACAACCCAGTAGAAAAATGGGCAAAGGATAGGAGCAGATAGTTATCACAAAAAATTAGATATAAA
TATACATATAGCCAGGCGCGGTGGCTCACGCCTGTTATCCCAGCACTTTGGGAGTCAAAGGCGGTTGGAT
GATGAGGTCAGGAGTTTGAGATCAGCTTGAGCAACATGGTGAAACCCTGTCTCTACTAAAAATACGAAAA
ATTAGCCAGGCATGGTGGTGCATGCCTGTAGTCCCAGCTACTCGGGAGGCTGAGGCAGGAGAATCGCTTG
AACCCAGGAGGCAGAGGTTGCAGTGAGCCGAGATCGCGCCATTGTACTCCAGCCTGGGTGACAGAGCGAG
ACTCCGTCTCAAAAATATATATATATATACACACACACACACATATAAAGATATTTAACCTCATTCAGTA
TAAAAGAGTAGAAAATTAAAGCATACAGATAAAATTTTTTAGTCTTATCAGATTGTCAAAAAAGAAAAAT
CTGATTACTGTGATATCAAGCACGTTTGGAAAACACACACACTCATACTTTGCTCATGAAAATGTCAACA
TTGGTAGATACATGTTGGTCTTGTTTTTTTAGTTTTTTTAAAAAGAAATTGGGTCTAACTGTGTTTCCCA
GACTCGTCTCAAAACTCCTGGTCTTGAGCTGTCTTCTTGCTTCAACTTCTCTGGAGTAGCTGAGATTACT
GACAGGAGCCACTGCACTGGGCTGGTAGATACATTTTGCTTAAAAGGTTTCCTTTACTCTTGTGTGTGCA
AAATGGTTTGTGTACAAGGTTATTCATTGCATCATTATACTTGCAAAAGACTGTTAACCGAAAGCTTATC
AGTTGTACACAGGTTAAATACATTCTGATACATACATGGAATACTATACACATGCAAAAGAGAATGAGCA
AGCCATTTGGACAACAGTAGCTTCCTTTCAGGAGGGAACTGTTGGTGGCTTTAGAACAGGAATATATTTT
GAACTTTTGAAGATTTTTTTTTTTTTAATTCTCAGCTCATTTTGACTTTCTAACCTTCCTTATAATCCAT
TTCTTGATTATATCCGTCGTTGCTTATTTGTTTCCTTCTGGGTTTTTTTGGTTTGTTTTGTTTTCAAATT
CAACTCTAAGATTCAGGTAAGAGACAAGCACTGCTGAAAATGTAAGCTAGTTAGTCTCTTTGAACCAATT
TGCTGGACAGTATGGAATTTTTGTTCACAGTATATGGATTTGATTATAGTTTATTCTTTTTCTTGTTATT
TGGAGGAAAACTAGAGGAAGTTAAACTGTAATCCATTAATTTTGAGGATTCTCCCCCTTCTCTCTCTTTA
CCCCTCTCTCCTCCTCTTTCTTTTTCCTGTCCTATTAACCCATCTTGCTTCTCTCTCTCTCTCTTCTTTT
CTCCATCTCTCTCTCTCCTTCATATGTATAGGATGCACTTGCAGCCTTGGAAACTCCAGGACGTCCCAGC
CAACAGAAAAGGAAACCGAGTACGCCACTCTCAGAAGTTATTGTCAAAAACTTGCAACTTGCTTTGGCAA
ATAGCTCTCGAAATGCTGTCGCTCTTTCTGCCAGCCCTCAACTGAAAGAGGCCCAGTCAGAGAAGGTAGG
ATTAGTTCTCTTATTAAAAGGAAGTTTTAGATAACATTTCAAACAATAATGACTGATCTGTTTCTTTTAT
TTTCCATGGACAGGAAGAAGCCCCAAAGCCACTTCACAAAGTAGTGGTATGTGTTAGTAAAAAACTCAGT
AAGAAGCAGAGTGAACTAAATGGGATCGCAGCCTCTCTAGGAGCAGATTACAGGTAGTTGGCACATCTTT
CTGTTTCATGGTGATATGACTGAAATTTATAAGGAAACCTAAAGCTATTGTGAGCATCTACAAGAATACA
TTTATTTTGTTTCATGCATCTTTATCTACAAAATCTCTCCAGTTGATTTTTAATTTACCACATCTGTTGA
AAATAGCCTCTCACATATCAATTCACTCTTATATGTATATAATGTATATTTTTTAGGGTATGCACAACAA
ATATTGGAGAGCCTATTTTATGCCACTAACTATTCTAGAAACCTGGGATCCATGAAGGATCAGTATAGTC
TAAAAGAATCCCTGTGTTCAAGGAGTTTAGAGTCTATTAATAGTAATACATCTGGATCTGAGATTAAGTT
TATTTTTACTAGTGATTTTTCAGATTAGAGCCCTCTGGGAGTAGTACTAAGTACTCTGGCAGCCCTCCTT
TATTAAGATAGTCTTTTTTGAGCATGTTTTCATTATCTTTTTTTTTTTTTAAACTTTGGAGACTTAGATT
GTCAGATTTTTCTTCAGTCAACCTGACAGCCTAAGCTGAAAACAGATCTCTAGCACAAATGGCATCAGTA
TCCAGAATTGAGAATCTCTTACCTATTTCAGCCAGTCCTGAGTTGACTGTACTCCTCCACTAGCTGTAAT
GCTTGCTTTGTTGATAACTTGTGTTCAGCCATTCATAGATATCATAAGAATTTGTTTAACAAATGATGAA
CCATTGCAGGAATATGATTAGTTTCATCTTCCCCTTTGGTAACTCTTATTTCAGTTTGTTTTCTATTTGA
TAAAGAAATTAGGACAGGAAAATATAGGAGTAAAATTGATCTGTAATACATATAAGCATCTTAGTGTTTG
GTACATCCATTTGAAATAGTGAAGCTCTTCTACGGTATATTTGTATTACCTATTATAAATTGTTAGGTAA
TCTTATCTGTTATTATCTAATTACCTATTATGTTACCTATTGCCAGTTGCTGAGCATTATCTCGTTTCAT
TCTCATAGTAGCCCTACAAGGGGTGTGTGTATATTTTTTTTTCCTCAAAATTGAATGTTTCCTTGTTTAT
TCTGTTTTGATGTAGACATGATATAAGACTTTCAAGGGAACATATAGGATGTATGTTTTTATATGATTTT
AAATGCCAGTCCTCTCAGTATAAAAAATAGAATTTATTACTGAAATTCCTAAACAGAATTTAACCATTGC
ATTGCATTAAAGTTTATATTAAATCTTTTCCTGAAATGGATTGGTAATTGATAAAGGGAAGAGCCTTATA
ATATGCAGAGGTTAGATATTTATATATGCATAGAGTAAAGCAGTTCTCAAGTGAAGTTGTTCCAAATGTT
CCCTTCCATCATCTAGGACCAGACTGTCCCAAAGAGATCATCGGATACTGTCTTCTGTCTTCAGACAGTT
AAACATGTAGGCCCGATCTTTGCAACAAATCAGATGCAGCATCTTCATTTTATTACAAATATTTGTGTAA
CATTCCCTCTATTAAAATGAATATAAATATAACCTACCTACTTTTATAATTTAAAAAAGTAGCAGACAGT
ATAGCACTCTGTGATGCATAGGAGAAATAGAAGGTGCATAATATAGAAAAGATATATGTTCAGTTATGTA
TAATGCCTAAGGCTGACTACACTAGAAAACAATGGAGTATTAATACGTTTGTATACCTATGTAAAGGCAC
CACAAATCCAACAGTCCCAAGGCTGAGACCGATCTGGGGACTCAGATACCATGAGTAGCAGTGGTCTTCC
ATCAATTTATACAGTAGTCACATTTTTGTAATATTAGTGTATATTAAAACTGCAAAAAAATAACTTGTTT
ATATGTCGAACAGGTTCTAGACTCAACTAATTATAAACAACTTTTTTTTACATACGTGAATTTGTCGGGA
CATTAGAATATCATGCAAGATATGACATAATTATATGTATGACTGTTCCCCAGAATTTCCAGCATCCTGT
ACCTTACCCACTGCATGCTAGTAGCACCCTCCAACATACAAACACACATTGTAACAACCAAAATCACCCT
CACAAATGTCCAAAATAACCCCTGAAGTAACACTTTTGCTGAAACCGCTGATCTAGACCAAGGGTGTATG
GGCTGGTTCATCTGTTTTTGTAAGTAAAGTTTTATTGGAATACAGCAATGCCTTTTCACTTACAAATTGC
CTATGACTGCTTTCACATACAAGACAAAAGTTGAGCAGTTGCAAAAGAGATTGTTTGGCCTGCAAAGTCT
AAAATATTTACTATCTGGCCTTTTAAGAAAAAATTTGCCAAACCCTGATGTAAACCATCTACAACCACTG
ACAGTCTGTTCTTGAATGGCCTCTGAAGACTGAAACTCATGGTTTCCATATTGTCATAGTGGAGTTGACT
GGTAAACCAAATTGATTCAGGCAAAAATACTCCTCTGTTTTTCTGAATTATCTTGATAATATACCACTAC
GCAGAAAGGGAGACAGTTATTCTGAGAACTAACAAATTAGGCAAGGTGTATTTTTATTGTTATGTTTTAG
GATACATGGTCAGTAGGAAATAGAGATTTTTATAATATAACTTAGGAGGCAATAGTACTTCTTACTTCTT
TTTCTTAATTCTTTTTTTTTTTTGAGAGGGAGTTTTGCTCTTGTTGCCCAGGCTGGAGTGCAGTGACATA
ATCTCGACTCACCACAACCTCCACCTCCTGGGTTTAAGCGATTCTCCTGCCTCAGCCTCCTGAGTAGCTG
GTATTACAGGCATGCGCCACCACACCCGGCTAATTTTGTATTTTTAGAAGAGATGTGGTTTCTCCATGTT
GGTCGACTGGTCTGAAACTCCCGACCTCAGGTGATCCACCTGCCTTGGCCTCCCAAAGTACTGGAATTAC
AGGCATGAGCCACTGCCACTGCACCCAGCTTCTTAATTCATTTGTCTATTTAAAAAGCTCAGAGATATTC
CTTACTTAGAAAATGGAAAATATTAAGTGTCCCTAAGGATAAAATTCTGTTTATTTTGGTGATTGTATTT
AGAAATATAATTTTTACCTACCCTTTGGTTTTTACTTGATGTTTCCCAGGTCAAGAGAATATTGAATAGC
GGCCGGGCACGGTGGCTCATGCGTGTAATCCCAGCACTTTGGGAGCGCAAGGCGGGTGGATCACTTGAAG
TCAGGAGTTCGAGACCACTGCCCAATATGGTGAAAACCCATCTCTACTAGAAATACAAAAATTAGCTGGG
TGTGGTGGCGTACGCCTATAATCCCAGCTGCTCAGGAGGCTGAGATAGGAGAATTGCTTGAACCCGGGAG
GTGGAGATTGCAGTGAACCAAGATTGTGCCACTGCATTCCAGCCTGGGTGACAGAGTGAGACTCTGTCTC
AAAAAAAGAGAGAATATTGAATAGGAAGAATTGGGAGATCATAGCATAATATAATAGTTAAGAGCATGGC
TTTTGAAGTCAAAGTTATCTCTATCATTTACTCATTGAGTATCCTTGAACAGGGTACTGAACCATGTCCC
TTAGTTCTTTTATCTTTAAGATTAATGTAATAATACCAGTGTTAGGATTGTTGTGAGGAATGGATGAGAT
AATGATGTGTAAAATATATATAGTCTGTTTTGGGGCATACAATGAATAGTGACTGCCAGCAACTGGAGGG
CAAGTTGGATGCTTTGCAATTTATTAATTTGAAATACCTTTATGGTTACTGTAAAAGTGATATTCTTTAT
AAAAGAAAATTGAAACAATTCAGAAAAGCATAAAGAAGAAAGTAATATTTTAAAGGATATTCTTCTAAAC
CTCTCTCTGTATTTATATACCTACAGATATATGCATAAAATTTGTCCAAAAAGATAGAGCCTATCATCAT
TTTTTTAACTGTTTTTTTCTTGAGGCGGGGTCTTGCTGTGTTGCCTGGGCTGAAGTGCAGTGTCTGTTCA
CAGGGGTGATCATAGCACACTACAGCCTCAAACTCCTGGCCTCAAGTGTCCTCCTGCCTCAGCCTCCTGG
GTAGCTGGGACTATAGGCATGTATCACTTGGCTTGAGCCTGTCATTTTAATGGTCTTGTTTACTCTAGTC
CGAAAGTTTTGGGAAGGTCAGAATATTCTGTTCACAGTAAATAAGAATCATCTTAAACTAATGAGGATGT
TTCTCTTGGTTATTTGTTTTTTTGTATTGGTTATTTCAGGTGGAGTTTTGATGAAACAGTGACTCATTTC
ATCTATCAAGGGCGGCCAAATGACACTAATCGGGAGTATAAATCTGTAAAAGAAAGAGGAGTACACATTG
TTTCCGAGCACTGGCTTTTAGATGTAAGCAGTGCTTTTTTCCCCCCCATCTCTGTTAATTGAAAATGTAT
ACAAACATTATTTCAGAGCACTAACTCAAGAGTTTTCACTCTCAATGGAACTAGAAGCCAGTTTAATAGT
CTTGGTTAACTGTACACATTTCAGATCTTTGGCATCAAAAACTTAACATCTTTAGTCCTTAAATACTTAA
CAAATCTTTAATGGATACTCTTTCTAATTCTCCATTTCCTTGTACTAATTAAAAATGTGATATGAATGGA
AAGTTTATAATTATTTGGGGAAAATTTAACATATCAATAGAGTTTAGATCTGTGTTTCTTTTTTTTCCTG
GGTATTCTCTGGAGGGTAATTGATACCTTTGCAAAAGCACAGGAATGGTTTCAGATTTTATACTTCAGTG
GATATGACATTTAAAACATGAGGACAATCTGTCATTTGTATGATGCAAATTTTTCAGTGTAAACTACTTT
TCAAACCAGTTTTGTGAACTTTTTGCCATATTACAGTATAATGTATTGCTTGTCCTTATCCTACTTAACA
TCATCTATTCATTAAGATTTTGTCAGTCCTGTCTTAAAGCACACCATTGTATTGCAGTGTGCCCAAGAGT
GTAAACATCTTCCTGAATCTCTTTATCCACATACTTATAATCCCAAAATGAGCTTGGATATCAGCGCAGT
GCAAGATGGCCGGCTCTGTAATAGTCGACTACTCTCAGCTGTGTCTTCAACAAAGGATGATGAGGTAGGA
GATATGGATGATACATTTACCCCCTCTTAAGCTAAAGGTATAATCATATATTGCTATGAAACCTTATACA
GTGGCTTGGTTTGAGAATTTATAATTTTTCTTTTTCAATAGCCAGATCCTTTGATTTTAGAAGAAAATGA
TGTAGACAATATGGCCACCAATAATAAAGAGTCAGCACCATCAAATGGAAGTGGAAAGAATGACTCTAAA
GGAGGTAAAATATTTTATTTTTTAATTAAAAAAATTTTTTTTGAGACAAGGTCTCAATTTTTTGTGGAGA
TGGGGTCTTGTCATCTTGCCCACACTGGTCTGAAACTCCTGGGCTGAAAGGATCCTCCTGCCTTGTGAGC
CACTGCACCCAGCTGTAAAATATGTTTAAATTACTAAATACAAGCAAAGCATATATTAGAGGATTGATTT
GTGGTCCCATGCTGATCATTAAGTGATAATTTGCAAAGTTTTATGTAGTTTAAGTGTAAAGCTTATGAAA
TTTATGAAACTAGGTTTTTATGGAGTTAGTGTGATACAGCCCTATTCCATTAAAGGTAGGTGAAGTTGGT
GATTTTTTAAAAATCTAGTCTTTGGTCCAGTTCTTTTGAGTGATTTTCAAAAAGTTTTCTTATATGTACA
ATATATTTTAACATATCCACATGGTTTTAAAGATACAAAAAGACATATGAAGAGTTTCTTCCACCCTTAT
TCTCCAGCCCCCCAGTGTTATTAGTTCCTTATGTATCCTTCTAGAGCTGCTTTATGCATATATAGCCGTA
AATATGTTTTTCCCCCATTAAAAAAAAACAAACAAACACATAGGCTGGGCATGGTGGCTCGTGTCTGTAA
TCCCAGCACTTTGGGAGGCTGAGGCAGGCAGATCACCCAAGGTCAGGAGTTTGAGATCAGCCTGGCCAAC
ATAGAGAAACTCCGTCTCTACTAAAAATACAAAAAATTAGCCGGGCATGGTGGTTGCATGCCTGTAATTC
CAGCTACTCGGGAGGCTGAGGCAGGAGAATCGCTTGAACTCGGGAGGCGGAGGTTGCGGTGAGCCGAGAT
CATGCCATTGCACTCCAGCCTGGGCAAGAAGAGCAAAACTCTTGTCTCAAAAAAAAAAAAAAAAAAAAAC
ATAAATGGTGGACTACTATACATGCTATTTCATACGCTGATCTTTTTGTTACCTTGGGTAGTGTTTTATA
TCAGTAGATAACTAGGAGCTTCTTTAGTCTTTTTCTTTCTTGCTTTTCTTCCTTCCTTCCCTCCCTTTCC
TTCCTGTCCCCCTTCCTCTCCTTTCCCTCTTCCCTTCCTTTCCCTTTCCTTCTTTCTTCCCTTTTCTTTC
TTTTTGGGCAACTGTATTGTATTCATTATGAATGGTCCCACTTTGTTTAGGCATCCATTCTTAATAGGCA
TTTAGGTTATTTCTACTTTCTTGCTTTTATAAATAGTACTGCAGTGAATAACCTTATACATGGATGTCTT
TTAATAGATTTAATATGTTCTGTTTTCCTTACTCATTCTAACCTACCAAAGCTTTCCCTATGACTTACCT
ATTTGGTTAGTCTCACTCTGTTCATTCCAAATGCATTTATTTAATACTTACTCCAGAGTTTAGGCTTTAA
AGAAAACCAAAGGTAAATACAGTTGTCTTGTCCCTTGGTATCCATGTGGCAGTGGTTCCGAGGACTTACC
TCAGGTACCAAAATCCACAGATGCTTAAGTTCCTTATGTATAAAATGACATAGGATTTGAATTTAACCAA
TGCACATCCTCCTGTATACTTTAAATCATCTCTGGATTACTTATAATACCTAATGCACTGTAAATGTTTT
GTAAATAGTTATATTTTATTTTTTTTACTGGTACTTTTAATTGTGATATTTTTCATTTTTATGTCTTTAA
AATATTTCTGATCCATACTTGGTTGAATCCATGCATGCAGAACCGGTGGATGTGGAGGGCTGGATGTATG
TTGTGGTCTGTGTTTTCAAGAGCCTTTGGGGAGTCTGGGCACGGTGGCTCACACCTGTAATCTCAGAGCT
TTGGGAGGCAAAGGCAAGAGGATTGCTTGATGCTAGGGGTTCCAGATCAGCCTGGGCAACATAGTGAGAC
CTTGTCTCTACAAAAAATTTAAAAAATTAGCTGGGCGTGGTAATGTACACCTGTAGTGCCAGCTACTCAG
GTTGCTGAGGCTGGAGGATCACTTGAGCCCAGGAGTTAGAGGTTATAATGAGCTATGACCATACCACTGC
AGTCCAGCCTGGGCCACAGAGCAAGACTCTGTCTCTAAAAAATTAAAAGAATCTTTGGGAAAAATCAGAC
ACATACACAAATGACTATAAGACATCTCAGAGTGTAGTACATACCATGAGAGTCAGAAGCAGGCAGGGAG
CTTTACAGAGGGATAATCACTACAGGTCTTGATGAAATGTCTTTGAAGGGGGCCAGGCACGGTGGCTCAT
GCCTGTAATCCTAGCACTTTGGGAGGCTGAGGTGGGCAGATCACCTGAGGTCAGGAGTTCAAGACCAGCC
TAGCCAACGTGGCGAAACCGCGTCTCTACTAAAAAATACAAAAATTAGCCCGGCATGGTGATGGGCACCT
GTAATCCCAGCTACTTGAGAGGCTGAGGCAGGGAGAATTGCTTGAACCTGGGAGGTGGAGGTTGCAGTGA
GCCGAGGTCGCACCACTGTCCAGCCTGGGCGACAGTGCTAGACTATCACCAAAAAAAAAAAAAAAAAAGT
ATTTGAAGGGCTTCCTAGTTATTTCATATACAGTGCTTGTGGTAAGGGCTGCTTTTTATGTTCTGCAGTA
TTCATAGTTTTAGTACATTACTATAGCCTGTAGTTAATATTCAGTAAATGTCAAGTCAATAAGTTTGTGT
TCAACCAGGTCTAAACAAAATAGTTAATGTAAGATATGGTAAAAAAGAGGAACTTACCTTGAATGGTGTA
TTTGTGTTTGTTTCAAGTTCTGACACAGACCTTAGAGATGAGAGAGAACTTTCAGAAGCAGTTACAGGAG
ATAATGTCTGCAACATCAATAGTGAAACCCCAAGGGCAGAGGACTTCCCTTTCAAGAAGTGGTTGTAACA
GCGCATCTTCAACCCCTGACAGCACTCGCTCTGCTCGCAGTGGACGAAGTAGAGTCCTAGAGGCACTGAG
GTGTGTACCTGTCACTGATGGCAGAAAGACTAGATGACTTGAGAGAAAGGATTTACGTACCTGCTGCTGA
CTCAATTCCATGAGCTTGGCCTAATTTAGCTTTTTTTTCTTTTTTTCCCCAATATGCAGTAAAAGCTGAA
ATTTAAATATCAAGACTAGTGAAGGGGTTATATGCCTAGGCCTTATTTAGCCCAAACAGTAAATATTATA
TTCCAGTATTATCTATTGCTTTTGGCTCTCTGCTGACTAGATTTTTCGTTCTAGCTTGTCCTTCCATTTC
TTGCTCCCAGCAGTTCTAGATTTCTTACTCGGAGGTGGAGCAGACATGGAGATTTGTCTTACAGCAGCAC
CTGCTTCACAGTGAGGCATGATTGATACTTTTTATTACCTCCGTTGAGAAAGAAATGATTTTAAGATCTA
ATTTGCCTCATTTGAAATGGATTCAGTAGGCAGTTCTCTCTGCTCTTTAGTATTAGTATTCAATAGTATT
TGTATTAAACAATAAGTACATATATATTTTTTCAGAGTCTTTTTCTAATGCAATATGTAAAATCTTAAAG
TTATTTTTGTTGGGATTTTGCATGCATTTTGTATTCTCCTTGTAAAATTTATCTTCTAGAAAAGGTGATT
ACAGTTTCTAGTGTGATGTGACTTAAGCTCAGTTGCATAACTTCATCTTTTTCGTGATAGAAGAAAAAAA
TCTATAATTGTGTGATAAGAATTATGGGACTTGTATTTTCAGTTGACTAATTGAATTAAGTATAAGATAA
ACTAGCATTTATCTTACGCTAACTGTATTACATGAGGCAGTTCATTATCTCAGTACTGAGTAAAGTAGCT
TTTTAATATGCTTCAGATCATGTTTTATCATTATAGAGAACCTAAATCCTGTACCAAATCAGAGTAAATA
AATATAGTGTGAGAATAAAAGGCTATATTCTTTATTTTTGAAGCAAAGGAACTATTTGGGGGTTCCTTTG
GTAAATTGTTTTATGGGTTTTGGTGTTTTGTTTTGTTTTTTGTTTTTTGTTTTTTTTTTTTTTGCTTCTC
CACAGTGTAAGTTTTATGGTAAATTATTTTTACTAAGAATGAATGAATGAGTGAATATAAAGAAAATTAT
AGGACTTCTATTTACTGTCACGTGGAATCATTACAATCGCACCATAAAATGCACTTCCCTGTAATTCAGC
ATATTGCTGTTCCACCGTAGACTCTGGAAAGTGGTTACCAATAGCCAAAAGGCCCTTCTGATAAGGCAGC
CTTTACAGCAAGCCTCCCATGTAATCATAGTGCTTATAATTTCAAGTAATTAAAAAATATAACTACTGTT
AAGTAAAGTAACCATAGTGTTTGAAACATTACCCTGTTTCCCTAACCTGTATAATTAAGGAAAATCACAT
TTTTAAATGTACCAATTACTTTAGTATTTTTAAAAAATTTCTTGACACTGTTGAATTTCTCCTTTGAAGT
TTTAGTTCTGTAGACATGTAGTCAAAATATGTGTTCCTAGCTAAAACAGATAACTTTTCTGGAAGAAACC
TTAAACCTTTTTAAAAAAAAAAAATGTCCCTAGGTTCATTTATTTAATATTTTTAATGCATACTGTGTGC
TAGATGGTGGGCATATAAAGGTGAGCCACAACTTTTATGGTCTAACTTATGGATTTAATGAGTTTGGATT
TGTTATTGCTGTTTATTTAAACTGTCACTTCTATTCCTTAGGCAGTCTCGTCAGACAGTACCTGATGTCA
ACACAGAGCCTTCCCAAAATGAACAGATCATTTGGGATGACCCTACAGCAAGGGAGGAGAGAGCAAGGCT
TGCCAGCAATTTGCAGTGGCCTAGTTGTCCCACACAATACTCTGAGCTTCAGGTTGACATTCAAAACTTG
GAGGATTCTCCTTTTCAAAAGCCTTTACATGATTCAGAAATTGCTAAACAGGGTAACAAGAAAGAAATCT
TTGCATTTGTTTGTATTAAGTACATGTTGACCTCTTAAAAATAAACAGATGAGCATGTTGTAGTTCTCTG
ATCTGAATGTGCAAACAAAAAAAACTTCGTAGATATTTCTGGTTTTGGTTTAAACTTGAGCCAGAAAAAT
AATTTGTAAATTGAGGTACTTCATCAGTAAATTGAAAAACATTTTCATAAATTTGGAAATTTAGAATTGG
GCGTTTTTTTCTAGACATGGTGTCTACCATTGTTCTTTTATTCTAGCTAACCCTTTTTGTGTTTGTGGAG
TTAATGCTTGGTTTTTCTTCCTATCATCTTATTTTCATTTAAGTCTTTTGAATTCTGCCTAGCACATACC
TACATTTGTTCTTTGGATTGTATGAGTTTCTTTCTGAATTCTCCTATTTTTTTTCTTCCTTGAGCTTTAC
CTTAAAAACAAAATTTTCCTATCTCTCATCTTTTTTCTTCCTTTTCTTCTTTTTCACATTGCATGATGAC
CTCCCATTAGATATATAGATTTATCTCTGCTTCTGCTTTTCTCCAAGTGTAGAATTGCTCTCATGTTACA
AATTTGGGTTACACTTAACAATGAAAACTTGGTATTTAAGGAAAATGTTGGGAGAAGCCCACAGATAACA
CACTTGCTCTGTTTAATGCTAATAAATTGCATTTTTTCTTTATTGTTATTATTGTCACATGCAGATGGGA
TGCATTTATTTATAAGTTCTGGGGATAGGATACTTTTTTGCCTGTACTTTTTACATTCCAGAGTTTGTGC
TTGACTTCATCTTGACTAAGACAGATGAGAATATTTCCTAGAATTTGTTTTTAGTCTTATTTGGATCCTG
TCACACTGCAGCATTTTATTGTCCTCAGCTGTCTGTGATCCTGGAAACATACGTGTGACTGAAGCTCCCA
AACACCCAATCTCTGAAGAACTGGAAACTCCCATAAAAGACAGCCACCTGATCCCTACGCCTCAAGCCCC
CAGTATTGCCTTTCCACTCGCCAACCCCCCTGTGGCTCCGCACCCTAGAGAAAAGGTTTGTTGATCCTTA
ATATGGTGATACAGCTTTTGCATACTGCTGTTAGGCTGTATTAGAAATTTGTTGATGTCAATATCAAGGC
TTCATCAAATGTTGAAAACTATTTTTTGCATTGTATCATTATTTGTATATTTCATAACTTAGAAGACTGA
GTAAAATACCACTATAAAAGAACTGTGTATCTGATCATTTTTAATGTTAATTTTTTCTAAAGTAAAACTT
TCATTCCAGATTATAACGATAGAGGAGACTCATGAAGAATTAAAAAAACAGTACATATTTCAGTTATCAT
CTCTGAATCCTCAAGAACGTATTGACTATTGTCATCTGATTGAGAAACTAGGTACCAGTATTTTACTTAA
ATCCAAAATGTCCCATATAATAACCATATTTGGAAGTCAAATGTAGTCAATATTAATATCATTTGTAAAG
TCTAGAAGTAGAGGAAAAGAACATGGGTAACTTGTCTAAGGCTATACATTGAGTCAGCATTGGAACTTTG
ATTTTAAAAAGCTCTAAAGTCAGTAGATCATGGGATTTAAAATTCAAATGGAATCTAGCAGTTGAGGTTT
AAGAATCTTCTGTGCTGTTTGACTATTCATTCACTAATGAAGCTTTAAAGACTTACTATATAAATAAAAC
CACATTTTAATGAACTTGAAAGGTTAATAATATCTAGAGAGGAGCTCCCTCTTGTTTTTTTGTTTGTTTG
TTTCCAGTTAGAAACAGTGTGGAGGCCAGGCACGGTGGCTCGTGCCTGTAATCTCAGCACTTTGGGAGGC
TGAGGTGGGCGGATCACCTGGGGTCAGGAGTTTAAGACTAGGCTGGCCAACATGGTGAAACCCTGTCTCT
ACTAAAAATACAAAAAAATTTGCGAGACGTAGAGGCACATGCCTGTGATCCTAGTTACTCAGGAGGCTGA
GGCAAGAGAATCGCTTGAACCTGGGAGGCGGAGGTTGCAATGAGCCAAGATAGCGCCACTGTACTCCAGG
CTGGGTGACAAAGCAAGACTCTGTCTCAAAAAAAAAAAAAAAGGGAAAAGAAAGAATTCAGTGTGGAAGA
GAGCTCCTTCTTATGTAACATTATTCTTATTCCACTGGTTGTCAGGCTCTCCACCTGACATCATTCTAGA
AGCAGCATAGTAAAAGAGCAATCTGGTATACTAGAGCAGCACTGTCCAATAGAAACAGAATGTGAACCAC
ATAGGTCATTTTAAATTCTCTAGTAGCTGCATTTTAAAAACTAAAAAGAGGCTGGGTGCATTGGCTCACA
CCTGTAATCCCAGACTTTGGGGGGCTGAGGTAGGAGGATTGCTTGAGCCTAGGAATTCAAGACCAGCCTG
GCAACATAGTGAGACCCCATCTCAAAAATAAAAAGTAAAATGAAACAAGTGAAATGAACTTTAAACATAT
ATTTATCATTCAATATGTGATCAGATAAAATATCAGTGAGTTTTTTTTTATATAAAGTAAAAATCTAGTG
TTTATTTAACTTACAGCACATCTCAATTTGGACTAACTGTGCTTCAGGTGTTTGATAGCCACAGATGTCT
AGTGGCTACTCTGTTGAACAAAGCTCTATAGAGTTAGGAAAACTATAGTAAGAGAAGTTAATCTGGCAGC
TCAGCATGGAAAGAGAAAACATTAAGAAATATTGGTGGGGTTTTTTTGTTTTTGTTTTGAGACAGAGTCT
TGCTCTGTCTCCCAGGCTTGAGTGCCATGGCACAATCTCAGCTCACTGCAACCTCTGCCTCCTGGGCTCA
AGCAATTCTTCTGCCTCAGCTTCCCAAGTAACTGGGATTACAGGTGTGCGCCACCACGCCTGGCTAATTT
TGTATTTTTGTATTTTTAGTAAAGACAGGGTTTCACCATGTTGGCCAGGCTGGTCTCGAACTGCTGACCT
CAGATGATCCACCTACCTTGGCCTCCCAAAGTGCTGGGATTACAGGCATGAGCCACCGCACCTGGCCAAA
ATAATGGTTCTTAATAGTGGCCCTGAAGTATCAGGAAAAGATTAAATGTTATTTAATGCTGTCTTTTTAA
GAATGTGGAAAACTATGATATGCTTTAAAAAAAAAAAAAAGATTTATGTCAAATACAGTTGTATACTTGG
AAAAACTTTCTCTTTTTTTTGCGGGTGAAGCTCACAGCTTTATTTTTTTTTATTTTTTTATTATTATTAT
TATACTCTAAGTTCTAAGGTACATGTGCACAACCTACAGGTTTGTTACATTTGTATCCATGTGCCATGTT
GGTGTGCTGCTCCCATTAACTTGTCATTTTCATTAGGTATATCTCCTAATGCTATCCCTCCCCCCTCCCC
CCACCCCAGGACAGGCCCCGGTGTGGAAAAACTGTTTCTTCTTAGAAACTTTACTCATACAAAACACTTT
GTTTCCCAGTTCCCTGATAACTTAGGTGAGGTTATAAGTCAGAATTGCTAAGCTTTACCCAGAACTCATG
AAAATGAAAGGCTTCAAGTGTCAGTCTCCTATAGATTTTTCCATCTCTGCAAACTTTGGGGAAGAGTGAC
AGCAATTAGCAGAGAATTGATCTAGAAGAGGGCAGGAAGCAGAGGCAGATGAGTACAGATTATGTTGGAA
TTCAGAGTCTTGTAACTCTAGAGGTTTTCCAATATTAGAATGCAAAGAGACATTATAATAGATATTATGC
CCAATCCTTCATTTTATAAATGAAGCAACTGTGGCCAACTGATATATATGTATATAAATCAGTCTATTAT
GTTGTCTGGGTCGCAGAATAAGTTTGTTATGTAGAATTGGAAATTGATGTTTATATATTAATATGGAATT
TTACCTTCTTGTCTTTTTGTCACTCTGTGATCCTGAGTAAGGTGCTCTACCAGTTTTCATGTGCATAAAT
GCAGATAATAATAGTAACCTTCCTTCATATGGTTGTGAGAATTAAATGAGTTAGTAATCTGGAGCACTTT
AAGTAGTTCCTGGCATAAAATAAATGCTCAGAAGGTGTTGCTGCTATTATTATTAGAGTCATCTTAAATC
ATGAGTTTGAATGTTTTGTTAAAATCTTAGAAAGTCCTTGATATGACCGGGTGTGGTGGCTCACACCTGT
AATCCCAGAACTTTGAGAGGCTGAGGTGGGCAGATCATGAGGTCAGGAGTTCAAGACCAGCCTGGCAAAC
ATGGTGAAACCCCGTCTCTACTAAAAATACAAAAATTAGCCAGGTGTGGTGGCGGGCACCTGTAATCCCA
GCTACTCAGAAGGCTGAGGCAGAGAATTGCTTGAACCCGGGAAGCAGAGGTTGCAGTGAGTCGAGATCGC
GCCACTGCACTCCTGCACTCCAGCCTGGGTGACAGAGTGAGACTCCGTCTCAAAAAAAAAAAAAAAAAAA
GTCCTTGATATAACTAACTCTGCCCAACCAGTGGTCAAGTTAACCTCTAAGCTATAAATCAACAGCCATG
CTTTACATAAGCTTATGTTTACTTATGCCTTCTTCTTTCCTCAAAGTCAGGCTTCATGCATTTATATCTG
AGAAGAGGTTCAATTATTGCTTTTTCCCACCTGCTGCTTCATCTCTTATTTATCTGTGTGTGTTTTCTTC
CCAAGCTTCTCTGTTGGTCTGCCGACATTATTTCCACTCATAAAAAATTTCCTCCTGTTTTAAAGTCTGC
AGATGCCCCTATCTTACTTCCATCTCCCTGGTTACCCATATTCGGTGCTTGAAAACTGCTTTTGTAATTG
AGACTTAAGAGACATAACCAACTACAGCGTGTGGCTCATGTTTATGTTCTATTTCTTTTTGTATCCTAAT
TATAACAATCCAAGTGAAGACAAACAGGAAAAATTGAACAAGGATTTAGTACTGAGACAGCAAAGAATCT
TTGTTAATCCTATTAGATCTGATAATGGCATTATGGCTGTTTAAGAAAATTTCCATATATTCTAGAGATG
CATACTGAAATACTTAGGGGTCAGTAACATGGTATCTAGAATTTGCTTTAAAATAGTTAAGCAGGACCAG
GCATGGTGGCTCACGCCTGTAATCCCAGCACTTCGGGAGGCTGAGGCAGGTGGATCATTTGAGGTCAGGA
GTTCAAGACCAGCCTGGCCAACATGGTGAAACCCTGTGTTTACTAAAAATACAAAAATTAGCCAGGCCAT
AGTGGTGTGTGCCTGTAATCCCAGCTACTTGCGAGGCTGAGGGAGGAGAATCGCTTGAGCTGGAGGTTGT
GGTGAGCCAAGATCATGCCACTGCACTCCAGTCTGGGTGACAGAGTGAGAACCTGTCTCAAAAAAATTAA
AATTAAAACAGAATAAAATTAAGTAGTTAAGCAAAAAAAGGTGGCAGAATTTGGATAATTTTAGAATATA
GGTAGCTAGTATATGTGTGGGGGTTCATTTTACTATTTTATTTACTTTTGTATTTAAAATGTTCATAATA
AACATTTTAATACATATATATATGTATATAAAGTAAAATAATTCTAAGTAAGTCAAGTTTTTTTGGTTTA
AATGGTTTGGGGCATTTTATTTATAAATAATTTCTATGCGTAGTTGAGATTACATTTTTCCTAGAAAGAA
GTTGGGAATCAATAAAGTACAATCCATTTTTCTCTGCTTAAGGTGGATTGGTGATAGAAAAGCAGTGCTT
TGATCCCACCTGTACACACATTGTTGTGGGACATCCACTTCGAAACGAGAAGTATTTAGCCTCAGTGGCA
GCTGGGAAGTGGGTGCTTCATCGCTCCTACCTTGAAGCCTGCAGGACTGCTGGACACTTCGTGCAGGTGT
GTATTCAGATTTGTGGAAGTTTATTTTTCTTTAAAAGCAAGTGTCCACCGGGTGCAGTGGCTCACACCTG
TTATCCTAGCACTTTGGGAGGCCGAGGTGGGTGGATCACCTGAGATCAGGAGTTCGAGACATGCCTGGCC
AACATGGTGAAACCCTCTCTACTAAAACTACAAAGATTAGCCAGGCATGGTGGTGAGTGCCTGTAATCCC
AGTTACTCAGGAGGCTGAGGCAGGAGAATCACTTGAACCCAGAAGGCAGAGGTTGCAGTGAGCCGAGATC
ATGCCATTGTACTCCAGCCTGGGCCACAAGAGTGAGACCCTATCTAAAAAAAAAAAAAAAGTAAGTGTTG
GCTGGCAGTGGCTGGCTCATGCCACTTTCAGCACTTTGGGAGGCCAAGGCAGGAGGATGGCTTGAACCTA
GGAGTTCAAGACCAGCCTGGGAAACATAGCAAGACTCCATCTCTAGAAAAAATAAAAACAGTTAGCTGGG
CATGGTGGTTCCCATCTGTAGTCCCAGCTACCTAGGAGGCTGAAGTGGGAGGATTGCTTGAGCCCAGGAG
GTCAAATCAAGACCCTGTCTCTAAAGGAAGAAACAGACAAATTTATTTATTTACTTAAAAAAGTAAATCT
CAGATTTCATCACATTTGCTGACTGCTCATAAAATTGAAATAACCAAATATGGCCAGTTAGAGTATACCA
GCTTTTTCAATAACAAAGCCAAACAACGAAACTTCGCAGAGCCAGGTTCACCTTTAATCACTTTTTAAAT
GATTTAATTTGAATGTTAGTGTTGTTTTTAATTGAAATAACATTTTCTTAGAAAGTTTCAAGATTATCTC
ATTGTAAGCTTTCATCTTTACTACATAGACAGATAATCAAGTTATCAGTACATACCTCCTCTGAGACTGT
GTCCTTTCATGAAGTTAGTCTTACAGCAGGTGAAATTTGTCCATCTGAATATTACCAGTTGCCAAGATAT
AGCTATCATTTTGTTTCTTAAAAATGTATGTGGTATTTTTCTGATTTCTAATTAAAAGCCAAATATACTT
GACTCTTATATGAAACTAATCTACATTTCCTCCATGCTCATAAAACAATATTTACTTAGTACTGTCTGTA
TTTGTAACAATTAAATGTATAGCTTTAACAGTTATTAGACTTTGGGCTCCTTGAGGAGCCCTGTATGTTG
CACAGTGGCTCCCCAGACTGTAACAACTCAGGTTTGTTGGACAAATTCTCTAGGAAGAAGACTATGAATG
GGGAAGTAGTTCCATACTTGATGTTCTGACTGGAATCAATGTACAGCAACGAAGACTAGCACTTGCAGCA
ATGAGATGGAGAAAAAAAATCCAGCAAAGACAAGAATCTGGCATTGTTGAGGTATTAAAACACAATTATA
TAGGTAATACAAATAGCATTCAATATTGTGACTCTTTCACATTTTTTTTAAAAGAGAATGTGCTTCAGGA
AATAATGATTCTACTTGTCTTTTTTCCCCAAATTTTTGATGGCTCTTTTAAAAATAATTTATATATGTAA
AATGTGGCCCATATTGCATTTCTTCCAAAGAATCTTTTCAGCATCTAATGTCAGGGGTTCTTGACCTGAG
TCCACAGACCTTCTCAAAGGAATTTGTAGATCAAATCTGGGAAGGCCATGTACTTTGCATGGGGAGAAAA
ATACATCCTTATTTTTACTAACCTCTAATTGAAAATTAGCACTTCCGGTCTTTTTTTTTTTTTTTTTTAA
ATTTTAATCAGCCTACATCATGCTTTGAGAAAACTAGCACTTCCTTTAATGAAAGGTCTAGGCAACAAAT
CACAACACTATCAACTGTACCTGTAATTTTGCACTAACAGAAATCACATGTTTCTGTTTTGCATTGTAAT
TGCAAGCATCTTGAAATACTGTTTGTGTTCATCAGTACTTTAGTTATTTATATTATTTGTTAACTGTTGA
TTTATCAAGAGAAACTATTAGGCCACATGTTCATGTTTCATAGTTCAGGAACACAAGTCAAAGACAAACT
TCTGTGTATTAATGATTCAGTCCAAAGAAATTCTTTATATTCCAAAATCACTTTGCACTCTGAAACATAA
TAGCACTCTTCATCTCAGATTCTTTCATGGAATCATAACTTCTGTAGAAATCAGCATGTCCTTTCTGTTT
TGGTTCAGCCACAGCAAACAGAGAGCTGCAACCCCAGGGATATAAGGAATGCTCCCACAATATGAAATCA
CAGACACTTGGCCAGAAGACCACATATCTGAGGTTTTGTCAAAGCACTGAAAGCCATATTAGTTATTGTC
TGCTACTTTAATATAAAGCACATCTATAATTACACAACAAATTTGTTTTTAATATTTTGATAACTTTCAA
TAAAATGGCTTCCTTTTGTAATCCTTTATATTTTAATTTTAACATTTTCTAAAAATCACCCATAAGGTTT
GGGAATTATATCTCAATACAGCTATTATTTAGAGTAGTCTAATGACCAGACTGCCAAAGGGATCCATGGC
TTACAAAAAGGTTAATTGTATTAGTTCGTTCTCACGCTGCTATGAAGCAACACCTGAGACTGGGTCATTT
ATAAAGGAAAGAGGTTTAATTGACTCACAGTTCCACATGGCTACAGAGGCCTCAGGAAGCTTACAGTCAT
GTAAGAAGCAAACACGTCCTTCTTCACATGGTGGCAGGAGAGAGAAGTGCAGAGCAAAGTGGGGAAAAAC
CCCTTATAAAACCATCAGATCTCCTGAGAACTCACTATCAGGAGAACAGCATGAGGGAACTGCCCCCACC
ATCTGATCACCTCCCACGAGGTCCCTCCCCCAACACTTGGAGATTATCATTCGGATTACAATTCAAGATG
AGATTTTGGGTGGGGACACAGCCAAACCATTATCAGAACCCCTGAGTTAAATAGTCTTTCATGTTGTATT
CTAAGTTCTCTGATATCTCCAAATCCTTATTAGCCATGATACCCTCTCTTTTAGAGTAATTCCACTGGCT
TTTGTTAGTTGTTATTCCCTTCCTAAATATTTTGTTTCCAGTTTGTAAACATTTTTAAGAGAAGTGAAAC
GCAGGCTTCATCTAACCTAAGGAGCTCTGCTTGAAGCTCTTCCCTTGATTAATCAAAAGAAAAAAATACT
AGAAAAGACTAAACATCAATCACACTGCTTTGTTTTAATGTTACCTAATCATTAATGGTTTTTCATTCCT
CACGTATTTCTTGATGGCCTACTATGTGCCAGATACCATGGATTCACGTTTCAGTGTTCTGGCCAGAGAT
AATTATACTGTGGCAAAAGTAAAGTTTATAAGATTTATTGACAAAACTAAGTCTACAGATAAAATCATGC
ATTATCTGTATTATTTTGTTATTTTCCAAATGATTTCACCACTGATTGTTTTTTATTTGTAGGGAGCATT
TAGTGGGTGGAAGGTTATTTTACATGTGGATCAGTCTCGAGAAGCAGGCTTCAAACGCCTTCTTCAGTCA
GGAGGAGCAAAGGTTTGTATCAAATTAATTTACTGACCTTTTTACATGAATAATCATCTAACCAAGATTG
CTATGATGAGTTCTTCATTTTCTCTACTTTTTGAAATGGTAATCCTTAAGTACACATTATACAGCTGAAC
TACTTTGGAATACTGGTAGATTGTGATACTACCTTGTTTTTTCATTAGGTGCTACCTGGTCATTCTGTAC
CTTTATTTAAAGAGGCCACACATCTTTTTTCTGACTTGAATAAACTGAAACCAGATGACTCAGGAGTTAA
TATAGCAGAAGCTGCTGCCCAGAACGTGTACTGCTTGAGAACAGAATACATTGCTGATTATCTCATGCAG
GTTTGTGAGATTCTATCCTTGACCTCCTCATTACCAGAGATACGTTTATGTGCATAGATAAGTAACTGCA
CAACAAAACCTTCAGCTCATGATTAGTAGAAGATTAGTCTCCTGTTATTCTCTTCTATTCCAGCCCTTTC
AGTTTTATTCTATTTGTGTTTTTTATTATAATGAACATATTATGTAAACATTTAGCTTGGAAGTTAAATA
TGAGAAGAGTATAAAAATCTAGGTACCTCTAAAGGCTTTAAAAATACCCTTTAAAATGTTGGAATATAAA
GCAGAAATCGATTCCAGGAGTCCAAGGAGAAACATTTATCCAAAGGTCCTTTAGTTTTCTTGACTGTTTG
CTTTCATGTACATTAAATACCTATGTTAGACACTGTGGTAAATTTAAGCATTTGCTATATGGTGGGCTTA
CTACTCTCATATTCAGAATTGGCCTGTGTTGTGTAATTTGAATGGGGTAAGAAAAATCTTCTGACACCAG
AGTGCCCAAAAGGCCATCAGGAGTCAGCAGGCATGACACATAATCATAAGGATTAGATTTCATAATCATA
ATCTATGAAGGATTTCAACTGGGATGATACAGAAATAAGGGGAGGCCAACACTCAAAGTCAGCTTTGTGA
TTTTGCTGCTGTGCTTGGAGATTGCTCAGGATTTAATAGAATGCCTAAAACACAAATGTGAAGCCGTTAT
AGAGCAGAGGGCATACTGATTAGTATCCACGATTTTATCTAAGGTTTTCACTCAACGTGATGTTTTTGAC
ATTCATTCAAGTTGTAGTGTATACCAGTAGTTCATTCCTTTTTATTGCTGAGTAGTATTTCTTTGTCTGA
ATATACCATAGTTGATTCATTTTCCTATTGATGGACCCTTGGACTCCTGGAATCAGAAATGTTCCAATAA
GCACTTCCCTTGAGCATCACATAAGTGCTCGAAAGTTTAGGATTTTGTACCATTTCTAACTTTTGGATTT
GAGATGCTCAATCTGTACATTATTGGTGGGAAGTGTAAAATGGTAAAAATCCCTTTGACAAAAGGCCTGG
CAGCTTCTTAAAAAACGAAATATTTACTTATTCTATTACACAGCAATTCTGTCCTATTTACCCAGGAAAA
ATGAAAAAATATGTCCATAAAAAAGCCTGTATATTTTTAGTAGCTGTTTGTCATCTTGGTTATCATTAGT
AAAGCTACTAAAAATATACAGGGATTTTTACCATTTTACACTTTCCACCAATAATATACAGATTGAGCAT
CCCAAATCCAAAAGTTAGAAATGGTACAAAATCGTAAACATTTCTGATTTCTGGGTTTCGGTTGCTCAAC
CAGTAAATATAAATATTCCAAAATCTGAAATACTTCTGATTCTAAGCACTTCAGATAAGGGATACTCAAT
CTGTGTAAGCCTTCTGGTTATTCCATATTTTGCCAACATTTAGTGTTGGCAGTCATTTGATTTTTAGCCA
TGCGGTAGGTTTATAGTGGGAGCACATTGTAATTTGTACAGAGTGTTTGTAATTTGTATTTCCCTGATGA
CTAATGACATCGAGCACTTTTTCTTTCATGGTCTCTTTGTTTGTTTGTTTGTTTGTTGGTGTGTGTGTGT
GTATTTAATATTTTTTTCTAAAAAGTTATTGTTTTAGCTTTTATGTTTAGCTCTATGACCTATTACAAAT
TAATTTTTCTTAATGCTCTGAGGTATGGACTAGGGCTGGTTTTTTTCCATATAGATATCTAGGTGTTCTA
GCACCATTTGTTGAACAGATTTTCCTTTCCCACAAAAGCTTTGGCATCTTGATAAAAAATCAAATGATCG
TATTTTTGTGAGTCTCTATTCTGTTTCATTATCTACTTGTTGATACCTTTCCTACTGTGTCTTGATTACT
GTAGCTGTACAGCAACTTTTGAAGCTAGTATTAAGACTACAATTTTAGTTGTCTTTTTCAAGGTTATTTA
GCTGTTCCATGTCCTTTGCATTTCCATATGGACTTTAGACTCAGCTTGTTAGTTTCTACAAAAAAAAAAA
AAAAAAAAAGGCCTAGAGTGGTTAAGATTAGGATTGCACTGACTCTATAGACCAACTTGAGGACAGTAAA
CATCTTTACAGTGTTGAGCATTCTATTCCATAAACCTAGAATGTCTCTATTTAGGTCTTCTTTAATTTCT
CTCAGCAACATTTTGTGGTTTTTCAGTAAGGGAACTTACCTATCTTTTGTTAAATTTATTCCTATTTTGT
GATGCTATTGTAAATAAAAATTTCTAGATTTACATTTAGATTTTTTTCTACAATTTGCTGCCAATCCAAA
AGAATATAAATTTTGTATATTATTATTTATTTATTTTGAGGCAAGGTCTCACTCTGTTGCCCAGGCTGGA
GTGCAGTGGCGTGATCTTGGCTTACTGCAACCTCTGCCTCCCAGGCCCAGGAGATCCACCTCAGCCTCCC
AAGTAGCTAGGACTACAGCCATGTGCCACCATGCCCAGCTAATTTTTTTTTTGGCAAGGGGAAGGGGTAG
AGATAGGGTTTCACCAGGTTGCCCAGGCTGGTCTCAAGCAATCCACCTGCCTCGGCCTCCCAAAGTACTG
GGATTACAGGTGTGAGCCACTGTGCCTTGCCTGTCAGTCTTTTATACCCTATGATCTTAATAAAATTCAC
TTAGTACAATTAGTACCTTAGGCTTTCCTACATAAGCAATCATTTTATCTGCAAAGAGATTTGTAGATTT
TCCCTTCTTTATGCCTTTTATTTCTTGTTGTCTTATGTGGCTAGGACCTCAAGTATGCTGCTGAATAGAA
GTGGTGAGATTGGGCCTCCTTGTCTTTATTCCCTAGCCTAGGTGGAAAGTGTTCAATATTTCACCAGCTA
TAGGGTCTTCATAGATTTTTTTTTCCAGATTGAGGAAGAGTCCTTTTATTCCTAGTTTACTAAGATTTCT
TTTTCATCATTAATTGGGGTTAACTTTTATAAAATGTCTTTTTCTACTTCTGTTGGAGTTGTTATAAGGT
TTTTCTCTTTCCTTCTATTACTATGGGGAATTACATTTTCAAATGTTAAGTTTCATGTATCAGTCCCACT
TGATCACGCCATATTAATCTTTGTATATATTGCTAGATTTAGTTGAGTAAAAATTTTTAAAATTGTTTTC
AGGGTGGGATATTGGTATGTAATTCTCATTGTTTTGTAATGTTTTTGTCATCTTTTGGTATTAGCGTTTT
GCTGGCATCACAAACAAGTTGGGAAGTTCTCCCTTGATTTTCTCGAAGAGTTTGTGTAAGATGCCTCTTT
CTTCCTTGAATGTTTGAAGGTCTGGAGTTTTCTTTTTTTTTTTTTTGAGACACGGTCTGGCTCTGTTGCC
CACACTGGAGTGCAATGGCTTGATCTCAGCTCACTGCAATCTCCACTTCCTGTGCTCAAATGATCCTTCC
ACCTCAGCCTCCTGGGTAGCTGGGACTACAAGCGCACGCCACCAGTCTTAGCTAATTTTTGTATTTTTGG
TAGAGACGGGGTTTCACCATGCTGGGCTTAAGTGATCCCCACGGCTTCCCAAAGTCCTAGGATTATAGGC
ATGAGCCACCTGGACTGGAGTTTTCTTTTTTTGTATTTTTATTTTTTAGATGGAGTCTTGCTCTGTCGCC
CAGCCTGGAGTGCAGTGGGGCAATATCAGCTCACTGCAACCTCCACCTCCTAGGTTCAAGTGATTCTCCT
GCCTCAGTCTCCCAAGTAGCTGGGATTACAGGCATGAGCCAACACACCTGGCTAATTTTTGTATTTTTAG
TAGAAACGGGGTTTTAACCATGTTGTCCAGGCTGACCTGAGGCTGACCTCAGGTGATCCGCCCACCTTGG
CCTCCCAAAGTGCTGAGATTACAGGCGTGAGCCACTGCACCCGGCCTGGAGTTTTCTTTATATGTGGTTT
TTTGTAACGAATTTTCTTTACTAGATACAGCGCTTTTCCTATTTTCTGTTTCATTTTATGTCAGTTTTTA
ATAACTGGTGTTTTTCAAATAATATATCCATTTCATCTTATCAAATTTGTTGGCATAAAGTTCTTCATAA
TATTCTTATTATCCTTTTAGTGTAATAAGTTTATTCCTGGCTGGGCACGGTAGCACACGCCTGTAATCTC
AACAGTTTAGGAGGCTGAGGTGGGCAGATCACTTGAGGTCAGGGGTTCGAGACCAGCCTGGCCAACATAG
CGAAACCCTGTCTCTACTAAAAATACAAAAAAATTAGCGGGGTGTGGTGGCGTGTGCCTGTAGTCCCAGC
CACTCGGGAGGCTGAGGCAGGAGAATCGCTTGAACCTGGGAGGCAGAGGTTGCAGTGAGACGAGATCACG
CCACTGCACTCCAGCTTGGGCAACAGAGCAAGACTCCGTTTCAAAATAAATAAATAAATAAATAAATAAA
TAAGTTTATTCCTGATATTGTCAACTTGTGTTCATTTATAACTGGCTTATTTAGGAGTCTGTTGTTTAGT
TCCTAAATATAAGAGGATTTTTTTTTCTATCTTTTTAATTTGTGATTGCCCATTGAATTCCATTGTAATC
ACAGAAAATACTCTATAATTTTAATTCTTTTAAAGTTATTGAGACTTGTTTTATCACCCAGCTTCATCTA
TCTTAATGAACATATCATATATGTGAAAGATTTTATATTCTGCAGCTGTTGGGTGTTGTGTTCTAAAAAT
ATCAAATAGGTTAATATGGTTGATAATGTTGATCAGATTTTCTGTGTATGTGGGTTTTTTTGTTTGTTTA
GTTATATCAATTACTGATACTAAAATCTCCAGCTGTTTGTGGAATTGTCTGTTTTTTCTCTTTAATTTTG
TCAGCTTTTACCCCATTTATTTCAAACTTTGTTGCTAGTTGTTTACCCATATATAATTTCTTTGATTTTC
ACATATTGATCCTTTGTTATAACACGTATCTCTGGGCTTACTCCGCCTTGAATGTACATTATCTGAGGTT
AATATAGCCTTTTCCTGTTTACTCTGTGTCATGATATCTCTTTGCATGGTTTTTAATTTTAAACTTGTCT
GTGTCATATATTTAAAATGGCTTTCTTGTAGATAGGATATAGTTGGGCCTTGCTTTTTTTTTCTTTGGAG
TGTTTAGTCCATCATGTAATTATTGATATGATTGGATTTAGGGATGGGGTTTTTTGCTGTTTGTTTTCTA
TTTGTTCTTTGTCCTTGTTCTTCTTTGTCTTTCTTGGCTTTTTTTGTATTAGTTTAATATTTTTAGAATT
TTATTTTATCCATTGGCCTTCTAAAGCAAAAATATATTTACCTTTTGGAGGGAGAAGTGTTTATATGTAG
ATTACAAATTACTTCCTGAGGCCGGGCATGGTGGCTCACGCCTGTAATCCCAGCACTTTGGGAGGCCAAG
GTGGGCAGATCACCTGAGGTCAGGATTTCGAGACCAGCCTGGCCAATATGGTGAAACCGTGTCTCTACTA
AAAATACAAAAATTAGCTGGGTGTCGTGGCGCACACCTGTAATCCCAGCTGCTTGGGAGGCTGAGGCAGG
AGAATCACTTGAACCTGTGAGGCGGAGGCTGCAGTGAGCCAAGATCGTGCCTCTGCACTCCAGCCTAGGT
GACAAGAGCGAAACTCTGTCTCAAAAAAAAAAAAAAAAAAAATGAAAAAAGGTAGATCTCTTGCATCCAA
GTTGGTTCATTTGCTTCCCCTGTCCTTTATACCAGGGGTCAGTAAACTATAGCCACCTGGCCAAACCTGG
CCCACTGCCTATTTTATAAATAAAGGTTTGTTGGAAAACAGCCATACTCATTCATTTATGTATTTTCTAT
GGCTGCTTTTGCACTATAATGGCAGAGTTAAGTAGTTTCAGCACAAATCATCTATCCCACAAAATCTAAA
ATGTTTCTGTCTGAGCCTTTACAGAAAGTGTGCTGACCTCTGCTTTATGCAGTAGTTGTCATATATTTTA
CATCTACATCTTATAGCCCCAAATAAGATTTTACTTTAAATAGGTTTTGCTTTTAACAATTCTGTGCATT
TTGAGGAAACTAAAATAAAAAATGGTATTTTATAATTACCCTCATGTATACCAGTTTGAGTGTCAGTTTT
CCCTGAAGATCTGAGTTTCCATCTGATAACATTTTCCTTCAGCCTGAAGAACTAACTTTAGTTTGGAGTG
CAGGTTGATTGGGGATCAATTCTAGCTTTCTGTTGTATGAAATGTCTATTCTACCTTCATTGTTGAAGGA
CAGTTTTGCAGGATACAGAATTATAGATTGACAGGTTTTTTTCTTCTATTAAAGACTTCACTGTCTGCTG
GCCTCCATTGTTTCTGTTGAGAAATCAGTGATGGTCATTTGAATTGTTCCCTTGTATTCAATGTGTCATT
TTTGAGACCAGCCACCAGCCTGGGCAACACAGCAAGACCCTTATCTCCCCCTAAAAAAGAAACTCTAGGT
TCTATTGTTCCTTTGCTCCTCCAAAGAGTACTGTGTTGTTTAACAGGCAGTTTACTTCATACACTGTGTT
TGCGTCCCCAGCCCCCCATTTGCTTGGTTCGTTTATTCTCCAGGCTCTATGGTTGCTTTTAATATATTTT
GGTCAGAATTTGTAGCTGTTATCCATGGAAGAATTGAATCAAAAGGCACTTACTTGGTATTTTGTGGTGA
TTCATTTTCAGGTTGCCCAGTCTGCCATATTGCTAGAAAATTAAGTTTTATTACACTTATAATAAGGAGG
AAAAGATCCATTTCTATGTTGGGAAATGGTTGTGGGGGGAAAATGCAAGGGTTTTGGAGTCAGATCAGTT
ATGAAATTTGGCTTTGCTACCTGCTAGTTATGTGACATTGGTTGTTTTCATTTAACCTTTTTTATTTTAT
CTCAAAAATGGGGATTAAAAACACCGATATGAAATGTTTGTAAGATCTGAGCTAGTCCCACTCTACCTGA
ACCATACACGTATTTCTTTGATAAAAGGTGAGACTTTGTCCCACAGGGTCCATTTTGTTTAATTTGCTGG
AACCTAGGAATGAATATGCGTTTTCCTTTAAGTTTGTCAGATTCATCCCTGAGAGGTCTGAGATTTAAAG
AAAAAATCTATTACCAGATCACGTAAATGTTTGAAATCATTTTAAAAAATCACTTATTTTTCCTTTTATA
GGAATCACCTCCTCATGTAGAAAATTACTGTCTACCAGAAGCTATTTCATTTATTCAGAATAATAAGGAA
CTTGGGACTGGATTATCACAAAAGAGGAAAGCTCCTACAGAAAAAAATAAAATCAAACGACCTAGAGTAC
ACTAATCGCATCTACCCTTTAGTTACCAAACATTAAATGTTTTTAAAAATTGAAAGCCTGAATGTGACTG
TGATAGATTTGGGTAGTAATTTAAAGATGAGTACCTGAAGAATTCTGCTTCAGAGTATAATGATGACCCT
TCTTGAGTTTTGAACACCTGAAATTGTAATCACTGAAATATTAACTGTTTCTTAATAAAAAGTTACCTGA
AATAACAACAAAATACAACTCCTCAGCTAGCTTGCTGTTAAACCACATTGAAGTCTGTTAAAAGATATTT
ATTTTTCTTGTAAATATCTGAAGCTGTAGCTTAGTGGAAATTTTAGCAAGGTAATGGATTTTGCTTTAAA
ATGTCTGCCTTACAAATTCATAACAACAAGATTTGTCAGTCAGCATTTATTCATGTTTTCCCTGATTTTT
ATCTTCTCACCATTTTACCTCTTTTAACAGGAGCCTGAGCACAAGGTTTAATGAGGAAGCTGGGGCTATA
AATATGTGTGTATATATGTATATGTATGTTTGTACAAATCTCCATGATGTTTGCCAAGTTTGAATGCGCA
AAACTTGGAAAATGTGACAATAAAGAATAAAAGTAGTAACTCAAATTAGTATTAAGATGTGTTTACATAG
ATAAATTTTTTAAAAGAGCACCCTGGCATCTGTTCTTCTGTTGAAGCAACAAAACATTTATGTAACGTAA
AAAATGAATTGCAGGGGCCTGGGTGCGGTGGCTCGTGCCTGTAATCCCAGCACTTTGGGAGGCTGAGGCA
GGCGGATCGTCTGAGGTCGGGAGTTTGAGACCAGCCTGACCAACATGGAGAAACCTCATCTGTACTAAAA
ATACAAAAAATTAGCCCAGTGTGGTGGCACATGCCTGTAATCCCAGCTACTCAGGAGGCTGAGGCAGGAG
AATCGCTTGAACCCGGGAGGCGGAGGTTGCGGTGAGCTGAGATCGCGCCATTGCACTCCAGCCTGGGCAA
CAAGAGCGAAACTCCATCTCAAAAAAAAAAAAAAAAAGAATTGCAGGCCAGGCACGGTGGCTCATGCTTG
TAATCCCACCACTTTGGGAGGCCAAGGTGGGTGGACTGCTTGAACCCAGAAGTTCAAGACCAGCCTGGAC
AACATGGCGAAACCCCATCTCTGCAAAAAATAGCAAAAAATTAGCCGGGCATGCTGTTTGATGCTTGTAG
TCCCAGCTACTTGGGAGGCTGAGGCATGAGAATTACTTGAACTCAGGAGGCAGAGGTTGCAGTGAGCTGA
AATCATGCCACTGCAACTCCAGCCTGGGTGACAGAATGAGACCCTGTCTCAAAAAAAATAAATGAATTGC
TTAACATTTCTGATATTTGTTATTTAGAATATTGCCCTATTAGATTAAAACATACTGTTATTGGAACTCT
GTATTGCATTAGCCTTTATTATGCTAAACCTAAACACCTAATACTACATGCGTTACCAGAATTCTCTATA
AATACACCTAATTTCATTTTAAGGACAAACTAGAATCCGTTAGGAATGTAATTTTGATGTAAACCGTTCA
ATTCCAAATGACTTTTTGAAAGGCAGATTCAAACAGTGAAGGAGAGAGTGCTCAACTTGGACACAAAATC
CCTTAAATTTTCATCAGATTTTCTTCAAAATGGAGTTGAGGGTATCCCTGCTGCTAGAGGATTGGTCCTA
CAGGGTTTTCAGCTTTGAGCTAGTTCACAGCTTAGGACAATACAAATTCTACACAGAGAAATAGGTAGCA
TTATGATGTAAACTGTCCCCCTCCCACCAAACAAAAACCACATGGGCCTGTCTTTATCAGAGCTATTTTA
TTTTAGCTGAATCATTTTGTAGATTGTAGTACGTTTCCCTGAATTTTATTACTCAGAATCCTTTGAAATA
GGCCAGGCACAGTGGCTCACACTTGTAATCCCAGCACTTTGGGAGGCCAAGGTGGGCAGATTACTTTAGG
TCAGGAGTTCGAGACCAGCCTGGCCAACATGACGAAACTCCATCTCTACTAAAAATACCAAAATTAGCCA
GGTGTGCCGGCACGTGCCTGTAATCCCAGCTACATGGGAGGCTGAGGCAGGAGAATCACTTGAACCAGGA
GGTGGAGGTTGCAGTGAGCCGAGATCGCACCACTGCACTCTAGCCTGGGTGACAGAGTGAGACTCCATCT
CAAAAAAAAAAAAAAAAAAAATTCTTTGAAATAGTTACTTTTTAAATTACCTAATATACCACTTTCTTTT
CTGCCAAAATTATGAATGGTTTTCCAGTTCAAACTTAGACACACAGTTTACCATTTAAGGCTCCAGGTCT
CAGTTTCTCCTCCTAACTTTCCAGCATCTGCCCATACTCTGTATAAGCCACTTGAACTCTGGCTTTGGCT
GTTAATCTGTAAATGTCCTAATGCCAGCAACAATATCCTCTTATATACAAATAATTCCAAGCATAGGTAG
TCTTCTTGTTTAAAAAGGGGAGGGGGCAGAACTTGCCTTGATTAGATTAGTATGAGTTTCTTTTCTGAAT
GGCTACGATATTTTAATCTGTGATATTTAAATTATCACCTTATATCCCTCCACGAATTTTCCTGTGCATT
AGTCTGATCTCACCAACATTCGTTAATTCAACAGGTAGGAATCCTCAACCTGTGCCTAGGATTCAGCAAC
AAACCACCTGGAACACATGGTCCCTTAGCACTTGAAGAGGTAGGAATCCTTACTGTAAATACAGTACTCA
ATTATACTCAGATTTAGTATTTACACTGTTAAGGACTGAGCTTGTCCCCCTAAAATTCACAGGTTAAAGC
CTAACCTGCTATGTGACTGTAGACAGAGCCTTTATAAGGGGATTAAATGAGGTCATAAGAATGAGTCCCT
AACCCACCAGGACTAGTGTCCTGGTAAGAAGAGGGAGGCACACCAGGAGTTTGCCGGCACGGAGGAAAAG
CCCTGTGAGGACACGGGGAGGGCAGCTATCTGTTTACACACCAGGAAGAAATGTCTCACCAGATACCAAC
CCTGGCCGTCTCCTGGATTTTGGATTTCCAATCTCCAGAACTGTGAGAAAATAAATTTCTGTTTAAGCCA
CTCAGCTTGTGATGTTCCTTTGTGGCAGCCTGAGCAGACCAGTAACAATATTAACAGTAATAAGGTTCTT
ACTTTGGGGCCTGAGATGCCTGGGAATGGAACAGGCTGTTTTGTATATGAGCATTTTTAGGGTAGAGTTC
ATAATTCTAGAGTTTGGATCTGTGACTTTCCACCCAAAAGTCACAAACCACTGCTCTAATGCAAACCTAT
TATTTCACATTTACACCTCTCACCTAGAAGTGCTTTAATACAGGCTGCTTTGTATCAGGGCTTGGTTTCC
TTCTGACCTTTCAAGACATAAAAATCATTACTAGCTTGAGGCCATGCAAAAATAAGCAGTGGGCCATAGT
TGACTGTTCCTTATTTTCTATCCCTAAAAAGATTTTAAAATCTAGATCTGTCAACAAGCAAGGCACCCAG
CTCAATTTTTTTTTTCTTTTGAGACGGAGCCTCGCTCTTGTTGCCCAGGCTGGAGTACAGTGGCATGATC
TCAGCTCACTGCAACCTCTGCCTCCTGGGTTCAAGCCATGCTCCTGCCTCAGCCTCCTGAGTAGCTGGGA
TTACAGACGTGTGCCACCACGCCCAGCTAACTTTTCTATTTTTGTAGAGATGGGGTTTCGCCATGTTGGC
CAGGCTGGTCTCAAACTTCTGACCTCAAGTGATCTGCCCGCCTCAGCCTCTCAAAGTGCTGGGATTACAG
GTGTGAGCCACCGCGCCCTGCCACTCAGCTCCTTTTCTACCATCCTGAGTAGCAGTCTATGGCAGACATA
CTTGACAACAACTCAGGCATACCCTGGGAAGTGACCCTGTGGTCTAAGAAGAATGTATGTTTGGAGTTCC
AAGTTAAGGAATCCAGGAGTGGCCAGTCCAGAGACTGACTCCTTATCATCAATGACGGATGTCCATACCC
CTGCCCCATTCCTTGGAATGCAGGCTGTATAGGGGATGGTGGCCCTTTGTATTGGGTTAAGTGGAAGTTG
TTAGGTAGAGGTTGCTATGTGAAAATGACATGTTAGACTGCATGCTTTTAAAAAACAGTAGCAATTTTTG
GCCGGGTGCGGTGGCTCATGCCTGTAGTCCCAGCACTTTGGGAGGCCGAGGCGGGCGGATCACGAGGTCA
GGAGATCGAGACCATCCTGGCTAACACGGTGAAACCCCGTCTCTACTAAGAATACACACACCCAAAAATT
AGCTGGGTGTGGCGGCGTGCACCTGTAGTCCCAGCTGCTGGGGAGGCTGAGGCAGGAGAATGGTGTGAAC
CTGGGAGGCAGAGCTTGCACTGAGCCGAGATCGCGCCACTGCACTCCCGCCTGGGCGACAGAGCGAGACT
CCGTCTCAAAAAAAAAAAAAAAAAAAAAAAAAAAAAAAAAAAAGGAGCAATTTTCCTGTCCAGCCCACTG
CTCCTGGACTGTTGTGTAATGTAAGTCCACAATAAACCCTATGTCTCATTCACTGGCTCCACATCTCTTC
TTCAGCCTCCCTCACGTGGTACCATCCCCACTAGAGTCAATAGCAGTCTGGCATGACAAGTAGTAGCATT
AAGCAGAGCCATCTCATGCTTGTTTAACATTTGGAAATCTGCAATGAAAATTATCAAGTTTTGGCTGGGC
GTGGTGGCTCACACCTGTAATCCTAGCACTTTGGGAGGCCGAGGCCGAGGTCAGGAGTTCGAGACCAGCC
TGGCCAACGTGGTGAACTCTCATCTCTGGGAGAAAAATACAAAAATTAGCTGGGAGTGGTGGTGGGCGTC
TGTAGTCCCAGCTACTCAGGAGGCTGAGACAGGAGAATCGCTTGAACCCGGGAGGTGGCGGTTGCAGTGA
GCCGAGATTGTGCCACTGCACTCCAGCCTGGGCGACAGAGGGAGACTCCGTCTCAGAAAAAAAAAAAAAA
GAACTTTCTGCTGCTTTGAGGGGAGACTGAAGAAGTCAGGCTCTAATGCATCCCTGCTGACCTTGGGATG
GGAACAGGGCAAACAGCATTTTCAAGTCATTTCGAAGGAGCATTTGGTTATCATGTTCCTTCTCTACCCT
TACTTAAATCTAAGGTGAAGAGTGGAAGCAAAGCCTCATGGTTAAAAACATGCTGGAGCCAAAACACCTG
GGTTGGAGTCCTGGCTCTTTCATTACTAGCTATGACTCCAGCAAGCTATTTAACCTTTCAGAACCTATTT
TCCCCTCTTTAAGGGGCTTTCAGGGTTAAACGAGTCAACATTTGTTACCTGTTGCCTGGCTCAAGGTTAA
AAACTATACAATTTTTTAAAATTCCAGTAAGTGATTTAACACTTTTGCCAGCTGGAGCTAAGGTTTTAAA
AAAAGAAGAGGATGTCAGGACAGAACAAAAGAATATAATGGGAGCTTGCAACCTCCTCTTCACTCCCATT
ACCATGGTGCCACTGAGGTTGGGAGTCCCTGACTTCCCTGTTTAATTCAGGTTCTAATTAAAGACATACA
TTTGAACTGTAAAATCAGAGAAATCCAATAAGGAAGCCATAGTAGTCCCAGCAATTTATAATAAAACCAA
AGACAAACCTAAGAGATTCCAGTCTGTGCCCACACCTCATTATGAAAAGATGCTTAAGTATAACCCACAT
GATCTTTAAAAGGCAGGAACTGGTGAGTAAGGTGAGTCACAGACCCAGAGTGTGTAGGTGGTACAAGCTA
CACTTGGCCTGAGGTTCTGATTCTTAAATAGATGAGCTATATGATTCTGCGGCTGCCAAAGCTTATCTCT
GGTAAGGTTAATTATGGTTGAATTCATAGTCACCAGGAAGAATAGCAGAATTCTAAAGAAACTCTTAAAA
CCCAGAGGTGCTATAACTGAGCAACATAATGAAAGGGCAAATTTAAAGTGGCCAGGGGTAGTGTAAGGCA
GATTAACATTTACAGTGAGTAAACTCAGGAATGGTCAGATCTGCTGTCAAAAGACAAGTCAAACATCATG
GAAGTATTGTTGGAGAAGGATAACGAGTAGCTACAGAAGTTACATTGATGATGAGGCAGTTATCTAAGAA
ATGACAGATAAGATATTAAAAATGGTCTTTATATACTGATAACTACTGAACTACAAAAATGTGTAGTTTT
GTAAAAAATCAAAGAAATTTACTATTTCAGTTGACAAGTCTTTCCCTCCAACTTCAGTATCCACTTTCCC
TCATTTAACAGTATCCAAAAATGCATTTAGGAATATGATAATCATTTCTGGTCTAAGCATGCAATTTAAG
GGATTTCCTGCTTGAGCTAGCCCTATGGTTGTCTTCCAACTGCCTACTAGGGAAATAATTTATCATTTTT
TGACATAACCCAGTGGTTCCCAGATTTTGCTGCACATTAGAACTATGGGACTTGAAAAAACATTCCTCTG
CTCGGGTCACACTCCATACTAATTAATTCAGAATGTCTGGATGTGGGAGTCGGGCATCACTTTTTTTTTT
TTTGAGACGGAGTCTTGATCTGTAGCCCAGGCTGGAGTGCAATGGTACCATCTCGGCTCACTGCAAGCTC
CGCCTCCCGGGTTCGAGTGATTCTCCTGCCTCAGCCTCCTGAGTAGCTGGGACTACAGGCGTCCACCACC
GTGCCCGGCTAATTTTTGTATTTTTAGTAGAGATGGGGTTTCACTGTGTTGGCCAGGCTGGTCTTGAACT
CCTGACCTCAGGTGATCCGCCCACCTCGGCCTCCTAAAGTGCAGGGATTACAGGCGTGAGCCACCGCACC
CAGCGAGTTTTTTTTTTTTTTTTTTTTTTTTAATGATTCCCAGGTTATTCCAAAATGCAGCAGTTTGAGA
ACCATGGACATAATCTTACAGAGTTGCTCCACTTCTTATGATTAAAATTGCGAAGGCTGGGTGCTACTCT
CCATCATATTTGGAGATGAACCATTTTACAGAGGTTTCTTGGGGCATGCTTTGACTGGATCCCTGAACAG
TTAGGTTGAGGGATTAAAAAGACTTTTAAAGTGGATGACTTAAATCCTACCCATCGTCTGTATTACTATA
TCCAATTATTTAGAATTCTAGTTCCCACTTGGGCTGCAAATTCAAAAGAATTGAACTGCCTTAATGATTA
CTTTTATGTATATCCTAAATTCCTGATGTGAACATAATTCCTATTTTAGATAATACAAATAAGATTATTT
AAAGCAATTATTTCTAAGGCCAGGTGTGATGGCTCACACCTGTAATCCCAGCAATTTGGGAGGCCGAGGT
GGGCAGATTACTTGAGGTCAGAAGTTCAAGACCAGCCTGGACAACATGGGGAAACCCTGTCTCCACTAAT
ACAAAAAAAAAAAAAAAAAATTAGCCGGGCGTGGTGGCATGCGCCTGTAATCCCAGCTACTGGGGAGCCT
GAGGCATAAGAATTGTTTGAACCTGGGAGGCAGAGGTTGTGGTGAGCTGGGATCGTGTCACTGCACTCCA
GCCTGGGTGACAGAGTGAAACTGTGTCAAAAAGATAAAATAAGCAATTATTTCTTACTCAATATATCACT
CATAATATTCATTATCTTTATTTCAAGCCCAGGAGAAGCAATTCATAACTTGCCTGCATTCTGCAGGCCC
CATTAGTACCTAGTTGTAGTAACTGGTGAATTAAAACCATTACAAACCTGCAGTTTCAGGATGCTAGTTA
TTAGAACACCTGTCCATATGACTTTCTAACTTCTTGGCTCTCCTTCTGATCTGACTACCTCCATTAATTT
GTTTGCACTCCCTAACTTGAAATCGTGACCTCATTTGTTCCTTTGTCAGTCTAGACACCCATAGCATGAC
CTGTCCTAAATTCCTACCCCACACTCTTAACCTCCTGACATCTCCACCTACGTGTACCTACCCCAGACCA
ATTTCACATTCTAACAGAGGGAGATAAACAACCAAAATGTTTAGTGTGCTAAATAAAGAGTAAGAACTAC
AAGCCAGGCATGGTGGTTCACACCTGTAATCCCAGCACTTCGCGAGGCTGAGGTAGGAGGATAACCTGAG
CTCAGGAGTTTTGAGATTAGCTTGGGCAACATAGCAAGACCTCATCTCTACTAAAAATAAAAAAAGTTAG
CTGGGTGTGGTGGCACGCATTTTAGTCCCAGCTACTTGAGAGGCTGAGGCGGGGAGGATCATTTGAGCCC
AGGCCAAGGCTGCGGTGAACTATGATCACACTACTGCACTCCAGCCTGGGTGATGCTGTCTCAAAAACAA
CCACCAAAAAATCCCCCAAAAACTATGAGTCTTGGTGCTGAGCAACTGGTAGTCACATGCAGAAGAATGA
AGCTGGAGCCCTAAGTCACAATAAAAAAAATTAAAATAGACCAAAGACCTAAATGAAAGAGCTAAAAACA
TAAAACTCTTAGAAGAAAATAGGCATAAATCTTTATGACTTGGGTTAGGCAATGTTTTCTTAGATATAAC
ACCCAAGCACAAGCAACTAAAGAATAGAAAAGGTGGACTTCATCAAAATTGAAAATTTTGTACTCCAAAA
GACACTTCTAAGAAAGGGAAAAATGGTAGGAGAAAATGTTTACAATTCATGTATCTGACAAAGAAGTAGC
ACCTGAAATTTAAAACACTTGCAACTCAACAATAAAATTATAAGTAAACCAATTTAGAAATTGGCAGAGG
ATTTGAATACACATTTTTCCAAAGACATACAGATGGCCAGTAAGCACATTTAAAGATGCTCAACATCACT
AGTCATTATAGGAATGCAAAATAAAACCATAATGAGATACTTCACACCCACTCGGAAGACTAGAACCAAT
CTGAAACAAGTGATCACAAGGATATTGGAGAAACTGGAATCCTCTGACACTGCTGGTGGGAATAGTAATA
TATAATATGGTGAGGCTACTTTAGAAGAGTTTGGCAGTTCCTCAAAGTGATACAGCCTTTCATCTCTAAG
TATATACCCAAGAGAATTGGAAATGTTGATACAAAAACTTGTACATGAAAGTTCATAGCAACATCATTCA
TAATAATGAAACAACCCCAATGTCCAACAGATGAATGTACAATTTAAACGTGGTATACCCATACAATTAC
CTATATTGTTTAGCAATAAAAACGAAGCACTGATACATGCTAAGCCTCAAAAACATGCTCAAAAACAAGT
GTAGAAGCCAGTCTCTGAAAAACAAATTGTATAACCCTGTTTATATGAAATGACCAGAATGAGAAAATCT
AGGCCGGGCACGGTGGCTCATGCAGCTGTAATCCCAGCACTTTGGGAGGCCAAAGCGGGTGGATCACCTG
AGGTCTGGAGTTTGAGACCAGCCTGGCCAATATGGTGAAACCCCATCTCTATTAAAAATTCAAAAATTAG
CCAGTCGTGGTGGTGGGTGCCTGTAATCCCAGCTACTCGGGGAGGCTGAGGCAGGAGAATCACTTGAATC
CGGGAGGCGGAGGGTGCATTGAGCTGACAATGTGCCACTGCACTCCAGCCTGGGTGACAGCAAGACTGTC
TCAAAAAAAAAAAAAAAAAAAAAACAGAAAAAAGAAACTAGAGACAATACAATAGTGGCTGCCTAGGACT
GAGGAATTTGGGAGGAAAGAAGAAAATGATGACTAATAACAATAGAATTTCTTTTTGGGGTGATGAAAAT
GTTCAAGAATTTTAAGAGTGGTGATGGTTGCATAACTTTGAGAATATAAGAAATTCTTAAATTGTACACT
TCAAAAGGTGACTTTTGGCCAGGTGTAGTGGCTCCCAAAGTGGCTGTAAAACATTCCAGCACTTTGGGAC
GCAGAGGAGGACTGCTTGAGACCAGGAAGCTTGAGAACAGCCTGGGCA

[0146] An exemplary DNA sequence is human Cdv3 provided below.

gi|224589815: 133289930-133311620 Homo sapiens chromosome 3,
GRCh37.p13 Primary Assembly
(SEQ ID NO: 311)
AAAGAGGAAGGGACCAGCTTCACAGAGGAGAGAATTACTACAAACAATGACACAACCACAAAGACACTGG
TCTCTCTACTGGCCTGACCTGAATTTCTTACACATGATCAAGTTCTGGGATCATGCCATCAATCACACTG
AAAAATGTAGTGGGAAATTCTGCAGCGTCAGCCCTCAACTACTGTTCCTTCTGTGTATTTTCTCAAGTCA
TTAATTCTTTCAAGACAATGATGAATTGATAAGGACTTAAGAAAGATATAAATAACTGAAACTTATTTAT
ATCTAGATCTTCTCTTCTAGATTATAAGGGAATTGAATGCAGGAATCACAAATTACTCACTTTTGAATAA
AGCACTTTGCCCGAAATATAGCAAAATAAGTGCTTCATAGATGAGGAAAGAAAGAGAGGGAGAGGGCCGG
GCATGGTGGCTCACACCTGTAATTCCAGCACTTTGGGAGGCTGAGGTGGGTGGATCACGAGGGTCAGGAG
TTTGAGACCAGCCTGGCCAACATGGTGAAACCCCGTCTCTACTAAAAATACAAAAATTAGCTGGGTGTGG
TGGCGGGTGCCTGTAATCCCAGCTACTCAGGAGGCTAAGGCAGGAGAATCGCTTGATCCTGGGAGGCAGA
GGTTGCAGCGAGCTGACATGCCATTGCACTCCAGCCTGGTGACAAGAGCAAGACTTTGCCTCAAAAAATA
AGTAAGTAAATAAATAAATAAATAAATGAAAGAGAGGGAGGGAGGAAGGAAGAAAGAGGGGGGAGGAAGA
AAAGAAGGAAAGAAAAGAGGAAGGGAGAAAAAAGAAGGAAAGAAAAAAAAGAAAGAAAATAAATTTGATT
AGCGATGGTAAGGGAGGGTGATGGTGATGGGCAGTACTGAACCTGGCCTGCATCACAGGAAGATATATGT
TGTCATAGAAGGAAGTCACCTTGGGAGCTGTTCATGTTTGGGGAATAGTATATGTATAAGCTCAAGCTAC
TTGCTGGCCAAGGCTAGGTCCTTGATTTCTTTTGACATTCAGAAGTTAGACTTTTTTTTTTTTTTTGAGA
CGGAGTTTCACTGTTGTTGCCCAGGCTGGATTGCAATGAGGCGATCTCGGCTTACTGCAACCTCCGCACC
CCCGGGTTCAAGCAATTCTCCAGCCTCAACCTGTAGCTGGGATTACAGGCGTTAGCCACTACGCCCGGCT
AATTTTCGTGTTTTTAGTAGAGACGGGGTTTCATTATTTTGGTGAGGCTGGTCTCGAACTCCTGACCTCA
GGTGATGCGCCTGCCTCGGCCTCCTGAAGTGCTGGGATTACAGGCGTGAGCCACCGCGCCCAGCCAGAAG
TTAATTCTTTAATAGCAGTGTAAGTAGGGGGTAGGAAAAGAGAAACTTTAATGGGGTAACTGTAAAGGAA
AAGACGAAGAAGTCTCTCCATTTACTGGCTGGATTCTATCTACCCCATATGGCTACCAACATTTGTCTGA
GTCATTTCCTCAATGGTTGTGACAGCTCCCTCTTCTGCTTTTAGAAGGAGGAAGTAGAAAGTTTAAGAGC
TTACTTTAGACCACCTTTTGCATATAGAATTCATTTCATTTTCAAGGCCCCAAGGGTATTTAAATGGGCT
TTAAACCCATTTAAACCTGGCTTTCGCCTGGGCATTTTGGTCTCCACCCCTATGATAAGACAGTCCCCTC
CTTTTATCAGGGATAGAAGCTAAGGATAAACTGTATCATCATCTAGACTCAAGTCAGGGCGTTAAGCAAT
GTGCTGAGCAGCTAATAATGTTGACTCTCTTCCCTCCATCCCCCTATCTTGTAAGAAATAGTATACCCAC
TTTACAGATTAGGGACTTGACGATAGGATTTATTGAACTTGACCTTGGTAAACATAATCCAGAGGGTGGA
GTTCAGACAAAATCCCTTTCTACCTACCAACCAGCCTATGAAAGATCTTTTAGTAAATGGGACCTAAACT
TCAGGCTCACTGCTCCTCTCACTTTCACAATCAACCGGTAAAGAAGAAAAGTAATGGTTGCCACTCCAGA
GGGGGTGGAAGTACAGAAGCGATCAGAGGAGAGGAACAATCTTTAACACAGTTGGCTTAACGCAGTGCCT
GTCCGTTTCGCGACAGTTCAAACGACTACTATGGGGCCACGGTTTGTTCTGGGCCAGGAAACACACGTGC
ATCCTGCGCATGCGTCCAAAAGGAACCCACTGCCCCTCCTGCTGGACCTCTTTAGCCAAGTCATCAACCA
GCCCTCAACATGCCCGCCCTCAAGACTAAACCCTCGGCCAATCGGGAAACCGGAGTCGCCCGGCACGTCA
CTTATTTTGCATATGCCCTCCTCTCCCCGCCCCCATGCTTGGACTCCGCCCCGTCTGGGTCAGGGATTGT
CACCTAAGAGCTTCGTCCTGGCACCTGATTGGCTCTCTTTCCAGCTCCGCCTCCATCTCCTCCCGCCGCC
CGCCCCTTGGCGATCCCACAGCGGCAGGCAGAGCAAAATACGCAGGCGCAGGCGCTTCCTCTCTCTTCTA
GCGGCCCGCCCTCCCTCCTCCCTCTCCCTCCCCTCCCCACTCCCTTCCCCTCCTCTCCAGGCCTGCGCGC
GCGCCTCTTCCTCCGGCACGCGCCGCTGCTAGCCGAGCACTCTCGCCAGAACCTCTGGCTCGCGCGTGCC
TTTTCCCCTCAGGTTGTGGGGAGAGCGGAATCCTGCTCCGCCGTCGCAGCAGCAGCGGCAGCCCCGGCAG
CCTCGGGCGACAGCGGCGGCGCGCGAGCCCCCGGGCGGACCGTACCACCGCTCGCCAGCACGCAGGGGGA
GCCGCCCGTCTCGCCGCGCACGCCTCGGCGACCCCGCGGGGCTGAGGCGTCGCCGCGCCCGGCAGCGTGA
GCGCAGAGCCGGCCTCGACCCCGAGCTCGGAGCCCCGCGGGCCGCGCCCGCCGCCGGCCCCACCCATCCG
GGTCGAGGAGGCCGAGGCCATGGCTGAGACGGAGGAGCGGAGCCTGGACAACTTCTTTGCCAAGAGGGAC
AAGAAGAAGAAGAAGGAGCGGAGCAACCGGGCGGCGAGTGCCGCGGGCGCAGCGGGCAGCGCCGGCGGAA
GCAGTGGAGCCGCGGGTGCGGCGGGCGGCGGGGCGGGCGCGGGGACCCGGCCGGGTGACGGCGGGACCGC
CAGCGCGGGGGCTGCGGGCCCAGGGGCCGCCACCAAGGCTGTGACGAAGGTGAGGGGCCGGGAGGCCGGC
ACTCGGGGCCCGGGCCGCGCGCCGGCGCCCCATGTGCCCGCCCCCGCCTGCCGGGGAAGCGTCCGGGAGG
GGCCGCGGAGGCCGGGCGGACGGGCGCGGGCCGCCACGTGACGCAGGCTCTCCACCTCGGGCTGGGCTCG
CCAGGGCCGGGACCCCTTCCGATATCCGCGGTGGAGCCGCCCTTCCCACCCCGCGTCGCTCGGCGTTAGC
CAAGGCCCGGGCGGCGCCACCCTCCGGGGGCACTAGGTCTGGGGCCGCAGTGCCCAGCACAGAGCAGCGT
TTATCGGGTGACGTCTAGGCTGAGTAATTCCGTGTGCTGACCTCAGCCCAGTAGTTTGAGCTGAATTTTC
GCTTTCAGCAGCCGCATTTGTAGCAGCTCTTTTGTGATGACTTAGTCTCTAAGCCCGTGAAAGAAAAAGA
AAACTCTCGGTGGCAAGGTTGAAGTAGAAATGTAGTTGTGAAATTCCTATTGACTTCTTCCTTCGGCTTT
TCTTAGTTGCTTAAAGTAACAGCTCCCATGCAGGAACCCAGCGGAAGTATAGTGTTAGCCTACGAGCATG
TTTGTCCTCCATTTAGCCTAGTTTGCCCCAGAACGAAGCAAGGGCTTTGACCAGAAGACAAGTACATACT
TAGTTTAGGTTCCAGCCACTTGATCCACTTTTCGTAGTGTGTTATTTGCTTAGTTATATGTCTACAAATA
GCTTTAATTGATCAAATGGCGTTTGTTTTACAGGACGAAGATGAATGGAAAGAATTGGAGCAAAAAGAGG
TTGATTACAGCGGCCTCAGGGTTCAGGCAATGCAAATAAGGTATAGTCTGGTTACAAATGTGTTTAGATA
ACCTTTGGGATAGATATTGGATACAAGTTAGGTTTTCCTTTGGCCCCAAAGCAGCATCATAGTAGCCTTG
TGCTCTAGATATGCTTATTAGGACTCAAATGGGTTCTGTCTACTCTTTCTCACTCCATGGAGGCAGCCCT
TCCGTGTGCTCATGAAATTAGCTGCTGACTCTAAAATCCTGTGAGAGCTTGCCTACTTCCAGTTCTGGTT
AGGACTTTTCATTTGAGACAGCTAAAGTGGATTTTGTCGCTTCAAAATTTTTACTTTTAACATCGGTGAT
TGTACTTAGTTTTGGTTTCAAAAGTAATGTGGATGTTTTTCACATCCTCTCCAATAAGCAAGTGAATATA
TGTTTTTGTAATTGAAGTATATCATACTTACAGAGAGATAGAGGTTTTATGTGTTCACACAGTGCAACCA
ACCTGTGCAATAAGCACCAGGTCAAGAAACTGAGTATTACTGATACAGAACAAGGTTCCCCTCCTAACAC
ATACTCACTGCATTCACCTTCAACATAACCACTATTCTAACACCATAATTTTTTCTAAAACTTCATAGGA
ATGGAATTATATTTGTAAACATGTTATTTTTTAAAGTTCAAAAAAATAGTAATTTTTAAAAATTGGGTAG
TTTAGAAGATTTGAAATTAACATTTTGTCAAGTCCAGTCTATGGCAGTCAACTTTAAGGTTGATGTTAAG
TAAGTGCTATATTTTGGAGGGTTCATAAAGTAGGAAAAAACAAATGAAGATATGGTTCTGCTGTAAGATG
AAAAAATCCTTTGCTCCCGGTTTAAAGAAATAAAGGATCTTGATAAACTGTCTCCAGTTTGAAGGTTGCA
TTTTATAGGCAATGCCAGTGAGTGCGAGGCACAGTGGAGGAAATACTTTCCTTAACTGAAAACTGTCTTT
TGACTTCTCTGGATGTTAGTATCTATAGCTTTAGATAACTTACTCAAAAAGCAGGGTTAATATTATTGAC
ATTTGTTGAACACCTACCACAGCTAGGCATTAATGTCCTACTGTGAAAACATCATTTTGTGAGCTTAACC
AAAGTGAAACCCCCAGATTGATAATGGGAAACTTTCAGGAACGATGGCTTCTCCACTCTTGAGATTTCTT
TGTAGTGGTGTTGAGTAGAAGTGATTAGACTTGAGTTTGATTCCCAACCACTTGTTGGCTTCCTTAATGT
GTCTTTCTCTTTTCTGTCTCCTGGGGCTTGACCTGTAAATAATGGGGAGGAGGGAATGTGAGGTTCTTAC
CATTTGGTGTTGTGGAACTGCCTGTGTGTGTGGCTCCGGTTCTGTTGTAAAGTTTGGCTCTTCTTAAGTC
TTTTCTTTCCTAAGTGACTGCAGGTTCTTGAAAACGTGAGTGACTGGAAGAATAGTGTTTGGCCATGTTG
AACTTGGCAAAATAGCACTTTTCTGAAGATAAAATTTTGGTTTCAAGTTCACTGAGGATTAGAAATTGAT
TTTGTTAAACTATGGAGATTATTTAAACAGAACCTGTGTTTTTCTGTTACTGACTATAAATTACATGTTC
ATCTTCAGGGTTATTTTGATCTTGATCTATTTTGGTTACTTTTGAGATAGTGAAAAGTGTCTTAAATAAC
TTACATACTTCACCCTTGCCAGGGATATAAGTAAGTATCAGCTAGTACAAGCATTTAAGTTCTGTTCAAC
CTGAAGGTAGACTAGCTTTTTTTTTTTTTTTTTTTTTTTGAGACGAAGTTTCCCTCTTGTTGCCCAGGCT
GGAGTGCAGTGGCAAAATCTCGGCTCACTGCAACCTCCGCCTTCTGGTTTCAAGCGATTCTTCTGCCTCA
GCCTCCCGAGTAGCTGGGATTACAGGCGCCCGCCACCACACCTGGCTAATTCTTGTATTTTTAGTAGAGA
CGGAGTTTCATCATGTTGGTCAGGCTGGTTTTGAACTCCTGACCTCGTGATCCGCCCGCCTCAGCCTCCC
AAAGTGCTGGGATTACAGGTGTGAGCCACAGCACCCGGCCTAGACTAGCTTTTATATTGTTTTTTTTGTT
TTCTTAGCATCTAGTCATTGGCCCTAAGTGGCCATCCTAGTAGAGGTATTCCACTAACCTGCAACACTGA
GAAACACTCCTTCCCATATGTTCTTCACTCAGATCCACCAGTCTCTGCTACATGTGCTTTATCTTTTTCT
ATTTCTCGGTATACTGAGAGCTGCAGATGTCACATTCAGTCTTTTTTTCTTTTTTTTTTTTTGAGACAGA
GTTTCGCTCTTGTTGCACAGGCTGGAGTGCAATGGTGCGATCTCAGCTCACCGCAACCTCAGCCTCCCGG
GTTCAAGCGATTCTCCTGCCTCAGCCTTCCGAGTAGCTGGGATTACAGGCATGTGTCACCACGCCTGGCT
AATTTTGTGTTTTTAGTAGAGACGGGGTTTCTCCATGTTGTTCAGGCTGGTCTCAAACTCCCGACCTCGG
GTGATCCACCCACCTCGGCCTTCCAAAGTGCTGGGATCACAGGCATGAGCCTCTGAGCCCAGCCAGATGT
CACATACAATCTTAAAGTTCTTGACCCTGGTCCTTATAGTAGTTAGCATATTAGTTCTTTACCTGTACAT
TTGAAAGGGGAAATTTTTCATTAGCAGCAAACGTATTATATATTAAGATCCTATTTCACATTTACCAACC
AGCTCAAGATTTAAGTACCAAGGTACTTAATGTGCCCAGTTTTGTGTCTGAATTAACAGATCTTATTCAA
GGTCATGCTGTTATAGACAGATTCTTGAGAGGGAAGCCATTGAGGTGGTTATAAAGGAGGCTGTCATTTG
AGTTAGATCCTTGGTTGTTTGTAGGCCCTGTAGGCCTCTTTCATCTCTATTTTTTCATTTTTTTGAGACA
GTCTCACTTTGTCACCCAGGTTGGAATGCAGTGGCATGATCATAGCTCATTGTAGTCTTGAACTCCTGGG
CTCAAGTGATCCTCCCACCTCAGCCTCCCGAGTAGCTGGGACTACAGGTGTGAGTTGCCACCCCTGACTA
ATCTTACTTTTTTTTTCTGTAGATGAGGTCTATTTTACCTAGGCTGGTCTCAAAACTCCTGGCCGCAAGT
GATCTCAAAGCAAAGGAATCACACGCATGAGCTGCTAGGCCCAGCCACTTCCATCTTTAAAGTGGATTTT
TGGGAGAATGTTAGAAAGATTTAATTCTTGAAGGTATACACTGTTGAGCATTTGTCACGTTTCAGTAAAT
AATTGAGTTCTTGGAGCCCAGTGGTTTTCTAGAAACTTTGGTGAGAAATCTAGACTTAAACCTTTTAGGT
AGAGCTGGTTACATTATCCAAGGTGGATTTATTCTAGCAAATACTTATGTGACTACTCTGCTAGACACTG
AGGTTCTCTGGTTGTAGAAATAAGTCATGCTGTAATAGACAACAGTAGATAATTTCAAAGAGATGTGCAT
GGTGCTCTGGGGCAGAGGAGAGACATTTCATCATCCATGAAGGGGTCAGGAAAGATTCTTTGGATGAGGT
GCAGTGCCATTTTAAGCCTCCAGGCCAGGCATAGCTGATCAGGCCATGTGTATCTCCCCATTTTACTGTT
GCAGCAATGCTAGGTATAATAGGGACAAACCTGTGGAGATGCCCGGTATTCCAGCAGCTCAATCCAGTCT
GATTTTTGTTTTAGCTGCTTCCCCCTAGTGTTGGGGAAGGGGAGTTAGGATGTATAAATTCTCATGTCTC
TTGAGGTAAAGAGATAAGGCTGTTCTATTCTTTATAAATATACTGCTGCAGGATGTGTGATCCTATCAGC
CTTACTAAAGAAAATGCATTTCTCAAATCTTAGAGAATATTTTTGCATCATACCTTAGAGCTATAAAGGG
GATAAAATGAATTAAAAGGTAATGTGAAATAATAGAGCCTCTAGAATCCCACACTATTTTGGCTCTGCTA
CTTTGTAGCCCTGGGGAAGGTACTTATGTTTCCTCATACATACATACAGTGGGTCTCTTGGCTGCCTTAG
TGTTACTGTGAGGTTTAACTTTGTACAGTGGGGTGGAATGCTGCCTGCTGTAGTAGATATTCAGTAAGTC
TCCCTTTTGTAGCATCATTATTCTCCTCACCTTACCAGTAGTGCCTTACAGACTTACACATATTTAAGAC
CGTATATGTGGAATTGTGATGAATTTACAGCAGTATTGTAGTGTTTGTTTATAAAATTTAGCTGATGGGA
AGCTATATATTATATTTGGGTCAAACACTGAATTTCAGCCTGTCTCCCATGGAAATAACCGTTTGGAACG
TGTTTCTTGTTCTGCTATGACATTTGGAGAGTTGATACTTTCTGAAATATGTAAAGATGAAAAAGTAATA
AAATATGTAAATCATTTCTACCCTGCTAACTGGCATTTAGGCAAGCCTCTAAGCATCTCTGGGCTTCAAT
TCCTTCAATTGTTGGATGAAGAGTGTTTTTGGTTTGTTCGTTCTTTTTTTTTTTTGATAGAGTTTTTGCT
TTTGTTACCCAGGCTGGGGTGCAATGGCGCAATCTCCGCTCACTGCAACCTCCACCTCCCAAGTTCAAGC
GATTCTCCTGCCTCAGCCTCCCAAGTAGCTGGGATTAGAGGCATGTGCCACCACGCCTAGCTAATTTTTG
TATTTTTAGTAGAGACAGTGTTTGACCATGTTGGTCAGGGTGGTCTCGAACTCCTGACCTCCAGTGATCT
GCCCGCCTCTGCCTCCCAAGATGCTGGGATTACAGGCATGAGCCACTGCGCCCGGCTGATAAAGAGTCTT
GACTAGACAATTTCCACATGTTTAGTTTAGCTAGTATTTCAGAATCTTAACCCAAAATACTTATTTATTT
TTATTATTATTATACTTTAAGTTCTAGGGTACATGTACACAACGTGCAGGTTTGTTACATAGGTATATAT
GTGCCATGGTGGTTTGCTGCACCCATCAACTTGTCATTTACATTAGGTATTTCTCCTAACGCTATCCCTC
CCCCAGTCCCCCACCCCCCAACAGGCCCTGGTGTGTGATGTTCCCCTCCCTGTGTCCATTTGTTCTCATT
GTTCAACTCCCACTTGTGAGTGAGAACATGCAGTGTTTGGTTTTCTGTCCTTGTGATATTTTGCTGAGAA
TGATGGTTTCCAGCTTTATCCATGTCCCTGCAAAGGACATGAGCTCATCCATTTTTATGGCTGCATAGTA
TTCCTTGGGGTATATGTGCAACGTTTTCTTTATCCAGTCTATTATTAATGTACATTTGGAAAAACCCAAA
ATATTTATTTAAAAAAATTTCTTTTGGCCGGGCACAGTGGCTCACGCCTGTAATCTCAGTACTCTGGGAG
GCTGAGGCAGGTGGATTACTTGAGGTCAGGAGTTCGAGACCAGCCTGGCCAACATGGTGAAACCCCGTCT
CTACTAAATACAAAAAATTAGCTGGGCATGATGGCGCATGCCTGTAATCCCAGTTACTTGGTGGGCTGAG
ATAGAAGAATTGCTTGAACCCGGGAGGCAGAGGTTGCAGTGAGCCAAGATCAGGCCATTGCACTCCAGTC
TGGGCAACAGGAGTGAAACTCCATCTCAAAAAAAAAAAATAGAGACAGAGTCTCACTGTGTTGCTATATT
GCTCAAGCTGGTTTTGAACTCCTGGCCTCAAGTGATCCTCCCACCTTGGCCTTCCAAAGTGCTGGGATTA
GGGCATGAGCCACTGCACCTGGCCAAGAATCCAAAATACTAAATTGTCTCCTTGTGCCTTTTATTATTGA
TGTACAATCCCTCTAATTAAACAGATTATGCTTATTTTTTGGTAATAGTTTGTAAACTAGGTGTATTTTA
AATTTGAGATTATTTTATTTTTTAATTTTTTTCCTAAGGGCAAGGAGATGTTAGACACTAGACAGTAAAA
AAAAAACTTCCAGTTGAGATACTGTCACTATTCCATCAGACCAAATAGGAGTTTTTATTTAAAAGCTTTC
TGTGAGGCTGGGCGTGGTGGCTCACTCCTGTAATCCCAGCACTTTGGGAGGCAGAGGTAGGAGGATCACT
TGAGGCCAGGAGTTCAAGACCAGCCTGGGCAAGACCCTGTCTCTACAAAAAAATGTAAAAAAGTAAAATT
AGCCAATTGTGGTGGTCTGCACCTTTAGTTCTAGCTTACTTGGGAGGCTGAGGTGGGAGTATCTCTTGAG
CCCTGGAGTTGAAGATTGCAGTGAGCTAAGATTGGGCCTCTGTACTCCAGCCTGGGTGACAGAGCAAGAC
CCTGTCTCTAAAAATTAATTTTTAAAAATAAAAAATGATTTTTTATGTAGGTTATAAAAATAATATGCTT
GTTTTTAGAAATTTTTTTGAGAAAAATGTAGAAGCATAAAGAAATATGTAAGAATTATCTGTAGTCTCTT
CTATTTAGGGATAATCAGTAAATAGTGCTGATTATTATGGGGTTGTCACCTCCATTTTACATAAGAGGAA
ATTGAGGTATAAAGAAATGAAGTGCCATGTTCAAAGTTTCCTGGCTGGTAAGTGGCAGAGCCTGGATTTG
AACCAGGAAGCCTGACTTTAGAATCTGCTCCTAATTGCTTGCTGCATGAAGAAGATAAAGTCATACATTC
TAGCACCCAGAGCTACTCTATAAAACTTTTTAAAATTGTTGTAGATGTTTTTGTATTTATATTAGGTATA
TAGATGTTGTTTTAGTGAATTTTGGTTTATATGACATGAATACTACCTCCATGTCAGCATAGGGTTTACA
TTTTAAATGGCTGCATAGAATTCTCTTACATGTTAACGAAAAGGAAAACTGAGAGATGGCTTGGCTATAT
TTTTATTTTAAATTGCATTTTTTTCTTTCTCAGACCTCTTAGGGATGAATTGCCATATTCTCTATCCTTT
TTCCTCTCAGATAAAGTTGTAAGTAAAATCTTGCTGTAAATGTAGACGAGATAAATCTGTTCTTCTTTCC
ACTCTTCCTCATTGTCACTCTAGCCTCCAAATTCTGCAGTCACTTCTGGTTGGTAGGTAATTCATACAAT
GCTGCCATTATTTTTTATTTTTTATTTTTGACACGGAGTCTCGCTCTGTCACCCAGGCTGGAGTGCAGTG
GCACAGTCTTGGCCCACTACAACCTCTGCCTCCCAGGTTCACCTGATTCTCCTGCCTCAGCCTCCCAAGT
AGCTAACCGGCATGTGTCACCACACCTGGCTAATTTTTGTGTTTTTAGTGGAGATGGGGTTTTGCCATGT
TGGCCAGGCTGGTCTCCAACTCCTGACCTCAGGTCATCGGCCTGCCTCAGCTCCCAAAGTGCTGGGATTA
CAGTTGTGAGCCACTGCGCCTGGCCAGTGCCATTATTTTTGAATGGCATTTTGCCACTTACTTTTTTCCT
AAGTATCTTTAAAGGAGACTGTCAAGCTAGTCAAGAACTTTGTCTTATAGCCAGCATGTGTCTTGTTTTA
ATAGAAATGGAAGGAAAGCATCCTTAGATATCCTTTTGCAGAAGCCAAGAGAGGCTGTGATGTTCCTAAG
GTTATACAGTTAAGAGAGTCAGGGTGATGAGTAGAAGGCAAGGGACAGAGTTTTGGGAACCAGCCTTTTT
TTTATAGGAAGGTGGGGAAAAGGTAGAATGGTGAAGGAGTTGAGAAGCTTGAAGACCTAGGAAAAGCCAC
CATTGTCATGAAAAATAATTTTATGAAAATGTTGGTAGTTTCTGCCAGGTGTATCTTCGAGGTGAAGAGT
TGCAAAAAGGACGTTCGATTTAGCCATTATTGTGCTTTAATATCCCTGTTGTCAGTATCCCTTTTGTCAA
GAGACAAAAGATAAATACACTTGGTAATTTAGGACATGTAAAGTTACACAAAATAATAAAAAGTAATCCA
GCAAAAAGAGAAATAATCAAAGATGCCTTGGAGAAATAGATTATGACTCAAGTCAATTCAAGAATAAATT
AATTAGCATTGAGAAAATACTGCAAGCAGTCTTAAGATGGTATGTTACCACTGAGGGTATCTTTTCCATT
TATAACATCTGGAAAGCCAAAGACTGAGATCTTATATATTTTTTTTAAACAGGTGATAAATACATGTCTG
GTGTTAGGGGCTAATTCTATCCTCTGTAAACACTGGACACAGACTTGTTTTCATCTGCTGGAATGTGAAT
TCTAATTCTGAGAGTATTTTATGTGCGAAAGGATTGGCAAATAAAATTATACAACTTTCAAAACTCTTCA
TTTGCTCACTAAAAATATGCTTACCTTAAATGCCTGTTTGTACACTTTGGTGCAAGGAAAATTTTGTAAT
TGTGCTCTTAATCCTTCAGCTCACCTTCTTCTCTGCATTTCAGGTTGTATCATCCTCTCTTCCCTCCCTT
AGTCGCTTGAGGTGGTAACTGGGGTCTTGCTCTTATGTGGGGCTGCTATAAATGATCAGGCATATTGTCA
CAGAGGCACATCAGGTTTTTTTTATTTTTATTTTTTTGAGACAGTCACGCTCTGTCGCCCAGGAGGGAGT
GCAGTGGCACGATCTCAGCTCACTGCAGCCTCTGCCTTCCGGGTTCAAGGGATTCTCCTGCCTCAGCTTC
CCCAGTAGCTGGCATTGTAGGTGTGTGCCCCCATGCCTGGCTCATTTTTGTATTTTTAGTACAGATGGGT
TTCGCCATGTTGCCCAGCCTGGTCTTGAACACCTGACCTCAGGTGGTGCACCCATCTTGGCCTCCCAAAG
TCCTGGGATTACAGGTGTGAGCCACTGTACCTGGCCTCACTTTTTAAATAAGACGTTCAGTCTCGAAAGA
GATTGACTTCTTCAGGGTCGTACAGATAATCATGGATAAAACTAACGATTTGGACTGAAAATTTTCTTGG
TGATTCCTTAATGAATTTACATCTTTGCTTTTCCAGCAGTGAAAAGGAAGAAGACGATAATGAAAAGAGA
CAAGATCCAGGTGATAACTGGGAAGAAGGTGGAGGTGGTGGTGGAGGTATGGAAAAATCTTCAGGTCCCT
GGAATAAAACAGCTCCAGTACAAGCACCTCCTGCTCCAGTAATTGGTAATTTTACTATTTCAGTTTCAGA
AAGATGTCTAATTTATATATGATTTTATATATGGTCCACTTTCAACTAAGTGCATGATTGTGGTAGGGTG
AGGAGGAGAGGCTCCTTTCCATTCCTGGTAGAGTGGGATGTGTATATATCTTGTTAAAGACTTTAAAATC
CTAAATAAAAGGAATCTGGAAGTTAAAAGACATGCTTTTGTCCTGTATGTTGCTGTAAAATTTATATAGA
TATAGACTAGTCGATTCCAGTTTCATTTATTGGAATTGAGCATTTCTTCTAATATTCTCGTTAAATATTA
ACTACTTGCTAATGGAGGAAAAGGTAAGGAAAAGACTTTAATTTACTAGAATCCAAGGTCAGCTTCATTT
AGGATTTTTAGTGGTAACTACCCTAGGGTTGGGTTTAACTCCAAAAGTTTTCATGAGAGAGAAAATTCCT
AAAGCTTTTATCATTTAAAATATTTTTGACAGCTGAGTAAAGACAGAAAGACAAGGGGCCCTTGTCTTTC
ACTTGTGCTTTGTCTTTTTCATTCCCTATTTAACTTTCCTGTTCTTTGAAGCATGAATTCTCAGCAGGGC
CAATTTTATCATTCTCAAGGTGGTAAAAGTTGCTTCTTATGGAATGAAGGAATCTTATACCTTAACAGTC
ATTTGTGGCCCACGAAAAGACTAGAATGCATAAACAGATGTATAGTATATCGCAGTATTAAAATTTCATG
GAGTGGGGGGCAGTTAGGAAACAGATGTCTGAAAGGTCTCCTTAGGGCAATAATGAAAGTTTAAGAGCAC
TACTTTAAAGAAGTGTATACTCATTATTTTATTTAGAATGTTATAAAGAATAACATATCACTCCAAATCT
TGTTATGCAGAAATCACAGATAACTACTCTATGTTAAATTTTTATTTTTATATTTTTTAGAGACAGGGTT
TCACTCTGGCCCAGGCTGGAGAGCAGTCATGCAATCATGGCTCATTGCAGCCCCTCAACTGCTTGGGCTC
AAGTGATCCTCCCACCCCAGCCTTCCAAGTAGACTACCGGGGCATGCCACCTGTTTATTTTATTGTAGAG
ATGAGATCTTAACTATGTTGCCCAGGCTAGTCTTCAACTCCTGGGTTCAAGCAATCCTCCCACCTTAGCT
TCCCAAAGTGCTGGGATTGCAGGTGTGAGTCACCACACCCGGTCTTATGTTTTTAAATCATCTTTAGAAT
CTTTTTGTTTTGTTTGTTTTGTTTGAGACAGAGTCTGGCTCCTGACTTCAAGTGATCTGCCCGCCTCGGC
CTCCCAAAGTGCTGGGATTACAGGCGTGAGCCATTGTGCCTGGCTAGAATCTTTTTTTCTTTTTCTTTTT
TTTTTTTAAGACAAAGTCTCACTCTCTTGCCCAGGCTGGAGTGCAGTGGCACAATCTTGGGTCACTGCAA
CCTCCGCCTCCCGGGTTCAAGCTATTCTCCTGCCTCAGCCTCCCAAGTAGCTGGGATTACAGGCGTGCAC
CACCATGCCCCGCTACATCTTTGTATTTTTAGTAGAGACGGGGTTTCACCATTTTGGCCAGGCTGGTTTT
GAACTGCTGACCTCAGGTGATCTGCCTGCCTCGGGCTTCCCGAAGTGCTAGGATTACAGGCTTGAGCCAC
TGCACCCAGCCCTGGCTAGAATCTTAAAAAATAACCACACTGGCATTTCATTAAAAAATTCTTTACATAT
GGCATCTTAATCAGTCCACCAATCAGGTAAAGAAGTAATTCATATTTACTGGTAGGGAAACAGGACTAAA
GTCCTATTCTGAGAGGCAGTCCCTGATGAGACCAGTCATCCAAGCCCAGCAGATTCCTTTTCTACTTCCA
GTAATTTGGCTTGTGGAACTCATCATTTACGTAGATTACTAAAGTTGTACGTGGAGGAGGAGTTAGAATA
CTACCCTAGAAAAATACAATGTTTTCACTTTTCTTTTTTCTTTTTTGAGAGCCGGAGTCTCCTTCTGTTG
CCCAGGCTGGAGTGCAGTGGCTCAATATCGGCTCACTGCAACCTCTGCCTCCTAGGTTCAAGCCATTCTC
CTGCCTCAGCCCCCTGAGTAGCTGGGATTACAGGTGCCTGCCATCATGCCCAGCTAAGTTTTGTATTTTT
AGTAGAGACAGGGTTTCATCATGTTGGCCCAGCTGGTCTTGAACTCCTGACCCCAGGTGATCCACCCACC
TCGGCCTCCCAAAGTGCTGGGATTACAGGCGTGAGCCACCACGCCCAGCCTGTTTTCACTTTCAGACATT
TTCTGAAATGAATTCCCTTCTGTGGTCTGACCCAGAGACCCTGGTATTGTTTTTTCTATAATTGTTAAAT
GATTGGGAATGCAAGAATAGCTTATTAAAATGCTGAGCATTTAAATAGTTTATCTAAAAATTGTTATAAA
ATATTAGTTACAGAAACCCCAGAACCAGCGATGACTAGTGGTGTGTATAGGCCTCCTGGGGCCAGGTTAA
CCACAACAAGGAAAACACCACAAGGACCACCAGAAATCTACAGTGATACACAGTTCCCATCCCTGCAGTC
AACTGCCAAGCATGTAGAAAGCCGGAAGTAAGTACTATAATTAATTGCATTTTGTTTGGGACTTCTGTTC
CTAGGCCAGGGAGTGGGATATAGGGGATGTGCATACCCACCCAAGGGAGAGACTACTCCTTAACTAATAA
AGCCTGAGCTTCAGCTGACAGGCAGGTGAGAATCAGGGTGGGACTTCATATGTCCAGAAGGGAGGAAAGG
GGGAGGGCAAAGAGCATTGGAGACACTTTGTCTTCTGTCTGCAAAAGTTTATCTTAGCCCTGGTTTATGT
TGTTTTATAGCAATGACAAGTTTTAATGTAGTTAAAATTCTTTTATAATTAAGTGGCTTTTGCTCCTTAT
AATATGGAAACTAGAAATATAAAAGCGCTGTTTAATTGTATTCCCAGTTAATGTGACTATAGACAGAAGA
TGTTGGCATTTATAAATCTAATATTAAAATAATCTTATTTCAGCAGGTACTTAAAATGAATGCTACCTGG
AATTAAATGACTACATATGGCACATCTACATCTTACTTTAGGGACATGAATTTTTTAAAATAAATAAAAT
GGGAAGAAATGTAAATGACATCAGATGGAAATGTGTTTTTTGGGGTGGCTTTTAGAATAAATCCCAGCCT
TTTCACCACTTTGAGAGCACAGCTGGCTTGAATTTAAACCTCCACGTGGACTTGCTCCTCTGCTCTGTCT
TAAAAAATGTGTAAGGGACCTTGGGAGGGCAGTGATTCACCACACTCGAGTTTCTTTACCTGATCTAATC
AGATCCACTCCCACAAAATCGATGTGAGGAGAAATCATTGACTAATGAGTAGAATTTACTTGAATGAGAA
AATTGTTACCCTTGTGCATAAAGAGAGAGATGTATTATCTATTACTTGCTAAAAGTAAGAGTCTTAGGAG
GAATGTCATTACACAGCTTTTAACAGTTTTCTTCAAGTTTGTCCTGAAATAGGGTCACAGTTAATACTGT
TCAGTAGAAGATAGGACCCTAGAGCTTCAATACAGCGTTCTGTGTTTTCTGTTTGAATTGAAGCCTTAAA
ATGGTTTGATAAGGATTTTCTATATGCCTCCACTCCTACCCCTCCCCAGGATTCTTCTAAGGGGTGGCTT
TTTTTTAAATTCAAGGACGAATATTTTCAAAAACCCTAGTGAAGAAGAAATATTTACTGATTACATTTCT
TTTCCCTTAGGGATAAAGAAATGGAGAAGAGCTTTGAAGTAGTAAGACACAAAAATAGAGGTAGGGATGA
GGTTTCAAAAAACCAGGCCCTTAAACTTCAGCTAGACAACCAATATGCTGTGCTTGAAAATCAGAAAAGC
AGCCACTCACAATACAATTAAGGAATGGGCTTTGCTAACCCTTCTGAGGTAACTAGACTGCAGCTAACCA
CCACCAACAGCCATTCATCATCTGATCTCTGCTGGATCTACAGACACCGATGCAGACCACTCGATTTCAT
GACCGGCCCTATTGCACTATGGAAGTTAAAGTGTCACGACTGCTCTATGCATATTGGATTTAGGGGAATT
TTCATTGTTACATAAATGTGTGAACTAGTTTCAACAGTGTTCTTTCATATTTACTCTGCAAATACAAAAA
ACCAAAACCTGCAGCCAGTGGTCATTTCAAAATCTTTTTATGTTCAGATACTGAGCCTTCATAAGGGTTG
ACTACCTCAGATTTGCTGCACTCATTGTGGACTTCATGTGGATCACAACTTCTGGATAAGAAGATTACAA
CTATTAAGTGTCGATGTGAACCTTGCAACCAGCTCTACTGGATTCTTATCAGAAATCCTGCATAAAAAGT
CAGCCATCTGGGTTCTGATCTGCTGTAAAAGATGAAGATTTAAGTGACCTTAATTAACCTGTCCTGTGCC
CTACCCTTAAGGAATACTCTCTGTAGTAGGCTGTTGTTATATTAGACTTCCTGGAACACACTGCTGAAAA
GAACTGATGTGTTCAGATCATCTGTGTAGGGCTGTGATTTGTAATTTAAACTAATTGTATTCTGAGGTAA
CCACAAAATAAATTCAACCAAACTGGGGTCCACCAAGTGGGGGAAGGGGAAGGGAGAGAATAATCTTGGG
GGTTTTTTTTTTTTGGTAATTTTTTTATTTGGATAGTGCTTTTTTGTTTTGTTTTTGTTCTGCATTAAGG
CCTTTTTTGCTTTGACTTGAAATAAGTTCTTTGACAGAGCATATTGCTTGGTTAATTAAGTAACCTAAAG
TATGCATTAGGATTGTGAAATGTCTCGTGAGTATGCCAATCCTGAGGGTGGAACCAAATAGCCTTTGATG
AAAAGGGCAGTGGATTCTGGAGGCTCTACTTCAGGTGCTGCTATAATGCCTCATCTAATCAGGACTAAAT
TGTGTAGGAAACTGCAGTGGGAAGAATATGCTTTCTGCTCAGGCTAAGAGGGTCACTGATCTGTCCTTAG
AAATTCAGAGTAACATGAGCAAAACCTCAGCTAAAACCCATTTAAGTGGCATGGATTGTGCATGATCTTT
GATAAGAATTCCTCATGTACTTGTGCCTAGTTTTTCAAGGTATTGGCTGTTCTATAGATGCAGTGATTGT
CCCAGCTAGCTCTGTTACCAGCCTTTTGGTGTGTCTTTATGTTCATTTGGAGAGTCAGGGCGAAAGACAG
GTGATGTAGCACTTCTGTTTTTAATAATTATTGCTTAAAATACCTATTAATAGTTTTGGGTCATTTAAAG
GGACTTGAGGAAGCTACCCAGGATTACAGAAGAGTGTCCACCTAACAAGATGGTCTGGCAGTTTCCTAGT
TTTGTATCTGGTTCAATAGAAATATGTGAAAGTGGTAATGTCATCATTTGATGCAGAGTCCGGGTTTCTC
TATAATAAATCCCTTTGCCAAATGCATGAGTTGCAGACTTGCTACTGGCAAGAGTGAAGCAAGTGGGTGA
GTAAAACTATTTTGACGTGGGAGCGTTTTCAGATAGGAGTTTAGTCTTGACGAAAGTGTCCGTGCAGGAA
TTGGACTCCGAGGAGGGTTACAGTATCTCCTGACGGGACCTGCCACTCGCATCTGGGCAATGTTGACATT
TGAGGTGGCAGGCAGGATGCCTGCCTTCTAATATATTTGGGTGAGTAACTGAGCCAGCCAAGGGAAGGTT
GAATGATTAAATCAGAAATGGGATTCTTGGTAAACTGAAGACTTTTATTTGGGAATGAAAAACCTTAAAA
AAATCTCTTCATCGTTGAACTGTGCATTTTCCCTGCATTTTTTCCCAACAAAATTTTGTTGGGGGTTATG
TTACTGAAGAATGAACAGATGAGTAAGTGGAGGTGTTATGTAAAGGCATATTGTACTCGAAATCTGAAGA
CCTGCAGCAGATTTAAATTACAACTCTTGTTATAACTTTTTAAAAGATTGTGAAAATATCAAAATATAAA
TGAATCAAGTTTTAATATACTGTATGATGGGTGGATGAGGCTGTCCATTGTACCATTTGTTTGAATTCTC
AGGCATGGTTTGGCAGTGCAAGAATTCTGTAACATTAACAAATTCAATAAAAAGTAAATATATGGATTTT
GGACTGTAATGGTTATTTTAAAGCCTTATTCTGTCTTTGAAAATGGTGAGTTGAGGTCACACCTCTCTTG
CTGTGGGAAGGTGAAGATGCTCTAAACTCAGGGGTGTACTTTTTTTTTTTTTTGAGACAGTTGCTCTGTC
GCCCAGGCTGGAGTGCAGTGATGTGATCTTGGCTCACTGCAACCTCCGCCTCCCTGGTTCAAGCGATTCT
CCTGCCTCAGCCTCCTGAATAGCTGGGATTACAGGCGTGCACCACCACACCCAGCTAACTTTTGTATTTT
TAGTAGAGACGGGGTTTCACCATGTTGGCCAGGCTGGTCTTGAACTCCTGACCTCGTGTTGCACCTGCCT
CGACCTCCCAAAGTGCTGGGATTACAGGCGTGAGCCACCGGGCCTGGCCAGGAGTGTACTTTCTGTTTCA
GAAGTGTTTACAGAGTACTCAAGCATAAAAAAGACCGATGAGGATTTAGGCAAACCAAAGACAGTAAAAA
AAGAAATAGAAAATTTAAAAAATACAACACGCATGAAAGTGGCTGCAAAGCTGTGACAAATATTTTTGGA
AAACTTGAAATACACATTTGTCCTTGTTGCTGTATTAAATTTTGTTACCTTAAACTATGGCAAAGGAATC
TAAAATCTTTATATAGACTAAGGATTTAAGGCTTTGTTCGATTAATCTTACAATTCTCAAAAACAGTAAT
TTTAAATTTCAGGATTTAGTTTGGATTATAGTCCCTCGATTTCTAAATTAGCAAAAGTATATTTCAGTCA
TTTTGGTAGTGGAGTTTAAATATGTAATGTTAACAATTTACTATTTGATTATTCTTTGTGCTTGATTGAG
ATCTTTTTTTTTTTTGACAACCTTATTTAAGATAGAACACACACACAAACTCACACTCTATCAGTCTTCC
CTGCTTTAATTTCTTCTATAGTTTTAACTTTTTAGATAAAAGTCACTCTTTTCAAAAAGAAAAAAAGAGA
CAGGGTCTTGTGCTGGAGTGCAGTGGCGCAATCATAGTCCCCTGCAGCCTTTAACTCCTGGGATCAAGGA
ATCCTCCCGCTTCAGCCTGCTGAGTAGCTGGGATTAATGTGTGTGCTACCAAGCACTATTTTGTTTTTTA
AGAGATGGGGTCTTGCTATGTTGCCCAGGCTGTTCTCAAGCTTCCTGGTCTCAAGCAGTCCTCCTCTGCG
TCCCAAAGTGCTGGAATGTTTTACAGCCACTTTGGGAGCCACTACACCTGGCCAAAAGTCACCTTTTGAA
GTGTACAATTTAAGAATTTCTTATATTCTCAAAGTTATGCAACCATCACCACTCTTAAAATTCTTGAACA
TTTTCATCACCCCAAAAAGAAATTCTATTGTTATTAGTCATCATTTTCTTCTTTCCTCCCAAATTCCTCA
GTCCTAGGCAGCCACTATTGTATTGTCTCTAGTTTCTTTTTTCTGTTTTTTTTTTTTTTTTTTTTTTGAG
ACAGTCTTGCTGTCACCCAGGCTGGAGTGCAGTGGCACATTGTCAGCTCAATGCACCCTCCGCCTCCCGG
ATTCAAGTGATTCTCCTGCCTCAGCCTCCCCGAGTAGCTGGGATTACAGGCACCCACCACCACGACTGGC
TAATTTTTGAATTTTTAATAGAGATGGGGTTTCACCATATTGGCCAGGCTGGTCTCAAACTCCAGACCTC
AGGTGATCCACCCGCTTTGGCCTCCCAAAGTGCTGGGATTACAGCTGCATGAGCCACCGTGCCCGGCCTA
GATTTTCTCATTCTGGTCATTTCATATAAACAGGGTTATACAATTTGTTTTTCAGAGACTGGCTTCTACA
CTTGTTTTTGAGCATGTTTTTGAGGCTTAGCATGTATCAGTGCTTCGTTTTTATTGCTAAACAATATAGG
TAATTGTATGGGTATACCACGTTTAAATTGTACATTCATCTGTTGGACATTGGGGTTGTTTCATTATTAT
GAATGATGTTGCTATGAACTTTCATGTACAAGTTTTTGTATCAACATTTCCAATTCTCTTGGGTATATAC
TTAGAGATGAAAGGCTGTATCACTTTGAGGAACTGCCAAACTCTTCTAAAGTAGCCTCACCATATTATAT
ATTACTATTCCCACCAGCAGTGTCAGAGGATTCCAGTTTCTCCAATATCCTTGTGATCACTTGTTTCAGA
TTGGTTCTAGTCTTCCGAGTGGGTGTGAAGTATCTCATTATGGTTTTATTTTGCATTCCTATAATGACTA
GTGATGTTGAGCATCTTTAAATGTGCTTACTGGCCATCTGTATGTCTTTGGAAAAATGTGTATTCAAATC
CTCTGCCAATTTCTAAATTGGTTTACTTATAATTTTATTGTTGAGTTGCAAGTGTTTTAAATTTCAGGTG
CTACTTCTTTGTCAGATACATGAATTGTAAACATTTTCTCCTACCATTTTTCCCTTTCTTAGAAGTGTCT
TTTGGAGTACAAAATTTTCAATTTTGATGAAGTCCACCTTTTCTATTCTTTAGTTGCTTGT

[0147] An exemplary DNA sequence is human Rab6b provided below.

gi|224589815: c133625432-133532336 Homo sapiens chromosome 3,
GRCh37.p13 Primary Assembly
(SEQ ID NO: 312)
ATCACAAATTCAATTTAATCTTTTAGGCCACAAACTGACAATATTATGAGTATATTTATATGATTATATG
ATTAGCATCACATGGTATTTTAGGCAAATACAACACTTGAAATCACTGCAATGGCAACAGAGGTAGCTAT
GAAATTATTACAGTAGTACAGTATGTACTACAGTAATTATATGCAGTTATGATTTAACATTATACCTTTA
CATTTGTTTACATTTCTCTCATGAACCTAACGTATACTGTTGTAAGGTTCTTGTACTATAGGTAAAGTGG
TATGATAGTATATGAAGGTAGGCTATGCTAAATCAAAGATGCATACTATAAACCCTATTGTAACCCCCAA
AATAACACCACAAAGTTATAGCTAACAAGCCAACAGAGGAGATAAAACAGAATCATAAAAAAATGCTCAA
TCCAATAGAAGGTAGAAATTGAGGAAGAAAGGAACAAAGAACAGATTAGACAAATGGGAAAAAAATAGCA
ATTGATAAATTTAATTAAAGCCAATACTATCAATAATCACATTAAATGTAAATTTTCTAACCATTCTCAT
TGAAGGTGATATTGTCAGTTTAGACAAAAAAGCAAGACCCAAATATTAATATATACTGCCTGCAAGAAAC
ACGCTTTCAGAAAAATTATATAAATAGCTTAAAAAGGGAAAGATTGGAAAATATACTATACTAAAACTAT
AAAAAGTTAACTGTAGTGACTATATTTATATCAAAATGAAATTTTAAGGAAATAACATTACCAGAGATAA
GAAGGGTCATTTTATAAGGATATAGGGGTCAATTTTAGGTAGGAAGTGGGACTCAACTTCAGAGGGTTCA
ACATTGGACCAGATTGAGGACTAGCTAAAACATAACCCGGGTGAAAGCAGCTTTCAATCAGACCCACCCA
CCAGTGTGCCATGTCAATTTACTGTTGCCATGGCAACACCCGGGCGTTACCACCCCTTTCCATGGCACCC
AATGATTCAAAAGTTACTACCCCTTCCCTGCATAAACCACCCCTTAATCTGCATGCAATTAGGAGTGGGT
ATAACTATGACTGCAAAACTGCCCTGAGCTGCTACTCTGCCTTTGGGACAACCCTGTTCTGCAGGACCAG
TCATGGAGCTCTAACAACACTGGAGCTGTATCACTGCCTGTTCAATAAAGCTGTTTTCTTCTACCTCTGG
CTTGCCCTTGAATTCTTTCCTGGGCAAAGCCGAGAACCCTCACGGGCTAAGCTCCTCTTTCGGGCTCTCC
TGCCCTGCATCAAATTTATCAAGAGAGCATAAAAGTTCTACACCTTTATGCAGCTAATACCAAAGTTTCA
AAGCACATGAAGCCAAAATTGATAGAACAGCAAGGAGAAATAGACAAGTCCACAATGATAACTGGTGATT
TTCAAATCCCTCTCTCAGTAAGTAATAGAAGTAGAAAATCAGTGAGAACATATAAGACTTAAACAATACA
ATCAGCCAACTTGATCTAATTTATATTTGTATAACATTTCACCTAACAGCAACAGAATACACAGTCTATT
CAAATTTACACAGAATATTTACCAAGATGTACCATATTCAGGGACATAAAGCAAGCCTGAATAAATTTAA
GGGATATAAATCGCAAACTTTGGTGTCTGATCACAATGAAATAAAATCAGAAGTAATAACAAACTATTTC
TTAAACATCTCCAAATATTTGTAAAATAAATAACACTGTTCTAAAAAAAAAAACCACCATAGATAGAAGA
ATAAATCAAAATTAAAATTATAAAAGATTGTGAACTGAATTAAAATGAAAACACAACATATTAAAACTGG
TGGGATGCAGCTAATACTTGGAATGTAATTTAGAGCAATAAATCTGTATATTAGAAAAGAAGGAAATTTT
AAATCAATAAATCAGCCTCCACTATAAGAAAGTAGAAAAATAAGAACAAATTAGACCCAGAGTAAACAGA
ATAAAGGAAATAATAAAAACAAGAACAGAAATCAATAAAAGAGAAAATAATAGAGAAAATCAATAAAACC
AAAAGTTTATTCTTTGAGATAATCAGTAAAATCAATAAACTTCTAGACAGAATGTTGAGAGAAAAAAAGA
AAAAATACACAAATTACCAGTATCTGGAAGAAGAGAAGTGATATCACTACAGGTTCTATACATATTAAAA
GGATAATAATATTTGAACAGTAATATTTGAACAGCTATATATCAATAAATTATACATCTTAAATAGAGAA
ATCCCTTGATAGACACAAACTGCCAAGACTACCTTAAGAAAATACTAGATAACCTAAAGATCTAATATCT
ATTGAAGAAATTTAACATATTTAAAAAACCTTCCCACAAAGAAAAGAACGAAATGGCTTCCTTGGTTAAT
CCTACCAAATTTTTAAAAACAGTAATGCCAATTCTACACACTGTTCCAGAAAACTGATGAAACCATAACA
CTTTCCCAAAAGGATTTGTGAGCAGAATATATTAAAGAATTCTCAGCTGGGCACAGTGAGTGGCTCATGC
CTGTAATCCCAGCCCTTTGGGAGGCTGAGGTGGGCGAATGGCTGGAGCCCAGGAGTTTGAGACCAGCCTG
GGCAACATAGCGAGATGTCGTCTCTACAAAAAATATAAAAATTACCTGGGTGTGGTGGCATGCATCTCTA
GTCCCAGCTAGTTGGGAGGTTGAGGTTGGGGGATCACTTGAGCCTGGGAGGCAAAGGCTGCAGTGAGCCC
AGATTGCACCACTGTGCTCCAGCCTGGGCGACAAAGAGAGACCCTGTCTCAAAAAAAAAAAAAAAAAGAA
TTTTCAAAACCAAACAATAAGAAAACAAATAACTGAAACTGAATTGGCAAAGTTTTTAAACTGTAACTAC
AATCAAATAAGATATATAGATGGCTAATAAATACATGAAAAGATGCTTAATACCATTACTCATTGGGAAA
ATGTAATTTAAAATCACAATGAGATACCACTATACATCTATTAGAATGACTACAATTTTAAAAACTGATC
ATATGACATGATTGTATATGTAGAAAATCCAAAAGGAATCTATAGATAACCTACTACAATAAATAAGTGA
ATTTAACATGATACTGGATAAGATCAATAAGATCAATCCATGATAAGGCCTCTACATAAAATTATAAAAC
ATCACTGAGGCAAATTAAAGATACAAATAAGTGGAAGCAAATACTGTGTTCATGGGTTGAGACACTCAAT
GTCATAAAGATGTCAACTTTCCCCAGTCTGATCTATAGAGTCCATGAAATTTCAATCAAAACCCTTTCAG
AGGAGTTTGTAGTATGTGTGTGTGTGTGTGTCTGTGTGTGTGTGTGTCTTTGGAAATTGAGACTCTGCTT
CACAAACGTATTTGGAAAATATAAAAAAGAAACAAGACAATTTTTGAAGATTAATTTACACTACTTACAA
CATAGCTATAGTAATTTAGAGAGTGTGGTGTTGGCCCAATGAAAGTGAAACAGACTTAACGGAAAAGAAG
TCTGGAAACAGACCACTTATAGTCACTTGGTTTATGAAAAAGGTACAACTGCAGTACCTTTTGCAGAAAA
GGATGATAAATGTTGCTGCATCAAGTAGATATCCTTATGGTAAAAAGTGGATCAATTTCAGGTGTTCTGT
AACCTGAATATGAAAGGTAATACAATGTAACTTCTATTAAATGAAGTAAAATATTTGCATGATCTTGGAG
TGGGCAAAAGTTTTTTAAACAGGACACAAAAAGTCCTAACAATAAAGGAAACAATACATTTGACTACATT
TAAAAAAGAATCTGTTCATCAAAAGATATCATTAAGAAAGTAAAAAGGCAATCCAGATTTTAAAAAGATT
CTTGTCATACATATTATTAAAAATACCAGAAAACATAATGTACTCTGCATGGCAATAAGAAAAGACCAGA
AAACCCAATAGAAAAATGTGAAAATACTTGAACAAACACTTCCTTATGAGAATATCTAAATGGATAATAA
ACATAAGATTAGGTGCTCAACACTACTAGTTGTCAGAGATATGCAGATTAAGACTACTGTGAGATATCAC
TACAAATCTACCAAAATATCTAAAATTAAAAGACTGATAAAATAGCAAGTGTTGGCAAGGATATGAAACA
CTGGAACTCTTACATACAACTAATGCTTTATATGACCACTTTGGAAAGCTGGAAATACCTACTAAATCTG
AAAACATACATGCTTCAGCAACCCCACACTTAGGTGTACCCAGAAGAAACATGTACATATGCTCACCAAA
AACATGTACAAGATTTTCATAACAGCAAAATTTGTAATAACCAAACACTGGAAACAACCTAAATATTTTT
CTACAGTAGAATGGACAAATAAACCGTGATGTATTCATACAATAAAACACTATGCAGCAGTGAAAATGAA
TTTACTTTGGCTACATGCAATACTATGGCTGAATCTTACAAACCCAATACTGAACGAAAGAGATTCAAAA
GAGCACATATTGTTTGACTCAACTCATCTAAAATTCAAATATGGGCAAAACCAATCTATGCTGATGTATC
TGAAGAGTTATTTCCTTTGTGGAAAATGCAGTGTAATGACTGGGAGGGGTATGATGGAGACTTCTGGGGT
ATTGGTAACATTCTTTTTCTTGACCTGAGCGGTGGTTACCAGGATATGTTCGTTCATTCTATTGAAATTC
ATTAAGCTGCGCACTTGTGATTTGTTGACTTTTATGCCTGTATGTTATGTTTAAATATAAGTGTGTATTA
AAATGTGTGTGTGGAAAGATGAAGTAGGGATACTTTTCCCTATTCCTCCTATTAAATATAACTGAGTACT
CCGGATATTGTGAATAAAACAAACATAAGAAAACTCTGAAAGGTGCAGAAAAGAAGGCAGAACCAGTTAG
AGACCCTGGGACCCAAGGAATGAAACAGTGATGAGCTTTTTGGTTTTTCTTTTTACTTCATATATATCTG
GGTCTTGGAGCTGAAGATGGTGGCAACCCAGACACATCAACAAGCACAGGCCCAAATCAAGCCCCAATAA
AAGCTTGATCTCTCTAGTCAAAGGACCAGGAAGGGTTTGTTTTACTCCAGCCAAACACTACAGAAAAAAC
TGTGCTGTTCCCACCCCACACCTACCTAGCCAGCAAAGTCTAAGTGATGAATATAGACTTCTAGCATTGC
CAGGCTATATCAAGGTGCCCCAACTCTTTGGCTGGGATGGGGGTATCACAGAAGGTCAAGATGGGAGCCA
GGACTTTTGCCTCCAGTGGGCAGTACCAAGGCCTCCCACCTGCAATGTCAGCGTAGACCACATGGGGAGG
CTGGACTTCTACCACCACCCCACAGTAATGAGGACCAACAAATTTTTGACAAAGGTGCAAGAGCAATTCA
ATAGAGAAAATATAATCTTTTCAACAAATGCTGCTGTAGCAACTGGACATCCATGGGCAAAAAACCAAAA
CCAAACAACAAAAAAACCCCTCCAGCCTAAGTCTTACACCTCACACAAATGTAACTCAAAATGGACCATG
AACATAAATGGAAGACATAAAACTATTTTTAAAATTTTTTCAAAAAACATGGGAAAGTATCTTTGGGACT
TAGGGCTTAGTAAAGAGTTCTTAGACATGGCACCAAAAGGCACAATTCATAAAAGAAAATATCAGTAAAT
TAGACTTCATCAAACTCAAAAACTTTTGCTTTGAAAGAGACCTTGTTAAATTGCTCGGAGTGGTGGCTCA
TGCCTGTAATCCCAGCACTTAGGGAGGCTGAGGTGGTAGGGTTGCTTGAGGCCAGGAGTTCAAGACCAGC
TTGGGTAACATAGCAAGACCTTGTCTTTATAAAAACAAAATTTAAAAATTAGCTGGGTGTGCTGGCGCAC
CTCTGTGGTCATAGCTACTTAAGAGGCTGAGGCAGAAGGATCACTTGAGCCCAGGAGTTTGAGGTTGCAG
TGGGCCATGATTGTGCCACTGCACTCCAGCAGAGTGGGAAAAAATATTTGTAAATCACATATCTGACAAA
GAACTAGTATCTAGAATACATAAAGAACTCTCAAAACTTAACAGTAAAGAAAAGAATCTAATTTAAAAAT
GGACAAAAGACATGAACAGACATTTCATTAAGAGGATATACAGATGGCAATTAATCACATGAAAATATGT
TGAACATCATTAGTCATTGGAAATGTAGATTAAAACCACCCACAATGAGATATTACTACATTCCTCTCAT
AATGGCTTAAAATATTGACAACAGCAAATGCTGATGAGGGTGAGAAGAGGCTGGATCGCTCATCCATTGC
TGGTGGGGAGTGGAAAGTGGTAGAACCACTCTGGAAAAGTCTGGCAGTTCCTTTAAAAAACAAACATGCA
TATGACCCAGCAAGTGCACTCCTGGGCATTTATCCTGGAGAAATAAAAACTTCCTTTCACACAAAAATCT
CTACATGATAGTTCATAACAGCTTTATTTGTAATGGCCCCAAACTGGAAATAATTTCAGATGCCTTTCCA
CAGGTGAGTGGTTAAACAAACTGTACGTCCATACTATTGAATGCTACTCAGCAGTAAAAGGGAGCTAACT
ATTGCTACAAACAATAACCTGGGTGAATCTCCATAGAATTATGTGAAAAAAAAAATAGGACATGCAGTGG
AATAGTAACCAGCAGGGAAAATGAAAGAACTGCTGCTACATGAATCAACAGATGGATCTCAGGAACATAA
TGTTAAGAAAAATGCAAGTCATAGGACAGAATATACAGTTTGAGACATTATATAAAATTCAAAAGATGCA
AAACAAAAAAGTATTGTTGGAGGACACATCCAAATGTGATAAAAACTCAAAGAAAAGCCACAGTTCTGGA
TTTTCAAGCTGGGGAGAGAGGGAGGGGCAGAAACACCTGAGGGCCTCAAAAGTACTGTAATATTTGAGTG
CTCCAGCCAGGTGAAGTGAAAAAAACAATCCCAAAGGGTGATATACTGTGTAATGCCACTTATATAAGAT
TCTTGAAATAACACATTTATTGAAATGAAGAACAGATTAGTGGTTGCCAGAGGTTAGGAAGGGGTTGAGG
GTGGGAGGAAAGTGGGTGTGGCTATAAAAGGGGAACATGAGGGCTCTTTGTGTGTCAAGGTACAGAACAG
AAATGTACCTTGACTGTCTTAATTCCAGTATCCACATTATGATACTGTAGTATAAAGTTCTGCAAGATCT
TACTCTTGGTGAAAACTAGATAAAGGATATACAGATCTGTCTTTTTTTTTTTTCCTGTTTGTGAATCTAC
AATGATCTCAAAAATTTAATTTAAATATATATATATATATATATAACACAGCAAAGGGCTCAGGAAAACC
AAGATCTTGAAGAAAATGAAAAATATAGATGATGCTGTAGTGCTATATGATCTAACGAATATCTTTGAAA
AATAGTTTGGCACAAAATTAAACGTACACTTGTTTTTATACCACAATTTACCTACTGACACATATCTTAG
AAAAACTTCACAGAGGCATCAAGAGACATGTAAAGAATGTTGATGGCAGCATTGTTTGTTAATAGCAGAA
ACAAAACTGAGTGCATTTTCCAATGTTAATTTCCTGGTTTTACTAAGCAATGTGGTTATGTAAGATGTTA
TCACTGGGGTAGCTTGGTGCAGGATACATAGTAACTCCCTGCACTGTTTTTTATAACCTCTATGTGAGTA
TAAAATTATTTAAAATAATTTTAAAAAAGGCCAGGCGTGGTGGCTCACACCTGTAATCCCAGCACTTTGG
GAGGCTGATGCAGGCGGATCACGAGGTTAAGAGATTGAGACCATTCTGGTCAACATGGTGAAACCTCGGC
TCTACTAAAAATAAAAAAATTAGCTAGACCTGGTGGTGCGTGGCTGTAGTACCAGCTACTCGGGAGGCTG
AGGCAGGTGAATTGCTTGAACCTGGGAGGCGGAGGTTACAGTGAGCCGAGATGGCGCCGCTACACTCCAG
CCTGGTGACAGACCAAGACTCCATCTCAAAAATAATAACAACAATAATAAAATAAAATAAAATAAAAATT
TTAAATGACACATTTTACAGAAAATCATTTAAAAATTGGGGCATAACTAGAATACTAACCAGCAGTGAAA
ATGAAAGAACTGCTGCTACATGAATTAACAAATGGATCTCAGAAACATGATGTTAAGAAACATGCAAGTC
AGGACAGAAAACACAGTTTGATACCTTATATAAGATTCAAAAGATGCAAAACAAAACAAAGTATTGTGAA
GGACACATCCAATGTGATAAAACTCAAAGAAAAGCTAAGATTCTGGATTTCCAAGTTGGGGAGGGAGGAA
GGAGAAGAAAGCACCTGGGGGCCTGAAAAGTACTATAATATTTGAGCCCTCCAGCTGTGTAGAGGGTAAA
TGGGCACTCAGAGTGATAGGTTTTCTTTGTAACTTACATATACACAGCACATACTAAATAGGAAGATTTA
AAGAATTTTTTTAAATGGAATGCACAGATTCTATGATATGGAAGAAACTCTTTCTAGTGAGGTTGCCAGG
CTGAGGTTCAGTGGCCCCATTTTCCACCTGGAGAAAGTCTGTCTGCTTTAGGGCAGGTTAAGGACAAGAC
TCAAAATCAGGGGAGATAAGCAATGATAGTTGGAGGAGAGAGACTTGGAGCAGAGCAAACTTGGAGTCTC
TAAGGCTCTCATTTCCACAGCATGATGACTGCATTCTGAGAGCAATGCCAGTATCTGCTCCAGCGACGTG
AGCCCGGTAGTCGGAGCCGGGTTTTTGTCATTTGAACTGGAAGAATTATGACAGAGTCCCCCAAAGTAAG
CTGGACCATAGTCAGCCCAGCTGGACCTGGTAAGCATATGGGATGACTTGGAGGCTTAGAGGTGCCCAGA
GGGGCCCTGCCCCAGCCCTCCCTCCCCTACTGCCATACCACCTTACATGTGCGGGACCAGATGATCAGAG
GAGGTACAGGACCTGCCTAGGCTTACCCAAAAGATGGTGCCTTTTCTGGCACACCTCAGCTGTTTTGTCT
TGCCACCGATGATCTCATCAGGTCAGGATGAGAGGGTACAGGGAGACAGCACTAGATGTTAGGAGAAGGT
GCAGGTTGGAGGAGTGTTGCATGGCTGGGTACCTTGGCCAGTAGCTCACTGGCCCTTCTTTGGAGGGATC
ACTTATAGAGACGGGAAGGGCTGTGACTTGGGAGTCTCCTCTCCTTTCAGAGCTTTCTTCAACCCCAAGC
TGGATATGGTCTCCTAAGAGAGCAGGAGCCCCAGAGAAGTGGGTGGGTGTCTGGAGGGTTACCCTGAGCC
TGGTGCCAGCCACAACGGGGCAGATATTCTAGGTGATGACTTACAATCCCTGGGGTTCCAAACTAAAGGT
AATTATGAGAATAGGACAGTTATTTTGATTTGAGTTCTAGATGTTCATTCAAACATTCAACAACTATTTC
TTAAACTCTGAGCTATGTCCTTGGGATGCAGTGGTGGAGCTTCAACTACTGCTTTTATGGAACTTGTGGT
CAGGTTTCTAACAAGAAATAGGAAAGAGATTCGAGGTGAGCACACCAGGGAGACAGATAGGCTTGCCCAA
GCAAGCCCCATAAGTCAAAAAGGGGGTAACAAGTGTCCACGAGAAATCTGGAGGTGAAGGTTGTGTCTCA
CTCCTCTTTCTCTTTCTATAACACATGCGTGCACACACCATCGTGTTCACCGACATGCAGATTATTATCT
CAAATAAATGCTCACTGAACAGCCATAAATGAACAAGACCACGCTGTGGCAGAACAGTAAGGGACAGCTT
TGTAAAACCTCAATTAACCAGCATGCCTTAGGCTCGGGCTGTCTTGGGAGTGTTTCTAGCACTTGGCGTC
TGCTCTTTGCTCTCACTCACTCACAACTTGGTCTGTGTGCCTCGATGGACCAGGCAAGTAGAGGCCAAGG
AGAGGTCGCCCACATGTCCTCAGATAGCTCATTGTCCAGATACACCTAATTGCCAGGGTGGGGAGTGGCA
TTGTCAGCCTGGCGACCCCGGGATCAAGAAACGCAGGGCACTGTCCTGGAGATAGTGGCACTGGCATTCA
GAGCGTCACCGTTCCTTCTCTCCCATGGGGCAGGTTAGGATTTGGCATAAAATGATCCAAATGAGCAGCT
GGTTTGAGGTAGGCGCGCCTGATATTGGCAGCTCCTCTCTCGCTGGCCAGGTCTGCGGGGGCACCCACAG
ACTCCACAAGAGGCCGCCCAAATAAAGGGTCTAGGCCTCGAGAGGGAAGGGCGGGCTAGAAGCCACGGGG
GGCAAGAGTCGAGCCCCATCTGCGCCAAGTACGCCAGGTTTCCCTAGGTCTGACCGCCCTGACGGGCCTC
GCCACACCCTGGCTCTCCCCCACCTTCGTTCCTTTCCGCCCTGTCGGTCGGACGACTGCGCTGTGCATCG
GTGTCTCGCGAGGTGGAGGAAGGGACTGGCATCTAGGTTTAAAAGACCAGAAACAAATGTCCCCTGACAA
TTTCTGTCATTTTCTGGATTCAAAAGAGGGGTAGAGTGGGGAAGACAGACGCAGCGGGGCAGCGAGACAC
GGTCCCCCCCGGGGGGCTCTCAGGGGTACGGCGAGGAGGTTCTCTCCTGCCCGGGTGCGGGCTCGGGTGG
GCGGGCGCACGCCCCCCAGCCCCGCAGCCCCGCGGGCCCCGCATGACATCAGAGGCTGGGGAGCGCACAG
AGCGCAGGCGCCGGCGGAGGAGGCAGGCGGGAGGGGGCCGACTGGCGCGGCTCTGGAGAGCGCTCCTCCG
CCCCGCGCGCCGTCCCTGCGCCCCGCTCCGCCCGCGCCTCTCTCCCAGCGCCGCGCCTCGGGCGTAAAGA
GCGCGCCCCTCGCACCGCAGCCAGTGCCGACCGCAGCAGCCCAGCCCCAGCCTTCCTCCGCCTCCGCCTC
TCTCTCCTCCTCCTCCTCCGCCGCCGGACACGCAGCCGCAGGCCGGGACCGGGACGCAGCTGGGGAGTCA
GGGACGCGCGCAGCCAGCCCTTCCCCCTCCGGCTCCCGCACCGCCGGCCGCCTCCCCTCGCCCTCCTACT
CTCCCCTCCCTGCTCCTTCGCTTTTTCCTCCTCCTCCTCTCCCGGCCCCGGCTGCCAGCACCATGTCCGC
AGGGGGAGATTTTGGGAATCCACTGAGAAAATTCAAGTTGGTGTTCTTGGGGGAGCAGAGCGGTAAGTAC
CCGGCTTAATCTCTTGGCTTGTCGCCGAGTCGACCCCCGCCGCCCAATCGCCCACCCCATTGGGACCCCC
GGCCCAGGCTCGGAAAGGCCCCTCCTTGCCAGGGTAGAGGAGAGGGACAGGGATGGGGAGGTCGGGGCGG
GGTCGGGCTGGGGAGGGGCCAAGGGTGAGGACGGAGGAGGCGCTGGAGCCTGGGGTGGAGGTGAGGGTGG
GCTCTGGGTGGGGGGCCCGGGGTGTGGGTGCAGGTGCGGCGCTGCAGGGGGCCCGGAGGGCGGCGGCTGG
CTCCGCGGCGCTGGCCAGGGCGTGAAGGAACCGGGCTCGCTGGCTAGCTCACACTGCGGCACCGGCTGCG
GGCGACCGCGCAGGTGGCTGGGTGCTGGCGGGGGTGGGGAGAGCGACGGGCGCCCCCCTTGGAGAACGAA
GCGAAGCTGGGGTCTGGCCGGGCCTCACTCCGCTGCACTGGAGGGGTGTTCCCTGCGGACCCTGCTGGGA
ACCATGCGAAAGGGCACGTCCAGGGCGTGGGACAAACAGCCACCGGGGAGAAAAGAGCGACACCTGTCTC
TGCTCGAAAGAGCGAGTGCAGGCCATGGGGGAACGGGGAGCCTACCTCCCCTGGCTCACGTCCGACTGGG
CACAGAAGGTTCTAGACCCGCTGCCCTTCGCCGGCGCTTGTTAGTCTCCTTGCTGCCCAGGGATCTGGGC
AATTGCAGTGAGGGCTACCCCAACTCGAGGCGATTTGGGGAATGATACAGGGGCACCTCACACCGAGAGG
CTGTGAAGTCTGGCTCTGGGCAGAGAAAGGCCCAGGCGACACGCCCTGCCTAGCTTCCCAGCACTCCTCC
AGAGAGCATCGGTGGATTCTTCCCACCCCCACCTCCCAGCTCACCGCCCTTCTTGGGGGAGGGGAGGTCA
CCCTGGCAGTCGGCCAGAGCTGGGGGAGGGGGAGACTGCTTCTCCGCTGCCCGGCTCCCTCCCCAGGAAA
ACATCTCTGAAAACCAGGTTAGTCCCTAGAGGCGGGAAGCCCAGATTGAAGGGCAGGGACCCCTCTGCCA
CCTGTAGGAAGGAGTGGCTTTCAGAGCATCCCTCCAGAGGCCTCTCGCATGGGGCTGCAGGGAGACAAAC
TGAGCTCTGGTCAGCTCTGCTCTGGGAGAAGGCTGTCCTTGCGGGACAGGACCCCAGCTCTGCCTCTGCA
GACCAGTCCTGTTCACCTGGGTTGGTGCCTCTCTGACAAGGGGGCCCAAAAGAAAGGCAGCTGTGGGAGG
ACTGGGTGGGCCCAGGAACAGTGCTACTGTGCTGTGTGTACATGAGGGTTATGGAGGTCACGTGGCTGGC
TCTTGTCTGCTGATACTCATTGCCTAAGATGGATGGTTCAGAGAAGGACGTTAGAAGGTAGTGTCCAGGC
CCAGTATGGAGATGGGTTTGGGGGACAGGCTGGGCATTTCAGAAGAAGATCCACTCAGCCAGCCAGCGTT
TGCCCTGGATTCTGATTGCCTGTTTTTAATAGATCCCAGTTTCATAGAGCTGACCATACCCTGTGTCTGG
AAGGGATTTTGGTGGTATTCACATCCCAGTGCTAGTCTCACCCGGCCTGGAGCCCTGGGAGATAACCTGC
AGGGATCAGGCAGCCTGGGGGTTGAATTCTTAGCTGTGTTGTCTTTAGTAAAATTTGAGGCCTCTCTGTG
ACTCACTTTCTGTCTCTGAAAAATGGTTGCTTGAAGACAATTCTCTTACTTCTTCATGTTTCTTTAGTGC
CTCTCAAAGTGCCTGGCCCCTGGTAGGTTCTCAGCAAACATTTGTTCTAAGTCTGCACAAGCTTCAGAAA
GGACTAGGAGTTTGGTGAAGAAAGTGTCTCTGGTGAGTTTGAGGGAACATCTGGGCTCCTTCAGAATCCC
TGATGAACGGAGGCCCCTGCTGGGCTCCACAGACCCCCTTTGCTCCCAAAATCACAGAAATGAGAGCTGA
AGCCTAAGAAATGAACCCACCACCTCTCCCATATGTTCAAATGGGAAGTCTGAGCCCCAGGGAACAGGGA
GGCCTTGCCTGGAGTCCCAGAGTCCCATTGTGAGTTGCTAATGCTTCTGGGCTGGAGCCCCACCTCTCAT
TTCCAGTCCAATATTTTTCACTAGCGTGTCATTGTGAAGTAAGATGACCTTGAATTGGGGAAGCCAACAA
CTGGGGAGCCTCCCCAAGAGGGAGTAAGGGTTGCTTCTGTCCAGCCAGGCTTATAGTTGGGGCTTGTGAC
TGGTAGGAATGCTGAGTAGTTGGTAAGGAGCAGGGTTGTGAGCCCTTGGAACATGGTCATTAGAGAGTCA
CTGCTATCAGTGAGATGGGCTGCTGGCCACCCTGGTGCCTTCTGTCAGGGAGTCCCAAGGCCCTGAAAAG
CCTGTTTCCAATTTGTTGCATTGTTAGTGGGTTCTTTTAGGTTTTACACAGCTTTTGAGTTAGGTAGGGG
ACATGTATGTGCATCTCTAAGCCTTATGGGATGGGGAGTCACCTCCACAGCCGCTTCTTCTACCTTGCCT
GCACAGTTTTGCATCTGTTGGTCATTTGTGCCAGCATTCTCTGCAGCCTGTGCAGTGGAGAGAGCCACCT
GAGGGCTGGCCCTCACGCTGGCCCTGGCTCGCTCTTTTTATATGACCTCAGAGGTCCCTTATCTTCTGTG
CATGGGGGACTTGGGCCAGCTGAGCTCAGCGGAGTCTTTCAGAGCAGCATGGGCTTGCCGATATGAGCCG
AGTGCCCTGGAGATGGGCCAGGGGAAGGAGCTGGAGGGATGTGGCTTTATCTTATTTCCTGTGCCTAGCA
TAATGGTGGCATTTCTCTAGCCTGGTGGGCAAGGGCAATGGATTCCCAAGAAGAGTGGCGTGCATGGACC
AGGGTGTGGAGCACACCCTGGGCCAGATAATCGCAGGTGGACATCAGGTCTTTGAAGATACCAGGGAACT
GGTTTGAATGGGAGGCCCTTGAGAAGCCACTCTGGAGGAAATACCTCAAGCCAGTGAAAGAGCCCCCCTC
CTGGCAGCTGTCCCCCTGGCCTGTGGAATATAGGCTGGCTGACAGTGTCAGCTTGGCACAGGCTGGGATT
GTGGGGAGGGTGCTGTGGACCCAGGATGAGAGATTTCCTTGTGGCAGGGAGGCTGTGGAGTCCCCCTGGT
GCCAGATGGCTCTCTGGGCCTATTGGGTATGCCCCTGTGCTGATGGCAGTGGTAGGAGACATGGGAGGGT
GACATATGTCAGTCCCGACTGGGGCATTTGATGGCGTCCGAGAAGACAAGCAGGAGCAGGTGTTTGAGGA
GGGGAGAGTGGGCCTGTGGGACCCACGTCTTCCTCCTAAGCTCTAATGGCATTCTGTCGGCTTTTAGGCC
TCACTTGGCACATCTCAGTGTGTGTGGTGGGAAGGGTCAGGGATGCGTCTGCTGTGCACTGTCTTCTTCT
GACCTCCCCTTCCCCAAGACTCTTCCAGCAAAAGCAGGAAGACTGGATGGAGACGCAAAAGCTCTGTCTG
CTTTCCTAGCTGAGGACGGCAGGCCAGTTTCTCGCTCTGACCAGCCACCTGCCTGCCCTGCCCCTGGTAT
TGTGCTGCTGGAGGTGCTGTCCATGTTGAGCATACTGTGAATAGCATTCCTTGGAGCTGTGCAATGAAGC
GACTATGCAGGCAGCTGCCTTTTTGTTGCTCAGTTGTTTAGTCATTTGTTCATGTATCCTTCCGTCCCAC
TCCTTCTCTCTCCTGTCCTCCCTCCATTATCTGTTTATTTATTTATTCTTTGAGCGTATTCCTGCCCTCC
TGGAACTTATAGTCCACTGGGAGCACAGACATTTGTGGATATAATTACAGTAAAGGTCTATGAGAGCCAT
GATGAGAGAAGAACAGCTGCTACTGGGGCCTAGAGCAGGGGCGCCTGACCCGCCTCTGGGGGCTGGTGTC
AGAGGCAGCTTCCGTAGGCTAGCAAGGGATGCTTCTATAGGCAGTAGGCTACTGCTACTTCATCTTTGGG
CTGTGTGTAGAAAGTAGGTCTTGGAACAAGCCCACCCTACCCAGAGGGCCTTGCCTGTTCTTCTGCTCTG
CCCTGTAGAAAGTGTATGAGGTGGAGGTTCAGAGGACAAGGGTGACTCTCAGGTATCTGGCTTGGTGGTA
CTGAGTTGGGGCTGTCCCTGTACTTTCAGCCCATTCCTCTGTGGTTAAGGGTTAATGATCATTCAGTGGC
CCCCACTGCCTGGAAGGCTCACTCCTCTGCCCGCAGCCTGACCCATCCTGACCCCTGCCCTCCCACTAGC
CACACCATGGAACACCTGCCCTCCTGCAGGGAGCCCTTCATCAGCCTGGTAGATGTGCCAGCAGCCCCTC
CTAGCAAGTTTCCTCCTCCCACCAATTTCCAGACTTACCTGCTCTTAGGTGCTCACTTCCACTCCTGCTC
CCCTGGGCTACCAGCCCACCTGGCCACACACCATGGCATAGCTTTGGTTTTCTCTGAACATTTCTTAAAT
ACAATACAATCATATGCTTCCCCATGACCTGTCTTCTGTTGTCTCTGTTAGCTAAGGATTTTAAAATGTT
AACTTTTTCAGGTACAAAAACCGTAATTGAATTTTAAGCATCTTCTGAGGTCTATGTCTTAGTCATCATT
TCACCCCTCCCCACCTGCAGGTAGTTTGTGCTTATTAAGTATCTTGATTTGAAAATGATGAGATTATCCT
TGCTGTGTGAGATTTGCTGATGGCCCATCAGTAGATTAAAAGTGAAGGAAGTTGAGGTGGCTTGAAATAG
GATTCCTATTTCAAATTCCTGACACCTGCTGCTTTTTTAAGCCAGATTTTTTACCAGCAATATCTTAAGA
ATCTTGGCTTACTGCAACCTCCGCCTCCCGGGTTCAAGCAATTCTTGTGCCTCAGCCTCCCGAGTAGCTG
GGACTACAGGCCCACACCAATACGCCCGGCTAATTTTTGTATTTTTAGTAGAGATGGGGTTTCACTATGT
TGGCCAGGCTGGTCTCGAACTTCTGACCTCAAGTGATCTGCCCACCTCAGCCTCCCAGAGTGCTGGGATT
ATGGGTGTGAGCCATGGTGCCCAGCTGGATCATGTAACCTTGGTCATGCGCAACTCACAATTCATCTCAA
AAAACCTGAAGTTCTTGGGGGGCACTTCCTCATTCCTAGTCTCTGAAGAAATACATGAGAACAACCAGGC
CACCAGAGGTGGAAAGGGACACACCAGACCTCAGCTTGCCAGAGCTCACTTTGACATCTGGAAGAAATCA
CCCTGTTGCCCTGAGCCTTAGCTTCCTTCTCTTGATTTCTCTCCTCCCAATTTTTCTCCTTTCCTCAGTG
GCTGGCATAAGAAGGGGCACCTTTGTGGAGGTTGGGTACAGGCCCAGAACCTTTGCTTTTTTATTTGTTT
AAACAGATGTGTGTGAGTGAGAGAGTCAGACAGACACCAGGATGAGAATTAACCTGTACTTGGTATAAGA
GGAAGGTGGCACCTTTAATCTGATGATGCATAGCAAGAGAACTTGCCAGCAAAGAAAAAAGAAACTTAGA
ATATGTTCTGGCTGCGTAGATGTAATAATAATTACTGTCTTTTGCATGATCTGATGATCATTATCATTTG
CAGCCCCCAGATTATAATGAATCACATTAAATTATAACAAAATAAGGCTGGGCGTGGTGGCTTACGCCTG
TAATCCCAGCACTTTGGGAGACCAAGGTGGCAAGGTGGGTAGATCACTTGAGGTCAGGAGTTCGAGACCA
GCCTGGCCAACGTGGCAAAATCCTGTCTCTACTAAGAAGTACAAACATTAGCCAGGCATGGTGGCGCATG
CCTATAATCCCAGCTACTTGGGAACCTGAGGCAGGAGAATCGCTTGAACCCGGGAGGCGGAGGTTTCAGT
GAGCCGAGATGGCACCACTGCACTCCACCCTGGGCAACAGAGCAAAACTCCATCCCAAAATAAATATATA
TATATATATATATATATATATATATATATATATATATATATATATATATAACAAAATAACCTTATTGTCC
TTTTGTTCCTTATTCTATCCCTAAAATCAGTCTATGACTATCTTTATAGATGTTGCCCCGACATTGCAAA
CTTTGCAGACTGGCCGGGGCCAGGCCCAAGGGTGGTAACATTTGTATCCCATCCAGGCTGCAGATTTCCC
CTGTCCTCCCCACCCAAGTCGTCCATTGTTGCCGAATGCATCGGCCATTGAATGTGTAGGGCTGTCTGGT
TTCAGTGTGGTTAACTTTGGGAAATTATTGGACAGAACCACTGGGGAAGGTGACAGAAGGCTAGGTAGAA
CAGCAGAATTCATAAACATTCAGGGTGGACTACCGGGAAAGCTGATGGGCATTTTCTCTGCGTCTGCCAT
TCTTTTCCATTTCTCACCACAGGGAAGAGAAGCCGAGGGAGCTCTGGTGGAGGTTGCCAGGGAGAAGTAC
CAGACACGCCCTGAAATGGACAGCTTTTGTTAGGGTGGAAAGACAGGCTGCCAGGAAATGGGGCTCCAAG
CAGGGCCTGGGGACTGGAAGCCCCTGGGAACTTGGAATGCCAGTCCAGTCTTTGTTTCCTAGAACAAGGG
AAGGAAAAGATGAAGACTCACAACTCTTAAGGACTCCTAGGATGTTCTTTACCATATCTTGGGGCTTGAG
ATTTCAAAATTGTTTTCATTATTTTCATAACTTTTGCCCTAAACAAAGTAAGATCTTTTTAAAAAATATT
GACTGATATACATAATTTAGCATTTTAATAAAGTGATTTATTTTTTGTAGAAAAACTTATTTATTCTGAT
CTCTTGGTAACAAGGCCAGAGGGAGCCCAGGTGACCAGATCACATGCTCTGGGCCAGCCATCACCTGTCC
CAAGGGGCTGACATACCTAAGGGACAGGCCCAAGTCCTGAGGAGGCAGATGTTACCTCACCCCTGAGGGC
AGAATAGAGCTTTCAAAGCAAAGGTTACTTCCAGGAAATGCATAAAAAGAATGGCAGCCTGTGTCCTTCC
TCACATGAGTTCACTCACGTGGCATTTATTGAACATCCACTATGCCGGAGGCTCCACACAGGGCACTTTT
TATCTTCCCAGCCACCCTGTGACGGATGTGGGATCATCCCTGTTTTGTGGGTCAGGAGGCAGAGGCTCAG
AGAGAGCTGGCCCTGCCCAAGGACTCACTGTGAGTGTGGCAGAATTAGAATTCAGACCCAGGTCACTGTG
AGAAACACAGTGGACTATCAGACCTCTTGCCTCAAAGGCAGCTTCTGGCCTAGGACTGGAGCGGAGGAGA
CAGAAGAACACTGAGGTCTTCTGGACACGAGGTCTGCTGTGCATGACTCGTGGGGAGTGTTTGTGCCAAG
CTCTTTGCTAAAGAGGAACCTGCGGGGCCCTGAGCAGGGAGGAGGGAAGCAGGGTCTCCGTGTGGGAGCT
GCTGGAGCTGGTCTTGCACAGCAGGCACCCTGTTCTTCCATTTGTGGTGCTTTGAAGGGAGTTGATAGAG
CCTATGGGGGCAGCTAAATCCCTCCCAAGTCAGCCCTCAGCCCACTGCCATGGTTCTAGCTGAGAACTAA
TTACTAACCAGGGAAGAACCAATTAAACTAAATGGCTGGTTCCCACCTACTCTGGGGTAACCCTTTCCTG
GCCACATCCTCCCTTCTGGCTTGGAGATACCAGGGCCCTGAAGACCCTGATTCTATTCCCGGTCTGTCAC
TGGCTGGCTGTATGTTGGATAAGCCCCAGCCCATCTCTGGCTTTCTCCGTGTATCCCCTCAAGGCTACTG
GGCTGGGTGACCCCTTGGGCCAGTGGAGCTCTAACTCTGGTTCTGCAATTCAGTGCCAGCTCTGAGTATG
AGGCCAAGCCAATAACACTCCCAGCCTGGAGACAAGCATGCTGCTGGTGAGAGGGGCTGCAGGAGTGAGA
TGGGGGATCAGGGGCTCTGCGACTGTTGCCCCCAGAACTGTCCTGGGTCCCACATGCAGGATCTTCTCCA
GCCTACCACCTCCTCTCCTGGGAGGCATTCCTGGCCCCCTACACCTGAGTGCAACCCTCCCTGGGGGCAC
AATGTGGGGGAGGGGCATGCTGGCTCCCTTCTTCTGAAGATGTGCTTGGCTCTGGTTGCCAAGCAACAAG
GATGGGGCTATCCTGCACTTCTGCTTCCAGGAGGTGTGTCTTCCACACAGAGAGGAACCATGATTAGGAC
GACAGGGCAGGTGACACCTCCCAGGTGCTCCTAGCCCAGGGGCACCCCTTTCCACAGCCTGGTGGGAGGG
GTAAGCTGGGAGGGCAGGGAAAGGACAGAGCCAAGAGGGGTATATGGTGTCCCCAGCAGACCTAGGAGGG
CTTAGAGACCCGGCCCCAGCCCCAGCTCCCACCCCCACCCCATCACCATATTGGTCCTCCTGCATCCTGG
GCTTCCACCTCAGCCCACCCCTCTGCTGAATGGATGGTGTTGGTGTGCAATGGCACCACCTGTGCTCATT
TTCCTCACCTGTGCAGGAAGTTGATCATTACCTTGTTGGGGTTCCAGGAAGATCAAGTACATCTATACAT
GGCATGTGATTAAGGCTCACATGATAAAAGCTCAGGTGATAGGTAATTTTGTTAATGAAATAGTAACAGC
AATCTCCATCTCCTCCCTCATTGCAGAAGTAGGGTGCGAGATTTTGAGAATCATTGATCATTTCTGTATT
GTGAACTGTGGGGTCTACATCCTCGTGATCTGGCAGGAAGAGCTGCTCATCCCATTTTATAAAGAAAGCG
AAGGTCTGCCAGGTGAAGGCTTTTACACAGATGGAAGGACCCTTTGACTCCCTGGCCAGTGTTTTCCCCA
GCTCCCCATCCCTGCTCAGAGACAGGCTGGCAAAAAGTGGGACAGACTCACCATGCCTGCTCCTCTGGGG
CCACCAAACCTGCTCAGGGGAAGAGTACCTCATCTTCACAGCTCCGTTACTTCCTGTAAGGAGCTCAGCC
AGGGTGGAGTATAAGGGCAGAGGCTTTGCAGCATTGGGGTTATATGCCTTCAGATGTGTGAGGTCGGTAG
TACTTGGCCCACAATAAGCAGGCAACAAATCTCAGCCAGTATTAAGATTAGTATTACATACACAAGCAAG
GCTATGGGCGTGATGTGCTTGGAGGAGTCAGGGAAGGCTTTCTGGAGGAGGTTTTGCATAGTGAGCAGGA
ACTCACCAGCAAAGAAGGGGAGGCACTGAGGGCAGAGGGCCTGACCATGCCCAGGCAGTGAAAGGCTTGG
GGTTTCTGGGGAATCGGGTGTGGTTCAGGGTGGTGGGATTCTGGTGCGGGTGGAGAAATAGTGGGGGAGA
AGGGGTTGAGCCTGGGGGAGTCAGTAGGGTCAGGCCCTGGAGGACCTCCCTGCAGGCAGTGGGGATCCAC
TGGGGAGTTTTGACCCAGAGGGACATGCTCATGGATTAGAAGGTGAAGGCAGAATGTGTTCTGATTGGAG
GCAGGAGATCCAGGTGGCTGAACTAGGTCAGAACAGAAACGTTCCGAGGATGGAATTTATAGAGAGGGCT
TGTAAACTTAAGCTTCCTTCCAGTTCTGAAGCTCAGCTCCACTGCAGATGTATATTTTCTTGATTCTTTC
TCTTAGAATGAGGCCTCAGGAACAATGAAGGATTGTAGGGGAGGGACTATTGTCTCTCTCTGCAAGGCCA
CACTGTACGCAGATGGACCAAAGCTAGCCCCTTTAAGCTCCCCTGTCCATCCTATCTCCACAGTGCCCTG
GGTTCCCTGACTGCTCTGGCCTTCCATGGGTGTTCTGCGGGACTGCTGGCAGCCCTTCCGGACTCCTCCC
TCTCTGCTACCTGCTCAGGTTGGATGTGGCATATGACCAGAAACTGGCCATTGGGTGTGTGAGCTCCCCT
ATCCTCTGGTCATTGGATGTGTGAGTCCCCCATCCTCTGGTCATTGGGTGTGTAAGTCCTCTGTCCTCTG
GTCACTGGGTATGTGAGTTCCCGTCCTCTGATCATTAGTGTGTGAGCAGCCCATCCTCTGGCCATTGGAT
GTGTGAGTCCCCCGTCCTCTGGTCATTGGGTGTGTGAGTCCCCCGTCCTCTGGTCATTAGGTGTGTGAGT
CCCCTATACTCTGGTCATTGGGTATGTGAGCCCTCCCTCCTCTGGTCATTGGGTGTGTGAGTTCCCGTCC
TCTAATCATTAGTGTGCGAGCAGCCCATCCTCTGGCTGTTGGATGTGTGAGCCCCTTGTCCTCTGATCAT
TGGTGTGTGAGCAGCCCATCCTCTAGCCATTGGATGTGTGAGTTCCCCATCCTCTGGTCATTGGGTGTGT
GAGTCCCCCATCCTCTGGTCATTTGGTGTGTGAGTTCCCCATTCTCTGATCATTGGTGTGTGAGCCCCCC
ATCCTCTGGTTATTGGGATATATGAGCCCCGCCGTCCTCTGGTTATTTGGTGTGTGAGTCCCCCGTCCTC
TCATCATTGGTGTGTGAGCCCCCCATCCTCTGGTTATTGGGATATATAAGCCCCCCCGTCCTCTGATTAT
TTGGTGTGTGAATCCCCCGTCCTTTGATCATTGGTGTGTGAGCCCCCCATCCTCTGATCATTGGTGTGTG
AGCCCCTCATCCTCTGGTTACTGGGATATGTGGGGCCCCCTGTCCTTTGGGCACTGGGTATGTGAGTCCT
CCATTCTCTGTCATTAGGTGTGTTTGTGTCCTGTCCTCTGGGCACTGGGTGTGTGAGCACCCCCGTCCTC
TGGTCATTAGTTATATGAGGCCCCCTAGCCCTGTTATGCAGCTTCCTGTCCCTCCCTGTCTCACTGGACT
TCTCTTCCAGTGGACACTTGATCACTTCCTTTGCTTTCTTGGATATTTTCCCCTATGCCTGTCTGCTGGG
TTCCATCACCCCAGCAAGCTCCGGAGTCCCCAAGGACTTGAGAGAGAGCAGCATTGTAGAAGGGAGTGCC
CCTTTCCATGCCTTGGAGAACAGAGACCCATCTTAAGCTGGCTGCACAAAAAGCTAAGGCTGAAAGCCAA
GGGGCCAGAGTAGAGGCAGACACTGCCGTTTTGAACCCTCCCCTAACCCAGAGAAGGCAGCCTGTTCAGG
TCAATTGGTGCACCCCCCTGCTCACGGGTCAGCTCATGATCTGCTTTAAGTTTTGAAACCCCACCCTCTA
AAGGCCTGATGACTTTTGCTCCCTGCCCTTCCTGTTCTTCTGCATAGGCAGTGCCCACTGGACGTTACTG
AGCACCACCTTGGTATTCCTTTGCCAGTGTAGCTGGTGCATGGAGTAATCCTAATTTTGCAGCATCAATG
ATTACAGCATTTTTCAGTCACCACCCTTGGCCTCTTTGAGCAGTGCCAGGTTGTGAGTTCAGGGTGGGTA
AGGAGAGCTGCCCCCTCATCTTGGTGCTCAGCAGAGGTGGCTCTTCTGCCTGAAGCAGCTGGCCCAGAGA
AAAACTGGTTTGGAAGGCTGGGCCACAAACAACACAGCCCAGCTTTGACCTCTTCCAGCCTCCTCTGGTC
CCTCTGTTTCCCCCAACCCTGGGGCAGGCAGGAGGAGGACCATTTTGGCTCAGGATTGGAGAGCTGCAAC
TTTGGCCTGTGCACCAGGGACAAGTCCCTAGAGATAAGGAAAACCTTTCTCTCTGGGAGTGGCTGTGCTA
ATTCTGAGAAAGGAAGAGAAAATGTTCTTTTCTGACCCTGTCTGTGAGTGGGGGGAATAAACACTGCATA
GACTAAACAGTAAGTGAGGCACTTAGAACACATTTCTTGTTTCTTTCCCCTGTTCAGTAAAAGAGGAGGG
CTAAGAGGGCAAACAGGGGAAGCAAGGGGCACTGGGGAAGAGAGATCCATAGAAGTGCTGAGACCGAAGG
GAGAGGCTCACAGACACTGCTTCCTACCAGACACAGATGGGGGCTTGTTGGCCATGCACAGGGCCCTTGG
GAGCCAGGGTGGGTCAAGGTCCGGGCAGGGTGCTGTCCATCCCAGGGTCCTAACCAAATTTAATGAAAGG
CTGGAGGTTCCCATGGAGCCACTGATGAGTATGGGGGCACAGGACGATGGACCAGTTCTGTGTTTGTGTG
GAGGACAAGATGAGGAGCTCCAGCCCAGCAAAGCAGGGGAAATGAGAAGAGAGAAAGGCTGTTACCTTGC
CTTGGAGGTTGAGGGAGGGTGTTTTCCAGCACACTGCCTCTGTGCTGCCAGCACTGGCTTTGAGGAGCAG
ACTGAGCTTTGTCTCTTCCTCCCCAAGGCTGTCTGGCTCTGCCTCACTGTGACCCTGCAGTTCCCAGACT
GTCTCTGGGCTGCTGTGAGTAGAGTCAGGTCTTGGCACTAGTGATCTTTGTTTGGTTCTGCACTTCTGTG
AACAGAGCAAACCTCCAAAGGGTTTCTTTTGGGGGAGAAACCACTCCCAAATTATTTTAAGGATATTAGC
AAATCCTACTTGTGGCACCAAGATCTGGAAATTATCCCCTGATTCTGATTCATTAAATTCCCCTCCCTCC
CCTACATTCAACCCAAACACTGCAGGCTGCTGCCCAGATTAGAAGTGAACTGGAGACCTGAAGAGGTACC
TAGCTAGCCACCTGACCCTGACTCTCACCCATCTTCATCAGAAGAGGATAGCACCCCAGATGTTGGGCCA
GAAGAACTCAGCTCCTCTCCTGCCTCTATCATGTAGCAAGAAGACCACACTCAGCTGGAGTTGTGGCCTG
GGCAGCTGTGTCTGCTGGTCCTTCCACCTCTGCCTGGGGGAGGGCTGGGTGTGATGTGGGAGAACTGGAT
AGAGCAGCATGCAGATGCCCAGTGAAGCACACAGGCAGGACTCAGCCTCTGCCCAGGCCAGCTAGGAGCG
CTTTAGTCTCAAGGCAGAGACCTGTGAGGTTTTGTTCCAGGTGATCAGCCCGGTTCACCACAGTGGGAGA
AAAGGCAGAGGTGGAGTAAAGAGTAAAGGCTGCATCTCTTAGGAACCTGACTGTGAGATGGTGTGGTAGA
CACAACCTAAGGTGACCCCAGGTGAGTCATACCCTTGCATAGCCTCCTCCCCAGAGTGCAGATGGAACTT
GTGACTTGCTTGTAGCAAATATAGTGTGGCAAAGGTGATAGGTGGCATTCCTTCAATCAGGTTATGTTGT
ACGGCAAAGGTTCAAAGGTGATGGGATAGTCCCTCCCATGATTATGTTTCTTTATGAGACTCCTCTTGCT
GGCCTTGAAGAAGTAAGCTGCTGTGCTGAGAGAGGGCCTGTGAGGGGGTCACGTGGCAAGGGATGTGGGT
GGCCTTCAGGAAATAAGAGCAGCCCGTGGGGGGAAGTCCTACAACCACAAGGAACCAAATTCTGTCAACA
AGCACACAAGCTTGGAAAATGACTCCCTGATCCAGAAAGAAATGTAGCCCAGCTGACACCTTGATTACAT
CCTTGTGACATGCTGAGCAGAGGATCCAGTGAAGTCATGTCCAGACTCCTGACCCATGGAAATATGACAT
AATAAATGTATTAATATATTGTTTTAAGCCACTGAATTCCTGGTATTTGTAAAAGCAACAGATAACTAAT
ACAGATAGGGTGAAGATTTTAGAGGAAGGTGACACCTGAGATGGCCTCATTTTACACAGAAGACATTGGA
GTGTCCAGGAGGAGCTGAGACCTGTCAGGTTAAGTAGCCAGCCTGGTCCAACCTGTGAAGCACTCATTGG
GGTCAGGCCCTGGTTCTTGATCTGCTATTGTTCTTTCTTCCTGTTCTGTCTTTGTGTTCTGAGTAAACCC
TCCTTCTTTCTAGGCCTCAGATTTTTCCTCTGTGGCATGCAGGGCTAGACCACATATTCTCTAGGCCCTT
CTTGCCATGACGTGATTTTCTGAGGTCACTCTGATCATCTGTGATCCTTCTAGAAGCTGGGCCTCCAGGC
ATTAGTGTGGTTCACTCTCTGCTGCTCCTTGGCACTTCCCATGTTGTGTGTTTCCATTTGGGCCTCATGA
CACAGGGACACATTGGTAAGCCTTCTGGGCTCAGATTAGTGGCAAAAGCAGGAGTAAGAAGAGCAGTCTC
TGAGGTCAAGCCCTTGGCTGTGCACCGAAAGAGATAGTGTCTGGCCATGACCCTGGTGCTGTGTGATCCT
GGGCAAGTGGTCCCTCTTCTGTGGCCCCTCTTCACATCTCCTCTGATAAGATCAGCTCCAGTCTCCTCTG
TGGCTCATCTATAGTGCTGCTTTTGAGAAGGGCTAACCTTAGGGACCCAGAGCTCGCAGCATGGGGACAG
GTGAGCCTGGCCACCATCTCCTTGCCCTGGTGCCCAAGCATCCAAGTCCAGTGGGGGATATGTGGACATT
GACGCAGCTCCCCTTGATCCACCCCCCAGCCTGGCCCTTTGTTGACCCTAATGCCTGACCAGCAGTCTCA
GTCCATAAGGGCTAGAGACACAGTGGGCCTCCTGGCCTGCTTGGTGGTCCTGTGCCTACTCCCGGGTCCA
GGGTCCTTGGGATCTAAGTGCATTTTCCACCCCAGAGTCAGTGGTCTTCATCTCTTAAATTTCACTGGAA
AGGCCATCACTACTCTTGAATCAATCCTGAGCAGGTGACATTGAGTCCTTCTGGGGGCAGGAGGAGAGTT
CTTTCTGTTGACTGAATGAGAGGTCTAGAAGTTCACTCTGCCCCTTGTGCTCCCCTCACCACCTGGCTCT
GCAGGGGCAGGGGCAGGGCCTGTGCCCTCCTCCTTGGCAAAGTAGAAAAGTTGAGCAGCAGCGAGCAGGC
TGTGTGAGGGTGTATGGAAGGACAGGAAGAGAAGCTGGGGCTGCAGAAGTGCAGGGACAGCTTCCTGTGT
TGATGGAGACCGCAGGGCTTCCTGGGTTAGCAGGTCAGCACTATGGCTGCCAAGGCCAAGGGTTCCTCTG
AGAAGGGGGCAGGCATCCGGGATGATGCCTTGCCTGCATCAGCCTGCAGTCTAGAGGCCTCCTTCCACTT
GCCTGAGCAAGCTTTGTCTCATGGCGAGGCCACAGCTGTGTCATCACTGTTGGGTGTTACGGGCCCATTG
GCCTTGTCACAGACCTTCTGACTGGGTCTCAGCTGACAACCTGGGAAACACAAGTTTCGCTCTCAATACT
CTGTTTACTCATTCTCCCTGCCTCAGCCTTCTTTTCCTATTACTGAGTCTTTTAACATCAACACTACTAG
CAGTTAAGCCTTGGGTATATAAGCCTTGGGTATTAAAGCATATACATTACTTTGCCAAACTCCATGCTGG
TTGGATGGGCCAAGACTTCTGTCAGTTAAATAAGCTACCAAGTTACATTAATACTAGCCTTGTCAAAGAT
CAGATGGTGGTGGGAATTTAACTTCCTCCTTCTCTACAACTATGCATACTCACTGTGAATTAATTCTTCA
CAGCACCCATGCAACTGCTCAAATGCACAGGCAGGATTGGCCTGTGTAGGGTCTGGCCAGAGTTGGGTTG
AGCCTCAAACCAATTGAAATAGACTGTATTCTGCCTGCTTCAGTCTAGCTCTCCAGGGAAGCTATGGCAG
AGGGTAACTGTGTGTGCTAAGGATGTAGACTCTTGTTCTCTGAGCTATGAGAATAGGGTGGCTAGCATTC
AAAGCTAGCTGGTGCTGCTGCTGCTCTTAGGTCCAAGAGGAAAGATCCTGCTCCTTTTTGAAGCTGCCAA
GTGTATGTGAGAAGGCTTAGCAAGGCAGAGAGGATTCAGAACATAAGTGAGCTGACCATGGAGGTATGCA
GTCTACACAAGCTGTTTGGTCAGATCTCAGGTGATTTTCAAGTAACCCTGAAGGTATTGCCCTTGACTGT
CGGTCCTCATAGCTAAGACACTGGGGAACTAAAGAGTTCCTACCATACCAGGGCCTGTGATGCCTGCTGA
GTTGAGCATGTGTGTGTATGTGTACTTGCATGCATCTCTGTGCATGTGCAGACATGGTGGTTACACATGG
ACCCTGGCCACTGAATTGATTGATCCAGGCTTTCTGTCTCCTGGCCTGTGGTTAGAAGGGCGCAGAGCAG
TTCTCCAGTGCCCAGCTAAGTCTTGGTCCTTCATGAAGCCTGAGTTGATGCCAAGTACAGTTATACTCTA
GTTCCTTAGGAAAATTTCATGCTGACCAGAATGTTTAATTAGTCAGAACAAGCCATTTTCTGAATGTGCT
AGGAATCTAAGAAACATGGATGTGTGCGTGTAATTAAAATAATTTTTTCTGTAACTTTTTATTTTGACAC
AGTTTTAGGATTATACAAAGACTTTACATATGCCTTTCACCCAGATTCCCTGAATTTTAACTTGTTACTG
CTTTCATAGAATTCATAACAATTCTGTGAGATAGGCATTTTTGTCCTTATTGGATGTATGAAGAAAGCTG
AGCCTCAGAGAGAATAGGAACTAACCCAAGATCACACAAGAAATGAGTGGCAGAGCCAGGATTAAAACCC
AGGTCGGTCAGACTTTAGTGCACATGCTGACCCCATGTGATGTAAGTGTGAATGTGTGGGTATCCTGCTC
CTTCTGCCCACAGAGCTTTCTTTCTTGTATTGTTGATCTGCTAGCAGTGAATTGTCTCAACATATGCCTT
TATTTCACCTTCATTTTTGAAAGATTTTTGCTAGGTATAGAATTCTGTGTTGACAATATTTTTCTTATAG
TATTGCAAAGGTGGCACTTCATTTTCTTCCGGTTTGCATAGCGTCTGACAGGGTAGCAGATATTTCTCTA
TGTTTTCTTAGGTCTGTGATCTAATATATTGTTGCTAATTTTGTTTAAATAGTCAATTATCTTTTAAAGA
GACTCAAATAATAGAAAGATCTTACATACACATGTAGTGACCATTTCCTGTGTTCATCATTCCATTGTAT
AAATCCGCATTTCCATCTGGTTTCATTTCACTTCTTCCTGAAGGACTTTCTTTAACATTTCTTGATGTGA
GAGTGTGCTGGTGATGAATTCTGTCAGCTTTTGTATGTTTGAAAAAGTCTTTATCTCACCTTTGTTTTTG
AAAGATGTTGTCCCTGGACATAGAATTCTAGGTTAACAGGTTTTTTTCTTTCAGTACTTTATAGATATTG
CACCATTGCCTTCTTGCTTGCATTGTTTCTGAGGAGAAATATACTGTCCTTTTTATGTTTGTTTCTCTGT
ACATAATGTGTCTTTTTTTCTCTGACTACTTTTATGATTTTTTTTGTCACTGACTATGCAATTTGACTAA
GATGTGCCTTGCTGTAATTTCCTTTATGTTTCCTGTGCTTGGGATTTTTGAATCTGTGGATGTATAGTTT
TCTTTAATTTTGGAGTATTTTCAGTCATTTCTTCAAATATTTTTTCTGTCACTGCCTCTCCCTTCATCCT
TTGAAGACTCCAGTTACATGGATGTTAGACCACTTGACATTATCATAGAGCTTACTGGTGTTCTTATCAT
TTATTGTCATTCTTTTTTCACTGTGTTTCACTTTAGGTAATTTTTATTACTGTCTTCAGGTTCATTGATC
TTTTCTTCTGCAACATCTAATCTGTTTAATCATGTCAGCCAGTGTAGTTGTTACCTCTGGAAGTTTGATT
TGTGTCTTTGAAAATCTATTTTTTACCCCGTGTAACTTCTTAAACATATTATACTATATGTTATTATACT
AACATATAGTATATAGCATATATTCTATATATAATAACTAAGTTATATATAATATATATTATATAACAGT
TATAATATATAATAACTATTTCTTAATATCTTTATCTGCTAATTATAACATCTCTGTCAGTTTGGGGTTG
GTTTCAGTTGATTGTTTTTTCTGCTCTTTATGAGTCTATTTTCTTGCTTTTTTACATGCCTGATAATTTT
TTATTGGATACCAGACATTGTGATTTTTGCCTTGTTGTGTGTGGATAGTTTTTCTGTTCCTATAAATATT
CTTAAGATTTGCTAGCTGTGGCCAGAGTAGGGCTCAGTGTATGGCTAATTATTACCCACTGTGAGGCCCA
GCCCTTCTGAGGACTCTCCCCAGCATCCCGTAAATGATGAGACTTTCCACTCTGGCTGCTGGGCAAGAGC
ACAGTCTCCAGCCTGGTGTGGATGCCAAGCACTGTTTCCTCTAGTCCATTTGGGCAGTCTTTCCCCAGTC
TCAAGTAGTTTCCTCATATACATTTGCTGATCAGTGCTCAGCCGAAGGCTTGAGGGAAACCCTTTGCAGG
TCTCTGCCATTCCCTTTCTGCATCTCCCTCTCTCTGGTATTCCATCTTCTGAACTCTAGCTGCTGTGTTT
TCTCTGAGCCTCAGCCCTATCCTTTCAACCTAGGGTTTCCAGTGGGTTTCACCTGGGTCCCCACTCCCTG
TGCTGTGGCCTGGAATTTTCTGAGGGCAGTAATCTGTGGGGCTCCCCTCCTCTGTTTCATGTATCTCAGG
GGTCATCATTACCTAATATCCTGTGGCTTGAAAATTGTTGTTTCATATATCTTGTCTGTCTTTTGGTTGT
TTCAGGTTAGAGGCTAAATCTGGTCCCTGTTACTCCATTTTGACCAGAGCTAAAGTCTTGGGACCTTTTT
TTTTTGTGTGTGTATTCATTTGTTTATAGGGAACATCAGTCTGGGCAGGCAGTGTTGCGTGGTCTGGTTA
TCAGCCTTGATTTTCATCTGGGATGTTCATCCAGTTGATTGTATAAATATGTAGACTTGCCCTCCAAGTG
GCAACAAAATTTCTGCACTCCAGACTCTTTTTGAGAACTTTCTGCTGCCCAGCTCTTATAAAAAGCTCAA
TATTGGCAATTGATATAGTTTTATCTCCTGAACACTGTGAATCTTACCCTTGGTTGTGCTTCTTTTTTTC
CCCTTTGACTGCCAGGGAGCTTAGACAGTTTCTTAGTCTACCTTCAATAATTAGGGAAGATTTTTCAAGA
TTTTTTTTGTAAGCAAATTTGTGGTCCAGCTTTCTCTTTTTAGCTTACATAACTTTTGCCTTATATTTTA
TCTCTCTCAGCATTTGTAGTTGTGAATAAGAGAGAGAAACTCTCTCTATACAGCAGATTTGAGCAAGCAG
TGAATGTATTAGAGGAATGATTGGGAAGTTCATAGAATCCTTGGGAGGGTCAGAGATCTGGGCTTGGAGC
AGCAGCCCGAGTCATATAGAACTGGTCCGGGGGAGACACAGCTCCTATGCTGTGTTCTGGCAGGTGCCAA
TGTTGAAATGCATGTCATGGCTGCCCCTGAATTTAGAATACAGAGGGAATTCTCAGTCTCACCAGATTCA
TGTCAGTTGAATCTGGTAGAGTCTTACGTGAACATCTGTTGGGAGAAGCCTCAGTTATTTGCCTACAAAA
TAGCTGCAGAGGAGGCTCCTACACTGGGGAGAATGGTTTTGGACCTCCCCAAACACAGTAGGGGTATTCA
GAGGGATTGGGAGGCTTTTCATTGTTATTGATACATAGCTACTTTATTCTGATACTATTTTAAATAATTA
CGTTTTCAAATCTTATTTTCATGAGTCATAAGTACAAGTACTCCTTGTGCACAGTAGTCGCATGCCGGAT
AGTACTGCCTCTCCCTCCACACGAGTGCGTTCGGTTCTCCTCTGCCTGATTTTGAAGCTGGGGTTGACTC
TTGGCACCAGCGTTTCTTAGGGTAAGGTAATGGGATGCATTCTGTGGGCAATGTACCCCAAGTCATTAGT
CCTCACAGCAGACTTGGCTGTAGCAGGTAGGGAAATGGATTGTCCCTAGTGCCCTGAGTGTCTGCTTCAG
GCTGGGGGACAAGAAGAAATCTCAAGTCAGGTGTGGACTCTCAGTTTAGAAGCCCCAGGGCAGGGATGAT
TTGCAGTGTCCTGAGAGCTCATAAGGCTCTATGGGAGTATGGAAGGGCTGAGGCCAAGACTGATGTGCAG
GCTGGGCCTGGGGGCTTTGGAAAGTGAAGAAGAAAAGCTGGAAATATCAAGTATATATTATTATTAACTG
GAGTCACCATGCTGTATAGTGCGTCTCCAGAACTTCTCTTATAACTGCAAATTTGTACCCTCTAATCAGC
ATTTCCTCCATTTCCCCACCTCTGACCCCTGGTAACCACCCTTCTACCCTGTGCTTGTATGTGTTCTACT
TTTTTAGTTTCCACATATAAGTGAGATCATGCAATATTTGTCTGTGTCTTGTCGAGTAGATCTTAAGTAT
TCTTAACACATGCACACACACACACACGTGTAACTGTGAAGTAATGAATATGTTAATTAGCTTGATTGTG
GTAATCATTTCACAATGTATATATAGTCATGTGCTGCATAGCAATGTTTTGGTTAACGACAGACCGCATG
TATGAAGGTTGTCCCATAAGATTATAATGGAGCTCAAAAATTCCTGTTGTCTAGTATTGCCTATGCTATA
CTTTATGTTGTTATGTTTAGAGTGTACACCTTCTACTCACTTTTTTTAAAAAGGGAACTGTAAAACAGCC
TCAGGCAGGTCCTTCAGGAGGACCTCCAGAAAGCAGTATTGTTATCACAGGAAATGACAGCGCCGTGTGT
GTTACTGCCCTTGAAGACCTTCTAGTGGGAGACGGAGAGGTGGAAGACAGCGATATTGGTGATCCTGACC
CCATGTAGGCCTAGGCTAATGTGTATGCTTGTGTCTTAGTTTTTAACAAAAAAAGTTTAAAAGGTAAAAA
AAAAAAAATTAATAGACAACATATAGAATAAAGATATAAAGAAATAATTTTTGCATAGCTGTACAGTGTA
TGTATTTTAAGCTAAGTGTTATTACAAAAGAGTCAAAATGTTAAAACAAGTTAAAAAGTTTATAAAGTAA
AAAATGTTGTAGTGAGCTAAGGTTAATTTATTATTAAAGAAAAATATTTTTAAATAGATTTAGTGTAGCC
TAAATGTACAGTCTATTGTAGTGTAATGTCATAGGCTTTCACATTTACTCACCACTCACTGACTGACTCA
CCCAGAACGACTTCCAGTCCTATGGCTCTGTTCATGTTTTATGTTTTTTACCATACTTTTACTGTACCTT
TGCTGTTTAGATATGTTTGGATACACAAATACCACTGAGTTACAATTGCCTACAGTATTCACTGCAATAA
TGTGCTGTGCAGGTTTGTAGCCTAGAAGCAATAGGGTACCATTATAGCCTAGGTGTGTAGTAAGCTGTAC
CATCTAGGTTTGGGAAGCATACTTTATGATGTTTGCACTACGACAGAGTCACCTAATGATGCGTTGCTCA
GAACTTATCCCTCTCATTAAGCAAAGCATGACTATAGATAGATAGATGGATGACCCTTGAACAAGATGGG
TTTGAACTATGCATATCCACTTAAAGGTAGATATTTTTCAGTAAAATTCACACCAGTGTGCCTGCCTGTC
CTGCCTCCCTGTCCACCTCTTTCACCTCTTCTCTGCCATTTTTGAGACAGCAAGACCAACCCTTTCCCTT
CCTCCTCCTCTTCAGCCTATTCAACGTAAAGACAATGAAGATGAAGACCTTTATGATGATCCACTTTCAC
TTAATGAACAGTAAATCTATTTTCTCTTCCCTATGATTGTAATAACATTTTCTTTTCTCTAGCTTATCTT
AAGAATAGAGTATATAATACATATAACACAAAATACCTGTTAATCAACTGTTTATGTTATCAGGAAGGCT
TTGGTCAACAGTAGGCTATTATAATAGTTAAGTTTTGTGGGACTAAAAAGTCGTATGAGGATTTTTGACT
ATGCAGGGTATCAGTGCCCCAACTCTTGCCTTCTTCAAGGGTCAACTCTCTATATATTAAAACGTCACAT
TTTACACCTTGAATATATAAATTTTTTTGTTTATTGATTGTACCTCAGTAAACCTTGGGGTAGAGGCAGG
AAGAGAGGAAGCTAGAGAGGAAAAGAAGAAAACCAAAGATGATAGCACCTTTTGCAGGGCAGGAGAGGGG
GCCGAGCCCTCCTCTGTGGCGGCTGGGGCTTTGGTCAGGTACCTGAGGATGGGGCCTCTCCCAGCCCAGC
TGTGCTGGCAGCATGTTTCTCTGGAATTTGCCTCTTTGTGTTAAAGGTGGAGCCTCTGGGGGAAAAAAAG
CAGGAGGAGGTCCAGGGTGTTGGTATAGGAAGGAAAACTGAGACTAAATCTTCCAGTCTCCAGCCAGTCA
CCCTGTGGAGCCCCAGCAGACCGTCATGTCCCCAGCAACCACAGAGCTGCTGAAAGTGTTCAGGAGGAGC
TGGAGGACCAGCCATCCTGGGAACACTCCTGTCTAGAATCTTAGTTTTCGTGATGACAAGGGACCTTTAT
TTTGCCTTTCCTTTTTCTGCTCTTGTCCATGTACTGTTACGTGGATGGGATCCTTTAGGATGCACTCGCC
CTGTTCCTTCTTGCTGTAGTGGGCAGGCTTACTGGGCCCCCTGTTTGGATAGAGGAGATGGGGTGGGTGC
AGGATAGTGAGACGGGGCACTCAGTGGAGAAGTGAGAGGGTCAGGCATCGGTCCGCCTCCTAGCTGGTGC
AGGAGAAGGGCCTGGGCCAGACCAGCCTGTGCCACTGTCTGGCTAACCCCTCCCTCCCTCACCTTCTTTT
GACTCCTCCCTCCCCTCTACCCTCCCCTTTCCATCTTCTCTGGATCCCTGGGTGAGGCCCAGGCGGCTGA
GCGTCCTCTAGCAGAGGGAATTAACACACTTAATTAAAATGTCCAATGAAGAGCTTTGCATATTTCTTAA
TTACCATCTGAGTCTTTTGGGGGATGGTTTGAAATGGGGTTTTTCACGTGTTTCCTCATTTAGCCTACGG
TGAGCCAGCCAGCCCCTCAGGGCTCTAGTGGGAGCTGCCAAAGATGCATGCCCAGTTTGGGGCTGCCTTT
TGGAGTCCAGGGTGGCAGGGTAGGGTGTGGAGCAGATAGCCCAGCTACCAAGCTTACCCACCTTTGAGGA
AGAATAGGGCTGGACTTTCTGTTTGGTGAAAACAGAGCCAAAGGAAACAAGGTTCAGATGGATATAGCTG
GTGTCTCTAACTGTTTCACTTGTCACCACAGGGCCTGGGGGCCGTACCTCACAGTCAGGCCAGGAATGGT
AGACTATGAGCAGAGGTTACAGGGATGGTGCAGGCCTCACCCCAAGGGCCCTGTGCAGCAGGGATGCGGG
TAGCCTGGCCTCCTTCCCAGCTGCATGGCAAGGGCCGAGTCCCTCTGCAGGTCCTTCCTAGCATTTATAC
CAGCAATTCCCACTTCTGTTCTAGAAACTGAGCTGATGGGATGGCTGAGTCAGCGGGTCTCTGCTAGGAC
TGGGTTACTGGTCTGCACAATGAGGAAGCAGACTTGCCTTTTCAGCCCTGAGCACCACCTTCTGAAAGCT
GCAGACATTATCTGAAATGGGCCTGGCTGCTGGGGGCTGTGGGCCGGGGATGCAGAGATTCTTTTCCTGG
CTCAGGGACTGATTTCCTGAAAACACAGGCATCTGAGAGGTGGGCAGCCCACCAAGATGGCTTAGAAATG
GCAGTGAGTTATGCCACATCTGTCCTGCCTGCCCTCTCCTCCCGGAACTCCTGGGGCCCTAGGCCCTGAG
CCCAGCTCTGTGGACCCCAGGAGGATCAGGATCCCACTGTTTGGCCAGGAGCTCTGAAGAGCTGGTGTGT
GTGGTAAGTGTGGATGCACAGCCGAGAGCAGACTGTGGGCCAGGGTTCTGGCTTGGCTCTGTGAGGGGCT
AGCTAGTGGGTGGTACACCTTCTGCCAGGTCCTGGCAAACCCTCCGTGCAGTCTCTGGCTAATGTCTGTG
CTCTGCCCCCTGCTCTCCCCAGTTTCTGGCCCTTACAGCAGCCTCTCCACCCACACCCACACCCGCTGTG
GAGGCGACAGGGAGAAGAGCTGTCCTTCGTGGAGGGAGGCAGTGTCAGTGGAGGAGTCTGGGGACTTACT
GCCCACTCAGCTTTCAGACTGTGATGTGGGCACAAGACAAGACCAGAAGTCCTCATAGCCACTGGCCCCA
AAGCTGTGGGTGGATTTGGCGTCACGTGGCAGCTGTGGAGAAATGTGGGCAAATGATTTTAAGCAGAGGA
ATCTCAGCCTCACATGACTGTCGTTTCATCCAGTCCCTTCCCCGGGAATGTTGTTCCCTGTGACCCCCTC
ATCTCCATCAATCAAGGCTCAGCCCAAATGGTGCCTTTTTCAGGAGGTTACTGTGATTTCCCCAGCAGAG
CGGCCTTTCCTTGCATGGGCCTCTCAGGAGACCCTTCCCGTATTGCCTGGCATTTTAGTATTTGGATCTG
GGTCTCACTTCACCACTGGATATGGACTGCTTGAGGCCAGAGGTGCATCTGCTTTGTCACTACAAATTCT
GTGCCCTGCACAACAGGACTGGCACACAGTGAGCCCCAGTGGGTGTTTGCTGAGTGGCTGGAGAAGCCTC
ACTGGCCTCTGCAGCTACCTAGAAACCACCAGAATGTACAAGAATCTGTTTACCTGGGACCTGCCAGTGA
GATGGGGGCCTGGGGCCCATGGGGCACTGGTGGAGTGAATGGCCCCTGTTGGTGAGGTCCAGGTAGGCAG
TGGTAGCTGATTGTGAAGGGCCAGCATCCAGTGCACCCTGCATTGGTGGGATTTCCAGGGTACATGGGAC
CAAGCTCCTCTGGACATCCCCATGGATGTGCAAGACCCCTGGGCCAGTAGTTCTCACTAGGGTAAGAAAA
ATAACTGTTTCATGCTGATGCCAATAGTGAAAAATAAGCTTACATCTTTAGGACAAGGGATTGAATGATT
ATTGTTAATTGTTTTTTCTGAATGCAGTGCTGGCATTTGTGCTTTTGCTCTGACAATTATGAAGAAGGCT
TTTATGAGTGACTGAATCCAAGGTGATTGCTTGGTGTCTGTTCCTTGTCCAGTTGTCTTGGGCTCAGGGG
ATAGCTCTAGCATCTAATGGTCATGAACCCAGGTCACAGGGAGGAGTTCTGGGCTCCTCTCTGAATCTGA
CCAGTCACTGGTCCTGTACCCTGCTCTCCTCCCCATTCTCTCCAGCCCCACCACCTCTGCATTGTTCACT
GAGATCCTCCATCTCTGGCAAGATTTCTGCCCCTAGTCTGGCTTCTGTAGGCCATTCTGTAGCAGAGTGT
CCCCACCCAAATCTTACCTCGAATTGTAATCCCCATGATCCCCACGTGTCAAGGACAGGACCAGGTGGAG
GTGATTGGATCATGGGGGCGGTTTCCCCCATGCTCTTCTCGTGATAGTGAGGTCTCATGAGATCTGATGG
TTTTATAAGCATCTGACATTTCCCCTGCTTGCCCTCACTCTGTCCCGCTGCCTTGTGAAGAAGGTGCCTG
TTTCTCCTTTGCCTTCTGCCATGATTGTAAGTTTCCTGAGGCTTTCCCAGCAATGGCAGACTGTGAGTCA
GTTAAACCTGTTTCCTTTATAAATGACCCAGTCTCACGTATTTCTTCATAGCAGTGTGAGAATGGACTAA
CATGTTTTCTTTTTTCTAAAGCACAGGTCTATTGCTCTGATTACCTAATGCTGTGTAACAAACCACCCCA
AAACTTAGTGGCTCAAGACAATAAAAATATTTACATCGCTCACGAATTTGTAGTTTGAGTAGGACCTGGC
AGGGAAGGTGTGGCTTTGTTCCATGCAGCACTGAAGGCGGCTTGAAGTCTGCCGGCTGGAGTCACCTGAA
GGCTCGCTCACTCACAGGTCTGCTGGTTGCTGCATGCGTGTCTCCCTCCTGTAGGCCTTCTTGGGCTTCC
TCACAGCATGGTTGCTGGGTTGCAGGGCTGGCTTCCAGAGTGTGTCAGTGTGAGCACACTCCAGGCAGAA
GCTGTGCTATTTTTTCTAAGCTAGCCTTGGGATTCCCACAGGGCCATTTCTGCCATAGTCACAGGCCTGC
CCAGATTCACCCCCTGATGGAATGTCAGGGTTAGATTGTAAGAAGAGCACATGGGATGGGAAATATTTTA
TGAGCCCACTATGGAAATTATGAACTGCCACACCTGTTCACACCATCCTGCTGAAGATCCTTTCTGAAGC
TCCCACTGCCCTTGGGCGAGAATCCATGCTCCTCCATGTGGCTGACATGGCCTGTGCCATGTGGCCCCTG
CCCCTGCCTTTGTACTTCTCTCTGTCTGCCCCTCCCTCCCTCCACAACTGGCCCCAGAGATGGGTTTGGC
TTAAATCAACCTGACAGCCACATGGAGCTTCCATGAACAATGTTTGCTACTCACTCTTCCTCACACACTG
TCTGGCTTCACTTGCCCTGAGATGAACCTCAGTCTGAGGGGCCTCCAAGTGTGTCCCCCATAGCAACCTA
GCCTGTTGCCTTCTGTTTCTTCTCACGAGTGTTTTCTCTCCCTGTCTCTGTGCCTTTGCACACATTGTTC
CCTCTGTCTGGAATTCCCCTTCACCCCCACCCACAGCCTTTCCCAGTCCCGTGGCTGCCCTGCCTCCTCC
TTGCAGGTGTCCTGACTGCCCGGCCACCTGCACCCCTGCCTTTGGGATCTGCCGCTTTGCTACTGTCAGA
CCTTTACATAAACCAGCACAGCAGAGTGATGAGGCATCGACTCTGGCTCAAATCTGTGCTCCTATCCCAG
CTCCACCACTTCCCAGCTCTGTGACCTTGGAATAATAACTAACTCATTGGATCGTGATGAGGATTAAATG
AGAGAACCTAAATAAAGTGCCAAATTCTCATCTGCTGCTGAATAGAGGCCCAGTAAGAGTTTGAGTTTCC
TCTCCTTCTTTCTAGCATCTCCTGGTAAATGCTCAGTAATGAATTTTCTCACCCTCATTTGGTTGAAAAA
GGAGAAATGCATCTCCTTGCTTAATCATGTGGGACTAAACTACCAGAAGATTACAAGAACATTGCTGAGC
CATGAGCAGAGAGAAAATAAAAAAGCTCAATAATGATTTGCCTGCTTATTTTTAATAAAACCTGCCAGTG
GAGCTGAATCTTTGTCCTCAGAAAAAGCTCCTCTTTGCTGCAGTGGTGTCCGAGAGCTGCGGTAGAAGCA
CAGCGGTGTGACCTTGAGAACAGAGCTGGCAGGAGGACAGCTCCCGCAGAAACTCCGGCAGCTGTTGCGA
GGCAGGGGGACACAGGAGGAGCTCCTGGCTCTTCCACCTGCCAGGCTGCAGGCCTGCTGGGATGCCCCAT
GCTACTGCTCCTCTGAGGCTGAGTGGGAGTGCCTGGTCAGGTGGCTCGGGATGGGTTCTGCCCACCCCTT
ATGGTTGGGGGACTGAGAAAGTAGCCAGGTAGATGCAGTGTGCAAGTTCTCCATTTGCAGGTTCTAGCAC
CTTCCACCCCGGGCAGTTGTTGAGGGCAGGTGTGGGCTGAGGAAGGGGTCTTTGCCATTTAGAGGGGAGA
GGAGCTTAGCACAGCACAACCCCTTACCCACCTAGCTCCTTTATGTGATACCATGGGCAGAGGCTGGGCA
GAAATGGACAAGAGGAGCTCCTTTTAATAAGCTCTGCCTCAGGTCTGCAGACACTTCCCCAGAGACAAAG
CATGGAGGACAAGGGTCTCGGATACCACTGCAGGGGTGTAACACACATTACCCTGGCAGAAGTGACGAGG
GCATGGGTAGTCTTAGCGGGCTCTGAGGTGGGGAAGAAGGCTTCAGCTCCGAGAAATGAGAAAAATGAGC
CTAGAGGAATAGTGTAAAGTCATTGCCTTTTGCAGCAAAGTAAGAATGAGTCCCTCATCCATTTCAAGCC
TGAGTTGGGGTGCTGGGCCCCAGATGTTAAAACCCTCACTTTCTGAGCCCTCCTTGTACCCCACAAAGCA
CTTCCAGGGCACCTCAGTGACCAGTTTCTGACCTTTCAGATTGGATCAAGCCCCTACCAAGTGGGGAAAG
GCCCCCAATTCCAGACTTGGCCTGGGACGGGCTGTTCCCTGGAGCGCCACAGCAGTGGCAATAATGACCT
GGCAGAATTCTGAACCCAGCATGATCTATCAAGGAGTACCCGGATAAGAACTGAGCACCTGGTCATGCAG
CCACATCCCAGCCCCACTCAGCTCTGACCCTGGTGCAGGAGCTGTCACCTTAATGCCCGTTGTGTGAAAT
GTGGATGACATTAGTGCCACCCAGAGTTGAGGGCTGGGAGGTATGGTACCCAGTGTTGCTGCAAGCTTCA
GTGGGCAGGTGCCACGTCTCCTCTGTTTACTGTTCTCATGTCAATTCTGTGCCTGACTCAGCCCCTACTA
TGTGCCTGGAACATGCTCTGTAAATGCTGGGGTCATGTGTTGCCTATTATGGTGACTGCGGGAATGCATA
GAAAATATCAGCTCTGGCCAGGACCCCACACCTAAAAGCTCCTCCTGCACAATTCCCAGTAAAAAACTTT
CAGGGGATGTTTTCCTGCCCCCTAGACCTGTGAGCAAGTGCTAATCCACTGCCAGTGGCTGGTGTCTCAT
GGAGAGGCACCTTGGCATTAGAAGGTGTTGCAGGGATTTCCAAGTTTTCAGCTACTCCATGAAATTTCTG
TGCCCTTAGTGGCTTTTTGGGACCCTGCTTTCTCTCCTCTCTGTGCTTGGAGGCCCTGGGGAGAAGAGAC
TCAGTGTCTTCCCATCCATCTCCCCACCCTGATCCCTGATGCATGCACCTTTCCCTAAGGTGCAAGACGC
AGAGCGTCGCTGCCTAGGGAAGTGACCAGCGTGCCCTGGGATGCCTCTCTTCCCAAGGAGGCAGTAACTT
TCCACTCCCTTTCAAAAAGGAGGATGCTGTGTTTTCCCCAATGCATCTGCCTCTTGCTAGTTCAGGGTTG
CCCCACTTTCCCCTCTGTGGTCCTCAGCCAGGTGCCTGGGGCCTCATGGCCTCAGAGCTGATCCTCCAGG
TATGGGAGGCCCCCTACTTCTCACCTTCATGTGAAATTTAAGGGGAGATTTAAAGCAGTCAGAATGCTCT
TTATAGCCTCGTTTCTATCAGAAGTTTAGAAAAGGCTGCTTCCAGGTAAAATTAGAAGAGATCTTGGGCA
CATTTCTGCTCACCCCAGAAATGTTGTTTTAAAAATGGGGCTGTTCTGACACCAGCTGGTACCCTACAAT
TCACTTCTGGCACTGACCACCCAGAGTTGGCGTGGTGGTCAGCGTTCTCCAACAAGGGCAGAATCCTGAC
CTGGCAGAATCCTGAACCCAGCATGACCTATCAAGGAGGACCTGGATAGGAACTGAGCACCTGGTCAGGC
AGCCACATCCCAGCCCCACTCAGCTCTGACCCTGGGCCAGGAGCTGCCACCTAATTGCCCATTGTGTGAA
ATGGGGATGACTTGAGTGCCGCCCAGAGTTGAGGGCTGGGGGTGGTGGTGATACATATATTTTTTCCATC
TGATATTCTGGAAACTGCCTTACCTTGCTCAGTTACCTGCTGCCTCCTTCCACTTTTAAGCATTTCCCAT
GTGCCTTGTACTTTTTACCTGATTTAATTCTTACTACAGCCCCCTGAAGTCTTTGATGTTAATATACTCA
TTTTCAAATGAGGAACTGAGGTCCTGGGATGGTGATAACCTCAAGGTGACACAGCTGAAAAGTACCCCAA
TAGGATTTCAATCCAGCTAACCAAATCTGGGTTAAAGATGGGGTCTTCTGAATTTAGCCCAAACACAGTC
AGTCAGATGCTCCTTCTGGGTAGAAGATCATCTTTCCCATAGCAAATGCTGGCTGCTGGGAGCTGAGTGC
ACTTGTCTGTTATGTGGTGCACTCTTGAGGCCTCAAAGCTGGTAAAGGGCCTTTGCCAAGGGGTCCTGTT
GGCTTGTCCTGCTCCCTCCAGGGAGTGACCAGCCACCCCACCAGGCACAGCTTGTGGATGTACTGCCAGC
CTGGGAAATGGGAGGGTGAGGGTACTTTTGTTTTGCCTGCCAGCATTACCTGTCCTCCTGAAGCCTAGTG
CAGAAAGGGCTCTGAGCCAGCACAGCTGGGCAGATTCCCCACTGAGCCTCCCAGGGTCATGGCAGAGACA
TGATAGGACAGTACAGACAGGCATCCGTGCAGGGCCCGTCCTAATGAATGTCCCTTGACTGCCCTCTTCC
CCCACCCCAGATGGTTAGAAATGCAGCAGTTGGCATTTCTGTCACTGCCAGGCCCCAGGGGAGCTGCACA
GGGTGAGGTCAGAAGCCAAATTCTACAATTTGGGAAATTAGCAGCATTTGTAGGATTCCCAAGAGACGTC
CTGTTTTCTCTCAGCTGTTCCAGTTGTTCTCAGTTGGGGTGTCACTGCCCCTACAGGGCATTTGCAGATG
TGTGAGTGAGTCTACAGTTGTCACAGTGACTGGGGATCCTCCTGGCATTTACCTAGCGGGGTTCCAGGTA
TGCTAAACATCCTGCAATGAGCTGGACGGTCAGATACACAAAGAATAGTCCTGTCCATGAGAGACATGGG
GAAATGACATTTGCCTCCCCGCCCCTGGTTCCTTAGAAAGCCACTGTCCCCACCAATCTTCAGGCTGAAT
TAACAGGAAATAAAGGGCAGGCTTCCATTCCAGTGTATGACCAACAACAAGGTGTACATGGGCAAGTACG
AGAGGAGCCTCCTGTTTTGCACCCACTTACCTTGATTCTTTATAGATGGTTCTTGCATCAGCTGGGTTCT
CCTGGGTCAAGGAAGACCTGGATTTGGGTAGTGGAAATCCATGGGGCAGTGGGATACCTCCTCCTTGGCA
GCACCCTGGTGCCTGGCAGGAACAGCCCTCAGCCCACCTGGTATAGAGACTCGGTGGCCTCACCACGGGG
TCCCTAGCAGGGGCCTGTCTCCCACTTCTGTATTTCTGCAACTCGGCCTTTCCCCTGTGCTTTTTGGTTT
TGTTATCTTTTCTTCAAATGCAGTGTGTTTAGAAGAGCCTAGCTCAGATGCCATGACTGAACACCTCTCT
CCTTGTTGTTTTGCAGTCGGGAAGACGTCTCTGATTACGAGGTTCATGTACGACAGCTTCGACAACACAT
ACCAGGTGAGGTCCTGGGTGCTCACCCTCCATATCATCTGGCAGTGGCTGACCTCTCTTTGAAACTTGCT
GAGCTGGGGTGGGAGTGGAATGGCCCTGGGTTCCCAGGCTGTCATTTTGCTATGGAGGAGCTTCCCACCT
CTATACTGGCCCCATCCCTGTAAAGAGCTTGAGCCCTTCTGAAAATCCACCCCTCGGTAAAGGGAACATT
TTTCAGAGGAAAATTCTAAAAATAGAGAGAGTCTGTGTTCTCTTGTTCCTCACAGGCAGATCCAAACCAT
GATAGTGTTTGGTTGTTCAGGGGAGTCATCATGTGGAAGAGGAACAAGATGAAAATGAGAGTGTTAGGCG
AACTTGCGCCTCATGCATGGTTGTAATGGTTATGTTTGCTGGGACCTTCTCTCTCTCTCACCCCCGCCCC
CCCCCACACACGCACACAAACACACACACGCGCGCACACACACACACACGGTTGCTGAGGCACTTCCTTC
CCTGGAGAGGCTGGTGCGATGAGCTTGCCCTGCCCTACATGGGCAGGAGGCTGGATGCGGTGACCTCTGC
AGCTCCTGGCCCTGGAGGCGTAGTCTGGGGTCAACCAGAGGCCCAGAGGTGGTTCCAGGTGCCCTGAAGG
CCAAGTTCTTGGGGGTTAATAACATGTCACTTTCCTGGCACCACTGGTGAGTAGGGAGGTTTGTGCAAGT
AAAGTGAATTTTCCATGCAATTATAGCTTTTTGCAAAAGGCACCAAACTTAATCATTTCAACTCTTTTAA
AGAAAAAAGGTGCTGTTTTATTCCTTAGATAGAGACAAATGATAATGCATTTTTCTACACTAGTGGATTC
TGTGAGATACTAATTCCAAGAGGTGTTGGTAGGTGTTACTTGAAAAAAAGTTGAGGTAGGGGGTGGTGGG
TTCAGAGCTTGTACAGATTTAGGGAACACTGGGTGAACAAAAGTAAATCTACTGCTGTGCTGCAGGGCTT
CTCGGAGCCTGACTATATCAGTGTATAGTTTTGATTTACTGAAAGAGGGATATAGTGTGTAGGATCTCTC
AGATGTATTTGATCATGGAATCCCTTGGTTATCGAGTTCTCAAAGGACAAATATTTATAGAACACAGCGG
GGACTGCTGTTCTAAGACGTCCCTCCTCCTTTCTGGATTTACAGAGTATGTGGAGCACAGCTCACTGCAG
ACTGCAGCTCTGTATCTACTTTTTAGTCTGTCTGTCTCCCTCTGGACCAATTATCCTCCTTGCCTTAAAT
ACAGCCCCTCTGTCTGCCTCTCTCTCATTTTTACTCTTTCTTTGCTGTGGTCTCAATTTTTACTTTACCT
CTGCTTCTACTCTGCTATGGTCTGAAATACTGGCTAGCCAGTGGACTTGGTGAAACTGACCATAGGAATT
GACAGAGGCTCTGGGAGAGGGGCCCTGGCTGATGTGCACAGCCTCAGGTGTGGACTGTGGGATGTTCACC
TTGGTCACACTTTGTCTTTGTTGTATCCTCTCTGGGCCAGGGCTTTGTAGCACCAAGCCTGTCCTCCTAA
TGAGGGGAGTTCTACTGGATCGGTTTGAATTCAAGATGACAGCTGCAACAGACTTAGTTCTGAAGTCTGA
CTTGGTATTCATTTATTTTTGTGCATGCATGTGTGTGTATGAATGATCTCATATATTATTTTGATTTCTT
ACTATTAAGTTACATATAATGCTTCTTGTTAGTGTCCCATTGAAAACAGTGAGACTCTTGGTTGGTTGGT
GTTCTTGGCAGTGGCAAGGGGGTGACAAAGGGGGCCCCCAGGCCTGTGCAGTGGGTCCCATTAGTATGGA
TCAAAGCCTCATCTCCTCCCCATGTCATTCAAGTTCCTCAAAATCTCGCCCTACCTCCATGTTCAGCGTC
GTCTCCCATTGCCTACTGCTTGTCCCCCATCCTGTGGTCCAGCCGACTTCCCTGCTCCTACTGCCCTTGG
AGTGACACTGTTATGCCTCCACACTTTGACTCATGTCATTGCCTCTGCCGGAATGCCCTTTCCTCTCTTC
TCTGCTGCGAGAATTCTCTGGATGCATCAAGGCCCAGAGCACATGTTTGGTCTGAGCAGCGAGGCCCTTT
CATCCTCTGTCCCCTCCGTGACCATCTTTCCTATAGCATCATCCTCAGGGCTGGTTTAGCCTCTCAACTG
TGCAGTAGCTCCTGTGTGCATCTGGCTCTGAGCTGGGCTCTGTGCTTGGCTGAGGCCAGGACCCTCTGGG
ACCCACCACTGCATTCATGAGTCTAGCACAGGGCCTGACCATAGTTGGTATCACCAGTGCCTGCTGGCAC
ACACACAAAAAAAACAGCATGGAGAGTTGGCCTCGGGTTTTAGACCCATCAGATCAAGAGGCCTCAAGGA
CCCAGTGTGGTGACAAGAGGAGAGAAACCTCAGAGAGGACTGCCCTCCCCATCGCAGGCTTTCTCTTTTT
TTTTTTTTCAATATTGCAGCAGGTGGAATTCCTTTCCCAGTGCTCTTAAAAATGGTAATTAGGCTGGGAG
ACCAGGGCTCCAATTCTGTGTATACAGAGGCTCATTTTAATGAATTCTCTGGAGATGGAGAAGGGGAAAT
GTTATTTTGTTTGTTTTTCCTAACATGGTGGCAGAGGCATTCGAGAAGTAGACAAGATCCCCAGGGTCTT
TGGGGATTCAGCTTACCTCACCCCAAGTTGTGCCCCTGCACAGCAATCACTCCCCACCACCCCTTCAGAC
ATCCTTCCAGCAGTACAACCTGGCAGAGCTGTCTTGCCTTGATTGGCTGAGGTGCCCAGACAGTTCCTAG
AATGGAATCTACCCCTCCTTCCCTCTTTCCATCCCACACTTTCTGTCTCTGGCCCCACTACTCCCCTCTC
GTTCACTCATTCTGACAAAAGATGTTTGTCAAATGCCTACTCTATGTTTGGAGAGGCAGAAGAAAGTGGC
CTGGCCACAGAATCTGGCCCTGCCTTCAGCCAGGGCATGAAGGACAGGGAGGGGGCGTTTAACCCTATCC
TCAGTGACAGCTGGTGAGTTCTTTCTCGGTCTAAAACTGAACATGCAGGAGACCCTGAGGGGCTGGCATG
AGGACCTGGGTGTGTGGAGCTGGGTTCTACAGACCTCTCAAGACTTTTTGTCCACCTGGTAGGCCCCGTG
AGATGCCTCAGGGGAGCAGGTCTTCTACCTCCTCTTGCCTCACACTTACCTCCTCACCCCCAAACACACA
TACACACATGTGTTCTCATGACACATGTACTCTCTGGCCTCTCAACACCCTGCCCATCACCTCATCTAAA
TCCACTCACTTGAAGAAGTAAAAAAACAAGAGTCACAGCCAGATGAGATTCATGTCTGCAGTGGTTCTCT
CATATAAAACCCCAACTAAGTAATTTTCAAAATTTATGATAGAAAAAAACCTTCCAGTATGTGCATTGTG
ATGAGACTTGGCTGTCTTTGGGGCCAGCCCCCTTCCCCTTCTGCAGGCCTGGTCTGTGAGCCGCCTGTGT
GAAACCTGTACTCATGCCACCATGGAAGGGTTCAGCCTCTGCAGGTGCTGCTGGGGATGGAGGGGGAGGA
TTTGGTGGTAGCAGCACTCTTCTCCGGTCTCTCATGGGCCCTCTATCACTCCTGGCTGCCTGTTAGCATC
ACCTTTTGCGAGATTCACGGGCTCGGGTATTAGCATGCTTAAAGCCTCAGCAGTGATTGTGATGCACTTA
GAGCCACTGGCTTGTCCCTGGGCCTCACACCATGGCACAAATTAGGAAACCACTGACTTAACGGGCTGTC
CCTGGGAGCAGGTCCCTGGCCTGCCAGAGCTCATCCAGCTGCTCTCAGGAGGACACACTCTCAGAGTGGA
GGAGCATTTCTGGAGGCCTGTGAAGCTCTGCCTGCGCTGGATCCTTTCCTGGGTCCCACAGAGCCTGGGA
ACAGAGTGGCTGCCTCCTTGCCCTCCCAGGCCAAGGGGTTGCCTGAGATGCTCTGGCCTTGCAGGTGATC
CTCACTGCATTCCTGCCGCTCCGCCCTGAGGCTTTCCTCTCTCTTCTCCTGGGGCTGCCTTAACAAATTG
CCGCAGAGTGCCTTAAAACAACAGAAGTTTATTTTCTTACTGTTCTGGAGGTTGAAGTCCAAAATCAAGG
CATGGAGGGCCTTGTTCTCAGAAGGCTCTGGGAGAGAATCCCCCCAGCTTCCAGTGCCTCCGGGCCTTCC
TCGGCTAGTGGCTGTATCACTCCACTCTCCGCCTCTGTCTTCAGCAGGCCTCCTGTCTCTCTGTGTCCTC
ACCTCTTCTTAAGAGGACACCAGTCACTGGATTTAAGGACCCACCCTAAATTCTGGATGATTTTTTCTCT
CAAGATCCTTAATTAATCGTATGTCCAAAACTGCAATTTTCAAATAAGCTCATATTCTGAAGTTCCAAGT
GGGCATGAATTTGGGGATGGATACCCTTCAACTCTCTCCAAAATCCTAGTACCTCCCAGTCTGATCCCAA
TGGGGACTGGACCTTCTGGCCTATTCCTCAGCTTGGGCACCTCCGCACCCCCCAGCATAGCCCCTGCAGG
CTCCGAGCCCCTCCGGCCCTTCACGTGCCTCCTGCCCAGCATCTCGACCTGGTGAGGCCATTTCCCCCGG
GATCCTTTCTTGGCCACATGTCTTTTTATTCTCACAAGGTGTCTCCAGATCATTTCTTTGTGTAACATTT
TGTACGTTGATTTAATGAAATAAATATGAGTGTTTCCTGGGGCCTGGCCATTGTGTCTGCAGGCCACTTA
TCTGGCTGCTCAGCCCATAAATCAGCACCTGCCCCTCCCCAGTGATCTTGCCCTTCTGAGAGGAGCTGAG
CTCCACACACAGCACATCCCAGCTGCTTAGGGAGGGGACAAACAGGAGAGGTCACTGTGCATGGAAGGCT
ATGCTTTATTCAACATGGTATTTGGTTCTCTGCTATCTCTTTCCAGGTCAGCACATTCTCAGGTGGCCCA
GGGGGTTGCCAGCCTTGGCAGCATGACCTTAACAAACAGAGACTCGGGCCTAAAAAGCCCTCGCACTGCC
TTTGCTGGTGTAGGTGAGGTAGGACCCAATGATGAAAACAGACCTGAGTGGGGATCAAGCCAGAAGGTTC
CCCGTGGACACACTCACACACTCATGGACACTGGACCCTGACACCCACCCCCAACCCAGGAATAGAAAAG
GGGCGTGAAAAGAGACACCTGTAGGACTTCCGGCAAGATTCTGAGGTTACTGAGCACTTTTTTCTTGGTG
TAATTTTCCATCATCTAGACTTTAAGACCTACATGAGCTACGGTTTAAATATAAATTTACAGCTGAGGGT
GGGGGTTCACACCTGTAATCCCAGCACTTCGGGAGGCCAAGGCCAGAGGATTGCTTGAGGCCAGGAATTC
AAGACCAGTCTGGTCAAGATAACGAAACCCTGTTATTATAAATTTTTTAAAAATTAGTTGTATATAGTGG
CATGAGCCTGTGGTCCCAGCTACTCAGGAGGCTGAGATGGGAGGATTGCTTGAGCCTGTGAGGTCAAGGC
TGCAGTGAGCCATGATCATGCCACTGCACTCCAGCCTGGGTCACAGAGCAAGACCCTATTTCAATCAGTC
AGTCAATTAATAAATACATACATACATACATATTTGCTACATTCCTACCTCTAAAGTAGGCCACTGGTCT
AGATGATACAGGGGTTAAATTCCATCTGATTAATTTCCAGGTTAAAAAAATGCAGTACTAAGACGCTGAA
AAGCTCGGCATGTTGGAGTGGAGGGCAGTAGTGGGGCCTGTGAGTGGGCTGTTGGCAGGGCTGCATTTTG
ACTTTCATGGGCCTCAGGCATTTCGCTTCATGGGCCCTAACATGGGCTGAATTGTGTCTCCTCAAAATTC
CTGCATCGAAGTTCTGGTCCCAAGTATCGCAGCATGGGACTGTAGATAAAGATAGGGTCTCTACAGAAGT
AAAATGAGATTATTAGGGTGGCCCTAGTTCAATATGACTGGTGTCCTTATAAGAAGAGGAGATGAGGACA
TTGACATTCACAGAGAAAGACAATGTGAGGACACAGGAAGGGACAGCCATCTGTAAGCCAGGGAGGGCCT
CTCAAGAAGCCAATTGTGCCTACACCTCAGTCTCAGACTCCAGCCTCCAGAGCTGTGAGGAGATGACTGT
AGTTGAAGCCATCCAGTCTGTGGTACTTTGTTATGGCAGGCCTAGGAAACAAATACAGGTCTCTTCCTTT
AAAAACATGTTAAGAATTATATTTTTACAGCTACATTGGTATAGAGATGAATGTAATTCAGGCTGGATTC
ATTATAATTATAGTCATTTCTTCTCCTGATTTTAAGAGAAATTAAAATGGAAACATTTTCCTTGGCCCTT
AAGTGTCTTACGGGCACTGGGCTCTGTGCCCCTCGTGCCTGGTGGGTGAGTTGGCCCCAGTGACTGGGAC
TGTGGAAGGCCCGAGGGCGGGTTGGGATCCCTGGGTAGGAAGGGTGCGCCATGGAGGGTTCCTGACCCAG
ACACTGATGGGATCAAAGATAAGGAGTTTGTGGGAGGCAGGCCTGGAGGGGCTGGGCCGGGACCAGGGGT
GGCAGCTGAGGCGGGGCACACAGACTCAGATACAGCTGTGTGTGGAAGGGCAAGGAGGGCAGGGGCAAGG
GAGGAACCATGCAGGGCTGTGTGGGAGGTGAGCGAGGGCCCTAGGAGAGATGGCACAGGAAGTGGAAGGG
GCCAACGAACAGTGTGTCTGTGGGTTACATAGAGAAGAGGAAGAGGCCTGAATGCGCCCCAGGTTTCTGT
CTAGAAATGCTGGAAGAATATCAGTGCCATCAATACAAAGAAAAAGGAAGAGTCCAGTGGGAGGTAATGA
TCAAACAGCCAAAATGCTTGCAAATGGCTGTTCTATCAGGCCAGCCTGTGAGAGACTGGGCAAATCTAGA
TTCCTAAAGCCCTAAAAATGGGTGCGTTTTCTCTAATGGAATGTAGAACGGAGGCAGAGTGCCAGAAGGG
ATCTTTTACCCACAGAATCTAAAATGCCGCACGTCCCCAGCACCTGGGGGAGATGGGACAGGATCTTCTG
CCCTGGTAGAGGTGGTCAGAGTGAGGGCACACGCCAAGGAGGATTCAGAATGTCCCCTATGCCTCAGTCC
TTTTTTTTTTTTTTTTTTTTTTCCCTTCAAAAAGAGGCCTAGGTTTAAGCCCCAGGTTCAAGTCCCACTT
CGCTGGGAGACCCTGGCCGAGCTTTTTAGTTTCTTAGTATTACTCTTTTTTTTAAGCTGGAAATTATTCA
GATGGAATTTAGCCCGTCTATCACCTAAACCAGTGGCCTTAAACTTTGGAAGTAGGAATGTAATTAATTT
GTATTTGAACTATGGCTCATATAGGTATTAAAGTCGAGGTGATGGAAAATTATGGGCCAAAACCACTGTT
GATAGAAATGTGCATTACTGTACAGAAACCCTGCAACAAACCAAGATAATAGTGATAAAGTGAAACAAAT
GACAACTTTCCACAGTGTCCCGACCATCCCTGCATGTGCACTTGTGCTGTGCTTTGCAGCTCTGCCAAAT
GATGCTCAACCCCATAGACTTCGGGCAGAGCACTGGACTGCAGTCCTCGGTTAACTCTAGCAACATGAGG
ATATTTTTTATATTAATAGAGTAGAGTTTCATTTTTTGCAGACATTATGTTCTGGGGTCACAATATGAGG
TGACACTCTTATGTCGTGAAATCTGAATGCCAATCACTCTGGCAAGATGACCCTGCCTCAGAGACCCACT
GGGGCACTGCAAGTCATCCAGGTGTTCCCTCTGAACATTGACCCGGCAGAAGATACTCCAGGCGTTGGAC
TTTTGAGGGCATCTAAGAACTTACTTATGGTAACTACAAAATGAATTAGGAAAGATTACTAAAGCCTGGA
GCAGAGAACTGCATCCTGAGTCCATTCCACTCATTAAATGTATCAGGAGCTACTGGTGGGCTCACCCAGT
ACCCATTGGCAACCTCCTACTCCCTCGCTTGATTAGAGACTGTAAAAGCTAAATTTGGCTTTCCCAGCCT
CTCTAGAGGCTAAGAGTAATGATATGACTCAATTCTGGCCAATAAGACACAAGCAGCAGTCTGCTTGGGG
GGAAGGATTCCAGGGAAGCTCTTGCTTGCTTTTTCTGCCTTGAATGTGGATGTGATGTCTGGAGCAGCAA
CAGACAGTCTGTACAAAGATGAGAACCCATGGGCCACGACAGCAGAACAGAATAAGCAATAGTCCAGGGG
CCTGGTGTACCACCACTCAGTGTGCCAACCACACTGCCCAGGCTCTAACATCCTTTCTTTCTCTCCCTCC
TCTCCTATGTCCTCCCGTCCACTTCTTTGTCAGCACATGCAAATTAGAAATGTAGTCCCCTCCTAGTACA
GAAAGCTGATGAACAGTGGCATAAATGAAGGAGAGTTTTAATTTTGTAGGTGCAAGAAGTCATGTGGTTG
GCACACTGAGTGGTGCTACCATCAGGCCCCTGGACTATTGCTTTTTCCATTCTGCCGTCGTGGCCTGTGG
GTTCTCATCTTCGTGCGTGCTGGCTGTTGCTGCTCCAGACATCACATCCACATTCAAGGCAGAAAAAGCA
AGAGCTTCCCTGGAGTTCCTCCCCGCTCCAGCAGACTGCTTCCTGTGTCTTATTGGCCAGAATTGAGTCA
CACCATTACCGTTAGCCTCTAGAGAGGCTGGGAAAGCCAAATTTAGCTTTTACAGTCTAAAGTAGTCAAG
CAAGGGAGTAGGAGGTTGCCAATGGGTGCTGGGTGGGCCCACCAGTAGCTCCTGATACATTTAATAAGTG
GAATGGACTCAGGATGCAGTTCTCTGCTCCAGGCTTTAGTAATCTCTCCTAATTCATTTTGTAGGTTACC
ATAAGTAAGTTCTTAGATGCCCTCAAAAGTCCGACACCTGGAGTATCTTTTGCTATAAGAGTTGAGGGGA
GGGCTGGCACACATGAATCCATTTGTCACCCTTTGGGAGGCCTCTCAGGGAGCTTCAGGCCACACGACCT
TGCACATTATGGGTAGCTTTTGAAGGGACCCACTGATATTGATGAAATTTAACCTTATTTAAAATTTGAA
GGTGTATGTTGTTTTCAGACCACAGTCAGGAAATAAAAGAGCAATCACATATTTAAATTGGGTGGTGACT
AAAGTACAAGCCACTCTCCATTGGGAGAAAAGTGGCCTCCAGGACCATACAGACTTTGAAACTGAGGTAT
CTGGAAGAATGCAAGTACCCGTACTGTGGCCTTCTGAGCCAACATCCCCTCCCCCAGGGCGCATTACTGC
GCTTCTGGCAAGGATATGCCCAGCCTATTTGCCAGAGACTGCTGTCTCATCTCTCCAAAGCACCCACTTG
CCAGTCTGGAACCTGAAGTTTCAGCAGGCTCATTTGCAAGCTAATTTACATGACTTTACCCTGATACTTT
CATTTAATGGTTAGTGGTGCAGAGCACAAACAGCAACTTCATTGTCAAAGGCTTGTCATGCCCAGCTGCT
TTCTGCCACTTATGGATGCTTCCCCAGCCCTGGGCCCAGGCCTGGCCAAGGCTAAAAGAAGACGCACGTA
ACATGCCTTTTCATTATTTCTTTTCCTGAGAAGAGAATCTTGAGTCAATTTATGCAAATTACCATGCAGA
TTTCCATTGCAGACTTTATTACTGTGTCTTGTCAGAATGTGGAAACAAAATTGTATTTCATAATAAATGC
ACATAGCAAAGAAGACTTCAACAAGTGCCTCAGGAAACGTCTCTTTCCTCCGGGATCAGCTGGGCCAATG
GAAGCTTCTGTGCAGAAGGAAGCATGTAATGTACTGTCATTCTGCACTGTATGTCTGAACCCCTGTAGAT
ACTGTTTAATACCATGTTCAGAAGAAGATAAATGTGGATTCAGCTATGAAATCCATGCTCATAAGATTCC
TCACATTTTGTATAAAATGAAGGGCCTGCCATTTCTCATATACAGTGCTGTTTGTAAGCACAAAGATATT
AAAGGAATAAATAAGCATTGCCAGGTTTGGAGCAATCTCATCCCAGCAGAGTGCAGCTCAGCCTTCTGAG
AGGACATGGTGCAGTGCAGGAGGTGTGCCCAGCACAGCCGAGGAGGGAGAGGAGGGTCATAGGGATCGTG
GACTGGCTGGCAGGAAACTCCCCAAGGTCAGACCTGCTGCTCATGCTGTGTTGATATCCTGCGTTTACAT
CCCTGTAAAATAGTTACCAGCAAAAATAATTTGCTTTGTACCTCACAAGAGAAAATGAAGTTCAGAGAAA
GAATGCTTTGACCAAGACTCCATGGCAAGCTAGAAGAGGGAAGTAGTCTCCTTTAGAACCCGTCTCTCTG
AAGGTCAGCCTTTCATGAGGCTCTGGGAATACTCGGTTATTGAGATGTTTGTAGGGATTGCAACCACAAA
GGTTCCTAGGGCAAAGAAGCTGGGGAAACATTGGGTTCGTGTTTCTTCAGTGCAGAACTCATCAGAGCCT
TTTATTTGCCAGTGTGCCTTATGAGAGGCTTTACTAAAGAGGCTATCTACTCAGGGCTAGAATATGTAGC
CTTTCCCAGAAATACTTGATCACCATTTACTTTTGTTCCAAAGATGGTCTCATGGGGCTGTGTTTCACAT
AACCACACTGAGAAACATTGCTGGAGAGTCTCCATGGGGTGGGTTCTACAGCTTCTCTTAAACCTCTAGG
TCAGTCGGTCACTAATAACAATTCATAATCTTTGTTTACGCAGCATATCACAGAGTATGCATTATCTTCA
CTTTCTCTAACTCATTTGATCCAACAGTCCTTAAAGGAAGCTGTGACTTTTCATGTATTAGAGATGAGGA
AGCCAAGGGCCAGGGAAGCTAAGCCATTTTTCCAGGACACTCCCAATCCAGTGTTGGTGTTGGCAGAGCA
CTCAGACCTTGCCAACACTGACAGAGGTCACCAAAAACAGACTGGGGCTCCCTTGGCATATTACCCCATC
CAAGTATGTTTGAGTGGGGCACTCTGCCAGCTGCATGGCCATTCCCCTGGGGCAGGGTGCATGGTAGCTC
CTGTGGGGCTGGCTATGGTCTGTCCTGGGGAGCATTGACAGGCATTCTAGATTTGCCGGCAGACATATGC
TCCCCATCCCAAGGGCCTGTGGAGCGTCCTCTTCACCTCAGCTGCCTGGCATTGCTGGGCTATGTGCATA
TCATGGATCTGGGCTTTATCTTCAAAGAAGAAATGACTCCCTCCCTACCCCCACACTCTCATACCCACAT
ACACATACTTCTACATGCAAATAAATACATAATTACATACACATGTGTATCCCCACTCATCCACGTGTCT
GCTCACACACACTCATACCCACCTTCCCATCAGTACACACTGTGGCCTGTGGTGACCTTTGAGATGAAAT
GTACCCTGTGGCAGGTCACAGGAAATCACCAAGGTTGCTGGGGCCTTTTTCAGGAGGATATGGCCTACCT
GGGTGGCTAGTTGTTCTTTTTGTCTGATGTCCCCATATCCCTCCAAAGTAGGAGCCACAGATATGACTGT
ACTACAGATGCAGAGGAGGAAAAACTAGCATCGGAAAGGAAAAGAGGGTAGGGGAGATAGCTATAGCAGA
AATACTGCATGGAGCTCAGCATTTACCTTTGAGTTTCCTGGTGGCTGGAGGGAAAGGAAATACCATGCAT
GGCTCCCACATACTAGTGGCAAAATGCTCCCAGGCTTGCATTTTGAGCCAGATATTGCTAACACTTGAAC
AAGGTCACGCAGTAAGGCAGGGAGAGTGGTCAGGTTTAGAATCAAGGATTTGCCAGGCATGGTGACTCAC
GCCTGTAATCCCAGCTCTTTGGGAGGCTGAAGCGGAAGGATCACTTGTGCCCTGGAGTTCGAGACCAGCC
TGGGCAACATGGTGAGATCCCCATCTCTACAAAAGAAAATTGTTTTTTTAATTAGCTGGGCGTGGTGGCA
CACTCCTGTAGTTCCAACTACTTGGGAGGCTGAGGCAGGAGAATTGCTTGTGCCAAGGAGGTCGAGGCTA
CAGGGATCTGTGTTCATGCCACTGCACTCCAGCCTGGGCAACAGAGTGAGACCCTGTCTCAAAAAAAAAA
AAAGAAAAAGAAAAAAATCAGGGTTTCTCTGCCCCAGCTTACAAAGAGGTATATGTAATGGCTTGGCAGG
TAGGGCATCTAGTGACAGTGTTACCAGCAAGATAGAGACTTTCCTCACATGATGATTTGTGATACAGACC
CTCACAGACCTCCAAAGTGCAATGCCAGCATAATCTGGCTTACTTGCTGCTAAAACCATCCTGGAGAGTG
TGGACAAAGCAGCCTAGGCCCGTGGTCTCTGAGGATCTGATTTGGCACAAGTCTGAGACTAGAGTACCCA
GCAGAACAGTGGTAGACACAGCTCTTAGACAGAGCCCCGCAGCCCCGGGAATCCCAGGAGCACCATTGGC
TTTGATGCTTGGCAATCTTGTATTGGCTGGTAAGCCCAGCTGCCTCGCAAAACCACGCCTGGACCACGCT
CATTCCCTGTGACGAGGAGAATGCCCATCAGTGTAGATCTAACTTTGTGGCTCTCCATGGAGGTGGCATG
AATGACACCCAAGTGTGGTCGTTTCTCATTAGTTCTAGTGGTGTGGTTGCAGTTGCTTCCAGAGAAGCAG
CACCTTGGGCCATCCTTTAGTGGCTACCCTAGCTGGGATGTGCTCCAAAGGAGTCAGCCCATGAAGGTCG
TCTTTTATTTCATCACCCAAAGCCCATGATTTATCATCAGAGAAGATGCAAATTAGTTCCTGTGACCTCG
CTGACTTGCTATGGGACCTCAGGCAAGTCACTTCACTTCTGTGTGGCTCTGGCTTATCTGCAAAGTGTAG
TTAGTGTTCCCAGTCGTGCAAGCCACTCCCCCCTTTTCTTGTTAACAGTACCTTATCTTAGTCACCCAGC
CTCTCTACATCTTTCACACCCATGGAGTCCTGCCTCTGCTTCTTGATATCACTCATGTGTCCTCCTTCCT
TCTCACTCTGCTCTTCTCTGCCCACACCTCTTTGCCTGTCTAGGCCTTTGCAGCAGGTTCCGTTTTGTCT
CCCTTGCCTTTATCCCATTCACTATCCTTCAACCAGGGTTATCTTTCTAAAGCCCCAGCTACATGGAAGT
CCCTCTTCTTTGGTCGTTTATCAGTTCTTTGGCTCCATCCTGTTCTCTACAGGCAATTCACAGTCCATTG
GTCCTGAATCATTTTTGTTTTTCTGAAGAAACTGTGTGGCTTCACACCTCAGGGTGTACTGAAGCCATCA
CTTTTATCTAAAACAAACAATGTCCTGCATTGACCCATGCATGTATTTACCATTTCTGATGCTCACAATT
TCTTCCAGAGAATTCTAGTTTCCATTAGTATATTTTCCTGTCAGCCTGAACAGCTTCCTTTAACATTTCT
TGTAGTGAAGTTCTGCTTGCCACAAATTCTCTTTGTTTTTGTTTATCTAAAAATATTTTTATTTCTTCAT
ACTTTTGAAGAGTATTTTTGCTGGATTTAGAATTCTGTTTCCACGGTTTTTTTTTTTTTTCTTGAACACT
TTTATTGTGTCATTCCAGTGTTTTCTAGCTTCCATTTTTTTCCAGTATGGCAGCCGTCATCCCTGTTATT
TCCTTGCGTGAGGTGTGTCATTTTCCTCTGGCTACTGTCAAGATTTTTCTTTATCTTTGATTTTTAGCAG
TTAGACTCTGTTATGAATAGACATGTGATTTTGTTTCTTTATTTTTTTAATGTAATGCTTGGAGTTGGAT
GAGTTTTTGAATCTGTAAATGTGTCTCATTTTGCACTCAGAAGACTTTTCACCATTATTTCTTTAGTTTT
TTTGTCCAATTCTCCATCTCCTCTACTTCTGGGACTCCAGTTAAACATATGTTAAGCTGTATGAGGCTCT
GTTTATGAAATTTTTCTCAATTTTTTTTCTCTTTATGCTTCCTTTTGGATAATTTATATGATCTATTTTC
AAGTTCACTGACTATTTCATTTCTCTTTTTGAATCTGTTGTTTCAGATGTATTTTTCAGTTCTAAGTTTG
TATTTGGTTCTTTACTTAGAGTTTTAGTTTCTCTGTTGAGATTTTTAAATCTGCGCCTTTATTATGAGCT
TATTTTTATATTTGAGCATAGTTATATGAACTATTTTTAAATGCTTGGCTATTTTCAACATCTGGGTACC
TCAGAGTTAGTCTCCATTTAATCTCTTTTTTCTTGAATATGGCTGACATTTTCTTATTCATATGACTAGT
AATTTTGGGTTATACATTATGTTAAAACTGTGGATTCTGTTTGTTCCTGTGAAGAGTACTCTTGGTTTTA
GTGGGCAGCTAAATTGTCTGGACCCAAATTCTCAATTCTCCCCCCCGTGGTAGGCAGCAACTGAAAGTTA
TGTTCAGATTTTTTTGTTTGCCTGTTTTATTTTGTTTTCAGTCTTAGGTAGGCTGCTTAGGGTCTGCTTG
GGTCAGTCAGAGATTTGGGTAACATTTATATGGAGAATTTGGGGTCACCTCTCTGTATCTATGTCACTTC
CAGGGTTTTCCACACTTTCTGGCTGCTGTAGTAACTTTGCAGATTGTTCTCTAATTTCTCAACCAGTAAG
ACTGTTTGTGCCTTATTTGAGGCAAATAGATGATGTCAAAGAGCTAGAAATTTTCTGGTAACTGAGGCCC
AGCCAAGGCCCTCTTAAAAGTTCTTGTTTCTATTCTGTCCTTAGAGAGCTGACTTTTCTCTTCTGGGAAA
TGAACTTCACCTTAAGTGGGCTCTGCTGAACTATTATGGCTGATGACCATAAGATTATGACAGTAGGTAG
CCAGATAGTTTGTGACCCCCAGAAATATTCAGTGACAGCTTCAGGGTGCATGACAGGTTCAGAAATGAAG
GGATTTCAGGAAGGAGAGGGAGTACAACTGAATAGTCAAGAGCAGGGACTTTGCATTCAGGGAAACTGAT
TCTGACACTACTGACTGTGTGACCTTAGTTCTGAGTAAGCCTTGCTTTCTTCTGTGAATAGCACCTTCTC
ATGCATAAGCATCTCCCTCTTGTCTCTCACCCTGTACAGGGCATCTGCCACTCCTGGACAGCACAACCTC
CCCAGACTCTGATTACAACAGAAGGCAGTTTGCAAACTTTACTGCACAAATGAGTTATCTGAGGGCTTGT
CTGGAATTCTGATTCCCAGAGATTGTGATTCTGTCTGTCTGAGTGGAGCTCAGGAATCAACATGTTTAAC
AAACTCCTGATGTGATTCTGATGCACATGACTCGTGGGCTACATATTGAGAATCATTGAATCACTGGCCA
GTGGGAGAGATTGATTAGTATGAGATCTTTCCAGTTTAACAGAGAAAGTGTTAAATGAGGGGCCCTGGAC
CAACCTGAGGGCTCAGAAAATGATTTGTAGAGGAGGTGAATCTTGAATTCTGAATAAGTATAAACCATGT
GGAAGAGCATTCCAGAAAAGGGGACATTATTAGAAAAGGCCCAGACATACAAAGCAACTTGTTTATGAGG
AGTTCTGTACAGAATATTATTTCTAAAATATAAAGTGGAGGCTGGTCAAGGAGGGAATGAGTCCATAGAA
TGCCAGGGGCAGGCCCTGAACAGCATTATAGGCCAGCTTGAAGTGTTTGAGCTATCTCTTAGAGGCAGTA
GATCATATTAATATGATCATATTAATATTTCAGAAAAATAACCCTGTGCAATGGTTTCAGTGTCACCACC
AAAACTCATATTGAAATTGAATTCCCATTGTGACGGTATTAAGAGGTGATCCTAGAAGGTGCAGCTGCTT
TAAAAAAAAAAAAAAGTGGAGCCTTTAAGAGGTGATTAGGTAATGAGGGCTTCACCCTCATGAATGGATT
AATGCAGTTATTGCAGGAGTGGGTGGTACCATCGGAGTTTGGGCCCCTTTTTCTCTCTGTTGTGTGTTCA
CTTTCCCTTCCACCTTCTGACATGGGATGACACAGCACAAAGGCCCTCCCCAGACACCAGTGCCATGTTC
TTAGACTTCGCAGCTTCCAGAATTGTGATAAGTAAATTTCTTTTTAAAGTAAATTATCCAGTCTGTGATT
CTGTTACAGCAGCAGAAAATGGACTAAGACATCCTGCCTGCTACATGAAAGATTAATTACAGTGGAAAGC
ATGAGGGATAGTCAGAAAGCTGTTGGTGTTATTTAGGTAAAAGAAGTTCAGTGTCTAAACTAGGGCAGTG
GTGTTGGGGATGGAGAAAAAGGGGGCTGGGTGAGAGCCCTTAGGAGGCCAAGCAACCAGTTCAGTATTCA
TTTGATGTGAGGGAACAGACAGCAAGTGAAGAGGAGCAACTCAGGAGGGCTTTCAGGCTTCCAGAGGCGT
GGGCGCCTGGATGGTCAAGGTGCCATTTATTGAAATAGGAAAAATAGCAGAAGCAGGTTTGGAGGAAGAT
GATAGGCTCTTTTTGGAATATACTATATTTAGTCAGCTGTCTAGTGGATAATTAAGTGGGATTTGTAGTA
AGTAGCTGGATGCATAGATTTGGGGCTCAGAACAGGGGTAAGTCCTGGGTTATAGATTGGGAACTGATCA
GTATATCATATTTGAAGCATCGAGAGTAAATGAGATCCCCTCTGAAACAAAACAGTGGAAATGCCAACAT
TTTAGGGAAAGAAAGGAAGAAGATCCTAGAAGAGAACAATAAGGAACCGCAATTAGAGAGGCAGGGAAAG
CCAGAAACAAGTAAAGTCGTGGAAAGCAAAGAAGAAACAAATGCCATAGAAGAGGAATGGTCAGCAGGGT
CAAGTGTGTTGAGTCTGGACTATACAGTGTCCTCATGACTTGATAATCAAATGGCTATTGGTGACCATAG
CAAGAGCTATGGGCAGAGGGACAGAAACCAGACTGACCTAGTTGAGAAATGGGTGGGCATAGAGGAAATG
GATACAGTGGGTTTGAAGTCCTTTTCCAAGAAGCAAGCCCATTGAGAAGAGGTGAGAGATTGGCAGATGG
CTAGAGAGCAACTTAGTGAAAATGAGGGATTTTTCCACTCAAAAGATGTGAGAATCTTGAGAATGTTTCT
TGGATGAAAGGAAAGAGTGAGTAGAGAATGAGAGACTGAGATATAGAAGAGAAAGGAGATGGCTGAGAAA
GCATCATCCAGAGAAGGCCAGTGCCAAGAGGGCCTAGGAAGAGGCTTTCTTTAAACAGGAGAAATAACGA
ATACTTAGAGCCTGGAGGCGTGTGGGGATAAGGCTGGACATATGTAGACAACTTTGCAAATACCTTTTGA
ATCTTGACTGCAGTCTCAGCTGTGGACATTTGACAAGTCGCTTAGCATCTCTTGTCTTCCATTTTCTTAG
CAGTGACACAGAATACAGAAGAGCCTAACTCATCACATAGATTTATTGTCCAGATTAAATTAAGTAATGT
ATTTAAAGCAGTTAGTACAAGAGCTGGGAAATGATAAAGTGCTGAGATGTTGTTACTGTGGATGTCATTG
TTACTGTGATAGGACGCAATCAAGGACAAGTAGCGTGTTTTTATATTTGCCCATAGATTTGCCATTTCTG
GTGCACTTGTATTCCAGCCTTGAAGATTCTAATTTCCATCTACAAAATTTCTCTTTAGCCTAAAGCATCT
CTTATAATGAGTGCATGCTGGTGACAAATTATGTGACTTTCCCTTATGTGAAAATGTTTATGTTTTGTCT
TCATTTTTGAAGAAAATTTTCACCAGCTATAGAATTCTAGGCTGACAGGGTTTTTGTGTGTGTGTCTTGT
TTTATTTTTTAAGCAGTTTAGAGACGTTGTTCCCTTGTCTTCTGTCTTCCATTGTTTCTGATGATAAATC
AACTATAATTCTTACCATTGTTTCCTTGTATGTAATGTGTTGTTCTGTTTTCTGGCTGCTATTACGGTTT
TCTCTCTACTTTTTTATTTTCAGCAATTTGACTATGACATACCTTGGTTTGGTTTTTTACAGATTTATCC
TGTTTTAGGTTCACTGAACTTCTTGGAACTGTGGGTTGATGTTTCTAATTAAATTGGGTGAAGTTGGGGG
CTATTCTCAAGATGTTTTTTGCTTGCATCTGTTTCTACTGTCCTGAGACTCTAATTGCATTTTTTGTTTT
ATTATTTTTTGGGAGACAGAGTCTCACTCTGTTGCCCAGGCTGGAGTGCAGTGGTGCGATCTCAGCTCAC
TGCAACCTCTGCCTCCCAGATTCAAGCGAGTCTCCTGCCTCAGCCTTCTAAGTAACTGGGATTACAGGCG
TCCGCCAAGATACCTGGCTAATTTTTGTATTTTTAGTAGAGATGGGGTTTCACTGTGTTGGCCAGGCTGG
TCTCAAACTCCTGACCTCAGGTGATCTGCCTGCCTAGGCCTCCCAGAGTGCTAGGATTACAGGCATGAGC
CACCATGCCCAGCTTCCAATTGCCATTTATGTCAGCTCACTTGATATTGTCCTAGGAGTGCTTGAAGCTC
TCTTTATTTTTATTCCATCATTTTTCTCTCTGTGCTTCAGTTTGAACAATTTATTTTGGCCTGTCTTCAG
GTTCACTGAGCTTTCCTCTGCAGTGTCCTAGCTACTGTTATTTAAATCCAATGCATTTTTATTTCAGATA
TTATAGTTTTTAGTGTTAAAAATACCATTTTGTTTTGTTTTAGAATTTTCATAAATCTCTTGACAGTCAC
CCATTGTATTAATTTTTAATTTTTTTTTTTACCTATTTATAAGAGTTTTAAAGTCTTTGTCTACTAATTC
AACATTTGGATCATGTAGGGGTCTGTTGAGTTTTTTCCCTTGATTATGGCTTGAATTTTCTGTTTCTTCA
CATTTCTAGTCCTTTTTTATTGTACAGTGGACCTCATGAATAATAAGTTATAGTCTTGGATTTTGTTACC
TTCCTCTGAAGAGTGTTGTTTTATCTTAATAGGCAATTAAATGATGGGCAGTTAATATTTTTTAGGGAAT
GGTTAGTTATCATGTATGGACCTTGTTAAGACAGATGTCTTCATCCATTCAGGCTGCTATAACAAAATAG
ACTGGGTAACGTATAAGCAATTGACATTTATTGCTCACAGTTCAGGAGTCTGGGATTTCCTTCCAAGATC
AAGGCTCCAGCAGATTCCGCATCTGGTGAGGACTTGCTCTCTGCTTCAAAAATGTCACCTTTATGCTGTG
TCCTCAGTGGTGGAAGGGACGAACACTGCGTCCTCACATGGCAGAGGGGAGCCAGGGTGCTCCCTTAAGC
CTCTTTTATAAGGGTACTAATCCCATTCAAGAGGTCAGAGTCCTCATGACTTAATCCTTTCCCCAAAGGA
TGTGCCTTTTAATACTATCACATTGAGGATTAAGTTTCAGCATTTGAAGTTGAGGTTACAGGGGACACAT
TCAGACCACAGCGATAGATTTATTTTGGTTTTCTCTGAGTCCTCTGGTGTAACCCTCAGTCCTGAGATGA
TCTTGTTCCTCCCAAAGCCAGCCTTTCTGGTGTTTCAGTGGAGTCTGAGGTGTTTTTGAAGTTCTTTTAA
TTTGGTGGGACTGGGGAGTTTCGTCAGGAGGCAAATTGATTTAATGTAGAATCTGCCTAGTTTTCTTCCA
TTCCTTGAGCGGTTGTAACTCCTACCTACTTTTTTTTTTTTCTTTTGAGCCAGGGTCTTGCTCTGTTGAC
CAGCCTGGAGTACAGTAGTGTCATCATGGCTCACTGCATCCTCAGCCCCACCAGCCTCAAGCGATTCTTC
CCCTCAGCCTCACAAGTAGCTGGGACTACAGGCAGGCACCACCACACCTGATTAATTTTCATTTTTTATT
TTTTGTAGAGGCAAAGTCTCACTATGTTACCTAGGCTGCTTTCAAACTCCTGGGCTCAAGTGATCCTCCT
GCCTTGGTCTTTCAAAGTGCTGGGATTACAGGCATGAGCCACTGCACCCTGCCTCGTCCTGCTTTTGATC
ATTCTTCAGTGCTTGCAAATTGTTATTTCTTGTATTTTTCCAGATATTAAAATAGTTTTCTGTTGGAGGG
TTTGTTTGATACAAGCCACTCAGCCATTATTGAAAGCAAAACTTAGGAATATGTTTTTGAGCAGAGCTGA
GGGCTCAGTTACACCCAGAGACAATGCCTATGCTTTGGCGCCATCTCCACAGCTATAGAAGTTCTTCAGT
GGCTCAGTGGCCTGGTCAGATGGAGAGTGTGGCTAGAACAGGTCTGAGAGAGTGGACAGTTAAGGGACCA
GAGGTTTCTCTGTTGGGGAAGCTGGAAGCAGGAATTAAGAGAGAGCTGGAGAAGATGGGATGTTGGCCTT
GTTCAGGTTCCTCGTTGCTGCCTCTGGTTAGTCTGTTATGGGATGTGAGAGAAAGTATGTGGATGTTCAG
TAATGGTGTTTATGATTATGGAGGCCACTGGGTTGAGCTTTGCTGGGACTTCATCCAAGTGGCACAATTT
CTTGTTTCATTTGGTGACTTCTCTGCCCTTTGTGGAAGCAGAAGTGCCTTGTGACATGTGAGGTGTGATG
GGGTTGTCATCATTACAGTTATCAGTAGCATTACCATCAGGTGCCTACCTTTGAGAGATACGTTTCTCCA
TGGTTCTTTGCTTGTTAATTAGGCTATGTTAACAGAAACCCAAAATAACAGTGACTTAAACAAAATAGAA
CAATCTGAGCAGTCCAGCGCTGCTGAAGTAGCTCCTCAGGGTCAGGGAGTCAGCCTTCGTTGATGTCATC
GCTCCTCTGTCATCCTCATCTGGATGGGCCACTATGACTCATCCCCACCGGACAGTGGGAAAGGGAGCAG
CTGTGGGTACTCCCTACCCACAGAGGACCTGACCCCAAAGATGCCTACATCACGTTCACATCCCATTAAC
CAGAATGTAGCCGCCCAGCTGCAAAGAAGGCTGGGAAATATGTTCTTTATTTGGGGCAGCCCTGAGTCCA
TCTGCACACCCAGAATTCTGTTACTATAGAAAGGGAAACTACATACTGGGGACAACCAGCAGTCCCTGCC
ACCAGTCCTAAGCTCATGCACCTGGTTTTAGTTCAAAGGTGACTCTACAAAAGGAGCATGTCACTCCTGG
GGAGCCTGTTGAGCATTGAGGAGTTGAGAGACTTCTACCTGCTATGCACATTTCTCCATAAGGGAATCAG
AAGACAAGGATTGTCAATCTAACATACACCTGTGAAGGAAAAAGTCTGCATCCACAAGCACTGGTCATTG
CAGATTTGTGCCTCGGTGGCTACACTATGCGAAGCTGTGGTAGAAAGAGCCCAGGTGCTGCCAAGTTTGC
AGCTCTGATCTTCCCAGCCCTGCTACTGATGAGTGAAGTCACACTAGGCATGTCCTTTAACCCTCTGGTC
TGTTCTTTCATCTCCAAAGTAAGGGATTGATTGGATTGTATCTAAGGTGTTTTGTCTAGTGCCCACATTC
TAGCATCGTATGCTCCAGAGCGTAGAATGACCCCCCATATCTTTGTGTTATGAGGCAAGCTTCCAGGAGG
GTGCAAGCCAGTCTCAGTCCTTTGTGGAACGAGTTGGGAGTGTGACTGTGTAAACATGCACACTTGTGCA
CACACATTGGTGCATACCTTTGCATTCAGCCTGGGGGGACTGGAGATATGACCTTTTCTATTTTCTTGGG
CTTCCTTTGGTTGTGTTTTTTGCAGTCAAAAATCATGGCATTCCACACAATTAAACTTATTTATTAAACT
TTATTTCAAAGGACTTTTTCTAATTTTAGTACTGTTATATGTTCATTGTGGAAAGTAGAGAAAAGTGTAA
TGAAGGAGTGTAATGAAGGAAAGAAAATGCTCTGTCACTATTCAGACCGTGATGCTATTAACATGTTAGC
AGATTCCCTTCACTTCAGTGTCTAAGAAAACATGAAAAATACTCATAGATCTATTTGAGTTAATCTAATT
GGGATCACTCGCCACATGATGTTTTATAACCTGTTTTTTGTTTATTTGTTTTTTTAACTGGATAACCGTT
TCCCCAAATCCTTAAATATTTTTTCAAGAATGTGATTGTTAACAGCTGCCAAGGGTTCTAATCACATGGA
TATACCACACTATGCTTATTTAGTGCCGTGGACATTCAGGCTGTGTCCAAGTCTTTGTTATTATTGATTA
CATAGCAGTGATATCTCCATTTTACATTGACAGCATCTCAGTCCTACTGACAGGTACCGGGTGCCTGTGA
GGCCCAGAGAGGTTGGTTGCCTGCCCAAGGCCACACAGCAAGTGAGTGGTGGGTCCTGGCCATCTGGCCA
CAAGGCTGGCTGCCTCTCACAGGTGCCAGGGCAGAAGAGGCATAGGTGTGGCACAGGGGAGCTGGTGACA
GCTTCCAATGTTTTGGCTTGGGGAGAAAAGAGCCAGTGGGGCCTCCCAGCGAGAGGCCACTCTGGGTGGT
CTGCAGTGCCCGCACCTGAGAAAAGCCATGCTGCTGTTTGCACCCACACAGCAGCAAGCTGCCTGCTCCT
GCCCCCTGCCTCCCACCCTCCCGAGGTCAGTGTTGAGCCCAGGCCCATGCTTTAGGGCAGAGGGAAGAGG
CTTTGGAAGCTGCAGGTTAGGCCATGAAGGGAACAAGGCAGGGAGTCCAGGTGGGGAGGGCAGGATATGT
GCGTTGAGTGGCCTGAGTGGCCTTGCTCCTGGGGAGGCCTCCTCACCACTGCGCTCTCACTGCTTCTGAA
GCACTTGCCCTCTCCAGAGAAGATCTCACCCTATAAAGGCCACCCTCATCTTTCCTCAGCTTGATCCCTC
AGTGAGAGAGCCGCTGAGTGGTAGCAGGGAGGGGCAGGGAGGACAGAGCATGGCCACATTAGACCTGACA
TGAGCGTCCCCTCTTGCTGGTTATGCCACCACCTGTGGTCGCTAGGCTTTTGCCCCTTTGCATGAGACCT
TTTGATTTTGACCGTTCTGTGCTTTTCTCTAACAGGCAACCATTGGGATTGACTTCTTGTCAAAAACCAT
GTACTTGGAGGACCGCACGGTGAGCACCTAATATCAGGACTGGGAGGGGCAGGGAGGGTTCCTTTGGGCT
TATCCCCTAGGACCCTTAGCTGGGCACCACTGAGAGCACCTGCCGACACTAGGGGCTGGAGCTGGTGATG
CCAGCATTGCAGAGCCCGGCTCTCCCAGTCCCCCGGACCAGGAGGACCTCACTGCCCCACTGACCCCTCT
GCCCATGGTCCTGCCCTCCCTGAGACAGGTGCGACTGCAGCTCTGGGACACAGCTGGTCAGGAGAGGTTC
CGCAGCCTGATCCCCAGCTACATCCGGGACTCCACGGTGGCTGTGGTGGTGTACGACATCACAAGTGAGT
GAGGCTCTGCTCCTAAGGGAGGGTGGCTCATAGGGGGTCCAGGGCCCAGGTGTGACCCTGGCCAGGCCTG
TGTGCATGTGTGTGCACACGCATGTGTGTGCACACGCATGTGTGTGCGATTGCTCCCTGAATGCAGAAAG
GCAGGGAGCAGTGGTGAGTTGCCTTTGAACACCAACATGGTTTCCACTGCTCCCCACCCTCCTGCAACCG
ACAGGGGTTTATAGGGCCAGGTTGGTCCTGCTCGGAGTGGAGGCCAGCTTGTGGTGTGAGCAGATGCTCA
CAAGGTTGGCCCTGCTCCAGCCTCTCTGCACCCTCCCTCTCCCTGGCTGTCAGAAAGCTCCCTAAGGAGC
TACTTCTATATGTGTGTCACCATGGGAGAAGACGCTGGTCCCTAGGCCAACCCCGGCCCAGCAGCTGTGG
GTGCAGGACTCCCTGGGAAGGTAGGCAAGGGGGTCTGGAAGCGCAGTAGGCTGGTAACCCTTCTCCAGTA
CTGTGGCTCTTCAGGCCAGGGCAGGTGTTCTTAACAGGACTGCACAGCCTCAAGGGCGCACAGGGCCAGA
GGTGGGGGTGGGGGGCCGAGGCAGAGGCCAGACCTGCAAGGCTCTTGTAATGGAACACACCTGATAAGCC
CTCAGGGCTGTGGTTACCCTGAAGTGGGCGAATGCCCTAGGTGCTGTCCACAGCCTTAAAAATCACACAA
GGAAGCATGCATGTCCCCGCGCTGGTGCATGCCCCCGCCACCCAGCCTGCTGCCCTGGCTCTGCCCACCC
CTTCTGTCCACCTCTCTTCTGACCACAGGCCCCCTCCACACCTGAGTGCAGGTGGGAGCTGGGCCCGCAA
GGGCCTGGGTTCACATGGCCTGAGGCACATCAGAAGGGATACCAGGCTGTGTGAAACTGAGGCTTCTGAG
GACAGCTACCTCCCCTCCCCTTGGGTGTGCAGGCTGCCGAGTGGTGGGTATTGCCTTATAGCTGCTCTGC
CCTGCAAGGCCTATCATGGCAGCTGAGGGGGGTCAGGCTGCCCAGAAGTGGCCTTGTCTCTCCTGGATTT
TTGAGTGCACCTGGCTCCCCTGACTAGTCCCGGGGCCACCTTTCCCCTCCTCTCATCTGCAGAGCCTGAG
GGTTCTCTTCAGAAACCCCTCTGGCCTTCCCCAAACTCTCCTGAGCTCCCATGGTGGGGACACCACTCAG
TAGGGCCCTTCCTTCCCTAGAGGCTGCTGTGTCCTCCTCTGCCCACCCTCACTGTTCCCAAACTTGCCAA
GTCGCGCGCGCATGTGTGTGTGTGTGTGTGTATGCACACACACGTGTGACCCAGTTCTCACTCTCCACTC
TGAATCCCCAGAGTCAGGTCTCTCAGGTGGGCCCCTAAAGCCACTATTCCATGTGGCAAATCATGACACT
GTGATCTTCCAGATGGGGTGATTCCTCTCCCACAAAGGGTGGCTGAACAGTGCAAGTGGCTCCCCAGGGC
CGCAGGGCAGGGCCCGGTTCCCTCTGAAAGGCCCTACCCAGCTGATCTGTGTTGACTGAGCTCACACCCC
TCCCTGGGTATCTGAGGGCACATGCTCACCCTCCCTCCTGCTCCTGGCTCACACCTCCCCTTCCCATCTC
CCACTGGTGGCTGGCCCTGGCTTTCAGTTTATCCTCACTTTCTGCCTCCAGATCTCAACTCCTTCCAACA
GACCTCTAAGTGGATCGACGACGTCAGGACAGAGAGGGGCAGTGATGTTATCATCATGCTGGTGGGCAAC
AAGACGGACCTGGCTGATAAGAGGTAGGTGCAAGGGCACACAGGTGCAGGGTGCCACCCTCCACTCCTCT
GTAACTGCTCCTGGACAGGGAGCTCTGGGATGCATGGGTGGTGTGTCTGTGCTTCTGACCATGCATCCGG
AAAAGGTCCCTTGAGACACTAGGAGCTTTGAGGACACCTGGTAGACTCTCATCCATGGGTATCTCATCTG
TGAAGCCCTGTCTTCCACCACCAGGCAGGGGCGGGGCACTTCTCCGTTTGCTGTCTACACAGAGCACTGT
GCACCTGGCTTGACCCAGCAGTGCATGGTCTAAGGCCCTGCCATGGCCACAGCCCTGCCCCAGACACAGC
AGTCCTCTAGGCCCCAGCGTGTGCACTGTGAACTGTCTGTGCCTGTGAAGTGTCTGCACCAATGTGCGTG
GGGCTGTGAATGCCCTGGGCCCTAGGTGTGAGCATGCAGAGCATTCAGACCACAAACCTATGGCCGTAGC
CTGCTTAGCCTGGTTTGTGGCTGCGTCTGGCATGAAGCTTTCTCTGAAGAGGCTCCTCCATGCTGCCCTC
CATGCACAGGGAGAACTGAGGTGCCATGTGTGTACATTGTCCACTCATTTTACATGACCCTGACTTGGGC
AGATAAAGTGACAGGCCATGGACTCCAGCAAGCAGTGTGGGCTTCCTGCAGCGTCCCTTGACCACCTGAG
GAATCATCTGAATTAGAGCCTGCTTTACTAGAGTTCTGTCCTTAAAGTAAGGAAAACTGGGCTCAAATCC
CAGTACAAAGGGTACCCAGGCCCTTCATACCCTCACCCACTTCTGCCTGCCCCATCATGGAGCCCTCTCT
GCTAAGTAGCTTTGTGGCCCTGGGGGAGACACTTTTAGCATTAGTGTTCTCACAGGGAAAATGCGACTGA
TAATACCACCCAGAGTGGCACTGCCTGGCTTGAATCTCTTCATAAGCACAGGCTCTGCAGTAGTGACTAC
TGGGAAAGGCAGGTATGGGGCAGCCCTACCCCAGGGCCTGCTTTGAAGCTGAGAAGACACAAAGGAAGGA
GTGGGGGAAGCGGATAGTGTCCTACTGTTCCCTGGTGCCTGCTTTGTGCTAGCGAGACTGTGGTTGGTGC
CCGGGAGGGACCCTTGGGATCAGAGCCTGTCTTCAGGACTGACCAAGGGCCCAGTGGGCTCCCTCTGCCC
TGCTGGGTGGGTCCCTCCTCATATCTGCCAGGGTCTGCTTCTCTGCTGAGCTGATTTCCCCCCTTCCCCT
CATCTCTAGGCAGATAACCATCGAGGAGGGGGAGCAGCGCGCCAAAGAACTGAGCGTCATGTTCATTGAG
ACCAGTGCGAAGACTGGCTACAACGTGAAGCAGGTGAGGACACACCTGGCACGGGGCCCGGCACGGGGCC
CGGCACGGTGTAGCCCTGTGGTCAGCTGCAGGCTCAGAGCTGCCTTGCCCTGAAGGGCTGGTGATGGGAT
TGGGGCAGCCAACCAGAACACCCATAGATGCGCCCAGGGAGGGGAGAGCTAATTTCCGGAGCTGGTAAAG
CCCAAAAGAGGGAGGGACCACTCCGGGCATGGCATCTGGAGAACATAAGTCACCAGCCACCGTAGTAGTT
GCCAGTCACGGCCCACGTAGCAGGCCCTAAGAGTGTCCAGCCACCAGCTTCCAGGAGGCTGAGGGAAGCA
GTGGTTCCCTAGCCCCTCACCCCACTTTGGATGACAGGTGCAGGAAAATTCAATCTGATCAGCATTTGGG
GTTCATGCCTTGCGCTTAGCAAGTGCTCAGGGCTGTGGAGGGCAACTCAGGCCTGGGGGAAAGAGCCTAC
CATGATGTGGTTGGAACTCACAGGAGGGCGAGGCAGTGGAGTTAGGGCTGAGCCTTGCAGCATGAGGGCC
CCTGAGTAGTCCATGGGTGGAATTTAGCAGGTCAGCAGACAGGGCTGGAAAACATTGCACCTTTATCTTC
ACTAACCACTGACCCGTCCGTAGCACTGAAGGACGTCTGATTTGTCCTTCAATGATGAATGTAGGCAATG
ACACTCAGTCACATTAGCAGTGCCTATGGCTTTACCACCAATAGAAATCACAGATGCCTTCCCATCACCT
CATAGTGTTGCAGGTATCTTGAACTTCACATCTATCAGTGTTTCAGCATCACACTACTTATTAGATCTCT
TGCTAGTTCTCGCTGTTCAATGTGTTTCATAAGGAAGCACAAATGTCGATGAAGTTTTATTTCAGTACTC
AGTAGTCCCCTTTATCATCCTATGTAATTGATTTCACATACTTCAAAGGAGTCCATAGGATTAACCAGAT
TGCCAGAGGGGTCCTTGGCTCACGGAAGGGTTAAGAACTCCTGCCGTTGGGGATGAGAAGGACTTGGAGA
GGTGGTGAGGAGGGAGGGCATGCCAAGCAGGGGAGCAGCAAAGGTGTGGCTGCAGGGTGCCCGAGGTATG
GGGAGGGGACTCTGGGTGAGGAGTGTGGTTGGCCTGGCGGTCGCTTCTGCCCTGCCACCCCAGCATTGCT
GGGAACCCTTGGCAAGCTGTGTATACAGCACTGGCCTTCTGGATGCAGTGATGGTTTGCCCTGTGTGGAC
AGTGCTGGTGGCAGTGGGGAAGGTGGGCTGGCAGAACGACAAGAAGAGACAAGAAGGGTGGAAGGGACAC
TATGTGACACTGGGGGCCCCAAAGCTCCAGGACTCAGTGCCCCACCCTAACTAGAGTGTCCTCATCAGGG
CTTCACTCACTCCCATCTGTTCCCAGCCTCCCTTGGTGTGGGGCTGAAGCTGTCATGGTCCTTCCTGCTC
CCTGGGGGCATGCAGGAGAGACTGGGCTGCTACTCTTTGGGAGCCCTAAAGTCATGGGAAGCAGGGAAGC
AGAGGGAGGGCAGGGCAGCACCAGGAGGTCCATAGGGCAGGTAGCATCTGCCTCAGCCGTCAGGGTCAGG
GAGGCACTGATGCCCCTACCCCCAGAGTGCTCTGGAACCCATGCAGTGGTTTAGCAGGAGTTAAATGTGG
TCAGTTTCGAACCCTGTGTGGCTCAGAGGAGTGTCCATGCAGTGCAGACTCCTGGATCTAAATGTGAGCA
TATCCACTCACAGAAACCCATACCTGACCCTAGAAACCCATACCTGATCCTAGAGCACCCTTCAAAATCC
CTAGTGGCATTTTGGCCACTAGTAGAGGCTGTGACTGTTTTGAGAGCCAGACAGGCAGATCAGAGCCGCC
CAGGGCCAATGCCATGAAGGAAAGCTCAGGAAGGATGGCCTGGGCCCTTTTACCCTTGCCTACTAATGGC
TACCCCACTGCAGAGCCTCCTCTGCAGCCCGCCCACAAGGGTCTCACACCATGCTGGGCCCACCAGCAGC
TTCCCCCCTTGGGCCCTCATGGCCTTTAGCCCTGTCACCCAGCCCGGGTGCTCAGCTGGGGCTGGGCTCT
GGGGTGAGGCCATGAATAAGACTCACCCTGTCTTCAGAGAGCTCATGCAGTGGAGGGTATGAGCCCAGAG
CCCACCCAGTTCCTGCAATTCACATTTGTGAGGACAGCGGGAGTGCTCCTGGGTTAGTCCTTTCAGGCTA
CCGTAACAAATCACTATAGGCAGGGTAGCATATAAACAGCAGAAATGTATTGCTTACAGCTCTGGAGGCT
GGGAACTCCATGGTCAAGGTGCAGGCATATTCAGTGTCTGGTGAGGGCCCATTTCCTCCTAGATGGCACC
TTCCTGCTGCATCCTCACAAGGTGGAAGGGGCAGACAGGCTCCCTCGGGCCTCATTCATAAGGGCACTCA
TCCCGTTCATGAGGACTCTACCCTCCTGACTAAGCACCTCCTAAAGCCCCACCTCTTTATACTGTCACAT
TGGAGATTCTGTTTCAACATAGGAATTTGCAGGGGGACCGGCATTCAGAACCTAGCAGTTCAGAGTCTTC
TGTGCCTCATACTTCTGCCTCGTACCTGTCACCTCCAAGATTCCATCTCTGCCAGCACCCCATCTGCCAC
TTGCCACCTGTCCCCTGCCACCCACACCTGCCCAAACACACACACACACACACACACACACACACAGAAA
ACCCACATGTACGCAGACACACACCTTACCAAGGACACACACTATGCACACATTCCCCCCACACTTACAC
AAACACACACATAAAGATGCCACACGTTCACACACACCACACTCAAACATTCCCCCATATGCTTACACAA
ACATACATGCACCTACCCACACGCACCACTCACAACACACACATTTTCCACGCAGTCCTACAGATAAAAC
ACATACACTGTACACACACTCCTACACACAATAAACAACTCACACTCCTACACATCCAAACAAGCCCACA
AAATTGTGTTCACACTCCTGCATCCCTCGCGCTCTCAGAGAAGCCTCACCACTGTGCCCATGCAGCCCTG
GCCCTGCTGTTCGCTGCCTTGGCGCCGGACCTGCAGGGCTCCCCAAGCAGAGTCATTCATCTCAAGGGCA
AGTCACTTCCCCATGCCTGGTCCCCATGAGGGCTGTTTGCAGAAGCCCACCTTAAGGCCTGTCACCCAGA
GGCCCAAACCATTTTCTGCACCAGAGGAAGTCCCTTGCAGTCACTGCCATGACCTAAGCTCATCCCAGTG
ACCCTATGGCCAGTCTGCTTGGGTGAGAGGCCACAGCTTTGTTCCTTCCTTCCACAAGCTACTGAGGCCT
GCCCAGACCCAATGCTGTGAGAGGTGGGGGAGAGAGAACATAGGCACAGCCCCTGCCTTTGAGGGCACCG
TCCGCTGGGCAGATGGGAGAGTAAAGCTGCAGGTTGGGAGGGGAAGAGGGGTGAGGGTGCAGGTGCAGTG
AGGAGCAGAGGGGAGGGCCAGGGTTGGGGTTCACACTGCATTTCTTCATCTTTCCAGCTTTTTCGACGTG
TGGCGTCGGCTCTACCCGGAATGGAGAATGTCCAGGAGAAAAGCAAAGAAGGGAGTATCCTTTTCCTTTG
ACAAGTGAGTGAAAAGATGTATAGAAGCCATTTATTCACTGAATATGTTAGTGCAGTGGACAGACACTCG
CCCAGTCCCCGCCCAGCCTTCCCTGGTCTGCCGCGAATGGCACGGGGCCTCCTCTAGGCGGGATGCAGCT
GAACCCTATGGTTTGGAGCCCCCGTCTGGCTCTAACCATCTACTTCTTCTTCCAGAATAGCAGGAAGATA
CCAAAGGGGTGTGCACAGAGTGATGCTGTGGGGTGGGGAGTGAGAAACAGCGACTTTGCCCTTCTTTACA
GCGAGCATGTTTATGGGTTTCATGAACACAGGCAGAGTCTCCACTGCAGGGAAGTCTCTGTCACTGGGGA
TATGATCTCAACGTGGTTCAGTCTACTCAAGACAGCTCCCCCCTTCAGACAGATGCCCCCTCCTTGTCCC
GCCCACCTTCTCTACCCAGCCCTGAACAGCTCCTGAGGCTCCCCACTGATCTGTGGGACCATTGCGCATC
ACCCACAAACCAGCCCCAACCTGAAGAGACACCTAGATGCTGAAACTGAGGTTCAGAGAGGTAGTCTGGT
TTGCCCAGTGTCACACAGCATGTAAGTTACAGTTAGGATTCACACTCAGGCTTGCTTCCTCCATATCCAG
CCCTATTCCATGTGGGACACTGTCCCTCTAAGGGCATTTGAGAGAATCAGATGAAAACTGTTTCAGCAGG
GGAAGCCATTGCCCACACCTGGGCCTCCCCTGCATCTAGTCAGATGTCCCTGCCTGAGTAAGCCACCAGA
AAACAAGCATGCAGATCCCTGGCTGGCATCCTTTACAGTGGACCTGTCCCTACACAGCAGCTCTCCAACA
TCCCCCACTGATCCTATAGGCCTCTGAGGGTAGACATCCCTGACAGATCAAAGAAGGGCCCTGGGAAGAT
GGAAGGGCACCTTTGGGCTGATGAGAATCAAAAGCAAAAGAAGCACACAGCTTAATGTTGGAGGCCTCAT
GGAGCTGCTGGGGCAGGGCGGGCAGGACACCAGGAGTCCCAGGGCTGCAGCAAGGGGGAGCCTGACACAG
GCCTGGAGGGAAGCTAGGCCTCTCCAGCCTTGCTCAAGGAGCTCTCAGAGCAGACTCGAGACCCACCCCC
CGGGGGGGTCAGGAAGGCTCACCAAGGAGCAGGTGCCCCAGCAGTCCCACGGTCTGTGTGTCACCAGAGG
ACAAGCAGTGGCCGAGAGGAGGGGGTTTGAGGAGTATCTCCTGGTTGGTCAGTTATGAGACTCCAATCAC
AGATAAGGAAACTGAGGCTCAGAAACTTAAACTAGGGCACCCCACGGCTCTCAGTAGCAGAGACAGGCTC
CAGAGCTCAGGAGAGAGCCCCTGTGGAATCACCTGTCACATGGGACTCCTTTGAGGTTCCAGGAACATAC
AGAAGCCAACCTGAAGGGCAAACATAGGAGCAGGAACAAGGGAGAGGGGCAGACAAGGTGCAGGCGATCT
CCGCTGTGCCTGCCAGCAAGGGGAAGGGTTGCACTGCCCGCTCTCCATCCCACCAGCTCCCAAGGTGTGG
CACACTGGCCGGGGTGAGTGGTGATCGTTTCATTCACATTCTCCCAGAGTCGCGCTGTTGAGGGCTCCAG
GCTGGGCCCACAGTCAGGTCAGACTGGGCTGAGTGCAGGGTGACAGTGAGCTCGTCATCGTCCTGGTATG
CCTAGCGTTTCATCCAGCTACCACTGACCTTTGGGCCCCTTGGGAGAAAGGATACATGGCAGGTTGCAAA
CAGACTGCACAGGGTGTTGTGACCTGTGTCCCTTTTTCTAGCTAAGGGGTCCCCTCATCTGGGTAGATGT
ACCCCCATCCTTTCACTTCTGCCCAGGAGCCAGCTTGCTGGGCCTCTCACGAGGCAGGTGCTAGAGCGGC
CACCAGAGGTCCCAGAGGGACCAGGCAGAGGCAGCCGTCATTCTGCTTCTTTCGGGATGGGGTGTTGGCA
TTTCTGCTTACTCACAGTCCAAATCCAGGTGTTTTGAAGGTGTGTGCTTTGGGGTCATGTTCATAATTGT
GTTCCACATTGAGAGCAGCCACACAGAAGCACTGCTTTGTGGCGCTGTATAAACTGTTCACACCTGGCCT
CACTTGCTCAGCTCAGGACTTGGTGAATGTGTGGCATGAGGTTTCCGTCTGCTGCTTGCAGGTCTAGATG
GGGGGCTGCTGCACCTCTTCTTCACGTTCGAGACAGGAGGACCCCTCAGGGCCGCTCTGGCCAATACTTC
TGCCCAGCAGCACCCTCCACTGGTCTGCTCTCAACAAAGTAGGAGCCAAGGGGCCACCAAATGGTAGAGC
CATAAGCCCCTTACTGGTTCTACATACACAACCCCCCAACCCCCACTTTCTACCCAAATACAGTATGCGC
CCATCACATGGGCCCCAGACTGTTTCTGAACAAGGCTGGCTTACGCAAAGAAAGAGCAGTAGTGTGGGCA
CTTCATGAAGTGGCTCTAAGCAGGTGAGGACAGTGACGCCGCAAACCAGATAGAGCATGCTCAAGGCCTC
CCAGCTCCTTAATTCAGAGCTGGAACCACATCCAAATGACTGGATTCCACAGCCCTGTTGCACTCTCTGA
TGGGGCTGTGGTGTGCTTTGACATTCCAGATACAGACAGGATTGTGCTGCAGTAGAGTCAGAGGCACTGG
GATTGGGGAAGCATATCCAGCAGTAGGGGGTAAGTTTGTAACAGGCTGTCTGGGCCCACCCATCACTTCC
AGGAACCAGGGAGAAGGGACATTGGGCACTGAATGTGGCCCGTGATGGGCCACACTTGACCCAGAGGGAA
GAGGCGGGTGTGCTCTGGCCATGCCTGCCGGAAAGGCACATATCTAACCTCTTGAGGCTTGTGAGAAACC
GTGAGTTTCCCCTTCTGGGACATTATTTAGACATGGGTCCAGTCATTCTTCCCTGTCCTCTCAATCAGCG
GGCAGCCCCTGAGCACTGCATTTCAGCAGCATGTGGCGTAACAAGGAAGGAGGTGTCATTAAATGAGAGC
CTTTGGGAAGGCTCCTAGCGGAAGAGCTGGGCCTGTGCTCTCCAATTCTGCAGCCACATGTGGGTGTTCC
GACTTAAATTAGTTAAAATTCAGTTGAATTAAAAGTTCATTTCCTCACTTGCACTAGCATCCTTGCAAGT
GCCCAGTTGCCCATGTTGCTAATGGTGACATCTTGGACAGTGCAGATATAGAATATTTCCATCACTGGAG
AAAGTTCTTTGGACAGTGCTGTTCTAGAAGTATCAGTAGAATTGGTTTCCCGGATGTCTGTGCATTGGGA
CTCTCCAAAGAACTTGTTAAAAACACACATCTGGGGCCCATCCCCACATCTACCAAGGTAGGACCCAGTG
AGACGTATTTTTAACAAACATCCCAGAAAATTTTGATGCAATCCATTTGAGAACTATTGCTGTGCAGTGT
ACAAAAGTATTGTGATCAAATTGCGCATGAGATTGTTTTAGTGGTCGTAGGTGACTTCAATACTGGGCAG
AACGTAATGCTGTAACAGTGGCCAACCTTCAAGCTAGACCACTAGTTCTCAACCAGGACTGATAGCCCTT
CCCTCCCCTCCCCACAGGGGACATTTGGCAATGTCTTCAGACGTTTTGGCTCACCATAAATTGGGGGAGG
GGGAATGGGGTTTAACTGGCATCTCATAGATAGTGGTCAGGGATGCTTCTGAACATCCTCCGTGCACAGG
ACGCCCTCATAACAAGGAATTGTCTGGCCCAAAATGTCAGTAGTGTTGAGTTTGAGAAGCCCATCCACAA
GGGGCTTAGCACAGCCAGGTCAGTGAAAGTAGAAGGCTGGGGTCAAGATAGCCTTGGGTTTGTACCTGGG
CACCTCAGCTTCCCAGCTGGAAGGTGGCTCTTTTACTCCCCACTGCACGAGGTCTAATGTGGAAGTGAGG
TAGCTCTCAGCAGGAGAGGCCACTAATGCGTGCACCCTGGCCCAAGGAATGAGGACATTTTTACAGGTGG
AGATGGGGAGGAAGGCTGGGTGTGGGGGAGGGAGCATCACTTCTAGAAGGAAAGAACAGCATGAACAAAG
GAAAGAAGGAAAGCATAGGACGTGTTTAAAGCAGGGAAAATCTGGTTGGTGGAGCCTTGGTGTGTGATTG
AGGGAAGGGGATAAGCTAGCGTCAACAGGTGCTTGGGGTGACCCTAAATGGGGAGGCCTTAAATGCCAGA
GTGAGAAATCCGTGGACACTTTGTTTCTGTAGCAGAGTGTGACATGATTGTCACCAGAGCTGGCTTTGGG
AAGCCACCATGCTGAGAGAGAGCTGGCTGGGCTCAGAGGGGCACTCAGAGAAGACCAGGAGACCTCAAGG
AGGCCTGTGCCCAGGCCAGCAATACAGAACAGGACTGCACTGCCGGCATGGGCCATAGAACTGCAGCTGG
CAGAGAGAAACAGCAGGGCATTCCTGGCAGTGGGTTTACCAAAAATGATGGGCAGTAGAGAAGCAGGCTG
CTTGACTAGGGTAGAGAGAACAAAAGGTGGGCTGCAGTGGGCAGTGGGAAGGAAGGCACTGGCTTAGTAT
CTATTTACTCATTTATAGGCTGCCATGGTATAAGATACATATACATACACACAAGATAAAGTTGTATGTG
TATGTGTGTACACACACACATGGGGAAAATAAAGGTAGGAAAAGCAAAGAAAAGTCAGAGATAAAGTCAT
ACTCAAAATGTATGCCATGGCCGCATGGTTGTTAGAGGTGGCCAAAAAGTTGGCTCTGAGCATCCTCACA
GCCAAGGCAAGGAAAGAGAATGTGAACTTCAGGAGAAGCATGGCTTTTCATAGTACTTAAAACAAAAGAA
CCTCTCCTGTTGTCCTCAAATAGGAGCCACAAAAGCATCCTTAGGATGCCAGCAAGAAGTTCCAAAACAG
TGTTTCTTATACCACCACACCCCACACACCCCTGTCTTAAGGCAATCCCTGTCCAGGAAGAGCAATTCTG
TGAGGTATCAAAGGGCCTGATCCTCAGCTATAATTAGGTCTGGTTTGATGCAAGGCTAAAATCTCACAGT
GTTGGTTTTGAGCCCGATGAGGAAGGCAGAGGGCCAGCCTGGCTGTGCATTTGGAACCAGTCCCTGTGGT
GGTTCTGATAAGTGCTTCTTTAGCCCACAGCCCCCGGGGGCACCAGTGGAAAGGGCTGGCGAGGGGGCTG
TGCTTAGGCCCCATGGATGTGGCTTCTTACAGTAACCATCCTCAGGATCTAAGTGATGTGTTCTGACTAA
AGCTTGAAGGGTTTGCTCCTGCTGCCAATTAGGCAAGGCCCACATACCCCTGTGCTTTGAGATGTGAACC
CAGCAGGCTCTTCATCTCCATTGCACTTTGAGTGGGGCTGACAGGTAACTGGGCTGAGGCCAGGGCTGGG
AGCTGGCATTTGAGCACTGGTCGAGGGAAGGCTTCTGGGAAAGGGACTCCCTGGCCTTGGTATAGATGGT
GATCCCACGGCCCAGGCAAGACAGGCTTTGCTTGGGTGGACAGGCGCTGGGGGAAGTGGACGGGTGAAGG
GAAGAGGAGGCAAGGTGGAGTTGGTATTGCATCCTTCCTAGCCCAGCCAAACCAAGAGCCAAGTCCCTAG
GTGTTTGCAGAGAAACAGAGCAGTAGCCAAAGGGTACAGTGCACAGGGCTAAGTGGGGTGGCAGCTTGTC
CAGGAGAGTCATCTTCCTTAGCCCGTCCCCCTGCAGTGATCGACATCAAGCTGGACAAACCCCAGGAGCC
CCCGGCCAGCGAGGGCGGCTGCTCCTGCTAATGCAGAGCCGACCTGTGGCTTCCCATGACACTCCTTGCT
TGTTGTGTTGCTTCCTATTGGCTAGCTTCCTAAGGGGGGAGGGAACCGAGTTATCAAGATGGGAGGATTT
TTCTTTTCTCTCTGTCTTTAGGAGTAGGGTGGGATGGGGAGGGAGGCTGGGCATCAGGGATCACATCACT
CTTAACGGCTGTTACTTAAACAACTATTTTTTGGTTTGGTTGTAATATATTGTACTTTATTAAGATTGCC
AAAAACTGTTAAAATTTAAAAAAAATTTAAATCATGTGTATACAATTTTTTGCCAGATAAAAATGTAGTC
ATTTTTATTTGAAAGATGTGCTTTTTGTTTTTGTATATTTGTAAACTTATAGAGAACCTTTTCCACACAC
CTCCTCCTTCCTGTTCTCTTTGAACCATTCATCACCTCTGCCTTCCTCCTATCCCCAGCCCAATAAATTA
AAACAATTAACTGAGCAAATTAATTAGGCTTCAGTCTGGGGCCATCTGGCCCCACTCTCTAGGCCCTACT
CCAGTTAAATCAAACATTGGTTGAACACATCAGCCTCTGAAAAGGTAGCTCTGACTCTTGTCTTTCCATG
GCCAGAGTGGGTCGTCAACCTCGTGTGGAGCTGAGACCAAGGTCTGTGGGCTCTAGGCAGCCCGGCAGCA
GCCCCCAGAGGAACTGCTCCCACCTCTCCTTCTCTTTCCCTGAAAAGCCTTGAAGGGGGTTGAGGGTACA
GGCAACCTTGTGTTCTCTGTGCCCTCAGGGACTGGCAGAGCAAGAGGCCATCAGAAGGACGAGGTGCTGT
TGGCAATTGCAGCTGCGTGGTGCGTGGTTTATAGACTGGGGTGCCATGTGTACTTCTGAAAATATTTTAA
CCAGCCCACCCAGCAGTCAGTACACATGCCTGGGCCAAGTCTAAGAAACTCAGTGTGTGATGTTGGGCAG
TGTGCCATCCTGAAGCCTTCCTCCTGGATGTCAGGGAAGCTGGACCACCTGGAGTTGATCCTCTGTGATG
GGGAGGCGGGGGGGGGGGGGGGTGTTGTCTGCAGAACCACCACCTTGAAAGATCCATGTTCTTAGAGCCT
CAGCTGCTAATATTGTTGAGTGCTTTCTGGAAAAGCTGATTTGTTGCTATGTTTTCACCCCAGTGGCATG
GCGCAGTTGAAGTCTTTGTGGACATATCTTTGTGGCTACTGTGGCTGCGCTGTGGTCACCTGAGGATGTG
GTTCAGGTGGGGTCTCCAGAAGGCTGCTTGCCCCCAGAGAGCCATCTCTTCCATTTTTGATTCATTCCTG
AGAATGGCTTAGTCCTGAGAATCTGCAAAGTCTCTGAAGAGAACTCTCTCTTCCCACTAAGTGATATAAC
CTACTTGGCCAGCATTCCAAATAGACTCAGACTCACTGCCCTGAGCCTGCACAGAGCCAGGTGCAATGGG
CAGTGAGTCTGGCCAAAATGTAAACCCCACCCTCCCTGCTGTCATTGGCTCTCCCTCCAGGCTGCTGCTG
GGCATGTCATAGATGGGATGAATGACCATCTGGGGTATGGTGGGCTGAACTCCACAAGGTCGTTGGAATG
AATTTTGAAACTTCTCAGAAATTAATCTGAAATGGCAGGCAGTAAGTGCAGCAGAATCTGGCAGGACTGA
TATTTGTGCAGTGGGCCTGCCACACACCCTCTGCCTAGGAGGCTGTATGCCAGAGCTCATCTCTAGCAAG
GAATTTATCTTCAGGTGAAGAAGAGAGGAAGCAGGATCCCACTGAGCACCTCTTGCAGAAGGCAAGGACC
AATGTTTGAACGTGTTTCAGATGTCATGTGTTTAGTTTTTATATGTGTGTACATAATTATATATAGAGAT
AGACTTGTGTATACACCTTCCACAAACACATCCTCACGGAGATACATGTGCTCAATGTATATTCTTGTTT
CTCCTGCTCTCAAGTTGGAACTTGCATTGTGATAAGTTTTGGAAATTCAAAAGTACTGCAACGTGTTGAA
ATAAGAAATACTTAATATTGTCAAATAACTTGTGATTGTCTTGCCATCAATAAAATAATGCATAGTTGTG
TTAAACTACAGGCAAACATAGCCCACGGGAATATCTCCACCATTTCTCTATGTACTTTATATGCACGGGT
GTGCATGCCTGTGTGGGCCAGTGTCCCCCCACCATGGGCACACCCCCAAGTGGTGCTTGTTGGAAGAGTG
CTTACTTACCTCGAGAGAATTTACAGGAGTCCACATGACAGTGTCCTGCCTGGTTGGCAGCGGGGGCCAT
CACCTGTGGCCTCTGAGACCGCCCCATTTACAGGAATCTGCACTGGGTCTCAGTGAATGAACGTATGGTA
GATTTTTATTTTCTTGGCACTAAAGATTAGCTTTTTTAAAAAAACATCCCATAAAACAGTAGAAACTCAG
TTCCCTTCTCAGGGGCACACACATCCAAGGCACCGTGGACTGTGTTTCCATCCTGGCCTAGAGGAGCAGT
AAAAGATAGCATTTGGTTTGACATGGCCTTAGTGAGTCCTGCCTTTCCTAGCATGCACACAACATCCTCT
CTTTGAGTTTGGGTTCTCCCCAGCCCCTTGGCCTCTGAGGCTGAGGGTGGCTTCCTCCCATCCTCCCATC
TCAGTGGTTCCATGGCGCTCCCTTCGGCACGTGCGGTTTCCGCCCCTCCCTTCCTGGGGTGTGGAAAGGC
AGCCAGACCTCTTTTTCAGAAGTTGTTGGTTCCCTGATTTTTGTCTTGAGCAGGCACCATCCCTGTCCCC
TTGCTTGCAGGTAGAATTGGCACAGAGTTAAGGTTCCATAATAAACTGTTAGGTGCTCTTGAAGAAGATG
TCATGGCATTGCCTCAGCACCCCAGCAAGAGCATTGCATCTTTGCTGAATCCAGATGGGTTAGCAGAGGG
CAAATTGGAGGATTCCTTTGAGGAAATGTTCTCAATTGAGCAATTCAGTCCCTCTCCCCAAAGACTAGAC
GTGACCTGGCAGATTAGCAGGATCCTCTTGGCCTTCTTTTTTGGGGATGGTGGGAGTGAAGGGGGTGAAT
CTTAAAAGCTTATCAACAAAGCTCCTGTTCTGCAGGCATCAGGAAAGTTGAGTGTAAGATGGAAAAAGCA
AACAGCCTATTTACAAGTGGAAACACATTGGTTCTGATCACTCCTAACTTGCTGGGTGATCATACATACA
TCAACATGAAGGTGTGACATCAGAATCATGAGCACCATGGCTGCAGTTGTGTGATCCAAGGCTAGTTGGC
TTGGTAGCTGTTGGCAGCAGTTTCCCTTGGTCAGAGGCCTCCTTGCTATCTATCGCTGCTCTCTTCTTGT
CATCCTTAAACATTCAGTCATGTTCCCAGGTCTGAGGGGAGCAATGGCCAGACCAGTTTCAGTATCTCTG
GCAACAGAAACAAGGATTGAAATGGTGGTAGTTAAGAGTGCAGACACATCTGGGGTGCAACGTCTGCATC
ATCCTGGTGGCTAGCCAGTGCGGGGAGGCCCTGCCCTGGGATACCAGTTGTGACAATAAAGGGATGGCCC
TCCTGGCTTCAGCATCCTGCAGGTAGAGCAGCCTCATTCCTTCACAAGATGGAAGGCAGGTGAGGATGTC
AGGATGAGATGGGACCAGGTAGCCGAGGACAGTGAGGCATGTCTGAGCCACTTGAGGGGCAGCTGAACAG
AAGGATGTCTGTGTGCATCAACCGAGCAGATTGTGCGCACACTCGTTTCCGAACTGCCTCTCCCCAAAGA
ATGTGAGGCATTGTCACCTTGTTACAGCTATGTGAAGCAGAGCTGTCACAACTTTTCCTGTCTACAGGCA
GGAAAACCAGGATGGAGAAGGGCAACTTGCTTATTAAGATCACCCAGCAAGTTAGGAGTGATCAGAACCA
GTGAAGTTTCCATTTTTCATCCATTGCTGCCCTGTGTGTGAACAAATGTGACTCCATATTTATTACACAG
CAAGGACTGCTGTGTGTGGGTGTGTTCCTCAGACCATCTCTACTCTTTTTGGTTAGGACACTAGGTTCTT
CCCAGCATATGAGTGAGAATATTGGTGGTATTTTGGGCTCCTCTACTGCACAAGGGCCAGTCCCCAAGTC
TACTCTGATTGATTGTCATGGGCACCCACACAGATCAGGACACCCTTTGAATTTTTGTTTGACATGAACT
ATTTAGGTGTTCCAAAACCTTGGGATCTCAATGTGCAAACTCCTTGGACTCCAGACCCCTGTCTGGTTGG
CACTCCCAGCAGTGTGTGGTTTCATCAGGAAATCCTTGCAGCAGGGGTTTAGATGGTTCCTTCAGGAGGT
GGGAAGCCTCCATAGCATTGAAGGCCAGCCTGCATCTCGCGGTGTGTGTCCACTTCTCCCCTCACTTTCC
CCTCACCCATCCCTTTAAAGTGATTGGCTGTGAGGAGCACAGAGGGTGGCAATTCCATCTGTTATGGGCT
CAGAAGACATAGCCGCCATGTTGATTTCACATTAAACTGTGTAAAATGTGGAAAAGACTCAGCATGTTGG
TCAAACAATAAACTGTCCTAATTCTCAAAACAAAGCTTCTTGTCTGTGTTTAAGTGGTGCAGTCATAAAT
GGGGGGGTTCAAAAACAGTTCCTGAAGTGTGTGCTCCACAGAGTCCCTTTTGTCATGCCTGGGTGGTATG
TCCACTACCTAAAGCCCTTTGCTGCTTTGCTTCTTCCTCCTACTGGTGGAGTTGGGCTGTCCACCAACTC
CGAAGGGGTAAAGATGGGACACACTCATGAGAGTAAATCCACACGCATTCCCCTAATCTCCATTCTGCTG
AAAGGCTGATGGGAAGGGAGCCTCCAGGCAGAACTGAGTCAGGGGTACGATATATTCCTTCATCCCCACT
CTGCTTGCCATGGCTAGGGGATTAGGAAGGGGGGAGAGGGTACAGGGACTGGATCTCTCATGCTTCTGGT
GATTTTCAGAAAGCCATTTAAAGGCAAGAACTTAAGGTGAACTATAATGACCTTTGACAACATCTAGCTG
CCATATTCCATCCCCAGCCCCACACCACACCAGTTAGGAACATCCCTGAGTGGCCCCTCCAGGTCTCAGT
TATCTCCAGACTAAAAGATGCTCAGAAAGCCAGCACAGTCCTGGGACCAATCCAAAGAGGAACAAAGGCC
AAGATTAGGTAAATTGCCCTTGCCCGGGAATCTCACTCTTCTTCAAGTCCAACTTCACTAATTACCTTTC
CTTTTAAAGCTTATAAAGGTTCCAGAACACCCTCCAATCTGCTGCCACCTCAAGGAAGCCATCTTTGATT
AGAAGAGACATTGAGGCCAGGAGTTTGAGAACAGACTGGCCAACATGGTGAAACCTCATCTCTACTAAAA
ATTAGCCAGGAGTGGTCCCACAGGCCTGTAATCCCAGCTACTTGGGGAGGCTAAGGCAGAAGAATCACTT
GAACCCGGGAGGCAGAGGTTGCAGTGAGCCGAGACGGCACCACTGCCACTCCAGCCTGGGCGACAGAGTG
AGACTCTGTCTCGACAAAACAAAAAAACCCTTGAAACAATATATTCAAGTCAACAGAACATGGCCATGTG
CCTCACACATCAGCATCATGGGAACACTGGCACTTCAGAGGCCAGTGGAAAAGTGGCAGTCCCGTTGGGG
CTGCATGGCTGGCAGCTGACCACAAGCCCACACAGCGCTTAGGAGTCAAGTGCAGCAGTGATGGAGCTCA
CACTACTGAGAGAGCAGGGAAACCACACTGAAAGGGCACGTTTCTTAACCTCAGAATGGGGCTACTAGCC
TCTAAAGCAGGAATTGCGTTTTGTTTAGTATTTCCATGGTCTGCTGCAAGGCGTGGCCTTTACCCAATGG
ATAAATGCGTACAAGGCTCTTGTGAGCAGTCAAGTTTCTCGAGGTTTACAGTTGAAGGGAAGTGGGATTG
TTTTCCTGCGCATTTAAATGAAGGTAGGTGGGTGATCACCTTTCCTTAAATGTGTGAAGGGATGAGATAA
AGAGATAGGCATCTTAATTGCCACTGATGGCCTTCAGGTGAGGACAGGCATGAGCCAACTGAAGCTTTGA
CAATTGTGCTGAACCCAAAACTTCAAAAACAAGAAAAAACATAGACTGGCTGAAATGATCTAAGTCAACA
GAGCATGGCCAGCGCTTCATACAAGGCAGGACCACAGGGGAACACTGACAGCCCAGGAGGCACTGAGACA
GAGGCAGTGGGAAGAAGTGACAGACCCCAGGGACTCCCCACCAACAGCAGCTGCTGTTGATTAGGAACCC
CCAGTAGACTGTCAGGCACCTGGTAGTGGAGAGGCTACCAAGGCCCGGACTGGAGAGGAGCCAAAGGAAG
AAACAGTGCAGTGCTTAGACCCCTCTGGGTCTGCCCGTGTCCATACCCACTAGGGAGATTCCATTCCAGA
AGTGGACATATTCACCAACAGAGTGCCTGGGGCTCACTCATCACAGCTGCCCCTCCATGAGGGCATCTCA
CTGCAGCCTTAGCAGGGAACAGGGTCATTTGCATTAGGCAGCTGCTGTCCTAGGAGGTCTCGGTGTCCAT
ACACTGCCATGTTCCCAAGGTGTTTCAAGCTCAAAAGTCTCATCTATGTCATACAGTCGTGCCTAGTTGG
CCCGTCTCCAAGACCTGACATCCATCCTTCTACTCTGGCCACACCTGCCCATCTCATGAAATGGGCCTAC
TTTAGTCAAATGCCCTCAGGGCCACAAAAGGGCACCACCTGAGTGGAGAGAGCACATTTGACCTCCCATC
AAAACCCTTCCCAGTTCCCAAAGACTAGTCACCATGACCTCATCCTGGCCCAAAGCCACAAGAACGGAAT
GCCTGCTACTAGTACAGGAGTAAGAAGCAAGGTCAGAGTTCCCATGCCTGCTGACTTGACCCTGTCAGAA
AAACTCAGCAGGGTGTGTGCCCCAAGAGACTTTAAAAACAAAGTAAAGGCACACGTGACACTCCAGGCCA
GATCATCTCTAGGGGTGCCATGCGACTGACAAAAGACTTATTAAGCATGCAGATTCCTGAGGCAATACCA
GACTTGCTATTGAATCAAATTGTCTGAGAGTAGGGTCCTCAAATCAGTTTAACAAGCATCGCAGGTAATT
CTGATGCCCACTAACATTTGAGACCAGTGTTCCAGATAGAATTATCCTTTTTTGGAAGACCTTCTTTAGG
CCTTGAATCAAACTCAAACTTGCAGCCCTTCTTCAGTCACTTTTTCTGGTGTGCTGCTTCCTCCAATAAA
GTAAGATATTAACCAGAAAAAAATAAAAGAGGCTGAGAGGGACACATGCCTCTAACAGAAGCATCAAGCC
ACTGACTTTTATTCCCATGAGCTCCTACTATGATGACATAACATGTCACATTTATTGCTCTTACCTACTT
CCTAAGTTACTGCTTGCCTAATAAGGAAAAGGGCAAGAAATAAGAGTCCAAAAGACACTCAGAACACCAG
CAGCAGCTTTCAAGTAAGGACTCAGGGTCAGGGTCTCACAACTCCTCCATTTCATGTTTCATTTACATTG
TCTTCGTGCTCCAGCAGCAAGGCTGACATGTGCTTTGGGGTAGGAGCCTGGAGTATTTCTGCCAGATGGT
CTGAGGTGACGTATACTCCTAGAGCCCAAGTGACCACCAGAAGGGACATGTGAGACAGCAGGCAGAGGCC
ATACATGGAGGATCACACTCCCTCAGACGTCATCAGCCCCATGCTTTATCCTTTGACTCCCCCTGATCCT
CAAGGCCAGGTGGGGTGCCCCTGCTGCATGCTCCAGAGAACTGTGGGCCTCTCCTACCATGGCTCTCAAT
GCACTGTTCCATAACTGGCTTCTCCCCTGGACAGAGCCACCCTGGTCTCCTTGTAAGCTTTAGTTGGGCT
TGTCCCTGAGTGTGTGGGGTAGGAATAGGAGTGTGTTCTTGTGTATGTTGCAATCTTTAGGCTCAGGAGA
CAAGGAGTTAGACCTGAGTCCTGACATGTGCACTCATTTGTACTCACCATTACATTCTATTTAATTGCTT
TGAGCCAGACAGGCTGTTTTCTTTACCATGAAATATACTAATCATTCAAAAAAGCCTTGTGTTTAAGAAG
ACAGCAAAAAACATCACTTCAAAAAGGCAACTTTTTTTTTTTCTTGGCATCAATGAATATGCACTTCAGA
AATCTACAGAGAACTTTTTTCACTTTGTATTTGTTCCACAGCATTCTAGCCAGGAGTACAAAATAGGAGC
TCTTCAAGCAGCACATGAAGATGGCCCAGGAGCCTTCAGCCATCCAGAGCAGCAGAGCAGCACCTAAATC
TCCACACACTTCCCAGTATAACCACTAAGAACACACTAGACCCTTGGCATTAGGGGATTTATCATTTCCA
GTTCTATTATCTGGGAATGACTCCAAGGGTTTGTGACAAGCTTTTGAAACGTAAGTGCTAAGACGAGTGT
GGACAAGTCACTGAGCTAATGAAGAATAGACCCACTGTCTGCTTGGCTCTGCTATTTTGTACCTGTCTTC
ACATGTGGGGAAACTTCATAACTGTGCCCACAAATCAGAGAAATTCGCAAAGGACTAGACAATGTATTGC
CTGTGAACTTCAGAGGCAACTGGAAATAGTGCAACTGGAAATCAACTAGCTTCATACATAGGCGGATTTG
TTTCCAGGGACCAAAAGCACAGAAGATAAGAAAACTTTTCAGGTGATGGCCATATTCTCATCATATCCTC
TCTGTGTGGAGTCTGCCTGTTGTCACAAAAACCTTGACCCTACATCAAGTTACACCTTAACAAAGGGAAG
ATACAGGCATCAGATAAAAGGTACTTGTTTGAAAGGCAGCCATAAGGGAGAACTGAACTTAAAAAAAAAA
AAAAAAAAAATTCCAAGCTGGTTTCAACAGTACTTTGTTTCCAGAACAAAGAAATGTTTCTAACCACATC
TTGTACCCCTTCCTCATCAACTCCAGACTACCACAGACCTTTTTCCAAAACTGTGTGTCACACATCCAGG
TCTTGTGCTTTAGAGCTGCCTCTCAGGCAATTTTAGCCAGCCATTTCTCCAAGTCCTGGATGTCAGCAGA
GCCCACGTCCCCTCTTCCACCCTTGGCACTGCACTCCAGGAACTCCACTTTGAGGGGCAACTGTGAGAAT
TCAAACTCTTTGCCTTTCTTCCCCAGCTGAGCAGGGGCAGTGCTGGAACTGTCCAGTGTGCTGGGGGCAG
CAGAACGGGTAACTCGTAAGGTGTTGCTGTGGGGCAAAAGGAAAGAAGTCAGGAGGCAAAATTTTTATAC
AGCAATTAAATCATATTAGTTTCTAAACATTTCAGCACTCATTTAAAACTTAACTATAGAATTGCCAATT
ATGCTATTAAGATTGTTGAATAATCCTTTGCATTTATAAGTCCCTCTCTTGGACAGAGAGGTGAGGTAGG
TGGGGCGGGCTGGGGGGGTCAGACCTCACAGGGCTAGAAGGCAGGTCAGCAGTAGACCAGGTCACACCAA
CTTTCTTTCAGCCCAAGGCCCCCTTCTAAGAGGATCTACTGAATGAAGCCGTCTAAAAATATATTTTTAA
AATACATGCTTTAAGTGTTATAAAAACATAAGTTTCTGAAAGTTAAGTGTGGGTAGATAGGGTATGTATT
TTTATCTTGAGTCTATTTGGATATGGAGTTTAGAAATCCACCAACTCCAGATTCTCATATCTAACTAGGG
CAGAATTACTATTATCCAACCTCTTTAACCACCAAAACCTTCCCAATGTAAGTCCCCTTACTGCCACCTG
CTGGCCCTAATAAAGGGTGCATAAGCAACACTCATTTGTCGGCCTCCCCTTCCCCTTTCTGCTATCCAGA
AGCAGAGGAATACATGCTGCCAATCTTCTTTCTTACAAAATAAAGCATTTCTTGTTCTGTAAAGTTGCTT
CAAAATTAGTGAAGAATCCACAGGCAAAACTAAGCAATACCTTGTTTAGGAAGGAACACACACACACACA
CACACACACACACACACACACACTGTAAAAGTATTTTTAAAAAACAATACAAAACTGGATATTGCTGACC
TCTTGAGGGAAAAGCTTTTGGGGAGAAACAGGGGCCTTCTAGGCATGGTGGTGAGTACATAGGTATTCAT
TTTAATATTTTTTAAGCTTAATGCATGTGACATATATACTATTATAAGTAAGATATTTTACAATAAAAAT
TTTTTAAGGAAAAAAGTAAAACATGTATTCAGCTTTTGCCACAAGGCCATGTAAATATAATATACCGTGT
TATTGAGAGACTATGAAATGCCTCTAAGCTAACAGGGCCTAATTCTCATAAATCTGAGATTAAAATTAGT
CAGATTCCGAATTTTAACTGATGTTAACCTTTACAATTTGTCAACATTTTGTTTCACTGCCTTTTAAGAA
AGCATTGCCTTTCAATGCTTTTAAAAAAGGATTGGCTTCTGTATTGTTTTTCTCTAAGTCTATAGAGTGA
AAAGCAAACAGCCTATGGAAAACATGTGTTTTAACCACGGGAGACTTGGACTGTACTGTTAAAAATAACC
CAAGACTGATTCACAAATAACATTATGACAGTTTTGGCTTCCCCAAAACAATTCCCAACAATTTCAAGAG
AATTTTTAGAAAAACCCAACCATCCAATTGTTCCAATGTCCTTATTAACCTAATGGCAGCAACAGATACA
ATCCAAGAGAGTGAGCATCAAGAGCACAGGAGGACAGGGTGATAAACTCGCAGCTCCAGACGGGAAAGGA
ACCACTGAAAATGGCATAGGCAGGGCTGGCAAAATTGTTCTGCAAAGAGCCAGAAATTAAATATTTTGTC
GCATATTTTTCTTCTGTTTTTTACCTGCCCTTTAAAAATGTCGATTTACTCTTGGCTTGCAGGCCCAGGC
AGGAGTTTGCCAATGCCCGAAGCTGACTAGATTCTACCAGACTCTAAGCTCCTGAGTACAGGAACACATT
TCCTCCTACAGCTGCTCCCAACTGCAGTCTTGGCATCCACTAGATGCACTACAGGTGCTTCTTAAATGAA
TAAGGGAGTCAGTAAGTCATAGTGGGGAGAAAAGTTTCTAAAAGTTGAATTTATACAGTTTTTCCTCATC
AGATCCTTTTCAAGGCCTTACACAAAAGCAATAAGAAAACATAACTTGCTTTACTATAAATGTTGATCAT
TTCTTCTACACCAGCTTTTGGCTAGCTCTTACAAATTGGCATAACGCAGAAGACATGCTAGATGCCTTAA
AATTCAAAAGCTTATAGCTCAATTTACAAACCTTGAAACACTCAAAGCAGGATATATAATATTGCCAAGT
ATTTTAACAATCTAAGAAGCTATAATGTAGTATCAAAGACTTGTAGTCTTCCTCAGTGTTCTGTTCTTAT
TCTGTCAACAATAATTTCCAAAGTGGCTTTTAAATGTTTTAATTTCTTTTTTCCTGATTCTCAGTTTTTA
TTTTTTATTATTTACATGCATCCTTAAATACCACTTCACAGGCATTATTGAGTGGTGAACAAACACTTCC
ACTCACTGAAATAACACCGTTCTCAAGTTGGCATGTAAACTTTTTTAGCTTCTAAAACCTTTCAACTATA
AATGATTTAGTAACAATGGTAAAATAAATTAAGTTTATGGTTTCAAAAAAATCTTCTTTCCATGAAATTT
TAAAATATCTATAAGCACCCTAGTAAGTTTTTGTGATTCCATTATTTTGTAAATTATTTAACAAATATTT
ATCACACTAATCTTCAGTCTATAATTGTGATAATCACATAAAACCAAACAAAAGAAACATGAATATGCTG
CTTACAGTCTAAGTGTTAAGATATATAATTAACCAACAGGCCTCTTTCACACTTACAGTTCTTTCTCCAG
CTGCTGTTGAATTAACTTTGCTGATTTTGCCATTGCAATATCTGTAAAGAAATAAAGACACTGTTGTAGT
TTAAACGAGAATGAGTTTTTTCCCCAAGACTTCTTACACAGAAGGAAAATTCCTATTTAAACCAGTAAGT
TTTTCTCTTTTTTTAAAAAAAGACCTTTTATCACTAGTTCCTTCTCTATCAAAGTAAGCTTTATACTTGC
ACTAGGGGCTTTCCCAAGATAATGCTTATAAACATATTATGCTGGTGACCCTAAAACTGACTTTAGCTTT
CCCTAAAGTTCTCCACACCTTATAGACCTTTCAATTCAAAACATATAAGTTTACTCAGTTTAACAGAAAG
AAAACCTACCAGTGCTGTGATTATGAGAAGTGCCTTCACATGCCAAAAGACAGTGCCCTATCTGTCATTT
TAAAGTAAACTTAGCATGTTTCCAATTGATCCTAAGACGGTATGTTTAAAGCATTAAGTGTACTAAAGGT
AAGAAACAAGCTCTGGTTTGGCACAAAGCCCATGGCAAATAAACAATAACTCCCTTCCTTATATTCAATC
AGGGAAATAAAGAGGTCAGGTAATGACGCTAATTGCATTCCCAATAAGGCATTATCAATATTATCTGGTC
ACTTCTGAGAAATGCCTTGAACTCTTCATAGAATCAGAATTTCAGATCTGGAAGAGACCTGAAGAGATCC
ACTAGTCTGTCTTATTGTACAGGTAACGGAACTGAAGCCCAGTTTTATTGGGGATTACTAGAAAAGTTTT
CAATGGTTATCAGGTTAAAAGAAAACAACTTCAGCAAACTTCCCTTGATAAAATGTGCTGTACAGTAAAC
TTGTTTGAAAGCAGAAACTCCACCCTGCAAAACTGTGCATCTGATATCACATATTGTCAATCTGATGAAC
TTAACTTGGTAAAGTAAAATAATTTATAATCAGAAAAAACACTGTATCAAAGAAAAATCAGTTAGCAGTC
ACTTGGTTATCATTCCTTGGTCTTCTGGTTAGAAGACTGGTGAAAAGGTAGGAGTAGAAATAAATTTTAA
GATTAAAAATCCTTCAATTTATAGTTCTTTACAGCAATTGTATCTCATCCTCAATAATAACAACTGTAAA
TAATGGAAATAATTCTTAGTAGCAGCAATCCCCAAAAAACTCAATTATTATTGCAAGAAAACATGATGGC
ACCTTGCTTATTGCAGGCTATTAAGAATGATGGTGTATTCTTCAGACCCATACTGTCAATGAGGACTTGA
TACAGAAACTCAGCCACATCTTTCACCTCTCGCTGGAATGCTGCACTATCCACAACAAACACAATAGCCC
TGGAGGGAGAAAACAAGAAAAACTGGCATGTGAACGTGTAACAGGACATCATTATCTTGAAAAACTATCC
TGAACTTCTTCAAAGTCAATCTTGGTGATTAACACTCAGCAGACACACATGCAGGTCTGTGCATATGTTA
TCATATAACATAAATCCTCATTTAACAAGGAACTATTGAGTGCTACTGTGTATCAATGACTGAAGCTGAA
AAAAGACAGTAAGAAATGATGCCTGTCCTCCAAGACAAATCATCATATAGAGAACCATATGATAAATGCC
AAGACAAAACTATGCACATGTGTAACAGGAATAAAGAGAAAGATCATTTAAATGAGACCAGGTCAAAGGC
AACTTTAAGGAGAATGTAACAGTTGAGTTGAATCTTAGCTAGACCAAAAATTGGGGCACAGGCTGTCTGG
AAAGTACAGGTTGAGTATCCCCAATCCAAAAATCCAAAGTCTAAAATCCAAAACACTTCTGGTTCCAAGC
ATTTTGGATAAGGGATACTCAGCCTACAGTATGTTCAAGCCACAAATACGTGAAACACATTCCCTGGGGA
AGTCAAGGTAAGCTGGTACACAGGGAGATGGGGAAATGAAGGAGAACCAAGTCAGACAGTGAGGCGTGAC
ACAATGACCTGTGGAGTTCATGCTTTTCTGTCTTATGAAGAATATTGGTGCCTAAATGGAAGACAAAGCA
ATCTTAGAGGGCGCTTGAACTAGAAGCACAGTGACCAGGTAGGGCCTGAACTAAGGCAGCCATAGTGGGA
CTCCTCATGTGACAGAAACAAAGAGATATCAAAGCTAAAGTGCAGCAGCCCAGGGAAACTGCAGACAACA
GGTCTTAGGGGGCCGGGTGCGGTGGCTCACGCCTGTAATCCCAGCACTTTGGGGGGCCGAGACAGGCAGA
TCACTTGAGGTCAGGAGTTCGAGACAAGTCTGGGCAACATGATGAAACCCAATCTCTACTAAAAATATAA
CAATTAGCCAGATATGGTGGCGGGAGCCTGTAATCCCAGCTACTTGAGAGTCTGAGGCAGAAGAGTTACT
TGAACCCAGAAGGCGAAGGTTGCAGTGAACTGAGATCATGCCACTGCACTCCAGCCTGGGTGACAAAGCG
AAACTCCATCTCAAAGAAAACAAAAAAACAAAAAAACCGGCCAGGCGCGGTGGCTCACGCCTGTAATCCC
AGCACTTTGGGAAGCCGAGGCGGGCGGATCACGAGGTCAGGAGATCGAGACCATCCTGGCTAACACGGCG
AAACCCTGTCTCTCCTAAAAATACAAAAAATTAGCTTGGTGTGATGGCGGGTGCCTGTTGTCCCAGCTAC
TCAGGGGACTGAGGCAGGAGAATGGCGTAAACCTGGGAGGCAGAGCTTGCAGCGAGCCAAGATCGCGCCA
CTGCACTCCAGCCTGGGCAACAGAGCGAGACTCCGTCTCAAAAAAAAAAAAAAAAATACAAGCCTTATGG
ACAAGGGTTTGAATGCCCAGGTGGAGATAAGAGACATGCAATGGCCAACATGCAGCTGGGGAGCTAGAAC
TGAATGCCCTGCACAAAGCCTACAACTTAAAATAGTCTCAGGGAGGTCGGGGCTTGCAAAAAAAGTTCCC
TTAGAAACAGCGGGCCTCCACTGCCTCACACAGATATAGGGTATGAATTTATACTCTCTCCAGGTGTAAG
ACCCCCAAGGGGAAAGGCTTACATAAAAATTGGGCCAGACTTATTGAAGCCCTATGGCCCCAACAGAAGG
AACTATGAACCGCTTATGGAGCAAGGCTTTCATATCCTACGGGATTAAAGAACCACCACAATATCAATGA
TGTGTCACTCTTGAAGAAAGGTTCTGGAGCAAAAATTACAAGGCACAGAATAAAATAATTATGAGGGAGA
ATAACTGGTACCCCAAAGAGAATAATCAGCACCCCAAAACTAAGATAATAAAGCTATCTATAAAGTAAAT
GTTTAAAATTATTTAAGAAAATACTACAAACTACAATAAAAAATAGAATAGTATAAAAAGAAACAGGCTG
GTTTGAAAAGGTAAGTATTTTAGACAAATATAGTAAATGATATTAATAAATCAATGGAAAAGTTAAG

### Example 3

### Sequence Analysis

[0148] Methods for sequencing nucleic acids are well known in the art. Two methods of sequencing were used to identify the genomic DNA identified and described herein: Sanger sequencing and next-generation sequencing.

[0149] Sanger sequencing is a method of DNA sequencing based on the selective incorporation of chain-terminating dideoxynucleotides by DNA polymerase during in vitro DNA replication. Sanger sequencing requires single-stranded DNA template, DNA primer, DNA polymerase, normal dNTPs and modified nucleotides (i.e., dideoxy-NTPs, ddNTPs) that terminate DNA strand elongation. The ddNTPs are labeled with fluorescent dyes, such that each of the nucleotides (A, T, G, C) emit light at different wavelength, thereby differentiating between the different nucleotides. The DNA sample and reagents were mixed together in one reaction mixture, and elongation products were detected by emitted wavelegnth by automatic detection programs to resolve the nucleic acid sequence.

[0150] Next generation sequencing allows high-throughput sequencing to read thousands of sequences concurrently. Next-generation sequencing include Illumina and 454-pyrosequencing methods.

### Example 4

### RNA Analysis from Ocular Samples

[0151] Retinas and whole-eye samples were isolated from the Nrv−/− mice using methods known in the art. RNA was then extracted using methods known in the art. Complementary DNA is produced from the extracted RNA, for example, by reverse transcribing mRNA (Superscript® cDNA synthesis kit, Invitrogen). Primers were designed to hybridize and detect the nucleic acid sequences described herein. A list of the primers and other useful oligonucleotides are included in Table 1.

[0152] Genetic mutations in the RNA sequences are detected by RT-PCR. The mutations are correlated to open reading frames (i.e., sequences encoding a polypeptide) or to a regulatory region (i.e., promoter regions, operator regions, suppressor regions, repressor regions) using methods known in the art, such as sequence alignment, and computer algorithms. Once the genetic mutation in the regulatory region or gene is identified, further validation assays are performed to elucidate the role of the regulatory region or gene in the progression of retinal vascular disease.

[0153] In summary, gene identification of Nrv1 mouse model of retinal neovascularization revealed: 1) linkage to mouse Chromosome 9; 2) genetic fine mapping to 1.0 Mb region of Chromosome 9; 3) sequence analysis of the candidate genes described above; and 4) correlation of genetic mutation to gene or regulatory sequence.

[0154] Sequence analysis, northern blot analysis, and functional assays are performed to identify specific gene regions that are responsible for the mutant phenotype described herein.

TABLE 1
Primers

| | | SEQ |
|---|---|---|
| | | ID |
| Name | Sequence | NO: |
| CVd3-NB-F | CATGAATCTGGCATGGTGTC | 26 |
| CVd3-NB-R | ATGCTCTCAAGCTGGGAAAA | 27 |
| CDV3 mRNAvr1 F | TTGACCCAGAGCTCGGAGC | 28 |
| CDV3 R5 | TCCGGACCTAGCACCAGAG | 29 |
| Cdv3 exon 3 F | TGAAAAGGAAGATGATGATAATG | 30 |
| Cdv3 intron 3 R | TCTGCTGAGAATGTAAGCTTC | 31 |
| Gap1 F | CATTTCCTGTTCCTCTGGCC | 32 |
| Gap1 R | TGAGGTTAGTAGCCAGGCAC | 33 |
| Gap2 F | CCCAACCTGACAGCACCAG | 34 |
| Gap2 R | GTACCTGCTCCTGACTGCC | 35 |
| Gap3 F | TTCAGTGGTAGGGGAAGTGG | 36 |
| Gap3 R | ATTTGCATGCTTTAGATTGGGG | 37 |
| Gap4 F | GGGATCCCATGCCCTCTTC | 38 |
| Gap4 R | GGAGCATGCTACTAACATGTG | 39 |
| Gap5 F | CATTGGTTGTGAGCCTAGCC | 40 |
| Gap5 R | TTCTGAAATTAGTACCACTGTAG | 41 |
| Gap6 F | CGGGAGCCATGCAGCCCAC | 42 |
| Gap6 R | AACGCTTGGCCACCCTCGG | 43 |
| Gap7 F | ACCACATGGTGGCTCAGAAC | 44 |
| Gap7 R | CTAATTGTCCTAGCTAGCTTAC | 45 |
| Gap8 F | GGGCATTTCTGAGTTCAAG | 46 |
| Gap8 R | CAGGGATATAATTGAAAGGTATG | 47 |
| Gap9 F | AAGACAGCTACAGTGTACTCAT | 48 |
| Gap9 R | TATCATGAATAGTGTCAAGCAGT | 49 |
| Gap10 F | TTCGCGGTGGAGAATTATCTC | 50 |
| Gap10 R | TGGAATAAACCCTCCTTGTTTG | 51 |
| Gap11 F | TTTTGAGACAGACTCCCTGGT | 52 |
| Gap11 R | CAGCGGAAGCTGGCCTACA | 53 |
| Gap12 F | GGTTGGTTCTCAGTGCCTAC | 54 |
| Gap12 R | ATCTGCCTGCCTCTCTCTATT | 55 |
| Gap13 F | TGTGGGAAGCCACAGAACTC | 56 |
| Gap13 R | CTAACCTCCCGCTGGAACC | 57 |
| Gap14 F | CTCCAACACATCTTTCTCAACT | 58 |
| Gap14 R | ACTTCACACTCATCAGCACAG | 59 |
| Gap15 F | CAGGGCTACACAGAGAAACC | 60 |
| Gap15 R | AGTGGCCTTCTGAGTGATTAG | 61 |
| Gap16 F | ATCCTAGCAAGTATTTATCTCTC | 62 |
| | Atto | |
| Gap16 R | CCAGCACTCGGGAGGCAG | 63 |
| Gap17 F | CATGCAGGGGATTTGTCAATG | 64 |
| Gap17 R | CTGGTGTGTCTGAAAAGAGTG | 65 |
| Gap18 F | AATGCTGTAAATGCAAGCCTTC | 66 |
| Gap18 R | TACACAGAGAAACCCTGTCTC | 67 |
| Gap19 F | ACATGCGTGCGCGCCCTC | 68 |
| Gap19 R | CTAAGGAGCGGCCACCCG | 69 |
| Gap20 F | AGCTCTTGTCTCTAGCTGCGT | 70 |
| Gap20 R | GATGCTATACCCTCATACAGG | 71 |
| Gap21 F | TTTGTAGAAGCCCCGCTCAC | 72 |
| Gap21 R | TCCTCGGCTTGCTTCCATCA | 73 |
| Gap22 F | GCCCTGGATGTCCTGGAAC | 74 |
| Gap22 R | ACCACCTAGTATACTGCAGAC | 75 |
| Gap23 F | TAGAAGTGTGTCACACCACAG | 76 |
| Gap23 R | GCTAGGGATGTCACTCAGTG | 77 |
| Gap24 F | ACCAAGAGAATGTCAGTGTAAG | 78 |
| Gap24 R | CTTGTTAGAGGAGTGTGTCAC | 79 |
| Gap25 F | CTGTGATACCCAGATGTTTTG | 80 |
| Gap25 R | CCCACAATACTTATAGATTATAG | 81 |
| Gap26 F | CACTGCTCATCTACACAAAGC | 82 |
| Gap26 R | CCAACAGCTATCTGTACAGC | 83 |
| Gap27 F | ATCTGTAAGAGTCCAGAGCAG | 84 |
| Gap27 R | GTTGCTAGTATCTGTCACCC | 85 |
| Gap28 F | TGTGAATGGAAGTCCAAGGATC | 86 |
| Gap28 R | TGGGAGTGCTGTCCTCAGTT | 87 |
| Gap29 F | CAGAAGGTAGCGCCTTCTTG | 88 |
| Gap29 R | CTCCTGGGCTTCTTACAGTTC | 89 |
| Gap30 F | GCCTCACCACTATCGAGAAG | 90 |
| Gap30 R | ATCTGTAACTCCAGTTCCAGG | 91 |
| Gap31 F | AGCCTTGGGTGAGCAAATGG | 92 |
| | Atto | |
| Gap31 R | GCTGTCCTAGAACTCACTCT | 93 |
| Gap32 F | AGAGTTCGAGACCAGCCTG | 94 |
| Gap32 R | TCTGCTGGCTGCTTCCTTG | 95 |
| Gap33 F | AGGGCAGAGCAAGACGCTC | 96 |
| Gap33 R | TGCGGACATGGTGCTGGCA | 97 |
| Gap34 F | GGGAGGACCAAGGGGGAAA | 98 |
| Gap34 R | TTGGGGTGGGGGCAACCAG | 99 |
| Gap35 F | TCTGATACCTGTGGGAAGGAG | 100 |
| Gap35 R | CATAGCTGCACGGTGCCTG | 101 |
| Gap36 F | GAG CACATACAAACTATCACAAG | 102 |
| Gap36 R | TACCAGGGAGCTAGCTGTAG | 102 |
| Gap37 F | TGTCCCTCATGGGAACAGTG | 103 |
| Gap37 R | GACTGTCAGCAAAGCTGCTGGTG | 104 |
| Gap38 F | GCTCCAGCAGATCCAAAGC | 105 |
| Gap38 R | AACTCCTCCACGGCTACATTT | 106 |
| Gap39 F | ACCAGGATGACACTTGGGTG | 107 |
| Gap39 R | CTGCACTCAGAAGACACTAAG | 108 |
| Gap40 F | GGCAGGAACGGAAGCAGAGG | 109 |
| Gap40 R | GTGGCTCATGCCTTTAATCC | 110 |
| Gap41 F | CACAACTGTCTGTAACTCCAG | 111 |
| Gap41 R | TGTGTGCCCTGTGCGGATG | 112 |
| Gap5Fbis | TTTTGTGAGACTAGGCCGGG | 113 |
| Gap5Rbis | AAGTGCTTCTAAAGCTGGCCA | 114 |
| Gap7Fbis | AGATGGCTCAGCGGTTAAGA | 115 |
| Gap7Rbis | CTAATTGTCCTAGCTAGCTTAG | 116 |
| Gap8Fbis | GGGCAGATTTCTGAGTTCAAG | 117 |
| Gap8Ftris | AAGCCAGCCTTGAGGAAGAC | 118 |
| Gap8Rtris | TGTGTGCATTTTTACAGCCACT | 119 |
| | Atto | |
| Gap9Fbis | AAGCCAGCCTTGAGGAAGAC | 120 |
| Gap9Rbis | TGTGTGCATTTTTACAGCCACT | 121 |
| Gap13 Rbis | CTAACCTCCCGCTGGAAGG | 122 |
| Gap15 Rbis | TGACTGTGCTGCACTTGGAT | 123 |
| GAP19Fbis | TTTCAGCCTGGCAAACAACG | 124 |
| GAP19Rbis | CGCTAACCAGAAAGCAAGCG | 125 |
| GAP21Fbis | CCCCGCTCACAGTGTCATAA | 126 |
| GAP21Rbis | ATCCTTCCTCGGCTTGCTTC | 127 |
| GAP22Fbis | CTCAGAGCACCTCAGAGCAC | 128 |
| GAP22Rbis | GCAGTGACAAGTCCCTCCTC | 129 |
| GAP30Fbis | CTTCAAGAGCAGCCTCACCA | 130 |
| GAP30Rbis | GGTTTGTTTCCTTGCCGTCC | 131 |
| GAP32Fbis | CAGCCTATGATGGGAGCCAC | 132 |
| GAP32Rbis | CCCAAGGCTTGCCCTAACTT | 133 |
| GAP33Fbis | GTGGGTGGGTGAGACAGAAG | 134 |
| GAP33Rbis | TTCCCAAAATCTCCCCCTGC | 135 |
| GAP36Fbis | CTGCTAACCACTGGCTCTGT | 136 |
| GAP36Rbis | GAGCTAGCTGTAGGGCAGTG | 137 |
| GAP37Fbis | TGTTGAACCACCATCCCTGG | 138 |
| GAP37Rbis | ATGCCCAAGGTCTCCAAGTG | 139 |
| GAP41Fbis | CTCCCAGTGAACACCAGCAT | 140 |
| GAP41Rbis | TGGAAAGATGTTCCCCAGCC | 141 |
| GapC1F | TGCCTTGAACAGTGGAACATG | 142 |
| GapC2F | CCATCCCTCTCTCACTTGAG | 143 |
| GapC3F | TAGAGTGTAGGTTAGTACTCTTA | 144 |
| GapC4F | AGCACTTGCCATAAGCATTAGA | 145 |
| GapC4R | TCTAATGCTTATGGCAAGTGCT | 146 |
| GapC5F | ACAGAGGACTCAAGGTCAGC | 147 |
| GapC6F | ATCCACAAGCACTGTACAAACA | 148 |
| GapC7F | ATACGTAGGCAAAGCTGATCG | 149 |
| GapC7R | CGATCAGCTTTGCCTACGTAT | 150 |
| GapC8F | CTGCCCACCAGCTGGAAGT | 151 |
| GapC9F | CAATGTTAGGAACTGATTGCTC | 152 |
| GapC10F | ACACCTGCATACACTGAAGCA | 153 |
| GapC10R | TGCTTCAGTGTATGCAGGTGT | 154 |
| GapC11F | TTATAGATCAGACTTGGAGATAC | 155 |
| GapC12F | GTGAGAACACCTAGGGATATG | 156 |
| GapC13F | ATTCCAGCAGCTCAAGTTCAG | 157 |
| GapC13R | CTGAACTTGAGCTGCTGGAAT | 158 |
| GapC14F | AGCGAGTGAACTACAGGAGC | 159 |
| GapC15F | TCGCCAGGATTCTTGAGTCG | 160 |
| GapC16F | TCCGGAGACGTGCCTAATTC | 161 |
| GapC16R | GAATTAGGCACGTCTCCGGA | 162 |
| GapC17F | CACCTTCGTTATGGCCTTGC | 163 |
| GapC18F | TGCTCTGGTGGTACGTTCCT | 164 |
| GapC19R | TCACTAGGGACGTCACTCTC | 165 |
| Ky Ex1 F | GCCAGTGACTTCTCTTAGGGG | 166 |
| Ky Ex1 R | GTGATCAGCCTAAGGCCCTG | 167 |
| CDV3 F3 | CGCGCCTTCCTTGTCCGTCAG | 168 |
| CDV3 R3 | GGCTCAAGCGGGACCACGAG | 169 |
| CDV3 F4 | TGCTCCACGCTCGCGGTTC | 170 |
| CDV3 R4 | CGTGGCCGTGGTTGGGAGAG | 171 |
| CDV3 F5 | CTTCAGCCAAGTCACCAACC | 172 |
| CDV3 R5 | TCCGGACCTAGCACCAGAG | 173 |
| CDV3 F6 | CGTAGAAGGAACGGATTGTC | 174 |
| CDV3 R6 | GGACCCTCACCTTCGTTATG | 175 |
| CDV3 F5 | CTTCAGCCAAGTCACCAACC | 176 |
| CDV3 R6 | GGACCCTCACCTTCGTTATG | 177 |
| CDV3 F6 | CGTAGAAGGAACGGATTGTC | 178 |
| CDV3 R5 | TCCGGACCTAGCACCAGAG | 179 |
| CDV3 F7 | ACGTACCACCAGAGCACGG | 180 |
| EphRb1 var 2 QP F | ACAGGCCGAGGGGAGTT | 181 |
| EphRb1 var 2 QP R | CTCTTGGTGACGACACCCTC | 182 |
| Slco2a1 QP F | GGTGCCCATTCAGCCATTTG | 183 |
| Slco2a1 QP R | CACTGTAGCCGTGTCCACTC | 184 |
| 1300 RIK QP F | CGGGACATCTCGGCCAATAA | 185 |
| 1300 RIK QP R | TCAGTTGGAAGCCTGTTCCC | 186 |
| 7SK QP F | AGGTCAACCAAGCATGAAAAGAG | 187 |
| 7SK QP R | CTCCTGGCCTAGTGGCAATG | 188 |
| GM20425 QP | FCAACCTCACCCGAGATACCC | 189 |
| GM20425 QP | RTTACGTGGCTCTAGGCTCCA | 190 |
| GM5627 QP | FCCCATTATCTCCACCGTCCG | 191 |
| GM5627 QP | FCCACCCCTTCCGTGTATGAC | 192 |
| EphRb1 var 1 QP | FTGCAGCAGGAAACGAGCTTA | 193 |
| EphRb1 var 1 QP R | AATTCCCGGACGGCTTCATT | 194 |
| Ky RTPCR F | ATGGAGCTGAAGAAGGACAG | 195 |
| Cep63 RTPCR | FGCTGCGGCTAACTGTGGTG | 196 |
| Anapc13 RTPR | FGCCTGACAAGATCAAAGCTG | 197 |
| Amotl2 RTPCR F | ATTGTCTAGGCAGGTGTGTG | 198 |
| Gm5627RTPCR F | GCAATGTGAAGTCTCTGGGC | 199 |
| Gm5627RTPCR R | TACAGGTATCCTGTGCGTGGA | 200 |
| RyK RTPCR F | TGCTTGGTCTTGATGCAGAG | 201 |
| Rab6b RTPCR F | CCAGCTGCCAGCACCATGT | 202 |
| Srprb RTPCR F | CTTTCATGGCTTCGGCGAAC | 203 |
| Tfr RTFCR F | GAAGCGGGTCGGTCTGTAC | 204 |
| 1300RkenRTPCRF | GCAGAACGCAGTTCCACAG | 235 |
| 1300RkenRTPCRR | TCCACATGGAGGCAAGCAG | 206 |
| Topbp1 RTPRF | CTCGGGCTCCACCTAGTTC | 207 |
| 7SK RT F | TGCCATATCTGTCACCCCATTG | 208 |
| 7SK RT R | TCAAGCTCCTGGCCTAGTGG | 209 |
| SNORA RT F | TCCCTAGAGGTGTGACAGGC | 210 |
| SNORA RT R | GTTCATAGGTCAGAACACCAAGC | 211 |
| Gm20425 RT F | CAGAAGCGGGTCGGTCTGTA | 212 |
| Gm20425 RT R | GTCCACCCTTGGCACTACAC | 213 |
| Ephb1 RT F | CTGGATTGCTTGCTGCTCTTC | 214 |
| Ephb1 RT F | AAACCCAGACATGCTTCTGCT | 215 |
| Slco2a1 F | AAGCCTGAAGCACCCAAGTC | 216 |
| Srpbp F1 | CAATAACAGGGGTAACAGCC | 217 |
| Srpbp F2 | GCACACTGGACAGTTCCAG | 218 |
| Srpbp F3 | ACCCTGCAGTTTGAGAAAGG | 219 |
| Srpbp F4 | CTCGGTGACCATCCCACAC | 220 |
| Srpbp R 1 | GGCTGTTACCCCTGTTATGG | 221 |
| Srpbp R 2 | CTGTAGACCTTCACACCCC | 222 |
| Srpbp R 3 | CACTACACTCCAGGAACTCC | 223 |
| CDV3mRNAvr1 F | TTGACCCAGAGCTCGGAGC | 224 |
| CDV3mRNAvr1 Rbis | TCCATTGGTTTACTGTTTATTCAA | 225 |
| CDV3mRNAvr1 F | TTGACCCAGAGCTCGGAGC | 226 |
| CDV3mRNAvar3 R | GGTAGTATTCATTTTAAGTACTTC | 227 |
| CDV3mRNAvr4F | TTGAGTTGTGGAATTTCTGTCGC | 228 |
| CDV3mRNAvr1 Rbis | TCCATTGGTTTACTGTTTATTCAA | 229 |
| Cep63-NB-F | GACGCCCACATTGAAGAAC | 230 |
| Cep63-NB-R | AGCTATTCACATGTAAGTCGGAAA | 231 |
| Anapc13-NB-F | GGACAGACCTGGCCTTACAG | 232 |
| Anapc13-NB-R | ATTTGGCGACAGGAAACATT | 233 |
| Amotl2-NB-F | CTGCAGCCGGAGGCCTGTTG | 234 |
| Amotl2-NB-R | AACTGTGGCAGCAGGGGCAG | 235 |
| Ry-NB-F | GTGAATGACCAGTGAGGGGCTGC | 236 |
| Ry-NB-R | CACCAGGCAGGCATCGTGGG | 237 |
| Rab6b-NB-F | AGCAGTGCAGAGATTGTGAAAGGGC | 238 |
| Rab6b-NB-R | GGCTCCCAGTGCTGTGGCAA | 239 |
| RyK-NB-F | ATAGCCCAGCCAATCAACTG | 240 |
| RyK-NB-R | CACCCCCTAGTCCAAAGTCA | 241 |
| Slco1a1-NB-F | CCTTCAGCTGGGACTACTGC | 242 |
| Slco1a1-NB-R | CCCACCACTGAAGTGTTCCT | 243 |
| Trf-NB-F | AAAGAACCCTGCCGAATGGG | 244 |
| Trf-NB-R | AGCAGCGAAGACTACACCAG | 245 |
| Srprb-NB-F | GCATCGCTTTGAGAGTAGGG | 246 |
| Srprb-NB-R | GCTCCTAGAGCCACCTTGTG | 247 |
| BActin-NB-F | TGTTACCAACTGGGACGACA | 248 |
| BActin-NB-R | AAGGAAGGCTGGAAAAGAGC | 249 |
| Topbp1-NB-F | ACAACCACCCAACGAATGTT | 250 |
| Topbp1-NB-R | CAAAGTTTTGGTGCCCAAGT | 251 |
| CVd3-NB-F | CATGAATCTGGCATGGTGTC | 252 |
| CVd3-NB-R | ATGCTCTCAAGCTGGGAAAA | 253 |
| EphB1-NB-F | TGGCAGGCCATCAGAAGAAG | 254 |
| EphB1-NB-R | CCATGCAGTAGTGGTCAGCA | 255 |
| Rik 1300 NB-F | ATGTGACCAGTGGAGTGCTG | 256 |
| Rik 1300 NBR | CAGCTCCGACTGAAGAATGC | 257 |
| GM 20525 NB-F | TGGAGCCTAGAGCCACGTAA | 258 |
| GM 20525 NB-R | ACATCTTTCACCTCCCGCTG | 259 |

NMF128 Finemapping I

| | | |
|---|---|---|
| D9Mit182 For | GTGAAATTGGTTATGTAAATGTCTGA | 260 |
| D9Mit182 Rev | GAGATGACTAGGGTGAACTGGG | 261 |
| D9Mit115 For | TCCAGACTCCTGGGAACTACA | 262 |
| D9Mit115 Rev | TTTCCCAGCCAGTAAAGGC | 263 |
| D9Mit358 For | CCTAAGGTAATTAAATGTGTAAGACCA | 264 |
| D9Mit358 Rev | TTCTGTTTCACTATACATGTGCACA | 265 |
| D9Mit276 Fo | TTGGGACTGTTTGGAATGTG | 266 |
| D9Mit276 Rev | AATTCATAAGTGTCCCCTGGG | 267 |
| D9Mit347 For | CCTCCACATGTGCACTGCT | 268 |
| D9Mit347 Rev | CTGTCCATCTATCATCTATCTGTCTG | 269 |
| D9Mit242 For | AGAATTGCCTTCTGGTCTATACA | 270 |
| D9Mit242 Rev | CGTGTTAAACGTGAATATGTTTG | 271 |
| D9Mit183 For | TAAATACTGAGGCAGAGTGACAGC | 272 |
| D9Mit183 Rev | GGGAGCATTATCATTCCCAA | 273 |
| D9Mit355 For | CTCATTCACTTCCTGGTCCTG | 274 |
| D9Mit355 Rev | GAAGGAAAGCCCACACTTTG | 275 |
| D9Mit35 For | CCAGCGCACTGTTCTGATAA | 276 |
| D9Mit35 Rev | AGGTGCCTTCTGCTTTGAAA | 277 |
| D9Mit34 For | ATGTTAAAACATGGGCTGGTG | 278 |
| D9Mit34 Rev | TGCTTTCTTGTTATTTCATCTACG | 279 |
| D9Mit274 For | AATTTTTAAAGTCTCTCTCCTCTTTCG | 280 |
| D9Mi274 Rev | CCTCTGTTTCATCCTTGTACTGC | 281 |
| D9Mit344 For | GACCTATGACAGCAAGGGGA | 282 |
| D9Mit344 Rev | GGTCCATTTCTCCTCTTTTTTT | 283 |
| D9Mit273 For | CCACTGTGCTTTGGTGACTG | 284 |
| D9Mit273 Rev | GGATTCTGTGGAGGGCTGTA | 285 |
| D9Mit308 For | AACCATGTTCCAGTGGTAGACA | 286 |
| D9Mit308 Rev | TAACAATGAAAGTTTGTGTCCAGG | 287 |
| D9Mit291 For | CATCCCCTTTTACTCTGAGTGG | 288 |
| D9Mit291 Rev | CTAGCCTAGCAGACTTGATGAGC | 289 |
| D9Mit135 For | AGGAAAGAGCCAACTCCCAT | 290 |
| D9Mit135 Rev | TTTCCTCTCCTTTTTGCGTA | 291 |
| D9Mit77 F | AAGAAGGAGGTAGAGCATCGC | 292 |
| D9Mit77 R | CTTTCGGTAATTGCTTGCTACC | 293 |
| D9Mit359 F | ATCACAGAAATGAAGCAAAGACC | 294 |
| D9Mit359 R | TGTATTCTTCCCCCTTCTCTAGC | 295 |
| D9Mit310 F | AAATCTTTATCATGAAATAGGGATGC | 296 |
| D9Mit310 R | CCCACCCCATGTGTATCAC | 297 |
| D9NH8 F | GGTTCTAGAGATGGAACCCA | 298 |
| D9NH8 R | CGAAGCTGTAGAGTATCCCTG | 299 |
| D9 DBL1 F | GACGAGGAAGACACAGCCAA | 300 |
| D9 DBL1 R | ACCCCACTTCCCAAAACCTG | 301 |

### Other Embodiments

[0155] While the invention has been described in conjunction with the detailed description thereof, the foregoing description is intended to illustrate and not limit the scope of the invention, which is defined by the scope of the appended claims. Other aspects, advantages, and modifications are within the scope of the following claims.

[0156] The patent and scientific literature referred to herein establishes the knowledge that is available to those with skill in the art. All United States patents and published or unpublished United States patent applications cited herein are incorporated by reference. All published foreign patents and patent applications cited herein are hereby incorporated by reference. Genbank and NCBI submissions indicated by accession number cited herein are hereby incorporated by reference. All other published references, documents, manuscripts and scientific literature cited herein are hereby incorporated by reference.

[0157] While this invention has been particularly shown and described with references to preferred embodiments thereof, it will be understood by those skilled in the art that various changes in form and details may be made therein without departing from the scope of the invention encompassed by the appended claims.

The application's sequence listing, which the Patent Office published only in electronic form, follows.

SEQUENCE LISTING (312 sequences)

SEQ ID NO: 1 - DNA, 40102 bp, Mus musculus
gcaccatggagctgaagaaggacagcaacgctgtggccatcgacatgctgctcatcgtgcactccgagaagcggcgcgcggcgcaagccacgcacttggacccgcaggcgaacccgggcgcgctgctgcaaaaccgaggaggtaacacccgcctggcccgggtcctcagaatccctgggcacctcggccactaagcccccgggtcctctcgccggggggcgcctaagcagcacccccctccccaacgaggctaatccgaacctctccgaacctctcccagaccgctgcttgtgccctggcgccagggcacctgcgttccttggcaacgcacagcgcactggttgccccaggcctgttttctcccgctattctctgaagggtgcaaaacacatagaaaaatgctcttcagaaagaaaccagggccttaggctgatcacgtgtagcagaggcctagtccccagtcagcatgcaactcaccataagttaccagggaccccaaagggtccctgtactgagtcagactttaagataacttagagtctcagtttcccctttcgtaagcctctcttttcgcctccaacagatataaggactgaatgggtgaagggaacctgggctggggtggagtagtgtttgaagtctcctgaccgtacttgaatttagcttcaattttacttcttctgcagactttgggaaaacgaaaactgagaagtgattgcttatagggtgattgcagaaggcagaatctgcctctattctacacacacacacacacacacacacacacacacaacttgtatagcgtataaagggtgccgaacggacgctcaggaaatcaccgaaaaatgtaggggcctcgtggcgctggtcttggagggagcctctgaagctgacttgagggtctaactctgcaccacttctttagcagagatgcctgccggctgcacagagaaagatgactgctaccatcccactctccctccagctcccacgtttcttgggaccccctcccgctgctctatctgccccccactcccagcttctgtgcgcatgatgcacccacagcctgtccacctgctgtgcgagggcagcggttctctagacaaccttgatccatcagccacatgcgctggagctatgatgcagcccctggggagctggaagggaggcattaagggaaagagagactggagaactgagagtgttcgcagcagttagagtttaggacggagtgtgaggacgggagctgtttaggttaatagatcctgtagttctccgatgctgctcctgggagaaaggattagaccctctcagggtctttgaaggagaaagaaaatgtcctccacgtcttgatgggaatgagatggcgcccgtcgcatgtaacacaatccagaagaccgctccccgagtgtagtgaggcctagttccaagtcagcccaatagtccccaccgcccaatcagagtccctttgcttctgacaccagagaggataaagagagaagccataaagtgctggctatcaaaactgccctcaaggtacccaaagcctacccaaaatgtccatgactccagaagagcatacaaactttgaccctgctttacttggggggtaaagcacccctacttgaaaggcactggtatttttctagaaacattttcccagagaaggtttcttgaagatgctgggcagtagagagaaccgtgtcccctattctttaccaaagtgaaaaagaacagtgtagggtctccaaggtctgccatccatggaacccccaggctgtaccgacctgtgtagccacactttagggcatagcctgaggaagaaaagcattaagtcaaactacttgttcagacgtctcacacagatgcacaacagcccaaaatcgccctgccgactttcaagtctctttctgtcacctgcaggagagttctccccctaaggaacggccaaggaaggccttaacgcgccccctccccacacccatcagagaagaataaagttcaactattgtcacgaggcagacacggtggccttgtgccacagagcaaggagggaaggagtcagagggacaggacaagaagagtcaccagcaatttaggctgcagggctggcctggtctctcttcttttctctaagagtccagcacgttcccagctatttccttagaacagcgctccccacaacacagactatgaagagcaacagactctgcagaaaagatcggggagggggggctgaggaagatttgggggcttctggggtgaagggttagagagccagacctgagactgagcttcctgggaacactgctatcaagtgtgccacagagctggtcttgtggtggcgcctctgctcccactgctcccactgcctgagcatacatcaggttgcatgccagggactcaatctctcaactatcacttccagccactgccagggagagagcttcccttctcttctgcattacatcattgccagagcgaaacatgggtgcatctgatgggtcatgctgaggcctacacaggtccatactctagctgcaaaggatgctgggaaagtaggcaactgtggctctccactcccataggaacaggcaatctctgtatgctttgtccctgcatacagaaataggcaggcaaagcagaaagaaaactctcagaaaataatactttcatacttacatattggagatgtggaaatgggtattgggcatctgtatagcaaaaattccttctggaaaatcctgatagccaatcccaccatcactaaaaactacatttttttttaaaatttaaggattgcattgtttcctcaaatgtgtctcattcaagggcagcctatctcagatcctgaaaaaactggttcccacagccttgtttagcacagatgggtgtctaagtggaacagtagtgcatggtactcgccctagggctccctccacaaaaagtctcacacccaatcttctctcacaggattccaaggtgtcagaaacggaatccggaagtggcaagagttggaagaaaacagctttcagggtaaatctctttttctttctattttctgttccgtctctgtgattcaaaaaccccgaaaagtggctggaagagttgggttgtcctcattgggaaattggccctaacatctaatcggtgagcagacatggctgcctgtggctcggccaagcctctaggcctctgtgagcctggaaaactttccctggcatcggggctcctgtgtttctggaagctgaaagtggggaatgatgctgtgaacttcagcacccatttgtttgctggctgagctatatacgaggatttggctttacttggggtatcgagggttgtgtgtgttcccaccagaggcagggctgctgacatcacaaagactatatacagctctaaaatgtgtttgagttttttgttgttgttgttgtgttttgtttttctggtcagactgggatagtggcctgtcttaaatctatattacttgaggactgggcagagccgatcaaaggttgtatagtagtccctactgccctgagcttccgaatacagctagaagttcatttccaagttcatttccaaaacctcttctttctggttccagacagcgctcttttctggaacacaggcgatgggccaaaatagcgggttttgttttgtgtgcctcaaagactgattacctcagcttccagggggatgcatgagcgttaacatgcatgatgagaacacagacttctactaggaccccgacctccactcgcagaatgttgctgaggagttccagcagaccccacccatgtaaccctggagtcagatgtctgcccctgcacaagagcacagctgaggaaaggtgaataactccgccttcgccagccttcagacagcggcaaaacggaaacgcaaaccaggaaaactgatcttacctctgtgcttattccttcaacagctccgtttcgcaattcctttgcgccaggccaaagtttgttagagattgaacagttaaacaagcaagtctagaaccctgtcctggtagagctgtgttcaaatgatggtcatttccccacgtcccttatgctgttcacgggaaggagtcatcttcaagatgcaagcacacccattaagaacatccgcctgtgtcctggctagtggatccgtgtaaaggcttccttaattggggctaagctataaggaaaatctaactcacttggggtggcaaagattgacattttagctagtgaagcgatactctaggccaataagaagcctaagaatgagagtccaggaactccagccctaggaatggccactcagagcctgtgtgctgtgtgctgggtccatgtgtgagcaagaaagtgagtcaagtgggaacactggacaaaaagagaatatcctttatgttgcttttctctcttgcctgtgtgagccatctgtcaagcaccaaaggcctctcagaaaaccctggagtcattccactttgggcatcttcaaggttggaatggagattagtgaaaaacttcacaaaacagaaagcaatgcagtaactctcaagatgattatttaaaaaaaaaaaaaaaaaaacaaccctctgaggctcttagtatccatccacagaaggtgatttaaatagtccatgaaaaaaatctagcgtttgaagatttggtatgactctggcagcagagaatgtctgtagaaaccttaaatccaggaaacatgatggtttcgccatcccaccaacatgtgtaattttaatgtaagatttggtctagaaaccaggcagtggtggcacatgtctttaatcccagcacttgagaggcagaggaggacggatttctgagttcaagaccagcctggtccacagaatgagttccaggacagccaaggctacacagagaaacattggctccaaaaaaaaaaaaaaaaaaaaaaaaaaaaaaaaaaaaaaaaccacacaaacaaacaaacaaaagactcagtctactttttaaatgacatgcacatatggagaaatatagcagcctctttccactttttttgagggcaagctccagggcactcgcgttgaagctgatttcatcacatatgtgccttgctggtacccaagtcaccgagtcctgctaaccaaaaggctgtccagacccggtagttggagaaatttcatctcagaaggaagtggcccagtggcatgtgctgacagagtgtgcacaaatggaaccaagtgtggtgttgatccaaaagggcacatttgtcctcctattgctactctgtaccctccttgggcttgggtgttggcgagaggtagggtggggagcctgaaacactccaaacttttggaagcagcaggtgtttgggctcagccacccctctcccaaagctcgcccagcaacgggcttaccctgctgtgattggctgctctccttggtcctggctgaagtctgcctagcagcacagtgtctggtgccctaccgctagagagaaaccacttgtgcagccctgactataaatacctcccaggagctgtgccagccaatcatccttcttaaggattcccttcccggctcctgtttcctcatggaggtacagccagccgtgcccacagaaggcagcctccctgtcctcacccgagtggccaggagctccagcccagcatgccacatcaccccacattggcatacgatgacagtgcatctggccttggctaggcaaccatgttctagaagtcctgggggcctgactcaacccgatcctaggagaagactagagcatgccggtcccccaaggcaaacctctgctgggtggaccccaagtctagcccagctgagtgccccacttatccaccttcaccagcttccgctagggaagcatcgaagctgtgtcatgggaagcacagagttgccttcgtgattggctccactctacagacagcaaccttagggaaatgctagttcccaggctgaaccactgttttcccctaaagtgaggctcactctaggtcacagggagatgacgaattataaggggaaatatagactgagaacttccttctgccataatcctggtccttcctcgactcttcccacatccatgaagacaaggtcccagggctggctcagtaaggacagtgctggcacagccacagagcagccataaagcagaaaggaattcatgcctaggaagacccgagaagacagcgatggcctgtagcaagaaccaggcatctctcttcagcatcccaaccccactgggccataaggacatgtaaatatcaccagtggacacagagaactcaaacatgttgagtgctctgtaaaaatggtgaaactaaaccaaactgagtatcctcccaccttcaaggatagaagcagaggcaggtgactgtccctgtgctcctcagagggaggaaagaaagctgagctaggagtttggaagctcaagagttcaagtactatgttggacccccaccctcacccccacccccacccccgcacagttcactccacagaaagggatgatgacaatcggttaggcatctgtgtctgagaaaatattttggaaattgtagcaaaaactccagagcagcagttccatagaccagtagtatgaatcccggcctgggtaagcttccactgggaggcagaaggggtgggcacttgtggactcccatgggtgaggctatgctggtccagaggtgtgctcactatggcagtagatgtgctcagcccccgccaacatacaattatctcaggtgcacccggctccctcagcccccctcccagggaacattataccatggtcatggtggtcacttgccatcgtctttgtctttcttaaataggaaacttgccagagaagcagtgccttcagcagccgcaggtcatcacctcctacgacaaccaaggtaagagacaaatcgctaatggccatctctcctggggttgtgttccaggctctgctgcccaagtcagcgagcccgggatacagagatcaggctgcagggagcacctctgctctgatccataaaagctatagggagcaccttctctgtgatccaagaaggctacagggaatacctcctctgtgatccatgaaggttagagcatccttctccctgcatcccagaggaagaactgagacaccctgcccttccagtgaagaaataaagtccttggattacagagtcccaccattatcgatattgtcagtgctacagctaacactcactgagtgcaaagcatgtgtctgcggctctaccaacctctatacgcacttaagtatcaaagcaaccttgactgggtgagatgaggagactaaggcttgagacagcaagagtcagggctagctctctggtaccttacctccaaccccagcagggcctcagttgttaaccttcccgtggctgggcttctgcggcttcctcgaaactgatctcctgctggctcccagtatccaagtgctcccacatcctgagtcacaaaggctccttgacctctcttgaagctgaacctgatgaaacatcccacttagcgccaagttttcggcagcaaggtggaacaacctggtccttcattgagagctctgattttcccagaagtgctctgggtacttggaaatggcaggcaagggcactctctgctggccaggctgattctgcagttttctagatctgagactaccacgaggtagagctgaggtttccactgtggctggaggagaacctatttaaaggactccagcatctaccatgactcttcgtcagaagcctggggtgctcaggctcaacccagagttggctgccattgctgatgccataacaagcaagaaaactatgccatagcactcaagggacatgggtatgccccttcctgaagcacaagaatcaatgcaggccaggctgtttctctgacactgacgtggctgtacaagtctcacagcagagatacctcgctgatgtagaaagattgcgaatgggctgccattctctcaacacaggggacaaaagaaaggctcctgcatgtaggactgggtcctagggagcgggaaagaccgaaggggaaattaaggcaggagggatggtgggggcaggggtgataaatcagtttcctgttgctcattggctagaaacagcaagatttcgccttaagcttctgggactgagaaggccgaagtcagctttgctgggtaaagggcaggtgtcagcgggccgcagcctttgaagtcttgggagggaatccattccttacctcctcctgctcctacaggctgccagcattccttggctttatggctgtgtcattccagtgacggcttctattatcacatggccctctccctttttaggtaggcagttctccgtctccctcttataaagttatacgtggtcacatctaaggcccaaccagatagcccagaataatcactctgagatccataggtaaggccccatctgcgaaatctccctcgcagtcagagattctgatggataccctgagaattcattactcagctcacgataaggaaccattgtaagcagaatagaggaggctgggagtgtagcttagttgtttggctatcatgcatgaggttttttagtctgatccctggcaccccccacccccagataaaaagaacaggtgagcagcaactgagatggaatatctgtgtaagaaaagagggggtgggacagacacgagggcatctggggagaaattttagctgggagtcatgacatgaaggcacaggcaggcaggcaggcatctgctaggtgtggaaagtctgtgtctgtggccaggggaaaaggggacatgagcagagtaagaagcaggagatgaggcagaaaggattcgaggcaggacttatggtcctaggtgtgggctgccttcagtgtgctggcttctgatcagagtatgatcagcagacatcagatggctttagatgtagtgcctctaatattggaagaatgaacagaacagaagggggtgactagaagcaaagaggactccccctagaggttgtatccaatggcaagagggtttcccatgttgtggatctgggctagaaggagaagggggaacggggagacaagaattgaagcataagccaggggtaagacacagcagactgatcagggggcgggggtggggtgaaggggaagagttgaatgtcgttctgttgagactaggcattggggaaacagaaaggatgtccccatcgtgtgttgagtttctacaaatcggcaagcctgggactccttgggctctgttctagggaccctgtcagctccagcacaggaggtccaatcatagcctagatcagaggcagaacacgaggtgtgtgccagacatcgagctaagcactgttcatggctcctcatctccctcagccacactctatgaaaggttttctttctcacacacacactaaaaaaatgaaatccactttatggatggaaaaaaatggagaaaccgaggcacaggggcatctaagcagcttacctgaagttatgcactaaacaggacaagtcagatccaagagttgaacatgtctgtgcacccccttaaagccaagtgggcttaacttctgtaccacacttcccccatacaggacagggaccacagagctgatttgagtacaacgtccctgcccaccccagcaaaaagtccaaggctccagatggagtttcttattaaaaatggctctgctttccccttctcctcagtggcaggttttatacagcaggcaataaaaagcctgctcgtagtgcacaggggccttagaagatgaatcttcagtgggcttgtgtttgggtgacaggagagtagtcaccacaaggaggcacgatggcttctgaccctcagggtggcggctaaggagacagttctgaaatgacaccacccatcatgcgtgtccccagcttttggagctgactgcttcccgactactacatcctggaagcatagagcacgcatcttttaagatctagccagccatggttcatttgagagtgcttttaagatgacgaatgtttaactaagatttttccgactttaagtgttatggaaaagtatgcccaggttgtaaatggatcagcatgtacagagactcttaagtcaatggtgctgagtatcttgcataaatcctgggactcctccgcatgcacccctgtcaccacccccatgcatgcatacacaccatgcacacatgcttgcctggcggtctttgttaattgatcaatgcacctggcagccacttccaatcagtcagagttaatgaacaacacaaaacccacttgccgtgcccacgttagatattctgagtcaattgagccgttagacaaataccgactgaaacctggagccattaggagagctgtcgtgtgggagatgtcacctgactgggtaaaaggccagcctagaacagtgcccacacagactcgggatgctctatgcatctcaaattttgagagagaaagggagaaaagtcagcagggtttagaaaatgtccagcctgaaagccacctcataggggtagcaagaaatatccctaaatggccaaggctgcagtttcagaagtcttattcagcaaatgaattgctggggaagggtactatgagagaggccaggcaggacacccaaagtcccagaaagggtctcttatccttgacggtcaaggttggtgtgattggcagctgcttgggatttagctctgacttgaattttgcctgagattcttcgtgttgagagataggtcaggttaatatttttactaaaatctcagttttattagatctaaaagtgaggtgggtacgctgtctgcctctctagtgaatgctaaccatcttgacacagggtgatgacggcaggccattcctagggggcagagaagtctcacagatggtctcttcagtctctggaggaatgcaaaactccataatcagggtgagagtttgacagcgttgagaataaaaacagcagcacagcctagggacagttggtcctgggcaaggagataaagtgaaaaattgcagggagaagagggggttcaaatgatgtcagggagagctggtgagcgacagcccctctaaacatgaggccacctccccgttaaccccagaagggtcacaactgtggtttgtttcccagccccaccactcttcacaagaaacatggttggaggagggcagctagatgtacataagctaggagaagtgcgagggagatgcttactgttggaccctaggcccacgagctgttcaccttcgcagctcctttaaggctacagttggttcagcccagtaatctccaaacaacagctgcactgggtcagacagactcctgggtcggatagacccctttgctgcgggactgaaagcattgcgggttgcaacccacaatagagagagcgtgcaggggagcctctcacagttcatctttcaaaaagcatcttgtggccacacaccactttggagaacacctcagaaagagttgcacaagaaaacaaagaggccaagttaaccagggccgcaaagggaatatgcttcggatgagggtggcacccaatcttctgacaagaatggactcacaccctgaattctgaaatcctcggcatcttcatcccaggatcacagggctggtgtcatgggcagtgaatgtgctagattctacactttacaggtgaatgctgggctacagagatagctcagttttaagagcatttgctccacaatcgtgaagactagagttcgaacctcagcacccacatgacagggcaggcatcctctgacatgcctttaacccagctcagaggctgtcagagattggaggctcttggacttgctggtttccagcctagctgaaacacaagcctcgggttcagggagagactctgcctcaaagaaataggcggagagtgatagagatcaccttatttattgcatgtgaacaatacatatataccccccacacacacacacacacattaactaatttattagttaattaaatatttaaaatgtttgctaagccttttggtctggggaacacacattgtatctccagtctcgttagcatgcaaaacaagttttaaaagcgtataagaaaatcaataatggttttccaaaagaaaataattgcagtatattttaacaaaggattaataaaaaggaactcattcttacaaaacaaaggaaacataataaatcagtaaataataataacaatcagcactcaaaacaatttaaagagcaaataagaaattttaaatctacactaaaatgtttttaaatacataaaacaataagggacccttcattaataaaaatgtaaagggtttatgaaggcaggtgccagtaagcttagcaggcatgtttgtgttatccaccaccacgggactcagctcctaatgccatcgtgagcttccaagcctgcagatctgctggacggtcactgtccacgccatagccggctgatctcagctcttggctgagctagtgctggctgtcagctggtgggctggctggagaccagagggtttcagatagcctcacctgagcagccctgcgctgctccctgcggtctctcacccttagtctggtgcacacacagcacagcactgtggcagggatgccaagagtgggagcgagcgttgcaaagtctctccagggctaaactcagacactgaatgataacacaagttctaccccatgctaatcagccatactaacttgtgaggccagcctacattcaaggggtgaaacaaaacacctctcgttgggaagaagatgaagtgtaggcaatcaaccagggcaagaatgagtaaaaagggcattctccacctctgaccccattggtggaatcagaaaccaacagaaggatgtgtgggaaagtcggccagtattacaaaagccttccaaaaccctcattcctttccatcagtgtttaggaattcactctcaggaattgattggaaaagtgttagagatgtcttctttatcctgatgttcaccacatcatggtttatcacagcaagcacctggggagtgcggagtatccgatgcacacagcaagttgtagtgagtactctgaacacgtgacgtaaatgtgtgttccactgccttccaggactgggggacattctctacagcaccgcagaagccacggcagctgacagcactatttaatgcttctccgcagttgctgatttttttaaattaatcccttcaatctctgaaagaagagagctgatatctctgactataatgtatatttgtctattcctctctataattctgtgagttttatttcagatattttaaatctttgtgttcaggtgactacgtatttgacattgtcacatctccttgataagctgacgtttcttcactattatattatactattatgttatatttctctatctctggtattttcctttcttgagtggatatgttaatgagcaaattgtcttggtctcactgtacctgaaaaaatgtttttatttcattctcatgtggaatttttattggatagagtcagttaatccctttcagaatcttaaagattccacatctttctgtcctagtttctgatgagaaatatgtagccaccttatatataatatatcacttatccagagcgtattcagggacattgtatctcagtgttgtaattatgtcatgtctggacctggatcttcttttatttatcatggttggcacacactaaacttgagtccattcatgtatgtcttttctcaaatttgagtagtttgttatttcttcagctacttttctgcacacatggttgccggagacatgaacagtggacttctaaatgtggtcctgtggtctctgaagcattgctggcttttcccattgtccagattggatcccggccgctgttctcatgttctcaggctctttcctttgtcatagaaaacattgtagcccatcttccatttcagggttaacatctccactttgttcttccatcttctgtttcttcgctgtgttttgtatcttttgctttattctgaaatggctggcctttcgttttggagcatggctaatgtgccattttatcacctttgggttaaatgtgggttgtcatggttggcatcttttcttctccaactgagatcttcccaggtactctgctgagcagttctgagtggtggcctttgcggggcccatctgcttgcgtgcaccaggaagtggccagttcagaaggaagacatggtttttcccctagagtttggtagtcagactgtggtataaagtgcatggggtgagacgtgtggtgaccatgggaactcatttgcaactttagggaattacatttcgtcagccatttcctgttcctctggccaaaaaaaaaaggttgaaactttgtcttttcactctgttgggtactttttataactgtgtctggggacaatcagcaggagagatgaaggagggaggaagggaggatagagggagggagaagagaggagagggaaagagagggaaggagagagatggtggagggagggatggagcgagggaggaagggagggagggtggagggagggagggagggagggaaaggagacagggagagaaaaatacacatgccacttgtgcctggctactaacctcacagctacccacattcttgcttctgggctgaatcaggaaaatatagaataaagaaaaaaaaaaaaaaacacagcagaagatgtccctgagacaattaggggttcccattctcacccttcaagtagaaaatgattttttttttccttgagtactcttttacatccatgcacctctgcgtagggatgcctttgcctgaggtgttgccagaatgagaagaagggtagaccgatgcggtcctgtctcacaacccggtcgttgccactcccaaccctgttcttttctatcactgaatttccagggtctgcagatgggtttccccatgcattccacccccatggttagatggggtagagagagcgcttgtgtttgttgtttgggttagtctggaaaacatgaattatctgcatattcaacagaaagatctaagatgaagcacgttctgccatttgaacatctgtcacaagacggagtgcccttcctagcagcatttggctaagaatgtcacctccccctttgcaggtactcagctgactgtggaaatccacccccaagacgccatgccccagctgcttaagaagttctctttggctaaacgtacgtacctgtacagggctgctttgatcgtccaacctgggagaaggcagaaacattactatttacacccattgtgttagtttctattcttattgctcccatggctttgggagatacagtatactgtgacagaaaaagtttggcagcaggaagttccgtaattgcaggagtatgcagctggacgtatcgctgccccacatagtggtaaaacaggaagcagaaaatgaacaggaagtggaactgggctttagagactcaagacctgcccaccagttacccacttcctccagagaggcttcaccccctaaaggttgtacatccctccaagacagcattaatatccagggactgggtgtccacacacataagtttatgggagcatttcacagtcaagtacaacagccagatgctactgttctcgggtctctgtaaggaggtccgggtgatgcgcataactaatagtgcattctctcaccagactgtcactaccagggttttaagatgccatctgtaggctgccaaaaaccgtggtatgcacagtgctaagtacttcccatgcctcaccttcttgacctttatgcagatgctggtattcgccccatgttttttcaagtcagcaaagcgaggctcagaaaagagaaacgactgtccaggagagttactcggccaaaagataaagacccaggtccaactccgaagcctccgatttcagctataatatgtgggaggtgtcagtctatgtaggcaggcaggatcttgactgcaatgactcttcatccctgccccatcttcaccctggcctgcctcttggatgaaggaggcctcatgaggaaagaggcagaggaggcttgaggcccctcccgctgtgtcctctcaatgatgcaaaaccctccaaggctatatccttgcagagcacaccacgacccttttttttttcacatagaaaaggaggaaaaataagtaagatacccttgtaggattgttctaaactcccataaacactaacttctcggaaccctgccattccgtctgaagatggaggaggaggggaagaaaagttccaaagaaaaacagaacctatttctgggaatggaaaccaccctctcagctttcagttcctatatttacagcctgaagtggctctgggggcataaaccgtcggcctcggtgagcccaccctcaattctgaatggtttcattagacaccatgtcttcctgacctgactttgaaccagcagctaagtctcctttgcttctttcccagggactcccctgttactcaccattcacagtgcagggccacccactccaagggctacatgaccttctgggccccaagttccatacacattaccttttgtgcccctattatcgctcttcgcttagtcagttcttgtcttggctagacataaaactgcctacatgtactgacaactgccacgtattatagctagaaccaaagggtttggagctgtacttgggccttattctcttggccaggtaactttcttggacaatcatttctcctacctgagcctcactttgctgacttggaaaacacagggtgaatacaggtcaaaaggctaaggcacagaaagtactagaagaaactggtttgtacctatagcgtctgcagctattttccaagatggcagaatgcagaggaggggtgaaccacagctctgtgcaggcctgctgcaggggataaagccttgagatcacagcatgctctgactcaactcaaagaccatagctccctttcctgtcattcatcccctattcccagtctcttctctggcccagcagccacagtgcatggtgggtggggatgggagcagggagtctgtaagagccagcatgaacagggagagtggccaggactactacctagaaaatcgccagtgcttgcttttctgtttcttctgtggtatctctgacctttgggatattccaggtttacaaggtgataaaaatggaaacatgagaccccggcagcctggagggaaagatgcccacggtgagtcccaggccttctctggggcctctttaaaaaaaaaaaaaagcagtgagttggcctcatggtccagtctccagctgccaattggtactggcttgctgggacatcaagagtctgagaccatctgtggatctgggagaaagagtgtcctgattgactagtagtgttggccacagacacaggtgaagagggaaaactcttatatcatcccagcgccaaagagtaacccctttctgagtacaaaacagtctactacagaaaatggtggacccgggatgcagagtgatgctaatttggagctggagacgtagctctgctggtagggtacctacctacctagcaggcatgaagctctgggaccagttctcagaaccacatcaactgggtatgccaacatactcctgcaatcctggtactcaagaggtggaggcaggaggatcagaatttcaaagtcaccctgtgctctatggagaaaaccagcctcaactggagaccctatctttaaaaagaaaagaaaaggaaaaaaaacagtaaaaacatagatgagggacttggaatacagcccactggcagaacacttgcccaccatgtgcagggggtcaatccccattgtgacaaaaaatacaaagcaataaataaaatggagtgtcaagtgtttacacggtaggaagcttgtgggtagcaggttacggcagagaaacactaaatggggtgatatgaggtgatagatggtctggattggaatcctgctttttcctctaatttgtcttctctaagcctcagtttcccccttggtaggccggatgctagcagtggctccgtgcacacctgcctattttatttggcctcaaaatcagagtaagttaattaatgttcctggtgttttaagtatcttgctataaaatcatattctcctgtttgactcttacataatctgcttggaaggtagatttaacgaggcatgaatcaccatgggtattttgaatataaaatatcaaatattgtaagaatggaaccagggaaagaggaactaataaagtggaaattttaacaccattttagaaatgccatccttctaaacaggaaggcggggaagagctgacctgagcggcagcctatgtgatgtgaaagcccacctgatgcccacctgtcaccgtggcgctcttatcaggcagtgacgggaggcaggctgaggagaactgagatgtgaggcactcagcaggagctagccagttattccccttctggtgggggcggctgaagtatggctgggtttcggaccacactagatggttatatctgcattaagatgccccaggtccaactctatgggtaaacacaaaccaggatgatgtcacctcctgaatccctgatctgcctcccagaacagactggggcactcctacatccaattggaaaatagaggtggacactagccataaaccaatatcagcatcctattctctctctccctttctacccccatggcctgactcaaagtctgggtgccctactgagaccctggtgaccagctctaccagacttccttacacctagcatgccttgtggtaccttacaccaaacacttggccatgggtcctccccgattaagaataccaggggccagcaacactacttacagaaagttaaaaaaaaaaaaaaaaccttaaactaattatcaggggtgggaaagtggattgcatcatcctttcagtaattgtctgggtacaattgagtcagccaaggtttttaatgctgaatctccagggtcttcaaaataatctcaagttccctgtgaatcttcaagatgaccataggggtagtcacagttcctaggcaactttgcccaaacaaacgtttctaggaggtacagctcttggaatgagtgtgttggtgtaagaaaggttaaagagccatggatcctccaagtgactattaggattgggctcacagccctcctcaggggtcccccaccccacccaccccccgtactgacttggtttccctgtgttaacagcctacccctgggacagatccagtttgaaatccatgcccctggacctccggctctttgaaaaactggatgcctctgcctcacaggtaggagaattgactcccttggctaaaggccccaaaggtgacttggagttccccaagtcaggataaaagagcctacctccaaggcctctcttgatcatacactgagtaaaccagatggatggtctatggctgtcctttcacagtgtaccttcgttactttgtaatggctgtgatcaaataactggcaagaggcaagatgatggagggagagtttgttttggcttacagtttgaggaggcactgtgtctcggggcagggagggtattgagcgtgaggtgactagacaaattgcaaccctaggcaggaagagaacagacaggaaatggagcaggctataaaacctcaaggcctggcctccagtgatctacttcttccagcaaggctctgcctcctgaaggctccacaaccttctcaaagaatgccaccagctggggaccaagtgtttagatacatgagcctatggaggaccttacacatttcaataccaccagtgtggatgcggaacaggaagcccaagggttgtgttaaacccataggcaatgccttagttacttttttcttgctgtgacgaaacaccataccttggggagaatagggtttatttcatcttataacttatagtcccttatccaaggacatggaggcaggaactcaaagcaagaagcctagagatagaaactgatgcctaggccatgaagaacactgcttactggcttgctcctcgtggcttgctttcctgtagcactcaggaccaccagcccggagatgacaatacctcccacgtcattcatcagttaagacaataagacaagcttgtccgcaggccaatctggtgcggggtatttctcaatcgagatttcttcttcccaaatgactctagcttgtggcaagttgacataaaactagccagcgtagatcaggtttagtaaatcttaaccatgaccacaggctgctgtagctacccgaatacctgcctggctggtcccagatgggaagaggaaagctgaggtggctctagcacctgggcttcaactggccagcacacatgccctgtccaactcccctaacgccacactatttatcccccaccaccctctgccctcctgggccccgttccagcttcctcactggagaaagagtagctggccagatttggtgggtgtcacactcccatcctcccctgacccccatagaatctgatttttctgctcccaggtgacagtcaagagtggcctgaatgagctggtgagtgacttgctccaggaagcccacagcgatctggaaagggtcagagccatctggatctggatctgccaccatataggtatgccaccatataggtatgccaccatataggtatgccactaagggggtagcaccggggaccctggatgccccttccttcagatccctgcttctgttgcctcatcagagtgaggagttaggtcagggggacgtgcctgaagtaaccaaggaaggtaaaagccacccttctgaactgggccttcacccagaagctgacctccctgggtccaggattcctagtaagccccgctctacagagatgagaacccaggacggcccatcaccaagagggtgaccacagactgaggaggacacagctgtatgaacaccagaaggtcctaagacaagtgccagctagggcaagtgctcatattcctgtctcctgctgtcccacctgtgtccccggccgctggcttccacctactcccagggttctccaagccatcttagaaacctgggcctgagcggctgcccactgctctctgagagacagttaagggaatcttgccaggtcctgacaagtcacaggcttcccttgctgaagcctgcaagtgggggagatggtggccaactgagtggcggggtggacccttgttcctttgacatgaagaacagccagtgtcccacctggattccccgaggctcttctttgtcctccaggtgcaacttagaaaatgtagtcacccaaggtctgaacctgagggcgggtgcctccttccctacaccaccaccagctttcttccccctcttagacaaggtttcattaggcagccctagctggcctggaactcactatgtagactaggctggtcttgaattcacagagatctatctgcccacctctactttctgagtgctgggattaaaggtgtgcgctatgaggaccaggtggtcctctccgctttggccgcgatgtcccttttgccacctacacaaaaggtgaccacatctggctaggttggggtcctgtttctgttcatgccaccatttcctcctgagcacagctggggggtgaaggctatcctatgggctctgtggctttcccttcctcactgagccatcctcgtgcacctgggagccttgcgtgcccacagccgcctcctctgtcctccagagtacgacgttgaggctgcccaggagaaggaccgccaggccttcaaacccactgacatcctgaggacccagaagaccaactgtgatggttacgccggcctctttgaaaggatgtgcaggtatgaaagacagcctgtgataagcaagagtccccgggctgtcacccgactgcctgcttctttcttctctttcgtccctctgtgcctctgcccccattgccaggtctggagcttgagtttgcaaactctgccggggaatccaagtgagtcctgaaaaggtcaatttctccctttttaacaccagcgtaattgactttggaccatctgccgggcttcgccatgcattaacataatggcagatgaatgcacaaagataatttggttataaaaggccccttttctgccttctcccttcactgtgcagctgaaggttaaaagaatggcaggcctggaagccagaggacagtggccgctgacgccaaggagactatgaaaggctgtcctttgaggagggagaggggccgtgcttggaaagatccattggtaggaaagctcagtagccaggaagtggttctctgtgccttggggccccattctcagagctatggcacagacacaggcccaagtgggagaactggctgaagtaattcttggtaacatcaagacagtctcaagtccgggggagccatacggatggatttctgaggtcacctgggttctcctagggaacaagcaggaagtgagtgattggctatgtccctgaaaagctgtgagtaggtctcagatacccagtgtccacctatcgggactgcaggtggcagttgtcaaaccacagtaacagatgctctccagtcgagcagctggcatggcttagcgttgtgctgctggtcccctgtggccttgtgtgcacttgtgtgtgccctgtcttgagatgcacacaacccattctcggcctgagctccagtgcctcccaaccctgtattaccgcttccaggtataggcagatacctggttctgggtccctctagccctcctgcccaactccctgctccaaacttccacttcccatctctgggaccctagcctcagagacaacctgggcaggatccatgctggctgacccactgttctccctccagcagtaccttctacttctccaagttcccagtgacatccccagccccagagccaggtgccccattgtctttgggcatccctgtccctgggttcccagtgtctttcaaagtcctccaaaacttgacctcagccacctgctggctctgcacctcgaagcaacactcacacaacacttccgcttccgcttcccatgagtgcacagcccttcctggcatttctctaggccccaccccagagcctccttcctatcctttgacatctgaccttgtctactaacttgtgtgagttacattaggttttcatcttgtagctctttactccaggtgatgatgaggaatcaaatccagggcctttcccagggaaaacaaacaatctaccactaagccttagccctcccatggtgctccagacagactctagctctgtagctcaggctcgctttgaattcactgtgtggcaaggctggcctaagtgctgggattatgggtatgcaacaactgttctgctaataatttttttaactatattatgtttagttagttagttagttagttatgcctctgtctctctgggggcgggggagaggggaggcatatacatgtcatagcattcatgtgaaggtcagaggtcaactttcaaaagtcaactctgtctttgtaacatgagggaattgaaccaggcttggtggcaagtgcttttacccactaagccatcttgtcagcccactaataacttttttgaattaaaaaaaaaaaaatgctttctgtaaatagtctccaaaatgtacaagacaaggaaaacaactaattggctctgaatcacctaggtagagttgagatagtgacgcccacgtgccttcccaggtgatagtgacacccatgtcccttcccaggtgacagtgacacccatgtgccttctctggcttgttctcagcacagttctctctatgtgcctttcttcctgtgtcttaatcccccgcccctcttctgcctctctgagaacatctggcccagaattctccacacagtagaccctcaattggcatttacacacagtaggcttttaataggcattttcagaatggtgagaagcaagaaggatatgcctggcagacgtgtgtgttttcttttgaataacagaacaccaccgggttttcagtgcctgcctggcatctttcagaatgtggttgttttcataggaatttgtaaatttgaaaacacttggatttctttttctttttttctcatgatgggttttgttttgaggtttatttttttaagaagtatttattttattttatatagaggagtatactgtagctgccttcagaagagggtatcagatcctattacagatggttgtgagctaccatgtggttgctgggatttgaactcaggacttttggaagacgagtcagtgctcttaaccactgaggcatctctccagaccctggattttctttctagttgattcattctttcacaatttcatatgcatattatactttgaatgtctcccccatagtcccctcacctccttcccctcccactaaaccccttcttcctaacagactcccccactcctattttcatgactttgggggccactctattttattagggttgtctacaagagtaggggttagttaaataagggtagcttaccactgagaaatttggctctcctgcccccccccccaacaacccttaactgcctagaacttcccagaaaggggtggggcctcatgagccccgcccccatccatccttgatggactcaccagctctgcctcctcactgcaggactcctgcaggtggcaacagtcttgagtcttgcaagcatgtctgtatgtctcctgagtctcccggctcactgtagatgtgccacaggtacagtcagaaagaccagggcccccatccctaactgaccacttatgagttttgttcatttaggtaaggcagcttcctttcaggcctcggtttcttcatctgtattttagggactgtattgctttcagggcggaacagtagagcatgccacgtggaggtgccgctcaactgacttgggaaatgctatttttttttaagacttgcgccatctttcataagcattggagcatttttgcggaactttcctactgcctctgctagcccacccacatagatccagaaaactgacgcttgccttgattgactctgtcggctctctgacctgttccagatgcttaacaatggccacatcctgccctgcagctcatcattaaaatacacccccaacatttcacatcagttaaagttagtctcaacctagcgatgaccatgcacaaaatcccttgcactgcctgggacacttaacagtagctcagggttcggtgaactcccttaagtgtcgccttaaggatcagtaacccattcgtgcatggcctccctaagccccttgacccctggaatggctgccaatcatttggtaaattcattagttggttccttaataattgcagacacgcaatccacacctgcttattgagtctgtggactgccagggtggcctcttagaaagcgccgtcctcggaagtcctgcctaatgctctgcttcctggccaagggcctcattaaagactgatttaacagagcagtttggtaaggacttagatattcccaggcattctctgtttccccctttgtctttcctacatttccgatgtggtgtgttttgttagctctctcgtcgccccgtgtaattgctggtccagtttcttcccggctttctatcattgagcagtaagtctgtcttcagccccgattgcccacagccttaattgattctgcctaatctccttgcaggggccaaggttaattccccaggcacctgccactgagtcagcctgcagtaaattctctcccccactgtaatcatggccccagtaacaccagccagcaaatttttccagagatttgaggtaaccggcgctttattgccagtctgaagctttggcactgagcaggctggttgtcaccaatcatatgtcagctgcatttccatccatcttccatgacatcttctagtcccgtgaagagcaaggacagaggcatgcctgcttggttagctgctggtggccaatgtgaccatagtggccatccaagcctctagggagattctccaggagctgggtggtctttcttattttcttctttttcagcagtattggagactgaacccagagtcttatatatgctagccagctaagaaccctatcactgagctgcctctccgttaagtttttgagtcagcatctctctgagttacccaggctgatcttcaactcactcggcaactcaggcagaccctgtacttgtgactttcctacctcagcctccagagtgctagaactaaagtactccagagtagagagaactaaaggcctgcatccgcccagagctgccttaaataatttaattattgccagcactgactttgtcacataaggcctctgaaagggacacctaaactccccctccactgtggctacactggaggaggatacaagctcgaattctttctcggatcatctcttcatttcattgtatatcacctacagtcctacatatgaaagcaggatgttggtctgcaaaagtcctgacatagtttgaaagctctcagactgtgtctcaggactgctggaccccaggattgtctttactttagctggctgtgtgtcaccaagtcaggtagcctttctctcaaagccacagttagacaggaaacctctgagatcatgcctaggaagccagaggtggacaggtgtgtggcaaggatagagagatacctaagtttataagaaatcaaatccaagtgttgagagagatgccgctgcttatgccctgcttagaaatcacacgccttcaacaagataatgaaagaaaagaacgtttcatttagcatggtcaaaggctgctgtgcgcagtgttcctgcctgcccaagcccctcacctacactcccagcttctcacaggctatacctgtatcacatagctcctgtggcagggcctggaccttatctgtatcaaacaaccatcaaggtctggactgtcaactcctcactctgtacccaggggacacaccacagcaagctggtatgctcagatctttgataagtgacaaggaaatgtgctcatagctccagaagccagccaaggtcactaggtaatggcaccttccatttgcccacccctctactcagtgcatattcatcaggctgcagaggaaggtcaagtgttcttcaaagcctcagatcattggttgggtccccgagccccagccctggctgggaatgggctgctgcttgctcctgatgttctgggtgtcgcaaaaggattgctcgtgagtcctgcatgcaagctggctttgcaatatcagatgcacatcctccctgtgctagtgccccaacagtggtactgtcaggactctcagatggagaagcaggattctgcagcctaaggttgttacatagacagacggccttgggctgtgtttggggctggctagccaagctactcggcaggtagaaacatgtctcacctgagatcccttcttcagcacttttttgcctcagtctggtgtttcacagatcctcctgcttcgcaagcacaagctcttctaaggcagccactgagccttgtgttggaacaatctctcactgtggttcattgtgtgtcatgtgctgccccccccccttcacacacacacccacgcccagtgccggttcttgtgcttgacacaccatttgtacggtcagagctctttcaatgatgtgaaggggtcacggattgtggtctgatcaggaaccagagaggctcgatagatagttctacaatcagatagatagttttatgcctgtgaaatatttaatttatataaaaactacggattactgacaacactttacattgtgacttctgtccaattcatcttacacatagttgtcagataataaaataaccccatgtcatactccagcaatgcataaacttacagctgacttcatttttcatcttagttctgccacaggcaatccccacggccctttctccttctcctcggtctgtcagaggagaattgccccctggagatcacttaatgccaaccatcctttttagcccataatgaacctggcaaggtcactgcaggtgactggtagaggtagcaatagagttctgatttcctggctgcggtcaatggccacccattccagcttggagcaatataggtacatgtcactcatcctttctccctcctatggctcgttcctgggctgggcaagacccttccccacttgcttctcctgggtggaagaatacctcccactcactgtttaaaacaagcttcccccagttggaggagacacagtctgcctacaggagaggccagttcactccagcacccagagaagatgtggatgctaaatgctccccactccttccttgctcctgatgctctgagcagaaagcaagcaccagacagcaatccagaccccagcgttccactcaccgcttgcccttcctgcgaagtgagccatttgcaaacacaaaggttcccaggacttccctttgccctccacaccaggctaaaatttacatacacagtgttttcgagcaacaatggggaataattcactgaagaatataacctaagttttcccaattctataacgaacacataatcatattttaaaatgttgtcgtgctccctcccccgccccgccctgcttctttttacagtactggagagagagtcttcgctcttgcatgcaaggcaagcactctgggcctgacctacagccccccccccaaaaaaaagtaagatgcagaggaatttaaataaacacacctataaccccatttccgagggatcaagaatctctccctacccaaccctgccctcgttctccatgaatatatatatttacactcagagagactgtctgccgtggcttcctgcctcagaaagaccttctgttctgggactcattttggaccgtcaccagtagaaaaccctaccaccagggtctagcaactcttggtgtttgtcaacagaatgtccccaagtgttcctgaaataacttcacagggcccagctgctataatatcgtgagattccctagggaaccctggagacctaacgcctctttggcactgcggacaggaggggagggatttaatttaattgatcatatagttcccaaataaaagacacaaaacatttatatttaaaacaagctgtaacagcactagagctgggcagatatcagccctctgtgttattttgtctacttccttgtcaataacccagagatatcacttgctttgttccccctgggctgctcctactccaactggctggccctcatggccatggggtcatgatcagcctacctcatggtatcttcttcctccttctctccttgtggtctctgcttcagactccaagcccagaaaccaaaacctgcctacctctcttctgcccagctgcaggccgtaggcgtctttattgaccaatcagggataacttggagggcaatgttacatagcgccaattgggtgtacaatgaggatttcctcgtctctggaggcaaccagacgttggggttcagtactcagcgttacaatatgtaacaacagaccaaacctcaacagggaccatcaaatgtcaccccctgaaaggagtctcggtgtgagtcgcctcagcgtggctctgcagggaaaggagggctacagcggatgtggtgacataccaccatcgttatctgcatgtgatgcaataagagaaatgagaatctcttcattttcatgctaccacatttgccccagtgacccagcaaatgacgcataagtgtacgtcagtgacactcagtgtggccttctactaaatgtgagctaaatacccatctccatgggcaagcctctccctacactcacagtcagtatgtgatcttctgaccccattagtctaagaccctgttgtttaatgggactggagattcagacccaatgcatcctgagagtgaccaggcccggctacctgatgtgggcctcagagagatgttcaggatcagcactgtgtggagggtgggtagttgttgaggtgcagatggggttccactgacgaatcactttgggaatccaggactcagtagacttgtgaatttattataccagttttcacaaatgcaagaaaagtgttggggcagagcaactcagcaccagggccagcaggcccggggccagcagctccatgtaggtcagactggtactgtccatttgtccattgccatgttggggaagagctgctgaagagagaggccagtgggtggtggggaaggcagggccctcaggggacttgctgattcagcctttggagtgttggccacagcccagacctggttttatgaggtctctaaaagtgacaggcactccatctcccacagttcaactttccccaaagtgatacctgcattgctgcgtgccatggggataccctgtcaaaaagacaaggccagccagtcaacgtttccactcctcgaggagcaggtagagacttcaaaatggtggctgtctcagtcagggttactattgctgtgatgagacgccatgaccaaagcaacttggggaggaaagagtttatgcagcttatgcttccacatcacagttcatcatcgaaggaagtcaggacaggaattcaaacaagacaggaacctgggaggcagaagctggtgcagagaccatggaggagccctgcttagtggcttgctcctaatggcttgctcagtctgcattttatagaacccaagatcactagcccaggggtgtcgccacccacaatggcctgggttctccccttattagtcatttagtaagaaaatgccctttgatcttgcctacagcccgatcctatggaggcattttctcaatagaggctccatcctctgatgactctagcttgtgtcaaggtgatgcaaaactggccaatgcagaggcccaggcaggtagtcaaggaaggatattaatgcaccatggtgctttctgttccttcctcatggaggccaaagctgatggtctggtctcctggcagccagcccattctcctaggttggttctggaccagtttgcctgccttcccaagcccatgcagaggggaacagccaggaatcagagctcagctacctcctctctcatcaccagcacctgccggaggtatgctggcttccccgcctctgtgtgcagctctttcgcattggttttcttccaagaacatctctgtctcccagctccctgcattctcgaggccgtcctcactcttgtcctgatttttcctcctgagatgctgtacatcggatcatggcaagcaggccctggggagacacttcagaagtaagctgaagagtctcaggggaatagcaaacaacagggctgcagtcagtctgcacgggcagggcctgccagcactctggatccctgtccacacacccctagcactcaagccccttctcagacccatgtcccatccccagggttgctggtgtgcagtgtgtcaccgtgcctggctactccaagggctttggctaccagaccggccaaagcttctccggagagttcgaccacgcctggaacgctgtgtaccttgagggtcgttggcacctggtggacagcacctggggcagcggcctggtggacaccaccacctccaaattcaccttcctgtaagtacgaagctcagttttgtccgtgtctttcctatctgtgtgtggggtgcagacaaggttgaagaagggaggcatgtgggggaagggaagggccaagtgttagaggaagaccggacagccttgcctagctactctcgccttcccaaaagctggttccaggtcgcttgcaaggagctgaattttcttgtcacctctgccctctgtgactcctctgactctccatgagtccataaagctaaacccaggagcccctcctgtttgccccaggtcacatatgaggaggggcgaggctaaggtgcctcctttgtgctccatcttctcctccaattcctgttctctgaaggaggaagaaggatgcagttggcagaaaggagaggtgtaggtggggctaagccacctgggtccttacggtgcagtctggatcatcctctaaggcttgttcaaccctgaacttaaccttcagccaagcatggcattttcatgggtcgtgatgtccctcagcagcctagatccccctttatttgggaaacgaactgtttcctccaatgtgtgcaagtgaaactttggccctccacactcaccctacatagagctgttaccctcaacagtgccccccttaggcggagcaaagccccccaagcccaggctgtctccctttccttctctttgtctctgtctctgaccagccctaaggagccacagaagttcccctgctgcatacccccttccccctggcacaggggcaagaagggtccagcgcaactagaacactgtccccttgcctccctacctccccatcctctcgctgtccacacccgctctacggatcatggttttggtcctttcaaaccacttttgggcattaaacagagagaaagctgtcctttctacctcaccctatccataacctcccaaggctctgcgagcaggccctgagttcatgctgtggccttgtctcagaagggacctcagatcccctgtggccccaggatctgcacacagccacccgaagagtctccagtgcccgcattaggaccacagatcgtcctgccgacaaacttctgttatcagcaacacccaatccagtggttgggtcagctagacaaagatttcccaaagctcccccgtgagatacccggatgtgggtgataatggtcaggcctactctcacacccggctcctaaccaggtcttcctctactccagctacaatgaattctacttcctcacccaccccgccctgttcatcgaggatcacttcccagacaacaaaaactggcagctgctgaagccgccccagtctctgaggcagtttgagaacagcatgtaccacaagagtgaattctacaacaagggcatgctgagcgcccacccggagacgtccatgatcagaacaggtaaggagaagcacaaggcggagccccagtgacggctgaagctcccttcccactagagtaagccaagaaaatcagaccaccaagcttagctatcttctatggcctgagctgacactcatcgccccttgacacagcatggaaaccatggctgctgggcgtttgcaacactcttaaggggcaaggcctgaccccaggaccagaccccaggcagagaggataaagaagtgtcatggacctcaaaggactccccctaaaggactgtttctcatgcctctctggggatccagagcctggtcctgctcttggcgcaccacagcaggggtcaggaaggctgaccagcccacctcccccttctcatcaaagcccaacctgacagcaccagctctgccaccaggaggcctccacacatcccagacagaaggcctgagatcccagaagcaatcaactggggggggggggtgggcatgagggatgatggccttgaccccaccccaccccaccccaccccacaggctgatgggataaggggacaaggcaggggggtccacgagggggcagtcaggagcaggtacctcttgcccattgcacttcccatggattcttgatctggatgcagagctgcagtggtctctggttagtcacagacacgtggccgcttcagcagcccacagctgctcacttcaaagatcatttcctgcacctgagtctggcagaggtctgcggtctctatcgtgagacatgaagccacaagaaagactcgagcagaccacagtgccctcgtgatcatactgctgagttgagtttgcctttttttgggagatgtaaaaatgtaaacaccagatttcttaatttatactaacctaaaactcaattccatattcatgctccttattgtaagaatatttcttggtgcctgtgagttgccttgagaatagagcttgaaaagaagcaagggaagggggcagggcgtgagggtagggtgaagaggaaggagagagtcacagatacagggaggagagaagaggcagagagaataaagaagtgccagccacagtccttcagtggcctttggggtccccaataattcacctcttctaagatgctcagcacacttctgccaaatgttctctaagacaagtgctaagctcttccaaagagcctacagcccagacaaaggcagaacatagaaaaaacactcccatgattcattctggaaaatggtgggttctctggaagaggcctccagcatccctccagcacccctccagcatccatccctccagcattcctccagcacccctccagcatccatccctccagcatccctccagcatccctccagcatccctccagcatccctccagcatccctccagcatccctccagcatccctccagcatcccaccagcatccctccagcatcccaccagcatccctccagcatgtccagctcacctgaagggctgaagcagactctttgcagccaggtctttagggtgagtccccaccatacatggaatggaggattaatagtggacgtgaaccagacagccttctcctttgcctttctccatccatgagcgggactggagaagttactgggcaagggctggggtggtcagcttctaacagaagccatggccgggctctcagagcagacactgcctggggagccagacaagcccagatagaaaaagccttcctgagccagtgaaaagcaatgttccagtagaggagtacagaggcaaggcaagggggagctggcaggagagggaatggattcagtgggttcgctgagacccaggtccagaagcacagctctggctccctgtgtgagaagcaagtgttgggaggggagtccagaaaaataccctgttaacactcctgggcttagactcctggaggaaagcccgttctggttatggtgtggtgttcatatgacagctgttgataccataatcttttcaggggggtgatacaaaagtaatacttcagagttgtggggggtggggtgggaggtggtggatggatagctcagtgtttaagagagcttggagctcatccagacgacctgagttctggtacccacatccttaagtcagctcacaatcgcctgtaactccatattcagggggatcagtaccctcttctgaaccattacacacacacacacatacacacacacacatacacacacacacacacacacacacatacacacacacacacacacacgcacacacagcattcacacaaagacatatgtgcacacacataaaaataaatctctttttaagacgtaagaattgaatgagacagcactcttccaatacttttaggcccctccctgctctggaatcaaataaaatatctaggcaggcttcatctaatgtaaagcaagtgggagagtagaggaagggaacacatatggctagggtagggttttcttgcccatcctccaccccaccccaccctccccagttatcacagttatcagctgtctcaaaaatattcacccaaatgagtcagaagaataccgcgttcagggctgtcacactgttaaaaatcaagcttggtagaaatcttcacaaccacggacatagacacacactgtaagtcacacctcccccccagtgcttaagcatcccccagcacacactggatccggctcacctaaccacaacttcctctccgcagtcaatgggaaagccacaatcaccatcgagagccgggccccaacactgttcatgttcatgctcaatggcaagcaggagcacgggctcctgagcctcaggaagaacgggatgaagctggaggtgtaccctccaaccatgggcacccacaagctgcagatcttcgccaagggcaactctgaaatctacagctcggtgctagaatacacactcaagtgcaactatgtagacttctctgtccagctgcccagtgagctccaccagcccgtgggccccagctggttctcggagcagatgggcatcacgaagccctctcactctgaccctatcattcacaccagcgatggccgctgcgccatcagctttagcgtggaagagggcgtcagtgtcctggcatcccttcatggcgatgacggccccatcactgaggagacacagcggcgctacatcttccagttgaaccgagggaagaggaccgagctcaaagtccagctgccccatgccggcaagtttgcccttaagatctttgtgaagaagaggcaggaacaagggaacttcatctttgtcttcaactacctcttgtgctgcgccaacaccaaggtgaactggcccatgttccctgagagctttggcaactggggacaggacaatgaactgctagagcctctctccggtgtgcttcccgccaaccgcaacatagccttcaaactaaagctgcatggtatcgccaaagctctggtgaaaggacaggacacgtggcccctcactcttaaccccgagggctactgggagggcagctgcaacacagctggctgccaggaagtctacgtcatggtgctagagaatgctaaccacaacttctacagctacatcctgaaatacaaagtgaatgaccagtgaggggctgcatttcttcacggtcccccagggttaaggccagccctgcccagggagggcccaagctaagagcagagagcccaggacaccactaatctgcatgaaaccacttctaggcctctgcttcagtcccctctgcctcaatctccctgctgtgtcacaggcactgaggaatttgtgccgccaaaggctcactcaatgtggctgtggaagaagagacagaggccagggccctctagaagaaaaaggtgctatgtaaatccaaggtattgtgaaacgtacacccctgcctgtgcctgctcttgtgttaggactttgttgctgtagagctgaatgggaaagcggaggtgttgcgggtgctgaaagctttccccacgatgcctgcctggtgcttgaggctgaatctatgagaaaggtgtgctccccctgcaagtaacatggtgtttctccccactacttctggaccccagggaatgtcgggcctgcccatcttccacattcctagtgctcctattagctacttcatgctcttcaagagcttgcaaagggggtgggtgtagaaagcaaaccagctgaccctcagccaactggaggctgctgtctcctgatgcctagcatctctgagatgtgctaagggcaggaaagcagccgtgtgcacattcggatgtcctggctggggaccagggatggagtgggtttgcaggtccagcaacccacatggaagggtgaagaccccgattctatgtgcctaccagagtttagctgagggcctggagattgccccaccccaccccccaccagccatcctcaggagcctcaaatgcctacatagcccactggtagcctggctgatgacctgggccctgggcaagcagattagccccagcagttatcagataccagggatagtgtctgataacaagatgttgctccttccttacaagccaaaccaagctgaggggaccaccacctgccccctagagaaagtgttggtctctgtctctgaggaaagccctatcatagccattttccctcctgtctttctctgagatgacaacccctgccctgagttcaaccttccttccattgggaacagttgagggcctcttacttgctccggcctgtcctaaaaagcctgagctgcctagctggccctcagcagcacctgaggctggtgtttccatggcaacagctgaggggggaaaagcaggctgctgcaaacagggaaggcctgaggagagccccccgacaagaggttcctgcagtagcatcccagtgcacagatgtgctccaggagggtccctaccaaatttcagggttctaggactctgctcactgtgcctgtctcaggaccacccccccccccaatccctcactgctctctaaggaatgtcctcaggctcagctgccgccagagccagcctgggatactcacagcctctacagtcaagtctttcctcagtaagagcccatcagactccttcgataagtggctgacccctcatgctagatcctgggactatagaggtgaacacaaaggactcagccataggcacccgcatctctgggtgggcagtctgccaagtggaacctatctgaagacctaggagcccagaacttcagctcttcattcccttctgcccctttcccacaggtccccactgctacccacctgataccacatagcccccctccaccagactgggtagcctcacttgtgattagcatggctgctaggggctgagctgccttggctcatgtccagggtcctctggcagtctcagcccatcagcatcttgtcactcacgcctggaaaacgcaccaaagtggggtggggtggggtgggaggtggcgttgtctccactacaagaagacggtggagtttgcactgcctggaaacagcctttcctcaccccttttattttatgagcagtaagaactgtgctatgttttaacgaaatagtaagtgcttcggcggtccctgccactcgctagacacagccgcgacagccactgctagccctgcagaaaatgatccccatgtttttttcaaaacagcataattaatctattctggagcttgtggaggatgctaccccacaaaacaggagctgtcctcagcaccagagacccagaccgagcctctcccagcggcccgggtcaaccacacgctccgccctcctcatataaccaggtagtccctttgtcaaggcaactgtaggtgcactcggaaaaacgcctgcgtttctttttactgaagcaaagatacacgaaaccgaatccaatcttcatgaatttttacacgcatgctgctcagcctgaaaatttggaggctgcgttttgaaggctttttattcaaatccccctctttgtctgctggtccacgagtctcattggccgatcaaatggcacgagcgccccctggtggatcacgtgcgaagttgccaccgctgcaaacccccaagctggctctttttatgatgtttgttaaaaatcactaggtgctttctcgtcccttgcggacaagttatgctgtctacggcatccacatcgtggatagttatcctcgtggttgatatgccaatgtcagcgttgtcttgcagactgtcagaagagcctggggagacttccctggcctggcgtggtgagaagataggatgggattaagaattgagcatcttgcccagaaagcttttcctgagacagaaaccctgggcacaggaatgcctgtctggggtcgctgtgatcacactcattactatggcaatgacaggctgaaactgatcaaactcagcgttttgccaggcaggccccaggatgggcgccagggtgcagaaggatggggcgtggtgaggcaaaagggtgcaattaagctctttcagcttgcttcaaaagtgccaccagctcagctggactgttctctgtctgattgtgaatattttgagttctccatatgttacattgtcccacgaggacggactcctcccggcccacagagattaaagagacgtaaatagattaactgaagcatgaaggatttgagctagatataaagaaccatttcctgttgtgaagcaggagggacacgttgccaataaactctcggcgaaattctcaaaggacttgaaaaggagaaaagttcccgcagtggtccggcattttctttgccgtgcttactgaagcggttgggttctccctccgctaactcgtaactcttaaacagtactggttggccggcagtaaacaccaggttaatggtgtgaccatatagctcactgttgtgggatttcaaaggccgtttatctgaggtctgccatttcctttcatctggagtaagtaaagccgcagaggtgactatttctccccgtgtgtgctgagtagtgtgggccactggctgttaaagatgctgtcctcacattgttgctggggttctttttcaataaaatttatattcattttta

SEQ ID NO: 2 - DNA, 39546 bp, Mus musculus
aaccgaccgcatgccccaaagacgggcgagctgcggctaactgtggtgcggtctcggccctggccacggtggtgccgctaggctccaggcctcatggcccgcggccgcagctcgttgcggcccacctgccgcggggctttccaatgccgggttgcggctgcccggtcgtcgcgcccctgggttcctcctcctccctatgggactctgggctggccggccaggtgcttcggcctgcgggagggcgggctgcgggctgtgggctgcatggctcccgggaagggacccggctgctgctgctgccgccggtgtaggaccaggccttagcgttagccgcccagcgggaagcccgcagggttccttggtgatgttagtatgagaggtgcggaaatgtggcgggaacccctgatggcaggggaattgcagatggcttcacgctttcaagtcaagcataggaaacaagattggtggagtgaaagtttggaaaggggaattccacaacagcgctttcacgcggagacacttgacagtgaatgggcttttgtcctttacaaaatcgtggagttagtgcattctgatgtcagacctagttttcatttacagactgtagacttgttgccaaaagtgctccccattctccccaactagcgctggctctcctttgtagctatgatctggaacttgcagtgtagaccaggctggcctcaaactcagagatgggcctacctatgtctcctaattaaggatccgcgccacctcgcctggctttcttgaggccaatttagagtttcaaaaatgtattactttattatagctctttgtacaactcgaatatttgtattttatattttgtatgtaagtcagagatcaatggctatagttatctttagctttttacactttttttttttgttttgtttttcgagacagggtttctctgtgtagccctggctgttctggaactcactctgtagaccaggctgtcctcgaactcagaaatccgcctgcctctgcctcccgagtgctgggattaaaggcgtgcgccaccacgcccggcttttacacttattcttaaaggctgcagcttaacgatatgatgaaacgaattatcttatttggaatgcagcgccatttttaggttaatttttgtcccgtgctctctgtcttttactgtgtcgtcctcagtggtcagtatagtaaaggaggctgcgaaactaaagagggttagagacttaaaccacagacacatgtccctttaaaatgtgtatatgctgaagtttcagaaacaatggagatattgttaatcatgctgctgctgcttcctcccgtggagcggtagggaccggttacttaggctttcctgtactgtgtggtggctgatggtgacagcattagtccacactgtcatagcttaaggtgctccccatgccaaaggctagagttgcttttttaagttttacaaaaaccacagtactatttttacatcagtacaaatttataaaaagcacacagtgtcagtgtccggtgagttcaggttcttcagctattccatatgtgcttgtaataccaaagttgtagacttgtagaccaaagtcctacagagaactgtcagctgcattcggttgctaggccttcaaaaccctctaatcaataatcaaaaccctcaatttctttctttcatatatatacatatatattatatacatgtattatatgtgtatatatgatattttctttatttacatttcaaatgttatcccctttcctagtttcccctctgaaaatcccctatttctcccccccccccaagcaggttcttacctcccgtttctttatcactcaggtttagctggttgtatatatttttgaatttatgcctctacctcttctatgacctctccttcactggctaaatcttgaactacactatccagtgtggcagtcatcagccagccctgacattttaaatgaactgtttggttccccagatgcattagccacattggaaatgcccagcacacacaggctgcctagtggctattgtctgattaatactgataagatgtttccataattacagaaagttctgttgcaatacaatgatcttttgaaatacagtgttagattcagccttgatttttgatggcaggtacaagaaaactcaaaggtataggttttatattataaaaattatctgttgcgttcattgtcagggagacttgtaatgtctgagtcaccccactagggatgttagaattaagctgtgtatgtcggggttcctgtgctgtttgctcagttgagccaccatgaaattgcccaagagcctttggtcaatagggagctcttcatggctaatagtgcctgggccgattactgagtgagagccaccgtggtgctttctagtggcgtcatgtgcccagtgctgcttagctggcactcttatgatgaacttgccttccgcagctgactatcctgaagtacagtttgtacaggaatggcaagcaaaatgcttaactccgttcctttcttttcagactacagcaatgaattggtggcctagcaacctccaaaggtaacccaagggctccaccttaaaacaaacagatagacttgaatgtgtttaaatctgtgacgtagcaacctccaaaagtaacccaagggctttatcttaaaaaccaaccaaccaaccaaccaataggcttctatgtgtttacattgtttgaacatataacaattttttaaaaagatttatttattatatgtaagtacactgtagctgtcttcagacactacagaagagggcatcagatctcatcacagatggctgtgagccaccatgtggttgctggaaattgaactcacgaccttcagaagagcagtcagcactcttaatcgctgagccatctctccagccccaacatttttttgatacctgaaattgtatcatttcctcctagttttgctttagctgggtttttttgtagtcaaggatgaccttgaacttaagatcttcctgcttcacctccccagtgctaggatcccggtcagtgctgctgctttcctctctgtgtggtagttagaaagcactgtcatcgtccctgtaaaagagcaaacctgctctgtagaaagttagctttatccctgactcccccacctgatcacttccctccgtaaaggcagtagttctcagtttgttcttcagtaaataagcacccaaaggcgaacacacttcttcttcttgctttgtagctgttttcaccttatcacaggcccctccacagatgtatgctcttttgacagcttcctagtattccctcagtgaatgagggccctgttggccctatgttagtatttgaccttagtgctaagcggtggcagatcatcaaacactttttgcttaagtctgtattgagtattaggaacacagaattctcagccacagtcacgtggcaccatcaaagaggaaacaagacttattgagtaaatgcaggccatgttggttagggacagagtcactgatgtggctgtgataaatatctacaggaaatctcagtcctccctgtgtattggatcctagagaagggtagagtgtttaagttaaagaaacacactccacattagccgacgtttttcaaggcatgttactggtcatctgtgcctgttttaaactagaattcctttgtctcaatactaggatttaagttttgagcttttcttatagctgagtagttttatcacagtgctgctgccacctagtggtgattaggcaatatgcttcagctttattctgttgccctctgagatcctgttaaccataagaaggcagtgttaaccaaaagatggcacattgcttgggtctggagggtcacattatctgggtttgaacttaaggaatataacctatagctttttataatcaagccgttctccctgtttcatcaaaggggtagcacctgccttttacaaggaagatagaacgtgtaagaggcaggtagataaagtgaacattcactaaagtttagcatatattatacacgttgttagttattaaatagtgtcatacataaatgccaagaaattatatattattaaataatcactgtttaagaatggcatgacctgctgggcggtggtggcgcacgcctttaatcccagcacttgggaggcagagaggcaggtgggtttctgagttcgaggccagcctgatctacagagtgagttccaggacagccagggctacacaaagaaactctatctcaaaaaaaaaaccaaaaaacaaaaaacaaaaaaggcatgacctaaagaggtgtatttttagtaggaattattttgagaaataattataaaaaagatgaaataaagaccttggcagttactattcatacccttcattttgcagatggaaaagccgaagttcgaggacacagagctggttagttgcagagcagaattgttttctgggcgtctgtctagtgttggctcaactgcttcccagttctggagcagagcaaaggctgggttgggttgctctgtaatttgacccttactgtggtttagaaggaagtgtagtaaaacgtggagtcctctccgttaggattttactctgggtcatggtgagctctatcaggaacactggttggaggaaagagccttagccaccctgtgcaagaagagccagcagtccttgctaggacatgtagagataggtgcagttacaacacactagctgtccctctggtcttctcagcctttctgtgtctctagaatcatctgtgtgtcttctgtctgtgcattcattgccaggggatgttgaccattttgtttcttttttagtcccacattgggctatttcttggtaaggagtatgtcttttattattatgtagagggctgtttgtacaacactaaactgttcaataaggtaatctacttctcagagaagtagattacttctggaaaagcattaggacagagggacccaatctctacatcgcaacttttggccttgtctttaattcagaattaaattgaaactttgaaaactgaggaaaaaggactgtttcttttttctttttaaattttattttatgtacatgagagttttgcttacatgtttatctctgcactataaacgtaacttgtgatcccctgaaactaagtttatggagagttatgagctgtcatatgggtgctgggaatcaaacctgggtcctctgcaagaataacaggccttctttccagcctactggggcgctttcttcagaatgaaagatggtctctgaaagaacacattgaggatttctgaagaagagaaatttatcatacaactctcgatacttatgagtttaagggttattctttctttatggtgtgaatttctctgtttaggcagtcttttctgtctcctttcattttccttcgagatccttcttggcagtcctgcatctgtgagcagtttgcttaagggatgatgaagtttcccaaggcatgcagcagtgccctgttaaaatctggtctcagctctggacctcagagatgagtgacattggttttctgtcactgagaaaccaatagcttagaaagaaggaggaatatactaaacctttattttccagttctatataatttggcatgaagagtgggggacatgtcagcagcagtaattgttgtgttagtgagaagtgctgctttcccttcagcagtggtcctgggtgattcctctcaatgtgtagcagggtttgtgttaatgtcccttgagagaaaataacttttcaccctgacattctttaagaactaagcattagaggggctagaaggagggctcagacagtaagagcatatactattcttgaagagaaccagaatttggttcctagatctacatctggtggctccattgcctctggcttccatggaccatacttaaaaaataagtcttgactacaacaatagaaggaaagccaggcctggtggcaaacacctttaattctatcactcagaaggcagctggacatctctgacttcaaagccagcctggtctacatgcataactggttctagaccagccagggctacatagtgagacatattgtgtctaaaaaattaagttaaacaattaaaaaaaaaagcatagagtaatgtgatgtttcattggttttgtaggatagtttcagcagcagttaggattttgtttgcttttggaatgtatttggtgctagcattgctaaatgataatccttgcttctacagacttcttaggctgctttgtatttctcactgtgattgcttttactcaccctaacttggaatcctggaattcagaacagtaatttttctcactcctcttttctttttcttttttcccctagttgccaaaacaaagaggatttagagatggaggctttgttggaaggaatacaaaatcgggggcatagtgggtaagtttgcctttgactgtgagctcattgcagtttaaaaacctacctgggttctgttagactaaagctaagctgagctaaggcacatttgtggacagcatccctccgacatcagttgccttctctcagcattactagggaggactgtggctcctatcctagcttgagttttccccttcagctcagatgggtatcagtagcttgagcagtgaggtaggttacagtgtgttccaaataacagttgggagaaataacagcaatagatcttgctcaagggtgagtttcttgaaacagctcttctttgttatcttttttcctgcataatatagcctgtttgctactaagactgttcattttggctgaaagagctgcaacacaggcttgcctggattctcccaaaagaatcccttaaatatcccagaagatgtggttagtagctctgaaatctcactttgcaagccagatgtaaagcatccatctgtgtttcagcaagtgagcctggttttaggttactcattagaggagggcaaaatattgtgtggagttaagcagcatagcatatgacagcaaaggcccaggcaccctgggcttggcttctgtaatgtttcagttctccagataggtttagtctgtgatatttttatctgtgaactaggagaaaccacttgggcatgagctgtgactggtctgttggtgcttgtaggggatttttgacatcctgtgaagcagaactgcaagagctcatgaaacagatcgatataatggtggctcataagaagtcggagtgggaggggcagacgcacgctctggagacttgcttggacatccgtgatcgggagctgaaggctctgaggagtcagctggacatgaagcacaaagaggtagagcggctgcttcacttctcttgttatcttgactctggctttaaatcatacatggttccatacacccatgttcatgcatgtatataatatacttggagcaacccatgtccaaacctttaatccatctttgtggtagtttaatcttttatgctaaaggtgtttcttaagtgtaagcatttgtttaccaagttaggtttgtttgtttgtttgtttggggtgtgtgtgtgtgtgtatgtatgtatgtgtcttcaagacagggcttctctgtagctctggctgttctggtacttgctctgtagaccaggctaacttggaactcagagatctgcctgtctctgcctcctgagtactgagattaaaggtgtgcgccacaaccgcccaatcttattctaattgttaccttttcttctttttttcttttctcttcttttcttttctcttcttttcttttcttgttttaagatttattttatgtgaatgagtattttgcctgcatgcacacatatgtgcaccatatatatgcctgatgtcacagattctctagaactggagttagagacagttgtgagctgccatgtggagtactgggaatccaacctgggtcctctagaggagcagtccgtgcttctaaccactgaaccatttctccagtcctcttagggtttcttttagaagacattttattatggaagtataagaacattagtatttgtttcagggagcattttactttggaaacatataatgcacactgtatttaagagagtgtcagtggagaccagggcgtggctttggtggttaagtgcttactgtgcagctctaagaccctgggtttgcattcccagaggtcatgtgatacagccaagcatggtggtattcatctgcaaccctagcacacaagaaaatgggagaaggcttgcataatctttgcataactttcatcatattacatgtccatattaacatcaccaggtttatagtataggttttggcttcacttgtaaagttaggtgacagcaaagttgaagatatagggacatggtgtagcagtagagtgcttgcttagtatgctgaaagccttaggttcagttccagcattcttctacccctctacctcccaataaatgtaaaagttgagcccttgcttttaacagtcagagttaagcaggtcaaggcaggagaagcagctcagtgatggagtgtgcttagcatgcacacagtcccggccaggaccaccagccttgtaagcaaagttaaggaaacccactcagacagaccttttttaaaattagggagaaggaaaatcaaatcatttctagtctcaccaccactaatattggtagtgctggggggaggtttaagactagctcctgacttagtcctcataacttagtggtgcagtagaagaagaacactgaatcctggaagggaagcaggaagcagtgtaggtggaagcattgtctctgagtttctatacagattagtctgggaagaatacgaactgtgggtaaatgctaaccctaagcctcacgctcgttctgccagacttgcctgcgtggcacttgcccttctgaaggccaatatactaccaggactgacaacacaaactgtgatttggttagtgatgatactgtatacatgtgtgaaattttcaaagagttaaaaagttatcgcccagtgagtggttggccatttacacttagagtcaaataacactttagtaataccagctgtattagtttagatttctgtaaatggtatttgctaatctagagtttaaagtttagacaaatcttttaaaagttttttttgaagttttattttaaaaaaagatttagtatttattttatgtatatgagtacactgttgctgtttttagacacaccataagagggcattgtgagccaccatgtggttactgggaattgaacttaggacctcaggaagggcagccagcgctcttaaccattgagccatctctccagcccctaggcacatcttttaagaacacaacttacacagagacaggaaggtgataaggaagcccagcaaatgatagccacgctagactgcaaagacgaaacagtgtggtgggctagagaaacaggtcagtgggtaagagtactggctgttctttcagaggatccaggctccattcttaacacccacgtggtggctaacagctgtctgtagtcccagtctcagaacacaccttcctctggcctccatggcaccaggcattcgatgtggtacacagatacacacaggccaaacacccatgtggctctctgggtctttactgttccactgcgcttgcttctctcgggaccttgtgaactgttcacaccaagtctagacgtagcagggtgaggatgggcgaagtcagcagcttcctgttgctcacagagacagaaacagagctgtctgcttccttagtaggttcccagtgacagctccggctgcttactgccgtagtctgcccaggaatgggccgttatggctcttccttccatctcctcactatgctttccaaggtcactctcctcatccacccagaagtctactctcagattgcacttctaggaaacctcaaaataagaccaaataatatagtaagacagttttaaccttccttataaatctgtaaaaattaccagggttgtcagtaggaaataataaagccagagtcatgcttgagagttttaacacatttttctcagtaactgatgatggagagcattcataaagatacagatttgaacagcatgatcagcaaacttgacccagtttataactatagaactcaacacaagagaactgcagagcatgcatttcttctgcagcacaaactgaatgatttccaaaaatggctctatcctggtccatgaacaaagttttgaaatcatagataaactctcttaacatagcagaagtaagttagaaaaagataaccttgaaaaaaatctgtgtatttggaaattaaataagttatgaatgacccagagaagtcataatagaaatggaaaatagtttgaatagtcccagacctcaactctggaactctaataatccaactgtaagtagccatacagccttaaagtgtaccaagcagcacaggcaggagatagggagaaattatgtccatggaacctatagaagtaacacagctctcttgctgttgatagaacaagcgcacggaaaggccatttaaggtagagtgctgatcagaatcaacttgacctagttaatcttaagtgtgttcttcttaagtgactgggacattttactgcagtcaggcggctatcaccataaccagcagattaagttgtatatttttatagcaaagtagatttaagctaagattcaacacaataaaagacaacttttcaagtacttggaaattaagcaatatacttaatgactgttctgcttttaggttggaatattgcatcagcagatagaagaacatgagaaaaccaagcaagaaatggccatggagtacaaggaggagttactgaagctgcaggaggaagtgagcctttcattgtgtgccgtgccgtgaggtgtagtcgttctctttctgtaactcctgactgttgtgttgacaacttgtttctgatttcagtggtgagaactgcacagcctgtgtgatagtctgtgggaagaatgtggtagaaatatttttctctgaccttgaatctaggtaaagaatcttgtccaagcatgtttgctagtacctaggccagcagttagctgagaggaaaagaattgtttatataatattgaaatcttgataacagaacatttaatttttttttccaagacaggatttctctatagagccctggctgtcttggaactcactctgtagaccagactggccttgaactcagaaatccgcctgcctttgtctcccaagtgctgggattaaaggcatgtgccaccactgcctggcaacatttaatattttaatttctaagtttatattggaagatacaaagcacttagaaatattttgggagccatgaggtgctggtgcacgcctttaatcccaggacttgagaggcagaggcagatggatctctgtgaattagaggccagcctgcctggtgagttctataattgccaggactacacaagaaaccctgtctctaaaaaccaaaaaggaaggaaggaaggaaggaaggaaggaaggaaggaaggaaggaaggaaggaaggaagaagaagaaaggaaagggaaggaaaggaaaggggaaaggaaaggagagaaaaaaaagagctgcaaaaagcaggggtcgtaagatggctcattgggtagaggcacctgccacccaacttcatgcatgaatttgattccaggaacctacatggtgggaggagagacccagcttcagcagactgtcctctgacctcctcttgctgggctgagatgcacacacacctcctctcctctctcccctaataaaaaataaaaatgttttcaaaacacttttttaagcaagaaaattgggaggcaaagctaggtgagagttgagagtgtactgttcgtgcagagggctctgggtcagttcccagtaccatgttaggaagctcagaacacctagaattccagctagagggctcggacatcctctctggccttcttaggcatctatctgcacttgcatgcatatacctacatagagagaaacacacataactagaaattaaaaataaaatctttaaaaagaaaattctattttcatattcaatgtaatttttaatattggggaaattacttttgttttggcttaagtcaaagtctcctactgaccgtgcatcatcagtgccctcaggagtatgtcttgagaaccactggctcagaggggaacagtcactgcttcctctattctgtggagtgggtcgtggaggggcatctatgaatgcatgacaattgccattaaactaaattttactttttcttttctggactggaaatttcattacttttataaatttcatttctttctctcacatacacatgcaagcaggcacatgcactttaagacaaggcagcccaggctggcctcaggttcttcatgtgattgaagatgaccttgcccttctgtttctcctgccttcacttagttctgtgatcactgcaccaactcccacagccagtctgtgtggagcttggtccagcccagggccagcgttttccaggtcagcgctctaccagctgagctgtagcccagccttgtcgtttttatgtcttcttttattttgctttgcagctctaacatgctgccaatctattttcaatagtgtaatttagcagtgctcttgctgtataatcccaattcatctgaccactacagtttgctaactcttaaataactgtttttacagttaagcagactgaagagaagctatgaaaagctgcagaaaaagcaactaagagaatttagaggaaataccaaaagttttcgagaggatcggtctgagattgagaggctaactggaaaaatagaggtatgtctacagcaatagtcccagttgaaacggcagttgtccattgtgtaggaaaatgccatttctaatggagctgttttctggagcaagttcctgctatctcaggggctgccactgaactagtcagtgtaggatggcggtccccatcacatgctcccctgtggctgatgggcttccaagacatcaattaatctcaagagtgtagagctcccatacagagcacttggaaatatatggaggttttgttttgtttgttttttgttattattttaaaatgatggagcatgaaattggcattcatggtagaggtagcagggatagccaacatgtctgggacagtatcctggagaagatcctagtactcagtacctcccattctgagaaacacggagcatcagttagtggcagcatcctaccttatctctgtctcctccaccccgatcctgtaggtgttagtgaccggggggatgcttggcttttcttgtagagagtgctctgctcatcaggtgacttcctttcagttcccatttaggtagagcatgagttacaatggattcgcctacctctctgattttgtttttgttccataactctgtgattactgataggagacagtgagtcccctctcttctccagtacattgaaacagtcactcaggattgtgggaactaaaagggggaggggaaagagggggaaggaggatagcctgcgctggccagagttcctcctatgctctgggcaggcggatgtgggagggctgccagacgctttccattcgctttccactcgctttccaggtgggcatctaagccactgaccccactcgacgggggcgggggggggcggggggtggacaaggggcagcccccgaaaccagggggcccagagcaacaccctgcagccctggggttatgggagagaaggcttaggggagaggttcccacacaggcgagagtctgcacagtgggccttgaagaacagacagtttatttagagctttattatagaaaggcagggggaagagaggaggtaaaagagagagagagactggccatggccaagaggagagagagagagagagagagagagagagaggagagagagagagagagagagagagagagagaggagagagagaaagagagaagaagaaggaggaggaggagagagagagaagagtaagagcaagagagcaagagaggagtgagagagtgaggaggggctaagcagccctttttatggtatgctgctatctttactgttgctaggtaactggggaggagtttagcctgaaggtcagaagcttgggacattgcctacatgactactagccacgcttctcttatggggggctgagggggtgggagccagggtcccaggagacatgagagaactccttctgtcccatgtaggtgaattatcaccaccaggacccggggttcaacatctagcttcaactggaaaccaggctgtctgtgcatagcccagtgccccacacaggatgttttgggacttcagagtctgatccagtagtaggcatgggacctaggaatctataccttacctaattaagaaactgttcaatatcattgtgtgactgcttaacaatgttgtatgagtgatctgtcatatagaaatgtactttatatacatgtcttatttagggtttcattgctgtgaagagacaccctgaccaaggcaactcttctaaaggagaacatttattggggttggcttattcattcagagctttagtccattatcatcatggtggaaagcatggcagcatgtaggcagacatggtactgcaggagccgagttctacatcttgatctgcaggaagcaggacattggacttctacactggatgaagcttgagcataggagacttcaaagcctatccccacagtgacacacttcttccagcaaggccacacctactccaacaaggtcctatctcccaatagtgctactctacatggaccaagcattcaaacacatgagtctctgggggccaaacctattcaaacaaccacaatactttactttatggaattgtaatttctatgtttaatattccttttatatttcaatatttttatagatttagaacttagaatcagaggaccacacagatactgcctctcctccagcctctctactgctaccatttcttctagctcccgcacattcttttttttttttttttttttttcaagacagggtttctctgtgtagccctggctgtcctggaactcactttgtaggccaggctggcctcgaactcagaaatccgcctgcctctgcctcccaagtgctgggattaaaggcgtgcgccgccaccacccggcgctcccacacattcttatcaccagcctacaccaccaaccatgagcacagagcctcggtagccatcctctggtccaggttacttcactgactctggattcagatcgttgttatctttaaaatccttgtcatcataacctttgagagtttcatccacagacatagtgctgatcacgctctggccttggagtttcctggagtcctttcttcgtagctattttgatctccttgtgtcatccacttactcctgttgacattcctcagttcttacctttatgaaattgctttcagtaagatagtcaacccatgagcatgacaagccttgccgtccttggtgtcttctttcatttctttctttaatgttttaaagttttcattgaagagattacttccctagttatgttatttcacacgtgtgtgtgtgttgtgtatatatgtatgtatgtgtataaatatatgtgtgtgtgtgtgtgtttatttaattctgcagtattttaaagttgttatgaatgagattgctctcctgagttctttctcagggtgtctgttattggttatggaaaagctactgagttttgatgtgggttttatgtcttgctccttttccgaaggtgtttatcagttctagaagctgttgagtgatggtattcagagtctcatgtatgaaccattttgtgtaaagaaaggatcatttagcttctttagctgtatcccttttctttcctttttggctttctgttctaagactccaaacttgagtaacagtggaaaaagtgtttgcctttgtctgtcattcctccttttagtggcagtgctctgggcttctccccatttagtgtgttgattataggcttgccatatatgtccttaattatgttgagctgtacttctttgtgtttgtttggctttttgagacagggtttctctgtatagtcctgcctatcctggaaggtactctgtagaccaggctggccttgaactcagagatctgctcgcctctgcctcctaagtgctgggattaaagatgagcaccactgccacctggctgacatatagcctttttaaaattgattctttgtgaatttcacatctgcaccccaatcccactcatctccccatcccttcctccccccccccagtgccaagaggaaacaaaaataaaaccaacaaaacaaaaaaccccaaacctctccctgtgggagaggcagtgtgccatatagtatccccttttgtccaaacagctacacttgcaaatgttcattggagtgagtcattggtccagtttgagccccctggcttatgctacactatcaatactggattgtcaattggacttgtctcagatatcctgttgttactctgtgtcatggagatgtccagccttgaatctgtaggaccaggccccttcatgggttacagcagttcacagatgggatagatgttggggttggccaactcagagccttggatctgggcctggtatatggtcagcctgccagctttcctgtgcccgcaccaccagggccagcgctcctactttactcaggtgatttggcagctggcaaggggtgggattggctgtcctgcactcatgccattggaatctacacccgtgccaccagggccagctctccagcattgtcctgtgaggggtaggtccagcttactctagtgtgtagctggtgatgggtggagatatgaactaactttattgttagttttttcaaggctattggattatatcagaagtcttttccgcattaactaagaggatcatgtgatttctgttctattaatatgataaatgatatttgctaatatatagtatatatcataatttgataacattaatatgtatgttgaaccatccttgtatcattgtaatgttacgtgtttggtcatagtggatgatctgttctttccctctaaggcaatatttgtctttacctgtaaggtatgtttcttgcaagtaacaaatagattgatcctttgtttgtttgttttgttaagatttatttatttattttatatatgtgagtacactgttactctcttcagacataccagatgagggcatccaactccattacagatgtggaataacactgactgctcttctagcacatctggaagagcagtcagtgttattaaccactgagccatctctccagcccctgattcttctgtcactacctcctcagcactggaatttcagatgtctgctgccatgcctagaattctctagtgagctggcctatatgcttacatgccaagcattgttcacataccgtgtcatcttagtagctcttagattgggccttttaacaatgtcctgtggatcttgtcatttcccttcatattttcttattacctttgtcattgtcttcatgttctaattcatataccttgtctttaggccctgaaactctgctttctatttggagaggctttccattgagcttttagttgactcaatgagatttttatttacaaaatttccatttgatttttttcagtatttctgtctctattgaatgcctcattcatagcctgtattgacttcttacttcatgcagatgcttgttggcttccttgttgaattccttcaaaagtctgtttatgttgtttgatttcattgaacgttcttactcattcattcattcattcattcattcattcattcagtgtgcatgtcatgtctatcacctccacttgaatggggctgggtttcagtttattcttattaaatgctattcctgagtcagtgctggcacatgtcatatagacagacagactgtgagtgaagggactatcagaaagctgacttctcacttagctaaggagctctggagctcgagatccctggcggacaaagatggggaggctgaggatctttccctttgagttgctttattttcagaaaagttgggcccattttcatgacgtagagtttgaaattgctgttgattacctattatttttgaattatttgactctggattataagtacctgataaaatgtgatgcatattttccatattattcaagcttttgcaattctacgaaataaaaaattttgactatcaaagatactattattggcaggataggaagtgagaatcaggctgctgagttactggtttagaaatctgttccaatctattcagtttctgggtctgaatgttagaaatttagatggcaaagggaatattattattttagcgtcacttttctaaaaatacaaaatggtaacagcccataggtggcagcagatctgcaataatgctcttgagcccactgtcatggccgtttcttcctcttcaccactaagtgttacatttagaaagacagacatgtagaggcacagtgtgagcaggatccagtcctcctttgcagcgtgagtaatggggctcctgctgagagaagggcgcccagggagcagggcgctgtgcaagcctcacagcctgggagcacttagatgttaagtacttcacttgcctccccaggaattccgacagaagtctctggactgggagaagcagcgtctgatttatcagcaacaggtatcttctctggaagcacagaggaaggctctggctgaacagtcggagataatccaggtaggcttaagctgtccgatgcatggctattgaccgaatcggacttactgccatgctctttctgtcttacttggattctctctgtagtctttgtgtggtaagcctgccttcctctacttgtggcttagcctcttcagcatctaaaacactctaaaacacttcagttttttctttcttttttctctctttctttctctcttttctttctctctctctctctctctttctttctttctttccttttggtttttcgagacagggtttctctgtgtagccctgactgtcctggaactcactttgtagaccaggctggcctccaactcagaaatccgcctgcctctgcctcccaagtgctgggattaaaggcgtgcaccaccactgcccggtgagtttttgtttattcaatcctcattttattcatgtttattgactattatctttaagtcactgctatcaatttactattgtggttaattccatataatgcaaacttcactgttagtaaaagtggagttgttatttaccaggcagtcaactagagatagaataagataccttgaaagaactgacatctgttgtgcccactaagggtatttgaataatccttctcatagttttatttaacataaagttatctgattagttaaaagtattaggtataaatgtctttctctttttccttggcaaactaaccaagaatgaaagcttcctttaactcagtttgtgtccatcaatgctgtgttgttatctttactaaacacttattaaatctctgtgtgcccattacttagtgttaatgattgtcatcatcttgccaatcttgtatgtaaatgagcattagaaattcataacagaaattatacctcatcttcttttcgtgtggtattgaacccatggcttcacttattcttggcgaatactgtaccagtgagctaaatcttgtgccaccctgactggctttctgagcgcagtagtgttgacaacatgtgcacattgttttgtgcagctgttctttgagacttcttccttttttgttttaaagagggacatggcattaaaaaaataaaagattgattttctttgtattggtatttttccttgatgtatatatgtgaccactgttacacagtgccacagtgcccgaacagggcattgattctggactggaggcatagatcagtgtgaggtacagggtgaatgctgggaattgaactctggaagagtagcctatggcgttcttatccagcccacttctttcatcttggaaagctaaaactgggtacacttttactctttattttttgctattaaaatgttacaaagcaaatcatggcatcaactcatttttgaacaggcaaggacttaaaatccctataatatgatagggtaacatcaataggataaataatagtaatataacttagtattcagtctgcagttttatccagttgtctaaaaactactctttcacagtggctgtttgaggcagaatccagttaagcttgactaattgcatttaattgatatgtgggacagcagaaaatccgagagtctgggtaaatgttatgagaaaaaactgaaaaaaactctttcatatttttaacattgaagaagattcaaaaacagcttcacgcactttgagtcatgtatttggattcatctatgcagctattagagttttatactccatgcttgttttagggaaaaaaaaaaaaacaaaaaaacccgagaacatcctttgtctggcttttctttttcttttttcttttcttaatgtagttttggagcttcaaggaaaccattgtcacaaatagattgcttaagaacagtggggttggaggcagcaaaggctttgattttccactgcagcacgagtacctgtctgcccatctgggtcgccttcagatgcggccacgcaggccatagcatccctgtaggcagcagcctgaggatcccacaaggctctgagttcagtgtgcaccatgcctctgcggtgtctgtcacctggtgcgccttgacagaagtgccttctgtctccctaaggcaaattgccttaatggtttccttactttcattgccctttgtgtagtgagataactccacccttctgaatgcttagtgaagaagggcatttctgctttcttgaaagaaaatgtatttgtgcatgaaaatatatatttcaaatatatttacctttaagtgcttctaaagctggccagttaagaggaggaattttaggagttgtttctgtgattttctgacttgcttaggattaaaagaggtatttctgaaattagtaccactgtagcaatatgtgaattacacagtttactattttgtgcagttagattaaaaaggtgaaaagaaatataagattaatttaatatattaatatataaaaattaatatattataaattagtatatattatataaatatataaatcaatatatttaatttaataatatattttatttaacccagtatatcaaaatattatcagttcaaaatttacattcttttaaaaactaagtcattgacacctcactgtgtattacacagttagaacattgttcaagtcagactagccacagctcagtgctcagtctcttattgccatagtagacagtagaacttgggctatcatttcttttttttttttttaatttttttattaggtattttcctcatttacatttccaatgctatcccaaaagtcccccataccaccccccccccaactcccctacccacccactccccctttttggccctggccttcccctgtactggggcatataaagtttgcaagtccaatgggtctctcgggctggagagatggctcagccgttaaaaggctaggctcacaaccaatgggtctctctttccagtgatggccgactaggccatcttttgatacatatgcagctagagacacaagctccggggtactggttagttcatattgttgttccacctatagggttgcagttccctttagctccttgggtactttctctagttcctccattgggggccctgtgatccatccaatagctgactgtgagcatccacttctgtgtttgctaggccccggcctagtctcacaaaagacagctacatctgggtcctttcgataaactcttgctagtgtctgcaatggtgggctatcatttctagttaatgaagatactgtgtttttgcatgagtgaaatagtagaataaaagaggaccgagactgattctaaagtaacaaatggagactacctggttacagagttgctgacacagctaaagctccagcattgaatgcagaccacagtgttatacagtgtcacagtgctgaggttttgggctatgtgcctcctggccactcatttggacagcttttcccagctgtgctctgtgagctccagggctggtgggcaggtgagggatggggtgagctgaggctcagcaacggagcacagccattttctcctcctaccttcaaccaatctctacatttacttattgtgcagaggattctgtataagatttcctcttgtttttgaaagtcttctgccaattgcatgcatagtggttagcgttgaccctgtcctgaatcttctttcacgtgccattctagggatctggtggaaaacaaattgcctctactctgaggccttgagctctaatttacacaaaattatttgtctgtatctttgcctctccctttttgtttccgtttttttttttttttttttttttttcatctttgtgtcaccatattgtaaggcaaaagagtttggtcctcagttatgtacagcagaatctttaaatctgtagtagatggattccacagagatatttctgcttgaatttctaaaatacaagtgggtgcctttcctttaggaaatgtttaaaataagggaagtttaactttacaaatgatttatgtccatttttaatgtatagataaaaaaccagtctggatactgaattaaaacttgaaaaaaacagaatgtgagaagccaaaaacacttcagctggcatgcagagccaaaaggttagacactgtactccacgggtcctgagccagttgctgaagtggctttatttgaatagacttcagtaggatatgccactaaaagaaaatgtccaaaacctgctgatagcccagccttcctaggagtgaatcttttctttcctcagtgaatacaattattgattattcttctatcaactctcttttccctatatgtttttaggctcagcttgccaaccggaaacagaaattagagtccgtggaactatctagccagtcagaaattcaacacctgaacagtaagcttgagcgggctaaggacaccatctgtgccaatgagctggaaatagagcgccttaacataagggtcaacgacctgatgggaaccaatatgactatcctgcaggaccatcggcagaaggaggagaaactaagggaatctgagaagttactagaggtgtgtgttagaatgagtaacttagggaggtatatgcatgccctaggactaggtcctggatgcccagcttccttcttgggctgaggctggtggctcagctcctgatagctgtattcatactgtccttgtcataaaacttgcagtcagccttcctggttgcttttctcatgaagtagaagcattgaaatattatttgactttttttctggagtattttgcagtctctgcaggaaaaagagagagctaaaggaaagttgtaataatatctgtcttttttcttgagtgttttgcaggctctgcaggaagaacagaaagagttgaaggcaagtcttcaatctcaagaaaccttcatccttgaggcaaaaatgcaggagaaactgcaaacgacattaaaggcagttggcactcagcagtccgtagaaaggtctgtttgaaccgtaaatgttagtctgctggcctgtttgacagtttggcattgaatgctgattttaatatcgaatattttcatttctgtgtttgatcatcttgtcttatttgactttaatttatgagttagatttttattgtcttaaaatttgtatggatggttttgtctccttttcatttaagtctctaagattctgaggatcataaggttggaaactccttatctctctttgttagacttggagggcctctctgccttagaagactaaggtatggtggaaagtagttgcttgccatcagtaacagcctgtcacttagctagccctttgggaactgactttattgttatcattattattgtattattattactactactactatgttttgaaataggattttatgcattaccccaggctaccttcaaaattactgtgcagttgaggatgaccttgaactcctcctgatcctcctacctttgcctcctaagtgctgggattatcagtgttgtgaccccacccagtctcagggcttcctgtatgccctgggaattctctaccaactaagctataaatctcccgccctgggctattgctagggcagggttatagtaaaaaataatagagtaaatgagcttccttttgtgtaagtcaggcatgcttctgttcttgccagactgtcttgtaaagtttttctgatagaaggattcaagtgttaacaaaatggttttgctgttttatgcggcttttccccttgaaacacaccccaaaccctagtaaagattaaattgctgctgaccctggattgttctccaggtattccccctcctccccaaagcaggctacaaactgaccagttctaaggagcttagttaaaagaatagttgggacaacagcctggctggcattgtttgtttgccaggataagagagagacctgtttccccctccttctgttcttaggcctctggaggactgtcagaaggaaaggaagtacagctctccagggcaaggagtcttggataatgtgctctcccagctggacttcagccacagcagtgaagaactcctgcaggcagaggtgacgcgtcttgaaggcaggtagataattagctacacattgaaaatttgaagttgttaggatgaactttgattctcacattgattgagtaaaacagtgcattggtgaaatgaagttgttttttctctagcattcacaaatggcctcactccctagttcattgaaaatacagaagacactgtcctaaccttctgccagttggccttcatctgagcctgtgctctgtggacgtgtctgaggctgacttgctcctgctgtgacgtcctctttagggctttcttcagaatggtttatatggacagaaagtattctgggagctttttccattttgaaaacaattaaacccctttaaaccatcagaatatttcctctttctctgttcttcagagtcaaaatctttttttaaaaaaattatttatttatctttttttatatgaatacactgtagctgtcttcagacacacaccagaagtgtgtgcattgaatcggatcccattagaggtggttgtgagccaccatgtggttgctgggaatcgtactgctgacctttggaagagcagaccgtgctcttaaccactgagccatctcaccagccctagaatcaaatttttgaagacttgtgtattctgataattcccacttcaccctttgccttttaggccccattcagttcagctttcttctgtattccctcactgaaactgttcttggagaagatacagtgggcatgtctttcttccttcattcttgtttatggtgtgatttagattttcttggctttgaattgaatgctagctaatggcaaatctatagtatttggtagcatagtatattctagcatagcatgcatagcatggcatagtgtgataggtagtgctttttgttttattttattttttgccatagttacaaactttattttgcttgtcacatttgtaaacttttttattgggaagagtttgatattttgttttaaactcattataattgcttgtatactaatttttttggtgtgggtaaaagataaaatatttacataagctctttgcctttaggcaaacataacaagaagaagtgccactttacactttctagcttgtcttgatacattgctcctcagtgtgctgtgtttcgtgcagccctctgctgtaggccttttagagtgtgtggggcacttgtgatctctactgaggtgtgtgtgtatatgtgctttatttagactgagccaaacaaaacttactattattactactattactagtattgatatcatttgtttttttgagacagttttttttctgtgtagccttagctgtcctagaactgctttatgtagaccatggtggtctcgaacttagagattggcctgcctttgcctcccaaatgctgggattaaaggtgtactccacccaccatgagtgctaaataaagattattagtcttttgatattggaacaaaaaaatttgtttttaatcatagttgtcatctccccctcccccgacctccagttggttttctgataatcttcatggacttcttgtcaggctcagaagttgcgcctctggtttgactccagcacagcactgcacagcactgcactgaccaccttagcccctcaggtcctgcttttcccatgcatggctaggacaatgtgatctctgatcttactcctctgctagtctcagtgtttagcacattgtaaccatatactagtagtaaatagataaataaaaattctagaatttctggaaataaaattagaatgaataaataacagtattcagtaagaatggcttcagtttttttctttgaaaaatctagtggacaaaaagactgttctaaacagtgtggtgtttagtttgaacagcacctaaaccaggaagggcagggcttttgttatactacaaagatgatatctctattttattttatttttgtttcatgtgcattggtgttttgcctccatgtatatctgtgtgagggtatcagaaaccctggaactggaattatagacagttatgagctgccatgtgggtgctgggaattgaagctgggtcctctggaggagaaaccagtgctcttcactgctgagccatctcttcagctcccaaagatgatatttttgaataataacttatctggcaaatttgctatgtttgtgaaataatatagtactaagcatttgtagaataatttagaggtgtatgctgtagcacgtgagggctaatggctaagtttggcaggcataagaagtaaaatattttaaccatagagttttcagtttcagagataaaatactcattttaaaggacttggggaattaaatgagcatatttaaagtagataatttctagaaaaatttgccttcaagttgtaaaaattgaattatttaaggtgaacaggggagtaaggactggagtgactgtaattaggccagtgccagtttggttcctgagaagctaatggccatcatgggctaggggaggaggtgctttgtggtgaagggacgattgcattgctacaaagaggcagagcactggagtgagaggcatgctgcctccgtggcgctaagtctcagaaagattggtcttgagtaagaacaatgagttggggactcttcaaagagttcttgcggttctgtatagtgtggttctgtatagtgtggagtgtgtctgtgtgttgctaagggtgatgaagtgtgagtctgttgtgacagttcttggtggctttccctctctcatagagctagagaaacccatacagctagagcaaaactgttagtaaagtggctggtgtctttataattctgtagccagtaaagtttaaatcagggggcgggagtggaggaaaacacgaaagacaaaactacctcagtgttgagatgggtttgctgcatctagtgataggggaattgcaaatgacttctcgtgacgggtatgaggtttaaggtgttagtaggaggtatcttgggcatcaagagggtacacttagataatccatcttatgggtttcaggaattttacttatatatggttgtatttctgccatacagtttagaatctgtgagtgcaacatgcaaacagctgagccaagaactaatggaaaaatacgaagagctgaagaggatggaagggcataacaatgagtaccggacagagataaagaaggtgagagcctccgtcagagcctgggctcagagctgggcaggaggtgctcagtgagggaaatgtgttgggtggtcagtggaagagtttgctggaactcagtgggaggaggagggatatgagaggatgatagggatggatgatcaaaggatactgtgcatgtggggaacttgtgaaatatgctcatgatgatttctaaacaattatattgcttattaaaaaagacattatattacctgtaatttccttattggcttcctttgtgctatgaagtagttaatgtcctcattggctgttggtactctagagcctttttttaaggggtcctgtccccagtgtgctggtgtactctaatcctagctttgggaggtgtagacaggagatcagagccagcctgggttagatgagactgtctcaaaataccaaaaataaattaatttttttagaggctttatttagaggattagtcttgttttatagcccaggttggccttaaactcataatcctctggtcttttgaattctaaatattgagattagagacatctgttaccatacttggcttaatttgtgtttttcactactttgagattattgctagttcctgtgcatgtgtgtgtatggtgcacacatgtatgtgtatgtagagcccagaagtagatattaagtagctgcttattgctctctccccacacactcacctgcctcagcagctctaactgaactcagtattcattggctgactagcttagctggccattgaactgcagaatcaacctttatctgctgtccctctccccatgctgggattatagatgtatgcaaccttccaggatgaattttatgtgggggctaggaatctagactaagtccttctgctcctgctgcaggtatgttatagactgagctgtcttcctcaaaggctcttgcccctttctacctcttatctttctgttagttctctcctgagaaacagaaaactagataaagaaacaaacaaaaaccccaaacaaacaaacaaattttaatttttagctgtgaaaagaatgaaagtcttagagactacataaattagacatagactttgccattgaccccagtgtttgagtaacacatgtttttctgagacctaatgcatgattttgaatttaaataccagactttcacagtagttatagaagttgataacttgtagttgatgattttctgtatatctaatctaggaaaaatttcatgtcttaaggtaagatagacattaccttattttatcaattttgtgtatatttttctttgttaaattctgtacattttaaacatttacttgtcagtttcatacatatatatgtactgtatattatatcatagtcatctccagtgccctcttttattcccttctatgatctccctttcctatcttgtcttcttccttctttctctttgtctttcttttaggcctacattgtttagggttgcttgcatgaacgttggcagggagttatctactggagcaatttaccagtaactacactattgaagaaaatgacaaccctgccctggcagccattaaccaggtgtcttctctctgaataccttgttctttagggacatgctaggccagtgctcgctctaccattgagctacatctctaaaccttgtttgttgagaaggggtcttcctggaagttcaatctggccttgcaatcactggcagatcaggctgctctcaatcctggggtctttctgtctctgcctctacctcctaagtgtcagagttactgctgtgtagatttatatgcctgaatcctaaatactttctctgaacttttggtgttttcttttgtgcctctctatagttgaaggaacagattctgcaggctgatcagacctacagttctgccctggaaggaatgaagatggaaatctcccagctaactcgggagttgcaccagcgagatatcactattgcttctgccaagtgttcctcctcagacatggaaaagcagctgaaggcagagatgcagaaggcagaagaaaaggctgtagagcataaggtaaagtccatccagggcgctccacttcatatttacctgtttgtttttaaagaatgaatttattcaaggaataacttccgtatttcagtggtagacacctgctttgggctggttagcaagcaggatagtgagggttggtggggaggtcagattgatacagacaaggaaaatgactaccttagtggtacgtgggcaaggtactgggagcacagccaaggagttgcttatctagagtaaagatctctcttcctgcaagaggagaatgagtaagctggaagagaccatgcagagctagtaaaactgcaagatgtggcctgagcagcgggtggggagccaccattcaagggaaatggggaatggatgcgttgtggagatacttggctgcacggttggctaggctttgtgtttgattagactagggtaacaaaggacagtaagaagctattactgagggatgaagcttgagtagccaagtaatgccctgtaacaaggcagagaatggttgtagtgctgtggaagatgatgcatttctatgaaagatgcccaggatagggaagctagcagaggagacattagtttggcacatttggtttcagataaagcctgaacttttatatggaaaaattggttagttggctccacggaaatcctgaaattcaagggttggccatttagttgtggaattcctggatgaaggtggcatttgaaatccctctccccagatactgcagttatagtgaaaaggcaatagagtatgcctaagagtgacttggatcaaatttcgcagatttctcagttggagtgaaggagtgggatggaactttaaaagaagtggcagtgaaggagtttcccagactgtgcctgctgaggaagaaggccatgaaaggaggcaggaattttttcatagagatagtctagcagaaaagctcagcagagtgagggctgaaaataaatgaatgctttatgcaagcgcagtcccacgtggtggtggtggcagaaagttgatgcgagctggaagcagggtgtgtctaagatcttctgtgactgaatctttgtgccttagtcccattcattactgagtgacatttaatcacatgcacagtgctttgcctgctaacacctttgacactcttaagaagcatatgtggggcctgggagacggctgagggagtgagagcccctctctgcaagcataaggacctgagctgggattcccagagcctacatagaagccaggcgtggcttcatggtctgttgattagcctagcattgcaggggaggggcacagcagagagagctgaattctgagaacttgttggctctggtctctgcaaatacacatgacaggcacacttgtgctctcatgtgtatgcaacacacacaacaccctgtatctacacacattttaaaagtttatctatatggatagaggatgtagactggactaagtagactagagaaaatgatgtggaaaagctttgtaaaatatatttgatttatgtgagtcccccgattttccttttgcaggagattctaagtcagctggaatctctcaaattagaaaatcatcgtctttctgaaacagtgatgaagctggaactgggcttgcatgaggtacacacatcgacacttagcttttgtgtttttgaagcctttgaacgtaactgttaatattgatgctagaagaaggtagaattaactagtttgaacagtcccttaggagatacagtcacaaatgaggtccaggtgccctcctgccagaggatgtttatgctgaagcagtaggatagtttcctattgtgtgtgacaagatggatatatagtctgtgttctcagcaagggaagtatctgtaaagtgccagcagagtgctggcagtcattgtgaagtggacactgggcgctgcttttagtgctaggctgttgtgctcacagtgtctttattataaagcataccatccttgaagtattttagttttcattttatttctatgaagcatacatagttcatttattcaactattctagaatactcagtgctaaattgcacacaggataactgatcacgtgtttgactctgaagacattatactaatttagtggagaatatgagaaatacatataagctactgtgaaatcagaacaggacagtgtgaagttatattgtaaaagtcttacaatttaaaaaatgatgcatctattctgatccatctttttttggtgtaggtcaaaagtcggaagattgaattctttttttctgaacttccagggagtgttctgcttccaaaaagattcatagtcacaaaaggcacccagtttgctcctaatagttccaatttcacagtcatggaggccgagagtgaagacgcaaaaggctagaagaatactttatttcaactaggaaaatgggggactattttcataatctttcagatgggcaagattctctaagcatcatgaagccacaaaggattttacaacataaaaatgtaaaatttctggatggcaaaaggctccattgaaaagactgataatagaagcaagtgtggcagctcatgcttataatcccagctctcgagaggctgaggcaggaggagcgagagtccaaggccaaactggacaagaccctgtctcagaataaaaataacagcagaggggctgggagtggagcttagagggagagcactcgcctagcttgaggcccggggctggcggcactggtgcttgaaagaaaggagcagtaacctggaagtagacacaggctaaccaagtgtcagcaagtaagagttcctacagaggcgataggaaagagacccagtcggaaaagggcaaagaactaagtagatatttaaattcaagtgagcgagggaagctattaaacttccctaatagccaaaatttttaaaaataaaaatttcttgctaataagcttgataatgatttagaaagttaatatatggcctctcttggcaagtattttaacagcaggctctcccatgcatatagagattgccttcagtacagttgagccatggacatggagcttgtaagtccatacacccccagtcctcccggtatttccacctgtgatattaatagtcatattcttcactgtcctcctggtatttccacctggaatattagtagtcacatttttcagtgtcctcagcagtttgcatccccagagagcccaccttatgggagtaaaggttcagaaatgggcacagcaggtattatgaaataaactggttacttaaatggttgatttgtgattgtactctgaaatatgctgtcatttaagatggaaacattcatttaatttttctgctactccacatccctgtgatactgtaatgaaaaaaattttttaagcacaaactcacatggatgggaaaaaaaatagaggagacaatagccaaacatttaaaatatttaatataattttatttttgtgtgcatggtgggtgattgtgtacacgcatgtgtatgtacatgtgtatgaatgtatgaaagctaggggttgatattgaatgtcttcctttatcattctctaccttttgtattgaggcagggtctctcacttggaccctgagcttgcaaattgggcttgctccagagatcctgtctcctttttccaagtattaagattactggcagtctactgtgtctactcggccagtatttacatgagtgttatagatctgagctctggtcctcttgcacggcaagtactttaccaactgaatcgttttctcaatcccatagctaaatattttataaggttttgtcaaggaggtggaagatggatggaggtgggggctggggcacatggctaaccagctggctgtcttaatgactagatggatggctaataagtggatggattagtaggtgagtgggtaaatggatgagcaggtaggtgagtgagtgagagtgtagccaacaaatgactttgtatgccctgataaagccaataccgagcgagtagtaatttgtggactaatctgtttacactatagtgttctttaaaaatgtgtcatttgtcagtattagagtggctctgtttacattaaagaactgagagattccagagatgctaaaggcagactgtgcagggttctgtggagctgaacttctcttgaaccttagtgggagcgctgaccctctttgcccactgagtgcatgcctgctccccaggtgtcatgccgcccttcccgctcaggcaccgggaggaattgttagtaagctaatagctctcggagatttcagaaagatgcacagaaaagacaagtttctcttctttttagctatgtgcaaggggtctcaaccctccccccgctgcgacccttcagtacagttcctcatgttgtagtgaccccaaccatacaatcatttttgtcgctacttcataaccataattttgctactgatatgaattgtaatctaaatatttttggagatagacatttgctaaaggggtgtaggttaaggaaagctggtttaatgatttcagacatcaaagttgtaaaaatcctgtcagctttagctttctctggtttcagagttgcatacagtatgaatatctgtacagattatcaaaacataattactaggaaatgctttttgcatgttaccacccaggaaggtgaatttacttttccaaattaatctaattatcttaatgaaagcagcagctttgattaatgttggccactttaaagatgagtcgtagttcatagcgtagccctgcattttagaaataaaaaggtgggtaggtagtcgacagtgtagcacttgtcctgtgaatacacttctctgagatattataaaacatggacagctactaatcctagtttacaggtctatttacacacttgtgagttgacaggcaaattatgtttatcagaactctattgactagcttactttcacaatttttctttacagaaaatgaaatatgttaaactgtaaagatcaccataattttatagaatgctaattaaatgaaaaaaattagaaaaagaaagtagatgtgtattatcaagaaataagatatatgatcacagaactaagaccagttcatggtaaattcctgccacataaaatagtcctgcttttatgttgctaacttcatatcaaactacatgccaaaaagtatttaagatggaagggtatttattttaaagttaccccttttggccagaattctctttagactcttgtgtttaaattactttctttgagttagttcttttaatttcctcccacaggtattgtgtgtaaggagagggctcctcattcttcttgatttccaggtctgattcttgaagctttcctctgccttgtttccatgccttgaatgcttatgtacagaaggaagccatcctgcctttaactttgtcccttccttcactctaggcagactgatgcttttcctgtgttcatcttaagagggctaaagacaaatctttactttctctaagtaaagccataattaaaactaaaacagaaaatatctcagccaacactgttgtaggttgatcataattacccttaaacatactagtgattctcgtgttcttttttattaggcaaaagagatttcactagcagaccttcaggagaattatattgaggccttaaataaattagtgtctgaaaatcaacaactgcagaaagatttgatgagcaccaaatctgagctggagcatgctactaacatgtgcaaaaaaaaagatggcgagatctttaacccagcacacagcagagctgccgggttcaagaatgcagagcttaagtaaagttccctccctccctccctccctccctccctccctccctccctctctgtctcttaaagaattacttatttattttatgtatgtgagtacactgtagctgtatttggacaccggaagagggcatcggatcccattacagatggttgtgagccaccatgtggtttctgagaattaactcaggacctctggaagagcagtcagtgctcttttactaagccatctctctagcaccttaagtaaagtttcttaaaagtctctttgaagtgcatgtgctacggcctgctttcctactttgagaagactttctggcttagagctgtgcagtcatcacaggctctggtttaactctgcccagtgtgcacaagaggctcaggtggctcagcctatttcatcacagcttttgttctgtgcaccctgagtgtacatgtgtgtgaacagcagcttgttcctgagttttcatgctgcctcccactaccttcatcacacctgttccataagaagtaaaacgtggctttctataaaaagcacccattgcacttttttttaaaatgtatttattttatttatgtgagtacattgtagctgttttcagacaataccagaagagggcatctgatcccactacggatggttgtgagccaccatgtggttgctgggatttgaactcaggacctctggaagagcagtcagtgctcttaaccactgagccatctctccagcccaaagaacctgccaactctttttttttttttttaagatttatttattacatgtaagtacactgtagctgtcttcagaccaccagaaaagggcgtcagatatcgttatagatggttgtgagccaccatgtggttgctgggatttgaactctggaccttcggaagaacaattgggtgctcttacccactgagccatctcaccagccccccattgcacttttgatcaattaattttaggttgttaccataagaaaggttatttcaatgagaagccaactgacttgagtttgttctgtgtagcctgtgtgttttcctaccagaagcctttgttagcatccccaccccactctcacccacggtgacattctgagctttctctgtgcacggggtgccctggccctgttccttctgcaccccactggcagcatgtttggccgctgctatgctgggagcatgagagcagagcccgaggagcgcttgtctccgagtggactgctcatttgtaagcagtagagtcctgtcgcatagcctcttatgaacatgcttctttcagcatttattggaaagaaaagttgctacagtttttcatttatcttgttttctaatctgctatccaggccaatccatggccagcacagacatgacggaataaagaccgagcagtacaaaacaggtcaccactcgcctcgaggacaaacgttggatagcatagaccctgtggccaggggtcccagccccctgagttctcacatcagccccggcagctccaccgtctctctgccttccaactttctatttgaggctcactctttgccttcagtgctagatataaatgatgtcaacttttctgacagtctgtctgactgtatgaatgaccaagaagagtttgtatcttcggtatgaaaactttctcgtgctaatacttatttttatttttaattttaagctaaagagggtgattttttttttttcttactgggtcccagtcagtaccctgtatcactttcacatttgtagttttgcttgtgaaggcacattcaaccaagacagcttcaaattcaggttctaaaatacttagaatatgagtgcaggcattcactgactttagcctgcgccttcttgcctgcctttcccaagagggctgaccatgctgcagggattgaatcaagggctctgtctcaagcatggagactgaggagggaaaagaggggctgctggggaggagctggtggcctggggctgagggtggtgcatctaaggtgaatggagcatgatttgagtacctatgatggcgccttaccctcaccactaggctccagtgttctttaccttccatcgtgaagccggtgttgggctgtccattgcctgttgttagctgtggtgtgtctttgtgaaagtttagtaacctttgtttttgtttttttgtttgtttgtttgtttatttttgaatgtgtcagcaattccatggaaagattttcttaaagttttcaaaataaatgtccaatttaacttacacatagttaacaaaaaaaatcaacaccctgaaaagtacctttcttctaagtttggcagccagccttccctgccctatgatgatgtgatttcacaaatgtcaccttttccagctagtgtgagcatcacgcttttccttcagaagtcaggtatctgatggttgcgctctacagggccaacacggttggtccttattattcatcacttgccggtttgactgcccactaaactgtactgtggccctgctgtacccacatgtggacacacagaaagcaggagagctggctcccacgctcctaatagagggagcaaaggtggccttgtgtttcgttccagtctcagtgttcatgtggtgatggcgggcagcaccctgctgtgtgagagccttgattccagcaccagttacagtggtagccgtgggaaagtcatttctcacttctgaaactcatttctgttttgtcaaatagagacaagagggtgtatatatgtctatactgtgtgtgtttatttcccccggaggcaatgatttgtgctaactcagcgtttaaagtgacttctaaagtataacattaaatgagagcaaactgcgtgtgctagatttcctgtattaccttcaaaaatctgagatctgaagtatcaccagaattgagagttgcagatcaaaggccatggagtggaattttaagaaagggaaaaatattgatttttaactggcatttaatttgtttcctgtagattttcagtgctttaaagtgagagtaacattcagagttttgaaatagcaggcgttggctgtattcttcagtaagaggcaggcaggcatttctagtctaagccgaggtactctcagacaactgacgacatttcctatacactttacacagacactctttgggtcagaaagaaagagctctgtggagctatgttttcagaacttgcctttttttctttcttggatttaagacgaaaatatctcctcaggaaaaattctccctttaacagggctaggcagaaaatatcaaaatgttggggcattcattcctgcttcctaacacatatcatgatttgtccctcttccagggctcgctgcccacctctcctctgggatcgatagctaccaggtttctggaagaggaggagctgaggtctcaccatattctagagcgcctggacgcccacattgaagaactgaaaagagagagtgagaagacggtgaggcagttcacagccctcgtgtagccctgcacagccacagacggaagactggattataaagttgtaatgaagcaatgctcgcaagggcggcactgaggagtctgcagactgggcacttgggtattttcactgcgttgtgtggaggactgcttccataggaacttgtgagaataaaccgctttgcagacttttctcacatgaatgtttattaccacagagcaatgctttctctttccgacttacatgtgaatagctgtgtactactgaaaataaagattgtactatacagtttgaaactag

SEQ ID NO: 3 - DNA, 7949 bp, Mus musculus
gtgacccagaagaagggcggggccgggaggaagccgacgcgcgcgcagtgggtaagggtttttcgcgcccgcggcccgggtttccgagggtggccaagcgttcgccctcgaactccggcgtctaccgcttccagaggcgcgggccggtactttcaaccgagcttcagagccacttctttactgcacgctgtgcggagtggaacggagcccccatggcgacgctcgacctccccccttgcacttccgcatgtagtatcctcccacccctcgaaccggaagtcgctgcagcgggtgactgtagtgtcccaggatggtggcctccgagggccattttagtgtaggcgccgtgctcgtagcttagaaatacatttacaaagctgtgtgcatgaaaggtgtgtatgtctcataggacgtacgcatctaatgtctagaaagagatatccgggcaatgtgacaagctttcctcctgttgtcacgtattgtgcccagagatctaggggactggtgaaggaatggacccttgggactgcactcagcctggggtctaaaggaaacaatctgagagctgagagtttgatattatctggtatccggagcgggggaactttctgtttacgtaaagggtgagcacccgagcacctgacccaggaaaatagatgtgtttggaaggacggccaagcataagtgatgagggacgggggtgggtgaaaagcgtgctagtttctaagcatgtagaagagagtcatgttacaaagtattgaggcgaacttgtggaaagactgggtatccttacattaccgctggagacagtagtaccctgccagtcagtcacaaagctgacctgacttgtttcatagatcatttgaggcaagcagcaaagcattcaaggacagagcctgctgaaaagctggagagaaagtcagagcactttagaaaaaggtgcaatccatagggactgggaaagtcagcaccagaaggtgtgaaatgcagcccaaggctcagctacaaaaacaaaaggcttgtcaaaccctgaggggtgattagaagtggcccttcagctggctttgcgttatccactagctagggtctggttatgtctgaggaaaactgctaagttatcacctggttttaacgtggcagagggagcttcagtgtgtgtgtgtgtgtatacgcgtacacgaaagttgtggtggtgggggagatttctgcgtacaggtggagttgtagatgagtgtagaggccagaggtcaacatcagtgtcttcctttattactttgaatcttaaacctggagctttctgattcagttaaactgcctggcctggcagcttcccagagaacacaagtgtgccatcgtgccaggctttttctgcgggtgccaggaatctgaattcaggtctttttgcttgcacagcaagcacttcactccactgaacctcctcccaggccccaggttgtttaattttttaaagtaaaaagccctttccctcctacagactaggtagatagcgctagcttgcttgcctttattctgttggaggcaagcacatagccgcgtagcacagtttgtttcttgtatgagtctcccttctctcggaaacagaacagttcctgagagagccactggtactaatcctcacaagacctttccttgggttgccactttgtggcagggagcacagtagggtgtgtttgtgataaggaacaaacttggaagccagaaacccaaaagcactgcttgatgactgagttagactgcaacagtttcaggagaaaaatgtggaacaatctgtggtctgggagcttagcaagcatcctgagcacttggaccaggcactgaagagagccagcaagatggtttagtggcttaaaggcgcttgctgccaagcctggcaacctgagtacaatctctgggacccgcctggtggaagaagagaaccaaaatccccaagttgtcctttgacttccacacgaacttacacatatacattgtttctttcaagaaggaagtaggctgggtgttgggatcacagcacaaaagttcttgcaccctcacatatccagggaggccgagatgttaagcatgcaggattgttcttccaatgtgagagatataaaacttgttcagtccacaaagctgggaattggaagtgattgacagcctggtgatctgcgttatctgttgggccaggccacatcaacctacaaccaggaccgagggtggctagtaatttaaatgaccctgataagcaggggttccctaagctccagaagtagctaagagaccagatgatgtctatgttattgtatgaccttccttagacccttaagctagtacaggtaacctatctctagaacccatcgtcttggaagaaataacataccctaagtcgagtttcaatgtaattgcacctccctgtgcaccagaaactgttattacaccaggaaactttcttccaaatcatactatgtttaagtttgttcggagtaaaccgcctagcatcagaccccccaagtctaagcaagactgataaagtcagtctgaacccagttttcattctcacctgacagtttgcttccctccctggactcctgcagggccccctcagctggggatggaggtcggttggcagtgtgcttaactgtagtatacacaacaccctggttctgtaaccagagccggtggcacaggcctgcaatcccattggtggaggcaggaagattggaagcttaaggctgcttttggctatagagagtttgagactctcaaaaaaacaaacaaaaaggaggacgcccagagggatagagaacctggagctgccaccgttgatcttggatagttctgttgagttcagtctggatgctgtttaagaaaggaagtggtttcctgggtaagccctgctggccacgttgttcctgccctgagagttagcagctggcctatggttggtcacttcacacatcccagctcagtgtcacccagctgttcccttagctcctgtgcctttagactgccaatgtttgggccaagacgggtggagacttgtgccaaatcgtaggggagggcttcaagagcaggagctgacactcaggtaagtcggtctgagtcaagtcagagactcgtcaaagacatcacaagcagggaagggtgattgtataagatggtaaagataaaagaaagttacatttccacgcagtgtcttctaggaccttattctgaagacctgtgttgctctctggttccactagcagcctggtgtgttgatcaagcatgtcagctgaggtgaggagagaactggagtctttatgttgtcatctgacacatacaagatgggcctttcctggggtaatgttaagcacagcaacaaaaccagtttcaaggtggaagtatgaggaatcctagtcctggattatactataccttcactgtgttagaaaaaaaaaaaaaaagacctctttggcttacaggcctgacaagatcaaagctgcaggaggatggacagtgaggtacagcgagatggaaggatcttggacctgattgatgatgcttggcgggaagataagctgccatatgaggatgtcgccattccactggtaggttgtgattcgagctcaggagaaaatgtggtgagacttagtggaggttggtgggaagtgaaatgctaaggcccagaaatcctactgcctggtgtaactagcttcaatacaggtcataccagggctggagtatacccggatttttggagccacaaaagcccagagggatgccaagtgtgagtttagcacatcacacccaggagcaaggagcattgctggcttaccagtctttgtgggttttttttgtttttgttgtttttatttgtgtgtgtgtgtatgtatatatttatgtatgtatgtatgtatgtatgtatgtatagtgtgagaatgtctgccacccatgtgcagatggggagggtgacagaagaaggcatcaaattccctggagctggacttacaggtagttagagatcacccaacacaggtgctggaacaaagcttggatcctctaaaagaagagtcggtgatcttaccactgagccatccccccagcccttaggatttatttccatttgtgtatgtgtgagggtctgggatacagtggaggagcgtgtgagtacaggtgccctcagaggccagaagagggtgttgggtcccttggagctggaattaaaggcagttgtgaaccacccaacatgagtgctgaaaaccaaacagtgtcctctgcaaaagcagtagagcccttaaccactgagccgtctctcagcccctctgatgcaggcacacagccagctgcttacaggcaaccttgcctttcttctttggcctgtagacatacaagctctcagtaaaccttttctttgctgatctctaggaaactcccttaaaaggctgttgttgaaccttctgtaataagtaaccccccacttttgcttatgtagatttaaaaaaaaaaacaaaaactcattgatgttacaaaggcctaacaaagaacaaggcaaacagagtctggggactttctctgtacagtgtgacacacgctctggaagagcagctaacacagcatgacttccaggagcatcacctgcactgctgttttacaaagaacagactccactcgctcactcaccggcactctctttcaagagtaagaggtgggatgtgttcagtggatattcaagtcgcagcttagttcaagttcaggacaataaaataataagaatcatagctacaatttattaccagttttaagccatagactgaaattaaggcttgcattatctgtaatccttaagacagccatacaggggaggtggtagtgtctccgtttggcaggaaaagagtaggattagagaagtacacttacctcaagtctagtgactagtatgtcagatttcataagcaaagctcaaagtctgtaagctttcatctgtccacccatccatccgtccatccatccatccaacaatcacttctccaaagtctactgtgtgccctaagggtatatgagcataagataaagttcctgtttggagccagggatcaagagaggtaggtgactaactaatgacactaccaagcaggagggaaggataagcaagtggagaatggctggaggcctggcatgcagtagaaatgcagagaagatgtaatgcttaagaaagaatcagatggttcatggtgctagacagggtactgtagcaaagaagagtgtagcaggcccagggtttgaaacacgttgggagatggtgaagcagtgggcagcaattaccttagtaattaggaggcagaaagttgggcatagtttttgagaaaatgtttgtgccccacttcgacctccttctctaggtatctagggatgaaaggtctgtggagggaagctgccatagctcacatttgtctttcagaaagtggggtctgtaacattgacagacagcctgatagaagaaagggccaggggacatcatgtgactgcagtgcagtgatctaggcaagggaggaaaaccacaacagcaccaggaaaagtgctgtgacttgctgagctccgtacagcaagacctaaggaacacttacatggtagggaatgaagggggaggtccctctgctgacttcctggtgccatggtaacctgatcctgtggtccatccacacagtgttgtgattctaaaggaatgtgtctgtcagttagcttttgctgcataacaaattatcctgaaacttaatggcttacaataacaactgtttggtcataattttatttcttattggggaggtctggtccacaccagttcagccaactaatcctaggcttgctggtgctgcagtgtcaggcagcagactagctggagcccctctgccagttaacaggatgtctccaggaagtagggtgcctggcacttggcacacaccaccctgcaggtcctctgggacctcagcctcaggttcagcagcaacagggaagtgcagagcacttagggctcaggcccagaactgccccacagctgcattctgctgagatgggcaagtctgtggccaatccaaaggcacagtcagggttagactctgcggcttggcaggaacagctgcagacagctgcagctgttggtgaatttgtccctgtggatattgtgcgtatggtattttgtgttgggtgggcatgttttgtctagttttacatggtagtattcatcgcaagaattaatagtcaccaagcaaacgatacatcattttaggaagcctagtatgccattagagagcatgacattaagtcgttcttaatcaaaggcctgtttattttttgtgacctgtagatagttattaaggtcagatttctaaacggactagagaatgacagttctctggctctgtttacagaatgttgaatctcactttactttcggcatagcagacgcatgttgtgcaaacacattggggttttcctgtatgtgtgtacctgtgtgccatgacacacatgtagaactcagcgttgtctgcagtgcctttacccactgaaccactttactggacctgcttcaaatacatctgtacatattgtagccaagtatcatgttccatatgttgaacataattttaaaaataaaaatacctccacatagtataaatataagtgagaaatcctaactttgaatatgaaagcatcagttttctaacacaaagtgtaagttcagggaattgcacagaaatacatgtggtgaactctggagccatggcttatctctgtaagaaaatggctcttggggtgtgagctagtctttactgtgctttccactagggggagctctcacctgttacattgtcagtgtccattatccagcccatattgtcactaaagaaagcattttgttgcagcattttttcttcttgatacaattcctgtatttgagaacatatcagcaaatcagattggcccttaaagcatttttcaataggtttagcattggttcttgtcagtgttctcagccactcagcagtgtgtgccctagagtactgagtaccctcacagcatgcactggatctaatgtccttactctccccgtccccaaggcagagacatgggggtgaaaaaaaaagctcttttttttttttctccaatttttgagagtggaaacaaaagcccccaagggtttgaattacctcatcaacccaataagccagcaaatgaaggctgtctgggcctccagtctctgcccttagccctcctgccccactgccttttataagaaaaccagagtcacagggccagcattcccatgaggcttccaagcaagccgcactgaacagacctctgatattttctatccatctgtttgtttaggctctctctttagagcatcatatcagctttgctggctgttcccaggccctcggaggctttctttcctaatgcctttgtgttttcagaagtaactgcaggaccaggtccacacctataatcccagctcctgggaggcaaaggaggatgggaaagagacttgggggtgatcggctgagagtgtggctcagtgagagagtgctagtgtatctcagcagggccctgagcgcagtccccggccgcgcagaaacacagttcaagatttggggccagcctaggctacctgagacccatctcaaggatagaaaagacacttcctgatggtcgttacggctgtgcttcccttccagagtgagcttcctgagcccgagcaagacaacggaggcaccacagagtctgtgaaagaacaggagatgaagtggacagacctggccttacagggcctccacgagaacgtcccacccgctggaaactgatgccgggctccttcccacggacggagttttcaaacatatggggataaaaatgtttcctgtcgccaaatgcagatctttagcaataaatcaacactcaaaagcata

SEQ ID NO: 4 - DNA, 15614 bp, Mus musculus
aagcagatcatcggcgccaccgactagtgcgcacctccgttgctgactgtacctaagccgaaccgggtctgcgtgcgccggcagccgcgggccgcagcggtaagcaaggtgccgggcactccgggcagtgcgcgaggccggcggggacgcttcccagcagcagcgggacaccgcgatcagtccgaccctttctggagatcggagctggggtggacgagcctccccgggagcgggaggggagactgtgaaccctttcgaggatcgatcctgggtgtctagcctagactgctcgcgcttttgtgggggtgaggacaccattctccgacccactggggctggaggaaggacagaggatcagtgtttgggagtgtgcgtctcgcgtgcggggcaagtgaaaagctgcggtaggcatatctcgctgaattatgaggttaccgtggctgctttgtctggattggggatacaggtggcttttaccctcagctagctcaagaattcctctttgtcttccttggaaaatcctctgcggagccacgaactggctctcacttagaaagaatgcagcctgctgtccagtccggtgacgtcagcgctgaagtatttggaaaacaaagagggttagggagagaggcgtacccgcgatgcttaaagacctctcgcggttgcgggttttgctcgcccggggcgctcgggcagccaccggtgctagtggtctgcctcggtagaggtgagtaacgccgggaccctggactggcctggttgacttggagactagcgttggttccttttgctggagtgagcccaggccaaggccagagacccgtgtttgcttagaaaggtggctggttttccgagtgcagcgctccagtgcagcccaggtacagcgcccgtgtaaggaagttgattttcagtaagtgctcttatataagtatttgaaagaaagattgtgcatctaggggattcgattgggacgtttgtgcgatgaaaggcctcggaaatgttcggtgctccgagagcctggctcatagtcggcgcgcctggaatctgccgggaaggctcagcattccttctagccgctcccggatccttagcgcgagtcagcccagacagtgattaacttaggaaataccgcgtagaaaaagccgcgtgtgagcagactcttcaagtcttacacattgcagggtgcagttgggggggggggggaggattagttgctggcttgggtatcgtcagggctcattacctttctccagctctgccaacataccattcccaaactgaggtaggacagggggctagcattagtatggcacagaaaggggccaccacccccttcctttgtctcccccctcgcctcattaccccatcaactggcataggtagttgttactaatatcaacagagatgcagagggatcatcccctgtgtgcctctagcatacacgtagggaggggtttttctaagtagcaaatgtgtgtgccaagaaaagaggttggtggtcatggaaaatgtttccctggctcagttactgcaagctcccctctgcctcctcaccaatttccatggggcttcttgtgctgctcaccttgcagagtggctgctaaggtcatctgtgacagggagactcagatttattttatcagcagcctttgagcccagggtctggctcacgcgtctttattctaaagaatcaatggaattatttgcttagggcttctttctgctgggctacattctttctttaccgcctgccagtaaactgggaaccctattgctaagtggttgaatttgatggacgcctgtcctacagtttgcccatgagattgtttggggtaatggctgactgccggggactgtgatatgagatagccttctggttttctgttgtatatctgtaagatcagctaaatctccataaatgttacaatgataagcatttgccaaggatttatagcataccaggcgctcagcttcttacatttcaactccaagagacacactgtgtgtgtgtgtgtgtgtgtgtgtgtgtgtgtgtgtacatatatatgtatgtatatacatatatgcatatatatatttatattaatggcaaactaaggatcagaagctcagtaactaaacttaatcaatagatggccatattagcacttgcatctgggcctgtgtaaaaccacccacctacccacccagcctcctccttcatccagagtgttcctgcaagtgcccctccctcctttgtttgtgcttcctttgactgctattctttctgtctcttaggtgctctgagaccaggtgcctgctggccattgtctaggcaggtgtgtgcaagccagagaagcatgaggacactggaagactcctcagggacagtcctgcaccgtctcatccaagagcagctgcgctacggcaacctgacagagactcgcactctgctggctatccagcagcaggccctgcggggtggggctggagctgggggcacggggagcccccaggcttccttggagatcggagcacccgaggacagtcaggtgctgcagcaagccaccaggcaggagccccagggccaggagcatcagggtggagagacccacctggcagagaacaggctgtaccggctgtgcccacagcccagcaaaggagaagagttgcccacctatgaggaggccaaagcccattcgcagtactacgcagcgcagcaggcagggtcccggccgcatgttggggaccgggatcctagaggaggggtgtccggaggcggccggcgacaggatgaagctcttcgagagctgaggcatggccatgtgcgctccttgagtgaacggcttctgcaactgtccctggaaagaaacggtgctcgggtccccagccacatgagctcttcccacagcttccctcagctggcccgcagccagcagggcccccaaccccgagggcccccagctgagggcccagagccccgcgggccaccacctcagtacccacacgctgtaatggctcaggagactgcggctgtcactgacccaagataccgaccccgaagcagcccacacttccagcatgccgaagtcaggtaaccccagatttctttctagttcggtctcccaggaggaggagaaccccaagatcatatatatcgtggatctcaactgtcatgatcccaatcccagggcacccccaccagttcctagggctgtctgatctagatctaccctctcctgtcttgagaagggagagctgggggggctggagggtaaggggatttagctgatccagtcatggtagcatgcctgtaatgtttaggtgaggcaggaggatcacaccaccagcctggacaacgtagcaagactgtctaaaacaaaaagaaactgacatcattgctttaactcaaaatatacatagcattgtctatagcattcaaataaggagggctcccagggatgtgaatggggttcaaaggtgagcatttctttttttctaagaaagaactaactaaagacaataggaatccttaccaaacttctcccgagttaagtaggccaaaggtggaacttattgaaggtttttaagagaaggtggacattttttgttgttggctcatcattgggaggtgttgctattgaggctgaaagaactaggtggctcgctgggccacttctgtatagttactgtctgccagttaattacttactagcttttcccttgtgcttatgggcctagatgagtgagtgagtgagtgagtgagtgagctgctttggggggaaagggggggctcaggatgctgttggaccagagtagtgacttggcttgacttcctgtgaagtgaactctcggggagtgtgtgtgtgtgaactctcggggagtgtgtgtgtgtgtgtgtgtgtgtgtgtgtgtgtgtattggagggcatgatatgattggctcttaagagatcaatactagccttagagaatgggtcattggagctaggctgggagcccagttagtataagcaggaagccagatcattgcaggagtccatgttcctagaaatgaggggctgccttagtcatctttattggcccctgtgccttttccagagaaacaggcaccattgctgtacctcctttggggtggggtgaggtgggctccaaggaacctggctggggaccctctgggttcaaagtcagtcacccttgctgaatccttatttggtccctccatttcccaccaattcggttttcttcactctggaagagaatagccgccttgggcctagtaggggagccaggggagcggggatgtgtgggggtgtggggggggtggagcctcgtgggtttactctagcctccactcccccagacccccacctcacctcccttttcagggccggtcaggaagagtttcttcttttggaccagccctattgaaccctgccaggaaaagataatatccaggcaaggaagtgggctgttttgcaggagaacaaaaagatagggaggagggcggtgggaaatggaagaaccaggagcaagtgtgaacggaaaggagtcgtcgccattcttccctggagctctcgatcattctcgaagaatgtcagttgtgtctgcctggcctgtggtagggaggagggggacaacagttatctgaggcaaccctaagagtgaccacacttggcagcaagggggagtttagtcagtctagtggcagccctcttctctgcactccctggagcctataggaggaaaaaggatgggcaggctttagggactgagtcaggggctcaaagaacaggggagcgagccataggctagaggggtgattttggacactggggatggcagagggggcatgagagatccagaagtgaaatccaaacttccaagaggcttctagaacattctgagtacaactgagaaggcacttgtgacacttgggggtcacaaggcccccagaaagagcctctggctacctgggcctaactgttctctaaacattagagtgtaaggatgtgttacactcatggccaagggccgaaagaacacagtcctgaactctgctatggagctaatccaggggttgccccttaactgaggtgatcaccaacagagatggaagctagacagtcatgggtgaacctgctgttaccagccatttggtcaagcctggcttctgtggctggagacccttgtgatttcgccgacacaggtgccacttggcagctacagcactggtctgctgaaggcctagcagctggagctgaaatctgttccccctggcatctgattccctgctctaaccttagctggggtcttggaaaagaatttcggtagttgtgggtagcaagacccttgaaacaaagaggagaaaaaactcaggtgagccgttttagctgacatggcttacctgctagaatccactagtaagtgcccttcctggggcctggggactctgtgtggcttccatcccaaaagatccttctatcaattcaaaaggtcatgagcgcgtctttaaaggtaatatttaagctgtatttgcttaggacgacccaggttgcttgaacagaatgagcatctggatacagcgccaccgccaccctaccccacacccatcctgctctctgactcttgagtcttaggcacataccttgtggcacaggccctccctctggtggctgcctaacactggggaggctcagtcactggcagtaatagtcagagtgcgcgtgcacacgtgcgtgctgtgtgtctcggggctctgagctttattcacctcttctttcccaggatcctgcaggcccaggtaccaccggtgttcctccagcagcagcagtaccagtacctgccacagccccaggagcactctccacccctccacccggcagctctgggccatggacccccaagctcctttggtccacctgcagtggagggaccacccagtgcccaggccaccttgggcagtgcccacctggcccagatggagactgtactgagggagaatgccaggctgcagagggacaatgagcgattgcagagagagctggagagcacttcagagaaggctggccgcatagaaaaggtggggactccaaggacactcagagcggtggccggtgcagagggaggcagaggggcaggaaagcctatcaggctaccttttgcaccatattctcctacacacacccccagacacacacacacacacacacacacacacacacacacatcccaagctgactccagacagctgaggaccgaccaagaggcctgccctaatgcatgagcagttgctggccagtagtggttagaaaggactcattcactagctccctgcacacttgtaccctcaccctgcacagcccctcctgtggacacctcccacagagagccctttgtgcacccacacaacagccagtctgttccaggccaacactggccaaagagaaagcccctcctctcagggaaaagaaaaagcaacgcattggcaaagcaagccagctaggagcacgtggaagacctgtggcttccaagtgggaggggcagccacatgctctgggcagaggcagctcaggctggggtctggcacccccacttcctcggtgaagcctggccaattgtgtactaaggttcaactttagcaatagcctcaggctttccacttgctgtctatctacagtgttctggataggctgagccacctaggtgctctcatccctggtcctttgtaaacactaggcatggggcatgctggaggtagcccccttgtagagcagctagcccagtgtctaggcagcagtctggtctacctaagaggctgcagtcctgtggcaatctcagtaaagtcactggcctccctccctaggacccttcctgaagttgaattaattatctgtctcttacagctggaaaatgaaatccagcggctctctgaggcccacgagagcctgatgaggacctcttccaagcgtgaggccctggagaagaccatgaggaacaagatggacggtgagatgagacggttgcaggacttcaaccgagaccttagaggtaaggaccaggcacgagggttggggtgttgggaggacatcatctgtcagactttgggggctctgttttcagggggaaatttagaatctgttctgagctatagaggcctacattagcccccatcgttgggccctgagctgagctgggacttccttataatcccatctccccagtttagagggtgcaagcctacagttaggacccgagggtaaagcccaggctgatagcatccctctatatttaaaacatcttttctccttatttgaaacagagagattggaatcggcaaaccgccacctggcaagcaagacccaggaagcccaggcgggcagtcaggacatggtggcgaaactgcttgcccagagtgagtaggggaccagctgagaaacctgggtgggtgtaaaggcaatgaggcacaatgacgtggccccactacccctgccactcccttccccttcaggtttaacccaccctcactacccccaccccccttgcagagtggtacagattcactgaatggctgctctgggaaggggtgatttccaaagatgaatagggactagggagccttaactggctgagccacacactatggactctcagtctctcctgtagggaggccatgacagccctggcaatagataaatggaggatgatgagggttctttggagttttcctaggaatgacagacaacagaaaggctggggacatgggaagctgcaggggatggtccacatggtgaaacttcctgggacagccacagatgggtttagtcaacagctacagtctgaaggaggcattcagaaagtttctctttaaaacagggaggtccaggcatcctggaagctttatagactaatcaatttgttccttcattagtggagccaggctaagcacctggccagcgctgggctgaatgtgagaatccatccagaggatgacagggaggtgagatgagcttaaggcaggagcaggtacccacaagttcaagggaaaaagtgttcctgagccatgttcctggtgattaggaagcccctggtgaccctgggaaatctgggaacagcagaagtatggaggcagtggaggaggtctcagacactgaggggaaatgacaggcttgtaggtaagaggtatttaggaggaatatgtatgagggtactttgttaggggtgtctaaagagggaaagactccagagagagggggtttctgaatgctaaccgccccacccccttccttcggggacttagagtgcttgctaataaataagcctttggcagggaatgggctcagattgggtaagacctgtgctatccactactacctttcaaaatgaggtggttaaaggtctctggaacggaggtgaaggggaaagaggtgtgtcgcctaggggtttgcccttgggagtctgtagaagcacctactgctgtgggaagagagattaggggtgctttggtgggaggggtgggttttggagcccggctctgacggagaaaggaagtcttaaggagggtttctggaagcttgcagagggggaggggggcagaagcagccgggaggcgtttcctctccccggggagcaagctagcgccaggctgttcttggcttcttgctggagccattaatctcgcagccgcgggtgacctggatgcctggcataccagagctgctgggctgttccgctcccagcccgtccccccctccgttccctcccctgtgcgcctgacagtggcgcccttcggccccggcggcgcccagcctggctttgggaggagagagtatgaatacaaagggaggctaggacctgaatgtggagagcttgctaagataggctcagcctcccaccctcaaccaaggtatcttagagattgtacaaggcatctggaaacaaaaaacactggatccacagctggaggaactaagaaacccccctagcattagaaggctgttttgctttgtttgttttgtttttctatataatcgccatttctaaagggctgaggttgacacttttttctggagggtacagaattcctccccataactggctttccccaacagcagcccccatctctgcctgaattgtctgatatgggccttcaggagctgactctgaggcctgacaactggtcctgcctgcttttggacaggtgttgccttggcctggcacaggctacagaagcatctacctcctagtactgctaggtctggagtgaggcctggacattcagacacaggctgtagtgctagtgggtgagagaggatgctgtttacgggtctgaacctggcttcttccctccactccactcaccaaaggcaagccagcagagtatgaccaagtcatgtgtaaagcatcatggaacagccccgtcttttccctccacaccaaagagtgaggcaagctaggccgattgtagccttcagaagggcaaaggagatagcctagattgccccttagtgccccttaatgctgttcaacgagttggtgaagggaggcctctgcatactagggccgtgtcctagccacacatagcccaaagaaagttaacatttcttctgtctttccagccacattttgagagttcggtagctgagtgtaaccttggtagttactgttttggataatgtagagccatccactgtagcagaaaaatctcaccaatatagttttgttccaaaccctgttccctacgaactctctagagaaataagcagccattcttggtcgactagcccaagactcccaaagggcgaacatccaggttctttcttgccttggccaggctaaatggagaggttcctctaatgtgcaaagtgctcggcaattgctggaatcttagacacaagtctttggaccagcatccttttcagtgtgatgcatggtttgaattctcttatgatgttgcatgtgggcccccagaccatgcaacaaaagggtcggtgaacaggagaggctaccgtccgcagactgtacttaagagttcatttcggcaagcctatagggagaaggactgtgagcaaagccttatagccggagcctcccagtcagccatttggttcctatgtttcttcctctataaatcaggagcctcaaattcctcctgggggatcaagtgtgataaggttaaaagtgcacgtcctgcttgcacaacgaatgaccttgtcacagtaccctccctaatctataacaggttggcacagtgtctgcctgagcagtctagttatcatgaagcttaaggaaaatatgttttggtaatggtcatgtctggcacagttcaagcagctgaaaggccactttggtttatttgtttgttccagcaagggtcatgggggtcaggctctgccgtttactcttaccttagtctgcatctcgccgaagtgcaatatgtaactcgcagacgcgtcgagggggagaagcagttgtcacaagtaggcaaaggtggccgccatcactgaccctttcctctttaatgtctcctcggacaggctatgagcagcaacaggaacaggagaagctggagcgggagatggcactgctgcgtggtgccatcgaggaccagcggcgacatgctgaactgctggagcaggctctgggcaatgcacaaagccgtgccgcccgggctgaagaggagctacgcaaaaagcaggcctatgtggagaaggtggagcggctgcagcaggcactggggcagttgcaggctgcctgtgaaaagcgagagcagttggagctgcgtctgcgcacgcgcctggagcaggaactcaaagccttgcgtgcacagcaggtaagcccagaagacctgtgcagctggcagtaccgggcacaattcaaagagtccctccctgctctctagtctttgtcctctttgaaagatgattgcttcatgttccccttggcgctgcttggtccctctcaggtgctttgtatagcaaaggctctgcctcgagccctactgtggctaataacagaaatttggtaccttagtaccagtcagtaataatgttcgtgcagaaggcttgaccactctaatccatcttcccaaaaataggaaggaagatgtctgagtctgtgcttggacataaacatctcttgtgtttaccaaccaaatagagttctgtctctacacacaactttaccctgtcatagaaggggggccaagactttgtcccaatgtgattgccactcaaacccaattcccacttcagagaattgctttttagtcgtatgtgtccctagtctcctgaccaccagaattaaggagaggatgtgaggagttttgctattccctatatctctgggtggaagtaggaagggctgtctgtatgtgctgtccatgactgaacagagggatgcatgtgagagacttcatgtgagcctgaggaacaaagtccccctcgtgccagcctttacccttgaccatgctattccttgctctacagaggcagacaggcaccctcgcaggtggtggcggcagccatggtgggtccgccgagctcagtgccctgcggctgtctgaacagctgcgggagaaggaggaacagatcctggctctagaggcggacatgaccaagtgggaacagaagtatttggaagaacgggctatgaggcagttcgccatggacgcggctgccactgcggctgcccagcgcgataccactctcatccggcactccccccagccctcgcccagcagcagtttcaacgagggcctgctgccaggcaaccacaggcaccaggagatggagagcaggtaccacagggtcaggcaggggtatctgcggtcaggggtggaacggtgctacccagtctcttcccagtgtcctttgtccctggtaaataggccccacccatagcagctctgtatgtttgacattccagaaattatagacaattgtttccctgagtgaatccctggtattcgcaggctggaggtgggtgggtacctcctaagctctggccacttctccttctctgtaagagatcttcatctgagtcttgcaataataggtgggcttccaaggccaagaggtcctgcctgccccagggagagatgtctgggtttctttgcaacttctgtgaggtgggtgggctggaggagctgagcctgtgggtctgacagtgtgacctcctccctgacagattgaaggtgctccatgctcagatcctagagaaggatgcggtgatcaaggtccttcagcagcgctccaggaaagaccctggcaaggccacccagggcaccctacggcctgccaagtcggtgccgtccatcttcgcggctgcagtgggaactcagggctggcaagggctcgtatccagtgagcggcaaactgatgcacggccagcgggaggtatgaggaggcttggtgtgggagggaaaggggtaggaattttggaatgcatattaccagactctcagaatacacgcccactgagaccagggcttcctgaccccctcttctaagggatcgggtttagcctttggctcccgtgactgcaacctacatgggtcctgctagtagagtggatggatgctggatacagatagatctaggcaagggtgttcctgagcaaatactaagaaatcctagattccagctacaaagaagggccacagaacattgatgcctatcctgaccccatttattcctattttaaaagaggagtcttgctgggcgtggtggcgcacgcctttaatcccagcactcgggaggcagaggcaggcggatttctgagttcgagcccagcctggtctacaaagtgagttccagtacagccagggctatacagaaaaaccctgtctcgaaaaaaaacaaaaaaacaaaaaaaaagaggagtcttttcattctattagacagcttgcaaattaagaactacccagtccaccaagtttgcttggggtgtcctccattgggaccgtgtctcctacatcaagctgtacccatcagtgtccattctttcttacagaccgggtcccagcagaggagcctccggccacagctcctctccctgcccacaccaaacatggcagcagagacgggagcacccagacggatggccctgcagacaacacctctgcctgcttggcctcagaacccgatggcctcctggggtgcaacagtagccagaggacaccctctctgggtaagcaccccacttggttagatgagggttgggaacatggtagaggtgcaaactggaacgcatgggccctgttttccccacgtttccgcaaactcatccactgtggaaagccccaccgtagcgaactgagggttgttggaagttgtctcaatgggaggcagggccatcgagccatttcagaaagaaggcaacgcaacaggaagcactctaactcctccagagttgccctcacatcctcctgtcagtccaggagcttgacaagtgaactcaatggtgatcttgggttgggaagctatttggaagagcccagaaaggaggaactaagccttttctctttctactcttgtttcacatttgcccttgcatagctgcctgtgtgtgccccatgatctcagaaaaaccacaggcatgacaggaacgctacagcctgcttctaaccctgggagcacccttccactgatcattcaagctagttcagagtctaaacacaggcatgggcttcctcggcagaggggagggggcacagccttgtgcttagttgatcaagggaagaggaacctaagggctgaggcagcttaggggagggggtcttgtttaaaaaagaccctgtgttgggagctgaggagaacaagtggatagtactgacagcatacacttgtcttcttgttttttctccagactctatagctgcaaccagagtccaggatctgtcagacatggtagaaatactgatctgaaggaaggaggcagtgccttggggaccccgaagcctggctccctcctggcattccggcagttgtcttcaaatgctgtgcctcacatcctccgaccagtgatgccttggtgcatggggctcagagaggagcaccccaggggagctagctagaaaagcctgcaccccctagaagactgctttttggcctatatttctcctatgacaatgaggaaggaaaagccagacatcacctgcagccggaggcctgttgctggggcagaaaggagctgagccccctccgtcctgcctgaaggaaacagcggattctgacgcccaagaatggctgggcaccagccgagcggtctgcagggatcgttaggccagctatggtgttctgtggctaagcatggctccagccaacactatctgctcttcagtccctgactgacttcctcagatcactaagacttgaatccttgggaggtgggggacgatgggagtgtgagtctttcgggagccaccagcatgtccccttggagtaggttagaggtcacttgagaggccccgcagagcagtgtgttttgtatataattctttttccttgggaacagaagactaagcgtgccggttcagagtctcctccagggctgtgctgcctgcccctgctgccacagttcttgaaacatgtgacaggtctaccagatgttcctctgcctgcagttcctggctgtggattttgatactggttggctttcctctgctttttaaatccctgtgtttcgtgcccatgggattcttatcaccagcctttgtgaatggctccacagctcctatccctgggacatcctgtcagtttggttataaactgagccagatgtgatgagccaccacaagcggacatctgtcatgcccagcaccaggttctctttgaagaaactggagaagttgttctcataaatgtattcgttcccaccagcagggactgggagagggagctatgttgttaaaacgaatcagtgaacttaaagaaaagtcctcattatggtgcccccaccacagaatggcacccttagaggctggctcctcaagttttggtgccccagccctgaagcagggccagctacttggaattaggtgaactacccccacgtggcagaccaccagcagcagtgactttgacttctggtcttaaagcaacccccattcagctcaaaaagcgattggtggatttcagatcttttgtgtttttctcctctggttgttttgtttgtttttctttcactgtttgaagttctgtctgttgtttgttccattcccatagttctctctgcatttcctttttaaacatttgcatttgctgggcaattgcgtatttttttaattccctttcccctatgtaaagctgagaaatacatctggttcatgtacgttgtttacaaagataaaagtttttaaaaaaaaaggagggggaaaagaaggcaaaaaaatattgtgaaaggaaaaaaaaaacaacttaatatattttggattaatatttggtatttcttttaaagtattttttttgtgctgtgaacgttttctgccaaagaccatgacgtgtgtctgtgtgtttaagttatcatgaatatttaaagtgtaaacatggctgttttgttacgccactctgtaccaggattgctgctgcattccgccaggtatgacagtattttaataaaaaaagagcttataaggag

SEQ ID NO: 5 - DNA, 17038 bp, Mus musculus
gagacagccagggccaaagccctgcctgacagctctagagtggaccccgtgcaatgtgaagtctctgggctctggtttcagtactctaggccctgtgtcttccacaccagccttcccagagctgggcaatgagtccacctggaatgtgtaactgccacgctcgtcgctgcacttaaagaattggcctctgccttccctgccaaagcaaagattcagatcagcagatccagcaaggccagacattgactgggaatggtcccctcaagtcaggaccagcggtgcctcctcttgggtgagacccgagtgtttttttttgtttttgtttttgttttgaggaccaaatatccatcacttgacagagcctttattaatggtgatttcatcgtggtcccagtcataggtgaccttgagggaattgaatagaaggaaaacaagagacttgggggactttgaaagtgttgggacagtaaatgacacaggtctggagagtgaggaagccacaacaggatgctctaagaaaacctttctttctttctcttaaaagatttcttttattatttacgtatatgtatgtgtgggttccctagagggccagaagaaggtgtccaatgtcatggaacaaatgtgatagagtattgtgaacagcttgatgtaggtgctaggaacagaactcaggtcctctgtaagagcagtggttagtaagcacggggcctttctctctagtcctagcaaacttttacagctagagaaggtgtgggggctgcccattccaggatgttcattccagcattgtttagtaacagtgaataattgaaaataacaccacggtctaagcacaggggacagatgaagaaattatggtttagccatgcacaggtgaagctggtggttcacaggttggttgtctggcttttaaaggtacatttggtttcttgcagagagagagagagagagagagagagagagagagagagagagaaagagagaaacaggaagaaaccgctacctctgtgaggaggctgttccaggttgtcaaattctctgcctcaccgtggttactcaccacggtcagtctctatcatcactgggtgcagacctgtgcatgctattctctggatctggaacgttctccctgcccctttcctagccctctgccctggtaagttcttctgaccccttaggagttagcattaacattatccctctagggaaggctttttgactgtcccacactgagttaggtcaccctgtttcatgttctcattgtatccctgtaaaacttcattagtgccatttaggagagcatttgtgacaactctccctcgcttaggcattccacctaatgaaggcagaggaacgtggaagatctaaagtcaccgtcagaagcagacctccaggacccgtgtcaccctcggataccagatccgatgaatgaaaagcttatgaagcagtggtattcccatagtctagaaatgatcttccttggctagagagatgacagggtgggtgaaggggcttgctgcacaaacataaagacctgagttcggatcccagaacccagggaaaggtaggctatgagcttagagctagggagaagctacgaggatgtgaagttagagggatctctggggctcactcgccaccagcttagtactagctcaatggttctcagccttcctaatgctgaactcctttagtgcagttcctcctgctgttgtgattcccccaacgacaaaattactacttcctagctgtaatgttgccacacttatgagttgtaatgtaaatatctgatatgcaaggtatctggtatgtgaacccctgggacccacagattgagaaccactgttctaggttcagggagagtcccttccccaagggaacaaggtgacaaattagagcagaatactcagagttccctctggactccaacttccacaaagatgcacgtgcctatgatcagttgaatacttctccctacccccccccccaaatgtattgttaaagacactatctcacaatgtttctctggctggcttagaacttactatgttaactgggtagaccttgaactcatggagatcctcctacctatgcctcctatgtgctgggattaaatgagtgtgtcaccaagactggcccccaaaacatttttttaattacaaaggaataaaattgtaacttcagaatgtgtggggcagtgggcatgggggaataaagagagtgagagaaaaacggcgtccggccagagttctggtgctctgggcaggtggactcaggaggactgccagggtgggtgtctggctgtgggaagccacagaactccagcctgcagtggggtggacaaggggcgtctcacagaggccagagataacaggttctcagtctcgggcgtcccagacaccgctggacacggtggaagagctgagaacaaagtggggccggtcatccccagggccgaagggaggacagggcagggggagagggggctctggggggttctcacatgggtgagagtctttggtctggtctgtggctggagtgcaggaaggccttccagcgggaggttagatgtggctctttagaggaaagcttattccatcgttcaagcacagtgggccttgatgagcagagacagtctatggttttagagctttattgtagagaggcatggagaaagagaggaggtagaaagagagaggctggccatggccatgtggaaagaggggggaagggagagagagaaggaggactagagatgagagtaagaaaggtgagagcttaaggagaaagagggggagccaagcagctccttttatagtgggctggactatctggttattgtcaggtaactgtggggaggagtctagccagaatgtcaggagcttgggggctttatctgtgtgactgatagtcacagaattatggagttggggaccctgtcgtatcaggcacctgtctctggggatgtggctcactgttccttcccttgtagagttttctactgagtctccggagcaagtcccattcaaccaaaacaggctgcctttcacagccccacaagagtggagaaatcttaagccatgtgaccaaggtaaacatcaccagtcattggacatagtgccatcatgagccctgtatagaatgtaccaagaagggcaggtcacatctgtggctcccttcccaccaaggcacaagatgcatctccatatgggaaaatatcacacaattgcaaattctctgttgttttgcttgagacagggccatcttatataacccaggcatataagagctcatgatctttctgcctctatctctccagtgtgctagggctacaccggctaggactttaaaaacaagaacctttctattccatttatgattggggtgggggtataactttcaggagttggttcttctccttctaccatgtgagctccaggactcgaactcaggttgccaggcttagtgtggcaaatgctttacccattgaactatctcccaaccttagaccactactcttaaaaaaaaaagtcttaaggcagctggatgtaatggtacatgtctttagttgtagcagtcaggagactgaggcaggtggacttctgagagtttcaggccagccagttcaaaagaaaaaaaaaagttagggagaggtggtttagtgattaagcgcacctgctgctctagcagagcacctccatggtggctcacaactgtctgtaactctagccccaggggatcctcatctatgggcaccaggcatgcacatggtaaagacatacatggaggcaaatcacacatacacataaaaatagataacaggtgtgcgccaccaccgccaggcagattcttagtgaaaagctgttgtgtgcaaggatttgcttcatgtctatgtcaccagatagcctattagcttcatggagtccgaggccacaaatcctgtcttgtcattgttatctcctgacgtgatgtacccagtaaatatgtgctgataaacagatacagttacggacattggggacatggggagtcatggaaggatgtggagggaatgggggaacatgggagacatgggggatcgttgggggacatgggggcatgggggatgtccatgatgcattaactgacaaaataggacatgtgaggccagttttatagcttggttggcatgacatcctgggctcattcattctccagcactggaggcaggaggatcagaagttcaagattaccctcagccacaccaaggtcaaggccggtctgggttttgtgagatggtgtctgaaaacaaagaaaatttaaacaaccaaaacctatgacacgaaataactcatatgatctggggataagagcacacccctgtaatcttagtaattaagaggcaggaagattgccaaaagttgagactagtctggtctatccagtgagttccaggccaatcagagccacaaagcaagaccagtctcaaacgcaattgcttaattaattacaatttaaaagtaaacaaaagcaaaaatacctatgccaatgtttgcttaaataaaaagaacataaagaagaggggtggtggtctcattcacctttaatctcagcactcaggaggcagaggcagggaaatctctgtgagtttgaggccagcctggtctacagaacaagttctagaacagccaaggctacactgagaaaccctatctcaaaaagaaaaaaaaaaccataatgattcagaaataaactggggacagtggctgtcactgaaagaaatagtcaaaggtgatctttattttggtcttaaaaaacaaaacaaagggctggtgagatggctcagtgggtaagagcacccgactgctcttccgaaggtccagagttcaaatcccagcaaccacatggtggcttacaaccatctgtaacgagatctgattccctcttctggagtgtctgaagacagctacaatgtacttacatataataaataaataaatctttaaaaaaaaaaaaaaaaaaaaacaaaacaaaacaaaccctttgtgctgcacctgggtccctacacacagacctggagccagtccctgtggggcgggcagccgatgcaagagtatgagttcggcaaactggtaccaggatgcaggatagccacaggcagcgtagggatacagtactgaatggaggcagtaatcgccctccatttctcagctctgtgatccaggcagcttatgtttcctgagcacgtcttctaaactggcacatccattcccaggaggtcggaactcatggccatttgttgtgtggctcacaggagtttttcctctcacagttctggagccttctgaggctaagatgtagtccagggtacaccactctgaatgtgttgtgggagacgtcttcttgcctcttctgagcttctagcactgtggctctcaaccttcctaatgctgtgaccctttaacacagttcctcatgctgtagtgacccccgaaccataagattagttttgttgctattgcataactgtaatttgttcctgttattcctgaattataatattaatatgtgtcttcccatggttttaggagacccgtgtgaaaggatcaaactccaagagatctcaacccacaggttgagaaacattgctctagaagctcttggcaactttagtattcctctcttataactgaaacacgtccatccctacctctgtgtctctagatctaaatcttcttcatatgctctttctaatccagtgtggccatatccgattccttcttcttcctctcctcctcttcctcttcttcttgagtctcacatagcctaggccttgaactgactatcctgtcaaagatgacctttgaacttttgctcctcagatctccaccccctgaaccttggacttacaggtacattgcaccatgctgagtttatgtggtgctggggacagaggccagggctttgtgcatactgggcacaatgctctacaaacttagggacgaccaccgctcagatgtcatctgattttgattatacctttgttttggtttggttttttgttggttttgttttgtttgcttgtttttttggtttttcgagacagggtgtctctgtgtagccctggctgtcctggaactcactctggcctcgaactcagaaatctgcctgcctctgcctcccaagtgctgggactaaaggtgtgcaccaccactgcccagcttaattacacctttgaagctgtttccaaataagttatactctacaggtaaaggggtttaggtcctgaatatctaatctaatctaatctaacccaatctaccactgatacccattttctatcactgcctatggtgcgtctcaaaaacgtaagaagctgtttaaagtaacattgtatctactcacaattcaggactcaacagttagggctgggctcagctggaaagttttgctgatttctcctgaggtcattagcatggttttttgtttttttgtttgtttggtgtgtgtgcgtgtgtgcatgcgtgtttgtgtgtgtgtgtgtgtgtgtgtgtgtgtgtgtgtgtgtgtgtgcgtgtgtctccttcacagcctctcaggctctcctggtggatcagatgaggtctatgcacacgcagctagacagaggataaaagcatacgcttccatgcctgctgacccttccagcctgactgggctgctgtaggtttttatggtcatgcaagcaaggcaagttcaaattcaaaagactcaacttctctgtagaagtggcagaggcagattacaaaggggcctgcatatggcagtagtggaagtactgagctgtctttacaaatgatctccgtagacctccagttctggaaacataaggtaaacagatccaggcctttcatgttagaactcatcctagcagctgaccaggctcctgtggggaaagcttggtgagtgcgcatggatgtgcaaaagaaagcaaggtgctctattgtgagtggcagacagcatgactcccatgccctaggcccctggtggccccaatcagagactaggatcataatttaagtataaagcaaagatggcccaacctcaaaccctgaagaaacagctcagattcatatgcaatgctcgctgaggcaagatgttttatgacaagagctggtagggaaattagactggagttactccttggcagagtcccctgtccctcccttcctgcggggtgagctctctgcccctttccccagtgactgctccacagagctctggcaggccacactgcagtgggagggaaagccctgggggtatatatcggatgtcataggaggtgaagtcctggctgcacttttcactgtgtgactttgagcctgtttcctcatctgtgaaatgtgggctctcggagctttcataagaaccaagaatgctttgccaatgctgcaatcatctctgaggaccacacagcccctggcttgctcatgcatgcatgcaatagtcaaccttgtctgccgagagcaacatactcttcctaggacttttctctgccttcttcatcctctgccagtcctctcaagcctgagctttgaatgagaacgccatcttcttagttatcctctccactgtggatcttagatttctctcctgaggttaaaactttctttttaattatattaaaattcaattctgccgagcagtgatggcacacgcctttaatcccagcacttgggaggcagaggcaggcggatttctgagttcaaggtcagcctgatctatagagtgagttccaggacagccagggctacacagagaaaccctgtcttgaaaaaaaccaaaaaaataaaaaataaaaatttaattttaattcttattggttgaaatgcctttcattttttaaattaggtatatatgtgctggcaaaggagtgtgtgcatgagggcaggtcccacagatctagaggaacacgctggattcagagtcccttgtgagcagccacaccaggtaaaccaggagtgaactctggtgtacccctgagtcattctcctgcctgacttttcttctctttctgtctttcactcatgtgtcctaccttcctttctatcttttcttttcttttactttttttattgcattcccctaagatggggactgatctgatgccagggactcctgcaagccatctaccactggaccacatccctagctccttccctgaggtttctcaatgtgaatggccaaagaactggaggtttcagaaccagaaacctctaactggttatgtgtcccaccgtcctggggaagaaccagaaaggaacggaagaggccactgaatcctggggctgggtcaggccagctcccagctgtttctgaagactttttctaaagaaacttccccttaacataaacttgcagtgaaaggaattttcactaagacggttggtttgttcaacgtttattgagcaattcaacctggcctaccctagacacacagcagagacatcgtgagtcctttcccctgaagaaagaacaggctcagagtgtgaaaggagctgtcactcagaaaggacatgctgaactcaggggaggctgcaaaggccttgtggagggaatgccttaagtctgtgggtgagtctttttggcagtgctgaaattcaaagtgagaagtctcacaagagacaggaaatgttctgtttttatttttattcattttttttctcttcccccttccctttctcccttttgctccagacccactcgctctgcccccgcccctcccctcgctccaggcccttccccgctcactctgggcctttcttttctttctttctctctctctctctctttaagatttatttatttatttttatgtatatgagtacactgtagctgtacagatggttgagccatcacgtggttgctgagaattgaattcaggacctctgttggcttcagtcccccctgctcgctctggtcaacccggctcacttagacccaaagatttatttattaaaatatctaagtacactgttagctgtcttcagccacaccagaagagggcgtcagatctcattacggatggttgtgagtaaccatgtggttgctgggatttgaactcaggacctctgggagagcagtcagtgctcttaaccgctgagccatctctccagcccccttcatttatttcttaacaaaaccaaaccaaatagggtctcatgtagcccagatcagctcctgattctccaagtagctagggatgaccttgaatgtctgatcttctggctcagcctcctgtatgctggggttacaggtgtgtgccctcatagccatttttggggggattctgaggattaatcccgggccttatgcacagctacattctcagctcagagactagaatggttcagaaaagccttgttagcttctgtgagtgagcagaaaatggatagacagtgccttgcttggaactggagtgtcctcatggactggggctcaggcagagaagaatagggagtcattttattctttggatttcttgtttcagtttggcttgggtttgctcttgtttccatttgattttccccagattttttttttccttctggcttatgagggcagtagctctgtggaggtcgtggggcagcaccaacagtctaaacagttgtcggttccatcctacagagctgcgtgagatggattctgaccacctcgctgtggattggcgcagctcaggaagcagtgcagcttgacacagagcttgggaagcacacccccattgatggtgcttgctttgcaaacatccctgattgctgcggcctctacaatcctctgaatgacgaacaacttcatggcctcgtccttgggcacacaccggtcaacatcactgcacaaggttgaggccctttttgacgtgatcgctgtttctttttcctgtctgtctttctctctctgtgtctctgtctctgtctctgtctctctctctctctctctgtctctctctctctctcgtcaccttgtagccaagacctaaaaattcttgtgggttttgttttcttttactttctgtatatgtgagttttatctgcatgtatgtctgcataccacatgtatgcctagagcctgtggaggtcagagagaactttgaatccctagaactagagttacatacagatggttgtgagcctgccctgtgcagaagcagaaaggacttgtaactgctgagttatctttctgtttgtttgttgtttgttttttacagatttatcctatttttcatcacatgaaaaataagatcttgttttcttaagtaattgcagagtgacagacaccagagtaaggacttaatgaaccaggcagaaggacccttcatctaaagcagccaaagagtcgaatgattagaagggagcataagagaacgtggttagctcagtgcaaagggattaccaggacacatgtactcaaaggcattgttaaagaccaaggacaacacagatgccaccgtgaggcagtgtgaacaggtgaggcgtgaaatgcacatagccagaaaggcggcaaagattcagctccatcttcctggatactgccctgtttgcccatccaacccacaaggcacccggttcagcttctgcaataagaggcagtatgatgccccaaaatgtttgataccaggctgtgatagccctgaggacaagatctgccttgttcctgtggcagacccagctccagcctagacctggcattgggtagaggctggcagttaagagttgctagcaaatagatggcttcagaactttccagaaagctagtggctgatagaaccaaggaattccttagaccagagtacagaatggcaggaaagcaccaaagtacacagcaagctcagaccaggagagtttgatctctgtgtcgagctcagagatggagaaggacccagtagggtatcatgctattataccagagctacaaggaggtcctggtcctggataggaggaactcatgggcaaagggctaagggcaaactaggaacctaagacctgtgcaaccatagaaaggctcagtagaaggacccagatatagctctctcttgtgagactatgctggggcctagcaaacacagaagtggatgctcacagtcagctattggatggatcacagggcctccaatggaggagctagagaaagtacccaaggagctaaagggatctgcaaccctataggtagaacaacaatatgaataaccagtaccccggagctcttgactctagctgcatatgtatcaaaagatggcctagtcggccatcactggaaagagaggcccattggacttgcaaactttatatgccccagtacaggggaatgccagggccaaaaagtgggagtaggtgggtaggggagtgggggggggaagggtatgggggacttttgggatagcattgaaaatgtaaatgaggaaaatacctaataaaaatatttaaaaaagaaaaagaaaaagaaagaaagaaaggctcagtagggcctgggaagatagctctgtcaacttggggcttggactttgatctctaaaactcatgtttaaaaagttgtgcatagagccaagcatggtgatacacgcttttaatcccaacactcaggatgcaaaggcaagctgatctctatgaatttgagacacaactagactacaaagcaagttccagattagccagagctatagagcgagggagaccctgtctcaaaaagagacgggggtgaggggagaggagaaggaggaggaaggggaatggaagaagaggaagaagaggaaggagaaggaagaggaggaagaagaggaggagagagctatgtgtggaatgtacgtgtaaccctagggttggagaagctgagaaaggtgggttcttgggggctcacatggcaagctttaggccagagagaaactagtctcaaaaaaaaaaaaaaaagaaagaaagaaagaaagaaaagatggtgtttgaagaagctgatttttggcttccacatatgtttgcatgtacattagcatctgccctcacttgtgttcctacaccacacacacacacacacacacacacacacagacacacacacacacacacacacacacacacacacacatacacagcaaaagatctgaggtctggtccagctatctctggaatgttcattatggtcaggccttgtatccaggctcagtaaaagtccaagaactgagtggccaagatccatacttgggaacctgagtcagccctggcagagttggtagatactgcaatcgggtgggcaggagctataggcagggtccctgcggcttgtcagaatgttgccgcctgggccctttcagctggatgctgggttggtaggggaagagtactagtaggagcagagctgtaggcagggtagagctttgggtctgacaaggtcagagctactcctgttctggaaaaagaaagtcagggtaaacatctggcccgtaagtaccatgaacaagcactcaagggtacaggaaaagggtcagaagtgtggcctgaaaggaagtcgaagccatcaaggaaagccaagagtgttgaagcagggttgaatgctaccttggctgtatgtgtgacactagagaggagatgtaggtgggagtgcagtcaggcccaccatccatgattccaaagcccaccacaccttgcaccatgctcactctttaacacctttgactcaaactctcaacagcaacctccgtgaaggccgaggggcatccgagaacaggagcaggcaagaagcctgtgcctcttcatccctagacacatcccttcttgtagactgactactgggcagtaaaccgtgaggataatgaaacccagaatcccaggatggaggaggatgctgcgtggctagcaagcttcaacccttttctagaatggaatcctctttagtaatatagtgggttctcaagcaactaggtctggcctgtaggcctgccccaccctgcctgatcctcccaagccctggcttcccgttgggctggtcctaccaaggtagaaggctccagggccatattttgggcccttccctcccctatacctgcgtcaatgactctttctgccttccaccctagctttaaggagggtgctcatcggaggcttggctcctcatcaacaacccaaggctctccagcctcatcaactgtcaggcagattgggcttggctgtgcttctgatccaagttctccaccactgcctacctcagcaccctccagtgatgtgcaagttcccaagacccaccttaatgcccctctgcccagctccagttggtggagaccaagcacatgggcagggcaggagtgtgagacttcctagcctttcccccttgagccgacccttcaactaccccctcacttcattcctatggaaagaccaagccatggtttataatacttcctctgaactcttaggaggaagatttttataaagcagggacttgaagactggtaacaccatgttctgaaggttgctgtagtttgcaattagttcttcaccaaagcaagaaagaataacaacatcagccacaggcctggggggttgggaggggagcagggaagcttgaaagccaattttttttatatttaaaatgttttattttaaaatatttttattatttttaatgatgtgtggaagtgtgtctgcatgtagtgtcatgtgaatccaggtgcctgcagaagccagagccattgaaccccctggattacagctacaagggctgtgagccaccagatgtgggtactgggaactgacctcaggtcttctggaagaaaacaattgctcttaacctctgagtcatctttctagccccataaaatgttttacatttttgtggatgtctctcttgcatgtatgtctgtgcccaatttgcatgccccatctctgtgttggacataagagagcactggattccctggaattggagctactgatggttgtgagctgccaaatgagtgctgagaatggaacctggatcctctataagactgacaggtgctcttaactgctgagccatcttcccaaggccaagcatcattgtcaggagctactggactgccatgaagagtagactgtagcagctcttggcagttttccctggggctgtaggcagatgataaaacccacagtataggagtagatgtgcccgacagaggaagcagagactctataggaaacacagagctgaggctgggtacctgggagcagccagaagatctcacagtgcaagaacatgcagtagatgcagatgagttggctgcataaggaaggagagggaggacaggaaatggaccaggctgatcaagataccagaagaatttctatacagctagagtgaggagagcgtgggtaggacaggcaaccctcagggaacgcccaaggtttggaagaagactctttggccaagtggtcatttgataaaggggggtatggcttaccattgaggatcctggccatgtctcaagagaataccctcgaatactcgctcactcctgctttgaccccatgagctttagatatgactgaatctgacacacacacacacacacacacacacacaaggggggagtattggatgtgtacaagtggtttgctgacattcatgtctatgtaccatgtgtctaaagtgccaaggggcccagaagagggcatcaggtgccctaggactggagttacagtcagttaggagtcaccatttgtgtgctggggatcaaacccaggtcttccataagagcagccagcactcttaacccctgagccaactctccaaccccacatggctgaacctttaaagccactagagtgagttctatcagctgttcatctgtcctcctgggacagaagtggcaatcctgtatacttcactttcttaaccatgtaaggaacttattttgcaagtaagtgtctggagctcaaactgacccaagaatttgactgaagtcacacaacacatcagacacagaggaggttcaagcctgtctaatatccaaactctgggtaatgtaaatagttgatatatgcttgtcacacatatattcaacagattccctgggcatgtaaacttgggaaatgctggtttcagtgaacttgagcagactcttttcacagcatggagaaaaactttaggccatggactcttgtcccagttggagttgctgtcccttagaagcaggacctcctgtcctgtaaggtcagaggtggggcactggaggcctcttacttcaagctgtttatattctcactttacatctatggctctccccacaacacatacacatcttatgtgtgaggagaggggactggtttttaattagactttgaagaatcttgggtgaaggatagtggggaagccaaacacctctgacccttagttgtcacaagagataccttcattctacgtacagggcctaaggccttgatcatctatggtgacatgtctttgggacactgccaaacaacaaagccatttcatgtattaaagtttgtttggaagggacttgtggatgtggtatcattttaataaaaagctgagagattaagaagcagagttgaggtggagagaaaagagccacatttaggggaaagagcatactcacatagcccagtcctgggagaagccaggaatggagctgttcttgatgcagcaaagaactggatttggatctgcaggcatgagaactatgggagatgcttgaggcagaggtcatttgatgcaatctaggagtagggactgggatatgagtcagttggtagagtgcctgccctttgtgcacaaagacctggcttgggtccccagtatcgcagacacagagactggaggttcgtgcctataatcccagctcctgaggggtagaagaaaaaggatcagaagttcaaaacgttctctgctacatagcacagtcgaggccagcttggaggccacacacacacacacacacacacacacacacacacacacacaaactcttaaggcacccccccaccccagcttctctctcatttcttaatggaatgccagcttgcacacagctattccacatcttgccttttttctcccctcctccctcctcccctcctccaaagcctctttggcccagcgtctttgtcagcagtgttcccttaggttctcgctgtatgaagcatctttctgtaacttctgctggagaatagcttctgtggacaccacggaatgtctggttattgagaaagtgcggagagatgaccttcccccctgaagagtgccattggcacacttccctcgaccctttctgcctcctgagatcagccttcctgaagtccatcccttccggggaatggggcatgccagtagggtccccagggacattctccccagctatgctggacacttccccaccctctagagtagatgccagaagaagaagggcaagtggaaatgggggtgggagtggaggtagcgacagagtggagacagagaaaagggtctgactgaggcctgtgacccctgctgcccccaacccatgcttgtcatgaataaggccagtggatggagaaacactagtttctttctggcttcaaggctctggttggattactcctttgatgtgtttgtcctttggcctcaaagggacggcttcgacttggtagctcatgatagccttaagtacagcaatccaaggtcaccaggccctctttctaacacaagtccccttctcccttggctttcaggaaggaccaaggccccagagcctcgttaatctgttgtcagagtccctgatggcatgctaggtatttttacaattgttctaaaatcccattatctccaccgtccgggttgcacaggggccgccattggctgaatacgtgaccgaccaccaatgattccctccagggaacgccaggcagagctccctgggctgctggccatcatccaaacatgctcctctccgtggaaaagaagtgatgtcatacacggaaggggtggtctccacgcacaggatacctgtaaacaccgaagcatgtttcaaagaaaaacaaaagtcaaattacagagctgc

SEQ ID NO: 6 - DNA, 73388 bp, Mus musculus
cccgttcccgggcggcgggtctgaagcggcggcgcgatgagctggccggccgcccccggctcggggctgtgaggcgctcggggccggggtgcgcggcggcgcggcgggcggcggacgctcctgctcggcggcggccatgcgcgcgggccggggcggcgtcccggggagcggcggcctgagggccccgccgccgccgctgctgctgctgctgctggcgatgctgcccgccgccgccccgcggtccccggccctggccgccgctcctgcgggacccagcgtgagcctctacctgagcgaggacgaggtgcgccggctgcttggtgagtggcgcggctcccggggcctcgtgagcccgcggtgctgccgctgcgccgcccgcgctctctctctctctctccctctctgcagcctccctgcgcgtgtcactctaggccgcggagctccggagcctcggagtcggcgctcgggacacgggtggccgctccttagcctgctgtgggtggcccacaggccacgccgccgccgtgcgcttgctttctggttagcgagtggggggcaaggtgagccgggcgccctgagttgtgtggcatcctgcacaccttcgggccgaccggatcccaagcatcggggtttgccttgggttccttgagtgtgacctgatgctgccgttccaggccacttgcctactctgcagaccctgaagcgagaggagaacttggctttggggtccgtcggcggtggttccgtttacctgtttagcccgttgtttggggagtccgactctgccctccgcttggaactctgtgcattctgaaaatcagcccttgaaggaaggcctggccagccatcaaaaggaagtctctgatagttagggatacccagcttttgccgtcttttgtgcattaaggcagtcccttcactttttatcggggtgttttagagtgaagtgttggaactggaaaggtctccccctaaatatccattaagtgtcacttttttagtgagcgagtatgcctcccccaagtgtgtgtgtgtgtgtgtgtggtgtgcgcgcgcgtgtgtatgcgtatgtgtgtattagaggaggtttttttgtttgtttgtttgtttgtttgttttgttttgtttttcctttccagacagggactttatgtagcctgggctgttttggaatccactatgtagaccaggttggcctcaagctcacagagagccttctgcctgttagaagagtttcttagggtctgttgagagagtttagcctcggaatgaaaactgcttttagcagactgtttagacatagttgtatgtgtaggtttatcggctttaactaaagaactgtgttttcctaacatcctaatttaaccttccttatagtctagttgaattagctgaatttagtctagcagaattgaaatggcatctgagttacgcctggagcatgggagaaaggcttgggaaaaaataacgatttgtagtgcggctcctaggcgtgcttttgtaagggttgtttttgttgttgttaaaagaacttacgtaattgtgactttattgacatgtatttcctctcctgccttagccaggatggaagtagggagacagagatatctggcagcagacagagacgagtacatgtgcctaccgttgcgtgttagagttttgctgttacttttatttattttggtgtgtgtgtaccacgatgtgttctgtggaggtcacaggacaccttgaaggtgtgggctgtctttccactattaatagggggtcccagggctcaaactcatgtcatctgactggacgacaagtgcttttacctgctgagccatctagctggggcttgatatggacttaaacatgttgtttcagtttcttgttacccagtggggcaattatgggagatgagaaaagtaaggctttcagtaacttgctgaaggtaacatggtttatttcatatattacatatataatatatacccacacaagacagtgtttcctggctgcagactaagttattgaagggcatgtgcatttagaagtttgattatggcatgttaaaaaagagactgttgttcattagtacgtgaagtgatacctttgtagcctggaactgattttcttaggacagtagctgagggggcacctgatggatgagcacctggtccagtagtgtgtgaaatagagtggggagcatggctcattaatgctcccatccacccttaggtatttcagttccatgcaagctgagttgtcctgttacaatgtggtctctagatagtcctcttgcagaaccagggcctctttctgtccctttacgtttccctcagctgtgctgctgttgaaggattcccatctggctttgtctgggtggcaaagtgcaagtactgggacgtttgctgggcctcctgagtgtggctgtgatggtgtgtacgtgcgagactgttggagatagtgctttccaccacgttttcctttgcgtaaagggttaagtgacttccaaaagctcaggcaagctagtgtcagttttacagtgttgctgagacccagggttcagaatgccaggtgagaacttggaagttggaagtgacaactctgtggagctggctgtacttgataggagaagtgcttttaatccagacattagctgcacataatagaaatcaattggataatagcaaaaaggccttgaaccagaagccatcagcaccctgcctttgggctttttgccctccaggtcccactgccccagtgggcgtagttcacacaactgtggtggagtttgtctttcccttgttgtctttggaatttctagactagtgtggactgaacatttgtcttctggggtcctccttgttcatcagactccccagggcaggtgggttttttttttttttaattttaaaaaacatcccaatcacaaaggaactcacacaatatctactcactgataagtggatattagcccagaaacttaggatacccaagatataagatacaatttgctaaacacatgaaactcaagaagaacgaagaccaaagtgtggacactttgccccttcttagaattgggaacaaaacacccatggaaggagttacagagacaaaatttggagctgtgacgaaaggatgaaccatctagtgattgccatatccagggatccatcccataatcagcttccaaacgctgacaccattgcatacactagcaagattttgctgaaaggacccagttgtctcttgtgagactatgccggggcctagcaaacacagaagtggatgctcacagtcagctattggatggatcacagggcccccaatggaggagctagagaaagtacccaaggagctaaagggaactgcaaccctataggtggaacaacattatgaactaaccagtaccccggagctcttgtctctagctgcgtacgtatcaaaagatggcctagtcggccatcactggaaagagaggcccattggacttgcaaactttatatgccccagtacaggggaacgccagggccaaaaagggggagtgggtgggtaggggagtgggggtgggtgggtatgggggacttttgggatggcattggaaatgtaaatgaggaaaatacctaattaaaaaaaaacatttatttttatttcatgggcattggagttttgcctgtatgagggtatagcatcccctggaactcgaggtacagacagttgcgagttgccatgtgggttctgggtattgaacgtgggtcctctggaagagctgccagcactcttagccacagagccatctttaatcctccagtgcatgtttaaaccagcagtcagttgccacagtggtctggtctgtgccctcagatggtcagtatcgatgctatagcgtacaaatacattgcccttttctgagttcgatatgaactggtagacaccccctcccacactcaccccctttgttcgggttttccctttggatcttaaacttttttttgattagcttgctttgtgtctgtacatatattctctcgggtaccccaagaagcacgctgagtgccttttgatccccagtccccttcaggcagcactttaagacatctgttagttccattggattcttctcagtggtaccttccttgatttagtgtcatccatcccttgcttcaggctggtcagtagcactttatacctctctgtcctctcttggtctcctgtcctcctttttctttgctggttgtgtgtatcctcaggggaaccctaaggatggggttcatggggaagagatattatttgaggtcctttatgtctgaaaattttcattttaccctcacactttgttgatggtctggatgactttagaatattaggtggaacataatttttgttcacaatttggagggttattttctcttgtaaggatttcagataaagagcccaaagccatgtctttctagctccttcccccacccccttcacagtttttagaattccggagtggtttactctggaattactctggtattctgaagtttgttaattgggttgcaaagccttcagttttggggagtgtttgtttgctttttaaataatatcctatgccttatttcttcctatgtgggtttttttttttctttctttcctgagatggctgtcgtgtgtctgttgattctccttaagttgaacttcatgcttcttgtcttacctttattgctttgtattgaaaccagtggacagagagttctcctcaattttgtcttaccagctttcattttaaaaatgttactgatgtttgtaagttttagaatctctttttttttctgtatttgattgcatcttgtgaatgttttatcttaacttttttattattgttgttgttgttgttgccagaattaaacagaattcttctgcttgtggttctggctgtctgatccttggctttgtgtagtgagatgctaatattgttaggagggagaggatatgctcgtgtgctgaccatccttgctgtcagccagagtgcaggtgggcatttcgctggaagcctgtcccgaacaccagtacagaattttgtatctaattagggctctctgctcagtgtctgtaaagaagccccaggaaacttcctgcctctggaatgccgggtgataaatcagctgccaggccttgggttacctggttggggaggaatggaagttttcaccctcaggctgtagactttgacttctggttataattccctgcccttatgactcaatttccctagacctggggtctcctactgaacctggggacctgctgctgtggatatttgcacagtggctccctccctgtgcagcctgagcttcagggtgacctttggtacctcccaggtacctctagggctgagcctcttaaggggcttctgatcgctcctctacctgctttccatcatgcagaagtctgataaagtagatgagttttttcttccttcttggcttgataattcagttcccctaccatccaaaggctttggtcattctgagctgtgtcatttggtagttgttttgtaagggcagtggtggtcagtagtggtggacagagtgctcatgatgtgtggcagaagtttccccgtgtcagatacatagtcctcgaaggcgggtgctgacacttccaccctgtacccaagcaggctgaaacaagattccatcaactgaggcccttagaagcaacagaaatgtctttttcacagttctggatgctgggaaagccaaaatcaaagtgctgatggcttggtttctggtcagggcctgttttctggttcctagatgtatccgttctcacacagtgggagggtgaaatgagctctgtggtcttcattatcagggcactgatcctccttgtgtctttaagacctaatcctctcccaaaaccctgttgtttatctatctgcccgccatggcggttagaattgtaacatgggttctgggggaatacagaggtttttaccttagcactgaggaagcagacttggagggggtccttggtgtgtgcctgctgcatgcagtcgtcctgtggaagtccgcctatgttctgaaccgtgtctgtgtggtttcccgtgtcaccaggccctgcttcactgctctcattactgtccttagcagactacagtactggctactgtgtccatatgtgaagggtgggatcttgattcagcgtgttgtggacatcgagtagaaggccaggccttgactcagttgtgcctgaaaactggatccctgctgtttccagcagccctggagccgctgcagttaagccagaactcaaacagtgctggtttgtggacctggttactgtcagtgtcctcctaggttcactaacgtagccctgtgcgctgcaactgctggagcagtgccagaggtttgggaataagatgccggtggctgggaaggcgtggtgacagtgatggccgtgatagggagctgtggtccatggcggtgaagacagcttcggagagaaggaagcagttaagcatttcctctggctagcttgcttctcctttcaaactaaattgcttctgggaaagccatgcttgctcactcacagcttatttaaagacagttcacacttgtttaggcacttgcttctcagagcagtgtagggaaggaaaattgaaggattatatatatggagataatgacaaaaagtgattagattcctttccttaatgaagtgtgtgtgtgtgtgcatgtgtgtatgattgtcccatgtaggactgtagctctgggataagattattggaggagtggtcacttgattgtgattgatggggtgataggcagggttatttttcatttttcactatggttgttgggagggtgtttttgtttgttttttgtttttgtttttatttgtaggaatggttacttttgagagaggaaagagagtcttggagagtttgggaagggatcccaggaaaggaaacatttacacctcatctccaggttgagctagacaggcagacagaagagagaagcacttagggccaggcagagaacatggcatggagtgtgggggcagacactgcagaactctgacatggctgggatgagagccatgagccaaggagaggagacagagaagacagctgggagatcagcggattggagctgttcccctgggaatggaaagccactggagtagttaggcagcactccagaggtggaggcaggggggatcaggacttcctggctagctttgtatatgtgagactctgatttactcccctcccccaaacaaaataacaacaaaacccagccatcaaaatacagtaccccacaacaaataaagcagagataggaaaggagtatgcagtcgtagtgggttgtagaaaagatagtgtgtggctccttgtctatagttaagacacctgtcggggaacatgggttggggagcaggtgaagaggtggggtggatttatcaggaatgagcaatgagttgggaggtttacccctctgagacctcagggctaaggagaagctattctctagagtccacttttttagatttggatgtctgagccaaaggaccctgtctcagttgagatgagccaagtgttctccccagctaagctcctctcgttcctgcagagtctcaggccaaacgcttggctggacaggggtggtgtcctccctgctggtggcactggtataacctgctaggggtggctttggcaggagtgggttagcatcctgaagtgaacccttaaccctaggcgttgggttggggttggtggtattggcacagctgaatccgagcccatgtgttcttaattgggaggccggggctgagacattgtgcaattgtgggtttgagtttctttctccctgcacatatgggggaaaattctgtccaattatggctatacttgtcccatgtgagtcacagcctgagttaatgagcgagttctgaaggtgctgcctcagtgctgctcgggttttaagtccactccaagcgtaagtgtgtgtgtgtggggggggggcacgtttctcaaacactcagaactgagaacctccccagctttgctttggggttttgatgctgtacatcaactgtccttttagatcttgccagcctgagagataagaaaaacctgcccttgagaccaaactattaagttactcttaaactacagcaaaagtaccgtgctttctgtgtgtgtcatccttgtggatgtatgtgtgttctaatctggatgttactaagcaacattccattgtgtagggcctcctaaaacgttatgtgctaaaactaatgtgtgtgtgtgtggggggggggctgagatgtaaacgcttactgaagggtctgttttgctgtccccagcaatgacaatgccgagtgactgtcatccttacattttaagttgtaatagaatgtgtatagttcttaacttgggagatgcccataatctagagagaactaacacatcttatgcacaccagctatttcacacatgtttgtcagcagcatctggcacattgtttactttttaaatagataaaaccaagattctggaaaaatacacaatttgctggaggtctcagatgcatgcagttacgaagctctgaagtgcacgctttctactctgtttctgggaagggtaatagtctacccggctcccattgaactcacccggggagctgcaacaacatccagagtcctggctatacccttaccaagtggtgtagtgatctgaacttctgatcctcctgccttcccctcccaagctctggaattccaagtgtttacaactcctgcttcacgtggtgctggagatcaaaccagggttccgtgaatgccgtaccccagagccaggtcctcagcccttgtagttgatctgaagtgatgagtcagccctttgacttctgaatgcgtcactgactgtaagatgcacagcttgtaaatttgcagctgacttagtgggagttctagttaacagactgctttcccccatacctcagattaaagtgacatgccctgttatcaagggtgacactgtaataacatcatcagcctagcatttcaaaaagtccaggtgctgtcctgggagtgccagtggttttctccttcctggtaaagggggtctctatagtaagattgcatactttgctagaaagtccttaggcctggggcctcagagaactcctgctgaagttcatgggtatctctgagtcttttggatttttgagacagggtttttctgtttagccctggctgtcctagaatttgctttgtagaccaggctggccttgaactcacagggatacacctgcctctgcctcccaagtgctgtgattaaagtgtgtgccagcactgcccagctgtattctaatttcttacaagagttaaaacagttatgatggggttggagagatggctcagcagttgagagcactggtttctgcagaggactgaggtttgactcctggcagctgcatgacagctcacaactgtccataactagatccaggggatccagtgcactcttctgaccttgggtaccagacacacatgtgatgctcagataagcctgtgagcaaaatacttatacacataaaataaaataaacagaaaataaaatttaaataaaaagttgtctttaagaattcattctagagctggaaaaatggctctgaggataaatatgtattgtataaggctggagacctcagtttgatcaccaggacccacccgagaggaatgaatgacatcaacaagttgtcctcacacctgagcccttcccataaacaaacaaacaagtgaataaatgtatgtatgcaattaaaaagttcactctgctataagcttttatgggctttgacaagtgcataatgtcctctgtgtacttcatcatatagtatataaagaatatatcagatatacagagtagttttaataaaaaaaatcataggaggaggcatctgcatttataataacaacaaaaacccaaccagtcaaccaaacaaaaagccaagagagccgggaaagaaagtttccagtattcatttttctgaagtcctgctgttcctctaacccagtgcactttttcttatctcttacattgtagttctcatttcaagaaattagactttatagtcttttttttactatctgcattacttattctttgtttctgcggacatttttggccacgtggaatacggttacatagttattgctagcacaccagtgcctgttggtgagttttagttgttatctagtgctctgtacattctttcctttaaaaaaaatatgtgtgtctataaatatatgtttggatggcagatactgtgaacatttctgggtgctgagtgtgtgtgtgtatgtgtgtgtgtgtgtgtgtgtgtgtgtgtgtgtgtgtgttgtgtgttttgtgtgtgtgtgtgtgtgaaattttttgagacaggatctattgcttgccctagaattcaatgatgaggctcagctgggtggccgtccaggaagctccagggaacctcctgtccccatctcctcagggctggaattacaagtgtatgccattgcacccagcttttttgtgggtgctgggatctaaactctggctctctcttgtagcaagcatgttaggagctgagcacctcctcagcctgcctacctgcctttctttctttgccttcttttctgtttttgcttttgtttgttggtttctttgttttagacagacacttgttctgaaattcaggctagcctcctgcttcattcttcccacatgctggaattgtaggagtgtaccaggatgcatgacagctgaacatttatgaattcttttaaatatccttggattttgttgtgggatgcagttaaatgacttggaaacagtttgagccttctgggtgttacttataaggcttgttgtcaggctcattgttccccacaggtgagttaagacccttctgcacttatcccactaaaccgtgaagggtgagcctccggtctggctggtgggaggatccagattctgagtattgggcactgttcccttttaccctctctctgcccccttctggcttccacatttgcatgtcgagtcacaactcagatgggctctggagctcaacactctggaccttggactttccactttgtttagctctctgtgcaccatacctctagaatctttttctagattcgcacatgccacagcattcatggggaggtcaaaggacagctttgaggagccagttctctctgcgctgtattgagctttgggcatcaggctcagtcctgagactctgtggtgagcggtcacacctgctgagccatctctcttgacttcagcatccttctctgcactgtaactgtagcacttactacttgtggtctttgttctagggatgggtcactgttgcctcctgatgagtcctttaaattaatgaatcagttgagtccagtcttgattatatcagatgagagaatcagtcaatcttccaatattctcatcaaatgctcgttgttcatgtcttccctaaggttaattccttaatgatcaattagaggaaaaagtagccctgctgaaagaagcagttgtgtaaggcttggatctgtttgtgcaagcacgcttgtgagcatatggtaggtggcaagtgtgggagagtgtgggagcccatatgtttgcatgttagtcgcatcccttccttccactttaagtggttaggcatgtgtagcggcaaatcttgatggtcaggttaacacacctggaaagagggaccctcaattcaagaattgcttccatcagctcggcctgtggacaaatttaggggggcattttcttgattagttactgatgtgggaaggcctaccacactgtgttctgtgtcacctctgggcatgtgggtctgggctgcataggaaaactatctgagctgggtagtggtggcacacacctttatcccagcgctcaggaggtagtggcagatgaatctctgagttcaaggacagactggtctacaaagtgaattccaggacatccaggactacagagagaaaccttgtctcaaagtacccctccctgccaaaaaaagttatttaagcatgagctagtgagtgggccagtacgtgtaagagagtttctctgtttctcagtgggttctgcttcatttcctgcctggactccctcattgattggctgtgacctgccgtcttctttcccgagttgctttgggttatagttgtttatcagacctacagaaaagcaagctgtaactaatgatctgcctatgtaagatgagttgctcttcgcacatgtgctataatgcatttgaatatgctgaatgagcctcacaacagcctatgttagtcactgctggcgatttctgtatctttgcattaaaaacaaataccctaaacattttgagctgtttcatttctggttgggctctgctgaggaaggtagaatggctcatctgtttggttctgaggaaggactgggagtaagctgcaggacacagggaaggagcctgctgatcctccccaggaagagccagatacctgtagccccgagcccctttcctcacatttaactgtgtgaggaaacacaattcctggcctaagacaataggccacttaagcacaacgcactggaggcctcaagtcaccgggtcatttagatatttggttggttgcctttcgtaacagtattcttttacaagagtaatatgagcttattttaggagcatggggtatctttggtgactaaaacagataaaggacctggccttgtggaactaacttttgacagagacctatgtgatttgcctttgaaattagctttgggattggattcctgagatagtagcaccctgctgcccgtcactggcagggagaagaagcgatgcttgtgagttctctgtgttttatgataacagcctacattattaccaggcaagtctgagtcagtccagcctgaggtaaagtgtgctcctgttagcagtggaggtcaaagaagttgggcagtgctgccatgaagccctgggtatgtggctccatttctgtggctgtgtcagtggtacaggtataaactggtcatatcactttcttcttctaggtcagggaacacaccaagctattgtctagagtctctgtcttaccagatgctggggattagggctctgtggcggggaagtggtgttttatgttttaatgctgaagcttgtgtatccttgagagggagttgggaggtgccttctacactattggctattgtccagatcatatgcaatcacagtttttaggggaatcttcttacgcatttctctttgacctatattttccttgggagtgaagtgtttggttgttttaatttaaagtgtgtttgctacatttgctatagtgtttgctgaggtggggaaggtgacagcacatctatttgaaaccacgcctgcataacttcttccagagcactagcagagacaaaccagagcagcacagcttttgtgatggatggcttgagtgtctgtgatcaagcatcagagaattactatgggttttgagaagacaggtcttggtctgaaggagggagcctaaaatacaaggagcagagtgggggagtaatggccttttgttggtcagagctgtctttctcagcacccatgcttgtcttggtttttctgtatgtaactatgcattgttacctcagctctgccaagatgtttgagatagagacagagacagagacagagacagagagagagagagacgcatgaagcaaacactgtgtggtggagtgcctgagagttgttcccagtgttcctgctccagtagccacaaggcttgaagagacctttgtagtggtggaagaaggcgttcctttcctgccatcaaatgtcgcagttctctgctgagggcagccacgttcttctgggacctaaactcagaagctctgcaaaagcagcctctgcagctctggcagtcgctgctatgtgaagttaaatgtcgcttctcaataaattgtttgggtgtgcacgggcatagctagatttcgatgaacaaacttatttcagtttattattttatataaattagaaacattagaagtacgagctttttattttgtatcagtaagtgtacttagtggttatacattgcttacaaataaacaaaaaaataaataaattccaagaaaaaaaccacattgattacctttttctgattagacctagaagattgtcttgacttgaaattttttaaaagttttgattggtacgtgggagccatggatgtatcatagaatacttatgttttgggtgacatttggaaactactgctgatgtcataaaattatagaatttttagtggaggaggggattaacatcatctggtctacctcttttgtcttatagttttgaaagctgacttatgaagatggcttaggaagtgagtgccaaaggcctctcacctacttagtctcagccaggaagagaggtctgcacggtgaaagctgctctgttttcttattttaactgatgcctgacaggttgtaaaataacttttttttatcaacagccagctattcatgtgtctgccactgaatgctacaatgctaccctaggtagaggagactgctggtcctgtgagcagctctcagacatatgtcctgtcaagtgcactcttaaaaggaggctcttcagtgacatgcaacttacccacaggatggcagcattggaatccgtagttaactttcaaagtcatttggaaaaattttaattagtggattattaatttgggacttaaaattgtatagtgaagaacttatttttcttgatagggtcatgagaattttgcaagagtaacaaattttatatcatcaaatatgggttctttaacatcaaattatgaacaaatgttatcctttcttagagagagacacacgctacttccctactttgctggaattggcagcaagaagcttaagtcgagctgatgaaattgagcagctgaagtgcttatcctgagtcagaatggcagtattctgtgtgttctgatgacaaaatgcaacctagtcagtccatggcctgtggcctttgccctctctccctcctcatagccctttccactctctgcctgttctcctttccctgttttgttcccttctctttggcgctccctctttatatggtagcgtttcagttcttgagtctccatggtgctgcttctttcaaaaatcagtctgtctgtctgtcttatcatctatccatctatcatccatctatatcttctatctatatcatccatctatatctgtctattatctatcatccatctctctctatctaatcaatcaatcaatctatctatctatctatctatctatctatctatcatctatctgtttatcatccatccatgtcatccatctacctacctacatacatacctacctattacctatctctctagggtgtgtatgtgtgtgtgtgtgtgtgtgcgcgctatgcaaacagaaggtttgaggacagcctgcaggaatgggtttctccctgtttggcttctggggtcatctttggtggcaggcacctttacctgttgaacatctcactgacctgttctgtatctttacaagtggattcacacactatgggatattttttctgaccatcttcatgtagcacaatgttatggaggttcccatacatcttttcattctattttcataccataatttactttttatctgttcagggaccttcaagttacttacatattttggctgttatgaataatggtgctgagaatatgcaagtacccgactggatacatgttcaagttaggtacatagaatagaattgagggttatctggtaactgtcttaactttttaaggcactgctaggggcattttcagtggctgactgttttgtattcctaccaagactgcaggggtcttgtttctctgcacgccagctcttgctattttctgcttctttggttgtggttattctaggcagtatgaagtacctcatttttattttgattctgttttcctggtatcgaatgatgtggagcatctttacatgtagttgtttatatgtctgtcttctttggagaaatgggtgttcaagtctgttgtccacttttagattggactggtggtggttgctgaattgtaagaattgtttatatatccaggattcacatacttgccaggtgtgatttgtggggccatcctccagtctgtgtgttcttgtctttgtaatagtaggttgtttcgttgtttgtttgtttgtttgtttgtttgtttgtttctggtttctgcatagaattaaaacttttttaaatatgaattttggcttatctactctttctttccttctttcttttttgttttgttttgtttgagacagggtatctttatgtatccgtggctgtcctggaactggttctgtagaccaggctggccttgaactcagagatccaccttcctctgcctccctagaactgggactgagggcgtgtgccaccatcacctggctagtttatcttccttttccatcccttgcttgggcttttgctatcctattgtaagaactcgccaccaaggttatgaagatatatctttaatatttttccaagaattttatgggttttttgttttgtttttcttttgtttttcaagacagggtttctctgtatagccctggctgtcctggaactcacttggtaggccaggctggcctggttttatggttttgtcttatgtttgggacatctattttaaactaatctttgtctgtggtgtgaggtagggacccagttacattcttcttatagaataaccattgtcctaccattgtttgttgatggtggttttggtacccttatcaaaacttgagtcttcagttttgggtggtgggggtgggaggtggctttaagacagagtatttctgtatattcttgactatcctggaactcactctgtagaccagagctgggctcaaactcacagagacctgcctgcttttgcctctggagttctgggattaaagttgtgtgctaactaccactgcccactgcctggcaagtcttcagaattttataactttatttctggcatcaattctgttctgttagtttacacagctgccattatgttagaatcatactttttaaatttttctgagattataatcatatcatttctccctttccctcaacattcccatatatccctcattccttgttcaaatttatggtctcttggtttctttcttttttgtttgtttgtttgttttgtttcatttttaatgagagagagagagcgcctaaatacataaatacaacctgcttcgactgtgatgttatttatctgtgcttccaggcctcatgagctttcccttgtctacgttagatgtctgttgttgttcttgttcagttcgtgtttaagcagtcatgttggtgagactttatggctgtcacttatgacattctcacggcaaacttcctgttcctctgattcttagaatctttccttttcctcttccacaatgatccctgagccatagttacaggagttatgttgtagatgtatctgttgggatcgggcgccataactcttcattttgcttggttgtggtttgctataatggtctcctttcattgtaaaacggagaagtttccttgcagagggggaggacttacctgtgggtgtggggaaatatttaggatgtggttaggggtcatgatgatttagtaaagtagaagacccatgattttactagctgtgggtggttggctgggtttccaggaccaggcatgatttccctcttgttgagcaggtcttaagtccaattagagagtgctggttaccgccgaggtacgtgtgccacttctgcactgtcttgatttgcatagctttgtagtgagttttgaaactgtgaaatgcgaatcttcttttatgtgcttttaaaagattgttttggctatttggagcaactttgcagtttcatatccacctatctacttttctatttctgtgtaaaaggcaggtggaattttggtagagaatgcactgacattgtacatttgggttatattgccatttgactaaccctgctgtcttcccatccgtaagcatgcgatgtttttctgtttattcggttgtttcagtactttgtgttttttaacttagattttcatttctttggttacattgcttcctaagtattttagtctttgcgatgcagctatgaatggaattggtttcttaatttccctttggaattgttctttgaggaactgactcttatgctttctatctttccatctgttgtttcgcctcaagatggtgactccaaaccctcctctcttttgttgtaaggtctttactgtatacctttaccttatacacactagtattgggaaaaaagaccccaaaaaagtgattcccaaagactttattctctaaatcgaaatttcttttttaccttcctctattccccaaaatgtcagaacctgttctgattttcttttagctgttcctctttggaccatgatggtcccagtttccaggagacgtttctcaaggcgcctgctggggtaactaaccctgaggctcaccgagccttcctcccaccccctttcctggtccccgattttctaacattcctctgctctggcttgctgtgagactggctcattgctgcgttgtggaatgtgatcctttcctcagcaccactcctcagtgtccatttaacctggtccatgtttgcccaccattccccatcatcataacctctgccagcccctgtttctgagctcagtgtgcatgtgatcacagtggttacagatgatgcatggataactggtgatagttgcaaggggcagcctttactgtcttcacttgcctggttttcactttgagtgaaaaagaaaggagattaaatccagaaatataaactatgatactccttgtaaatttagtgtttgtcaaaaaaaaaatcaagataaaattgttaaaaaaatttttatttcctttattttatttcatggatgccaatgcaaaacatagactttattgatcatttagaaaatatatgttcatatcataaagaagaagaaaaacattaaacactcattattaacttttggtaaacaatcctcctagcctatttttgcattcttgtttttcttataaaaggtgaagaaagcaggcagattgtacttcgtaacctacatgtgtttcctgtctctgtgccttcttctcacctactgctgaccaaattttggcctggacattttctgccttaaaaagttggtttcacatttccttacaaccgataacttttaaaataaataataatattatttatgtgtatgggtaggaatgtggttggtatatatgtggccgtcagaggacagccttgaggggcttcttccactctgggatctgagcattagatttggctgaccaatgcttgtctagcaagtccctttacctacaaggctagcttattagcccagtgtttcgtttttgtttgagaacactattttaacatagtccaggctagctgaaaattcagtaagtaactgagatgccttgaactcagcagcctgttactagggtgtgaccaacctggttgctgatagctttatataactgtcgggagggtggtttgagaggagacagtttctatagtgtatctgtcatcttgatgcgtgtcttacttatgattatactaattatggatattcatgtcttctattctctgaatcctaatttcacaccctaattgacattctttatgtctctatgtttagaaatgctttacattaaaaatgatttatttattttgattgatgtgtatgattgtctgcatgaatatgtgcttcatgtgagtgtggtgcctataaagaccagaagagggcatcagatcgccttgaacagtaattgcagacagttgtggatgctgggaatcaaacctaggtcctctgcaagagcagccagtggacttaaccactgagccatctctcgagcctctgaaacactttatgctttgatttaatcagcaaagattgacagttattttatcatcgtaagtttctccttggtataaaggattctttgttccctgttaaaaacaaaaaagttattctttcttggtatgatttagagttacttactggggtataaatatgtaattggctgttttctgaggcctctgagaatatgctttctttgcataggatcagaatttgtctggaaatggactttcttgctggccttttcttccctggatgctttgttccagcatcctagagttttccatgccagtctccacagctagtgaacacggccagtctccacagctagtgaacacggccagtctccacagctagtgaacaaggccagtctccacagctagtgaacaaggccagtctccacagctagtgaacactgccagtctccacagctagtgaacaaggccagtctccacagctagtgaacactgccagtctccacagctagtgaacaaggccagtctccacagctagtgaacaaggccagtctccacagctagtgaacacggccagtctccacagctagtgaacactgccagtctccacagctagtgaacaaggccagtctccacagctagtgaacactgccagtctccacagctagtgaacaaggccagtctccacagctagtgaacaaggccagtctccacagctagtgaacacggccagtctccacagctagtgaacacggccagtctccacagctagtgaacacggccagtctccacagctagtgaacaaggccagtctccacagctagtgaacaaggccagtctccacagctagtgaacacggccagtctccacagctagtgaacacggccagtctccacagctagtgaacaaggccagtctccacagctagtgaacaaggccagtctccacagctagtgaacaaggccagtctccacagctagtgaacacggccagtctccacagctagtgaacacggccagtctgacatgtgtcttcccatcagtcctctgtcaatgctgtaggtggagattcttcctaaactttggtctttctttttagtactttaacagattttgccttttgctatatcttggtatttcaagggatggtggaggaaggatttttagttattaatgatttgtcattactagtgtcaactttaatataccaaagatgacatcttctcagtaattttttaattgagaaataattgggatgggtgagcatgtacagccttttttcctagctcttactaactttaatgggcttttaatagaaagtatcttagttgctttgttgttgttgtgtggagatacttgaccagggcaacttagaaaagaaagcgtttaattgaggacttgcttcagtttcagagggtgatccatggtcatcacggcagggagcaaggcagctggcaagtgggcacggcactggcgcagtagctgagagcttacatctcccacacccacaaggcccatcgagaacgaattacctcaaagccagtgacacacctcctctaacaaagccatacctcccgacccttactaaacagctccatcaactgtggaccaaacattcaaatgagccagtaagggccattctcatttaaactgccacagaaagtaattgaatttggttttagtgactttcaaaatgctgtatgcatatttaaatgcttttttaaaacctttaattttttttcacttactcttcatagaatatttaaacattgttgttgttgttgttgttgttgttgttgttgttgttgttgttagatgaagtcttagtgtattgtcttggatggcctggcctggaactcactgtgtagtatctacctgcctctgcctttgcctctgccttctaaatgctggggttcaaggcatgtaccaccttgcccacccttcatagaaaacttaaggagaaagaaaagaatacagggtacataaaaatcaagtataaccaatctattattcacttctgtcttagggttttattgctgagaagagacaccgtgaccaaggcaactcataaagaacaacagctcactggggctggggctggctgaccgtttcagaggttcagtccattatcaccacggtgggaagcacgcagtgtcaggcacacatggggctggagaaggagctgagagtttgacatcttgatctgcaggcagcagaaggagactgggcagagcttgcacagatatatgacctcaaagcccacccccacagtgacacacttcctctatcaaggccacacctcctaattatgccattcctcatgggccaggcattcaaacatgtgagtctatgggggccaagcctattcaaaccaccacactacttagtatattttggtattcactttcttttttaaaaatggaacatatataatgtgcacattcatatatgcatatccatgtctgactttaatttcttagatatgtattgaacactttgaggtgccaggcagttttaaaattttgctgtatatagtttacatcttgcctactttcacttagtgttaaggactggacaaaactggttcaccaaactgtgtttgtagaagccccgctcacagtgtcataactcttttcagggttttttagttcaatccctccttcccctccctttccctccctccctccctccctccctccctccctccctccctccttttccctccctccctcccttccacccttccacccttcctcccttcctcccttcctttctctttccttctttttgtcatcagagttatttttgtgttgctgggaccaaaaaacctgatggaagcaagccgaggaaggatagacttgttttgttccattgtagagggtccagtctgtcaggacagcaggagttcaggcagtggcctcttcacatggcaacagacaagaagccgaaaaggcaggctgcagccagtgcagacacaatcttcagaggcctgctcttagtgacttacttctggcaggcagggtctgctccctgaaagcttcttccacatcttttgaatcaagacacaagctgggactgggcacgaactcacagagacccacctgcctctctgcctcctgagtgttgggattaaaggcatacaccatcactgcctggcatgactgttgattattaaccactgctgtcttgctaggaatttatattactcacaagtttagagtcacaaattgctgccgctccctgctcagcattcagagttatatttaaagaacataagcatttctgttataatatcaaatccactcctaagaaaactttcaagagtgcttattcactaaaaataacaggattatggtgaaaagaaggttcaaggcagaccattcaagacttctactatttcagaccagagagagctaacaatagcataattggtaccttatgaggtaaggtgggtcgcctagtcaaaccacttattgtggctgaggctccctgagagcagagtaaagctattaaagtgtaagaggatggaaattgcaggcctcgtggttgtgagctgtggggttggcctgagagtggtacagggggagtgcagcttgctctgccaggacacatgcacaggccagacagtgctcctctggggatagagcccttgggcagtgctcaccattaatattcttgaaatggagctgaaagggcttgcgtacacatgcctgcctcgaggctggggaggtggctcagttgttaagaacacataaaacccttggagaggacccgagttcagttctcagcacccatatcaggaggctaacaactgcctgtaactctagctccaggggatccaataccctctcctggattctgcaagcacttgcactcacatgtgtacacacccttctgcctccagttaaaaagaaaacaaattctttatatacggctttatgaccttgactcaaatcaagatattgaacattgccatctttgcaggaagtcccctgtactcccatctcccatccttctttctagatgagcacagttcagagttttatcccaattagtgctatatcttctagaagttttatctaaataaagtctaataatagtttgctattctcatgtgtcacgtttcttttattctgaaaagtccatccttgttccagagtctggttttgattgtagagtagtagtccattgttgaatgtaaacaattggtatcaagttcagtgtttgctgaggaacatttgtgttgcttccacttctgcttattagtagtaaaaggcctgtgaacatctgcacaagtgttttgtggatacagtgttttcatttcctttgcagaattacctcaagaggaattgctggccatagagtaggtgtgtgtttaatttataagcaactgctagcttttcaaagcagttgagctgtttttcaccctggcagggatgttctgagctgacttgccagcatcaattgtagttattctcttgggtgctagtggttttcatcgtacttctaacctttgtctgtctgaagattaatggtgtgttttagcgcctcttcacattttcatggccccgtgtgtgtcttactacgaagcgcaccaatctccctcccttctactcatagaatgtggttgagagcaaagtttacttaggtcttgagaagaggcctgggcctcttcaggcccattccttgtggtttctctgcacagccctatctaaaacatacagtttcttggaagaaggctaaccagcatttaaaggggcaactggcttttccccataggttttctcctaaaagcacttgtctagcacagcctttccactacttgatttccagtgtgtttaacagttccacagctataatgtattactattataagtgtgaaattgagtgggagtagggacatccttaccttgttaataattttagaaatgagaatgtgaaaattcacccttgcgcatgcgagctgtatggctttgcaagtgccctttggtaaagacagagaaagtgtctgtccgtttactatttgttgtctgtttttatccgtatagattttcaatctgatatgccatcactgtttcgtttcaaaacagggtctcgtgttgccctggttggcctcaaccttgttaaatagctgaggatgactttgaacccctgaacttgcagcactttgcctgtgctggagtcactggtgtgagtcaccacacccgccttcgttgttttcccttttctactaatgtggtgactcactgacttcttagcggtcacttggttatgctgcgcttcccctttttcatgcttttcgtggcttatgattgtccgtacgtctgcccgttgggtatggggctgttagtctgtggctggggctcttggcttttgctttctgtgtaggaagctttgcttggtacagtgctgcatcttttgtgtgtagaggatctcagttgtaagttttgttacctgagtcgtttcaccttgagctatagttgtgtgttgtcattctgcctcatgagtctttttctttttgttacttgacatatttctgaactttgttttaatcaatctctctagactaactatctcaggcttgagtgaatttttgtaaaaggtttattatttttatgtgtataagtgttttgcctgcgtgtgtgtgtgtgtgtgtgtgtgtgtgtgtgtgtgtgcgcgcacctcatgtgtgcagtgcccacagaagtcagggagggtttaatctctgggactgtaatgaattgttgggaggtgccatgtgggtgctgggaatcaaactcaggcccttggcagagaagtcagtactcttagttgccacgccatctctccagccccttaaatgaatttaaactgtattattgtgattactgatgttttctttgaattcattttccttttccattcaatctttccatcttcctgcctcctctacatctttctctaacaacaccagccccccccccccccatgttccttagcattttctgccttcagcaggcagagccttctgcacaggcttccagctcgcccatgttgtatctggcaccctgcgcatgatgcataaaacagtgctacacagatctcgttttttgacttatcatatctgggtccgaaatgaaggagctttgacagataagctgtctgtggcagagctgttggtctctctctgtgtactgaggggtctgaggtatccaggtgacctccttcatggatgtgccatttaagtttctgtttgtcctgtctgagcactagggacatctggactaaactttaacagtaaccatgtttaaagggagttaacaggcccctgttctctccgttctttggctctttgcctgtctctaacacttgctgataatacctccttcccccttttgtctcagtgcccaggactcaaggtcactgacttggtcgcatcagtcattagctttgtcattactggtgttttcttttcctttttgttttttgggtttttattatcattattatctgacatctttttcacagtaggttgattttccaccgaaggcagtccttaaaggttttcttcagagcctggatagatggcttcgcagttaagaacacagacccacatgtagctcacagccttctgcaacttcagtgcaggtagtctccctcctttttgaatcgaagtgtgggccagcagtcgagaaggatttatgtttcttcttctgtgctctttggagaggcaccgaatctagaaggcagagtggtttcaggtggtcctggcacggctgtctcagagggggagctaggttttgagtgccagtttctctgtgggctgtggaagctgtagcatcctgcttcacaaggcagctcacatgccacacaggccgcagcttcacggcaccgcacacttgtgcgtcagtgcatgctctctgccctctgcaagaatctgtgacacggaagacatttggatggctaactacgtttccttctttcccccctaggtcttgatgcagagctttactatgtgagaaatgacctcatcagtcactacgctctgtcctttaacctgctagtgcccagtgagacaaacttcctgcacttcacttggcatgcaaagtccaaggtaagcgctgccggcagaccacgtgacaggtcacccagtctgcagaggcgagggctgtccctgaggatgggccttcctctccacagaagggtcagtggtggtatagagcactgggtcttttcaggtgtatagctgacagatacagtcttgagcctgctcctctgaaagtttagatttaggtggctgccaggtgggtgaccagcgcatcacagggctgggtcctttgaggcttttgcagggagatctgtacccaggaaaaaagagagttggatctgatggtgaccctgctgttacagagaagccatatgtggctggaggatgggtgagtggctggggaggagcatggctgagctggctggctcttccacacacacttggtgacttgaacgtaagtttcccatttactgttctgagtccccctggtaaccatagatactgaagcggggaggggggtgcttatcaacttctgccatttgtgtattggtgaattcttcacctctgactgccaaggaaccttacatgcttgtctcccagatttgccagatgatactgtttgtaccctttactcccctccctgcctgcctatgaatccttgagctgtttcaaagtgcattgaacgcatcatgtcctctctctcctaaatcaaaaccaggaagtttggtgttctaactcacagcacttgggtaactgagttctaactcactcatcagggaccctcagcatctttatcactaaggtttcactagagactgatgttgtttcagtttgtgtcaatctgaagttttgatgccctgcccatgtgcttcagcctcaagttgttgggagtggagaacctgtcatggtggaagctagcttggaagggtcgtctatgaatctatatgcttgcagggggaacactgaaggggactggtataactctaattatctggtagattcctctcctctcctcccccctctcccctcctccccctccccttcttcccttcctcttcccccctcacctccccacttcccccctctcctccctcccctcctcctcctctcctccctttcctcccccccccccccaatccttctctctctttctcttcttgaggcagggttttactctatagctctggctacatgtagattcagctggccttggactcagatatctgcctcccaagttctgggattaaaggtgtgcaccactacacctggctagcagcatgtatttaactatacatttgggcttcttcttgatgatattacagtccccaactctagttcttaagtcctagtatctggtgatttttggcacagctgattaattgcagtttgtttatttaaaaagttaatcgtacgagtaggtagtacatggatatggcctgtaagggtatacagtgaaaaggaaggttttccgttgtcatggtagcatgctgagcaagcccatctagatcactgtcttcatcaggcattgttgcctgagtcttgtctcctaaagaaaggtagtgtatatgtgtgcagtgtgcacacgtacacctaagtgcttcctgctttcgtgtagtgtggagttgtgagcaatgtgtcctggtaaaggggcactgttccttgttccttggtattgctttgtgtgttccccccttaaataactgtatcattttctcacatagttgtgctctggtcatttcctacaagaggaaaccgagacccaggtttgggaaggacttgcttaaatgagtctggaggctgaagaaacaggtgctaggggtgagctcacatggcagtcacccgagaaggcaggagtagtaaggtgcggtctcttatcacttgattctgagatacagtcagacttcagaaggaaggctgtctctctcagtttctaacactctgtcagaatctctgtttgggctgtttgagctcttgccagaagatgaactgttggcttccgagatctccagactcgccagtgtatcacttgaacactgcaggcattttaacatcagtgttcccacatcagagcttttgctggtagagttctccagtgtttacgtgactggtcttgccaaagatttcagttccctcagcggctggagctgtgtgtgtcttttcttaacatctatgtcacgcgcgcctcgctgagtggttgagaatgtgttaattgtattttaagatgggaggagaactctggtattgattctctcacaagagtagacgactaggcggtcttaacagataattagtttcttgtatgttccagaacattccccagtgttcaagaagaaacttgcaactgtgtctgctaagtgtcagtagatatgctagacagccaaaaggcagaggctcagtaggatgtggcagaggactccaccacccactcccttggtctccgtccaggagattctgcggggagcttgtcagagctccagcagctgcctctgggggccagcctgctgtgtcccagtggagtgaagtagctgtgagaaaggcagttctggcaatttcagagaaattaaaaggccgttgactgtaggcgagcacattcactttagatgtgttccagaaggggactgctttattcgtcgtctgcctattcacacagccatgcgttccaagtaaggaaaaataccaaacatgttgattttttagcttattcaaatatttatattttctctagttacttttctgaagtattttggctcatttattttctgataaacagctgctgcacagatttgctttggggtggggggcagggtaaggctggggtgcactttctaaatagatctctttcttccaaggtgattgacaaacggcattccttacagatcagtacacaccaaagtagagacaattgtattccagtgattggcactttcttctctgactccaaaaactacattaaaaaaaaaaaccaaaaaacaaaaaaacccagctgtcctcagtacaccagtgtgaggggggaactgccttctgatgcttccgtgttcattcatccgtccaaaggaagtcttaggcaaagggcaggcttccatgcttcttgttgtgggttcctctgggccactgctgattctctcagtccttccctcagccacctctgcctgtgctctgctccttgttttgccgccacttgcaacatcatttcctccctttctccctctcccgtgcttagactgagatggccctgccactcctcttgccgctctccctcagctctgccgtcagagccctctctttgctttcctggctttggtccccggacagctattcctctgcttatagccagaactttgtaaaggagaccgaaaggttagagcagatgtccaagaggggcactgaggggtaaggagcttctggaagagcattgatgccatggacagacagagtcagcaagatgacgtgggcctcaagcacagctcaggccctggcactagaaacggacggcctggcagggtgtctggggagaggcatcgagcccatgtgatagaagtggggtctttgattccctggcaggaggcagagacaggagggggagctggatcaagtaactcacttcccaggtgagaaatcctggctccaggatgtctgttagctaggaacacacactgtcccagtggggtgcctgcctacctatgagaggaggctcccccatgtatgtaggaacccacagacagtatcccagtgaggcgcctgtgttgatctgtgagaggagcttggcaatcaggtaagctcaactctgtctggtaaccctacagcttcagcctttgaggttaccagatgggtatgcctagtaggtagttggaggaaaaggagagggagagacaagttgaaatgtttatccttgggactggagtgcagagggttaatgttctgataggtcagcctgatgcagaaaggaataagagttcttcctggaagtgaagaagccgagcaggtagcgtgtggtgcaccagcgaggagcacgggtgaggttgaagaggagcagccattgagcacaggtctggggggtcatcatgtgtatcatctcctcagcaagctgagccaagggccatggggttgcaggcactgccatccaagtgtgaagaagaaggagtgaaccagctgaaggtgtcagaatgactgtgtcagtgatgtccctgctggggcacaggctggggcacaggcggtgggaacatgaaacccggcatcctggctgtgctgggaaggaaggaagtagtttaattaaccactgctttcccccctctactagcgcagccctcggctcataaacatgcctcataaatgttgtccgacttagagtagtgagcacaaagaactgcttttacagggaccagaggtgggtggtcagaggcagtgctggcatcttggatggaatggacggtatttttgtatctgttttggacatagagaagttgagtgctatgtcagaacgaacactgaatttcagagttaacagaaagatgggaggagacggaatgagccagccttcgaaacctgtgtagagtcttgtgtgtgacatgtgagtggcccgagacatgcactgagtagaagagagcttcagagtagaggggctgatttcacgcaggacgtctagagagggccttagagcctgacagggatactgaccacatgtgcagacccagtgctcaggtctagaaagtagacatgagcaagaagaggaggagcctgaggggaaagccacactgagggagatcatgagggagatgagagtatgagaggctgtgcagccagtggggttcctcacatcaggaacaaaaccgatcccaccagtgctgacagctcaggagggtttgctgcaaacccctggggttggcaggaggctgatgaccacaaaggagtgcagcttgacagtgggagaggctgctgaggccccggggtcccgagccagtgtcacgggcctgttgtgtcatcagcttggaaaagttgctcatttgtgcaggtcacgtggcctcctggttctagatcccatgctgatctgtctcaggcaccaccccccccccccccccaagctatggcctcgtgcagagataacagccataccttacagtcagtgcatcctcttgaggttttagtgctgggaagcccagggtaccttagtgatggctctctagcgccccttggtggcagccatggcgatgtgatgagctgagagattgaatgcttccttccagactgttgattttaagggaaagggtggttcagttccaggtaccaaatggacagtagccttcaggttgaatttctgtctggctgaaaagtcctagtatgatttcagttttattatttttatttatttatttttgagacggggtctcactttgtagcccaggttgatcctgaactcactatataaaccacactggcctcaaactcacagagatccacctactgctcacggctgactgctagaattaaaggactgctcttggaatctttttgggagtggatttttattccacccatgaatagctctcatactgcttagttaatgaacttactaatgaagtctttttctgttgtcaggggtataatgttttatctctcttcattttgcaggttgaatataagctgggattccaagtagacaactttgtggctatgggcatgccccaggtcaatatttctgctcaaggggaggtcccacgcactttatcaggtgagccaggaaagacggacttagcatactgctttcagctgcctccatcctatccctacaaggatagttcactgagtaccgggccctcccacatcaatcattaatcaagagagtgccccacagacaaactcaaaggtcccagggggttgggaggcaggggttggggaagtagacgtgtaattattattgtcatctttattgtctatttatttttaaagaatgttgtagggcttttcctggcagttttattcacaattattattggcacaagttcagctaggctttaagcagagctgggaggcaagttaatttttgggggtcagcaagagtttcagaaatatcaaagtctctgatccactactcatagatggtgaaatatctttgaaatttgtaagaaaggaatcataaattaaaaaggcaaaatgttctaaaatctacgactttgtcattaacattcctagatatacctttagaagctaatcctatttagaagggcagtgttgtttttaattcatagccaagaacatgttagctttgtttataggtttattataatttcccccagtaacaatgtctttatttcctagaggtactgcttttgaatggtacaatttttattttattttattttttaaagatttatttatttacttattgattcatttattttatgtatatgagtacactgttactatcttcagccacaccagaagagggcatcggatcccattacagatggttgtgagccaccatgtggttgttgggaattgaactcaggacctccggaaggacagtcagtgctcttaaccactgagccatctctccagccctgatacggtttttaaatgtggttactaaatacacatatgacataaacattctccacagggagtacttctaaacatgtcatgcacctgtctgctcatactatggatatagttgttattggtggtgtgctgacgtgtatttttggccatctgttatggtgtggcttcaagcccaacaggaactctctggcacccagttcagtgcagctttggtttccctacattttcttagccagacagcaggaaaggctttccctccttgggattcgatgatggcatgctttattccgggtagctcatgtctgccctgcaggccgcagtccacacggtgtggtcagcactgccttcttgacattcatacccttcacgttgctaggagcgatacacaggtgcatttggtgctgcagagtctttccttccgtggtgtagttttgttaccgttgctggggagactggtaagctcagcagtttgcctcgtgattcctgagattcagtgcattggaaagcagaacatagacaacaaactgatattaaaaacaaagtcacaaggaaggctcggaagtaactatcccttcatctgtgtcctgtgctctgcttcagtcctctggatctgcagtgaaggaaatgcaggtgtccagagcggtggtgacagggtctccggaagctcctgtctgatccgcttatttagatgcgcttctttattttatttgagcagaaatagatgaaaatgttgtatagcattgatcctaatctttaggacactaaagtgttttctcttgtttcttttaacagtgtttcgggtcgagctttcttgtaccggcaaagtcgactctgaagtcatgattctaatgcagctcaatctgacagtgaattcctcaaaaaattttacagttttaaattttaaacgaaggaaaatgtgctacaaaagtaaggaatttatttaacagaatgtgtttcatgtagataagaggtcaatagaagactgcattttctgtatagagatttaagcatgaccaagtcttgattatagttatgagaaaagcgcattagtggatgaaactctgggtcagcctctggctctcattccattggagttctgtgggtgtttccagagcgagcgacagagctgagcattcgctcggtgggcttggactctgcaggacctttgtgttgggggtcacatgggcctgggttgaaccatatctctgtgttttcaggacaggggagatattgcacctctgcagggctgagattcttgtctgtgagatgtgcatgttgctgtttcagagaggttttaaagggtaacgaaacctagtccagaattagaaagtcacatgtgggcacttaataattagggtttgaattatatcatccattacccaggaaatcaccatagatagtagtgagttctagaacaccaaggctgagttttgaaatgttaagattttgttttaagagttaaatattttatgtatatgagtacactgtagctgtcctcagacacaccagaagaaggcatcagatcccattacagatggttgtgaaccaccatatgcttgctaggaactgaactcaggacctctggaagagcagtcagtgctcttaacccctgagccatttctctagctccaattttaagattcttaaaggttatctaatctccatgtagcctacagataaaatttccagaatttacaaataggtagaattgtttactgtttaaggtagaaacaaaacaaactgtaaactcagtggatgtttcccgtgatctgtacactttacacgcgctaaacccagctttaggtgttatgtttcaaaaagtctgagtggcctgaccaaggtcagacaaagtgctgcagcctgtgctctccactgctttgtgaaactatttacagtttcccagttgaaactagcaagtgagttacagtggcagatgccaagatacaggccagagatacaggccaataaagaagctatattgcattgaaaagagacatttttaaaattaaaaaaaaattaacacccttagctttagtactgtgaattatatacctacttcaatgtaagtttaaagcctgtagggactgtagaggctttactccaacctaatctttttgtgattggcatgaggacactggtcctcgagagtgggaggcctcctaggtttgtataactactcagtggggatggatggaggatggatggatggatatagaacaggtggatggataggtggatggatagatagatggaaggatagagaatggatggagagtggatagatgcatagaaggatgtatgtatagatggatggatagagaatggatggatggatggatagaagatggatgaatggatagaaggaaggatagaagattatgtatatatgaatggaaggaagaaaggatagagaatggatggatggatggatggatggatggatagaagatagaagatagatggatggaggattaatactagggttggacctaaggtgtgctaggagaatagaatgctttaccattgtgctatatccaaaactcatattttagaatttttattttgagacagggttttgctaacttatccaagctggttttgaactcactatgtaacctagtcaagccttgaacttgtgtttctcctgcctcagcctctgggtagctgagactaaggtgtgcaccacaatgcctgacttgtgaaaactgtcccattttagatttaatgcatatcaccatcttaatttggtggtcctattttgtccacttggattgtgtagtttttgtttctgactcttacttttaacatgtgattttgttgtatttatctggtttcctagcctatggcacttaactgaactagtaagcatccccgagctgtgtggaatagctgttacttctgggagggggttctgtatcttatgggtgagaattacaggtcaggaagtttcctagaactccagagcctttcccctcagctggtggcgcggtttccatgatgacagtataagtttgtgggtttccctacactctttaccacagaagcccatctcattgggaatctgtaagtgactggcagagactgtcctttgactagtgattgcactgatggcaggacagccgttctcatgatcttactgcagacagctgtgacttagctcacgcagtgttcaggaggtatgttagtatgtaaggattgttacagaaaaaaacttctaaagtactttttatttctcttttaatccagaacttgaagaagtaaaaacttcagccttggacaaaaacactagcagaactatttgtaagtgtcactgcgttcgcgttctccaccctgcgagtgtgagcatgactgcgtgaggcctgaagccgggtgccagcaccagtgtgctgtctggtttgcagagtgatatgtagaccaaatgaagctgtttgagaattcaaacttaaacatactttatagcacgctaacaaataccttttagaagcaagaatttatattgtggtttttctcaggcaggaccaataaaggaaaggatattaaaaagttatgtgtgagacctccattagcagagtgtttaagaatctgacttgtagcctgggcccagctcttaactaatttcatctaggtgaaaatgaaaatttatgtcatttattctatattttattttgatatagcgagatgacttagttggtaaagtgcttgctatgtaagcatgaagacttgttccgattcctagcacccgtgtaaaaggcaggtgctgcgtatactcctgtaatgttgcactgtgggggatgggaaggtgggagaagggcagaggcaggcagatctccaaagcctcctgacctgtcagtctagttagctaatgcattccaggttcagtgagagattctgactcaacaagcaaggtaggaagtgatagaggaagatacagaatgtcagcccctggtctgtgcatacacatgtacacacatatgcacacacataaacatctgcgcacacacacacacacacacacacacacacacacacagggggggggggaagacagacagacagacagacagacagatgaacactctggttcaggctggtctggagatctgtatgttgttgagggtaaccttgagtttctgattcctctttctctacctcaggagtggtgggaattgaactcagggcctcacacatgctaggcaaacacctactaactgagccacactcccagtccaggcatagattatttaaatacatggagaaaaaaattttgttaggtcagttagatttatttatttgtttactcttggtattgattatattatacaccattaacaagcttcttttttctcttatgaacacattatggtagcattagcaccaaatgatctttatagaaatagataatattttcaggagaaagttgcaagtatactgaagttcagagtatgcgctggtggacatttatgtcctcagtaactattgcatgtgttcttctgtgcattgctaactccaaatttgatggataggggattagtgtcttaaagcacagtctaaacatcacatcatttgacccctaagtatgtcactgtaggtcacctaaaaagcccctagttacccaacacacccacatgttgatttatcacatatatcatctcttctatctaatctgtgttcaaatttacataattgtgccaaaccatctttcaatagtttccttcttcaaaatcaggatctaaatggagccaatacatagtgtgttttgtccatgacacacacacacaccaccaccaccatctcttcctcctcttcttcctcctcttcctcttcttaatttttttttattttttattttatttattttatttatgtgagtacattgtagctgtcttcagacacaccagaagagggcatcagatcttattacagatggttgtgagccatcatgtggttgctgggaattgaactcaggacatctggaagatcagtcagtgctttaactgttgagccatctctccagccccacaccacttccttccttccttccttccttccttccttccttccttccttccttctttctttgtttctttgtttctttctttctttcttgcatttttttaatttattttttttaattaggtattttcttcatttacatttcaaatgctatcccaaaagtcccccagacccctccccccattcccctacccacccatttccacttcttggccctggtgttcccctgtactgaggcatataaagtttgcaagaccaaggggcctctctttccactgatggctgattaggctatacaccacttctttattaattgatcatattgtctttttttcccatagaatttgccaaagtaaacattcttcttgtattatttaattgcctttaactctttcttataactggtagttaaattttatacttgattagacttaggaccacttcttttggtaagagcaattcacgggtgtcctgtgtgcttcttatttattgttttagcacctcagagcacctcagagcaccgagcatctgtcctaatgtaggcttttgtttgtttgtttgtttgattgtttctgtttttgtttttctctgtgtagccctggatgtcctggaactcactttgtagaccaggctgaccttaaactttttctcccctcccctcccctcccctcccctcccctcccctcccctcccctcccctcccctcccctcccctcccctgttctcttctcttctcttctctctctctctctctctctctctctctctctctctctctctctctaatttaaatgctcacaaggtatttctccctaagaacaacagtaggatgctcttggcctctgtctctctcttccttgctctttctcttccaacttttatcactcctatccagcatttactgagtctgcagtatactaggtggtgtgactgaggcagaggattgaactgagaaacagccccagcctttacggacttaagagtgttccgggggagataggacagcatggtaggcaccccgaggagggacttgtcactgcctctgaaggagagcggcagcagctaaaggaagggcagctgtgttctgacaggggagtgtcagagaggagtaggagcagagctacacccgctggaagctgaggggctgggcagagtgcgggcggacggcctgcccagcggacctgtctgctccggccactgcttgggctgcagtgtccatccacgcaggcttggggcttttctacccctcctgagacgtttcagcagatactcctgggagtcttgttttcacttgacccaaatctagctgtcccacttgcattaaccttttagatttttattcactttttgttcttttactccacgtttaattgtttggttgttggcagcttaggatccgtctgctcagccttcttcccagtgttaggctcccgagcttgtgccgctgtatccagcctgagagaagcctgggttctcctttactgttaaaaaacaaatcacatatgtatacaatgtattttcatcttatccactccccctatagttcctactgggtttcccatacacacacacaatcccttcccgcctctgtctgtgtgtgtgtgtgtgtgtgtgtgtgtatgtgtgtgtgtgtagtatgctcacttaagcattcagttaatttttctattcctgtggtgtttcttaaaataatgtagctgggtataatcatatttaatcaatagaacccttttaaaaaatcaaagaagcaaaattatattgatcaagagaactgtgcagtctgcccagcagggtgactattagctgtgtgtagctttgaggctataaatatattaacacaatataaagtagaatacagtgaagttattctggttgtttttcataccacatagttaaggtagcaagtggctactgtgcagggcagtgcattccatctgtttctgcaactatgctatagaacatttactgaaggacatgcgtgtcttgtatactggggtgttttgtatctactgtttgtgagggtctgactgtggttcatattaaccagaaattttaaagtcttaaaactgtaacaaaaccaccaaaattggtgtgagtaccgcactgcgggtatctggttttatcaaaggacgggtgtgatgcagtgcaggccttcccgtgaggagcagggcactccccgtgttaggccacagagcaccccatcagctctgtaaaaacctcacgtgcctctcatttctgtttcagatgaccctgtccatgcagcgccaacgacttccacgcgtgtgttttacatcagtgtaggggtttgctgtgcagtgatatttcttgtagcaataatattagccgttttgcaccttcatagcatgaaaaggattgaactggatgacaggtaccgttcatgttttggggagcatgttacttgcatgtgcatgagtgcccctcccccaagcccccccccctccatccatgcacattgtgcaggggaggagggagagtgatgaagctcaagccaaagaggaactcagatgtctcggttattactgcctttatgtttttatcttcatcttttaaagtttgtggagttataacctgggggagaaataaaggtcagaaatgtttttcatgtttgttatcctgattcgcctccaggtccgactgccttttttaaactacttccttctacgtcctccagcccctccccgtccctccttccatccctcccttcctccctccctcctccctccctcctgccttcccacttgagtatctgctgtactttaaagtttcttggatgatcctaatgtgtagcagagtagagacaccgggtagataattacactaagtgttgggactataaagattaatgatactcttcatggtatcaaggttctttgatgttaacccataattatagtatagaattgatgattgtggtatgtataatgtagtgtgggaatgcagaaggtcctggcttaacctgggtgagtcacacacattatagccagactatagtgaagggtaaagatggaatgggagatacgtgctcataacccacaatccttagcgacaaaaggcattctcagcattgtttttgactttgaactttgaaccctttctacctgtcttgatccctagttgcaacttgtcaggtgattccatatccctgatgctgccctttgagagcttttgttcatactggggccatgggacttcttgctaatccagacccattatttgtactccagatccatcaccgtctttcccacaactaaaatagaagctttttccaggcagggaggagagacccttctctccccaaactctcctaacactgtacagtagagccatgatatcagcattccctttgtaaaagatctgggggctggttggatccagcactctttaagtactttggatccaatactcatgacttagtctccactgtgctccttcccttccttgagtcaaaagaagagaggagtgaacatggcggagtgcatacaggcactctaacctgctttctgttgccgtgataaaacactggccaaaaccattgtggaggagggatgggttcatctcagttcacactgtcaggtcatagtctaggggatgtcaaggtaggaactggaaggctgaaccatagggcatggctgccactgccttgcttccttaggcactgaaggcccacctgcctaggggtgaagctcacggtcggctggaccctctcacatctgtcattaaccaaaacatctcgcttacatagtcacgggcccatctgatctgggcagttcctcaactgagactccttcatgagactctaggctgtgtcaggttggcagccagctcactagggtagtggatgctatgtttcagagtgtttggtgtacaccgggatcatggagttctttgattttacagaggaagaactggcatttggaagccgttgaggggagaaaagactagacatcttgtaaacaatttcgacagatgatataaatgatgagagttactgaagagtagaatagtcagaagtcatactttgtgctttttgtttttggaggcagggtctcatgtagcccaggctggtcttgaacttttgattctcctgctccaccccctaacagcacatactgttatactcagctccacaggtctgatactcatcgagttgagttttccttgactgctggtgtgtgtgttcaggccatgggttcacacaggccgacattgtgctgtaactcatagattccatgaagcatacgtgtcttcctgctaagtattcagcactcacaagcaaactctctaggtttctagatactgtctgaataaaagcaattatgtgattgcttgttttcagggcacagcctagtagttaggagctagcctctggggccaggccatctgtatctgatatccagctgttctatttaccagcctctcagccttctcacgtgtaaagcagagattgtgggctgtgaagaaaggacgctagaggggtgggtagcagatctcagccgtagctacatgcagtaagtgccgccatgccgacgtcatccccagaacgatacagtggataatctggcgttcccattattcctggcttgcttacaacacaccaggcaagctaatggtggtggccagcactggagacacctgctgctcctctctacactacatggttgtgtaattaagactcagagacagacgtaaagacagacttgtgggattgtggcaatacaccagtacaaagcaggagggctccattctgccatttctgtattgtagttacatcagatgcttgctgcctgacaagctctgttcctcgggaggcttagtggtgctgtgaactcttgggaagagccagtgttctgttacatatgaggtttctctggaggcagagggtgtagctgtctgagacgtgctctcagcagggacacatggagttcgcgcgcgaggctttccctctctcccaatgcagcacattgatctgtagtccattacagcagagtctgccctgaaggggctgcgtggtctcctgcagagctcggtctgtagctgctctctctgtggtctccccctcagggaatggaaaatccattcctcgagtatggggtgcttgcatgtgttatttggtagtattttctttttctcttctacttactgcttcctagcacctcactaccctcagcattagggtgggagtgggggctttttgttttttcttttctatatttgtttttacccttgctgtcgtaacaaactggcatacatagtaatatacagagtcttaaagtttcctcttccttctcctcctccttctcctcctcctcctcctcttccttctcctcctcctcttcctcctcctcctcatcttctatcttcttcttctgacagggtttctctgtatctgtaatttgctctgtagaccaggctagccttgaacacagagatcctcctgcctctggcttctgagtgatgggattgaaggcgtgcatgaagaatgaaaaagtcggttactgcgctcaaccgttccctccgcatcacgtatcagcagctggagtcggcagcaagcattctgcctggcccccgtcttcccagtccatgggcgtggctgctttcactgagtagctaacccactgtgctttgggctctcacaggggtcccagtttgcttcctgtgctgggcaccggtgtaagtgttggggaggtggagtgagcaggcacttagctgtccccatggagcttgtggtctgcccagatgagacgttcagcaagaagtcccaactggaaagagggtgggaaggtctgtggtgttcagtgctgcctcctcagcagcagagcacctcctgtcacacacagacacttgataaatatttattgaataaatatataaatagatgactcactgaaaatagacagtaagatttattattttgaagatctttgtttaaattcttagcttatcctaaatctaggtgctttcttgcttatgaaaaatcaaatttatttagactagtcatatgctactaaatgttagtaaatatacattttaatctgtttcctacctcctgtgatggtgtcgggctgtccttgcttctcttataatcgtacgtttggctccaaagaaagtttcttgctccactgttgcttcgctcttctttcacttgttcatttctgttaaggaaatgaaactctgacataactagccatcaagcttgactgctctcagtcatttttagctgacgcaagagcaccacctactgttcagttgtcaaagtttactcacccggacacattgttgctcgcagggaatatctgagttttcacagatatcatacatttgagcctcacctcctgtgaggcaggtctcctcagtcctcttctgcggaggagctcttatctgtccccttctgtgatgcagcccttccctcctctctgctgaagactacacttctaacaaataggacttttagtcacatctttgccaagtactctgcaaaaacatgtacctgtaggtcaccgttctaaggttggagacatgatgcgcagtattcctcatgataaaagagtggtcgtttataaatgcatgcctgagggccaagcagtgacctcagtgatgtacttagacatcttccgtgtaagacccttttagccgtcttgttgggagtagctttatgcttccttctatccccacagagttcgaggctccagaaggattgaatactttgcctaagccacacagctggtgatgtgggcaattgtgatttacaggtttatgctcagcatttgcttatgaccaactacatatgtaaactcacataaatcaccatttagtaacttccagaactccaaccacacagtagcctgacaaatctttgttacattctatgaattgaaagtcccctcagcaaagttgactgtaagttcccaggaagaaataacaatctgaaatgtgagcgtctccagggaaagaaggcatgttgagggcacattaaatgaacaggcatttcacgtggagattgtactgtgcagagtggctcatgtgcacacaggctctctgaatgtttattggaggacacctctatctcagtacttcagccatgacagtaggtcattctaaagtgtgttagcgataaaaggctacatagcctccagaactcactacttagatgccttatgtctgtacgtttttcacatgtgtgtttgggctcttgaaattggcaaaatacaaatccatgtgtaagtatccagattatatagcaggtggtcaccagttccattgtaatcactggggtttgaaactacgatgataaggtacaaatatcagtcagtcacaaggttcttcatatgtaatagtgggctccaccacctctgtggtgacaggagttctgtctggctctctggttttactctctgtgctgaatctctgctttaacatctcctcggctacaaaattaaaaggaataggccagtgagattgaaatgttccccagagtgacctgggacaaggtttctacccattgagaagatggaagaatatgcttgggaagtgttggtttataggaattacaacacgtgagtgacaagatttgcgcccaccaccttcaggggctcctcttacttggaaagtatggggtgatgtgatgtttcaagttctagagatttctgagaaccatgaattctaaaagtggcatgggaggggtgaagagggacaacatatatgattaaacagtgagactgtgaggacacccctgcccccgttgagcatggcactcttgatttaatctgtggctgcttcaactcaagaccatttgatttgggccattgctgaaatgaacttgtttttctccttttctgaaagccagttcaactgaacagcgtggggttttttctagaaagccgagacatagttcctgacacaccctgtgtgaggttcagaattgctctctgagcacgtctacccgcactcctgaataattttgctctgatggcatgccctccgtcgtcacgtccctcaggaatccagtttggaacgctgatagagatgcgtgcctttattgcattgttatctcgaccaacttatgtaccttatatgtatgggaaagacatctctcactgaggctcacttatcaagtatttctgtcttcaaattctttgcagcatcagcgccagcagtagttcccaggggctgtctcagccgtctacccagacgacccagtatctgagagctgacacacccaacaatgcaacgcctatcaccagtaagagtcaattgaatcctaaagctgtatgtgctctgtctgtggttagagtatttgtgggattaatgtaccagtgtgtaacttgtgtaaaagttggtttgatcttcgattttgtttttttagagcactgagttaaaaaaaagttggggtatttaaagtaaaaatagttgctagagctagttttgctttggggagatttccatagttaattttattaaaagagctaataaatcaattttatacaaatccagactgaaggttttcaggttacttatatggaataaactaatactctcatggggtacatagagacttggcattggttttactcatctgatgttggagatagaagccagggtctccagcatgcccgctgtactgtgtaaggagctgtccaccagtccatgctgctgtcttctaatcctaattcaaatctcattaccattgatatggtctgcctgtctgtctatgatttttcaaaacaggggttctctgtgtagccctggctgtcctagaacttgctttgtagactaggctggcctcaaactcagagatccttctgcctctgcctcctgagtactagaattagaagtgtgtcacaccacagcccaacttttttgtgggggtgtttggaatttcctttcctttcctttcctttcctttcctttcctttcctttcctttcctttcctttcctttcctttccttctccctccctccctccctccctccctccctcccttccttccttccttccttccttccttccttccttcgtgtgccatgctggaatcaaaccaaagggccctcacacatgttacaagtactttaccactgagtgacatccctagcttttaatttctctctttaaaaagaaaatcaacctgtgtgtctgtgtgtctttatatacatgagttctagtgtccacagatgccagaggtgtggggtcccccttgagctcgagttctagtcagttggaattgaacttgggtcatttggaggagcattgagtgctcttagccacagagccatgtctttagccctaattttcttcttattagcagaattttgttttttagcttaggctggcttggaactctagcatgtagattaggttggccttatatgggccaccattaccagcccatttttatttttatacacttcagggttaggaattttggggaaagtttttttcttttttctttttttttttttcattctttcttttggttttcttgagataaggtttctctgtgtagtcctggctgtcctggaactcgctctgtagaccaggctagcctcaaactcagagatctgtcttcctctaccttctaaatgccaggattaaagttgtgcattattactgcccaactaaaataaatcttttaaaaatatttaactgacaagttatatacagtgtgatataaaatatgcatgtaataatgtagtgttattggactatactttagatatagtggggaatcagttatgagatgatgatgagaatagactaaccttctgaaactgtaagcaagaccccaattaaatgttttcttttataacagttgccttggtgatggtgcctctttgtagcaataaatgaccaacacggggaggaagatagccttgatctaatgttattaccaagagaatgtcagtgtaaggaagactattgatgtcctataattagtagcctttccaaggcaagacctgagccagagagagagagagagagagagagagggagagggagagggagagggagagggagagagagagagagagagagagagagagagagagagagaatgcctagacctggcatgggcttttgaagccttaaagccaaccccatacctcccagtgacacactcctctaacaaggccatacctcctaatccttctaatttttacaaacagtgcctggagactgtttaattatgagcctatggaggccgttcatacccaaaccaccacactctcagtgccctgcggtggtttttctaaactgtttccaacaaaaagagtcaaacgtgttaggagaaaaagcagattccaggtctgggtcaggaaatgaacaaggcaaatctaagacatatgattgagcaacatatcccacttaccaaggatggagccactgagtatacaagagaataatgactgcagtgatttggaataaaatatgtgtaataatccataaatgtataatgcttataattgctcaacataattattaactggggctccatcaataccttagtatctgacagctggctgaatgaattatattgcagggtaatgaggtagcaccagttgcttagaacaagcatttccttacagaaggctcccagctaatgactatgaaaggaatggtacaattagacaaggacatttaataaaatacttagtctaggaaagaccatcattgatgaaagccctaagcacaaaggaaatggaggcttcaccattggccagtcaaatccttccctgatccactgatagataaacttagcactacaaaaagtgcaacacccaggtattttatacctgaggatatgaagttccaaccccagataattagcctggatttaatcaaggctagagcttggagctgtcctgtaacacagagacagaggaagaaggtgaaggacatgccaggagcaaggagggcagttctgcatcattgattgtggcaggaaacaagggccaacaaaaaacctcagagaaatcagagcagcacctttggtcactctcaagaaagaaagatgacaaacccttcgtgaaaatgccgtggtaggtaggaaggtcatttctgctcagaaaatgcaaacctttaatgtcgcttttaatgctgacattagggctgtccttactgatggatatgaccttatgaaagagactatataccaatgaaaataatttacatattaaaaatttgttcttaaggtgaaatttacctattttttgtttttcactgtggacattatcacagagaaacacgtagttcatatatcaatagacgctaaaaacactggaaacctttaacttttacatgtatgagtgcgttgcctgcgtgtgcatgtgaccatgtgcatgaagtctctgcagaggtcagaagagggcgttgggtcccctgggaccagcctttacagcagttgtaagctgtcgtgggtacggggaatcccacctgggtctctctaagaatatcaagtgctcttaaatactgagctttctctccgccccacccccaacaaattgtcctaaaaactcaatataaatacagttgttttatgactaaaaaaggaaggccaggcatggtggtacacacttttaatcctagcgctcaggaaacagaggcaaatagctctctgtgaatctgaggccagccagctctacatagtgagttccaggccaaccagggatacatagtgagaccctacctcaaacaaaacaaaataggaatagcaacaaaagggatggggtgtagtggatcatacctataaccccagtatttgggaaactgaggtagatcatgggttctgagccagcatgggctgcctagtgagacttgtctcaaaaagaaaaaaaggggtgggggcagaaaacaaacttaaatactgggcttcgggagtgctaacgagagtggtcaaagtgaagatgtagtttatcagaagtgatgcttttcaaacttctccgtatttgaaaagatcgtttgtcacgtgatttattgaaaaatcatttgggagggaaaactagagagggattagagtctgtaattcaaaccttgtgtcatttgtcccaaaggcattccaaatgacaataatatttttagtgcttcttgttttaacatttggaagtagtggtgtcatagatgggactgtttttccttaattttttaaaaaaaattatttttattttattcatactgatgttttgcctgactatatgtctgttgtgagggtgtcaggtccctggatctggagttagagacagctgtaagctgccatgtgggatttgaagagtagacagtgctcttaactgccgagccacatctccaaccccttcccttaacatcttatgtgcccttcagcagcagcttctctgatctgtgtgtatagttgcttcattattcatttgcttcattattctttgctatgacttaagtccacaggctggagtgcctaggtgagcccagtgctgcagtagggtatttatattgcttggtctggctttgttggctcctcaggttatcctaccttgcggatagagaagaacgacttgcgaagtgtcactcttctggaagccaaagccaaggtgaaggatatcgcaatatccagagaaaggatcacactgaaagatgtcctccaagaaggtactcgtgctcgctacagtttcagttctgttaaaaaattgtcttcattttctatttctttagactttatacagtgtcgtagcagctttgatgaacatcttgattttgaagtgtgataaaacagacaagtatttgtgacctataaatgtattgtatccttatttcaagtgatcagtacccagcacctgtatttacaatacttaaattagtttattctttcatggcttgtggatgatcaggtgtgtggatgggcattggggttaggctcagcgtttgtagcctgagtgaccttagagaaaccacacagtatctcagaatttctgtagagttcacaccatgctagtcttcatcactctgagactagctgagaggcgacatgaaatggtgcattcggaagacttctcagagtttgtatttgacatgtccagggctcttttcaccccgtcttgcaggcccttgatctcggctttgagttttaggtctccattaaggagatggtgagatcggaggacagaaattaacagtgaaatactgcatcacacgcggttagatggcagatgcttgtttcctcgctgcaatttgttctggaatgtgtttggtccgcacaactgttctgtttgctgggcctcctggaagctagtctcagctaagtgaggacctaagatgccttctgagagagtggcgctcagttgacgcagactcttatttctgtctgttcttcagagtaggaacactgctcctacggttgtctgcttcctaactcaaataactagatagatcatctgcagtctgaggagagaaaccaggccagacagcatttcctacagagttagtggttatgcttccaatttcctgtgtttccaaacaggatgctcatactttgaggaaatttggagccatgttttccttgatactttttggagccataatggttttttgtttgtttgcttgttttttgttgttattgttttgttttttaagaactttagctttcagaaaagaaaacatgactggctaatattttgaaaagtggtgaggttcactggagatctgactaagtacaaatcaaacagtggttacacgccacttttcatctgttagattggatgaaattaaaaagagatagctagagatccagatggggttacaaggtgataaactgttatgcaccctgaccggtggcaaggtaatctgtgtacacatgtgctgtagtgtggggtttgcccagttacttttgcatttaaagtttgtgtttggaatatctaaaggggactaggtttagggaaaaggagacacagcagggtggacggaaggaccaggtctgtcctgctgggcagggatagaaggaaggaccaggtctgtcctgctgggcaggggtggaaggaaggaccaggtctgtcctgctgggcaggggtggaaagaaggaccaggtctgtcctgctgggcaggggtggaagggaggcactcctttgacagtacagagactcggaggtgtttggacagctccaggcaaagattctccaaacccttctgcctgcagcaccgatgtcactcagactctgtgactcagtgggaccttccacatgagcactggtacctttagcacacacagtgagatattaaagccaaggtgtgtgtagtgtccacagtaaagctaaactctttcaggcatttcttttaaattatgaaaaaaaaaatggtctgtgcgaaagaatagcatgtcagcaatctttttttttgaggatcatctcatttaaaaagtatttttagcaatcaggaaattaataataaatctgtaaggatttttgcatttctgttttacactgctgtgcccctcgggaatgtcataatttctttgctgtgagagctccttaggagcacacttggccctcagtgacctgagagttgggtcacctcacctgagactgaggggtagaggcgccgaggcctctctgagccagggttagcgttcctcactctttcatcattgaagtctgcatcgcagaaagagcggccgttctctccctccgtcgttgctttgaggcaactaccagagactcagatgctctggctggcacctgtaactgcgacagcacgcctgaccgactgtgtttatttagagaaattaaggaaaatagtctcagatatttagtctagctataggatttctcaagcaacctgctttgtgggcttgaattgctcttaacagctttagtccggtttattctggagggagaatgaacagcagccacacctgtcagcttagtcgcggttactagaaagctttgtgatactgtgaagattattgtatggcctcattaactgttatttttccttttaggtacttttgggcgtattttccatgggattttagtagatgaaaaagatccaaataaagagaagcaaacatttgtaaaaacagttaaaggtagggatttttacatgctgttttcataagagttttttgtttgtgtttttttgtcaatcactcaaactagcaaaactctgtcccctgtctcagtgtgtgccagacctttggaatgactctgtactagtgtgactcacaggctaatttttgcaaattaggtttttctcaccaggtatagaaattagttttctaacttactaaacatttattagaaatgaatccaacagtagttaaattgcataattgcatgcgcttaacctatctgtgtctaactttgaggttttttttcctgttgaaactcccttataccatccttaatcatatgtaagaaaacattgtcattagttttcaacatatttataaagaagataatgagctgtgctcagatccacagtgcctcatatagatatttttttacattgtttaccttttgttctctcccccacttgatctcttacacgctgtgtagtgccctaagacatgcctgtttcttcaacccttaccctgactgccaccctttacccttacccgtgtgttaggtaagcaggtgttcatgtacatgtgtgcatacatgcagagatcccaggagtcagccttaggattctctaatcaagtgttatccgcctttttgctttctttttaaattatctttattttattttagtttagtttatgtatatgaatgttttgcctgcatgtgtgtatttgtaccacctgggtgctctgggcccctgggagggtgttagatcccctggaacagacagttgtcagacaccaatgggtaggtgctgggatttgaacccaagttctctggaaaagcagccagtacttctaaccactgagccatctctccccaaatcctccttgatctttgagacatctctctctctttctctctgggacctagggctttccagttaggctaggcagactggtcagcgagctccagagatccacctggatctgcctccacagctcgggctgtaagcacgtgccagcgtgccccgctctttttcatgaccatcagatttgctaggaaggcaagcgccttacagactagtccttctttccgatctaaggagtgctcctttctgagaaagaaactaagcacttggcagagattgagaggaaattatttttgagtagaagatgtaaagtttttttgagatttacagtaactgtttctaaatgtacgtaagggagtaggtgggaaggacggagggcttatgtatattatttctaaaacttcaggttttactagtcataactaaaacatctagaatttactgcctgtagtttaacaaagttgcccgtttagaacttctacaaatccttaaacccctccgcattcaaacggttcaactcgctgctttgttttgtgtttgtttcctccccttagctcccaaaacatttaatattttgttagacgatagtgggctttctgactaattttgaaggataatttacatgactctttttacattttactctttataattataaggtttgagccacaagtattgtaaaggaactgctttttgttttcttatttttcttaaggaaatactttattttaatggcagtacttttggatttataaatactccatgcatcatagtgagtcctgaattcaatcctgagttagtgtggaaaggaaataagagtgataagaaagcgcagcacagatcctgcagctctgtgataagccttcgctctgtgctggagctgtggccaccgcgccccccccctccgctccccaaccccagtaactactgtgttctccctgacgggagggaaacaggaacaaacacagtgagtccttagcactcagccatggcttatgtgggctggggacatgcagtggtgctcgtttgcataggccacatggctgaggtgctccacgtttatcttttagagtattgattctctgttgatgctgtgtcctgctgacaaacatccctcacaggctggtgagctctatttcatcttaatgcgtgctgcacagatagtagctcaacaaagaatagggtttgggggtttggggttttgttttagagaatgcaaatttttatggggaaaattgaagcctttttttttttaagtttaataattttgttcagagatctaatagatatccagtgtcagtttccaaagactgaagtcagaaatgtcacctggatcaaaacccatgaatttagatactagaaataaaatggagccaggcacaatacaccgtgcttaggaggcggaggcaggaggatcggaagttggaggccaccttaggctacatactaagactttgtaacagtgcagcaaagtgtgaaatctaagttctctcatccccggagcccacagaaagggtgtgacatggttcttctcaccgtcaggggacaacatggtccccaggtagttttgatttttcaagtaactttgtttttaaaccgtaatgtgccttatggaaccttaccagattctgtcatctgctccggagtttctgtgaaagctgccgtctccagccagggtctgtcggctgccctgggctggaggctgcttgtaagttacaatgaaaattgaccctaggtaacgaaatgttagtgtaacacgtacagtattaatcacggcagtggtttttgtttttgtctttgtttttaatacatagaccaagcatctgaagttcaggtgacgatgatgctcaccgagagctgcaagcttcgaggtctgcaccacaggtgagagcgaggctgcgcttcagcaccgagcacagtgcgactccgcacacttactcactttttaagaatgttatgtcttgttcagaactgaattcttttggaaattctttatttgttttccttctgagtataaaggtaaatgcgtgctcattgaaagcaatttgtaaacagcaaaggacgaagatggtagagaacaggatgtaagctatgtaaataataaatgtgcacaactaagctttctaaaagagtctacgtatcatgtacctgtctccctttaacaaatatgacagggtgatgcatacattaaagaaaattgctacaaaaatttatatctatggaacaccaaggccaaaaataattaaccatccatccttagatacaatgaggttaatggtctgccatgtactgttgagtgtgtatgcatgccagtgtgtgtgtgtgtgtatgtgtgtatgtgtatgcatgcccgtgtgtgtgtgtgtgtgtgtgtgtgtgtgtgtgtgtaactacctgagatcttgtatctagaaatagccatctatgtatttgtctgtagagatattttataataaatttagtgtgtttccagtgtacttttaaaaaggacaatgttttttacctttaataaaattaatttctttatgtaacaataaaaaaaaaacctgtttctaggttttcatgttggtaactgtaaatccctgtccccattttaataggccacttagtggtttactgaatgactgtaccacgttttatttaatttatctcttatgtatgctcttaaaatcatagtatgatttcacaaaatgtacctattggaagaacttttaacaacttcttctagaccaggaatgattggggacagcagcatcagtatcaaggcaaagtttttgcatgtttgttgacatagtttctatatagcccgggctcttctggaactcactatttagactccactgtctctgccacccgcgtgctggtattaaaggcactttccaccaagctgagctggcagtcggggtatgtttgttggtttgtttgaagcatcatatagagaggtctaggaggtggtcatgtctccgacccagagttggaggggtacagacaagtaaatacctggagctcattgggcagcctagctgaaccattgtgttccaggccagacagagaccaaagtggataacagttaaggaaggcacatgatgttgacctgtgacttctatgcacatgcttagactgtacatacttatatattcctacatgtatatacaccacacacaagtattgtgtagactctgcttagtttgtatgactactgagagtttcacatatctgaaaagtgaaccctgactctgtgtgttagaaggctctgtgggcttctgggaaggccttgtgatgtgtgcagagggcaccattggcttccatttggacttgggctgttactgagctctgataaaagtatgaatacacagaaattccttctttgcattttgtttttactttgggttttgatggcctaaaaagatgacagccacatgaaaatgagttcagtggtaatgaaaacgagacagatatttggcattgtggtggtgtaaagaaaataagccaagaggagaagacaactgtttggactgagattaaacacagcataattcttggcttctgatcagctgagatgaaggtgacattaaagtctctaagtctcagaagcagggggaagagaaagcgcgttgttaataagctcttttagtctcagatcccaagacggaggtttgcattaggttcattatttaatgtagattctgataatataaaagtaaatattcattttctaaaactccattgaaaaacgaggcttttgaagaaaaagttgaacgcaatattgagaaacagtgagggtattccttggaagagttgagtaatataactcaagaatgttgccttcaattggccagattcagccccaagagtagaagtcctcacttgttgggaaatagacagcaccccccccccccggctatatttgctttaagaaaggaaggaaggaaaggaagaaagaaaaagagagggagggaagaaagaaactaagttatatttgctaaaagccagaaacacgtctggagcttttagaccctttttaacagtgttgtgagtgagtgcttgatgctgacgcagactctagaggaagcaccttctggctgatcacttatgctcccggccagttccctgaccctgtgaagctgtaaccggcaggacagaagcacgtggcaggagttaatgcagacaaagccacagacttttcccaagtaggagctttagatctaccctagccctgcgcatcccttggctgagcaaccttccaggcaggcacttacgttctctcatgcagctttaatctgcactgcttcacagcatccctccatgatgggctagcagtctcagacaccccacagaaggagaggcgaagcaagttggtcagagttcatgtcatctcggctgtgaagtgacgttaagatccctagttgtggcagtaaagctgctggtatgctctattccctgtagtcctccatctgaccacacgcagttaatggaatactcaaggctgtgcgattgcttgcttcaatttcattcactaactgcccgtttgtacttaggattcaggttggtgtagaataataataataataaaaaaggtcatctggttttttggtttttttaaaaaagatttatttatttatttcatgtgtatgagtacactgtaggtgtcttcagacactccagaagagggcatcagatctcattacagatggttgtgagccaccatgtggttgctgggacttgaactcaggacctctggaagagcagtcagtgctcttaaccgctgagccttctctctagctcaagagtaatcttaagatcagtaccatagagtttattgtgcaggctcagtgcactcagcaagaaatgtcacctgttttcaggtgtcaccttttcattggttgtagtctgtgagtcagaaggtttgctttgtgtttttacattctgtgatacaggttaagaatccctgacacgtttgaaagcatcttgacattctaatttttttgttagctttggtttttctactggaacttgtaagttttctcatattgaaatgcttgcataaattaaaaataaactgctttcattacttcatgtctgaaaacccctaagccgttttttgtttttttgtgtttttttgtggtgttttggtttttttgttttgttttgttttgtttttgtggtttgaagtccccattggcccagaatgcccagtgatggctggcccttgttaatgcataatgacaggtagctttagggttgtaagcatgctcagcatgggaggcagttaggcccagccccgaagccctgcagccccacctcgcctccgccttctcacctctcctttacctccatctgtccattcttcgatatctcagacctttctgtttgtcctcctttcctttgtaaaatgggcagtgaagaacagtcatttattcttggaaacattttcataaagctttttactatttccagagtttttccaggtttggtttttgtgtatatgggtgttttgcatgtatgtgtgtatgtctgtgcaccacattatgcggggcctgagggggcagacgaggcattgggtcccctgagactgtacttagagtcaattgtgaggcaccatatgagttctgggaatcaaacctggtccctctgcaagagcagccagtgttcttaactacttaaccacaagagtaaacattttggttttatttatcttatttgttgtgtctggacaaatgccattaattctgctaagcaatttcagtcatgggtgaagggacagagataatcctttagggttaaggaagtggccagctcacctgcttatcctgaagcagggttagccctgattgatcctctaggtgaagctcgaattggagtgagtgtgtgtgtctgtgtgtgtgtctgtgtgtgtgtctgtgtgtgtgcttctggaaaggaggggctctgcagtccttcctgcattctcctttatcctgggaaggaaatgtccagcagcccaggggaaagcacaggggcgtagaatctgatgacacctaaatttccttctctttatacttgatctttgtccataggttcctaaccactcttcagctgtaacgctaaagtctttgatgtgtccgtccagtgcctcttagagactgatgcttctggcaatggggacactcttaggacacaaaggccaagcagaaacttactgtcatctcacaagtcagagacagcgcctcttggtacatttctgcagcttcccctttgtctttgtggttgtcctgtgaatgtgtgggttgtgcctcagtttctttgagttcttttcatttttttaaagatatttatttattatatgtaagtacactgtagctgtcttcagacaccccagaagagggcgtcagatctcattatggatggttgtgagccaccatgtggttgctgggatttgaactcaggacctctggaagaacagtcattgctcttaaccgctcagccatctctccagcccgctcttttcattttttgatcgttcagttgtaaggtgttactttgtcattcttgggcaacttttcactgttgatatcctattgacttctcttgttaatgcacctttttatgtttcatattaatcttttaaaaaactttttgacattggtgttctgcctccaagtgtgtctgtgtgagggtgtcagattccctagaactggggtcacagactgccatgtgggtgctagaacttgaacttgggtcctttagaagagcagccagtgctcttaacccccaagccacctctctagcccccatgtactcattctttatgaagccataaagaactaataaatagtgcttttagggtattgttatgtatgtgtttcaaaaatgcattaaatgtaaccacacaggaggtggcactgagtatgtaaattgagtctatgttatttctggcttaatagagaggaggtaattatttaaatacttacaaccttggggaaagtgagttattttcatatatcagctggagtgtcattacacaggaggatgggacgtgtgtgtgtgtgtgtgtgtgtgtgtgtgtgtatatgagtgccatgagaattaaagtatgcaagattgttcagtgcattcttatttattgtgtacataagaattgtttgaaattcacatgttacaagtttgaaaactaaggccaagtgggggaggggagcagggcccccatgcactcccatatccactctcacaagcatgcacaaacacacacacacacacacacacacacaatcactcagatagtgaatcttgtttacatacacacacacacacacacacacacagagtgaatcttgttttcaaaactcaggttccaaattctactgcaagcatttgactttgtgacagtttcaacctgttggagacttttgatggtcccgttttatttgcagcggggatggggcctttttgatttccagcgtgacagtaaagtcggtgggacagcgtgatgatgagctccgggccaagctggccaagcagccatcagctgtctgcgcctggcctttagggtggggattaacatggccgtcagcaaatctaatacaaaggaattcattctgggtagtcatttttattctacaaagaaagctcatacttatgaggacttttcacatctggtttaagaagtaggccatttgtaaataaatattttaatgataatctttttaagtgtgtttggaatttcattttgctttcgattatctttattactttttatttaagataaatcagtaaggttttagatttcacttgcatttttccaaatctcttattattttctagaaacctccttcctattactcatgtgtgcatagaagaaggagaaaagcccatggtggtattgccatacatgaattgggggaatcttaaattatttcttcggcagtgcaaattagtagaagccaataatccacaggtgagaaaatttccctaaatatgaaaaattcctaatggttttgcaagtagatattaataaccacacacatagtgtctaaagattaaaaaaaaaaaagacctcagaatgaaccaggagatatttataagctgtcgatttagaggaccgtgaagatggcctgtggcttcccagtggagcactcttggcccatgctgtttctcattgttcgccacaccttcattcataaatcacctcttatgtcctatgacagcatctcaaagtctcttccggagtaacttctgaagacggcctaggatttcctttcttggaatagaaatcatagcagagcggtctaaccatatggtgccaagggcactgaaggttggaggtcaggatcgtgggggataatcaggaatatccttaatgtgcctgactgtgagacgccacggtttaagtttctctcttgtcactaccgacgtgctgtggtagtgatcagagagtctgttgggtgctttgctgtctgctatattttctgttcttgttaaattgattttaagacttaaaatagcatacttcttgtagttaataagaagaacaaactcagatctgcactgagtatttgactcttaatgtatatgatatgtcgtttaagctaaaagactaaagctctggttagaaccatgtagttagaggtcgtggtctgtgggtgtcaccaggagaggaacttccctgcccagcctgcagtgccggcgggcatctcgaggagcgtgtctgcagagagactggtttttggtagaatgctgcccccaccccagggtggtggtggtggtggtggtgataatctgataagacctactactacgaaagaaaagagccagtcactagagagatacatgaaaatgataagtgtcatggataaagtctcatcggtggtaaatcctgctacccaacaggggcttttgtaatggatgaacagtattccgtgctgccagagcacatcttggttgagaaataggttttcaaaatctcagtaagtaggtccaagggagtgttatggggtgggactgtagactcaggtaatcagatcccaaactagttctgcagtatctacagactgtgtcatttcttttcctctgttaccacaggcaatttcccagcaagatctggtccatatggctattcagattgcctgcgggatgagctacctggcgaggagagaagtgatccatagagacctggctgctaggaactgtgtgtaggtgtccgccgctccctgggcttgccctctgtctgggagtcccggggcacacagactgtttgtggtgatgctgcatcttaacaccctgctaccttctatgttcatgtctctctcttcagcatcgacgacactcttcaagtcaagatcacagacaatgccctttccagagacttgtttcctatggactaccactgcctaggggacaacgagaacaggccagtgagatggatggctctggaaagtctggttaataatgagttctctagtgctagtgacgtggtaagtactggagcccaggtcaacagcatgtagagaaaagctttctgtttcactacagtcagtgttttgttcttttaaaaatcttggtgctgttccttgaaattttcatccagagagcctgtgtacttagctccctcttggcccacttaaagcagagcaccggcccagatcctgtgttcttgctcacaccagctgaggcagcaccattcccactgaggggcgctgaggttagggagcgggcggccactatcatctccttgcacaagtctcaggatgcctgagtggctactaaaggcagaatggttgctttctgagcatgctctcttctcagtctgcagcctctctcatctgcagtcctgacactgttcctgttaggtgtcagcgtagttctttctcctcttccagagcacagagttgagcccttctgctcagtgatgtgcttccagaagccgcatctactcgtccgttgtaaggttctgtcccgctactttttattctagtctagatcataatcagcccagacttggaggcgcgggcctatcgttccagacccacctagggtacatagtgactgtgtatcaagaaagaatgaaaaagtaatatgatttttgtttgttttgtttttatctcttgactgttgcacactgtagctgtgtatttggaaattagattaaaaagtttggctattaaggtccctaagtcatcatttgacaatactacattacttgtaaaataattgggatttgatctcatgtttcaacatctaagacctgggttgattgtgtttgggcgtctggcttattttattattcagagctgcctttccatttcggcttgtatgcttcacacgtctccctttaatagtgggctactgacacagctcctactcgttacttacattgattagtgcacatgctttccccccgtgtattgattttgctggctctataacaaattgctcagggctcagatataaatggactagacattataagtgtatatcatgccttatagttttcataattgttataattgtattcaatttatatctgagaggaaaaagagccttttgttggactaaaaaggggagtatcgttgaggtttggccttttgctatgtactgtgatgctaaatatcagctcccaaggcctgctggacctcaaggactagagaatctacacagagaaccgactgacaacgctgtggccttgcccccaagtcatccctgattggtgaataagatgcctacagcctgtagctggacaggattgagatgggcagggctcggggttcccaagcttggggttgagaaaagggaggaggagggaagaaggaaggagccatgaattaggtgagtcagtcctaaaaggacaaccatgaggactggcagtgaagttacgggcagcccagatggagcatggcaagtgataactccgggttactaatggggaaatagattctagtagtgtagaggatagatagctgcccaactctagtgctgattaagtcttgttatgatgataaaagtttcgtgtattttatctgggaactgaatgatcaaaggtggggtagaaaccctgacttgagattaaataattacagcaatattttattgctaaattcctttggcataacaatagtacttggttttcttataggtctgtggtctatttaagctaggttcttggccacccaagcagtgtcaggcatgggttttgtctcatggagtgggccttaaatcctgtcactagaggtgtcacttggtggagagatgtctagttggaggattctctcctccattatttggtgactccatttagatttctttcatatatgtatgtattttaagaaatctctgttgtaggtttccatgtgactcctcaaatggccctccttcattttgttttgatcattgtgagtccagtactggacatcttaacataattctctaaatttagaataccaactcccagttcaacaaagttctccctcattacagcccatgctggtcttgggcatgaaatcttgcctcagccttctaagtgctaggattacaggcatgtgttttgtcttattccaagttgaattgagcttagcatattattgtaagaatgtcccttcattaaatttaacgtggctaactcctaaaaatgatcagatttttcccttaaattcttccagacgcatttcatatgcataaatactccctataagtatcttttgccttgaatacttgggaccaaaagaaatatttatgtcttttcctgtgactatgataggctgttagtttaaaattctgccatcaagttggggcattgcatattgttttaaattcttaaaggttattgttacattctaacattggggttaaaaatgctaacatgttgaacacatgaacacatgttgactttgctctctttgggtggaggtgggattcgtattcattctctcttctctctctcttttctctcttttctctctctcttctctctctctctctctttttctctccctctctctctctctctctctctctctctctccctctccctctctctctctctctctctctctctctctctctctctctctctcttctaggcacagtttctctgtttaaccctggctgtccttgaacttgccctgtagaccaggctggtcttgaacttaaggagccaagcacctctatctcctgagcgctaggaggggttgtaaaggttgtacactgaggttgaaactcagtgtcatttcttaagggtgctgaacagttttcaccatcaggtactaagaactgtaaccctgctcccactgaatctgcacatgggaagtgcacacttgcaggtgtgtaagtgcatacttgcaggtgtagctcaggacccttttttctccttgaaagaaccttatagttctgcagttttgtagttaaggagtcttcatgatttgcttagaaacacactggttggttgttttgtcataatagtaacgcattgccactttgggctttgtttttgtaattctatctggaaacatccaatatgttggtacattaagattctaataacgttaacatcagcttttaactgtcagcttaggaagtacacacaaccagatccagctagttacgaatgtctagtatgccaagatgggacctcacataggcactctgaagacgtctgggtattgttcttgttctatgtttttgccaaatgtaggcacaacttcagatgtctgttacgacttttttccctttatttgaaaaaatactttttgattgatgcctcctttgaattatttagataattatagtagctaacacagttcagctgtcaagagtctgccaccgattgagtggtgaatgcaatcaggaaagcacagttgagagtttcatgttgtttttcctcgtctttgtggtactacattgtgtttaaaaagcattttcttgggaaaaacaaatcaaagaaatgacttccatgctaatcttatcagcatggtttatggcactcgggggatcctttttaaggcatgtgaatagttactaggccatagagcaaatcaaatgccccccatgtgcctgctgtttctttctagacaccggtggacattgtcctgggagcagagtctgcagtcattcagagcctgcatctgcagcatgctccatcttgctccagtccgccaagtgctctagcggccatcgccagatactgagtaggctcagtcaggagactcatgtacagcgggtggtgtctaagggaaagctggagtttctgaaagacgcttcttattttcaaaagcagagaactctttctgtctcatattttccattactaattttaggtagggcttagaagatcctcagtagttagttgtgtgtttccttcatggttgcagattttatacaccaacaatcttagacctattatttcagtatcaaattcacattaagagaattagtgtagggacagaagaacaatgtagacatgaaaggatcagtttagaccatggtttaggaaatagagatttaagatttaatgttcttgatgttagggtcctgcttcattgtattgctctagcgttggttgtcctggcgtttcttaagaacgagcagtacagggatcactctaagaacagttgctgtatttccagacgtggtcgactcccctggcagtgttgtctgcagtactgctctctcaggatctcacgcgtctctgagcatctctcctctggagcgctttggagacgtgctcctactctctgctcctactgtctcccttagaagaccccaggattccgatgaagccctgtgcgagtgtctgctggcggagaaagtggcgtgagcagccagttctgtgatagccgtcggttgcgtgtaggtctgcaggtgtctaaggattggtcacaccagcagctgcagatgctggcttttgaggaaggcggatagacccagtagctcaggacacaggctgcattcctccagctctgcagcctggggagtccagcatgagggcactgatcagtgtcctgctttctgctatttcttcacatggcagagggaagagtggggtttgctgaggtctttataagactttataagctcccattcctgggagctccacctttatggtgttaactcctcccatagccccacccgctagctttatcacactgggcatcgggagttcaaaatgtacacatggtggaggcatggtggagtctctcaagttctgctgctgggcctcctaattcacacccctcatgtagtagatcgctttcattccttcctgacgttccttcctcatttgcctaaaatcagtctcatcagatgtgagtgagcctcaaggtatgatttatactcaggtgaatttgttttcagctctaagtttaggaaaggaagcaagttaccgacttccagaaacgcagcggtgggacgggttcaagttggtgcatctgtctccaaaagcgtaaaacaggaagggaaagaaacccaacaaacacagtgcaccttagactcaagcaggcctctagctcagtgccttgccatccaggaccctggtcccttcatcaacagctgcccatgaaagttcatttgtggctctccactggggtcccagccaggcagggcagagcatgagagtatcccgtcacacgtttccagtgagtgctaaggtttcgtctcagttaactggctggggcgattgctctgctgaagcctgtctggcattttaaattcccagaggactcacacagaagctgccccattcagtgacctcaccctcatacgttaagatgaaaacaattgtgtactttctgacaaaccatgccagtatatattgttcattaaaaaaaaaaaaaaaaacctagtttttgtccttcattttaaataacaaggtcagaagctatgtctcttggcgcatgtctgtagtctcagcactttaggaagttggggaagggaagttgttggagtctcaggccagcctgggttacagagagagacctgcccccaccagtgccaccaccaccactcgcaaaatagaggctagcattcatctgcacctgttacttatacctccttctgtcaaagatggcctgatgctcactggtgaaaggacagcagattctgaaaggctttgctattctggcaatgctgcccctgagcacatggatagtgggggaactgtgttcaacccccacccccattctccaaatgacaggtgggaaattctaacccctgaaactaagactataactttaagaacacctaggacttccagtgaccagtagaagctggaattaggaaggaagggatcaccttttagagcaatatttaatgtcattccattatggattttttgttttgttttgttttatagattctgttaaaaatgtggctattgttcactaatataggttgaatagccttcgtccaaaatgcttgggtttttttccctagacttaatacatacatacatacatacatacatacatacatatgctgtataaatgggactcaaatctaaacacaggtctgttttgtgtaatatttttaatgattttgtgcatgaaacagtttcatggcatggaaatttctttattgtagtgtcagctctataacttagattttggtgtgttttgcattagggatattcaacctgtgaaaggcttttttaaaaacaatctgtgtattttacacagtgtctccagattttgttcgtactgaaacagtaacctccagctttgtgctctgggtgtggatgtgctgtgtgccccacccagctctgccctttcactcactgagatgtgtgcttggccagccataggtttcacctgcttcctcgcctggtaacctaagctgccagcgtgaggttcaagggtttgttgtgaaaactgaatgtgattggaggctcatcgcaaagcactggtgagaaccctttagctcctacacaggtgctgccccctctccccagcgttgacgtgaactcaggttcacaggtggcagcaggttgtccccaccgtgccctggacagcagcatagccgcagctctgggtggtggtggagcctgccttccactgctcgttcttctcatgaagggaaggcccgagtcagccggccgggccttgcagtgcctctgcttgggctctgcgcttactgttcatccccttactggttttaggtaactctgacttttactcagctggacagtatcttttcagggtgttcctaaaagttgtaaatggtgacaacaacacattgtctctctgtgcatgctagggttccatccctcgctctgcaaaataagcagatcagaaacccatgactgcttctatgttatgtaatctgcatgtctcgcttactgagggaatcttctgtccatctaggttgttctccatttcccaccgtaattcgttaacttaggggtagcatggtgaatagccagtgatagaagtggtttctttgaacggacctagttacttagaccaaatgatacaaatgttaacattgaagaattaatgcattttaatgctttctttcctacaccagctggagaaactagccagtatggtagcttttgttttatgagcagtactcactttatttaggagtttgttcagttgctatttgtgacctgtctgtagtcaccagcgcccagttttagaatgttcccctcattgtgctgctgtcctctcctagtgggcctttggagtgacgctgtgggagctcatgactctgggccagacgccctacgtggacatcgacccctttgagatggccgcttacctgaaagatggttaccgaatagcccagccaatcaactgccctgatgaactgtgagttttttggatctcagacatgagccttggtgcatttactatgttactataaagcaggaaagcacgtaagatactccttcagagtaaagaaaaaagtagaggacagaactcagtgctgacctctgctctccacagacatgcacagacacatgcatacaaccacacagacatgcacatagactacatgacagtaaacacagacagagacagacacctttctcatcctggccttgccttccttccttgcctccatcatggcggtggggtacacagggcctggttgggatggtggcacagcaatgtgttgtctacagaggccctaaaaggtttccctgccagttttagatagtagctttgctgtagatccaggagtcttaatttcaggtaacacttcttcctagttcttcctcaacagcgtccaggacaacgcagcctgttattctgactgttctgtgtatttacacaaagctctgaactttctgagtattgtattctcataaagaactgaagatggttgtgtgtaatccaaagaacttaacttcctttaatcctgaagctgctaacagtacagctaagcgattgctcatggctgtcctccccagcagcccattaaacagagcacataactggcaggacgctgacggaggcctgacacgtttccatgtcactgcaggtttgctgtgatggcctgttgctgggccttggaccctgaggagaggcctaagttccagcagctggtccagtgcctcacagagttccacgctgccctgggagcctacgtctgacttctctcccagctccgccactcagaagaaagtgcctgtctgtcacggatgcccctcgtgcagcgcagtgcctgcaggggcacactgtctccagatcacccagccttagcagtgcttccaaacctcagcttttaacgatgacgtaataacgcagagtgttttctagataccacttttactaggttgaaccaaaaggggttttgtacattttttggccaaaaatttttttaaaatatagtgactttggactagggggtgcattcttttaaaaaatgaataaacagttttaaaaattatttagacacagatatttggaatagctgtcttagtgccaactgcttttattcttaatgttttacttcattgaagtaatgtaggtgactcacctttaaagctattttaatattttggtcactacttttgggagtggtttgtcttcaaaatgcggtacttttcttaggaaaaacaacattacgaagttgtctggtttgccttatacgaagaaagatagtatattaggaaaattgaaaaagtaaaaagaaaaagaaattacaaagtaaaaataaaaaaaaaaaaacatatcgcccccgcatggaaaatcgcttgtttagtgaccatggctctgctcacatttggggaagcaggtctgagttcacatctcagtcagctttcctgtgagctggaagaaggctggggcaggcttgtggaaaacagtggtgaccttatttatttttgctctccggggaaggagaggacacagttcctgacagtgacccctctctactgctgcggttccctctgtgcacgcctgggcggagctacgcacagagccggtgcttctgttgttgtgggtttggggggttttagttttggtttttggtttaaattggtaatttttatgcttatcttcaaggctggcttaagtataaatttgtttttttaaaacacttgaaaaattaaaggactcattttatatgctggtattcaaaatactgctcacagtgtgtgactgttggtcgtgtcctgaaagtcttggagtcacattttatcccctgagagtttgactcaggttccaaaaccctaacagaagaacagctgactctgctcagccgccagggcctgttaagaagttggagttactcctacaaggacttatcatggagagagtccacaaatacatgtatgtagttacacacaggtttggtctacctaagggattgtcacctgggcctgtgaagtgactgggcctgcagctactgcctctgtgtctgtcctctcagggatgtgagggagaacatgggtctgttctattaaaataagtcttgtgaataaagagagtatctgaa

SEQ ID NO: 7 - DNA, 79361 bp, Mus musculus
tcagtctccacgtctcgctccccatagcccggctaccgccgctgaagcctgaagcacccaagtcccgcagaacctgaccccggcctgtcgccaccaccttggcccggtcaggggacgtcgcctcagtcacgatggggctcctgcccaagcccggagcacgccagggcagcggcacctcctcggtcccagccagacgttgctcccgctcggtcttcaacaacattaaggtgagtagtgttgtgagtagtgttcgtgttcggggcaggagggcggcagagtgggtgacacaacctaggacgtcgatgaggccagtccgggagctctgggttgcacccggctcccttctctgtccccggtgccacatccgtggggcctggcccggcgcgtgagcgtgagcgtgagggggcgacacctctctctctctctctctctctctctctctctctctctctctctctctctctctgtgtgtgtgtgtgtgtgtgtgtgtgtgtgtgtgttgcgcgcatatgctcataggctctcgtggggagtaataatcagaacagacgtaactttgtaaaggggaactgtcctgttcttccatggagaaagaacacctccagggaattctgttgggtctctgctgtgggtatgcgctcttccttaatgagaagggatgcagaggagtttagccagcaccttgtgggcaacaggctgtgggcagcctgagatgcaagtcagagcacaggcaccttgtctcagtggatggtagaagcctgcattccttgcctgggttttcatctttgcaatagttgggagtcgcagattagattgctacctggctgcatagctcccagcagttttgaggattccccagctctcctggtctcaagaaaacagcaggcactcgaggtttatggagaaaggccaccagaggtgcctgtggcctgagagttatgaggagttaatagaaaaaagaggaagctgttagcatgagaatgccttctttggtaagggtcaaaagtagggtccacttcccccaggtcttgaaggacctggaatggttgcgtcctcacaatatttgggagagaggttcctgaagaaggtatctcctggaaggggctagacgaccttggtcagacatccaggcgccctggggtccggcaagcatatggtgcagagagattatttcccacaattcctaccttagatgtaatgggtgcccagacctcacatggaaggattggagaaatgtgaacaggctatgtgtgtctaacggaaagagactggggtttggggggtggggtggggcagagcgaatgccacctgcatgttctgcctcaggctgttactggtagaactggggttcctcgtggggatccctcttttgttactaccaccaccaccaccatggttttaaagggctaccttgatttcccattggaatattcctaacacagaaaattggaggtaattgaaaacagtcctcagatctcctcccctctagccagacctggatgggaattccatttattattttggttctaccaatttagagggacttggagaattatggagattttttttaaaacttgctaattagaaggaaagggtgtgtctaaaggatgggtggtctcaaaggaatgggattgtggcagcacgagaaggaggtcactctcattttccccaagaatggaaagagaggtggctgtcccaggattcctgatggtgagggtgacaagagtgactcagcacctccaacccctaagaataagtgggtggcagccatttcgttgaaaaatataaaaataagataaaacccacattcatatgctgagattcatgcctgagacctggacctaggccagttggcctcagaagggagagtcaagagctcttatcagtcaagaggttttgagtctgttaaaacatttccttggttggaggataataagcatcagatgacaggcaatttggagagcccccaccttagccaggttcgtcctggagaccctaggcacacctgagtggagatcctagctaagctttttcttgctggtgactctatgcctgggcctttgctattcgaagggagattttctcctcttgataacaggctgggtgattaccttataccttcccagcaagggaaaggtgacacaagtgacacaagtggggcaggtgacaagggacatccagcccaatagcttgtcactttgctggcatctttgtcactgggatggactgtcaagagcggatgttgctataaacccatgtgccacatgatctgagggaggagtagagtctgagaatacagatccacggcccagcccggccacactcacttcctgggtcactcaggacagacacatggctcacctttcttggccctctggggtccttttctgaaagagtgggtgtcatgaatagttcccaccatgcacctcagtaagaatgccctagggtaagagttaaactgggcctccccagggtgagccccacttctgtaaacaaggcatcgcattcgatgttgtccaggagctccggtttcaatgttagaccagctctgaatgacgccctggtctccatccttgacaccacactgtgagcctgcacaggtcaagccagataggagggtactgaggtgggagagtgagtcccacctctaaccaagatgctatttgtaattgatacttaccaacaaaggcaaacatccgttttcttcagtggagtgtccctgtgaatatcaaaccacacttcagagcagacccgtatccccggggtagctggccaagataaaacaaaacccatttttgtttgtttgtttgtttgtttgtttgttgtgggctttttgtttagcttgggcatttttagcttattgttttgttttgttttgatttttgtgagatttatttatttatttatttatttatttatttattttaaagcctacagcaccctctggtctcccagtagtaaccaagccttaccctacttagcttccaagatcagacgagattgggtgcattcagggtggtatggtcatagatgagtgctgttttgttttgttttgtttgaaagagagagagaaagcataaagttgagtggttggtgaggtggagaggacctgggaggagtagggggagaaaaaacatgatcaaactataatattggacaaaagttgttaaaaatctttaaaaatgattaaaagatagattttaaaaactcaaaataaaaattagaaaaaaactgggtgtggtggtcttgtaatcttagcatccaggagataaaggcaggagaactagaagcttaagttatcactggctatagagtaagctggagacagcctgggctacatgagacctgtgaaagaaagaaagaaaaagagagagagagagagagagagagagagagagagagagagaaaggaagaaaggaaggaaggaaggaagagagaaaaaagaaaccattgtcccattagttccatgatgcagttattagttatcaatgacagttaataatattaatcacaatgtccataataataacaaataatagctaacagtaattgagctctatgaatgtacagaccttgaggatcttgcacgcacatcccatctgctttacaactctagcagaggataacattaccaacctcactggtaaggcaatcaattcttcatggaccaggaagggaggcagggagaagcaggaacagctatggcacaaagtactgtcctcatgagcactatcgtctacgctggctctataactggcgacaacacagccatcacttaacagtactttctccaggaccagaagacattcagaagtgggtacagaggggacccagacatgaatccccaatgctgacccactcctgcctcttctctcttcacaaggctccatgaaagagccttgcacctatttattattattattattattatcatcattattattattattacatgaaacggtgctggaattaaaggtgtgaggcaccaccatgcagccaggggaatttttacatagcctgtgtgtgtgtgtgtgtgtgtgtgtgtgtgtgtgtgtgtgtgtgtgtgtgtgtgtaacaagttgatgtgcagctatgtggaggccagaggacaatctacagtatcagccttagggacagcttccatctcctttgagaaagggttttaaatggcctgaagctcactgactatggtcaactaagccatggatccctagccatggatccctagggctcccctgtctctacctactgctagggtcaaacccactctgtgtctgggtaatgtcattcttacacaggtactaaggctagaaccgggatcctcctgcgcatgcggcaagcactttataggttgggaagtgttttgcttctggtttattttgtggtgctgttgaatcccaagccatgagccatataagagagcattctaccactgagtcacctcccaggccctgtggggtgaagatttatatatctcctcctgcaggagacctctctctctcaagatttatttattttgtctatatgagtacaccattgctctcttcagacacaccagaagagggcattggatcccattacagatggttgtgagccaccatgtggttgctgaaaattgaactcaggacctctggaagagcagtcagtgctcttaaccatggagccatctctccagcccccaggagacatctcttgaggtttggtttgcaagaagattcttaggaatctcagaacctgctcaaacatcactgtcaattagtctagtacaggcccaggactctaaattaaaagcaggttccctcggagaccctgggaggaggtaggctctgctcctgacttctcctggcagcctcagactaatctgaagctccctaaagtgaaacaccatcgtggagctaagtcgaggttcttctgaggcctttgaccccctcagccctagtgaggcatcttgagtgccacttcttagtttccaaaatccagggcagcatgccaacaatctaatccatccccaggaaaacactcccactggactccctgaatcagagaagagctaacggtggctcgcccacctccctccagggggcgcatttccatagacttcagaacagtgatctgttctcaggaggctggcttggcaagtttatcagaaggcagggaaggaaggatgaggactaatgagttctctggtattagaatactgggattcctctctgggatgatgttctaagccctctatagcttttcatctcccaacacagaacaaatgagagcaagttaacatttctgagggtgcagagtccctttcatctgtcctgattgtgacaggactttctctttttccaagctaggagacccagcctgggctgttgggatgagggcacgcttctcctatcttctcttgtctcagcatgtaatttgagacaaacggtgtttgtaggggaaagttagaggtctctgaccctcctcgttctccccttcccacccttgaattggttgtaaccacctttttgtctgtagagacactgggtgcacagtgtctactatgtgcccaatcccaaggatggggagggaggtaccaagaaggcaaggatagggagactcagcgctgtgtagatagaggataggggatagaggattgctctctgtttattatttttagactctctagagatggttttctcaaggaatgctgtgaagaaatgaagaaatggggtgtatgagtttgcccttcttcatgctctacatgggtcaccatcactgggggctctctcacagtggccccatgagaaagtcacttgtgttgcttagttccaggcacagctttatttgtttagagtcttttagaaaatggttttcagtttgaaacgataacagattctcaacaaagctggtcttagaggtcctgtgtatcctacacccactcaccctcagggttccatgctatatgacaacagtaatgacgaaggatatcaaaaaagcaggaaatcaccactgctatctcgtgcacgtacagtccggtcctgtactgctttatcacaggtagatttgtgcagacaccacccatctgaggatacaggtgtgtttcaccacccaccgcagagaagtgccttgtgcctgctcgttgagagtctcatcctctgaccactgtccctaacccccagcactgtctagtgtccatctccaggattgtattatttcaaggctgttacatacagggaagcatgtaacaggcgaccttttgaaaaaccagccgtcttcatgcagaataacgtatttgcgttccagtccgtctaagctgtgacacagatcaggtgctggttcctttaacggctgagtactacgccaaggtgtggatgtgctgtgcttcgtttacacatgttcacttatggaagaacgtttggctcatttcccacttgggactagttcagataaatccacaagagtggtgacgtacaggcttctgtgtggacatagctcgtaatttctctagggtgaatgccgtggagtgttgctgggtggtgtggttgttgaacaatgatactttttttttaaaaaaagatttatttattattataaataagtacactgtagctgacttcagacacaccagaagagggtgtcaggtctcattatgggtggttgcagagatttgaactcaggaccttccttcggaagagcagtcagtgctcttacccactgagccacctcaccagccctgaacaatgatacttttttaaaaaggatcttcctaactctttcctggaagggtcgtctcaccttacacgggtgtcagctgcttagcagttggtcagcttttgacattaccactctttttttgtaaaaattctaatagacatgcggcaccacctctttgtgtctcgttcatgttgtccttgtggctggagagaggaagattgagcttcttttcatgtgatcatcgccccttcatgttgtcgttttcctttaatgttgtgtagctttaagagctcactgggcactccagttataagtcctttgttgggttatttggtctgcagattttgtctttgaatctgtaggttggttttttattttttttaatcatttaaaatggttttatagagaaaatacttaattttgatgaattccaattattggtctgtgtgtgtgtgtgtgtgtgtgtgtgtgtgtgtgtgtgtgtgtgtgtgtatacacctgctcacatgtgagcacacagtagtcaaaggaccttaggtgttggtcctcaacattcacattgtttgagacagggtttcttgtttactgctatatacaactccagcctttgtttgtttgtttgtttgtttttaagctcacggaggcagattacccactactcactgtgtagctcaggttgtcctggaattcctgatcctcttgatttctatctctgaatcgctggggtactaagtatgtactgccatgtctggcttacatatatcagccttcagcagtttgggtcctcctcttggtgctacatctaagaaggcttgcttcactgaatcataaatctattgcctttcgagttgttctgtgtagaggtgaggaccgggtcaaagccttgtctgtttttacctctagatgttcttgtgccacgtctcttctctcctaacctgtctccgcgctcttgtccaaagccagttggctgttctcctgtaggtctcttggttcttcgtttagcttcactgctacacaccttcaggcccctccttgtatcgctgtctgattattgtagctacggagcgaggctcgacgagggaggagcttgctttcacctgtaacggtgcagttatcaagcttgctaactcacggggcttcccttgccctctggcttttggcatgatttcagggcagatttcagcagtggggatgagctctctgtcagcacccctgtctcctgcttgccttctggtttcagctgtttggcatgcttttctccttggacttttagatctgtgcctctaaatccttctctatgagggtgggagatgtctcagtctgtaaggtattcaccatgcaagcatgagaacttgagttcagaaccccaggatacatgtaaaaatctgggagccatggcccaggcctctaatttcagtgctgggagggtagagataggtttcctgaggctccctggccagccagcccagcagaacccataagttccaggttcagtaagagaatttgcttcaaaactagagacttgctgtcaacctctggcctccacaagcacatgcatgtgcacttgcacatacatgtatacacacatgtatacacatgcaataaatacacttttcctttataatcctaatgacagccctgaagagaggtgtcaacccaacacctccatctcacagctgaggaagaagagaactgcacagggccgagtgctgagtaactgacaaagcaggaatgcccactcagcatctccctcccaagtcccccttttcccgtgaccacagaaggactctgtcttctactttctctcatccgtgacctgcaggcttgggctccatggtctcagggttcttttcccaatctcaaattctcagctcatgctagccatcatggattaagatgagactaggagcgagccagttggatctgtactgtgcttggagagtttctgtggacccagtggaagcaatgagattcttccatcagtgtcctgctggcttgggttggaggaccttggtggcctgggtctgccttactgttggaagttgattaaatcttctcaggggtggagagtgaaactaaggcagaagtcaacttggacttcactgtgggggtgaggggggtgggctgatactgttgggggtgggcatcttcatgagctgatcttcccagctcctttccattctgggtcctgaagctcagcagtatacccaagaggctcaggtccagcccaagggtgaagcaaagagagggagccaaaggacttgtgaggaactcttagaacattcaatgcgatcagtatttggtgctaatgcccaggactgctcttggcttcaagagatgtggtggactctcttctcctatcttagggtttctattgtgggaatgaaacaccatgaccaaaaagcaaattgtgggagaaaagggtttatttggcttagacttccatattcctgttcatcaccaaaggaagtcaagacaggaactcaaacaaggcaggaacctagaggcaggagctgatgcagaggtcatggagggatgctacttactgccttgactcccatgacttactcagcctgctttcttatagatcccaggatcaccagcacagggatggaaccatccatactgggctgggcccttctctattgatcactaattaagaaaattccctagagctggatcttatggaggcatcttttcagttaaggttccctcctttcagatgacactagcttgtgtgtcaagttgacataagtctactttagcacacctccttagagaattaatgagcatctgggtcctggaggagcctggggtcttcttgacaaaccacatatgttcagcagggtgtcacaccaaatgtccctgggatatgggctagcctagagcaccaagaaacttgggtaagatacagaggtcctcagaaggggtcaacatggaggttcacctttgtcacatgcctcacctcaaggccctgggttctaaataataaataggtttccacatcctggaagggctagagaacaatgtatctggagatagggcctgacctgactaaccccaagaattagatttttccccctgaaaaccaaatgaatattatattttgtttcacaaatcatctatttctacaagtctgttcttgttccccaaatcttggagtaacctcaacatccagggacctgttttgtgtttctcaaacgcagggtcccagaagaagcccgtcaaatttggggactaccacctagatagagctcaggaaataactactttatctggctagttcactcagtcagcttgttggctacagagggacagactctccacagtttaaacaggatgggaatgtggggtgtgggtcaggacatttgagcccagtgggacactggcaaagtgggaccagttacagaatctggtggggtgccccgggttgggggaaaagggcacgttggtagatcgctaccaacatctaccagtagaaacgacacaggattttcctggtgtcttttggttgccaaacagaaccctaaacagatcttaactgaccactttctcagtcagcttcaaactgttccttccttgcgcctcgggtcctcttctttttcttaaacttactgtttttctttggctcacaatgcaggtggaggcaatagccaggagctgagccaggagtctgcagttgattgactggttgtgggtgagaccttttctagctaggcactgctgttctgtctggctctccgagaagctccaaagtttctgagatggattgcctgtatgtttgctggttcccagccacccgaacaaaccacccccgtttgccctgggacacaggactttcagttttaaaactggaaatgttctaaggaaattgaaataagtgagtcaacttactgcctcccatgtaagaatagcttacgaaaacaagcttctactctctgactaccagaggcagcaaggagggtcgcagatgatgttgcagggtagaaatgaaccccagaggctcatggaggcttccagagagcagcttatcatgggccagatcttgtgccttgcaagcctcattagtctctccgatttacaggtgaaagcctttctccaagcttcctacgcccattgtggatcatggttcatgactagtccattgcgtagaatctgtacagataagaatatggacagataaagctcctggtctggggagctattgaatttcagaattgactgtgatgtgcaaactcatctcctcaaagatgcaaaaatgtgctgatgtctctgtctttgctagctggctcattcacaggatagccttcttctacaacccaggcccacctgccttggggatggcaccgctcatggtggatgaagtgctccacatccaccgtcattaagaccatccctcacaggcatgaccaagtaatccctcagtgggaactctcctccaaatgactctaggcttatcaagttgatagctgaatctaactaggatataacctattatatacttaatgcataggtatataagatttataaggagcagggatagcattgttcatacttgtttggttggttgtcttatttgtactatattttagtctaatttcgtttcattcttgcattttttctttcttttctttctttcctcctcttcctcctcctcctccttctttttgagacagtatcttgctctgtggcccagactgagctgaaattcactaagttaacctggtgtactttgaacttgcaataatcctcctgcctctgcctcccaagtgtgattacatacatgagccactgtgcctggtcttgaacattcagagtactggccacagttccaacccattcttagtagccagtacaaaattccttccatttggaccatgtgcgtggtgatccataaaaagaaaaaaaaggacagatattcagctatgactataattatcaatatatctgtgctttctgtaagagtgcacacccacagtgcacacatttagtgagctaatgtgaacaaagctaggtcttccagaacgctgactgatgaagccctttccctatgccgagaaggcagcctgttaattcctactttatcatggaggaaactaggaggaggcctatatgaactgccactcacacaagtggagagctgaaagtatcgctttctgggggtgctgtcttgagtttttctcccctctacagctgcacattgtcctccataaatctccagtcatttagccagagtggtacctagccatagcgtcctaccagagatgtggcagagctagtgctgttttctaagtcagacatatcgactgttgtcccagaactctaacttcctcacgtttgcctctagatgcacatttcctctttggtgttcagccaacaccaacactccatccagcacaggacacttagatggagtgtggacgtggggctatgtcatggctttaaaaatgttgatttctaaatgaaagaattagtggaaacccgatcattttcacagtgtcttaggctgtaactcatttgcttagaaactcaaagggaaggactactctatcatcggagtgtcaataaataaactgcaagatgtctgtggaatagtcgcaaatctattgtgtgtacatgtcttgttgggaattgtactacacatcaattttaaagtttttttttaacttcttattgattcttgtgaacttcacaccattcaccctagtcccactcatctccccatcccttcgtacctgccctcttcccttgcaacctcccctgctacagaagctgtagtgtgtcccagtgtgtcccagagtacactctttcgtccatacttatttatttgccaaagttcattgcaatgactttttggtttggtacaaggcctctgactcctgctactgtatcaatactggaacctctctggaactcctcttagatatcctgttgttgctctgtgtcatggtgatcctgtagttttagatctgtaggactgacccagccattcatgcactccagcagttcatcaatggggtagatgttggggtgggacaattcaaagccctggatctgggcctgagaggtaccagagctggtcagccttctggctctcctcctctcattgcccttggagacagctcaccagcgtcccccatatccagaccagctcggctgtgctgcccaaggaggtgcagggcctgctctcccaagtgctgcagcaggggaggggcagggccagatctcctgctctgatgacccagggcagctctcctgctgccaaaggtaacaaggggtgagggagggtcatctctccctaaccaatgtcactacacaacaggcaagggacggggccagctctcccatacatgcgcccttggagctggctcacccacaaccctgctatcaggggcaactctacttcgctgcccaggtgaggtggagggcccaagtgctgccgcaacatgacctcctttcatgaccccaggggcagcaatcccatgaagcccaggtgaggatagcgtcagttctacacaacactcagacatcaacacgtccctgggtggtatcccagaccagggacatctgcctagctgctgcagggttacagaccaagatgtgccctctccctgtgacagcataggccagggccttgctatggtcccaggtggcaccaccagctgctcacatcaggttcctcatgacccttgagtctgcagttctgcctttcttcattgtgcccacatccttctgtttcttgttctcttccttttctccaccactgacttgctcctctttgtggtgtgtgtgcctggagactctgagtatccggggtcacctcaggagtgctgtgccctgattgtgcattatggtgccaggcaggggttatctcgggcacagtctggccactgctggactagtggacatctcgggcaagatccctgtccaggcttcatggtgccagtctggtggtcatcttgagctcactcctctcccagcctgccagagtggccctttgcaagggtcatctgtctcaggctcactgccacctgggaccctcagtcccaggtgggattcttctagtctccagctcactctccatcctgggagcccatgtggtcctgcctggcagcggactggtggtcatctcaggctcaattatttcaggaagtgttaggctactaatcattcagatgttcataggtcagaacaccaagcacagatataatctcttctttttgccacctactgatatgcctgtgacagagcagccatgcctgtcacacctctagggacagggaagctttctaatgatttatttatttatttgtattttctgtgcactggtgtcttgcctgcatgcttgtctgtgtgagggagacagatcccctggactagcatgacagacagttgggagccgccaaatgggtgctgggaattgaacccatgtcctttggaagaacagccaagtgttttcaaccactgagccatctctccaggccccaatcttaatgttttaagaataaatcaaacaatggaaaggagcttctctgatgttaagtaaaatgaggcaggatggaccaccgtatggaccaagggtgtggatatttctgctagggcacacaaagcaaggcagcgctaaggaagaacacccagacagaagtggttctccgctgggcggggacaggaaagcctagcaacaatgtccctttgttctttatggatttgtatgttctttattgtcctacaacaaacatgtcctatatttatgcttagatgaaactatcaactccagactctaaagtgacatccaccctccactgccaggtgcaccaagacattacactggtggtacatgaaataaaagccatggagcacagaagtgctgttttccaggactctgagagtggaccaaggacgctgcaggattgcagtgagagggatggggttgtcctgtagtgtggttgctattccctttgcatttttacgcctattattgcattcgaggctcactgcttcccagaggtggactcaattcagataatgatacttgaagccttaaagagtggtaagaatgcagaacactctccattctggaaagatgggagacaggtatatccaggaatccctctccactctgccagcacccactcacagtgcccagctcagagcttaggaatccagccccaagggttggccaaacaccttagatagacgagtctatctatcagatctgcatcttgccctgtaggaagggcagccaagggcgaggcagcaaggacaagagctgccactggatctgctgagtactgactggaggtctagtcctgtgcctggggatttatgcctgggaagacatggaaaccatcttagtgggctttcctgtggccatgttagtaaacctggattgcctgccacattgtttgtaaggctgcactctgcagttgttctaaacagcagtgacctttgactctctgaggccaagagtagtaaggttcatttatttgtgtgtgtgtgtgtgtgtgtgtgtgtggtcaggagtcacctggggttttgttgttgttttgtttaagacaaggtctctcactggctttgaattcattaagaagactaccctggatggccagtgtcttagggttttactgctatgaacagacaccacaaccaaggcaagtcttataaaggacaacatttaattgggcttgcaggttcagagaggttcagtccattatcatcaaagcaggaacatgacagcatcgagggcaggcatggtgcaggaggagctgagaattctacatcttcatctgaaggctgctagcagaatactgacttccaggcagctaggatgagggtcttaagcccacactcacagtgacacacctacacccaacagggccacactaactactagtgttacttcctggactgagcatatacaaaccatcacagccagaaagccccaaaggtctgctttctcagtgatgggattacaaatgcacaccaacacgcccagctgcttcttccttttgttctgaggataagcccaaggtcctcattactgactgagctaactccccatcttcacattcttggtcgattactatcaagcattggctattcagtgatgagtaaaagcagaagagctctgtccctccagtcagataaacagtgcacagttatgcaaatgacagcaaagtcaccaggcatgtcatataatcgggggaggaaattgcctgtttaaggtaacaaatatggtggattctgctttacatatctgggtcatggactgtgagttttagcgtcatcctcactgtcctcatacagaatgactgagtgggaaacaccattaggagcagaaaaaatgtctctgcctcccaaaggctgtggttagatggctggatcataataagttctagtgcattatggtttccatcaacaagacaggcccatgtagcacaaaagacctcttaatgaaaacacttaaaggtgcttcataaaataagtaaaatcagagttcccatgtatagctgagctttcgagaaagagaggggagtggtcaggtgagagaaatgaagaaggcacaaaacagcagaaacttgacacaccagtcaccgctgtgggggacagatgggaatggagcatagtggctatgagagcaggaaagagcccaagagactgtctgagaaggatgtggtgttagttacagtatgggtacctaagatgacatgagaggcggtggaatcccatgtataagctacacggaattgccaactgaggtaccacatgatggacagactttatactatataaaagttaactcaaatggatctgagacttaaatataagatccaaaactataaaactcaaaagaagacatggagatcaagctttatgacacagagctgggcaaagctgtcttagatgtgatgccaaaagtataggcaatatatattaaaattgttaaaagttatatgatgttgaatttttaaacatttctgagtgtcaagcaagacagtcaatggcatcttagaagaggcaatctatggactggagagatggctcagcggttaagagcactggttgttcttccagaggacctgggttcaattcctagcacctacatggcagctcacaactgtctattccccagctccaggggacactacacccttacataggcatacgtgcaagcaaaacataaaataaaaattaaaaacagaaaatgcaatctaagacatgggagaaaatacatgcaaatttatgtgcagtaagaattaatatctaggagccaggcatggtggcgcacacctttagtcccagcactcaggaggcagaggcaggcggatttctgagtttgaggccagcctggtctacaaagtgagttccaggacagccagggctatacagagaaactctgtctcaaaaaacaaaacacaaacacaaacaaacaaacaaacaaaaaagaattaatatctaggacatataaaaaatttcttcaatccagcaacaaagaacaactggaactgtaaactgaataaatcctattctttactttgcttttggttcaggtacttttatcccagcaatggaaaacacactaggacattacaggaggaagatctgaaagcagaggctctaagcaatagttaaacacccttgatcatagcagcgctaaggtagaaggaacccaagtctccaccaatgaataaacagacaagcaaaccagacatagccacagggtggaacattagtcagcctcaaaaggaaagacattctcacgcatgctataaaatggacagacctggaggacgttctgctcagagaagtatgccaaccacaaaagagcaaagatatgatctcatttaagtgaggtctgtaacacggctaaatgtatagatagggaccgtgaatggcagtttcccagggttggagggatggtgggagaatggggaactcctacccaatgggtattcgtttcagcatcacaagatgaagtgtctgagaggcagatgatggtcatggttgcacagccttaaatgtgtgatgccacaggagttggtcctggaaatggtcgtgatggttggtagattgaaatgtggttttcctccattggaaatatgtatgggtgatcagtaaaacatcactagacacaggcctcccagggaggggagaataaaaggtagacttacaaaatgataataaaacaaaatgtaatcaaaggctgtagcaacggaaggttgcggaggcaaacccccttcggtggagcctgatattataactaaaccgagaaagaactgcagcgcatgcaaatgtcctaccctcatcatttccatttcagagagtctcaggttggattaaaaaaaagagagagagagagtcaaattgcttttgaaaagggacatccaagtcagtgggatgtgaggtcacctacattgcttcatgtcccacctctccctccattctcaaagatggtggcttagcatcttgaaatctatcagctcaccctctctcctctctcatgaagacttttgtcattatacacacatgcacacacacacacacgcacatacgcagccatgcatcttgaataagctcccaatttaacatcatagtcacgccttcaaatttcattttgctacataagctaatatagtcaaaggttacacctgtaaccccagcatttgggaagtggaggcaagaggatcaggagttcaaggccagccttggctacatagcaagcctgtgctacgtcaaaccttgactctaaaactaaataaattaccacaaaaccaaaatccacaaaaataaacattaaaacacacagaaagtttgaaaatcaaggggcagaagattaccaggagaccaagatgtaaagatgatttatccatttttaataacaagtacaagtgcctataacaaaaaagaatgctagactgtggtatatttgtaatatttaaaaatgaatgagactcatagctacaatgtacccagaacagagcccacaaaatccagcaaggaaacagtggcagatgtgaccaggtggatgagagtatgtatctctgaatgtcactgtcattttgtctcatgaagctcagagtcacagccagcagccagagcatgtccattgcggttcatttaaatgcaatttgaaaaaaaaatcccgggacagactctaattggctctgctgggtcacatgtggccctcccagtgcaggacaccatactggtattgtcttcttgaatcatgggtccaacagggacccctctagaactgttcttacaaacaaggtgggtggatagggcaatccagacctgctgtgttaggaaggtgaacaagtgaaagagacgccaaagaagaggtgcggtccttggtgccgtgggagactccttgggtgtcatggtaagcagattgtttgagcaaggagcaaaatgaaaggggttcgccccctctgcactctgcagtcacagcagttctagggagccaccaacaaaaccaccaccttagaggaaaccggaagtgaggcttagaacacttctcaattggctacagctcagcagtcagccagacggctggctacggcgtaattaattggttaactgcaatgcccctcccctccaaatgttatttaacatcctttgctgcggagaaaaggtccctccagaaagagggcagtcaggtacaggcaagggatctttctgaactggactcacacctgtttcttatcgccgctgtaacaaatgatcccagccatgatgcttaaacaaggacttactgtagggaaagccttggaaaatgtggtgccaagtgatttcctcaccttcttccacttctacagtcacctacattcctccatcctcaaagatggcagcttagtgtcttgaaatctctcccctcccccttctccttcttatctcataaagacccttggaattatattgcccaccgctctccatggatcttggatatgctcctaatttaaaatcctatccacaccttcaaatttcctttttgcacataagctactactatgttcaaaggttctgagggcccccttctaaataggggaagacattgttttgtccaatttggggttactcaaactaaagtcagtagaaggcattcaacacatatattaagatatagcacaaggaattggctcacacaatattggaggcaagcagtccaatcacaaacaggctcttaggattcaccaacttgggacaaagctgctgtccgtggtgtgtctgtgtgtgtctctgtgtgtgtgtgtctcctgcacacacttgtcagttctcttaagttttgtggttgattggcttgggccaactcagatcatacaggatcatatagatcatcttccttccttcaagtcaggcgattctgcattttaattacatctgcagacctcgattgtgtttgactagccagaggcgaggctaaccatgctggcccatccagtgtactgttacaattaggacctgttggggatagactgttgcagctccaggagttggggctaccatgggaacagagggaatccccagaaggtagcgccttcttgaaactgttgatttgaagaatgcatgcttggggttggggatttagctcagtggtaaagtgcttgcctagcaagcccaaggccctgggttcggtcctcagctccggaaaaaagaaaaaaaaaaaaaaaaaaaaaaaaaaaaaaaaactttaaaaaaaaaaaaaaaaaaaaaaagaagaatgcatgcttgagtgaactgtaagaagcccaggagggggtgagcaccttcccacagtttgaaaaagctgtgtcgagagagagagagagagagagagagagagagagagagagagagagagagagagagagtctgcttccttctacaccaactttgccaggccacacagtgagcgagctacctgtgactacagagatgccccttccttctgttgccttcccattgctaggtcgcaggcccctggggtgcagacttgaatgggcgggtggtggaaggccggtgagctcatgtctgctgctcctggaacaggaggcagctgtaggcgtgagtgtttgcttggcttatcttttcccatctgaagatggtcattggtgattcattccggaatcttggagtctgcggggagaagtcccaacccaaaccaaccaggtgcaggtaaagggacacccatccccctgtgtccctgcacttgccttctagtgttctaagagaaaaaaatcggcctggggagggggctccccaacacccactgtgcaggcagactctcaagaggattccccatgcccagatagatagcccagaagcgggagagaaatctgtaagtcccagcttctcactccatgagaagtttacattttagcaactctgttcacaaaatgtgtttgtccagaggttgagctttgtcactgggaaaaaaaagttgtcagggaagaaggacttaagggcttgggagttcttcctttgactcgacagccatgattgtcaaaatggagtctatgagctggtggcaccctccacacaagccagcttattgtaaagacaaattttcataccccatccctgactactgaatgactgatggaaagacttctcgggtacttctgatgtgctccagcgttcagtgacatctctcgggcaagcacatcttgagcccctgttgtgcatgcagagtgtgctatggttgctgctatgaatgtggtggtgaaagtgaacagcaagaagtaattggtattcaactcccacggttgccaggtaactcgactggctgattgtaatggatggaggaaatttgcctggcctctgaggttgatgagtaaaggcctcccagaactttctggtgtggctcaggtaaaggccaaggactgtaatctcctgtcccagagacctctctgtgcagggagactggagtgggactgtattaaagcagaacctccttagccaggaggaacagccatgttgcaatctgcaggctttctggggggggggaggggctcaaaacacacaggctgggttccatagcaacctcatttaagccatgggaaaggaccaattgtctgggaggctgaggtcaggagttcaagttaaatagtcaaggtaagcagggatctgagaaatgggcgttctcttctctgtatctactcctggctgcagacagtttgtggtgctaagaatgcctggtgctctgaatgagccattccagagattgtgggaatccctatggccattcccttgatgctctttggggccgtggtgtgagtgtgggttgggaagaagcaccagggggttgtggagaccagggtgccatatttttgtgcatgttacgaaactcacatcttcccgccctcctttcttgacctctccatttgtcttttattttcttctgtcacaacagcctaggacctgatgaagcttttctgggaaagaacttggtctcagttccgtggtctgactgaagacccctccctttgaggtttcattcagttctgtcatgctctctctgtgttgaccttgaaaatattgctttctctttttctgttgctccatagctcccagcaaaaagtaacccacagttaagaaaaggtttggcttggcttattctggattgagggtacagactggcatggcagggctggcatggtgggagtgtgcaggagctggctttatgcacctacagtcagggagcagagagaaagagataaccatcaatgctccattttcactctgcttttggtttagtctgggaccccaggtaatgggagagagctacttccatccttcatggtcttctctctatagctcaacctccctgaaaatgcatagcgatttgtctcttaggcaattctaagtctgggcaagttgatagccaagattaagaatgtgtgtgtgtgtgtgtgtgtgtgtgtgtgtgtgtgtgtgtgtgtgtatgtatgtttatatatatatgacatggcagctttgggggagaggggcaagtagggtccatattctgagagtgagcacaggactccagagcaccgcttggcgaccagccctcctgagaaagcttctacttctggggaggatcacttgtgcagacttctacccatgcaaagactagaccagagactcagcttggagcacatcccaaatagcattagagatcaagtggcccttgtctggctgcagataaccacctcacacatcagagtttagatgtgttagggtgtctgtcaagtaactggggctttgtcctgtttttttttttttttttttttttttttttttttttttttttttttttttttgtgccgctgtagcaccacagctgtcatgaggcacccaggaggctctaggtcaagtaagccttccaccttcttcatggggaaaatggagtctgccagcgaggccccccggctgcgtcgagcaggagtaaaagctaataaagataaaggaatcagtcatgggtggggatatagctcatcctagtacgcacaggctccagggcttgattcccagcattaccagaaaaacaatgaagaaggaaggaaggaaaacagaatggagaaaagattttttccctccagctggaacgcgctcaaggggcttcagtcctacggagcccaagagggacttatttcaatgcagccctgggttcctgttgtccactgggcttgagaattgcattccacactatccccccaccagaatgagaagttgaataatgagcagaattgaagtcctcttgccctggaaccagttgctggcctggccgggacctagaggtcactccccgtcagccctgagccatccattctccaatcgtgccaccaaccattgacaagaccagagagagctggtcttgtccttggtaggcagtggtgcctgcccagctttcctcccatgccaggcctctcaccgatgcttgctttctttgccacccctgttccctcctttcattctctctacgggtccctctcccctgacccatcagcacactgacctctgcgcacccgctcccacctgttcccccgcagcccattggctccttcctctcaccacctgccctgccctgccctgcccatgttctgacctcctcacttccctcacaccactctctccggtgccccttaccacccctgggccacctcagctctcaggccttcccttgccagaattcctctcccttggctgctcgctcgtcctggccgttgtccaactagagacttcctgccttgtcttcgcaacctcgcctgactgctttcctgcgttctgccctgttacatgacaacctttgcaggaggtccagcatgtgtcatacctgcttagaagtcttcagtgatgaccagatggagatgaactcctatggctccccagggaggcaattgtcactcacagtgtaatttcttcctgccacacccctagaatgttccccagattcctctgaccctatcaccgtgtgacagatgcgcagcctggcttccctgccacacagtcacctacagggaaacctcctccatgcctttgtcacttcattggtaaagtcagaccatcaatggcaagcgcatctcatgaaccaccagaggtcatgtggtagaactgcgctcacagcctaaggcagagaagcatttccttctccggaggtgtctgatgcaatgtggagatctgaatgttgggtaagggcttctgtctcttcctagcatcctcttccttgcccaggggagagagggggcaatctgctctggcttgatgaacctgctctgcacaggaccaagctttcaggggactgatgtcatgttgagtaatgggagaacgtgtggagactgccgctagttctgtggatcctctggcaggctgggaagggggatatgaggtgaccatgatagagcatgttgtgtccccatgtcagaacaagtgtgtctggttgtgagtactgattatggcgaggatcctgacctgtgatcagtgagtggggggagtgctcacctgtgggtatggatgtatagactctgcaacactgtcacctggagagggacctttacttaggatcagccagaggagacagtgttgacagtgagtggggccagcaatccactcagtggaggtaggcaggtgtctgcacacacacacacacacacacacacacacacacacacacacagggtcctcaggtcctctcctccatgtttcttgtacatctcattggggacctactgaagctttgttctcagacctcctctgtggcttccagcaagtatgttgcagtttttcggaaggtctcctgggagctgctgttgatgaatgagtggtgggtggacacaggctgccctgggcaggggttttcctgaatgaaagttctttcctgtcccaccagggcgctgactcatgtctgatgggacttgctccgctcttgcctgggtactccaggggcacagcttaacactctgtttctcatgcccagaaaaaaaaaattgacagccctttgtctgtctgccaaattaaacccacaataaagaccaaaagtcaaaactgagtccaaggcttcacttctccatagggagatgagtttgttgggagctctgggctagaaaatgactgtgggattctgaagagactgaaagaaccgatccacaagaattgatgacaaagaaatttgtctttgtctctagaacttttagggggaggcatggctacaggaaaaggaaaccacctgcttctaccgtgaatttacaacctaatttgacaactttgtatttgtatgcatttaatgctagctttttggtgtctggataagagtgggcccctcactgacagtcactccttgccttatccatggtctttagtgttcctggagaggatcgcttcttcctcatgcttaccctgcctctgtggtcatttccttcgcgccctgctgctgtgtgctggatgctgagaatggctagggccctgagccccagtgattgaaatcacactctgggctcagttgcctgaaggaacaatggagagctgtagctcaaggggccgtccttgacactagcctgctgagttcatgaagaaaggagctggaggctggggggcagatcaggcggtgaagagtttgtcatgttaagcatgaggagctgagttcaatccccagagtccacactagaaaataacaaggattgaggaatctggagggggcagggactccacaggaagaccaacagagtcaactaacctggacccttgggggctctcagagactgaaccaccaaccaacgagcgtacccaggctggactatctccatcccctgcatagttgtagcagctgtgcagttcccccaacaactggagcagggacttaccctgactctgttgcctgcctgtggatcctgttcccctaattgggctgccttgtctggcctcagtgggagaggatgtgcctagtcctgcagtgacttgagatgcccgggtgggttggcacccagtggaggacttctttctcaaaggtgaaaaggaggcgtgggggaaggggccgtgtgaaggtaggactgggatgatggggggctgtgatcagggtgtaaagtgagtaaataaataaatttaaaaaaaaaaacagtaacaaggccaggcatggggcacatgcctttaatcccagcactcgggaggaagaggcaggcggatttctgagttcgaggccagcctggtctacaaagagttccaggacagccagggctatacagagaaaccctgtctcgaaaaaaacaaaaccaaaaccaaccaaccaaacaaacaaaaaaacaaacaaaaaaaccccaaaaaacaaaaaataataacaaaaccgagtgtggatgtgtggggttcttgttatcccagcactgagtgggaaagagcgcagacgggaatccagaggcttgctggccaatcagctcatcctacttctcaactccaggtcagtggaagactccgtctcaaagaagaggatggcagctgtcttagttagggtttcgttgctgtgaaaagataccatgaccaaggcaactcttataagggacatttatcaccacagcaactgaggttgttttctggcctccagacacagacatgcatacgtatacacagagagagagagacagacagacagacagagaggcttgtacacaaatgtataccacatgcacatacacacacgggcggtggcagggaagaggaagagggagagaggcacacatgcaaacacatgcacatcacgtgcatactacatgtgcgcgtgcacacacacacacacacacacacacaaggaaggaagagccgtcaaagaagaaagcatttctcaccatcatttgttgccccagcaacttcacgctttctattacggacacacttcggcactgggttgtggccactgtgctgggaagcttaggcagaggggaaggcagatgagagtttgagtgtggacagcgctgtaggctgtggactgggctcagattttcatccaagatggtgggaacccacaggcttgtcactgtcacagcaggctctggtctccattttcaatcatgctgccacttaaaagtcccttcccacaaagcccaagggcaaactgaccctagctcttggaactcagaagagtttctaccttggaggtgaggcaggtggcaactgaagggacccagagacctttggggaagctggtactgatctagtttttattatgggtccttgaactgtagccagctcgggaatctttaagctgtactcttacaacagatgcattttctgtgcgaatgtactccagtaagagctttctcagaagacttctctggctgtttaaagagtagatcagagcaaggaaagagtaggtataggaaatgagaatagggatgtgtctatgagtcaggggatgtcaccagctgctggtgtcagggactggaggggaccaacatagatgaaaaatgtaacaaaatttgagatttggcttggaggcaccgagggcaaaacctagaatccagaaaacactgttggaaggcaggaatgacggggcatggacttgataggaaatgggtggaaataggagaggcacagttgagaggaagtcagcctggggagggagggcttcagttaagcatccatgctcccacaggtgggtaaacaagacaccaaaggttggtacatgtgaaagcactgatatacatcccggggaccatcaacatctgggggatagagaagacatctcttatcaaggttttacaatagaaacagacctagaggaagtgacatcatgtactccagtgcccatccttgttgaattacctggtacagaggttcacatctgtgatcctgactcttgacacttgggaggtaggagtttgaggctagcctgggctatatagctagaccctatctcagacagagagagtgacagagacagagacacaagagagagacgggtaggaggtgggatagaaaggagagatgaggtgggggagtcctataggacttagatactttttggaaagccttatgtgatcgccaggtactgtcaacttcagcaaaaacaatctctgtagcacctccttcctctgagccctcagaagagtcaacattgtcacacaatggaagagtagtatgacttagtgtctgttggctgttgtcatttgccaactacaatatgagatgagcttgcaagttgccctgggccttcgtcaccttctccacagggttatgtgagattatctaggtttgcaagcatttactgaacatgtaccatgcattggcttactgatgtgacagtgagagcatgcctggaaaaaaaaaagcaatggaaacagataatagagacaaagatgatgtgacggccccacatgccctccctcagagctccctagcggtcattgcccactgataggaccataggacccctccttggagggactcttgtgagactgtctttgtattatagtttgcactttctctatctgaaaaactggcttccctttgcttgaaggcaggaagggatgggctttatcttcaaatccttccaggatgtgagaaaaaatattgacatcccatcttgttaccagaacaaagacgaggaaggatataaaatagcaacgtttccatattcacagggtctagatgtcccttccctgccataaatgcattcaaggcacgttggacaacggcggcttcctttcaacccaacaggtgactgcgagccaacttcccccagcacaggatggtgcttgttcttcattaaggagtgttttcactgtcttaaaagacaacaaaagcttttcagaatctctggagaagaattcaagcatatattgacatgaacactagggataattttatttccaagtgtctatttgcccaggaaaacgttcttctagtgaatatgataaatccatagagtctcacatgcgtgcatttaacctcccctcccccaggcgatctctcagcttgctcttccatgacacctcgtcaccacctccttgcagtggtctgcctcacacactcctggggctgagcaccaagcacaaagccccacccccacaccgggatgggggaaccagagcatctcggaacatccagtgctggacgccttttagggttcctagtgtggtttggggtccaggattcccactgcttctctcctttgtgccccagatttaaaatgaggatgcagcatggaaagccacaggcttcctgtccacagtgaagttctacattttcttttacttcaaaggacaccccaggaccccatcttatcaaagatcctttttagtgagattataatcccagatccagattcccaaattgccttcttccttccctatgaagagacaggaggtgtcttatatcttccgtgctcctctttagactactctggtactttcttttttctcttttcttttttcttttcttttcttttcttttcttttcttttcttttcttttctttccttgtcttgtcttgcttttcttttgtcttgtctttctttctttcttttactttctttcttttccttcttccttccttcctccctccccccccctctttctttctttctttctttctttctttctttctttctttctttctttctttctttctctctttctttctttctcttctaagaaccatcaggacacagtgcttttctagttcctaacaatgctaatgttcctgatgctaccttggctcatttctcctccaaaggacatcaactttgagcccaggctggctattttgaatctgagtgttatcttgtgtagacattcttcctgcatgggaatatacttgatttcctgaatgattgtgtgacagagacactccccacgggggcactgggctatgcccggcagaaggtacaggaggcttaggcaggctccctggctgttccaggcctttctccctaggtcacatctttgttttacatcccactgtccctttggaaagacagtaataaggattcaccatccatcttccaattctctgggccctcaggggggtctcagaggcaccaactcagtctctctctctctctctctctctctctctctctctctgaaatgtcagatgactctggaaaacatctttatctgtgttgaatagggtaccttgaacctaggacctcaccgttcagcacttaacccctggtccactgccggccagcaaggaggatgagctgtgggcagggaagttacgtgggaaggagcacacacagagtcagaatcaccatcaggccgagtgcctgcaatcagaggcacaccttgctctgcaagactcagctagcgagataacagtgtcataacccgaatgtgctagggttatgagggaggatctgtttgtactttgggattgacagtttagtccactgcccaacatataataaatggtctcttaatggtgttcttgacaccactgtgatttgaaaaaagcacacccataccaccacgctgtcctccaatttcagtagtggtcagtaaactatatgaggtagagccaacagtttgttatgaaataggctttctcttaaatgattctgctccatgataggctgatataaatgtcttacctggcaagtgggagaaacatagacatgtagagcattttctatttatgagaagtttattaaatatgcttcttggagcccttctttattcattgagaaagtaggggcacaaggatgggaatagattgggtttgtaattcaagacggtagactaaacacatgctcatttctcctcagctccaacatccccattatgatgaaaacggtgattaaggatgattaaaaaaaaggaccagaaacagttaaaaagggggacacactatgaatggatgaaagaactcaataatttctgtggcatggacaatggttagtggatgggtcagactgggagtcacagactctcaggtcccttcaaggggtgttcagtggtgggaaacctgaagcctgctgcaactccagaggcagcagggatagaatctgtgagtattatgaggtagaaagctgaattcttggggtgatagtcagcagaggacagccctttgcccaggggaaaacccaagcgtcccttcattgtgaaccaagggcactatcaccagggggtttggggcactggttcctgtggcttccagtttgtttgccacagagtggggtggtctgataataataaaagaccggcagaactgtgaacagctgggaggaacagggagaaggacacatctaggtagccaaacccctatccacgatggtgcatgctctaaaacggcagagcaagacgtcctagaacaagcatagcggcttgagatgtgtgatcagcagaaagcctgttccgtggacctgctagagcggctaaagctgcttgcccataggtttgctactctgagcccttctgtgctgcttgaggtttttttgtttttgtttttgttttttaaatttacacgttgttgtatagatgataagatgaagggggaaaacaaaacatgtgaaaaaaatgtaaacagattttaatgttctgtgtggaatctggttgacagaggccaggagttcctttgggctagagctgcgattggaaacccatctggtcaagaattccgttcctctacacagtagttagtattcctgacagcctaggctgtcgttagctccagcttagagatggaagaggaagagaatggtctctgagcccaggggtctatgctgttgctgttgctgttaggatagcatctttctctaggatctgggtctcctccactaggctgtctagccagcaagctccaggaatcctcccacctctgccatcgcagtactgaggtttcaagtgcacaccactacacccagttctttgggggttttcccacaggttctgtggtctgattgattgctataagaaacatctcacagaccgagatatctcccaagtcctctctgaggtcagagaaactaaagcaggcagcagaggactcagagcagcccgggcatacccagaaacacccaacactcatgtggcatcagaggaatgtttctttatgtctgtggcttttccttcttctctccttccctccctccttccctccttccctccctcctttgggaaggactgcttcttctagaccacagacagctgccatctagaaacaccggaaggccatcagctgatgccctgtcaggccacttaaagctttttatcatgctagccagctccagtctgaattatcccagtgaaatcacatcctagtggccatgagggctcatgaagggaaagtcctccctccctgagagctgtgttcacaaagtcagagctgggtgagagcaggagcagccattacctgggggtccgtgcgtcagacctgcctggcagcttcagggccagccagtgcttctgtggtctaatgccagttagctatagctccaatgtctagactaggaaaaagaacgagtcaagaacatgacaatgaaaactgaccaaacaaaactgtgtcccaggtgtccttgacccttccccatttatcctgagttctcagcagtccctcaccctgagtgcttatggtacagttagttgtcctccgcatgccactgaaacttgccttgggccccagacctctctctatcatcatgtgcatcctctcagccttcctttggtcttttttaaaaaatatttttattaggtattttcctcatttacatttccaatgctatcccaaaagtcccccataccctcctccccttcctttggtctttaaaggtcacttcaatttctctgctttttttctcctttactctccctgccacgccatcctcatttgttaggactgaggaatggagctgtgagcatgacctgcacatttggatgtctgagagtctccctcatatccaaccctgcaagaaaggtccccaaaagggaaggcctttgctaacttcctctgtgagatgtacctgtaagagtctgtctctctgtctctgtctctgtctctgtctctgtctctgtctctgtctctctctctctctctctctctctctctctccctccttccctccctttttggaatagcatgcacacacaaatctaaatatttacacgggttttgaacttttcagcatagagcccttgagtaaacaaacactctcacaatgttgtcaatgctcatactttaagacaacaacaaaaccagaaaactttgcggaatgcccttcaaagggtcaggatattattttgaaaaccttcatgcctctgactctgtcctcaagggaattttcctttagtcaattttattgaggtctactttgcttataataaaatgcacacactttaagtacagactctacctgtataaatatcactgctataaaaatgtagacgacatcaaccacatcagaaagtccctgtattcatagttgcaaatttttaacttttgtggtttgggtttggcattctcaggagccattctgagtgagacaagtaagccagggggatagctgaaccgtgcttacaaattatagccacgtcaaaggggaattttatacatgacagagactgatcattgcaatgaacctgcagtaccctggcttttctgacggctgaagcctctagatcccaggttattgtgacattttgaaaacacgatgctcacctgcttcctctgagccagatattgcttcaagccctgggggataatttgttctaaaactctccagtcatgttttctcctgtaagtctagagcctgttgaggaaatatcaataaagaagaaatcttgtgtgttgtacaatctatagaagcaagaagtgcctgcgaacagaatgagaatagagggaggagatggaaagtggctgaccgtagtaatcctcggactgcgtctttacctttccttgtctttctgtgaagcattttggagtgttttgttgttgttgttgttgttgttgttaaatggagttgagtggaacacctagcttcttataggtaaagggtgggccaggttctggggacctcaagcaagtaaagaacttgcctcccaagcagaagggccagagtgcaatctccagcatccatgtaaaaaaccatgtgtggtgctatgtgctcgtaagtccagtgctgagttgtagacacagtggatccctggagtggatccccatggccagcaagccttgcctagtccgccagctccagatcccggagagagtcgctgtctcaaaaaaacaaggcagatggctcctgaggggttgacttctgctcttcatgtgttatgtgcatagacacacacacacacacacacacacacacacacacatagggggaattggcttaaacagagctgagcaggtctttaatgaagtctttgacgtactaacataattgcagcttttcctgagggaaggctgtaggacgcaccaatctccagatatttttctcctgtaaatcccactggatttggcgtgtgtggagcaaggagtcatttttacagctccctgaatgtagcacatgcagcttccgcttctcatggcacagagctgaaagccacagagaagttcatgactaggggcaaggaagggaatgaggttgggcagcttgtgggtccagcatggggccaagaatcccaaacacagcccttgggtaatctttttgactagggtgttacagctcctaggtactgtggctcagagtgaccccattggtagccaaagattccatgcagagccaggatccgaacctaggcctgttttactcccaaacccaaacctgcctacaccaggatggctgtcctaagtgaagtatagagaggctgtaactcagcaacatgcccccacttctccacagttaatctacatgtcccttcaagccacatactcttcagggggcatttaccactttttccccccactggcaggtgatcgttttttcttctcctgctagttatgagtgagtatttggtaagtcagagcagacaaggacacggtctcctggttctgtcctcatgaaatggtatgcagggccagatgcctgtgaccctgggagtggccccttgcagcaagctctgccaacctacccctccatggcttcctctttcccctgcattttctcctgttgtcatagccgcacatcccacctgtctttatctgctgcatcccctggaggatggggctcagacccgcatcagtacctctgtcccagcatccatgaggtacccagtctggtcacagctgcagtggctactgctgacgtgggcattgccgcaaagggacatggcaaagagatatagcagggtcctcactgtagcccaggggtgaagatgtggaaatccagcacttactggaaatagcaaaggagtatctctcaggaaaggctctgaggcagtttgtctcccaccatccccgtcttcctctcaggagacaacagaggaagttggtaggaattactcacgtctgctaattcattactaattgaaaggaagggagatgggtcttctctaagctcaacgctcagaagctaaagtatactaactctgaccttgggtccccttttcacgtctggccttgcctccttggcttctgtattttattccatttagagttgctgaccactcaacttctgtgggagtctttgatctggtcccttttcacatatcctgcaagacgtccctggcatcaccaataccatcagcgacacctttatcctatcttcactaaaattcactggcttagttagcatcacctgtcaacttgacatagcctagaatcatcctcccccagcacccaaaaaagaatatttgttgagtaattgtctttatggagttgatctgtgggcatatctgtgagggcttatcttgattgtgaattaatacagagagctcaccccatcatgatggcaccattccccgggaaggtgacccagtgctgtgtaaggaagctagctctataagaacaagtctgagaaagccagagaacaatgcttctaatgacttctgcttcaaatccctgtttgaatttctgcaatggcctcagtttctccattttggaaaacaaactgggacaaaaactcatcttcaaagctgatttcatcataatatatttaaaaataggggttagagagatggctcagcggttaagagcactggctgctcttccagaggtcctgagttcaattcccaacaaccaccatgatgactcacaaccatctataatgggatctgatgccctcttctggtgtgtctgaagatagctacagtgtactcatatacaaattacataactttaaaaatattaaaaatattccagccaatgaaaggaaacacagaagacactttctgggaggcaggactgaagagatttctctggccagcaggttctctgctgcttctggtgaggagggagctggttggtggggctcagaggcaggcagcagtttggagagctatctatttctctgagtacggtggccttcttgaatatagaggccatgagtacagacggacatgcagtgagatctggtctctgtcaaagaagcctcgagttggccttgccaaggctctgtccaagcagctaggtcattccacaggctggagggaggccccagcagcaagaccagctcagtttcggagggaaatgacaatgaagatggagacttagttgctcttctcagacaccggcccttcagtccagagaataactttagcagagtatgaaacataacagcaccctacccttctctggaggagaaacactacccaaaggaaaccttccaagcacaacttaaggatgtgggtcttgtggcttggtgcctgttcatgcagcagctgagatcccagggagacacagcctggagctgaggacaccatcaaattcttcttccatattgcaagatgatatctaaccctgtctagtatggaactcacatttgctcagtacacacaggacaaggcatgtgaggccagctgggacacagtgacaattaacctctgggcatttctccaaggccttgagcattcatccagaggggaatatgaccagtcagaaattttcttggtaggaggtcaagatagccctgataaaagcccagtaagacagaatgaggatattcatttaagtagatggtaggaggactctgtcaaaccaccttcctagagacataagaacttcctgggcgggctggagagatggctcagtgggtaagagcacccgactgctcttccgaaagtccggagttcaaatcccagcaaccacatggtggctcacaaccatctgtaatgagatctgactctctcttctggagcatctgaagatagctacagtgtacttacatataataaataaataaatctttaaaaaaaaaaagaacttcctgggccttggaggatggaggttatgagtgaggacatgccaggagaagtggagcatccaaactgaggcccagattgagtagtgaatgaccttcagccctctcatggcacagcaggaagaccaactagcagttcatgagaaaatcacgatacggttagggagcaactcaaggtggcaaaggcccttgacacttgtctaagggggggaccttgcttggggatggcatttcccatggttttagtgggctctttgtgacaacagttataactcattaggtagagtgcttgccctggtctgcacaaagccttacgttcaacccccagcacagcacagaaacagaatgtggtagcacaggcctgggagctcagcacagagtagaggtagaagggtcagaagttcaaggtcaccttcagcttcagagagagtttcaacccaacttgggagacaagagacagggtctcaaaaaccaaaccaaaccaacaacaaaacctgggaaatctgggagtgactagcactttcagaccatttgccatggggtggaatatgtggtatctgatagagtttcaccctcagaaccatccatgaagtgtttccatgaagagacagtgccaactgtctcagagagccctggatggaaggctgggcaggcacccgggacactgggcagagacctcacaagcctgtcatctgtcccccaggtcttcgtgctttgtcatggcctcctacagctctgccagttgctctacagtgcctacttcaagagcagcctcaccactatcgagaagcgctttgggctctccagttcttcctccggtctcatctccagtttgaatgaggtgagtgggaggccctttattttaaaagacttttaaaatcagacttgtgtattgtatgtgtgaatgttttgcctgtatatatatatatatatatatatatatatatatatatatatatatgtatgtatgtgtgtatgcatggatgcatagcagacagatgtttactgcctgaggagatcaggagaaggcattggatctcctggaactggagttacagatggctgtgaaccactacgtaggtgttgggatatgaacctgtgtctactgctagagcagcaagtgctattaaatactgaccatctctccagccctgagtgggacgctcttgccaggttaggtcattgtatgcactgacctaatctctgagaggtacataagaggggcagggtttacctcctagtgcagaaaaccacccctaaattttggtctttgatttactattgtcctcatagacaacggacggcaaggaaacaaacctttgccatttatgtcaccaaagcctggccctggcccttggatgtatcacaagtcacccacagctcttggtgaatccagacatggcctctggattcttctcacaccatgttctaggctccgtgactaaacaaatgagatctagcatataggatagaccctctcttacagcagtcaagaggaaccaaaactatgattcccacacctaaacttttatctgcatcattaaatgctgggaataaagctgtggtccaggaacacatggagtttgtaggctgctgttgctgctggcggtggtgagtgtgtgtgtgtgtgtgtgtgtgtgtgtgtgtgtgtgtgtgtgtgtgtggccaggggtgtgtaaagagagtccagcctggtgccaggttaagtgagggcatctgagtgtgtggtgagtacagaccttcagactgaagctccaatctcaaagccttcctggccccaggtgatatgaaaggacacagaatgcctatggtagttcaaaggcaggtgaggggctagaacagagaagccatgggtatcttggccttggaaagcagcagctcctattattcactctgacatgacattgaaggatgaacagacatggcgggttggatccctagatccctagatgttaacccctagtctttagagccctttggttttgagacacagaagggcaaagtgtgttcataatgggctttatgtcagattgcaaatgtttaacaccagcgagtcggtgttaagctgttttagaggcactccgggggtgagacctcaagtcctctccttggctagaacaactgcagctttgaggtctagcaacccatggcttctgcaggtgagcgcaggcccacatgccccgacctttcttcctgatttgttttggacccctccaccatctgtcatgcacagaccctttcgagtcagctgacagctgaaatggtccaacactttagtccacatacaaaaaaataatagagatgctaaaaggaaagaaatgaaacccaagaagctcaagaagaagcttttcctctctctgcagaacccgcttcagaatgttctagaaccctcaggctggagggctctctgctaaagccaggctgcctccgcatacacctcacacaccctcacagcctcctgtgtgtgccgcagcctctgtttgttggtcatgctctttgacacatgtcaatgagcaccaactttgggccaggcactatcctagatgctagggaggcagaaaggaacagacagacagaaagctaagacaaacatgtagaaataaatctctagtaggtagatggtaggctccatgagaaggtggcatgggagaggaagaacatgcagggtcaaagtggtggacacaaagggacatcccttgtaaggagcaccaggaacagtgttcctgatgtccacactgagcaggacttggaagtggtatggtccttgtcctttgttttgaagaatttagcatggggatggggtgggttagagttattgaggcagaagtccattcttccagaagattgttctaggacagtgtagacaacccaaaatgggcctccgtggttccggttacctcctgacttcatggatggagctatgacacttactgtttgactgtcaagttctagttttctttcggttgctctgataaagaccatgaaccaaaaggaacttggaaaagagagtatttatctcgcttacacttccatcctaggtcaccatcacaggaagccagggcagggactgaagcgggagcagaggcagagatcacacaggaaagctggcttcctccttcagcttgcttagattgctttacaacccaggaccgcctgaccagggacggcatcacccgcagtaggccaggccctcccacattaatcattaatcaaggtagatgtcccacagacttgcctacaggccaactgatagagatattttcttgattgaagtttcctctgcccagatggcccgagttcgtgtcaagttgacaaaaaaaattagccagcagaaatttgacattgagagtagtaacatggtgtctggggccatgcacattgcttggttgttattctgacgttcagtccaaagtccctgagtccattactttggacctcatttaagttaggagtttaatttaaaaatatatgctacactagcagccagccaggactggagcttccttggacttttgccccaaaagacttttctagaagggctagggtaaaagcttagttggtaaggtgctgatcatgcaaccacaagggcccaagttgtcccatccctagaacctacatttaaaaaaccaggtgcagtagtggcatgtgtctatacttccagagttggggaggtagagacaaggggatccctggagtcaaccagcatagactatttgcctagccactaagaaactgtctgagagagagagagagagagagagagagcacagaagcacacccacttgctaacacacacaccctacacacacccacttgctaacacacacaccctacacacacacacacacacacacacacttaggtttgtgtatagacatccaatatttagattagttctttatgctttcagataattttttggggttggtctaaaaacctgaggtcgggatgggtttctgatggccaagggaaagccaatgccgtgaatctacaatgtgagcaagaccatctgggcaaggctagtgtggctttgtcagggactgcactaaagccagacggccccttcactgtctgttctccctaggtgagctatggtaggtctcctctgggctggaggagggtgggacctggctctcactgcatcccttgtcctcctctgcagatcagcaacgctatcctcatcatcttcgtcagctacttcggcagccgggtgaaccgcccacggatgatcggcatagggggtctcctcctggctgcaggggcctttgtcctcaccctcccacacttcctgtcagaaccctatcagtacgcgtcgacaactgctggtgagtggctccgactcctgcctggaggaactgaggcagggtgagcacggtgcagagcagatggtggtgctcctggggttgggggtctccgctctgagtcaccttcttccctctcccgctagagactgtccttgacttcagtagttcattttctctgcagactacatctgaagtgcagaacctattgaagcatgcagaagcatgaagtagcccagctacctggttgttaaggatgtggttgctggcctttctctgtgagtccttgtgctttgtgcccaaggcaatccaaactccacctgcctagaaccagaacccacggaggcttagagaaaaagaggaccagagtgtgggacatgatgaagtttggggggtagggggggtcctgtttgttgtactgtcaatttcgttttaactagcatatcgcttgtatggtccttttgtacggtccactcgctgatgccaggatattagtggagtgtagaaaaaagttataatatgaggttttatgtaacttctcctggaaaaatatgaacaaatgtctgttcacgccatataagacactacaacaacccaaattctactcaactgtagttggtgaatcaataaattcattcaggttaatcacaggaatataggtaagagatgatagaaatatgggtaattcaaaggcagctacatctccaaaaggcatacccatcatgggtgaagactcacaaaagctgtatgtttggagcctcctggaaaggtctaggtaactctaacgagagtctcctcttccccagcaactgattcctgctttgtatgacctaggaggaagctttgtaaatcttgtaattttcgtgaacttctgagccatacaagtttctatagctcccttcatcttacgagttccctacttcctctaacctgaagagaaggtttcagttgggaagaaatggctgcatcgtaggtcttgacagttgaaggtactcagatactatttcatgttccaagtatctaagaagagagagaagatgtgggggaggtcttatctcctgaccctcagatagggggctttttctgtgacccaaacttctgcattttattggggtgtcttgtggcagaatgaagtagactttagaatttatgtggttaaacatggtattgattagtactgaagtatctatgaaaaggtaacttttctttagtcttaatttaaaattatttaattagcatatattaattatacataataggtttcactgggacatttccgtacatgtacatgatgtacttgatcatattcacgttctttctcccacccttattaatcctgtttcttttctactgtttcgtgtgtgtgtgtgtgtgtgtgtgtgtgtgtgtgtgtgtgtgtgtgtatttcattagggttgattaaaggagtgtaagtgagggtttgtttataagaacatgggcaccttaccacaggcttttccactgaagaaaacgttgctcttttccctaccaacccatcaactgattgtaaattgttgttgttttaaattgtttagtttgaactttatacaaattctagacagctctttgttgatataagctgtacaaatatttcctccccgtctctaactcatcatgatatcctttttaacagactataaagcccttccagaacagaaagaggttttaattttgacaaaattcaatttttccttatttttttcccttccatgactcattctttcagtactgcacttaggacctctgtctgaccccaagagagagatttttctatgcactttcatggggtgtctccattttttacatttgcatgtagacttacgatctgagttaatcatttagttataaatgctcaagatttccctcttgtgtatgaatgtcacttttcagcccaatttattacaaaaactgtcttttcagcataccataattttgtaccattatagcagataaattgtcttgggctaaggctgcaggtcagtggtagaaagctgaccctgagttccaccaacacagagaagaaagctgacggtgtctgtgggttcatctctggacttcccttcccaccccatggatctgggtgtctcctttgccagtactgcaggcccctccctcccctccccagtgttttattacatttcatatatatatatatatatatatatatactttgagatctagttgtttatattcaaaagaaaacatttttttctggaattttgattgggactgcattaaatccataatcaactggcacacctgttgtgtgtaatcctctcattgttaaatagtttggctcactgctgccctgtgttcaccactgactgatgactgaacaggctctaagctgatgaatgcctttatcctccaggagaacatagtccctggatgcctcaatgcccactgtctatcactgctgcccagtgctgtggatactcctagcttcccctccccaccctactcagtgctattaatattcacccacaaggctagaggtttctgtgttcctattcttctggggagggagactttaacatactttgttgctacaatgttcccctattcctgagctagatcttttgttgttactttgatgagtgataaaatgtcagaaaagatcttcctttcgcccttgctctctaattggtttagctgcaaacagccatgaaatgagtagttatccctgctcagaactttaaggaaagtgcatctttgtcttttggcgattcttaatggaccttctccatctgtctcattatcagctctttatttctaggcctcctggttttagtctctctagttgatcgttttcttctttgctttgctatcataacatgtttgaatgtgggccaatctgtatctgtctgggagttcaggtttgttgggggttgggagttagttgttgggatgtataaccaagatttttatgtaattctaaaatatgtcagtcaaaaatgcttctggttttcttcatccttcactctggaacttttatgtagatatacacggcagtcaccctcatcttgtaacctcactttcagtgggttgtccctctgtaccatctttttagtgatttccttgaagtacgtctccccattctgtgagtccctctctagctttgtaaatcagaaccaagcccttccataatgtaaaatttaagagctgtcactgttttgctaatttctaggagataggatttgcttccaaatttttcagccccaattttgtgatttcttaatgcttttttactgacatacatatacataggtatgtttctttgatgtcttcaagtattaaaatatatttatgtatgtagccttttttgatattgttccaatagctcaagctttaagaatgtggccctgtccccttcattttgtctgcttgctcacgttccttgtgggtcctccctttgtatgttctatcatgtaccatggagcaaactgtaataagttatatgtggacagattgggagtggatctggtttaatatccgtttgtgtaccgagtgtgcactatctgcagggatctagggctctgacccagctggagcaaccaaagagccccaagagttgcagttctccgagagggagtcaaagaaaggcagctcttccactgcggatgctgcccagagttggtggcaggggcaggatgcagtgggcagctaggagccaaggttggggtggggtttgggggtcacaggacaggagccaaagtaaggcagctcttccactgcggatgctgcccagagtcggtggcaggggcaggatgcagtgggcagctaggagccaaggtcggggtggggtttgggggtcacgggacaggaagtggctgagttagccttgagcagcttccagcgacaaaagcttctagagagaaaactcttccctagagtgttacagttccataagacaggcactctcagacgattcggtgaaataactcatgccctttattccttctggataggatcttataatacggttttcggggggggggtgggaactgacagtgggtgcttcctattgtcttggtctgagatgttagggatgcctcatctgcatgtggaaggacttcaggtgctgtccctgcatgactgattgtcacagtcctctccatggggtgtcgtggaaaccctgttccaggacaggaacctggccgggagtagatttaaacacctacagttctcaagtatgataattgccagggtttctgaatccactccaccttaccaggttttctgccaggtggccccacagggcagcatcatgctttacatcctcgtgtggacttagtgcttcaggaccaccgctgctttggaggtacctttgtatcaacctgttagctcaggatgatactgcccttgtcttgagagaagtggggggaggttatggcttggtgatgagcggcagtgagggccccgcactgcaaatgttcatccttagttcgatgcaacagagctgtgtgatgttggttgaggatgggtgagccacccaggaacgtgctgagcaagtaactgattcctgtttgcttgaacatcaggctcttctaaaagtagatgtaagggccagagatggatcatttagaatggccgagggaggaaattcctctatgggttgtgaggcctgtgctagagatgggtagttggtttgaatgggcgtggggaggattataagcaggagtgggaggggtctacaaatgaagtgtctacaaggttctggtactgtccctccttcctctggagcgtcctagtcatctgcataggcgtgtcgcagtcgcagtccttgactgtttaaaggctgagccttgcttcaggagagacaaggacggagacagacccaaacctgtgggttcttccctgtcctttctcccctctatctgggggggaggcatggaaacccagctctgatggagagtcaggccttgacctttttgatgcatgaagacggggctaatgagatcagcaagggagcctggagcactggggccgaagggagggcactttgccagacaccacacaccaggctggtcggctccccgcggcctgggcccacagcccatggcatttgctttgcacaatgtagccacgggaggaaaattagcgatggcctcactctgctccttattaggggtggctattcagattgagtgggactttaccacaaagcccagatcactaccagcccagtcttaaccccgatgctcctggcccaaatcatctgagagactgtggaaagggctattagaaagagcacagcttgcctgacaggaccacagtgtgcacaggctaggagaaggggctgggctgttgttgctcctgtctgtgcatgttctgattgcaacgagggtagcacttgctctgacagacactcaagcaacatctggaagcgttcaggggtagactgccttcggggtccacctttctagggccaggcaataagaggaggaggcccgtgacccaggagtcactctgtgtgctttggctgggctatgtactaggtgccgatgcagtgtggaagtatggtgttaatatgttcagataaaaatagtcattaagtctcattttgtggaaggaattatgatttgtggctccacttccaatatactcttatgggaacttcaactttgaattatgtgaggtcatcagagtgggagcgacacccaaatgtgggtgtgtctgaactgtcttctggagccaggcagtcctagggctgaaactaaccattgagactctctaatgggaactacagccttgagccatttcctccttgctttgagtcttagcaaggtctaaagagaaacacttccccatcataaggctcaggtgtagcccctcagagtccccagtgagaacacacattgtgtcctctgacaagtgctttgctgtgggctgggtagcgtgggaggacctgcaggtgatctctagtcttcatgcctggttctccagcacaccctcatttgggtgtatggtccctctggatgagaacttggcctgctgttctgactagttcccagagcacgctgaatgaagtttcatctggagcctcttaaagtcacagtgtaggaaaggctcggtcctcactcccattggtaggcagagcatggactttgacagtccaatcccatctcagctgctctcttgccaactcttcttaggggaggcactcctctttttttctgaaccttacctgtaatacaggagcaacaataccttcccactctgtgttcccggaatagaaatagacatgaagagcgtggctcatggtggctattggggaaacctacctctatttgcttgccttgccgtcgcatttgaaatctgtagtcgatcagtttccgctccactcctctcttcatgaggatttgctgatttcttcccccatggagcaaagcggccccagcaacgaccatgggaaatgaagggaaactatgatcttcagagggggaagaaaactgaaggaaggctgaatgttgtgggaaatcacaaagacctttacaactaattgctaatttaaaaaagtccatgcaggcatttatgggtgtttagattttctaaatgtcactggggtccggaaatgtgccttggcgcctttagaggctagctacccagccaaagcctccatccaagcccatgtctagaagatacagggaggcttttgtggatgggaaacaagccagcgtgagaccggttcccataggagagaagagaggggacttatgggaatcagtgtttggaaggactaggtgtaacctggtgaaagattcagtctagtccttccggaagtcagcctggaagacaatggttgctggggcaggaagtctcttgaaggctaagcaggaaatgaagggaagcgttgtattttggaagcaatcaagaaaagaaaaggaagaagcccttcctggtccttgatgtctgaggctgttggtccctaggctgtgctcttcgtgatgtccccaggaagatgggcagagggaaaacacacaaagcggagccttgggacccagagtgacttcaacccttccttcctcggctctcggcctccagagctcaatccatctcctaagcctggaaggggcccaggcccggggctcagacagagtcactctggaacacgagctcgggtctgtggtaaacacccagctgtggcatgaaatggagatgctagaagctccgggaaatgaggggcaggctcatggcgtgcaggtggcccacgtgtgcctgtgcagggtatgtgcagggcagagcttctctacgggccgatgttgggtgaggtagggaagtggctgggcatgcagaggagagaaagctggtgtgtggggggatgggtactggtggcaggagtgtgtagacgcaggggtgaaggtagggcggtaggagggttgtgaggaggtgggagtatctgggaaggagggtgaagagaacatacataagaagaagtgtgtgggtagggatgtgggggacaagcgtgcacgtgatgggactcgggtggggtggcagttggctggagagctgagatagggtgttactaaagagtaaagggagcatgcgtgttggggtgagtgggtgggtagtcagtggttgcacagcctggctaattggaactgtttaatctggaaaaaaaggaagaagacaaaaaaacaaacaaatacaagaaaggaaaatatcaaaaaaaaaaaaaaaaaaccacatacatgctattaactcaactaaaagaaaatcagttccgaacagatgagtagaccaaaagcaaatgtgatttgacgtggaccttcttaaagtcatggtataggaaaggagaggtgtaaacctgagggatgattgtaggcacccagctgctgcactgagtggcagggaaggtcacaactctgaggttggtggggcaagcttctccactgcagtggcatgagagacagcccctctccaggcactagctcctgtcctaggctgtccatgctctgggtctttgagcattgtagtgggtttggtctgatgctgcttgtattctaatgcggaatactggttcctcaaaacgtggttgccctccgccccacgagcagatcctcatgtgttcaagggatgccatgtgaaccttctccccagtttcactggtcaataaaaggcctgtgattgggcagggaagggagaaaggtgagactggaggttcaagagatagggtggcaggtagaagggggaaggaagaggagggatataagggaggaagaagctgccatggatcagaaccgtgtggccaaaaggaacagcaagtaacaagggcccttatagctaggaaatacgttagtatagacctgcccaatctaggcatatggcttataaatagaatttctggattgtgtgtcttttataagggcttattaggattgaaattttaactacatagcatctgtgttgtgggcaagtcaggtgcattgaaagcatcctcctcgtcctccagtaggaggctaaatgtggctggctcctctctaccttctgggcccttgggaactacttactatgcagccatttttcttgttcaacagtgaagccaggtagtgggcctgctgcaagtgtctttggagacaagctccttcctgccctccattgagtcactcttcctggatggttggtagactctgtctcagtcctacctaggacgggggaaggtctccctaagagctgtcattcaaggcagagaagaaaggctttgggcatcctaggaaacagtcactatcccactgtaggatggggtttgaagaaaccgttagccatcactataggaggtagtggactcctgaaggcccagggagtcagaaaggcaccttctattcctcttcctgtacttggtgaggctattgactgcccagacacctcctgtgactgaaatacttgacatggatgacccaggcacacctaggcagtgggcacctttctcccacgaccatgcttgcgccgtccataatcagagaaaatggaagctcgggcattgaaatagggaaaataacacaacagtcaactgacccacatcccaggaactagctgttagcaaaggcttgtgggtattctggaatgttccagatatccccttcctgtcttctccctagcctggggtagaagaagtgaggagaaggctgagtaggaaaactccctcctccaccacacacccatccttcaagagccctggttatgtctgggttgtattccatatctccagaagctttggttatagaaagctttagtggctgaagtgcttgaaaaccatatcaggccatgggcagacatttttattcaagtaccaggtagcaaatatttccagcttgccaaccccagagactatgaacctgtttagcactgtcccaggaacaccagcttccacaggagtagagaccaaagtgtctaggcgtgtgctgtaaaactcacgggcacaaacagggcagggatccatccgatcctagcctcattagtagtttcccaagccctgtgctacatggttctcctggcctaggcttaccctatcccttagagctgaaaccaaggctatgaatccaccaggctgccttgatgtgcccagtcactctctttcttagatatggtactatctcccatgggttctagtccctcctagaatcatccagaaaaagtctgttagtcccagctacaggaatagccaccccatagctgggctgagcctgctcttccactgcgggctcttcactggacctcagataataaggttgcagggcttcggggtctcctcaggaaaaagacagaagtttccgctctggatccgaggatcctaaagcagggcttaagatgtggatgtgtgatcaaaatagccagaaactcaaccctgaggatggttttgttgttgtttggtttggtttgagacagggtttctctgtgtagccctggctgtcttggaacttgctctgtagatgggactggccttgaactcagagatctacctacctctctctgcctcccgaatgccaggccttgccttgcctatttactgtctagctgaagccaagccttgtatttgatccctgtaagagtcactctccttggttggaaccctgctttttttcccttgggtttaattttttttttttttacttttcggccttcgggatgttttatcggccattctcctgactctgttgttcttaggcctgccagccatgtccccaggacagagcatgaagagtgacagacacatagcccttctacctcaggtatacagtaagctggtacccctgaagatgctccagatatgggtccccatcttacctagcagatatagtgacagactttgtcaacaggctgcctccagtcaagtcatgccacagcttctgctggctaaagagcctcactaacaaagaaaatgtgtgtgggggaggaggcatggatgacttttgatgaactgatgttggctctgctaactactctgggttttcttcaaagagctccccggcagcctggggaataaatctgtgagcaataacttctatttcacaacaatgaaaggtgctagtgaagtgcctatctccttaaatattaaagtcggtgctgctagctgtcatcatttttctcccaaccactaaagaaatgagtctgatgctcagggtgcctgtgcactggcaaaggctataaggaactaggagaggggagtctcaggccagccatatggcttgggattttaagtcttgcatacagcaagcctgctcccttaggcccagtacaagtagtattattttagaaccctcctatgacaagggaggcagtgtgggaagagagtttcagtctcagtgcacacatacatgtgtgcacatacacagacgtgcccaacactagcacactcctttcctgtacatgtacgaacttttccaagaacacacttttgccctgtgagttctttgttgtaatctgctattgctggaaaccgccctcagtcttgcctgtcactactggagcctgtccctgaggaacatggccttatccatttgagtttctccaagtgattcatcattttgaatgaaagtagttttattggaggaactttgggtcctcgattatgatatactaattatttcttataaaataatgctttataaaacaaagttttatgaataaggagagcacaaagttgtgaaggagtgggaaggtggggatggacgtgggaagagctggggggatgggaggagagtgactataataaaaaatacattgtataaagttcccataggatcgtaaaatagtatattaactgtttttcattgcaatgacacatagtgatcacataagcatagcatgtgacatttcaacctatgtacacatgtgtgctgatctgattggaatggctgacataccttctatcatgctagccacttaccatttctttatgttgggaacatcatccctgcttcagccctgtctcatgcctgcctgagtccatgggtcacatctcaggaaagttgacttcttgacacaaaatctcctatattgcaaaaccacagagagatccagaagtcaggactggaattttgcagatataaaactcagcgtgagtcaggaggttgactcgtgtgctgccagggtggggctgagtaacctcaggaggggtgaagccagcctgttcctagttagcactgcccagtcctgtaaagactaatggaaccggaccccttgtgtcctactggggttaaagaatgtgctttgatgaacttgtgccttccaggagtctgccttggaggagataggaaatagactaagctcctgttaataaaaaaagtttcttttcctcctaaggagccctgcagtatagaggcaggcagccttgggtgagcaaatggatttcagagaagttctgtagtggctgcaaagggtgccacttatctgtcttatttcaggacttttattatttttaaaacgttgtgtgcgggggggggggggggggaaggggactggagatatagagatgcacacctttgatcccagcactccggagacggatctctgtgagtctgaggtcagcctggtccacagagtgagttctaggacagccagagctacagagtgagtccctatctcaaacaaacaaacaaatacaccaacaaaaatgtaggactggagagatggctcagtgattaagaggacttactcttgcaaggatccaggtttggttcccaaagcccacatggtggctcataaccatccataactccagtttcagggaagtcaatgtcgtcttctgatccctgaggataccgcgtgcacatacatgcaggcagaacactcatacatatgagataaataaatctataaaaaaatttaatttgtatgtgaggtaacgtgtatgaatgtgtttggatgtatgttcatatgtgcacatatgtccatgcacacatttatgtggaggctagaagtcaatgttagatgattctcagtcattcttagctgtatttctttgagacagcatctcccactgaacctggcgctcgcctgtttatctaggctgtaggccgtgagcgccaggaattggccctatctctgcctccccagtgctgggattacaggtgcacgctgccacgccggagcttctctctgtgtgctgaggaggatctgaagtcaggtccccatgtttgctcggccatcacttcactaagtgagccatgtccccagccacagtgagcagccgggaaagcgctcagacttgagaaatgagatacttgttgatcccttacacgggctcaagctcttggaaaaagctaagaactttgcccctagggaagaaatgggagactgcagcccagaaagccaatctgtccttctgtctgttgagaacctgcctgcaaggatggtcccctccaaggcctgttcttcccatcttcctgcctctgcagtcacatatctatgatgcccacctcattcatgctgattatttttgaaaagagcttaacggtctttaaaaaaaaaaaaaaactaagaccctattttcacccagggtgtggtgacctagacacccactaaagggggtccatgccttgttcctaagctcctgcataaggctccaactgctgtcaaccgccctggagggcagggagcagcagacctcctcagaacatcgtgcccactgctcttctctgttcctcggtgctccagggtcagtgctcaccacctccaaggtagccgactgctgttcctctgagatggcacccatagggaaagaagccctgccctaagggctttgtttaactacttttgctcatacatgtgtgtgtgcatgtacatgtatgcattcatacatgcatgtgggggggtgggggggaatacatccggaggccagaggtcatcctgggtgttgttgctcgctcaggagggtcatccaccatatttttcgagacatattctctcactgggacttgggctggccaatgagtctaggctgggtggccacatgccatgtgatcctcacctttccaacactggcgttacaagcgtgtgccctcatgctgggctttttatattggttccaaagatcatattcagatgtcatgcttatgagggcaagcactttatgaactcagccatcttctcagctccaactactgtccctttgcaccagtgtcacagctggatctgaagtaggattgggcccccattcaggactggcatcgggaagggcatgttctgcagggagatcttgaatcaatgtgggaaacagaataaagccatggagaatttggagacttggatgtagttgggccaactgatttttttatgcatatttcgagtaagatgtatttctgacctgcatattgacacttttaaacttaatagtagtgaaacgatccccagagactttggtggctgaacacttcgctggatgaaacttcaggaggatttctgtggctttggcataccacgcaatatggcacatgaagacttaataaggcagtcaatgtttttacgatctttgatgaccattaaatctctctctctctctctctctctctctctctctctctctctctctctctctctctcacacacacacacacacacacacacacacacacacacagagcctttgacagccaaagcagtaacgatggttctcatgaatgtctgtttctgtcaaataatgaggacggatgaaatctggaattagagtaaacttagaacaaactctattctctgggacttttatttccccggagagtccctcaagtcgtcatcccctgccccctgctccagttcactccattctcccaccacagtcctacctattcatactcatacgaccatggagcccccgcaagccctgaccctgagcacacagcgacagcctcacctcttagagctctaggcagttctggctgaggatcttcctgcccttgaactagggccttagtctacccagaagctgtattacagtgccctgtcagggtcctcacctgtcttggggtgtccttggggtacttcctaaggcaatctacccacctgcagtagctagattgcatacccccctcccaaacttccctgtgaactgtgtccctcacttgtgagtgctgcgacaccctggcttcccattgtgccctcttcttggttcagaggcccctggtctccagagaactttttccaacacctctccatccccctgccatgccaactctgagtttcccatttaacctttactctctgtcctttgtgtgcttggcactattttttttttccagttacggtgaaatgtgtaacgtgaagtttgcccttctaccactgtaagatgcgtgctggtggggctaagtcaaagccacccgcctccaggacattcttatgtgaatcgatcctatgcaatgtcttcattcgtttctcccttagcccttgacaaactccctgtctttatgatttcagccattttagaagcctcccattaagggagtcaggcaggacttggcattttgtttggcttctttcacttagcacagtgtccccaaggctcatatatgttaccatacagcagaatttgcttcctctttaaattgaaaaaagatcctattgtatgtaccatgtttgacttaattaccaggttgtttctatttcttggttttcaccaacaatggtgccataaatatgggaacattaagatctcttcagggctgaagagattgctcaatggtcaagagcactgactgctctgccagaggtcctgagttcacgtcccagaaactacacagtggctcacaaccatctgtaatgggatccgatgccctcttctgctgtgtctgaagacagctacagtgtacttatacacataaaataaataaatctttttttaaagcggggaggtggatctaaaagaggaagaaaaagaaaaatccagcaagggcagtggccgtgcacacctttgatcccagtagttgggaggcagaggcaggcagaggcaggaggatctctgtgagtcaggacagccagggctatacaaagaaaccgtcttgaaaaacaaaagcctcttcaagcctcagcttcatctcgattattacgggactcattgcagagtggctgcagcctttccaacgcttcgacagcagtgcccaggggtctctccgtctcaggatcctcaccaacactcgctgttttccggctttttgatgcttgccatcctgtgggacattacatgctatctcatcgcttcctgtttctgttggcaaagcaatactgtagttgcttttttcttttttttaaataacccaggggcccttgtgggttggagactaggtaagggccatgcctttgtccctctgtcacctgcatgaggaaaaggccttctctcacagtcactagccagatggctgggagactaaagaggatttgaatcttggtgtgactgtttttcaagaggcaggcttcacccacactgctagtcagaggatggtgtctcagatagaggcacatgccttccgtgaccaagcaggcacagggacaactctttcttggcattatcatttgatttcagatggcctttaaaatattcttgaatagataatgcacaccacaggacactcactaaaggcgaccaaggcccctgtctccgttaaagtcatctgcattctgtgccaccaatgagccttggctagtggttgtagtaacagtttggtttgttgagaggggtacatgttatgtggaccaggctgtcctctaactggtaatccttctgcctcagctccttgagggctgagatccctagtgagcccgccatgcatggcttcccagagtacttgatagtatcacacctggccttcgtccctctgttttatctgagtctctcagtggccattaaaggagcccttttgctggaagtttgcacatgggtctagtctagaccctggcattgagaacaggaagtgatgggattcggccataggaggcctgtgtggacggggaatggggcatcagggaaggcggagcccctgctcctgccctaccaactattccatggccccaaccttttctctccagggggctcaggggccctctcactcagggccacatctctaggaagatcctaagtaggaattaaactgattccattcgtgttaatgaaaaccccacagaggacggctggtgacgtcagaggcttccattggccagaatgaagcaggaataaaaggaatctggaaaagattccctcaaacccctctaggccttggaaagctgacaacgctgattgtttggtgtggggcaaattgaaaacagaggcacagaagcagctgccaagcctggcaaagcctacagccgcaggaaccacagtgtccaaaggccatactgggatgactggagccctcccagaagggcctccaggggcagcctcgctccccaatctgtaatatgacagggtctccaaatccccttgttttcagagtctgccgttcttctcttggtcccggccaaaaggcccaagaagcattaagagtctatgattctggggggctgcccaggtgtggtcaggtccctaaatacctttggcagccagtccttcgccatggtgtggtgctgggagcattcagaagtgaaggatcaggggtcaggatgcagggaaggccagagccaagcccagcggtgacatagtcctttgctgaggagaactctgggtttagcctgtggatctcctcttccagatgggtggcgctttcctccaggactgaaatacggatccactatgctcaaccctctgccagcaccagaacagagggagaaatggttgtgccttctccttcctgggcagagctgctcctggtgcaagaaccgccatcctccttgctctcgcctcagtctctgtagcaagcaagtcttcggccaggcaatcagaggactactcctctaggaccatgtcccattttcctaaccctggccctctttcccttcctctgggatatggaagaaaggctagaacaagagcgggatagaaggacagatggtggaggcgggcagccaggctgatggtgactactgggcatgctcattgcaggaaacagcagccactttcagaccgacctctgtcagaagcatttgccaggcctgctccccagtaagtgccacagcaccgtgcccgatacccagaaggagaccagcagcatgtggagcctgatggtggtcgctcagctgctggccggcgttgggacggtgcccattcagccatttgggatctcctatgtggacgactttgcagagcctaccaactcgcctctgtatatctgtgagtcttaagcttcagccgggctgcgaggggtggggatcaggacctggtgcagcacctgctaaagctcttggggatgaagtggggtctgattcacttggcccacaacatggtggatgacaaagacccattgttaatgccagttctgcttccttccacttggctggacctcaagtggctaacccaagtccccaggcttttacttagaggacggcactaagattttttgtgtgagccttgtgttttgaggttaggtgagctgatgtagatcaccatttagccctgttttgagcctttgacatcacagcatgatattggattctatcaagttcacactagaaaaccatgcaattgaggtttttttaaaaaatgcaacaacaacaacaacaacaacagcataatgctttaagtttaaatttggtattggaccacgttcacaactgtcctggagaccatgtggcctatgggccaggtgttagacactctgtagatcctcaacaaattataggctcttctaggtgatataccaatactccgagttgtggacaggttagcatgcatgaagaaggtagcagatggccaactggtacctaatcccttcccttagagagaaagccacatcgagctttctcagggtcacagcctgtacctttgactccacgtgcacccgtcagagccaccagcaccgtgcacacacaacactgtaactataacacagaatccgcgtgatgctgtacccatcctggatttaaactaatggagagtaaataaataaaagtagatttgtgctcttgtaaaaaaaaaaaaaaaaaaagataccattgaggaaagttcattccaggccagcagatctctctggcaggtgctggaggagccgcaggcttggttctgcaagccttggcatccggcccttccttatctgcaggagctgtaataggcttgggcttcaggaggagttacaggcatgggcttgttggtcccaggggacagcgagtggcaccttaggaatctccttcagtttgggagactagggatgctgaactccccccaatgcccctcactcggctttttatcccttgctttaatttccagccatcttatttgctatcgccgtgtttgggccggctttcgggtacctgctgggctcagtcatgctgaggatcttcgtggactacggcagagtggacacgggtgcgtatgcagaggacactcattcttacctatcacccctttactgatgcttctggtttagctcctcccttgtggctgcccatagagagcagcgatggagctctcagcccatgtggggccctgccctgaggtgcctgtcactgagtgactggacactattttgctactttcttcctccttctgtgtccatgtctgatgtcaaggaacacagagggggctggagtgcagtgggacagattttcaggggatcattgctgtttgtagaacaggcaacccactttgttgatggcgatgtcctccggctcctaagaattatgggacctcctttcttagggctcctcaaaagtaaagtgtagctgggcgtggcagcgctcgcctttaatcccagcactcgggaagcagaggcaggcagatttttgagttcgaggccagcttggtctacaaagtgagttccaggacagctagggctctccagagaaacctgtctcaaacaaacaaaacaaccaaacaacaacagtaaagtgttctcaagcttagtggttacgagtgcaggtgaggatggcaggcacacaggtttggaattgactaatggacaagagatttggtctcctgatcagttagaggaagtcagatgtgtgtaagtcttccgttactgggatgctagaagagcctgtagaatggtggcggcaaagtgtgtagtagtgtatgaaccatgtcagccctctggagaccagatcatttcaccaattattcctgccaagagctagagaggaagcacagcagtgggagggttagcatttgccttctgtgcagaggctggggtgctctgggaagaccagaaaggcctggagagggagagctgtcccaccactgtgggaagaaagtcagtaaaacacccccctgaaccagagttccctttcgagtcaggtcagagagatcgggcattcagccaacagacacttctatccctcggtttcttctcagctacagtgaacctgagcccaggtgaccctcggtggatcggagcctggtggctgggcctgctcatctcctcaggcttcttgatcgtcacctctttgccctttttcttctttccccgagcgatgtccagaggagcagaggtaagtgtcccagggcccaggactccatggatgtagccacgtaagcaatggacacgggcttggaaaagaaacagctgggaagctgcagtggccttggcaaactgggggaaatgaaaagaggtcttaggacttagggttcatcagaggctgagaagaggtacccctcagcaccttcttatcaggctgtcatctcgaagaccggagggttgcaaaggaacatagtttggaaatccctgagttcatctaagctgggctaaagagttaagaagcaattcacagtgctcaatgggatgtagagacagcgagacaactcaatccttagaaagccggccatgcaaacgtgaggccctgagcttaagccacacaccgcctcttttttttaaaaaaaaaaaaaagccaagcgtggtggtatataattgcaatcccagagctggggggggggggggtcagataaatggaagtattccctaaggcttgatagccagacagcctaggtggggagttccaggctacttaaagacctctttaaaaatcaatatgggggctggagagatggctcagcggttaagagcactgactgctcttccagaggtcctgagttcaaccacagcaaccacatggtggctcacaaccatctgtaatgggatctgatgccctcttctggtgcgtctgaagacagctataactatatattctttaaaaaaaaaaaatcaagatgtgtggtgccagaaggatgacacccaaggaggttggcccatgacctccacgtggacgcacacatgcatgtacacatgtggacacacacacacacacaaaagctgagcaggtagtgaggcacagttaacttggacatttagtggagtttactaaggtttgagcctgaatgcctggtgagaagggggcgtccactcaaggtgtaagtgagggtgtggggcaaggatgggctgagaaggagcgtgtctgggacagggttgtatctgctagggaaaggaacctgaaagatgagactaggaagcagcagagaggaggttgagcggagcctttatgttacactaaagggtctcacgttttctcctgtggtttctgggcactgcagtgactgtgtggtcccatagtgacaatatggcagttggctgagattggggctcatgaaagaatgaagattggagacctaagaggctcaagagaaagaaggaaaacacagttgagggtcagggcagtggccatcagagagatgggacaaagtcctgcctggagcggtagtgcacagacttggctgtggataggcgttggagctgctgttttgtgtctatgacttaagacagaaagggccccactgtgggaaatggagctgtgagcagaggtccaaagcttatcccggggaagcatttaagaggttatgggtgtattttgataggctaagagttggacagctctgagcttgaagactgttccactcgtaaacttgttgaatgatgctaggcaagttgctttgtttttaagcttcctttcttgtaaagttcttgggagtaattaaagaatctgtctgggaaggaagttgtgagggaagaggcgatggatggagagtaatgggcatgttgcccagagcaggagggctcagttaatgggagcatcaaaaaatgcttatggtaaagccctggcctctgtctatgcagtggcttggagagagccgagggctctgactggagctgctagcttcagagactggcgagggcactgaggtaatgtccccagaatgattagaacagaacctagggtaggggtttcttctggactgagtagaaagcagggtcccagagaggacacagaaagggggagctgagaactgcagacatcgtagatccctgtgtcctagaagctagccatctccaggatctgcatatgggacacagtgtagtcataacgcagacaagggtagggtccaggatgatgctttgggcatcagtcatgggaaagtcagatgaaataatatgcccataggtatagtgggaggcattggcacagattcaccctggcctccagccaaggcaccaggctcctgaaaaacacaggtggtatctgcttcaagggagcatcctgcagatgccctcccccacacacgtgtggtcctcacgccgctgagtcaaggggctcaaggatgggccattaacatcaccatgtttgctaccttcagaggtctgttatcgcagaggagaccatgaagatggaggaagacaagtcaagaggctccctgatggatttcattaaacgtaactgagcgccccagcagcctcgggtgggctggttctgggaggcagcaagccaggtacagggtaaagggcaacaagagacaataagtaaggcccgtgactgcctcacctcccttcagttcggagggatcctgccaaggaccctggtgaccggttctttacaggaaccagtaaatcccacttcaggcagagccagtcaccccctctcaagtctccccttctgctctctctctctctgtcttcctatagtggtggaagttgtgggaggagaccttccccagggtgagcagtgtttctatttacccaccaccagcatcctcttagtcagaccacaagcgtggtgagcaggaatccaaggaccctgggctgacttctgggagtctgggtgtctctgattctgccccgaggaagagaggaagctgtccttgtggatgagtcagggtgacggcaaggctctaggaagcctgtgatgctcttgccaaggcctgcctcctgacagctgtttgcccgcagggttcccccgcatcttcctgaggctgctgatgaacccactcttcatgctggtggtcctgagccagtgcaccttctcctcagtcattgctggcctctccacgttcctcaacaagttcctggagaagcagtacgatgcctcggcagcctatgccaacttactcattggtgtgtcagagggcactgcagggcctgggtggtgccctagggaggaactgggtactgtacagtccatccagagataactgagagccagaccggatgcaggcaggagacaggagggcttgccggagagaaagaattttaagagcatttttcctggttggcgatctagagtgattttggcaggattctgagactcctattctatttaggagtgggtgaagactaggggctgctttccttcccatcaagagggtaggaatctgatatcctcccaactgaccttatcaggggtaacagaggagagagggaacatggagcttgagatatacataacacctcttaggagttgccttctccaggaacttgagtcttggccctgtgacacgtcagcctcctttacacgatggcagtgcagatgcttagcccccacccacccagactaatgaacccagattctgtggcaggggtgctcgtacttcttgcagtagatgctaagaaccactaatgggggttctaccaagtgcctaaatgaataactgggccccatctataggtgaatttgaccaaagatttgacaagataatcagggcatgagatctggggtgacttccctgtttgcgctgaagtcctgtgtagcctttagggatgctatcatttctccagccttcagtgtcggatcagggcatcgccacccaagaacgatctacttccttattgttgtcattgtcttcttgttttcaatttgtttcttcgaaacaagtcctagaatagcccaggctgactctgaacttgctaggtagctgaggatcacctggaattcctgatccccctgtctccacttcccaagcgctgggttataggtgtcagaagttgactgcctctttgctttttgatcaggctagccaaccctctactaaagtaaattctcgggatgtacccagcaatcacccaacagttagtgatattcggtagtcacccatcgtttctttacgaagctgtgctccttccctgtggttcagctcaaggctcccaggctgtgcatccagcccctctccttctcacctaggtgctgtgaaccttccagctgcggccttggggatgctgtttggaggaatcctcatgaagcgttttgttttccctctgcaaaccatcccccgagtagctgccaccatcatgaccatctccataatcctatgtgcccctctcttctttatgggatgttccacacccgccgtggctgaggtctaccctcccaggtaatggacagccggaatccagccactgtatgtctctcttctctgccttttacctcctccgtcctgctcatttgatctgatgtctcacatggtgacacaggaagccaggtctcaaatagtgtgttctattatgagatgagattagccagccagtggggttgggcttagggtttggttttgtaagaagccacagaagctagccggcttagtgtctggatgagcctaagccatagaagccaggaaataagcaatggttaatgccagctctgaaccagctagagctagagtctcactgagatgtcgaagaaagaggagaagagacttgaaaaggtttagagatgaacaattaaaatggcgacacactgtaaaaaacaagggctgcagaggcaggggcaggtcaaaggaccagtctgcttgcttaaagcagcgtgagacgtaagcgtagggcaagctttatcttcagaaagagtgttacaaccccatgagcaaggaacatgccactccccacctcctcccccctcccccacaaacccaccccaggtaaccaccttgaaacgttttctttttttgaaaggaaaacatattttctttatttatatttcaaatgttatcccctttcctagtttcaccccctcctggaaacccctatcccgtcccccctccccttgtttctgtgagggtgttcataagggaaattggtctgaagttctctttctttgtttggtcttcatgtggtttaggtataagagtaattgtggcttcacagaatgaattgggtagtgttctttctgtttctattttgtggaatagtttgaagagtattggtcttgggtcttctttgacagtctgatagcattctccactaaatctatctggtcctgggctattttggttgggagactattaatgactgctatttctttaggggttatgggactgtttagatggtttatctgatcctgttttaactttggcacctagaaaattgtccatttcatccagattttccaattttgttgaatataagcttttgtagtaggatctgatgatttttttgatttccatgtctcctttttcatttctgattttattaatttggatactgtctctgtgccctgtggttagtctggttaagggtttatctatcttgttgatttttctcaaagaaccagctcctggtgttgttgattctttgaatagttctttttgtttccatttggttgatttcagccctgagtttgattatttcctgccgtctactcctcttgggtgtatttgcttctttttgttctagagctttcaggtgtgctgtccccgctgtcgttgaaactttttcttgaggactttgcccaaaacatttgcaagatttggagactcagaaccttttaaccccagcatagtctctttctcgtggagagcaacatctccaaatacaccaacagcatcaggcaaaaacatagtgtgatatgacctcctctgtagctgacagatgacagaggaaagcagaacaaaagaggggaacattgcctcgagtgagggagtgagaaactcaccaccgttctgcaggctgactggggacccagagaagctggggacccagagaaacctgaaagcttggggtccttgaggtggttttcagtgggagtttggtcccacctctgtcacctgcctggcctgagttctagatatgacactctttgttgctatgaggaagttatccgtaaacaaaaaggcccttccattgtgatgtcccataaatgccaacatccactgctactgtttatcaatgcactactcagccatcagaacttccccaaagaagatcagtaagaacagccatcgaaatccacttcgatgaagttctggcccaggataggaaggcgaatggacagacccagatcagtgaatccatttgtttcaggagatgaacagtctataaaaacctcagtggcctccaaaggtctcagccagcacctagctgggccataagagaaggcaaatgtttctaatgacttcactgtagcgtagaccacttccttcaacagagcttcaggctgtcagtcattttaactctgacagtggcatgggtgttttctggctagacctttacaactgagtaatgggtgggtttgggttcccagggtcaggagaatggagagggccatgatgtccaaaccatggcagactcacagccggctcccaccggctccgttcagattctgggacagcactggcctaagacaaacgggggtatgcaggcacatcagccaggccaggacctcgtgctgggctggagtgtggtgctgtttcttggtcttgctttgtttgattctcttctcttcctgtctcgcctggcagcacaccaagttctatacatccgcagcctcccgcctgccgcagggactgcctgtgcccagattccgtcttccaccctgtctgcggagacaatggagtcgagtacctctccccctgccatgctggctgcagcagcctcaacgtgagctcagcagcttctaagcaaccagtaaggacaacgacgaagggggtcacaggggtcgacagaaccacatggagctttggggctcagtgtgtcacctcaaaaaccgttccttggccgtcagtatcagcgtcttagccccctccaccatctctcatccttctctgccccggggtcatgaccagatgcccacagcccaaagtcagttaaagattggctggagaccaacgagttcattcttgggaacttggcaaaacaacagaaacaagtccgagcagtcgctctcagcggaaacttgtgactgatactaatggctccctgtggcaggggggaacttctgggttctgggttctgggttcaggccatattacagagtcacatggcctgagagcagagggtcccctgtgacttggaccttagaggccagtgctgggagcagcagtcgtttcaagccctcctctcccaggagtgccacagagttggcctgaagccatgaaattaagttcaaatctaggattagaaacaaaatctctcttcacctggtcttcaaggccatgtgtctccttcttagacctagacctatggggacttgtctgacaatatgtgaggacagtgaccccaggccttctgggatcaggaaacagcaaatgcctcctccaggtttgtctcttagtcagaaatccatgtgtgcagccaccatgtcaaccaaaagccctggtctcacagtttacatccagtccgataaatgcacacgataaatgctgagggacttcctgaggtgacttacccttgagcaaagaccagaagaatcctatggaaacctggaagcccattgcactcgagggaagcacaggtgccagtgcaccagagaagctgaggaaaggcctggtcggcgctaagcgacaagtgtcacagctatcgggacaagggatcaacaggtccagagctgggcagggccaggcaagccagacttaggagggagattatttcccctcttaactccctctgatgagaacaatggaacgtctatgtcattactataggatgcccccataggaagaatgcacctgtgtgtcggccatgtgtgttggccatgggccaggctagcccccacttaccacctcttgcgaggtcacagaaaaaagcttcccctgtctgtcactatgggcaaaggcccttggctctcaggtagagaagggtgaggagctaagacaagatggccccttagtttgcctcttaactggaagagtggtggcttctgtggttttcttatctttatttactctccgctgactcatctacttccagaaataatcttgacaagcttccaataacagcacaagtacatcaagacaaaatccattaccatgatagcaagggaaaaaataataaattataagggggataaagtcttagtattttaagatccagattgcgggaggttacggcaatatcgtgtgttaggaacttctgagcttgagggccacagtcccactgactgacagagggaggcctcctctagctcattagttggctcagccccataacagctctgacaccaacgtcatcataggctgggccatcagccactgcaaggagggaaggcaaagatgaccagatgaacggtggccgccaaatgagtcgaacagcagtgttgagccacatagaattatgatgaggcagggtcctcctctgggggctcttcttaggtcaaagtacacctcttcagtggggagtgctacagagcattcaagagactctgttattgtttcctctactcccggaacataccttctcccataacaacttgcgcaaccactagagcgggctggaccgggaggagagctcccaggttccaggcgctgagctgatgagggtgctttgcctggtgatgggatcttgggcattcagatgttggaagactgcaggagttcatcccatgctggactcttggtgaagaccatttctttcttttttttattttaaagatttgtttatttattttatgcatgtgagtgcactgtcactctcttcagacacaccagaagagggcatcaggtctcattacagatggttgtgagccaccatatggttgctgggaattgaactcagaacctctggaagagcagtcagtgctcttaaccgccgagccatctctccagaccgtgaagaccatttctaatgtccccaaagtgaaagagccaggaccccatggggcactctaaaaccctcatctgacctcttcagtctttgaatcctagcttttcctccatccctggagggctgaagggagggcagagggattcgttcatattagagggaggcagtgtggatatgtgaaacatacagaggttaaatcatgacgtggcccctcctgttcttcaagatctatttgaactgtagctgtgtgactggaggatccgcatcggccaagacaggctcctgccctacatcctgtgcacagctgctgctcccgtccatcttcctcatctcctttgtggcactcattgcctgcgtctcccacaaccccctctacatgatggtcctacggtgagtgaaatctctgagcctctggctgctgcttccacaccctctctttgacagtacatcctgtctcctactcagagtctctcctcccttaactggggagtcttaacagcaacctacaagtgtctaatggtgagaagacaataggtacactgatggcaggagttccctgtcccaggaggagctcctggtagggaagcctggcccaggctcctagtatccatgaaacataggccctgttggcacccccatctttatttgtgggaagttaaatcatagcccgggatggtggaactgtcgaaaggttgagccgcaggttcaagacaggctgtgggtaaagattcacttgttcttcaatattaaaagaggagaaatcagcaagtcagaaactgaggaaagttccagaagcaaagcgaacactgtgagaaagggctgaaaacgtgaaatttgcaggagactggggactcagtgctcagagtggagggacaagggaccaggaaccagggtggggtcaagagaagtgtctggtttttaatagagagcgttccctcttctcattctaccaagaaggaaaatgtaagaaaagaaaaagaaaaaagaaaagaaatctcacccaagttcatctaaccacctcctgcctgcctctctgacctcccatccagccccatcagcttacttggaaagcagagaaggagaaacacaaaggttgaaaactccctatcagattaaaagtctctacttgagtgtcttgggtgttgcctgacctcatgactcccagtttccttgactatgaaaggaagatagtgatacccacctccaagtgtgagtgtgagcaattacaaggtcaatcgcttcgtaaacagaagctcctctgctgggcgtggtggtgtcatctataaatctagtgcttggaagtaggagaaccaagagttcaaggtcttctttgcctagatagtaagttacaagccagcctaagcaatatgagaccctaccttacaaggttctcaatgtttgagtaacaatccctttgggggttgactgactctttcacaggggttgcctactacgaccatcagaaaacacagaatttacattacaattcataacattagcaaaattaaaattaggaagtaacaacgaaataatttagtggttgggaggctcaccacagcataaggaactgtattaaagggtcgcaaccttaggaaggttgaagaccactgccctacctcagaaaagacatgggggctggtgttctccatattgattaggacctatctctccagaaggctaagcaatgaggaaggaccagctgccatgtcaataatgtagcttagtaacagagcacttggttagcacatgtattttactctatccaagtctagtctctttccattcatcccagaacctcaaactactaaatagtaccatgaacattcaggattacgtcctcccaacttagtcaaatccctcaggatacatcttcatggatacaccaagagatttgtttcccaggtcattccagatccatacgttagcaatgaagattggccatcgaagtcatccattatggatcgggccattggagacaagctgatacagagggaaagaacatccattcaactggaattccaggcactgtccactgggagatcccacatggtccctctttctcctacttgaactccaaagagcctcccttcactgggtcatccccctggggatgtctctcagatgccgactaactttggcaatggttgtaagataatatggaatgatctggaggccacttttgagttcttttccactctgtcctcggctccaaattcttttccaaatgataatcacccagccaggagtatgtggtgtgaaaacgtggagaagccagagtctggtcacacagcaggcgcttctaccactgctctgagctcctcaaccctgtgtgtcagatgccaacccccttttcactctccagttgaggtggcagctctctagggagagctgaacctctttacctggctttgccatccccctcttgaaggagaaaaggtagaaagcaggaccacgcacagaatccacaggacccaatgcaaatgaaactgtaaagactttggcttgtgaatcatttaagaactccaagacatacgtaaaccaaagctgggcctttctgacggcagcatcctatgcagctattcaagtcacaccttacaaagctggcccagggcaaggaaatgtttcagatctgcacagaagctgatagcccagggccctcttttcctggtacaagatattctgtgggtgttgttcagacctgctgtctaagcatccagccagaaattcctttctacttggtctctcttgcctgctttctttccaagaagtctctggacagtcctgaaaacaatacagactattggttctcaaacccaagtttacatccaactctcctggaatatccacgtttttgatagatgccaggcggagaatctgtattttgaacgtagcctgggcggtgcctctgatccagcaacagtgctttgagaacgatgggtataacaggcattcagcagataatgcgcatcatccatgtgtctggtcagactccatgaggaccagtgctgacctgctctgagtctttctaccccctacacctcataccctccaggtgatgctgcagtctagagtcctactggtgctaacttcctgttttccttttcagtgtggtgaaccaggatgaaaagtcgtttgccattggagtacagttcttgttgatgcgtttgctgggtaggtgatttaggccctggaccgtgggcatctaaaagccatgtggggcggggcagggtttggagaagtcccagttcatcttggctgcatattcctaacagcaagaagaaccaaaccctgacagatgacagtttgcctgattgcttgagatcggggaagattctgtctacagtattcaagccaaatttaaattatgtaagaaaaagaaaaggtcatagctgagagtgctgaatacagagttaaaggcaggtatttttaaatctgtctccaagaatccgccctaggaaacaagaccttgcattcctgccctagacagagcagtttctgagctgagccctggcttccctcccattttccaaacctcagtcctctgccacggttcagcaaatgtctcttctgtcaggggatcctgcctccaaaccctgtctgtcctcaagtagcctggagcccccagctcaacactcaaaatactcaagctgtgcatacacataatcagcagagacctacagggagagagaactcccacgggagcaggaggcatctggcttccctgagtgcagggactgcagggagaggagacacacagtaggttccttcccagctggccaactctcatctgcccgttgacatccatggcacagtcatgcattagactgaaccccaggcactgatgtggaggtcttgctacaatggatgaacaaaagtataaagattgaatttaacagaggatctttgtactaagaatttcaggggtggggattttgaggttccgggcagaaggacttgagttactatcaatgtgagccttcctactttaaccactgacaccctctgcattattatacaggggtgcaggtcacatcttgccctgccatggcttccattagccttccagcgtgcgtcatcatcccagctgaagtcagatgggcaggtgcctatgcagggtctgagccagcattttcaatggagtttcttagccgcaagccatttatcctatcatgaagcgtctcagttccaaaggacccttaaccctctaaatgacaaccgtcacattcctggaaccacacaggggacacagggtatcttgtccaggttgaggctggttcattagcacagctgcttgtatttatttatttatgacttaccatctatagctggtttatcacttactccaatgccctggcggggaaagagccctggcattcctcccagaggaccttctgccctgcttctattggtgacttagagaatggcccctctgccccgctgctccaagcccttgctgcttcctctttcccacctgagctcagctaactctgtggaccacagttggaaaacacaggcctagaggaaatccactggtcacttaagaacacagcttcactctgggttagatgaaaagactgcctatttataaaccccagcaggctcacagtcacccactgagatgtggttgaaaactctccttgacttcttttctatttagggatgggtcactagggccagtttccagccactgttcacctggaaactggagtgtgagcaggggctgaggggctgctcttgggaatttctctatgtaggtagggaacaggactgggttgcctctttcttccagaaacaggaactcacagggtgctagagtgtctggtgttttcagcaccgcgtttctgagaatgggatggcccatctgcaacgtaaatcctggacaagtccaccctgatccactgactgctggacaagtccactctgacccactggcggctagacaagtccaccctgacccgttggctgctcacaacgtggctagcaccactgagtttggtggggttgggtagtgggcatctaaaatattcatcacccagtaaggtgttgtgcctgctggacttcatcttaacattcagatgctaggatgatttggcaacctgtgtttctgagcaagacggggaactaaaggtctccaaagggtgttgtccgatctagtgggctagtttggagtgggagaagaacgtgggatttgaacttcagtgaacccttgggtcctcttgttcgcttgcactttattccagtgactccacccacccacagaggctgggggagtccttggaggcgttagcactctcgagatggaacttctacctggggccagccttgagcttgagaacagtgctgtgtgtctgagctgactccaggttgagcccgtgattcattctgccctgaaagaatggattcccttttatctcctaagccttctggtgaaaggggaactcttgctgagctttgctgcagctttctgctttcccgagtcactgtgattccgagggcaatgtgtgaaccgtgccattggtgtggggggctcggacatctctgactgcagatccaagccacccagacaccctgaattctctttccctttgttgccagcctggctgccatctccatccctttatggcctgctcatcgactcctcctgtatccggtggaactacctatgctcagggagacgaggggcctgtgcgtattatgacaacgatgctcttcgaaacaggtgagagctcccacatacacaggtgtctaggagattaggtctgttgtcccagcacgggggggggggggaaagccctttttttaaacctcatggatgtggtggaggctgtcagctttctaaggggcaaaataggagggaatgtctctatagattctgccatggacagagagcagaggctaccatagcaggcatttggggacctataaggagccattcaggtgaggagacacagggtctgctttgaggtgtcccccaaagtactgtccctcacaagcctactcatagcagcagacaatggtcaccaaagttaaaggtgtacctggagcctgagagagatttcgaatatggaaaagataccagtcactctccactgctcagagaatggggaacacagcacggcgcccaggagaggtccaaagaagcaggagtccaacctatgcctgtgagccaaatgcagccatctcttctgttgctgccgttccatcatctagaaatggtggagaaggtgggcctgcaggggctagaaatactgaggacggatagaaaaggccaggttagagaaggccagcagagaggcagctgaaagatacagaccctctggagacagctgggacagtagtgtcacctctggccatcagtgatgtcacaggagagcagaggatcactagcgtcatgtgtctctccacagtgaccacctgagaagtgacagctcgtcacctgagtaacgatcttcacagcttctagtgaactgtgaaaacaaagatcatcttcccgctgcccctgggcctcaccatacctgtctcttcctgcctcataggtacctgggcctacaggtaatctacaaggtcttgggcacactgctgctcttcttcatcagctggagggtgaagaagaacagggaatacagtctgcaggagaatgcctcgggcctcatctgaccttcagctgggactactgccctgccccagagactggatatcctacccctccacacctacctatattaactaatgttagcatgccttcctcctccttccctctctctctccctctctcttgcgcacacacacacacacacacatacacacatacacacacatgcgccagtgcgcgcacaaaagagagagagagagagagttagttcactcaccccttgtctcaccggcctcttcctcctaaagtctcccgcatggttcttagggcctgaagggtcctgagctgaatgagcgctggactgaagggtctagtttctcagagtccttggaagggatcctctcctcagccctgggtcttccactgtccgtactaaggcagcctctgttctcaccagtctctcaggaacacttcagtggtgggagaaatgggagccttgacttccgtgccaggcagcccagctcctctgtctctgcccacacccaacagagaggcaggggagcagcaggtggttgtttcttagcagctaccactgggctaagggagcttggctgtggccgctttgcatctggcttcagtctagcatggaacccaggagggacctatctccctttcctttcccactttctgccctcaaggctgatttggaaaccaccactttgggaagtataaccctctctgtatactactccctggtgtcagagcaggaacgaaggaaccagcaaggctaggtcatccaagcactgttcctaggaacctgaggcctaccctcaggtcagcatgtgcttccttctgcctttcaaaccaacaaagcccatgtaaggagcccatgtaaggaggacccagtctcccaccctcacagtagagacaaggtctttcccccttcagagacgcaaatagccatctttaccatgccccggaaacaaaagagtgacctcacatgggctttgctgtctggacttcagctcatgtgcagaggagtaaaggcggtgaatggggggtgtgatcctgagatgcagtcagaccaaggaatggagcagagtggatgccacctgtcactgtgccagatggcaagttgcagcccacaaagagagtagccgggttgactcgcttgcaaacacattgtcttcgttggcattttctcagcttttcctcactacctctctggatgtggaggtgggctccttctgtgggcctgggctgggggccaccactgccatgcagtggagaggcaaaggcagaggcccaggaatgaggccttttctcaacgattctgtttatcagagaactggcttggtgtttgtcagggatgctgtatggttctctgagagctcccctggaaaaccttacctccattcgcattgggattgctcccagagagcgctcggtgggcagcaagaacatgctcacacacttgccaagcatatccagaaccaaaaaggctggcggaaaagatcctggtctgactgcccatgcacaccctgaggctccagcaggttgactgtgtgcctgagctggagatctggctcaccgtgtccccgaagcagctaggcaattgacattgccctatgtgacatttaagtgcctttcagaaatgccttatatggtgagaagccaaatggtttatgtcggcgtggcaaaggtcctgtgagactgaagccttcagggagcctttgttactggcagtgttctttctgaagccaccgggctcatttccacagatcttattaaggaggaggctccacacaacctcacgggccagtttcagcatgtggaacggttctgcttggaacctgattctctgcaactaaccctgggcttactcactgcagtttaaccagattctgaaggcatagccttccaccaatctcgcaaacaatgaacgtcaaccttccgttcccggaagatcagctgtccccacaagtctttattctattatattgctattaatatattataattctgttctgggtgt

SEQ ID NO: 8 - DNA, 14033 bp, Mus musculus
tctttcatggcttcggcgaacacccggcgagttggcgatggcgccggtggcgccttccagccttacctcgactccttacgacaggagctgcagcagagggatccgacgctgctctccgtggcggtggctctcctggcggtgctgctgacgctgggtgaggcggccggcattcacggcgagggcagggtggctcggcgccgcaggccagggaggcggacggctgcgttccctcttctactactcgtcttccagacccagcagtgtggaaaggggacgctgaagtgacctgggtcttgggacaggacttacatgaggcggccctgtgcgcttgagcgctgcggccgccatcgttcattccaactttgagccacttgtgtctgaactgggctctgagatactggggtactaaggtagagtagaaatccaccaatcaaatgtagcaagccactaatttttcccagatccatcattctgtgtatacttttagtctccacatttggatgagggaaatagacgtgaaaaggtttacagttgatagtggctggcgctccgtgagttcctaacaaaactgactctaatccgtgtgacaatgaaagtagtccagatggacgctttgtttttttgtcgtaaatgcctactaataatgtctttagaaaatgaaggctgcctttctcttctctgcagtgttctggaagttcatctggagccgaaagagcagtcagagagctgttctcttcgttggtctctgtgactctgggaaaacgttgctgtttgtcagggtaatgctttgattttcacctcggttagacttaagagggatgggtaaggcatttccgtagccctgtcatcttgcagtttatttggtacagcaagtttaggacatgtttttaaaaatatttttttttctttttaattatatgtatgtgtgtgggtatatgcacatgagtgcctgtacctgtagaggccagatgtgtcagattttgtagagtcggtcttcaaagctgcctgatgtgggtgctgggaattgaattcaggtccctttgctagaagcaggatgggatcttatccaacttagttgagtctccagccctgggagttaattctttttttttttttaagatttatttattattatatctaagtacactgtagctgtcttcagatgcaccagaagagggagtcagatctcattacagatggttgtgagccaccatgtggttgctgggatttgaactcaggaccttcggaagagcagtcggtgctcttaaccactgagctatctctccagccccctgggagttatataaaaaagactctaggaaaacctgtaaaaacacacacacacacacacacacacacacatacacacacgatgctgttagaatacgtggtctggggatggggaggtgactcagtctgttttcttgcctggcaaaaaaatgagggtctgagtttggatcggtggcacatacgtgaaagccaggtccagaagttcttgtcagcaatcccagggcctaggaggtatggatccctggaattccttggctcaccaccacccatgctagttggttttctccccgggttcagtgagagaccacagcctcacaaaaggtggctggctgtgtggtggtggtccatgcctttaaagccaacacttgggaggcagaagtaggaggatctcttcaagtttgaggccagcttggtctgtagaatgagttccaggacagccagagctgcacagagaaaccctatgtcagggaaaaaaaaaaaaaaaaaaaagcaaaaacagtaaataaataaggtggagaaagattaaggactcccgacatcaaccaaccttcagtgtacatacacctgttaaaaaatgcattaccagtttcttgggctactcagaatataatggttatggacatacatttttttgtttgtttgtttgattttgtttttttccagacagggtttctctgtatagccctggctgtcctggaactcactctgtagaccaggctggtcttgaactcagaaatccacctgcctctgcctcctaagtgctgggattaaaggcctgtgccaccactgcctggatagacatatattcttaagtgtagcttgcgttcttattctttctttaaacaatcaataaaggataaaggaagcccaataacttttgctgatttctgtgacttaaaatagtcccagcatggctagttctgagcaatccagcattatcacaatcatgacaaaaattaccctccttcgacagtcttaagctagagaggcctccctttactaacacttagttttatgtaagccagtgtattttaactgaacatgttttactatggagaatttaccctcttcctttggagggtataaataataataatagtagtagtagtagtagtaatagctattattattttaattgtgtgtgtgtgttcattcatgtgtgtaagggctggtacgtgtgagccttggcacatctgtggaggtcagaggaccagaagtgttggtcttctctcattgctgtgccaggcaagctagtatgaatttctggagattgtcctgtctccctcccattttccccataggagtactgggcttgtgaatgtgtgtactactagatctgggtttatgtgggttcagaggggctgaacttaggtcatcaaggttacacaggaagtgttatgtccactgaacatctcctgaggccttgagttggttttggtgcctaaaatctttacaggtcagtaatttggccccttgctgttgtttaaaaataatactaataatgttgggcccagggtgccactttctgatggcactgcaaaaagaaggaataaagcttgtaattaattattattattatttggtttttcgagacagggtttctctgtgtagccctggctgtcctggaactcactctgtagaccaggctggcctcgaactcaaaaatccgcctgcctctgcttcccgagtgctgggattaaaggcgtgtgccatcactgcccggctgtaattaatcactattctacaagttaaaaataaagcagtatgatcgttttcagctgtttcaagtagcattcgttcatttgaccttactctccacagaatgaaaatgtcattttttacattgcattcagtgttattgtaactcgcttaccctgatttgtctgtcttggttttgttttgtttacagttgctaactggccagtacagagacacacagacttccattaccgatagttctgccatatacaaagtcaacaataacagggtaagaggtatctggaatgttctagaatctgacactcttctttactaagttctactgtcatgtgtgttgctgacccaaagcaacttggggaggaaaggatttaatctgtttacactcccgggatgtagttcattgttaagggaattcagggcagggtcctggcagcagaagccatgcagaaatgctgcttgctggttcactcttcagttcacttagctagatttcttcatagctccggactacctgcctaaacatggcgcctcccacattggactcaagaaaatgacccatagacatgcacacaggccagtctcatggagggacttctgttgaggcttctcttgcatggctggaagctgtgtcaagttaacaaagcttactggggcactgtggcttgtcaaggaagaaccttcttggatggagtagtctgaagatgtaggtaccttttgtgtagcttcattttacgtagaacatattctgtataacaaacagatctgccctcgataatataggtagcagatttagtcctgcccacccatcctcgtaacttacgtacagggtataagacattttatttttaggttctgtctgtccaacattactatgaggttcagtaagtactgggtctttttcgggtataaggaggcagtatgtagacacaggacaatcatttggctaaaagtagttgtctttttctgcctctgctagccagacttctctttagaagccgtcccatagttagatttttattacccagagccttgttaatgtctagtgcctttttttttaatttaaaaaatttatttatttatttgtttgtttgtttttgagacagggtttctctgtatagctccggctgtcctggaactcactctgtagaccaggctggcctcgaactcagaaatccttctgcctctgcctcccgagtgctgggattaaaactttttttctgtgcctcacatatactaggcaagccactacccttccttcacctgtgtttactattaagacatcctcaacagaaatccatctgacttgctgcctgcagtaaacatttgcttgattcatgagctcagctccagtgtgctgatctgatggtgaagatctatgctatgtgaacctggagctggaccgaatggtgatgtgatgtcactcttgctgtcctcagggtaacagcctgactctgatcgacctccccgggcatgagagcttgaggtttcagctcttagatcgctttaagtcttcagctaggtaagtcagggatgaagtgacatgggtcccttcaagtctgcactgcgtccatgcgcacgctcacgctggttcctctgccaagacttttgacactggtatgggatgaaccttggagtggccatttctggggtgctagaactcggaagacgtaggagcctgcttaaggctggcttttcagattgcgcagggggtgtcactctactagcatgattaaacttcaactatgtgtatgtggggcagggtatgtgcacttgtgtgaggtacagcataggaagggagggtgttggatcccctggagctggggttacagttggttgtaacttcccaacatgggaactgaactcagatcctctgcaagagcagaacacactctgaactgttgagccatctctctagccactgactctgaaaatagatttaatgacatgttaaggctattacaatctggaaaaggaaattgtaaggctaggatggatcccagaagatactaaactcaaaacattaatcatactctttttggttttctttctttttttggggggggggggggttcgagacagggtttctctgtatagccctggctgtcctggagctcactttgtagaccaggctggcctcgaacttagaaatccgcctgcctctgcctcccgagtgctgggattaaaggcgtgcgccaccacgcctggctttttcttttgttttgataaggtggcagtatctctctagcccatgtagcccaggctggccctgaactgtaagctttttccattccagcctcctggcttatacaaactaagtggcttttctttcctgtccacctgcttggttttggcttttcaagatagagtctcaggtactgcaggttgaccttgaacttgctatatagccaaacaaagaaccttgaatttgcaagtgttgggattacaggtatgtgtcaccataactagcaaggctttctttcctcttaccttcttttcaccttatttatttatttatttatttatttatttatttatttatttttggtcatcaataagaaattcccttgtgtatgtgtgtttgtttgtttgtttcttttttagcatataaatgctagcattgtccaaaaaactgtaagagattgatttctaattgtcttgaagttgagctgctgggagttgcccaaagaaaggcttggctctattgggctttacctcccgtgtttggattggaaatcgagtacaaatgaaaatggaaagcccgccagcacctgactctgccccatttttctacgcagaatcatgccttttgaccccacagggacgaatctgacattcagaattactgatgatagcaggacaaaggggtttattgtttgcttcgctttgttatatttctctcatagtagattctttttggggggtcagggtttgagacagggtttctctgtgtagccctggctatcctggaactccctcagttgatcaggctagcctccaactcagagatctgcctgctactgcctcctgactcttggttcctggcactaacagtgtgctctaccatgctcggctcttattgtagattcttaagccttcaggcatgctagctggagttctttggcataactgttagtttgcatggctagcacacagctggtatcctcagaaaggcctggcttgagtcctgtgaagcaccagtagctgtactcacgtcctgggtctggcccagatgctaaccagagtctggatcagaagtgcagcagaacagagtgccacagtaccacgtggcacagagaggtcccctcacccctgcagtagtgcaagcagctatggagctaatagtttactaggtgcttttctgctggtgggtatggagctgtccacttcataggaacaaccgtatagagaccttcctcactatctccctcgtataacccagccaaaagctagaggctgcatgtctgttcttaaatcacactaaattgatacctcaagaactatttttagtgtaagtcctcatgtcattgatttttaaattctttcctaaaatttgtatgttgtagttttaaatgctttcttcatgtttgctgtctaacattgttaagaaaagtaaggaaaatttgtatttgtattaatttgtcagagtgtctcaagaacagctttttaaaaaatttttttccattgtcacttgcaaatattttagagtttatagtataattacacttttttccaagtattttggataaatagaatattcagcatataaagataaaactaagttaataagccgggtgtgatggtgcacacctttaatcccagcactcgggaggcagaggcaggcggatttctgagttcgaggccagcctgatctatttacaaagtgagttccaggacagccagggctacacagagaaaccctgtcttgaaaaaccaaaaaaaaaaaaaaaaaaaaaaaacctaagttaacaaacttcattcagtcataaaactgttaaatcgaaaacacttttactatggtatatgacatttttctttttaagatttctttttaaaatttaggtgcatgcccctgttcttgtttgtgcactgtgtgtgtgcaggtacccaaaggaccagaacatgacgctgggccccctggactgcagttacaagcagtagtgagctgcctgatgtgggtgctgggaacctaacctgggtcctctacaagagcaacaagaactcttaccatgaccccaatgtgacatttaaaaaaaaaattcttccttgtgacctaagattgtttttccatctagggatttcaaagtatattatattttctttctgtggattcctgccccattttaaaaaacaaaaaacagtatctaaccaggacccatttcttttttataaaccatgacaagcacctgtgttttgaggctccctgatgtttgatttctttgctctttgccaaattttgctccttcctttcaggttctgttttcctcagagtatctgctagaaatgtttctagaggatgagtgtgtcgtgaagttgttggctgtctttcacggaaagcaacctttatttggcctctttttttttcatggtccttggtcttagttgcatgtgaggtcctgggtagcagctccgagtggtccctggagaccgccgactccacatctgctcttacagagtgccagtgtaactgtcatttccctctgaggcatctgtctttgggtttctggtatttggaattcaagtgtagcaccctacacagaagggtgttatcatctgttaagtgcaggccctggggggcagctggaccagtcaccctgtgcacagcttgccactcaaaggtaatctaatggagaccgtagctggaacggaattccaaagaaactgaaacacccggtctccatgcctcgccgctacaaggcacaagtggatatttacaggtagaagagcctcaagagaaagattagcctaaacatcaagccagattcatccgaccctgtgcctgctgcctcatttgtcacagcatgggccgttctctctgccctagctcttgcgtagtttatctgacacatccttctctctcgagtgttgcccctcagagtgttagcccctcagatccgctgcctagtttgccgtgttcttttcagctgagagaacctgtttagtttccactgtgttgctaattttatttactatttttataatgtgttcttttttaaaataccctttaaaactccacccatttctttttacttgcttctagtattattctctaaaataattttaaacatacattatgattttttttggaggcagaatttcatgtagctcagcctgaccttgaactcactgttcaaccaaaaatgaacttgagtttttgatctcctgcctctacctcctcagtgctaggattacaggtgatcactttggttcaatgctgggtgggatgggatggatacatatacatacacatatacatatacatatacatccatatgtatatatatatattctactatgcaagcactctgctaactgagctacatgtccagcccataaacatgtgctttgtagattgctctaaagtccagttttgggggtgctggttaatctcttttataattgcatattttaatttctgttttgatccagaactcctcctctaagagaatgggtgccatcgatgagactggtagtctttgttagtgtagggcgtgagcggccagctccacaccgctctcctcatttgttagcaccatcgggggttgatgatgaatatggtccaaaattgttttcttaactttttttttccttaaagttttatttattttatttgtatgactacactgttgctgtcttcagacacactagaagaaggcatcggatcccattacagatggttgggagccaccatgtagttgctgggaattgaactcaggactctggaagaactctgagccatctctccagcccccaatttttatataatctcttgcttagggctcttattccaagggagtgtccacttatgccccatagctacagccattggagaccgggtgttttaacgtctttaaaactattttctaaccacagcctccatttcactgccttagagttggaggctttgggtaaggtttggtccagttgtccagaccctgttagccactgcacattctctgccccaggacctgatgtctgaggctcccgtgcagtacctctggtacttgatggtgtcactgctgtgtctgaggtcaggtcccacatagtcacaatccttgagttccctcaagagtgttctgtcttccacttaggccccagtagtcttcacagcacaagcttcacagggcagtgtcctcatcccttcccctctggcctggcctcccccgttcaccctgcctttgtgctcttctcgagatttttacatctttcttttgtctccctctttgttctcccactgtgggtacattctgccctgtgttcatcgcctagatctgtcagatggttttctgacccttgaaagcccaagtcatttcttgtgtccttttagcttcttcatgttttgtttttgttttctttttttacttaaatcaaagcatgcatgcgtgcatgtgtgctgtggtggagggctgagtggagaaaccaggggtctgtcttgtggctcctgcctgccgtgtgtgctcatgtgtccttccctttaactgtccctgcagggctgtggtgtttgtggtggacagtgcggcgttccagcgggaggtgaaagatgtggccgaatttctgtaccaggtcctcatcgacagcatggctctgaagaactcaccgtccttattaatagcctgcaataagcaaggtgcttcctggcaaaggcagccaaccgttgaggattgctgttgggaattagttcatttacccgccgttgttatttctgagcatggggaaagggctggaattaagcattaattaagggattaaatctgaaaattgtttctattactttcctggtcttttaccaggttgtcccaaggactggcagctgggggctctgttgatattatatctttttcatgatacagtgctttttaaagataaattatcttacttttccaaatgttaatttgtgagaccgagtactatcggttctggggggattattgggcctctccttccagacaggctgcgccactgttccctcttaccccagcgctcacagtcaggttggctgggcatcagctctgtggccaggcggagtaacgtcaggagttggtcctcgggaactccttcacggctacatttcctaatacctgatgaatggtgcagctcttagcatcttttgtaaaagtatttttgttttgtgtgtatgtggggcggggggggggggggggtgtgcagggctgaacctcaggcatacccggtgcctgagaagattagaagagggctttggatctgctgggacagttgtgagttggccatgcaggttctggtacttgaaccctggtcctctggaagagcagccagtgctgtaacccctgggccatctctagccctagccatcatcttttcttaagggttaatgtggtgttgtgttgaaagttctcctcagatgtcagtcatggttcacgtatgcttgctttctttcaatggacaggacaggttacatattgaagggcttgtaaggtgtgggaaacttaagcttggttagttttaaggtcattagcactaaaacaatattttgttgtattttatgttttaaaacattttttaaaaacctgcaaatacagcatttactgtgacagaaaggaataatgataaaaagtgtttcaacaaaggaatgtggggtgaactagttggtataattgggaattttctttctgtgctggaagtccagggaggagacagatcctggtttaaactagaataatgctcttcttttccttcccagatatcgcaatggcaaaatcagcgaagttgatccagcagcagcttgagaaggagctgtaagtggggctgtgctccgggtggcgtcctgaccgtcggagtccattcgcagcttaggatcgagtgatcagagttgtagctggggtagtatggaatatgtgttaaagggattattagaattataaaagacgtgggtgtttatagccatttaaggtttttcacaaattagggaaaggtgtgtggcaccatgccctgcttgtaaatttagtcagatgtagtatttatgaaatgtccccagcaggaaggcagcaagcatgctgcctgtgtgctctacagggccagcggctggcagcacagtgacagtttgggaaggttttcctgcttacagatacaggacagatgagacggaagtctgtggatgtgtgagcttcatagccaaggctccctatctaccctttctgaagtttcaaaaccatgagttttataatacagtggggccattcaggagagcttagaagtaggtagaggcttcaaagagctggtgtgacctgggtctcctaacccactggtgtctgtctgaaacagtgatccatggacataaaggacaagccagcagtgtcaataccgactggtgctatccctttgatttaggagctcataggattttgggctttgttgcgtctgacttttctccctttgcccccagcaacaccttacgagtcacccggtccgcggctcccagcacactggacagttccagcaccgcacctgctcagttggggaagaaaggcaaagaatttgaattttcccagttgccactcaaagtggagttcctggagtgtagtgccaagggtggacgaggggacactggctctgctgacatccaggacttggagaagtggctggccaagattgcctgaggagcatcgctggccacaagcgttggtcatgtgagactgaccctgcagtttgagaaagggcggtggtggtgtggactgataaagagggggcatgtcgttgaagcatttcttgagttcttgaaacaattgtaccacccccaccccacccccgtcagctcctttctcagctagtcctttcttaattcccatattctttctccctttgctaggtgttaggtgtagcatcatgttagtgtgagacataacagagagggcatcgctttgagagtagggtcgcatctgagaagtccttgtctcctgcctctgtgttggtcccttttcctgggaccagatctgcctgcttgtggaataagtgaacttgcagttgcccctggtgtaggcataatacagtgtcagttcttagtggagtctggggtgtgaaggtctacagtgaagacagcttcaaagccacaggcacagctgacagtgtgtccttcacgggctcagtgaccatcccacaccaccctagctgacagtgtgtccttcacgggctcggtgaccatcccacaccaccctagctgacagtgtgtccttcacgggctcggtgaccatcccacaccaccctagctgacagtgtgtccttcacaggctcggtgaccatcccacaccaccctagctgacagtgtgtccttcatgggctcggtgaccatcccacaccaccctagctgacagtgtgtccttcacgggctcggtgaccatccccacaccaccctaggttcaaaagctgccgcaaccccgaagagtcaccctcacaaggtggctctaggagccaaatccccagacactcctaggttagtgttctagaggctccactggggagagcagggagacagcacactgctgcctcgggcgtgcgtgagcccaggctgtcccctgtgctacttgatcagctcctgttgtgtcaccccagctagagtgctatggaacaatacaaactgaagatgtccactgtgcattttaaatacatatttattcatgatgctttaaaaaatgttacctttttaaagtgatgctgtcttcaacatttgtgttctcattgcttttataaatgactggtatcttgataaatgactatactgaaagcattgagtcaaatgatgagtacaagtgggaacctgagctagaattgaaccccagctccaggttactgagcctacagatcgctgcatatatgagactcttggtctcgtctcacactcagagtcaggcttcactaaagccacactaaagagacaggcagagcattgactcaggtgcagtgctcagggaatatgtgtggcgctctgggctggcctggaccagtgagagggacaggataaacacacaggtgttctctgtgcagaccagcccaagcctctgcctgctgacacatggcctccctgtgggtcacctgggctgataatagagtcccagaccatgattcccatcaagtactcagctccccactcctaaaatatctactggccttgcttatggtgtatgagacagatacagcacagcacaggacagataagccatgagatgactcagttctcactgggaggcagtattgctgctaggattcttactgccctttgcacactgctgttcatgttggtcacggacaaatgggaagggcacgatgaaggacgttcacatcacagtaggtgctcatcaaaaaaacctttcagttagaaaatgtgttcgctggcctcccttttgtctgcataataaagtgattttacttagtgggagaatcagtacatcaaaaaagtgacaaggatggagagcaaggataaatgttatttatttatttatagcctgtgtcctgagcaaaaggtaagctgtgcagggctgggaaccaggttagtagaatgcctacctggaacgcatgggtctggctttgctgtgggctgctgtaaaagccagctctaaacaggcagccgcagcaaagattctatgtctggactcttccatggagccacggcagaagcagcttctcactgctaggtgccttgtggtctctcgggaggccttggcccctgccactgcttcccagggcctccagcacctcctgacgtgagctgttctatcagaggggaggggaggcagtggcccagccattgagctatttcaggcacaataaaatataaggct

SEQ ID NO: 9 - DNA, 21411 bp, Mus musculus
gccacgggcaggcggcgcagaagcgggtcggtctgtactccccgctcctcgccacacacacaccgagaggatgaggctcaccgtgggtgccctgctggcctgcgctgccctgggtgagtgtgcgtgcaggggatgactggctggctatgtatgcaacccttaggagctaaagctggaagtcccagcttccagccccttgcttcttctctgtggtatcttcatcttccatagcgtaggaacaacgtggatccacatgcatctggggctctgattcagtctctacctttcactatcctcatcacgctgtctcccctatgtccagtaatttgaagatatggtatacgcgatgttagaaaacttttaaccagtttacccaggcgctatcccggggcctcagtatagtccaaacagcatggtgtggtagtcacaacttcctgagatctaatcctgctatctctcctttgtctgatgcctccttggatgcctttggcgctggtggcttagactagggtgtgggatttgaagccagaattctggggttcaaatcatacctgtatttctcctgcgacgggtcttgcttgttaccgcacatgcctgggagggtcaggtgagggtgaggtcacaggtcccagtcctgcatcctgctgactcctcaccagagggggggggggtctcaaagacccaaatgcctgctccagttggactgtagttagcatttgtcacagtgttggggctgtctagtttgagtgatttgtcatccctaacaactgtcagcctgaaacaggcttccgtgcttgttagctcaggacaccttgtgtggctatgcacagtgacaccggaccaaggtcaaaatttacaagttagacgaactagtttgaagaggctagagaggtcgtctatccctctggccacggtgaactaaagggaaggagctggggacgatcagtctccctgttgtccttcctcatccatcctgaggtccattggcctcacccaccccgatccatgcttagtgatttgtgggcttgctgagtcagtaagtcagccctgctgaattgcccgaaagggaagggatgtgacaagagctaggagtgccaggtcccacagacggcatctctccatcgtgtggatttcagtggtgacccagctggggagatggtacaactgggcagatgcttagcatgcaaacaccaggacctaaattcagaaccccagcaaccatgtaaaaagctgggtaccgcagtgccctggggaagcagacacaggaagatcccagggaacccacagtgccctggggaagcaaacacaggaagatcccagggactttctggccagacaatctagtggaaccagcaaggctcagattcagtgaaagacactgtctccaaaaaaatcaggcagagagtaatagcgggagacaccgcacgttgccctttgtcccccacccccaccccccatgtgttcccatctgcacatgcacacaccacatgggagcccgattatataagcacatacacacatcgtgatacacgtaattgtcttcagctgattctctaaatggcggcccaaagggggtaaagcatccagggaaggtttggtagaaacagaagcctgctgcatagaagggagttcctagccttttctcaacagaagacagctgaagagtatcacaggtgaactcgtgatcaaactgtcgctcagagagacgcaaagcttctaagatcgttatcttcccctggggcctggccatcagacctagtgtctgggctgctaacaaacatgatgacgtaggacaaacctgcttcctcccccaaggccagctttctcatttctaaaagacggtatgcctttcctagagttggtgtctagagccttgtctgaaggtggctgaggatggtgtttgcccactgaagttcacattttgatgtggaccttcagccaaggcaaaagaagagcaggttgtcaccttcagctaccccagcatctctctaagcagcccagggttaggtgggaacatggcagaccgttggggcgaacggattcatctgttcccaggatcggagtgcagcagagccctgtgctctgtcatgactgccaccagggatgagaggagggtggaacagaggagaggtggccattaagacccttcgtaaagtggtgcgttctctccccaggcacggggagcgggtcctttatgcctccgccttctctcctgcagggctgtgtctggctgtccctgacaaaacggtcaaatggtgcgcagtgtcagagcacgagaataccaagtgcatcagcttccgtgaccacatgaagaccgtccttccgcctgatggcccccggcttgcctgtgtgaagaaaacctcctatccggattgcatcaaggccatttctgtaagtcctgctgccgggaacggtagcccctatacgcctctggtttgactcacttgtggaaaaaaaaaaattgaactggggggtggggactgtcaggtgtccaagtagacaattataccaagagtggcaggaagaggatcattccaaggcttgaattctcctgtccatccgggtgtggccgcacacgtaggtggccatggcatgctagctcctactgtttcaggggcccaggactatagggaaaagcagtaagcttttcagtgttaagactagcaccttctgggctagtgagatgggcttctgaaggtcctgagttcaaatcccagcaaccacatggtggctcacaaccatccgtaatgagatctgacacccttttctggtgcatctgaagacagctacagtgtgcttagatataataataaataaatctttaaaaaaaaaaaaaaacaaagacagcaccttcagggttttcacctccatgacagcacccacagaggagcttacagggactctcaaaacacgagggtctctgaatgacaaaccccactgtgtggccgagcatggaaacagatataagaacccagccacccacagaccctgggtgctccactacaaccatgccagagcctctggtataatagcagtgcccacctctgaagagggagagacccttcccccctaccaagcctgccagaccaagcctcgaccactgccgatgggtaaatccgcattttgtccaggtactgggcacatcatcagggaaaagtgaggaaaaaaaagactccatttcttcctctagatggaatcaacccaaaccggcagggctggatgtgcttgtgcttgggattttctagcccgagacccatggagcgctgccaggtccttcccacttgttctggtgtagggaagccttccttgcaataagtctttgggactcgctctcttctaggcaagtgaagccgatgctatgaccttggatgggggttgggtgtacgatgccggcctgactccgaacaacctgaagcccgtggcggcggagttttatggatcagtggaacgtgagttctcccagaatacccaggagggggaccgtggtttagtagatgttaaatctcattctgtaggcaggtagccgacattagaaacgctaggaagccttttctttggggagtccatggggaatgagatcttctagccctccgggcacacatggagacatcttgaggactttgggctggttggaggctggtatggaccttctgagtcaggcatcctcaatggagagcaggctggggtccagcttggccttcactggatctggggaagtgtccaagctccccagagcctcaggcgccatggacaagagaaaacccacccctatagtgcccggagggagcttagcagtccaagaagctcttctgagatagctctggtggtccctgtcaccatattagaggatgtaaaatactttgagggagacagagaatgcctctgttgtggctctcacatgttcctggtgccttggcttggtaaggagaatgaggcgctcatgacccatgtgccgatgcctcttgagcctttgttttcccggatggaccatctgtctttaagtctacagaggtttctctggcttcttaccacccagctctgcctaagttacccctgggtctctctctctccttcatcaggacagagcactgacaagcagtgcttctctgggccatgtcaaagtcctccctccacattgtcccctttcagatccacagacctactactacgctgtggctgtggtaaagaagggaacagacttccagctgaaccagctcgaaggcaagaagtcctgccacacaggcctgggaaggtctgcaggctgggtcatccccattggcttgctcttctgtaagctgtcggagccccgcagtcctcttgagaaaggtaagccgccatttctattctgaatatcctgtactgctggggccacacagtcctggttagtcaggcaggtaggctgaactccaaggaagtggaggaagagggaaacaattagaagtggcaacttgaaccttcttgttgttgtgagctcccaacacccctgcagaggctgacctgaggaggaatgaaagggcaggtgggtccacagtggatttccatattcacttcagtccctcacacaccctcaacccccatcacccccaccaccacacacacctctgctccgttaaaggatgctttggttccacctgctggtcataaggttgtcctgcacctctctaggctgtactacagcccccagaggcaccctttgaaagatctggagcctggcagtggtggctcacacctttaatcccagcacttgggaggcagaggcaggtggctttctgagttcgaggccagcctggtctacggagtgagttcctggacagccagggctacacagagaaaccctgtcttgaaaaaaacaaaaacaaaaaaaaacctggaaacagagtgggcaaagtctagggcaagccttgtttagcaagaagtactgcttgtgtccccgggagggtaactgaagagcaggggttaacttattcctgtctagaaaccctgcttagtacatgaaaggctgggcagggactgtgctgggcagggactgtgcctctgccttccttcaccagcccaggctgggtgatggcattatgcttattatgccttgtccatttctttgtatcgagcagctgtgtccagtttcttctcgggcagttgtgtcccctgtgcagatccagtggccttccccaaactgtgtcaactgtgcccaggctgtggctgctcctccactcaaccattctttggctacgtaggcgcattcaagtgagtggaattgacactctgtggtggccagtgccaaaagtcctcaaatgggggctctttgctgagccaacctacctaaaagcatgcaggtggcttaaggtcctcccaggaaggcggggttacaacctggggctctcaaggccaaggtaacctatgtccccttccatctgatgtcaaagttcaagccctgttctggcagtcctctctcctcagagcttccgcatctggctggcgtctcctctcagtgggctgggtagcatctgaagggacctacataccccgagtgcctcacagtagaccatgctcaggatactagacgctgccccgcaccaccccagcagtacatgtggctttttaaattatgtttttacatataatatattttaatcatatataaaactgtccagtggacataaaatactctgagggaggcagggcatgtgagcctctattatggctccatgagccttgggttggtaaggacaatgaggcgctgtgccggtccctcttgggcctttgttctcctggaatgatgctacagatggaccatctgtctttaagtctacagaggtttctctggcttcttaccacccagctctgcctaagttacccctgggtctctatcaccataccagaggacactgcacccccataccttcttacacacacacaccaacactgaagattaaaccaaaccaaaagtacacaggggaaaacaaaacaaaacatgaagtcctctgtgtgtgtgtgtgttggccaactactcctgggcatgagactggtcctgaaatatggttgatatactcccttaaaaaaacaaaaaacaaaaacaaaacaaaacaaaacaaaaacaactgattttcgccaggcagtggtggcacacgcctttaatcctagcacttgggaggcagaggcaggcagatttctgagttcaaggccagcctggtctacaaagtgagttccaggacagctaggctacacagagaaacactatcttgaaacaaacaaacaaacaaacaaccctgattttctgaagccagcatcaattgcaagtagcctcttaggaataggattttgtgtcatttatgcccaatttcttgctctctcttttttgtcttctgataccctgaaatccacatagccagggtagaaatactgtcatcttccatactaaggatctgaagatttttacattattttcacctcctgtcagccactttggggtacgtgagcacatcccccatcccagtggtactgtggatgtcagcatcccaccctagagagctgtctccactatgagggccactcagcctcaggccttgtctgaaaggtgacagtgtgatctggaccaggagcagggtccaccttctgggactccttgttcatgggcttctttcccacaggtgtctgaaagatggcggtggggatgtggcctttgtcaagcacacaaccatatttggtgagtgatggggaaagactctggccggttccttgtcatccttttcatggctagtggccagacctgagcatgcagggtctctctcccgctgcttgagtctctatatatgcagaggaaggtactttgggggtctctaccaagattcatgggtctctttccaacactcaaaccacacaatggctctccctctagggaagaagtgtcacagccaagggttggaggttggcctggctgaccttgcctgtcagtagtcttgctgagcttggagtcaggggatgggggcaaccattgcttcactggcctacagaagcctctgtgtctttaactggtcataggctcaccttcctgcatattccttgaccctcagagatccctctagacctttcagttcatgctttcaatgctaacaggacttcaaaaatggggaggggttcagcctgccacaggctcactgaactttccctccttagaggtcttgccggagaaggctgacagggaccaatatgaactgctctgccttgacaatacccgcaagccagtggatcagtatgaggattgctacctggctcggatcccttctcatgctgttgtggctcgaaaaaacaatggcaaggaagacttgatctgggagattctcaaagtggcacaggtattttaccgccatcctctgtcctgcttaccgctctgtgcagagatctctttgacatctggacacactaagacagccgggtcaccaacctctccagcatcctcatagagtagccagtgtctcctctggtatcaacatccaccacctttttgaccaatgataccctttccatctgaattaggccctcaaggcccagagagaatcccagaaggaaagagaatctccgtcacactcgctcacgcgcgcgtgcacgcacacacacacacacacacacacacacagaggcacacgcgcacacacccagactgcagaggaactgacttcccctgcctcttggctgaggtcggttaacacagtttcctctggtcaagcctactcatgccagcctctgcactagattcacttgttctcagctagttctcacttaactactcaggcagacagggagagggaatgtgggatggtccttacaggatcccggacaaagaggcgctgggtgatggagaacatgcccgaataacttctctcctggtacctccaagtttcccacacttttaagatcagtttcctgaagtttctcttgttctcttcagttcttgttcttctttttaacctccctaattccctgttcactccactgtttttatagtttttttgttttgttttgttttgtttttgttgttgttgtttttccttctggaaacaggaacactttggcaaaggcaaatcaaaagacttccaactgttcagctctcctcttgggaaagacctgctgtttaaagattctgcctttgggctgttaagggtccccccaaggatggactacaggctgtaccttggccataactatgtcactgccattcggaatcagcaggaaggcgtgtgtaagtattcagggaaaactaggtgaccccaggaatgtggggaacctggtaaggtcaagaagcagccatggtctttctggggactgacagcttctcctgctgttctcatttccatcctgtttgtgagcctagggctagactgatgctggctggcatcaaccatgagaggacccagaggtcaccaagtgctttaaaggctggtcacatttaaaatgacctgggttcatactagtatcattcctctgcaaaaattagggtagccccctgccctttatgaagccaattagactattagaaagtaaataactccatgtttctgcagactgtatatctcttgccaatattgtggtcaacatgggcgtaatgaaagctggagatgcagggagtttgatctggccctgggtttcactggaggactgggggtttgcctaataatttattcactcagtaggtatgtattagacaaccagccacagactcggctgggtgcctaacttataaacacatactagactctgctgtttggggaaggaatttcaggtcagggagaggacaaatgtttgagagatagtcacactactgaacagataaatacaaaatgaaagaatgaaaaacagcaacaaaaaaaaaatcaaagtcctacagtagtgaaaaccaaagtcaaacctctgagggtacttgtactaacatgtacaaacatacatacacacacacacacacacattcatgcacttacgcatgcatgcacgcacatacgcacacacgcaccccacgtgattaaaattaaagaaaactaaatcttacctcggaagaaaagctgaacttaaatgaaatcaactacagttgggctgtgtcccatctgcttccctagacgattaggagttccttggtgggatctgtttatttagctcatcatttccataaagcacttagcagcattgacatctaccagacagctgctgcagcctttcttacctgagccccggctcttcttctggtaccacaggcccggagggctcgatcgacaactcgccagtgaagtggtgtgcactgagtcacctggagagaaccaagtgtgacgagtggagcatcatcagtgagggaaagatagagtgtgagtcagcagagaccactgaggactgcattgaaaagattgtggtacgtgtctcctgcctctcagggtgggtccccaacactatggcctgctggcccgctgagttagcaagtgtaactcttgcatggaaatcccctttccagactccttgctctcatggtttgagttcagctctgaaggatgccctttacattagcgcagtagaagggtaaactgagccatctcctgtcaaaggacactggaccatgacaagagtgccttttgggctcaggatgtgccctggggagtgtggaaagggctccgttttgatttcgcaagcaagtacatgttcacttcattgatcgagatagcatttttaaattgcctgtagagaattttctaaatcctgagcccgagaacgaagaaaaacagcaccccttgtcatcaccgtgactcagagaaaaccctcttcttgagagtgtgctgtgtgggttgcttagcacaccccaccttagcacctcatcgtgtcttgtgagcctttcttgtgtctttcgaaccctggcgtttctgcctcagagaatacactgaggttctgcagggtggcagccttggagagggcaaggaagctccaagctctcacacccctgcctctgttctgtgctctatggagcctctccagttgcctattctttgagttgactcttttgtgctttctaagatatctatcagaaagcaaaactgactgcgaaccccattcttctatctacattttcagatactacattcttttagctacagaccattttcttgttttgtctgagtcaaggcaagaaaaatcaaaccaacttcatacaaagcttgctaacacagaaccagagtttatataaaaatacactaacatctgggcgtgcctgactgatcatcaggggtccggtaccaacatctactgttgcccttggctttataacttgggctgagaggggccttcaagaggccagtctaaaagggcaggtggcacaggaaatagcaactcttcatttgctgtgtcttcctgtgtctttgcagaacggagaagcggacgccatgactttggatggaggacatgcctacattgcaggccagtgtggtctagtgcctgtcatggcagagtactacggtgagtgaggacagtgcctctgtgttctttctgagccatggtagaaggagaatcacagcccaatttatcccacagccaccataaaatgctccttgcatgagctttttctcagtctctgagacgccctcacctagaatctccacagtcatcttaaaggatgagagtggtgggatcctcagtccctgagatgagatttctggtataaaaaggatccaattacagaggacatataggaagtctggaaagtcttgcgatatccagaaggctcacttttcctgctaccttgtagcaggacaaataagttcagtcaacatcccactgtgggcttggtacacagtgagcaagacacttgaaatgcagtttgtgaatgagtcccagaggtcaacagccaggtgaactctcaacatctggagagtcttgacattattgtaaatcagaggtgtgtgtggtcttatccatgcctcttagttttagttgcctcatgagaaaggtgtgggttttctatcctatacataaatgtttaatggtttcttgattctctttcagagagctctaattgtgccatcccatcacaacaaggtgagttgaaacgggtaatctcgggcacaggaaggtaaattctcattgttgggagaagtggttaggcaaatttataagtcaatggagaaagccaattttagaaggcaaagtgagatgaaagaatagtaattgatcaggagtgtgtgtgtgtgtgtgtgtgtgtgtgtgtggtgactcagatacagggttactcatctcctgttaatatgtaggtattgtctctataaggatgcatgagggaacccaagggttgagaatttatgaatggtctccaaacaaatctttgaacaaagcagtaactagaacatctgttgacaaagctaggatttcttgcccctgtcaactgatcctggggacaatctaggttcttcccattgcttcctaccattttgaatcctatgaagtcttcagagttttagatgagagttagcacagaccttgtctatgtagtccttgcaggactgaatggagcacttcaaaatgctgatgtctaagtgcatggaattccatccaggctgggcccaggaaaccagactagcccatctcttactaaggctttgattaggagtggatctgaaaagatggcaccagagcaaacaggaattcaaatgccaaagtgaccctgagtcctagtgttcagtctccttaggttgtattccacagaactatgagtgtacaattctgtagtcttgtccctgcagctaaacttaacctcccagtttttagcatatctagaaggagccattattattccacagattgttttcaattggagaaagtatattgaattaattaaaacagaaaacagaatcacaggtgttccagccccaactgaggtcacatttgtgctatagaaaattacaaccaatgtgttgttggtatttccttttttatgtttatcctggtataaaatcatattcttattatcagagggaatctggcctgattaaccccaatacatgttcatatacaaaatgccagagttccattaacttttctgtacccatgtctttgatttaataatttggaaagtgagttactggcttttaacttcaataaccttatgcatacaggtaagggctgtatgttagccttcttcctaatgattatatgttaatatttgctattttatgtgtatacatgtatatgtgggcacatgtgcacacttgtgatggggcatgtagaggtcagaagtcaacgtcaagtggaatttctcagaagtcatccactttgttttatgagatgggatctttgttggtctggagtaagttaagctggcttactagtaaggcccaggaatttgtctgtacccatcttcctagtaatgagattataagcacatgccaccatgcctggcttttatcttacatcagttctggggaccgaactgcttacatggcaagaactttaccaaccaagtcatttcctgagcccattattttatttttaaatcaatacatcaaagcatttttaatatggacataatcacggggcaccatgtgatcttagtactttgcttttaagattcttcctgcaagactgtcctgttcttcaccggagttagatgttgtggaattcctttcacgacacaatgctatttaggacatcctcgctgtcctagggagacagtggcttctgttggaagcagatactttgggaggccccagcgatattaattgttcttttcaggtatctttcctaaagggtattatgccgtggctgtggtgaaggcatcggacactagcatcacctggaacaacctgaaaggcaagaagtcctgccacactggggtagacagaaccgctggttggaacatccctatgggcatgctgtacaacaggatcaaccactgcaaattcggtgagcagagctgggaaggcagcttgggaggagccgtgcagaaaaacagggtcctgagggaggcggtgggctcagggttcataaaagtgagtttcacaaaaatgaacctcaaggaaatagcaaaaaaagctaggaggggtgcggagctgagccatggagtcaggatgattgtctcagtggcaaatgatggcgtcagtagatatacatttagttgcctctcccatgatggagatcagaggtgagcagtccacggctgataaggtcttgagagcttctccttctttccggtccacgatttccatcatagtacttccatgttcaaagcaaccttgcctgggcagtcacaattcaggcaaggagaacaagtggaaatttacacccactatggtcagtgcttgaaaagagccttctggacttgaaagcaattatttgcatataacttgccattgtgcagaacttaggtgtcctgtcagacacctacctacatgtacctactataaaccaaattagatttttgttacggaggaacaaagggaaacagacattgggtggatatcaagcaatctctgccatcagggttctgtgatatgactatgtgggctgccgtttcctgggtcccttaaggtgttggtcatctcaccgagtccctgctcagccctgaggattcttcagttgactatgtcctctacctgaggctgtttctatctccttatgtttctgagtagaagatcccaacagaaaattttggccatggctttgcttcatattggcttcctcagatcttctttcctgatgcctctaaatttgggcaactccttaaaaatgatagaactgtaaacatgactatgaactctgcgaccttagaatatgcagggaggggagatggggacacatttctgcacagagatgctctgctgtctcagaaacaaaggacacctggggtgacaggcagaaagcacaggctcctgaacttgcttccctgagcctccttatattttcacatccatagaagcagctgatgggcagaggctgtctcctatccctctcttgatttctgaggtgtagtgtagctcttctaatgaatggcagggaaggggaaactcacaaagaaagaaagaatggtacaaccttagaaattccatttcttcattctacaggctagagatggtaccatcacagtcctccaggggtctcctttaccctgaagtggaatgctcacaaaatcctttcccaaccttgagaagtttcctccaaagacctatagtctgggtggttctgggttggtgggtggcaggttgcagagtgaattatttcatagcctgtcaggggttaggtaagccactagaattaacacacacacacacacacacacacacacacacacacacaaagctgacattttcttgttcttctgtccagatgaatttttcagtcaaggctgcgctcccgggtatgagaagaattccaccctctgtgacctgtgtattggcccactcaaatgtgctccgaacaacaaagaggaatataatggttacacaggggctttcaggtgagttttccaacacacacacacagagttggatatctaaaatccacataaaaaccaagcacgaatatatgtctttaacctcagcacttgcgagtgtgggatggaggagaaacaagtgggtctctggagctcactagccaccagcttagccaaactgaggcgctccaggctcagggagagaccatgtatgtctcaaacagtaaggtggggaatgataaaggcagatgtccaatgttgacttctgacctctgcacacatgtacacatgtgcacatgcacacatactcacatgaacgtgcatatacgccttcctctcgcacccacaaagaataaagaaaaaaaaaagcatggtgtgtggagctgagcttgtgggactgactgcacagcaacttggggccttttgctttccttattctgcatgttgttgagtgatagaacgagtggccctaacacttgatgacatcaggtgaccaacctgaatccccaaggtgcctctgaatgacaggtgccagtctgacctcctgtcttctctcttctccaaatctggacctgttcaggtgtctcgttgagaaaggagatgtagcctttgtgaaacaccagactgtcctggataacaccgaaggtatgtgtgcgctctcttctgttggttccctccagaatctgggtcactgggatttgctgagactcagggatggctccataggagctgtgcagaaaccgtcaggctcgagagttctaattctcaacttgtatgttcaatggagagagaagcaattgctctgcagtgatccctatggcaagggtccctgcaaggctggggcagggtgaatatgcgtgggaagctgcttgcactgccgtgtgcaaaggaggatgggatacagcacagggagccagtgtatagcatctcccagtgccatgtctggaaatgttggacatgaaactaatgttaacagtaacagatggcaaaccatagattaaagtaagaatccatgatgcaacccagactagataaacgatgaagagatagctcttgcgggccatggaatgctagctaaggaatgaggtgggatggcaaggttgggaagatgggcttgagtatcaggaaggatgagcacgccaggccttgtatgtcaccaagggctcctgaggaactgccgttccggccattaaccactgccctgtcagctctcaggtctgttctcttcactgccttgggcaactgatgtaggatggactgtctctcggcaccagctcttctgagacgccttcccaggcggcacacccactctgctgagaatcttctgtctatgtggctacaaagtatctgtgtgcactttggctgtgggcaatcactgggctctttctcttcctctttatcctcccagcacctgagactgcactcagaagacactaagaatttatttaacgaactgatttgattgtgttctctctctctctctctctctctctctctctcttacacacacacacacacattttctctctccccttcccacctctctctcccttcctctttcccctttccctccctctctctttctctcccctctgcttatctctttctctctccctacctctctctccctcctcctctccttctcctttcctctctctatcccttcctccctctctcccctcttcctaccttgttctctctcttcctccctctcccctctctctcagtcccccctttctctctcccttctctccctcccttgttccccacatgatttttaaactttctttaaaggctttctttcatgccacccaagtgtcatcctggtcttggttctttgtcacctttgatttcttctgtgcttttctgagtaagtctttgatttctaggccttgactctccactcttcataaaggctccaacacctgtaacctcctggttacagttgctgtaggagacctgaccttccatctcctcagctcctcagactgacaagctgctatttttatgcacaggatgctggcacgacaagctcagttggcacaaatgcaagcccttcctagttctctttccatagcttctgtctctagagaaccttgttataatcctctgccagtccctcccattgtccctccatcagcccaccttagtacttggaaattaacccaaggcctggatcatgcttaatcaagtctttaccacgtagggtggtggaagcaatttgattatattaaaattaagctgaattaactgttctacatctacataagcacattcatattcaatagacactcatcattaccgtagtggcaaaaaaaaaaaaagtataattactccaaatatctattaatggaggaatggtttaaaaacactgtgttattgtcacactatagaataagatccaatgattttaaagaattaccttgatttgcataatggtgcagaagaaactgtgacgcatataagtagctgagagctacagaagttcatatgtgttaagatctactgctaagaaaaaaaatgtaggcttgtaacatcacacagacttgtatataggtaaatgaggacaaggcgcatgcgtggaagcacaacttgtgatttccaggcttggtgccagagaaaacattgggagtaaaggaacgcagaagtgagggtgtttagtttgtgagggaataattttaaaatatgataacgctggtctcacacagtatttgttcaattacgggaaaagctgagcggacagtgaatgaatcgagagaggtcacgatcccgctttatgagcgagaaatgaaaactggcaataaaaaatgcccggaggaaccgcggaaaacctccgaaagggcggaggtctttaaatcgactgttcggttggttaactgttgcaaagagaatgcagaaaagattaagtaagcagctgagataggacattagctcctgggactagcatgaagtcaaactgaaaatatcgatgagtatcgatatgagagcgtcttccgggcgggtcttccgtttggagagctgagagggcagcacagaggcggggaaactgccttagagcaccaccttctccccgctccttgatggagctagaagtacagaaggtctcgggattttgtctgagacaggcttcactctgtatctcccgttaacctagaattcactgtgtagaccagctggccccacattcacagagatccatttgtttctgccttccaagtgctaagattaaaggcatgcattagcacacctggcttgcttgcttgcttgcttgctttatttatttatttatttatttaaataaatgcattgttgttgtttagcattggaatttaatagaagttttttttctttttctttaaaaaaaaaccacccatagaacatggctttttttttttctttctttgttttcttttcttttctttttgttttgttttgttattgttgctgttgttgttgttttcaagacagggtttctctgtgtagccctggctgtcctggaactcactctgtagaccaggctggcccctcgaactcagaaatccacctgcctctgcctcccaagtcctggtattagaggcgagcaccaccactgcctggcttgtggctcttttttcatttggctgagagggcaggtcagaggagagtggtcactaaaaagctcttgtgaatcgagtgctacctgtaatgaacacgaccatcctctcctcctaacaccaccataaccttaaacatgggcttgtgctggacagaaggcacacgccttccatacacctgtgggtcagtgacatcccagtgactacaacggttccacctggcggatccaccccttttctctacccaggaaagaaccctgccgaatgggctaagaatctgaagcaggaagacttcgagttgctctgccctgatggcaccaggaagcctgtgaaagattttgccagctgccacctggcccaagctccaaaccatgttgtggtctcacgaaaagagaaggcagcccgggttaaggctgtactgactagccaggaggtatgaactacccagggtctgctaccgtttattcctagcaggggcaggctattcggagttaaacggagctccggagtgagcatttcctttctaaaaactagaatttggactctacagaccgtggatcagaatatctgagttcaaatctcagctcggcagctttcggtccacgccatcttaggcacatggcttaaaatgtccacgttcggtttcttcacgtattaaatggaaataataccacatacacacatgtttctaagttaacaaaaaaataaataaataaagtggtgcatgcacacgtcttagggaatgtgtgtttacagggagggcacacagtgtgctagctgggactggattcctcagacctggctctgctcctgtggaactcctagtcaggacagacaaattcccacttgacccataacccctccgagcctagaatctgccttccagctcatctggatcttgactcgggactttattttcctcgagaatgtttttctgaaaacaatttctaatgttccttcgtatgagtcttaaggaccggaattgactactccttctcttgcttgtatcagttgcaccatattcttaacagtctggaaaatacaagactcttactctcagaaaaatcctgtcagggccagccttggggggcagcgagtacaggggccactggaacactttatccctagggccactctacacacacacacacacacacacacacacaaattacccttccttctggtatagctgcctgccttttaatttgtcattagttttaaaagaaataggctagcatactttgaaaagttccttccaaagcctatgataatcttcagtggtgtttctagtttgacattagatttgagtcaagcagtcttacaatcactaacagtttcatagcagcattaccaaatatttaaagaaactcaatgtgaaatgtttaacctttctacagcgttttatacctctgtttcttgtgtcgatttttaaaaaaatgccatgtcaattataaatatcttctgtagctttctgttgttcccagggctggcttggacctttcagtttcctgcaggtgtttccagtccgagacataggttcacgtctattttctgctcatttgacagactttatttgggggaagtgactgcaccggcaatttctgtttgttcaagtccaccaccaaggaccttctgttcagggatgacaccaaatgtttcgttaaacttccagagggtaccacacctgaaaaatacttaggagcggagtacatgcaatctgtcggtaacatgaggaagtgctcaacctcacgtaagtagaatgaaccctgtggagaggtcgcagagaaacccagcgatgggtgctggaatggtagttacaagaactcaaacccttaggaaacagccacgtgagcaaggcaaaacctagcatatacaaccacgtgggttatatgcacatattgttaaggggtcgcagacccaggatactaaggcagtggacgaattatatgcacacaattcctaagaagataaaaaggggcactgaacttattagaggtccctgtccaatatggcaatggctagcaaggtgtgacagagcaagttcaggtgacagctggattaaatctagatatcatatcctcactccacccagctacaattttaattgaaagtagccatagcaagaagaattatcacagagcatccttttagacagctctgttcatagaacatccttttagacagctctgttctagggaacttcaataatgataagttctggctagctaggaagttgctaagcagcatctgcaatgccatattccaggaattgaaataggataaaatatattttaccatctgtttggggattagcggggacacctgaaaacatttgtaaagtgcgagggggtgcatgggatatacagtggtgagtctcccactggagtttggaggtgagtcttggccttcatttaagttattgtgctggagatacagcctcggagactgtgctgctctggggtgatggccctttcaaggttgccccatgtggattggtaagatggctcagtggggaaaagagcccgtggcacaagctagatgacctgagtttaatccctagatctgacggtcggagacaatatactatactatactacactgtgctgcactgtgccaagctatgctatatatgtgttttacaagttgccacatggaattctagtgtgagcaatgtgattgttgaggtttagtgtgacagaatccaagttaatatttcccttacctgtatgctccagagaacaccagtctagctttgtttttctccactccatccttagacccagctcagacgttgctggggactgccagctaccatctgcctcgcattctcagggaagaagggccttcctaggcggcttctccttatgtgaattcaagttcagagcctcactggttaaaagcaaagttggggatgcctgtagggcaggaaagtcacatgacagcttctctatccttgtgtggagccctccccgtgggaggctcaggagctgtgtagggaagcagggatgggagggatggggcacagcatgcatgagtctagcagaacaatgagccttggcacaatttatgtgatactgaattgcccattcaggttcctttcattctgctaaacagctcataaaagtaagagtattctcaatgtcctatatctttcttctctccccaggactcctggaagcctgcactttccacaaacattaaaatccaagaggtgggttgccactgtggtggagacagatgctccctcccgtggcccatgggcttctcttggtcttcatgccctgaggggttggggctaactggtgtagtcttcgctgctgtgccttaccacatacacagagcacaaaataaaaacgactgctgacttta

SEQ ID NO: 10 - DNA, 37768 bp, Mus musculus
agtcaacactgccttctgggtaaagtgcacctaggctgggggagagcaagcagaacgcagttccacagttgaaaatgaggctgctcatctgcgcccttctatgcttggggaccctaggtgagtgtgctgagagccaggcagggggccggccctctggggaggggaccaggtgtcatttgctgaccatacacttcagggatcaaatgtggttggatagactatgagcctagagaagagtaatcactttggactggaattcacctgccacgcagtcccccggctgtcctttgccctcactgaggcggtcatagtggattgtcgctgactcttttgcttgcttttgggacccttttcctgccacatcctccttaataccagggaggtgcctagtctttttgtaacttgttatgtcgcgtttggttgatatccctgggaggcctgcccttttctgaaggaaaatggagacgtagttggtgacaggggatgtgaagagggactcagaggaaggaggggaaattgcagcaatatatgagagataggagaggaaaataaaaaaaacaaaacaaaacaaataaacaaacaaaaaaaccccacaacttgtttcactgctttggtaggtaaaggggctgatgttgtgattgacgacatatgacctccaggaccaaatggtagaagaggaaatccactcttgaaatctgtcctctgtagtaataataagtatagcacataaaataaaaatttaaaaaaaccaaaaaaaaaaaaaaaaaagaaaagaaatctgtcctctgacccccatgtggcttccacacaatgttaacttttttttaaaaaaagttatgtttacccaacaaacacacagttgctggagaaatgagctaacacagccagaggcaggcagagttctacgctcacaaatacaagaagccctttcgtgggtagggagaacaggctccagggaagaactcatgcactgtgaagagctcttcctgtctcaaccacggttggatcctcctccctttagctttgtctgatctgagaccgtggtaaataatacctagggtggccagagcccggcaatggtgcacagtatatgtctgcctcttctgcccagcagtgccatctgtagccacccagagggtcattcgctctcagaatgcagctgcctgatctctttcagaattcccctgaactgagccagtgttctgctaaatagcgttccgccaccattgccagcaatgtcagacacagaccagaagttcattttcccaacaggcttcatgtttacatgtcagagactaaaggcccctccgggcttcgtttcttcacgacctttctccgggctaccagaccaggccggagtctggaaccttcattcctcaaaactcagtgttccagtccaataagaatacttgtggtgtcaaatgacaaaaaacaaaacaaaaccccaaaccaccactaccaacaacaacaaaaaaccccagccaaagcagcttaaataggaaacacgtaactgagggttacatatcctaaaaacttgcaaaagtcaagagccaagccaacggtttcttctggggtccaggaactttctccattcagtgagtgactggaggccaccagcagcctttctcttcctcctgaaaaggtcagagcgtgctcagacctcttcctgtgtctgtcaggaggctagtgggggcatgctattgatgaccttgttgatgttatcagactccacccacccttagcttgtctgtacacgtcctctttttaaaatatttctatttgccaagccaggacagtggtgacagagctgtgatgctcaggcagggaatgaattcaccaaagacagaaggaagcagtagtagagaattagctacactgtggcacaaccagtaggcagtagaaacagtttaaacagaaactttgtaagaactggggaggggtgcatgtgtgcttgcttgagtgtgtgtgtgtgtgtgtgtgtgtgtgtgtgtgtgtgtgtgtgtgtgtgtgtatgtgtctgtgtgtgtgtatgtgtgtgtttctatgtaggcagtcctccatgtgtacttgcttgagtgtgtgtgtgtgtgtgtctgtgtgtctgtgtattgtgtgtgtttctatgtaggcagtcctccatgtgtacttgcttgagtgtgtgtgtgtctgtgtgtgtctgtgtgtctgtgtattgtgtgtgtttctatgtaggcagtcctccatgtgtacttgcttgagtgtgtgtgtgtgtctgtgtgtgtgtctgtgtgtgtctgtgtgtctgtgtatgtgtgtgtttctatgtaggcagtcctccagcaatggcggcagttgaggcttatggttatcaacaggttgaccttgaggttaggatgatcttgctgtgacttagaaatggctcagtaaaacctaccagtcctaacgtgacatccatctatcatttttagctagggcgtgttatgatgaagtctttgtcatagagcagtagtcccgttcacaggcagtagtgacttgctctgagcccagcctgctttgaggccaaagccgctttgttctgagacttgaagtggctcagcagtgttcccccagaatattgacacattgtttgcatacgataaactacactcatttaaaggatatatacagttcggctaacgtgacccccctccataatcgagataaagaacatttttaactttttcaaattgcccctcctcctttctcggccacccccacctcacccctgcaaacaccctgcctcctaggctcacacatctggagtgtaagcacacatccctgtaggtttggcttctctgtgttttccatttatgtctttattgtgtgctctgtctgtgtgtatgtgctctgcaggagaagacttttggagttggttttctccttacatcttatggggtctggggtcaaactcaggtcatcaggttgggcaacaagcacccttaccctctgccatctccacgacctggactactgacttctccttcttttttttccctcttcctcttccccttcttcttttcctcttcttcttccatctccttctcctcctcttcctttctctcctccttctcaccacgccacccccgcattagattgtaattattaagcaagaagtggaattaaataagttattaatttggatgcaagtgtgcaatactcaaaccaaagtgaacctggaatttctggggggaaaaattgtcagtaacacaagtagccactccctccttcccaccaacaatacagaggcctgttggaggaaagaattgggctttgagtgggagagcaggtagggctgttagttacacttggattttagaatgatttctatggctctcagaatcaagaatccataatgagtgcaggtaagggccacaaccttgaagtcttgagcagggattccagtagatctagctgtgcaccgccatgtgaggagtctggcttggaccccattggaagcaggggagatcacaggtaagggcagtttccatacatagacaataaacatcaataaacatcaataactcataggtatttgaatgacccattccttgaaaccttctcaattgctgtagacagcggggataaagccctcaatggtggaggggctgtaatggttccaaggggtctacttcacagaactgggagttctctctctctccctccttccctccctcccttcccctctccttccccactgccctctccccatttatgtgtgctacattcatacattcaatcacatgtgggtgtcctcgtgtgcacacacactgtacttgtgtgagtttgtgcgaaggctggcaattgacactgggtccattttagcggctgaaaccgggtctctcactgagccagaagctcatcaactctgctagtctagctaaacaagatccgggtctctgcctcctgagtccaggcagctccttatctactgagccacctccacagtcccagcggcttctgtcacttggcatagttgtttggagatttatccaggtggcatataccacattcactctctcaatggccaaaccctgtatcactgtgctgaaggcaactttagttggtcacatgtcccctgaggacttttgttttgttttgttttggtttttcgagacagggtttctctgtgtagccctggctgccctgggactcactttgtagagcaggctggcctcgaactcagaaacccgcctgcctctgcctcccgagtgctgggattaaaggtgtgcgccaccacacccggctagtgagaggcttttatgaataactgccatgcacagtagtgggcccatctttgagaggatacgtggttttgtttcttttgtataaatatctaaaattattgggtcctattagtaactatatgttgagggtttttgtttgtttctttcacttgctgtttttgaggttcattcaggacttaaagcatgatggtacctatctactctccctttaatgcacacttgatggttttttttaatgtttacttatttatttacttactttaatgtgtatgaatgatctgtcttcacacacacaaacccagaaaagggaatcagatcccatatagatggttgtgagccaccatgtcgttactgggaattgaactcaggacttctggaagagcagctagcattttttttttttaaagatttatttatttattatatgtaagtacactgtagctgtcttcagacactccagaagagggagtcagatcttgttacggatggttgtgagccaccatgtggttgctgggatttgaactctggaccatcggaagagcagtcgggtgctctaacccactgagccatctcaccagcccagcagctagcatttttaacctttagccctgaatgtttttcttttagttattgaaaaaaaaaaaaagaaagttttgctgtgaatatctgtgtatttgtttgagttcctgttgtcaatttttaaatatatatttaggagtgaaaatgctgtgtcatattgctaattctgtggttatcttttgggggatgtttgtttgtttgtttgggttttggtttttcgagacagggtttctctgtatagccctggctgtcctggaactcactctgtagaccaggatgacctcgaactcagaaattcgcctgcctctgcctcccaagtgctgggattaaaggcttgcgccaccacgcctgacttgggggactttaatatatctggagagagtcagaaaaaaagggccctgagaattccctcaaggaacacagctaattcagtgtgtggatgacacacagttggctctattttttagtattaagatatttttaattacacacatagtgtgtgtgtttgtgggggggttgtgcatataattgaggtatccacaacagaggccagaagataatgtccagttcctcagcactggagttacaggaggttgtaagctgtgactcaggggctgggaactgaacttgggttctccagaagagttgaatgcagacttaacggtgacaccatctctctgtgccatcggtccaggccacttagctccttgtcttgtgtttgattcctttctgccagcagaggaaggtaagtgctgtgggtccctgacacctcttgtgtctctcccctagggctgtgcctggctcttcctgagaagaccatacgatggtgcgttgtgtcagatcatgaggccactaagtgttctagtttccgtgacaatatgaagaaagtccttcctgcaggtggcccagctgttacctgtgtaaggaaaatgtctcaccctgagtgcatccgggacatctcggtaagtcactgctgtgtgaaagaaagctgaagaaaggctgtccttttcctgtattttacagagctggggagaacacagctgttcagtgctcgtctgtcggaaaagtcatcatcttaatcaaacaactaatacagggttcaaacttagcaatgtagccatgacacagcaaaacctaaaactgcatcaagagaatctataaagactcaaaagtactgggcttagcagtttagagccctggctgttatcccggaggaccagggttcaattcccagaacccatatggcagctcaaaactgtctgtaactccagttccagaggatctgtcaccctcttacaggcaaaacaccaatgcatatgaaataaaaattttaaaaattaaaaaaaaaagactcaaaatgaaacaagaaactttctctatgcagaccaggcttttccagaactcaaagtgtccccgttcctctgtcccaggcactgggactcaaggtgtagaccaccatacctggtggagttttaatattaagtacaaaaagctggggtgttgttgttgttgcttttgttcttttaacaaggctggtcttgaactatatgcctgcctttgcttcccgagtgcagggattaaaggtgtgtaccaccactacccagctaaacttgttttttttttcttaacatgaaatttgcctttgtttaatatgcatacgtgtgtgtgcatgtgtatgagtgtgtatgagagacacagagacagagacagaggcagacaagtgggagagtaagcagagatggatttatagctataaatataaattatatttgctagttgtccttatgcagttgcagagcaggttaaactgtctaagacttgcctttttcatctgatgctggaccctaaaggggaaggactcaggaagggaggatgtgcgaagtggagaaaagccgccatgaactggagcctcagagagggctggagctcatgtcaagtccattcatgttgctccaaatcttcttccgtccttctgtctttcttttatgtacgtatttatttttattttatgaggtcctgaattcaattcccagcaaccacatggtggctcacaattatctgtaatggggatccaatgccctcttctgctgtgtctgaagacagtgacagtgtacccacatacatgaaataaataaataaataaatcttttaaaaaaataatggatattgacaacctaggaaaacaaaaaagaatgagaggaaggaagtctgagctatggaagagtctgtggcatcagagtcccgggaaagacactagcagagtcttcgccaggggtgatgagtctcattcatgtctggtcccttgtctttcaggccaataaagtagatgctgtgactgttgacggagctttggtggctgaagctgacctgcctcaccacagcctgaaacctatcatggcagaatactatggatcaaaagatggtgtgttctcccagtatcactggtgtggcgtgatggccaccatggttggggggggggggctttgccaagagtggcggttacttttcttgttgccgtaacaaactgcctaacaaaagaaacttcaggaagggaaggtctatcttggctcacggttttaaaggatacagtccaccactgtgggaagggcaatgccaaggagcgcgaggcagctggtcacattgcatctgtagtcaggaagcagggagaaagcgagggggactgatgctcggtccactctcttctcatttctattcatcccaggaatggtgctacccacattcaaggggtgactcttcccttctcagtgaaacctctttgaaaacccttaacgacactcagagatgtgtctcctacatggttgcaaatctagccaagacaatggtgtaaaggaagcatcatgccaacgttacgggtaccaagtccccagagctcttccgattggcagtgttgttcactgacccgcagggtttgggacatttctccacaggaagctgtagcttttatgaatcctgatggacagacatatccttggttctatagtctgtgggacagttaacatccccagaggaacgttatctagagcctatcacacacctctagggttgtgacaataagataccatttctgaggatccacaaggctcttctttttgttgcttcctgtaggccttatatggcacaggtggtatgaaaagaagctctgggggagtgaatgaggggagattcacctcgcgtccattatttctatcagcctgtgaaagcacagcccggctcagtctggtagtccacgaacactctccgtctttcttctcacaactttactatgtgcctgagctgtaagcagagaaccacaaaaggaagagaagtccacatagagacagcaacagtgcaatgactgggactaaagcttgggggtccctggaacccccacgagtcctgaaatgaagcattggaggctttgcagacttacaatgacttgcagaaactaaatattataagcccaatgctttcagtacagctggtctggctaatagcctatccgcagtgctgcggatgagtgtttgttcccgtggtgatcccacggctaactacacacaccatggtttaacatctctgtccagcttcagaggaggggcacagcatgcattcgaaagaccaaactgaaaattcaaaggatgctactgtcatctgcattgaccataaagtaaaagcctcacaagtctagcttgtaagtcagagagcatctgtgatattaatttattgccttggaaggatcagttctctcttcctgccagaaaaaggcattttttcattccccaccccaccccaccccccacacttctttctagggagtggtgctgggcccagggtcctctgatggtccgcattgagaatgccctggaaggttggttgtaatgacacacttcatttttgccttctctttctctctgctccactacagatccaaaaacccattattatgttgtggccatggcaaagaagggaacaggcttccaactgaaccagctccggggcaagaagtcctgccatactggcctgggctggtctgctgggtggtacgttcccctcagcaccctgcttccttctggctctcgggaaacaggtgagacacctggggctgggtgcccttaagtggggctcctgcactggatggtctaaatgggttatgttggggttccacaatgggtcagtcatttgtcttgctgctgtgaaacatacccgacaaaagcaccttcaggaaggaagggcccgaagtctgagggaacagtccatctcagtggggaactcatgatagcaggagcgctctctctctctctctctctctctctctctctctctctctctctctctctctctctctcatttaacccaggacccaattccatcagtggggacacacccatgttcagggtagctcttccctcattagttaaacttttctggaaacatcttcatagacacacacccagatatgtgtttccatggtgattccaaatccagttgataatgcatgttaaccatcgctcactccctgacgaacatgtcatgctttatgttctccaagatggagtaagagtatgcactagcatcacatagctggcagagtcatctctcaatagaggtgcttctcttttgctgggccgtcagtctcttcttccctgggaattgcagcagtttgtcttggcaagggtagccttgaaagtccccaaggaaggtcatctccctccaagcctcccaggaagggtctctggggactcccagaaacttcaccagcccctcgggtttccaagtattcattcgagggcttggggcatgggcaaggacagtgggactggtcgatgctaggacatctctggataccccaggcttctcgagcatttagaatgagccacagtgagcccagacctgttcaacccttgaagatgattaccagatcctacactctgcaaaagtggtaccctttctgagctgacaatgtagtattcatggatattctgggggtttttgtttgtttgtttgttttaaagatttgtgtatttttatgtctatgagtacactgtatctgcatgtacatgtgcatgccagaagaggtcatcagatcctattacagatggttgtgagcctccatgtggttgctgggaactgaacgcaggacctctgggagagcaggcagtgagtgcccttaaccactgagccacctctctagcccccagtactcgtgttttaacagagagggacaggtgactctgtgggtctgctggagtctggtgaagtggaacagccttgccttggtggcagatacccgtggacgtctccctgggcagctaggctactggcttgctcctctcctgactcaccagcagcatctaccaaatacccccatgccccaccaccaaagggatcccatgaggcatcatagtctctgtgcacagaagggatgaagtgggtgagcttcatgcagggagacaaggctactgggtggtggacgatctgcacagggtcttcagtgttctgtctggccctgtaaggggttggtgaattaacagggtcacgtcttgtcttcacgtgggtcagcagttcccacaccttacagcagacaagccggcaagcattttcatgggcttgagccctgggctcacctgagtgtgattctcaaacacacaggaccctgggccatgcatccattcattctgacgtgggcactgccgactacctaaggcaggctccctgcacattctttcccttcttagaagcaggcctgggagatgtccacagacttaggctctcccatagggcactcccccacaaacatgcgtaacctggagccttgagccagctcacaccctggggccttgtctctgtgttgagcagcggcagccacgttcttctccagcagctgtgtgccctgtgcggatggaaagatgttccccagcctgtgccaactgtgtgcggggaaggggacagacaagtgtgcctgctcctcccgggaaccatactttggctcctggggagccttaaagtaagtgaaacctttgctctggaacaagggggtctcttagtgacttttctctttttaaaaaaaaaaagtatttatgaaattaatttattatcagattattaatttactaaaaattaataaattattaaaaagaatttatattatatgttatataatactttacataaataatcaaactatgtgtatttgtggttgtctgcacgtctgtctgtgtgagggtgttgaatccctggaactggagttacagacagttgtgggctgccatgcgaatgctcggaattgaccccaggacctctggaagactgctgagtcatctctccagtctcttagttacttttcttctttctgtgactaaatgcctgacaagaagcgacttgtgagagtttatttcagctcactgtttgggaggataccatccttcatgatgggaaaggtgtggtggcgggagcaggagctagcaggttacctggagtgggggatgctggcgctcagtgggagcaggggcaggggcaggagctagctggttaccaggaatgggggatgctggtgttcactgggagcaggagctaactggttaccaggagtgggtgggggatgctggtctctgctcactttctcctttttattcattgccaagctctagcccatagagtaacaccacccacattcaaggtgtgtcttcccaccttaattaacctagaaacacactcgaagatacgacctgtgcttgtctcctatgttatctgatccagtctagttgacaaccaatatcagccatcgaagagagacgaaggcatagggtagaacaggacatactcctggcatctagatggcatgagcatcagggtgcagagtccctcccgtggcctacccctgtttctaaccatcctgaggaactatcttctttgtgggagaccttattgtctccccaaagctggggccatgacatgccccatggtaacagaagtgccaaggggtcagacttatctcttttctggagaccgaggtccatagacacaggcctcaggagtctcccagcgaaccacctttggcattttacctgtgttttttcattctctgtagaaggtgactcaaaccaaagcagggttttgaggttatctgacaggtttttgtttgtttggggttttttgttgttgttgttgttttattttcattactgttttttgagacagggtttcttggtgtaacagtcctggctgtcctgtaactccctttatggactaggctggcctcaagctcacaaagatcccctgcctctgcctctcaagtgttggaagcaaagtcgtgttgttgttgctgttcaaacactgcattcagaggcttggggaagggttattttctgtctgctattttctgcaaaagaggtctccctgtcactgagagcatctgatgcctttattttttcttttcctaatttatttatttttattcactttacatcccaatcatagcccccctcctgtcctcccagtcccacccttacaaatccctcacccaattacccctccctttatcctcagaggaggggaagggaagccccaccctagaatatctagtcctaacaggactaagcatatcctctcccactgaggcccaacactaggtagggggaaggggatccaatggcaggtgacagagacagagacagcccctgtttcattcgttaggggacccacatgaagcccaagttgcacatctcctacaaatgtgtgagtgtcctaggtccagcccctgcatactcttcagtctctgtgagcttccagggacccaggttagttgactttgtaggtcttcttgtggtgccatctatattccagtcttccacaagacttcccaaactccatctgatgtttggctgtgggtctgtcaatcagcatccctccgtccactgccggatgaagcctctcagaggacagttttgttaagcatagcagagtatatcattaatcgtgtcaggggttggctctctcccatggatgggtctcaggttggactattccttctttctctgctccatctttatctctgcacatcctgtaggcaggacaaatttgagattgaaggttttgtgggtagattgatattatattgctggtcatggtggctcataccagtaggttttatctgatgacttgtaagtagccaaaaccaaaccagttgcttggagctgctccctaggaggaatgtgagggtcctgtctgcttcatcacccctctctggagctgtctgccatgatgatttccagactcctgcctgcttcaggtctcggcatggctgtataatgttcaaaggccccagataaggccattgcctctctgaaggcagatgggcgccaccatttctaccaaagccttcctagattgtaaggggcattgcgcaagaggcagatgaaccgtgttcccaggcagagggcctgaccttggctgtcctgtttgcagatgtctgcaggatggcacggcggatgtgagcttcgtgaagcacctgacagtgtttggtaagtgctggacgaagagcaaagtgggccccagcctgaccaaaggctctggctcttgtctctaaagggtttttgtttgtttgtttgctttttttttgcttttaacttctagagactattgatattgagaggctaactccattgaagagattttatgaaagcatttccaccatttctacattgtttagggccccacttattcttcttagcacacatccgtctcctagtgaccacacccatttcagggctctgcacccatccctctctggctgccttagccaacctgctgatgcctctataaatctagggaacatgaattttggacggttatttgcaatttaccaacaaatgaaagaagtcgcttctgcagtggcccacattaaaccaagagccttgtatataccagacaaaggctttaccctgataacccccccattctaaaaattaaaatcaaaagtaacatggcaaacctttccaccagccattttggacaatttagctcaaacaagcaaagcaacgttttcagacaagttaagatgacatattctggttttgtgaggtgtgtatgtgtgtatgtgacaactgttgggatcataaaaagagaaagagttataagaatgtgttctggcagggtgtggggaaagggtgtcccccggcagacccatgcagaggcatcccttccccctgagggacctgacacacaccagtgcagtatagaatagggttcattcagggcatggggaggggagttaagagggtagcagaggcagagaaaggcagagaggagagagtagaaacgtaggggccagccatgaccatgtgtagaggaggtgggggaagggaatggggagagagggggcaagaggcaagaggcaagagagagagaaaagtgtaagagagagagaggagggaccaagcagtcccttttatagggccaggtctacctggctgctgccaggaactgtgggggtagagtttagacagaataccaacaactgtatctgtgtgtatgtatttgtatatgtgtctttctctctctgtgtatgtgtgtgtatgtatttgtatatgtgtctttctctctctgtgtatgtgtgtgtgtgtgtatgtatttgtatatgtgtctttctctctctgtatatgtgtgtgtgtgtgtgtgtgtgtgtgtgtgtatgtatgtctatgtatgtgtgtgtgtatgtgtgtgtgtgtgtgtatgtgtgtgtgtgtttatctgtgtatgtgtttatgtgtgtctgtgctgggattgaaggcgtgcgccaccgctgcccagctaaggctgcaactttaagatgagggtgtcaacagtgcctgctccttctgaggacgtgaggaagaatctcccgtcctgttctcctggctgggtggccgtctctgcttttccttggcttgcacataaatatcgtcactgtctgacgtcacactgatgtcatgcttgcatggcagtctccctgtgtgcacgtctctggctcagtttcctctcccacaagaacactgattgtattgaattgggagcccactgtattccactatgtcatatcttaatggcacacacttgtaaagactacttcaaagtgaggtcacacttggggacgctgtggattatgacttcaacctatgaatgggacagggtccacaacacccaaatcaacatagtagcaaccaaggaacctgtgcttcacacctgcagagttccctgactgggaccccagtatcctttcctaccctcggctctctcagcactttccccaagcaggctctgtctcggggagaacatggctgcgttcatgagggacatgaattgccccagcatggcagcatatctgagaccttgacaagttaccttaactctctgcctctgtttcttcgtgcctatgatgtgatcattctatgtccagcctcctttagcttgggggattgatggtaaagaggcctgggcagcagtaagtcttgcatacagccgtgtgggtcatcactgctaagcgtgtgtttgctgccaccatttgtatgttcagatccacagggatgtaggcagctggagggggccagggtcaggcatggtaccctacctgtgggagccacagtgggactataactctgtcattcccctggtgagccccgctgctctctcatctgtggaaagtgtatttagaaaggattctagctctgtccccttcaggccactcgctctgtggtggtggggagaggtcagcacagctccaggctcagcctgctcacccgaactttccttcctcagaggccatgccaacaaaggccgacagggaccaatacgagctgctctgcatggacaacacccgcaggccagtggaggaatatgaacagtgctacctggcccgggtcccttctcatgttgtggtggctcgaagtgtggatggcaaggaggactccatccaagagcttctcagagtggcccaggtaccccattcccacatcctttcctcagctcgaagctcctggcttcagtgtgtgtggtatgtgtgggtttcctccatctgaccacactaacactagccgtctttgtgcattcaggatacaatgggcgatgcattcaccaacaatctacctgctatgtgtttattccagacagtagaagccattaggaccatgtgacctacatcaccaacccagggctaagcacttcctgtctcatttctgttctctttttcattctatggagtcccaccctcttcaacaaagcacttcccttgtgaccccctaccctggcctgtgactctcctggtggaggaacagaaacaagatctctgtattggtggaaatctctcccagacagtctctggaccctatctgtgccagcactgtgttcaggctcagggatgaagcacccaggcacaaggagagcatgcatgcattagcaccaggaggaattgcaccaccttgagaacatgggccttgtactctgtgctttcacagaggaactgattggaagggcattctgggataaatcctgaggcctggggataaggagtgtgtgtgtgtgtgtgtgtgtgtgtgtgtgtccccatccgtccaaaagaggggtgaaggattattagaaaaatcagcaggtggctgattttatgcagagccactgcaagagcaaactacagtcatttgaacctttttgctattgttattgttgttgtgcttaggtttttgtggagacaggtctcatgtagcctagactggtcttgactatgctaagtagccaaaggtggacttgcacactccttatcctccttccctacgctcccaagtactgggaatacagacatgtgttgccatacctagcaaacacagtcctttgaaagagcacttggacaggtaccacgaaaagctgaaatcaggaacaactgtgagccaggcaacggagacacaggcaacgggcatttggggtattttgaaagcctgaaaggaaaagagactgtttaataactggtccttagcaacaagcctgaggtaaagagaaggtccaggacacctaccctgcatccctgctggcaacttcagggaacgtctagcatcaccagggcaaccagtcagggaggaaaaagtcatcactcatgtgaacacacagcaagagccctactagagcctactagagccgggcagctgcctggcacatgaccaactcagacccccctttctacaggtcgggagttagcagtttgccaagtttatacggcacaggctagatgggatttgagtaaaactgtccttcaaagaacttgttagaagccctggaactgtctttgtgtgtggctatctccttttatctgtgtgtaaggggttatttaaaaagctttagtggatgtctgtgattgtaaaaaagtcccaagccctacagatagataaatatacagatggatagcttgccagttagatgtgtaaataaataatagatagggaggtagacactccttgattcactgagctgtactctagtaaacctgtcactgtgcttaaaaaaaaaatcaaatcaaaccattgtaagtcagcaatctgtgcattcaaatgtatgatgaagattaatgtataaattaagcacaataagggattatcaataatatcaaaatacatccatatactacaattaaagttatttaaaatttaatgcctctgtctggaatttttccccttagtattttcagaatgctgttaactgttggcaactgaaatcgcagaaagaatctgtggatacgtgttagtgttattattaattattattatcattattatttttattattatttatctaatttatttcaaggctcacatctgggcacaacttgtaggcatatttgttttatttattttatttgggttcttttacctctacctccctttcaacccttattccttccaacagcccaacaccagggaggagagaaagaaggttagagaggacaggaggcgttggtttctctttagaatactttctgctgactggggttgggttccttggaggtggtgggggagtctgatcttcatagtgaggatatcttcaacttcttcttgtctctttactctttgcgtatgaccacttgactaaccccaacaacagcaaccaggagcagcatggaaaggctacagctgccaccttctttcttctgctcctactcctcttcctcctcctcttgctcttcctcctcctcctgctcttcttcctcctcctgctcttcctcctcctccctcctcctcctctccccctccatgtcctccaccactcctcctcctcctcctcctcctcctcccccccccatcctcctcttctgagtccctcctggcctctcttggggctgcatttctaccctctcccgagtcctcagaattaaactatctgcagccagcataattacatccctgccagagcatgaggcaggaggtcagctgctttgaataatctgaagcagccccttatctcacacctgggattaaaacaacaacatgtctacctacataacctaagtgagattttaaagaaaccaaattcctcactacagacagggatggccgcatggcttcccacccccctcccttacctagtttggtttctttttgtctttactttcacctccgtgtcaacaatgatcctctgtttcttttcctgcctctggacaggaacattttggaaaagacaagtcatcacccttccagctctttggctcccctcacggggaggacctgctgtttactgatgctgctcatgggctcctaagggtccctcgaaagatagacatcagtctgtacttgggatatgagtttctttctgcctttcggaatcttaaaagaggtatgtcagactcgggagggacctgccaagcttcagccaccgggtgtggcagaggccttggattgagattttgctggtggctgcaagtttcacctaaccttaatggtcagaaaagcccacaagtgctactcaatacccagggctaacgagcagatgttctgataagccaggagaaagggctatgctacgctatttaaggacgagaacactatattggtggaagtggtggtgctgggcttgaactcagagccttacagatgtcacgaaggggcttgattactggggtattctggtccctacataaaggatttgaaaatctttctattatagagattttctttaaaggttttgtttaagtatatgagtacacaccagaagagggcctcagatcccactgcagatggttgtgagccaccatgtggtttctgggaactgaactcaggacctctggaagagcagccagtgctcttaaccactgagccatctccagctccctaccatagacaatttaaagccacggtggttccaggttcttgtgttaactgagtctattctcccagtggtgggtttgctcaacagagaggacaattcatcctcaactgaccaggaaacacatccatgatcacagtcaggagcagagctagaacaggcattgcggaggctttgagtgcagcgccaccctcgcacccccaacccccgcttccactggcctctgctgcccgcccctctcttcacttctctgttttcaacccccagcccccctgccccccaatttagtcaaacaatagtcactgagcatctacaaaagaaagtgttagatgttagatgggagctgacacagcagatgggccacagcgatgagaccatccaagcagagcacatgactgccatgggctgctccctggatggaagttctggaagggagagctaagacgcttccctggggaggtgatatcaggagggaggggaaaactccacctcagctgctttatgaatgcctaggtctctacttctcctagacaatgactgatggcaaggagctatggcaaggaatgagtcgcacccgctctttgccatcagtgatgccctgcctggcatcatgtctgcagccatctggggctttctttgggtccttggatcatctttctgcatcctaggtctggaagactcccagagggtgaagtggtgtgcagtgggccagcaggagaggaccaaatgtgaccagtggagtgctgtgagcggtggtgctttggcgtgtgccacggaggagacccctgaggactgcatcgctgccaccatggtaggaaaccccgctccttcatctgggctacattgcatataactattttatctcagggatcatacttacaactataagaatacattagttgctctatttagaatcttgattaaaatatcaagttaattatgaatgactttcttaatggttattcattattttgttagttatttattgaaaacgtttcttgcaccgcagttatgagtgtggtgctgatgggatttaggcaatggatttgattccattagttgtaagaaaacattttcccgtgagacagattaaatatagtacctgaatctgaccatgggggttctgaatttactgacaatggtcataaagaaagtgtgttctgggcatgtcagagggtcctctaggaggacacagggatgtccagagagcatggtttgaatcgggcatgtttctagctgacaggccagaggcaggtcttgttttctaaactccgtatttccaccagttctgctgtctggttaaataaggacccatgacagaatgtgcatgagatgaagtctctgagggtcagaggaatgagagccacacagtttacgactgatttctttcttaacttcagaaaggagaagcggacgccatgagcctggatggagggtttgcctacgtcgcaggccactgcggcctggtacctgtcctggcagagaactactgtgagtggggcgcttctcttcatttctccctgggccatgggcacagaaaggtgaagaagtaatgtcattttctggtaagatgaggatgactatttttgcagcttagggctctttgaagtggaatcttggactccccagtcagaagcagataagctgcagatgtgggtgttaggcgtctttccataggtcttagaatcaagcagccaaagtgagggcaacaagtgtctgtctctccagtgtctttgcccctgctgggacagttacaagcaaggagagttcaacgtcatacctcctgttttatctagaatgatactggagggcatgtggtgggtaaagccaccacaatgcttgtcaactagcccttgggttagacttgctgctagctcccgggtctcagcagccatgacaggctaggctcagccactccctcagataacaattaaagaggagagagagagagagagagagagagagagagagagagattgattgatcttatctaccatagccacttaaggaagcggacccattagagctgcaacccctaagtccatcttcaggattctgatatgaaggttcaggtttaaataagagggcaagagacatgcatggatgatcaatccttgtcatgatgtggtctcccacatcatggatccatcatgctatttggctttagtctcacctacaaggtggactgacaaggtggactgacagggtggtagaactgtatgaaacctctccctgggagacaagttcttcctcagagacttgcagtgactcttgagtcattcccttctccagcatgagattcctgaaggcatttcagtgccttggggactactgttccaatagtctgagagccaaagtgagggcaacaggtatctgtctctacagtatctttggcccctgctggaacagttacaggcagagagagtttaacatcatatctcttattctggctagaatgatactggagggcatgaagtgggtagtgcttgccaaacagcccctgggttagacttgttgtagctcagagaagatgtcagatccagacagctgcttcaaaagcatctctgccaagatgtgcagccatctctcttctgctccccttctatgggcatcttattgtactttggatctgtttaagttttgagattctgggggtagaacctgatgttataataggaaagactagggggagaaactaaatgggctgcagaacctttgactggtgataaccagcgacggcttgctaagccaacattcctcattttattccatctcagctgaggtagagaagcttacagctcgggtagaataactcgtgtgagagtttaacgtggaccttcagtgtttccatttttctttttagtgtctacccacagcagtgggaggctggggtctaagtgtgtgaacgcacctttggaaggtgagtgagtcagctttttgaactttggggttcaaaggcagaaccttatccttgggaagaaggcaaaggaagccttaaaaaatgaccaaaatcggggctggagaaatggcttagcagtgaagtatgatgattggtctcgaagatgacccagatttgatgcccagtacccacatcaggcggctcacaaatacctgtaactccagtttcctctttgctgccctctgctggcctctgtcgttcccttatgaatgtggtacacatgcactcatgcaggcacacacacatacacatacattaaaaaaataataacaaataaaaccaaacttaatagagttgaaaagagatgccagggttcactgttgaaatacacaactgccctaaagcagccataataattgatgtctgcagggcacttgacaattgaaaggactcctgtgaactctgagactgctgtctgttctcctcagcaacctggtagaatgagcattattgctccactgggatgtagttggggaaactgaggctcagggactgggtgtcttcccagggggaaagagccaggggtggctgcagttaagtttgagaagagttggggtgagcagacccccaagtcctcctggcacagcacggtgtttctgtcacgtgtccactcttgcacgaaggtcagcatagaggcagaagtcatctgggagcaggttaggccttgtgagagaaggagattcccaggggctgctgaggaggaagaagaaaatgagaatcaccctggggttagctggaacttaataacaggggaattgacctggtccttagagcaaacaccttcagaagttaagtctcctgcccacatctctccatggctgatgtttatatttcccctgaaggatccagccttgaaatcaggtggaatgtggccatgggtaagctccctggaccatcagcatcatttgggaatccattggaaatgagatttcttgacttctctctaattctacccagtcaaatacttctggaagaggccagaagactgctttgttggatttaatgacagagccccaagatgaataccagatacttacttcggctcagcagagatctgatgagttgaaggtttggctcagtatagcacacacagcctcaggtgggctttgcccctgttgagtaccaggccacagaggtccccatgctttcatgtccctgctcaactacagcagtccaccctaatctccctgtgataggagcctgaagctccccactctctatattcatggctaagaaatcttctctgaatcgcgtcctcctactcaaaactgagagctggcttccatcagccgtgtattccagtctgatcatttatggtcagaaacaacatgtctgcttcaagaaaagttgaaatatccaggagctgcagtcacatgcaaaatgtaggtcagcaaggatgttgagaagacaatttagacagacacatgatggctgtcatcgagaaggttcagtctgagtatgggtggagagggctctgtatttagccaaatgtatcagctattttccttgttgcaatagcaaaaagcatcctaatggaggaagggtttgttttagttacagttgtaggggagacaatccctcagtggtgaaagcatggcagaagccggtcttgttgcatcagcagtcagaaagcagagagaaatgagtgtcagggctcggctagctttctcctttgatggagcccagggaatggcatctgctttcctacctcagttaacccaatcaagaccaactctccctgacatgcccagagctctatctccaaggtgcttctaagtcatatcaagtcaacagtcaacataaacaatcacaccaaatctgtctcttatctttctatatgtctctactatctcttttttctctcctgtatatctctccacctctgtctctcccatctgtttccctctttcttttctatctctgcatcttttatttctgtctttctcacacaaagtcaaagatagatgatagcatttaatgaaataagaataaaaatcttagacctgaagacagtattagtattttataataataataataataataaatttattattattatcatcatcagtagtagatagtgtagctacttgtattacagagtccagtcagtggaaattgcttttccacaagcgaatctagaattatctctgccactagcaccactgttgggaacctacagattcatctactctccccactcaaagcaggatgctcggaacacaacagattcccccaccccacatgacgagttttagccatcactgtactaatgagaagtgtaggtacatatagaggcacccaaggtcatctaagatagctagtgagacaagtctacacctgccatgctgagccccagtttttcccacatttgaacacggagggcagggtgtgtgtgtgtgtgtgtgtatgtgtgtgtgtgtgtgtgtgtgtgtgtgtgtaatggaggtgggggtgagtgacggtatttcctaattctgaagatttataactttatctgtctaacctaaccaattccactcttcagctctgacttactaatgagcacgactcagtagtgtattcctcagataggaaaacctgaagcactaatgatagtcccataagtcaggaagaaggcaggaatgctcactcccaccagagagccacaggattaccttagaagtaaaggcagcgagattagaaaatgagggggtcttgccagagaagcaggggcccccttggaccagtcccacactcccattgtcacagatcctgaaccatgctaaagtcacacttgcaggcaaatggctatgtagtttcagcacaccagccaaaggatggagctgaacagaagatggagaaaccaagttcacattctcctccacacagagactccattaaatgttcccggggaagggagtgtgccagatcctgcttttgcccactctctgtctccaaacagtaaagagcttgtgtctcggtgtctccactgcaaggttattatgttgtggctgtggttaagaaatcggatgttggcatcacctggaaatctctgcaaggcaagaagtcctgccacacggccgttggcacttctgaaggctggaacgtccccatgggtttaatatacaaccaaactgggtcttgcaaatttggtaagtgtgttctgaaggtaaggcggtgccttccttgggcttgttcctgagttggggggatattcagttcaggagatggcaaggaatgtcctggccacctaggatatttgggtcatgggcttgacagaaagtgaactccaccccttcccaggtaactcctcccctttctcctactttcactacctgcttttgatgggagtacatagccctgaaggcagatctcagggaaagggccctgttatgtcttatgaacagtcctgggaataaatggagccttagtagtgtgtgtaagtgtgcacatgtgtgttattttcacatataccctgaactgacagctttcacacttgaagccctttcaccaggaaggccctggagtgctgcctccccttgcacatttatcctgctcccttgactcccaccctagccacttcagctgcaccctcaagggtacctcagattccttgcctctatcacttgatacatcccagtcttcttctctggaacagaggaaccaggctggagaagagcccaggacaacagagtagtcattgctctggaaaagctctgaccagtggcctcagtgggcccccaacactcccgagtgcagctgcccctcacacttccaataattgtgcctgtgtccacacacctcaaacccacaccgacctgccaccttctctggcagatgacccagtcagtggacaccatcagaagacaactgaaaccatcagcatccatcagcagaagctgctgagtctatggacctcctgactgctgcctctcctcagcctcctacatgcccagatccctctccctgcacttgggtaccactcacgacaaagcccaagacactcaactatttttcttttcttagcctatccaacaattcctttcaacacgtcaatacactgatgtcttctatctttaagattcttaactcctacaacattctcctgcagcccctgtctaagttcactttttcctttcctcccagatcttaaaaacactacaggagccacacacctttctctcacatctccacttcctgctgtctgtcttcttgcatcatccatcccgagggcatcactctgatggagacccccacagtgccctccagctgctcagctcctgctctcccagcaccaccacccctctattcctggctttcgtgatgatgtctagatgttgtttttctccttctcctaaaggagtctatcctttccaacctggttaagaaacatcggggtttcataaagcagttctcttcccgtctaagcatcatccctaagcactcacatccaaatgcagctggatcattacgctgcccatacaaaaccaggtactcggtatgcactggataaatgctgactgctgttgcttttattgtgtctaaagggcgataactctcaagcacagattgctccttcacacacacacacacacacaccgcaacacacacgcacacacccccccccctgcagcacacacacatacacagtctcaagaagttgggcttcacctcagactcgcgatgcagctgagactgatattgaagctctgatcttcccgcctcccaagtgctgggattataggtgtgcatgaccacatgcaacccaaacatgtatctaatgaactatttccatatctacttaagatctcgaaggcatattaaactcatctcgattatccaaaacggtgttctctcatcctaacctggtgatgctccaggactgcctagcaccgtggaggactctggagtcccacttgcccagcaacgtcagttctttctcctcccacccacgtcttcttacttcacgctccctctcctagcccactgcagtggcctgccacccgagctgcacatcaaccctacatccatctacttctcagtcagacttctgcaaagtgtggttctgattgtgtgtgccaatccactgggcccagcattgtctaaatcacttcagagactccctttactctagagataaacaacagtagctacacagtaacatcccctggggtctgaaccttgcccctgccctactcccttctcttgacagtctattcaaacggcccccattaagcttgttatgctatgtctgggtcctgctctcaggtgccagtcccctgtctgtaagcttctcttctccccattcccttggggactgcctactcattccccatctcttgactccctggtctatggaaggtccctctatctccagtttcaggaaatcatattccttcttcccagagcaacgggggccatgcagatccatgggtgtggttgcttgagctctgaatggtacccacagagagtaagtggaaaagggaagggcccatggtcagtgtagttccctggaacccagtgctaggcttggcagccatggctttcctaacttgaagtcacaatggcaagctttctaaagggaaaaccaagacagcagagaccagaacgcatgggtttaggtcaaacaagccagcccactccctttccactatgttagagttacactctctacctacccttcaacaccctggtcctgtttgaggacaggtagacttctgtgagctctcaggccggctcatctccagtcagtccctttacgtggtatggaatcttttcttttcttttcttttcttttcttttcttttcttttcttttcttttcttttcttttcttttcttttcttctcttctcttctcttttctttcctcttctcttctcttctcttctcttttctctttctttctttcttttttctttttttctttttttctgagacagggctgtcctggaactcactttgtagaccaggctggccttgaactcagaaatccacctgcctctgcctcccaagtgctgggattaaaggcgtgcaccaccactgcctggcttggaatcttttcttttattccatgatgttcttgttcttttttaaaaaatgagttttgtatatgtagagtatgtatgtgttcatatggacatggatatgtatatgtgcaggtgcatgtatgcacacatctatggaagccagagatagaggctggttgtcttcttcagttgatctccacattattattattgtttgagtaagagtccctctgtgtagccctgatggttccgagatccaactgtccctgcctcctaagtgctggtacttatagctcctgtcttagtttttgagactgggtctctcactgaacctggagctcaccattttgactaagctggcaggtcagcgagctgcagggatccacctgtctctgcctttctcagcactggagttacagatttacaccacagcacccagcttttacgtaggttctggggatccaaactcaggtcctcttgcttgcgtggtatgcactttgctggctgagccatctccctagcccttactaatgttgctgaataacaagctgtgtgcttgtgttgcaggcagtctcagggacaaacctccggggctttcctgtgatcacgggaagagctgactctggcttgtccttccttgcagatgcattcttcagtcgcagctgtgccccagggtctgaccctgactctcctctctgcgctctgtgtgttgggggtaacaacccagcccacatgtgtgctgccaacaacgctgaggggtatcacggctccagcggagctctcaggttagtgtctgtgcctttccttctcttggcatcaccctgttgaccccctcatctcctcatgcattcatcatatcagtatctgggtggtgatttgggaggatctgggattggagaccagagttaactgctgatattcagcctggttctataaagaatactcccttggcccaggtgcctgggcacttcagggacttggatagggcaagatcagtagtacagagtctagttttcctcttatcttttgtgtgactgtagataagccattggttctgttagagctcagctgtcaatcacaggagagacccagactctggcttcccccactgagctcttttacaccgacagatcttttacaatagacctgtcaaggtactgcctttcatttaaatgaaagaagatgcagttacagagcactgagtagcaggtgctcgtctaggtagctagcaagcaacaagactcgcacggtcctgtctgctctgtgtcccagtacaaaataggaccgtaaacagacaagtaaagaaaattgttctcaactgaatatgctatagagagaccaagaggaggcacgagttagggagctttccatccttgtaacaaaacacccgagacaatcagcttataagacaaaaaggttcattttagctcatgatcttagtggttctaagtagaaccaatgcaactgggatccggccgtctgtttcaaaggcgtgtctcaacgactcagggatcactcagtaggacccatctccttctggtttcacctctaattaccaccaccttagaaataagctctttttttaaaatttaagtttaaatttgattttaatttttatgtgtgtacatgtgtccctgtgtgtgtgtctgtttaaatatgatcatattcatacaggtgcctgcagatgccagaagagggcatcagacaccagtccaacccctggagttggacttaggggtgattgtcagctgcccaacatgggggttgggaagcaaactctgcttctctggaagagcagcaagtgctctcaaacactgaaccatctctccaggtcccagagccaagcctttgatagtcaagtgcctttggaagatgttcaagatcctagcacagcagggagtaatgtggcaatggccagggcaggcaacagcttaagaaaaggtacatggggaaggtctttgagagcagagagatcaggagagctgagaactaaataatgagagatgaaattggccagagagaatctggagcaagagtaatcgagaagtgaatcagcacgggtgaggcatgtgtggcaaagaccctactgagtgaggccagcaataaaattctgtggactgaagtgtggagaaggaaggtgtctgggttgtgacctgctgcctctgcctgtggtggccatgtctattgaaccctggagtcctggctgaacaggaaaactgagttctaaatatgatgagccagccatgctggatatgttcagattggtgtgtgtgtgtctgtgtgtctgtgtgcctgtgtgtgtgcctgtgtgtgtgtgcctgtgtgtgtgtgtctgtgtgtgtctgtgtgtgtgtgcctgtgtgtgtctgtgtgtgtgtgtatgtctgtctgtctttgtttgtactggatgagtaaaagctctgtgggcagcatggggcactctagaaaactcccctgcccccgtatacatcagttgacttcatcctgccctccaaacatttgcctcttatcagtcatgtgctagtgacatcaatatctatctgctgaatgttgaatctaagccaaactaacttacattatctttatatcacaaggtaactggtattaagcttgacccaactttaatactttttcaaatcatttttatttgcttattattttatttacttattattttgtatgtgtaaggtgcatatgctccaggatatttatatctgtctgtctgtctatctatctgtccatctatcatctatctgtctgactatctatctatctatctatctatctatctatctatctatctatctatctatgttggaaaggggaggacttgtgcacagcagtgcacatgtggaggtcagaaaacaacttgaggcagttaattctctttttctaccatctgtaatccagagaccaaactcagattgtcaagtttggtgagtgagtgtttgtttgtttgtttgtttttgtttttgttttgtttttgtaaagacagactctcactctgtagcccagactggcctgaaatttgtgattctctggtctcggcctctcaaatgctggagttatagatgtcgccacaggtacacattttcccatgggataaagattgtgtcgtgtttagagaagcagatgagtgctgtcagagctgagcaattgagtgcaataaaatcacctcacagccatatttccacgcggattgtagtatctcatggtgtgatactacagcacgtgggtcttgtagatctaactagagtgccatcccatagatatctctgttagtgggagtacacaagcaacctgtctggggaaagtggtgaggatttaaaacaaggcctgaacggtgctttccacaagggaaactcaatgagcagttctgcctctccatcaccttccttcctggggccctgcaggcactacagttgcttgtgtggggtgctgggtgcctagtggtgtgactcccccttggtggctccctcttactccttgctgattctccttgctggcctgggccttgttgtgcaggtgtctggttgagaagggggacgtggccttcatgaagcaccctacagttctacagaacactgatggtacgtaggcgcctgcaatgtgctttctgtccatgggaacactcgagtctcccttgcagagtggctccccaagaggcaactggggaagttgaatagctaagcccaggagactccagtgactaggatcgtagcactttaaattaatctagcattgaaacggtcttccagtctgttcagacttgatgctagttatcaccctggccttgaacctggctgacaaagcccacagaaaccatgggctgtgtgagtaggtctgactccctgattgacaggcattcctttggtattccagattaaagttcttgacagccatcccgtgttggaaaatgtcttgtctgtttctgtagcttgacttttttcactttctttaaaaaaattgtctacttatttatatatttatttgtatgtgagtggtcatgaggatttatgcacaccacatgtgtgcaagagcccaaagccagagggcattagaccaactgaccctgaagctgcctgaagttggctaggaactgaacttgggtccttggaagaacagtgaggtcttaacccctgagccagatcttttgaccccaggtggataatattaatgagtttttgagttttttatataacttttaaaaaaagatttatttacttattttatgtacatgagtgctctatctgcatgtacacttgaataccagaagaaggtatcaggtcatattatagatggttgtgggccaccatgtggttgctgggaactgaacttaggacctctgaaagatcagatagtgttcttaactgctgagccatctctccagcctcttcctttgtttgtttgttttttaattgttgttttttgttttttgggttgtttgtttgtttgtttgtttgagacagagtttctctatgtagccctggttgtcttgtaactcactttgtagactaggctggctttgaactctgagatctacctgcctttgcctcccaagtgctggaattaaaagcgtacccatcactgtctgacaacagtcttaaattttaaaacactccaatgtgttgaattttcccctttggttaacactcccaggactgttattttaaattcttattcagttctggagaatttaaccaagggtcttgctaggcaaatgctctacagtgagctgcagccctggcatttgatttgtttattgattaattgattttgaattttatagctatgagtcttttaccaggatgtatgtctgtataccacatgcatgcctgttgcctgtagaggccaaaagagagcatcagatcccctggggttggagttgcagacacttgtgagtcaccatgtgggtgctatgacacaagcccaggtcctctggtccttaacctctgagccatgtctctaaacaattatatctatattttaaacttacacgtatttacttaatgtctgtttgttatgaggtcagaggaaaacttacttgagtcagttctctccctctatctattatgtgggtcccaagggtccaactcaggtcctctggcttggcagcaactgccttctttctttctttctttctttctttctttctttctttctttctttctttctttctctctctctctctttctttctctctttctttctttctttctttctttctttctttctctctctctctctctctctctctctctctctctctctctctttctctctttccccactgagccacctcactggccccaacatcattctctccctaggaaagaaccctgagccttgggctaagggtctgaaacacgaagactttgagctgctctgccttgatggcaccaggaagcctgtgactgaggctcagagctgccacctggccagagtgccaaaccgtgctgtgttctccaggaaagataaggctgactttgttcgaagaatactcttcaaccaacaggtatgggcaccagtgcctaccccctgtgactcagtgcctggttcccaagagctgcactgatggccgtgtgcctgtgcacccagcttagctcatgctctttctccctcagcagggggccctggacctacgagtcctcactctggttatatctggtgcccacttgttctgcagctctctaggagtgtaagatttgcagccttgaggaaacacacaggatctcttgggcccggtcaatttccaagagaatgaatctcttctctcttcttctggtgcattaagtaaaggagttgttggttcagtggctgagccaagtgtaacaaaagcagaatggtgggttctctaactgacttgtgggttgatctgagtctgtcttcttaacctggataggctgggcaccatctgggcttgctgaaagttaaggagccaaacatctagacactttctgactgtattgaaagccaacagttgctgatgttatggagtatcagatgcctaacccaaatgatctgaaggaaaacctatagccttctctgcctactgcaatagatatcccgttcttggcggtttctcaaagaagaaatccatgttttatcatatatcaccttcacatccctgaaaaaaaaaaaaaaaaaaagatgacctagtgtcctggtgttccagttttcttctctttgttgtgctagggcaataaccaaaagaaacttgggcacagaaagggtttatctgacttacaagtttaatctatcattggggaagtcaggcaggaaactcaagacaggaacctgaaggcaggaactaaaacagaccatggaggagcaccacttactgttttgcttgataactcgcattgagctgcctttcttgtatagtctcagccaacctgctgagggatggtaccacccacgaagggctgggccctcctatatcaactattaagaaaatacccatagacatgcccacgggccaatctaagagactgtagctaactgagaatccctctttccaggtatgtaacattgacaatcaaaattaaccttcacacctaggaaaaccattgaaataagagagtcttgactgtggacatgtggcatagaggtgggggggagtctcacacaagataagctgccatgttggctactatggaaatcaactaaggaagagaagtaggatggagatatagaactggttggagttcagagacaagaagaggaagcagcaagggaagacatgggaagattttgcctgtagctttagaaaatcactactgcctttgcctaggacagaagctggctcagctccattgggggggggcgtgtcttgctatgaacccacttccaaaacccttgaatccgaagataaaagacacacacagacagctttgttaccttaactcgcctgctaggcacaattgctgggtgcaaatatctcctgcctggaaatacatgcccttaccaatttattatctccatatttccttctgccctaagcttagtggcttgttccaaatagcccctgccaaacatctttggccacctgcctgtaaccgaagccacaggccctagcttcccccaaggccttacatgtttgctgtgtccttcttcctccaaagcatggcagaaaaagcctctttccttcctttgcatctcccttttcctcctgggacccggaagtcccacctgtactgcctgcccagcaattagcccccggctttctttattgacacatcaagagccaattggggaaatagcgttagtgacagaacctccccctacaggaggatgatccatacagctgggaaagcacctggcactggctggctaactggtgacatatggccagctttctacttgtgtttcttatgaaagaaagatgaaatttcaagacctgtaagtcatataaagtactcagaaattgctggttgtttgtgagcctagaggctgcctggggctgagaaaaaagaaaaacaaacctgggtatgccccggagttaaaacattcctgggaacagcttaactttaaagataaagaggaatgtgaggacagaacagggctatctaaactgagtcaacaactcacagaactctgacaccctgcacgtacatgtaatttttctgctgatatttgaataagccaatagtgtgccactatgctgaattccatgcccctaggccccttaccccataaaaacccctaactttcgagcctcgtggccgacatccgttatctcctgtgtgggatgcatgtcggtccggagctccgtcattaaatgacctcatgtaattacatcaagatggtccttcgtgattttttgggtgcacgccgaatcgggaattgagtgggggtttcccccactaggttctatcacttacatacagcattgcacaatgtgacgttagtgtctccatttacaaatgagcaaacagaggtagactgagcgtggtgaaggattttcctaagttcacatagcaagaaaaagatgaagccaggattcaaacccacagaccatgctttctgttactacagcattccctgaactgttgttgtgtccagggattccccaaggactggagctgagcagtccagaaacctttggttttctagaaagagtagacacctctatgcttcctggcacccctagtgactttctgtttattccaatccaggagctctttggaagaaatggatttgaatatatgatgttccagatgtttgaatcctcagctaaggacctgcttttcagtgatgacacagaatgtttatctaaccttcagaacaaaacaacatataaaacatacctaggaccacagtatcttaccttgatggataactttagacagtgcttgtcctctggtaagtagaaacaaccaaggagaaatagcaggagattcgaaatcagcatgtttatgttaagagctcggttgtttcaagtattcagttgatacaaaggcatggagaagcagaaactttctctttgacttgaaggtttagagttaccattgagccaattcaattagaaaataatgaaagacaccatccatgtaatgctaaattgtctgaaggagacaagaagtgtagcagaacttgaaaccatttgggaaatgaagctcttctcatgtgtattcccatttttgttggggcttgggaaatgatacaagctgtatgtcttagggtttactgttgtgaacagacaccgaccaaggcaactcttataaggacaacatttaattggggctgacttacaggttcagaggtttagtccattatcttcaaagtggaacatggcagcatccaggcaggcatggtacaggaggagctgagagttctacatctttatctgaagtccactaggagaagactgacttccaggcagctaggatgagagtctcaaagcccacacccacagtgacacaccttctccaacaaggtcacaccttgtgatagtgagccaagtatattaaaaccaccacactgtgcataccacccgtgaagggctggtttttgatggttttatataaaatgctcaaacattaataaaagtaaatacagcatggctagctctgtaggaatcttgggatacatattttagatggcatagatgtctcaaaaaaatagaaattgggaaaataaaattaaaactgagataaccattgggcatatgcccgactctgtggcattgtgttgtgtgttagggataatgtaagcaggaaggaaggacaggtacttaaggataggaaggaaggacagcacagggatttaaggacatgaaggaaggacagatacttaaggatatacatggtaggacagagatggccagtgagggtcttaactcatctcaactgtggcttacttttagaagacaggagtgtttccaatacactttcaagaatttcacttttaagagcatgagaaatcagagcagacgagtttggcaagtgcaggcagagcctgatgttcttccccttgtgttttaatttacagaactgctggatgcctgcacatttcataaatattaaacaccattcagctggggggggcggtaacccaggggctggggacccaactgcttgcctccatgtggacttgtgcagaatgaataaaagtatcttcccag

SEQ ID NO: 11 - DNA, 45102 bp, Mus musculus
cgcgccccccgacttggtgcccgtgggccctcgggctccacctaggtgagcgagcttcggctcctcccggccggcgtggccgcccggcgcctcttgcggccttcgcgcctctcctaaccggcgggtgggcctcaggtccctggggagccgcggcctggacgctcctttccctgggagctgggccgagcgtgcacgaccttgcacggtggctgcttgcgttcagagttcgttaacttaggagcaaatcttgcgggctgtgggtacccgtagccgcagcggcgccctgcgtcgtcttaagccccatgcaagtgaacagtgagtgactgaggaccaaaccaagggtctcaggggattcaatcaggaacgttcattttgttctcacgtttgcaaggatccgtgtccttttttttcttcttcgactttgcccaccttctggggccctttgtaaacatcttgaatgaattgatgaaccaagccagatagctatgtcttaggcactcttgtctgcataagaaaatagttgatttgcaggccgggcggtagtggcacactcccttttttgccagcttgagtgaggcagaggccgagcatctcttgagtgccaggcagacctagtctacagagcgaattccaggactgccagggcttgtctcaaaactaaaaaaaaaaaaaaaaaaaaccaaaaaccctacaaaaatagttgacttgtacatttaattccctgattgactgactgacttttgttcttcttgactgccttattctcacagttcagctatgtccagaaatgaccaagagccgtttcttgtgaagtttttaaagtcttcggacaattcagaatgcttttttaaagctcttgaggtaagaattaatggatatgtcttatttgatacttgagctcattttcatgttttaaatgtttttgctttgttggattttatgtcttagaagtagataattttaatgaaattttgctatagcatatgcttaatacagataaatcactgctatataatttttagttgatgcaagtttaccattatattttttgggaggattgaaatctattgtgacaattggatgttaacctacagtttgatcccctacccccgcccggtctgtgtctgtttgtgtgtgtgtctgagccatcttcccagtcctctgacttagagttcctgacttgttttgtttactaaccccattgatcctttaagcactgaaaaacggagtcacaatgcaatagttttggttcattgcttgctctctctctttctctctgtctctctctctctgtctctcatacacacacacacacacacacacacacacacacacacacacacacatattcatgaatgaatgaatgatgggagtagttttgagctttgccattcacaaaccctagtaatgtccttgtagcttgggaatctattagaaatgcagagccttgggatcccaacccacatttgacaattagaatatgcattttaaacaaaagtcccagtgcatattcaggtttgagaagttagctgttttttttttgtttgtttgtttgttttgttttttaaagttcactcacttagcaatcatcaattgagtgtccgtcatctgacaggttttcctctagcataatacttggggtacaccaatgatcagaacaagcaaatatctctcctctttcagcatacatagaacaggaaatcggtattaatcaggtgataagcaagaaactacacagtatgggggcagtgaaagagttgagactgagtctcacagtgtagcccagactgatctggaactctgtgcttctgcctcagtttcctgcatgctgagattacaggtgtgtgccccaaaacctagtacctatgtaatgtgttataaggggtctagtactgtgggaaaatgaaaaagaaaaagccaaaacaatttaaggttttccagaggatgtttgttggaggagaaagacatggaagggttacagcttaaaactgaatttaaaaaaaagcaaactatttctcttaagattatagactagggtcttgtataaggtactaggtatccggatatgcttataaacaaaatacatcatggaatgttcatttgtgttggtgtgtggggatggtgtttatgtgggtgctcttgtgcacatgcattcggaatagtatctgcataccacagtacatgtgtagatgtcagaggacaacttgaagcagttggttctccttttaccctgaggttctcaggctgaatggcaggcacttttacctgatgagccatttaacagaaccaacacattccttctcacagggaagaaataaaactatgtacatttacaaaaagaaccatttttttttccttcataaaatgtagtcaagtggtagagggagtgtagttagaaagcaggatgaccatgggaatattgcttagtggtagttgtatagtgtgcataaaaacctggttttagttcccggtgctgcaaagcaaacccaccgtggtatctagaaagatctagacaggtatctctaggaagtgacagtgaagcaggcgttattgcagtgaagaaccacttccaatgaaagcttaagaaaagagtagctcctgtagtaggaccagaagcagaaccgcttagtaggtcattagtatcttccaggtgtacggtttggggatgactggaattagccaggaaggtggatgtaaagatgagacttgagataagtgagggctaaattttatgattttgtagtcatgaagttgtatggtgctgatgcatctttaatcccagctcttgggaggcagagagatctctatgaaatggaggccagcctggactacggagttaagttccaggacaaccaaggctacacaaagaaaccctgaatggggggcggggggggggggggaagaattgggactgatccatgtgccctttctttttgtccagtggttcatttctgctatattcctcagtttctctccatcttatttttttgagataaatttctcactgttgtagagcccactgatttgctagactggttggccagggatctggtgggctccagtctctggcacccaccccactgcccagtattgggattgtgagtccatgcctccacactaggctttttacatggggccaaactcagatgcccaagcttacactgcaggcattttacccactgaaccctctgctcagctcctgggtggtttctttaaaaggattactaactgtgaagaatagagaggagaccagttcagaggcttctgcatgggtctaggtgagaagcatgcatgggtctaggtgagaagctttatttaataaggaaagggctgggtttgaaattagctctgagcacttagtaggacttaaatttagggtactaatttctactacaatcttacttgttttttctttcagtcaataaaggaattacaatcagaagattatcttcagattattacagatgaggaagcattgaagataagagagaatgacaaatcgctttatatctgtgaccgtttcagtggcactgtttttgatcaccttaaacaggtttgctgtttctagaatacttatttgctctttcaccctctcttttaatctgtgtgtacctgtgcttgtgtgtgatgtgtctgtctgtctgtgtgtgtgtacatgcatgcgtgtgtagggtctcattcttcatgaaaactatcatgagtgctacgagtaccttgggattctttgggcttggggttcttagatatctgagctgctttattggctgttgcttttttgaaaagcatacttgaatgtttctcagttgttatagcataagattattgcattaagattgtatttcttgggaaaggtgccctagtggttcagggcacgtacttcaagggatctgaatttgattcacagcacccatgtcaggtggctcatgactgcttataatgccggttccagtacctccaactccaggtttatctgtacaaaatgtgtgtatacctacataaggatacatacatacatacatacatacatcatataatttaaaataataaaaagttttatgttgtaagagtttttacctgcatgcatgttggtgcaccatgtgcacacttgatacgcttgggggtcagaagagggcattggatcccttagaattgaagttacaggttgtaagctactgactaaggtactgggaaccaaacctaggtcctttgtaagaacaataagtgctcttaactttttaaaattaataatgataataataagacaaggaggaaagtttgttttaagtggttgaagttttggaggcagttatgagcgctcttgtggttttgctttggagggtgcgtgtctatttagtgcttgcttgagaaattatgtgatagtctttttctcctaacatttcatggttttctgcagtagctgttagcttctgtgagtaactaataaaatgtcccaagtttaattttgtgattttgtcccaaactttttacagcttggctgcaggattgttggtcctcaagtggtcacattttgtatgcgccaccagcaatgtgtcccaagagctgagcatccagtctacaacatgataatgtctgacgtaactgtatcctgtacaagcctggataaagacaaacgggtaagcactgaaagcagccgggctgcccccacctgacttacccagggctcaacagcagcaggcctcacacgtggggttcacagctacaggcctcacacgtggggttcacagccagcagacttgtgcatggctcccagtggtatttttttctaaagattattatataattccatcatttcctcatcccttttcctccctccaaatcctctcatacaccattccttgctttttttttcaagttttcaaatttataatctttttttcattgttatatgcataaatatatacataatcttagataaatacaacccgcttagtctgcataatgttacttatatgtattggtgtgctcttccctggggaaagtggaatatgattgtagagacactggttaagtgctttgttttgatttaaaagaaaagttacttttttttctacagtcagtgagttttgttttaaatcatttaatttttgcagaacagaaaatctttcaagaaaggattctaatctgggtgttgtagtgcatgcctttaatccccaactcttggaaggtagagaaaggcagattagtgaattccagatcaaatagggctacatattaataagacctgtctcaaaaaaaaaaaaggaaaggaaaggaaagaaaaaagaaaagtggctggcacctttaatcccagcactggagagacagaggcaagtgtgtctaagttcaaggtcagcatggtctaaggccaggatagctaaggctacacagagatgccctgtctcggggaaaaaagaaataatcagaagcaacatagttttgaattatggaatttaaaagaataaataaggtcacttattaatgataataattctacctgaaagtgtttctgtaggtgactgagggtgcttaaacttaagaaggctatgatgtcattagcaatattaatctgcaagaccacattgttataaatgtggttgattagaaagtattgttaaaaagtatgtgactgttcaagaaaacagttcttttcaggttttttgtttttttgtttttaggggaaggctgtggattgagcccagagccttgtgcatggtaggcaagcattctactactgagctacatcaccagcctacaaatagcgatttttaaatttaaaattgatacacatctttccaaaaataattacttattttttttagtagcaaaaaacatttgtatgtttagtctatcaacagtaaatgatacttatgggggctggagagatggctcagcgggtaagagcacttattgctcttagagaggacctgggtttggttcccagtacctgctagatagctcacaaccatttaaaccttcagtttcagggggtctatctgatgccctcttgtgatctccaaggcatgcaaataatgtatagacatatactcaggcgaaagaaacactcatacacataaatttttttaaaaaaattacgtgatttttttttttttaaaatagaagaattgttgttttctccagcattaacatattttcttttgggtctataggaagaagttcataaatacgtacaaatgatgggtggacgagtatacagagaccttaatgtatcagtcactcaccttattgcaggagaagttgggagcaaaaagtacttagttgctgctaatctgaagaagcctattttgctaccttcttggataaaaaccctttgggagaagtcacaagaaaagtgaggcacattcatatgctttgtctgtttgaaaaaatgatgcatttggatagttttgacggtgtttggttttcatggggaagctttatggtatctctggacttgttactgagaaacaaaacagggtctttgttcatttctccagtgacagtaggggagatggtccatagattcagcagtgcctagagggcaaatgctttgataatgaagttcttttctgcatcaaatacatctaaaataattcagtttggcttttgtgttgcactgtgtaatactgttccccagtattaagatggagaataaagtacctacttgggcagctctgttccctgctgggtagggtggaggtgcagagaggggtagaggtaagattaatatacatatatgtaagccatctgctgagaggtgatcattccgtgtacatcgagcctattttctgcactgggctggacattagatgtatgtagagatcagaacaggataacagtttaccttatggagtttggaggtacacttctgttttccctaaacttgggtttatagtaataaatccgggtatctgaattatatctgcattctgtggcatttttctgcacttatttcaacattattcagcatgtactcagtacatttcctagttagtaccagcctggtgaagtttagcacacctacttattgtggcaacaaaatggcagtactattgttggaactctgccgaaaagcattccttttacttatcaagagtaatggaagaatgtgtctgttttataccagacaacctgtgtaaacgttaggtttttaagtacagatccagtcttataattctgccaaatgctccccatttattagcaaggacttaggagttaatagtgctttctttaagatagtcttgggactgttgctgaaatacaagtttttattagagacttgggactgagctagatgagcagttagtgtaatcctcaatgtcagttttcctttctgaaaaatgtttatagatcctaaagaatagcaactgagcagacagggagagcagtaggagctagcacggtctgagtactcgggctcagttgtctcctcttcttactttctccagaaaaataaccaagtacactgatgtaaacatggaagactttaagtgtcctatttttcttggttgcattatctgtgtgactggcttaaatggaatacacagaaagacagtccagcaactcacggctaagcacggaggccagtacatgggacagttgaagatgaatgagtgtacacacctcattgtgcaagaaccaaaaggtaaacaatgccttagatgtggttgagcgtgcaagtcctgtttaagcactaattctctgtagaccaccttgtgttctgatgtgtcattgccttagtttatctgggtttttttttgccttttaaattcttgagaagatagtttgggtcacagtctagaaaaattaaggaactgtccttgttattgtccagaatatggaataaacataaaatatcaaaagttgcccatgatgtttcactacctgacttagaccttgatgaaaaaaaaacaaaactcttcacagcataacaaatatgtatagctgagtggtattctttctcatgactaacttcagaagcttagttaagcacttagtgggatgaattggtttatattactgcatttggattggggtgcgggtgggtggtatgggtagagttcccgagtgctgggcaagtgctctaccacattttccaactagtctatgaactagaatttctttctttctttctttctttctttctttctttctttctctttttcttctttttctgagacagggtttctctgtgtagccctggctgtcctgtaactcactctgtaaagttttactattgagaaactttaaaattattactgtttttgatatttcgggaattttattctagggaatagttttgctaatactcctaaaatcagggttagggtttatacaaatatataagaagagtcttgctgtatttttagtaactcctttgtgtttgtactgttttactaagctaccttgataagaagcatttgagagtgattgttagttacttgataattgtcacttgatcaggagattggtgtaatggttatgataggacagttactgtggcttttctcaatctaaaggcagtctgtttatctattaactatgttttaaggtatgcgggattgagcctaggtcttgcttatgctaggcaagtgctttcccactgagcaatgaccctagtcctgctttctgttggagacaggctctcgtcaagtttgccatgctgctgtgagatgtatgattttcctgtcttacagaatatagactctaccaggccctgctcccttgactttatggagtaccaaaagttctccatagagcggggtgtcaaaggaggaggaggaggcaggaaatcagggctacacatctttgtctagtcaaagatagtatttattacgttgcatacatttatggtatctgcagttgtattatatgttcttattaaacaacattaatagccgggcagtggtggcgcacgcctttaatcccagcacttgggaggcagaggcaggcggatttctgagttcgaggtcagcctggtctacaaagtgagttccaggacagccagggctatacagagaaaccctttctcaaaaaaccaaaaaacagaaacaaaccaaaaaaacaacattaataatgtcaagcatgatggtgtcttcagtcccagtgcttgggaggcataggcaggcagatctgtgtgagtataagtccaacctagtctatccaggctaactaagcctacaaatgagaccctattccaaagctggttggctggaaacttgactcagtggttaagagcactggctactctttcagaggaccctagcttgattcccagcacttatatggcagctcacaactctctgtagttccagttccagggtgtccaacaccctcttctaacctccttaagcatcagacatgcaagtagtacacagacatacatgcagacaaaacacccagacacattaaataagaaataaaaaattcgctgggcgtggtggcacacgcctttaatcccagcactcgggaggcagaggcaggtggatttctgagttcgaggccagcctggtctacagagtgagttccaggacagccagggctacacagagaaaccctgtctcgaaaaaaaaaaaaaaaaaagaaagaaagaaaaaattcttaaaggtaaatatatttactggtaagctttaatcattacttttgtttggagtgacttttaaaaaaataatttactatgaactaactatatagtctatgtatttctgtatttctttcgtaatgaacacaggacaaaaatacgaatgtgccaggagatggaatgtgcactgtgtgaccctgcaatggtttcatgacagtattgagaaaggcttttgtcaggatgaatctatatacaaggctgaaaccagagtagaagcaaagatggtgcctgatacttcaacacccactgctcagagcaatgctgaaagtaagtctctttgagattaaaataaacaattacttgttcacatgataattgattgactggggatgtagcttagtgggaaagcttttgtcttgcaagcccaggaactcagtcttaaacaccaaggaaaaagtgaaggagttgatttgttaacaggaccataggaatatagtagggactttattttctccctttgcccctgggtagaattaaataaaatagccatgcgtagacagctttccagaacttcttttgtatgccttttggaatgagagattgctttctttcacatcctaattcacacaagaggggattaagaacactagtgtatgggcttaagggaagagttgttcgcccctctccacatttgtttgcttggttaattggtttttcaagacagggtttctttgtatagctctagctgtcctgaaactccctctgtagattgctgagcccggcatggccctggtggggacagttcttgcccctgggacaagacccggtgtgggcctcctcaagtgttgatggctggtgggtagaagacttgttgtgtagtaatgtacgtattttctggaccagcagtgggcgagtctttccttctgaagaatgtcctccctgttaactttaatgattccatgataattagaaatagagtccaggagagtgtggctgtgtctcggaccttcaggacagcccttaaggatatgggaaagaactctaaatacgtgagttcaaaaatgtaaggatgcaatatgaattatgaggggcttcacgaatctaaaggaacagagatagctacactatgagcctgcttgtcagaaagatacaaaggcaggcggatacaaatgtcccaggcagattcctgggacacagcaagattaggtccaagtgtggttgaaatgataatttccagttctacctagctagtttagcatctgtgtgtaagaaactagcagatctctgaattcttttgcaatgttaaaagaaaatgtgtttgttgtctcctaagaaacaaaaaagtcactgatgctgattcataggataattaaaaaaaggaacctggaataaataactgaattgttatgtaaataaaaaactgggcttttggtctacctgatgtgaactagcagaaagcagtagcagatcctttttagaattttctctagtgagagctctggagaacaaaaacatctctgcaagaatttttcttaattttccaacttggtaggaagataaaataatttttttatagcagtttttctgactatggtcagaaaacccatgagctatccagatagcttttagaatttttcctagcagagagaactgtctcaaccagagtttttagaatagtgagaaaaggctgtccagagcagagcagagcacatacacactcatacacacacacacacacacacacacacacacacacacacacacacacacacacactaactctcacacactcacacactcagactgagagatcgagcagtctggaaagccatctcagcaaaacctaggctgccagcttggacccacaattagacttcgagttgttcttttcgctgctctcagacactacttctctcagaacccctctctgccaaggctagtccctggcagtagatcattgagctggcctcagattgagattgcgtccactttctgagcactgggattaaaggcgtgtccaccatgcccagcctatattttctgtattggtttactgtaatgattataaatcattacataaaaattcggcctgcatgaagtcctgagtttgattaccttttgattactactactgcattataaagctggatgtggtggcacatacctataataccagcacttgagagttggagatggagggatcagaagtttaaagtcttctttggctacaaagagttcaaagccaacctggatttggtgagactctgcctcagaaaacaaaacaaaaggccagggacagtggtatataacctcagtgccagcactgcgggctgaggcaagttcgatgtggtcctgatctgggtagtgcagtccttttcagccttcctaatgctgtgaccctttattacagttcctcgaattatggtgaccccgaccataaaataattttgttgctactctataactgtaattttgctactgttatgaattgtaatataaatatctgttttctggaggtcttaggtgacatctgtgaaagagttgtttgacccccaaagggcctcaacccacagattgagaaccacatgcccctacatccacatgccactctgatgtgtcagctaggctagcatattcagtcaatactgaggtcttatttcggaagttccatttagcaaagtcttcctccttggaccttaaagccagccttatgggctataagccactttaaggaaatattaaatataatttcacctaaagaatgaaactttatagccgggcatggtggcgcgcgcctttaatcccagcactcgggaggcagaggcagacagatttctgagttcgaggccagcctggtctacagagtgagttccaggacagctagggctacagagaaaacctgtctcaaaaaaccaaaaaaaaaaaaaaaaaaaaaaggatgaaacttttattttttttttcagtaaaaatctctgaatttttgtaggtttatgccttaagccctttctaggaaaagttagtttattaggaagcaggtaatggctcttttacctcaggaattttcatttcctttcacattttaggtcacacgctcgcagatgtcagccatatatccaacataaatggcagctgtgtaaatgaaacaatgtttggttcaactactagcaaacttgaatgttcccttgaaaacctagaaaatctggacatcagtatgtttcaagctcctgaagacttattagatggctgtcgggtatgtctttattatgtaacaaagtcagaaggacaaataagagacctgagtttagggctagcttgggctacacaggtccagacatccatacaccctcagcctgactccaaagacccctcacagatggacttgctccttatgtgcgtaagcaaaccttgcactaaattaggaagctgacacttggcacacacacgctgtgcctgtgggtctgtctgggctgtagcttcatcccttctattgctgagttcttaagtctgctctgaaaccttaccgcctactttacagatgttcatccttatcatttgtttacaatacattaatgacggtgatcatttcatgttacattatgttatttaaaatataacttaatccccatgagtaaagtggttattatcttgaagctaatacttagatgattaaaatccatttttagggcacttaggctaacgtgcttgttgctaagcctgacagcctgtgctcagtccctagcaccccatgtggtcgaaggaatgaacgtaatcctgtcctgtgacatgtacttgcgccacgcccacacgtgtatatgtacaagacttaaatacaataatgtgctttctcagagtcctagacagataatactgtggtcttaaagtctgccttcttaattgtgtacaagaccttgggttcagtgctcagaaataaaaagagaaaaagattagatttgtaagattattttcagtgtgtgcatggaagctccgtgatggaagtgtcgcgtatttagacccacacaccccacacagtgctaggaggggagtgagaagctacacatttttcctcagagtaggcagttaggtttattgttaaggccacatatctgtgatcgctcctaagatttatcaacttactggtgggatagaacgacactttgtgtaatcttttttctttgatcttgggacagactagttctagatgtaactttgaatttttttttttctatgtaggaagtatttgattcctaatttttgctaggatgtattctagtaatggtgatagtttgggacatgtggaaatagattgtcctttttgaaattttttaaagacttgaaatttttaaaagacttgaaaagtaatgtcggctatccctcacatctacaacccctgtacacatgtttcttcaaagcattgggctcagctcctggatttgttgttttggttaattcaagtcgaaaagaaatttcaggaaagataactatgtaggaaggagttggctccgagccttgaggagtttgctcagttcatatggttggtcagtaccaactgaaaacatgcaagcctgggtgctcctgagtttacagtgaactgcagtgtttctctgtaattattcatctacaggcagtcactcctttacaatttaaggagctatttgtatgttagaaatagctctgccacccaccaaacctgatgacctgagttccattcctgggaccataaggtaggagagaactgagtccctcatgttttcctctggcctccatatatgtattctgacacctgtgcatgtgcacacatatgtacacacacacacacatatacacacagtgaaaatcttatagcaagctgtgcaccatcatttagaagatgttgcagtttgtcctgtaattcatctgcggcctcaaccctccttcaggtttttactgagagatgacagtgctgtggttaaaataccagttttaggctgaggagatgggtgagtggggcaggcacttgctgtgaaaacatgggggctgaaatttgattcccagcacctatgtaaaagctgtgagtgatggtgtccagcagtggggggtggaggggagctagctgctagtgtgtgtgcacacattagatgtagactatagttgactccatgtgtatcccaaaatgtacatgaagtatcttgtttacacacagtggatacagttttcctttaaatttgtttctgttgaggaaaaaaataacttgagtatgttaatccaaagcaaatgttttctttgcagatatatctttgtggttttagtggcagaaagctggataagctgagaaggcttattaacagtggaggtggagttcgatttaatcaactaaatgaagatgtaactcatgtaattgtgggagattatgatgacgacgtgaggcagttctggagcaaatcatctcacaggtcctgtcagtcttcagctcagagcacttggtacagggatggtttgggttagctttgcatgtctgtgcgtggagctgtgggaatgatggccagtggagtgacgatcttctactcgggagcctaactctgctctttttataggcctcacgtagtgggagcaaagtggttgctggagtgttttactaaaggatatatacttcctgaagagtcctatatccacactaactaccagccagctggaattgcagtttccgatcagcctggaaaccagacagctgtcttagacaagagcggctcattctccaagagcgcccttgttcctgctgagaggcttcagcaggccgacgaggatctgcttgctcagtatggaaatgacgactccacgatgggtgaggaagagttgattagcttttgtagttaagaagcaatagataatgcatgatagctgccatatttttatgaacattttattttcaaaaacttttagatttgtaactttgtaaccaggcaaggccatcaggctccaaatgattgaatcatgctctcagtagctctatgttgagtatgaactgtttttgtttggggtgtgtgtttgtgtgtgtgttggtgccagaggtcagaggtgagaccctcatggagctagagttacaggcatttgtgtctaatgtgggtgctaggaatagaactcgcgtactttgtaagaactgtgcatccttttaacctctgagctatctctctggcacctctgtgtgaattgtaatggtagaaaacaaaggccctctgactgggctgtcggaagtctttcctgcatgcaatactgttcctggtactgctgtctcagcgtatagtttcatcggtgtagtaaggtaaattaccaacaaagagttagaactaacctttttagagtgtattatttgatacatcaaaagatagggttttgtggtgactgtcacgtactgtttgtttatgaaaatagagcatacccctgtgccaagagcattcctgtgaagtcctcctgtttttcgctttctagtttgtgtcctgtgtaggtttatagatgagcctttggccttcgtggctaggttgtttagttgtttacattgcttattgcaatgctgaggctgactcaggcgtaggctctatcactgagctgttactctttttatttttaattttaaggcttagtctgctcttggacttcctccgtgaggcaggtagattttgaacttggagtctttctgcctcagctttctgagtagttggtttttcaggcctcttctactagggctggcttcaatttacataaagtatatgtactttgtagttgtaaagacatagttttcagttcttttttttttaagattttatttcttttaaaaaaagattttatttattttacgtatatgagtactataactgtacagatggttgtgagccttcatgtggttataggaattgaatttaggacttatgttcgctcagttcaaccctgcttgctctggcccaaagatttattattatatctaagtacactgtagctgacagctgacttcagatgcaccagaagagggcatcagatctcattacggatggttgtgagccaccatatggttgctgggatttgaactcaggatttttggaagagcagttagtagtgctcttacatactgagccatctcatcagtccccagttttcagttctttttgtatgtgtgtggtttttgttttttgtttttttttgttgttgttgtttttcgagacagggtttctctgtgtaaccctggctatcctagaactcactttgtagaccaggctggccttgaactcagaaatccatttacctctgcctcccaagtgctgggattaaaggtgtgtgccaccactgcccagccagttttcagttcttattgaattttaattgtttaattgtggaaaacaaatttttttattatttttctaaatctattcagtggtacacatttgagtttcagcacttgcgaagcagaaagaggcagaaggagcttgaggccatcctgggctacataacaagctgcagaccagccaggactagagagaccgtgtctcaaaaacaaaacaaagaaacaaaacaaagcatgtttactagacggtgatttttcaggaaatttggttttctactctggtttcatacttagaatagacatgacagttgttctctgattgacgatggtgatacttagcatttgggataaacctgaagatggaatgaatacagagtctcctttcactgtatatttaaacctaagttttataagtattaaaattatcagactcttacattcatgtctttgctagaaaatcactgtgtagctttggttgatttggatattgctgtgtaaaccaatttggccttgaactgacagagatccacctgcttctgtttcccaagtattgggattaaacctgtgcatcaccacaccctgtgcaaataaactcttttttttctttctattattcactgtacatcccaatatccatccctttcctcccagtcccctccatagcccctattccccgtcccccattccccctctcctgtgagatgggggacccccaccctccaatcatcaatcaccccatcatggcacatcaactctctgctgcacttggtgcgtcttctcccactgaggccagacaaggcaacccagctagggggatgggatccacagacaagcaacagattcaggacatccctgactccagttgttaggggacctgcatgaagatcaaatagcacatctactacatatgtttggggaagcctgggtctagcccatgttggtggatttttggctggtgggaaataaactttgttttgttttttctcaagacagggggaaataaactcttaagtctagtaattgtcaaatagaaaacttgcctttttcttttccagttgaagctaagctatctgaagctttagagcctgaagtcgggccttgccctggttctgctcaccgtgagccctgtgatgattccactcacatttctgtgcaagaggaaaacaagtcgtctgtcagtcattgcatccttgatgactctacagttcgtgaagaaggcttatttagccagaagagtttccttgttttgggttttagtgttgaaaataaatgtaatattgtagacatcataagagagcatgctggcaagattgtgtcccttcccagcagaattgttgctgactatgctgtggttccactgctgggatgtgaggtagacgtgacggtgggagaagttgttacaaacacgtggctggtaagaagctgtggcagtcggaaccctgttttgaaggagtattggctgccagagtctttatgtttacttttgagcctgttctgtttatctaaattggcatttggtttgggcaacggcaattttaaaacattagcctgggagagcagcaggatggcccagtgggtagaggcccgagctgtgggagcctgagcacccgagcctgagccctagaccctggtgggagagagaactcccacgagtcctctgacctccgtgctgcagacactttctctccctccttttccttttgctgtgccccctcaaatgcaccggctatacttctggcctcaaactcagaaatctgcctgcctctgcctgagtgctggggattaaaggcgtacaccaccacgcccagcccaaacctgtatttcttgatcctaatactaacatcaagaagttgctatcacagggctaaggcaccagtattctttaaagtaacttgcaattgctgtattaatccatcttactgattttgatatgcaaatgtgaaggattggtatctgtatttttcttcaaatatcatttggaatatgtcaagaatgagcatactcaagtctatgtaaaattcctttttccttaaactaaaattgctactattataacttgagcttctcttaaccacttgtttctgatagtagctttattgcttttgttttcaaaggttacgtgtatagacaaccagacattagttgatcccaagtcgaatcccctcttcacaccagtctcagtaatgtcgggagtgactcctttagaggactgtgtgatttccttcagtcagtgtgtgggagcagaaagagattccttggtattcttagcaaatcaccttggagcaaggtatgtaatattttcagtatatctcctgcctgtgagtgagtgtgcatgcacacacacacacacacacacacacacacacacacacacacacacacacacacacacacacacacacagtgttaggcaataagcggagggccttgtacatgctaagcaagggctcaactatggcaaccctaactgcatcaagttttgtttgttttggcttactggaaagtgtataattacatttgcctaggattttgtttgtatatgtggttgatgggtaaatactggggcatacacagctaggtggatatctggcaaacttgcaaggctgtgggcaggcattgtttttttttttttcccccattggcttagtcaccatgaaaggctgttactaaattgtgcttctctaagcactgtatgtgcccttcagtgcctcctcctcttccttctcttccccccttcttccccccacctcctttctctttcttattttaagtgtatatctattgcttgtttttatcgagaaatacaaatggagcactttttttttttttttttttttttttggtttttcgagacagggtttctctgtgtagccctggctgtcctggaactcactttgtagaccaggctggcctcaaactcagaaatccgtctgcctctgcctcccgagtgctgggattaaaggcatgcaccaccacacccggggcaaatggagcactttgcaaggaatgcaaggaacactttggaaataaaggaattaaaagtttcctataaaatcctcattggtcattacgtagtagcatttgaaaaagagtagaaatcagctgtatcaatgcatttccattaaccaacctcatatttaatggggatatttttaggttaagagcataatgagcataatgcttttaagcaacactctgaacattctgaggggtagagtcacagcagggcttctctgtgtaaccctctctccgtagaccagtttggccttgatccaactcaggtcggccgctcttgcctctagagtcctgggattaaaggcgtgcactgccaccacccagagtatgtttctctgacattaaccatgctattatttttttaaaatgagctaattgtgtgttcatttgctttatttccatgtaaaattttagtgttcaagaattctttgttcgcaaagccaatgcaaagaaaggcatgctcgccagcacacatcttatagtgaaggaaccgactggttccaaatacgaagctgcaaagaaatggagtttgccggcagttaacatttcatggctcttagaaactgcgagaatcgggaagagagcagatgaaaaccattttctggttgacaacgcacctaaacaaggttagaagtccttgttttttttttatgtattttacaacttgatggtttctgaaatagggatgttccagtacttgctttaaaacatttgtatgaccctaacctcagtcagtggtgcttacttcagaacccctgagtgaaacacggaaagcagatcaatgaagaagcgcatcagggtcaaccctcgattagtcctcaaggcgagtgacgagaaggtgacccccgaatggctgttagaagcagtttttatactttttagtggcacaggttacatcagcaaggtaacagttcatacttattgcctaagcatattgaccttaaaatctattggctagcaagcatgacacacatttgaactctacctaggactttccagggggtccgatgactatgagtcagtacgttctgctgtttttctgagaatttttttactccaggatgttcctgtgggtgaatggaacttggcctagctttgaccccaggtgagagggggaagctgtaaggagggtgtgagactggaaaagcccttagggtccctcacaatcttttatttctgctattgtttatggtaggtcctgtgagtcttggttgtttgtcagtggtgccatctctcagcttagtgtgtactgtaccaattgttgtcagtacggcctgaaaggaaagtgcacacacagtctagttcagtgctgtgcaaggcgtgagcctctatcccagttagtgttaattccttttatggcttgcgctagcatgctgggtagctaatgtgctcttgctgcttatctgggtttttcgtatgttcccacaagataacttacgacttggctactgtcctagttacttttctattgctgtgataaggaaccatggccaaaagcagctcgggaagggaagcatttattccagcttacagtctgtagtctgtcactcaggtaagcctggaaactgatgcggaggccatggacgagtgccgctcactggcttattccttatggcttgctcagcttgttttcctttaccatccagggaccaactgcccaataacgtactgcccatagtgaactgggcctcccaaatcaatcatcaatcaaggaaacatgcacaggccaatctggtgggcgtactctcagttaaggctcccttttcccgagcctgtggctggttgtcgtaaaaccagccagcacagctattttcctttgtcttgagtttgaatgcccctttctctgggatagatggcttctttgacttaacagttatggccttgtctcttcacttttctcctttttgtaggattcttgttgcttagagaggctggtttgctttcttgtctcagtcaaactataaactataaaggcaggaactgtggaagtcctgtggattctttacttttattgtttggcaatgggcgtgctgtgaagtagtcaaaaacgttttgtttaatgttggataacagtggagaaggcagagatgggaggatgtgaacagcctctgaaaggcagtgttgctgggcagactgcagagcccagtcagcatcctgggagcacctgagagctgttagctgctaccaaggcggcctagacatgttccgttgccacagcagactagctcactagactttccaaaatttttgactacacttaattctaaagacatctttcgggaattttcttcttactgttttgactaggttaatacactgttttgttttgtgaatggatttataattatttgtttcacttaatgtgtgtgtctgattcaatatatacattcatgtacacatacattcatgcacacatatgtacacatatgtgtatgtgtgagtatatttgtgtatgtgatgtatgagtgtgcatgtctgaccacaggtcaacatggtgtgttttctctgtcatgctccatcttgtttttagagtcagggtctctcactaaacctggagctcactgattaggtgagctccaggaatctgcctgcctacaccactgcacccagctctccttggatgctggagacctgaattcaggtcttcattcttgcatagtaagcactttactcactgggccatttctccattcatcactgtatattttaatatatcttctggagtcaggggcacatctctgaagccacacttgaagaacactagtgaggatgaagcaggggggtcacatacatgtgtgtccagcctatgttctatggaatgcattcatacaaagatggctttgactgtagcccaacacaaaatcataaaatacctgggttgttttttgttgttaaaccctgattgtgatcttctctttgtagatgacagtgttctgttgcagtgtcagtcaacaggttccacgcatctgcaaggctttatgagacctgtctcaaaacaagtttatctggtttgttttttggaaagtaggaatataactttatggtttaaagtgtactgagacaatatgtaaaatctaacaaaatactaaaatgtcactttgcctcatatgagagaaaaggctcatattaatggctcatttgttttttgttttgttgtttttttcattttcaatttgtagaacaagttttagaaactaagataccaaatggagtgagttcaaatccagatttaccagcacatcctgacgcacacttggaaattcacagaaaaaaggcggttacacctttggacatgaatcgctttcagagtagagccttccgtgctgtcatttcacagcagagggggcaggaccccacctttccaccagtacggcagccccttactaaggagccctctttacacctggacacaccatcaaagtttctgtccaaggacaagcttttcaagccatcctttgatgtgacggtaaggtttgaaggaaatgttactagtgctaatggttttatggtttataaaggtagagccccaaattgtgcgttactactaaagtttgtaatagaaagtcatccagagatgttgataaatgggcgctcagagctgagataacagctgtgcctatataatatgaagttaggactctgggtttgctcatgaacacagttctaggcagatgacttaacctctgaatatcactctgaaatgaaatagtctaatgtaatggttttgtaagctttaaaatagcaaatgtgttgctaccgtttctgggtgacttagtgtgccttggacttgctgaaagccctagtgttgccttaccttttcagtcactcctcttaaggagacaagtgttgtttctctgtgtgatctgagcagtggggccaacaccttatgaaatttattcatgaatcaaagactattcaaatagtcttctttcagattctcaagattcctccccccccccaccttttttgggggaaggcttttggctttctaagtagctgttgaagtaagtcattgcctgagatttctgtatccttgagcccacttacttttgatagtttgcttataggatgttaagaaatgacattttagctgcacctagtagtgtttcctataatcccagtaactcggaggccaaggtggaagatcataaattcaagacttgtctaggttacacagtgagttcaaggcctgcctcaaacaaaaagtacttttgtttttgttttgcctagagttttttgtttgtttgtttgttttgttttgtttttttctgagatagcttttctctgtgtagccctggctgtcctggaacttgctctgtagaccaggctggccttaaactcagatctgcctgcctctgcctccctagtgctggtattaaaggcttgtgtcagcactgtccagcaattctttgctttaaaaaaaaaaaaaaagagttgtggaggtaggtctctaatagaatagtggccttgtggacatgagaagactatgggtttcatccataagaaatccaggtgcattttagacatttttactactgtgtttaggggcagattattccgaaaataaatattgatatctagtaccattttattctaggctgatgtatatccctaatctgaaaatcaaaatggctcctttagtattctacagtggtcctgcagttttaaatcccttcctctgattagtgctctgccccatgagccttcagcagaggaaaggcactgtcttagtgctatgacttctggagtcaggatgaccatgcttcatgctgccttctgtctgacacgtgggaactcccttgagcgtcaccattcttgtcctgggatcatgttaagtcacggaatgagtcccaacaacttgtacagttctcagaccccttaagtagtaaacacagaaaagggatgcactgctaagtgaaactgcaaccaacatttgggcagccactgtccgagctcagataggactcattctgtgtgcccttcctcatgctcggtatttctgtttctcctccccaccacttgtcagagttgtgttgtgcttggttttggcacttacagaggcagtgttaggaagtctcttgcatctgttttgttggatttgtttagcctctattgtggagatttgcccatgttctatataactgtagttaatcatttatcataagatggtattttttctatctgaggtagtgtttgctatatatccagtatatttatatgaaaactgtaatttctgattcccaatatgtgcttatttacccatcctgtatattaagtgatgtttgcaagtttcttgtgttgataattcttgtttcggtttttggttttggtttttgatttctctgtgtagccctcacactgtagaccaggctggtcttgaactctcggatttacctgtctctacctcccaagttctgggattaaagcctgttccaccatgcccagcagtgttggtaattcttcttctgagatttcacatggttttgttttttgtaagtagtcgctttgttagttggcacactgatgtgtgacttgtattaattagaatataaaatgcaacttttgattttataaaagatcctgtcttgtttaatgctttctggcttgagggctgtctgctgtggttttaggatttcagtgtgctgtatttatctcagttctgtcatgtatatagtaacttacacttgcttcatatacctttatattatgtttgcttgatgttcttttttccttgtttcctttttgtatgtagaatagaacccctgctccacttttgagacaaggtctcctatataatgcagactaaccttgaattctgagatctacctgcctctgcctgttgatgactggagttaaaggcatggacctccatgcctagctttttctcttttctttcctctcctctcctctccttccttttttttttttttttttttttttttttttttttaagattttaaaacagttttactgtatagatagccctgattggcttggtacatagagccaggtattcatcactgttgtgtatgatgctggagaatatgcctagggctttgtgcatgtagtactcccagccgagctgtatcccagtacaaaccataaacatgtgttgatcatttgccattgtggttactagctagtaaattccctactctttgcttagtttcagcaaagagtaattgaggcttttcccttctctcctttctagcctctccgaatcttgggagagttagcattaaaggtgtatgggattgtcaaagcctagagttgacatgacaggtagtgcatcctctccatattaactgtccacttctcctgctggcatattttacttagtttggatattataaaatttatgcaactgcattcctgaacatattcattcatattatttctgatctttccttcttgaggtgtgtcactttttgttaatccacatcaacagtagaaggatctgttctcaagaactttgtttctcaagaacacttctctctttgtgatcatgcattccttggtatcatgaggctggatgaaagaaaagaatggcttcctccattgtagtctgcagaaaccccagatgagaggcatctatctatctgtcgtagaactttcagcacccattgtcatgaagggatattagaactgtcctctaaggtgcccagaacacttacgcctgtctctaaaggtgtcagatgcttgcccactttcagcgttaagtgcagtcctggttagctctgagctctgtggactgcttgggaagtagccagaccctgcatggagctctctgcgtccagttcttagcctcccctccctttgagcctatattttatatcttgtacattttgttggttcttgcctcagtctgactttttacctaatcttaaaattaatttcttatacccatccattctttctggtttccttctgtgttcactttagtttggggtattttatgtaattgcaattacaattcttaagtgtggtatgtatgcactgctgaaaaggtaagtatgcctaatggttttgtttatctgttttaaaatctattttttatgtgcatggttcttttgcctacacatatgtttatgcatcacctgcgtgcctggtgaacatgaaaaccagagggtgtcagatcccatggaactggtgatacatatagttgtgagccaccacgtgagagcaggggattgattccctgggtcctctagaagagctctcgcagtactcttaactgctcagccaactctccagctccttacttaatgcttggtgaagaatatgaaattcttttaactctagtataaaaataaaaattaaagttcatgctttttatttcagagaaaaagaggtcaaagatgtaatctcttttttcctttcttcactactttgtctctttcctctgtgtccccctcttcctctcctcattttttcctttttcctgttcttaaacacaggatgcacttgcagccctggaaaccccaaatgctgccagccagaagcggaaactaagctcaccactctctgaagtcatcgtcagaaacctgacagttgctttggcaaatagttcccgaaacactgacagtcattctgccagccctcagctgaagggtgcccatttggaggaggtagacatggttttcttattaaatggaaggtgtccctaatgcatgtcaaagaactgtggctggtctgtttctttattctccatgtgcaggaagagactcggaaaccacttgacagcgttgtggtgtgtgtgagtaagaagctcagtaagaagcagagtgagctcaatggggtcgcagcatcactgggagcagagtacaggtagggacagctctgtgttggcggcgccagccacagctcagacagcacaaaaagcctgtattcatttataaggaagacttggctttgcctgcttgtgtgcattatctaataaaacctctccgattaattaaaactgtcctcttaggtacccagaacacttaagcctgtctataaaggtgtcagatgcttgcccacttttagcctccagtgcagtcctggttatggactggtcatgggtttatagtcagcacatctgggactgactgcatttattatcaatcttagtgatttcctgtgagtagtactgactgaccactgtagcaaaccttcctagattcccctgacttccacactccattaaagacattttagtttgctctaaataaaaatttatttgtgtgtgtgtgtgtgtatgttggcatggtggtacactccattaattccagcgcttgggaggcagaggcaggaggatctctgagggtctacatagttccaggataggcagggctacagagtgagagaccctgtctctaatgttttcttaagagacgtagtctcatgctgtggtagatttcttgcctagtgtactcagaggcctgagctcagttctcaacatagatagttttgtgatagggactaacttgatagagtgaataaacagggtggtggccagtgactggacagtggatttgaatgccttaagttttattaacttgaaaatactttttattgtaattagaaagtgatatacattataagacaaaatggaaggattcttaaaaatataaagaagatagtagtattttaaaagtattcttctggcatctacactgtataaatgctgtgtaaatggagtcgctagcatttgtcaggatacaaaatctgccatttactactcttgcttattctctagttctttgagttctgtgtgtcagaacattctgttcagagtagactgctgtttcccttagttattcctcttgcatatttggttgtttcaggtggagtttcgatgagactgttactcatttcatttaccagggtcgggcaaatgacagtaatcgagaatataaatctgcaaaggaaagaggggtgcacatcgtgtccgagcattggctattagaggtaagcaatgcttttccctctcttccttgttggttgaaaatacacaaatatttcagagcacaaaccagtttcattgaatgcaaataaatttgctaatcttggctaactgtgtggtggcatgtcgtgccaatacctgcccatttcatggctgggacatgaaagaggtcgtgaaagggttgggattggactgctgtccagggcacaccccgagggcctgttggatgccatgggaactgtgcttgtaacataaggccttgggacactcaaaatctgagctatatgtaggtcatgcttggggcattgtatcgttttagcattagaacttaaattgttttaagattaattggttgattggttgattgattatttttgtatttttatgcacatgagtgctctatctacttgtacactcgagtgcctagaagagggcatcagaccccattatagatggttgtgagccaccacgcgtgatagatggggaattgaactcaggacctctggaagaacgtacatctctccagccctagaacttaaaatttttattgcttgaatatttaccaagttttaaatgaatacttatatcatgattcctttccctcattgactattagatgaagagtagctaaggggctggagagatggctcagtggttaagagcactgactgctcttccaaaggtcctgagttcaattcccagcaaccacatggtggctcaaaaccatctgtaatgagatctgatgccctcttctggtgtgtctgaagacagctacagtgtacttacatataataaataagtctgagagggagagggagggagagattgagaaagagagaagctgaaagaaagggtgtggaaggtaaaggctctcaccaccaagcttgactatttgaatttatttcctgggacccatacagtgggaggagataaccaactcctacaaggtctgccccccatataaatagatagaaattaatttaaatcatataaaaacaaaagatgtttttgagggtagttgctagcatcctcatacactatagccatgcttttcttggtgctctctggaatggctgatacagaggctaaatgcagaggcaggattagagtttatactttaatagacagtagattgtaaaagtggggataacttgttccactttgtttaatttactgtgtgtgcataggtgtgctcagagggccttttactctttttacagttttaatatggtttcagtgattaaactcatgtcaccaacttaataggacaaggacatttactggctaagtcatttcctgggtcccaattggttatttacatgctagagttttccactgtaaattaatttccttccttccttccttccttccttcttccttccttccttccttccttcctttctttctttctttctttctttcaaagatttatttattttttatatgtaaatacactgtagctgtcttcagacactccagaagagggcatcagatttcgttacggatggttgtgagccaccatgtggttgctgggatttgaactcgggacctttggaagagcagtcggcactcttaaccactgagccatctcaccagcccctgtaaacttctttctaaagtgtacacttgtgtttcagtgtgctcaagagtataagcatcttcctgaatctctttatccacacacttacaatcccaaaatgagtttggacatcaacacagtgcaagatgggcggctctgtaacagccgggcacccttggcagtttctgcatctaaggatgatggggtaggtggtgtggacagtgagcccctcccaagctgcatgtagatgtctgtgaaactttatgcagtgaacttcgtttgagaagttgtcatttttctctttgaatagccagatcatctgtctgtagaaggaaatgagacaaacactatgggcacaaatgacaaagagtcacctctgttgaatgggagtggaagagatgactgtaaaggaggtaagacacttgtcactttttaccccttactctcacgccatggcctcccaagacagggtttctctgagtggttctggaactgactctgtagaccaggctggcctcaaacccagagatctgccttcttctttccaagtgctgggattaaaggcctgcgccaccacactcaagtgcactttttacttttgacaacgtttgttttgacttacagtcccagctgtattttaccactaatagaagaactgggatggccttccagctttgcagccaaacactgacttctctccacaaaaccctagagaggtgtcttcttccagtctgagtcagctgctcattctcctgcagcttcgcatcaatgaggagctgtgcccactgcaggagcacttggaatttctctttgcagtcacagcttgactgttcagcagaagagccttttgacctaacttgactttcatgcatgcctttgtcacttgccttagtcactgctagctttactttagagctagagagaggagtgtgactcttctcttcacttgaacactaagccactgtaggatgttaattgagctaattttagaactgttgtttcttagggattgcggaagtccttggaaggaaagagaggaggaacaaccagtcagcatatacagcttttatctgtagcttttgtgtagatatggttcacacagaatcatttggaagagttggacaattgttaatatatggttgctacagctctccatttgcaaaaaaaaaaaaagaaagaaaaaaaagcaatgttttagtgtagctggagctgagaaatatatagtaaagggtacatttttagctcaaacagccttagaaaatgaaagcccaagcttgattggtttggactctgatgaagacctggctacatcctatcatgtcactatcagaaagggaaagagtgcaagtgggtgtcaccacatgaaagactgcaagcaagttagaccaggctcactgttgtcatagcaacccacaacaaaactagcctgagttccccctgaaaactgcattacttctggggtggtgttgctaatgacccaacccccttagactagatctcactcttaaggagtctccttactataccacaccacacacaggagggtgtgcactcaagccagagaagagtgtctgggaaacaggggctgctccagtcctgggttttatttgctggtgtagtgtgtggcttctgtcctgctttattttgctgtttcctgttcagtgtcactagcagttattttgaatttcttgctattacagatagtgctgtgctgattaccttacttagatgtgttactctctgacttctccttattcagcctgcctactagaacttgctttctgacttaactgttccattctgtttatttcaaaaatgcctacatggtatctacttcagtgtctataatgggaaggaaagacaaagacgttgtggtgtgttctttcaaggattagtgaaagctcggctagtgctttacagcagcaatcccaggcttgctgctgaggcaggagggcattcaaggccagcatgagctatgtggcaagatccaaagcaaatggacagacagctatacatacaaatgactgtgaatctctgtagtatgcatccatgagaaagggtcagacacgagcagggagctcctcaaaggagcaagttttcctccaagggagtcttcatcgcttcagaaacagtcctcatggccgcctttgtgttttgtgacattttagccttgtattcctgtataaatgttcagtaaatggcaattctttgttcagctagatctagacaaaatagtgtaagatatgattgacaagagaagttagtaactgtggtaatgcttgcctgtaatcccagaaccctagagactgaggcagggattacaatgggaggtcagcctggccacacaatcagatctatcttcacaccagcaaggtggaacgggggggcacatctttcttgattgatatcgattactctgtttctagctctgacccaggccttggagatgagagagaacttccagaagcagctgcaagagatcatgtcagccacctgcattgtgaagacgcctgcccagaagacttgcatgtcaagaagcagctgtaacagcgcctcttcaactcctgacagcgctcgctctgtgcggagcggacgaagccgagtcctggaggcactcaggtttgtgcgctgtgttgtttgcataaaagcccctggtaacttaggttggtgggttaggctctttttgttgtttttgtttttcgagatagggttactttgtgtagtcctggctgtcctggaattctggaatttgctctgcataccaggctggccttgaactcaaagattcatctgcttctgcctcccaaatactagcaataaaaggtttgtgccaccacacaggactttaattttcttttcttttctttctttcttttttttattttaaataaagtggaaattagaatattgagaccagtgaaggggtttgtgttggcgctttgtttaactcaaacagtatgcattatatcccactgtcatctggggttttgtgtattgctgctgagttttttgtcttgttgctcaagcagttgtgagttcttactttgaagtatgtgattttaggtgcacttttccacttgacgtaaaatccgggagcagtcagtcctctctgtcacttagtgttagcactagacagtgaggacacagagtacttcaactttaaacagcttttttattatcttgtgtttgagtgtgatatgtgggcgtgaagacatgcatgccatagcacccatgtcgaggtcagaggacagcctgtggatgtcactccaccctttcctcactttttatttcttacttgaagtgtgtgtacgtttttcctctgtgttctaggaaaggtgccacagttcttaatgcagtataacttaagctcattgaaattactgtatttttctttgtctttatagttataagacaaggtcttatcccaggctggcctgcaatactgtggaactagtgttagccctaaactcccaatcctcctgcttcagtctcctgactgctggaattacatgtgtaccgccactcaccctctctctgtattgctgtgtagccaaggtgggctttaaataaacttggtgtttttctacctcagtttaccaagtgttgggttactgggcccaccaatagcatttttttacctctctctgtattgctgtgtagccaaggtgggctttaaataaacttggtgtttttctacctcagtttaccaagtgttgggttactgggcccaccaatagcatttttctactagaagaaaaaatctctgaggtgtagggtgagagatttgagtccatgttgacttcatttatatcgtactctgtgttttccttggggtaattttgaattctgagaaaagtagcttttcccaacagtgcaggtcatgttttagatatagaaccttactctgtgccaggtcgtttgggactaaaaggctttcctggttcattggcttgtttgtttttaagacaaggtctcactatgtagcttgagctggtctggagctcagagatcacctgcctgactctgcctctgcctctgcctccatccactttgggatgtagtccttactgtcctgaaactcaatatgtggaccagactggcctcaaatttacagagacccgcctcctactggctaccgagtcacttactaactgcatgtagcttggtgatggcgcaggcctgtaatcaaggccccagggagatagccaggtggtaaaggtgcttcacgccaagcgtgatgacttgaattccgtccctggaatggtggaagaagagagctaacttctgtaagctgtcctctggcctccacataaggtcactgtgtcacatatgtgtatacatacacacaaagtaaataaataaatgtaatgaaaacatttttaagggactagagagatagcagttaatgagtgcttgctactcttgtagaggccacaactaactgcttgtgactacaggtcgaggggatctaacaacttcttttggcctccctgggcacccacatctgtacatataaacaaaatacttgaaaatattttaatgaattcataattctgtaattcagtaaatgtctaccatagactggaaattttggtcaccaagtgtactggctagttttgtgtcaacttgacacagctggagttatcacagagaaaggaacttcagttgaggaaatgcctccatgaaatccaactgtaaggcattttctcaattagtgatcaagggggaaaggccccttgtgggtgggaccatctctgggctggtagtcttggttctataagagagcaggctgagcaagccaggggaagcaagccagtaaagaacatccctccatggcctctgcatcagctcctgcttcctgacctgcttgagttccagtcttgactttctttggtgatgaacagcagtgtggaagtgtaagccgaataaaccctttcctccccaacttgcttcttggtcatgatgtttgtgcaggaatagaaaccctgactaagacaccaagggttgaaagacccattagttatatcttcagcaatgtcatgttaaaaatacactttaaagctgggtatagtggcacccacgaggcagaagcaatggatctgtgagttcaagaccaacctggtcttcaatgtgaattccaggacagccagacctacatagtgagactcaatgagatataatttaattactaagacaggtacggtggtgcatacctacagtcctagcacatggaagctgctgaggggagctcatggtcgtccttcactacagagaagcgtctttaaaagaaaatgtaaatgcaattattaacccactagctacagttctctaaacatcaccctggttccctaattttttagaatttaaaaaatacccgggcttgatggcgcacgcctttaatcccagcactagggaggcagaggcaggcagatttctgagttcgaggccagcctggtctacaaagtgagtttcaggacagccagggctacacagagaaaccctgtctcaaaaaacaaaacaaaaaaaaattaaaaaatatataattatttttgaaatacagttatagacattcacttaaattgtctagtagaaatattttagaagtaattaactgggtgtattggtgcatgctatgctgtgtaggtttttgtaaacttgggtcatttaagaagagaaacctcatctgagaaaatgtctttatcactctggcgtgtaggtaaatctgtagaatatcttggctaatgagtgatttaggagggtccggcccactgtgagcccctgggacttcctttgagcaagccatgcaagtcaataagcagttctcttctacagtctcttcagttcctgcccggacttctctcagtgatgggctacagctgtaggctgtaataaatctcaccaggctgcttttgatcatatcttatcacagcaggggaagcaaaccaggatgcatgcctataatcttagcacctgggaggcagaagcaggagaagcacctcatttaaagccatactctcaataatgagaccatatgtccaaaaaaaaaaagaaaaggagaagaaaggatgtcctcttgatttattcaacaaatactgtgtgtctttgctgcttactggttttccgcacttgggttcagtgtggctgctatttaacactgtcccttttgttccttaggcagtctcggcaggcagtgcctgatgtgaacacggagccgtcccagaacgagcagatcatttgggacgacccgacagcaagggaagagagagcaaggcttgccagcaacttacagtggcccagcgaccccacacagcattctgagcttcaggttgagataaaaatgccggatgactctccctctcgaaagcctgtgtaccattcagaaattgctgagcagggtaataagacagacattgacttgtgcttaagaatgctgacctcttaaagacaccatggttctctgttacatatgcgaatcaaaatgaattttctagtactgtttcagtcaaatgagaaatgttttttgatttttaaatatagaaatttagctataagtttctgaagaagaaattgtcatttttgaagcttctagcctccatacaatctaatctggggccagaatattatcagcctctgagccttactgctgacttaagttcaccctttctaattcttctgagctctagctggatggctcagcttagctggtcagctgtaaactcctctccagagtgactgattcagtctggcttctctcagcttctcctgaactgctctgcttggcctcagactgtctttggcaacatgttctaatcttattgcttcttctcgttctctggcttgttctgttttcacctgtgtttagctgttctctctgcaacctgtccttctataataatgtctggtaaaacggcctttcttctcactgtgctgcttcctatagcttccctttcctctccttgttattgggcctgtcctagtctgtcagatctttctcttgattcagcactttgtctgccactcagttagacatggcttacaaacatgggtgctttttttctacaactaactttaccttcattgctgggaattaagagcaagtctgtattccagccagagggattaaaggtgtgtgctgaaactcaaccacaccacaagtaaaaacaggttttctcagtaaagatcacaatcttggggttcaccgtgtgatcaaatatcctgaaatatttaggatcagcctttttttttttccctttctaccctcttctgtttgtgaggtaatgtctgatgttgtttggcttatgagctttgcctgagttcctttttttttctcccttcacctcggttaaggttatcttcctgtgctggatatacagatctgatttttttctccaagaattgctttcattttaaaaagttgggtatgttatacttgtgaaaagatgttttagaaagggattcacaaaactcaattaatagctgccctttcagagctatttagtcagatgtacctataagctggggaaaccaaccactctttcctctatgtgtagtgcttgcttttgagccatgcagggttgtacccatgcagggctcaagcctgagagtctcctgtctcagcctcccaagttactggggttacaaacagatgccaccatgtctgagcctttgtatacttttgattgcagaattcatggctcattttattttggccaagacaggtgagaacatttccagagtttgttctaagttccatgtgtacactcttacacagtatttctttctccttacccttagcctcgtgtgttactcaagccccagggcacccaggctctgaagaaccagagcctccagtagcagaaaggcctttgatccccgagccgcaagcccccgctgtagcttcccccctggctaagccgcctgtggccccacaacctgcagacaaggtttgttaaccttcggtatggtgatggcgggcggttttgtgtattttatgctggagtaggaagtgttggctgcagcaggctcatcactactgaaaagtgcatctctttgaattacaatttgtatacttggtcccttagaagactagataaaatgtcactataaaatagctatatctgataatagttttaatgttaatatttttctaaaataaaactattgtgttttagattgaaacacaggaggagacgcacagaaaagttaaaaaacagtatgtgttccagatgtcgtctctgaattctcaagagcggattgattactgtcgcctgattaaagacttaggtgccattattttactttttttttttttcaattttcttccaatattttactttaaaacattgttattacaacttatttagaatacaaatgcaaacatatttctatcatgtgtaaaggggagggcagttgagaaaagaacatggttaagttttggattttgttggttttttttttggttttgttttttttttttgagacagggtttctctgtgtagccctggctgtcctggaactcagtctgtagaccaggctggcctcaaactcagaaatccacctgcctctgcctcccaagtgctgggattaaagacatgtgtcaccactgtctggctatgggcaagttatttaagcctacacattgagtctgttctgcctcacagacccaggtacacagataggcaaaatacacatacatataaataatatatatatatatattttttttaagtcaagggtgggactgggggttgtatggctcagtgtgagtttttttgggggggggcatatatgaagccctgaatttcaactgtatacacgggtcagcattggaagttttattttttataaaaccccaatctacatttcaaatcactagatcttggaacgctgaaggcagggatggagggcgataaattaaagtgaatgttacttttacatctctaggttgatcattttatataaataatttttatgcacagttaacatttttctagaaagaaagttaagaactagtagatgccgtttctctccatacaaggtgggtcggtgatcgagaagcagtgctctgaccccagctgcacacacatggttgtgggctacccactgcgcaatgagaagtacttagcttctatggcagctggtaaatgggtgcttcatcgctcctacctagacgcttgcaagacagctgggcgctttgtgcaggtgtgtattcatattcctgtgaaggtttgttctcttgttaatgacttaggagatccttggtcatcccctcaccgtgtatttagtttaaatgaccacacgtggccagtcagattacagctgttctgtgaggatctttgaaacagaacaaagtctgcaaggtcgggctgctttattcacatccctttttattaaaatattttggttggcatacaaaaaaatgagtttttattgtggcctgctcactttttgttacctaatttatcggtgcttttttattgaaatgattttctcttaatgagcagattcaagatagcccattataaggctttttctttgctgttagcttatccatattaagcagttgtaacaagctgggcatcacggtaatatctactgtgtcgtttccgaagcttccaatctgagctccttgggacttgtcttagttcatacctcctcaggctgtgctctcatgaagccaaatactagggtattttactaagttaggtatgctactaagttgccaaaatacagctgtctggccaaaaggtttgttttggggaaattagtttctggttttaattaaagccagctgtactggttcttcacataaaactgaataaatggaatgagttcccaaagtagtgttctctatcattcgtgtctctgtaacgattgaactttcagctttgatcttgatagactgcaagctgctgggggccagatacccatgcttagttagcacagtgctgtgaaaggaacccacaagttcactggcctggttttctaggaagaagactacgagtggggaagtagctccatacttgatgctctccctgacgtcactgagcaccagcagaagctcgcactggcggcaatgagatggaggaaaagaatccagcaaagtcaagaatccggcattgttgaggtactattgtgggattcagtattgtgacttgttttaaagagcatatgcctgaccaagtagttctgattgtcttttattccataattgatatatttagttgcacattctgtgttgaactaaaatttctgttgtgcagggaggcagaggcaggagaatgtttgaattccaggatatctgaggctatgtagaaatcctgcctgagacaacaaagtattgtgttactgtaagatagggtcttctaaagataacttgtcttttcagggtagagcatcaggagtcctaagccaggtctgcaaattctctctaaggagtctatatacttttgagtaaggaaattatgtcctttctttcctaattgctgattgctagggtactcctgtaatcctagcacttgggaggcaggagaagagcaagaggtcagagctagcctatgaaactttgtcctttttcttttctttctttcttttttttaaactaataatgggttgaagaggccgcccaggggtaaaggcacctgcgctgctcttccagagaactcagatttaattcctatcatcaacatctgtaaatctacttccagaggatccaacaccctcttctgacttctgtaggccctgcatgcaagtgatacttagtatatgtaaatatatgcaaaaaacccactgagttttgtgtgtgtgtgtgtgtatagatagatagatgaatgacaagaaattacttgacactaaacaattaaattcatgcattatctctgcattttgaatgtttagtatgttaaaattacatgtacttatttttaaatagggagcatttagtggctggaaagctattttacgtgttgatcggccccgagaagctgggttcaaacgccttcttcaggcaggaggagcaaaggtttgtcctgaattaatttactgctatcctaggggcaggtttgcaccaacttgtccagcaaggtttctgtgatgtctccctgccctctgcctttgaggggaggagcatctgctatggagcatgaggggattaacccttcctgtttttcattaggtgttatctggtcatccagaacctttacttaaagatgctacgcatctcttttgtgacttcaataaactgaaacctgatgactgcagagttttcatcgcagaggctactgcccagaacatggtctgcttgaaaacagaatatatcgctgattatctcatgctggtttgtcacattctactcttccgtttatcattatcatttttattacttgtgtgtatatgtggggtggggagttggcacatgtgtgctcgtcagaggatagcttaatggagttggttctctcctaccatgtaggttcaaacttaggttgccaggctggtagcaagcgcctttacttgctgagtcattttgctggccccatacttccttatttctagagatatgtgtatgtttgtagatgaacatccacacatttactcttggcttgctgctaatagaattgacagtctgccattctctagtctttcagtttagttccatttctatattggatgcctgtaaactttttagcatgaaatttaagtatgacaggtttatgaaaatctgggtagctatagatgttttacaagttctttaaaatattgggctataaagaaagcagggggctagagagttggctcagagacaagagaactggctgccattgaaatcagactcagttcctacctaacagtaacagacctaccgtgtgtacctgtgttcgtgtgtacctgtgttcgtgtgtgtgctcgtgtgtgtgtgtgtgtgtgtgtgtgtgtgtgtgtgtgtgttcgtgtatagaggtgtctgtggagttcaaaaaaaaaaaaaaaaaaaagagttctattccctggagctggagttataggaggctgtatcctgtccagtatgggtgtgagaatcaaacttagatctcttaagtgctcttaactgctaagccatctctccggccctaaatgaatggatttttaaactgtatacttgcttcctaggtcaagcaacattttaatataatcaagtaacattgatttattacatagccgtttctcattttttttatgcatttcagagttttggggaaatcagaacatgtgtctcctcaaatacttagcatgtgtatcattaactagaatccagtatttgtttacttttctcttagaagagctgttgtacagtgaaatttgtagataacagttccatcatgtgagtcagcctcctgatagatgatggccttccaaaaccctttggtatcaagagcatgacctcatttcaacaagcatccttggggcccttttcaatgacctctaccccagccccacagagataagcttgttttattatttgtccccagaatatattaatctttccttagtttgagagctttttatacctggccttagggaacacttagcatactgtccatgtgtctaggtcatggtgcatgttagctagctcatcccttattatagaacgttctgtctgaacagagcccctgggtgacttcccttcaatgtgaagtagtgtaactgctgggctaagtatacatttagtttatgtggtctggatagctttaaacttgcagggcttcctacttctgtctcctagtactagaattgcatggtattcactatcagactcttcctagaagagatttggtgtcactttatagtcacttgacttttagcatctggtatggctacagtggaggtagtagcatcatgctttaaaagaatcagtctttacctctcttactctgcctctctttgcctcccatccttgtcctgctaattgctgttattaccagcatgtatctcgttgtttatgagcttttttcacttggtactccagattggccttaggccttaaactggttttgtttgtttgtctgttttctttcaattctgatggaaaataggttatagactatagatcctggcatttatctgtttgcattacttaacaaataacagaagcagctgaactgtcagttcacattttagtcttattaaataaaggttgtgtgtgtgtgtgtgtgtgtgtgtgtgtatgtatggctcagaggccaaagatttggccaagctccacaaactatttctggcttccagacctttgctctgggttcccaaccttttttttctgaggaaatagttgctttcctaccttgttcttcaagccatttctattagaattttagccagcctgtggcacacataaaagaaacaaaatgagaaagcccacaaaagctaaattgacccaggtctgacctgccctgtaacagttacttggtttgttaattctccagcgtctttaattagaatttaagttcaattcccagaacccaaaaaaggcaagcatgatgtttgtaatcttaacactggaaaggctcagttccaggcccataagtgactagtgggattggcatggtgactcaggcctttaatcccaacatttgggagttaaaggtaggaggatcactaaaagtctgaagcatcctgggctacaaaaggccagcttgtcttatttatttatttatttatttatttatttatttattttatgaaaatagaaaaatggctgcaaaggtagccattgcaaggacttggtgtcaggtagaaacacttaaatgtccttgctacctgatagttaagcccattgcacatttgtaaatgggtgtaaaaacacttatagtaattcacactactagctactgaccagcctttccccaatttaatctatattttaatccatggaatcattaaaatctgaactagccatgctttacctgaactttgacccactggcaagctttgaggggaaaaagaaacctggagacatacatgcactacaaatttgaagttttcctcttcccattccaggaatcccctccttgtgcagacaattaccgtgtatccgaagctgctttattccataataagaaaggtgggcctggattaccacagaagaggaaaactcctgcagagaatgtagtcaaacggcctcgagtacactgaagtgagccatacacaaccacccaacgaatgtttttgagtttagtgtgcttgcctaaaatgtataaagtgcactagaaaattttcagctacaacctgaacattgctgtgatgcatttgtgtagcagtttaaaggcatacatctgaaggactatgcttcagattctaatgatcctgtaaactggatacctttaacctgaatttgaatcactggttattgactgttcctaatgaggctgaaatagttttaacaaggagatttgtttcaaaaatgtcatagttcataaaagcaaaagttatacattagggttatttcatgttttcctgatttttatatatgtattcttgccatttaacctctttaacagcctgagcagagagtttaacaatgaagctggggctctaaacttaaaatatgtatatatgtaaatgtgtgtatgtataaacttctatcatttgccaaacttgggcaccaaaactttgagataaagaataaaaaaaaatagcaacttaaa

SEQ ID NO: 12 - DNA, 12679 bp, Mus musculus
gcccacagcggcgggcggaaccgagcgcgcaggcgcggcgctgcctctctctgctggtggcccgccctccctcctcccctccctcccctccccgtcccctctccccctcctcaggcccgcgcgtcttcctcccgcacgcgccgtcgttagccgagcgctcgccggtgcgcgccttccttgtccctcaggcagcggggcgggcgcgaccctgctccacgctcgcggttcccagcgaggaacgtaccaccagagcacggggggagccggccgccctgccgcccgcgcctcggcgaccccgcggggctgaggcgacgccgcaccctgcagcctgagcgcacagccggccttgacccagagctcggagccgcgagcgccgcgccctccgccggccccacccatccggaccgcggccatggccgagaccgaggagcggagcctggacaacttcttcgccaagagggacaagaagaagaagaaggaacggagcagtcgcgcggccaacgcggcgagcggcgcgggcgggagcagcgcggcggcgggctccaggccgggcgatggcgggagcctgggctccggtgccaggtcgggcgacggcgggagcttgggctccggctccaggtcgggcgacggcgggagctcgggctctggtgctaggtccggagacggcgggagctcgaggtccggagacggcgggagcgcgggccccgccggcaaggccataacgaaggtgagggtcgggaggccggcggccggccgcatgtgcccgcccccgccggcccgggaggccacgtgactcgggcttcgcacgtcggcccggcgggcgggcgggctcgcggtcctcggcccccggggctcgtctggccgcccccgtccgcggccctctgcgcgccgcgccctctgggccacgggggttgggccggtccccgggtgacgtgtgcccgagtcctcgtggtcccgcttgagccccgctggggccggatttcatgttcttaaggtgttccgaggctcctctgtgccgcccgggccagcgtggcttactctcccaaccacggccacgcagggctgggaattgagttgtggaatttctgtcgccttctctccgccgctcagctcgccctgggcttgggtttaagtaaaagcggcggcagagagggcgtttgggaattaggcacgtctccggatcttgcaggaacgggctaaactttaccgtccggccactagccccaatttttgagacaaggtctcacggtgtagctctggttggcctccagttcacaaagagcctccggcctctgtctctggagtactgggattaaaggtctgtgtcactgtctgcaattttgttttttttttgttgttgttgttgttgttgttttttgttttttttaaagatcacatttatttgcttatttgtgtgcgcgcactcctgtgtacgtgtgcggagaggttagaggccggggtaaattctctcttcccaccacgtgggcctggagagttagactctctggttctcggtgttgactgccgccgattcttagaccgactcaagaatcctggcgaccactgatggaatttttccgagtctggaatctgtttaccaagatctctaattaattaattcgatgtttcgcgggtacctttaccagtttggggaatcccgttggcccttgatgccttttagtctgaagtgggcttaccaaaaactaatcaggtgttgtttcttccataggatgaaaatgagtggaaagaatttgagcaaagagaggttgattacagcggattaagagttcaggcaatgcaaataaggtaggatgtgattacacgtgggattaggtaaccttgttaagtagtgcacgcgtttacttttttttttttttaaatgccctctgtgtcattaaattagttgccaactctaaaatcctgtggtttccctatttgcagctatgtggatttttggcttgactaaaatggatttttgtcatttaaaaatttttaacacttcgtgtttgaatttaggtggtcttccctacccctagtagggctcctgtagttcactcgctgccctgagaacttactgtgtgactcaggagaagaaggggcttgttttttttttttttttccaaaaaaaaatatttgaagcgagttgcctgtgtaatacatgtctgtactgtcttctggaattggaattacagctgttagtgtgggttctgtgagctggaccctgatctgtggaagaccgctgagcgacatgtcaccttgaactcttaattctaaagtgtccacccaaatgtaccaccaagctgtgcaggaacttagttttttcttttacttacttagtaaaattgttttctagttctctctggtaattgcagtgtaggatacttccaacatacacgaatttgcattgaccatgaagccaccttgaatacccactaccccagtcaaaaaattgaacgttaatagaggctcttctgaacctatccccaaaagtagcttaccctagccctcgtttgcacagttcttagctgtgtattccggactgaacttgagctgctggaattgcaggcctgtgctacctgccatttcgggctctgaggtgactggttttcaaagttcaggaaaacagtcattttcacagttggattggttgatttaagagaacctacattgtcacgttcaatctgtggtagttcattttagatctggttttaaaagtaacatgtttggaaagattttttttttaagtagaaagggtaagtatttaaggtaaggtttttgaagttcaaaagtgagtagggctctattgccttaaaatcctttactcatcttacacaagcaaaatgattggaaattgtctttggtttgaagcttgcaatttgtagagaattccagtgaccatatgggacagttgttgaggaaataactttcttaactctaaattaatcttttaaaatctagattatatatgatctgaggtaacttattgaaaagccaggtagtatattttaatgtatggttagtgtctgtaccacccaggcattcatatccctaggtgttctcacttgtgaatttaccaaattaaacattgttttttatagtagggaacttagaagttatctccctttttggtgtggctttagtgttttgttttgctttgtttttccttttttaaagatttaattacatatgtatgtctgggatgtatatgtacatgtatgtgcatgcaggtgcctgtcgaggccagaagagagcgcatcagttcccttgaaactggagttacaggtagttgggagctgtgttctagggactgaatttgtatcctctacaagagcagtatataagcttatgagtaattttagaaaatacttggtggtgaaagccttaactgtcagctgttgagaagctgaggtggggagaataagaaaaatcaggtgcgcttgggttagagtgagtttaaggttactctgagcaatttagtgagaccctatctcaaaacttaaaagaaaaagtagaaaatgttcttgttttgtatctccaagtctgatctataaatctggagagggagtttacaggttcctttcttttatctggatgtggtccctgctctgaagttaaattatgcccttgagtggtaatttctggacatattgacttgaattttagtgggtaaaagtaacactttctgaaggtagaggggtggccttcaagttttttcagtataaaatttgattttgttaaattatggagaacatttaaattgaactggttttctaacaggatataaaattctttattttaacttttttagagtcaggaagttgttaataaactgttaggatctacttgtctctgccctgcagtgttgacatgcctggctttcatgtgggggccaggggtttgaactctgctctttttacttttacagcaagtgttcttaccatatatacagatgaacagttgtgatttactgtgttggtgagtgaatagattcaaagagtgaatgaataactgaaagcaactgcttcagtgtatgcaggtgtaaatgccatgtaggtgggaatctttttcaccttttttggatgcattaggttgttgggatattaccacacccagatgattacctatttcatccctgaagcaattatagtattgacatggctttacaatttaaaaaggcaaaaaaaaaaaaacctcttgaaaaaattatgaagattggaaaccacaattagcctgggtaattataaacttcatactagctaataagctactgttagacaatggtgttgtgctatctgatcagatttttacgatccattagagaataacatgttcccatctctttttcaaatgaaagctagaattttttacttcctgttacgaaggtgatatatgtactgagtgtataaatttgctcttcgtattggtgatatctaaaagccagccagtatcatcttgaaagcctgaccattaaatgacagagatggcagaacctggacttgagcaatcagttcctaacattgttttagctatcaaagttctcattaaaattacagatctttaggattctctctggatgtttgatgtttatgataagtataatgtattagatgatgatttaaatggcatgaatattatttgttagtgaccagcatcattttatatggctggacaggttgtatgttaaaagggaaaactgaaatttggctttctctttttcctttgtcttttaaaaattgcagtttattttgtgtgagcatgctgtggcatgcatatcagaataaaaccaacaggagttagttctcttccaccttgtggatcctggggattagactctggtagttaggcttggtggcaaggaccatctaggtgtgacctttagtttttggagaaagtatcagtgacgtcatcattctcttgcctcagcttgcatgctgaggtcaccagtcagcctccaaacggtggttacttctctgtttgtctttttgagttacaggtgaagtgctctgttattgagccctgagagacagtcttagtcttaaatacagattggaaattaggttgttcctctttcttgacatcataagtctttaaatgctggggttacttccagctggtgggcagtgtctttaaagggccttaataaagatgggtatggtggtttacacctttaatttcagcacttgggagatagagacaggaagatcagtcaggatcgtcagcttacttgagtatatagtgagtttaaggccagcctgggctacctgagtgaggccttgtcttggattctaggtatggctcagtttagcatgcttttgttgcatacatgagaatccaagttagactccactcaccaatggagggaaaaaaaaaatcaacactaagccagaagaaatttggcttaaagctaggacacatcttgctttaataggaatatcttttatgggggccagcaagatggcttattattgggtattgctgttaaaagttgatgacctgggtttattccctagaatccacatggtagagaactgattcccaaaagttcgcccctaaagagtttagtctcagcagagggaggcagagacaggcaggtctctgagatgtcgatcagctttgcctacgtatctgattccatgccagtcaggactgtataattggaccatattttcaaaagaaatgtatttttttgtagaagtttcatatggtggtgcatacatctagttccagttcttgggaagttcaatgtgcttgtttttcaatagtgaaaaggaagatgatgataatgagaagagagaagatccaggagataattgggaagaaggtggaggtggcagtggagcagaaaaatcttcaggtccctggaataaaaccgctccggtacaagcgcctcctgctccagtaacaggtgatcttctgttttccctcctgagggatgggcatagtggatccaaatggatgctgctttagtggaaggaatgtagaaattgagggacatactttttttgtcctgtaggctgtcaaagttttgcttttgtttttggtgctagggaataaagccaagtagttcacctcctgctatcatcctaccactaaatcacattcttggtgctgcacttaggtcttgaagcttacattctcagcagaagggagtgagtaaaatttctttagaactaaagaacttttaggggtttatgtgtgttgttggatgtgtgtttgcatgtttgtacagtgcttgtggatggaccacagcttggtgccggtctcattgtccatttttattttttgagagtagggtttctcaaggaaccgggaactcaaaccagttctagctatcctagctagccagtttgcttttaggatcctgtttgtgtgccttgccatggctgcctaggcttacatggatctgaccatcctgtacacatgctcggcagactgtagccattgagccagcttcctagctcagcgtgtttgtctggtttttgctgtgctagaaattgaactctaaaaactctgcacatgctaaatgtgctgtaccacagagctgcattttcatctcaaaattgttagttttatttattttatatagctcaggctgaccttgagtcctctgtaatacagatgaccttatgctaccccacttcccaaaacctgagattacaggtgtgagctttcctggcaattttctaagttaaaaaaattttttatatgtaaagttcttattttttgagaatgccatcagtatatttttggtaatattcatccccactctgctcaggctagccctgaatttgtgtgtgtgtgtgtgtgtgtgtgtgtgtgtgtgtgtgtgtgtgtgtgtgtgtgtgtgtgtttatgtcttgttgtgtgggtatcgaggctagaggttggctgtgtcttcctcgtcactctaaatgcttaagacaagttctcaccgagtctagagatgattgaatggctgtactagctagctagcgcactcctaggatgttcttttctctgtcaccacccacccatcctgtgctgtttacaggcatgtgctgctgccatgcctgggctttggtgcacatgagtttaagttctaatgcttatggcaagtgctgaagtgactagtgtgaatcaccatggaaatgctgcctttttttttttttttttttttctcctgaacctgatgttctttcaagctactcctggaatgcaccagacacacagctccagcagacccttagttcttagctttgggagtattttctttctctttcctctttttatcaggtgcctgaaaagccaggtggtagatgactgtggtctctgttgtgctgctgtggcatagacagtaatgtggaattaacagcagtgaggatagctgtgctcagttgttgggccggattcagcttgttcactaatatttggttttaagtgttggctttctttttattatttgtgtggtgagtttgtggagctggatcttgccaccaggtttgtataaagagggtcttttcatatctgcttaattttaccctgttaataaaacccttcccaagcccccttttaatatgtaacctctttggggctcagcagttaagagtactaacctacactctaccagcaccagaattatatcttagtaattcttatcagaggaccacaaatatctatgactccagtttcaaggaatccacctttcccttctggccaccaggggcatctgtgtatctacatgatgtgtgtacacattgaagtgtagctcctttgtactcctgctgttatttttggcatggcaccccttctccccttctcccctttttttgtctcttctagaatatactgcccattaggtagcattttggggggtgctggatgagctcaagtgagagagggatggctagtcacatgtagctgtgttgaatacttaggacatggtggctaatgtgactgaggaattgaaacctagatttcattttactcatctaaaatagctacatgtgttgctttgatcccagcactcaggacacagacagatggtgtttgagttggggcagccagggctacagagacggggctgagatgagatggctcagcggttaagagcactaactgctcttccaaggtctcgagttcaaatcccagaaaccacatggtggctcacaaccatccataatgagatctgacaccctcttctggagtgcctgaagacagctacagtgtacttacatataataaataaataaatctttaaaaaaacatatgaatgaatgagtgcataagagagcaggcaagcctcacaagtcatatcacccacaaacacaaataacgaattttttttaaaaagccacatgtggtggctgaaatgtaagggtcagtagttatttagtgtttggtctggtttttttgaagatgggtctgagttgcccaggctggctttgaactccagatcctcctgtctcagcctcccatgttgcaagcatgttccactgttcaaggcaggttgttttttgtttgtttttttgagacagggtttctctgtgtagccctggctgtcctggaactcactttgtagaccaggctgggcttgaactcagaaatccgcctgcctctgcctcccaagtgctgggattaaaggtgtgcgccaccacgccagcctcaaggcagtttttaatgtgtgtatctcaagtgcagcttagatactcagtaaaagcttgtatgctttccctctggcataacaaagcctatagaaagcaatcctttaaactataagaacattttatttcagctagtagatgattacagtgctgtcccagtgagcctccccagcctgaaactttgaaatttttcataaagtgggaaacgacactgcttgaatacatatcaagggtcagttgggaaggtaggagacaggaaaaacctgaaacattgtggcccccaaattcagtcacagtaaatttaaagtcaaggtgctttttcctgtgttataagcaaatagagaaacttaacatccaatagtcttaatgaaataaagacctttattatttttaggaatttaaaatactgcatgtgtattttattaaataatttatataaaataccttgtttagcccacctttcaagtagagaaagtagatgtcaccttttgatagaaacaccagcgacagcagtgttgaatttcagaagagattaagagatgggcaaggttctacttgagacattttctcacagaactttgtttttattgtgtagtccaaatccattctaaatcagggtggcctttcctacagttgttataggatcaggagtgtgggaaaatgttacaagaaagtcaaacatttgaatggtttatctattagttacagaaaccccggagccagcaatgcccagtggtgtatacaggcctcctggggcaaggctaaccacaacaaggaaaacgccacaaggaccaccagaaatatacagtgacacgcagttcccatccctgcagtccactgccaagcatgtagagagccggaagtaagtatgtgaggctatgagctaggctttctgacaggcagctgggcacatggtgaggctttggtacccaggagggaaggagaaggtgggggaagagtcctttaagtacattattactggcttctgttccttttaaatatggaaactagaattgtagaagcatttatcattgcattcacagtaaatgtgagaagatgaaagatgttggcatttataaatctaatactataaataatcttatttcattcagcaggtacttaaaatgaatactacctgaagttaaatgaccacatatggcacatctacatcttattagggacatgaattttcaaaaataaagtgggaagaaatgtaaatggcatcagatggaaaatttttttgggtggttttaaagtaaatcccagccttttcacctcgttgagagcacagctggcttgaatttagacctctacttggacttgcttctccgttctgtcctcacatgtgggggactctgggagagcagtgacttgccacacacatctttctgtacctgatctaatcagaccactcccccaaagcaaaagggaggagaaattgttgaatgatgagaacattacttgaatgaggaaattgttgcccttatgcataaagacgtattatctactaactgcgaaaacttagaagtgagtcttagaaggaatgtcattatacagcttctttctggttgttttcaagttggtcccaaaatatgcagaagatgggacctcggagcttcagtacagtattacatgttttctgttcaattgaagccttaaaatggtttgataaggatttttgtattctcttcctgtctctccaggattatccttagggtcttttttttttttttttttttttttttttctttttaaattcgaggaagagtactttcaaaattccctagtgaagaagaaatatttactgattacatttcttttcccttagggataaagaaatggagaagagctttgaagtagtaagacacaaaaatagagatagggaggaggtttcaaaaaaccaggcccttaaacttcagctagacaaccagtatgctgtgcttgagaatcagaagtacagccacacacagtacagctaaggaatggtctttgctaagccttccaaggtaactagaccacagctaaccaccaagaacagccattcatcgttttgatttctggatctacagtgactgactgaagacctcaagtccagtgactgtccctgttgcactatggaagttcaagagtcacgactgatcttgatgtgtgttggatttaggggtgtttcattgtcttaaatatttgtgaattagattcaacagtgtttccatagttgctctgcgtataaaaccaaacctgcagccagtggtcattcaaacatctttatgttcagatactgagccttcgcaaggttgactacctcagatttgctgcccttagttgtggatttcatgtggatcacatcttctacataaggttacagctactagtgtctgtgtgaaccttgaaaccaactctactggattcctgtcagaaagccttcagaagtcagccatctgggttctgagccgctgtaaaagatgaagagttaagtgaccttaattaacctgttctgtgccccatcctaaggcatactctgtaggctgtggctgtgttagactccctggaacaagccgctgtcagaaatgatgtgtttggatcatctgtgtggggcttatgatttataatttaagtttttagttttatgcggtaactggatttaattcaaccaaactctggtccaccaaatggggagtgggtgggggggtagtcttatttctttgaataatttttcattcagatagtgcttgttcggttccacattaaggccttgctttgactcagagtaagttctttaagggcatattgtctgaaatatgtctgaaagaagcattggaattgtaaaatgccctatgaatttgccaatccttaggtggaaccagatagcctttgatgcatataaaggacagcggatccgctgcactccaggtgctgctcaagcctcctaatcaggtctaattgaactgctgtggacagagtgtggcgtctgctcactgctgtggacagagtgtgacgtctgctcaggaggagagggtttcactgacctggcttttaacagttcaaagcaacaggagcaaaacacccaagttgcgcatgaatctggcatggtgtctgataaatccttgtgtgtgccccaaatgtgaaggttatgggctattcattgtttagccagctcttgacattcaccttgggagtatgtttggtaatcacttggagacgcaggggaatagtcagtaatgtagcatttctgttgtaatttcaatttaactatctagtagtacttggctcttagaagaggtttctgctaaatttctttctacctaatgaaatagcctgtcagttacctaccttgtcactacagatggttcagtacacatactctatgttggcatatgactatgtgatacaatactagtgcctgggtttctctctgtaaacgaatccctttgccaaacacaggtcagacttgctcactactgacaggagtggaacaggaaatggatgttttcccagcttgagagcatgtttagtggatttagggcagcagtgtaggaagcaggaggtggaggccagtgtcacctgaccagactgtatgccacttcagagcaataatgttggcatgatctgaaccagccaggaggaggttgagtgattagaggcttgagattcttagttgaactgaagacttcatttgggcaccagaaacgttaacaccttgagccacaaacttcccttaaagtatgcttcactccagcgtgacacacaaacacagattctgtttggggttatggtttaagacgtgaacagaaacatgatgaggtttgtttaatggcatactgtactggaacgctgaagaactgcagcagatgtaaattccaagtcttgttattttttaagattgtgaaattatcaaaatgcatatgaatcaagttttaatacactgtctgggtggatgaggctgtccattgcaccatttctttctttgggttctcaggcatggttctgacagtgtaagaactctgtaacatttaacattgaataaacagtaaaccaatgga

(The sequence listing continues in the following parts.)

1. A method of diagnosing retinal vascular disease in a subject comprising:
providing a test sample from a subject;
detecting a genetic mutation associated with a region of human chromosome 3 or mouse chromosome 9 in said subject, thereby diagnosing retinal vascular disease in said subject.

2. The method of claim 1, wherein said genetic mutation comprises a genetic mutation in anaphase promoting complex subunit 13 (Anapc13) or a regulatory region thereof.

3. The method of claim 2, wherein said genetic mutation in Anapc13 is in SEQ ID NO: 17 or SEQ ID NO: 304.

4. The method of claim 1, wherein said genetic mutation is associated with a 1.0 Mb region of human chromosome 3 between the position 132,757,235 and 134,370,478, including 50,000 bases flanking the region or of mouse chromosome 9 between the position 102,450,352 and 103,338,569 as stated on mouse genome GRCm38.p1.

5. The method of claim 1, wherein said genetic mutation comprises a genetic mutation in Kyphoscoliosis peptidase (Ky) or a regulatory region thereof, centrosomal protein 63 (Cep63) or a regulatory region thereof, angiomotin-like 2 (Amotl2) or a regulatory region thereof, Gm5627 or a regulatory region thereof, receptor-like tyrosine kinase (Ryk) or a regulatory region thereof, solute carrier organic anion transporter family or a regulatory region thereof, member 2a1 (Slco2a1) or a regulatory region thereof, member RAS oncogene family (Rab6b) or a regulatory region thereof, signal recognition particle receptor, B subunit (Srprb) or a regulatory region thereof, transferrin (trf) or a regulatory region thereof, 1300017J0RIK or a regulatory region thereof, topoisomerase (DNA) II binding protein 1 (Topbp1) or a regulatory region thereof, or carnitine deficiency-associated gene expressed in ventricle 3 (Cdv3) or a regulatory region thereof.

6. The method of claim 1, wherein said retinal vascular disease is selected from the group consisting of diabetic retinopathy, age related macular degeneration, and retinopathy of prematurity.

7. The method of claim 1 wherein said test sample is obtained from a biological fluid selected from the group consisting of blood, vitreous humor, and aqueous humor.

8. The method of claim 1, wherein said genetic mutation is associated with a region of human chromosome 3.

9. The method of claim 1, wherein said genetic mutation is located in at least one of SEQ ID NOs: 1-13, 15-25, or 302-312.

10. The method of claim 1, wherein said genetic mutation is located in at least one of Ky cDNA provided in GenBank Accession No. BC024014.1 (GI: 21955431), Cep63 cDNA sequence provided in GenBank Accession No. BC014050.2 (GI:33878420), Anapc13 cDNA sequence provided in GenBank Accession No. BC005398.1 (GI:13529286), AmotL2 cDNA sequence provided in GenBank Accession No. BC011454.1 (GI:15079242), Ryk cDNA sequence provided in GenBank Accession No. NM_{—}001005861 (XM_{—}001130617), Slco2a1 cDNA sequence provided in GenBank Accession No. BC041140.1 (GI:26996626), Srprb cDNA sequence provided in GenBank Accession No. BC063001.1 (GI:38649414), Trf mRNA sequence provided in GenBank Accession No. NM_{—}001063.3 (GI:257196241), Topbp1 cDNA sequence provided in GenBank Accession No. BC151237.1 (GI:153217452), Cdv3 cDNA sequence provided in GenBank Accession No. BC007338.2 (GI:33873572), or Rab6b cDNA sequence provided in GenBank Accession No. BC078662.1 (GI:50927455), or a regulatory region thereof.

11. The method of claim 1, wherein said genetic mutation is located in at least one of Ky DNA provided in GenBank Accession No. NC_{—}000003.11 (GI224589815:c134378285-134311000) (SEQ ID NO: 302), Cep63 DNA sequence provided in GenBank Accession No. NC_{—}000003.11 (GI: 224589815:134191182-134307246) (SEQ ID NO: 303), Anapc13 DNA sequence provided in GenBank Accession No. NC_{—}000003.11 (GI: 224589815:c134206112-134195297) (SEQ ID NO: 304), AmotL2 DNA sequence provided in GenBank Accession No. NC_{—}000003.11 (GI: 1224589815:c134097340-134071166) (SEQ ID NO: 305), Ryk DNA sequence provided in GenBank Accession No. NC_{—}000003.11 (GI 224589815:c133983626-133861936) (SEQ ID NO: 306), Slco2a1 DNA sequence provided in GenBank Accession No. NC_{—}000003.11 (GI: 224589815:c133763526-133636932) (SEQ ID NO: 307), Srprb DNA sequence provided in GenBank Accession No. NC_{—}000003.11 (GI: 224589815:133497257-133545954) (SEQ ID NO: 308), Trf DNAsequence provided in GenBank Accession No. NC_{—}000003.11 (GI: 224589820:73915262-73965820) (SEQ ID NO: 309), Topbp1 DNA sequence provided in GenBank Accession No. NC_{—}000003.11 (GI: 224589815:c133389958-133310251) (SEQ ID NO: 310), Cdv3 DNA sequence provided in GenBank Accession No. NC_{—}000003.11 (GI: 224589815:133289930-133311620) (SEQ ID NO: 311), or Rab6b DNA sequence provided in GenBank Accession No. NC_{—}000003.11 (GI: 224589815:c133625432-133532336) (SEQ ID NO: 312), or regulatory regions thereof.

12. An isolated polynucleotide comprising the nucleic acid sequence having at least 80% sequence identity to SEQ ID NO: 1, SEQ ID NO: 2, SEQ ID NO: 3, SEQ ID NO: 4, SEQ ID NO: 5, SEQ ID NO: 6, SEQ ID NO: 7, SEQ ID NO: 8, SEQ ID NO: 9, SEQ ID NO: 10, SEQ ID NO: 11, SEQ ID NO: 12, SEQ ID NO: 13, SEQ ID NO: 14, SEQ ID NO: 15, SEQ ID NO: 16, SEQ ID NO: 17, SEQ ID NO:18, SEQ ID NO: 19, SEQ ID NO:20, SEQ ID NO:21, SEQ ID NO:22, SEQ ID NO:23, SEQ ID NO:24, SEQ ID NO:25, SEQ ID NO:302, SEQ ID NO:303, SEQ ID NO:304, SEQ ID NO:305, SEQ ID NO:306, SEQ ID NO:307, SEQ ID NO:308, SEQ ID NO:309, SEQ ID NO:310, SEQ ID NO:311, or SEQ ID NO:312.

13. The isolated polynucleotide of claim 12, wherein said polynucleotide comprises a complementary deoxyribonucleic acid (cDNA) sequence or a messenger ribonucleic acid (mRNA) sequence.

14. An isolated polypeptide comprising an amino acid sequence encoded by the isolated polynucleotide of claim 12.
